United States Patent Application Publication US 2015/0141320 A1 - sequence listing, part 26

SEQ ID NO: 921021 - DNA, 15 bp, Homo sapiens
tcttacctacctaga

SEQ ID NO: 921022 - DNA, 15 bp, Homo sapiens
cttacctacctagag

SEQ ID NO: 921023 - DNA, 15 bp, Homo sapiens
ttacctacctagagg

SEQ ID NO: 921024 - DNA, 15 bp, Homo sapiens
tacctacctagaggg

SEQ ID NO: 921025 - DNA, 15 bp, Homo sapiens
acctacctagaggga

SEQ ID NO: 921026 - DNA, 15 bp, Homo sapiens
cctacctagagggat

SEQ ID NO: 921027 - DNA, 15 bp, Homo sapiens
ctacctagagggatg

SEQ ID NO: 921028 - DNA, 15 bp, Homo sapiens
tacctagagggatgc

SEQ ID NO: 921029 - DNA, 15 bp, Homo sapiens
acctagagggatgct

SEQ ID NO: 921030 - DNA, 15 bp, Homo sapiens
cctagagggatgctc

SEQ ID NO: 921031 - DNA, 15 bp, Homo sapiens
ctagagggatgctct

SEQ ID NO: 921032 - DNA, 15 bp, Homo sapiens
tagagggatgctctg

SEQ ID NO: 921033 - DNA, 15 bp, Homo sapiens
agagggatgctctgg

SEQ ID NO: 921034 - DNA, 15 bp, Homo sapiens
gagggatgctctggc

SEQ ID NO: 921035 - DNA, 15 bp, Homo sapiens
agggatgctctggct

SEQ ID NO: 921036 - DNA, 15 bp, Homo sapiens
gggatgctctggctc

SEQ ID NO: 921037 - DNA, 15 bp, Homo sapiens
ggatgctctggctca

SEQ ID NO: 921038 - DNA, 15 bp, Homo sapiens
gatgctctggctcaa

SEQ ID NO: 921039 - DNA, 15 bp, Homo sapiens
atgctctggctcaag

SEQ ID NO: 921040 - DNA, 15 bp, Homo sapiens
tgctctggctcaagt

SEQ ID NO: 921041 - DNA, 15 bp, Homo sapiens
gctctggctcaagta

SEQ ID NO: 921042 - DNA, 15 bp, Homo sapiens
ctctggctcaagtaa

SEQ ID NO: 921043 - DNA, 15 bp, Homo sapiens
tctggctcaagtaag

SEQ ID NO: 921044 - DNA, 15 bp, Homo sapiens
ctggctcaagtaagg

SEQ ID NO: 921045 - DNA, 15 bp, Homo sapiens
tggctcaagtaaggg

SEQ ID NO: 921046 - DNA, 15 bp, Homo sapiens
ggctcaagtaaggga

SEQ ID NO: 921047 - DNA, 15 bp, Homo sapiens
gctcaagtaagggag

SEQ ID NO: 921048 - DNA, 15 bp, Homo sapiens
ctcaagtaagggagg

SEQ ID NO: 921049 - DNA, 15 bp, Homo sapiens
tcaagtaagggaggt

SEQ ID NO: 921050 - DNA, 15 bp, Homo sapiens
caagtaagggaggta

SEQ ID NO: 921051 - DNA, 15 bp, Homo sapiens
aagtaagggaggtaa

SEQ ID NO: 921052 - DNA, 15 bp, Homo sapiens
agtaagggaggtaat

SEQ ID NO: 921053 - DNA, 15 bp, Homo sapiens
gtaagggaggtaatt

SEQ ID NO: 921054 - DNA, 15 bp, Homo sapiens
taagggaggtaattt

SEQ ID NO: 921055 - DNA, 15 bp, Homo sapiens
aagggaggtaatttg

SEQ ID NO: 921056 - DNA, 15 bp, Homo sapiens
agggaggtaatttga

SEQ ID NO: 921057 - DNA, 15 bp, Homo sapiens
gggaggtaatttgat

SEQ ID NO: 921058 - DNA, 15 bp, Homo sapiens
ggaggtaatttgatg

SEQ ID NO: 921059 - DNA, 15 bp, Homo sapiens
gaggtaatttgatgt

SEQ ID NO: 921060 - DNA, 15 bp, Homo sapiens
aggtaatttgatgta

SEQ ID NO: 921061 - DNA, 15 bp, Homo sapiens
ggtaatttgatgtag

SEQ ID NO: 921062 - DNA, 15 bp, Homo sapiens
gtaatttgatgtagt

SEQ ID NO: 921063 - DNA, 15 bp, Homo sapiens
taatttgatgtagtg

SEQ ID NO: 921064 - DNA, 15 bp, Homo sapiens
aatttgatgtagtga

SEQ ID NO: 921065 - DNA, 15 bp, Homo sapiens
atttgatgtagtgat

SEQ ID NO: 921066 - DNA, 15 bp, Homo sapiens
tttgatgtagtgatt

SEQ ID NO: 921067 - DNA, 15 bp, Homo sapiens
ttgatgtagtgatta

SEQ ID NO: 921068 - DNA, 15 bp, Homo sapiens
tgatgtagtgattat

SEQ ID NO: 921069 - DNA, 15 bp, Homo sapiens
gatgtagtgattatt

SEQ ID NO: 921070 - DNA, 15 bp, Homo sapiens
atgtagtgattatta

SEQ ID NO: 921071 - DNA, 15 bp, Homo sapiens
tgtagtgattattag

SEQ ID NO: 921072 - DNA, 15 bp, Homo sapiens
gtagtgattattagg

SEQ ID NO: 921073 - DNA, 15 bp, Homo sapiens
tagtgattattaggt

SEQ ID NO: 921074 - DNA, 15 bp, Homo sapiens
agtgattattaggtt

SEQ ID NO: 921075 - DNA, 15 bp, Homo sapiens
gtgattattaggtta

SEQ ID NO: 921076 - DNA, 15 bp, Homo sapiens
tgattattaggttaa

SEQ ID NO: 921077 - DNA, 15 bp, Homo sapiens
gattattaggttaag

SEQ ID NO: 921078 - DNA, 15 bp, Homo sapiens
attattaggttaagc

SEQ ID NO: 921079 - DNA, 15 bp, Homo sapiens
ttattaggttaagca

SEQ ID NO: 921080 - DNA, 15 bp, Homo sapiens
tattaggttaagcat

SEQ ID NO: 921081 - DNA, 15 bp, Homo sapiens
attaggttaagcata

SEQ ID NO: 921082 - DNA, 15 bp, Homo sapiens
ttaggttaagcatag

SEQ ID NO: 921083 - DNA, 15 bp, Homo sapiens
taggttaagcataga

SEQ ID NO: 921084 - DNA, 15 bp, Homo sapiens
aggttaagcatagaa

SEQ ID NO: 921085 - DNA, 15 bp, Homo sapiens
ggttaagcatagaat

SEQ ID NO: 921086 - DNA, 15 bp, Homo sapiens
gttaagcatagaatc

SEQ ID NO: 921087 - DNA, 15 bp, Homo sapiens
ttaagcatagaatct

SEQ ID NO: 921088 - DNA, 15 bp, Homo sapiens
taagcatagaatcta

SEQ ID NO: 921089 - DNA, 15 bp, Homo sapiens
aagcatagaatctag

SEQ ID NO: 921090 - DNA, 15 bp, Homo sapiens
agcatagaatctaga

SEQ ID NO: 921091 - DNA, 15 bp, Homo sapiens
gcatagaatctagag

SEQ ID NO: 921092 - DNA, 15 bp, Homo sapiens
catagaatctagaga

SEQ ID NO: 921093 - DNA, 15 bp, Homo sapiens
atagaatctagagac

SEQ ID NO: 921094 - DNA, 15 bp, Homo sapiens
tagaatctagagaca

SEQ ID NO: 921095 - DNA, 15 bp, Homo sapiens
agaatctagagacag

SEQ ID NO: 921096 - DNA, 15 bp, Homo sapiens
gaatctagagacaga

SEQ ID NO: 921097 - DNA, 15 bp, Homo sapiens
aatctagagacagac

SEQ ID NO: 921098 - DNA, 15 bp, Homo sapiens
atctagagacagact

SEQ ID NO: 921099 - DNA, 15 bp, Homo sapiens
tctagagacagacta

SEQ ID NO: 921100 - DNA, 15 bp, Homo sapiens
ctagagacagactaa

SEQ ID NO: 921101 - DNA, 15 bp, Homo sapiens
tagagacagactaat

SEQ ID NO: 921102 - DNA, 15 bp, Homo sapiens
agagacagactaatt

SEQ ID NO: 921103 - DNA, 15 bp, Homo sapiens
gagacagactaattg

SEQ ID NO: 921104 - DNA, 15 bp, Homo sapiens
agacagactaattgg

SEQ ID NO: 921105 - DNA, 15 bp, Homo sapiens
gacagactaattggg

SEQ ID NO: 921106 - DNA, 15 bp, Homo sapiens
acagactaattgggt

SEQ ID NO: 921107 - DNA, 15 bp, Homo sapiens
cagactaattgggtt

SEQ ID NO: 921108 - DNA, 15 bp, Homo sapiens
agactaattgggtta

SEQ ID NO: 921109 - DNA, 15 bp, Homo sapiens
gactaattgggttat

SEQ ID NO: 921110 - DNA, 15 bp, Homo sapiens
actaattgggttatg

SEQ ID NO: 921111 - DNA, 15 bp, Homo sapiens
ctaattgggttatga

SEQ ID NO: 921112 - DNA, 15 bp, Homo sapiens
taattgggttatgat

SEQ ID NO: 921113 - DNA, 15 bp, Homo sapiens
aattgggttatgatc

SEQ ID NO: 921114 - DNA, 15 bp, Homo sapiens
attgggttatgatct

SEQ ID NO: 921115 - DNA, 15 bp, Homo sapiens
ttgggttatgatctt

SEQ ID NO: 921116 - DNA, 15 bp, Homo sapiens
tgggttatgatcttg

SEQ ID NO: 921117 - DNA, 15 bp, Homo sapiens
gggttatgatcttgc

SEQ ID NO: 921118 - DNA, 15 bp, Homo sapiens
ggttatgatcttgcc

SEQ ID NO: 921119 - DNA, 15 bp, Homo sapiens
gttatgatcttgcct

SEQ ID NO: 921120 - DNA, 15 bp, Homo sapiens
ttatgatcttgcctt

SEQ ID NO: 921121 - DNA, 15 bp, Homo sapiens
tatgatcttgccttt

SEQ ID NO: 921122 - DNA, 15 bp, Homo sapiens
atgatcttgcctttg

SEQ ID NO: 921123 - DNA, 15 bp, Homo sapiens
tgatcttgcctttgc

SEQ ID NO: 921124 - DNA, 15 bp, Homo sapiens
gatcttgcctttgcc

SEQ ID NO: 921125 - DNA, 15 bp, Homo sapiens
atcttgcctttgcca

SEQ ID NO: 921126 - DNA, 15 bp, Homo sapiens
tcttgcctttgccac

SEQ ID NO: 921127 - DNA, 15 bp, Homo sapiens
cttgcctttgccact

SEQ ID NO: 921128 - DNA, 15 bp, Homo sapiens
ttgcctttgccactt

SEQ ID NO: 921129 - DNA, 15 bp, Homo sapiens
tgcctttgccactta

SEQ ID NO: 921130 - DNA, 15 bp, Homo sapiens
gcctttgccacttac

SEQ ID NO: 921131 - DNA, 15 bp, Homo sapiens
cctttgccacttact

SEQ ID NO: 921132 - DNA, 15 bp, Homo sapiens
ctttgccacttacta

SEQ ID NO: 921133 - DNA, 15 bp, Homo sapiens
tttgccacttactag

SEQ ID NO: 921134 - DNA, 15 bp, Homo sapiens
ttgccacttactagc

SEQ ID NO: 921135 - DNA, 15 bp, Homo sapiens
tgccacttactagct

SEQ ID NO: 921136 - DNA, 15 bp, Homo sapiens
gccacttactagctg

SEQ ID NO: 921137 - DNA, 15 bp, Homo sapiens
ccacttactagctgt

SEQ ID NO: 921138 - DNA, 15 bp, Homo sapiens
cacttactagctgtg

SEQ ID NO: 921139 - DNA, 15 bp, Homo sapiens
acttactagctgtga

SEQ ID NO: 921140 - DNA, 15 bp, Homo sapiens
cttactagctgtgaa

SEQ ID NO: 921141 - DNA, 15 bp, Homo sapiens
ttactagctgtgaaa

SEQ ID NO: 921142 - DNA, 15 bp, Homo sapiens
tactagctgtgaaat

SEQ ID NO: 921143 - DNA, 15 bp, Homo sapiens
actagctgtgaaatc

SEQ ID NO: 921144 - DNA, 15 bp, Homo sapiens
ctagctgtgaaatcc

SEQ ID NO: 921145 - DNA, 15 bp, Homo sapiens
tagctgtgaaatccc

SEQ ID NO: 921146 - DNA, 15 bp, Homo sapiens
agctgtgaaatccct

SEQ ID NO: 921147 - DNA, 15 bp, Homo sapiens
gctgtgaaatccctc

SEQ ID NO: 921148 - DNA, 15 bp, Homo sapiens
ctgtgaaatccctca

SEQ ID NO: 921149 - DNA, 15 bp, Homo sapiens
tgtgaaatccctcaa

SEQ ID NO: 921150 - DNA, 15 bp, Homo sapiens
gtgaaatccctcaag

SEQ ID NO: 921151 - DNA, 15 bp, Homo sapiens
tgaaatccctcaagc

SEQ ID NO: 921152 - DNA, 15 bp, Homo sapiens
gaaatccctcaagca

SEQ ID NO: 921153 - DNA, 15 bp, Homo sapiens
aaatccctcaagcaa

SEQ ID NO: 921154 - DNA, 15 bp, Homo sapiens
aatccctcaagcaag

SEQ ID NO: 921155 - DNA, 15 bp, Homo sapiens
atccctcaagcaagt

SEQ ID NO: 921156 - DNA, 15 bp, Homo sapiens
tccctcaagcaagtt

SEQ ID NO: 921157 - DNA, 15 bp, Homo sapiens
ccctcaagcaagttg

SEQ ID NO: 921158 - DNA, 15 bp, Homo sapiens
cctcaagcaagttgt

SEQ ID NO: 921159 - DNA, 15 bp, Homo sapiens
ctcaagcaagttgtt

SEQ ID NO: 921160 - DNA, 15 bp, Homo sapiens
tcaagcaagttgttt

SEQ ID NO: 921161 - DNA, 15 bp, Homo sapiens
caagcaagttgttta

SEQ ID NO: 921162 - DNA, 15 bp, Homo sapiens
aagcaagttgtttaa

SEQ ID NO: 921163 - DNA, 15 bp, Homo sapiens
agcaagttgtttaag

SEQ ID NO: 921164 - DNA, 15 bp, Homo sapiens
gcaagttgtttaagc

SEQ ID NO: 921165 - DNA, 15 bp, Homo sapiens
caagttgtttaagct

SEQ ID NO: 921166 - DNA, 15 bp, Homo sapiens
aagttgtttaagctc

SEQ ID NO: 921167 - DNA, 15 bp, Homo sapiens
agttgtttaagctct

SEQ ID NO: 921168 - DNA, 15 bp, Homo sapiens
gttgtttaagctctc

SEQ ID NO: 921169 - DNA, 15 bp, Homo sapiens
ttgtttaagctctct

SEQ ID NO: 921170 - DNA, 15 bp, Homo sapiens
tgtttaagctctctg

SEQ ID NO: 921171 - DNA, 15 bp, Homo sapiens
gtttaagctctctgg

SEQ ID NO: 921172 - DNA, 15 bp, Homo sapiens
tttaagctctctggg

SEQ ID NO: 921173 - DNA, 15 bp, Homo sapiens
ttaagctctctgggg

SEQ ID NO: 921174 - DNA, 15 bp, Homo sapiens
taagctctctggggc

SEQ ID NO: 921175 - DNA, 15 bp, Homo sapiens
aagctctctggggct

SEQ ID NO: 921176 - DNA, 15 bp, Homo sapiens
agctctctggggcta

SEQ ID NO: 921177 - DNA, 15 bp, Homo sapiens
gctctctggggctaa

SEQ ID NO: 921178 - DNA, 15 bp, Homo sapiens
ctctctggggctaaa

SEQ ID NO: 921179 - DNA, 15 bp, Homo sapiens
tctctggggctaaat

SEQ ID NO: 921180 - DNA, 15 bp, Homo sapiens
ctctggggctaaatt

SEQ ID NO: 921181 - DNA, 15 bp, Homo sapiens
tctggggctaaattt

SEQ ID NO: 921182 - DNA, 15 bp, Homo sapiens
ctggggctaaatttc

SEQ ID NO: 921183 - DNA, 15 bp, Homo sapiens
tggggctaaatttct

SEQ ID NO: 921184 - DNA, 15 bp, Homo sapiens
ggggctaaatttctt

SEQ ID NO: 921185 - DNA, 15 bp, Homo sapiens
gggctaaatttcttc

SEQ ID NO: 921186 - DNA, 15 bp, Homo sapiens
ggctaaatttcttca

SEQ ID NO: 921187 - DNA, 15 bp, Homo sapiens
gctaaatttcttcat

SEQ ID NO: 921188 - DNA, 15 bp, Homo sapiens
ctaaatttcttcatt

SEQ ID NO: 921189 - DNA, 15 bp, Homo sapiens
taaatttcttcattt

SEQ ID NO: 921190 - DNA, 15 bp, Homo sapiens
aaatttcttcattta

SEQ ID NO: 921191 - DNA, 15 bp, Homo sapiens
aatttcttcatttat

SEQ ID NO: 921192 - DNA, 15 bp, Homo sapiens
atttcttcatttata

SEQ ID NO: 921193 - DNA, 15 bp, Homo sapiens
tttcttcatttataa

SEQ ID NO: 921194 - DNA, 15 bp, Homo sapiens
ttcttcatttataaa

SEQ ID NO: 921195 - DNA, 15 bp, Homo sapiens
tcttcatttataaaa

SEQ ID NO: 921196 - DNA, 15 bp, Homo sapiens
cttcatttataaaat

SEQ ID NO: 921197 - DNA, 15 bp, Homo sapiens
ttcatttataaaata

SEQ ID NO: 921198 - DNA, 15 bp, Homo sapiens
tcatttataaaataa

SEQ ID NO: 921199 - DNA, 15 bp, Homo sapiens
catttataaaataag

SEQ ID NO: 921200 - DNA, 15 bp, Homo sapiens
atttataaaataaga

SEQ ID NO: 921201 - DNA, 15 bp, Homo sapiens
tttataaaataagat

SEQ ID NO: 921202 - DNA, 15 bp, Homo sapiens
ttataaaataagata

SEQ ID NO: 921203 - DNA, 15 bp, Homo sapiens
tataaaataagatat

SEQ ID NO: 921204 - DNA, 15 bp, Homo sapiens
ataaaataagatatt

SEQ ID NO: 921205 - DNA, 15 bp, Homo sapiens
taaaataagatattg

SEQ ID NO: 921206 - DNA, 15 bp, Homo sapiens
aaaataagatattgt

SEQ ID NO: 921207 - DNA, 15 bp, Homo sapiens
aaataagatattgtt

SEQ ID NO: 921208 - DNA, 15 bp, Homo sapiens
aataagatattgttg

SEQ ID NO: 921209 - DNA, 15 bp, Homo sapiens
ataagatattgttgc

SEQ ID NO: 921210 - DNA, 15 bp, Homo sapiens
taagatattgttgct

SEQ ID NO: 921211 - DNA, 15 bp, Homo sapiens
aagatattgttgctt

SEQ ID NO: 921212 - DNA, 15 bp, Homo sapiens
agatattgttgcttc

SEQ ID NO: 921213 - DNA, 15 bp, Homo sapiens
gatattgttgcttct

SEQ ID NO: 921214 - DNA, 15 bp, Homo sapiens
atattgttgcttctc

SEQ ID NO: 921215 - DNA, 15 bp, Homo sapiens
tattgttgcttctct

SEQ ID NO: 921216 - DNA, 15 bp, Homo sapiens
attgttgcttctctt

SEQ ID NO: 921217 - DNA, 15 bp, Homo sapiens
ttgttgcttctctta

SEQ ID NO: 921218 - DNA, 15 bp, Homo sapiens
tgttgcttctcttat

SEQ ID NO: 921219 - DNA, 15 bp, Homo sapiens
gttgcttctcttata

SEQ ID NO: 921220 - DNA, 15 bp, Homo sapiens
ttgcttctcttatag

SEQ ID NO: 921221 - DNA, 15 bp, Homo sapiens
tgcttctcttatagg

SEQ ID NO: 921222 - DNA, 15 bp, Homo sapiens
gcttctcttatagga

SEQ ID NO: 921223 - DNA, 15 bp, Homo sapiens
cttctcttataggat

SEQ ID NO: 921224 - DNA, 15 bp, Homo sapiens
ttctcttataggatt

SEQ ID NO: 921225 - DNA, 15 bp, Homo sapiens
tctcttataggattg

SEQ ID NO: 921226 - DNA, 15 bp, Homo sapiens
ctcttataggattgt

SEQ ID NO: 921227 - DNA, 15 bp, Homo sapiens
tcttataggattgtc

SEQ ID NO: 921228 - DNA, 15 bp, Homo sapiens
cttataggattgtca

SEQ ID NO: 921229 - DNA, 15 bp, Homo sapiens
ttataggattgtcag

SEQ ID NO: 921230 - DNA, 15 bp, Homo sapiens
tataggattgtcagg

SEQ ID NO: 921231 - DNA, 15 bp, Homo sapiens
ataggattgtcagga

SEQ ID NO: 921232 - DNA, 15 bp, Homo sapiens
taggattgtcaggaa

SEQ ID NO: 921233 - DNA, 15 bp, Homo sapiens
aggattgtcaggaat

SEQ ID NO: 921234 - DNA, 15 bp, Homo sapiens
ggattgtcaggaata

SEQ ID NO: 921235 - DNA, 15 bp, Homo sapiens
gattgtcaggaatac

SEQ ID NO: 921236 - DNA, 15 bp, Homo sapiens
attgtcaggaatact

SEQ ID NO: 921237 - DNA, 15 bp, Homo sapiens
ttgtcaggaatacta

SEQ ID NO: 921238 - DNA, 15 bp, Homo sapiens
tgtcaggaatactaa

SEQ ID NO: 921239 - DNA, 15 bp, Homo sapiens
gtcaggaatactaaa

SEQ ID NO: 921240 - DNA, 15 bp, Homo sapiens
tcaggaatactaaat

SEQ ID NO: 921241 - DNA, 15 bp, Homo sapiens
caggaatactaaatg

SEQ ID NO: 921242 - DNA, 15 bp, Homo sapiens
aggaatactaaatga

SEQ ID NO: 921243 - DNA, 15 bp, Homo sapiens
ggaatactaaatgag

SEQ ID NO: 921244 - DNA, 15 bp, Homo sapiens
gaatactaaatgaga

SEQ ID NO: 921245 - DNA, 15 bp, Homo sapiens
aatactaaatgagat

SEQ ID NO: 921246 - DNA, 15 bp, Homo sapiens
atactaaatgagatg

SEQ ID NO: 921247 - DNA, 15 bp, Homo sapiens
tactaaatgagatga

SEQ ID NO: 921248 - DNA, 15 bp, Homo sapiens
actaaatgagatgaa

SEQ ID NO: 921249 - DNA, 15 bp, Homo sapiens
ctaaatgagatgaat

SEQ ID NO: 921250 - DNA, 15 bp, Homo sapiens
taaatgagatgaatg

SEQ ID NO: 921251 - DNA, 15 bp, Homo sapiens
aaatgagatgaatgc

SEQ ID NO: 921252 - DNA, 15 bp, Homo sapiens
aatgagatgaatgct

SEQ ID NO: 921253 - DNA, 15 bp, Homo sapiens
atgagatgaatgctg

SEQ ID NO: 921254 - DNA, 15 bp, Homo sapiens
tgagatgaatgctga

SEQ ID NO: 921255 - DNA, 15 bp, Homo sapiens
gagatgaatgctgag

SEQ ID NO: 921256 - DNA, 15 bp, Homo sapiens
agatgaatgctgaga

SEQ ID NO: 921257 - DNA, 15 bp, Homo sapiens
gatgaatgctgagaa

SEQ ID NO: 921258 - DNA, 15 bp, Homo sapiens
atgaatgctgagaac

SEQ ID NO: 921259 - DNA, 15 bp, Homo sapiens
tgaatgctgagaaca

SEQ ID NO: 921260 - DNA, 15 bp, Homo sapiens
gaatgctgagaacaa

SEQ ID NO: 921261 - DNA, 15 bp, Homo sapiens
aatgctgagaacaag

SEQ ID NO: 921262 - DNA, 15 bp, Homo sapiens
atgctgagaacaaga

SEQ ID NO: 921263 - DNA, 15 bp, Homo sapiens
tgctgagaacaagat

SEQ ID NO: 921264 - DNA, 15 bp, Homo sapiens
gctgagaacaagatt

SEQ ID NO: 921265 - DNA, 15 bp, Homo sapiens
ctgagaacaagattg

SEQ ID NO: 921266 - DNA, 15 bp, Homo sapiens
tgagaacaagattgg

SEQ ID NO: 921267 - DNA, 15 bp, Homo sapiens
gagaacaagattggc

SEQ ID NO: 921268 - DNA, 15 bp, Homo sapiens
agaacaagattggca

SEQ ID NO: 921269 - DNA, 15 bp, Homo sapiens
gaacaagattggcat

SEQ ID NO: 921270 - DNA, 15 bp, Homo sapiens
aacaagattggcata

SEQ ID NO: 921271 - DNA, 15 bp, Homo sapiens
acaagattggcatat

SEQ ID NO: 921272 - DNA, 15 bp, Homo sapiens
caagattggcatata

SEQ ID NO: 921273 - DNA, 15 bp, Homo sapiens
aagattggcatatag

SEQ ID NO: 921274 - DNA, 15 bp, Homo sapiens
agattggcatatagg

SEQ ID NO: 921275 - DNA, 15 bp, Homo sapiens
gattggcatatagga

SEQ ID NO: 921276 - DNA, 15 bp, Homo sapiens
attggcatataggaa

SEQ ID NO: 921277 - DNA, 15 bp, Homo sapiens
ttggcatataggaag

SEQ ID NO: 921278 - DNA, 15 bp, Homo sapiens
tggcatataggaagt

SEQ ID NO: 921279 - DNA, 15 bp, Homo sapiens
ggcatataggaagtg

SEQ ID NO: 921280 - DNA, 15 bp, Homo sapiens
gcatataggaagtgg

SEQ ID NO: 921281 - DNA, 15 bp, Homo sapiens
catataggaagtgga

SEQ ID NO: 921282 - DNA, 15 bp, Homo sapiens
atataggaagtggag

SEQ ID NO: 921283 - DNA, 15 bp, Homo sapiens
tataggaagtggagt

SEQ ID NO: 921284 - DNA, 15 bp, Homo sapiens
ataggaagtggagta

SEQ ID NO: 921285 - DNA, 15 bp, Homo sapiens
taggaagtggagtat

SEQ ID NO: 921286 - DNA, 15 bp, Homo sapiens
aggaagtggagtata

SEQ ID NO: 921287 - DNA, 15 bp, Homo sapiens
ggaagtggagtatat

SEQ ID NO: 921288 - DNA, 15 bp, Homo sapiens
gaagtggagtatatc

SEQ ID NO: 921289 - DNA, 15 bp, Homo sapiens
aagtggagtatatct

SEQ ID NO: 921290 - DNA, 15 bp, Homo sapiens
agtggagtatatctg

SEQ ID NO: 921291 - DNA, 15 bp, Homo sapiens
gtggagtatatctga

SEQ ID NO: 921292 - DNA, 15 bp, Homo sapiens
tggagtatatctgaa

SEQ ID NO: 921293 - DNA, 15 bp, Homo sapiens
ggagtatatctgaaa

SEQ ID NO: 921294 - DNA, 15 bp, Homo sapiens
gagtatatctgaaaa

SEQ ID NO: 921295 - DNA, 15 bp, Homo sapiens
agtatatctgaaaac

SEQ ID NO: 921296 - DNA, 15 bp, Homo sapiens
gtatatctgaaaact

SEQ ID NO: 921297 - DNA, 15 bp, Homo sapiens
tatatctgaaaacta

SEQ ID NO: 921298 - DNA, 15 bp, Homo sapiens
atatctgaaaactat

SEQ ID NO: 921299 - DNA, 15 bp, Homo sapiens
tatctgaaaactatt

SEQ ID NO: 921300 - DNA, 15 bp, Homo sapiens
atctgaaaactatta

SEQ ID NO: 921301 - DNA, 15 bp, Homo sapiens
tctgaaaactattac

SEQ ID NO: 921302 - DNA, 15 bp, Homo sapiens
ctgaaaactattact

SEQ ID NO: 921303 - DNA, 15 bp, Homo sapiens
tgaaaactattacta

SEQ ID NO: 921304 - DNA, 15 bp, Homo sapiens
gaaaactattactag

SEQ ID NO: 921305 - DNA, 15 bp, Homo sapiens
aaaactattactagt

SEQ ID NO: 921306 - DNA, 15 bp, Homo sapiens
aaactattactagtc

SEQ ID NO: 921307 - DNA, 15 bp, Homo sapiens
aactattactagtca

SEQ ID NO: 921308 - DNA, 15 bp, Homo sapiens
actattactagtcat

SEQ ID NO: 921309 - DNA, 15 bp, Homo sapiens
ctattactagtcatg

SEQ ID NO: 921310 - DNA, 15 bp, Homo sapiens
tattactagtcatgt

SEQ ID NO: 921311 - DNA, 15 bp, Homo sapiens
attactagtcatgta

SEQ ID NO: 921312 - DNA, 15 bp, Homo sapiens
ttactagtcatgtaa

SEQ ID NO: 921313 - DNA, 15 bp, Homo sapiens
tactagtcatgtaat

SEQ ID NO: 921314 - DNA, 15 bp, Homo sapiens
actagtcatgtaata

SEQ ID NO: 921315 - DNA, 15 bp, Homo sapiens
ctagtcatgtaataa

SEQ ID NO: 921316 - DNA, 15 bp, Homo sapiens
tagtcatgtaataag

SEQ ID NO: 921317 - DNA, 15 bp, Homo sapiens
agtcatgtaataagt

SEQ ID NO: 921318 - DNA, 15 bp, Homo sapiens
gtcatgtaataagtt

SEQ ID NO: 921319 - DNA, 15 bp, Homo sapiens
tcatgtaataagttg

SEQ ID NO: 921320 - DNA, 15 bp, Homo sapiens
catgtaataagttgt

SEQ ID NO: 921321 - DNA, 15 bp, Homo sapiens
atgtaataagttgtt

SEQ ID NO: 921322 - DNA, 15 bp, Homo sapiens
tgtaataagttgttt

SEQ ID NO: 921323 - DNA, 15 bp, Homo sapiens
gtaataagttgttta

SEQ ID NO: 921324 - DNA, 15 bp, Homo sapiens
taataagttgtttaa

SEQ ID NO: 921325 - DNA, 15 bp, Homo sapiens
aataagttgtttaaa

SEQ ID NO: 921326 - DNA, 15 bp, Homo sapiens
ataagttgtttaaaa

SEQ ID NO: 921327 - DNA, 15 bp, Homo sapiens
taagttgtttaaaac

SEQ ID NO: 921328 - DNA, 15 bp, Homo sapiens
aagttgtttaaaaca

SEQ ID NO: 921329 - DNA, 15 bp, Homo sapiens
agttgtttaaaacat

SEQ ID NO: 921330 - DNA, 15 bp, Homo sapiens
gttgtttaaaacatg

SEQ ID NO: 921331 - DNA, 15 bp, Homo sapiens
ttgtttaaaacatgc

SEQ ID NO: 921332 - DNA, 15 bp, Homo sapiens
tgtttaaaacatgcc

SEQ ID NO: 921333 - DNA, 15 bp, Homo sapiens
gtttaaaacatgcct

SEQ ID NO: 921334 - DNA, 15 bp, Homo sapiens
tttaaaacatgcctt

SEQ ID NO: 921335 - DNA, 15 bp, Homo sapiens
ttaaaacatgccttc

SEQ ID NO: 921336 - DNA, 15 bp, Homo sapiens
taaaacatgccttct

SEQ ID NO: 921337 - DNA, 15 bp, Homo sapiens
aaaacatgccttctc

SEQ ID NO: 921338 - DNA, 15 bp, Homo sapiens
aaacatgccttctca

SEQ ID NO: 921339 - DNA, 15 bp, Homo sapiens
aacatgccttctcat

SEQ ID NO: 921340 - DNA, 15 bp, Homo sapiens
acatgccttctcatg

SEQ ID NO: 921341 - DNA, 15 bp, Homo sapiens
catgccttctcatgt

SEQ ID NO: 921342 - DNA, 15 bp, Homo sapiens
atgccttctcatgta

SEQ ID NO: 921343 - DNA, 15 bp, Homo sapiens
tgccttctcatgtat

SEQ ID NO: 921344 - DNA, 15 bp, Homo sapiens
gccttctcatgtatt

SEQ ID NO: 921345 - DNA, 15 bp, Homo sapiens
ccttctcatgtattc

SEQ ID NO: 921346 - DNA, 15 bp, Homo sapiens
cttctcatgtattct

SEQ ID NO: 921347 - DNA, 15 bp, Homo sapiens
ttctcatgtattctg

SEQ ID NO: 921348 - DNA, 15 bp, Homo sapiens
tctcatgtattctgt

SEQ ID NO: 921349 - DNA, 15 bp, Homo sapiens
ctcatgtattctgtg

SEQ ID NO: 921350 - DNA, 15 bp, Homo sapiens
tcatgtattctgtga

SEQ ID NO: 921351 - DNA, 15 bp, Homo sapiens
catgtattctgtgag

SEQ ID NO: 921352 - DNA, 15 bp, Homo sapiens
atgtattctgtgagg

SEQ ID NO: 921353 - DNA, 15 bp, Homo sapiens
tgtattctgtgaggg

SEQ ID NO: 921354 - DNA, 15 bp, Homo sapiens
gtattctgtgagggc

SEQ ID NO: 921355 - DNA, 15 bp, Homo sapiens
tattctgtgagggca

SEQ ID NO: 921356 - DNA, 15 bp, Homo sapiens
attctgtgagggcag

SEQ ID NO: 921357 - DNA, 15 bp, Homo sapiens
ttctgtgagggcaga

SEQ ID NO: 921358 - DNA, 15 bp, Homo sapiens
tctgtgagggcagaa

SEQ ID NO: 921359 - DNA, 15 bp, Homo sapiens
ctgtgagggcagaat

SEQ ID NO: 921360 - DNA, 15 bp, Homo sapiens
tgtgagggcagaatc

SEQ ID NO: 921361 - DNA, 15 bp, Homo sapiens
gtgagggcagaatct

SEQ ID NO: 921362 - DNA, 15 bp, Homo sapiens
tgagggcagaatcta

SEQ ID NO: 921363 - DNA, 15 bp, Homo sapiens
gagggcagaatctat

SEQ ID NO: 921364 - DNA, 15 bp, Homo sapiens
agggcagaatctatc

SEQ ID NO: 921365 - DNA, 15 bp, Homo sapiens
gggcagaatctatct

SEQ ID NO: 921366 - DNA, 15 bp, Homo sapiens
ggcagaatctatctg

SEQ ID NO: 921367 - DNA, 15 bp, Homo sapiens
gcagaatctatctgt

SEQ ID NO: 921368 - DNA, 15 bp, Homo sapiens
cagaatctatctgta

SEQ ID NO: 921369 - DNA, 15 bp, Homo sapiens
agaatctatctgtaa

SEQ ID NO: 921370 - DNA, 15 bp, Homo sapiens
gaatctatctgtaag

SEQ ID NO: 921371 - DNA, 15 bp, Homo sapiens
aatctatctgtaaga

SEQ ID NO: 921372 - DNA, 15 bp, Homo sapiens
atctatctgtaagag

SEQ ID NO: 921373 - DNA, 15 bp, Homo sapiens
tctatctgtaagagg

SEQ ID NO: 921374 - DNA, 15 bp, Homo sapiens
ctatctgtaagaggt

SEQ ID NO: 921375 - DNA, 15 bp, Homo sapiens
tatctgtaagaggtt

SEQ ID NO: 921376 - DNA, 15 bp, Homo sapiens
atctgtaagaggttg

SEQ ID NO: 921377 - DNA, 15 bp, Homo sapiens
tctgtaagaggttga

SEQ ID NO: 921378 - DNA, 15 bp, Homo sapiens
ctgtaagaggttgag

SEQ ID NO: 921379 - DNA, 15 bp, Homo sapiens
tgtaagaggttgaga

SEQ ID NO: 921380 - DNA, 15 bp, Homo sapiens
gtaagaggttgagaa

SEQ ID NO: 921381 - DNA, 15 bp, Homo sapiens
taagaggttgagaat

SEQ ID NO: 921382 - DNA, 15 bp, Homo sapiens
aagaggttgagaatg

SEQ ID NO: 921383 - DNA, 15 bp, Homo sapiens
agaggttgagaatgt

SEQ ID NO: 921384 - DNA, 15 bp, Homo sapiens
gaggttgagaatgtg

SEQ ID NO: 921385 - DNA, 15 bp, Homo sapiens
aggttgagaatgtgt

SEQ ID NO: 921386 - DNA, 15 bp, Homo sapiens
ggttgagaatgtgtt

SEQ ID NO: 921387 - DNA, 15 bp, Homo sapiens
gttgagaatgtgttt

SEQ ID NO: 921388 - DNA, 15 bp, Homo sapiens
ttgagaatgtgttta

SEQ ID NO: 921389 - DNA, 15 bp, Homo sapiens
tgagaatgtgtttaa

SEQ ID NO: 921390 - DNA, 15 bp, Homo sapiens
gagaatgtgtttaac

SEQ ID NO: 921391 - DNA, 15 bp, Homo sapiens
agaatgtgtttaaca

SEQ ID NO: 921392 - DNA, 15 bp, Homo sapiens
gaatgtgtttaacac

SEQ ID NO: 921393 - DNA, 15 bp, Homo sapiens
aatgtgtttaacact

SEQ ID NO: 921394 - DNA, 15 bp, Homo sapiens
atgtgtttaacacta

SEQ ID NO: 921395 - DNA, 15 bp, Homo sapiens
tgtgtttaacactat

SEQ ID NO: 921396 - DNA, 15 bp, Homo sapiens
gtgtttaacactata

SEQ ID NO: 921397 - DNA, 15 bp, Homo sapiens
tgtttaacactatat

SEQ ID NO: 921398 - DNA, 15 bp, Homo sapiens
gtttaacactatatc

SEQ ID NO: 921399 - DNA, 15 bp, Homo sapiens
tttaacactatatca

SEQ ID NO: 921400 - DNA, 15 bp, Homo sapiens
ttaacactatatcac

SEQ ID NO: 921401 - DNA, 15 bp, Homo sapiens
taacactatatcaca

SEQ ID NO: 921402 - DNA, 15 bp, Homo sapiens
aacactatatcacag

SEQ ID NO: 921403 - DNA, 15 bp, Homo sapiens
acactatatcacagg

SEQ ID NO: 921404 - DNA, 15 bp, Homo sapiens
cactatatcacaggc

SEQ ID NO: 921405 - DNA, 15 bp, Homo sapiens
actatatcacaggcc

SEQ ID NO: 921406 - DNA, 15 bp, Homo sapiens
ctatatcacaggcct

SEQ ID NO: 921407 - DNA, 15 bp, Homo sapiens
tatatcacaggccta

SEQ ID NO: 921408 - DNA, 15 bp, Homo sapiens
atatcacaggcctag

SEQ ID NO: 921409 - DNA, 15 bp, Homo sapiens
tatcacaggcctagc

SEQ ID NO: 921410 - DNA, 15 bp, Homo sapiens
atcacaggcctagca

SEQ ID NO: 921411 - DNA, 15 bp, Homo sapiens
tcacaggcctagcag

SEQ ID NO: 921412 - DNA, 15 bp, Homo sapiens
cacaggcctagcaga

SEQ ID NO: 921413 - DNA, 15 bp, Homo sapiens
acaggcctagcagag

SEQ ID NO: 921414 - DNA, 15 bp, Homo sapiens
caggcctagcagagt

SEQ ID NO: 921415 - DNA, 15 bp, Homo sapiens
aggcctagcagagtg

SEQ ID NO: 921416 - DNA, 15 bp, Homo sapiens
ggcctagcagagtgc

SEQ ID NO: 921417 - DNA, 15 bp, Homo sapiens
gcctagcagagtgcc

SEQ ID NO: 921418 - DNA, 15 bp, Homo sapiens
cctagcagagtgcct

SEQ ID NO: 921419 - DNA, 15 bp, Homo sapiens
ctagcagagtgcctg

SEQ ID NO: 921420 - DNA, 15 bp, Homo sapiens
tagcagagtgcctgg

SEQ ID NO: 921421 - DNA, 15 bp, Homo sapiens
agcagagtgcctgga

SEQ ID NO: 921422 - DNA, 15 bp, Homo sapiens
gcagagtgcctggac

SEQ ID NO: 921423 - DNA, 15 bp, Homo sapiens
cagagtgcctggaca

SEQ ID NO: 921424 - DNA, 15 bp, Homo sapiens
agagtgcctggacac

SEQ ID NO: 921425 - DNA, 15 bp, Homo sapiens
gagtgcctggacaca

SEQ ID NO: 921426 - DNA, 15 bp, Homo sapiens
agtgcctggacacag

SEQ ID NO: 921427 - DNA, 15 bp, Homo sapiens
gtgcctggacacagt

SEQ ID NO: 921428 - DNA, 15 bp, Homo sapiens
tgcctggacacagtg

SEQ ID NO: 921429 - DNA, 15 bp, Homo sapiens
gcctggacacagtgg

SEQ ID NO: 921430 - DNA, 15 bp, Homo sapiens
cctggacacagtggg

SEQ ID NO: 921431 - DNA, 15 bp, Homo sapiens
ctggacacagtgggt

SEQ ID NO: 921432 - DNA, 15 bp, Homo sapiens
tggacacagtgggtg

SEQ ID NO: 921433 - DNA, 15 bp, Homo sapiens
ggacacagtgggtgt

SEQ ID NO: 921434 - DNA, 15 bp, Homo sapiens
gacacagtgggtgtt

SEQ ID NO: 921435 - DNA, 15 bp, Homo sapiens
acacagtgggtgttt

SEQ ID NO: 921436 - DNA, 15 bp, Homo sapiens
cacagtgggtgtttg

SEQ ID NO: 921437 - DNA, 15 bp, Homo sapiens
acagtgggtgtttga

SEQ ID NO: 921438 - DNA, 15 bp, Homo sapiens
cagtgggtgtttgat

SEQ ID NO: 921439 - DNA, 15 bp, Homo sapiens
agtgggtgtttgata

SEQ ID NO: 921440 - DNA, 15 bp, Homo sapiens
gtgggtgtttgataa

SEQ ID NO: 921441 - DNA, 15 bp, Homo sapiens
tgggtgtttgataaa

SEQ ID NO: 921442 - DNA, 15 bp, Homo sapiens
gggtgtttgataaat

SEQ ID NO: 921443 - DNA, 15 bp, Homo sapiens
ggtgtttgataaata

SEQ ID NO: 921444 - DNA, 15 bp, Homo sapiens
gtgtttgataaatat

SEQ ID NO: 921445 - DNA, 15 bp, Homo sapiens
tgtttgataaatatt

SEQ ID NO: 921446 - DNA, 15 bp, Homo sapiens
gtttgataaatattt

SEQ ID NO: 921447 - DNA, 15 bp, Homo sapiens
tttgataaatatttg

SEQ ID NO: 921448 - DNA, 15 bp, Homo sapiens
ttgataaatatttga

SEQ ID NO: 921449 - DNA, 15 bp, Homo sapiens
tgataaatatttgaa

SEQ ID NO: 921450 - DNA, 15 bp, Homo sapiens
gataaatatttgaat

SEQ ID NO: 921451 - DNA, 15 bp, Homo sapiens
ataaatatttgaatt

SEQ ID NO: 921452 - DNA, 15 bp, Homo sapiens
taaatatttgaatta

SEQ ID NO: 921453 - DNA, 15 bp, Homo sapiens
aaatatttgaattaa

SEQ ID NO: 921454 - DNA, 15 bp, Homo sapiens
aatatttgaattaat

SEQ ID NO: 921455 - DNA, 15 bp, Homo sapiens
atatttgaattaatg

SEQ ID NO: 921456 - DNA, 15 bp, Homo sapiens
tatttgaattaatga

SEQ ID NO: 921457 - DNA, 15 bp, Homo sapiens
atttgaattaatgaa

SEQ ID NO: 921458 - DNA, 15 bp, Homo sapiens
tttgaattaatgaat

SEQ ID NO: 921459 - DNA, 15 bp, Homo sapiens
ttgaattaatgaatg

SEQ ID NO: 921460 - DNA, 15 bp, Homo sapiens
tgaattaatgaatgg

SEQ ID NO: 921461 - DNA, 15 bp, Homo sapiens
gaattaatgaatgga

SEQ ID NO: 921462 - DNA, 15 bp, Homo sapiens
aattaatgaatggac

SEQ ID NO: 921463 - DNA, 15 bp, Homo sapiens
attaatgaatggaca

SEQ ID NO: 921464 - DNA, 15 bp, Homo sapiens
ttaatgaatggacaa

SEQ ID NO: 921465 - DNA, 15 bp, Homo sapiens
taatgaatggacaaa

SEQ ID NO: 921466 - DNA, 15 bp, Homo sapiens
aatgaatggacaaat

SEQ ID NO: 921467 - DNA, 15 bp, Homo sapiens
atgaatggacaaatg

SEQ ID NO: 921468 - DNA, 15 bp, Homo sapiens
tgaatggacaaatga

SEQ ID NO: 921469 - DNA, 15 bp, Homo sapiens
gaatggacaaatgaa

SEQ ID NO: 921470 - DNA, 15 bp, Homo sapiens
aatggacaaatgaaa

SEQ ID NO: 921471 - DNA, 15 bp, Homo sapiens
atggacaaatgaaaa

SEQ ID NO: 921472 - DNA, 15 bp, Homo sapiens
tggacaaatgaaaag

SEQ ID NO: 921473 - DNA, 15 bp, Homo sapiens
ggacaaatgaaaagc

SEQ ID NO: 921474 - DNA, 15 bp, Homo sapiens
gacaaatgaaaagct

SEQ ID NO: 921475 - DNA, 15 bp, Homo sapiens
acaaatgaaaagctg

SEQ ID NO: 921476 - DNA, 15 bp, Homo sapiens
caaatgaaaagctga

SEQ ID NO: 921477 - DNA, 15 bp, Homo sapiens
aaatgaaaagctgag

SEQ ID NO: 921478 - DNA, 15 bp, Homo sapiens
aatgaaaagctgagt

SEQ ID NO: 921479 - DNA, 15 bp, Homo sapiens
atgaaaagctgagta

SEQ ID NO: 921480 - DNA, 15 bp, Homo sapiens
tgaaaagctgagtac

SEQ ID NO: 921481 - DNA, 15 bp, Homo sapiens
gaaaagctgagtaca

SEQ ID NO: 921482 - DNA, 15 bp, Homo sapiens
aaaagctgagtacac

SEQ ID NO: 921483 - DNA, 15 bp, Homo sapiens
aaagctgagtacaca

SEQ ID NO: 921484 - DNA, 15 bp, Homo sapiens
aagctgagtacacag

SEQ ID NO: 921485 - DNA, 15 bp, Homo sapiens
agctgagtacacaga

SEQ ID NO: 921486 - DNA, 15 bp, Homo sapiens
gctgagtacacagat

SEQ ID NO: 921487 - DNA, 15 bp, Homo sapiens
ctgagtacacagatc

SEQ ID NO: 921488 - DNA, 15 bp, Homo sapiens
tgagtacacagatct

SEQ ID NO: 921489 - DNA, 15 bp, Homo sapiens
gagtacacagatctt

SEQ ID NO: 921490 - DNA, 15 bp, Homo sapiens
agtacacagatctta

SEQ ID NO: 921491 - DNA, 15 bp, Homo sapiens
gtacacagatcttac

SEQ ID NO: 921492 - DNA, 15 bp, Homo sapiens
tacacagatcttact

SEQ ID NO: 921493 - DNA, 15 bp, Homo sapiens
acacagatcttactg

SEQ ID NO: 921494 - DNA, 15 bp, Homo sapiens
cacagatcttactgc

SEQ ID NO: 921495 - DNA, 15 bp, Homo sapiens
acagatcttactgcc

SEQ ID NO: 921496 - DNA, 15 bp, Homo sapiens
cagatcttactgcct

SEQ ID NO: 921497 - DNA, 15 bp, Homo sapiens
agatcttactgccta

SEQ ID NO: 921498 - DNA, 15 bp, Homo sapiens
gatcttactgcctaa

SEQ ID NO: 921499 - DNA, 15 bp, Homo sapiens
atcttactgcctaac

SEQ ID NO: 921500 - DNA, 15 bp, Homo sapiens
tcttactgcctaaca

SEQ ID NO: 921501 - DNA, 15 bp, Homo sapiens
cttactgcctaacac

SEQ ID NO: 921502 - DNA, 15 bp, Homo sapiens
ttactgcctaacacc

SEQ ID NO: 921503 - DNA, 15 bp, Homo sapiens
tactgcctaacacca

SEQ ID NO: 921504 - DNA, 15 bp, Homo sapiens
actgcctaacaccac

SEQ ID NO: 921505 - DNA, 15 bp, Homo sapiens
ctgcctaacaccacc

SEQ ID NO: 921506 - DNA, 15 bp, Homo sapiens
tgcctaacaccacca

SEQ ID NO: 921507 - DNA, 15 bp, Homo sapiens
gcctaacaccaccac

SEQ ID NO: 921508 - DNA, 15 bp, Homo sapiens
cctaacaccaccaca

SEQ ID NO: 921509 - DNA, 15 bp, Homo sapiens
ctaacaccaccacat

SEQ ID NO: 921510 - DNA, 15 bp, Homo sapiens
taacaccaccacatg

SEQ ID NO: 921511 - DNA, 15 bp, Homo sapiens
aacaccaccacatgc

SEQ ID NO: 921512 - DNA, 15 bp, Homo sapiens
acaccaccacatgca

SEQ ID NO: 921513 - DNA, 15 bp, Homo sapiens
caccaccacatgcat

SEQ ID NO: 921514 - DNA, 15 bp, Homo sapiens
accaccacatgcata

SEQ ID NO: 921515 - DNA, 15 bp, Homo sapiens
ccaccacatgcatag

SEQ ID NO: 921516 - DNA, 15 bp, Homo sapiens
caccacatgcataga

SEQ ID NO: 921517 - DNA, 15 bp, Homo sapiens
accacatgcatagag

SEQ ID NO: 921518 - DNA, 15 bp, Homo sapiens
ccacatgcatagagc

SEQ ID NO: 921519 - DNA, 15 bp, Homo sapiens
cacatgcatagagca

SEQ ID NO: 921520 - DNA, 15 bp, Homo sapiens
acatgcatagagcac

SEQ ID NO: 921521 - DNA, 15 bp, Homo sapiens
catgcatagagcaca

SEQ ID NO: 921522 - DNA, 15 bp, Homo sapiens
atgcatagagcacat

SEQ ID NO: 921523 - DNA, 15 bp, Homo sapiens
tgcatagagcacatt

SEQ ID NO: 921524 - DNA, 15 bp, Homo sapiens
gcatagagcacatta

SEQ ID NO: 921525 - DNA, 15 bp, Homo sapiens
catagagcacattaa

SEQ ID NO: 921526 - DNA, 15 bp, Homo sapiens
atagagcacattaaa

SEQ ID NO: 921527 - DNA, 15 bp, Homo sapiens
tagagcacattaaaa

SEQ ID NO: 921528 - DNA, 15 bp, Homo sapiens
agagcacattaaaat

SEQ ID NO: 921529 - DNA, 15 bp, Homo sapiens
gagcacattaaaatg

SEQ ID NO: 921530 - DNA, 15 bp, Homo sapiens
agcacattaaaatgt

SEQ ID NO: 921531 - DNA, 15 bp, Homo sapiens
gcacattaaaatgta

SEQ ID NO: 921532 - DNA, 15 bp, Homo sapiens
cacattaaaatgtat

SEQ ID NO: 921533 - DNA, 15 bp, Homo sapiens
acattaaaatgtatg

SEQ ID NO: 921534 - DNA, 15 bp, Homo sapiens
cattaaaatgtatgg

SEQ ID NO: 921535 - DNA, 15 bp, Homo sapiens
attaaaatgtatggt

SEQ ID NO: 921536 - DNA, 15 bp, Homo sapiens
ttaaaatgtatggtg

SEQ ID NO: 921537 - DNA, 15 bp, Homo sapiens
taaaatgtatggtgc

SEQ ID NO: 921538 - DNA, 15 bp, Homo sapiens
aaaatgtatggtgcc

SEQ ID NO: 921539 - DNA, 15 bp, Homo sapiens
aaatgtatggtgcct

SEQ ID NO: 921540 - DNA, 15 bp, Homo sapiens
aatgtatggtgcctg

SEQ ID NO: 921541 - DNA, 15 bp, Homo sapiens
atgtatggtgcctgt

SEQ ID NO: 921542 - DNA, 15 bp, Homo sapiens
tgtatggtgcctgtt

SEQ ID NO: 921543 - DNA, 15 bp, Homo sapiens
gtatggtgcctgttt

SEQ ID NO: 921544 - DNA, 15 bp, Homo sapiens
tatggtgcctgtttc

SEQ ID NO: 921545 - DNA, 15 bp, Homo sapiens
atggtgcctgtttca

SEQ ID NO: 921546 - DNA, 15 bp, Homo sapiens
tggtgcctgtttcat

SEQ ID NO: 921547 - DNA, 15 bp, Homo sapiens
ggtgcctgtttcatg

SEQ ID NO: 921548 - DNA, 15 bp, Homo sapiens
gtgcctgtttcatga

SEQ ID NO: 921549 - DNA, 15 bp, Homo sapiens
tgcctgtttcatgac

SEQ ID NO: 921550 - DNA, 15 bp, Homo sapiens
gcctgtttcatgacc

SEQ ID NO: 921551 - DNA, 15 bp, Homo sapiens
cctgtttcatgacca

SEQ ID NO: 921552 - DNA, 15 bp, Homo sapiens
ctgtttcatgaccat

SEQ ID NO: 921553 - DNA, 15 bp, Homo sapiens
tgtttcatgaccatt

SEQ ID NO: 921554 - DNA, 15 bp, Homo sapiens
gtttcatgaccattt

SEQ ID NO: 921555 - DNA, 15 bp, Homo sapiens
tttcatgaccatttt

SEQ ID NO: 921556 - DNA, 15 bp, Homo sapiens
ttcatgaccattttg

SEQ ID NO: 921557 - DNA, 15 bp, Homo sapiens
tcatgaccattttgt

SEQ ID NO: 921558 - DNA, 15 bp, Homo sapiens
catgaccattttgtt

SEQ ID NO: 921559 - DNA, 15 bp, Homo sapiens
atgaccattttgttt

SEQ ID NO: 921560 - DNA, 15 bp, Homo sapiens
tgaccattttgttta

SEQ ID NO: 921561 - DNA, 15 bp, Homo sapiens
gaccattttgtttaa

SEQ ID NO: 921562 - DNA, 15 bp, Homo sapiens
accattttgtttaat

SEQ ID NO: 921563 - DNA, 15 bp, Homo sapiens
ccattttgtttaatt

SEQ ID NO: 921564 - DNA, 15 bp, Homo sapiens
cattttgtttaattt

SEQ ID NO: 921565 - DNA, 15 bp, Homo sapiens
attttgtttaatttt

SEQ ID NO: 921566 - DNA, 15 bp, Homo sapiens
ttttgtttaatttta

SEQ ID NO: 921567 - DNA, 15 bp, Homo sapiens
tttgtttaattttaa

SEQ ID NO: 921568 - DNA, 15 bp, Homo sapiens
ttgtttaattttaac

SEQ ID NO: 921569 - DNA, 15 bp, Homo sapiens
tgtttaattttaacc

SEQ ID NO: 921570 - DNA, 15 bp, Homo sapiens
gtttaattttaacca

SEQ ID NO: 921571 - DNA, 15 bp, Homo sapiens
tttaattttaaccac

SEQ ID NO: 921572 - DNA, 15 bp, Homo sapiens
ttaattttaaccaca

SEQ ID NO: 921573 - DNA, 15 bp, Homo sapiens
taattttaaccacaa

SEQ ID NO: 921574 - DNA, 15 bp, Homo sapiens
aattttaaccacaaa

SEQ ID NO: 921575 - DNA, 15 bp, Homo sapiens
attttaaccacaaag

SEQ ID NO: 921576 - DNA, 15 bp, Homo sapiens
ttttaaccacaaagt

SEQ ID NO: 921577 - DNA, 15 bp, Homo sapiens
tttaaccacaaagtc

SEQ ID NO: 921578 - DNA, 15 bp, Homo sapiens
ttaaccacaaagtca

SEQ ID NO: 921579 - DNA, 15 bp, Homo sapiens
taaccacaaagtcaa

SEQ ID NO: 921580 - DNA, 15 bp, Homo sapiens
aaccacaaagtcaaa

SEQ ID NO: 921581 - DNA, 15 bp, Homo sapiens
accacaaagtcaaag

SEQ ID NO: 921582 - DNA, 15 bp, Homo sapiens
ccacaaagtcaaaga

SEQ ID NO: 921583 - DNA, 15 bp, Homo sapiens
cacaaagtcaaagaa

SEQ ID NO: 921584 - DNA, 15 bp, Homo sapiens
acaaagtcaaagaag

SEQ ID NO: 921585 - DNA, 15 bp, Homo sapiens
caaagtcaaagaagg

SEQ ID NO: 921586 - DNA, 15 bp, Homo sapiens
aaagtcaaagaaggg

SEQ ID NO: 921587 - DNA, 15 bp, Homo sapiens
aagtcaaagaaggga

SEQ ID NO: 921588 - DNA, 15 bp, Homo sapiens
agtcaaagaagggaa

SEQ ID NO: 921589 - DNA, 15 bp, Homo sapiens
gtcaaagaagggaag

SEQ ID NO: 921590 - DNA, 15 bp, Homo sapiens
tcaaagaagggaagg

SEQ ID NO: 921591 - DNA, 15 bp, Homo sapiens
caaagaagggaagga

SEQ ID NO: 921592 - DNA, 15 bp, Homo sapiens
aaagaagggaaggaa

SEQ ID NO: 921593 - DNA, 15 bp, Homo sapiens
aagaagggaaggaac

SEQ ID NO: 921594 - DNA, 15 bp, Homo sapiens
agaagggaaggaact

SEQ ID NO: 921595 - DNA, 15 bp, Homo sapiens
gaagggaaggaacta

SEQ ID NO: 921596 - DNA, 15 bp, Homo sapiens
aagggaaggaactat

SEQ ID NO: 921597 - DNA, 15 bp, Homo sapiens
agggaaggaactatt

SEQ ID NO: 921598 - DNA, 15 bp, Homo sapiens
gggaaggaactatta

SEQ ID NO: 921599 - DNA, 15 bp, Homo sapiens
ggaaggaactattat

SEQ ID NO: 921600 - DNA, 15 bp, Homo sapiens
gaaggaactattatc

SEQ ID NO: 921601 - DNA, 15 bp, Homo sapiens
aaggaactattatcc

SEQ ID NO: 921602 - DNA, 15 bp, Homo sapiens
aggaactattatcca

SEQ ID NO: 921603 - DNA, 15 bp, Homo sapiens
ggaactattatccat

SEQ ID NO: 921604 - DNA, 15 bp, Homo sapiens
gaactattatccata

SEQ ID NO: 921605 - DNA, 15 bp, Homo sapiens
aactattatccatat

SEQ ID NO: 921606 - DNA, 15 bp, Homo sapiens
actattatccatatt

SEQ ID NO: 921607 - DNA, 15 bp, Homo sapiens
ctattatccatattt

SEQ ID NO: 921608 - DNA, 15 bp, Homo sapiens
tattatccatatttt

SEQ ID NO: 921609 - DNA, 15 bp, Homo sapiens
attatccatatttta

SEQ ID NO: 921610 - DNA, 15 bp, Homo sapiens
ttatccatattttac

SEQ ID NO: 921611 - DNA, 15 bp, Homo sapiens
tatccatattttacc

SEQ ID NO: 921612 - DNA, 15 bp, Homo sapiens
atccatattttacct

SEQ ID NO: 921613 - DNA, 15 bp, Homo sapiens
tccatattttacctt

SEQ ID NO: 921614 - DNA, 15 bp, Homo sapiens
ccatattttaccttt

SEQ ID NO: 921615 - DNA, 15 bp, Homo sapiens
catattttacctttg

SEQ ID NO: 921616 - DNA, 15 bp, Homo sapiens
atattttacctttga

SEQ ID NO: 921617 - DNA, 15 bp, Homo sapiens
tattttacctttgat

SEQ ID NO: 921618 - DNA, 15 bp, Homo sapiens
attttacctttgata

SEQ ID NO: 921619 - DNA, 15 bp, Homo sapiens
ttttacctttgataa

SEQ ID NO: 921620 - DNA, 15 bp, Homo sapiens
tttacctttgataat

SEQ ID NO: 921621 - DNA, 15 bp, Homo sapiens
ttacctttgataatg

SEQ ID NO: 921622 - DNA, 15 bp, Homo sapiens
tacctttgataatgt

SEQ ID NO: 921623 - DNA, 15 bp, Homo sapiens
acctttgataatgtt

SEQ ID NO: 921624 - DNA, 15 bp, Homo sapiens
cctttgataatgttg

SEQ ID NO: 921625 - DNA, 15 bp, Homo sapiens
ctttgataatgttga

SEQ ID NO: 921626 - DNA, 15 bp, Homo sapiens
tttgataatgttgag

SEQ ID NO: 921627 - DNA, 15 bp, Homo sapiens
ttgataatgttgagt

SEQ ID NO: 921628 - DNA, 15 bp, Homo sapiens
tgataatgttgagtc

SEQ ID NO: 921629 - DNA, 15 bp, Homo sapiens
gataatgttgagtct

SEQ ID NO: 921630 - DNA, 15 bp, Homo sapiens
ataatgttgagtctc

SEQ ID NO: 921631 - DNA, 15 bp, Homo sapiens
taatgttgagtctca

SEQ ID NO: 921632 - DNA, 15 bp, Homo sapiens
aatgttgagtctcag

SEQ ID NO: 921633 - DNA, 15 bp, Homo sapiens
atgttgagtctcaga

SEQ ID NO: 921634 - DNA, 15 bp, Homo sapiens
tgttgagtctcagaa

SEQ ID NO: 921635 - DNA, 15 bp, Homo sapiens
gttgagtctcagaaa

SEQ ID NO: 921636 - DNA, 15 bp, Homo sapiens
ttgagtctcagaaag

SEQ ID NO: 921637 - DNA, 15 bp, Homo sapiens
tgagtctcagaaagt

SEQ ID NO: 921638 - DNA, 15 bp, Homo sapiens
gagtctcagaaagtt

SEQ ID NO: 921639 - DNA, 15 bp, Homo sapiens
agtctcagaaagttg

SEQ ID NO: 921640 - DNA, 15 bp, Homo sapiens
gtctcagaaagttgt

SEQ ID NO: 921641 - DNA, 15 bp, Homo sapiens
tctcagaaagttgtt

SEQ ID NO: 921642 - DNA, 15 bp, Homo sapiens
ctcagaaagttgttt

SEQ ID NO: 921643 - DNA, 15 bp, Homo sapiens
tcagaaagttgtttg

SEQ ID NO: 921644 - DNA, 15 bp, Homo sapiens
cagaaagttgtttgc

SEQ ID NO: 921645 - DNA, 15 bp, Homo sapiens
agaaagttgtttgct

SEQ ID NO: 921646 - DNA, 15 bp, Homo sapiens
gaaagttgtttgctc

SEQ ID NO: 921647 - DNA, 15 bp, Homo sapiens
aaagttgtttgctca

SEQ ID NO: 921648 - DNA, 15 bp, Homo sapiens
aagttgtttgctcaa

SEQ ID NO: 921649 - DNA, 15 bp, Homo sapiens
agttgtttgctcaag

SEQ ID NO: 921650 - DNA, 15 bp, Homo sapiens
gttgtttgctcaagg

SEQ ID NO: 921651 - DNA, 15 bp, Homo sapiens
ttgtttgctcaaggt

SEQ ID NO: 921652 - DNA, 15 bp, Homo sapiens
tgtttgctcaaggtc

SEQ ID NO: 921653 - DNA, 15 bp, Homo sapiens
gtttgctcaaggtca

SEQ ID NO: 921654 - DNA, 15 bp, Homo sapiens
tttgctcaaggtcat

SEQ ID NO: 921655 - DNA, 15 bp, Homo sapiens
ttgctcaaggtcata

SEQ ID NO: 921656 - DNA, 15 bp, Homo sapiens
tgctcaaggtcatat

SEQ ID NO: 921657 - DNA, 15 bp, Homo sapiens
gctcaaggtcatata

SEQ ID NO: 921658 - DNA, 15 bp, Homo sapiens
ctcaaggtcatatag

SEQ ID NO: 921659 - DNA, 15 bp, Homo sapiens
tcaaggtcatatagt

SEQ ID NO: 921660 - DNA, 15 bp, Homo sapiens
caaggtcatatagtt

SEQ ID NO: 921661 - DNA, 15 bp, Homo sapiens
aaggtcatatagttg

SEQ ID NO: 921662 - DNA, 15 bp, Homo sapiens
aggtcatatagttga

SEQ ID NO: 921663 - DNA, 15 bp, Homo sapiens
ggtcatatagttgat

SEQ ID NO: 921664 - DNA, 15 bp, Homo sapiens
gtcatatagttgata

SEQ ID NO: 921665 - DNA, 15 bp, Homo sapiens
tcatatagttgataa

SEQ ID NO: 921666 - DNA, 15 bp, Homo sapiens
catatagttgataaa

SEQ ID NO: 921667 - DNA, 15 bp, Homo sapiens
atatagttgataaat

SEQ ID NO: 921668 - DNA, 15 bp, Homo sapiens
tatagttgataaatg

SEQ ID NO: 921669 - DNA, 15 bp, Homo sapiens
atagttgataaatgg

SEQ ID NO: 921670 - DNA, 15 bp, Homo sapiens
tagttgataaatggt

SEQ ID NO: 921671 - DNA, 15 bp, Homo sapiens
agttgataaatggta

SEQ ID NO: 921672 - DNA, 15 bp, Homo sapiens
gttgataaatggtaa

SEQ ID NO: 921673 - DNA, 15 bp, Homo sapiens
ttgataaatggtaaa

SEQ ID NO: 921674 - DNA, 15 bp, Homo sapiens
tgataaatggtaaag

SEQ ID NO: 921675 - DNA, 15 bp, Homo sapiens
gataaatggtaaagc

SEQ ID NO: 921676 - DNA, 15 bp, Homo sapiens
ataaatggtaaagcc

SEQ ID NO: 921677 - DNA, 15 bp, Homo sapiens
taaatggtaaagcca

SEQ ID NO: 921678 - DNA, 15 bp, Homo sapiens
aaatggtaaagccaa

SEQ ID NO: 921679 - DNA, 15 bp, Homo sapiens
aatggtaaagccaaa

SEQ ID NO: 921680 - DNA, 15 bp, Homo sapiens
atggtaaagccaaag

SEQ ID NO: 921681 - DNA, 15 bp, Homo sapiens
tggtaaagccaaagg

SEQ ID NO: 921682 - DNA, 15 bp, Homo sapiens
ggtaaagccaaagga

SEQ ID NO: 921683 - DNA, 15 bp, Homo sapiens
gtaaagccaaaggaa

SEQ ID NO: 921684 - DNA, 15 bp, Homo sapiens
taaagccaaaggaag

SEQ ID NO: 921685 - DNA, 15 bp, Homo sapiens
aaagccaaaggaaga

SEQ ID NO: 921686 - DNA, 15 bp, Homo sapiens
aagccaaaggaagat

SEQ ID NO: 921687 - DNA, 15 bp, Homo sapiens
agccaaaggaagatc

SEQ ID NO: 921688 - DNA, 15 bp, Homo sapiens
gccaaaggaagatcc

SEQ ID NO: 921689 - DNA, 15 bp, Homo sapiens
ccaaaggaagatcct

SEQ ID NO: 921690 - DNA, 15 bp, Homo sapiens
caaaggaagatcctg

SEQ ID NO: 921691 - DNA, 15 bp, Homo sapiens
aaaggaagatcctga

SEQ ID NO: 921692 - DNA, 15 bp, Homo sapiens
aaggaagatcctgac

SEQ ID NO: 921693 - DNA, 15 bp, Homo sapiens
aggaagatcctgact

SEQ ID NO: 921694 - DNA, 15 bp, Homo sapiens
ggaagatcctgactc

SEQ ID NO: 921695 - DNA, 15 bp, Homo sapiens
gaagatcctgactct

SEQ ID NO: 921696 - DNA, 15 bp, Homo sapiens
aagatcctgactctc

SEQ ID NO: 921697 - DNA, 15 bp, Homo sapiens
agatcctgactctca

SEQ ID NO: 921698 - DNA, 15 bp, Homo sapiens
gatcctgactctcaa

SEQ ID NO: 921699 - DNA, 15 bp, Homo sapiens
atcctgactctcaaa

SEQ ID NO: 921700 - DNA, 15 bp, Homo sapiens
tcctgactctcaaac

SEQ ID NO: 921701 - DNA, 15 bp, Homo sapiens
cctgactctcaaact

SEQ ID NO: 921702 - DNA, 15 bp, Homo sapiens
ctgactctcaaacta

SEQ ID NO: 921703 - DNA, 15 bp, Homo sapiens
tgactctcaaactac

SEQ ID NO: 921704 - DNA, 15 bp, Homo sapiens
gactctcaaactacc

SEQ ID NO: 921705 - DNA, 15 bp, Homo sapiens
actctcaaactaccc

SEQ ID NO: 921706 - DNA, 15 bp, Homo sapiens
ctctcaaactaccca

SEQ ID NO: 921707 - DNA, 15 bp, Homo sapiens
tctcaaactacccaa

SEQ ID NO: 921708 - DNA, 15 bp, Homo sapiens
ctcaaactacccaag

SEQ ID NO: 921709 - DNA, 15 bp, Homo sapiens
tcaaactacccaagg

SEQ ID NO: 921710 - DNA, 15 bp, Homo sapiens
caaactacccaaggc

SEQ ID NO: 921711 - DNA, 15 bp, Homo sapiens
aaactacccaaggcc

SEQ ID NO: 921712 - DNA, 15 bp, Homo sapiens
aactacccaaggcca

SEQ ID NO: 921713 - DNA, 15 bp, Homo sapiens
actacccaaggccag

SEQ ID NO: 921714 - DNA, 15 bp, Homo sapiens
ctacccaaggccaga

SEQ ID NO: 921715 - DNA, 15 bp, Homo sapiens
tacccaaggccagag

SEQ ID NO: 921716 - DNA, 15 bp, Homo sapiens
acccaaggccagagt

SEQ ID NO: 921717 - DNA, 15 bp, Homo sapiens
cccaaggccagagtt

SEQ ID NO: 921718 - DNA, 15 bp, Homo sapiens
ccaaggccagagtta

SEQ ID NO: 921719 - DNA, 15 bp, Homo sapiens
caaggccagagttat

SEQ ID NO: 921720 - DNA, 15 bp, Homo sapiens
aaggccagagttatc

SEQ ID NO: 921721 - DNA, 15 bp, Homo sapiens
aggccagagttatct

SEQ ID NO: 921722 - DNA, 15 bp, Homo sapiens
ggccagagttatctt

SEQ ID NO: 921723 - DNA, 15 bp, Homo sapiens
gccagagttatctta

SEQ ID NO: 921724 - DNA, 15 bp, Homo sapiens
ccagagttatcttaa

SEQ ID NO: 921725 - DNA, 15 bp, Homo sapiens
cagagttatcttaaa

SEQ ID NO: 921726 - DNA, 15 bp, Homo sapiens
agagttatcttaaag

SEQ ID NO: 921727 - DNA, 15 bp, Homo sapiens
gagttatcttaaaga

SEQ ID NO: 921728 - DNA, 15 bp, Homo sapiens
agttatcttaaagac

SEQ ID NO: 921729 - DNA, 15 bp, Homo sapiens
gttatcttaaagaca

SEQ ID NO: 921730 - DNA, 15 bp, Homo sapiens
ttatcttaaagacaa

SEQ ID NO: 921731 - DNA, 15 bp, Homo sapiens
tatcttaaagacaac

SEQ ID NO: 921732 - DNA, 15 bp, Homo sapiens
atcttaaagacaacc

SEQ ID NO: 921733 - DNA, 15 bp, Homo sapiens
tcttaaagacaaccc

SEQ ID NO: 921734 - DNA, 15 bp, Homo sapiens
cttaaagacaaccca

SEQ ID NO: 921735 - DNA, 15 bp, Homo sapiens
ttaaagacaacccag

SEQ ID NO: 921736 - DNA, 15 bp, Homo sapiens
taaagacaacccaga

SEQ ID NO: 921737 - DNA, 15 bp, Homo sapiens
aaagacaacccagat

SEQ ID NO: 921738 - DNA, 15 bp, Homo sapiens
aagacaacccagatg

SEQ ID NO: 921739 - DNA, 15 bp, Homo sapiens
agacaacccagatga

SEQ ID NO: 921740 - DNA, 15 bp, Homo sapiens
gacaacccagatgag

SEQ ID NO: 921741 - DNA, 15 bp, Homo sapiens
acaacccagatgaga

SEQ ID NO: 921742 - DNA, 15 bp, Homo sapiens
caacccagatgagag

SEQ ID NO: 921743 - DNA, 15 bp, Homo sapiens
aacccagatgagagt

SEQ ID NO: 921744 - DNA, 15 bp, Homo sapiens
acccagatgagagtc

SEQ ID NO: 921745 - DNA, 15 bp, Homo sapiens
cccagatgagagtca

SEQ ID NO: 921746 - DNA, 15 bp, Homo sapiens
ccagatgagagtcac

SEQ ID NO: 921747 - DNA, 15 bp, Homo sapiens
cagatgagagtcacc

SEQ ID NO: 921748 - DNA, 15 bp, Homo sapiens
agatgagagtcacca

SEQ ID NO: 921749 - DNA, 15 bp, Homo sapiens
gatgagagtcaccac

SEQ ID NO: 921750 - DNA, 15 bp, Homo sapiens
atgagagtcaccaca

SEQ ID NO: 921751 - DNA, 15 bp, Homo sapiens
tgagagtcaccacag

SEQ ID NO: 921752 - DNA, 15 bp, Homo sapiens
gagagtcaccacagg

SEQ ID NO: 921753 - DNA, 15 bp, Homo sapiens
agagtcaccacaggc

SEQ ID NO: 921754 - DNA, 15 bp, Homo sapiens
gagtcaccacaggca

SEQ ID NO: 921755 - DNA, 15 bp, Homo sapiens
agtcaccacaggcaa

SEQ ID NO: 921756 - DNA, 15 bp, Homo sapiens
gtcaccacaggcaag

SEQ ID NO: 921757 - DNA, 15 bp, Homo sapiens
tcaccacaggcaagg

SEQ ID NO: 921758 - DNA, 15 bp, Homo sapiens
caccacaggcaaggt

SEQ ID NO: 921759 - DNA, 15 bp, Homo sapiens
accacaggcaaggtt

SEQ ID NO: 921760 - DNA, 15 bp, Homo sapiens
ccacaggcaaggttg

SEQ ID NO: 921761 - DNA, 15 bp, Homo sapiens
tctatacatagtctt

SEQ ID NO: 921762 - DNA, 15 bp, Homo sapiens
ctatacatagtctta

SEQ ID NO: 921763 - DNA, 15 bp, Homo sapiens
tatacatagtcttac

SEQ ID NO: 921764 - DNA, 15 bp, Homo sapiens
atacatagtcttaca

SEQ ID NO: 921765 - DNA, 15 bp, Homo sapiens
tacatagtcttacat

SEQ ID NO: 921766 - DNA, 15 bp, Homo sapiens
acatagtcttacatt

SEQ ID NO: 921767 - DNA, 15 bp, Homo sapiens
catagtcttacattt

SEQ ID NO: 921768 - DNA, 15 bp, Homo sapiens
atagtcttacatttt

SEQ ID NO: 921769 - DNA, 15 bp, Homo sapiens
tagtcttacattttt

SEQ ID NO: 921770 - DNA, 15 bp, Homo sapiens
agtcttacatttttc

SEQ ID NO: 921771 - DNA, 15 bp, Homo sapiens
gtcttacatttttct

SEQ ID NO: 921772 - DNA, 15 bp, Homo sapiens
tcttacatttttctg

SEQ ID NO: 921773 - DNA, 15 bp, Homo sapiens
cttacatttttctgc

SEQ ID NO: 921774 - DNA, 15 bp, Homo sapiens
ttacatttttctgca

SEQ ID NO: 921775 - DNA, 15 bp, Homo sapiens
tacatttttctgcat

SEQ ID NO: 921776 - DNA, 15 bp, Homo sapiens
acatttttctgcatt

SEQ ID NO: 921777 - DNA, 15 bp, Homo sapiens
catttttctgcattt

SEQ ID NO: 921778 - DNA, 15 bp, Homo sapiens
atttttctgcattta

SEQ ID NO: 921779 - DNA, 15 bp, Homo sapiens
tttttctgcatttat

SEQ ID NO: 921780 - DNA, 15 bp, Homo sapiens
ttttctgcatttata

SEQ ID NO: 921781 - DNA, 15 bp, Homo sapiens
tttctgcatttatat

SEQ ID NO: 921782 - DNA, 15 bp, Homo sapiens
ttctgcatttatata

SEQ ID NO: 921783 - DNA, 15 bp, Homo sapiens
tctgcatttatatat

SEQ ID NO: 921784 - DNA, 15 bp, Homo sapiens
ctgcatttatatatc

SEQ ID NO: 921785 - DNA, 15 bp, Homo sapiens
tgcatttatatatct

SEQ ID NO: 921786 - DNA, 15 bp, Homo sapiens
gcatttatatatctg

SEQ ID NO: 921787 - DNA, 15 bp, Homo sapiens
catttatatatctgt

SEQ ID NO: 921788 - DNA, 15 bp, Homo sapiens
atttatatatctgtt

SEQ ID NO: 921789 - DNA, 15 bp, Homo sapiens
tttatatatctgttc

SEQ ID NO: 921790 - DNA, 15 bp, Homo sapiens
ttatatatctgttca

SEQ ID NO: 921791 - DNA, 15 bp, Homo sapiens
tatatatctgttcat

SEQ ID NO: 921792 - DNA, 15 bp, Homo sapiens
atatatctgttcatt

SEQ ID NO: 921793 - DNA, 15 bp, Homo sapiens
tatatctgttcattc

SEQ ID NO: 921794 - DNA, 15 bp, Homo sapiens
atatctgttcattct

SEQ ID NO: 921795 - DNA, 15 bp, Homo sapiens
tatctgttcattcta

SEQ ID NO: 921796 - DNA, 15 bp, Homo sapiens
atctgttcattctac

SEQ ID NO: 921797 - DNA, 15 bp, Homo sapiens
tctgttcattctact

SEQ ID NO: 921798 - DNA, 15 bp, Homo sapiens
ctgttcattctactc

SEQ ID NO: 921799 - DNA, 15 bp, Homo sapiens
tgttcattctactca

SEQ ID NO: 921800 - DNA, 15 bp, Homo sapiens
gttcattctactcat

SEQ ID NO: 921801 - DNA, 15 bp, Homo sapiens
ttcattctactcatc

SEQ ID NO: 921802 - DNA, 15 bp, Homo sapiens
tcattctactcatct

SEQ ID NO: 921803 - DNA, 15 bp, Homo sapiens
cattctactcatctg

SEQ ID NO: 921804 - DNA, 15 bp, Homo sapiens
attctactcatctgg

SEQ ID NO: 921805 - DNA, 15 bp, Homo sapiens
ttctactcatctgga

SEQ ID NO: 921806 - DNA, 15 bp, Homo sapiens
tctactcatctggat

SEQ ID NO: 921807 - DNA, 15 bp, Homo sapiens
ctactcatctggatt

SEQ ID NO: 921808 - DNA, 15 bp, Homo sapiens
tactcatctggattt

SEQ ID NO: 921809 - DNA, 15 bp, Homo sapiens
actcatctggatttg

SEQ ID NO: 921810 - DNA, 15 bp, Homo sapiens
ctcatctggatttgt

SEQ ID NO: 921811 - DNA, 15 bp, Homo sapiens
tcatctggatttgtt

SEQ ID NO: 921812 - DNA, 15 bp, Homo sapiens
catctggatttgttt

SEQ ID NO: 921813 - DNA, 15 bp, Homo sapiens
atctggatttgtttg

SEQ ID NO: 921814 - DNA, 15 bp, Homo sapiens
tctggatttgtttga

SEQ ID NO: 921815 - DNA, 15 bp, Homo sapiens
ctggatttgtttgat

SEQ ID NO: 921816 - DNA, 15 bp, Homo sapiens
tggatttgtttgatt

SEQ ID NO: 921817 - DNA, 15 bp, Homo sapiens
ggatttgtttgattt

SEQ ID NO: 921818 - DNA, 15 bp, Homo sapiens
gatttgtttgatttg

SEQ ID NO: 921819 - DNA, 15 bp, Homo sapiens
atttgtttgatttgt

SEQ ID NO: 921820 - DNA, 15 bp, Homo sapiens
tttgtttgatttgtt

SEQ ID NO: 921821 - DNA, 15 bp, Homo sapiens
ttgtttgatttgttt

SEQ ID NO: 921822 - DNA, 15 bp, Homo sapiens
tgtttgatttgttta

SEQ ID NO: 921823 - DNA, 15 bp, Homo sapiens
gtttgatttgtttat

SEQ ID NO: 921824 - DNA, 15 bp, Homo sapiens
tttgatttgtttatt

SEQ ID NO: 921825 - DNA, 15 bp, Homo sapiens
ttgatttgtttatta

SEQ ID NO: 921826 - DNA, 15 bp, Homo sapiens
tgatttgtttattat

SEQ ID NO: 921827 - DNA, 15 bp, Homo sapiens
gatttgtttattata

SEQ ID NO: 921828 - DNA, 15 bp, Homo sapiens
atttgtttattataa

SEQ ID NO: 921829 - DNA, 15 bp, Homo sapiens
tttgtttattataaa

SEQ ID NO: 921830 - DNA, 15 bp, Homo sapiens
ttgtttattataaat

SEQ ID NO: 921831 - DNA, 15 bp, Homo sapiens
tgtttattataaata

SEQ ID NO: 921832 - DNA, 15 bp, Homo sapiens
gtttattataaatag

SEQ ID NO: 921833 - DNA, 15 bp, Homo sapiens
tttattataaatagc

SEQ ID NO: 921834 - DNA, 15 bp, Homo sapiens
ttattataaatagca

SEQ ID NO: 921835 - DNA, 15 bp, Homo sapiens
tattataaatagcat

SEQ ID NO: 921836 - DNA, 15 bp, Homo sapiens
attataaatagcata

SEQ ID NO: 921837 - DNA, 15 bp, Homo sapiens
ttataaatagcatat

SEQ ID NO: 921838 - DNA, 15 bp, Homo sapiens
tataaatagcatatt

SEQ ID NO: 921839 - DNA, 15 bp, Homo sapiens
ataaatagcatattc

SEQ ID NO: 921840 - DNA, 15 bp, Homo sapiens
taaatagcatattct

SEQ ID NO: 921841 - DNA, 15 bp, Homo sapiens
aaatagcatattcta

SEQ ID NO: 921842 - DNA, 15 bp, Homo sapiens
aatagcatattctaa

SEQ ID NO: 921843 - DNA, 15 bp, Homo sapiens
atagcatattctaat

SEQ ID NO: 921844 - DNA, 15 bp, Homo sapiens
tagcatattctaatt

SEQ ID NO: 921845 - DNA, 15 bp, Homo sapiens
agcatattctaattc

SEQ ID NO: 921846 - DNA, 15 bp, Homo sapiens
gcatattctaattct

SEQ ID NO: 921847 - DNA, 15 bp, Homo sapiens
catattctaattcta

SEQ ID NO: 921848 - DNA, 15 bp, Homo sapiens
atattctaattctag

SEQ ID NO: 921849 - DNA, 15 bp, Homo sapiens
tattctaattctaga

SEQ ID NO: 921850 - DNA, 15 bp, Homo sapiens
attctaattctagag

SEQ ID NO: 921851 - DNA, 15 bp, Homo sapiens
ttctaattctagagc

SEQ ID NO: 921852 - DNA, 15 bp, Homo sapiens
tctaattctagagca

SEQ ID NO: 921853 - DNA, 15 bp, Homo sapiens
ctaattctagagcaa

SEQ ID NO: 921854 - DNA, 15 bp, Homo sapiens
taattctagagcaag

SEQ ID NO: 921855 - DNA, 15 bp, Homo sapiens
aattctagagcaagc

SEQ ID NO: 921856 - DNA, 15 bp, Homo sapiens
attctagagcaagca

SEQ ID NO: 921857 - DNA, 15 bp, Homo sapiens
ttctagagcaagcaa

SEQ ID NO: 921858 - DNA, 15 bp, Homo sapiens
tctagagcaagcaag

SEQ ID NO: 921859 - DNA, 15 bp, Homo sapiens
ctagagcaagcaagg

SEQ ID NO: 921860 - DNA, 15 bp, Homo sapiens
tagagcaagcaagga

SEQ ID NO: 921861 - DNA, 15 bp, Homo sapiens
agagcaagcaaggat

SEQ ID NO: 921862 - DNA, 15 bp, Homo sapiens
gagcaagcaaggata

SEQ ID NO: 921863 - DNA, 15 bp, Homo sapiens
agcaagcaaggataa

SEQ ID NO: 921864 - DNA, 15 bp, Homo sapiens
gcaagcaaggataaa

SEQ ID NO: 921865 - DNA, 15 bp, Homo sapiens
caagcaaggataaac

SEQ ID NO: 921866 - DNA, 15 bp, Homo sapiens
aagcaaggataaact

SEQ ID NO: 921867 - DNA, 15 bp, Homo sapiens
agcaaggataaacta

SEQ ID NO: 921868 - DNA, 15 bp, Homo sapiens
gcaaggataaactaa

SEQ ID NO: 921869 - DNA, 15 bp, Homo sapiens
caaggataaactaaa

SEQ ID NO: 921870 - DNA, 15 bp, Homo sapiens
aaggataaactaaat

SEQ ID NO: 921871 - DNA, 15 bp, Homo sapiens
aggataaactaaatg

SEQ ID NO: 921872 - DNA, 15 bp, Homo sapiens
ggataaactaaatgc

SEQ ID NO: 921873 - DNA, 15 bp, Homo sapiens
gataaactaaatgca

SEQ ID NO: 921874 - DNA, 15 bp, Homo sapiens
ataaactaaatgcaa

SEQ ID NO: 921875 - DNA, 15 bp, Homo sapiens
taaactaaatgcaat

SEQ ID NO: 921876 - DNA, 15 bp, Homo sapiens
aaactaaatgcaatc

SEQ ID NO: 921877 - DNA, 15 bp, Homo sapiens
aactaaatgcaatcc

SEQ ID NO: 921878 - DNA, 15 bp, Homo sapiens
actaaatgcaatcct

SEQ ID NO: 921879 - DNA, 15 bp, Homo sapiens
ctaaatgcaatcctg

SEQ ID NO: 921880 - DNA, 15 bp, Homo sapiens
taaatgcaatcctgt

SEQ ID NO: 921881 - DNA, 15 bp, Homo sapiens
aaatgcaatcctgta

SEQ ID NO: 921882 - DNA, 15 bp, Homo sapiens
aatgcaatcctgtag

SEQ ID NO: 921883 - DNA, 15 bp, Homo sapiens
atgcaatcctgtagg

SEQ ID NO: 921884 - DNA, 15 bp, Homo sapiens
tgcaatcctgtagga

SEQ ID NO: 921885 - DNA, 15 bp, Homo sapiens
gcaatcctgtaggaa

SEQ ID NO: 921886 - DNA, 15 bp, Homo sapiens
caatcctgtaggaaa

SEQ ID NO: 921887 - DNA, 15 bp, Homo sapiens
aatcctgtaggaaaa

SEQ ID NO: 921888 - DNA, 15 bp, Homo sapiens
atcctgtaggaaaaa

SEQ ID NO: 921889 - DNA, 15 bp, Homo sapiens
tcctgtaggaaaaat

SEQ ID NO: 921890 - DNA, 15 bp, Homo sapiens
cctgtaggaaaaatt

SEQ ID NO: 921891 - DNA, 15 bp, Homo sapiens
ctgtaggaaaaatta

SEQ ID NO: 921892 - DNA, 15 bp, Homo sapiens
tgtaggaaaaattaa

SEQ ID NO: 921893 - DNA, 15 bp, Homo sapiens
gtaggaaaaattaac

SEQ ID NO: 921894 - DNA, 15 bp, Homo sapiens
taggaaaaattaaca

SEQ ID NO: 921895 - DNA, 15 bp, Homo sapiens
aggaaaaattaacag

SEQ ID NO: 921896 - DNA, 15 bp, Homo sapiens
ggaaaaattaacagg

SEQ ID NO: 921897 - DNA, 15 bp, Homo sapiens
gaaaaattaacaggg

SEQ ID NO: 921898 - DNA, 15 bp, Homo sapiens
aaaaattaacaggga

SEQ ID NO: 921899 - DNA, 15 bp, Homo sapiens
aaaattaacagggaa

SEQ ID NO: 921900 - DNA, 15 bp, Homo sapiens
aaattaacagggaaa

SEQ ID NO: 921901 - DNA, 15 bp, Homo sapiens
aattaacagggaaaa

SEQ ID NO: 921902 - DNA, 15 bp, Homo sapiens
attaacagggaaaaa

SEQ ID NO: 921903 - DNA, 15 bp, Homo sapiens
ttaacagggaaaaag

SEQ ID NO: 921904 - DNA, 15 bp, Homo sapiens
taacagggaaaaagg

SEQ ID NO: 921905 - DNA, 15 bp, Homo sapiens
aacagggaaaaagga

SEQ ID NO: 921906 - DNA, 15 bp, Homo sapiens
acagggaaaaaggag

SEQ ID NO: 921907 - DNA, 15 bp, Homo sapiens
cagggaaaaaggagg

SEQ ID NO: 921908 - DNA, 15 bp, Homo sapiens
agggaaaaaggaggt

SEQ ID NO: 921909 - DNA, 15 bp, Homo sapiens
gggaaaaaggaggtg

SEQ ID NO: 921910 - DNA, 15 bp, Homo sapiens
ggaaaaaggaggtga

SEQ ID NO: 921911 - DNA, 15 bp, Homo sapiens
gaaaaaggaggtgat

SEQ ID NO: 921912 - DNA, 15 bp, Homo sapiens
aaaaaggaggtgatt

SEQ ID NO: 921913 - DNA, 15 bp, Homo sapiens
aaaaggaggtgattc

SEQ ID NO: 921914 - DNA, 15 bp, Homo sapiens
aaaggaggtgattcc

SEQ ID NO: 921915 - DNA, 15 bp, Homo sapiens
aaggaggtgattcct

SEQ ID NO: 921916 - DNA, 15 bp, Homo sapiens
aggaggtgattcctc

SEQ ID NO: 921917 - DNA, 15 bp, Homo sapiens
ggaggtgattcctcc

SEQ ID NO: 921918 - DNA, 15 bp, Homo sapiens
gaggtgattcctcct

SEQ ID NO: 921919 - DNA, 15 bp, Homo sapiens
aggtgattcctcctg

SEQ ID NO: 921920 - DNA, 15 bp, Homo sapiens
ggtgattcctcctga

SEQ ID NO: 921921 - DNA, 15 bp, Homo sapiens
gtgattcctcctgaa

SEQ ID NO: 921922 - DNA, 15 bp, Homo sapiens
tgattcctcctgaaa

SEQ ID NO: 921923 - DNA, 15 bp, Homo sapiens
gattcctcctgaaag

SEQ ID NO: 921924 - DNA, 15 bp, Homo sapiens
attcctcctgaaagg

SEQ ID NO: 921925 - DNA, 15 bp, Homo sapiens
ttcctcctgaaaggc

SEQ ID NO: 921926 - DNA, 15 bp, Homo sapiens
tcctcctgaaaggca

SEQ ID NO: 921927 - DNA, 15 bp, Homo sapiens
cctcctgaaaggcag

SEQ ID NO: 921928 - DNA, 15 bp, Homo sapiens
ctcctgaaaggcaga

SEQ ID NO: 921929 - DNA, 15 bp, Homo sapiens
tcctgaaaggcagag

SEQ ID NO: 921930 - DNA, 15 bp, Homo sapiens
cctgaaaggcagagt

SEQ ID NO: 921931 - DNA, 15 bp, Homo sapiens
ctgaaaggcagagtg

SEQ ID NO: 921932 - DNA, 15 bp, Homo sapiens
tgaaaggcagagtgg

SEQ ID NO: 921933 - DNA, 15 bp, Homo sapiens
gaaaggcagagtggt

SEQ ID NO: 921934 - DNA, 15 bp, Homo sapiens
aaaggcagagtggtg

SEQ ID NO: 921935 - DNA, 15 bp, Homo sapiens
aaggcagagtggtga

SEQ ID NO: 921936 - DNA, 15 bp, Homo sapiens
aggcagagtggtgaa

SEQ ID NO: 921937 - DNA, 15 bp, Homo sapiens
ggcagagtggtgaag

SEQ ID NO: 921938 - DNA, 15 bp, Homo sapiens
gcagagtggtgaagt

SEQ ID NO: 921939 - DNA, 15 bp, Homo sapiens
cagagtggtgaagtg

SEQ ID NO: 921940 - DNA, 15 bp, Homo sapiens
agagtggtgaagtga

SEQ ID NO: 921941 - DNA, 15 bp, Homo sapiens
gagtggtgaagtgaa

SEQ ID NO: 921942 - DNA, 15 bp, Homo sapiens
agtggtgaagtgaag

SEQ ID NO: 921943 - DNA, 15 bp, Homo sapiens
gtggtgaagtgaagg

SEQ ID NO: 921944 - DNA, 15 bp, Homo sapiens
tggtgaagtgaaggg

SEQ ID NO: 921945 - DNA, 15 bp, Homo sapiens
ggtgaagtgaagggc

SEQ ID NO: 921946 - DNA, 15 bp, Homo sapiens
gtgaagtgaagggca

SEQ ID NO: 921947 - DNA, 15 bp, Homo sapiens
tgaagtgaagggcaa

SEQ ID NO: 921948 - DNA, 15 bp, Homo sapiens
gaagtgaagggcaaa

SEQ ID NO: 921949 - DNA, 15 bp, Homo sapiens
aagtgaagggcaaat

SEQ ID NO: 921950 - DNA, 15 bp, Homo sapiens
agtgaagggcaaatt

SEQ ID NO: 921951 - DNA, 15 bp, Homo sapiens
gtgaagggcaaattt

SEQ ID NO: 921952 - DNA, 15 bp, Homo sapiens
tgaagggcaaatttc

SEQ ID NO: 921953 - DNA, 15 bp, Homo sapiens
gaagggcaaatttct

SEQ ID NO: 921954 - DNA, 15 bp, Homo sapiens
aagggcaaatttctt

SEQ ID NO: 921955 - DNA, 15 bp, Homo sapiens
agggcaaatttctta

SEQ ID NO: 921956 - DNA, 15 bp, Homo sapiens
gggcaaatttcttat

SEQ ID NO: 921957 - DNA, 15 bp, Homo sapiens
ggcaaatttcttatt

SEQ ID NO: 921958 - DNA, 15 bp, Homo sapiens
gcaaatttcttatta

SEQ ID NO: 921959 - DNA, 15 bp, Homo sapiens
caaatttcttattag

SEQ ID NO: 921960 - DNA, 15 bp, Homo sapiens
aaatttcttattaga

SEQ ID NO: 921961 - DNA, 15 bp, Homo sapiens
aatttcttattagaa

SEQ ID NO: 921962 - DNA, 15 bp, Homo sapiens
atttcttattagaag

SEQ ID NO: 921963 - DNA, 15 bp, Homo sapiens
tttcttattagaagt

SEQ ID NO: 921964 - DNA, 15 bp, Homo sapiens
ttcttattagaagtc

SEQ ID NO: 921965 - DNA, 15 bp, Homo sapiens
tcttattagaagtct

SEQ ID NO: 921966 - DNA, 15 bp, Homo sapiens
cttattagaagtctg

SEQ ID NO: 921967 - DNA, 15 bp, Homo sapiens
ttattagaagtctga

SEQ ID NO: 921968 - DNA, 15 bp, Homo sapiens
tattagaagtctgag

SEQ ID NO: 921969 - DNA, 15 bp, Homo sapiens
attagaagtctgagg

SEQ ID NO: 921970 - DNA, 15 bp, Homo sapiens
ttagaagtctgaggc

SEQ ID NO: 921971 - DNA, 15 bp, Homo sapiens
tagaagtctgaggcg

SEQ ID NO: 921972 - DNA, 15 bp, Homo sapiens
agaagtctgaggcgc

SEQ ID NO: 921973 - DNA, 15 bp, Homo sapiens
gaagtctgaggcgct

SEQ ID NO: 921974 - DNA, 15 bp, Homo sapiens
aagtctgaggcgctg

SEQ ID NO: 921975 - DNA, 15 bp, Homo sapiens
agtctgaggcgctgg

SEQ ID NO: 921976 - DNA, 15 bp, Homo sapiens
gtctgaggcgctggg

SEQ ID NO: 921977 - DNA, 15 bp, Homo sapiens
tctgaggcgctgggt

SEQ ID NO: 921978 - DNA, 15 bp, Homo sapiens
ctgaggcgctgggta

SEQ ID NO: 921979 - DNA, 15 bp, Homo sapiens
tgaggcgctgggtaa

SEQ ID NO: 921980 - DNA, 15 bp, Homo sapiens
gaggcgctgggtaaa

SEQ ID NO: 921981 - DNA, 15 bp, Homo sapiens
aggcgctgggtaaag

SEQ ID NO: 921982 - DNA, 15 bp, Homo sapiens
ggcgctgggtaaagt

SEQ ID NO: 921983 - DNA, 15 bp, Homo sapiens
gcgctgggtaaagtt

SEQ ID NO: 921984 - DNA, 15 bp, Homo sapiens
cgctgggtaaagttc

SEQ ID NO: 921985 - DNA, 15 bp, Homo sapiens
gctgggtaaagttca

SEQ ID NO: 921986 - DNA, 15 bp, Homo sapiens
ctgggtaaagttcaa

SEQ ID NO: 921987 - DNA, 15 bp, Homo sapiens
tgggtaaagttcaag

SEQ ID NO: 921988 - DNA, 15 bp, Homo sapiens
gggtaaagttcaaga

SEQ ID NO: 921989 - DNA, 15 bp, Homo sapiens
ggtaaagttcaagag

SEQ ID NO: 921990 - DNA, 15 bp, Homo sapiens
gtaaagttcaagagg

SEQ ID NO: 921991 - DNA, 15 bp, Homo sapiens
taaagttcaagagga

SEQ ID NO: 921992 - DNA, 15 bp, Homo sapiens
aaagttcaagaggaa

SEQ ID NO: 921993 - DNA, 15 bp, Homo sapiens
aagttcaagaggaat

SEQ ID NO: 921994 - DNA, 15 bp, Homo sapiens
agttcaagaggaatc

SEQ ID NO: 921995 - DNA, 15 bp, Homo sapiens
gttcaagaggaatca

SEQ ID NO: 921996 - DNA, 15 bp, Homo sapiens
ttcaagaggaatcaa

SEQ ID NO: 921997 - DNA, 15 bp, Homo sapiens
tcaagaggaatcaaa

SEQ ID NO: 921998 - DNA, 15 bp, Homo sapiens
caagaggaatcaaag

SEQ ID NO: 921999 - DNA, 15 bp, Homo sapiens
aagaggaatcaaagc

SEQ ID NO: 922000 - DNA, 15 bp, Homo sapiens
agaggaatcaaagca

SEQ ID NO: 922001 - DNA, 15 bp, Homo sapiens
gaggaatcaaagcag

SEQ ID NO: 922002 - DNA, 15 bp, Homo sapiens
aggaatcaaagcagt

SEQ ID NO: 922003 - DNA, 15 bp, Homo sapiens
ggaatcaaagcagta

SEQ ID NO: 922004 - DNA, 15 bp, Homo sapiens
gaatcaaagcagtag

SEQ ID NO: 922005 - DNA, 15 bp, Homo sapiens
aatcaaagcagtagg

SEQ ID NO: 922006 - DNA, 15 bp, Homo sapiens
atcaaagcagtagga

SEQ ID NO: 922007 - DNA, 15 bp, Homo sapiens
tcaaagcagtaggat

SEQ ID NO: 922008 - DNA, 15 bp, Homo sapiens
caaagcagtaggatg

SEQ ID NO: 922009 - DNA, 15 bp, Homo sapiens
aaagcagtaggatgt

SEQ ID NO: 922010 - DNA, 15 bp, Homo sapiens
aagcagtaggatgtt

SEQ ID NO: 922011 - DNA, 15 bp, Homo sapiens
agcagtaggatgtta

SEQ ID NO: 922012 - DNA, 15 bp, Homo sapiens
gcagtaggatgttac

SEQ ID NO: 922013 - DNA, 15 bp, Homo sapiens
cagtaggatgttact

SEQ ID NO: 922014 - DNA, 15 bp, Homo sapiens
agtaggatgttactt

SEQ ID NO: 922015 - DNA, 15 bp, Homo sapiens
gtaggatgttacttg

SEQ ID NO: 922016 - DNA, 15 bp, Homo sapiens
taggatgttacttgg

SEQ ID NO: 922017 - DNA, 15 bp, Homo sapiens
aggatgttacttggt

SEQ ID NO: 922018 - DNA, 15 bp, Homo sapiens
ggatgttacttggtt

SEQ ID NO: 922019 - DNA, 15 bp, Homo sapiens
gatgttacttggttg

SEQ ID NO: 922020 - DNA, 15 bp, Homo sapiens
atgttacttggttgg

SEQ ID NO: 922021 - DNA, 15 bp, Homo sapiens
tgttacttggttggg

SEQ ID NO: 922022 - DNA, 15 bp, Homo sapiens
gttacttggttgggg

SEQ ID NO: 922023 - DNA, 15 bp, Homo sapiens
ttacttggttggggt

SEQ ID NO: 922024 - DNA, 15 bp, Homo sapiens
tacttggttggggtg

SEQ ID NO: 922025 - DNA, 15 bp, Homo sapiens
acttggttggggtga

SEQ ID NO: 922026 - DNA, 15 bp, Homo sapiens
cttggttggggtgag

SEQ ID NO: 922027 - DNA, 15 bp, Homo sapiens
ttggttggggtgaga

SEQ ID NO: 922028 - DNA, 15 bp, Homo sapiens
tggttggggtgagaa

SEQ ID NO: 922029 - DNA, 15 bp, Homo sapiens
ggttggggtgagaat

SEQ ID NO: 922030 - DNA, 15 bp, Homo sapiens
gttggggtgagaatg

SEQ ID NO: 922031 - DNA, 15 bp, Homo sapiens
ttggggtgagaatgg

SEQ ID NO: 922032 - DNA, 15 bp, Homo sapiens
tggggtgagaatggg

SEQ ID NO: 922033 - DNA, 15 bp, Homo sapiens
ggggtgagaatgggg

SEQ ID NO: 922034 - DNA, 15 bp, Homo sapiens
gggtgagaatggggt

SEQ ID NO: 922035 - DNA, 15 bp, Homo sapiens
ggtgagaatggggtg

SEQ ID NO: 922036 - DNA, 15 bp, Homo sapiens
gtgagaatggggtgg

SEQ ID NO: 922037 - DNA, 15 bp, Homo sapiens
tgagaatggggtggt

SEQ ID NO: 922038 - DNA, 15 bp, Homo sapiens
gagaatggggtggtt

SEQ ID NO: 922039 - DNA, 15 bp, Homo sapiens
agaatggggtggttg

SEQ ID NO: 922040 - DNA, 15 bp, Homo sapiens
gaatggggtggttgc

SEQ ID NO: 922041 - DNA, 15 bp, Homo sapiens
aatggggtggttgca

SEQ ID NO: 922042 - DNA, 15 bp, Homo sapiens
atggggtggttgcaa

SEQ ID NO: 922043 - DNA, 15 bp, Homo sapiens
tggggtggttgcaag

SEQ ID NO: 922044 - DNA, 15 bp, Homo sapiens
ggggtggttgcaagg

SEQ ID NO: 922045 - DNA, 15 bp, Homo sapiens
gggtggttgcaaggc

SEQ ID NO: 922046 - DNA, 15 bp, Homo sapiens
ggtggttgcaaggca

SEQ ID NO: 922047 - DNA, 15 bp, Homo sapiens
gtggttgcaaggcat

SEQ ID NO: 922048 - DNA, 15 bp, Homo sapiens
tggttgcaaggcata

SEQ ID NO: 922049 - DNA, 15 bp, Homo sapiens
ggttgcaaggcataa

SEQ ID NO: 922050 - DNA, 15 bp, Homo sapiens
gttgcaaggcataag

SEQ ID NO: 922051 - DNA, 15 bp, Homo sapiens
ttgcaaggcataaga

SEQ ID NO: 922052 - DNA, 15 bp, Homo sapiens
tgcaaggcataagag

SEQ ID NO: 922053 - DNA, 15 bp, Homo sapiens
gcaaggcataagagg

SEQ ID NO: 922054 - DNA, 15 bp, Homo sapiens
caaggcataagaggt

SEQ ID NO: 922055 - DNA, 15 bp, Homo sapiens
aaggcataagaggtg

SEQ ID NO: 922056 - DNA, 15 bp, Homo sapiens
aggcataagaggtgt

SEQ ID NO: 922057 - DNA, 15 bp, Homo sapiens
ggcataagaggtgtt

SEQ ID NO: 922058 - DNA, 15 bp, Homo sapiens
gcataagaggtgtta

SEQ ID NO: 922059 - DNA, 15 bp, Homo sapiens
cataagaggtgttat

SEQ ID NO: 922060 - DNA, 15 bp, Homo sapiens
ataagaggtgttata

SEQ ID NO: 922061 - DNA, 15 bp, Homo sapiens
taagaggtgttataa

SEQ ID NO: 922062 - DNA, 15 bp, Homo sapiens
aagaggtgttataat

SEQ ID NO: 922063 - DNA, 15 bp, Homo sapiens
agaggtgttataatc

SEQ ID NO: 922064 - DNA, 15 bp, Homo sapiens
gaggtgttataatca

SEQ ID NO: 922065 - DNA, 15 bp, Homo sapiens
aggtgttataatcag

SEQ ID NO: 922066 - DNA, 15 bp, Homo sapiens
ggtgttataatcaga

SEQ ID NO: 922067 - DNA, 15 bp, Homo sapiens
gtgttataatcagag

SEQ ID NO: 922068 - DNA, 15 bp, Homo sapiens
tgttataatcagaga

SEQ ID NO: 922069 - DNA, 15 bp, Homo sapiens
gttataatcagagag

SEQ ID NO: 922070 - DNA, 15 bp, Homo sapiens
ttataatcagagaga

SEQ ID NO: 922071 - DNA, 15 bp, Homo sapiens
tataatcagagagat

SEQ ID NO: 922072 - DNA, 15 bp, Homo sapiens
ataatcagagagatt

SEQ ID NO: 922073 - DNA, 15 bp, Homo sapiens
taatcagagagattg

SEQ ID NO: 922074 - DNA, 15 bp, Homo sapiens
aatcagagagattga

SEQ ID NO: 922075 - DNA, 15 bp, Homo sapiens
atcagagagattgaa

SEQ ID NO: 922076 - DNA, 15 bp, Homo sapiens
tcagagagattgaaa

SEQ ID NO: 922077 - DNA, 15 bp, Homo sapiens
cagagagattgaaaa

SEQ ID NO: 922078 - DNA, 15 bp, Homo sapiens
agagagattgaaaac

SEQ ID NO: 922079 - DNA, 15 bp, Homo sapiens
gagagattgaaaaca

SEQ ID NO: 922080 - DNA, 15 bp, Homo sapiens
agagattgaaaacaa

SEQ ID NO: 922081 - DNA, 15 bp, Homo sapiens
gagattgaaaacaac

SEQ ID NO: 922082 - DNA, 15 bp, Homo sapiens
agattgaaaacaaca

SEQ ID NO: 922083 - DNA, 15 bp, Homo sapiens
gattgaaaacaacat

SEQ ID NO: 922084 - DNA, 15 bp, Homo sapiens
attgaaaacaacata

SEQ ID NO: 922085 - DNA, 15 bp, Homo sapiens
ttgaaaacaacataa

SEQ ID NO: 922086 - DNA, 15 bp, Homo sapiens
tgaaaacaacataaa

SEQ ID NO: 922087 - DNA, 15 bp, Homo sapiens
gaaaacaacataaac

SEQ ID NO: 922088 - DNA, 15 bp, Homo sapiens
aaaacaacataaaca

SEQ ID NO: 922089 - DNA, 15 bp, Homo sapiens
aaacaacataaacag

SEQ ID NO: 922090 - DNA, 15 bp, Homo sapiens
aacaacataaacaga

SEQ ID NO: 922091 - DNA, 15 bp, Homo sapiens
acaacataaacagaa

SEQ ID NO: 922092 - DNA, 15 bp, Homo sapiens
caacataaacagaat

SEQ ID NO: 922093 - DNA, 15 bp, Homo sapiens
aacataaacagaatc

SEQ ID NO: 922094 - DNA, 15 bp, Homo sapiens
acataaacagaatcc

SEQ ID NO: 922095 - DNA, 15 bp, Homo sapiens
cataaacagaatcct

SEQ ID NO: 922096 - DNA, 15 bp, Homo sapiens
ataaacagaatcctg

SEQ ID NO: 922097 - DNA, 15 bp, Homo sapiens
taaacagaatcctgg

SEQ ID NO: 922098 - DNA, 15 bp, Homo sapiens
aaacagaatcctggt

SEQ ID NO: 922099 - DNA, 15 bp, Homo sapiens
aacagaatcctggtc

SEQ ID NO: 922100 - DNA, 15 bp, Homo sapiens
acagaatcctggtct

SEQ ID NO: 922101 - DNA, 15 bp, Homo sapiens
cagaatcctggtctg

SEQ ID NO: 922102 - DNA, 15 bp, Homo sapiens
agaatcctggtctgg

SEQ ID NO: 922103 - DNA, 15 bp, Homo sapiens
gaatcctggtctgga

SEQ ID NO: 922104 - DNA, 15 bp, Homo sapiens
aatcctggtctggaa

SEQ ID NO: 922105 - DNA, 15 bp, Homo sapiens
atcctggtctggaaa

SEQ ID NO: 922106 - DNA, 15 bp, Homo sapiens
tcctggtctggaaaa

SEQ ID NO: 922107 - DNA, 15 bp, Homo sapiens
cctggtctggaaaat

SEQ ID NO: 922108 - DNA, 15 bp, Homo sapiens
ctggtctggaaaatg

SEQ ID NO: 922109 - DNA, 15 bp, Homo sapiens
tggtctggaaaatga

SEQ ID NO: 922110 - DNA, 15 bp, Homo sapiens
ggtctggaaaatgag

SEQ ID NO: 922111 - DNA, 15 bp, Homo sapiens
gtctggaaaatgagg

SEQ ID NO: 922112 - DNA, 15 bp, Homo sapiens
tctggaaaatgaggt

SEQ ID NO: 922113 - DNA, 15 bp, Homo sapiens
ctggaaaatgaggtc

SEQ ID NO: 922114 - DNA, 15 bp, Homo sapiens
tggaaaatgaggtca

SEQ ID NO: 922115 - DNA, 15 bp, Homo sapiens
ggaaaatgaggtcac

SEQ ID NO: 922116 - DNA, 15 bp, Homo sapiens
gaaaatgaggtcacc

SEQ ID NO: 922117 - DNA, 15 bp, Homo sapiens
aaaatgaggtcacca

SEQ ID NO: 922118 - DNA, 15 bp, Homo sapiens
aaatgaggtcaccaa

SEQ ID NO: 922119 - DNA, 15 bp, Homo sapiens
aatgaggtcaccaat

SEQ ID NO: 922120 - DNA, 15 bp, Homo sapiens
atgaggtcaccaata

SEQ ID NO: 922121 - DNA, 15 bp, Homo sapiens
tgaggtcaccaatat

SEQ ID NO: 922122 - DNA, 15 bp, Homo sapiens
gaggtcaccaatatt

SEQ ID NO: 922123 - DNA, 15 bp, Homo sapiens
aggtcaccaatattc

SEQ ID NO: 922124 - DNA, 15 bp, Homo sapiens
ggtcaccaatattcc

SEQ ID NO: 922125 - DNA, 15 bp, Homo sapiens
gtcaccaatattcca

SEQ ID NO: 922126 - DNA, 15 bp, Homo sapiens
tcaccaatattccaa

SEQ ID NO: 922127 - DNA, 15 bp, Homo sapiens
caccaatattccaag

SEQ ID NO: 922128 - DNA, 15 bp, Homo sapiens
accaatattccaaga

SEQ ID NO: 922129 - DNA, 15 bp, Homo sapiens
ccaatattccaagat

SEQ ID NO: 922130 - DNA, 15 bp, Homo sapiens
caatattccaagatc

SEQ ID NO: 922131 - DNA, 15 bp, Homo sapiens
aatattccaagatca

SEQ ID NO: 922132 - DNA, 15 bp, Homo sapiens
atattccaagatcac

SEQ ID NO: 922133 - DNA, 15 bp, Homo sapiens
tattccaagatcaca

SEQ ID NO: 922134 - DNA, 15 bp, Homo sapiens
attccaagatcacaa

SEQ ID NO: 922135 - DNA, 15 bp, Homo sapiens
ttccaagatcacaat

SEQ ID NO: 922136 - DNA, 15 bp, Homo sapiens
tccaagatcacaatc

SEQ ID NO: 922137 - DNA, 15 bp, Homo sapiens
ccaagatcacaatca

SEQ ID NO: 922138 - DNA, 15 bp, Homo sapiens
caagatcacaatcat

SEQ ID NO: 922139 - DNA, 15 bp, Homo sapiens
aagatcacaatcatc

SEQ ID NO: 922140 - DNA, 15 bp, Homo sapiens
agatcacaatcatca

SEQ ID NO: 922141 - DNA, 15 bp, Homo sapiens
gatcacaatcatcat

SEQ ID NO: 922142 - DNA, 15 bp, Homo sapiens
atcacaatcatcatt

SEQ ID NO: 922143 - DNA, 15 bp, Homo sapiens
tcacaatcatcattg

SEQ ID NO: 922144 - DNA, 15 bp, Homo sapiens
cacaatcatcattgt

SEQ ID NO: 922145 - DNA, 15 bp, Homo sapiens
acaatcatcattgta

SEQ ID NO: 922146 - DNA, 15 bp, Homo sapiens
caatcatcattgtat

SEQ ID NO: 922147 - DNA, 15 bp, Homo sapiens
aatcatcattgtatt

SEQ ID NO: 922148 - DNA, 15 bp, Homo sapiens
atcatcattgtattt

SEQ ID NO: 922149 - DNA, 15 bp, Homo sapiens
tcatcattgtatttt

SEQ ID NO: 922150 - DNA, 15 bp, Homo sapiens
catcattgtattttg

SEQ ID NO: 922151 - DNA, 15 bp, Homo sapiens
atcattgtattttgt

SEQ ID NO: 922152 - DNA, 15 bp, Homo sapiens
tcattgtattttgtt

SEQ ID NO: 922153 - DNA, 15 bp, Homo sapiens
cattgtattttgtta

SEQ ID NO: 922154 - DNA, 15 bp, Homo sapiens
attgtattttgttat

SEQ ID NO: 922155 - DNA, 15 bp, Homo sapiens
ttgtattttgttatg

SEQ ID NO: 922156 - DNA, 15 bp, Homo sapiens
tgtattttgttatgt

SEQ ID NO: 922157 - DNA, 15 bp, Homo sapiens
gtattttgttatgta

SEQ ID NO: 922158 - DNA, 15 bp, Homo sapiens
tattttgttatgtaa

SEQ ID NO: 922159 - DNA, 15 bp, Homo sapiens
attttgttatgtaat

SEQ ID NO: 922160 - DNA, 15 bp, Homo sapiens
ttttgttatgtaata

SEQ ID NO: 922161 - DNA, 15 bp, Homo sapiens
tttgttatgtaatag

SEQ ID NO: 922162 - DNA, 15 bp, Homo sapiens
ttgttatgtaatagt

SEQ ID NO: 922163 - DNA, 15 bp, Homo sapiens
tgttatgtaatagtt

SEQ ID NO: 922164 - DNA, 15 bp, Homo sapiens
gttatgtaatagtta

SEQ ID NO: 922165 - DNA, 15 bp, Homo sapiens
ttatgtaatagttac

SEQ ID NO: 922166 - DNA, 15 bp, Homo sapiens
tatgtaatagttaca

SEQ ID NO: 922167 - DNA, 15 bp, Homo sapiens
atgtaatagttacag

SEQ ID NO: 922168 - DNA, 15 bp, Homo sapiens
tgtaatagttacaga

SEQ ID NO: 922169 - DNA, 15 bp, Homo sapiens
gtaatagttacagag

SEQ ID NO: 922170 - DNA, 15 bp, Homo sapiens
taatagttacagagt

SEQ ID NO: 922171 - DNA, 15 bp, Homo sapiens
aatagttacagagta

SEQ ID NO: 922172 - DNA, 15 bp, Homo sapiens
atagttacagagtac

SEQ ID NO: 922173 - DNA, 15 bp, Homo sapiens
tagttacagagtacc

SEQ ID NO: 922174 - DNA, 15 bp, Homo sapiens
agttacagagtacct

SEQ ID NO: 922175 - DNA, 15 bp, Homo sapiens
gttacagagtacctc

SEQ ID NO: 922176 - DNA, 15 bp, Homo sapiens
ttacagagtacctct

SEQ ID NO: 922177 - DNA, 15 bp, Homo sapiens
tacagagtacctctt

SEQ ID NO: 922178 - DNA, 15 bp, Homo sapiens
acagagtacctctta

SEQ ID NO: 922179 - DNA, 15 bp, Homo sapiens
cagagtacctcttat

SEQ ID NO: 922180 - DNA, 15 bp, Homo sapiens
agagtacctcttata

SEQ ID NO: 922181 - DNA, 15 bp, Homo sapiens
gagtacctcttatag

SEQ ID NO: 922182 - DNA, 15 bp, Homo sapiens
agtacctcttatagt

SEQ ID NO: 922183 - DNA, 15 bp, Homo sapiens
gtacctcttatagta

SEQ ID NO: 922184 - DNA, 15 bp, Homo sapiens
tacctcttatagtaa

SEQ ID NO: 922185 - DNA, 15 bp, Homo sapiens
acctcttatagtaaa

SEQ ID NO: 922186 - DNA, 15 bp, Homo sapiens
cctcttatagtaaaa

SEQ ID NO: 922187 - DNA, 15 bp, Homo sapiens
ctcttatagtaaaag

SEQ ID NO: 922188 - DNA, 15 bp, Homo sapiens
tcttatagtaaaagc

SEQ ID NO: 922189 - DNA, 15 bp, Homo sapiens
cttatagtaaaagct

SEQ ID NO: 922190 - DNA, 15 bp, Homo sapiens
ttatagtaaaagctt

SEQ ID NO: 922191 - DNA, 15 bp, Homo sapiens
tatagtaaaagcttt

SEQ ID NO: 922192 - DNA, 15 bp, Homo sapiens
atagtaaaagctttg

SEQ ID NO: 922193 - DNA, 15 bp, Homo sapiens
tagtaaaagctttgt

SEQ ID NO: 922194 - DNA, 15 bp, Homo sapiens
agtaaaagctttgtg

SEQ ID NO: 922195 - DNA, 15 bp, Homo sapiens
gtaaaagctttgtgc

SEQ ID NO: 922196 - DNA, 15 bp, Homo sapiens
taaaagctttgtgcc

SEQ ID NO: 922197 - DNA, 15 bp, Homo sapiens
aaaagctttgtgcca

SEQ ID NO: 922198 - DNA, 15 bp, Homo sapiens
aaagctttgtgccag

SEQ ID NO: 922199 - DNA, 15 bp, Homo sapiens
aagctttgtgccaga

SEQ ID NO: 922200 - DNA, 15 bp, Homo sapiens
agctttgtgccagac

SEQ ID NO: 922201 - DNA, 15 bp, Homo sapiens
gctttgtgccagaca

SEQ ID NO: 922202 - DNA, 15 bp, Homo sapiens
ctttgtgccagacac

SEQ ID NO: 922203 - DNA, 15 bp, Homo sapiens
tttgtgccagacaca

SEQ ID NO: 922204 - DNA, 15 bp, Homo sapiens
ttgtgccagacacac

SEQ ID NO: 922205 - DNA, 15 bp, Homo sapiens
tgtgccagacacaca

SEQ ID NO: 922206 - DNA, 15 bp, Homo sapiens
gtgccagacacacag

SEQ ID NO: 922207 - DNA, 15 bp, Homo sapiens
tgccagacacacaga

SEQ ID NO: 922208 - DNA, 15 bp, Homo sapiens
gccagacacacagat

SEQ ID NO: 922209 - DNA, 15 bp, Homo sapiens
ccagacacacagata

SEQ ID NO: 922210 - DNA, 15 bp, Homo sapiens
cagacacacagatac

SEQ ID NO: 922211 - DNA, 15 bp, Homo sapiens
agacacacagataca

SEQ ID NO: 922212 - DNA, 15 bp, Homo sapiens
gacacacagatacac

SEQ ID NO: 922213 - DNA, 15 bp, Homo sapiens
acacacagatacaca

SEQ ID NO: 922214 - DNA, 15 bp, Homo sapiens
cacacagatacacaa

SEQ ID NO: 922215 - DNA, 15 bp, Homo sapiens
acacagatacacaaa

SEQ ID NO: 922216 - DNA, 15 bp, Homo sapiens
cacagatacacaaag

SEQ ID NO: 922217 - DNA, 15 bp, Homo sapiens
acagatacacaaaga

SEQ ID NO: 922218 - DNA, 15 bp, Homo sapiens
cagatacacaaagat

SEQ ID NO: 922219 - DNA, 15 bp, Homo sapiens
agatacacaaagatc

SEQ ID NO: 922220 - DNA, 15 bp, Homo sapiens
gatacacaaagatca

SEQ ID NO: 922221 - DNA, 15 bp, Homo sapiens
atacacaaagatcaa

SEQ ID NO: 922222 - DNA, 15 bp, Homo sapiens
tacacaaagatcaat

SEQ ID NO: 922223 - DNA, 15 bp, Homo sapiens
acacaaagatcaata

SEQ ID NO: 922224 - DNA, 15 bp, Homo sapiens
cacaaagatcaataa

SEQ ID NO: 922225 - DNA, 15 bp, Homo sapiens
acaaagatcaataag

SEQ ID NO: 922226 - DNA, 15 bp, Homo sapiens
caaagatcaataaga

SEQ ID NO: 922227 - DNA, 15 bp, Homo sapiens
aaagatcaataagac

SEQ ID NO: 922228 - DNA, 15 bp, Homo sapiens
aagatcaataagaca

SEQ ID NO: 922229 - DNA, 15 bp, Homo sapiens
agatcaataagacaa

SEQ ID NO: 922230 - DNA, 15 bp, Homo sapiens
gatcaataagacaaa

SEQ ID NO: 922231 - DNA, 15 bp, Homo sapiens
atcaataagacaaac

SEQ ID NO: 922232 - DNA, 15 bp, Homo sapiens
tcaataagacaaact

SEQ ID NO: 922233 - DNA, 15 bp, Homo sapiens
caataagacaaactc

SEQ ID NO: 922234 - DNA, 15 bp, Homo sapiens
aataagacaaactcc

SEQ ID NO: 922235 - DNA, 15 bp, Homo sapiens
ataagacaaactcct

SEQ ID NO: 922236 - DNA, 15 bp, Homo sapiens
taagacaaactcctt

SEQ ID NO: 922237 - DNA, 15 bp, Homo sapiens
aagacaaactccttg

SEQ ID NO: 922238 - DNA, 15 bp, Homo sapiens
agacaaactccttga

SEQ ID NO: 922239 - DNA, 15 bp, Homo sapiens
gacaaactccttgac

SEQ ID NO: 922240 - DNA, 15 bp, Homo sapiens
acaaactccttgacc

SEQ ID NO: 922241 - DNA, 15 bp, Homo sapiens
caaactccttgacct

SEQ ID NO: 922242 - DNA, 15 bp, Homo sapiens
aaactccttgacctc

SEQ ID NO: 922243 - DNA, 15 bp, Homo sapiens
aactccttgacctca

SEQ ID NO: 922244 - DNA, 15 bp, Homo sapiens
actccttgacctcaa

SEQ ID NO: 922245 - DNA, 15 bp, Homo sapiens
ctccttgacctcaaa

SEQ ID NO: 922246 - DNA, 15 bp, Homo sapiens
tccttgacctcaaat

SEQ ID NO: 922247 - DNA, 15 bp, Homo sapiens
ccttgacctcaaata

SEQ ID NO: 922248 - DNA, 15 bp, Homo sapiens
cttgacctcaaataa

SEQ ID NO: 922249 - DNA, 15 bp, Homo sapiens
ttgacctcaaataaa

SEQ ID NO: 922250 - DNA, 15 bp, Homo sapiens
tgacctcaaataaat

SEQ ID NO: 922251 - DNA, 15 bp, Homo sapiens
gacctcaaataaata

SEQ ID NO: 922252 - DNA, 15 bp, Homo sapiens
acctcaaataaatac

SEQ ID NO: 922253 - DNA, 15 bp, Homo sapiens
cctcaaataaataca

SEQ ID NO: 922254 - DNA, 15 bp, Homo sapiens
ctcaaataaatacac

SEQ ID NO: 922255 - DNA, 15 bp, Homo sapiens
tcaaataaatacaca

SEQ ID NO: 922256 - DNA, 15 bp, Homo sapiens
caaataaatacacaa

SEQ ID NO: 922257 - DNA, 15 bp, Homo sapiens
aaataaatacacaat

SEQ ID NO: 922258 - DNA, 15 bp, Homo sapiens
aataaatacacaata

SEQ ID NO: 922259 - DNA, 15 bp, Homo sapiens
ataaatacacaataa

SEQ ID NO: 922260 - DNA, 15 bp, Homo sapiens
taaatacacaataaa

SEQ ID NO: 922261 - DNA, 15 bp, Homo sapiens
aaatacacaataaac

SEQ ID NO: 922262 - DNA, 15 bp, Homo sapiens
aatacacaataaaca

SEQ ID NO: 922263 - DNA, 15 bp, Homo sapiens
atacacaataaacac

SEQ ID NO: 922264 - DNA, 15 bp, Homo sapiens
tacacaataaacaca

SEQ ID NO: 922265 - DNA, 15 bp, Homo sapiens
acacaataaacacaa

SEQ ID NO: 922266 - DNA, 15 bp, Homo sapiens
cacaataaacacaaa

SEQ ID NO: 922267 - DNA, 15 bp, Homo sapiens
acaataaacacaaat

SEQ ID NO: 922268 - DNA, 15 bp, Homo sapiens
caataaacacaaata

SEQ ID NO: 922269 - DNA, 15 bp, Homo sapiens
aataaacacaaataa

SEQ ID NO: 922270 - DNA, 15 bp, Homo sapiens
ataaacacaaataat

SEQ ID NO: 922271 - DNA, 15 bp, Homo sapiens
taaacacaaataatt

SEQ ID NO: 922272 - DNA, 15 bp, Homo sapiens
aaacacaaataattc

SEQ ID NO: 922273 - DNA, 15 bp, Homo sapiens
aacacaaataattca

SEQ ID NO: 922274 - DNA, 15 bp, Homo sapiens
acacaaataattcaa

SEQ ID NO: 922275 - DNA, 15 bp, Homo sapiens
cacaaataattcaat

SEQ ID NO: 922276 - DNA, 15 bp, Homo sapiens
acaaataattcaata

SEQ ID NO: 922277 - DNA, 15 bp, Homo sapiens
caaataattcaataa

SEQ ID NO: 922278 - DNA, 15 bp, Homo sapiens
aaataattcaataaa

SEQ ID NO: 922279 - DNA, 15 bp, Homo sapiens
aataattcaataaat

SEQ ID NO: 922280 - DNA, 15 bp, Homo sapiens
ataattcaataaata

SEQ ID NO: 922281 - DNA, 15 bp, Homo sapiens
taattcaataaataa

SEQ ID NO: 922282 - DNA, 15 bp, Homo sapiens
aattcaataaataaa

SEQ ID NO: 922283 - DNA, 15 bp, Homo sapiens
attcaataaataaaa

SEQ ID NO: 922284 - DNA, 15 bp, Homo sapiens
ttcaataaataaaat

SEQ ID NO: 922285 - DNA, 15 bp, Homo sapiens
tcaataaataaaatg

SEQ ID NO: 922286 - DNA, 15 bp, Homo sapiens
caataaataaaatgt

SEQ ID NO: 922287 - DNA, 15 bp, Homo sapiens
aataaataaaatgtc

SEQ ID NO: 922288 - DNA, 15 bp, Homo sapiens
ataaataaaatgtca

SEQ ID NO: 922289 - DNA, 15 bp, Homo sapiens
taaataaaatgtcaa

SEQ ID NO: 922290 - DNA, 15 bp, Homo sapiens
aaataaaatgtcaag

SEQ ID NO: 922291 - DNA, 15 bp, Homo sapiens
aataaaatgtcaaga

SEQ ID NO: 922292 - DNA, 15 bp, Homo sapiens
ataaaatgtcaagaa

SEQ ID NO: 922293 - DNA, 15 bp, Homo sapiens
taaaatgtcaagaag

SEQ ID NO: 922294 - DNA, 15 bp, Homo sapiens
aaaatgtcaagaagg

SEQ ID NO: 922295 - DNA, 15 bp, Homo sapiens
aaatgtcaagaagga

SEQ ID NO: 922296 - DNA, 15 bp, Homo sapiens
aatgtcaagaaggag

SEQ ID NO: 922297 - DNA, 15 bp, Homo sapiens
atgtcaagaaggaga

SEQ ID NO: 922298 - DNA, 15 bp, Homo sapiens
tgtcaagaaggagaa

SEQ ID NO: 922299 - DNA, 15 bp, Homo sapiens
gtcaagaaggagaag

SEQ ID NO: 922300 - DNA, 15 bp, Homo sapiens
tcaagaaggagaagt

SEQ ID NO: 922301 - DNA, 15 bp, Homo sapiens
caagaaggagaagta

SEQ ID NO: 922302 - DNA, 15 bp, Homo sapiens
aagaaggagaagtag

SEQ ID NO: 922303 - DNA, 15 bp, Homo sapiens
agaaggagaagtagt

SEQ ID NO: 922304 - DNA, 15 bp, Homo sapiens
gaaggagaagtagta

SEQ ID NO: 922305 - DNA, 15 bp, Homo sapiens
aaggagaagtagtaa

SEQ ID NO: 922306 - DNA, 15 bp, Homo sapiens
aggagaagtagtaag

SEQ ID NO: 922307 - DNA, 15 bp, Homo sapiens
ggagaagtagtaagt

SEQ ID NO: 922308 - DNA, 15 bp, Homo sapiens
gagaagtagtaagtt

SEQ ID NO: 922309 - DNA, 15 bp, Homo sapiens
agaagtagtaagttt

SEQ ID NO: 922310 - DNA, 15 bp, Homo sapiens
gaagtagtaagtttg

SEQ ID NO: 922311 - DNA, 15 bp, Homo sapiens
aagtagtaagtttgt

SEQ ID NO: 922312 - DNA, 15 bp, Homo sapiens
agtagtaagtttgtg

SEQ ID NO: 922313 - DNA, 15 bp, Homo sapiens
gtagtaagtttgtgc

SEQ ID NO: 922314 - DNA, 15 bp, Homo sapiens
tagtaagtttgtgct

SEQ ID NO: 922315 - DNA, 15 bp, Homo sapiens
agtaagtttgtgctc

SEQ ID NO: 922316 - DNA, 15 bp, Homo sapiens
gtaagtttgtgctca

SEQ ID NO: 922317 - DNA, 15 bp, Homo sapiens
taagtttgtgctcat

SEQ ID NO: 922318 - DNA, 15 bp, Homo sapiens
aagtttgtgctcatg

SEQ ID NO: 922319 - DNA, 15 bp, Homo sapiens
agtttgtgctcatgg

SEQ ID NO: 922320 - DNA, 15 bp, Homo sapiens
gtttgtgctcatgga

SEQ ID NO: 922321 - DNA, 15 bp, Homo sapiens
tttgtgctcatggaa

SEQ ID NO: 922322 - DNA, 15 bp, Homo sapiens
ttgtgctcatggaaa

SEQ ID NO: 922323 - DNA, 15 bp, Homo sapiens
tgtgctcatggaaat

SEQ ID NO: 922324 - DNA, 15 bp, Homo sapiens
gtgctcatggaaatg

SEQ ID NO: 922325 - DNA, 15 bp, Homo sapiens
tgctcatggaaatga

SEQ ID NO: 922326 - DNA, 15 bp, Homo sapiens
gctcatggaaatgaa

SEQ ID NO: 922327 - DNA, 15 bp, Homo sapiens
ctcatggaaatgaat

SEQ ID NO: 922328 - DNA, 15 bp, Homo sapiens
tcatggaaatgaata

SEQ ID NO: 922329 - DNA, 15 bp, Homo sapiens
catggaaatgaatag

SEQ ID NO: 922330 - DNA, 15 bp, Homo sapiens
atggaaatgaatagt

SEQ ID NO: 922331 - DNA, 15 bp, Homo sapiens
tggaaatgaatagtc

SEQ ID NO: 922332 - DNA, 15 bp, Homo sapiens
ggaaatgaatagtca

SEQ ID NO: 922333 - DNA, 15 bp, Homo sapiens
gaaatgaatagtcaa

SEQ ID NO: 922334 - DNA, 15 bp, Homo sapiens
aaatgaatagtcaac

SEQ ID NO: 922335 - DNA, 15 bp, Homo sapiens
aatgaatagtcaacc

SEQ ID NO: 922336 - DNA, 15 bp, Homo sapiens
atgaatagtcaacca

SEQ ID NO: 922337 - DNA, 15 bp, Homo sapiens
tgaatagtcaaccag

SEQ ID NO: 922338 - DNA, 15 bp, Homo sapiens
gaatagtcaaccaga

SEQ ID NO: 922339 - DNA, 15 bp, Homo sapiens
aatagtcaaccagaa

SEQ ID NO: 922340 - DNA, 15 bp, Homo sapiens
atagtcaaccagaag

SEQ ID NO: 922341 - DNA, 15 bp, Homo sapiens
tagtcaaccagaagt

SEQ ID NO: 922342 - DNA, 15 bp, Homo sapiens
agtcaaccagaagtt

SEQ ID NO: 922343 - DNA, 15 bp, Homo sapiens
gtcaaccagaagttt

SEQ ID NO: 922344 - DNA, 15 bp, Homo sapiens
tcaaccagaagtttc

SEQ ID NO: 922345 - DNA, 15 bp, Homo sapiens
caaccagaagtttcc

SEQ ID NO: 922346 - DNA, 15 bp, Homo sapiens
aaccagaagtttcca

SEQ ID NO: 922347 - DNA, 15 bp, Homo sapiens
accagaagtttccaa

SEQ ID NO: 922348 - DNA, 15 bp, Homo sapiens
ccagaagtttccaaa

SEQ ID NO: 922349 - DNA, 15 bp, Homo sapiens
cagaagtttccaaat

SEQ ID NO: 922350 - DNA, 15 bp, Homo sapiens
agaagtttccaaatg

SEQ ID NO: 922351 - DNA, 15 bp, Homo sapiens
gaagtttccaaatgg

SEQ ID NO: 922352 - DNA, 15 bp, Homo sapiens
aagtttccaaatgga

SEQ ID NO: 922353 - DNA, 15 bp, Homo sapiens
agtttccaaatggaa

SEQ ID NO: 922354 - DNA, 15 bp, Homo sapiens
gtttccaaatggaac

SEQ ID NO: 922355 - DNA, 15 bp, Homo sapiens
tttccaaatggaact

SEQ ID NO: 922356 - DNA, 15 bp, Homo sapiens
ttccaaatggaactt

SEQ ID NO: 922357 - DNA, 15 bp, Homo sapiens
tccaaatggaacttc

SEQ ID NO: 922358 - DNA, 15 bp, Homo sapiens
ccaaatggaacttcc

SEQ ID NO: 922359 - DNA, 15 bp, Homo sapiens
caaatggaacttcct

SEQ ID NO: 922360 - DNA, 15 bp, Homo sapiens
aaatggaacttcctc

SEQ ID NO: 922361 - DNA, 15 bp, Homo sapiens
aatggaacttcctca

SEQ ID NO: 922362 - DNA, 15 bp, Homo sapiens
atggaacttcctcat

SEQ ID NO: 922363 - DNA, 15 bp, Homo sapiens
tggaacttcctcatt

SEQ ID NO: 922364 - DNA, 15 bp, Homo sapiens
ggaacttcctcatta

SEQ ID NO: 922365 - DNA, 15 bp, Homo sapiens
gaacttcctcattaa

SEQ ID NO: 922366 - DNA, 15 bp, Homo sapiens
aacttcctcattaag

SEQ ID NO: 922367 - DNA, 15 bp, Homo sapiens
acttcctcattaagt

SEQ ID NO: 922368 - DNA, 15 bp, Homo sapiens
cttcctcattaagtt

SEQ ID NO: 922369 - DNA, 15 bp, Homo sapiens
ttcctcattaagttt

SEQ ID NO: 922370 - DNA, 15 bp, Homo sapiens
tcctcattaagtttg

SEQ ID NO: 922371 - DNA, 15 bp, Homo sapiens
cctcattaagtttgg

SEQ ID NO: 922372 - DNA, 15 bp, Homo sapiens
ctcattaagtttggg

SEQ ID NO: 922373 - DNA, 15 bp, Homo sapiens
tcattaagtttgggc

SEQ ID NO: 922374 - DNA, 15 bp, Homo sapiens
cattaagtttgggcc

SEQ ID NO: 922375 - DNA, 15 bp, Homo sapiens
attaagtttgggccc

SEQ ID NO: 922376 - DNA, 15 bp, Homo sapiens
ttaagtttgggccca

SEQ ID NO: 922377 - DNA, 15 bp, Homo sapiens
taagtttgggcccat

SEQ ID NO: 922378 - DNA, 15 bp, Homo sapiens
aagtttgggcccatt

SEQ ID NO: 922379 - DNA, 15 bp, Homo sapiens
agtttgggcccattt

SEQ ID NO: 922380 - DNA, 15 bp, Homo sapiens
gtttgggcccattta

SEQ ID NO: 922381 - DNA, 15 bp, Homo sapiens
tttgggcccatttag

SEQ ID NO: 922382 - DNA, 15 bp, Homo sapiens
ttgggcccatttaga

SEQ ID NO: 922383 - DNA, 15 bp, Homo sapiens
tgggcccatttagag

SEQ ID NO: 922384 - DNA, 15 bp, Homo sapiens
gggcccatttagagt

SEQ ID NO: 922385 - DNA, 15 bp, Homo sapiens
ggcccatttagagta

SEQ ID NO: 922386 - DNA, 15 bp, Homo sapiens
gcccatttagagtaa

SEQ ID NO: 922387 - DNA, 15 bp, Homo sapiens
cccatttagagtaag

SEQ ID NO: 922388 - DNA, 15 bp, Homo sapiens
ccatttagagtaagg

SEQ ID NO: 922389 - DNA, 15 bp, Homo sapiens
catttagagtaaggc

SEQ ID NO: 922390 - DNA, 15 bp, Homo sapiens
atttagagtaaggca

SEQ ID NO: 922391 - DNA, 15 bp, Homo sapiens
tttagagtaaggcaa

SEQ ID NO: 922392 - DNA, 15 bp, Homo sapiens
ttagagtaaggcaaa

SEQ ID NO: 922393 - DNA, 15 bp, Homo sapiens
tagagtaaggcaaaa

SEQ ID NO: 922394 - DNA, 15 bp, Homo sapiens
agagtaaggcaaaat

SEQ ID NO: 922395 - DNA, 15 bp, Homo sapiens
gagtaaggcaaaatg

SEQ ID NO: 922396 - DNA, 15 bp, Homo sapiens
agtaaggcaaaatgc

SEQ ID NO: 922397 - DNA, 15 bp, Homo sapiens
gtaaggcaaaatgcc

SEQ ID NO: 922398 - DNA, 15 bp, Homo sapiens
taaggcaaaatgccc

SEQ ID NO: 922399 - DNA, 15 bp, Homo sapiens
aaggcaaaatgccct

SEQ ID NO: 922400 - DNA, 15 bp, Homo sapiens
aggcaaaatgcccta

SEQ ID NO: 922401 - DNA, 15 bp, Homo sapiens
ggcaaaatgccctac

SEQ ID NO: 922402 - DNA, 15 bp, Homo sapiens
gcaaaatgccctaca

SEQ ID NO: 922403 - DNA, 15 bp, Homo sapiens
caaaatgccctacat

SEQ ID NO: 922404 - DNA, 15 bp, Homo sapiens
aaaatgccctacata

SEQ ID NO: 922405 - DNA, 15 bp, Homo sapiens
aaatgccctacatac

SEQ ID NO: 922406 - DNA, 15 bp, Homo sapiens
aatgccctacatacc

SEQ ID NO: 922407 - DNA, 15 bp, Homo sapiens
atgccctacatacct

SEQ ID NO: 922408 - DNA, 15 bp, Homo sapiens
tgccctacatacctc

SEQ ID NO: 922409 - DNA, 15 bp, Homo sapiens
gccctacatacctcc

SEQ ID NO: 922410 - DNA, 15 bp, Homo sapiens
ccctacatacctcca

SEQ ID NO: 922411 - DNA, 15 bp, Homo sapiens
cctacatacctccat

SEQ ID NO: 922412 - DNA, 15 bp, Homo sapiens
ctacatacctccata

SEQ ID NO: 922413 - DNA, 15 bp, Homo sapiens
tacatacctccatac

SEQ ID NO: 922414 - DNA, 15 bp, Homo sapiens
acatacctccatact

SEQ ID NO: 922415 - DNA, 15 bp, Homo sapiens
catacctccatactt

SEQ ID NO: 922416 - DNA, 15 bp, Homo sapiens
atacctccatacttt

SEQ ID NO: 922417 - DNA, 15 bp, Homo sapiens
tacctccatactttc

SEQ ID NO: 922418 - DNA, 15 bp, Homo sapiens
acctccatactttca

SEQ ID NO: 922419 - DNA, 15 bp, Homo sapiens
cctccatactttcaa

SEQ ID NO: 922420 - DNA, 15 bp, Homo sapiens
ctccatactttcaaa

SEQ ID NO: 922421 - DNA, 15 bp, Homo sapiens
tccatactttcaaag

SEQ ID NO: 922422 - DNA, 15 bp, Homo sapiens
ccatactttcaaagg

SEQ ID NO: 922423 - DNA, 15 bp, Homo sapiens
catactttcaaaggg

SEQ ID NO: 922424 - DNA, 15 bp, Homo sapiens
atactttcaaagggc

SEQ ID NO: 922425 - DNA, 15 bp, Homo sapiens
tactttcaaagggca

SEQ ID NO: 922426 - DNA, 15 bp, Homo sapiens
actttcaaagggcat

SEQ ID NO: 922427 - DNA, 15 bp, Homo sapiens
ctttcaaagggcatt

SEQ ID NO: 922428 - DNA, 15 bp, Homo sapiens
tttcaaagggcattt

SEQ ID NO: 922429 - DNA, 15 bp, Homo sapiens
ttcaaagggcatttc

SEQ ID NO: 922430 - DNA, 15 bp, Homo sapiens
tcaaagggcatttct

SEQ ID NO: 922431 - DNA, 15 bp, Homo sapiens
caaagggcatttctg

SEQ ID NO: 922432 - DNA, 15 bp, Homo sapiens
aaagggcatttctgc

SEQ ID NO: 922433 - DNA, 15 bp, Homo sapiens
aagggcatttctgca

SEQ ID NO: 922434 - DNA, 15 bp, Homo sapiens
agggcatttctgcag

SEQ ID NO: 922435 - DNA, 15 bp, Homo sapiens
gggcatttctgcagt

SEQ ID NO: 922436 - DNA, 15 bp, Homo sapiens
ggcatttctgcagta

SEQ ID NO: 922437 - DNA, 15 bp, Homo sapiens
gcatttctgcagtac

SEQ ID NO: 922438 - DNA, 15 bp, Homo sapiens
catttctgcagtaca

SEQ ID NO: 922439 - DNA, 15 bp, Homo sapiens
atttctgcagtacaa

SEQ ID NO: 922440 - DNA, 15 bp, Homo sapiens
tttctgcagtacaaa

SEQ ID NO: 922441 - DNA, 15 bp, Homo sapiens
ttctgcagtacaaac

SEQ ID NO: 922442 - DNA, 15 bp, Homo sapiens
tctgcagtacaaact

SEQ ID NO: 922443 - DNA, 15 bp, Homo sapiens
ctgcagtacaaacta

SEQ ID NO: 922444 - DNA, 15 bp, Homo sapiens
tgcagtacaaactac

SEQ ID NO: 922445 - DNA, 15 bp, Homo sapiens
gcagtacaaactaca

SEQ ID NO: 922446 - DNA, 15 bp, Homo sapiens
cagtacaaactacag

SEQ ID NO: 922447 - DNA, 15 bp, Homo sapiens
agtacaaactacagt

SEQ ID NO: 922448 - DNA, 15 bp, Homo sapiens
gtacaaactacagta

SEQ ID NO: 922449 - DNA, 15 bp, Homo sapiens
tacaaactacagtaa

SEQ ID NO: 922450 - DNA, 15 bp, Homo sapiens
acaaactacagtaaa

SEQ ID NO: 922451 - DNA, 15 bp, Homo sapiens
caaactacagtaaac

SEQ ID NO: 922452 - DNA, 15 bp, Homo sapiens
aaactacagtaaaca

SEQ ID NO: 922453 - DNA, 15 bp, Homo sapiens
aactacagtaaacag

SEQ ID NO: 922454 - DNA, 15 bp, Homo sapiens
actacagtaaacagt

SEQ ID NO: 922455 - DNA, 15 bp, Homo sapiens
ctacagtaaacagta

SEQ ID NO: 922456 - DNA, 15 bp, Homo sapiens
tacagtaaacagtat

SEQ ID NO: 922457 - DNA, 15 bp, Homo sapiens
acagtaaacagtata

SEQ ID NO: 922458 - DNA, 15 bp, Homo sapiens
cagtaaacagtatag

SEQ ID NO: 922459 - DNA, 15 bp, Homo sapiens
agtaaacagtatagg

SEQ ID NO: 922460 - DNA, 15 bp, Homo sapiens
gtaaacagtataggc

SEQ ID NO: 922461 - DNA, 15 bp, Homo sapiens
taaacagtataggct

SEQ ID NO: 922462 - DNA, 15 bp, Homo sapiens
aaacagtataggcta

SEQ ID NO: 922463 - DNA, 15 bp, Homo sapiens
aacagtataggctag

SEQ ID NO: 922464 - DNA, 15 bp, Homo sapiens
acagtataggctagt

SEQ ID NO: 922465 - DNA, 15 bp, Homo sapiens
cagtataggctagtg

SEQ ID NO: 922466 - DNA, 15 bp, Homo sapiens
agtataggctagtga

SEQ ID NO: 922467 - DNA, 15 bp, Homo sapiens
gtataggctagtgat

SEQ ID NO: 922468 - DNA, 15 bp, Homo sapiens
tataggctagtgatg

SEQ ID NO: 922469 - DNA, 15 bp, Homo sapiens
ataggctagtgatgg

SEQ ID NO: 922470 - DNA, 15 bp, Homo sapiens
taggctagtgatggt

SEQ ID NO: 922471 - DNA, 15 bp, Homo sapiens
aggctagtgatggtt

SEQ ID NO: 922472 - DNA, 15 bp, Homo sapiens
ggctagtgatggttc

SEQ ID NO: 922473 - DNA, 15 bp, Homo sapiens
gctagtgatggttct

SEQ ID NO: 922474 - DNA, 15 bp, Homo sapiens
ctagtgatggttctt

SEQ ID NO: 922475 - DNA, 15 bp, Homo sapiens
tagtgatggttctta

SEQ ID NO: 922476 - DNA, 15 bp, Homo sapiens
agtgatggttcttag

SEQ ID NO: 922477 - DNA, 15 bp, Homo sapiens
gtgatggttcttaga

SEQ ID NO: 922478 - DNA, 15 bp, Homo sapiens
tgatggttcttagat

SEQ ID NO: 922479 - DNA, 15 bp, Homo sapiens
gatggttcttagatc

SEQ ID NO: 922480 - DNA, 15 bp, Homo sapiens
atggttcttagatct

SEQ ID NO: 922481 - DNA, 15 bp, Homo sapiens
tggttcttagatctg

SEQ ID NO: 922482 - DNA, 15 bp, Homo sapiens
ggttcttagatctgg

SEQ ID NO: 922483 - DNA, 15 bp, Homo sapiens
gttcttagatctggt

SEQ ID NO: 922484 - DNA, 15 bp, Homo sapiens
ttcttagatctggta

SEQ ID NO: 922485 - DNA, 15 bp, Homo sapiens
tcttagatctggtaa

SEQ ID NO: 922486 - DNA, 15 bp, Homo sapiens
cttagatctggtaag

SEQ ID NO: 922487 - DNA, 15 bp, Homo sapiens
ttagatctggtaaga

SEQ ID NO: 922488 - DNA, 15 bp, Homo sapiens
tagatctggtaagat

SEQ ID NO: 922489 - DNA, 15 bp, Homo sapiens
agatctggtaagatg

SEQ ID NO: 922490 - DNA, 15 bp, Homo sapiens
gatctggtaagatga

SEQ ID NO: 922491 - DNA, 15 bp, Homo sapiens
atctggtaagatgag

SEQ ID NO: 922492 - DNA, 15 bp, Homo sapiens
tctggtaagatgaga

SEQ ID NO: 922493 - DNA, 15 bp, Homo sapiens
ctggtaagatgagat

SEQ ID NO: 922494 - DNA, 15 bp, Homo sapiens
tggtaagatgagatc

SEQ ID NO: 922495 - DNA, 15 bp, Homo sapiens
ggtaagatgagatca

SEQ ID NO: 922496 - DNA, 15 bp, Homo sapiens
gtaagatgagatcat

SEQ ID NO: 922497 - DNA, 15 bp, Homo sapiens
taagatgagatcatg

SEQ ID NO: 922498 - DNA, 15 bp, Homo sapiens
aagatgagatcatgt

SEQ ID NO: 922499 - DNA, 15 bp, Homo sapiens
agatgagatcatgtt

SEQ ID NO: 922500 - DNA, 15 bp, Homo sapiens
gatgagatcatgttt

SEQ ID NO: 922501 - DNA, 15 bp, Homo sapiens
atgagatcatgttta

SEQ ID NO: 922502 - DNA, 15 bp, Homo sapiens
tgagatcatgtttaa

SEQ ID NO: 922503 - DNA, 15 bp, Homo sapiens
gagatcatgtttaat

SEQ ID NO: 922504 - DNA, 15 bp, Homo sapiens
agatcatgtttaatg

SEQ ID NO: 922505 - DNA, 15 bp, Homo sapiens
gatcatgtttaatgt

SEQ ID NO: 922506 - DNA, 15 bp, Homo sapiens
atcatgtttaatgta

SEQ ID NO: 922507 - DNA, 15 bp, Homo sapiens
tcatgtttaatgtac

SEQ ID NO: 922508 - DNA, 15 bp, Homo sapiens
catgtttaatgtact

SEQ ID NO: 922509 - DNA, 15 bp, Homo sapiens
atgtttaatgtactg

SEQ ID NO: 922510 - DNA, 15 bp, Homo sapiens
tgtttaatgtactgc

SEQ ID NO: 922511 - DNA, 15 bp, Homo sapiens
gtttaatgtactgcc

SEQ ID NO: 922512 - DNA, 15 bp, Homo sapiens
tttaatgtactgcca

SEQ ID NO: 922513 - DNA, 15 bp, Homo sapiens
ttaatgtactgccaa

SEQ ID NO: 922514 - DNA, 15 bp, Homo sapiens
taatgtactgccaat

SEQ ID NO: 922515 - DNA, 15 bp, Homo sapiens
aatgtactgccaatg

SEQ ID NO: 922516 - DNA, 15 bp, Homo sapiens
atgtactgccaatgt

SEQ ID NO: 922517 - DNA, 15 bp, Homo sapiens
tgtactgccaatgtt

SEQ ID NO: 922518 - DNA, 15 bp, Homo sapiens
gtactgccaatgtta

SEQ ID NO: 922519 - DNA, 15 bp, Homo sapiens
tactgccaatgttac

SEQ ID NO: 922520 - DNA, 15 bp, Homo sapiens
actgccaatgttacc

SEQ ID NO: 922521 - DNA, 15 bp, Homo sapiens
ctgccaatgttacct

SEQ ID NO: 922522 - DNA, 15 bp, Homo sapiens
tgccaatgttacctg

SEQ ID NO: 922523 - DNA, 15 bp, Homo sapiens
gccaatgttacctga

SEQ ID NO: 922524 - DNA, 15 bp, Homo sapiens
ccaatgttacctgac

SEQ ID NO: 922525 - DNA, 15 bp, Homo sapiens
caatgttacctgaca

SEQ ID NO: 922526 - DNA, 15 bp, Homo sapiens
aatgttacctgacac

SEQ ID NO: 922527 - DNA, 15 bp, Homo sapiens
atgttacctgacacc

SEQ ID NO: 922528 - DNA, 15 bp, Homo sapiens
tgttacctgacacca

SEQ ID NO: 922529 - DNA, 15 bp, Homo sapiens
gttacctgacaccac

SEQ ID NO: 922530 - DNA, 15 bp, Homo sapiens
ttacctgacaccacc

SEQ ID NO: 922531 - DNA, 15 bp, Homo sapiens
tacctgacaccacca

SEQ ID NO: 922532 - DNA, 15 bp, Homo sapiens
acctgacaccaccaa

SEQ ID NO: 922533 - DNA, 15 bp, Homo sapiens
cctgacaccaccaac

SEQ ID NO: 922534 - DNA, 15 bp, Homo sapiens
ctgacaccaccaaca

SEQ ID NO: 922535 - DNA, 15 bp, Homo sapiens
tgacaccaccaacag

SEQ ID NO: 922536 - DNA, 15 bp, Homo sapiens
gacaccaccaacaga

SEQ ID NO: 922537 - DNA, 15 bp, Homo sapiens
acaccaccaacagac

SEQ ID NO: 922538 - DNA, 15 bp, Homo sapiens
caccaccaacagact

SEQ ID NO: 922539 - DNA, 15 bp, Homo sapiens
accaccaacagactc

SEQ ID NO: 922540 - DNA, 15 bp, Homo sapiens
ccaccaacagactca

SEQ ID NO: 922541 - DNA, 15 bp, Homo sapiens
caccaacagactcac

SEQ ID NO: 922542 - DNA, 15 bp, Homo sapiens
accaacagactcaca

SEQ ID NO: 922543 - DNA, 15 bp, Homo sapiens
ccaacagactcacag

SEQ ID NO: 922544 - DNA, 15 bp, Homo sapiens
caacagactcacagt

SEQ ID NO: 922545 - DNA, 15 bp, Homo sapiens
aacagactcacagtt

SEQ ID NO: 922546 - DNA, 15 bp, Homo sapiens
acagactcacagtta

SEQ ID NO: 922547 - DNA, 15 bp, Homo sapiens
cagactcacagttac

SEQ ID NO: 922548 - DNA, 15 bp, Homo sapiens
agactcacagttaca

SEQ ID NO: 922549 - DNA, 15 bp, Homo sapiens
gactcacagttacag

SEQ ID NO: 922550 - DNA, 15 bp, Homo sapiens
actcacagttacagt

SEQ ID NO: 922551 - DNA, 15 bp, Homo sapiens
ctcacagttacagtc

SEQ ID NO: 922552 - DNA, 15 bp, Homo sapiens
tcacagttacagtca

SEQ ID NO: 922553 - DNA, 15 bp, Homo sapiens
cacagttacagtcat

SEQ ID NO: 922554 - DNA, 15 bp, Homo sapiens
acagttacagtcatg

SEQ ID NO: 922555 - DNA, 15 bp, Homo sapiens
cagttacagtcatgc

SEQ ID NO: 922556 - DNA, 15 bp, Homo sapiens
agttacagtcatgcc

SEQ ID NO: 922557 - DNA, 15 bp, Homo sapiens
gttacagtcatgccc

SEQ ID NO: 922558 - DNA, 15 bp, Homo sapiens
ttacagtcatgccca

SEQ ID NO: 922559 - DNA, 15 bp, Homo sapiens
tacagtcatgcccaa

SEQ ID NO: 922560 - DNA, 15 bp, Homo sapiens
acagtcatgcccaat

SEQ ID NO: 922561 - DNA, 15 bp, Homo sapiens
cagtcatgcccaatg

SEQ ID NO: 922562 - DNA, 15 bp, Homo sapiens
agtcatgcccaatga

SEQ ID NO: 922563 - DNA, 15 bp, Homo sapiens
gtcatgcccaatgac

SEQ ID NO: 922564 - DNA, 15 bp, Homo sapiens
tcatgcccaatgaca

SEQ ID NO: 922565 - DNA, 15 bp, Homo sapiens
catgcccaatgacag

SEQ ID NO: 922566 - DNA, 15 bp, Homo sapiens
atgcccaatgacagt

SEQ ID NO: 922567 - DNA, 15 bp, Homo sapiens
tgcccaatgacagtt

SEQ ID NO: 922568 - DNA, 15 bp, Homo sapiens
gcccaatgacagtta

SEQ ID NO: 922569 - DNA, 15 bp, Homo sapiens
cccaatgacagttat

SEQ ID NO: 922570 - DNA, 15 bp, Homo sapiens
ccaatgacagttatg

SEQ ID NO: 922571 - DNA, 15 bp, Homo sapiens
caatgacagttatga

SEQ ID NO: 922572 - DNA, 15 bp, Homo sapiens
aatgacagttatgaa

SEQ ID NO: 922573 - DNA, 15 bp, Homo sapiens
atgacagttatgaat

SEQ ID NO: 922574 - DNA, 15 bp, Homo sapiens
tgacagttatgaatc

SEQ ID NO: 922575 - DNA, 15 bp, Homo sapiens
gacagttatgaatct

SEQ ID NO: 922576 - DNA, 15 bp, Homo sapiens
acagttatgaatctc

SEQ ID NO: 922577 - DNA, 15 bp, Homo sapiens
cagttatgaatctcc

SEQ ID NO: 922578 - DNA, 15 bp, Homo sapiens
agttatgaatctcca

SEQ ID NO: 922579 - DNA, 15 bp, Homo sapiens
gttatgaatctccag

SEQ ID NO: 922580 - DNA, 15 bp, Homo sapiens
ttatgaatctccagt

SEQ ID NO: 922581 - DNA, 15 bp, Homo sapiens
tatgaatctccagtg

SEQ ID NO: 922582 - DNA, 15 bp, Homo sapiens
atgaatctccagtgc

SEQ ID NO: 922583 - DNA, 15 bp, Homo sapiens
tgaatctccagtgct

SEQ ID NO: 922584 - DNA, 15 bp, Homo sapiens
gaatctccagtgcta

SEQ ID NO: 922585 - DNA, 15 bp, Homo sapiens
aatctccagtgctaa

SEQ ID NO: 922586 - DNA, 15 bp, Homo sapiens
atctccagtgctaaa

SEQ ID NO: 922587 - DNA, 15 bp, Homo sapiens
tctccagtgctaaag

SEQ ID NO: 922588 - DNA, 15 bp, Homo sapiens
ctccagtgctaaagg

SEQ ID NO: 922589 - DNA, 15 bp, Homo sapiens
tccagtgctaaagga

SEQ ID NO: 922590 - DNA, 15 bp, Homo sapiens
ccagtgctaaaggaa

SEQ ID NO: 922591 - DNA, 15 bp, Homo sapiens
cagtgctaaaggaag

SEQ ID NO: 922592 - DNA, 15 bp, Homo sapiens
agtgctaaaggaaga

SEQ ID NO: 922593 - DNA, 15 bp, Homo sapiens
gtgctaaaggaagaa

SEQ ID NO: 922594 - DNA, 15 bp, Homo sapiens
tgctaaaggaagaac

SEQ ID NO: 922595 - DNA, 15 bp, Homo sapiens
gctaaaggaagaact

SEQ ID NO: 922596 - DNA, 15 bp, Homo sapiens
ctaaaggaagaactc

SEQ ID NO: 922597 - DNA, 15 bp, Homo sapiens
taaaggaagaactca

SEQ ID NO: 922598 - DNA, 15 bp, Homo sapiens
aaaggaagaactcac

SEQ ID NO: 922599 - DNA, 15 bp, Homo sapiens
aaggaagaactcacc

SEQ ID NO: 922600 - DNA, 15 bp, Homo sapiens
aggaagaactcaccc

SEQ ID NO: 922601 - DNA, 15 bp, Homo sapiens
ggaagaactcaccct

SEQ ID NO: 922602 - DNA, 15 bp, Homo sapiens
gaagaactcaccctg

SEQ ID NO: 922603 - DNA, 15 bp, Homo sapiens
aagaactcaccctgc

SEQ ID NO: 922604 - DNA, 15 bp, Homo sapiens
agaactcaccctgcc

SEQ ID NO: 922605 - DNA, 15 bp, Homo sapiens
gaactcaccctgccc

SEQ ID NO: 922606 - DNA, 15 bp, Homo sapiens
aactcaccctgcccc

SEQ ID NO: 922607 - DNA, 15 bp, Homo sapiens
actcaccctgcccca

SEQ ID NO: 922608 - DNA, 15 bp, Homo sapiens
ctcaccctgccccag

SEQ ID NO: 922609 - DNA, 15 bp, Homo sapiens
tcaccctgccccagt

SEQ ID NO: 922610 - DNA, 15 bp, Homo sapiens
caccctgccccagtg

SEQ ID NO: 922611 - DNA, 15 bp, Homo sapiens
accctgccccagtgt

SEQ ID NO: 922612 - DNA, 15 bp, Homo sapiens
ccctgccccagtgtc

SEQ ID NO: 922613 - DNA, 15 bp, Homo sapiens
cctgccccagtgtcc

SEQ ID NO: 922614 - DNA, 15 bp, Homo sapiens
ctgccccagtgtcca

SEQ ID NO: 922615 - DNA, 15 bp, Homo sapiens
tgccccagtgtccac

SEQ ID NO: 922616 - DNA, 15 bp, Homo sapiens
gccccagtgtccacc

SEQ ID NO: 922617 - DNA, 15 bp, Homo sapiens
ccccagtgtccacca

SEQ ID NO: 922618 - DNA, 15 bp, Homo sapiens
cccagtgtccaccat

SEQ ID NO: 922619 - DNA, 15 bp, Homo sapiens
ccagtgtccaccata

SEQ ID NO: 922620 - DNA, 15 bp, Homo sapiens
cagtgtccaccatat

SEQ ID NO: 922621 - DNA, 15 bp, Homo sapiens
agtgtccaccatatt

SEQ ID NO: 922622 - DNA, 15 bp, Homo sapiens
gtgtccaccatattg

SEQ ID NO: 922623 - DNA, 15 bp, Homo sapiens
tgtccaccatattgc

SEQ ID NO: 922624 - DNA, 15 bp, Homo sapiens
gtccaccatattgct

SEQ ID NO: 922625 - DNA, 15 bp, Homo sapiens
tccaccatattgctt

SEQ ID NO: 922626 - DNA, 15 bp, Homo sapiens
ccaccatattgcttt

SEQ ID NO: 922627 - DNA, 15 bp, Homo sapiens
caccatattgctttt

SEQ ID NO: 922628 - DNA, 15 bp, Homo sapiens
accatattgcttttt

SEQ ID NO: 922629 - DNA, 15 bp, Homo sapiens
ccatattgctttttt

SEQ ID NO: 922630 - DNA, 15 bp, Homo sapiens
catattgcttttttc

SEQ ID NO: 922631 - DNA, 15 bp, Homo sapiens
atattgcttttttcc

SEQ ID NO: 922632 - DNA, 15 bp, Homo sapiens
tattgcttttttcct

SEQ ID NO: 922633 - DNA, 15 bp, Homo sapiens
attgcttttttcctg

SEQ ID NO: 922634 - DNA, 15 bp, Homo sapiens
ttgcttttttcctgc

SEQ ID NO: 922635 - DNA, 15 bp, Homo sapiens
tgcttttttcctgct

SEQ ID NO: 922636 - DNA, 15 bp, Homo sapiens
gcttttttcctgctt

SEQ ID NO: 922637 - DNA, 15 bp, Homo sapiens
cttttttcctgcttt

SEQ ID NO: 922638 - DNA, 15 bp, Homo sapiens
ttttttcctgctttt

SEQ ID NO: 922639 - DNA, 15 bp, Homo sapiens
tttttcctgctttta

SEQ ID NO: 922640 - DNA, 15 bp, Homo sapiens
ttttcctgcttttac

SEQ ID NO: 922641 - DNA, 15 bp, Homo sapiens
tttcctgcttttact

SEQ ID NO: 922642 - DNA, 15 bp, Homo sapiens
ttcctgcttttactt

SEQ ID NO: 922643 - DNA, 15 bp, Homo sapiens
tcctgcttttacttc

SEQ ID NO: 922644 - DNA, 15 bp, Homo sapiens
cctgcttttacttcc

SEQ ID NO: 922645 - DNA, 15 bp, Homo sapiens
ctgcttttacttcca

SEQ ID NO: 922646 - DNA, 15 bp, Homo sapiens
tgcttttacttccat

SEQ ID NO: 922647 - DNA, 15 bp, Homo sapiens
gcttttacttccatg

SEQ ID NO: 922648 - DNA, 15 bp, Homo sapiens
cttttacttccatgt

SEQ ID NO: 922649 - DNA, 15 bp, Homo sapiens
ttttacttccatgta

SEQ ID NO: 922650 - DNA, 15 bp, Homo sapiens
tttacttccatgtat

SEQ ID NO: 922651 - DNA, 15 bp, Homo sapiens
ttacttccatgtata

SEQ ID NO: 922652 - DNA, 15 bp, Homo sapiens
tacttccatgtataa

SEQ ID NO: 922653 - DNA, 15 bp, Homo sapiens
acttccatgtataaa

SEQ ID NO: 922654 - DNA, 15 bp, Homo sapiens
cttccatgtataaat

SEQ ID NO: 922655 - DNA, 15 bp, Homo sapiens
ttccatgtataaatg

SEQ ID NO: 922656 - DNA, 15 bp, Homo sapiens
tccatgtataaatga

SEQ ID NO: 922657 - DNA, 15 bp, Homo sapiens
ccatgtataaatgac

SEQ ID NO: 922658 - DNA, 15 bp, Homo sapiens
catgtataaatgacc

SEQ ID NO: 922659 - DNA, 15 bp, Homo sapiens
atgtataaatgacca

SEQ ID NO: 922660 - DNA, 15 bp, Homo sapiens
tgtataaatgaccac

SEQ ID NO: 922661 - DNA, 15 bp, Homo sapiens
gtataaatgaccaca

SEQ ID NO: 922662 - DNA, 15 bp, Homo sapiens
tataaatgaccacaa

SEQ ID NO: 922663 - DNA, 15 bp, Homo sapiens
ataaatgaccacaaa

SEQ ID NO: 922664 - DNA, 15 bp, Homo sapiens
taaatgaccacaaag

SEQ ID NO: 922665 - DNA, 15 bp, Homo sapiens
aaatgaccacaaagt

SEQ ID NO: 922666 - DNA, 15 bp, Homo sapiens
aatgaccacaaagtc

SEQ ID NO: 922667 - DNA, 15 bp, Homo sapiens
atgaccacaaagtcc

SEQ ID NO: 922668 - DNA, 15 bp, Homo sapiens
tgaccacaaagtcca

SEQ ID NO: 922669 - DNA, 15 bp, Homo sapiens
gaccacaaagtccat

SEQ ID NO: 922670 - DNA, 15 bp, Homo sapiens
accacaaagtccatt

SEQ ID NO: 922671 - DNA, 15 bp, Homo sapiens
ccacaaagtccattt

SEQ ID NO: 922672 - DNA, 15 bp, Homo sapiens
cacaaagtccatttc

SEQ ID NO: 922673 - DNA, 15 bp, Homo sapiens
acaaagtccatttcc

SEQ ID NO: 922674 - DNA, 15 bp, Homo sapiens
caaagtccatttccc

SEQ ID NO: 922675 - DNA, 15 bp, Homo sapiens
aaagtccatttccct

SEQ ID NO: 922676 - DNA, 15 bp, Homo sapiens
aagtccatttccctg

SEQ ID NO: 922677 - DNA, 15 bp, Homo sapiens
agtccatttccctgg

SEQ ID NO: 922678 - DNA, 15 bp, Homo sapiens
gtccatttccctggc

SEQ ID NO: 922679 - DNA, 15 bp, Homo sapiens
tccatttccctggcg

SEQ ID NO: 922680 - DNA, 15 bp, Homo sapiens
ccatttccctggcgc

SEQ ID NO: 922681 - DNA, 15 bp, Homo sapiens
catttccctggcgct

SEQ ID NO: 922682 - DNA, 15 bp, Homo sapiens
atttccctggcgctt

SEQ ID NO: 922683 - DNA, 15 bp, Homo sapiens
tttccctggcgcttc

SEQ ID NO: 922684 - DNA, 15 bp, Homo sapiens
ttccctggcgcttct

SEQ ID NO: 922685 - DNA, 15 bp, Homo sapiens
tccctggcgcttctt

SEQ ID NO: 922686 - DNA, 15 bp, Homo sapiens
ccctggcgcttcttt

SEQ ID NO: 922687 - DNA, 15 bp, Homo sapiens
cctggcgcttctttt

SEQ ID NO: 922688 - DNA, 15 bp, Homo sapiens
ctggcgcttctttta

SEQ ID NO: 922689 - DNA, 15 bp, Homo sapiens
tggcgcttcttttaa

SEQ ID NO: 922690 - DNA, 15 bp, Homo sapiens
ggcgcttcttttaag

SEQ ID NO: 922691 - DNA, 15 bp, Homo sapiens
gcgcttcttttaaga

SEQ ID NO: 922692 - DNA, 15 bp, Homo sapiens
cgcttcttttaagag

SEQ ID NO: 922693 - DNA, 15 bp, Homo sapiens
gcttcttttaagaga

SEQ ID NO: 922694 - DNA, 15 bp, Homo sapiens
cttcttttaagagac

SEQ ID NO: 922695 - DNA, 15 bp, Homo sapiens
ttcttttaagagact

SEQ ID NO: 922696 - DNA, 15 bp, Homo sapiens
tcttttaagagactc

SEQ ID NO: 922697 - DNA, 15 bp, Homo sapiens
cttttaagagactct

SEQ ID NO: 922698 - DNA, 15 bp, Homo sapiens
ttttaagagactctc

SEQ ID NO: 922699 - DNA, 15 bp, Homo sapiens
tttaagagactctct

SEQ ID NO: 922700 - DNA, 15 bp, Homo sapiens
ttaagagactctctg

SEQ ID NO: 922701 - DNA, 15 bp, Homo sapiens
taagagactctctgc

SEQ ID NO: 922702 - DNA, 15 bp, Homo sapiens
aagagactctctgct

SEQ ID NO: 922703 - DNA, 15 bp, Homo sapiens
agagactctctgcta

SEQ ID NO: 922704 - DNA, 15 bp, Homo sapiens
gagactctctgctac

SEQ ID NO: 922705 - DNA, 15 bp, Homo sapiens
agactctctgctaca

SEQ ID NO: 922706 - DNA, 15 bp, Homo sapiens
gactctctgctacag

SEQ ID NO: 922707 - DNA, 15 bp, Homo sapiens
actctctgctacagt

SEQ ID NO: 922708 - DNA, 15 bp, Homo sapiens
ctctctgctacagtt

SEQ ID NO: 922709 - DNA, 15 bp, Homo sapiens
tctctgctacagttg

SEQ ID NO: 922710 - DNA, 15 bp, Homo sapiens
ctctgctacagttga

SEQ ID NO: 922711 - DNA, 15 bp, Homo sapiens
tctgctacagttgag

SEQ ID NO: 922712 - DNA, 15 bp, Homo sapiens
ctgctacagttgagc

SEQ ID NO: 922713 - DNA, 15 bp, Homo sapiens
tgctacagttgagcc

SEQ ID NO: 922714 - DNA, 15 bp, Homo sapiens
gctacagttgagcca

SEQ ID NO: 922715 - DNA, 15 bp, Homo sapiens
ctacagttgagccat

SEQ ID NO: 922716 - DNA, 15 bp, Homo sapiens
tacagttgagccatt

SEQ ID NO: 922717 - DNA, 15 bp, Homo sapiens
acagttgagccattt

SEQ ID NO: 922718 - DNA, 15 bp, Homo sapiens
cagttgagccatttc

SEQ ID NO: 922719 - DNA, 15 bp, Homo sapiens
agttgagccatttct

SEQ ID NO: 922720 - DNA, 15 bp, Homo sapiens
gttgagccatttctg

SEQ ID NO: 922721 - DNA, 15 bp, Homo sapiens
ttgagccatttctgt

SEQ ID NO: 922722 - DNA, 15 bp, Homo sapiens
tgagccatttctgtt

SEQ ID NO: 922723 - DNA, 15 bp, Homo sapiens
gagccatttctgttt

SEQ ID NO: 922724 - DNA, 15 bp, Homo sapiens
agccatttctgttta

SEQ ID NO: 922725 - DNA, 15 bp, Homo sapiens
gccatttctgtttac

SEQ ID NO: 922726 - DNA, 15 bp, Homo sapiens
ccatttctgtttaca

SEQ ID NO: 922727 - DNA, 15 bp, Homo sapiens
catttctgtttacac

SEQ ID NO: 922728 - DNA, 15 bp, Homo sapiens
atttctgtttacacc

SEQ ID NO: 922729 - DNA, 15 bp, Homo sapiens
tttctgtttacacca

SEQ ID NO: 922730 - DNA, 15 bp, Homo sapiens
ttctgtttacaccaa

SEQ ID NO: 922731 - DNA, 15 bp, Homo sapiens
tctgtttacaccaag

SEQ ID NO: 922732 - DNA, 15 bp, Homo sapiens
ctgtttacaccaaga

SEQ ID NO: 922733 - DNA, 15 bp, Homo sapiens
tgtttacaccaagac

SEQ ID NO: 922734 - DNA, 15 bp, Homo sapiens
gtttacaccaagacc

SEQ ID NO: 922735 - DNA, 15 bp, Homo sapiens
tttacaccaagacca

SEQ ID NO: 922736 - DNA, 15 bp, Homo sapiens
ttacaccaagaccat

SEQ ID NO: 922737 - DNA, 15 bp, Homo sapiens
tacaccaagaccatg

SEQ ID NO: 922738 - DNA, 15 bp, Homo sapiens
acaccaagaccatga

SEQ ID NO: 922739 - DNA, 15 bp, Homo sapiens
caccaagaccatgac

SEQ ID NO: 922740 - DNA, 15 bp, Homo sapiens
accaagaccatgaca

SEQ ID NO: 922741 - DNA, 15 bp, Homo sapiens
ccaagaccatgacaa

SEQ ID NO: 922742 - DNA, 15 bp, Homo sapiens
caagaccatgacaag

SEQ ID NO: 922743 - DNA, 15 bp, Homo sapiens
aagaccatgacaaga

SEQ ID NO: 922744 - DNA, 15 bp, Homo sapiens
agaccatgacaagaa

SEQ ID NO: 922745 - DNA, 15 bp, Homo sapiens
gaccatgacaagaaa

SEQ ID NO: 922746 - DNA, 15 bp, Homo sapiens
accatgacaagaaag

SEQ ID NO: 922747 - DNA, 15 bp, Homo sapiens
ccatgacaagaaaga

SEQ ID NO: 922748 - DNA, 15 bp, Homo sapiens
catgacaagaaagat

SEQ ID NO: 922749 - DNA, 15 bp, Homo sapiens
atgacaagaaagatg

SEQ ID NO: 922750 - DNA, 15 bp, Homo sapiens
tgacaagaaagatgg

SEQ ID NO: 922751 - DNA, 15 bp, Homo sapiens
gacaagaaagatggt

SEQ ID NO: 922752 - DNA, 15 bp, Homo sapiens
acaagaaagatggta

SEQ ID NO: 922753 - DNA, 15 bp, Homo sapiens
caagaaagatggtat

SEQ ID NO: 922754 - DNA, 15 bp, Homo sapiens
aagaaagatggtatc

SEQ ID NO: 922755 - DNA, 15 bp, Homo sapiens
agaaagatggtatca

SEQ ID NO: 922756 - DNA, 15 bp, Homo sapiens
gaaagatggtatcaa

SEQ ID NO: 922757 - DNA, 15 bp, Homo sapiens
aaagatggtatcaaa

SEQ ID NO: 922758 - DNA, 15 bp, Homo sapiens
aagatggtatcaaag

SEQ ID NO: 922759 - DNA, 15 bp, Homo sapiens
agatggtatcaaagg

SEQ ID NO: 922760 - DNA, 15 bp, Homo sapiens
gatggtatcaaagga

SEQ ID NO: 922761 - DNA, 15 bp, Homo sapiens
atggtatcaaaggat

SEQ ID NO: 922762 - DNA, 15 bp, Homo sapiens
tggtatcaaaggatg

SEQ ID NO: 922763 - DNA, 15 bp, Homo sapiens
ggtatcaaaggatgg

SEQ ID NO: 922764 - DNA, 15 bp, Homo sapiens
gtatcaaaggatggc

SEQ ID NO: 922765 - DNA, 15 bp, Homo sapiens
tatcaaaggatggct

SEQ ID NO: 922766 - DNA, 15 bp, Homo sapiens
atcaaaggatggctt

SEQ ID NO: 922767 - DNA, 15 bp, Homo sapiens
tcaaaggatggcttg

SEQ ID NO: 922768 - DNA, 15 bp, Homo sapiens
caaaggatggcttgc

SEQ ID NO: 922769 - DNA, 15 bp, Homo sapiens
aaaggatggcttgct

SEQ ID NO: 922770 - DNA, 15 bp, Homo sapiens
aaggatggcttgctt

SEQ ID NO: 922771 - DNA, 15 bp, Homo sapiens
aggatggcttgcttg

SEQ ID NO: 922772 - DNA, 15 bp, Homo sapiens
ggatggcttgcttgg

SEQ ID NO: 922773 - DNA, 15 bp, Homo sapiens
gatggcttgcttggg

SEQ ID NO: 922774 - DNA, 15 bp, Homo sapiens
atggcttgcttgggc

SEQ ID NO: 922775 - DNA, 15 bp, Homo sapiens
tggcttgcttgggct

SEQ ID NO: 922776 - DNA, 15 bp, Homo sapiens
ggcttgcttgggctt

SEQ ID NO: 922777 - DNA, 15 bp, Homo sapiens
gcttgcttgggcttt

SEQ ID NO: 922778 - DNA, 15 bp, Homo sapiens
cttgcttgggcttta

SEQ ID NO: 922779 - DNA, 15 bp, Homo sapiens
ttgcttgggctttag

SEQ ID NO: 922780 - DNA, 15 bp, Homo sapiens
tgcttgggctttaga

SEQ ID NO: 922781 - DNA, 15 bp, Homo sapiens
gcttgggctttagac

SEQ ID NO: 922782 - DNA, 15 bp, Homo sapiens
cttgggctttagacc

SEQ ID NO: 922783 - DNA, 15 bp, Homo sapiens
ttgggctttagaccc

SEQ ID NO: 922784 - DNA, 15 bp, Homo sapiens
tgggctttagacccc

SEQ ID NO: 922785 - DNA, 15 bp, Homo sapiens
gggctttagacccct

SEQ ID NO: 922786 - DNA, 15 bp, Homo sapiens
ggctttagacccctc

SEQ ID NO: 922787 - DNA, 15 bp, Homo sapiens
gctttagacccctcc

SEQ ID NO: 922788 - DNA, 15 bp, Homo sapiens
ctttagacccctcct

SEQ ID NO: 922789 - DNA, 15 bp, Homo sapiens
tttagacccctcctt

SEQ ID NO: 922790 - DNA, 15 bp, Homo sapiens
ttagacccctccttc

SEQ ID NO: 922791 - DNA, 15 bp, Homo sapiens
tagacccctccttct

SEQ ID NO: 922792 - DNA, 15 bp, Homo sapiens
agacccctccttctc

SEQ ID NO: 922793 - DNA, 15 bp, Homo sapiens
gacccctccttctcc

SEQ ID NO: 922794 - DNA, 15 bp, Homo sapiens
acccctccttctccc

SEQ ID NO: 922795 - DNA, 15 bp, Homo sapiens
cccctccttctccca

SEQ ID NO: 922796 - DNA, 15 bp, Homo sapiens
ccctccttctcccac

SEQ ID NO: 922797 - DNA, 15 bp, Homo sapiens
cctccttctcccaca

SEQ ID NO: 922798 - DNA, 15 bp, Homo sapiens
ctccttctcccacaa

SEQ ID NO: 922799 - DNA, 15 bp, Homo sapiens
tccttctcccacaat

SEQ ID NO: 922800 - DNA, 15 bp, Homo sapiens
ccttctcccacaatt

SEQ ID NO: 922801 - DNA, 15 bp, Homo sapiens
cttctcccacaattt

SEQ ID NO: 922802 - DNA, 15 bp, Homo sapiens
ttctcccacaatttc

SEQ ID NO: 922803 - DNA, 15 bp, Homo sapiens
tctcccacaatttcc

SEQ ID NO: 922804 - DNA, 15 bp, Homo sapiens
ctcccacaatttcca

SEQ ID NO: 922805 - DNA, 15 bp, Homo sapiens
tcccacaatttccag

SEQ ID NO: 922806 - DNA, 15 bp, Homo sapiens
cccacaatttccagc

SEQ ID NO: 922807 - DNA, 15 bp, Homo sapiens
ccacaatttccagca

SEQ ID NO: 922808 - DNA, 15 bp, Homo sapiens
cacaatttccagcaa

SEQ ID NO: 922809 - DNA, 15 bp, Homo sapiens
acaatttccagcaat

SEQ ID NO: 922810 - DNA, 15 bp, Homo sapiens
caatttccagcaata

SEQ ID NO: 922811 - DNA, 15 bp, Homo sapiens
aatttccagcaatac

SEQ ID NO: 922812 - DNA, 15 bp, Homo sapiens
atttccagcaatact

SEQ ID NO: 922813 - DNA, 15 bp, Homo sapiens
tttccagcaatactc

SEQ ID NO: 922814 - DNA, 15 bp, Homo sapiens
ttccagcaatactct

SEQ ID NO: 922815 - DNA, 15 bp, Homo sapiens
tccagcaatactctc

SEQ ID NO: 922816 - DNA, 15 bp, Homo sapiens
ccagcaatactctcc

SEQ ID NO: 922817 - DNA, 15 bp, Homo sapiens
cagcaatactctcct

SEQ ID NO: 922818 - DNA, 15 bp, Homo sapiens
agcaatactctccta

SEQ ID NO: 922819 - DNA, 15 bp, Homo sapiens
gcaatactctcctag

SEQ ID NO: 922820 - DNA, 15 bp, Homo sapiens
caatactctcctaga

SEQ ID NO: 922821 - DNA, 15 bp, Homo sapiens
aatactctcctagaa

SEQ ID NO: 922822 - DNA, 15 bp, Homo sapiens
atactctcctagaac

SEQ ID NO: 922823 - DNA, 15 bp, Homo sapiens
tactctcctagaacc

SEQ ID NO: 922824 - DNA, 15 bp, Homo sapiens
actctcctagaacct

SEQ ID NO: 922825 - DNA, 15 bp, Homo sapiens
ctctcctagaaccta

SEQ ID NO: 922826 - DNA, 15 bp, Homo sapiens
tctcctagaacctac

SEQ ID NO: 922827 - DNA, 15 bp, Homo sapiens
ctcctagaacctact

SEQ ID NO: 922828 - DNA, 15 bp, Homo sapiens
tcctagaacctactg

SEQ ID NO: 922829 - DNA, 15 bp, Homo sapiens
cctagaacctactga

SEQ ID NO: 922830 - DNA, 15 bp, Homo sapiens
ctagaacctactgac

SEQ ID NO: 922831 - DNA, 15 bp, Homo sapiens
tagaacctactgaca

SEQ ID NO: 922832 - DNA, 15 bp, Homo sapiens
agaacctactgacaa

SEQ ID NO: 922833 - DNA, 15 bp, Homo sapiens
gaacctactgacaaa

SEQ ID NO: 922834 - DNA, 15 bp, Homo sapiens
aacctactgacaaat

SEQ ID NO: 922835 - DNA, 15 bp, Homo sapiens
acctactgacaaata

SEQ ID NO: 922836 - DNA, 15 bp, Homo sapiens
cctactgacaaataa

SEQ ID NO: 922837 - DNA, 15 bp, Homo sapiens
ctactgacaaataag

SEQ ID NO: 922838 - DNA, 15 bp, Homo sapiens
tactgacaaataagc

SEQ ID NO: 922839 - DNA, 15 bp, Homo sapiens
actgacaaataagca

SEQ ID NO: 922840 - DNA, 15 bp, Homo sapiens
ctgacaaataagcat

SEQ ID NO: 922841 - DNA, 15 bp, Homo sapiens
tgacaaataagcata

SEQ ID NO: 922842 - DNA, 15 bp, Homo sapiens
gacaaataagcatac

SEQ ID NO: 922843 - DNA, 15 bp, Homo sapiens
acaaataagcataca

SEQ ID NO: 922844 - DNA, 15 bp, Homo sapiens
caaataagcatacaa

SEQ ID NO: 922845 - DNA, 15 bp, Homo sapiens
aaataagcatacaat

SEQ ID NO: 922846 - DNA, 15 bp, Homo sapiens
aataagcatacaatc

SEQ ID NO: 922847 - DNA, 15 bp, Homo sapiens
ataagcatacaatct

SEQ ID NO: 922848 - DNA, 15 bp, Homo sapiens
taagcatacaatcta

SEQ ID NO: 922849 - DNA, 15 bp, Homo sapiens
aagcatacaatctaa

SEQ ID NO: 922850 - DNA, 15 bp, Homo sapiens
agcatacaatctaaa

SEQ ID NO: 922851 - DNA, 15 bp, Homo sapiens
gcatacaatctaaat

SEQ ID NO: 922852 - DNA, 15 bp, Homo sapiens
catacaatctaaatt

SEQ ID NO: 922853 - DNA, 15 bp, Homo sapiens
atacaatctaaatta

SEQ ID NO: 922854 - DNA, 15 bp, Homo sapiens
tacaatctaaattaa

SEQ ID NO: 922855 - DNA, 15 bp, Homo sapiens
acaatctaaattaaa

SEQ ID NO: 922856 - DNA, 15 bp, Homo sapiens
caatctaaattaaaa

SEQ ID NO: 922857 - DNA, 15 bp, Homo sapiens
aatctaaattaaaat

SEQ ID NO: 922858 - DNA, 15 bp, Homo sapiens
atctaaattaaaatg

SEQ ID NO: 922859 - DNA, 15 bp, Homo sapiens
tctaaattaaaatgt

SEQ ID NO: 922860 - DNA, 15 bp, Homo sapiens
ctaaattaaaatgtg

SEQ ID NO: 922861 - DNA, 15 bp, Homo sapiens
taaattaaaatgtgt

SEQ ID NO: 922862 - DNA, 15 bp, Homo sapiens
aaattaaaatgtgtg

SEQ ID NO: 922863 - DNA, 15 bp, Homo sapiens
aattaaaatgtgtgt

SEQ ID NO: 922864 - DNA, 15 bp, Homo sapiens
attaaaatgtgtgtg

SEQ ID NO: 922865 - DNA, 15 bp, Homo sapiens
ttaaaatgtgtgtga

SEQ ID NO: 922866 - DNA, 15 bp, Homo sapiens
taaaatgtgtgtgaa

SEQ ID NO: 922867 - DNA, 15 bp, Homo sapiens
aaaatgtgtgtgaac

SEQ ID NO: 922868 - DNA, 15 bp, Homo sapiens
aaatgtgtgtgaaca

SEQ ID NO: 922869 - DNA, 15 bp, Homo sapiens
aatgtgtgtgaacac

SEQ ID NO: 922870 - DNA, 15 bp, Homo sapiens
atgtgtgtgaacaca

SEQ ID NO: 922871 - DNA, 15 bp, Homo sapiens
tgtgtgtgaacacaa

SEQ ID NO: 922872 - DNA, 15 bp, Homo sapiens
gtgtgtgaacacaaa

SEQ ID NO: 922873 - DNA, 15 bp, Homo sapiens
tgtgtgaacacaaaa

SEQ ID NO: 922874 - DNA, 15 bp, Homo sapiens
gtgtgaacacaaaat

SEQ ID NO: 922875 - DNA, 15 bp, Homo sapiens
tgtgaacacaaaatc

SEQ ID NO: 922876 - DNA, 15 bp, Homo sapiens
gtgaacacaaaatca

SEQ ID NO: 922877 - DNA, 15 bp, Homo sapiens
tgaacacaaaatcat

SEQ ID NO: 922878 - DNA, 15 bp, Homo sapiens
gaacacaaaatcatc

SEQ ID NO: 922879 - DNA, 15 bp, Homo sapiens
aacacaaaatcatct

SEQ ID NO: 922880 - DNA, 15 bp, Homo sapiens
acacaaaatcatctt

SEQ ID NO: 922881 - DNA, 15 bp, Homo sapiens
cacaaaatcatcttc

SEQ ID NO: 922882 - DNA, 15 bp, Homo sapiens
acaaaatcatcttcg

SEQ ID NO: 922883 - DNA, 15 bp, Homo sapiens
caaaatcatcttcga

SEQ ID NO: 922884 - DNA, 15 bp, Homo sapiens
aaaatcatcttcgaa

SEQ ID NO: 922885 - DNA, 15 bp, Homo sapiens
aaatcatcttcgaaa

SEQ ID NO: 922886 - DNA, 15 bp, Homo sapiens
aatcatcttcgaaat

SEQ ID NO: 922887 - DNA, 15 bp, Homo sapiens
atcatcttcgaaata

SEQ ID NO: 922888 - DNA, 15 bp, Homo sapiens
tcatcttcgaaataa

SEQ ID NO: 922889 - DNA, 15 bp, Homo sapiens
catcttcgaaataaa

SEQ ID NO: 922890 - DNA, 15 bp, Homo sapiens
atcttcgaaataaaa

SEQ ID NO: 922891 - DNA, 15 bp, Homo sapiens
tcttcgaaataaaat

SEQ ID NO: 922892 - DNA, 15 bp, Homo sapiens
cttcgaaataaaata

SEQ ID NO: 922893 - DNA, 15 bp, Homo sapiens
ttcgaaataaaataa

SEQ ID NO: 922894 - DNA, 15 bp, Homo sapiens
tcgaaataaaataag

SEQ ID NO: 922895 - DNA, 15 bp, Homo sapiens
cgaaataaaataagt

SEQ ID NO: 922896 - DNA, 15 bp, Homo sapiens
gaaataaaataagtg

SEQ ID NO: 922897 - DNA, 15 bp, Homo sapiens
aaataaaataagtgt

SEQ ID NO: 922898 - DNA, 15 bp, Homo sapiens
aataaaataagtgtt

SEQ ID NO: 922899 - DNA, 15 bp, Homo sapiens
ataaaataagtgttc

SEQ ID NO: 922900 - DNA, 15 bp, Homo sapiens
taaaataagtgttcc

SEQ ID NO: 922901 - DNA, 15 bp, Homo sapiens
aaaataagtgttcca

SEQ ID NO: 922902 - DNA, 15 bp, Homo sapiens
aaataagtgttccag

SEQ ID NO: 922903 - DNA, 15 bp, Homo sapiens
aataagtgttccagc

SEQ ID NO: 922904 - DNA, 15 bp, Homo sapiens
ataagtgttccagca

SEQ ID NO: 922905 - DNA, 15 bp, Homo sapiens
taagtgttccagcat

SEQ ID NO: 922906 - DNA, 15 bp, Homo sapiens
aagtgttccagcatc

SEQ ID NO: 922907 - DNA, 15 bp, Homo sapiens
agtgttccagcatct

SEQ ID NO: 922908 - DNA, 15 bp, Homo sapiens
gtgttccagcatctc

SEQ ID NO: 922909 - DNA, 15 bp, Homo sapiens
tgttccagcatctcc

SEQ ID NO: 922910 - DNA, 15 bp, Homo sapiens
gttccagcatctcct

SEQ ID NO: 922911 - DNA, 15 bp, Homo sapiens
ttccagcatctcctc

SEQ ID NO: 922912 - DNA, 15 bp, Homo sapiens
tccagcatctcctcc

SEQ ID NO: 922913 - DNA, 15 bp, Homo sapiens
ccagcatctcctccc

SEQ ID NO: 922914 - DNA, 15 bp, Homo sapiens
cagcatctcctccca

SEQ ID NO: 922915 - DNA, 15 bp, Homo sapiens
agcatctcctcccaa

SEQ ID NO: 922916 - DNA, 15 bp, Homo sapiens
gcatctcctcccaac

SEQ ID NO: 922917 - DNA, 15 bp, Homo sapiens
catctcctcccaacg

SEQ ID NO: 922918 - DNA, 15 bp, Homo sapiens
atctcctcccaacgg

SEQ ID NO: 922919 - DNA, 15 bp, Homo sapiens
tctcctcccaacggg

SEQ ID NO: 922920 - DNA, 15 bp, Homo sapiens
ctcctcccaacggga

SEQ ID NO: 922921 - DNA, 15 bp, Homo sapiens
tcctcccaacgggac

SEQ ID NO: 922922 - DNA, 15 bp, Homo sapiens
cctcccaacgggact

SEQ ID NO: 922923 - DNA, 15 bp, Homo sapiens
ctcccaacgggactg

SEQ ID NO: 922924 - DNA, 15 bp, Homo sapiens
tcccaacgggactgc

SEQ ID NO: 922925 - DNA, 15 bp, Homo sapiens
cccaacgggactgcc

SEQ ID NO: 922926 - DNA, 15 bp, Homo sapiens
ccaacgggactgcca

SEQ ID NO: 922927 - DNA, 15 bp, Homo sapiens
caacgggactgccac

SEQ ID NO: 922928 - DNA, 15 bp, Homo sapiens
aacgggactgccacc

SEQ ID NO: 922929 - DNA, 15 bp, Homo sapiens
acgggactgccacca

SEQ ID NO: 922930 - DNA, 15 bp, Homo sapiens
cgggactgccaccag

SEQ ID NO: 922931 - DNA, 15 bp, Homo sapiens
gggactgccaccagt

SEQ ID NO: 922932 - DNA, 15 bp, Homo sapiens
ggactgccaccagta

SEQ ID NO: 922933 - DNA, 15 bp, Homo sapiens
gactgccaccagtaa

SEQ ID NO: 922934 - DNA, 15 bp, Homo sapiens
actgccaccagtaag

SEQ ID NO: 922935 - DNA, 15 bp, Homo sapiens
ctgccaccagtaagc

SEQ ID NO: 922936 - DNA, 15 bp, Homo sapiens
tgccaccagtaagct

SEQ ID NO: 922937 - DNA, 15 bp, Homo sapiens
gccaccagtaagctg

SEQ ID NO: 922938 - DNA, 15 bp, Homo sapiens
ccaccagtaagctgt

SEQ ID NO: 922939 - DNA, 15 bp, Homo sapiens
caccagtaagctgtt

SEQ ID NO: 922940 - DNA, 15 bp, Homo sapiens
accagtaagctgttc

SEQ ID NO: 922941 - DNA, 15 bp, Homo sapiens
ccagtaagctgttcc

SEQ ID NO: 922942 - DNA, 15 bp, Homo sapiens
cagtaagctgttcca

SEQ ID NO: 922943 - DNA, 15 bp, Homo sapiens
agtaagctgttccac

SEQ ID NO: 922944 - DNA, 15 bp, Homo sapiens
gtaagctgttccaca

SEQ ID NO: 922945 - DNA, 15 bp, Homo sapiens
taagctgttccacat

SEQ ID NO: 922946 - DNA, 15 bp, Homo sapiens
aagctgttccacata

SEQ ID NO: 922947 - DNA, 15 bp, Homo sapiens
agctgttccacataa

SEQ ID NO: 922948 - DNA, 15 bp, Homo sapiens
gctgttccacataag

SEQ ID NO: 922949 - DNA, 15 bp, Homo sapiens
ctgttccacataaga

SEQ ID NO: 922950 - DNA, 15 bp, Homo sapiens
tgttccacataagaa

SEQ ID NO: 922951 - DNA, 15 bp, Homo sapiens
gttccacataagaat

SEQ ID NO: 922952 - DNA, 15 bp, Homo sapiens
ttccacataagaatt

SEQ ID NO: 922953 - DNA, 15 bp, Homo sapiens
tccacataagaattt

SEQ ID NO: 922954 - DNA, 15 bp, Homo sapiens
ccacataagaatttt

SEQ ID NO: 922955 - DNA, 15 bp, Homo sapiens
cacataagaattttg

SEQ ID NO: 922956 - DNA, 15 bp, Homo sapiens
acataagaattttgg

SEQ ID NO: 922957 - DNA, 15 bp, Homo sapiens
cataagaattttgga

SEQ ID NO: 922958 - DNA, 15 bp, Homo sapiens
ataagaattttggaa

SEQ ID NO: 922959 - DNA, 15 bp, Homo sapiens
taagaattttggaac

SEQ ID NO: 922960 - DNA, 15 bp, Homo sapiens
aagaattttggaacc

SEQ ID NO: 922961 - DNA, 15 bp, Homo sapiens
agaattttggaacca

SEQ ID NO: 922962 - DNA, 15 bp, Homo sapiens
gaattttggaaccat

SEQ ID NO: 922963 - DNA, 15 bp, Homo sapiens
aattttggaaccatc

SEQ ID NO: 922964 - DNA, 15 bp, Homo sapiens
attttggaaccatca

SEQ ID NO: 922965 - DNA, 15 bp, Homo sapiens
ttttggaaccatcac

SEQ ID NO: 922966 - DNA, 15 bp, Homo sapiens
tttggaaccatcact

SEQ ID NO: 922967 - DNA, 15 bp, Homo sapiens
ttggaaccatcacta

SEQ ID NO: 922968 - DNA, 15 bp, Homo sapiens
tggaaccatcactaa

SEQ ID NO: 922969 - DNA, 15 bp, Homo sapiens
ggaaccatcactaat

SEQ ID NO: 922970 - DNA, 15 bp, Homo sapiens
gaaccatcactaatg

SEQ ID NO: 922971 - DNA, 15 bp, Homo sapiens
aaccatcactaatgc

SEQ ID NO: 922972 - DNA, 15 bp, Homo sapiens
accatcactaatgcc

SEQ ID NO: 922973 - DNA, 15 bp, Homo sapiens
ccatcactaatgcca

SEQ ID NO: 922974 - DNA, 15 bp, Homo sapiens
catcactaatgccaa

SEQ ID NO: 922975 - DNA, 15 bp, Homo sapiens
atcactaatgccaag

SEQ ID NO: 922976 - DNA, 15 bp, Homo sapiens
tcactaatgccaagg

SEQ ID NO: 922977 - DNA, 15 bp, Homo sapiens
cactaatgccaaggt

SEQ ID NO: 922978 - DNA, 15 bp, Homo sapiens
actaatgccaaggtc

SEQ ID NO: 922979 - DNA, 15 bp, Homo sapiens
ctaatgccaaggtca

SEQ ID NO: 922980 - DNA, 15 bp, Homo sapiens
taatgccaaggtcat

SEQ ID NO: 922981 - DNA, 15 bp, Homo sapiens
aatgccaaggtcatg

SEQ ID NO: 922982 - DNA, 15 bp, Homo sapiens
atgccaaggtcatgg

SEQ ID NO: 922983 - DNA, 15 bp, Homo sapiens
tgccaaggtcatgga

SEQ ID NO: 922984 - DNA, 15 bp, Homo sapiens
gccaaggtcatggac

SEQ ID NO: 922985 - DNA, 15 bp, Homo sapiens
ccaaggtcatggact

SEQ ID NO: 922986 - DNA, 15 bp, Homo sapiens
caaggtcatggactg

SEQ ID NO: 922987 - DNA, 15 bp, Homo sapiens
aaggtcatggactgt

SEQ ID NO: 922988 - DNA, 15 bp, Homo sapiens
aggtcatggactgtc

SEQ ID NO: 922989 - DNA, 15 bp, Homo sapiens
ggtcatggactgtca

SEQ ID NO: 922990 - DNA, 15 bp, Homo sapiens
gtcatggactgtcaa

SEQ ID NO: 922991 - DNA, 15 bp, Homo sapiens
tcatggactgtcaag

SEQ ID NO: 922992 - DNA, 15 bp, Homo sapiens
catggactgtcaagt

SEQ ID NO: 922993 - DNA, 15 bp, Homo sapiens
atggactgtcaagtt

SEQ ID NO: 922994 - DNA, 15 bp, Homo sapiens
tggactgtcaagttc

SEQ ID NO: 922995 - DNA, 15 bp, Homo sapiens
ggactgtcaagttct

SEQ ID NO: 922996 - DNA, 15 bp, Homo sapiens
gactgtcaagttctg

SEQ ID NO: 922997 - DNA, 15 bp, Homo sapiens
actgtcaagttctgt

SEQ ID NO: 922998 - DNA, 15 bp, Homo sapiens
ctgtcaagttctgtt

SEQ ID NO: 922999 - DNA, 15 bp, Homo sapiens
tgtcaagttctgttt

SEQ ID NO: 923000 - DNA, 15 bp, Homo sapiens
gtcaagttctgtttc

SEQ ID NO: 923001 - DNA, 15 bp, Homo sapiens
tcaagttctgtttct

SEQ ID NO: 923002 - DNA, 15 bp, Homo sapiens
caagttctgtttctg

SEQ ID NO: 923003 - DNA, 15 bp, Homo sapiens
aagttctgtttctgc

SEQ ID NO: 923004 - DNA, 15 bp, Homo sapiens
agttctgtttctgcc

SEQ ID NO: 923005 - DNA, 15 bp, Homo sapiens
gttctgtttctgcca

SEQ ID NO: 923006 - DNA, 15 bp, Homo sapiens
ttctgtttctgccag

SEQ ID NO: 923007 - DNA, 15 bp, Homo sapiens
tctgtttctgccagt

SEQ ID NO: 923008 - DNA, 15 bp, Homo sapiens
ctgtttctgccagtc

SEQ ID NO: 923009 - DNA, 15 bp, Homo sapiens
tgtttctgccagtca

SEQ ID NO: 923010 - DNA, 15 bp, Homo sapiens
gtttctgccagtcac

SEQ ID NO: 923011 - DNA, 15 bp, Homo sapiens
tttctgccagtcaca

SEQ ID NO: 923012 - DNA, 15 bp, Homo sapiens
ttctgccagtcacag

SEQ ID NO: 923013 - DNA, 15 bp, Homo sapiens
tctgccagtcacaga

SEQ ID NO: 923014 - DNA, 15 bp, Homo sapiens
ctgccagtcacagag

SEQ ID NO: 923015 - DNA, 15 bp, Homo sapiens
tgccagtcacagaga

SEQ ID NO: 923016 - DNA, 15 bp, Homo sapiens
gccagtcacagagag

SEQ ID NO: 923017 - DNA, 15 bp, Homo sapiens
ccagtcacagagaga

SEQ ID NO: 923018 - DNA, 15 bp, Homo sapiens
cagtcacagagagaa

SEQ ID NO: 923019 - DNA, 15 bp, Homo sapiens
agtcacagagagaac

SEQ ID NO: 923020 - DNA, 15 bp, Homo sapiens
gtcacagagagaacg

SEQ ID NO: 923021 - DNA, 15 bp, Homo sapiens
tcacagagagaacga

SEQ ID NO: 923022 - DNA, 15 bp, Homo sapiens
cacagagagaacgat

SEQ ID NO: 923023 - DNA, 15 bp, Homo sapiens
acagagagaacgatc

SEQ ID NO: 923024 - DNA, 15 bp, Homo sapiens
cagagagaacgatct

SEQ ID NO: 923025 - DNA, 15 bp, Homo sapiens
agagagaacgatctc

SEQ ID NO: 923026 - DNA, 15 bp, Homo sapiens
gagagaacgatctct

SEQ ID NO: 923027 - DNA, 15 bp, Homo sapiens
agagaacgatctctt

SEQ ID NO: 923028 - DNA, 15 bp, Homo sapiens
gagaacgatctcttc

SEQ ID NO: 923029 - DNA, 15 bp, Homo sapiens
agaacgatctcttct

SEQ ID NO: 923030 - DNA, 15 bp, Homo sapiens
gaacgatctcttcta

SEQ ID NO: 923031 - DNA, 15 bp, Homo sapiens
aacgatctcttctaa

SEQ ID NO: 923032 - DNA, 15 bp, Homo sapiens
acgatctcttctaaa

SEQ ID NO: 923033 - DNA, 15 bp, Homo sapiens
cgatctcttctaaac

SEQ ID NO: 923034 - DNA, 15 bp, Homo sapiens
gatctcttctaaact

SEQ ID NO: 923035 - DNA, 15 bp, Homo sapiens
atctcttctaaactc

SEQ ID NO: 923036 - DNA, 15 bp, Homo sapiens
tctcttctaaactct

SEQ ID NO: 923037 - DNA, 15 bp, Homo sapiens
ctcttctaaactctt

SEQ ID NO: 923038 - DNA, 15 bp, Homo sapiens
tcttctaaactcttt

SEQ ID NO: 923039 - DNA, 15 bp, Homo sapiens
cttctaaactctttg

SEQ ID NO: 923040 - DNA, 15 bp, Homo sapiens
ttctaaactctttgc

SEQ ID NO: 923041 - DNA, 15 bp, Homo sapiens
tctaaactctttgct

SEQ ID NO: 923042 - DNA, 15 bp, Homo sapiens
ctaaactctttgcta

SEQ ID NO: 923043 - DNA, 15 bp, Homo sapiens
taaactctttgctat

SEQ ID NO: 923044 - DNA, 15 bp, Homo sapiens
aaactctttgctata

SEQ ID NO: 923045 - DNA, 15 bp, Homo sapiens
aactctttgctatat

SEQ ID NO: 923046 - DNA, 15 bp, Homo sapiens
actctttgctatatt

SEQ ID NO: 923047 - DNA, 15 bp, Homo sapiens
ctctttgctatattt

SEQ ID NO: 923048 - DNA, 15 bp, Homo sapiens
tctttgctatatttt

SEQ ID NO: 923049 - DNA, 15 bp, Homo sapiens
ctttgctatattttg

SEQ ID NO: 923050 - DNA, 15 bp, Homo sapiens
tttgctatattttgc

SEQ ID NO: 923051 - DNA, 15 bp, Homo sapiens
ttgctatattttgcc

SEQ ID NO: 923052 - DNA, 15 bp, Homo sapiens
tgctatattttgcca

SEQ ID NO: 923053 - DNA, 15 bp, Homo sapiens
gctatattttgccac

SEQ ID NO: 923054 - DNA, 15 bp, Homo sapiens
ctatattttgccacc

SEQ ID NO: 923055 - DNA, 15 bp, Homo sapiens
tatattttgccacct

SEQ ID NO: 923056 - DNA, 15 bp, Homo sapiens
atattttgccacctg

SEQ ID NO: 923057 - DNA, 15 bp, Homo sapiens
tattttgccacctgg

SEQ ID NO: 923058 - DNA, 15 bp, Homo sapiens
attttgccacctggt

SEQ ID NO: 923059 - DNA, 15 bp, Homo sapiens
ttttgccacctggtt

SEQ ID NO: 923060 - DNA, 15 bp, Homo sapiens
tttgccacctggttc

SEQ ID NO: 923061 - DNA, 15 bp, Homo sapiens
ttgccacctggttcc

SEQ ID NO: 923062 - DNA, 15 bp, Homo sapiens
tgccacctggttcct

SEQ ID NO: 923063 - DNA, 15 bp, Homo sapiens
gccacctggttccta

SEQ ID NO: 923064 - DNA, 15 bp, Homo sapiens
ccacctggttcctaa

SEQ ID NO: 923065 - DNA, 15 bp, Homo sapiens
cacctggttcctaac

SEQ ID NO: 923066 - DNA, 15 bp, Homo sapiens
acctggttcctaact

SEQ ID NO: 923067 - DNA, 15 bp, Homo sapiens
cctggttcctaacta

SEQ ID NO: 923068 - DNA, 15 bp, Homo sapiens
ctggttcctaactag

SEQ ID NO: 923069 - DNA, 15 bp, Homo sapiens
tggttcctaactaga

SEQ ID NO: 923070 - DNA, 15 bp, Homo sapiens
ggttcctaactagag

SEQ ID NO: 923071 - DNA, 15 bp, Homo sapiens
gttcctaactagagt

SEQ ID NO: 923072 - DNA, 15 bp, Homo sapiens
ttcctaactagagtt

SEQ ID NO: 923073 - DNA, 15 bp, Homo sapiens
tcctaactagagtta

SEQ ID NO: 923074 - DNA, 15 bp, Homo sapiens
cctaactagagttac

SEQ ID NO: 923075 - DNA, 15 bp, Homo sapiens
ctaactagagttaca

SEQ ID NO: 923076 - DNA, 15 bp, Homo sapiens
taactagagttacat

SEQ ID NO: 923077 - DNA, 15 bp, Homo sapiens
aactagagttacatt

SEQ ID NO: 923078 - DNA, 15 bp, Homo sapiens
actagagttacattg

SEQ ID NO: 923079 - DNA, 15 bp, Homo sapiens
ctagagttacattgg

SEQ ID NO: 923080 - DNA, 15 bp, Homo sapiens
tagagttacattggg

SEQ ID NO: 923081 - DNA, 15 bp, Homo sapiens
agagttacattgggt

SEQ ID NO: 923082 - DNA, 15 bp, Homo sapiens
gagttacattgggtc

SEQ ID NO: 923083 - DNA, 15 bp, Homo sapiens
agttacattgggtct

SEQ ID NO: 923084 - DNA, 15 bp, Homo sapiens
gttacattgggtctg

SEQ ID NO: 923085 - DNA, 15 bp, Homo sapiens
ttacattgggtctgg

SEQ ID NO: 923086 - DNA, 15 bp, Homo sapiens
tacattgggtctgga

SEQ ID NO: 923087 - DNA, 15 bp, Homo sapiens
acattgggtctggaa

SEQ ID NO: 923088 - DNA, 15 bp, Homo sapiens
cattgggtctggaat

SEQ ID NO: 923089 - DNA, 15 bp, Homo sapiens
attgggtctggaata

SEQ ID NO: 923090 - DNA, 15 bp, Homo sapiens
ttgggtctggaatat

SEQ ID NO: 923091 - DNA, 15 bp, Homo sapiens
tgggtctggaatatt

SEQ ID NO: 923092 - DNA, 15 bp, Homo sapiens
gggtctggaatatta

SEQ ID NO: 923093 - DNA, 15 bp, Homo sapiens
ggtctggaatattac

SEQ ID NO: 923094 - DNA, 15 bp, Homo sapiens
gtctggaatattaca

SEQ ID NO: 923095 - DNA, 15 bp, Homo sapiens
tctggaatattacaa

SEQ ID NO: 923096 - DNA, 15 bp, Homo sapiens
ctggaatattacaaa

SEQ ID NO: 923097 - DNA, 15 bp, Homo sapiens
tggaatattacaaat

SEQ ID NO: 923098 - DNA, 15 bp, Homo sapiens
ggaatattacaaatt

SEQ ID NO: 923099 - DNA, 15 bp, Homo sapiens
gaatattacaaattc

SEQ ID NO: 923100 - DNA, 15 bp, Homo sapiens
aatattacaaattct

SEQ ID NO: 923101 - DNA, 15 bp, Homo sapiens
atattacaaattctt

SEQ ID NO: 923102 - DNA, 15 bp, Homo sapiens
tattacaaattcttt

SEQ ID NO: 923103 - DNA, 15 bp, Homo sapiens
attacaaattctttc

SEQ ID NO: 923104 - DNA, 15 bp, Homo sapiens
ttacaaattctttct

SEQ ID NO: 923105 - DNA, 15 bp, Homo sapiens
tacaaattctttctt

SEQ ID NO: 923106 - DNA, 15 bp, Homo sapiens
acaaattctttcttg

SEQ ID NO: 923107 - DNA, 15 bp, Homo sapiens
caaattctttcttga

SEQ ID NO: 923108 - DNA, 15 bp, Homo sapiens
aaattctttcttgaa

SEQ ID NO: 923109 - DNA, 15 bp, Homo sapiens
aattctttcttgaaa

SEQ ID NO: 923110 - DNA, 15 bp, Homo sapiens
attctttcttgaaaa

SEQ ID NO: 923111 - DNA, 15 bp, Homo sapiens
ttctttcttgaaaat

SEQ ID NO: 923112 - DNA, 15 bp, Homo sapiens
tctttcttgaaaatg

SEQ ID NO: 923113 - DNA, 15 bp, Homo sapiens
ctttcttgaaaatgg

SEQ ID NO: 923114 - DNA, 15 bp, Homo sapiens
tttcttgaaaatggt

SEQ ID NO: 923115 - DNA, 15 bp, Homo sapiens
ttcttgaaaatggtt

SEQ ID NO: 923116 - DNA, 15 bp, Homo sapiens
tcttgaaaatggttg

SEQ ID NO: 923117 - DNA, 15 bp, Homo sapiens
cttgaaaatggttgt

SEQ ID NO: 923118 - DNA, 15 bp, Homo sapiens
ttgaaaatggttgtg

SEQ ID NO: 923119 - DNA, 15 bp, Homo sapiens
tgaaaatggttgtgc

SEQ ID NO: 923120 - DNA, 15 bp, Homo sapiens
gaaaatggttgtgcc

SEQ ID NO: 923121 - DNA, 15 bp, Homo sapiens
aaaatggttgtgcca

SEQ ID NO: 923122 - DNA, 15 bp, Homo sapiens
aaatggttgtgccag

SEQ ID NO: 923123 - DNA, 15 bp, Homo sapiens
aatggttgtgccagt

SEQ ID NO: 923124 - DNA, 15 bp, Homo sapiens
atggttgtgccagtt

SEQ ID NO: 923125 - DNA, 15 bp, Homo sapiens
tggttgtgccagttt

SEQ ID NO: 923126 - DNA, 15 bp, Homo sapiens
ggttgtgccagtttc

SEQ ID NO: 923127 - DNA, 15 bp, Homo sapiens
gttgtgccagtttct

SEQ ID NO: 923128 - DNA, 15 bp, Homo sapiens
ttgtgccagtttctg

SEQ ID NO: 923129 - DNA, 15 bp, Homo sapiens
tgtgccagtttctgg

SEQ ID NO: 923130 - DNA, 15 bp, Homo sapiens
gtgccagtttctggt

SEQ ID NO: 923131 - DNA, 15 bp, Homo sapiens
tgccagtttctggtt

SEQ ID NO: 923132 - DNA, 15 bp, Homo sapiens
gccagtttctggttt

SEQ ID NO: 923133 - DNA, 15 bp, Homo sapiens
ccagtttctggtttt

SEQ ID NO: 923134 - DNA, 15 bp, Homo sapiens
cagtttctggttttt

SEQ ID NO: 923135 - DNA, 15 bp, Homo sapiens
agtttctggttttta

SEQ ID NO: 923136 - DNA, 15 bp, Homo sapiens
gtttctggtttttat

SEQ ID NO: 923137 - DNA, 15 bp, Homo sapiens
tttctggtttttata

SEQ ID NO: 923138 - DNA, 15 bp, Homo sapiens
ttctggtttttataa

SEQ ID NO: 923139 - DNA, 15 bp, Homo sapiens
tctggtttttataag

SEQ ID NO: 923140 - DNA, 15 bp, Homo sapiens
ctggtttttataagt

SEQ ID NO: 923141 - DNA, 15 bp, Homo sapiens
tggtttttataagta

SEQ ID NO: 923142 - DNA, 15 bp, Homo sapiens
ggtttttataagtat

SEQ ID NO: 923143 - DNA, 15 bp, Homo sapiens
gtttttataagtata

SEQ ID NO: 923144 - DNA, 15 bp, Homo sapiens
tttttataagtatac

SEQ ID NO: 923145 - DNA, 15 bp, Homo sapiens
ttttataagtatact

SEQ ID NO: 923146 - DNA, 15 bp, Homo sapiens
tttataagtatactg

SEQ ID NO: 923147 - DNA, 15 bp, Homo sapiens
ttataagtatactgt

SEQ ID NO: 923148 - DNA, 15 bp, Homo sapiens
tataagtatactgtg

SEQ ID NO: 923149 - DNA, 15 bp, Homo sapiens
ataagtatactgtgg

SEQ ID NO: 923150 - DNA, 15 bp, Homo sapiens
taagtatactgtggg

SEQ ID NO: 923151 - DNA, 15 bp, Homo sapiens
aagtatactgtgggc

SEQ ID NO: 923152 - DNA, 15 bp, Homo sapiens
agtatactgtgggca

SEQ ID NO: 923153 - DNA, 15 bp, Homo sapiens
gtatactgtgggcac

SEQ ID NO: 923154 - DNA, 15 bp, Homo sapiens
tatactgtgggcacc

SEQ ID NO: 923155 - DNA, 15 bp, Homo sapiens
atactgtgggcacca

SEQ ID NO: 923156 - DNA, 15 bp, Homo sapiens
tactgtgggcaccac

SEQ ID NO: 923157 - DNA, 15 bp, Homo sapiens
actgtgggcaccaca

SEQ ID NO: 923158 - DNA, 15 bp, Homo sapiens
ctgtgggcaccacag

SEQ ID NO: 923159 - DNA, 15 bp, Homo sapiens
tgtgggcaccacagt

SEQ ID NO: 923160 - DNA, 15 bp, Homo sapiens
gtgggcaccacagtc

SEQ ID NO: 923161 - DNA, 15 bp, Homo sapiens
tgggcaccacagtcc

SEQ ID NO: 923162 - DNA, 15 bp, Homo sapiens
gggcaccacagtcca

SEQ ID NO: 923163 - DNA, 15 bp, Homo sapiens
ggcaccacagtccag

SEQ ID NO: 923164 - DNA, 15 bp, Homo sapiens
gcaccacagtccagc

SEQ ID NO: 923165 - DNA, 15 bp, Homo sapiens
caccacagtccagct

SEQ ID NO: 923166 - DNA, 15 bp, Homo sapiens
accacagtccagctt

SEQ ID NO: 923167 - DNA, 15 bp, Homo sapiens
ccacagtccagcttc

SEQ ID NO: 923168 - DNA, 15 bp, Homo sapiens
cacagtccagcttct

SEQ ID NO: 923169 - DNA, 15 bp, Homo sapiens
acagtccagcttcta

SEQ ID NO: 923170 - DNA, 15 bp, Homo sapiens
cagtccagcttctag

SEQ ID NO: 923171 - DNA, 15 bp, Homo sapiens
agtccagcttctagt

SEQ ID NO: 923172 - DNA, 15 bp, Homo sapiens
gtccagcttctagtt

SEQ ID NO: 923173 - DNA, 15 bp, Homo sapiens
tccagcttctagttt

SEQ ID NO: 923174 - DNA, 15 bp, Homo sapiens
ccagcttctagttta

SEQ ID NO: 923175 - DNA, 15 bp, Homo sapiens
cagcttctagtttat

SEQ ID NO: 923176 - DNA, 15 bp, Homo sapiens
agcttctagtttata

SEQ ID NO: 923177 - DNA, 15 bp, Homo sapiens
gcttctagtttatag

SEQ ID NO: 923178 - DNA, 15 bp, Homo sapiens
cttctagtttatagt

SEQ ID NO: 923179 - DNA, 15 bp, Homo sapiens
ttctagtttatagta

SEQ ID NO: 923180 - DNA, 15 bp, Homo sapiens
tctagtttatagtaa

SEQ ID NO: 923181 - DNA, 15 bp, Homo sapiens
ctagtttatagtaaa

SEQ ID NO: 923182 - DNA, 15 bp, Homo sapiens
tagtttatagtaaat

SEQ ID NO: 923183 - DNA, 15 bp, Homo sapiens
agtttatagtaaatt

SEQ ID NO: 923184 - DNA, 15 bp, Homo sapiens
gtttatagtaaatta

SEQ ID NO: 923185 - DNA, 15 bp, Homo sapiens
tttatagtaaattaa

SEQ ID NO: 923186 - DNA, 15 bp, Homo sapiens
ttatagtaaattaat

SEQ ID NO: 923187 - DNA, 15 bp, Homo sapiens
tatagtaaattaatt

SEQ ID NO: 923188 - DNA, 15 bp, Homo sapiens
atagtaaattaattc

SEQ ID NO: 923189 - DNA, 15 bp, Homo sapiens
tagtaaattaattca

SEQ ID NO: 923190 - DNA, 15 bp, Homo sapiens
agtaaattaattcaa

SEQ ID NO: 923191 - DNA, 15 bp, Homo sapiens
gtaaattaattcaag

SEQ ID NO: 923192 - DNA, 15 bp, Homo sapiens
taaattaattcaagg

SEQ ID NO: 923193 - DNA, 15 bp, Homo sapiens
aaattaattcaagga

SEQ ID NO: 923194 - DNA, 15 bp, Homo sapiens
aattaattcaaggag

SEQ ID NO: 923195 - DNA, 15 bp, Homo sapiens
attaattcaaggagg

SEQ ID NO: 923196 - DNA, 15 bp, Homo sapiens
ttaattcaaggaggt

SEQ ID NO: 923197 - DNA, 15 bp, Homo sapiens
taattcaaggaggtg

SEQ ID NO: 923198 - DNA, 15 bp, Homo sapiens
aattcaaggaggtga

SEQ ID NO: 923199 - DNA, 15 bp, Homo sapiens
attcaaggaggtgag

SEQ ID NO: 923200 - DNA, 15 bp, Homo sapiens
ttcaaggaggtgaga

SEQ ID NO: 923201 - DNA, 15 bp, Homo sapiens
tcaaggaggtgagag

SEQ ID NO: 923202 - DNA, 15 bp, Homo sapiens
caaggaggtgagagg

SEQ ID NO: 923203 - DNA, 15 bp, Homo sapiens
aaggaggtgagaggg

SEQ ID NO: 923204 - DNA, 15 bp, Homo sapiens
aggaggtgagagggc

SEQ ID NO: 923205 - DNA, 15 bp, Homo sapiens
ggaggtgagagggca

SEQ ID NO: 923206 - DNA, 15 bp, Homo sapiens
gaggtgagagggcaa

SEQ ID NO: 923207 - DNA, 15 bp, Homo sapiens
aggtgagagggcaac

SEQ ID NO: 923208 - DNA, 15 bp, Homo sapiens
ggtgagagggcaaca

SEQ ID NO: 923209 - DNA, 15 bp, Homo sapiens
gtgagagggcaacag

SEQ ID NO: 923210 - DNA, 15 bp, Homo sapiens
tgagagggcaacaga

SEQ ID NO: 923211 - DNA, 15 bp, Homo sapiens
gagagggcaacagat

SEQ ID NO: 923212 - DNA, 15 bp, Homo sapiens
agagggcaacagata

SEQ ID NO: 923213 - DNA, 15 bp, Homo sapiens
gagggcaacagatac

SEQ ID NO: 923214 - DNA, 15 bp, Homo sapiens
agggcaacagatacc

SEQ ID NO: 923215 - DNA, 15 bp, Homo sapiens
gggcaacagatacca

SEQ ID NO: 923216 - DNA, 15 bp, Homo sapiens
ggcaacagataccat

SEQ ID NO: 923217 - DNA, 15 bp, Homo sapiens
gcaacagataccatg

SEQ ID NO: 923218 - DNA, 15 bp, Homo sapiens
caacagataccatgc

SEQ ID NO: 923219 - DNA, 15 bp, Homo sapiens
aacagataccatgcc

SEQ ID NO: 923220 - DNA, 15 bp, Homo sapiens
acagataccatgcca

SEQ ID NO: 923221 - DNA, 15 bp, Homo sapiens
cagataccatgccat

SEQ ID NO: 923222 - DNA, 15 bp, Homo sapiens
agataccatgccatt

SEQ ID NO: 923223 - DNA, 15 bp, Homo sapiens
gataccatgccattc

SEQ ID NO: 923224 - DNA, 15 bp, Homo sapiens
ataccatgccattcc

SEQ ID NO: 923225 - DNA, 15 bp, Homo sapiens
taccatgccattccc

SEQ ID NO: 923226 - DNA, 15 bp, Homo sapiens
accatgccattccct

SEQ ID NO: 923227 - DNA, 15 bp, Homo sapiens
ccatgccattccctc

SEQ ID NO: 923228 - DNA, 15 bp, Homo sapiens
catgccattccctcc

SEQ ID NO: 923229 - DNA, 15 bp, Homo sapiens
atgccattccctcct

SEQ ID NO: 923230 - DNA, 15 bp, Homo sapiens
tgccattccctcctc

SEQ ID NO: 923231 - DNA, 15 bp, Homo sapiens
gccattccctcctcc

SEQ ID NO: 923232 - DNA, 15 bp, Homo sapiens
ccattccctcctccc

SEQ ID NO: 923233 - DNA, 15 bp, Homo sapiens
cattccctcctccct

SEQ ID NO: 923234 - DNA, 15 bp, Homo sapiens
attccctcctccctt

SEQ ID NO: 923235 - DNA, 15 bp, Homo sapiens
ttccctcctcccttc

SEQ ID NO: 923236 - DNA, 15 bp, Homo sapiens
tccctcctcccttct

SEQ ID NO: 923237 - DNA, 15 bp, Homo sapiens
ccctcctcccttctc

SEQ ID NO: 923238 - DNA, 15 bp, Homo sapiens
cctcctcccttctcc

SEQ ID NO: 923239 - DNA, 15 bp, Homo sapiens
ctcctcccttctcct

SEQ ID NO: 923240 - DNA, 15 bp, Homo sapiens
tcctcccttctcctt

SEQ ID NO: 923241 - DNA, 15 bp, Homo sapiens
cctcccttctccttt

SEQ ID NO: 923242 - DNA, 15 bp, Homo sapiens
ctcccttctcctttt

SEQ ID NO: 923243 - DNA, 15 bp, Homo sapiens
tcccttctccttttc

SEQ ID NO: 923244 - DNA, 15 bp, Homo sapiens
cccttctccttttct

SEQ ID NO: 923245 - DNA, 15 bp, Homo sapiens
ccttctccttttctt

SEQ ID NO: 923246 - DNA, 15 bp, Homo sapiens
cttctccttttcttg

SEQ ID NO: 923247 - DNA, 15 bp, Homo sapiens
ttctccttttcttgt

SEQ ID NO: 923248 - DNA, 15 bp, Homo sapiens
tctccttttcttgtc

SEQ ID NO: 923249 - DNA, 15 bp, Homo sapiens
ctccttttcttgtct

SEQ ID NO: 923250 - DNA, 15 bp, Homo sapiens
tccttttcttgtctt

SEQ ID NO: 923251 - DNA, 15 bp, Homo sapiens
ccttttcttgtcttc

SEQ ID NO: 923252 - DNA, 15 bp, Homo sapiens
cttttcttgtcttcc

SEQ ID NO: 923253 - DNA, 15 bp, Homo sapiens
ttttcttgtcttccc

SEQ ID NO: 923254 - DNA, 15 bp, Homo sapiens
tttcttgtcttcccc

SEQ ID NO: 923255 - DNA, 15 bp, Homo sapiens
ttcttgtcttcccca

SEQ ID NO: 923256 - DNA, 15 bp, Homo sapiens
tcttgtcttccccat

SEQ ID NO: 923257 - DNA, 15 bp, Homo sapiens
cttgtcttccccatc

SEQ ID NO: 923258 - DNA, 15 bp, Homo sapiens
ttgtcttccccatct

SEQ ID NO: 923259 - DNA, 15 bp, Homo sapiens
tgtcttccccatctc

SEQ ID NO: 923260 - DNA, 15 bp, Homo sapiens
gtcttccccatctct

SEQ ID NO: 923261 - DNA, 15 bp, Homo sapiens
tcttccccatctctt

SEQ ID NO: 923262 - DNA, 15 bp, Homo sapiens
cttccccatctcttt

SEQ ID NO: 923263 - DNA, 15 bp, Homo sapiens
ttccccatctctttt

SEQ ID NO: 923264 - DNA, 15 bp, Homo sapiens
tccccatctcttttt

SEQ ID NO: 923265 - DNA, 15 bp, Homo sapiens
ccccatctctttttt

SEQ ID NO: 923266 - DNA, 15 bp, Homo sapiens
cccatctcttttttc

SEQ ID NO: 923267 - DNA, 15 bp, Homo sapiens
ccatctcttttttcc

SEQ ID NO: 923268 - DNA, 15 bp, Homo sapiens
catctcttttttcca

SEQ ID NO: 923269 - DNA, 15 bp, Homo sapiens
atctcttttttccaa

SEQ ID NO: 923270 - DNA, 15 bp, Homo sapiens
tctcttttttccaag

SEQ ID NO: 923271 - DNA, 15 bp, Homo sapiens
ctcttttttccaaga

SEQ ID NO: 923272 - DNA, 15 bp, Homo sapiens
tcttttttccaagat

SEQ ID NO: 923273 - DNA, 15 bp, Homo sapiens
cttttttccaagata

SEQ ID NO: 923274 - DNA, 15 bp, Homo sapiens
ttttttccaagatac

SEQ ID NO: 923275 - DNA, 15 bp, Homo sapiens
tttttccaagataca

SEQ ID NO: 923276 - DNA, 15 bp, Homo sapiens
ttttccaagatacat

SEQ ID NO: 923277 - DNA, 15 bp, Homo sapiens
tttccaagatacata

SEQ ID NO: 923278 - DNA, 15 bp, Homo sapiens
ttccaagatacatag

SEQ ID NO: 923279 - DNA, 15 bp, Homo sapiens
tccaagatacataga

SEQ ID NO: 923280 - DNA, 15 bp, Homo sapiens
ccaagatacatagat

SEQ ID NO: 923281 - DNA, 15 bp, Homo sapiens
caagatacatagatg

SEQ ID NO: 923282 - DNA, 15 bp, Homo sapiens
aagatacatagatgc

SEQ ID NO: 923283 - DNA, 15 bp, Homo sapiens
agatacatagatgct

SEQ ID NO: 923284 - DNA, 15 bp, Homo sapiens
gatacatagatgcta

SEQ ID NO: 923285 - DNA, 15 bp, Homo sapiens
atacatagatgctat

SEQ ID NO: 923286 - DNA, 15 bp, Homo sapiens
tacatagatgctatt

SEQ ID NO: 923287 - DNA, 15 bp, Homo sapiens
acatagatgctatta

SEQ ID NO: 923288 - DNA, 15 bp, Homo sapiens
catagatgctattat

SEQ ID NO: 923289 - DNA, 15 bp, Homo sapiens
atagatgctattata

SEQ ID NO: 923290 - DNA, 15 bp, Homo sapiens
tagatgctattatat

SEQ ID NO: 923291 - DNA, 15 bp, Homo sapiens
agatgctattatatg

SEQ ID NO: 923292 - DNA, 15 bp, Homo sapiens
gatgctattatatgc

SEQ ID NO: 923293 - DNA, 15 bp, Homo sapiens
atgctattatatgca

SEQ ID NO: 923294 - DNA, 15 bp, Homo sapiens
tgctattatatgcaa

SEQ ID NO: 923295 - DNA, 15 bp, Homo sapiens
gctattatatgcaat

SEQ ID NO: 923296 - DNA, 15 bp, Homo sapiens
ctattatatgcaata

SEQ ID NO: 923297 - DNA, 15 bp, Homo sapiens
tattatatgcaatag

SEQ ID NO: 923298 - DNA, 15 bp, Homo sapiens
attatatgcaatagt

SEQ ID NO: 923299 - DNA, 15 bp, Homo sapiens
ttatatgcaatagta

SEQ ID NO: 923300 - DNA, 15 bp, Homo sapiens
tatatgcaatagtat

SEQ ID NO: 923301 - DNA, 15 bp, Homo sapiens
atatgcaatagtata

SEQ ID NO: 923302 - DNA, 15 bp, Homo sapiens
tatgcaatagtatat

SEQ ID NO: 923303 - DNA, 15 bp, Homo sapiens
atgcaatagtatatg

SEQ ID NO: 923304 - DNA, 15 bp, Homo sapiens
tgcaatagtatatgc

SEQ ID NO: 923305 - DNA, 15 bp, Homo sapiens
gcaatagtatatgca

SEQ ID NO: 923306 - DNA, 15 bp, Homo sapiens
caatagtatatgcaa

SEQ ID NO: 923307 - DNA, 15 bp, Homo sapiens
aatagtatatgcaaa

SEQ ID NO: 923308 - DNA, 15 bp, Homo sapiens
atagtatatgcaaat

SEQ ID NO: 923309 - DNA, 15 bp, Homo sapiens
tagtatatgcaaatt

SEQ ID NO: 923310 - DNA, 15 bp, Homo sapiens
agtatatgcaaattg

SEQ ID NO: 923311 - DNA, 15 bp, Homo sapiens
gtatatgcaaattga

SEQ ID NO: 923312 - DNA, 15 bp, Homo sapiens
tatatgcaaattgat

SEQ ID NO: 923313 - DNA, 15 bp, Homo sapiens
atatgcaaattgatg

SEQ ID NO: 923314 - DNA, 15 bp, Homo sapiens
tatgcaaattgatgt

SEQ ID NO: 923315 - DNA, 15 bp, Homo sapiens
atgcaaattgatgtg

SEQ ID NO: 923316 - DNA, 15 bp, Homo sapiens
tgcaaattgatgtga

SEQ ID NO: 923317 - DNA, 15 bp, Homo sapiens
gcaaattgatgtgag

SEQ ID NO: 923318 - DNA, 15 bp, Homo sapiens
caaattgatgtgagg

SEQ ID NO: 923319 - DNA, 15 bp, Homo sapiens
aaattgatgtgagga

SEQ ID NO: 923320 - DNA, 15 bp, Homo sapiens
aattgatgtgaggaa

SEQ ID NO: 923321 - DNA, 15 bp, Homo sapiens
attgatgtgaggaat

SEQ ID NO: 923322 - DNA, 15 bp, Homo sapiens
ttgatgtgaggaatg

SEQ ID NO: 923323 - DNA, 15 bp, Homo sapiens
tgatgtgaggaatgg

SEQ ID NO: 923324 - DNA, 15 bp, Homo sapiens
gatgtgaggaatgga

SEQ ID NO: 923325 - DNA, 15 bp, Homo sapiens
atgtgaggaatggag

SEQ ID NO: 923326 - DNA, 15 bp, Homo sapiens
tgtgaggaatggaga

SEQ ID NO: 923327 - DNA, 15 bp, Homo sapiens
gtgaggaatggagac

SEQ ID NO: 923328 - DNA, 15 bp, Homo sapiens
tgaggaatggagacc

SEQ ID NO: 923329 - DNA, 15 bp, Homo sapiens
gaggaatggagacct

SEQ ID NO: 923330 - DNA, 15 bp, Homo sapiens
aggaatggagacctg

SEQ ID NO: 923331 - DNA, 15 bp, Homo sapiens
ggaatggagacctga

SEQ ID NO: 923332 - DNA, 15 bp, Homo sapiens
gaatggagacctgaa

SEQ ID NO: 923333 - DNA, 15 bp, Homo sapiens
aatggagacctgaac

SEQ ID NO: 923334 - DNA, 15 bp, Homo sapiens
atggagacctgaact

SEQ ID NO: 923335 - DNA, 15 bp, Homo sapiens
tggagacctgaactt

SEQ ID NO: 923336 - DNA, 15 bp, Homo sapiens
ggagacctgaacttc

SEQ ID NO: 923337 - DNA, 15 bp, Homo sapiens
gagacctgaacttct

SEQ ID NO: 923338 - DNA, 15 bp, Homo sapiens
agacctgaacttctg

SEQ ID NO: 923339 - DNA, 15 bp, Homo sapiens
gacctgaacttctgt

SEQ ID NO: 923340 - DNA, 15 bp, Homo sapiens
acctgaacttctgtc

SEQ ID NO: 923341 - DNA, 15 bp, Homo sapiens
cctgaacttctgtct

SEQ ID NO: 923342 - DNA, 15 bp, Homo sapiens
ctgaacttctgtctt

SEQ ID NO: 923343 - DNA, 15 bp, Homo sapiens
tgaacttctgtcttc

SEQ ID NO: 923344 - DNA, 15 bp, Homo sapiens
gaacttctgtcttct

SEQ ID NO: 923345 - DNA, 15 bp, Homo sapiens
aacttctgtcttcta

SEQ ID NO: 923346 - DNA, 15 bp, Homo sapiens
acttctgtcttctaa

SEQ ID NO: 923347 - DNA, 15 bp, Homo sapiens
cttctgtcttctaag

SEQ ID NO: 923348 - DNA, 15 bp, Homo sapiens
ttctgtcttctaagc

SEQ ID NO: 923349 - DNA, 15 bp, Homo sapiens
tctgtcttctaagca

SEQ ID NO: 923350 - DNA, 15 bp, Homo sapiens
ctgtcttctaagcaa

SEQ ID NO: 923351 - DNA, 15 bp, Homo sapiens
tgtcttctaagcaaa

SEQ ID NO: 923352 - DNA, 15 bp, Homo sapiens
gtcttctaagcaaaa

SEQ ID NO: 923353 - DNA, 15 bp, Homo sapiens
tcttctaagcaaaat

SEQ ID NO: 923354 - DNA, 15 bp, Homo sapiens
cttctaagcaaaatg

SEQ ID NO: 923355 - DNA, 15 bp, Homo sapiens
ttctaagcaaaatgt

SEQ ID NO: 923356 - DNA, 15 bp, Homo sapiens
tctaagcaaaatgtt

SEQ ID NO: 923357 - DNA, 15 bp, Homo sapiens
ctaagcaaaatgttt

SEQ ID NO: 923358 - DNA, 15 bp, Homo sapiens
taagcaaaatgtttc

SEQ ID NO: 923359 - DNA, 15 bp, Homo sapiens
aagcaaaatgtttca

SEQ ID NO: 923360 - DNA, 15 bp, Homo sapiens
agcaaaatgtttcat

SEQ ID NO: 923361 - DNA, 15 bp, Homo sapiens
gcaaaatgtttcatt

SEQ ID NO: 923362 - DNA, 15 bp, Homo sapiens
caaaatgtttcattc

SEQ ID NO: 923363 - DNA, 15 bp, Homo sapiens
aaaatgtttcattca

SEQ ID NO: 923364 - DNA, 15 bp, Homo sapiens
aaatgtttcattcac

SEQ ID NO: 923365 - DNA, 15 bp, Homo sapiens
aatgtttcattcact

SEQ ID NO: 923366 - DNA, 15 bp, Homo sapiens
atgtttcattcacta

SEQ ID NO: 923367 - DNA, 15 bp, Homo sapiens
tgtttcattcactag

SEQ ID NO: 923368 - DNA, 15 bp, Homo sapiens
gtttcattcactagt

SEQ ID NO: 923369 - DNA, 15 bp, Homo sapiens
tttcattcactagtg

SEQ ID NO: 923370 - DNA, 15 bp, Homo sapiens
ttcattcactagtgg

SEQ ID NO: 923371 - DNA, 15 bp, Homo sapiens
tcattcactagtgga

SEQ ID NO: 923372 - DNA, 15 bp, Homo sapiens
cattcactagtggac

SEQ ID NO: 923373 - DNA, 15 bp, Homo sapiens
attcactagtggact

SEQ ID NO: 923374 - DNA, 15 bp, Homo sapiens
ttcactagtggactc

SEQ ID NO: 923375 - DNA, 15 bp, Homo sapiens
tcactagtggactct

SEQ ID NO: 923376 - DNA, 15 bp, Homo sapiens
cactagtggactctt

SEQ ID NO: 923377 - DNA, 15 bp, Homo sapiens
actagtggactctta

SEQ ID NO: 923378 - DNA, 15 bp, Homo sapiens
ctagtggactcttaa

SEQ ID NO: 923379 - DNA, 15 bp, Homo sapiens
tagtggactcttaag

SEQ ID NO: 923380 - DNA, 15 bp, Homo sapiens
agtggactcttaaga

SEQ ID NO: 923381 - DNA, 15 bp, Homo sapiens
gtggactcttaagaa

SEQ ID NO: 923382 - DNA, 15 bp, Homo sapiens
tggactcttaagaac

SEQ ID NO: 923383 - DNA, 15 bp, Homo sapiens
ggactcttaagaact

SEQ ID NO: 923384 - DNA, 15 bp, Homo sapiens
gactcttaagaactc

SEQ ID NO: 923385 - DNA, 15 bp, Homo sapiens
actcttaagaactct

SEQ ID NO: 923386 - DNA, 15 bp, Homo sapiens
ctcttaagaactctt

SEQ ID NO: 923387 - DNA, 15 bp, Homo sapiens
tcttaagaactctta

SEQ ID NO: 923388 - DNA, 15 bp, Homo sapiens
cttaagaactcttaa

SEQ ID NO: 923389 - DNA, 15 bp, Homo sapiens
ttaagaactcttaag

SEQ ID NO: 923390 - DNA, 15 bp, Homo sapiens
taagaactcttaaga

SEQ ID NO: 923391 - DNA, 15 bp, Homo sapiens
aagaactcttaagag

SEQ ID NO: 923392 - DNA, 15 bp, Homo sapiens
agaactcttaagagc

SEQ ID NO: 923393 - DNA, 15 bp, Homo sapiens
gaactcttaagagct

SEQ ID NO: 923394 - DNA, 15 bp, Homo sapiens
aactcttaagagctc

SEQ ID NO: 923395 - DNA, 15 bp, Homo sapiens
actcttaagagctct

SEQ ID NO: 923396 - DNA, 15 bp, Homo sapiens
ctcttaagagctctt

SEQ ID NO: 923397 - DNA, 15 bp, Homo sapiens
tcttaagagctctta

SEQ ID NO: 923398 - DNA, 15 bp, Homo sapiens
cttaagagctcttat

SEQ ID NO: 923399 - DNA, 15 bp, Homo sapiens
ttaagagctcttatg

SEQ ID NO: 923400 - DNA, 15 bp, Homo sapiens
taagagctcttatga

SEQ ID NO: 923401 - DNA, 15 bp, Homo sapiens
aagagctcttatgaa

SEQ ID NO: 923402 - DNA, 15 bp, Homo sapiens
agagctcttatgaac

SEQ ID NO: 923403 - DNA, 15 bp, Homo sapiens
gagctcttatgaaca

SEQ ID NO: 923404 - DNA, 15 bp, Homo sapiens
agctcttatgaacag

SEQ ID NO: 923405 - DNA, 15 bp, Homo sapiens
gctcttatgaacaga

SEQ ID NO: 923406 - DNA, 15 bp, Homo sapiens
ctcttatgaacagaa

SEQ ID NO: 923407 - DNA, 15 bp, Homo sapiens
tcttatgaacagaaa

SEQ ID NO: 923408 - DNA, 15 bp, Homo sapiens
cttatgaacagaaat

SEQ ID NO: 923409 - DNA, 15 bp, Homo sapiens
ttatgaacagaaatg

SEQ ID NO: 923410 - DNA, 15 bp, Homo sapiens
tatgaacagaaatgc

SEQ ID NO: 923411 - DNA, 15 bp, Homo sapiens
atgaacagaaatgct

SEQ ID NO: 923412 - DNA, 15 bp, Homo sapiens
tgaacagaaatgctg

SEQ ID NO: 923413 - DNA, 15 bp, Homo sapiens
gaacagaaatgctgg

SEQ ID NO: 923414 - DNA, 15 bp, Homo sapiens
aacagaaatgctgga

SEQ ID NO: 923415 - DNA, 15 bp, Homo sapiens
acagaaatgctggaa

SEQ ID NO: 923416 - DNA, 15 bp, Homo sapiens
cagaaatgctggaat

SEQ ID NO: 923417 - DNA, 15 bp, Homo sapiens
agaaatgctggaatt

SEQ ID NO: 923418 - DNA, 15 bp, Homo sapiens
gaaatgctggaattg

SEQ ID NO: 923419 - DNA, 15 bp, Homo sapiens
aaatgctggaattgt

SEQ ID NO: 923420 - DNA, 15 bp, Homo sapiens
aatgctggaattgtt

SEQ ID NO: 923421 - DNA, 15 bp, Homo sapiens
atgctggaattgttt

SEQ ID NO: 923422 - DNA, 15 bp, Homo sapiens
tgctggaattgtttt

SEQ ID NO: 923423 - DNA, 15 bp, Homo sapiens
gctggaattgttttt

SEQ ID NO: 923424 - DNA, 15 bp, Homo sapiens
ctggaattgttttta

SEQ ID NO: 923425 - DNA, 15 bp, Homo sapiens
tggaattgtttttaa

SEQ ID NO: 923426 - DNA, 15 bp, Homo sapiens
ggaattgtttttaag

SEQ ID NO: 923427 - DNA, 15 bp, Homo sapiens
gaattgtttttaaga

SEQ ID NO: 923428 - DNA, 15 bp, Homo sapiens
aattgtttttaagaa

SEQ ID NO: 923429 - DNA, 15 bp, Homo sapiens
attgtttttaagaaa

SEQ ID NO: 923430 - DNA, 15 bp, Homo sapiens
ttgtttttaagaaaa

SEQ ID NO: 923431 - DNA, 15 bp, Homo sapiens
tgtttttaagaaaat

SEQ ID NO: 923432 - DNA, 15 bp, Homo sapiens
gtttttaagaaaatg

SEQ ID NO: 923433 - DNA, 15 bp, Homo sapiens
tttttaagaaaatgt

SEQ ID NO: 923434 - DNA, 15 bp, Homo sapiens
ttttaagaaaatgtt

SEQ ID NO: 923435 - DNA, 15 bp, Homo sapiens
tttaagaaaatgtta

SEQ ID NO: 923436 - DNA, 15 bp, Homo sapiens
ttaagaaaatgttat

SEQ ID NO: 923437 - DNA, 15 bp, Homo sapiens
taagaaaatgttatc

SEQ ID NO: 923438 - DNA, 15 bp, Homo sapiens
aagaaaatgttatcc

SEQ ID NO: 923439 - DNA, 15 bp, Homo sapiens
agaaaatgttatcca

SEQ ID NO: 923440 - DNA, 15 bp, Homo sapiens
gaaaatgttatccaa

SEQ ID NO: 923441 - DNA, 15 bp, Homo sapiens
aaaatgttatccaag

SEQ ID NO: 923442 - DNA, 15 bp, Homo sapiens
aaatgttatccaagc

SEQ ID NO: 923443 - DNA, 15 bp, Homo sapiens
aatgttatccaagcc

SEQ ID NO: 923444 - DNA, 15 bp, Homo sapiens
atgttatccaagcct

SEQ ID NO: 923445 - DNA, 15 bp, Homo sapiens
tgttatccaagccta

SEQ ID NO: 923446 - DNA, 15 bp, Homo sapiens
gttatccaagcctaa

SEQ ID NO: 923447 - DNA, 15 bp, Homo sapiens
ttatccaagcctaat

SEQ ID NO: 923448 - DNA, 15 bp, Homo sapiens
tatccaagcctaatc

SEQ ID NO: 923449 - DNA, 15 bp, Homo sapiens
atccaagcctaatca

SEQ ID NO: 923450 - DNA, 15 bp, Homo sapiens
tccaagcctaatcag

SEQ ID NO: 923451 - DNA, 15 bp, Homo sapiens
ccaagcctaatcagc

SEQ ID NO: 923452 - DNA, 15 bp, Homo sapiens
caagcctaatcagct

SEQ ID NO: 923453 - DNA, 15 bp, Homo sapiens
aagcctaatcagctt

SEQ ID NO: 923454 - DNA, 15 bp, Homo sapiens
agcctaatcagcttt

SEQ ID NO: 923455 - DNA, 15 bp, Homo sapiens
gcctaatcagcttta

SEQ ID NO: 923456 - DNA, 15 bp, Homo sapiens
cctaatcagctttag

SEQ ID NO: 923457 - DNA, 15 bp, Homo sapiens
ctaatcagctttagt

SEQ ID NO: 923458 - DNA, 15 bp, Homo sapiens
taatcagctttagtg

SEQ ID NO: 923459 - DNA, 15 bp, Homo sapiens
aatcagctttagtgt

SEQ ID NO: 923460 - DNA, 15 bp, Homo sapiens
atcagctttagtgtt

SEQ ID NO: 923461 - DNA, 15 bp, Homo sapiens
tcagctttagtgttt

SEQ ID NO: 923462 - DNA, 15 bp, Homo sapiens
cagctttagtgtttt

SEQ ID NO: 923463 - DNA, 15 bp, Homo sapiens
agctttagtgtttta

SEQ ID NO: 923464 - DNA, 15 bp, Homo sapiens
gctttagtgttttag

SEQ ID NO: 923465 - DNA, 15 bp, Homo sapiens
ctttagtgttttaga

SEQ ID NO: 923466 - DNA, 15 bp, Homo sapiens
tttagtgttttagaa

SEQ ID NO: 923467 - DNA, 15 bp, Homo sapiens
ttagtgttttagaaa

SEQ ID NO: 923468 - DNA, 15 bp, Homo sapiens
tagtgttttagaaag

SEQ ID NO: 923469 - DNA, 15 bp, Homo sapiens
agtgttttagaaagc

SEQ ID NO: 923470 - DNA, 15 bp, Homo sapiens
gtgttttagaaagca

SEQ ID NO: 923471 - DNA, 15 bp, Homo sapiens
tgttttagaaagcaa

SEQ ID NO: 923472 - DNA, 15 bp, Homo sapiens
gttttagaaagcaac

SEQ ID NO: 923473 - DNA, 15 bp, Homo sapiens
ttttagaaagcaact

SEQ ID NO: 923474 - DNA, 15 bp, Homo sapiens
tttagaaagcaactt

SEQ ID NO: 923475 - DNA, 15 bp, Homo sapiens
ttagaaagcaacttt

SEQ ID NO: 923476 - DNA, 15 bp, Homo sapiens
tagaaagcaactttc

SEQ ID NO: 923477 - DNA, 15 bp, Homo sapiens
agaaagcaactttca

SEQ ID NO: 923478 - DNA, 15 bp, Homo sapiens
gaaagcaactttcaa

SEQ ID NO: 923479 - DNA, 15 bp, Homo sapiens
aaagcaactttcaat

SEQ ID NO: 923480 - DNA, 15 bp, Homo sapiens
aagcaactttcaatt

SEQ ID NO: 923481 - DNA, 15 bp, Homo sapiens
agcaactttcaatta

SEQ ID NO: 923482 - DNA, 15 bp, Homo sapiens
gcaactttcaattat

SEQ ID NO: 923483 - DNA, 15 bp, Homo sapiens
caactttcaattatc

SEQ ID NO: 923484 - DNA, 15 bp, Homo sapiens
aactttcaattatct

SEQ ID NO: 923485 - DNA, 15 bp, Homo sapiens
actttcaattatctg

SEQ ID NO: 923486 - DNA, 15 bp, Homo sapiens
ctttcaattatctgg

SEQ ID NO: 923487 - DNA, 15 bp, Homo sapiens
tttcaattatctgga

SEQ ID NO: 923488 - DNA, 15 bp, Homo sapiens
ttcaattatctggaa

SEQ ID NO: 923489 - DNA, 15 bp, Homo sapiens
tcaattatctggaaa

SEQ ID NO: 923490 - DNA, 15 bp, Homo sapiens
caattatctggaaaa

SEQ ID NO: 923491 - DNA, 15 bp, Homo sapiens
aattatctggaaaag

SEQ ID NO: 923492 - DNA, 15 bp, Homo sapiens
attatctggaaaagt

SEQ ID NO: 923493 - DNA, 15 bp, Homo sapiens
ttatctggaaaagtg

SEQ ID NO: 923494 - DNA, 15 bp, Homo sapiens
tatctggaaaagtga

SEQ ID NO: 923495 - DNA, 15 bp, Homo sapiens
atctggaaaagtgat

SEQ ID NO: 923496 - DNA, 15 bp, Homo sapiens
tctggaaaagtgatt

SEQ ID NO: 923497 - DNA, 15 bp, Homo sapiens
ctggaaaagtgattt

SEQ ID NO: 923498 - DNA, 15 bp, Homo sapiens
tggaaaagtgattta

SEQ ID NO: 923499 - DNA, 15 bp, Homo sapiens
ggaaaagtgatttat

SEQ ID NO: 923500 - DNA, 15 bp, Homo sapiens
gaaaagtgatttatg

SEQ ID NO: 923501 - DNA, 15 bp, Homo sapiens
aaaagtgatttatgt

SEQ ID NO: 923502 - DNA, 15 bp, Homo sapiens
aaagtgatttatgtg

SEQ ID NO: 923503 - DNA, 15 bp, Homo sapiens
aagtgatttatgtga

SEQ ID NO: 923504 - DNA, 15 bp, Homo sapiens
agtgatttatgtgaa

SEQ ID NO: 923505 - DNA, 15 bp, Homo sapiens
gtgatttatgtgaag

SEQ ID NO: 923506 - DNA, 15 bp, Homo sapiens
tgatttatgtgaagc

SEQ ID NO: 923507 - DNA, 15 bp, Homo sapiens
gatttatgtgaagca

SEQ ID NO: 923508 - DNA, 15 bp, Homo sapiens
atttatgtgaagcac

SEQ ID NO: 923509 - DNA, 15 bp, Homo sapiens
tttatgtgaagcacc

SEQ ID NO: 923510 - DNA, 15 bp, Homo sapiens
ttatgtgaagcacct

SEQ ID NO: 923511 - DNA, 15 bp, Homo sapiens
tatgtgaagcacctt

SEQ ID NO: 923512 - DNA, 15 bp, Homo sapiens
atgtgaagcacctta

SEQ ID NO: 923513 - DNA, 15 bp, Homo sapiens
tgtgaagcaccttat

SEQ ID NO: 923514 - DNA, 15 bp, Homo sapiens
gtgaagcaccttatt

SEQ ID NO: 923515 - DNA, 15 bp, Homo sapiens
tgaagcaccttattt

SEQ ID NO: 923516 - DNA, 15 bp, Homo sapiens
gaagcaccttatttt

SEQ ID NO: 923517 - DNA, 15 bp, Homo sapiens
aagcaccttattttt

SEQ ID NO: 923518 - DNA, 15 bp, Homo sapiens
agcaccttatttttc

SEQ ID NO: 923519 - DNA, 15 bp, Homo sapiens
gcaccttatttttca

SEQ ID NO: 923520 - DNA, 15 bp, Homo sapiens
caccttatttttcag

SEQ ID NO: 923521 - DNA, 15 bp, Homo sapiens
accttatttttcagt

SEQ ID NO: 923522 - DNA, 15 bp, Homo sapiens
ccttatttttcagta

SEQ ID NO: 923523 - DNA, 15 bp, Homo sapiens
cttatttttcagtag

SEQ ID NO: 923524 - DNA, 15 bp, Homo sapiens
ttatttttcagtagt

SEQ ID NO: 923525 - DNA, 15 bp, Homo sapiens
tatttttcagtagtt

SEQ ID NO: 923526 - DNA, 15 bp, Homo sapiens
atttttcagtagttt

SEQ ID NO: 923527 - DNA, 15 bp, Homo sapiens
tttttcagtagtttc

SEQ ID NO: 923528 - DNA, 15 bp, Homo sapiens
ttttcagtagtttcg

SEQ ID NO: 923529 - DNA, 15 bp, Homo sapiens
tttcagtagtttcga

SEQ ID NO: 923530 - DNA, 15 bp, Homo sapiens
ttcagtagtttcgaa

SEQ ID NO: 923531 - DNA, 15 bp, Homo sapiens
tcagtagtttcgaat

SEQ ID NO: 923532 - DNA, 15 bp, Homo sapiens
cagtagtttcgaata

SEQ ID NO: 923533 - DNA, 15 bp, Homo sapiens
agtagtttcgaatat

SEQ ID NO: 923534 - DNA, 15 bp, Homo sapiens
gtagtttcgaatatg

SEQ ID NO: 923535 - DNA, 15 bp, Homo sapiens
tagtttcgaatatgt

SEQ ID NO: 923536 - DNA, 15 bp, Homo sapiens
agtttcgaatatgtt

SEQ ID NO: 923537 - DNA, 15 bp, Homo sapiens
gtttcgaatatgtta

SEQ ID NO: 923538 - DNA, 15 bp, Homo sapiens
tttcgaatatgttag

SEQ ID NO: 923539 - DNA, 15 bp, Homo sapiens
ttcgaatatgttagg

SEQ ID NO: 923540 - DNA, 15 bp, Homo sapiens
tcgaatatgttaggc

SEQ ID NO: 923541 - DNA, 15 bp, Homo sapiens
cgaatatgttaggca

SEQ ID NO: 923542 - DNA, 15 bp, Homo sapiens
gaatatgttaggcat

SEQ ID NO: 923543 - DNA, 15 bp, Homo sapiens
aatatgttaggcatt

SEQ ID NO: 923544 - DNA, 15 bp, Homo sapiens
atatgttaggcatta

SEQ ID NO: 923545 - DNA, 15 bp, Homo sapiens
tatgttaggcattat

SEQ ID NO: 923546 - DNA, 15 bp, Homo sapiens
atgttaggcattatt

SEQ ID NO: 923547 - DNA, 15 bp, Homo sapiens
tgttaggcattattt

SEQ ID NO: 923548 - DNA, 15 bp, Homo sapiens
gttaggcattattta

SEQ ID NO: 923549 - DNA, 15 bp, Homo sapiens
ttaggcattatttac

SEQ ID NO: 923550 - DNA, 15 bp, Homo sapiens
taggcattatttaca

SEQ ID NO: 923551 - DNA, 15 bp, Homo sapiens
aggcattatttacaa

SEQ ID NO: 923552 - DNA, 15 bp, Homo sapiens
ggcattatttacaag

SEQ ID NO: 923553 - DNA, 15 bp, Homo sapiens
gcattatttacaagc

SEQ ID NO: 923554 - DNA, 15 bp, Homo sapiens
cattatttacaagca

SEQ ID NO: 923555 - DNA, 15 bp, Homo sapiens
attatttacaagcaa

SEQ ID NO: 923556 - DNA, 15 bp, Homo sapiens
ttatttacaagcaaa

SEQ ID NO: 923557 - DNA, 15 bp, Homo sapiens
tatttacaagcaaag

SEQ ID NO: 923558 - DNA, 15 bp, Homo sapiens
atttacaagcaaaga

SEQ ID NO: 923559 - DNA, 15 bp, Homo sapiens
tttacaagcaaagaa

SEQ ID NO: 923560 - DNA, 15 bp, Homo sapiens
ttacaagcaaagaaa

SEQ ID NO: 923561 - DNA, 15 bp, Homo sapiens
tacaagcaaagaaag

SEQ ID NO: 923562 - DNA, 15 bp, Homo sapiens
acaagcaaagaaaga

SEQ ID NO: 923563 - DNA, 15 bp, Homo sapiens
caagcaaagaaagaa

SEQ ID NO: 923564 - DNA, 15 bp, Homo sapiens
aagcaaagaaagaag

SEQ ID NO: 923565 - DNA, 15 bp, Homo sapiens
agcaaagaaagaagt

SEQ ID NO: 923566 - DNA, 15 bp, Homo sapiens
gcaaagaaagaagtc

SEQ ID NO: 923567 - DNA, 15 bp, Homo sapiens
caaagaaagaagtca

SEQ ID NO: 923568 - DNA, 15 bp, Homo sapiens
aaagaaagaagtcag

SEQ ID NO: 923569 - DNA, 15 bp, Homo sapiens
aagaaagaagtcaga

SEQ ID NO: 923570 - DNA, 15 bp, Homo sapiens
agaaagaagtcagac

SEQ ID NO: 923571 - DNA, 15 bp, Homo sapiens
gaaagaagtcagaca

SEQ ID NO: 923572 - DNA, 15 bp, Homo sapiens
aaagaagtcagacaa

SEQ ID NO: 923573 - DNA, 15 bp, Homo sapiens
aagaagtcagacaac

SEQ ID NO: 923574 - DNA, 15 bp, Homo sapiens
agaagtcagacaact

SEQ ID NO: 923575 - DNA, 15 bp, Homo sapiens
gaagtcagacaactt

SEQ ID NO: 923576 - DNA, 15 bp, Homo sapiens
aagtcagacaactta

SEQ ID NO: 923577 - DNA, 15 bp, Homo sapiens
agtcagacaacttaa

SEQ ID NO: 923578 - DNA, 15 bp, Homo sapiens
gtcagacaacttaat

SEQ ID NO: 923579 - DNA, 15 bp, Homo sapiens
tcagacaacttaata

SEQ ID NO: 923580 - DNA, 15 bp, Homo sapiens
cagacaacttaataa

SEQ ID NO: 923581 - DNA, 15 bp, Homo sapiens
agacaacttaataaa

SEQ ID NO: 923582 - DNA, 15 bp, Homo sapiens
gacaacttaataaaa

SEQ ID NO: 923583 - DNA, 15 bp, Homo sapiens
acaacttaataaaac

SEQ ID NO: 923584 - DNA, 15 bp, Homo sapiens
caacttaataaaact

SEQ ID NO: 923585 - DNA, 15 bp, Homo sapiens
aacttaataaaacta

SEQ ID NO: 923586 - DNA, 15 bp, Homo sapiens
acttaataaaactat

SEQ ID NO: 923587 - DNA, 15 bp, Homo sapiens
cttaataaaactata

SEQ ID NO: 923588 - DNA, 15 bp, Homo sapiens
ttaataaaactatat

SEQ ID NO: 923589 - DNA, 15 bp, Homo sapiens
taataaaactatata

SEQ ID NO: 923590 - DNA, 15 bp, Homo sapiens
aataaaactatatag

SEQ ID NO: 923591 - DNA, 15 bp, Homo sapiens
ataaaactatatagc

SEQ ID NO: 923592 - DNA, 15 bp, Homo sapiens
taaaactatatagca

SEQ ID NO: 923593 - DNA, 15 bp, Homo sapiens
aaaactatatagcat

SEQ ID NO: 923594 - DNA, 15 bp, Homo sapiens
aaactatatagcatt

SEQ ID NO: 923595 - DNA, 15 bp, Homo sapiens
aactatatagcattt

SEQ ID NO: 923596 - DNA, 15 bp, Homo sapiens
actatatagcatttt

SEQ ID NO: 923597 - DNA, 15 bp, Homo sapiens
ctatatagcattttt

SEQ ID NO: 923598 - DNA, 15 bp, Homo sapiens
tatatagcattttta

SEQ ID NO: 923599 - DNA, 15 bp, Homo sapiens
atatagcatttttaa

SEQ ID NO: 923600 - DNA, 15 bp, Homo sapiens
tatagcatttttaat

SEQ ID NO: 923601 - DNA, 15 bp, Homo sapiens
atagcatttttaata

SEQ ID NO: 923602 - DNA, 15 bp, Homo sapiens
tagcatttttaatac

SEQ ID NO: 923603 - DNA, 15 bp, Homo sapiens
agcatttttaatacg

SEQ ID NO: 923604 - DNA, 15 bp, Homo sapiens
gcatttttaatacgg

SEQ ID NO: 923605 - DNA, 15 bp, Homo sapiens
catttttaatacgga

SEQ ID NO: 923606 - DNA, 15 bp, Homo sapiens
atttttaatacggag

SEQ ID NO: 923607 - DNA, 15 bp, Homo sapiens
tttttaatacggaga

SEQ ID NO: 923608 - DNA, 15 bp, Homo sapiens
ttttaatacggagaa

SEQ ID NO: 923609 - DNA, 15 bp, Homo sapiens
tttaatacggagaaa

SEQ ID NO: 923610 - DNA, 15 bp, Homo sapiens
ttaatacggagaaag

SEQ ID NO: 923611 - DNA, 15 bp, Homo sapiens
taatacggagaaagt

SEQ ID NO: 923612 - DNA, 15 bp, Homo sapiens
aatacggagaaagtg

SEQ ID NO: 923613 - DNA, 15 bp, Homo sapiens
atacggagaaagtgt

SEQ ID NO: 923614 - DNA, 15 bp, Homo sapiens
tacggagaaagtgtt

SEQ ID NO: 923615 - DNA, 15 bp, Homo sapiens
acggagaaagtgttt

SEQ ID NO: 923616 - DNA, 15 bp, Homo sapiens
cggagaaagtgtttc

SEQ ID NO: 923617 - DNA, 15 bp, Homo sapiens
ggagaaagtgtttct

SEQ ID NO: 923618 - DNA, 15 bp, Homo sapiens
gagaaagtgtttcta

SEQ ID NO: 923619 - DNA, 15 bp, Homo sapiens
agaaagtgtttctac

SEQ ID NO: 923620 - DNA, 15 bp, Homo sapiens
gaaagtgtttctact

SEQ ID NO: 923621 - DNA, 15 bp, Homo sapiens
aaagtgtttctactc

SEQ ID NO: 923622 - DNA, 15 bp, Homo sapiens
aagtgtttctactct

SEQ ID NO: 923623 - DNA, 15 bp, Homo sapiens
agtgtttctactctc

SEQ ID NO: 923624 - DNA, 15 bp, Homo sapiens
gtgtttctactctcc

SEQ ID NO: 923625 - DNA, 15 bp, Homo sapiens
tgtttctactctccc

SEQ ID NO: 923626 - DNA, 15 bp, Homo sapiens
gtttctactctccct

SEQ ID NO: 923627 - DNA, 15 bp, Homo sapiens
tttctactctccctg

SEQ ID NO: 923628 - DNA, 15 bp, Homo sapiens
ttctactctccctga

SEQ ID NO: 923629 - DNA, 15 bp, Homo sapiens
tctactctccctgat

SEQ ID NO: 923630 - DNA, 15 bp, Homo sapiens
ctactctccctgatg

SEQ ID NO: 923631 - DNA, 15 bp, Homo sapiens
tactctccctgatgg

SEQ ID NO: 923632 - DNA, 15 bp, Homo sapiens
actctccctgatgga

SEQ ID NO: 923633 - DNA, 15 bp, Homo sapiens
ctctccctgatggaa

SEQ ID NO: 923634 - DNA, 15 bp, Homo sapiens
tctccctgatggaag

SEQ ID NO: 923635 - DNA, 15 bp, Homo sapiens
ctccctgatggaagc

SEQ ID NO: 923636 - DNA, 15 bp, Homo sapiens
tccctgatggaagct

SEQ ID NO: 923637 - DNA, 15 bp, Homo sapiens
ccctgatggaagctt

SEQ ID NO: 923638 - DNA, 15 bp, Homo sapiens
cctgatggaagctta

SEQ ID NO: 923639 - DNA, 15 bp, Homo sapiens
ctgatggaagcttat

SEQ ID NO: 923640 - DNA, 15 bp, Homo sapiens
tgatggaagcttatc

SEQ ID NO: 923641 - DNA, 15 bp, Homo sapiens
gatggaagcttatct

SEQ ID NO: 923642 - DNA, 15 bp, Homo sapiens
atggaagcttatcta

SEQ ID NO: 923643 - DNA, 15 bp, Homo sapiens
tggaagcttatctat

SEQ ID NO: 923644 - DNA, 15 bp, Homo sapiens
ggaagcttatctatt

SEQ ID NO: 923645 - DNA, 15 bp, Homo sapiens
gaagcttatctatta

SEQ ID NO: 923646 - DNA, 15 bp, Homo sapiens
aagcttatctattaa

SEQ ID NO: 923647 - DNA, 15 bp, Homo sapiens
agcttatctattaaa

SEQ ID NO: 923648 - DNA, 15 bp, Homo sapiens
gcttatctattaaaa

SEQ ID NO: 923649 - DNA, 15 bp, Homo sapiens
cttatctattaaaag

SEQ ID NO: 923650 - DNA, 15 bp, Homo sapiens
ttatctattaaaagg

SEQ ID NO: 923651 - DNA, 15 bp, Homo sapiens
tatctattaaaagga

SEQ ID NO: 923652 - DNA, 15 bp, Homo sapiens
atctattaaaaggat

SEQ ID NO: 923653 - DNA, 15 bp, Homo sapiens
tctattaaaaggatt

SEQ ID NO: 923654 - DNA, 15 bp, Homo sapiens
ctattaaaaggattc

SEQ ID NO: 923655 - DNA, 15 bp, Homo sapiens
tattaaaaggattca

SEQ ID NO: 923656 - DNA, 15 bp, Homo sapiens
attaaaaggattcag

SEQ ID NO: 923657 - DNA, 15 bp, Homo sapiens
ttaaaaggattcaga

SEQ ID NO: 923658 - DNA, 15 bp, Homo sapiens
taaaaggattcagat

SEQ ID NO: 923659 - DNA, 15 bp, Homo sapiens
aaaaggattcagata

SEQ ID NO: 923660 - DNA, 15 bp, Homo sapiens
aaaggattcagatat

SEQ ID NO: 923661 - DNA, 15 bp, Homo sapiens
aaggattcagatatc

SEQ ID NO: 923662 - DNA, 15 bp, Homo sapiens
aggattcagatatct

SEQ ID NO: 923663 - DNA, 15 bp, Homo sapiens
ggattcagatatcta

SEQ ID NO: 923664 - DNA, 15 bp, Homo sapiens
gattcagatatctaa

SEQ ID NO: 923665 - DNA, 15 bp, Homo sapiens
attcagatatctaaa

SEQ ID NO: 923666 - DNA, 15 bp, Homo sapiens
ttcagatatctaaac

SEQ ID NO: 923667 - DNA, 15 bp, Homo sapiens
tcagatatctaaact

SEQ ID NO: 923668 - DNA, 15 bp, Homo sapiens
cagatatctaaactt

SEQ ID NO: 923669 - DNA, 15 bp, Homo sapiens
agatatctaaacttt

SEQ ID NO: 923670 - DNA, 15 bp, Homo sapiens
gatatctaaacttta

SEQ ID NO: 923671 - DNA, 15 bp, Homo sapiens
atatctaaactttaa

SEQ ID NO: 923672 - DNA, 15 bp, Homo sapiens
tatctaaactttaag

SEQ ID NO: 923673 - DNA, 15 bp, Homo sapiens
atctaaactttaaga

SEQ ID NO: 923674 - DNA, 15 bp, Homo sapiens
tctaaactttaagaa

SEQ ID NO: 923675 - DNA, 15 bp, Homo sapiens
ctaaactttaagaaa

SEQ ID NO: 923676 - DNA, 15 bp, Homo sapiens
taaactttaagaaag

SEQ ID NO: 923677 - DNA, 15 bp, Homo sapiens
aaactttaagaaagg

SEQ ID NO: 923678 - DNA, 15 bp, Homo sapiens
aactttaagaaaggc

SEQ ID NO: 923679 - DNA, 15 bp, Homo sapiens
actttaagaaaggca

SEQ ID NO: 923680 - DNA, 15 bp, Homo sapiens
ctttaagaaaggcag

SEQ ID NO: 923681 - DNA, 15 bp, Homo sapiens
tttaagaaaggcaga

SEQ ID NO: 923682 - DNA, 15 bp, Homo sapiens
ttaagaaaggcagag

SEQ ID NO: 923683 - DNA, 15 bp, Homo sapiens
taagaaaggcagaga

SEQ ID NO: 923684 - DNA, 15 bp, Homo sapiens
aagaaaggcagagac

SEQ ID NO: 923685 - DNA, 15 bp, Homo sapiens
agaaaggcagagacc

SEQ ID NO: 923686 - DNA, 15 bp, Homo sapiens
gaaaggcagagaccc

SEQ ID NO: 923687 - DNA, 15 bp, Homo sapiens
aaaggcagagaccct

SEQ ID NO: 923688 - DNA, 15 bp, Homo sapiens
aaggcagagaccctt

SEQ ID NO: 923689 - DNA, 15 bp, Homo sapiens
aggcagagacccttc

SEQ ID NO: 923690 - DNA, 15 bp, Homo sapiens
ggcagagacccttcc

SEQ ID NO: 923691 - DNA, 15 bp, Homo sapiens
gcagagacccttcct

SEQ ID NO: 923692 - DNA, 15 bp, Homo sapiens
cagagacccttccta

SEQ ID NO: 923693 - DNA, 15 bp, Homo sapiens
agagacccttcctac

SEQ ID NO: 923694 - DNA, 15 bp, Homo sapiens
gagacccttcctacc

SEQ ID NO: 923695 - DNA, 15 bp, Homo sapiens
agacccttcctacct

SEQ ID NO: 923696 - DNA, 15 bp, Homo sapiens
gacccttcctacctc

SEQ ID NO: 923697 - DNA, 15 bp, Homo sapiens
acccttcctacctcc

SEQ ID NO: 923698 - DNA, 15 bp, Homo sapiens
cccttcctacctcct

SEQ ID NO: 923699 - DNA, 15 bp, Homo sapiens
ccttcctacctcctt

SEQ ID NO: 923700 - DNA, 15 bp, Homo sapiens
cttcctacctcctta

SEQ ID NO: 923701 - DNA, 15 bp, Homo sapiens
ttcctacctccttaa

SEQ ID NO: 923702 - DNA, 15 bp, Homo sapiens
tcctacctccttaat

SEQ ID NO: 923703 - DNA, 15 bp, Homo sapiens
cctacctccttaata

SEQ ID NO: 923704 - DNA, 15 bp, Homo sapiens
ctacctccttaatat

SEQ ID NO: 923705 - DNA, 15 bp, Homo sapiens
tacctccttaatatg

SEQ ID NO: 923706 - DNA, 15 bp, Homo sapiens
acctccttaatatgg

SEQ ID NO: 923707 - DNA, 15 bp, Homo sapiens
cctccttaatatggt

SEQ ID NO: 923708 - DNA, 15 bp, Homo sapiens
ctccttaatatggtt

SEQ ID NO: 923709 - DNA, 15 bp, Homo sapiens
tccttaatatggttc

SEQ ID NO: 923710 - DNA, 15 bp, Homo sapiens
ccttaatatggttca

SEQ ID NO: 923711 - DNA, 15 bp, Homo sapiens
cttaatatggttcat

SEQ ID NO: 923712 - DNA, 15 bp, Homo sapiens
ttaatatggttcatc

SEQ ID NO: 923713 - DNA, 15 bp, Homo sapiens
taatatggttcatcg

SEQ ID NO: 923714 - DNA, 15 bp, Homo sapiens
aatatggttcatcgg

SEQ ID NO: 923715 - DNA, 15 bp, Homo sapiens
atatggttcatcggg

SEQ ID NO: 923716 - DNA, 15 bp, Homo sapiens
tatggttcatcgggg

SEQ ID NO: 923717 - DNA, 15 bp, Homo sapiens
atggttcatcggggt

SEQ ID NO: 923718 - DNA, 15 bp, Homo sapiens
tggttcatcggggta

SEQ ID NO: 923719 - DNA, 15 bp, Homo sapiens
ggttcatcggggtaa

SEQ ID NO: 923720 - DNA, 15 bp, Homo sapiens
gttcatcggggtaaa

SEQ ID NO: 923721 - DNA, 15 bp, Homo sapiens
ttcatcggggtaaaa

SEQ ID NO: 923722 - DNA, 15 bp, Homo sapiens
tcatcggggtaaaag

SEQ ID NO: 923723 - DNA, 15 bp, Homo sapiens
catcggggtaaaagt

SEQ ID NO: 923724 - DNA, 15 bp, Homo sapiens
atcggggtaaaagtt

SEQ ID NO: 923725 - DNA, 15 bp, Homo sapiens
tcggggtaaaagtta

SEQ ID NO: 923726 - DNA, 15 bp, Homo sapiens
cggggtaaaagttac

SEQ ID NO: 923727 - DNA, 15 bp, Homo sapiens
ggggtaaaagttact

SEQ ID NO: 923728 - DNA, 15 bp, Homo sapiens
gggtaaaagttactc

SEQ ID NO: 923729 - DNA, 15 bp, Homo sapiens
ggtaaaagttactcc

SEQ ID NO: 923730 - DNA, 15 bp, Homo sapiens
gtaaaagttactcct

SEQ ID NO: 923731 - DNA, 15 bp, Homo sapiens
taaaagttactcctt

SEQ ID NO: 923732 - DNA, 15 bp, Homo sapiens
aaaagttactcctta

SEQ ID NO: 923733 - DNA, 15 bp, Homo sapiens
aaagttactccttac

SEQ ID NO: 923734 - DNA, 15 bp, Homo sapiens
aagttactccttact

SEQ ID NO: 923735 - DNA, 15 bp, Homo sapiens
agttactccttactc

SEQ ID NO: 923736 - DNA, 15 bp, Homo sapiens
gttactccttactca

SEQ ID NO: 923737 - DNA, 15 bp, Homo sapiens
ttactccttactcac

SEQ ID NO: 923738 - DNA, 15 bp, Homo sapiens
tactccttactcact

SEQ ID NO: 923739 - DNA, 15 bp, Homo sapiens
actccttactcacta

SEQ ID NO: 923740 - DNA, 15 bp, Homo sapiens
ctccttactcactaa

SEQ ID NO: 923741 - DNA, 15 bp, Homo sapiens
tccttactcactaac

SEQ ID NO: 923742 - DNA, 15 bp, Homo sapiens
ccttactcactaacc

SEQ ID NO: 923743 - DNA, 15 bp, Homo sapiens
cttactcactaacca

SEQ ID NO: 923744 - DNA, 15 bp, Homo sapiens
ttactcactaaccaa

SEQ ID NO: 923745 - DNA, 15 bp, Homo sapiens
tactcactaaccaaa

SEQ ID NO: 923746 - DNA, 15 bp, Homo sapiens
actcactaaccaaac

SEQ ID NO: 923747 - DNA, 15 bp, Homo sapiens
ctcactaaccaaacc

SEQ ID NO: 923748 - DNA, 15 bp, Homo sapiens
tcactaaccaaacct

SEQ ID NO: 923749 - DNA, 15 bp, Homo sapiens
cactaaccaaacctc

SEQ ID NO: 923750 - DNA, 15 bp, Homo sapiens
actaaccaaacctct

SEQ ID NO: 923751 - DNA, 15 bp, Homo sapiens
ctaaccaaacctcta

SEQ ID NO: 923752 - DNA, 15 bp, Homo sapiens
taaccaaacctctag

SEQ ID NO: 923753 - DNA, 15 bp, Homo sapiens
aaccaaacctctagg

SEQ ID NO: 923754 - DNA, 15 bp, Homo sapiens
accaaacctctaggt

SEQ ID NO: 923755 - DNA, 15 bp, Homo sapiens
ccaaacctctaggtc

SEQ ID NO: 923756 - DNA, 15 bp, Homo sapiens
caaacctctaggtca

SEQ ID NO: 923757 - DNA, 15 bp, Homo sapiens
aaacctctaggtcat

SEQ ID NO: 923758 - DNA, 15 bp, Homo sapiens
aacctctaggtcatc

SEQ ID NO: 923759 - DNA, 15 bp, Homo sapiens
acctctaggtcatct

SEQ ID NO: 923760 - DNA, 15 bp, Homo sapiens
cctctaggtcatctt

SEQ ID NO: 923761 - DNA, 15 bp, Homo sapiens
ctctaggtcatcttc

SEQ ID NO: 923762 - DNA, 15 bp, Homo sapiens
tctaggtcatcttcc

SEQ ID NO: 923763 - DNA, 15 bp, Homo sapiens
ctaggtcatcttccc

SEQ ID NO: 923764 - DNA, 15 bp, Homo sapiens
taggtcatcttccca

SEQ ID NO: 923765 - DNA, 15 bp, Homo sapiens
aggtcatcttcccac

SEQ ID NO: 923766 - DNA, 15 bp, Homo sapiens
ggtcatcttcccact

SEQ ID NO: 923767 - DNA, 15 bp, Homo sapiens
gtcatcttcccactt

SEQ ID NO: 923768 - DNA, 15 bp, Homo sapiens
tcatcttcccacttc

SEQ ID NO: 923769 - DNA, 15 bp, Homo sapiens
catcttcccacttca

SEQ ID NO: 923770 - DNA, 15 bp, Homo sapiens
atcttcccacttcat

SEQ ID NO: 923771 - DNA, 15 bp, Homo sapiens
tcttcccacttcata

SEQ ID NO: 923772 - DNA, 15 bp, Homo sapiens
cttcccacttcatat

SEQ ID NO: 923773 - DNA, 15 bp, Homo sapiens
ttcccacttcatatt

SEQ ID NO: 923774 - DNA, 15 bp, Homo sapiens
tcccacttcatattc

SEQ ID NO: 923775 - DNA, 15 bp, Homo sapiens
cccacttcatattcc

SEQ ID NO: 923776 - DNA, 15 bp, Homo sapiens
ccacttcatattcct

SEQ ID NO: 923777 - DNA, 15 bp, Homo sapiens
cacttcatattcctt

SEQ ID NO: 923778 - DNA, 15 bp, Homo sapiens
acttcatattccttc

SEQ ID NO: 923779 - DNA, 15 bp, Homo sapiens
cttcatattccttct

SEQ ID NO: 923780 - DNA, 15 bp, Homo sapiens
ttcatattccttctt

SEQ ID NO: 923781 - DNA, 15 bp, Homo sapiens
tcatattccttcttc

SEQ ID NO: 923782 - DNA, 15 bp, Homo sapiens
catattccttcttct

SEQ ID NO: 923783 - DNA, 15 bp, Homo sapiens
atattccttcttctc

SEQ ID NO: 923784 - DNA, 15 bp, Homo sapiens
tattccttcttctcc

SEQ ID NO: 923785 - DNA, 15 bp, Homo sapiens
attccttcttctccg

SEQ ID NO: 923786 - DNA, 15 bp, Homo sapiens
ttccttcttctccgt

SEQ ID NO: 923787 - DNA, 15 bp, Homo sapiens
tccttcttctccgtg

SEQ ID NO: 923788 - DNA, 15 bp, Homo sapiens
ccttcttctccgtga

SEQ ID NO: 923789 - DNA, 15 bp, Homo sapiens
cttcttctccgtgac

SEQ ID NO: 923790 - DNA, 15 bp, Homo sapiens
ttcttctccgtgact

SEQ ID NO: 923791 - DNA, 15 bp, Homo sapiens
tcttctccgtgactg

SEQ ID NO: 923792 - DNA, 15 bp, Homo sapiens
cttctccgtgactga

SEQ ID NO: 923793 - DNA, 15 bp, Homo sapiens
ttctccgtgactgat

SEQ ID NO: 923794 - DNA, 15 bp, Homo sapiens
tctccgtgactgata

SEQ ID NO: 923795 - DNA, 15 bp, Homo sapiens
ctccgtgactgataa

SEQ ID NO: 923796 - DNA, 15 bp, Homo sapiens
tccgtgactgataaa

SEQ ID NO: 923797 - DNA, 15 bp, Homo sapiens
ccgtgactgataaac

SEQ ID NO: 923798 - DNA, 15 bp, Homo sapiens
cgtgactgataaacc

SEQ ID NO: 923799 - DNA, 15 bp, Homo sapiens
gtgactgataaacct

SEQ ID NO: 923800 - DNA, 15 bp, Homo sapiens
tgactgataaacctc

SEQ ID NO: 923801 - DNA, 15 bp, Homo sapiens
gactgataaacctct

SEQ ID NO: 923802 - DNA, 15 bp, Homo sapiens
actgataaacctctc

SEQ ID NO: 923803 - DNA, 15 bp, Homo sapiens
ctgataaacctctca

SEQ ID NO: 923804 - DNA, 15 bp, Homo sapiens
tgataaacctctcag

SEQ ID NO: 923805 - DNA, 15 bp, Homo sapiens
gataaacctctcagt

SEQ ID NO: 923806 - DNA, 15 bp, Homo sapiens
ataaacctctcagta

SEQ ID NO: 923807 - DNA, 15 bp, Homo sapiens
taaacctctcagtac

SEQ ID NO: 923808 - DNA, 15 bp, Homo sapiens
aaacctctcagtact

SEQ ID NO: 923809 - DNA, 15 bp, Homo sapiens
aacctctcagtactt

SEQ ID NO: 923810 - DNA, 15 bp, Homo sapiens
acctctcagtacttt

SEQ ID NO: 923811 - DNA, 15 bp, Homo sapiens
cctctcagtactttc

SEQ ID NO: 923812 - DNA, 15 bp, Homo sapiens
ctctcagtactttct

SEQ ID NO: 923813 - DNA, 15 bp, Homo sapiens
tctcagtactttctg

SEQ ID NO: 923814 - DNA, 15 bp, Homo sapiens
ctcagtactttctga

SEQ ID NO: 923815 - DNA, 15 bp, Homo sapiens
tcagtactttctgaa

SEQ ID NO: 923816 - DNA, 15 bp, Homo sapiens
cagtactttctgaaa

SEQ ID NO: 923817 - DNA, 15 bp, Homo sapiens
agtactttctgaaat

SEQ ID NO: 923818 - DNA, 15 bp, Homo sapiens
gtactttctgaaatt

SEQ ID NO: 923819 - DNA, 15 bp, Homo sapiens
tactttctgaaattc

SEQ ID NO: 923820 - DNA, 15 bp, Homo sapiens
actttctgaaattcc

SEQ ID NO: 923821 - DNA, 15 bp, Homo sapiens
ctttctgaaattcct

SEQ ID NO: 923822 - DNA, 15 bp, Homo sapiens
tttctgaaattcctg

SEQ ID NO: 923823 - DNA, 15 bp, Homo sapiens
ttctgaaattcctgg

SEQ ID NO: 923824 - DNA, 15 bp, Homo sapiens
tctgaaattcctggt

SEQ ID NO: 923825 - DNA, 15 bp, Homo sapiens
ctgaaattcctggta

SEQ ID NO: 923826 - DNA, 15 bp, Homo sapiens
tgaaattcctggtaa

SEQ ID NO: 923827 - DNA, 15 bp, Homo sapiens
gaaattcctggtaaa

SEQ ID NO: 923828 - DNA, 15 bp, Homo sapiens
aaattcctggtaaag

SEQ ID NO: 923829 - DNA, 15 bp, Homo sapiens
aattcctggtaaaga

SEQ ID NO: 923830 - DNA, 15 bp, Homo sapiens
attcctggtaaagat

SEQ ID NO: 923831 - DNA, 15 bp, Homo sapiens
ttcctggtaaagatg

SEQ ID NO: 923832 - DNA, 15 bp, Homo sapiens
tcctggtaaagatgg

SEQ ID NO: 923833 - DNA, 15 bp, Homo sapiens
cctggtaaagatggc

SEQ ID NO: 923834 - DNA, 15 bp, Homo sapiens
ctggtaaagatggca

SEQ ID NO: 923835 - DNA, 15 bp, Homo sapiens
tggtaaagatggcat

SEQ ID NO: 923836 - DNA, 15 bp, Homo sapiens
ggtaaagatggcatt

SEQ ID NO: 923837 - DNA, 15 bp, Homo sapiens
gtaaagatggcattc

SEQ ID NO: 923838 - DNA, 15 bp, Homo sapiens
taaagatggcattct

SEQ ID NO: 923839 - DNA, 15 bp, Homo sapiens
aaagatggcattctc

SEQ ID NO: 923840 - DNA, 15 bp, Homo sapiens
aagatggcattctca

SEQ ID NO: 923841 - DNA, 15 bp, Homo sapiens
agatggcattctcag

SEQ ID NO: 923842 - DNA, 15 bp, Homo sapiens
gatggcattctcagt

SEQ ID NO: 923843 - DNA, 15 bp, Homo sapiens
atggcattctcagtg

SEQ ID NO: 923844 - DNA, 15 bp, Homo sapiens
tggcattctcagtgg

SEQ ID NO: 923845 - DNA, 15 bp, Homo sapiens
ggcattctcagtggt

SEQ ID NO: 923846 - DNA, 15 bp, Homo sapiens
gcattctcagtggtg

SEQ ID NO: 923847 - DNA, 15 bp, Homo sapiens
cattctcagtggtgc

SEQ ID NO: 923848 - DNA, 15 bp, Homo sapiens
attctcagtggtgct

SEQ ID NO: 923849 - DNA, 15 bp, Homo sapiens
ttctcagtggtgctt

SEQ ID NO: 923850 - DNA, 15 bp, Homo sapiens
tctcagtggtgcttg

SEQ ID NO: 923851 - DNA, 15 bp, Homo sapiens
ctcagtggtgcttgc

SEQ ID NO: 923852 - DNA, 15 bp, Homo sapiens
tcagtggtgcttgct

SEQ ID NO: 923853 - DNA, 15 bp, Homo sapiens
cagtggtgcttgctt

SEQ ID NO: 923854 - DNA, 15 bp, Homo sapiens
agtggtgcttgcttc

SEQ ID NO: 923855 - DNA, 15 bp, Homo sapiens
gtggtgcttgcttcc

SEQ ID NO: 923856 - DNA, 15 bp, Homo sapiens
tggtgcttgcttcct

SEQ ID NO: 923857 - DNA, 15 bp, Homo sapiens
ggtgcttgcttccta

SEQ ID NO: 923858 - DNA, 15 bp, Homo sapiens
gtgcttgcttcctaa

SEQ ID NO: 923859 - DNA, 15 bp, Homo sapiens
tgcttgcttcctaac

SEQ ID NO: 923860 - DNA, 15 bp, Homo sapiens
gcttgcttcctaaca

SEQ ID NO: 923861 - DNA, 15 bp, Homo sapiens
cttgcttcctaacac

SEQ ID NO: 923862 - DNA, 15 bp, Homo sapiens
ttgcttcctaacaca

SEQ ID NO: 923863 - DNA, 15 bp, Homo sapiens
tgcttcctaacacat

SEQ ID NO: 923864 - DNA, 15 bp, Homo sapiens
gcttcctaacacatg

SEQ ID NO: 923865 - DNA, 15 bp, Homo sapiens
cttcctaacacatgg

SEQ ID NO: 923866 - DNA, 15 bp, Homo sapiens
ttcctaacacatggc

SEQ ID NO: 923867 - DNA, 15 bp, Homo sapiens
tcctaacacatggca

SEQ ID NO: 923868 - DNA, 15 bp, Homo sapiens
cctaacacatggcaa

SEQ ID NO: 923869 - DNA, 15 bp, Homo sapiens
ctaacacatggcaaa

SEQ ID NO: 923870 - DNA, 15 bp, Homo sapiens
taacacatggcaaaa

SEQ ID NO: 923871 - DNA, 15 bp, Homo sapiens
aacacatggcaaaaa

SEQ ID NO: 923872 - DNA, 15 bp, Homo sapiens
acacatggcaaaaac

SEQ ID NO: 923873 - DNA, 15 bp, Homo sapiens
cacatggcaaaaaca

SEQ ID NO: 923874 - DNA, 15 bp, Homo sapiens
acatggcaaaaacag

SEQ ID NO: 923875 - DNA, 15 bp, Homo sapiens
catggcaaaaacaga

SEQ ID NO: 923876 - DNA, 15 bp, Homo sapiens
atggcaaaaacagac

SEQ ID NO: 923877 - DNA, 15 bp, Homo sapiens
tggcaaaaacagact

SEQ ID NO: 923878 - DNA, 15 bp, Homo sapiens
ggcaaaaacagactg

SEQ ID NO: 923879 - DNA, 15 bp, Homo sapiens
gcaaaaacagactga

SEQ ID NO: 923880 - DNA, 15 bp, Homo sapiens
caaaaacagactgac

SEQ ID NO: 923881 - DNA, 15 bp, Homo sapiens
aaaaacagactgaca

SEQ ID NO: 923882 - DNA, 15 bp, Homo sapiens
aaaacagactgacag

SEQ ID NO: 923883 - DNA, 15 bp, Homo sapiens
aaacagactgacagc

SEQ ID NO: 923884 - DNA, 15 bp, Homo sapiens
aacagactgacagct

SEQ ID NO: 923885 - DNA, 15 bp, Homo sapiens
acagactgacagctt

SEQ ID NO: 923886 - DNA, 15 bp, Homo sapiens
cagactgacagctta

SEQ ID NO: 923887 - DNA, 15 bp, Homo sapiens
agactgacagcttat

SEQ ID NO: 923888 - DNA, 15 bp, Homo sapiens
gactgacagcttatt

SEQ ID NO: 923889 - DNA, 15 bp, Homo sapiens
actgacagcttatta

SEQ ID NO: 923890 - DNA, 15 bp, Homo sapiens
ctgacagcttattag

SEQ ID NO: 923891 - DNA, 15 bp, Homo sapiens
tgacagcttattagt

SEQ ID NO: 923892 - DNA, 15 bp, Homo sapiens
gacagcttattagtg

SEQ ID NO: 923893 - DNA, 15 bp, Homo sapiens
acagcttattagtgc

SEQ ID NO: 923894 - DNA, 15 bp, Homo sapiens
cagcttattagtgct

SEQ ID NO: 923895 - DNA, 15 bp, Homo sapiens
agcttattagtgctg

SEQ ID NO: 923896 - DNA, 15 bp, Homo sapiens
gcttattagtgctgt

SEQ ID NO: 923897 - DNA, 15 bp, Homo sapiens
cttattagtgctgtc

SEQ ID NO: 923898 - DNA, 15 bp, Homo sapiens
ttattagtgctgtca

SEQ ID NO: 923899 - DNA, 15 bp, Homo sapiens
tattagtgctgtcag

SEQ ID NO: 923900 - DNA, 15 bp, Homo sapiens
attagtgctgtcagt

SEQ ID NO: 923901 - DNA, 15 bp, Homo sapiens
ttagtgctgtcagta

SEQ ID NO: 923902 - DNA, 15 bp, Homo sapiens
tagtgctgtcagtaa

SEQ ID NO: 923903 - DNA, 15 bp, Homo sapiens
agtgctgtcagtaac

SEQ ID NO: 923904 - DNA, 15 bp, Homo sapiens
gtgctgtcagtaaca

SEQ ID NO: 923905 - DNA, 15 bp, Homo sapiens
tgctgtcagtaacag

SEQ ID NO: 923906 - DNA, 15 bp, Homo sapiens
gctgtcagtaacagc

SEQ ID NO: 923907 - DNA, 15 bp, Homo sapiens
ctgtcagtaacagct

SEQ ID NO: 923908 - DNA, 15 bp, Homo sapiens
tgtcagtaacagcta

SEQ ID NO: 923909 - DNA, 15 bp, Homo sapiens
gtcagtaacagctac

SEQ ID NO: 923910 - DNA, 15 bp, Homo sapiens
tcagtaacagctaca

SEQ ID NO: 923911 - DNA, 15 bp, Homo sapiens
cagtaacagctacat

SEQ ID NO: 923912 - DNA, 15 bp, Homo sapiens
agtaacagctacatt

SEQ ID NO: 923913 - DNA, 15 bp, Homo sapiens
gtaacagctacattg

SEQ ID NO: 923914 - DNA, 15 bp, Homo sapiens
taacagctacattga

SEQ ID NO: 923915 - DNA, 15 bp, Homo sapiens
aacagctacattgag

SEQ ID NO: 923916 - DNA, 15 bp, Homo sapiens
acagctacattgaga

SEQ ID NO: 923917 - DNA, 15 bp, Homo sapiens
cagctacattgagac

SEQ ID NO: 923918 - DNA, 15 bp, Homo sapiens
agctacattgagact

SEQ ID NO: 923919 - DNA, 15 bp, Homo sapiens
gctacattgagactg

SEQ ID NO: 923920 - DNA, 15 bp, Homo sapiens
ctacattgagactga

SEQ ID NO: 923921 - DNA, 15 bp, Homo sapiens
tacattgagactgaa

SEQ ID NO: 923922 - DNA, 15 bp, Homo sapiens
acattgagactgaaa

SEQ ID NO: 923923 - DNA, 15 bp, Homo sapiens
cattgagactgaaaa

SEQ ID NO: 923924 - DNA, 15 bp, Homo sapiens
attgagactgaaaag

SEQ ID NO: 923925 - DNA, 15 bp, Homo sapiens
ttgagactgaaaagg

SEQ ID NO: 923926 - DNA, 15 bp, Homo sapiens
tgagactgaaaaggc

SEQ ID NO: 923927 - DNA, 15 bp, Homo sapiens
gagactgaaaaggct

SEQ ID NO: 923928 - DNA, 15 bp, Homo sapiens
agactgaaaaggcta

SEQ ID NO: 923929 - DNA, 15 bp, Homo sapiens
gactgaaaaggctag

SEQ ID NO: 923930 - DNA, 15 bp, Homo sapiens
actgaaaaggctagg

SEQ ID NO: 923931 - DNA, 15 bp, Homo sapiens
ctgaaaaggctaggg

SEQ ID NO: 923932 - DNA, 15 bp, Homo sapiens
tgaaaaggctagggg

SEQ ID NO: 923933 - DNA, 15 bp, Homo sapiens
gaaaaggctagggga

SEQ ID NO: 923934 - DNA, 15 bp, Homo sapiens
aaaaggctaggggac

SEQ ID NO: 923935 - DNA, 15 bp, Homo sapiens
aaaggctaggggacc

SEQ ID NO: 923936 - DNA, 15 bp, Homo sapiens
aaggctaggggaccc

SEQ ID NO: 923937 - DNA, 15 bp, Homo sapiens
aggctaggggaccca

SEQ ID NO: 923938 - DNA, 15 bp, Homo sapiens
ggctaggggacccaa

SEQ ID NO: 923939 - DNA, 15 bp, Homo sapiens
gctaggggacccaag

SEQ ID NO: 923940 - DNA, 15 bp, Homo sapiens
ctaggggacccaagc

SEQ ID NO: 923941 - DNA, 15 bp, Homo sapiens
taggggacccaagcc

SEQ ID NO: 923942 - DNA, 15 bp, Homo sapiens
aggggacccaagcca

SEQ ID NO: 923943 - DNA, 15 bp, Homo sapiens
ggggacccaagccac

SEQ ID NO: 923944 - DNA, 15 bp, Homo sapiens
gggacccaagccaca

SEQ ID NO: 923945 - DNA, 15 bp, Homo sapiens
ggacccaagccacat

SEQ ID NO: 923946 - DNA, 15 bp, Homo sapiens
gacccaagccacata

SEQ ID NO: 923947 - DNA, 15 bp, Homo sapiens
acccaagccacatag

SEQ ID NO: 923948 - DNA, 15 bp, Homo sapiens
cccaagccacatagc

SEQ ID NO: 923949 - DNA, 15 bp, Homo sapiens
ccaagccacatagct

SEQ ID NO: 923950 - DNA, 15 bp, Homo sapiens
caagccacatagcta

SEQ ID NO: 923951 - DNA, 15 bp, Homo sapiens
aagccacatagctat

SEQ ID NO: 923952 - DNA, 15 bp, Homo sapiens
agccacatagctatt

SEQ ID NO: 923953 - DNA, 15 bp, Homo sapiens
gccacatagctatta

SEQ ID NO: 923954 - DNA, 15 bp, Homo sapiens
ccacatagctattaa

SEQ ID NO: 923955 - DNA, 15 bp, Homo sapiens
cacatagctattaat

SEQ ID NO: 923956 - DNA, 15 bp, Homo sapiens
acatagctattaata

SEQ ID NO: 923957 - DNA, 15 bp, Homo sapiens
catagctattaataa

SEQ ID NO: 923958 - DNA, 15 bp, Homo sapiens
atagctattaataaa

SEQ ID NO: 923959 - DNA, 15 bp, Homo sapiens
tagctattaataaaa

SEQ ID NO: 923960 - DNA, 15 bp, Homo sapiens
agctattaataaaag

SEQ ID NO: 923961 - DNA, 15 bp, Homo sapiens
gctattaataaaagg

SEQ ID NO: 923962 - DNA, 15 bp, Homo sapiens
ctattaataaaagga

SEQ ID NO: 923963 - DNA, 15 bp, Homo sapiens
tattaataaaaggac

SEQ ID NO: 923964 - DNA, 15 bp, Homo sapiens
attaataaaaggaca

SEQ ID NO: 923965 - DNA, 15 bp, Homo sapiens
ttaataaaaggacat

SEQ ID NO: 923966 - DNA, 15 bp, Homo sapiens
taataaaaggacatg

SEQ ID NO: 923967 - DNA, 15 bp, Homo sapiens
aataaaaggacatga

SEQ ID NO: 923968 - DNA, 15 bp, Homo sapiens
ataaaaggacatgaa

SEQ ID NO: 923969 - DNA, 15 bp, Homo sapiens
taaaaggacatgaat

SEQ ID NO: 923970 - DNA, 15 bp, Homo sapiens
aaaaggacatgaatg

SEQ ID NO: 923971 - DNA, 15 bp, Homo sapiens
aaaggacatgaatgc

SEQ ID NO: 923972 - DNA, 15 bp, Homo sapiens
aaggacatgaatgca

SEQ ID NO: 923973 - DNA, 15 bp, Homo sapiens
aggacatgaatgcat

SEQ ID NO: 923974 - DNA, 15 bp, Homo sapiens
ggacatgaatgcatt

SEQ ID NO: 923975 - DNA, 15 bp, Homo sapiens
gacatgaatgcattt

SEQ ID NO: 923976 - DNA, 15 bp, Homo sapiens
acatgaatgcatttt

SEQ ID NO: 923977 - DNA, 15 bp, Homo sapiens
catgaatgcatttta

SEQ ID NO: 923978 - DNA, 15 bp, Homo sapiens
atgaatgcattttac

SEQ ID NO: 923979 - DNA, 15 bp, Homo sapiens
tgaatgcattttacc

SEQ ID NO: 923980 - DNA, 15 bp, Homo sapiens
gaatgcattttaccc

SEQ ID NO: 923981 - DNA, 15 bp, Homo sapiens
aatgcattttacccc

SEQ ID NO: 923982 - DNA, 15 bp, Homo sapiens
atgcattttacccca

SEQ ID NO: 923983 - DNA, 15 bp, Homo sapiens
tgcattttaccccac

SEQ ID NO: 923984 - DNA, 15 bp, Homo sapiens
gcattttaccccaca

SEQ ID NO: 923985 - DNA, 15 bp, Homo sapiens
cattttaccccacaa

SEQ ID NO: 923986 - DNA, 15 bp, Homo sapiens
attttaccccacaat

SEQ ID NO: 923987 - DNA, 15 bp, Homo sapiens
ttttaccccacaatc

SEQ ID NO: 923988 - DNA, 15 bp, Homo sapiens
tttaccccacaatcc

SEQ ID NO: 923989 - DNA, 15 bp, Homo sapiens
ttaccccacaatcca

SEQ ID NO: 923990 - DNA, 15 bp, Homo sapiens
taccccacaatccaa

SEQ ID NO: 923991 - DNA, 15 bp, Homo sapiens
accccacaatccaag

SEQ ID NO: 923992 - DNA, 15 bp, Homo sapiens
ccccacaatccaaga

SEQ ID NO: 923993 - DNA, 15 bp, Homo sapiens
cccacaatccaagaa

SEQ ID NO: 923994 - DNA, 15 bp, Homo sapiens
ccacaatccaagaac

SEQ ID NO: 923995 - DNA, 15 bp, Homo sapiens
cacaatccaagaact

SEQ ID NO: 923996 - DNA, 15 bp, Homo sapiens
acaatccaagaactg

SEQ ID NO: 923997 - DNA, 15 bp, Homo sapiens
caatccaagaactga

SEQ ID NO: 923998 - DNA, 15 bp, Homo sapiens
aatccaagaactgac

SEQ ID NO: 923999 - DNA, 15 bp, Homo sapiens
atccaagaactgaca

SEQ ID NO: 924000 - DNA, 15 bp, Homo sapiens
tccaagaactgacaa

SEQ ID NO: 924001 - DNA, 15 bp, Homo sapiens
ccaagaactgacaaa

SEQ ID NO: 924002 - DNA, 15 bp, Homo sapiens
caagaactgacaaaa

SEQ ID NO: 924003 - DNA, 15 bp, Homo sapiens
aagaactgacaaaac

SEQ ID NO: 924004 - DNA, 15 bp, Homo sapiens
agaactgacaaaact

SEQ ID NO: 924005 - DNA, 15 bp, Homo sapiens
gaactgacaaaacta

SEQ ID NO: 924006 - DNA, 15 bp, Homo sapiens
aactgacaaaactac

SEQ ID NO: 924007 - DNA, 15 bp, Homo sapiens
actgacaaaactact

SEQ ID NO: 924008 - DNA, 15 bp, Homo sapiens
ctgacaaaactactc

SEQ ID NO: 924009 - DNA, 15 bp, Homo sapiens
tgacaaaactactca

SEQ ID NO: 924010 - DNA, 15 bp, Homo sapiens
gacaaaactactcag

SEQ ID NO: 924011 - DNA, 15 bp, Homo sapiens
acaaaactactcagc

SEQ ID NO: 924012 - DNA, 15 bp, Homo sapiens
caaaactactcagct

SEQ ID NO: 924013 - DNA, 15 bp, Homo sapiens
aaaactactcagctt

SEQ ID NO: 924014 - DNA, 15 bp, Homo sapiens
aaactactcagcttc

SEQ ID NO: 924015 - DNA, 15 bp, Homo sapiens
aactactcagcttcc

SEQ ID NO: 924016 - DNA, 15 bp, Homo sapiens
actactcagcttccg

SEQ ID NO: 924017 - DNA, 15 bp, Homo sapiens
ctactcagcttccgc

SEQ ID NO: 924018 - DNA, 15 bp, Homo sapiens
tactcagcttccgcc

SEQ ID NO: 924019 - DNA, 15 bp, Homo sapiens
actcagcttccgcct

SEQ ID NO: 924020 - DNA, 15 bp, Homo sapiens
ctcagcttccgccta

SEQ ID NO: 924021 - DNA, 15 bp, Homo sapiens
tcagcttccgcctat

SEQ ID NO: 924022 - DNA, 15 bp, Homo sapiens
cagcttccgcctatg

SEQ ID NO: 924023 - DNA, 15 bp, Homo sapiens
agcttccgcctatgc

SEQ ID NO: 924024 - DNA, 15 bp, Homo sapiens
gcttccgcctatgcg

SEQ ID NO: 924025 - DNA, 15 bp, Homo sapiens
cttccgcctatgcgg

SEQ ID NO: 924026 - DNA, 15 bp, Homo sapiens
ttccgcctatgcggc

SEQ ID NO: 924027 - DNA, 15 bp, Homo sapiens
tccgcctatgcggct

SEQ ID NO: 924028 - DNA, 15 bp, Homo sapiens
ccgcctatgcggctg

SEQ ID NO: 924029 - DNA, 15 bp, Homo sapiens
cgcctatgcggctgg

SEQ ID NO: 924030 - DNA, 15 bp, Homo sapiens
gcctatgcggctggc

SEQ ID NO: 924031 - DNA, 15 bp, Homo sapiens
cctatgcggctggca

SEQ ID NO: 924032 - DNA, 15 bp, Homo sapiens
ctatgcggctggcat

SEQ ID NO: 924033 - DNA, 15 bp, Homo sapiens
tatgcggctggcatt

SEQ ID NO: 924034 - DNA, 15 bp, Homo sapiens
atgcggctggcattc

SEQ ID NO: 924035 - DNA, 15 bp, Homo sapiens
tgcggctggcattcc

SEQ ID NO: 924036 - DNA, 15 bp, Homo sapiens
gcggctggcattcct

SEQ ID NO: 924037 - DNA, 15 bp, Homo sapiens
cggctggcattcctt

SEQ ID NO: 924038 - DNA, 15 bp, Homo sapiens
ggctggcattcctta

SEQ ID NO: 924039 - DNA, 15 bp, Homo sapiens
gctggcattccttaa

SEQ ID NO: 924040 - DNA, 15 bp, Homo sapiens
ctggcattccttaat

SEQ ID NO: 924041 - DNA, 15 bp, Homo sapiens
tggcattccttaatt

SEQ ID NO: 924042 - DNA, 15 bp, Homo sapiens
ggcattccttaattc

SEQ ID NO: 924043 - DNA, 15 bp, Homo sapiens
gcattccttaattcc

SEQ ID NO: 924044 - DNA, 15 bp, Homo sapiens
cattccttaattccc

SEQ ID NO: 924045 - DNA, 15 bp, Homo sapiens
attccttaattccct

SEQ ID NO: 924046 - DNA, 15 bp, Homo sapiens
ttccttaattccctt

SEQ ID NO: 924047 - DNA, 15 bp, Homo sapiens
tccttaattcccttt

SEQ ID NO: 924048 - DNA, 15 bp, Homo sapiens
ccttaattccctttt

SEQ ID NO: 924049 - DNA, 15 bp, Homo sapiens
cttaattcccttttg

SEQ ID NO: 924050 - DNA, 15 bp, Homo sapiens
ttaattcccttttgc

SEQ ID NO: 924051 - DNA, 15 bp, Homo sapiens
taattcccttttgct

SEQ ID NO: 924052 - DNA, 15 bp, Homo sapiens
aattcccttttgctg

SEQ ID NO: 924053 - DNA, 15 bp, Homo sapiens
attcccttttgctgc

SEQ ID NO: 924054 - DNA, 15 bp, Homo sapiens
ttcccttttgctgcc

SEQ ID NO: 924055 - DNA, 15 bp, Homo sapiens
tcccttttgctgccc

SEQ ID NO: 924056 - DNA, 15 bp, Homo sapiens
cccttttgctgccca

SEQ ID NO: 924057 - DNA, 15 bp, Homo sapiens
ccttttgctgcccat

SEQ ID NO: 924058 - DNA, 15 bp, Homo sapiens
cttttgctgcccatg

SEQ ID NO: 924059 - DNA, 15 bp, Homo sapiens
ttttgctgcccatgg

SEQ ID NO: 924060 - DNA, 15 bp, Homo sapiens
tttgctgcccatggt

SEQ ID NO: 924061 - DNA, 15 bp, Homo sapiens
ttgctgcccatggtt

SEQ ID NO: 924062 - DNA, 15 bp, Homo sapiens
tgctgcccatggtta

SEQ ID NO: 924063 - DNA, 15 bp, Homo sapiens
gctgcccatggttag

SEQ ID NO: 924064 - DNA, 15 bp, Homo sapiens
ctgcccatggttagg

SEQ ID NO: 924065 - DNA, 15 bp, Homo sapiens
tgcccatggttaggc

SEQ ID NO: 924066 - DNA, 15 bp, Homo sapiens
gcccatggttaggcc

SEQ ID NO: 924067 - DNA, 15 bp, Homo sapiens
cccatggttaggccc

SEQ ID NO: 924068 - DNA, 15 bp, Homo sapiens
ccatggttaggccca

SEQ ID NO: 924069 - DNA, 15 bp, Homo sapiens
catggttaggcccaa

SEQ ID NO: 924070 - DNA, 15 bp, Homo sapiens
atggttaggcccaaa

SEQ ID NO: 924071 - DNA, 15 bp, Homo sapiens
tggttaggcccaaat

SEQ ID NO: 924072 - DNA, 15 bp, Homo sapiens
ggttaggcccaaata

SEQ ID NO: 924073 - DNA, 15 bp, Homo sapiens
gttaggcccaaataa

SEQ ID NO: 924074 - DNA, 15 bp, Homo sapiens
ttaggcccaaataac

SEQ ID NO: 924075 - DNA, 15 bp, Homo sapiens
taggcccaaataaca

SEQ ID NO: 924076 - DNA, 15 bp, Homo sapiens
aggcccaaataacac

SEQ ID NO: 924077 - DNA, 15 bp, Homo sapiens
ggcccaaataacaca

SEQ ID NO: 924078 - DNA, 15 bp, Homo sapiens
gcccaaataacacat

SEQ ID NO: 924079 - DNA, 15 bp, Homo sapiens
cccaaataacacatg

SEQ ID NO: 924080 - DNA, 15 bp, Homo sapiens
ccaaataacacatgg

SEQ ID NO: 924081 - DNA, 15 bp, Homo sapiens
caaataacacatggt

SEQ ID NO: 924082 - DNA, 15 bp, Homo sapiens
aaataacacatggtg

SEQ ID NO: 924083 - DNA, 15 bp, Homo sapiens
aataacacatggtga

SEQ ID NO: 924084 - DNA, 15 bp, Homo sapiens
ataacacatggtgaa

SEQ ID NO: 924085 - DNA, 15 bp, Homo sapiens
taacacatggtgaac

SEQ ID NO: 924086 - DNA, 15 bp, Homo sapiens
aacacatggtgaaca

SEQ ID NO: 924087 - DNA, 15 bp, Homo sapiens
acacatggtgaacac

SEQ ID NO: 924088 - DNA, 15 bp, Homo sapiens
cacatggtgaacact

SEQ ID NO: 924089 - DNA, 15 bp, Homo sapiens
acatggtgaacactg

SEQ ID NO: 924090 - DNA, 15 bp, Homo sapiens
catggtgaacactgg

SEQ ID NO: 924091 - DNA, 15 bp, Homo sapiens
atggtgaacactgga

SEQ ID NO: 924092 - DNA, 15 bp, Homo sapiens
tggtgaacactggat

SEQ ID NO: 924093 - DNA, 15 bp, Homo sapiens
ggtgaacactggatc

SEQ ID NO: 924094 - DNA, 15 bp, Homo sapiens
gtgaacactggatcg

SEQ ID NO: 924095 - DNA, 15 bp, Homo sapiens
tgaacactggatcgg

SEQ ID NO: 924096 - DNA, 15 bp, Homo sapiens
gaacactggatcggg

SEQ ID NO: 924097 - DNA, 15 bp, Homo sapiens
aacactggatcgggg

SEQ ID NO: 924098 - DNA, 15 bp, Homo sapiens
acactggatcggggg

SEQ ID NO: 924099 - DNA, 15 bp, Homo sapiens
cactggatcgggggg

SEQ ID NO: 924100 - DNA, 15 bp, Homo sapiens
actggatcggggggt

SEQ ID NO: 924101 - DNA, 15 bp, Homo sapiens
ctggatcggggggtc

SEQ ID NO: 924102 - DNA, 15 bp, Homo sapiens
tggatcggggggtcg

SEQ ID NO: 924103 - DNA, 15 bp, Homo sapiens
ggatcggggggtcga

SEQ ID NO: 924104 - DNA, 15 bp, Homo sapiens
gatcggggggtcgat

SEQ ID NO: 924105 - DNA, 15 bp, Homo sapiens
atcggggggtcgatg

SEQ ID NO: 924106 - DNA, 15 bp, Homo sapiens
tcggggggtcgatgg

SEQ ID NO: 924107 - DNA, 15 bp, Homo sapiens
cggggggtcgatgga

SEQ ID NO: 924108 - DNA, 15 bp, Homo sapiens
ggggggtcgatggat

SEQ ID NO: 924109 - DNA, 15 bp, Homo sapiens
gggggtcgatggatg

SEQ ID NO: 924110 - DNA, 15 bp, Homo sapiens
ggggtcgatggatgg

SEQ ID NO: 924111 - DNA, 15 bp, Homo sapiens
gggtcgatggatggg

SEQ ID NO: 924112 - DNA, 15 bp, Homo sapiens
ggtcgatggatgggc

SEQ ID NO: 924113 - DNA, 15 bp, Homo sapiens
gtcgatggatgggca

SEQ ID NO: 924114 - DNA, 15 bp, Homo sapiens
tcgatggatgggcag

SEQ ID NO: 924115 - DNA, 15 bp, Homo sapiens
cgatggatgggcaga

SEQ ID NO: 924116 - DNA, 15 bp, Homo sapiens
gatggatgggcagat

SEQ ID NO: 924117 - DNA, 15 bp, Homo sapiens
atggatgggcagatg

SEQ ID NO: 924118 - DNA, 15 bp, Homo sapiens
tggatgggcagatgg

SEQ ID NO: 924119 - DNA, 15 bp, Homo sapiens
ggatgggcagatgga

SEQ ID NO: 924120 - DNA, 15 bp, Homo sapiens
gatgggcagatggat

SEQ ID NO: 924121 - DNA, 15 bp, Homo sapiens
atgggcagatggatg

SEQ ID NO: 924122 - DNA, 15 bp, Homo sapiens
tgggcagatggatga

SEQ ID NO: 924123 - DNA, 15 bp, Homo sapiens
gggcagatggatgaa

SEQ ID NO: 924124 - DNA, 15 bp, Homo sapiens
ggcagatggatgaat

SEQ ID NO: 924125 - DNA, 15 bp, Homo sapiens
gcagatggatgaatg

SEQ ID NO: 924126 - DNA, 15 bp, Homo sapiens
cagatggatgaatgg

SEQ ID NO: 924127 - DNA, 15 bp, Homo sapiens
agatggatgaatgga

SEQ ID NO: 924128 - DNA, 15 bp, Homo sapiens
gatggatgaatggat

SEQ ID NO: 924129 - DNA, 15 bp, Homo sapiens
atggatgaatggatt

SEQ ID NO: 924130 - DNA, 15 bp, Homo sapiens
tggatgaatggatta

SEQ ID NO: 924131 - DNA, 15 bp, Homo sapiens
ggatgaatggattaa

SEQ ID NO: 924132 - DNA, 15 bp, Homo sapiens
gatgaatggattaat

SEQ ID NO: 924133 - DNA, 15 bp, Homo sapiens
atgaatggattaatg

SEQ ID NO: 924134 - DNA, 15 bp, Homo sapiens
tgaatggattaatgg

SEQ ID NO: 924135 - DNA, 15 bp, Homo sapiens
gaatggattaatgga

SEQ ID NO: 924136 - DNA, 15 bp, Homo sapiens
aatggattaatggat

SEQ ID NO: 924137 - DNA, 15 bp, Homo sapiens
atggattaatggatg

SEQ ID NO: 924138 - DNA, 15 bp, Homo sapiens
tggattaatggatga

SEQ ID NO: 924139 - DNA, 15 bp, Homo sapiens
ggattaatggatgaa

SEQ ID NO: 924140 - DNA, 15 bp, Homo sapiens
gattaatggatgaac

SEQ ID NO: 924141 - DNA, 15 bp, Homo sapiens
attaatggatgaaca

SEQ ID NO: 924142 - DNA, 15 bp, Homo sapiens
ttaatggatgaacag

SEQ ID NO: 924143 - DNA, 15 bp, Homo sapiens
taatggatgaacaga

SEQ ID NO: 924144 - DNA, 15 bp, Homo sapiens
aatggatgaacagat

SEQ ID NO: 924145 - DNA, 15 bp, Homo sapiens
atggatgaacagatg

SEQ ID NO: 924146 - DNA, 15 bp, Homo sapiens
tggatgaacagatga

SEQ ID NO: 924147 - DNA, 15 bp, Homo sapiens
ggatgaacagatgaa

SEQ ID NO: 924148 - DNA, 15 bp, Homo sapiens
gatgaacagatgaat

SEQ ID NO: 924149 - DNA, 15 bp, Homo sapiens
atgaacagatgaata

SEQ ID NO: 924150 - DNA, 15 bp, Homo sapiens
tgaacagatgaataa

SEQ ID NO: 924151 - DNA, 15 bp, Homo sapiens
gaacagatgaataat

SEQ ID NO: 924152 - DNA, 15 bp, Homo sapiens
aacagatgaataatt

SEQ ID NO: 924153 - DNA, 15 bp, Homo sapiens
acagatgaataattg

SEQ ID NO: 924154 - DNA, 15 bp, Homo sapiens
cagatgaataattgt

SEQ ID NO: 924155 - DNA, 15 bp, Homo sapiens
agatgaataattgtt

SEQ ID NO: 924156 - DNA, 15 bp, Homo sapiens
gatgaataattgttc

SEQ ID NO: 924157 - DNA, 15 bp, Homo sapiens
atgaataattgttcc

SEQ ID NO: 924158 - DNA, 15 bp, Homo sapiens
tgaataattgttcct

SEQ ID NO: 924159 - DNA, 15 bp, Homo sapiens
gaataattgttcctt

SEQ ID NO: 924160 - DNA, 15 bp, Homo sapiens
aataattgttccttg

SEQ ID NO: 924161 - DNA, 15 bp, Homo sapiens
ataattgttccttga

SEQ ID NO: 924162 - DNA, 15 bp, Homo sapiens
taattgttccttgac

SEQ ID NO: 924163 - DNA, 15 bp, Homo sapiens
aattgttccttgact

SEQ ID NO: 924164 - DNA, 15 bp, Homo sapiens
attgttccttgacta

SEQ ID NO: 924165 - DNA, 15 bp, Homo sapiens
ttgttccttgactat

SEQ ID NO: 924166 - DNA, 15 bp, Homo sapiens
tgttccttgactata

SEQ ID NO: 924167 - DNA, 15 bp, Homo sapiens
gttccttgactatag

SEQ ID NO: 924168 - DNA, 15 bp, Homo sapiens
ttccttgactatagc

SEQ ID NO: 924169 - DNA, 15 bp, Homo sapiens
tccttgactatagcc

SEQ ID NO: 924170 - DNA, 15 bp, Homo sapiens
ccttgactatagcca

SEQ ID NO: 924171 - DNA, 15 bp, Homo sapiens
cttgactatagccag

SEQ ID NO: 924172 - DNA, 15 bp, Homo sapiens
ttgactatagccagg

SEQ ID NO: 924173 - DNA, 15 bp, Homo sapiens
tgactatagccaggt

SEQ ID NO: 924174 - DNA, 15 bp, Homo sapiens
gactatagccaggta

SEQ ID NO: 924175 - DNA, 15 bp, Homo sapiens
actatagccaggtag

SEQ ID NO: 924176 - DNA, 15 bp, Homo sapiens
ctatagccaggtaga

SEQ ID NO: 924177 - DNA, 15 bp, Homo sapiens
tatagccaggtagac

SEQ ID NO: 924178 - DNA, 15 bp, Homo sapiens
atagccaggtagaca

SEQ ID NO: 924179 - DNA, 15 bp, Homo sapiens
tagccaggtagacaa

SEQ ID NO: 924180 - DNA, 15 bp, Homo sapiens
agccaggtagacaaa

SEQ ID NO: 924181 - DNA, 15 bp, Homo sapiens
gccaggtagacaaag

SEQ ID NO: 924182 - DNA, 15 bp, Homo sapiens
ccaggtagacaaaga

SEQ ID NO: 924183 - DNA, 15 bp, Homo sapiens
caggtagacaaagaa

SEQ ID NO: 924184 - DNA, 15 bp, Homo sapiens
aggtagacaaagaat

SEQ ID NO: 924185 - DNA, 15 bp, Homo sapiens
ggtagacaaagaatg

SEQ ID NO: 924186 - DNA, 15 bp, Homo sapiens
gtagacaaagaatga

SEQ ID NO: 924187 - DNA, 15 bp, Homo sapiens
tagacaaagaatgag

SEQ ID NO: 924188 - DNA, 15 bp, Homo sapiens
agacaaagaatgaga

SEQ ID NO: 924189 - DNA, 15 bp, Homo sapiens
gacaaagaatgagag

SEQ ID NO: 924190 - DNA, 15 bp, Homo sapiens
acaaagaatgagaga

SEQ ID NO: 924191 - DNA, 15 bp, Homo sapiens
caaagaatgagagag

SEQ ID NO: 924192 - DNA, 15 bp, Homo sapiens
aaagaatgagagagg

SEQ ID NO: 924193 - DNA, 15 bp, Homo sapiens
aagaatgagagaggg

SEQ ID NO: 924194 - DNA, 15 bp, Homo sapiens
agaatgagagaggga

SEQ ID NO: 924195 - DNA, 15 bp, Homo sapiens
gaatgagagagggaa

SEQ ID NO: 924196 - DNA, 15 bp, Homo sapiens
aatgagagagggaaa

SEQ ID NO: 924197 - DNA, 15 bp, Homo sapiens
atgagagagggaaat

SEQ ID NO: 924198 - DNA, 15 bp, Homo sapiens
tgagagagggaaatt

SEQ ID NO: 924199 - DNA, 15 bp, Homo sapiens
gagagagggaaattc

SEQ ID NO: 924200 - DNA, 15 bp, Homo sapiens
agagagggaaattca

SEQ ID NO: 924201 - DNA, 15 bp, Homo sapiens
gagagggaaattcaa

SEQ ID NO: 924202 - DNA, 15 bp, Homo sapiens
agagggaaattcaaa

SEQ ID NO: 924203 - DNA, 15 bp, Homo sapiens
gagggaaattcaaat

SEQ ID NO: 924204 - DNA, 15 bp, Homo sapiens
agggaaattcaaatc

SEQ ID NO: 924205 - DNA, 15 bp, Homo sapiens
gggaaattcaaatct

SEQ ID NO: 924206 - DNA, 15 bp, Homo sapiens
ggaaattcaaatctc

SEQ ID NO: 924207 - DNA, 15 bp, Homo sapiens
gaaattcaaatctca

SEQ ID NO: 924208 - DNA, 15 bp, Homo sapiens
aaattcaaatctcag

SEQ ID NO: 924209 - DNA, 15 bp, Homo sapiens
aattcaaatctcagg

SEQ ID NO: 924210 - DNA, 15 bp, Homo sapiens
attcaaatctcaggt

SEQ ID NO: 924211 - DNA, 15 bp, Homo sapiens
ttcaaatctcaggtg

SEQ ID NO: 924212 - DNA, 15 bp, Homo sapiens
tcaaatctcaggtgt

SEQ ID NO: 924213 - DNA, 15 bp, Homo sapiens
caaatctcaggtgtg

SEQ ID NO: 924214 - DNA, 15 bp, Homo sapiens
aaatctcaggtgtgc

SEQ ID NO: 924215 - DNA, 15 bp, Homo sapiens
aatctcaggtgtgct

SEQ ID NO: 924216 - DNA, 15 bp, Homo sapiens
atctcaggtgtgcta

SEQ ID NO: 924217 - DNA, 15 bp, Homo sapiens
tctcaggtgtgctat

SEQ ID NO: 924218 - DNA, 15 bp, Homo sapiens
ctcaggtgtgctatt

SEQ ID NO: 924219 - DNA, 15 bp, Homo sapiens
tcaggtgtgctattt

SEQ ID NO: 924220 - DNA, 15 bp, Homo sapiens
caggtgtgctatttg

SEQ ID NO: 924221 - DNA, 15 bp, Homo sapiens
aggtgtgctatttgt

SEQ ID NO: 924222 - DNA, 15 bp, Homo sapiens
ggtgtgctatttgtc

SEQ ID NO: 924223 - DNA, 15 bp, Homo sapiens
gtgtgctatttgtca

SEQ ID NO: 924224 - DNA, 15 bp, Homo sapiens
tgtgctatttgtcac

SEQ ID NO: 924225 - DNA, 15 bp, Homo sapiens
gtgctatttgtcaca

SEQ ID NO: 924226 - DNA, 15 bp, Homo sapiens
tgctatttgtcacaa

SEQ ID NO: 924227 - DNA, 15 bp, Homo sapiens
gctatttgtcacaat

SEQ ID NO: 924228 - DNA, 15 bp, Homo sapiens
ctatttgtcacaatt

SEQ ID NO: 924229 - DNA, 15 bp, Homo sapiens
tatttgtcacaattc

SEQ ID NO: 924230 - DNA, 15 bp, Homo sapiens
atttgtcacaattca

SEQ ID NO: 924231 - DNA, 15 bp, Homo sapiens
tttgtcacaattcaa

SEQ ID NO: 924232 - DNA, 15 bp, Homo sapiens
ttgtcacaattcaaa

SEQ ID NO: 924233 - DNA, 15 bp, Homo sapiens
tgtcacaattcaaat

SEQ ID NO: 924234 - DNA, 15 bp, Homo sapiens
gtcacaattcaaatt

SEQ ID NO: 924235 - DNA, 15 bp, Homo sapiens
tcacaattcaaatta

SEQ ID NO: 924236 - DNA, 15 bp, Homo sapiens
cacaattcaaattaa

SEQ ID NO: 924237 - DNA, 15 bp, Homo sapiens
acaattcaaattaaa

SEQ ID NO: 924238 - DNA, 15 bp, Homo sapiens
caattcaaattaaaa

SEQ ID NO: 924239 - DNA, 15 bp, Homo sapiens
aattcaaattaaaag

SEQ ID NO: 924240 - DNA, 15 bp, Homo sapiens
attcaaattaaaagg

SEQ ID NO: 924241 - DNA, 15 bp, Homo sapiens
ttcaaattaaaaggt

SEQ ID NO: 924242 - DNA, 15 bp, Homo sapiens
tcaaattaaaaggtg

SEQ ID NO: 924243 - DNA, 15 bp, Homo sapiens
caaattaaaaggtgt

SEQ ID NO: 924244 - DNA, 15 bp, Homo sapiens
aaattaaaaggtgtt

SEQ ID NO: 924245 - DNA, 15 bp, Homo sapiens
aattaaaaggtgttg

SEQ ID NO: 924246 - DNA, 15 bp, Homo sapiens
attaaaaggtgttgg

SEQ ID NO: 924247 - DNA, 15 bp, Homo sapiens
ttaaaaggtgttggg

SEQ ID NO: 924248 - DNA, 15 bp, Homo sapiens
taaaaggtgttggga

SEQ ID NO: 924249 - DNA, 15 bp, Homo sapiens
aaaaggtgttgggag

SEQ ID NO: 924250 - DNA, 15 bp, Homo sapiens
aaaggtgttgggaga

SEQ ID NO: 924251 - DNA, 15 bp, Homo sapiens
aaggtgttgggagaa

SEQ ID NO: 924252 - DNA, 15 bp, Homo sapiens
aggtgttgggagaaa

SEQ ID NO: 924253 - DNA, 15 bp, Homo sapiens
ggtgttgggagaaaa

SEQ ID NO: 924254 - DNA, 15 bp, Homo sapiens
gtgttgggagaaaat

SEQ ID NO: 924255 - DNA, 15 bp, Homo sapiens
tgttgggagaaaatg

SEQ ID NO: 924256 - DNA, 15 bp, Homo sapiens
gttgggagaaaatgg

SEQ ID NO: 924257 - DNA, 15 bp, Homo sapiens
ttgggagaaaatggg

SEQ ID NO: 924258 - DNA, 15 bp, Homo sapiens
tgggagaaaatggga

SEQ ID NO: 924259 - DNA, 15 bp, Homo sapiens
gggagaaaatgggac

SEQ ID NO: 924260 - DNA, 15 bp, Homo sapiens
ggagaaaatgggact

SEQ ID NO: 924261 - DNA, 15 bp, Homo sapiens
gagaaaatgggacta

SEQ ID NO: 924262 - DNA, 15 bp, Homo sapiens
agaaaatgggactac

SEQ ID NO: 924263 - DNA, 15 bp, Homo sapiens
gaaaatgggactact

SEQ ID NO: 924264 - DNA, 15 bp, Homo sapiens
aaaatgggactacta

SEQ ID NO: 924265 - DNA, 15 bp, Homo sapiens
aaatgggactactaa

SEQ ID NO: 924266 - DNA, 15 bp, Homo sapiens
aatgggactactaac

SEQ ID NO: 924267 - DNA, 15 bp, Homo sapiens
atgggactactaact

SEQ ID NO: 924268 - DNA, 15 bp, Homo sapiens
tgggactactaacta

SEQ ID NO: 924269 - DNA, 15 bp, Homo sapiens
gggactactaactaa

SEQ ID NO: 924270 - DNA, 15 bp, Homo sapiens
ggactactaactaaa

SEQ ID NO: 924271 - DNA, 15 bp, Homo sapiens
gactactaactaaaa

SEQ ID NO: 924272 - DNA, 15 bp, Homo sapiens
actactaactaaaat

SEQ ID NO: 924273 - DNA, 15 bp, Homo sapiens
ctactaactaaaatt

SEQ ID NO: 924274 - DNA, 15 bp, Homo sapiens
tactaactaaaattc

SEQ ID NO: 924275 - DNA, 15 bp, Homo sapiens
actaactaaaattca

SEQ ID NO: 924276 - DNA, 15 bp, Homo sapiens
ctaactaaaattcaa

SEQ ID NO: 924277 - DNA, 15 bp, Homo sapiens
taactaaaattcaaa

SEQ ID NO: 924278 - DNA, 15 bp, Homo sapiens
aactaaaattcaaat

SEQ ID NO: 924279 - DNA, 15 bp, Homo sapiens
actaaaattcaaatt

SEQ ID NO: 924280 - DNA, 15 bp, Homo sapiens
ctaaaattcaaatta

SEQ ID NO: 924281 - DNA, 15 bp, Homo sapiens
taaaattcaaattat

SEQ ID NO: 924282 - DNA, 15 bp, Homo sapiens
aaaattcaaattatg

SEQ ID NO: 924283 - DNA, 15 bp, Homo sapiens
aaattcaaattatgg

SEQ ID NO: 924284 - DNA, 15 bp, Homo sapiens
aattcaaattatgga

SEQ ID NO: 924285 - DNA, 15 bp, Homo sapiens
attcaaattatggat

SEQ ID NO: 924286 - DNA, 15 bp, Homo sapiens
ttcaaattatggatt

SEQ ID NO: 924287 - DNA, 15 bp, Homo sapiens
tcaaattatggattt

SEQ ID NO: 924288 - DNA, 15 bp, Homo sapiens
caaattatggatttc

SEQ ID NO: 924289 - DNA, 15 bp, Homo sapiens
aaattatggatttca

SEQ ID NO: 924290 - DNA, 15 bp, Homo sapiens
aattatggatttcag

SEQ ID NO: 924291 - DNA, 15 bp, Homo sapiens
attatggatttcagc

SEQ ID NO: 924292 - DNA, 15 bp, Homo sapiens
ttatggatttcagct

SEQ ID NO: 924293 - DNA, 15 bp, Homo sapiens
tatggatttcagctt

SEQ ID NO: 924294 - DNA, 15 bp, Homo sapiens
atggatttcagcttg

SEQ ID NO: 924295 - DNA, 15 bp, Homo sapiens
tggatttcagcttgt

SEQ ID NO: 924296 - DNA, 15 bp, Homo sapiens
ggatttcagcttgtt

SEQ ID NO: 924297 - DNA, 15 bp, Homo sapiens
gatttcagcttgttt

SEQ ID NO: 924298 - DNA, 15 bp, Homo sapiens
atttcagcttgtttt

SEQ ID NO: 924299 - DNA, 15 bp, Homo sapiens
tttcagcttgttttg

SEQ ID NO: 924300 - DNA, 15 bp, Homo sapiens
ttcagcttgttttgc

SEQ ID NO: 924301 - DNA, 15 bp, Homo sapiens
tcagcttgttttgcc

SEQ ID NO: 924302 - DNA, 15 bp, Homo sapiens
cagcttgttttgcca

SEQ ID NO: 924303 - DNA, 15 bp, Homo sapiens
agcttgttttgccac

SEQ ID NO: 924304 - DNA, 15 bp, Homo sapiens
gcttgttttgccact

SEQ ID NO: 924305 - DNA, 15 bp, Homo sapiens
cttgttttgccactc

SEQ ID NO: 924306 - DNA, 15 bp, Homo sapiens
ttgttttgccactcc

SEQ ID NO: 924307 - DNA, 15 bp, Homo sapiens
tgttttgccactcct

SEQ ID NO: 924308 - DNA, 15 bp, Homo sapiens
gttttgccactcctt

SEQ ID NO: 924309 - DNA, 15 bp, Homo sapiens
ttttgccactccttt

SEQ ID NO: 924310 - DNA, 15 bp, Homo sapiens
tttgccactcctttg

SEQ ID NO: 924311 - DNA, 15 bp, Homo sapiens
ttgccactcctttgg

SEQ ID NO: 924312 - DNA, 15 bp, Homo sapiens
tgccactcctttggc

SEQ ID NO: 924313 - DNA, 15 bp, Homo sapiens
gccactcctttggct

SEQ ID NO: 924314 - DNA, 15 bp, Homo sapiens
ccactcctttggcta

SEQ ID NO: 924315 - DNA, 15 bp, Homo sapiens
cactcctttggctaa

SEQ ID NO: 924316 - DNA, 15 bp, Homo sapiens
actcctttggctaat

SEQ ID NO: 924317 - DNA, 15 bp, Homo sapiens
ctcctttggctaatt

SEQ ID NO: 924318 - DNA, 15 bp, Homo sapiens
tcctttggctaatta

SEQ ID NO: 924319 - DNA, 15 bp, Homo sapiens
cctttggctaattaa

SEQ ID NO: 924320 - DNA, 15 bp, Homo sapiens
ctttggctaattaat

SEQ ID NO: 924321 - DNA, 15 bp, Homo sapiens
tttggctaattaatt

SEQ ID NO: 924322 - DNA, 15 bp, Homo sapiens
ttggctaattaattt

SEQ ID NO: 924323 - DNA, 15 bp, Homo sapiens
tggctaattaattta

SEQ ID NO: 924324 - DNA, 15 bp, Homo sapiens
ggctaattaatttaa

SEQ ID NO: 924325 - DNA, 15 bp, Homo sapiens
gctaattaatttaaa

SEQ ID NO: 924326 - DNA, 15 bp, Homo sapiens
ctaattaatttaaat

SEQ ID NO: 924327 - DNA, 15 bp, Homo sapiens
taattaatttaaatt

SEQ ID NO: 924328 - DNA, 15 bp, Homo sapiens
aattaatttaaattt

SEQ ID NO: 924329 - DNA, 15 bp, Homo sapiens
attaatttaaatttt

SEQ ID NO: 924330 - DNA, 15 bp, Homo sapiens
ttaatttaaatttta

SEQ ID NO: 924331 - DNA, 15 bp, Homo sapiens
taatttaaattttac

SEQ ID NO: 924332 - DNA, 15 bp, Homo sapiens
aatttaaattttact

SEQ ID NO: 924333 - DNA, 15 bp, Homo sapiens
atttaaattttactc

SEQ ID NO: 924334 - DNA, 15 bp, Homo sapiens
tttaaattttactca

SEQ ID NO: 924335 - DNA, 15 bp, Homo sapiens
ttaaattttactcaa

SEQ ID NO: 924336 - DNA, 15 bp, Homo sapiens
taaattttactcaaa

SEQ ID NO: 924337 - DNA, 15 bp, Homo sapiens
aaattttactcaaag

SEQ ID NO: 924338 - DNA, 15 bp, Homo sapiens
aattttactcaaagt

SEQ ID NO: 924339 - DNA, 15 bp, Homo sapiens
attttactcaaagtt

SEQ ID NO: 924340 - DNA, 15 bp, Homo sapiens
ttttactcaaagtta

SEQ ID NO: 924341 - DNA, 15 bp, Homo sapiens
tttactcaaagttaa

SEQ ID NO: 924342 - DNA, 15 bp, Homo sapiens
ttactcaaagttaac

SEQ ID NO: 924343 - DNA, 15 bp, Homo sapiens
tactcaaagttaact

SEQ ID NO: 924344 - DNA, 15 bp, Homo sapiens
actcaaagttaactg

SEQ ID NO: 924345 - DNA, 15 bp, Homo sapiens
ctcaaagttaactgc

SEQ ID NO: 924346 - DNA, 15 bp, Homo sapiens
tcaaagttaactgca

SEQ ID NO: 924347 - DNA, 15 bp, Homo sapiens
caaagttaactgcac

SEQ ID NO: 924348 - DNA, 15 bp, Homo sapiens
aaagttaactgcact

SEQ ID NO: 924349 - DNA, 15 bp, Homo sapiens
aagttaactgcacta

SEQ ID NO: 924350 - DNA, 15 bp, Homo sapiens
agttaactgcactaa

SEQ ID NO: 924351 - DNA, 15 bp, Homo sapiens
gttaactgcactaac

SEQ ID NO: 924352 - DNA, 15 bp, Homo sapiens
ttaactgcactaaca

SEQ ID NO: 924353 - DNA, 15 bp, Homo sapiens
taactgcactaacaa

SEQ ID NO: 924354 - DNA, 15 bp, Homo sapiens
aactgcactaacaat

SEQ ID NO: 924355 - DNA, 15 bp, Homo sapiens
actgcactaacaatt

SEQ ID NO: 924356 - DNA, 15 bp, Homo sapiens
ctgcactaacaattc

SEQ ID NO: 924357 - DNA, 15 bp, Homo sapiens
tgcactaacaattct

SEQ ID NO: 924358 - DNA, 15 bp, Homo sapiens
gcactaacaattctc

SEQ ID NO: 924359 - DNA, 15 bp, Homo sapiens
cactaacaattctca

SEQ ID NO: 924360 - DNA, 15 bp, Homo sapiens
actaacaattctcaa

SEQ ID NO: 924361 - DNA, 15 bp, Homo sapiens
ctaacaattctcaag

SEQ ID NO: 924362 - DNA, 15 bp, Homo sapiens
taacaattctcaagc

SEQ ID NO: 924363 - DNA, 15 bp, Homo sapiens
aacaattctcaagcc

SEQ ID NO: 924364 - DNA, 15 bp, Homo sapiens
acaattctcaagcca

SEQ ID NO: 924365 - DNA, 15 bp, Homo sapiens
caattctcaagccac

SEQ ID NO: 924366 - DNA, 15 bp, Homo sapiens
aattctcaagccaca

SEQ ID NO: 924367 - DNA, 15 bp, Homo sapiens
attctcaagccacag

SEQ ID NO: 924368 - DNA, 15 bp, Homo sapiens
ttctcaagccacaga

SEQ ID NO: 924369 - DNA, 15 bp, Homo sapiens
tctcaagccacagaa

SEQ ID NO: 924370 - DNA, 15 bp, Homo sapiens
ctcaagccacagaag

SEQ ID NO: 924371 - DNA, 15 bp, Homo sapiens
tcaagccacagaagc

SEQ ID NO: 924372 - DNA, 15 bp, Homo sapiens
caagccacagaagca

SEQ ID NO: 924373 - DNA, 15 bp, Homo sapiens
aagccacagaagcat

SEQ ID NO: 924374 - DNA, 15 bp, Homo sapiens
agccacagaagcata

SEQ ID NO: 924375 - DNA, 15 bp, Homo sapiens
gccacagaagcatac

SEQ ID NO: 924376 - DNA, 15 bp, Homo sapiens
ccacagaagcatacc

SEQ ID NO: 924377 - DNA, 15 bp, Homo sapiens
cacagaagcatacct

SEQ ID NO: 924378 - DNA, 15 bp, Homo sapiens
acagaagcataccta

SEQ ID NO: 924379 - DNA, 15 bp, Homo sapiens
cagaagcatacctag

SEQ ID NO: 924380 - DNA, 15 bp, Homo sapiens
agaagcatacctagc

SEQ ID NO: 924381 - DNA, 15 bp, Homo sapiens
gaagcatacctagca

SEQ ID NO: 924382 - DNA, 15 bp, Homo sapiens
aagcatacctagcat

SEQ ID NO: 924383 - DNA, 15 bp, Homo sapiens
agcatacctagcata

SEQ ID NO: 924384 - DNA, 15 bp, Homo sapiens
gcatacctagcataa

SEQ ID NO: 924385 - DNA, 15 bp, Homo sapiens
catacctagcataat

SEQ ID NO: 924386 - DNA, 15 bp, Homo sapiens
atacctagcataata

SEQ ID NO: 924387 - DNA, 15 bp, Homo sapiens
tacctagcataataa

SEQ ID NO: 924388 - DNA, 15 bp, Homo sapiens
acctagcataataac

SEQ ID NO: 924389 - DNA, 15 bp, Homo sapiens
cctagcataataact

SEQ ID NO: 924390 - DNA, 15 bp, Homo sapiens
ctagcataataacta

SEQ ID NO: 924391 - DNA, 15 bp, Homo sapiens
tagcataataactag

SEQ ID NO: 924392 - DNA, 15 bp, Homo sapiens
agcataataactagg

SEQ ID NO: 924393 - DNA, 15 bp, Homo sapiens
gcataataactaggt

SEQ ID NO: 924394 - DNA, 15 bp, Homo sapiens
cataataactaggta

SEQ ID NO: 924395 - DNA, 15 bp, Homo sapiens
ataataactaggtat

SEQ ID NO: 924396 - DNA, 15 bp, Homo sapiens
taataactaggtata

SEQ ID NO: 924397 - DNA, 15 bp, Homo sapiens
aataactaggtataa

SEQ ID NO: 924398 - DNA, 15 bp, Homo sapiens
ataactaggtataat

SEQ ID NO: 924399 - DNA, 15 bp, Homo sapiens
taactaggtataata

SEQ ID NO: 924400 - DNA, 15 bp, Homo sapiens
aactaggtataataa

SEQ ID NO: 924401 - DNA, 15 bp, Homo sapiens
actaggtataataat

SEQ ID NO: 924402 - DNA, 15 bp, Homo sapiens
ctaggtataataatt

SEQ ID NO: 924403 - DNA, 15 bp, Homo sapiens
taggtataataatta

SEQ ID NO: 924404 - DNA, 15 bp, Homo sapiens
aggtataataattaa

SEQ ID NO: 924405 - DNA, 15 bp, Homo sapiens
ggtataataattaac

SEQ ID NO: 924406 - DNA, 15 bp, Homo sapiens
gtataataattaacc

SEQ ID NO: 924407 - DNA, 15 bp, Homo sapiens
tataataattaacca

SEQ ID NO: 924408 - DNA, 15 bp, Homo sapiens
ataataattaaccag

SEQ ID NO: 924409 - DNA, 15 bp, Homo sapiens
taataattaaccaga

SEQ ID NO: 924410 - DNA, 15 bp, Homo sapiens
aataattaaccagat

SEQ ID NO: 924411 - DNA, 15 bp, Homo sapiens
ataattaaccagatg

SEQ ID NO: 924412 - DNA, 15 bp, Homo sapiens
taattaaccagatgt

SEQ ID NO: 924413 - DNA, 15 bp, Homo sapiens
aattaaccagatgtt

SEQ ID NO: 924414 - DNA, 15 bp, Homo sapiens
attaaccagatgtta

SEQ ID NO: 924415 - DNA, 15 bp, Homo sapiens
ttaaccagatgttaa

SEQ ID NO: 924416 - DNA, 15 bp, Homo sapiens
taaccagatgttaat

SEQ ID NO: 924417 - DNA, 15 bp, Homo sapiens
aaccagatgttaatt

SEQ ID NO: 924418 - DNA, 15 bp, Homo sapiens
accagatgttaattc

SEQ ID NO: 924419 - DNA, 15 bp, Homo sapiens
ccagatgttaattct

SEQ ID NO: 924420 - DNA, 15 bp, Homo sapiens
cagatgttaattctc

SEQ ID NO: 924421 - DNA, 15 bp, Homo sapiens
agatgttaattctca

SEQ ID NO: 924422 - DNA, 15 bp, Homo sapiens
gatgttaattctcac

SEQ ID NO: 924423 - DNA, 15 bp, Homo sapiens
atgttaattctcaca

SEQ ID NO: 924424 - DNA, 15 bp, Homo sapiens
tgttaattctcacat

SEQ ID NO: 924425 - DNA, 15 bp, Homo sapiens
gttaattctcacatg

SEQ ID NO: 924426 - DNA, 15 bp, Homo sapiens
ttaattctcacatgg

SEQ ID NO: 924427 - DNA, 15 bp, Homo sapiens
taattctcacatgga

SEQ ID NO: 924428 - DNA, 15 bp, Homo sapiens
aattctcacatggag

SEQ ID NO: 924429 - DNA, 15 bp, Homo sapiens
attctcacatggaga

SEQ ID NO: 924430 - DNA, 15 bp, Homo sapiens
ttctcacatggagaa

SEQ ID NO: 924431 - DNA, 15 bp, Homo sapiens
tctcacatggagaaa

SEQ ID NO: 924432 - DNA, 15 bp, Homo sapiens
ctcacatggagaaaa

SEQ ID NO: 924433 - DNA, 15 bp, Homo sapiens
tcacatggagaaaac

SEQ ID NO: 924434 - DNA, 15 bp, Homo sapiens
cacatggagaaaaca

SEQ ID NO: 924435 - DNA, 15 bp, Homo sapiens
acatggagaaaacag

SEQ ID NO: 924436 - DNA, 15 bp, Homo sapiens
catggagaaaacagc

SEQ ID NO: 924437 - DNA, 15 bp, Homo sapiens
atggagaaaacagct

SEQ ID NO: 924438 - DNA, 15 bp, Homo sapiens
tggagaaaacagcta

SEQ ID NO: 924439 - DNA, 15 bp, Homo sapiens
ggagaaaacagctat

SEQ ID NO: 924440 - DNA, 15 bp, Homo sapiens
gagaaaacagctatt

SEQ ID NO: 924441 - DNA, 15 bp, Homo sapiens
agaaaacagctattc

SEQ ID NO: 924442 - DNA, 15 bp, Homo sapiens
gaaaacagctattct

SEQ ID NO: 924443 - DNA, 15 bp, Homo sapiens
aaaacagctattcta

SEQ ID NO: 924444 - DNA, 15 bp, Homo sapiens
aaacagctattctag

SEQ ID NO: 924445 - DNA, 15 bp, Homo sapiens
aacagctattctagc

SEQ ID NO: 924446 - DNA, 15 bp, Homo sapiens
acagctattctagcc

SEQ ID NO: 924447 - DNA, 15 bp, Homo sapiens
cagctattctagcca

SEQ ID NO: 924448 - DNA, 15 bp, Homo sapiens
agctattctagccac

SEQ ID NO: 924449 - DNA, 15 bp, Homo sapiens
gctattctagccaca

SEQ ID NO: 924450 - DNA, 15 bp, Homo sapiens
ctattctagccacag

SEQ ID NO: 924451 - DNA, 15 bp, Homo sapiens
tattctagccacagc

SEQ ID NO: 924452 - DNA, 15 bp, Homo sapiens
attctagccacagct

SEQ ID NO: 924453 - DNA, 15 bp, Homo sapiens
ttctagccacagctt

SEQ ID NO: 924454 - DNA, 15 bp, Homo sapiens
tctagccacagcttc

SEQ ID NO: 924455 - DNA, 15 bp, Homo sapiens
ctagccacagcttca

SEQ ID NO: 924456 - DNA, 15 bp, Homo sapiens
tagccacagcttcac

SEQ ID NO: 924457 - DNA, 15 bp, Homo sapiens
agccacagcttcaca

SEQ ID NO: 924458 - DNA, 15 bp, Homo sapiens
gccacagcttcacat

SEQ ID NO: 924459 - DNA, 15 bp, Homo sapiens
ccacagcttcacatc

SEQ ID NO: 924460 - DNA, 15 bp, Homo sapiens
cacagcttcacatca

SEQ ID NO: 924461 - DNA, 15 bp, Homo sapiens
acagcttcacatcat

SEQ ID NO: 924462 - DNA, 15 bp, Homo sapiens
cagcttcacatcatg

SEQ ID NO: 924463 - DNA, 15 bp, Homo sapiens
agcttcacatcatgc

SEQ ID NO: 924464 - DNA, 15 bp, Homo sapiens
gcttcacatcatgca

SEQ ID NO: 924465 - DNA, 15 bp, Homo sapiens
cttcacatcatgcat

SEQ ID NO: 924466 - DNA, 15 bp, Homo sapiens
ttcacatcatgcatg

SEQ ID NO: 924467 - DNA, 15 bp, Homo sapiens
tcacatcatgcatgg

SEQ ID NO: 924468 - DNA, 15 bp, Homo sapiens
cacatcatgcatggt

SEQ ID NO: 924469 - DNA, 15 bp, Homo sapiens
acatcatgcatggtt

SEQ ID NO: 924470 - DNA, 15 bp, Homo sapiens
catcatgcatggttt

SEQ ID NO: 924471 - DNA, 15 bp, Homo sapiens
atcatgcatggtttc

SEQ ID NO: 924472 - DNA, 15 bp, Homo sapiens
tcatgcatggtttcc

SEQ ID NO: 924473 - DNA, 15 bp, Homo sapiens
catgcatggtttcca

SEQ ID NO: 924474 - DNA, 15 bp, Homo sapiens
atgcatggtttccag

SEQ ID NO: 924475 - DNA, 15 bp, Homo sapiens
tgcatggtttccagc

SEQ ID NO: 924476 - DNA, 15 bp, Homo sapiens
gcatggtttccagcc

SEQ ID NO: 924477 - DNA, 15 bp, Homo sapiens
catggtttccagcct

SEQ ID NO: 924478 - DNA, 15 bp, Homo sapiens
atggtttccagcctt

SEQ ID NO: 924479 - DNA, 15 bp, Homo sapiens
tggtttccagcctta

SEQ ID NO: 924480 - DNA, 15 bp, Homo sapiens
ggtttccagccttac

SEQ ID NO: 924481 - DNA, 15 bp, Homo sapiens
gtttccagccttact

SEQ ID NO: 924482 - DNA, 15 bp, Homo sapiens
tttccagccttacta

SEQ ID NO: 924483 - DNA, 15 bp, Homo sapiens
ttccagccttactag

SEQ ID NO: 924484 - DNA, 15 bp, Homo sapiens
tccagccttactaga

SEQ ID NO: 924485 - DNA, 15 bp, Homo sapiens
ccagccttactagaa

SEQ ID NO: 924486 - DNA, 15 bp, Homo sapiens
cagccttactagaaa

SEQ ID NO: 924487 - DNA, 15 bp, Homo sapiens
agccttactagaaaa

SEQ ID NO: 924488 - DNA, 15 bp, Homo sapiens
gccttactagaaaat

SEQ ID NO: 924489 - DNA, 15 bp, Homo sapiens
ccttactagaaaata

SEQ ID NO: 924490 - DNA, 15 bp, Homo sapiens
cttactagaaaatat

SEQ ID NO: 924491 - DNA, 15 bp, Homo sapiens
ttactagaaaatatt

SEQ ID NO: 924492 - DNA, 15 bp, Homo sapiens
tactagaaaatattt

SEQ ID NO: 924493 - DNA, 15 bp, Homo sapiens
actagaaaatatttt

SEQ ID NO: 924494 - DNA, 15 bp, Homo sapiens
ctagaaaatattttc

SEQ ID NO: 924495 - DNA, 15 bp, Homo sapiens
tagaaaatattttca

SEQ ID NO: 924496 - DNA, 15 bp, Homo sapiens
agaaaatattttcag

SEQ ID NO: 924497 - DNA, 15 bp, Homo sapiens
gaaaatattttcagt

SEQ ID NO: 924498 - DNA, 15 bp, Homo sapiens
aaaatattttcagtt

SEQ ID NO: 924499 - DNA, 15 bp, Homo sapiens
aaatattttcagtta

SEQ ID NO: 924500 - DNA, 15 bp, Homo sapiens
aatattttcagttaa

SEQ ID NO: 924501 - DNA, 15 bp, Homo sapiens
atattttcagttaaa

SEQ ID NO: 924502 - DNA, 15 bp, Homo sapiens
tattttcagttaaaa

SEQ ID NO: 924503 - DNA, 15 bp, Homo sapiens
attttcagttaaaat

SEQ ID NO: 924504 - DNA, 15 bp, Homo sapiens
ttttcagttaaaata

SEQ ID NO: 924505 - DNA, 15 bp, Homo sapiens
tttcagttaaaatag

SEQ ID NO: 924506 - DNA, 15 bp, Homo sapiens
ttcagttaaaataga

SEQ ID NO: 924507 - DNA, 15 bp, Homo sapiens
tcagttaaaatagaa

SEQ ID NO: 924508 - DNA, 15 bp, Homo sapiens
cagttaaaatagaaa

SEQ ID NO: 924509 - DNA, 15 bp, Homo sapiens
agttaaaatagaaat

SEQ ID NO: 924510 - DNA, 15 bp, Homo sapiens
gttaaaatagaaata

SEQ ID NO: 924511 - DNA, 15 bp, Homo sapiens
ttaaaatagaaatat

SEQ ID NO: 924512 - DNA, 15 bp, Homo sapiens
taaaatagaaatatg

SEQ ID NO: 924513 - DNA, 15 bp, Homo sapiens
aaaatagaaatatgg

SEQ ID NO: 924514 - DNA, 15 bp, Homo sapiens
aaatagaaatatggg

SEQ ID NO: 924515 - DNA, 15 bp, Homo sapiens
aatagaaatatgggt

SEQ ID NO: 924516 - DNA, 15 bp, Homo sapiens
atagaaatatgggtt

SEQ ID NO: 924517 - DNA, 15 bp, Homo sapiens
tagaaatatgggtta

SEQ ID NO: 924518 - DNA, 15 bp, Homo sapiens
agaaatatgggttat

SEQ ID NO: 924519 - DNA, 15 bp, Homo sapiens
gaaatatgggttatt

SEQ ID NO: 924520 - DNA, 15 bp, Homo sapiens
aaatatgggttattt

SEQ ID NO: 924521 - DNA, 15 bp, Homo sapiens
aatatgggttattta

SEQ ID NO: 924522 - DNA, 15 bp, Homo sapiens
atatgggttatttaa

SEQ ID NO: 924523 - DNA, 15 bp, Homo sapiens
tatgggttatttaat

SEQ ID NO: 924524 - DNA, 15 bp, Homo sapiens
atgggttatttaatt

SEQ ID NO: 924525 - DNA, 15 bp, Homo sapiens
tgggttatttaattt

SEQ ID NO: 924526 - DNA, 15 bp, Homo sapiens
gggttatttaatttg

SEQ ID NO: 924527 - DNA, 15 bp, Homo sapiens
ggttatttaatttgc

SEQ ID NO: 924528 - DNA, 15 bp, Homo sapiens
gttatttaatttgca

SEQ ID NO: 924529 - DNA, 15 bp, Homo sapiens
ttatttaatttgcat

SEQ ID NO: 924530 - DNA, 15 bp, Homo sapiens
tatttaatttgcatt

SEQ ID NO: 924531 - DNA, 15 bp, Homo sapiens
atttaatttgcattc

SEQ ID NO: 924532 - DNA, 15 bp, Homo sapiens
tttaatttgcattca

SEQ ID NO: 924533 - DNA, 15 bp, Homo sapiens
ttaatttgcattcac

SEQ ID NO: 924534 - DNA, 15 bp, Homo sapiens
taatttgcattcact

SEQ ID NO: 924535 - DNA, 15 bp, Homo sapiens
aatttgcattcactg

SEQ ID NO: 924536 - DNA, 15 bp, Homo sapiens
atttgcattcactgc

SEQ ID NO: 924537 - DNA, 15 bp, Homo sapiens
tttgcattcactgca

SEQ ID NO: 924538 - DNA, 15 bp, Homo sapiens
ttgcattcactgcaa

SEQ ID NO: 924539 - DNA, 15 bp, Homo sapiens
tgcattcactgcaac

SEQ ID NO: 924540 - DNA, 15 bp, Homo sapiens
gcattcactgcaaca

SEQ ID NO: 924541 - DNA, 15 bp, Homo sapiens
cattcactgcaacag

SEQ ID NO: 924542 - DNA, 15 bp, Homo sapiens
attcactgcaacagg

SEQ ID NO: 924543 - DNA, 15 bp, Homo sapiens
ttcactgcaacaggt

SEQ ID NO: 924544 - DNA, 15 bp, Homo sapiens
tcactgcaacaggtt

SEQ ID NO: 924545 - DNA, 15 bp, Homo sapiens
cactgcaacaggttg

SEQ ID NO: 924546 - DNA, 15 bp, Homo sapiens
actgcaacaggttga

SEQ ID NO: 924547 - DNA, 15 bp, Homo sapiens
ctgcaacaggttgac

SEQ ID NO: 924548 - DNA, 15 bp, Homo sapiens
tgcaacaggttgaca

SEQ ID NO: 924549 - DNA, 15 bp, Homo sapiens
gcaacaggttgacag

SEQ ID NO: 924550 - DNA, 15 bp, Homo sapiens
caacaggttgacagt

SEQ ID NO: 924551 - DNA, 15 bp, Homo sapiens
aacaggttgacagta

SEQ ID NO: 924552 - DNA, 15 bp, Homo sapiens
acaggttgacagtac

SEQ ID NO: 924553 - DNA, 15 bp, Homo sapiens
caggttgacagtaca

SEQ ID NO: 924554 - DNA, 15 bp, Homo sapiens
aggttgacagtacaa

SEQ ID NO: 924555 - DNA, 15 bp, Homo sapiens
ggttgacagtacaac

SEQ ID NO: 924556 - DNA, 15 bp, Homo sapiens
gttgacagtacaaca

SEQ ID NO: 924557 - DNA, 15 bp, Homo sapiens
ttgacagtacaacag

SEQ ID NO: 924558 - DNA, 15 bp, Homo sapiens
tgacagtacaacagg

SEQ ID NO: 924559 - DNA, 15 bp, Homo sapiens
gacagtacaacaggt

SEQ ID NO: 924560 - DNA, 15 bp, Homo sapiens
acagtacaacaggtt

SEQ ID NO: 924561 - DNA, 15 bp, Homo sapiens
cagtacaacaggttt

SEQ ID NO: 924562 - DNA, 15 bp, Homo sapiens
agtacaacaggtttg

SEQ ID NO: 924563 - DNA, 15 bp, Homo sapiens
gtacaacaggtttgg

SEQ ID NO: 924564 - DNA, 15 bp, Homo sapiens
tacaacaggtttgga

SEQ ID NO: 924565 - DNA, 15 bp, Homo sapiens
acaacaggtttggaa

SEQ ID NO: 924566 - DNA, 15 bp, Homo sapiens
caacaggtttggaag

SEQ ID NO: 924567 - DNA, 15 bp, Homo sapiens
aacaggtttggaagc

SEQ ID NO: 924568 - DNA, 15 bp, Homo sapiens
acaggtttggaagca

SEQ ID NO: 924569 - DNA, 15 bp, Homo sapiens
caggtttggaagcaa

SEQ ID NO: 924570 - DNA, 15 bp, Homo sapiens
aggtttggaagcaat

SEQ ID NO: 924571 - DNA, 15 bp, Homo sapiens
ggtttggaagcaatt

SEQ ID NO: 924572 - DNA, 15 bp, Homo sapiens
gtttggaagcaattt

SEQ ID NO: 924573 - DNA, 15 bp, Homo sapiens
tttggaagcaattta

SEQ ID NO: 924574 - DNA, 15 bp, Homo sapiens
ttggaagcaatttaa

SEQ ID NO: 924575 - DNA, 15 bp, Homo sapiens
tggaagcaatttaat

SEQ ID NO: 924576 - DNA, 15 bp, Homo sapiens
ggaagcaatttaatt

SEQ ID NO: 924577 - DNA, 15 bp, Homo sapiens
gaagcaatttaattg

SEQ ID NO: 924578 - DNA, 15 bp, Homo sapiens
aagcaatttaattga

SEQ ID NO: 924579 - DNA, 15 bp, Homo sapiens
agcaatttaattgaa

SEQ ID NO: 924580 - DNA, 15 bp, Homo sapiens
gcaatttaattgaaa

SEQ ID NO: 924581 - DNA, 15 bp, Homo sapiens
caatttaattgaaac

SEQ ID NO: 924582 - DNA, 15 bp, Homo sapiens
aatttaattgaaact

SEQ ID NO: 924583 - DNA, 15 bp, Homo sapiens
atttaattgaaacta

SEQ ID NO: 924584 - DNA, 15 bp, Homo sapiens
tttaattgaaactat

SEQ ID NO: 924585 - DNA, 15 bp, Homo sapiens
ttaattgaaactata

SEQ ID NO: 924586 - DNA, 15 bp, Homo sapiens
taattgaaactataa

SEQ ID NO: 924587 - DNA, 15 bp, Homo sapiens
aattgaaactataaa

SEQ ID NO: 924588 - DNA, 15 bp, Homo sapiens
attgaaactataaat

SEQ ID NO: 924589 - DNA, 15 bp, Homo sapiens
ttgaaactataaatt

SEQ ID NO: 924590 - DNA, 15 bp, Homo sapiens
tgaaactataaatta

SEQ ID NO: 924591 - DNA, 15 bp, Homo sapiens
gaaactataaattat

SEQ ID NO: 924592 - DNA, 15 bp, Homo sapiens
aaactataaattatt

SEQ ID NO: 924593 - DNA, 15 bp, Homo sapiens
aactataaattattc

SEQ ID NO: 924594 - DNA, 15 bp, Homo sapiens
actataaattattct

SEQ ID NO: 924595 - DNA, 15 bp, Homo sapiens
ctataaattattctg

SEQ ID NO: 924596 - DNA, 15 bp, Homo sapiens
tataaattattctgc

SEQ ID NO: 924597 - DNA, 15 bp, Homo sapiens
ataaattattctgcg

SEQ ID NO: 924598 - DNA, 15 bp, Homo sapiens
taaattattctgcgt

SEQ ID NO: 924599 - DNA, 15 bp, Homo sapiens
aaattattctgcgtc

SEQ ID NO: 924600 - DNA, 15 bp, Homo sapiens
aattattctgcgtca

SEQ ID NO: 924601 - DNA, 15 bp, Homo sapiens
attattctgcgtcat

SEQ ID NO: 924602 - DNA, 15 bp, Homo sapiens
ttattctgcgtcatc

SEQ ID NO: 924603 - DNA, 15 bp, Homo sapiens
tattctgcgtcatct

SEQ ID NO: 924604 - DNA, 15 bp, Homo sapiens
attctgcgtcatctg

SEQ ID NO: 924605 - DNA, 15 bp, Homo sapiens
ttctgcgtcatctgg

SEQ ID NO: 924606 - DNA, 15 bp, Homo sapiens
tctgcgtcatctggg

SEQ ID NO: 924607 - DNA, 15 bp, Homo sapiens
ctgcgtcatctggga

SEQ ID NO: 924608 - DNA, 15 bp, Homo sapiens
tgcgtcatctgggag

SEQ ID NO: 924609 - DNA, 15 bp, Homo sapiens
gcgtcatctgggagg

SEQ ID NO: 924610 - DNA, 15 bp, Homo sapiens
cgtcatctgggaggc

SEQ ID NO: 924611 - DNA, 15 bp, Homo sapiens
gtcatctgggaggca

SEQ ID NO: 924612 - DNA, 15 bp, Homo sapiens
tcatctgggaggcaa

SEQ ID NO: 924613 - DNA, 15 bp, Homo sapiens
catctgggaggcaag

SEQ ID NO: 924614 - DNA, 15 bp, Homo sapiens
atctgggaggcaaga

SEQ ID NO: 924615 - DNA, 15 bp, Homo sapiens
tctgggaggcaagac

SEQ ID NO: 924616 - DNA, 15 bp, Homo sapiens
ctgggaggcaagacc

SEQ ID NO: 924617 - DNA, 15 bp, Homo sapiens
tgggaggcaagacca

SEQ ID NO: 924618 - DNA, 15 bp, Homo sapiens
gggaggcaagaccat

SEQ ID NO: 924619 - DNA, 15 bp, Homo sapiens
ggaggcaagaccatg

SEQ ID NO: 924620 - DNA, 15 bp, Homo sapiens
gaggcaagaccatgt

SEQ ID NO: 924621 - DNA, 15 bp, Homo sapiens
aggcaagaccatgtt

SEQ ID NO: 924622 - DNA, 15 bp, Homo sapiens
ggcaagaccatgtta

SEQ ID NO: 924623 - DNA, 15 bp, Homo sapiens
gcaagaccatgttat

SEQ ID NO: 924624 - DNA, 15 bp, Homo sapiens
caagaccatgttatc

SEQ ID NO: 924625 - DNA, 15 bp, Homo sapiens
aagaccatgttatcc

SEQ ID NO: 924626 - DNA, 15 bp, Homo sapiens
agaccatgttatcct

SEQ ID NO: 924627 - DNA, 15 bp, Homo sapiens
gaccatgttatcctg

SEQ ID NO: 924628 - DNA, 15 bp, Homo sapiens
accatgttatcctga

SEQ ID NO: 924629 - DNA, 15 bp, Homo sapiens
ccatgttatcctgat

SEQ ID NO: 924630 - DNA, 15 bp, Homo sapiens
catgttatcctgatg

SEQ ID NO: 924631 - DNA, 15 bp, Homo sapiens
atgttatcctgatgc

SEQ ID NO: 924632 - DNA, 15 bp, Homo sapiens
tgttatcctgatgct

SEQ ID NO: 924633 - DNA, 15 bp, Homo sapiens
gttatcctgatgctt

SEQ ID NO: 924634 - DNA, 15 bp, Homo sapiens
ttatcctgatgcttt

SEQ ID NO: 924635 - DNA, 15 bp, Homo sapiens
tatcctgatgctttt

SEQ ID NO: 924636 - DNA, 15 bp, Homo sapiens
atcctgatgcttttg

SEQ ID NO: 924637 - DNA, 15 bp, Homo sapiens
tcctgatgcttttgt

SEQ ID NO: 924638 - DNA, 15 bp, Homo sapiens
cctgatgcttttgtt

SEQ ID NO: 924639 - DNA, 15 bp, Homo sapiens
ctgatgcttttgttt

SEQ ID NO: 924640 - DNA, 15 bp, Homo sapiens
tgatgcttttgtttc

SEQ ID NO: 924641 - DNA, 15 bp, Homo sapiens
gatgcttttgtttcc

SEQ ID NO: 924642 - DNA, 15 bp, Homo sapiens
atgcttttgtttcct

SEQ ID NO: 924643 - DNA, 15 bp, Homo sapiens
tgcttttgtttcctt

SEQ ID NO: 924644 - DNA, 15 bp, Homo sapiens
gcttttgtttccttt

SEQ ID NO: 924645 - DNA, 15 bp, Homo sapiens
cttttgtttcctttg

SEQ ID NO: 924646 - DNA, 15 bp, Homo sapiens
ttttgtttcctttgg

SEQ ID NO: 924647 - DNA, 15 bp, Homo sapiens
tttgtttcctttgga

SEQ ID NO: 924648 - DNA, 15 bp, Homo sapiens
ttgtttcctttggaa

SEQ ID NO: 924649 - DNA, 15 bp, Homo sapiens
tgtttcctttggaaa

SEQ ID NO: 924650 - DNA, 15 bp, Homo sapiens
gtttcctttggaaac

SEQ ID NO: 924651 - DNA, 15 bp, Homo sapiens
tttcctttggaaaca

SEQ ID NO: 924652 - DNA, 15 bp, Homo sapiens
ttcctttggaaacag

SEQ ID NO: 924653 - DNA, 15 bp, Homo sapiens
tcctttggaaacagg

SEQ ID NO: 924654 - DNA, 15 bp, Homo sapiens
cctttggaaacagga

SEQ ID NO: 924655 - DNA, 15 bp, Homo sapiens
ctttggaaacaggat

SEQ ID NO: 924656 - DNA, 15 bp, Homo sapiens
tttggaaacaggatt

SEQ ID NO: 924657 - DNA, 15 bp, Homo sapiens
ttggaaacaggatta

SEQ ID NO: 924658 - DNA, 15 bp, Homo sapiens
tggaaacaggattag

SEQ ID NO: 924659 - DNA, 15 bp, Homo sapiens
ggaaacaggattagt

SEQ ID NO: 924660 - DNA, 15 bp, Homo sapiens
gaaacaggattagta

SEQ ID NO: 924661 - DNA, 15 bp, Homo sapiens
aaacaggattagtac

SEQ ID NO: 924662 - DNA, 15 bp, Homo sapiens
aacaggattagtaca

SEQ ID NO: 924663 - DNA, 15 bp, Homo sapiens
acaggattagtacaa

SEQ ID NO: 924664 - DNA, 15 bp, Homo sapiens
caggattagtacaat

SEQ ID NO: 924665 - DNA, 15 bp, Homo sapiens
aggattagtacaatg

SEQ ID NO: 924666 - DNA, 15 bp, Homo sapiens
ggattagtacaatgc

SEQ ID NO: 924667 - DNA, 15 bp, Homo sapiens
gattagtacaatgcc

SEQ ID NO: 924668 - DNA, 15 bp, Homo sapiens
attagtacaatgcct

SEQ ID NO: 924669 - DNA, 15 bp, Homo sapiens
ttagtacaatgcctc

SEQ ID NO: 924670 - DNA, 15 bp, Homo sapiens
tagtacaatgcctca

SEQ ID NO: 924671 - DNA, 15 bp, Homo sapiens
agtacaatgcctcag

SEQ ID NO: 924672 - DNA, 15 bp, Homo sapiens
gtacaatgcctcagg

SEQ ID NO: 924673 - DNA, 15 bp, Homo sapiens
tacaatgcctcagga

SEQ ID NO: 924674 - DNA, 15 bp, Homo sapiens
acaatgcctcaggaa

SEQ ID NO: 924675 - DNA, 15 bp, Homo sapiens
caatgcctcaggaaa

SEQ ID NO: 924676 - DNA, 15 bp, Homo sapiens
aatgcctcaggaaat

SEQ ID NO: 924677 - DNA, 15 bp, Homo sapiens
atgcctcaggaaatg

SEQ ID NO: 924678 - DNA, 15 bp, Homo sapiens
tgcctcaggaaatgt

SEQ ID NO: 924679 - DNA, 15 bp, Homo sapiens
gcctcaggaaatgta

SEQ ID NO: 924680 - DNA, 15 bp, Homo sapiens
cctcaggaaatgtac

SEQ ID NO: 924681 - DNA, 15 bp, Homo sapiens
ctcaggaaatgtaca

SEQ ID NO: 924682 - DNA, 15 bp, Homo sapiens
tcaggaaatgtacat

SEQ ID NO: 924683 - DNA, 15 bp, Homo sapiens
caggaaatgtacata

SEQ ID NO: 924684 - DNA, 15 bp, Homo sapiens
aggaaatgtacatat

SEQ ID NO: 924685 - DNA, 15 bp, Homo sapiens
ggaaatgtacatatc

SEQ ID NO: 924686 - DNA, 15 bp, Homo sapiens
gaaatgtacatatct

SEQ ID NO: 924687 - DNA, 15 bp, Homo sapiens
aaatgtacatatctc

SEQ ID NO: 924688 - DNA, 15 bp, Homo sapiens
aatgtacatatctca

SEQ ID NO: 924689 - DNA, 15 bp, Homo sapiens
atgtacatatctcaa

SEQ ID NO: 924690 - DNA, 15 bp, Homo sapiens
tgtacatatctcaac

SEQ ID NO: 924691 - DNA, 15 bp, Homo sapiens
gtacatatctcaaca

SEQ ID NO: 924692 - DNA, 15 bp, Homo sapiens
tacatatctcaacac

SEQ ID NO: 924693 - DNA, 15 bp, Homo sapiens
acatatctcaacaca

SEQ ID NO: 924694 - DNA, 15 bp, Homo sapiens
catatctcaacacag

SEQ ID NO: 924695 - DNA, 15 bp, Homo sapiens
atatctcaacacaga

SEQ ID NO: 924696 - DNA, 15 bp, Homo sapiens
tatctcaacacagag

SEQ ID NO: 924697 - DNA, 15 bp, Homo sapiens
atctcaacacagagg

SEQ ID NO: 924698 - DNA, 15 bp, Homo sapiens
tctcaacacagaggc

SEQ ID NO: 924699 - DNA, 15 bp, Homo sapiens
ctcaacacagaggct

SEQ ID NO: 924700 - DNA, 15 bp, Homo sapiens
tcaacacagaggctg

SEQ ID NO: 924701 - DNA, 15 bp, Homo sapiens
caacacagaggctga

SEQ ID NO: 924702 - DNA, 15 bp, Homo sapiens
aacacagaggctgaa

SEQ ID NO: 924703 - DNA, 15 bp, Homo sapiens
acacagaggctgaaa

SEQ ID NO: 924704 - DNA, 15 bp, Homo sapiens
cacagaggctgaaaa

SEQ ID NO: 924705 - DNA, 15 bp, Homo sapiens
acagaggctgaaaac

SEQ ID NO: 924706 - DNA, 15 bp, Homo sapiens
cagaggctgaaaaca

SEQ ID NO: 924707 - DNA, 15 bp, Homo sapiens
agaggctgaaaacac

SEQ ID NO: 924708 - DNA, 15 bp, Homo sapiens
gaggctgaaaacaca

SEQ ID NO: 924709 - DNA, 15 bp, Homo sapiens
aggctgaaaacacag

SEQ ID NO: 924710 - DNA, 15 bp, Homo sapiens
ggctgaaaacacagg

SEQ ID NO: 924711 - DNA, 15 bp, Homo sapiens
gctgaaaacacaggg

SEQ ID NO: 924712 - DNA, 15 bp, Homo sapiens
ctgaaaacacagggc

SEQ ID NO: 924713 - DNA, 15 bp, Homo sapiens
tgaaaacacagggct

SEQ ID NO: 924714 - DNA, 15 bp, Homo sapiens
gaaaacacagggctt

SEQ ID NO: 924715 - DNA, 15 bp, Homo sapiens
aaaacacagggcttt

SEQ ID NO: 924716 - DNA, 15 bp, Homo sapiens
aaacacagggctttg

SEQ ID NO: 924717 - DNA, 15 bp, Homo sapiens
aacacagggctttgt

SEQ ID NO: 924718 - DNA, 15 bp, Homo sapiens
acacagggctttgtc

SEQ ID NO: 924719 - DNA, 15 bp, Homo sapiens
cacagggctttgtct

SEQ ID NO: 924720 - DNA, 15 bp, Homo sapiens
acagggctttgtctg

SEQ ID NO: 924721 - DNA, 15 bp, Homo sapiens
cagggctttgtctga

SEQ ID NO: 924722 - DNA, 15 bp, Homo sapiens
agggctttgtctgac

SEQ ID NO: 924723 - DNA, 15 bp, Homo sapiens
gggctttgtctgact

SEQ ID NO: 924724 - DNA, 15 bp, Homo sapiens
ggctttgtctgactg

SEQ ID NO: 924725 - DNA, 15 bp, Homo sapiens
gctttgtctgactgt

SEQ ID NO: 924726 - DNA, 15 bp, Homo sapiens
ctttgtctgactgtt

SEQ ID NO: 924727 - DNA, 15 bp, Homo sapiens
tttgtctgactgttg

SEQ ID NO: 924728 - DNA, 15 bp, Homo sapiens
ttgtctgactgttgg

SEQ ID NO: 924729 - DNA, 15 bp, Homo sapiens
tgtctgactgttggg

SEQ ID NO: 924730 - DNA, 15 bp, Homo sapiens
gtctgactgttgggt

SEQ ID NO: 924731 - DNA, 15 bp, Homo sapiens
tctgactgttgggta

SEQ ID NO: 924732 - DNA, 15 bp, Homo sapiens
ctgactgttgggtat

SEQ ID NO: 924733 - DNA, 15 bp, Homo sapiens
tgactgttgggtatg

SEQ ID NO: 924734 - DNA, 15 bp, Homo sapiens
gactgttgggtatgt

SEQ ID NO: 924735 - DNA, 15 bp, Homo sapiens
actgttgggtatgtc

SEQ ID NO: 924736 - DNA, 15 bp, Homo sapiens
ctgttgggtatgtcc

SEQ ID NO: 924737 - DNA, 15 bp, Homo sapiens
tgttgggtatgtccc

SEQ ID NO: 924738 - DNA, 15 bp, Homo sapiens
gttgggtatgtccct

SEQ ID NO: 924739 - DNA, 15 bp, Homo sapiens
ttgggtatgtccctc

SEQ ID NO: 924740 - DNA, 15 bp, Homo sapiens
tgggtatgtccctct

SEQ ID NO: 924741 - DNA, 15 bp, Homo sapiens
gggtatgtccctctg

SEQ ID NO: 924742 - DNA, 15 bp, Homo sapiens
ggtatgtccctctgc

SEQ ID NO: 924743 - DNA, 15 bp, Homo sapiens
gtatgtccctctgcc

SEQ ID NO: 924744 - DNA, 15 bp, Homo sapiens
tatgtccctctgcct

SEQ ID NO: 924745 - DNA, 15 bp, Homo sapiens
atgtccctctgcctt

SEQ ID NO: 924746 - DNA, 15 bp, Homo sapiens
tgtccctctgccttt

SEQ ID NO: 924747 - DNA, 15 bp, Homo sapiens
gtccctctgccttta

SEQ ID NO: 924748 - DNA, 15 bp, Homo sapiens
tccctctgcctttat

SEQ ID NO: 924749 - DNA, 15 bp, Homo sapiens
ccctctgcctttatc

SEQ ID NO: 924750 - DNA, 15 bp, Homo sapiens
cctctgcctttatct

SEQ ID NO: 924751 - DNA, 15 bp, Homo sapiens
ctctgcctttatctc

SEQ ID NO: 924752 - DNA, 15 bp, Homo sapiens
tctgcctttatctcc

SEQ ID NO: 924753 - DNA, 15 bp, Homo sapiens
ctgcctttatctcca

SEQ ID NO: 924754 - DNA, 15 bp, Homo sapiens
tgcctttatctccac

SEQ ID NO: 924755 - DNA, 15 bp, Homo sapiens
gcctttatctccaca

SEQ ID NO: 924756 - DNA, 15 bp, Homo sapiens
cctttatctccacaa

SEQ ID NO: 924757 - DNA, 15 bp, Homo sapiens
ctttatctccacaac

SEQ ID NO: 924758 - DNA, 15 bp, Homo sapiens
tttatctccacaaca

SEQ ID NO: 924759 - DNA, 15 bp, Homo sapiens
ttatctccacaacaa

SEQ ID NO: 924760 - DNA, 15 bp, Homo sapiens
tatctccacaacaaa

SEQ ID NO: 924761 - DNA, 15 bp, Homo sapiens
atctccacaacaaac

SEQ ID NO: 924762 - DNA, 15 bp, Homo sapiens
tctccacaacaaaca

SEQ ID NO: 924763 - DNA, 15 bp, Homo sapiens
ctccacaacaaacaa

SEQ ID NO: 924764 - DNA, 15 bp, Homo sapiens
tccacaacaaacaat

SEQ ID NO: 924765 - DNA, 15 bp, Homo sapiens
ccacaacaaacaata

SEQ ID NO: 924766 - DNA, 15 bp, Homo sapiens
cacaacaaacaataa

SEQ ID NO: 924767 - DNA, 15 bp, Homo sapiens
acaacaaacaataac

SEQ ID NO: 924768 - DNA, 15 bp, Homo sapiens
caacaaacaataaca

SEQ ID NO: 924769 - DNA, 15 bp, Homo sapiens
aacaaacaataacat

SEQ ID NO: 924770 - DNA, 15 bp, Homo sapiens
acaaacaataacatt

SEQ ID NO: 924771 - DNA, 15 bp, Homo sapiens
caaacaataacatta

SEQ ID NO: 924772 - DNA, 15 bp, Homo sapiens
aaacaataacattac

SEQ ID NO: 924773 - DNA, 15 bp, Homo sapiens
aacaataacattaca

SEQ ID NO: 924774 - DNA, 15 bp, Homo sapiens
acaataacattacag

SEQ ID NO: 924775 - DNA, 15 bp, Homo sapiens
caataacattacaga

SEQ ID NO: 924776 - DNA, 15 bp, Homo sapiens
aataacattacagaa

SEQ ID NO: 924777 - DNA, 15 bp, Homo sapiens
ataacattacagaaa

SEQ ID NO: 924778 - DNA, 15 bp, Homo sapiens
taacattacagaaaa

SEQ ID NO: 924779 - DNA, 15 bp, Homo sapiens
aacattacagaaaag

SEQ ID NO: 924780 - DNA, 15 bp, Homo sapiens
acattacagaaaaga

SEQ ID NO: 924781 - DNA, 15 bp, Homo sapiens
cattacagaaaagag

SEQ ID NO: 924782 - DNA, 15 bp, Homo sapiens
attacagaaaagagt

SEQ ID NO: 924783 - DNA, 15 bp, Homo sapiens
ttacagaaaagagtg

SEQ ID NO: 924784 - DNA, 15 bp, Homo sapiens
tacagaaaagagtgg

SEQ ID NO: 924785 - DNA, 15 bp, Homo sapiens
acagaaaagagtggc

SEQ ID NO: 924786 - DNA, 15 bp, Homo sapiens
cagaaaagagtggct

SEQ ID NO: 924787 - DNA, 15 bp, Homo sapiens
agaaaagagtggctt

SEQ ID NO: 924788 - DNA, 15 bp, Homo sapiens
gaaaagagtggcttg

SEQ ID NO: 924789 - DNA, 15 bp, Homo sapiens
aaaagagtggcttga

SEQ ID NO: 924790 - DNA, 15 bp, Homo sapiens
aaagagtggcttgat

SEQ ID NO: 924791 - DNA, 15 bp, Homo sapiens
aagagtggcttgatt

SEQ ID NO: 924792 - DNA, 15 bp, Homo sapiens
agagtggcttgatta

SEQ ID NO: 924793 - DNA, 15 bp, Homo sapiens
gagtggcttgattaa

SEQ ID NO: 924794 - DNA, 15 bp, Homo sapiens
agtggcttgattaag

SEQ ID NO: 924795 - DNA, 15 bp, Homo sapiens
gtggcttgattaagg

SEQ ID NO: 924796 - DNA, 15 bp, Homo sapiens
tggcttgattaagga

SEQ ID NO: 924797 - DNA, 15 bp, Homo sapiens
ggcttgattaaggaa

SEQ ID NO: 924798 - DNA, 15 bp, Homo sapiens
gcttgattaaggaaa

SEQ ID NO: 924799 - DNA, 15 bp, Homo sapiens
cttgattaaggaaaa

SEQ ID NO: 924800 - DNA, 15 bp, Homo sapiens
ttgattaaggaaaaa

SEQ ID NO: 924801 - DNA, 15 bp, Homo sapiens
tgattaaggaaaaat

SEQ ID NO: 924802 - DNA, 15 bp, Homo sapiens
gattaaggaaaaatg

SEQ ID NO: 924803 - DNA, 15 bp, Homo sapiens
attaaggaaaaatga

SEQ ID NO: 924804 - DNA, 15 bp, Homo sapiens
ttaaggaaaaatgat

SEQ ID NO: 924805 - DNA, 15 bp, Homo sapiens
taaggaaaaatgata

SEQ ID NO: 924806 - DNA, 15 bp, Homo sapiens
aaggaaaaatgatag

SEQ ID NO: 924807 - DNA, 15 bp, Homo sapiens
aggaaaaatgatagt

SEQ ID NO: 924808 - DNA, 15 bp, Homo sapiens
ggaaaaatgatagta

SEQ ID NO: 924809 - DNA, 15 bp, Homo sapiens
gaaaaatgatagtac

SEQ ID NO: 924810 - DNA, 15 bp, Homo sapiens
aaaaatgatagtaca

SEQ ID NO: 924811 - DNA, 15 bp, Homo sapiens
aaaatgatagtacac

SEQ ID NO: 924812 - DNA, 15 bp, Homo sapiens
aaatgatagtacaca

SEQ ID NO: 924813 - DNA, 15 bp, Homo sapiens
aatgatagtacacac

SEQ ID NO: 924814 - DNA, 15 bp, Homo sapiens
atgatagtacacaca

SEQ ID NO: 924815 - DNA, 15 bp, Homo sapiens
tgatagtacacacag

SEQ ID NO: 924816 - DNA, 15 bp, Homo sapiens
gatagtacacacagt

SEQ ID NO: 924817 - DNA, 15 bp, Homo sapiens
atagtacacacagta

SEQ ID NO: 924818 - DNA, 15 bp, Homo sapiens
tagtacacacagtat

SEQ ID NO: 924819 - DNA, 15 bp, Homo sapiens
agtacacacagtatg

SEQ ID NO: 924820 - DNA, 15 bp, Homo sapiens
gtacacacagtatgc

SEQ ID NO: 924821 - DNA, 15 bp, Homo sapiens
tacacacagtatgct

SEQ ID NO: 924822 - DNA, 15 bp, Homo sapiens
acacacagtatgctc

SEQ ID NO: 924823 - DNA, 15 bp, Homo sapiens
cacacagtatgctct

SEQ ID NO: 924824 - DNA, 15 bp, Homo sapiens
acacagtatgctctc

SEQ ID NO: 924825 - DNA, 15 bp, Homo sapiens
cacagtatgctctct

SEQ ID NO: 924826 - DNA, 15 bp, Homo sapiens
acagtatgctctcta

SEQ ID NO: 924827 - DNA, 15 bp, Homo sapiens
cagtatgctctctat

SEQ ID NO: 924828 - DNA, 15 bp, Homo sapiens
agtatgctctctatc

SEQ ID NO: 924829 - DNA, 15 bp, Homo sapiens
gtatgctctctatcc

SEQ ID NO: 924830 - DNA, 15 bp, Homo sapiens
tatgctctctatccc

SEQ ID NO: 924831 - DNA, 15 bp, Homo sapiens
atgctctctatccct

SEQ ID NO: 924832 - DNA, 15 bp, Homo sapiens
tgctctctatccctg

SEQ ID NO: 924833 - DNA, 15 bp, Homo sapiens
gctctctatccctgg

SEQ ID NO: 924834 - DNA, 15 bp, Homo sapiens
ctctctatccctggg

SEQ ID NO: 924835 - DNA, 15 bp, Homo sapiens
tctctatccctggga

SEQ ID NO: 924836 - DNA, 15 bp, Homo sapiens
ctctatccctgggat

SEQ ID NO: 924837 - DNA, 15 bp, Homo sapiens
tctatccctgggatc

SEQ ID NO: 924838 - DNA, 15 bp, Homo sapiens
ctatccctgggatca

SEQ ID NO: 924839 - DNA, 15 bp, Homo sapiens
tatccctgggatcaa

SEQ ID NO: 924840 - DNA, 15 bp, Homo sapiens
atccctgggatcaaa

SEQ ID NO: 924841 - DNA, 15 bp, Homo sapiens
tccctgggatcaaac

SEQ ID NO: 924842 - DNA, 15 bp, Homo sapiens
ccctgggatcaaact

SEQ ID NO: 924843 - DNA, 15 bp, Homo sapiens
cctgggatcaaacta

SEQ ID NO: 924844 - DNA, 15 bp, Homo sapiens
ctgggatcaaactaa

SEQ ID NO: 924845 - DNA, 15 bp, Homo sapiens
tgggatcaaactaag

SEQ ID NO: 924846 - DNA, 15 bp, Homo sapiens
gggatcaaactaaga

SEQ ID NO: 924847 - DNA, 15 bp, Homo sapiens
ggatcaaactaagac

SEQ ID NO: 924848 - DNA, 15 bp, Homo sapiens
gatcaaactaagacc

SEQ ID NO: 924849 - DNA, 15 bp, Homo sapiens
atcaaactaagaccc

SEQ ID NO: 924850 - DNA, 15 bp, Homo sapiens
tcaaactaagaccca

SEQ ID NO: 924851 - DNA, 15 bp, Homo sapiens
caaactaagacccat

SEQ ID NO: 924852 - DNA, 15 bp, Homo sapiens
aaactaagacccatg

SEQ ID NO: 924853 - DNA, 15 bp, Homo sapiens
aactaagacccatgg

SEQ ID NO: 924854 - DNA, 15 bp, Homo sapiens
actaagacccatggt

SEQ ID NO: 924855 - DNA, 15 bp, Homo sapiens
ctaagacccatggtg

SEQ ID NO: 924856 - DNA, 15 bp, Homo sapiens
taagacccatggtgt

SEQ ID NO: 924857 - DNA, 15 bp, Homo sapiens
aagacccatggtgta

SEQ ID NO: 924858 - DNA, 15 bp, Homo sapiens
agacccatggtgtat

SEQ ID NO: 924859 - DNA, 15 bp, Homo sapiens
gacccatggtgtatt

SEQ ID NO: 924860 - DNA, 15 bp, Homo sapiens
acccatggtgtatta

SEQ ID NO: 924861 - DNA, 15 bp, Homo sapiens
cccatggtgtattag

SEQ ID NO: 924862 - DNA, 15 bp, Homo sapiens
ccatggtgtattagt

SEQ ID NO: 924863 - DNA, 15 bp, Homo sapiens
catggtgtattagtc

SEQ ID NO: 924864 - DNA, 15 bp, Homo sapiens
atggtgtattagtcc

SEQ ID NO: 924865 - DNA, 15 bp, Homo sapiens
tggtgtattagtcca

SEQ ID NO: 924866 - DNA, 15 bp, Homo sapiens
ggtgtattagtccat

SEQ ID NO: 924867 - DNA, 15 bp, Homo sapiens
gtgtattagtccatt

SEQ ID NO: 924868 - DNA, 15 bp, Homo sapiens
tgtattagtccattc

SEQ ID NO: 924869 - DNA, 15 bp, Homo sapiens
gtattagtccattct

SEQ ID NO: 924870 - DNA, 15 bp, Homo sapiens
tattagtccattctc

SEQ ID NO: 924871 - DNA, 15 bp, Homo sapiens
attagtccattctca

SEQ ID NO: 924872 - DNA, 15 bp, Homo sapiens
ttagtccattctcac

SEQ ID NO: 924873 - DNA, 15 bp, Homo sapiens
tagtccattctcaca

SEQ ID NO: 924874 - DNA, 15 bp, Homo sapiens
agtccattctcacac

SEQ ID NO: 924875 - DNA, 15 bp, Homo sapiens
gtccattctcacact

SEQ ID NO: 924876 - DNA, 15 bp, Homo sapiens
tccattctcacactg

SEQ ID NO: 924877 - DNA, 15 bp, Homo sapiens
ccattctcacactgc

SEQ ID NO: 924878 - DNA, 15 bp, Homo sapiens
cattctcacactgct

SEQ ID NO: 924879 - DNA, 15 bp, Homo sapiens
attctcacactgcta

SEQ ID NO: 924880 - DNA, 15 bp, Homo sapiens
ttctcacactgctaa

SEQ ID NO: 924881 - DNA, 15 bp, Homo sapiens
tctcacactgctaat

SEQ ID NO: 924882 - DNA, 15 bp, Homo sapiens
ctcacactgctaata

SEQ ID NO: 924883 - DNA, 15 bp, Homo sapiens
tcacactgctaataa

SEQ ID NO: 924884 - DNA, 15 bp, Homo sapiens
cacactgctaataaa

SEQ ID NO: 924885 - DNA, 15 bp, Homo sapiens
acactgctaataaag

SEQ ID NO: 924886 - DNA, 15 bp, Homo sapiens
cactgctaataaaga

SEQ ID NO: 924887 - DNA, 15 bp, Homo sapiens
actgctaataaagat

SEQ ID NO: 924888 - DNA, 15 bp, Homo sapiens
ctgctaataaagata

SEQ ID NO: 924889 - DNA, 15 bp, Homo sapiens
tgctaataaagatat

SEQ ID NO: 924890 - DNA, 15 bp, Homo sapiens
gctaataaagatata

SEQ ID NO: 924891 - DNA, 15 bp, Homo sapiens
ctaataaagatatac

SEQ ID NO: 924892 - DNA, 15 bp, Homo sapiens
taataaagatatacc

SEQ ID NO: 924893 - DNA, 15 bp, Homo sapiens
aataaagatatacct

SEQ ID NO: 924894 - DNA, 15 bp, Homo sapiens
ataaagatatacctg

SEQ ID NO: 924895 - DNA, 15 bp, Homo sapiens
taaagatatacctga

SEQ ID NO: 924896 - DNA, 15 bp, Homo sapiens
aaagatatacctgac

SEQ ID NO: 924897 - DNA, 15 bp, Homo sapiens
aagatatacctgaca

SEQ ID NO: 924898 - DNA, 15 bp, Homo sapiens
agatatacctgacac

SEQ ID NO: 924899 - DNA, 15 bp, Homo sapiens
gatatacctgacact

SEQ ID NO: 924900 - DNA, 15 bp, Homo sapiens
atatacctgacactg

SEQ ID NO: 924901 - DNA, 15 bp, Homo sapiens
tatacctgacactgg

SEQ ID NO: 924902 - DNA, 15 bp, Homo sapiens
atacctgacactgga

SEQ ID NO: 924903 - DNA, 15 bp, Homo sapiens
tacctgacactggat

SEQ ID NO: 924904 - DNA, 15 bp, Homo sapiens
acctgacactggata

SEQ ID NO: 924905 - DNA, 15 bp, Homo sapiens
cctgacactggataa

SEQ ID NO: 924906 - DNA, 15 bp, Homo sapiens
ctgacactggataat

SEQ ID NO: 924907 - DNA, 15 bp, Homo sapiens
tgacactggataatt

SEQ ID NO: 924908 - DNA, 15 bp, Homo sapiens
gacactggataattt

SEQ ID NO: 924909 - DNA, 15 bp, Homo sapiens
acactggataatttg

SEQ ID NO: 924910 - DNA, 15 bp, Homo sapiens
cactggataatttgt

SEQ ID NO: 924911 - DNA, 15 bp, Homo sapiens
actggataatttgta

SEQ ID NO: 924912 - DNA, 15 bp, Homo sapiens
ctggataatttgtaa

SEQ ID NO: 924913 - DNA, 15 bp, Homo sapiens
tggataatttgtaaa

SEQ ID NO: 924914 - DNA, 15 bp, Homo sapiens
ggataatttgtaaag

SEQ ID NO: 924915 - DNA, 15 bp, Homo sapiens
gataatttgtaaagg

SEQ ID NO: 924916 - DNA, 15 bp, Homo sapiens
ataatttgtaaagga

SEQ ID NO: 924917 - DNA, 15 bp, Homo sapiens
taatttgtaaaggaa

SEQ ID NO: 924918 - DNA, 15 bp, Homo sapiens
aatttgtaaaggaaa

SEQ ID NO: 924919 - DNA, 15 bp, Homo sapiens
atttgtaaaggaaag

SEQ ID NO: 924920 - DNA, 15 bp, Homo sapiens
tttgtaaaggaaaga

SEQ ID NO: 924921 - DNA, 15 bp, Homo sapiens
ttgtaaaggaaagag

SEQ ID NO: 924922 - DNA, 15 bp, Homo sapiens
tgtaaaggaaagaga

SEQ ID NO: 924923 - DNA, 15 bp, Homo sapiens
gtaaaggaaagagat

SEQ ID NO: 924924 - DNA, 15 bp, Homo sapiens
taaaggaaagagatt

SEQ ID NO: 924925 - DNA, 15 bp, Homo sapiens
aaaggaaagagattt

SEQ ID NO: 924926 - DNA, 15 bp, Homo sapiens
aaggaaagagattta

SEQ ID NO: 924927 - DNA, 15 bp, Homo sapiens
aggaaagagatttaa

SEQ ID NO: 924928 - DNA, 15 bp, Homo sapiens
ggaaagagatttaat

SEQ ID NO: 924929 - DNA, 15 bp, Homo sapiens
gaaagagatttaatt

SEQ ID NO: 924930 - DNA, 15 bp, Homo sapiens
aaagagatttaattg

SEQ ID NO: 924931 - DNA, 15 bp, Homo sapiens
aagagatttaattga

SEQ ID NO: 924932 - DNA, 15 bp, Homo sapiens
agagatttaattgac

SEQ ID NO: 924933 - DNA, 15 bp, Homo sapiens
gagatttaattgact

SEQ ID NO: 924934 - DNA, 15 bp, Homo sapiens
atttaattgactcat

SEQ ID NO: 924935 - DNA, 15 bp, Homo sapiens
tttaattgactcatg

SEQ ID NO: 924936 - DNA, 15 bp, Homo sapiens
ttaattgactcatgt

SEQ ID NO: 924937 - DNA, 15 bp, Homo sapiens
taattgactcatgtc

SEQ ID NO: 924938 - DNA, 15 bp, Homo sapiens
aattgactcatgtct

SEQ ID NO: 924939 - DNA, 15 bp, Homo sapiens
attgactcatgtctc

SEQ ID NO: 924940 - DNA, 15 bp, Homo sapiens
ttgactcatgtctca

SEQ ID NO: 924941 - DNA, 15 bp, Homo sapiens
tgactcatgtctcag

SEQ ID NO: 924942 - DNA, 15 bp, Homo sapiens
gactcatgtctcagc

SEQ ID NO: 924943 - DNA, 15 bp, Homo sapiens
actcatgtctcagca

SEQ ID NO: 924944 - DNA, 15 bp, Homo sapiens
ctcatgtctcagcat

SEQ ID NO: 924945 - DNA, 15 bp, Homo sapiens
tcatgtctcagcatg

SEQ ID NO: 924946 - DNA, 15 bp, Homo sapiens
catgtctcagcatga

SEQ ID NO: 924947 - DNA, 15 bp, Homo sapiens
atgtctcagcatgac

SEQ ID NO: 924948 - DNA, 15 bp, Homo sapiens
tgtctcagcatgact

SEQ ID NO: 924949 - DNA, 15 bp, Homo sapiens
gtctcagcatgactg

SEQ ID NO: 924950 - DNA, 15 bp, Homo sapiens
tctcagcatgactgg

SEQ ID NO: 924951 - DNA, 15 bp, Homo sapiens
ctcagcatgactggc

SEQ ID NO: 924952 - DNA, 15 bp, Homo sapiens
tcagcatgactggcg

SEQ ID NO: 924953 - DNA, 15 bp, Homo sapiens
cagcatgactggcga

SEQ ID NO: 924954 - DNA, 15 bp, Homo sapiens
agcatgactggcgag

SEQ ID NO: 924955 - DNA, 15 bp, Homo sapiens
gcatgactggcgagg

SEQ ID NO: 924956 - DNA, 15 bp, Homo sapiens
catgactggcgagga

SEQ ID NO: 924957 - DNA, 15 bp, Homo sapiens
atgactggcgaggac

SEQ ID NO: 924958 - DNA, 15 bp, Homo sapiens
tgactggcgaggact

SEQ ID NO: 924959 - DNA, 15 bp, Homo sapiens
gactggcgaggactc

SEQ ID NO: 924960 - DNA, 15 bp, Homo sapiens
actggcgaggactca

SEQ ID NO: 924961 - DNA, 15 bp, Homo sapiens
ctggcgaggactcaa

SEQ ID NO: 924962 - DNA, 15 bp, Homo sapiens
tggcgaggactcaag

SEQ ID NO: 924963 - DNA, 15 bp, Homo sapiens
ggcgaggactcaaga

SEQ ID NO: 924964 - DNA, 15 bp, Homo sapiens
gcgaggactcaagaa

SEQ ID NO: 924965 - DNA, 15 bp, Homo sapiens
cgaggactcaagaaa

SEQ ID NO: 924966 - DNA, 15 bp, Homo sapiens
gaggactcaagaaac

SEQ ID NO: 924967 - DNA, 15 bp, Homo sapiens
aggactcaagaaact

SEQ ID NO: 924968 - DNA, 15 bp, Homo sapiens
ggactcaagaaactt

SEQ ID NO: 924969 - DNA, 15 bp, Homo sapiens
gactcaagaaactta

SEQ ID NO: 924970 - DNA, 15 bp, Homo sapiens
actcaagaaacttac

SEQ ID NO: 924971 - DNA, 15 bp, Homo sapiens
ctcaagaaacttaca

SEQ ID NO: 924972 - DNA, 15 bp, Homo sapiens
tcaagaaacttacaa

SEQ ID NO: 924973 - DNA, 15 bp, Homo sapiens
caagaaacttacaat

SEQ ID NO: 924974 - DNA, 15 bp, Homo sapiens
aagaaacttacaatc

SEQ ID NO: 924975 - DNA, 15 bp, Homo sapiens
agaaacttacaatcg

SEQ ID NO: 924976 - DNA, 15 bp, Homo sapiens
gaaacttacaatcgt

SEQ ID NO: 924977 - DNA, 15 bp, Homo sapiens
aaacttacaatcgtg

SEQ ID NO: 924978 - DNA, 15 bp, Homo sapiens
aacttacaatcgtgg

SEQ ID NO: 924979 - DNA, 15 bp, Homo sapiens
acttacaatcgtggc

SEQ ID NO: 924980 - DNA, 15 bp, Homo sapiens
cttacaatcgtggca

SEQ ID NO: 924981 - DNA, 15 bp, Homo sapiens
ttacaatcgtggcag

SEQ ID NO: 924982 - DNA, 15 bp, Homo sapiens
tacaatcgtggcaga

SEQ ID NO: 924983 - DNA, 15 bp, Homo sapiens
acaatcgtggcagag

SEQ ID NO: 924984 - DNA, 15 bp, Homo sapiens
caatcgtggcagagg

SEQ ID NO: 924985 - DNA, 15 bp, Homo sapiens
aatcgtggcagaggg

SEQ ID NO: 924986 - DNA, 15 bp, Homo sapiens
atcgtggcagagggg

SEQ ID NO: 924987 - DNA, 15 bp, Homo sapiens
tcgtggcagagggga

SEQ ID NO: 924988 - DNA, 15 bp, Homo sapiens
cgtggcagaggggaa

SEQ ID NO: 924989 - DNA, 15 bp, Homo sapiens
gtggcagaggggaac

SEQ ID NO: 924990 - DNA, 15 bp, Homo sapiens
tggcagaggggaacc

SEQ ID NO: 924991 - DNA, 15 bp, Homo sapiens
ggcagaggggaacca

SEQ ID NO: 924992 - DNA, 15 bp, Homo sapiens
gcagaggggaaccaa

SEQ ID NO: 924993 - DNA, 15 bp, Homo sapiens
cagaggggaaccaaa

SEQ ID NO: 924994 - DNA, 15 bp, Homo sapiens
agaggggaaccaaat

SEQ ID NO: 924995 - DNA, 15 bp, Homo sapiens
gaggggaaccaaata

SEQ ID NO: 924996 - DNA, 15 bp, Homo sapiens
aggggaaccaaatat

SEQ ID NO: 924997 - DNA, 15 bp, Homo sapiens
ggggaaccaaatatg

SEQ ID NO: 924998 - DNA, 15 bp, Homo sapiens
gggaaccaaatatgt

SEQ ID NO: 924999 - DNA, 15 bp, Homo sapiens
ggaaccaaatatgtc

SEQ ID NO: 925000 - DNA, 15 bp, Homo sapiens
gaaccaaatatgtcc

SEQ ID NO: 925001 - DNA, 15 bp, Homo sapiens
aaccaaatatgtcct

SEQ ID NO: 925002 - DNA, 15 bp, Homo sapiens
accaaatatgtcctt

SEQ ID NO: 925003 - DNA, 15 bp, Homo sapiens
ccaaatatgtccttc

SEQ ID NO: 925004 - DNA, 15 bp, Homo sapiens
tgtccttcttcacat

SEQ ID NO: 925005 - DNA, 15 bp, Homo sapiens
gtccttcttcacatg

SEQ ID NO: 925006 - DNA, 15 bp, Homo sapiens
tccttcttcacatgg

SEQ ID NO: 925007 - DNA, 15 bp, Homo sapiens
ccttcttcacatggc

SEQ ID NO: 925008 - DNA, 15 bp, Homo sapiens
cttcttcacatggca

SEQ ID NO: 925009 - DNA, 15 bp, Homo sapiens
ttcttcacatggcag

SEQ ID NO: 925010 - DNA, 15 bp, Homo sapiens
tcttcacatggcagc

SEQ ID NO: 925011 - DNA, 15 bp, Homo sapiens
cttcacatggcagca

SEQ ID NO: 925012 - DNA, 15 bp, Homo sapiens
ttcacatggcagcag

SEQ ID NO: 925013 - DNA, 15 bp, Homo sapiens
tcacatggcagcagc

SEQ ID NO: 925014 - DNA, 15 bp, Homo sapiens
cacatggcagcagca

SEQ ID NO: 925015 - DNA, 15 bp, Homo sapiens
acatggcagcagcaa

SEQ ID NO: 925016 - DNA, 15 bp, Homo sapiens
catggcagcagcaag

SEQ ID NO: 925017 - DNA, 15 bp, Homo sapiens
atggcagcagcaagg

SEQ ID NO: 925018 - DNA, 15 bp, Homo sapiens
tggcagcagcaagga

SEQ ID NO: 925019 - DNA, 15 bp, Homo sapiens
ggcagcagcaaggag

SEQ ID NO: 925020 - DNA, 15 bp, Homo sapiens
gcagcagcaaggaga

SEQ ID NO: 925021 - DNA, 15 bp, Homo sapiens
cagcagcaaggagaa

SEQ ID NO: 925022 - DNA, 15 bp, Homo sapiens
agcagcaaggagaag

SEQ ID NO: 925023 - DNA, 15 bp, Homo sapiens
gcagcaaggagaagt

SEQ ID NO: 925024 - DNA, 15 bp, Homo sapiens
cagcaaggagaagtg

SEQ ID NO: 925025 - DNA, 15 bp, Homo sapiens
agcaaggagaagtgc

SEQ ID NO: 925026 - DNA, 15 bp, Homo sapiens
gcaaggagaagtgct

SEQ ID NO: 925027 - DNA, 15 bp, Homo sapiens
caaggagaagtgctg

SEQ ID NO: 925028 - DNA, 15 bp, Homo sapiens
aaggagaagtgctga

SEQ ID NO: 925029 - DNA, 15 bp, Homo sapiens
aggagaagtgctgag

SEQ ID NO: 925030 - DNA, 15 bp, Homo sapiens
ggagaagtgctgaga

SEQ ID NO: 925031 - DNA, 15 bp, Homo sapiens
gagaagtgctgagaa

SEQ ID NO: 925032 - DNA, 15 bp, Homo sapiens
agaagtgctgagaaa

SEQ ID NO: 925033 - DNA, 15 bp, Homo sapiens
gaagtgctgagaaaa

SEQ ID NO: 925034 - DNA, 15 bp, Homo sapiens
aagtgctgagaaaaa

SEQ ID NO: 925035 - DNA, 15 bp, Homo sapiens
agtgctgagaaaaag

SEQ ID NO: 925036 - DNA, 15 bp, Homo sapiens
gtgctgagaaaaagg

SEQ ID NO: 925037 - DNA, 15 bp, Homo sapiens
tgctgagaaaaaggg

SEQ ID NO: 925038 - DNA, 15 bp, Homo sapiens
gctgagaaaaagggg

SEQ ID NO: 925039 - DNA, 15 bp, Homo sapiens
ctgagaaaaagggga

SEQ ID NO: 925040 - DNA, 15 bp, Homo sapiens
tgagaaaaaggggaa

SEQ ID NO: 925041 - DNA, 15 bp, Homo sapiens
gagaaaaaggggaaa

SEQ ID NO: 925042 - DNA, 15 bp, Homo sapiens
agaaaaaggggaaat

SEQ ID NO: 925043 - DNA, 15 bp, Homo sapiens
gaaaaaggggaaatg

SEQ ID NO: 925044 - DNA, 15 bp, Homo sapiens
aaaaaggggaaatgc

SEQ ID NO: 925045 - DNA, 15 bp, Homo sapiens
aaaaggggaaatgcc

SEQ ID NO: 925046 - DNA, 15 bp, Homo sapiens
aaaggggaaatgcca

SEQ ID NO: 925047 - DNA, 15 bp, Homo sapiens
aaggggaaatgccac

SEQ ID NO: 925048 - DNA, 15 bp, Homo sapiens
aggggaaatgccact

SEQ ID NO: 925049 - DNA, 15 bp, Homo sapiens
ggggaaatgccactt

SEQ ID NO: 925050 - DNA, 15 bp, Homo sapiens
gggaaatgccactta

SEQ ID NO: 925051 - DNA, 15 bp, Homo sapiens
ggaaatgccacttat

SEQ ID NO: 925052 - DNA, 15 bp, Homo sapiens
gaaatgccacttata

SEQ ID NO: 925053 - DNA, 15 bp, Homo sapiens
aaatgccacttataa

SEQ ID NO: 925054 - DNA, 15 bp, Homo sapiens
aatgccacttataaa

SEQ ID NO: 925055 - DNA, 15 bp, Homo sapiens
atgccacttataaag

SEQ ID NO: 925056 - DNA, 15 bp, Homo sapiens
tgccacttataaagc

SEQ ID NO: 925057 - DNA, 15 bp, Homo sapiens
gccacttataaagcc

SEQ ID NO: 925058 - DNA, 15 bp, Homo sapiens
ccacttataaagcca

SEQ ID NO: 925059 - DNA, 15 bp, Homo sapiens
cacttataaagccat

SEQ ID NO: 925060 - DNA, 15 bp, Homo sapiens
acttataaagccatc

SEQ ID NO: 925061 - DNA, 15 bp, Homo sapiens
cttataaagccatca

SEQ ID NO: 925062 - DNA, 15 bp, Homo sapiens
ttataaagccatcag

SEQ ID NO: 925063 - DNA, 15 bp, Homo sapiens
tataaagccatcaga

SEQ ID NO: 925064 - DNA, 15 bp, Homo sapiens
ataaagccatcagat

SEQ ID NO: 925065 - DNA, 15 bp, Homo sapiens
taaagccatcagatc

SEQ ID NO: 925066 - DNA, 15 bp, Homo sapiens
aaagccatcagatct

SEQ ID NO: 925067 - DNA, 15 bp, Homo sapiens
aagccatcagatctt

SEQ ID NO: 925068 - DNA, 15 bp, Homo sapiens
agccatcagatcttt

SEQ ID NO: 925069 - DNA, 15 bp, Homo sapiens
gccatcagatctttt

SEQ ID NO: 925070 - DNA, 15 bp, Homo sapiens
ccatcagatcttttg

SEQ ID NO: 925071 - DNA, 15 bp, Homo sapiens
catcagatcttttga

SEQ ID NO: 925072 - DNA, 15 bp, Homo sapiens
atcagatcttttgag

SEQ ID NO: 925073 - DNA, 15 bp, Homo sapiens
tcagatcttttgaga

SEQ ID NO: 925074 - DNA, 15 bp, Homo sapiens
cagatcttttgagag

SEQ ID NO: 925075 - DNA, 15 bp, Homo sapiens
agatcttttgagagc

SEQ ID NO: 925076 - DNA, 15 bp, Homo sapiens
gatcttttgagagct

SEQ ID NO: 925077 - DNA, 15 bp, Homo sapiens
atcttttgagagctt

SEQ ID NO: 925078 - DNA, 15 bp, Homo sapiens
tcttttgagagctta

SEQ ID NO: 925079 - DNA, 15 bp, Homo sapiens
cttttgagagcttac

SEQ ID NO: 925080 - DNA, 15 bp, Homo sapiens
ttttgagagcttact

SEQ ID NO: 925081 - DNA, 15 bp, Homo sapiens
tttgagagcttacta

SEQ ID NO: 925082 - DNA, 15 bp, Homo sapiens
ttgagagcttactat

SEQ ID NO: 925083 - DNA, 15 bp, Homo sapiens
tgagagcttactatc

SEQ ID NO: 925084 - DNA, 15 bp, Homo sapiens
gagagcttactatca

SEQ ID NO: 925085 - DNA, 15 bp, Homo sapiens
agagcttactatcat

SEQ ID NO: 925086 - DNA, 15 bp, Homo sapiens
gagcttactatcatg

SEQ ID NO: 925087 - DNA, 15 bp, Homo sapiens
agcttactatcatga

SEQ ID NO: 925088 - DNA, 15 bp, Homo sapiens
gcttactatcatgag

SEQ ID NO: 925089 - DNA, 15 bp, Homo sapiens
cttactatcatgaga

SEQ ID NO: 925090 - DNA, 15 bp, Homo sapiens
ttactatcatgagaa

SEQ ID NO: 925091 - DNA, 15 bp, Homo sapiens
tactatcatgagaac

SEQ ID NO: 925092 - DNA, 15 bp, Homo sapiens
tgagaacagcatggt

SEQ ID NO: 925093 - DNA, 15 bp, Homo sapiens
gagaacagcatggtg

SEQ ID NO: 925094 - DNA, 15 bp, Homo sapiens
agaacagcatggtgg

SEQ ID NO: 925095 - DNA, 15 bp, Homo sapiens
gaacagcatggtggt

SEQ ID NO: 925096 - DNA, 15 bp, Homo sapiens
aacagcatggtggta

SEQ ID NO: 925097 - DNA, 15 bp, Homo sapiens
acagcatggtggtaa

SEQ ID NO: 925098 - DNA, 15 bp, Homo sapiens
cagcatggtggtaac

SEQ ID NO: 925099 - DNA, 15 bp, Homo sapiens
agcatggtggtaact

SEQ ID NO: 925100 - DNA, 15 bp, Homo sapiens
gcatggtggtaactc

SEQ ID NO: 925101 - DNA, 15 bp, Homo sapiens
catggtggtaactcc

SEQ ID NO: 925102 - DNA, 15 bp, Homo sapiens
atggtggtaactccc

SEQ ID NO: 925103 - DNA, 15 bp, Homo sapiens
tggtggtaactcccc

SEQ ID NO: 925104 - DNA, 15 bp, Homo sapiens
ggtggtaactccccc

SEQ ID NO: 925105 - DNA, 15 bp, Homo sapiens
gtggtaactccccct

SEQ ID NO: 925106 - DNA, 15 bp, Homo sapiens
tggtaactcccccta

SEQ ID NO: 925107 - DNA, 15 bp, Homo sapiens
ggtaactccccctat

SEQ ID NO: 925108 - DNA, 15 bp, Homo sapiens
gtaactccccctatg

SEQ ID NO: 925109 - DNA, 15 bp, Homo sapiens
taactccccctatga

SEQ ID NO: 925110 - DNA, 15 bp, Homo sapiens
aactccccctatgat

SEQ ID NO: 925111 - DNA, 15 bp, Homo sapiens
actccccctatgatt

SEQ ID NO: 925112 - DNA, 15 bp, Homo sapiens
ctccccctatgattc

SEQ ID NO: 925113 - DNA, 15 bp, Homo sapiens
tccccctatgattca

SEQ ID NO: 925114 - DNA, 15 bp, Homo sapiens
ccccctatgattcaa

SEQ ID NO: 925115 - DNA, 15 bp, Homo sapiens
cccctatgattcaat

SEQ ID NO: 925116 - DNA, 15 bp, Homo sapiens
ccctatgattcaatt

SEQ ID NO: 925117 - DNA, 15 bp, Homo sapiens
cctatgattcaatta

SEQ ID NO: 925118 - DNA, 15 bp, Homo sapiens
ctatgattcaattac

SEQ ID NO: 925119 - DNA, 15 bp, Homo sapiens
tatgattcaattacc

SEQ ID NO: 925120 - DNA, 15 bp, Homo sapiens
atgattcaattacct

SEQ ID NO: 925121 - DNA, 15 bp, Homo sapiens
tgattcaattacctc

SEQ ID NO: 925122 - DNA, 15 bp, Homo sapiens
gattcaattacctcc

SEQ ID NO: 925123 - DNA, 15 bp, Homo sapiens
attcaattacctccc

SEQ ID NO: 925124 - DNA, 15 bp, Homo sapiens
ttcaattacctccca

SEQ ID NO: 925125 - DNA, 15 bp, Homo sapiens
tcaattacctcccac

SEQ ID NO: 925126 - DNA, 15 bp, Homo sapiens
caattacctcccact

SEQ ID NO: 925127 - DNA, 15 bp, Homo sapiens
aattacctcccactg

SEQ ID NO: 925128 - DNA, 15 bp, Homo sapiens
attacctcccactga

SEQ ID NO: 925129 - DNA, 15 bp, Homo sapiens
ttacctcccactgag

SEQ ID NO: 925130 - DNA, 15 bp, Homo sapiens
tacctcccactgagt

SEQ ID NO: 925131 - DNA, 15 bp, Homo sapiens
acctcccactgagtc

SEQ ID NO: 925132 - DNA, 15 bp, Homo sapiens
cctcccactgagtcc

SEQ ID NO: 925133 - DNA, 15 bp, Homo sapiens
ctcccactgagtccc

SEQ ID NO: 925134 - DNA, 15 bp, Homo sapiens
tcccactgagtccct

SEQ ID NO: 925135 - DNA, 15 bp, Homo sapiens
cccactgagtccctc

SEQ ID NO: 925136 - DNA, 15 bp, Homo sapiens
ccactgagtccctcc

SEQ ID NO: 925137 - DNA, 15 bp, Homo sapiens
cactgagtccctccc

SEQ ID NO: 925138 - DNA, 15 bp, Homo sapiens
actgagtccctccca

SEQ ID NO: 925139 - DNA, 15 bp, Homo sapiens
ctgagtccctcccat

SEQ ID NO: 925140 - DNA, 15 bp, Homo sapiens
tgagtccctcccatg

SEQ ID NO: 925141 - DNA, 15 bp, Homo sapiens
gagtccctcccatga

SEQ ID NO: 925142 - DNA, 15 bp, Homo sapiens
agtccctcccatgac

SEQ ID NO: 925143 - DNA, 15 bp, Homo sapiens
gtccctcccatgaca

SEQ ID NO: 925144 - DNA, 15 bp, Homo sapiens
tccctcccatgacac

SEQ ID NO: 925145 - DNA, 15 bp, Homo sapiens
ccctcccatgacaca

SEQ ID NO: 925146 - DNA, 15 bp, Homo sapiens
cctcccatgacacat

SEQ ID NO: 925147 - DNA, 15 bp, Homo sapiens
ctcccatgacacatg

SEQ ID NO: 925148 - DNA, 15 bp, Homo sapiens
tcccatgacacatgg

SEQ ID NO: 925149 - DNA, 15 bp, Homo sapiens
cccatgacacatggg

SEQ ID NO: 925150 - DNA, 15 bp, Homo sapiens
ccatgacacatgggg

SEQ ID NO: 925151 - DNA, 15 bp, Homo sapiens
catgacacatgggga

SEQ ID NO: 925152 - DNA, 15 bp, Homo sapiens
atgacacatggggat

SEQ ID NO: 925153 - DNA, 15 bp, Homo sapiens
tgacacatggggatt

SEQ ID NO: 925154 - DNA, 15 bp, Homo sapiens
gacacatggggatta

SEQ ID NO: 925155 - DNA, 15 bp, Homo sapiens
acacatggggattac

SEQ ID NO: 925156 - DNA, 15 bp, Homo sapiens
cacatggggattacg

SEQ ID NO: 925157 - DNA, 15 bp, Homo sapiens
acatggggattacgg

SEQ ID NO: 925158 - DNA, 15 bp, Homo sapiens
catggggattacggg

SEQ ID NO: 925159 - DNA, 15 bp, Homo sapiens
atggggattacggga

SEQ ID NO: 925160 - DNA, 15 bp, Homo sapiens
tggggattacgggaa

SEQ ID NO: 925161 - DNA, 15 bp, Homo sapiens
ggggattacgggaac

SEQ ID NO: 925162 - DNA, 15 bp, Homo sapiens
gggattacgggaact

SEQ ID NO: 925163 - DNA, 15 bp, Homo sapiens
ggattacgggaacta

SEQ ID NO: 925164 - DNA, 15 bp, Homo sapiens
gattacgggaactac

SEQ ID NO: 925165 - DNA, 15 bp, Homo sapiens
attacgggaactaca

SEQ ID NO: 925166 - DNA, 15 bp, Homo sapiens
ttacgggaactacaa

SEQ ID NO: 925167 - DNA, 15 bp, Homo sapiens
tacgggaactacaat

SEQ ID NO: 925168 - DNA, 15 bp, Homo sapiens
acgggaactacaatt

SEQ ID NO: 925169 - DNA, 15 bp, Homo sapiens
cgggaactacaattc

SEQ ID NO: 925170 - DNA, 15 bp, Homo sapiens
gggaactacaattca

SEQ ID NO: 925171 - DNA, 15 bp, Homo sapiens
ggaactacaattcaa

SEQ ID NO: 925172 - DNA, 15 bp, Homo sapiens
gaactacaattcaag

SEQ ID NO: 925173 - DNA, 15 bp, Homo sapiens
aactacaattcaaga

SEQ ID NO: 925174 - DNA, 15 bp, Homo sapiens
actacaattcaagat

SEQ ID NO: 925175 - DNA, 15 bp, Homo sapiens
ctacaattcaagatg

SEQ ID NO: 925176 - DNA, 15 bp, Homo sapiens
tacaattcaagatga

SEQ ID NO: 925177 - DNA, 15 bp, Homo sapiens
acaattcaagatgag

SEQ ID NO: 925178 - DNA, 15 bp, Homo sapiens
caattcaagatgaga

SEQ ID NO: 925179 - DNA, 15 bp, Homo sapiens
atgagatttgggtga

SEQ ID NO: 925180 - DNA, 15 bp, Homo sapiens
tgagatttgggtgag

SEQ ID NO: 925181 - DNA, 15 bp, Homo sapiens
gagatttgggtgagg

SEQ ID NO: 925182 - DNA, 15 bp, Homo sapiens
agatttgggtgagga

SEQ ID NO: 925183 - DNA, 15 bp, Homo sapiens
gatttgggtgaggac

SEQ ID NO: 925184 - DNA, 15 bp, Homo sapiens
atttgggtgaggaca

SEQ ID NO: 925185 - DNA, 15 bp, Homo sapiens
tttgggtgaggacac

SEQ ID NO: 925186 - DNA, 15 bp, Homo sapiens
ttgggtgaggacaca

SEQ ID NO: 925187 - DNA, 15 bp, Homo sapiens
tgggtgaggacacag

SEQ ID NO: 925188 - DNA, 15 bp, Homo sapiens
gggtgaggacacagc

SEQ ID NO: 925189 - DNA, 15 bp, Homo sapiens
ggtgaggacacagcc

SEQ ID NO: 925190 - DNA, 15 bp, Homo sapiens
gtgaggacacagcca

SEQ ID NO: 925191 - DNA, 15 bp, Homo sapiens
tgaggacacagccaa

SEQ ID NO: 925192 - DNA, 15 bp, Homo sapiens
gaggacacagccaaa

SEQ ID NO: 925193 - DNA, 15 bp, Homo sapiens
aggacacagccaaac

SEQ ID NO: 925194 - DNA, 15 bp, Homo sapiens
ggacacagccaaaca

SEQ ID NO: 925195 - DNA, 15 bp, Homo sapiens
gacacagccaaacaa

SEQ ID NO: 925196 - DNA, 15 bp, Homo sapiens
acacagccaaacaat

SEQ ID NO: 925197 - DNA, 15 bp, Homo sapiens
cacagccaaacaata

SEQ ID NO: 925198 - DNA, 15 bp, Homo sapiens
acagccaaacaatat

SEQ ID NO: 925199 - DNA, 15 bp, Homo sapiens
cagccaaacaatatc

SEQ ID NO: 925200 - DNA, 15 bp, Homo sapiens
agccaaacaatatca

SEQ ID NO: 925201 - DNA, 15 bp, Homo sapiens
gccaaacaatatcat

SEQ ID NO: 925202 - DNA, 15 bp, Homo sapiens
ccaaacaatatcatt

SEQ ID NO: 925203 - DNA, 15 bp, Homo sapiens
caaacaatatcattt

SEQ ID NO: 925204 - DNA, 15 bp, Homo sapiens
aaacaatatcatttc

SEQ ID NO: 925205 - DNA, 15 bp, Homo sapiens
aacaatatcatttca

SEQ ID NO: 925206 - DNA, 15 bp, Homo sapiens
acaatatcatttcac

SEQ ID NO: 925207 - DNA, 15 bp, Homo sapiens
caatatcatttcacc

SEQ ID NO: 925208 - DNA, 15 bp, Homo sapiens
aatatcatttcaccc

SEQ ID NO: 925209 - DNA, 15 bp, Homo sapiens
atatcatttcaccct

SEQ ID NO: 925210 - DNA, 15 bp, Homo sapiens
tatcatttcaccctt

SEQ ID NO: 925211 - DNA, 15 bp, Homo sapiens
atcatttcacccttg

SEQ ID NO: 925212 - DNA, 15 bp, Homo sapiens
tcatttcacccttgg

SEQ ID NO: 925213 - DNA, 15 bp, Homo sapiens
catttcacccttggc

SEQ ID NO: 925214 - DNA, 15 bp, Homo sapiens
atttcacccttggcc

SEQ ID NO: 925215 - DNA, 15 bp, Homo sapiens
tttcacccttggccc

SEQ ID NO: 925216 - DNA, 15 bp, Homo sapiens
ttcacccttggcccc

SEQ ID NO: 925217 - DNA, 15 bp, Homo sapiens
tcacccttggcccct

SEQ ID NO: 925218 - DNA, 15 bp, Homo sapiens
cacccttggcccctc

SEQ ID NO: 925219 - DNA, 15 bp, Homo sapiens
acccttggcccctcc

SEQ ID NO: 925220 - DNA, 15 bp, Homo sapiens
cccttggcccctccc

SEQ ID NO: 925221 - DNA, 15 bp, Homo sapiens
ccttggcccctccca

SEQ ID NO: 925222 - DNA, 15 bp, Homo sapiens
cttggcccctcccaa

SEQ ID NO: 925223 - DNA, 15 bp, Homo sapiens
ttggcccctcccaaa

SEQ ID NO: 925224 - DNA, 15 bp, Homo sapiens
tggcccctcccaaat

SEQ ID NO: 925225 - DNA, 15 bp, Homo sapiens
ggcccctcccaaatc

SEQ ID NO: 925226 - DNA, 15 bp, Homo sapiens
gcccctcccaaatct

SEQ ID NO: 925227 - DNA, 15 bp, Homo sapiens
cccctcccaaatctc

SEQ ID NO: 925228 - DNA, 15 bp, Homo sapiens
ccctcccaaatctca

SEQ ID NO: 925229 - DNA, 15 bp, Homo sapiens
cctcccaaatctcat

SEQ ID NO: 925230 - DNA, 15 bp, Homo sapiens
ctcccaaatctcatg

SEQ ID NO: 925231 - DNA, 15 bp, Homo sapiens
tcccaaatctcatgt

SEQ ID NO: 925232 - DNA, 15 bp, Homo sapiens
cccaaatctcatgtc

SEQ ID NO: 925233 - DNA, 15 bp, Homo sapiens
ccaaatctcatgtcc

SEQ ID NO: 925234 - DNA, 15 bp, Homo sapiens
caaatctcatgtcct

SEQ ID NO: 925235 - DNA, 15 bp, Homo sapiens
aaatctcatgtcctc

SEQ ID NO: 925236 - DNA, 15 bp, Homo sapiens
aatctcatgtcctca

SEQ ID NO: 925237 - DNA, 15 bp, Homo sapiens
atctcatgtcctcac

SEQ ID NO: 925238 - DNA, 15 bp, Homo sapiens
tctcatgtcctcaca

SEQ ID NO: 925239 - DNA, 15 bp, Homo sapiens
ctcatgtcctcacat

SEQ ID NO: 925240 - DNA, 15 bp, Homo sapiens
tcatgtcctcacatt

SEQ ID NO: 925241 - DNA, 15 bp, Homo sapiens
catgtcctcacattt

SEQ ID NO: 925242 - DNA, 15 bp, Homo sapiens
atgtcctcacatttc

SEQ ID NO: 925243 - DNA, 15 bp, Homo sapiens
tgtcctcacatttca

SEQ ID NO: 925244 - DNA, 15 bp, Homo sapiens
gtcctcacatttcaa

SEQ ID NO: 925245 - DNA, 15 bp, Homo sapiens
tcctcacatttcaaa

SEQ ID NO: 925246 - DNA, 15 bp, Homo sapiens
cctcacatttcaaaa

SEQ ID NO: 925247 - DNA, 15 bp, Homo sapiens
ctcacatttcaaaac

SEQ ID NO: 925248 - DNA, 15 bp, Homo sapiens
tcacatttcaaaaca

SEQ ID NO: 925249 - DNA, 15 bp, Homo sapiens
cacatttcaaaacac

SEQ ID NO: 925250 - DNA, 15 bp, Homo sapiens
acatttcaaaacaca

SEQ ID NO: 925251 - DNA, 15 bp, Homo sapiens
catttcaaaacacaa

SEQ ID NO: 925252 - DNA, 15 bp, Homo sapiens
atttcaaaacacaat

SEQ ID NO: 925253 - DNA, 15 bp, Homo sapiens
tttcaaaacacaatc

SEQ ID NO: 925254 - DNA, 15 bp, Homo sapiens
ttcaaaacacaatca

SEQ ID NO: 925255 - DNA, 15 bp, Homo sapiens
tcaaaacacaatcat

SEQ ID NO: 925256 - DNA, 15 bp, Homo sapiens
caaaacacaatcatg

SEQ ID NO: 925257 - DNA, 15 bp, Homo sapiens
aaaacacaatcatgc

SEQ ID NO: 925258 - DNA, 15 bp, Homo sapiens
aaacacaatcatgcc

SEQ ID NO: 925259 - DNA, 15 bp, Homo sapiens
aacacaatcatgcct

SEQ ID NO: 925260 - DNA, 15 bp, Homo sapiens
acacaatcatgcctt

SEQ ID NO: 925261 - DNA, 15 bp, Homo sapiens
cacaatcatgccttc

SEQ ID NO: 925262 - DNA, 15 bp, Homo sapiens
acaatcatgccttcc

SEQ ID NO: 925263 - DNA, 15 bp, Homo sapiens
caatcatgccttccc

SEQ ID NO: 925264 - DNA, 15 bp, Homo sapiens
aatcatgccttccca

SEQ ID NO: 925265 - DNA, 15 bp, Homo sapiens
atcatgccttcccaa

SEQ ID NO: 925266 - DNA, 15 bp, Homo sapiens
tcatgccttcccaac

SEQ ID NO: 925267 - DNA, 15 bp, Homo sapiens
catgccttcccaaca

SEQ ID NO: 925268 - DNA, 15 bp, Homo sapiens
atgccttcccaacag

SEQ ID NO: 925269 - DNA, 15 bp, Homo sapiens
tgccttcccaacagt

SEQ ID NO: 925270 - DNA, 15 bp, Homo sapiens
gccttcccaacagtt

SEQ ID NO: 925271 - DNA, 15 bp, Homo sapiens
ccttcccaacagttc

SEQ ID NO: 925272 - DNA, 15 bp, Homo sapiens
cttcccaacagttcc

SEQ ID NO: 925273 - DNA, 15 bp, Homo sapiens
ttcccaacagttccc

SEQ ID NO: 925274 - DNA, 15 bp, Homo sapiens
tcccaacagttcccc

SEQ ID NO: 925275 - DNA, 15 bp, Homo sapiens
cccaacagttcccca

SEQ ID NO: 925276 - DNA, 15 bp, Homo sapiens
ccaacagttccccaa

SEQ ID NO: 925277 - DNA, 15 bp, Homo sapiens
caacagttccccaaa

SEQ ID NO: 925278 - DNA, 15 bp, Homo sapiens
aacagttccccaaag

SEQ ID NO: 925279 - DNA, 15 bp, Homo sapiens
acagttccccaaagt

SEQ ID NO: 925280 - DNA, 15 bp, Homo sapiens
cagttccccaaagtc

SEQ ID NO: 925281 - DNA, 15 bp, Homo sapiens
agttccccaaagtct

SEQ ID NO: 925282 - DNA, 15 bp, Homo sapiens
gttccccaaagtctt

SEQ ID NO: 925283 - DNA, 15 bp, Homo sapiens
ttccccaaagtctta

SEQ ID NO: 925284 - DNA, 15 bp, Homo sapiens
tccccaaagtcttag

SEQ ID NO: 925285 - DNA, 15 bp, Homo sapiens
ccccaaagtcttagc

SEQ ID NO: 925286 - DNA, 15 bp, Homo sapiens
cccaaagtcttagct

SEQ ID NO: 925287 - DNA, 15 bp, Homo sapiens
ccaaagtcttagctc

SEQ ID NO: 925288 - DNA, 15 bp, Homo sapiens
caaagtcttagctca

SEQ ID NO: 925289 - DNA, 15 bp, Homo sapiens
aaagtcttagctcat

SEQ ID NO: 925290 - DNA, 15 bp, Homo sapiens
aagtcttagctcatt

SEQ ID NO: 925291 - DNA, 15 bp, Homo sapiens
agtcttagctcattc

SEQ ID NO: 925292 - DNA, 15 bp, Homo sapiens
gtcttagctcattcc

SEQ ID NO: 925293 - DNA, 15 bp, Homo sapiens
tcttagctcattcca

SEQ ID NO: 925294 - DNA, 15 bp, Homo sapiens
cttagctcattccag

SEQ ID NO: 925295 - DNA, 15 bp, Homo sapiens
ttagctcattccagc

SEQ ID NO: 925296 - DNA, 15 bp, Homo sapiens
tagctcattccagca

SEQ ID NO: 925297 - DNA, 15 bp, Homo sapiens
agctcattccagcat

SEQ ID NO: 925298 - DNA, 15 bp, Homo sapiens
gctcattccagcatt

SEQ ID NO: 925299 - DNA, 15 bp, Homo sapiens
ctcattccagcatta

SEQ ID NO: 925300 - DNA, 15 bp, Homo sapiens
tcattccagcattaa

SEQ ID NO: 925301 - DNA, 15 bp, Homo sapiens
cattccagcattaac

SEQ ID NO: 925302 - DNA, 15 bp, Homo sapiens
attccagcattaact

SEQ ID NO: 925303 - DNA, 15 bp, Homo sapiens
ttccagcattaactc

SEQ ID NO: 925304 - DNA, 15 bp, Homo sapiens
tccagcattaactca

SEQ ID NO: 925305 - DNA, 15 bp, Homo sapiens
ccagcattaactcaa

SEQ ID NO: 925306 - DNA, 15 bp, Homo sapiens
cagcattaactcaaa

SEQ ID NO: 925307 - DNA, 15 bp, Homo sapiens
agcattaactcaaaa

SEQ ID NO: 925308 - DNA, 15 bp, Homo sapiens
gcattaactcaaaag

SEQ ID NO: 925309 - DNA, 15 bp, Homo sapiens
cattaactcaaaagt

SEQ ID NO: 925310 - DNA, 15 bp, Homo sapiens
attaactcaaaagtc

SEQ ID NO: 925311 - DNA, 15 bp, Homo sapiens
ttaactcaaaagtcc

SEQ ID NO: 925312 - DNA, 15 bp, Homo sapiens
taactcaaaagtcca

SEQ ID NO: 925313 - DNA, 15 bp, Homo sapiens
aactcaaaagtccag

SEQ ID NO: 925314 - DNA, 15 bp, Homo sapiens
actcaaaagtccagg

SEQ ID NO: 925315 - DNA, 15 bp, Homo sapiens
ctcaaaagtccaggt

SEQ ID NO: 925316 - DNA, 15 bp, Homo sapiens
tcaaaagtccaggtc

SEQ ID NO: 925317 - DNA, 15 bp, Homo sapiens
caaaagtccaggtcc

SEQ ID NO: 925318 - DNA, 15 bp, Homo sapiens
aaaagtccaggtcca

SEQ ID NO: 925319 - DNA, 15 bp, Homo sapiens
aaagtccaggtccaa

SEQ ID NO: 925320 - DNA, 15 bp, Homo sapiens
aagtccaggtccaaa

SEQ ID NO: 925321 - DNA, 15 bp, Homo sapiens
agtccaggtccaaag

SEQ ID NO: 925322 - DNA, 15 bp, Homo sapiens
gtccaggtccaaagt

SEQ ID NO: 925323 - DNA, 15 bp, Homo sapiens
tccaggtccaaagtc

SEQ ID NO: 925324 - DNA, 15 bp, Homo sapiens
ccaggtccaaagtct

SEQ ID NO: 925325 - DNA, 15 bp, Homo sapiens
caggtccaaagtctc

SEQ ID NO: 925326 - DNA, 15 bp, Homo sapiens
aggtccaaagtctca

SEQ ID NO: 925327 - DNA, 15 bp, Homo sapiens
ggtccaaagtctcat

SEQ ID NO: 925328 - DNA, 15 bp, Homo sapiens
gtccaaagtctcatc

SEQ ID NO: 925329 - DNA, 15 bp, Homo sapiens
tccaaagtctcatct

SEQ ID NO: 925330 - DNA, 15 bp, Homo sapiens
ccaaagtctcatctg

SEQ ID NO: 925331 - DNA, 15 bp, Homo sapiens
caaagtctcatctga

SEQ ID NO: 925332 - DNA, 15 bp, Homo sapiens
aaagtctcatctgag

SEQ ID NO: 925333 - DNA, 15 bp, Homo sapiens
aagtctcatctgaga

SEQ ID NO: 925334 - DNA, 15 bp, Homo sapiens
agtctcatctgagac

SEQ ID NO: 925335 - DNA, 15 bp, Homo sapiens
gtctcatctgagaca

SEQ ID NO: 925336 - DNA, 15 bp, Homo sapiens
tctcatctgagacaa

SEQ ID NO: 925337 - DNA, 15 bp, Homo sapiens
ctcatctgagacaag

SEQ ID NO: 925338 - DNA, 15 bp, Homo sapiens
tcatctgagacaagg

SEQ ID NO: 925339 - DNA, 15 bp, Homo sapiens
catctgagacaaggc

SEQ ID NO: 925340 - DNA, 15 bp, Homo sapiens
atctgagacaaggca

SEQ ID NO: 925341 - DNA, 15 bp, Homo sapiens
tctgagacaaggcaa

SEQ ID NO: 925342 - DNA, 15 bp, Homo sapiens
ctgagacaaggcaag

SEQ ID NO: 925343 - DNA, 15 bp, Homo sapiens
tgagacaaggcaagt

SEQ ID NO: 925344 - DNA, 15 bp, Homo sapiens
gagacaaggcaagtc

SEQ ID NO: 925345 - DNA, 15 bp, Homo sapiens
agacaaggcaagtcc

SEQ ID NO: 925346 - DNA, 15 bp, Homo sapiens
gacaaggcaagtccc

SEQ ID NO: 925347 - DNA, 15 bp, Homo sapiens
acaaggcaagtccct

SEQ ID NO: 925348 - DNA, 15 bp, Homo sapiens
caaggcaagtccctt

SEQ ID NO: 925349 - DNA, 15 bp, Homo sapiens
aaggcaagtcccttc

SEQ ID NO: 925350 - DNA, 15 bp, Homo sapiens
aggcaagtcccttct

SEQ ID NO: 925351 - DNA, 15 bp, Homo sapiens
ggcaagtcccttctg

SEQ ID NO: 925352 - DNA, 15 bp, Homo sapiens
gcaagtcccttctgc

SEQ ID NO: 925353 - DNA, 15 bp, Homo sapiens
caagtcccttctgcc

SEQ ID NO: 925354 - DNA, 15 bp, Homo sapiens
aagtcccttctgcct

SEQ ID NO: 925355 - DNA, 15 bp, Homo sapiens
agtcccttctgccta

SEQ ID NO: 925356 - DNA, 15 bp, Homo sapiens
gtcccttctgcctat

SEQ ID NO: 925357 - DNA, 15 bp, Homo sapiens
tcccttctgcctatg

SEQ ID NO: 925358 - DNA, 15 bp, Homo sapiens
cccttctgcctatga

SEQ ID NO: 925359 - DNA, 15 bp, Homo sapiens
ccttctgcctatgag

SEQ ID NO: 925360 - DNA, 15 bp, Homo sapiens
cttctgcctatgagc

SEQ ID NO: 925361 - DNA, 15 bp, Homo sapiens
ttctgcctatgagcc

SEQ ID NO: 925362 - DNA, 15 bp, Homo sapiens
tctgcctatgagcct

SEQ ID NO: 925363 - DNA, 15 bp, Homo sapiens
ctgcctatgagcctg

SEQ ID NO: 925364 - DNA, 15 bp, Homo sapiens
tgcctatgagcctgt

SEQ ID NO: 925365 - DNA, 15 bp, Homo sapiens
gcctatgagcctgta

SEQ ID NO: 925366 - DNA, 15 bp, Homo sapiens
cctatgagcctgtaa

SEQ ID NO: 925367 - DNA, 15 bp, Homo sapiens
ctatgagcctgtaaa

SEQ ID NO: 925368 - DNA, 15 bp, Homo sapiens
tatgagcctgtaaaa

SEQ ID NO: 925369 - DNA, 15 bp, Homo sapiens
atgagcctgtaaaat

SEQ ID NO: 925370 - DNA, 15 bp, Homo sapiens
tgagcctgtaaaatc

SEQ ID NO: 925371 - DNA, 15 bp, Homo sapiens
gagcctgtaaaatca

SEQ ID NO: 925372 - DNA, 15 bp, Homo sapiens
agcctgtaaaatcaa

SEQ ID NO: 925373 - DNA, 15 bp, Homo sapiens
gcctgtaaaatcaaa

SEQ ID NO: 925374 - DNA, 15 bp, Homo sapiens
cctgtaaaatcaaaa

SEQ ID NO: 925375 - DNA, 15 bp, Homo sapiens
ctgtaaaatcaaaag

SEQ ID NO: 925376 - DNA, 15 bp, Homo sapiens
tgtaaaatcaaaagc

SEQ ID NO: 925377 - DNA, 15 bp, Homo sapiens
gtaaaatcaaaagca

SEQ ID NO: 925378 - DNA, 15 bp, Homo sapiens
taaaatcaaaagcaa

SEQ ID NO: 925379 - DNA, 15 bp, Homo sapiens
aaaatcaaaagcaag

SEQ ID NO: 925380 - DNA, 15 bp, Homo sapiens
aaatcaaaagcaagt

SEQ ID NO: 925381 - DNA, 15 bp, Homo sapiens
aatcaaaagcaagtt

SEQ ID NO: 925382 - DNA, 15 bp, Homo sapiens
atcaaaagcaagtta

SEQ ID NO: 925383 - DNA, 15 bp, Homo sapiens
tcaaaagcaagttag

SEQ ID NO: 925384 - DNA, 15 bp, Homo sapiens
caaaagcaagttagt

SEQ ID NO: 925385 - DNA, 15 bp, Homo sapiens
aaaagcaagttagtt

SEQ ID NO: 925386 - DNA, 15 bp, Homo sapiens
aaagcaagttagtta

SEQ ID NO: 925387 - DNA, 15 bp, Homo sapiens
aagcaagttagttac

SEQ ID NO: 925388 - DNA, 15 bp, Homo sapiens
agcaagttagttact

SEQ ID NO: 925389 - DNA, 15 bp, Homo sapiens
gcaagttagttactt

SEQ ID NO: 925390 - DNA, 15 bp, Homo sapiens
caagttagttacttc

SEQ ID NO: 925391 - DNA, 15 bp, Homo sapiens
aagttagttacttcc

SEQ ID NO: 925392 - DNA, 15 bp, Homo sapiens
agttagttacttcct

SEQ ID NO: 925393 - DNA, 15 bp, Homo sapiens
gttagttacttccta

SEQ ID NO: 925394 - DNA, 15 bp, Homo sapiens
ttagttacttcctag

SEQ ID NO: 925395 - DNA, 15 bp, Homo sapiens
tagttacttcctaga

SEQ ID NO: 925396 - DNA, 15 bp, Homo sapiens
agttacttcctagat

SEQ ID NO: 925397 - DNA, 15 bp, Homo sapiens
gttacttcctagata

SEQ ID NO: 925398 - DNA, 15 bp, Homo sapiens
ttacttcctagatac

SEQ ID NO: 925399 - DNA, 15 bp, Homo sapiens
tacttcctagatacc

SEQ ID NO: 925400 - DNA, 15 bp, Homo sapiens
acttcctagatacca

SEQ ID NO: 925401 - DNA, 15 bp, Homo sapiens
cttcctagataccat

SEQ ID NO: 925402 - DNA, 15 bp, Homo sapiens
ttcctagataccatg

SEQ ID NO: 925403 - DNA, 15 bp, Homo sapiens
tcctagataccatgg

SEQ ID NO: 925404 - DNA, 15 bp, Homo sapiens
cctagataccatggg

SEQ ID NO: 925405 - DNA, 15 bp, Homo sapiens
ctagataccatggga

SEQ ID NO: 925406 - DNA, 15 bp, Homo sapiens
tagataccatgggag

SEQ ID NO: 925407 - DNA, 15 bp, Homo sapiens
agataccatgggagt

SEQ ID NO: 925408 - DNA, 15 bp, Homo sapiens
gataccatgggagta

SEQ ID NO: 925409 - DNA, 15 bp, Homo sapiens
ataccatgggagtac

SEQ ID NO: 925410 - DNA, 15 bp, Homo sapiens
taccatgggagtaca

SEQ ID NO: 925411 - DNA, 15 bp, Homo sapiens
accatgggagtacag

SEQ ID NO: 925412 - DNA, 15 bp, Homo sapiens
ccatgggagtacagg

SEQ ID NO: 925413 - DNA, 15 bp, Homo sapiens
catgggagtacaggt

SEQ ID NO: 925414 - DNA, 15 bp, Homo sapiens
atgggagtacaggta

SEQ ID NO: 925415 - DNA, 15 bp, Homo sapiens
tgggagtacaggtat

SEQ ID NO: 925416 - DNA, 15 bp, Homo sapiens
gggagtacaggtatt

SEQ ID NO: 925417 - DNA, 15 bp, Homo sapiens
ggagtacaggtattg

SEQ ID NO: 925418 - DNA, 15 bp, Homo sapiens
gagtacaggtattgg

SEQ ID NO: 925419 - DNA, 15 bp, Homo sapiens
agtacaggtattggg

SEQ ID NO: 925420 - DNA, 15 bp, Homo sapiens
gtacaggtattgggt

SEQ ID NO: 925421 - DNA, 15 bp, Homo sapiens
tacaggtattgggtc

SEQ ID NO: 925422 - DNA, 15 bp, Homo sapiens
acaggtattgggtca

SEQ ID NO: 925423 - DNA, 15 bp, Homo sapiens
caggtattgggtcaa

SEQ ID NO: 925424 - DNA, 15 bp, Homo sapiens
aggtattgggtcaat

SEQ ID NO: 925425 - DNA, 15 bp, Homo sapiens
ggtattgggtcaata

SEQ ID NO: 925426 - DNA, 15 bp, Homo sapiens
gtattgggtcaatac

SEQ ID NO: 925427 - DNA, 15 bp, Homo sapiens
tattgggtcaataca

SEQ ID NO: 925428 - DNA, 15 bp, Homo sapiens
attgggtcaatacac

SEQ ID NO: 925429 - DNA, 15 bp, Homo sapiens
ttgggtcaatacacc

SEQ ID NO: 925430 - DNA, 15 bp, Homo sapiens
tgggtcaatacaccc

SEQ ID NO: 925431 - DNA, 15 bp, Homo sapiens
gggtcaatacaccca

SEQ ID NO: 925432 - DNA, 15 bp, Homo sapiens
ggtcaatacacccat

SEQ ID NO: 925433 - DNA, 15 bp, Homo sapiens
gtcaatacacccatt

SEQ ID NO: 925434 - DNA, 15 bp, Homo sapiens
tcaatacacccattc

SEQ ID NO: 925435 - DNA, 15 bp, Homo sapiens
caatacacccattcc

SEQ ID NO: 925436 - DNA, 15 bp, Homo sapiens
aatacacccattcca

SEQ ID NO: 925437 - DNA, 15 bp, Homo sapiens
atacacccattccaa

SEQ ID NO: 925438 - DNA, 15 bp, Homo sapiens
tacacccattccaaa

SEQ ID NO: 925439 - DNA, 15 bp, Homo sapiens
acacccattccaaat

SEQ ID NO: 925440 - DNA, 15 bp, Homo sapiens
cacccattccaaata

SEQ ID NO: 925441 - DNA, 15 bp, Homo sapiens
acccattccaaatag

SEQ ID NO: 925442 - DNA, 15 bp, Homo sapiens
cccattccaaataga

SEQ ID NO: 925443 - DNA, 15 bp, Homo sapiens
ccattccaaatagaa

SEQ ID NO: 925444 - DNA, 15 bp, Homo sapiens
cattccaaatagaag

SEQ ID NO: 925445 - DNA, 15 bp, Homo sapiens
attccaaatagaaga

SEQ ID NO: 925446 - DNA, 15 bp, Homo sapiens
ttccaaatagaagaa

SEQ ID NO: 925447 - DNA, 15 bp, Homo sapiens
tccaaatagaagaaa

SEQ ID NO: 925448 - DNA, 15 bp, Homo sapiens
ccaaatagaagaaat

SEQ ID NO: 925449 - DNA, 15 bp, Homo sapiens
caaatagaagaaatt

SEQ ID NO: 925450 - DNA, 15 bp, Homo sapiens
aaatagaagaaattg

SEQ ID NO: 925451 - DNA, 15 bp, Homo sapiens
aatagaagaaattgt

SEQ ID NO: 925452 - DNA, 15 bp, Homo sapiens
atagaagaaattgtt

SEQ ID NO: 925453 - DNA, 15 bp, Homo sapiens
tagaagaaattgttc

SEQ ID NO: 925454 - DNA, 15 bp, Homo sapiens
agaagaaattgttca

SEQ ID NO: 925455 - DNA, 15 bp, Homo sapiens
gaagaaattgttcaa

SEQ ID NO: 925456 - DNA, 15 bp, Homo sapiens
aagaaattgttcaaa

SEQ ID NO: 925457 - DNA, 15 bp, Homo sapiens
agaaattgttcaaaa

SEQ ID NO: 925458 - DNA, 15 bp, Homo sapiens
gaaattgttcaaaac

SEQ ID NO: 925459 - DNA, 15 bp, Homo sapiens
aaattgttcaaaaca

SEQ ID NO: 925460 - DNA, 15 bp, Homo sapiens
aattgttcaaaacaa

SEQ ID NO: 925461 - DNA, 15 bp, Homo sapiens
attgttcaaaacaaa

SEQ ID NO: 925462 - DNA, 15 bp, Homo sapiens
ttgttcaaaacaaag

SEQ ID NO: 925463 - DNA, 15 bp, Homo sapiens
tgttcaaaacaaagg

SEQ ID NO: 925464 - DNA, 15 bp, Homo sapiens
gttcaaaacaaaggg

SEQ ID NO: 925465 - DNA, 15 bp, Homo sapiens
ttcaaaacaaagggg

SEQ ID NO: 925466 - DNA, 15 bp, Homo sapiens
tcaaaacaaaggggc

SEQ ID NO: 925467 - DNA, 15 bp, Homo sapiens
caaaacaaaggggct

SEQ ID NO: 925468 - DNA, 15 bp, Homo sapiens
aaaacaaaggggcta

SEQ ID NO: 925469 - DNA, 15 bp, Homo sapiens
aaacaaaggggctac

SEQ ID NO: 925470 - DNA, 15 bp, Homo sapiens
aacaaaggggctaca

SEQ ID NO: 925471 - DNA, 15 bp, Homo sapiens
acaaaggggctacag

SEQ ID NO: 925472 - DNA, 15 bp, Homo sapiens
caaaggggctacagg

SEQ ID NO: 925473 - DNA, 15 bp, Homo sapiens
aaaggggctacaggc

SEQ ID NO: 925474 - DNA, 15 bp, Homo sapiens
aaggggctacaggcc

SEQ ID NO: 925475 - DNA, 15 bp, Homo sapiens
aggggctacaggccc

SEQ ID NO: 925476 - DNA, 15 bp, Homo sapiens
ggggctacaggcccc

SEQ ID NO: 925477 - DNA, 15 bp, Homo sapiens
gggctacaggcccca

SEQ ID NO: 925478 - DNA, 15 bp, Homo sapiens
ggctacaggccccat

SEQ ID NO: 925479 - DNA, 15 bp, Homo sapiens
gctacaggccccatg

SEQ ID NO: 925480 - DNA, 15 bp, Homo sapiens
ctacaggccccatgc

SEQ ID NO: 925481 - DNA, 15 bp, Homo sapiens
tacaggccccatgca

SEQ ID NO: 925482 - DNA, 15 bp, Homo sapiens
acaggccccatgcaa

SEQ ID NO: 925483 - DNA, 15 bp, Homo sapiens
caggccccatgcaag

SEQ ID NO: 925484 - DNA, 15 bp, Homo sapiens
aggccccatgcaagt

SEQ ID NO: 925485 - DNA, 15 bp, Homo sapiens
ggccccatgcaagtc

SEQ ID NO: 925486 - DNA, 15 bp, Homo sapiens
gccccatgcaagtcc

SEQ ID NO: 925487 - DNA, 15 bp, Homo sapiens
ccccatgcaagtcca

SEQ ID NO: 925488 - DNA, 15 bp, Homo sapiens
cccatgcaagtccaa

SEQ ID NO: 925489 - DNA, 15 bp, Homo sapiens
ccatgcaagtccaaa

SEQ ID NO: 925490 - DNA, 15 bp, Homo sapiens
catgcaagtccaaaa

SEQ ID NO: 925491 - DNA, 15 bp, Homo sapiens
atgcaagtccaaaat

SEQ ID NO: 925492 - DNA, 15 bp, Homo sapiens
tgcaagtccaaaatc

SEQ ID NO: 925493 - DNA, 15 bp, Homo sapiens
gcaagtccaaaatcc

SEQ ID NO: 925494 - DNA, 15 bp, Homo sapiens
caagtccaaaatcca

SEQ ID NO: 925495 - DNA, 15 bp, Homo sapiens
aagtccaaaatccaa

SEQ ID NO: 925496 - DNA, 15 bp, Homo sapiens
agtccaaaatccaat

SEQ ID NO: 925497 - DNA, 15 bp, Homo sapiens
gtccaaaatccaata

SEQ ID NO: 925498 - DNA, 15 bp, Homo sapiens
tccaaaatccaatag

SEQ ID NO: 925499 - DNA, 15 bp, Homo sapiens
ccaaaatccaatagg

SEQ ID NO: 925500 - DNA, 15 bp, Homo sapiens
caaaatccaataggg

SEQ ID NO: 925501 - DNA, 15 bp, Homo sapiens
aaaatccaatagggc

SEQ ID NO: 925502 - DNA, 15 bp, Homo sapiens
aaatccaatagggca

SEQ ID NO: 925503 - DNA, 15 bp, Homo sapiens
aatccaatagggcaa

SEQ ID NO: 925504 - DNA, 15 bp, Homo sapiens
atccaatagggcaat

SEQ ID NO: 925505 - DNA, 15 bp, Homo sapiens
tccaatagggcaatc

SEQ ID NO: 925506 - DNA, 15 bp, Homo sapiens
ccaatagggcaatca

SEQ ID NO: 925507 - DNA, 15 bp, Homo sapiens
caatagggcaatcat

SEQ ID NO: 925508 - DNA, 15 bp, Homo sapiens
aatagggcaatcatt

SEQ ID NO: 925509 - DNA, 15 bp, Homo sapiens
atagggcaatcatta

SEQ ID NO: 925510 - DNA, 15 bp, Homo sapiens
tagggcaatcattaa

SEQ ID NO: 925511 - DNA, 15 bp, Homo sapiens
agggcaatcattaaa

SEQ ID NO: 925512 - DNA, 15 bp, Homo sapiens
gggcaatcattaaac

SEQ ID NO: 925513 - DNA, 15 bp, Homo sapiens
ggcaatcattaaacc

SEQ ID NO: 925514 - DNA, 15 bp, Homo sapiens
gcaatcattaaacct

SEQ ID NO: 925515 - DNA, 15 bp, Homo sapiens
caatcattaaacctt

SEQ ID NO: 925516 - DNA, 15 bp, Homo sapiens
aatcattaaacctta

SEQ ID NO: 925517 - DNA, 15 bp, Homo sapiens
atcattaaaccttaa

SEQ ID NO: 925518 - DNA, 15 bp, Homo sapiens
tcattaaaccttaaa

SEQ ID NO: 925519 - DNA, 15 bp, Homo sapiens
cattaaaccttaaag

SEQ ID NO: 925520 - DNA, 15 bp, Homo sapiens
attaaaccttaaagt

SEQ ID NO: 925521 - DNA, 15 bp, Homo sapiens
ttaaaccttaaagtt

SEQ ID NO: 925522 - DNA, 15 bp, Homo sapiens
taaaccttaaagtta

SEQ ID NO: 925523 - DNA, 15 bp, Homo sapiens
aaaccttaaagttac

SEQ ID NO: 925524 - DNA, 15 bp, Homo sapiens
aaccttaaagttaca

SEQ ID NO: 925525 - DNA, 15 bp, Homo sapiens
accttaaagttacaa

SEQ ID NO: 925526 - DNA, 15 bp, Homo sapiens
ccttaaagttacaaa

SEQ ID NO: 925527 - DNA, 15 bp, Homo sapiens
cttaaagttacaaaa

SEQ ID NO: 925528 - DNA, 15 bp, Homo sapiens
ttaaagttacaaaat

SEQ ID NO: 925529 - DNA, 15 bp, Homo sapiens
taaagttacaaaatg

SEQ ID NO: 925530 - DNA, 15 bp, Homo sapiens
aaagttacaaaatga

SEQ ID NO: 925531 - DNA, 15 bp, Homo sapiens
aagttacaaaatgat

SEQ ID NO: 925532 - DNA, 15 bp, Homo sapiens
agttacaaaatgatc

SEQ ID NO: 925533 - DNA, 15 bp, Homo sapiens
gttacaaaatgatcc

SEQ ID NO: 925534 - DNA, 15 bp, Homo sapiens
ttacaaaatgatccc

SEQ ID NO: 925535 - DNA, 15 bp, Homo sapiens
tacaaaatgatcccc

SEQ ID NO: 925536 - DNA, 15 bp, Homo sapiens
acaaaatgatcccct

SEQ ID NO: 925537 - DNA, 15 bp, Homo sapiens
caaaatgatcccctt

SEQ ID NO: 925538 - DNA, 15 bp, Homo sapiens
aaaatgatccccttt

SEQ ID NO: 925539 - DNA, 15 bp, Homo sapiens
aaatgatcccctttg

SEQ ID NO: 925540 - DNA, 15 bp, Homo sapiens
aatgatcccctttga

SEQ ID NO: 925541 - DNA, 15 bp, Homo sapiens
atgatcccctttgac

SEQ ID NO: 925542 - DNA, 15 bp, Homo sapiens
tgatcccctttgact

SEQ ID NO: 925543 - DNA, 15 bp, Homo sapiens
gatcccctttgactc

SEQ ID NO: 925544 - DNA, 15 bp, Homo sapiens
atcccctttgactcc

SEQ ID NO: 925545 - DNA, 15 bp, Homo sapiens
tcccctttgactcca

SEQ ID NO: 925546 - DNA, 15 bp, Homo sapiens
cccctttgactccat

SEQ ID NO: 925547 - DNA, 15 bp, Homo sapiens
ccctttgactccatg

SEQ ID NO: 925548 - DNA, 15 bp, Homo sapiens
cctttgactccatgt

SEQ ID NO: 925549 - DNA, 15 bp, Homo sapiens
ctttgactccatgtc

SEQ ID NO: 925550 - DNA, 15 bp, Homo sapiens
tttgactccatgtct

SEQ ID NO: 925551 - DNA, 15 bp, Homo sapiens
ttgactccatgtctc

SEQ ID NO: 925552 - DNA, 15 bp, Homo sapiens
tgactccatgtctca

SEQ ID NO: 925553 - DNA, 15 bp, Homo sapiens
gactccatgtctcac

SEQ ID NO: 925554 - DNA, 15 bp, Homo sapiens
actccatgtctcaca

SEQ ID NO: 925555 - DNA, 15 bp, Homo sapiens
ctccatgtctcacac

SEQ ID NO: 925556 - DNA, 15 bp, Homo sapiens
tccatgtctcacaca

SEQ ID NO: 925557 - DNA, 15 bp, Homo sapiens
ccatgtctcacacac

SEQ ID NO: 925558 - DNA, 15 bp, Homo sapiens
catgtctcacacaca

SEQ ID NO: 925559 - DNA, 15 bp, Homo sapiens
atgtctcacacacat

SEQ ID NO: 925560 - DNA, 15 bp, Homo sapiens
tgtctcacacacatc

SEQ ID NO: 925561 - DNA, 15 bp, Homo sapiens
gtctcacacacatcc

SEQ ID NO: 925562 - DNA, 15 bp, Homo sapiens
tctcacacacatcca

SEQ ID NO: 925563 - DNA, 15 bp, Homo sapiens
ctcacacacatccag

SEQ ID NO: 925564 - DNA, 15 bp, Homo sapiens
tcacacacatccagg

SEQ ID NO: 925565 - DNA, 15 bp, Homo sapiens
cacacacatccaggt

SEQ ID NO: 925566 - DNA, 15 bp, Homo sapiens
acacacatccaggtc

SEQ ID NO: 925567 - DNA, 15 bp, Homo sapiens
cacacatccaggtca

SEQ ID NO: 925568 - DNA, 15 bp, Homo sapiens
acacatccaggtcac

SEQ ID NO: 925569 - DNA, 15 bp, Homo sapiens
cacatccaggtcaca

SEQ ID NO: 925570 - DNA, 15 bp, Homo sapiens
acatccaggtcacac

SEQ ID NO: 925571 - DNA, 15 bp, Homo sapiens
catccaggtcacact

SEQ ID NO: 925572 - DNA, 15 bp, Homo sapiens
atccaggtcacactg

SEQ ID NO: 925573 - DNA, 15 bp, Homo sapiens
tccaggtcacactga

SEQ ID NO: 925574 - DNA, 15 bp, Homo sapiens
ccaggtcacactgat

SEQ ID NO: 925575 - DNA, 15 bp, Homo sapiens
caggtcacactgatg

SEQ ID NO: 925576 - DNA, 15 bp, Homo sapiens
aggtcacactgatgc

SEQ ID NO: 925577 - DNA, 15 bp, Homo sapiens
ggtcacactgatgca

SEQ ID NO: 925578 - DNA, 15 bp, Homo sapiens
gtcacactgatgcaa

SEQ ID NO: 925579 - DNA, 15 bp, Homo sapiens
tcacactgatgcaag

SEQ ID NO: 925580 - DNA, 15 bp, Homo sapiens
cacactgatgcaaga

SEQ ID NO: 925581 - DNA, 15 bp, Homo sapiens
acactgatgcaagag

SEQ ID NO: 925582 - DNA, 15 bp, Homo sapiens
cactgatgcaagagg

SEQ ID NO: 925583 - DNA, 15 bp, Homo sapiens
actgatgcaagaggt

SEQ ID NO: 925584 - DNA, 15 bp, Homo sapiens
ctgatgcaagaggta

SEQ ID NO: 925585 - DNA, 15 bp, Homo sapiens
tgatgcaagaggtag

SEQ ID NO: 925586 - DNA, 15 bp, Homo sapiens
gatgcaagaggtagc

SEQ ID NO: 925587 - DNA, 15 bp, Homo sapiens
atgcaagaggtagcc

SEQ ID NO: 925588 - DNA, 15 bp, Homo sapiens
tgcaagaggtagcct

SEQ ID NO: 925589 - DNA, 15 bp, Homo sapiens
gcaagaggtagcctc

SEQ ID NO: 925590 - DNA, 15 bp, Homo sapiens
caagaggtagcctcc

SEQ ID NO: 925591 - DNA, 15 bp, Homo sapiens
aagaggtagcctccc

SEQ ID NO: 925592 - DNA, 15 bp, Homo sapiens
agaggtagcctccca

SEQ ID NO: 925593 - DNA, 15 bp, Homo sapiens
gaggtagcctcccat

SEQ ID NO: 925594 - DNA, 15 bp, Homo sapiens
aggtagcctcccatg

SEQ ID NO: 925595 - DNA, 15 bp, Homo sapiens
ggtagcctcccatgg

SEQ ID NO: 925596 - DNA, 15 bp, Homo sapiens
gtagcctcccatggt

SEQ ID NO: 925597 - DNA, 15 bp, Homo sapiens
tagcctcccatggtc

SEQ ID NO: 925598 - DNA, 15 bp, Homo sapiens
agcctcccatggtct

SEQ ID NO: 925599 - DNA, 15 bp, Homo sapiens
gcctcccatggtctt

SEQ ID NO: 925600 - DNA, 15 bp, Homo sapiens
cctcccatggtcttg

SEQ ID NO: 925601 - DNA, 15 bp, Homo sapiens
ctcccatggtcttgg

SEQ ID NO: 925602 - DNA, 15 bp, Homo sapiens
tcccatggtcttggg

SEQ ID NO: 925603 - DNA, 15 bp, Homo sapiens
cccatggtcttgggc

SEQ ID NO: 925604 - DNA, 15 bp, Homo sapiens
ccatggtcttgggca

SEQ ID NO: 925605 - DNA, 15 bp, Homo sapiens
catggtcttgggcag

SEQ ID NO: 925606 - DNA, 15 bp, Homo sapiens
atggtcttgggcagc

SEQ ID NO: 925607 - DNA, 15 bp, Homo sapiens
tggtcttgggcagct

SEQ ID NO: 925608 - DNA, 15 bp, Homo sapiens
ggtcttgggcagctc

SEQ ID NO: 925609 - DNA, 15 bp, Homo sapiens
gtcttgggcagctcc

SEQ ID NO: 925610 - DNA, 15 bp, Homo sapiens
tcttgggcagctccg

SEQ ID NO: 925611 - DNA, 15 bp, Homo sapiens
cttgggcagctccgc

SEQ ID NO: 925612 - DNA, 15 bp, Homo sapiens
ttgggcagctccgcc

SEQ ID NO: 925613 - DNA, 15 bp, Homo sapiens
tgggcagctccgccc

SEQ ID NO: 925614 - DNA, 15 bp, Homo sapiens
gggcagctccgcccc

SEQ ID NO: 925615 - DNA, 15 bp, Homo sapiens
ggcagctccgcccct

SEQ ID NO: 925616 - DNA, 15 bp, Homo sapiens
gcagctccgcccctg

SEQ ID NO: 925617 - DNA, 15 bp, Homo sapiens
cagctccgcccctgt

SEQ ID NO: 925618 - DNA, 15 bp, Homo sapiens
agctccgcccctgta

SEQ ID NO: 925619 - DNA, 15 bp, Homo sapiens
gctccgcccctgtag

SEQ ID NO: 925620 - DNA, 15 bp, Homo sapiens
ctccgcccctgtagc

SEQ ID NO: 925621 - DNA, 15 bp, Homo sapiens
tccgcccctgtagct

SEQ ID NO: 925622 - DNA, 15 bp, Homo sapiens
ccgcccctgtagctt

SEQ ID NO: 925623 - DNA, 15 bp, Homo sapiens
cgcccctgtagcttt

SEQ ID NO: 925624 - DNA, 15 bp, Homo sapiens
gcccctgtagctttg

SEQ ID NO: 925625 - DNA, 15 bp, Homo sapiens
cccctgtagctttgc

SEQ ID NO: 925626 - DNA, 15 bp, Homo sapiens
ccctgtagctttgca

SEQ ID NO: 925627 - DNA, 15 bp, Homo sapiens
cctgtagctttgcag

SEQ ID NO: 925628 - DNA, 15 bp, Homo sapiens
ctgtagctttgcagg

SEQ ID NO: 925629 - DNA, 15 bp, Homo sapiens
tgtagctttgcaggg

SEQ ID NO: 925630 - DNA, 15 bp, Homo sapiens
gtagctttgcagggt

SEQ ID NO: 925631 - DNA, 15 bp, Homo sapiens
tagctttgcagggta

SEQ ID NO: 925632 - DNA, 15 bp, Homo sapiens
agctttgcagggtac

SEQ ID NO: 925633 - DNA, 15 bp, Homo sapiens
gctttgcagggtaca

SEQ ID NO: 925634 - DNA, 15 bp, Homo sapiens
ctttgcagggtacag

SEQ ID NO: 925635 - DNA, 15 bp, Homo sapiens
tttgcagggtacagc

SEQ ID NO: 925636 - DNA, 15 bp, Homo sapiens
ttgcagggtacagcc

SEQ ID NO: 925637 - DNA, 15 bp, Homo sapiens
tgcagggtacagccc

SEQ ID NO: 925638 - DNA, 15 bp, Homo sapiens
gcagggtacagcccc

SEQ ID NO: 925639 - DNA, 15 bp, Homo sapiens
cagggtacagccccc

SEQ ID NO: 925640 - DNA, 15 bp, Homo sapiens
agggtacagcccccc

SEQ ID NO: 925641 - DNA, 15 bp, Homo sapiens
gggtacagccccccc

SEQ ID NO: 925642 - DNA, 15 bp, Homo sapiens
ggtacagcccccccg

SEQ ID NO: 925643 - DNA, 15 bp, Homo sapiens
gtacagcccccccgc

SEQ ID NO: 925644 - DNA, 15 bp, Homo sapiens
tacagcccccccgcc

SEQ ID NO: 925645 - DNA, 15 bp, Homo sapiens
acagcccccccgcca

SEQ ID NO: 925646 - DNA, 15 bp, Homo sapiens
cagcccccccgccag

SEQ ID NO: 925647 - DNA, 15 bp, Homo sapiens
agcccccccgccagc

SEQ ID NO: 925648 - DNA, 15 bp, Homo sapiens
gcccccccgccagct

SEQ ID NO: 925649 - DNA, 15 bp, Homo sapiens
cccccccgccagctc

SEQ ID NO: 925650 - DNA, 15 bp, Homo sapiens
ccccccgccagctcc

SEQ ID NO: 925651 - DNA, 15 bp, Homo sapiens
cccccgccagctcct

SEQ ID NO: 925652 - DNA, 15 bp, Homo sapiens
ccccgccagctcctt

SEQ ID NO: 925653 - DNA, 15 bp, Homo sapiens
cccgccagctccttt

SEQ ID NO: 925654 - DNA, 15 bp, Homo sapiens
ccgccagctcctttc

SEQ ID NO: 925655 - DNA, 15 bp, Homo sapiens
cgccagctcctttca

SEQ ID NO: 925656 - DNA, 15 bp, Homo sapiens
gccagctcctttcac

SEQ ID NO: 925657 - DNA, 15 bp, Homo sapiens
ccagctcctttcaca

SEQ ID NO: 925658 - DNA, 15 bp, Homo sapiens
cagctcctttcacag

SEQ ID NO: 925659 - DNA, 15 bp, Homo sapiens
agctcctttcacagg

SEQ ID NO: 925660 - DNA, 15 bp, Homo sapiens
gctcctttcacaggc

SEQ ID NO: 925661 - DNA, 15 bp, Homo sapiens
ctcctttcacaggct

SEQ ID NO: 925662 - DNA, 15 bp, Homo sapiens
tcctttcacaggctg

SEQ ID NO: 925663 - DNA, 15 bp, Homo sapiens
cctttcacaggctgg

SEQ ID NO: 925664 - DNA, 15 bp, Homo sapiens
ctttcacaggctggc

SEQ ID NO: 925665 - DNA, 15 bp, Homo sapiens
tttcacaggctggca

SEQ ID NO: 925666 - DNA, 15 bp, Homo sapiens
ttcacaggctggcat

SEQ ID NO: 925667 - DNA, 15 bp, Homo sapiens
tcacaggctggcatt

SEQ ID NO: 925668 - DNA, 15 bp, Homo sapiens
cacaggctggcattg

SEQ ID NO: 925669 - DNA, 15 bp, Homo sapiens
acaggctggcattga

SEQ ID NO: 925670 - DNA, 15 bp, Homo sapiens
caggctggcattgag

SEQ ID NO: 925671 - DNA, 15 bp, Homo sapiens
aggctggcattgagt

SEQ ID NO: 925672 - DNA, 15 bp, Homo sapiens
ggctggcattgagtg

SEQ ID NO: 925673 - DNA, 15 bp, Homo sapiens
gctggcattgagtgt

SEQ ID NO: 925674 - DNA, 15 bp, Homo sapiens
ctggcattgagtgtc

SEQ ID NO: 925675 - DNA, 15 bp, Homo sapiens
tggcattgagtgtct

SEQ ID NO: 925676 - DNA, 15 bp, Homo sapiens
ggcattgagtgtctg

SEQ ID NO: 925677 - DNA, 15 bp, Homo sapiens
gcattgagtgtctgc

SEQ ID NO: 925678 - DNA, 15 bp, Homo sapiens
cattgagtgtctgca

SEQ ID NO: 925679 - DNA, 15 bp, Homo sapiens
attgagtgtctgcaa

SEQ ID NO: 925680 - DNA, 15 bp, Homo sapiens
ttgagtgtctgcaac

SEQ ID NO: 925681 - DNA, 15 bp, Homo sapiens
tgagtgtctgcaact

SEQ ID NO: 925682 - DNA, 15 bp, Homo sapiens
gagtgtctgcaactt

SEQ ID NO: 925683 - DNA, 15 bp, Homo sapiens
agtgtctgcaacttt

SEQ ID NO: 925684 - DNA, 15 bp, Homo sapiens
gtgtctgcaactttt

SEQ ID NO: 925685 - DNA, 15 bp, Homo sapiens
tgtctgcaacttttc

SEQ ID NO: 925686 - DNA, 15 bp, Homo sapiens
gtctgcaacttttcc

SEQ ID NO: 925687 - DNA, 15 bp, Homo sapiens
tctgcaacttttcca

SEQ ID NO: 925688 - DNA, 15 bp, Homo sapiens
ctgcaacttttccag

SEQ ID NO: 925689 - DNA, 15 bp, Homo sapiens
tgcaacttttccagg

SEQ ID NO: 925690 - DNA, 15 bp, Homo sapiens
gcaacttttccaggt

SEQ ID NO: 925691 - DNA, 15 bp, Homo sapiens
caacttttccaggtg

SEQ ID NO: 925692 - DNA, 15 bp, Homo sapiens
aacttttccaggtgc

SEQ ID NO: 925693 - DNA, 15 bp, Homo sapiens
acttttccaggtgca

SEQ ID NO: 925694 - DNA, 15 bp, Homo sapiens
cttttccaggtgcac

SEQ ID NO: 925695 - DNA, 15 bp, Homo sapiens
ttttccaggtgcaca

SEQ ID NO: 925696 - DNA, 15 bp, Homo sapiens
tttccaggtgcacag

SEQ ID NO: 925697 - DNA, 15 bp, Homo sapiens
ttccaggtgcacagt

SEQ ID NO: 925698 - DNA, 15 bp, Homo sapiens
tccaggtgcacagtg

SEQ ID NO: 925699 - DNA, 15 bp, Homo sapiens
ccaggtgcacagtgt

SEQ ID NO: 925700 - DNA, 15 bp, Homo sapiens
caggtgcacagtgta

SEQ ID NO: 925701 - DNA, 15 bp, Homo sapiens
aggtgcacagtgtaa

SEQ ID NO: 925702 - DNA, 15 bp, Homo sapiens
ggtgcacagtgtaag

SEQ ID NO: 925703 - DNA, 15 bp, Homo sapiens
gtgcacagtgtaagc

SEQ ID NO: 925704 - DNA, 15 bp, Homo sapiens
tgcacagtgtaagct

SEQ ID NO: 925705 - DNA, 15 bp, Homo sapiens
gcacagtgtaagctg

SEQ ID NO: 925706 - DNA, 15 bp, Homo sapiens
cacagtgtaagctgt

SEQ ID NO: 925707 - DNA, 15 bp, Homo sapiens
acagtgtaagctgtt

SEQ ID NO: 925708 - DNA, 15 bp, Homo sapiens
cagtgtaagctgttg

SEQ ID NO: 925709 - DNA, 15 bp, Homo sapiens
agtgtaagctgttgg

SEQ ID NO: 925710 - DNA, 15 bp, Homo sapiens
gtgtaagctgttggt

SEQ ID NO: 925711 - DNA, 15 bp, Homo sapiens
tgtaagctgttggtg

SEQ ID NO: 925712 - DNA, 15 bp, Homo sapiens
gtaagctgttggtgg

SEQ ID NO: 925713 - DNA, 15 bp, Homo sapiens
taagctgttggtggc

SEQ ID NO: 925714 - DNA, 15 bp, Homo sapiens
aagctgttggtggct

SEQ ID NO: 925715 - DNA, 15 bp, Homo sapiens
agctgttggtggctc

SEQ ID NO: 925716 - DNA, 15 bp, Homo sapiens
gctgttggtggctct

SEQ ID NO: 925717 - DNA, 15 bp, Homo sapiens
ctgttggtggctcta

SEQ ID NO: 925718 - DNA, 15 bp, Homo sapiens
tgttggtggctctac

SEQ ID NO: 925719 - DNA, 15 bp, Homo sapiens
gttggtggctctacc

SEQ ID NO: 925720 - DNA, 15 bp, Homo sapiens
ttggtggctctacca

SEQ ID NO: 925721 - DNA, 15 bp, Homo sapiens
tggtggctctaccat

SEQ ID NO: 925722 - DNA, 15 bp, Homo sapiens
ggtggctctaccatt

SEQ ID NO: 925723 - DNA, 15 bp, Homo sapiens
gtggctctaccattc

SEQ ID NO: 925724 - DNA, 15 bp, Homo sapiens
tggctctaccattct

SEQ ID NO: 925725 - DNA, 15 bp, Homo sapiens
ggctctaccattctg

SEQ ID NO: 925726 - DNA, 15 bp, Homo sapiens
gctctaccattctgg

SEQ ID NO: 925727 - DNA, 15 bp, Homo sapiens
ctctaccattctggg

SEQ ID NO: 925728 - DNA, 15 bp, Homo sapiens
tctaccattctgggg

SEQ ID NO: 925729 - DNA, 15 bp, Homo sapiens
ctaccattctggggt

SEQ ID NO: 925730 - DNA, 15 bp, Homo sapiens
taccattctggggtc

SEQ ID NO: 925731 - DNA, 15 bp, Homo sapiens
accattctggggtct

SEQ ID NO: 925732 - DNA, 15 bp, Homo sapiens
ccattctggggtctg

SEQ ID NO: 925733 - DNA, 15 bp, Homo sapiens
cattctggggtctga

SEQ ID NO: 925734 - DNA, 15 bp, Homo sapiens
attctggggtctgaa

SEQ ID NO: 925735 - DNA, 15 bp, Homo sapiens
ttctggggtctgaag

SEQ ID NO: 925736 - DNA, 15 bp, Homo sapiens
tctggggtctgaaga

SEQ ID NO: 925737 - DNA, 15 bp, Homo sapiens
ctggggtctgaagaa

SEQ ID NO: 925738 - DNA, 15 bp, Homo sapiens
tggggtctgaagaat

SEQ ID NO: 925739 - DNA, 15 bp, Homo sapiens
ggggtctgaagaatg

SEQ ID NO: 925740 - DNA, 15 bp, Homo sapiens
gggtctgaagaatgg

SEQ ID NO: 925741 - DNA, 15 bp, Homo sapiens
ggtctgaagaatggt

SEQ ID NO: 925742 - DNA, 15 bp, Homo sapiens
gtctgaagaatggtg

SEQ ID NO: 925743 - DNA, 15 bp, Homo sapiens
tctgaagaatggtgg

SEQ ID NO: 925744 - DNA, 15 bp, Homo sapiens
ctgaagaatggtggc

SEQ ID NO: 925745 - DNA, 15 bp, Homo sapiens
tgaagaatggtggcc

SEQ ID NO: 925746 - DNA, 15 bp, Homo sapiens
gaagaatggtggccc

SEQ ID NO: 925747 - DNA, 15 bp, Homo sapiens
aagaatggtggccct

SEQ ID NO: 925748 - DNA, 15 bp, Homo sapiens
agaatggtggccctc

SEQ ID NO: 925749 - DNA, 15 bp, Homo sapiens
gaatggtggccctct

SEQ ID NO: 925750 - DNA, 15 bp, Homo sapiens
aatggtggccctctt

SEQ ID NO: 925751 - DNA, 15 bp, Homo sapiens
atggtggccctcttc

SEQ ID NO: 925752 - DNA, 15 bp, Homo sapiens
tggtggccctcttct

SEQ ID NO: 925753 - DNA, 15 bp, Homo sapiens
ggtggccctcttctc

SEQ ID NO: 925754 - DNA, 15 bp, Homo sapiens
gtggccctcttctca

SEQ ID NO: 925755 - DNA, 15 bp, Homo sapiens
tggccctcttctcac

SEQ ID NO: 925756 - DNA, 15 bp, Homo sapiens
ggccctcttctcaca

SEQ ID NO: 925757 - DNA, 15 bp, Homo sapiens
gccctcttctcacag

SEQ ID NO: 925758 - DNA, 15 bp, Homo sapiens
ccctcttctcacaga

SEQ ID NO: 925759 - DNA, 15 bp, Homo sapiens
cctcttctcacagat

SEQ ID NO: 925760 - DNA, 15 bp, Homo sapiens
ctcttctcacagatc

SEQ ID NO: 925761 - DNA, 15 bp, Homo sapiens
tcttctcacagatcc

SEQ ID NO: 925762 - DNA, 15 bp, Homo sapiens
cttctcacagatcca

SEQ ID NO: 925763 - DNA, 15 bp, Homo sapiens
ttctcacagatccac

SEQ ID NO: 925764 - DNA, 15 bp, Homo sapiens
tctcacagatccact

SEQ ID NO: 925765 - DNA, 15 bp, Homo sapiens
ctcacagatccacta

SEQ ID NO: 925766 - DNA, 15 bp, Homo sapiens
tcacagatccactag

SEQ ID NO: 925767 - DNA, 15 bp, Homo sapiens
cacagatccactagg

SEQ ID NO: 925768 - DNA, 15 bp, Homo sapiens
acagatccactaggc

SEQ ID NO: 925769 - DNA, 15 bp, Homo sapiens
cagatccactaggca

SEQ ID NO: 925770 - DNA, 15 bp, Homo sapiens
agatccactaggcag

SEQ ID NO: 925771 - DNA, 15 bp, Homo sapiens
gatccactaggcagt

SEQ ID NO: 925772 - DNA, 15 bp, Homo sapiens
atccactaggcagtg

SEQ ID NO: 925773 - DNA, 15 bp, Homo sapiens
tccactaggcagtgc

SEQ ID NO: 925774 - DNA, 15 bp, Homo sapiens
ccactaggcagtgcc

SEQ ID NO: 925775 - DNA, 15 bp, Homo sapiens
cactaggcagtgcct

SEQ ID NO: 925776 - DNA, 15 bp, Homo sapiens
actaggcagtgcctc

SEQ ID NO: 925777 - DNA, 15 bp, Homo sapiens
ctaggcagtgcctca

SEQ ID NO: 925778 - DNA, 15 bp, Homo sapiens
taggcagtgcctcaa

SEQ ID NO: 925779 - DNA, 15 bp, Homo sapiens
aggcagtgcctcaat

SEQ ID NO: 925780 - DNA, 15 bp, Homo sapiens
ggcagtgcctcaatg

SEQ ID NO: 925781 - DNA, 15 bp, Homo sapiens
gcagtgcctcaatgg

SEQ ID NO: 925782 - DNA, 15 bp, Homo sapiens
cagtgcctcaatggg

SEQ ID NO: 925783 - DNA, 15 bp, Homo sapiens
agtgcctcaatgggg

SEQ ID NO: 925784 - DNA, 15 bp, Homo sapiens
gtgcctcaatgggga

SEQ ID NO: 925785 - DNA, 15 bp, Homo sapiens
tgcctcaatggggac

SEQ ID NO: 925786 - DNA, 15 bp, Homo sapiens
gcctcaatggggact

SEQ ID NO: 925787 - DNA, 15 bp, Homo sapiens
cctcaatggggactc

SEQ ID NO: 925788 - DNA, 15 bp, Homo sapiens
ctcaatggggactct

SEQ ID NO: 925789 - DNA, 15 bp, Homo sapiens
tcaatggggactctg

SEQ ID NO: 925790 - DNA, 15 bp, Homo sapiens
caatggggactctgt

SEQ ID NO: 925791 - DNA, 15 bp, Homo sapiens
aatggggactctgtg

SEQ ID NO: 925792 - DNA, 15 bp, Homo sapiens
atggggactctgtgt

SEQ ID NO: 925793 - DNA, 15 bp, Homo sapiens
tggggactctgtgtg

SEQ ID NO: 925794 - DNA, 15 bp, Homo sapiens
ggggactctgtgtgg

SEQ ID NO: 925795 - DNA, 15 bp, Homo sapiens
gggactctgtgtggg

SEQ ID NO: 925796 - DNA, 15 bp, Homo sapiens
ggactctgtgtgggg

SEQ ID NO: 925797 - DNA, 15 bp, Homo sapiens
gactctgtgtggggg

SEQ ID NO: 925798 - DNA, 15 bp, Homo sapiens
actctgtgtggggga

SEQ ID NO: 925799 - DNA, 15 bp, Homo sapiens
ctctgtgtgggggat

SEQ ID NO: 925800 - DNA, 15 bp, Homo sapiens
tctgtgtgggggatt

SEQ ID NO: 925801 - DNA, 15 bp, Homo sapiens
ctgtgtgggggattc

SEQ ID NO: 925802 - DNA, 15 bp, Homo sapiens
tgtgtgggggattca

SEQ ID NO: 925803 - DNA, 15 bp, Homo sapiens
gtgtgggggattcaa

SEQ ID NO: 925804 - DNA, 15 bp, Homo sapiens
tgtgggggattcaac

SEQ ID NO: 925805 - DNA, 15 bp, Homo sapiens
gtgggggattcaacc

SEQ ID NO: 925806 - DNA, 15 bp, Homo sapiens
tgggggattcaaccc

SEQ ID NO: 925807 - DNA, 15 bp, Homo sapiens
gggggattcaaccca

SEQ ID NO: 925808 - DNA, 15 bp, Homo sapiens
ggggattcaacccac

SEQ ID NO: 925809 - DNA, 15 bp, Homo sapiens
gggattcaacccaca

SEQ ID NO: 925810 - DNA, 15 bp, Homo sapiens
ggattcaacccacat

SEQ ID NO: 925811 - DNA, 15 bp, Homo sapiens
gattcaacccacatt

SEQ ID NO: 925812 - DNA, 15 bp, Homo sapiens
attcaacccacattt

SEQ ID NO: 925813 - DNA, 15 bp, Homo sapiens
ttcaacccacatttc

SEQ ID NO: 925814 - DNA, 15 bp, Homo sapiens
tcaacccacatttcc

SEQ ID NO: 925815 - DNA, 15 bp, Homo sapiens
caacccacatttccc

SEQ ID NO: 925816 - DNA, 15 bp, Homo sapiens
aacccacatttccct

SEQ ID NO: 925817 - DNA, 15 bp, Homo sapiens
acccacatttccctt

SEQ ID NO: 925818 - DNA, 15 bp, Homo sapiens
cccacatttcccttc

SEQ ID NO: 925819 - DNA, 15 bp, Homo sapiens
ccacatttcccttct

SEQ ID NO: 925820 - DNA, 15 bp, Homo sapiens
cacatttcccttctg

SEQ ID NO: 925821 - DNA, 15 bp, Homo sapiens
acatttcccttctgc

SEQ ID NO: 925822 - DNA, 15 bp, Homo sapiens
catttcccttctgca

SEQ ID NO: 925823 - DNA, 15 bp, Homo sapiens
atttcccttctgcac

SEQ ID NO: 925824 - DNA, 15 bp, Homo sapiens
tttcccttctgcact

SEQ ID NO: 925825 - DNA, 15 bp, Homo sapiens
ttcccttctgcactg

SEQ ID NO: 925826 - DNA, 15 bp, Homo sapiens
tcccttctgcactgc

SEQ ID NO: 925827 - DNA, 15 bp, Homo sapiens
cccttctgcactgcc

SEQ ID NO: 925828 - DNA, 15 bp, Homo sapiens
ccttctgcactgccc

SEQ ID NO: 925829 - DNA, 15 bp, Homo sapiens
cttctgcactgccct

SEQ ID NO: 925830 - DNA, 15 bp, Homo sapiens
ttctgcactgccctc

SEQ ID NO: 925831 - DNA, 15 bp, Homo sapiens
tctgcactgccctca

SEQ ID NO: 925832 - DNA, 15 bp, Homo sapiens
ctgcactgccctcac

SEQ ID NO: 925833 - DNA, 15 bp, Homo sapiens
tgcactgccctcacg

SEQ ID NO: 925834 - DNA, 15 bp, Homo sapiens
gcactgccctcacgg

SEQ ID NO: 925835 - DNA, 15 bp, Homo sapiens
cactgccctcacgga

SEQ ID NO: 925836 - DNA, 15 bp, Homo sapiens
actgccctcacggag

SEQ ID NO: 925837 - DNA, 15 bp, Homo sapiens
ctgccctcacggagg

SEQ ID NO: 925838 - DNA, 15 bp, Homo sapiens
tgccctcacggaggt

SEQ ID NO: 925839 - DNA, 15 bp, Homo sapiens
gccctcacggaggtt

SEQ ID NO: 925840 - DNA, 15 bp, Homo sapiens
ccctcacggaggttc

SEQ ID NO: 925841 - DNA, 15 bp, Homo sapiens
cctcacggaggttct

SEQ ID NO: 925842 - DNA, 15 bp, Homo sapiens
ctcacggaggttctc

SEQ ID NO: 925843 - DNA, 15 bp, Homo sapiens
tcacggaggttctcc

SEQ ID NO: 925844 - DNA, 15 bp, Homo sapiens
cacggaggttctcca

SEQ ID NO: 925845 - DNA, 15 bp, Homo sapiens
acggaggttctccat

SEQ ID NO: 925846 - DNA, 15 bp, Homo sapiens
cggaggttctccatg

SEQ ID NO: 925847 - DNA, 15 bp, Homo sapiens
ggaggttctccatga

SEQ ID NO: 925848 - DNA, 15 bp, Homo sapiens
gaggttctccatgag

SEQ ID NO: 925849 - DNA, 15 bp, Homo sapiens
aggttctccatgagg

SEQ ID NO: 925850 - DNA, 15 bp, Homo sapiens
ggttctccatgaggg

SEQ ID NO: 925851 - DNA, 15 bp, Homo sapiens
gttctccatgagggc

SEQ ID NO: 925852 - DNA, 15 bp, Homo sapiens
ttctccatgagggcc

SEQ ID NO: 925853 - DNA, 15 bp, Homo sapiens
tctccatgagggccc

SEQ ID NO: 925854 - DNA, 15 bp, Homo sapiens
ctccatgagggcccc

SEQ ID NO: 925855 - DNA, 15 bp, Homo sapiens
tccatgagggcccca

SEQ ID NO: 925856 - DNA, 15 bp, Homo sapiens
ccatgagggccccag

SEQ ID NO: 925857 - DNA, 15 bp, Homo sapiens
catgagggccccagc

SEQ ID NO: 925858 - DNA, 15 bp, Homo sapiens
atgagggccccagcc

SEQ ID NO: 925859 - DNA, 15 bp, Homo sapiens
tgagggccccagccc

SEQ ID NO: 925860 - DNA, 15 bp, Homo sapiens
gagggccccagcccc

SEQ ID NO: 925861 - DNA, 15 bp, Homo sapiens
agggccccagcccct

SEQ ID NO: 925862 - DNA, 15 bp, Homo sapiens
gggccccagcccctc

SEQ ID NO: 925863 - DNA, 15 bp, Homo sapiens
ggccccagcccctcc

SEQ ID NO: 925864 - DNA, 15 bp, Homo sapiens
gccccagcccctcca

SEQ ID NO: 925865 - DNA, 15 bp, Homo sapiens
ccccagcccctccag

SEQ ID NO: 925866 - DNA, 15 bp, Homo sapiens
cccagcccctccagc

SEQ ID NO: 925867 - DNA, 15 bp, Homo sapiens
ccagcccctccagca

SEQ ID NO: 925868 - DNA, 15 bp, Homo sapiens
cagcccctccagcaa

SEQ ID NO: 925869 - DNA, 15 bp, Homo sapiens
agcccctccagcaaa

SEQ ID NO: 925870 - DNA, 15 bp, Homo sapiens
gcccctccagcaaac

SEQ ID NO: 925871 - DNA, 15 bp, Homo sapiens
cccctccagcaaact

SEQ ID NO: 925872 - DNA, 15 bp, Homo sapiens
ccctccagcaaactt

SEQ ID NO: 925873 - DNA, 15 bp, Homo sapiens
cctccagcaaacttc

SEQ ID NO: 925874 - DNA, 15 bp, Homo sapiens
ctccagcaaacttct

SEQ ID NO: 925875 - DNA, 15 bp, Homo sapiens
tccagcaaacttctg

SEQ ID NO: 925876 - DNA, 15 bp, Homo sapiens
ccagcaaacttctga

SEQ ID NO: 925877 - DNA, 15 bp, Homo sapiens
cagcaaacttctgac

SEQ ID NO: 925878 - DNA, 15 bp, Homo sapiens
agcaaacttctgact

SEQ ID NO: 925879 - DNA, 15 bp, Homo sapiens
gcaaacttctgactg

SEQ ID NO: 925880 - DNA, 15 bp, Homo sapiens
caaacttctgactgg

SEQ ID NO: 925881 - DNA, 15 bp, Homo sapiens
aaacttctgactgga

SEQ ID NO: 925882 - DNA, 15 bp, Homo sapiens
aacttctgactggac

SEQ ID NO: 925883 - DNA, 15 bp, Homo sapiens
acttctgactggaca

SEQ ID NO: 925884 - DNA, 15 bp, Homo sapiens
cttctgactggacat

SEQ ID NO: 925885 - DNA, 15 bp, Homo sapiens
ttctgactggacata

SEQ ID NO: 925886 - DNA, 15 bp, Homo sapiens
tctgactggacatac

SEQ ID NO: 925887 - DNA, 15 bp, Homo sapiens
ctgactggacataca

SEQ ID NO: 925888 - DNA, 15 bp, Homo sapiens
tgactggacatacag

SEQ ID NO: 925889 - DNA, 15 bp, Homo sapiens
gactggacatacagg

SEQ ID NO: 925890 - DNA, 15 bp, Homo sapiens
actggacatacaggc

SEQ ID NO: 925891 - DNA, 15 bp, Homo sapiens
ctggacatacaggca

SEQ ID NO: 925892 - DNA, 15 bp, Homo sapiens
tggacatacaggcat

SEQ ID NO: 925893 - DNA, 15 bp, Homo sapiens
ggacatacaggcatt

SEQ ID NO: 925894 - DNA, 15 bp, Homo sapiens
gacatacaggcattc

SEQ ID NO: 925895 - DNA, 15 bp, Homo sapiens
acatacaggcattcc

SEQ ID NO: 925896 - DNA, 15 bp, Homo sapiens
catacaggcattcct

SEQ ID NO: 925897 - DNA, 15 bp, Homo sapiens
atacaggcattccta

SEQ ID NO: 925898 - DNA, 15 bp, Homo sapiens
tacaggcattcctat

SEQ ID NO: 925899 - DNA, 15 bp, Homo sapiens
acaggcattcctata

SEQ ID NO: 925900 - DNA, 15 bp, Homo sapiens
caggcattcctataa

SEQ ID NO: 925901 - DNA, 15 bp, Homo sapiens
aggcattcctataaa

SEQ ID NO: 925902 - DNA, 15 bp, Homo sapiens
ggcattcctataaac

SEQ ID NO: 925903 - DNA, 15 bp, Homo sapiens
gcattcctataaacc

SEQ ID NO: 925904 - DNA, 15 bp, Homo sapiens
cattcctataaaccc

SEQ ID NO: 925905 - DNA, 15 bp, Homo sapiens
attcctataaaccct

SEQ ID NO: 925906 - DNA, 15 bp, Homo sapiens
ttcctataaaccctc

SEQ ID NO: 925907 - DNA, 15 bp, Homo sapiens
tcctataaaccctct

SEQ ID NO: 925908 - DNA, 15 bp, Homo sapiens
cctataaaccctctg

SEQ ID NO: 925909 - DNA, 15 bp, Homo sapiens
ctataaaccctctga

SEQ ID NO: 925910 - DNA, 15 bp, Homo sapiens
tataaaccctctgaa

SEQ ID NO: 925911 - DNA, 15 bp, Homo sapiens
ataaaccctctgaaa

SEQ ID NO: 925912 - DNA, 15 bp, Homo sapiens
taaaccctctgaaat

SEQ ID NO: 925913 - DNA, 15 bp, Homo sapiens
aaaccctctgaaatc

SEQ ID NO: 925914 - DNA, 15 bp, Homo sapiens
aaccctctgaaatct

SEQ ID NO: 925915 - DNA, 15 bp, Homo sapiens
accctctgaaatcta

SEQ ID NO: 925916 - DNA, 15 bp, Homo sapiens
ccctctgaaatctag

SEQ ID NO: 925917 - DNA, 15 bp, Homo sapiens
cctctgaaatctagg

SEQ ID NO: 925918 - DNA, 15 bp, Homo sapiens
ctctgaaatctaggc

SEQ ID NO: 925919 - DNA, 15 bp, Homo sapiens
tctgaaatctaggca

SEQ ID NO: 925920 - DNA, 15 bp, Homo sapiens
ctgaaatctaggcag

SEQ ID NO: 925921 - DNA, 15 bp, Homo sapiens
tgaaatctaggcaga

SEQ ID NO: 925922 - DNA, 15 bp, Homo sapiens
gaaatctaggcagaa

SEQ ID NO: 925923 - DNA, 15 bp, Homo sapiens
aaatctaggcagaag

SEQ ID NO: 925924 - DNA, 15 bp, Homo sapiens
aatctaggcagaagt

SEQ ID NO: 925925 - DNA, 15 bp, Homo sapiens
atctaggcagaagtt

SEQ ID NO: 925926 - DNA, 15 bp, Homo sapiens
tctaggcagaagttc

SEQ ID NO: 925927 - DNA, 15 bp, Homo sapiens
ctaggcagaagttcc

SEQ ID NO: 925928 - DNA, 15 bp, Homo sapiens
taggcagaagttccc

SEQ ID NO: 925929 - DNA, 15 bp, Homo sapiens
aggcagaagttccca

SEQ ID NO: 925930 - DNA, 15 bp, Homo sapiens
ggcagaagttcccaa

SEQ ID NO: 925931 - DNA, 15 bp, Homo sapiens
gcagaagttcccaaa

SEQ ID NO: 925932 - DNA, 15 bp, Homo sapiens
cagaagttcccaaac

SEQ ID NO: 925933 - DNA, 15 bp, Homo sapiens
agaagttcccaaacc

SEQ ID NO: 925934 - DNA, 15 bp, Homo sapiens
gaagttcccaaacct

SEQ ID NO: 925935 - DNA, 15 bp, Homo sapiens
aagttcccaaacctc

SEQ ID NO: 925936 - DNA, 15 bp, Homo sapiens
agttcccaaacctca

SEQ ID NO: 925937 - DNA, 15 bp, Homo sapiens
gttcccaaacctcag

SEQ ID NO: 925938 - DNA, 15 bp, Homo sapiens
ttcccaaacctcagt

SEQ ID NO: 925939 - DNA, 15 bp, Homo sapiens
tcccaaacctcagtt

SEQ ID NO: 925940 - DNA, 15 bp, Homo sapiens
cccaaacctcagttc

SEQ ID NO: 925941 - DNA, 15 bp, Homo sapiens
ccaaacctcagttct

SEQ ID NO: 925942 - DNA, 15 bp, Homo sapiens
caaacctcagttctt

SEQ ID NO: 925943 - DNA, 15 bp, Homo sapiens
aaacctcagttcttg

SEQ ID NO: 925944 - DNA, 15 bp, Homo sapiens
aacctcagttcttga

SEQ ID NO: 925945 - DNA, 15 bp, Homo sapiens
acctcagttcttgac

SEQ ID NO: 925946 - DNA, 15 bp, Homo sapiens
cctcagttcttgact

SEQ ID NO: 925947 - DNA, 15 bp, Homo sapiens
ctcagttcttgactt

SEQ ID NO: 925948 - DNA, 15 bp, Homo sapiens
tcagttcttgacttc

SEQ ID NO: 925949 - DNA, 15 bp, Homo sapiens
cagttcttgacttct

SEQ ID NO: 925950 - DNA, 15 bp, Homo sapiens
agttcttgacttctg

SEQ ID NO: 925951 - DNA, 15 bp, Homo sapiens
gttcttgacttctgt

SEQ ID NO: 925952 - DNA, 15 bp, Homo sapiens
ttcttgacttctgtg

SEQ ID NO: 925953 - DNA, 15 bp, Homo sapiens
tcttgacttctgtgc

SEQ ID NO: 925954 - DNA, 15 bp, Homo sapiens
cttgacttctgtgca

SEQ ID NO: 925955 - DNA, 15 bp, Homo sapiens
ttgacttctgtgcac

SEQ ID NO: 925956 - DNA, 15 bp, Homo sapiens
tgacttctgtgcacc

SEQ ID NO: 925957 - DNA, 15 bp, Homo sapiens
gacttctgtgcacct

SEQ ID NO: 925958 - DNA, 15 bp, Homo sapiens
acttctgtgcacctg

SEQ ID NO: 925959 - DNA, 15 bp, Homo sapiens
cttctgtgcacctgc

SEQ ID NO: 925960 - DNA, 15 bp, Homo sapiens
ttctgtgcacctgca

SEQ ID NO: 925961 - DNA, 15 bp, Homo sapiens
tctgtgcacctgcag

SEQ ID NO: 925962 - DNA, 15 bp, Homo sapiens
ctgtgcacctgcagg

SEQ ID NO: 925963 - DNA, 15 bp, Homo sapiens
tgtgcacctgcaggc

SEQ ID NO: 925964 - DNA, 15 bp, Homo sapiens
gtgcacctgcaggct

SEQ ID NO: 925965 - DNA, 15 bp, Homo sapiens
tgcacctgcaggctg

SEQ ID NO: 925966 - DNA, 15 bp, Homo sapiens
gcacctgcaggctga

SEQ ID NO: 925967 - DNA, 15 bp, Homo sapiens
cacctgcaggctgaa

SEQ ID NO: 925968 - DNA, 15 bp, Homo sapiens
acctgcaggctgaac

SEQ ID NO: 925969 - DNA, 15 bp, Homo sapiens
cctgcaggctgaaca

SEQ ID NO: 925970 - DNA, 15 bp, Homo sapiens
ctgcaggctgaacac

SEQ ID NO: 925971 - DNA, 15 bp, Homo sapiens
tgcaggctgaacacc

SEQ ID NO: 925972 - DNA, 15 bp, Homo sapiens
gcaggctgaacacca

SEQ ID NO: 925973 - DNA, 15 bp, Homo sapiens
caggctgaacaccac

SEQ ID NO: 925974 - DNA, 15 bp, Homo sapiens
aggctgaacaccaca

SEQ ID NO: 925975 - DNA, 15 bp, Homo sapiens
ggctgaacaccacat

SEQ ID NO: 925976 - DNA, 15 bp, Homo sapiens
gctgaacaccacatg

SEQ ID NO: 925977 - DNA, 15 bp, Homo sapiens
ctgaacaccacatgg

SEQ ID NO: 925978 - DNA, 15 bp, Homo sapiens
tgaacaccacatggc

SEQ ID NO: 925979 - DNA, 15 bp, Homo sapiens
gaacaccacatggca

SEQ ID NO: 925980 - DNA, 15 bp, Homo sapiens
aacaccacatggcac

SEQ ID NO: 925981 - DNA, 15 bp, Homo sapiens
acaccacatggcacc

SEQ ID NO: 925982 - DNA, 15 bp, Homo sapiens
caccacatggcacct

SEQ ID NO: 925983 - DNA, 15 bp, Homo sapiens
accacatggcacctg

SEQ ID NO: 925984 - DNA, 15 bp, Homo sapiens
ccacatggcacctgc

SEQ ID NO: 925985 - DNA, 15 bp, Homo sapiens
cacatggcacctgcc

SEQ ID NO: 925986 - DNA, 15 bp, Homo sapiens
acatggcacctgcca

SEQ ID NO: 925987 - DNA, 15 bp, Homo sapiens
catggcacctgccaa

SEQ ID NO: 925988 - DNA, 15 bp, Homo sapiens
atggcacctgccaag

SEQ ID NO: 925989 - DNA, 15 bp, Homo sapiens
tggcacctgccaagg

SEQ ID NO: 925990 - DNA, 15 bp, Homo sapiens
ggcacctgccaaggc

SEQ ID NO: 925991 - DNA, 15 bp, Homo sapiens
gcacctgccaaggct

SEQ ID NO: 925992 - DNA, 15 bp, Homo sapiens
cacctgccaaggctt

SEQ ID NO: 925993 - DNA, 15 bp, Homo sapiens
acctgccaaggcttg

SEQ ID NO: 925994 - DNA, 15 bp, Homo sapiens
cctgccaaggcttgg

SEQ ID NO: 925995 - DNA, 15 bp, Homo sapiens
ctgccaaggcttggg

SEQ ID NO: 925996 - DNA, 15 bp, Homo sapiens
tgccaaggcttgggg

SEQ ID NO: 925997 - DNA, 15 bp, Homo sapiens
gccaaggcttggggc

SEQ ID NO: 925998 - DNA, 15 bp, Homo sapiens
ccaaggcttggggct

SEQ ID NO: 925999 - DNA, 15 bp, Homo sapiens
caaggcttggggctc

SEQ ID NO: 926000 - DNA, 15 bp, Homo sapiens
aaggcttggggctca

SEQ ID NO: 926001 - DNA, 15 bp, Homo sapiens
aggcttggggctcac

SEQ ID NO: 926002 - DNA, 15 bp, Homo sapiens
ggcttggggctcaca

SEQ ID NO: 926003 - DNA, 15 bp, Homo sapiens
gcttggggctcacac

SEQ ID NO: 926004 - DNA, 15 bp, Homo sapiens
cttggggctcacacc

SEQ ID NO: 926005 - DNA, 15 bp, Homo sapiens
ttggggctcacaccc

SEQ ID NO: 926006 - DNA, 15 bp, Homo sapiens
tggggctcacaccct

SEQ ID NO: 926007 - DNA, 15 bp, Homo sapiens
ggggctcacaccctc

SEQ ID NO: 926008 - DNA, 15 bp, Homo sapiens
gggctcacaccctct

SEQ ID NO: 926009 - DNA, 15 bp, Homo sapiens
ggctcacaccctctg

SEQ ID NO: 926010 - DNA, 15 bp, Homo sapiens
gctcacaccctctga

SEQ ID NO: 926011 - DNA, 15 bp, Homo sapiens
ctcacaccctctgaa

SEQ ID NO: 926012 - DNA, 15 bp, Homo sapiens
tcacaccctctgaag

SEQ ID NO: 926013 - DNA, 15 bp, Homo sapiens
cacaccctctgaagc

SEQ ID NO: 926014 - DNA, 15 bp, Homo sapiens
acaccctctgaagcc

SEQ ID NO: 926015 - DNA, 15 bp, Homo sapiens
caccctctgaagcca

SEQ ID NO: 926016 - DNA, 15 bp, Homo sapiens
accctctgaagccat

SEQ ID NO: 926017 - DNA, 15 bp, Homo sapiens
ccctctgaagccatg

SEQ ID NO: 926018 - DNA, 15 bp, Homo sapiens
cctctgaagccatga

SEQ ID NO: 926019 - DNA, 15 bp, Homo sapiens
ctctgaagccatgac

SEQ ID NO: 926020 - DNA, 15 bp, Homo sapiens
tctgaagccatgacc

SEQ ID NO: 926021 - DNA, 15 bp, Homo sapiens
ctgaagccatgaccc

SEQ ID NO: 926022 - DNA, 15 bp, Homo sapiens
tgaagccatgaccca

SEQ ID NO: 926023 - DNA, 15 bp, Homo sapiens
gaagccatgacccaa

SEQ ID NO: 926024 - DNA, 15 bp, Homo sapiens
aagccatgacccaaa

SEQ ID NO: 926025 - DNA, 15 bp, Homo sapiens
agccatgacccaaac

SEQ ID NO: 926026 - DNA, 15 bp, Homo sapiens
gccatgacccaaact

SEQ ID NO: 926027 - DNA, 15 bp, Homo sapiens
ccatgacccaaactg

SEQ ID NO: 926028 - DNA, 15 bp, Homo sapiens
catgacccaaactgt

SEQ ID NO: 926029 - DNA, 15 bp, Homo sapiens
atgacccaaactgta

SEQ ID NO: 926030 - DNA, 15 bp, Homo sapiens
tgacccaaactgtac

SEQ ID NO: 926031 - DNA, 15 bp, Homo sapiens
gacccaaactgtacc

SEQ ID NO: 926032 - DNA, 15 bp, Homo sapiens
acccaaactgtacct

SEQ ID NO: 926033 - DNA, 15 bp, Homo sapiens
cccaaactgtacctt

SEQ ID NO: 926034 - DNA, 15 bp, Homo sapiens
ccaaactgtaccttg

SEQ ID NO: 926035 - DNA, 15 bp, Homo sapiens
caaactgtaccttgg

SEQ ID NO: 926036 - DNA, 15 bp, Homo sapiens
aaactgtaccttggc

SEQ ID NO: 926037 - DNA, 15 bp, Homo sapiens
aactgtaccttggcc

SEQ ID NO: 926038 - DNA, 15 bp, Homo sapiens
actgtaccttggccc

SEQ ID NO: 926039 - DNA, 15 bp, Homo sapiens
ctgtaccttggcccc

SEQ ID NO: 926040 - DNA, 15 bp, Homo sapiens
tgtaccttggcccct

SEQ ID NO: 926041 - DNA, 15 bp, Homo sapiens
gtaccttggcccctt

SEQ ID NO: 926042 - DNA, 15 bp, Homo sapiens
taccttggccccttg

SEQ ID NO: 926043 - DNA, 15 bp, Homo sapiens
accttggccccttgt

SEQ ID NO: 926044 - DNA, 15 bp, Homo sapiens
ccttggccccttgta

SEQ ID NO: 926045 - DNA, 15 bp, Homo sapiens
cttggccccttgtag

SEQ ID NO: 926046 - DNA, 15 bp, Homo sapiens
ttggccccttgtagc

SEQ ID NO: 926047 - DNA, 15 bp, Homo sapiens
tggccccttgtagcc

SEQ ID NO: 926048 - DNA, 15 bp, Homo sapiens
ggccccttgtagcca

SEQ ID NO: 926049 - DNA, 15 bp, Homo sapiens
gccccttgtagccaa

SEQ ID NO: 926050 - DNA, 15 bp, Homo sapiens
ccccttgtagccaag

SEQ ID NO: 926051 - DNA, 15 bp, Homo sapiens
cccttgtagccaagg

SEQ ID NO: 926052 - DNA, 15 bp, Homo sapiens
ccttgtagccaaggc

SEQ ID NO: 926053 - DNA, 15 bp, Homo sapiens
cttgtagccaaggct

SEQ ID NO: 926054 - DNA, 15 bp, Homo sapiens
ttgtagccaaggctg

SEQ ID NO: 926055 - DNA, 15 bp, Homo sapiens
tgtagccaaggctgg

SEQ ID NO: 926056 - DNA, 15 bp, Homo sapiens
gtagccaaggctgga

SEQ ID NO: 926057 - DNA, 15 bp, Homo sapiens
tagccaaggctggag

SEQ ID NO: 926058 - DNA, 15 bp, Homo sapiens
agccaaggctggagg

SEQ ID NO: 926059 - DNA, 15 bp, Homo sapiens
gccaaggctggaggg

SEQ ID NO: 926060 - DNA, 15 bp, Homo sapiens
ccaaggctggagggg

SEQ ID NO: 926061 - DNA, 15 bp, Homo sapiens
caaggctggaggggc

SEQ ID NO: 926062 - DNA, 15 bp, Homo sapiens
aaggctggaggggct

SEQ ID NO: 926063 - DNA, 15 bp, Homo sapiens
aggctggaggggctg

SEQ ID NO: 926064 - DNA, 15 bp, Homo sapiens
ggctggaggggctgg

SEQ ID NO: 926065 - DNA, 15 bp, Homo sapiens
gctggaggggctggg

SEQ ID NO: 926066 - DNA, 15 bp, Homo sapiens
ctggaggggctggga

SEQ ID NO: 926067 - DNA, 15 bp, Homo sapiens
tggaggggctgggat

SEQ ID NO: 926068 - DNA, 15 bp, Homo sapiens
ggaggggctgggatg

SEQ ID NO: 926069 - DNA, 15 bp, Homo sapiens
gaggggctgggatgt

SEQ ID NO: 926070 - DNA, 15 bp, Homo sapiens
aggggctgggatgtg

SEQ ID NO: 926071 - DNA, 15 bp, Homo sapiens
ggggctgggatgtgg

SEQ ID NO: 926072 - DNA, 15 bp, Homo sapiens
gggctgggatgtggg

SEQ ID NO: 926073 - DNA, 15 bp, Homo sapiens
ggctgggatgtgggg

SEQ ID NO: 926074 - DNA, 15 bp, Homo sapiens
gctgggatgtggggc

SEQ ID NO: 926075 - DNA, 15 bp, Homo sapiens
ctgggatgtggggca

SEQ ID NO: 926076 - DNA, 15 bp, Homo sapiens
tgggatgtggggcac

SEQ ID NO: 926077 - DNA, 15 bp, Homo sapiens
gggatgtggggcacc

SEQ ID NO: 926078 - DNA, 15 bp, Homo sapiens
ggatgtggggcacca

SEQ ID NO: 926079 - DNA, 15 bp, Homo sapiens
gatgtggggcaccaa

SEQ ID NO: 926080 - DNA, 15 bp, Homo sapiens
atgtggggcaccaag

SEQ ID NO: 926081 - DNA, 15 bp, Homo sapiens
tgtggggcaccaagg

SEQ ID NO: 926082 - DNA, 15 bp, Homo sapiens
gtggggcaccaaggc

SEQ ID NO: 926083 - DNA, 15 bp, Homo sapiens
tggggcaccaaggcc

SEQ ID NO: 926084 - DNA, 15 bp, Homo sapiens
ggggcaccaaggcct

SEQ ID NO: 926085 - DNA, 15 bp, Homo sapiens
gggcaccaaggcctg

SEQ ID NO: 926086 - DNA, 15 bp, Homo sapiens
ggcaccaaggcctga

SEQ ID NO: 926087 - DNA, 15 bp, Homo sapiens
gcaccaaggcctgag

SEQ ID NO: 926088 - DNA, 15 bp, Homo sapiens
caccaaggcctgagg

SEQ ID NO: 926089 - DNA, 15 bp, Homo sapiens
accaaggcctgaggc

SEQ ID NO: 926090 - DNA, 15 bp, Homo sapiens
ccaaggcctgaggct

SEQ ID NO: 926091 - DNA, 15 bp, Homo sapiens
caaggcctgaggctg

SEQ ID NO: 926092 - DNA, 15 bp, Homo sapiens
aaggcctgaggctgc

SEQ ID NO: 926093 - DNA, 15 bp, Homo sapiens
aggcctgaggctgca

SEQ ID NO: 926094 - DNA, 15 bp, Homo sapiens
ggcctgaggctgcac

SEQ ID NO: 926095 - DNA, 15 bp, Homo sapiens
gcctgaggctgcaca

SEQ ID NO: 926096 - DNA, 15 bp, Homo sapiens
cctgaggctgcacac

SEQ ID NO: 926097 - DNA, 15 bp, Homo sapiens
ctgaggctgcacaca

SEQ ID NO: 926098 - DNA, 15 bp, Homo sapiens
tgaggctgcacacag

SEQ ID NO: 926099 - DNA, 15 bp, Homo sapiens
gaggctgcacacagt

SEQ ID NO: 926100 - DNA, 15 bp, Homo sapiens
aggctgcacacagtg

SEQ ID NO: 926101 - DNA, 15 bp, Homo sapiens
ggctgcacacagtgg

SEQ ID NO: 926102 - DNA, 15 bp, Homo sapiens
gctgcacacagtggt

SEQ ID NO: 926103 - DNA, 15 bp, Homo sapiens
ctgcacacagtggtc

SEQ ID NO: 926104 - DNA, 15 bp, Homo sapiens
tgcacacagtggtca

SEQ ID NO: 926105 - DNA, 15 bp, Homo sapiens
gcacacagtggtcac

SEQ ID NO: 926106 - DNA, 15 bp, Homo sapiens
cacacagtggtcaca

SEQ ID NO: 926107 - DNA, 15 bp, Homo sapiens
acacagtggtcacag

SEQ ID NO: 926108 - DNA, 15 bp, Homo sapiens
cacagtggtcacagg

SEQ ID NO: 926109 - DNA, 15 bp, Homo sapiens
acagtggtcacaggg

SEQ ID NO: 926110 - DNA, 15 bp, Homo sapiens
cagtggtcacagggt

SEQ ID NO: 926111 - DNA, 15 bp, Homo sapiens
agtggtcacagggtg

SEQ ID NO: 926112 - DNA, 15 bp, Homo sapiens
gtggtcacagggtgg

SEQ ID NO: 926113 - DNA, 15 bp, Homo sapiens
tggtcacagggtggg

SEQ ID NO: 926114 - DNA, 15 bp, Homo sapiens
ggtcacagggtgggt

SEQ ID NO: 926115 - DNA, 15 bp, Homo sapiens
gtcacagggtgggtg

SEQ ID NO: 926116 - DNA, 15 bp, Homo sapiens
tcacagggtgggtgg

SEQ ID NO: 926117 - DNA, 15 bp, Homo sapiens
cacagggtgggtggg

SEQ ID NO: 926118 - DNA, 15 bp, Homo sapiens
acagggtgggtgggc

SEQ ID NO: 926119 - DNA, 15 bp, Homo sapiens
cagggtgggtgggca

SEQ ID NO: 926120 - DNA, 15 bp, Homo sapiens
agggtgggtgggcac

SEQ ID NO: 926121 - DNA, 15 bp, Homo sapiens
gggtgggtgggcacc

SEQ ID NO: 926122 - DNA, 15 bp, Homo sapiens
ggtgggtgggcacct

SEQ ID NO: 926123 - DNA, 15 bp, Homo sapiens
gtgggtgggcacctg

SEQ ID NO: 926124 - DNA, 15 bp, Homo sapiens
tgggtgggcacctgt

SEQ ID NO: 926125 - DNA, 15 bp, Homo sapiens
gggtgggcacctgta

SEQ ID NO: 926126 - DNA, 15 bp, Homo sapiens
ggtgggcacctgtac

SEQ ID NO: 926127 - DNA, 15 bp, Homo sapiens
gtgggcacctgtacc

SEQ ID NO: 926128 - DNA, 15 bp, Homo sapiens
tgggcacctgtacct

SEQ ID NO: 926129 - DNA, 15 bp, Homo sapiens
gggcacctgtacctg

SEQ ID NO: 926130 - DNA, 15 bp, Homo sapiens
ggcacctgtacctgc

SEQ ID NO: 926131 - DNA, 15 bp, Homo sapiens
gcacctgtacctgcc

SEQ ID NO: 926132 - DNA, 15 bp, Homo sapiens
cacctgtacctgccc

SEQ ID NO: 926133 - DNA, 15 bp, Homo sapiens
acctgtacctgcccc

SEQ ID NO: 926134 - DNA, 15 bp, Homo sapiens
cctgtacctgcccca

SEQ ID NO: 926135 - DNA, 15 bp, Homo sapiens
ctgtacctgccccag

SEQ ID NO: 926136 - DNA, 15 bp, Homo sapiens
tgtacctgccccagg

SEQ ID NO: 926137 - DNA, 15 bp, Homo sapiens
gtacctgccccagga

SEQ ID NO: 926138 - DNA, 15 bp, Homo sapiens
tacctgccccaggaa

SEQ ID NO: 926139 - DNA, 15 bp, Homo sapiens
acctgccccaggaaa

SEQ ID NO: 926140 - DNA, 15 bp, Homo sapiens
cctgccccaggaaac

SEQ ID NO: 926141 - DNA, 15 bp, Homo sapiens
ctgccccaggaaacc

SEQ ID NO: 926142 - DNA, 15 bp, Homo sapiens
tgccccaggaaacca

SEQ ID NO: 926143 - DNA, 15 bp, Homo sapiens
gccccaggaaaccat

SEQ ID NO: 926144 - DNA, 15 bp, Homo sapiens
ccccaggaaaccatt

SEQ ID NO: 926145 - DNA, 15 bp, Homo sapiens
cccaggaaaccattt

SEQ ID NO: 926146 - DNA, 15 bp, Homo sapiens
ccaggaaaccatttt

SEQ ID NO: 926147 - DNA, 15 bp, Homo sapiens
caggaaaccattttt

SEQ ID NO: 926148 - DNA, 15 bp, Homo sapiens
aggaaaccatttttc

SEQ ID NO: 926149 - DNA, 15 bp, Homo sapiens
ggaaaccatttttcc

SEQ ID NO: 926150 - DNA, 15 bp, Homo sapiens
gaaaccatttttccc

SEQ ID NO: 926151 - DNA, 15 bp, Homo sapiens
aaaccatttttccct

SEQ ID NO: 926152 - DNA, 15 bp, Homo sapiens
aaccatttttccctc

SEQ ID NO: 926153 - DNA, 15 bp, Homo sapiens
accatttttccctcc

SEQ ID NO: 926154 - DNA, 15 bp, Homo sapiens
ccatttttccctcct

SEQ ID NO: 926155 - DNA, 15 bp, Homo sapiens
catttttccctccta

SEQ ID NO: 926156 - DNA, 15 bp, Homo sapiens
atttttccctcctag

SEQ ID NO: 926157 - DNA, 15 bp, Homo sapiens
tttttccctcctagg

SEQ ID NO: 926158 - DNA, 15 bp, Homo sapiens
ttttccctcctaggc

SEQ ID NO: 926159 - DNA, 15 bp, Homo sapiens
tttccctcctaggcc

SEQ ID NO: 926160 - DNA, 15 bp, Homo sapiens
ttccctcctaggcct

SEQ ID NO: 926161 - DNA, 15 bp, Homo sapiens
tccctcctaggcctc

SEQ ID NO: 926162 - DNA, 15 bp, Homo sapiens
ccctcctaggcctct

SEQ ID NO: 926163 - DNA, 15 bp, Homo sapiens
cctcctaggcctctg

SEQ ID NO: 926164 - DNA, 15 bp, Homo sapiens
ctcctaggcctctgg

SEQ ID NO: 926165 - DNA, 15 bp, Homo sapiens
tcctaggcctctggg

SEQ ID NO: 926166 - DNA, 15 bp, Homo sapiens
cctaggcctctgggc

SEQ ID NO: 926167 - DNA, 15 bp, Homo sapiens
ctaggcctctgggcc

SEQ ID NO: 926168 - DNA, 15 bp, Homo sapiens
taggcctctgggcct

SEQ ID NO: 926169 - DNA, 15 bp, Homo sapiens
aggcctctgggcctg

SEQ ID NO: 926170 - DNA, 15 bp, Homo sapiens
ggcctctgggcctgt

SEQ ID NO: 926171 - DNA, 15 bp, Homo sapiens
gcctctgggcctgtg

SEQ ID NO: 926172 - DNA, 15 bp, Homo sapiens
cctctgggcctgtga

SEQ ID NO: 926173 - DNA, 15 bp, Homo sapiens
ctctgggcctgtgat

SEQ ID NO: 926174 - DNA, 15 bp, Homo sapiens
tctgggcctgtgatg

SEQ ID NO: 926175 - DNA, 15 bp, Homo sapiens
ctgggcctgtgatgg

SEQ ID NO: 926176 - DNA, 15 bp, Homo sapiens
tgggcctgtgatggg

SEQ ID NO: 926177 - DNA, 15 bp, Homo sapiens
gggcctgtgatggga

SEQ ID NO: 926178 - DNA, 15 bp, Homo sapiens
ggcctgtgatgggag

SEQ ID NO: 926179 - DNA, 15 bp, Homo sapiens
gcctgtgatgggagg

SEQ ID NO: 926180 - DNA, 15 bp, Homo sapiens
cctgtgatgggaggg

SEQ ID NO: 926181 - DNA, 15 bp, Homo sapiens
ctgtgatgggagggg

SEQ ID NO: 926182 - DNA, 15 bp, Homo sapiens
tgtgatgggaggggc

SEQ ID NO: 926183 - DNA, 15 bp, Homo sapiens
gtgatgggaggggct

SEQ ID NO: 926184 - DNA, 15 bp, Homo sapiens
tgatgggaggggctg

SEQ ID NO: 926185 - DNA, 15 bp, Homo sapiens
gatgggaggggctgc

SEQ ID NO: 926186 - DNA, 15 bp, Homo sapiens
atgggaggggctgcc

SEQ ID NO: 926187 - DNA, 15 bp, Homo sapiens
tgggaggggctgcca

SEQ ID NO: 926188 - DNA, 15 bp, Homo sapiens
gggaggggctgccat

SEQ ID NO: 926189 - DNA, 15 bp, Homo sapiens
ggaggggctgccatg

SEQ ID NO: 926190 - DNA, 15 bp, Homo sapiens
gaggggctgccatga

SEQ ID NO: 926191 - DNA, 15 bp, Homo sapiens
aggggctgccatgaa

SEQ ID NO: 926192 - DNA, 15 bp, Homo sapiens
ggggctgccatgaag

SEQ ID NO: 926193 - DNA, 15 bp, Homo sapiens
gggctgccatgaagg

SEQ ID NO: 926194 - DNA, 15 bp, Homo sapiens
ggctgccatgaaggt

SEQ ID NO: 926195 - DNA, 15 bp, Homo sapiens
gctgccatgaaggtc

SEQ ID NO: 926196 - DNA, 15 bp, Homo sapiens
ctgccatgaaggtct

SEQ ID NO: 926197 - DNA, 15 bp, Homo sapiens
tgccatgaaggtctc

SEQ ID NO: 926198 - DNA, 15 bp, Homo sapiens
gccatgaaggtctct

SEQ ID NO: 926199 - DNA, 15 bp, Homo sapiens
ccatgaaggtctctg

SEQ ID NO: 926200 - DNA, 15 bp, Homo sapiens
catgaaggtctctga

SEQ ID NO: 926201 - DNA, 15 bp, Homo sapiens
atgaaggtctctgac

SEQ ID NO: 926202 - DNA, 15 bp, Homo sapiens
tgaaggtctctgaca

SEQ ID NO: 926203 - DNA, 15 bp, Homo sapiens
gaaggtctctgacat

SEQ ID NO: 926204 - DNA, 15 bp, Homo sapiens
aaggtctctgacatg

SEQ ID NO: 926205 - DNA, 15 bp, Homo sapiens
aggtctctgacatgc

SEQ ID NO: 926206 - DNA, 15 bp, Homo sapiens
ggtctctgacatgcc

SEQ ID NO: 926207 - DNA, 15 bp, Homo sapiens
gtctctgacatgccc

SEQ ID NO: 926208 - DNA, 15 bp, Homo sapiens
tctctgacatgccct

SEQ ID NO: 926209 - DNA, 15 bp, Homo sapiens
ctctgacatgccctg

SEQ ID NO: 926210 - DNA, 15 bp, Homo sapiens
tctgacatgccctgg

SEQ ID NO: 926211 - DNA, 15 bp, Homo sapiens
ctgacatgccctgga

SEQ ID NO: 926212 - DNA, 15 bp, Homo sapiens
tgacatgccctggag

SEQ ID NO: 926213 - DNA, 15 bp, Homo sapiens
gacatgccctggaga

SEQ ID NO: 926214 - DNA, 15 bp, Homo sapiens
acatgccctggagac

SEQ ID NO: 926215 - DNA, 15 bp, Homo sapiens
catgccctggagaca

SEQ ID NO: 926216 - DNA, 15 bp, Homo sapiens
atgccctggagacat

SEQ ID NO: 926217 - DNA, 15 bp, Homo sapiens
tgccctggagacatt

SEQ ID NO: 926218 - DNA, 15 bp, Homo sapiens
gccctggagacattt

SEQ ID NO: 926219 - DNA, 15 bp, Homo sapiens
ccctggagacatttt

SEQ ID NO: 926220 - DNA, 15 bp, Homo sapiens
cctggagacattttc

SEQ ID NO: 926221 - DNA, 15 bp, Homo sapiens
ctggagacattttcc

SEQ ID NO: 926222 - DNA, 15 bp, Homo sapiens
tggagacattttccc

SEQ ID NO: 926223 - DNA, 15 bp, Homo sapiens
ggagacattttcccc

SEQ ID NO: 926224 - DNA, 15 bp, Homo sapiens
gagacattttcccca

SEQ ID NO: 926225 - DNA, 15 bp, Homo sapiens
agacattttccccat

SEQ ID NO: 926226 - DNA, 15 bp, Homo sapiens
gacattttccccatt

SEQ ID NO: 926227 - DNA, 15 bp, Homo sapiens
acattttccccattg

SEQ ID NO: 926228 - DNA, 15 bp, Homo sapiens
cattttccccattgc

SEQ ID NO: 926229 - DNA, 15 bp, Homo sapiens
attttccccattgcc

SEQ ID NO: 926230 - DNA, 15 bp, Homo sapiens
ttttccccattgcct

SEQ ID NO: 926231 - DNA, 15 bp, Homo sapiens
tttccccattgcctt

SEQ ID NO: 926232 - DNA, 15 bp, Homo sapiens
ttccccattgccttg

SEQ ID NO: 926233 - DNA, 15 bp, Homo sapiens
tccccattgccttgg

SEQ ID NO: 926234 - DNA, 15 bp, Homo sapiens
ccccattgccttggc

SEQ ID NO: 926235 - DNA, 15 bp, Homo sapiens
cccattgccttggca

SEQ ID NO: 926236 - DNA, 15 bp, Homo sapiens
ccattgccttggcaa

SEQ ID NO: 926237 - DNA, 15 bp, Homo sapiens
cattgccttggcaat

SEQ ID NO: 926238 - DNA, 15 bp, Homo sapiens
attgccttggcaatt

SEQ ID NO: 926239 - DNA, 15 bp, Homo sapiens
ttgccttggcaatta

SEQ ID NO: 926240 - DNA, 15 bp, Homo sapiens
tgccttggcaattag

SEQ ID NO: 926241 - DNA, 15 bp, Homo sapiens
gccttggcaattagc

SEQ ID NO: 926242 - DNA, 15 bp, Homo sapiens
ccttggcaattagca

SEQ ID NO: 926243 - DNA, 15 bp, Homo sapiens
cttggcaattagcat

SEQ ID NO: 926244 - DNA, 15 bp, Homo sapiens
ttggcaattagcatt

SEQ ID NO: 926245 - DNA, 15 bp, Homo sapiens
tggcaattagcattt

SEQ ID NO: 926246 - DNA, 15 bp, Homo sapiens
ggcaattagcatttg

SEQ ID NO: 926247 - DNA, 15 bp, Homo sapiens
gcaattagcatttgg

SEQ ID NO: 926248 - DNA, 15 bp, Homo sapiens
caattagcatttggc

SEQ ID NO: 926249 - DNA, 15 bp, Homo sapiens
aattagcatttggct

SEQ ID NO: 926250 - DNA, 15 bp, Homo sapiens
attagcatttggctc

SEQ ID NO: 926251 - DNA, 15 bp, Homo sapiens
ttagcatttggctcc

SEQ ID NO: 926252 - DNA, 15 bp, Homo sapiens
tagcatttggctcct

SEQ ID NO: 926253 - DNA, 15 bp, Homo sapiens
agcatttggctcctt

SEQ ID NO: 926254 - DNA, 15 bp, Homo sapiens
gcatttggctccttg

SEQ ID NO: 926255 - DNA, 15 bp, Homo sapiens
catttggctccttgt

SEQ ID NO: 926256 - DNA, 15 bp, Homo sapiens
atttggctccttgtt

SEQ ID NO: 926257 - DNA, 15 bp, Homo sapiens
tttggctccttgtta

SEQ ID NO: 926258 - DNA, 15 bp, Homo sapiens
ttggctccttgttac

SEQ ID NO: 926259 - DNA, 15 bp, Homo sapiens
tggctccttgttact

SEQ ID NO: 926260 - DNA, 15 bp, Homo sapiens
ggctccttgttactc

SEQ ID NO: 926261 - DNA, 15 bp, Homo sapiens
gctccttgttactca

SEQ ID NO: 926262 - DNA, 15 bp, Homo sapiens
ctccttgttactcat

SEQ ID NO: 926263 - DNA, 15 bp, Homo sapiens
tccttgttactcatg

SEQ ID NO: 926264 - DNA, 15 bp, Homo sapiens
ccttgttactcatgc

SEQ ID NO: 926265 - DNA, 15 bp, Homo sapiens
cttgttactcatgca

SEQ ID NO: 926266 - DNA, 15 bp, Homo sapiens
ttgttactcatgcaa

SEQ ID NO: 926267 - DNA, 15 bp, Homo sapiens
tgttactcatgcaaa

SEQ ID NO: 926268 - DNA, 15 bp, Homo sapiens
gttactcatgcaaac

SEQ ID NO: 926269 - DNA, 15 bp, Homo sapiens
ttactcatgcaaact

SEQ ID NO: 926270 - DNA, 15 bp, Homo sapiens
tactcatgcaaactt

SEQ ID NO: 926271 - DNA, 15 bp, Homo sapiens
actcatgcaaacttc

SEQ ID NO: 926272 - DNA, 15 bp, Homo sapiens
ctcatgcaaacttct

SEQ ID NO: 926273 - DNA, 15 bp, Homo sapiens
tcatgcaaacttcta

SEQ ID NO: 926274 - DNA, 15 bp, Homo sapiens
catgcaaacttctac

SEQ ID NO: 926275 - DNA, 15 bp, Homo sapiens
atgcaaacttctact

SEQ ID NO: 926276 - DNA, 15 bp, Homo sapiens
tgcaaacttctacta

SEQ ID NO: 926277 - DNA, 15 bp, Homo sapiens
gcaaacttctactac

SEQ ID NO: 926278 - DNA, 15 bp, Homo sapiens
caaacttctactact

SEQ ID NO: 926279 - DNA, 15 bp, Homo sapiens
aaacttctactactg

SEQ ID NO: 926280 - DNA, 15 bp, Homo sapiens
aacttctactactgg

SEQ ID NO: 926281 - DNA, 15 bp, Homo sapiens
acttctactactggc

SEQ ID NO: 926282 - DNA, 15 bp, Homo sapiens
cttctactactggct

SEQ ID NO: 926283 - DNA, 15 bp, Homo sapiens
ttctactactggctt

SEQ ID NO: 926284 - DNA, 15 bp, Homo sapiens
tctactactggcttg

SEQ ID NO: 926285 - DNA, 15 bp, Homo sapiens
ctactactggcttga

SEQ ID NO: 926286 - DNA, 15 bp, Homo sapiens
tactactggcttgaa

SEQ ID NO: 926287 - DNA, 15 bp, Homo sapiens
actactggcttgaat

SEQ ID NO: 926288 - DNA, 15 bp, Homo sapiens
ctactggcttgaatt

SEQ ID NO: 926289 - DNA, 15 bp, Homo sapiens
tactggcttgaattt

SEQ ID NO: 926290 - DNA, 15 bp, Homo sapiens
actggcttgaatttc

SEQ ID NO: 926291 - DNA, 15 bp, Homo sapiens
ctggcttgaatttct

SEQ ID NO: 926292 - DNA, 15 bp, Homo sapiens
tggcttgaatttctt

SEQ ID NO: 926293 - DNA, 15 bp, Homo sapiens
ggcttgaatttcttc

SEQ ID NO: 926294 - DNA, 15 bp, Homo sapiens
gcttgaatttcttcc

SEQ ID NO: 926295 - DNA, 15 bp, Homo sapiens
cttgaatttcttccc

SEQ ID NO: 926296 - DNA, 15 bp, Homo sapiens
ttgaatttcttccca

SEQ ID NO: 926297 - DNA, 15 bp, Homo sapiens
tgaatttcttcccag

SEQ ID NO: 926298 - DNA, 15 bp, Homo sapiens
gaatttcttcccaga

SEQ ID NO: 926299 - DNA, 15 bp, Homo sapiens
aatttcttcccagaa

SEQ ID NO: 926300 - DNA, 15 bp, Homo sapiens
atttcttcccagaat

SEQ ID NO: 926301 - DNA, 15 bp, Homo sapiens
tttcttcccagaata

SEQ ID NO: 926302 - DNA, 15 bp, Homo sapiens
ttcttcccagaatat

SEQ ID NO: 926303 - DNA, 15 bp, Homo sapiens
tcttcccagaatata

SEQ ID NO: 926304 - DNA, 15 bp, Homo sapiens
cttcccagaatataa

SEQ ID NO: 926305 - DNA, 15 bp, Homo sapiens
ttcccagaatataag

SEQ ID NO: 926306 - DNA, 15 bp, Homo sapiens
tcccagaatataagt

SEQ ID NO: 926307 - DNA, 15 bp, Homo sapiens
cccagaatataagtt

SEQ ID NO: 926308 - DNA, 15 bp, Homo sapiens
ccagaatataagttt

SEQ ID NO: 926309 - DNA, 15 bp, Homo sapiens
cagaatataagtttt

SEQ ID NO: 926310 - DNA, 15 bp, Homo sapiens
agaatataagttttt

SEQ ID NO: 926311 - DNA, 15 bp, Homo sapiens
gaatataagtttttc

SEQ ID NO: 926312 - DNA, 15 bp, Homo sapiens
aatataagtttttct

SEQ ID NO: 926313 - DNA, 15 bp, Homo sapiens
atataagtttttctt

SEQ ID NO: 926314 - DNA, 15 bp, Homo sapiens
tataagtttttcttt

SEQ ID NO: 926315 - DNA, 15 bp, Homo sapiens
ataagtttttctttt

SEQ ID NO: 926316 - DNA, 15 bp, Homo sapiens
taagtttttcttttc

SEQ ID NO: 926317 - DNA, 15 bp, Homo sapiens
aagtttttcttttct

SEQ ID NO: 926318 - DNA, 15 bp, Homo sapiens
agtttttcttttcta

SEQ ID NO: 926319 - DNA, 15 bp, Homo sapiens
gtttttcttttctat

SEQ ID NO: 926320 - DNA, 15 bp, Homo sapiens
tttttcttttctatc

SEQ ID NO: 926321 - DNA, 15 bp, Homo sapiens
ttttcttttctatca

SEQ ID NO: 926322 - DNA, 15 bp, Homo sapiens
tttcttttctatcac

SEQ ID NO: 926323 - DNA, 15 bp, Homo sapiens
ttcttttctatcaca

SEQ ID NO: 926324 - DNA, 15 bp, Homo sapiens
tcttttctatcacat

SEQ ID NO: 926325 - DNA, 15 bp, Homo sapiens
cttttctatcacatc

SEQ ID NO: 926326 - DNA, 15 bp, Homo sapiens
ttttctatcacatca

SEQ ID NO: 926327 - DNA, 15 bp, Homo sapiens
tttctatcacatcat

SEQ ID NO: 926328 - DNA, 15 bp, Homo sapiens
ttctatcacatcatt

SEQ ID NO: 926329 - DNA, 15 bp, Homo sapiens
tctatcacatcatta

SEQ ID NO: 926330 - DNA, 15 bp, Homo sapiens
ctatcacatcattag

SEQ ID NO: 926331 - DNA, 15 bp, Homo sapiens
tatcacatcattaga

SEQ ID NO: 926332 - DNA, 15 bp, Homo sapiens
atcacatcattagac

SEQ ID NO: 926333 - DNA, 15 bp, Homo sapiens
tcacatcattagact

SEQ ID NO: 926334 - DNA, 15 bp, Homo sapiens
cacatcattagactg

SEQ ID NO: 926335 - DNA, 15 bp, Homo sapiens
acatcattagactgc

SEQ ID NO: 926336 - DNA, 15 bp, Homo sapiens
catcattagactgca

SEQ ID NO: 926337 - DNA, 15 bp, Homo sapiens
atcattagactgcaa

SEQ ID NO: 926338 - DNA, 15 bp, Homo sapiens
tcattagactgcaaa

SEQ ID NO: 926339 - DNA, 15 bp, Homo sapiens
cattagactgcaaat

SEQ ID NO: 926340 - DNA, 15 bp, Homo sapiens
attagactgcaaatt

SEQ ID NO: 926341 - DNA, 15 bp, Homo sapiens
ttagactgcaaattt

SEQ ID NO: 926342 - DNA, 15 bp, Homo sapiens
tagactgcaaatttt

SEQ ID NO: 926343 - DNA, 15 bp, Homo sapiens
agactgcaaattttt

SEQ ID NO: 926344 - DNA, 15 bp, Homo sapiens
gactgcaaatttttc

SEQ ID NO: 926345 - DNA, 15 bp, Homo sapiens
actgcaaatttttca

SEQ ID NO: 926346 - DNA, 15 bp, Homo sapiens
ctgcaaatttttcaa

SEQ ID NO: 926347 - DNA, 15 bp, Homo sapiens
tgcaaatttttcaaa

SEQ ID NO: 926348 - DNA, 15 bp, Homo sapiens
gcaaatttttcaaat

SEQ ID NO: 926349 - DNA, 15 bp, Homo sapiens
caaatttttcaaatt

SEQ ID NO: 926350 - DNA, 15 bp, Homo sapiens
aaatttttcaaattt

SEQ ID NO: 926351 - DNA, 15 bp, Homo sapiens
aatttttcaaatttt

SEQ ID NO: 926352 - DNA, 15 bp, Homo sapiens
atttttcaaattttt

SEQ ID NO: 926353 - DNA, 15 bp, Homo sapiens
tttttcaaattttta

SEQ ID NO: 926354 - DNA, 15 bp, Homo sapiens
ttttcaaatttttat

SEQ ID NO: 926355 - DNA, 15 bp, Homo sapiens
tttcaaatttttatg

SEQ ID NO: 926356 - DNA, 15 bp, Homo sapiens
ttcaaatttttatgc

SEQ ID NO: 926357 - DNA, 15 bp, Homo sapiens
tcaaatttttatgct

SEQ ID NO: 926358 - DNA, 15 bp, Homo sapiens
caaatttttatgctc

SEQ ID NO: 926359 - DNA, 15 bp, Homo sapiens
aaatttttatgctct

SEQ ID NO: 926360 - DNA, 15 bp, Homo sapiens
aatttttatgctctt

SEQ ID NO: 926361 - DNA, 15 bp, Homo sapiens
atttttatgctcttc

SEQ ID NO: 926362 - DNA, 15 bp, Homo sapiens
tttttatgctcttct

SEQ ID NO: 926363 - DNA, 15 bp, Homo sapiens
ttttatgctcttctt

SEQ ID NO: 926364 - DNA, 15 bp, Homo sapiens
tttatgctcttcttc

SEQ ID NO: 926365 - DNA, 15 bp, Homo sapiens
ttatgctcttcttcc

SEQ ID NO: 926366 - DNA, 15 bp, Homo sapiens
tatgctcttcttcct

SEQ ID NO: 926367 - DNA, 15 bp, Homo sapiens
atgctcttcttcctg

SEQ ID NO: 926368 - DNA, 15 bp, Homo sapiens
tgctcttcttcctgt

SEQ ID NO: 926369 - DNA, 15 bp, Homo sapiens
gctcttcttcctgtt

SEQ ID NO: 926370 - DNA, 15 bp, Homo sapiens
ctcttcttcctgttg

SEQ ID NO: 926371 - DNA, 15 bp, Homo sapiens
tcttcttcctgttga

SEQ ID NO: 926372 - DNA, 15 bp, Homo sapiens
cttcttcctgttgaa

SEQ ID NO: 926373 - DNA, 15 bp, Homo sapiens
ttcttcctgttgaac

SEQ ID NO: 926374 - DNA, 15 bp, Homo sapiens
tcttcctgttgaaca

SEQ ID NO: 926375 - DNA, 15 bp, Homo sapiens
cttcctgttgaacac

SEQ ID NO: 926376 - DNA, 15 bp, Homo sapiens
ttcctgttgaacact

SEQ ID NO: 926377 - DNA, 15 bp, Homo sapiens
tcctgttgaacactt

SEQ ID NO: 926378 - DNA, 15 bp, Homo sapiens
cctgttgaacacttt

SEQ ID NO: 926379 - DNA, 15 bp, Homo sapiens
ctgttgaacactttg

SEQ ID NO: 926380 - DNA, 15 bp, Homo sapiens
tgttgaacactttgc

SEQ ID NO: 926381 - DNA, 15 bp, Homo sapiens
gttgaacactttgct

SEQ ID NO: 926382 - DNA, 15 bp, Homo sapiens
ttgaacactttgctg

SEQ ID NO: 926383 - DNA, 15 bp, Homo sapiens
tgaacactttgctgc

SEQ ID NO: 926384 - DNA, 15 bp, Homo sapiens
gaacactttgctgct

SEQ ID NO: 926385 - DNA, 15 bp, Homo sapiens
aacactttgctgctt

SEQ ID NO: 926386 - DNA, 15 bp, Homo sapiens
acactttgctgctta

SEQ ID NO: 926387 - DNA, 15 bp, Homo sapiens
cactttgctgcttag

SEQ ID NO: 926388 - DNA, 15 bp, Homo sapiens
actttgctgcttaga

SEQ ID NO: 926389 - DNA, 15 bp, Homo sapiens
ctttgctgcttagaa

SEQ ID NO: 926390 - DNA, 15 bp, Homo sapiens
tttgctgcttagaaa

SEQ ID NO: 926391 - DNA, 15 bp, Homo sapiens
ttgctgcttagaaat

SEQ ID NO: 926392 - DNA, 15 bp, Homo sapiens
tgctgcttagaaatt

SEQ ID NO: 926393 - DNA, 15 bp, Homo sapiens
gctgcttagaaattt

SEQ ID NO: 926394 - DNA, 15 bp, Homo sapiens
ctgcttagaaatttc

SEQ ID NO: 926395 - DNA, 15 bp, Homo sapiens
tgcttagaaatttct

SEQ ID NO: 926396 - DNA, 15 bp, Homo sapiens
gcttagaaatttctt

SEQ ID NO: 926397 - DNA, 15 bp, Homo sapiens
cttagaaatttcttc

SEQ ID NO: 926398 - DNA, 15 bp, Homo sapiens
ttagaaatttcttct

SEQ ID NO: 926399 - DNA, 15 bp, Homo sapiens
tagaaatttcttctg

SEQ ID NO: 926400 - DNA, 15 bp, Homo sapiens
agaaatttcttctgc

SEQ ID NO: 926401 - DNA, 15 bp, Homo sapiens
gaaatttcttctgcc

SEQ ID NO: 926402 - DNA, 15 bp, Homo sapiens
aaatttcttctgcca

SEQ ID NO: 926403 - DNA, 15 bp, Homo sapiens
aatttcttctgccag

SEQ ID NO: 926404 - DNA, 15 bp, Homo sapiens
atttcttctgccaga

SEQ ID NO: 926405 - DNA, 15 bp, Homo sapiens
tttcttctgccagat

SEQ ID NO: 926406 - DNA, 15 bp, Homo sapiens
ttcttctgccagata

SEQ ID NO: 926407 - DNA, 15 bp, Homo sapiens
tcttctgccagatac

SEQ ID NO: 926408 - DNA, 15 bp, Homo sapiens
cttctgccagatacc

SEQ ID NO: 926409 - DNA, 15 bp, Homo sapiens
ttctgccagatacct

SEQ ID NO: 926410 - DNA, 15 bp, Homo sapiens
tctgccagatacctt

SEQ ID NO: 926411 - DNA, 15 bp, Homo sapiens
ctgccagatacctta

SEQ ID NO: 926412 - DNA, 15 bp, Homo sapiens
tgccagataccttaa

SEQ ID NO: 926413 - DNA, 15 bp, Homo sapiens
gccagataccttaaa

SEQ ID NO: 926414 - DNA, 15 bp, Homo sapiens
ccagataccttaaat

SEQ ID NO: 926415 - DNA, 15 bp, Homo sapiens
cagataccttaaatc

SEQ ID NO: 926416 - DNA, 15 bp, Homo sapiens
agataccttaaatca

SEQ ID NO: 926417 - DNA, 15 bp, Homo sapiens
gataccttaaatcat

SEQ ID NO: 926418 - DNA, 15 bp, Homo sapiens
ataccttaaatcata

SEQ ID NO: 926419 - DNA, 15 bp, Homo sapiens
taccttaaatcatat

SEQ ID NO: 926420 - DNA, 15 bp, Homo sapiens
accttaaatcatatc

SEQ ID NO: 926421 - DNA, 15 bp, Homo sapiens
ccttaaatcatatct

SEQ ID NO: 926422 - DNA, 15 bp, Homo sapiens
cttaaatcatatctc

SEQ ID NO: 926423 - DNA, 15 bp, Homo sapiens
ttaaatcatatctct

SEQ ID NO: 926424 - DNA, 15 bp, Homo sapiens
taaatcatatctctc

SEQ ID NO: 926425 - DNA, 15 bp, Homo sapiens
aaatcatatctctca

SEQ ID NO: 926426 - DNA, 15 bp, Homo sapiens
aatcatatctctcaa

SEQ ID NO: 926427 - DNA, 15 bp, Homo sapiens
atcatatctctcaag

SEQ ID NO: 926428 - DNA, 15 bp, Homo sapiens
tcatatctctcaagt

SEQ ID NO: 926429 - DNA, 15 bp, Homo sapiens
catatctctcaagtt

SEQ ID NO: 926430 - DNA, 15 bp, Homo sapiens
atatctctcaagttc

SEQ ID NO: 926431 - DNA, 15 bp, Homo sapiens
tatctctcaagttca

SEQ ID NO: 926432 - DNA, 15 bp, Homo sapiens
atctctcaagttcaa

SEQ ID NO: 926433 - DNA, 15 bp, Homo sapiens
tctctcaagttcaaa

SEQ ID NO: 926434 - DNA, 15 bp, Homo sapiens
ctctcaagttcaaag

SEQ ID NO: 926435 - DNA, 15 bp, Homo sapiens
tctcaagttcaaagt

SEQ ID NO: 926436 - DNA, 15 bp, Homo sapiens
ctcaagttcaaagtt

SEQ ID NO: 926437 - DNA, 15 bp, Homo sapiens
tcaagttcaaagtta

SEQ ID NO: 926438 - DNA, 15 bp, Homo sapiens
caagttcaaagttac

SEQ ID NO: 926439 - DNA, 15 bp, Homo sapiens
aagttcaaagttaca

SEQ ID NO: 926440 - DNA, 15 bp, Homo sapiens
agttcaaagttacac

SEQ ID NO: 926441 - DNA, 15 bp, Homo sapiens
gttcaaagttacaca

SEQ ID NO: 926442 - DNA, 15 bp, Homo sapiens
ttcaaagttacacag

SEQ ID NO: 926443 - DNA, 15 bp, Homo sapiens
tcaaagttacacaga

SEQ ID NO: 926444 - DNA, 15 bp, Homo sapiens
caaagttacacagat

SEQ ID NO: 926445 - DNA, 15 bp, Homo sapiens
aaagttacacagatc

SEQ ID NO: 926446 - DNA, 15 bp, Homo sapiens
aagttacacagatct

SEQ ID NO: 926447 - DNA, 15 bp, Homo sapiens
agttacacagatctc

SEQ ID NO: 926448 - DNA, 15 bp, Homo sapiens
gttacacagatctct

SEQ ID NO: 926449 - DNA, 15 bp, Homo sapiens
ttacacagatctcta

SEQ ID NO: 926450 - DNA, 15 bp, Homo sapiens
tacacagatctctag

SEQ ID NO: 926451 - DNA, 15 bp, Homo sapiens
acacagatctctagg

SEQ ID NO: 926452 - DNA, 15 bp, Homo sapiens
cacagatctctaggg

SEQ ID NO: 926453 - DNA, 15 bp, Homo sapiens
acagatctctagggc

SEQ ID NO: 926454 - DNA, 15 bp, Homo sapiens
cagatctctagggca

SEQ ID NO: 926455 - DNA, 15 bp, Homo sapiens
agatctctagggcag

SEQ ID NO: 926456 - DNA, 15 bp, Homo sapiens
gatctctagggcagg

SEQ ID NO: 926457 - DNA, 15 bp, Homo sapiens
atctctagggcaggg

SEQ ID NO: 926458 - DNA, 15 bp, Homo sapiens
tctctagggcagggg

SEQ ID NO: 926459 - DNA, 15 bp, Homo sapiens
ctctagggcaggggc

SEQ ID NO: 926460 - DNA, 15 bp, Homo sapiens
tctagggcaggggca

SEQ ID NO: 926461 - DNA, 15 bp, Homo sapiens
ctagggcaggggcaa

SEQ ID NO: 926462 - DNA, 15 bp, Homo sapiens
tagggcaggggcaaa

SEQ ID NO: 926463 - DNA, 15 bp, Homo sapiens
agggcaggggcaaaa

SEQ ID NO: 926464 - DNA, 15 bp, Homo sapiens
gggcaggggcaaaat

SEQ ID NO: 926465 - DNA, 15 bp, Homo sapiens
ggcaggggcaaaatg

SEQ ID NO: 926466 - DNA, 15 bp, Homo sapiens
gcaggggcaaaatgc

SEQ ID NO: 926467 - DNA, 15 bp, Homo sapiens
caggggcaaaatgcc

SEQ ID NO: 926468 - DNA, 15 bp, Homo sapiens
aggggcaaaatgccg

SEQ ID NO: 926469 - DNA, 15 bp, Homo sapiens
ggggcaaaatgccgc

SEQ ID NO: 926470 - DNA, 15 bp, Homo sapiens
gggcaaaatgccgct

SEQ ID NO: 926471 - DNA, 15 bp, Homo sapiens
ggcaaaatgccgcta

SEQ ID NO: 926472 - DNA, 15 bp, Homo sapiens
gcaaaatgccgctag

SEQ ID NO: 926473 - DNA, 15 bp, Homo sapiens
caaaatgccgctagt

SEQ ID NO: 926474 - DNA, 15 bp, Homo sapiens
aaaatgccgctagtc

SEQ ID NO: 926475 - DNA, 15 bp, Homo sapiens
aaatgccgctagtct

SEQ ID NO: 926476 - DNA, 15 bp, Homo sapiens
aatgccgctagtctc

SEQ ID NO: 926477 - DNA, 15 bp, Homo sapiens
atgccgctagtctct

SEQ ID NO: 926478 - DNA, 15 bp, Homo sapiens
tgccgctagtctctt

SEQ ID NO: 926479 - DNA, 15 bp, Homo sapiens
gccgctagtctcttt

SEQ ID NO: 926480 - DNA, 15 bp, Homo sapiens
ccgctagtctctttg

SEQ ID NO: 926481 - DNA, 15 bp, Homo sapiens
cgctagtctctttgc

SEQ ID NO: 926482 - DNA, 15 bp, Homo sapiens
gctagtctctttgca

SEQ ID NO: 926483 - DNA, 15 bp, Homo sapiens
ctagtctctttgcat

SEQ ID NO: 926484 - DNA, 15 bp, Homo sapiens
tagtctctttgcata

SEQ ID NO: 926485 - DNA, 15 bp, Homo sapiens
agtctctttgcatac

SEQ ID NO: 926486 - DNA, 15 bp, Homo sapiens
gtctctttgcataca

SEQ ID NO: 926487 - DNA, 15 bp, Homo sapiens
tctctttgcatacaa

SEQ ID NO: 926488 - DNA, 15 bp, Homo sapiens
ctctttgcatacaag

SEQ ID NO: 926489 - DNA, 15 bp, Homo sapiens
tctttgcatacaaga

SEQ ID NO: 926490 - DNA, 15 bp, Homo sapiens
ctttgcatacaagag

SEQ ID NO: 926491 - DNA, 15 bp, Homo sapiens
tttgcatacaagagt

SEQ ID NO: 926492 - DNA, 15 bp, Homo sapiens
ttgcatacaagagtg

SEQ ID NO: 926493 - DNA, 15 bp, Homo sapiens
tgcatacaagagtga

SEQ ID NO: 926494 - DNA, 15 bp, Homo sapiens
gcatacaagagtgac

SEQ ID NO: 926495 - DNA, 15 bp, Homo sapiens
catacaagagtgacc

SEQ ID NO: 926496 - DNA, 15 bp, Homo sapiens
atacaagagtgacct

SEQ ID NO: 926497 - DNA, 15 bp, Homo sapiens
tacaagagtgacctt

SEQ ID NO: 926498 - DNA, 15 bp, Homo sapiens
acaagagtgaccttt

SEQ ID NO: 926499 - DNA, 15 bp, Homo sapiens
caagagtgaccttta

SEQ ID NO: 926500 - DNA, 15 bp, Homo sapiens
aagagtgacctttac

SEQ ID NO: 926501 - DNA, 15 bp, Homo sapiens
agagtgacctttact

SEQ ID NO: 926502 - DNA, 15 bp, Homo sapiens
gagtgacctttactc

SEQ ID NO: 926503 - DNA, 15 bp, Homo sapiens
agtgacctttactcc

SEQ ID NO: 926504 - DNA, 15 bp, Homo sapiens
gtgacctttactcca

SEQ ID NO: 926505 - DNA, 15 bp, Homo sapiens
tgacctttactccag

SEQ ID NO: 926506 - DNA, 15 bp, Homo sapiens
gacctttactccagt

SEQ ID NO: 926507 - DNA, 15 bp, Homo sapiens
acctttactccagtt

SEQ ID NO: 926508 - DNA, 15 bp, Homo sapiens
cctttactccagttc

SEQ ID NO: 926509 - DNA, 15 bp, Homo sapiens
ctttactccagttcc

SEQ ID NO: 926510 - DNA, 15 bp, Homo sapiens
tttactccagttcct

SEQ ID NO: 926511 - DNA, 15 bp, Homo sapiens
ttactccagttccta

SEQ ID NO: 926512 - DNA, 15 bp, Homo sapiens
tactccagttcctaa

SEQ ID NO: 926513 - DNA, 15 bp, Homo sapiens
actccagttcctaac

SEQ ID NO: 926514 - DNA, 15 bp, Homo sapiens
ctccagttcctaaca

SEQ ID NO: 926515 - DNA, 15 bp, Homo sapiens
tccagttcctaacaa

SEQ ID NO: 926516 - DNA, 15 bp, Homo sapiens
ccagttcctaacaag

SEQ ID NO: 926517 - DNA, 15 bp, Homo sapiens
cagttcctaacaagt

SEQ ID NO: 926518 - DNA, 15 bp, Homo sapiens
agttcctaacaagtt

SEQ ID NO: 926519 - DNA, 15 bp, Homo sapiens
gttcctaacaagttc

SEQ ID NO: 926520 - DNA, 15 bp, Homo sapiens
ttcctaacaagttcc

SEQ ID NO: 926521 - DNA, 15 bp, Homo sapiens
tcctaacaagttcct

SEQ ID NO: 926522 - DNA, 15 bp, Homo sapiens
cctaacaagttcctc

SEQ ID NO: 926523 - DNA, 15 bp, Homo sapiens
ctaacaagttcctca

SEQ ID NO: 926524 - DNA, 15 bp, Homo sapiens
taacaagttcctcat

SEQ ID NO: 926525 - DNA, 15 bp, Homo sapiens
aacaagttcctcatc

SEQ ID NO: 926526 - DNA, 15 bp, Homo sapiens
acaagttcctcatct

SEQ ID NO: 926527 - DNA, 15 bp, Homo sapiens
caagttcctcatctc

SEQ ID NO: 926528 - DNA, 15 bp, Homo sapiens
aagttcctcatctcc

SEQ ID NO: 926529 - DNA, 15 bp, Homo sapiens
agttcctcatctcca

SEQ ID NO: 926530 - DNA, 15 bp, Homo sapiens
gttcctcatctccat

SEQ ID NO: 926531 - DNA, 15 bp, Homo sapiens
ttcctcatctccatc

SEQ ID NO: 926532 - DNA, 15 bp, Homo sapiens
tcctcatctccatct

SEQ ID NO: 926533 - DNA, 15 bp, Homo sapiens
cctcatctccatctg

SEQ ID NO: 926534 - DNA, 15 bp, Homo sapiens
ctcatctccatctga

SEQ ID NO: 926535 - DNA, 15 bp, Homo sapiens
tcatctccatctgag

SEQ ID NO: 926536 - DNA, 15 bp, Homo sapiens
catctccatctgaga

SEQ ID NO: 926537 - DNA, 15 bp, Homo sapiens
atctccatctgagac

SEQ ID NO: 926538 - DNA, 15 bp, Homo sapiens
tctccatctgagact

SEQ ID NO: 926539 - DNA, 15 bp, Homo sapiens
ctccatctgagacta

SEQ ID NO: 926540 - DNA, 15 bp, Homo sapiens
tccatctgagactac

SEQ ID NO: 926541 - DNA, 15 bp, Homo sapiens
ccatctgagactacc

SEQ ID NO: 926542 - DNA, 15 bp, Homo sapiens
catctgagactacct

SEQ ID NO: 926543 - DNA, 15 bp, Homo sapiens
atctgagactacctt

SEQ ID NO: 926544 - DNA, 15 bp, Homo sapiens
tctgagactaccttg

SEQ ID NO: 926545 - DNA, 15 bp, Homo sapiens
ctgagactaccttgg

SEQ ID NO: 926546 - DNA, 15 bp, Homo sapiens
tgagactaccttggc

SEQ ID NO: 926547 - DNA, 15 bp, Homo sapiens
gagactaccttggcc

SEQ ID NO: 926548 - DNA, 15 bp, Homo sapiens
agactaccttggcct

SEQ ID NO: 926549 - DNA, 15 bp, Homo sapiens
gactaccttggcctg

SEQ ID NO: 926550 - DNA, 15 bp, Homo sapiens
actaccttggcctgg

SEQ ID NO: 926551 - DNA, 15 bp, Homo sapiens
ctaccttggcctgga

SEQ ID NO: 926552 - DNA, 15 bp, Homo sapiens
taccttggcctggac

SEQ ID NO: 926553 - DNA, 15 bp, Homo sapiens
accttggcctggact

SEQ ID NO: 926554 - DNA, 15 bp, Homo sapiens
ccttggcctggactt

SEQ ID NO: 926555 - DNA, 15 bp, Homo sapiens
cttggcctggacttt

SEQ ID NO: 926556 - DNA, 15 bp, Homo sapiens
ttggcctggacttta

SEQ ID NO: 926557 - DNA, 15 bp, Homo sapiens
tggcctggactttat

SEQ ID NO: 926558 - DNA, 15 bp, Homo sapiens
ggcctggactttatt

SEQ ID NO: 926559 - DNA, 15 bp, Homo sapiens
gcctggactttattg

SEQ ID NO: 926560 - DNA, 15 bp, Homo sapiens
cctggactttattgt

SEQ ID NO: 926561 - DNA, 15 bp, Homo sapiens
ctggactttattgtc

SEQ ID NO: 926562 - DNA, 15 bp, Homo sapiens
tggactttattgtcc

SEQ ID NO: 926563 - DNA, 15 bp, Homo sapiens
ggactttattgtcca

SEQ ID NO: 926564 - DNA, 15 bp, Homo sapiens
gactttattgtccat

SEQ ID NO: 926565 - DNA, 15 bp, Homo sapiens
actttattgtccata

SEQ ID NO: 926566 - DNA, 15 bp, Homo sapiens
ctttattgtccatat

SEQ ID NO: 926567 - DNA, 15 bp, Homo sapiens
tttattgtccatatc

SEQ ID NO: 926568 - DNA, 15 bp, Homo sapiens
ttattgtccatatca

SEQ ID NO: 926569 - DNA, 15 bp, Homo sapiens
tattgtccatatcac

SEQ ID NO: 926570 - DNA, 15 bp, Homo sapiens
attgtccatatcact

SEQ ID NO: 926571 - DNA, 15 bp, Homo sapiens
ttgtccatatcacta

SEQ ID NO: 926572 - DNA, 15 bp, Homo sapiens
tgtccatatcactat

SEQ ID NO: 926573 - DNA, 15 bp, Homo sapiens
gtccatatcactatc

SEQ ID NO: 926574 - DNA, 15 bp, Homo sapiens
tccatatcactatca

SEQ ID NO: 926575 - DNA, 15 bp, Homo sapiens
ccatatcactatcac

SEQ ID NO: 926576 - DNA, 15 bp, Homo sapiens
catatcactatcaca

SEQ ID NO: 926577 - DNA, 15 bp, Homo sapiens
atatcactatcacaa

SEQ ID NO: 926578 - DNA, 15 bp, Homo sapiens
tatcactatcacaat

SEQ ID NO: 926579 - DNA, 15 bp, Homo sapiens
atcactatcacaatt

SEQ ID NO: 926580 - DNA, 15 bp, Homo sapiens
tcactatcacaattc

SEQ ID NO: 926581 - DNA, 15 bp, Homo sapiens
cactatcacaattct

SEQ ID NO: 926582 - DNA, 15 bp, Homo sapiens
actatcacaattctg

SEQ ID NO: 926583 - DNA, 15 bp, Homo sapiens
ctatcacaattctgg

SEQ ID NO: 926584 - DNA, 15 bp, Homo sapiens
tatcacaattctggt

SEQ ID NO: 926585 - DNA, 15 bp, Homo sapiens
atcacaattctggtc

SEQ ID NO: 926586 - DNA, 15 bp, Homo sapiens
tcacaattctggtca

SEQ ID NO: 926587 - DNA, 15 bp, Homo sapiens
cacaattctggtcaa

SEQ ID NO: 926588 - DNA, 15 bp, Homo sapiens
acaattctggtcaaa

SEQ ID NO: 926589 - DNA, 15 bp, Homo sapiens
caattctggtcaaag

SEQ ID NO: 926590 - DNA, 15 bp, Homo sapiens
aattctggtcaaagc

SEQ ID NO: 926591 - DNA, 15 bp, Homo sapiens
attctggtcaaagcc

SEQ ID NO: 926592 - DNA, 15 bp, Homo sapiens
ttctggtcaaagcca

SEQ ID NO: 926593 - DNA, 15 bp, Homo sapiens
tctggtcaaagccat

SEQ ID NO: 926594 - DNA, 15 bp, Homo sapiens
ctggtcaaagccatt

SEQ ID NO: 926595 - DNA, 15 bp, Homo sapiens
tggtcaaagccattc

SEQ ID NO: 926596 - DNA, 15 bp, Homo sapiens
ggtcaaagccattca

SEQ ID NO: 926597 - DNA, 15 bp, Homo sapiens
gtcaaagccattcaa

SEQ ID NO: 926598 - DNA, 15 bp, Homo sapiens
tcaaagccattcaac

SEQ ID NO: 926599 - DNA, 15 bp, Homo sapiens
caaagccattcaaca

SEQ ID NO: 926600 - DNA, 15 bp, Homo sapiens
aaagccattcaacat

SEQ ID NO: 926601 - DNA, 15 bp, Homo sapiens
aagccattcaacatg

SEQ ID NO: 926602 - DNA, 15 bp, Homo sapiens
agccattcaacatgt

SEQ ID NO: 926603 - DNA, 15 bp, Homo sapiens
gccattcaacatgtc

SEQ ID NO: 926604 - DNA, 15 bp, Homo sapiens
ccattcaacatgtct

SEQ ID NO: 926605 - DNA, 15 bp, Homo sapiens
cattcaacatgtctc

SEQ ID NO: 926606 - DNA, 15 bp, Homo sapiens
attcaacatgtctct

SEQ ID NO: 926607 - DNA, 15 bp, Homo sapiens
ttcaacatgtctcta

SEQ ID NO: 926608 - DNA, 15 bp, Homo sapiens
tcaacatgtctctac

SEQ ID NO: 926609 - DNA, 15 bp, Homo sapiens
caacatgtctctaca

SEQ ID NO: 926610 - DNA, 15 bp, Homo sapiens
aacatgtctctacaa

SEQ ID NO: 926611 - DNA, 15 bp, Homo sapiens
acatgtctctacaaa

SEQ ID NO: 926612 - DNA, 15 bp, Homo sapiens
catgtctctacaaaa

SEQ ID NO: 926613 - DNA, 15 bp, Homo sapiens
atgtctctacaaaat

SEQ ID NO: 926614 - DNA, 15 bp, Homo sapiens
tgtctctacaaaatt

SEQ ID NO: 926615 - DNA, 15 bp, Homo sapiens
gtctctacaaaattt

SEQ ID NO: 926616 - DNA, 15 bp, Homo sapiens
tctctacaaaatttc

SEQ ID NO: 926617 - DNA, 15 bp, Homo sapiens
ctctacaaaatttca

SEQ ID NO: 926618 - DNA, 15 bp, Homo sapiens
tctacaaaatttcaa

SEQ ID NO: 926619 - DNA, 15 bp, Homo sapiens
ctacaaaatttcaaa

SEQ ID NO: 926620 - DNA, 15 bp, Homo sapiens
tacaaaatttcaaac

SEQ ID NO: 926621 - DNA, 15 bp, Homo sapiens
acaaaatttcaaact

SEQ ID NO: 926622 - DNA, 15 bp, Homo sapiens
caaaatttcaaactt

SEQ ID NO: 926623 - DNA, 15 bp, Homo sapiens
aaaatttcaaacttt

SEQ ID NO: 926624 - DNA, 15 bp, Homo sapiens
aaatttcaaactttc

SEQ ID NO: 926625 - DNA, 15 bp, Homo sapiens
aatttcaaactttcc

SEQ ID NO: 926626 - DNA, 15 bp, Homo sapiens
atttcaaactttccc

SEQ ID NO: 926627 - DNA, 15 bp, Homo sapiens
tttcaaactttccca

SEQ ID NO: 926628 - DNA, 15 bp, Homo sapiens
ttcaaactttcccat

SEQ ID NO: 926629 - DNA, 15 bp, Homo sapiens
tcaaactttcccatg

SEQ ID NO: 926630 - DNA, 15 bp, Homo sapiens
caaactttcccatgt

SEQ ID NO: 926631 - DNA, 15 bp, Homo sapiens
aaactttcccatgtc

SEQ ID NO: 926632 - DNA, 15 bp, Homo sapiens
aactttcccatgtct

SEQ ID NO: 926633 - DNA, 15 bp, Homo sapiens
actttcccatgtctt

SEQ ID NO: 926634 - DNA, 15 bp, Homo sapiens
ctttcccatgtcttc

SEQ ID NO: 926635 - DNA, 15 bp, Homo sapiens
tttcccatgtcttcc

SEQ ID NO: 926636 - DNA, 15 bp, Homo sapiens
ttcccatgtcttcct

SEQ ID NO: 926637 - DNA, 15 bp, Homo sapiens
tcccatgtcttcctg

SEQ ID NO: 926638 - DNA, 15 bp, Homo sapiens
cccatgtcttcctgt

SEQ ID NO: 926639 - DNA, 15 bp, Homo sapiens
ccatgtcttcctgtc

SEQ ID NO: 926640 - DNA, 15 bp, Homo sapiens
catgtcttcctgtct

SEQ ID NO: 926641 - DNA, 15 bp, Homo sapiens
atgtcttcctgtctt

SEQ ID NO: 926642 - DNA, 15 bp, Homo sapiens
tgtcttcctgtcttc

SEQ ID NO: 926643 - DNA, 15 bp, Homo sapiens
gtcttcctgtcttct

SEQ ID NO: 926644 - DNA, 15 bp, Homo sapiens
tcttcctgtcttctg

SEQ ID NO: 926645 - DNA, 15 bp, Homo sapiens
cttcctgtcttctga

SEQ ID NO: 926646 - DNA, 15 bp, Homo sapiens
ttcctgtcttctgag

SEQ ID NO: 926647 - DNA, 15 bp, Homo sapiens
tcctgtcttctgagc

SEQ ID NO: 926648 - DNA, 15 bp, Homo sapiens
cctgtcttctgagcc

SEQ ID NO: 926649 - DNA, 15 bp, Homo sapiens
ctgtcttctgagccc

SEQ ID NO: 926650 - DNA, 15 bp, Homo sapiens
tgtcttctgagccct

SEQ ID NO: 926651 - DNA, 15 bp, Homo sapiens
gtcttctgagccctc

SEQ ID NO: 926652 - DNA, 15 bp, Homo sapiens
tcttctgagccctcc

SEQ ID NO: 926653 - DNA, 15 bp, Homo sapiens
cttctgagccctcca

SEQ ID NO: 926654 - DNA, 15 bp, Homo sapiens
ttctgagccctccaa

SEQ ID NO: 926655 - DNA, 15 bp, Homo sapiens
tctgagccctccaag

SEQ ID NO: 926656 - DNA, 15 bp, Homo sapiens
ctgagccctccaagt

SEQ ID NO: 926657 - DNA, 15 bp, Homo sapiens
tgagccctccaagtc

SEQ ID NO: 926658 - DNA, 15 bp, Homo sapiens
gagccctccaagtct

SEQ ID NO: 926659 - DNA, 15 bp, Homo sapiens
agccctccaagtctc

SEQ ID NO: 926660 - DNA, 15 bp, Homo sapiens
gccctccaagtctct

SEQ ID NO: 926661 - DNA, 15 bp, Homo sapiens
ccctccaagtctcta

SEQ ID NO: 926662 - DNA, 15 bp, Homo sapiens
cctccaagtctctag

SEQ ID NO: 926663 - DNA, 15 bp, Homo sapiens
ctccaagtctctaga

SEQ ID NO: 926664 - DNA, 15 bp, Homo sapiens
tccaagtctctagaa

SEQ ID NO: 926665 - DNA, 15 bp, Homo sapiens
ccaagtctctagaaa

SEQ ID NO: 926666 - DNA, 15 bp, Homo sapiens
caagtctctagaaag

SEQ ID NO: 926667 - DNA, 15 bp, Homo sapiens
aagtctctagaaagt

SEQ ID NO: 926668 - DNA, 15 bp, Homo sapiens
agtctctagaaagtt

SEQ ID NO: 926669 - DNA, 15 bp, Homo sapiens
gtctctagaaagttc

SEQ ID NO: 926670 - DNA, 15 bp, Homo sapiens
tctctagaaagttcc

SEQ ID NO: 926671 - DNA, 15 bp, Homo sapiens
ctctagaaagttcca

SEQ ID NO: 926672 - DNA, 15 bp, Homo sapiens
tctagaaagttccaa

SEQ ID NO: 926673 - DNA, 15 bp, Homo sapiens
ctagaaagttccaaa

SEQ ID NO: 926674 - DNA, 15 bp, Homo sapiens
tagaaagttccaaac

SEQ ID NO: 926675 - DNA, 15 bp, Homo sapiens
agaaagttccaaact

SEQ ID NO: 926676 - DNA, 15 bp, Homo sapiens
gaaagttccaaactt

SEQ ID NO: 926677 - DNA, 15 bp, Homo sapiens
aaagttccaaacttt

SEQ ID NO: 926678 - DNA, 15 bp, Homo sapiens
aagttccaaactttc

SEQ ID NO: 926679 - DNA, 15 bp, Homo sapiens
agttccaaactttcc

SEQ ID NO: 926680 - DNA, 15 bp, Homo sapiens
gttccaaactttccc

SEQ ID NO: 926681 - DNA, 15 bp, Homo sapiens
ttccaaactttccca

SEQ ID NO: 926682 - DNA, 15 bp, Homo sapiens
tccaaactttcccac

SEQ ID NO: 926683 - DNA, 15 bp, Homo sapiens
ccaaactttcccaca

SEQ ID NO: 926684 - DNA, 15 bp, Homo sapiens
caaactttcccacat

SEQ ID NO: 926685 - DNA, 15 bp, Homo sapiens
aaactttcccacatt

SEQ ID NO: 926686 - DNA, 15 bp, Homo sapiens
aactttcccacattt

SEQ ID NO: 926687 - DNA, 15 bp, Homo sapiens
actttcccacatttc

SEQ ID NO: 926688 - DNA, 15 bp, Homo sapiens
ctttcccacatttcc

SEQ ID NO: 926689 - DNA, 15 bp, Homo sapiens
tttcccacatttcct

SEQ ID NO: 926690 - DNA, 15 bp, Homo sapiens
ttcccacatttccta

SEQ ID NO: 926691 - DNA, 15 bp, Homo sapiens
tcccacatttcctat

SEQ ID NO: 926692 - DNA, 15 bp, Homo sapiens
cccacatttcctata

SEQ ID NO: 926693 - DNA, 15 bp, Homo sapiens
ccacatttcctatat

SEQ ID NO: 926694 - DNA, 15 bp, Homo sapiens
cacatttcctatatt

SEQ ID NO: 926695 - DNA, 15 bp, Homo sapiens
acatttcctatattc

SEQ ID NO: 926696 - DNA, 15 bp, Homo sapiens
catttcctatattct

SEQ ID NO: 926697 - DNA, 15 bp, Homo sapiens
atttcctatattctg

SEQ ID NO: 926698 - DNA, 15 bp, Homo sapiens
tttcctatattctga

SEQ ID NO: 926699 - DNA, 15 bp, Homo sapiens
ttcctatattctgag

SEQ ID NO: 926700 - DNA, 15 bp, Homo sapiens
tcctatattctgagc

SEQ ID NO: 926701 - DNA, 15 bp, Homo sapiens
cctatattctgagcc

SEQ ID NO: 926702 - DNA, 15 bp, Homo sapiens
ctatattctgagccc

SEQ ID NO: 926703 - DNA, 15 bp, Homo sapiens
tatattctgagccct

SEQ ID NO: 926704 - DNA, 15 bp, Homo sapiens
atattctgagccctt

SEQ ID NO: 926705 - DNA, 15 bp, Homo sapiens
tattctgagcccttc

SEQ ID NO: 926706 - DNA, 15 bp, Homo sapiens
attctgagcccttca

SEQ ID NO: 926707 - DNA, 15 bp, Homo sapiens
ttctgagcccttcaa

SEQ ID NO: 926708 - DNA, 15 bp, Homo sapiens
tctgagcccttcaaa

SEQ ID NO: 926709 - DNA, 15 bp, Homo sapiens
ctgagcccttcaaat

SEQ ID NO: 926710 - DNA, 15 bp, Homo sapiens
tgagcccttcaaatg

SEQ ID NO: 926711 - DNA, 15 bp, Homo sapiens
gagcccttcaaatgg

SEQ ID NO: 926712 - DNA, 15 bp, Homo sapiens
agcccttcaaatggt

SEQ ID NO: 926713 - DNA, 15 bp, Homo sapiens
gcccttcaaatggtt

SEQ ID NO: 926714 - DNA, 15 bp, Homo sapiens
cccttcaaatggttc

SEQ ID NO: 926715 - DNA, 15 bp, Homo sapiens
ccttcaaatggttcc

SEQ ID NO: 926716 - DNA, 15 bp, Homo sapiens
cttcaaatggttccc

SEQ ID NO: 926717 - DNA, 15 bp, Homo sapiens
ttcaaatggttccca

SEQ ID NO: 926718 - DNA, 15 bp, Homo sapiens
tcaaatggttcccac

SEQ ID NO: 926719 - DNA, 15 bp, Homo sapiens
caaatggttcccacc

SEQ ID NO: 926720 - DNA, 15 bp, Homo sapiens
aaatggttcccacct

SEQ ID NO: 926721 - DNA, 15 bp, Homo sapiens
aatggttcccacctc

SEQ ID NO: 926722 - DNA, 15 bp, Homo sapiens
atggttcccacctct

SEQ ID NO: 926723 - DNA, 15 bp, Homo sapiens
tggttcccacctctg

SEQ ID NO: 926724 - DNA, 15 bp, Homo sapiens
ggttcccacctctgt

SEQ ID NO: 926725 - DNA, 15 bp, Homo sapiens
gttcccacctctgtc

SEQ ID NO: 926726 - DNA, 15 bp, Homo sapiens
ttcccacctctgtct

SEQ ID NO: 926727 - DNA, 15 bp, Homo sapiens
tcccacctctgtctg

SEQ ID NO: 926728 - DNA, 15 bp, Homo sapiens
cccacctctgtctgt

SEQ ID NO: 926729 - DNA, 15 bp, Homo sapiens
ccacctctgtctgtt

SEQ ID NO: 926730 - DNA, 15 bp, Homo sapiens
cacctctgtctgtta

SEQ ID NO: 926731 - DNA, 15 bp, Homo sapiens
acctctgtctgttac

SEQ ID NO: 926732 - DNA, 15 bp, Homo sapiens
cctctgtctgttacc

SEQ ID NO: 926733 - DNA, 15 bp, Homo sapiens
ctctgtctgttaccc

SEQ ID NO: 926734 - DNA, 15 bp, Homo sapiens
tctgtctgttaccca

SEQ ID NO: 926735 - DNA, 15 bp, Homo sapiens
ctgtctgttacccag

SEQ ID NO: 926736 - DNA, 15 bp, Homo sapiens
tgtctgttacccagt

SEQ ID NO: 926737 - DNA, 15 bp, Homo sapiens
gtctgttacccagtt

SEQ ID NO: 926738 - DNA, 15 bp, Homo sapiens
tctgttacccagttc

SEQ ID NO: 926739 - DNA, 15 bp, Homo sapiens
ctgttacccagttcc

SEQ ID NO: 926740 - DNA, 15 bp, Homo sapiens
tgttacccagttcca

SEQ ID NO: 926741 - DNA, 15 bp, Homo sapiens
gttacccagttccaa

SEQ ID NO: 926742 - DNA, 15 bp, Homo sapiens
ttacccagttccaaa

SEQ ID NO: 926743 - DNA, 15 bp, Homo sapiens
tacccagttccaaag

SEQ ID NO: 926744 - DNA, 15 bp, Homo sapiens
acccagttccaaagt

SEQ ID NO: 926745 - DNA, 15 bp, Homo sapiens
cccagttccaaagtc

SEQ ID NO: 926746 - DNA, 15 bp, Homo sapiens
ccagttccaaagtca

SEQ ID NO: 926747 - DNA, 15 bp, Homo sapiens
cagttccaaagtcac

SEQ ID NO: 926748 - DNA, 15 bp, Homo sapiens
agttccaaagtcact

SEQ ID NO: 926749 - DNA, 15 bp, Homo sapiens
gttccaaagtcactt

SEQ ID NO: 926750 - DNA, 15 bp, Homo sapiens
ttccaaagtcacttt

SEQ ID NO: 926751 - DNA, 15 bp, Homo sapiens
tccaaagtcactttc

SEQ ID NO: 926752 - DNA, 15 bp, Homo sapiens
ccaaagtcactttca

SEQ ID NO: 926753 - DNA, 15 bp, Homo sapiens
caaagtcactttcac

SEQ ID NO: 926754 - DNA, 15 bp, Homo sapiens
aaagtcactttcaca

SEQ ID NO: 926755 - DNA, 15 bp, Homo sapiens
aagtcactttcacat

SEQ ID NO: 926756 - DNA, 15 bp, Homo sapiens
agtcactttcacatt

SEQ ID NO: 926757 - DNA, 15 bp, Homo sapiens
gtcactttcacattt

SEQ ID NO: 926758 - DNA, 15 bp, Homo sapiens
tcactttcacatttt

SEQ ID NO: 926759 - DNA, 15 bp, Homo sapiens
cactttcacattttt

SEQ ID NO: 926760 - DNA, 15 bp, Homo sapiens
actttcacatttttg

SEQ ID NO: 926761 - DNA, 15 bp, Homo sapiens
ctttcacatttttgg

SEQ ID NO: 926762 - DNA, 15 bp, Homo sapiens
tttcacatttttggg

SEQ ID NO: 926763 - DNA, 15 bp, Homo sapiens
ttcacatttttgggt

SEQ ID NO: 926764 - DNA, 15 bp, Homo sapiens
tcacatttttgggta

SEQ ID NO: 926765 - DNA, 15 bp, Homo sapiens
cacatttttgggtat

SEQ ID NO: 926766 - DNA, 15 bp, Homo sapiens
acatttttgggtatc

SEQ ID NO: 926767 - DNA, 15 bp, Homo sapiens
catttttgggtatct

SEQ ID NO: 926768 - DNA, 15 bp, Homo sapiens
atttttgggtatctt

SEQ ID NO: 926769 - DNA, 15 bp, Homo sapiens
tttttgggtatcttt

SEQ ID NO: 926770 - DNA, 15 bp, Homo sapiens
ttttgggtatcttta

SEQ ID NO: 926771 - DNA, 15 bp, Homo sapiens
tttgggtatctttac

SEQ ID NO: 926772 - DNA, 15 bp, Homo sapiens
ttgggtatctttaca

SEQ ID NO: 926773 - DNA, 15 bp, Homo sapiens
tgggtatctttacag

SEQ ID NO: 926774 - DNA, 15 bp, Homo sapiens
gggtatctttacagc

SEQ ID NO: 926775 - DNA, 15 bp, Homo sapiens
ggtatctttacagca

SEQ ID NO: 926776 - DNA, 15 bp, Homo sapiens
gtatctttacagcag

SEQ ID NO: 926777 - DNA, 15 bp, Homo sapiens
tatctttacagcagc

SEQ ID NO: 926778 - DNA, 15 bp, Homo sapiens
atctttacagcagca

SEQ ID NO: 926779 - DNA, 15 bp, Homo sapiens
tctttacagcagcac

SEQ ID NO: 926780 - DNA, 15 bp, Homo sapiens
ctttacagcagcact

SEQ ID NO: 926781 - DNA, 15 bp, Homo sapiens
tttacagcagcactc

SEQ ID NO: 926782 - DNA, 15 bp, Homo sapiens
ttacagcagcactcc

SEQ ID NO: 926783 - DNA, 15 bp, Homo sapiens
tacagcagcactcca

SEQ ID NO: 926784 - DNA, 15 bp, Homo sapiens
acagcagcactccac

SEQ ID NO: 926785 - DNA, 15 bp, Homo sapiens
cagcagcactccact

SEQ ID NO: 926786 - DNA, 15 bp, Homo sapiens
agcagcactccactc

SEQ ID NO: 926787 - DNA, 15 bp, Homo sapiens
gcagcactccactct

SEQ ID NO: 926788 - DNA, 15 bp, Homo sapiens
cagcactccactctc

SEQ ID NO: 926789 - DNA, 15 bp, Homo sapiens
agcactccactctct

SEQ ID NO: 926790 - DNA, 15 bp, Homo sapiens
gcactccactctctg

SEQ ID NO: 926791 - DNA, 15 bp, Homo sapiens
cactccactctctgc

SEQ ID NO: 926792 - DNA, 15 bp, Homo sapiens
actccactctctgca

SEQ ID NO: 926793 - DNA, 15 bp, Homo sapiens
ctccactctctgcag

SEQ ID NO: 926794 - DNA, 15 bp, Homo sapiens
tccactctctgcagt

SEQ ID NO: 926795 - DNA, 15 bp, Homo sapiens
ccactctctgcagtc

SEQ ID NO: 926796 - DNA, 15 bp, Homo sapiens
cactctctgcagtcc

SEQ ID NO: 926797 - DNA, 15 bp, Homo sapiens
actctctgcagtccc

SEQ ID NO: 926798 - DNA, 15 bp, Homo sapiens
ctctctgcagtccca

SEQ ID NO: 926799 - DNA, 15 bp, Homo sapiens
tctctgcagtcccaa

SEQ ID NO: 926800 - DNA, 15 bp, Homo sapiens
ctctgcagtcccaat

SEQ ID NO: 926801 - DNA, 15 bp, Homo sapiens
tctgcagtcccaatt

SEQ ID NO: 926802 - DNA, 15 bp, Homo sapiens
ctgcagtcccaattt

SEQ ID NO: 926803 - DNA, 15 bp, Homo sapiens
tgcagtcccaattta

SEQ ID NO: 926804 - DNA, 15 bp, Homo sapiens
gcagtcccaatttac

SEQ ID NO: 926805 - DNA, 15 bp, Homo sapiens
cagtcccaatttact

SEQ ID NO: 926806 - DNA, 15 bp, Homo sapiens
agtcccaatttactg

SEQ ID NO: 926807 - DNA, 15 bp, Homo sapiens
gtcccaatttactgt

SEQ ID NO: 926808 - DNA, 15 bp, Homo sapiens
tcccaatttactgta

SEQ ID NO: 926809 - DNA, 15 bp, Homo sapiens
cccaatttactgtat

SEQ ID NO: 926810 - DNA, 15 bp, Homo sapiens
ccaatttactgtatt

SEQ ID NO: 926811 - DNA, 15 bp, Homo sapiens
caatttactgtatta

SEQ ID NO: 926812 - DNA, 15 bp, Homo sapiens
aatttactgtattag

SEQ ID NO: 926813 - DNA, 15 bp, Homo sapiens
atttactgtattagt

SEQ ID NO: 926814 - DNA, 15 bp, Homo sapiens
tttactgtattagtc

SEQ ID NO: 926815 - DNA, 15 bp, Homo sapiens
ttactgtattagtcc

SEQ ID NO: 926816 - DNA, 15 bp, Homo sapiens
tactgtattagtccg

SEQ ID NO: 926817 - DNA, 15 bp, Homo sapiens
actgtattagtccgt

SEQ ID NO: 926818 - DNA, 15 bp, Homo sapiens
ctgtattagtccgtt

SEQ ID NO: 926819 - DNA, 15 bp, Homo sapiens
tgtattagtccgttc

SEQ ID NO: 926820 - DNA, 15 bp, Homo sapiens
gtattagtccgttct

SEQ ID NO: 926821 - DNA, 15 bp, Homo sapiens
tattagtccgttctc

SEQ ID NO: 926822 - DNA, 15 bp, Homo sapiens
attagtccgttctca

SEQ ID NO: 926823 - DNA, 15 bp, Homo sapiens
ttagtccgttctcac

SEQ ID NO: 926824 - DNA, 15 bp, Homo sapiens
tagtccgttctcaca

SEQ ID NO: 926825 - DNA, 15 bp, Homo sapiens
agtccgttctcacac

SEQ ID NO: 926826 - DNA, 15 bp, Homo sapiens
gtccgttctcacact

SEQ ID NO: 926827 - DNA, 15 bp, Homo sapiens
tccgttctcacactg

SEQ ID NO: 926828 - DNA, 15 bp, Homo sapiens
ccgttctcacactgc

SEQ ID NO: 926829 - DNA, 15 bp, Homo sapiens
cgttctcacactgct

SEQ ID NO: 926830 - DNA, 15 bp, Homo sapiens
gttctcacactgcta

SEQ ID NO: 926831 - DNA, 15 bp, Homo sapiens
cacactgctaataag

SEQ ID NO: 926832 - DNA, 15 bp, Homo sapiens
acactgctaataagg

SEQ ID NO: 926833 - DNA, 15 bp, Homo sapiens
cactgctaataagga

SEQ ID NO: 926834 - DNA, 15 bp, Homo sapiens
actgctaataaggaa

SEQ ID NO: 926835 - DNA, 15 bp, Homo sapiens
ctgctaataaggaaa

SEQ ID NO: 926836 - DNA, 15 bp, Homo sapiens
tgctaataaggaaat

SEQ ID NO: 926837 - DNA, 15 bp, Homo sapiens
gctaataaggaaata

SEQ ID NO: 926838 - DNA, 15 bp, Homo sapiens
ctaataaggaaatac

SEQ ID NO: 926839 - DNA, 15 bp, Homo sapiens
taataaggaaatacc

SEQ ID NO: 926840 - DNA, 15 bp, Homo sapiens
aataaggaaatacct

SEQ ID NO: 926841 - DNA, 15 bp, Homo sapiens
ataaggaaatacctg

SEQ ID NO: 926842 - DNA, 15 bp, Homo sapiens
taaggaaatacctga

SEQ ID NO: 926843 - DNA, 15 bp, Homo sapiens
aaggaaatacctgag

SEQ ID NO: 926844 - DNA, 15 bp, Homo sapiens
aggaaatacctgaga

SEQ ID NO: 926845 - DNA, 15 bp, Homo sapiens
ggaaatacctgagac

SEQ ID NO: 926846 - DNA, 15 bp, Homo sapiens
gaaatacctgagact

SEQ ID NO: 926847 - DNA, 15 bp, Homo sapiens
aaatacctgagactg

SEQ ID NO: 926848 - DNA, 15 bp, Homo sapiens
aatacctgagactgg

SEQ ID NO: 926849 - DNA, 15 bp, Homo sapiens
atacctgagactggg

SEQ ID NO: 926850 - DNA, 15 bp, Homo sapiens
tacctgagactgggt

SEQ ID NO: 926851 - DNA, 15 bp, Homo sapiens
acctgagactgggta

SEQ ID NO: 926852 - DNA, 15 bp, Homo sapiens
cctgagactgggtaa

SEQ ID NO: 926853 - DNA, 15 bp, Homo sapiens
ctgagactgggtaat

SEQ ID NO: 926854 - DNA, 15 bp, Homo sapiens
tgagactgggtaatt

SEQ ID NO: 926855 - DNA, 15 bp, Homo sapiens
gagactgggtaattt

SEQ ID NO: 926856 - DNA, 15 bp, Homo sapiens
agactgggtaattta

SEQ ID NO: 926857 - DNA, 15 bp, Homo sapiens
gactgggtaatttat

SEQ ID NO: 926858 - DNA, 15 bp, Homo sapiens
actgggtaatttatg

SEQ ID NO: 926859 - DNA, 15 bp, Homo sapiens
ctgggtaatttatga

SEQ ID NO: 926860 - DNA, 15 bp, Homo sapiens
tgggtaatttatgaa

SEQ ID NO: 926861 - DNA, 15 bp, Homo sapiens
gggtaatttatgaag

SEQ ID NO: 926862 - DNA, 15 bp, Homo sapiens
ggtaatttatgaagg

SEQ ID NO: 926863 - DNA, 15 bp, Homo sapiens
gtaatttatgaagga

SEQ ID NO: 926864 - DNA, 15 bp, Homo sapiens
taatttatgaaggaa

SEQ ID NO: 926865 - DNA, 15 bp, Homo sapiens
aatttatgaaggaaa

SEQ ID NO: 926866 - DNA, 15 bp, Homo sapiens
atttatgaaggaaag

SEQ ID NO: 926867 - DNA, 15 bp, Homo sapiens
tttatgaaggaaaga

SEQ ID NO: 926868 - DNA, 15 bp, Homo sapiens
ttatgaaggaaagag

SEQ ID NO: 926869 - DNA, 15 bp, Homo sapiens
tatgaaggaaagagg

SEQ ID NO: 926870 - DNA, 15 bp, Homo sapiens
atgaaggaaagaggt

SEQ ID NO: 926871 - DNA, 15 bp, Homo sapiens
tgaaggaaagaggtt

SEQ ID NO: 926872 - DNA, 15 bp, Homo sapiens
gaaggaaagaggttt

SEQ ID NO: 926873 - DNA, 15 bp, Homo sapiens
aaggaaagaggttta

SEQ ID NO: 926874 - DNA, 15 bp, Homo sapiens
aggaaagaggtttaa

SEQ ID NO: 926875 - DNA, 15 bp, Homo sapiens
ggaaagaggtttaat

SEQ ID NO: 926876 - DNA, 15 bp, Homo sapiens
gaaagaggtttaatt

SEQ ID NO: 926877 - DNA, 15 bp, Homo sapiens
aaagaggtttaattg

SEQ ID NO: 926878 - DNA, 15 bp, Homo sapiens
aagaggtttaattga

SEQ ID NO: 926879 - DNA, 15 bp, Homo sapiens
agaggtttaattgac

SEQ ID NO: 926880 - DNA, 15 bp, Homo sapiens
gaggtttaattgact

SEQ ID NO: 926881 - DNA, 15 bp, Homo sapiens
aggtttaattgactc

SEQ ID NO: 926882 - DNA, 15 bp, Homo sapiens
ggtttaattgactca

SEQ ID NO: 926883 - DNA, 15 bp, Homo sapiens
gtttaattgactcac

SEQ ID NO: 926884 - DNA, 15 bp, Homo sapiens
tttaattgactcaca

SEQ ID NO: 926885 - DNA, 15 bp, Homo sapiens
ttaattgactcacag

SEQ ID NO: 926886 - DNA, 15 bp, Homo sapiens
taattgactcacagt

SEQ ID NO: 926887 - DNA, 15 bp, Homo sapiens
aattgactcacagtt

SEQ ID NO: 926888 - DNA, 15 bp, Homo sapiens
attgactcacagttc

SEQ ID NO: 926889 - DNA, 15 bp, Homo sapiens
ttgactcacagttca

SEQ ID NO: 926890 - DNA, 15 bp, Homo sapiens
tgactcacagttcag

SEQ ID NO: 926891 - DNA, 15 bp, Homo sapiens
gactcacagttcagc

SEQ ID NO: 926892 - DNA, 15 bp, Homo sapiens
actcacagttcagca

SEQ ID NO: 926893 - DNA, 15 bp, Homo sapiens
ctcacagttcagcat

SEQ ID NO: 926894 - DNA, 15 bp, Homo sapiens
tcacagttcagcatg

SEQ ID NO: 926895 - DNA, 15 bp, Homo sapiens
cacagttcagcatga

SEQ ID NO: 926896 - DNA, 15 bp, Homo sapiens
acagttcagcatgac

SEQ ID NO: 926897 - DNA, 15 bp, Homo sapiens
cagttcagcatgacc

SEQ ID NO: 926898 - DNA, 15 bp, Homo sapiens
agttcagcatgacca

SEQ ID NO: 926899 - DNA, 15 bp, Homo sapiens
gttcagcatgaccag

SEQ ID NO: 926900 - DNA, 15 bp, Homo sapiens
ttcagcatgaccagg

SEQ ID NO: 926901 - DNA, 15 bp, Homo sapiens
tcagcatgaccaggg

SEQ ID NO: 926902 - DNA, 15 bp, Homo sapiens
cagcatgaccaggga

SEQ ID NO: 926903 - DNA, 15 bp, Homo sapiens
agcatgaccagggag

SEQ ID NO: 926904 - DNA, 15 bp, Homo sapiens
gcatgaccagggagg

SEQ ID NO: 926905 - DNA, 15 bp, Homo sapiens
catgaccagggaggc

SEQ ID NO: 926906 - DNA, 15 bp, Homo sapiens
atgaccagggaggcc

SEQ ID NO: 926907 - DNA, 15 bp, Homo sapiens
tgaccagggaggcct

SEQ ID NO: 926908 - DNA, 15 bp, Homo sapiens
gaccagggaggcctc

SEQ ID NO: 926909 - DNA, 15 bp, Homo sapiens
accagggaggcctca

SEQ ID NO: 926910 - DNA, 15 bp, Homo sapiens
ccagggaggcctcag

SEQ ID NO: 926911 - DNA, 15 bp, Homo sapiens
cagggaggcctcagg

SEQ ID NO: 926912 - DNA, 15 bp, Homo sapiens
agggaggcctcagga

SEQ ID NO: 926913 - DNA, 15 bp, Homo sapiens
gggaggcctcaggaa

SEQ ID NO: 926914 - DNA, 15 bp, Homo sapiens
ggaggcctcaggaaa

SEQ ID NO: 926915 - DNA, 15 bp, Homo sapiens
gaggcctcaggaaac

SEQ ID NO: 926916 - DNA, 15 bp, Homo sapiens
cctcaggaaacttaa

SEQ ID NO: 926917 - DNA, 15 bp, Homo sapiens
ctcaggaaacttaaa

SEQ ID NO: 926918 - DNA, 15 bp, Homo sapiens
tcaggaaacttaaaa

SEQ ID NO: 926919 - DNA, 15 bp, Homo sapiens
caggaaacttaaaat

SEQ ID NO: 926920 - DNA, 15 bp, Homo sapiens
aggaaacttaaaatc

SEQ ID NO: 926921 - DNA, 15 bp, Homo sapiens
ggaaacttaaaatca

SEQ ID NO: 926922 - DNA, 15 bp, Homo sapiens
gaaacttaaaatcat

SEQ ID NO: 926923 - DNA, 15 bp, Homo sapiens
aaacttaaaatcatg

SEQ ID NO: 926924 - DNA, 15 bp, Homo sapiens
aacttaaaatcatgg

SEQ ID NO: 926925 - DNA, 15 bp, Homo sapiens
acttaaaatcatggc

SEQ ID NO: 926926 - DNA, 15 bp, Homo sapiens
cttaaaatcatggca

SEQ ID NO: 926927 - DNA, 15 bp, Homo sapiens
ttaaaatcatggcag

SEQ ID NO: 926928 - DNA, 15 bp, Homo sapiens
taaaatcatggcaga

SEQ ID NO: 926929 - DNA, 15 bp, Homo sapiens
aaaatcatggcagaa

SEQ ID NO: 926930 - DNA, 15 bp, Homo sapiens
aaatcatggcagaag

SEQ ID NO: 926931 - DNA, 15 bp, Homo sapiens
atcatggcagaaggg

SEQ ID NO: 926932 - DNA, 15 bp, Homo sapiens
tcatggcagaagggg

SEQ ID NO: 926933 - DNA, 15 bp, Homo sapiens
catggcagaagggga

SEQ ID NO: 926934 - DNA, 15 bp, Homo sapiens
gaaggggaagcaaac

SEQ ID NO: 926935 - DNA, 15 bp, Homo sapiens
aaggggaagcaaaca

SEQ ID NO: 926936 - DNA, 15 bp, Homo sapiens
aggggaagcaaacat

SEQ ID NO: 926937 - DNA, 15 bp, Homo sapiens
ggggaagcaaacatg

SEQ ID NO: 926938 - DNA, 15 bp, Homo sapiens
gggaagcaaacatgc

SEQ ID NO: 926939 - DNA, 15 bp, Homo sapiens
ggaagcaaacatgcc

SEQ ID NO: 926940 - DNA, 15 bp, Homo sapiens
gaagcaaacatgccc

SEQ ID NO: 926941 - DNA, 15 bp, Homo sapiens
aagcaaacatgccct

SEQ ID NO: 926942 - DNA, 15 bp, Homo sapiens
agcaaacatgccctt

SEQ ID NO: 926943 - DNA, 15 bp, Homo sapiens
gcaaacatgcccttc

SEQ ID NO: 926944 - DNA, 15 bp, Homo sapiens
caaacatgcccttct

SEQ ID NO: 926945 - DNA, 15 bp, Homo sapiens
aaacatgcccttctt

SEQ ID NO: 926946 - DNA, 15 bp, Homo sapiens
aacatgcccttcttc

SEQ ID NO: 926947 - DNA, 15 bp, Homo sapiens
acatgcccttcttca

SEQ ID NO: 926948 - DNA, 15 bp, Homo sapiens
catgcccttcttcac

SEQ ID NO: 926949 - DNA, 15 bp, Homo sapiens
atgcccttcttcaca

SEQ ID NO: 926950 - DNA, 15 bp, Homo sapiens
tgcccttcttcacat

SEQ ID NO: 926951 - DNA, 15 bp, Homo sapiens
gcccttcttcacatg

SEQ ID NO: 926952 - DNA, 15 bp, Homo sapiens
cccttcttcacatgg

SEQ ID NO: 926953 - DNA, 15 bp, Homo sapiens
ccttcttcacatggt

SEQ ID NO: 926954 - DNA, 15 bp, Homo sapiens
cttcttcacatggtg

SEQ ID NO: 926955 - DNA, 15 bp, Homo sapiens
ttcttcacatggtgg

SEQ ID NO: 926956 - DNA, 15 bp, Homo sapiens
tcttcacatggtggc

SEQ ID NO: 926957 - DNA, 15 bp, Homo sapiens
cttcacatggtggca

SEQ ID NO: 926958 - DNA, 15 bp, Homo sapiens
ttcacatggtggcag

SEQ ID NO: 926959 - DNA, 15 bp, Homo sapiens
tcacatggtggcagc

SEQ ID NO: 926960 - DNA, 15 bp, Homo sapiens
cacatggtggcagca

SEQ ID NO: 926961 - DNA, 15 bp, Homo sapiens
acatggtggcagcaa

SEQ ID NO: 926962 - DNA, 15 bp, Homo sapiens
catggtggcagcaag

SEQ ID NO: 926963 - DNA, 15 bp, Homo sapiens
atggtggcagcaagg

SEQ ID NO: 926964 - DNA, 15 bp, Homo sapiens
tggtggcagcaagga

SEQ ID NO: 926965 - DNA, 15 bp, Homo sapiens
ggtggcagcaaggag

SEQ ID NO: 926966 - DNA, 15 bp, Homo sapiens
gtggcagcaaggaga

SEQ ID NO: 926967 - DNA, 15 bp, Homo sapiens
tggcagcaaggagaa

SEQ ID NO: 926968 - DNA, 15 bp, Homo sapiens
ggcagcaaggagaag

SEQ ID NO: 926969 - DNA, 15 bp, Homo sapiens
gcagcaaggagaaga

SEQ ID NO: 926970 - DNA, 15 bp, Homo sapiens
cagcaaggagaagag

SEQ ID NO: 926971 - DNA, 15 bp, Homo sapiens
agcaaggagaagagc

SEQ ID NO: 926972 - DNA, 15 bp, Homo sapiens
gcaaggagaagagcc

SEQ ID NO: 926973 - DNA, 15 bp, Homo sapiens
caaggagaagagcca

SEQ ID NO: 926974 - DNA, 15 bp, Homo sapiens
aaggagaagagccaa

SEQ ID NO: 926975 - DNA, 15 bp, Homo sapiens
aggagaagagccaag

SEQ ID NO: 926976 - DNA, 15 bp, Homo sapiens
ggagaagagccaagc

SEQ ID NO: 926977 - DNA, 15 bp, Homo sapiens
gagaagagccaagca

SEQ ID NO: 926978 - DNA, 15 bp, Homo sapiens
agaagagccaagcaa

SEQ ID NO: 926979 - DNA, 15 bp, Homo sapiens
gaagagccaagcaaa

SEQ ID NO: 926980 - DNA, 15 bp, Homo sapiens
aagagccaagcaaaa

SEQ ID NO: 926981 - DNA, 15 bp, Homo sapiens
agagccaagcaaaat

SEQ ID NO: 926982 - DNA, 15 bp, Homo sapiens
gagccaagcaaaatg

SEQ ID NO: 926983 - DNA, 15 bp, Homo sapiens
agccaagcaaaatgg

SEQ ID NO: 926984 - DNA, 15 bp, Homo sapiens
gccaagcaaaatggg

SEQ ID NO: 926985 - DNA, 15 bp, Homo sapiens
ccaagcaaaatggga

SEQ ID NO: 926986 - DNA, 15 bp, Homo sapiens
caagcaaaatgggaa

SEQ ID NO: 926987 - DNA, 15 bp, Homo sapiens
aagcaaaatgggaaa

SEQ ID NO: 926988 - DNA, 15 bp, Homo sapiens
agcaaaatgggaaaa

SEQ ID NO: 926989 - DNA, 15 bp, Homo sapiens
gcaaaatgggaaaaa

SEQ ID NO: 926990 - DNA, 15 bp, Homo sapiens
caaaatgggaaaaat

SEQ ID NO: 926991 - DNA, 15 bp, Homo sapiens
aaaatgggaaaaatc

SEQ ID NO: 926992 - DNA, 15 bp, Homo sapiens
aaatgggaaaaatcc

SEQ ID NO: 926993 - DNA, 15 bp, Homo sapiens
aatgggaaaaatccc

SEQ ID NO: 926994 - DNA, 15 bp, Homo sapiens
atgggaaaaatccct

SEQ ID NO: 926995 - DNA, 15 bp, Homo sapiens
tgggaaaaatccctt

SEQ ID NO: 926996 - DNA, 15 bp, Homo sapiens
gggaaaaatccctta

SEQ ID NO: 926997 - DNA, 15 bp, Homo sapiens
ggaaaaatcccttat

SEQ ID NO: 926998 - DNA, 15 bp, Homo sapiens
gaaaaatcccttata

SEQ ID NO: 926999 - DNA, 15 bp, Homo sapiens
aaaaatcccttataa

SEQ ID NO: 927000 - DNA, 15 bp, Homo sapiens
aaaatcccttataaa

SEQ ID NO: 927001 - DNA, 15 bp, Homo sapiens
aaatcccttataaaa

SEQ ID NO: 927002 - DNA, 15 bp, Homo sapiens
aatcccttataaaac

SEQ ID NO: 927003 - DNA, 15 bp, Homo sapiens
atcccttataaaacc

SEQ ID NO: 927004 - DNA, 15 bp, Homo sapiens
tcccttataaaacca

SEQ ID NO: 927005 - DNA, 15 bp, Homo sapiens
cccttataaaaccat

SEQ ID NO: 927006 - DNA, 15 bp, Homo sapiens
ccttataaaaccatc

SEQ ID NO: 927007 - DNA, 15 bp, Homo sapiens
taaaaccatcagata

SEQ ID NO: 927008 - DNA, 15 bp, Homo sapiens
aaaaccatcagatat

SEQ ID NO: 927009 - DNA, 15 bp, Homo sapiens
aaaccatcagatatc

SEQ ID NO: 927010 - DNA, 15 bp, Homo sapiens
aaccatcagatatca

SEQ ID NO: 927011 - DNA, 15 bp, Homo sapiens
accatcagatatcat

SEQ ID NO: 927012 - DNA, 15 bp, Homo sapiens
ccatcagatatcatg

SEQ ID NO: 927013 - DNA, 15 bp, Homo sapiens
catcagatatcatga

SEQ ID NO: 927014 - DNA, 15 bp, Homo sapiens
atcagatatcatgag

SEQ ID NO: 927015 - DNA, 15 bp, Homo sapiens
tcagatatcatgaga

SEQ ID NO: 927016 - DNA, 15 bp, Homo sapiens
cagatatcatgagat

SEQ ID NO: 927017 - DNA, 15 bp, Homo sapiens
agatatcatgagata

SEQ ID NO: 927018 - DNA, 15 bp, Homo sapiens
gatatcatgagatat

SEQ ID NO: 927019 - DNA, 15 bp, Homo sapiens
atatcatgagatatc

SEQ ID NO: 927020 - DNA, 15 bp, Homo sapiens
tatcatgagatatct

SEQ ID NO: 927021 - DNA, 15 bp, Homo sapiens
atcatgagatatctg

SEQ ID NO: 927022 - DNA, 15 bp, Homo sapiens
tcatgagatatctga

SEQ ID NO: 927023 - DNA, 15 bp, Homo sapiens
catgagatatctgac

SEQ ID NO: 927024 - DNA, 15 bp, Homo sapiens
atgagatatctgact

SEQ ID NO: 927025 - DNA, 15 bp, Homo sapiens
tgagatatctgactc

SEQ ID NO: 927026 - DNA, 15 bp, Homo sapiens
gagatatctgactca

SEQ ID NO: 927027 - DNA, 15 bp, Homo sapiens
agatatctgactcac

SEQ ID NO: 927028 - DNA, 15 bp, Homo sapiens
gatatctgactcact

SEQ ID NO: 927029 - DNA, 15 bp, Homo sapiens
atatctgactcacta

SEQ ID NO: 927030 - DNA, 15 bp, Homo sapiens
tatctgactcactat

SEQ ID NO: 927031 - DNA, 15 bp, Homo sapiens
atctgactcactatc

SEQ ID NO: 927032 - DNA, 15 bp, Homo sapiens
tctgactcactatca

SEQ ID NO: 927033 - DNA, 15 bp, Homo sapiens
ctgactcactatcat

SEQ ID NO: 927034 - DNA, 15 bp, Homo sapiens
tgactcactatcatg

SEQ ID NO: 927035 - DNA, 15 bp, Homo sapiens
gactcactatcatga

SEQ ID NO: 927036 - DNA, 15 bp, Homo sapiens
actcactatcatgag

SEQ ID NO: 927037 - DNA, 15 bp, Homo sapiens
ctcactatcatgaga

SEQ ID NO: 927038 - DNA, 15 bp, Homo sapiens
gagaacagcatggag

SEQ ID NO: 927039 - DNA, 15 bp, Homo sapiens
agaacagcatggagg

SEQ ID NO: 927040 - DNA, 15 bp, Homo sapiens
gaacagcatggaggt

SEQ ID NO: 927041 - DNA, 15 bp, Homo sapiens
aacagcatggaggta

SEQ ID NO: 927042 - DNA, 15 bp, Homo sapiens
acagcatggaggtaa

SEQ ID NO: 927043 - DNA, 15 bp, Homo sapiens
cagcatggaggtaac

SEQ ID NO: 927044 - DNA, 15 bp, Homo sapiens
agcatggaggtaacc

SEQ ID NO: 927045 - DNA, 15 bp, Homo sapiens
gcatggaggtaacca

SEQ ID NO: 927046 - DNA, 15 bp, Homo sapiens
catggaggtaaccac

SEQ ID NO: 927047 - DNA, 15 bp, Homo sapiens
atggaggtaaccacc

SEQ ID NO: 927048 - DNA, 15 bp, Homo sapiens
tggaggtaaccacct

SEQ ID NO: 927049 - DNA, 15 bp, Homo sapiens
ggaggtaaccacctc

SEQ ID NO: 927050 - DNA, 15 bp, Homo sapiens
gaggtaaccacctcc

SEQ ID NO: 927051 - DNA, 15 bp, Homo sapiens
aggtaaccacctcca

SEQ ID NO: 927052 - DNA, 15 bp, Homo sapiens
ggtaaccacctccat

SEQ ID NO: 927053 - DNA, 15 bp, Homo sapiens
gtaaccacctccatg

SEQ ID NO: 927054 - DNA, 15 bp, Homo sapiens
taaccacctccatga

SEQ ID NO: 927055 - DNA, 15 bp, Homo sapiens
aaccacctccatgat

SEQ ID NO: 927056 - DNA, 15 bp, Homo sapiens
accacctccatgatt

SEQ ID NO: 927057 - DNA, 15 bp, Homo sapiens
ccacctccatgattc

SEQ ID NO: 927058 - DNA, 15 bp, Homo sapiens
cacctccatgattca

SEQ ID NO: 927059 - DNA, 15 bp, Homo sapiens
acctccatgattcaa

SEQ ID NO: 927060 - DNA, 15 bp, Homo sapiens
cctccatgattcaat

SEQ ID NO: 927061 - DNA, 15 bp, Homo sapiens
ctccatgattcaatt

SEQ ID NO: 927062 - DNA, 15 bp, Homo sapiens
tccatgattcaatta

SEQ ID NO: 927063 - DNA, 15 bp, Homo sapiens
ccatgattcaattac

SEQ ID NO: 927064 - DNA, 15 bp, Homo sapiens
catgattcaattacc

SEQ ID NO: 927065 - DNA, 15 bp, Homo sapiens
caattacctcccacc

SEQ ID NO: 927066 - DNA, 15 bp, Homo sapiens
aattacctcccacca

SEQ ID NO: 927067 - DNA, 15 bp, Homo sapiens
attacctcccaccag

SEQ ID NO: 927068 - DNA, 15 bp, Homo sapiens
ttacctcccaccagg

SEQ ID NO: 927069 - DNA, 15 bp, Homo sapiens
tacctcccaccaggt

SEQ ID NO: 927070 - DNA, 15 bp, Homo sapiens
acctcccaccaggtc

SEQ ID NO: 927071 - DNA, 15 bp, Homo sapiens
cctcccaccaggtcc

SEQ ID NO: 927072 - DNA, 15 bp, Homo sapiens
ctcccaccaggtcct

SEQ ID NO: 927073 - DNA, 15 bp, Homo sapiens
tcccaccaggtcctt

SEQ ID NO: 927074 - DNA, 15 bp, Homo sapiens
cccaccaggtccttc

SEQ ID NO: 927075 - DNA, 15 bp, Homo sapiens
ccaccaggtccttcc

SEQ ID NO: 927076 - DNA, 15 bp, Homo sapiens
ccaggtccttcccat

SEQ ID NO: 927077 - DNA, 15 bp, Homo sapiens
caggtccttcccatg

SEQ ID NO: 927078 - DNA, 15 bp, Homo sapiens
aggtccttcccatga

SEQ ID NO: 927079 - DNA, 15 bp, Homo sapiens
ggtccttcccatgat

SEQ ID NO: 927080 - DNA, 15 bp, Homo sapiens
gtccttcccatgata

SEQ ID NO: 927081 - DNA, 15 bp, Homo sapiens
tccttcccatgatac

SEQ ID NO: 927082 - DNA, 15 bp, Homo sapiens
ccttcccatgataca

SEQ ID NO: 927083 - DNA, 15 bp, Homo sapiens
cttcccatgatacat

SEQ ID NO: 927084 - DNA, 15 bp, Homo sapiens
ttcccatgatacatg

SEQ ID NO: 927085 - DNA, 15 bp, Homo sapiens
tcccatgatacatgg

SEQ ID NO: 927086 - DNA, 15 bp, Homo sapiens
cccatgatacatggg

SEQ ID NO: 927087 - DNA, 15 bp, Homo sapiens
ccatgatacatggga

SEQ ID NO: 927088 - DNA, 15 bp, Homo sapiens
catgatacatgggat

SEQ ID NO: 927089 - DNA, 15 bp, Homo sapiens
atgatacatgggatt

SEQ ID NO: 927090 - DNA, 15 bp, Homo sapiens
tgatacatgggatta

SEQ ID NO: 927091 - DNA, 15 bp, Homo sapiens
gatacatgggattat

SEQ ID NO: 927092 - DNA, 15 bp, Homo sapiens
atacatgggattatg

SEQ ID NO: 927093 - DNA, 15 bp, Homo sapiens
tacatgggattatgg

SEQ ID NO: 927094 - DNA, 15 bp, Homo sapiens
acatgggattatggg

SEQ ID NO: 927095 - DNA, 15 bp, Homo sapiens
catgggattatgggg

SEQ ID NO: 927096 - DNA, 15 bp, Homo sapiens
atgggattatgggga

SEQ ID NO: 927097 - DNA, 15 bp, Homo sapiens
tgggattatggggac

SEQ ID NO: 927098 - DNA, 15 bp, Homo sapiens
gggattatggggact

SEQ ID NO: 927099 - DNA, 15 bp, Homo sapiens
ggattatggggacta

SEQ ID NO: 927100 - DNA, 15 bp, Homo sapiens
gattatggggactac

SEQ ID NO: 927101 - DNA, 15 bp, Homo sapiens
attatggggactaca

SEQ ID NO: 927102 - DNA, 15 bp, Homo sapiens
ttatggggactacaa

SEQ ID NO: 927103 - DNA, 15 bp, Homo sapiens
tatggggactacaat

SEQ ID NO: 927104 - DNA, 15 bp, Homo sapiens
atggggactacaatt

SEQ ID NO: 927105 - DNA, 15 bp, Homo sapiens
tggggactacaattc

SEQ ID NO: 927106 - DNA, 15 bp, Homo sapiens
ggggactacaattca

SEQ ID NO: 927107 - DNA, 15 bp, Homo sapiens
gggactacaattcaa

SEQ ID NO: 927108 - DNA, 15 bp, Homo sapiens
ggactacaattcaag

SEQ ID NO: 927109 - DNA, 15 bp, Homo sapiens
gactacaattcaaga

SEQ ID NO: 927110 - DNA, 15 bp, Homo sapiens
attcaagatgagatg

SEQ ID NO: 927111 - DNA, 15 bp, Homo sapiens
ttcaagatgagatgt

SEQ ID NO: 927112 - DNA, 15 bp, Homo sapiens
tcaagatgagatgtg

SEQ ID NO: 927113 - DNA, 15 bp, Homo sapiens
caagatgagatgtgg

SEQ ID NO: 927114 - DNA, 15 bp, Homo sapiens
aagatgagatgtggg

SEQ ID NO: 927115 - DNA, 15 bp, Homo sapiens
agatgagatgtgggt

SEQ ID NO: 927116 - DNA, 15 bp, Homo sapiens
gatgagatgtgggtg

SEQ ID NO: 927117 - DNA, 15 bp, Homo sapiens
atgagatgtgggtgg

SEQ ID NO: 927118 - DNA, 15 bp, Homo sapiens
tgagatgtgggtggg

SEQ ID NO: 927119 - DNA, 15 bp, Homo sapiens
gagatgtgggtgggg

SEQ ID NO: 927120 - DNA, 15 bp, Homo sapiens
agatgtgggtgggga

SEQ ID NO: 927121 - DNA, 15 bp, Homo sapiens
gatgtgggtggggat

SEQ ID NO: 927122 - DNA, 15 bp, Homo sapiens
atgtgggtggggata

SEQ ID NO: 927123 - DNA, 15 bp, Homo sapiens
tgtgggtggggatac

SEQ ID NO: 927124 - DNA, 15 bp, Homo sapiens
gtgggtggggataca

SEQ ID NO: 927125 - DNA, 15 bp, Homo sapiens
tgggtggggatacaa

SEQ ID NO: 927126 - DNA, 15 bp, Homo sapiens
gggtggggatacaac

SEQ ID NO: 927127 - DNA, 15 bp, Homo sapiens
ggtggggatacaaca

SEQ ID NO: 927128 - DNA, 15 bp, Homo sapiens
gtggggatacaacaa

SEQ ID NO: 927129 - DNA, 15 bp, Homo sapiens
tggggatacaacaaa

SEQ ID NO: 927130 - DNA, 15 bp, Homo sapiens
ggggatacaacaaaa

SEQ ID NO: 927131 - DNA, 15 bp, Homo sapiens
gggatacaacaaaac

SEQ ID NO: 927132 - DNA, 15 bp, Homo sapiens
ggatacaacaaaacc

SEQ ID NO: 927133 - DNA, 15 bp, Homo sapiens
gatacaacaaaacca

SEQ ID NO: 927134 - DNA, 15 bp, Homo sapiens
atacaacaaaaccat

SEQ ID NO: 927135 - DNA, 15 bp, Homo sapiens
tacaacaaaaccata

SEQ ID NO: 927136 - DNA, 15 bp, Homo sapiens
acaacaaaaccatat

SEQ ID NO: 927137 - DNA, 15 bp, Homo sapiens
caacaaaaccatatc

SEQ ID NO: 927138 - DNA, 15 bp, Homo sapiens
aacaaaaccatatca

SEQ ID NO: 927139 - DNA, 15 bp, Homo sapiens
acaaaaccatatcac

SEQ ID NO: 927140 - DNA, 15 bp, Homo sapiens
caaaaccatatcaca

SEQ ID NO: 927141 - DNA, 15 bp, Homo sapiens
aaaaccatatcacac

SEQ ID NO: 927142 - DNA, 15 bp, Homo sapiens
aaaccatatcacacg

SEQ ID NO: 927143 - DNA, 15 bp, Homo sapiens
aaccatatcacacgg

SEQ ID NO: 927144 - DNA, 15 bp, Homo sapiens
accatatcacacggt

SEQ ID NO: 927145 - DNA, 15 bp, Homo sapiens
ccatatcacacggtt

SEQ ID NO: 927146 - DNA, 15 bp, Homo sapiens
catatcacacggttt

SEQ ID NO: 927147 - DNA, 15 bp, Homo sapiens
atatcacacggtttg

SEQ ID NO: 927148 - DNA, 15 bp, Homo sapiens
tatcacacggtttgg

SEQ ID NO: 927149 - DNA, 15 bp, Homo sapiens
atcacacggtttggt

SEQ ID NO: 927150 - DNA, 15 bp, Homo sapiens
tcacacggtttggtc

SEQ ID NO: 927151 - DNA, 15 bp, Homo sapiens
cacacggtttggtct

SEQ ID NO: 927152 - DNA, 15 bp, Homo sapiens
acacggtttggtcta

SEQ ID NO: 927153 - DNA, 15 bp, Homo sapiens
cacggtttggtctaa

SEQ ID NO: 927154 - DNA, 15 bp, Homo sapiens
acggtttggtctaac

SEQ ID NO: 927155 - DNA, 15 bp, Homo sapiens
cggtttggtctaaca

SEQ ID NO: 927156 - DNA, 15 bp, Homo sapiens
ggtttggtctaacag

SEQ ID NO: 927157 - DNA, 15 bp, Homo sapiens
gtttggtctaacaga

SEQ ID NO: 927158 - DNA, 15 bp, Homo sapiens
tttggtctaacagag

SEQ ID NO: 927159 - DNA, 15 bp, Homo sapiens
ttggtctaacagagc

SEQ ID NO: 927160 - DNA, 15 bp, Homo sapiens
tggtctaacagagca

SEQ ID NO: 927161 - DNA, 15 bp, Homo sapiens
ggtctaacagagcaa

SEQ ID NO: 927162 - DNA, 15 bp, Homo sapiens
gtctaacagagcaaa

SEQ ID NO: 927163 - DNA, 15 bp, Homo sapiens
tctaacagagcaaaa

SEQ ID NO: 927164 - DNA, 15 bp, Homo sapiens
ctaacagagcaaaac

SEQ ID NO: 927165 - DNA, 15 bp, Homo sapiens
taacagagcaaaacc

SEQ ID NO: 927166 - DNA, 15 bp, Homo sapiens
aacagagcaaaaccc

SEQ ID NO: 927167 - DNA, 15 bp, Homo sapiens
acagagcaaaaccca

SEQ ID NO: 927168 - DNA, 15 bp, Homo sapiens
cagagcaaaacccaa

SEQ ID NO: 927169 - DNA, 15 bp, Homo sapiens
agagcaaaacccaat

SEQ ID NO: 927170 - DNA, 15 bp, Homo sapiens
gagcaaaacccaatg

SEQ ID NO: 927171 - DNA, 15 bp, Homo sapiens
agcaaaacccaatgc

SEQ ID NO: 927172 - DNA, 15 bp, Homo sapiens
gcaaaacccaatgct

SEQ ID NO: 927173 - DNA, 15 bp, Homo sapiens
caaaacccaatgcta

SEQ ID NO: 927174 - DNA, 15 bp, Homo sapiens
aaaacccaatgctag

SEQ ID NO: 927175 - DNA, 15 bp, Homo sapiens
aaacccaatgctaga

SEQ ID NO: 927176 - DNA, 15 bp, Homo sapiens
aacccaatgctagac

SEQ ID NO: 927177 - DNA, 15 bp, Homo sapiens
acccaatgctagact

SEQ ID NO: 927178 - DNA, 15 bp, Homo sapiens
cccaatgctagactc

SEQ ID NO: 927179 - DNA, 15 bp, Homo sapiens
ccaatgctagactcc

SEQ ID NO: 927180 - DNA, 15 bp, Homo sapiens
caatgctagactccc

SEQ ID NO: 927181 - DNA, 15 bp, Homo sapiens
aatgctagactccct

SEQ ID NO: 927182 - DNA, 15 bp, Homo sapiens
atgctagactccctc

SEQ ID NO: 927183 - DNA, 15 bp, Homo sapiens
tgctagactccctca

SEQ ID NO: 927184 - DNA, 15 bp, Homo sapiens
gctagactccctcaa

SEQ ID NO: 927185 - DNA, 15 bp, Homo sapiens
ctagactccctcaaa

SEQ ID NO: 927186 - DNA, 15 bp, Homo sapiens
tagactccctcaaaa

SEQ ID NO: 927187 - DNA, 15 bp, Homo sapiens
agactccctcaaaag

SEQ ID NO: 927188 - DNA, 15 bp, Homo sapiens
gactccctcaaaagc

SEQ ID NO: 927189 - DNA, 15 bp, Homo sapiens
actccctcaaaagcc

SEQ ID NO: 927190 - DNA, 15 bp, Homo sapiens
ctccctcaaaagcct

SEQ ID NO: 927191 - DNA, 15 bp, Homo sapiens
tccctcaaaagccta

SEQ ID NO: 927192 - DNA, 15 bp, Homo sapiens
ccctcaaaagcctaa

SEQ ID NO: 927193 - DNA, 15 bp, Homo sapiens
cctcaaaagcctaag

SEQ ID NO: 927194 - DNA, 15 bp, Homo sapiens
ctcaaaagcctaagt

SEQ ID NO: 927195 - DNA, 15 bp, Homo sapiens
tcaaaagcctaagtg

SEQ ID NO: 927196 - DNA, 15 bp, Homo sapiens
caaaagcctaagtga

SEQ ID NO: 927197 - DNA, 15 bp, Homo sapiens
aaaagcctaagtgaa

SEQ ID NO: 927198 - DNA, 15 bp, Homo sapiens
aaagcctaagtgaac

SEQ ID NO: 927199 - DNA, 15 bp, Homo sapiens
aagcctaagtgaaca

SEQ ID NO: 927200 - DNA, 15 bp, Homo sapiens
agcctaagtgaacag

SEQ ID NO: 927201 - DNA, 15 bp, Homo sapiens
gcctaagtgaacagc

SEQ ID NO: 927202 - DNA, 15 bp, Homo sapiens
cctaagtgaacagct

SEQ ID NO: 927203 - DNA, 15 bp, Homo sapiens
ctaagtgaacagctg

SEQ ID NO: 927204 - DNA, 15 bp, Homo sapiens
taagtgaacagctgc

SEQ ID NO: 927205 - DNA, 15 bp, Homo sapiens
aagtgaacagctgcc

SEQ ID NO: 927206 - DNA, 15 bp, Homo sapiens
agtgaacagctgcca

SEQ ID NO: 927207 - DNA, 15 bp, Homo sapiens
gtgaacagctgccat

SEQ ID NO: 927208 - DNA, 15 bp, Homo sapiens
tgaacagctgccatc

SEQ ID NO: 927209 - DNA, 15 bp, Homo sapiens
gaacagctgccatct

SEQ ID NO: 927210 - DNA, 15 bp, Homo sapiens
aacagctgccatctt

SEQ ID NO: 927211 - DNA, 15 bp, Homo sapiens
acagctgccatcttt

SEQ ID NO: 927212 - DNA, 15 bp, Homo sapiens
cagctgccatctttc

SEQ ID NO: 927213 - DNA, 15 bp, Homo sapiens
agctgccatctttct

SEQ ID NO: 927214 - DNA, 15 bp, Homo sapiens
gctgccatctttctg

SEQ ID NO: 927215 - DNA, 15 bp, Homo sapiens
ctgccatctttctga

SEQ ID NO: 927216 - DNA, 15 bp, Homo sapiens
tgccatctttctgat

SEQ ID NO: 927217 - DNA, 15 bp, Homo sapiens
gccatctttctgatg

SEQ ID NO: 927218 - DNA, 15 bp, Homo sapiens
ccatctttctgatgt

SEQ ID NO: 927219 - DNA, 15 bp, Homo sapiens
catctttctgatgtg

SEQ ID NO: 927220 - DNA, 15 bp, Homo sapiens
atctttctgatgtga

SEQ ID NO: 927221 - DNA, 15 bp, Homo sapiens
tctttctgatgtgag

SEQ ID NO: 927222 - DNA, 15 bp, Homo sapiens
ctttctgatgtgaga

SEQ ID NO: 927223 - DNA, 15 bp, Homo sapiens
tttctgatgtgagat

SEQ ID NO: 927224 - DNA, 15 bp, Homo sapiens
ttctgatgtgagatc

SEQ ID NO: 927225 - DNA, 15 bp, Homo sapiens
tctgatgtgagatct

SEQ ID NO: 927226 - DNA, 15 bp, Homo sapiens
ctgatgtgagatctc

SEQ ID NO: 927227 - DNA, 15 bp, Homo sapiens
tgatgtgagatctca

SEQ ID NO: 927228 - DNA, 15 bp, Homo sapiens
gatgtgagatctcag

SEQ ID NO: 927229 - DNA, 15 bp, Homo sapiens
atgtgagatctcagg

SEQ ID NO: 927230 - DNA, 15 bp, Homo sapiens
tgtgagatctcaggg

SEQ ID NO: 927231 - DNA, 15 bp, Homo sapiens
gtgagatctcaggga

SEQ ID NO: 927232 - DNA, 15 bp, Homo sapiens
tgagatctcagggag

SEQ ID NO: 927233 - DNA, 15 bp, Homo sapiens
gagatctcagggaga

SEQ ID NO: 927234 - DNA, 15 bp, Homo sapiens
agatctcagggagaa

SEQ ID NO: 927235 - DNA, 15 bp, Homo sapiens
gatctcagggagaaa

SEQ ID NO: 927236 - DNA, 15 bp, Homo sapiens
atctcagggagaaat

SEQ ID NO: 927237 - DNA, 15 bp, Homo sapiens
tctcagggagaaata

SEQ ID NO: 927238 - DNA, 15 bp, Homo sapiens
ctcagggagaaatat

SEQ ID NO: 927239 - DNA, 15 bp, Homo sapiens
tcagggagaaatatt

SEQ ID NO: 927240 - DNA, 15 bp, Homo sapiens
cagggagaaatattt

SEQ ID NO: 927241 - DNA, 15 bp, Homo sapiens
agggagaaatattta

SEQ ID NO: 927242 - DNA, 15 bp, Homo sapiens
gggagaaatatttaa

SEQ ID NO: 927243 - DNA, 15 bp, Homo sapiens
ggagaaatatttaag

SEQ ID NO: 927244 - DNA, 15 bp, Homo sapiens
gagaaatatttaaga

SEQ ID NO: 927245 - DNA, 15 bp, Homo sapiens
agaaatatttaagaa

SEQ ID NO: 927246 - DNA, 15 bp, Homo sapiens
gaaatatttaagaag

SEQ ID NO: 927247 - DNA, 15 bp, Homo sapiens
aaatatttaagaagg

SEQ ID NO: 927248 - DNA, 15 bp, Homo sapiens
aatatttaagaaggc

SEQ ID NO: 927249 - DNA, 15 bp, Homo sapiens
atatttaagaaggca

SEQ ID NO: 927250 - DNA, 15 bp, Homo sapiens
tatttaagaaggcag

SEQ ID NO: 927251 - DNA, 15 bp, Homo sapiens
atttaagaaggcaga

SEQ ID NO: 927252 - DNA, 15 bp, Homo sapiens
tttaagaaggcagag

SEQ ID NO: 927253 - DNA, 15 bp, Homo sapiens
ttaagaaggcagagg

SEQ ID NO: 927254 - DNA, 15 bp, Homo sapiens
taagaaggcagaggg

SEQ ID NO: 927255 - DNA, 15 bp, Homo sapiens
aagaaggcagagggg

SEQ ID NO: 927256 - DNA, 15 bp, Homo sapiens
agaaggcagagggga

SEQ ID NO: 927257 - DNA, 15 bp, Homo sapiens
gaaggcagaggggag

SEQ ID NO: 927258 - DNA, 15 bp, Homo sapiens
aaggcagaggggagt

SEQ ID NO: 927259 - DNA, 15 bp, Homo sapiens
aggcagaggggagta

SEQ ID NO: 927260 - DNA, 15 bp, Homo sapiens
ggcagaggggagtaa

SEQ ID NO: 927261 - DNA, 15 bp, Homo sapiens
gcagaggggagtaac

SEQ ID NO: 927262 - DNA, 15 bp, Homo sapiens
cagaggggagtaacc

SEQ ID NO: 927263 - DNA, 15 bp, Homo sapiens
agaggggagtaacca

SEQ ID NO: 927264 - DNA, 15 bp, Homo sapiens
gaggggagtaaccac

SEQ ID NO: 927265 - DNA, 15 bp, Homo sapiens
aggggagtaaccacg

SEQ ID NO: 927266 - DNA, 15 bp, Homo sapiens
ggggagtaaccacga

SEQ ID NO: 927267 - DNA, 15 bp, Homo sapiens
gggagtaaccacgat

SEQ ID NO: 927268 - DNA, 15 bp, Homo sapiens
ggagtaaccacgatt

SEQ ID NO: 927269 - DNA, 15 bp, Homo sapiens
gagtaaccacgatta

SEQ ID NO: 927270 - DNA, 15 bp, Homo sapiens
agtaaccacgattaa

SEQ ID NO: 927271 - DNA, 15 bp, Homo sapiens
gtaaccacgattaag

SEQ ID NO: 927272 - DNA, 15 bp, Homo sapiens
taaccacgattaagt

SEQ ID NO: 927273 - DNA, 15 bp, Homo sapiens
aaccacgattaagtt

SEQ ID NO: 927274 - DNA, 15 bp, Homo sapiens
accacgattaagttt

SEQ ID NO: 927275 - DNA, 15 bp, Homo sapiens
ccacgattaagttta

SEQ ID NO: 927276 - DNA, 15 bp, Homo sapiens
cacgattaagtttat

SEQ ID NO: 927277 - DNA, 15 bp, Homo sapiens
acgattaagtttatg

SEQ ID NO: 927278 - DNA, 15 bp, Homo sapiens
cgattaagtttatga

SEQ ID NO: 927279 - DNA, 15 bp, Homo sapiens
gattaagtttatgag

SEQ ID NO: 927280 - DNA, 15 bp, Homo sapiens
attaagtttatgagt

SEQ ID NO: 927281 - DNA, 15 bp, Homo sapiens
ttaagtttatgagtg

SEQ ID NO: 927282 - DNA, 15 bp, Homo sapiens
taagtttatgagtgc

SEQ ID NO: 927283 - DNA, 15 bp, Homo sapiens
aagtttatgagtgcc

SEQ ID NO: 927284 - DNA, 15 bp, Homo sapiens
agtttatgagtgcct

SEQ ID NO: 927285 - DNA, 15 bp, Homo sapiens
gtttatgagtgccta

SEQ ID NO: 927286 - DNA, 15 bp, Homo sapiens
tttatgagtgcctat

SEQ ID NO: 927287 - DNA, 15 bp, Homo sapiens
ttatgagtgcctatg

SEQ ID NO: 927288 - DNA, 15 bp, Homo sapiens
tatgagtgcctatga

SEQ ID NO: 927289 - DNA, 15 bp, Homo sapiens
atgagtgcctatgac

SEQ ID NO: 927290 - DNA, 15 bp, Homo sapiens
tgagtgcctatgacc

SEQ ID NO: 927291 - DNA, 15 bp, Homo sapiens
gagtgcctatgaccc

SEQ ID NO: 927292 - DNA, 15 bp, Homo sapiens
agtgcctatgaccct

SEQ ID NO: 927293 - DNA, 15 bp, Homo sapiens
gtgcctatgaccctg

SEQ ID NO: 927294 - DNA, 15 bp, Homo sapiens
tgcctatgaccctga

SEQ ID NO: 927295 - DNA, 15 bp, Homo sapiens
gcctatgaccctgaa

SEQ ID NO: 927296 - DNA, 15 bp, Homo sapiens
cctatgaccctgaag

SEQ ID NO: 927297 - DNA, 15 bp, Homo sapiens
ctatgaccctgaagg

SEQ ID NO: 927298 - DNA, 15 bp, Homo sapiens
tatgaccctgaaggc

SEQ ID NO: 927299 - DNA, 15 bp, Homo sapiens
atgaccctgaaggcc

SEQ ID NO: 927300 - DNA, 15 bp, Homo sapiens
tgaccctgaaggcct

SEQ ID NO: 927301 - DNA, 15 bp, Homo sapiens
gaccctgaaggcctc

SEQ ID NO: 927302 - DNA, 15 bp, Homo sapiens
accctgaaggcctct

SEQ ID NO: 927303 - DNA, 15 bp, Homo sapiens
ccctgaaggcctcta

SEQ ID NO: 927304 - DNA, 15 bp, Homo sapiens
cctgaaggcctctat

SEQ ID NO: 927305 - DNA, 15 bp, Homo sapiens
ctgaaggcctctata

SEQ ID NO: 927306 - DNA, 15 bp, Homo sapiens
tgaaggcctctataa

SEQ ID NO: 927307 - DNA, 15 bp, Homo sapiens
gaaggcctctataac

SEQ ID NO: 927308 - DNA, 15 bp, Homo sapiens
aaggcctctataact

SEQ ID NO: 927309 - DNA, 15 bp, Homo sapiens
aggcctctataactg

SEQ ID NO: 927310 - DNA, 15 bp, Homo sapiens
ggcctctataactgt

SEQ ID NO: 927311 - DNA, 15 bp, Homo sapiens
gcctctataactgta

SEQ ID NO: 927312 - DNA, 15 bp, Homo sapiens
cctctataactgtat

SEQ ID NO: 927313 - DNA, 15 bp, Homo sapiens
ctctataactgtata

SEQ ID NO: 927314 - DNA, 15 bp, Homo sapiens
tctataactgtatat

SEQ ID NO: 927315 - DNA, 15 bp, Homo sapiens
ctataactgtatatt

SEQ ID NO: 927316 - DNA, 15 bp, Homo sapiens
tataactgtatattt

SEQ ID NO: 927317 - DNA, 15 bp, Homo sapiens
ataactgtatatttg

SEQ ID NO: 927318 - DNA, 15 bp, Homo sapiens
taactgtatatttgt

SEQ ID NO: 927319 - DNA, 15 bp, Homo sapiens
aactgtatatttgtt

SEQ ID NO: 927320 - DNA, 15 bp, Homo sapiens
actgtatatttgttt

SEQ ID NO: 927321 - DNA, 15 bp, Homo sapiens
ctgtatatttgtttg

SEQ ID NO: 927322 - DNA, 15 bp, Homo sapiens
tgtatatttgtttga

SEQ ID NO: 927323 - DNA, 15 bp, Homo sapiens
gtatatttgtttgaa

SEQ ID NO: 927324 - DNA, 15 bp, Homo sapiens
tatatttgtttgaat

SEQ ID NO: 927325 - DNA, 15 bp, Homo sapiens
atatttgtttgaatt

SEQ ID NO: 927326 - DNA, 15 bp, Homo sapiens
tatttgtttgaattg

SEQ ID NO: 927327 - DNA, 15 bp, Homo sapiens
atttgtttgaattgt

SEQ ID NO: 927328 - DNA, 15 bp, Homo sapiens
tttgtttgaattgtt

SEQ ID NO: 927329 - DNA, 15 bp, Homo sapiens
ttgtttgaattgttt

SEQ ID NO: 927330 - DNA, 15 bp, Homo sapiens
tgtttgaattgtttg

SEQ ID NO: 927331 - DNA, 15 bp, Homo sapiens
gtttgaattgtttga

SEQ ID NO: 927332 - DNA, 15 bp, Homo sapiens
tttgaattgtttgag

SEQ ID NO: 927333 - DNA, 15 bp, Homo sapiens
ttgaattgtttgagc

SEQ ID NO: 927334 - DNA, 15 bp, Homo sapiens
tgaattgtttgagct

SEQ ID NO: 927335 - DNA, 15 bp, Homo sapiens
gaattgtttgagctc

SEQ ID NO: 927336 - DNA, 15 bp, Homo sapiens
aattgtttgagctct

SEQ ID NO: 927337 - DNA, 15 bp, Homo sapiens
attgtttgagctctg

SEQ ID NO: 927338 - DNA, 15 bp, Homo sapiens
ttgtttgagctctga

SEQ ID NO: 927339 - DNA, 15 bp, Homo sapiens
tgtttgagctctgag

SEQ ID NO: 927340 - DNA, 15 bp, Homo sapiens
gtttgagctctgagg

SEQ ID NO: 927341 - DNA, 15 bp, Homo sapiens
tttgagctctgagga

SEQ ID NO: 927342 - DNA, 15 bp, Homo sapiens
ttgagctctgaggaa

SEQ ID NO: 927343 - DNA, 15 bp, Homo sapiens
tgagctctgaggaaa

SEQ ID NO: 927344 - DNA, 15 bp, Homo sapiens
gagctctgaggaaaa

SEQ ID NO: 927345 - DNA, 15 bp, Homo sapiens
agctctgaggaaaag

SEQ ID NO: 927346 - DNA, 15 bp, Homo sapiens
gctctgaggaaaagg

SEQ ID NO: 927347 - DNA, 15 bp, Homo sapiens
ctctgaggaaaaggg

SEQ ID NO: 927348 - DNA, 15 bp, Homo sapiens
tctgaggaaaagggc

SEQ ID NO: 927349 - DNA, 15 bp, Homo sapiens
ctgaggaaaagggcc

SEQ ID NO: 927350 - DNA, 15 bp, Homo sapiens
tgaggaaaagggcct

SEQ ID NO: 927351 - DNA, 15 bp, Homo sapiens
gaggaaaagggcctt

SEQ ID NO: 927352 - DNA, 15 bp, Homo sapiens
aggaaaagggccttt

SEQ ID NO: 927353 - DNA, 15 bp, Homo sapiens
ggaaaagggcctttg

SEQ ID NO: 927354 - DNA, 15 bp, Homo sapiens
gaaaagggcctttga

SEQ ID NO: 927355 - DNA, 15 bp, Homo sapiens
aaaagggcctttgat

SEQ ID NO: 927356 - DNA, 15 bp, Homo sapiens
aaagggcctttgatc

SEQ ID NO: 927357 - DNA, 15 bp, Homo sapiens
aagggcctttgatca

SEQ ID NO: 927358 - DNA, 15 bp, Homo sapiens
agggcctttgatcag

SEQ ID NO: 927359 - DNA, 15 bp, Homo sapiens
gggcctttgatcaga

SEQ ID NO: 927360 - DNA, 15 bp, Homo sapiens
ggcctttgatcagaa

SEQ ID NO: 927361 - DNA, 15 bp, Homo sapiens
gcctttgatcagaag

SEQ ID NO: 927362 - DNA, 15 bp, Homo sapiens
cctttgatcagaagg

SEQ ID NO: 927363 - DNA, 15 bp, Homo sapiens
ctttgatcagaaggt

SEQ ID NO: 927364 - DNA, 15 bp, Homo sapiens
tttgatcagaaggtc

SEQ ID NO: 927365 - DNA, 15 bp, Homo sapiens
ttgatcagaaggtct

SEQ ID NO: 927366 - DNA, 15 bp, Homo sapiens
tgatcagaaggtctt

SEQ ID NO: 927367 - DNA, 15 bp, Homo sapiens
gatcagaaggtcttg

SEQ ID NO: 927368 - DNA, 15 bp, Homo sapiens
atcagaaggtcttgg

SEQ ID NO: 927369 - DNA, 15 bp, Homo sapiens
tcagaaggtcttggt

SEQ ID NO: 927370 - DNA, 15 bp, Homo sapiens
cagaaggtcttggtc

SEQ ID NO: 927371 - DNA, 15 bp, Homo sapiens
agaaggtcttggtca

SEQ ID NO: 927372 - DNA, 15 bp, Homo sapiens
gaaggtcttggtcat

SEQ ID NO: 927373 - DNA, 15 bp, Homo sapiens
aaggtcttggtcatg

SEQ ID NO: 927374 - DNA, 15 bp, Homo sapiens
aggtcttggtcatgc

SEQ ID NO: 927375 - DNA, 15 bp, Homo sapiens
ggtcttggtcatgcc

SEQ ID NO: 927376 - DNA, 15 bp, Homo sapiens
gtcttggtcatgcca

SEQ ID NO: 927377 - DNA, 15 bp, Homo sapiens
tcttggtcatgccag

SEQ ID NO: 927378 - DNA, 15 bp, Homo sapiens
cttggtcatgccagg

SEQ ID NO: 927379 - DNA, 15 bp, Homo sapiens
ttggtcatgccaggc

SEQ ID NO: 927380 - DNA, 15 bp, Homo sapiens
tggtcatgccaggcc

SEQ ID NO: 927381 - DNA, 15 bp, Homo sapiens
ggtcatgccaggcct

SEQ ID NO: 927382 - DNA, 15 bp, Homo sapiens
gtcatgccaggccta

SEQ ID NO: 927383 - DNA, 15 bp, Homo sapiens
tcatgccaggcctag

SEQ ID NO: 927384 - DNA, 15 bp, Homo sapiens
catgccaggcctagg

SEQ ID NO: 927385 - DNA, 15 bp, Homo sapiens
atgccaggcctaggg

SEQ ID NO: 927386 - DNA, 15 bp, Homo sapiens
tgccaggcctagggt

SEQ ID NO: 927387 - DNA, 15 bp, Homo sapiens
gccaggcctagggta

SEQ ID NO: 927388 - DNA, 15 bp, Homo sapiens
ccaggcctagggtaa

SEQ ID NO: 927389 - DNA, 15 bp, Homo sapiens
caggcctagggtaaa

SEQ ID NO: 927390 - DNA, 15 bp, Homo sapiens
aggcctagggtaaaa

SEQ ID NO: 927391 - DNA, 15 bp, Homo sapiens
ggcctagggtaaaat

SEQ ID NO: 927392 - DNA, 15 bp, Homo sapiens
gcctagggtaaaatg

SEQ ID NO: 927393 - DNA, 15 bp, Homo sapiens
cctagggtaaaatgg

SEQ ID NO: 927394 - DNA, 15 bp, Homo sapiens
ctagggtaaaatggg

SEQ ID NO: 927395 - DNA, 15 bp, Homo sapiens
tagggtaaaatggga

SEQ ID NO: 927396 - DNA, 15 bp, Homo sapiens
agggtaaaatgggag

SEQ ID NO: 927397 - DNA, 15 bp, Homo sapiens
gggtaaaatgggaga

SEQ ID NO: 927398 - DNA, 15 bp, Homo sapiens
ggtaaaatgggagag

SEQ ID NO: 927399 - DNA, 15 bp, Homo sapiens
gtaaaatgggagaga

SEQ ID NO: 927400 - DNA, 15 bp, Homo sapiens
taaaatgggagagat

SEQ ID NO: 927401 - DNA, 15 bp, Homo sapiens
aaaatgggagagata

SEQ ID NO: 927402 - DNA, 15 bp, Homo sapiens
aaatgggagagatag

SEQ ID NO: 927403 - DNA, 15 bp, Homo sapiens
aatgggagagataga

SEQ ID NO: 927404 - DNA, 15 bp, Homo sapiens
atgggagagatagag

SEQ ID NO: 927405 - DNA, 15 bp, Homo sapiens
tgggagagatagagg

SEQ ID NO: 927406 - DNA, 15 bp, Homo sapiens
gggagagatagaggc

SEQ ID NO: 927407 - DNA, 15 bp, Homo sapiens
ggagagatagaggca

SEQ ID NO: 927408 - DNA, 15 bp, Homo sapiens
gagagatagaggcaa

SEQ ID NO: 927409 - DNA, 15 bp, Homo sapiens
agagatagaggcaac

SEQ ID NO: 927410 - DNA, 15 bp, Homo sapiens
gagatagaggcaaca

SEQ ID NO: 927411 - DNA, 15 bp, Homo sapiens
agatagaggcaacat

SEQ ID NO: 927412 - DNA, 15 bp, Homo sapiens
gatagaggcaacatg

SEQ ID NO: 927413 - DNA, 15 bp, Homo sapiens
atagaggcaacatgg

SEQ ID NO: 927414 - DNA, 15 bp, Homo sapiens
tagaggcaacatggg

SEQ ID NO: 927415 - DNA, 15 bp, Homo sapiens
agaggcaacatgggg

SEQ ID NO: 927416 - DNA, 15 bp, Homo sapiens
gaggcaacatggggt

SEQ ID NO: 927417 - DNA, 15 bp, Homo sapiens
aggcaacatggggtg

SEQ ID NO: 927418 - DNA, 15 bp, Homo sapiens
ggcaacatggggtgc

SEQ ID NO: 927419 - DNA, 15 bp, Homo sapiens
gcaacatggggtgca

SEQ ID NO: 927420 - DNA, 15 bp, Homo sapiens
caacatggggtgcaa

SEQ ID NO: 927421 - DNA, 15 bp, Homo sapiens
aacatggggtgcaag

SEQ ID NO: 927422 - DNA, 15 bp, Homo sapiens
acatggggtgcaagg

SEQ ID NO: 927423 - DNA, 15 bp, Homo sapiens
catggggtgcaaggg

SEQ ID NO: 927424 - DNA, 15 bp, Homo sapiens
atggggtgcaagggt

SEQ ID NO: 927425 - DNA, 15 bp, Homo sapiens
tggggtgcaagggta

SEQ ID NO: 927426 - DNA, 15 bp, Homo sapiens
ggggtgcaagggtac

SEQ ID NO: 927427 - DNA, 15 bp, Homo sapiens
gggtgcaagggtaca

SEQ ID NO: 927428 - DNA, 15 bp, Homo sapiens
ggtgcaagggtacaa

SEQ ID NO: 927429 - DNA, 15 bp, Homo sapiens
gtgcaagggtacaag

SEQ ID NO: 927430 - DNA, 15 bp, Homo sapiens
tgcaagggtacaagt

SEQ ID NO: 927431 - DNA, 15 bp, Homo sapiens
gcaagggtacaagtc

SEQ ID NO: 927432 - DNA, 15 bp, Homo sapiens
caagggtacaagtct

SEQ ID NO: 927433 - DNA, 15 bp, Homo sapiens
aagggtacaagtctg

SEQ ID NO: 927434 - DNA, 15 bp, Homo sapiens
agggtacaagtctga

SEQ ID NO: 927435 - DNA, 15 bp, Homo sapiens
gggtacaagtctgag

SEQ ID NO: 927436 - DNA, 15 bp, Homo sapiens
ggtacaagtctgagt

SEQ ID NO: 927437 - DNA, 15 bp, Homo sapiens
gtacaagtctgagtt

SEQ ID NO: 927438 - DNA, 15 bp, Homo sapiens
tacaagtctgagttc

SEQ ID NO: 927439 - DNA, 15 bp, Homo sapiens
acaagtctgagttca

SEQ ID NO: 927440 - DNA, 15 bp, Homo sapiens
caagtctgagttcag

SEQ ID NO: 927441 - DNA, 15 bp, Homo sapiens
aagtctgagttcagt

SEQ ID NO: 927442 - DNA, 15 bp, Homo sapiens
agtctgagttcagtg

SEQ ID NO: 927443 - DNA, 15 bp, Homo sapiens
gtctgagttcagtgg

SEQ ID NO: 927444 - DNA, 15 bp, Homo sapiens
tctgagttcagtggg

SEQ ID NO: 927445 - DNA, 15 bp, Homo sapiens
ctgagttcagtgggg

SEQ ID NO: 927446 - DNA, 15 bp, Homo sapiens
tgagttcagtgggga

SEQ ID NO: 927447 - DNA, 15 bp, Homo sapiens
gagttcagtggggag

SEQ ID NO: 927448 - DNA, 15 bp, Homo sapiens
agttcagtggggagg

SEQ ID NO: 927449 - DNA, 15 bp, Homo sapiens
gttcagtggggagga

SEQ ID NO: 927450 - DNA, 15 bp, Homo sapiens
ttcagtggggaggaa

SEQ ID NO: 927451 - DNA, 15 bp, Homo sapiens
tcagtggggaggaaa

SEQ ID NO: 927452 - DNA, 15 bp, Homo sapiens
cagtggggaggaaaa

SEQ ID NO: 927453 - DNA, 15 bp, Homo sapiens
agtggggaggaaaat

SEQ ID NO: 927454 - DNA, 15 bp, Homo sapiens
gtggggaggaaaatt

SEQ ID NO: 927455 - DNA, 15 bp, Homo sapiens
tggggaggaaaattt

SEQ ID NO: 927456 - DNA, 15 bp, Homo sapiens
ggggaggaaaatttt

SEQ ID NO: 927457 - DNA, 15 bp, Homo sapiens
gggaggaaaattttc

SEQ ID NO: 927458 - DNA, 15 bp, Homo sapiens
ggaggaaaattttcc

SEQ ID NO: 927459 - DNA, 15 bp, Homo sapiens
gaggaaaattttccc

SEQ ID NO: 927460 - DNA, 15 bp, Homo sapiens
aggaaaattttcccc

SEQ ID NO: 927461 - DNA, 15 bp, Homo sapiens
ggaaaattttcccct

SEQ ID NO: 927462 - DNA, 15 bp, Homo sapiens
gaaaattttcccctt

SEQ ID NO: 927463 - DNA, 15 bp, Homo sapiens
aaaattttccccttt

SEQ ID NO: 927464 - DNA, 15 bp, Homo sapiens
aaattttcccctttc

SEQ ID NO: 927465 - DNA, 15 bp, Homo sapiens
aattttcccctttcc

SEQ ID NO: 927466 - DNA, 15 bp, Homo sapiens
attttcccctttccc

SEQ ID NO: 927467 - DNA, 15 bp, Homo sapiens
ttttcccctttccct

SEQ ID NO: 927468 - DNA, 15 bp, Homo sapiens
tttcccctttccctg

SEQ ID NO: 927469 - DNA, 15 bp, Homo sapiens
ttcccctttccctgt

SEQ ID NO: 927470 - DNA, 15 bp, Homo sapiens
tcccctttccctgtc

SEQ ID NO: 927471 - DNA, 15 bp, Homo sapiens
cccctttccctgtcc

SEQ ID NO: 927472 - DNA, 15 bp, Homo sapiens
ccctttccctgtccc

SEQ ID NO: 927473 - DNA, 15 bp, Homo sapiens
cctttccctgtccca

SEQ ID NO: 927474 - DNA, 15 bp, Homo sapiens
ctttccctgtcccat

SEQ ID NO: 927475 - DNA, 15 bp, Homo sapiens
tttccctgtcccata

SEQ ID NO: 927476 - DNA, 15 bp, Homo sapiens
ttccctgtcccatat

SEQ ID NO: 927477 - DNA, 15 bp, Homo sapiens
tccctgtcccatatt

SEQ ID NO: 927478 - DNA, 15 bp, Homo sapiens
ccctgtcccatattg

SEQ ID NO: 927479 - DNA, 15 bp, Homo sapiens
cctgtcccatattga

SEQ ID NO: 927480 - DNA, 15 bp, Homo sapiens
ctgtcccatattgag

SEQ ID NO: 927481 - DNA, 15 bp, Homo sapiens
tgtcccatattgagg

SEQ ID NO: 927482 - DNA, 15 bp, Homo sapiens
gtcccatattgaggc

SEQ ID NO: 927483 - DNA, 15 bp, Homo sapiens
tcccatattgaggct

SEQ ID NO: 927484 - DNA, 15 bp, Homo sapiens
cccatattgaggctc

SEQ ID NO: 927485 - DNA, 15 bp, Homo sapiens
ccatattgaggctcc

SEQ ID NO: 927486 - DNA, 15 bp, Homo sapiens
catattgaggctcct

SEQ ID NO: 927487 - DNA, 15 bp, Homo sapiens
atattgaggctcctg

SEQ ID NO: 927488 - DNA, 15 bp, Homo sapiens
tattgaggctcctgg

SEQ ID NO: 927489 - DNA, 15 bp, Homo sapiens
attgaggctcctgga

SEQ ID NO: 927490 - DNA, 15 bp, Homo sapiens
ttgaggctcctggac

SEQ ID NO: 927491 - DNA, 15 bp, Homo sapiens
tgaggctcctggact

SEQ ID NO: 927492 - DNA, 15 bp, Homo sapiens
gaggctcctggactg

SEQ ID NO: 927493 - DNA, 15 bp, Homo sapiens
aggctcctggactgt

SEQ ID NO: 927494 - DNA, 15 bp, Homo sapiens
ggctcctggactgtg

SEQ ID NO: 927495 - DNA, 15 bp, Homo sapiens
gctcctggactgtgg

SEQ ID NO: 927496 - DNA, 15 bp, Homo sapiens
ctcctggactgtggt

SEQ ID NO: 927497 - DNA, 15 bp, Homo sapiens
tcctggactgtggtg

SEQ ID NO: 927498 - DNA, 15 bp, Homo sapiens
cctggactgtggtga

SEQ ID NO: 927499 - DNA, 15 bp, Homo sapiens
ctggactgtggtgat

SEQ ID NO: 927500 - DNA, 15 bp, Homo sapiens
tggactgtggtgatg

SEQ ID NO: 927501 - DNA, 15 bp, Homo sapiens
ggactgtggtgatgg

SEQ ID NO: 927502 - DNA, 15 bp, Homo sapiens
gactgtggtgatgga

SEQ ID NO: 927503 - DNA, 15 bp, Homo sapiens
actgtggtgatggaa

SEQ ID NO: 927504 - DNA, 15 bp, Homo sapiens
ctgtggtgatggaag

SEQ ID NO: 927505 - DNA, 15 bp, Homo sapiens
tgtggtgatggaagg

SEQ ID NO: 927506 - DNA, 15 bp, Homo sapiens
gtggtgatggaaggg

SEQ ID NO: 927507 - DNA, 15 bp, Homo sapiens
tggtgatggaaggga

SEQ ID NO: 927508 - DNA, 15 bp, Homo sapiens
ggtgatggaagggaa

SEQ ID NO: 927509 - DNA, 15 bp, Homo sapiens
gtgatggaagggaat

SEQ ID NO: 927510 - DNA, 15 bp, Homo sapiens
tgatggaagggaatt

SEQ ID NO: 927511 - DNA, 15 bp, Homo sapiens
gatggaagggaattg

SEQ ID NO: 927512 - DNA, 15 bp, Homo sapiens
atggaagggaattga

SEQ ID NO: 927513 - DNA, 15 bp, Homo sapiens
tggaagggaattgaa

SEQ ID NO: 927514 - DNA, 15 bp, Homo sapiens
ggaagggaattgaat

SEQ ID NO: 927515 - DNA, 15 bp, Homo sapiens
gaagggaattgaatt

SEQ ID NO: 927516 - DNA, 15 bp, Homo sapiens
aagggaattgaattc

SEQ ID NO: 927517 - DNA, 15 bp, Homo sapiens
agggaattgaattct

SEQ ID NO: 927518 - DNA, 15 bp, Homo sapiens
gggaattgaattctg

SEQ ID NO: 927519 - DNA, 15 bp, Homo sapiens
ggaattgaattctgt

SEQ ID NO: 927520 - DNA, 15 bp, Homo sapiens
gaattgaattctgtt

SEQ ID NO: 927521 - DNA, 15 bp, Homo sapiens
aattgaattctgttt

SEQ ID NO: 927522 - DNA, 15 bp, Homo sapiens
attgaattctgtttt

SEQ ID NO: 927523 - DNA, 15 bp, Homo sapiens
ttgaattctgttttc

SEQ ID NO: 927524 - DNA, 15 bp, Homo sapiens
tgaattctgttttca

SEQ ID NO: 927525 - DNA, 15 bp, Homo sapiens
gaattctgttttcat

SEQ ID NO: 927526 - DNA, 15 bp, Homo sapiens
aattctgttttcatg

SEQ ID NO: 927527 - DNA, 15 bp, Homo sapiens
attctgttttcatgt

SEQ ID NO: 927528 - DNA, 15 bp, Homo sapiens
ttctgttttcatgta

SEQ ID NO: 927529 - DNA, 15 bp, Homo sapiens
tctgttttcatgtat

SEQ ID NO: 927530 - DNA, 15 bp, Homo sapiens
ctgttttcatgtatg

SEQ ID NO: 927531 - DNA, 15 bp, Homo sapiens
tgttttcatgtatga

SEQ ID NO: 927532 - DNA, 15 bp, Homo sapiens
gttttcatgtatgac

SEQ ID NO: 927533 - DNA, 15 bp, Homo sapiens
ttttcatgtatgact

SEQ ID NO: 927534 - DNA, 15 bp, Homo sapiens
tttcatgtatgactt

SEQ ID NO: 927535 - DNA, 15 bp, Homo sapiens
ttcatgtatgacttt

SEQ ID NO: 927536 - DNA, 15 bp, Homo sapiens
tcatgtatgactttt

SEQ ID NO: 927537 - DNA, 15 bp, Homo sapiens
catgtatgacttttc

SEQ ID NO: 927538 - DNA, 15 bp, Homo sapiens
atgtatgacttttca

SEQ ID NO: 927539 - DNA, 15 bp, Homo sapiens
tgtatgacttttcag

SEQ ID NO: 927540 - DNA, 15 bp, Homo sapiens
gtatgacttttcagc

SEQ ID NO: 927541 - DNA, 15 bp, Homo sapiens
tatgacttttcagcc

SEQ ID NO: 927542 - DNA, 15 bp, Homo sapiens
atgacttttcagcct

SEQ ID NO: 927543 - DNA, 15 bp, Homo sapiens
tgacttttcagcctt

SEQ ID NO: 927544 - DNA, 15 bp, Homo sapiens
gacttttcagcctta

SEQ ID NO: 927545 - DNA, 15 bp, Homo sapiens
acttttcagccttaa

SEQ ID NO: 927546 - DNA, 15 bp, Homo sapiens
cttttcagccttaag

SEQ ID NO: 927547 - DNA, 15 bp, Homo sapiens
ttttcagccttaagg

SEQ ID NO: 927548 - DNA, 15 bp, Homo sapiens
tttcagccttaaggc

SEQ ID NO: 927549 - DNA, 15 bp, Homo sapiens
ttcagccttaaggca

SEQ ID NO: 927550 - DNA, 15 bp, Homo sapiens
tcagccttaaggcat

SEQ ID NO: 927551 - DNA, 15 bp, Homo sapiens
cagccttaaggcata

SEQ ID NO: 927552 - DNA, 15 bp, Homo sapiens
agccttaaggcatag

SEQ ID NO: 927553 - DNA, 15 bp, Homo sapiens
gccttaaggcatagc

SEQ ID NO: 927554 - DNA, 15 bp, Homo sapiens
ccttaaggcatagca

SEQ ID NO: 927555 - DNA, 15 bp, Homo sapiens
cttaaggcatagcag

SEQ ID NO: 927556 - DNA, 15 bp, Homo sapiens
ttaaggcatagcagg

SEQ ID NO: 927557 - DNA, 15 bp, Homo sapiens
taaggcatagcaggg

SEQ ID NO: 927558 - DNA, 15 bp, Homo sapiens
aaggcatagcagggg

SEQ ID NO: 927559 - DNA, 15 bp, Homo sapiens
aggcatagcaggggg

SEQ ID NO: 927560 - DNA, 15 bp, Homo sapiens
ggcatagcagggggc

SEQ ID NO: 927561 - DNA, 15 bp, Homo sapiens
gcatagcagggggca

SEQ ID NO: 927562 - DNA, 15 bp, Homo sapiens
catagcagggggcag

SEQ ID NO: 927563 - DNA, 15 bp, Homo sapiens
atagcagggggcagc

SEQ ID NO: 927564 - DNA, 15 bp, Homo sapiens
tagcagggggcagca

SEQ ID NO: 927565 - DNA, 15 bp, Homo sapiens
agcagggggcagcac

SEQ ID NO: 927566 - DNA, 15 bp, Homo sapiens
gcagggggcagcacc

SEQ ID NO: 927567 - DNA, 15 bp, Homo sapiens
cagggggcagcaccg

SEQ ID NO: 927568 - DNA, 15 bp, Homo sapiens
agggggcagcaccgc

SEQ ID NO: 927569 - DNA, 15 bp, Homo sapiens
gggggcagcaccgca

SEQ ID NO: 927570 - DNA, 15 bp, Homo sapiens
ggggcagcaccgcag

SEQ ID NO: 927571 - DNA, 15 bp, Homo sapiens
gggcagcaccgcaga

SEQ ID NO: 927572 - DNA, 15 bp, Homo sapiens
ggcagcaccgcagac

SEQ ID NO: 927573 - DNA, 15 bp, Homo sapiens
gcagcaccgcagaca

SEQ ID NO: 927574 - DNA, 15 bp, Homo sapiens
cagcaccgcagacaa

SEQ ID NO: 927575 - DNA, 15 bp, Homo sapiens
agcaccgcagacaag

SEQ ID NO: 927576 - DNA, 15 bp, Homo sapiens
gcaccgcagacaagg

SEQ ID NO: 927577 - DNA, 15 bp, Homo sapiens
caccgcagacaaggt

SEQ ID NO: 927578 - DNA, 15 bp, Homo sapiens
accgcagacaaggta

SEQ ID NO: 927579 - DNA, 15 bp, Homo sapiens
ccgcagacaaggtag

SEQ ID NO: 927580 - DNA, 15 bp, Homo sapiens
cgcagacaaggtagt

SEQ ID NO: 927581 - DNA, 15 bp, Homo sapiens
gcagacaaggtagtg

SEQ ID NO: 927582 - DNA, 15 bp, Homo sapiens
cagacaaggtagtgc

SEQ ID NO: 927583 - DNA, 15 bp, Homo sapiens
agacaaggtagtgct

SEQ ID NO: 927584 - DNA, 15 bp, Homo sapiens
gacaaggtagtgctt

SEQ ID NO: 927585 - DNA, 15 bp, Homo sapiens
acaaggtagtgcttc

SEQ ID NO: 927586 - DNA, 15 bp, Homo sapiens
caaggtagtgcttct

SEQ ID NO: 927587 - DNA, 15 bp, Homo sapiens
aaggtagtgcttctc

SEQ ID NO: 927588 - DNA, 15 bp, Homo sapiens
aggtagtgcttctct

SEQ ID NO: 927589 - DNA, 15 bp, Homo sapiens
ggtagtgcttctctg

SEQ ID NO: 927590 - DNA, 15 bp, Homo sapiens
gtagtgcttctctgt

SEQ ID NO: 927591 - DNA, 15 bp, Homo sapiens
tagtgcttctctgta

SEQ ID NO: 927592 - DNA, 15 bp, Homo sapiens
agtgcttctctgtag

SEQ ID NO: 927593 - DNA, 15 bp, Homo sapiens
gtgcttctctgtagt

SEQ ID NO: 927594 - DNA, 15 bp, Homo sapiens
tgcttctctgtagtg

SEQ ID NO: 927595 - DNA, 15 bp, Homo sapiens
gcttctctgtagtgg

SEQ ID NO: 927596 - DNA, 15 bp, Homo sapiens
cttctctgtagtgga

SEQ ID NO: 927597 - DNA, 15 bp, Homo sapiens
ttctctgtagtggaa

SEQ ID NO: 927598 - DNA, 15 bp, Homo sapiens
tctctgtagtggaag

SEQ ID NO: 927599 - DNA, 15 bp, Homo sapiens
ctctgtagtggaagg

SEQ ID NO: 927600 - DNA, 15 bp, Homo sapiens
tctgtagtggaaggg

SEQ ID NO: 927601 - DNA, 15 bp, Homo sapiens
ctgtagtggaagggc

SEQ ID NO: 927602 - DNA, 15 bp, Homo sapiens
tgtagtggaagggct

SEQ ID NO: 927603 - DNA, 15 bp, Homo sapiens
gtagtggaagggctg

SEQ ID NO: 927604 - DNA, 15 bp, Homo sapiens
tagtggaagggctgg

SEQ ID NO: 927605 - DNA, 15 bp, Homo sapiens
agtggaagggctgga

SEQ ID NO: 927606 - DNA, 15 bp, Homo sapiens
gtggaagggctggag

SEQ ID NO: 927607 - DNA, 15 bp, Homo sapiens
tggaagggctggaga

SEQ ID NO: 927608 - DNA, 15 bp, Homo sapiens
ggaagggctggagag

SEQ ID NO: 927609 - DNA, 15 bp, Homo sapiens
gaagggctggagagg

SEQ ID NO: 927610 - DNA, 15 bp, Homo sapiens
aagggctggagagga

SEQ ID NO: 927611 - DNA, 15 bp, Homo sapiens
agggctggagaggaa

SEQ ID NO: 927612 - DNA, 15 bp, Homo sapiens
gggctggagaggaaa

SEQ ID NO: 927613 - DNA, 15 bp, Homo sapiens
ggctggagaggaaac

SEQ ID NO: 927614 - DNA, 15 bp, Homo sapiens
gctggagaggaaaca

SEQ ID NO: 927615 - DNA, 15 bp, Homo sapiens
ctggagaggaaacag

SEQ ID NO: 927616 - DNA, 15 bp, Homo sapiens
tggagaggaaacagc

SEQ ID NO: 927617 - DNA, 15 bp, Homo sapiens
ggagaggaaacagca

SEQ ID NO: 927618 - DNA, 15 bp, Homo sapiens
gagaggaaacagcaa

SEQ ID NO: 927619 - DNA, 15 bp, Homo sapiens
agaggaaacagcaat

SEQ ID NO: 927620 - DNA, 15 bp, Homo sapiens
gaggaaacagcaatg

SEQ ID NO: 927621 - DNA, 15 bp, Homo sapiens
aggaaacagcaatgc

SEQ ID NO: 927622 - DNA, 15 bp, Homo sapiens
ggaaacagcaatgcc

SEQ ID NO: 927623 - DNA, 15 bp, Homo sapiens
gaaacagcaatgccc

SEQ ID NO: 927624 - DNA, 15 bp, Homo sapiens
aaacagcaatgccca

SEQ ID NO: 927625 - DNA, 15 bp, Homo sapiens
aacagcaatgcccag

SEQ ID NO: 927626 - DNA, 15 bp, Homo sapiens
acagcaatgcccagt

SEQ ID NO: 927627 - DNA, 15 bp, Homo sapiens
cagcaatgcccagtg

SEQ ID NO: 927628 - DNA, 15 bp, Homo sapiens
agcaatgcccagtgc

SEQ ID NO: 927629 - DNA, 15 bp, Homo sapiens
gcaatgcccagtgca

SEQ ID NO: 927630 - DNA, 15 bp, Homo sapiens
caatgcccagtgcac

SEQ ID NO: 927631 - DNA, 15 bp, Homo sapiens
aatgcccagtgcaca

SEQ ID NO: 927632 - DNA, 15 bp, Homo sapiens
atgcccagtgcacaa

SEQ ID NO: 927633 - DNA, 15 bp, Homo sapiens
tgcccagtgcacaaa

SEQ ID NO: 927634 - DNA, 15 bp, Homo sapiens
gcccagtgcacaaag

SEQ ID NO: 927635 - DNA, 15 bp, Homo sapiens
cccagtgcacaaaga

SEQ ID NO: 927636 - DNA, 15 bp, Homo sapiens
ccagtgcacaaagat

SEQ ID NO: 927637 - DNA, 15 bp, Homo sapiens
cagtgcacaaagatt

SEQ ID NO: 927638 - DNA, 15 bp, Homo sapiens
agtgcacaaagattt

SEQ ID NO: 927639 - DNA, 15 bp, Homo sapiens
gtgcacaaagatttt

SEQ ID NO: 927640 - DNA, 15 bp, Homo sapiens
tgcacaaagatttta

SEQ ID NO: 927641 - DNA, 15 bp, Homo sapiens
gcacaaagattttat

SEQ ID NO: 927642 - DNA, 15 bp, Homo sapiens
cacaaagattttatt

SEQ ID NO: 927643 - DNA, 15 bp, Homo sapiens
acaaagattttattg

SEQ ID NO: 927644 - DNA, 15 bp, Homo sapiens
caaagattttattgc

SEQ ID NO: 927645 - DNA, 15 bp, Homo sapiens
aaagattttattgca

SEQ ID NO: 927646 - DNA, 15 bp, Homo sapiens
aagattttattgcac

SEQ ID NO: 927647 - DNA, 15 bp, Homo sapiens
agattttattgcact

SEQ ID NO: 927648 - DNA, 15 bp, Homo sapiens
gattttattgcactc

SEQ ID NO: 927649 - DNA, 15 bp, Homo sapiens
attttattgcactca

SEQ ID NO: 927650 - DNA, 15 bp, Homo sapiens
ttttattgcactcaa

SEQ ID NO: 927651 - DNA, 15 bp, Homo sapiens
tttattgcactcaac

SEQ ID NO: 927652 - DNA, 15 bp, Homo sapiens
ttattgcactcaaca

SEQ ID NO: 927653 - DNA, 15 bp, Homo sapiens
tattgcactcaacag

SEQ ID NO: 927654 - DNA, 15 bp, Homo sapiens
attgcactcaacagc

SEQ ID NO: 927655 - DNA, 15 bp, Homo sapiens
ttgcactcaacagcc

SEQ ID NO: 927656 - DNA, 15 bp, Homo sapiens
tgcactcaacagcct

SEQ ID NO: 927657 - DNA, 15 bp, Homo sapiens
gcactcaacagcctt

SEQ ID NO: 927658 - DNA, 15 bp, Homo sapiens
cactcaacagccttg

SEQ ID NO: 927659 - DNA, 15 bp, Homo sapiens
actcaacagccttgg

SEQ ID NO: 927660 - DNA, 15 bp, Homo sapiens
ctcaacagccttgga

SEQ ID NO: 927661 - DNA, 15 bp, Homo sapiens
tcaacagccttggag

SEQ ID NO: 927662 - DNA, 15 bp, Homo sapiens
caacagccttggaga

SEQ ID NO: 927663 - DNA, 15 bp, Homo sapiens
aacagccttggagat

SEQ ID NO: 927664 - DNA, 15 bp, Homo sapiens
acagccttggagatg

SEQ ID NO: 927665 - DNA, 15 bp, Homo sapiens
cagccttggagatga

SEQ ID NO: 927666 - DNA, 15 bp, Homo sapiens
agccttggagatgag

SEQ ID NO: 927667 - DNA, 15 bp, Homo sapiens
gccttggagatgagc

SEQ ID NO: 927668 - DNA, 15 bp, Homo sapiens
ccttggagatgagcc

SEQ ID NO: 927669 - DNA, 15 bp, Homo sapiens
cttggagatgagcca

SEQ ID NO: 927670 - DNA, 15 bp, Homo sapiens
ttggagatgagccaa

SEQ ID NO: 927671 - DNA, 15 bp, Homo sapiens
tggagatgagccaaa

SEQ ID NO: 927672 - DNA, 15 bp, Homo sapiens
ggagatgagccaaaa

SEQ ID NO: 927673 - DNA, 15 bp, Homo sapiens
gagatgagccaaaat

SEQ ID NO: 927674 - DNA, 15 bp, Homo sapiens
agatgagccaaaata

SEQ ID NO: 927675 - DNA, 15 bp, Homo sapiens
gatgagccaaaatac

SEQ ID NO: 927676 - DNA, 15 bp, Homo sapiens
atgagccaaaatacc

SEQ ID NO: 927677 - DNA, 15 bp, Homo sapiens
tgagccaaaatacca

SEQ ID NO: 927678 - DNA, 15 bp, Homo sapiens
gagccaaaataccag

SEQ ID NO: 927679 - DNA, 15 bp, Homo sapiens
agccaaaataccagc

SEQ ID NO: 927680 - DNA, 15 bp, Homo sapiens
gccaaaataccagcc

SEQ ID NO: 927681 - DNA, 15 bp, Homo sapiens
ccaaaataccagcca

SEQ ID NO: 927682 - DNA, 15 bp, Homo sapiens
caaaataccagccag

SEQ ID NO: 927683 - DNA, 15 bp, Homo sapiens
aaaataccagccaga

SEQ ID NO: 927684 - DNA, 15 bp, Homo sapiens
aaataccagccagag

SEQ ID NO: 927685 - DNA, 15 bp, Homo sapiens
aataccagccagagg

SEQ ID NO: 927686 - DNA, 15 bp, Homo sapiens
ataccagccagagga

SEQ ID NO: 927687 - DNA, 15 bp, Homo sapiens
taccagccagaggag

SEQ ID NO: 927688 - DNA, 15 bp, Homo sapiens
accagccagaggagg

SEQ ID NO: 927689 - DNA, 15 bp, Homo sapiens
ccagccagaggagga

SEQ ID NO: 927690 - DNA, 15 bp, Homo sapiens
cagccagaggaggac

SEQ ID NO: 927691 - DNA, 15 bp, Homo sapiens
agccagaggaggaca

SEQ ID NO: 927692 - DNA, 15 bp, Homo sapiens
gccagaggaggacac

SEQ ID NO: 927693 - DNA, 15 bp, Homo sapiens
ccagaggaggacact

SEQ ID NO: 927694 - DNA, 15 bp, Homo sapiens
cagaggaggacactt

SEQ ID NO: 927695 - DNA, 15 bp, Homo sapiens
agaggaggacacttt

SEQ ID NO: 927696 - DNA, 15 bp, Homo sapiens
gaggaggacacttta

SEQ ID NO: 927697 - DNA, 15 bp, Homo sapiens
aggaggacactttac

SEQ ID NO: 927698 - DNA, 15 bp, Homo sapiens
ggaggacactttacc

SEQ ID NO: 927699 - DNA, 15 bp, Homo sapiens
gaggacactttacca

SEQ ID NO: 927700 - DNA, 15 bp, Homo sapiens
aggacactttaccaa

SEQ ID NO: 927701 - DNA, 15 bp, Homo sapiens
ggacactttaccaac

SEQ ID NO: 927702 - DNA, 15 bp, Homo sapiens
gacactttaccaacc

SEQ ID NO: 927703 - DNA, 15 bp, Homo sapiens
acactttaccaacct

SEQ ID NO: 927704 - DNA, 15 bp, Homo sapiens
cactttaccaacctg

SEQ ID NO: 927705 - DNA, 15 bp, Homo sapiens
actttaccaacctgc

SEQ ID NO: 927706 - DNA, 15 bp, Homo sapiens
ctttaccaacctgct

SEQ ID NO: 927707 - DNA, 15 bp, Homo sapiens
tttaccaacctgctt

SEQ ID NO: 927708 - DNA, 15 bp, Homo sapiens
ttaccaacctgcttg

SEQ ID NO: 927709 - DNA, 15 bp, Homo sapiens
taccaacctgcttga

SEQ ID NO: 927710 - DNA, 15 bp, Homo sapiens
accaacctgcttgaa

SEQ ID NO: 927711 - DNA, 15 bp, Homo sapiens
ccaacctgcttgaac

SEQ ID NO: 927712 - DNA, 15 bp, Homo sapiens
caacctgcttgaact

SEQ ID NO: 927713 - DNA, 15 bp, Homo sapiens
aacctgcttgaacta

SEQ ID NO: 927714 - DNA, 15 bp, Homo sapiens
acctgcttgaactaa

SEQ ID NO: 927715 - DNA, 15 bp, Homo sapiens
cctgcttgaactaag

SEQ ID NO: 927716 - DNA, 15 bp, Homo sapiens
ctgcttgaactaaga

SEQ ID NO: 927717 - DNA, 15 bp, Homo sapiens
tgcttgaactaagaa

SEQ ID NO: 927718 - DNA, 15 bp, Homo sapiens
gcttgaactaagaag

SEQ ID NO: 927719 - DNA, 15 bp, Homo sapiens
cttgaactaagaaga

SEQ ID NO: 927720 - DNA, 15 bp, Homo sapiens
ttgaactaagaagag

SEQ ID NO: 927721 - DNA, 15 bp, Homo sapiens
tgaactaagaagagc

SEQ ID NO: 927722 - DNA, 15 bp, Homo sapiens
gaactaagaagagct

SEQ ID NO: 927723 - DNA, 15 bp, Homo sapiens
aactaagaagagcta

SEQ ID NO: 927724 - DNA, 15 bp, Homo sapiens
actaagaagagctaa

SEQ ID NO: 927725 - DNA, 15 bp, Homo sapiens
ctaagaagagctaag

SEQ ID NO: 927726 - DNA, 15 bp, Homo sapiens
taagaagagctaaga

SEQ ID NO: 927727 - DNA, 15 bp, Homo sapiens
aagaagagctaagaa

SEQ ID NO: 927728 - DNA, 15 bp, Homo sapiens
agaagagctaagaac

SEQ ID NO: 927729 - DNA, 15 bp, Homo sapiens
gaagagctaagaacc

SEQ ID NO: 927730 - DNA, 15 bp, Homo sapiens
aagagctaagaacca

SEQ ID NO: 927731 - DNA, 15 bp, Homo sapiens
agagctaagaaccag

SEQ ID NO: 927732 - DNA, 15 bp, Homo sapiens
gagctaagaaccagc

SEQ ID NO: 927733 - DNA, 15 bp, Homo sapiens
agctaagaaccagca

SEQ ID NO: 927734 - DNA, 15 bp, Homo sapiens
gctaagaaccagcac

SEQ ID NO: 927735 - DNA, 15 bp, Homo sapiens
ctaagaaccagcacc

SEQ ID NO: 927736 - DNA, 15 bp, Homo sapiens
taagaaccagcacca

SEQ ID NO: 927737 - DNA, 15 bp, Homo sapiens
aagaaccagcaccat

SEQ ID NO: 927738 - DNA, 15 bp, Homo sapiens
agaaccagcaccatt

SEQ ID NO: 927739 - DNA, 15 bp, Homo sapiens
gaaccagcaccattt

SEQ ID NO: 927740 - DNA, 15 bp, Homo sapiens
aaccagcaccatttg

SEQ ID NO: 927741 - DNA, 15 bp, Homo sapiens
accagcaccatttgg

SEQ ID NO: 927742 - DNA, 15 bp, Homo sapiens
ccagcaccatttgga

SEQ ID NO: 927743 - DNA, 15 bp, Homo sapiens
cagcaccatttggat

SEQ ID NO: 927744 - DNA, 15 bp, Homo sapiens
agcaccatttggata

SEQ ID NO: 927745 - DNA, 15 bp, Homo sapiens
gcaccatttggatac

SEQ ID NO: 927746 - DNA, 15 bp, Homo sapiens
caccatttggataca

SEQ ID NO: 927747 - DNA, 15 bp, Homo sapiens
accatttggatacaa

SEQ ID NO: 927748 - DNA, 15 bp, Homo sapiens
ccatttggatacaaa

SEQ ID NO: 927749 - DNA, 15 bp, Homo sapiens
catttggatacaaat

SEQ ID NO: 927750 - DNA, 15 bp, Homo sapiens
atttggatacaaatt

SEQ ID NO: 927751 - DNA, 15 bp, Homo sapiens
tttggatacaaattg

SEQ ID NO: 927752 - DNA, 15 bp, Homo sapiens
ttggatacaaattgc

SEQ ID NO: 927753 - DNA, 15 bp, Homo sapiens
tggatacaaattgct

SEQ ID NO: 927754 - DNA, 15 bp, Homo sapiens
ggatacaaattgctg

SEQ ID NO: 927755 - DNA, 15 bp, Homo sapiens
gatacaaattgctga

SEQ ID NO: 927756 - DNA, 15 bp, Homo sapiens
atacaaattgctgat

SEQ ID NO: 927757 - DNA, 15 bp, Homo sapiens
tacaaattgctgatt

SEQ ID NO: 927758 - DNA, 15 bp, Homo sapiens
acaaattgctgattt

SEQ ID NO: 927759 - DNA, 15 bp, Homo sapiens
caaattgctgattta

SEQ ID NO: 927760 - DNA, 15 bp, Homo sapiens
aaattgctgatttat

SEQ ID NO: 927761 - DNA, 15 bp, Homo sapiens
aattgctgatttatt

SEQ ID NO: 927762 - DNA, 15 bp, Homo sapiens
attgctgatttattt

SEQ ID NO: 927763 - DNA, 15 bp, Homo sapiens
ttgctgatttatttt

SEQ ID NO: 927764 - DNA, 15 bp, Homo sapiens
tgctgatttattttc

SEQ ID NO: 927765 - DNA, 15 bp, Homo sapiens
gctgatttattttct

SEQ ID NO: 927766 - DNA, 15 bp, Homo sapiens
ctgatttattttctt

SEQ ID NO: 927767 - DNA, 15 bp, Homo sapiens
tgatttattttcttc

SEQ ID NO: 927768 - DNA, 15 bp, Homo sapiens
gatttattttcttcc

SEQ ID NO: 927769 - DNA, 15 bp, Homo sapiens
atttattttcttcct

SEQ ID NO: 927770 - DNA, 15 bp, Homo sapiens
tttattttcttcctt

SEQ ID NO: 927771 - DNA, 15 bp, Homo sapiens
ttattttcttccttg

SEQ ID NO: 927772 - DNA, 15 bp, Homo sapiens
tattttcttccttgc

SEQ ID NO: 927773 - DNA, 15 bp, Homo sapiens
attttcttccttgcc

SEQ ID NO: 927774 - DNA, 15 bp, Homo sapiens
ttttcttccttgcca

SEQ ID NO: 927775 - DNA, 15 bp, Homo sapiens
tttcttccttgccag

SEQ ID NO: 927776 - DNA, 15 bp, Homo sapiens
ttcttccttgccagt

SEQ ID NO: 927777 - DNA, 15 bp, Homo sapiens
tcttccttgccagta

SEQ ID NO: 927778 - DNA, 15 bp, Homo sapiens
cttccttgccagtag

SEQ ID NO: 927779 - DNA, 15 bp, Homo sapiens
ttccttgccagtagg

SEQ ID NO: 927780 - DNA, 15 bp, Homo sapiens
tccttgccagtaggc

SEQ ID NO: 927781 - DNA, 15 bp, Homo sapiens
ccttgccagtaggct

SEQ ID NO: 927782 - DNA, 15 bp, Homo sapiens
cttgccagtaggcta

SEQ ID NO: 927783 - DNA, 15 bp, Homo sapiens
ttgccagtaggctag

SEQ ID NO: 927784 - DNA, 15 bp, Homo sapiens
tgccagtaggctagt

SEQ ID NO: 927785 - DNA, 15 bp, Homo sapiens
gccagtaggctagtg

SEQ ID NO: 927786 - DNA, 15 bp, Homo sapiens
ccagtaggctagtga

SEQ ID NO: 927787 - DNA, 15 bp, Homo sapiens
cagtaggctagtgag

SEQ ID NO: 927788 - DNA, 15 bp, Homo sapiens
agtaggctagtgagg

SEQ ID NO: 927789 - DNA, 15 bp, Homo sapiens
gtaggctagtgaggc

SEQ ID NO: 927790 - DNA, 15 bp, Homo sapiens
taggctagtgaggcc

SEQ ID NO: 927791 - DNA, 15 bp, Homo sapiens
aggctagtgaggcct

SEQ ID NO: 927792 - DNA, 15 bp, Homo sapiens
ggctagtgaggcctg

SEQ ID NO: 927793 - DNA, 15 bp, Homo sapiens
gctagtgaggcctgg

SEQ ID NO: 927794 - DNA, 15 bp, Homo sapiens
ctagtgaggcctggg

SEQ ID NO: 927795 - DNA, 15 bp, Homo sapiens
tagtgaggcctgggg

SEQ ID NO: 927796 - DNA, 15 bp, Homo sapiens
agtgaggcctgggga

SEQ ID NO: 927797 - DNA, 15 bp, Homo sapiens
gtgaggcctggggac

SEQ ID NO: 927798 - DNA, 15 bp, Homo sapiens
tgaggcctggggaca

SEQ ID NO: 927799 - DNA, 15 bp, Homo sapiens
gaggcctggggacat

SEQ ID NO: 927800 - DNA, 15 bp, Homo sapiens
aggcctggggacata

SEQ ID NO: 927801 - DNA, 15 bp, Homo sapiens
ggcctggggacatac

SEQ ID NO: 927802 - DNA, 15 bp, Homo sapiens
gcctggggacataca

SEQ ID NO: 927803 - DNA, 15 bp, Homo sapiens
cctggggacatacat

SEQ ID NO: 927804 - DNA, 15 bp, Homo sapiens
ctggggacatacatg

SEQ ID NO: 927805 - DNA, 15 bp, Homo sapiens
tggggacatacatgt

SEQ ID NO: 927806 - DNA, 15 bp, Homo sapiens
ggggacatacatgtt

SEQ ID NO: 927807 - DNA, 15 bp, Homo sapiens
gggacatacatgtta

SEQ ID NO: 927808 - DNA, 15 bp, Homo sapiens
ggacatacatgttac

SEQ ID NO: 927809 - DNA, 15 bp, Homo sapiens
gacatacatgttact

SEQ ID NO: 927810 - DNA, 15 bp, Homo sapiens
acatacatgttacta

SEQ ID NO: 927811 - DNA, 15 bp, Homo sapiens
catacatgttactaa

SEQ ID NO: 927812 - DNA, 15 bp, Homo sapiens
atacatgttactaag

SEQ ID NO: 927813 - DNA, 15 bp, Homo sapiens
tacatgttactaaga

SEQ ID NO: 927814 - DNA, 15 bp, Homo sapiens
acatgttactaagac

SEQ ID NO: 927815 - DNA, 15 bp, Homo sapiens
catgttactaagaca

SEQ ID NO: 927816 - DNA, 15 bp, Homo sapiens
atgttactaagacaa

SEQ ID NO: 927817 - DNA, 15 bp, Homo sapiens
tgttactaagacaag

SEQ ID NO: 927818 - DNA, 15 bp, Homo sapiens
gttactaagacaagt

SEQ ID NO: 927819 - DNA, 15 bp, Homo sapiens
ttactaagacaagta

SEQ ID NO: 927820 - DNA, 15 bp, Homo sapiens
tactaagacaagtat

SEQ ID NO: 927821 - DNA, 15 bp, Homo sapiens
actaagacaagtatc

SEQ ID NO: 927822 - DNA, 15 bp, Homo sapiens
ctaagacaagtatcc

SEQ ID NO: 927823 - DNA, 15 bp, Homo sapiens
taagacaagtatcca

SEQ ID NO: 927824 - DNA, 15 bp, Homo sapiens
aagacaagtatccag

SEQ ID NO: 927825 - DNA, 15 bp, Homo sapiens
agacaagtatccagc

SEQ ID NO: 927826 - DNA, 15 bp, Homo sapiens
gacaagtatccagca

SEQ ID NO: 927827 - DNA, 15 bp, Homo sapiens
acaagtatccagcag

SEQ ID NO: 927828 - DNA, 15 bp, Homo sapiens
caagtatccagcagt

SEQ ID NO: 927829 - DNA, 15 bp, Homo sapiens
aagtatccagcagtt

SEQ ID NO: 927830 - DNA, 15 bp, Homo sapiens
agtatccagcagtta

SEQ ID NO: 927831 - DNA, 15 bp, Homo sapiens
gtatccagcagttac

SEQ ID NO: 927832 - DNA, 15 bp, Homo sapiens
tatccagcagttaca

SEQ ID NO: 927833 - DNA, 15 bp, Homo sapiens
atccagcagttacag

SEQ ID NO: 927834 - DNA, 15 bp, Homo sapiens
tccagcagttacagg

SEQ ID NO: 927835 - DNA, 15 bp, Homo sapiens
ccagcagttacagga

SEQ ID NO: 927836 - DNA, 15 bp, Homo sapiens
cagcagttacaggat

SEQ ID NO: 927837 - DNA, 15 bp, Homo sapiens
agcagttacaggatt

SEQ ID NO: 927838 - DNA, 15 bp, Homo sapiens
gcagttacaggattc

SEQ ID NO: 927839 - DNA, 15 bp, Homo sapiens
cagttacaggattct

SEQ ID NO: 927840 - DNA, 15 bp, Homo sapiens
agttacaggattctt

SEQ ID NO: 927841 - DNA, 15 bp, Homo sapiens
gttacaggattcttg

SEQ ID NO: 927842 - DNA, 15 bp, Homo sapiens
ttacaggattcttgt

SEQ ID NO: 927843 - DNA, 15 bp, Homo sapiens
tacaggattcttgtt

SEQ ID NO: 927844 - DNA, 15 bp, Homo sapiens
acaggattcttgttt

SEQ ID NO: 927845 - DNA, 15 bp, Homo sapiens
caggattcttgtttg

SEQ ID NO: 927846 - DNA, 15 bp, Homo sapiens
aggattcttgtttgc

SEQ ID NO: 927847 - DNA, 15 bp, Homo sapiens
ggattcttgtttgca

SEQ ID NO: 927848 - DNA, 15 bp, Homo sapiens
gattcttgtttgcaa

SEQ ID NO: 927849 - DNA, 15 bp, Homo sapiens
attcttgtttgcaat

SEQ ID NO: 927850 - DNA, 15 bp, Homo sapiens
ttcttgtttgcaata

SEQ ID NO: 927851 - DNA, 15 bp, Homo sapiens
tcttgtttgcaataa

SEQ ID NO: 927852 - DNA, 15 bp, Homo sapiens
cttgtttgcaataat

SEQ ID NO: 927853 - DNA, 15 bp, Homo sapiens
ttgtttgcaataatt

SEQ ID NO: 927854 - DNA, 15 bp, Homo sapiens
tgtttgcaataatta

SEQ ID NO: 927855 - DNA, 15 bp, Homo sapiens
gtttgcaataattat

SEQ ID NO: 927856 - DNA, 15 bp, Homo sapiens
tttgcaataattata

SEQ ID NO: 927857 - DNA, 15 bp, Homo sapiens
ttgcaataattataa

SEQ ID NO: 927858 - DNA, 15 bp, Homo sapiens
tgcaataattataat

SEQ ID NO: 927859 - DNA, 15 bp, Homo sapiens
gcaataattataata

SEQ ID NO: 927860 - DNA, 15 bp, Homo sapiens
caataattataatat

SEQ ID NO: 927861 - DNA, 15 bp, Homo sapiens
aataattataatatc

SEQ ID NO: 927862 - DNA, 15 bp, Homo sapiens
ataattataatatcc

SEQ ID NO: 927863 - DNA, 15 bp, Homo sapiens
taattataatatccc

SEQ ID NO: 927864 - DNA, 15 bp, Homo sapiens
aattataatatccct

SEQ ID NO: 927865 - DNA, 15 bp, Homo sapiens
attataatatccctt

SEQ ID NO: 927866 - DNA, 15 bp, Homo sapiens
ttataatatccctta

SEQ ID NO: 927867 - DNA, 15 bp, Homo sapiens
tataatatcccttac

SEQ ID NO: 927868 - DNA, 15 bp, Homo sapiens
ataatatcccttaca

SEQ ID NO: 927869 - DNA, 15 bp, Homo sapiens
taatatcccttacac

SEQ ID NO: 927870 - DNA, 15 bp, Homo sapiens
aatatcccttacaca

SEQ ID NO: 927871 - DNA, 15 bp, Homo sapiens
atatcccttacacag

SEQ ID NO: 927872 - DNA, 15 bp, Homo sapiens
tatcccttacacagg

SEQ ID NO: 927873 - DNA, 15 bp, Homo sapiens
atcccttacacaggt

SEQ ID NO: 927874 - DNA, 15 bp, Homo sapiens
tcccttacacaggtg

SEQ ID NO: 927875 - DNA, 15 bp, Homo sapiens
cccttacacaggtgc

SEQ ID NO: 927876 - DNA, 15 bp, Homo sapiens
ccttacacaggtgct

SEQ ID NO: 927877 - DNA, 15 bp, Homo sapiens
cttacacaggtgctt

SEQ ID NO: 927878 - DNA, 15 bp, Homo sapiens
ttacacaggtgctta

SEQ ID NO: 927879 - DNA, 15 bp, Homo sapiens
tacacaggtgcttat

SEQ ID NO: 927880 - DNA, 15 bp, Homo sapiens
acacaggtgcttatg

SEQ ID NO: 927881 - DNA, 15 bp, Homo sapiens
cacaggtgcttatgc

SEQ ID NO: 927882 - DNA, 15 bp, Homo sapiens
acaggtgcttatgca

SEQ ID NO: 927883 - DNA, 15 bp, Homo sapiens
caggtgcttatgcat

SEQ ID NO: 927884 - DNA, 15 bp, Homo sapiens
aggtgcttatgcata

SEQ ID NO: 927885 - DNA, 15 bp, Homo sapiens
ggtgcttatgcatac

SEQ ID NO: 927886 - DNA, 15 bp, Homo sapiens
gtgcttatgcataca

SEQ ID NO: 927887 - DNA, 15 bp, Homo sapiens
tgcttatgcatacac

SEQ ID NO: 927888 - DNA, 15 bp, Homo sapiens
gcttatgcatacaca

SEQ ID NO: 927889 - DNA, 15 bp, Homo sapiens
cttatgcatacacac

SEQ ID NO: 927890 - DNA, 15 bp, Homo sapiens
ttatgcatacacaca

SEQ ID NO: 927891 - DNA, 15 bp, Homo sapiens
tatgcatacacacac

SEQ ID NO: 927892 - DNA, 15 bp, Homo sapiens
atgcatacacacaca

SEQ ID NO: 927893 - DNA, 15 bp, Homo sapiens
tgcatacacacacac

SEQ ID NO: 927894 - DNA, 15 bp, Homo sapiens
gcatacacacacaca

SEQ ID NO: 927895 - DNA, 15 bp, Homo sapiens
catacacacacacac

SEQ ID NO: 927896 - DNA, 15 bp, Homo sapiens
atacacacacacaca

SEQ ID NO: 927897 - DNA, 15 bp, Homo sapiens
tacacacacacacac

SEQ ID NO: 927898 - DNA, 15 bp, Homo sapiens
acacacacacacact

SEQ ID NO: 927899 - DNA, 15 bp, Homo sapiens
cacacacacacactc

SEQ ID NO: 927900 - DNA, 15 bp, Homo sapiens
acacacacacactcc

SEQ ID NO: 927901 - DNA, 15 bp, Homo sapiens
cacacacacactccc

SEQ ID NO: 927902 - DNA, 15 bp, Homo sapiens
acacacacactccct

SEQ ID NO: 927903 - DNA, 15 bp, Homo sapiens
cacacacactccctt

SEQ ID NO: 927904 - DNA, 15 bp, Homo sapiens
acacacactcccttc

SEQ ID NO: 927905 - DNA, 15 bp, Homo sapiens
cacacactcccttcc

SEQ ID NO: 927906 - DNA, 15 bp, Homo sapiens
acacactcccttcct

SEQ ID NO: 927907 - DNA, 15 bp, Homo sapiens
cacactcccttcctc

SEQ ID NO: 927908 - DNA, 15 bp, Homo sapiens
acactcccttcctca

SEQ ID NO: 927909 - DNA, 15 bp, Homo sapiens
cactcccttcctcac

SEQ ID NO: 927910 - DNA, 15 bp, Homo sapiens
actcccttcctcaca

SEQ ID NO: 927911 - DNA, 15 bp, Homo sapiens
ctcccttcctcacaa

SEQ ID NO: 927912 - DNA, 15 bp, Homo sapiens
tcccttcctcacaat

SEQ ID NO: 927913 - DNA, 15 bp, Homo sapiens
cccttcctcacaata

SEQ ID NO: 927914 - DNA, 15 bp, Homo sapiens
ccttcctcacaataa

SEQ ID NO: 927915 - DNA, 15 bp, Homo sapiens
cttcctcacaataag

SEQ ID NO: 927916 - DNA, 15 bp, Homo sapiens
ttcctcacaataagc

SEQ ID NO: 927917 - DNA, 15 bp, Homo sapiens
tcctcacaataagct

SEQ ID NO: 927918 - DNA, 15 bp, Homo sapiens
cctcacaataagctc

SEQ ID NO: 927919 - DNA, 15 bp, Homo sapiens
ctcacaataagctca

SEQ ID NO: 927920 - DNA, 15 bp, Homo sapiens
tcacaataagctcag

SEQ ID NO: 927921 - DNA, 15 bp, Homo sapiens
cacaataagctcagc

SEQ ID NO: 927922 - DNA, 15 bp, Homo sapiens
acaataagctcagct

SEQ ID NO: 927923 - DNA, 15 bp, Homo sapiens
caataagctcagctt

SEQ ID NO: 927924 - DNA, 15 bp, Homo sapiens
aataagctcagcttt

SEQ ID NO: 927925 - DNA, 15 bp, Homo sapiens
ataagctcagctttg

SEQ ID NO: 927926 - DNA, 15 bp, Homo sapiens
taagctcagctttga

SEQ ID NO: 927927 - DNA, 15 bp, Homo sapiens
aagctcagctttgac

SEQ ID NO: 927928 - DNA, 15 bp, Homo sapiens
agctcagctttgaca

SEQ ID NO: 927929 - DNA, 15 bp, Homo sapiens
gctcagctttgacac

SEQ ID NO: 927930 - DNA, 15 bp, Homo sapiens
ctcagctttgacacc

SEQ ID NO: 927931 - DNA, 15 bp, Homo sapiens
tcagctttgacaccg

SEQ ID NO: 927932 - DNA, 15 bp, Homo sapiens
cagctttgacaccgg

SEQ ID NO: 927933 - DNA, 15 bp, Homo sapiens
agctttgacaccggg

SEQ ID NO: 927934 - DNA, 15 bp, Homo sapiens
gctttgacaccgggc

SEQ ID NO: 927935 - DNA, 15 bp, Homo sapiens
ctttgacaccgggca

SEQ ID NO: 927936 - DNA, 15 bp, Homo sapiens
tttgacaccgggcag

SEQ ID NO: 927937 - DNA, 15 bp, Homo sapiens
ttgacaccgggcaga

SEQ ID NO: 927938 - DNA, 15 bp, Homo sapiens
tgacaccgggcagag

SEQ ID NO: 927939 - DNA, 15 bp, Homo sapiens
gacaccgggcagagg

SEQ ID NO: 927940 - DNA, 15 bp, Homo sapiens
acaccgggcagaggg

SEQ ID NO: 927941 - DNA, 15 bp, Homo sapiens
caccgggcagaggga

SEQ ID NO: 927942 - DNA, 15 bp, Homo sapiens
accgggcagagggaa

SEQ ID NO: 927943 - DNA, 15 bp, Homo sapiens
ccgggcagagggaaa

SEQ ID NO: 927944 - DNA, 15 bp, Homo sapiens
cgggcagagggaaaa

SEQ ID NO: 927945 - DNA, 15 bp, Homo sapiens
gggcagagggaaaaa

SEQ ID NO: 927946 - DNA, 15 bp, Homo sapiens
ggcagagggaaaaac

SEQ ID NO: 927947 - DNA, 15 bp, Homo sapiens
gcagagggaaaaaca

SEQ ID NO: 927948 - DNA, 15 bp, Homo sapiens
cagagggaaaaacaa

SEQ ID NO: 927949 - DNA, 15 bp, Homo sapiens
agagggaaaaacaac

SEQ ID NO: 927950 - DNA, 15 bp, Homo sapiens
gagggaaaaacaaca

SEQ ID NO: 927951 - DNA, 15 bp, Homo sapiens
agggaaaaacaacag

SEQ ID NO: 927952 - DNA, 15 bp, Homo sapiens
gggaaaaacaacaga

SEQ ID NO: 927953 - DNA, 15 bp, Homo sapiens
ggaaaaacaacagac

SEQ ID NO: 927954 - DNA, 15 bp, Homo sapiens
gaaaaacaacagaca

SEQ ID NO: 927955 - DNA, 15 bp, Homo sapiens
aaaaacaacagacaa

SEQ ID NO: 927956 - DNA, 15 bp, Homo sapiens
aaaacaacagacaac

SEQ ID NO: 927957 - DNA, 15 bp, Homo sapiens
aaacaacagacaact

SEQ ID NO: 927958 - DNA, 15 bp, Homo sapiens
aacaacagacaactt

SEQ ID NO: 927959 - DNA, 15 bp, Homo sapiens
acaacagacaacttt

SEQ ID NO: 927960 - DNA, 15 bp, Homo sapiens
caacagacaacttta

SEQ ID NO: 927961 - DNA, 15 bp, Homo sapiens
aacagacaactttag

SEQ ID NO: 927962 - DNA, 15 bp, Homo sapiens
acagacaactttaga

SEQ ID NO: 927963 - DNA, 15 bp, Homo sapiens
cagacaactttagat

SEQ ID NO: 927964 - DNA, 15 bp, Homo sapiens
agacaactttagatg

SEQ ID NO: 927965 - DNA, 15 bp, Homo sapiens
gacaactttagatgt

SEQ ID NO: 927966 - DNA, 15 bp, Homo sapiens
acaactttagatgta

SEQ ID NO: 927967 - DNA, 15 bp, Homo sapiens
caactttagatgtag

SEQ ID NO: 927968 - DNA, 15 bp, Homo sapiens
aactttagatgtagc

SEQ ID NO: 927969 - DNA, 15 bp, Homo sapiens
actttagatgtagct

SEQ ID NO: 927970 - DNA, 15 bp, Homo sapiens
ctttagatgtagctg

SEQ ID NO: 927971 - DNA, 15 bp, Homo sapiens
tttagatgtagctgt

SEQ ID NO: 927972 - DNA, 15 bp, Homo sapiens
ttagatgtagctgta

SEQ ID NO: 927973 - DNA, 15 bp, Homo sapiens
tagatgtagctgtag

SEQ ID NO: 927974 - DNA, 15 bp, Homo sapiens
agatgtagctgtagt

SEQ ID NO: 927975 - DNA, 15 bp, Homo sapiens
gatgtagctgtagtg

SEQ ID NO: 927976 - DNA, 15 bp, Homo sapiens
atgtagctgtagtgg

SEQ ID NO: 927977 - DNA, 15 bp, Homo sapiens
tgtagctgtagtgga

SEQ ID NO: 927978 - DNA, 15 bp, Homo sapiens
gtagctgtagtggaa

SEQ ID NO: 927979 - DNA, 15 bp, Homo sapiens
tagctgtagtggaat

SEQ ID NO: 927980 - DNA, 15 bp, Homo sapiens
agctgtagtggaata

SEQ ID NO: 927981 - DNA, 15 bp, Homo sapiens
gctgtagtggaatag

SEQ ID NO: 927982 - DNA, 15 bp, Homo sapiens
ctgtagtggaatagc

SEQ ID NO: 927983 - DNA, 15 bp, Homo sapiens
tgtagtggaatagct

SEQ ID NO: 927984 - DNA, 15 bp, Homo sapiens
gtagtggaatagctc

SEQ ID NO: 927985 - DNA, 15 bp, Homo sapiens
tagtggaatagctct

SEQ ID NO: 927986 - DNA, 15 bp, Homo sapiens
agtggaatagctctg

SEQ ID NO: 927987 - DNA, 15 bp, Homo sapiens
gtggaatagctctga

SEQ ID NO: 927988 - DNA, 15 bp, Homo sapiens
tggaatagctctgaa

SEQ ID NO: 927989 - DNA, 15 bp, Homo sapiens
ggaatagctctgaaa

SEQ ID NO: 927990 - DNA, 15 bp, Homo sapiens
gaatagctctgaaat

SEQ ID NO: 927991 - DNA, 15 bp, Homo sapiens
aatagctctgaaatt

SEQ ID NO: 927992 - DNA, 15 bp, Homo sapiens
atagctctgaaattc

SEQ ID NO: 927993 - DNA, 15 bp, Homo sapiens
tagctctgaaattct

SEQ ID NO: 927994 - DNA, 15 bp, Homo sapiens
agctctgaaattctg

SEQ ID NO: 927995 - DNA, 15 bp, Homo sapiens
gctctgaaattctgt

SEQ ID NO: 927996 - DNA, 15 bp, Homo sapiens
ctctgaaattctgtg

SEQ ID NO: 927997 - DNA, 15 bp, Homo sapiens
tctgaaattctgtgt

SEQ ID NO: 927998 - DNA, 15 bp, Homo sapiens
ctgaaattctgtgtc

SEQ ID NO: 927999 - DNA, 15 bp, Homo sapiens
tgaaattctgtgtca

SEQ ID NO: 928000 - DNA, 15 bp, Homo sapiens
gaaattctgtgtcac

SEQ ID NO: 928001 - DNA, 15 bp, Homo sapiens
aaattctgtgtcaca

SEQ ID NO: 928002 - DNA, 15 bp, Homo sapiens
aattctgtgtcacag

SEQ ID NO: 928003 - DNA, 15 bp, Homo sapiens
attctgtgtcacagt

SEQ ID NO: 928004 - DNA, 15 bp, Homo sapiens
ttctgtgtcacagtt

SEQ ID NO: 928005 - DNA, 15 bp, Homo sapiens
tctgtgtcacagttt

SEQ ID NO: 928006 - DNA, 15 bp, Homo sapiens
ctgtgtcacagtttt

SEQ ID NO: 928007 - DNA, 15 bp, Homo sapiens
tgtgtcacagttttc

SEQ ID NO: 928008 - DNA, 15 bp, Homo sapiens
gtgtcacagttttct

SEQ ID NO: 928009 - DNA, 15 bp, Homo sapiens
tgtcacagttttcta

SEQ ID NO: 928010 - DNA, 15 bp, Homo sapiens
gtcacagttttctat

SEQ ID NO: 928011 - DNA, 15 bp, Homo sapiens
tcacagttttctatg

SEQ ID NO: 928012 - DNA, 15 bp, Homo sapiens
cacagttttctatga

SEQ ID NO: 928013 - DNA, 15 bp, Homo sapiens
acagttttctatgaa

SEQ ID NO: 928014 - DNA, 15 bp, Homo sapiens
cagttttctatgaat

SEQ ID NO: 928015 - DNA, 15 bp, Homo sapiens
agttttctatgaatg

SEQ ID NO: 928016 - DNA, 15 bp, Homo sapiens
gttttctatgaatga

SEQ ID NO: 928017 - DNA, 15 bp, Homo sapiens
ttttctatgaatgaa

SEQ ID NO: 928018 - DNA, 15 bp, Homo sapiens
tttctatgaatgaat

SEQ ID NO: 928019 - DNA, 15 bp, Homo sapiens
ttctatgaatgaata

SEQ ID NO: 928020 - DNA, 15 bp, Homo sapiens
tctatgaatgaatag

SEQ ID NO: 928021 - DNA, 15 bp, Homo sapiens
ctatgaatgaataga

SEQ ID NO: 928022 - DNA, 15 bp, Homo sapiens
tatgaatgaatagaa

SEQ ID NO: 928023 - DNA, 15 bp, Homo sapiens
atgaatgaatagaag

SEQ ID NO: 928024 - DNA, 15 bp, Homo sapiens
tgaatgaatagaagt

SEQ ID NO: 928025 - DNA, 15 bp, Homo sapiens
gaatgaatagaagtg

SEQ ID NO: 928026 - DNA, 15 bp, Homo sapiens
aatgaatagaagtgt

SEQ ID NO: 928027 - DNA, 15 bp, Homo sapiens
atgaatagaagtgtc

SEQ ID NO: 928028 - DNA, 15 bp, Homo sapiens
tgaatagaagtgtca

SEQ ID NO: 928029 - DNA, 15 bp, Homo sapiens
gaatagaagtgtcat

SEQ ID NO: 928030 - DNA, 15 bp, Homo sapiens
aatagaagtgtcatt

SEQ ID NO: 928031 - DNA, 15 bp, Homo sapiens
atagaagtgtcattt

SEQ ID NO: 928032 - DNA, 15 bp, Homo sapiens
tagaagtgtcatttg

SEQ ID NO: 928033 - DNA, 15 bp, Homo sapiens
agaagtgtcatttgg

SEQ ID NO: 928034 - DNA, 15 bp, Homo sapiens
gaagtgtcatttggc

SEQ ID NO: 928035 - DNA, 15 bp, Homo sapiens
aagtgtcatttggca

SEQ ID NO: 928036 - DNA, 15 bp, Homo sapiens
agtgtcatttggcat

SEQ ID NO: 928037 - DNA, 15 bp, Homo sapiens
gtgtcatttggcatc

SEQ ID NO: 928038 - DNA, 15 bp, Homo sapiens
tgtcatttggcatct

SEQ ID NO: 928039 - DNA, 15 bp, Homo sapiens
gtcatttggcatctt

SEQ ID NO: 928040 - DNA, 15 bp, Homo sapiens
tcatttggcatcttg

SEQ ID NO: 928041 - DNA, 15 bp, Homo sapiens
catttggcatcttgc

SEQ ID NO: 928042 - DNA, 15 bp, Homo sapiens
atttggcatcttgcc

SEQ ID NO: 928043 - DNA, 15 bp, Homo sapiens
tttggcatcttgcca

SEQ ID NO: 928044 - DNA, 15 bp, Homo sapiens
ttggcatcttgccac

SEQ ID NO: 928045 - DNA, 15 bp, Homo sapiens
tggcatcttgccaca

SEQ ID NO: 928046 - DNA, 15 bp, Homo sapiens
ggcatcttgccacat

SEQ ID NO: 928047 - DNA, 15 bp, Homo sapiens
gcatcttgccacatt

SEQ ID NO: 928048 - DNA, 15 bp, Homo sapiens
catcttgccacattc

SEQ ID NO: 928049 - DNA, 15 bp, Homo sapiens
atcttgccacattct

SEQ ID NO: 928050 - DNA, 15 bp, Homo sapiens
tcttgccacattctc

SEQ ID NO: 928051 - DNA, 15 bp, Homo sapiens
cttgccacattctcc

SEQ ID NO: 928052 - DNA, 15 bp, Homo sapiens
ttgccacattctcct

SEQ ID NO: 928053 - DNA, 15 bp, Homo sapiens
tgccacattctcctc

SEQ ID NO: 928054 - DNA, 15 bp, Homo sapiens
gccacattctcctca

SEQ ID NO: 928055 - DNA, 15 bp, Homo sapiens
ccacattctcctcac

SEQ ID NO: 928056 - DNA, 15 bp, Homo sapiens
cacattctcctcacc

SEQ ID NO: 928057 - DNA, 15 bp, Homo sapiens
acattctcctcacca

SEQ ID NO: 928058 - DNA, 15 bp, Homo sapiens
cattctcctcaccag

SEQ ID NO: 928059 - DNA, 15 bp, Homo sapiens
attctcctcaccagt

SEQ ID NO: 928060 - DNA, 15 bp, Homo sapiens
ttctcctcaccagtc

SEQ ID NO: 928061 - DNA, 15 bp, Homo sapiens
tctcctcaccagtct

SEQ ID NO: 928062 - DNA, 15 bp, Homo sapiens
ctcctcaccagtctc

SEQ ID NO: 928063 - DNA, 15 bp, Homo sapiens
tcctcaccagtctca

SEQ ID NO: 928064 - DNA, 15 bp, Homo sapiens
cctcaccagtctcat

SEQ ID NO: 928065 - DNA, 15 bp, Homo sapiens
ctcaccagtctcatc

SEQ ID NO: 928066 - DNA, 15 bp, Homo sapiens
tcaccagtctcatca

SEQ ID NO: 928067 - DNA, 15 bp, Homo sapiens
caccagtctcatcac

SEQ ID NO: 928068 - DNA, 15 bp, Homo sapiens
accagtctcatcact

SEQ ID NO: 928069 - DNA, 15 bp, Homo sapiens
ccagtctcatcactt

SEQ ID NO: 928070 - DNA, 15 bp, Homo sapiens
cagtctcatcacttg

SEQ ID NO: 928071 - DNA, 15 bp, Homo sapiens
agtctcatcacttgc

SEQ ID NO: 928072 - DNA, 15 bp, Homo sapiens
gtctcatcacttgct

SEQ ID NO: 928073 - DNA, 15 bp, Homo sapiens
tctcatcacttgctc

SEQ ID NO: 928074 - DNA, 15 bp, Homo sapiens
ctcatcacttgctct

SEQ ID NO: 928075 - DNA, 15 bp, Homo sapiens
tcatcacttgctctg

SEQ ID NO: 928076 - DNA, 15 bp, Homo sapiens
catcacttgctctgc

SEQ ID NO: 928077 - DNA, 15 bp, Homo sapiens
atcacttgctctgca

SEQ ID NO: 928078 - DNA, 15 bp, Homo sapiens
tcacttgctctgcaa

SEQ ID NO: 928079 - DNA, 15 bp, Homo sapiens
cacttgctctgcaac

SEQ ID NO: 928080 - DNA, 15 bp, Homo sapiens
acttgctctgcaact

SEQ ID NO: 928081 - DNA, 15 bp, Homo sapiens
cttgctctgcaactc

SEQ ID NO: 928082 - DNA, 15 bp, Homo sapiens
ttgctctgcaactct

SEQ ID NO: 928083 - DNA, 15 bp, Homo sapiens
tgctctgcaactctg

SEQ ID NO: 928084 - DNA, 15 bp, Homo sapiens
gctctgcaactctgc

SEQ ID NO: 928085 - DNA, 15 bp, Homo sapiens
ctctgcaactctgcc

SEQ ID NO: 928086 - DNA, 15 bp, Homo sapiens
tctgcaactctgccc

SEQ ID NO: 928087 - DNA, 15 bp, Homo sapiens
ctgcaactctgcccg

SEQ ID NO: 928088 - DNA, 15 bp, Homo sapiens
tgcaactctgcccgg

SEQ ID NO: 928089 - DNA, 15 bp, Homo sapiens
gcaactctgcccggt

SEQ ID NO: 928090 - DNA, 15 bp, Homo sapiens
caactctgcccggtt

SEQ ID NO: 928091 - DNA, 15 bp, Homo sapiens
aactctgcccggttt

SEQ ID NO: 928092 - DNA, 15 bp, Homo sapiens
actctgcccggtttt

SEQ ID NO: 928093 - DNA, 15 bp, Homo sapiens
ctctgcccggttttc

SEQ ID NO: 928094 - DNA, 15 bp, Homo sapiens
tctgcccggttttct

SEQ ID NO: 928095 - DNA, 15 bp, Homo sapiens
ctgcccggttttctg

SEQ ID NO: 928096 - DNA, 15 bp, Homo sapiens
tgcccggttttctgt

SEQ ID NO: 928097 - DNA, 15 bp, Homo sapiens
gcccggttttctgtg

SEQ ID NO: 928098 - DNA, 15 bp, Homo sapiens
cccggttttctgtgt

SEQ ID NO: 928099 - DNA, 15 bp, Homo sapiens
ccggttttctgtgtc

SEQ ID NO: 928100 - DNA, 15 bp, Homo sapiens
cggttttctgtgtca

SEQ ID NO: 928101 - DNA, 15 bp, Homo sapiens
ggttttctgtgtcat

SEQ ID NO: 928102 - DNA, 15 bp, Homo sapiens
gttttctgtgtcata

SEQ ID NO: 928103 - DNA, 15 bp, Homo sapiens
ttttctgtgtcatag

SEQ ID NO: 928104 - DNA, 15 bp, Homo sapiens
tttctgtgtcatagt

SEQ ID NO: 928105 - DNA, 15 bp, Homo sapiens
ttctgtgtcatagtc

SEQ ID NO: 928106 - DNA, 15 bp, Homo sapiens
tctgtgtcatagtcc

SEQ ID NO: 928107 - DNA, 15 bp, Homo sapiens
ctgtgtcatagtcct

SEQ ID NO: 928108 - DNA, 15 bp, Homo sapiens
tgtgtcatagtcctt

SEQ ID NO: 928109 - DNA, 15 bp, Homo sapiens
gtgtcatagtccttc

SEQ ID NO: 928110 - DNA, 15 bp, Homo sapiens
tgtcatagtccttct

SEQ ID NO: 928111 - DNA, 15 bp, Homo sapiens
gtcatagtccttctt

SEQ ID NO: 928112 - DNA, 15 bp, Homo sapiens
tcatagtccttcttc

SEQ ID NO: 928113 - DNA, 15 bp, Homo sapiens
catagtccttcttca

SEQ ID NO: 928114 - DNA, 15 bp, Homo sapiens
atagtccttcttcat

SEQ ID NO: 928115 - DNA, 15 bp, Homo sapiens
tagtccttcttcatt

SEQ ID NO: 928116 - DNA, 15 bp, Homo sapiens
agtccttcttcattc

SEQ ID NO: 928117 - DNA, 15 bp, Homo sapiens
gtccttcttcattca

SEQ ID NO: 928118 - DNA, 15 bp, Homo sapiens
tccttcttcattcag

SEQ ID NO: 928119 - DNA, 15 bp, Homo sapiens
ccttcttcattcagg

SEQ ID NO: 928120 - DNA, 15 bp, Homo sapiens
cttcttcattcaggc

SEQ ID NO: 928121 - DNA, 15 bp, Homo sapiens
ttcttcattcaggct

SEQ ID NO: 928122 - DNA, 15 bp, Homo sapiens
tcttcattcaggctg

SEQ ID NO: 928123 - DNA, 15 bp, Homo sapiens
cttcattcaggctgt

SEQ ID NO: 928124 - DNA, 15 bp, Homo sapiens
ttcattcaggctgtg

SEQ ID NO: 928125 - DNA, 15 bp, Homo sapiens
tcattcaggctgtgt

SEQ ID NO: 928126 - DNA, 15 bp, Homo sapiens
cattcaggctgtgtg

SEQ ID NO: 928127 - DNA, 15 bp, Homo sapiens
attcaggctgtgtgg

SEQ ID NO: 928128 - DNA, 15 bp, Homo sapiens
ttcaggctgtgtggt

SEQ ID NO: 928129 - DNA, 15 bp, Homo sapiens
tcaggctgtgtggtg

SEQ ID NO: 928130 - DNA, 15 bp, Homo sapiens
caggctgtgtggtgc

SEQ ID NO: 928131 - DNA, 15 bp, Homo sapiens
aggctgtgtggtgcc

SEQ ID NO: 928132 - DNA, 15 bp, Homo sapiens
ggctgtgtggtgcca

SEQ ID NO: 928133 - DNA, 15 bp, Homo sapiens
gctgtgtggtgccat

SEQ ID NO: 928134 - DNA, 15 bp, Homo sapiens
ctgtgtggtgccatc

SEQ ID NO: 928135 - DNA, 15 bp, Homo sapiens
tgtgtggtgccatca

SEQ ID NO: 928136 - DNA, 15 bp, Homo sapiens
gtgtggtgccatcaa

SEQ ID NO: 928137 - DNA, 15 bp, Homo sapiens
tgtggtgccatcaag

SEQ ID NO: 928138 - DNA, 15 bp, Homo sapiens
gtggtgccatcaaga

SEQ ID NO: 928139 - DNA, 15 bp, Homo sapiens
tggtgccatcaagac

SEQ ID NO: 928140 - DNA, 15 bp, Homo sapiens
ggtgccatcaagacc

SEQ ID NO: 928141 - DNA, 15 bp, Homo sapiens
gtgccatcaagacct

SEQ ID NO: 928142 - DNA, 15 bp, Homo sapiens
tgccatcaagaccta

SEQ ID NO: 928143 - DNA, 15 bp, Homo sapiens
gccatcaagacctaa

SEQ ID NO: 928144 - DNA, 15 bp, Homo sapiens
ccatcaagacctaaa

SEQ ID NO: 928145 - DNA, 15 bp, Homo sapiens
catcaagacctaaat

SEQ ID NO: 928146 - DNA, 15 bp, Homo sapiens
atcaagacctaaatt

SEQ ID NO: 928147 - DNA, 15 bp, Homo sapiens
tcaagacctaaattt

SEQ ID NO: 928148 - DNA, 15 bp, Homo sapiens
caagacctaaattta

SEQ ID NO: 928149 - DNA, 15 bp, Homo sapiens
aagacctaaatttat

SEQ ID NO: 928150 - DNA, 15 bp, Homo sapiens
agacctaaatttata

SEQ ID NO: 928151 - DNA, 15 bp, Homo sapiens
gacctaaatttatat

SEQ ID NO: 928152 - DNA, 15 bp, Homo sapiens
acctaaatttatatt

SEQ ID NO: 928153 - DNA, 15 bp, Homo sapiens
cctaaatttatattc

SEQ ID NO: 928154 - DNA, 15 bp, Homo sapiens
ctaaatttatattca

SEQ ID NO: 928155 - DNA, 15 bp, Homo sapiens
taaatttatattcag

SEQ ID NO: 928156 - DNA, 15 bp, Homo sapiens
aaatttatattcagg

SEQ ID NO: 928157 - DNA, 15 bp, Homo sapiens
aatttatattcaggt

SEQ ID NO: 928158 - DNA, 15 bp, Homo sapiens
atttatattcaggta

SEQ ID NO: 928159 - DNA, 15 bp, Homo sapiens
tttatattcaggtat

SEQ ID NO: 928160 - DNA, 15 bp, Homo sapiens
ttatattcaggtata

SEQ ID NO: 928161 - DNA, 15 bp, Homo sapiens
tatattcaggtatac

SEQ ID NO: 928162 - DNA, 15 bp, Homo sapiens
atattcaggtataca

SEQ ID NO: 928163 - DNA, 15 bp, Homo sapiens
tattcaggtatacat

SEQ ID NO: 928164 - DNA, 15 bp, Homo sapiens
attcaggtatacatt

SEQ ID NO: 928165 - DNA, 15 bp, Homo sapiens
ttcaggtatacattc

SEQ ID NO: 928166 - DNA, 15 bp, Homo sapiens
tcaggtatacattct

SEQ ID NO: 928167 - DNA, 15 bp, Homo sapiens
caggtatacattctg

SEQ ID NO: 928168 - DNA, 15 bp, Homo sapiens
aggtatacattctgt

SEQ ID NO: 928169 - DNA, 15 bp, Homo sapiens
ggtatacattctgtg

SEQ ID NO: 928170 - DNA, 15 bp, Homo sapiens
gtatacattctgtgt

SEQ ID NO: 928171 - DNA, 15 bp, Homo sapiens
tatacattctgtgtt

SEQ ID NO: 928172 - DNA, 15 bp, Homo sapiens
atacattctgtgttt

SEQ ID NO: 928173 - DNA, 15 bp, Homo sapiens
tacattctgtgtttt

SEQ ID NO: 928174 - DNA, 15 bp, Homo sapiens
acattctgtgttttc

SEQ ID NO: 928175 - DNA, 15 bp, Homo sapiens
cattctgtgttttct

SEQ ID NO: 928176 - DNA, 15 bp, Homo sapiens
attctgtgttttctt

SEQ ID NO: 928177 - DNA, 15 bp, Homo sapiens
ttctgtgttttcttc

SEQ ID NO: 928178 - DNA, 15 bp, Homo sapiens
tctgtgttttcttca

SEQ ID NO: 928179 - DNA, 15 bp, Homo sapiens
ctgtgttttcttcac

SEQ ID NO: 928180 - DNA, 15 bp, Homo sapiens
tgtgttttcttcaca

SEQ ID NO: 928181 - DNA, 15 bp, Homo sapiens
gtgttttcttcacat

SEQ ID NO: 928182 - DNA, 15 bp, Homo sapiens
tgttttcttcacata

SEQ ID NO: 928183 - DNA, 15 bp, Homo sapiens
gttttcttcacatac

SEQ ID NO: 928184 - DNA, 15 bp, Homo sapiens
ttttcttcacatact

SEQ ID NO: 928185 - DNA, 15 bp, Homo sapiens
tttcttcacatacta

SEQ ID NO: 928186 - DNA, 15 bp, Homo sapiens
ttcttcacatactaa

SEQ ID NO: 928187 - DNA, 15 bp, Homo sapiens
tcttcacatactaat

SEQ ID NO: 928188 - DNA, 15 bp, Homo sapiens
cttcacatactaatc

SEQ ID NO: 928189 - DNA, 15 bp, Homo sapiens
ttcacatactaatca

SEQ ID NO: 928190 - DNA, 15 bp, Homo sapiens
tcacatactaatcat

SEQ ID NO: 928191 - DNA, 15 bp, Homo sapiens
cacatactaatcatt

SEQ ID NO: 928192 - DNA, 15 bp, Homo sapiens
acatactaatcattc

SEQ ID NO: 928193 - DNA, 15 bp, Homo sapiens
catactaatcattca

SEQ ID NO: 928194 - DNA, 15 bp, Homo sapiens
atactaatcattcac

SEQ ID NO: 928195 - DNA, 15 bp, Homo sapiens
tactaatcattcacc

SEQ ID NO: 928196 - DNA, 15 bp, Homo sapiens
actaatcattcacca

SEQ ID NO: 928197 - DNA, 15 bp, Homo sapiens
ctaatcattcaccac

SEQ ID NO: 928198 - DNA, 15 bp, Homo sapiens
taatcattcaccact

SEQ ID NO: 928199 - DNA, 15 bp, Homo sapiens
aatcattcaccactg

SEQ ID NO: 928200 - DNA, 15 bp, Homo sapiens
atcattcaccactgt

SEQ ID NO: 928201 - DNA, 15 bp, Homo sapiens
tcattcaccactgtg

SEQ ID NO: 928202 - DNA, 15 bp, Homo sapiens
cattcaccactgtgt

SEQ ID NO: 928203 - DNA, 15 bp, Homo sapiens
attcaccactgtgtc

SEQ ID NO: 928204 - DNA, 15 bp, Homo sapiens
ttcaccactgtgtct

SEQ ID NO: 928205 - DNA, 15 bp, Homo sapiens
tcaccactgtgtcta

SEQ ID NO: 928206 - DNA, 15 bp, Homo sapiens
caccactgtgtctat

SEQ ID NO: 928207 - DNA, 15 bp, Homo sapiens
accactgtgtctata

SEQ ID NO: 928208 - DNA, 15 bp, Homo sapiens
ccactgtgtctatat

SEQ ID NO: 928209 - DNA, 15 bp, Homo sapiens
cactgtgtctatatg

SEQ ID NO: 928210 - DNA, 15 bp, Homo sapiens
actgtgtctatatgg

SEQ ID NO: 928211 - DNA, 15 bp, Homo sapiens
ctgtgtctatatggt

SEQ ID NO: 928212 - DNA, 15 bp, Homo sapiens
tgtgtctatatggtg

SEQ ID NO: 928213 - DNA, 15 bp, Homo sapiens
gtgtctatatggtga

SEQ ID NO: 928214 - DNA, 15 bp, Homo sapiens
tgtctatatggtgac

SEQ ID NO: 928215 - DNA, 15 bp, Homo sapiens
gtctatatggtgaca

SEQ ID NO: 928216 - DNA, 15 bp, Homo sapiens
tctatatggtgacat

SEQ ID NO: 928217 - DNA, 15 bp, Homo sapiens
ctatatggtgacatt

SEQ ID NO: 928218 - DNA, 15 bp, Homo sapiens
tatatggtgacattt

SEQ ID NO: 928219 - DNA, 15 bp, Homo sapiens
atatggtgacattta

SEQ ID NO: 928220 - DNA, 15 bp, Homo sapiens
tatggtgacatttaa

SEQ ID NO: 928221 - DNA, 15 bp, Homo sapiens
atggtgacatttaag

SEQ ID NO: 928222 - DNA, 15 bp, Homo sapiens
tggtgacatttaaga

SEQ ID NO: 928223 - DNA, 15 bp, Homo sapiens
ggtgacatttaagaa

SEQ ID NO: 928224 - DNA, 15 bp, Homo sapiens
gtgacatttaagaat

SEQ ID NO: 928225 - DNA, 15 bp, Homo sapiens
tgacatttaagaatt

SEQ ID NO: 928226 - DNA, 15 bp, Homo sapiens
gacatttaagaattt

SEQ ID NO: 928227 - DNA, 15 bp, Homo sapiens
acatttaagaattta

SEQ ID NO: 928228 - DNA, 15 bp, Homo sapiens
catttaagaatttat

SEQ ID NO: 928229 - DNA, 15 bp, Homo sapiens
atttaagaatttata

SEQ ID NO: 928230 - DNA, 15 bp, Homo sapiens
tttaagaatttatat

SEQ ID NO: 928231 - DNA, 15 bp, Homo sapiens
ttaagaatttatatt

SEQ ID NO: 928232 - DNA, 15 bp, Homo sapiens
taagaatttatattt

SEQ ID NO: 928233 - DNA, 15 bp, Homo sapiens
aagaatttatatttg

SEQ ID NO: 928234 - DNA, 15 bp, Homo sapiens
agaatttatatttgg

SEQ ID NO: 928235 - DNA, 15 bp, Homo sapiens
gaatttatatttggg

SEQ ID NO: 928236 - DNA, 15 bp, Homo sapiens
aatttatatttgggc

SEQ ID NO: 928237 - DNA, 15 bp, Homo sapiens
atttatatttgggca

SEQ ID NO: 928238 - DNA, 15 bp, Homo sapiens
tttatatttgggcat

SEQ ID NO: 928239 - DNA, 15 bp, Homo sapiens
ttatatttgggcatg

SEQ ID NO: 928240 - DNA, 15 bp, Homo sapiens
tatatttgggcatga

SEQ ID NO: 928241 - DNA, 15 bp, Homo sapiens
atatttgggcatgaa

SEQ ID NO: 928242 - DNA, 15 bp, Homo sapiens
tatttgggcatgaaa

SEQ ID NO: 928243 - DNA, 15 bp, Homo sapiens
atttgggcatgaaat

SEQ ID NO: 928244 - DNA, 15 bp, Homo sapiens
tttgggcatgaaatt

SEQ ID NO: 928245 - DNA, 15 bp, Homo sapiens
ttgggcatgaaatta

SEQ ID NO: 928246 - DNA, 15 bp, Homo sapiens
tgggcatgaaattat

SEQ ID NO: 928247 - DNA, 15 bp, Homo sapiens
gggcatgaaattatc

SEQ ID NO: 928248 - DNA, 15 bp, Homo sapiens
ggcatgaaattatct

SEQ ID NO: 928249 - DNA, 15 bp, Homo sapiens
gcatgaaattatctt

SEQ ID NO: 928250 - DNA, 15 bp, Homo sapiens
catgaaattatcttt

SEQ ID NO: 928251 - DNA, 15 bp, Homo sapiens
atgaaattatctttt

SEQ ID NO: 928252 - DNA, 15 bp, Homo sapiens
tgaaattatctttta

SEQ ID NO: 928253 - DNA, 15 bp, Homo sapiens
gaaattatcttttag

SEQ ID NO: 928254 - DNA, 15 bp, Homo sapiens
aaattatcttttagc

SEQ ID NO: 928255 - DNA, 15 bp, Homo sapiens
aattatcttttagct

SEQ ID NO: 928256 - DNA, 15 bp, Homo sapiens
attatcttttagctt

SEQ ID NO: 928257 - DNA, 15 bp, Homo sapiens
ttatcttttagctta

SEQ ID NO: 928258 - DNA, 15 bp, Homo sapiens
tatcttttagcttat

SEQ ID NO: 928259 - DNA, 15 bp, Homo sapiens
atcttttagcttatt

SEQ ID NO: 928260 - DNA, 15 bp, Homo sapiens
tcttttagcttatta

SEQ ID NO: 928261 - DNA, 15 bp, Homo sapiens
cttttagcttattat

SEQ ID NO: 928262 - DNA, 15 bp, Homo sapiens
ttttagcttattatt

SEQ ID NO: 928263 - DNA, 15 bp, Homo sapiens
tttagcttattattt

SEQ ID NO: 928264 - DNA, 15 bp, Homo sapiens
ttagcttattatttt

SEQ ID NO: 928265 - DNA, 15 bp, Homo sapiens
tagcttattatttta

SEQ ID NO: 928266 - DNA, 15 bp, Homo sapiens
agcttattattttaa

SEQ ID NO: 928267 - DNA, 15 bp, Homo sapiens
gcttattattttaaa

SEQ ID NO: 928268 - DNA, 15 bp, Homo sapiens
cttattattttaaag

SEQ ID NO: 928269 - DNA, 15 bp, Homo sapiens
ttattattttaaaga

SEQ ID NO: 928270 - DNA, 15 bp, Homo sapiens
tattattttaaagat

SEQ ID NO: 928271 - DNA, 15 bp, Homo sapiens
attattttaaagatc

SEQ ID NO: 928272 - DNA, 15 bp, Homo sapiens
ttattttaaagatca

SEQ ID NO: 928273 - DNA, 15 bp, Homo sapiens
tattttaaagatcat

SEQ ID NO: 928274 - DNA, 15 bp, Homo sapiens
attttaaagatcatt

SEQ ID NO: 928275 - DNA, 15 bp, Homo sapiens
ttttaaagatcattg

SEQ ID NO: 928276 - DNA, 15 bp, Homo sapiens
tttaaagatcattgc

SEQ ID NO: 928277 - DNA, 15 bp, Homo sapiens
ttaaagatcattgcc

SEQ ID NO: 928278 - DNA, 15 bp, Homo sapiens
taaagatcattgcct

SEQ ID NO: 928279 - DNA, 15 bp, Homo sapiens
aaagatcattgcctg

SEQ ID NO: 928280 - DNA, 15 bp, Homo sapiens
aagatcattgcctgg

SEQ ID NO: 928281 - DNA, 15 bp, Homo sapiens
agatcattgcctggt

SEQ ID NO: 928282 - DNA, 15 bp, Homo sapiens
gatcattgcctggta

SEQ ID NO: 928283 - DNA, 15 bp, Homo sapiens
atcattgcctggtaa

SEQ ID NO: 928284 - DNA, 15 bp, Homo sapiens
tcattgcctggtaaa

SEQ ID NO: 928285 - DNA, 15 bp, Homo sapiens
cattgcctggtaaac

SEQ ID NO: 928286 - DNA, 15 bp, Homo sapiens
attgcctggtaaact

SEQ ID NO: 928287 - DNA, 15 bp, Homo sapiens
ttgcctggtaaacta

SEQ ID NO: 928288 - DNA, 15 bp, Homo sapiens
tgcctggtaaactat

SEQ ID NO: 928289 - DNA, 15 bp, Homo sapiens
gcctggtaaactata

SEQ ID NO: 928290 - DNA, 15 bp, Homo sapiens
cctggtaaactataa

SEQ ID NO: 928291 - DNA, 15 bp, Homo sapiens
ctggtaaactataat

SEQ ID NO: 928292 - DNA, 15 bp, Homo sapiens
tggtaaactataata

SEQ ID NO: 928293 - DNA, 15 bp, Homo sapiens
ggtaaactataataa

SEQ ID NO: 928294 - DNA, 15 bp, Homo sapiens
gtaaactataataat

SEQ ID NO: 928295 - DNA, 15 bp, Homo sapiens
taaactataataatt

SEQ ID NO: 928296 - DNA, 15 bp, Homo sapiens
aaactataataatta

SEQ ID NO: 928297 - DNA, 15 bp, Homo sapiens
aactataataattat

SEQ ID NO: 928298 - DNA, 15 bp, Homo sapiens
actataataattata

SEQ ID NO: 928299 - DNA, 15 bp, Homo sapiens
ctataataattatac

SEQ ID NO: 928300 - DNA, 15 bp, Homo sapiens
tataataattataca

SEQ ID NO: 928301 - DNA, 15 bp, Homo sapiens
ataataattatacaa

SEQ ID NO: 928302 - DNA, 15 bp, Homo sapiens
taataattatacaaa

SEQ ID NO: 928303 - DNA, 15 bp, Homo sapiens
aataattatacaaat

SEQ ID NO: 928304 - DNA, 15 bp, Homo sapiens
ataattatacaaatt

SEQ ID NO: 928305 - DNA, 15 bp, Homo sapiens
taattatacaaattc

SEQ ID NO: 928306 - DNA, 15 bp, Homo sapiens
aattatacaaattca

SEQ ID NO: 928307 - DNA, 15 bp, Homo sapiens
attatacaaattcaa

SEQ ID NO: 928308 - DNA, 15 bp, Homo sapiens
ttatacaaattcaat

SEQ ID NO: 928309 - DNA, 15 bp, Homo sapiens
tatacaaattcaata

SEQ ID NO: 928310 - DNA, 15 bp, Homo sapiens
atacaaattcaatac

SEQ ID NO: 928311 - DNA, 15 bp, Homo sapiens
tacaaattcaatact

SEQ ID NO: 928312 - DNA, 15 bp, Homo sapiens
acaaattcaatactt

SEQ ID NO: 928313 - DNA, 15 bp, Homo sapiens
caaattcaatacttc

SEQ ID NO: 928314 - DNA, 15 bp, Homo sapiens
aaattcaatacttca

SEQ ID NO: 928315 - DNA, 15 bp, Homo sapiens
aattcaatacttcag

SEQ ID NO: 928316 - DNA, 15 bp, Homo sapiens
attcaatacttcagt

SEQ ID NO: 928317 - DNA, 15 bp, Homo sapiens
ttcaatacttcagtt

SEQ ID NO: 928318 - DNA, 15 bp, Homo sapiens
tcaatacttcagttc

SEQ ID NO: 928319 - DNA, 15 bp, Homo sapiens
caatacttcagttct

SEQ ID NO: 928320 - DNA, 15 bp, Homo sapiens
aatacttcagttctt

SEQ ID NO: 928321 - DNA, 15 bp, Homo sapiens
atacttcagttcttg

SEQ ID NO: 928322 - DNA, 15 bp, Homo sapiens
tacttcagttcttgt

SEQ ID NO: 928323 - DNA, 15 bp, Homo sapiens
acttcagttcttgtt

SEQ ID NO: 928324 - DNA, 15 bp, Homo sapiens
cttcagttcttgttc

SEQ ID NO: 928325 - DNA, 15 bp, Homo sapiens
ttcagttcttgttca

SEQ ID NO: 928326 - DNA, 15 bp, Homo sapiens
tcagttcttgttcat

SEQ ID NO: 928327 - DNA, 15 bp, Homo sapiens
cagttcttgttcatt

SEQ ID NO: 928328 - DNA, 15 bp, Homo sapiens
agttcttgttcatta

SEQ ID NO: 928329 - DNA, 15 bp, Homo sapiens
gttcttgttcattac

SEQ ID NO: 928330 - DNA, 15 bp, Homo sapiens
ttcttgttcattacc

SEQ ID NO: 928331 - DNA, 15 bp, Homo sapiens
tcttgttcattacct

SEQ ID NO: 928332 - DNA, 15 bp, Homo sapiens
cttgttcattaccta

SEQ ID NO: 928333 - DNA, 15 bp, Homo sapiens
ttgttcattacctac

SEQ ID NO: 928334 - DNA, 15 bp, Homo sapiens
tgttcattacctact

SEQ ID NO: 928335 - DNA, 15 bp, Homo sapiens
gttcattacctacta

SEQ ID NO: 928336 - DNA, 15 bp, Homo sapiens
ttcattacctactaa

SEQ ID NO: 928337 - DNA, 15 bp, Homo sapiens
tcattacctactaat

SEQ ID NO: 928338 - DNA, 15 bp, Homo sapiens
cattacctactaatt

SEQ ID NO: 928339 - DNA, 15 bp, Homo sapiens
attacctactaattc

SEQ ID NO: 928340 - DNA, 15 bp, Homo sapiens
ttacctactaattca

SEQ ID NO: 928341 - DNA, 15 bp, Homo sapiens
tacctactaattcat

SEQ ID NO: 928342 - DNA, 15 bp, Homo sapiens
acctactaattcata

SEQ ID NO: 928343 - DNA, 15 bp, Homo sapiens
cctactaattcatag

SEQ ID NO: 928344 - DNA, 15 bp, Homo sapiens
ctactaattcatagt

SEQ ID NO: 928345 - DNA, 15 bp, Homo sapiens
tactaattcatagtc

SEQ ID NO: 928346 - DNA, 15 bp, Homo sapiens
actaattcatagtca

SEQ ID NO: 928347 - DNA, 15 bp, Homo sapiens
ctaattcatagtcat

SEQ ID NO: 928348 - DNA, 15 bp, Homo sapiens
taattcatagtcatt

SEQ ID NO: 928349 - DNA, 15 bp, Homo sapiens
aattcatagtcatta

SEQ ID NO: 928350 - DNA, 15 bp, Homo sapiens
attcatagtcattag

SEQ ID NO: 928351 - DNA, 15 bp, Homo sapiens
ttcatagtcattagt

SEQ ID NO: 928352 - DNA, 15 bp, Homo sapiens
tcatagtcattagta

SEQ ID NO: 928353 - DNA, 15 bp, Homo sapiens
catagtcattagtac

SEQ ID NO: 928354 - DNA, 15 bp, Homo sapiens
atagtcattagtacc

SEQ ID NO: 928355 - DNA, 15 bp, Homo sapiens
tagtcattagtacca

SEQ ID NO: 928356 - DNA, 15 bp, Homo sapiens
agtcattagtaccac

SEQ ID NO: 928357 - DNA, 15 bp, Homo sapiens
gtcattagtaccaca

SEQ ID NO: 928358 - DNA, 15 bp, Homo sapiens
tcattagtaccacaa

SEQ ID NO: 928359 - DNA, 15 bp, Homo sapiens
cattagtaccacaaa

SEQ ID NO: 928360 - DNA, 15 bp, Homo sapiens
attagtaccacaaac

SEQ ID NO: 928361 - DNA, 15 bp, Homo sapiens
ttagtaccacaaaca

SEQ ID NO: 928362 - DNA, 15 bp, Homo sapiens
tagtaccacaaacaa

SEQ ID NO: 928363 - DNA, 15 bp, Homo sapiens
agtaccacaaacaaa

SEQ ID NO: 928364 - DNA, 15 bp, Homo sapiens
gtaccacaaacaaaa

SEQ ID NO: 928365 - DNA, 15 bp, Homo sapiens
taccacaaacaaaat

SEQ ID NO: 928366 - DNA, 15 bp, Homo sapiens
accacaaacaaaatg

SEQ ID NO: 928367 - DNA, 15 bp, Homo sapiens
ccacaaacaaaatgg

SEQ ID NO: 928368 - DNA, 15 bp, Homo sapiens
cacaaacaaaatggt

SEQ ID NO: 928369 - DNA, 15 bp, Homo sapiens
acaaacaaaatggtt

SEQ ID NO: 928370 - DNA, 15 bp, Homo sapiens
caaacaaaatggtta

SEQ ID NO: 928371 - DNA, 15 bp, Homo sapiens
aaacaaaatggttat

SEQ ID NO: 928372 - DNA, 15 bp, Homo sapiens
aacaaaatggttatt

SEQ ID NO: 928373 - DNA, 15 bp, Homo sapiens
acaaaatggttatta

SEQ ID NO: 928374 - DNA, 15 bp, Homo sapiens
caaaatggttattaa

SEQ ID NO: 928375 - DNA, 15 bp, Homo sapiens
aaaatggttattaac

SEQ ID NO: 928376 - DNA, 15 bp, Homo sapiens
aaatggttattaacc

SEQ ID NO: 928377 - DNA, 15 bp, Homo sapiens
aatggttattaacca

SEQ ID NO: 928378 - DNA, 15 bp, Homo sapiens
atggttattaaccaa

SEQ ID NO: 928379 - DNA, 15 bp, Homo sapiens
tggttattaaccaaa

SEQ ID NO: 928380 - DNA, 15 bp, Homo sapiens
ggttattaaccaaaa

SEQ ID NO: 928381 - DNA, 15 bp, Homo sapiens
gttattaaccaaaag

SEQ ID NO: 928382 - DNA, 15 bp, Homo sapiens
ttattaaccaaaagc

SEQ ID NO: 928383 - DNA, 15 bp, Homo sapiens
tattaaccaaaagcc

SEQ ID NO: 928384 - DNA, 15 bp, Homo sapiens
attaaccaaaagcca

SEQ ID NO: 928385 - DNA, 15 bp, Homo sapiens
ttaaccaaaagccag

SEQ ID NO: 928386 - DNA, 15 bp, Homo sapiens
taaccaaaagccaga

SEQ ID NO: 928387 - DNA, 15 bp, Homo sapiens
aaccaaaagccagag

SEQ ID NO: 928388 - DNA, 15 bp, Homo sapiens
accaaaagccagagt

SEQ ID NO: 928389 - DNA, 15 bp, Homo sapiens
ccaaaagccagagtt

SEQ ID NO: 928390 - DNA, 15 bp, Homo sapiens
caaaagccagagttt

SEQ ID NO: 928391 - DNA, 15 bp, Homo sapiens
aaaagccagagtttc

SEQ ID NO: 928392 - DNA, 15 bp, Homo sapiens
aaagccagagtttca

SEQ ID NO: 928393 - DNA, 15 bp, Homo sapiens
aagccagagtttcat

SEQ ID NO: 928394 - DNA, 15 bp, Homo sapiens
agccagagtttcata

SEQ ID NO: 928395 - DNA, 15 bp, Homo sapiens
gccagagtttcatag

SEQ ID NO: 928396 - DNA, 15 bp, Homo sapiens
ccagagtttcatagt

SEQ ID NO: 928397 - DNA, 15 bp, Homo sapiens
cagagtttcatagtt

SEQ ID NO: 928398 - DNA, 15 bp, Homo sapiens
agagtttcatagttt

SEQ ID NO: 928399 - DNA, 15 bp, Homo sapiens
gagtttcatagtttc

SEQ ID NO: 928400 - DNA, 15 bp, Homo sapiens
agtttcatagtttca

SEQ ID NO: 928401 - DNA, 15 bp, Homo sapiens
gtttcatagtttcat

SEQ ID NO: 928402 - DNA, 15 bp, Homo sapiens
tttcatagtttcatt

SEQ ID NO: 928403 - DNA, 15 bp, Homo sapiens
ttcatagtttcattg

SEQ ID NO: 928404 - DNA, 15 bp, Homo sapiens
tcatagtttcattga

SEQ ID NO: 928405 - DNA, 15 bp, Homo sapiens
catagtttcattgac

SEQ ID NO: 928406 - DNA, 15 bp, Homo sapiens
atagtttcattgaca

SEQ ID NO: 928407 - DNA, 15 bp, Homo sapiens
tagtttcattgacat

SEQ ID NO: 928408 - DNA, 15 bp, Homo sapiens
agtttcattgacatc

SEQ ID NO: 928409 - DNA, 15 bp, Homo sapiens
gtttcattgacatca

SEQ ID NO: 928410 - DNA, 15 bp, Homo sapiens
tttcattgacatcac

SEQ ID NO: 928411 - DNA, 15 bp, Homo sapiens
ttcattgacatcact

SEQ ID NO: 928412 - DNA, 15 bp, Homo sapiens
tcattgacatcactg

SEQ ID NO: 928413 - DNA, 15 bp, Homo sapiens
cattgacatcactgt

SEQ ID NO: 928414 - DNA, 15 bp, Homo sapiens
attgacatcactgtc

SEQ ID NO: 928415 - DNA, 15 bp, Homo sapiens
ttgacatcactgtca

SEQ ID NO: 928416 - DNA, 15 bp, Homo sapiens
tgacatcactgtcat

SEQ ID NO: 928417 - DNA, 15 bp, Homo sapiens
gacatcactgtcatt

SEQ ID NO: 928418 - DNA, 15 bp, Homo sapiens
acatcactgtcatta

SEQ ID NO: 928419 - DNA, 15 bp, Homo sapiens
catcactgtcattag

SEQ ID NO: 928420 - DNA, 15 bp, Homo sapiens
atcactgtcattaga

SEQ ID NO: 928421 - DNA, 15 bp, Homo sapiens
tcactgtcattagag

SEQ ID NO: 928422 - DNA, 15 bp, Homo sapiens
cactgtcattagaga

SEQ ID NO: 928423 - DNA, 15 bp, Homo sapiens
actgtcattagagat

SEQ ID NO: 928424 - DNA, 15 bp, Homo sapiens
ctgtcattagagatg

SEQ ID NO: 928425 - DNA, 15 bp, Homo sapiens
tgtcattagagatgc

SEQ ID NO: 928426 - DNA, 15 bp, Homo sapiens
gtcattagagatgca

SEQ ID NO: 928427 - DNA, 15 bp, Homo sapiens
tcattagagatgcag

SEQ ID NO: 928428 - DNA, 15 bp, Homo sapiens
cattagagatgcaga

SEQ ID NO: 928429 - DNA, 15 bp, Homo sapiens
attagagatgcagaa

SEQ ID NO: 928430 - DNA, 15 bp, Homo sapiens
ttagagatgcagaag

SEQ ID NO: 928431 - DNA, 15 bp, Homo sapiens
tagagatgcagaaga

SEQ ID NO: 928432 - DNA, 15 bp, Homo sapiens
agagatgcagaagac

SEQ ID NO: 928433 - DNA, 15 bp, Homo sapiens
gagatgcagaagaca

SEQ ID NO: 928434 - DNA, 15 bp, Homo sapiens
agatgcagaagacat

SEQ ID NO: 928435 - DNA, 15 bp, Homo sapiens
gatgcagaagacata

SEQ ID NO: 928436 - DNA, 15 bp, Homo sapiens
atgcagaagacatat

SEQ ID NO: 928437 - DNA, 15 bp, Homo sapiens
tgcagaagacatatt

SEQ ID NO: 928438 - DNA, 15 bp, Homo sapiens
gcagaagacatattt

SEQ ID NO: 928439 - DNA, 15 bp, Homo sapiens
cagaagacatatttc

SEQ ID NO: 928440 - DNA, 15 bp, Homo sapiens
agaagacatatttca

SEQ ID NO: 928441 - DNA, 15 bp, Homo sapiens
gaagacatatttcac

SEQ ID NO: 928442 - DNA, 15 bp, Homo sapiens
aagacatatttcacc

SEQ ID NO: 928443 - DNA, 15 bp, Homo sapiens
agacatatttcacct

SEQ ID NO: 928444 - DNA, 15 bp, Homo sapiens
gacatatttcacctg

SEQ ID NO: 928445 - DNA, 15 bp, Homo sapiens
acatatttcacctgt

SEQ ID NO: 928446 - DNA, 15 bp, Homo sapiens
catatttcacctgtg

SEQ ID NO: 928447 - DNA, 15 bp, Homo sapiens
atatttcacctgtgc

SEQ ID NO: 928448 - DNA, 15 bp, Homo sapiens
tatttcacctgtgca

SEQ ID NO: 928449 - DNA, 15 bp, Homo sapiens
atttcacctgtgcac

SEQ ID NO: 928450 - DNA, 15 bp, Homo sapiens
tttcacctgtgcact

SEQ ID NO: 928451 - DNA, 15 bp, Homo sapiens
ttcacctgtgcactt

SEQ ID NO: 928452 - DNA, 15 bp, Homo sapiens
tcacctgtgcacttc

SEQ ID NO: 928453 - DNA, 15 bp, Homo sapiens
cacctgtgcacttca

SEQ ID NO: 928454 - DNA, 15 bp, Homo sapiens
acctgtgcacttcat

SEQ ID NO: 928455 - DNA, 15 bp, Homo sapiens
cctgtgcacttcatg

SEQ ID NO: 928456 - DNA, 15 bp, Homo sapiens
ctgtgcacttcatgt

SEQ ID NO: 928457 - DNA, 15 bp, Homo sapiens
tgtgcacttcatgtt

SEQ ID NO: 928458 - DNA, 15 bp, Homo sapiens
gtgcacttcatgtta

SEQ ID NO: 928459 - DNA, 15 bp, Homo sapiens
tgcacttcatgttat

SEQ ID NO: 928460 - DNA, 15 bp, Homo sapiens
gcacttcatgttatg

SEQ ID NO: 928461 - DNA, 15 bp, Homo sapiens
cacttcatgttatgt

SEQ ID NO: 928462 - DNA, 15 bp, Homo sapiens
acttcatgttatgta

SEQ ID NO: 928463 - DNA, 15 bp, Homo sapiens
cttcatgttatgtat

SEQ ID NO: 928464 - DNA, 15 bp, Homo sapiens
ttcatgttatgtatg

SEQ ID NO: 928465 - DNA, 15 bp, Homo sapiens
tcatgttatgtatgg

SEQ ID NO: 928466 - DNA, 15 bp, Homo sapiens
catgttatgtatggt

SEQ ID NO: 928467 - DNA, 15 bp, Homo sapiens
atgttatgtatggtt

SEQ ID NO: 928468 - DNA, 15 bp, Homo sapiens
tgttatgtatggttt

SEQ ID NO: 928469 - DNA, 15 bp, Homo sapiens
gttatgtatggtttg

SEQ ID NO: 928470 - DNA, 15 bp, Homo sapiens
ttatgtatggtttga

SEQ ID NO: 928471 - DNA, 15 bp, Homo sapiens
tatgtatggtttgag

SEQ ID NO: 928472 - DNA, 15 bp, Homo sapiens
atgtatggtttgagc

SEQ ID NO: 928473 - DNA, 15 bp, Homo sapiens
tgtatggtttgagca

SEQ ID NO: 928474 - DNA, 15 bp, Homo sapiens
gtatggtttgagcat

SEQ ID NO: 928475 - DNA, 15 bp, Homo sapiens
tatggtttgagcatt

SEQ ID NO: 928476 - DNA, 15 bp, Homo sapiens
atggtttgagcattt

SEQ ID NO: 928477 - DNA, 15 bp, Homo sapiens
tggtttgagcatttt

SEQ ID NO: 928478 - DNA, 15 bp, Homo sapiens
ggtttgagcattttt

SEQ ID NO: 928479 - DNA, 15 bp, Homo sapiens
gtttgagcatttttc

SEQ ID NO: 928480 - DNA, 15 bp, Homo sapiens
tttgagcatttttcc

SEQ ID NO: 928481 - DNA, 15 bp, Homo sapiens
ttgagcatttttccc

SEQ ID NO: 928482 - DNA, 15 bp, Homo sapiens
tgagcatttttccca

SEQ ID NO: 928483 - DNA, 15 bp, Homo sapiens
gagcatttttcccaa

SEQ ID NO: 928484 - DNA, 15 bp, Homo sapiens
agcatttttcccaag

SEQ ID NO: 928485 - DNA, 15 bp, Homo sapiens
gcatttttcccaagc

SEQ ID NO: 928486 - DNA, 15 bp, Homo sapiens
catttttcccaagct

SEQ ID NO: 928487 - DNA, 15 bp, Homo sapiens
atttttcccaagcta

SEQ ID NO: 928488 - DNA, 15 bp, Homo sapiens
tttttcccaagctaa

SEQ ID NO: 928489 - DNA, 15 bp, Homo sapiens
ttttcccaagctaaa

SEQ ID NO: 928490 - DNA, 15 bp, Homo sapiens
tttcccaagctaaag

SEQ ID NO: 928491 - DNA, 15 bp, Homo sapiens
ttcccaagctaaagt

SEQ ID NO: 928492 - DNA, 15 bp, Homo sapiens
tcccaagctaaagta

SEQ ID NO: 928493 - DNA, 15 bp, Homo sapiens
cccaagctaaagtaa

SEQ ID NO: 928494 - DNA, 15 bp, Homo sapiens
ccaagctaaagtaat

SEQ ID NO: 928495 - DNA, 15 bp, Homo sapiens
caagctaaagtaatt

SEQ ID NO: 928496 - DNA, 15 bp, Homo sapiens
aagctaaagtaattt

SEQ ID NO: 928497 - DNA, 15 bp, Homo sapiens
agctaaagtaatttt

SEQ ID NO: 928498 - DNA, 15 bp, Homo sapiens
gctaaagtaattttg

SEQ ID NO: 928499 - DNA, 15 bp, Homo sapiens
ctaaagtaattttga

SEQ ID NO: 928500 - DNA, 15 bp, Homo sapiens
taaagtaattttgaa

SEQ ID NO: 928501 - DNA, 15 bp, Homo sapiens
aaagtaattttgaac

SEQ ID NO: 928502 - DNA, 15 bp, Homo sapiens
aagtaattttgaact

SEQ ID NO: 928503 - DNA, 15 bp, Homo sapiens
agtaattttgaactt

SEQ ID NO: 928504 - DNA, 15 bp, Homo sapiens
gtaattttgaacttt

SEQ ID NO: 928505 - DNA, 15 bp, Homo sapiens
taattttgaactttg

SEQ ID NO: 928506 - DNA, 15 bp, Homo sapiens
aattttgaactttga

SEQ ID NO: 928507 - DNA, 15 bp, Homo sapiens
attttgaactttgat

SEQ ID NO: 928508 - DNA, 15 bp, Homo sapiens
ttttgaactttgatt

SEQ ID NO: 928509 - DNA, 15 bp, Homo sapiens
tttgaactttgattt

SEQ ID NO: 928510 - DNA, 15 bp, Homo sapiens
ttgaactttgatttt

SEQ ID NO: 928511 - DNA, 15 bp, Homo sapiens
tgaactttgatttta

SEQ ID NO: 928512 - DNA, 15 bp, Homo sapiens
gaactttgattttaa

SEQ ID NO: 928513 - DNA, 15 bp, Homo sapiens
aactttgattttaaa

SEQ ID NO: 928514 - DNA, 15 bp, Homo sapiens
actttgattttaaat

SEQ ID NO: 928515 - DNA, 15 bp, Homo sapiens
ctttgattttaaatt

SEQ ID NO: 928516 - DNA, 15 bp, Homo sapiens
tttgattttaaatta

SEQ ID NO: 928517 - DNA, 15 bp, Homo sapiens
ttgattttaaattag

SEQ ID NO: 928518 - DNA, 15 bp, Homo sapiens
tgattttaaattaga

SEQ ID NO: 928519 - DNA, 15 bp, Homo sapiens
gattttaaattagat

SEQ ID NO: 928520 - DNA, 15 bp, Homo sapiens
attttaaattagata

SEQ ID NO: 928521 - DNA, 15 bp, Homo sapiens
ttttaaattagatat

SEQ ID NO: 928522 - DNA, 15 bp, Homo sapiens
tttaaattagatata

SEQ ID NO: 928523 - DNA, 15 bp, Homo sapiens
ttaaattagatataa

SEQ ID NO: 928524 - DNA, 15 bp, Homo sapiens
taaattagatataac

SEQ ID NO: 928525 - DNA, 15 bp, Homo sapiens
aaattagatataaca

SEQ ID NO: 928526 - DNA, 15 bp, Homo sapiens
aattagatataacat

SEQ ID NO: 928527 - DNA, 15 bp, Homo sapiens
attagatataacata

SEQ ID NO: 928528 - DNA, 15 bp, Homo sapiens
ttagatataacataa

SEQ ID NO: 928529 - DNA, 15 bp, Homo sapiens
tagatataacataat

SEQ ID NO: 928530 - DNA, 15 bp, Homo sapiens
agatataacataatt

SEQ ID NO: 928531 - DNA, 15 bp, Homo sapiens
gatataacataattt

SEQ ID NO: 928532 - DNA, 15 bp, Homo sapiens
atataacataattta

SEQ ID NO: 928533 - DNA, 15 bp, Homo sapiens
tataacataatttat

SEQ ID NO: 928534 - DNA, 15 bp, Homo sapiens
ataacataatttatt

SEQ ID NO: 928535 - DNA, 15 bp, Homo sapiens
taacataatttattg

SEQ ID NO: 928536 - DNA, 15 bp, Homo sapiens
aacataatttattgt

SEQ ID NO: 928537 - DNA, 15 bp, Homo sapiens
acataatttattgtt

SEQ ID NO: 928538 - DNA, 15 bp, Homo sapiens
cataatttattgttt

SEQ ID NO: 928539 - DNA, 15 bp, Homo sapiens
ataatttattgtttg

SEQ ID NO: 928540 - DNA, 15 bp, Homo sapiens
taatttattgtttga

SEQ ID NO: 928541 - DNA, 15 bp, Homo sapiens
aatttattgtttgag

SEQ ID NO: 928542 - DNA, 15 bp, Homo sapiens
atttattgtttgagt

SEQ ID NO: 928543 - DNA, 15 bp, Homo sapiens
tttattgtttgagta

SEQ ID NO: 928544 - DNA, 15 bp, Homo sapiens
ttattgtttgagtac

SEQ ID NO: 928545 - DNA, 15 bp, Homo sapiens
tattgtttgagtact

SEQ ID NO: 928546 - DNA, 15 bp, Homo sapiens
attgtttgagtactt

SEQ ID NO: 928547 - DNA, 15 bp, Homo sapiens
ttgtttgagtacttt

SEQ ID NO: 928548 - DNA, 15 bp, Homo sapiens
tgtttgagtacttta

SEQ ID NO: 928549 - DNA, 15 bp, Homo sapiens
gtttgagtactttat

SEQ ID NO: 928550 - DNA, 15 bp, Homo sapiens
tttgagtactttatg

SEQ ID NO: 928551 - DNA, 15 bp, Homo sapiens
ttgagtactttatgt

SEQ ID NO: 928552 - DNA, 15 bp, Homo sapiens
tgagtactttatgtc

SEQ ID NO: 928553 - DNA, 15 bp, Homo sapiens
gagtactttatgtcc

SEQ ID NO: 928554 - DNA, 15 bp, Homo sapiens
agtactttatgtcct

SEQ ID NO: 928555 - DNA, 15 bp, Homo sapiens
gtactttatgtcctt

SEQ ID NO: 928556 - DNA, 15 bp, Homo sapiens
tactttatgtccttg

SEQ ID NO: 928557 - DNA, 15 bp, Homo sapiens
actttatgtccttga

SEQ ID NO: 928558 - DNA, 15 bp, Homo sapiens
ctttatgtccttgaa

SEQ ID NO: 928559 - DNA, 15 bp, Homo sapiens
tttatgtccttgaaa

SEQ ID NO: 928560 - DNA, 15 bp, Homo sapiens
ttatgtccttgaaat

SEQ ID NO: 928561 - DNA, 15 bp, Homo sapiens
tatgtccttgaaatc

SEQ ID NO: 928562 - DNA, 15 bp, Homo sapiens
atgtccttgaaatct

SEQ ID NO: 928563 - DNA, 15 bp, Homo sapiens
tgtccttgaaatctg

SEQ ID NO: 928564 - DNA, 15 bp, Homo sapiens
gtccttgaaatctgt

SEQ ID NO: 928565 - DNA, 15 bp, Homo sapiens
tccttgaaatctgtg

SEQ ID NO: 928566 - DNA, 15 bp, Homo sapiens
ccttgaaatctgtgt

SEQ ID NO: 928567 - DNA, 15 bp, Homo sapiens
cttgaaatctgtgtc

SEQ ID NO: 928568 - DNA, 15 bp, Homo sapiens
ttgaaatctgtgtct

SEQ ID NO: 928569 - DNA, 15 bp, Homo sapiens
tgaaatctgtgtctc

SEQ ID NO: 928570 - DNA, 15 bp, Homo sapiens
gaaatctgtgtctca

SEQ ID NO: 928571 - DNA, 15 bp, Homo sapiens
aaatctgtgtctcag

SEQ ID NO: 928572 - DNA, 15 bp, Homo sapiens
aatctgtgtctcaga

SEQ ID NO: 928573 - DNA, 15 bp, Homo sapiens
atctgtgtctcagat

SEQ ID NO: 928574 - DNA, 15 bp, Homo sapiens
tctgtgtctcagata

SEQ ID NO: 928575 - DNA, 15 bp, Homo sapiens
ctgtgtctcagatac

SEQ ID NO: 928576 - DNA, 15 bp, Homo sapiens
tgtgtctcagataca

SEQ ID NO: 928577 - DNA, 15 bp, Homo sapiens
gtgtctcagatacaa

SEQ ID NO: 928578 - DNA, 15 bp, Homo sapiens
tgtctcagatacaac

SEQ ID NO: 928579 - DNA, 15 bp, Homo sapiens
gtctcagatacaacc

SEQ ID NO: 928580 - DNA, 15 bp, Homo sapiens
tctcagatacaacca

SEQ ID NO: 928581 - DNA, 15 bp, Homo sapiens
ctcagatacaaccat

SEQ ID NO: 928582 - DNA, 15 bp, Homo sapiens
tcagatacaaccata

SEQ ID NO: 928583 - DNA, 15 bp, Homo sapiens
cagatacaaccataa

SEQ ID NO: 928584 - DNA, 15 bp, Homo sapiens
agatacaaccataag

SEQ ID NO: 928585 - DNA, 15 bp, Homo sapiens
gatacaaccataagt

SEQ ID NO: 928586 - DNA, 15 bp, Homo sapiens
atacaaccataagtc

SEQ ID NO: 928587 - DNA, 15 bp, Homo sapiens
tacaaccataagtca

SEQ ID NO: 928588 - DNA, 15 bp, Homo sapiens
acaaccataagtcag

SEQ ID NO: 928589 - DNA, 15 bp, Homo sapiens
caaccataagtcagt

SEQ ID NO: 928590 - DNA, 15 bp, Homo sapiens
aaccataagtcagtg

SEQ ID NO: 928591 - DNA, 15 bp, Homo sapiens
accataagtcagtgt

SEQ ID NO: 928592 - DNA, 15 bp, Homo sapiens
ccataagtcagtgtt

SEQ ID NO: 928593 - DNA, 15 bp, Homo sapiens
cataagtcagtgttt

SEQ ID NO: 928594 - DNA, 15 bp, Homo sapiens
ataagtcagtgtttg

SEQ ID NO: 928595 - DNA, 15 bp, Homo sapiens
taagtcagtgtttgg

SEQ ID NO: 928596 - DNA, 15 bp, Homo sapiens
aagtcagtgtttggt

SEQ ID NO: 928597 - DNA, 15 bp, Homo sapiens
agtcagtgtttggtt

SEQ ID NO: 928598 - DNA, 15 bp, Homo sapiens
gtcagtgtttggttt

SEQ ID NO: 928599 - DNA, 15 bp, Homo sapiens
tcagtgtttggtttc

SEQ ID NO: 928600 - DNA, 15 bp, Homo sapiens
cagtgtttggtttct

SEQ ID NO: 928601 - DNA, 15 bp, Homo sapiens
agtgtttggtttctt

SEQ ID NO: 928602 - DNA, 15 bp, Homo sapiens
gtgtttggtttcttc

SEQ ID NO: 928603 - DNA, 15 bp, Homo sapiens
tgtttggtttcttcc

SEQ ID NO: 928604 - DNA, 15 bp, Homo sapiens
gtttggtttcttcca

SEQ ID NO: 928605 - DNA, 15 bp, Homo sapiens
tttggtttcttccaa

SEQ ID NO: 928606 - DNA, 15 bp, Homo sapiens
tggtttcttccaaat

SEQ ID NO: 928607 - DNA, 15 bp, Homo sapiens
ggtttcttccaaatt

SEQ ID NO: 928608 - DNA, 15 bp, Homo sapiens
gtttcttccaaattt

SEQ ID NO: 928609 - DNA, 15 bp, Homo sapiens
tttcttccaaatttt

SEQ ID NO: 928610 - DNA, 15 bp, Homo sapiens
ttcttccaaattttc

SEQ ID NO: 928611 - DNA, 15 bp, Homo sapiens
tcttccaaattttcc

SEQ ID NO: 928612 - DNA, 15 bp, Homo sapiens
cttccaaattttcca

SEQ ID NO: 928613 - DNA, 15 bp, Homo sapiens
ttccaaattttccaa

SEQ ID NO: 928614 - DNA, 15 bp, Homo sapiens
tccaaattttccaaa

SEQ ID NO: 928615 - DNA, 15 bp, Homo sapiens
ccaaattttccaaac

SEQ ID NO: 928616 - DNA, 15 bp, Homo sapiens
caaattttccaaacc

SEQ ID NO: 928617 - DNA, 15 bp, Homo sapiens
aaattttccaaaccc

SEQ ID NO: 928618 - DNA, 15 bp, Homo sapiens
aattttccaaaccca

SEQ ID NO: 928619 - DNA, 15 bp, Homo sapiens
attttccaaacccag

SEQ ID NO: 928620 - DNA, 15 bp, Homo sapiens
ttttccaaacccagc

SEQ ID NO: 928621 - DNA, 15 bp, Homo sapiens
tttccaaacccagcc

SEQ ID NO: 928622 - DNA, 15 bp, Homo sapiens
ttccaaacccagccc

SEQ ID NO: 928623 - DNA, 15 bp, Homo sapiens
tccaaacccagccca

SEQ ID NO: 928624 - DNA, 15 bp, Homo sapiens
ccaaacccagcccag

SEQ ID NO: 928625 - DNA, 15 bp, Homo sapiens
caaacccagcccagg

SEQ ID NO: 928626 - DNA, 15 bp, Homo sapiens
aaacccagcccaggg

SEQ ID NO: 928627 - DNA, 15 bp, Homo sapiens
aacccagcccaggga

SEQ ID NO: 928628 - DNA, 15 bp, Homo sapiens
acccagcccagggac

SEQ ID NO: 928629 - DNA, 15 bp, Homo sapiens
cccagcccagggact

SEQ ID NO: 928630 - DNA, 15 bp, Homo sapiens
ccagcccagggactt

SEQ ID NO: 928631 - DNA, 15 bp, Homo sapiens
cagcccagggactta

SEQ ID NO: 928632 - DNA, 15 bp, Homo sapiens
agcccagggacttac

SEQ ID NO: 928633 - DNA, 15 bp, Homo sapiens
gcccagggacttaca

SEQ ID NO: 928634 - DNA, 15 bp, Homo sapiens
cccagggacttacag

SEQ ID NO: 928635 - DNA, 15 bp, Homo sapiens
ccagggacttacaga

SEQ ID NO: 928636 - DNA, 15 bp, Homo sapiens
cagggacttacagaa

SEQ ID NO: 928637 - DNA, 15 bp, Homo sapiens
agggacttacagaaa

SEQ ID NO: 928638 - DNA, 15 bp, Homo sapiens
gggacttacagaaaa

SEQ ID NO: 928639 - DNA, 15 bp, Homo sapiens
ggacttacagaaaat

SEQ ID NO: 928640 - DNA, 15 bp, Homo sapiens
gacttacagaaaatt

SEQ ID NO: 928641 - DNA, 15 bp, Homo sapiens
acttacagaaaattg

SEQ ID NO: 928642 - DNA, 15 bp, Homo sapiens
cttacagaaaattgc

SEQ ID NO: 928643 - DNA, 15 bp, Homo sapiens
ttacagaaaattgct

SEQ ID NO: 928644 - DNA, 15 bp, Homo sapiens
tacagaaaattgctt

SEQ ID NO: 928645 - DNA, 15 bp, Homo sapiens
acagaaaattgcttc

SEQ ID NO: 928646 - DNA, 15 bp, Homo sapiens
cagaaaattgcttct

SEQ ID NO: 928647 - DNA, 15 bp, Homo sapiens
agaaaattgcttctc

SEQ ID NO: 928648 - DNA, 15 bp, Homo sapiens
gaaaattgcttctca

SEQ ID NO: 928649 - DNA, 15 bp, Homo sapiens
aaaattgcttctcaa

SEQ ID NO: 928650 - DNA, 15 bp, Homo sapiens
aaattgcttctcaaa

SEQ ID NO: 928651 - DNA, 15 bp, Homo sapiens
aattgcttctcaaaa

SEQ ID NO: 928652 - DNA, 15 bp, Homo sapiens
attgcttctcaaaaa

SEQ ID NO: 928653 - DNA, 15 bp, Homo sapiens
ttgcttctcaaaaaa

SEQ ID NO: 928654 - DNA, 15 bp, Homo sapiens
tgcttctcaaaaaag

SEQ ID NO: 928655 - DNA, 15 bp, Homo sapiens
gcttctcaaaaaaga

SEQ ID NO: 928656 - DNA, 15 bp, Homo sapiens
cttctcaaaaaagat

SEQ ID NO: 928657 - DNA, 15 bp, Homo sapiens
ttctcaaaaaagatc

SEQ ID NO: 928658 - DNA, 15 bp, Homo sapiens
tctcaaaaaagatcc

SEQ ID NO: 928659 - DNA, 15 bp, Homo sapiens
ctcaaaaaagatccc

SEQ ID NO: 928660 - DNA, 15 bp, Homo sapiens
tcaaaaaagatccct

SEQ ID NO: 928661 - DNA, 15 bp, Homo sapiens
caaaaaagatccctt

SEQ ID NO: 928662 - DNA, 15 bp, Homo sapiens
aaaaaagatcccttc

SEQ ID NO: 928663 - DNA, 15 bp, Homo sapiens
aaaaagatcccttca

SEQ ID NO: 928664 - DNA, 15 bp, Homo sapiens
aaaagatcccttcag

SEQ ID NO: 928665 - DNA, 15 bp, Homo sapiens
aaagatcccttcagc

SEQ ID NO: 928666 - DNA, 15 bp, Homo sapiens
aagatcccttcagca

SEQ ID NO: 928667 - DNA, 15 bp, Homo sapiens
agatcccttcagcat

SEQ ID NO: 928668 - DNA, 15 bp, Homo sapiens
gatcccttcagcata

SEQ ID NO: 928669 - DNA, 15 bp, Homo sapiens
atcccttcagcataa

SEQ ID NO: 928670 - DNA, 15 bp, Homo sapiens
tcccttcagcataaa

SEQ ID NO: 928671 - DNA, 15 bp, Homo sapiens
cccttcagcataaaa

SEQ ID NO: 928672 - DNA, 15 bp, Homo sapiens
ccttcagcataaaaa

SEQ ID NO: 928673 - DNA, 15 bp, Homo sapiens
cttcagcataaaaat

SEQ ID NO: 928674 - DNA, 15 bp, Homo sapiens
ttcagcataaaaatg

SEQ ID NO: 928675 - DNA, 15 bp, Homo sapiens
tcagcataaaaatga

SEQ ID NO: 928676 - DNA, 15 bp, Homo sapiens
cagcataaaaatgat

SEQ ID NO: 928677 - DNA, 15 bp, Homo sapiens
agcataaaaatgata

SEQ ID NO: 928678 - DNA, 15 bp, Homo sapiens
gcataaaaatgatat

SEQ ID NO: 928679 - DNA, 15 bp, Homo sapiens
cataaaaatgatata

SEQ ID NO: 928680 - DNA, 15 bp, Homo sapiens
ataaaaatgatataa

SEQ ID NO: 928681 - DNA, 15 bp, Homo sapiens
taaaaatgatataat

SEQ ID NO: 928682 - DNA, 15 bp, Homo sapiens
aaaaatgatataatg

SEQ ID NO: 928683 - DNA, 15 bp, Homo sapiens
aaaatgatataatgg

SEQ ID NO: 928684 - DNA, 15 bp, Homo sapiens
aaatgatataatgga

SEQ ID NO: 928685 - DNA, 15 bp, Homo sapiens
aatgatataatggat

SEQ ID NO: 928686 - DNA, 15 bp, Homo sapiens
atgatataatggatt

SEQ ID NO: 928687 - DNA, 15 bp, Homo sapiens
tgatataatggattg

SEQ ID NO: 928688 - DNA, 15 bp, Homo sapiens
gatataatggattgt

SEQ ID NO: 928689 - DNA, 15 bp, Homo sapiens
atataatggattgta

SEQ ID NO: 928690 - DNA, 15 bp, Homo sapiens
tataatggattgtag

SEQ ID NO: 928691 - DNA, 15 bp, Homo sapiens
ataatggattgtagg

SEQ ID NO: 928692 - DNA, 15 bp, Homo sapiens
taatggattgtagga

SEQ ID NO: 928693 - DNA, 15 bp, Homo sapiens
aatggattgtaggaa

SEQ ID NO: 928694 - DNA, 15 bp, Homo sapiens
atggattgtaggaac

SEQ ID NO: 928695 - DNA, 15 bp, Homo sapiens
tggattgtaggaact

SEQ ID NO: 928696 - DNA, 15 bp, Homo sapiens
ggattgtaggaactt

SEQ ID NO: 928697 - DNA, 15 bp, Homo sapiens
gattgtaggaacttg

SEQ ID NO: 928698 - DNA, 15 bp, Homo sapiens
attgtaggaacttgg

SEQ ID NO: 928699 - DNA, 15 bp, Homo sapiens
ttgtaggaacttggg

SEQ ID NO: 928700 - DNA, 15 bp, Homo sapiens
tgtaggaacttgggt

SEQ ID NO: 928701 - DNA, 15 bp, Homo sapiens
gtaggaacttgggtg

SEQ ID NO: 928702 - DNA, 15 bp, Homo sapiens
taggaacttgggtgg

SEQ ID NO: 928703 - DNA, 15 bp, Homo sapiens
aggaacttgggtgga

SEQ ID NO: 928704 - DNA, 15 bp, Homo sapiens
ggaacttgggtggaa

SEQ ID NO: 928705 - DNA, 15 bp, Homo sapiens
gaacttgggtggaag

SEQ ID NO: 928706 - DNA, 15 bp, Homo sapiens
aacttgggtggaaga

SEQ ID NO: 928707 - DNA, 15 bp, Homo sapiens
acttgggtggaagaa

SEQ ID NO: 928708 - DNA, 15 bp, Homo sapiens
cttgggtggaagaat

SEQ ID NO: 928709 - DNA, 15 bp, Homo sapiens
ttgggtggaagaatg

SEQ ID NO: 928710 - DNA, 15 bp, Homo sapiens
tagccaagcaaaagg

SEQ ID NO: 928711 - DNA, 15 bp, Homo sapiens
agccaagcaaaagga

SEQ ID NO: 928712 - DNA, 15 bp, Homo sapiens
gccaagcaaaaggag

SEQ ID NO: 928713 - DNA, 15 bp, Homo sapiens
ccaagcaaaaggagc

SEQ ID NO: 928714 - DNA, 15 bp, Homo sapiens
caagcaaaaggagca

SEQ ID NO: 928715 - DNA, 15 bp, Homo sapiens
aagcaaaaggagcat

SEQ ID NO: 928716 - DNA, 15 bp, Homo sapiens
agcaaaaggagcata

SEQ ID NO: 928717 - DNA, 15 bp, Homo sapiens
gcaaaaggagcataa

SEQ ID NO: 928718 - DNA, 15 bp, Homo sapiens
caaaaggagcataaa

SEQ ID NO: 928719 - DNA, 15 bp, Homo sapiens
aaaaggagcataaat

SEQ ID NO: 928720 - DNA, 15 bp, Homo sapiens
aaaggagcataaatt

SEQ ID NO: 928721 - DNA, 15 bp, Homo sapiens
aaggagcataaattt

SEQ ID NO: 928722 - DNA, 15 bp, Homo sapiens
aggagcataaatttt

SEQ ID NO: 928723 - DNA, 15 bp, Homo sapiens
ggagcataaattttg

SEQ ID NO: 928724 - DNA, 15 bp, Homo sapiens
gagcataaattttga

SEQ ID NO: 928725 - DNA, 15 bp, Homo sapiens
agcataaattttgaa

SEQ ID NO: 928726 - DNA, 15 bp, Homo sapiens
gcataaattttgaat

SEQ ID NO: 928727 - DNA, 15 bp, Homo sapiens
cataaattttgaatc

SEQ ID NO: 928728 - DNA, 15 bp, Homo sapiens
ataaattttgaatca

SEQ ID NO: 928729 - DNA, 15 bp, Homo sapiens
taaattttgaatcac

SEQ ID NO: 928730 - DNA, 15 bp, Homo sapiens
aaattttgaatcaca

SEQ ID NO: 928731 - DNA, 15 bp, Homo sapiens
aattttgaatcacac

SEQ ID NO: 928732 - DNA, 15 bp, Homo sapiens
attttgaatcacaca

SEQ ID NO: 928733 - DNA, 15 bp, Homo sapiens
ttttgaatcacacag

SEQ ID NO: 928734 - DNA, 15 bp, Homo sapiens
tttgaatcacacagt

SEQ ID NO: 928735 - DNA, 15 bp, Homo sapiens
ttgaatcacacagtc

SEQ ID NO: 928736 - DNA, 15 bp, Homo sapiens
tgaatcacacagtcc

SEQ ID NO: 928737 - DNA, 15 bp, Homo sapiens
gaatcacacagtcct

SEQ ID NO: 928738 - DNA, 15 bp, Homo sapiens
aatcacacagtcctg

SEQ ID NO: 928739 - DNA, 15 bp, Homo sapiens
atcacacagtcctgt

SEQ ID NO: 928740 - DNA, 15 bp, Homo sapiens
tcacacagtcctgta

SEQ ID NO: 928741 - DNA, 15 bp, Homo sapiens
cacacagtcctgtat

SEQ ID NO: 928742 - DNA, 15 bp, Homo sapiens
acacagtcctgtatc

SEQ ID NO: 928743 - DNA, 15 bp, Homo sapiens
cacagtcctgtatct

SEQ ID NO: 928744 - DNA, 15 bp, Homo sapiens
acagtcctgtatctg

SEQ ID NO: 928745 - DNA, 15 bp, Homo sapiens
cagtcctgtatctga

SEQ ID NO: 928746 - DNA, 15 bp, Homo sapiens
agtcctgtatctgaa

SEQ ID NO: 928747 - DNA, 15 bp, Homo sapiens
gtcctgtatctgaat

SEQ ID NO: 928748 - DNA, 15 bp, Homo sapiens
tcctgtatctgaatc

SEQ ID NO: 928749 - DNA, 15 bp, Homo sapiens
cctgtatctgaatcc

SEQ ID NO: 928750 - DNA, 15 bp, Homo sapiens
ctgtatctgaatcca

SEQ ID NO: 928751 - DNA, 15 bp, Homo sapiens
tgtatctgaatccat

SEQ ID NO: 928752 - DNA, 15 bp, Homo sapiens
gtatctgaatccatt

SEQ ID NO: 928753 - DNA, 15 bp, Homo sapiens
tatctgaatccattt

SEQ ID NO: 928754 - DNA, 15 bp, Homo sapiens
atctgaatccatttc

SEQ ID NO: 928755 - DNA, 15 bp, Homo sapiens
tctgaatccatttct

SEQ ID NO: 928756 - DNA, 15 bp, Homo sapiens
ctgaatccatttctg

SEQ ID NO: 928757 - DNA, 15 bp, Homo sapiens
tgaatccatttctgc

SEQ ID NO: 928758 - DNA, 15 bp, Homo sapiens
gaatccatttctgct

SEQ ID NO: 928759 - DNA, 15 bp, Homo sapiens
aatccatttctgcta

SEQ ID NO: 928760 - DNA, 15 bp, Homo sapiens
atccatttctgctac

SEQ ID NO: 928761 - DNA, 15 bp, Homo sapiens
tccatttctgctact

SEQ ID NO: 928762 - DNA, 15 bp, Homo sapiens
ccatttctgctactt

SEQ ID NO: 928763 - DNA, 15 bp, Homo sapiens
catttctgctactta

SEQ ID NO: 928764 - DNA, 15 bp, Homo sapiens
atttctgctacttat

SEQ ID NO: 928765 - DNA, 15 bp, Homo sapiens
tttctgctacttatt

SEQ ID NO: 928766 - DNA, 15 bp, Homo sapiens
ttctgctacttatta

SEQ ID NO: 928767 - DNA, 15 bp, Homo sapiens
tctgctacttattac

SEQ ID NO: 928768 - DNA, 15 bp, Homo sapiens
ctgctacttattact

SEQ ID NO: 928769 - DNA, 15 bp, Homo sapiens
tgctacttattactt

SEQ ID NO: 928770 - DNA, 15 bp, Homo sapiens
gctacttattacttg

SEQ ID NO: 928771 - DNA, 15 bp, Homo sapiens
ctacttattacttga

SEQ ID NO: 928772 - DNA, 15 bp, Homo sapiens
tacttattacttgat

SEQ ID NO: 928773 - DNA, 15 bp, Homo sapiens
acttattacttgatt

SEQ ID NO: 928774 - DNA, 15 bp, Homo sapiens
cttattacttgattg

SEQ ID NO: 928775 - DNA, 15 bp, Homo sapiens
ttattacttgattgc

SEQ ID NO: 928776 - DNA, 15 bp, Homo sapiens
tattacttgattgcc

SEQ ID NO: 928777 - DNA, 15 bp, Homo sapiens
attacttgattgccc

SEQ ID NO: 928778 - DNA, 15 bp, Homo sapiens
ttacttgattgccct

SEQ ID NO: 928779 - DNA, 15 bp, Homo sapiens
tacttgattgccctt

SEQ ID NO: 928780 - DNA, 15 bp, Homo sapiens
acttgattgcccttt

SEQ ID NO: 928781 - DNA, 15 bp, Homo sapiens
cttgattgccctttg

SEQ ID NO: 928782 - DNA, 15 bp, Homo sapiens
ttgattgccctttga

SEQ ID NO: 928783 - DNA, 15 bp, Homo sapiens
tgattgccctttgat

SEQ ID NO: 928784 - DNA, 15 bp, Homo sapiens
gattgccctttgatt

SEQ ID NO: 928785 - DNA, 15 bp, Homo sapiens
attgccctttgatta

SEQ ID NO: 928786 - DNA, 15 bp, Homo sapiens
ttgccctttgattaa

SEQ ID NO: 928787 - DNA, 15 bp, Homo sapiens
tgccctttgattaat

SEQ ID NO: 928788 - DNA, 15 bp, Homo sapiens
gccctttgattaatt

SEQ ID NO: 928789 - DNA, 15 bp, Homo sapiens
ccctttgattaatta

SEQ ID NO: 928790 - DNA, 15 bp, Homo sapiens
cctttgattaattac

SEQ ID NO: 928791 - DNA, 15 bp, Homo sapiens
ctttgattaattact

SEQ ID NO: 928792 - DNA, 15 bp, Homo sapiens
tttgattaattactt

SEQ ID NO: 928793 - DNA, 15 bp, Homo sapiens
ttgattaattactta

SEQ ID NO: 928794 - DNA, 15 bp, Homo sapiens
tgattaattacttaa

SEQ ID NO: 928795 - DNA, 15 bp, Homo sapiens
gattaattacttaat

SEQ ID NO: 928796 - DNA, 15 bp, Homo sapiens
attaattacttaatt

SEQ ID NO: 928797 - DNA, 15 bp, Homo sapiens
ttaattacttaattt

SEQ ID NO: 928798 - DNA, 15 bp, Homo sapiens
taattacttaatttt

SEQ ID NO: 928799 - DNA, 15 bp, Homo sapiens
aattacttaatttta

SEQ ID NO: 928800 - DNA, 15 bp, Homo sapiens
attacttaattttat

SEQ ID NO: 928801 - DNA, 15 bp, Homo sapiens
ttacttaattttatt

SEQ ID NO: 928802 - DNA, 15 bp, Homo sapiens
tacttaattttattg

SEQ ID NO: 928803 - DNA, 15 bp, Homo sapiens
acttaattttattga

SEQ ID NO: 928804 - DNA, 15 bp, Homo sapiens
cttaattttattgag

SEQ ID NO: 928805 - DNA, 15 bp, Homo sapiens
ttaattttattgagc

SEQ ID NO: 928806 - DNA, 15 bp, Homo sapiens
taattttattgagca

SEQ ID NO: 928807 - DNA, 15 bp, Homo sapiens
aattttattgagcaa

SEQ ID NO: 928808 - DNA, 15 bp, Homo sapiens
attttattgagcaac

SEQ ID NO: 928809 - DNA, 15 bp, Homo sapiens
ttttattgagcaaca

SEQ ID NO: 928810 - DNA, 15 bp, Homo sapiens
tttattgagcaacag

SEQ ID NO: 928811 - DNA, 15 bp, Homo sapiens
ttattgagcaacagt

SEQ ID NO: 928812 - DNA, 15 bp, Homo sapiens
tattgagcaacagtt

SEQ ID NO: 928813 - DNA, 15 bp, Homo sapiens
attgagcaacagttg

SEQ ID NO: 928814 - DNA, 15 bp, Homo sapiens
ttgagcaacagttgt

SEQ ID NO: 928815 - DNA, 15 bp, Homo sapiens
tgagcaacagttgtc

SEQ ID NO: 928816 - DNA, 15 bp, Homo sapiens
gagcaacagttgtct

SEQ ID NO: 928817 - DNA, 15 bp, Homo sapiens
agcaacagttgtctc

SEQ ID NO: 928818 - DNA, 15 bp, Homo sapiens
gcaacagttgtctca

SEQ ID NO: 928819 - DNA, 15 bp, Homo sapiens
caacagttgtctcat

SEQ ID NO: 928820 - DNA, 15 bp, Homo sapiens
aacagttgtctcatc

SEQ ID NO: 928821 - DNA, 15 bp, Homo sapiens
acagttgtctcatct

SEQ ID NO: 928822 - DNA, 15 bp, Homo sapiens
cagttgtctcatctc

SEQ ID NO: 928823 - DNA, 15 bp, Homo sapiens
agttgtctcatctct

SEQ ID NO: 928824 - DNA, 15 bp, Homo sapiens
gttgtctcatctctt

SEQ ID NO: 928825 - DNA, 15 bp, Homo sapiens
ttgtctcatctctta

SEQ ID NO: 928826 - DNA, 15 bp, Homo sapiens
tgtctcatctcttag

SEQ ID NO: 928827 - DNA, 15 bp, Homo sapiens
gtctcatctcttagt

SEQ ID NO: 928828 - DNA, 15 bp, Homo sapiens
tctcatctcttagta

SEQ ID NO: 928829 - DNA, 15 bp, Homo sapiens
ctcatctcttagtat

SEQ ID NO: 928830 - DNA, 15 bp, Homo sapiens
tcatctcttagtatt

SEQ ID NO: 928831 - DNA, 15 bp, Homo sapiens
catctcttagtattt

SEQ ID NO: 928832 - DNA, 15 bp, Homo sapiens
atctcttagtattta

SEQ ID NO: 928833 - DNA, 15 bp, Homo sapiens
tctcttagtatttac

SEQ ID NO: 928834 - DNA, 15 bp, Homo sapiens
ctcttagtatttaca

SEQ ID NO: 928835 - DNA, 15 bp, Homo sapiens
tcttagtatttacat

SEQ ID NO: 928836 - DNA, 15 bp, Homo sapiens
cttagtatttacatt

SEQ ID NO: 928837 - DNA, 15 bp, Homo sapiens
ttagtatttacattg

SEQ ID NO: 928838 - DNA, 15 bp, Homo sapiens
tagtatttacattgc

SEQ ID NO: 928839 - DNA, 15 bp, Homo sapiens
agtatttacattgca

SEQ ID NO: 928840 - DNA, 15 bp, Homo sapiens
gtatttacattgcag

SEQ ID NO: 928841 - DNA, 15 bp, Homo sapiens
tatttacattgcaga

SEQ ID NO: 928842 - DNA, 15 bp, Homo sapiens
atttacattgcagag

SEQ ID NO: 928843 - DNA, 15 bp, Homo sapiens
tttacattgcagagt

SEQ ID NO: 928844 - DNA, 15 bp, Homo sapiens
ttacattgcagagtt

SEQ ID NO: 928845 - DNA, 15 bp, Homo sapiens
tacattgcagagttt

SEQ ID NO: 928846 - DNA, 15 bp, Homo sapiens
acattgcagagtttg

SEQ ID NO: 928847 - DNA, 15 bp, Homo sapiens
cattgcagagtttgc

SEQ ID NO: 928848 - DNA, 15 bp, Homo sapiens
attgcagagtttgca

SEQ ID NO: 928849 - DNA, 15 bp, Homo sapiens
ttgcagagtttgcag

SEQ ID NO: 928850 - DNA, 15 bp, Homo sapiens
tgcagagtttgcaga

SEQ ID NO: 928851 - DNA, 15 bp, Homo sapiens
gcagagtttgcagag

SEQ ID NO: 928852 - DNA, 15 bp, Homo sapiens
cagagtttgcagagg

SEQ ID NO: 928853 - DNA, 15 bp, Homo sapiens
agagtttgcagagga

SEQ ID NO: 928854 - DNA, 15 bp, Homo sapiens
gagtttgcagaggat

SEQ ID NO: 928855 - DNA, 15 bp, Homo sapiens
agtttgcagaggata

SEQ ID NO: 928856 - DNA, 15 bp, Homo sapiens
gtttgcagaggatat

SEQ ID NO: 928857 - DNA, 15 bp, Homo sapiens
tttgcagaggatatt

SEQ ID NO: 928858 - DNA, 15 bp, Homo sapiens
ttgcagaggatatta

SEQ ID NO: 928859 - DNA, 15 bp, Homo sapiens
tgcagaggatattaa

SEQ ID NO: 928860 - DNA, 15 bp, Homo sapiens
gcagaggatattaaa

SEQ ID NO: 928861 - DNA, 15 bp, Homo sapiens
cagaggatattaaat

SEQ ID NO: 928862 - DNA, 15 bp, Homo sapiens
agaggatattaaata

SEQ ID NO: 928863 - DNA, 15 bp, Homo sapiens
gaggatattaaataa

SEQ ID NO: 928864 - DNA, 15 bp, Homo sapiens
aggatattaaataag

SEQ ID NO: 928865 - DNA, 15 bp, Homo sapiens
ggatattaaataaga

SEQ ID NO: 928866 - DNA, 15 bp, Homo sapiens
gatattaaataagaa

SEQ ID NO: 928867 - DNA, 15 bp, Homo sapiens
atattaaataagaaa

SEQ ID NO: 928868 - DNA, 15 bp, Homo sapiens
tattaaataagaaaa

SEQ ID NO: 928869 - DNA, 15 bp, Homo sapiens
attaaataagaaaac

SEQ ID NO: 928870 - DNA, 15 bp, Homo sapiens
ttaaataagaaaacg

SEQ ID NO: 928871 - DNA, 15 bp, Homo sapiens
taaataagaaaacgt

SEQ ID NO: 928872 - DNA, 15 bp, Homo sapiens
aaataagaaaacgta

SEQ ID NO: 928873 - DNA, 15 bp, Homo sapiens
aataagaaaacgtat

SEQ ID NO: 928874 - DNA, 15 bp, Homo sapiens
ataagaaaacgtatg

SEQ ID NO: 928875 - DNA, 15 bp, Homo sapiens
taagaaaacgtatgc

SEQ ID NO: 928876 - DNA, 15 bp, Homo sapiens
aagaaaacgtatgca

SEQ ID NO: 928877 - DNA, 15 bp, Homo sapiens
agaaaacgtatgcaa

SEQ ID NO: 928878 - DNA, 15 bp, Homo sapiens
gaaaacgtatgcaaa

SEQ ID NO: 928879 - DNA, 15 bp, Homo sapiens
aaaacgtatgcaaaa

SEQ ID NO: 928880 - DNA, 15 bp, Homo sapiens
aaacgtatgcaaaat

SEQ ID NO: 928881 - DNA, 15 bp, Homo sapiens
aacgtatgcaaaata

SEQ ID NO: 928882 - DNA, 15 bp, Homo sapiens
acgtatgcaaaatac

SEQ ID NO: 928883 - DNA, 15 bp, Homo sapiens
cgtatgcaaaatacc

SEQ ID NO: 928884 - DNA, 15 bp, Homo sapiens
gtatgcaaaatacca

SEQ ID NO: 928885 - DNA, 15 bp, Homo sapiens
tatgcaaaataccaa

SEQ ID NO: 928886 - DNA, 15 bp, Homo sapiens
atgcaaaataccaat

SEQ ID NO: 928887 - DNA, 15 bp, Homo sapiens
tgcaaaataccaatt

SEQ ID NO: 928888 - DNA, 15 bp, Homo sapiens
gcaaaataccaatta

SEQ ID NO: 928889 - DNA, 15 bp, Homo sapiens
caaaataccaattac

SEQ ID NO: 928890 - DNA, 15 bp, Homo sapiens
aaaataccaattaca

SEQ ID NO: 928891 - DNA, 15 bp, Homo sapiens
aaataccaattacag

SEQ ID NO: 928892 - DNA, 15 bp, Homo sapiens
aataccaattacagc

SEQ ID NO: 928893 - DNA, 15 bp, Homo sapiens
ataccaattacagca

SEQ ID NO: 928894 - DNA, 15 bp, Homo sapiens
taccaattacagcac

SEQ ID NO: 928895 - DNA, 15 bp, Homo sapiens
accaattacagcacc

SEQ ID NO: 928896 - DNA, 15 bp, Homo sapiens
ccaattacagcacca

SEQ ID NO: 928897 - DNA, 15 bp, Homo sapiens
caattacagcaccag

SEQ ID NO: 928898 - DNA, 15 bp, Homo sapiens
aattacagcaccaga

SEQ ID NO: 928899 - DNA, 15 bp, Homo sapiens
attacagcaccagac

SEQ ID NO: 928900 - DNA, 15 bp, Homo sapiens
ttacagcaccagaca

SEQ ID NO: 928901 - DNA, 15 bp, Homo sapiens
tacagcaccagacaa

SEQ ID NO: 928902 - DNA, 15 bp, Homo sapiens
acagcaccagacaat

SEQ ID NO: 928903 - DNA, 15 bp, Homo sapiens
cagcaccagacaatg

SEQ ID NO: 928904 - DNA, 15 bp, Homo sapiens
agcaccagacaatgg

SEQ ID NO: 928905 - DNA, 15 bp, Homo sapiens
gcaccagacaatggt

SEQ ID NO: 928906 - DNA, 15 bp, Homo sapiens
caccagacaatggta

SEQ ID NO: 928907 - DNA, 15 bp, Homo sapiens
accagacaatggtag

SEQ ID NO: 928908 - DNA, 15 bp, Homo sapiens
ccagacaatggtagg

SEQ ID NO: 928909 - DNA, 15 bp, Homo sapiens
cagacaatggtaggc

SEQ ID NO: 928910 - DNA, 15 bp, Homo sapiens
agacaatggtaggca

SEQ ID NO: 928911 - DNA, 15 bp, Homo sapiens
gacaatggtaggcat

SEQ ID NO: 928912 - DNA, 15 bp, Homo sapiens
acaatggtaggcatt

SEQ ID NO: 928913 - DNA, 15 bp, Homo sapiens
caatggtaggcattc

SEQ ID NO: 928914 - DNA, 15 bp, Homo sapiens
aatggtaggcattca

SEQ ID NO: 928915 - DNA, 15 bp, Homo sapiens
atggtaggcattcaa

SEQ ID NO: 928916 - DNA, 15 bp, Homo sapiens
tggtaggcattcaac

SEQ ID NO: 928917 - DNA, 15 bp, Homo sapiens
ggtaggcattcaact

SEQ ID NO: 928918 - DNA, 15 bp, Homo sapiens
gtaggcattcaactg

SEQ ID NO: 928919 - DNA, 15 bp, Homo sapiens
taggcattcaactga

SEQ ID NO: 928920 - DNA, 15 bp, Homo sapiens
aggcattcaactgaa

SEQ ID NO: 928921 - DNA, 15 bp, Homo sapiens
ggcattcaactgaaa

SEQ ID NO: 928922 - DNA, 15 bp, Homo sapiens
gcattcaactgaaaa

SEQ ID NO: 928923 - DNA, 15 bp, Homo sapiens
cattcaactgaaaat

SEQ ID NO: 928924 - DNA, 15 bp, Homo sapiens
attcaactgaaaata

SEQ ID NO: 928925 - DNA, 15 bp, Homo sapiens
ttcaactgaaaatag

SEQ ID NO: 928926 - DNA, 15 bp, Homo sapiens
tcaactgaaaatagt

SEQ ID NO: 928927 - DNA, 15 bp, Homo sapiens
caactgaaaatagtc

SEQ ID NO: 928928 - DNA, 15 bp, Homo sapiens
aactgaaaatagtca

SEQ ID NO: 928929 - DNA, 15 bp, Homo sapiens
actgaaaatagtcat

SEQ ID NO: 928930 - DNA, 15 bp, Homo sapiens
ctgaaaatagtcatt

SEQ ID NO: 928931 - DNA, 15 bp, Homo sapiens
tgaaaatagtcatta

SEQ ID NO: 928932 - DNA, 15 bp, Homo sapiens
gaaaatagtcattat

SEQ ID NO: 928933 - DNA, 15 bp, Homo sapiens
aaaatagtcattatt

SEQ ID NO: 928934 - DNA, 15 bp, Homo sapiens
aaatagtcattattt

SEQ ID NO: 928935 - DNA, 15 bp, Homo sapiens
aatagtcattatttt

SEQ ID NO: 928936 - DNA, 15 bp, Homo sapiens
atagtcattattttt

SEQ ID NO: 928937 - DNA, 15 bp, Homo sapiens
tagtcattattttta

SEQ ID NO: 928938 - DNA, 15 bp, Homo sapiens
agtcattatttttat

SEQ ID NO: 928939 - DNA, 15 bp, Homo sapiens
gtcattatttttatt

SEQ ID NO: 928940 - DNA, 15 bp, Homo sapiens
tcattatttttatta

SEQ ID NO: 928941 - DNA, 15 bp, Homo sapiens
cattatttttattat

SEQ ID NO: 928942 - DNA, 15 bp, Homo sapiens
attatttttattatt

SEQ ID NO: 928943 - DNA, 15 bp, Homo sapiens
ttatttttattatta

SEQ ID NO: 928944 - DNA, 15 bp, Homo sapiens
tatttttattattac

SEQ ID NO: 928945 - DNA, 15 bp, Homo sapiens
atttttattattacg

SEQ ID NO: 928946 - DNA, 15 bp, Homo sapiens
tttttattattacga

SEQ ID NO: 928947 - DNA, 15 bp, Homo sapiens
ttttattattacgaa

SEQ ID NO: 928948 - DNA, 15 bp, Homo sapiens
tttattattacgaat

SEQ ID NO: 928949 - DNA, 15 bp, Homo sapiens
ttattattacgaata

SEQ ID NO: 928950 - DNA, 15 bp, Homo sapiens
tattattacgaatat

SEQ ID NO: 928951 - DNA, 15 bp, Homo sapiens
attattacgaatatt

SEQ ID NO: 928952 - DNA, 15 bp, Homo sapiens
ttattacgaatattc

SEQ ID NO: 928953 - DNA, 15 bp, Homo sapiens
tattacgaatattcc

SEQ ID NO: 928954 - DNA, 15 bp, Homo sapiens
attacgaatattccc

SEQ ID NO: 928955 - DNA, 15 bp, Homo sapiens
ttacgaatattccct

SEQ ID NO: 928956 - DNA, 15 bp, Homo sapiens
tacgaatattcccta

SEQ ID NO: 928957 - DNA, 15 bp, Homo sapiens
acgaatattccctat

SEQ ID NO: 928958 - DNA, 15 bp, Homo sapiens
cgaatattccctatc

SEQ ID NO: 928959 - DNA, 15 bp, Homo sapiens
gaatattccctatct

SEQ ID NO: 928960 - DNA, 15 bp, Homo sapiens
aatattccctatctg

SEQ ID NO: 928961 - DNA, 15 bp, Homo sapiens
atattccctatctgt

SEQ ID NO: 928962 - DNA, 15 bp, Homo sapiens
tattccctatctgtg

SEQ ID NO: 928963 - DNA, 15 bp, Homo sapiens
attccctatctgtgt

SEQ ID NO: 928964 - DNA, 15 bp, Homo sapiens
ttccctatctgtgtg

SEQ ID NO: 928965 - DNA, 15 bp, Homo sapiens
tccctatctgtgtga

SEQ ID NO: 928966 - DNA, 15 bp, Homo sapiens
ccctatctgtgtgat

SEQ ID NO: 928967 - DNA, 15 bp, Homo sapiens
cctatctgtgtgata

SEQ ID NO: 928968 - DNA, 15 bp, Homo sapiens
ctatctgtgtgataa

SEQ ID NO: 928969 - DNA, 15 bp, Homo sapiens
tatctgtgtgataag

SEQ ID NO: 928970 - DNA, 15 bp, Homo sapiens
atctgtgtgataagg

SEQ ID NO: 928971 - DNA, 15 bp, Homo sapiens
tctgtgtgataaggc

SEQ ID NO: 928972 - DNA, 15 bp, Homo sapiens
ctgtgtgataaggct

SEQ ID NO: 928973 - DNA, 15 bp, Homo sapiens
tgtgtgataaggctt

SEQ ID NO: 928974 - DNA, 15 bp, Homo sapiens
gtgtgataaggcttt

SEQ ID NO: 928975 - DNA, 15 bp, Homo sapiens
tgtgataaggctttt

SEQ ID NO: 928976 - DNA, 15 bp, Homo sapiens
gtgataaggcttttg

SEQ ID NO: 928977 - DNA, 15 bp, Homo sapiens
tgataaggcttttgt

SEQ ID NO: 928978 - DNA, 15 bp, Homo sapiens
gataaggcttttgtc

SEQ ID NO: 928979 - DNA, 15 bp, Homo sapiens
ataaggcttttgtct

SEQ ID NO: 928980 - DNA, 15 bp, Homo sapiens
taaggcttttgtctc

SEQ ID NO: 928981 - DNA, 15 bp, Homo sapiens
aaggcttttgtctca

SEQ ID NO: 928982 - DNA, 15 bp, Homo sapiens
aggcttttgtctcag

SEQ ID NO: 928983 - DNA, 15 bp, Homo sapiens
ggcttttgtctcaga

SEQ ID NO: 928984 - DNA, 15 bp, Homo sapiens
gcttttgtctcagat

SEQ ID NO: 928985 - DNA, 15 bp, Homo sapiens
cttttgtctcagatt

SEQ ID NO: 928986 - DNA, 15 bp, Homo sapiens
ttttgtctcagattc

SEQ ID NO: 928987 - DNA, 15 bp, Homo sapiens
tttgtctcagattct

SEQ ID NO: 928988 - DNA, 15 bp, Homo sapiens
ttgtctcagattctg

SEQ ID NO: 928989 - DNA, 15 bp, Homo sapiens
tgtctcagattctga

SEQ ID NO: 928990 - DNA, 15 bp, Homo sapiens
gtctcagattctgag

SEQ ID NO: 928991 - DNA, 15 bp, Homo sapiens
tctcagattctgaga

SEQ ID NO: 928992 - DNA, 15 bp, Homo sapiens
ctcagattctgagat

SEQ ID NO: 928993 - DNA, 15 bp, Homo sapiens
tcagattctgagata

SEQ ID NO: 928994 - DNA, 15 bp, Homo sapiens
cagattctgagatat

SEQ ID NO: 928995 - DNA, 15 bp, Homo sapiens
agattctgagatatt

SEQ ID NO: 928996 - DNA, 15 bp, Homo sapiens
gattctgagatatta

SEQ ID NO: 928997 - DNA, 15 bp, Homo sapiens
attctgagatattac

SEQ ID NO: 928998 - DNA, 15 bp, Homo sapiens
ttctgagatattacc

SEQ ID NO: 928999 - DNA, 15 bp, Homo sapiens
tctgagatattacca

SEQ ID NO: 929000 - DNA, 15 bp, Homo sapiens
ctgagatattaccat

SEQ ID NO: 929001 - DNA, 15 bp, Homo sapiens
tgagatattaccatc

SEQ ID NO: 929002 - DNA, 15 bp, Homo sapiens
gagatattaccatca

SEQ ID NO: 929003 - DNA, 15 bp, Homo sapiens
agatattaccatcag

SEQ ID NO: 929004 - DNA, 15 bp, Homo sapiens
gatattaccatcagg

SEQ ID NO: 929005 - DNA, 15 bp, Homo sapiens
atattaccatcagga

SEQ ID NO: 929006 - DNA, 15 bp, Homo sapiens
tattaccatcaggac

SEQ ID NO: 929007 - DNA, 15 bp, Homo sapiens
attaccatcaggact

SEQ ID NO: 929008 - DNA, 15 bp, Homo sapiens
ttaccatcaggacta

SEQ ID NO: 929009 - DNA, 15 bp, Homo sapiens
taccatcaggactag

SEQ ID NO: 929010 - DNA, 15 bp, Homo sapiens
accatcaggactaga

SEQ ID NO: 929011 - DNA, 15 bp, Homo sapiens
ccatcaggactagaa

SEQ ID NO: 929012 - DNA, 15 bp, Homo sapiens
catcaggactagaac

SEQ ID NO: 929013 - DNA, 15 bp, Homo sapiens
atcaggactagaact

SEQ ID NO: 929014 - DNA, 15 bp, Homo sapiens
tcaggactagaactc

SEQ ID NO: 929015 - DNA, 15 bp, Homo sapiens
caggactagaactct

SEQ ID NO: 929016 - DNA, 15 bp, Homo sapiens
aggactagaactctg

SEQ ID NO: 929017 - DNA, 15 bp, Homo sapiens
ggactagaactctgc

SEQ ID NO: 929018 - DNA, 15 bp, Homo sapiens
gactagaactctgcc

SEQ ID NO: 929019 - DNA, 15 bp, Homo sapiens
actagaactctgcca

SEQ ID NO: 929020 - DNA, 15 bp, Homo sapiens
ctagaactctgccat

SEQ ID NO: 929021 - DNA, 15 bp, Homo sapiens
tagaactctgccatg

SEQ ID NO: 929022 - DNA, 15 bp, Homo sapiens
agaactctgccatga

SEQ ID NO: 929023 - DNA, 15 bp, Homo sapiens
gaactctgccatgaa

SEQ ID NO: 929024 - DNA, 15 bp, Homo sapiens
aactctgccatgaag

SEQ ID NO: 929025 - DNA, 15 bp, Homo sapiens
actctgccatgaagc

SEQ ID NO: 929026 - DNA, 15 bp, Homo sapiens
ctctgccatgaagcc

SEQ ID NO: 929027 - DNA, 15 bp, Homo sapiens
tctgccatgaagccc

SEQ ID NO: 929028 - DNA, 15 bp, Homo sapiens
ctgccatgaagccca

SEQ ID NO: 929029 - DNA, 15 bp, Homo sapiens
tgccatgaagcccaa

SEQ ID NO: 929030 - DNA, 15 bp, Homo sapiens
gccatgaagcccaac

SEQ ID NO: 929031 - DNA, 15 bp, Homo sapiens
ccatgaagcccaacc

SEQ ID NO: 929032 - DNA, 15 bp, Homo sapiens
catgaagcccaaccc

SEQ ID NO: 929033 - DNA, 15 bp, Homo sapiens
atgaagcccaaccca

SEQ ID NO: 929034 - DNA, 15 bp, Homo sapiens
tgaagcccaacccac

SEQ ID NO: 929035 - DNA, 15 bp, Homo sapiens
gaagcccaacccact

SEQ ID NO: 929036 - DNA, 15 bp, Homo sapiens
aagcccaacccactt

SEQ ID NO: 929037 - DNA, 15 bp, Homo sapiens
agcccaacccacttg

SEQ ID NO: 929038 - DNA, 15 bp, Homo sapiens
gcccaacccacttgg

SEQ ID NO: 929039 - DNA, 15 bp, Homo sapiens
cccaacccacttggc

SEQ ID NO: 929040 - DNA, 15 bp, Homo sapiens
ccaacccacttggct

SEQ ID NO: 929041 - DNA, 15 bp, Homo sapiens
caacccacttggctg

SEQ ID NO: 929042 - DNA, 15 bp, Homo sapiens
aacccacttggctgg

SEQ ID NO: 929043 - DNA, 15 bp, Homo sapiens
acccacttggctggg

SEQ ID NO: 929044 - DNA, 15 bp, Homo sapiens
cccacttggctggga

SEQ ID NO: 929045 - DNA, 15 bp, Homo sapiens
ccacttggctgggac

SEQ ID NO: 929046 - DNA, 15 bp, Homo sapiens
cacttggctgggact

SEQ ID NO: 929047 - DNA, 15 bp, Homo sapiens
acttggctgggactg

SEQ ID NO: 929048 - DNA, 15 bp, Homo sapiens
cttggctgggactga

SEQ ID NO: 929049 - DNA, 15 bp, Homo sapiens
ttggctgggactgag

SEQ ID NO: 929050 - DNA, 15 bp, Homo sapiens
tggctgggactgagt

SEQ ID NO: 929051 - DNA, 15 bp, Homo sapiens
ggctgggactgagtt

SEQ ID NO: 929052 - DNA, 15 bp, Homo sapiens
gctgggactgagttc

SEQ ID NO: 929053 - DNA, 15 bp, Homo sapiens
ctgggactgagttct

SEQ ID NO: 929054 - DNA, 15 bp, Homo sapiens
tgggactgagttctc

SEQ ID NO: 929055 - DNA, 15 bp, Homo sapiens
gggactgagttctca

SEQ ID NO: 929056 - DNA, 15 bp, Homo sapiens
ggactgagttctcac

SEQ ID NO: 929057 - DNA, 15 bp, Homo sapiens
gactgagttctcact

SEQ ID NO: 929058 - DNA, 15 bp, Homo sapiens
actgagttctcactg

SEQ ID NO: 929059 - DNA, 15 bp, Homo sapiens
ctgagttctcactgg

SEQ ID NO: 929060 - DNA, 15 bp, Homo sapiens
tgagttctcactggg

SEQ ID NO: 929061 - DNA, 15 bp, Homo sapiens
gagttctcactgggg

SEQ ID NO: 929062 - DNA, 15 bp, Homo sapiens
agttctcactggggc

SEQ ID NO: 929063 - DNA, 15 bp, Homo sapiens
gttctcactggggcc

SEQ ID NO: 929064 - DNA, 15 bp, Homo sapiens
ttctcactggggccc

SEQ ID NO: 929065 - DNA, 15 bp, Homo sapiens
tctcactggggcccc

SEQ ID NO: 929066 - DNA, 15 bp, Homo sapiens
ctcactggggcccct

SEQ ID NO: 929067 - DNA, 15 bp, Homo sapiens
tcactggggcccctt

SEQ ID NO: 929068 - DNA, 15 bp, Homo sapiens
cactggggccccttc

SEQ ID NO: 929069 - DNA, 15 bp, Homo sapiens
actggggccccttcc

SEQ ID NO: 929070 - DNA, 15 bp, Homo sapiens
ctggggccccttccc

SEQ ID NO: 929071 - DNA, 15 bp, Homo sapiens
tggggccccttccca

SEQ ID NO: 929072 - DNA, 15 bp, Homo sapiens
ggggccccttcccaa

SEQ ID NO: 929073 - DNA, 15 bp, Homo sapiens
gggccccttcccaag

SEQ ID NO: 929074 - DNA, 15 bp, Homo sapiens
ggccccttcccaaga

SEQ ID NO: 929075 - DNA, 15 bp, Homo sapiens
gccccttcccaagaa

SEQ ID NO: 929076 - DNA, 15 bp, Homo sapiens
ccccttcccaagaag

SEQ ID NO: 929077 - DNA, 15 bp, Homo sapiens
cccttcccaagaagg

SEQ ID NO: 929078 - DNA, 15 bp, Homo sapiens
ccttcccaagaagga

SEQ ID NO: 929079 - DNA, 15 bp, Homo sapiens
cttcccaagaaggac

SEQ ID NO: 929080 - DNA, 15 bp, Homo sapiens
ttcccaagaaggacc

SEQ ID NO: 929081 - DNA, 15 bp, Homo sapiens
tcccaagaaggacca

SEQ ID NO: 929082 - DNA, 15 bp, Homo sapiens
cccaagaaggaccac

SEQ ID NO: 929083 - DNA, 15 bp, Homo sapiens
ccaagaaggaccacc

SEQ ID NO: 929084 - DNA, 15 bp, Homo sapiens
caagaaggaccacct

SEQ ID NO: 929085 - DNA, 15 bp, Homo sapiens
aagaaggaccacctg

SEQ ID NO: 929086 - DNA, 15 bp, Homo sapiens
agaaggaccacctgg

SEQ ID NO: 929087 - DNA, 15 bp, Homo sapiens
gaaggaccacctgga

SEQ ID NO: 929088 - DNA, 15 bp, Homo sapiens
aaggaccacctggaa

SEQ ID NO: 929089 - DNA, 15 bp, Homo sapiens
aggaccacctggaac

SEQ ID NO: 929090 - DNA, 15 bp, Homo sapiens
ggaccacctggaacc

SEQ ID NO: 929091 - DNA, 15 bp, Homo sapiens
gaccacctggaacca

SEQ ID NO: 929092 - DNA, 15 bp, Homo sapiens
accacctggaaccag

SEQ ID NO: 929093 - DNA, 15 bp, Homo sapiens
ccacctggaaccagg

SEQ ID NO: 929094 - DNA, 15 bp, Homo sapiens
cacctggaaccagga

SEQ ID NO: 929095 - DNA, 15 bp, Homo sapiens
acctggaaccaggaa

SEQ ID NO: 929096 - DNA, 15 bp, Homo sapiens
cctggaaccaggaaa

SEQ ID NO: 929097 - DNA, 15 bp, Homo sapiens
ctggaaccaggaaac

SEQ ID NO: 929098 - DNA, 15 bp, Homo sapiens
tggaaccaggaaaca

SEQ ID NO: 929099 - DNA, 15 bp, Homo sapiens
ggaaccaggaaacaa

SEQ ID NO: 929100 - DNA, 15 bp, Homo sapiens
gaaccaggaaacaac

SEQ ID NO: 929101 - DNA, 15 bp, Homo sapiens
aaccaggaaacaact

SEQ ID NO: 929102 - DNA, 15 bp, Homo sapiens
accaggaaacaacta

SEQ ID NO: 929103 - DNA, 15 bp, Homo sapiens
ccaggaaacaactac

SEQ ID NO: 929104 - DNA, 15 bp, Homo sapiens
caggaaacaactacc

SEQ ID NO: 929105 - DNA, 15 bp, Homo sapiens
aggaaacaactaccc

SEQ ID NO: 929106 - DNA, 15 bp, Homo sapiens
ggaaacaactaccca

SEQ ID NO: 929107 - DNA, 15 bp, Homo sapiens
gaaacaactacccac

SEQ ID NO: 929108 - DNA, 15 bp, Homo sapiens
aaacaactacccact

SEQ ID NO: 929109 - DNA, 15 bp, Homo sapiens
aacaactacccactt

SEQ ID NO: 929110 - DNA, 15 bp, Homo sapiens
acaactacccacttg

SEQ ID NO: 929111 - DNA, 15 bp, Homo sapiens
caactacccacttga

SEQ ID NO: 929112 - DNA, 15 bp, Homo sapiens
aactacccacttgac

SEQ ID NO: 929113 - DNA, 15 bp, Homo sapiens
actacccacttgacc

SEQ ID NO: 929114 - DNA, 15 bp, Homo sapiens
ctacccacttgaccc

SEQ ID NO: 929115 - DNA, 15 bp, Homo sapiens
tacccacttgaccct

SEQ ID NO: 929116 - DNA, 15 bp, Homo sapiens
acccacttgaccctg

SEQ ID NO: 929117 - DNA, 15 bp, Homo sapiens
cccacttgaccctga

SEQ ID NO: 929118 - DNA, 15 bp, Homo sapiens
ccacttgaccctgag

SEQ ID NO: 929119 - DNA, 15 bp, Homo sapiens
cacttgaccctgagc

SEQ ID NO: 929120 - DNA, 15 bp, Homo sapiens
acttgaccctgagca

SEQ ID NO: 929121 - DNA, 15 bp, Homo sapiens
cttgaccctgagcat

SEQ ID NO: 929122 - DNA, 15 bp, Homo sapiens
ttgaccctgagcatc

SEQ ID NO: 929123 - DNA, 15 bp, Homo sapiens
tgaccctgagcatca

SEQ ID NO: 929124 - DNA, 15 bp, Homo sapiens
gaccctgagcatcac

SEQ ID NO: 929125 - DNA, 15 bp, Homo sapiens
accctgagcatcaca

SEQ ID NO: 929126 - DNA, 15 bp, Homo sapiens
ccctgagcatcacaa

SEQ ID NO: 929127 - DNA, 15 bp, Homo sapiens
cctgagcatcacaat

SEQ ID NO: 929128 - DNA, 15 bp, Homo sapiens
ctgagcatcacaata

SEQ ID NO: 929129 - DNA, 15 bp, Homo sapiens
tgagcatcacaataa

SEQ ID NO: 929130 - DNA, 15 bp, Homo sapiens
gagcatcacaataac

SEQ ID NO: 929131 - DNA, 15 bp, Homo sapiens
agcatcacaataact

SEQ ID NO: 929132 - DNA, 15 bp, Homo sapiens
gcatcacaataactt

SEQ ID NO: 929133 - DNA, 15 bp, Homo sapiens
catcacaataactta

SEQ ID NO: 929134 - DNA, 15 bp, Homo sapiens
atcacaataacttag

SEQ ID NO: 929135 - DNA, 15 bp, Homo sapiens
tcacaataacttaga

SEQ ID NO: 929136 - DNA, 15 bp, Homo sapiens
cacaataacttagaa

SEQ ID NO: 929137 - DNA, 15 bp, Homo sapiens
acaataacttagaaa

SEQ ID NO: 929138 - DNA, 15 bp, Homo sapiens
caataacttagaaat

SEQ ID NO: 929139 - DNA, 15 bp, Homo sapiens
aataacttagaaatt

SEQ ID NO: 929140 - DNA, 15 bp, Homo sapiens
ataacttagaaattc

SEQ ID NO: 929141 - DNA, 15 bp, Homo sapiens
taacttagaaattcc

SEQ ID NO: 929142 - DNA, 15 bp, Homo sapiens
aacttagaaattcca

SEQ ID NO: 929143 - DNA, 15 bp, Homo sapiens
acttagaaattccag

SEQ ID NO: 929144 - DNA, 15 bp, Homo sapiens
cttagaaattccagc

SEQ ID NO: 929145 - DNA, 15 bp, Homo sapiens
ttagaaattccagcc

SEQ ID NO: 929146 - DNA, 15 bp, Homo sapiens
tagaaattccagcca

SEQ ID NO: 929147 - DNA, 15 bp, Homo sapiens
agaaattccagccat

SEQ ID NO: 929148 - DNA, 15 bp, Homo sapiens
gaaattccagccatg

SEQ ID NO: 929149 - DNA, 15 bp, Homo sapiens
aaattccagccatgt

SEQ ID NO: 929150 - DNA, 15 bp, Homo sapiens
aattccagccatgtc

SEQ ID NO: 929151 - DNA, 15 bp, Homo sapiens
attccagccatgtct

SEQ ID NO: 929152 - DNA, 15 bp, Homo sapiens
ttccagccatgtctc

SEQ ID NO: 929153 - DNA, 15 bp, Homo sapiens
tccagccatgtctct

SEQ ID NO: 929154 - DNA, 15 bp, Homo sapiens
ccagccatgtctctc

SEQ ID NO: 929155 - DNA, 15 bp, Homo sapiens
cagccatgtctctca

SEQ ID NO: 929156 - DNA, 15 bp, Homo sapiens
agccatgtctctcag

SEQ ID NO: 929157 - DNA, 15 bp, Homo sapiens
gccatgtctctcaga

SEQ ID NO: 929158 - DNA, 15 bp, Homo sapiens
ccatgtctctcagag

SEQ ID NO: 929159 - DNA, 15 bp, Homo sapiens
catgtctctcagagc

SEQ ID NO: 929160 - DNA, 15 bp, Homo sapiens
atgtctctcagagct

SEQ ID NO: 929161 - DNA, 15 bp, Homo sapiens
tgtctctcagagctg

SEQ ID NO: 929162 - DNA, 15 bp, Homo sapiens
gtctctcagagctga

SEQ ID NO: 929163 - DNA, 15 bp, Homo sapiens
tctctcagagctgac

SEQ ID NO: 929164 - DNA, 15 bp, Homo sapiens
ctctcagagctgaca

SEQ ID NO: 929165 - DNA, 15 bp, Homo sapiens
tctcagagctgacaa

SEQ ID NO: 929166 - DNA, 15 bp, Homo sapiens
ctcagagctgacaag

SEQ ID NO: 929167 - DNA, 15 bp, Homo sapiens
tcagagctgacaaga

SEQ ID NO: 929168 - DNA, 15 bp, Homo sapiens
cagagctgacaagac

SEQ ID NO: 929169 - DNA, 15 bp, Homo sapiens
agagctgacaagacc

SEQ ID NO: 929170 - DNA, 15 bp, Homo sapiens
gagctgacaagaccc

SEQ ID NO: 929171 - DNA, 15 bp, Homo sapiens
agctgacaagaccct

SEQ ID NO: 929172 - DNA, 15 bp, Homo sapiens
gctgacaagaccctc

SEQ ID NO: 929173 - DNA, 15 bp, Homo sapiens
ctgacaagaccctct

SEQ ID NO: 929174 - DNA, 15 bp, Homo sapiens
tgacaagaccctctt

SEQ ID NO: 929175 - DNA, 15 bp, Homo sapiens
gacaagaccctcttt

SEQ ID NO: 929176 - DNA, 15 bp, Homo sapiens
acaagaccctctttg

SEQ ID NO: 929177 - DNA, 15 bp, Homo sapiens
caagaccctctttgc

SEQ ID NO: 929178 - DNA, 15 bp, Homo sapiens
aagaccctctttgct

SEQ ID NO: 929179 - DNA, 15 bp, Homo sapiens
agaccctctttgctt

SEQ ID NO: 929180 - DNA, 15 bp, Homo sapiens
gaccctctttgctta

SEQ ID NO: 929181 - DNA, 15 bp, Homo sapiens
accctctttgcttag

SEQ ID NO: 929182 - DNA, 15 bp, Homo sapiens
ccctctttgcttagc

SEQ ID NO: 929183 - DNA, 15 bp, Homo sapiens
cctctttgcttagcc

SEQ ID NO: 929184 - DNA, 15 bp, Homo sapiens
ctctttgcttagccc

SEQ ID NO: 929185 - DNA, 15 bp, Homo sapiens
tctttgcttagccca

SEQ ID NO: 929186 - DNA, 15 bp, Homo sapiens
ctttgcttagcccat

SEQ ID NO: 929187 - DNA, 15 bp, Homo sapiens
tttgcttagcccatg

SEQ ID NO: 929188 - DNA, 15 bp, Homo sapiens
ttgcttagcccatgc

SEQ ID NO: 929189 - DNA, 15 bp, Homo sapiens
tgcttagcccatgcc

SEQ ID NO: 929190 - DNA, 15 bp, Homo sapiens
gcttagcccatgccc

SEQ ID NO: 929191 - DNA, 15 bp, Homo sapiens
cttagcccatgccct

SEQ ID NO: 929192 - DNA, 15 bp, Homo sapiens
ttagcccatgccctg

SEQ ID NO: 929193 - DNA, 15 bp, Homo sapiens
tagcccatgccctgg

SEQ ID NO: 929194 - DNA, 15 bp, Homo sapiens
agcccatgccctggt

SEQ ID NO: 929195 - DNA, 15 bp, Homo sapiens
gcccatgccctggta

SEQ ID NO: 929196 - DNA, 15 bp, Homo sapiens
cccatgccctggtaa

SEQ ID NO: 929197 - DNA, 15 bp, Homo sapiens
ccatgccctggtaac

SEQ ID NO: 929198 - DNA, 15 bp, Homo sapiens
catgccctggtaaca

SEQ ID NO: 929199 - DNA, 15 bp, Homo sapiens
atgccctggtaacag

SEQ ID NO: 929200 - DNA, 15 bp, Homo sapiens
tgccctggtaacagt

SEQ ID NO: 929201 - DNA, 15 bp, Homo sapiens
gccctggtaacagtt

SEQ ID NO: 929202 - DNA, 15 bp, Homo sapiens
ccctggtaacagtta

SEQ ID NO: 929203 - DNA, 15 bp, Homo sapiens
cctggtaacagttat

SEQ ID NO: 929204 - DNA, 15 bp, Homo sapiens
ctggtaacagttatt

SEQ ID NO: 929205 - DNA, 15 bp, Homo sapiens
tggtaacagttattt

SEQ ID NO: 929206 - DNA, 15 bp, Homo sapiens
ggtaacagttatttt

SEQ ID NO: 929207 - DNA, 15 bp, Homo sapiens
gtaacagttatttta

SEQ ID NO: 929208 - DNA, 15 bp, Homo sapiens
taacagttattttat

SEQ ID NO: 929209 - DNA, 15 bp, Homo sapiens
aacagttattttatt

SEQ ID NO: 929210 - DNA, 15 bp, Homo sapiens
acagttattttatta

SEQ ID NO: 929211 - DNA, 15 bp, Homo sapiens
cagttattttattat

SEQ ID NO: 929212 - DNA, 15 bp, Homo sapiens
agttattttattatc

SEQ ID NO: 929213 - DNA, 15 bp, Homo sapiens
gttattttattatct

SEQ ID NO: 929214 - DNA, 15 bp, Homo sapiens
ttattttattatcta

SEQ ID NO: 929215 - DNA, 15 bp, Homo sapiens
tattttattatctac

SEQ ID NO: 929216 - DNA, 15 bp, Homo sapiens
attttattatctact

SEQ ID NO: 929217 - DNA, 15 bp, Homo sapiens
ttttattatctactc

SEQ ID NO: 929218 - DNA, 15 bp, Homo sapiens
tttattatctactct

SEQ ID NO: 929219 - DNA, 15 bp, Homo sapiens
ttattatctactctg

SEQ ID NO: 929220 - DNA, 15 bp, Homo sapiens
tattatctactctgt

SEQ ID NO: 929221 - DNA, 15 bp, Homo sapiens
attatctactctgtg

SEQ ID NO: 929222 - DNA, 15 bp, Homo sapiens
ttatctactctgtgg

SEQ ID NO: 929223 - DNA, 15 bp, Homo sapiens
tatctactctgtggc

SEQ ID NO: 929224 - DNA, 15 bp, Homo sapiens
atctactctgtggca

SEQ ID NO: 929225 - DNA, 15 bp, Homo sapiens
tctactctgtggcag

SEQ ID NO: 929226 - DNA, 15 bp, Homo sapiens
ctactctgtggcagg

SEQ ID NO: 929227 - DNA, 15 bp, Homo sapiens
tactctgtggcaggt

SEQ ID NO: 929228 - DNA, 15 bp, Homo sapiens
actctgtggcaggtt

SEQ ID NO: 929229 - DNA, 15 bp, Homo sapiens
ctctgtggcaggtta

SEQ ID NO: 929230 - DNA, 15 bp, Homo sapiens
tctgtggcaggttat

SEQ ID NO: 929231 - DNA, 15 bp, Homo sapiens
ctgtggcaggttata

SEQ ID NO: 929232 - DNA, 15 bp, Homo sapiens
tgtggcaggttatat

SEQ ID NO: 929233 - DNA, 15 bp, Homo sapiens
gtggcaggttatatg

SEQ ID NO: 929234 - DNA, 15 bp, Homo sapiens
tggcaggttatatgt

SEQ ID NO: 929235 - DNA, 15 bp, Homo sapiens
ggcaggttatatgtt

SEQ ID NO: 929236 - DNA, 15 bp, Homo sapiens
gcaggttatatgtta

SEQ ID NO: 929237 - DNA, 15 bp, Homo sapiens
caggttatatgttaa

SEQ ID NO: 929238 - DNA, 15 bp, Homo sapiens
aggttatatgttaaa

SEQ ID NO: 929239 - DNA, 15 bp, Homo sapiens
ggttatatgttaaat

SEQ ID NO: 929240 - DNA, 15 bp, Homo sapiens
gttatatgttaaata

SEQ ID NO: 929241 - DNA, 15 bp, Homo sapiens
ttatatgttaaatat

SEQ ID NO: 929242 - DNA, 15 bp, Homo sapiens
tatatgttaaatatc

SEQ ID NO: 929243 - DNA, 15 bp, Homo sapiens
atatgttaaatatct

SEQ ID NO: 929244 - DNA, 15 bp, Homo sapiens
tatgttaaatatctt

SEQ ID NO: 929245 - DNA, 15 bp, Homo sapiens
atgttaaatatcttt

SEQ ID NO: 929246 - DNA, 15 bp, Homo sapiens
tgttaaatatctttc

SEQ ID NO: 929247 - DNA, 15 bp, Homo sapiens
gttaaatatctttca

SEQ ID NO: 929248 - DNA, 15 bp, Homo sapiens
ttaaatatctttcat

SEQ ID NO: 929249 - DNA, 15 bp, Homo sapiens
taaatatctttcata

SEQ ID NO: 929250 - DNA, 15 bp, Homo sapiens
aaatatctttcatac

SEQ ID NO: 929251 - DNA, 15 bp, Homo sapiens
aatatctttcataca

SEQ ID NO: 929252 - DNA, 15 bp, Homo sapiens
atatctttcatacat

SEQ ID NO: 929253 - DNA, 15 bp, Homo sapiens
tatctttcatacata

SEQ ID NO: 929254 - DNA, 15 bp, Homo sapiens
atctttcatacataa

SEQ ID NO: 929255 - DNA, 15 bp, Homo sapiens
tctttcatacataat

SEQ ID NO: 929256 - DNA, 15 bp, Homo sapiens
ctttcatacataatc

SEQ ID NO: 929257 - DNA, 15 bp, Homo sapiens
tttcatacataatca

SEQ ID NO: 929258 - DNA, 15 bp, Homo sapiens
ttcatacataatcac

SEQ ID NO: 929259 - DNA, 15 bp, Homo sapiens
tcatacataatcact

SEQ ID NO: 929260 - DNA, 15 bp, Homo sapiens
catacataatcacta

SEQ ID NO: 929261 - DNA, 15 bp, Homo sapiens
atacataatcactaa

SEQ ID NO: 929262 - DNA, 15 bp, Homo sapiens
tacataatcactaat

SEQ ID NO: 929263 - DNA, 15 bp, Homo sapiens
acataatcactaatc

SEQ ID NO: 929264 - DNA, 15 bp, Homo sapiens
cataatcactaatct

SEQ ID NO: 929265 - DNA, 15 bp, Homo sapiens
ataatcactaatctt

SEQ ID NO: 929266 - DNA, 15 bp, Homo sapiens
taatcactaatcttc

SEQ ID NO: 929267 - DNA, 15 bp, Homo sapiens
aatcactaatcttcc

SEQ ID NO: 929268 - DNA, 15 bp, Homo sapiens
atcactaatcttcca

SEQ ID NO: 929269 - DNA, 15 bp, Homo sapiens
tcactaatcttccaa

SEQ ID NO: 929270 - DNA, 15 bp, Homo sapiens
cactaatcttccaag

SEQ ID NO: 929271 - DNA, 15 bp, Homo sapiens
actaatcttccaagg

SEQ ID NO: 929272 - DNA, 15 bp, Homo sapiens
ctaatcttccaaggg

SEQ ID NO: 929273 - DNA, 15 bp, Homo sapiens
taatcttccaaggga

SEQ ID NO: 929274 - DNA, 15 bp, Homo sapiens
aatcttccaagggaa

SEQ ID NO: 929275 - DNA, 15 bp, Homo sapiens
atcttccaagggaat

SEQ ID NO: 929276 - DNA, 15 bp, Homo sapiens
tcttccaagggaatc

SEQ ID NO: 929277 - DNA, 15 bp, Homo sapiens
cttccaagggaatcc

SEQ ID NO: 929278 - DNA, 15 bp, Homo sapiens
ttccaagggaatcca

SEQ ID NO: 929279 - DNA, 15 bp, Homo sapiens
tccaagggaatccaa

SEQ ID NO: 929280 - DNA, 15 bp, Homo sapiens
ccaagggaatccaag

SEQ ID NO: 929281 - DNA, 15 bp, Homo sapiens
caagggaatccaaga

SEQ ID NO: 929282 - DNA, 15 bp, Homo sapiens
aagggaatccaagag

SEQ ID NO: 929283 - DNA, 15 bp, Homo sapiens
agggaatccaagagt

SEQ ID NO: 929284 - DNA, 15 bp, Homo sapiens
gggaatccaagagtt

SEQ ID NO: 929285 - DNA, 15 bp, Homo sapiens
ggaatccaagagttg

SEQ ID NO: 929286 - DNA, 15 bp, Homo sapiens
gaatccaagagttgg

SEQ ID NO: 929287 - DNA, 15 bp, Homo sapiens
aatccaagagttggt

SEQ ID NO: 929288 - DNA, 15 bp, Homo sapiens
atccaagagttggtt

SEQ ID NO: 929289 - DNA, 15 bp, Homo sapiens
tccaagagttggttt

SEQ ID NO: 929290 - DNA, 15 bp, Homo sapiens
ccaagagttggtttg

SEQ ID NO: 929291 - DNA, 15 bp, Homo sapiens
caagagttggtttgg

SEQ ID NO: 929292 - DNA, 15 bp, Homo sapiens
aagagttggtttggt

SEQ ID NO: 929293 - DNA, 15 bp, Homo sapiens
agagttggtttggtg

SEQ ID NO: 929294 - DNA, 15 bp, Homo sapiens
gagttggtttggtga

SEQ ID NO: 929295 - DNA, 15 bp, Homo sapiens
agttggtttggtgaa

SEQ ID NO: 929296 - DNA, 15 bp, Homo sapiens
gttggtttggtgaat

SEQ ID NO: 929297 - DNA, 15 bp, Homo sapiens
ttggtttggtgaatg

SEQ ID NO: 929298 - DNA, 15 bp, Homo sapiens
tggtttggtgaatgt

SEQ ID NO: 929299 - DNA, 15 bp, Homo sapiens
ggtttggtgaatgtt

SEQ ID NO: 929300 - DNA, 15 bp, Homo sapiens
gtttggtgaatgtta

SEQ ID NO: 929301 - DNA, 15 bp, Homo sapiens
tttggtgaatgttat

SEQ ID NO: 929302 - DNA, 15 bp, Homo sapiens
ttggtgaatgttatt

SEQ ID NO: 929303 - DNA, 15 bp, Homo sapiens
tggtgaatgttattt

SEQ ID NO: 929304 - DNA, 15 bp, Homo sapiens
ggtgaatgttatttt

SEQ ID NO: 929305 - DNA, 15 bp, Homo sapiens
gtgaatgttatttta

SEQ ID NO: 929306 - DNA, 15 bp, Homo sapiens
tgaatgttattttac

SEQ ID NO: 929307 - DNA, 15 bp, Homo sapiens
gaatgttattttaca

SEQ ID NO: 929308 - DNA, 15 bp, Homo sapiens
aatgttattttacag

SEQ ID NO: 929309 - DNA, 15 bp, Homo sapiens
atgttattttacagt

SEQ ID NO: 929310 - DNA, 15 bp, Homo sapiens
tgttattttacagtt

SEQ ID NO: 929311 - DNA, 15 bp, Homo sapiens
gttattttacagttg

SEQ ID NO: 929312 - DNA, 15 bp, Homo sapiens
ttattttacagttga

SEQ ID NO: 929313 - DNA, 15 bp, Homo sapiens
tattttacagttgag

SEQ ID NO: 929314 - DNA, 15 bp, Homo sapiens
attttacagttgagc

SEQ ID NO: 929315 - DNA, 15 bp, Homo sapiens
ttttacagttgagca

SEQ ID NO: 929316 - DNA, 15 bp, Homo sapiens
tttacagttgagcaa

SEQ ID NO: 929317 - DNA, 15 bp, Homo sapiens
ttacagttgagcaaa

SEQ ID NO: 929318 - DNA, 15 bp, Homo sapiens
tacagttgagcaaac

SEQ ID NO: 929319 - DNA, 15 bp, Homo sapiens
acagttgagcaaact

SEQ ID NO: 929320 - DNA, 15 bp, Homo sapiens
cagttgagcaaacta

SEQ ID NO: 929321 - DNA, 15 bp, Homo sapiens
agttgagcaaactaa

SEQ ID NO: 929322 - DNA, 15 bp, Homo sapiens
gttgagcaaactaag

SEQ ID NO: 929323 - DNA, 15 bp, Homo sapiens
ttgagcaaactaaga

SEQ ID NO: 929324 - DNA, 15 bp, Homo sapiens
tgagcaaactaagac

SEQ ID NO: 929325 - DNA, 15 bp, Homo sapiens
gagcaaactaagact

SEQ ID NO: 929326 - DNA, 15 bp, Homo sapiens
agcaaactaagactc

SEQ ID NO: 929327 - DNA, 15 bp, Homo sapiens
gcaaactaagactcg

SEQ ID NO: 929328 - DNA, 15 bp, Homo sapiens
caaactaagactcgg

SEQ ID NO: 929329 - DNA, 15 bp, Homo sapiens
aaactaagactcgga

SEQ ID NO: 929330 - DNA, 15 bp, Homo sapiens
aactaagactcggag

SEQ ID NO: 929331 - DNA, 15 bp, Homo sapiens
actaagactcggaga

SEQ ID NO: 929332 - DNA, 15 bp, Homo sapiens
ctaagactcggagag

SEQ ID NO: 929333 - DNA, 15 bp, Homo sapiens
taagactcggagagg

SEQ ID NO: 929334 - DNA, 15 bp, Homo sapiens
aagactcggagaggt

SEQ ID NO: 929335 - DNA, 15 bp, Homo sapiens
agactcggagaggtt

SEQ ID NO: 929336 - DNA, 15 bp, Homo sapiens
gactcggagaggtta

SEQ ID NO: 929337 - DNA, 15 bp, Homo sapiens
actcggagaggttaa

SEQ ID NO: 929338 - DNA, 15 bp, Homo sapiens
ctcggagaggttaaa

SEQ ID NO: 929339 - DNA, 15 bp, Homo sapiens
tcggagaggttaaaa

SEQ ID NO: 929340 - DNA, 15 bp, Homo sapiens
cggagaggttaaaat

SEQ ID NO: 929341 - DNA, 15 bp, Homo sapiens
ggagaggttaaaatg

SEQ ID NO: 929342 - DNA, 15 bp, Homo sapiens
gagaggttaaaatga

SEQ ID NO: 929343 - DNA, 15 bp, Homo sapiens
agaggttaaaatgac

SEQ ID NO: 929344 - DNA, 15 bp, Homo sapiens
gaggttaaaatgact

SEQ ID NO: 929345 - DNA, 15 bp, Homo sapiens
aggttaaaatgactt

SEQ ID NO: 929346 - DNA, 15 bp, Homo sapiens
ggttaaaatgacttg

SEQ ID NO: 929347 - DNA, 15 bp, Homo sapiens
gttaaaatgacttgc

SEQ ID NO: 929348 - DNA, 15 bp, Homo sapiens
ttaaaatgacttgct

SEQ ID NO: 929349 - DNA, 15 bp, Homo sapiens
taaaatgacttgctc

SEQ ID NO: 929350 - DNA, 15 bp, Homo sapiens
aaaatgacttgctca

SEQ ID NO: 929351 - DNA, 15 bp, Homo sapiens
aaatgacttgctcag

SEQ ID NO: 929352 - DNA, 15 bp, Homo sapiens
aatgacttgctcagg

SEQ ID NO: 929353 - DNA, 15 bp, Homo sapiens
atgacttgctcaggg

SEQ ID NO: 929354 - DNA, 15 bp, Homo sapiens
tgacttgctcagggt

SEQ ID NO: 929355 - DNA, 15 bp, Homo sapiens
gacttgctcagggtc

SEQ ID NO: 929356 - DNA, 15 bp, Homo sapiens
acttgctcagggtca

SEQ ID NO: 929357 - DNA, 15 bp, Homo sapiens
cttgctcagggtcac

SEQ ID NO: 929358 - DNA, 15 bp, Homo sapiens
ttgctcagggtcaca

SEQ ID NO: 929359 - DNA, 15 bp, Homo sapiens
tgctcagggtcacag

SEQ ID NO: 929360 - DNA, 15 bp, Homo sapiens
gctcagggtcacaga

SEQ ID NO: 929361 - DNA, 15 bp, Homo sapiens
ctcagggtcacagag

SEQ ID NO: 929362 - DNA, 15 bp, Homo sapiens
tcagggtcacagagc

SEQ ID NO: 929363 - DNA, 15 bp, Homo sapiens
cagggtcacagagct

SEQ ID NO: 929364 - DNA, 15 bp, Homo sapiens
agggtcacagagctg

SEQ ID NO: 929365 - DNA, 15 bp, Homo sapiens
gggtcacagagctgg

SEQ ID NO: 929366 - DNA, 15 bp, Homo sapiens
ggtcacagagctggt

SEQ ID NO: 929367 - DNA, 15 bp, Homo sapiens
gtcacagagctggta

SEQ ID NO: 929368 - DNA, 15 bp, Homo sapiens
tcacagagctggtaa

SEQ ID NO: 929369 - DNA, 15 bp, Homo sapiens
cacagagctggtaaa

SEQ ID NO: 929370 - DNA, 15 bp, Homo sapiens
acagagctggtaaag

SEQ ID NO: 929371 - DNA, 15 bp, Homo sapiens
cagagctggtaaagg

SEQ ID NO: 929372 - DNA, 15 bp, Homo sapiens
agagctggtaaaggg

SEQ ID NO: 929373 - DNA, 15 bp, Homo sapiens
gagctggtaaagggc

SEQ ID NO: 929374 - DNA, 15 bp, Homo sapiens
agctggtaaagggca

SEQ ID NO: 929375 - DNA, 15 bp, Homo sapiens
gctggtaaagggcag

SEQ ID NO: 929376 - DNA, 15 bp, Homo sapiens
ctggtaaagggcagg

SEQ ID NO: 929377 - DNA, 15 bp, Homo sapiens
tggtaaagggcaggg

SEQ ID NO: 929378 - DNA, 15 bp, Homo sapiens
ggtaaagggcagggt

SEQ ID NO: 929379 - DNA, 15 bp, Homo sapiens
gtaaagggcagggtc

SEQ ID NO: 929380 - DNA, 15 bp, Homo sapiens
taaagggcagggtca

SEQ ID NO: 929381 - DNA, 15 bp, Homo sapiens
aaagggcagggtcaa

SEQ ID NO: 929382 - DNA, 15 bp, Homo sapiens
aagggcagggtcaag

SEQ ID NO: 929383 - DNA, 15 bp, Homo sapiens
agggcagggtcaaga

SEQ ID NO: 929384 - DNA, 15 bp, Homo sapiens
gggcagggtcaagac

SEQ ID NO: 929385 - DNA, 15 bp, Homo sapiens
ggcagggtcaagact

SEQ ID NO: 929386 - DNA, 15 bp, Homo sapiens
gcagggtcaagactt

SEQ ID NO: 929387 - DNA, 15 bp, Homo sapiens
cagggtcaagacttc

SEQ ID NO: 929388 - DNA, 15 bp, Homo sapiens
agggtcaagacttca

SEQ ID NO: 929389 - DNA, 15 bp, Homo sapiens
gggtcaagacttcaa

SEQ ID NO: 929390 - DNA, 15 bp, Homo sapiens
ggtcaagacttcaaa

SEQ ID NO: 929391 - DNA, 15 bp, Homo sapiens
gtcaagacttcaaat

SEQ ID NO: 929392 - DNA, 15 bp, Homo sapiens
tcaagacttcaaatc

SEQ ID NO: 929393 - DNA, 15 bp, Homo sapiens
caagacttcaaatcc

SEQ ID NO: 929394 - DNA, 15 bp, Homo sapiens
aagacttcaaatcct

SEQ ID NO: 929395 - DNA, 15 bp, Homo sapiens
agacttcaaatcctg

SEQ ID NO: 929396 - DNA, 15 bp, Homo sapiens
gacttcaaatcctgc

SEQ ID NO: 929397 - DNA, 15 bp, Homo sapiens
acttcaaatcctgca

SEQ ID NO: 929398 - DNA, 15 bp, Homo sapiens
cttcaaatcctgcac

SEQ ID NO: 929399 - DNA, 15 bp, Homo sapiens
ttcaaatcctgcaca

SEQ ID NO: 929400 - DNA, 15 bp, Homo sapiens
tcaaatcctgcacac

SEQ ID NO: 929401 - DNA, 15 bp, Homo sapiens
caaatcctgcacact

SEQ ID NO: 929402 - DNA, 15 bp, Homo sapiens
aaatcctgcacactt

SEQ ID NO: 929403 - DNA, 15 bp, Homo sapiens
aatcctgcacacttg

SEQ ID NO: 929404 - DNA, 15 bp, Homo sapiens
atcctgcacacttgt

SEQ ID NO: 929405 - DNA, 15 bp, Homo sapiens
tcctgcacacttgtc

SEQ ID NO: 929406 - DNA, 15 bp, Homo sapiens
cctgcacacttgtca

SEQ ID NO: 929407 - DNA, 15 bp, Homo sapiens
ctgcacacttgtcac

SEQ ID NO: 929408 - DNA, 15 bp, Homo sapiens
tgcacacttgtcacc

SEQ ID NO: 929409 - DNA, 15 bp, Homo sapiens
gcacacttgtcacca

SEQ ID NO: 929410 - DNA, 15 bp, Homo sapiens
cacacttgtcaccag

SEQ ID NO: 929411 - DNA, 15 bp, Homo sapiens
acacttgtcaccagg

SEQ ID NO: 929412 - DNA, 15 bp, Homo sapiens
cacttgtcaccaggt

SEQ ID NO: 929413 - DNA, 15 bp, Homo sapiens
acttgtcaccaggtc

SEQ ID NO: 929414 - DNA, 15 bp, Homo sapiens
cttgtcaccaggtcc

SEQ ID NO: 929415 - DNA, 15 bp, Homo sapiens
ttgtcaccaggtcct

SEQ ID NO: 929416 - DNA, 15 bp, Homo sapiens
tgtcaccaggtccta

SEQ ID NO: 929417 - DNA, 15 bp, Homo sapiens
gtcaccaggtcctat

SEQ ID NO: 929418 - DNA, 15 bp, Homo sapiens
tcaccaggtcctatt

SEQ ID NO: 929419 - DNA, 15 bp, Homo sapiens
caccaggtcctattg

SEQ ID NO: 929420 - DNA, 15 bp, Homo sapiens
accaggtcctattgc

SEQ ID NO: 929421 - DNA, 15 bp, Homo sapiens
ccaggtcctattgct

SEQ ID NO: 929422 - DNA, 15 bp, Homo sapiens
caggtcctattgctt

SEQ ID NO: 929423 - DNA, 15 bp, Homo sapiens
aggtcctattgcttc

SEQ ID NO: 929424 - DNA, 15 bp, Homo sapiens
ggtcctattgcttca

SEQ ID NO: 929425 - DNA, 15 bp, Homo sapiens
gtcctattgcttcat

SEQ ID NO: 929426 - DNA, 15 bp, Homo sapiens
tcctattgcttcata

SEQ ID NO: 929427 - DNA, 15 bp, Homo sapiens
cctattgcttcatat

SEQ ID NO: 929428 - DNA, 15 bp, Homo sapiens
ctattgcttcatata

SEQ ID NO: 929429 - DNA, 15 bp, Homo sapiens
tattgcttcatatac

SEQ ID NO: 929430 - DNA, 15 bp, Homo sapiens
attgcttcatataca

SEQ ID NO: 929431 - DNA, 15 bp, Homo sapiens
ttgcttcatatacac

SEQ ID NO: 929432 - DNA, 15 bp, Homo sapiens
tgcttcatatacaca

SEQ ID NO: 929433 - DNA, 15 bp, Homo sapiens
gcttcatatacacag

SEQ ID NO: 929434 - DNA, 15 bp, Homo sapiens
cttcatatacacagg

SEQ ID NO: 929435 - DNA, 15 bp, Homo sapiens
ttcatatacacaggg

SEQ ID NO: 929436 - DNA, 15 bp, Homo sapiens
tcatatacacagggc

SEQ ID NO: 929437 - DNA, 15 bp, Homo sapiens
catatacacagggcc

SEQ ID NO: 929438 - DNA, 15 bp, Homo sapiens
atatacacagggcct

SEQ ID NO: 929439 - DNA, 15 bp, Homo sapiens
tatacacagggcctg

SEQ ID NO: 929440 - DNA, 15 bp, Homo sapiens
atacacagggcctga

SEQ ID NO: 929441 - DNA, 15 bp, Homo sapiens
tacacagggcctgac

SEQ ID NO: 929442 - DNA, 15 bp, Homo sapiens
acacagggcctgaca

SEQ ID NO: 929443 - DNA, 15 bp, Homo sapiens
cacagggcctgacac

SEQ ID NO: 929444 - DNA, 15 bp, Homo sapiens
acagggcctgacact

SEQ ID NO: 929445 - DNA, 15 bp, Homo sapiens
cagggcctgacactg

SEQ ID NO: 929446 - DNA, 15 bp, Homo sapiens
agggcctgacactga

SEQ ID NO: 929447 - DNA, 15 bp, Homo sapiens
gggcctgacactgac

SEQ ID NO: 929448 - DNA, 15 bp, Homo sapiens
ggcctgacactgaca

SEQ ID NO: 929449 - DNA, 15 bp, Homo sapiens
gcctgacactgacag

SEQ ID NO: 929450 - DNA, 15 bp, Homo sapiens
cctgacactgacagt

SEQ ID NO: 929451 - DNA, 15 bp, Homo sapiens
ctgacactgacagtt

SEQ ID NO: 929452 - DNA, 15 bp, Homo sapiens
tgacactgacagtta

SEQ ID NO: 929453 - DNA, 15 bp, Homo sapiens
gacactgacagttat

SEQ ID NO: 929454 - DNA, 15 bp, Homo sapiens
acactgacagttatt

SEQ ID NO: 929455 - DNA, 15 bp, Homo sapiens
cactgacagttattc

SEQ ID NO: 929456 - DNA, 15 bp, Homo sapiens
actgacagttattcc

SEQ ID NO: 929457 - DNA, 15 bp, Homo sapiens
ctgacagttattccc

SEQ ID NO: 929458 - DNA, 15 bp, Homo sapiens
tgacagttattccca

SEQ ID NO: 929459 - DNA, 15 bp, Homo sapiens
gacagttattcccag

SEQ ID NO: 929460 - DNA, 15 bp, Homo sapiens
acagttattcccagc

SEQ ID NO: 929461 - DNA, 15 bp, Homo sapiens
cagttattcccagca

SEQ ID NO: 929462 - DNA, 15 bp, Homo sapiens
agttattcccagcat

SEQ ID NO: 929463 - DNA, 15 bp, Homo sapiens
gttattcccagcatt

SEQ ID NO: 929464 - DNA, 15 bp, Homo sapiens
ttattcccagcattt

SEQ ID NO: 929465 - DNA, 15 bp, Homo sapiens
tattcccagcatttt

SEQ ID NO: 929466 - DNA, 15 bp, Homo sapiens
attcccagcattttc

SEQ ID NO: 929467 - DNA, 15 bp, Homo sapiens
ttcccagcattttct

SEQ ID NO: 929468 - DNA, 15 bp, Homo sapiens
tcccagcattttctt

SEQ ID NO: 929469 - DNA, 15 bp, Homo sapiens
cccagcattttcttc

SEQ ID NO: 929470 - DNA, 15 bp, Homo sapiens
ccagcattttcttcc

SEQ ID NO: 929471 - DNA, 15 bp, Homo sapiens
cagcattttcttcct

SEQ ID NO: 929472 - DNA, 15 bp, Homo sapiens
agcattttcttccta

SEQ ID NO: 929473 - DNA, 15 bp, Homo sapiens
gcattttcttcctac

SEQ ID NO: 929474 - DNA, 15 bp, Homo sapiens
cattttcttcctaca

SEQ ID NO: 929475 - DNA, 15 bp, Homo sapiens
attttcttcctacat

SEQ ID NO: 929476 - DNA, 15 bp, Homo sapiens
ttttcttcctacatg

SEQ ID NO: 929477 - DNA, 15 bp, Homo sapiens
tttcttcctacatgg

SEQ ID NO: 929478 - DNA, 15 bp, Homo sapiens
ttcttcctacatggt

SEQ ID NO: 929479 - DNA, 15 bp, Homo sapiens
tcttcctacatggtg

SEQ ID NO: 929480 - DNA, 15 bp, Homo sapiens
cttcctacatggtga

SEQ ID NO: 929481 - DNA, 15 bp, Homo sapiens
ttcctacatggtgat

SEQ ID NO: 929482 - DNA, 15 bp, Homo sapiens
tcctacatggtgatc

SEQ ID NO: 929483 - DNA, 15 bp, Homo sapiens
cctacatggtgatct

SEQ ID NO: 929484 - DNA, 15 bp, Homo sapiens
ctacatggtgatcta

SEQ ID NO: 929485 - DNA, 15 bp, Homo sapiens
tacatggtgatctag

SEQ ID NO: 929486 - DNA, 15 bp, Homo sapiens
acatggtgatctagt

SEQ ID NO: 929487 - DNA, 15 bp, Homo sapiens
catggtgatctagtg

SEQ ID NO: 929488 - DNA, 15 bp, Homo sapiens
atggtgatctagtgg

SEQ ID NO: 929489 - DNA, 15 bp, Homo sapiens
tggtgatctagtggg

SEQ ID NO: 929490 - DNA, 15 bp, Homo sapiens
ggtgatctagtggga

SEQ ID NO: 929491 - DNA, 15 bp, Homo sapiens
gtgatctagtgggat

SEQ ID NO: 929492 - DNA, 15 bp, Homo sapiens
tgatctagtgggatc

SEQ ID NO: 929493 - DNA, 15 bp, Homo sapiens
gatctagtgggatcc

SEQ ID NO: 929494 - DNA, 15 bp, Homo sapiens
atctagtgggatcca

SEQ ID NO: 929495 - DNA, 15 bp, Homo sapiens
tctagtgggatccaa

SEQ ID NO: 929496 - DNA, 15 bp, Homo sapiens
ctagtgggatccaat

SEQ ID NO: 929497 - DNA, 15 bp, Homo sapiens
tagtgggatccaata

SEQ ID NO: 929498 - DNA, 15 bp, Homo sapiens
agtgggatccaataa

SEQ ID NO: 929499 - DNA, 15 bp, Homo sapiens
gtgggatccaataaa

SEQ ID NO: 929500 - DNA, 15 bp, Homo sapiens
tgggatccaataaaa

SEQ ID NO: 929501 - DNA, 15 bp, Homo sapiens
gggatccaataaaat

SEQ ID NO: 929502 - DNA, 15 bp, Homo sapiens
ggatccaataaaata

SEQ ID NO: 929503 - DNA, 15 bp, Homo sapiens
gatccaataaaataa

SEQ ID NO: 929504 - DNA, 15 bp, Homo sapiens
atccaataaaataac

SEQ ID NO: 929505 - DNA, 15 bp, Homo sapiens
tccaataaaataacc

SEQ ID NO: 929506 - DNA, 15 bp, Homo sapiens
ccaataaaataacct

SEQ ID NO: 929507 - DNA, 15 bp, Homo sapiens
caataaaataacctg

SEQ ID NO: 929508 - DNA, 15 bp, Homo sapiens
aataaaataacctga

SEQ ID NO: 929509 - DNA, 15 bp, Homo sapiens
ataaaataacctgat

SEQ ID NO: 929510 - DNA, 15 bp, Homo sapiens
taaaataacctgatt

SEQ ID NO: 929511 - DNA, 15 bp, Homo sapiens
aaaataacctgattc

SEQ ID NO: 929512 - DNA, 15 bp, Homo sapiens
aaataacctgattct

SEQ ID NO: 929513 - DNA, 15 bp, Homo sapiens
aataacctgattctt

SEQ ID NO: 929514 - DNA, 15 bp, Homo sapiens
ataacctgattcttc

SEQ ID NO: 929515 - DNA, 15 bp, Homo sapiens
taacctgattcttca

SEQ ID NO: 929516 - DNA, 15 bp, Homo sapiens
aacctgattcttcag

SEQ ID NO: 929517 - DNA, 15 bp, Homo sapiens
acctgattcttcaga

SEQ ID NO: 929518 - DNA, 15 bp, Homo sapiens
cctgattcttcagac

SEQ ID NO: 929519 - DNA, 15 bp, Homo sapiens
ctgattcttcagaca

SEQ ID NO: 929520 - DNA, 15 bp, Homo sapiens
tgattcttcagacag

SEQ ID NO: 929521 - DNA, 15 bp, Homo sapiens
gattcttcagacaga

SEQ ID NO: 929522 - DNA, 15 bp, Homo sapiens
attcttcagacagat

SEQ ID NO: 929523 - DNA, 15 bp, Homo sapiens
ttcttcagacagatc

SEQ ID NO: 929524 - DNA, 15 bp, Homo sapiens
tcttcagacagatcc

SEQ ID NO: 929525 - DNA, 15 bp, Homo sapiens
cttcagacagatcct

SEQ ID NO: 929526 - DNA, 15 bp, Homo sapiens
ttcagacagatcctt

SEQ ID NO: 929527 - DNA, 15 bp, Homo sapiens
tcagacagatccttc

SEQ ID NO: 929528 - DNA, 15 bp, Homo sapiens
cagacagatccttct

SEQ ID NO: 929529 - DNA, 15 bp, Homo sapiens
agacagatccttcta

SEQ ID NO: 929530 - DNA, 15 bp, Homo sapiens
gacagatccttctat

SEQ ID NO: 929531 - DNA, 15 bp, Homo sapiens
acagatccttctatg

SEQ ID NO: 929532 - DNA, 15 bp, Homo sapiens
cagatccttctatgt

SEQ ID NO: 929533 - DNA, 15 bp, Homo sapiens
agatccttctatgtc

SEQ ID NO: 929534 - DNA, 15 bp, Homo sapiens
gatccttctatgtcc

SEQ ID NO: 929535 - DNA, 15 bp, Homo sapiens
atccttctatgtccc

SEQ ID NO: 929536 - DNA, 15 bp, Homo sapiens
tccttctatgtccct

SEQ ID NO: 929537 - DNA, 15 bp, Homo sapiens
ccttctatgtccctc

SEQ ID NO: 929538 - DNA, 15 bp, Homo sapiens
cttctatgtccctct

SEQ ID NO: 929539 - DNA, 15 bp, Homo sapiens
ttctatgtccctcta

SEQ ID NO: 929540 - DNA, 15 bp, Homo sapiens
tctatgtccctctag

SEQ ID NO: 929541 - DNA, 15 bp, Homo sapiens
ctatgtccctctagc

SEQ ID NO: 929542 - DNA, 15 bp, Homo sapiens
tatgtccctctagca

SEQ ID NO: 929543 - DNA, 15 bp, Homo sapiens
atgtccctctagcag

SEQ ID NO: 929544 - DNA, 15 bp, Homo sapiens
tgtccctctagcagc

SEQ ID NO: 929545 - DNA, 15 bp, Homo sapiens
gtccctctagcagca

SEQ ID NO: 929546 - DNA, 15 bp, Homo sapiens
tccctctagcagcat

SEQ ID NO: 929547 - DNA, 15 bp, Homo sapiens
ccctctagcagcatt

SEQ ID NO: 929548 - DNA, 15 bp, Homo sapiens
cctctagcagcatta

SEQ ID NO: 929549 - DNA, 15 bp, Homo sapiens
ctctagcagcattat

SEQ ID NO: 929550 - DNA, 15 bp, Homo sapiens
tctagcagcattata

SEQ ID NO: 929551 - DNA, 15 bp, Homo sapiens
ctagcagcattatat

SEQ ID NO: 929552 - DNA, 15 bp, Homo sapiens
tagcagcattatatt

SEQ ID NO: 929553 - DNA, 15 bp, Homo sapiens
agcagcattatattg

SEQ ID NO: 929554 - DNA, 15 bp, Homo sapiens
gcagcattatattgc

SEQ ID NO: 929555 - DNA, 15 bp, Homo sapiens
cagcattatattgcc

SEQ ID NO: 929556 - DNA, 15 bp, Homo sapiens
agcattatattgccc

SEQ ID NO: 929557 - DNA, 15 bp, Homo sapiens
gcattatattgcccc

SEQ ID NO: 929558 - DNA, 15 bp, Homo sapiens
cattatattgcccct

SEQ ID NO: 929559 - DNA, 15 bp, Homo sapiens
attatattgcccctt

SEQ ID NO: 929560 - DNA, 15 bp, Homo sapiens
ttatattgccccttc

SEQ ID NO: 929561 - DNA, 15 bp, Homo sapiens
tatattgccccttca

SEQ ID NO: 929562 - DNA, 15 bp, Homo sapiens
atattgccccttcat

SEQ ID NO: 929563 - DNA, 15 bp, Homo sapiens
tattgccccttcatg

SEQ ID NO: 929564 - DNA, 15 bp, Homo sapiens
attgccccttcatga

SEQ ID NO: 929565 - DNA, 15 bp, Homo sapiens
ttgccccttcatgat

SEQ ID NO: 929566 - DNA, 15 bp, Homo sapiens
tgccccttcatgatg

SEQ ID NO: 929567 - DNA, 15 bp, Homo sapiens
gccccttcatgatgt

SEQ ID NO: 929568 - DNA, 15 bp, Homo sapiens
ccccttcatgatgtt

SEQ ID NO: 929569 - DNA, 15 bp, Homo sapiens
cccttcatgatgtta

SEQ ID NO: 929570 - DNA, 15 bp, Homo sapiens
ccttcatgatgttac

SEQ ID NO: 929571 - DNA, 15 bp, Homo sapiens
cttcatgatgttaca

SEQ ID NO: 929572 - DNA, 15 bp, Homo sapiens
ttcatgatgttacaa

SEQ ID NO: 929573 - DNA, 15 bp, Homo sapiens
tcatgatgttacaaa

SEQ ID NO: 929574 - DNA, 15 bp, Homo sapiens
catgatgttacaaac

SEQ ID NO: 929575 - DNA, 15 bp, Homo sapiens
atgatgttacaaacc

SEQ ID NO: 929576 - DNA, 15 bp, Homo sapiens
tgatgttacaaacct

SEQ ID NO: 929577 - DNA, 15 bp, Homo sapiens
gatgttacaaacctt

SEQ ID NO: 929578 - DNA, 15 bp, Homo sapiens
atgttacaaaccttc

SEQ ID NO: 929579 - DNA, 15 bp, Homo sapiens
tgttacaaaccttca

SEQ ID NO: 929580 - DNA, 15 bp, Homo sapiens
gttacaaaccttcag

SEQ ID NO: 929581 - DNA, 15 bp, Homo sapiens
ttacaaaccttcagt

SEQ ID NO: 929582 - DNA, 15 bp, Homo sapiens
tacaaaccttcagtg

SEQ ID NO: 929583 - DNA, 15 bp, Homo sapiens
acaaaccttcagtgt

SEQ ID NO: 929584 - DNA, 15 bp, Homo sapiens
caaaccttcagtgtt

SEQ ID NO: 929585 - DNA, 15 bp, Homo sapiens
aaaccttcagtgttt

SEQ ID NO: 929586 - DNA, 15 bp, Homo sapiens
aaccttcagtgtttt

SEQ ID NO: 929587 - DNA, 15 bp, Homo sapiens
accttcagtgttttt

SEQ ID NO: 929588 - DNA, 15 bp, Homo sapiens
ccttcagtgtttttt

SEQ ID NO: 929589 - DNA, 15 bp, Homo sapiens
cttcagtgtttttta

SEQ ID NO: 929590 - DNA, 15 bp, Homo sapiens
ttcagtgttttttat

SEQ ID NO: 929591 - DNA, 15 bp, Homo sapiens
tcagtgttttttata

SEQ ID NO: 929592 - DNA, 15 bp, Homo sapiens
cagtgttttttatat

SEQ ID NO: 929593 - DNA, 15 bp, Homo sapiens
agtgttttttatata

SEQ ID NO: 929594 - DNA, 15 bp, Homo sapiens
gtgttttttatatat

SEQ ID NO: 929595 - DNA, 15 bp, Homo sapiens
tgttttttatatata

SEQ ID NO: 929596 - DNA, 15 bp, Homo sapiens
gttttttatatatac

SEQ ID NO: 929597 - DNA, 15 bp, Homo sapiens
ttttttatatataca

SEQ ID NO: 929598 - DNA, 15 bp, Homo sapiens
tttttatatatacac

SEQ ID NO: 929599 - DNA, 15 bp, Homo sapiens
ttttatatatacaca

SEQ ID NO: 929600 - DNA, 15 bp, Homo sapiens
tttatatatacacat

SEQ ID NO: 929601 - DNA, 15 bp, Homo sapiens
ttatatatacacata

SEQ ID NO: 929602 - DNA, 15 bp, Homo sapiens
tatatatacacatac

SEQ ID NO: 929603 - DNA, 15 bp, Homo sapiens
atatatacacataca

SEQ ID NO: 929604 - DNA, 15 bp, Homo sapiens
tatatacacatacat

SEQ ID NO: 929605 - DNA, 15 bp, Homo sapiens
atatacacatacata

SEQ ID NO: 929606 - DNA, 15 bp, Homo sapiens
tatacacatacatat

SEQ ID NO: 929607 - DNA, 15 bp, Homo sapiens
atacacatacatata

SEQ ID NO: 929608 - DNA, 15 bp, Homo sapiens
tacacatacatatat

SEQ ID NO: 929609 - DNA, 15 bp, Homo sapiens
acacatacatatata

SEQ ID NO: 929610 - DNA, 15 bp, Homo sapiens
cacatacatatatat

SEQ ID NO: 929611 - DNA, 15 bp, Homo sapiens
acatacatatatata

SEQ ID NO: 929612 - DNA, 15 bp, Homo sapiens
catacatatatatat

SEQ ID NO: 929613 - DNA, 15 bp, Homo sapiens
atacatatatatata

SEQ ID NO: 929614 - DNA, 15 bp, Homo sapiens
tacatatatatatat

SEQ ID NO: 929615 - DNA, 15 bp, Homo sapiens
acatatatatatatt

SEQ ID NO: 929616 - DNA, 15 bp, Homo sapiens
catatatatatatta

SEQ ID NO: 929617 - DNA, 15 bp, Homo sapiens
atatatatatattat

SEQ ID NO: 929618 - DNA, 15 bp, Homo sapiens
tatatatatattatt

SEQ ID NO: 929619 - DNA, 15 bp, Homo sapiens
atatatatattatta

SEQ ID NO: 929620 - DNA, 15 bp, Homo sapiens
tatatatattattat

SEQ ID NO: 929621 - DNA, 15 bp, Homo sapiens
atatatattattatt

SEQ ID NO: 929622 - DNA, 15 bp, Homo sapiens
tatatattattatta

SEQ ID NO: 929623 - DNA, 15 bp, Homo sapiens
atatattattattat

SEQ ID NO: 929624 - DNA, 15 bp, Homo sapiens
tatattattattata

SEQ ID NO: 929625 - DNA, 15 bp, Homo sapiens
atattattattatat

SEQ ID NO: 929626 - DNA, 15 bp, Homo sapiens
tattattattatatt

SEQ ID NO: 929627 - DNA, 15 bp, Homo sapiens
attattattatattt

SEQ ID NO: 929628 - DNA, 15 bp, Homo sapiens
ttattattatatttt

SEQ ID NO: 929629 - DNA, 15 bp, Homo sapiens
tattattatatttta

SEQ ID NO: 929630 - DNA, 15 bp, Homo sapiens
attattatattttaa

SEQ ID NO: 929631 - DNA, 15 bp, Homo sapiens
ttattatattttaag

SEQ ID NO: 929632 - DNA, 15 bp, Homo sapiens
tattatattttaagt

SEQ ID NO: 929633 - DNA, 15 bp, Homo sapiens
attatattttaagtt

SEQ ID NO: 929634 - DNA, 15 bp, Homo sapiens
ttatattttaagttc

SEQ ID NO: 929635 - DNA, 15 bp, Homo sapiens
tatattttaagttct

SEQ ID NO: 929636 - DNA, 15 bp, Homo sapiens
atattttaagttctg

SEQ ID NO: 929637 - DNA, 15 bp, Homo sapiens
tattttaagttctgg

SEQ ID NO: 929638 - DNA, 15 bp, Homo sapiens
attttaagttctggg

SEQ ID NO: 929639 - DNA, 15 bp, Homo sapiens
ttttaagttctggga

SEQ ID NO: 929640 - DNA, 15 bp, Homo sapiens
ttctgggatacatgc

SEQ ID NO: 929641 - DNA, 15 bp, Homo sapiens
tctgggatacatgcg

SEQ ID NO: 929642 - DNA, 15 bp, Homo sapiens
ctgggatacatgcgc

SEQ ID NO: 929643 - DNA, 15 bp, Homo sapiens
tgggatacatgcgca

SEQ ID NO: 929644 - DNA, 15 bp, Homo sapiens
gggatacatgcgcag

SEQ ID NO: 929645 - DNA, 15 bp, Homo sapiens
ggatacatgcgcaga

SEQ ID NO: 929646 - DNA, 15 bp, Homo sapiens
gatacatgcgcagaa

SEQ ID NO: 929647 - DNA, 15 bp, Homo sapiens
atacatgcgcagaac

SEQ ID NO: 929648 - DNA, 15 bp, Homo sapiens
tacatgcgcagaacg

SEQ ID NO: 929649 - DNA, 15 bp, Homo sapiens
acatgcgcagaacgt

SEQ ID NO: 929650 - DNA, 15 bp, Homo sapiens
catgcgcagaacgtg

SEQ ID NO: 929651 - DNA, 15 bp, Homo sapiens
atgcgcagaacgtgc

SEQ ID NO: 929652 - DNA, 15 bp, Homo sapiens
tgcgcagaacgtgca

SEQ ID NO: 929653 - DNA, 15 bp, Homo sapiens
gcgcagaacgtgcag

SEQ ID NO: 929654 - DNA, 15 bp, Homo sapiens
cgcagaacgtgcaga

SEQ ID NO: 929655 - DNA, 15 bp, Homo sapiens
gcagaacgtgcagat

SEQ ID NO: 929656 - DNA, 15 bp, Homo sapiens
cagaacgtgcagatt

SEQ ID NO: 929657 - DNA, 15 bp, Homo sapiens
agaacgtgcagattt

SEQ ID NO: 929658 - DNA, 15 bp, Homo sapiens
gaacgtgcagatttg

SEQ ID NO: 929659 - DNA, 15 bp, Homo sapiens
aacgtgcagatttgt

SEQ ID NO: 929660 - DNA, 15 bp, Homo sapiens
acgtgcagatttgtt

SEQ ID NO: 929661 - DNA, 15 bp, Homo sapiens
cgtgcagatttgtta

SEQ ID NO: 929662 - DNA, 15 bp, Homo sapiens
gtgcagatttgttac

SEQ ID NO: 929663 - DNA, 15 bp, Homo sapiens
tgcagatttgttaca

SEQ ID NO: 929664 - DNA, 15 bp, Homo sapiens
gcagatttgttacat

SEQ ID NO: 929665 - DNA, 15 bp, Homo sapiens
cagatttgttacata

SEQ ID NO: 929666 - DNA, 15 bp, Homo sapiens
agatttgttacatag

SEQ ID NO: 929667 - DNA, 15 bp, Homo sapiens
gatttgttacatagg

SEQ ID NO: 929668 - DNA, 15 bp, Homo sapiens
atttgttacataggt

SEQ ID NO: 929669 - DNA, 15 bp, Homo sapiens
tttgttacataggta

SEQ ID NO: 929670 - DNA, 15 bp, Homo sapiens
ttgttacataggtat

SEQ ID NO: 929671 - DNA, 15 bp, Homo sapiens
tgttacataggtata

SEQ ID NO: 929672 - DNA, 15 bp, Homo sapiens
gttacataggtatac

SEQ ID NO: 929673 - DNA, 15 bp, Homo sapiens
ttacataggtataca

SEQ ID NO: 929674 - DNA, 15 bp, Homo sapiens
taggtatacacgtgt

SEQ ID NO: 929675 - DNA, 15 bp, Homo sapiens
aggtatacacgtgtc

SEQ ID NO: 929676 - DNA, 15 bp, Homo sapiens
ggtatacacgtgtca

SEQ ID NO: 929677 - DNA, 15 bp, Homo sapiens
gtatacacgtgtcat

SEQ ID NO: 929678 - DNA, 15 bp, Homo sapiens
tatacacgtgtcatg

SEQ ID NO: 929679 - DNA, 15 bp, Homo sapiens
atacacgtgtcatgg

SEQ ID NO: 929680 - DNA, 15 bp, Homo sapiens
tacacgtgtcatggt

SEQ ID NO: 929681 - DNA, 15 bp, Homo sapiens
acacgtgtcatggtg

SEQ ID NO: 929682 - DNA, 15 bp, Homo sapiens
cacgtgtcatggtgg

SEQ ID NO: 929683 - DNA, 15 bp, Homo sapiens
acgtgtcatggtggt

SEQ ID NO: 929684 - DNA, 15 bp, Homo sapiens
cgtgtcatggtggtt

SEQ ID NO: 929685 - DNA, 15 bp, Homo sapiens
gtgtcatggtggttt

SEQ ID NO: 929686 - DNA, 15 bp, Homo sapiens
tgtcatggtggtttg

SEQ ID NO: 929687 - DNA, 15 bp, Homo sapiens
gtcatggtggtttgc

SEQ ID NO: 929688 - DNA, 15 bp, Homo sapiens
tcatggtggtttgct

SEQ ID NO: 929689 - DNA, 15 bp, Homo sapiens
tggtttgctgcaccc

SEQ ID NO: 929690 - DNA, 15 bp, Homo sapiens
ggtttgctgcaccca

SEQ ID NO: 929691 - DNA, 15 bp, Homo sapiens
gtttgctgcacccat

SEQ ID NO: 929692 - DNA, 15 bp, Homo sapiens
tttgctgcacccatc

SEQ ID NO: 929693 - DNA, 15 bp, Homo sapiens
ttgctgcacccatca

SEQ ID NO: 929694 - DNA, 15 bp, Homo sapiens
tgctgcacccatcaa

SEQ ID NO: 929695 - DNA, 15 bp, Homo sapiens
gctgcacccatcaac

SEQ ID NO: 929696 - DNA, 15 bp, Homo sapiens
ctgcacccatcaacc

SEQ ID NO: 929697 - DNA, 15 bp, Homo sapiens
tgcacccatcaaccc

SEQ ID NO: 929698 - DNA, 15 bp, Homo sapiens
gcacccatcaacccg

SEQ ID NO: 929699 - DNA, 15 bp, Homo sapiens
cacccatcaacccgt

SEQ ID NO: 929700 - DNA, 15 bp, Homo sapiens
acccatcaacccgtc

SEQ ID NO: 929701 - DNA, 15 bp, Homo sapiens
cccatcaacccgtca

SEQ ID NO: 929702 - DNA, 15 bp, Homo sapiens
ccatcaacccgtcat

SEQ ID NO: 929703 - DNA, 15 bp, Homo sapiens
catcaacccgtcatc

SEQ ID NO: 929704 - DNA, 15 bp, Homo sapiens
atcaacccgtcatct

SEQ ID NO: 929705 - DNA, 15 bp, Homo sapiens
tcaacccgtcatcta

SEQ ID NO: 929706 - DNA, 15 bp, Homo sapiens
caacccgtcatctac

SEQ ID NO: 929707 - DNA, 15 bp, Homo sapiens
aacccgtcatctaca

SEQ ID NO: 929708 - DNA, 15 bp, Homo sapiens
acccgtcatctacat

SEQ ID NO: 929709 - DNA, 15 bp, Homo sapiens
cccgtcatctacatt

SEQ ID NO: 929710 - DNA, 15 bp, Homo sapiens
ccgtcatctacatta

SEQ ID NO: 929711 - DNA, 15 bp, Homo sapiens
cgtcatctacattag

SEQ ID NO: 929712 - DNA, 15 bp, Homo sapiens
gtcatctacattagg

SEQ ID NO: 929713 - DNA, 15 bp, Homo sapiens
tcatctacattaggt

SEQ ID NO: 929714 - DNA, 15 bp, Homo sapiens
catctacattaggta

SEQ ID NO: 929715 - DNA, 15 bp, Homo sapiens
atctacattaggtat

SEQ ID NO: 929716 - DNA, 15 bp, Homo sapiens
tctacattaggtatt

SEQ ID NO: 929717 - DNA, 15 bp, Homo sapiens
ctacattaggtattt

SEQ ID NO: 929718 - DNA, 15 bp, Homo sapiens
tacattaggtatttc

SEQ ID NO: 929719 - DNA, 15 bp, Homo sapiens
acattaggtatttct

SEQ ID NO: 929720 - DNA, 15 bp, Homo sapiens
cattaggtatttctc

SEQ ID NO: 929721 - DNA, 15 bp, Homo sapiens
attaggtatttctcc

SEQ ID NO: 929722 - DNA, 15 bp, Homo sapiens
ttaggtatttctcct

SEQ ID NO: 929723 - DNA, 15 bp, Homo sapiens
taggtatttctccta

SEQ ID NO: 929724 - DNA, 15 bp, Homo sapiens
aggtatttctcctaa

SEQ ID NO: 929725 - DNA, 15 bp, Homo sapiens
ggtatttctcctaat

SEQ ID NO: 929726 - DNA, 15 bp, Homo sapiens
gtatttctcctaatg

SEQ ID NO: 929727 - DNA, 15 bp, Homo sapiens
tatttctcctaatgc

SEQ ID NO: 929728 - DNA, 15 bp, Homo sapiens
atttctcctaatgct

SEQ ID NO: 929729 - DNA, 15 bp, Homo sapiens
tttctcctaatgctg

SEQ ID NO: 929730 - DNA, 15 bp, Homo sapiens
ttctcctaatgctgt

SEQ ID NO: 929731 - DNA, 15 bp, Homo sapiens
tctcctaatgctgtc

SEQ ID NO: 929732 - DNA, 15 bp, Homo sapiens
ctcctaatgctgtcc

SEQ ID NO: 929733 - DNA, 15 bp, Homo sapiens
tcctaatgctgtccc

SEQ ID NO: 929734 - DNA, 15 bp, Homo sapiens
cctaatgctgtccct

SEQ ID NO: 929735 - DNA, 15 bp, Homo sapiens
ctaatgctgtccctc

SEQ ID NO: 929736 - DNA, 15 bp, Homo sapiens
taatgctgtccctcc

SEQ ID NO: 929737 - DNA, 15 bp, Homo sapiens
aatgctgtccctccc

SEQ ID NO: 929738 - DNA, 15 bp, Homo sapiens
atgctgtccctcccc

SEQ ID NO: 929739 - DNA, 15 bp, Homo sapiens
tgctgtccctcccct

SEQ ID NO: 929740 - DNA, 15 bp, Homo sapiens
gctgtccctccccta

SEQ ID NO: 929741 - DNA, 15 bp, Homo sapiens
ctgtccctcccctag

SEQ ID NO: 929742 - DNA, 15 bp, Homo sapiens
tgtccctcccctagc

SEQ ID NO: 929743 - DNA, 15 bp, Homo sapiens
gtccctcccctagcc

SEQ ID NO: 929744 - DNA, 15 bp, Homo sapiens
tccctcccctagccc

SEQ ID NO: 929745 - DNA, 15 bp, Homo sapiens
ccctcccctagcccc

SEQ ID NO: 929746 - DNA, 15 bp, Homo sapiens
cctcccctagccccc

SEQ ID NO: 929747 - DNA, 15 bp, Homo sapiens
ctcccctagcccccc

SEQ ID NO: 929748 - DNA, 15 bp, Homo sapiens
tcccctagcccccca

SEQ ID NO: 929749 - DNA, 15 bp, Homo sapiens
cccctagccccccac

SEQ ID NO: 929750 - DNA, 15 bp, Homo sapiens
ccctagccccccacc

SEQ ID NO: 929751 - DNA, 15 bp, Homo sapiens
cctagccccccaccc

SEQ ID NO: 929752 - DNA, 15 bp, Homo sapiens
ctagccccccaccct

SEQ ID NO: 929753 - DNA, 15 bp, Homo sapiens
tagccccccaccctc

SEQ ID NO: 929754 - DNA, 15 bp, Homo sapiens
agccccccaccctcc

SEQ ID NO: 929755 - DNA, 15 bp, Homo sapiens
gccccccaccctccg

SEQ ID NO: 929756 - DNA, 15 bp, Homo sapiens
ccccccaccctccga

SEQ ID NO: 929757 - DNA, 15 bp, Homo sapiens
cccccaccctccgac

SEQ ID NO: 929758 - DNA, 15 bp, Homo sapiens
ccccaccctccgaca

SEQ ID NO: 929759 - DNA, 15 bp, Homo sapiens
cccaccctccgacag

SEQ ID NO: 929760 - DNA, 15 bp, Homo sapiens
ccaccctccgacagg

SEQ ID NO: 929761 - DNA, 15 bp, Homo sapiens
caccctccgacaggc

SEQ ID NO: 929762 - DNA, 15 bp, Homo sapiens
accctccgacaggcc

SEQ ID NO: 929763 - DNA, 15 bp, Homo sapiens
ccctccgacaggccc

SEQ ID NO: 929764 - DNA, 15 bp, Homo sapiens
cctccgacaggcccc

SEQ ID NO: 929765 - DNA, 15 bp, Homo sapiens
ctccgacaggcccca

SEQ ID NO: 929766 - DNA, 15 bp, Homo sapiens
tccgacaggccccag

SEQ ID NO: 929767 - DNA, 15 bp, Homo sapiens
ccgacaggccccagt

SEQ ID NO: 929768 - DNA, 15 bp, Homo sapiens
cgacaggccccagtg

SEQ ID NO: 929769 - DNA, 15 bp, Homo sapiens
gacaggccccagtgt

SEQ ID NO: 929770 - DNA, 15 bp, Homo sapiens
acaggccccagtgtg

SEQ ID NO: 929771 - DNA, 15 bp, Homo sapiens
caggccccagtgtgt

SEQ ID NO: 929772 - DNA, 15 bp, Homo sapiens
aggccccagtgtgtg

SEQ ID NO: 929773 - DNA, 15 bp, Homo sapiens
ggccccagtgtgtga

SEQ ID NO: 929774 - DNA, 15 bp, Homo sapiens
gccccagtgtgtgat

SEQ ID NO: 929775 - DNA, 15 bp, Homo sapiens
ccccagtgtgtgatg

SEQ ID NO: 929776 - DNA, 15 bp, Homo sapiens
cccagtgtgtgatgt

SEQ ID NO: 929777 - DNA, 15 bp, Homo sapiens
ccagtgtgtgatgtt

SEQ ID NO: 929778 - DNA, 15 bp, Homo sapiens
cagtgtgtgatgttc

SEQ ID NO: 929779 - DNA, 15 bp, Homo sapiens
agtgtgtgatgttcc

SEQ ID NO: 929780 - DNA, 15 bp, Homo sapiens
tgtgatgttcccctc

SEQ ID NO: 929781 - DNA, 15 bp, Homo sapiens
gtgatgttcccctcc

SEQ ID NO: 929782 - DNA, 15 bp, Homo sapiens
tgatgttcccctccc

SEQ ID NO: 929783 - DNA, 15 bp, Homo sapiens
gatgttcccctccct

SEQ ID NO: 929784 - DNA, 15 bp, Homo sapiens
atgttcccctccctg

SEQ ID NO: 929785 - DNA, 15 bp, Homo sapiens
tgttcccctccctgt

SEQ ID NO: 929786 - DNA, 15 bp, Homo sapiens
gttcccctccctgtg

SEQ ID NO: 929787 - DNA, 15 bp, Homo sapiens
ttcccctccctgtgt

SEQ ID NO: 929788 - DNA, 15 bp, Homo sapiens
tcccctccctgtgtc

SEQ ID NO: 929789 - DNA, 15 bp, Homo sapiens
cccctccctgtgtcc

SEQ ID NO: 929790 - DNA, 15 bp, Homo sapiens
cctccctgtgtccat

SEQ ID NO: 929791 - DNA, 15 bp, Homo sapiens
ctccctgtgtccatg

SEQ ID NO: 929792 - DNA, 15 bp, Homo sapiens
tccctgtgtccatgt

SEQ ID NO: 929793 - DNA, 15 bp, Homo sapiens
ccctgtgtccatgtg

SEQ ID NO: 929794 - DNA, 15 bp, Homo sapiens
tccatgtgttctcat

SEQ ID NO: 929795 - DNA, 15 bp, Homo sapiens
ccatgtgttctcatt

SEQ ID NO: 929796 - DNA, 15 bp, Homo sapiens
catgtgttctcattg

SEQ ID NO: 929797 - DNA, 15 bp, Homo sapiens
atgtgttctcattgt

SEQ ID NO: 929798 - DNA, 15 bp, Homo sapiens
tgtgttctcattgtt

SEQ ID NO: 929799 - DNA, 15 bp, Homo sapiens
gtgttctcattgttc

SEQ ID NO: 929800 - DNA, 15 bp, Homo sapiens
tgttctcattgttca

SEQ ID NO: 929801 - DNA, 15 bp, Homo sapiens
gttctcattgttcag

SEQ ID NO: 929802 - DNA, 15 bp, Homo sapiens
ttctcattgttcagc

SEQ ID NO: 929803 - DNA, 15 bp, Homo sapiens
tctcattgttcagca

SEQ ID NO: 929804 - DNA, 15 bp, Homo sapiens
ctcattgttcagcac

SEQ ID NO: 929805 - DNA, 15 bp, Homo sapiens
tcattgttcagcacc

SEQ ID NO: 929806 - DNA, 15 bp, Homo sapiens
cattgttcagcaccc

SEQ ID NO: 929807 - DNA, 15 bp, Homo sapiens
attgttcagcaccca

SEQ ID NO: 929808 - DNA, 15 bp, Homo sapiens
ttgttcagcacccac

SEQ ID NO: 929809 - DNA, 15 bp, Homo sapiens
tgttcagcacccact

SEQ ID NO: 929810 - DNA, 15 bp, Homo sapiens
gttcagcacccactt

SEQ ID NO: 929811 - DNA, 15 bp, Homo sapiens
ttcagcacccactta

SEQ ID NO: 929812 - DNA, 15 bp, Homo sapiens
tcagcacccacttat

SEQ ID NO: 929813 - DNA, 15 bp, Homo sapiens
cagcacccacttatg

SEQ ID NO: 929814 - DNA, 15 bp, Homo sapiens
agcacccacttatga

SEQ ID NO: 929815 - DNA, 15 bp, Homo sapiens
gcacccacttatgag

SEQ ID NO: 929816 - DNA, 15 bp, Homo sapiens
cacccacttatgagt

SEQ ID NO: 929817 - DNA, 15 bp, Homo sapiens
acccacttatgagtg

SEQ ID NO: 929818 - DNA, 15 bp, Homo sapiens
cccacttatgagtga

SEQ ID NO: 929819 - DNA, 15 bp, Homo sapiens
ccacttatgagtgag

SEQ ID NO: 929820 - DNA, 15 bp, Homo sapiens
cacttatgagtgaga

SEQ ID NO: 929821 - DNA, 15 bp, Homo sapiens
acttatgagtgagaa

SEQ ID NO: 929822 - DNA, 15 bp, Homo sapiens
cttatgagtgagaac

SEQ ID NO: 929823 - DNA, 15 bp, Homo sapiens
ttatgagtgagaaca

SEQ ID NO: 929824 - DNA, 15 bp, Homo sapiens
gagtgagaacatgca

SEQ ID NO: 929825 - DNA, 15 bp, Homo sapiens
agtgagaacatgcag

SEQ ID NO: 929826 - DNA, 15 bp, Homo sapiens
gtgagaacatgcagt

SEQ ID NO: 929827 - DNA, 15 bp, Homo sapiens
tgagaacatgcagtg

SEQ ID NO: 929828 - DNA, 15 bp, Homo sapiens
gagaacatgcagtgt

SEQ ID NO: 929829 - DNA, 15 bp, Homo sapiens
agaacatgcagtgtc

SEQ ID NO: 929830 - DNA, 15 bp, Homo sapiens
gaacatgcagtgtct

SEQ ID NO: 929831 - DNA, 15 bp, Homo sapiens
aacatgcagtgtctg

SEQ ID NO: 929832 - DNA, 15 bp, Homo sapiens
acatgcagtgtctgg

SEQ ID NO: 929833 - DNA, 15 bp, Homo sapiens
catgcagtgtctggt

SEQ ID NO: 929834 - DNA, 15 bp, Homo sapiens
atgcagtgtctggtt

SEQ ID NO: 929835 - DNA, 15 bp, Homo sapiens
tgcagtgtctggttt

SEQ ID NO: 929836 - DNA, 15 bp, Homo sapiens
gcagtgtctggtttt

SEQ ID NO: 929837 - DNA, 15 bp, Homo sapiens
cagtgtctggttttc

SEQ ID NO: 929838 - DNA, 15 bp, Homo sapiens
agtgtctggttttct

SEQ ID NO: 929839 - DNA, 15 bp, Homo sapiens
gtgtctggttttctg

SEQ ID NO: 929840 - DNA, 15 bp, Homo sapiens
tgtctggttttctgt

SEQ ID NO: 929841 - DNA, 15 bp, Homo sapiens
gtctggttttctgtt

SEQ ID NO: 929842 - DNA, 15 bp, Homo sapiens
tctggttttctgttc

SEQ ID NO: 929843 - DNA, 15 bp, Homo sapiens
ctggttttctgttcc

SEQ ID NO: 929844 - DNA, 15 bp, Homo sapiens
tggttttctgttcct

SEQ ID NO: 929845 - DNA, 15 bp, Homo sapiens
ggttttctgttcctg

SEQ ID NO: 929846 - DNA, 15 bp, Homo sapiens
gttttctgttcctgt

SEQ ID NO: 929847 - DNA, 15 bp, Homo sapiens
ttttctgttcctgtg

SEQ ID NO: 929848 - DNA, 15 bp, Homo sapiens
cctgtgttagtttgt

SEQ ID NO: 929849 - DNA, 15 bp, Homo sapiens
ctgtgttagtttgtt

SEQ ID NO: 929850 - DNA, 15 bp, Homo sapiens
tgtgttagtttgttg

SEQ ID NO: 929851 - DNA, 15 bp, Homo sapiens
gtgttagtttgttga

SEQ ID NO: 929852 - DNA, 15 bp, Homo sapiens
tgttagtttgttgag

SEQ ID NO: 929853 - DNA, 15 bp, Homo sapiens
gttagtttgttgagc

SEQ ID NO: 929854 - DNA, 15 bp, Homo sapiens
ttagtttgttgagca

SEQ ID NO: 929855 - DNA, 15 bp, Homo sapiens
tagtttgttgagcat

SEQ ID NO: 929856 - DNA, 15 bp, Homo sapiens
agtttgttgagcatg

SEQ ID NO: 929857 - DNA, 15 bp, Homo sapiens
gtttgttgagcatga

SEQ ID NO: 929858 - DNA, 15 bp, Homo sapiens
tttgttgagcatgat

SEQ ID NO: 929859 - DNA, 15 bp, Homo sapiens
ttgttgagcatgatg

SEQ ID NO: 929860 - DNA, 15 bp, Homo sapiens
tgttgagcatgatgg

SEQ ID NO: 929861 - DNA, 15 bp, Homo sapiens
gttgagcatgatggt

SEQ ID NO: 929862 - DNA, 15 bp, Homo sapiens
ttgagcatgatggtt

SEQ ID NO: 929863 - DNA, 15 bp, Homo sapiens
tgagcatgatggttt

SEQ ID NO: 929864 - DNA, 15 bp, Homo sapiens
gagcatgatggtttc

SEQ ID NO: 929865 - DNA, 15 bp, Homo sapiens
agcatgatggtttcc

SEQ ID NO: 929866 - DNA, 15 bp, Homo sapiens
gcatgatggtttcca

SEQ ID NO: 929867 - DNA, 15 bp, Homo sapiens
catgatggtttccag

SEQ ID NO: 929868 - DNA, 15 bp, Homo sapiens
tgatggtttccagct

SEQ ID NO: 929869 - DNA, 15 bp, Homo sapiens
gatggtttccagctt

SEQ ID NO: 929870 - DNA, 15 bp, Homo sapiens
atggtttccagcttt

SEQ ID NO: 929871 - DNA, 15 bp, Homo sapiens
tggtttccagcttta

SEQ ID NO: 929872 - DNA, 15 bp, Homo sapiens
ggtttccagctttat

SEQ ID NO: 929873 - DNA, 15 bp, Homo sapiens
gtttccagctttatc

SEQ ID NO: 929874 - DNA, 15 bp, Homo sapiens
tttccagctttatcc

SEQ ID NO: 929875 - DNA, 15 bp, Homo sapiens
ttccagctttatcca

SEQ ID NO: 929876 - DNA, 15 bp, Homo sapiens
tccagctttatccat

SEQ ID NO: 929877 - DNA, 15 bp, Homo sapiens
ccagctttatccatg

SEQ ID NO: 929878 - DNA, 15 bp, Homo sapiens
cagctttatccatgt

SEQ ID NO: 929879 - DNA, 15 bp, Homo sapiens
agctttatccatgtt

SEQ ID NO: 929880 - DNA, 15 bp, Homo sapiens
gctttatccatgttc

SEQ ID NO: 929881 - DNA, 15 bp, Homo sapiens
ctttatccatgttcc

SEQ ID NO: 929882 - DNA, 15 bp, Homo sapiens
tttatccatgttcct

SEQ ID NO: 929883 - DNA, 15 bp, Homo sapiens
ttatccatgttcctg

SEQ ID NO: 929884 - DNA, 15 bp, Homo sapiens
tatccatgttcctgc

SEQ ID NO: 929885 - DNA, 15 bp, Homo sapiens
atccatgttcctgca

SEQ ID NO: 929886 - DNA, 15 bp, Homo sapiens
tccatgttcctgcaa

SEQ ID NO: 929887 - DNA, 15 bp, Homo sapiens
ccatgttcctgcaaa

SEQ ID NO: 929888 - DNA, 15 bp, Homo sapiens
catgttcctgcaaag

SEQ ID NO: 929889 - DNA, 15 bp, Homo sapiens
atgttcctgcaaagg

SEQ ID NO: 929890 - DNA, 15 bp, Homo sapiens
tgttcctgcaaagga

SEQ ID NO: 929891 - DNA, 15 bp, Homo sapiens
gttcctgcaaaggac

SEQ ID NO: 929892 - DNA, 15 bp, Homo sapiens
gcaaaggacatgaac

SEQ ID NO: 929893 - DNA, 15 bp, Homo sapiens
aaggacatgaactct

SEQ ID NO: 929894 - DNA, 15 bp, Homo sapiens
aggacatgaactctt

SEQ ID NO: 929895 - DNA, 15 bp, Homo sapiens
ggacatgaactcttc

SEQ ID NO: 929896 - DNA, 15 bp, Homo sapiens
gacatgaactcttcc

SEQ ID NO: 929897 - DNA, 15 bp, Homo sapiens
acatgaactcttcct

SEQ ID NO: 929898 - DNA, 15 bp, Homo sapiens
catgaactcttcctt

SEQ ID NO: 929899 - DNA, 15 bp, Homo sapiens
atgaactcttccttt

SEQ ID NO: 929900 - DNA, 15 bp, Homo sapiens
tgaactcttcctttt

SEQ ID NO: 929901 - DNA, 15 bp, Homo sapiens
gaactcttccttttt

SEQ ID NO: 929902 - DNA, 15 bp, Homo sapiens
aactcttcctttttt

SEQ ID NO: 929903 - DNA, 15 bp, Homo sapiens
actcttcctttttta

SEQ ID NO: 929904 - DNA, 15 bp, Homo sapiens
ctcttccttttttat

SEQ ID NO: 929905 - DNA, 15 bp, Homo sapiens
tcttccttttttatg

SEQ ID NO: 929906 - DNA, 15 bp, Homo sapiens
cttccttttttatgg

SEQ ID NO: 929907 - DNA, 15 bp, Homo sapiens
ttccttttttatggc

SEQ ID NO: 929908 - DNA, 15 bp, Homo sapiens
tccttttttatggct

SEQ ID NO: 929909 - DNA, 15 bp, Homo sapiens
ccttttttatggctg

SEQ ID NO: 929910 - DNA, 15 bp, Homo sapiens
cttttttatggctgc

SEQ ID NO: 929911 - DNA, 15 bp, Homo sapiens
atggctgcatagtat

SEQ ID NO: 929912 - DNA, 15 bp, Homo sapiens
ggctgcatagtattt

SEQ ID NO: 929913 - DNA, 15 bp, Homo sapiens
gctgcatagtatttc

SEQ ID NO: 929914 - DNA, 15 bp, Homo sapiens
ctgcatagtatttca

SEQ ID NO: 929915 - DNA, 15 bp, Homo sapiens
tgcatagtatttcat

SEQ ID NO: 929916 - DNA, 15 bp, Homo sapiens
gcatagtatttcatg

SEQ ID NO: 929917 - DNA, 15 bp, Homo sapiens
catagtatttcatgg

SEQ ID NO: 929918 - DNA, 15 bp, Homo sapiens
atagtatttcatggt

SEQ ID NO: 929919 - DNA, 15 bp, Homo sapiens
tagtatttcatggtg

SEQ ID NO: 929920 - DNA, 15 bp, Homo sapiens
agtatttcatggtgt

SEQ ID NO: 929921 - DNA, 15 bp, Homo sapiens
gtatttcatggtgta

SEQ ID NO: 929922 - DNA, 15 bp, Homo sapiens
tatttcatggtgtac

SEQ ID NO: 929923 - DNA, 15 bp, Homo sapiens
atttcatggtgtaca

SEQ ID NO: 929924 - DNA, 15 bp, Homo sapiens
tttcatggtgtacat

SEQ ID NO: 929925 - DNA, 15 bp, Homo sapiens
ttcatggtgtacatg

SEQ ID NO: 929926 - DNA, 15 bp, Homo sapiens
tcatggtgtacatgt

SEQ ID NO: 929927 - DNA, 15 bp, Homo sapiens
catggtgtacatgtg

SEQ ID NO: 929928 - DNA, 15 bp, Homo sapiens
atggtgtacatgtgc

SEQ ID NO: 929929 - DNA, 15 bp, Homo sapiens
tggtgtacatgtgcc

SEQ ID NO: 929930 - DNA, 15 bp, Homo sapiens
ggtgtacatgtgcca

SEQ ID NO: 929931 - DNA, 15 bp, Homo sapiens
gtgtacatgtgccac

SEQ ID NO: 929932 - DNA, 15 bp, Homo sapiens
tgtacatgtgccaca

SEQ ID NO: 929933 - DNA, 15 bp, Homo sapiens
gtacatgtgccacat

SEQ ID NO: 929934 - DNA, 15 bp, Homo sapiens
tacatgtgccacatt

SEQ ID NO: 929935 - DNA, 15 bp, Homo sapiens
acatgtgccacattt

SEQ ID NO: 929936 - DNA, 15 bp, Homo sapiens
catgtgccacatttt

SEQ ID NO: 929937 - DNA, 15 bp, Homo sapiens
atgtgccacattttc

SEQ ID NO: 929938 - DNA, 15 bp, Homo sapiens
tgtgccacattttct

SEQ ID NO: 929939 - DNA, 15 bp, Homo sapiens
gtgccacattttctt

SEQ ID NO: 929940 - DNA, 15 bp, Homo sapiens
tgccacattttcttt

SEQ ID NO: 929941 - DNA, 15 bp, Homo sapiens
gccacattttcttta

SEQ ID NO: 929942 - DNA, 15 bp, Homo sapiens
ccacattttctttat

SEQ ID NO: 929943 - DNA, 15 bp, Homo sapiens
cacattttctttatc

SEQ ID NO: 929944 - DNA, 15 bp, Homo sapiens
acattttctttatct

SEQ ID NO: 929945 - DNA, 15 bp, Homo sapiens
cattttctttatcta

SEQ ID NO: 929946 - DNA, 15 bp, Homo sapiens
attttctttatctag

SEQ ID NO: 929947 - DNA, 15 bp, Homo sapiens
ttttctttatctagt

SEQ ID NO: 929948 - DNA, 15 bp, Homo sapiens
tttctttatctagtc

SEQ ID NO: 929949 - DNA, 15 bp, Homo sapiens
ttctttatctagtct

SEQ ID NO: 929950 - DNA, 15 bp, Homo sapiens
tctttatctagtcta

SEQ ID NO: 929951 - DNA, 15 bp, Homo sapiens
ctttatctagtctac

SEQ ID NO: 929952 - DNA, 15 bp, Homo sapiens
tttatctagtctaca

SEQ ID NO: 929953 - DNA, 15 bp, Homo sapiens
ttatctagtctacat

SEQ ID NO: 929954 - DNA, 15 bp, Homo sapiens
tatctagtctacatt

SEQ ID NO: 929955 - DNA, 15 bp, Homo sapiens
atctagtctacattg

SEQ ID NO: 929956 - DNA, 15 bp, Homo sapiens
tctagtctacattga

SEQ ID NO: 929957 - DNA, 15 bp, Homo sapiens
ctagtctacattgat

SEQ ID NO: 929958 - DNA, 15 bp, Homo sapiens
tagtctacattgatg

SEQ ID NO: 929959 - DNA, 15 bp, Homo sapiens
agtctacattgatgg

SEQ ID NO: 929960 - DNA, 15 bp, Homo sapiens
gtctacattgatggg

SEQ ID NO: 929961 - DNA, 15 bp, Homo sapiens
tctacattgatgggc

SEQ ID NO: 929962 - DNA, 15 bp, Homo sapiens
ctacattgatgggca

SEQ ID NO: 929963 - DNA, 15 bp, Homo sapiens
tacattgatgggcat

SEQ ID NO: 929964 - DNA, 15 bp, Homo sapiens
acattgatgggcatc

SEQ ID NO: 929965 - DNA, 15 bp, Homo sapiens
cattgatgggcatct

SEQ ID NO: 929966 - DNA, 15 bp, Homo sapiens
attgatgggcatctt

SEQ ID NO: 929967 - DNA, 15 bp, Homo sapiens
ttgatgggcatcttg

SEQ ID NO: 929968 - DNA, 15 bp, Homo sapiens
tgatgggcatcttgg

SEQ ID NO: 929969 - DNA, 15 bp, Homo sapiens
gatgggcatcttggt

SEQ ID NO: 929970 - DNA, 15 bp, Homo sapiens
atgggcatcttggtt

SEQ ID NO: 929971 - DNA, 15 bp, Homo sapiens
tgggcatcttggttg

SEQ ID NO: 929972 - DNA, 15 bp, Homo sapiens
gggcatcttggttgg

SEQ ID NO: 929973 - DNA, 15 bp, Homo sapiens
ggcatcttggttggt

SEQ ID NO: 929974 - DNA, 15 bp, Homo sapiens
gcatcttggttggtt

SEQ ID NO: 929975 - DNA, 15 bp, Homo sapiens
catcttggttggttc

SEQ ID NO: 929976 - DNA, 15 bp, Homo sapiens
atcttggttggttct

SEQ ID NO: 929977 - DNA, 15 bp, Homo sapiens
tcttggttggttcta

SEQ ID NO: 929978 - DNA, 15 bp, Homo sapiens
cttggttggttctaa

SEQ ID NO: 929979 - DNA, 15 bp, Homo sapiens
ttggttggttctaag

SEQ ID NO: 929980 - DNA, 15 bp, Homo sapiens
tggttggttctaagt

SEQ ID NO: 929981 - DNA, 15 bp, Homo sapiens
ggttggttctaagtc

SEQ ID NO: 929982 - DNA, 15 bp, Homo sapiens
gttggttctaagtct

SEQ ID NO: 929983 - DNA, 15 bp, Homo sapiens
ttggttctaagtctt

SEQ ID NO: 929984 - DNA, 15 bp, Homo sapiens
tggttctaagtcttt

SEQ ID NO: 929985 - DNA, 15 bp, Homo sapiens
ggttctaagtctttg

SEQ ID NO: 929986 - DNA, 15 bp, Homo sapiens
gttctaagtctttgc

SEQ ID NO: 929987 - DNA, 15 bp, Homo sapiens
ttctaagtctttgct

SEQ ID NO: 929988 - DNA, 15 bp, Homo sapiens
tctaagtctttgcta

SEQ ID NO: 929989 - DNA, 15 bp, Homo sapiens
ctaagtctttgctat

SEQ ID NO: 929990 - DNA, 15 bp, Homo sapiens
taagtctttgctatt

SEQ ID NO: 929991 - DNA, 15 bp, Homo sapiens
aagtctttgctattg

SEQ ID NO: 929992 - DNA, 15 bp, Homo sapiens
agtctttgctattgt

SEQ ID NO: 929993 - DNA, 15 bp, Homo sapiens
gtctttgctattgtg

SEQ ID NO: 929994 - DNA, 15 bp, Homo sapiens
tctttgctattgtga

SEQ ID NO: 929995 - DNA, 15 bp, Homo sapiens
ctttgctattgtgaa

SEQ ID NO: 929996 - DNA, 15 bp, Homo sapiens
tttgctattgtgaat

SEQ ID NO: 929997 - DNA, 15 bp, Homo sapiens
ttgctattgtgaata

SEQ ID NO: 929998 - DNA, 15 bp, Homo sapiens
tgctattgtgaatag

SEQ ID NO: 929999 - DNA, 15 bp, Homo sapiens
gctattgtgaatagt

SEQ ID NO: 930000 - DNA, 15 bp, Homo sapiens
ctattgtgaatagtg

SEQ ID NO: 930001 - DNA, 15 bp, Homo sapiens
tattgtgaatagtgc

SEQ ID NO: 930002 - DNA, 15 bp, Homo sapiens
attgtgaatagtgct

SEQ ID NO: 930003 - DNA, 15 bp, Homo sapiens
ttgtgaatagtgctg

SEQ ID NO: 930004 - DNA, 15 bp, Homo sapiens
gctgcaataaacatt

SEQ ID NO: 930005 - DNA, 15 bp, Homo sapiens
ctgcaataaacattt

SEQ ID NO: 930006 - DNA, 15 bp, Homo sapiens
tgcaataaacatttt

SEQ ID NO: 930007 - DNA, 15 bp, Homo sapiens
gcaataaacattttt

SEQ ID NO: 930008 - DNA, 15 bp, Homo sapiens
caataaacatttttt

SEQ ID NO: 930009 - DNA, 15 bp, Homo sapiens
aataaacattttttt

SEQ ID NO: 930010 - DNA, 15 bp, Homo sapiens
ataaacatttttttt

SEQ ID NO: 930011 - DNA, 15 bp, Homo sapiens
taaacatttttttta

SEQ ID NO: 930012 - DNA, 15 bp, Homo sapiens
aaacattttttttaa

SEQ ID NO: 930013 - DNA, 15 bp, Homo sapiens
aacattttttttaat

SEQ ID NO: 930014 - DNA, 15 bp, Homo sapiens
acattttttttaata

SEQ ID NO: 930015 - DNA, 15 bp, Homo sapiens
cattttttttaataa

SEQ ID NO: 930016 - DNA, 15 bp, Homo sapiens
attttttttaataaa

SEQ ID NO: 930017 - DNA, 15 bp, Homo sapiens
ttttttttaataaag

SEQ ID NO: 930018 - DNA, 15 bp, Homo sapiens
tttttttaataaaga

SEQ ID NO: 930019 - DNA, 15 bp, Homo sapiens
ttttttaataaagag

SEQ ID NO: 930020 - DNA, 15 bp, Homo sapiens
tttttaataaagaga

SEQ ID NO: 930021 - DNA, 15 bp, Homo sapiens
ttttaataaagagac

SEQ ID NO: 930022 - DNA, 15 bp, Homo sapiens
tttaataaagagaca

SEQ ID NO: 930023 - DNA, 15 bp, Homo sapiens
ttaataaagagacag

SEQ ID NO: 930024 - DNA, 15 bp, Homo sapiens
taataaagagacaga

SEQ ID NO: 930025 - DNA, 15 bp, Homo sapiens
aataaagagacagac

SEQ ID NO: 930026 - DNA, 15 bp, Homo sapiens
ataaagagacagaca

SEQ ID NO: 930027 - DNA, 15 bp, Homo sapiens
taaagagacagacac

SEQ ID NO: 930028 - DNA, 15 bp, Homo sapiens
aaagagacagacact

SEQ ID NO: 930029 - DNA, 15 bp, Homo sapiens
aagagacagacacta

SEQ ID NO: 930030 - DNA, 15 bp, Homo sapiens
agagacagacactaa

SEQ ID NO: 930031 - DNA, 15 bp, Homo sapiens
gagacagacactaaa

SEQ ID NO: 930032 - DNA, 15 bp, Homo sapiens
agacagacactaaac

SEQ ID NO: 930033 - DNA, 15 bp, Homo sapiens
gacagacactaaaca

SEQ ID NO: 930034 - DNA, 15 bp, Homo sapiens
acagacactaaacag

SEQ ID NO: 930035 - DNA, 15 bp, Homo sapiens
cagacactaaacagc

SEQ ID NO: 930036 - DNA, 15 bp, Homo sapiens
agacactaaacagct

SEQ ID NO: 930037 - DNA, 15 bp, Homo sapiens
gacactaaacagctt

SEQ ID NO: 930038 - DNA, 15 bp, Homo sapiens
acactaaacagcttt

SEQ ID NO: 930039 - DNA, 15 bp, Homo sapiens
cactaaacagctttg

SEQ ID NO: 930040 - DNA, 15 bp, Homo sapiens
actaaacagctttgt

SEQ ID NO: 930041 - DNA, 15 bp, Homo sapiens
ctaaacagctttgtg

SEQ ID NO: 930042 - DNA, 15 bp, Homo sapiens
taaacagctttgtga

SEQ ID NO: 930043 - DNA, 15 bp, Homo sapiens
aaacagctttgtgag

SEQ ID NO: 930044 - DNA, 15 bp, Homo sapiens
aacagctttgtgagc

SEQ ID NO: 930045 - DNA, 15 bp, Homo sapiens
acagctttgtgagct

SEQ ID NO: 930046 - DNA, 15 bp, Homo sapiens
cagctttgtgagcta

SEQ ID NO: 930047 - DNA, 15 bp, Homo sapiens
agctttgtgagctat

SEQ ID NO: 930048 - DNA, 15 bp, Homo sapiens
gctttgtgagctata

SEQ ID NO: 930049 - DNA, 15 bp, Homo sapiens
ctttgtgagctatac

SEQ ID NO: 930050 - DNA, 15 bp, Homo sapiens
tttgtgagctataca

SEQ ID NO: 930051 - DNA, 15 bp, Homo sapiens
ttgtgagctatacag

SEQ ID NO: 930052 - DNA, 15 bp, Homo sapiens
tgtgagctatacagt

SEQ ID NO: 930053 - DNA, 15 bp, Homo sapiens
gtgagctatacagtc

SEQ ID NO: 930054 - DNA, 15 bp, Homo sapiens
tgagctatacagtct

SEQ ID NO: 930055 - DNA, 15 bp, Homo sapiens
gagctatacagtctc

SEQ ID NO: 930056 - DNA, 15 bp, Homo sapiens
agctatacagtctct

SEQ ID NO: 930057 - DNA, 15 bp, Homo sapiens
gctatacagtctctc

SEQ ID NO: 930058 - DNA, 15 bp, Homo sapiens
ctatacagtctctct

SEQ ID NO: 930059 - DNA, 15 bp, Homo sapiens
tatacagtctctctt

SEQ ID NO: 930060 - DNA, 15 bp, Homo sapiens
atacagtctctcttg

SEQ ID NO: 930061 - DNA, 15 bp, Homo sapiens
tacagtctctcttgc

SEQ ID NO: 930062 - DNA, 15 bp, Homo sapiens
acagtctctcttgcg

SEQ ID NO: 930063 - DNA, 15 bp, Homo sapiens
cagtctctcttgcgg

SEQ ID NO: 930064 - DNA, 15 bp, Homo sapiens
agtctctcttgcggt

SEQ ID NO: 930065 - DNA, 15 bp, Homo sapiens
gtctctcttgcggtc

SEQ ID NO: 930066 - DNA, 15 bp, Homo sapiens
tctctcttgcggtca

SEQ ID NO: 930067 - DNA, 15 bp, Homo sapiens
ctctcttgcggtcac

SEQ ID NO: 930068 - DNA, 15 bp, Homo sapiens
tctcttgcggtcact

SEQ ID NO: 930069 - DNA, 15 bp, Homo sapiens
ctcttgcggtcactc

SEQ ID NO: 930070 - DNA, 15 bp, Homo sapiens
tcttgcggtcactct

SEQ ID NO: 930071 - DNA, 15 bp, Homo sapiens
cttgcggtcactcta

SEQ ID NO: 930072 - DNA, 15 bp, Homo sapiens
ttgcggtcactctac

SEQ ID NO: 930073 - DNA, 15 bp, Homo sapiens
tgcggtcactctact

SEQ ID NO: 930074 - DNA, 15 bp, Homo sapiens
gcggtcactctactc

SEQ ID NO: 930075 - DNA, 15 bp, Homo sapiens
cggtcactctactct

SEQ ID NO: 930076 - DNA, 15 bp, Homo sapiens
ggtcactctactctg

SEQ ID NO: 930077 - DNA, 15 bp, Homo sapiens
gtcactctactctgc

SEQ ID NO: 930078 - DNA, 15 bp, Homo sapiens
tcactctactctgcc

SEQ ID NO: 930079 - DNA, 15 bp, Homo sapiens
cactctactctgcca

SEQ ID NO: 930080 - DNA, 15 bp, Homo sapiens
actctactctgccac

SEQ ID NO: 930081 - DNA, 15 bp, Homo sapiens
ctctactctgccact

SEQ ID NO: 930082 - DNA, 15 bp, Homo sapiens
tctactctgccactg

SEQ ID NO: 930083 - DNA, 15 bp, Homo sapiens
ctactctgccactgt

SEQ ID NO: 930084 - DNA, 15 bp, Homo sapiens
tactctgccactgta

SEQ ID NO: 930085 - DNA, 15 bp, Homo sapiens
actctgccactgtag

SEQ ID NO: 930086 - DNA, 15 bp, Homo sapiens
ctctgccactgtagt

SEQ ID NO: 930087 - DNA, 15 bp, Homo sapiens
tctgccactgtagtg

SEQ ID NO: 930088 - DNA, 15 bp, Homo sapiens
ctgccactgtagtgc

SEQ ID NO: 930089 - DNA, 15 bp, Homo sapiens
tgccactgtagtgca

SEQ ID NO: 930090 - DNA, 15 bp, Homo sapiens
gccactgtagtgcac

SEQ ID NO: 930091 - DNA, 15 bp, Homo sapiens
ccactgtagtgcaca

SEQ ID NO: 930092 - DNA, 15 bp, Homo sapiens
cactgtagtgcacag

SEQ ID NO: 930093 - DNA, 15 bp, Homo sapiens
actgtagtgcacaga

SEQ ID NO: 930094 - DNA, 15 bp, Homo sapiens
ctgtagtgcacagat

SEQ ID NO: 930095 - DNA, 15 bp, Homo sapiens
tgtagtgcacagata

SEQ ID NO: 930096 - DNA, 15 bp, Homo sapiens
gtagtgcacagatat

SEQ ID NO: 930097 - DNA, 15 bp, Homo sapiens
tagtgcacagatata

SEQ ID NO: 930098 - DNA, 15 bp, Homo sapiens
agtgcacagatatag

SEQ ID NO: 930099 - DNA, 15 bp, Homo sapiens
gtgcacagatataga

SEQ ID NO: 930100 - DNA, 15 bp, Homo sapiens
tgcacagatatagac

SEQ ID NO: 930101 - DNA, 15 bp, Homo sapiens
gcacagatatagaca

SEQ ID NO: 930102 - DNA, 15 bp, Homo sapiens
cacagatatagacag

SEQ ID NO: 930103 - DNA, 15 bp, Homo sapiens
acagatatagacagt

SEQ ID NO: 930104 - DNA, 15 bp, Homo sapiens
cagatatagacagta

SEQ ID NO: 930105 - DNA, 15 bp, Homo sapiens
agatatagacagtag

SEQ ID NO: 930106 - DNA, 15 bp, Homo sapiens
gatatagacagtaga

SEQ ID NO: 930107 - DNA, 15 bp, Homo sapiens
atatagacagtagat

SEQ ID NO: 930108 - DNA, 15 bp, Homo sapiens
tatagacagtagata

SEQ ID NO: 930109 - DNA, 15 bp, Homo sapiens
atagacagtagataa

SEQ ID NO: 930110 - DNA, 15 bp, Homo sapiens
tagacagtagataaa

SEQ ID NO: 930111 - DNA, 15 bp, Homo sapiens
agacagtagataaac

SEQ ID NO: 930112 - DNA, 15 bp, Homo sapiens
gacagtagataaaca

SEQ ID NO: 930113 - DNA, 15 bp, Homo sapiens
acagtagataaacaa

SEQ ID NO: 930114 - DNA, 15 bp, Homo sapiens
cagtagataaacaaa

SEQ ID NO: 930115 - DNA, 15 bp, Homo sapiens
agtagataaacaaat

SEQ ID NO: 930116 - DNA, 15 bp, Homo sapiens
gtagataaacaaatg

SEQ ID NO: 930117 - DNA, 15 bp, Homo sapiens
tagataaacaaatga

SEQ ID NO: 930118 - DNA, 15 bp, Homo sapiens
agataaacaaatgat

SEQ ID NO: 930119 - DNA, 15 bp, Homo sapiens
gataaacaaatgatc

SEQ ID NO: 930120 - DNA, 15 bp, Homo sapiens
ataaacaaatgatcc

SEQ ID NO: 930121 - DNA, 15 bp, Homo sapiens
taaacaaatgatcct

SEQ ID NO: 930122 - DNA, 15 bp, Homo sapiens
aaacaaatgatcctg

SEQ ID NO: 930123 - DNA, 15 bp, Homo sapiens
aacaaatgatcctgg

SEQ ID NO: 930124 - DNA, 15 bp, Homo sapiens
acaaatgatcctggc

SEQ ID NO: 930125 - DNA, 15 bp, Homo sapiens
caaatgatcctggct

SEQ ID NO: 930126 - DNA, 15 bp, Homo sapiens
aaatgatcctggctg

SEQ ID NO: 930127 - DNA, 15 bp, Homo sapiens
aatgatcctggctgt

SEQ ID NO: 930128 - DNA, 15 bp, Homo sapiens
atgatcctggctgtg

SEQ ID NO: 930129 - DNA, 15 bp, Homo sapiens
tgatcctggctgtgt

SEQ ID NO: 930130 - DNA, 15 bp, Homo sapiens
gatcctggctgtgtt

SEQ ID NO: 930131 - DNA, 15 bp, Homo sapiens
atcctggctgtgttc

SEQ ID NO: 930132 - DNA, 15 bp, Homo sapiens
tcctggctgtgttcc

SEQ ID NO: 930133 - DNA, 15 bp, Homo sapiens
cctggctgtgttcca

SEQ ID NO: 930134 - DNA, 15 bp, Homo sapiens
ctggctgtgttccag

SEQ ID NO: 930135 - DNA, 15 bp, Homo sapiens
tggctgtgttccagt

SEQ ID NO: 930136 - DNA, 15 bp, Homo sapiens
ggctgtgttccagta

SEQ ID NO: 930137 - DNA, 15 bp, Homo sapiens
gctgtgttccagtaa

SEQ ID NO: 930138 - DNA, 15 bp, Homo sapiens
ctgtgttccagtaaa

SEQ ID NO: 930139 - DNA, 15 bp, Homo sapiens
tgtgttccagtaaaa

SEQ ID NO: 930140 - DNA, 15 bp, Homo sapiens
gtgttccagtaaaac

SEQ ID NO: 930141 - DNA, 15 bp, Homo sapiens
tgttccagtaaaact

SEQ ID NO: 930142 - DNA, 15 bp, Homo sapiens
gttccagtaaaactt

SEQ ID NO: 930143 - DNA, 15 bp, Homo sapiens
ttccagtaaaacttt

SEQ ID NO: 930144 - DNA, 15 bp, Homo sapiens
tccagtaaaactttt

SEQ ID NO: 930145 - DNA, 15 bp, Homo sapiens
ccagtaaaacttttt

SEQ ID NO: 930146 - DNA, 15 bp, Homo sapiens
cagtaaaactttttt

SEQ ID NO: 930147 - DNA, 15 bp, Homo sapiens
agtaaaacttttttg

SEQ ID NO: 930148 - DNA, 15 bp, Homo sapiens
gtaaaacttttttgc

SEQ ID NO: 930149 - DNA, 15 bp, Homo sapiens
taaaacttttttgca

SEQ ID NO: 930150 - DNA, 15 bp, Homo sapiens
aaaacttttttgcaa

SEQ ID NO: 930151 - DNA, 15 bp, Homo sapiens
aaacttttttgcaaa

SEQ ID NO: 930152 - DNA, 15 bp, Homo sapiens
aacttttttgcaaag

SEQ ID NO: 930153 - DNA, 15 bp, Homo sapiens
acttttttgcaaagc

SEQ ID NO: 930154 - DNA, 15 bp, Homo sapiens
cttttttgcaaagcc

SEQ ID NO: 930155 - DNA, 15 bp, Homo sapiens
ttttttgcaaagcca

SEQ ID NO: 930156 - DNA, 15 bp, Homo sapiens
tttttgcaaagccag

SEQ ID NO: 930157 - DNA, 15 bp, Homo sapiens
ttttgcaaagccagg

SEQ ID NO: 930158 - DNA, 15 bp, Homo sapiens
tttgcaaagccaggc

SEQ ID NO: 930159 - DNA, 15 bp, Homo sapiens
ttgcaaagccaggca

SEQ ID NO: 930160 - DNA, 15 bp, Homo sapiens
tgcaaagccaggcag

SEQ ID NO: 930161 - DNA, 15 bp, Homo sapiens
gcaaagccaggcagt

SEQ ID NO: 930162 - DNA, 15 bp, Homo sapiens
caaagccaggcagtt

SEQ ID NO: 930163 - DNA, 15 bp, Homo sapiens
aaagccaggcagttg

SEQ ID NO: 930164 - DNA, 15 bp, Homo sapiens
aagccaggcagttgg

SEQ ID NO: 930165 - DNA, 15 bp, Homo sapiens
agccaggcagttggc

SEQ ID NO: 930166 - DNA, 15 bp, Homo sapiens
gccaggcagttggct

SEQ ID NO: 930167 - DNA, 15 bp, Homo sapiens
ccaggcagttggctg

SEQ ID NO: 930168 - DNA, 15 bp, Homo sapiens
caggcagttggctga

SEQ ID NO: 930169 - DNA, 15 bp, Homo sapiens
aggcagttggctgaa

SEQ ID NO: 930170 - DNA, 15 bp, Homo sapiens
ggcagttggctgaat

SEQ ID NO: 930171 - DNA, 15 bp, Homo sapiens
gcagttggctgaatt

SEQ ID NO: 930172 - DNA, 15 bp, Homo sapiens
cagttggctgaattt

SEQ ID NO: 930173 - DNA, 15 bp, Homo sapiens
agttggctgaatttg

SEQ ID NO: 930174 - DNA, 15 bp, Homo sapiens
gttggctgaatttga

SEQ ID NO: 930175 - DNA, 15 bp, Homo sapiens
ttggctgaatttgac

SEQ ID NO: 930176 - DNA, 15 bp, Homo sapiens
tggctgaatttgacc

SEQ ID NO: 930177 - DNA, 15 bp, Homo sapiens
ggctgaatttgaccc

SEQ ID NO: 930178 - DNA, 15 bp, Homo sapiens
gctgaatttgaccca

SEQ ID NO: 930179 - DNA, 15 bp, Homo sapiens
ctgaatttgacccat

SEQ ID NO: 930180 - DNA, 15 bp, Homo sapiens
tgaatttgacccatg

SEQ ID NO: 930181 - DNA, 15 bp, Homo sapiens
gaatttgacccatgg

SEQ ID NO: 930182 - DNA, 15 bp, Homo sapiens
aatttgacccatggg

SEQ ID NO: 930183 - DNA, 15 bp, Homo sapiens
atttgacccatgggc

SEQ ID NO: 930184 - DNA, 15 bp, Homo sapiens
tttgacccatgggct

SEQ ID NO: 930185 - DNA, 15 bp, Homo sapiens
ttgacccatgggcta

SEQ ID NO: 930186 - DNA, 15 bp, Homo sapiens
tgacccatgggctac

SEQ ID NO: 930187 - DNA, 15 bp, Homo sapiens
gacccatgggctaca

SEQ ID NO: 930188 - DNA, 15 bp, Homo sapiens
acccatgggctacag

SEQ ID NO: 930189 - DNA, 15 bp, Homo sapiens
cccatgggctacagt

SEQ ID NO: 930190 - DNA, 15 bp, Homo sapiens
ccatgggctacagtt

SEQ ID NO: 930191 - DNA, 15 bp, Homo sapiens
catgggctacagttt

SEQ ID NO: 930192 - DNA, 15 bp, Homo sapiens
atgggctacagttta

SEQ ID NO: 930193 - DNA, 15 bp, Homo sapiens
tgggctacagtttac

SEQ ID NO: 930194 - DNA, 15 bp, Homo sapiens
gggctacagtttacc

SEQ ID NO: 930195 - DNA, 15 bp, Homo sapiens
ggctacagtttacca

SEQ ID NO: 930196 - DNA, 15 bp, Homo sapiens
gctacagtttaccaa

SEQ ID NO: 930197 - DNA, 15 bp, Homo sapiens
ctacagtttaccaac

SEQ ID NO: 930198 - DNA, 15 bp, Homo sapiens
tacagtttaccaacc

SEQ ID NO: 930199 - DNA, 15 bp, Homo sapiens
acagtttaccaaccc

SEQ ID NO: 930200 - DNA, 15 bp, Homo sapiens
cagtttaccaacccc

SEQ ID NO: 930201 - DNA, 15 bp, Homo sapiens
agtttaccaacccct

SEQ ID NO: 930202 - DNA, 15 bp, Homo sapiens
gtttaccaacccctg

SEQ ID NO: 930203 - DNA, 15 bp, Homo sapiens
tttaccaacccctga

SEQ ID NO: 930204 - DNA, 15 bp, Homo sapiens
ttaccaacccctgat

SEQ ID NO: 930205 - DNA, 15 bp, Homo sapiens
taccaacccctgatc

SEQ ID NO: 930206 - DNA, 15 bp, Homo sapiens
accaacccctgatca

SEQ ID NO: 930207 - DNA, 15 bp, Homo sapiens
ccaacccctgatcat

SEQ ID NO: 930208 - DNA, 15 bp, Homo sapiens
caacccctgatcatt

SEQ ID NO: 930209 - DNA, 15 bp, Homo sapiens
aacccctgatcatta

SEQ ID NO: 930210 - DNA, 15 bp, Homo sapiens
acccctgatcattat

SEQ ID NO: 930211 - DNA, 15 bp, Homo sapiens
cccctgatcattatg

SEQ ID NO: 930212 - DNA, 15 bp, Homo sapiens
ccctgatcattatgc

SEQ ID NO: 930213 - DNA, 15 bp, Homo sapiens
cctgatcattatgct

SEQ ID NO: 930214 - DNA, 15 bp, Homo sapiens
ctgatcattatgctt

SEQ ID NO: 930215 - DNA, 15 bp, Homo sapiens
tgatcattatgcttg

SEQ ID NO: 930216 - DNA, 15 bp, Homo sapiens
gatcattatgcttgc

SEQ ID NO: 930217 - DNA, 15 bp, Homo sapiens
atcattatgcttgct

SEQ ID NO: 930218 - DNA, 15 bp, Homo sapiens
tcattatgcttgcta

SEQ ID NO: 930219 - DNA, 15 bp, Homo sapiens
cattatgcttgctac

SEQ ID NO: 930220 - DNA, 15 bp, Homo sapiens
attatgcttgctact

SEQ ID NO: 930221 - DNA, 15 bp, Homo sapiens
ttatgcttgctactc

SEQ ID NO: 930222 - DNA, 15 bp, Homo sapiens
tatgcttgctactca

SEQ ID NO: 930223 - DNA, 15 bp, Homo sapiens
atgcttgctactcaa

SEQ ID NO: 930224 - DNA, 15 bp, Homo sapiens
tgcttgctactcaaa

SEQ ID NO: 930225 - DNA, 15 bp, Homo sapiens
gcttgctactcaaag

SEQ ID NO: 930226 - DNA, 15 bp, Homo sapiens
cttgctactcaaagt

SEQ ID NO: 930227 - DNA, 15 bp, Homo sapiens
ttgctactcaaagtg

SEQ ID NO: 930228 - DNA, 15 bp, Homo sapiens
tgctactcaaagtgt

SEQ ID NO: 930229 - DNA, 15 bp, Homo sapiens
gctactcaaagtgtg

SEQ ID NO: 930230 - DNA, 15 bp, Homo sapiens
ctactcaaagtgtgg

SEQ ID NO: 930231 - DNA, 15 bp, Homo sapiens
tactcaaagtgtggt

SEQ ID NO: 930232 - DNA, 15 bp, Homo sapiens
actcaaagtgtggtc

SEQ ID NO: 930233 - DNA, 15 bp, Homo sapiens
ctcaaagtgtggtcc

SEQ ID NO: 930234 - DNA, 15 bp, Homo sapiens
tcaaagtgtggtcca

SEQ ID NO: 930235 - DNA, 15 bp, Homo sapiens
caaagtgtggtccat

SEQ ID NO: 930236 - DNA, 15 bp, Homo sapiens
aaagtgtggtccatg

SEQ ID NO: 930237 - DNA, 15 bp, Homo sapiens
aagtgtggtccatgc

SEQ ID NO: 930238 - DNA, 15 bp, Homo sapiens
agtgtggtccatgca

SEQ ID NO: 930239 - DNA, 15 bp, Homo sapiens
gtgtggtccatgcac

SEQ ID NO: 930240 - DNA, 15 bp, Homo sapiens
tgtggtccatgcacc

SEQ ID NO: 930241 - DNA, 15 bp, Homo sapiens
gtggtccatgcacca

SEQ ID NO: 930242 - DNA, 15 bp, Homo sapiens
tggtccatgcaccag

SEQ ID NO: 930243 - DNA, 15 bp, Homo sapiens
ggtccatgcaccagc

SEQ ID NO: 930244 - DNA, 15 bp, Homo sapiens
gtccatgcaccagca

SEQ ID NO: 930245 - DNA, 15 bp, Homo sapiens
tccatgcaccagcag

SEQ ID NO: 930246 - DNA, 15 bp, Homo sapiens
ccatgcaccagcagc

SEQ ID NO: 930247 - DNA, 15 bp, Homo sapiens
catgcaccagcagca

SEQ ID NO: 930248 - DNA, 15 bp, Homo sapiens
atgcaccagcagcat

SEQ ID NO: 930249 - DNA, 15 bp, Homo sapiens
tgcaccagcagcatt

SEQ ID NO: 930250 - DNA, 15 bp, Homo sapiens
gcaccagcagcatta

SEQ ID NO: 930251 - DNA, 15 bp, Homo sapiens
caccagcagcattag

SEQ ID NO: 930252 - DNA, 15 bp, Homo sapiens
accagcagcattaga

SEQ ID NO: 930253 - DNA, 15 bp, Homo sapiens
ccagcagcattagaa

SEQ ID NO: 930254 - DNA, 15 bp, Homo sapiens
cagcagcattagaat

SEQ ID NO: 930255 - DNA, 15 bp, Homo sapiens
agcagcattagaatt

SEQ ID NO: 930256 - DNA, 15 bp, Homo sapiens
gcagcattagaatta

SEQ ID NO: 930257 - DNA, 15 bp, Homo sapiens
cagcattagaattac

SEQ ID NO: 930258 - DNA, 15 bp, Homo sapiens
agcattagaattact

SEQ ID NO: 930259 - DNA, 15 bp, Homo sapiens
gcattagaattactt

SEQ ID NO: 930260 - DNA, 15 bp, Homo sapiens
cattagaattacttg

SEQ ID NO: 930261 - DNA, 15 bp, Homo sapiens
attagaattacttgg

SEQ ID NO: 930262 - DNA, 15 bp, Homo sapiens
ttagaattacttgga

SEQ ID NO: 930263 - DNA, 15 bp, Homo sapiens
tagaattacttggaa

SEQ ID NO: 930264 - DNA, 15 bp, Homo sapiens
agaattacttggaag

SEQ ID NO: 930265 - DNA, 15 bp, Homo sapiens
gaattacttggaagc

SEQ ID NO: 930266 - DNA, 15 bp, Homo sapiens
aattacttggaagct

SEQ ID NO: 930267 - DNA, 15 bp, Homo sapiens
attacttggaagctt

SEQ ID NO: 930268 - DNA, 15 bp, Homo sapiens
ttacttggaagcttg

SEQ ID NO: 930269 - DNA, 15 bp, Homo sapiens
tacttggaagcttgc

SEQ ID NO: 930270 - DNA, 15 bp, Homo sapiens
acttggaagcttgcc

SEQ ID NO: 930271 - DNA, 15 bp, Homo sapiens
cttggaagcttgccg

SEQ ID NO: 930272 - DNA, 15 bp, Homo sapiens
ttggaagcttgccgg

SEQ ID NO: 930273 - DNA, 15 bp, Homo sapiens
tggaagcttgccgga

SEQ ID NO: 930274 - DNA, 15 bp, Homo sapiens
ggaagcttgccggaa

SEQ ID NO: 930275 - DNA, 15 bp, Homo sapiens
gaagcttgccggaaa

SEQ ID NO: 930276 - DNA, 15 bp, Homo sapiens
aagcttgccggaaat

SEQ ID NO: 930277 - DNA, 15 bp, Homo sapiens
agcttgccggaaatg

SEQ ID NO: 930278 - DNA, 15 bp, Homo sapiens
gcttgccggaaatgc

SEQ ID NO: 930279 - DNA, 15 bp, Homo sapiens
cttgccggaaatgca

SEQ ID NO: 930280 - DNA, 15 bp, Homo sapiens
ttgccggaaatgcag

SEQ ID NO: 930281 - DNA, 15 bp, Homo sapiens
tgccggaaatgcaga

SEQ ID NO: 930282 - DNA, 15 bp, Homo sapiens
gccggaaatgcagaa

SEQ ID NO: 930283 - DNA, 15 bp, Homo sapiens
ccggaaatgcagaat

SEQ ID NO: 930284 - DNA, 15 bp, Homo sapiens
cggaaatgcagaatc

SEQ ID NO: 930285 - DNA, 15 bp, Homo sapiens
ggaaatgcagaatct

SEQ ID NO: 930286 - DNA, 15 bp, Homo sapiens
gaaatgcagaatctt

SEQ ID NO: 930287 - DNA, 15 bp, Homo sapiens
aaatgcagaatcttg

SEQ ID NO: 930288 - DNA, 15 bp, Homo sapiens
aatgcagaatcttgg

SEQ ID NO: 930289 - DNA, 15 bp, Homo sapiens
atgcagaatcttgga

SEQ ID NO: 930290 - DNA, 15 bp, Homo sapiens
tgcagaatcttggat

SEQ ID NO: 930291 - DNA, 15 bp, Homo sapiens
gcagaatcttggatc

SEQ ID NO: 930292 - DNA, 15 bp, Homo sapiens
cagaatcttggatcc

SEQ ID NO: 930293 - DNA, 15 bp, Homo sapiens
agaatcttggatccc

SEQ ID NO: 930294 - DNA, 15 bp, Homo sapiens
gaatcttggatcccg

SEQ ID NO: 930295 - DNA, 15 bp, Homo sapiens
aatcttggatcccgc

SEQ ID NO: 930296 - DNA, 15 bp, Homo sapiens
atcttggatcccgcc

SEQ ID NO: 930297 - DNA, 15 bp, Homo sapiens
tcttggatcccgccc

SEQ ID NO: 930298 - DNA, 15 bp, Homo sapiens
cttggatcccgcccc

SEQ ID NO: 930299 - DNA, 15 bp, Homo sapiens
ttggatcccgcccca

SEQ ID NO: 930300 - DNA, 15 bp, Homo sapiens
tggatcccgccccaa

SEQ ID NO: 930301 - DNA, 15 bp, Homo sapiens
ggatcccgccccaaa

SEQ ID NO: 930302 - DNA, 15 bp, Homo sapiens
gatcccgccccaaat

SEQ ID NO: 930303 - DNA, 15 bp, Homo sapiens
atcccgccccaaatc

SEQ ID NO: 930304 - DNA, 15 bp, Homo sapiens
tcccgccccaaatct

SEQ ID NO: 930305 - DNA, 15 bp, Homo sapiens
cccgccccaaatcta

SEQ ID NO: 930306 - DNA, 15 bp, Homo sapiens
ccgccccaaatctac

SEQ ID NO: 930307 - DNA, 15 bp, Homo sapiens
cgccccaaatctact

SEQ ID NO: 930308 - DNA, 15 bp, Homo sapiens
gccccaaatctactg

SEQ ID NO: 930309 - DNA, 15 bp, Homo sapiens
ccccaaatctactga

SEQ ID NO: 930310 - DNA, 15 bp, Homo sapiens
cccaaatctactgaa

SEQ ID NO: 930311 - DNA, 15 bp, Homo sapiens
ccaaatctactgaat

SEQ ID NO: 930312 - DNA, 15 bp, Homo sapiens
caaatctactgaatc

SEQ ID NO: 930313 - DNA, 15 bp, Homo sapiens
aaatctactgaatca

SEQ ID NO: 930314 - DNA, 15 bp, Homo sapiens
aatctactgaatcag

SEQ ID NO: 930315 - DNA, 15 bp, Homo sapiens
atctactgaatcaga

SEQ ID NO: 930316 - DNA, 15 bp, Homo sapiens
tctactgaatcagaa

SEQ ID NO: 930317 - DNA, 15 bp, Homo sapiens
ctactgaatcagaat

SEQ ID NO: 930318 - DNA, 15 bp, Homo sapiens
tactgaatcagaatc

SEQ ID NO: 930319 - DNA, 15 bp, Homo sapiens
actgaatcagaatca

SEQ ID NO: 930320 - DNA, 15 bp, Homo sapiens
ctgaatcagaatcag

SEQ ID NO: 930321 - DNA, 15 bp, Homo sapiens
tgaatcagaatcaga

SEQ ID NO: 930322 - DNA, 15 bp, Homo sapiens
gaatcagaatcagac

SEQ ID NO: 930323 - DNA, 15 bp, Homo sapiens
aatcagaatcagact

SEQ ID NO: 930324 - DNA, 15 bp, Homo sapiens
atcagaatcagactt

SEQ ID NO: 930325 - DNA, 15 bp, Homo sapiens
tcagaatcagacttt

SEQ ID NO: 930326 - DNA, 15 bp, Homo sapiens
cagaatcagactttt

SEQ ID NO: 930327 - DNA, 15 bp, Homo sapiens
agaatcagactttta

SEQ ID NO: 930328 - DNA, 15 bp, Homo sapiens
gaatcagacttttaa

SEQ ID NO: 930329 - DNA, 15 bp, Homo sapiens
aatcagacttttaac

SEQ ID NO: 930330 - DNA, 15 bp, Homo sapiens
atcagacttttaaca

SEQ ID NO: 930331 - DNA, 15 bp, Homo sapiens
tcagacttttaacaa

SEQ ID NO: 930332 - DNA, 15 bp, Homo sapiens
cagacttttaacaag

SEQ ID NO: 930333 - DNA, 15 bp, Homo sapiens
agacttttaacaaga

SEQ ID NO: 930334 - DNA, 15 bp, Homo sapiens
gacttttaacaagat

SEQ ID NO: 930335 - DNA, 15 bp, Homo sapiens
acttttaacaagatt

SEQ ID NO: 930336 - DNA, 15 bp, Homo sapiens
cttttaacaagattc

SEQ ID NO: 930337 - DNA, 15 bp, Homo sapiens
ttttaacaagattct

SEQ ID NO: 930338 - DNA, 15 bp, Homo sapiens
tttaacaagattctc

SEQ ID NO: 930339 - DNA, 15 bp, Homo sapiens
ttaacaagattctcc

SEQ ID NO: 930340 - DNA, 15 bp, Homo sapiens
taacaagattctcca

SEQ ID NO: 930341 - DNA, 15 bp, Homo sapiens
aacaagattctccag

SEQ ID NO: 930342 - DNA, 15 bp, Homo sapiens
acaagattctccaga

SEQ ID NO: 930343 - DNA, 15 bp, Homo sapiens
caagattctccagaa

SEQ ID NO: 930344 - DNA, 15 bp, Homo sapiens
aagattctccagaag

SEQ ID NO: 930345 - DNA, 15 bp, Homo sapiens
agattctccagaaga

SEQ ID NO: 930346 - DNA, 15 bp, Homo sapiens
gattctccagaagag

SEQ ID NO: 930347 - DNA, 15 bp, Homo sapiens
attctccagaagagt

SEQ ID NO: 930348 - DNA, 15 bp, Homo sapiens
ttctccagaagagtc

SEQ ID NO: 930349 - DNA, 15 bp, Homo sapiens
tctccagaagagtca

SEQ ID NO: 930350 - DNA, 15 bp, Homo sapiens
ctccagaagagtcat

SEQ ID NO: 930351 - DNA, 15 bp, Homo sapiens
tccagaagagtcata

SEQ ID NO: 930352 - DNA, 15 bp, Homo sapiens
ccagaagagtcatac

SEQ ID NO: 930353 - DNA, 15 bp, Homo sapiens
cagaagagtcataca

SEQ ID NO: 930354 - DNA, 15 bp, Homo sapiens
agaagagtcatacac

SEQ ID NO: 930355 - DNA, 15 bp, Homo sapiens
gaagagtcatacaca

SEQ ID NO: 930356 - DNA, 15 bp, Homo sapiens
aagagtcatacacac

SEQ ID NO: 930357 - DNA, 15 bp, Homo sapiens
agagtcatacacaca

SEQ ID NO: 930358 - DNA, 15 bp, Homo sapiens
gagtcatacacacat

SEQ ID NO: 930359 - DNA, 15 bp, Homo sapiens
agtcatacacacatt

SEQ ID NO: 930360 - DNA, 15 bp, Homo sapiens
gtcatacacacattg

SEQ ID NO: 930361 - DNA, 15 bp, Homo sapiens
tcatacacacattga

SEQ ID NO: 930362 - DNA, 15 bp, Homo sapiens
catacacacattgaa

SEQ ID NO: 930363 - DNA, 15 bp, Homo sapiens
atacacacattgaag

SEQ ID NO: 930364 - DNA, 15 bp, Homo sapiens
tacacacattgaagt

SEQ ID NO: 930365 - DNA, 15 bp, Homo sapiens
acacacattgaagtg

SEQ ID NO: 930366 - DNA, 15 bp, Homo sapiens
cacacattgaagtgt

SEQ ID NO: 930367 - DNA, 15 bp, Homo sapiens
acacattgaagtgtg

SEQ ID NO: 930368 - DNA, 15 bp, Homo sapiens
cacattgaagtgtga

SEQ ID NO: 930369 - DNA, 15 bp, Homo sapiens
acattgaagtgtgag

SEQ ID NO: 930370 - DNA, 15 bp, Homo sapiens
cattgaagtgtgaga

SEQ ID NO: 930371 - DNA, 15 bp, Homo sapiens
attgaagtgtgagaa

SEQ ID NO: 930372 - DNA, 15 bp, Homo sapiens
ttgaagtgtgagaag

SEQ ID NO: 930373 - DNA, 15 bp, Homo sapiens
tgaagtgtgagaagc

SEQ ID NO: 930374 - DNA, 15 bp, Homo sapiens
gaagtgtgagaagct

SEQ ID NO: 930375 - DNA, 15 bp, Homo sapiens
aagtgtgagaagctc

SEQ ID NO: 930376 - DNA, 15 bp, Homo sapiens
agtgtgagaagctct

SEQ ID NO: 930377 - DNA, 15 bp, Homo sapiens
gtgtgagaagctctg

SEQ ID NO: 930378 - DNA, 15 bp, Homo sapiens
tgtgagaagctctgc

SEQ ID NO: 930379 - DNA, 15 bp, Homo sapiens
gtgagaagctctgct

SEQ ID NO: 930380 - DNA, 15 bp, Homo sapiens
tgagaagctctgctc

SEQ ID NO: 930381 - DNA, 15 bp, Homo sapiens
gagaagctctgctct

SEQ ID NO: 930382 - DNA, 15 bp, Homo sapiens
agaagctctgctcta

SEQ ID NO: 930383 - DNA, 15 bp, Homo sapiens
gaagctctgctctac

SEQ ID NO: 930384 - DNA, 15 bp, Homo sapiens
aagctctgctctaca

SEQ ID NO: 930385 - DNA, 15 bp, Homo sapiens
agctctgctctacat

SEQ ID NO: 930386 - DNA, 15 bp, Homo sapiens
gctctgctctacatg

SEQ ID NO: 930387 - DNA, 15 bp, Homo sapiens
ctctgctctacatgt

SEQ ID NO: 930388 - DNA, 15 bp, Homo sapiens
tctgctctacatgtc

SEQ ID NO: 930389 - DNA, 15 bp, Homo sapiens
ctgctctacatgtct

SEQ ID NO: 930390 - DNA, 15 bp, Homo sapiens
tgctctacatgtctt

SEQ ID NO: 930391 - DNA, 15 bp, Homo sapiens
gctctacatgtcttt

SEQ ID NO: 930392 - DNA, 15 bp, Homo sapiens
ctctacatgtcttta

SEQ ID NO: 930393 - DNA, 15 bp, Homo sapiens
tctacatgtctttaa

SEQ ID NO: 930394 - DNA, 15 bp, Homo sapiens
ctacatgtctttaat

SEQ ID NO: 930395 - DNA, 15 bp, Homo sapiens
tacatgtctttaatt

SEQ ID NO: 930396 - DNA, 15 bp, Homo sapiens
acatgtctttaattc

SEQ ID NO: 930397 - DNA, 15 bp, Homo sapiens
catgtctttaattca

SEQ ID NO: 930398 - DNA, 15 bp, Homo sapiens
atgtctttaattcat

SEQ ID NO: 930399 - DNA, 15 bp, Homo sapiens
tgtctttaattcatt

SEQ ID NO: 930400 - DNA, 15 bp, Homo sapiens
gtctttaattcattg

SEQ ID NO: 930401 - DNA, 15 bp, Homo sapiens
tctttaattcattga

SEQ ID NO: 930402 - DNA, 15 bp, Homo sapiens
ctttaattcattgaa

SEQ ID NO: 930403 - DNA, 15 bp, Homo sapiens
tttaattcattgaat

SEQ ID NO: 930404 - DNA, 15 bp, Homo sapiens
ttaattcattgaatg

SEQ ID NO: 930405 - DNA, 15 bp, Homo sapiens
taattcattgaatgc

SEQ ID NO: 930406 - DNA, 15 bp, Homo sapiens
aattcattgaatgcc

SEQ ID NO: 930407 - DNA, 15 bp, Homo sapiens
attcattgaatgcct

SEQ ID NO: 930408 - DNA, 15 bp, Homo sapiens
ttcattgaatgcctc

SEQ ID NO: 930409 - DNA, 15 bp, Homo sapiens
tcattgaatgcctct

SEQ ID NO: 930410 - DNA, 15 bp, Homo sapiens
cattgaatgcctctt

SEQ ID NO: 930411 - DNA, 15 bp, Homo sapiens
attgaatgcctctta

SEQ ID NO: 930412 - DNA, 15 bp, Homo sapiens
ttgaatgcctcttat

SEQ ID NO: 930413 - DNA, 15 bp, Homo sapiens
tgaatgcctcttata

SEQ ID NO: 930414 - DNA, 15 bp, Homo sapiens
gaatgcctcttatag

SEQ ID NO: 930415 - DNA, 15 bp, Homo sapiens
aatgcctcttatagt

SEQ ID NO: 930416 - DNA, 15 bp, Homo sapiens
atgcctcttatagtc

SEQ ID NO: 930417 - DNA, 15 bp, Homo sapiens
tgcctcttatagtcc

SEQ ID NO: 930418 - DNA, 15 bp, Homo sapiens
gcctcttatagtcca

SEQ ID NO: 930419 - DNA, 15 bp, Homo sapiens
cctcttatagtccaa

SEQ ID NO: 930420 - DNA, 15 bp, Homo sapiens
ctcttatagtccaag

SEQ ID NO: 930421 - DNA, 15 bp, Homo sapiens
tcttatagtccaagc

SEQ ID NO: 930422 - DNA, 15 bp, Homo sapiens
cttatagtccaagca

SEQ ID NO: 930423 - DNA, 15 bp, Homo sapiens
ttatagtccaagcat

SEQ ID NO: 930424 - DNA, 15 bp, Homo sapiens
tatagtccaagcatt

SEQ ID NO: 930425 - DNA, 15 bp, Homo sapiens
atagtccaagcattc

SEQ ID NO: 930426 - DNA, 15 bp, Homo sapiens
tagtccaagcattct

SEQ ID NO: 930427 - DNA, 15 bp, Homo sapiens
agtccaagcattctt

SEQ ID NO: 930428 - DNA, 15 bp, Homo sapiens
gtccaagcattctta

SEQ ID NO: 930429 - DNA, 15 bp, Homo sapiens
tccaagcattcttac

SEQ ID NO: 930430 - DNA, 15 bp, Homo sapiens
ccaagcattcttaca

SEQ ID NO: 930431 - DNA, 15 bp, Homo sapiens
caagcattcttacag

SEQ ID NO: 930432 - DNA, 15 bp, Homo sapiens
aagcattcttacagg

SEQ ID NO: 930433 - DNA, 15 bp, Homo sapiens
agcattcttacaggg

SEQ ID NO: 930434 - DNA, 15 bp, Homo sapiens
gcattcttacaggga

SEQ ID NO: 930435 - DNA, 15 bp, Homo sapiens
cattcttacagggac

SEQ ID NO: 930436 - DNA, 15 bp, Homo sapiens
attcttacagggaca

SEQ ID NO: 930437 - DNA, 15 bp, Homo sapiens
ttcttacagggacaa

SEQ ID NO: 930438 - DNA, 15 bp, Homo sapiens
tcttacagggacaat

SEQ ID NO: 930439 - DNA, 15 bp, Homo sapiens
cttacagggacaata

SEQ ID NO: 930440 - DNA, 15 bp, Homo sapiens
ttacagggacaatac

SEQ ID NO: 930441 - DNA, 15 bp, Homo sapiens
tacagggacaataca

SEQ ID NO: 930442 - DNA, 15 bp, Homo sapiens
acagggacaatacac

SEQ ID NO: 930443 - DNA, 15 bp, Homo sapiens
cagggacaatacaca

SEQ ID NO: 930444 - DNA, 15 bp, Homo sapiens
agggacaatacacac

SEQ ID NO: 930445 - DNA, 15 bp, Homo sapiens
gggacaatacacact

SEQ ID NO: 930446 - DNA, 15 bp, Homo sapiens
ggacaatacacacta

SEQ ID NO: 930447 - DNA, 15 bp, Homo sapiens
gacaatacacactac

SEQ ID NO: 930448 - DNA, 15 bp, Homo sapiens
acaatacacactact

SEQ ID NO: 930449 - DNA, 15 bp, Homo sapiens
caatacacactacta

SEQ ID NO: 930450 - DNA, 15 bp, Homo sapiens
aatacacactactag

SEQ ID NO: 930451 - DNA, 15 bp, Homo sapiens
atacacactactaga

SEQ ID NO: 930452 - DNA, 15 bp, Homo sapiens
tacacactactagat

SEQ ID NO: 930453 - DNA, 15 bp, Homo sapiens
acacactactagatc

SEQ ID NO: 930454 - DNA, 15 bp, Homo sapiens
cacactactagatct

SEQ ID NO: 930455 - DNA, 15 bp, Homo sapiens
acactactagatcta

SEQ ID NO: 930456 - DNA, 15 bp, Homo sapiens
cactactagatctat

SEQ ID NO: 930457 - DNA, 15 bp, Homo sapiens
actactagatctata

SEQ ID NO: 930458 - DNA, 15 bp, Homo sapiens
ctactagatctatag

SEQ ID NO: 930459 - DNA, 15 bp, Homo sapiens
tactagatctatagt

SEQ ID NO: 930460 - DNA, 15 bp, Homo sapiens
actagatctatagtc

SEQ ID NO: 930461 - DNA, 15 bp, Homo sapiens
ctagatctatagtcc

SEQ ID NO: 930462 - DNA, 15 bp, Homo sapiens
tagatctatagtcct

SEQ ID NO: 930463 - DNA, 15 bp, Homo sapiens
agatctatagtcctc

SEQ ID NO: 930464 - DNA, 15 bp, Homo sapiens
gatctatagtcctca

SEQ ID NO: 930465 - DNA, 15 bp, Homo sapiens
atctatagtcctcac

SEQ ID NO: 930466 - DNA, 15 bp, Homo sapiens
tctatagtcctcaca

SEQ ID NO: 930467 - DNA, 15 bp, Homo sapiens
ctatagtcctcacaa

SEQ ID NO: 930468 - DNA, 15 bp, Homo sapiens
tatagtcctcacaac

SEQ ID NO: 930469 - DNA, 15 bp, Homo sapiens
atagtcctcacaaca

SEQ ID NO: 930470 - DNA, 15 bp, Homo sapiens
tagtcctcacaacag

SEQ ID NO: 930471 - DNA, 15 bp, Homo sapiens
agtcctcacaacagg

SEQ ID NO: 930472 - DNA, 15 bp, Homo sapiens
gtcctcacaacagga

SEQ ID NO: 930473 - DNA, 15 bp, Homo sapiens
tcctcacaacaggat

SEQ ID NO: 930474 - DNA, 15 bp, Homo sapiens
cctcacaacaggata

SEQ ID NO: 930475 - DNA, 15 bp, Homo sapiens
ctcacaacaggataa

SEQ ID NO: 930476 - DNA, 15 bp, Homo sapiens
tcacaacaggataag

SEQ ID NO: 930477 - DNA, 15 bp, Homo sapiens
cacaacaggataagg

SEQ ID NO: 930478 - DNA, 15 bp, Homo sapiens
acaacaggataaggt

SEQ ID NO: 930479 - DNA, 15 bp, Homo sapiens
caacaggataaggtg

SEQ ID NO: 930480 - DNA, 15 bp, Homo sapiens
aacaggataaggtgg

SEQ ID NO: 930481 - DNA, 15 bp, Homo sapiens
acaggataaggtggc

SEQ ID NO: 930482 - DNA, 15 bp, Homo sapiens
caggataaggtggct

SEQ ID NO: 930483 - DNA, 15 bp, Homo sapiens
aggataaggtggctg

SEQ ID NO: 930484 - DNA, 15 bp, Homo sapiens
ggataaggtggctgt

SEQ ID NO: 930485 - DNA, 15 bp, Homo sapiens
gataaggtggctgtt

SEQ ID NO: 930486 - DNA, 15 bp, Homo sapiens
ataaggtggctgtta

SEQ ID NO: 930487 - DNA, 15 bp, Homo sapiens
taaggtggctgttat

SEQ ID NO: 930488 - DNA, 15 bp, Homo sapiens
aaggtggctgttatt

SEQ ID NO: 930489 - DNA, 15 bp, Homo sapiens
aggtggctgttatta

SEQ ID NO: 930490 - DNA, 15 bp, Homo sapiens
ggtggctgttattat

SEQ ID NO: 930491 - DNA, 15 bp, Homo sapiens
gtggctgttattatc

SEQ ID NO: 930492 - DNA, 15 bp, Homo sapiens
tggctgttattatcc

SEQ ID NO: 930493 - DNA, 15 bp, Homo sapiens
ggctgttattatccc

SEQ ID NO: 930494 - DNA, 15 bp, Homo sapiens
gctgttattatccca

SEQ ID NO: 930495 - DNA, 15 bp, Homo sapiens
ctgttattatcccat

SEQ ID NO: 930496 - DNA, 15 bp, Homo sapiens
tgttattatcccatt

SEQ ID NO: 930497 - DNA, 15 bp, Homo sapiens
gttattatcccattt

SEQ ID NO: 930498 - DNA, 15 bp, Homo sapiens
ttattatcccatttt

SEQ ID NO: 930499 - DNA, 15 bp, Homo sapiens
tattatcccatttta

SEQ ID NO: 930500 - DNA, 15 bp, Homo sapiens
attatcccattttac

SEQ ID NO: 930501 - DNA, 15 bp, Homo sapiens
ttatcccattttaca

SEQ ID NO: 930502 - DNA, 15 bp, Homo sapiens
tatcccattttacag

SEQ ID NO: 930503 - DNA, 15 bp, Homo sapiens
atcccattttacaga

SEQ ID NO: 930504 - DNA, 15 bp, Homo sapiens
tcccattttacagat

SEQ ID NO: 930505 - DNA, 15 bp, Homo sapiens
cccattttacagatg

SEQ ID NO: 930506 - DNA, 15 bp, Homo sapiens
ccattttacagatga

SEQ ID NO: 930507 - DNA, 15 bp, Homo sapiens
cattttacagatgag

SEQ ID NO: 930508 - DNA, 15 bp, Homo sapiens
attttacagatgagg

SEQ ID NO: 930509 - DNA, 15 bp, Homo sapiens
ttttacagatgagga

SEQ ID NO: 930510 - DNA, 15 bp, Homo sapiens
tttacagatgaggaa

SEQ ID NO: 930511 - DNA, 15 bp, Homo sapiens
ttacagatgaggaaa

SEQ ID NO: 930512 - DNA, 15 bp, Homo sapiens
tacagatgaggaaac

SEQ ID NO: 930513 - DNA, 15 bp, Homo sapiens
acagatgaggaaaca

SEQ ID NO: 930514 - DNA, 15 bp, Homo sapiens
cagatgaggaaacaa

SEQ ID NO: 930515 - DNA, 15 bp, Homo sapiens
agatgaggaaacaaa

SEQ ID NO: 930516 - DNA, 15 bp, Homo sapiens
gatgaggaaacaaaa

SEQ ID NO: 930517 - DNA, 15 bp, Homo sapiens
atgaggaaacaaaag

SEQ ID NO: 930518 - DNA, 15 bp, Homo sapiens
tgaggaaacaaaagc

SEQ ID NO: 930519 - DNA, 15 bp, Homo sapiens
gaggaaacaaaagct

SEQ ID NO: 930520 - DNA, 15 bp, Homo sapiens
aggaaacaaaagctc

SEQ ID NO: 930521 - DNA, 15 bp, Homo sapiens
ggaaacaaaagctca

SEQ ID NO: 930522 - DNA, 15 bp, Homo sapiens
gaaacaaaagctcag

SEQ ID NO: 930523 - DNA, 15 bp, Homo sapiens
aaacaaaagctcaga

SEQ ID NO: 930524 - DNA, 15 bp, Homo sapiens
aacaaaagctcagag

SEQ ID NO: 930525 - DNA, 15 bp, Homo sapiens
acaaaagctcagaga

SEQ ID NO: 930526 - DNA, 15 bp, Homo sapiens
caaaagctcagagaa

SEQ ID NO: 930527 - DNA, 15 bp, Homo sapiens
aaaagctcagagaaa

SEQ ID NO: 930528 - DNA, 15 bp, Homo sapiens
aaagctcagagaaat

SEQ ID NO: 930529 - DNA, 15 bp, Homo sapiens
aagctcagagaaatt

SEQ ID NO: 930530 - DNA, 15 bp, Homo sapiens
agctcagagaaatta

SEQ ID NO: 930531 - DNA, 15 bp, Homo sapiens
gctcagagaaattag

SEQ ID NO: 930532 - DNA, 15 bp, Homo sapiens
ctcagagaaattaga

SEQ ID NO: 930533 - DNA, 15 bp, Homo sapiens
tcagagaaattagat

SEQ ID NO: 930534 - DNA, 15 bp, Homo sapiens
cagagaaattagatg

SEQ ID NO: 930535 - DNA, 15 bp, Homo sapiens
agagaaattagatga

SEQ ID NO: 930536 - DNA, 15 bp, Homo sapiens
gagaaattagatgaa

SEQ ID NO: 930537 - DNA, 15 bp, Homo sapiens
agaaattagatgaat

SEQ ID NO: 930538 - DNA, 15 bp, Homo sapiens
gaaattagatgaatc

SEQ ID NO: 930539 - DNA, 15 bp, Homo sapiens
aaattagatgaatca

SEQ ID NO: 930540 - DNA, 15 bp, Homo sapiens
aattagatgaatcaa

SEQ ID NO: 930541 - DNA, 15 bp, Homo sapiens
attagatgaatcaag

SEQ ID NO: 930542 - DNA, 15 bp, Homo sapiens
ttagatgaatcaagg

SEQ ID NO: 930543 - DNA, 15 bp, Homo sapiens
tagatgaatcaagga

SEQ ID NO: 930544 - DNA, 15 bp, Homo sapiens
agatgaatcaaggag

SEQ ID NO: 930545 - DNA, 15 bp, Homo sapiens
gatgaatcaaggaga

SEQ ID NO: 930546 - DNA, 15 bp, Homo sapiens
atgaatcaaggagac

SEQ ID NO: 930547 - DNA, 15 bp, Homo sapiens
tgaatcaaggagaca

SEQ ID NO: 930548 - DNA, 15 bp, Homo sapiens
gaatcaaggagacaa

SEQ ID NO: 930549 - DNA, 15 bp, Homo sapiens
aatcaaggagacaat

SEQ ID NO: 930550 - DNA, 15 bp, Homo sapiens
atcaaggagacaata

SEQ ID NO: 930551 - DNA, 15 bp, Homo sapiens
tcaaggagacaatag

SEQ ID NO: 930552 - DNA, 15 bp, Homo sapiens
caaggagacaataga

SEQ ID NO: 930553 - DNA, 15 bp, Homo sapiens
aaggagacaatagat

SEQ ID NO: 930554 - DNA, 15 bp, Homo sapiens
aggagacaatagatg

SEQ ID NO: 930555 - DNA, 15 bp, Homo sapiens
ggagacaatagatgg

SEQ ID NO: 930556 - DNA, 15 bp, Homo sapiens
gagacaatagatggc

SEQ ID NO: 930557 - DNA, 15 bp, Homo sapiens
agacaatagatggca

SEQ ID NO: 930558 - DNA, 15 bp, Homo sapiens
gacaatagatggcat

SEQ ID NO: 930559 - DNA, 15 bp, Homo sapiens
acaatagatggcatt

SEQ ID NO: 930560 - DNA, 15 bp, Homo sapiens
caatagatggcattg

SEQ ID NO: 930561 - DNA, 15 bp, Homo sapiens
aatagatggcattga

SEQ ID NO: 930562 - DNA, 15 bp, Homo sapiens
atagatggcattgaa

SEQ ID NO: 930563 - DNA, 15 bp, Homo sapiens
tagatggcattgaaa

SEQ ID NO: 930564 - DNA, 15 bp, Homo sapiens
agatggcattgaaat

SEQ ID NO: 930565 - DNA, 15 bp, Homo sapiens
gatggcattgaaatt

SEQ ID NO: 930566 - DNA, 15 bp, Homo sapiens
atggcattgaaattt

SEQ ID NO: 930567 - DNA, 15 bp, Homo sapiens
tggcattgaaattta

SEQ ID NO: 930568 - DNA, 15 bp, Homo sapiens
ggcattgaaatttaa

SEQ ID NO: 930569 - DNA, 15 bp, Homo sapiens
gcattgaaatttaac

SEQ ID NO: 930570 - DNA, 15 bp, Homo sapiens
cattgaaatttaact

SEQ ID NO: 930571 - DNA, 15 bp, Homo sapiens
attgaaatttaacta

SEQ ID NO: 930572 - DNA, 15 bp, Homo sapiens
ttgaaatttaactag

SEQ ID NO: 930573 - DNA, 15 bp, Homo sapiens
tgaaatttaactaga

SEQ ID NO: 930574 - DNA, 15 bp, Homo sapiens
gaaatttaactagaa

SEQ ID NO: 930575 - DNA, 15 bp, Homo sapiens
aaatttaactagaaa

SEQ ID NO: 930576 - DNA, 15 bp, Homo sapiens
aatttaactagaaat

SEQ ID NO: 930577 - DNA, 15 bp, Homo sapiens
atttaactagaaatt

SEQ ID NO: 930578 - DNA, 15 bp, Homo sapiens
tttaactagaaatta

SEQ ID NO: 930579 - DNA, 15 bp, Homo sapiens
ttaactagaaattaa

SEQ ID NO: 930580 - DNA, 15 bp, Homo sapiens
taactagaaattaaa

SEQ ID NO: 930581 - DNA, 15 bp, Homo sapiens
aactagaaattaaac

SEQ ID NO: 930582 - DNA, 15 bp, Homo sapiens
actagaaattaaaca

SEQ ID NO: 930583 - DNA, 15 bp, Homo sapiens
ctagaaattaaacaa

SEQ ID NO: 930584 - DNA, 15 bp, Homo sapiens
tagaaattaaacaat

SEQ ID NO: 930585 - DNA, 15 bp, Homo sapiens
agaaattaaacaatc

SEQ ID NO: 930586 - DNA, 15 bp, Homo sapiens
gaaattaaacaatct

SEQ ID NO: 930587 - DNA, 15 bp, Homo sapiens
aaattaaacaatctg

SEQ ID NO: 930588 - DNA, 15 bp, Homo sapiens
aattaaacaatctgc

SEQ ID NO: 930589 - DNA, 15 bp, Homo sapiens
attaaacaatctgct

SEQ ID NO: 930590 - DNA, 15 bp, Homo sapiens
ttaaacaatctgcta

SEQ ID NO: 930591 - DNA, 15 bp, Homo sapiens
taaacaatctgctat

SEQ ID NO: 930592 - DNA, 15 bp, Homo sapiens
aaacaatctgctatg

SEQ ID NO: 930593 - DNA, 15 bp, Homo sapiens
aacaatctgctatga

SEQ ID NO: 930594 - DNA, 15 bp, Homo sapiens
acaatctgctatgat

SEQ ID NO: 930595 - DNA, 15 bp, Homo sapiens
caatctgctatgata

SEQ ID NO: 930596 - DNA, 15 bp, Homo sapiens
aatctgctatgatat

SEQ ID NO: 930597 - DNA, 15 bp, Homo sapiens
atctgctatgatatt

SEQ ID NO: 930598 - DNA, 15 bp, Homo sapiens
tctgctatgatattc

SEQ ID NO: 930599 - DNA, 15 bp, Homo sapiens
ctgctatgatattca

SEQ ID NO: 930600 - DNA, 15 bp, Homo sapiens
tgctatgatattcat

SEQ ID NO: 930601 - DNA, 15 bp, Homo sapiens
gctatgatattcatc

SEQ ID NO: 930602 - DNA, 15 bp, Homo sapiens
ctatgatattcatct

SEQ ID NO: 930603 - DNA, 15 bp, Homo sapiens
tatgatattcatctc

SEQ ID NO: 930604 - DNA, 15 bp, Homo sapiens
atgatattcatctca

SEQ ID NO: 930605 - DNA, 15 bp, Homo sapiens
tgatattcatctcag

SEQ ID NO: 930606 - DNA, 15 bp, Homo sapiens
gatattcatctcaga

SEQ ID NO: 930607 - DNA, 15 bp, Homo sapiens
atattcatctcagaa

SEQ ID NO: 930608 - DNA, 15 bp, Homo sapiens
tattcatctcagaaa

SEQ ID NO: 930609 - DNA, 15 bp, Homo sapiens
attcatctcagaaat

SEQ ID NO: 930610 - DNA, 15 bp, Homo sapiens
ttcatctcagaaatg

SEQ ID NO: 930611 - DNA, 15 bp, Homo sapiens
tcatctcagaaatgg

SEQ ID NO: 930612 - DNA, 15 bp, Homo sapiens
catctcagaaatggt

SEQ ID NO: 930613 - DNA, 15 bp, Homo sapiens
atctcagaaatggta

SEQ ID NO: 930614 - DNA, 15 bp, Homo sapiens
tctcagaaatggtat

SEQ ID NO: 930615 - DNA, 15 bp, Homo sapiens
ctcagaaatggtatg

SEQ ID NO: 930616 - DNA, 15 bp, Homo sapiens
tcagaaatggtatga

SEQ ID NO: 930617 - DNA, 15 bp, Homo sapiens
cagaaatggtatgac

SEQ ID NO: 930618 - DNA, 15 bp, Homo sapiens
agaaatggtatgact

SEQ ID NO: 930619 - DNA, 15 bp, Homo sapiens
gaaatggtatgacta

SEQ ID NO: 930620 - DNA, 15 bp, Homo sapiens
aaatggtatgactaa

SEQ ID NO: 930621 - DNA, 15 bp, Homo sapiens
aatggtatgactaag

SEQ ID NO: 930622 - DNA, 15 bp, Homo sapiens
atggtatgactaagg

SEQ ID NO: 930623 - DNA, 15 bp, Homo sapiens
tggtatgactaaggc

SEQ ID NO: 930624 - DNA, 15 bp, Homo sapiens
ggtatgactaaggcc

SEQ ID NO: 930625 - DNA, 15 bp, Homo sapiens
gtatgactaaggcca

SEQ ID NO: 930626 - DNA, 15 bp, Homo sapiens
tatgactaaggccac

SEQ ID NO: 930627 - DNA, 15 bp, Homo sapiens
atgactaaggccaca

SEQ ID NO: 930628 - DNA, 15 bp, Homo sapiens
tgactaaggccacac

SEQ ID NO: 930629 - DNA, 15 bp, Homo sapiens
gactaaggccacaca

SEQ ID NO: 930630 - DNA, 15 bp, Homo sapiens
actaaggccacacag

SEQ ID NO: 930631 - DNA, 15 bp, Homo sapiens
ctaaggccacacaga

SEQ ID NO: 930632 - DNA, 15 bp, Homo sapiens
taaggccacacagaa

SEQ ID NO: 930633 - DNA, 15 bp, Homo sapiens
aaggccacacagaat

SEQ ID NO: 930634 - DNA, 15 bp, Homo sapiens
aggccacacagaata

SEQ ID NO: 930635 - DNA, 15 bp, Homo sapiens
ggccacacagaatat

SEQ ID NO: 930636 - DNA, 15 bp, Homo sapiens
gccacacagaatatt

SEQ ID NO: 930637 - DNA, 15 bp, Homo sapiens
ccacacagaatattc

SEQ ID NO: 930638 - DNA, 15 bp, Homo sapiens
cacacagaatattcc

SEQ ID NO: 930639 - DNA, 15 bp, Homo sapiens
acacagaatattcca

SEQ ID NO: 930640 - DNA, 15 bp, Homo sapiens
cacagaatattccat

SEQ ID NO: 930641 - DNA, 15 bp, Homo sapiens
acagaatattccata

SEQ ID NO: 930642 - DNA, 15 bp, Homo sapiens
cagaatattccatag

SEQ ID NO: 930643 - DNA, 15 bp, Homo sapiens
agaatattccatagg

SEQ ID NO: 930644 - DNA, 15 bp, Homo sapiens
gaatattccataggt

SEQ ID NO: 930645 - DNA, 15 bp, Homo sapiens
aatattccataggta

SEQ ID NO: 930646 - DNA, 15 bp, Homo sapiens
atattccataggtac

SEQ ID NO: 930647 - DNA, 15 bp, Homo sapiens
tattccataggtact

SEQ ID NO: 930648 - DNA, 15 bp, Homo sapiens
attccataggtacta

SEQ ID NO: 930649 - DNA, 15 bp, Homo sapiens
ttccataggtactaa

SEQ ID NO: 930650 - DNA, 15 bp, Homo sapiens
tccataggtactaac

SEQ ID NO: 930651 - DNA, 15 bp, Homo sapiens
ccataggtactaact

SEQ ID NO: 930652 - DNA, 15 bp, Homo sapiens
cataggtactaactc

SEQ ID NO: 930653 - DNA, 15 bp, Homo sapiens
ataggtactaactct

SEQ ID NO: 930654 - DNA, 15 bp, Homo sapiens
taggtactaactcta

SEQ ID NO: 930655 - DNA, 15 bp, Homo sapiens
aggtactaactctag

SEQ ID NO: 930656 - DNA, 15 bp, Homo sapiens
ggtactaactctaga

SEQ ID NO: 930657 - DNA, 15 bp, Homo sapiens
gtactaactctagat

SEQ ID NO: 930658 - DNA, 15 bp, Homo sapiens
tactaactctagatg

SEQ ID NO: 930659 - DNA, 15 bp, Homo sapiens
actaactctagatgt

SEQ ID NO: 930660 - DNA, 15 bp, Homo sapiens
ctaactctagatgtg

SEQ ID NO: 930661 - DNA, 15 bp, Homo sapiens
taactctagatgtga

SEQ ID NO: 930662 - DNA, 15 bp, Homo sapiens
aactctagatgtgaa

SEQ ID NO: 930663 - DNA, 15 bp, Homo sapiens
actctagatgtgaat

SEQ ID NO: 930664 - DNA, 15 bp, Homo sapiens
ctctagatgtgaata

SEQ ID NO: 930665 - DNA, 15 bp, Homo sapiens
tctagatgtgaataa

SEQ ID NO: 930666 - DNA, 15 bp, Homo sapiens
ctagatgtgaataaa

SEQ ID NO: 930667 - DNA, 15 bp, Homo sapiens
tagatgtgaataaat

SEQ ID NO: 930668 - DNA, 15 bp, Homo sapiens
agatgtgaataaata

SEQ ID NO: 930669 - DNA, 15 bp, Homo sapiens
gatgtgaataaatat

SEQ ID NO: 930670 - DNA, 15 bp, Homo sapiens
atgtgaataaatatt

SEQ ID NO: 930671 - DNA, 15 bp, Homo sapiens
tgtgaataaatattg

SEQ ID NO: 930672 - DNA, 15 bp, Homo sapiens
gtgaataaatattgt

SEQ ID NO: 930673 - DNA, 15 bp, Homo sapiens
tgaataaatattgtt

SEQ ID NO: 930674 - DNA, 15 bp, Homo sapiens
gaataaatattgttt

SEQ ID NO: 930675 - DNA, 15 bp, Homo sapiens
aataaatattgtttt

SEQ ID NO: 930676 - DNA, 15 bp, Homo sapiens
ataaatattgttttc

SEQ ID NO: 930677 - DNA, 15 bp, Homo sapiens
taaatattgttttca

SEQ ID NO: 930678 - DNA, 15 bp, Homo sapiens
aaatattgttttcac

SEQ ID NO: 930679 - DNA, 15 bp, Homo sapiens
aatattgttttcaca

SEQ ID NO: 930680 - DNA, 15 bp, Homo sapiens
atattgttttcacaa

SEQ ID NO: 930681 - DNA, 15 bp, Homo sapiens
tattgttttcacaat

SEQ ID NO: 930682 - DNA, 15 bp, Homo sapiens
attgttttcacaatt

SEQ ID NO: 930683 - DNA, 15 bp, Homo sapiens
ttgttttcacaatta

SEQ ID NO: 930684 - DNA, 15 bp, Homo sapiens
tgttttcacaattat

SEQ ID NO: 930685 - DNA, 15 bp, Homo sapiens
gttttcacaattata

SEQ ID NO: 930686 - DNA, 15 bp, Homo sapiens
ttttcacaattataa

SEQ ID NO: 930687 - DNA, 15 bp, Homo sapiens
tttcacaattataag

SEQ ID NO: 930688 - DNA, 15 bp, Homo sapiens
ttcacaattataagc

SEQ ID NO: 930689 - DNA, 15 bp, Homo sapiens
tcacaattataagca

SEQ ID NO: 930690 - DNA, 15 bp, Homo sapiens
cacaattataagcac

SEQ ID NO: 930691 - DNA, 15 bp, Homo sapiens
acaattataagcaca

SEQ ID NO: 930692 - DNA, 15 bp, Homo sapiens
caattataagcacag

SEQ ID NO: 930693 - DNA, 15 bp, Homo sapiens
aattataagcacagg

SEQ ID NO: 930694 - DNA, 15 bp, Homo sapiens
attataagcacaggt

SEQ ID NO: 930695 - DNA, 15 bp, Homo sapiens
ttataagcacaggtg

SEQ ID NO: 930696 - DNA, 15 bp, Homo sapiens
tataagcacaggtgt

SEQ ID NO: 930697 - DNA, 15 bp, Homo sapiens
ataagcacaggtgtt

SEQ ID NO: 930698 - DNA, 15 bp, Homo sapiens
taagcacaggtgttt

SEQ ID NO: 930699 - DNA, 15 bp, Homo sapiens
aagcacaggtgttta

SEQ ID NO: 930700 - DNA, 15 bp, Homo sapiens
agcacaggtgtttat

SEQ ID NO: 930701 - DNA, 15 bp, Homo sapiens
gcacaggtgtttata

SEQ ID NO: 930702 - DNA, 15 bp, Homo sapiens
cacaggtgtttatat

SEQ ID NO: 930703 - DNA, 15 bp, Homo sapiens
acaggtgtttatatg

SEQ ID NO: 930704 - DNA, 15 bp, Homo sapiens
caggtgtttatatgc

SEQ ID NO: 930705 - DNA, 15 bp, Homo sapiens
aggtgtttatatgct

SEQ ID NO: 930706 - DNA, 15 bp, Homo sapiens
ggtgtttatatgcta

SEQ ID NO: 930707 - DNA, 15 bp, Homo sapiens
gtgtttatatgctaa

SEQ ID NO: 930708 - DNA, 15 bp, Homo sapiens
tgtttatatgctaaa

SEQ ID NO: 930709 - DNA, 15 bp, Homo sapiens
gtttatatgctaaag

SEQ ID NO: 930710 - DNA, 15 bp, Homo sapiens
tttatatgctaaagt

SEQ ID NO: 930711 - DNA, 15 bp, Homo sapiens
ttatatgctaaagta

SEQ ID NO: 930712 - DNA, 15 bp, Homo sapiens
tatatgctaaagtat

SEQ ID NO: 930713 - DNA, 15 bp, Homo sapiens
atatgctaaagtatt

SEQ ID NO: 930714 - DNA, 15 bp, Homo sapiens
tatgctaaagtattg

SEQ ID NO: 930715 - DNA, 15 bp, Homo sapiens
atgctaaagtattga

SEQ ID NO: 930716 - DNA, 15 bp, Homo sapiens
tgctaaagtattgaa

SEQ ID NO: 930717 - DNA, 15 bp, Homo sapiens
gctaaagtattgaaa

SEQ ID NO: 930718 - DNA, 15 bp, Homo sapiens
ctaaagtattgaaat

SEQ ID NO: 930719 - DNA, 15 bp, Homo sapiens
taaagtattgaaatt

SEQ ID NO: 930720 - DNA, 15 bp, Homo sapiens
aaagtattgaaatta

SEQ ID NO: 930721 - DNA, 15 bp, Homo sapiens
aagtattgaaattat

SEQ ID NO: 930722 - DNA, 15 bp, Homo sapiens
agtattgaaattatc

SEQ ID NO: 930723 - DNA, 15 bp, Homo sapiens
gtattgaaattatcg

SEQ ID NO: 930724 - DNA, 15 bp, Homo sapiens
tattgaaattatcgc

SEQ ID NO: 930725 - DNA, 15 bp, Homo sapiens
attgaaattatcgca

SEQ ID NO: 930726 - DNA, 15 bp, Homo sapiens
ttgaaattatcgcat

SEQ ID NO: 930727 - DNA, 15 bp, Homo sapiens
tgaaattatcgcata

SEQ ID NO: 930728 - DNA, 15 bp, Homo sapiens
gaaattatcgcatag

SEQ ID NO: 930729 - DNA, 15 bp, Homo sapiens
aaattatcgcatagc

SEQ ID NO: 930730 - DNA, 15 bp, Homo sapiens
aattatcgcatagcc

SEQ ID NO: 930731 - DNA, 15 bp, Homo sapiens
attatcgcatagcca

SEQ ID NO: 930732 - DNA, 15 bp, Homo sapiens
ttatcgcatagccac

SEQ ID NO: 930733 - DNA, 15 bp, Homo sapiens
tatcgcatagccaca

SEQ ID NO: 930734 - DNA, 15 bp, Homo sapiens
atcgcatagccacag

SEQ ID NO: 930735 - DNA, 15 bp, Homo sapiens
tcgcatagccacaga

SEQ ID NO: 930736 - DNA, 15 bp, Homo sapiens
cgcatagccacagaa

SEQ ID NO: 930737 - DNA, 15 bp, Homo sapiens
gcatagccacagaaa

SEQ ID NO: 930738 - DNA, 15 bp, Homo sapiens
catagccacagaaat

SEQ ID NO: 930739 - DNA, 15 bp, Homo sapiens
atagccacagaaata

SEQ ID NO: 930740 - DNA, 15 bp, Homo sapiens
tagccacagaaataa

SEQ ID NO: 930741 - DNA, 15 bp, Homo sapiens
agccacagaaataaa

SEQ ID NO: 930742 - DNA, 15 bp, Homo sapiens
gccacagaaataaat

SEQ ID NO: 930743 - DNA, 15 bp, Homo sapiens
ccacagaaataaatt

SEQ ID NO: 930744 - DNA, 15 bp, Homo sapiens
cacagaaataaattt

SEQ ID NO: 930745 - DNA, 15 bp, Homo sapiens
acagaaataaatttt

SEQ ID NO: 930746 - DNA, 15 bp, Homo sapiens
cagaaataaattttt

SEQ ID NO: 930747 - DNA, 15 bp, Homo sapiens
agaaataaattttta

SEQ ID NO: 930748 - DNA, 15 bp, Homo sapiens
gaaataaatttttat

SEQ ID NO: 930749 - DNA, 15 bp, Homo sapiens
aaataaatttttatt

SEQ ID NO: 930750 - DNA, 15 bp, Homo sapiens
aataaatttttattc

SEQ ID NO: 930751 - DNA, 15 bp, Homo sapiens
ataaatttttattct

SEQ ID NO: 930752 - DNA, 15 bp, Homo sapiens
taaatttttattctc

SEQ ID NO: 930753 - DNA, 15 bp, Homo sapiens
aaatttttattctca

SEQ ID NO: 930754 - DNA, 15 bp, Homo sapiens
aatttttattctcaa

SEQ ID NO: 930755 - DNA, 15 bp, Homo sapiens
atttttattctcaaa

SEQ ID NO: 930756 - DNA, 15 bp, Homo sapiens
tttttattctcaaag

SEQ ID NO: 930757 - DNA, 15 bp, Homo sapiens
ttttattctcaaaga

SEQ ID NO: 930758 - DNA, 15 bp, Homo sapiens
tttattctcaaagat

SEQ ID NO: 930759 - DNA, 15 bp, Homo sapiens
ttattctcaaagata

SEQ ID NO: 930760 - DNA, 15 bp, Homo sapiens
tattctcaaagataa

SEQ ID NO: 930761 - DNA, 15 bp, Homo sapiens
attctcaaagataat

SEQ ID NO: 930762 - DNA, 15 bp, Homo sapiens
ttctcaaagataatc

SEQ ID NO: 930763 - DNA, 15 bp, Homo sapiens
tctcaaagataatcc

SEQ ID NO: 930764 - DNA, 15 bp, Homo sapiens
ctcaaagataatcct

SEQ ID NO: 930765 - DNA, 15 bp, Homo sapiens
tcaaagataatccta

SEQ ID NO: 930766 - DNA, 15 bp, Homo sapiens
caaagataatcctaa

SEQ ID NO: 930767 - DNA, 15 bp, Homo sapiens
aaagataatcctaaa

SEQ ID NO: 930768 - DNA, 15 bp, Homo sapiens
aagataatcctaaaa

SEQ ID NO: 930769 - DNA, 15 bp, Homo sapiens
agataatcctaaaag

SEQ ID NO: 930770 - DNA, 15 bp, Homo sapiens
gataatcctaaaagt

SEQ ID NO: 930771 - DNA, 15 bp, Homo sapiens
ataatcctaaaagta

SEQ ID NO: 930772 - DNA, 15 bp, Homo sapiens
taatcctaaaagtag

SEQ ID NO: 930773 - DNA, 15 bp, Homo sapiens
aatcctaaaagtaga

SEQ ID NO: 930774 - DNA, 15 bp, Homo sapiens
atcctaaaagtagaa

SEQ ID NO: 930775 - DNA, 15 bp, Homo sapiens
tcctaaaagtagaat

SEQ ID NO: 930776 - DNA, 15 bp, Homo sapiens
cctaaaagtagaata

SEQ ID NO: 930777 - DNA, 15 bp, Homo sapiens
ctaaaagtagaatac

SEQ ID NO: 930778 - DNA, 15 bp, Homo sapiens
taaaagtagaatacc

SEQ ID NO: 930779 - DNA, 15 bp, Homo sapiens
aaaagtagaataccc

SEQ ID NO: 930780 - DNA, 15 bp, Homo sapiens
aaagtagaataccct

SEQ ID NO: 930781 - DNA, 15 bp, Homo sapiens
aagtagaataccctt

SEQ ID NO: 930782 - DNA, 15 bp, Homo sapiens
agtagaatacccttt

SEQ ID NO: 930783 - DNA, 15 bp, Homo sapiens
gtagaataccctttg

SEQ ID NO: 930784 - DNA, 15 bp, Homo sapiens
tagaataccctttgc

SEQ ID NO: 930785 - DNA, 15 bp, Homo sapiens
agaataccctttgct

SEQ ID NO: 930786 - DNA, 15 bp, Homo sapiens
gaataccctttgcta

SEQ ID NO: 930787 - DNA, 15 bp, Homo sapiens
aataccctttgctaa

SEQ ID NO: 930788 - DNA, 15 bp, Homo sapiens
ataccctttgctaaa

SEQ ID NO: 930789 - DNA, 15 bp, Homo sapiens
taccctttgctaaac

SEQ ID NO: 930790 - DNA, 15 bp, Homo sapiens
accctttgctaaact

SEQ ID NO: 930791 - DNA, 15 bp, Homo sapiens
ccctttgctaaactg

SEQ ID NO: 930792 - DNA, 15 bp, Homo sapiens
cctttgctaaactgt

SEQ ID NO: 930793 - DNA, 15 bp, Homo sapiens
ctttgctaaactgtt

SEQ ID NO: 930794 - DNA, 15 bp, Homo sapiens
tttgctaaactgttt

SEQ ID NO: 930795 - DNA, 15 bp, Homo sapiens
ttgctaaactgtttt

SEQ ID NO: 930796 - DNA, 15 bp, Homo sapiens
tgctaaactgttttc

SEQ ID NO: 930797 - DNA, 15 bp, Homo sapiens
gctaaactgttttct

SEQ ID NO: 930798 - DNA, 15 bp, Homo sapiens
ctaaactgttttctt

SEQ ID NO: 930799 - DNA, 15 bp, Homo sapiens
taaactgttttcttt

SEQ ID NO: 930800 - DNA, 15 bp, Homo sapiens
aaactgttttctttg

SEQ ID NO: 930801 - DNA, 15 bp, Homo sapiens
aactgttttctttgc

SEQ ID NO: 930802 - DNA, 15 bp, Homo sapiens
actgttttctttgca

SEQ ID NO: 930803 - DNA, 15 bp, Homo sapiens
ctgttttctttgcaa

SEQ ID NO: 930804 - DNA, 15 bp, Homo sapiens
tgttttctttgcaat

SEQ ID NO: 930805 - DNA, 15 bp, Homo sapiens
gttttctttgcaatt

SEQ ID NO: 930806 - DNA, 15 bp, Homo sapiens
ttttctttgcaattt

SEQ ID NO: 930807 - DNA, 15 bp, Homo sapiens
tttctttgcaatttc

SEQ ID NO: 930808 - DNA, 15 bp, Homo sapiens
ttctttgcaatttct

SEQ ID NO: 930809 - DNA, 15 bp, Homo sapiens
tctttgcaatttctc

SEQ ID NO: 930810 - DNA, 15 bp, Homo sapiens
ctttgcaatttctct

SEQ ID NO: 930811 - DNA, 15 bp, Homo sapiens
tttgcaatttctctt

SEQ ID NO: 930812 - DNA, 15 bp, Homo sapiens
ttgcaatttctcttc

SEQ ID NO: 930813 - DNA, 15 bp, Homo sapiens
tgcaatttctcttca

SEQ ID NO: 930814 - DNA, 15 bp, Homo sapiens
gcaatttctcttcac

SEQ ID NO: 930815 - DNA, 15 bp, Homo sapiens
caatttctcttcaca

SEQ ID NO: 930816 - DNA, 15 bp, Homo sapiens
aatttctcttcacaa

SEQ ID NO: 930817 - DNA, 15 bp, Homo sapiens
atttctcttcacaag

SEQ ID NO: 930818 - DNA, 15 bp, Homo sapiens
tttctcttcacaagt

SEQ ID NO: 930819 - DNA, 15 bp, Homo sapiens
ttctcttcacaagtt

SEQ ID NO: 930820 - DNA, 15 bp, Homo sapiens
tctcttcacaagttc

SEQ ID NO: 930821 - DNA, 15 bp, Homo sapiens
ctcttcacaagttct

SEQ ID NO: 930822 - DNA, 15 bp, Homo sapiens
tcttcacaagttctc

SEQ ID NO: 930823 - DNA, 15 bp, Homo sapiens
cttcacaagttctca

SEQ ID NO: 930824 - DNA, 15 bp, Homo sapiens
ttcacaagttctcat

SEQ ID NO: 930825 - DNA, 15 bp, Homo sapiens
tcacaagttctcatt

SEQ ID NO: 930826 - DNA, 15 bp, Homo sapiens
cacaagttctcattt

SEQ ID NO: 930827 - DNA, 15 bp, Homo sapiens
acaagttctcattta

SEQ ID NO: 930828 - DNA, 15 bp, Homo sapiens
caagttctcatttac

SEQ ID NO: 930829 - DNA, 15 bp, Homo sapiens
aagttctcatttact

SEQ ID NO: 930830 - DNA, 15 bp, Homo sapiens
agttctcatttactc

SEQ ID NO: 930831 - DNA, 15 bp, Homo sapiens
gttctcatttactca

SEQ ID NO: 930832 - DNA, 15 bp, Homo sapiens
ttctcatttactcag

SEQ ID NO: 930833 - DNA, 15 bp, Homo sapiens
tctcatttactcagc

SEQ ID NO: 930834 - DNA, 15 bp, Homo sapiens
ctcatttactcagct

SEQ ID NO: 930835 - DNA, 15 bp, Homo sapiens
tcatttactcagctt

SEQ ID NO: 930836 - DNA, 15 bp, Homo sapiens
catttactcagcttt

SEQ ID NO: 930837 - DNA, 15 bp, Homo sapiens
atttactcagcttta

SEQ ID NO: 930838 - DNA, 15 bp, Homo sapiens
tttactcagctttat

SEQ ID NO: 930839 - DNA, 15 bp, Homo sapiens
ttactcagctttatc

SEQ ID NO: 930840 - DNA, 15 bp, Homo sapiens
tactcagctttatcc

SEQ ID NO: 930841 - DNA, 15 bp, Homo sapiens
actcagctttatcca

SEQ ID NO: 930842 - DNA, 15 bp, Homo sapiens
ctcagctttatccaa

SEQ ID NO: 930843 - DNA, 15 bp, Homo sapiens
tcagctttatccaac

SEQ ID NO: 930844 - DNA, 15 bp, Homo sapiens
cagctttatccaaca

SEQ ID NO: 930845 - DNA, 15 bp, Homo sapiens
agctttatccaacat

SEQ ID NO: 930846 - DNA, 15 bp, Homo sapiens
gctttatccaacatc

SEQ ID NO: 930847 - DNA, 15 bp, Homo sapiens
ctttatccaacatca

SEQ ID NO: 930848 - DNA, 15 bp, Homo sapiens
tttatccaacatcaa

SEQ ID NO: 930849 - DNA, 15 bp, Homo sapiens
ttatccaacatcaaa

SEQ ID NO: 930850 - DNA, 15 bp, Homo sapiens
tatccaacatcaaaa

SEQ ID NO: 930851 - DNA, 15 bp, Homo sapiens
atccaacatcaaaaa

SEQ ID NO: 930852 - DNA, 15 bp, Homo sapiens
tccaacatcaaaaac

SEQ ID NO: 930853 - DNA, 15 bp, Homo sapiens
ccaacatcaaaaact

SEQ ID NO: 930854 - DNA, 15 bp, Homo sapiens
caacatcaaaaacta

SEQ ID NO: 930855 - DNA, 15 bp, Homo sapiens
aacatcaaaaactat

SEQ ID NO: 930856 - DNA, 15 bp, Homo sapiens
acatcaaaaactatt

SEQ ID NO: 930857 - DNA, 15 bp, Homo sapiens
catcaaaaactattc

SEQ ID NO: 930858 - DNA, 15 bp, Homo sapiens
atcaaaaactattca

SEQ ID NO: 930859 - DNA, 15 bp, Homo sapiens
tcaaaaactattcaa

SEQ ID NO: 930860 - DNA, 15 bp, Homo sapiens
caaaaactattcaag

SEQ ID NO: 930861 - DNA, 15 bp, Homo sapiens
aaaaactattcaagg

SEQ ID NO: 930862 - DNA, 15 bp, Homo sapiens
aaaactattcaagga

SEQ ID NO: 930863 - DNA, 15 bp, Homo sapiens
aaactattcaaggag

SEQ ID NO: 930864 - DNA, 15 bp, Homo sapiens
aactattcaaggagc

SEQ ID NO: 930865 - DNA, 15 bp, Homo sapiens
actattcaaggagcc

SEQ ID NO: 930866 - DNA, 15 bp, Homo sapiens
ctattcaaggagcca

SEQ ID NO: 930867 - DNA, 15 bp, Homo sapiens
tattcaaggagccat

SEQ ID NO: 930868 - DNA, 15 bp, Homo sapiens
attcaaggagccatg

SEQ ID NO: 930869 - DNA, 15 bp, Homo sapiens
ttcaaggagccatgt

SEQ ID NO: 930870 - DNA, 15 bp, Homo sapiens
tcaaggagccatgtc

SEQ ID NO: 930871 - DNA, 15 bp, Homo sapiens
caaggagccatgtca

SEQ ID NO: 930872 - DNA, 15 bp, Homo sapiens
aaggagccatgtcat

SEQ ID NO: 930873 - DNA, 15 bp, Homo sapiens
aggagccatgtcatt

SEQ ID NO: 930874 - DNA, 15 bp, Homo sapiens
ggagccatgtcatta

SEQ ID NO: 930875 - DNA, 15 bp, Homo sapiens
gagccatgtcattac

SEQ ID NO: 930876 - DNA, 15 bp, Homo sapiens
agccatgtcattact

SEQ ID NO: 930877 - DNA, 15 bp, Homo sapiens
gccatgtcattactt

SEQ ID NO: 930878 - DNA, 15 bp, Homo sapiens
ccatgtcattacttg

SEQ ID NO: 930879 - DNA, 15 bp, Homo sapiens
catgtcattacttgg

SEQ ID NO: 930880 - DNA, 15 bp, Homo sapiens
atgtcattacttggg

SEQ ID NO: 930881 - DNA, 15 bp, Homo sapiens
tgtcattacttgggc

SEQ ID NO: 930882 - DNA, 15 bp, Homo sapiens
gtcattacttgggca

SEQ ID NO: 930883 - DNA, 15 bp, Homo sapiens
tcattacttgggcaa

SEQ ID NO: 930884 - DNA, 15 bp, Homo sapiens
cattacttgggcaat

SEQ ID NO: 930885 - DNA, 15 bp, Homo sapiens
attacttgggcaata

SEQ ID NO: 930886 - DNA, 15 bp, Homo sapiens
ttacttgggcaatat

SEQ ID NO: 930887 - DNA, 15 bp, Homo sapiens
tacttgggcaatatt

SEQ ID NO: 930888 - DNA, 15 bp, Homo sapiens
acttgggcaatattt

SEQ ID NO: 930889 - DNA, 15 bp, Homo sapiens
cttgggcaatattta

SEQ ID NO: 930890 - DNA, 15 bp, Homo sapiens
ttgggcaatatttat

SEQ ID NO: 930891 - DNA, 15 bp, Homo sapiens
tgggcaatatttata

SEQ ID NO: 930892 - DNA, 15 bp, Homo sapiens
gggcaatatttatat

SEQ ID NO: 930893 - DNA, 15 bp, Homo sapiens
ggcaatatttatata

SEQ ID NO: 930894 - DNA, 15 bp, Homo sapiens
gcaatatttatataa

SEQ ID NO: 930895 - DNA, 15 bp, Homo sapiens
caatatttatataaa

SEQ ID NO: 930896 - DNA, 15 bp, Homo sapiens
aatatttatataaat

SEQ ID NO: 930897 - DNA, 15 bp, Homo sapiens
atatttatataaatt

SEQ ID NO: 930898 - DNA, 15 bp, Homo sapiens
tatttatataaattt

SEQ ID NO: 930899 - DNA, 15 bp, Homo sapiens
atttatataaatttt

SEQ ID NO: 930900 - DNA, 15 bp, Homo sapiens
tttatataaatttta

SEQ ID NO: 930901 - DNA, 15 bp, Homo sapiens
ttatataaattttat

SEQ ID NO: 930902 - DNA, 15 bp, Homo sapiens
tatataaattttata

SEQ ID NO: 930903 - DNA, 15 bp, Homo sapiens
atataaattttatag

SEQ ID NO: 930904 - DNA, 15 bp, Homo sapiens
tataaattttatagt

SEQ ID NO: 930905 - DNA, 15 bp, Homo sapiens
ataaattttatagtc

SEQ ID NO: 930906 - DNA, 15 bp, Homo sapiens
taaattttatagtct

SEQ ID NO: 930907 - DNA, 15 bp, Homo sapiens
aaattttatagtctt

SEQ ID NO: 930908 - DNA, 15 bp, Homo sapiens
aattttatagtcttt

SEQ ID NO: 930909 - DNA, 15 bp, Homo sapiens
attttatagtctttt

SEQ ID NO: 930910 - DNA, 15 bp, Homo sapiens
ttttatagtcttttt

SEQ ID NO: 930911 - DNA, 15 bp, Homo sapiens
tttatagtctttttc

SEQ ID NO: 930912 - DNA, 15 bp, Homo sapiens
ttatagtctttttct

SEQ ID NO: 930913 - DNA, 15 bp, Homo sapiens
tatagtctttttcta

SEQ ID NO: 930914 - DNA, 15 bp, Homo sapiens
atagtctttttctaa

SEQ ID NO: 930915 - DNA, 15 bp, Homo sapiens
tagtctttttctaat

SEQ ID NO: 930916 - DNA, 15 bp, Homo sapiens
agtctttttctaatg

SEQ ID NO: 930917 - DNA, 15 bp, Homo sapiens
gtctttttctaatgc

SEQ ID NO: 930918 - DNA, 15 bp, Homo sapiens
tctttttctaatgcc

SEQ ID NO: 930919 - DNA, 15 bp, Homo sapiens
ctttttctaatgcct

SEQ ID NO: 930920 - DNA, 15 bp, Homo sapiens
tttttctaatgcctc

SEQ ID NO: 930921 - DNA, 15 bp, Homo sapiens
ttttctaatgcctca

SEQ ID NO: 930922 - DNA, 15 bp, Homo sapiens
tttctaatgcctcaa

SEQ ID NO: 930923 - DNA, 15 bp, Homo sapiens
ttctaatgcctcaaa

SEQ ID NO: 930924 - DNA, 15 bp, Homo sapiens
tctaatgcctcaaaa

SEQ ID NO: 930925 - DNA, 15 bp, Homo sapiens
ctaatgcctcaaaaa

SEQ ID NO: 930926 - DNA, 15 bp, Homo sapiens
taatgcctcaaaaaa

SEQ ID NO: 930927 - DNA, 15 bp, Homo sapiens
aatgcctcaaaaaag

SEQ ID NO: 930928 - DNA, 15 bp, Homo sapiens
atgcctcaaaaaagt

SEQ ID NO: 930929 - DNA, 15 bp, Homo sapiens
tgcctcaaaaaagtt

SEQ ID NO: 930930 - DNA, 15 bp, Homo sapiens
gcctcaaaaaagttt

SEQ ID NO: 930931 - DNA, 15 bp, Homo sapiens
cctcaaaaaagtttt

SEQ ID NO: 930932 - DNA, 15 bp, Homo sapiens
ctcaaaaaagttttg

SEQ ID NO: 930933 - DNA, 15 bp, Homo sapiens
tcaaaaaagttttga

SEQ ID NO: 930934 - DNA, 15 bp, Homo sapiens
caaaaaagttttgaa

SEQ ID NO: 930935 - DNA, 15 bp, Homo sapiens
aaaaaagttttgaaa

SEQ ID NO: 930936 - DNA, 15 bp, Homo sapiens
aaaaagttttgaaaa

SEQ ID NO: 930937 - DNA, 15 bp, Homo sapiens
aaaagttttgaaaaa

SEQ ID NO: 930938 - DNA, 15 bp, Homo sapiens
aaagttttgaaaaac

SEQ ID NO: 930939 - DNA, 15 bp, Homo sapiens
aagttttgaaaaacg

SEQ ID NO: 930940 - DNA, 15 bp, Homo sapiens
agttttgaaaaacga

SEQ ID NO: 930941 - DNA, 15 bp, Homo sapiens
gttttgaaaaacgat

SEQ ID NO: 930942 - DNA, 15 bp, Homo sapiens
ttttgaaaaacgatt

SEQ ID NO: 930943 - DNA, 15 bp, Homo sapiens
tttgaaaaacgattt

SEQ ID NO: 930944 - DNA, 15 bp, Homo sapiens
ttgaaaaacgatttg

SEQ ID NO: 930945 - DNA, 15 bp, Homo sapiens
tgaaaaacgatttga

SEQ ID NO: 930946 - DNA, 15 bp, Homo sapiens
gaaaaacgatttgag

SEQ ID NO: 930947 - DNA, 15 bp, Homo sapiens
aaaaacgatttgagg

SEQ ID NO: 930948 - DNA, 15 bp, Homo sapiens
aaaacgatttgaggt

SEQ ID NO: 930949 - DNA, 15 bp, Homo sapiens
aaacgatttgaggta

SEQ ID NO: 930950 - DNA, 15 bp, Homo sapiens
aacgatttgaggtag

SEQ ID NO: 930951 - DNA, 15 bp, Homo sapiens
acgatttgaggtagc

SEQ ID NO: 930952 - DNA, 15 bp, Homo sapiens
cgatttgaggtagct

SEQ ID NO: 930953 - DNA, 15 bp, Homo sapiens
gatttgaggtagctt

SEQ ID NO: 930954 - DNA, 15 bp, Homo sapiens
atttgaggtagctta

SEQ ID NO: 930955 - DNA, 15 bp, Homo sapiens
tttgaggtagcttag

SEQ ID NO: 930956 - DNA, 15 bp, Homo sapiens
ttgaggtagcttaga

SEQ ID NO: 930957 - DNA, 15 bp, Homo sapiens
tgaggtagcttagag

SEQ ID NO: 930958 - DNA, 15 bp, Homo sapiens
gaggtagcttagaga

SEQ ID NO: 930959 - DNA, 15 bp, Homo sapiens
aggtagcttagagac

SEQ ID NO: 930960 - DNA, 15 bp, Homo sapiens
ggtagcttagagaca

SEQ ID NO: 930961 - DNA, 15 bp, Homo sapiens
gtagcttagagacac

SEQ ID NO: 930962 - DNA, 15 bp, Homo sapiens
tagcttagagacaca

SEQ ID NO: 930963 - DNA, 15 bp, Homo sapiens
agcttagagacacat

SEQ ID NO: 930964 - DNA, 15 bp, Homo sapiens
gcttagagacacata

SEQ ID NO: 930965 - DNA, 15 bp, Homo sapiens
cttagagacacataa

SEQ ID NO: 930966 - DNA, 15 bp, Homo sapiens
ttagagacacataaa

SEQ ID NO: 930967 - DNA, 15 bp, Homo sapiens
tagagacacataaaa

SEQ ID NO: 930968 - DNA, 15 bp, Homo sapiens
agagacacataaaat

SEQ ID NO: 930969 - DNA, 15 bp, Homo sapiens
gagacacataaaatg

SEQ ID NO: 930970 - DNA, 15 bp, Homo sapiens
agacacataaaatgc

SEQ ID NO: 930971 - DNA, 15 bp, Homo sapiens
gacacataaaatgca

SEQ ID NO: 930972 - DNA, 15 bp, Homo sapiens
acacataaaatgcaa

SEQ ID NO: 930973 - DNA, 15 bp, Homo sapiens
cacataaaatgcaag

SEQ ID NO: 930974 - DNA, 15 bp, Homo sapiens
acataaaatgcaaga

SEQ ID NO: 930975 - DNA, 15 bp, Homo sapiens
cataaaatgcaagat

SEQ ID NO: 930976 - DNA, 15 bp, Homo sapiens
ataaaatgcaagata

SEQ ID NO: 930977 - DNA, 15 bp, Homo sapiens
taaaatgcaagataa

SEQ ID NO: 930978 - DNA, 15 bp, Homo sapiens
aaaatgcaagataaa

SEQ ID NO: 930979 - DNA, 15 bp, Homo sapiens
aaatgcaagataaat

SEQ ID NO: 930980 - DNA, 15 bp, Homo sapiens
aatgcaagataaata

SEQ ID NO: 930981 - DNA, 15 bp, Homo sapiens
atgcaagataaatat

SEQ ID NO: 930982 - DNA, 15 bp, Homo sapiens
tgcaagataaatatg

SEQ ID NO: 930983 - DNA, 15 bp, Homo sapiens
gcaagataaatatga

SEQ ID NO: 930984 - DNA, 15 bp, Homo sapiens
caagataaatatgat

SEQ ID NO: 930985 - DNA, 15 bp, Homo sapiens
aagataaatatgatg

SEQ ID NO: 930986 - DNA, 15 bp, Homo sapiens
agataaatatgatgt

SEQ ID NO: 930987 - DNA, 15 bp, Homo sapiens
gataaatatgatgta

SEQ ID NO: 930988 - DNA, 15 bp, Homo sapiens
ataaatatgatgtaa

SEQ ID NO: 930989 - DNA, 15 bp, Homo sapiens
taaatatgatgtaaa

SEQ ID NO: 930990 - DNA, 15 bp, Homo sapiens
aaatatgatgtaaac

SEQ ID NO: 930991 - DNA, 15 bp, Homo sapiens
aatatgatgtaaaca

SEQ ID NO: 930992 - DNA, 15 bp, Homo sapiens
atatgatgtaaacaa

SEQ ID NO: 930993 - DNA, 15 bp, Homo sapiens
tatgatgtaaacaat

SEQ ID NO: 930994 - DNA, 15 bp, Homo sapiens
atgatgtaaacaatg

SEQ ID NO: 930995 - DNA, 15 bp, Homo sapiens
tgatgtaaacaatga

SEQ ID NO: 930996 - DNA, 15 bp, Homo sapiens
gatgtaaacaatgat

SEQ ID NO: 930997 - DNA, 15 bp, Homo sapiens
atgtaaacaatgata

SEQ ID NO: 930998 - DNA, 15 bp, Homo sapiens
tgtaaacaatgatac

SEQ ID NO: 930999 - DNA, 15 bp, Homo sapiens
gtaaacaatgataca

SEQ ID NO: 931000 - DNA, 15 bp, Homo sapiens
taaacaatgatacag

SEQ ID NO: 931001 - DNA, 15 bp, Homo sapiens
aaacaatgatacaga

SEQ ID NO: 931002 - DNA, 15 bp, Homo sapiens
aacaatgatacagat

SEQ ID NO: 931003 - DNA, 15 bp, Homo sapiens
acaatgatacagatc

SEQ ID NO: 931004 - DNA, 15 bp, Homo sapiens
caatgatacagatca

SEQ ID NO: 931005 - DNA, 15 bp, Homo sapiens
aatgatacagatcat

SEQ ID NO: 931006 - DNA, 15 bp, Homo sapiens
atgatacagatcatt

SEQ ID NO: 931007 - DNA, 15 bp, Homo sapiens
tgatacagatcattt

SEQ ID NO: 931008 - DNA, 15 bp, Homo sapiens
gatacagatcatttt

SEQ ID NO: 931009 - DNA, 15 bp, Homo sapiens
atacagatcattttg

SEQ ID NO: 931010 - DNA, 15 bp, Homo sapiens
tacagatcattttgg

SEQ ID NO: 931011 - DNA, 15 bp, Homo sapiens
acagatcattttggg

SEQ ID NO: 931012 - DNA, 15 bp, Homo sapiens
cagatcattttgggt

SEQ ID NO: 931013 - DNA, 15 bp, Homo sapiens
agatcattttgggtt

SEQ ID NO: 931014 - DNA, 15 bp, Homo sapiens
gatcattttgggtta

SEQ ID NO: 931015 - DNA, 15 bp, Homo sapiens
atcattttgggttat

SEQ ID NO: 931016 - DNA, 15 bp, Homo sapiens
tcattttgggttata

SEQ ID NO: 931017 - DNA, 15 bp, Homo sapiens
cattttgggttataa

SEQ ID NO: 931018 - DNA, 15 bp, Homo sapiens
attttgggttataaa

SEQ ID NO: 931019 - DNA, 15 bp, Homo sapiens
ttttgggttataaaa

SEQ ID NO: 931020 - DNA, 15 bp, Homo sapiens
tttgggttataaaat

SEQ ID NO: 931021 - DNA, 15 bp, Homo sapiens
ttgggttataaaata

SEQ ID NO: 931022 - DNA, 15 bp, Homo sapiens
tgggttataaaatat

SEQ ID NO: 931023 - DNA, 15 bp, Homo sapiens
gggttataaaatatg

SEQ ID NO: 931024 - DNA, 15 bp, Homo sapiens
ggttataaaatatga

SEQ ID NO: 931025 - DNA, 15 bp, Homo sapiens
gttataaaatatgac

SEQ ID NO: 931026 - DNA, 15 bp, Homo sapiens
ttataaaatatgacc

SEQ ID NO: 931027 - DNA, 15 bp, Homo sapiens
tataaaatatgacca

SEQ ID NO: 931028 - DNA, 15 bp, Homo sapiens
ataaaatatgaccaa

SEQ ID NO: 931029 - DNA, 15 bp, Homo sapiens
taaaatatgaccaag

SEQ ID NO: 931030 - DNA, 15 bp, Homo sapiens
aaaatatgaccaagg

SEQ ID NO: 931031 - DNA, 15 bp, Homo sapiens
aaatatgaccaagga

SEQ ID NO: 931032 - DNA, 15 bp, Homo sapiens
aatatgaccaaggat

SEQ ID NO: 931033 - DNA, 15 bp, Homo sapiens
atatgaccaaggatg

SEQ ID NO: 931034 - DNA, 15 bp, Homo sapiens
tatgaccaaggatga

SEQ ID NO: 931035 - DNA, 15 bp, Homo sapiens
atgaccaaggatgaa

SEQ ID NO: 931036 - DNA, 15 bp, Homo sapiens
tgaccaaggatgaag

SEQ ID NO: 931037 - DNA, 15 bp, Homo sapiens
gaccaaggatgaaga

SEQ ID NO: 931038 - DNA, 15 bp, Homo sapiens
accaaggatgaagac

SEQ ID NO: 931039 - DNA, 15 bp, Homo sapiens
ccaaggatgaagact

SEQ ID NO: 931040 - DNA, 15 bp, Homo sapiens
caaggatgaagacta

SEQ ID NO: 931041 - DNA, 15 bp, Homo sapiens
aaggatgaagactat

SEQ ID NO: 931042 - DNA, 15 bp, Homo sapiens
aggatgaagactata

SEQ ID NO: 931043 - DNA, 15 bp, Homo sapiens
ggatgaagactatat

SEQ ID NO: 931044 - DNA, 15 bp, Homo sapiens
gatgaagactatata

SEQ ID NO: 931045 - DNA, 15 bp, Homo sapiens
atgaagactatatac

SEQ ID NO: 931046 - DNA, 15 bp, Homo sapiens
tgaagactatataca

SEQ ID NO: 931047 - DNA, 15 bp, Homo sapiens
gaagactatatacaa

SEQ ID NO: 931048 - DNA, 15 bp, Homo sapiens
aagactatatacaaa

SEQ ID NO: 931049 - DNA, 15 bp, Homo sapiens
agactatatacaaaa

SEQ ID NO: 931050 - DNA, 15 bp, Homo sapiens
gactatatacaaaat

SEQ ID NO: 931051 - DNA, 15 bp, Homo sapiens
actatatacaaaatt

SEQ ID NO: 931052 - DNA, 15 bp, Homo sapiens
ctatatacaaaattc

SEQ ID NO: 931053 - DNA, 15 bp, Homo sapiens
tatatacaaaattca

SEQ ID NO: 931054 - DNA, 15 bp, Homo sapiens
atatacaaaattcac

SEQ ID NO: 931055 - DNA, 15 bp, Homo sapiens
tatacaaaattcaca

SEQ ID NO: 931056 - DNA, 15 bp, Homo sapiens
atacaaaattcacac

SEQ ID NO: 931057 - DNA, 15 bp, Homo sapiens
tacaaaattcacacc

SEQ ID NO: 931058 - DNA, 15 bp, Homo sapiens
acaaaattcacacca

SEQ ID NO: 931059 - DNA, 15 bp, Homo sapiens
caaaattcacaccat

SEQ ID NO: 931060 - DNA, 15 bp, Homo sapiens
aaaattcacaccatt

SEQ ID NO: 931061 - DNA, 15 bp, Homo sapiens
aaattcacaccatta

SEQ ID NO: 931062 - DNA, 15 bp, Homo sapiens
aattcacaccattat

SEQ ID NO: 931063 - DNA, 15 bp, Homo sapiens
attcacaccattatg

SEQ ID NO: 931064 - DNA, 15 bp, Homo sapiens
ttcacaccattatgg

SEQ ID NO: 931065 - DNA, 15 bp, Homo sapiens
tcacaccattatggt

SEQ ID NO: 931066 - DNA, 15 bp, Homo sapiens
cacaccattatggtc

SEQ ID NO: 931067 - DNA, 15 bp, Homo sapiens
acaccattatggtct

SEQ ID NO: 931068 - DNA, 15 bp, Homo sapiens
caccattatggtctt

SEQ ID NO: 931069 - DNA, 15 bp, Homo sapiens
accattatggtctta

SEQ ID NO: 931070 - DNA, 15 bp, Homo sapiens
ccattatggtcttat

SEQ ID NO: 931071 - DNA, 15 bp, Homo sapiens
cattatggtcttata

SEQ ID NO: 931072 - DNA, 15 bp, Homo sapiens
attatggtcttatac

SEQ ID NO: 931073 - DNA, 15 bp, Homo sapiens
ttatggtcttatacc

SEQ ID NO: 931074 - DNA, 15 bp, Homo sapiens
tatggtcttatacct

SEQ ID NO: 931075 - DNA, 15 bp, Homo sapiens
atggtcttatacctt

SEQ ID NO: 931076 - DNA, 15 bp, Homo sapiens
tggtcttataccttt

SEQ ID NO: 931077 - DNA, 15 bp, Homo sapiens
ggtcttatacctttt

SEQ ID NO: 931078 - DNA, 15 bp, Homo sapiens
gtcttataccttttc

SEQ ID NO: 931079 - DNA, 15 bp, Homo sapiens
tcttataccttttct

SEQ ID NO: 931080 - DNA, 15 bp, Homo sapiens
cttataccttttctg

SEQ ID NO: 931081 - DNA, 15 bp, Homo sapiens
ttataccttttctgt

SEQ ID NO: 931082 - DNA, 15 bp, Homo sapiens
tataccttttctgtg

SEQ ID NO: 931083 - DNA, 15 bp, Homo sapiens
ataccttttctgtgg

SEQ ID NO: 931084 - DNA, 15 bp, Homo sapiens
taccttttctgtggt

SEQ ID NO: 931085 - DNA, 15 bp, Homo sapiens
accttttctgtggta

SEQ ID NO: 931086 - DNA, 15 bp, Homo sapiens
ccttttctgtggtat

SEQ ID NO: 931087 - DNA, 15 bp, Homo sapiens
cttttctgtggtata

SEQ ID NO: 931088 - DNA, 15 bp, Homo sapiens
ttttctgtggtataa

SEQ ID NO: 931089 - DNA, 15 bp, Homo sapiens
tttctgtggtataaa

SEQ ID NO: 931090 - DNA, 15 bp, Homo sapiens
ttctgtggtataaaa

SEQ ID NO: 931091 - DNA, 15 bp, Homo sapiens
tctgtggtataaaaa

SEQ ID NO: 931092 - DNA, 15 bp, Homo sapiens
ctgtggtataaaaag

SEQ ID NO: 931093 - DNA, 15 bp, Homo sapiens
tgtggtataaaaagg

SEQ ID NO: 931094 - DNA, 15 bp, Homo sapiens
gtggtataaaaagga

SEQ ID NO: 931095 - DNA, 15 bp, Homo sapiens
tggtataaaaaggac

SEQ ID NO: 931096 - DNA, 15 bp, Homo sapiens
ggtataaaaaggaca

SEQ ID NO: 931097 - DNA, 15 bp, Homo sapiens
gtataaaaaggacaa

SEQ ID NO: 931098 - DNA, 15 bp, Homo sapiens
tataaaaaggacaag

SEQ ID NO: 931099 - DNA, 15 bp, Homo sapiens
ataaaaaggacaaga

SEQ ID NO: 931100 - DNA, 15 bp, Homo sapiens
taaaaaggacaagag

SEQ ID NO: 931101 - DNA, 15 bp, Homo sapiens
aaaaaggacaagagc

SEQ ID NO: 931102 - DNA, 15 bp, Homo sapiens
aaaaggacaagagct

SEQ ID NO: 931103 - DNA, 15 bp, Homo sapiens
aaaggacaagagctt

SEQ ID NO: 931104 - DNA, 15 bp, Homo sapiens
aaggacaagagcttg

SEQ ID NO: 931105 - DNA, 15 bp, Homo sapiens
aggacaagagcttgt

SEQ ID NO: 931106 - DNA, 15 bp, Homo sapiens
ggacaagagcttgta

SEQ ID NO: 931107 - DNA, 15 bp, Homo sapiens
gacaagagcttgtat

SEQ ID NO: 931108 - DNA, 15 bp, Homo sapiens
acaagagcttgtatc

SEQ ID NO: 931109 - DNA, 15 bp, Homo sapiens
caagagcttgtatca

SEQ ID NO: 931110 - DNA, 15 bp, Homo sapiens
aagagcttgtatcat

SEQ ID NO: 931111 - DNA, 15 bp, Homo sapiens
agagcttgtatcatc

SEQ ID NO: 931112 - DNA, 15 bp, Homo sapiens
gagcttgtatcatct

SEQ ID NO: 931113 - DNA, 15 bp, Homo sapiens
agcttgtatcatcta

SEQ ID NO: 931114 - DNA, 15 bp, Homo sapiens
gcttgtatcatctat

SEQ ID NO: 931115 - DNA, 15 bp, Homo sapiens
cttgtatcatctatt

SEQ ID NO: 931116 - DNA, 15 bp, Homo sapiens
ttgtatcatctatta

SEQ ID NO: 931117 - DNA, 15 bp, Homo sapiens
tgtatcatctattac

SEQ ID NO: 931118 - DNA, 15 bp, Homo sapiens
gtatcatctattaca

SEQ ID NO: 931119 - DNA, 15 bp, Homo sapiens
tatcatctattacat

SEQ ID NO: 931120 - DNA, 15 bp, Homo sapiens
atcatctattacatg

SEQ ID NO: 931121 - DNA, 15 bp, Homo sapiens
tcatctattacatgg

SEQ ID NO: 931122 - DNA, 15 bp, Homo sapiens
catctattacatggt

SEQ ID NO: 931123 - DNA, 15 bp, Homo sapiens
atctattacatggtg

SEQ ID NO: 931124 - DNA, 15 bp, Homo sapiens
tctattacatggtgc

SEQ ID NO: 931125 - DNA, 15 bp, Homo sapiens
ctattacatggtgca

SEQ ID NO: 931126 - DNA, 15 bp, Homo sapiens
tattacatggtgcaa

SEQ ID NO: 931127 - DNA, 15 bp, Homo sapiens
attacatggtgcaaa

SEQ ID NO: 931128 - DNA, 15 bp, Homo sapiens
ttacatggtgcaaag

SEQ ID NO: 931129 - DNA, 15 bp, Homo sapiens
tacatggtgcaaaga

SEQ ID NO: 931130 - DNA, 15 bp, Homo sapiens
acatggtgcaaagag

SEQ ID NO: 931131 - DNA, 15 bp, Homo sapiens
catggtgcaaagagc

SEQ ID NO: 931132 - DNA, 15 bp, Homo sapiens
atggtgcaaagagcc

SEQ ID NO: 931133 - DNA, 15 bp, Homo sapiens
tggtgcaaagagccc

SEQ ID NO: 931134 - DNA, 15 bp, Homo sapiens
ggtgcaaagagccca

SEQ ID NO: 931135 - DNA, 15 bp, Homo sapiens
gtgcaaagagcccag

SEQ ID NO: 931136 - DNA, 15 bp, Homo sapiens
tgcaaagagcccagg

SEQ ID NO: 931137 - DNA, 15 bp, Homo sapiens
gcaaagagcccaggc

SEQ ID NO: 931138 - DNA, 15 bp, Homo sapiens
caaagagcccaggct

SEQ ID NO: 931139 - DNA, 15 bp, Homo sapiens
aaagagcccaggctt

SEQ ID NO: 931140 - DNA, 15 bp, Homo sapiens
aagagcccaggctta

SEQ ID NO: 931141 - DNA, 15 bp, Homo sapiens
agagcccaggcttag

SEQ ID NO: 931142 - DNA, 15 bp, Homo sapiens
gagcccaggcttaga

SEQ ID NO: 931143 - DNA, 15 bp, Homo sapiens
agcccaggcttagaa

SEQ ID NO: 931144 - DNA, 15 bp, Homo sapiens
gcccaggcttagaaa

SEQ ID NO: 931145 - DNA, 15 bp, Homo sapiens
cccaggcttagaaaa

SEQ ID NO: 931146 - DNA, 15 bp, Homo sapiens
ccaggcttagaaaac

SEQ ID NO: 931147 - DNA, 15 bp, Homo sapiens
caggcttagaaaaca

SEQ ID NO: 931148 - DNA, 15 bp, Homo sapiens
aggcttagaaaacat

SEQ ID NO: 931149 - DNA, 15 bp, Homo sapiens
ggcttagaaaacatt

SEQ ID NO: 931150 - DNA, 15 bp, Homo sapiens
gcttagaaaacattt

SEQ ID NO: 931151 - DNA, 15 bp, Homo sapiens
cttagaaaacatttg

SEQ ID NO: 931152 - DNA, 15 bp, Homo sapiens
ttagaaaacatttgc

SEQ ID NO: 931153 - DNA, 15 bp, Homo sapiens
tagaaaacatttgct

SEQ ID NO: 931154 - DNA, 15 bp, Homo sapiens
agaaaacatttgctt

SEQ ID NO: 931155 - DNA, 15 bp, Homo sapiens
gaaaacatttgcttg

SEQ ID NO: 931156 - DNA, 15 bp, Homo sapiens
aaaacatttgcttgt

SEQ ID NO: 931157 - DNA, 15 bp, Homo sapiens
aaacatttgcttgtc

SEQ ID NO: 931158 - DNA, 15 bp, Homo sapiens
aacatttgcttgtca

SEQ ID NO: 931159 - DNA, 15 bp, Homo sapiens
acatttgcttgtcaa

SEQ ID NO: 931160 - DNA, 15 bp, Homo sapiens
catttgcttgtcaag

SEQ ID NO: 931161 - DNA, 15 bp, Homo sapiens
atttgcttgtcaagg

SEQ ID NO: 931162 - DNA, 15 bp, Homo sapiens
tttgcttgtcaagga

SEQ ID NO: 931163 - DNA, 15 bp, Homo sapiens
ttgcttgtcaaggat

SEQ ID NO: 931164 - DNA, 15 bp, Homo sapiens
tgcttgtcaaggata

SEQ ID NO: 931165 - DNA, 15 bp, Homo sapiens
gcttgtcaaggatat

SEQ ID NO: 931166 - DNA, 15 bp, Homo sapiens
cttgtcaaggatatc

SEQ ID NO: 931167 - DNA, 15 bp, Homo sapiens
ttgtcaaggatatca

SEQ ID NO: 931168 - DNA, 15 bp, Homo sapiens
tgtcaaggatatcat

SEQ ID NO: 931169 - DNA, 15 bp, Homo sapiens
gtcaaggatatcatt

SEQ ID NO: 931170 - DNA, 15 bp, Homo sapiens
tcaaggatatcattt

SEQ ID NO: 931171 - DNA, 15 bp, Homo sapiens
caaggatatcattta

SEQ ID NO: 931172 - DNA, 15 bp, Homo sapiens
aaggatatcatttaa

SEQ ID NO: 931173 - DNA, 15 bp, Homo sapiens
aggatatcatttaat

SEQ ID NO: 931174 - DNA, 15 bp, Homo sapiens
ggatatcatttaatt

SEQ ID NO: 931175 - DNA, 15 bp, Homo sapiens
gatatcatttaattt

SEQ ID NO: 931176 - DNA, 15 bp, Homo sapiens
atatcatttaatttc

SEQ ID NO: 931177 - DNA, 15 bp, Homo sapiens
tatcatttaatttcc

SEQ ID NO: 931178 - DNA, 15 bp, Homo sapiens
atcatttaatttcca

SEQ ID NO: 931179 - DNA, 15 bp, Homo sapiens
tcatttaatttccac

SEQ ID NO: 931180 - DNA, 15 bp, Homo sapiens
catttaatttccact

SEQ ID NO: 931181 - DNA, 15 bp, Homo sapiens
atttaatttccactt

SEQ ID NO: 931182 - DNA, 15 bp, Homo sapiens
tttaatttccacttg

SEQ ID NO: 931183 - DNA, 15 bp, Homo sapiens
ttaatttccacttgt

SEQ ID NO: 931184 - DNA, 15 bp, Homo sapiens
taatttccacttgtt

SEQ ID NO: 931185 - DNA, 15 bp, Homo sapiens
aatttccacttgttc

SEQ ID NO: 931186 - DNA, 15 bp, Homo sapiens
atttccacttgttca

SEQ ID NO: 931187 - DNA, 15 bp, Homo sapiens
tttccacttgttcaa

SEQ ID NO: 931188 - DNA, 15 bp, Homo sapiens
ttccacttgttcaaa

SEQ ID NO: 931189 - DNA, 15 bp, Homo sapiens
tccacttgttcaaat

SEQ ID NO: 931190 - DNA, 15 bp, Homo sapiens
ccacttgttcaaata

SEQ ID NO: 931191 - DNA, 15 bp, Homo sapiens
cacttgttcaaatat

SEQ ID NO: 931192 - DNA, 15 bp, Homo sapiens
acttgttcaaatata

SEQ ID NO: 931193 - DNA, 15 bp, Homo sapiens
cttgttcaaatataa

SEQ ID NO: 931194 - DNA, 15 bp, Homo sapiens
ttgttcaaatataaa

SEQ ID NO: 931195 - DNA, 15 bp, Homo sapiens
tgttcaaatataaat

SEQ ID NO: 931196 - DNA, 15 bp, Homo sapiens
gttcaaatataaatt

SEQ ID NO: 931197 - DNA, 15 bp, Homo sapiens
ttcaaatataaattg

SEQ ID NO: 931198 - DNA, 15 bp, Homo sapiens
tcaaatataaattgt

SEQ ID NO: 931199 - DNA, 15 bp, Homo sapiens
caaatataaattgtg

SEQ ID NO: 931200 - DNA, 15 bp, Homo sapiens
aaatataaattgtgg

SEQ ID NO: 931201 - DNA, 15 bp, Homo sapiens
aatataaattgtgga

SEQ ID NO: 931202 - DNA, 15 bp, Homo sapiens
atataaattgtggat

SEQ ID NO: 931203 - DNA, 15 bp, Homo sapiens
tataaattgtggata

SEQ ID NO: 931204 - DNA, 15 bp, Homo sapiens
ataaattgtggataa

SEQ ID NO: 931205 - DNA, 15 bp, Homo sapiens
taaattgtggataat

SEQ ID NO: 931206 - DNA, 15 bp, Homo sapiens
aaattgtggataata

SEQ ID NO: 931207 - DNA, 15 bp, Homo sapiens
aattgtggataataa

SEQ ID NO: 931208 - DNA, 15 bp, Homo sapiens
attgtggataataat

SEQ ID NO: 931209 - DNA, 15 bp, Homo sapiens
ttgtggataataata

SEQ ID NO: 931210 - DNA, 15 bp, Homo sapiens
tgtggataataatat

SEQ ID NO: 931211 - DNA, 15 bp, Homo sapiens
gtggataataatatc

SEQ ID NO: 931212 - DNA, 15 bp, Homo sapiens
tggataataatatct

SEQ ID NO: 931213 - DNA, 15 bp, Homo sapiens
ggataataatatctc

SEQ ID NO: 931214 - DNA, 15 bp, Homo sapiens
gataataatatctca

SEQ ID NO: 931215 - DNA, 15 bp, Homo sapiens
ataataatatctcac

SEQ ID NO: 931216 - DNA, 15 bp, Homo sapiens
taataatatctcaca

SEQ ID NO: 931217 - DNA, 15 bp, Homo sapiens
aataatatctcacag

SEQ ID NO: 931218 - DNA, 15 bp, Homo sapiens
ataatatctcacaga

SEQ ID NO: 931219 - DNA, 15 bp, Homo sapiens
taatatctcacagag

SEQ ID NO: 931220 - DNA, 15 bp, Homo sapiens
aatatctcacagagg

SEQ ID NO: 931221 - DNA, 15 bp, Homo sapiens
atatctcacagagga

SEQ ID NO: 931222 - DNA, 15 bp, Homo sapiens
tatctcacagaggaa

SEQ ID NO: 931223 - DNA, 15 bp, Homo sapiens
atctcacagaggaag

SEQ ID NO: 931224 - DNA, 15 bp, Homo sapiens
tctcacagaggaagt

SEQ ID NO: 931225 - DNA, 15 bp, Homo sapiens
ctcacagaggaagtg

SEQ ID NO: 931226 - DNA, 15 bp, Homo sapiens
tcacagaggaagtgt

SEQ ID NO: 931227 - DNA, 15 bp, Homo sapiens
cacagaggaagtgtg

SEQ ID NO: 931228 - DNA, 15 bp, Homo sapiens
acagaggaagtgtga

SEQ ID NO: 931229 - DNA, 15 bp, Homo sapiens
cagaggaagtgtgag

SEQ ID NO: 931230 - DNA, 15 bp, Homo sapiens
agaggaagtgtgagt

SEQ ID NO: 931231 - DNA, 15 bp, Homo sapiens
gaggaagtgtgagta

SEQ ID NO: 931232 - DNA, 15 bp, Homo sapiens
aggaagtgtgagtat

SEQ ID NO: 931233 - DNA, 15 bp, Homo sapiens
ggaagtgtgagtatg

SEQ ID NO: 931234 - DNA, 15 bp, Homo sapiens
gaagtgtgagtatga

SEQ ID NO: 931235 - DNA, 15 bp, Homo sapiens
aagtgtgagtatgaa

SEQ ID NO: 931236 - DNA, 15 bp, Homo sapiens
agtgtgagtatgaaa

SEQ ID NO: 931237 - DNA, 15 bp, Homo sapiens
gtgtgagtatgaaat

SEQ ID NO: 931238 - DNA, 15 bp, Homo sapiens
tgtgagtatgaaata

SEQ ID NO: 931239 - DNA, 15 bp, Homo sapiens
gtgagtatgaaataa

SEQ ID NO: 931240 - DNA, 15 bp, Homo sapiens
tgagtatgaaataac

SEQ ID NO: 931241 - DNA, 15 bp, Homo sapiens
gagtatgaaataaca

SEQ ID NO: 931242 - DNA, 15 bp, Homo sapiens
agtatgaaataacaa

SEQ ID NO: 931243 - DNA, 15 bp, Homo sapiens
gtatgaaataacaaa

SEQ ID NO: 931244 - DNA, 15 bp, Homo sapiens
tatgaaataacaaat

SEQ ID NO: 931245 - DNA, 15 bp, Homo sapiens
atgaaataacaaata

SEQ ID NO: 931246 - DNA, 15 bp, Homo sapiens
tgaaataacaaatat

SEQ ID NO: 931247 - DNA, 15 bp, Homo sapiens
gaaataacaaatatg

SEQ ID NO: 931248 - DNA, 15 bp, Homo sapiens
aaataacaaatatga

SEQ ID NO: 931249 - DNA, 15 bp, Homo sapiens
aataacaaatatgaa

SEQ ID NO: 931250 - DNA, 15 bp, Homo sapiens
ataacaaatatgaaa

SEQ ID NO: 931251 - DNA, 15 bp, Homo sapiens
taacaaatatgaaaa

SEQ ID NO: 931252 - DNA, 15 bp, Homo sapiens
aacaaatatgaaaaa

SEQ ID NO: 931253 - DNA, 15 bp, Homo sapiens
acaaatatgaaaaaa

SEQ ID NO: 931254 - DNA, 15 bp, Homo sapiens
caaatatgaaaaaat

SEQ ID NO: 931255 - DNA, 15 bp, Homo sapiens
aaatatgaaaaaatt

SEQ ID NO: 931256 - DNA, 15 bp, Homo sapiens
aatatgaaaaaatta

SEQ ID NO: 931257 - DNA, 15 bp, Homo sapiens
atatgaaaaaattac

SEQ ID NO: 931258 - DNA, 15 bp, Homo sapiens
tatgaaaaaattaca

SEQ ID NO: 931259 - DNA, 15 bp, Homo sapiens
atgaaaaaattacac

SEQ ID NO: 931260 - DNA, 15 bp, Homo sapiens
tgaaaaaattacact

SEQ ID NO: 931261 - DNA, 15 bp, Homo sapiens
gaaaaaattacacta

SEQ ID NO: 931262 - DNA, 15 bp, Homo sapiens
aaaaaattacactat

SEQ ID NO: 931263 - DNA, 15 bp, Homo sapiens
aaaaattacactatt

SEQ ID NO: 931264 - DNA, 15 bp, Homo sapiens
aaaattacactattt

SEQ ID NO: 931265 - DNA, 15 bp, Homo sapiens
aaattacactatttc

SEQ ID NO: 931266 - DNA, 15 bp, Homo sapiens
aattacactatttca

SEQ ID NO: 931267 - DNA, 15 bp, Homo sapiens
attacactatttcac

SEQ ID NO: 931268 - DNA, 15 bp, Homo sapiens
ttacactatttcact

SEQ ID NO: 931269 - DNA, 15 bp, Homo sapiens
tacactatttcacta

SEQ ID NO: 931270 - DNA, 15 bp, Homo sapiens
acactatttcactac

SEQ ID NO: 931271 - DNA, 15 bp, Homo sapiens
cactatttcactact

SEQ ID NO: 931272 - DNA, 15 bp, Homo sapiens
actatttcactacta

SEQ ID NO: 931273 - DNA, 15 bp, Homo sapiens
ctatttcactactaa

SEQ ID NO: 931274 - DNA, 15 bp, Homo sapiens
tatttcactactaat

SEQ ID NO: 931275 - DNA, 15 bp, Homo sapiens
atttcactactaatt

SEQ ID NO: 931276 - DNA, 15 bp, Homo sapiens
tttcactactaattt

SEQ ID NO: 931277 - DNA, 15 bp, Homo sapiens
ttcactactaattta

SEQ ID NO: 931278 - DNA, 15 bp, Homo sapiens
tcactactaatttaa

SEQ ID NO: 931279 - DNA, 15 bp, Homo sapiens
cactactaatttaat

SEQ ID NO: 931280 - DNA, 15 bp, Homo sapiens
actactaatttaatg

SEQ ID NO: 931281 - DNA, 15 bp, Homo sapiens
ctactaatttaatga

SEQ ID NO: 931282 - DNA, 15 bp, Homo sapiens
tactaatttaatgat

SEQ ID NO: 931283 - DNA, 15 bp, Homo sapiens
actaatttaatgatt

SEQ ID NO: 931284 - DNA, 15 bp, Homo sapiens
ctaatttaatgattt

SEQ ID NO: 931285 - DNA, 15 bp, Homo sapiens
taatttaatgatttt

SEQ ID NO: 931286 - DNA, 15 bp, Homo sapiens
aatttaatgattttt

SEQ ID NO: 931287 - DNA, 15 bp, Homo sapiens
atttaatgattttta

SEQ ID NO: 931288 - DNA, 15 bp, Homo sapiens
tttaatgatttttaa

SEQ ID NO: 931289 - DNA, 15 bp, Homo sapiens
ttaatgatttttaat

SEQ ID NO: 931290 - DNA, 15 bp, Homo sapiens
taatgatttttaatt

SEQ ID NO: 931291 - DNA, 15 bp, Homo sapiens
aatgatttttaatta

SEQ ID NO: 931292 - DNA, 15 bp, Homo sapiens
atgatttttaattat

SEQ ID NO: 931293 - DNA, 15 bp, Homo sapiens
tgatttttaattata

SEQ ID NO: 931294 - DNA, 15 bp, Homo sapiens
gatttttaattataa

SEQ ID NO: 931295 - DNA, 15 bp, Homo sapiens
atttttaattataat

SEQ ID NO: 931296 - DNA, 15 bp, Homo sapiens
tttttaattataata

SEQ ID NO: 931297 - DNA, 15 bp, Homo sapiens
ttttaattataataa

SEQ ID NO: 931298 - DNA, 15 bp, Homo sapiens
tttaattataataat

SEQ ID NO: 931299 - DNA, 15 bp, Homo sapiens
ttaattataataatt

SEQ ID NO: 931300 - DNA, 15 bp, Homo sapiens
taattataataattc

SEQ ID NO: 931301 - DNA, 15 bp, Homo sapiens
aattataataattcc

SEQ ID NO: 931302 - DNA, 15 bp, Homo sapiens
attataataattcct

SEQ ID NO: 931303 - DNA, 15 bp, Homo sapiens
ttataataattcctg

SEQ ID NO: 931304 - DNA, 15 bp, Homo sapiens
tataataattcctga

SEQ ID NO: 931305 - DNA, 15 bp, Homo sapiens
ataataattcctgat

SEQ ID NO: 931306 - DNA, 15 bp, Homo sapiens
taataattcctgata

SEQ ID NO: 931307 - DNA, 15 bp, Homo sapiens
aataattcctgatat

SEQ ID NO: 931308 - DNA, 15 bp, Homo sapiens
ataattcctgatata

SEQ ID NO: 931309 - DNA, 15 bp, Homo sapiens
taattcctgatataa

SEQ ID NO: 931310 - DNA, 15 bp, Homo sapiens
aattcctgatataaa

SEQ ID NO: 931311 - DNA, 15 bp, Homo sapiens
attcctgatataaaa

SEQ ID NO: 931312 - DNA, 15 bp, Homo sapiens
ttcctgatataaaat

SEQ ID NO: 931313 - DNA, 15 bp, Homo sapiens
tcctgatataaaata

SEQ ID NO: 931314 - DNA, 15 bp, Homo sapiens
cctgatataaaatat

SEQ ID NO: 931315 - DNA, 15 bp, Homo sapiens
ctgatataaaatata

SEQ ID NO: 931316 - DNA, 15 bp, Homo sapiens
tgatataaaatataa

SEQ ID NO: 931317 - DNA, 15 bp, Homo sapiens
gatataaaatataat

SEQ ID NO: 931318 - DNA, 15 bp, Homo sapiens
atataaaatataatt

SEQ ID NO: 931319 - DNA, 15 bp, Homo sapiens
tataaaatataatta

SEQ ID NO: 931320 - DNA, 15 bp, Homo sapiens
ataaaatataattat

SEQ ID NO: 931321 - DNA, 15 bp, Homo sapiens
taaaatataattata

SEQ ID NO: 931322 - DNA, 15 bp, Homo sapiens
aaaatataattataa

SEQ ID NO: 931323 - DNA, 15 bp, Homo sapiens
aaatataattataac

SEQ ID NO: 931324 - DNA, 15 bp, Homo sapiens
aatataattataact

SEQ ID NO: 931325 - DNA, 15 bp, Homo sapiens
atataattataacta

SEQ ID NO: 931326 - DNA, 15 bp, Homo sapiens
tataattataactaa

SEQ ID NO: 931327 - DNA, 15 bp, Homo sapiens
ataattataactaat

SEQ ID NO: 931328 - DNA, 15 bp, Homo sapiens
taattataactaata

SEQ ID NO: 931329 - DNA, 15 bp, Homo sapiens
aattataactaatat

SEQ ID NO: 931330 - DNA, 15 bp, Homo sapiens
attataactaatatt

SEQ ID NO: 931331 - DNA, 15 bp, Homo sapiens
ttataactaatattt

SEQ ID NO: 931332 - DNA, 15 bp, Homo sapiens
tataactaatattta

SEQ ID NO: 931333 - DNA, 15 bp, Homo sapiens
ataactaatatttat

SEQ ID NO: 931334 - DNA, 15 bp, Homo sapiens
taactaatatttatt

SEQ ID NO: 931335 - DNA, 15 bp, Homo sapiens
aactaatatttattc

SEQ ID NO: 931336 - DNA, 15 bp, Homo sapiens
actaatatttattca

SEQ ID NO: 931337 - DNA, 15 bp, Homo sapiens
ctaatatttattcat

SEQ ID NO: 931338 - DNA, 15 bp, Homo sapiens
taatatttattcatt

SEQ ID NO: 931339 - DNA, 15 bp, Homo sapiens
aatatttattcatta

SEQ ID NO: 931340 - DNA, 15 bp, Homo sapiens
atatttattcattac

SEQ ID NO: 931341 - DNA, 15 bp, Homo sapiens
tatttattcattact

SEQ ID NO: 931342 - DNA, 15 bp, Homo sapiens
atttattcattactt

SEQ ID NO: 931343 - DNA, 15 bp, Homo sapiens
tttattcattactta

SEQ ID NO: 931344 - DNA, 15 bp, Homo sapiens
ttattcattacttat

SEQ ID NO: 931345 - DNA, 15 bp, Homo sapiens
tattcattacttatg

SEQ ID NO: 931346 - DNA, 15 bp, Homo sapiens
attcattacttatgc

SEQ ID NO: 931347 - DNA, 15 bp, Homo sapiens
ttcattacttatgct

SEQ ID NO: 931348 - DNA, 15 bp, Homo sapiens
tcattacttatgcta

SEQ ID NO: 931349 - DNA, 15 bp, Homo sapiens
cattacttatgctaa

SEQ ID NO: 931350 - DNA, 15 bp, Homo sapiens
attacttatgctaag

SEQ ID NO: 931351 - DNA, 15 bp, Homo sapiens
ttacttatgctaaga

SEQ ID NO: 931352 - DNA, 15 bp, Homo sapiens
tacttatgctaagat

SEQ ID NO: 931353 - DNA, 15 bp, Homo sapiens
acttatgctaagatc

SEQ ID NO: 931354 - DNA, 15 bp, Homo sapiens
cttatgctaagatct

SEQ ID NO: 931355 - DNA, 15 bp, Homo sapiens
ttatgctaagatctc

SEQ ID NO: 931356 - DNA, 15 bp, Homo sapiens
tatgctaagatctct

SEQ ID NO: 931357 - DNA, 15 bp, Homo sapiens
atgctaagatctcta

SEQ ID NO: 931358 - DNA, 15 bp, Homo sapiens
tgctaagatctctaa

SEQ ID NO: 931359 - DNA, 15 bp, Homo sapiens
gctaagatctctaaa

SEQ ID NO: 931360 - DNA, 15 bp, Homo sapiens
ctaagatctctaaat

SEQ ID NO: 931361 - DNA, 15 bp, Homo sapiens
taagatctctaaatg

SEQ ID NO: 931362 - DNA, 15 bp, Homo sapiens
aagatctctaaatgg

SEQ ID NO: 931363 - DNA, 15 bp, Homo sapiens
agatctctaaatgga

SEQ ID NO: 931364 - DNA, 15 bp, Homo sapiens
gatctctaaatggat

SEQ ID NO: 931365 - DNA, 15 bp, Homo sapiens
atctctaaatggatt

SEQ ID NO: 931366 - DNA, 15 bp, Homo sapiens
tctctaaatggatta

SEQ ID NO: 931367 - DNA, 15 bp, Homo sapiens
ctctaaatggattat

SEQ ID NO: 931368 - DNA, 15 bp, Homo sapiens
tctaaatggattatc

SEQ ID NO: 931369 - DNA, 15 bp, Homo sapiens
ctaaatggattatct

SEQ ID NO: 931370 - DNA, 15 bp, Homo sapiens
taaatggattatctc

SEQ ID NO: 931371 - DNA, 15 bp, Homo sapiens
aaatggattatctca

SEQ ID NO: 931372 - DNA, 15 bp, Homo sapiens
aatggattatctcac

SEQ ID NO: 931373 - DNA, 15 bp, Homo sapiens
atggattatctcact

SEQ ID NO: 931374 - DNA, 15 bp, Homo sapiens
tggattatctcactg

SEQ ID NO: 931375 - DNA, 15 bp, Homo sapiens
ggattatctcactgt

SEQ ID NO: 931376 - DNA, 15 bp, Homo sapiens
gattatctcactgtc

SEQ ID NO: 931377 - DNA, 15 bp, Homo sapiens
attatctcactgtct

SEQ ID NO: 931378 - DNA, 15 bp, Homo sapiens
ttatctcactgtctt

SEQ ID NO: 931379 - DNA, 15 bp, Homo sapiens
tatctcactgtcttc

SEQ ID NO: 931380 - DNA, 15 bp, Homo sapiens
atctcactgtcttca

SEQ ID NO: 931381 - DNA, 15 bp, Homo sapiens
tctcactgtcttcac

SEQ ID NO: 931382 - DNA, 15 bp, Homo sapiens
ctcactgtcttcaca

SEQ ID NO: 931383 - DNA, 15 bp, Homo sapiens
tcactgtcttcacag

SEQ ID NO: 931384 - DNA, 15 bp, Homo sapiens
cactgtcttcacagc

SEQ ID NO: 931385 - DNA, 15 bp, Homo sapiens
actgtcttcacagca

SEQ ID NO: 931386 - DNA, 15 bp, Homo sapiens
ctgtcttcacagcaa

SEQ ID NO: 931387 - DNA, 15 bp, Homo sapiens
tgtcttcacagcaac

SEQ ID NO: 931388 - DNA, 15 bp, Homo sapiens
gtcttcacagcaacc

SEQ ID NO: 931389 - DNA, 15 bp, Homo sapiens
tcttcacagcaaccc

SEQ ID NO: 931390 - DNA, 15 bp, Homo sapiens
cttcacagcaacccc

SEQ ID NO: 931391 - DNA, 15 bp, Homo sapiens
ttcacagcaacccca

SEQ ID NO: 931392 - DNA, 15 bp, Homo sapiens
tcacagcaaccccaa

SEQ ID NO: 931393 - DNA, 15 bp, Homo sapiens
cacagcaaccccaaa

SEQ ID NO: 931394 - DNA, 15 bp, Homo sapiens
acagcaaccccaaat

SEQ ID NO: 931395 - DNA, 15 bp, Homo sapiens
cagcaaccccaaatt

SEQ ID NO: 931396 - DNA, 15 bp, Homo sapiens
agcaaccccaaatta

SEQ ID NO: 931397 - DNA, 15 bp, Homo sapiens
gcaaccccaaattac

SEQ ID NO: 931398 - DNA, 15 bp, Homo sapiens
caaccccaaattact

SEQ ID NO: 931399 - DNA, 15 bp, Homo sapiens
aaccccaaattacta

SEQ ID NO: 931400 - DNA, 15 bp, Homo sapiens
accccaaattactaa

SEQ ID NO: 931401 - DNA, 15 bp, Homo sapiens
ccccaaattactaaa

SEQ ID NO: 931402 - DNA, 15 bp, Homo sapiens
cccaaattactaaaa

SEQ ID NO: 931403 - DNA, 15 bp, Homo sapiens
ccaaattactaaaat

SEQ ID NO: 931404 - DNA, 15 bp, Homo sapiens
caaattactaaaatt

SEQ ID NO: 931405 - DNA, 15 bp, Homo sapiens
aaattactaaaatta

SEQ ID NO: 931406 - DNA, 15 bp, Homo sapiens
aattactaaaattat

SEQ ID NO: 931407 - DNA, 15 bp, Homo sapiens
attactaaaattatc

SEQ ID NO: 931408 - DNA, 15 bp, Homo sapiens
ttactaaaattatcc

SEQ ID NO: 931409 - DNA, 15 bp, Homo sapiens
tactaaaattatccc

SEQ ID NO: 931410 - DNA, 15 bp, Homo sapiens
actaaaattatcccc

SEQ ID NO: 931411 - DNA, 15 bp, Homo sapiens
ctaaaattatcccca

SEQ ID NO: 931412 - DNA, 15 bp, Homo sapiens
taaaattatccccat

SEQ ID NO: 931413 - DNA, 15 bp, Homo sapiens
aaaattatccccatt

SEQ ID NO: 931414 - DNA, 15 bp, Homo sapiens
aaattatccccattt

SEQ ID NO: 931415 - DNA, 15 bp, Homo sapiens
aattatccccatttg

SEQ ID NO: 931416 - DNA, 15 bp, Homo sapiens
attatccccatttgc

SEQ ID NO: 931417 - DNA, 15 bp, Homo sapiens
ttatccccatttgca

SEQ ID NO: 931418 - DNA, 15 bp, Homo sapiens
tatccccatttgcac

SEQ ID NO: 931419 - DNA, 15 bp, Homo sapiens
atccccatttgcacg

SEQ ID NO: 931420 - DNA, 15 bp, Homo sapiens
tccccatttgcacgt

SEQ ID NO: 931421 - DNA, 15 bp, Homo sapiens
ccccatttgcacgtg

SEQ ID NO: 931422 - DNA, 15 bp, Homo sapiens
cccatttgcacgtga

SEQ ID NO: 931423 - DNA, 15 bp, Homo sapiens
ccatttgcacgtgat

SEQ ID NO: 931424 - DNA, 15 bp, Homo sapiens
catttgcacgtgata

SEQ ID NO: 931425 - DNA, 15 bp, Homo sapiens
atttgcacgtgataa

SEQ ID NO: 931426 - DNA, 15 bp, Homo sapiens
tttgcacgtgataaa

SEQ ID NO: 931427 - DNA, 15 bp, Homo sapiens
ttgcacgtgataaaa

SEQ ID NO: 931428 - DNA, 15 bp, Homo sapiens
tgcacgtgataaaac

SEQ ID NO: 931429 - DNA, 15 bp, Homo sapiens
gcacgtgataaaaca

SEQ ID NO: 931430 - DNA, 15 bp, Homo sapiens
cacgtgataaaacag

SEQ ID NO: 931431 - DNA, 15 bp, Homo sapiens
acgtgataaaacagg

SEQ ID NO: 931432 - DNA, 15 bp, Homo sapiens
cgtgataaaacaggc

SEQ ID NO: 931433 - DNA, 15 bp, Homo sapiens
gtgataaaacaggcc

SEQ ID NO: 931434 - DNA, 15 bp, Homo sapiens
tgataaaacaggcct

SEQ ID NO: 931435 - DNA, 15 bp, Homo sapiens
gataaaacaggccta

SEQ ID NO: 931436 - DNA, 15 bp, Homo sapiens
ataaaacaggcctaa

SEQ ID NO: 931437 - DNA, 15 bp, Homo sapiens
taaaacaggcctaag

SEQ ID NO: 931438 - DNA, 15 bp, Homo sapiens
aaaacaggcctaaga

SEQ ID NO: 931439 - DNA, 15 bp, Homo sapiens
aaacaggcctaagag

SEQ ID NO: 931440 - DNA, 15 bp, Homo sapiens
aacaggcctaagaga

SEQ ID NO: 931441 - DNA, 15 bp, Homo sapiens
acaggcctaagagaa

SEQ ID NO: 931442 - DNA, 15 bp, Homo sapiens
caggcctaagagaag

SEQ ID NO: 931443 - DNA, 15 bp, Homo sapiens
aggcctaagagaagt

SEQ ID NO: 931444 - DNA, 15 bp, Homo sapiens
ggcctaagagaagtt

SEQ ID NO: 931445 - DNA, 15 bp, Homo sapiens
gcctaagagaagttc

SEQ ID NO: 931446 - DNA, 15 bp, Homo sapiens
cctaagagaagttca

SEQ ID NO: 931447 - DNA, 15 bp, Homo sapiens
ctaagagaagttcag

SEQ ID NO: 931448 - DNA, 15 bp, Homo sapiens
taagagaagttcagt

SEQ ID NO: 931449 - DNA, 15 bp, Homo sapiens
aagagaagttcagta

SEQ ID NO: 931450 - DNA, 15 bp, Homo sapiens
agagaagttcagtaa

SEQ ID NO: 931451 - DNA, 15 bp, Homo sapiens
gagaagttcagtaat

SEQ ID NO: 931452 - DNA, 15 bp, Homo sapiens
agaagttcagtaatt

SEQ ID NO: 931453 - DNA, 15 bp, Homo sapiens
gaagttcagtaattg

SEQ ID NO: 931454 - DNA, 15 bp, Homo sapiens
aagttcagtaattgg

SEQ ID NO: 931455 - DNA, 15 bp, Homo sapiens
agttcagtaattggg

SEQ ID NO: 931456 - DNA, 15 bp, Homo sapiens
gttcagtaattgggt

SEQ ID NO: 931457 - DNA, 15 bp, Homo sapiens
ttcagtaattgggtc

SEQ ID NO: 931458 - DNA, 15 bp, Homo sapiens
tcagtaattgggtca

SEQ ID NO: 931459 - DNA, 15 bp, Homo sapiens
cagtaattgggtcat

SEQ ID NO: 931460 - DNA, 15 bp, Homo sapiens
agtaattgggtcatc

SEQ ID NO: 931461 - DNA, 15 bp, Homo sapiens
gtaattgggtcatcc

SEQ ID NO: 931462 - DNA, 15 bp, Homo sapiens
taattgggtcatcca

SEQ ID NO: 931463 - DNA, 15 bp, Homo sapiens
aattgggtcatccaa

SEQ ID NO: 931464 - DNA, 15 bp, Homo sapiens
attgggtcatccaat

SEQ ID NO: 931465 - DNA, 15 bp, Homo sapiens
ttgggtcatccaatg

SEQ ID NO: 931466 - DNA, 15 bp, Homo sapiens
tgggtcatccaatgt

SEQ ID NO: 931467 - DNA, 15 bp, Homo sapiens
gggtcatccaatgta

SEQ ID NO: 931468 - DNA, 15 bp, Homo sapiens
ggtcatccaatgtat

SEQ ID NO: 931469 - DNA, 15 bp, Homo sapiens
gtcatccaatgtatc

SEQ ID NO: 931470 - DNA, 15 bp, Homo sapiens
tcatccaatgtatca

SEQ ID NO: 931471 - DNA, 15 bp, Homo sapiens
catccaatgtatcag

SEQ ID NO: 931472 - DNA, 15 bp, Homo sapiens
atccaatgtatcagg

SEQ ID NO: 931473 - DNA, 15 bp, Homo sapiens
tccaatgtatcaggt

SEQ ID NO: 931474 - DNA, 15 bp, Homo sapiens
ccaatgtatcaggta

SEQ ID NO: 931475 - DNA, 15 bp, Homo sapiens
caatgtatcaggtag

SEQ ID NO: 931476 - DNA, 15 bp, Homo sapiens
aatgtatcaggtagc

SEQ ID NO: 931477 - DNA, 15 bp, Homo sapiens
atgtatcaggtagct

SEQ ID NO: 931478 - DNA, 15 bp, Homo sapiens
tgtatcaggtagcta

SEQ ID NO: 931479 - DNA, 15 bp, Homo sapiens
gtatcaggtagctac

SEQ ID NO: 931480 - DNA, 15 bp, Homo sapiens
tatcaggtagctact

SEQ ID NO: 931481 - DNA, 15 bp, Homo sapiens
atcaggtagctacta

SEQ ID NO: 931482 - DNA, 15 bp, Homo sapiens
tcaggtagctactat

SEQ ID NO: 931483 - DNA, 15 bp, Homo sapiens
caggtagctactatt

SEQ ID NO: 931484 - DNA, 15 bp, Homo sapiens
aggtagctactatta

SEQ ID NO: 931485 - DNA, 15 bp, Homo sapiens
ggtagctactattat

SEQ ID NO: 931486 - DNA, 15 bp, Homo sapiens
gtagctactattata

SEQ ID NO: 931487 - DNA, 15 bp, Homo sapiens
tagctactattatat

SEQ ID NO: 931488 - DNA, 15 bp, Homo sapiens
agctactattatata

SEQ ID NO: 931489 - DNA, 15 bp, Homo sapiens
gctactattatatac

SEQ ID NO: 931490 - DNA, 15 bp, Homo sapiens
ctactattatataca

SEQ ID NO: 931491 - DNA, 15 bp, Homo sapiens
tactattatatacaa

SEQ ID NO: 931492 - DNA, 15 bp, Homo sapiens
actattatatacaaa

SEQ ID NO: 931493 - DNA, 15 bp, Homo sapiens
ctattatatacaaaa

SEQ ID NO: 931494 - DNA, 15 bp, Homo sapiens
tattatatacaaaac

SEQ ID NO: 931495 - DNA, 15 bp, Homo sapiens
attatatacaaaacc

SEQ ID NO: 931496 - DNA, 15 bp, Homo sapiens
ttatatacaaaacca

SEQ ID NO: 931497 - DNA, 15 bp, Homo sapiens
tatatacaaaaccac

SEQ ID NO: 931498 - DNA, 15 bp, Homo sapiens
atatacaaaaccacc

SEQ ID NO: 931499 - DNA, 15 bp, Homo sapiens
tatacaaaaccaccc

SEQ ID NO: 931500 - DNA, 15 bp, Homo sapiens
atacaaaaccaccca

SEQ ID NO: 931501 - DNA, 15 bp, Homo sapiens
tacaaaaccacccag

SEQ ID NO: 931502 - DNA, 15 bp, Homo sapiens
acaaaaccacccaga

SEQ ID NO: 931503 - DNA, 15 bp, Homo sapiens
caaaaccacccagaa

SEQ ID NO: 931504 - DNA, 15 bp, Homo sapiens
aaaaccacccagaaa

SEQ ID NO: 931505 - DNA, 15 bp, Homo sapiens
aaaccacccagaaac

SEQ ID NO: 931506 - DNA, 15 bp, Homo sapiens
aaccacccagaaaca

SEQ ID NO: 931507 - DNA, 15 bp, Homo sapiens
accacccagaaacac

SEQ ID NO: 931508 - DNA, 15 bp, Homo sapiens
ccacccagaaacaca

SEQ ID NO: 931509 - DNA, 15 bp, Homo sapiens
cacccagaaacacag

SEQ ID NO: 931510 - DNA, 15 bp, Homo sapiens
acccagaaacacagt

SEQ ID NO: 931511 - DNA, 15 bp, Homo sapiens
cccagaaacacagta

SEQ ID NO: 931512 - DNA, 15 bp, Homo sapiens
ccagaaacacagtag

SEQ ID NO: 931513 - DNA, 15 bp, Homo sapiens
cagaaacacagtagc

SEQ ID NO: 931514 - DNA, 15 bp, Homo sapiens
agaaacacagtagct

SEQ ID NO: 931515 - DNA, 15 bp, Homo sapiens
gaaacacagtagctt

SEQ ID NO: 931516 - DNA, 15 bp, Homo sapiens
aaacacagtagctta

SEQ ID NO: 931517 - DNA, 15 bp, Homo sapiens
aacacagtagcttaa

SEQ ID NO: 931518 - DNA, 15 bp, Homo sapiens
acacagtagcttaaa

SEQ ID NO: 931519 - DNA, 15 bp, Homo sapiens
cacagtagcttaaaa

SEQ ID NO: 931520 - DNA, 15 bp, Homo sapiens
acagtagcttaaaac

SEQ ID NO: 931521 - DNA, 15 bp, Homo sapiens
cagtagcttaaaaca

SEQ ID NO: 931522 - DNA, 15 bp, Homo sapiens
agtagcttaaaacaa

SEQ ID NO: 931523 - DNA, 15 bp, Homo sapiens
gtagcttaaaacaat

SEQ ID NO: 931524 - DNA, 15 bp, Homo sapiens
tagcttaaaacaata

SEQ ID NO: 931525 - DNA, 15 bp, Homo sapiens
agcttaaaacaataa

SEQ ID NO: 931526 - DNA, 15 bp, Homo sapiens
gcttaaaacaataat

SEQ ID NO: 931527 - DNA, 15 bp, Homo sapiens
cttaaaacaataatt

SEQ ID NO: 931528 - DNA, 15 bp, Homo sapiens
ttaaaacaataatta

SEQ ID NO: 931529 - DNA, 15 bp, Homo sapiens
taaaacaataattat

SEQ ID NO: 931530 - DNA, 15 bp, Homo sapiens
aaaacaataattatt

SEQ ID NO: 931531 - DNA, 15 bp, Homo sapiens
aaacaataattattt

SEQ ID NO: 931532 - DNA, 15 bp, Homo sapiens
aacaataattattta

SEQ ID NO: 931533 - DNA, 15 bp, Homo sapiens
acaataattatttat

SEQ ID NO: 931534 - DNA, 15 bp, Homo sapiens
caataattatttatt

SEQ ID NO: 931535 - DNA, 15 bp, Homo sapiens
aataattatttattt

SEQ ID NO: 931536 - DNA, 15 bp, Homo sapiens
ataattatttatttg

SEQ ID NO: 931537 - DNA, 15 bp, Homo sapiens
taattatttatttgt

SEQ ID NO: 931538 - DNA, 15 bp, Homo sapiens
aattatttatttgtt

SEQ ID NO: 931539 - DNA, 15 bp, Homo sapiens
attatttatttgttc

SEQ ID NO: 931540 - DNA, 15 bp, Homo sapiens
ttatttatttgttcc

SEQ ID NO: 931541 - DNA, 15 bp, Homo sapiens
tatttatttgttccc

SEQ ID NO: 931542 - DNA, 15 bp, Homo sapiens
atttatttgttccca

SEQ ID NO: 931543 - DNA, 15 bp, Homo sapiens
tttatttgttcccaa

SEQ ID NO: 931544 - DNA, 15 bp, Homo sapiens
ttatttgttcccaat

SEQ ID NO: 931545 - DNA, 15 bp, Homo sapiens
tatttgttcccaatt

SEQ ID NO: 931546 - DNA, 15 bp, Homo sapiens
atttgttcccaattc

SEQ ID NO: 931547 - DNA, 15 bp, Homo sapiens
tttgttcccaattct

SEQ ID NO: 931548 - DNA, 15 bp, Homo sapiens
ttgttcccaattctt

SEQ ID NO: 931549 - DNA, 15 bp, Homo sapiens
tgttcccaattcttt

SEQ ID NO: 931550 - DNA, 15 bp, Homo sapiens
gttcccaattctttt

SEQ ID NO: 931551 - DNA, 15 bp, Homo sapiens
ttcccaattcttttg

SEQ ID NO: 931552 - DNA, 15 bp, Homo sapiens
tcccaattcttttgg

SEQ ID NO: 931553 - DNA, 15 bp, Homo sapiens
cccaattcttttggt

SEQ ID NO: 931554 - DNA, 15 bp, Homo sapiens
ccaattcttttggtc

SEQ ID NO: 931555 - DNA, 15 bp, Homo sapiens
caattcttttggtca

SEQ ID NO: 931556 - DNA, 15 bp, Homo sapiens
aattcttttggtcag

SEQ ID NO: 931557 - DNA, 15 bp, Homo sapiens
attcttttggtcagc

SEQ ID NO: 931558 - DNA, 15 bp, Homo sapiens
ttcttttggtcagca

SEQ ID NO: 931559 - DNA, 15 bp, Homo sapiens
tcttttggtcagcaa

SEQ ID NO: 931560 - DNA, 15 bp, Homo sapiens
cttttggtcagcaat

SEQ ID NO: 931561 - DNA, 15 bp, Homo sapiens
ttttggtcagcaatt

SEQ ID NO: 931562 - DNA, 15 bp, Homo sapiens
tttggtcagcaattt

SEQ ID NO: 931563 - DNA, 15 bp, Homo sapiens
ttggtcagcaatttg

SEQ ID NO: 931564 - DNA, 15 bp, Homo sapiens
tggtcagcaatttgg

SEQ ID NO: 931565 - DNA, 15 bp, Homo sapiens
ggtcagcaatttggg

SEQ ID NO: 931566 - DNA, 15 bp, Homo sapiens
gtcagcaatttgggc

SEQ ID NO: 931567 - DNA, 15 bp, Homo sapiens
tcagcaatttgggct

SEQ ID NO: 931568 - DNA, 15 bp, Homo sapiens
cagcaatttgggctg

SEQ ID NO: 931569 - DNA, 15 bp, Homo sapiens
agcaatttgggctgg

SEQ ID NO: 931570 - DNA, 15 bp, Homo sapiens
gcaatttgggctggg

SEQ ID NO: 931571 - DNA, 15 bp, Homo sapiens
caatttgggctgggc

SEQ ID NO: 931572 - DNA, 15 bp, Homo sapiens
aatttgggctgggct

SEQ ID NO: 931573 - DNA, 15 bp, Homo sapiens
atttgggctgggctc

SEQ ID NO: 931574 - DNA, 15 bp, Homo sapiens
tttgggctgggctca

SEQ ID NO: 931575 - DNA, 15 bp, Homo sapiens
ttgggctgggctcaa

SEQ ID NO: 931576 - DNA, 15 bp, Homo sapiens
tgggctgggctcaac

SEQ ID NO: 931577 - DNA, 15 bp, Homo sapiens
gggctgggctcaact

SEQ ID NO: 931578 - DNA, 15 bp, Homo sapiens
ggctgggctcaactg

SEQ ID NO: 931579 - DNA, 15 bp, Homo sapiens
gctgggctcaactga

SEQ ID NO: 931580 - DNA, 15 bp, Homo sapiens
ctgggctcaactgag

SEQ ID NO: 931581 - DNA, 15 bp, Homo sapiens
tgggctcaactgaga

SEQ ID NO: 931582 - DNA, 15 bp, Homo sapiens
gggctcaactgagat

SEQ ID NO: 931583 - DNA, 15 bp, Homo sapiens
ggctcaactgagatg

SEQ ID NO: 931584 - DNA, 15 bp, Homo sapiens
gctcaactgagatgg

SEQ ID NO: 931585 - DNA, 15 bp, Homo sapiens
ctcaactgagatggt

SEQ ID NO: 931586 - DNA, 15 bp, Homo sapiens
tcaactgagatggtt

SEQ ID NO: 931587 - DNA, 15 bp, Homo sapiens
caactgagatggttc

SEQ ID NO: 931588 - DNA, 15 bp, Homo sapiens
aactgagatggttca

SEQ ID NO: 931589 - DNA, 15 bp, Homo sapiens
actgagatggttcat

SEQ ID NO: 931590 - DNA, 15 bp, Homo sapiens
ctgagatggttcatc

SEQ ID NO: 931591 - DNA, 15 bp, Homo sapiens
tgagatggttcatct

SEQ ID NO: 931592 - DNA, 15 bp, Homo sapiens
gagatggttcatctc

SEQ ID NO: 931593 - DNA, 15 bp, Homo sapiens
agatggttcatctct

SEQ ID NO: 931594 - DNA, 15 bp, Homo sapiens
gatggttcatctctg

SEQ ID NO: 931595 - DNA, 15 bp, Homo sapiens
atggttcatctctgc

SEQ ID NO: 931596 - DNA, 15 bp, Homo sapiens
tggttcatctctgct

SEQ ID NO: 931597 - DNA, 15 bp, Homo sapiens
ggttcatctctgctc

SEQ ID NO: 931598 - DNA, 15 bp, Homo sapiens
gttcatctctgctcc

SEQ ID NO: 931599 - DNA, 15 bp, Homo sapiens
ttcatctctgctcca

SEQ ID NO: 931600 - DNA, 15 bp, Homo sapiens
tcatctctgctccac

SEQ ID NO: 931601 - DNA, 15 bp, Homo sapiens
catctctgctccacg

SEQ ID NO: 931602 - DNA, 15 bp, Homo sapiens
atctctgctccacgt

SEQ ID NO: 931603 - DNA, 15 bp, Homo sapiens
tctctgctccacgtg

SEQ ID NO: 931604 - DNA, 15 bp, Homo sapiens
ctctgctccacgtgg

SEQ ID NO: 931605 - DNA, 15 bp, Homo sapiens
tctgctccacgtggt

SEQ ID NO: 931606 - DNA, 15 bp, Homo sapiens
ctgctccacgtggtg

SEQ ID NO: 931607 - DNA, 15 bp, Homo sapiens
tgctccacgtggtgt

SEQ ID NO: 931608 - DNA, 15 bp, Homo sapiens
gctccacgtggtgtt

SEQ ID NO: 931609 - DNA, 15 bp, Homo sapiens
ctccacgtggtgttg

SEQ ID NO: 931610 - DNA, 15 bp, Homo sapiens
tccacgtggtgttgg

SEQ ID NO: 931611 - DNA, 15 bp, Homo sapiens
ccacgtggtgttggc

SEQ ID NO: 931612 - DNA, 15 bp, Homo sapiens
cacgtggtgttggct

SEQ ID NO: 931613 - DNA, 15 bp, Homo sapiens
acgtggtgttggcta

SEQ ID NO: 931614 - DNA, 15 bp, Homo sapiens
cgtggtgttggctag

SEQ ID NO: 931615 - DNA, 15 bp, Homo sapiens
gtggtgttggctagg

SEQ ID NO: 931616 - DNA, 15 bp, Homo sapiens
tggtgttggctaggc

SEQ ID NO: 931617 - DNA, 15 bp, Homo sapiens
ggtgttggctaggct

SEQ ID NO: 931618 - DNA, 15 bp, Homo sapiens
gtgttggctaggctt

SEQ ID NO: 931619 - DNA, 15 bp, Homo sapiens
tgttggctaggctta

SEQ ID NO: 931620 - DNA, 15 bp, Homo sapiens
gttggctaggcttac

SEQ ID NO: 931621 - DNA, 15 bp, Homo sapiens
ttggctaggcttact

SEQ ID NO: 931622 - DNA, 15 bp, Homo sapiens
tggctaggcttactt

SEQ ID NO: 931623 - DNA, 15 bp, Homo sapiens
ggctaggcttactta

SEQ ID NO: 931624 - DNA, 15 bp, Homo sapiens
gctaggcttacttat

SEQ ID NO: 931625 - DNA, 15 bp, Homo sapiens
ctaggcttacttatt

SEQ ID NO: 931626 - DNA, 15 bp, Homo sapiens
taggcttacttattc

SEQ ID NO: 931627 - DNA, 15 bp, Homo sapiens
aggcttacttattct

SEQ ID NO: 931628 - DNA, 15 bp, Homo sapiens
ggcttacttattctg

SEQ ID NO: 931629 - DNA, 15 bp, Homo sapiens
gcttacttattctgt

SEQ ID NO: 931630 - DNA, 15 bp, Homo sapiens
cttacttattctgtg

SEQ ID NO: 931631 - DNA, 15 bp, Homo sapiens
ttacttattctgtgg

SEQ ID NO: 931632 - DNA, 15 bp, Homo sapiens
tacttattctgtggg

SEQ ID NO: 931633 - DNA, 15 bp, Homo sapiens
acttattctgtggga

SEQ ID NO: 931634 - DNA, 15 bp, Homo sapiens
cttattctgtgggag

SEQ ID NO: 931635 - DNA, 15 bp, Homo sapiens
ttattctgtgggagg

SEQ ID NO: 931636 - DNA, 15 bp, Homo sapiens
tattctgtgggaggg

SEQ ID NO: 931637 - DNA, 15 bp, Homo sapiens
attctgtgggagggc

SEQ ID NO: 931638 - DNA, 15 bp, Homo sapiens
ttctgtgggagggct

SEQ ID NO: 931639 - DNA, 15 bp, Homo sapiens
tctgtgggagggcta

SEQ ID NO: 931640 - DNA, 15 bp, Homo sapiens
ctgtgggagggctag

SEQ ID NO: 931641 - DNA, 15 bp, Homo sapiens
tgtgggagggctagg

SEQ ID NO: 931642 - DNA, 15 bp, Homo sapiens
gtgggagggctagga

SEQ ID NO: 931643 - DNA, 15 bp, Homo sapiens
tgggagggctaggac

SEQ ID NO: 931644 - DNA, 15 bp, Homo sapiens
gggagggctaggaca

SEQ ID NO: 931645 - DNA, 15 bp, Homo sapiens
ggagggctaggacag

SEQ ID NO: 931646 - DNA, 15 bp, Homo sapiens
gagggctaggacagc

SEQ ID NO: 931647 - DNA, 15 bp, Homo sapiens
agggctaggacagca

SEQ ID NO: 931648 - DNA, 15 bp, Homo sapiens
gggctaggacagcag

SEQ ID NO: 931649 - DNA, 15 bp, Homo sapiens
ggctaggacagcaga

SEQ ID NO: 931650 - DNA, 15 bp, Homo sapiens
gctaggacagcagag

SEQ ID NO: 931651 - DNA, 15 bp, Homo sapiens
ctaggacagcagagc

SEQ ID NO: 931652 - DNA, 15 bp, Homo sapiens
taggacagcagagcc

SEQ ID NO: 931653 - DNA, 15 bp, Homo sapiens
aggacagcagagcct

SEQ ID NO: 931654 - DNA, 15 bp, Homo sapiens
ggacagcagagcctc

SEQ ID NO: 931655 - DNA, 15 bp, Homo sapiens
gacagcagagcctct

SEQ ID NO: 931656 - DNA, 15 bp, Homo sapiens
acagcagagcctctc

SEQ ID NO: 931657 - DNA, 15 bp, Homo sapiens
cagcagagcctctct

SEQ ID NO: 931658 - DNA, 15 bp, Homo sapiens
agcagagcctctctc

SEQ ID NO: 931659 - DNA, 15 bp, Homo sapiens
gcagagcctctctct

SEQ ID NO: 931660 - DNA, 15 bp, Homo sapiens
cagagcctctctctc

SEQ ID NO: 931661 - DNA, 15 bp, Homo sapiens
agagcctctctctcc

SEQ ID NO: 931662 - DNA, 15 bp, Homo sapiens
gagcctctctctccg

SEQ ID NO: 931663 - DNA, 15 bp, Homo sapiens
agcctctctctccgt

SEQ ID NO: 931664 - DNA, 15 bp, Homo sapiens
gcctctctctccgtt

SEQ ID NO: 931665 - DNA, 15 bp, Homo sapiens
cctctctctccgttg

SEQ ID NO: 931666 - DNA, 15 bp, Homo sapiens
ctctctctccgttgg

SEQ ID NO: 931667 - DNA, 15 bp, Homo sapiens
tctctctccgttggt

SEQ ID NO: 931668 - DNA, 15 bp, Homo sapiens
ctctctccgttggtc

SEQ ID NO: 931669 - DNA, 15 bp, Homo sapiens
tctctccgttggtcc

SEQ ID NO: 931670 - DNA, 15 bp, Homo sapiens
ctctccgttggtccc

SEQ ID NO: 931671 - DNA, 15 bp, Homo sapiens
tctccgttggtccct

SEQ ID NO: 931672 - DNA, 15 bp, Homo sapiens
ctccgttggtccctc

SEQ ID NO: 931673 - DNA, 15 bp, Homo sapiens
tccgttggtccctca

SEQ ID NO: 931674 - DNA, 15 bp, Homo sapiens
ccgttggtccctcat

SEQ ID NO: 931675 - DNA, 15 bp, Homo sapiens
cgttggtccctcatc

SEQ ID NO: 931676 - DNA, 15 bp, Homo sapiens
gttggtccctcatct

SEQ ID NO: 931677 - DNA, 15 bp, Homo sapiens
ttggtccctcatctt

SEQ ID NO: 931678 - DNA, 15 bp, Homo sapiens
tggtccctcatcttc

SEQ ID NO: 931679 - DNA, 15 bp, Homo sapiens
ggtccctcatcttca

SEQ ID NO: 931680 - DNA, 15 bp, Homo sapiens
gtccctcatcttcaa

SEQ ID NO: 931681 - DNA, 15 bp, Homo sapiens
tccctcatcttcaag

SEQ ID NO: 931682 - DNA, 15 bp, Homo sapiens
ccctcatcttcaagg

SEQ ID NO: 931683 - DNA, 15 bp, Homo sapiens
cctcatcttcaagga

SEQ ID NO: 931684 - DNA, 15 bp, Homo sapiens
ctcatcttcaaggag

SEQ ID NO: 931685 - DNA, 15 bp, Homo sapiens
tcatcttcaaggagg

SEQ ID NO: 931686 - DNA, 15 bp, Homo sapiens
catcttcaaggaggc

SEQ ID NO: 931687 - DNA, 15 bp, Homo sapiens
atcttcaaggaggct

SEQ ID NO: 931688 - DNA, 15 bp, Homo sapiens
tcttcaaggaggctg

SEQ ID NO: 931689 - DNA, 15 bp, Homo sapiens
cttcaaggaggctgg

SEQ ID NO: 931690 - DNA, 15 bp, Homo sapiens
ttcaaggaggctggc

SEQ ID NO: 931691 - DNA, 15 bp, Homo sapiens
tcaaggaggctggcc

SEQ ID NO: 931692 - DNA, 15 bp, Homo sapiens
caaggaggctggcct

SEQ ID NO: 931693 - DNA, 15 bp, Homo sapiens
aaggaggctggccta

SEQ ID NO: 931694 - DNA, 15 bp, Homo sapiens
aggaggctggcctag

SEQ ID NO: 931695 - DNA, 15 bp, Homo sapiens
ggaggctggcctagg

SEQ ID NO: 931696 - DNA, 15 bp, Homo sapiens
gaggctggcctaggt

SEQ ID NO: 931697 - DNA, 15 bp, Homo sapiens
aggctggcctaggtt

SEQ ID NO: 931698 - DNA, 15 bp, Homo sapiens
ggctggcctaggttt

SEQ ID NO: 931699 - DNA, 15 bp, Homo sapiens
gctggcctaggtttc

SEQ ID NO: 931700 - DNA, 15 bp, Homo sapiens
ctggcctaggtttct

SEQ ID NO: 931701 - DNA, 15 bp, Homo sapiens
tggcctaggtttctt

SEQ ID NO: 931702 - DNA, 15 bp, Homo sapiens
ggcctaggtttcttc

SEQ ID NO: 931703 - DNA, 15 bp, Homo sapiens
gcctaggtttcttca

SEQ ID NO: 931704 - DNA, 15 bp, Homo sapiens
cctaggtttcttcac

SEQ ID NO: 931705 - DNA, 15 bp, Homo sapiens
ctaggtttcttcact

SEQ ID NO: 931706 - DNA, 15 bp, Homo sapiens
taggtttcttcactt

SEQ ID NO: 931707 - DNA, 15 bp, Homo sapiens
aggtttcttcacttg

SEQ ID NO: 931708 - DNA, 15 bp, Homo sapiens
ggtttcttcacttgt

SEQ ID NO: 931709 - DNA, 15 bp, Homo sapiens
gtttcttcacttgtt

SEQ ID NO: 931710 - DNA, 15 bp, Homo sapiens
tttcttcacttgttg

SEQ ID NO: 931711 - DNA, 15 bp, Homo sapiens
ttcttcacttgttgc

SEQ ID NO: 931712 - DNA, 15 bp, Homo sapiens
tcttcacttgttgcc

SEQ ID NO: 931713 - DNA, 15 bp, Homo sapiens
cttcacttgttgcca

SEQ ID NO: 931714 - DNA, 15 bp, Homo sapiens
ttcacttgttgccaa

SEQ ID NO: 931715 - DNA, 15 bp, Homo sapiens
tcacttgttgccaaa

SEQ ID NO: 931716 - DNA, 15 bp, Homo sapiens
cacttgttgccaaat

SEQ ID NO: 931717 - DNA, 15 bp, Homo sapiens
acttgttgccaaatg

SEQ ID NO: 931718 - DNA, 15 bp, Homo sapiens
cttgttgccaaatgg

SEQ ID NO: 931719 - DNA, 15 bp, Homo sapiens
ttgttgccaaatggg

SEQ ID NO: 931720 - DNA, 15 bp, Homo sapiens
tgttgccaaatgggt

SEQ ID NO: 931721 - DNA, 15 bp, Homo sapiens
gttgccaaatgggtt

SEQ ID NO: 931722 - DNA, 15 bp, Homo sapiens
ttgccaaatgggttc

SEQ ID NO: 931723 - DNA, 15 bp, Homo sapiens
tgccaaatgggttcc

SEQ ID NO: 931724 - DNA, 15 bp, Homo sapiens
gccaaatgggttccc

SEQ ID NO: 931725 - DNA, 15 bp, Homo sapiens
ccaaatgggttccca

SEQ ID NO: 931726 - DNA, 15 bp, Homo sapiens
caaatgggttcccag

SEQ ID NO: 931727 - DNA, 15 bp, Homo sapiens
aaatgggttcccagg

SEQ ID NO: 931728 - DNA, 15 bp, Homo sapiens
aatgggttcccagga

SEQ ID NO: 931729 - DNA, 15 bp, Homo sapiens
atgggttcccaggaa

SEQ ID NO: 931730 - DNA, 15 bp, Homo sapiens
tgggttcccaggaag

SEQ ID NO: 931731 - DNA, 15 bp, Homo sapiens
gggttcccaggaagg

SEQ ID NO: 931732 - DNA, 15 bp, Homo sapiens
ggttcccaggaagga

SEQ ID NO: 931733 - DNA, 15 bp, Homo sapiens
gttcccaggaaggag

SEQ ID NO: 931734 - DNA, 15 bp, Homo sapiens
ttcccaggaaggagt

SEQ ID NO: 931735 - DNA, 15 bp, Homo sapiens
tcccaggaaggagta

SEQ ID NO: 931736 - DNA, 15 bp, Homo sapiens
cccaggaaggagtaa

SEQ ID NO: 931737 - DNA, 15 bp, Homo sapiens
ccaggaaggagtaag

SEQ ID NO: 931738 - DNA, 15 bp, Homo sapiens
caggaaggagtaaga

SEQ ID NO: 931739 - DNA, 15 bp, Homo sapiens
aggaaggagtaagaa

SEQ ID NO: 931740 - DNA, 15 bp, Homo sapiens
ggaaggagtaagaaa

SEQ ID NO: 931741 - DNA, 15 bp, Homo sapiens
gaaggagtaagaaag

SEQ ID NO: 931742 - DNA, 15 bp, Homo sapiens
aaggagtaagaaagg

SEQ ID NO: 931743 - DNA, 15 bp, Homo sapiens
aggagtaagaaaggg

SEQ ID NO: 931744 - DNA, 15 bp, Homo sapiens
ggagtaagaaagggc

SEQ ID NO: 931745 - DNA, 15 bp, Homo sapiens
gagtaagaaagggca

SEQ ID NO: 931746 - DNA, 15 bp, Homo sapiens
agtaagaaagggcaa

SEQ ID NO: 931747 - DNA, 15 bp, Homo sapiens
gtaagaaagggcaag

SEQ ID NO: 931748 - DNA, 15 bp, Homo sapiens
taagaaagggcaagc

SEQ ID NO: 931749 - DNA, 15 bp, Homo sapiens
aagaaagggcaagcc

SEQ ID NO: 931750 - DNA, 15 bp, Homo sapiens
agaaagggcaagcct

SEQ ID NO: 931751 - DNA, 15 bp, Homo sapiens
gaaagggcaagcctc

SEQ ID NO: 931752 - DNA, 15 bp, Homo sapiens
aaagggcaagcctca

SEQ ID NO: 931753 - DNA, 15 bp, Homo sapiens
aagggcaagcctcag

SEQ ID NO: 931754 - DNA, 15 bp, Homo sapiens
agggcaagcctcagt

SEQ ID NO: 931755 - DNA, 15 bp, Homo sapiens
gggcaagcctcagtg

SEQ ID NO: 931756 - DNA, 15 bp, Homo sapiens
ggcaagcctcagtga

SEQ ID NO: 931757 - DNA, 15 bp, Homo sapiens
gcaagcctcagtgaa

SEQ ID NO: 931758 - DNA, 15 bp, Homo sapiens
caagcctcagtgaat

SEQ ID NO: 931759 - DNA, 15 bp, Homo sapiens
aagcctcagtgaata

SEQ ID NO: 931760 - DNA, 15 bp, Homo sapiens
agcctcagtgaataa

SEQ ID NO: 931761 - DNA, 15 bp, Homo sapiens
gcctcagtgaataag

SEQ ID NO: 931762 - DNA, 15 bp, Homo sapiens
cctcagtgaataagc

SEQ ID NO: 931763 - DNA, 15 bp, Homo sapiens
ctcagtgaataagca

SEQ ID NO: 931764 - DNA, 15 bp, Homo sapiens
tcagtgaataagcac

SEQ ID NO: 931765 - DNA, 15 bp, Homo sapiens
cagtgaataagcact

SEQ ID NO: 931766 - DNA, 15 bp, Homo sapiens
agtgaataagcactc

SEQ ID NO: 931767 - DNA, 15 bp, Homo sapiens
gtgaataagcactct

SEQ ID NO: 931768 - DNA, 15 bp, Homo sapiens
tgaataagcactctt

SEQ ID NO: 931769 - DNA, 15 bp, Homo sapiens
gaataagcactcttt

SEQ ID NO: 931770 - DNA, 15 bp, Homo sapiens
aataagcactcttta

SEQ ID NO: 931771 - DNA, 15 bp, Homo sapiens
ataagcactctttaa

SEQ ID NO: 931772 - DNA, 15 bp, Homo sapiens
taagcactctttaag

SEQ ID NO: 931773 - DNA, 15 bp, Homo sapiens
aagcactctttaagc

SEQ ID NO: 931774 - DNA, 15 bp, Homo sapiens
agcactctttaagcc

SEQ ID NO: 931775 - DNA, 15 bp, Homo sapiens
gcactctttaagcct

SEQ ID NO: 931776 - DNA, 15 bp, Homo sapiens
cactctttaagcctc

SEQ ID NO: 931777 - DNA, 15 bp, Homo sapiens
actctttaagcctct

SEQ ID NO: 931778 - DNA, 15 bp, Homo sapiens
ctctttaagcctctg

SEQ ID NO: 931779 - DNA, 15 bp, Homo sapiens
tctttaagcctctgc

SEQ ID NO: 931780 - DNA, 15 bp, Homo sapiens
ctttaagcctctgct

SEQ ID NO: 931781 - DNA, 15 bp, Homo sapiens
tttaagcctctgctt

SEQ ID NO: 931782 - DNA, 15 bp, Homo sapiens
ttaagcctctgcttg

SEQ ID NO: 931783 - DNA, 15 bp, Homo sapiens
taagcctctgcttga

SEQ ID NO: 931784 - DNA, 15 bp, Homo sapiens
aagcctctgcttgag

SEQ ID NO: 931785 - DNA, 15 bp, Homo sapiens
agcctctgcttgagt

SEQ ID NO: 931786 - DNA, 15 bp, Homo sapiens
gcctctgcttgagtc

SEQ ID NO: 931787 - DNA, 15 bp, Homo sapiens
cctctgcttgagtca

SEQ ID NO: 931788 - DNA, 15 bp, Homo sapiens
ctctgcttgagtcac

SEQ ID NO: 931789 - DNA, 15 bp, Homo sapiens
tctgcttgagtcaca

SEQ ID NO: 931790 - DNA, 15 bp, Homo sapiens
ctgcttgagtcacat

SEQ ID NO: 931791 - DNA, 15 bp, Homo sapiens
tgcttgagtcacatt

SEQ ID NO: 931792 - DNA, 15 bp, Homo sapiens
gcttgagtcacatta

SEQ ID NO: 931793 - DNA, 15 bp, Homo sapiens
cttgagtcacattac

SEQ ID NO: 931794 - DNA, 15 bp, Homo sapiens
ttgagtcacattacc

SEQ ID NO: 931795 - DNA, 15 bp, Homo sapiens
tgagtcacattacca

SEQ ID NO: 931796 - DNA, 15 bp, Homo sapiens
gagtcacattaccaa

SEQ ID NO: 931797 - DNA, 15 bp, Homo sapiens
agtcacattaccaat

SEQ ID NO: 931798 - DNA, 15 bp, Homo sapiens
gtcacattaccaatg

SEQ ID NO: 931799 - DNA, 15 bp, Homo sapiens
tcacattaccaatgt

SEQ ID NO: 931800 - DNA, 15 bp, Homo sapiens
cacattaccaatgtc

SEQ ID NO: 931801 - DNA, 15 bp, Homo sapiens
acattaccaatgtcc

SEQ ID NO: 931802 - DNA, 15 bp, Homo sapiens
cattaccaatgtccc

SEQ ID NO: 931803 - DNA, 15 bp, Homo sapiens
attaccaatgtccca

SEQ ID NO: 931804 - DNA, 15 bp, Homo sapiens
ttaccaatgtcccaa

SEQ ID NO: 931805 - DNA, 15 bp, Homo sapiens
taccaatgtcccaaa

SEQ ID NO: 931806 - DNA, 15 bp, Homo sapiens
accaatgtcccaaac

SEQ ID NO: 931807 - DNA, 15 bp, Homo sapiens
ccaatgtcccaaacc

SEQ ID NO: 931808 - DNA, 15 bp, Homo sapiens
caatgtcccaaacct

SEQ ID NO: 931809 - DNA, 15 bp, Homo sapiens
aatgtcccaaaccta

SEQ ID NO: 931810 - DNA, 15 bp, Homo sapiens
atgtcccaaacctag

SEQ ID NO: 931811 - DNA, 15 bp, Homo sapiens
tgtcccaaacctagg

SEQ ID NO: 931812 - DNA, 15 bp, Homo sapiens
gtcccaaacctaggg

SEQ ID NO: 931813 - DNA, 15 bp, Homo sapiens
tcccaaacctagggt

SEQ ID NO: 931814 - DNA, 15 bp, Homo sapiens
cccaaacctagggtt

SEQ ID NO: 931815 - DNA, 15 bp, Homo sapiens
ccaaacctagggtta

SEQ ID NO: 931816 - DNA, 15 bp, Homo sapiens
caaacctagggttaa

SEQ ID NO: 931817 - DNA, 15 bp, Homo sapiens
aaacctagggttaat

SEQ ID NO: 931818 - DNA, 15 bp, Homo sapiens
aacctagggttaatg

SEQ ID NO: 931819 - DNA, 15 bp, Homo sapiens
acctagggttaatgt

SEQ ID NO: 931820 - DNA, 15 bp, Homo sapiens
cctagggttaatgtg

SEQ ID NO: 931821 - DNA, 15 bp, Homo sapiens
ctagggttaatgtgg

SEQ ID NO: 931822 - DNA, 15 bp, Homo sapiens
tagggttaatgtgga

SEQ ID NO: 931823 - DNA, 15 bp, Homo sapiens
agggttaatgtggag

SEQ ID NO: 931824 - DNA, 15 bp, Homo sapiens
gggttaatgtggaga

SEQ ID NO: 931825 - DNA, 15 bp, Homo sapiens
ggttaatgtggagag

SEQ ID NO: 931826 - DNA, 15 bp, Homo sapiens
gttaatgtggagaga

SEQ ID NO: 931827 - DNA, 15 bp, Homo sapiens
ttaatgtggagagag

SEQ ID NO: 931828 - DNA, 15 bp, Homo sapiens
taatgtggagagagc

SEQ ID NO: 931829 - DNA, 15 bp, Homo sapiens
aatgtggagagagct

SEQ ID NO: 931830 - DNA, 15 bp, Homo sapiens
atgtggagagagctc

SEQ ID NO: 931831 - DNA, 15 bp, Homo sapiens
tgtggagagagctca

SEQ ID NO: 931832 - DNA, 15 bp, Homo sapiens
gtggagagagctcaa

SEQ ID NO: 931833 - DNA, 15 bp, Homo sapiens
tggagagagctcaac

SEQ ID NO: 931834 - DNA, 15 bp, Homo sapiens
ggagagagctcaaca

SEQ ID NO: 931835 - DNA, 15 bp, Homo sapiens
gagagagctcaacaa

SEQ ID NO: 931836 - DNA, 15 bp, Homo sapiens
agagagctcaacaag

SEQ ID NO: 931837 - DNA, 15 bp, Homo sapiens
gagagctcaacaagg

SEQ ID NO: 931838 - DNA, 15 bp, Homo sapiens
agagctcaacaaggg

SEQ ID NO: 931839 - DNA, 15 bp, Homo sapiens
gagctcaacaagggt

SEQ ID NO: 931840 - DNA, 15 bp, Homo sapiens
agctcaacaagggta

SEQ ID NO: 931841 - DNA, 15 bp, Homo sapiens
gctcaacaagggtat

SEQ ID NO: 931842 - DNA, 15 bp, Homo sapiens
ctcaacaagggtata

SEQ ID NO: 931843 - DNA, 15 bp, Homo sapiens
tcaacaagggtatac

SEQ ID NO: 931844 - DNA, 15 bp, Homo sapiens
caacaagggtataca

SEQ ID NO: 931845 - DNA, 15 bp, Homo sapiens
aacaagggtatacat

SEQ ID NO: 931846 - DNA, 15 bp, Homo sapiens
acaagggtatacata

SEQ ID NO: 931847 - DNA, 15 bp, Homo sapiens
caagggtatacatac

SEQ ID NO: 931848 - DNA, 15 bp, Homo sapiens
aagggtatacataca

SEQ ID NO: 931849 - DNA, 15 bp, Homo sapiens
agggtatacatacaa

SEQ ID NO: 931850 - DNA, 15 bp, Homo sapiens
gggtatacatacaat

SEQ ID NO: 931851 - DNA, 15 bp, Homo sapiens
ggtatacatacaata

SEQ ID NO: 931852 - DNA, 15 bp, Homo sapiens
gtatacatacaatag

SEQ ID NO: 931853 - DNA, 15 bp, Homo sapiens
tatacatacaatagg

SEQ ID NO: 931854 - DNA, 15 bp, Homo sapiens
atacatacaataggc

SEQ ID NO: 931855 - DNA, 15 bp, Homo sapiens
tacatacaataggca

SEQ ID NO: 931856 - DNA, 15 bp, Homo sapiens
acatacaataggcat

SEQ ID NO: 931857 - DNA, 15 bp, Homo sapiens
catacaataggcatg

SEQ ID NO: 931858 - DNA, 15 bp, Homo sapiens
atacaataggcatga

SEQ ID NO: 931859 - DNA, 15 bp, Homo sapiens
tacaataggcatgat

SEQ ID NO: 931860 - DNA, 15 bp, Homo sapiens
acaataggcatgatt

SEQ ID NO: 931861 - DNA, 15 bp, Homo sapiens
caataggcatgattc

SEQ ID NO: 931862 - DNA, 15 bp, Homo sapiens
aataggcatgattct

SEQ ID NO: 931863 - DNA, 15 bp, Homo sapiens
ataggcatgattctt

SEQ ID NO: 931864 - DNA, 15 bp, Homo sapiens
taggcatgattcttt

SEQ ID NO: 931865 - DNA, 15 bp, Homo sapiens
aggcatgattctttg

SEQ ID NO: 931866 - DNA, 15 bp, Homo sapiens
ggcatgattctttga

SEQ ID NO: 931867 - DNA, 15 bp, Homo sapiens
gcatgattctttgag

SEQ ID NO: 931868 - DNA, 15 bp, Homo sapiens
catgattctttgaga

SEQ ID NO: 931869 - DNA, 15 bp, Homo sapiens
atgattctttgagag

SEQ ID NO: 931870 - DNA, 15 bp, Homo sapiens
tgattctttgagagt

SEQ ID NO: 931871 - DNA, 15 bp, Homo sapiens
gattctttgagagtc

SEQ ID NO: 931872 - DNA, 15 bp, Homo sapiens
attctttgagagtca

SEQ ID NO: 931873 - DNA, 15 bp, Homo sapiens
ttctttgagagtcac

SEQ ID NO: 931874 - DNA, 15 bp, Homo sapiens
tctttgagagtcact

SEQ ID NO: 931875 - DNA, 15 bp, Homo sapiens
ctttgagagtcactg

SEQ ID NO: 931876 - DNA, 15 bp, Homo sapiens
tttgagagtcactgt

SEQ ID NO: 931877 - DNA, 15 bp, Homo sapiens
ttgagagtcactgta

SEQ ID NO: 931878 - DNA, 15 bp, Homo sapiens
tgagagtcactgtag

SEQ ID NO: 931879 - DNA, 15 bp, Homo sapiens
gagagtcactgtagt

SEQ ID NO: 931880 - DNA, 15 bp, Homo sapiens
agagtcactgtagta

SEQ ID NO: 931881 - DNA, 15 bp, Homo sapiens
gagtcactgtagtaa

SEQ ID NO: 931882 - DNA, 15 bp, Homo sapiens
agtcactgtagtaat

SEQ ID NO: 931883 - DNA, 15 bp, Homo sapiens
gtcactgtagtaata

SEQ ID NO: 931884 - DNA, 15 bp, Homo sapiens
tcactgtagtaataa

SEQ ID NO: 931885 - DNA, 15 bp, Homo sapiens
cactgtagtaataag

SEQ ID NO: 931886 - DNA, 15 bp, Homo sapiens
actgtagtaataaga

SEQ ID NO: 931887 - DNA, 15 bp, Homo sapiens
ctgtagtaataagat

SEQ ID NO: 931888 - DNA, 15 bp, Homo sapiens
tgtagtaataagata

SEQ ID NO: 931889 - DNA, 15 bp, Homo sapiens
gtagtaataagatat

SEQ ID NO: 931890 - DNA, 15 bp, Homo sapiens
tagtaataagatatg

SEQ ID NO: 931891 - DNA, 15 bp, Homo sapiens
agtaataagatatgt

SEQ ID NO: 931892 - DNA, 15 bp, Homo sapiens
gtaataagatatgtt

SEQ ID NO: 931893 - DNA, 15 bp, Homo sapiens
taataagatatgtta

SEQ ID NO: 931894 - DNA, 15 bp, Homo sapiens
aataagatatgttac

SEQ ID NO: 931895 - DNA, 15 bp, Homo sapiens
ataagatatgttacc

SEQ ID NO: 931896 - DNA, 15 bp, Homo sapiens
taagatatgttaccc

SEQ ID NO: 931897 - DNA, 15 bp, Homo sapiens
aagatatgttaccca

SEQ ID NO: 931898 - DNA, 15 bp, Homo sapiens
agatatgttacccag

SEQ ID NO: 931899 - DNA, 15 bp, Homo sapiens
gatatgttacccaga

SEQ ID NO: 931900 - DNA, 15 bp, Homo sapiens
atatgttacccagaa

SEQ ID NO: 931901 - DNA, 15 bp, Homo sapiens
tatgttacccagaat

SEQ ID NO: 931902 - DNA, 15 bp, Homo sapiens
atgttacccagaata

SEQ ID NO: 931903 - DNA, 15 bp, Homo sapiens
tgttacccagaatat

SEQ ID NO: 931904 - DNA, 15 bp, Homo sapiens
gttacccagaatata

SEQ ID NO: 931905 - DNA, 15 bp, Homo sapiens
ttacccagaatataa

SEQ ID NO: 931906 - DNA, 15 bp, Homo sapiens
tacccagaatataaa

SEQ ID NO: 931907 - DNA, 15 bp, Homo sapiens
acccagaatataaaa

SEQ ID NO: 931908 - DNA, 15 bp, Homo sapiens
cccagaatataaaag

SEQ ID NO: 931909 - DNA, 15 bp, Homo sapiens
ccagaatataaaagt

SEQ ID NO: 931910 - DNA, 15 bp, Homo sapiens
cagaatataaaagtg

SEQ ID NO: 931911 - DNA, 15 bp, Homo sapiens
agaatataaaagtgt

SEQ ID NO: 931912 - DNA, 15 bp, Homo sapiens
gaatataaaagtgtt

SEQ ID NO: 931913 - DNA, 15 bp, Homo sapiens
aatataaaagtgttc

SEQ ID NO: 931914 - DNA, 15 bp, Homo sapiens
atataaaagtgttcc

SEQ ID NO: 931915 - DNA, 15 bp, Homo sapiens
tataaaagtgttcca

SEQ ID NO: 931916 - DNA, 15 bp, Homo sapiens
ataaaagtgttccaa

SEQ ID NO: 931917 - DNA, 15 bp, Homo sapiens
taaaagtgttccaag

SEQ ID NO: 931918 - DNA, 15 bp, Homo sapiens
aaaagtgttccaagt

SEQ ID NO: 931919 - DNA, 15 bp, Homo sapiens
aaagtgttccaagtt

SEQ ID NO: 931920 - DNA, 15 bp, Homo sapiens
aagtgttccaagttt

SEQ ID NO: 931921 - DNA, 15 bp, Homo sapiens
agtgttccaagtttg

SEQ ID NO: 931922 - DNA, 15 bp, Homo sapiens
gtgttccaagtttga

SEQ ID NO: 931923 - DNA, 15 bp, Homo sapiens
tgttccaagtttgaa

SEQ ID NO: 931924 - DNA, 15 bp, Homo sapiens
gttccaagtttgaac

SEQ ID NO: 931925 - DNA, 15 bp, Homo sapiens
ttccaagtttgaact

SEQ ID NO: 931926 - DNA, 15 bp, Homo sapiens
tccaagtttgaactg

SEQ ID NO: 931927 - DNA, 15 bp, Homo sapiens
ccaagtttgaactga

SEQ ID NO: 931928 - DNA, 15 bp, Homo sapiens
caagtttgaactgaa

SEQ ID NO: 931929 - DNA, 15 bp, Homo sapiens
aagtttgaactgaag

SEQ ID NO: 931930 - DNA, 15 bp, Homo sapiens
agtttgaactgaaga

SEQ ID NO: 931931 - DNA, 15 bp, Homo sapiens
gtttgaactgaagaa

SEQ ID NO: 931932 - DNA, 15 bp, Homo sapiens
tttgaactgaagaac

SEQ ID NO: 931933 - DNA, 15 bp, Homo sapiens
ttgaactgaagaact

SEQ ID NO: 931934 - DNA, 15 bp, Homo sapiens
tgaactgaagaactg

SEQ ID NO: 931935 - DNA, 15 bp, Homo sapiens
gaactgaagaactgt

SEQ ID NO: 931936 - DNA, 15 bp, Homo sapiens
aactgaagaactgta

SEQ ID NO: 931937 - DNA, 15 bp, Homo sapiens
actgaagaactgtaa

SEQ ID NO: 931938 - DNA, 15 bp, Homo sapiens
ctgaagaactgtaaa

SEQ ID NO: 931939 - DNA, 15 bp, Homo sapiens
tgaagaactgtaaat

SEQ ID NO: 931940 - DNA, 15 bp, Homo sapiens
gaagaactgtaaatt

SEQ ID NO: 931941 - DNA, 15 bp, Homo sapiens
aagaactgtaaattc

SEQ ID NO: 931942 - DNA, 15 bp, Homo sapiens
agaactgtaaattca

SEQ ID NO: 931943 - DNA, 15 bp, Homo sapiens
gaactgtaaattcat

SEQ ID NO: 931944 - DNA, 15 bp, Homo sapiens
aactgtaaattcata

SEQ ID NO: 931945 - DNA, 15 bp, Homo sapiens
actgtaaattcatat

SEQ ID NO: 931946 - DNA, 15 bp, Homo sapiens
ctgtaaattcatatc

SEQ ID NO: 931947 - DNA, 15 bp, Homo sapiens
tgtaaattcatatcc

SEQ ID NO: 931948 - DNA, 15 bp, Homo sapiens
gtaaattcatatccc

SEQ ID NO: 931949 - DNA, 15 bp, Homo sapiens
taaattcatatccca

SEQ ID NO: 931950 - DNA, 15 bp, Homo sapiens
aaattcatatcccat

SEQ ID NO: 931951 - DNA, 15 bp, Homo sapiens
aattcatatcccatg

SEQ ID NO: 931952 - DNA, 15 bp, Homo sapiens
attcatatcccatgc

SEQ ID NO: 931953 - DNA, 15 bp, Homo sapiens
ttcatatcccatgct

SEQ ID NO: 931954 - DNA, 15 bp, Homo sapiens
tcatatcccatgctc

SEQ ID NO: 931955 - DNA, 15 bp, Homo sapiens
catatcccatgctct

SEQ ID NO: 931956 - DNA, 15 bp, Homo sapiens
atatcccatgctctt

SEQ ID NO: 931957 - DNA, 15 bp, Homo sapiens
tatcccatgctctta

SEQ ID NO: 931958 - DNA, 15 bp, Homo sapiens
atcccatgctcttaa

SEQ ID NO: 931959 - DNA, 15 bp, Homo sapiens
tcccatgctcttaac

SEQ ID NO: 931960 - DNA, 15 bp, Homo sapiens
cccatgctcttaacc

SEQ ID NO: 931961 - DNA, 15 bp, Homo sapiens
ccatgctcttaacca

SEQ ID NO: 931962 - DNA, 15 bp, Homo sapiens
catgctcttaaccat

SEQ ID NO: 931963 - DNA, 15 bp, Homo sapiens
atgctcttaaccatg

SEQ ID NO: 931964 - DNA, 15 bp, Homo sapiens
tgctcttaaccatga

SEQ ID NO: 931965 - DNA, 15 bp, Homo sapiens
gctcttaaccatgac

SEQ ID NO: 931966 - DNA, 15 bp, Homo sapiens
ctcttaaccatgaca

SEQ ID NO: 931967 - DNA, 15 bp, Homo sapiens
tcttaaccatgacat

SEQ ID NO: 931968 - DNA, 15 bp, Homo sapiens
cttaaccatgacatc

SEQ ID NO: 931969 - DNA, 15 bp, Homo sapiens
ttaaccatgacatca

SEQ ID NO: 931970 - DNA, 15 bp, Homo sapiens
taaccatgacatcac

SEQ ID NO: 931971 - DNA, 15 bp, Homo sapiens
aaccatgacatcaca

SEQ ID NO: 931972 - DNA, 15 bp, Homo sapiens
accatgacatcacac

SEQ ID NO: 931973 - DNA, 15 bp, Homo sapiens
ccatgacatcacact

SEQ ID NO: 931974 - DNA, 15 bp, Homo sapiens
catgacatcacactt

SEQ ID NO: 931975 - DNA, 15 bp, Homo sapiens
atgacatcacacttg

SEQ ID NO: 931976 - DNA, 15 bp, Homo sapiens
tgacatcacacttgc

SEQ ID NO: 931977 - DNA, 15 bp, Homo sapiens
gacatcacacttgcc

SEQ ID NO: 931978 - DNA, 15 bp, Homo sapiens
acatcacacttgcct

SEQ ID NO: 931979 - DNA, 15 bp, Homo sapiens
catcacacttgcctc

SEQ ID NO: 931980 - DNA, 15 bp, Homo sapiens
atcacacttgcctcc

SEQ ID NO: 931981 - DNA, 15 bp, Homo sapiens
tcacacttgcctcca

SEQ ID NO: 931982 - DNA, 15 bp, Homo sapiens
cacacttgcctccaa

SEQ ID NO: 931983 - DNA, 15 bp, Homo sapiens
acacttgcctccaag

SEQ ID NO: 931984 - DNA, 15 bp, Homo sapiens
cacttgcctccaaga

SEQ ID NO: 931985 - DNA, 15 bp, Homo sapiens
acttgcctccaagaa

SEQ ID NO: 931986 - DNA, 15 bp, Homo sapiens
cttgcctccaagaaa

SEQ ID NO: 931987 - DNA, 15 bp, Homo sapiens
ttgcctccaagaaaa

SEQ ID NO: 931988 - DNA, 15 bp, Homo sapiens
tgcctccaagaaaaa

SEQ ID NO: 931989 - DNA, 15 bp, Homo sapiens
gcctccaagaaaaat

SEQ ID NO: 931990 - DNA, 15 bp, Homo sapiens
cctccaagaaaaatt

SEQ ID NO: 931991 - DNA, 15 bp, Homo sapiens
ctccaagaaaaattc

SEQ ID NO: 931992 - DNA, 15 bp, Homo sapiens
tccaagaaaaattcc

SEQ ID NO: 931993 - DNA, 15 bp, Homo sapiens
ccaagaaaaattccc

SEQ ID NO: 931994 - DNA, 15 bp, Homo sapiens
caagaaaaattccca

SEQ ID NO: 931995 - DNA, 15 bp, Homo sapiens
aagaaaaattcccat

SEQ ID NO: 931996 - DNA, 15 bp, Homo sapiens
agaaaaattcccata

SEQ ID NO: 931997 - DNA, 15 bp, Homo sapiens
gaaaaattcccataa

SEQ ID NO: 931998 - DNA, 15 bp, Homo sapiens
aaaaattcccataat

SEQ ID NO: 931999 - DNA, 15 bp, Homo sapiens
aaaattcccataatg

SEQ ID NO: 932000 - DNA, 15 bp, Homo sapiens
aaattcccataatgt

SEQ ID NO: 932001 - DNA, 15 bp, Homo sapiens
aattcccataatgtt

SEQ ID NO: 932002 - DNA, 15 bp, Homo sapiens
attcccataatgttt

SEQ ID NO: 932003 - DNA, 15 bp, Homo sapiens
ttcccataatgtttt

SEQ ID NO: 932004 - DNA, 15 bp, Homo sapiens
tcccataatgttttc

SEQ ID NO: 932005 - DNA, 15 bp, Homo sapiens
cccataatgttttct

SEQ ID NO: 932006 - DNA, 15 bp, Homo sapiens
ccataatgttttcta

SEQ ID NO: 932007 - DNA, 15 bp, Homo sapiens
cataatgttttctac

SEQ ID NO: 932008 - DNA, 15 bp, Homo sapiens
ataatgttttctaca

SEQ ID NO: 932009 - DNA, 15 bp, Homo sapiens
taatgttttctacat

SEQ ID NO: 932010 - DNA, 15 bp, Homo sapiens
aatgttttctacatg

SEQ ID NO: 932011 - DNA, 15 bp, Homo sapiens
atgttttctacatga

SEQ ID NO: 932012 - DNA, 15 bp, Homo sapiens
tgttttctacatgat

SEQ ID NO: 932013 - DNA, 15 bp, Homo sapiens
gttttctacatgatg

SEQ ID NO: 932014 - DNA, 15 bp, Homo sapiens
ttttctacatgatgt

SEQ ID NO: 932015 - DNA, 15 bp, Homo sapiens
tttctacatgatgtc

SEQ ID NO: 932016 - DNA, 15 bp, Homo sapiens
ttctacatgatgtcg

SEQ ID NO: 932017 - DNA, 15 bp, Homo sapiens
tctacatgatgtcgg

SEQ ID NO: 932018 - DNA, 15 bp, Homo sapiens
ctacatgatgtcggt

SEQ ID NO: 932019 - DNA, 15 bp, Homo sapiens
tacatgatgtcggtt

SEQ ID NO: 932020 - DNA, 15 bp, Homo sapiens
acatgatgtcggttt

SEQ ID NO: 932021 - DNA, 15 bp, Homo sapiens
catgatgtcggtttc

SEQ ID NO: 932022 - DNA, 15 bp, Homo sapiens
atgatgtcggtttct

SEQ ID NO: 932023 - DNA, 15 bp, Homo sapiens
tgatgtcggtttctc

SEQ ID NO: 932024 - DNA, 15 bp, Homo sapiens
gatgtcggtttctct

SEQ ID NO: 932025 - DNA, 15 bp, Homo sapiens
atgtcggtttctctt

SEQ ID NO: 932026 - DNA, 15 bp, Homo sapiens
tgtcggtttctcttt

SEQ ID NO: 932027 - DNA, 15 bp, Homo sapiens
gtcggtttctctttt

SEQ ID NO: 932028 - DNA, 15 bp, Homo sapiens
tcggtttctctttta

SEQ ID NO: 932029 - DNA, 15 bp, Homo sapiens
cggtttctcttttaa

SEQ ID NO: 932030 - DNA, 15 bp, Homo sapiens
ggtttctcttttaac

SEQ ID NO: 932031 - DNA, 15 bp, Homo sapiens
gtttctcttttaact

SEQ ID NO: 932032 - DNA, 15 bp, Homo sapiens
tttctcttttaactc

SEQ ID NO: 932033 - DNA, 15 bp, Homo sapiens
ttctcttttaactct

SEQ ID NO: 932034 - DNA, 15 bp, Homo sapiens
tctcttttaactctt

SEQ ID NO: 932035 - DNA, 15 bp, Homo sapiens
ctcttttaactctta

SEQ ID NO: 932036 - DNA, 15 bp, Homo sapiens
tcttttaactcttaa

SEQ ID NO: 932037 - DNA, 15 bp, Homo sapiens
cttttaactcttaaa

SEQ ID NO: 932038 - DNA, 15 bp, Homo sapiens
ttttaactcttaaac

SEQ ID NO: 932039 - DNA, 15 bp, Homo sapiens
tttaactcttaaact

SEQ ID NO: 932040 - DNA, 15 bp, Homo sapiens
ttaactcttaaactg

SEQ ID NO: 932041 - DNA, 15 bp, Homo sapiens
taactcttaaactgc

SEQ ID NO: 932042 - DNA, 15 bp, Homo sapiens
aactcttaaactgcc

SEQ ID NO: 932043 - DNA, 15 bp, Homo sapiens
actcttaaactgcca

SEQ ID NO: 932044 - DNA, 15 bp, Homo sapiens
ctcttaaactgccac

SEQ ID NO: 932045 - DNA, 15 bp, Homo sapiens
tcttaaactgccacc

SEQ ID NO: 932046 - DNA, 15 bp, Homo sapiens
cttaaactgccacct

SEQ ID NO: 932047 - DNA, 15 bp, Homo sapiens
ttaaactgccacctt

SEQ ID NO: 932048 - DNA, 15 bp, Homo sapiens
taaactgccacctta

SEQ ID NO: 932049 - DNA, 15 bp, Homo sapiens
aaactgccaccttat

SEQ ID NO: 932050 - DNA, 15 bp, Homo sapiens
aactgccaccttatg

SEQ ID NO: 932051 - DNA, 15 bp, Homo sapiens
actgccaccttatga

SEQ ID NO: 932052 - DNA, 15 bp, Homo sapiens
ctgccaccttatgaa

SEQ ID NO: 932053 - DNA, 15 bp, Homo sapiens
tgccaccttatgaaa

SEQ ID NO: 932054 - DNA, 15 bp, Homo sapiens
gccaccttatgaaac

SEQ ID NO: 932055 - DNA, 15 bp, Homo sapiens
ccaccttatgaaaca

SEQ ID NO: 932056 - DNA, 15 bp, Homo sapiens
caccttatgaaacag

SEQ ID NO: 932057 - DNA, 15 bp, Homo sapiens
accttatgaaacagc

SEQ ID NO: 932058 - DNA, 15 bp, Homo sapiens
ccttatgaaacagca

SEQ ID NO: 932059 - DNA, 15 bp, Homo sapiens
cttatgaaacagcaa

SEQ ID NO: 932060 - DNA, 15 bp, Homo sapiens
ttatgaaacagcaaa

SEQ ID NO: 932061 - DNA, 15 bp, Homo sapiens
tatgaaacagcaaag

SEQ ID NO: 932062 - DNA, 15 bp, Homo sapiens
atgaaacagcaaaga

SEQ ID NO: 932063 - DNA, 15 bp, Homo sapiens
tgaaacagcaaagat

SEQ ID NO: 932064 - DNA, 15 bp, Homo sapiens
gaaacagcaaagata

SEQ ID NO: 932065 - DNA, 15 bp, Homo sapiens
aaacagcaaagatat

SEQ ID NO: 932066 - DNA, 15 bp, Homo sapiens
aacagcaaagatatt

SEQ ID NO: 932067 - DNA, 15 bp, Homo sapiens
acagcaaagatattc

SEQ ID NO: 932068 - DNA, 15 bp, Homo sapiens
cagcaaagatattcc

SEQ ID NO: 932069 - DNA, 15 bp, Homo sapiens
agcaaagatattcct

SEQ ID NO: 932070 - DNA, 15 bp, Homo sapiens
gcaaagatattccta

SEQ ID NO: 932071 - DNA, 15 bp, Homo sapiens
caaagatattcctaa

SEQ ID NO: 932072 - DNA, 15 bp, Homo sapiens
aaagatattcctaat

SEQ ID NO: 932073 - DNA, 15 bp, Homo sapiens
aagatattcctaatc

SEQ ID NO: 932074 - DNA, 15 bp, Homo sapiens
agatattcctaatct

SEQ ID NO: 932075 - DNA, 15 bp, Homo sapiens
gatattcctaatctc

SEQ ID NO: 932076 - DNA, 15 bp, Homo sapiens
atattcctaatctca

SEQ ID NO: 932077 - DNA, 15 bp, Homo sapiens
tattcctaatctcat

SEQ ID NO: 932078 - DNA, 15 bp, Homo sapiens
attcctaatctcatc

SEQ ID NO: 932079 - DNA, 15 bp, Homo sapiens
ttcctaatctcatct

SEQ ID NO: 932080 - DNA, 15 bp, Homo sapiens
tcctaatctcatctc

SEQ ID NO: 932081 - DNA, 15 bp, Homo sapiens
cctaatctcatctcc

SEQ ID NO: 932082 - DNA, 15 bp, Homo sapiens
ctaatctcatctcca

SEQ ID NO: 932083 - DNA, 15 bp, Homo sapiens
taatctcatctccaa

SEQ ID NO: 932084 - DNA, 15 bp, Homo sapiens
aatctcatctccaaa

SEQ ID NO: 932085 - DNA, 15 bp, Homo sapiens
atctcatctccaaat

SEQ ID NO: 932086 - DNA, 15 bp, Homo sapiens
tctcatctccaaatg

SEQ ID NO: 932087 - DNA, 15 bp, Homo sapiens
ctcatctccaaatga

SEQ ID NO: 932088 - DNA, 15 bp, Homo sapiens
tcatctccaaatgat

SEQ ID NO: 932089 - DNA, 15 bp, Homo sapiens
catctccaaatgatt

SEQ ID NO: 932090 - DNA, 15 bp, Homo sapiens
atctccaaatgattt

SEQ ID NO: 932091 - DNA, 15 bp, Homo sapiens
tctccaaatgatttc

SEQ ID NO: 932092 - DNA, 15 bp, Homo sapiens
ctccaaatgatttct

SEQ ID NO: 932093 - DNA, 15 bp, Homo sapiens
tccaaatgatttctt

SEQ ID NO: 932094 - DNA, 15 bp, Homo sapiens
ccaaatgatttcttt

SEQ ID NO: 932095 - DNA, 15 bp, Homo sapiens
caaatgatttctttc

SEQ ID NO: 932096 - DNA, 15 bp, Homo sapiens
aaatgatttctttct

SEQ ID NO: 932097 - DNA, 15 bp, Homo sapiens
aatgatttctttctg

SEQ ID NO: 932098 - DNA, 15 bp, Homo sapiens
atgatttctttctga

SEQ ID NO: 932099 - DNA, 15 bp, Homo sapiens
tgatttctttctgac

SEQ ID NO: 932100 - DNA, 15 bp, Homo sapiens
gatttctttctgact

SEQ ID NO: 932101 - DNA, 15 bp, Homo sapiens
atttctttctgactt

SEQ ID NO: 932102 - DNA, 15 bp, Homo sapiens
tttctttctgactta

SEQ ID NO: 932103 - DNA, 15 bp, Homo sapiens
ttctttctgacttac

SEQ ID NO: 932104 - DNA, 15 bp, Homo sapiens
tctttctgacttaca

SEQ ID NO: 932105 - DNA, 15 bp, Homo sapiens
ctttctgacttacaa

SEQ ID NO: 932106 - DNA, 15 bp, Homo sapiens
tttctgacttacaaa

SEQ ID NO: 932107 - DNA, 15 bp, Homo sapiens
ttctgacttacaaaa

SEQ ID NO: 932108 - DNA, 15 bp, Homo sapiens
tctgacttacaaaat

SEQ ID NO: 932109 - DNA, 15 bp, Homo sapiens
ctgacttacaaaatc

SEQ ID NO: 932110 - DNA, 15 bp, Homo sapiens
tgacttacaaaatcc

SEQ ID NO: 932111 - DNA, 15 bp, Homo sapiens
gacttacaaaatccc

SEQ ID NO: 932112 - DNA, 15 bp, Homo sapiens
acttacaaaatccct

SEQ ID NO: 932113 - DNA, 15 bp, Homo sapiens
cttacaaaatccctt

SEQ ID NO: 932114 - DNA, 15 bp, Homo sapiens
ttacaaaatcccttg

SEQ ID NO: 932115 - DNA, 15 bp, Homo sapiens
tacaaaatcccttga

SEQ ID NO: 932116 - DNA, 15 bp, Homo sapiens
acaaaatcccttgag

SEQ ID NO: 932117 - DNA, 15 bp, Homo sapiens
caaaatcccttgagt

SEQ ID NO: 932118 - DNA, 15 bp, Homo sapiens
aaaatcccttgagtc

SEQ ID NO: 932119 - DNA, 15 bp, Homo sapiens
aaatcccttgagtct

SEQ ID NO: 932120 - DNA, 15 bp, Homo sapiens
aatcccttgagtctc

SEQ ID NO: 932121 - DNA, 15 bp, Homo sapiens
atcccttgagtctca

SEQ ID NO: 932122 - DNA, 15 bp, Homo sapiens
tcccttgagtctcag

SEQ ID NO: 932123 - DNA, 15 bp, Homo sapiens
cccttgagtctcagg

SEQ ID NO: 932124 - DNA, 15 bp, Homo sapiens
ccttgagtctcaggg

SEQ ID NO: 932125 - DNA, 15 bp, Homo sapiens
cttgagtctcagggt

SEQ ID NO: 932126 - DNA, 15 bp, Homo sapiens
ttgagtctcagggta

SEQ ID NO: 932127 - DNA, 15 bp, Homo sapiens
tgagtctcagggtag

SEQ ID NO: 932128 - DNA, 15 bp, Homo sapiens
gagtctcagggtagg

SEQ ID NO: 932129 - DNA, 15 bp, Homo sapiens
agtctcagggtaggc

SEQ ID NO: 932130 - DNA, 15 bp, Homo sapiens
gtctcagggtaggct

SEQ ID NO: 932131 - DNA, 15 bp, Homo sapiens
tctcagggtaggctt

SEQ ID NO: 932132 - DNA, 15 bp, Homo sapiens
ctcagggtaggctta

SEQ ID NO: 932133 - DNA, 15 bp, Homo sapiens
tcagggtaggcttag

SEQ ID NO: 932134 - DNA, 15 bp, Homo sapiens
cagggtaggcttagc

SEQ ID NO: 932135 - DNA, 15 bp, Homo sapiens
agggtaggcttagca

SEQ ID NO: 932136 - DNA, 15 bp, Homo sapiens
gggtaggcttagcaa

SEQ ID NO: 932137 - DNA, 15 bp, Homo sapiens
ggtaggcttagcaaa

SEQ ID NO: 932138 - DNA, 15 bp, Homo sapiens
gtaggcttagcaaag

SEQ ID NO: 932139 - DNA, 15 bp, Homo sapiens
taggcttagcaaagt

SEQ ID NO: 932140 - DNA, 15 bp, Homo sapiens
aggcttagcaaagta

SEQ ID NO: 932141 - DNA, 15 bp, Homo sapiens
ggcttagcaaagtac

SEQ ID NO: 932142 - DNA, 15 bp, Homo sapiens
gcttagcaaagtaca

SEQ ID NO: 932143 - DNA, 15 bp, Homo sapiens
cttagcaaagtacaa

SEQ ID NO: 932144 - DNA, 15 bp, Homo sapiens
ttagcaaagtacaaa

SEQ ID NO: 932145 - DNA, 15 bp, Homo sapiens
tagcaaagtacaaat

SEQ ID NO: 932146 - DNA, 15 bp, Homo sapiens
agcaaagtacaaatt

SEQ ID NO: 932147 - DNA, 15 bp, Homo sapiens
gcaaagtacaaattg

SEQ ID NO: 932148 - DNA, 15 bp, Homo sapiens
caaagtacaaattga

SEQ ID NO: 932149 - DNA, 15 bp, Homo sapiens
aaagtacaaattgaa

SEQ ID NO: 932150 - DNA, 15 bp, Homo sapiens
aagtacaaattgaag

SEQ ID NO: 932151 - DNA, 15 bp, Homo sapiens
agtacaaattgaaga

SEQ ID NO: 932152 - DNA, 15 bp, Homo sapiens
gtacaaattgaagac

SEQ ID NO: 932153 - DNA, 15 bp, Homo sapiens
tacaaattgaagaca

SEQ ID NO: 932154 - DNA, 15 bp, Homo sapiens
acaaattgaagacag

SEQ ID NO: 932155 - DNA, 15 bp, Homo sapiens
caaattgaagacaga

SEQ ID NO: 932156 - DNA, 15 bp, Homo sapiens
aaattgaagacagat

SEQ ID NO: 932157 - DNA, 15 bp, Homo sapiens
aattgaagacagatt

SEQ ID NO: 932158 - DNA, 15 bp, Homo sapiens
attgaagacagatta

SEQ ID NO: 932159 - DNA, 15 bp, Homo sapiens
ttgaagacagattat

SEQ ID NO: 932160 - DNA, 15 bp, Homo sapiens
tgaagacagattatg

SEQ ID NO: 932161 - DNA, 15 bp, Homo sapiens
gaagacagattatgt

SEQ ID NO: 932162 - DNA, 15 bp, Homo sapiens
aagacagattatgtt

SEQ ID NO: 932163 - DNA, 15 bp, Homo sapiens
agacagattatgttt

SEQ ID NO: 932164 - DNA, 15 bp, Homo sapiens
gacagattatgtttt

SEQ ID NO: 932165 - DNA, 15 bp, Homo sapiens
acagattatgttttc

SEQ ID NO: 932166 - DNA, 15 bp, Homo sapiens
cagattatgttttca

SEQ ID NO: 932167 - DNA, 15 bp, Homo sapiens
agattatgttttcat

SEQ ID NO: 932168 - DNA, 15 bp, Homo sapiens
gattatgttttcatt

SEQ ID NO: 932169 - DNA, 15 bp, Homo sapiens
attatgttttcattc

SEQ ID NO: 932170 - DNA, 15 bp, Homo sapiens
ttatgttttcattcc

SEQ ID NO: 932171 - DNA, 15 bp, Homo sapiens
tatgttttcattcct

SEQ ID NO: 932172 - DNA, 15 bp, Homo sapiens
atgttttcattcctt

SEQ ID NO: 932173 - DNA, 15 bp, Homo sapiens
tgttttcattcctta

SEQ ID NO: 932174 - DNA, 15 bp, Homo sapiens
gttttcattccttaa

SEQ ID NO: 932175 - DNA, 15 bp, Homo sapiens
ttttcattccttaag

SEQ ID NO: 932176 - DNA, 15 bp, Homo sapiens
tttcattccttaagt

SEQ ID NO: 932177 - DNA, 15 bp, Homo sapiens
ttcattccttaagtc

SEQ ID NO: 932178 - DNA, 15 bp, Homo sapiens
tcattccttaagtca

SEQ ID NO: 932179 - DNA, 15 bp, Homo sapiens
cattccttaagtcat

SEQ ID NO: 932180 - DNA, 15 bp, Homo sapiens
attccttaagtcatt

SEQ ID NO: 932181 - DNA, 15 bp, Homo sapiens
ttccttaagtcattt

SEQ ID NO: 932182 - DNA, 15 bp, Homo sapiens
tccttaagtcatttg

SEQ ID NO: 932183 - DNA, 15 bp, Homo sapiens
ccttaagtcatttgt

SEQ ID NO: 932184 - DNA, 15 bp, Homo sapiens
cttaagtcatttgta

SEQ ID NO: 932185 - DNA, 15 bp, Homo sapiens
ttaagtcatttgtac

SEQ ID NO: 932186 - DNA, 15 bp, Homo sapiens
taagtcatttgtact

SEQ ID NO: 932187 - DNA, 15 bp, Homo sapiens
aagtcatttgtacta

SEQ ID NO: 932188 - DNA, 15 bp, Homo sapiens
agtcatttgtactac

SEQ ID NO: 932189 - DNA, 15 bp, Homo sapiens
gtcatttgtactact

SEQ ID NO: 932190 - DNA, 15 bp, Homo sapiens
tcatttgtactacta

SEQ ID NO: 932191 - DNA, 15 bp, Homo sapiens
catttgtactactag

SEQ ID NO: 932192 - DNA, 15 bp, Homo sapiens
atttgtactactaga

SEQ ID NO: 932193 - DNA, 15 bp, Homo sapiens
tttgtactactagaa

SEQ ID NO: 932194 - DNA, 15 bp, Homo sapiens
ttgtactactagaaa

SEQ ID NO: 932195 - DNA, 15 bp, Homo sapiens
tgtactactagaaag

SEQ ID NO: 932196 - DNA, 15 bp, Homo sapiens
gtactactagaaaga

SEQ ID NO: 932197 - DNA, 15 bp, Homo sapiens
tactactagaaagat

SEQ ID NO: 932198 - DNA, 15 bp, Homo sapiens
actactagaaagatt

SEQ ID NO: 932199 - DNA, 15 bp, Homo sapiens
ctactagaaagattg

SEQ ID NO: 932200 - DNA, 15 bp, Homo sapiens
tactagaaagattga

SEQ ID NO: 932201 - DNA, 15 bp, Homo sapiens
actagaaagattgaa

SEQ ID NO: 932202 - DNA, 15 bp, Homo sapiens
ctagaaagattgaac

SEQ ID NO: 932203 - DNA, 15 bp, Homo sapiens
tagaaagattgaact

SEQ ID NO: 932204 - DNA, 15 bp, Homo sapiens
agaaagattgaactt

SEQ ID NO: 932205 - DNA, 15 bp, Homo sapiens
gaaagattgaacttt

SEQ ID NO: 932206 - DNA, 15 bp, Homo sapiens
aaagattgaacttta

SEQ ID NO: 932207 - DNA, 15 bp, Homo sapiens
aagattgaactttac

SEQ ID NO: 932208 - DNA, 15 bp, Homo sapiens
agattgaactttaca

SEQ ID NO: 932209 - DNA, 15 bp, Homo sapiens
gattgaactttacat

SEQ ID NO: 932210 - DNA, 15 bp, Homo sapiens
attgaactttacata

SEQ ID NO: 932211 - DNA, 15 bp, Homo sapiens
ttgaactttacatag

SEQ ID NO: 932212 - DNA, 15 bp, Homo sapiens
tgaactttacatagc

SEQ ID NO: 932213 - DNA, 15 bp, Homo sapiens
gaactttacatagct

SEQ ID NO: 932214 - DNA, 15 bp, Homo sapiens
aactttacatagctg

SEQ ID NO: 932215 - DNA, 15 bp, Homo sapiens
actttacatagctgc

SEQ ID NO: 932216 - DNA, 15 bp, Homo sapiens
ctttacatagctgct

SEQ ID NO: 932217 - DNA, 15 bp, Homo sapiens
tttacatagctgctc

SEQ ID NO: 932218 - DNA, 15 bp, Homo sapiens
ttacatagctgctct

SEQ ID NO: 932219 - DNA, 15 bp, Homo sapiens
tacatagctgctctc

SEQ ID NO: 932220 - DNA, 15 bp, Homo sapiens
acatagctgctctct

SEQ ID NO: 932221 - DNA, 15 bp, Homo sapiens
catagctgctctcta

SEQ ID NO: 932222 - DNA, 15 bp, Homo sapiens
atagctgctctctag

SEQ ID NO: 932223 - DNA, 15 bp, Homo sapiens
tagctgctctctagg

SEQ ID NO: 932224 - DNA, 15 bp, Homo sapiens
agctgctctctaggg

SEQ ID NO: 932225 - DNA, 15 bp, Homo sapiens
gctgctctctaggga

SEQ ID NO: 932226 - DNA, 15 bp, Homo sapiens
ctgctctctagggac

SEQ ID NO: 932227 - DNA, 15 bp, Homo sapiens
tgctctctagggacc

SEQ ID NO: 932228 - DNA, 15 bp, Homo sapiens
gctctctagggacct

SEQ ID NO: 932229 - DNA, 15 bp, Homo sapiens
ctctctagggaccta

SEQ ID NO: 932230 - DNA, 15 bp, Homo sapiens
tctctagggacctag

SEQ ID NO: 932231 - DNA, 15 bp, Homo sapiens
ctctagggacctagc

SEQ ID NO: 932232 - DNA, 15 bp, Homo sapiens
tctagggacctagct

SEQ ID NO: 932233 - DNA, 15 bp, Homo sapiens
ctagggacctagctg

SEQ ID NO: 932234 - DNA, 15 bp, Homo sapiens
tagggacctagctga

SEQ ID NO: 932235 - DNA, 15 bp, Homo sapiens
agggacctagctgat

SEQ ID NO: 932236 - DNA, 15 bp, Homo sapiens
gggacctagctgata

SEQ ID NO: 932237 - DNA, 15 bp, Homo sapiens
ggacctagctgatac

SEQ ID NO: 932238 - DNA, 15 bp, Homo sapiens
gacctagctgatacc

SEQ ID NO: 932239 - DNA, 15 bp, Homo sapiens
acctagctgatacca

SEQ ID NO: 932240 - DNA, 15 bp, Homo sapiens
cctagctgataccaa

SEQ ID NO: 932241 - DNA, 15 bp, Homo sapiens
ctagctgataccaaa

SEQ ID NO: 932242 - DNA, 15 bp, Homo sapiens
tagctgataccaaaa

SEQ ID NO: 932243 - DNA, 15 bp, Homo sapiens
agctgataccaaaat

SEQ ID NO: 932244 - DNA, 15 bp, Homo sapiens
gctgataccaaaatg

SEQ ID NO: 932245 - DNA, 15 bp, Homo sapiens
ctgataccaaaatga

SEQ ID NO: 932246 - DNA, 15 bp, Homo sapiens
tgataccaaaatgat

SEQ ID NO: 932247 - DNA, 15 bp, Homo sapiens
gataccaaaatgata

SEQ ID NO: 932248 - DNA, 15 bp, Homo sapiens
ataccaaaatgatac

SEQ ID NO: 932249 - DNA, 15 bp, Homo sapiens
taccaaaatgatacc

SEQ ID NO: 932250 - DNA, 15 bp, Homo sapiens
accaaaatgatacca

SEQ ID NO: 932251 - DNA, 15 bp, Homo sapiens
ccaaaatgataccaa

SEQ ID NO: 932252 - DNA, 15 bp, Homo sapiens
caaaatgataccaat

SEQ ID NO: 932253 - DNA, 15 bp, Homo sapiens
aaaatgataccaatg

SEQ ID NO: 932254 - DNA, 15 bp, Homo sapiens
aaatgataccaatgc

SEQ ID NO: 932255 - DNA, 15 bp, Homo sapiens
aatgataccaatgca

SEQ ID NO: 932256 - DNA, 15 bp, Homo sapiens
atgataccaatgcat

SEQ ID NO: 932257 - DNA, 15 bp, Homo sapiens
tgataccaatgcatt

SEQ ID NO: 932258 - DNA, 15 bp, Homo sapiens
gataccaatgcatta

SEQ ID NO: 932259 - DNA, 15 bp, Homo sapiens
ataccaatgcattaa

SEQ ID NO: 932260 - DNA, 15 bp, Homo sapiens
taccaatgcattaaa

SEQ ID NO: 932261 - DNA, 15 bp, Homo sapiens
accaatgcattaaaa

SEQ ID NO: 932262 - DNA, 15 bp, Homo sapiens
ccaatgcattaaaag

SEQ ID NO: 932263 - DNA, 15 bp, Homo sapiens
caatgcattaaaaga

SEQ ID NO: 932264 - DNA, 15 bp, Homo sapiens
aatgcattaaaagac

SEQ ID NO: 932265 - DNA, 15 bp, Homo sapiens
atgcattaaaagaca

SEQ ID NO: 932266 - DNA, 15 bp, Homo sapiens
tgcattaaaagacaa

SEQ ID NO: 932267 - DNA, 15 bp, Homo sapiens
gcattaaaagacaac

SEQ ID NO: 932268 - DNA, 15 bp, Homo sapiens
cattaaaagacaaca

SEQ ID NO: 932269 - DNA, 15 bp, Homo sapiens
attaaaagacaacag

SEQ ID NO: 932270 - DNA, 15 bp, Homo sapiens
ttaaaagacaacagt

SEQ ID NO: 932271 - DNA, 15 bp, Homo sapiens
taaaagacaacagta

SEQ ID NO: 932272 - DNA, 15 bp, Homo sapiens
aaaagacaacagtat

SEQ ID NO: 932273 - DNA, 15 bp, Homo sapiens
aaagacaacagtatt

SEQ ID NO: 932274 - DNA, 15 bp, Homo sapiens
aagacaacagtatta

SEQ ID NO: 932275 - DNA, 15 bp, Homo sapiens
agacaacagtattac

SEQ ID NO: 932276 - DNA, 15 bp, Homo sapiens
gacaacagtattacc

SEQ ID NO: 932277 - DNA, 15 bp, Homo sapiens
acaacagtattacct

SEQ ID NO: 932278 - DNA, 15 bp, Homo sapiens
caacagtattacctc

SEQ ID NO: 932279 - DNA, 15 bp, Homo sapiens
aacagtattacctca

SEQ ID NO: 932280 - DNA, 15 bp, Homo sapiens
acagtattacctcat

SEQ ID NO: 932281 - DNA, 15 bp, Homo sapiens
cagtattacctcatt

SEQ ID NO: 932282 - DNA, 15 bp, Homo sapiens
agtattacctcattt

SEQ ID NO: 932283 - DNA, 15 bp, Homo sapiens
gtattacctcatttt

SEQ ID NO: 932284 - DNA, 15 bp, Homo sapiens
tattacctcattttg

SEQ ID NO: 932285 - DNA, 15 bp, Homo sapiens
attacctcattttgt

SEQ ID NO: 932286 - DNA, 15 bp, Homo sapiens
ttacctcattttgta

SEQ ID NO: 932287 - DNA, 15 bp, Homo sapiens
tacctcattttgtat

SEQ ID NO: 932288 - DNA, 15 bp, Homo sapiens
acctcattttgtata

SEQ ID NO: 932289 - DNA, 15 bp, Homo sapiens
cctcattttgtataa

SEQ ID NO: 932290 - DNA, 15 bp, Homo sapiens
ctcattttgtataac

SEQ ID NO: 932291 - DNA, 15 bp, Homo sapiens
tcattttgtataaca

SEQ ID NO: 932292 - DNA, 15 bp, Homo sapiens
cattttgtataacac

SEQ ID NO: 932293 - DNA, 15 bp, Homo sapiens
attttgtataacact

SEQ ID NO: 932294 - DNA, 15 bp, Homo sapiens
ttttgtataacactt

SEQ ID NO: 932295 - DNA, 15 bp, Homo sapiens
tttgtataacacttt

SEQ ID NO: 932296 - DNA, 15 bp, Homo sapiens
ttgtataacacttta

SEQ ID NO: 932297 - DNA, 15 bp, Homo sapiens
tgtataacactttac

SEQ ID NO: 932298 - DNA, 15 bp, Homo sapiens
gtataacactttact

SEQ ID NO: 932299 - DNA, 15 bp, Homo sapiens
tataacactttacta

SEQ ID NO: 932300 - DNA, 15 bp, Homo sapiens
ataacactttactat

SEQ ID NO: 932301 - DNA, 15 bp, Homo sapiens
taacactttactatt

SEQ ID NO: 932302 - DNA, 15 bp, Homo sapiens
aacactttactatta

SEQ ID NO: 932303 - DNA, 15 bp, Homo sapiens
acactttactattag

SEQ ID NO: 932304 - DNA, 15 bp, Homo sapiens
cactttactattagc

SEQ ID NO: 932305 - DNA, 15 bp, Homo sapiens
actttactattagca

SEQ ID NO: 932306 - DNA, 15 bp, Homo sapiens
ctttactattagcac

SEQ ID NO: 932307 - DNA, 15 bp, Homo sapiens
tttactattagcaca

SEQ ID NO: 932308 - DNA, 15 bp, Homo sapiens
ttactattagcacag

SEQ ID NO: 932309 - DNA, 15 bp, Homo sapiens
tactattagcacaga

SEQ ID NO: 932310 - DNA, 15 bp, Homo sapiens
actattagcacagaa

SEQ ID NO: 932311 - DNA, 15 bp, Homo sapiens
ctattagcacagaac

SEQ ID NO: 932312 - DNA, 15 bp, Homo sapiens
tattagcacagaact

SEQ ID NO: 932313 - DNA, 15 bp, Homo sapiens
attagcacagaactt

SEQ ID NO: 932314 - DNA, 15 bp, Homo sapiens
ttagcacagaacttt

SEQ ID NO: 932315 - DNA, 15 bp, Homo sapiens
tagcacagaactttc

SEQ ID NO: 932316 - DNA, 15 bp, Homo sapiens
agcacagaactttca

SEQ ID NO: 932317 - DNA, 15 bp, Homo sapiens
gcacagaactttcaa

SEQ ID NO: 932318 - DNA, 15 bp, Homo sapiens
cacagaactttcaaa

SEQ ID NO: 932319 - DNA, 15 bp, Homo sapiens
acagaactttcaaaa

SEQ ID NO: 932320 - DNA, 15 bp, Homo sapiens
cagaactttcaaaat

SEQ ID NO: 932321 - DNA, 15 bp, Homo sapiens
agaactttcaaaatg

SEQ ID NO: 932322 - DNA, 15 bp, Homo sapiens
gaactttcaaaatga

SEQ ID NO: 932323 - DNA, 15 bp, Homo sapiens
aactttcaaaatgaa

SEQ ID NO: 932324 - DNA, 15 bp, Homo sapiens
actttcaaaatgaat

SEQ ID NO: 932325 - DNA, 15 bp, Homo sapiens
ctttcaaaatgaata

SEQ ID NO: 932326 - DNA, 15 bp, Homo sapiens
tttcaaaatgaatat

SEQ ID NO: 932327 - DNA, 15 bp, Homo sapiens
ttcaaaatgaatata

SEQ ID NO: 932328 - DNA, 15 bp, Homo sapiens
tcaaaatgaatataa

SEQ ID NO: 932329 - DNA, 15 bp, Homo sapiens
caaaatgaatataaa

SEQ ID NO: 932330 - DNA, 15 bp, Homo sapiens
aaaatgaatataaaa

SEQ ID NO: 932331 - DNA, 15 bp, Homo sapiens
aaatgaatataaaac

SEQ ID NO: 932332 - DNA, 15 bp, Homo sapiens
aatgaatataaaact

SEQ ID NO: 932333 - DNA, 15 bp, Homo sapiens
atgaatataaaactc

SEQ ID NO: 932334 - DNA, 15 bp, Homo sapiens
tgaatataaaactca

SEQ ID NO: 932335 - DNA, 15 bp, Homo sapiens
gaatataaaactcat

SEQ ID NO: 932336 - DNA, 15 bp, Homo sapiens
aatataaaactcatt

SEQ ID NO: 932337 - DNA, 15 bp, Homo sapiens
atataaaactcattc

SEQ ID NO: 932338 - DNA, 15 bp, Homo sapiens
tataaaactcattca

SEQ ID NO: 932339 - DNA, 15 bp, Homo sapiens
ataaaactcattcat

SEQ ID NO: 932340 - DNA, 15 bp, Homo sapiens
taaaactcattcatc

SEQ ID NO: 932341 - DNA, 15 bp, Homo sapiens
aaaactcattcatct

SEQ ID NO: 932342 - DNA, 15 bp, Homo sapiens
aaactcattcatctg

SEQ ID NO: 932343 - DNA, 15 bp, Homo sapiens
aactcattcatctgg

SEQ ID NO: 932344 - DNA, 15 bp, Homo sapiens
actcattcatctggg

SEQ ID NO: 932345 - DNA, 15 bp, Homo sapiens
ctcattcatctgggc

SEQ ID NO: 932346 - DNA, 15 bp, Homo sapiens
tcattcatctgggct

SEQ ID NO: 932347 - DNA, 15 bp, Homo sapiens
cattcatctgggctt

SEQ ID NO: 932348 - DNA, 15 bp, Homo sapiens
attcatctgggcttt

SEQ ID NO: 932349 - DNA, 15 bp, Homo sapiens
ttcatctgggctttc

SEQ ID NO: 932350 - DNA, 15 bp, Homo sapiens
tcatctgggctttcc

SEQ ID NO: 932351 - DNA, 15 bp, Homo sapiens
catctgggctttccc

SEQ ID NO: 932352 - DNA, 15 bp, Homo sapiens
atctgggctttccct

SEQ ID NO: 932353 - DNA, 15 bp, Homo sapiens
tctgggctttcccta

SEQ ID NO: 932354 - DNA, 15 bp, Homo sapiens
ctgggctttccctat

SEQ ID NO: 932355 - DNA, 15 bp, Homo sapiens
tgggctttccctata

SEQ ID NO: 932356 - DNA, 15 bp, Homo sapiens
gggctttccctatag

SEQ ID NO: 932357 - DNA, 15 bp, Homo sapiens
ggctttccctatagg

SEQ ID NO: 932358 - DNA, 15 bp, Homo sapiens
gctttccctataggc

SEQ ID NO: 932359 - DNA, 15 bp, Homo sapiens
ctttccctataggca

SEQ ID NO: 932360 - DNA, 15 bp, Homo sapiens
tttccctataggcat

SEQ ID NO: 932361 - DNA, 15 bp, Homo sapiens
ttccctataggcatc

SEQ ID NO: 932362 - DNA, 15 bp, Homo sapiens
tccctataggcatct

SEQ ID NO: 932363 - DNA, 15 bp, Homo sapiens
ccctataggcatctg

SEQ ID NO: 932364 - DNA, 15 bp, Homo sapiens
cctataggcatctgg

SEQ ID NO: 932365 - DNA, 15 bp, Homo sapiens
ctataggcatctgga

SEQ ID NO: 932366 - DNA, 15 bp, Homo sapiens
tataggcatctggaa

SEQ ID NO: 932367 - DNA, 15 bp, Homo sapiens
ataggcatctggaag

SEQ ID NO: 932368 - DNA, 15 bp, Homo sapiens
taggcatctggaagc

SEQ ID NO: 932369 - DNA, 15 bp, Homo sapiens
aggcatctggaagct

SEQ ID NO: 932370 - DNA, 15 bp, Homo sapiens
ggcatctggaagctt

SEQ ID NO: 932371 - DNA, 15 bp, Homo sapiens
gcatctggaagcttc

SEQ ID NO: 932372 - DNA, 15 bp, Homo sapiens
catctggaagcttct

SEQ ID NO: 932373 - DNA, 15 bp, Homo sapiens
atctggaagcttctg

SEQ ID NO: 932374 - DNA, 15 bp, Homo sapiens
tctggaagcttctga

SEQ ID NO: 932375 - DNA, 15 bp, Homo sapiens
ctggaagcttctgaa

SEQ ID NO: 932376 - DNA, 15 bp, Homo sapiens
tggaagcttctgaag

SEQ ID NO: 932377 - DNA, 15 bp, Homo sapiens
ggaagcttctgaagc

SEQ ID NO: 932378 - DNA, 15 bp, Homo sapiens
gaagcttctgaagct

SEQ ID NO: 932379 - DNA, 15 bp, Homo sapiens
aagcttctgaagcta

SEQ ID NO: 932380 - DNA, 15 bp, Homo sapiens
agcttctgaagctat

SEQ ID NO: 932381 - DNA, 15 bp, Homo sapiens
gcttctgaagctatc

SEQ ID NO: 932382 - DNA, 15 bp, Homo sapiens
cttctgaagctatct

SEQ ID NO: 932383 - DNA, 15 bp, Homo sapiens
ttctgaagctatctt

SEQ ID NO: 932384 - DNA, 15 bp, Homo sapiens
tctgaagctatctta

SEQ ID NO: 932385 - DNA, 15 bp, Homo sapiens
ctgaagctatcttag

SEQ ID NO: 932386 - DNA, 15 bp, Homo sapiens
tgaagctatcttagc

SEQ ID NO: 932387 - DNA, 15 bp, Homo sapiens
gaagctatcttagca

SEQ ID NO: 932388 - DNA, 15 bp, Homo sapiens
aagctatcttagcat

SEQ ID NO: 932389 - DNA, 15 bp, Homo sapiens
agctatcttagcatg

SEQ ID NO: 932390 - DNA, 15 bp, Homo sapiens
gctatcttagcatgg

SEQ ID NO: 932391 - DNA, 15 bp, Homo sapiens
ctatcttagcatggt

SEQ ID NO: 932392 - DNA, 15 bp, Homo sapiens
tatcttagcatggtg

SEQ ID NO: 932393 - DNA, 15 bp, Homo sapiens
atcttagcatggtgc

SEQ ID NO: 932394 - DNA, 15 bp, Homo sapiens
tcttagcatggtgca

SEQ ID NO: 932395 - DNA, 15 bp, Homo sapiens
cttagcatggtgcaa

SEQ ID NO: 932396 - DNA, 15 bp, Homo sapiens
ttagcatggtgcaaa

SEQ ID NO: 932397 - DNA, 15 bp, Homo sapiens
tagcatggtgcaaag

SEQ ID NO: 932398 - DNA, 15 bp, Homo sapiens
agcatggtgcaaagg

SEQ ID NO: 932399 - DNA, 15 bp, Homo sapiens
gcatggtgcaaagga

SEQ ID NO: 932400 - DNA, 15 bp, Homo sapiens
catggtgcaaaggag

SEQ ID NO: 932401 - DNA, 15 bp, Homo sapiens
atggtgcaaaggagt

SEQ ID NO: 932402 - DNA, 15 bp, Homo sapiens
tggtgcaaaggagtg

SEQ ID NO: 932403 - DNA, 15 bp, Homo sapiens
ggtgcaaaggagtgt

SEQ ID NO: 932404 - DNA, 15 bp, Homo sapiens
gtgcaaaggagtgtt

SEQ ID NO: 932405 - DNA, 15 bp, Homo sapiens
tgcaaaggagtgttt

SEQ ID NO: 932406 - DNA, 15 bp, Homo sapiens
gcaaaggagtgtttt

SEQ ID NO: 932407 - DNA, 15 bp, Homo sapiens
caaaggagtgtttta

SEQ ID NO: 932408 - DNA, 15 bp, Homo sapiens
aaaggagtgttttaa

SEQ ID NO: 932409 - DNA, 15 bp, Homo sapiens
aaggagtgttttaag

SEQ ID NO: 932410 - DNA, 15 bp, Homo sapiens
aggagtgttttaagg

SEQ ID NO: 932411 - DNA, 15 bp, Homo sapiens
ggagtgttttaaggg

SEQ ID NO: 932412 - DNA, 15 bp, Homo sapiens
gagtgttttaagggt

SEQ ID NO: 932413 - DNA, 15 bp, Homo sapiens
agtgttttaagggtg

SEQ ID NO: 932414 - DNA, 15 bp, Homo sapiens
gtgttttaagggtgt

SEQ ID NO: 932415 - DNA, 15 bp, Homo sapiens
tgttttaagggtgtt

SEQ ID NO: 932416 - DNA, 15 bp, Homo sapiens
gttttaagggtgtta

SEQ ID NO: 932417 - DNA, 15 bp, Homo sapiens
ttttaagggtgttaa

SEQ ID NO: 932418 - DNA, 15 bp, Homo sapiens
tttaagggtgttaaa

SEQ ID NO: 932419 - DNA, 15 bp, Homo sapiens
ttaagggtgttaaac

SEQ ID NO: 932420 - DNA, 15 bp, Homo sapiens
taagggtgttaaact

SEQ ID NO: 932421 - DNA, 15 bp, Homo sapiens
aagggtgttaaactg

SEQ ID NO: 932422 - DNA, 15 bp, Homo sapiens
agggtgttaaactga

SEQ ID NO: 932423 - DNA, 15 bp, Homo sapiens
gggtgttaaactgat

SEQ ID NO: 932424 - DNA, 15 bp, Homo sapiens
ggtgttaaactgatg

SEQ ID NO: 932425 - DNA, 15 bp, Homo sapiens
gtgttaaactgatgt

SEQ ID NO: 932426 - DNA, 15 bp, Homo sapiens
tgttaaactgatgtg

SEQ ID NO: 932427 - DNA, 15 bp, Homo sapiens
gttaaactgatgtga

SEQ ID NO: 932428 - DNA, 15 bp, Homo sapiens
ttaaactgatgtgaa

SEQ ID NO: 932429 - DNA, 15 bp, Homo sapiens
taaactgatgtgaaa

SEQ ID NO: 932430 - DNA, 15 bp, Homo sapiens
aaactgatgtgaaag

SEQ ID NO: 932431 - DNA, 15 bp, Homo sapiens
aactgatgtgaaaga

SEQ ID NO: 932432 - DNA, 15 bp, Homo sapiens
actgatgtgaaagaa

SEQ ID NO: 932433 - DNA, 15 bp, Homo sapiens
ctgatgtgaaagaag

SEQ ID NO: 932434 - DNA, 15 bp, Homo sapiens
tgatgtgaaagaagt

SEQ ID NO: 932435 - DNA, 15 bp, Homo sapiens
gatgtgaaagaagta

SEQ ID NO: 932436 - DNA, 15 bp, Homo sapiens
atgtgaaagaagtac

SEQ ID NO: 932437 - DNA, 15 bp, Homo sapiens
tgtgaaagaagtact

SEQ ID NO: 932438 - DNA, 15 bp, Homo sapiens
gtgaaagaagtactg

SEQ ID NO: 932439 - DNA, 15 bp, Homo sapiens
tgaaagaagtactgt

SEQ ID NO: 932440 - DNA, 15 bp, Homo sapiens
gaaagaagtactgta

SEQ ID NO: 932441 - DNA, 15 bp, Homo sapiens
aaagaagtactgtag

SEQ ID NO: 932442 - DNA, 15 bp, Homo sapiens
aagaagtactgtagc

SEQ ID NO: 932443 - DNA, 15 bp, Homo sapiens
agaagtactgtagct

SEQ ID NO: 932444 - DNA, 15 bp, Homo sapiens
gaagtactgtagctg

SEQ ID NO: 932445 - DNA, 15 bp, Homo sapiens
aagtactgtagctga

SEQ ID NO: 932446 - DNA, 15 bp, Homo sapiens
agtactgtagctgaa

SEQ ID NO: 932447 - DNA, 15 bp, Homo sapiens
gtactgtagctgaaa

SEQ ID NO: 932448 - DNA, 15 bp, Homo sapiens
tactgtagctgaaac

SEQ ID NO: 932449 - DNA, 15 bp, Homo sapiens
actgtagctgaaaca

SEQ ID NO: 932450 - DNA, 15 bp, Homo sapiens
ctgtagctgaaacac

SEQ ID NO: 932451 - DNA, 15 bp, Homo sapiens
tgtagctgaaacact

SEQ ID NO: 932452 - DNA, 15 bp, Homo sapiens
gtagctgaaacactg

SEQ ID NO: 932453 - DNA, 15 bp, Homo sapiens
tagctgaaacactgg

SEQ ID NO: 932454 - DNA, 15 bp, Homo sapiens
agctgaaacactggt

SEQ ID NO: 932455 - DNA, 15 bp, Homo sapiens
gctgaaacactggtg

SEQ ID NO: 932456 - DNA, 15 bp, Homo sapiens
ctgaaacactggtgg

SEQ ID NO: 932457 - DNA, 15 bp, Homo sapiens
tgaaacactggtggc

SEQ ID NO: 932458 - DNA, 15 bp, Homo sapiens
gaaacactggtggca

SEQ ID NO: 932459 - DNA, 15 bp, Homo sapiens
aaacactggtggcaa

SEQ ID NO: 932460 - DNA, 15 bp, Homo sapiens
aacactggtggcaag

SEQ ID NO: 932461 - DNA, 15 bp, Homo sapiens
acactggtggcaaga

SEQ ID NO: 932462 - DNA, 15 bp, Homo sapiens
cactggtggcaagaa

SEQ ID NO: 932463 - DNA, 15 bp, Homo sapiens
actggtggcaagaag

SEQ ID NO: 932464 - DNA, 15 bp, Homo sapiens
ctggtggcaagaaga

SEQ ID NO: 932465 - DNA, 15 bp, Homo sapiens
tggtggcaagaagac

SEQ ID NO: 932466 - DNA, 15 bp, Homo sapiens
ggtggcaagaagact

SEQ ID NO: 932467 - DNA, 15 bp, Homo sapiens
gtggcaagaagacta

SEQ ID NO: 932468 - DNA, 15 bp, Homo sapiens
tggcaagaagactaa

SEQ ID NO: 932469 - DNA, 15 bp, Homo sapiens
ggcaagaagactaat

SEQ ID NO: 932470 - DNA, 15 bp, Homo sapiens
gcaagaagactaatc

SEQ ID NO: 932471 - DNA, 15 bp, Homo sapiens
caagaagactaatct

SEQ ID NO: 932472 - DNA, 15 bp, Homo sapiens
aagaagactaatcta

SEQ ID NO: 932473 - DNA, 15 bp, Homo sapiens
agaagactaatctag

SEQ ID NO: 932474 - DNA, 15 bp, Homo sapiens
gaagactaatctaga

SEQ ID NO: 932475 - DNA, 15 bp, Homo sapiens
aagactaatctagag

SEQ ID NO: 932476 - DNA, 15 bp, Homo sapiens
agactaatctagaga

SEQ ID NO: 932477 - DNA, 15 bp, Homo sapiens
gactaatctagagac

SEQ ID NO: 932478 - DNA, 15 bp, Homo sapiens
actaatctagagact

SEQ ID NO: 932479 - DNA, 15 bp, Homo sapiens
ctaatctagagactg

SEQ ID NO: 932480 - DNA, 15 bp, Homo sapiens
taatctagagactgt

SEQ ID NO: 932481 - DNA, 15 bp, Homo sapiens
aatctagagactgtg

SEQ ID NO: 932482 - DNA, 15 bp, Homo sapiens
atctagagactgtgg

SEQ ID NO: 932483 - DNA, 15 bp, Homo sapiens
tctagagactgtggc

SEQ ID NO: 932484 - DNA, 15 bp, Homo sapiens
ctagagactgtggca

SEQ ID NO: 932485 - DNA, 15 bp, Homo sapiens
tagagactgtggcac

SEQ ID NO: 932486 - DNA, 15 bp, Homo sapiens
agagactgtggcaca

SEQ ID NO: 932487 - DNA, 15 bp, Homo sapiens
gagactgtggcacaa

SEQ ID NO: 932488 - DNA, 15 bp, Homo sapiens
agactgtggcacaag

SEQ ID NO: 932489 - DNA, 15 bp, Homo sapiens
gactgtggcacaagt

SEQ ID NO: 932490 - DNA, 15 bp, Homo sapiens
actgtggcacaagtt

SEQ ID NO: 932491 - DNA, 15 bp, Homo sapiens
ctgtggcacaagttt

SEQ ID NO: 932492 - DNA, 15 bp, Homo sapiens
tgtggcacaagtttg

SEQ ID NO: 932493 - DNA, 15 bp, Homo sapiens
gtggcacaagtttga

SEQ ID NO: 932494 - DNA, 15 bp, Homo sapiens
tggcacaagtttgaa

SEQ ID NO: 932495 - DNA, 15 bp, Homo sapiens
ggcacaagtttgaaa

SEQ ID NO: 932496 - DNA, 15 bp, Homo sapiens
gcacaagtttgaaag

SEQ ID NO: 932497 - DNA, 15 bp, Homo sapiens
cacaagtttgaaaga

SEQ ID NO: 932498 - DNA, 15 bp, Homo sapiens
acaagtttgaaagag

SEQ ID NO: 932499 - DNA, 15 bp, Homo sapiens
caagtttgaaagagt

SEQ ID NO: 932500 - DNA, 15 bp, Homo sapiens
aagtttgaaagagtt

SEQ ID NO: 932501 - DNA, 15 bp, Homo sapiens
agtttgaaagagtta

SEQ ID NO: 932502 - DNA, 15 bp, Homo sapiens
gtttgaaagagttat

SEQ ID NO: 932503 - DNA, 15 bp, Homo sapiens
tttgaaagagttatg

SEQ ID NO: 932504 - DNA, 15 bp, Homo sapiens
ttgaaagagttatgg

SEQ ID NO: 932505 - DNA, 15 bp, Homo sapiens
tgaaagagttatggc

SEQ ID NO: 932506 - DNA, 15 bp, Homo sapiens
gaaagagttatggca

SEQ ID NO: 932507 - DNA, 15 bp, Homo sapiens
aaagagttatggcaa

SEQ ID NO: 932508 - DNA, 15 bp, Homo sapiens
aagagttatggcaat

SEQ ID NO: 932509 - DNA, 15 bp, Homo sapiens
agagttatggcaatg

SEQ ID NO: 932510 - DNA, 15 bp, Homo sapiens
gagttatggcaatga

SEQ ID NO: 932511 - DNA, 15 bp, Homo sapiens
agttatggcaatgaa

SEQ ID NO: 932512 - DNA, 15 bp, Homo sapiens
gttatggcaatgaaa

SEQ ID NO: 932513 - DNA, 15 bp, Homo sapiens
ttatggcaatgaaac

SEQ ID NO: 932514 - DNA, 15 bp, Homo sapiens
tatggcaatgaaaca

SEQ ID NO: 932515 - DNA, 15 bp, Homo sapiens
atggcaatgaaacat

SEQ ID NO: 932516 - DNA, 15 bp, Homo sapiens
tggcaatgaaacata

SEQ ID NO: 932517 - DNA, 15 bp, Homo sapiens
ggcaatgaaacatac

SEQ ID NO: 932518 - DNA, 15 bp, Homo sapiens
gcaatgaaacataca

SEQ ID NO: 932519 - DNA, 15 bp, Homo sapiens
caatgaaacatacaa

SEQ ID NO: 932520 - DNA, 15 bp, Homo sapiens
aatgaaacatacaag

SEQ ID NO: 932521 - DNA, 15 bp, Homo sapiens
atgaaacatacaaga

SEQ ID NO: 932522 - DNA, 15 bp, Homo sapiens
tgaaacatacaagac

SEQ ID NO: 932523 - DNA, 15 bp, Homo sapiens
gaaacatacaagacc

SEQ ID NO: 932524 - DNA, 15 bp, Homo sapiens
aaacatacaagacct

SEQ ID NO: 932525 - DNA, 15 bp, Homo sapiens
aacatacaagacctc

SEQ ID NO: 932526 - DNA, 15 bp, Homo sapiens
acatacaagacctca

SEQ ID NO: 932527 - DNA, 15 bp, Homo sapiens
catacaagacctcac

SEQ ID NO: 932528 - DNA, 15 bp, Homo sapiens
atacaagacctcaca

SEQ ID NO: 932529 - DNA, 15 bp, Homo sapiens
tacaagacctcacaa

SEQ ID NO: 932530 - DNA, 15 bp, Homo sapiens
acaagacctcacaaa

SEQ ID NO: 932531 - DNA, 15 bp, Homo sapiens
caagacctcacaaaa

SEQ ID NO: 932532 - DNA, 15 bp, Homo sapiens
aagacctcacaaaag

SEQ ID NO: 932533 - DNA, 15 bp, Homo sapiens
agacctcacaaaaga

SEQ ID NO: 932534 - DNA, 15 bp, Homo sapiens
gacctcacaaaagaa

SEQ ID NO: 932535 - DNA, 15 bp, Homo sapiens
acctcacaaaagaag

SEQ ID NO: 932536 - DNA, 15 bp, Homo sapiens
cctcacaaaagaaga

SEQ ID NO: 932537 - DNA, 15 bp, Homo sapiens
ctcacaaaagaagaa

SEQ ID NO: 932538 - DNA, 15 bp, Homo sapiens
tcacaaaagaagaaa

SEQ ID NO: 932539 - DNA, 15 bp, Homo sapiens
cacaaaagaagaaaa

SEQ ID NO: 932540 - DNA, 15 bp, Homo sapiens
acaaaagaagaaaaa

SEQ ID NO: 932541 - DNA, 15 bp, Homo sapiens
caaaagaagaaaaac

SEQ ID NO: 932542 - DNA, 15 bp, Homo sapiens
aaaagaagaaaaact

SEQ ID NO: 932543 - DNA, 15 bp, Homo sapiens
aaagaagaaaaacta

SEQ ID NO: 932544 - DNA, 15 bp, Homo sapiens
aagaagaaaaactag

SEQ ID NO: 932545 - DNA, 15 bp, Homo sapiens
agaagaaaaactagt

SEQ ID NO: 932546 - DNA, 15 bp, Homo sapiens
gaagaaaaactagtc

SEQ ID NO: 932547 - DNA, 15 bp, Homo sapiens
aagaaaaactagtcc

SEQ ID NO: 932548 - DNA, 15 bp, Homo sapiens
agaaaaactagtcct

SEQ ID NO: 932549 - DNA, 15 bp, Homo sapiens
gaaaaactagtcctt

SEQ ID NO: 932550 - DNA, 15 bp, Homo sapiens
aaaaactagtccttc

SEQ ID NO: 932551 - DNA, 15 bp, Homo sapiens
aaaactagtccttct

SEQ ID NO: 932552 - DNA, 15 bp, Homo sapiens
aaactagtccttcta

SEQ ID NO: 932553 - DNA, 15 bp, Homo sapiens
aactagtccttctaa

SEQ ID NO: 932554 - DNA, 15 bp, Homo sapiens
actagtccttctaac

SEQ ID NO: 932555 - DNA, 15 bp, Homo sapiens
ctagtccttctaacc

SEQ ID NO: 932556 - DNA, 15 bp, Homo sapiens
tagtccttctaacca

SEQ ID NO: 932557 - DNA, 15 bp, Homo sapiens
agtccttctaaccat

SEQ ID NO: 932558 - DNA, 15 bp, Homo sapiens
gtccttctaaccatc

SEQ ID NO: 932559 - DNA, 15 bp, Homo sapiens
tccttctaaccatct

SEQ ID NO: 932560 - DNA, 15 bp, Homo sapiens
ccttctaaccatcta

SEQ ID NO: 932561 - DNA, 15 bp, Homo sapiens
cttctaaccatctag

SEQ ID NO: 932562 - DNA, 15 bp, Homo sapiens
ttctaaccatctaga

SEQ ID NO: 932563 - DNA, 15 bp, Homo sapiens
tctaaccatctagag

SEQ ID NO: 932564 - DNA, 15 bp, Homo sapiens
ctaaccatctagagg

SEQ ID NO: 932565 - DNA, 15 bp, Homo sapiens
taaccatctagaggg

SEQ ID NO: 932566 - DNA, 15 bp, Homo sapiens
aaccatctagagggg

SEQ ID NO: 932567 - DNA, 15 bp, Homo sapiens
accatctagagggga

SEQ ID NO: 932568 - DNA, 15 bp, Homo sapiens
ccatctagaggggag

SEQ ID NO: 932569 - DNA, 15 bp, Homo sapiens
catctagaggggagg

SEQ ID NO: 932570 - DNA, 15 bp, Homo sapiens
atctagaggggaggg

SEQ ID NO: 932571 - DNA, 15 bp, Homo sapiens
tctagaggggaggga

SEQ ID NO: 932572 - DNA, 15 bp, Homo sapiens
ctagaggggagggaa

SEQ ID NO: 932573 - DNA, 15 bp, Homo sapiens
tagaggggagggaaa

SEQ ID NO: 932574 - DNA, 15 bp, Homo sapiens
agaggggagggaaaa

SEQ ID NO: 932575 - DNA, 15 bp, Homo sapiens
gaggggagggaaaag

SEQ ID NO: 932576 - DNA, 15 bp, Homo sapiens
aggggagggaaaaga

SEQ ID NO: 932577 - DNA, 15 bp, Homo sapiens
ggggagggaaaagaa

SEQ ID NO: 932578 - DNA, 15 bp, Homo sapiens
gggagggaaaagaaa

SEQ ID NO: 932579 - DNA, 15 bp, Homo sapiens
ggagggaaaagaaag

SEQ ID NO: 932580 - DNA, 15 bp, Homo sapiens
gagggaaaagaaaga

SEQ ID NO: 932581 - DNA, 15 bp, Homo sapiens
agggaaaagaaagag

SEQ ID NO: 932582 - DNA, 15 bp, Homo sapiens
gggaaaagaaagagt

SEQ ID NO: 932583 - DNA, 15 bp, Homo sapiens
ggaaaagaaagagtc

SEQ ID NO: 932584 - DNA, 15 bp, Homo sapiens
gaaaagaaagagtcg

SEQ ID NO: 932585 - DNA, 15 bp, Homo sapiens
aaaagaaagagtcgg

SEQ ID NO: 932586 - DNA, 15 bp, Homo sapiens
aaagaaagagtcggg

SEQ ID NO: 932587 - DNA, 15 bp, Homo sapiens
aagaaagagtcgggg

SEQ ID NO: 932588 - DNA, 15 bp, Homo sapiens
agaaagagtcggggt

SEQ ID NO: 932589 - DNA, 15 bp, Homo sapiens
gaaagagtcggggtg

SEQ ID NO: 932590 - DNA, 15 bp, Homo sapiens
aaagagtcggggtgt

SEQ ID NO: 932591 - DNA, 15 bp, Homo sapiens
aagagtcggggtgtt

SEQ ID NO: 932592 - DNA, 15 bp, Homo sapiens
agagtcggggtgttc

SEQ ID NO: 932593 - DNA, 15 bp, Homo sapiens
gagtcggggtgttca

SEQ ID NO: 932594 - DNA, 15 bp, Homo sapiens
agtcggggtgttcaa

SEQ ID NO: 932595 - DNA, 15 bp, Homo sapiens
gtcggggtgttcaag

SEQ ID NO: 932596 - DNA, 15 bp, Homo sapiens
tcggggtgttcaagg

SEQ ID NO: 932597 - DNA, 15 bp, Homo sapiens
cggggtgttcaaggg

SEQ ID NO: 932598 - DNA, 15 bp, Homo sapiens
ggggtgttcaagggt

SEQ ID NO: 932599 - DNA, 15 bp, Homo sapiens
gggtgttcaagggtt

SEQ ID NO: 932600 - DNA, 15 bp, Homo sapiens
ggtgttcaagggtta

SEQ ID NO: 932601 - DNA, 15 bp, Homo sapiens
gtgttcaagggttac

SEQ ID NO: 932602 - DNA, 15 bp, Homo sapiens
tgttcaagggttact

SEQ ID NO: 932603 - DNA, 15 bp, Homo sapiens
gttcaagggttactg

SEQ ID NO: 932604 - DNA, 15 bp, Homo sapiens
ttcaagggttactgt

SEQ ID NO: 932605 - DNA, 15 bp, Homo sapiens
tcaagggttactgtt

SEQ ID NO: 932606 - DNA, 15 bp, Homo sapiens
caagggttactgttc

SEQ ID NO: 932607 - DNA, 15 bp, Homo sapiens
aagggttactgttct

SEQ ID NO: 932608 - DNA, 15 bp, Homo sapiens
agggttactgttctt

SEQ ID NO: 932609 - DNA, 15 bp, Homo sapiens
gggttactgttcttt

SEQ ID NO: 932610 - DNA, 15 bp, Homo sapiens
ggttactgttctttt

SEQ ID NO: 932611 - DNA, 15 bp, Homo sapiens
gttactgttcttttt

SEQ ID NO: 932612 - DNA, 15 bp, Homo sapiens
ttactgttcttttta

SEQ ID NO: 932613 - DNA, 15 bp, Homo sapiens
tactgttctttttaa

SEQ ID NO: 932614 - DNA, 15 bp, Homo sapiens
actgttctttttaat

SEQ ID NO: 932615 - DNA, 15 bp, Homo sapiens
ctgttctttttaatg

SEQ ID NO: 932616 - DNA, 15 bp, Homo sapiens
tgttctttttaatgt

SEQ ID NO: 932617 - DNA, 15 bp, Homo sapiens
gttctttttaatgtc

SEQ ID NO: 932618 - DNA, 15 bp, Homo sapiens
ttctttttaatgtct

SEQ ID NO: 932619 - DNA, 15 bp, Homo sapiens
tctttttaatgtctt

SEQ ID NO: 932620 - DNA, 15 bp, Homo sapiens
ctttttaatgtcttt

SEQ ID NO: 932621 - DNA, 15 bp, Homo sapiens
tttttaatgtcttta

SEQ ID NO: 932622 - DNA, 15 bp, Homo sapiens
ttttaatgtctttag

SEQ ID NO: 932623 - DNA, 15 bp, Homo sapiens
tttaatgtctttaga

SEQ ID NO: 932624 - DNA, 15 bp, Homo sapiens
ttaatgtctttagac

SEQ ID NO: 932625 - DNA, 15 bp, Homo sapiens
taatgtctttagact

SEQ ID NO: 932626 - DNA, 15 bp, Homo sapiens
aatgtctttagactt

SEQ ID NO: 932627 - DNA, 15 bp, Homo sapiens
atgtctttagacttg

SEQ ID NO: 932628 - DNA, 15 bp, Homo sapiens
tgtctttagacttgg

SEQ ID NO: 932629 - DNA, 15 bp, Homo sapiens
gtctttagacttggc

SEQ ID NO: 932630 - DNA, 15 bp, Homo sapiens
tctttagacttggca

SEQ ID NO: 932631 - DNA, 15 bp, Homo sapiens
ctttagacttggcat

SEQ ID NO: 932632 - DNA, 15 bp, Homo sapiens
tttagacttggcatt

SEQ ID NO: 932633 - DNA, 15 bp, Homo sapiens
ttagacttggcattt

SEQ ID NO: 932634 - DNA, 15 bp, Homo sapiens
tagacttggcatttt

SEQ ID NO: 932635 - DNA, 15 bp, Homo sapiens
agacttggcattttt

SEQ ID NO: 932636 - DNA, 15 bp, Homo sapiens
gacttggcatttttc

SEQ ID NO: 932637 - DNA, 15 bp, Homo sapiens
acttggcatttttcc

SEQ ID NO: 932638 - DNA, 15 bp, Homo sapiens
cttggcatttttccg

SEQ ID NO: 932639 - DNA, 15 bp, Homo sapiens
ttggcatttttccgt

SEQ ID NO: 932640 - DNA, 15 bp, Homo sapiens
tggcatttttccgtt

SEQ ID NO: 932641 - DNA, 15 bp, Homo sapiens
ggcatttttccgttt

SEQ ID NO: 932642 - DNA, 15 bp, Homo sapiens
gcatttttccgttta

SEQ ID NO: 932643 - DNA, 15 bp, Homo sapiens
catttttccgtttac

SEQ ID NO: 932644 - DNA, 15 bp, Homo sapiens
atttttccgtttaca

SEQ ID NO: 932645 - DNA, 15 bp, Homo sapiens
tttttccgtttacat

SEQ ID NO: 932646 - DNA, 15 bp, Homo sapiens
ttttccgtttacata

SEQ ID NO: 932647 - DNA, 15 bp, Homo sapiens
tttccgtttacatag

SEQ ID NO: 932648 - DNA, 15 bp, Homo sapiens
ttccgtttacatagc

SEQ ID NO: 932649 - DNA, 15 bp, Homo sapiens
tccgtttacatagca

SEQ ID NO: 932650 - DNA, 15 bp, Homo sapiens
ccgtttacatagcac

SEQ ID NO: 932651 - DNA, 15 bp, Homo sapiens
cgtttacatagcact

SEQ ID NO: 932652 - DNA, 15 bp, Homo sapiens
gtttacatagcactt

SEQ ID NO: 932653 - DNA, 15 bp, Homo sapiens
tttacatagcacttt

SEQ ID NO: 932654 - DNA, 15 bp, Homo sapiens
ttacatagcactttt

SEQ ID NO: 932655 - DNA, 15 bp, Homo sapiens
tacatagcactttta

SEQ ID NO: 932656 - DNA, 15 bp, Homo sapiens
acatagcacttttac

SEQ ID NO: 932657 - DNA, 15 bp, Homo sapiens
catagcacttttacc

SEQ ID NO: 932658 - DNA, 15 bp, Homo sapiens
atagcacttttacct

SEQ ID NO: 932659 - DNA, 15 bp, Homo sapiens
tagcacttttacctc

SEQ ID NO: 932660 - DNA, 15 bp, Homo sapiens
agcacttttacctcc

SEQ ID NO: 932661 - DNA, 15 bp, Homo sapiens
gcacttttacctcct

SEQ ID NO: 932662 - DNA, 15 bp, Homo sapiens
cacttttacctcctg

SEQ ID NO: 932663 - DNA, 15 bp, Homo sapiens
acttttacctcctga

SEQ ID NO: 932664 - DNA, 15 bp, Homo sapiens
cttttacctcctgat

SEQ ID NO: 932665 - DNA, 15 bp, Homo sapiens
ttttacctcctgatg

SEQ ID NO: 932666 - DNA, 15 bp, Homo sapiens
tttacctcctgatgg

SEQ ID NO: 932667 - DNA, 15 bp, Homo sapiens
ttacctcctgatggt

SEQ ID NO: 932668 - DNA, 15 bp, Homo sapiens
tacctcctgatggtt

SEQ ID NO: 932669 - DNA, 15 bp, Homo sapiens
acctcctgatggtta

SEQ ID NO: 932670 - DNA, 15 bp, Homo sapiens
cctcctgatggttag

SEQ ID NO: 932671 - DNA, 15 bp, Homo sapiens
ctcctgatggttagg

SEQ ID NO: 932672 - DNA, 15 bp, Homo sapiens
tcctgatggttaggg

SEQ ID NO: 932673 - DNA, 15 bp, Homo sapiens
cctgatggttaggga

SEQ ID NO: 932674 - DNA, 15 bp, Homo sapiens
ctgatggttagggag

SEQ ID NO: 932675 - DNA, 15 bp, Homo sapiens
tgatggttagggaga

SEQ ID NO: 932676 - DNA, 15 bp, Homo sapiens
gatggttagggagaa

SEQ ID NO: 932677 - DNA, 15 bp, Homo sapiens
atggttagggagaac

SEQ ID NO: 932678 - DNA, 15 bp, Homo sapiens
tggttagggagaaca

SEQ ID NO: 932679 - DNA, 15 bp, Homo sapiens
ggttagggagaacag

SEQ ID NO: 932680 - DNA, 15 bp, Homo sapiens
gttagggagaacagg

SEQ ID NO: 932681 - DNA, 15 bp, Homo sapiens
ttagggagaacagga

SEQ ID NO: 932682 - DNA, 15 bp, Homo sapiens
tagggagaacaggaa

SEQ ID NO: 932683 - DNA, 15 bp, Homo sapiens
agggagaacaggaat

SEQ ID NO: 932684 - DNA, 15 bp, Homo sapiens
gggagaacaggaatg

SEQ ID NO: 932685 - DNA, 15 bp, Homo sapiens
ggagaacaggaatgc

SEQ ID NO: 932686 - DNA, 15 bp, Homo sapiens
gagaacaggaatgct

SEQ ID NO: 932687 - DNA, 15 bp, Homo sapiens
agaacaggaatgctc

SEQ ID NO: 932688 - DNA, 15 bp, Homo sapiens
gaacaggaatgctca

SEQ ID NO: 932689 - DNA, 15 bp, Homo sapiens
aacaggaatgctcat

SEQ ID NO: 932690 - DNA, 15 bp, Homo sapiens
acaggaatgctcatc

SEQ ID NO: 932691 - DNA, 15 bp, Homo sapiens
caggaatgctcatcc

SEQ ID NO: 932692 - DNA, 15 bp, Homo sapiens
aggaatgctcatcct

SEQ ID NO: 932693 - DNA, 15 bp, Homo sapiens
ggaatgctcatcctc

SEQ ID NO: 932694 - DNA, 15 bp, Homo sapiens
gaatgctcatcctca

SEQ ID NO: 932695 - DNA, 15 bp, Homo sapiens
aatgctcatcctcat

SEQ ID NO: 932696 - DNA, 15 bp, Homo sapiens
atgctcatcctcatt

SEQ ID NO: 932697 - DNA, 15 bp, Homo sapiens
tgctcatcctcattc

SEQ ID NO: 932698 - DNA, 15 bp, Homo sapiens
gctcatcctcattca

SEQ ID NO: 932699 - DNA, 15 bp, Homo sapiens
ctcatcctcattcag

SEQ ID NO: 932700 - DNA, 15 bp, Homo sapiens
tcatcctcattcaga

SEQ ID NO: 932701 - DNA, 15 bp, Homo sapiens
catcctcattcagag

SEQ ID NO: 932702 - DNA, 15 bp, Homo sapiens
atcctcattcagaga

SEQ ID NO: 932703 - DNA, 15 bp, Homo sapiens
tcctcattcagagaa

SEQ ID NO: 932704 - DNA, 15 bp, Homo sapiens
cctcattcagagaag

SEQ ID NO: 932705 - DNA, 15 bp, Homo sapiens
ctcattcagagaagt

SEQ ID NO: 932706 - DNA, 15 bp, Homo sapiens
tcattcagagaagtt

SEQ ID NO: 932707 - DNA, 15 bp, Homo sapiens
cattcagagaagttt

SEQ ID NO: 932708 - DNA, 15 bp, Homo sapiens
attcagagaagtttc

SEQ ID NO: 932709 - DNA, 15 bp, Homo sapiens
ttcagagaagtttca

SEQ ID NO: 932710 - DNA, 15 bp, Homo sapiens
ccttctcaacatttt

SEQ ID NO: 932711 - DNA, 15 bp, Homo sapiens
cttctcaacattttg

SEQ ID NO: 932712 - DNA, 15 bp, Homo sapiens
ttctcaacattttga

SEQ ID NO: 932713 - DNA, 15 bp, Homo sapiens
tctcaacattttgat

SEQ ID NO: 932714 - DNA, 15 bp, Homo sapiens
ctcaacattttgatg

SEQ ID NO: 932715 - DNA, 15 bp, Homo sapiens
tcaacattttgatgt

SEQ ID NO: 932716 - DNA, 15 bp, Homo sapiens
caacattttgatgta

SEQ ID NO: 932717 - DNA, 15 bp, Homo sapiens
aacattttgatgtat

SEQ ID NO: 932718 - DNA, 15 bp, Homo sapiens
acattttgatgtatg

SEQ ID NO: 932719 - DNA, 15 bp, Homo sapiens
cattttgatgtatgt

SEQ ID NO: 932720 - DNA, 15 bp, Homo sapiens
attttgatgtatgtc

SEQ ID NO: 932721 - DNA, 15 bp, Homo sapiens
ttttgatgtatgtct

SEQ ID NO: 932722 - DNA, 15 bp, Homo sapiens
tttgatgtatgtctc

SEQ ID NO: 932723 - DNA, 15 bp, Homo sapiens
ttgatgtatgtctcc

SEQ ID NO: 932724 - DNA, 15 bp, Homo sapiens
tgatgtatgtctccc

SEQ ID NO: 932725 - DNA, 15 bp, Homo sapiens
gatgtatgtctccct

SEQ ID NO: 932726 - DNA, 15 bp, Homo sapiens
atgtatgtctccctg

SEQ ID NO: 932727 - DNA, 15 bp, Homo sapiens
tgtatgtctccctgt

SEQ ID NO: 932728 - DNA, 15 bp, Homo sapiens
gtatgtctccctgtg

SEQ ID NO: 932729 - DNA, 15 bp, Homo sapiens
tatgtctccctgtgt

SEQ ID NO: 932730 - DNA, 15 bp, Homo sapiens
atgtctccctgtgtc

SEQ ID NO: 932731 - DNA, 15 bp, Homo sapiens
tgtctccctgtgtct

SEQ ID NO: 932732 - DNA, 15 bp, Homo sapiens
gtctccctgtgtctt

SEQ ID NO: 932733 - DNA, 15 bp, Homo sapiens
tctccctgtgtcttt

SEQ ID NO: 932734 - DNA, 15 bp, Homo sapiens
ctccctgtgtctttg

SEQ ID NO: 932735 - DNA, 15 bp, Homo sapiens
tccctgtgtctttga

SEQ ID NO: 932736 - DNA, 15 bp, Homo sapiens
ccctgtgtctttgag

SEQ ID NO: 932737 - DNA, 15 bp, Homo sapiens
cctgtgtctttgagt

SEQ ID NO: 932738 - DNA, 15 bp, Homo sapiens
ctgtgtctttgagtt

SEQ ID NO: 932739 - DNA, 15 bp, Homo sapiens
tgtgtctttgagtta

SEQ ID NO: 932740 - DNA, 15 bp, Homo sapiens
gtgtctttgagttaa

SEQ ID NO: 932741 - DNA, 15 bp, Homo sapiens
tgtctttgagttaag

SEQ ID NO: 932742 - DNA, 15 bp, Homo sapiens
gtctttgagttaagt

SEQ ID NO: 932743 - DNA, 15 bp, Homo sapiens
tctttgagttaagtt

SEQ ID NO: 932744 - DNA, 15 bp, Homo sapiens
ctttgagttaagttt

SEQ ID NO: 932745 - DNA, 15 bp, Homo sapiens
tttgagttaagtttt

SEQ ID NO: 932746 - DNA, 15 bp, Homo sapiens
ttgagttaagttttc

SEQ ID NO: 932747 - DNA, 15 bp, Homo sapiens
tgagttaagttttca

SEQ ID NO: 932748 - DNA, 15 bp, Homo sapiens
gagttaagttttcag

SEQ ID NO: 932749 - DNA, 15 bp, Homo sapiens
agttaagttttcagc

SEQ ID NO: 932750 - DNA, 15 bp, Homo sapiens
gttaagttttcagct

SEQ ID NO: 932751 - DNA, 15 bp, Homo sapiens
ttaagttttcagcta

SEQ ID NO: 932752 - DNA, 15 bp, Homo sapiens
taagttttcagctag

SEQ ID NO: 932753 - DNA, 15 bp, Homo sapiens
aagttttcagctagg

SEQ ID NO: 932754 - DNA, 15 bp, Homo sapiens
agttttcagctagga

SEQ ID NO: 932755 - DNA, 15 bp, Homo sapiens
gttttcagctaggat

SEQ ID NO: 932756 - DNA, 15 bp, Homo sapiens
ttttcagctaggatc

SEQ ID NO: 932757 - DNA, 15 bp, Homo sapiens
tttcagctaggatct

SEQ ID NO: 932758 - DNA, 15 bp, Homo sapiens
ttcagctaggatcta

SEQ ID NO: 932759 - DNA, 15 bp, Homo sapiens
tcagctaggatctac

SEQ ID NO: 932760 - DNA, 15 bp, Homo sapiens
cagctaggatctact

SEQ ID NO: 932761 - DNA, 15 bp, Homo sapiens
agctaggatctactg

SEQ ID NO: 932762 - DNA, 15 bp, Homo sapiens
gctaggatctactgt

SEQ ID NO: 932763 - DNA, 15 bp, Homo sapiens
ctaggatctactgtt

SEQ ID NO: 932764 - DNA, 15 bp, Homo sapiens
taggatctactgttt

SEQ ID NO: 932765 - DNA, 15 bp, Homo sapiens
aggatctactgtttc

SEQ ID NO: 932766 - DNA, 15 bp, Homo sapiens
ggatctactgtttca

SEQ ID NO: 932767 - DNA, 15 bp, Homo sapiens
gatctactgtttcaa

SEQ ID NO: 932768 - DNA, 15 bp, Homo sapiens
atctactgtttcaag

SEQ ID NO: 932769 - DNA, 15 bp, Homo sapiens
tctactgtttcaagg

SEQ ID NO: 932770 - DNA, 15 bp, Homo sapiens
ctactgtttcaagga

SEQ ID NO: 932771 - DNA, 15 bp, Homo sapiens
tactgtttcaaggag

SEQ ID NO: 932772 - DNA, 15 bp, Homo sapiens
actgtttcaaggagg

SEQ ID NO: 932773 - DNA, 15 bp, Homo sapiens
ctgtttcaaggagga

SEQ ID NO: 932774 - DNA, 15 bp, Homo sapiens
tgtttcaaggaggaa

SEQ ID NO: 932775 - DNA, 15 bp, Homo sapiens
gtttcaaggaggaac

SEQ ID NO: 932776 - DNA, 15 bp, Homo sapiens
tttcaaggaggaaca

SEQ ID NO: 932777 - DNA, 15 bp, Homo sapiens
ttcaaggaggaacaa

SEQ ID NO: 932778 - DNA, 15 bp, Homo sapiens
tcaaggaggaacaag

SEQ ID NO: 932779 - DNA, 15 bp, Homo sapiens
caaggaggaacaagt

SEQ ID NO: 932780 - DNA, 15 bp, Homo sapiens
aaggaggaacaagtt

SEQ ID NO: 932781 - DNA, 15 bp, Homo sapiens
aggaggaacaagtta

SEQ ID NO: 932782 - DNA, 15 bp, Homo sapiens
ggaggaacaagttag

SEQ ID NO: 932783 - DNA, 15 bp, Homo sapiens
gaggaacaagttagg

SEQ ID NO: 932784 - DNA, 15 bp, Homo sapiens
aggaacaagttagga

SEQ ID NO: 932785 - DNA, 15 bp, Homo sapiens
ggaacaagttaggac

SEQ ID NO: 932786 - DNA, 15 bp, Homo sapiens
gaacaagttaggacc

SEQ ID NO: 932787 - DNA, 15 bp, Homo sapiens
aacaagttaggacct

SEQ ID NO: 932788 - DNA, 15 bp, Homo sapiens
acaagttaggaccta

SEQ ID NO: 932789 - DNA, 15 bp, Homo sapiens
caagttaggacctat

SEQ ID NO: 932790 - DNA, 15 bp, Homo sapiens
aagttaggacctata

SEQ ID NO: 932791 - DNA, 15 bp, Homo sapiens
agttaggacctatat

SEQ ID NO: 932792 - DNA, 15 bp, Homo sapiens
gttaggacctatatc

SEQ ID NO: 932793 - DNA, 15 bp, Homo sapiens
ttaggacctatatca

SEQ ID NO: 932794 - DNA, 15 bp, Homo sapiens
taggacctatatcac

SEQ ID NO: 932795 - DNA, 15 bp, Homo sapiens
aggacctatatcact

SEQ ID NO: 932796 - DNA, 15 bp, Homo sapiens
ggacctatatcacta

SEQ ID NO: 932797 - DNA, 15 bp, Homo sapiens
gacctatatcactag

SEQ ID NO: 932798 - DNA, 15 bp, Homo sapiens
acctatatcactagg

SEQ ID NO: 932799 - DNA, 15 bp, Homo sapiens
cctatatcactaggc

SEQ ID NO: 932800 - DNA, 15 bp, Homo sapiens
ctatatcactaggct

SEQ ID NO: 932801 - DNA, 15 bp, Homo sapiens
tatatcactaggctg

SEQ ID NO: 932802 - DNA, 15 bp, Homo sapiens
atatcactaggctgc

SEQ ID NO: 932803 - DNA, 15 bp, Homo sapiens
tatcactaggctgct

SEQ ID NO: 932804 - DNA, 15 bp, Homo sapiens
atcactaggctgctt

SEQ ID NO: 932805 - DNA, 15 bp, Homo sapiens
tcactaggctgcttt

SEQ ID NO: 932806 - DNA, 15 bp, Homo sapiens
cactaggctgctttt

SEQ ID NO: 932807 - DNA, 15 bp, Homo sapiens
actaggctgcttttc

SEQ ID NO: 932808 - DNA, 15 bp, Homo sapiens
ctaggctgcttttct

SEQ ID NO: 932809 - DNA, 15 bp, Homo sapiens
taggctgcttttctg

SEQ ID NO: 932810 - DNA, 15 bp, Homo sapiens
aggctgcttttctgg

SEQ ID NO: 932811 - DNA, 15 bp, Homo sapiens
ggctgcttttctggt

SEQ ID NO: 932812 - DNA, 15 bp, Homo sapiens
gctgcttttctggtt

SEQ ID NO: 932813 - DNA, 15 bp, Homo sapiens
ctgcttttctggttt

SEQ ID NO: 932814 - DNA, 15 bp, Homo sapiens
tgcttttctggtttc

SEQ ID NO: 932815 - DNA, 15 bp, Homo sapiens
gcttttctggtttct

SEQ ID NO: 932816 - DNA, 15 bp, Homo sapiens
cttttctggtttctg

SEQ ID NO: 932817 - DNA, 15 bp, Homo sapiens
ttttctggtttctga

SEQ ID NO: 932818 - DNA, 15 bp, Homo sapiens
tttctggtttctgag

SEQ ID NO: 932819 - DNA, 15 bp, Homo sapiens
ttctggtttctgagt

SEQ ID NO: 932820 - DNA, 15 bp, Homo sapiens
tctggtttctgagtc

SEQ ID NO: 932821 - DNA, 15 bp, Homo sapiens
ctggtttctgagtcc

SEQ ID NO: 932822 - DNA, 15 bp, Homo sapiens
tggtttctgagtcct

SEQ ID NO: 932823 - DNA, 15 bp, Homo sapiens
ggtttctgagtccta

SEQ ID NO: 932824 - DNA, 15 bp, Homo sapiens
ttctgagtcctactg

SEQ ID NO: 932825 - DNA, 15 bp, Homo sapiens
tctgagtcctactgt

SEQ ID NO: 932826 - DNA, 15 bp, Homo sapiens
ctgagtcctactgta

SEQ ID NO: 932827 - DNA, 15 bp, Homo sapiens
tgagtcctactgtaa

SEQ ID NO: 932828 - DNA, 15 bp, Homo sapiens
gagtcctactgtaaa

SEQ ID NO: 932829 - DNA, 15 bp, Homo sapiens
agtcctactgtaaat

SEQ ID NO: 932830 - DNA, 15 bp, Homo sapiens
gtcctactgtaaatc

SEQ ID NO: 932831 - DNA, 15 bp, Homo sapiens
tcctactgtaaatca

SEQ ID NO: 932832 - DNA, 15 bp, Homo sapiens
cctactgtaaatcaa

SEQ ID NO: 932833 - DNA, 15 bp, Homo sapiens
ctactgtaaatcaag

SEQ ID NO: 932834 - DNA, 15 bp, Homo sapiens
tactgtaaatcaagc

SEQ ID NO: 932835 - DNA, 15 bp, Homo sapiens
actgtaaatcaagca

SEQ ID NO: 932836 - DNA, 15 bp, Homo sapiens
ctgtaaatcaagcat

SEQ ID NO: 932837 - DNA, 15 bp, Homo sapiens
tgtaaatcaagcata

SEQ ID NO: 932838 - DNA, 15 bp, Homo sapiens
gtaaatcaagcatat

SEQ ID NO: 932839 - DNA, 15 bp, Homo sapiens
taaatcaagcatatc

SEQ ID NO: 932840 - DNA, 15 bp, Homo sapiens
aaatcaagcatatct

SEQ ID NO: 932841 - DNA, 15 bp, Homo sapiens
aatcaagcatatctg

SEQ ID NO: 932842 - DNA, 15 bp, Homo sapiens
atcaagcatatctgg

SEQ ID NO: 932843 - DNA, 15 bp, Homo sapiens
tcaagcatatctgga

SEQ ID NO: 932844 - DNA, 15 bp, Homo sapiens
caagcatatctggaa

SEQ ID NO: 932845 - DNA, 15 bp, Homo sapiens
aagcatatctggaaa

SEQ ID NO: 932846 - DNA, 15 bp, Homo sapiens
agcatatctggaaac

SEQ ID NO: 932847 - DNA, 15 bp, Homo sapiens
gcatatctggaaacc

SEQ ID NO: 932848 - DNA, 15 bp, Homo sapiens
catatctggaaacca

SEQ ID NO: 932849 - DNA, 15 bp, Homo sapiens
atatctggaaaccac

SEQ ID NO: 932850 - DNA, 15 bp, Homo sapiens
tatctggaaaccaca

SEQ ID NO: 932851 - DNA, 15 bp, Homo sapiens
atctggaaaccacac

SEQ ID NO: 932852 - DNA, 15 bp, Homo sapiens
tctggaaaccacacc

SEQ ID NO: 932853 - DNA, 15 bp, Homo sapiens
ctggaaaccacacca

SEQ ID NO: 932854 - DNA, 15 bp, Homo sapiens
tggaaaccacaccat

SEQ ID NO: 932855 - DNA, 15 bp, Homo sapiens
ggaaaccacaccata

SEQ ID NO: 932856 - DNA, 15 bp, Homo sapiens
gaaaccacaccatac

SEQ ID NO: 932857 - DNA, 15 bp, Homo sapiens
aaaccacaccatact

SEQ ID NO: 932858 - DNA, 15 bp, Homo sapiens
aaccacaccatactg

SEQ ID NO: 932859 - DNA, 15 bp, Homo sapiens
accacaccatactgc

SEQ ID NO: 932860 - DNA, 15 bp, Homo sapiens
ccacaccatactgct

SEQ ID NO: 932861 - DNA, 15 bp, Homo sapiens
cacaccatactgctg

SEQ ID NO: 932862 - DNA, 15 bp, Homo sapiens
acaccatactgctgt

SEQ ID NO: 932863 - DNA, 15 bp, Homo sapiens
caccatactgctgtc

SEQ ID NO: 932864 - DNA, 15 bp, Homo sapiens
accatactgctgtca

SEQ ID NO: 932865 - DNA, 15 bp, Homo sapiens
ccatactgctgtcat

SEQ ID NO: 932866 - DNA, 15 bp, Homo sapiens
catactgctgtcatg

SEQ ID NO: 932867 - DNA, 15 bp, Homo sapiens
atactgctgtcatgg

SEQ ID NO: 932868 - DNA, 15 bp, Homo sapiens
tactgctgtcatggg

SEQ ID NO: 932869 - DNA, 15 bp, Homo sapiens
actgctgtcatgggt

SEQ ID NO: 932870 - DNA, 15 bp, Homo sapiens
ctgctgtcatgggtt

SEQ ID NO: 932871 - DNA, 15 bp, Homo sapiens
tgctgtcatgggttt

SEQ ID NO: 932872 - DNA, 15 bp, Homo sapiens
gctgtcatgggtttt

SEQ ID NO: 932873 - DNA, 15 bp, Homo sapiens
ctgtcatgggtttta

SEQ ID NO: 932874 - DNA, 15 bp, Homo sapiens
tgtcatgggttttat

SEQ ID NO: 932875 - DNA, 15 bp, Homo sapiens
gtcatgggttttatt

SEQ ID NO: 932876 - DNA, 15 bp, Homo sapiens
tcatgggttttattg

SEQ ID NO: 932877 - DNA, 15 bp, Homo sapiens
catgggttttattgt

SEQ ID NO: 932878 - DNA, 15 bp, Homo sapiens
atgggttttattgtt

SEQ ID NO: 932879 - DNA, 15 bp, Homo sapiens
tgggttttattgtta

SEQ ID NO: 932880 - DNA, 15 bp, Homo sapiens
gggttttattgttat

SEQ ID NO: 932881 - DNA, 15 bp, Homo sapiens
ggttttattgttata

SEQ ID NO: 932882 - DNA, 15 bp, Homo sapiens
gttttattgttatat

SEQ ID NO: 932883 - DNA, 15 bp, Homo sapiens
ttttattgttatatc

SEQ ID NO: 932884 - DNA, 15 bp, Homo sapiens
tttattgttatatcc

SEQ ID NO: 932885 - DNA, 15 bp, Homo sapiens
ttattgttatatcca

SEQ ID NO: 932886 - DNA, 15 bp, Homo sapiens
tattgttatatccaa

SEQ ID NO: 932887 - DNA, 15 bp, Homo sapiens
attgttatatccaac

SEQ ID NO: 932888 - DNA, 15 bp, Homo sapiens
ttgttatatccaact

SEQ ID NO: 932889 - DNA, 15 bp, Homo sapiens
tgttatatccaactg

SEQ ID NO: 932890 - DNA, 15 bp, Homo sapiens
gttatatccaactgg

SEQ ID NO: 932891 - DNA, 15 bp, Homo sapiens
ttatatccaactggg

SEQ ID NO: 932892 - DNA, 15 bp, Homo sapiens
tatatccaactggga

SEQ ID NO: 932893 - DNA, 15 bp, Homo sapiens
atatccaactgggac

SEQ ID NO: 932894 - DNA, 15 bp, Homo sapiens
tatccaactgggacc

SEQ ID NO: 932895 - DNA, 15 bp, Homo sapiens
atccaactgggacct

SEQ ID NO: 932896 - DNA, 15 bp, Homo sapiens
tccaactgggacctg

SEQ ID NO: 932897 - DNA, 15 bp, Homo sapiens
ccaactgggacctgc

SEQ ID NO: 932898 - DNA, 15 bp, Homo sapiens
caactgggacctgcc

SEQ ID NO: 932899 - DNA, 15 bp, Homo sapiens
aactgggacctgcct

SEQ ID NO: 932900 - DNA, 15 bp, Homo sapiens
actgggacctgcctc

SEQ ID NO: 932901 - DNA, 15 bp, Homo sapiens
ctgggacctgcctct

SEQ ID NO: 932902 - DNA, 15 bp, Homo sapiens
tgggacctgcctctt

SEQ ID NO: 932903 - DNA, 15 bp, Homo sapiens
gggacctgcctcttc

SEQ ID NO: 932904 - DNA, 15 bp, Homo sapiens
ggacctgcctcttcc

SEQ ID NO: 932905 - DNA, 15 bp, Homo sapiens
gacctgcctcttcct

SEQ ID NO: 932906 - DNA, 15 bp, Homo sapiens
acctgcctcttcctc

SEQ ID NO: 932907 - DNA, 15 bp, Homo sapiens
cctgcctcttcctca

SEQ ID NO: 932908 - DNA, 15 bp, Homo sapiens
ctgcctcttcctcat

SEQ ID NO: 932909 - DNA, 15 bp, Homo sapiens
tgcctcttcctcatg

SEQ ID NO: 932910 - DNA, 15 bp, Homo sapiens
gcctcttcctcatgt

SEQ ID NO: 932911 - DNA, 15 bp, Homo sapiens
cctcttcctcatgtg

SEQ ID NO: 932912 - DNA, 15 bp, Homo sapiens
ctcttcctcatgtgg

SEQ ID NO: 932913 - DNA, 15 bp, Homo sapiens
tcttcctcatgtggt

SEQ ID NO: 932914 - DNA, 15 bp, Homo sapiens
cttcctcatgtggtg

SEQ ID NO: 932915 - DNA, 15 bp, Homo sapiens
ttcctcatgtggtga

SEQ ID NO: 932916 - DNA, 15 bp, Homo sapiens
tcctcatgtggtgat

SEQ ID NO: 932917 - DNA, 15 bp, Homo sapiens
cctcatgtggtgatt

SEQ ID NO: 932918 - DNA, 15 bp, Homo sapiens
ctcatgtggtgatta

SEQ ID NO: 932919 - DNA, 15 bp, Homo sapiens
tcatgtggtgattat

SEQ ID NO: 932920 - DNA, 15 bp, Homo sapiens
catgtggtgattatt

SEQ ID NO: 932921 - DNA, 15 bp, Homo sapiens
atgtggtgattattt

SEQ ID NO: 932922 - DNA, 15 bp, Homo sapiens
tgtggtgattattta

SEQ ID NO: 932923 - DNA, 15 bp, Homo sapiens
gtggtgattatttac

SEQ ID NO: 932924 - DNA, 15 bp, Homo sapiens
tggtgattatttact

SEQ ID NO: 932925 - DNA, 15 bp, Homo sapiens
ggtgattatttacta

SEQ ID NO: 932926 - DNA, 15 bp, Homo sapiens
gtgattatttactaa

SEQ ID NO: 932927 - DNA, 15 bp, Homo sapiens
tgattatttactaaa

SEQ ID NO: 932928 - DNA, 15 bp, Homo sapiens
gattatttactaaac

SEQ ID NO: 932929 - DNA, 15 bp, Homo sapiens
attatttactaaaca

SEQ ID NO: 932930 - DNA, 15 bp, Homo sapiens
ttatttactaaacac

SEQ ID NO: 932931 - DNA, 15 bp, Homo sapiens
tatttactaaacact

SEQ ID NO: 932932 - DNA, 15 bp, Homo sapiens
atttactaaacacta

SEQ ID NO: 932933 - DNA, 15 bp, Homo sapiens
tttactaaacactat

SEQ ID NO: 932934 - DNA, 15 bp, Homo sapiens
ttactaaacactata

SEQ ID NO: 932935 - DNA, 15 bp, Homo sapiens
tactaaacactatat

SEQ ID NO: 932936 - DNA, 15 bp, Homo sapiens
actaaacactatatg

SEQ ID NO: 932937 - DNA, 15 bp, Homo sapiens
ctaaacactatatgc

SEQ ID NO: 932938 - DNA, 15 bp, Homo sapiens
taaacactatatgca

SEQ ID NO: 932939 - DNA, 15 bp, Homo sapiens
aaacactatatgcag

SEQ ID NO: 932940 - DNA, 15 bp, Homo sapiens
aacactatatgcagt

SEQ ID NO: 932941 - DNA, 15 bp, Homo sapiens
acactatatgcagtt

SEQ ID NO: 932942 - DNA, 15 bp, Homo sapiens
cactatatgcagttg

SEQ ID NO: 932943 - DNA, 15 bp, Homo sapiens
actatatgcagttgg

SEQ ID NO: 932944 - DNA, 15 bp, Homo sapiens
ctatatgcagttggc

SEQ ID NO: 932945 - DNA, 15 bp, Homo sapiens
tatatgcagttggca

SEQ ID NO: 932946 - DNA, 15 bp, Homo sapiens
atatgcagttggcat

SEQ ID NO: 932947 - DNA, 15 bp, Homo sapiens
tatgcagttggcatt

SEQ ID NO: 932948 - DNA, 15 bp, Homo sapiens
atgcagttggcattt

SEQ ID NO: 932949 - DNA, 15 bp, Homo sapiens
tgcagttggcatttg

SEQ ID NO: 932950 - DNA, 15 bp, Homo sapiens
gcagttggcatttgt

SEQ ID NO: 932951 - DNA, 15 bp, Homo sapiens
cagttggcatttgtc

SEQ ID NO: 932952 - DNA, 15 bp, Homo sapiens
agttggcatttgtca

SEQ ID NO: 932953 - DNA, 15 bp, Homo sapiens
gttggcatttgtcaa

SEQ ID NO: 932954 - DNA, 15 bp, Homo sapiens
ttggcatttgtcaag

SEQ ID NO: 932955 - DNA, 15 bp, Homo sapiens
tggcatttgtcaagt

SEQ ID NO: 932956 - DNA, 15 bp, Homo sapiens
ggcatttgtcaagta

SEQ ID NO: 932957 - DNA, 15 bp, Homo sapiens
gcatttgtcaagtac

SEQ ID NO: 932958 - DNA, 15 bp, Homo sapiens
catttgtcaagtact

SEQ ID NO: 932959 - DNA, 15 bp, Homo sapiens
atttgtcaagtactc

SEQ ID NO: 932960 - DNA, 15 bp, Homo sapiens
tttgtcaagtactct

SEQ ID NO: 932961 - DNA, 15 bp, Homo sapiens
ttgtcaagtactctg

SEQ ID NO: 932962 - DNA, 15 bp, Homo sapiens
tgtcaagtactctgt

SEQ ID NO: 932963 - DNA, 15 bp, Homo sapiens
gtcaagtactctgtg

SEQ ID NO: 932964 - DNA, 15 bp, Homo sapiens
tcaagtactctgtgt

SEQ ID NO: 932965 - DNA, 15 bp, Homo sapiens
caagtactctgtgtg

SEQ ID NO: 932966 - DNA, 15 bp, Homo sapiens
aagtactctgtgtgt

SEQ ID NO: 932967 - DNA, 15 bp, Homo sapiens
agtactctgtgtgtt

SEQ ID NO: 932968 - DNA, 15 bp, Homo sapiens
gtactctgtgtgttt

SEQ ID NO: 932969 - DNA, 15 bp, Homo sapiens
tactctgtgtgttta

SEQ ID NO: 932970 - DNA, 15 bp, Homo sapiens
actctgtgtgtttag

SEQ ID NO: 932971 - DNA, 15 bp, Homo sapiens
ctctgtgtgtttagt

SEQ ID NO: 932972 - DNA, 15 bp, Homo sapiens
tctgtgtgtttagtt

SEQ ID NO: 932973 - DNA, 15 bp, Homo sapiens
ctgtgtgtttagttg

SEQ ID NO: 932974 - DNA, 15 bp, Homo sapiens
tgtgtgtttagttga

SEQ ID NO: 932975 - DNA, 15 bp, Homo sapiens
gtgtgtttagttgat

SEQ ID NO: 932976 - DNA, 15 bp, Homo sapiens
tgtgtttagttgatg

SEQ ID NO: 932977 - DNA, 15 bp, Homo sapiens
gtgtttagttgatga

SEQ ID NO: 932978 - DNA, 15 bp, Homo sapiens
tgtttagttgatgaa

SEQ ID NO: 932979 - DNA, 15 bp, Homo sapiens
gtttagttgatgaag

SEQ ID NO: 932980 - DNA, 15 bp, Homo sapiens
tttagttgatgaagt

SEQ ID NO: 932981 - DNA, 15 bp, Homo sapiens
ttagttgatgaagtt

SEQ ID NO: 932982 - DNA, 15 bp, Homo sapiens
tagttgatgaagttt

SEQ ID NO: 932983 - DNA, 15 bp, Homo sapiens
agttgatgaagtttt

SEQ ID NO: 932984 - DNA, 15 bp, Homo sapiens
gttgatgaagttttt

SEQ ID NO: 932985 - DNA, 15 bp, Homo sapiens
ttgatgaagtttttt

SEQ ID NO: 932986 - DNA, 15 bp, Homo sapiens
tgatgaagttttttt

SEQ ID NO: 932987 - DNA, 15 bp, Homo sapiens
gatgaagtttttttc

SEQ ID NO: 932988 - DNA, 15 bp, Homo sapiens
atgaagtttttttcc

SEQ ID NO: 932989 - DNA, 15 bp, Homo sapiens
tgaagtttttttcct

SEQ ID NO: 932990 - DNA, 15 bp, Homo sapiens
gaagtttttttccta

SEQ ID NO: 932991 - DNA, 15 bp, Homo sapiens
aagtttttttcctat

SEQ ID NO: 932992 - DNA, 15 bp, Homo sapiens
agtttttttcctatc

SEQ ID NO: 932993 - DNA, 15 bp, Homo sapiens
gtttttttcctatca

SEQ ID NO: 932994 - DNA, 15 bp, Homo sapiens
tttttttcctatcac

SEQ ID NO: 932995 - DNA, 15 bp, Homo sapiens
ttttttcctatcact

SEQ ID NO: 932996 - DNA, 15 bp, Homo sapiens
tttttcctatcactg

SEQ ID NO: 932997 - DNA, 15 bp, Homo sapiens
ttttcctatcactgg

SEQ ID NO: 932998 - DNA, 15 bp, Homo sapiens
tttcctatcactggt

SEQ ID NO: 932999 - DNA, 15 bp, Homo sapiens
ttcctatcactggtg

SEQ ID NO: 933000 - DNA, 15 bp, Homo sapiens
tcctatcactggtgt

SEQ ID NO: 933001 - DNA, 15 bp, Homo sapiens
cctatcactggtgtt

SEQ ID NO: 933002 - DNA, 15 bp, Homo sapiens
ctatcactggtgtta

SEQ ID NO: 933003 - DNA, 15 bp, Homo sapiens
tatcactggtgttac

SEQ ID NO: 933004 - DNA, 15 bp, Homo sapiens
atcactggtgttaca

SEQ ID NO: 933005 - DNA, 15 bp, Homo sapiens
tcactggtgttacaa

SEQ ID NO: 933006 - DNA, 15 bp, Homo sapiens
cactggtgttacaaa

SEQ ID NO: 933007 - DNA, 15 bp, Homo sapiens
actggtgttacaaag

SEQ ID NO: 933008 - DNA, 15 bp, Homo sapiens
ctggtgttacaaagg

SEQ ID NO: 933009 - DNA, 15 bp, Homo sapiens
tggtgttacaaaggg

SEQ ID NO: 933010 - DNA, 15 bp, Homo sapiens
ggtgttacaaagggc

SEQ ID NO: 933011 - DNA, 15 bp, Homo sapiens
gtgttacaaagggcc

SEQ ID NO: 933012 - DNA, 15 bp, Homo sapiens
tgttacaaagggccc

SEQ ID NO: 933013 - DNA, 15 bp, Homo sapiens
gttacaaagggccct

SEQ ID NO: 933014 - DNA, 15 bp, Homo sapiens
ttacaaagggccctt

SEQ ID NO: 933015 - DNA, 15 bp, Homo sapiens
tacaaagggcccttg

SEQ ID NO: 933016 - DNA, 15 bp, Homo sapiens
acaaagggcccttgg

SEQ ID NO: 933017 - DNA, 15 bp, Homo sapiens
caaagggcccttggc

SEQ ID NO: 933018 - DNA, 15 bp, Homo sapiens
aaagggcccttggct

SEQ ID NO: 933019 - DNA, 15 bp, Homo sapiens
aagggcccttggctt

SEQ ID NO: 933020 - DNA, 15 bp, Homo sapiens
agggcccttggctta

SEQ ID NO: 933021 - DNA, 15 bp, Homo sapiens
gggcccttggcttag

SEQ ID NO: 933022 - DNA, 15 bp, Homo sapiens
ggcccttggcttagt

SEQ ID NO: 933023 - DNA, 15 bp, Homo sapiens
gcccttggcttagtg

SEQ ID NO: 933024 - DNA, 15 bp, Homo sapiens
cccttggcttagtga

SEQ ID NO: 933025 - DNA, 15 bp, Homo sapiens
ccttggcttagtgag

SEQ ID NO: 933026 - DNA, 15 bp, Homo sapiens
cttggcttagtgagc

SEQ ID NO: 933027 - DNA, 15 bp, Homo sapiens
ttggcttagtgagct

SEQ ID NO: 933028 - DNA, 15 bp, Homo sapiens
tggcttagtgagctt

SEQ ID NO: 933029 - DNA, 15 bp, Homo sapiens
ggcttagtgagcttc

SEQ ID NO: 933030 - DNA, 15 bp, Homo sapiens
gcttagtgagcttcc

SEQ ID NO: 933031 - DNA, 15 bp, Homo sapiens
cttagtgagcttccc

SEQ ID NO: 933032 - DNA, 15 bp, Homo sapiens
ttagtgagcttccct

SEQ ID NO: 933033 - DNA, 15 bp, Homo sapiens
tagtgagcttccctt

SEQ ID NO: 933034 - DNA, 15 bp, Homo sapiens
agtgagcttcccttt

SEQ ID NO: 933035 - DNA, 15 bp, Homo sapiens
gtgagcttccctttc

SEQ ID NO: 933036 - DNA, 15 bp, Homo sapiens
tgagcttccctttca

SEQ ID NO: 933037 - DNA, 15 bp, Homo sapiens
gagcttccctttcat

SEQ ID NO: 933038 - DNA, 15 bp, Homo sapiens
agcttccctttcatg

SEQ ID NO: 933039 - DNA, 15 bp, Homo sapiens
gcttccctttcatgg

SEQ ID NO: 933040 - DNA, 15 bp, Homo sapiens
cttccctttcatggt

SEQ ID NO: 933041 - DNA, 15 bp, Homo sapiens
ttccctttcatggta

SEQ ID NO: 933042 - DNA, 15 bp, Homo sapiens
tccctttcatggtag

SEQ ID NO: 933043 - DNA, 15 bp, Homo sapiens
ccctttcatggtagg

SEQ ID NO: 933044 - DNA, 15 bp, Homo sapiens
cctttcatggtagga

SEQ ID NO: 933045 - DNA, 15 bp, Homo sapiens
ctttcatggtaggat

SEQ ID NO: 933046 - DNA, 15 bp, Homo sapiens
tttcatggtaggatg

SEQ ID NO: 933047 - DNA, 15 bp, Homo sapiens
ttcatggtaggatga

SEQ ID NO: 933048 - DNA, 15 bp, Homo sapiens
tcatggtaggatgac

SEQ ID NO: 933049 - DNA, 15 bp, Homo sapiens
catggtaggatgaca

SEQ ID NO: 933050 - DNA, 15 bp, Homo sapiens
atggtaggatgacaa

SEQ ID NO: 933051 - DNA, 15 bp, Homo sapiens
tggtaggatgacaac

SEQ ID NO: 933052 - DNA, 15 bp, Homo sapiens
ggtaggatgacaact

SEQ ID NO: 933053 - DNA, 15 bp, Homo sapiens
gtaggatgacaacta

SEQ ID NO: 933054 - DNA, 15 bp, Homo sapiens
taggatgacaactaa

SEQ ID NO: 933055 - DNA, 15 bp, Homo sapiens
aggatgacaactaaa

SEQ ID NO: 933056 - DNA, 15 bp, Homo sapiens
ggatgacaactaaac

SEQ ID NO: 933057 - DNA, 15 bp, Homo sapiens
gatgacaactaaacc

SEQ ID NO: 933058 - DNA, 15 bp, Homo sapiens
atgacaactaaacca

SEQ ID NO: 933059 - DNA, 15 bp, Homo sapiens
tgacaactaaaccaa

SEQ ID NO: 933060 - DNA, 15 bp, Homo sapiens
gacaactaaaccaac

SEQ ID NO: 933061 - DNA, 15 bp, Homo sapiens
acaactaaaccaacc

SEQ ID NO: 933062 - DNA, 15 bp, Homo sapiens
caactaaaccaacct

SEQ ID NO: 933063 - DNA, 15 bp, Homo sapiens
aactaaaccaacctg

SEQ ID NO: 933064 - DNA, 15 bp, Homo sapiens
actaaaccaacctga

SEQ ID NO: 933065 - DNA, 15 bp, Homo sapiens
ctaaaccaacctgac

SEQ ID NO: 933066 - DNA, 15 bp, Homo sapiens
taaaccaacctgacc

SEQ ID NO: 933067 - DNA, 15 bp, Homo sapiens
aaaccaacctgacca

SEQ ID NO: 933068 - DNA, 15 bp, Homo sapiens
aaccaacctgaccag

SEQ ID NO: 933069 - DNA, 15 bp, Homo sapiens
accaacctgaccagg

SEQ ID NO: 933070 - DNA, 15 bp, Homo sapiens
ccaacctgaccagga

SEQ ID NO: 933071 - DNA, 15 bp, Homo sapiens
caacctgaccaggag

SEQ ID NO: 933072 - DNA, 15 bp, Homo sapiens
aacctgaccaggaga

SEQ ID NO: 933073 - DNA, 15 bp, Homo sapiens
acctgaccaggagac

SEQ ID NO: 933074 - DNA, 15 bp, Homo sapiens
cctgaccaggagacc

SEQ ID NO: 933075 - DNA, 15 bp, Homo sapiens
ctgaccaggagacca

SEQ ID NO: 933076 - DNA, 15 bp, Homo sapiens
tgaccaggagaccag

SEQ ID NO: 933077 - DNA, 15 bp, Homo sapiens
gaccaggagaccagg

SEQ ID NO: 933078 - DNA, 15 bp, Homo sapiens
accaggagaccaggg

SEQ ID NO: 933079 - DNA, 15 bp, Homo sapiens
ccaggagaccagggc

SEQ ID NO: 933080 - DNA, 15 bp, Homo sapiens
caggagaccagggcc

SEQ ID NO: 933081 - DNA, 15 bp, Homo sapiens
aggagaccagggccc

SEQ ID NO: 933082 - DNA, 15 bp, Homo sapiens
ggagaccagggccct

SEQ ID NO: 933083 - DNA, 15 bp, Homo sapiens
gagaccagggccctg

SEQ ID NO: 933084 - DNA, 15 bp, Homo sapiens
agaccagggccctgg

SEQ ID NO: 933085 - DNA, 15 bp, Homo sapiens
gaccagggccctggg

SEQ ID NO: 933086 - DNA, 15 bp, Homo sapiens
accagggccctggga

SEQ ID NO: 933087 - DNA, 15 bp, Homo sapiens
ccagggccctgggag

SEQ ID NO: 933088 - DNA, 15 bp, Homo sapiens
cagggccctgggaga

SEQ ID NO: 933089 - DNA, 15 bp, Homo sapiens
agggccctgggagaa

SEQ ID NO: 933090 - DNA, 15 bp, Homo sapiens
gggccctgggagaac

SEQ ID NO: 933091 - DNA, 15 bp, Homo sapiens
ggccctgggagaaca

SEQ ID NO: 933092 - DNA, 15 bp, Homo sapiens
gccctgggagaacag

SEQ ID NO: 933093 - DNA, 15 bp, Homo sapiens
ccctgggagaacaga

SEQ ID NO: 933094 - DNA, 15 bp, Homo sapiens
cctgggagaacagaa

SEQ ID NO: 933095 - DNA, 15 bp, Homo sapiens
ctgggagaacagaag

SEQ ID NO: 933096 - DNA, 15 bp, Homo sapiens
tgggagaacagaagt

SEQ ID NO: 933097 - DNA, 15 bp, Homo sapiens
gggagaacagaagtc

SEQ ID NO: 933098 - DNA, 15 bp, Homo sapiens
ggagaacagaagtca

SEQ ID NO: 933099 - DNA, 15 bp, Homo sapiens
gagaacagaagtcaa

SEQ ID NO: 933100 - DNA, 15 bp, Homo sapiens
agaacagaagtcaac

SEQ ID NO: 933101 - DNA, 15 bp, Homo sapiens
gaacagaagtcaact

SEQ ID NO: 933102 - DNA, 15 bp, Homo sapiens
aacagaagtcaactt

SEQ ID NO: 933103 - DNA, 15 bp, Homo sapiens
acagaagtcaacttt

SEQ ID NO: 933104 - DNA, 15 bp, Homo sapiens
cagaagtcaactttt

SEQ ID NO: 933105 - DNA, 15 bp, Homo sapiens
agaagtcaacttttc

SEQ ID NO: 933106 - DNA, 15 bp, Homo sapiens
gaagtcaacttttca

SEQ ID NO: 933107 - DNA, 15 bp, Homo sapiens
aagtcaacttttcag

SEQ ID NO: 933108 - DNA, 15 bp, Homo sapiens
agtcaacttttcagg

SEQ ID NO: 933109 - DNA, 15 bp, Homo sapiens
gtcaacttttcaggt

SEQ ID NO: 933110 - DNA, 15 bp, Homo sapiens
tcaacttttcaggta

SEQ ID NO: 933111 - DNA, 15 bp, Homo sapiens
caacttttcaggtag

SEQ ID NO: 933112 - DNA, 15 bp, Homo sapiens
aacttttcaggtagc

SEQ ID NO: 933113 - DNA, 15 bp, Homo sapiens
acttttcaggtagca

SEQ ID NO: 933114 - DNA, 15 bp, Homo sapiens
cttttcaggtagcaa

SEQ ID NO: 933115 - DNA, 15 bp, Homo sapiens
ttttcaggtagcaag

SEQ ID NO: 933116 - DNA, 15 bp, Homo sapiens
tttcaggtagcaagt

SEQ ID NO: 933117 - DNA, 15 bp, Homo sapiens
ttcaggtagcaagtc

SEQ ID NO: 933118 - DNA, 15 bp, Homo sapiens
tcaggtagcaagtcc

SEQ ID NO: 933119 - DNA, 15 bp, Homo sapiens
caggtagcaagtcca

SEQ ID NO: 933120 - DNA, 15 bp, Homo sapiens
aggtagcaagtccaa

SEQ ID NO: 933121 - DNA, 15 bp, Homo sapiens
ggtagcaagtccaag

SEQ ID NO: 933122 - DNA, 15 bp, Homo sapiens
gtagcaagtccaaga

SEQ ID NO: 933123 - DNA, 15 bp, Homo sapiens
tagcaagtccaagac

SEQ ID NO: 933124 - DNA, 15 bp, Homo sapiens
agcaagtccaagacc

SEQ ID NO: 933125 - DNA, 15 bp, Homo sapiens
gcaagtccaagacct

SEQ ID NO: 933126 - DNA, 15 bp, Homo sapiens
caagtccaagacctg

SEQ ID NO: 933127 - DNA, 15 bp, Homo sapiens
aagtccaagacctgt

SEQ ID NO: 933128 - DNA, 15 bp, Homo sapiens
agtccaagacctgta

SEQ ID NO: 933129 - DNA, 15 bp, Homo sapiens
gtccaagacctgtag

SEQ ID NO: 933130 - DNA, 15 bp, Homo sapiens
tccaagacctgtagt

SEQ ID NO: 933131 - DNA, 15 bp, Homo sapiens
ccaagacctgtagtg

SEQ ID NO: 933132 - DNA, 15 bp, Homo sapiens
caagacctgtagtgg

SEQ ID NO: 933133 - DNA, 15 bp, Homo sapiens
aagacctgtagtggt

SEQ ID NO: 933134 - DNA, 15 bp, Homo sapiens
agacctgtagtggtc

SEQ ID NO: 933135 - DNA, 15 bp, Homo sapiens
gacctgtagtggtcc

SEQ ID NO: 933136 - DNA, 15 bp, Homo sapiens
acctgtagtggtcca

SEQ ID NO: 933137 - DNA, 15 bp, Homo sapiens
cctgtagtggtccaa

SEQ ID NO: 933138 - DNA, 15 bp, Homo sapiens
ctgtagtggtccaac

SEQ ID NO: 933139 - DNA, 15 bp, Homo sapiens
tgtagtggtccaaca

SEQ ID NO: 933140 - DNA, 15 bp, Homo sapiens
gtagtggtccaacag

SEQ ID NO: 933141 - DNA, 15 bp, Homo sapiens
tagtggtccaacagc

SEQ ID NO: 933142 - DNA, 15 bp, Homo sapiens
agtggtccaacagca

SEQ ID NO: 933143 - DNA, 15 bp, Homo sapiens
gtggtccaacagcac

SEQ ID NO: 933144 - DNA, 15 bp, Homo sapiens
tggtccaacagcact

SEQ ID NO: 933145 - DNA, 15 bp, Homo sapiens
ggtccaacagcactg

SEQ ID NO: 933146 - DNA, 15 bp, Homo sapiens
gtccaacagcactga

SEQ ID NO: 933147 - DNA, 15 bp, Homo sapiens
tccaacagcactgat

SEQ ID NO: 933148 - DNA, 15 bp, Homo sapiens
ccaacagcactgatt

SEQ ID NO: 933149 - DNA, 15 bp, Homo sapiens
caacagcactgattg

SEQ ID NO: 933150 - DNA, 15 bp, Homo sapiens
aacagcactgattga

SEQ ID NO: 933151 - DNA, 15 bp, Homo sapiens
acagcactgattgag

SEQ ID NO: 933152 - DNA, 15 bp, Homo sapiens
cagcactgattgaga

SEQ ID NO: 933153 - DNA, 15 bp, Homo sapiens
agcactgattgagat

SEQ ID NO: 933154 - DNA, 15 bp, Homo sapiens
gcactgattgagatc

SEQ ID NO: 933155 - DNA, 15 bp, Homo sapiens
cactgattgagatct

SEQ ID NO: 933156 - DNA, 15 bp, Homo sapiens
actgattgagatctg

SEQ ID NO: 933157 - DNA, 15 bp, Homo sapiens
ctgattgagatctgg

SEQ ID NO: 933158 - DNA, 15 bp, Homo sapiens
tgattgagatctgga

SEQ ID NO: 933159 - DNA, 15 bp, Homo sapiens
gattgagatctggat

SEQ ID NO: 933160 - DNA, 15 bp, Homo sapiens
attgagatctggata

SEQ ID NO: 933161 - DNA, 15 bp, Homo sapiens
ttgagatctggataa

SEQ ID NO: 933162 - DNA, 15 bp, Homo sapiens
tgagatctggataag

SEQ ID NO: 933163 - DNA, 15 bp, Homo sapiens
gagatctggataaga

SEQ ID NO: 933164 - DNA, 15 bp, Homo sapiens
agatctggataagat

SEQ ID NO: 933165 - DNA, 15 bp, Homo sapiens
gatctggataagatg

SEQ ID NO: 933166 - DNA, 15 bp, Homo sapiens
atctggataagatgc

SEQ ID NO: 933167 - DNA, 15 bp, Homo sapiens
tctggataagatgcc

SEQ ID NO: 933168 - DNA, 15 bp, Homo sapiens
ctggataagatgcca

SEQ ID NO: 933169 - DNA, 15 bp, Homo sapiens
tggataagatgccag

SEQ ID NO: 933170 - DNA, 15 bp, Homo sapiens
ggataagatgccaga

SEQ ID NO: 933171 - DNA, 15 bp, Homo sapiens
gataagatgccagaa

SEQ ID NO: 933172 - DNA, 15 bp, Homo sapiens
ataagatgccagaac

SEQ ID NO: 933173 - DNA, 15 bp, Homo sapiens
taagatgccagaact

SEQ ID NO: 933174 - DNA, 15 bp, Homo sapiens
aagatgccagaactg

SEQ ID NO: 933175 - DNA, 15 bp, Homo sapiens
agatgccagaactgc

SEQ ID NO: 933176 - DNA, 15 bp, Homo sapiens
gatgccagaactgcc

SEQ ID NO: 933177 - DNA, 15 bp, Homo sapiens
atgccagaactgcct

SEQ ID NO: 933178 - DNA, 15 bp, Homo sapiens
tgccagaactgcctg

SEQ ID NO: 933179 - DNA, 15 bp, Homo sapiens
gccagaactgcctgc

SEQ ID NO: 933180 - DNA, 15 bp, Homo sapiens
ccagaactgcctgcc

SEQ ID NO: 933181 - DNA, 15 bp, Homo sapiens
cagaactgcctgccc

SEQ ID NO: 933182 - DNA, 15 bp, Homo sapiens
agaactgcctgcccc

SEQ ID NO: 933183 - DNA, 15 bp, Homo sapiens
gaactgcctgcccct

SEQ ID NO: 933184 - DNA, 15 bp, Homo sapiens
aactgcctgcccctc

SEQ ID NO: 933185 - DNA, 15 bp, Homo sapiens
actgcctgcccctct

SEQ ID NO: 933186 - DNA, 15 bp, Homo sapiens
ctgcctgcccctctc

SEQ ID NO: 933187 - DNA, 15 bp, Homo sapiens
tgcctgcccctctct

SEQ ID NO: 933188 - DNA, 15 bp, Homo sapiens
gcctgcccctctctt

SEQ ID NO: 933189 - DNA, 15 bp, Homo sapiens
cctgcccctctctta

SEQ ID NO: 933190 - DNA, 15 bp, Homo sapiens
ctgcccctctcttat

SEQ ID NO: 933191 - DNA, 15 bp, Homo sapiens
tgcccctctcttatg

SEQ ID NO: 933192 - DNA, 15 bp, Homo sapiens
gcccctctcttatgc

SEQ ID NO: 933193 - DNA, 15 bp, Homo sapiens
cccctctcttatgct

SEQ ID NO: 933194 - DNA, 15 bp, Homo sapiens
ccctctcttatgctt

SEQ ID NO: 933195 - DNA, 15 bp, Homo sapiens
cctctcttatgcttt

SEQ ID NO: 933196 - DNA, 15 bp, Homo sapiens
ctctcttatgcttta

SEQ ID NO: 933197 - DNA, 15 bp, Homo sapiens
tctcttatgctttat

SEQ ID NO: 933198 - DNA, 15 bp, Homo sapiens
ctcttatgctttata

SEQ ID NO: 933199 - DNA, 15 bp, Homo sapiens
tcttatgctttatag

SEQ ID NO: 933200 - DNA, 15 bp, Homo sapiens
cttatgctttatagg

SEQ ID NO: 933201 - DNA, 15 bp, Homo sapiens
ttatgctttatagga

SEQ ID NO: 933202 - DNA, 15 bp, Homo sapiens
tatgctttataggac

SEQ ID NO: 933203 - DNA, 15 bp, Homo sapiens
atgctttataggact

SEQ ID NO: 933204 - DNA, 15 bp, Homo sapiens
tgctttataggactt

SEQ ID NO: 933205 - DNA, 15 bp, Homo sapiens
gctttataggacttt

SEQ ID NO: 933206 - DNA, 15 bp, Homo sapiens
ctttataggactttc

SEQ ID NO: 933207 - DNA, 15 bp, Homo sapiens
tttataggactttcc

SEQ ID NO: 933208 - DNA, 15 bp, Homo sapiens
ttataggactttcct

SEQ ID NO: 933209 - DNA, 15 bp, Homo sapiens
tataggactttcctg

SEQ ID NO: 933210 - DNA, 15 bp, Homo sapiens
ataggactttcctgt

SEQ ID NO: 933211 - DNA, 15 bp, Homo sapiens
taggactttcctgtc

SEQ ID NO: 933212 - DNA, 15 bp, Homo sapiens
aggactttcctgtca

SEQ ID NO: 933213 - DNA, 15 bp, Homo sapiens
ggactttcctgtcag

SEQ ID NO: 933214 - DNA, 15 bp, Homo sapiens
gactttcctgtcagt

SEQ ID NO: 933215 - DNA, 15 bp, Homo sapiens
actttcctgtcagtg

SEQ ID NO: 933216 - DNA, 15 bp, Homo sapiens
ctttcctgtcagtgc

SEQ ID NO: 933217 - DNA, 15 bp, Homo sapiens
tttcctgtcagtgcc

SEQ ID NO: 933218 - DNA, 15 bp, Homo sapiens
ttcctgtcagtgcct

SEQ ID NO: 933219 - DNA, 15 bp, Homo sapiens
tcctgtcagtgcctc

SEQ ID NO: 933220 - DNA, 15 bp, Homo sapiens
cctgtcagtgcctct

SEQ ID NO: 933221 - DNA, 15 bp, Homo sapiens
ctgtcagtgcctctg

SEQ ID NO: 933222 - DNA, 15 bp, Homo sapiens
tgtcagtgcctctga

SEQ ID NO: 933223 - DNA, 15 bp, Homo sapiens
gtcagtgcctctgac

SEQ ID NO: 933224 - DNA, 15 bp, Homo sapiens
tcagtgcctctgacc

SEQ ID NO: 933225 - DNA, 15 bp, Homo sapiens
cagtgcctctgaccc

SEQ ID NO: 933226 - DNA, 15 bp, Homo sapiens
agtgcctctgaccct

SEQ ID NO: 933227 - DNA, 15 bp, Homo sapiens
gtgcctctgaccctg

SEQ ID NO: 933228 - DNA, 15 bp, Homo sapiens
tgcctctgaccctgt

SEQ ID NO: 933229 - DNA, 15 bp, Homo sapiens
gcctctgaccctgtg

SEQ ID NO: 933230 - DNA, 15 bp, Homo sapiens
cctctgaccctgtga

SEQ ID NO: 933231 - DNA, 15 bp, Homo sapiens
ctctgaccctgtgag

SEQ ID NO: 933232 - DNA, 15 bp, Homo sapiens
tctgaccctgtgagg

SEQ ID NO: 933233 - DNA, 15 bp, Homo sapiens
ctgaccctgtgaggt

SEQ ID NO: 933234 - DNA, 15 bp, Homo sapiens
tgaccctgtgaggta

SEQ ID NO: 933235 - DNA, 15 bp, Homo sapiens
gaccctgtgaggtat

SEQ ID NO: 933236 - DNA, 15 bp, Homo sapiens
accctgtgaggtatc

SEQ ID NO: 933237 - DNA, 15 bp, Homo sapiens
ccctgtgaggtatct

SEQ ID NO: 933238 - DNA, 15 bp, Homo sapiens
cctgtgaggtatctt

SEQ ID NO: 933239 - DNA, 15 bp, Homo sapiens
ctgtgaggtatcttt

SEQ ID NO: 933240 - DNA, 15 bp, Homo sapiens
tgtgaggtatctttc

SEQ ID NO: 933241 - DNA, 15 bp, Homo sapiens
gtgaggtatctttcc

SEQ ID NO: 933242 - DNA, 15 bp, Homo sapiens
tgaggtatctttcca

SEQ ID NO: 933243 - DNA, 15 bp, Homo sapiens
gaggtatctttccat

SEQ ID NO: 933244 - DNA, 15 bp, Homo sapiens
aggtatctttccata

SEQ ID NO: 933245 - DNA, 15 bp, Homo sapiens
ggtatctttccatac

SEQ ID NO: 933246 - DNA, 15 bp, Homo sapiens
gtatctttccatact

SEQ ID NO: 933247 - DNA, 15 bp, Homo sapiens
tatctttccatactg

SEQ ID NO: 933248 - DNA, 15 bp, Homo sapiens
atctttccatactgt

SEQ ID NO: 933249 - DNA, 15 bp, Homo sapiens
tctttccatactgtc

SEQ ID NO: 933250 - DNA, 15 bp, Homo sapiens
ctttccatactgtca

SEQ ID NO: 933251 - DNA, 15 bp, Homo sapiens
tttccatactgtcag

SEQ ID NO: 933252 - DNA, 15 bp, Homo sapiens
ttccatactgtcagt

SEQ ID NO: 933253 - DNA, 15 bp, Homo sapiens
tccatactgtcagtt

SEQ ID NO: 933254 - DNA, 15 bp, Homo sapiens
ccatactgtcagttg

SEQ ID NO: 933255 - DNA, 15 bp, Homo sapiens
catactgtcagttgt

SEQ ID NO: 933256 - DNA, 15 bp, Homo sapiens
atactgtcagttgtt

SEQ ID NO: 933257 - DNA, 15 bp, Homo sapiens
tactgtcagttgttc

SEQ ID NO: 933258 - DNA, 15 bp, Homo sapiens
actgtcagttgttcc

SEQ ID NO: 933259 - DNA, 15 bp, Homo sapiens
ctgtcagttgttccc

SEQ ID NO: 933260 - DNA, 15 bp, Homo sapiens
tgtcagttgttccca

SEQ ID NO: 933261 - DNA, 15 bp, Homo sapiens
gtcagttgttcccaa

SEQ ID NO: 933262 - DNA, 15 bp, Homo sapiens
tcagttgttcccaac

SEQ ID NO: 933263 - DNA, 15 bp, Homo sapiens
cagttgttcccaact

SEQ ID NO: 933264 - DNA, 15 bp, Homo sapiens
agttgttcccaactg

SEQ ID NO: 933265 - DNA, 15 bp, Homo sapiens
gttgttcccaactga

SEQ ID NO: 933266 - DNA, 15 bp, Homo sapiens
ttgttcccaactgaa

SEQ ID NO: 933267 - DNA, 15 bp, Homo sapiens
tgttcccaactgaat

SEQ ID NO: 933268 - DNA, 15 bp, Homo sapiens
gttcccaactgaata

SEQ ID NO: 933269 - DNA, 15 bp, Homo sapiens
ttcccaactgaatac

SEQ ID NO: 933270 - DNA, 15 bp, Homo sapiens
tcccaactgaataca

SEQ ID NO: 933271 - DNA, 15 bp, Homo sapiens
cccaactgaatacac

SEQ ID NO: 933272 - DNA, 15 bp, Homo sapiens
ccaactgaatacaca

SEQ ID NO: 933273 - DNA, 15 bp, Homo sapiens
caactgaatacacaa

SEQ ID NO: 933274 - DNA, 15 bp, Homo sapiens
aactgaatacacaaa

SEQ ID NO: 933275 - DNA, 15 bp, Homo sapiens
actgaatacacaaat

SEQ ID NO: 933276 - DNA, 15 bp, Homo sapiens
ctgaatacacaaatc

SEQ ID NO: 933277 - DNA, 15 bp, Homo sapiens
tgaatacacaaatct

SEQ ID NO: 933278 - DNA, 15 bp, Homo sapiens
gaatacacaaatctc

SEQ ID NO: 933279 - DNA, 15 bp, Homo sapiens
aatacacaaatctct

SEQ ID NO: 933280 - DNA, 15 bp, Homo sapiens
atacacaaatctctc

SEQ ID NO: 933281 - DNA, 15 bp, Homo sapiens
tacacaaatctctct

SEQ ID NO: 933282 - DNA, 15 bp, Homo sapiens
acacaaatctctcta

SEQ ID NO: 933283 - DNA, 15 bp, Homo sapiens
cacaaatctctctaa

SEQ ID NO: 933284 - DNA, 15 bp, Homo sapiens
acaaatctctctaac

SEQ ID NO: 933285 - DNA, 15 bp, Homo sapiens
caaatctctctaacc

SEQ ID NO: 933286 - DNA, 15 bp, Homo sapiens
aaatctctctaacca

SEQ ID NO: 933287 - DNA, 15 bp, Homo sapiens
aatctctctaaccaa

SEQ ID NO: 933288 - DNA, 15 bp, Homo sapiens
atctctctaaccaaa

SEQ ID NO: 933289 - DNA, 15 bp, Homo sapiens
tctctctaaccaaag

SEQ ID NO: 933290 - DNA, 15 bp, Homo sapiens
ctctctaaccaaagc

SEQ ID NO: 933291 - DNA, 15 bp, Homo sapiens
tctctaaccaaagct

SEQ ID NO: 933292 - DNA, 15 bp, Homo sapiens
ctctaaccaaagctt

SEQ ID NO: 933293 - DNA, 15 bp, Homo sapiens
tctaaccaaagctta

SEQ ID NO: 933294 - DNA, 15 bp, Homo sapiens
ctaaccaaagcttac

SEQ ID NO: 933295 - DNA, 15 bp, Homo sapiens
taaccaaagcttaca

SEQ ID NO: 933296 - DNA, 15 bp, Homo sapiens
aaccaaagcttacag

SEQ ID NO: 933297 - DNA, 15 bp, Homo sapiens
accaaagcttacagt

SEQ ID NO: 933298 - DNA, 15 bp, Homo sapiens
ccaaagcttacagtt

SEQ ID NO: 933299 - DNA, 15 bp, Homo sapiens
caaagcttacagttc

SEQ ID NO: 933300 - DNA, 15 bp, Homo sapiens
aaagcttacagttca

SEQ ID NO: 933301 - DNA, 15 bp, Homo sapiens
aagcttacagttcag

SEQ ID NO: 933302 - DNA, 15 bp, Homo sapiens
agcttacagttcagc

SEQ ID NO: 933303 - DNA, 15 bp, Homo sapiens
gcttacagttcagcc

SEQ ID NO: 933304 - DNA, 15 bp, Homo sapiens
cttacagttcagcca

SEQ ID NO: 933305 - DNA, 15 bp, Homo sapiens
ttacagttcagccaa

SEQ ID NO: 933306 - DNA, 15 bp, Homo sapiens
tacagttcagccaac

SEQ ID NO: 933307 - DNA, 15 bp, Homo sapiens
acagttcagccaact

SEQ ID NO: 933308 - DNA, 15 bp, Homo sapiens
cagttcagccaactc

SEQ ID NO: 933309 - DNA, 15 bp, Homo sapiens
agttcagccaactcc

SEQ ID NO: 933310 - DNA, 15 bp, Homo sapiens
gttcagccaactccc

SEQ ID NO: 933311 - DNA, 15 bp, Homo sapiens
ttcagccaactccca

SEQ ID NO: 933312 - DNA, 15 bp, Homo sapiens
tcagccaactcccag

SEQ ID NO: 933313 - DNA, 15 bp, Homo sapiens
cagccaactcccagt

SEQ ID NO: 933314 - DNA, 15 bp, Homo sapiens
agccaactcccagtg

SEQ ID NO: 933315 - DNA, 15 bp, Homo sapiens
gccaactcccagtgg

SEQ ID NO: 933316 - DNA, 15 bp, Homo sapiens
ccaactcccagtggt

SEQ ID NO: 933317 - DNA, 15 bp, Homo sapiens
caactcccagtggtt

SEQ ID NO: 933318 - DNA, 15 bp, Homo sapiens
aactcccagtggttc

SEQ ID NO: 933319 - DNA, 15 bp, Homo sapiens
actcccagtggttct

SEQ ID NO: 933320 - DNA, 15 bp, Homo sapiens
ctcccagtggttctt

SEQ ID NO: 933321 - DNA, 15 bp, Homo sapiens
tcccagtggttcttc

SEQ ID NO: 933322 - DNA, 15 bp, Homo sapiens
cccagtggttcttct

SEQ ID NO: 933323 - DNA, 15 bp, Homo sapiens
ccagtggttcttctg

SEQ ID NO: 933324 - DNA, 15 bp, Homo sapiens
cagtggttcttctga

SEQ ID NO: 933325 - DNA, 15 bp, Homo sapiens
agtggttcttctgaa

SEQ ID NO: 933326 - DNA, 15 bp, Homo sapiens
gtggttcttctgaat

SEQ ID NO: 933327 - DNA, 15 bp, Homo sapiens
tggttcttctgaatt

SEQ ID NO: 933328 - DNA, 15 bp, Homo sapiens
ggttcttctgaatta

SEQ ID NO: 933329 - DNA, 15 bp, Homo sapiens
gttcttctgaattaa

SEQ ID NO: 933330 - DNA, 15 bp, Homo sapiens
ttcttctgaattaac

SEQ ID NO: 933331 - DNA, 15 bp, Homo sapiens
tcttctgaattaaca

SEQ ID NO: 933332 - DNA, 15 bp, Homo sapiens
cttctgaattaacag

SEQ ID NO: 933333 - DNA, 15 bp, Homo sapiens
ttctgaattaacaga

SEQ ID NO: 933334 - DNA, 15 bp, Homo sapiens
tctgaattaacagaa

SEQ ID NO: 933335 - DNA, 15 bp, Homo sapiens
ctgaattaacagaat

SEQ ID NO: 933336 - DNA, 15 bp, Homo sapiens
tgaattaacagaatt

SEQ ID NO: 933337 - DNA, 15 bp, Homo sapiens
gaattaacagaatta

SEQ ID NO: 933338 - DNA, 15 bp, Homo sapiens
aattaacagaattag

SEQ ID NO: 933339 - DNA, 15 bp, Homo sapiens
attaacagaattagc

SEQ ID NO: 933340 - DNA, 15 bp, Homo sapiens
ttaacagaattagca

SEQ ID NO: 933341 - DNA, 15 bp, Homo sapiens
taacagaattagcag

SEQ ID NO: 933342 - DNA, 15 bp, Homo sapiens
aacagaattagcaga

SEQ ID NO: 933343 - DNA, 15 bp, Homo sapiens
acagaattagcagag

SEQ ID NO: 933344 - DNA, 15 bp, Homo sapiens
cagaattagcagagc

SEQ ID NO: 933345 - DNA, 15 bp, Homo sapiens
agaattagcagagca

SEQ ID NO: 933346 - DNA, 15 bp, Homo sapiens
gaattagcagagcat

SEQ ID NO: 933347 - DNA, 15 bp, Homo sapiens
aattagcagagcatt

SEQ ID NO: 933348 - DNA, 15 bp, Homo sapiens
attagcagagcattc

SEQ ID NO: 933349 - DNA, 15 bp, Homo sapiens
ttagcagagcattct

SEQ ID NO: 933350 - DNA, 15 bp, Homo sapiens
tagcagagcattctg

SEQ ID NO: 933351 - DNA, 15 bp, Homo sapiens
agcagagcattctgc

SEQ ID NO: 933352 - DNA, 15 bp, Homo sapiens
gcagagcattctgca

SEQ ID NO: 933353 - DNA, 15 bp, Homo sapiens
cagagcattctgcag

SEQ ID NO: 933354 - DNA, 15 bp, Homo sapiens
agagcattctgcagt

SEQ ID NO: 933355 - DNA, 15 bp, Homo sapiens
gagcattctgcagtt

SEQ ID NO: 933356 - DNA, 15 bp, Homo sapiens
agcattctgcagttt

SEQ ID NO: 933357 - DNA, 15 bp, Homo sapiens
gcattctgcagtttg

SEQ ID NO: 933358 - DNA, 15 bp, Homo sapiens
cattctgcagtttga

SEQ ID NO: 933359 - DNA, 15 bp, Homo sapiens
attctgcagtttgat

SEQ ID NO: 933360 - DNA, 15 bp, Homo sapiens
ttctgcagtttgatc

SEQ ID NO: 933361 - DNA, 15 bp, Homo sapiens
tctgcagtttgatca

SEQ ID NO: 933362 - DNA, 15 bp, Homo sapiens
ctgcagtttgatcac

SEQ ID NO: 933363 - DNA, 15 bp, Homo sapiens
tgcagtttgatcaca

SEQ ID NO: 933364 - DNA, 15 bp, Homo sapiens
gcagtttgatcacat

SEQ ID NO: 933365 - DNA, 15 bp, Homo sapiens
cagtttgatcacata

SEQ ID NO: 933366 - DNA, 15 bp, Homo sapiens
agtttgatcacatac

SEQ ID NO: 933367 - DNA, 15 bp, Homo sapiens
gtttgatcacatacc

SEQ ID NO: 933368 - DNA, 15 bp, Homo sapiens
tttgatcacataccc

SEQ ID NO: 933369 - DNA, 15 bp, Homo sapiens
ttgatcacatacccg

SEQ ID NO: 933370 - DNA, 15 bp, Homo sapiens
tgatcacatacccgc

SEQ ID NO: 933371 - DNA, 15 bp, Homo sapiens
gatcacatacccgct

SEQ ID NO: 933372 - DNA, 15 bp, Homo sapiens
atcacatacccgcta

SEQ ID NO: 933373 - DNA, 15 bp, Homo sapiens
tcacatacccgctaa

SEQ ID NO: 933374 - DNA, 15 bp, Homo sapiens
cacatacccgctaac

SEQ ID NO: 933375 - DNA, 15 bp, Homo sapiens
acatacccgctaaca

SEQ ID NO: 933376 - DNA, 15 bp, Homo sapiens
catacccgctaacag

SEQ ID NO: 933377 - DNA, 15 bp, Homo sapiens
atacccgctaacagt

SEQ ID NO: 933378 - DNA, 15 bp, Homo sapiens
tacccgctaacagtg

SEQ ID NO: 933379 - DNA, 15 bp, Homo sapiens
acccgctaacagtga

SEQ ID NO: 933380 - DNA, 15 bp, Homo sapiens
cccgctaacagtgag

SEQ ID NO: 933381 - DNA, 15 bp, Homo sapiens
ccgctaacagtgagt

SEQ ID NO: 933382 - DNA, 15 bp, Homo sapiens
cgctaacagtgagtt

SEQ ID NO: 933383 - DNA, 15 bp, Homo sapiens
gctaacagtgagttt

SEQ ID NO: 933384 - DNA, 15 bp, Homo sapiens
ctaacagtgagttta

SEQ ID NO: 933385 - DNA, 15 bp, Homo sapiens
taacagtgagtttag

SEQ ID NO: 933386 - DNA, 15 bp, Homo sapiens
aacagtgagtttagc

SEQ ID NO: 933387 - DNA, 15 bp, Homo sapiens
acagtgagtttagct

SEQ ID NO: 933388 - DNA, 15 bp, Homo sapiens
cagtgagtttagctt

SEQ ID NO: 933389 - DNA, 15 bp, Homo sapiens
agtgagtttagcttc

SEQ ID NO: 933390 - DNA, 15 bp, Homo sapiens
gtgagtttagcttct

SEQ ID NO: 933391 - DNA, 15 bp, Homo sapiens
tgagtttagcttctc

SEQ ID NO: 933392 - DNA, 15 bp, Homo sapiens
gagtttagcttctct

SEQ ID NO: 933393 - DNA, 15 bp, Homo sapiens
agtttagcttctctt

SEQ ID NO: 933394 - DNA, 15 bp, Homo sapiens
gtttagcttctcttc

SEQ ID NO: 933395 - DNA, 15 bp, Homo sapiens
tttagcttctcttcc

SEQ ID NO: 933396 - DNA, 15 bp, Homo sapiens
ttagcttctcttcca

SEQ ID NO: 933397 - DNA, 15 bp, Homo sapiens
tagcttctcttccat

SEQ ID NO: 933398 - DNA, 15 bp, Homo sapiens
agcttctcttccata

SEQ ID NO: 933399 - DNA, 15 bp, Homo sapiens
gcttctcttccatat

SEQ ID NO: 933400 - DNA, 15 bp, Homo sapiens
cttctcttccatatt

SEQ ID NO: 933401 - DNA, 15 bp, Homo sapiens
ttctcttccatattt

SEQ ID NO: 933402 - DNA, 15 bp, Homo sapiens
tctcttccatatttg

SEQ ID NO: 933403 - DNA, 15 bp, Homo sapiens
ctcttccatatttga

SEQ ID NO: 933404 - DNA, 15 bp, Homo sapiens
tcttccatatttgat

SEQ ID NO: 933405 - DNA, 15 bp, Homo sapiens
cttccatatttgata

SEQ ID NO: 933406 - DNA, 15 bp, Homo sapiens
ttccatatttgatat

SEQ ID NO: 933407 - DNA, 15 bp, Homo sapiens
tccatatttgatatt

SEQ ID NO: 933408 - DNA, 15 bp, Homo sapiens
ccatatttgatattt

SEQ ID NO: 933409 - DNA, 15 bp, Homo sapiens
catatttgatatttc

SEQ ID NO: 933410 - DNA, 15 bp, Homo sapiens
atatttgatatttct

SEQ ID NO: 933411 - DNA, 15 bp, Homo sapiens
tatttgatatttctg

SEQ ID NO: 933412 - DNA, 15 bp, Homo sapiens
atttgatatttctga

SEQ ID NO: 933413 - DNA, 15 bp, Homo sapiens
tttgatatttctgaa

SEQ ID NO: 933414 - DNA, 15 bp, Homo sapiens
ttgatatttctgaat

SEQ ID NO: 933415 - DNA, 15 bp, Homo sapiens
tgatatttctgaatt

SEQ ID NO: 933416 - DNA, 15 bp, Homo sapiens
gatatttctgaattt

SEQ ID NO: 933417 - DNA, 15 bp, Homo sapiens
atatttctgaatttt

SEQ ID NO: 933418 - DNA, 15 bp, Homo sapiens
tatttctgaattttt

SEQ ID NO: 933419 - DNA, 15 bp, Homo sapiens
atttctgaatttttc

SEQ ID NO: 933420 - DNA, 15 bp, Homo sapiens
tttctgaatttttct

SEQ ID NO: 933421 - DNA, 15 bp, Homo sapiens
ttctgaatttttctg

SEQ ID NO: 933422 - DNA, 15 bp, Homo sapiens
tctgaatttttctga

SEQ ID NO: 933423 - DNA, 15 bp, Homo sapiens
ctgaatttttctgaa

SEQ ID NO: 933424 - DNA, 15 bp, Homo sapiens
tgaatttttctgaat

SEQ ID NO: 933425 - DNA, 15 bp, Homo sapiens
gaatttttctgaatg

SEQ ID NO: 933426 - DNA, 15 bp, Homo sapiens
aatttttctgaatgc

SEQ ID NO: 933427 - DNA, 15 bp, Homo sapiens
atttttctgaatgcc

SEQ ID NO: 933428 - DNA, 15 bp, Homo sapiens
tttttctgaatgccc

SEQ ID NO: 933429 - DNA, 15 bp, Homo sapiens
ttttctgaatgccca

SEQ ID NO: 933430 - DNA, 15 bp, Homo sapiens
tttctgaatgcccag

SEQ ID NO: 933431 - DNA, 15 bp, Homo sapiens
ttctgaatgcccaga

SEQ ID NO: 933432 - DNA, 15 bp, Homo sapiens
tctgaatgcccagag

SEQ ID NO: 933433 - DNA, 15 bp, Homo sapiens
ctgaatgcccagaga

SEQ ID NO: 933434 - DNA, 15 bp, Homo sapiens
tgaatgcccagagaa

SEQ ID NO: 933435 - DNA, 15 bp, Homo sapiens
gaatgcccagagaat

SEQ ID NO: 933436 - DNA, 15 bp, Homo sapiens
aatgcccagagaatg

SEQ ID NO: 933437 - DNA, 15 bp, Homo sapiens
atgcccagagaatgt

SEQ ID NO: 933438 - DNA, 15 bp, Homo sapiens
tgcccagagaatgta

SEQ ID NO: 933439 - DNA, 15 bp, Homo sapiens
gcccagagaatgtac

SEQ ID NO: 933440 - DNA, 15 bp, Homo sapiens
cccagagaatgtaca

SEQ ID NO: 933441 - DNA, 15 bp, Homo sapiens
ccagagaatgtacat

SEQ ID NO: 933442 - DNA, 15 bp, Homo sapiens
cagagaatgtacata

SEQ ID NO: 933443 - DNA, 15 bp, Homo sapiens
agagaatgtacataa

SEQ ID NO: 933444 - DNA, 15 bp, Homo sapiens
gagaatgtacataat

SEQ ID NO: 933445 - DNA, 15 bp, Homo sapiens
agaatgtacataata

SEQ ID NO: 933446 - DNA, 15 bp, Homo sapiens
gaatgtacataataa

SEQ ID NO: 933447 - DNA, 15 bp, Homo sapiens
aatgtacataataac

SEQ ID NO: 933448 - DNA, 15 bp, Homo sapiens
atgtacataataaca

SEQ ID NO: 933449 - DNA, 15 bp, Homo sapiens
tgtacataataacat

SEQ ID NO: 933450 - DNA, 15 bp, Homo sapiens
gtacataataacatt

SEQ ID NO: 933451 - DNA, 15 bp, Homo sapiens
tacataataacattg

SEQ ID NO: 933452 - DNA, 15 bp, Homo sapiens
acataataacattga

SEQ ID NO: 933453 - DNA, 15 bp, Homo sapiens
cataataacattgat

SEQ ID NO: 933454 - DNA, 15 bp, Homo sapiens
ataataacattgata

SEQ ID NO: 933455 - DNA, 15 bp, Homo sapiens
taataacattgatag

SEQ ID NO: 933456 - DNA, 15 bp, Homo sapiens
aataacattgatagt

SEQ ID NO: 933457 - DNA, 15 bp, Homo sapiens
ataacattgatagta

SEQ ID NO: 933458 - DNA, 15 bp, Homo sapiens
taacattgatagtat

SEQ ID NO: 933459 - DNA, 15 bp, Homo sapiens
aacattgatagtatc

SEQ ID NO: 933460 - DNA, 15 bp, Homo sapiens
acattgatagtatca

SEQ ID NO: 933461 - DNA, 15 bp, Homo sapiens
cattgatagtatcaa

SEQ ID NO: 933462 - DNA, 15 bp, Homo sapiens
attgatagtatcaaa

SEQ ID NO: 933463 - DNA, 15 bp, Homo sapiens
ttgatagtatcaaat

SEQ ID NO: 933464 - DNA, 15 bp, Homo sapiens
tgatagtatcaaata

SEQ ID NO: 933465 - DNA, 15 bp, Homo sapiens
gatagtatcaaatat

SEQ ID NO: 933466 - DNA, 15 bp, Homo sapiens
atagtatcaaatatt

SEQ ID NO: 933467 - DNA, 15 bp, Homo sapiens
tagtatcaaatattt

SEQ ID NO: 933468 - DNA, 15 bp, Homo sapiens
agtatcaaatatttg

SEQ ID NO: 933469 - DNA, 15 bp, Homo sapiens
gtatcaaatatttgt

SEQ ID NO: 933470 - DNA, 15 bp, Homo sapiens
tatcaaatatttgtt

SEQ ID NO: 933471 - DNA, 15 bp, Homo sapiens
atcaaatatttgttg

SEQ ID NO: 933472 - DNA, 15 bp, Homo sapiens
tcaaatatttgttga

SEQ ID NO: 933473 - DNA, 15 bp, Homo sapiens
caaatatttgttgag

SEQ ID NO: 933474 - DNA, 15 bp, Homo sapiens
aaatatttgttgaga

SEQ ID NO: 933475 - DNA, 15 bp, Homo sapiens
aatatttgttgagag

SEQ ID NO: 933476 - DNA, 15 bp, Homo sapiens
atatttgttgagagt

SEQ ID NO: 933477 - DNA, 15 bp, Homo sapiens
tatttgttgagagtt

SEQ ID NO: 933478 - DNA, 15 bp, Homo sapiens
atttgttgagagttt

SEQ ID NO: 933479 - DNA, 15 bp, Homo sapiens
tttgttgagagtttg

SEQ ID NO: 933480 - DNA, 15 bp, Homo sapiens
ttgttgagagtttgc

SEQ ID NO: 933481 - DNA, 15 bp, Homo sapiens
tgttgagagtttgca

SEQ ID NO: 933482 - DNA, 15 bp, Homo sapiens
gttgagagtttgcaa

SEQ ID NO: 933483 - DNA, 15 bp, Homo sapiens
ttgagagtttgcaat

SEQ ID NO: 933484 - DNA, 15 bp, Homo sapiens
tgagagtttgcaata

SEQ ID NO: 933485 - DNA, 15 bp, Homo sapiens
gagagtttgcaatac

SEQ ID NO: 933486 - DNA, 15 bp, Homo sapiens
agagtttgcaatacg

SEQ ID NO: 933487 - DNA, 15 bp, Homo sapiens
gagtttgcaatacgt

SEQ ID NO: 933488 - DNA, 15 bp, Homo sapiens
agtttgcaatacgtc

SEQ ID NO: 933489 - DNA, 15 bp, Homo sapiens
gtttgcaatacgtca

SEQ ID NO: 933490 - DNA, 15 bp, Homo sapiens
tttgcaatacgtcag

SEQ ID NO: 933491 - DNA, 15 bp, Homo sapiens
ttgcaatacgtcagg

SEQ ID NO: 933492 - DNA, 15 bp, Homo sapiens
tgcaatacgtcaggg

SEQ ID NO: 933493 - DNA, 15 bp, Homo sapiens
gcaatacgtcagggt

SEQ ID NO: 933494 - DNA, 15 bp, Homo sapiens
caatacgtcagggtc

SEQ ID NO: 933495 - DNA, 15 bp, Homo sapiens
aatacgtcagggtct

SEQ ID NO: 933496 - DNA, 15 bp, Homo sapiens
atacgtcagggtctt

SEQ ID NO: 933497 - DNA, 15 bp, Homo sapiens
tacgtcagggtcttg

SEQ ID NO: 933498 - DNA, 15 bp, Homo sapiens
acgtcagggtcttgt

SEQ ID NO: 933499 - DNA, 15 bp, Homo sapiens
cgtcagggtcttgtt

SEQ ID NO: 933500 - DNA, 15 bp, Homo sapiens
gtcagggtcttgtta

SEQ ID NO: 933501 - DNA, 15 bp, Homo sapiens
tcagggtcttgttaa

SEQ ID NO: 933502 - DNA, 15 bp, Homo sapiens
cagggtcttgttaaa

SEQ ID NO: 933503 - DNA, 15 bp, Homo sapiens
agggtcttgttaaac

SEQ ID NO: 933504 - DNA, 15 bp, Homo sapiens
gggtcttgttaaaca

SEQ ID NO: 933505 - DNA, 15 bp, Homo sapiens
ggtcttgttaaacat

SEQ ID NO: 933506 - DNA, 15 bp, Homo sapiens
gtcttgttaaacatt

SEQ ID NO: 933507 - DNA, 15 bp, Homo sapiens
tcttgttaaacattc

SEQ ID NO: 933508 - DNA, 15 bp, Homo sapiens
cttgttaaacattca

SEQ ID NO: 933509 - DNA, 15 bp, Homo sapiens
ttgttaaacattcac

SEQ ID NO: 933510 - DNA, 15 bp, Homo sapiens
tgttaaacattcacg

SEQ ID NO: 933511 - DNA, 15 bp, Homo sapiens
gttaaacattcacgt

SEQ ID NO: 933512 - DNA, 15 bp, Homo sapiens
ttaaacattcacgtt

SEQ ID NO: 933513 - DNA, 15 bp, Homo sapiens
taaacattcacgtta

SEQ ID NO: 933514 - DNA, 15 bp, Homo sapiens
aaacattcacgttat

SEQ ID NO: 933515 - DNA, 15 bp, Homo sapiens
aacattcacgttatc

SEQ ID NO: 933516 - DNA, 15 bp, Homo sapiens
acattcacgttatca

SEQ ID NO: 933517 - DNA, 15 bp, Homo sapiens
cattcacgttatcac

SEQ ID NO: 933518 - DNA, 15 bp, Homo sapiens
attcacgttatcaca

SEQ ID NO: 933519 - DNA, 15 bp, Homo sapiens
ttcacgttatcacat

SEQ ID NO: 933520 - DNA, 15 bp, Homo sapiens
tcacgttatcacatt

SEQ ID NO: 933521 - DNA, 15 bp, Homo sapiens
cacgttatcacattt

SEQ ID NO: 933522 - DNA, 15 bp, Homo sapiens
acgttatcacattta

SEQ ID NO: 933523 - DNA, 15 bp, Homo sapiens
cgttatcacatttat

SEQ ID NO: 933524 - DNA, 15 bp, Homo sapiens
gttatcacatttatc

SEQ ID NO: 933525 - DNA, 15 bp, Homo sapiens
ttatcacatttatct

SEQ ID NO: 933526 - DNA, 15 bp, Homo sapiens
tatcacatttatctc

SEQ ID NO: 933527 - DNA, 15 bp, Homo sapiens
atcacatttatctcc

SEQ ID NO: 933528 - DNA, 15 bp, Homo sapiens
tcacatttatctccc

SEQ ID NO: 933529 - DNA, 15 bp, Homo sapiens
cacatttatctccct

SEQ ID NO: 933530 - DNA, 15 bp, Homo sapiens
acatttatctccctc

SEQ ID NO: 933531 - DNA, 15 bp, Homo sapiens
catttatctccctca

SEQ ID NO: 933532 - DNA, 15 bp, Homo sapiens
atttatctccctcac

SEQ ID NO: 933533 - DNA, 15 bp, Homo sapiens
tttatctccctcaca

SEQ ID NO: 933534 - DNA, 15 bp, Homo sapiens
ttatctccctcacaa

SEQ ID NO: 933535 - DNA, 15 bp, Homo sapiens
tatctccctcacaac

SEQ ID NO: 933536 - DNA, 15 bp, Homo sapiens
atctccctcacaaca

SEQ ID NO: 933537 - DNA, 15 bp, Homo sapiens
tctccctcacaacaa

SEQ ID NO: 933538 - DNA, 15 bp, Homo sapiens
ctccctcacaacaac

SEQ ID NO: 933539 - DNA, 15 bp, Homo sapiens
tccctcacaacaacc

SEQ ID NO: 933540 - DNA, 15 bp, Homo sapiens
ccctcacaacaacct

SEQ ID NO: 933541 - DNA, 15 bp, Homo sapiens
cctcacaacaacctc

SEQ ID NO: 933542 - DNA, 15 bp, Homo sapiens
ctcacaacaacctca

SEQ ID NO: 933543 - DNA, 15 bp, Homo sapiens
tcacaacaacctcat

SEQ ID NO: 933544 - DNA, 15 bp, Homo sapiens
cacaacaacctcatg

SEQ ID NO: 933545 - DNA, 15 bp, Homo sapiens
acaacaacctcatga

SEQ ID NO: 933546 - DNA, 15 bp, Homo sapiens
caacaacctcatgag

SEQ ID NO: 933547 - DNA, 15 bp, Homo sapiens
aacaacctcatgagc

SEQ ID NO: 933548 - DNA, 15 bp, Homo sapiens
acaacctcatgagct

SEQ ID NO: 933549 - DNA, 15 bp, Homo sapiens
caacctcatgagcta

SEQ ID NO: 933550 - DNA, 15 bp, Homo sapiens
aacctcatgagctac

SEQ ID NO: 933551 - DNA, 15 bp, Homo sapiens
acctcatgagctaca

SEQ ID NO: 933552 - DNA, 15 bp, Homo sapiens
cctcatgagctacat

SEQ ID NO: 933553 - DNA, 15 bp, Homo sapiens
ctcatgagctacata

SEQ ID NO: 933554 - DNA, 15 bp, Homo sapiens
tcatgagctacatac

SEQ ID NO: 933555 - DNA, 15 bp, Homo sapiens
catgagctacatact

SEQ ID NO: 933556 - DNA, 15 bp, Homo sapiens
atgagctacatacta

SEQ ID NO: 933557 - DNA, 15 bp, Homo sapiens
tgagctacatactat

SEQ ID NO: 933558 - DNA, 15 bp, Homo sapiens
gagctacatactatt

SEQ ID NO: 933559 - DNA, 15 bp, Homo sapiens
agctacatactattg

SEQ ID NO: 933560 - DNA, 15 bp, Homo sapiens
gctacatactattgc

SEQ ID NO: 933561 - DNA, 15 bp, Homo sapiens
ctacatactattgcc

SEQ ID NO: 933562 - DNA, 15 bp, Homo sapiens
tacatactattgccc

SEQ ID NO: 933563 - DNA, 15 bp, Homo sapiens
acatactattgccct

SEQ ID NO: 933564 - DNA, 15 bp, Homo sapiens
catactattgccctt

SEQ ID NO: 933565 - DNA, 15 bp, Homo sapiens
atactattgcccttc

SEQ ID NO: 933566 - DNA, 15 bp, Homo sapiens
tactattgcccttcc

SEQ ID NO: 933567 - DNA, 15 bp, Homo sapiens
actattgcccttccc

SEQ ID NO: 933568 - DNA, 15 bp, Homo sapiens
ctattgcccttccca

SEQ ID NO: 933569 - DNA, 15 bp, Homo sapiens
tattgcccttcccat

SEQ ID NO: 933570 - DNA, 15 bp, Homo sapiens
attgcccttcccatt

SEQ ID NO: 933571 - DNA, 15 bp, Homo sapiens
ttgcccttcccattc

SEQ ID NO: 933572 - DNA, 15 bp, Homo sapiens
tgcccttcccattca

SEQ ID NO: 933573 - DNA, 15 bp, Homo sapiens
gcccttcccattcaa

SEQ ID NO: 933574 - DNA, 15 bp, Homo sapiens
cccttcccattcaat

SEQ ID NO: 933575 - DNA, 15 bp, Homo sapiens
ccttcccattcaatt

SEQ ID NO: 933576 - DNA, 15 bp, Homo sapiens
cttcccattcaattg

SEQ ID NO: 933577 - DNA, 15 bp, Homo sapiens
ttcccattcaattga

SEQ ID NO: 933578 - DNA, 15 bp, Homo sapiens
tcccattcaattgag

SEQ ID NO: 933579 - DNA, 15 bp, Homo sapiens
cccattcaattgaga

SEQ ID NO: 933580 - DNA, 15 bp, Homo sapiens
ccattcaattgagag

SEQ ID NO: 933581 - DNA, 15 bp, Homo sapiens
cattcaattgagaga

SEQ ID NO: 933582 - DNA, 15 bp, Homo sapiens
attcaattgagagaa

SEQ ID NO: 933583 - DNA, 15 bp, Homo sapiens
ttcaattgagagaaa

SEQ ID NO: 933584 - DNA, 15 bp, Homo sapiens
tcaattgagagaaaa

SEQ ID NO: 933585 - DNA, 15 bp, Homo sapiens
caattgagagaaaac

SEQ ID NO: 933586 - DNA, 15 bp, Homo sapiens
aattgagagaaaact

SEQ ID NO: 933587 - DNA, 15 bp, Homo sapiens
attgagagaaaactg

SEQ ID NO: 933588 - DNA, 15 bp, Homo sapiens
ttgagagaaaactga

SEQ ID NO: 933589 - DNA, 15 bp, Homo sapiens
tgagagaaaactgag

SEQ ID NO: 933590 - DNA, 15 bp, Homo sapiens
gagagaaaactgagt

SEQ ID NO: 933591 - DNA, 15 bp, Homo sapiens
agagaaaactgagtc

SEQ ID NO: 933592 - DNA, 15 bp, Homo sapiens
gagaaaactgagtct

SEQ ID NO: 933593 - DNA, 15 bp, Homo sapiens
agaaaactgagtctc

SEQ ID NO: 933594 - DNA, 15 bp, Homo sapiens
gaaaactgagtctca

SEQ ID NO: 933595 - DNA, 15 bp, Homo sapiens
aaaactgagtctcag

SEQ ID NO: 933596 - DNA, 15 bp, Homo sapiens
aaactgagtctcaga

SEQ ID NO: 933597 - DNA, 15 bp, Homo sapiens
aactgagtctcagaa

SEQ ID NO: 933598 - DNA, 15 bp, Homo sapiens
actgagtctcagaaa

SEQ ID NO: 933599 - DNA, 15 bp, Homo sapiens
ctgagtctcagaaag

SEQ ID NO: 933600 - DNA, 15 bp, Homo sapiens
tgagtctcagaaaga

SEQ ID NO: 933601 - DNA, 15 bp, Homo sapiens
gagtctcagaaagat

SEQ ID NO: 933602 - DNA, 15 bp, Homo sapiens
agtctcagaaagata

SEQ ID NO: 933603 - DNA, 15 bp, Homo sapiens
gtctcagaaagataa

SEQ ID NO: 933604 - DNA, 15 bp, Homo sapiens
tctcagaaagataat

SEQ ID NO: 933605 - DNA, 15 bp, Homo sapiens
ctcagaaagataatt

SEQ ID NO: 933606 - DNA, 15 bp, Homo sapiens
tcagaaagataattc

SEQ ID NO: 933607 - DNA, 15 bp, Homo sapiens
cagaaagataattca

SEQ ID NO: 933608 - DNA, 15 bp, Homo sapiens
agaaagataattcat

SEQ ID NO: 933609 - DNA, 15 bp, Homo sapiens
gaaagataattcatc

SEQ ID NO: 933610 - DNA, 15 bp, Homo sapiens
aaagataattcatca

SEQ ID NO: 933611 - DNA, 15 bp, Homo sapiens
aagataattcatcag

SEQ ID NO: 933612 - DNA, 15 bp, Homo sapiens
agataattcatcagt

SEQ ID NO: 933613 - DNA, 15 bp, Homo sapiens
gataattcatcagtg

SEQ ID NO: 933614 - DNA, 15 bp, Homo sapiens
ataattcatcagtgg

SEQ ID NO: 933615 - DNA, 15 bp, Homo sapiens
taattcatcagtggt

SEQ ID NO: 933616 - DNA, 15 bp, Homo sapiens
aattcatcagtggtc

SEQ ID NO: 933617 - DNA, 15 bp, Homo sapiens
attcatcagtggtca

SEQ ID NO: 933618 - DNA, 15 bp, Homo sapiens
ttcatcagtggtcac

SEQ ID NO: 933619 - DNA, 15 bp, Homo sapiens
tcatcagtggtcaca

SEQ ID NO: 933620 - DNA, 15 bp, Homo sapiens
catcagtggtcacag

SEQ ID NO: 933621 - DNA, 15 bp, Homo sapiens
atcagtggtcacaga

SEQ ID NO: 933622 - DNA, 15 bp, Homo sapiens
tcagtggtcacagaa

SEQ ID NO: 933623 - DNA, 15 bp, Homo sapiens
cagtggtcacagaac

SEQ ID NO: 933624 - DNA, 15 bp, Homo sapiens
agtggtcacagaact

SEQ ID NO: 933625 - DNA, 15 bp, Homo sapiens
gtggtcacagaactg

SEQ ID NO: 933626 - DNA, 15 bp, Homo sapiens
tggtcacagaactgg

SEQ ID NO: 933627 - DNA, 15 bp, Homo sapiens
ggtcacagaactggt

SEQ ID NO: 933628 - DNA, 15 bp, Homo sapiens
gtcacagaactggta

SEQ ID NO: 933629 - DNA, 15 bp, Homo sapiens
tcacagaactggtaa

SEQ ID NO: 933630 - DNA, 15 bp, Homo sapiens
cacagaactggtaag

SEQ ID NO: 933631 - DNA, 15 bp, Homo sapiens
acagaactggtaaga

SEQ ID NO: 933632 - DNA, 15 bp, Homo sapiens
cagaactggtaagag

SEQ ID NO: 933633 - DNA, 15 bp, Homo sapiens
agaactggtaagagg

SEQ ID NO: 933634 - DNA, 15 bp, Homo sapiens
gaactggtaagaggt

SEQ ID NO: 933635 - DNA, 15 bp, Homo sapiens
aactggtaagaggtg

SEQ ID NO: 933636 - DNA, 15 bp, Homo sapiens
actggtaagaggtgg

SEQ ID NO: 933637 - DNA, 15 bp, Homo sapiens
ctggtaagaggtgga

SEQ ID NO: 933638 - DNA, 15 bp, Homo sapiens
tggtaagaggtggag

SEQ ID NO: 933639 - DNA, 15 bp, Homo sapiens
ggtaagaggtggagc

SEQ ID NO: 933640 - DNA, 15 bp, Homo sapiens
gtaagaggtggagcc

SEQ ID NO: 933641 - DNA, 15 bp, Homo sapiens
taagaggtggagcca

SEQ ID NO: 933642 - DNA, 15 bp, Homo sapiens
aagaggtggagccag

SEQ ID NO: 933643 - DNA, 15 bp, Homo sapiens
agaggtggagccaga

SEQ ID NO: 933644 - DNA, 15 bp, Homo sapiens
gaggtggagccagaa

SEQ ID NO: 933645 - DNA, 15 bp, Homo sapiens
aggtggagccagaac

SEQ ID NO: 933646 - DNA, 15 bp, Homo sapiens
ggtggagccagaact

SEQ ID NO: 933647 - DNA, 15 bp, Homo sapiens
gtggagccagaacta

SEQ ID NO: 933648 - DNA, 15 bp, Homo sapiens
tggagccagaactaa

SEQ ID NO: 933649 - DNA, 15 bp, Homo sapiens
ggagccagaactaaa

SEQ ID NO: 933650 - DNA, 15 bp, Homo sapiens
gagccagaactaaaa

SEQ ID NO: 933651 - DNA, 15 bp, Homo sapiens
agccagaactaaaac

SEQ ID NO: 933652 - DNA, 15 bp, Homo sapiens
gccagaactaaaacc

SEQ ID NO: 933653 - DNA, 15 bp, Homo sapiens
ccagaactaaaacct

SEQ ID NO: 933654 - DNA, 15 bp, Homo sapiens
cagaactaaaacctg

SEQ ID NO: 933655 - DNA, 15 bp, Homo sapiens
agaactaaaacctgc

SEQ ID NO: 933656 - DNA, 15 bp, Homo sapiens
gaactaaaacctgca

SEQ ID NO: 933657 - DNA, 15 bp, Homo sapiens
aactaaaacctgcat

SEQ ID NO: 933658 - DNA, 15 bp, Homo sapiens
actaaaacctgcatt

SEQ ID NO: 933659 - DNA, 15 bp, Homo sapiens
ctaaaacctgcattt

SEQ ID NO: 933660 - DNA, 15 bp, Homo sapiens
taaaacctgcatttt

SEQ ID NO: 933661 - DNA, 15 bp, Homo sapiens
aaaacctgcattttt

SEQ ID NO: 933662 - DNA, 15 bp, Homo sapiens
aaacctgcatttttt

SEQ ID NO: 933663 - DNA, 15 bp, Homo sapiens
aacctgcattttttt

SEQ ID NO: 933664 - DNA, 15 bp, Homo sapiens
acctgcatttttttt

SEQ ID NO: 933665 - DNA, 15 bp, Homo sapiens
cctgcattttttttt

SEQ ID NO: 933666 - DNA, 15 bp, Homo sapiens
ctgcatttttttttt

SEQ ID NO: 933667 - DNA, 15 bp, Homo sapiens
tgcattttttttttt

SEQ ID NO: 933668 - DNA, 15 bp, Homo sapiens
gcatttttttttttt

SEQ ID NO: 933669 - DNA, 15 bp, Homo sapiens
cattttttttttttt

SEQ ID NO: 933670 - DNA, 15 bp, Homo sapiens
ttttttttgagatgg

SEQ ID NO: 933671 - DNA, 15 bp, Homo sapiens
tttttttgagatgga

SEQ ID NO: 933672 - DNA, 15 bp, Homo sapiens
ttttttgagatggaa

SEQ ID NO: 933673 - DNA, 15 bp, Homo sapiens
tttttgagatggaat

SEQ ID NO: 933674 - DNA, 15 bp, Homo sapiens
ttttgagatggaatc

SEQ ID NO: 933675 - DNA, 15 bp, Homo sapiens
tttgagatggaatct

SEQ ID NO: 933676 - DNA, 15 bp, Homo sapiens
ttgagatggaatctt

SEQ ID NO: 933677 - DNA, 15 bp, Homo sapiens
tgagatggaatcttg

SEQ ID NO: 933678 - DNA, 15 bp, Homo sapiens
gagatggaatcttgc

SEQ ID NO: 933679 - DNA, 15 bp, Homo sapiens
agatggaatcttgct

SEQ ID NO: 933680 - DNA, 15 bp, Homo sapiens
gatggaatcttgctc

SEQ ID NO: 933681 - DNA, 15 bp, Homo sapiens
atggaatcttgctct

SEQ ID NO: 933682 - DNA, 15 bp, Homo sapiens
tggaatcttgctctg

SEQ ID NO: 933683 - DNA, 15 bp, Homo sapiens
ggaatcttgctctgt

SEQ ID NO: 933684 - DNA, 15 bp, Homo sapiens
gaatcttgctctgtt

SEQ ID NO: 933685 - DNA, 15 bp, Homo sapiens
aatcttgctctgttg

SEQ ID NO: 933686 - DNA, 15 bp, Homo sapiens
atcttgctctgttgc

SEQ ID NO: 933687 - DNA, 15 bp, Homo sapiens
tcttgctctgttgcc

SEQ ID NO: 933688 - DNA, 15 bp, Homo sapiens
cttgctctgttgccc

SEQ ID NO: 933689 - DNA, 15 bp, Homo sapiens
ttgctctgttgccca

SEQ ID NO: 933690 - DNA, 15 bp, Homo sapiens
tgctctgttgcccag

SEQ ID NO: 933691 - DNA, 15 bp, Homo sapiens
gctctgttgcccagg

SEQ ID NO: 933692 - DNA, 15 bp, Homo sapiens
ctctgttgcccaggc

SEQ ID NO: 933693 - DNA, 15 bp, Homo sapiens
tctgttgcccaggct

SEQ ID NO: 933694 - DNA, 15 bp, Homo sapiens
ctgttgcccaggctg

SEQ ID NO: 933695 - DNA, 15 bp, Homo sapiens
tcggctcactgcaat

SEQ ID NO: 933696 - DNA, 15 bp, Homo sapiens
cggctcactgcaatt

SEQ ID NO: 933697 - DNA, 15 bp, Homo sapiens
ggctcactgcaattt

SEQ ID NO: 933698 - DNA, 15 bp, Homo sapiens
gctcactgcaatttc

SEQ ID NO: 933699 - DNA, 15 bp, Homo sapiens
ctcactgcaatttcc

SEQ ID NO: 933700 - DNA, 15 bp, Homo sapiens
tcactgcaatttcca

SEQ ID NO: 933701 - DNA, 15 bp, Homo sapiens
cactgcaatttccac

SEQ ID NO: 933702 - DNA, 15 bp, Homo sapiens
actgcaatttccacc

SEQ ID NO: 933703 - DNA, 15 bp, Homo sapiens
ctgcaatttccacct

SEQ ID NO: 933704 - DNA, 15 bp, Homo sapiens
tgcaatttccacctc

SEQ ID NO: 933705 - DNA, 15 bp, Homo sapiens
gcaatttccacctcc

SEQ ID NO: 933706 - DNA, 15 bp, Homo sapiens
caatttccacctccg

SEQ ID NO: 933707 - DNA, 15 bp, Homo sapiens
aatttccacctccga

SEQ ID NO: 933708 - DNA, 15 bp, Homo sapiens
atttccacctccgag

SEQ ID NO: 933709 - DNA, 15 bp, Homo sapiens
tttccacctccgagg

SEQ ID NO: 933710 - DNA, 15 bp, Homo sapiens
ttccacctccgaggt

SEQ ID NO: 933711 - DNA, 15 bp, Homo sapiens
tccacctccgaggtt

SEQ ID NO: 933712 - DNA, 15 bp, Homo sapiens
ccacctccgaggttc

SEQ ID NO: 933713 - DNA, 15 bp, Homo sapiens
cacctccgaggttca

SEQ ID NO: 933714 - DNA, 15 bp, Homo sapiens
acctccgaggttcaa

SEQ ID NO: 933715 - DNA, 15 bp, Homo sapiens
cctccgaggttcaag

SEQ ID NO: 933716 - DNA, 15 bp, Homo sapiens
ctccgaggttcaagc

SEQ ID NO: 933717 - DNA, 15 bp, Homo sapiens
tccgaggttcaagcg

SEQ ID NO: 933718 - DNA, 15 bp, Homo sapiens
ccgaggttcaagcga

SEQ ID NO: 933719 - DNA, 15 bp, Homo sapiens
cgaggttcaagcgat

SEQ ID NO: 933720 - DNA, 15 bp, Homo sapiens
gaggttcaagcgatt

SEQ ID NO: 933721 - DNA, 15 bp, Homo sapiens
aggttcaagcgattg

SEQ ID NO: 933722 - DNA, 15 bp, Homo sapiens
ggttcaagcgattgt

SEQ ID NO: 933723 - DNA, 15 bp, Homo sapiens
gttcaagcgattgtc

SEQ ID NO: 933724 - DNA, 15 bp, Homo sapiens
ttcaagcgattgtcc

SEQ ID NO: 933725 - DNA, 15 bp, Homo sapiens
tcaagcgattgtcct

SEQ ID NO: 933726 - DNA, 15 bp, Homo sapiens
caagcgattgtcctg

SEQ ID NO: 933727 - DNA, 15 bp, Homo sapiens
aagcgattgtcctgc

SEQ ID NO: 933728 - DNA, 15 bp, Homo sapiens
agcgattgtcctgcc

SEQ ID NO: 933729 - DNA, 15 bp, Homo sapiens
gcgattgtcctgcct

SEQ ID NO: 933730 - DNA, 15 bp, Homo sapiens
cgattgtcctgcctc

SEQ ID NO: 933731 - DNA, 15 bp, Homo sapiens
gattgtcctgcctca

SEQ ID NO: 933732 - DNA, 15 bp, Homo sapiens
attgtcctgcctcag

SEQ ID NO: 933733 - DNA, 15 bp, Homo sapiens
ttgtcctgcctcagc

SEQ ID NO: 933734 - DNA, 15 bp, Homo sapiens
tgtcctgcctcagct

SEQ ID NO: 933735 - DNA, 15 bp, Homo sapiens
gtcctgcctcagctt

SEQ ID NO: 933736 - DNA, 15 bp, Homo sapiens
tcctgcctcagcttc

SEQ ID NO: 933737 - DNA, 15 bp, Homo sapiens
cctgcctcagcttcc

SEQ ID NO: 933738 - DNA, 15 bp, Homo sapiens
ctgcctcagcttccg

SEQ ID NO: 933739 - DNA, 15 bp, Homo sapiens
tgcctcagcttccgg

SEQ ID NO: 933740 - DNA, 15 bp, Homo sapiens
gcctcagcttccgga

SEQ ID NO: 933741 - DNA, 15 bp, Homo sapiens
cctcagcttccggag

SEQ ID NO: 933742 - DNA, 15 bp, Homo sapiens
ctcagcttccggagt

SEQ ID NO: 933743 - DNA, 15 bp, Homo sapiens
tcagcttccggagta

SEQ ID NO: 933744 - DNA, 15 bp, Homo sapiens
cagcttccggagtag

SEQ ID NO: 933745 - DNA, 15 bp, Homo sapiens
agcttccggagtagc

SEQ ID NO: 933746 - DNA, 15 bp, Homo sapiens
gcttccggagtagct

SEQ ID NO: 933747 - DNA, 15 bp, Homo sapiens
cttccggagtagctg

SEQ ID NO: 933748 - DNA, 15 bp, Homo sapiens
ttccggagtagctgg

SEQ ID NO: 933749 - DNA, 15 bp, Homo sapiens
tccggagtagctggg

SEQ ID NO: 933750 - DNA, 15 bp, Homo sapiens
ccggagtagctggga

SEQ ID NO: 933751 - DNA, 15 bp, Homo sapiens
cggagtagctgggat

SEQ ID NO: 933752 - DNA, 15 bp, Homo sapiens
ggagtagctgggatt

SEQ ID NO: 933753 - DNA, 15 bp, Homo sapiens
tagctgggattacac

SEQ ID NO: 933754 - DNA, 15 bp, Homo sapiens
agctgggattacacg

SEQ ID NO: 933755 - DNA, 15 bp, Homo sapiens
gctgggattacacgc

SEQ ID NO: 933756 - DNA, 15 bp, Homo sapiens
ctgggattacacgca

SEQ ID NO: 933757 - DNA, 15 bp, Homo sapiens
tgggattacacgcat

SEQ ID NO: 933758 - DNA, 15 bp, Homo sapiens
gggattacacgcatg

SEQ ID NO: 933759 - DNA, 15 bp, Homo sapiens
ggattacacgcatgc

SEQ ID NO: 933760 - DNA, 15 bp, Homo sapiens
gattacacgcatgct

SEQ ID NO: 933761 - DNA, 15 bp, Homo sapiens
attacacgcatgctc

SEQ ID NO: 933762 - DNA, 15 bp, Homo sapiens
ttacacgcatgctcc

SEQ ID NO: 933763 - DNA, 15 bp, Homo sapiens
tacacgcatgctcca

SEQ ID NO: 933764 - DNA, 15 bp, Homo sapiens
acacgcatgctccac

SEQ ID NO: 933765 - DNA, 15 bp, Homo sapiens
cacgcatgctccacc

SEQ ID NO: 933766 - DNA, 15 bp, Homo sapiens
acgcatgctccacca

SEQ ID NO: 933767 - DNA, 15 bp, Homo sapiens
cgcatgctccaccat

SEQ ID NO: 933768 - DNA, 15 bp, Homo sapiens
gcatgctccaccatg

SEQ ID NO: 933769 - DNA, 15 bp, Homo sapiens
catgctccaccatgc

SEQ ID NO: 933770 - DNA, 15 bp, Homo sapiens
atgctccaccatgcc

SEQ ID NO: 933771 - DNA, 15 bp, Homo sapiens
tgctccaccatgccc

SEQ ID NO: 933772 - DNA, 15 bp, Homo sapiens
gctccaccatgccca

SEQ ID NO: 933773 - DNA, 15 bp, Homo sapiens
ctccaccatgcccag

SEQ ID NO: 933774 - DNA, 15 bp, Homo sapiens
tccaccatgcccagc

SEQ ID NO: 933775 - DNA, 15 bp, Homo sapiens
aatttttgtattttg

SEQ ID NO: 933776 - DNA, 15 bp, Homo sapiens
atttttgtattttga

SEQ ID NO: 933777 - DNA, 15 bp, Homo sapiens
tttttgtattttgag

SEQ ID NO: 933778 - DNA, 15 bp, Homo sapiens
ttttgtattttgagt

SEQ ID NO: 933779 - DNA, 15 bp, Homo sapiens
tttgtattttgagta

SEQ ID NO: 933780 - DNA, 15 bp, Homo sapiens
ttgtattttgagtag

SEQ ID NO: 933781 - DNA, 15 bp, Homo sapiens
tgtattttgagtaga

SEQ ID NO: 933782 - DNA, 15 bp, Homo sapiens
gtattttgagtagag

SEQ ID NO: 933783 - DNA, 15 bp, Homo sapiens
tattttgagtagaga

SEQ ID NO: 933784 - DNA, 15 bp, Homo sapiens
attttgagtagagat

SEQ ID NO: 933785 - DNA, 15 bp, Homo sapiens
ttttgagtagagatg

SEQ ID NO: 933786 - DNA, 15 bp, Homo sapiens
tttgagtagagatgg

SEQ ID NO: 933787 - DNA, 15 bp, Homo sapiens
ttgagtagagatggg

SEQ ID NO: 933788 - DNA, 15 bp, Homo sapiens
tgagtagagatgggt

SEQ ID NO: 933789 - DNA, 15 bp, Homo sapiens
gagtagagatgggtt

SEQ ID NO: 933790 - DNA, 15 bp, Homo sapiens
agtagagatgggttt

SEQ ID NO: 933791 - DNA, 15 bp, Homo sapiens
gtagagatgggtttt

SEQ ID NO: 933792 - DNA, 15 bp, Homo sapiens
tagagatgggttttg

SEQ ID NO: 933793 - DNA, 15 bp, Homo sapiens
agagatgggttttgc

SEQ ID NO: 933794 - DNA, 15 bp, Homo sapiens
gagatgggttttgcc

SEQ ID NO: 933795 - DNA, 15 bp, Homo sapiens
agatgggttttgcca

SEQ ID NO: 933796 - DNA, 15 bp, Homo sapiens
gatgggttttgccat

SEQ ID NO: 933797 - DNA, 15 bp, Homo sapiens
atgggttttgccatg

SEQ ID NO: 933798 - DNA, 15 bp, Homo sapiens
tgggttttgccatgt

SEQ ID NO: 933799 - DNA, 15 bp, Homo sapiens
gggttttgccatgtt

SEQ ID NO: 933800 - DNA, 15 bp, Homo sapiens
ggttttgccatgttg

SEQ ID NO: 933801 - DNA, 15 bp, Homo sapiens
gttttgccatgttgg

SEQ ID NO: 933802 - DNA, 15 bp, Homo sapiens
ttttgccatgttggc

SEQ ID NO: 933803 - DNA, 15 bp, Homo sapiens
tttgccatgttggcc

SEQ ID NO: 933804 - DNA, 15 bp, Homo sapiens
ttgccatgttggcca

SEQ ID NO: 933805 - DNA, 15 bp, Homo sapiens
tgccatgttggccag

SEQ ID NO: 933806 - DNA, 15 bp, Homo sapiens
gccatgttggccagg

SEQ ID NO: 933807 - DNA, 15 bp, Homo sapiens
tgttggccaggctgg

SEQ ID NO: 933808 - DNA, 15 bp, Homo sapiens
gttggccaggctggt

SEQ ID NO: 933809 - DNA, 15 bp, Homo sapiens
ttggccaggctggtc

SEQ ID NO: 933810 - DNA, 15 bp, Homo sapiens
tggccaggctggtct

SEQ ID NO: 933811 - DNA, 15 bp, Homo sapiens
ggccaggctggtctc

SEQ ID NO: 933812 - DNA, 15 bp, Homo sapiens
gccaggctggtctcg

SEQ ID NO: 933813 - DNA, 15 bp, Homo sapiens
ccaggctggtctcga

SEQ ID NO: 933814 - DNA, 15 bp, Homo sapiens
caggctggtctcgaa

SEQ ID NO: 933815 - DNA, 15 bp, Homo sapiens
aggctggtctcgaac

SEQ ID NO: 933816 - DNA, 15 bp, Homo sapiens
ggctggtctcgaact

SEQ ID NO: 933817 - DNA, 15 bp, Homo sapiens
gctggtctcgaactc

SEQ ID NO: 933818 - DNA, 15 bp, Homo sapiens
ctggtctcgaactcc

SEQ ID NO: 933819 - DNA, 15 bp, Homo sapiens
tggtctcgaactcct

SEQ ID NO: 933820 - DNA, 15 bp, Homo sapiens
ggtctcgaactcctg

SEQ ID NO: 933821 - DNA, 15 bp, Homo sapiens
tgacctcaagtgatt

SEQ ID NO: 933822 - DNA, 15 bp, Homo sapiens
gacctcaagtgattt

SEQ ID NO: 933823 - DNA, 15 bp, Homo sapiens
acctcaagtgatttg

SEQ ID NO: 933824 - DNA, 15 bp, Homo sapiens
cctcaagtgatttgc

SEQ ID NO: 933825 - DNA, 15 bp, Homo sapiens
ctcaagtgatttgcc

SEQ ID NO: 933826 - DNA, 15 bp, Homo sapiens
tcaagtgatttgccc

SEQ ID NO: 933827 - DNA, 15 bp, Homo sapiens
caagtgatttgccca

SEQ ID NO: 933828 - DNA, 15 bp, Homo sapiens
aagtgatttgcccac

SEQ ID NO: 933829 - DNA, 15 bp, Homo sapiens
agtgatttgcccact

SEQ ID NO: 933830 - DNA, 15 bp, Homo sapiens
gtgatttgcccactt

SEQ ID NO: 933831 - DNA, 15 bp, Homo sapiens
tgatttgcccacttc

SEQ ID NO: 933832 - DNA, 15 bp, Homo sapiens
gatttgcccacttcg

SEQ ID NO: 933833 - DNA, 15 bp, Homo sapiens
atttgcccacttcgg

SEQ ID NO: 933834 - DNA, 15 bp, Homo sapiens
tttgcccacttcggc

SEQ ID NO: 933835 - DNA, 15 bp, Homo sapiens
ttgcccacttcggcc

SEQ ID NO: 933836 - DNA, 15 bp, Homo sapiens
tgcccacttcggcct

SEQ ID NO: 933837 - DNA, 15 bp, Homo sapiens
gcccacttcggcctc

SEQ ID NO: 933838 - DNA, 15 bp, Homo sapiens
cccacttcggcctct

SEQ ID NO: 933839 - DNA, 15 bp, Homo sapiens
ccacttcggcctctc

SEQ ID NO: 933840 - DNA, 15 bp, Homo sapiens
cacttcggcctctca

SEQ ID NO: 933841 - DNA, 15 bp, Homo sapiens
acttcggcctctcaa

SEQ ID NO: 933842 - DNA, 15 bp, Homo sapiens
cttcggcctctcaaa

SEQ ID NO: 933843 - DNA, 15 bp, Homo sapiens
ttcggcctctcaaag

SEQ ID NO: 933844 - DNA, 15 bp, Homo sapiens
tcggcctctcaaagt

SEQ ID NO: 933845 - DNA, 15 bp, Homo sapiens
cggcctctcaaagtg

SEQ ID NO: 933846 - DNA, 15 bp, Homo sapiens
ggcctctcaaagtgc

SEQ ID NO: 933847 - DNA, 15 bp, Homo sapiens
gcctctcaaagtgct

SEQ ID NO: 933848 - DNA, 15 bp, Homo sapiens
cctctcaaagtgctg

SEQ ID NO: 933849 - DNA, 15 bp, Homo sapiens
ctctcaaagtgctgg

SEQ ID NO: 933850 - DNA, 15 bp, Homo sapiens
tctcaaagtgctggg

SEQ ID NO: 933851 - DNA, 15 bp, Homo sapiens
ctcaaagtgctggga

SEQ ID NO: 933852 - DNA, 15 bp, Homo sapiens
tcaaagtgctgggat

SEQ ID NO: 933853 - DNA, 15 bp, Homo sapiens
gattacaggcatgat

SEQ ID NO: 933854 - DNA, 15 bp, Homo sapiens
attacaggcatgatc

SEQ ID NO: 933855 - DNA, 15 bp, Homo sapiens
ttacaggcatgatcc

SEQ ID NO: 933856 - DNA, 15 bp, Homo sapiens
tacaggcatgatccc

SEQ ID NO: 933857 - DNA, 15 bp, Homo sapiens
acaggcatgatccca

SEQ ID NO: 933858 - DNA, 15 bp, Homo sapiens
caggcatgatcccaa

SEQ ID NO: 933859 - DNA, 15 bp, Homo sapiens
aggcatgatcccaaa

SEQ ID NO: 933860 - DNA, 15 bp, Homo sapiens
ggcatgatcccaaaa

SEQ ID NO: 933861 - DNA, 15 bp, Homo sapiens
gcatgatcccaaaac

SEQ ID NO: 933862 - DNA, 15 bp, Homo sapiens
catgatcccaaaacc

SEQ ID NO: 933863 - DNA, 15 bp, Homo sapiens
atgatcccaaaacct

SEQ ID NO: 933864 - DNA, 15 bp, Homo sapiens
tgatcccaaaacctg

SEQ ID NO: 933865 - DNA, 15 bp, Homo sapiens
gatcccaaaacctgc

SEQ ID NO: 933866 - DNA, 15 bp, Homo sapiens
atcccaaaacctgca

SEQ ID NO: 933867 - DNA, 15 bp, Homo sapiens
tcccaaaacctgcat

SEQ ID NO: 933868 - DNA, 15 bp, Homo sapiens
cccaaaacctgcatt

SEQ ID NO: 933869 - DNA, 15 bp, Homo sapiens
ccaaaacctgcattt

SEQ ID NO: 933870 - DNA, 15 bp, Homo sapiens
caaaacctgcatttc

SEQ ID NO: 933871 - DNA, 15 bp, Homo sapiens
aaaacctgcatttct

SEQ ID NO: 933872 - DNA, 15 bp, Homo sapiens
aaacctgcatttctt

SEQ ID NO: 933873 - DNA, 15 bp, Homo sapiens
aacctgcatttcttg

SEQ ID NO: 933874 - DNA, 15 bp, Homo sapiens
acctgcatttcttga

SEQ ID NO: 933875 - DNA, 15 bp, Homo sapiens
cctgcatttcttgat

SEQ ID NO: 933876 - DNA, 15 bp, Homo sapiens
ctgcatttcttgata

SEQ ID NO: 933877 - DNA, 15 bp, Homo sapiens
tgcatttcttgatat

SEQ ID NO: 933878 - DNA, 15 bp, Homo sapiens
gcatttcttgatatc

SEQ ID NO: 933879 - DNA, 15 bp, Homo sapiens
catttcttgatatca

SEQ ID NO: 933880 - DNA, 15 bp, Homo sapiens
atttcttgatatcac

SEQ ID NO: 933881 - DNA, 15 bp, Homo sapiens
tttcttgatatcaca

SEQ ID NO: 933882 - DNA, 15 bp, Homo sapiens
ttcttgatatcacag

SEQ ID NO: 933883 - DNA, 15 bp, Homo sapiens
tcttgatatcacagg

SEQ ID NO: 933884 - DNA, 15 bp, Homo sapiens
cttgatatcacaggc

SEQ ID NO: 933885 - DNA, 15 bp, Homo sapiens
ttgatatcacaggcc

SEQ ID NO: 933886 - DNA, 15 bp, Homo sapiens
tgatatcacaggcct

SEQ ID NO: 933887 - DNA, 15 bp, Homo sapiens
gatatcacaggcctt

SEQ ID NO: 933888 - DNA, 15 bp, Homo sapiens
atatcacaggccttg

SEQ ID NO: 933889 - DNA, 15 bp, Homo sapiens
tatcacaggccttga

SEQ ID NO: 933890 - DNA, 15 bp, Homo sapiens
atcacaggccttgag

SEQ ID NO: 933891 - DNA, 15 bp, Homo sapiens
tcacaggccttgaga

SEQ ID NO: 933892 - DNA, 15 bp, Homo sapiens
cacaggccttgagag

SEQ ID NO: 933893 - DNA, 15 bp, Homo sapiens
acaggccttgagaga

SEQ ID NO: 933894 - DNA, 15 bp, Homo sapiens
caggccttgagagaa

SEQ ID NO: 933895 - DNA, 15 bp, Homo sapiens
aggccttgagagaat

SEQ ID NO: 933896 - DNA, 15 bp, Homo sapiens
ggccttgagagaatc

SEQ ID NO: 933897 - DNA, 15 bp, Homo sapiens
gccttgagagaatct

SEQ ID NO: 933898 - DNA, 15 bp, Homo sapiens
ccttgagagaatctc

SEQ ID NO: 933899 - DNA, 15 bp, Homo sapiens
cttgagagaatctca

SEQ ID NO: 933900 - DNA, 15 bp, Homo sapiens
ttgagagaatctcag

SEQ ID NO: 933901 - DNA, 15 bp, Homo sapiens
tgagagaatctcagg

SEQ ID NO: 933902 - DNA, 15 bp, Homo sapiens
gagagaatctcaggg

SEQ ID NO: 933903 - DNA, 15 bp, Homo sapiens
agagaatctcaggga

SEQ ID NO: 933904 - DNA, 15 bp, Homo sapiens
gagaatctcagggac

SEQ ID NO: 933905 - DNA, 15 bp, Homo sapiens
agaatctcagggaca

SEQ ID NO: 933906 - DNA, 15 bp, Homo sapiens
gaatctcagggacag

SEQ ID NO: 933907 - DNA, 15 bp, Homo sapiens
aatctcagggacagg

SEQ ID NO: 933908 - DNA, 15 bp, Homo sapiens
atctcagggacaggt

SEQ ID NO: 933909 - DNA, 15 bp, Homo sapiens
tctcagggacaggtt

SEQ ID NO: 933910 - DNA, 15 bp, Homo sapiens
ctcagggacaggttt

SEQ ID NO: 933911 - DNA, 15 bp, Homo sapiens
tcagggacaggtttt

SEQ ID NO: 933912 - DNA, 15 bp, Homo sapiens
cagggacaggttttc

SEQ ID NO: 933913 - DNA, 15 bp, Homo sapiens
agggacaggttttcc

SEQ ID NO: 933914 - DNA, 15 bp, Homo sapiens
gggacaggttttcca

SEQ ID NO: 933915 - DNA, 15 bp, Homo sapiens
ggacaggttttccac

SEQ ID NO: 933916 - DNA, 15 bp, Homo sapiens
gacaggttttccaca

SEQ ID NO: 933917 - DNA, 15 bp, Homo sapiens
acaggttttccacat

SEQ ID NO: 933918 - DNA, 15 bp, Homo sapiens
caggttttccacata

SEQ ID NO: 933919 - DNA, 15 bp, Homo sapiens
aggttttccacatat

SEQ ID NO: 933920 - DNA, 15 bp, Homo sapiens
ggttttccacatata

SEQ ID NO: 933921 - DNA, 15 bp, Homo sapiens
gttttccacatatat

SEQ ID NO: 933922 - DNA, 15 bp, Homo sapiens
ttttccacatatatg

SEQ ID NO: 933923 - DNA, 15 bp, Homo sapiens
tttccacatatatgc

SEQ ID NO: 933924 - DNA, 15 bp, Homo sapiens
ttccacatatatgca

SEQ ID NO: 933925 - DNA, 15 bp, Homo sapiens
tccacatatatgcat

SEQ ID NO: 933926 - DNA, 15 bp, Homo sapiens
ccacatatatgcata

SEQ ID NO: 933927 - DNA, 15 bp, Homo sapiens
cacatatatgcatat

SEQ ID NO: 933928 - DNA, 15 bp, Homo sapiens
acatatatgcatatt

SEQ ID NO: 933929 - DNA, 15 bp, Homo sapiens
catatatgcatatta

SEQ ID NO: 933930 - DNA, 15 bp, Homo sapiens
atatatgcatattag

SEQ ID NO: 933931 - DNA, 15 bp, Homo sapiens
tatatgcatattagt

SEQ ID NO: 933932 - DNA, 15 bp, Homo sapiens
atatgcatattagta

SEQ ID NO: 933933 - DNA, 15 bp, Homo sapiens
tatgcatattagtaa

SEQ ID NO: 933934 - DNA, 15 bp, Homo sapiens
atgcatattagtaac

SEQ ID NO: 933935 - DNA, 15 bp, Homo sapiens
tgcatattagtaact

SEQ ID NO: 933936 - DNA, 15 bp, Homo sapiens
gcatattagtaactg

SEQ ID NO: 933937 - DNA, 15 bp, Homo sapiens
catattagtaactgc

SEQ ID NO: 933938 - DNA, 15 bp, Homo sapiens
atattagtaactgca

SEQ ID NO: 933939 - DNA, 15 bp, Homo sapiens
tattagtaactgcag

SEQ ID NO: 933940 - DNA, 15 bp, Homo sapiens
attagtaactgcagg

SEQ ID NO: 933941 - DNA, 15 bp, Homo sapiens
ttagtaactgcagga

SEQ ID NO: 933942 - DNA, 15 bp, Homo sapiens
tagtaactgcaggaa

SEQ ID NO: 933943 - DNA, 15 bp, Homo sapiens
agtaactgcaggaag

SEQ ID NO: 933944 - DNA, 15 bp, Homo sapiens
gtaactgcaggaagt

SEQ ID NO: 933945 - DNA, 15 bp, Homo sapiens
taactgcaggaagtt

SEQ ID NO: 933946 - DNA, 15 bp, Homo sapiens
aactgcaggaagttg

SEQ ID NO: 933947 - DNA, 15 bp, Homo sapiens
actgcaggaagttgg

SEQ ID NO: 933948 - DNA, 15 bp, Homo sapiens
ctgcaggaagttggg

SEQ ID NO: 933949 - DNA, 15 bp, Homo sapiens
tgcaggaagttggga

SEQ ID NO: 933950 - DNA, 15 bp, Homo sapiens
gcaggaagttgggag

SEQ ID NO: 933951 - DNA, 15 bp, Homo sapiens
caggaagttgggagg

SEQ ID NO: 933952 - DNA, 15 bp, Homo sapiens
aggaagttgggagga

SEQ ID NO: 933953 - DNA, 15 bp, Homo sapiens
ggaagttgggaggaa

SEQ ID NO: 933954 - DNA, 15 bp, Homo sapiens
gaagttgggaggaac

SEQ ID NO: 933955 - DNA, 15 bp, Homo sapiens
aagttgggaggaacg

SEQ ID NO: 933956 - DNA, 15 bp, Homo sapiens
agttgggaggaacgg

SEQ ID NO: 933957 - DNA, 15 bp, Homo sapiens
gttgggaggaacggg

SEQ ID NO: 933958 - DNA, 15 bp, Homo sapiens
ttgggaggaacgggt

SEQ ID NO: 933959 - DNA, 15 bp, Homo sapiens
tgggaggaacgggtc

SEQ ID NO: 933960 - DNA, 15 bp, Homo sapiens
gggaggaacgggtcc

SEQ ID NO: 933961 - DNA, 15 bp, Homo sapiens
ggaggaacgggtccc

SEQ ID NO: 933962 - DNA, 15 bp, Homo sapiens
gaggaacgggtccct

SEQ ID NO: 933963 - DNA, 15 bp, Homo sapiens
aggaacgggtccctg

SEQ ID NO: 933964 - DNA, 15 bp, Homo sapiens
ggaacgggtccctgg

SEQ ID NO: 933965 - DNA, 15 bp, Homo sapiens
gaacgggtccctgga

SEQ ID NO: 933966 - DNA, 15 bp, Homo sapiens
aacgggtccctggac

SEQ ID NO: 933967 - DNA, 15 bp, Homo sapiens
acgggtccctggacc

SEQ ID NO: 933968 - DNA, 15 bp, Homo sapiens
cgggtccctggacca

SEQ ID NO: 933969 - DNA, 15 bp, Homo sapiens
gggtccctggaccaa

SEQ ID NO: 933970 - DNA, 15 bp, Homo sapiens
ggtccctggaccaaa

SEQ ID NO: 933971 - DNA, 15 bp, Homo sapiens
gtccctggaccaaat

SEQ ID NO: 933972 - DNA, 15 bp, Homo sapiens
tccctggaccaaatt

SEQ ID NO: 933973 - DNA, 15 bp, Homo sapiens
ccctggaccaaatta

SEQ ID NO: 933974 - DNA, 15 bp, Homo sapiens
cctggaccaaattat

SEQ ID NO: 933975 - DNA, 15 bp, Homo sapiens
ctggaccaaattata

SEQ ID NO: 933976 - DNA, 15 bp, Homo sapiens
tggaccaaattatat

SEQ ID NO: 933977 - DNA, 15 bp, Homo sapiens
ggaccaaattatatt

SEQ ID NO: 933978 - DNA, 15 bp, Homo sapiens
gaccaaattatattt

SEQ ID NO: 933979 - DNA, 15 bp, Homo sapiens
accaaattatatttc

SEQ ID NO: 933980 - DNA, 15 bp, Homo sapiens
ccaaattatatttca

SEQ ID NO: 933981 - DNA, 15 bp, Homo sapiens
caaattatatttcac

SEQ ID NO: 933982 - DNA, 15 bp, Homo sapiens
aaattatatttcacc

SEQ ID NO: 933983 - DNA, 15 bp, Homo sapiens
aattatatttcaccc

SEQ ID NO: 933984 - DNA, 15 bp, Homo sapiens
attatatttcacccc

SEQ ID NO: 933985 - DNA, 15 bp, Homo sapiens
ttatatttcaccccc

SEQ ID NO: 933986 - DNA, 15 bp, Homo sapiens
tatatttcaccccca

SEQ ID NO: 933987 - DNA, 15 bp, Homo sapiens
atatttcacccccaa

SEQ ID NO: 933988 - DNA, 15 bp, Homo sapiens
tatttcacccccaag

SEQ ID NO: 933989 - DNA, 15 bp, Homo sapiens
atttcacccccaagt

SEQ ID NO: 933990 - DNA, 15 bp, Homo sapiens
tttcacccccaagtc

SEQ ID NO: 933991 - DNA, 15 bp, Homo sapiens
ttcacccccaagtca

SEQ ID NO: 933992 - DNA, 15 bp, Homo sapiens
tcacccccaagtcag

SEQ ID NO: 933993 - DNA, 15 bp, Homo sapiens
cacccccaagtcaga

SEQ ID NO: 933994 - DNA, 15 bp, Homo sapiens
acccccaagtcagag

SEQ ID NO: 933995 - DNA, 15 bp, Homo sapiens
cccccaagtcagaga

SEQ ID NO: 933996 - DNA, 15 bp, Homo sapiens
ccccaagtcagagac

SEQ ID NO: 933997 - DNA, 15 bp, Homo sapiens
cccaagtcagagact

SEQ ID NO: 933998 - DNA, 15 bp, Homo sapiens
ccaagtcagagactg

SEQ ID NO: 933999 - DNA, 15 bp, Homo sapiens
caagtcagagactga

SEQ ID NO: 934000 - DNA, 15 bp, Homo sapiens
aagtcagagactgag

SEQ ID NO: 934001 - DNA, 15 bp, Homo sapiens
agtcagagactgagg

SEQ ID NO: 934002 - DNA, 15 bp, Homo sapiens
gtcagagactgagga

SEQ ID NO: 934003 - DNA, 15 bp, Homo sapiens
tcagagactgaggac

SEQ ID NO: 934004 - DNA, 15 bp, Homo sapiens
cagagactgaggaca

SEQ ID NO: 934005 - DNA, 15 bp, Homo sapiens
agagactgaggacat

SEQ ID NO: 934006 - DNA, 15 bp, Homo sapiens
gagactgaggacatt

SEQ ID NO: 934007 - DNA, 15 bp, Homo sapiens
agactgaggacattc

SEQ ID NO: 934008 - DNA, 15 bp, Homo sapiens
gactgaggacattcc

SEQ ID NO: 934009 - DNA, 15 bp, Homo sapiens
actgaggacattcca

SEQ ID NO: 934010 - DNA, 15 bp, Homo sapiens
ctgaggacattccag

SEQ ID NO: 934011 - DNA, 15 bp, Homo sapiens
tgaggacattccagg

SEQ ID NO: 934012 - DNA, 15 bp, Homo sapiens
gaggacattccaggg

SEQ ID NO: 934013 - DNA, 15 bp, Homo sapiens
aggacattccaggga

SEQ ID NO: 934014 - DNA, 15 bp, Homo sapiens
ggacattccagggac

SEQ ID NO: 934015 - DNA, 15 bp, Homo sapiens
gacattccagggaca

SEQ ID NO: 934016 - DNA, 15 bp, Homo sapiens
acattccagggacac

SEQ ID NO: 934017 - DNA, 15 bp, Homo sapiens
cattccagggacacc

SEQ ID NO: 934018 - DNA, 15 bp, Homo sapiens
attccagggacaccc

SEQ ID NO: 934019 - DNA, 15 bp, Homo sapiens
ttccagggacacccc

SEQ ID NO: 934020 - DNA, 15 bp, Homo sapiens
tccagggacacccct

SEQ ID NO: 934021 - DNA, 15 bp, Homo sapiens
ccagggacacccctt

SEQ ID NO: 934022 - DNA, 15 bp, Homo sapiens
cagggacaccccttc

SEQ ID NO: 934023 - DNA, 15 bp, Homo sapiens
agggacaccccttct

SEQ ID NO: 934024 - DNA, 15 bp, Homo sapiens
gggacaccccttctt

SEQ ID NO: 934025 - DNA, 15 bp, Homo sapiens
ggacaccccttcttt

SEQ ID NO: 934026 - DNA, 15 bp, Homo sapiens
gacaccccttctttc

SEQ ID NO: 934027 - DNA, 15 bp, Homo sapiens
acaccccttctttct

SEQ ID NO: 934028 - DNA, 15 bp, Homo sapiens
caccccttctttctc

SEQ ID NO: 934029 - DNA, 15 bp, Homo sapiens
accccttctttctcc

SEQ ID NO: 934030 - DNA, 15 bp, Homo sapiens
ccccttctttctcca

SEQ ID NO: 934031 - DNA, 15 bp, Homo sapiens
cccttctttctccag

SEQ ID NO: 934032 - DNA, 15 bp, Homo sapiens
ccttctttctccagg

SEQ ID NO: 934033 - DNA, 15 bp, Homo sapiens
cttctttctccagga

SEQ ID NO: 934034 - DNA, 15 bp, Homo sapiens
ttctttctccaggat

SEQ ID NO: 934035 - DNA, 15 bp, Homo sapiens
tctttctccaggata

SEQ ID NO: 934036 - DNA, 15 bp, Homo sapiens
ctttctccaggatat

SEQ ID NO: 934037 - DNA, 15 bp, Homo sapiens
tttctccaggatatc

SEQ ID NO: 934038 - DNA, 15 bp, Homo sapiens
ttctccaggatatca

SEQ ID NO: 934039 - DNA, 15 bp, Homo sapiens
tctccaggatatcat

SEQ ID NO: 934040 - DNA, 15 bp, Homo sapiens
ctccaggatatcatt

SEQ ID NO: 934041 - DNA, 15 bp, Homo sapiens
tccaggatatcattc

SEQ ID NO: 934042 - DNA, 15 bp, Homo sapiens
ccaggatatcattca

SEQ ID NO: 934043 - DNA, 15 bp, Homo sapiens
caggatatcattcat

SEQ ID NO: 934044 - DNA, 15 bp, Homo sapiens
aggatatcattcata

SEQ ID NO: 934045 - DNA, 15 bp, Homo sapiens
ggatatcattcatat

SEQ ID NO: 934046 - DNA, 15 bp, Homo sapiens
gatatcattcatatc

SEQ ID NO: 934047 - DNA, 15 bp, Homo sapiens
atatcattcatatcc

SEQ ID NO: 934048 - DNA, 15 bp, Homo sapiens
tatcattcatatcca

SEQ ID NO: 934049 - DNA, 15 bp, Homo sapiens
atcattcatatccac

SEQ ID NO: 934050 - DNA, 15 bp, Homo sapiens
tcattcatatccaca

SEQ ID NO: 934051 - DNA, 15 bp, Homo sapiens
cattcatatccacag

SEQ ID NO: 934052 - DNA, 15 bp, Homo sapiens
attcatatccacagg

SEQ ID NO: 934053 - DNA, 15 bp, Homo sapiens
ttcatatccacaggt

SEQ ID NO: 934054 - DNA, 15 bp, Homo sapiens
tcatatccacaggtc

SEQ ID NO: 934055 - DNA, 15 bp, Homo sapiens
catatccacaggtca

SEQ ID NO: 934056 - DNA, 15 bp, Homo sapiens
atatccacaggtcat

SEQ ID NO: 934057 - DNA, 15 bp, Homo sapiens
tatccacaggtcata

SEQ ID NO: 934058 - DNA, 15 bp, Homo sapiens
atccacaggtcatag

SEQ ID NO: 934059 - DNA, 15 bp, Homo sapiens
tccacaggtcatagt

SEQ ID NO: 934060 - DNA, 15 bp, Homo sapiens
ccacaggtcatagta

SEQ ID NO: 934061 - DNA, 15 bp, Homo sapiens
cacaggtcatagtag

SEQ ID NO: 934062 - DNA, 15 bp, Homo sapiens
acaggtcatagtaga

SEQ ID NO: 934063 - DNA, 15 bp, Homo sapiens
caggtcatagtagag

SEQ ID NO: 934064 - DNA, 15 bp, Homo sapiens
aggtcatagtagagt

SEQ ID NO: 934065 - DNA, 15 bp, Homo sapiens
ggtcatagtagagtc

SEQ ID NO: 934066 - DNA, 15 bp, Homo sapiens
gtcatagtagagtca

SEQ ID NO: 934067 - DNA, 15 bp, Homo sapiens
tcatagtagagtcag

SEQ ID NO: 934068 - DNA, 15 bp, Homo sapiens
catagtagagtcagt

SEQ ID NO: 934069 - DNA, 15 bp, Homo sapiens
atagtagagtcagtc

SEQ ID NO: 934070 - DNA, 15 bp, Homo sapiens
tagtagagtcagtct

SEQ ID NO: 934071 - DNA, 15 bp, Homo sapiens
agtagagtcagtctt

SEQ ID NO: 934072 - DNA, 15 bp, Homo sapiens
gtagagtcagtcttt

SEQ ID NO: 934073 - DNA, 15 bp, Homo sapiens
tagagtcagtcttta

SEQ ID NO: 934074 - DNA, 15 bp, Homo sapiens
agagtcagtctttag

SEQ ID NO: 934075 - DNA, 15 bp, Homo sapiens
gagtcagtctttagg

SEQ ID NO: 934076 - DNA, 15 bp, Homo sapiens
agtcagtctttaggc

SEQ ID NO: 934077 - DNA, 15 bp, Homo sapiens
gtcagtctttaggca

SEQ ID NO: 934078 - DNA, 15 bp, Homo sapiens
tcagtctttaggcat

SEQ ID NO: 934079 - DNA, 15 bp, Homo sapiens
cagtctttaggcatt

SEQ ID NO: 934080 - DNA, 15 bp, Homo sapiens
agtctttaggcattg

SEQ ID NO: 934081 - DNA, 15 bp, Homo sapiens
gtctttaggcattgc

SEQ ID NO: 934082 - DNA, 15 bp, Homo sapiens
tctttaggcattgct

SEQ ID NO: 934083 - DNA, 15 bp, Homo sapiens
ctttaggcattgctt

SEQ ID NO: 934084 - DNA, 15 bp, Homo sapiens
tttaggcattgctta

SEQ ID NO: 934085 - DNA, 15 bp, Homo sapiens
ttaggcattgcttaa

SEQ ID NO: 934086 - DNA, 15 bp, Homo sapiens
taggcattgcttaaa

SEQ ID NO: 934087 - DNA, 15 bp, Homo sapiens
aggcattgcttaaaa

SEQ ID NO: 934088 - DNA, 15 bp, Homo sapiens
ggcattgcttaaaaa

SEQ ID NO: 934089 - DNA, 15 bp, Homo sapiens
gcattgcttaaaaaa

SEQ ID NO: 934090 - DNA, 15 bp, Homo sapiens
cattgcttaaaaaac

SEQ ID NO: 934091 - DNA, 15 bp, Homo sapiens
attgcttaaaaaaca

SEQ ID NO: 934092 - DNA, 15 bp, Homo sapiens
ttgcttaaaaaacat

SEQ ID NO: 934093 - DNA, 15 bp, Homo sapiens
tgcttaaaaaacata

SEQ ID NO: 934094 - DNA, 15 bp, Homo sapiens
gcttaaaaaacataa

SEQ ID NO: 934095 - DNA, 15 bp, Homo sapiens
cttaaaaaacataaa

SEQ ID NO: 934096 - DNA, 15 bp, Homo sapiens
ttaaaaaacataaag

SEQ ID NO: 934097 - DNA, 15 bp, Homo sapiens
taaaaaacataaagc

SEQ ID NO: 934098 - DNA, 15 bp, Homo sapiens
aaaaaacataaagcc

SEQ ID NO: 934099 - DNA, 15 bp, Homo sapiens
aaaaacataaagccc

SEQ ID NO: 934100 - DNA, 15 bp, Homo sapiens
aaaacataaagccct

SEQ ID NO: 934101 - DNA, 15 bp, Homo sapiens
aaacataaagccctg

SEQ ID NO: 934102 - DNA, 15 bp, Homo sapiens
aacataaagccctgc

SEQ ID NO: 934103 - DNA, 15 bp, Homo sapiens
acataaagccctgcc

SEQ ID NO: 934104 - DNA, 15 bp, Homo sapiens
cataaagccctgcct

SEQ ID NO: 934105 - DNA, 15 bp, Homo sapiens
ataaagccctgcctt

SEQ ID NO: 934106 - DNA, 15 bp, Homo sapiens
taaagccctgccttt

SEQ ID NO: 934107 - DNA, 15 bp, Homo sapiens
aaagccctgcctttt

SEQ ID NO: 934108 - DNA, 15 bp, Homo sapiens
aagccctgccttttt

SEQ ID NO: 934109 - DNA, 15 bp, Homo sapiens
agccctgcctttttg

SEQ ID NO: 934110 - DNA, 15 bp, Homo sapiens
gccctgcctttttgg

SEQ ID NO: 934111 - DNA, 15 bp, Homo sapiens
ccctgcctttttgga

SEQ ID NO: 934112 - DNA, 15 bp, Homo sapiens
cctgcctttttggaa

SEQ ID NO: 934113 - DNA, 15 bp, Homo sapiens
ctgcctttttggaat

SEQ ID NO: 934114 - DNA, 15 bp, Homo sapiens
tgcctttttggaata

SEQ ID NO: 934115 - DNA, 15 bp, Homo sapiens
gcctttttggaataa

SEQ ID NO: 934116 - DNA, 15 bp, Homo sapiens
cctttttggaataag

SEQ ID NO: 934117 - DNA, 15 bp, Homo sapiens
ctttttggaataagt

SEQ ID NO: 934118 - DNA, 15 bp, Homo sapiens
tttttggaataagtt

SEQ ID NO: 934119 - DNA, 15 bp, Homo sapiens
ttttggaataagtta

SEQ ID NO: 934120 - DNA, 15 bp, Homo sapiens
tttggaataagttaa

SEQ ID NO: 934121 - DNA, 15 bp, Homo sapiens
ttggaataagttaaa

SEQ ID NO: 934122 - DNA, 15 bp, Homo sapiens
tggaataagttaaat

SEQ ID NO: 934123 - DNA, 15 bp, Homo sapiens
ggaataagttaaatg

SEQ ID NO: 934124 - DNA, 15 bp, Homo sapiens
gaataagttaaatga

SEQ ID NO: 934125 - DNA, 15 bp, Homo sapiens
aataagttaaatgat

SEQ ID NO: 934126 - DNA, 15 bp, Homo sapiens
ataagttaaatgatc

SEQ ID NO: 934127 - DNA, 15 bp, Homo sapiens
taagttaaatgatca

SEQ ID NO: 934128 - DNA, 15 bp, Homo sapiens
aagttaaatgatcag

SEQ ID NO: 934129 - DNA, 15 bp, Homo sapiens
agttaaatgatcagc

SEQ ID NO: 934130 - DNA, 15 bp, Homo sapiens
gttaaatgatcagct

SEQ ID NO: 934131 - DNA, 15 bp, Homo sapiens
ttaaatgatcagctt

SEQ ID NO: 934132 - DNA, 15 bp, Homo sapiens
taaatgatcagcttg

SEQ ID NO: 934133 - DNA, 15 bp, Homo sapiens
aaatgatcagcttgt

SEQ ID NO: 934134 - DNA, 15 bp, Homo sapiens
aatgatcagcttgtc

SEQ ID NO: 934135 - DNA, 15 bp, Homo sapiens
atgatcagcttgtca

SEQ ID NO: 934136 - DNA, 15 bp, Homo sapiens
tgatcagcttgtcag

SEQ ID NO: 934137 - DNA, 15 bp, Homo sapiens
gatcagcttgtcagg

SEQ ID NO: 934138 - DNA, 15 bp, Homo sapiens
atcagcttgtcaggc

SEQ ID NO: 934139 - DNA, 15 bp, Homo sapiens
tcagcttgtcaggct

SEQ ID NO: 934140 - DNA, 15 bp, Homo sapiens
cagcttgtcaggctt

SEQ ID NO: 934141 - DNA, 15 bp, Homo sapiens
agcttgtcaggctta

SEQ ID NO: 934142 - DNA, 15 bp, Homo sapiens
gcttgtcaggcttat

SEQ ID NO: 934143 - DNA, 15 bp, Homo sapiens
cttgtcaggcttatg

SEQ ID NO: 934144 - DNA, 15 bp, Homo sapiens
ttgtcaggcttatgc

SEQ ID NO: 934145 - DNA, 15 bp, Homo sapiens
tgtcaggcttatgcc

SEQ ID NO: 934146 - DNA, 15 bp, Homo sapiens
gtcaggcttatgccc

SEQ ID NO: 934147 - DNA, 15 bp, Homo sapiens
tcaggcttatgccca

SEQ ID NO: 934148 - DNA, 15 bp, Homo sapiens
caggcttatgcccac

SEQ ID NO: 934149 - DNA, 15 bp, Homo sapiens
aggcttatgcccaca

SEQ ID NO: 934150 - DNA, 15 bp, Homo sapiens
ggcttatgcccacac

SEQ ID NO: 934151 - DNA, 15 bp, Homo sapiens
gcttatgcccacact

SEQ ID NO: 934152 - DNA, 15 bp, Homo sapiens
cttatgcccacactt

SEQ ID NO: 934153 - DNA, 15 bp, Homo sapiens
ttatgcccacacttt

SEQ ID NO: 934154 - DNA, 15 bp, Homo sapiens
tatgcccacacttta

SEQ ID NO: 934155 - DNA, 15 bp, Homo sapiens
atgcccacactttat

SEQ ID NO: 934156 - DNA, 15 bp, Homo sapiens
tgcccacactttatg

SEQ ID NO: 934157 - DNA, 15 bp, Homo sapiens
gcccacactttatgt

SEQ ID NO: 934158 - DNA, 15 bp, Homo sapiens
cccacactttatgtc

SEQ ID NO: 934159 - DNA, 15 bp, Homo sapiens
ccacactttatgtct

SEQ ID NO: 934160 - DNA, 15 bp, Homo sapiens
cacactttatgtctg

SEQ ID NO: 934161 - DNA, 15 bp, Homo sapiens
acactttatgtctgg

SEQ ID NO: 934162 - DNA, 15 bp, Homo sapiens
cactttatgtctggg

SEQ ID NO: 934163 - DNA, 15 bp, Homo sapiens
actttatgtctgggc

SEQ ID NO: 934164 - DNA, 15 bp, Homo sapiens
ctttatgtctgggca

SEQ ID NO: 934165 - DNA, 15 bp, Homo sapiens
tttatgtctgggcaa

SEQ ID NO: 934166 - DNA, 15 bp, Homo sapiens
ttatgtctgggcaaa

SEQ ID NO: 934167 - DNA, 15 bp, Homo sapiens
tatgtctgggcaaat

SEQ ID NO: 934168 - DNA, 15 bp, Homo sapiens
atgtctgggcaaatt

SEQ ID NO: 934169 - DNA, 15 bp, Homo sapiens
tgtctgggcaaattt

SEQ ID NO: 934170 - DNA, 15 bp, Homo sapiens
gtctgggcaaatttc

SEQ ID NO: 934171 - DNA, 15 bp, Homo sapiens
tctgggcaaatttca

SEQ ID NO: 934172 - DNA, 15 bp, Homo sapiens
ctgggcaaatttcag

SEQ ID NO: 934173 - DNA, 15 bp, Homo sapiens
tgggcaaatttcagc

SEQ ID NO: 934174 - DNA, 15 bp, Homo sapiens
gggcaaatttcagca

SEQ ID NO: 934175 - DNA, 15 bp, Homo sapiens
ggcaaatttcagcaa

SEQ ID NO: 934176 - DNA, 15 bp, Homo sapiens
gcaaatttcagcaac

SEQ ID NO: 934177 - DNA, 15 bp, Homo sapiens
caaatttcagcaact

SEQ ID NO: 934178 - DNA, 15 bp, Homo sapiens
aaatttcagcaactt

SEQ ID NO: 934179 - DNA, 15 bp, Homo sapiens
aatttcagcaactta

SEQ ID NO: 934180 - DNA, 15 bp, Homo sapiens
atttcagcaacttaa

SEQ ID NO: 934181 - DNA, 15 bp, Homo sapiens
tttcagcaacttaaa

SEQ ID NO: 934182 - DNA, 15 bp, Homo sapiens
ttcagcaacttaaaa

SEQ ID NO: 934183 - DNA, 15 bp, Homo sapiens
tcagcaacttaaaaa

SEQ ID NO: 934184 - DNA, 15 bp, Homo sapiens
cagcaacttaaaaaa

SEQ ID NO: 934185 - DNA, 15 bp, Homo sapiens
agcaacttaaaaaaa

SEQ ID NO: 934186 - DNA, 15 bp, Homo sapiens
gcaacttaaaaaaaa

SEQ ID NO: 934187 - DNA, 15 bp, Homo sapiens
caacttaaaaaaaaa

SEQ ID NO: 934188 - DNA, 15 bp, Homo sapiens
aacttaaaaaaaaaa

SEQ ID NO: 934189 - DNA, 15 bp, Homo sapiens
acttaaaaaaaaaaa

SEQ ID NO: 934190 - DNA, 15 bp, Homo sapiens
cttaaaaaaaaaaaa

SEQ ID NO: 934191 - DNA, 15 bp, Homo sapiens
aaaaaaaaaaaagga

SEQ ID NO: 934192 - DNA, 15 bp, Homo sapiens
aaaaaaaaaaaggat

SEQ ID NO: 934193 - DNA, 15 bp, Homo sapiens
aaaaaaaaaaggatg

SEQ ID NO: 934194 - DNA, 15 bp, Homo sapiens
aaaaaaaaaggatga

SEQ ID NO: 934195 - DNA, 15 bp, Homo sapiens
aaaaaaaaggatgaa

SEQ ID NO: 934196 - DNA, 15 bp, Homo sapiens
aaaaaaaggatgaac

SEQ ID NO: 934197 - DNA, 15 bp, Homo sapiens
aaaaaaggatgaact

SEQ ID NO: 934198 - DNA, 15 bp, Homo sapiens
aaaaaggatgaacta

SEQ ID NO: 934199 - DNA, 15 bp, Homo sapiens
aaaaggatgaactat

SEQ ID NO: 934200 - DNA, 15 bp, Homo sapiens
aaaggatgaactatt

SEQ ID NO: 934201 - DNA, 15 bp, Homo sapiens
aaggatgaactattc

SEQ ID NO: 934202 - DNA, 15 bp, Homo sapiens
aggatgaactattca

SEQ ID NO: 934203 - DNA, 15 bp, Homo sapiens
ggatgaactattcaa

SEQ ID NO: 934204 - DNA, 15 bp, Homo sapiens
gatgaactattcaag

SEQ ID NO: 934205 - DNA, 15 bp, Homo sapiens
atgaactattcaagt

SEQ ID NO: 934206 - DNA, 15 bp, Homo sapiens
tgaactattcaagtt

SEQ ID NO: 934207 - DNA, 15 bp, Homo sapiens
gaactattcaagttc

SEQ ID NO: 934208 - DNA, 15 bp, Homo sapiens
aactattcaagttcc

SEQ ID NO: 934209 - DNA, 15 bp, Homo sapiens
actattcaagttcca

SEQ ID NO: 934210 - DNA, 15 bp, Homo sapiens
ctattcaagttccaa

SEQ ID NO: 934211 - DNA, 15 bp, Homo sapiens
tattcaagttccaac

SEQ ID NO: 934212 - DNA, 15 bp, Homo sapiens
attcaagttccaaca

SEQ ID NO: 934213 - DNA, 15 bp, Homo sapiens
ttcaagttccaacat

SEQ ID NO: 934214 - DNA, 15 bp, Homo sapiens
tcaagttccaacatg

SEQ ID NO: 934215 - DNA, 15 bp, Homo sapiens
caagttccaacatgt

SEQ ID NO: 934216 - DNA, 15 bp, Homo sapiens
aagttccaacatgtc

SEQ ID NO: 934217 - DNA, 15 bp, Homo sapiens
agttccaacatgtct

SEQ ID NO: 934218 - DNA, 15 bp, Homo sapiens
gttccaacatgtcta

SEQ ID NO: 934219 - DNA, 15 bp, Homo sapiens
ttccaacatgtctaa

SEQ ID NO: 934220 - DNA, 15 bp, Homo sapiens
tccaacatgtctaac

SEQ ID NO: 934221 - DNA, 15 bp, Homo sapiens
ccaacatgtctaacc

SEQ ID NO: 934222 - DNA, 15 bp, Homo sapiens
caacatgtctaacct

SEQ ID NO: 934223 - DNA, 15 bp, Homo sapiens
aacatgtctaaccta

SEQ ID NO: 934224 - DNA, 15 bp, Homo sapiens
acatgtctaacctaa

SEQ ID NO: 934225 - DNA, 15 bp, Homo sapiens
catgtctaacctaaa

SEQ ID NO: 934226 - DNA, 15 bp, Homo sapiens
atgtctaacctaaaa

SEQ ID NO: 934227 - DNA, 15 bp, Homo sapiens
tgtctaacctaaaat

SEQ ID NO: 934228 - DNA, 15 bp, Homo sapiens
gtctaacctaaaata

SEQ ID NO: 934229 - DNA, 15 bp, Homo sapiens
tctaacctaaaataa

SEQ ID NO: 934230 - DNA, 15 bp, Homo sapiens
ctaacctaaaataag

SEQ ID NO: 934231 - DNA, 15 bp, Homo sapiens
taacctaaaataagt

SEQ ID NO: 934232 - DNA, 15 bp, Homo sapiens
aacctaaaataagta

SEQ ID NO: 934233 - DNA, 15 bp, Homo sapiens
acctaaaataagtat

SEQ ID NO: 934234 - DNA, 15 bp, Homo sapiens
cctaaaataagtata

SEQ ID NO: 934235 - DNA, 15 bp, Homo sapiens
ctaaaataagtatat

SEQ ID NO: 934236 - DNA, 15 bp, Homo sapiens
taaaataagtatatg

SEQ ID NO: 934237 - DNA, 15 bp, Homo sapiens
aaaataagtatatgt

SEQ ID NO: 934238 - DNA, 15 bp, Homo sapiens
aaataagtatatgtc

SEQ ID NO: 934239 - DNA, 15 bp, Homo sapiens
aataagtatatgtca

SEQ ID NO: 934240 - DNA, 15 bp, Homo sapiens
ataagtatatgtcaa

SEQ ID NO: 934241 - DNA, 15 bp, Homo sapiens
taagtatatgtcaac

SEQ ID NO: 934242 - DNA, 15 bp, Homo sapiens
aagtatatgtcaaca

SEQ ID NO: 934243 - DNA, 15 bp, Homo sapiens
agtatatgtcaacat

SEQ ID NO: 934244 - DNA, 15 bp, Homo sapiens
gtatatgtcaacatc

SEQ ID NO: 934245 - DNA, 15 bp, Homo sapiens
tatatgtcaacatca

SEQ ID NO: 934246 - DNA, 15 bp, Homo sapiens
atatgtcaacatcaa

SEQ ID NO: 934247 - DNA, 15 bp, Homo sapiens
tatgtcaacatcaag

SEQ ID NO: 934248 - DNA, 15 bp, Homo sapiens
atgtcaacatcaaga

SEQ ID NO: 934249 - DNA, 15 bp, Homo sapiens
tgtcaacatcaagat

SEQ ID NO: 934250 - DNA, 15 bp, Homo sapiens
gtcaacatcaagatg

SEQ ID NO: 934251 - DNA, 15 bp, Homo sapiens
tcaacatcaagatgt

SEQ ID NO: 934252 - DNA, 15 bp, Homo sapiens
caacatcaagatgta

SEQ ID NO: 934253 - DNA, 15 bp, Homo sapiens
aacatcaagatgtat

SEQ ID NO: 934254 - DNA, 15 bp, Homo sapiens
acatcaagatgtatc

SEQ ID NO: 934255 - DNA, 15 bp, Homo sapiens
catcaagatgtatcc

SEQ ID NO: 934256 - DNA, 15 bp, Homo sapiens
atcaagatgtatcca

SEQ ID NO: 934257 - DNA, 15 bp, Homo sapiens
tcaagatgtatccat

SEQ ID NO: 934258 - DNA, 15 bp, Homo sapiens
caagatgtatccata

SEQ ID NO: 934259 - DNA, 15 bp, Homo sapiens
aagatgtatccatat

SEQ ID NO: 934260 - DNA, 15 bp, Homo sapiens
agatgtatccatata

SEQ ID NO: 934261 - DNA, 15 bp, Homo sapiens
gatgtatccatatat

SEQ ID NO: 934262 - DNA, 15 bp, Homo sapiens
atgtatccatatata

SEQ ID NO: 934263 - DNA, 15 bp, Homo sapiens
tgtatccatatataa

SEQ ID NO: 934264 - DNA, 15 bp, Homo sapiens
gtatccatatataaa

SEQ ID NO: 934265 - DNA, 15 bp, Homo sapiens
tatccatatataaat

SEQ ID NO: 934266 - DNA, 15 bp, Homo sapiens
atccatatataaatg

SEQ ID NO: 934267 - DNA, 15 bp, Homo sapiens
tccatatataaatgg

SEQ ID NO: 934268 - DNA, 15 bp, Homo sapiens
ccatatataaatgga

SEQ ID NO: 934269 - DNA, 15 bp, Homo sapiens
catatataaatggaa

SEQ ID NO: 934270 - DNA, 15 bp, Homo sapiens
atatataaatggaaa

SEQ ID NO: 934271 - DNA, 15 bp, Homo sapiens
tatataaatggaaaa

SEQ ID NO: 934272 - DNA, 15 bp, Homo sapiens
atataaatggaaaat

SEQ ID NO: 934273 - DNA, 15 bp, Homo sapiens
tataaatggaaaatt

SEQ ID NO: 934274 - DNA, 15 bp, Homo sapiens
ataaatggaaaatta

SEQ ID NO: 934275 - DNA, 15 bp, Homo sapiens
taaatggaaaattaa

SEQ ID NO: 934276 - DNA, 15 bp, Homo sapiens
aaatggaaaattaaa

SEQ ID NO: 934277 - DNA, 15 bp, Homo sapiens
aatggaaaattaaag

SEQ ID NO: 934278 - DNA, 15 bp, Homo sapiens
atggaaaattaaaga

SEQ ID NO: 934279 - DNA, 15 bp, Homo sapiens
tggaaaattaaagag

SEQ ID NO: 934280 - DNA, 15 bp, Homo sapiens
ggaaaattaaagaga

SEQ ID NO: 934281 - DNA, 15 bp, Homo sapiens
gaaaattaaagagaa

SEQ ID NO: 934282 - DNA, 15 bp, Homo sapiens
aaaattaaagagaat

SEQ ID NO: 934283 - DNA, 15 bp, Homo sapiens
aaattaaagagaata

SEQ ID NO: 934284 - DNA, 15 bp, Homo sapiens
aattaaagagaataa

SEQ ID NO: 934285 - DNA, 15 bp, Homo sapiens
attaaagagaataaa

SEQ ID NO: 934286 - DNA, 15 bp, Homo sapiens
ttaaagagaataaaa

SEQ ID NO: 934287 - DNA, 15 bp, Homo sapiens
taaagagaataaaac

SEQ ID NO: 934288 - DNA, 15 bp, Homo sapiens
aaagagaataaaact

SEQ ID NO: 934289 - DNA, 15 bp, Homo sapiens
aagagaataaaacta

SEQ ID NO: 934290 - DNA, 15 bp, Homo sapiens
agagaataaaactag

SEQ ID NO: 934291 - DNA, 15 bp, Homo sapiens
gagaataaaactagt

SEQ ID NO: 934292 - DNA, 15 bp, Homo sapiens
agaataaaactagtg

SEQ ID NO: 934293 - DNA, 15 bp, Homo sapiens
gaataaaactagtgt

SEQ ID NO: 934294 - DNA, 15 bp, Homo sapiens
aataaaactagtgta

SEQ ID NO: 934295 - DNA, 15 bp, Homo sapiens
ataaaactagtgtat

SEQ ID NO: 934296 - DNA, 15 bp, Homo sapiens
taaaactagtgtatt

SEQ ID NO: 934297 - DNA, 15 bp, Homo sapiens
aaaactagtgtattt

SEQ ID NO: 934298 - DNA, 15 bp, Homo sapiens
aaactagtgtatttc

SEQ ID NO: 934299 - DNA, 15 bp, Homo sapiens
aactagtgtatttct

SEQ ID NO: 934300 - DNA, 15 bp, Homo sapiens
actagtgtatttcta

SEQ ID NO: 934301 - DNA, 15 bp, Homo sapiens
ctagtgtatttctat

SEQ ID NO: 934302 - DNA, 15 bp, Homo sapiens
tagtgtatttctatt

SEQ ID NO: 934303 - DNA, 15 bp, Homo sapiens
agtgtatttctatta

SEQ ID NO: 934304 - DNA, 15 bp, Homo sapiens
gtgtatttctattat

SEQ ID NO: 934305 - DNA, 15 bp, Homo sapiens
tgtatttctattatg

SEQ ID NO: 934306 - DNA, 15 bp, Homo sapiens
gtatttctattatgc

SEQ ID NO: 934307 - DNA, 15 bp, Homo sapiens
tatttctattatgct

SEQ ID NO: 934308 - DNA, 15 bp, Homo sapiens
atttctattatgctt

SEQ ID NO: 934309 - DNA, 15 bp, Homo sapiens
tttctattatgcttt

SEQ ID NO: 934310 - DNA, 15 bp, Homo sapiens
ttctattatgctttt

SEQ ID NO: 934311 - DNA, 15 bp, Homo sapiens
tctattatgcttttt

SEQ ID NO: 934312 - DNA, 15 bp, Homo sapiens
ctattatgcttttta

SEQ ID NO: 934313 - DNA, 15 bp, Homo sapiens
tattatgctttttaa

SEQ ID NO: 934314 - DNA, 15 bp, Homo sapiens
attatgctttttaac

SEQ ID NO: 934315 - DNA, 15 bp, Homo sapiens
ttatgctttttaact

SEQ ID NO: 934316 - DNA, 15 bp, Homo sapiens
tatgctttttaactt

SEQ ID NO: 934317 - DNA, 15 bp, Homo sapiens
atgctttttaacttc

SEQ ID NO: 934318 - DNA, 15 bp, Homo sapiens
tgctttttaacttca

SEQ ID NO: 934319 - DNA, 15 bp, Homo sapiens
gctttttaacttcat

SEQ ID NO: 934320 - DNA, 15 bp, Homo sapiens
ctttttaacttcata

SEQ ID NO: 934321 - DNA, 15 bp, Homo sapiens
tttttaacttcatat

SEQ ID NO: 934322 - DNA, 15 bp, Homo sapiens
ttttaacttcatatc

SEQ ID NO: 934323 - DNA, 15 bp, Homo sapiens
tttaacttcatatct

SEQ ID NO: 934324 - DNA, 15 bp, Homo sapiens
ttaacttcatatcta

SEQ ID NO: 934325 - DNA, 15 bp, Homo sapiens
taacttcatatctag

SEQ ID NO: 934326 - DNA, 15 bp, Homo sapiens
aacttcatatctagt

SEQ ID NO: 934327 - DNA, 15 bp, Homo sapiens
acttcatatctagtt

SEQ ID NO: 934328 - DNA, 15 bp, Homo sapiens
cttcatatctagttt

SEQ ID NO: 934329 - DNA, 15 bp, Homo sapiens
ttcatatctagtttg

SEQ ID NO: 934330 - DNA, 15 bp, Homo sapiens
tcatatctagtttgg

SEQ ID NO: 934331 - DNA, 15 bp, Homo sapiens
catatctagtttggc

SEQ ID NO: 934332 - DNA, 15 bp, Homo sapiens
atatctagtttggcc

SEQ ID NO: 934333 - DNA, 15 bp, Homo sapiens
tatctagtttggcct

SEQ ID NO: 934334 - DNA, 15 bp, Homo sapiens
atctagtttggcctg

SEQ ID NO: 934335 - DNA, 15 bp, Homo sapiens
tctagtttggcctgg

SEQ ID NO: 934336 - DNA, 15 bp, Homo sapiens
ctagtttggcctggg

SEQ ID NO: 934337 - DNA, 15 bp, Homo sapiens
tagtttggcctgggc

SEQ ID NO: 934338 - DNA, 15 bp, Homo sapiens
agtttggcctgggct

SEQ ID NO: 934339 - DNA, 15 bp, Homo sapiens
gtttggcctgggctt

SEQ ID NO: 934340 - DNA, 15 bp, Homo sapiens
tttggcctgggcttt

SEQ ID NO: 934341 - DNA, 15 bp, Homo sapiens
ttggcctgggctttt

SEQ ID NO: 934342 - DNA, 15 bp, Homo sapiens
tggcctgggctttta

SEQ ID NO: 934343 - DNA, 15 bp, Homo sapiens
ggcctgggcttttaa

SEQ ID NO: 934344 - DNA, 15 bp, Homo sapiens
gcctgggcttttaaa

SEQ ID NO: 934345 - DNA, 15 bp, Homo sapiens
cctgggcttttaaac

SEQ ID NO: 934346 - DNA, 15 bp, Homo sapiens
ctgggcttttaaact

SEQ ID NO: 934347 - DNA, 15 bp, Homo sapiens
tgggcttttaaactg

SEQ ID NO: 934348 - DNA, 15 bp, Homo sapiens
gggcttttaaactgg

SEQ ID NO: 934349 - DNA, 15 bp, Homo sapiens
ggcttttaaactggc

SEQ ID NO: 934350 - DNA, 15 bp, Homo sapiens
gcttttaaactggcc

SEQ ID NO: 934351 - DNA, 15 bp, Homo sapiens
cttttaaactggcca

SEQ ID NO: 934352 - DNA, 15 bp, Homo sapiens
ttttaaactggccac

SEQ ID NO: 934353 - DNA, 15 bp, Homo sapiens
tttaaactggccacc

SEQ ID NO: 934354 - DNA, 15 bp, Homo sapiens
ttaaactggccacct

SEQ ID NO: 934355 - DNA, 15 bp, Homo sapiens
taaactggccacctg

SEQ ID NO: 934356 - DNA, 15 bp, Homo sapiens
aaactggccacctgt

SEQ ID NO: 934357 - DNA, 15 bp, Homo sapiens
aactggccacctgtt

SEQ ID NO: 934358 - DNA, 15 bp, Homo sapiens
actggccacctgttt

SEQ ID NO: 934359 - DNA, 15 bp, Homo sapiens
ctggccacctgtttc

SEQ ID NO: 934360 - DNA, 15 bp, Homo sapiens
tggccacctgtttcc

SEQ ID NO: 934361 - DNA, 15 bp, Homo sapiens
ggccacctgtttcca

SEQ ID NO: 934362 - DNA, 15 bp, Homo sapiens
gccacctgtttccaa

SEQ ID NO: 934363 - DNA, 15 bp, Homo sapiens
ccacctgtttccaaa

SEQ ID NO: 934364 - DNA, 15 bp, Homo sapiens
cacctgtttccaaag

SEQ ID NO: 934365 - DNA, 15 bp, Homo sapiens
acctgtttccaaagt

SEQ ID NO: 934366 - DNA, 15 bp, Homo sapiens
cctgtttccaaagta

SEQ ID NO: 934367 - DNA, 15 bp, Homo sapiens
ctgtttccaaagtat

SEQ ID NO: 934368 - DNA, 15 bp, Homo sapiens
tgtttccaaagtatg

SEQ ID NO: 934369 - DNA, 15 bp, Homo sapiens
gtttccaaagtatgg

SEQ ID NO: 934370 - DNA, 15 bp, Homo sapiens
tttccaaagtatgga

SEQ ID NO: 934371 - DNA, 15 bp, Homo sapiens
ttccaaagtatggac

SEQ ID NO: 934372 - DNA, 15 bp, Homo sapiens
tccaaagtatggact

SEQ ID NO: 934373 - DNA, 15 bp, Homo sapiens
ccaaagtatggactt

SEQ ID NO: 934374 - DNA, 15 bp, Homo sapiens
caaagtatggacttc

SEQ ID NO: 934375 - DNA, 15 bp, Homo sapiens
aaagtatggacttcc

SEQ ID NO: 934376 - DNA, 15 bp, Homo sapiens
aagtatggacttcca

SEQ ID NO: 934377 - DNA, 15 bp, Homo sapiens
agtatggacttccag

SEQ ID NO: 934378 - DNA, 15 bp, Homo sapiens
gtatggacttccagc

SEQ ID NO: 934379 - DNA, 15 bp, Homo sapiens
tatggacttccagca

SEQ ID NO: 934380 - DNA, 15 bp, Homo sapiens
atggacttccagcac

SEQ ID NO: 934381 - DNA, 15 bp, Homo sapiens
tggacttccagcacc

SEQ ID NO: 934382 - DNA, 15 bp, Homo sapiens
ggacttccagcacca

SEQ ID NO: 934383 - DNA, 15 bp, Homo sapiens
gacttccagcaccac

SEQ ID NO: 934384 - DNA, 15 bp, Homo sapiens
acttccagcaccact

SEQ ID NO: 934385 - DNA, 15 bp, Homo sapiens
cttccagcaccactg

SEQ ID NO: 934386 - DNA, 15 bp, Homo sapiens
ttccagcaccactgt

SEQ ID NO: 934387 - DNA, 15 bp, Homo sapiens
tccagcaccactgtg

SEQ ID NO: 934388 - DNA, 15 bp, Homo sapiens
ccagcaccactgtgt

SEQ ID NO: 934389 - DNA, 15 bp, Homo sapiens
cagcaccactgtgtt

SEQ ID NO: 934390 - DNA, 15 bp, Homo sapiens
agcaccactgtgttc

SEQ ID NO: 934391 - DNA, 15 bp, Homo sapiens
gcaccactgtgttca

SEQ ID NO: 934392 - DNA, 15 bp, Homo sapiens
caccactgtgttcat

SEQ ID NO: 934393 - DNA, 15 bp, Homo sapiens
accactgtgttcatg

SEQ ID NO: 934394 - DNA, 15 bp, Homo sapiens
ccactgtgttcatga

SEQ ID NO: 934395 - DNA, 15 bp, Homo sapiens
cactgtgttcatgaa

SEQ ID NO: 934396 - DNA, 15 bp, Homo sapiens
actgtgttcatgaac

SEQ ID NO: 934397 - DNA, 15 bp, Homo sapiens
ctgtgttcatgaacc

SEQ ID NO: 934398 - DNA, 15 bp, Homo sapiens
tgtgttcatgaacca

SEQ ID NO: 934399 - DNA, 15 bp, Homo sapiens
gtgttcatgaaccat

SEQ ID NO: 934400 - DNA, 15 bp, Homo sapiens
tgttcatgaaccatt

SEQ ID NO: 934401 - DNA, 15 bp, Homo sapiens
gttcatgaaccattt

SEQ ID NO: 934402 - DNA, 15 bp, Homo sapiens
ttcatgaaccattta

SEQ ID NO: 934403 - DNA, 15 bp, Homo sapiens
tcatgaaccatttac

SEQ ID NO: 934404 - DNA, 15 bp, Homo sapiens
catgaaccatttacc

SEQ ID NO: 934405 - DNA, 15 bp, Homo sapiens
atgaaccatttacct

SEQ ID NO: 934406 - DNA, 15 bp, Homo sapiens
tgaaccatttacctt

SEQ ID NO: 934407 - DNA, 15 bp, Homo sapiens
gaaccatttaccttc

SEQ ID NO: 934408 - DNA, 15 bp, Homo sapiens
aaccatttaccttca

SEQ ID NO: 934409 - DNA, 15 bp, Homo sapiens
accatttaccttcat

SEQ ID NO: 934410 - DNA, 15 bp, Homo sapiens
ccatttaccttcatc

SEQ ID NO: 934411 - DNA, 15 bp, Homo sapiens
catttaccttcatcc

SEQ ID NO: 934412 - DNA, 15 bp, Homo sapiens
atttaccttcatcct

SEQ ID NO: 934413 - DNA, 15 bp, Homo sapiens
tttaccttcatcctg

SEQ ID NO: 934414 - DNA, 15 bp, Homo sapiens
ttaccttcatcctgc

SEQ ID NO: 934415 - DNA, 15 bp, Homo sapiens
taccttcatcctgct

SEQ ID NO: 934416 - DNA, 15 bp, Homo sapiens
accttcatcctgctt

SEQ ID NO: 934417 - DNA, 15 bp, Homo sapiens
ccttcatcctgcttg

SEQ ID NO: 934418 - DNA, 15 bp, Homo sapiens
cttcatcctgcttgc

SEQ ID NO: 934419 - DNA, 15 bp, Homo sapiens
ttcatcctgcttgca

SEQ ID NO: 934420 - DNA, 15 bp, Homo sapiens
tcatcctgcttgcac

SEQ ID NO: 934421 - DNA, 15 bp, Homo sapiens
catcctgcttgcacc

SEQ ID NO: 934422 - DNA, 15 bp, Homo sapiens
atcctgcttgcacca

SEQ ID NO: 934423 - DNA, 15 bp, Homo sapiens
tcctgcttgcaccaa

SEQ ID NO: 934424 - DNA, 15 bp, Homo sapiens
cctgcttgcaccaaa

SEQ ID NO: 934425 - DNA, 15 bp, Homo sapiens
ctgcttgcaccaaat

SEQ ID NO: 934426 - DNA, 15 bp, Homo sapiens
tgcttgcaccaaatt

SEQ ID NO: 934427 - DNA, 15 bp, Homo sapiens
gcttgcaccaaattt

SEQ ID NO: 934428 - DNA, 15 bp, Homo sapiens
cttgcaccaaatttt

SEQ ID NO: 934429 - DNA, 15 bp, Homo sapiens
ttgcaccaaattttt

SEQ ID NO: 934430 - DNA, 15 bp, Homo sapiens
tgcaccaaatttttt

SEQ ID NO: 934431 - DNA, 15 bp, Homo sapiens
gcaccaaattttttt

SEQ ID NO: 934432 - DNA, 15 bp, Homo sapiens
caccaaatttttttc

SEQ ID NO: 934433 - DNA, 15 bp, Homo sapiens
accaaatttttttca

SEQ ID NO: 934434 - DNA, 15 bp, Homo sapiens
ccaaatttttttcac

SEQ ID NO: 934435 - DNA, 15 bp, Homo sapiens
caaatttttttcact

SEQ ID NO: 934436 - DNA, 15 bp, Homo sapiens
aaatttttttcactc

SEQ ID NO: 934437 - DNA, 15 bp, Homo sapiens
aatttttttcactca

SEQ ID NO: 934438 - DNA, 15 bp, Homo sapiens
atttttttcactcat

SEQ ID NO: 934439 - DNA, 15 bp, Homo sapiens
tttttttcactcatt

SEQ ID NO: 934440 - DNA, 15 bp, Homo sapiens
ttttttcactcattt

SEQ ID NO: 934441 - DNA, 15 bp, Homo sapiens
tttttcactcatttc

SEQ ID NO: 934442 - DNA, 15 bp, Homo sapiens
ttttcactcatttct

SEQ ID NO: 934443 - DNA, 15 bp, Homo sapiens
tttcactcatttcta

SEQ ID NO: 934444 - DNA, 15 bp, Homo sapiens
ttcactcatttctaa

SEQ ID NO: 934445 - DNA, 15 bp, Homo sapiens
tcactcatttctaac

SEQ ID NO: 934446 - DNA, 15 bp, Homo sapiens
cactcatttctaacc

SEQ ID NO: 934447 - DNA, 15 bp, Homo sapiens
actcatttctaacct

SEQ ID NO: 934448 - DNA, 15 bp, Homo sapiens
ctcatttctaacctc

SEQ ID NO: 934449 - DNA, 15 bp, Homo sapiens
tcatttctaacctcc

SEQ ID NO: 934450 - DNA, 15 bp, Homo sapiens
catttctaacctcct

SEQ ID NO: 934451 - DNA, 15 bp, Homo sapiens
atttctaacctcctc

SEQ ID NO: 934452 - DNA, 15 bp, Homo sapiens
tttctaacctcctca

SEQ ID NO: 934453 - DNA, 15 bp, Homo sapiens
ttctaacctcctcag

SEQ ID NO: 934454 - DNA, 15 bp, Homo sapiens
tctaacctcctcaga

SEQ ID NO: 934455 - DNA, 15 bp, Homo sapiens
ctaacctcctcagat

SEQ ID NO: 934456 - DNA, 15 bp, Homo sapiens
taacctcctcagatc

SEQ ID NO: 934457 - DNA, 15 bp, Homo sapiens
aacctcctcagatcc

SEQ ID NO: 934458 - DNA, 15 bp, Homo sapiens
acctcctcagatcct

SEQ ID NO: 934459 - DNA, 15 bp, Homo sapiens
cctcctcagatcctg

SEQ ID NO: 934460 - DNA, 15 bp, Homo sapiens
ctcctcagatcctgc

SEQ ID NO: 934461 - DNA, 15 bp, Homo sapiens
tcctcagatcctgcc

SEQ ID NO: 934462 - DNA, 15 bp, Homo sapiens
cctcagatcctgccc

SEQ ID NO: 934463 - DNA, 15 bp, Homo sapiens
ctcagatcctgccca

SEQ ID NO: 934464 - DNA, 15 bp, Homo sapiens
tcagatcctgcccag

SEQ ID NO: 934465 - DNA, 15 bp, Homo sapiens
cagatcctgcccagg

SEQ ID NO: 934466 - DNA, 15 bp, Homo sapiens
agatcctgcccaggg

SEQ ID NO: 934467 - DNA, 15 bp, Homo sapiens
gatcctgcccagggc

SEQ ID NO: 934468 - DNA, 15 bp, Homo sapiens
atcctgcccagggct

SEQ ID NO: 934469 - DNA, 15 bp, Homo sapiens
tcctgcccagggctt

SEQ ID NO: 934470 - DNA, 15 bp, Homo sapiens
cctgcccagggcttc

SEQ ID NO: 934471 - DNA, 15 bp, Homo sapiens
ctgcccagggcttca

SEQ ID NO: 934472 - DNA, 15 bp, Homo sapiens
tgcccagggcttcac

SEQ ID NO: 934473 - DNA, 15 bp, Homo sapiens
gcccagggcttcaca

SEQ ID NO: 934474 - DNA, 15 bp, Homo sapiens
cccagggcttcacat

SEQ ID NO: 934475 - DNA, 15 bp, Homo sapiens
ccagggcttcacatt

SEQ ID NO: 934476 - DNA, 15 bp, Homo sapiens
cagggcttcacattc

SEQ ID NO: 934477 - DNA, 15 bp, Homo sapiens
agggcttcacattca

SEQ ID NO: 934478 - DNA, 15 bp, Homo sapiens
gggcttcacattcat

SEQ ID NO: 934479 - DNA, 15 bp, Homo sapiens
ggcttcacattcata

SEQ ID NO: 934480 - DNA, 15 bp, Homo sapiens
gcttcacattcatac

SEQ ID NO: 934481 - DNA, 15 bp, Homo sapiens
cttcacattcatact

SEQ ID NO: 934482 - DNA, 15 bp, Homo sapiens
ttcacattcatactt

SEQ ID NO: 934483 - DNA, 15 bp, Homo sapiens
tcacattcatacttt

SEQ ID NO: 934484 - DNA, 15 bp, Homo sapiens
cacattcatactttg

SEQ ID NO: 934485 - DNA, 15 bp, Homo sapiens
acattcatactttgc

SEQ ID NO: 934486 - DNA, 15 bp, Homo sapiens
cattcatactttgcg

SEQ ID NO: 934487 - DNA, 15 bp, Homo sapiens
attcatactttgcgt

SEQ ID NO: 934488 - DNA, 15 bp, Homo sapiens
ttcatactttgcgtc

SEQ ID NO: 934489 - DNA, 15 bp, Homo sapiens
tcatactttgcgtcc

SEQ ID NO: 934490 - DNA, 15 bp, Homo sapiens
catactttgcgtcct

SEQ ID NO: 934491 - DNA, 15 bp, Homo sapiens
atactttgcgtcctt

SEQ ID NO: 934492 - DNA, 15 bp, Homo sapiens
tactttgcgtccttt

SEQ ID NO: 934493 - DNA, 15 bp, Homo sapiens
actttgcgtcctttg

SEQ ID NO: 934494 - DNA, 15 bp, Homo sapiens
ctttgcgtcctttga

SEQ ID NO: 934495 - DNA, 15 bp, Homo sapiens
tttgcgtcctttgat

SEQ ID NO: 934496 - DNA, 15 bp, Homo sapiens
ttgcgtcctttgatt

SEQ ID NO: 934497 - DNA, 15 bp, Homo sapiens
tgcgtcctttgatta

SEQ ID NO: 934498 - DNA, 15 bp, Homo sapiens
gcgtcctttgattat

SEQ ID NO: 934499 - DNA, 15 bp, Homo sapiens
cgtcctttgattatg

SEQ ID NO: 934500 - DNA, 15 bp, Homo sapiens
gtcctttgattatgt

SEQ ID NO: 934501 - DNA, 15 bp, Homo sapiens
tcctttgattatgtt

SEQ ID NO: 934502 - DNA, 15 bp, Homo sapiens
cctttgattatgttt

SEQ ID NO: 934503 - DNA, 15 bp, Homo sapiens
ctttgattatgtttc

SEQ ID NO: 934504 - DNA, 15 bp, Homo sapiens
tttgattatgtttct

SEQ ID NO: 934505 - DNA, 15 bp, Homo sapiens
ttgattatgtttctt

SEQ ID NO: 934506 - DNA, 15 bp, Homo sapiens
tgattatgtttcttt

SEQ ID NO: 934507 - DNA, 15 bp, Homo sapiens
gattatgtttctttt

SEQ ID NO: 934508 - DNA, 15 bp, Homo sapiens
attatgtttctttta

SEQ ID NO: 934509 - DNA, 15 bp, Homo sapiens
ttatgtttcttttaa

SEQ ID NO: 934510 - DNA, 15 bp, Homo sapiens
tatgtttcttttaaa

SEQ ID NO: 934511 - DNA, 15 bp, Homo sapiens
atgtttcttttaaac

SEQ ID NO: 934512 - DNA, 15 bp, Homo sapiens
tgtttcttttaaact

SEQ ID NO: 934513 - DNA, 15 bp, Homo sapiens
gtttcttttaaactg

SEQ ID NO: 934514 - DNA, 15 bp, Homo sapiens
tttcttttaaactga

SEQ ID NO: 934515 - DNA, 15 bp, Homo sapiens
ttcttttaaactgaa

SEQ ID NO: 934516 - DNA, 15 bp, Homo sapiens
tcttttaaactgaaa

SEQ ID NO: 934517 - DNA, 15 bp, Homo sapiens
cttttaaactgaaat

SEQ ID NO: 934518 - DNA, 15 bp, Homo sapiens
ttttaaactgaaatt

SEQ ID NO: 934519 - DNA, 15 bp, Homo sapiens
tttaaactgaaattg

SEQ ID NO: 934520 - DNA, 15 bp, Homo sapiens
ttaaactgaaattga

SEQ ID NO: 934521 - DNA, 15 bp, Homo sapiens
taaactgaaattgat

SEQ ID NO: 934522 - DNA, 15 bp, Homo sapiens
aaactgaaattgatt

SEQ ID NO: 934523 - DNA, 15 bp, Homo sapiens
aactgaaattgattt

SEQ ID NO: 934524 - DNA, 15 bp, Homo sapiens
actgaaattgatttc

SEQ ID NO: 934525 - DNA, 15 bp, Homo sapiens
ctgaaattgatttcc

SEQ ID NO: 934526 - DNA, 15 bp, Homo sapiens
tgaaattgatttcct

SEQ ID NO: 934527 - DNA, 15 bp, Homo sapiens
gaaattgatttcctt

SEQ ID NO: 934528 - DNA, 15 bp, Homo sapiens
aaattgatttccttc

SEQ ID NO: 934529 - DNA, 15 bp, Homo sapiens
aattgatttccttcc

SEQ ID NO: 934530 - DNA, 15 bp, Homo sapiens
attgatttccttcct

SEQ ID NO: 934531 - DNA, 15 bp, Homo sapiens
ttgatttccttcctt

SEQ ID NO: 934532 - DNA, 15 bp, Homo sapiens
tgatttccttccttg

SEQ ID NO: 934533 - DNA, 15 bp, Homo sapiens
gatttccttccttgg

SEQ ID NO: 934534 - DNA, 15 bp, Homo sapiens
atttccttccttggc

SEQ ID NO: 934535 - DNA, 15 bp, Homo sapiens
tttccttccttggct

SEQ ID NO: 934536 - DNA, 15 bp, Homo sapiens
ttccttccttggctg

SEQ ID NO: 934537 - DNA, 15 bp, Homo sapiens
tccttccttggctgt

SEQ ID NO: 934538 - DNA, 15 bp, Homo sapiens
ccttccttggctgta

SEQ ID NO: 934539 - DNA, 15 bp, Homo sapiens
cttccttggctgtaa

SEQ ID NO: 934540 - DNA, 15 bp, Homo sapiens
ttccttggctgtaaa

SEQ ID NO: 934541 - DNA, 15 bp, Homo sapiens
tccttggctgtaaat

SEQ ID NO: 934542 - DNA, 15 bp, Homo sapiens
ccttggctgtaaatt

SEQ ID NO: 934543 - DNA, 15 bp, Homo sapiens
cttggctgtaaattg

SEQ ID NO: 934544 - DNA, 15 bp, Homo sapiens
ttggctgtaaattgc

SEQ ID NO: 934545 - DNA, 15 bp, Homo sapiens
tggctgtaaattgct

SEQ ID NO: 934546 - DNA, 15 bp, Homo sapiens
ggctgtaaattgcta

SEQ ID NO: 934547 - DNA, 15 bp, Homo sapiens
gctgtaaattgctag

SEQ ID NO: 934548 - DNA, 15 bp, Homo sapiens
ctgtaaattgctaga

SEQ ID NO: 934549 - DNA, 15 bp, Homo sapiens
tgtaaattgctagaa

SEQ ID NO: 934550 - DNA, 15 bp, Homo sapiens
gtaaattgctagaaa

SEQ ID NO: 934551 - DNA, 15 bp, Homo sapiens
taaattgctagaaaa

SEQ ID NO: 934552 - DNA, 15 bp, Homo sapiens
aaattgctagaaaat

SEQ ID NO: 934553 - DNA, 15 bp, Homo sapiens
aattgctagaaaatt

SEQ ID NO: 934554 - DNA, 15 bp, Homo sapiens
attgctagaaaattg

SEQ ID NO: 934555 - DNA, 15 bp, Homo sapiens
ttgctagaaaattgc

SEQ ID NO: 934556 - DNA, 15 bp, Homo sapiens
tgctagaaaattgct

SEQ ID NO: 934557 - DNA, 15 bp, Homo sapiens
gctagaaaattgctt

SEQ ID NO: 934558 - DNA, 15 bp, Homo sapiens
ctagaaaattgcttc

SEQ ID NO: 934559 - DNA, 15 bp, Homo sapiens
tagaaaattgcttcc

SEQ ID NO: 934560 - DNA, 15 bp, Homo sapiens
agaaaattgcttcca

SEQ ID NO: 934561 - DNA, 15 bp, Homo sapiens
gaaaattgcttccag

SEQ ID NO: 934562 - DNA, 15 bp, Homo sapiens
aaaattgcttccagt

SEQ ID NO: 934563 - DNA, 15 bp, Homo sapiens
aaattgcttccagtc

SEQ ID NO: 934564 - DNA, 15 bp, Homo sapiens
aattgcttccagtcc

SEQ ID NO: 934565 - DNA, 15 bp, Homo sapiens
attgcttccagtccc

SEQ ID NO: 934566 - DNA, 15 bp, Homo sapiens
ttgcttccagtccct

SEQ ID NO: 934567 - DNA, 15 bp, Homo sapiens
tgcttccagtccctc

SEQ ID NO: 934568 - DNA, 15 bp, Homo sapiens
gcttccagtccctcc

SEQ ID NO: 934569 - DNA, 15 bp, Homo sapiens
cttccagtccctcca

SEQ ID NO: 934570 - DNA, 15 bp, Homo sapiens
ttccagtccctccag

SEQ ID NO: 934571 - DNA, 15 bp, Homo sapiens
tccagtccctccagt

SEQ ID NO: 934572 - DNA, 15 bp, Homo sapiens
ccagtccctccagtt

SEQ ID NO: 934573 - DNA, 15 bp, Homo sapiens
cagtccctccagtta

SEQ ID NO: 934574 - DNA, 15 bp, Homo sapiens
agtccctccagttaa

SEQ ID NO: 934575 - DNA, 15 bp, Homo sapiens
gtccctccagttaat

SEQ ID NO: 934576 - DNA, 15 bp, Homo sapiens
tccctccagttaatg

SEQ ID NO: 934577 - DNA, 15 bp, Homo sapiens
ccctccagttaatga

SEQ ID NO: 934578 - DNA, 15 bp, Homo sapiens
cctccagttaatgat

SEQ ID NO: 934579 - DNA, 15 bp, Homo sapiens
ctccagttaatgatg

SEQ ID NO: 934580 - DNA, 15 bp, Homo sapiens
tccagttaatgatga

SEQ ID NO: 934581 - DNA, 15 bp, Homo sapiens
ccagttaatgatgaa

SEQ ID NO: 934582 - DNA, 15 bp, Homo sapiens
cagttaatgatgaag

SEQ ID NO: 934583 - DNA, 15 bp, Homo sapiens
agttaatgatgaagc

SEQ ID NO: 934584 - DNA, 15 bp, Homo sapiens
gttaatgatgaagcc

SEQ ID NO: 934585 - DNA, 15 bp, Homo sapiens
ttaatgatgaagcct

SEQ ID NO: 934586 - DNA, 15 bp, Homo sapiens
taatgatgaagccta

SEQ ID NO: 934587 - DNA, 15 bp, Homo sapiens
aatgatgaagcctaa

SEQ ID NO: 934588 - DNA, 15 bp, Homo sapiens
atgatgaagcctaat

SEQ ID NO: 934589 - DNA, 15 bp, Homo sapiens
tgatgaagcctaatg

SEQ ID NO: 934590 - DNA, 15 bp, Homo sapiens
gatgaagcctaatgc

SEQ ID NO: 934591 - DNA, 15 bp, Homo sapiens
atgaagcctaatgca

SEQ ID NO: 934592 - DNA, 15 bp, Homo sapiens
tgaagcctaatgcaa

SEQ ID NO: 934593 - DNA, 15 bp, Homo sapiens
gaagcctaatgcaac

SEQ ID NO: 934594 - DNA, 15 bp, Homo sapiens
aagcctaatgcaacc

SEQ ID NO: 934595 - DNA, 15 bp, Homo sapiens
agcctaatgcaacct

SEQ ID NO: 934596 - DNA, 15 bp, Homo sapiens
gcctaatgcaacctc

SEQ ID NO: 934597 - DNA, 15 bp, Homo sapiens
cctaatgcaacctca

SEQ ID NO: 934598 - DNA, 15 bp, Homo sapiens
ctaatgcaacctcag

SEQ ID NO: 934599 - DNA, 15 bp, Homo sapiens
taatgcaacctcagt

SEQ ID NO: 934600 - DNA, 15 bp, Homo sapiens
aatgcaacctcagta

SEQ ID NO: 934601 - DNA, 15 bp, Homo sapiens
atgcaacctcagtat

SEQ ID NO: 934602 - DNA, 15 bp, Homo sapiens
tgcaacctcagtata

SEQ ID NO: 934603 - DNA, 15 bp, Homo sapiens
gcaacctcagtatag

SEQ ID NO: 934604 - DNA, 15 bp, Homo sapiens
caacctcagtatagg

SEQ ID NO: 934605 - DNA, 15 bp, Homo sapiens
aacctcagtatagga

SEQ ID NO: 934606 - DNA, 15 bp, Homo sapiens
acctcagtataggat

SEQ ID NO: 934607 - DNA, 15 bp, Homo sapiens
cctcagtataggatg

SEQ ID NO: 934608 - DNA, 15 bp, Homo sapiens
ctcagtataggatgc

SEQ ID NO: 934609 - DNA, 15 bp, Homo sapiens
tcagtataggatgct

SEQ ID NO: 934610 - DNA, 15 bp, Homo sapiens
cagtataggatgctg

SEQ ID NO: 934611 - DNA, 15 bp, Homo sapiens
agtataggatgctgc

SEQ ID NO: 934612 - DNA, 15 bp, Homo sapiens
gtataggatgctgcc

SEQ ID NO: 934613 - DNA, 15 bp, Homo sapiens
tataggatgctgccc

SEQ ID NO: 934614 - DNA, 15 bp, Homo sapiens
ataggatgctgccca

SEQ ID NO: 934615 - DNA, 15 bp, Homo sapiens
taggatgctgcccaa

SEQ ID NO: 934616 - DNA, 15 bp, Homo sapiens
aggatgctgcccaag

SEQ ID NO: 934617 - DNA, 15 bp, Homo sapiens
ggatgctgcccaagg

SEQ ID NO: 934618 - DNA, 15 bp, Homo sapiens
gatgctgcccaaggg

SEQ ID NO: 934619 - DNA, 15 bp, Homo sapiens
atgctgcccaagggc

SEQ ID NO: 934620 - DNA, 15 bp, Homo sapiens
tgctgcccaagggcc

SEQ ID NO: 934621 - DNA, 15 bp, Homo sapiens
gctgcccaagggcca

SEQ ID NO: 934622 - DNA, 15 bp, Homo sapiens
ctgcccaagggccag

SEQ ID NO: 934623 - DNA, 15 bp, Homo sapiens
tgcccaagggccagt

SEQ ID NO: 934624 - DNA, 15 bp, Homo sapiens
gcccaagggccagtc

SEQ ID NO: 934625 - DNA, 15 bp, Homo sapiens
cccaagggccagtct

SEQ ID NO: 934626 - DNA, 15 bp, Homo sapiens
ccaagggccagtctg

SEQ ID NO: 934627 - DNA, 15 bp, Homo sapiens
caagggccagtctgc

SEQ ID NO: 934628 - DNA, 15 bp, Homo sapiens
aagggccagtctgcc

SEQ ID NO: 934629 - DNA, 15 bp, Homo sapiens
agggccagtctgcca

SEQ ID NO: 934630 - DNA, 15 bp, Homo sapiens
gggccagtctgccag

SEQ ID NO: 934631 - DNA, 15 bp, Homo sapiens
ggccagtctgccagg

SEQ ID NO: 934632 - DNA, 15 bp, Homo sapiens
gccagtctgccaggt

SEQ ID NO: 934633 - DNA, 15 bp, Homo sapiens
ccagtctgccaggtc

SEQ ID NO: 934634 - DNA, 15 bp, Homo sapiens
cagtctgccaggtcc

SEQ ID NO: 934635 - DNA, 15 bp, Homo sapiens
agtctgccaggtcca

SEQ ID NO: 934636 - DNA, 15 bp, Homo sapiens
gtctgccaggtccaa

SEQ ID NO: 934637 - DNA, 15 bp, Homo sapiens
tctgccaggtccaaa

SEQ ID NO: 934638 - DNA, 15 bp, Homo sapiens
ctgccaggtccaaac

SEQ ID NO: 934639 - DNA, 15 bp, Homo sapiens
tgccaggtccaaact

SEQ ID NO: 934640 - DNA, 15 bp, Homo sapiens
gccaggtccaaactc

SEQ ID NO: 934641 - DNA, 15 bp, Homo sapiens
ccaggtccaaactcc

SEQ ID NO: 934642 - DNA, 15 bp, Homo sapiens
caggtccaaactccc

SEQ ID NO: 934643 - DNA, 15 bp, Homo sapiens
aggtccaaactcccc

SEQ ID NO: 934644 - DNA, 15 bp, Homo sapiens
ggtccaaactcccct

SEQ ID NO: 934645 - DNA, 15 bp, Homo sapiens
gtccaaactcccctg

SEQ ID NO: 934646 - DNA, 15 bp, Homo sapiens
tccaaactcccctga

SEQ ID NO: 934647 - DNA, 15 bp, Homo sapiens
ccaaactcccctgag

SEQ ID NO: 934648 - DNA, 15 bp, Homo sapiens
caaactcccctgagt

SEQ ID NO: 934649 - DNA, 15 bp, Homo sapiens
aaactcccctgagtt

SEQ ID NO: 934650 - DNA, 15 bp, Homo sapiens
aactcccctgagttt

SEQ ID NO: 934651 - DNA, 15 bp, Homo sapiens
actcccctgagtttg

SEQ ID NO: 934652 - DNA, 15 bp, Homo sapiens
ctcccctgagtttgc

SEQ ID NO: 934653 - DNA, 15 bp, Homo sapiens
tcccctgagtttgct

SEQ ID NO: 934654 - DNA, 15 bp, Homo sapiens
cccctgagtttgctt

SEQ ID NO: 934655 - DNA, 15 bp, Homo sapiens
ccctgagtttgcttc

SEQ ID NO: 934656 - DNA, 15 bp, Homo sapiens
cctgagtttgcttca

SEQ ID NO: 934657 - DNA, 15 bp, Homo sapiens
ctgagtttgcttcaa

SEQ ID NO: 934658 - DNA, 15 bp, Homo sapiens
tgagtttgcttcaac

SEQ ID NO: 934659 - DNA, 15 bp, Homo sapiens
gagtttgcttcaact

SEQ ID NO: 934660 - DNA, 15 bp, Homo sapiens
agtttgcttcaactc

SEQ ID NO: 934661 - DNA, 15 bp, Homo sapiens
gtttgcttcaactct

SEQ ID NO: 934662 - DNA, 15 bp, Homo sapiens
tttgcttcaactctc

SEQ ID NO: 934663 - DNA, 15 bp, Homo sapiens
ttgcttcaactctcc

SEQ ID NO: 934664 - DNA, 15 bp, Homo sapiens
tgcttcaactctccc

SEQ ID NO: 934665 - DNA, 15 bp, Homo sapiens
gcttcaactctccca

SEQ ID NO: 934666 - DNA, 15 bp, Homo sapiens
cttcaactctcccag

SEQ ID NO: 934667 - DNA, 15 bp, Homo sapiens
ttcaactctcccaga

SEQ ID NO: 934668 - DNA, 15 bp, Homo sapiens
tcaactctcccagag

SEQ ID NO: 934669 - DNA, 15 bp, Homo sapiens
caactctcccagaga

SEQ ID NO: 934670 - DNA, 15 bp, Homo sapiens
aactctcccagagag

SEQ ID NO: 934671 - DNA, 15 bp, Homo sapiens
actctcccagagaga

SEQ ID NO: 934672 - DNA, 15 bp, Homo sapiens
ctctcccagagagaa

SEQ ID NO: 934673 - DNA, 15 bp, Homo sapiens
tctcccagagagaat

SEQ ID NO: 934674 - DNA, 15 bp, Homo sapiens
ctcccagagagaatt

SEQ ID NO: 934675 - DNA, 15 bp, Homo sapiens
tcccagagagaattg

SEQ ID NO: 934676 - DNA, 15 bp, Homo sapiens
cccagagagaattgg

SEQ ID NO: 934677 - DNA, 15 bp, Homo sapiens
ccagagagaattgga

SEQ ID NO: 934678 - DNA, 15 bp, Homo sapiens
cagagagaattggac

SEQ ID NO: 934679 - DNA, 15 bp, Homo sapiens
agagagaattggaca

SEQ ID NO: 934680 - DNA, 15 bp, Homo sapiens
gagagaattggacaa

SEQ ID NO: 934681 - DNA, 15 bp, Homo sapiens
agagaattggacaat

SEQ ID NO: 934682 - DNA, 15 bp, Homo sapiens
gagaattggacaatt

SEQ ID NO: 934683 - DNA, 15 bp, Homo sapiens
agaattggacaattg

SEQ ID NO: 934684 - DNA, 15 bp, Homo sapiens
gaattggacaattga

SEQ ID NO: 934685 - DNA, 15 bp, Homo sapiens
aattggacaattgaa

SEQ ID NO: 934686 - DNA, 15 bp, Homo sapiens
attggacaattgaag

SEQ ID NO: 934687 - DNA, 15 bp, Homo sapiens
ttggacaattgaagt

SEQ ID NO: 934688 - DNA, 15 bp, Homo sapiens
tggacaattgaagtt

SEQ ID NO: 934689 - DNA, 15 bp, Homo sapiens
ggacaattgaagtta

SEQ ID NO: 934690 - DNA, 15 bp, Homo sapiens
gacaattgaagttaa

SEQ ID NO: 934691 - DNA, 15 bp, Homo sapiens
acaattgaagttaaa

SEQ ID NO: 934692 - DNA, 15 bp, Homo sapiens
caattgaagttaaac

SEQ ID NO: 934693 - DNA, 15 bp, Homo sapiens
aattgaagttaaaca

SEQ ID NO: 934694 - DNA, 15 bp, Homo sapiens
attgaagttaaacac

SEQ ID NO: 934695 - DNA, 15 bp, Homo sapiens
ttgaagttaaacacc

SEQ ID NO: 934696 - DNA, 15 bp, Homo sapiens
tgaagttaaacaccc

SEQ ID NO: 934697 - DNA, 15 bp, Homo sapiens
gaagttaaacaccct

SEQ ID NO: 934698 - DNA, 15 bp, Homo sapiens
aagttaaacaccctt

SEQ ID NO: 934699 - DNA, 15 bp, Homo sapiens
agttaaacacccttt

SEQ ID NO: 934700 - DNA, 15 bp, Homo sapiens
gttaaacaccctttc

SEQ ID NO: 934701 - DNA, 15 bp, Homo sapiens
ttaaacaccctttct

SEQ ID NO: 934702 - DNA, 15 bp, Homo sapiens
taaacaccctttctg

SEQ ID NO: 934703 - DNA, 15 bp, Homo sapiens
aaacaccctttctgt

SEQ ID NO: 934704 - DNA, 15 bp, Homo sapiens
aacaccctttctgtt

SEQ ID NO: 934705 - DNA, 15 bp, Homo sapiens
acaccctttctgttc

SEQ ID NO: 934706 - DNA, 15 bp, Homo sapiens
caccctttctgttca

SEQ ID NO: 934707 - DNA, 15 bp, Homo sapiens
accctttctgttcac

SEQ ID NO: 934708 - DNA, 15 bp, Homo sapiens
ccctttctgttcaca

SEQ ID NO: 934709 - DNA, 15 bp, Homo sapiens
cctttctgttcacat

SEQ ID NO: 934710 - DNA, 15 bp, Homo sapiens
ctttctgttcacatt

SEQ ID NO: 934711 - DNA, 15 bp, Homo sapiens
tttctgttcacatta

SEQ ID NO: 934712 - DNA, 15 bp, Homo sapiens
ttctgttcacattaa

SEQ ID NO: 934713 - DNA, 15 bp, Homo sapiens
tctgttcacattaag

SEQ ID NO: 934714 - DNA, 15 bp, Homo sapiens
ctgttcacattaagt

SEQ ID NO: 934715 - DNA, 15 bp, Homo sapiens
tgttcacattaagtg

SEQ ID NO: 934716 - DNA, 15 bp, Homo sapiens
gttcacattaagtgt

SEQ ID NO: 934717 - DNA, 15 bp, Homo sapiens
ttcacattaagtgtg

SEQ ID NO: 934718 - DNA, 15 bp, Homo sapiens
tcacattaagtgtga

SEQ ID NO: 934719 - DNA, 15 bp, Homo sapiens
cacattaagtgtgat

SEQ ID NO: 934720 - DNA, 15 bp, Homo sapiens
acattaagtgtgata

SEQ ID NO: 934721 - DNA, 15 bp, Homo sapiens
cattaagtgtgataa

SEQ ID NO: 934722 - DNA, 15 bp, Homo sapiens
attaagtgtgataac

SEQ ID NO: 934723 - DNA, 15 bp, Homo sapiens
ttaagtgtgataact

SEQ ID NO: 934724 - DNA, 15 bp, Homo sapiens
taagtgtgataactg

SEQ ID NO: 934725 - DNA, 15 bp, Homo sapiens
aagtgtgataactga

SEQ ID NO: 934726 - DNA, 15 bp, Homo sapiens
agtgtgataactgac

SEQ ID NO: 934727 - DNA, 15 bp, Homo sapiens
gtgtgataactgact

SEQ ID NO: 934728 - DNA, 15 bp, Homo sapiens
tgtgataactgactc

SEQ ID NO: 934729 - DNA, 15 bp, Homo sapiens
gtgataactgactcc

SEQ ID NO: 934730 - DNA, 15 bp, Homo sapiens
tgataactgactcct

SEQ ID NO: 934731 - DNA, 15 bp, Homo sapiens
gataactgactcctg

SEQ ID NO: 934732 - DNA, 15 bp, Homo sapiens
ataactgactcctgg

SEQ ID NO: 934733 - DNA, 15 bp, Homo sapiens
taactgactcctgga

SEQ ID NO: 934734 - DNA, 15 bp, Homo sapiens
aactgactcctggaa

SEQ ID NO: 934735 - DNA, 15 bp, Homo sapiens
actgactcctggaat

SEQ ID NO: 934736 - DNA, 15 bp, Homo sapiens
ctgactcctggaatt

SEQ ID NO: 934737 - DNA, 15 bp, Homo sapiens
tgactcctggaattg

SEQ ID NO: 934738 - DNA, 15 bp, Homo sapiens
gactcctggaattga

SEQ ID NO: 934739 - DNA, 15 bp, Homo sapiens
actcctggaattgaa

SEQ ID NO: 934740 - DNA, 15 bp, Homo sapiens
ctcctggaattgaaa

SEQ ID NO: 934741 - DNA, 15 bp, Homo sapiens
tcctggaattgaaat

SEQ ID NO: 934742 - DNA, 15 bp, Homo sapiens
cctggaattgaaata

SEQ ID NO: 934743 - DNA, 15 bp, Homo sapiens
ctggaattgaaatag

SEQ ID NO: 934744 - DNA, 15 bp, Homo sapiens
tggaattgaaatagc

SEQ ID NO: 934745 - DNA, 15 bp, Homo sapiens
ggaattgaaatagct

SEQ ID NO: 934746 - DNA, 15 bp, Homo sapiens
gaattgaaatagctt

SEQ ID NO: 934747 - DNA, 15 bp, Homo sapiens
aattgaaatagcttc

SEQ ID NO: 934748 - DNA, 15 bp, Homo sapiens
attgaaatagcttca

SEQ ID NO: 934749 - DNA, 15 bp, Homo sapiens
ttgaaatagcttcag

SEQ ID NO: 934750 - DNA, 15 bp, Homo sapiens
tgaaatagcttcagg

SEQ ID NO: 934751 - DNA, 15 bp, Homo sapiens
gaaatagcttcaggg

SEQ ID NO: 934752 - DNA, 15 bp, Homo sapiens
aaatagcttcaggga

SEQ ID NO: 934753 - DNA, 15 bp, Homo sapiens
aatagcttcagggag

SEQ ID NO: 934754 - DNA, 15 bp, Homo sapiens
atagcttcagggagg

SEQ ID NO: 934755 - DNA, 15 bp, Homo sapiens
tagcttcagggaggc

SEQ ID NO: 934756 - DNA, 15 bp, Homo sapiens
agcttcagggaggca

SEQ ID NO: 934757 - DNA, 15 bp, Homo sapiens
gcttcagggaggcat

SEQ ID NO: 934758 - DNA, 15 bp, Homo sapiens
cttcagggaggcatc

SEQ ID NO: 934759 - DNA, 15 bp, Homo sapiens
ttcagggaggcatct

SEQ ID NO: 934760 - DNA, 15 bp, Homo sapiens
tcagggaggcatctt

SEQ ID NO: 934761 - DNA, 15 bp, Homo sapiens
cagggaggcatcttc

SEQ ID NO: 934762 - DNA, 15 bp, Homo sapiens
agggaggcatcttct

SEQ ID NO: 934763 - DNA, 15 bp, Homo sapiens
gggaggcatcttctc

SEQ ID NO: 934764 - DNA, 15 bp, Homo sapiens
ggaggcatcttctca

SEQ ID NO: 934765 - DNA, 15 bp, Homo sapiens
gaggcatcttctcaa

SEQ ID NO: 934766 - DNA, 15 bp, Homo sapiens
aggcatcttctcaag

SEQ ID NO: 934767 - DNA, 15 bp, Homo sapiens
ggcatcttctcaaga

SEQ ID NO: 934768 - DNA, 15 bp, Homo sapiens
gcatcttctcaagag

SEQ ID NO: 934769 - DNA, 15 bp, Homo sapiens
catcttctcaagaga

SEQ ID NO: 934770 - DNA, 15 bp, Homo sapiens
atcttctcaagagat

SEQ ID NO: 934771 - DNA, 15 bp, Homo sapiens
tcttctcaagagata

SEQ ID NO: 934772 - DNA, 15 bp, Homo sapiens
cttctcaagagatac

SEQ ID NO: 934773 - DNA, 15 bp, Homo sapiens
ttctcaagagataca

SEQ ID NO: 934774 - DNA, 15 bp, Homo sapiens
tctcaagagatacaa

SEQ ID NO: 934775 - DNA, 15 bp, Homo sapiens
ctcaagagatacaat

SEQ ID NO: 934776 - DNA, 15 bp, Homo sapiens
tcaagagatacaata

SEQ ID NO: 934777 - DNA, 15 bp, Homo sapiens
caagagatacaataa

SEQ ID NO: 934778 - DNA, 15 bp, Homo sapiens
aagagatacaataat

SEQ ID NO: 934779 - DNA, 15 bp, Homo sapiens
agagatacaataatt

SEQ ID NO: 934780 - DNA, 15 bp, Homo sapiens
gagatacaataattc

SEQ ID NO: 934781 - DNA, 15 bp, Homo sapiens
agatacaataattcc

SEQ ID NO: 934782 - DNA, 15 bp, Homo sapiens
gatacaataattcct

SEQ ID NO: 934783 - DNA, 15 bp, Homo sapiens
atacaataattcctt

SEQ ID NO: 934784 - DNA, 15 bp, Homo sapiens
tacaataattcctta

SEQ ID NO: 934785 - DNA, 15 bp, Homo sapiens
acaataattccttat

SEQ ID NO: 934786 - DNA, 15 bp, Homo sapiens
caataattccttatg

SEQ ID NO: 934787 - DNA, 15 bp, Homo sapiens
aataattccttatgt

SEQ ID NO: 934788 - DNA, 15 bp, Homo sapiens
ataattccttatgta

SEQ ID NO: 934789 - DNA, 15 bp, Homo sapiens
taattccttatgtag

SEQ ID NO: 934790 - DNA, 15 bp, Homo sapiens
aattccttatgtagc

SEQ ID NO: 934791 - DNA, 15 bp, Homo sapiens
attccttatgtagcc

SEQ ID NO: 934792 - DNA, 15 bp, Homo sapiens
ttccttatgtagccc

SEQ ID NO: 934793 - DNA, 15 bp, Homo sapiens
tccttatgtagccct

SEQ ID NO: 934794 - DNA, 15 bp, Homo sapiens
ccttatgtagccctt

SEQ ID NO: 934795 - DNA, 15 bp, Homo sapiens
cttatgtagcccttt

SEQ ID NO: 934796 - DNA, 15 bp, Homo sapiens
ttatgtagcccttta

SEQ ID NO: 934797 - DNA, 15 bp, Homo sapiens
tatgtagccctttag

SEQ ID NO: 934798 - DNA, 15 bp, Homo sapiens
atgtagccctttaga

SEQ ID NO: 934799 - DNA, 15 bp, Homo sapiens
tgtagccctttagag

SEQ ID NO: 934800 - DNA, 15 bp, Homo sapiens
gtagccctttagagc

SEQ ID NO: 934801 - DNA, 15 bp, Homo sapiens
tagccctttagagct

SEQ ID NO: 934802 - DNA, 15 bp, Homo sapiens
agccctttagagctt

SEQ ID NO: 934803 - DNA, 15 bp, Homo sapiens
gccctttagagctta

SEQ ID NO: 934804 - DNA, 15 bp, Homo sapiens
ccctttagagcttac

SEQ ID NO: 934805 - DNA, 15 bp, Homo sapiens
cctttagagcttaca

SEQ ID NO: 934806 - DNA, 15 bp, Homo sapiens
ctttagagcttacaa

SEQ ID NO: 934807 - DNA, 15 bp, Homo sapiens
tttagagcttacaaa

SEQ ID NO: 934808 - DNA, 15 bp, Homo sapiens
ttagagcttacaaag

SEQ ID NO: 934809 - DNA, 15 bp, Homo sapiens
tagagcttacaaagt

SEQ ID NO: 934810 - DNA, 15 bp, Homo sapiens
agagcttacaaagtc

SEQ ID NO: 934811 - DNA, 15 bp, Homo sapiens
gagcttacaaagtca

SEQ ID NO: 934812 - DNA, 15 bp, Homo sapiens
agcttacaaagtcaa

SEQ ID NO: 934813 - DNA, 15 bp, Homo sapiens
gcttacaaagtcaac

SEQ ID NO: 934814 - DNA, 15 bp, Homo sapiens
cttacaaagtcaaca

SEQ ID NO: 934815 - DNA, 15 bp, Homo sapiens
ttacaaagtcaacat

SEQ ID NO: 934816 - DNA, 15 bp, Homo sapiens
tacaaagtcaacatt

SEQ ID NO: 934817 - DNA, 15 bp, Homo sapiens
acaaagtcaacatta

SEQ ID NO: 934818 - DNA, 15 bp, Homo sapiens
caaagtcaacattat

SEQ ID NO: 934819 - DNA, 15 bp, Homo sapiens
aaagtcaacattatc

SEQ ID NO: 934820 - DNA, 15 bp, Homo sapiens
aagtcaacattatca

SEQ ID NO: 934821 - DNA, 15 bp, Homo sapiens
agtcaacattatcaa

SEQ ID NO: 934822 - DNA, 15 bp, Homo sapiens
gtcaacattatcaac

SEQ ID NO: 934823 - DNA, 15 bp, Homo sapiens
tcaacattatcaact

SEQ ID NO: 934824 - DNA, 15 bp, Homo sapiens
caacattatcaactt

SEQ ID NO: 934825 - DNA, 15 bp, Homo sapiens
aacattatcaactta

SEQ ID NO: 934826 - DNA, 15 bp, Homo sapiens
acattatcaacttat

SEQ ID NO: 934827 - DNA, 15 bp, Homo sapiens
cattatcaacttatt

SEQ ID NO: 934828 - DNA, 15 bp, Homo sapiens
attatcaacttattc

SEQ ID NO: 934829 - DNA, 15 bp, Homo sapiens
ttatcaacttattca

SEQ ID NO: 934830 - DNA, 15 bp, Homo sapiens
tatcaacttattcag

SEQ ID NO: 934831 - DNA, 15 bp, Homo sapiens
atcaacttattcagc

SEQ ID NO: 934832 - DNA, 15 bp, Homo sapiens
tcaacttattcagca

SEQ ID NO: 934833 - DNA, 15 bp, Homo sapiens
caacttattcagcaa

SEQ ID NO: 934834 - DNA, 15 bp, Homo sapiens
aacttattcagcaag

SEQ ID NO: 934835 - DNA, 15 bp, Homo sapiens
acttattcagcaagc

SEQ ID NO: 934836 - DNA, 15 bp, Homo sapiens
cttattcagcaagca

SEQ ID NO: 934837 - DNA, 15 bp, Homo sapiens
ttattcagcaagcat

SEQ ID NO: 934838 - DNA, 15 bp, Homo sapiens
tattcagcaagcatt

SEQ ID NO: 934839 - DNA, 15 bp, Homo sapiens
attcagcaagcattt

SEQ ID NO: 934840 - DNA, 15 bp, Homo sapiens
ttcagcaagcattta

SEQ ID NO: 934841 - DNA, 15 bp, Homo sapiens
tcagcaagcatttat

SEQ ID NO: 934842 - DNA, 15 bp, Homo sapiens
cagcaagcatttatt

SEQ ID NO: 934843 - DNA, 15 bp, Homo sapiens
agcaagcatttattg

SEQ ID NO: 934844 - DNA, 15 bp, Homo sapiens
gcaagcatttattga

SEQ ID NO: 934845 - DNA, 15 bp, Homo sapiens
caagcatttattgag

SEQ ID NO: 934846 - DNA, 15 bp, Homo sapiens
aagcatttattgagt

SEQ ID NO: 934847 - DNA, 15 bp, Homo sapiens
agcatttattgagta

SEQ ID NO: 934848 - DNA, 15 bp, Homo sapiens
gcatttattgagtac

SEQ ID NO: 934849 - DNA, 15 bp, Homo sapiens
catttattgagtacc

SEQ ID NO: 934850 - DNA, 15 bp, Homo sapiens
atttattgagtacct

SEQ ID NO: 934851 - DNA, 15 bp, Homo sapiens
tttattgagtacctg

SEQ ID NO: 934852 - DNA, 15 bp, Homo sapiens
ttattgagtacctgc

SEQ ID NO: 934853 - DNA, 15 bp, Homo sapiens
tattgagtacctgct

SEQ ID NO: 934854 - DNA, 15 bp, Homo sapiens
attgagtacctgctg

SEQ ID NO: 934855 - DNA, 15 bp, Homo sapiens
ttgagtacctgctgt

SEQ ID NO: 934856 - DNA, 15 bp, Homo sapiens
tgagtacctgctgta

SEQ ID NO: 934857 - DNA, 15 bp, Homo sapiens
gagtacctgctgtat

SEQ ID NO: 934858 - DNA, 15 bp, Homo sapiens
agtacctgctgtatg

SEQ ID NO: 934859 - DNA, 15 bp, Homo sapiens
gtacctgctgtatgc

SEQ ID NO: 934860 - DNA, 15 bp, Homo sapiens
tacctgctgtatgcc

SEQ ID NO: 934861 - DNA, 15 bp, Homo sapiens
acctgctgtatgcca

SEQ ID NO: 934862 - DNA, 15 bp, Homo sapiens
cctgctgtatgccag

SEQ ID NO: 934863 - DNA, 15 bp, Homo sapiens
ctgctgtatgccagg

SEQ ID NO: 934864 - DNA, 15 bp, Homo sapiens
tgctgtatgccaggc

SEQ ID NO: 934865 - DNA, 15 bp, Homo sapiens
gctgtatgccaggca

SEQ ID NO: 934866 - DNA, 15 bp, Homo sapiens
ctgtatgccaggcac

SEQ ID NO: 934867 - DNA, 15 bp, Homo sapiens
tgtatgccaggcact

SEQ ID NO: 934868 - DNA, 15 bp, Homo sapiens
gtatgccaggcactc

SEQ ID NO: 934869 - DNA, 15 bp, Homo sapiens
tatgccaggcactct

SEQ ID NO: 934870 - DNA, 15 bp, Homo sapiens
atgccaggcactcta

SEQ ID NO: 934871 - DNA, 15 bp, Homo sapiens
tgccaggcactctac

SEQ ID NO: 934872 - DNA, 15 bp, Homo sapiens
gccaggcactctact

SEQ ID NO: 934873 - DNA, 15 bp, Homo sapiens
ccaggcactctacta

SEQ ID NO: 934874 - DNA, 15 bp, Homo sapiens
caggcactctactag

SEQ ID NO: 934875 - DNA, 15 bp, Homo sapiens
aggcactctactaga

SEQ ID NO: 934876 - DNA, 15 bp, Homo sapiens
ggcactctactagag

SEQ ID NO: 934877 - DNA, 15 bp, Homo sapiens
gcactctactagagt

SEQ ID NO: 934878 - DNA, 15 bp, Homo sapiens
cactctactagagta

SEQ ID NO: 934879 - DNA, 15 bp, Homo sapiens
actctactagagtag

SEQ ID NO: 934880 - DNA, 15 bp, Homo sapiens
ctctactagagtagt

SEQ ID NO: 934881 - DNA, 15 bp, Homo sapiens
tctactagagtagtc

SEQ ID NO: 934882 - DNA, 15 bp, Homo sapiens
ctactagagtagtct

SEQ ID NO: 934883 - DNA, 15 bp, Homo sapiens
tactagagtagtcta

SEQ ID NO: 934884 - DNA, 15 bp, Homo sapiens
actagagtagtctaa

SEQ ID NO: 934885 - DNA, 15 bp, Homo sapiens
ctagagtagtctaat

SEQ ID NO: 934886 - DNA, 15 bp, Homo sapiens
tagagtagtctaata

SEQ ID NO: 934887 - DNA, 15 bp, Homo sapiens
agagtagtctaataa

SEQ ID NO: 934888 - DNA, 15 bp, Homo sapiens
gagtagtctaataag

SEQ ID NO: 934889 - DNA, 15 bp, Homo sapiens
agtagtctaataagt

SEQ ID NO: 934890 - DNA, 15 bp, Homo sapiens
gtagtctaataagtg

SEQ ID NO: 934891 - DNA, 15 bp, Homo sapiens
tagtctaataagtga

SEQ ID NO: 934892 - DNA, 15 bp, Homo sapiens
agtctaataagtgat

SEQ ID NO: 934893 - DNA, 15 bp, Homo sapiens
gtctaataagtgata

SEQ ID NO: 934894 - DNA, 15 bp, Homo sapiens
tctaataagtgatac

SEQ ID NO: 934895 - DNA, 15 bp, Homo sapiens
ctaataagtgataca

SEQ ID NO: 934896 - DNA, 15 bp, Homo sapiens
taataagtgatacaa

SEQ ID NO: 934897 - DNA, 15 bp, Homo sapiens
aataagtgatacaaa

SEQ ID NO: 934898 - DNA, 15 bp, Homo sapiens
ataagtgatacaaag

SEQ ID NO: 934899 - DNA, 15 bp, Homo sapiens
taagtgatacaaaga

SEQ ID NO: 934900 - DNA, 15 bp, Homo sapiens
aagtgatacaaagat

SEQ ID NO: 934901 - DNA, 15 bp, Homo sapiens
agtgatacaaagatg

SEQ ID NO: 934902 - DNA, 15 bp, Homo sapiens
gtgatacaaagatga

SEQ ID NO: 934903 - DNA, 15 bp, Homo sapiens
tgatacaaagatgaa

SEQ ID NO: 934904 - DNA, 15 bp, Homo sapiens
gatacaaagatgaat

SEQ ID NO: 934905 - DNA, 15 bp, Homo sapiens
atacaaagatgaata

SEQ ID NO: 934906 - DNA, 15 bp, Homo sapiens
tacaaagatgaataa

SEQ ID NO: 934907 - DNA, 15 bp, Homo sapiens
acaaagatgaataag

SEQ ID NO: 934908 - DNA, 15 bp, Homo sapiens
caaagatgaataaga

SEQ ID NO: 934909 - DNA, 15 bp, Homo sapiens
aaagatgaataagac

SEQ ID NO: 934910 - DNA, 15 bp, Homo sapiens
aagatgaataagaca

SEQ ID NO: 934911 - DNA, 15 bp, Homo sapiens
agatgaataagacag

SEQ ID NO: 934912 - DNA, 15 bp, Homo sapiens
gatgaataagacagc

SEQ ID NO: 934913 - DNA, 15 bp, Homo sapiens
atgaataagacagcc

SEQ ID NO: 934914 - DNA, 15 bp, Homo sapiens
tgaataagacagcct

SEQ ID NO: 934915 - DNA, 15 bp, Homo sapiens
gaataagacagcctc

SEQ ID NO: 934916 - DNA, 15 bp, Homo sapiens
aataagacagcctcg

SEQ ID NO: 934917 - DNA, 15 bp, Homo sapiens
ataagacagcctcgg

SEQ ID NO: 934918 - DNA, 15 bp, Homo sapiens
taagacagcctcggg

SEQ ID NO: 934919 - DNA, 15 bp, Homo sapiens
aagacagcctcggga

SEQ ID NO: 934920 - DNA, 15 bp, Homo sapiens
agacagcctcgggat

SEQ ID NO: 934921 - DNA, 15 bp, Homo sapiens
gacagcctcgggata

SEQ ID NO: 934922 - DNA, 15 bp, Homo sapiens
acagcctcgggataa

SEQ ID NO: 934923 - DNA, 15 bp, Homo sapiens
cagcctcgggataac

SEQ ID NO: 934924 - DNA, 15 bp, Homo sapiens
agcctcgggataacc

SEQ ID NO: 934925 - DNA, 15 bp, Homo sapiens
gcctcgggataacct

SEQ ID NO: 934926 - DNA, 15 bp, Homo sapiens
cctcgggataacctg

SEQ ID NO: 934927 - DNA, 15 bp, Homo sapiens
ctcgggataacctgg

SEQ ID NO: 934928 - DNA, 15 bp, Homo sapiens
tcgggataacctggg

SEQ ID NO: 934929 - DNA, 15 bp, Homo sapiens
cgggataacctgggg

SEQ ID NO: 934930 - DNA, 15 bp, Homo sapiens
gggataacctgggga

SEQ ID NO: 934931 - DNA, 15 bp, Homo sapiens
ggataacctggggag

SEQ ID NO: 934932 - DNA, 15 bp, Homo sapiens
gataacctggggagt

SEQ ID NO: 934933 - DNA, 15 bp, Homo sapiens
ataacctggggagta

SEQ ID NO: 934934 - DNA, 15 bp, Homo sapiens
taacctggggagtag

SEQ ID NO: 934935 - DNA, 15 bp, Homo sapiens
aacctggggagtagg

SEQ ID NO: 934936 - DNA, 15 bp, Homo sapiens
acctggggagtaggt

SEQ ID NO: 934937 - DNA, 15 bp, Homo sapiens
cctggggagtaggta

SEQ ID NO: 934938 - DNA, 15 bp, Homo sapiens
ctggggagtaggtag

SEQ ID NO: 934939 - DNA, 15 bp, Homo sapiens
tggggagtaggtaga

SEQ ID NO: 934940 - DNA, 15 bp, Homo sapiens
ggggagtaggtagac

SEQ ID NO: 934941 - DNA, 15 bp, Homo sapiens
gggagtaggtagaca

SEQ ID NO: 934942 - DNA, 15 bp, Homo sapiens
ggagtaggtagacaa

SEQ ID NO: 934943 - DNA, 15 bp, Homo sapiens
gagtaggtagacaaa

SEQ ID NO: 934944 - DNA, 15 bp, Homo sapiens
agtaggtagacaaag

SEQ ID NO: 934945 - DNA, 15 bp, Homo sapiens
gtaggtagacaaagc

SEQ ID NO: 934946 - DNA, 15 bp, Homo sapiens
taggtagacaaagca

SEQ ID NO: 934947 - DNA, 15 bp, Homo sapiens
aggtagacaaagcag

SEQ ID NO: 934948 - DNA, 15 bp, Homo sapiens
ggtagacaaagcaga

SEQ ID NO: 934949 - DNA, 15 bp, Homo sapiens
gtagacaaagcagat

SEQ ID NO: 934950 - DNA, 15 bp, Homo sapiens
tagacaaagcagata

SEQ ID NO: 934951 - DNA, 15 bp, Homo sapiens
agacaaagcagataa

SEQ ID NO: 934952 - DNA, 15 bp, Homo sapiens
gacaaagcagataag

SEQ ID NO: 934953 - DNA, 15 bp, Homo sapiens
acaaagcagataagt

SEQ ID NO: 934954 - DNA, 15 bp, Homo sapiens
caaagcagataagtt

SEQ ID NO: 934955 - DNA, 15 bp, Homo sapiens
aaagcagataagtta

SEQ ID NO: 934956 - DNA, 15 bp, Homo sapiens
aagcagataagttat

SEQ ID NO: 934957 - DNA, 15 bp, Homo sapiens
agcagataagttatg

SEQ ID NO: 934958 - DNA, 15 bp, Homo sapiens
gcagataagttatgg

SEQ ID NO: 934959 - DNA, 15 bp, Homo sapiens
cagataagttatggg

SEQ ID NO: 934960 - DNA, 15 bp, Homo sapiens
agataagttatggga

SEQ ID NO: 934961 - DNA, 15 bp, Homo sapiens
gataagttatgggaa

SEQ ID NO: 934962 - DNA, 15 bp, Homo sapiens
ataagttatgggaac

SEQ ID NO: 934963 - DNA, 15 bp, Homo sapiens
taagttatgggaact

SEQ ID NO: 934964 - DNA, 15 bp, Homo sapiens
aagttatgggaactt

SEQ ID NO: 934965 - DNA, 15 bp, Homo sapiens
agttatgggaactta

SEQ ID NO: 934966 - DNA, 15 bp, Homo sapiens
gttatgggaacttag

SEQ ID NO: 934967 - DNA, 15 bp, Homo sapiens
ttatgggaacttagg

SEQ ID NO: 934968 - DNA, 15 bp, Homo sapiens
tatgggaacttaggc

SEQ ID NO: 934969 - DNA, 15 bp, Homo sapiens
atgggaacttaggca

SEQ ID NO: 934970 - DNA, 15 bp, Homo sapiens
tgggaacttaggcag

SEQ ID NO: 934971 - DNA, 15 bp, Homo sapiens
gggaacttaggcagg

SEQ ID NO: 934972 - DNA, 15 bp, Homo sapiens
ggaacttaggcagga

SEQ ID NO: 934973 - DNA, 15 bp, Homo sapiens
gaacttaggcaggaa

SEQ ID NO: 934974 - DNA, 15 bp, Homo sapiens
aacttaggcaggaag

SEQ ID NO: 934975 - DNA, 15 bp, Homo sapiens
acttaggcaggaagg

SEQ ID NO: 934976 - DNA, 15 bp, Homo sapiens
cttaggcaggaagga

SEQ ID NO: 934977 - DNA, 15 bp, Homo sapiens
ttaggcaggaaggaa

SEQ ID NO: 934978 - DNA, 15 bp, Homo sapiens
taggcaggaaggaag

SEQ ID NO: 934979 - DNA, 15 bp, Homo sapiens
aggcaggaaggaaga

SEQ ID NO: 934980 - DNA, 15 bp, Homo sapiens
ggcaggaaggaagaa

SEQ ID NO: 934981 - DNA, 15 bp, Homo sapiens
gcaggaaggaagaac

SEQ ID NO: 934982 - DNA, 15 bp, Homo sapiens
caggaaggaagaaca

SEQ ID NO: 934983 - DNA, 15 bp, Homo sapiens
aggaaggaagaacag

SEQ ID NO: 934984 - DNA, 15 bp, Homo sapiens
ggaaggaagaacaga

SEQ ID NO: 934985 - DNA, 15 bp, Homo sapiens
gaaggaagaacagag

SEQ ID NO: 934986 - DNA, 15 bp, Homo sapiens
aaggaagaacagagt

SEQ ID NO: 934987 - DNA, 15 bp, Homo sapiens
aggaagaacagagtc

SEQ ID NO: 934988 - DNA, 15 bp, Homo sapiens
ggaagaacagagtca

SEQ ID NO: 934989 - DNA, 15 bp, Homo sapiens
gaagaacagagtcag

SEQ ID NO: 934990 - DNA, 15 bp, Homo sapiens
aagaacagagtcaga

SEQ ID NO: 934991 - DNA, 15 bp, Homo sapiens
agaacagagtcagaa

SEQ ID NO: 934992 - DNA, 15 bp, Homo sapiens
gaacagagtcagaat

SEQ ID NO: 934993 - DNA, 15 bp, Homo sapiens
aacagagtcagaatt

SEQ ID NO: 934994 - DNA, 15 bp, Homo sapiens
acagagtcagaattt

SEQ ID NO: 934995 - DNA, 15 bp, Homo sapiens
cagagtcagaatttt

SEQ ID NO: 934996 - DNA, 15 bp, Homo sapiens
agagtcagaattttg

SEQ ID NO: 934997 - DNA, 15 bp, Homo sapiens
gagtcagaattttgt

SEQ ID NO: 934998 - DNA, 15 bp, Homo sapiens
agtcagaattttgtc

SEQ ID NO: 934999 - DNA, 15 bp, Homo sapiens
gtcagaattttgtca

SEQ ID NO: 935000 - DNA, 15 bp, Homo sapiens
tcagaattttgtcag

SEQ ID NO: 935001 - DNA, 15 bp, Homo sapiens
cagaattttgtcagt

SEQ ID NO: 935002 - DNA, 15 bp, Homo sapiens
agaattttgtcagta

SEQ ID NO: 935003 - DNA, 15 bp, Homo sapiens
gaattttgtcagtac

SEQ ID NO: 935004 - DNA, 15 bp, Homo sapiens
aattttgtcagtact

SEQ ID NO: 935005 - DNA, 15 bp, Homo sapiens
attttgtcagtactt

SEQ ID NO: 935006 - DNA, 15 bp, Homo sapiens
ttttgtcagtacttt

SEQ ID NO: 935007 - DNA, 15 bp, Homo sapiens
tttgtcagtactttc

SEQ ID NO: 935008 - DNA, 15 bp, Homo sapiens
ttgtcagtactttct

SEQ ID NO: 935009 - DNA, 15 bp, Homo sapiens
tgtcagtactttctt

SEQ ID NO: 935010 - DNA, 15 bp, Homo sapiens
gtcagtactttcttt

SEQ ID NO: 935011 - DNA, 15 bp, Homo sapiens
tcagtactttcttta

SEQ ID NO: 935012 - DNA, 15 bp, Homo sapiens
cagtactttctttac

SEQ ID NO: 935013 - DNA, 15 bp, Homo sapiens
agtactttctttaca

SEQ ID NO: 935014 - DNA, 15 bp, Homo sapiens
gtactttctttacaa

SEQ ID NO: 935015 - DNA, 15 bp, Homo sapiens
tactttctttacaaa

SEQ ID NO: 935016 - DNA, 15 bp, Homo sapiens
actttctttacaaaa

SEQ ID NO: 935017 - DNA, 15 bp, Homo sapiens
ctttctttacaaaaa

SEQ ID NO: 935018 - DNA, 15 bp, Homo sapiens
tttctttacaaaaaa

SEQ ID NO: 935019 - DNA, 15 bp, Homo sapiens
ttctttacaaaaaaa

SEQ ID NO: 935020 - DNA, 15 bp, Homo sapiens
tctttacaaaaaaaa

SEQ ID NO: 935021 - DNA, 15 bp, Homo sapiens
ctttacaaaaaaaaa

SEQ ID NO: 935022 - DNA, 15 bp, Homo sapiens
tttacaaaaaaaaaa

SEQ ID NO: 935023 - DNA, 15 bp, Homo sapiens
ttacaaaaaaaaaaa

SEQ ID NO: 935024 - DNA, 15 bp, Homo sapiens
acaaaaaaaaaaaag

SEQ ID NO: 935025 - DNA, 15 bp, Homo sapiens
caaaaaaaaaaaagg

SEQ ID NO: 935026 - DNA, 15 bp, Homo sapiens
aaaaaaaaaaaggca

SEQ ID NO: 935027 - DNA, 15 bp, Homo sapiens
aaaaaaaaaaggcat

SEQ ID NO: 935028 - DNA, 15 bp, Homo sapiens
aaaaaaaaaggcatc

SEQ ID NO: 935029 - DNA, 15 bp, Homo sapiens
aaaaaaaaggcatct

SEQ ID NO: 935030 - DNA, 15 bp, Homo sapiens
aaaaaaaggcatctt

SEQ ID NO: 935031 - DNA, 15 bp, Homo sapiens
aaaaaaggcatcttc

SEQ ID NO: 935032 - DNA, 15 bp, Homo sapiens
aaaaaggcatcttca

SEQ ID NO: 935033 - DNA, 15 bp, Homo sapiens
aaaaggcatcttcac

SEQ ID NO: 935034 - DNA, 15 bp, Homo sapiens
aaaggcatcttcacc

SEQ ID NO: 935035 - DNA, 15 bp, Homo sapiens
aaggcatcttcacct

SEQ ID NO: 935036 - DNA, 15 bp, Homo sapiens
aggcatcttcacctt

SEQ ID NO: 935037 - DNA, 15 bp, Homo sapiens
ggcatcttcaccttt

SEQ ID NO: 935038 - DNA, 15 bp, Homo sapiens
gcatcttcacctttg

SEQ ID NO: 935039 - DNA, 15 bp, Homo sapiens
catcttcacctttgg

SEQ ID NO: 935040 - DNA, 15 bp, Homo sapiens
atcttcacctttggt

SEQ ID NO: 935041 - DNA, 15 bp, Homo sapiens
tcttcacctttggtg

SEQ ID NO: 935042 - DNA, 15 bp, Homo sapiens
cttcacctttggtga

SEQ ID NO: 935043 - DNA, 15 bp, Homo sapiens
ttcacctttggtgac

SEQ ID NO: 935044 - DNA, 15 bp, Homo sapiens
tcacctttggtgact

SEQ ID NO: 935045 - DNA, 15 bp, Homo sapiens
cacctttggtgactc

SEQ ID NO: 935046 - DNA, 15 bp, Homo sapiens
acctttggtgactcc

SEQ ID NO: 935047 - DNA, 15 bp, Homo sapiens
cctttggtgactcct

SEQ ID NO: 935048 - DNA, 15 bp, Homo sapiens
ctttggtgactcctg

SEQ ID NO: 935049 - DNA, 15 bp, Homo sapiens
tttggtgactcctga

SEQ ID NO: 935050 - DNA, 15 bp, Homo sapiens
ttggtgactcctgag

SEQ ID NO: 935051 - DNA, 15 bp, Homo sapiens
tggtgactcctgaga

SEQ ID NO: 935052 - DNA, 15 bp, Homo sapiens
ggtgactcctgagaa

SEQ ID NO: 935053 - DNA, 15 bp, Homo sapiens
gtgactcctgagaat

SEQ ID NO: 935054 - DNA, 15 bp, Homo sapiens
tgactcctgagaatc

SEQ ID NO: 935055 - DNA, 15 bp, Homo sapiens
gactcctgagaatct

SEQ ID NO: 935056 - DNA, 15 bp, Homo sapiens
actcctgagaatctg

SEQ ID NO: 935057 - DNA, 15 bp, Homo sapiens
ctcctgagaatctga

SEQ ID NO: 935058 - DNA, 15 bp, Homo sapiens
tcctgagaatctgaa

SEQ ID NO: 935059 - DNA, 15 bp, Homo sapiens
cctgagaatctgaag

SEQ ID NO: 935060 - DNA, 15 bp, Homo sapiens
ctgagaatctgaagt

SEQ ID NO: 935061 - DNA, 15 bp, Homo sapiens
tgagaatctgaagtg

SEQ ID NO: 935062 - DNA, 15 bp, Homo sapiens
gagaatctgaagtga

SEQ ID NO: 935063 - DNA, 15 bp, Homo sapiens
agaatctgaagtgag

SEQ ID NO: 935064 - DNA, 15 bp, Homo sapiens
gaatctgaagtgaga

SEQ ID NO: 935065 - DNA, 15 bp, Homo sapiens
aatctgaagtgagat

SEQ ID NO: 935066 - DNA, 15 bp, Homo sapiens
atctgaagtgagatc

SEQ ID NO: 935067 - DNA, 15 bp, Homo sapiens
tctgaagtgagatca

SEQ ID NO: 935068 - DNA, 15 bp, Homo sapiens
ctgaagtgagatcac

SEQ ID NO: 935069 - DNA, 15 bp, Homo sapiens
tgaagtgagatcacc

SEQ ID NO: 935070 - DNA, 15 bp, Homo sapiens
gaagtgagatcacca

SEQ ID NO: 935071 - DNA, 15 bp, Homo sapiens
aagtgagatcaccat

SEQ ID NO: 935072 - DNA, 15 bp, Homo sapiens
agtgagatcaccatt

SEQ ID NO: 935073 - DNA, 15 bp, Homo sapiens
gtgagatcaccattc

SEQ ID NO: 935074 - DNA, 15 bp, Homo sapiens
tgagatcaccattcc

SEQ ID NO: 935075 - DNA, 15 bp, Homo sapiens
gagatcaccattcct

SEQ ID NO: 935076 - DNA, 15 bp, Homo sapiens
agatcaccattccta

SEQ ID NO: 935077 - DNA, 15 bp, Homo sapiens
gatcaccattcctaa

SEQ ID NO: 935078 - DNA, 15 bp, Homo sapiens
atcaccattcctaaa

SEQ ID NO: 935079 - DNA, 15 bp, Homo sapiens
tcaccattcctaaac

SEQ ID NO: 935080 - DNA, 15 bp, Homo sapiens
caccattcctaaact

SEQ ID NO: 935081 - DNA, 15 bp, Homo sapiens
accattcctaaactc

SEQ ID NO: 935082 - DNA, 15 bp, Homo sapiens
ccattcctaaactct

SEQ ID NO: 935083 - DNA, 15 bp, Homo sapiens
cattcctaaactctc

SEQ ID NO: 935084 - DNA, 15 bp, Homo sapiens
attcctaaactctcg

SEQ ID NO: 935085 - DNA, 15 bp, Homo sapiens
ttcctaaactctcgt

SEQ ID NO: 935086 - DNA, 15 bp, Homo sapiens
tcctaaactctcgtc

SEQ ID NO: 935087 - DNA, 15 bp, Homo sapiens
cctaaactctcgtcc

SEQ ID NO: 935088 - DNA, 15 bp, Homo sapiens
ctaaactctcgtcca

SEQ ID NO: 935089 - DNA, 15 bp, Homo sapiens
taaactctcgtccat

SEQ ID NO: 935090 - DNA, 15 bp, Homo sapiens
aaactctcgtccatt

SEQ ID NO: 935091 - DNA, 15 bp, Homo sapiens
aactctcgtccattt

SEQ ID NO: 935092 - DNA, 15 bp, Homo sapiens
actctcgtccatttc

SEQ ID NO: 935093 - DNA, 15 bp, Homo sapiens
ctctcgtccatttct

SEQ ID NO: 935094 - DNA, 15 bp, Homo sapiens
tctcgtccatttcta

SEQ ID NO: 935095 - DNA, 15 bp, Homo sapiens
ctcgtccatttctag

SEQ ID NO: 935096 - DNA, 15 bp, Homo sapiens
tcgtccatttctaga

SEQ ID NO: 935097 - DNA, 15 bp, Homo sapiens
cgtccatttctagag

SEQ ID NO: 935098 - DNA, 15 bp, Homo sapiens
gtccatttctagaga

SEQ ID NO: 935099 - DNA, 15 bp, Homo sapiens
tccatttctagagac

SEQ ID NO: 935100 - DNA, 15 bp, Homo sapiens
ccatttctagagact

SEQ ID NO: 935101 - DNA, 15 bp, Homo sapiens
catttctagagactt

SEQ ID NO: 935102 - DNA, 15 bp, Homo sapiens
atttctagagactta

SEQ ID NO: 935103 - DNA, 15 bp, Homo sapiens
tttctagagacttac

SEQ ID NO: 935104 - DNA, 15 bp, Homo sapiens
ttctagagacttact

SEQ ID NO: 935105 - DNA, 15 bp, Homo sapiens
tctagagacttactt

SEQ ID NO: 935106 - DNA, 15 bp, Homo sapiens
ctagagacttactta

SEQ ID NO: 935107 - DNA, 15 bp, Homo sapiens
tagagacttacttat

SEQ ID NO: 935108 - DNA, 15 bp, Homo sapiens
agagacttacttatt

SEQ ID NO: 935109 - DNA, 15 bp, Homo sapiens
gagacttacttattt

SEQ ID NO: 935110 - DNA, 15 bp, Homo sapiens
agacttacttatttt

SEQ ID NO: 935111 - DNA, 15 bp, Homo sapiens
gacttacttattttg

SEQ ID NO: 935112 - DNA, 15 bp, Homo sapiens
acttacttattttgt

SEQ ID NO: 935113 - DNA, 15 bp, Homo sapiens
cttacttattttgtt

SEQ ID NO: 935114 - DNA, 15 bp, Homo sapiens
ttacttattttgttt

SEQ ID NO: 935115 - DNA, 15 bp, Homo sapiens
tacttattttgtttc

SEQ ID NO: 935116 - DNA, 15 bp, Homo sapiens
acttattttgtttca

SEQ ID NO: 935117 - DNA, 15 bp, Homo sapiens
cttattttgtttcaa

SEQ ID NO: 935118 - DNA, 15 bp, Homo sapiens
ttattttgtttcaaa

SEQ ID NO: 935119 - DNA, 15 bp, Homo sapiens
tattttgtttcaaaa

SEQ ID NO: 935120 - DNA, 15 bp, Homo sapiens
attttgtttcaaaac

SEQ ID NO: 935121 - DNA, 15 bp, Homo sapiens
ttttgtttcaaaact

SEQ ID NO: 935122 - DNA, 15 bp, Homo sapiens
tttgtttcaaaactg

SEQ ID NO: 935123 - DNA, 15 bp, Homo sapiens
ttgtttcaaaactgc

SEQ ID NO: 935124 - DNA, 15 bp, Homo sapiens
tgtttcaaaactgcc

SEQ ID NO: 935125 - DNA, 15 bp, Homo sapiens
gtttcaaaactgcca

SEQ ID NO: 935126 - DNA, 15 bp, Homo sapiens
tttcaaaactgccac

SEQ ID NO: 935127 - DNA, 15 bp, Homo sapiens
ttcaaaactgccacc

SEQ ID NO: 935128 - DNA, 15 bp, Homo sapiens
tcaaaactgccacca

SEQ ID NO: 935129 - DNA, 15 bp, Homo sapiens
caaaactgccaccat

SEQ ID NO: 935130 - DNA, 15 bp, Homo sapiens
aaaactgccaccatc

SEQ ID NO: 935131 - DNA, 15 bp, Homo sapiens
aaactgccaccatct

SEQ ID NO: 935132 - DNA, 15 bp, Homo sapiens
aactgccaccatctt

SEQ ID NO: 935133 - DNA, 15 bp, Homo sapiens
actgccaccatcttt

SEQ ID NO: 935134 - DNA, 15 bp, Homo sapiens
ctgccaccatcttta

SEQ ID NO: 935135 - DNA, 15 bp, Homo sapiens
tgccaccatctttaa

SEQ ID NO: 935136 - DNA, 15 bp, Homo sapiens
gccaccatctttaac

SEQ ID NO: 935137 - DNA, 15 bp, Homo sapiens
ccaccatctttaaca

SEQ ID NO: 935138 - DNA, 15 bp, Homo sapiens
caccatctttaacaa

SEQ ID NO: 935139 - DNA, 15 bp, Homo sapiens
accatctttaacaat

SEQ ID NO: 935140 - DNA, 15 bp, Homo sapiens
ccatctttaacaata

SEQ ID NO: 935141 - DNA, 15 bp, Homo sapiens
catctttaacaataa

SEQ ID NO: 935142 - DNA, 15 bp, Homo sapiens
atctttaacaataat

SEQ ID NO: 935143 - DNA, 15 bp, Homo sapiens
tctttaacaataata

SEQ ID NO: 935144 - DNA, 15 bp, Homo sapiens
ctttaacaataataa

SEQ ID NO: 935145 - DNA, 15 bp, Homo sapiens
tttaacaataataag

SEQ ID NO: 935146 - DNA, 15 bp, Homo sapiens
ttaacaataataagt

SEQ ID NO: 935147 - DNA, 15 bp, Homo sapiens
taacaataataagtg

SEQ ID NO: 935148 - DNA, 15 bp, Homo sapiens
aacaataataagtgg

SEQ ID NO: 935149 - DNA, 15 bp, Homo sapiens
acaataataagtgga

SEQ ID NO: 935150 - DNA, 15 bp, Homo sapiens
caataataagtggac

SEQ ID NO: 935151 - DNA, 15 bp, Homo sapiens
aataataagtggaca

SEQ ID NO: 935152 - DNA, 15 bp, Homo sapiens
ataataagtggacat

SEQ ID NO: 935153 - DNA, 15 bp, Homo sapiens
taataagtggacatg

SEQ ID NO: 935154 - DNA, 15 bp, Homo sapiens
aataagtggacatga

SEQ ID NO: 935155 - DNA, 15 bp, Homo sapiens
ataagtggacatgac

SEQ ID NO: 935156 - DNA, 15 bp, Homo sapiens
taagtggacatgact

SEQ ID NO: 935157 - DNA, 15 bp, Homo sapiens
aagtggacatgactt

SEQ ID NO: 935158 - DNA, 15 bp, Homo sapiens
agtggacatgactta

SEQ ID NO: 935159 - DNA, 15 bp, Homo sapiens
gtggacatgacttat

SEQ ID NO: 935160 - DNA, 15 bp, Homo sapiens
tggacatgacttatc

SEQ ID NO: 935161 - DNA, 15 bp, Homo sapiens
ggacatgacttatcc

SEQ ID NO: 935162 - DNA, 15 bp, Homo sapiens
gacatgacttatccc

SEQ ID NO: 935163 - DNA, 15 bp, Homo sapiens
acatgacttatccct

SEQ ID NO: 935164 - DNA, 15 bp, Homo sapiens
catgacttatccctt

SEQ ID NO: 935165 - DNA, 15 bp, Homo sapiens
atgacttatcccttt

SEQ ID NO: 935166 - DNA, 15 bp, Homo sapiens
tgacttatccctttt

SEQ ID NO: 935167 - DNA, 15 bp, Homo sapiens
gacttatcccttttg

SEQ ID NO: 935168 - DNA, 15 bp, Homo sapiens
acttatcccttttgt

SEQ ID NO: 935169 - DNA, 15 bp, Homo sapiens
cttatcccttttgta

SEQ ID NO: 935170 - DNA, 15 bp, Homo sapiens
ttatcccttttgtaa

SEQ ID NO: 935171 - DNA, 15 bp, Homo sapiens
tatcccttttgtaaa

SEQ ID NO: 935172 - DNA, 15 bp, Homo sapiens
atcccttttgtaaat

SEQ ID NO: 935173 - DNA, 15 bp, Homo sapiens
tcccttttgtaaata

SEQ ID NO: 935174 - DNA, 15 bp, Homo sapiens
cccttttgtaaatag

SEQ ID NO: 935175 - DNA, 15 bp, Homo sapiens
ccttttgtaaataga

SEQ ID NO: 935176 - DNA, 15 bp, Homo sapiens
cttttgtaaatagag

SEQ ID NO: 935177 - DNA, 15 bp, Homo sapiens
ttttgtaaatagagt

SEQ ID NO: 935178 - DNA, 15 bp, Homo sapiens
tttgtaaatagagtt

SEQ ID NO: 935179 - DNA, 15 bp, Homo sapiens
ttgtaaatagagttt

SEQ ID NO: 935180 - DNA, 15 bp, Homo sapiens
tgtaaatagagttta

SEQ ID NO: 935181 - DNA, 15 bp, Homo sapiens
gtaaatagagtttac

SEQ ID NO: 935182 - DNA, 15 bp, Homo sapiens
taaatagagtttact

SEQ ID NO: 935183 - DNA, 15 bp, Homo sapiens
aaatagagtttactt

SEQ ID NO: 935184 - DNA, 15 bp, Homo sapiens
aatagagtttacttt

SEQ ID NO: 935185 - DNA, 15 bp, Homo sapiens
atagagtttactttc

SEQ ID NO: 935186 - DNA, 15 bp, Homo sapiens
tagagtttactttca

SEQ ID NO: 935187 - DNA, 15 bp, Homo sapiens
agagtttactttcat

SEQ ID NO: 935188 - DNA, 15 bp, Homo sapiens
gagtttactttcatg

SEQ ID NO: 935189 - DNA, 15 bp, Homo sapiens
agtttactttcatgc

SEQ ID NO: 935190 - DNA, 15 bp, Homo sapiens
gtttactttcatgca

SEQ ID NO: 935191 - DNA, 15 bp, Homo sapiens
tttactttcatgcat

SEQ ID NO: 935192 - DNA, 15 bp, Homo sapiens
ttactttcatgcatt

SEQ ID NO: 935193 - DNA, 15 bp, Homo sapiens
tactttcatgcattt

SEQ ID NO: 935194 - DNA, 15 bp, Homo sapiens
actttcatgcatttc

SEQ ID NO: 935195 - DNA, 15 bp, Homo sapiens
ctttcatgcatttcc

SEQ ID NO: 935196 - DNA, 15 bp, Homo sapiens
tttcatgcatttccc

SEQ ID NO: 935197 - DNA, 15 bp, Homo sapiens
ttcatgcatttccct

SEQ ID NO: 935198 - DNA, 15 bp, Homo sapiens
tcatgcatttccctc

SEQ ID NO: 935199 - DNA, 15 bp, Homo sapiens
catgcatttccctct

SEQ ID NO: 935200 - DNA, 15 bp, Homo sapiens
atgcatttccctctg

SEQ ID NO: 935201 - DNA, 15 bp, Homo sapiens
tgcatttccctctga

SEQ ID NO: 935202 - DNA, 15 bp, Homo sapiens
gcatttccctctgaa

SEQ ID NO: 935203 - DNA, 15 bp, Homo sapiens
catttccctctgaat

SEQ ID NO: 935204 - DNA, 15 bp, Homo sapiens
atttccctctgaata

SEQ ID NO: 935205 - DNA, 15 bp, Homo sapiens
tttccctctgaataa

SEQ ID NO: 935206 - DNA, 15 bp, Homo sapiens
ttccctctgaataat

SEQ ID NO: 935207 - DNA, 15 bp, Homo sapiens
tccctctgaataatc

SEQ ID NO: 935208 - DNA, 15 bp, Homo sapiens
ccctctgaataatct

SEQ ID NO: 935209 - DNA, 15 bp, Homo sapiens
cctctgaataatctt

SEQ ID NO: 935210 - DNA, 15 bp, Homo sapiens
ctctgaataatcttt

SEQ ID NO: 935211 - DNA, 15 bp, Homo sapiens
tctgaataatcttta

SEQ ID NO: 935212 - DNA, 15 bp, Homo sapiens
ctgaataatctttac

SEQ ID NO: 935213 - DNA, 15 bp, Homo sapiens
tgaataatctttact

SEQ ID NO: 935214 - DNA, 15 bp, Homo sapiens
gaataatctttactg

SEQ ID NO: 935215 - DNA, 15 bp, Homo sapiens
aataatctttactgt

SEQ ID NO: 935216 - DNA, 15 bp, Homo sapiens
ataatctttactgtt

SEQ ID NO: 935217 - DNA, 15 bp, Homo sapiens
taatctttactgttt

SEQ ID NO: 935218 - DNA, 15 bp, Homo sapiens
aatctttactgtttc

SEQ ID NO: 935219 - DNA, 15 bp, Homo sapiens
atctttactgtttct

SEQ ID NO: 935220 - DNA, 15 bp, Homo sapiens
tctttactgtttctc

SEQ ID NO: 935221 - DNA, 15 bp, Homo sapiens
ctttactgtttctca

SEQ ID NO: 935222 - DNA, 15 bp, Homo sapiens
tttactgtttctcac

SEQ ID NO: 935223 - DNA, 15 bp, Homo sapiens
ttactgtttctcact

SEQ ID NO: 935224 - DNA, 15 bp, Homo sapiens
tactgtttctcactt

SEQ ID NO: 935225 - DNA, 15 bp, Homo sapiens
actgtttctcacttg

SEQ ID NO: 935226 - DNA, 15 bp, Homo sapiens
ctgtttctcacttgc

SEQ ID NO: 935227 - DNA, 15 bp, Homo sapiens
tgtttctcacttgct

SEQ ID NO: 935228 - DNA, 15 bp, Homo sapiens
gtttctcacttgctg

SEQ ID NO: 935229 - DNA, 15 bp, Homo sapiens
tttctcacttgctgt

SEQ ID NO: 935230 - DNA, 15 bp, Homo sapiens
ttctcacttgctgtc

SEQ ID NO: 935231 - DNA, 15 bp, Homo sapiens
tctcacttgctgtcc

SEQ ID NO: 935232 - DNA, 15 bp, Homo sapiens
ctcacttgctgtcct

SEQ ID NO: 935233 - DNA, 15 bp, Homo sapiens
tcacttgctgtcctt

SEQ ID NO: 935234 - DNA, 15 bp, Homo sapiens
cacttgctgtccttc

SEQ ID NO: 935235 - DNA, 15 bp, Homo sapiens
acttgctgtccttct

SEQ ID NO: 935236 - DNA, 15 bp, Homo sapiens
cttgctgtccttcta

SEQ ID NO: 935237 - DNA, 15 bp, Homo sapiens
ttgctgtccttctat

SEQ ID NO: 935238 - DNA, 15 bp, Homo sapiens
tgctgtccttctatc

SEQ ID NO: 935239 - DNA, 15 bp, Homo sapiens
gctgtccttctatca

SEQ ID NO: 935240 - DNA, 15 bp, Homo sapiens
ctgtccttctatcag

SEQ ID NO: 935241 - DNA, 15 bp, Homo sapiens
tgtccttctatcagc

SEQ ID NO: 935242 - DNA, 15 bp, Homo sapiens
gtccttctatcagca

SEQ ID NO: 935243 - DNA, 15 bp, Homo sapiens
tccttctatcagcag

SEQ ID NO: 935244 - DNA, 15 bp, Homo sapiens
ccttctatcagcagg

SEQ ID NO: 935245 - DNA, 15 bp, Homo sapiens
cttctatcagcaggc

SEQ ID NO: 935246 - DNA, 15 bp, Homo sapiens
ttctatcagcaggct

SEQ ID NO: 935247 - DNA, 15 bp, Homo sapiens
tctatcagcaggctc

SEQ ID NO: 935248 - DNA, 15 bp, Homo sapiens
ctatcagcaggctct

SEQ ID NO: 935249 - DNA, 15 bp, Homo sapiens
tatcagcaggctctg

SEQ ID NO: 935250 - DNA, 15 bp, Homo sapiens
atcagcaggctctga

SEQ ID NO: 935251 - DNA, 15 bp, Homo sapiens
tcagcaggctctgat

SEQ ID NO: 935252 - DNA, 15 bp, Homo sapiens
cagcaggctctgatc

SEQ ID NO: 935253 - DNA, 15 bp, Homo sapiens
agcaggctctgatct

SEQ ID NO: 935254 - DNA, 15 bp, Homo sapiens
gcaggctctgatctg

SEQ ID NO: 935255 - DNA, 15 bp, Homo sapiens
caggctctgatctga

SEQ ID NO: 935256 - DNA, 15 bp, Homo sapiens
aggctctgatctgag

SEQ ID NO: 935257 - DNA, 15 bp, Homo sapiens
ggctctgatctgagc

SEQ ID NO: 935258 - DNA, 15 bp, Homo sapiens
gctctgatctgagcc

SEQ ID NO: 935259 - DNA, 15 bp, Homo sapiens
ctctgatctgagccc

SEQ ID NO: 935260 - DNA, 15 bp, Homo sapiens
tctgatctgagcccc

SEQ ID NO: 935261 - DNA, 15 bp, Homo sapiens
ctgatctgagcccct

SEQ ID NO: 935262 - DNA, 15 bp, Homo sapiens
tgatctgagcccctt

SEQ ID NO: 935263 - DNA, 15 bp, Homo sapiens
gatctgagccccttt

SEQ ID NO: 935264 - DNA, 15 bp, Homo sapiens
atctgagcccctttg

SEQ ID NO: 935265 - DNA, 15 bp, Homo sapiens
tctgagcccctttgt

SEQ ID NO: 935266 - DNA, 15 bp, Homo sapiens
ctgagcccctttgtg

SEQ ID NO: 935267 - DNA, 15 bp, Homo sapiens
tgagcccctttgtgt

SEQ ID NO: 935268 - DNA, 15 bp, Homo sapiens
gagcccctttgtgtc

SEQ ID NO: 935269 - DNA, 15 bp, Homo sapiens
agcccctttgtgtca

SEQ ID NO: 935270 - DNA, 15 bp, Homo sapiens
gcccctttgtgtcag

SEQ ID NO: 935271 - DNA, 15 bp, Homo sapiens
cccctttgtgtcagc

SEQ ID NO: 935272 - DNA, 15 bp, Homo sapiens
ccctttgtgtcagcc

SEQ ID NO: 935273 - DNA, 15 bp, Homo sapiens
cctttgtgtcagcca

SEQ ID NO: 935274 - DNA, 15 bp, Homo sapiens
ctttgtgtcagccac

SEQ ID NO: 935275 - DNA, 15 bp, Homo sapiens
tttgtgtcagccact

SEQ ID NO: 935276 - DNA, 15 bp, Homo sapiens
ttgtgtcagccactc

SEQ ID NO: 935277 - DNA, 15 bp, Homo sapiens
tgtgtcagccactct

SEQ ID NO: 935278 - DNA, 15 bp, Homo sapiens
gtgtcagccactctg

SEQ ID NO: 935279 - DNA, 15 bp, Homo sapiens
tgtcagccactctgc

SEQ ID NO: 935280 - DNA, 15 bp, Homo sapiens
gtcagccactctgca

SEQ ID NO: 935281 - DNA, 15 bp, Homo sapiens
tcagccactctgcat

SEQ ID NO: 935282 - DNA, 15 bp, Homo sapiens
cagccactctgcatc

SEQ ID NO: 935283 - DNA, 15 bp, Homo sapiens
agccactctgcatcc

SEQ ID NO: 935284 - DNA, 15 bp, Homo sapiens
gccactctgcatccc

SEQ ID NO: 935285 - DNA, 15 bp, Homo sapiens
ccactctgcatccct

SEQ ID NO: 935286 - DNA, 15 bp, Homo sapiens
cactctgcatccctt

SEQ ID NO: 935287 - DNA, 15 bp, Homo sapiens
actctgcatcccttc

SEQ ID NO: 935288 - DNA, 15 bp, Homo sapiens
ctctgcatcccttct

SEQ ID NO: 935289 - DNA, 15 bp, Homo sapiens
tctgcatcccttctg

SEQ ID NO: 935290 - DNA, 15 bp, Homo sapiens
ctgcatcccttctgt

SEQ ID NO: 935291 - DNA, 15 bp, Homo sapiens
tgcatcccttctgtg

SEQ ID NO: 935292 - DNA, 15 bp, Homo sapiens
gcatcccttctgtga

SEQ ID NO: 935293 - DNA, 15 bp, Homo sapiens
catcccttctgtgat

SEQ ID NO: 935294 - DNA, 15 bp, Homo sapiens
atcccttctgtgata

SEQ ID NO: 935295 - DNA, 15 bp, Homo sapiens
tcccttctgtgatag

SEQ ID NO: 935296 - DNA, 15 bp, Homo sapiens
cccttctgtgataga

SEQ ID NO: 935297 - DNA, 15 bp, Homo sapiens
ccttctgtgatagaa

SEQ ID NO: 935298 - DNA, 15 bp, Homo sapiens
cttctgtgatagaag

SEQ ID NO: 935299 - DNA, 15 bp, Homo sapiens
ttctgtgatagaagt

SEQ ID NO: 935300 - DNA, 15 bp, Homo sapiens
tctgtgatagaagta

SEQ ID NO: 935301 - DNA, 15 bp, Homo sapiens
ctgtgatagaagtag

SEQ ID NO: 935302 - DNA, 15 bp, Homo sapiens
tgtgatagaagtaga

SEQ ID NO: 935303 - DNA, 15 bp, Homo sapiens
gtgatagaagtagat

SEQ ID NO: 935304 - DNA, 15 bp, Homo sapiens
tgatagaagtagatc

SEQ ID NO: 935305 - DNA, 15 bp, Homo sapiens
gatagaagtagatca

SEQ ID NO: 935306 - DNA, 15 bp, Homo sapiens
atagaagtagatcag

SEQ ID NO: 935307 - DNA, 15 bp, Homo sapiens
tagaagtagatcaga

SEQ ID NO: 935308 - DNA, 15 bp, Homo sapiens
agaagtagatcagaa

SEQ ID NO: 935309 - DNA, 15 bp, Homo sapiens
gaagtagatcagaat

SEQ ID NO: 935310 - DNA, 15 bp, Homo sapiens
aagtagatcagaata

SEQ ID NO: 935311 - DNA, 15 bp, Homo sapiens
agtagatcagaataa

SEQ ID NO: 935312 - DNA, 15 bp, Homo sapiens
gtagatcagaataac

SEQ ID NO: 935313 - DNA, 15 bp, Homo sapiens
tagatcagaataaca

SEQ ID NO: 935314 - DNA, 15 bp, Homo sapiens
agatcagaataacac

SEQ ID NO: 935315 - DNA, 15 bp, Homo sapiens
gatcagaataacact

SEQ ID NO: 935316 - DNA, 15 bp, Homo sapiens
atcagaataacactt

SEQ ID NO: 935317 - DNA, 15 bp, Homo sapiens
tcagaataacactta

SEQ ID NO: 935318 - DNA, 15 bp, Homo sapiens
cagaataacacttaa

SEQ ID NO: 935319 - DNA, 15 bp, Homo sapiens
agaataacacttaac

SEQ ID NO: 935320 - DNA, 15 bp, Homo sapiens
gaataacacttaaca

SEQ ID NO: 935321 - DNA, 15 bp, Homo sapiens
aataacacttaacaa

SEQ ID NO: 935322 - DNA, 15 bp, Homo sapiens
ataacacttaacaaa

SEQ ID NO: 935323 - DNA, 15 bp, Homo sapiens
taacacttaacaaat

SEQ ID NO: 935324 - DNA, 15 bp, Homo sapiens
aacacttaacaaatt

SEQ ID NO: 935325 - DNA, 15 bp, Homo sapiens
acacttaacaaatta

SEQ ID NO: 935326 - DNA, 15 bp, Homo sapiens
cacttaacaaattac

SEQ ID NO: 935327 - DNA, 15 bp, Homo sapiens
acttaacaaattaca

SEQ ID NO: 935328 - DNA, 15 bp, Homo sapiens
cttaacaaattacag

SEQ ID NO: 935329 - DNA, 15 bp, Homo sapiens
ttaacaaattacagg

SEQ ID NO: 935330 - DNA, 15 bp, Homo sapiens
taacaaattacaggt

SEQ ID NO: 935331 - DNA, 15 bp, Homo sapiens
aacaaattacaggta

SEQ ID NO: 935332 - DNA, 15 bp, Homo sapiens
acaaattacaggtat

SEQ ID NO: 935333 - DNA, 15 bp, Homo sapiens
caaattacaggtatt

SEQ ID NO: 935334 - DNA, 15 bp, Homo sapiens
aaattacaggtattt

SEQ ID NO: 935335 - DNA, 15 bp, Homo sapiens
aattacaggtatttg

SEQ ID NO: 935336 - DNA, 15 bp, Homo sapiens
attacaggtatttgg

SEQ ID NO: 935337 - DNA, 15 bp, Homo sapiens
ttacaggtatttggg

SEQ ID NO: 935338 - DNA, 15 bp, Homo sapiens
tacaggtatttggga

SEQ ID NO: 935339 - DNA, 15 bp, Homo sapiens
acaggtatttgggat

SEQ ID NO: 935340 - DNA, 15 bp, Homo sapiens
caggtatttgggata

SEQ ID NO: 935341 - DNA, 15 bp, Homo sapiens
aggtatttgggatac

SEQ ID NO: 935342 - DNA, 15 bp, Homo sapiens
ggtatttgggataca

SEQ ID NO: 935343 - DNA, 15 bp, Homo sapiens
gtatttgggatacaa

SEQ ID NO: 935344 - DNA, 15 bp, Homo sapiens
tatttgggatacaag

SEQ ID NO: 935345 - DNA, 15 bp, Homo sapiens
atttgggatacaagc

SEQ ID NO: 935346 - DNA, 15 bp, Homo sapiens
tttgggatacaagcg

SEQ ID NO: 935347 - DNA, 15 bp, Homo sapiens
ttgggatacaagcgt

SEQ ID NO: 935348 - DNA, 15 bp, Homo sapiens
tgggatacaagcgtc

SEQ ID NO: 935349 - DNA, 15 bp, Homo sapiens
gggatacaagcgtct

SEQ ID NO: 935350 - DNA, 15 bp, Homo sapiens
ggatacaagcgtctt

SEQ ID NO: 935351 - DNA, 15 bp, Homo sapiens
gatacaagcgtcttg

SEQ ID NO: 935352 - DNA, 15 bp, Homo sapiens
atacaagcgtcttgc

SEQ ID NO: 935353 - DNA, 15 bp, Homo sapiens
tacaagcgtcttgca

SEQ ID NO: 935354 - DNA, 15 bp, Homo sapiens
acaagcgtcttgcag

SEQ ID NO: 935355 - DNA, 15 bp, Homo sapiens
caagcgtcttgcagc

SEQ ID NO: 935356 - DNA, 15 bp, Homo sapiens
aagcgtcttgcagct

SEQ ID NO: 935357 - DNA, 15 bp, Homo sapiens
agcgtcttgcagctt

SEQ ID NO: 935358 - DNA, 15 bp, Homo sapiens
gcgtcttgcagcttt

SEQ ID NO: 935359 - DNA, 15 bp, Homo sapiens
cgtcttgcagctttg

SEQ ID NO: 935360 - DNA, 15 bp, Homo sapiens
gtcttgcagctttgt

SEQ ID NO: 935361 - DNA, 15 bp, Homo sapiens
tcttgcagctttgtg

SEQ ID NO: 935362 - DNA, 15 bp, Homo sapiens
cttgcagctttgtgc

SEQ ID NO: 935363 - DNA, 15 bp, Homo sapiens
ttgcagctttgtgcc

SEQ ID NO: 935364 - DNA, 15 bp, Homo sapiens
tgcagctttgtgcct

SEQ ID NO: 935365 - DNA, 15 bp, Homo sapiens
gcagctttgtgcctg

SEQ ID NO: 935366 - DNA, 15 bp, Homo sapiens
cagctttgtgcctga

SEQ ID NO: 935367 - DNA, 15 bp, Homo sapiens
agctttgtgcctgag

SEQ ID NO: 935368 - DNA, 15 bp, Homo sapiens
gctttgtgcctgaga

SEQ ID NO: 935369 - DNA, 15 bp, Homo sapiens
ctttgtgcctgagaa

SEQ ID NO: 935370 - DNA, 15 bp, Homo sapiens
tttgtgcctgagaag

SEQ ID NO: 935371 - DNA, 15 bp, Homo sapiens
ttgtgcctgagaaga

SEQ ID NO: 935372 - DNA, 15 bp, Homo sapiens
tgtgcctgagaagaa

SEQ ID NO: 935373 - DNA, 15 bp, Homo sapiens
gtgcctgagaagaaa

SEQ ID NO: 935374 - DNA, 15 bp, Homo sapiens
tgcctgagaagaaac

SEQ ID NO: 935375 - DNA, 15 bp, Homo sapiens
gcctgagaagaaact

SEQ ID NO: 935376 - DNA, 15 bp, Homo sapiens
cctgagaagaaactt

SEQ ID NO: 935377 - DNA, 15 bp, Homo sapiens
ctgagaagaaacttt

SEQ ID NO: 935378 - DNA, 15 bp, Homo sapiens
tgagaagaaactttt

SEQ ID NO: 935379 - DNA, 15 bp, Homo sapiens
gagaagaaacttttc

SEQ ID NO: 935380 - DNA, 15 bp, Homo sapiens
agaagaaacttttcc

SEQ ID NO: 935381 - DNA, 15 bp, Homo sapiens
gaagaaacttttcct

SEQ ID NO: 935382 - DNA, 15 bp, Homo sapiens
aagaaacttttcctt

SEQ ID NO: 935383 - DNA, 15 bp, Homo sapiens
agaaacttttcctta

SEQ ID NO: 935384 - DNA, 15 bp, Homo sapiens
gaaacttttccttat

SEQ ID NO: 935385 - DNA, 15 bp, Homo sapiens
aaacttttccttata

SEQ ID NO: 935386 - DNA, 15 bp, Homo sapiens
aacttttccttataa

SEQ ID NO: 935387 - DNA, 15 bp, Homo sapiens
acttttccttataat

SEQ ID NO: 935388 - DNA, 15 bp, Homo sapiens
cttttccttataatt

SEQ ID NO: 935389 - DNA, 15 bp, Homo sapiens
ttttccttataattt

SEQ ID NO: 935390 - DNA, 15 bp, Homo sapiens
tttccttataatttc

SEQ ID NO: 935391 - DNA, 15 bp, Homo sapiens
ttccttataatttcc

SEQ ID NO: 935392 - DNA, 15 bp, Homo sapiens
tccttataatttcct

SEQ ID NO: 935393 - DNA, 15 bp, Homo sapiens
ccttataatttcctc

SEQ ID NO: 935394 - DNA, 15 bp, Homo sapiens
cttataatttcctct

SEQ ID NO: 935395 - DNA, 15 bp, Homo sapiens
ttataatttcctctc

SEQ ID NO: 935396 - DNA, 15 bp, Homo sapiens
tataatttcctctct

SEQ ID NO: 935397 - DNA, 15 bp, Homo sapiens
ataatttcctctcta

SEQ ID NO: 935398 - DNA, 15 bp, Homo sapiens
taatttcctctctag

SEQ ID NO: 935399 - DNA, 15 bp, Homo sapiens
aatttcctctctagc

SEQ ID NO: 935400 - DNA, 15 bp, Homo sapiens
atttcctctctagca

SEQ ID NO: 935401 - DNA, 15 bp, Homo sapiens
tttcctctctagcag

SEQ ID NO: 935402 - DNA, 15 bp, Homo sapiens
ttcctctctagcagg

SEQ ID NO: 935403 - DNA, 15 bp, Homo sapiens
tcctctctagcaggt

SEQ ID NO: 935404 - DNA, 15 bp, Homo sapiens
cctctctagcaggtg

SEQ ID NO: 935405 - DNA, 15 bp, Homo sapiens
ctctctagcaggtgt

SEQ ID NO: 935406 - DNA, 15 bp, Homo sapiens
tctctagcaggtgtt

SEQ ID NO: 935407 - DNA, 15 bp, Homo sapiens
ctctagcaggtgtta

SEQ ID NO: 935408 - DNA, 15 bp, Homo sapiens
tctagcaggtgttac

SEQ ID NO: 935409 - DNA, 15 bp, Homo sapiens
ctagcaggtgttacg

SEQ ID NO: 935410 - DNA, 15 bp, Homo sapiens
tagcaggtgttacgt

SEQ ID NO: 935411 - DNA, 15 bp, Homo sapiens
agcaggtgttacgtt

SEQ ID NO: 935412 - DNA, 15 bp, Homo sapiens
gcaggtgttacgttc

SEQ ID NO: 935413 - DNA, 15 bp, Homo sapiens
caggtgttacgttcc

SEQ ID NO: 935414 - DNA, 15 bp, Homo sapiens
aggtgttacgttcca

SEQ ID NO: 935415 - DNA, 15 bp, Homo sapiens
ggtgttacgttccat

SEQ ID NO: 935416 - DNA, 15 bp, Homo sapiens
gtgttacgttccatt

SEQ ID NO: 935417 - DNA, 15 bp, Homo sapiens
tgttacgttccattg

SEQ ID NO: 935418 - DNA, 15 bp, Homo sapiens
gttacgttccattgc

SEQ ID NO: 935419 - DNA, 15 bp, Homo sapiens
ttacgttccattgca

SEQ ID NO: 935420 - DNA, 15 bp, Homo sapiens
tacgttccattgcat

SEQ ID NO: 935421 - DNA, 15 bp, Homo sapiens
acgttccattgcatt

SEQ ID NO: 935422 - DNA, 15 bp, Homo sapiens
cgttccattgcattg

SEQ ID NO: 935423 - DNA, 15 bp, Homo sapiens
gttccattgcattgc

SEQ ID NO: 935424 - DNA, 15 bp, Homo sapiens
ttccattgcattgcc

SEQ ID NO: 935425 - DNA, 15 bp, Homo sapiens
tccattgcattgccc

SEQ ID NO: 935426 - DNA, 15 bp, Homo sapiens
ccattgcattgccct

SEQ ID NO: 935427 - DNA, 15 bp, Homo sapiens
cattgcattgccctg

SEQ ID NO: 935428 - DNA, 15 bp, Homo sapiens
attgcattgccctgt

SEQ ID NO: 935429 - DNA, 15 bp, Homo sapiens
ttgcattgccctgta

SEQ ID NO: 935430 - DNA, 15 bp, Homo sapiens
tgcattgccctgtat

SEQ ID NO: 935431 - DNA, 15 bp, Homo sapiens
gcattgccctgtatg

SEQ ID NO: 935432 - DNA, 15 bp, Homo sapiens
cattgccctgtatgc

SEQ ID NO: 935433 - DNA, 15 bp, Homo sapiens
attgccctgtatgca

SEQ ID NO: 935434 - DNA, 15 bp, Homo sapiens
ttgccctgtatgcag

SEQ ID NO: 935435 - DNA, 15 bp, Homo sapiens
tgccctgtatgcagg

SEQ ID NO: 935436 - DNA, 15 bp, Homo sapiens
gccctgtatgcaggt

SEQ ID NO: 935437 - DNA, 15 bp, Homo sapiens
ccctgtatgcaggta

SEQ ID NO: 935438 - DNA, 15 bp, Homo sapiens
cctgtatgcaggtaa

SEQ ID NO: 935439 - DNA, 15 bp, Homo sapiens
ctgtatgcaggtaaa

SEQ ID NO: 935440 - DNA, 15 bp, Homo sapiens
tgtatgcaggtaaaa

SEQ ID NO: 935441 - DNA, 15 bp, Homo sapiens
gtatgcaggtaaaaa

SEQ ID NO: 935442 - DNA, 15 bp, Homo sapiens
tatgcaggtaaaaac

SEQ ID NO: 935443 - DNA, 15 bp, Homo sapiens
atgcaggtaaaaacc

SEQ ID NO: 935444 - DNA, 15 bp, Homo sapiens
tgcaggtaaaaaccc

SEQ ID NO: 935445 - DNA, 15 bp, Homo sapiens
gcaggtaaaaaccca

SEQ ID NO: 935446 - DNA, 15 bp, Homo sapiens
caggtaaaaacccaa

SEQ ID NO: 935447 - DNA, 15 bp, Homo sapiens
aggtaaaaacccaac

SEQ ID NO: 935448 - DNA, 15 bp, Homo sapiens
ggtaaaaacccaacc

SEQ ID NO: 935449 - DNA, 15 bp, Homo sapiens
gtaaaaacccaacca

SEQ ID NO: 935450 - DNA, 15 bp, Homo sapiens
taaaaacccaaccaa

SEQ ID NO: 935451 - DNA, 15 bp, Homo sapiens
aaaaacccaaccaaa

SEQ ID NO: 935452 - DNA, 15 bp, Homo sapiens
aaaacccaaccaaac

SEQ ID NO: 935453 - DNA, 15 bp, Homo sapiens
aaacccaaccaaaca

SEQ ID NO: 935454 - DNA, 15 bp, Homo sapiens
aacccaaccaaacaa

SEQ ID NO: 935455 - DNA, 15 bp, Homo sapiens
acccaaccaaacaag

SEQ ID NO: 935456 - DNA, 15 bp, Homo sapiens
cccaaccaaacaaga

SEQ ID NO: 935457 - DNA, 15 bp, Homo sapiens
ccaaccaaacaagaa

SEQ ID NO: 935458 - DNA, 15 bp, Homo sapiens
caaccaaacaagaaa

SEQ ID NO: 935459 - DNA, 15 bp, Homo sapiens
aaccaaacaagaaaa

SEQ ID NO: 935460 - DNA, 15 bp, Homo sapiens
accaaacaagaaaat

SEQ ID NO: 935461 - DNA, 15 bp, Homo sapiens
ccaaacaagaaaatc

SEQ ID NO: 935462 - DNA, 15 bp, Homo sapiens
caaacaagaaaatct

SEQ ID NO: 935463 - DNA, 15 bp, Homo sapiens
aaacaagaaaatctt

SEQ ID NO: 935464 - DNA, 15 bp, Homo sapiens
aacaagaaaatctta

SEQ ID NO: 935465 - DNA, 15 bp, Homo sapiens
acaagaaaatcttac

SEQ ID NO: 935466 - DNA, 15 bp, Homo sapiens
caagaaaatcttacc

SEQ ID NO: 935467 - DNA, 15 bp, Homo sapiens
aagaaaatcttacca

SEQ ID NO: 935468 - DNA, 15 bp, Homo sapiens
agaaaatcttaccaa

SEQ ID NO: 935469 - DNA, 15 bp, Homo sapiens
gaaaatcttaccaag

SEQ ID NO: 935470 - DNA, 15 bp, Homo sapiens
aaaatcttaccaagt

SEQ ID NO: 935471 - DNA, 15 bp, Homo sapiens
aaatcttaccaagtc

SEQ ID NO: 935472 - DNA, 15 bp, Homo sapiens
aatcttaccaagtcc

SEQ ID NO: 935473 - DNA, 15 bp, Homo sapiens
atcttaccaagtccc

SEQ ID NO: 935474 - DNA, 15 bp, Homo sapiens
tcttaccaagtccct

SEQ ID NO: 935475 - DNA, 15 bp, Homo sapiens
cttaccaagtccctg

SEQ ID NO: 935476 - DNA, 15 bp, Homo sapiens
ttaccaagtccctga

SEQ ID NO: 935477 - DNA, 15 bp, Homo sapiens
taccaagtccctgag

SEQ ID NO: 935478 - DNA, 15 bp, Homo sapiens
accaagtccctgagt

SEQ ID NO: 935479 - DNA, 15 bp, Homo sapiens
ccaagtccctgagtt

SEQ ID NO: 935480 - DNA, 15 bp, Homo sapiens
caagtccctgagttt

SEQ ID NO: 935481 - DNA, 15 bp, Homo sapiens
aagtccctgagtttt

SEQ ID NO: 935482 - DNA, 15 bp, Homo sapiens
agtccctgagttttt

SEQ ID NO: 935483 - DNA, 15 bp, Homo sapiens
gtccctgagtttttt

SEQ ID NO: 935484 - DNA, 15 bp, Homo sapiens
tccctgagttttttt

SEQ ID NO: 935485 - DNA, 15 bp, Homo sapiens
ccctgagtttttttc

SEQ ID NO: 935486 - DNA, 15 bp, Homo sapiens
cctgagtttttttct

SEQ ID NO: 935487 - DNA, 15 bp, Homo sapiens
ctgagtttttttctg

SEQ ID NO: 935488 - DNA, 15 bp, Homo sapiens
tgagtttttttctgt

SEQ ID NO: 935489 - DNA, 15 bp, Homo sapiens
gagtttttttctgtc

SEQ ID NO: 935490 - DNA, 15 bp, Homo sapiens
agtttttttctgtct

SEQ ID NO: 935491 - DNA, 15 bp, Homo sapiens
gtttttttctgtctg

SEQ ID NO: 935492 - DNA, 15 bp, Homo sapiens
tttttttctgtctgt

SEQ ID NO: 935493 - DNA, 15 bp, Homo sapiens
ttttttctgtctgtc

SEQ ID NO: 935494 - DNA, 15 bp, Homo sapiens
tttttctgtctgtct

SEQ ID NO: 935495 - DNA, 15 bp, Homo sapiens
ttttctgtctgtcta

SEQ ID NO: 935496 - DNA, 15 bp, Homo sapiens
tttctgtctgtctat

SEQ ID NO: 935497 - DNA, 15 bp, Homo sapiens
ttctgtctgtctatc

SEQ ID NO: 935498 - DNA, 15 bp, Homo sapiens
tctgtctgtctatct

SEQ ID NO: 935499 - DNA, 15 bp, Homo sapiens
ctgtctgtctatctc

SEQ ID NO: 935500 - DNA, 15 bp, Homo sapiens
tgtctgtctatctct

SEQ ID NO: 935501 - DNA, 15 bp, Homo sapiens
gtctgtctatctctg

SEQ ID NO: 935502 - DNA, 15 bp, Homo sapiens
tctgtctatctctgt

SEQ ID NO: 935503 - DNA, 15 bp, Homo sapiens
ctgtctatctctgta

SEQ ID NO: 935504 - DNA, 15 bp, Homo sapiens
tgtctatctctgtat

SEQ ID NO: 935505 - DNA, 15 bp, Homo sapiens
gtctatctctgtatg

SEQ ID NO: 935506 - DNA, 15 bp, Homo sapiens
tctatctctgtatgt

SEQ ID NO: 935507 - DNA, 15 bp, Homo sapiens
ctatctctgtatgta

SEQ ID NO: 935508 - DNA, 15 bp, Homo sapiens
tatctctgtatgtat

SEQ ID NO: 935509 - DNA, 15 bp, Homo sapiens
atctctgtatgtatg

SEQ ID NO: 935510 - DNA, 15 bp, Homo sapiens
tctctgtatgtatgc

SEQ ID NO: 935511 - DNA, 15 bp, Homo sapiens
ctctgtatgtatgca

SEQ ID NO: 935512 - DNA, 15 bp, Homo sapiens
tctgtatgtatgcat

SEQ ID NO: 935513 - DNA, 15 bp, Homo sapiens
ctgtatgtatgcatg

SEQ ID NO: 935514 - DNA, 15 bp, Homo sapiens
tgtatgtatgcatgt

SEQ ID NO: 935515 - DNA, 15 bp, Homo sapiens
gtatgtatgcatgtg

SEQ ID NO: 935516 - DNA, 15 bp, Homo sapiens
tatgtatgcatgtgt

SEQ ID NO: 935517 - DNA, 15 bp, Homo sapiens
atgtatgcatgtgtc

SEQ ID NO: 935518 - DNA, 15 bp, Homo sapiens
tgtatgcatgtgtct

SEQ ID NO: 935519 - DNA, 15 bp, Homo sapiens
gtatgcatgtgtcta

SEQ ID NO: 935520 - DNA, 15 bp, Homo sapiens
tatgcatgtgtctag

SEQ ID NO: 935521 - DNA, 15 bp, Homo sapiens
atgcatgtgtctagc

SEQ ID NO: 935522 - DNA, 15 bp, Homo sapiens
tgcatgtgtctagct

SEQ ID NO: 935523 - DNA, 15 bp, Homo sapiens
gcatgtgtctagcta

SEQ ID NO: 935524 - DNA, 15 bp, Homo sapiens
catgtgtctagctag

SEQ ID NO: 935525 - DNA, 15 bp, Homo sapiens
atgtgtctagctagc

SEQ ID NO: 935526 - DNA, 15 bp, Homo sapiens
tgtgtctagctagct

SEQ ID NO: 935527 - DNA, 15 bp, Homo sapiens
gtgtctagctagcta

SEQ ID NO: 935528 - DNA, 15 bp, Homo sapiens
tgtctagctagctag

SEQ ID NO: 935529 - DNA, 15 bp, Homo sapiens
gtctagctagctagc

SEQ ID NO: 935530 - DNA, 15 bp, Homo sapiens
tctagctagctagct

SEQ ID NO: 935531 - DNA, 15 bp, Homo sapiens
ctagctagctagcta

SEQ ID NO: 935532 - DNA, 15 bp, Homo sapiens
tagctagctagctaa

SEQ ID NO: 935533 - DNA, 15 bp, Homo sapiens
agctagctagctaat

SEQ ID NO: 935534 - DNA, 15 bp, Homo sapiens
gctagctagctaatc

SEQ ID NO: 935535 - DNA, 15 bp, Homo sapiens
ctagctagctaatct

SEQ ID NO: 935536 - DNA, 15 bp, Homo sapiens
tagctagctaatctt

SEQ ID NO: 935537 - DNA, 15 bp, Homo sapiens
agctagctaatcttc

SEQ ID NO: 935538 - DNA, 15 bp, Homo sapiens
gctagctaatcttcc

SEQ ID NO: 935539 - DNA, 15 bp, Homo sapiens
ctagctaatcttcct

SEQ ID NO: 935540 - DNA, 15 bp, Homo sapiens
tagctaatcttcctc

SEQ ID NO: 935541 - DNA, 15 bp, Homo sapiens
agctaatcttcctct

SEQ ID NO: 935542 - DNA, 15 bp, Homo sapiens
gctaatcttcctctc

SEQ ID NO: 935543 - DNA, 15 bp, Homo sapiens
ctaatcttcctctca

SEQ ID NO: 935544 - DNA, 15 bp, Homo sapiens
taatcttcctctcaa

SEQ ID NO: 935545 - DNA, 15 bp, Homo sapiens
aatcttcctctcaag

SEQ ID NO: 935546 - DNA, 15 bp, Homo sapiens
atcttcctctcaagg

SEQ ID NO: 935547 - DNA, 15 bp, Homo sapiens
tcttcctctcaagga

SEQ ID NO: 935548 - DNA, 15 bp, Homo sapiens
cttcctctcaaggac

SEQ ID NO: 935549 - DNA, 15 bp, Homo sapiens
ttcctctcaaggaca

SEQ ID NO: 935550 - DNA, 15 bp, Homo sapiens
tcctctcaaggacat

SEQ ID NO: 935551 - DNA, 15 bp, Homo sapiens
cctctcaaggacata

SEQ ID NO: 935552 - DNA, 15 bp, Homo sapiens
ctctcaaggacataa

SEQ ID NO: 935553 - DNA, 15 bp, Homo sapiens
tctcaaggacataaa

SEQ ID NO: 935554 - DNA, 15 bp, Homo sapiens
ctcaaggacataaac

SEQ ID NO: 935555 - DNA, 15 bp, Homo sapiens
tcaaggacataaact

SEQ ID NO: 935556 - DNA, 15 bp, Homo sapiens
caaggacataaactt

SEQ ID NO: 935557 - DNA, 15 bp, Homo sapiens
aaggacataaacttt

SEQ ID NO: 935558 - DNA, 15 bp, Homo sapiens
aggacataaactttt

SEQ ID NO: 935559 - DNA, 15 bp, Homo sapiens
ggacataaacttttt

SEQ ID NO: 935560 - DNA, 15 bp, Homo sapiens
gacataaactttttc

SEQ ID NO: 935561 - DNA, 15 bp, Homo sapiens
acataaactttttct

SEQ ID NO: 935562 - DNA, 15 bp, Homo sapiens
cataaactttttctc

SEQ ID NO: 935563 - DNA, 15 bp, Homo sapiens
ataaactttttctct

SEQ ID NO: 935564 - DNA, 15 bp, Homo sapiens
taaactttttctctc

SEQ ID NO: 935565 - DNA, 15 bp, Homo sapiens
aaactttttctctca

SEQ ID NO: 935566 - DNA, 15 bp, Homo sapiens
aactttttctctcag

SEQ ID NO: 935567 - DNA, 15 bp, Homo sapiens
actttttctctcaga

SEQ ID NO: 935568 - DNA, 15 bp, Homo sapiens
ctttttctctcagaa

SEQ ID NO: 935569 - DNA, 15 bp, Homo sapiens
tttttctctcagaag

SEQ ID NO: 935570 - DNA, 15 bp, Homo sapiens
ttttctctcagaagt

SEQ ID NO: 935571 - DNA, 15 bp, Homo sapiens
tttctctcagaagtt

SEQ ID NO: 935572 - DNA, 15 bp, Homo sapiens
ttctctcagaagtta

SEQ ID NO: 935573 - DNA, 15 bp, Homo sapiens
tctctcagaagttag

SEQ ID NO: 935574 - DNA, 15 bp, Homo sapiens
ctctcagaagttagg

SEQ ID NO: 935575 - DNA, 15 bp, Homo sapiens
tctcagaagttaggt

SEQ ID NO: 935576 - DNA, 15 bp, Homo sapiens
ctcagaagttaggta

SEQ ID NO: 935577 - DNA, 15 bp, Homo sapiens
tcagaagttaggtag

SEQ ID NO: 935578 - DNA, 15 bp, Homo sapiens
cagaagttaggtagg

SEQ ID NO: 935579 - DNA, 15 bp, Homo sapiens
agaagttaggtaggc

SEQ ID NO: 935580 - DNA, 15 bp, Homo sapiens
gaagttaggtaggcc

SEQ ID NO: 935581 - DNA, 15 bp, Homo sapiens
aagttaggtaggcct

SEQ ID NO: 935582 - DNA, 15 bp, Homo sapiens
agttaggtaggcctg

SEQ ID NO: 935583 - DNA, 15 bp, Homo sapiens
gttaggtaggcctgc

SEQ ID NO: 935584 - DNA, 15 bp, Homo sapiens
ttaggtaggcctgcc

SEQ ID NO: 935585 - DNA, 15 bp, Homo sapiens
taggtaggcctgcct

SEQ ID NO: 935586 - DNA, 15 bp, Homo sapiens
aggtaggcctgccta

SEQ ID NO: 935587 - DNA, 15 bp, Homo sapiens
ggtaggcctgcctat

SEQ ID NO: 935588 - DNA, 15 bp, Homo sapiens
gtaggcctgcctata

SEQ ID NO: 935589 - DNA, 15 bp, Homo sapiens
taggcctgcctataa

SEQ ID NO: 935590 - DNA, 15 bp, Homo sapiens
aggcctgcctataag

SEQ ID NO: 935591 - DNA, 15 bp, Homo sapiens
ggcctgcctataaga

SEQ ID NO: 935592 - DNA, 15 bp, Homo sapiens
gcctgcctataagat

SEQ ID NO: 935593 - DNA, 15 bp, Homo sapiens
cctgcctataagatc

SEQ ID NO: 935594 - DNA, 15 bp, Homo sapiens
ctgcctataagatca

SEQ ID NO: 935595 - DNA, 15 bp, Homo sapiens
tgcctataagatcaa

SEQ ID NO: 935596 - DNA, 15 bp, Homo sapiens
gcctataagatcaaa

SEQ ID NO: 935597 - DNA, 15 bp, Homo sapiens
cctataagatcaaaa

SEQ ID NO: 935598 - DNA, 15 bp, Homo sapiens
ctataagatcaaaat

SEQ ID NO: 935599 - DNA, 15 bp, Homo sapiens
tataagatcaaaatc

SEQ ID NO: 935600 - DNA, 15 bp, Homo sapiens
ataagatcaaaatca

SEQ ID NO: 935601 - DNA, 15 bp, Homo sapiens
taagatcaaaatcat

SEQ ID NO: 935602 - DNA, 15 bp, Homo sapiens
aagatcaaaatcatt

SEQ ID NO: 935603 - DNA, 15 bp, Homo sapiens
agatcaaaatcattt

SEQ ID NO: 935604 - DNA, 15 bp, Homo sapiens
gatcaaaatcatttc

SEQ ID NO: 935605 - DNA, 15 bp, Homo sapiens
atcaaaatcatttcc

SEQ ID NO: 935606 - DNA, 15 bp, Homo sapiens
tcaaaatcatttcct

SEQ ID NO: 935607 - DNA, 15 bp, Homo sapiens
caaaatcatttcctt

SEQ ID NO: 935608 - DNA, 15 bp, Homo sapiens
aaaatcatttccttc

SEQ ID NO: 935609 - DNA, 15 bp, Homo sapiens
aaatcatttccttcg

SEQ ID NO: 935610 - DNA, 15 bp, Homo sapiens
aatcatttccttcgt

SEQ ID NO: 935611 - DNA, 15 bp, Homo sapiens
atcatttccttcgtg

SEQ ID NO: 935612 - DNA, 15 bp, Homo sapiens
tcatttccttcgtgt

SEQ ID NO: 935613 - DNA, 15 bp, Homo sapiens
catttccttcgtgtt

SEQ ID NO: 935614 - DNA, 15 bp, Homo sapiens
atttccttcgtgttc

SEQ ID NO: 935615 - DNA, 15 bp, Homo sapiens
tttccttcgtgttcc

SEQ ID NO: 935616 - DNA, 15 bp, Homo sapiens
ttccttcgtgttccc

SEQ ID NO: 935617 - DNA, 15 bp, Homo sapiens
tccttcgtgttcccc

SEQ ID NO: 935618 - DNA, 15 bp, Homo sapiens
ccttcgtgttccccc

SEQ ID NO: 935619 - DNA, 15 bp, Homo sapiens
cttcgtgttccccca

SEQ ID NO: 935620 - DNA, 15 bp, Homo sapiens
ttcgtgttcccccac

SEQ ID NO: 935621 - DNA, 15 bp, Homo sapiens
tcgtgttcccccact

SEQ ID NO: 935622 - DNA, 15 bp, Homo sapiens
cgtgttcccccactc

SEQ ID NO: 935623 - DNA, 15 bp, Homo sapiens
gtgttcccccactct

SEQ ID NO: 935624 - DNA, 15 bp, Homo sapiens
tgttcccccactctg

SEQ ID NO: 935625 - DNA, 15 bp, Homo sapiens
gttcccccactctgg

SEQ ID NO: 935626 - DNA, 15 bp, Homo sapiens
ttcccccactctgga

SEQ ID NO: 935627 - DNA, 15 bp, Homo sapiens
tcccccactctggaa

SEQ ID NO: 935628 - DNA, 15 bp, Homo sapiens
cccccactctggaat

SEQ ID NO: 935629 - DNA, 15 bp, Homo sapiens
ccccactctggaatc

SEQ ID NO: 935630 - DNA, 15 bp, Homo sapiens
cccactctggaatca

SEQ ID NO: 935631 - DNA, 15 bp, Homo sapiens
ccactctggaatcag

SEQ ID NO: 935632 - DNA, 15 bp, Homo sapiens
cactctggaatcaga

SEQ ID NO: 935633 - DNA, 15 bp, Homo sapiens
actctggaatcagaa

SEQ ID NO: 935634 - DNA, 15 bp, Homo sapiens
ctctggaatcagaag

SEQ ID NO: 935635 - DNA, 15 bp, Homo sapiens
tctggaatcagaaga

SEQ ID NO: 935636 - DNA, 15 bp, Homo sapiens
ctggaatcagaagat

SEQ ID NO: 935637 - DNA, 15 bp, Homo sapiens
tggaatcagaagatc

SEQ ID NO: 935638 - DNA, 15 bp, Homo sapiens
ggaatcagaagatct

SEQ ID NO: 935639 - DNA, 15 bp, Homo sapiens
gaatcagaagatctg

SEQ ID NO: 935640 - DNA, 15 bp, Homo sapiens
aatcagaagatctga

SEQ ID NO: 935641 - DNA, 15 bp, Homo sapiens
atcagaagatctgag

SEQ ID NO: 935642 - DNA, 15 bp, Homo sapiens
tcagaagatctgagt

SEQ ID NO: 935643 - DNA, 15 bp, Homo sapiens
cagaagatctgagtt

SEQ ID NO: 935644 - DNA, 15 bp, Homo sapiens
agaagatctgagtta

SEQ ID NO: 935645 - DNA, 15 bp, Homo sapiens
gaagatctgagttaa

SEQ ID NO: 935646 - DNA, 15 bp, Homo sapiens
aagatctgagttaaa

SEQ ID NO: 935647 - DNA, 15 bp, Homo sapiens
agatctgagttaaag

SEQ ID NO: 935648 - DNA, 15 bp, Homo sapiens
gatctgagttaaagc

SEQ ID NO: 935649 - DNA, 15 bp, Homo sapiens
atctgagttaaagcc

SEQ ID NO: 935650 - DNA, 15 bp, Homo sapiens
tctgagttaaagcca

SEQ ID NO: 935651 - DNA, 15 bp, Homo sapiens
ctgagttaaagccag

SEQ ID NO: 935652 - DNA, 15 bp, Homo sapiens
tgagttaaagccagt

SEQ ID NO: 935653 - DNA, 15 bp, Homo sapiens
gagttaaagccagta

SEQ ID NO: 935654 - DNA, 15 bp, Homo sapiens
agttaaagccagtat

SEQ ID NO: 935655 - DNA, 15 bp, Homo sapiens
gttaaagccagtatg

SEQ ID NO: 935656 - DNA, 15 bp, Homo sapiens
ttaaagccagtatgg

SEQ ID NO: 935657 - DNA, 15 bp, Homo sapiens
taaagccagtatggc

SEQ ID NO: 935658 - DNA, 15 bp, Homo sapiens
aaagccagtatggca

SEQ ID NO: 935659 - DNA, 15 bp, Homo sapiens
aagccagtatggcac

SEQ ID NO: 935660 - DNA, 15 bp, Homo sapiens
agccagtatggcact

SEQ ID NO: 935661 - DNA, 15 bp, Homo sapiens
gccagtatggcacta

SEQ ID NO: 935662 - DNA, 15 bp, Homo sapiens
ccagtatggcactaa

SEQ ID NO: 935663 - DNA, 15 bp, Homo sapiens
cagtatggcactaaa

SEQ ID NO: 935664 - DNA, 15 bp, Homo sapiens
agtatggcactaaat

SEQ ID NO: 935665 - DNA, 15 bp, Homo sapiens
gtatggcactaaatg

SEQ ID NO: 935666 - DNA, 15 bp, Homo sapiens
tatggcactaaatga

SEQ ID NO: 935667 - DNA, 15 bp, Homo sapiens
atggcactaaatgac

SEQ ID NO: 935668 - DNA, 15 bp, Homo sapiens
tggcactaaatgaca

SEQ ID NO: 935669 - DNA, 15 bp, Homo sapiens
ggcactaaatgacag

SEQ ID NO: 935670 - DNA, 15 bp, Homo sapiens
gcactaaatgacagt

SEQ ID NO: 935671 - DNA, 15 bp, Homo sapiens
cactaaatgacagtg

SEQ ID NO: 935672 - DNA, 15 bp, Homo sapiens
actaaatgacagtgt

SEQ ID NO: 935673 - DNA, 15 bp, Homo sapiens
ctaaatgacagtgtt

SEQ ID NO: 935674 - DNA, 15 bp, Homo sapiens
taaatgacagtgtta

SEQ ID NO: 935675 - DNA, 15 bp, Homo sapiens
aaatgacagtgttac

SEQ ID NO: 935676 - DNA, 15 bp, Homo sapiens
aatgacagtgttacc

SEQ ID NO: 935677 - DNA, 15 bp, Homo sapiens
atgacagtgttaccc

SEQ ID NO: 935678 - DNA, 15 bp, Homo sapiens
tgacagtgttaccca

SEQ ID NO: 935679 - DNA, 15 bp, Homo sapiens
gacagtgttacccaa

SEQ ID NO: 935680 - DNA, 15 bp, Homo sapiens
acagtgttacccaag

SEQ ID NO: 935681 - DNA, 15 bp, Homo sapiens
cagtgttacccaaga

SEQ ID NO: 935682 - DNA, 15 bp, Homo sapiens
agtgttacccaagac

SEQ ID NO: 935683 - DNA, 15 bp, Homo sapiens
gtgttacccaagaca

SEQ ID NO: 935684 - DNA, 15 bp, Homo sapiens
tgttacccaagacaa

SEQ ID NO: 935685 - DNA, 15 bp, Homo sapiens
gttacccaagacaag

SEQ ID NO: 935686 - DNA, 15 bp, Homo sapiens
ttacccaagacaagt

SEQ ID NO: 935687 - DNA, 15 bp, Homo sapiens
tacccaagacaagtc

SEQ ID NO: 935688 - DNA, 15 bp, Homo sapiens
acccaagacaagtca

SEQ ID NO: 935689 - DNA, 15 bp, Homo sapiens
cccaagacaagtcat

SEQ ID NO: 935690 - DNA, 15 bp, Homo sapiens
ccaagacaagtcatt

SEQ ID NO: 935691 - DNA, 15 bp, Homo sapiens
caagacaagtcattt

SEQ ID NO: 935692 - DNA, 15 bp, Homo sapiens
aagacaagtcatttt

SEQ ID NO: 935693 - DNA, 15 bp, Homo sapiens
agacaagtcattttg

SEQ ID NO: 935694 - DNA, 15 bp, Homo sapiens
gacaagtcattttgt

SEQ ID NO: 935695 - DNA, 15 bp, Homo sapiens
acaagtcattttgtc

SEQ ID NO: 935696 - DNA, 15 bp, Homo sapiens
caagtcattttgtct

SEQ ID NO: 935697 - DNA, 15 bp, Homo sapiens
aagtcattttgtctt

SEQ ID NO: 935698 - DNA, 15 bp, Homo sapiens
agtcattttgtcttt

SEQ ID NO: 935699 - DNA, 15 bp, Homo sapiens
gtcattttgtctttc

SEQ ID NO: 935700 - DNA, 15 bp, Homo sapiens
tcattttgtctttct

SEQ ID NO: 935701 - DNA, 15 bp, Homo sapiens
cattttgtctttctg

SEQ ID NO: 935702 - DNA, 15 bp, Homo sapiens
attttgtctttctgg

SEQ ID NO: 935703 - DNA, 15 bp, Homo sapiens
ttttgtctttctggg

SEQ ID NO: 935704 - DNA, 15 bp, Homo sapiens
tttgtctttctggga

SEQ ID NO: 935705 - DNA, 15 bp, Homo sapiens
ttgtctttctgggac

SEQ ID NO: 935706 - DNA, 15 bp, Homo sapiens
tgtctttctgggact

SEQ ID NO: 935707 - DNA, 15 bp, Homo sapiens
gtctttctgggactc

SEQ ID NO: 935708 - DNA, 15 bp, Homo sapiens
tctttctgggactca

SEQ ID NO: 935709 - DNA, 15 bp, Homo sapiens
ctttctgggactcag

SEQ ID NO: 935710 - DNA, 15 bp, Homo sapiens
tttctgggactcagt

SEQ ID NO: 935711 - DNA, 15 bp, Homo sapiens
ttctgggactcagtt

SEQ ID NO: 935712 - DNA, 15 bp, Homo sapiens
tctgggactcagttt

SEQ ID NO: 935713 - DNA, 15 bp, Homo sapiens
ctgggactcagtttc

SEQ ID NO: 935714 - DNA, 15 bp, Homo sapiens
tgggactcagtttct

SEQ ID NO: 935715 - DNA, 15 bp, Homo sapiens
gggactcagtttctt

SEQ ID NO: 935716 - DNA, 15 bp, Homo sapiens
ggactcagtttcttg

SEQ ID NO: 935717 - DNA, 15 bp, Homo sapiens
gactcagtttcttgg

SEQ ID NO: 935718 - DNA, 15 bp, Homo sapiens
actcagtttcttggt

SEQ ID NO: 935719 - DNA, 15 bp, Homo sapiens
ctcagtttcttggtt

SEQ ID NO: 935720 - DNA, 15 bp, Homo sapiens
tcagtttcttggttt

SEQ ID NO: 935721 - DNA, 15 bp, Homo sapiens
cagtttcttggtttg

SEQ ID NO: 935722 - DNA, 15 bp, Homo sapiens
agtttcttggtttga

SEQ ID NO: 935723 - DNA, 15 bp, Homo sapiens
gtttcttggtttgat

SEQ ID NO: 935724 - DNA, 15 bp, Homo sapiens
tttcttggtttgata

SEQ ID NO: 935725 - DNA, 15 bp, Homo sapiens
ttcttggtttgatat

SEQ ID NO: 935726 - DNA, 15 bp, Homo sapiens
tcttggtttgatatc

SEQ ID NO: 935727 - DNA, 15 bp, Homo sapiens
cttggtttgatatca

SEQ ID NO: 935728 - DNA, 15 bp, Homo sapiens
ttggtttgatatcag

SEQ ID NO: 935729 - DNA, 15 bp, Homo sapiens
tggtttgatatcaga

SEQ ID NO: 935730 - DNA, 15 bp, Homo sapiens
ggtttgatatcagaa

SEQ ID NO: 935731 - DNA, 15 bp, Homo sapiens
gtttgatatcagaag

SEQ ID NO: 935732 - DNA, 15 bp, Homo sapiens
tttgatatcagaagt

SEQ ID NO: 935733 - DNA, 15 bp, Homo sapiens
ttgatatcagaagtg

SEQ ID NO: 935734 - DNA, 15 bp, Homo sapiens
tgatatcagaagtgg

SEQ ID NO: 935735 - DNA, 15 bp, Homo sapiens
gatatcagaagtggc

SEQ ID NO: 935736 - DNA, 15 bp, Homo sapiens
atatcagaagtggca

SEQ ID NO: 935737 - DNA, 15 bp, Homo sapiens
tatcagaagtggcat

SEQ ID NO: 935738 - DNA, 15 bp, Homo sapiens
atcagaagtggcata

SEQ ID NO: 935739 - DNA, 15 bp, Homo sapiens
tcagaagtggcatag

SEQ ID NO: 935740 - DNA, 15 bp, Homo sapiens
cagaagtggcataga

SEQ ID NO: 935741 - DNA, 15 bp, Homo sapiens
agaagtggcatagat

SEQ ID NO: 935742 - DNA, 15 bp, Homo sapiens
gaagtggcatagatt

SEQ ID NO: 935743 - DNA, 15 bp, Homo sapiens
aagtggcatagatta

SEQ ID NO: 935744 - DNA, 15 bp, Homo sapiens
agtggcatagattag

SEQ ID NO: 935745 - DNA, 15 bp, Homo sapiens
gtggcatagattagg

SEQ ID NO: 935746 - DNA, 15 bp, Homo sapiens
tggcatagattaggt

SEQ ID NO: 935747 - DNA, 15 bp, Homo sapiens
ggcatagattaggtg

SEQ ID NO: 935748 - DNA, 15 bp, Homo sapiens
gcatagattaggtga

SEQ ID NO: 935749 - DNA, 15 bp, Homo sapiens
catagattaggtgag

SEQ ID NO: 935750 - DNA, 15 bp, Homo sapiens
atagattaggtgagc

SEQ ID NO: 935751 - DNA, 15 bp, Homo sapiens
tagattaggtgagct

SEQ ID NO: 935752 - DNA, 15 bp, Homo sapiens
agattaggtgagcta

SEQ ID NO: 935753 - DNA, 15 bp, Homo sapiens
gattaggtgagctat

SEQ ID NO: 935754 - DNA, 15 bp, Homo sapiens
attaggtgagctata

SEQ ID NO: 935755 - DNA, 15 bp, Homo sapiens
ttaggtgagctataa

SEQ ID NO: 935756 - DNA, 15 bp, Homo sapiens
taggtgagctataaa

SEQ ID NO: 935757 - DNA, 15 bp, Homo sapiens
aggtgagctataaat

SEQ ID NO: 935758 - DNA, 15 bp, Homo sapiens
ggtgagctataaatt

SEQ ID NO: 935759 - DNA, 15 bp, Homo sapiens
gtgagctataaattg

SEQ ID NO: 935760 - DNA, 15 bp, Homo sapiens
tgagctataaattgg

SEQ ID NO: 935761 - DNA, 15 bp, Homo sapiens
gagctataaattgga

SEQ ID NO: 935762 - DNA, 15 bp, Homo sapiens
agctataaattggaa

SEQ ID NO: 935763 - DNA, 15 bp, Homo sapiens
gctataaattggaat

SEQ ID NO: 935764 - DNA, 15 bp, Homo sapiens
ctataaattggaata

SEQ ID NO: 935765 - DNA, 15 bp, Homo sapiens
tataaattggaatac

SEQ ID NO: 935766 - DNA, 15 bp, Homo sapiens
ataaattggaataca

SEQ ID NO: 935767 - DNA, 15 bp, Homo sapiens
taaattggaatacac

SEQ ID NO: 935768 - DNA, 15 bp, Homo sapiens
aaattggaatacact

SEQ ID NO: 935769 - DNA, 15 bp, Homo sapiens
aattggaatacactg

SEQ ID NO: 935770 - DNA, 15 bp, Homo sapiens
attggaatacactgg

SEQ ID NO: 935771 - DNA, 15 bp, Homo sapiens
ttggaatacactggg

SEQ ID NO: 935772 - DNA, 15 bp, Homo sapiens
tggaatacactggga

SEQ ID NO: 935773 - DNA, 15 bp, Homo sapiens
ggaatacactgggag

SEQ ID NO: 935774 - DNA, 15 bp, Homo sapiens
gaatacactgggaga

SEQ ID NO: 935775 - DNA, 15 bp, Homo sapiens
aatacactgggagat

SEQ ID NO: 935776 - DNA, 15 bp, Homo sapiens
atacactgggagatt

SEQ ID NO: 935777 - DNA, 15 bp, Homo sapiens
tacactgggagattg

SEQ ID NO: 935778 - DNA, 15 bp, Homo sapiens
acactgggagattgc

SEQ ID NO: 935779 - DNA, 15 bp, Homo sapiens
cactgggagattgct

SEQ ID NO: 935780 - DNA, 15 bp, Homo sapiens
actgggagattgctc

SEQ ID NO: 935781 - DNA, 15 bp, Homo sapiens
ctgggagattgctct

SEQ ID NO: 935782 - DNA, 15 bp, Homo sapiens
tgggagattgctcta

SEQ ID NO: 935783 - DNA, 15 bp, Homo sapiens
gggagattgctctag

SEQ ID NO: 935784 - DNA, 15 bp, Homo sapiens
ggagattgctctaga

SEQ ID NO: 935785 - DNA, 15 bp, Homo sapiens
gagattgctctagac

SEQ ID NO: 935786 - DNA, 15 bp, Homo sapiens
agattgctctagacc

SEQ ID NO: 935787 - DNA, 15 bp, Homo sapiens
gattgctctagacca

SEQ ID NO: 935788 - DNA, 15 bp, Homo sapiens
attgctctagaccat

SEQ ID NO: 935789 - DNA, 15 bp, Homo sapiens
ttgctctagaccatg

SEQ ID NO: 935790 - DNA, 15 bp, Homo sapiens
tgctctagaccatgt

SEQ ID NO: 935791 - DNA, 15 bp, Homo sapiens
gctctagaccatgtg

SEQ ID NO: 935792 - DNA, 15 bp, Homo sapiens
ctctagaccatgtgt

SEQ ID NO: 935793 - DNA, 15 bp, Homo sapiens
tctagaccatgtgtt

SEQ ID NO: 935794 - DNA, 15 bp, Homo sapiens
ctagaccatgtgttg

SEQ ID NO: 935795 - DNA, 15 bp, Homo sapiens
tagaccatgtgttga

SEQ ID NO: 935796 - DNA, 15 bp, Homo sapiens
agaccatgtgttgag

SEQ ID NO: 935797 - DNA, 15 bp, Homo sapiens
gaccatgtgttgagt

SEQ ID NO: 935798 - DNA, 15 bp, Homo sapiens
accatgtgttgagtc

SEQ ID NO: 935799 - DNA, 15 bp, Homo sapiens
ccatgtgttgagtcg

SEQ ID NO: 935800 - DNA, 15 bp, Homo sapiens
catgtgttgagtcgg

SEQ ID NO: 935801 - DNA, 15 bp, Homo sapiens
atgtgttgagtcggg

SEQ ID NO: 935802 - DNA, 15 bp, Homo sapiens
tgtgttgagtcggga

SEQ ID NO: 935803 - DNA, 15 bp, Homo sapiens
gtgttgagtcgggat

SEQ ID NO: 935804 - DNA, 15 bp, Homo sapiens
tgttgagtcgggata

SEQ ID NO: 935805 - DNA, 15 bp, Homo sapiens
gttgagtcgggatag

SEQ ID NO: 935806 - DNA, 15 bp, Homo sapiens
ttgagtcgggataga

SEQ ID NO: 935807 - DNA, 15 bp, Homo sapiens
tgagtcgggatagag

SEQ ID NO: 935808 - DNA, 15 bp, Homo sapiens
gagtcgggatagagc

SEQ ID NO: 935809 - DNA, 15 bp, Homo sapiens
agtcgggatagagct

SEQ ID NO: 935810 - DNA, 15 bp, Homo sapiens
gtcgggatagagctg

SEQ ID NO: 935811 - DNA, 15 bp, Homo sapiens
tcgggatagagctgg

SEQ ID NO: 935812 - DNA, 15 bp, Homo sapiens
cgggatagagctggg

SEQ ID NO: 935813 - DNA, 15 bp, Homo sapiens
gggatagagctgggg

SEQ ID NO: 935814 - DNA, 15 bp, Homo sapiens
ggatagagctggggt

SEQ ID NO: 935815 - DNA, 15 bp, Homo sapiens
gatagagctggggtt

SEQ ID NO: 935816 - DNA, 15 bp, Homo sapiens
atagagctggggttt

SEQ ID NO: 935817 - DNA, 15 bp, Homo sapiens
tagagctggggttta

SEQ ID NO: 935818 - DNA, 15 bp, Homo sapiens
agagctggggtttag

SEQ ID NO: 935819 - DNA, 15 bp, Homo sapiens
gagctggggtttaga

SEQ ID NO: 935820 - DNA, 15 bp, Homo sapiens
agctggggtttagac

SEQ ID NO: 935821 - DNA, 15 bp, Homo sapiens
gctggggtttagaca

SEQ ID NO: 935822 - DNA, 15 bp, Homo sapiens
ctggggtttagacaa

SEQ ID NO: 935823 - DNA, 15 bp, Homo sapiens
tggggtttagacaaa

SEQ ID NO: 935824 - DNA, 15 bp, Homo sapiens
ggggtttagacaaat

SEQ ID NO: 935825 - DNA, 15 bp, Homo sapiens
gggtttagacaaatt

SEQ ID NO: 935826 - DNA, 15 bp, Homo sapiens
ggtttagacaaattc

SEQ ID NO: 935827 - DNA, 15 bp, Homo sapiens
gtttagacaaattcc

SEQ ID NO: 935828 - DNA, 15 bp, Homo sapiens
tttagacaaattccc

SEQ ID NO: 935829 - DNA, 15 bp, Homo sapiens
ttagacaaattccca

SEQ ID NO: 935830 - DNA, 15 bp, Homo sapiens
tagacaaattcccag

SEQ ID NO: 935831 - DNA, 15 bp, Homo sapiens
agacaaattcccagt

SEQ ID NO: 935832 - DNA, 15 bp, Homo sapiens
gacaaattcccagtt

SEQ ID NO: 935833 - DNA, 15 bp, Homo sapiens
acaaattcccagttt

SEQ ID NO: 935834 - DNA, 15 bp, Homo sapiens
caaattcccagtttc

SEQ ID NO: 935835 - DNA, 15 bp, Homo sapiens
aaattcccagtttct

SEQ ID NO: 935836 - DNA, 15 bp, Homo sapiens
aattcccagtttctt

SEQ ID NO: 935837 - DNA, 15 bp, Homo sapiens
attcccagtttcttt

SEQ ID NO: 935838 - DNA, 15 bp, Homo sapiens
ttcccagtttctttc

SEQ ID NO: 935839 - DNA, 15 bp, Homo sapiens
tcccagtttctttcc

SEQ ID NO: 935840 - DNA, 15 bp, Homo sapiens
cccagtttctttcca

SEQ ID NO: 935841 - DNA, 15 bp, Homo sapiens
ccagtttctttccac

SEQ ID NO: 935842 - DNA, 15 bp, Homo sapiens
cagtttctttccact

SEQ ID NO: 935843 - DNA, 15 bp, Homo sapiens
agtttctttccactg

SEQ ID NO: 935844 - DNA, 15 bp, Homo sapiens
gtttctttccactgc

SEQ ID NO: 935845 - DNA, 15 bp, Homo sapiens
tttctttccactgcc

SEQ ID NO: 935846 - DNA, 15 bp, Homo sapiens
ttctttccactgccc

SEQ ID NO: 935847 - DNA, 15 bp, Homo sapiens
tctttccactgcccc

SEQ ID NO: 935848 - DNA, 15 bp, Homo sapiens
ctttccactgcccca

SEQ ID NO: 935849 - DNA, 15 bp, Homo sapiens
tttccactgccccac

SEQ ID NO: 935850 - DNA, 15 bp, Homo sapiens
ttccactgccccaca

SEQ ID NO: 935851 - DNA, 15 bp, Homo sapiens
tccactgccccacac

SEQ ID NO: 935852 - DNA, 15 bp, Homo sapiens
ccactgccccacacc

SEQ ID NO: 935853 - DNA, 15 bp, Homo sapiens
cactgccccacacct

SEQ ID NO: 935854 - DNA, 15 bp, Homo sapiens
actgccccacacctt

SEQ ID NO: 935855 - DNA, 15 bp, Homo sapiens
ctgccccacaccttc

SEQ ID NO: 935856 - DNA, 15 bp, Homo sapiens
tgccccacaccttct

SEQ ID NO: 935857 - DNA, 15 bp, Homo sapiens
gccccacaccttctc

SEQ ID NO: 935858 - DNA, 15 bp, Homo sapiens
ccccacaccttctca

SEQ ID NO: 935859 - DNA, 15 bp, Homo sapiens
cccacaccttctcag

SEQ ID NO: 935860 - DNA, 15 bp, Homo sapiens
ccacaccttctcaga

SEQ ID NO: 935861 - DNA, 15 bp, Homo sapiens
cacaccttctcagaa

SEQ ID NO: 935862 - DNA, 15 bp, Homo sapiens
acaccttctcagaaa

SEQ ID NO: 935863 - DNA, 15 bp, Homo sapiens
caccttctcagaaag

SEQ ID NO: 935864 - DNA, 15 bp, Homo sapiens
accttctcagaaagt

SEQ ID NO: 935865 - DNA, 15 bp, Homo sapiens
ccttctcagaaagtc

SEQ ID NO: 935866 - DNA, 15 bp, Homo sapiens
cttctcagaaagtca

SEQ ID NO: 935867 - DNA, 15 bp, Homo sapiens
ttctcagaaagtcaa

SEQ ID NO: 935868 - DNA, 15 bp, Homo sapiens
tctcagaaagtcaaa

SEQ ID NO: 935869 - DNA, 15 bp, Homo sapiens
ctcagaaagtcaaat

SEQ ID NO: 935870 - DNA, 15 bp, Homo sapiens
tcagaaagtcaaatc

SEQ ID NO: 935871 - DNA, 15 bp, Homo sapiens
cagaaagtcaaatca

SEQ ID NO: 935872 - DNA, 15 bp, Homo sapiens
agaaagtcaaatcat

SEQ ID NO: 935873 - DNA, 15 bp, Homo sapiens
gaaagtcaaatcatg

SEQ ID NO: 935874 - DNA, 15 bp, Homo sapiens
aaagtcaaatcatga

SEQ ID NO: 935875 - DNA, 15 bp, Homo sapiens
aagtcaaatcatgaa

SEQ ID NO: 935876 - DNA, 15 bp, Homo sapiens
agtcaaatcatgaag

SEQ ID NO: 935877 - DNA, 15 bp, Homo sapiens
gtcaaatcatgaagc

SEQ ID NO: 935878 - DNA, 15 bp, Homo sapiens
tcaaatcatgaagca

SEQ ID NO: 935879 - DNA, 15 bp, Homo sapiens
caaatcatgaagcac

SEQ ID NO: 935880 - DNA, 15 bp, Homo sapiens
aaatcatgaagcact

SEQ ID NO: 935881 - DNA, 15 bp, Homo sapiens
aatcatgaagcactt

SEQ ID NO: 935882 - DNA, 15 bp, Homo sapiens
atcatgaagcacttt

SEQ ID NO: 935883 - DNA, 15 bp, Homo sapiens
tcatgaagcacttta

SEQ ID NO: 935884 - DNA, 15 bp, Homo sapiens
catgaagcactttag

SEQ ID NO: 935885 - DNA, 15 bp, Homo sapiens
atgaagcactttagc

SEQ ID NO: 935886 - DNA, 15 bp, Homo sapiens
tgaagcactttagca

SEQ ID NO: 935887 - DNA, 15 bp, Homo sapiens
gaagcactttagcat

SEQ ID NO: 935888 - DNA, 15 bp, Homo sapiens
aagcactttagcata

SEQ ID NO: 935889 - DNA, 15 bp, Homo sapiens
agcactttagcatac

SEQ ID NO: 935890 - DNA, 15 bp, Homo sapiens
gcactttagcatact

SEQ ID NO: 935891 - DNA, 15 bp, Homo sapiens
cactttagcatactt

SEQ ID NO: 935892 - DNA, 15 bp, Homo sapiens
actttagcatacttt

SEQ ID NO: 935893 - DNA, 15 bp, Homo sapiens
ctttagcatacttta

SEQ ID NO: 935894 - DNA, 15 bp, Homo sapiens
tttagcatactttag

SEQ ID NO: 935895 - DNA, 15 bp, Homo sapiens
ttagcatactttagt

SEQ ID NO: 935896 - DNA, 15 bp, Homo sapiens
tagcatactttagtc

SEQ ID NO: 935897 - DNA, 15 bp, Homo sapiens
agcatactttagtct

SEQ ID NO: 935898 - DNA, 15 bp, Homo sapiens
gcatactttagtctg

SEQ ID NO: 935899 - DNA, 15 bp, Homo sapiens
catactttagtctga

SEQ ID NO: 935900 - DNA, 15 bp, Homo sapiens
atactttagtctgat

SEQ ID NO: 935901 - DNA, 15 bp, Homo sapiens
tactttagtctgatt

SEQ ID NO: 935902 - DNA, 15 bp, Homo sapiens
actttagtctgattt

SEQ ID NO: 935903 - DNA, 15 bp, Homo sapiens
ctttagtctgatttt

SEQ ID NO: 935904 - DNA, 15 bp, Homo sapiens
gtctgattttttttc

SEQ ID NO: 935905 - DNA, 15 bp, Homo sapiens
tctgattttttttct

SEQ ID NO: 935906 - DNA, 15 bp, Homo sapiens
ctgattttttttctc

SEQ ID NO: 935907 - DNA, 15 bp, Homo sapiens
tgattttttttctct

SEQ ID NO: 935908 - DNA, 15 bp, Homo sapiens
gattttttttctcta

SEQ ID NO: 935909 - DNA, 15 bp, Homo sapiens
attttttttctctat

SEQ ID NO: 935910 - DNA, 15 bp, Homo sapiens
ttttttttctctata

SEQ ID NO: 935911 - DNA, 15 bp, Homo sapiens
tttttttctctatat

SEQ ID NO: 935912 - DNA, 15 bp, Homo sapiens
ttttttctctatatc

SEQ ID NO: 935913 - DNA, 15 bp, Homo sapiens
tttttctctatatcg

SEQ ID NO: 935914 - DNA, 15 bp, Homo sapiens
ttttctctatatcgt

SEQ ID NO: 935915 - DNA, 15 bp, Homo sapiens
tttctctatatcgta

SEQ ID NO: 935916 - DNA, 15 bp, Homo sapiens
ttctctatatcgtat

SEQ ID NO: 935917 - DNA, 15 bp, Homo sapiens
tctctatatcgtata

SEQ ID NO: 935918 - DNA, 15 bp, Homo sapiens
ctctatatcgtatat

SEQ ID NO: 935919 - DNA, 15 bp, Homo sapiens
tctatatcgtatatg

SEQ ID NO: 935920 - DNA, 15 bp, Homo sapiens
ctatatcgtatatgc

SEQ ID NO: 935921 - DNA, 15 bp, Homo sapiens
tatatcgtatatgca

SEQ ID NO: 935922 - DNA, 15 bp, Homo sapiens
atatcgtatatgcat

SEQ ID NO: 935923 - DNA, 15 bp, Homo sapiens
tatcgtatatgcatc

SEQ ID NO: 935924 - DNA, 15 bp, Homo sapiens
atcgtatatgcatct

SEQ ID NO: 935925 - DNA, 15 bp, Homo sapiens
tcgtatatgcatctt

SEQ ID NO: 935926 - DNA, 15 bp, Homo sapiens
cgtatatgcatctta

SEQ ID NO: 935927 - DNA, 15 bp, Homo sapiens
gtatatgcatcttac

SEQ ID NO: 935928 - DNA, 15 bp, Homo sapiens
tatatgcatcttact

SEQ ID NO: 935929 - DNA, 15 bp, Homo sapiens
atatgcatcttactg

SEQ ID NO: 935930 - DNA, 15 bp, Homo sapiens
tatgcatcttactga

SEQ ID NO: 935931 - DNA, 15 bp, Homo sapiens
atgcatcttactgac

SEQ ID NO: 935932 - DNA, 15 bp, Homo sapiens
tgcatcttactgacc

SEQ ID NO: 935933 - DNA, 15 bp, Homo sapiens
gcatcttactgacct

SEQ ID NO: 935934 - DNA, 15 bp, Homo sapiens
catcttactgaccta

SEQ ID NO: 935935 - DNA, 15 bp, Homo sapiens
atcttactgacctaa

SEQ ID NO: 935936 - DNA, 15 bp, Homo sapiens
tcttactgacctaag

SEQ ID NO: 935937 - DNA, 15 bp, Homo sapiens
cttactgacctaagc

SEQ ID NO: 935938 - DNA, 15 bp, Homo sapiens
ttactgacctaagca

SEQ ID NO: 935939 - DNA, 15 bp, Homo sapiens
tactgacctaagcaa

SEQ ID NO: 935940 - DNA, 15 bp, Homo sapiens
actgacctaagcaaa

SEQ ID NO: 935941 - DNA, 15 bp, Homo sapiens
ctgacctaagcaaat

SEQ ID NO: 935942 - DNA, 15 bp, Homo sapiens
tgacctaagcaaata

SEQ ID NO: 935943 - DNA, 15 bp, Homo sapiens
gacctaagcaaatat

SEQ ID NO: 935944 - DNA, 15 bp, Homo sapiens
acctaagcaaatata

SEQ ID NO: 935945 - DNA, 15 bp, Homo sapiens
cctaagcaaatatat

SEQ ID NO: 935946 - DNA, 15 bp, Homo sapiens
ctaagcaaatatatg

SEQ ID NO: 935947 - DNA, 15 bp, Homo sapiens
taagcaaatatatgg

SEQ ID NO: 935948 - DNA, 15 bp, Homo sapiens
aagcaaatatatggt

SEQ ID NO: 935949 - DNA, 15 bp, Homo sapiens
agcaaatatatggtc

SEQ ID NO: 935950 - DNA, 15 bp, Homo sapiens
gcaaatatatggtca

SEQ ID NO: 935951 - DNA, 15 bp, Homo sapiens
caaatatatggtcat

SEQ ID NO: 935952 - DNA, 15 bp, Homo sapiens
aaatatatggtcata

SEQ ID NO: 935953 - DNA, 15 bp, Homo sapiens
aatatatggtcatac

SEQ ID NO: 935954 - DNA, 15 bp, Homo sapiens
atatatggtcatacc

SEQ ID NO: 935955 - DNA, 15 bp, Homo sapiens
tatatggtcatacca

SEQ ID NO: 935956 - DNA, 15 bp, Homo sapiens
atatggtcataccaa

SEQ ID NO: 935957 - DNA, 15 bp, Homo sapiens
tatggtcataccaac

SEQ ID NO: 935958 - DNA, 15 bp, Homo sapiens
atggtcataccaaca

SEQ ID NO: 935959 - DNA, 15 bp, Homo sapiens
tggtcataccaacat

SEQ ID NO: 935960 - DNA, 15 bp, Homo sapiens
ggtcataccaacatc

SEQ ID NO: 935961 - DNA, 15 bp, Homo sapiens
gtcataccaacatca

SEQ ID NO: 935962 - DNA, 15 bp, Homo sapiens
tcataccaacatcag

SEQ ID NO: 935963 - DNA, 15 bp, Homo sapiens
cataccaacatcaga

SEQ ID NO: 935964 - DNA, 15 bp, Homo sapiens
ataccaacatcagag

SEQ ID NO: 935965 - DNA, 15 bp, Homo sapiens
taccaacatcagaga

SEQ ID NO: 935966 - DNA, 15 bp, Homo sapiens
accaacatcagagac

SEQ ID NO: 935967 - DNA, 15 bp, Homo sapiens
ccaacatcagagaca

SEQ ID NO: 935968 - DNA, 15 bp, Homo sapiens
caacatcagagacac

SEQ ID NO: 935969 - DNA, 15 bp, Homo sapiens
aacatcagagacaca

SEQ ID NO: 935970 - DNA, 15 bp, Homo sapiens
acatcagagacacaa

SEQ ID NO: 935971 - DNA, 15 bp, Homo sapiens
catcagagacacaaa

SEQ ID NO: 935972 - DNA, 15 bp, Homo sapiens
atcagagacacaaat

SEQ ID NO: 935973 - DNA, 15 bp, Homo sapiens
tcagagacacaaatc

SEQ ID NO: 935974 - DNA, 15 bp, Homo sapiens
cagagacacaaatct

SEQ ID NO: 935975 - DNA, 15 bp, Homo sapiens
agagacacaaatctc

SEQ ID NO: 935976 - DNA, 15 bp, Homo sapiens
gagacacaaatctct

SEQ ID NO: 935977 - DNA, 15 bp, Homo sapiens
agacacaaatctctg

SEQ ID NO: 935978 - DNA, 15 bp, Homo sapiens
gacacaaatctctgt

SEQ ID NO: 935979 - DNA, 15 bp, Homo sapiens
acacaaatctctgtc

SEQ ID NO: 935980 - DNA, 15 bp, Homo sapiens
cacaaatctctgtct

SEQ ID NO: 935981 - DNA, 15 bp, Homo sapiens
acaaatctctgtctc

SEQ ID NO: 935982 - DNA, 15 bp, Homo sapiens
caaatctctgtctca

SEQ ID NO: 935983 - DNA, 15 bp, Homo sapiens
aaatctctgtctcat

SEQ ID NO: 935984 - DNA, 15 bp, Homo sapiens
aatctctgtctcatt

SEQ ID NO: 935985 - DNA, 15 bp, Homo sapiens
atctctgtctcattc

SEQ ID NO: 935986 - DNA, 15 bp, Homo sapiens
tctctgtctcattct

SEQ ID NO: 935987 - DNA, 15 bp, Homo sapiens
ctctgtctcattcta

SEQ ID NO: 935988 - DNA, 15 bp, Homo sapiens
tctgtctcattctaa

SEQ ID NO: 935989 - DNA, 15 bp, Homo sapiens
ctgtctcattctaaa

SEQ ID NO: 935990 - DNA, 15 bp, Homo sapiens
tgtctcattctaaac

SEQ ID NO: 935991 - DNA, 15 bp, Homo sapiens
gtctcattctaaact

SEQ ID NO: 935992 - DNA, 15 bp, Homo sapiens
tctcattctaaactc

SEQ ID NO: 935993 - DNA, 15 bp, Homo sapiens
ctcattctaaactca

SEQ ID NO: 935994 - DNA, 15 bp, Homo sapiens
tcattctaaactcat

SEQ ID NO: 935995 - DNA, 15 bp, Homo sapiens
cattctaaactcata

SEQ ID NO: 935996 - DNA, 15 bp, Homo sapiens
attctaaactcatag

SEQ ID NO: 935997 - DNA, 15 bp, Homo sapiens
ttctaaactcatagt

SEQ ID NO: 935998 - DNA, 15 bp, Homo sapiens
tctaaactcatagtc

SEQ ID NO: 935999 - DNA, 15 bp, Homo sapiens
ctaaactcatagtcc

SEQ ID NO: 936000 - DNA, 15 bp, Homo sapiens
taaactcatagtcct

SEQ ID NO: 936001 - DNA, 15 bp, Homo sapiens
aaactcatagtcctg

SEQ ID NO: 936002 - DNA, 15 bp, Homo sapiens
aactcatagtcctgg

SEQ ID NO: 936003 - DNA, 15 bp, Homo sapiens
actcatagtcctgga

SEQ ID NO: 936004 - DNA, 15 bp, Homo sapiens
ctcatagtcctggat

SEQ ID NO: 936005 - DNA, 15 bp, Homo sapiens
tcatagtcctggatt

SEQ ID NO: 936006 - DNA, 15 bp, Homo sapiens
catagtcctggattt

SEQ ID NO: 936007 - DNA, 15 bp, Homo sapiens
atagtcctggatttg

SEQ ID NO: 936008 - DNA, 15 bp, Homo sapiens
tagtcctggatttgg

SEQ ID NO: 936009 - DNA, 15 bp, Homo sapiens
agtcctggatttgga

SEQ ID NO: 936010 - DNA, 15 bp, Homo sapiens
gtcctggatttggaa

SEQ ID NO: 936011 - DNA, 15 bp, Homo sapiens
tcctggatttggaag

SEQ ID NO: 936012 - DNA, 15 bp, Homo sapiens
cctggatttggaagc

SEQ ID NO: 936013 - DNA, 15 bp, Homo sapiens
ctggatttggaagcc

SEQ ID NO: 936014 - DNA, 15 bp, Homo sapiens
tggatttggaagccc

SEQ ID NO: 936015 - DNA, 15 bp, Homo sapiens
ggatttggaagccca

SEQ ID NO: 936016 - DNA, 15 bp, Homo sapiens
gatttggaagcccaa

SEQ ID NO: 936017 - DNA, 15 bp, Homo sapiens
atttggaagcccaag

SEQ ID NO: 936018 - DNA, 15 bp, Homo sapiens
tttggaagcccaagt

SEQ ID NO: 936019 - DNA, 15 bp, Homo sapiens
ttggaagcccaagtc

SEQ ID NO: 936020 - DNA, 15 bp, Homo sapiens
tggaagcccaagtct

SEQ ID NO: 936021 - DNA, 15 bp, Homo sapiens
ggaagcccaagtcta

SEQ ID NO: 936022 - DNA, 15 bp, Homo sapiens
gaagcccaagtctaa

SEQ ID NO: 936023 - DNA, 15 bp, Homo sapiens
aagcccaagtctaat

SEQ ID NO: 936024 - DNA, 15 bp, Homo sapiens
agcccaagtctaatg

SEQ ID NO: 936025 - DNA, 15 bp, Homo sapiens
gcccaagtctaatga

SEQ ID NO: 936026 - DNA, 15 bp, Homo sapiens
cccaagtctaatgag

SEQ ID NO: 936027 - DNA, 15 bp, Homo sapiens
ccaagtctaatgaga

SEQ ID NO: 936028 - DNA, 15 bp, Homo sapiens
caagtctaatgagat

SEQ ID NO: 936029 - DNA, 15 bp, Homo sapiens
aagtctaatgagatc

SEQ ID NO: 936030 - DNA, 15 bp, Homo sapiens
agtctaatgagatct

SEQ ID NO: 936031 - DNA, 15 bp, Homo sapiens
gtctaatgagatcta

SEQ ID NO: 936032 - DNA, 15 bp, Homo sapiens
tctaatgagatctat

SEQ ID NO: 936033 - DNA, 15 bp, Homo sapiens
ctaatgagatctatc

SEQ ID NO: 936034 - DNA, 15 bp, Homo sapiens
taatgagatctatcc

SEQ ID NO: 936035 - DNA, 15 bp, Homo sapiens
aatgagatctatccc

SEQ ID NO: 936036 - DNA, 15 bp, Homo sapiens
atgagatctatccca

SEQ ID NO: 936037 - DNA, 15 bp, Homo sapiens
tgagatctatcccat

SEQ ID NO: 936038 - DNA, 15 bp, Homo sapiens
gagatctatcccatc

SEQ ID NO: 936039 - DNA, 15 bp, Homo sapiens
agatctatcccatca

SEQ ID NO: 936040 - DNA, 15 bp, Homo sapiens
gatctatcccatcac

SEQ ID NO: 936041 - DNA, 15 bp, Homo sapiens
atctatcccatcaca

SEQ ID NO: 936042 - DNA, 15 bp, Homo sapiens
tctatcccatcacag

SEQ ID NO: 936043 - DNA, 15 bp, Homo sapiens
ctatcccatcacaga

SEQ ID NO: 936044 - DNA, 15 bp, Homo sapiens
tatcccatcacagaa

SEQ ID NO: 936045 - DNA, 15 bp, Homo sapiens
atcccatcacagaag

SEQ ID NO: 936046 - DNA, 15 bp, Homo sapiens
tcccatcacagaagc

SEQ ID NO: 936047 - DNA, 15 bp, Homo sapiens
cccatcacagaagca

SEQ ID NO: 936048 - DNA, 15 bp, Homo sapiens
ccatcacagaagcag

SEQ ID NO: 936049 - DNA, 15 bp, Homo sapiens
catcacagaagcagc

SEQ ID NO: 936050 - DNA, 15 bp, Homo sapiens
atcacagaagcagcc

SEQ ID NO: 936051 - DNA, 15 bp, Homo sapiens
tcacagaagcagcca

SEQ ID NO: 936052 - DNA, 15 bp, Homo sapiens
cacagaagcagccag

SEQ ID NO: 936053 - DNA, 15 bp, Homo sapiens
acagaagcagccaga

SEQ ID NO: 936054 - DNA, 15 bp, Homo sapiens
cagaagcagccagaa

SEQ ID NO: 936055 - DNA, 15 bp, Homo sapiens
agaagcagccagaag

SEQ ID NO: 936056 - DNA, 15 bp, Homo sapiens
gaagcagccagaaga

SEQ ID NO: 936057 - DNA, 15 bp, Homo sapiens
aagcagccagaagac

SEQ ID NO: 936058 - DNA, 15 bp, Homo sapiens
agcagccagaagacc

SEQ ID NO: 936059 - DNA, 15 bp, Homo sapiens
gcagccagaagaccc

SEQ ID NO: 936060 - DNA, 15 bp, Homo sapiens
cagccagaagacccc

SEQ ID NO: 936061 - DNA, 15 bp, Homo sapiens
agccagaagacccca

SEQ ID NO: 936062 - DNA, 15 bp, Homo sapiens
gccagaagaccccaa

SEQ ID NO: 936063 - DNA, 15 bp, Homo sapiens
ccagaagaccccaag

SEQ ID NO: 936064 - DNA, 15 bp, Homo sapiens
cagaagaccccaagt

SEQ ID NO: 936065 - DNA, 15 bp, Homo sapiens
agaagaccccaagtg

SEQ ID NO: 936066 - DNA, 15 bp, Homo sapiens
gaagaccccaagtgg

SEQ ID NO: 936067 - DNA, 15 bp, Homo sapiens
aagaccccaagtggc

SEQ ID NO: 936068 - DNA, 15 bp, Homo sapiens
agaccccaagtggct

SEQ ID NO: 936069 - DNA, 15 bp, Homo sapiens
gaccccaagtggcta

SEQ ID NO: 936070 - DNA, 15 bp, Homo sapiens
accccaagtggctat

SEQ ID NO: 936071 - DNA, 15 bp, Homo sapiens
ccccaagtggctata

SEQ ID NO: 936072 - DNA, 15 bp, Homo sapiens
cccaagtggctataa

SEQ ID NO: 936073 - DNA, 15 bp, Homo sapiens
ccaagtggctataag

SEQ ID NO: 936074 - DNA, 15 bp, Homo sapiens
caagtggctataaga

SEQ ID NO: 936075 - DNA, 15 bp, Homo sapiens
aagtggctataagat

SEQ ID NO: 936076 - DNA, 15 bp, Homo sapiens
agtggctataagatg

SEQ ID NO: 936077 - DNA, 15 bp, Homo sapiens
gtggctataagatgg

SEQ ID NO: 936078 - DNA, 15 bp, Homo sapiens
tggctataagatggg

SEQ ID NO: 936079 - DNA, 15 bp, Homo sapiens
ggctataagatgggg

SEQ ID NO: 936080 - DNA, 15 bp, Homo sapiens
gctataagatggggt

SEQ ID NO: 936081 - DNA, 15 bp, Homo sapiens
ctataagatggggtt

SEQ ID NO: 936082 - DNA, 15 bp, Homo sapiens
tataagatggggttt

SEQ ID NO: 936083 - DNA, 15 bp, Homo sapiens
ataagatggggttta

SEQ ID NO: 936084 - DNA, 15 bp, Homo sapiens
taagatggggtttaa

SEQ ID NO: 936085 - DNA, 15 bp, Homo sapiens
aagatggggtttaac

SEQ ID NO: 936086 - DNA, 15 bp, Homo sapiens
agatggggtttaaca

SEQ ID NO: 936087 - DNA, 15 bp, Homo sapiens
gatggggtttaacac

SEQ ID NO: 936088 - DNA, 15 bp, Homo sapiens
atggggtttaacaca

SEQ ID NO: 936089 - DNA, 15 bp, Homo sapiens
tggggtttaacacaa

SEQ ID NO: 936090 - DNA, 15 bp, Homo sapiens
ggggtttaacacaag

SEQ ID NO: 936091 - DNA, 15 bp, Homo sapiens
gggtttaacacaagc

SEQ ID NO: 936092 - DNA, 15 bp, Homo sapiens
ggtttaacacaagct

SEQ ID NO: 936093 - DNA, 15 bp, Homo sapiens
gtttaacacaagcta

SEQ ID NO: 936094 - DNA, 15 bp, Homo sapiens
tttaacacaagctat

SEQ ID NO: 936095 - DNA, 15 bp, Homo sapiens
ttaacacaagctatg

SEQ ID NO: 936096 - DNA, 15 bp, Homo sapiens
taacacaagctatgg

SEQ ID NO: 936097 - DNA, 15 bp, Homo sapiens
aacacaagctatgga

SEQ ID NO: 936098 - DNA, 15 bp, Homo sapiens
acacaagctatggac

SEQ ID NO: 936099 - DNA, 15 bp, Homo sapiens
cacaagctatggaca

SEQ ID NO: 936100 - DNA, 15 bp, Homo sapiens
acaagctatggacat

SEQ ID NO: 936101 - DNA, 15 bp, Homo sapiens
caagctatggacatc

SEQ ID NO: 936102 - DNA, 15 bp, Homo sapiens
aagctatggacatct

SEQ ID NO: 936103 - DNA, 15 bp, Homo sapiens
agctatggacatcta

SEQ ID NO: 936104 - DNA, 15 bp, Homo sapiens
gctatggacatctag

SEQ ID NO: 936105 - DNA, 15 bp, Homo sapiens
ctatggacatctaga

SEQ ID NO: 936106 - DNA, 15 bp, Homo sapiens
tatggacatctagag

SEQ ID NO: 936107 - DNA, 15 bp, Homo sapiens
atggacatctagagg

SEQ ID NO: 936108 - DNA, 15 bp, Homo sapiens
tggacatctagaggt

SEQ ID NO: 936109 - DNA, 15 bp, Homo sapiens
ggacatctagaggta

SEQ ID NO: 936110 - DNA, 15 bp, Homo sapiens
gacatctagaggtag

SEQ ID NO: 936111 - DNA, 15 bp, Homo sapiens
acatctagaggtagg

SEQ ID NO: 936112 - DNA, 15 bp, Homo sapiens
catctagaggtaggg

SEQ ID NO: 936113 - DNA, 15 bp, Homo sapiens
atctagaggtagggc

SEQ ID NO: 936114 - DNA, 15 bp, Homo sapiens
tctagaggtagggct

SEQ ID NO: 936115 - DNA, 15 bp, Homo sapiens
ctagaggtagggctg

SEQ ID NO: 936116 - DNA, 15 bp, Homo sapiens
tagaggtagggctgg

SEQ ID NO: 936117 - DNA, 15 bp, Homo sapiens
agaggtagggctggg

SEQ ID NO: 936118 - DNA, 15 bp, Homo sapiens
gaggtagggctgggt

SEQ ID NO: 936119 - DNA, 15 bp, Homo sapiens
aggtagggctgggtc

SEQ ID NO: 936120 - DNA, 15 bp, Homo sapiens
ggtagggctgggtct

SEQ ID NO: 936121 - DNA, 15 bp, Homo sapiens
gtagggctgggtctc

SEQ ID NO: 936122 - DNA, 15 bp, Homo sapiens
tagggctgggtctct

SEQ ID NO: 936123 - DNA, 15 bp, Homo sapiens
agggctgggtctcta

SEQ ID NO: 936124 - DNA, 15 bp, Homo sapiens
gggctgggtctctaa

SEQ ID NO: 936125 - DNA, 15 bp, Homo sapiens
ggctgggtctctaag

SEQ ID NO: 936126 - DNA, 15 bp, Homo sapiens
gctgggtctctaagc

SEQ ID NO: 936127 - DNA, 15 bp, Homo sapiens
ctgggtctctaagct

SEQ ID NO: 936128 - DNA, 15 bp, Homo sapiens
tgggtctctaagcta

SEQ ID NO: 936129 - DNA, 15 bp, Homo sapiens
gggtctctaagctaa

SEQ ID NO: 936130 - DNA, 15 bp, Homo sapiens
ggtctctaagctaat

SEQ ID NO: 936131 - DNA, 15 bp, Homo sapiens
gtctctaagctaatg

SEQ ID NO: 936132 - DNA, 15 bp, Homo sapiens
tctctaagctaatga

SEQ ID NO: 936133 - DNA, 15 bp, Homo sapiens
ctctaagctaatgat

SEQ ID NO: 936134 - DNA, 15 bp, Homo sapiens
tctaagctaatgatc

SEQ ID NO: 936135 - DNA, 15 bp, Homo sapiens
ctaagctaatgatct

SEQ ID NO: 936136 - DNA, 15 bp, Homo sapiens
taagctaatgatctc

SEQ ID NO: 936137 - DNA, 15 bp, Homo sapiens
aagctaatgatctct

SEQ ID NO: 936138 - DNA, 15 bp, Homo sapiens
agctaatgatctctc

SEQ ID NO: 936139 - DNA, 15 bp, Homo sapiens
gctaatgatctctcg

SEQ ID NO: 936140 - DNA, 15 bp, Homo sapiens
ctaatgatctctcgc

SEQ ID NO: 936141 - DNA, 15 bp, Homo sapiens
taatgatctctcgca

SEQ ID NO: 936142 - DNA, 15 bp, Homo sapiens
aatgatctctcgcag

SEQ ID NO: 936143 - DNA, 15 bp, Homo sapiens
atgatctctcgcagc

SEQ ID NO: 936144 - DNA, 15 bp, Homo sapiens
tgatctctcgcagcc

SEQ ID NO: 936145 - DNA, 15 bp, Homo sapiens
gatctctcgcagcct

SEQ ID NO: 936146 - DNA, 15 bp, Homo sapiens
atctctcgcagcctc

SEQ ID NO: 936147 - DNA, 15 bp, Homo sapiens
tctctcgcagcctcc

SEQ ID NO: 936148 - DNA, 15 bp, Homo sapiens
ctctcgcagcctcca

SEQ ID NO: 936149 - DNA, 15 bp, Homo sapiens
tctcgcagcctccag

SEQ ID NO: 936150 - DNA, 15 bp, Homo sapiens
ctcgcagcctccagc

SEQ ID NO: 936151 - DNA, 15 bp, Homo sapiens
tcgcagcctccagcc

SEQ ID NO: 936152 - DNA, 15 bp, Homo sapiens
cgcagcctccagccc

SEQ ID NO: 936153 - DNA, 15 bp, Homo sapiens
gcagcctccagccca

SEQ ID NO: 936154 - DNA, 15 bp, Homo sapiens
cagcctccagcccag

SEQ ID NO: 936155 - DNA, 15 bp, Homo sapiens
agcctccagcccagc

SEQ ID NO: 936156 - DNA, 15 bp, Homo sapiens
gcctccagcccagcc

SEQ ID NO: 936157 - DNA, 15 bp, Homo sapiens
cctccagcccagccc

SEQ ID NO: 936158 - DNA, 15 bp, Homo sapiens
ctccagcccagccct

SEQ ID NO: 936159 - DNA, 15 bp, Homo sapiens
tccagcccagccctg

SEQ ID NO: 936160 - DNA, 15 bp, Homo sapiens
ccagcccagccctgt

SEQ ID NO: 936161 - DNA, 15 bp, Homo sapiens
cagcccagccctgtg

SEQ ID NO: 936162 - DNA, 15 bp, Homo sapiens
agcccagccctgtga

SEQ ID NO: 936163 - DNA, 15 bp, Homo sapiens
gcccagccctgtgac

SEQ ID NO: 936164 - DNA, 15 bp, Homo sapiens
cccagccctgtgact

SEQ ID NO: 936165 - DNA, 15 bp, Homo sapiens
ccagccctgtgactt

SEQ ID NO: 936166 - DNA, 15 bp, Homo sapiens
cagccctgtgacttt

SEQ ID NO: 936167 - DNA, 15 bp, Homo sapiens
agccctgtgactttt

SEQ ID NO: 936168 - DNA, 15 bp, Homo sapiens
gccctgtgacttttt

SEQ ID NO: 936169 - DNA, 15 bp, Homo sapiens
ccctgtgactttttc

SEQ ID NO: 936170 - DNA, 15 bp, Homo sapiens
cctgtgactttttca

SEQ ID NO: 936171 - DNA, 15 bp, Homo sapiens
ctgtgactttttcag

SEQ ID NO: 936172 - DNA, 15 bp, Homo sapiens
tgtgactttttcaga

SEQ ID NO: 936173 - DNA, 15 bp, Homo sapiens
gtgactttttcagaa

SEQ ID NO: 936174 - DNA, 15 bp, Homo sapiens
tgactttttcagaag

SEQ ID NO: 936175 - DNA, 15 bp, Homo sapiens
gactttttcagaagc

SEQ ID NO: 936176 - DNA, 15 bp, Homo sapiens
actttttcagaagca

SEQ ID NO: 936177 - DNA, 15 bp, Homo sapiens
ctttttcagaagcat

SEQ ID NO: 936178 - DNA, 15 bp, Homo sapiens
tttttcagaagcatc

SEQ ID NO: 936179 - DNA, 15 bp, Homo sapiens
ttttcagaagcatca

SEQ ID NO: 936180 - DNA, 15 bp, Homo sapiens
tttcagaagcatcac

SEQ ID NO: 936181 - DNA, 15 bp, Homo sapiens
ttcagaagcatcact

SEQ ID NO: 936182 - DNA, 15 bp, Homo sapiens
tcagaagcatcactg

SEQ ID NO: 936183 - DNA, 15 bp, Homo sapiens
cagaagcatcactgc

SEQ ID NO: 936184 - DNA, 15 bp, Homo sapiens
agaagcatcactgca

SEQ ID NO: 936185 - DNA, 15 bp, Homo sapiens
gaagcatcactgcat

SEQ ID NO: 936186 - DNA, 15 bp, Homo sapiens
aagcatcactgcatc

SEQ ID NO: 936187 - DNA, 15 bp, Homo sapiens
agcatcactgcatca

SEQ ID NO: 936188 - DNA, 15 bp, Homo sapiens
gcatcactgcatcag

SEQ ID NO: 936189 - DNA, 15 bp, Homo sapiens
catcactgcatcagt

SEQ ID NO: 936190 - DNA, 15 bp, Homo sapiens
atcactgcatcagtc

SEQ ID NO: 936191 - DNA, 15 bp, Homo sapiens
tcactgcatcagtct

SEQ ID NO: 936192 - DNA, 15 bp, Homo sapiens
cactgcatcagtctg

SEQ ID NO: 936193 - DNA, 15 bp, Homo sapiens
actgcatcagtctgg

SEQ ID NO: 936194 - DNA, 15 bp, Homo sapiens
ctgcatcagtctgga

SEQ ID NO: 936195 - DNA, 15 bp, Homo sapiens
tgcatcagtctggat

SEQ ID NO: 936196 - DNA, 15 bp, Homo sapiens
gcatcagtctggatc

SEQ ID NO: 936197 - DNA, 15 bp, Homo sapiens
catcagtctggatct

SEQ ID NO: 936198 - DNA, 15 bp, Homo sapiens
atcagtctggatcta

SEQ ID NO: 936199 - DNA, 15 bp, Homo sapiens
tcagtctggatctat

SEQ ID NO: 936200 - DNA, 15 bp, Homo sapiens
cagtctggatctatt

SEQ ID NO: 936201 - DNA, 15 bp, Homo sapiens
agtctggatctatta

SEQ ID NO: 936202 - DNA, 15 bp, Homo sapiens
gtctggatctattat

SEQ ID NO: 936203 - DNA, 15 bp, Homo sapiens
tctggatctattatc

SEQ ID NO: 936204 - DNA, 15 bp, Homo sapiens
ctggatctattatct

SEQ ID NO: 936205 - DNA, 15 bp, Homo sapiens
tggatctattatctc

SEQ ID NO: 936206 - DNA, 15 bp, Homo sapiens
ggatctattatctct

SEQ ID NO: 936207 - DNA, 15 bp, Homo sapiens
gatctattatctctt

SEQ ID NO: 936208 - DNA, 15 bp, Homo sapiens
atctattatctcttg

SEQ ID NO: 936209 - DNA, 15 bp, Homo sapiens
tctattatctcttga

SEQ ID NO: 936210 - DNA, 15 bp, Homo sapiens
ctattatctcttgat

SEQ ID NO: 936211 - DNA, 15 bp, Homo sapiens
tattatctcttgatt

SEQ ID NO: 936212 - DNA, 15 bp, Homo sapiens
attatctcttgatta

SEQ ID NO: 936213 - DNA, 15 bp, Homo sapiens
ttatctcttgattaa

SEQ ID NO: 936214 - DNA, 15 bp, Homo sapiens
tatctcttgattaag

SEQ ID NO: 936215 - DNA, 15 bp, Homo sapiens
atctcttgattaagg

SEQ ID NO: 936216 - DNA, 15 bp, Homo sapiens
tctcttgattaaggc

SEQ ID NO: 936217 - DNA, 15 bp, Homo sapiens
ctcttgattaaggct

SEQ ID NO: 936218 - DNA, 15 bp, Homo sapiens
tcttgattaaggctg

SEQ ID NO: 936219 - DNA, 15 bp, Homo sapiens
cttgattaaggctgc

SEQ ID NO: 936220 - DNA, 15 bp, Homo sapiens
ttgattaaggctgct

SEQ ID NO: 936221 - DNA, 15 bp, Homo sapiens
tgattaaggctgctt

SEQ ID NO: 936222 - DNA, 15 bp, Homo sapiens
gattaaggctgctta

SEQ ID NO: 936223 - DNA, 15 bp, Homo sapiens
attaaggctgcttat

SEQ ID NO: 936224 - DNA, 15 bp, Homo sapiens
ttaaggctgcttata

SEQ ID NO: 936225 - DNA, 15 bp, Homo sapiens
taaggctgcttatag

SEQ ID NO: 936226 - DNA, 15 bp, Homo sapiens
aaggctgcttataga

SEQ ID NO: 936227 - DNA, 15 bp, Homo sapiens
aggctgcttatagag

SEQ ID NO: 936228 - DNA, 15 bp, Homo sapiens
ggctgcttatagagt

SEQ ID NO: 936229 - DNA, 15 bp, Homo sapiens
gctgcttatagagta

SEQ ID NO: 936230 - DNA, 15 bp, Homo sapiens
ctgcttatagagtac

SEQ ID NO: 936231 - DNA, 15 bp, Homo sapiens
tgcttatagagtaca

SEQ ID NO: 936232 - DNA, 15 bp, Homo sapiens
gcttatagagtacaa

SEQ ID NO: 936233 - DNA, 15 bp, Homo sapiens
cttatagagtacaac

SEQ ID NO: 936234 - DNA, 15 bp, Homo sapiens
ttatagagtacaaca

SEQ ID NO: 936235 - DNA, 15 bp, Homo sapiens
tatagagtacaacat

SEQ ID NO: 936236 - DNA, 15 bp, Homo sapiens
atagagtacaacatt

SEQ ID NO: 936237 - DNA, 15 bp, Homo sapiens
tagagtacaacattt

SEQ ID NO: 936238 - DNA, 15 bp, Homo sapiens
agagtacaacatttt

SEQ ID NO: 936239 - DNA, 15 bp, Homo sapiens
gagtacaacatttta

SEQ ID NO: 936240 - DNA, 15 bp, Homo sapiens
agtacaacattttac

SEQ ID NO: 936241 - DNA, 15 bp, Homo sapiens
gtacaacattttaca

SEQ ID NO: 936242 - DNA, 15 bp, Homo sapiens
tacaacattttacag

SEQ ID NO: 936243 - DNA, 15 bp, Homo sapiens
acaacattttacagc

SEQ ID NO: 936244 - DNA, 15 bp, Homo sapiens
caacattttacagct

SEQ ID NO: 936245 - DNA, 15 bp, Homo sapiens
aacattttacagctt

SEQ ID NO: 936246 - DNA, 15 bp, Homo sapiens
acattttacagctta

SEQ ID NO: 936247 - DNA, 15 bp, Homo sapiens
cattttacagcttag

SEQ ID NO: 936248 - DNA, 15 bp, Homo sapiens
attttacagcttagc

SEQ ID NO: 936249 - DNA, 15 bp, Homo sapiens
ttttacagcttagcc

SEQ ID NO: 936250 - DNA, 15 bp, Homo sapiens
tttacagcttagccc

SEQ ID NO: 936251 - DNA, 15 bp, Homo sapiens
ttacagcttagccca

SEQ ID NO: 936252 - DNA, 15 bp, Homo sapiens
tacagcttagcccag

SEQ ID NO: 936253 - DNA, 15 bp, Homo sapiens
acagcttagcccagc

SEQ ID NO: 936254 - DNA, 15 bp, Homo sapiens
cagcttagcccagct

SEQ ID NO: 936255 - DNA, 15 bp, Homo sapiens
agcttagcccagctt

SEQ ID NO: 936256 - DNA, 15 bp, Homo sapiens
gcttagcccagcttc

SEQ ID NO: 936257 - DNA, 15 bp, Homo sapiens
cttagcccagcttct

SEQ ID NO: 936258 - DNA, 15 bp, Homo sapiens
ttagcccagcttctt

SEQ ID NO: 936259 - DNA, 15 bp, Homo sapiens
tagcccagcttcttg

SEQ ID NO: 936260 - DNA, 15 bp, Homo sapiens
agcccagcttcttgc

SEQ ID NO: 936261 - DNA, 15 bp, Homo sapiens
gcccagcttcttgca

SEQ ID NO: 936262 - DNA, 15 bp, Homo sapiens
cccagcttcttgcat

SEQ ID NO: 936263 - DNA, 15 bp, Homo sapiens
ccagcttcttgcatt

SEQ ID NO: 936264 - DNA, 15 bp, Homo sapiens
cagcttcttgcattt

SEQ ID NO: 936265 - DNA, 15 bp, Homo sapiens
agcttcttgcatttt

SEQ ID NO: 936266 - DNA, 15 bp, Homo sapiens
gcttcttgcattttc

SEQ ID NO: 936267 - DNA, 15 bp, Homo sapiens
cttcttgcattttca

SEQ ID NO: 936268 - DNA, 15 bp, Homo sapiens
ttcttgcattttcat

SEQ ID NO: 936269 - DNA, 15 bp, Homo sapiens
tcttgcattttcatc

SEQ ID NO: 936270 - DNA, 15 bp, Homo sapiens
cttgcattttcatca

SEQ ID NO: 936271 - DNA, 15 bp, Homo sapiens
ttgcattttcatcag

SEQ ID NO: 936272 - DNA, 15 bp, Homo sapiens
tgcattttcatcagt

SEQ ID NO: 936273 - DNA, 15 bp, Homo sapiens
gcattttcatcagtt

SEQ ID NO: 936274 - DNA, 15 bp, Homo sapiens
cattttcatcagttg

SEQ ID NO: 936275 - DNA, 15 bp, Homo sapiens
attttcatcagttgc

SEQ ID NO: 936276 - DNA, 15 bp, Homo sapiens
ttttcatcagttgct

SEQ ID NO: 936277 - DNA, 15 bp, Homo sapiens
tttcatcagttgctt

SEQ ID NO: 936278 - DNA, 15 bp, Homo sapiens
ttcatcagttgcttt

SEQ ID NO: 936279 - DNA, 15 bp, Homo sapiens
tcatcagttgcttta

SEQ ID NO: 936280 - DNA, 15 bp, Homo sapiens
catcagttgctttat

SEQ ID NO: 936281 - DNA, 15 bp, Homo sapiens
atcagttgctttatt

SEQ ID NO: 936282 - DNA, 15 bp, Homo sapiens
tcagttgctttattc

SEQ ID NO: 936283 - DNA, 15 bp, Homo sapiens
cagttgctttattct

SEQ ID NO: 936284 - DNA, 15 bp, Homo sapiens
agttgctttattctt

SEQ ID NO: 936285 - DNA, 15 bp, Homo sapiens
gttgctttattcttt

SEQ ID NO: 936286 - DNA, 15 bp, Homo sapiens
ttgctttattctttt

SEQ ID NO: 936287 - DNA, 15 bp, Homo sapiens
tgctttattcttttc

SEQ ID NO: 936288 - DNA, 15 bp, Homo sapiens
gctttattcttttcc

SEQ ID NO: 936289 - DNA, 15 bp, Homo sapiens
ctttattcttttcct

SEQ ID NO: 936290 - DNA, 15 bp, Homo sapiens
tttattcttttcctt

SEQ ID NO: 936291 - DNA, 15 bp, Homo sapiens
ttattcttttcctta

SEQ ID NO: 936292 - DNA, 15 bp, Homo sapiens
tattcttttccttaa

SEQ ID NO: 936293 - DNA, 15 bp, Homo sapiens
attcttttccttaac

SEQ ID NO: 936294 - DNA, 15 bp, Homo sapiens
ttcttttccttaaca

SEQ ID NO: 936295 - DNA, 15 bp, Homo sapiens
tcttttccttaacaa

SEQ ID NO: 936296 - DNA, 15 bp, Homo sapiens
cttttccttaacaat

SEQ ID NO: 936297 - DNA, 15 bp, Homo sapiens
ttttccttaacaatt

SEQ ID NO: 936298 - DNA, 15 bp, Homo sapiens
tttccttaacaatta

SEQ ID NO: 936299 - DNA, 15 bp, Homo sapiens
ttccttaacaattac

SEQ ID NO: 936300 - DNA, 15 bp, Homo sapiens
tccttaacaattact

SEQ ID NO: 936301 - DNA, 15 bp, Homo sapiens
ccttaacaattactg

SEQ ID NO: 936302 - DNA, 15 bp, Homo sapiens
cttaacaattactgc

SEQ ID NO: 936303 - DNA, 15 bp, Homo sapiens
ttaacaattactgca

SEQ ID NO: 936304 - DNA, 15 bp, Homo sapiens
taacaattactgcat

SEQ ID NO: 936305 - DNA, 15 bp, Homo sapiens
aacaattactgcatg

SEQ ID NO: 936306 - DNA, 15 bp, Homo sapiens
acaattactgcatgt

SEQ ID NO: 936307 - DNA, 15 bp, Homo sapiens
caattactgcatgtc

SEQ ID NO: 936308 - DNA, 15 bp, Homo sapiens
aattactgcatgtca

SEQ ID NO: 936309 - DNA, 15 bp, Homo sapiens
attactgcatgtcaa

SEQ ID NO: 936310 - DNA, 15 bp, Homo sapiens
ttactgcatgtcaac

SEQ ID NO: 936311 - DNA, 15 bp, Homo sapiens
tactgcatgtcaaca

SEQ ID NO: 936312 - DNA, 15 bp, Homo sapiens
actgcatgtcaacac

SEQ ID NO: 936313 - DNA, 15 bp, Homo sapiens
ctgcatgtcaacacc

SEQ ID NO: 936314 - DNA, 15 bp, Homo sapiens
tgcatgtcaacaccc

SEQ ID NO: 936315 - DNA, 15 bp, Homo sapiens
gcatgtcaacaccct

SEQ ID NO: 936316 - DNA, 15 bp, Homo sapiens
catgtcaacaccctt

SEQ ID NO: 936317 - DNA, 15 bp, Homo sapiens
atgtcaacacccttt

SEQ ID NO: 936318 - DNA, 15 bp, Homo sapiens
tgtcaacaccctttc

SEQ ID NO: 936319 - DNA, 15 bp, Homo sapiens
gtcaacaccctttct

SEQ ID NO: 936320 - DNA, 15 bp, Homo sapiens
tcaacaccctttctc

SEQ ID NO: 936321 - DNA, 15 bp, Homo sapiens
caacaccctttctcc

SEQ ID NO: 936322 - DNA, 15 bp, Homo sapiens
aacaccctttctcct

SEQ ID NO: 936323 - DNA, 15 bp, Homo sapiens
acaccctttctcctg

SEQ ID NO: 936324 - DNA, 15 bp, Homo sapiens
caccctttctcctgt

SEQ ID NO: 936325 - DNA, 15 bp, Homo sapiens
accctttctcctgtc

SEQ ID NO: 936326 - DNA, 15 bp, Homo sapiens
ccctttctcctgtca

SEQ ID NO: 936327 - DNA, 15 bp, Homo sapiens
cctttctcctgtcag

SEQ ID NO: 936328 - DNA, 15 bp, Homo sapiens
ctttctcctgtcagc

SEQ ID NO: 936329 - DNA, 15 bp, Homo sapiens
tttctcctgtcagca

SEQ ID NO: 936330 - DNA, 15 bp, Homo sapiens
ttctcctgtcagcat

SEQ ID NO: 936331 - DNA, 15 bp, Homo sapiens
tctcctgtcagcata

SEQ ID NO: 936332 - DNA, 15 bp, Homo sapiens
ctcctgtcagcatac

SEQ ID NO: 936333 - DNA, 15 bp, Homo sapiens
tcctgtcagcatacc

SEQ ID NO: 936334 - DNA, 15 bp, Homo sapiens
cctgtcagcatacca

SEQ ID NO: 936335 - DNA, 15 bp, Homo sapiens
ctgtcagcataccaa

SEQ ID NO: 936336 - DNA, 15 bp, Homo sapiens
tgtcagcataccaaa

SEQ ID NO: 936337 - DNA, 15 bp, Homo sapiens
gtcagcataccaaac

SEQ ID NO: 936338 - DNA, 15 bp, Homo sapiens
tcagcataccaaacc

SEQ ID NO: 936339 - DNA, 15 bp, Homo sapiens
cagcataccaaaccc

SEQ ID NO: 936340 - DNA, 15 bp, Homo sapiens
agcataccaaaccct

SEQ ID NO: 936341 - DNA, 15 bp, Homo sapiens
gcataccaaaccctg

SEQ ID NO: 936342 - DNA, 15 bp, Homo sapiens
cataccaaaccctgt

SEQ ID NO: 936343 - DNA, 15 bp, Homo sapiens
ataccaaaccctgta

SEQ ID NO: 936344 - DNA, 15 bp, Homo sapiens
taccaaaccctgtac

SEQ ID NO: 936345 - DNA, 15 bp, Homo sapiens
accaaaccctgtaca

SEQ ID NO: 936346 - DNA, 15 bp, Homo sapiens
ccaaaccctgtacag

SEQ ID NO: 936347 - DNA, 15 bp, Homo sapiens
caaaccctgtacagg

SEQ ID NO: 936348 - DNA, 15 bp, Homo sapiens
aaaccctgtacagga

SEQ ID NO: 936349 - DNA, 15 bp, Homo sapiens
aaccctgtacaggag

SEQ ID NO: 936350 - DNA, 15 bp, Homo sapiens
accctgtacaggagg

SEQ ID NO: 936351 - DNA, 15 bp, Homo sapiens
ccctgtacaggaggc

SEQ ID NO: 936352 - DNA, 15 bp, Homo sapiens
cctgtacaggaggct

SEQ ID NO: 936353 - DNA, 15 bp, Homo sapiens
ctgtacaggaggctg

SEQ ID NO: 936354 - DNA, 15 bp, Homo sapiens
tgtacaggaggctgg

SEQ ID NO: 936355 - DNA, 15 bp, Homo sapiens
gtacaggaggctggc

SEQ ID NO: 936356 - DNA, 15 bp, Homo sapiens
tacaggaggctggca

SEQ ID NO: 936357 - DNA, 15 bp, Homo sapiens
acaggaggctggcat

SEQ ID NO: 936358 - DNA, 15 bp, Homo sapiens
caggaggctggcatt

SEQ ID NO: 936359 - DNA, 15 bp, Homo sapiens
aggaggctggcattg

SEQ ID NO: 936360 - DNA, 15 bp, Homo sapiens
ggaggctggcattgt

SEQ ID NO: 936361 - DNA, 15 bp, Homo sapiens
gaggctggcattgtt

SEQ ID NO: 936362 - DNA, 15 bp, Homo sapiens
aggctggcattgttc

SEQ ID NO: 936363 - DNA, 15 bp, Homo sapiens
ggctggcattgttcc

SEQ ID NO: 936364 - DNA, 15 bp, Homo sapiens
gctggcattgttcca

SEQ ID NO: 936365 - DNA, 15 bp, Homo sapiens
ctggcattgttccaa

SEQ ID NO: 936366 - DNA, 15 bp, Homo sapiens
tggcattgttccaag

SEQ ID NO: 936367 - DNA, 15 bp, Homo sapiens
ggcattgttccaagt

SEQ ID NO: 936368 - DNA, 15 bp, Homo sapiens
gcattgttccaagta

SEQ ID NO: 936369 - DNA, 15 bp, Homo sapiens
cattgttccaagtag

SEQ ID NO: 936370 - DNA, 15 bp, Homo sapiens
attgttccaagtaga

SEQ ID NO: 936371 - DNA, 15 bp, Homo sapiens
ttgttccaagtagac

SEQ ID NO: 936372 - DNA, 15 bp, Homo sapiens
tgttccaagtagact

SEQ ID NO: 936373 - DNA, 15 bp, Homo sapiens
gttccaagtagacta

SEQ ID NO: 936374 - DNA, 15 bp, Homo sapiens
ttccaagtagactaa

SEQ ID NO: 936375 - DNA, 15 bp, Homo sapiens
tccaagtagactaaa

SEQ ID NO: 936376 - DNA, 15 bp, Homo sapiens
ccaagtagactaaag

SEQ ID NO: 936377 - DNA, 15 bp, Homo sapiens
caagtagactaaagt

SEQ ID NO: 936378 - DNA, 15 bp, Homo sapiens
aagtagactaaagtt

SEQ ID NO: 936379 - DNA, 15 bp, Homo sapiens
agtagactaaagttg

SEQ ID NO: 936380 - DNA, 15 bp, Homo sapiens
gtagactaaagttgg

SEQ ID NO: 936381 - DNA, 15 bp, Homo sapiens
tagactaaagttggg

SEQ ID NO: 936382 - DNA, 15 bp, Homo sapiens
agactaaagttgggc

SEQ ID NO: 936383 - DNA, 15 bp, Homo sapiens
gactaaagttgggct

SEQ ID NO: 936384 - DNA, 15 bp, Homo sapiens
actaaagttgggctt

SEQ ID NO: 936385 - DNA, 15 bp, Homo sapiens
ctaaagttgggcttt

SEQ ID NO: 936386 - DNA, 15 bp, Homo sapiens
taaagttgggctttc

SEQ ID NO: 936387 - DNA, 15 bp, Homo sapiens
aaagttgggctttcc

SEQ ID NO: 936388 - DNA, 15 bp, Homo sapiens
aagttgggctttcct

SEQ ID NO: 936389 - DNA, 15 bp, Homo sapiens
agttgggctttcctc

SEQ ID NO: 936390 - DNA, 15 bp, Homo sapiens
gttgggctttcctct

SEQ ID NO: 936391 - DNA, 15 bp, Homo sapiens
ttgggctttcctctt

SEQ ID NO: 936392 - DNA, 15 bp, Homo sapiens
tgggctttcctctta

SEQ ID NO: 936393 - DNA, 15 bp, Homo sapiens
gggctttcctcttat

SEQ ID NO: 936394 - DNA, 15 bp, Homo sapiens
ggctttcctcttatt

SEQ ID NO: 936395 - DNA, 15 bp, Homo sapiens
gctttcctcttatta

SEQ ID NO: 936396 - DNA, 15 bp, Homo sapiens
ctttcctcttattac

SEQ ID NO: 936397 - DNA, 15 bp, Homo sapiens
tttcctcttattaca

SEQ ID NO: 936398 - DNA, 15 bp, Homo sapiens
ttcctcttattacag

SEQ ID NO: 936399 - DNA, 15 bp, Homo sapiens
tcctcttattacagt

SEQ ID NO: 936400 - DNA, 15 bp, Homo sapiens
cctcttattacagtc

SEQ ID NO: 936401 - DNA, 15 bp, Homo sapiens
ctcttattacagtct

SEQ ID NO: 936402 - DNA, 15 bp, Homo sapiens
tcttattacagtctt

SEQ ID NO: 936403 - DNA, 15 bp, Homo sapiens
cttattacagtcttt

SEQ ID NO: 936404 - DNA, 15 bp, Homo sapiens
ttattacagtctttt

SEQ ID NO: 936405 - DNA, 15 bp, Homo sapiens
tattacagtctttta

SEQ ID NO: 936406 - DNA, 15 bp, Homo sapiens
attacagtcttttaa

SEQ ID NO: 936407 - DNA, 15 bp, Homo sapiens
ttacagtcttttaaa

SEQ ID NO: 936408 - DNA, 15 bp, Homo sapiens
tacagtcttttaaac

SEQ ID NO: 936409 - DNA, 15 bp, Homo sapiens
acagtcttttaaacc

SEQ ID NO: 936410 - DNA, 15 bp, Homo sapiens
cagtcttttaaaccc

SEQ ID NO: 936411 - DNA, 15 bp, Homo sapiens
agtcttttaaaccca

SEQ ID NO: 936412 - DNA, 15 bp, Homo sapiens
gtcttttaaacccaa

SEQ ID NO: 936413 - DNA, 15 bp, Homo sapiens
tcttttaaacccaag

SEQ ID NO: 936414 - DNA, 15 bp, Homo sapiens
cttttaaacccaagg

SEQ ID NO: 936415 - DNA, 15 bp, Homo sapiens
ttttaaacccaaggg

SEQ ID NO: 936416 - DNA, 15 bp, Homo sapiens
tttaaacccaaggga

SEQ ID NO: 936417 - DNA, 15 bp, Homo sapiens
ttaaacccaagggag

SEQ ID NO: 936418 - DNA, 15 bp, Homo sapiens
taaacccaagggagt

SEQ ID NO: 936419 - DNA, 15 bp, Homo sapiens
aaacccaagggagtt

SEQ ID NO: 936420 - DNA, 15 bp, Homo sapiens
aacccaagggagttg

SEQ ID NO: 936421 - DNA, 15 bp, Homo sapiens
acccaagggagttga

SEQ ID NO: 936422 - DNA, 15 bp, Homo sapiens
cccaagggagttgaa

SEQ ID NO: 936423 - DNA, 15 bp, Homo sapiens
ccaagggagttgaat

SEQ ID NO: 936424 - DNA, 15 bp, Homo sapiens
caagggagttgaatg

SEQ ID NO: 936425 - DNA, 15 bp, Homo sapiens
aagggagttgaatga

SEQ ID NO: 936426 - DNA, 15 bp, Homo sapiens
agggagttgaatgat

SEQ ID NO: 936427 - DNA, 15 bp, Homo sapiens
gggagttgaatgatc

SEQ ID NO: 936428 - DNA, 15 bp, Homo sapiens
ggagttgaatgatct

SEQ ID NO: 936429 - DNA, 15 bp, Homo sapiens
gagttgaatgatctt

SEQ ID NO: 936430 - DNA, 15 bp, Homo sapiens
agttgaatgatcttt

SEQ ID NO: 936431 - DNA, 15 bp, Homo sapiens
gttgaatgatctttg

SEQ ID NO: 936432 - DNA, 15 bp, Homo sapiens
ttgaatgatctttga

SEQ ID NO: 936433 - DNA, 15 bp, Homo sapiens
tgaatgatctttgaa

SEQ ID NO: 936434 - DNA, 15 bp, Homo sapiens
gaatgatctttgaac

SEQ ID NO: 936435 - DNA, 15 bp, Homo sapiens
aatgatctttgaaca

SEQ ID NO: 936436 - DNA, 15 bp, Homo sapiens
atgatctttgaacat

SEQ ID NO: 936437 - DNA, 15 bp, Homo sapiens
tgatctttgaacatt

SEQ ID NO: 936438 - DNA, 15 bp, Homo sapiens
gatctttgaacattc

SEQ ID NO: 936439 - DNA, 15 bp, Homo sapiens
atctttgaacattcc

SEQ ID NO: 936440 - DNA, 15 bp, Homo sapiens
tctttgaacattcct

SEQ ID NO: 936441 - DNA, 15 bp, Homo sapiens
ctttgaacattcctg

SEQ ID NO: 936442 - DNA, 15 bp, Homo sapiens
tttgaacattcctgg

SEQ ID NO: 936443 - DNA, 15 bp, Homo sapiens
ttgaacattcctggg

SEQ ID NO: 936444 - DNA, 15 bp, Homo sapiens
tgaacattcctgggg

SEQ ID NO: 936445 - DNA, 15 bp, Homo sapiens
gaacattcctgggga

SEQ ID NO: 936446 - DNA, 15 bp, Homo sapiens
aacattcctggggat

SEQ ID NO: 936447 - DNA, 15 bp, Homo sapiens
acattcctggggatt

SEQ ID NO: 936448 - DNA, 15 bp, Homo sapiens
cattcctggggattc

SEQ ID NO: 936449 - DNA, 15 bp, Homo sapiens
attcctggggattcc

SEQ ID NO: 936450 - DNA, 15 bp, Homo sapiens
ttcctggggattcca

SEQ ID NO: 936451 - DNA, 15 bp, Homo sapiens
tcctggggattccat

SEQ ID NO: 936452 - DNA, 15 bp, Homo sapiens
cctggggattccatt

SEQ ID NO: 936453 - DNA, 15 bp, Homo sapiens
ctggggattccattt

SEQ ID NO: 936454 - DNA, 15 bp, Homo sapiens
tggggattccatttc

SEQ ID NO: 936455 - DNA, 15 bp, Homo sapiens
ggggattccatttca

SEQ ID NO: 936456 - DNA, 15 bp, Homo sapiens
gggattccatttcaa

SEQ ID NO: 936457 - DNA, 15 bp, Homo sapiens
ggattccatttcaag

SEQ ID NO: 936458 - DNA, 15 bp, Homo sapiens
gattccatttcaaga

SEQ ID NO: 936459 - DNA, 15 bp, Homo sapiens
attccatttcaagat

SEQ ID NO: 936460 - DNA, 15 bp, Homo sapiens
ttccatttcaagata

SEQ ID NO: 936461 - DNA, 15 bp, Homo sapiens
tccatttcaagatac

SEQ ID NO: 936462 - DNA, 15 bp, Homo sapiens
ccatttcaagatact

SEQ ID NO: 936463 - DNA, 15 bp, Homo sapiens
catttcaagatactt

SEQ ID NO: 936464 - DNA, 15 bp, Homo sapiens
atttcaagatacttc

SEQ ID NO: 936465 - DNA, 15 bp, Homo sapiens
tttcaagatacttcc

SEQ ID NO: 936466 - DNA, 15 bp, Homo sapiens
ttcaagatacttccc

SEQ ID NO: 936467 - DNA, 15 bp, Homo sapiens
tcaagatacttccct

SEQ ID NO: 936468 - DNA, 15 bp, Homo sapiens
caagatacttcccta

SEQ ID NO: 936469 - DNA, 15 bp, Homo sapiens
aagatacttccctac

SEQ ID NO: 936470 - DNA, 15 bp, Homo sapiens
agatacttccctaca

SEQ ID NO: 936471 - DNA, 15 bp, Homo sapiens
gatacttccctacag

SEQ ID NO: 936472 - DNA, 15 bp, Homo sapiens
atacttccctacagg

SEQ ID NO: 936473 - DNA, 15 bp, Homo sapiens
tacttccctacaggc

SEQ ID NO: 936474 - DNA, 15 bp, Homo sapiens
acttccctacaggct

SEQ ID NO: 936475 - DNA, 15 bp, Homo sapiens
cttccctacaggctg

SEQ ID NO: 936476 - DNA, 15 bp, Homo sapiens
ttccctacaggctgt

SEQ ID NO: 936477 - DNA, 15 bp, Homo sapiens
tccctacaggctgtg

SEQ ID NO: 936478 - DNA, 15 bp, Homo sapiens
ccctacaggctgtgg

SEQ ID NO: 936479 - DNA, 15 bp, Homo sapiens
cctacaggctgtggc

SEQ ID NO: 936480 - DNA, 15 bp, Homo sapiens
ctacaggctgtggca

SEQ ID NO: 936481 - DNA, 15 bp, Homo sapiens
tacaggctgtggcaa

SEQ ID NO: 936482 - DNA, 15 bp, Homo sapiens
acaggctgtggcaat

SEQ ID NO: 936483 - DNA, 15 bp, Homo sapiens
caggctgtggcaatg

SEQ ID NO: 936484 - DNA, 15 bp, Homo sapiens
aggctgtggcaatgc

SEQ ID NO: 936485 - DNA, 15 bp, Homo sapiens
ggctgtggcaatgcc

SEQ ID NO: 936486 - DNA, 15 bp, Homo sapiens
gctgtggcaatgcca

SEQ ID NO: 936487 - DNA, 15 bp, Homo sapiens
ctgtggcaatgccac

SEQ ID NO: 936488 - DNA, 15 bp, Homo sapiens
tgtggcaatgccaca

SEQ ID NO: 936489 - DNA, 15 bp, Homo sapiens
gtggcaatgccacat

SEQ ID NO: 936490 - DNA, 15 bp, Homo sapiens
tggcaatgccacatt

SEQ ID NO: 936491 - DNA, 15 bp, Homo sapiens
ggcaatgccacattt

SEQ ID NO: 936492 - DNA, 15 bp, Homo sapiens
gcaatgccacattta

SEQ ID NO: 936493 - DNA, 15 bp, Homo sapiens
caatgccacatttaa

SEQ ID NO: 936494 - DNA, 15 bp, Homo sapiens
aatgccacatttaac

SEQ ID NO: 936495 - DNA, 15 bp, Homo sapiens
atgccacatttaacc

SEQ ID NO: 936496 - DNA, 15 bp, Homo sapiens
tgccacatttaacct

SEQ ID NO: 936497 - DNA, 15 bp, Homo sapiens
gccacatttaacctt

SEQ ID NO: 936498 - DNA, 15 bp, Homo sapiens
ccacatttaaccttg

SEQ ID NO: 936499 - DNA, 15 bp, Homo sapiens
cacatttaaccttga

SEQ ID NO: 936500 - DNA, 15 bp, Homo sapiens
acatttaaccttgat

SEQ ID NO: 936501 - DNA, 15 bp, Homo sapiens
catttaaccttgatc

SEQ ID NO: 936502 - DNA, 15 bp, Homo sapiens
atttaaccttgatcc

SEQ ID NO: 936503 - DNA, 15 bp, Homo sapiens
tttaaccttgatccc

SEQ ID NO: 936504 - DNA, 15 bp, Homo sapiens
ttaaccttgatcccc

SEQ ID NO: 936505 - DNA, 15 bp, Homo sapiens
taaccttgatcccca

SEQ ID NO: 936506 - DNA, 15 bp, Homo sapiens
aaccttgatccccag

SEQ ID NO: 936507 - DNA, 15 bp, Homo sapiens
accttgatccccaga

SEQ ID NO: 936508 - DNA, 15 bp, Homo sapiens
ccttgatccccagaa

SEQ ID NO: 936509 - DNA, 15 bp, Homo sapiens
cttgatccccagaaa

SEQ ID NO: 936510 - DNA, 15 bp, Homo sapiens
ttgatccccagaaac

SEQ ID NO: 936511 - DNA, 15 bp, Homo sapiens
tgatccccagaaact

SEQ ID NO: 936512 - DNA, 15 bp, Homo sapiens
gatccccagaaacta

SEQ ID NO: 936513 - DNA, 15 bp, Homo sapiens
atccccagaaactag

SEQ ID NO: 936514 - DNA, 15 bp, Homo sapiens
tccccagaaactagg

SEQ ID NO: 936515 - DNA, 15 bp, Homo sapiens
ccccagaaactagga

SEQ ID NO: 936516 - DNA, 15 bp, Homo sapiens
cccagaaactaggaa

SEQ ID NO: 936517 - DNA, 15 bp, Homo sapiens
ccagaaactaggaat

SEQ ID NO: 936518 - DNA, 15 bp, Homo sapiens
cagaaactaggaatg

SEQ ID NO: 936519 - DNA, 15 bp, Homo sapiens
agaaactaggaatgg

SEQ ID NO: 936520 - DNA, 15 bp, Homo sapiens
gaaactaggaatggc

SEQ ID NO: 936521 - DNA, 15 bp, Homo sapiens
aaactaggaatggcc

SEQ ID NO: 936522 - DNA, 15 bp, Homo sapiens
aactaggaatggcct

SEQ ID NO: 936523 - DNA, 15 bp, Homo sapiens
actaggaatggcctg

SEQ ID NO: 936524 - DNA, 15 bp, Homo sapiens
ctaggaatggcctgg

SEQ ID NO: 936525 - DNA, 15 bp, Homo sapiens
taggaatggcctggc

SEQ ID NO: 936526 - DNA, 15 bp, Homo sapiens
aggaatggcctggct

SEQ ID NO: 936527 - DNA, 15 bp, Homo sapiens
ggaatggcctggctt

SEQ ID NO: 936528 - DNA, 15 bp, Homo sapiens
gaatggcctggcttt

SEQ ID NO: 936529 - DNA, 15 bp, Homo sapiens
aatggcctggcttta

SEQ ID NO: 936530 - DNA, 15 bp, Homo sapiens
atggcctggctttat

SEQ ID NO: 936531 - DNA, 15 bp, Homo sapiens
tggcctggctttata

SEQ ID NO: 936532 - DNA, 15 bp, Homo sapiens
ggcctggctttataa

SEQ ID NO: 936533 - DNA, 15 bp, Homo sapiens
gcctggctttataac

SEQ ID NO: 936534 - DNA, 15 bp, Homo sapiens
cctggctttataact

SEQ ID NO: 936535 - DNA, 15 bp, Homo sapiens
ctggctttataactc

SEQ ID NO: 936536 - DNA, 15 bp, Homo sapiens
tggctttataactca

SEQ ID NO: 936537 - DNA, 15 bp, Homo sapiens
ggctttataactcat

SEQ ID NO: 936538 - DNA, 15 bp, Homo sapiens
gctttataactcata

SEQ ID NO: 936539 - DNA, 15 bp, Homo sapiens
ctttataactcatag

SEQ ID NO: 936540 - DNA, 15 bp, Homo sapiens
tttataactcatagg

SEQ ID NO: 936541 - DNA, 15 bp, Homo sapiens
ttataactcataggt

SEQ ID NO: 936542 - DNA, 15 bp, Homo sapiens
tataactcataggta

SEQ ID NO: 936543 - DNA, 15 bp, Homo sapiens
ataactcataggtaa

SEQ ID NO: 936544 - DNA, 15 bp, Homo sapiens
taactcataggtaac

SEQ ID NO: 936545 - DNA, 15 bp, Homo sapiens
aactcataggtaaca

SEQ ID NO: 936546 - DNA, 15 bp, Homo sapiens
actcataggtaacag

SEQ ID NO: 936547 - DNA, 15 bp, Homo sapiens
ctcataggtaacagc

SEQ ID NO: 936548 - DNA, 15 bp, Homo sapiens
tcataggtaacagct

SEQ ID NO: 936549 - DNA, 15 bp, Homo sapiens
cataggtaacagctt

SEQ ID NO: 936550 - DNA, 15 bp, Homo sapiens
ataggtaacagcttg

SEQ ID NO: 936551 - DNA, 15 bp, Homo sapiens
taggtaacagcttgt

SEQ ID NO: 936552 - DNA, 15 bp, Homo sapiens
aggtaacagcttgtg

SEQ ID NO: 936553 - DNA, 15 bp, Homo sapiens
ggtaacagcttgtgt

SEQ ID NO: 936554 - DNA, 15 bp, Homo sapiens
gtaacagcttgtgtg

SEQ ID NO: 936555 - DNA, 15 bp, Homo sapiens
taacagcttgtgtga

SEQ ID NO: 936556 - DNA, 15 bp, Homo sapiens
aacagcttgtgtgac

SEQ ID NO: 936557 - DNA, 15 bp, Homo sapiens
acagcttgtgtgact

SEQ ID NO: 936558 - DNA, 15 bp, Homo sapiens
cagcttgtgtgactc

SEQ ID NO: 936559 - DNA, 15 bp, Homo sapiens
agcttgtgtgactct

SEQ ID NO: 936560 - DNA, 15 bp, Homo sapiens
gcttgtgtgactctg

SEQ ID NO: 936561 - DNA, 15 bp, Homo sapiens
cttgtgtgactctgt

SEQ ID NO: 936562 - DNA, 15 bp, Homo sapiens
ttgtgtgactctgtt

SEQ ID NO: 936563 - DNA, 15 bp, Homo sapiens
tgtgtgactctgttc

SEQ ID NO: 936564 - DNA, 15 bp, Homo sapiens
gtgtgactctgttct

SEQ ID NO: 936565 - DNA, 15 bp, Homo sapiens
tgtgactctgttctg

SEQ ID NO: 936566 - DNA, 15 bp, Homo sapiens
gtgactctgttctgg

SEQ ID NO: 936567 - DNA, 15 bp, Homo sapiens
tgactctgttctggg

SEQ ID NO: 936568 - DNA, 15 bp, Homo sapiens
gactctgttctgggc

SEQ ID NO: 936569 - DNA, 15 bp, Homo sapiens
actctgttctgggcc

SEQ ID NO: 936570 - DNA, 15 bp, Homo sapiens
ctctgttctgggcct

SEQ ID NO: 936571 - DNA, 15 bp, Homo sapiens
tctgttctgggcctc

SEQ ID NO: 936572 - DNA, 15 bp, Homo sapiens
ctgttctgggcctct

SEQ ID NO: 936573 - DNA, 15 bp, Homo sapiens
tgttctgggcctcta

SEQ ID NO: 936574 - DNA, 15 bp, Homo sapiens
gttctgggcctctag

SEQ ID NO: 936575 - DNA, 15 bp, Homo sapiens
ttctgggcctctagg

SEQ ID NO: 936576 - DNA, 15 bp, Homo sapiens
tctgggcctctaggc

SEQ ID NO: 936577 - DNA, 15 bp, Homo sapiens
ctgggcctctaggcc

SEQ ID NO: 936578 - DNA, 15 bp, Homo sapiens
tgggcctctaggcca

SEQ ID NO: 936579 - DNA, 15 bp, Homo sapiens
gggcctctaggccac

SEQ ID NO: 936580 - DNA, 15 bp, Homo sapiens
ggcctctaggccact

SEQ ID NO: 936581 - DNA, 15 bp, Homo sapiens
gcctctaggccactt

SEQ ID NO: 936582 - DNA, 15 bp, Homo sapiens
cctctaggccacttc

SEQ ID NO: 936583 - DNA, 15 bp, Homo sapiens
ctctaggccacttca

SEQ ID NO: 936584 - DNA, 15 bp, Homo sapiens
tctaggccacttcag

SEQ ID NO: 936585 - DNA, 15 bp, Homo sapiens
ctaggccacttcaga

SEQ ID NO: 936586 - DNA, 15 bp, Homo sapiens
taggccacttcagaa

SEQ ID NO: 936587 - DNA, 15 bp, Homo sapiens
aggccacttcagaag

SEQ ID NO: 936588 - DNA, 15 bp, Homo sapiens
ggccacttcagaagt

SEQ ID NO: 936589 - DNA, 15 bp, Homo sapiens
gccacttcagaagtg

SEQ ID NO: 936590 - DNA, 15 bp, Homo sapiens
ccacttcagaagtga

SEQ ID NO: 936591 - DNA, 15 bp, Homo sapiens
cacttcagaagtgat

SEQ ID NO: 936592 - DNA, 15 bp, Homo sapiens
acttcagaagtgatt

SEQ ID NO: 936593 - DNA, 15 bp, Homo sapiens
cttcagaagtgatta

SEQ ID NO: 936594 - DNA, 15 bp, Homo sapiens
ttcagaagtgattaa

SEQ ID NO: 936595 - DNA, 15 bp, Homo sapiens
tcagaagtgattaac

SEQ ID NO: 936596 - DNA, 15 bp, Homo sapiens
cagaagtgattaacc

SEQ ID NO: 936597 - DNA, 15 bp, Homo sapiens
agaagtgattaaccc

SEQ ID NO: 936598 - DNA, 15 bp, Homo sapiens
gaagtgattaaccct

SEQ ID NO: 936599 - DNA, 15 bp, Homo sapiens
aagtgattaaccctg

SEQ ID NO: 936600 - DNA, 15 bp, Homo sapiens
agtgattaaccctgt

SEQ ID NO: 936601 - DNA, 15 bp, Homo sapiens
gtgattaaccctgtt

SEQ ID NO: 936602 - DNA, 15 bp, Homo sapiens
tgattaaccctgtta

SEQ ID NO: 936603 - DNA, 15 bp, Homo sapiens
gattaaccctgttat

SEQ ID NO: 936604 - DNA, 15 bp, Homo sapiens
attaaccctgttatc

SEQ ID NO: 936605 - DNA, 15 bp, Homo sapiens
ttaaccctgttatca

SEQ ID NO: 936606 - DNA, 15 bp, Homo sapiens
taaccctgttatcag

SEQ ID NO: 936607 - DNA, 15 bp, Homo sapiens
aaccctgttatcaga

SEQ ID NO: 936608 - DNA, 15 bp, Homo sapiens
accctgttatcagaa

SEQ ID NO: 936609 - DNA, 15 bp, Homo sapiens
ccctgttatcagaag

SEQ ID NO: 936610 - DNA, 15 bp, Homo sapiens
cctgttatcagaagg

SEQ ID NO: 936611 - DNA, 15 bp, Homo sapiens
ctgttatcagaaggc

SEQ ID NO: 936612 - DNA, 15 bp, Homo sapiens
tgttatcagaaggca

SEQ ID NO: 936613 - DNA, 15 bp, Homo sapiens
gttatcagaaggcag

SEQ ID NO: 936614 - DNA, 15 bp, Homo sapiens
ttatcagaaggcagt

SEQ ID NO: 936615 - DNA, 15 bp, Homo sapiens
tatcagaaggcagtg

SEQ ID NO: 936616 - DNA, 15 bp, Homo sapiens
atcagaaggcagtgg

SEQ ID NO: 936617 - DNA, 15 bp, Homo sapiens
tcagaaggcagtggg

SEQ ID NO: 936618 - DNA, 15 bp, Homo sapiens
cagaaggcagtggga

SEQ ID NO: 936619 - DNA, 15 bp, Homo sapiens
agaaggcagtgggaa

SEQ ID NO: 936620 - DNA, 15 bp, Homo sapiens
gaaggcagtgggaag

SEQ ID NO: 936621 - DNA, 15 bp, Homo sapiens
aaggcagtgggaagc

SEQ ID NO: 936622 - DNA, 15 bp, Homo sapiens
aggcagtgggaagca

SEQ ID NO: 936623 - DNA, 15 bp, Homo sapiens
ggcagtgggaagcat

SEQ ID NO: 936624 - DNA, 15 bp, Homo sapiens
gcagtgggaagcatt

SEQ ID NO: 936625 - DNA, 15 bp, Homo sapiens
cagtgggaagcattt

SEQ ID NO: 936626 - DNA, 15 bp, Homo sapiens
agtgggaagcatttg

SEQ ID NO: 936627 - DNA, 15 bp, Homo sapiens
gtgggaagcatttgg

SEQ ID NO: 936628 - DNA, 15 bp, Homo sapiens
tgggaagcatttggc

SEQ ID NO: 936629 - DNA, 15 bp, Homo sapiens
gggaagcatttggct

SEQ ID NO: 936630 - DNA, 15 bp, Homo sapiens
ggaagcatttggctt

SEQ ID NO: 936631 - DNA, 15 bp, Homo sapiens
gaagcatttggcttc

SEQ ID NO: 936632 - DNA, 15 bp, Homo sapiens
aagcatttggcttca

SEQ ID NO: 936633 - DNA, 15 bp, Homo sapiens
agcatttggcttcac

SEQ ID NO: 936634 - DNA, 15 bp, Homo sapiens
gcatttggcttcact

SEQ ID NO: 936635 - DNA, 15 bp, Homo sapiens
catttggcttcacta

SEQ ID NO: 936636 - DNA, 15 bp, Homo sapiens
atttggcttcactat

SEQ ID NO: 936637 - DNA, 15 bp, Homo sapiens
tttggcttcactata

SEQ ID NO: 936638 - DNA, 15 bp, Homo sapiens
ttggcttcactatat

SEQ ID NO: 936639 - DNA, 15 bp, Homo sapiens
tggcttcactatatt

SEQ ID NO: 936640 - DNA, 15 bp, Homo sapiens
ggcttcactatattc

SEQ ID NO: 936641 - DNA, 15 bp, Homo sapiens
gcttcactatattct

SEQ ID NO: 936642 - DNA, 15 bp, Homo sapiens
cttcactatattctg

SEQ ID NO: 936643 - DNA, 15 bp, Homo sapiens
ttcactatattctgt

SEQ ID NO: 936644 - DNA, 15 bp, Homo sapiens
tcactatattctgtc

SEQ ID NO: 936645 - DNA, 15 bp, Homo sapiens
cactatattctgtct

SEQ ID NO: 936646 - DNA, 15 bp, Homo sapiens
actatattctgtctc

SEQ ID NO: 936647 - DNA, 15 bp, Homo sapiens
ctatattctgtctcc

SEQ ID NO: 936648 - DNA, 15 bp, Homo sapiens
tatattctgtctcca

SEQ ID NO: 936649 - DNA, 15 bp, Homo sapiens
atattctgtctccaa

SEQ ID NO: 936650 - DNA, 15 bp, Homo sapiens
tattctgtctccaag

SEQ ID NO: 936651 - DNA, 15 bp, Homo sapiens
attctgtctccaagt

SEQ ID NO: 936652 - DNA, 15 bp, Homo sapiens
ttctgtctccaagtt

SEQ ID NO: 936653 - DNA, 15 bp, Homo sapiens
tctgtctccaagttt

SEQ ID NO: 936654 - DNA, 15 bp, Homo sapiens
ctgtctccaagtttg

SEQ ID NO: 936655 - DNA, 15 bp, Homo sapiens
tgtctccaagtttga

SEQ ID NO: 936656 - DNA, 15 bp, Homo sapiens
gtctccaagtttgat

SEQ ID NO: 936657 - DNA, 15 bp, Homo sapiens
tctccaagtttgatt

SEQ ID NO: 936658 - DNA, 15 bp, Homo sapiens
ctccaagtttgattc

SEQ ID NO: 936659 - DNA, 15 bp, Homo sapiens
tccaagtttgattcc

SEQ ID NO: 936660 - DNA, 15 bp, Homo sapiens
ccaagtttgattcct

SEQ ID NO: 936661 - DNA, 15 bp, Homo sapiens
caagtttgattcctt

SEQ ID NO: 936662 - DNA, 15 bp, Homo sapiens
aagtttgattccttt

SEQ ID NO: 936663 - DNA, 15 bp, Homo sapiens
agtttgattcctttt

SEQ ID NO: 936664 - DNA, 15 bp, Homo sapiens
gtttgattccttttt

SEQ ID NO: 936665 - DNA, 15 bp, Homo sapiens
tttgattcctttttc

SEQ ID NO: 936666 - DNA, 15 bp, Homo sapiens
ttgattcctttttct

SEQ ID NO: 936667 - DNA, 15 bp, Homo sapiens
tgattcctttttctt

SEQ ID NO: 936668 - DNA, 15 bp, Homo sapiens
gattcctttttcttt

SEQ ID NO: 936669 - DNA, 15 bp, Homo sapiens
attcctttttctttc

SEQ ID NO: 936670 - DNA, 15 bp, Homo sapiens
ttcctttttctttct

SEQ ID NO: 936671 - DNA, 15 bp, Homo sapiens
tcctttttctttctt

SEQ ID NO: 936672 - DNA, 15 bp, Homo sapiens
cctttttctttcttt

SEQ ID NO: 936673 - DNA, 15 bp, Homo sapiens
ctttttctttctttt

SEQ ID NO: 936674 - DNA, 15 bp, Homo sapiens
ttctttctttttttg

SEQ ID NO: 936675 - DNA, 15 bp, Homo sapiens
tctttctttttttgc

SEQ ID NO: 936676 - DNA, 15 bp, Homo sapiens
ctttctttttttgct

SEQ ID NO: 936677 - DNA, 15 bp, Homo sapiens
tttctttttttgctt

SEQ ID NO: 936678 - DNA, 15 bp, Homo sapiens
ttctttttttgctta

SEQ ID NO: 936679 - DNA, 15 bp, Homo sapiens
tctttttttgcttat

SEQ ID NO: 936680 - DNA, 15 bp, Homo sapiens
ctttttttgcttata

SEQ ID NO: 936681 - DNA, 15 bp, Homo sapiens
tttttttgcttataa

SEQ ID NO: 936682 - DNA, 15 bp, Homo sapiens
ttttttgcttataaa

SEQ ID NO: 936683 - DNA, 15 bp, Homo sapiens
tttttgcttataaaa

SEQ ID NO: 936684 - DNA, 15 bp, Homo sapiens
ttttgcttataaaac

SEQ ID NO: 936685 - DNA, 15 bp, Homo sapiens
tttgcttataaaacc

SEQ ID NO: 936686 - DNA, 15 bp, Homo sapiens
ttgcttataaaacct

SEQ ID NO: 936687 - DNA, 15 bp, Homo sapiens
tgcttataaaacctg

SEQ ID NO: 936688 - DNA, 15 bp, Homo sapiens
gcttataaaacctgg

SEQ ID NO: 936689 - DNA, 15 bp, Homo sapiens
cttataaaacctggc

SEQ ID NO: 936690 - DNA, 15 bp, Homo sapiens
ttataaaacctggct

SEQ ID NO: 936691 - DNA, 15 bp, Homo sapiens
tataaaacctggctg

SEQ ID NO: 936692 - DNA, 15 bp, Homo sapiens
ataaaacctggctga

SEQ ID NO: 936693 - DNA, 15 bp, Homo sapiens
taaaacctggctgag

SEQ ID NO: 936694 - DNA, 15 bp, Homo sapiens
aaaacctggctgagg

SEQ ID NO: 936695 - DNA, 15 bp, Homo sapiens
aaacctggctgagga

SEQ ID NO: 936696 - DNA, 15 bp, Homo sapiens
aacctggctgaggaa

SEQ ID NO: 936697 - DNA, 15 bp, Homo sapiens
acctggctgaggaat

SEQ ID NO: 936698 - DNA, 15 bp, Homo sapiens
cctggctgaggaata

SEQ ID NO: 936699 - DNA, 15 bp, Homo sapiens
ctggctgaggaatag

SEQ ID NO: 936700 - DNA, 15 bp, Homo sapiens
tggctgaggaatagt

SEQ ID NO: 936701 - DNA, 15 bp, Homo sapiens
ggctgaggaatagtt

SEQ ID NO: 936702 - DNA, 15 bp, Homo sapiens
gctgaggaatagtta

SEQ ID NO: 936703 - DNA, 15 bp, Homo sapiens
ctgaggaatagttat

SEQ ID NO: 936704 - DNA, 15 bp, Homo sapiens
tgaggaatagttata

SEQ ID NO: 936705 - DNA, 15 bp, Homo sapiens
gaggaatagttataa

SEQ ID NO: 936706 - DNA, 15 bp, Homo sapiens
aggaatagttataat

SEQ ID NO: 936707 - DNA, 15 bp, Homo sapiens
ggaatagttataatt

SEQ ID NO: 936708 - DNA, 15 bp, Homo sapiens
gaatagttataattt

SEQ ID NO: 936709 - DNA, 15 bp, Homo sapiens
aatagttataatttt

SEQ ID NO: 936710 - DNA, 15 bp, Homo sapiens
atagttataattttc

SEQ ID NO: 936711 - DNA, 15 bp, Homo sapiens
tagttataattttca

SEQ ID NO: 936712 - DNA, 15 bp, Homo sapiens
agttataattttcag

SEQ ID NO: 936713 - DNA, 15 bp, Homo sapiens
gttataattttcagg

SEQ ID NO: 936714 - DNA, 15 bp, Homo sapiens
ttataattttcaggt

SEQ ID NO: 936715 - DNA, 15 bp, Homo sapiens
tataattttcaggtg

SEQ ID NO: 936716 - DNA, 15 bp, Homo sapiens
ataattttcaggtgg

SEQ ID NO: 936717 - DNA, 15 bp, Homo sapiens
taattttcaggtgga

SEQ ID NO: 936718 - DNA, 15 bp, Homo sapiens
aattttcaggtggaa

SEQ ID NO: 936719 - DNA, 15 bp, Homo sapiens
attttcaggtggaat

SEQ ID NO: 936720 - DNA, 15 bp, Homo sapiens
ttttcaggtggaata

SEQ ID NO: 936721 - DNA, 15 bp, Homo sapiens
tttcaggtggaataa

SEQ ID NO: 936722 - DNA, 15 bp, Homo sapiens
ttcaggtggaataaa

SEQ ID NO: 936723 - DNA, 15 bp, Homo sapiens
tcaggtggaataaac

SEQ ID NO: 936724 - DNA, 15 bp, Homo sapiens
caggtggaataaact

SEQ ID NO: 936725 - DNA, 15 bp, Homo sapiens
aggtggaataaactc

SEQ ID NO: 936726 - DNA, 15 bp, Homo sapiens
ggtggaataaactca

SEQ ID NO: 936727 - DNA, 15 bp, Homo sapiens
gtggaataaactcat

SEQ ID NO: 936728 - DNA, 15 bp, Homo sapiens
tggaataaactcatg

SEQ ID NO: 936729 - DNA, 15 bp, Homo sapiens
ggaataaactcatga

SEQ ID NO: 936730 - DNA, 15 bp, Homo sapiens
gaataaactcatgat

SEQ ID NO: 936731 - DNA, 15 bp, Homo sapiens
aataaactcatgatt

SEQ ID NO: 936732 - DNA, 15 bp, Homo sapiens
ataaactcatgattt

SEQ ID NO: 936733 - DNA, 15 bp, Homo sapiens
taaactcatgatttt

SEQ ID NO: 936734 - DNA, 15 bp, Homo sapiens
aaactcatgattttt

SEQ ID NO: 936735 - DNA, 15 bp, Homo sapiens
aactcatgattttta

SEQ ID NO: 936736 - DNA, 15 bp, Homo sapiens
actcatgatttttat

SEQ ID NO: 936737 - DNA, 15 bp, Homo sapiens
ctcatgatttttatg

SEQ ID NO: 936738 - DNA, 15 bp, Homo sapiens
tcatgatttttatgt

SEQ ID NO: 936739 - DNA, 15 bp, Homo sapiens
catgatttttatgtt

SEQ ID NO: 936740 - DNA, 15 bp, Homo sapiens
atgatttttatgttc

SEQ ID NO: 936741 - DNA, 15 bp, Homo sapiens
tgatttttatgttct

SEQ ID NO: 936742 - DNA, 15 bp, Homo sapiens
gatttttatgttctc

SEQ ID NO: 936743 - DNA, 15 bp, Homo sapiens
atttttatgttctct

SEQ ID NO: 936744 - DNA, 15 bp, Homo sapiens
tttttatgttctctc

SEQ ID NO: 936745 - DNA, 15 bp, Homo sapiens
ttttatgttctctcc

SEQ ID NO: 936746 - DNA, 15 bp, Homo sapiens
tttatgttctctcct

SEQ ID NO: 936747 - DNA, 15 bp, Homo sapiens
ttatgttctctcctg

SEQ ID NO: 936748 - DNA, 15 bp, Homo sapiens
tatgttctctcctgt

SEQ ID NO: 936749 - DNA, 15 bp, Homo sapiens
atgttctctcctgtc

SEQ ID NO: 936750 - DNA, 15 bp, Homo sapiens
tgttctctcctgtcc

SEQ ID NO: 936751 - DNA, 15 bp, Homo sapiens
gttctctcctgtccc

SEQ ID NO: 936752 - DNA, 15 bp, Homo sapiens
ttctctcctgtccca

SEQ ID NO: 936753 - DNA, 15 bp, Homo sapiens
tctctcctgtcccac

SEQ ID NO: 936754 - DNA, 15 bp, Homo sapiens
gtttccttctggtat

SEQ ID NO: 936755 - DNA, 15 bp, Homo sapiens
tttccttctggtatc

SEQ ID NO: 936756 - DNA, 15 bp, Homo sapiens
ttccttctggtatca

SEQ ID NO: 936757 - DNA, 15 bp, Homo sapiens
tccttctggtatcat

SEQ ID NO: 936758 - DNA, 15 bp, Homo sapiens
ccttctggtatcatt

SEQ ID NO: 936759 - DNA, 15 bp, Homo sapiens
cttctggtatcattt

SEQ ID NO: 936760 - DNA, 15 bp, Homo sapiens
ttctggtatcattta

SEQ ID NO: 936761 - DNA, 15 bp, Homo sapiens
tctggtatcatttat

SEQ ID NO: 936762 - DNA, 15 bp, Homo sapiens
ctggtatcatttatc

SEQ ID NO: 936763 - DNA, 15 bp, Homo sapiens
tggtatcatttatct

SEQ ID NO: 936764 - DNA, 15 bp, Homo sapiens
ggtatcatttatctt

SEQ ID NO: 936765 - DNA, 15 bp, Homo sapiens
gtatcatttatcttc

SEQ ID NO: 936766 - DNA, 15 bp, Homo sapiens
tatcatttatcttct

SEQ ID NO: 936767 - DNA, 15 bp, Homo sapiens
atcatttatcttctg

SEQ ID NO: 936768 - DNA, 15 bp, Homo sapiens
tcatttatcttctgt

SEQ ID NO: 936769 - DNA, 15 bp, Homo sapiens
catttatcttctgtc

SEQ ID NO: 936770 - DNA, 15 bp, Homo sapiens
atttatcttctgtca

SEQ ID NO: 936771 - DNA, 15 bp, Homo sapiens
tttatcttctgtcag

SEQ ID NO: 936772 - DNA, 15 bp, Homo sapiens
ttatcttctgtcaga

SEQ ID NO: 936773 - DNA, 15 bp, Homo sapiens
tatcttctgtcagaa

SEQ ID NO: 936774 - DNA, 15 bp, Homo sapiens
atcttctgtcagaag

SEQ ID NO: 936775 - DNA, 15 bp, Homo sapiens
tcttctgtcagaaga

SEQ ID NO: 936776 - DNA, 15 bp, Homo sapiens
cttctgtcagaagat

SEQ ID NO: 936777 - DNA, 15 bp, Homo sapiens
ttctgtcagaagatt

SEQ ID NO: 936778 - DNA, 15 bp, Homo sapiens
tctgtcagaagattt

SEQ ID NO: 936779 - DNA, 15 bp, Homo sapiens
ctgtcagaagatttt

SEQ ID NO: 936780 - DNA, 15 bp, Homo sapiens
tgtcagaagattttc

SEQ ID NO: 936781 - DNA, 15 bp, Homo sapiens
gtcagaagattttct

SEQ ID NO: 936782 - DNA, 15 bp, Homo sapiens
tcagaagattttctt

SEQ ID NO: 936783 - DNA, 15 bp, Homo sapiens
cagaagattttcttt

SEQ ID NO: 936784 - DNA, 15 bp, Homo sapiens
agaagattttcttta

SEQ ID NO: 936785 - DNA, 15 bp, Homo sapiens
gaagattttctttac

SEQ ID NO: 936786 - DNA, 15 bp, Homo sapiens
aagattttctttact

SEQ ID NO: 936787 - DNA, 15 bp, Homo sapiens
agattttctttactg

SEQ ID NO: 936788 - DNA, 15 bp, Homo sapiens
gattttctttactga

SEQ ID NO: 936789 - DNA, 15 bp, Homo sapiens
attttctttactgat

SEQ ID NO: 936790 - DNA, 15 bp, Homo sapiens
ttttctttactgatt

SEQ ID NO: 936791 - DNA, 15 bp, Homo sapiens
tttctttactgattc

SEQ ID NO: 936792 - DNA, 15 bp, Homo sapiens
ttctttactgattct

SEQ ID NO: 936793 - DNA, 15 bp, Homo sapiens
tctttactgattctt

SEQ ID NO: 936794 - DNA, 15 bp, Homo sapiens
ctttactgattcttt

SEQ ID NO: 936795 - DNA, 15 bp, Homo sapiens
tttactgattctttt

SEQ ID NO: 936796 - DNA, 15 bp, Homo sapiens
ttactgattctttta

SEQ ID NO: 936797 - DNA, 15 bp, Homo sapiens
tactgattcttttag

SEQ ID NO: 936798 - DNA, 15 bp, Homo sapiens
actgattcttttaga

SEQ ID NO: 936799 - DNA, 15 bp, Homo sapiens
ctgattcttttagag

SEQ ID NO: 936800 - DNA, 15 bp, Homo sapiens
tgattcttttagagt

SEQ ID NO: 936801 - DNA, 15 bp, Homo sapiens
gattcttttagagta

SEQ ID NO: 936802 - DNA, 15 bp, Homo sapiens
attcttttagagtag

SEQ ID NO: 936803 - DNA, 15 bp, Homo sapiens
ttcttttagagtagg

SEQ ID NO: 936804 - DNA, 15 bp, Homo sapiens
tcttttagagtaggt

SEQ ID NO: 936805 - DNA, 15 bp, Homo sapiens
cttttagagtaggtc

SEQ ID NO: 936806 - DNA, 15 bp, Homo sapiens
ttttagagtaggtct

SEQ ID NO: 936807 - DNA, 15 bp, Homo sapiens
tttagagtaggtctg

SEQ ID NO: 936808 - DNA, 15 bp, Homo sapiens
ttagagtaggtctga

SEQ ID NO: 936809 - DNA, 15 bp, Homo sapiens
tagagtaggtctgat

SEQ ID NO: 936810 - DNA, 15 bp, Homo sapiens
agagtaggtctgatg

SEQ ID NO: 936811 - DNA, 15 bp, Homo sapiens
gagtaggtctgatgg

SEQ ID NO: 936812 - DNA, 15 bp, Homo sapiens
agtaggtctgatggc

SEQ ID NO: 936813 - DNA, 15 bp, Homo sapiens
gtaggtctgatggca

SEQ ID NO: 936814 - DNA, 15 bp, Homo sapiens
taggtctgatggcaa

SEQ ID NO: 936815 - DNA, 15 bp, Homo sapiens
aggtctgatggcaac

SEQ ID NO: 936816 - DNA, 15 bp, Homo sapiens
ggtctgatggcaaca

SEQ ID NO: 936817 - DNA, 15 bp, Homo sapiens
gtctgatggcaacaa

SEQ ID NO: 936818 - DNA, 15 bp, Homo sapiens
tctgatggcaacaaa

SEQ ID NO: 936819 - DNA, 15 bp, Homo sapiens
ctgatggcaacaaat

SEQ ID NO: 936820 - DNA, 15 bp, Homo sapiens
tgatggcaacaaatt

SEQ ID NO: 936821 - DNA, 15 bp, Homo sapiens
gatggcaacaaattc

SEQ ID NO: 936822 - DNA, 15 bp, Homo sapiens
atggcaacaaattct

SEQ ID NO: 936823 - DNA, 15 bp, Homo sapiens
tggcaacaaattctt

SEQ ID NO: 936824 - DNA, 15 bp, Homo sapiens
ggcaacaaattcttt

SEQ ID NO: 936825 - DNA, 15 bp, Homo sapiens
gcaacaaattctttc

SEQ ID NO: 936826 - DNA, 15 bp, Homo sapiens
caacaaattctttca

SEQ ID NO: 936827 - DNA, 15 bp, Homo sapiens
aacaaattctttcag

SEQ ID NO: 936828 - DNA, 15 bp, Homo sapiens
acaaattctttcagt

SEQ ID NO: 936829 - DNA, 15 bp, Homo sapiens
caaattctttcagtt

SEQ ID NO: 936830 - DNA, 15 bp, Homo sapiens
aaattctttcagttt

SEQ ID NO: 936831 - DNA, 15 bp, Homo sapiens
aattctttcagtttt

SEQ ID NO: 936832 - DNA, 15 bp, Homo sapiens
attctttcagttttc

SEQ ID NO: 936833 - DNA, 15 bp, Homo sapiens
ttctttcagttttct

SEQ ID NO: 936834 - DNA, 15 bp, Homo sapiens
tctttcagttttctt

SEQ ID NO: 936835 - DNA, 15 bp, Homo sapiens
ctttcagttttcttt

SEQ ID NO: 936836 - DNA, 15 bp, Homo sapiens
tttcagttttctttg

SEQ ID NO: 936837 - DNA, 15 bp, Homo sapiens
ttcagttttctttga

SEQ ID NO: 936838 - DNA, 15 bp, Homo sapiens
tcagttttctttgac

SEQ ID NO: 936839 - DNA, 15 bp, Homo sapiens
cagttttctttgact

SEQ ID NO: 936840 - DNA, 15 bp, Homo sapiens
agttttctttgactt

SEQ ID NO: 936841 - DNA, 15 bp, Homo sapiens
gttttctttgacttg

SEQ ID NO: 936842 - DNA, 15 bp, Homo sapiens
ttttctttgacttga

SEQ ID NO: 936843 - DNA, 15 bp, Homo sapiens
tttctttgacttgac

SEQ ID NO: 936844 - DNA, 15 bp, Homo sapiens
ttctttgacttgact

SEQ ID NO: 936845 - DNA, 15 bp, Homo sapiens
tctttgacttgactt

SEQ ID NO: 936846 - DNA, 15 bp, Homo sapiens
ctttgacttgacttg

SEQ ID NO: 936847 - DNA, 15 bp, Homo sapiens
tttgacttgacttga

SEQ ID NO: 936848 - DNA, 15 bp, Homo sapiens
ttgacttgacttgaa

SEQ ID NO: 936849 - DNA, 15 bp, Homo sapiens
tgacttgacttgaaa

SEQ ID NO: 936850 - DNA, 15 bp, Homo sapiens
gacttgacttgaaag

SEQ ID NO: 936851 - DNA, 15 bp, Homo sapiens
acttgacttgaaagt

SEQ ID NO: 936852 - DNA, 15 bp, Homo sapiens
cttgacttgaaagtg

SEQ ID NO: 936853 - DNA, 15 bp, Homo sapiens
ttgacttgaaagtgt

SEQ ID NO: 936854 - DNA, 15 bp, Homo sapiens
tgacttgaaagtgtt

SEQ ID NO: 936855 - DNA, 15 bp, Homo sapiens
gacttgaaagtgttt

SEQ ID NO: 936856 - DNA, 15 bp, Homo sapiens
acttgaaagtgtttt

SEQ ID NO: 936857 - DNA, 15 bp, Homo sapiens
cttgaaagtgttttt

SEQ ID NO: 936858 - DNA, 15 bp, Homo sapiens
ttgaaagtgttttta

SEQ ID NO: 936859 - DNA, 15 bp, Homo sapiens
tgaaagtgtttttat

SEQ ID NO: 936860 - DNA, 15 bp, Homo sapiens
gaaagtgtttttatt

SEQ ID NO: 936861 - DNA, 15 bp, Homo sapiens
aaagtgtttttattt

SEQ ID NO: 936862 - DNA, 15 bp, Homo sapiens
aagtgtttttatttt

SEQ ID NO: 936863 - DNA, 15 bp, Homo sapiens
agtgtttttatttta

SEQ ID NO: 936864 - DNA, 15 bp, Homo sapiens
gtgtttttattttac

SEQ ID NO: 936865 - DNA, 15 bp, Homo sapiens
tgtttttattttacc

SEQ ID NO: 936866 - DNA, 15 bp, Homo sapiens
gtttttattttacct

SEQ ID NO: 936867 - DNA, 15 bp, Homo sapiens
tttttattttacctt

SEQ ID NO: 936868 - DNA, 15 bp, Homo sapiens
ttttattttaccttc

SEQ ID NO: 936869 - DNA, 15 bp, Homo sapiens
tttattttaccttcg

SEQ ID NO: 936870 - DNA, 15 bp, Homo sapiens
ttattttaccttcgt

SEQ ID NO: 936871 - DNA, 15 bp, Homo sapiens
tattttaccttcgtt

SEQ ID NO: 936872 - DNA, 15 bp, Homo sapiens
attttaccttcgttc

SEQ ID NO: 936873 - DNA, 15 bp, Homo sapiens
ttttaccttcgttcc

SEQ ID NO: 936874 - DNA, 15 bp, Homo sapiens
tttaccttcgttcct

SEQ ID NO: 936875 - DNA, 15 bp, Homo sapiens
ttaccttcgttcctg

SEQ ID NO: 936876 - DNA, 15 bp, Homo sapiens
taccttcgttcctga

SEQ ID NO: 936877 - DNA, 15 bp, Homo sapiens
accttcgttcctgaa

SEQ ID NO: 936878 - DNA, 15 bp, Homo sapiens
ccttcgttcctgaag

SEQ ID NO: 936879 - DNA, 15 bp, Homo sapiens
cttcgttcctgaaga

SEQ ID NO: 936880 - DNA, 15 bp, Homo sapiens
ttcgttcctgaagaa

SEQ ID NO: 936881 - DNA, 15 bp, Homo sapiens
tcgttcctgaagaat

SEQ ID NO: 936882 - DNA, 15 bp, Homo sapiens
cgttcctgaagaata

SEQ ID NO: 936883 - DNA, 15 bp, Homo sapiens
gttcctgaagaatat

SEQ ID NO: 936884 - DNA, 15 bp, Homo sapiens
ttcctgaagaatatt

SEQ ID NO: 936885 - DNA, 15 bp, Homo sapiens
tcctgaagaatattt

SEQ ID NO: 936886 - DNA, 15 bp, Homo sapiens
cctgaagaatatttt

SEQ ID NO: 936887 - DNA, 15 bp, Homo sapiens
ctgaagaatattttc

SEQ ID NO: 936888 - DNA, 15 bp, Homo sapiens
tgaagaatattttca

SEQ ID NO: 936889 - DNA, 15 bp, Homo sapiens
gaagaatattttcac

SEQ ID NO: 936890 - DNA, 15 bp, Homo sapiens
aagaatattttcact

SEQ ID NO: 936891 - DNA, 15 bp, Homo sapiens
agaatattttcactg

SEQ ID NO: 936892 - DNA, 15 bp, Homo sapiens
gaatattttcactgt

SEQ ID NO: 936893 - DNA, 15 bp, Homo sapiens
aatattttcactgta

SEQ ID NO: 936894 - DNA, 15 bp, Homo sapiens
atattttcactgtat

SEQ ID NO: 936895 - DNA, 15 bp, Homo sapiens
tattttcactgtata

SEQ ID NO: 936896 - DNA, 15 bp, Homo sapiens
attttcactgtatat

SEQ ID NO: 936897 - DNA, 15 bp, Homo sapiens
ttttcactgtatatt

SEQ ID NO: 936898 - DNA, 15 bp, Homo sapiens
tttcactgtatattg

SEQ ID NO: 936899 - DNA, 15 bp, Homo sapiens
ttcactgtatattga

SEQ ID NO: 936900 - DNA, 15 bp, Homo sapiens
tcactgtatattgaa

SEQ ID NO: 936901 - DNA, 15 bp, Homo sapiens
cactgtatattgaat

SEQ ID NO: 936902 - DNA, 15 bp, Homo sapiens
actgtatattgaatt

SEQ ID NO: 936903 - DNA, 15 bp, Homo sapiens
ctgtatattgaattt

SEQ ID NO: 936904 - DNA, 15 bp, Homo sapiens
tgtatattgaatttt

SEQ ID NO: 936905 - DNA, 15 bp, Homo sapiens
gtatattgaattttg

SEQ ID NO: 936906 - DNA, 15 bp, Homo sapiens
tatattgaattttgg

SEQ ID NO: 936907 - DNA, 15 bp, Homo sapiens
atattgaattttggt

SEQ ID NO: 936908 - DNA, 15 bp, Homo sapiens
tattgaattttggtt

SEQ ID NO: 936909 - DNA, 15 bp, Homo sapiens
attgaattttggttg

SEQ ID NO: 936910 - DNA, 15 bp, Homo sapiens
ttgaattttggttga

SEQ ID NO: 936911 - DNA, 15 bp, Homo sapiens
tgaattttggttgac

SEQ ID NO: 936912 - DNA, 15 bp, Homo sapiens
gaattttggttgaca

SEQ ID NO: 936913 - DNA, 15 bp, Homo sapiens
aattttggttgacag

SEQ ID NO: 936914 - DNA, 15 bp, Homo sapiens
attttggttgacagg

SEQ ID NO: 936915 - DNA, 15 bp, Homo sapiens
ttttggttgacaggt

SEQ ID NO: 936916 - DNA, 15 bp, Homo sapiens
tttggttgacaggtt

SEQ ID NO: 936917 - DNA, 15 bp, Homo sapiens
ttggttgacaggttt

SEQ ID NO: 936918 - DNA, 15 bp, Homo sapiens
tggttgacaggtttt

SEQ ID NO: 936919 - DNA, 15 bp, Homo sapiens
ggttgacaggttttt

SEQ ID NO: 936920 - DNA, 15 bp, Homo sapiens
gttgacaggtttttt

SEQ ID NO: 936921 - DNA, 15 bp, Homo sapiens
ttgacaggttttttt

SEQ ID NO: 936922 - DNA, 15 bp, Homo sapiens
tgacaggtttttttt

SEQ ID NO: 936923 - DNA, 15 bp, Homo sapiens
gacaggttttttttc

SEQ ID NO: 936924 - DNA, 15 bp, Homo sapiens
acaggttttttttca

SEQ ID NO: 936925 - DNA, 15 bp, Homo sapiens
caggttttttttcaa

SEQ ID NO: 936926 - DNA, 15 bp, Homo sapiens
aggttttttttcaaa

SEQ ID NO: 936927 - DNA, 15 bp, Homo sapiens
ggttttttttcaaat

SEQ ID NO: 936928 - DNA, 15 bp, Homo sapiens
gttttttttcaaata

SEQ ID NO: 936929 - DNA, 15 bp, Homo sapiens
ttttttttcaaatat

SEQ ID NO: 936930 - DNA, 15 bp, Homo sapiens
tttttttcaaatatt

SEQ ID NO: 936931 - DNA, 15 bp, Homo sapiens
ttttttcaaatattt

SEQ ID NO: 936932 - DNA, 15 bp, Homo sapiens
tttttcaaatatttc

SEQ ID NO: 936933 - DNA, 15 bp, Homo sapiens
ttttcaaatatttct

SEQ ID NO: 936934 - DNA, 15 bp, Homo sapiens
tttcaaatatttctt

SEQ ID NO: 936935 - DNA, 15 bp, Homo sapiens
ttcaaatatttcttt

SEQ ID NO: 936936 - DNA, 15 bp, Homo sapiens
tcaaatatttcttta

SEQ ID NO: 936937 - DNA, 15 bp, Homo sapiens
caaatatttctttag

SEQ ID NO: 936938 - DNA, 15 bp, Homo sapiens
aaatatttctttaga

SEQ ID NO: 936939 - DNA, 15 bp, Homo sapiens
aatatttctttagat

SEQ ID NO: 936940 - DNA, 15 bp, Homo sapiens
atatttctttagata

SEQ ID NO: 936941 - DNA, 15 bp, Homo sapiens
tatttctttagatat

SEQ ID NO: 936942 - DNA, 15 bp, Homo sapiens
atttctttagatatt

SEQ ID NO: 936943 - DNA, 15 bp, Homo sapiens
tttctttagatattt

SEQ ID NO: 936944 - DNA, 15 bp, Homo sapiens
ttctttagatatttt

SEQ ID NO: 936945 - DNA, 15 bp, Homo sapiens
tctttagatattttt

SEQ ID NO: 936946 - DNA, 15 bp, Homo sapiens
ctttagatatttttt

SEQ ID NO: 936947 - DNA, 15 bp, Homo sapiens
tttagatatttttta

SEQ ID NO: 936948 - DNA, 15 bp, Homo sapiens
ttagatattttttag

SEQ ID NO: 936949 - DNA, 15 bp, Homo sapiens
tagatattttttaga

SEQ ID NO: 936950 - DNA, 15 bp, Homo sapiens
agatattttttagat

SEQ ID NO: 936951 - DNA, 15 bp, Homo sapiens
gatattttttagata

SEQ ID NO: 936952 - DNA, 15 bp, Homo sapiens
atattttttagatat

SEQ ID NO: 936953 - DNA, 15 bp, Homo sapiens
tattttttagatata

SEQ ID NO: 936954 - DNA, 15 bp, Homo sapiens
attttttagatatac

SEQ ID NO: 936955 - DNA, 15 bp, Homo sapiens
ttttttagatataca

SEQ ID NO: 936956 - DNA, 15 bp, Homo sapiens
tttttagatatacac

SEQ ID NO: 936957 - DNA, 15 bp, Homo sapiens
ttttagatatacact

SEQ ID NO: 936958 - DNA, 15 bp, Homo sapiens
tttagatatacactg

SEQ ID NO: 936959 - DNA, 15 bp, Homo sapiens
ttagatatacactgc

SEQ ID NO: 936960 - DNA, 15 bp, Homo sapiens
tagatatacactgca

SEQ ID NO: 936961 - DNA, 15 bp, Homo sapiens
agatatacactgcat

SEQ ID NO: 936962 - DNA, 15 bp, Homo sapiens
gatatacactgcatc

SEQ ID NO: 936963 - DNA, 15 bp, Homo sapiens
atatacactgcatct

SEQ ID NO: 936964 - DNA, 15 bp, Homo sapiens
tatacactgcatcta

SEQ ID NO: 936965 - DNA, 15 bp, Homo sapiens
atacactgcatctaa

SEQ ID NO: 936966 - DNA, 15 bp, Homo sapiens
tacactgcatctaaa

SEQ ID NO: 936967 - DNA, 15 bp, Homo sapiens
acactgcatctaaag

SEQ ID NO: 936968 - DNA, 15 bp, Homo sapiens
cactgcatctaaaga

SEQ ID NO: 936969 - DNA, 15 bp, Homo sapiens
actgcatctaaagaa

SEQ ID NO: 936970 - DNA, 15 bp, Homo sapiens
ctgcatctaaagaac

SEQ ID NO: 936971 - DNA, 15 bp, Homo sapiens
tgcatctaaagaaca

SEQ ID NO: 936972 - DNA, 15 bp, Homo sapiens
gcatctaaagaacac

SEQ ID NO: 936973 - DNA, 15 bp, Homo sapiens
catctaaagaacact

SEQ ID NO: 936974 - DNA, 15 bp, Homo sapiens
atctaaagaacactg

SEQ ID NO: 936975 - DNA, 15 bp, Homo sapiens
tctaaagaacactgg

SEQ ID NO: 936976 - DNA, 15 bp, Homo sapiens
ctaaagaacactgga

SEQ ID NO: 936977 - DNA, 15 bp, Homo sapiens
taaagaacactggaa

SEQ ID NO: 936978 - DNA, 15 bp, Homo sapiens
aaagaacactggaat

SEQ ID NO: 936979 - DNA, 15 bp, Homo sapiens
aagaacactggaatt

SEQ ID NO: 936980 - DNA, 15 bp, Homo sapiens
agaacactggaattg

SEQ ID NO: 936981 - DNA, 15 bp, Homo sapiens
gaacactggaattgc

SEQ ID NO: 936982 - DNA, 15 bp, Homo sapiens
aacactggaattgct

SEQ ID NO: 936983 - DNA, 15 bp, Homo sapiens
acactggaattgctt

SEQ ID NO: 936984 - DNA, 15 bp, Homo sapiens
cactggaattgcttt

SEQ ID NO: 936985 - DNA, 15 bp, Homo sapiens
actggaattgctttt

SEQ ID NO: 936986 - DNA, 15 bp, Homo sapiens
ctggaattgctttta

SEQ ID NO: 936987 - DNA, 15 bp, Homo sapiens
tggaattgcttttac

SEQ ID NO: 936988 - DNA, 15 bp, Homo sapiens
ggaattgcttttaca

SEQ ID NO: 936989 - DNA, 15 bp, Homo sapiens
gaattgcttttacag

SEQ ID NO: 936990 - DNA, 15 bp, Homo sapiens
aattgcttttacaga

SEQ ID NO: 936991 - DNA, 15 bp, Homo sapiens
attgcttttacagac

SEQ ID NO: 936992 - DNA, 15 bp, Homo sapiens
ttgcttttacagacc

SEQ ID NO: 936993 - DNA, 15 bp, Homo sapiens
tgcttttacagacca

SEQ ID NO: 936994 - DNA, 15 bp, Homo sapiens
gcttttacagaccag

SEQ ID NO: 936995 - DNA, 15 bp, Homo sapiens
cttttacagaccaga

SEQ ID NO: 936996 - DNA, 15 bp, Homo sapiens
ttttacagaccagag

SEQ ID NO: 936997 - DNA, 15 bp, Homo sapiens
tttacagaccagagt

SEQ ID NO: 936998 - DNA, 15 bp, Homo sapiens
ttacagaccagagtc

SEQ ID NO: 936999 - DNA, 15 bp, Homo sapiens
tacagaccagagtct

SEQ ID NO: 937000 - DNA, 15 bp, Homo sapiens
acagaccagagtctg

SEQ ID NO: 937001 - DNA, 15 bp, Homo sapiens
cagaccagagtctgc

SEQ ID NO: 937002 - DNA, 15 bp, Homo sapiens
agaccagagtctgct

SEQ ID NO: 937003 - DNA, 15 bp, Homo sapiens
gaccagagtctgctc

SEQ ID NO: 937004 - DNA, 15 bp, Homo sapiens
accagagtctgctcc

SEQ ID NO: 937005 - DNA, 15 bp, Homo sapiens
ccagagtctgctcca

SEQ ID NO: 937006 - DNA, 15 bp, Homo sapiens
cagagtctgctccat

SEQ ID NO: 937007 - DNA, 15 bp, Homo sapiens
agagtctgctccatt

SEQ ID NO: 937008 - DNA, 15 bp, Homo sapiens
gagtctgctccattt

SEQ ID NO: 937009 - DNA, 15 bp, Homo sapiens
agtctgctccatttt

SEQ ID NO: 937010 - DNA, 15 bp, Homo sapiens
gtctgctccattttt

SEQ ID NO: 937011 - DNA, 15 bp, Homo sapiens
tctgctccatttttt

SEQ ID NO: 937012 - DNA, 15 bp, Homo sapiens
ctgctccattttttc

SEQ ID NO: 937013 - DNA, 15 bp, Homo sapiens
tgctccattttttct

SEQ ID NO: 937014 - DNA, 15 bp, Homo sapiens
gctccattttttctc

SEQ ID NO: 937015 - DNA, 15 bp, Homo sapiens
ctccattttttctct

SEQ ID NO: 937016 - DNA, 15 bp, Homo sapiens
tccattttttctctt

SEQ ID NO: 937017 - DNA, 15 bp, Homo sapiens
ccattttttctcttt

SEQ ID NO: 937018 - DNA, 15 bp, Homo sapiens
cattttttctcttta

SEQ ID NO: 937019 - DNA, 15 bp, Homo sapiens
attttttctctttat

SEQ ID NO: 937020 - DNA, 15 bp, Homo sapiens
ttttttctctttatg

SEQ ID NO: 937021 - DNA, 15 bp, Homo sapiens
tttttctctttatga

SEQ ID NO: 937022 - DNA, 15 bp, Homo sapiens
ttttctctttatgat

SEQ ID NO: 937023 - DNA, 15 bp, Homo sapiens
tttctctttatgata

SEQ ID NO: 937024 - DNA, 15 bp, Homo sapiens
ttctctttatgataa

SEQ ID NO: 937025 - DNA, 15 bp, Homo sapiens
tctctttatgataag

SEQ ID NO: 937026 - DNA, 15 bp, Homo sapiens
ctctttatgataaga

SEQ ID NO: 937027 - DNA, 15 bp, Homo sapiens
tctttatgataagaa

SEQ ID NO: 937028 - DNA, 15 bp, Homo sapiens
ctttatgataagaat

SEQ ID NO: 937029 - DNA, 15 bp, Homo sapiens
tttatgataagaata

SEQ ID NO: 937030 - DNA, 15 bp, Homo sapiens
ttatgataagaatat

SEQ ID NO: 937031 - DNA, 15 bp, Homo sapiens
tatgataagaatata

SEQ ID NO: 937032 - DNA, 15 bp, Homo sapiens
atgataagaatatat

SEQ ID NO: 937033 - DNA, 15 bp, Homo sapiens
tgataagaatatatg

SEQ ID NO: 937034 - DNA, 15 bp, Homo sapiens
gataagaatatatga

SEQ ID NO: 937035 - DNA, 15 bp, Homo sapiens
ataagaatatatgaa

SEQ ID NO: 937036 - DNA, 15 bp, Homo sapiens
taagaatatatgaaa

SEQ ID NO: 937037 - DNA, 15 bp, Homo sapiens
aagaatatatgaaat

SEQ ID NO: 937038 - DNA, 15 bp, Homo sapiens
agaatatatgaaata

SEQ ID NO: 937039 - DNA, 15 bp, Homo sapiens
gaatatatgaaataa

SEQ ID NO: 937040 - DNA, 15 bp, Homo sapiens
aatatatgaaataaa

SEQ ID NO: 937041 - DNA, 15 bp, Homo sapiens
atatatgaaataaaa

SEQ ID NO: 937042 - DNA, 15 bp, Homo sapiens
tatatgaaataaaat

SEQ ID NO: 937043 - DNA, 15 bp, Homo sapiens
atatgaaataaaata

SEQ ID NO: 937044 - DNA, 15 bp, Homo sapiens
tatgaaataaaatag

SEQ ID NO: 937045 - DNA, 15 bp, Homo sapiens
atgaaataaaataga

SEQ ID NO: 937046 - DNA, 15 bp, Homo sapiens
tgaaataaaatagac

SEQ ID NO: 937047 - DNA, 15 bp, Homo sapiens
gaaataaaatagaca

SEQ ID NO: 937048 - DNA, 15 bp, Homo sapiens
aaataaaatagacat

SEQ ID NO: 937049 - DNA, 15 bp, Homo sapiens
aataaaatagacatt

SEQ ID NO: 937050 - DNA, 15 bp, Homo sapiens
ataaaatagacattc

SEQ ID NO: 937051 - DNA, 15 bp, Homo sapiens
taaaatagacattca

SEQ ID NO: 937052 - DNA, 15 bp, Homo sapiens
aaaatagacattcaa

SEQ ID NO: 937053 - DNA, 15 bp, Homo sapiens
aaatagacattcaaa

SEQ ID NO: 937054 - DNA, 15 bp, Homo sapiens
aatagacattcaaat

SEQ ID NO: 937055 - DNA, 15 bp, Homo sapiens
atagacattcaaata

SEQ ID NO: 937056 - DNA, 15 bp, Homo sapiens
tagacattcaaatat

SEQ ID NO: 937057 - DNA, 15 bp, Homo sapiens
agacattcaaatata

SEQ ID NO: 937058 - DNA, 15 bp, Homo sapiens
gacattcaaatatat

SEQ ID NO: 937059 - DNA, 15 bp, Homo sapiens
acattcaaatatatt

SEQ ID NO: 937060 - DNA, 15 bp, Homo sapiens
cattcaaatatatta

SEQ ID NO: 937061 - DNA, 15 bp, Homo sapiens
attcaaatatattac

SEQ ID NO: 937062 - DNA, 15 bp, Homo sapiens
ttcaaatatattact

SEQ ID NO: 937063 - DNA, 15 bp, Homo sapiens
tcaaatatattactt

SEQ ID NO: 937064 - DNA, 15 bp, Homo sapiens
caaatatattactta

SEQ ID NO: 937065 - DNA, 15 bp, Homo sapiens
aaatatattacttac

SEQ ID NO: 937066 - DNA, 15 bp, Homo sapiens
aatatattacttact

SEQ ID NO: 937067 - DNA, 15 bp, Homo sapiens
atatattacttactt

SEQ ID NO: 937068 - DNA, 15 bp, Homo sapiens
tatattacttacttg

SEQ ID NO: 937069 - DNA, 15 bp, Homo sapiens
atattacttacttgc

SEQ ID NO: 937070 - DNA, 15 bp, Homo sapiens
tattacttacttgca

SEQ ID NO: 937071 - DNA, 15 bp, Homo sapiens
attacttacttgcac

SEQ ID NO: 937072 - DNA, 15 bp, Homo sapiens
ttacttacttgcact

SEQ ID NO: 937073 - DNA, 15 bp, Homo sapiens
tacttacttgcactt

SEQ ID NO: 937074 - DNA, 15 bp, Homo sapiens
acttacttgcacttc

SEQ ID NO: 937075 - DNA, 15 bp, Homo sapiens
cttacttgcacttct

SEQ ID NO: 937076 - DNA, 15 bp, Homo sapiens
ttacttgcacttctg

SEQ ID NO: 937077 - DNA, 15 bp, Homo sapiens
tacttgcacttctgc

SEQ ID NO: 937078 - DNA, 15 bp, Homo sapiens
acttgcacttctgca

SEQ ID NO: 937079 - DNA, 15 bp, Homo sapiens
cttgcacttctgcac

SEQ ID NO: 937080 - DNA, 15 bp, Homo sapiens
ttgcacttctgcact

SEQ ID NO: 937081 - DNA, 15 bp, Homo sapiens
tgcacttctgcactt

SEQ ID NO: 937082 - DNA, 15 bp, Homo sapiens
gcacttctgcacttg

SEQ ID NO: 937083 - DNA, 15 bp, Homo sapiens
cacttctgcacttgc

SEQ ID NO: 937084 - DNA, 15 bp, Homo sapiens
acttctgcacttgcc

SEQ ID NO: 937085 - DNA, 15 bp, Homo sapiens
cttctgcacttgccc

SEQ ID NO: 937086 - DNA, 15 bp, Homo sapiens
ttctgcacttgccct

SEQ ID NO: 937087 - DNA, 15 bp, Homo sapiens
tctgcacttgccctg

SEQ ID NO: 937088 - DNA, 15 bp, Homo sapiens
ctgcacttgccctga

SEQ ID NO: 937089 - DNA, 15 bp, Homo sapiens
tgcacttgccctgaa

SEQ ID NO: 937090 - DNA, 15 bp, Homo sapiens
gcacttgccctgaag

SEQ ID NO: 937091 - DNA, 15 bp, Homo sapiens
cacttgccctgaaga

SEQ ID NO: 937092 - DNA, 15 bp, Homo sapiens
acttgccctgaagat

SEQ ID NO: 937093 - DNA, 15 bp, Homo sapiens
cttgccctgaagatt

SEQ ID NO: 937094 - DNA, 15 bp, Homo sapiens
ttgccctgaagattt

SEQ ID NO: 937095 - DNA, 15 bp, Homo sapiens
tgccctgaagatttc

SEQ ID NO: 937096 - DNA, 15 bp, Homo sapiens
gccctgaagatttca

SEQ ID NO: 937097 - DNA, 15 bp, Homo sapiens
ccctgaagatttcaa

SEQ ID NO: 937098 - DNA, 15 bp, Homo sapiens
cctgaagatttcaaa

SEQ ID NO: 937099 - DNA, 15 bp, Homo sapiens
ctgaagatttcaaag

SEQ ID NO: 937100 - DNA, 15 bp, Homo sapiens
tgaagatttcaaagt

SEQ ID NO: 937101 - DNA, 15 bp, Homo sapiens
gaagatttcaaagta

SEQ ID NO: 937102 - DNA, 15 bp, Homo sapiens
aagatttcaaagtag

SEQ ID NO: 937103 - DNA, 15 bp, Homo sapiens
agatttcaaagtaga

SEQ ID NO: 937104 - DNA, 15 bp, Homo sapiens
gatttcaaagtagaa

SEQ ID NO: 937105 - DNA, 15 bp, Homo sapiens
atttcaaagtagaaa

SEQ ID NO: 937106 - DNA, 15 bp, Homo sapiens
tttcaaagtagaaaa

SEQ ID NO: 937107 - DNA, 15 bp, Homo sapiens
ttcaaagtagaaaag

SEQ ID NO: 937108 - DNA, 15 bp, Homo sapiens
tcaaagtagaaaagt

SEQ ID NO: 937109 - DNA, 15 bp, Homo sapiens
caaagtagaaaagtt

SEQ ID NO: 937110 - DNA, 15 bp, Homo sapiens
aaagtagaaaagttt

SEQ ID NO: 937111 - DNA, 15 bp, Homo sapiens
aagtagaaaagtttc

SEQ ID NO: 937112 - DNA, 15 bp, Homo sapiens
agtagaaaagtttct

SEQ ID NO: 937113 - DNA, 15 bp, Homo sapiens
gtagaaaagtttcta

SEQ ID NO: 937114 - DNA, 15 bp, Homo sapiens
tagaaaagtttctat

SEQ ID NO: 937115 - DNA, 15 bp, Homo sapiens
agaaaagtttctata

SEQ ID NO: 937116 - DNA, 15 bp, Homo sapiens
gaaaagtttctatag

SEQ ID NO: 937117 - DNA, 15 bp, Homo sapiens
aaaagtttctatagc

SEQ ID NO: 937118 - DNA, 15 bp, Homo sapiens
aaagtttctatagca

SEQ ID NO: 937119 - DNA, 15 bp, Homo sapiens
aagtttctatagcaa

SEQ ID NO: 937120 - DNA, 15 bp, Homo sapiens
agtttctatagcaaa

SEQ ID NO: 937121 - DNA, 15 bp, Homo sapiens
gtttctatagcaaac

SEQ ID NO: 937122 - DNA, 15 bp, Homo sapiens
tttctatagcaaaca

SEQ ID NO: 937123 - DNA, 15 bp, Homo sapiens
ttctatagcaaacat

SEQ ID NO: 937124 - DNA, 15 bp, Homo sapiens
tctatagcaaacata

SEQ ID NO: 937125 - DNA, 15 bp, Homo sapiens
ctatagcaaacataa

SEQ ID NO: 937126 - DNA, 15 bp, Homo sapiens
tatagcaaacataaa

SEQ ID NO: 937127 - DNA, 15 bp, Homo sapiens
atagcaaacataaaa

SEQ ID NO: 937128 - DNA, 15 bp, Homo sapiens
tagcaaacataaaat

SEQ ID NO: 937129 - DNA, 15 bp, Homo sapiens
agcaaacataaaatg

SEQ ID NO: 937130 - DNA, 15 bp, Homo sapiens
gcaaacataaaatgt

SEQ ID NO: 937131 - DNA, 15 bp, Homo sapiens
caaacataaaatgtt

SEQ ID NO: 937132 - DNA, 15 bp, Homo sapiens
aaacataaaatgttt

SEQ ID NO: 937133 - DNA, 15 bp, Homo sapiens
aacataaaatgttta

SEQ ID NO: 937134 - DNA, 15 bp, Homo sapiens
acataaaatgtttac

SEQ ID NO: 937135 - DNA, 15 bp, Homo sapiens
cataaaatgtttact

SEQ ID NO: 937136 - DNA, 15 bp, Homo sapiens
ataaaatgtttactt

SEQ ID NO: 937137 - DNA, 15 bp, Homo sapiens
taaaatgtttactta

SEQ ID NO: 937138 - DNA, 15 bp, Homo sapiens
aaaatgtttacttat

SEQ ID NO: 937139 - DNA, 15 bp, Homo sapiens
aaatgtttacttatg

SEQ ID NO: 937140 - DNA, 15 bp, Homo sapiens
aatgtttacttatga

SEQ ID NO: 937141 - DNA, 15 bp, Homo sapiens
atgtttacttatgat

SEQ ID NO: 937142 - DNA, 15 bp, Homo sapiens
tgtttacttatgata

SEQ ID NO: 937143 - DNA, 15 bp, Homo sapiens
gtttacttatgataa

SEQ ID NO: 937144 - DNA, 15 bp, Homo sapiens
tttacttatgataat

SEQ ID NO: 937145 - DNA, 15 bp, Homo sapiens
ttacttatgataata

SEQ ID NO: 937146 - DNA, 15 bp, Homo sapiens
tacttatgataatat

SEQ ID NO: 937147 - DNA, 15 bp, Homo sapiens
acttatgataatatg

SEQ ID NO: 937148 - DNA, 15 bp, Homo sapiens
cttatgataatatga

SEQ ID NO: 937149 - DNA, 15 bp, Homo sapiens
ttatgataatatgag

SEQ ID NO: 937150 - DNA, 15 bp, Homo sapiens
tatgataatatgaga

SEQ ID NO: 937151 - DNA, 15 bp, Homo sapiens
atgataatatgagac

SEQ ID NO: 937152 - DNA, 15 bp, Homo sapiens
tgataatatgagaca

SEQ ID NO: 937153 - DNA, 15 bp, Homo sapiens
gataatatgagacat

SEQ ID NO: 937154 - DNA, 15 bp, Homo sapiens
ataatatgagacatt

SEQ ID NO: 937155 - DNA, 15 bp, Homo sapiens
taatatgagacattg

SEQ ID NO: 937156 - DNA, 15 bp, Homo sapiens
aatatgagacattga

SEQ ID NO: 937157 - DNA, 15 bp, Homo sapiens
atatgagacattgag

SEQ ID NO: 937158 - DNA, 15 bp, Homo sapiens
tatgagacattgagc

SEQ ID NO: 937159 - DNA, 15 bp, Homo sapiens
atgagacattgagcc

SEQ ID NO: 937160 - DNA, 15 bp, Homo sapiens
tgagacattgagcca

SEQ ID NO: 937161 - DNA, 15 bp, Homo sapiens
gagacattgagccaa

SEQ ID NO: 937162 - DNA, 15 bp, Homo sapiens
agacattgagccaat

SEQ ID NO: 937163 - DNA, 15 bp, Homo sapiens
gacattgagccaatg

SEQ ID NO: 937164 - DNA, 15 bp, Homo sapiens
acattgagccaatgt

SEQ ID NO: 937165 - DNA, 15 bp, Homo sapiens
cattgagccaatgta

SEQ ID NO: 937166 - DNA, 15 bp, Homo sapiens
attgagccaatgtag

SEQ ID NO: 937167 - DNA, 15 bp, Homo sapiens
ttgagccaatgtagc

SEQ ID NO: 937168 - DNA, 15 bp, Homo sapiens
tgagccaatgtagct

SEQ ID NO: 937169 - DNA, 15 bp, Homo sapiens
gagccaatgtagctc

SEQ ID NO: 937170 - DNA, 15 bp, Homo sapiens
agccaatgtagctca

SEQ ID NO: 937171 - DNA, 15 bp, Homo sapiens
gccaatgtagctcaa

SEQ ID NO: 937172 - DNA, 15 bp, Homo sapiens
ccaatgtagctcaag

SEQ ID NO: 937173 - DNA, 15 bp, Homo sapiens
caatgtagctcaaga

SEQ ID NO: 937174 - DNA, 15 bp, Homo sapiens
aatgtagctcaagat

SEQ ID NO: 937175 - DNA, 15 bp, Homo sapiens
atgtagctcaagatc

SEQ ID NO: 937176 - DNA, 15 bp, Homo sapiens
tgtagctcaagatca

SEQ ID NO: 937177 - DNA, 15 bp, Homo sapiens
gtagctcaagatcac

SEQ ID NO: 937178 - DNA, 15 bp, Homo sapiens
tagctcaagatcaca

SEQ ID NO: 937179 - DNA, 15 bp, Homo sapiens
agctcaagatcacag

SEQ ID NO: 937180 - DNA, 15 bp, Homo sapiens
gctcaagatcacagc

SEQ ID NO: 937181 - DNA, 15 bp, Homo sapiens
ctcaagatcacagcc

SEQ ID NO: 937182 - DNA, 15 bp, Homo sapiens
tcaagatcacagcct

SEQ ID NO: 937183 - DNA, 15 bp, Homo sapiens
caagatcacagcctg

SEQ ID NO: 937184 - DNA, 15 bp, Homo sapiens
aagatcacagcctgt

SEQ ID NO: 937185 - DNA, 15 bp, Homo sapiens
agatcacagcctgtc

SEQ ID NO: 937186 - DNA, 15 bp, Homo sapiens
gatcacagcctgtca

SEQ ID NO: 937187 - DNA, 15 bp, Homo sapiens
atcacagcctgtcac

SEQ ID NO: 937188 - DNA, 15 bp, Homo sapiens
tcacagcctgtcact

SEQ ID NO: 937189 - DNA, 15 bp, Homo sapiens
cacagcctgtcacta

SEQ ID NO: 937190 - DNA, 15 bp, Homo sapiens
acagcctgtcactat

SEQ ID NO: 937191 - DNA, 15 bp, Homo sapiens
cagcctgtcactatt

SEQ ID NO: 937192 - DNA, 15 bp, Homo sapiens
agcctgtcactattt

SEQ ID NO: 937193 - DNA, 15 bp, Homo sapiens
gcctgtcactatttt

SEQ ID NO: 937194 - DNA, 15 bp, Homo sapiens
cctgtcactattttt

SEQ ID NO: 937195 - DNA, 15 bp, Homo sapiens
ctgtcactattttta

SEQ ID NO: 937196 - DNA, 15 bp, Homo sapiens
tgtcactatttttat

SEQ ID NO: 937197 - DNA, 15 bp, Homo sapiens
gtcactatttttatt

SEQ ID NO: 937198 - DNA, 15 bp, Homo sapiens
tcactatttttatta

SEQ ID NO: 937199 - DNA, 15 bp, Homo sapiens
cactatttttattaa

SEQ ID NO: 937200 - DNA, 15 bp, Homo sapiens
actatttttattaat

SEQ ID NO: 937201 - DNA, 15 bp, Homo sapiens
ctatttttattaatt

SEQ ID NO: 937202 - DNA, 15 bp, Homo sapiens
tatttttattaattt

SEQ ID NO: 937203 - DNA, 15 bp, Homo sapiens
atttttattaatttg

SEQ ID NO: 937204 - DNA, 15 bp, Homo sapiens
tttttattaatttgt

SEQ ID NO: 937205 - DNA, 15 bp, Homo sapiens
ttttattaatttgtc

SEQ ID NO: 937206 - DNA, 15 bp, Homo sapiens
tttattaatttgtct

SEQ ID NO: 937207 - DNA, 15 bp, Homo sapiens
ttattaatttgtctt

SEQ ID NO: 937208 - DNA, 15 bp, Homo sapiens
tattaatttgtcttt

SEQ ID NO: 937209 - DNA, 15 bp, Homo sapiens
attaatttgtctttc

SEQ ID NO: 937210 - DNA, 15 bp, Homo sapiens
ttaatttgtctttct

SEQ ID NO: 937211 - DNA, 15 bp, Homo sapiens
taatttgtctttctc

SEQ ID NO: 937212 - DNA, 15 bp, Homo sapiens
aatttgtctttctcc

SEQ ID NO: 937213 - DNA, 15 bp, Homo sapiens
atttgtctttctccc

SEQ ID NO: 937214 - DNA, 15 bp, Homo sapiens
tttgtctttctccca

SEQ ID NO: 937215 - DNA, 15 bp, Homo sapiens
ttgtctttctcccat

SEQ ID NO: 937216 - DNA, 15 bp, Homo sapiens
tgtctttctcccata

SEQ ID NO: 937217 - DNA, 15 bp, Homo sapiens
gtctttctcccataa

SEQ ID NO: 937218 - DNA, 15 bp, Homo sapiens
tctttctcccataat

SEQ ID NO: 937219 - DNA, 15 bp, Homo sapiens
ctttctcccataatt

SEQ ID NO: 937220 - DNA, 15 bp, Homo sapiens
tttctcccataattt

SEQ ID NO: 937221 - DNA, 15 bp, Homo sapiens
ttctcccataattta

SEQ ID NO: 937222 - DNA, 15 bp, Homo sapiens
tctcccataatttat

SEQ ID NO: 937223 - DNA, 15 bp, Homo sapiens
ctcccataatttatt

SEQ ID NO: 937224 - DNA, 15 bp, Homo sapiens
tcccataatttattg

SEQ ID NO: 937225 - DNA, 15 bp, Homo sapiens
cccataatttattga

SEQ ID NO: 937226 - DNA, 15 bp, Homo sapiens
ccataatttattgaa

SEQ ID NO: 937227 - DNA, 15 bp, Homo sapiens
cataatttattgaaa

SEQ ID NO: 937228 - DNA, 15 bp, Homo sapiens
ataatttattgaaaa

SEQ ID NO: 937229 - DNA, 15 bp, Homo sapiens
taatttattgaaaag

SEQ ID NO: 937230 - DNA, 15 bp, Homo sapiens
aatttattgaaaaga

SEQ ID NO: 937231 - DNA, 15 bp, Homo sapiens
atttattgaaaagat

SEQ ID NO: 937232 - DNA, 15 bp, Homo sapiens
tttattgaaaagata

SEQ ID NO: 937233 - DNA, 15 bp, Homo sapiens
ttattgaaaagatat

SEQ ID NO: 937234 - DNA, 15 bp, Homo sapiens
tattgaaaagatata

SEQ ID NO: 937235 - DNA, 15 bp, Homo sapiens
attgaaaagatatat

SEQ ID NO: 937236 - DNA, 15 bp, Homo sapiens
ttgaaaagatatatt

SEQ ID NO: 937237 - DNA, 15 bp, Homo sapiens
tgaaaagatatattg

SEQ ID NO: 937238 - DNA, 15 bp, Homo sapiens
gaaaagatatattgt

SEQ ID NO: 937239 - DNA, 15 bp, Homo sapiens
aaaagatatattgtc

SEQ ID NO: 937240 - DNA, 15 bp, Homo sapiens
aaagatatattgtct

SEQ ID NO: 937241 - DNA, 15 bp, Homo sapiens
aagatatattgtctc

SEQ ID NO: 937242 - DNA, 15 bp, Homo sapiens
agatatattgtctct

SEQ ID NO: 937243 - DNA, 15 bp, Homo sapiens
gatatattgtctctt

SEQ ID NO: 937244 - DNA, 15 bp, Homo sapiens
atatattgtctcttt

SEQ ID NO: 937245 - DNA, 15 bp, Homo sapiens
tatattgtctctttc

SEQ ID NO: 937246 - DNA, 15 bp, Homo sapiens
atattgtctctttca

SEQ ID NO: 937247 - DNA, 15 bp, Homo sapiens
tattgtctctttcat

SEQ ID NO: 937248 - DNA, 15 bp, Homo sapiens
attgtctctttcatt

SEQ ID NO: 937249 - DNA, 15 bp, Homo sapiens
ttgtctctttcatta

SEQ ID NO: 937250 - DNA, 15 bp, Homo sapiens
tgtctctttcattac

SEQ ID NO: 937251 - DNA, 15 bp, Homo sapiens
gtctctttcattaca

SEQ ID NO: 937252 - DNA, 15 bp, Homo sapiens
tctctttcattacag

SEQ ID NO: 937253 - DNA, 15 bp, Homo sapiens
ctctttcattacagt

SEQ ID NO: 937254 - DNA, 15 bp, Homo sapiens
tctttcattacagtt

SEQ ID NO: 937255 - DNA, 15 bp, Homo sapiens
ctttcattacagttt

SEQ ID NO: 937256 - DNA, 15 bp, Homo sapiens
tttcattacagtttc

SEQ ID NO: 937257 - DNA, 15 bp, Homo sapiens
ttcattacagtttca

SEQ ID NO: 937258 - DNA, 15 bp, Homo sapiens
tcattacagtttcag

SEQ ID NO: 937259 - DNA, 15 bp, Homo sapiens
cattacagtttcagc

SEQ ID NO: 937260 - DNA, 15 bp, Homo sapiens
attacagtttcagct

SEQ ID NO: 937261 - DNA, 15 bp, Homo sapiens
ttacagtttcagctg

SEQ ID NO: 937262 - DNA, 15 bp, Homo sapiens
tacagtttcagctgt

SEQ ID NO: 937263 - DNA, 15 bp, Homo sapiens
acagtttcagctgtt

SEQ ID NO: 937264 - DNA, 15 bp, Homo sapiens
cagtttcagctgttc

SEQ ID NO: 937265 - DNA, 15 bp, Homo sapiens
agtttcagctgttct

SEQ ID NO: 937266 - DNA, 15 bp, Homo sapiens
gtttcagctgttctt

SEQ ID NO: 937267 - DNA, 15 bp, Homo sapiens
tttcagctgttcttt

SEQ ID NO: 937268 - DNA, 15 bp, Homo sapiens
ttcagctgttctttc

SEQ ID NO: 937269 - DNA, 15 bp, Homo sapiens
tcagctgttctttca

SEQ ID NO: 937270 - DNA, 15 bp, Homo sapiens
cagctgttctttcat

SEQ ID NO: 937271 - DNA, 15 bp, Homo sapiens
agctgttctttcatt

SEQ ID NO: 937272 - DNA, 15 bp, Homo sapiens
gctgttctttcattg

SEQ ID NO: 937273 - DNA, 15 bp, Homo sapiens
ctgttctttcattga

SEQ ID NO: 937274 - DNA, 15 bp, Homo sapiens
tgttctttcattgat

SEQ ID NO: 937275 - DNA, 15 bp, Homo sapiens
gttctttcattgatt

SEQ ID NO: 937276 - DNA, 15 bp, Homo sapiens
ttctttcattgattt

SEQ ID NO: 937277 - DNA, 15 bp, Homo sapiens
tctttcattgatttt

SEQ ID NO: 937278 - DNA, 15 bp, Homo sapiens
ctttcattgattttt

SEQ ID NO: 937279 - DNA, 15 bp, Homo sapiens
tttcattgatttttc

SEQ ID NO: 937280 - DNA, 15 bp, Homo sapiens
ttcattgatttttcc

SEQ ID NO: 937281 - DNA, 15 bp, Homo sapiens
tcattgatttttcca

SEQ ID NO: 937282 - DNA, 15 bp, Homo sapiens
cattgatttttccat

SEQ ID NO: 937283 - DNA, 15 bp, Homo sapiens
attgatttttccatt

SEQ ID NO: 937284 - DNA, 15 bp, Homo sapiens
ttgatttttccattc

SEQ ID NO: 937285 - DNA, 15 bp, Homo sapiens
tgatttttccattct

SEQ ID NO: 937286 - DNA, 15 bp, Homo sapiens
gatttttccattctg

SEQ ID NO: 937287 - DNA, 15 bp, Homo sapiens
atttttccattctgt

SEQ ID NO: 937288 - DNA, 15 bp, Homo sapiens
tttttccattctgtt

SEQ ID NO: 937289 - DNA, 15 bp, Homo sapiens
ttttccattctgttg

SEQ ID NO: 937290 - DNA, 15 bp, Homo sapiens
tttccattctgttgc

SEQ ID NO: 937291 - DNA, 15 bp, Homo sapiens
ttccattctgttgcg

SEQ ID NO: 937292 - DNA, 15 bp, Homo sapiens
tccattctgttgcga

SEQ ID NO: 937293 - DNA, 15 bp, Homo sapiens
ccattctgttgcgat

SEQ ID NO: 937294 - DNA, 15 bp, Homo sapiens
cattctgttgcgatc

SEQ ID NO: 937295 - DNA, 15 bp, Homo sapiens
attctgttgcgatca

SEQ ID NO: 937296 - DNA, 15 bp, Homo sapiens
ttctgttgcgatcac

SEQ ID NO: 937297 - DNA, 15 bp, Homo sapiens
tctgttgcgatcaca

SEQ ID NO: 937298 - DNA, 15 bp, Homo sapiens
ctgttgcgatcacat

SEQ ID NO: 937299 - DNA, 15 bp, Homo sapiens
tgttgcgatcacatt

SEQ ID NO: 937300 - DNA, 15 bp, Homo sapiens
gttgcgatcacattt

SEQ ID NO: 937301 - DNA, 15 bp, Homo sapiens
ttgcgatcacatttt

SEQ ID NO: 937302 - DNA, 15 bp, Homo sapiens
tgcgatcacattttc

SEQ ID NO: 937303 - DNA, 15 bp, Homo sapiens
gcgatcacattttca

SEQ ID NO: 937304 - DNA, 15 bp, Homo sapiens
cgatcacattttcat

SEQ ID NO: 937305 - DNA, 15 bp, Homo sapiens
gatcacattttcatt

SEQ ID NO: 937306 - DNA, 15 bp, Homo sapiens
atcacattttcatta

SEQ ID NO: 937307 - DNA, 15 bp, Homo sapiens
tcacattttcattac

SEQ ID NO: 937308 - DNA, 15 bp, Homo sapiens
cacattttcattact

SEQ ID NO: 937309 - DNA, 15 bp, Homo sapiens
acattttcattacta

SEQ ID NO: 937310 - DNA, 15 bp, Homo sapiens
cattttcattactac

SEQ ID NO: 937311 - DNA, 15 bp, Homo sapiens
attttcattactacc

SEQ ID NO: 937312 - DNA, 15 bp, Homo sapiens
ttttcattactaccc

SEQ ID NO: 937313 - DNA, 15 bp, Homo sapiens
tttcattactaccct

SEQ ID NO: 937314 - DNA, 15 bp, Homo sapiens
ttcattactaccctg

SEQ ID NO: 937315 - DNA, 15 bp, Homo sapiens
tcattactaccctgg

SEQ ID NO: 937316 - DNA, 15 bp, Homo sapiens
cattactaccctggc

SEQ ID NO: 937317 - DNA, 15 bp, Homo sapiens
attactaccctggct

SEQ ID NO: 937318 - DNA, 15 bp, Homo sapiens
ttactaccctggcta

SEQ ID NO: 937319 - DNA, 15 bp, Homo sapiens
tactaccctggctag

SEQ ID NO: 937320 - DNA, 15 bp, Homo sapiens
actaccctggctaga

SEQ ID NO: 937321 - DNA, 15 bp, Homo sapiens
ctaccctggctagag

SEQ ID NO: 937322 - DNA, 15 bp, Homo sapiens
taccctggctagaga

SEQ ID NO: 937323 - DNA, 15 bp, Homo sapiens
accctggctagagat

SEQ ID NO: 937324 - DNA, 15 bp, Homo sapiens
ccctggctagagatc

SEQ ID NO: 937325 - DNA, 15 bp, Homo sapiens
cctggctagagatct

SEQ ID NO: 937326 - DNA, 15 bp, Homo sapiens
ctggctagagatcta

SEQ ID NO: 937327 - DNA, 15 bp, Homo sapiens
tggctagagatctaa

SEQ ID NO: 937328 - DNA, 15 bp, Homo sapiens
ggctagagatctaaa

SEQ ID NO: 937329 - DNA, 15 bp, Homo sapiens
gctagagatctaaaa

SEQ ID NO: 937330 - DNA, 15 bp, Homo sapiens
ctagagatctaaaaa

SEQ ID NO: 937331 - DNA, 15 bp, Homo sapiens
tagagatctaaaaaa

SEQ ID NO: 937332 - DNA, 15 bp, Homo sapiens
agagatctaaaaaac

SEQ ID NO: 937333 - DNA, 15 bp, Homo sapiens
gagatctaaaaaaca

SEQ ID NO: 937334 - DNA, 15 bp, Homo sapiens
agatctaaaaaacaa

SEQ ID NO: 937335 - DNA, 15 bp, Homo sapiens
gatctaaaaaacaaa

SEQ ID NO: 937336 - DNA, 15 bp, Homo sapiens
atctaaaaaacaaac

SEQ ID NO: 937337 - DNA, 15 bp, Homo sapiens
tctaaaaaacaaaca

SEQ ID NO: 937338 - DNA, 15 bp, Homo sapiens
ctaaaaaacaaacaa

SEQ ID NO: 937339 - DNA, 15 bp, Homo sapiens
taaaaaacaaacaaa

SEQ ID NO: 937340 - DNA, 15 bp, Homo sapiens
aaacaaacaaacaac

SEQ ID NO: 937341 - DNA, 15 bp, Homo sapiens
aacaaacaaacaaca

SEQ ID NO: 937342 - DNA, 15 bp, Homo sapiens
acaaacaaacaacaa

SEQ ID NO: 937343 - DNA, 15 bp, Homo sapiens
caaacaaacaacaaa

SEQ ID NO: 937344 - DNA, 15 bp, Homo sapiens
aaacaaacaacaaac

SEQ ID NO: 937345 - DNA, 15 bp, Homo sapiens
aacaaacaacaaact

SEQ ID NO: 937346 - DNA, 15 bp, Homo sapiens
acaaacaacaaactc

SEQ ID NO: 937347 - DNA, 15 bp, Homo sapiens
caaacaacaaactct

SEQ ID NO: 937348 - DNA, 15 bp, Homo sapiens
aaacaacaaactcta

SEQ ID NO: 937349 - DNA, 15 bp, Homo sapiens
aacaacaaactctat

SEQ ID NO: 937350 - DNA, 15 bp, Homo sapiens
acaacaaactctatc

SEQ ID NO: 937351 - DNA, 15 bp, Homo sapiens
caacaaactctatct

SEQ ID NO: 937352 - DNA, 15 bp, Homo sapiens
aacaaactctatctt

SEQ ID NO: 937353 - DNA, 15 bp, Homo sapiens
acaaactctatcttc

SEQ ID NO: 937354 - DNA, 15 bp, Homo sapiens
caaactctatcttca

SEQ ID NO: 937355 - DNA, 15 bp, Homo sapiens
aaactctatcttcat

SEQ ID NO: 937356 - DNA, 15 bp, Homo sapiens
aactctatcttcatt

SEQ ID NO: 937357 - DNA, 15 bp, Homo sapiens
actctatcttcatta

SEQ ID NO: 937358 - DNA, 15 bp, Homo sapiens
ctctatcttcattaa

SEQ ID NO: 937359 - DNA, 15 bp, Homo sapiens
tctatcttcattaat

SEQ ID NO: 937360 - DNA, 15 bp, Homo sapiens
ctatcttcattaata

SEQ ID NO: 937361 - DNA, 15 bp, Homo sapiens
tatcttcattaataa

SEQ ID NO: 937362 - DNA, 15 bp, Homo sapiens
atcttcattaataac

SEQ ID NO: 937363 - DNA, 15 bp, Homo sapiens
tcttcattaataaca

SEQ ID NO: 937364 - DNA, 15 bp, Homo sapiens
cttcattaataacac

SEQ ID NO: 937365 - DNA, 15 bp, Homo sapiens
ttcattaataacacc

SEQ ID NO: 937366 - DNA, 15 bp, Homo sapiens
tcattaataacacca

SEQ ID NO: 937367 - DNA, 15 bp, Homo sapiens
cattaataacaccac

SEQ ID NO: 937368 - DNA, 15 bp, Homo sapiens
attaataacaccacc

SEQ ID NO: 937369 - DNA, 15 bp, Homo sapiens
ttaataacaccacct

SEQ ID NO: 937370 - DNA, 15 bp, Homo sapiens
taataacaccacctg

SEQ ID NO: 937371 - DNA, 15 bp, Homo sapiens
aataacaccacctgc

SEQ ID NO: 937372 - DNA, 15 bp, Homo sapiens
ataacaccacctgcc

SEQ ID NO: 937373 - DNA, 15 bp, Homo sapiens
taacaccacctgcct

SEQ ID NO: 937374 - DNA, 15 bp, Homo sapiens
aacaccacctgcctc

SEQ ID NO: 937375 - DNA, 15 bp, Homo sapiens
acaccacctgcctcc

SEQ ID NO: 937376 - DNA, 15 bp, Homo sapiens
caccacctgcctccc

SEQ ID NO: 937377 - DNA, 15 bp, Homo sapiens
accacctgcctccct

SEQ ID NO: 937378 - DNA, 15 bp, Homo sapiens
ccacctgcctccctc

SEQ ID NO: 937379 - DNA, 15 bp, Homo sapiens
cacctgcctccctcg

SEQ ID NO: 937380 - DNA, 15 bp, Homo sapiens
acctgcctccctcgt

SEQ ID NO: 937381 - DNA, 15 bp, Homo sapiens
cctgcctccctcgtc

SEQ ID NO: 937382 - DNA, 15 bp, Homo sapiens
ctgcctccctcgtca

SEQ ID NO: 937383 - DNA, 15 bp, Homo sapiens
tgcctccctcgtcag

SEQ ID NO: 937384 - DNA, 15 bp, Homo sapiens
gcctccctcgtcagg

SEQ ID NO: 937385 - DNA, 15 bp, Homo sapiens
cctccctcgtcaggc

SEQ ID NO: 937386 - DNA, 15 bp, Homo sapiens
ctccctcgtcaggct

SEQ ID NO: 937387 - DNA, 15 bp, Homo sapiens
tccctcgtcaggctg

SEQ ID NO: 937388 - DNA, 15 bp, Homo sapiens
ccctcgtcaggctgc

SEQ ID NO: 937389 - DNA, 15 bp, Homo sapiens
cctcgtcaggctgct

SEQ ID NO: 937390 - DNA, 15 bp, Homo sapiens
ctcgtcaggctgcta

SEQ ID NO: 937391 - DNA, 15 bp, Homo sapiens
tcgtcaggctgctaa

SEQ ID NO: 937392 - DNA, 15 bp, Homo sapiens
cgtcaggctgctaat

SEQ ID NO: 937393 - DNA, 15 bp, Homo sapiens
gtcaggctgctaatt

SEQ ID NO: 937394 - DNA, 15 bp, Homo sapiens
tcaggctgctaatta

SEQ ID NO: 937395 - DNA, 15 bp, Homo sapiens
caggctgctaattaa

SEQ ID NO: 937396 - DNA, 15 bp, Homo sapiens
aggctgctaattaaa

SEQ ID NO: 937397 - DNA, 15 bp, Homo sapiens
ggctgctaattaaat

SEQ ID NO: 937398 - DNA, 15 bp, Homo sapiens
gctgctaattaaatt

SEQ ID NO: 937399 - DNA, 15 bp, Homo sapiens
ctgctaattaaatta

SEQ ID NO: 937400 - DNA, 15 bp, Homo sapiens
tgctaattaaattag

SEQ ID NO: 937401 - DNA, 15 bp, Homo sapiens
gctaattaaattaga

SEQ ID NO: 937402 - DNA, 15 bp, Homo sapiens
ctaattaaattagaa

SEQ ID NO: 937403 - DNA, 15 bp, Homo sapiens
taattaaattagaat

SEQ ID NO: 937404 - DNA, 15 bp, Homo sapiens
aattaaattagaata

SEQ ID NO: 937405 - DNA, 15 bp, Homo sapiens
attaaattagaataa

SEQ ID NO: 937406 - DNA, 15 bp, Homo sapiens
ttaaattagaataag

SEQ ID NO: 937407 - DNA, 15 bp, Homo sapiens
taaattagaataagt

SEQ ID NO: 937408 - DNA, 15 bp, Homo sapiens
aaattagaataagta

SEQ ID NO: 937409 - DNA, 15 bp, Homo sapiens
aattagaataagtaa

SEQ ID NO: 937410 - DNA, 15 bp, Homo sapiens
attagaataagtaag

SEQ ID NO: 937411 - DNA, 15 bp, Homo sapiens
ttagaataagtaagc

SEQ ID NO: 937412 - DNA, 15 bp, Homo sapiens
tagaataagtaagct

SEQ ID NO: 937413 - DNA, 15 bp, Homo sapiens
agaataagtaagcta

SEQ ID NO: 937414 - DNA, 15 bp, Homo sapiens
gaataagtaagctaa

SEQ ID NO: 937415 - DNA, 15 bp, Homo sapiens
aataagtaagctaat

SEQ ID NO: 937416 - DNA, 15 bp, Homo sapiens
ataagtaagctaata

SEQ ID NO: 937417 - DNA, 15 bp, Homo sapiens
taagtaagctaataa

SEQ ID NO: 937418 - DNA, 15 bp, Homo sapiens
aagtaagctaataac

SEQ ID NO: 937419 - DNA, 15 bp, Homo sapiens
agtaagctaataaca

SEQ ID NO: 937420 - DNA, 15 bp, Homo sapiens
gtaagctaataacag

SEQ ID NO: 937421 - DNA, 15 bp, Homo sapiens
taagctaataacagc

SEQ ID NO: 937422 - DNA, 15 bp, Homo sapiens
aagctaataacagca

SEQ ID NO: 937423 - DNA, 15 bp, Homo sapiens
agctaataacagcaa

SEQ ID NO: 937424 - DNA, 15 bp, Homo sapiens
gctaataacagcaaa

SEQ ID NO: 937425 - DNA, 15 bp, Homo sapiens
ctaataacagcaaaa

SEQ ID NO: 937426 - DNA, 15 bp, Homo sapiens
taataacagcaaaac

SEQ ID NO: 937427 - DNA, 15 bp, Homo sapiens
aataacagcaaaact

SEQ ID NO: 937428 - DNA, 15 bp, Homo sapiens
ataacagcaaaactc

SEQ ID NO: 937429 - DNA, 15 bp, Homo sapiens
taacagcaaaactct

SEQ ID NO: 937430 - DNA, 15 bp, Homo sapiens
aacagcaaaactctt

SEQ ID NO: 937431 - DNA, 15 bp, Homo sapiens
acagcaaaactcttg

SEQ ID NO: 937432 - DNA, 15 bp, Homo sapiens
cagcaaaactcttgc

SEQ ID NO: 937433 - DNA, 15 bp, Homo sapiens
agcaaaactcttgct

SEQ ID NO: 937434 - DNA, 15 bp, Homo sapiens
gcaaaactcttgcta

SEQ ID NO: 937435 - DNA, 15 bp, Homo sapiens
caaaactcttgctat

SEQ ID NO: 937436 - DNA, 15 bp, Homo sapiens
aaaactcttgctatt

SEQ ID NO: 937437 - DNA, 15 bp, Homo sapiens
aaactcttgctattt

SEQ ID NO: 937438 - DNA, 15 bp, Homo sapiens
aactcttgctattta

SEQ ID NO: 937439 - DNA, 15 bp, Homo sapiens
actcttgctatttag

SEQ ID NO: 937440 - DNA, 15 bp, Homo sapiens
ctcttgctatttagg

SEQ ID NO: 937441 - DNA, 15 bp, Homo sapiens
tcttgctatttaggt

SEQ ID NO: 937442 - DNA, 15 bp, Homo sapiens
cttgctatttaggtg

SEQ ID NO: 937443 - DNA, 15 bp, Homo sapiens
ttgctatttaggtgt

SEQ ID NO: 937444 - DNA, 15 bp, Homo sapiens
tgctatttaggtgtg

SEQ ID NO: 937445 - DNA, 15 bp, Homo sapiens
gctatttaggtgtgt

SEQ ID NO: 937446 - DNA, 15 bp, Homo sapiens
ctatttaggtgtgta

SEQ ID NO: 937447 - DNA, 15 bp, Homo sapiens
tatttaggtgtgtat

SEQ ID NO: 937448 - DNA, 15 bp, Homo sapiens
atttaggtgtgtatt

SEQ ID NO: 937449 - DNA, 15 bp, Homo sapiens
tttaggtgtgtattg

SEQ ID NO: 937450 - DNA, 15 bp, Homo sapiens
ttaggtgtgtattga

SEQ ID NO: 937451 - DNA, 15 bp, Homo sapiens
taggtgtgtattgaa

SEQ ID NO: 937452 - DNA, 15 bp, Homo sapiens
aggtgtgtattgaag

SEQ ID NO: 937453 - DNA, 15 bp, Homo sapiens
ggtgtgtattgaagt

SEQ ID NO: 937454 - DNA, 15 bp, Homo sapiens
gtgtgtattgaagta

SEQ ID NO: 937455 - DNA, 15 bp, Homo sapiens
tgtgtattgaagtaa

SEQ ID NO: 937456 - DNA, 15 bp, Homo sapiens
gtgtattgaagtaac

SEQ ID NO: 937457 - DNA, 15 bp, Homo sapiens
tgtattgaagtaaca

SEQ ID NO: 937458 - DNA, 15 bp, Homo sapiens
gtattgaagtaacag

SEQ ID NO: 937459 - DNA, 15 bp, Homo sapiens
tattgaagtaacagg

SEQ ID NO: 937460 - DNA, 15 bp, Homo sapiens
attgaagtaacagga

SEQ ID NO: 937461 - DNA, 15 bp, Homo sapiens
ttgaagtaacaggaa

SEQ ID NO: 937462 - DNA, 15 bp, Homo sapiens
tgaagtaacaggaaa

SEQ ID NO: 937463 - DNA, 15 bp, Homo sapiens
gaagtaacaggaaat

SEQ ID NO: 937464 - DNA, 15 bp, Homo sapiens
aagtaacaggaaata

SEQ ID NO: 937465 - DNA, 15 bp, Homo sapiens
agtaacaggaaatag

SEQ ID NO: 937466 - DNA, 15 bp, Homo sapiens
gtaacaggaaatagc

SEQ ID NO: 937467 - DNA, 15 bp, Homo sapiens
taacaggaaatagcc

SEQ ID NO: 937468 - DNA, 15 bp, Homo sapiens
aacaggaaatagcca

SEQ ID NO: 937469 - DNA, 15 bp, Homo sapiens
acaggaaatagccat

SEQ ID NO: 937470 - DNA, 15 bp, Homo sapiens
caggaaatagccata

SEQ ID NO: 937471 - DNA, 15 bp, Homo sapiens
aggaaatagccatat

SEQ ID NO: 937472 - DNA, 15 bp, Homo sapiens
ggaaatagccatata

SEQ ID NO: 937473 - DNA, 15 bp, Homo sapiens
gaaatagccatatac

SEQ ID NO: 937474 - DNA, 15 bp, Homo sapiens
aaatagccatatacc

SEQ ID NO: 937475 - DNA, 15 bp, Homo sapiens
aatagccatataccc

SEQ ID NO: 937476 - DNA, 15 bp, Homo sapiens
atagccatataccct

SEQ ID NO: 937477 - DNA, 15 bp, Homo sapiens
tagccatataccctt

SEQ ID NO: 937478 - DNA, 15 bp, Homo sapiens
agccatatacccttt

SEQ ID NO: 937479 - DNA, 15 bp, Homo sapiens
gccatataccctttt

SEQ ID NO: 937480 - DNA, 15 bp, Homo sapiens
ccatatacccttttg

SEQ ID NO: 937481 - DNA, 15 bp, Homo sapiens
catatacccttttga

SEQ ID NO: 937482 - DNA, 15 bp, Homo sapiens
atatacccttttgaa

SEQ ID NO: 937483 - DNA, 15 bp, Homo sapiens
tatacccttttgaaa

SEQ ID NO: 937484 - DNA, 15 bp, Homo sapiens
atacccttttgaaat

SEQ ID NO: 937485 - DNA, 15 bp, Homo sapiens
tacccttttgaaata

SEQ ID NO: 937486 - DNA, 15 bp, Homo sapiens
acccttttgaaatac

SEQ ID NO: 937487 - DNA, 15 bp, Homo sapiens
cccttttgaaatacc

SEQ ID NO: 937488 - DNA, 15 bp, Homo sapiens
ccttttgaaatacca

SEQ ID NO: 937489 - DNA, 15 bp, Homo sapiens
cttttgaaataccaa

SEQ ID NO: 937490 - DNA, 15 bp, Homo sapiens
ttttgaaataccaag

SEQ ID NO: 937491 - DNA, 15 bp, Homo sapiens
tttgaaataccaagg

SEQ ID NO: 937492 - DNA, 15 bp, Homo sapiens
ttgaaataccaagga

SEQ ID NO: 937493 - DNA, 15 bp, Homo sapiens
tgaaataccaaggaa

SEQ ID NO: 937494 - DNA, 15 bp, Homo sapiens
gaaataccaaggaaa

SEQ ID NO: 937495 - DNA, 15 bp, Homo sapiens
aaataccaaggaaat

SEQ ID NO: 937496 - DNA, 15 bp, Homo sapiens
aataccaaggaaata

SEQ ID NO: 937497 - DNA, 15 bp, Homo sapiens
ataccaaggaaatat

SEQ ID NO: 937498 - DNA, 15 bp, Homo sapiens
taccaaggaaatatc

SEQ ID NO: 937499 - DNA, 15 bp, Homo sapiens
accaaggaaatatct

SEQ ID NO: 937500 - DNA, 15 bp, Homo sapiens
ccaaggaaatatcta

SEQ ID NO: 937501 - DNA, 15 bp, Homo sapiens
caaggaaatatctat

SEQ ID NO: 937502 - DNA, 15 bp, Homo sapiens
aaggaaatatctatt

SEQ ID NO: 937503 - DNA, 15 bp, Homo sapiens
aggaaatatctattc

SEQ ID NO: 937504 - DNA, 15 bp, Homo sapiens
ggaaatatctattct

SEQ ID NO: 937505 - DNA, 15 bp, Homo sapiens
gaaatatctattcta

SEQ ID NO: 937506 - DNA, 15 bp, Homo sapiens
aaatatctattctag

SEQ ID NO: 937507 - DNA, 15 bp, Homo sapiens
aatatctattctagc

SEQ ID NO: 937508 - DNA, 15 bp, Homo sapiens
atatctattctagct

SEQ ID NO: 937509 - DNA, 15 bp, Homo sapiens
tatctattctagctc

SEQ ID NO: 937510 - DNA, 15 bp, Homo sapiens
atctattctagctct

SEQ ID NO: 937511 - DNA, 15 bp, Homo sapiens
tctattctagctctc

SEQ ID NO: 937512 - DNA, 15 bp, Homo sapiens
ctattctagctctca

SEQ ID NO: 937513 - DNA, 15 bp, Homo sapiens
tattctagctctcaa

SEQ ID NO: 937514 - DNA, 15 bp, Homo sapiens
attctagctctcaat

SEQ ID NO: 937515 - DNA, 15 bp, Homo sapiens
ttctagctctcaatg

SEQ ID NO: 937516 - DNA, 15 bp, Homo sapiens
tctagctctcaatgt

SEQ ID NO: 937517 - DNA, 15 bp, Homo sapiens
ctagctctcaatgtt

SEQ ID NO: 937518 - DNA, 15 bp, Homo sapiens
tagctctcaatgttc

SEQ ID NO: 937519 - DNA, 15 bp, Homo sapiens
agctctcaatgttct

SEQ ID NO: 937520 - DNA, 15 bp, Homo sapiens
gctctcaatgttctt

SEQ ID NO: 937521 - DNA, 15 bp, Homo sapiens
ctctcaatgttcttg

SEQ ID NO: 937522 - DNA, 15 bp, Homo sapiens
tctcaatgttcttga

SEQ ID NO: 937523 - DNA, 15 bp, Homo sapiens
ctcaatgttcttgaa

SEQ ID NO: 937524 - DNA, 15 bp, Homo sapiens
tcaatgttcttgaat

SEQ ID NO: 937525 - DNA, 15 bp, Homo sapiens
caatgttcttgaatc

SEQ ID NO: 937526 - DNA, 15 bp, Homo sapiens
aatgttcttgaatct

SEQ ID NO: 937527 - DNA, 15 bp, Homo sapiens
atgttcttgaatcta

SEQ ID NO: 937528 - DNA, 15 bp, Homo sapiens
tgttcttgaatctac

SEQ ID NO: 937529 - DNA, 15 bp, Homo sapiens
gttcttgaatctacg

SEQ ID NO: 937530 - DNA, 15 bp, Homo sapiens
ttcttgaatctacgt

SEQ ID NO: 937531 - DNA, 15 bp, Homo sapiens
tcttgaatctacgta

SEQ ID NO: 937532 - DNA, 15 bp, Homo sapiens
cttgaatctacgtac

SEQ ID NO: 937533 - DNA, 15 bp, Homo sapiens
ttgaatctacgtact

SEQ ID NO: 937534 - DNA, 15 bp, Homo sapiens
tgaatctacgtactg

SEQ ID NO: 937535 - DNA, 15 bp, Homo sapiens
gaatctacgtactgg

SEQ ID NO: 937536 - DNA, 15 bp, Homo sapiens
aatctacgtactggc

SEQ ID NO: 937537 - DNA, 15 bp, Homo sapiens
atctacgtactggcc

SEQ ID NO: 937538 - DNA, 15 bp, Homo sapiens
tctacgtactggcct

SEQ ID NO: 937539 - DNA, 15 bp, Homo sapiens
ctacgtactggcctc

SEQ ID NO: 937540 - DNA, 15 bp, Homo sapiens
tacgtactggcctca

SEQ ID NO: 937541 - DNA, 15 bp, Homo sapiens
acgtactggcctcaa

SEQ ID NO: 937542 - DNA, 15 bp, Homo sapiens
cgtactggcctcaat

SEQ ID NO: 937543 - DNA, 15 bp, Homo sapiens
gtactggcctcaata

SEQ ID NO: 937544 - DNA, 15 bp, Homo sapiens
tactggcctcaatac

SEQ ID NO: 937545 - DNA, 15 bp, Homo sapiens
actggcctcaataca

SEQ ID NO: 937546 - DNA, 15 bp, Homo sapiens
ctggcctcaatacat

SEQ ID NO: 937547 - DNA, 15 bp, Homo sapiens
tggcctcaatacata

SEQ ID NO: 937548 - DNA, 15 bp, Homo sapiens
ggcctcaatacatat

SEQ ID NO: 937549 - DNA, 15 bp, Homo sapiens
gcctcaatacatatt

SEQ ID NO: 937550 - DNA, 15 bp, Homo sapiens
cctcaatacatattg

SEQ ID NO: 937551 - DNA, 15 bp, Homo sapiens
ctcaatacatattgc

SEQ ID NO: 937552 - DNA, 15 bp, Homo sapiens
tcaatacatattgct

SEQ ID NO: 937553 - DNA, 15 bp, Homo sapiens
caatacatattgctc

SEQ ID NO: 937554 - DNA, 15 bp, Homo sapiens
aatacatattgctct

SEQ ID NO: 937555 - DNA, 15 bp, Homo sapiens
atacatattgctctc

SEQ ID NO: 937556 - DNA, 15 bp, Homo sapiens
tacatattgctctca

SEQ ID NO: 937557 - DNA, 15 bp, Homo sapiens
acatattgctctcat

SEQ ID NO: 937558 - DNA, 15 bp, Homo sapiens
catattgctctcatc

SEQ ID NO: 937559 - DNA, 15 bp, Homo sapiens
atattgctctcatct

SEQ ID NO: 937560 - DNA, 15 bp, Homo sapiens
tattgctctcatcta

SEQ ID NO: 937561 - DNA, 15 bp, Homo sapiens
attgctctcatctaa

SEQ ID NO: 937562 - DNA, 15 bp, Homo sapiens
ttgctctcatctaat

SEQ ID NO: 937563 - DNA, 15 bp, Homo sapiens
tgctctcatctaatc

SEQ ID NO: 937564 - DNA, 15 bp, Homo sapiens
gctctcatctaatcc

SEQ ID NO: 937565 - DNA, 15 bp, Homo sapiens
ctctcatctaatcca

SEQ ID NO: 937566 - DNA, 15 bp, Homo sapiens
tctcatctaatccaa

SEQ ID NO: 937567 - DNA, 15 bp, Homo sapiens
ctcatctaatccaaa

SEQ ID NO: 937568 - DNA, 15 bp, Homo sapiens
tcatctaatccaaag

SEQ ID NO: 937569 - DNA, 15 bp, Homo sapiens
catctaatccaaagt

SEQ ID NO: 937570 - DNA, 15 bp, Homo sapiens
atctaatccaaagtt

SEQ ID NO: 937571 - DNA, 15 bp, Homo sapiens
tctaatccaaagttc

SEQ ID NO: 937572 - DNA, 15 bp, Homo sapiens
ctaatccaaagttcc

SEQ ID NO: 937573 - DNA, 15 bp, Homo sapiens
taatccaaagttccc

SEQ ID NO: 937574 - DNA, 15 bp, Homo sapiens
aatccaaagttccca

SEQ ID NO: 937575 - DNA, 15 bp, Homo sapiens
atccaaagttcccat

SEQ ID NO: 937576 - DNA, 15 bp, Homo sapiens
tccaaagttcccatc

SEQ ID NO: 937577 - DNA, 15 bp, Homo sapiens
ccaaagttcccatct

SEQ ID NO: 937578 - DNA, 15 bp, Homo sapiens
caaagttcccatctg

SEQ ID NO: 937579 - DNA, 15 bp, Homo sapiens
aaagttcccatctgg

SEQ ID NO: 937580 - DNA, 15 bp, Homo sapiens
aagttcccatctggt

SEQ ID NO: 937581 - DNA, 15 bp, Homo sapiens
agttcccatctggtc

SEQ ID NO: 937582 - DNA, 15 bp, Homo sapiens
gttcccatctggtca

SEQ ID NO: 937583 - DNA, 15 bp, Homo sapiens
ttcccatctggtcaa

SEQ ID NO: 937584 - DNA, 15 bp, Homo sapiens
tcccatctggtcaag

SEQ ID NO: 937585 - DNA, 15 bp, Homo sapiens
cccatctggtcaaga

SEQ ID NO: 937586 - DNA, 15 bp, Homo sapiens
ccatctggtcaagat

SEQ ID NO: 937587 - DNA, 15 bp, Homo sapiens
catctggtcaagatt

SEQ ID NO: 937588 - DNA, 15 bp, Homo sapiens
atctggtcaagattc

SEQ ID NO: 937589 - DNA, 15 bp, Homo sapiens
tctggtcaagattct

SEQ ID NO: 937590 - DNA, 15 bp, Homo sapiens
ctggtcaagattctc

SEQ ID NO: 937591 - DNA, 15 bp, Homo sapiens
tggtcaagattctct

SEQ ID NO: 937592 - DNA, 15 bp, Homo sapiens
ggtcaagattctctt

SEQ ID NO: 937593 - DNA, 15 bp, Homo sapiens
gtcaagattctcttc

SEQ ID NO: 937594 - DNA, 15 bp, Homo sapiens
tcaagattctcttcc

SEQ ID NO: 937595 - DNA, 15 bp, Homo sapiens
caagattctcttccc

SEQ ID NO: 937596 - DNA, 15 bp, Homo sapiens
aagattctcttcccc

SEQ ID NO: 937597 - DNA, 15 bp, Homo sapiens
agattctcttcccca

SEQ ID NO: 937598 - DNA, 15 bp, Homo sapiens
gattctcttccccat

SEQ ID NO: 937599 - DNA, 15 bp, Homo sapiens
attctcttccccata

SEQ ID NO: 937600 - DNA, 15 bp, Homo sapiens
ttctcttccccatat

SEQ ID NO: 937601 - DNA, 15 bp, Homo sapiens
tctcttccccatatt

SEQ ID NO: 937602 - DNA, 15 bp, Homo sapiens
ctcttccccatattt

SEQ ID NO: 937603 - DNA, 15 bp, Homo sapiens
tcttccccatatttt

SEQ ID NO: 937604 - DNA, 15 bp, Homo sapiens
cttccccatattttt

SEQ ID NO: 937605 - DNA, 15 bp, Homo sapiens
ttccccatatttttc

SEQ ID NO: 937606 - DNA, 15 bp, Homo sapiens
tccccatatttttcc

SEQ ID NO: 937607 - DNA, 15 bp, Homo sapiens
ccccatatttttccc

SEQ ID NO: 937608 - DNA, 15 bp, Homo sapiens
cccatatttttcccc

SEQ ID NO: 937609 - DNA, 15 bp, Homo sapiens
ccatatttttcccct

SEQ ID NO: 937610 - DNA, 15 bp, Homo sapiens
catatttttcccctt

SEQ ID NO: 937611 - DNA, 15 bp, Homo sapiens
atatttttccccttc

SEQ ID NO: 937612 - DNA, 15 bp, Homo sapiens
tatttttccccttcc

SEQ ID NO: 937613 - DNA, 15 bp, Homo sapiens
atttttccccttccc

SEQ ID NO: 937614 - DNA, 15 bp, Homo sapiens
tttttccccttcccc

SEQ ID NO: 937615 - DNA, 15 bp, Homo sapiens
ttttccccttcccct

SEQ ID NO: 937616 - DNA, 15 bp, Homo sapiens
tttccccttccccta

SEQ ID NO: 937617 - DNA, 15 bp, Homo sapiens
ttccccttcccctat

SEQ ID NO: 937618 - DNA, 15 bp, Homo sapiens
tccccttcccctata

SEQ ID NO: 937619 - DNA, 15 bp, Homo sapiens
ccccttcccctatat

SEQ ID NO: 937620 - DNA, 15 bp, Homo sapiens
cccttcccctatata

SEQ ID NO: 937621 - DNA, 15 bp, Homo sapiens
ccttcccctatatac

SEQ ID NO: 937622 - DNA, 15 bp, Homo sapiens
cttcccctatatacc

SEQ ID NO: 937623 - DNA, 15 bp, Homo sapiens
ttcccctatatacct

SEQ ID NO: 937624 - DNA, 15 bp, Homo sapiens
tcccctatatacctg

SEQ ID NO: 937625 - DNA, 15 bp, Homo sapiens
cccctatatacctga

SEQ ID NO: 937626 - DNA, 15 bp, Homo sapiens
ccctatatacctgaa

SEQ ID NO: 937627 - DNA, 15 bp, Homo sapiens
cctatatacctgaat

SEQ ID NO: 937628 - DNA, 15 bp, Homo sapiens
ctatatacctgaata

SEQ ID NO: 937629 - DNA, 15 bp, Homo sapiens
tatatacctgaataa

SEQ ID NO: 937630 - DNA, 15 bp, Homo sapiens
atatacctgaataat

SEQ ID NO: 937631 - DNA, 15 bp, Homo sapiens
tatacctgaataatt

SEQ ID NO: 937632 - DNA, 15 bp, Homo sapiens
atacctgaataattt

SEQ ID NO: 937633 - DNA, 15 bp, Homo sapiens
tacctgaataatttt

SEQ ID NO: 937634 - DNA, 15 bp, Homo sapiens
acctgaataatttta

SEQ ID NO: 937635 - DNA, 15 bp, Homo sapiens
cctgaataattttag

SEQ ID NO: 937636 - DNA, 15 bp, Homo sapiens
ctgaataattttagt

SEQ ID NO: 937637 - DNA, 15 bp, Homo sapiens
tgaataattttagtt

SEQ ID NO: 937638 - DNA, 15 bp, Homo sapiens
gaataattttagttt

SEQ ID NO: 937639 - DNA, 15 bp, Homo sapiens
aataattttagtttc

SEQ ID NO: 937640 - DNA, 15 bp, Homo sapiens
ataattttagtttcg

SEQ ID NO: 937641 - DNA, 15 bp, Homo sapiens
taattttagtttcgc

SEQ ID NO: 937642 - DNA, 15 bp, Homo sapiens
aattttagtttcgcc

SEQ ID NO: 937643 - DNA, 15 bp, Homo sapiens
attttagtttcgcct

SEQ ID NO: 937644 - DNA, 15 bp, Homo sapiens
ttttagtttcgcctt

SEQ ID NO: 937645 - DNA, 15 bp, Homo sapiens
tttagtttcgccttt

SEQ ID NO: 937646 - DNA, 15 bp, Homo sapiens
ttagtttcgcctttt

SEQ ID NO: 937647 - DNA, 15 bp, Homo sapiens
tagtttcgcctttta

SEQ ID NO: 937648 - DNA, 15 bp, Homo sapiens
agtttcgccttttag

SEQ ID NO: 937649 - DNA, 15 bp, Homo sapiens
gtttcgccttttagg

SEQ ID NO: 937650 - DNA, 15 bp, Homo sapiens
tttcgccttttagga

SEQ ID NO: 937651 - DNA, 15 bp, Homo sapiens
ttcgccttttaggac

SEQ ID NO: 937652 - DNA, 15 bp, Homo sapiens
tcgccttttaggact

SEQ ID NO: 937653 - DNA, 15 bp, Homo sapiens
cgccttttaggactc

SEQ ID NO: 937654 - DNA, 15 bp, Homo sapiens
gccttttaggactca

SEQ ID NO: 937655 - DNA, 15 bp, Homo sapiens
ccttttaggactcaa

SEQ ID NO: 937656 - DNA, 15 bp, Homo sapiens
cttttaggactcaaa

SEQ ID NO: 937657 - DNA, 15 bp, Homo sapiens
ttttaggactcaaat

SEQ ID NO: 937658 - DNA, 15 bp, Homo sapiens
tttaggactcaaata

SEQ ID NO: 937659 - DNA, 15 bp, Homo sapiens
ttaggactcaaataa

SEQ ID NO: 937660 - DNA, 15 bp, Homo sapiens
taggactcaaataaa

SEQ ID NO: 937661 - DNA, 15 bp, Homo sapiens
aggactcaaataaat

SEQ ID NO: 937662 - DNA, 15 bp, Homo sapiens
ggactcaaataaatt

SEQ ID NO: 937663 - DNA, 15 bp, Homo sapiens
gactcaaataaattg

SEQ ID NO: 937664 - DNA, 15 bp, Homo sapiens
actcaaataaattgt

SEQ ID NO: 937665 - DNA, 15 bp, Homo sapiens
ctcaaataaattgtc

SEQ ID NO: 937666 - DNA, 15 bp, Homo sapiens
tcaaataaattgtca

SEQ ID NO: 937667 - DNA, 15 bp, Homo sapiens
caaataaattgtcac

SEQ ID NO: 937668 - DNA, 15 bp, Homo sapiens
aaataaattgtcact

SEQ ID NO: 937669 - DNA, 15 bp, Homo sapiens
aataaattgtcactc

SEQ ID NO: 937670 - DNA, 15 bp, Homo sapiens
ataaattgtcactcc

SEQ ID NO: 937671 - DNA, 15 bp, Homo sapiens
taaattgtcactccc

SEQ ID NO: 937672 - DNA, 15 bp, Homo sapiens
aaattgtcactccca

SEQ ID NO: 937673 - DNA, 15 bp, Homo sapiens
aattgtcactcccat

SEQ ID NO: 937674 - DNA, 15 bp, Homo sapiens
attgtcactcccatt

SEQ ID NO: 937675 - DNA, 15 bp, Homo sapiens
ttgtcactcccattt

SEQ ID NO: 937676 - DNA, 15 bp, Homo sapiens
tgtcactcccattta

SEQ ID NO: 937677 - DNA, 15 bp, Homo sapiens
gtcactcccatttag

SEQ ID NO: 937678 - DNA, 15 bp, Homo sapiens
tcactcccatttaga

SEQ ID NO: 937679 - DNA, 15 bp, Homo sapiens
cactcccatttagaa

SEQ ID NO: 937680 - DNA, 15 bp, Homo sapiens
actcccatttagaag

SEQ ID NO: 937681 - DNA, 15 bp, Homo sapiens
ctcccatttagaagg

SEQ ID NO: 937682 - DNA, 15 bp, Homo sapiens
tcccatttagaaggc

SEQ ID NO: 937683 - DNA, 15 bp, Homo sapiens
cccatttagaaggct

SEQ ID NO: 937684 - DNA, 15 bp, Homo sapiens
ccatttagaaggctt

SEQ ID NO: 937685 - DNA, 15 bp, Homo sapiens
catttagaaggcttt

SEQ ID NO: 937686 - DNA, 15 bp, Homo sapiens
atttagaaggctttt

SEQ ID NO: 937687 - DNA, 15 bp, Homo sapiens
tttagaaggctttta

SEQ ID NO: 937688 - DNA, 15 bp, Homo sapiens
ttagaaggcttttat

SEQ ID NO: 937689 - DNA, 15 bp, Homo sapiens
tagaaggcttttatt

SEQ ID NO: 937690 - DNA, 15 bp, Homo sapiens
agaaggcttttatta

SEQ ID NO: 937691 - DNA, 15 bp, Homo sapiens
gaaggcttttattag

SEQ ID NO: 937692 - DNA, 15 bp, Homo sapiens
aaggcttttattagt

SEQ ID NO: 937693 - DNA, 15 bp, Homo sapiens
aggcttttattagtg

SEQ ID NO: 937694 - DNA, 15 bp, Homo sapiens
ggcttttattagtgt

SEQ ID NO: 937695 - DNA, 15 bp, Homo sapiens
gcttttattagtgtc

SEQ ID NO: 937696 - DNA, 15 bp, Homo sapiens
cttttattagtgtcc

SEQ ID NO: 937697 - DNA, 15 bp, Homo sapiens
ttttattagtgtcct

SEQ ID NO: 937698 - DNA, 15 bp, Homo sapiens
tttattagtgtcctc

SEQ ID NO: 937699 - DNA, 15 bp, Homo sapiens
ttattagtgtcctct

SEQ ID NO: 937700 - DNA, 15 bp, Homo sapiens
tattagtgtcctctt

SEQ ID NO: 937701 - DNA, 15 bp, Homo sapiens
attagtgtcctcttt

SEQ ID NO: 937702 - DNA, 15 bp, Homo sapiens
ttagtgtcctctttc

SEQ ID NO: 937703 - DNA, 15 bp, Homo sapiens
tagtgtcctctttct

SEQ ID NO: 937704 - DNA, 15 bp, Homo sapiens
agtgtcctctttctc

SEQ ID NO: 937705 - DNA, 15 bp, Homo sapiens
gtgtcctctttctcc

SEQ ID NO: 937706 - DNA, 15 bp, Homo sapiens
tgtcctctttctcca

SEQ ID NO: 937707 - DNA, 15 bp, Homo sapiens
gtcctctttctccac

SEQ ID NO: 937708 - DNA, 15 bp, Homo sapiens
tcctctttctccacc

SEQ ID NO: 937709 - DNA, 15 bp, Homo sapiens
cctctttctccaccg

SEQ ID NO: 937710 - DNA, 15 bp, Homo sapiens
ctctttctccaccgt

SEQ ID NO: 937711 - DNA, 15 bp, Homo sapiens
tctttctccaccgtg

SEQ ID NO: 937712 - DNA, 15 bp, Homo sapiens
ctttctccaccgtgg

SEQ ID NO: 937713 - DNA, 15 bp, Homo sapiens
tttctccaccgtggt

SEQ ID NO: 937714 - DNA, 15 bp, Homo sapiens
ttctccaccgtggta

SEQ ID NO: 937715 - DNA, 15 bp, Homo sapiens
tctccaccgtggtag

SEQ ID NO: 937716 - DNA, 15 bp, Homo sapiens
ctccaccgtggtagg

SEQ ID NO: 937717 - DNA, 15 bp, Homo sapiens
tccaccgtggtaggc

SEQ ID NO: 937718 - DNA, 15 bp, Homo sapiens
ccaccgtggtaggca

SEQ ID NO: 937719 - DNA, 15 bp, Homo sapiens
caccgtggtaggcag

SEQ ID NO: 937720 - DNA, 15 bp, Homo sapiens
accgtggtaggcaga

SEQ ID NO: 937721 - DNA, 15 bp, Homo sapiens
ccgtggtaggcagag

SEQ ID NO: 937722 - DNA, 15 bp, Homo sapiens
cgtggtaggcagagt

SEQ ID NO: 937723 - DNA, 15 bp, Homo sapiens
gtggtaggcagagta

SEQ ID NO: 937724 - DNA, 15 bp, Homo sapiens
tggtaggcagagtag

SEQ ID NO: 937725 - DNA, 15 bp, Homo sapiens
ggtaggcagagtagt

SEQ ID NO: 937726 - DNA, 15 bp, Homo sapiens
gtaggcagagtagta

SEQ ID NO: 937727 - DNA, 15 bp, Homo sapiens
taggcagagtagtag

SEQ ID NO: 937728 - DNA, 15 bp, Homo sapiens
aggcagagtagtaga

SEQ ID NO: 937729 - DNA, 15 bp, Homo sapiens
ggcagagtagtagac

SEQ ID NO: 937730 - DNA, 15 bp, Homo sapiens
gcagagtagtagaca

SEQ ID NO: 937731 - DNA, 15 bp, Homo sapiens
cagagtagtagacac

SEQ ID NO: 937732 - DNA, 15 bp, Homo sapiens
agagtagtagacacc

SEQ ID NO: 937733 - DNA, 15 bp, Homo sapiens
gagtagtagacaccc

SEQ ID NO: 937734 - DNA, 15 bp, Homo sapiens
agtagtagacaccct

SEQ ID NO: 937735 - DNA, 15 bp, Homo sapiens
gtagtagacacccta

SEQ ID NO: 937736 - DNA, 15 bp, Homo sapiens
tagtagacaccctaa

SEQ ID NO: 937737 - DNA, 15 bp, Homo sapiens
agtagacaccctaaa

SEQ ID NO: 937738 - DNA, 15 bp, Homo sapiens
gtagacaccctaaag

SEQ ID NO: 937739 - DNA, 15 bp, Homo sapiens
tagacaccctaaaga

SEQ ID NO: 937740 - DNA, 15 bp, Homo sapiens
agacaccctaaagat

SEQ ID NO: 937741 - DNA, 15 bp, Homo sapiens
gacaccctaaagatg

SEQ ID NO: 937742 - DNA, 15 bp, Homo sapiens
acaccctaaagatgt

SEQ ID NO: 937743 - DNA, 15 bp, Homo sapiens
caccctaaagatgtc

SEQ ID NO: 937744 - DNA, 15 bp, Homo sapiens
accctaaagatgtct

SEQ ID NO: 937745 - DNA, 15 bp, Homo sapiens
ccctaaagatgtcta

SEQ ID NO: 937746 - DNA, 15 bp, Homo sapiens
cctaaagatgtctat

SEQ ID NO: 937747 - DNA, 15 bp, Homo sapiens
ctaaagatgtctatg

SEQ ID NO: 937748 - DNA, 15 bp, Homo sapiens
taaagatgtctatgt

SEQ ID NO: 937749 - DNA, 15 bp, Homo sapiens
aaagatgtctatgtc

SEQ ID NO: 937750 - DNA, 15 bp, Homo sapiens
aagatgtctatgtcc

SEQ ID NO: 937751 - DNA, 15 bp, Homo sapiens
agatgtctatgtcct

SEQ ID NO: 937752 - DNA, 15 bp, Homo sapiens
gatgtctatgtccta

SEQ ID NO: 937753 - DNA, 15 bp, Homo sapiens
atgtctatgtcctaa

SEQ ID NO: 937754 - DNA, 15 bp, Homo sapiens
tgtctatgtcctaat

SEQ ID NO: 937755 - DNA, 15 bp, Homo sapiens
gtctatgtcctaatc

SEQ ID NO: 937756 - DNA, 15 bp, Homo sapiens
tctatgtcctaatct

SEQ ID NO: 937757 - DNA, 15 bp, Homo sapiens
ctatgtcctaatctc

SEQ ID NO: 937758 - DNA, 15 bp, Homo sapiens
tatgtcctaatctct

SEQ ID NO: 937759 - DNA, 15 bp, Homo sapiens
atgtcctaatctcta

SEQ ID NO: 937760 - DNA, 15 bp, Homo sapiens
tgtcctaatctctag

SEQ ID NO: 937761 - DNA, 15 bp, Homo sapiens
gtcctaatctctaga

SEQ ID NO: 937762 - DNA, 15 bp, Homo sapiens
tcctaatctctagaa

SEQ ID NO: 937763 - DNA, 15 bp, Homo sapiens
cctaatctctagaac

SEQ ID NO: 937764 - DNA, 15 bp, Homo sapiens
ctaatctctagaacc

SEQ ID NO: 937765 - DNA, 15 bp, Homo sapiens
taatctctagaacct

SEQ ID NO: 937766 - DNA, 15 bp, Homo sapiens
aatctctagaacctg

SEQ ID NO: 937767 - DNA, 15 bp, Homo sapiens
atctctagaacctga

SEQ ID NO: 937768 - DNA, 15 bp, Homo sapiens
tctctagaacctgag

SEQ ID NO: 937769 - DNA, 15 bp, Homo sapiens
ctctagaacctgaga

SEQ ID NO: 937770 - DNA, 15 bp, Homo sapiens
tctagaacctgagaa

SEQ ID NO: 937771 - DNA, 15 bp, Homo sapiens
ctagaacctgagaag

SEQ ID NO: 937772 - DNA, 15 bp, Homo sapiens
tagaacctgagaaga

SEQ ID NO: 937773 - DNA, 15 bp, Homo sapiens
agaacctgagaagat

SEQ ID NO: 937774 - DNA, 15 bp, Homo sapiens
gaacctgagaagatg

SEQ ID NO: 937775 - DNA, 15 bp, Homo sapiens
aacctgagaagatgt

SEQ ID NO: 937776 - DNA, 15 bp, Homo sapiens
acctgagaagatgtt

SEQ ID NO: 937777 - DNA, 15 bp, Homo sapiens
cctgagaagatgtta

SEQ ID NO: 937778 - DNA, 15 bp, Homo sapiens
ctgagaagatgttac

SEQ ID NO: 937779 - DNA, 15 bp, Homo sapiens
tgagaagatgttacc

SEQ ID NO: 937780 - DNA, 15 bp, Homo sapiens
gagaagatgttaccc

SEQ ID NO: 937781 - DNA, 15 bp, Homo sapiens
agaagatgttaccct

SEQ ID NO: 937782 - DNA, 15 bp, Homo sapiens
gaagatgttacccta

SEQ ID NO: 937783 - DNA, 15 bp, Homo sapiens
aagatgttaccctac

SEQ ID NO: 937784 - DNA, 15 bp, Homo sapiens
agatgttaccctact

SEQ ID NO: 937785 - DNA, 15 bp, Homo sapiens
gatgttaccctactt

SEQ ID NO: 937786 - DNA, 15 bp, Homo sapiens
atgttaccctacttg

SEQ ID NO: 937787 - DNA, 15 bp, Homo sapiens
tgttaccctacttgg

SEQ ID NO: 937788 - DNA, 15 bp, Homo sapiens
gttaccctacttggc

SEQ ID NO: 937789 - DNA, 15 bp, Homo sapiens
ttaccctacttggca

SEQ ID NO: 937790 - DNA, 15 bp, Homo sapiens
taccctacttggcaa

SEQ ID NO: 937791 - DNA, 15 bp, Homo sapiens
accctacttggcaag

SEQ ID NO: 937792 - DNA, 15 bp, Homo sapiens
ccctacttggcaaga

SEQ ID NO: 937793 - DNA, 15 bp, Homo sapiens
cctacttggcaagag

SEQ ID NO: 937794 - DNA, 15 bp, Homo sapiens
ctacttggcaagagg

SEQ ID NO: 937795 - DNA, 15 bp, Homo sapiens
tacttggcaagagga

SEQ ID NO: 937796 - DNA, 15 bp, Homo sapiens
acttggcaagaggaa

SEQ ID NO: 937797 - DNA, 15 bp, Homo sapiens
cttggcaagaggaaa

SEQ ID NO: 937798 - DNA, 15 bp, Homo sapiens
ttggcaagaggaaat

SEQ ID NO: 937799 - DNA, 15 bp, Homo sapiens
tggcaagaggaaatt

SEQ ID NO: 937800 - DNA, 15 bp, Homo sapiens
ggcaagaggaaattt

SEQ ID NO: 937801 - DNA, 15 bp, Homo sapiens
gcaagaggaaatttg

SEQ ID NO: 937802 - DNA, 15 bp, Homo sapiens
caagaggaaatttgc

SEQ ID NO: 937803 - DNA, 15 bp, Homo sapiens
aagaggaaatttgca

SEQ ID NO: 937804 - DNA, 15 bp, Homo sapiens
agaggaaatttgcag

SEQ ID NO: 937805 - DNA, 15 bp, Homo sapiens
gaggaaatttgcaga

SEQ ID NO: 937806 - DNA, 15 bp, Homo sapiens
aggaaatttgcagat

SEQ ID NO: 937807 - DNA, 15 bp, Homo sapiens
ggaaatttgcagatg

SEQ ID NO: 937808 - DNA, 15 bp, Homo sapiens
gaaatttgcagatgt

SEQ ID NO: 937809 - DNA, 15 bp, Homo sapiens
aaatttgcagatgtg

SEQ ID NO: 937810 - DNA, 15 bp, Homo sapiens
aatttgcagatgtga

SEQ ID NO: 937811 - DNA, 15 bp, Homo sapiens
atttgcagatgtgat

SEQ ID NO: 937812 - DNA, 15 bp, Homo sapiens
tttgcagatgtgatt

SEQ ID NO: 937813 - DNA, 15 bp, Homo sapiens
ttgcagatgtgatta

SEQ ID NO: 937814 - DNA, 15 bp, Homo sapiens
tgcagatgtgattaa

SEQ ID NO: 937815 - DNA, 15 bp, Homo sapiens
gcagatgtgattaag

SEQ ID NO: 937816 - DNA, 15 bp, Homo sapiens
cagatgtgattaagt

SEQ ID NO: 937817 - DNA, 15 bp, Homo sapiens
agatgtgattaagtt

SEQ ID NO: 937818 - DNA, 15 bp, Homo sapiens
gatgtgattaagtta

SEQ ID NO: 937819 - DNA, 15 bp, Homo sapiens
atgtgattaagttaa

SEQ ID NO: 937820 - DNA, 15 bp, Homo sapiens
tgtgattaagttaat

SEQ ID NO: 937821 - DNA, 15 bp, Homo sapiens
gtgattaagttaata

SEQ ID NO: 937822 - DNA, 15 bp, Homo sapiens
tgattaagttaataa

SEQ ID NO: 937823 - DNA, 15 bp, Homo sapiens
gattaagttaataac

SEQ ID NO: 937824 - DNA, 15 bp, Homo sapiens
attaagttaataacc

SEQ ID NO: 937825 - DNA, 15 bp, Homo sapiens
ttaagttaataacct

SEQ ID NO: 937826 - DNA, 15 bp, Homo sapiens
taagttaataacctt

SEQ ID NO: 937827 - DNA, 15 bp, Homo sapiens
aagttaataaccttg

SEQ ID NO: 937828 - DNA, 15 bp, Homo sapiens
agttaataaccttga

SEQ ID NO: 937829 - DNA, 15 bp, Homo sapiens
gttaataaccttgag

SEQ ID NO: 937830 - DNA, 15 bp, Homo sapiens
ttaataaccttgaga

SEQ ID NO: 937831 - DNA, 15 bp, Homo sapiens
taataaccttgagat

SEQ ID NO: 937832 - DNA, 15 bp, Homo sapiens
aataaccttgagatt

SEQ ID NO: 937833 - DNA, 15 bp, Homo sapiens
ataaccttgagattt

SEQ ID NO: 937834 - DNA, 15 bp, Homo sapiens
taaccttgagatttg

SEQ ID NO: 937835 - DNA, 15 bp, Homo sapiens
aaccttgagatttgg

SEQ ID NO: 937836 - DNA, 15 bp, Homo sapiens
accttgagatttgga

SEQ ID NO: 937837 - DNA, 15 bp, Homo sapiens
ccttgagatttggaa

SEQ ID NO: 937838 - DNA, 15 bp, Homo sapiens
cttgagatttggaaa

SEQ ID NO: 937839 - DNA, 15 bp, Homo sapiens
ttgagatttggaaat

SEQ ID NO: 937840 - DNA, 15 bp, Homo sapiens
tgagatttggaaatt

SEQ ID NO: 937841 - DNA, 15 bp, Homo sapiens
gagatttggaaatta

SEQ ID NO: 937842 - DNA, 15 bp, Homo sapiens
agatttggaaattat

SEQ ID NO: 937843 - DNA, 15 bp, Homo sapiens
gatttggaaattatc

SEQ ID NO: 937844 - DNA, 15 bp, Homo sapiens
atttggaaattatct

SEQ ID NO: 937845 - DNA, 15 bp, Homo sapiens
tttggaaattatctt

SEQ ID NO: 937846 - DNA, 15 bp, Homo sapiens
ttggaaattatcttg

SEQ ID NO: 937847 - DNA, 15 bp, Homo sapiens
tggaaattatcttgt

SEQ ID NO: 937848 - DNA, 15 bp, Homo sapiens
ggaaattatcttgta

SEQ ID NO: 937849 - DNA, 15 bp, Homo sapiens
gaaattatcttgtat

SEQ ID NO: 937850 - DNA, 15 bp, Homo sapiens
aaattatcttgtatt

SEQ ID NO: 937851 - DNA, 15 bp, Homo sapiens
aattatcttgtatta

SEQ ID NO: 937852 - DNA, 15 bp, Homo sapiens
attatcttgtattat

SEQ ID NO: 937853 - DNA, 15 bp, Homo sapiens
ttatcttgtattatc

SEQ ID NO: 937854 - DNA, 15 bp, Homo sapiens
tatcttgtattatcc

SEQ ID NO: 937855 - DNA, 15 bp, Homo sapiens
atcttgtattatcct

SEQ ID NO: 937856 - DNA, 15 bp, Homo sapiens
tcttgtattatcctt

SEQ ID NO: 937857 - DNA, 15 bp, Homo sapiens
cttgtattatccttg

SEQ ID NO: 937858 - DNA, 15 bp, Homo sapiens
ttgtattatccttgt

SEQ ID NO: 937859 - DNA, 15 bp, Homo sapiens
tgtattatccttgtg

SEQ ID NO: 937860 - DNA, 15 bp, Homo sapiens
gtattatccttgtga

SEQ ID NO: 937861 - DNA, 15 bp, Homo sapiens
tattatccttgtgag

SEQ ID NO: 937862 - DNA, 15 bp, Homo sapiens
attatccttgtgagc

SEQ ID NO: 937863 - DNA, 15 bp, Homo sapiens
ttatccttgtgagcc

SEQ ID NO: 937864 - DNA, 15 bp, Homo sapiens
tatccttgtgagccc

SEQ ID NO: 937865 - DNA, 15 bp, Homo sapiens
atccttgtgagccca

SEQ ID NO: 937866 - DNA, 15 bp, Homo sapiens
tccttgtgagcccaa

SEQ ID NO: 937867 - DNA, 15 bp, Homo sapiens
ccttgtgagcccaat

SEQ ID NO: 937868 - DNA, 15 bp, Homo sapiens
cttgtgagcccaatc

SEQ ID NO: 937869 - DNA, 15 bp, Homo sapiens
ttgtgagcccaatct

SEQ ID NO: 937870 - DNA, 15 bp, Homo sapiens
tgtgagcccaatcta

SEQ ID NO: 937871 - DNA, 15 bp, Homo sapiens
gtgagcccaatctaa

SEQ ID NO: 937872 - DNA, 15 bp, Homo sapiens
tgagcccaatctaat

SEQ ID NO: 937873 - DNA, 15 bp, Homo sapiens
gagcccaatctaatt

SEQ ID NO: 937874 - DNA, 15 bp, Homo sapiens
agcccaatctaatta

SEQ ID NO: 937875 - DNA, 15 bp, Homo sapiens
gcccaatctaattaa

SEQ ID NO: 937876 - DNA, 15 bp, Homo sapiens
cccaatctaattaaa

SEQ ID NO: 937877 - DNA, 15 bp, Homo sapiens
ccaatctaattaaat

SEQ ID NO: 937878 - DNA, 15 bp, Homo sapiens
caatctaattaaatg

SEQ ID NO: 937879 - DNA, 15 bp, Homo sapiens
aatctaattaaatga

SEQ ID NO: 937880 - DNA, 15 bp, Homo sapiens
atctaattaaatgag

SEQ ID NO: 937881 - DNA, 15 bp, Homo sapiens
tctaattaaatgagt

SEQ ID NO: 937882 - DNA, 15 bp, Homo sapiens
ctaattaaatgagtt

SEQ ID NO: 937883 - DNA, 15 bp, Homo sapiens
taattaaatgagttt

SEQ ID NO: 937884 - DNA, 15 bp, Homo sapiens
aattaaatgagtttt

SEQ ID NO: 937885 - DNA, 15 bp, Homo sapiens
attaaatgagttttt

SEQ ID NO: 937886 - DNA, 15 bp, Homo sapiens
ttaaatgagttttta

SEQ ID NO: 937887 - DNA, 15 bp, Homo sapiens
taaatgagtttttag

SEQ ID NO: 937888 - DNA, 15 bp, Homo sapiens
aaatgagtttttaga

SEQ ID NO: 937889 - DNA, 15 bp, Homo sapiens
aatgagtttttagaa

SEQ ID NO: 937890 - DNA, 15 bp, Homo sapiens
atgagtttttagaag

SEQ ID NO: 937891 - DNA, 15 bp, Homo sapiens
tgagtttttagaagt

SEQ ID NO: 937892 - DNA, 15 bp, Homo sapiens
gagtttttagaagtg

SEQ ID NO: 937893 - DNA, 15 bp, Homo sapiens
agtttttagaagtgg

SEQ ID NO: 937894 - DNA, 15 bp, Homo sapiens
gtttttagaagtgga

SEQ ID NO: 937895 - DNA, 15 bp, Homo sapiens
tttttagaagtggag

SEQ ID NO: 937896 - DNA, 15 bp, Homo sapiens
ttttagaagtggaga

SEQ ID NO: 937897 - DNA, 15 bp, Homo sapiens
tttagaagtggagaa

SEQ ID NO: 937898 - DNA, 15 bp, Homo sapiens
ttagaagtggagaaa

SEQ ID NO: 937899 - DNA, 15 bp, Homo sapiens
tagaagtggagaaaa

SEQ ID NO: 937900 - DNA, 15 bp, Homo sapiens
agaagtggagaaaac

SEQ ID NO: 937901 - DNA, 15 bp, Homo sapiens
gaagtggagaaaact

SEQ ID NO: 937902 - DNA, 15 bp, Homo sapiens
aagtggagaaaactt

SEQ ID NO: 937903 - DNA, 15 bp, Homo sapiens
agtggagaaaacttt

SEQ ID NO: 937904 - DNA, 15 bp, Homo sapiens
gtggagaaaactttt

SEQ ID NO: 937905 - DNA, 15 bp, Homo sapiens
tggagaaaacttttc

SEQ ID NO: 937906 - DNA, 15 bp, Homo sapiens
ggagaaaacttttct

SEQ ID NO: 937907 - DNA, 15 bp, Homo sapiens
gagaaaacttttctt

SEQ ID NO: 937908 - DNA, 15 bp, Homo sapiens
agaaaacttttcttg

SEQ ID NO: 937909 - DNA, 15 bp, Homo sapiens
gaaaacttttcttgg

SEQ ID NO: 937910 - DNA, 15 bp, Homo sapiens
aaaacttttcttggc

SEQ ID NO: 937911 - DNA, 15 bp, Homo sapiens
aaacttttcttggct

SEQ ID NO: 937912 - DNA, 15 bp, Homo sapiens
aacttttcttggcta

SEQ ID NO: 937913 - DNA, 15 bp, Homo sapiens
acttttcttggctat

SEQ ID NO: 937914 - DNA, 15 bp, Homo sapiens
cttttcttggctatg

SEQ ID NO: 937915 - DNA, 15 bp, Homo sapiens
ttttcttggctatgg

SEQ ID NO: 937916 - DNA, 15 bp, Homo sapiens
tttcttggctatggt

SEQ ID NO: 937917 - DNA, 15 bp, Homo sapiens
ttcttggctatggtc

SEQ ID NO: 937918 - DNA, 15 bp, Homo sapiens
tcttggctatggtca

SEQ ID NO: 937919 - DNA, 15 bp, Homo sapiens
cttggctatggtcag

SEQ ID NO: 937920 - DNA, 15 bp, Homo sapiens
ttggctatggtcaga

SEQ ID NO: 937921 - DNA, 15 bp, Homo sapiens
tggctatggtcagag

SEQ ID NO: 937922 - DNA, 15 bp, Homo sapiens
ggctatggtcagaga

SEQ ID NO: 937923 - DNA, 15 bp, Homo sapiens
gctatggtcagagag

SEQ ID NO: 937924 - DNA, 15 bp, Homo sapiens
ctatggtcagagaga

SEQ ID NO: 937925 - DNA, 15 bp, Homo sapiens
tatggtcagagagag

SEQ ID NO: 937926 - DNA, 15 bp, Homo sapiens
atggtcagagagaga

SEQ ID NO: 937927 - DNA, 15 bp, Homo sapiens
tggtcagagagagac

SEQ ID NO: 937928 - DNA, 15 bp, Homo sapiens
ggtcagagagagaca

SEQ ID NO: 937929 - DNA, 15 bp, Homo sapiens
gtcagagagagacat

SEQ ID NO: 937930 - DNA, 15 bp, Homo sapiens
tcagagagagacatg

SEQ ID NO: 937931 - DNA, 15 bp, Homo sapiens
cagagagagacatga

SEQ ID NO: 937932 - DNA, 15 bp, Homo sapiens
agagagagacatgac

SEQ ID NO: 937933 - DNA, 15 bp, Homo sapiens
gagagagacatgact

SEQ ID NO: 937934 - DNA, 15 bp, Homo sapiens
agagagacatgacta

SEQ ID NO: 937935 - DNA, 15 bp, Homo sapiens
gagagacatgactaa

SEQ ID NO: 937936 - DNA, 15 bp, Homo sapiens
agagacatgactaag

SEQ ID NO: 937937 - DNA, 15 bp, Homo sapiens
gagacatgactaagg

SEQ ID NO: 937938 - DNA, 15 bp, Homo sapiens
agacatgactaagga

SEQ ID NO: 937939 - DNA, 15 bp, Homo sapiens
gacatgactaaggaa

SEQ ID NO: 937940 - DNA, 15 bp, Homo sapiens
acatgactaaggaag

SEQ ID NO: 937941 - DNA, 15 bp, Homo sapiens
catgactaaggaaga

SEQ ID NO: 937942 - DNA, 15 bp, Homo sapiens
atgactaaggaagaa

SEQ ID NO: 937943 - DNA, 15 bp, Homo sapiens
tgactaaggaagaaa

SEQ ID NO: 937944 - DNA, 15 bp, Homo sapiens
gactaaggaagaaaa

SEQ ID NO: 937945 - DNA, 15 bp, Homo sapiens
actaaggaagaaaag

SEQ ID NO: 937946 - DNA, 15 bp, Homo sapiens
ctaaggaagaaaagt

SEQ ID NO: 937947 - DNA, 15 bp, Homo sapiens
taaggaagaaaagtc

SEQ ID NO: 937948 - DNA, 15 bp, Homo sapiens
aaggaagaaaagtca

SEQ ID NO: 937949 - DNA, 15 bp, Homo sapiens
aggaagaaaagtcag

SEQ ID NO: 937950 - DNA, 15 bp, Homo sapiens
ggaagaaaagtcaga

SEQ ID NO: 937951 - DNA, 15 bp, Homo sapiens
gaagaaaagtcagag

SEQ ID NO: 937952 - DNA, 15 bp, Homo sapiens
aagaaaagtcagaga

SEQ ID NO: 937953 - DNA, 15 bp, Homo sapiens
agaaaagtcagagag

SEQ ID NO: 937954 - DNA, 15 bp, Homo sapiens
gaaaagtcagagaga

SEQ ID NO: 937955 - DNA, 15 bp, Homo sapiens
aaaagtcagagagat

SEQ ID NO: 937956 - DNA, 15 bp, Homo sapiens
aaagtcagagagatg

SEQ ID NO: 937957 - DNA, 15 bp, Homo sapiens
aagtcagagagatgc

SEQ ID NO: 937958 - DNA, 15 bp, Homo sapiens
agtcagagagatgca

SEQ ID NO: 937959 - DNA, 15 bp, Homo sapiens
gtcagagagatgcaa

SEQ ID NO: 937960 - DNA, 15 bp, Homo sapiens
tcagagagatgcaac

SEQ ID NO: 937961 - DNA, 15 bp, Homo sapiens
cagagagatgcaaca

SEQ ID NO: 937962 - DNA, 15 bp, Homo sapiens
agagagatgcaacat

SEQ ID NO: 937963 - DNA, 15 bp, Homo sapiens
gagagatgcaacatt

SEQ ID NO: 937964 - DNA, 15 bp, Homo sapiens
agagatgcaacattg

SEQ ID NO: 937965 - DNA, 15 bp, Homo sapiens
gagatgcaacattgc

SEQ ID NO: 937966 - DNA, 15 bp, Homo sapiens
agatgcaacattgct

SEQ ID NO: 937967 - DNA, 15 bp, Homo sapiens
gatgcaacattgctg

SEQ ID NO: 937968 - DNA, 15 bp, Homo sapiens
atgcaacattgctgg

SEQ ID NO: 937969 - DNA, 15 bp, Homo sapiens
tgcaacattgctggc

SEQ ID NO: 937970 - DNA, 15 bp, Homo sapiens
gcaacattgctggct

SEQ ID NO: 937971 - DNA, 15 bp, Homo sapiens
caacattgctggctt

SEQ ID NO: 937972 - DNA, 15 bp, Homo sapiens
aacattgctggcttt

SEQ ID NO: 937973 - DNA, 15 bp, Homo sapiens
acattgctggctttg

SEQ ID NO: 937974 - DNA, 15 bp, Homo sapiens
cattgctggctttga

SEQ ID NO: 937975 - DNA, 15 bp, Homo sapiens
attgctggctttgaa

SEQ ID NO: 937976 - DNA, 15 bp, Homo sapiens
ttgctggctttgaag

SEQ ID NO: 937977 - DNA, 15 bp, Homo sapiens
tgctggctttgaaga

SEQ ID NO: 937978 - DNA, 15 bp, Homo sapiens
gctggctttgaagat

SEQ ID NO: 937979 - DNA, 15 bp, Homo sapiens
ctggctttgaagatg

SEQ ID NO: 937980 - DNA, 15 bp, Homo sapiens
tggctttgaagatgg

SEQ ID NO: 937981 - DNA, 15 bp, Homo sapiens
ggctttgaagatgga

SEQ ID NO: 937982 - DNA, 15 bp, Homo sapiens
gctttgaagatggag

SEQ ID NO: 937983 - DNA, 15 bp, Homo sapiens
ctttgaagatggagg

SEQ ID NO: 937984 - DNA, 15 bp, Homo sapiens
tttgaagatggagga

SEQ ID NO: 937985 - DNA, 15 bp, Homo sapiens
ttgaagatggaggaa

SEQ ID NO: 937986 - DNA, 15 bp, Homo sapiens
tgaagatggaggaag

SEQ ID NO: 937987 - DNA, 15 bp, Homo sapiens
gaagatggaggaagg

SEQ ID NO: 937988 - DNA, 15 bp, Homo sapiens
aagatggaggaaggg

SEQ ID NO: 937989 - DNA, 15 bp, Homo sapiens
agatggaggaaggga

SEQ ID NO: 937990 - DNA, 15 bp, Homo sapiens
gatggaggaagggag

SEQ ID NO: 937991 - DNA, 15 bp, Homo sapiens
atggaggaagggagt

SEQ ID NO: 937992 - DNA, 15 bp, Homo sapiens
tggaggaagggagtc

SEQ ID NO: 937993 - DNA, 15 bp, Homo sapiens
ggaggaagggagtca

SEQ ID NO: 937994 - DNA, 15 bp, Homo sapiens
gaggaagggagtcat

SEQ ID NO: 937995 - DNA, 15 bp, Homo sapiens
aggaagggagtcatg

SEQ ID NO: 937996 - DNA, 15 bp, Homo sapiens
ggaagggagtcatga

SEQ ID NO: 937997 - DNA, 15 bp, Homo sapiens
gaagggagtcatgag

SEQ ID NO: 937998 - DNA, 15 bp, Homo sapiens
aagggagtcatgagc

SEQ ID NO: 937999 - DNA, 15 bp, Homo sapiens
agggagtcatgagcc

SEQ ID NO: 938000 - DNA, 15 bp, Homo sapiens
gggagtcatgagcca

SEQ ID NO: 938001 - DNA, 15 bp, Homo sapiens
ggagtcatgagccaa

SEQ ID NO: 938002 - DNA, 15 bp, Homo sapiens
gagtcatgagccaaa

SEQ ID NO: 938003 - DNA, 15 bp, Homo sapiens
agtcatgagccaaaa

SEQ ID NO: 938004 - DNA, 15 bp, Homo sapiens
gtcatgagccaaaaa

SEQ ID NO: 938005 - DNA, 15 bp, Homo sapiens
tcatgagccaaaaaa

SEQ ID NO: 938006 - DNA, 15 bp, Homo sapiens
catgagccaaaaaaa

SEQ ID NO: 938007 - DNA, 15 bp, Homo sapiens
atgagccaaaaaaag

SEQ ID NO: 938008 - DNA, 15 bp, Homo sapiens
tgagccaaaaaaagt

SEQ ID NO: 938009 - DNA, 15 bp, Homo sapiens
gagccaaaaaaagtg

SEQ ID NO: 938010 - DNA, 15 bp, Homo sapiens
agccaaaaaaagtgg

SEQ ID NO: 938011 - DNA, 15 bp, Homo sapiens
gccaaaaaaagtggg

SEQ ID NO: 938012 - DNA, 15 bp, Homo sapiens
ccaaaaaaagtgggc

SEQ ID NO: 938013 - DNA, 15 bp, Homo sapiens
caaaaaaagtgggca

SEQ ID NO: 938014 - DNA, 15 bp, Homo sapiens
aaaaaaagtgggcaa

SEQ ID NO: 938015 - DNA, 15 bp, Homo sapiens
aaaaaagtgggcaac

SEQ ID NO: 938016 - DNA, 15 bp, Homo sapiens
aaaaagtgggcaacc

SEQ ID NO: 938017 - DNA, 15 bp, Homo sapiens
aaaagtgggcaacct

SEQ ID NO: 938018 - DNA, 15 bp, Homo sapiens
aaagtgggcaacctc

SEQ ID NO: 938019 - DNA, 15 bp, Homo sapiens
aagtgggcaacctct

SEQ ID NO: 938020 - DNA, 15 bp, Homo sapiens
agtgggcaacctcta

SEQ ID NO: 938021 - DNA, 15 bp, Homo sapiens
gtgggcaacctctag

SEQ ID NO: 938022 - DNA, 15 bp, Homo sapiens
tgggcaacctctagt

SEQ ID NO: 938023 - DNA, 15 bp, Homo sapiens
gggcaacctctagta

SEQ ID NO: 938024 - DNA, 15 bp, Homo sapiens
ggcaacctctagtag

SEQ ID NO: 938025 - DNA, 15 bp, Homo sapiens
gcaacctctagtagc

SEQ ID NO: 938026 - DNA, 15 bp, Homo sapiens
caacctctagtagct

SEQ ID NO: 938027 - DNA, 15 bp, Homo sapiens
aacctctagtagcta

SEQ ID NO: 938028 - DNA, 15 bp, Homo sapiens
acctctagtagctag

SEQ ID NO: 938029 - DNA, 15 bp, Homo sapiens
cctctagtagctaga

SEQ ID NO: 938030 - DNA, 15 bp, Homo sapiens
ctctagtagctagaa

SEQ ID NO: 938031 - DNA, 15 bp, Homo sapiens
tctagtagctagaaa

SEQ ID NO: 938032 - DNA, 15 bp, Homo sapiens
ctagtagctagaaaa

SEQ ID NO: 938033 - DNA, 15 bp, Homo sapiens
tagtagctagaaaag

SEQ ID NO: 938034 - DNA, 15 bp, Homo sapiens
agtagctagaaaaga

SEQ ID NO: 938035 - DNA, 15 bp, Homo sapiens
gtagctagaaaagaa

SEQ ID NO: 938036 - DNA, 15 bp, Homo sapiens
tagctagaaaagaaa

SEQ ID NO: 938037 - DNA, 15 bp, Homo sapiens
agctagaaaagaaaa

SEQ ID NO: 938038 - DNA, 15 bp, Homo sapiens
gctagaaaagaaaag

SEQ ID NO: 938039 - DNA, 15 bp, Homo sapiens
ctagaaaagaaaaga

SEQ ID NO: 938040 - DNA, 15 bp, Homo sapiens
tagaaaagaaaagaa

SEQ ID NO: 938041 - DNA, 15 bp, Homo sapiens
agaaaagaaaagaaa

SEQ ID NO: 938042 - DNA, 15 bp, Homo sapiens
gaaaagaaaagaaaa

SEQ ID NO: 938043 - DNA, 15 bp, Homo sapiens
aaaagaaaagaaaat

SEQ ID NO: 938044 - DNA, 15 bp, Homo sapiens
aaagaaaagaaaatg

SEQ ID NO: 938045 - DNA, 15 bp, Homo sapiens
aagaaaagaaaatgg

SEQ ID NO: 938046 - DNA, 15 bp, Homo sapiens
agaaaagaaaatggt

SEQ ID NO: 938047 - DNA, 15 bp, Homo sapiens
gaaaagaaaatggtt

SEQ ID NO: 938048 - DNA, 15 bp, Homo sapiens
aaaagaaaatggttt

SEQ ID NO: 938049 - DNA, 15 bp, Homo sapiens
aaagaaaatggtttt

SEQ ID NO: 938050 - DNA, 15 bp, Homo sapiens
aagaaaatggttttc

SEQ ID NO: 938051 - DNA, 15 bp, Homo sapiens
agaaaatggttttcc

SEQ ID NO: 938052 - DNA, 15 bp, Homo sapiens
gaaaatggttttccc

SEQ ID NO: 938053 - DNA, 15 bp, Homo sapiens
aaaatggttttccct

SEQ ID NO: 938054 - DNA, 15 bp, Homo sapiens
aaatggttttccctt

SEQ ID NO: 938055 - DNA, 15 bp, Homo sapiens
aatggttttccctta

SEQ ID NO: 938056 - DNA, 15 bp, Homo sapiens
atggttttcccttag

SEQ ID NO: 938057 - DNA, 15 bp, Homo sapiens
tggttttcccttaga

SEQ ID NO: 938058 - DNA, 15 bp, Homo sapiens
ggttttcccttagag

SEQ ID NO: 938059 - DNA, 15 bp, Homo sapiens
gttttcccttagagc

SEQ ID NO: 938060 - DNA, 15 bp, Homo sapiens
ttttcccttagagcc

SEQ ID NO: 938061 - DNA, 15 bp, Homo sapiens
tttcccttagagcct

SEQ ID NO: 938062 - DNA, 15 bp, Homo sapiens
ttcccttagagcctc

SEQ ID NO: 938063 - DNA, 15 bp, Homo sapiens
tcccttagagcctct

SEQ ID NO: 938064 - DNA, 15 bp, Homo sapiens
cccttagagcctcta

SEQ ID NO: 938065 - DNA, 15 bp, Homo sapiens
ccttagagcctctag

SEQ ID NO: 938066 - DNA, 15 bp, Homo sapiens
cttagagcctctagg

SEQ ID NO: 938067 - DNA, 15 bp, Homo sapiens
ttagagcctctagga

SEQ ID NO: 938068 - DNA, 15 bp, Homo sapiens
tagagcctctaggaa

SEQ ID NO: 938069 - DNA, 15 bp, Homo sapiens
agagcctctaggaag

SEQ ID NO: 938070 - DNA, 15 bp, Homo sapiens
gagcctctaggaagg

SEQ ID NO: 938071 - DNA, 15 bp, Homo sapiens
agcctctaggaagga

SEQ ID NO: 938072 - DNA, 15 bp, Homo sapiens
gcctctaggaaggaa

SEQ ID NO: 938073 - DNA, 15 bp, Homo sapiens
cctctaggaaggaat

SEQ ID NO: 938074 - DNA, 15 bp, Homo sapiens
ctctaggaaggaatg

SEQ ID NO: 938075 - DNA, 15 bp, Homo sapiens
tctaggaaggaatgc

SEQ ID NO: 938076 - DNA, 15 bp, Homo sapiens
ctaggaaggaatgca

SEQ ID NO: 938077 - DNA, 15 bp, Homo sapiens
taggaaggaatgcat

SEQ ID NO: 938078 - DNA, 15 bp, Homo sapiens
aggaaggaatgcatc

SEQ ID NO: 938079 - DNA, 15 bp, Homo sapiens
ggaaggaatgcatca

SEQ ID NO: 938080 - DNA, 15 bp, Homo sapiens
gaaggaatgcatcac

SEQ ID NO: 938081 - DNA, 15 bp, Homo sapiens
aaggaatgcatcact

SEQ ID NO: 938082 - DNA, 15 bp, Homo sapiens
aggaatgcatcactg

SEQ ID NO: 938083 - DNA, 15 bp, Homo sapiens
ggaatgcatcactgc

SEQ ID NO: 938084 - DNA, 15 bp, Homo sapiens
gaatgcatcactgca

SEQ ID NO: 938085 - DNA, 15 bp, Homo sapiens
aatgcatcactgcac

SEQ ID NO: 938086 - DNA, 15 bp, Homo sapiens
atgcatcactgcaca

SEQ ID NO: 938087 - DNA, 15 bp, Homo sapiens
tgcatcactgcacac

SEQ ID NO: 938088 - DNA, 15 bp, Homo sapiens
gcatcactgcacaca

SEQ ID NO: 938089 - DNA, 15 bp, Homo sapiens
catcactgcacacac

SEQ ID NO: 938090 - DNA, 15 bp, Homo sapiens
atcactgcacacacc

SEQ ID NO: 938091 - DNA, 15 bp, Homo sapiens
tcactgcacacacct

SEQ ID NO: 938092 - DNA, 15 bp, Homo sapiens
cactgcacacacctt

SEQ ID NO: 938093 - DNA, 15 bp, Homo sapiens
actgcacacaccttt

SEQ ID NO: 938094 - DNA, 15 bp, Homo sapiens
ctgcacacaccttta

SEQ ID NO: 938095 - DNA, 15 bp, Homo sapiens
tgcacacacctttat

SEQ ID NO: 938096 - DNA, 15 bp, Homo sapiens
gcacacacctttatt

SEQ ID NO: 938097 - DNA, 15 bp, Homo sapiens
cacacacctttattt

SEQ ID NO: 938098 - DNA, 15 bp, Homo sapiens
acacacctttatttt

SEQ ID NO: 938099 - DNA, 15 bp, Homo sapiens
cacacctttatttta

SEQ ID NO: 938100 - DNA, 15 bp, Homo sapiens
acacctttattttag

SEQ ID NO: 938101 - DNA, 15 bp, Homo sapiens
cacctttattttagc

SEQ ID NO: 938102 - DNA, 15 bp, Homo sapiens
acctttattttagcc

SEQ ID NO: 938103 - DNA, 15 bp, Homo sapiens
cctttattttagccc

SEQ ID NO: 938104 - DNA, 15 bp, Homo sapiens
ctttattttagcccc

SEQ ID NO: 938105 - DNA, 15 bp, Homo sapiens
tttattttagcccca

SEQ ID NO: 938106 - DNA, 15 bp, Homo sapiens
ttattttagccccat

SEQ ID NO: 938107 - DNA, 15 bp, Homo sapiens
tattttagccccatg

SEQ ID NO: 938108 - DNA, 15 bp, Homo sapiens
attttagccccatga

SEQ ID NO: 938109 - DNA, 15 bp, Homo sapiens
ttttagccccatgag

SEQ ID NO: 938110 - DNA, 15 bp, Homo sapiens
tttagccccatgaga

SEQ ID NO: 938111 - DNA, 15 bp, Homo sapiens
ttagccccatgagac

SEQ ID NO: 938112 - DNA, 15 bp, Homo sapiens
tagccccatgagact

SEQ ID NO: 938113 - DNA, 15 bp, Homo sapiens
agccccatgagactt

SEQ ID NO: 938114 - DNA, 15 bp, Homo sapiens
gccccatgagacttg

SEQ ID NO: 938115 - DNA, 15 bp, Homo sapiens
ccccatgagacttgt

SEQ ID NO: 938116 - DNA, 15 bp, Homo sapiens
cccatgagacttgtg

SEQ ID NO: 938117 - DNA, 15 bp, Homo sapiens
ccatgagacttgtgt

SEQ ID NO: 938118 - DNA, 15 bp, Homo sapiens
catgagacttgtgtc

SEQ ID NO: 938119 - DNA, 15 bp, Homo sapiens
atgagacttgtgtca

SEQ ID NO: 938120 - DNA, 15 bp, Homo sapiens
tgagacttgtgtcag

SEQ ID NO: 938121 - DNA, 15 bp, Homo sapiens
gagacttgtgtcaga

SEQ ID NO: 938122 - DNA, 15 bp, Homo sapiens
agacttgtgtcagaa

SEQ ID NO: 938123 - DNA, 15 bp, Homo sapiens
gacttgtgtcagaat

SEQ ID NO: 938124 - DNA, 15 bp, Homo sapiens
acttgtgtcagaatt

SEQ ID NO: 938125 - DNA, 15 bp, Homo sapiens
cttgtgtcagaattc

SEQ ID NO: 938126 - DNA, 15 bp, Homo sapiens
ttgtgtcagaattct

SEQ ID NO: 938127 - DNA, 15 bp, Homo sapiens
tgtgtcagaattcta

SEQ ID NO: 938128 - DNA, 15 bp, Homo sapiens
gtgtcagaattctaa

SEQ ID NO: 938129 - DNA, 15 bp, Homo sapiens
tgtcagaattctaac

SEQ ID NO: 938130 - DNA, 15 bp, Homo sapiens
gtcagaattctaacc

SEQ ID NO: 938131 - DNA, 15 bp, Homo sapiens
tcagaattctaacct

SEQ ID NO: 938132 - DNA, 15 bp, Homo sapiens
cagaattctaacctc

SEQ ID NO: 938133 - DNA, 15 bp, Homo sapiens
agaattctaacctct

SEQ ID NO: 938134 - DNA, 15 bp, Homo sapiens
gaattctaacctcta

SEQ ID NO: 938135 - DNA, 15 bp, Homo sapiens
aattctaacctctaa

SEQ ID NO: 938136 - DNA, 15 bp, Homo sapiens
attctaacctctaaa

SEQ ID NO: 938137 - DNA, 15 bp, Homo sapiens
ttctaacctctaaaa

SEQ ID NO: 938138 - DNA, 15 bp, Homo sapiens
tctaacctctaaaac

SEQ ID NO: 938139 - DNA, 15 bp, Homo sapiens
ctaacctctaaaact

SEQ ID NO: 938140 - DNA, 15 bp, Homo sapiens
taacctctaaaacta

SEQ ID NO: 938141 - DNA, 15 bp, Homo sapiens
aacctctaaaactat

SEQ ID NO: 938142 - DNA, 15 bp, Homo sapiens
acctctaaaactata

SEQ ID NO: 938143 - DNA, 15 bp, Homo sapiens
cctctaaaactataa

SEQ ID NO: 938144 - DNA, 15 bp, Homo sapiens
ctctaaaactataag

SEQ ID NO: 938145 - DNA, 15 bp, Homo sapiens
tctaaaactataaga

SEQ ID NO: 938146 - DNA, 15 bp, Homo sapiens
ctaaaactataagat

SEQ ID NO: 938147 - DNA, 15 bp, Homo sapiens
taaaactataagata

SEQ ID NO: 938148 - DNA, 15 bp, Homo sapiens
aaaactataagataa

SEQ ID NO: 938149 - DNA, 15 bp, Homo sapiens
aaactataagataat

SEQ ID NO: 938150 - DNA, 15 bp, Homo sapiens
aactataagataata

SEQ ID NO: 938151 - DNA, 15 bp, Homo sapiens
actataagataataa

SEQ ID NO: 938152 - DNA, 15 bp, Homo sapiens
ctataagataataaa

SEQ ID NO: 938153 - DNA, 15 bp, Homo sapiens
tataagataataaat

SEQ ID NO: 938154 - DNA, 15 bp, Homo sapiens
ataagataataaatt

SEQ ID NO: 938155 - DNA, 15 bp, Homo sapiens
taagataataaattt

SEQ ID NO: 938156 - DNA, 15 bp, Homo sapiens
aagataataaatttg

SEQ ID NO: 938157 - DNA, 15 bp, Homo sapiens
agataataaatttgt

SEQ ID NO: 938158 - DNA, 15 bp, Homo sapiens
gataataaatttgtg

SEQ ID NO: 938159 - DNA, 15 bp, Homo sapiens
ataataaatttgtgt

SEQ ID NO: 938160 - DNA, 15 bp, Homo sapiens
taataaatttgtgtt

SEQ ID NO: 938161 - DNA, 15 bp, Homo sapiens
aataaatttgtgttc

SEQ ID NO: 938162 - DNA, 15 bp, Homo sapiens
ataaatttgtgttct

SEQ ID NO: 938163 - DNA, 15 bp, Homo sapiens
taaatttgtgttctt

SEQ ID NO: 938164 - DNA, 15 bp, Homo sapiens
aaatttgtgttcttt

SEQ ID NO: 938165 - DNA, 15 bp, Homo sapiens
aatttgtgttctttt

SEQ ID NO: 938166 - DNA, 15 bp, Homo sapiens
atttgtgttctttta

SEQ ID NO: 938167 - DNA, 15 bp, Homo sapiens
tttgtgttcttttaa

SEQ ID NO: 938168 - DNA, 15 bp, Homo sapiens
ttgtgttcttttaag

SEQ ID NO: 938169 - DNA, 15 bp, Homo sapiens
tgtgttcttttaagc

SEQ ID NO: 938170 - DNA, 15 bp, Homo sapiens
gtgttcttttaagct

SEQ ID NO: 938171 - DNA, 15 bp, Homo sapiens
tgttcttttaagcta

SEQ ID NO: 938172 - DNA, 15 bp, Homo sapiens
gttcttttaagctac

SEQ ID NO: 938173 - DNA, 15 bp, Homo sapiens
ttcttttaagctact

SEQ ID NO: 938174 - DNA, 15 bp, Homo sapiens
tcttttaagctacta

SEQ ID NO: 938175 - DNA, 15 bp, Homo sapiens
cttttaagctactaa

SEQ ID NO: 938176 - DNA, 15 bp, Homo sapiens
ttttaagctactaag

SEQ ID NO: 938177 - DNA, 15 bp, Homo sapiens
tttaagctactaagt

SEQ ID NO: 938178 - DNA, 15 bp, Homo sapiens
ttaagctactaagtt

SEQ ID NO: 938179 - DNA, 15 bp, Homo sapiens
taagctactaagttt

SEQ ID NO: 938180 - DNA, 15 bp, Homo sapiens
aagctactaagtttg

SEQ ID NO: 938181 - DNA, 15 bp, Homo sapiens
agctactaagtttgt

SEQ ID NO: 938182 - DNA, 15 bp, Homo sapiens
gctactaagtttgtg

SEQ ID NO: 938183 - DNA, 15 bp, Homo sapiens
ctactaagtttgtgg

SEQ ID NO: 938184 - DNA, 15 bp, Homo sapiens
tactaagtttgtggt

SEQ ID NO: 938185 - DNA, 15 bp, Homo sapiens
actaagtttgtggta

SEQ ID NO: 938186 - DNA, 15 bp, Homo sapiens
ctaagtttgtggtaa

SEQ ID NO: 938187 - DNA, 15 bp, Homo sapiens
taagtttgtggtaat

SEQ ID NO: 938188 - DNA, 15 bp, Homo sapiens
aagtttgtggtaatt

SEQ ID NO: 938189 - DNA, 15 bp, Homo sapiens
agtttgtggtaattt

SEQ ID NO: 938190 - DNA, 15 bp, Homo sapiens
gtttgtggtaatttg

SEQ ID NO: 938191 - DNA, 15 bp, Homo sapiens
tttgtggtaatttgt

SEQ ID NO: 938192 - DNA, 15 bp, Homo sapiens
ttgtggtaatttgtt

SEQ ID NO: 938193 - DNA, 15 bp, Homo sapiens
tgtggtaatttgtta

SEQ ID NO: 938194 - DNA, 15 bp, Homo sapiens
gtggtaatttgttac

SEQ ID NO: 938195 - DNA, 15 bp, Homo sapiens
tggtaatttgttaca

SEQ ID NO: 938196 - DNA, 15 bp, Homo sapiens
ggtaatttgttacag

SEQ ID NO: 938197 - DNA, 15 bp, Homo sapiens
gtaatttgttacagc

SEQ ID NO: 938198 - DNA, 15 bp, Homo sapiens
taatttgttacagca

SEQ ID NO: 938199 - DNA, 15 bp, Homo sapiens
aatttgttacagcaa

SEQ ID NO: 938200 - DNA, 15 bp, Homo sapiens
atttgttacagcaag

SEQ ID NO: 938201 - DNA, 15 bp, Homo sapiens
tttgttacagcaaga

SEQ ID NO: 938202 - DNA, 15 bp, Homo sapiens
ttgttacagcaagaa

SEQ ID NO: 938203 - DNA, 15 bp, Homo sapiens
tgttacagcaagaat

SEQ ID NO: 938204 - DNA, 15 bp, Homo sapiens
gttacagcaagaata

SEQ ID NO: 938205 - DNA, 15 bp, Homo sapiens
ttacagcaagaatag

SEQ ID NO: 938206 - DNA, 15 bp, Homo sapiens
tacagcaagaataga

SEQ ID NO: 938207 - DNA, 15 bp, Homo sapiens
acagcaagaatagaa

SEQ ID NO: 938208 - DNA, 15 bp, Homo sapiens
cagcaagaatagaaa

SEQ ID NO: 938209 - DNA, 15 bp, Homo sapiens
agcaagaatagaaaa

SEQ ID NO: 938210 - DNA, 15 bp, Homo sapiens
gcaagaatagaaaac

SEQ ID NO: 938211 - DNA, 15 bp, Homo sapiens
caagaatagaaaact

SEQ ID NO: 938212 - DNA, 15 bp, Homo sapiens
aagaatagaaaacta

SEQ ID NO: 938213 - DNA, 15 bp, Homo sapiens
agaatagaaaactaa

SEQ ID NO: 938214 - DNA, 15 bp, Homo sapiens
gaatagaaaactaat

SEQ ID NO: 938215 - DNA, 15 bp, Homo sapiens
aatagaaaactaata

SEQ ID NO: 938216 - DNA, 15 bp, Homo sapiens
atagaaaactaatat

SEQ ID NO: 938217 - DNA, 15 bp, Homo sapiens
tagaaaactaatata

SEQ ID NO: 938218 - DNA, 15 bp, Homo sapiens
agaaaactaatataa

SEQ ID NO: 938219 - DNA, 15 bp, Homo sapiens
gaaaactaatataat

SEQ ID NO: 938220 - DNA, 15 bp, Homo sapiens
aaaactaatataatc

SEQ ID NO: 938221 - DNA, 15 bp, Homo sapiens
aaactaatataatcc

SEQ ID NO: 938222 - DNA, 15 bp, Homo sapiens
aactaatataatccc

SEQ ID NO: 938223 - DNA, 15 bp, Homo sapiens
actaatataatcccc

SEQ ID NO: 938224 - DNA, 15 bp, Homo sapiens
ctaatataatcccct

SEQ ID NO: 938225 - DNA, 15 bp, Homo sapiens
taatataatcccctc

SEQ ID NO: 938226 - DNA, 15 bp, Homo sapiens
aatataatcccctcc

SEQ ID NO: 938227 - DNA, 15 bp, Homo sapiens
atataatcccctcca

SEQ ID NO: 938228 - DNA, 15 bp, Homo sapiens
tataatcccctccag

SEQ ID NO: 938229 - DNA, 15 bp, Homo sapiens
ataatcccctccagg

SEQ ID NO: 938230 - DNA, 15 bp, Homo sapiens
taatcccctccaggc

SEQ ID NO: 938231 - DNA, 15 bp, Homo sapiens
aatcccctccaggcc

SEQ ID NO: 938232 - DNA, 15 bp, Homo sapiens
atcccctccaggcca

SEQ ID NO: 938233 - DNA, 15 bp, Homo sapiens
tcccctccaggccag

SEQ ID NO: 938234 - DNA, 15 bp, Homo sapiens
cccctccaggccagg

SEQ ID NO: 938235 - DNA, 15 bp, Homo sapiens
ccctccaggccaggt

SEQ ID NO: 938236 - DNA, 15 bp, Homo sapiens
cctccaggccaggtt

SEQ ID NO: 938237 - DNA, 15 bp, Homo sapiens
ctccaggccaggtta

SEQ ID NO: 938238 - DNA, 15 bp, Homo sapiens
tccaggccaggttaa

SEQ ID NO: 938239 - DNA, 15 bp, Homo sapiens
ccaggccaggttaaa

SEQ ID NO: 938240 - DNA, 15 bp, Homo sapiens
caggccaggttaaat

SEQ ID NO: 938241 - DNA, 15 bp, Homo sapiens
aggccaggttaaatg

SEQ ID NO: 938242 - DNA, 15 bp, Homo sapiens
ggccaggttaaatgc

SEQ ID NO: 938243 - DNA, 15 bp, Homo sapiens
gccaggttaaatgct

SEQ ID NO: 938244 - DNA, 15 bp, Homo sapiens
ccaggttaaatgcta

SEQ ID NO: 938245 - DNA, 15 bp, Homo sapiens
caggttaaatgctac

SEQ ID NO: 938246 - DNA, 15 bp, Homo sapiens
aggttaaatgctact

SEQ ID NO: 938247 - DNA, 15 bp, Homo sapiens
ggttaaatgctactt

SEQ ID NO: 938248 - DNA, 15 bp, Homo sapiens
gttaaatgctacttt

SEQ ID NO: 938249 - DNA, 15 bp, Homo sapiens
ttaaatgctactttt

SEQ ID NO: 938250 - DNA, 15 bp, Homo sapiens
taaatgctactttta

SEQ ID NO: 938251 - DNA, 15 bp, Homo sapiens
aaatgctacttttaa

SEQ ID NO: 938252 - DNA, 15 bp, Homo sapiens
aatgctacttttaaa

SEQ ID NO: 938253 - DNA, 15 bp, Homo sapiens
atgctacttttaaaa

SEQ ID NO: 938254 - DNA, 15 bp, Homo sapiens
tgctacttttaaaag

SEQ ID NO: 938255 - DNA, 15 bp, Homo sapiens
gctacttttaaaagt

SEQ ID NO: 938256 - DNA, 15 bp, Homo sapiens
ctacttttaaaagtt

SEQ ID NO: 938257 - DNA, 15 bp, Homo sapiens
tacttttaaaagttc

SEQ ID NO: 938258 - DNA, 15 bp, Homo sapiens
acttttaaaagttct

SEQ ID NO: 938259 - DNA, 15 bp, Homo sapiens
cttttaaaagttctt

SEQ ID NO: 938260 - DNA, 15 bp, Homo sapiens
ttttaaaagttcttg

SEQ ID NO: 938261 - DNA, 15 bp, Homo sapiens
tttaaaagttcttgc

SEQ ID NO: 938262 - DNA, 15 bp, Homo sapiens
ttaaaagttcttgcc

SEQ ID NO: 938263 - DNA, 15 bp, Homo sapiens
taaaagttcttgcca

SEQ ID NO: 938264 - DNA, 15 bp, Homo sapiens
aaaagttcttgccac

SEQ ID NO: 938265 - DNA, 15 bp, Homo sapiens
aaagttcttgccaca

SEQ ID NO: 938266 - DNA, 15 bp, Homo sapiens
aagttcttgccacat

SEQ ID NO: 938267 - DNA, 15 bp, Homo sapiens
agttcttgccacatt

SEQ ID NO: 938268 - DNA, 15 bp, Homo sapiens
gttcttgccacattc

SEQ ID NO: 938269 - DNA, 15 bp, Homo sapiens
ttcttgccacattcc

SEQ ID NO: 938270 - DNA, 15 bp, Homo sapiens
tcttgccacattcca

SEQ ID NO: 938271 - DNA, 15 bp, Homo sapiens
cttgccacattccac

SEQ ID NO: 938272 - DNA, 15 bp, Homo sapiens
ttgccacattccaca

SEQ ID NO: 938273 - DNA, 15 bp, Homo sapiens
tgccacattccacac

SEQ ID NO: 938274 - DNA, 15 bp, Homo sapiens
gccacattccacaca

SEQ ID NO: 938275 - DNA, 15 bp, Homo sapiens
ccacattccacacat

SEQ ID NO: 938276 - DNA, 15 bp, Homo sapiens
cacattccacacata

SEQ ID NO: 938277 - DNA, 15 bp, Homo sapiens
acattccacacatac

SEQ ID NO: 938278 - DNA, 15 bp, Homo sapiens
cattccacacatact

SEQ ID NO: 938279 - DNA, 15 bp, Homo sapiens
attccacacatactg

SEQ ID NO: 938280 - DNA, 15 bp, Homo sapiens
ttccacacatactgc

SEQ ID NO: 938281 - DNA, 15 bp, Homo sapiens
tccacacatactgct

SEQ ID NO: 938282 - DNA, 15 bp, Homo sapiens
ccacacatactgcta

SEQ ID NO: 938283 - DNA, 15 bp, Homo sapiens
cacacatactgctaa

SEQ ID NO: 938284 - DNA, 15 bp, Homo sapiens
acacatactgctaac

SEQ ID NO: 938285 - DNA, 15 bp, Homo sapiens
cacatactgctaaca

SEQ ID NO: 938286 - DNA, 15 bp, Homo sapiens
acatactgctaacaa

SEQ ID NO: 938287 - DNA, 15 bp, Homo sapiens
catactgctaacaat

SEQ ID NO: 938288 - DNA, 15 bp, Homo sapiens
atactgctaacaata

SEQ ID NO: 938289 - DNA, 15 bp, Homo sapiens
tactgctaacaatac

SEQ ID NO: 938290 - DNA, 15 bp, Homo sapiens
actgctaacaatacg

SEQ ID NO: 938291 - DNA, 15 bp, Homo sapiens
ctgctaacaatacgt

SEQ ID NO: 938292 - DNA, 15 bp, Homo sapiens
tgctaacaatacgtg

SEQ ID NO: 938293 - DNA, 15 bp, Homo sapiens
gctaacaatacgtgc

SEQ ID NO: 938294 - DNA, 15 bp, Homo sapiens
ctaacaatacgtgca

SEQ ID NO: 938295 - DNA, 15 bp, Homo sapiens
taacaatacgtgcat

SEQ ID NO: 938296 - DNA, 15 bp, Homo sapiens
aacaatacgtgcata

SEQ ID NO: 938297 - DNA, 15 bp, Homo sapiens
acaatacgtgcatag

SEQ ID NO: 938298 - DNA, 15 bp, Homo sapiens
caatacgtgcatagc

SEQ ID NO: 938299 - DNA, 15 bp, Homo sapiens
aatacgtgcatagca

SEQ ID NO: 938300 - DNA, 15 bp, Homo sapiens
atacgtgcatagcac

SEQ ID NO: 938301 - DNA, 15 bp, Homo sapiens
tacgtgcatagcact

SEQ ID NO: 938302 - DNA, 15 bp, Homo sapiens
acgtgcatagcactt

SEQ ID NO: 938303 - DNA, 15 bp, Homo sapiens
cgtgcatagcactta

SEQ ID NO: 938304 - DNA, 15 bp, Homo sapiens
gtgcatagcacttac

SEQ ID NO: 938305 - DNA, 15 bp, Homo sapiens
tgcatagcacttacc

SEQ ID NO: 938306 - DNA, 15 bp, Homo sapiens
gcatagcacttacca

SEQ ID NO: 938307 - DNA, 15 bp, Homo sapiens
catagcacttaccat

SEQ ID NO: 938308 - DNA, 15 bp, Homo sapiens
atagcacttaccata

SEQ ID NO: 938309 - DNA, 15 bp, Homo sapiens
tagcacttaccatac

SEQ ID NO: 938310 - DNA, 15 bp, Homo sapiens
agcacttaccataca

SEQ ID NO: 938311 - DNA, 15 bp, Homo sapiens
gcacttaccatacag

SEQ ID NO: 938312 - DNA, 15 bp, Homo sapiens
cacttaccatacagt

SEQ ID NO: 938313 - DNA, 15 bp, Homo sapiens
acttaccatacagtc

SEQ ID NO: 938314 - DNA, 15 bp, Homo sapiens
cttaccatacagtca

SEQ ID NO: 938315 - DNA, 15 bp, Homo sapiens
ttaccatacagtcag

SEQ ID NO: 938316 - DNA, 15 bp, Homo sapiens
taccatacagtcagt

SEQ ID NO: 938317 - DNA, 15 bp, Homo sapiens
accatacagtcagta

SEQ ID NO: 938318 - DNA, 15 bp, Homo sapiens
ccatacagtcagtat

SEQ ID NO: 938319 - DNA, 15 bp, Homo sapiens
catacagtcagtatt

SEQ ID NO: 938320 - DNA, 15 bp, Homo sapiens
atacagtcagtattg

SEQ ID NO: 938321 - DNA, 15 bp, Homo sapiens
tacagtcagtattga

SEQ ID NO: 938322 - DNA, 15 bp, Homo sapiens
acagtcagtattgat

SEQ ID NO: 938323 - DNA, 15 bp, Homo sapiens
cagtcagtattgatt

SEQ ID NO: 938324 - DNA, 15 bp, Homo sapiens
agtcagtattgattt

SEQ ID NO: 938325 - DNA, 15 bp, Homo sapiens
gtcagtattgatttc

SEQ ID NO: 938326 - DNA, 15 bp, Homo sapiens
tcagtattgatttca

SEQ ID NO: 938327 - DNA, 15 bp, Homo sapiens
cagtattgatttcat

SEQ ID NO: 938328 - DNA, 15 bp, Homo sapiens
agtattgatttcata

SEQ ID NO: 938329 - DNA, 15 bp, Homo sapiens
gtattgatttcatat

SEQ ID NO: 938330 - DNA, 15 bp, Homo sapiens
tattgatttcatatt

SEQ ID NO: 938331 - DNA, 15 bp, Homo sapiens
attgatttcatattc

SEQ ID NO: 938332 - DNA, 15 bp, Homo sapiens
ttgatttcatattct

SEQ ID NO: 938333 - DNA, 15 bp, Homo sapiens
tgatttcatattctt

SEQ ID NO: 938334 - DNA, 15 bp, Homo sapiens
gatttcatattctta

SEQ ID NO: 938335 - DNA, 15 bp, Homo sapiens
atttcatattcttat

SEQ ID NO: 938336 - DNA, 15 bp, Homo sapiens
tttcatattcttatt

SEQ ID NO: 938337 - DNA, 15 bp, Homo sapiens
ttcatattcttattt

SEQ ID NO: 938338 - DNA, 15 bp, Homo sapiens
tcatattcttattta

SEQ ID NO: 938339 - DNA, 15 bp, Homo sapiens
catattcttatttat

SEQ ID NO: 938340 - DNA, 15 bp, Homo sapiens
atattcttatttatc

SEQ ID NO: 938341 - DNA, 15 bp, Homo sapiens
tattcttatttatct

SEQ ID NO: 938342 - DNA, 15 bp, Homo sapiens
attcttatttatctg

SEQ ID NO: 938343 - DNA, 15 bp, Homo sapiens
ttcttatttatctgt

SEQ ID NO: 938344 - DNA, 15 bp, Homo sapiens
tcttatttatctgtt

SEQ ID NO: 938345 - DNA, 15 bp, Homo sapiens
cttatttatctgttc

SEQ ID NO: 938346 - DNA, 15 bp, Homo sapiens
ttatttatctgttcc

SEQ ID NO: 938347 - DNA, 15 bp, Homo sapiens
tatttatctgttcct

SEQ ID NO: 938348 - DNA, 15 bp, Homo sapiens
atttatctgttcctt

SEQ ID NO: 938349 - DNA, 15 bp, Homo sapiens
tttatctgttccttg

SEQ ID NO: 938350 - DNA, 15 bp, Homo sapiens
ttatctgttccttgc

SEQ ID NO: 938351 - DNA, 15 bp, Homo sapiens
tatctgttccttgca

SEQ ID NO: 938352 - DNA, 15 bp, Homo sapiens
atctgttccttgcaa

SEQ ID NO: 938353 - DNA, 15 bp, Homo sapiens
tctgttccttgcaat

SEQ ID NO: 938354 - DNA, 15 bp, Homo sapiens
ctgttccttgcaata

SEQ ID NO: 938355 - DNA, 15 bp, Homo sapiens
tgttccttgcaatag

SEQ ID NO: 938356 - DNA, 15 bp, Homo sapiens
gttccttgcaataga

SEQ ID NO: 938357 - DNA, 15 bp, Homo sapiens
ttccttgcaatagac

SEQ ID NO: 938358 - DNA, 15 bp, Homo sapiens
tccttgcaatagact

SEQ ID NO: 938359 - DNA, 15 bp, Homo sapiens
ccttgcaatagactg

SEQ ID NO: 938360 - DNA, 15 bp, Homo sapiens
cttgcaatagactgt

SEQ ID NO: 938361 - DNA, 15 bp, Homo sapiens
ttgcaatagactgtg

SEQ ID NO: 938362 - DNA, 15 bp, Homo sapiens
tgcaatagactgtga

SEQ ID NO: 938363 - DNA, 15 bp, Homo sapiens
gcaatagactgtgag

SEQ ID NO: 938364 - DNA, 15 bp, Homo sapiens
caatagactgtgagt

SEQ ID NO: 938365 - DNA, 15 bp, Homo sapiens
aatagactgtgagtg

SEQ ID NO: 938366 - DNA, 15 bp, Homo sapiens
atagactgtgagtgc

SEQ ID NO: 938367 - DNA, 15 bp, Homo sapiens
tagactgtgagtgcc

SEQ ID NO: 938368 - DNA, 15 bp, Homo sapiens
agactgtgagtgcct

SEQ ID NO: 938369 - DNA, 15 bp, Homo sapiens
gactgtgagtgcctt

SEQ ID NO: 938370 - DNA, 15 bp, Homo sapiens
actgtgagtgccttg

SEQ ID NO: 938371 - DNA, 15 bp, Homo sapiens
ctgtgagtgccttgg

SEQ ID NO: 938372 - DNA, 15 bp, Homo sapiens
tgtgagtgccttgga

SEQ ID NO: 938373 - DNA, 15 bp, Homo sapiens
gtgagtgccttggaa

SEQ ID NO: 938374 - DNA, 15 bp, Homo sapiens
tgagtgccttggaaa

SEQ ID NO: 938375 - DNA, 15 bp, Homo sapiens
gagtgccttggaaac

SEQ ID NO: 938376 - DNA, 15 bp, Homo sapiens
agtgccttggaaaca

SEQ ID NO: 938377 - DNA, 15 bp, Homo sapiens
gtgccttggaaacag

SEQ ID NO: 938378 - DNA, 15 bp, Homo sapiens
tgccttggaaacagg

SEQ ID NO: 938379 - DNA, 15 bp, Homo sapiens
gccttggaaacaggt

SEQ ID NO: 938380 - DNA, 15 bp, Homo sapiens
ccttggaaacaggta

SEQ ID NO: 938381 - DNA, 15 bp, Homo sapiens
cttggaaacaggtat

SEQ ID NO: 938382 - DNA, 15 bp, Homo sapiens
ttggaaacaggtata

SEQ ID NO: 938383 - DNA, 15 bp, Homo sapiens
tggaaacaggtatag

SEQ ID NO: 938384 - DNA, 15 bp, Homo sapiens
ggaaacaggtatagg

SEQ ID NO: 938385 - DNA, 15 bp, Homo sapiens
gaaacaggtataggc

SEQ ID NO: 938386 - DNA, 15 bp, Homo sapiens
aaacaggtataggcc

SEQ ID NO: 938387 - DNA, 15 bp, Homo sapiens
aacaggtataggcct

SEQ ID NO: 938388 - DNA, 15 bp, Homo sapiens
acaggtataggcctt

SEQ ID NO: 938389 - DNA, 15 bp, Homo sapiens
caggtataggcctta

SEQ ID NO: 938390 - DNA, 15 bp, Homo sapiens
aggtataggccttat

SEQ ID NO: 938391 - DNA, 15 bp, Homo sapiens
ggtataggccttatg

SEQ ID NO: 938392 - DNA, 15 bp, Homo sapiens
gtataggccttatgc

SEQ ID NO: 938393 - DNA, 15 bp, Homo sapiens
tataggccttatgca

SEQ ID NO: 938394 - DNA, 15 bp, Homo sapiens
ataggccttatgcat

SEQ ID NO: 938395 - DNA, 15 bp, Homo sapiens
taggccttatgcatg

SEQ ID NO: 938396 - DNA, 15 bp, Homo sapiens
aggccttatgcatgg

SEQ ID NO: 938397 - DNA, 15 bp, Homo sapiens
ggccttatgcatgga

SEQ ID NO: 938398 - DNA, 15 bp, Homo sapiens
gccttatgcatggaa

SEQ ID NO: 938399 - DNA, 15 bp, Homo sapiens
ccttatgcatggaac

SEQ ID NO: 938400 - DNA, 15 bp, Homo sapiens
cttatgcatggaact

SEQ ID NO: 938401 - DNA, 15 bp, Homo sapiens
ttatgcatggaactg

SEQ ID NO: 938402 - DNA, 15 bp, Homo sapiens
tatgcatggaactgg

SEQ ID NO: 938403 - DNA, 15 bp, Homo sapiens
atgcatggaactggc

SEQ ID NO: 938404 - DNA, 15 bp, Homo sapiens
tgcatggaactggct

SEQ ID NO: 938405 - DNA, 15 bp, Homo sapiens
gcatggaactggcta

SEQ ID NO: 938406 - DNA, 15 bp, Homo sapiens
catggaactggctat

SEQ ID NO: 938407 - DNA, 15 bp, Homo sapiens
atggaactggctatc

SEQ ID NO: 938408 - DNA, 15 bp, Homo sapiens
tggaactggctatct

SEQ ID NO: 938409 - DNA, 15 bp, Homo sapiens
ggaactggctatctg

SEQ ID NO: 938410 - DNA, 15 bp, Homo sapiens
gaactggctatctgt

SEQ ID NO: 938411 - DNA, 15 bp, Homo sapiens
aactggctatctgtg

SEQ ID NO: 938412 - DNA, 15 bp, Homo sapiens
actggctatctgtga

SEQ ID NO: 938413 - DNA, 15 bp, Homo sapiens
ctggctatctgtgaa

SEQ ID NO: 938414 - DNA, 15 bp, Homo sapiens
tggctatctgtgaat

SEQ ID NO: 938415 - DNA, 15 bp, Homo sapiens
ggctatctgtgaatt

SEQ ID NO: 938416 - DNA, 15 bp, Homo sapiens
gctatctgtgaattt

SEQ ID NO: 938417 - DNA, 15 bp, Homo sapiens
ctatctgtgaatttt

SEQ ID NO: 938418 - DNA, 15 bp, Homo sapiens
tatctgtgaattttt

SEQ ID NO: 938419 - DNA, 15 bp, Homo sapiens
atctgtgaatttttt

SEQ ID NO: 938420 - DNA, 15 bp, Homo sapiens
tctgtgaattttttc

SEQ ID NO: 938421 - DNA, 15 bp, Homo sapiens
ctgtgaattttttca

SEQ ID NO: 938422 - DNA, 15 bp, Homo sapiens
tgtgaattttttcat

SEQ ID NO: 938423 - DNA, 15 bp, Homo sapiens
gtgaattttttcatt

SEQ ID NO: 938424 - DNA, 15 bp, Homo sapiens
tgaattttttcatta

SEQ ID NO: 938425 - DNA, 15 bp, Homo sapiens
gaattttttcattaa

SEQ ID NO: 938426 - DNA, 15 bp, Homo sapiens
aattttttcattaat

SEQ ID NO: 938427 - DNA, 15 bp, Homo sapiens
attttttcattaatc

SEQ ID NO: 938428 - DNA, 15 bp, Homo sapiens
ttttttcattaatca

SEQ ID NO: 938429 - DNA, 15 bp, Homo sapiens
tttttcattaatcac

SEQ ID NO: 938430 - DNA, 15 bp, Homo sapiens
ttttcattaatcacc

SEQ ID NO: 938431 - DNA, 15 bp, Homo sapiens
tttcattaatcaccc

SEQ ID NO: 938432 - DNA, 15 bp, Homo sapiens
ttcattaatcaccca

SEQ ID NO: 938433 - DNA, 15 bp, Homo sapiens
tcattaatcacccaa

SEQ ID NO: 938434 - DNA, 15 bp, Homo sapiens
cattaatcacccaaa

SEQ ID NO: 938435 - DNA, 15 bp, Homo sapiens
attaatcacccaaaa

SEQ ID NO: 938436 - DNA, 15 bp, Homo sapiens
ttaatcacccaaaat

SEQ ID NO: 938437 - DNA, 15 bp, Homo sapiens
taatcacccaaaatt

SEQ ID NO: 938438 - DNA, 15 bp, Homo sapiens
aatcacccaaaattg

SEQ ID NO: 938439 - DNA, 15 bp, Homo sapiens
atcacccaaaattgt

SEQ ID NO: 938440 - DNA, 15 bp, Homo sapiens
tcacccaaaattgtt

SEQ ID NO: 938441 - DNA, 15 bp, Homo sapiens
cacccaaaattgttg

SEQ ID NO: 938442 - DNA, 15 bp, Homo sapiens
acccaaaattgttgt

SEQ ID NO: 938443 - DNA, 15 bp, Homo sapiens
cccaaaattgttgtt

SEQ ID NO: 938444 - DNA, 15 bp, Homo sapiens
ccaaaattgttgttg

SEQ ID NO: 938445 - DNA, 15 bp, Homo sapiens
caaaattgttgttgc

SEQ ID NO: 938446 - DNA, 15 bp, Homo sapiens
aaaattgttgttgca

SEQ ID NO: 938447 - DNA, 15 bp, Homo sapiens
aaattgttgttgcat

SEQ ID NO: 938448 - DNA, 15 bp, Homo sapiens
aattgttgttgcatc

SEQ ID NO: 938449 - DNA, 15 bp, Homo sapiens
attgttgttgcatca

SEQ ID NO: 938450 - DNA, 15 bp, Homo sapiens
ttgttgttgcatcat

SEQ ID NO: 938451 - DNA, 15 bp, Homo sapiens
tgttgttgcatcatc

SEQ ID NO: 938452 - DNA, 15 bp, Homo sapiens
gttgttgcatcatca

SEQ ID NO: 938453 - DNA, 15 bp, Homo sapiens
ttgttgcatcatcac

SEQ ID NO: 938454 - DNA, 15 bp, Homo sapiens
tgttgcatcatcact

SEQ ID NO: 938455 - DNA, 15 bp, Homo sapiens
gttgcatcatcactc

SEQ ID NO: 938456 - DNA, 15 bp, Homo sapiens
ttgcatcatcactca

SEQ ID NO: 938457 - DNA, 15 bp, Homo sapiens
tgcatcatcactcac

SEQ ID NO: 938458 - DNA, 15 bp, Homo sapiens
gcatcatcactcaca

SEQ ID NO: 938459 - DNA, 15 bp, Homo sapiens
catcatcactcacac

SEQ ID NO: 938460 - DNA, 15 bp, Homo sapiens
atcatcactcacacc

SEQ ID NO: 938461 - DNA, 15 bp, Homo sapiens
tcatcactcacacca

SEQ ID NO: 938462 - DNA, 15 bp, Homo sapiens
catcactcacaccag

SEQ ID NO: 938463 - DNA, 15 bp, Homo sapiens
atcactcacaccagc

SEQ ID NO: 938464 - DNA, 15 bp, Homo sapiens
tcactcacaccagcc

SEQ ID NO: 938465 - DNA, 15 bp, Homo sapiens
cactcacaccagcct

SEQ ID NO: 938466 - DNA, 15 bp, Homo sapiens
actcacaccagcctc

SEQ ID NO: 938467 - DNA, 15 bp, Homo sapiens
ctcacaccagcctct

SEQ ID NO: 938468 - DNA, 15 bp, Homo sapiens
tcacaccagcctctg

SEQ ID NO: 938469 - DNA, 15 bp, Homo sapiens
cacaccagcctctgg

SEQ ID NO: 938470 - DNA, 15 bp, Homo sapiens
acaccagcctctggg

SEQ ID NO: 938471 - DNA, 15 bp, Homo sapiens
caccagcctctggga

SEQ ID NO: 938472 - DNA, 15 bp, Homo sapiens
accagcctctgggat

SEQ ID NO: 938473 - DNA, 15 bp, Homo sapiens
ccagcctctgggata

SEQ ID NO: 938474 - DNA, 15 bp, Homo sapiens
cagcctctgggatag

SEQ ID NO: 938475 - DNA, 15 bp, Homo sapiens
agcctctgggataga

SEQ ID NO: 938476 - DNA, 15 bp, Homo sapiens
gcctctgggatagac

SEQ ID NO: 938477 - DNA, 15 bp, Homo sapiens
cctctgggatagact

SEQ ID NO: 938478 - DNA, 15 bp, Homo sapiens
ctctgggatagactc

SEQ ID NO: 938479 - DNA, 15 bp, Homo sapiens
tctgggatagactct

SEQ ID NO: 938480 - DNA, 15 bp, Homo sapiens
ctgggatagactctg

SEQ ID NO: 938481 - DNA, 15 bp, Homo sapiens
tgggatagactctga

SEQ ID NO: 938482 - DNA, 15 bp, Homo sapiens
gggatagactctgat

SEQ ID NO: 938483 - DNA, 15 bp, Homo sapiens
ggatagactctgata

SEQ ID NO: 938484 - DNA, 15 bp, Homo sapiens
gatagactctgataa

SEQ ID NO: 938485 - DNA, 15 bp, Homo sapiens
atagactctgataat

SEQ ID NO: 938486 - DNA, 15 bp, Homo sapiens
tagactctgataatg

SEQ ID NO: 938487 - DNA, 15 bp, Homo sapiens
agactctgataatgg

SEQ ID NO: 938488 - DNA, 15 bp, Homo sapiens
gactctgataatggc

SEQ ID NO: 938489 - DNA, 15 bp, Homo sapiens
actctgataatggca

SEQ ID NO: 938490 - DNA, 15 bp, Homo sapiens
ctctgataatggcaa

SEQ ID NO: 938491 - DNA, 15 bp, Homo sapiens
tctgataatggcaat

SEQ ID NO: 938492 - DNA, 15 bp, Homo sapiens
ctgataatggcaatg

SEQ ID NO: 938493 - DNA, 15 bp, Homo sapiens
tgataatggcaatgc

SEQ ID NO: 938494 - DNA, 15 bp, Homo sapiens
gataatggcaatgca

SEQ ID NO: 938495 - DNA, 15 bp, Homo sapiens
ataatggcaatgcat

SEQ ID NO: 938496 - DNA, 15 bp, Homo sapiens
taatggcaatgcata

SEQ ID NO: 938497 - DNA, 15 bp, Homo sapiens
aatggcaatgcatat

SEQ ID NO: 938498 - DNA, 15 bp, Homo sapiens
atggcaatgcatatt

SEQ ID NO: 938499 - DNA, 15 bp, Homo sapiens
tggcaatgcatatta

SEQ ID NO: 938500 - DNA, 15 bp, Homo sapiens
ggcaatgcatattaa

SEQ ID NO: 938501 - DNA, 15 bp, Homo sapiens
gcaatgcatattaat

SEQ ID NO: 938502 - DNA, 15 bp, Homo sapiens
caatgcatattaata

SEQ ID NO: 938503 - DNA, 15 bp, Homo sapiens
aatgcatattaatat

SEQ ID NO: 938504 - DNA, 15 bp, Homo sapiens
atgcatattaatatt

SEQ ID NO: 938505 - DNA, 15 bp, Homo sapiens
tgcatattaatattg

SEQ ID NO: 938506 - DNA, 15 bp, Homo sapiens
gcatattaatattgc

SEQ ID NO: 938507 - DNA, 15 bp, Homo sapiens
catattaatattgcc

SEQ ID NO: 938508 - DNA, 15 bp, Homo sapiens
atattaatattgcct

SEQ ID NO: 938509 - DNA, 15 bp, Homo sapiens
tattaatattgcctt

SEQ ID NO: 938510 - DNA, 15 bp, Homo sapiens
attaatattgccttt

SEQ ID NO: 938511 - DNA, 15 bp, Homo sapiens
ttaatattgcctttt

SEQ ID NO: 938512 - DNA, 15 bp, Homo sapiens
taatattgccttttc

SEQ ID NO: 938513 - DNA, 15 bp, Homo sapiens
aatattgccttttca

SEQ ID NO: 938514 - DNA, 15 bp, Homo sapiens
atattgccttttcat

SEQ ID NO: 938515 - DNA, 15 bp, Homo sapiens
tattgccttttcatt

SEQ ID NO: 938516 - DNA, 15 bp, Homo sapiens
attgccttttcattc

SEQ ID NO: 938517 - DNA, 15 bp, Homo sapiens
ttgccttttcattcc

SEQ ID NO: 938518 - DNA, 15 bp, Homo sapiens
tgccttttcattcca

SEQ ID NO: 938519 - DNA, 15 bp, Homo sapiens
gccttttcattccaa

SEQ ID NO: 938520 - DNA, 15 bp, Homo sapiens
ccttttcattccaat

SEQ ID NO: 938521 - DNA, 15 bp, Homo sapiens
cttttcattccaatc

SEQ ID NO: 938522 - DNA, 15 bp, Homo sapiens
ttttcattccaatca

SEQ ID NO: 938523 - DNA, 15 bp, Homo sapiens
tttcattccaatcag

SEQ ID NO: 938524 - DNA, 15 bp, Homo sapiens
ttcattccaatcagt

SEQ ID NO: 938525 - DNA, 15 bp, Homo sapiens
tcattccaatcagtc

SEQ ID NO: 938526 - DNA, 15 bp, Homo sapiens
cattccaatcagtct

SEQ ID NO: 938527 - DNA, 15 bp, Homo sapiens
attccaatcagtctc

SEQ ID NO: 938528 - DNA, 15 bp, Homo sapiens
ttccaatcagtctcc

SEQ ID NO: 938529 - DNA, 15 bp, Homo sapiens
tccaatcagtctcct

SEQ ID NO: 938530 - DNA, 15 bp, Homo sapiens
ccaatcagtctcctt

SEQ ID NO: 938531 - DNA, 15 bp, Homo sapiens
caatcagtctccttc

SEQ ID NO: 938532 - DNA, 15 bp, Homo sapiens
aatcagtctccttcc

SEQ ID NO: 938533 - DNA, 15 bp, Homo sapiens
atcagtctccttcct

SEQ ID NO: 938534 - DNA, 15 bp, Homo sapiens
tcagtctccttcctg

SEQ ID NO: 938535 - DNA, 15 bp, Homo sapiens
cagtctccttcctgt

SEQ ID NO: 938536 - DNA, 15 bp, Homo sapiens
agtctccttcctgtg

SEQ ID NO: 938537 - DNA, 15 bp, Homo sapiens
gtctccttcctgtga

SEQ ID NO: 938538 - DNA, 15 bp, Homo sapiens
tctccttcctgtgat

SEQ ID NO: 938539 - DNA, 15 bp, Homo sapiens
ctccttcctgtgatt

SEQ ID NO: 938540 - DNA, 15 bp, Homo sapiens
tccttcctgtgattt

SEQ ID NO: 938541 - DNA, 15 bp, Homo sapiens
ccttcctgtgatttt

SEQ ID NO: 938542 - DNA, 15 bp, Homo sapiens
cttcctgtgattttt

SEQ ID NO: 938543 - DNA, 15 bp, Homo sapiens
ttcctgtgatttttc

SEQ ID NO: 938544 - DNA, 15 bp, Homo sapiens
tcctgtgatttttcc

SEQ ID NO: 938545 - DNA, 15 bp, Homo sapiens
cctgtgatttttcct

SEQ ID NO: 938546 - DNA, 15 bp, Homo sapiens
ctgtgatttttcctt

SEQ ID NO: 938547 - DNA, 15 bp, Homo sapiens
tgtgatttttcctta

SEQ ID NO: 938548 - DNA, 15 bp, Homo sapiens
gtgatttttccttaa

SEQ ID NO: 938549 - DNA, 15 bp, Homo sapiens
tgatttttccttaaa

SEQ ID NO: 938550 - DNA, 15 bp, Homo sapiens
gatttttccttaaag

SEQ ID NO: 938551 - DNA, 15 bp, Homo sapiens
atttttccttaaaga

SEQ ID NO: 938552 - DNA, 15 bp, Homo sapiens
tttttccttaaagag

SEQ ID NO: 938553 - DNA, 15 bp, Homo sapiens
ttttccttaaagaga

SEQ ID NO: 938554 - DNA, 15 bp, Homo sapiens
tttccttaaagagag

SEQ ID NO: 938555 - DNA, 15 bp, Homo sapiens
ttccttaaagagagt

SEQ ID NO: 938556 - DNA, 15 bp, Homo sapiens
tccttaaagagagtg

SEQ ID NO: 938557 - DNA, 15 bp, Homo sapiens
ccttaaagagagtgg

SEQ ID NO: 938558 - DNA, 15 bp, Homo sapiens
cttaaagagagtggg

SEQ ID NO: 938559 - DNA, 15 bp, Homo sapiens
ttaaagagagtgggc

SEQ ID NO: 938560 - DNA, 15 bp, Homo sapiens
taaagagagtgggca

SEQ ID NO: 938561 - DNA, 15 bp, Homo sapiens
aaagagagtgggcag

SEQ ID NO: 938562 - DNA, 15 bp, Homo sapiens
aagagagtgggcagg

SEQ ID NO: 938563 - DNA, 15 bp, Homo sapiens
agagagtgggcagga

SEQ ID NO: 938564 - DNA, 15 bp, Homo sapiens
gagagtgggcaggaa

SEQ ID NO: 938565 - DNA, 15 bp, Homo sapiens
agagtgggcaggaat

SEQ ID NO: 938566 - DNA, 15 bp, Homo sapiens
gagtgggcaggaatc

SEQ ID NO: 938567 - DNA, 15 bp, Homo sapiens
agtgggcaggaatca

SEQ ID NO: 938568 - DNA, 15 bp, Homo sapiens
gtgggcaggaatcag

SEQ ID NO: 938569 - DNA, 15 bp, Homo sapiens
tgggcaggaatcaga

SEQ ID NO: 938570 - DNA, 15 bp, Homo sapiens
gggcaggaatcagac

SEQ ID NO: 938571 - DNA, 15 bp, Homo sapiens
ggcaggaatcagaca

SEQ ID NO: 938572 - DNA, 15 bp, Homo sapiens
gcaggaatcagacat

SEQ ID NO: 938573 - DNA, 15 bp, Homo sapiens
caggaatcagacata

SEQ ID NO: 938574 - DNA, 15 bp, Homo sapiens
aggaatcagacataa

SEQ ID NO: 938575 - DNA, 15 bp, Homo sapiens
ggaatcagacataat

SEQ ID NO: 938576 - DNA, 15 bp, Homo sapiens
gaatcagacataata

SEQ ID NO: 938577 - DNA, 15 bp, Homo sapiens
aatcagacataataa

SEQ ID NO: 938578 - DNA, 15 bp, Homo sapiens
atcagacataataaa

SEQ ID NO: 938579 - DNA, 15 bp, Homo sapiens
tcagacataataaag

SEQ ID NO: 938580 - DNA, 15 bp, Homo sapiens
cagacataataaaga

SEQ ID NO: 938581 - DNA, 15 bp, Homo sapiens
agacataataaagat

SEQ ID NO: 938582 - DNA, 15 bp, Homo sapiens
gacataataaagatg

SEQ ID NO: 938583 - DNA, 15 bp, Homo sapiens
acataataaagatgg

SEQ ID NO: 938584 - DNA, 15 bp, Homo sapiens
cataataaagatggg

SEQ ID NO: 938585 - DNA, 15 bp, Homo sapiens
ataataaagatgggt

SEQ ID NO: 938586 - DNA, 15 bp, Homo sapiens
taataaagatgggtg

SEQ ID NO: 938587 - DNA, 15 bp, Homo sapiens
aataaagatgggtgg

SEQ ID NO: 938588 - DNA, 15 bp, Homo sapiens
ataaagatgggtggc

SEQ ID NO: 938589 - DNA, 15 bp, Homo sapiens
taaagatgggtggct

SEQ ID NO: 938590 - DNA, 15 bp, Homo sapiens
aaagatgggtggctt

SEQ ID NO: 938591 - DNA, 15 bp, Homo sapiens
aagatgggtggcttc

SEQ ID NO: 938592 - DNA, 15 bp, Homo sapiens
agatgggtggcttca

SEQ ID NO: 938593 - DNA, 15 bp, Homo sapiens
gatgggtggcttcac

SEQ ID NO: 938594 - DNA, 15 bp, Homo sapiens
atgggtggcttcacc

SEQ ID NO: 938595 - DNA, 15 bp, Homo sapiens
tgggtggcttcaccc

SEQ ID NO: 938596 - DNA, 15 bp, Homo sapiens
gggtggcttcaccca

SEQ ID NO: 938597 - DNA, 15 bp, Homo sapiens
ggtggcttcacccag

SEQ ID NO: 938598 - DNA, 15 bp, Homo sapiens
gtggcttcacccaga

SEQ ID NO: 938599 - DNA, 15 bp, Homo sapiens
tggcttcacccagac

SEQ ID NO: 938600 - DNA, 15 bp, Homo sapiens
ggcttcacccagaca

SEQ ID NO: 938601 - DNA, 15 bp, Homo sapiens
gcttcacccagacat

SEQ ID NO: 938602 - DNA, 15 bp, Homo sapiens
cttcacccagacatg

SEQ ID NO: 938603 - DNA, 15 bp, Homo sapiens
ttcacccagacatgg

SEQ ID NO: 938604 - DNA, 15 bp, Homo sapiens
tcacccagacatgga

SEQ ID NO: 938605 - DNA, 15 bp, Homo sapiens
cacccagacatggac

SEQ ID NO: 938606 - DNA, 15 bp, Homo sapiens
acccagacatggacc

SEQ ID NO: 938607 - DNA, 15 bp, Homo sapiens
cccagacatggaccc

SEQ ID NO: 938608 - DNA, 15 bp, Homo sapiens
ccagacatggaccct

SEQ ID NO: 938609 - DNA, 15 bp, Homo sapiens
cagacatggacccta

SEQ ID NO: 938610 - DNA, 15 bp, Homo sapiens
agacatggaccctaa

SEQ ID NO: 938611 - DNA, 15 bp, Homo sapiens
gacatggaccctaac

SEQ ID NO: 938612 - DNA, 15 bp, Homo sapiens
acatggaccctaaca

SEQ ID NO: 938613 - DNA, 15 bp, Homo sapiens
catggaccctaacag

SEQ ID NO: 938614 - DNA, 15 bp, Homo sapiens
atggaccctaacagt

SEQ ID NO: 938615 - DNA, 15 bp, Homo sapiens
tggaccctaacagta

SEQ ID NO: 938616 - DNA, 15 bp, Homo sapiens
ggaccctaacagtat

SEQ ID NO: 938617 - DNA, 15 bp, Homo sapiens
gaccctaacagtatt

SEQ ID NO: 938618 - DNA, 15 bp, Homo sapiens
accctaacagtattc

SEQ ID NO: 938619 - DNA, 15 bp, Homo sapiens
ccctaacagtattca

SEQ ID NO: 938620 - DNA, 15 bp, Homo sapiens
cctaacagtattcac

SEQ ID NO: 938621 - DNA, 15 bp, Homo sapiens
ctaacagtattcaca

SEQ ID NO: 938622 - DNA, 15 bp, Homo sapiens
taacagtattcacat

SEQ ID NO: 938623 - DNA, 15 bp, Homo sapiens
aacagtattcacatc

SEQ ID NO: 938624 - DNA, 15 bp, Homo sapiens
acagtattcacatct

SEQ ID NO: 938625 - DNA, 15 bp, Homo sapiens
cagtattcacatctt

SEQ ID NO: 938626 - DNA, 15 bp, Homo sapiens
agtattcacatcttt

SEQ ID NO: 938627 - DNA, 15 bp, Homo sapiens
gtattcacatcttta

SEQ ID NO: 938628 - DNA, 15 bp, Homo sapiens
tattcacatctttag

SEQ ID NO: 938629 - DNA, 15 bp, Homo sapiens
attcacatctttaga

SEQ ID NO: 938630 - DNA, 15 bp, Homo sapiens
ttcacatctttagat

SEQ ID NO: 938631 - DNA, 15 bp, Homo sapiens
tcacatctttagatc

SEQ ID NO: 938632 - DNA, 15 bp, Homo sapiens
cacatctttagatct

SEQ ID NO: 938633 - DNA, 15 bp, Homo sapiens
acatctttagatcta

SEQ ID NO: 938634 - DNA, 15 bp, Homo sapiens
catctttagatctag

SEQ ID NO: 938635 - DNA, 15 bp, Homo sapiens
atctttagatctagc

SEQ ID NO: 938636 - DNA, 15 bp, Homo sapiens
tctttagatctagca

SEQ ID NO: 938637 - DNA, 15 bp, Homo sapiens
ctttagatctagcag

SEQ ID NO: 938638 - DNA, 15 bp, Homo sapiens
tttagatctagcagt

SEQ ID NO: 938639 - DNA, 15 bp, Homo sapiens
ttagatctagcagtc

SEQ ID NO: 938640 - DNA, 15 bp, Homo sapiens
tagatctagcagtca

SEQ ID NO: 938641 - DNA, 15 bp, Homo sapiens
agatctagcagtcag

SEQ ID NO: 938642 - DNA, 15 bp, Homo sapiens
gatctagcagtcaga

SEQ ID NO: 938643 - DNA, 15 bp, Homo sapiens
atctagcagtcagag

SEQ ID NO: 938644 - DNA, 15 bp, Homo sapiens
tctagcagtcagaga

SEQ ID NO: 938645 - DNA, 15 bp, Homo sapiens
ctagcagtcagagaa

SEQ ID NO: 938646 - DNA, 15 bp, Homo sapiens
tagcagtcagagaac

SEQ ID NO: 938647 - DNA, 15 bp, Homo sapiens
agcagtcagagaaca

SEQ ID NO: 938648 - DNA, 15 bp, Homo sapiens
gcagtcagagaacat

SEQ ID NO: 938649 - DNA, 15 bp, Homo sapiens
cagtcagagaacatt

SEQ ID NO: 938650 - DNA, 15 bp, Homo sapiens
agtcagagaacatta

SEQ ID NO: 938651 - DNA, 15 bp, Homo sapiens
gtcagagaacattaa

SEQ ID NO: 938652 - DNA, 15 bp, Homo sapiens
tcagagaacattaaa

SEQ ID NO: 938653 - DNA, 15 bp, Homo sapiens
cagagaacattaaag

SEQ ID NO: 938654 - DNA, 15 bp, Homo sapiens
agagaacattaaaga

SEQ ID NO: 938655 - DNA, 15 bp, Homo sapiens
gagaacattaaagac

SEQ ID NO: 938656 - DNA, 15 bp, Homo sapiens
agaacattaaagaca

SEQ ID NO: 938657 - DNA, 15 bp, Homo sapiens
gaacattaaagacac

SEQ ID NO: 938658 - DNA, 15 bp, Homo sapiens
aacattaaagacaca

SEQ ID NO: 938659 - DNA, 15 bp, Homo sapiens
acattaaagacacat

SEQ ID NO: 938660 - DNA, 15 bp, Homo sapiens
cattaaagacacatt

SEQ ID NO: 938661 - DNA, 15 bp, Homo sapiens
attaaagacacattt

SEQ ID NO: 938662 - DNA, 15 bp, Homo sapiens
ttaaagacacatttg

SEQ ID NO: 938663 - DNA, 15 bp, Homo sapiens
taaagacacatttgt

SEQ ID NO: 938664 - DNA, 15 bp, Homo sapiens
aaagacacatttgta

SEQ ID NO: 938665 - DNA, 15 bp, Homo sapiens
aagacacatttgtat

SEQ ID NO: 938666 - DNA, 15 bp, Homo sapiens
agacacatttgtatc

SEQ ID NO: 938667 - DNA, 15 bp, Homo sapiens
gacacatttgtatca

SEQ ID NO: 938668 - DNA, 15 bp, Homo sapiens
acacatttgtatcaa

SEQ ID NO: 938669 - DNA, 15 bp, Homo sapiens
cacatttgtatcaac

SEQ ID NO: 938670 - DNA, 15 bp, Homo sapiens
acatttgtatcaaca

SEQ ID NO: 938671 - DNA, 15 bp, Homo sapiens
catttgtatcaacaa

SEQ ID NO: 938672 - DNA, 15 bp, Homo sapiens
atttgtatcaacaaa

SEQ ID NO: 938673 - DNA, 15 bp, Homo sapiens
tttgtatcaacaaaa

SEQ ID NO: 938674 - DNA, 15 bp, Homo sapiens
ttgtatcaacaaaat

SEQ ID NO: 938675 - DNA, 15 bp, Homo sapiens
tgtatcaacaaaatc

SEQ ID NO: 938676 - DNA, 15 bp, Homo sapiens
gtatcaacaaaatct

SEQ ID NO: 938677 - DNA, 15 bp, Homo sapiens
tatcaacaaaatctt

SEQ ID NO: 938678 - DNA, 15 bp, Homo sapiens
atcaacaaaatcttt

SEQ ID NO: 938679 - DNA, 15 bp, Homo sapiens
tcaacaaaatctttc

SEQ ID NO: 938680 - DNA, 15 bp, Homo sapiens
caacaaaatctttcc

SEQ ID NO: 938681 - DNA, 15 bp, Homo sapiens
aacaaaatctttcca

SEQ ID NO: 938682 - DNA, 15 bp, Homo sapiens
acaaaatctttccag

SEQ ID NO: 938683 - DNA, 15 bp, Homo sapiens
caaaatctttccagt

SEQ ID NO: 938684 - DNA, 15 bp, Homo sapiens
aaaatctttccagtg

SEQ ID NO: 938685 - DNA, 15 bp, Homo sapiens
aaatctttccagtga

SEQ ID NO: 938686 - DNA, 15 bp, Homo sapiens
aatctttccagtgaa

SEQ ID NO: 938687 - DNA, 15 bp, Homo sapiens
atctttccagtgaat

SEQ ID NO: 938688 - DNA, 15 bp, Homo sapiens
tctttccagtgaatt

SEQ ID NO: 938689 - DNA, 15 bp, Homo sapiens
ctttccagtgaatta

SEQ ID NO: 938690 - DNA, 15 bp, Homo sapiens
tttccagtgaattag

SEQ ID NO: 938691 - DNA, 15 bp, Homo sapiens
ttccagtgaattagt

SEQ ID NO: 938692 - DNA, 15 bp, Homo sapiens
tccagtgaattagtg

SEQ ID NO: 938693 - DNA, 15 bp, Homo sapiens
ccagtgaattagtga

SEQ ID NO: 938694 - DNA, 15 bp, Homo sapiens
cagtgaattagtgag

SEQ ID NO: 938695 - DNA, 15 bp, Homo sapiens
agtgaattagtgagg

SEQ ID NO: 938696 - DNA, 15 bp, Homo sapiens
gtgaattagtgaggt

SEQ ID NO: 938697 - DNA, 15 bp, Homo sapiens
tgaattagtgaggtt

SEQ ID NO: 938698 - DNA, 15 bp, Homo sapiens
gaattagtgaggtta

SEQ ID NO: 938699 - DNA, 15 bp, Homo sapiens
aattagtgaggttat

SEQ ID NO: 938700 - DNA, 15 bp, Homo sapiens
attagtgaggttatt

SEQ ID NO: 938701 - DNA, 15 bp, Homo sapiens
ttagtgaggttattt

SEQ ID NO: 938702 - DNA, 15 bp, Homo sapiens
tagtgaggttatttt

SEQ ID NO: 938703 - DNA, 15 bp, Homo sapiens
agtgaggttattttg

SEQ ID NO: 938704 - DNA, 15 bp, Homo sapiens
gtgaggttattttgg

SEQ ID NO: 938705 - DNA, 15 bp, Homo sapiens
tgaggttattttggg

SEQ ID NO: 938706 - DNA, 15 bp, Homo sapiens
gaggttattttggga

SEQ ID NO: 938707 - DNA, 15 bp, Homo sapiens
aggttattttgggaa

SEQ ID NO: 938708 - DNA, 15 bp, Homo sapiens
ggttattttgggaaa

SEQ ID NO: 938709 - DNA, 15 bp, Homo sapiens
gttattttgggaaac

SEQ ID NO: 938710 - DNA, 15 bp, Homo sapiens
ttattttgggaaaca

SEQ ID NO: 938711 - DNA, 15 bp, Homo sapiens
tattttgggaaacat

SEQ ID NO: 938712 - DNA, 15 bp, Homo sapiens
attttgggaaacatg

SEQ ID NO: 938713 - DNA, 15 bp, Homo sapiens
ttttgggaaacatga

SEQ ID NO: 938714 - DNA, 15 bp, Homo sapiens
tttgggaaacatgat

SEQ ID NO: 938715 - DNA, 15 bp, Homo sapiens
ttgggaaacatgatg

SEQ ID NO: 938716 - DNA, 15 bp, Homo sapiens
tgggaaacatgatgg

SEQ ID NO: 938717 - DNA, 15 bp, Homo sapiens
gggaaacatgatggg

SEQ ID NO: 938718 - DNA, 15 bp, Homo sapiens
ggaaacatgatgggc

SEQ ID NO: 938719 - DNA, 15 bp, Homo sapiens
gaaacatgatgggcc

SEQ ID NO: 938720 - DNA, 15 bp, Homo sapiens
aaacatgatgggcca

SEQ ID NO: 938721 - DNA, 15 bp, Homo sapiens
aacatgatgggccaa

SEQ ID NO: 938722 - DNA, 15 bp, Homo sapiens
acatgatgggccaaa

SEQ ID NO: 938723 - DNA, 15 bp, Homo sapiens
catgatgggccaaaa

SEQ ID NO: 938724 - DNA, 15 bp, Homo sapiens
atgatgggccaaaat

SEQ ID NO: 938725 - DNA, 15 bp, Homo sapiens
tgatgggccaaaatg

SEQ ID NO: 938726 - DNA, 15 bp, Homo sapiens
gatgggccaaaatgg

SEQ ID NO: 938727 - DNA, 15 bp, Homo sapiens
atgggccaaaatggg

SEQ ID NO: 938728 - DNA, 15 bp, Homo sapiens
tgggccaaaatgggg

SEQ ID NO: 938729 - DNA, 15 bp, Homo sapiens
gggccaaaatggggg

SEQ ID NO: 938730 - DNA, 15 bp, Homo sapiens
ggccaaaatggggga

SEQ ID NO: 938731 - DNA, 15 bp, Homo sapiens
gccaaaatgggggag

SEQ ID NO: 938732 - DNA, 15 bp, Homo sapiens
ccaaaatgggggaga

SEQ ID NO: 938733 - DNA, 15 bp, Homo sapiens
caaaatgggggagaa

SEQ ID NO: 938734 - DNA, 15 bp, Homo sapiens
aaaatgggggagaaa

SEQ ID NO: 938735 - DNA, 15 bp, Homo sapiens
aaatgggggagaaac

SEQ ID NO: 938736 - DNA, 15 bp, Homo sapiens
aatgggggagaaact

SEQ ID NO: 938737 - DNA, 15 bp, Homo sapiens
atgggggagaaactg

SEQ ID NO: 938738 - DNA, 15 bp, Homo sapiens
tgggggagaaactgc

SEQ ID NO: 938739 - DNA, 15 bp, Homo sapiens
gggggagaaactgca

SEQ ID NO: 938740 - DNA, 15 bp, Homo sapiens
ggggagaaactgcag

SEQ ID NO: 938741 - DNA, 15 bp, Homo sapiens
gggagaaactgcaga

SEQ ID NO: 938742 - DNA, 15 bp, Homo sapiens
ggagaaactgcagaa

SEQ ID NO: 938743 - DNA, 15 bp, Homo sapiens
gagaaactgcagaaa

SEQ ID NO: 938744 - DNA, 15 bp, Homo sapiens
agaaactgcagaaag

SEQ ID NO: 938745 - DNA, 15 bp, Homo sapiens
gaaactgcagaaagg

SEQ ID NO: 938746 - DNA, 15 bp, Homo sapiens
aaactgcagaaagga

SEQ ID NO: 938747 - DNA, 15 bp, Homo sapiens
aactgcagaaaggaa

SEQ ID NO: 938748 - DNA, 15 bp, Homo sapiens
actgcagaaaggaaa

SEQ ID NO: 938749 - DNA, 15 bp, Homo sapiens
ctgcagaaaggaaat

SEQ ID NO: 938750 - DNA, 15 bp, Homo sapiens
tgcagaaaggaaatg

SEQ ID NO: 938751 - DNA, 15 bp, Homo sapiens
gcagaaaggaaatgc

SEQ ID NO: 938752 - DNA, 15 bp, Homo sapiens
cagaaaggaaatgca

SEQ ID NO: 938753 - DNA, 15 bp, Homo sapiens
agaaaggaaatgcag

SEQ ID NO: 938754 - DNA, 15 bp, Homo sapiens
gaaaggaaatgcagt

SEQ ID NO: 938755 - DNA, 15 bp, Homo sapiens
aaaggaaatgcagtt

SEQ ID NO: 938756 - DNA, 15 bp, Homo sapiens
aaggaaatgcagttt

SEQ ID NO: 938757 - DNA, 15 bp, Homo sapiens
aggaaatgcagtttc

SEQ ID NO: 938758 - DNA, 15 bp, Homo sapiens
ggaaatgcagtttct

SEQ ID NO: 938759 - DNA, 15 bp, Homo sapiens
gaaatgcagtttctt

SEQ ID NO: 938760 - DNA, 15 bp, Homo sapiens
aaatgcagtttctta

SEQ ID NO: 938761 - DNA, 15 bp, Homo sapiens
aatgcagtttcttat

SEQ ID NO: 938762 - DNA, 15 bp, Homo sapiens
atgcagtttcttatt

SEQ ID NO: 938763 - DNA, 15 bp, Homo sapiens
tgcagtttcttattt

SEQ ID NO: 938764 - DNA, 15 bp, Homo sapiens
gcagtttcttatttt

SEQ ID NO: 938765 - DNA, 15 bp, Homo sapiens
cagtttcttattttt

SEQ ID NO: 938766 - DNA, 15 bp, Homo sapiens
agtttcttatttttc

SEQ ID NO: 938767 - DNA, 15 bp, Homo sapiens
gtttcttatttttca

SEQ ID NO: 938768 - DNA, 15 bp, Homo sapiens
tttcttatttttcat

SEQ ID NO: 938769 - DNA, 15 bp, Homo sapiens
ttcttatttttcata

SEQ ID NO: 938770 - DNA, 15 bp, Homo sapiens
tcttatttttcatat

SEQ ID NO: 938771 - DNA, 15 bp, Homo sapiens
cttatttttcatata

SEQ ID NO: 938772 - DNA, 15 bp, Homo sapiens
ttatttttcatataa

SEQ ID NO: 938773 - DNA, 15 bp, Homo sapiens
tatttttcatataaa

SEQ ID NO: 938774 - DNA, 15 bp, Homo sapiens
atttttcatataaaa

SEQ ID NO: 938775 - DNA, 15 bp, Homo sapiens
tttttcatataaaaa

SEQ ID NO: 938776 - DNA, 15 bp, Homo sapiens
ttttcatataaaaag

SEQ ID NO: 938777 - DNA, 15 bp, Homo sapiens
tttcatataaaaagt

SEQ ID NO: 938778 - DNA, 15 bp, Homo sapiens
ttcatataaaaagtg

SEQ ID NO: 938779 - DNA, 15 bp, Homo sapiens
tcatataaaaagtgt

SEQ ID NO: 938780 - DNA, 15 bp, Homo sapiens
catataaaaagtgtt

SEQ ID NO: 938781 - DNA, 15 bp, Homo sapiens
atataaaaagtgttg

SEQ ID NO: 938782 - DNA, 15 bp, Homo sapiens
tataaaaagtgttgg

SEQ ID NO: 938783 - DNA, 15 bp, Homo sapiens
ataaaaagtgttggg

SEQ ID NO: 938784 - DNA, 15 bp, Homo sapiens
taaaaagtgttgggc

SEQ ID NO: 938785 - DNA, 15 bp, Homo sapiens
aaaaagtgttgggca

SEQ ID NO: 938786 - DNA, 15 bp, Homo sapiens
aaaagtgttgggcag

SEQ ID NO: 938787 - DNA, 15 bp, Homo sapiens
aaagtgttgggcagg

SEQ ID NO: 938788 - DNA, 15 bp, Homo sapiens
aagtgttgggcagga

SEQ ID NO: 938789 - DNA, 15 bp, Homo sapiens
agtgttgggcaggag

SEQ ID NO: 938790 - DNA, 15 bp, Homo sapiens
gtgttgggcaggagg

SEQ ID NO: 938791 - DNA, 15 bp, Homo sapiens
tgttgggcaggaggc

SEQ ID NO: 938792 - DNA, 15 bp, Homo sapiens
gttgggcaggaggca

SEQ ID NO: 938793 - DNA, 15 bp, Homo sapiens
ttgggcaggaggcat

SEQ ID NO: 938794 - DNA, 15 bp, Homo sapiens
tgggcaggaggcatc

SEQ ID NO: 938795 - DNA, 15 bp, Homo sapiens
gggcaggaggcatca

SEQ ID NO: 938796 - DNA, 15 bp, Homo sapiens
ggcaggaggcatcaa

SEQ ID NO: 938797 - DNA, 15 bp, Homo sapiens
gcaggaggcatcaag

SEQ ID NO: 938798 - DNA, 15 bp, Homo sapiens
caggaggcatcaagc

SEQ ID NO: 938799 - DNA, 15 bp, Homo sapiens
aggaggcatcaagca

SEQ ID NO: 938800 - DNA, 15 bp, Homo sapiens
ggaggcatcaagcaa

SEQ ID NO: 938801 - DNA, 15 bp, Homo sapiens
gaggcatcaagcaat

SEQ ID NO: 938802 - DNA, 15 bp, Homo sapiens
aggcatcaagcaatg

SEQ ID NO: 938803 - DNA, 15 bp, Homo sapiens
ggcatcaagcaatgc

SEQ ID NO: 938804 - DNA, 15 bp, Homo sapiens
gcatcaagcaatgct

SEQ ID NO: 938805 - DNA, 15 bp, Homo sapiens
catcaagcaatgctg

SEQ ID NO: 938806 - DNA, 15 bp, Homo sapiens
atcaagcaatgctgc

SEQ ID NO: 938807 - DNA, 15 bp, Homo sapiens
tcaagcaatgctgcc

SEQ ID NO: 938808 - DNA, 15 bp, Homo sapiens
caagcaatgctgccc

SEQ ID NO: 938809 - DNA, 15 bp, Homo sapiens
aagcaatgctgcccg

SEQ ID NO: 938810 - DNA, 15 bp, Homo sapiens
agcaatgctgcccgt

SEQ ID NO: 938811 - DNA, 15 bp, Homo sapiens
gcaatgctgcccgtg

SEQ ID NO: 938812 - DNA, 15 bp, Homo sapiens
caatgctgcccgtga

SEQ ID NO: 938813 - DNA, 15 bp, Homo sapiens
aatgctgcccgtgac

SEQ ID NO: 938814 - DNA, 15 bp, Homo sapiens
atgctgcccgtgaca

SEQ ID NO: 938815 - DNA, 15 bp, Homo sapiens
tgctgcccgtgacac

SEQ ID NO: 938816 - DNA, 15 bp, Homo sapiens
gctgcccgtgacaca

SEQ ID NO: 938817 - DNA, 15 bp, Homo sapiens
ctgcccgtgacacaa

SEQ ID NO: 938818 - DNA, 15 bp, Homo sapiens
tgcccgtgacacaaa

SEQ ID NO: 938819 - DNA, 15 bp, Homo sapiens
gcccgtgacacaaac

SEQ ID NO: 938820 - DNA, 15 bp, Homo sapiens
cccgtgacacaaaca

SEQ ID NO: 938821 - DNA, 15 bp, Homo sapiens
ccgtgacacaaacag

SEQ ID NO: 938822 - DNA, 15 bp, Homo sapiens
cgtgacacaaacaga

SEQ ID NO: 938823 - DNA, 15 bp, Homo sapiens
gtgacacaaacagac

SEQ ID NO: 938824 - DNA, 15 bp, Homo sapiens
tgacacaaacagaca

SEQ ID NO: 938825 - DNA, 15 bp, Homo sapiens
gacacaaacagacag

SEQ ID NO: 938826 - DNA, 15 bp, Homo sapiens
acacaaacagacaga

SEQ ID NO: 938827 - DNA, 15 bp, Homo sapiens
cacaaacagacagat

SEQ ID NO: 938828 - DNA, 15 bp, Homo sapiens
acaaacagacagatt

SEQ ID NO: 938829 - DNA, 15 bp, Homo sapiens
caaacagacagatta

SEQ ID NO: 938830 - DNA, 15 bp, Homo sapiens
aaacagacagattac

SEQ ID NO: 938831 - DNA, 15 bp, Homo sapiens
aacagacagattact

SEQ ID NO: 938832 - DNA, 15 bp, Homo sapiens
acagacagattacta

SEQ ID NO: 938833 - DNA, 15 bp, Homo sapiens
cagacagattactat

SEQ ID NO: 938834 - DNA, 15 bp, Homo sapiens
agacagattactatt

SEQ ID NO: 938835 - DNA, 15 bp, Homo sapiens
gacagattactattt

SEQ ID NO: 938836 - DNA, 15 bp, Homo sapiens
acagattactatttc

SEQ ID NO: 938837 - DNA, 15 bp, Homo sapiens
cagattactatttct

SEQ ID NO: 938838 - DNA, 15 bp, Homo sapiens
agattactatttcta

SEQ ID NO: 938839 - DNA, 15 bp, Homo sapiens
gattactatttctaa

SEQ ID NO: 938840 - DNA, 15 bp, Homo sapiens
attactatttctaag

SEQ ID NO: 938841 - DNA, 15 bp, Homo sapiens
ttactatttctaaga

SEQ ID NO: 938842 - DNA, 15 bp, Homo sapiens
tactatttctaagag

SEQ ID NO: 938843 - DNA, 15 bp, Homo sapiens
actatttctaagaga

SEQ ID NO: 938844 - DNA, 15 bp, Homo sapiens
ctatttctaagagaa

SEQ ID NO: 938845 - DNA, 15 bp, Homo sapiens
tatttctaagagaag

SEQ ID NO: 938846 - DNA, 15 bp, Homo sapiens
atttctaagagaagt

SEQ ID NO: 938847 - DNA, 15 bp, Homo sapiens
tttctaagagaagtt

SEQ ID NO: 938848 - DNA, 15 bp, Homo sapiens
ttctaagagaagtta

SEQ ID NO: 938849 - DNA, 15 bp, Homo sapiens
tctaagagaagttat

SEQ ID NO: 938850 - DNA, 15 bp, Homo sapiens
ctaagagaagttatg

SEQ ID NO: 938851 - DNA, 15 bp, Homo sapiens
taagagaagttatga

SEQ ID NO: 938852 - DNA, 15 bp, Homo sapiens
aagagaagttatgaa

SEQ ID NO: 938853 - DNA, 15 bp, Homo sapiens
agagaagttatgaat

SEQ ID NO: 938854 - DNA, 15 bp, Homo sapiens
gagaagttatgaatc

SEQ ID NO: 938855 - DNA, 15 bp, Homo sapiens
agaagttatgaatca

SEQ ID NO: 938856 - DNA, 15 bp, Homo sapiens
gaagttatgaatcac

SEQ ID NO: 938857 - DNA, 15 bp, Homo sapiens
aagttatgaatcacg

SEQ ID NO: 938858 - DNA, 15 bp, Homo sapiens
agttatgaatcacgt

SEQ ID NO: 938859 - DNA, 15 bp, Homo sapiens
gttatgaatcacgtg

SEQ ID NO: 938860 - DNA, 15 bp, Homo sapiens
ttatgaatcacgtga

SEQ ID NO: 938861 - DNA, 15 bp, Homo sapiens
tatgaatcacgtgag

SEQ ID NO: 938862 - DNA, 15 bp, Homo sapiens
atgaatcacgtgagc

SEQ ID NO: 938863 - DNA, 15 bp, Homo sapiens
tgaatcacgtgagcg

SEQ ID NO: 938864 - DNA, 15 bp, Homo sapiens
gaatcacgtgagcgc

SEQ ID NO: 938865 - DNA, 15 bp, Homo sapiens
aatcacgtgagcgct

SEQ ID NO: 938866 - DNA, 15 bp, Homo sapiens
atcacgtgagcgctg

SEQ ID NO: 938867 - DNA, 15 bp, Homo sapiens
tcacgtgagcgctgt

SEQ ID NO: 938868 - DNA, 15 bp, Homo sapiens
cacgtgagcgctgtc

SEQ ID NO: 938869 - DNA, 15 bp, Homo sapiens
acgtgagcgctgtct

SEQ ID NO: 938870 - DNA, 15 bp, Homo sapiens
cgtgagcgctgtctg

SEQ ID NO: 938871 - DNA, 15 bp, Homo sapiens
gtgagcgctgtctgt

SEQ ID NO: 938872 - DNA, 15 bp, Homo sapiens
tgagcgctgtctgtc

SEQ ID NO: 938873 - DNA, 15 bp, Homo sapiens
gagcgctgtctgtcc

SEQ ID NO: 938874 - DNA, 15 bp, Homo sapiens
agcgctgtctgtcca

SEQ ID NO: 938875 - DNA, 15 bp, Homo sapiens
gcgctgtctgtccaa

SEQ ID NO: 938876 - DNA, 15 bp, Homo sapiens
cgctgtctgtccaag

SEQ ID NO: 938877 - DNA, 15 bp, Homo sapiens
gctgtctgtccaaga

SEQ ID NO: 938878 - DNA, 15 bp, Homo sapiens
ctgtctgtccaagaa

SEQ ID NO: 938879 - DNA, 15 bp, Homo sapiens
tgtctgtccaagaag

SEQ ID NO: 938880 - DNA, 15 bp, Homo sapiens
gtctgtccaagaagc

SEQ ID NO: 938881 - DNA, 15 bp, Homo sapiens
tctgtccaagaagca

SEQ ID NO: 938882 - DNA, 15 bp, Homo sapiens
ctgtccaagaagcaa

SEQ ID NO: 938883 - DNA, 15 bp, Homo sapiens
tgtccaagaagcaaa

SEQ ID NO: 938884 - DNA, 15 bp, Homo sapiens
gtccaagaagcaaaa

SEQ ID NO: 938885 - DNA, 15 bp, Homo sapiens
tccaagaagcaaaag

SEQ ID NO: 938886 - DNA, 15 bp, Homo sapiens
ccaagaagcaaaaga

SEQ ID NO: 938887 - DNA, 15 bp, Homo sapiens
caagaagcaaaagag

SEQ ID NO: 938888 - DNA, 15 bp, Homo sapiens
aagaagcaaaagaga

SEQ ID NO: 938889 - DNA, 15 bp, Homo sapiens
agaagcaaaagagat

SEQ ID NO: 938890 - DNA, 15 bp, Homo sapiens
gaagcaaaagagatg

SEQ ID NO: 938891 - DNA, 15 bp, Homo sapiens
aagcaaaagagatga

SEQ ID NO: 938892 - DNA, 15 bp, Homo sapiens
agcaaaagagatgag

SEQ ID NO: 938893 - DNA, 15 bp, Homo sapiens
gcaaaagagatgaga

SEQ ID NO: 938894 - DNA, 15 bp, Homo sapiens
caaaagagatgagat

SEQ ID NO: 938895 - DNA, 15 bp, Homo sapiens
aaaagagatgagatc

SEQ ID NO: 938896 - DNA, 15 bp, Homo sapiens
aaagagatgagatca

SEQ ID NO: 938897 - DNA, 15 bp, Homo sapiens
aagagatgagatcag

SEQ ID NO: 938898 - DNA, 15 bp, Homo sapiens
agagatgagatcagc

SEQ ID NO: 938899 - DNA, 15 bp, Homo sapiens
gagatgagatcagct

SEQ ID NO: 938900 - DNA, 15 bp, Homo sapiens
agatgagatcagctt

SEQ ID NO: 938901 - DNA, 15 bp, Homo sapiens
gatgagatcagcttt

SEQ ID NO: 938902 - DNA, 15 bp, Homo sapiens
atgagatcagctttg

SEQ ID NO: 938903 - DNA, 15 bp, Homo sapiens
tgagatcagctttgg

SEQ ID NO: 938904 - DNA, 15 bp, Homo sapiens
gagatcagctttggg

SEQ ID NO: 938905 - DNA, 15 bp, Homo sapiens
agatcagctttggga

SEQ ID NO: 938906 - DNA, 15 bp, Homo sapiens
gatcagctttgggat

SEQ ID NO: 938907 - DNA, 15 bp, Homo sapiens
atcagctttgggatg

SEQ ID NO: 938908 - DNA, 15 bp, Homo sapiens
tcagctttgggatga

SEQ ID NO: 938909 - DNA, 15 bp, Homo sapiens
cagctttgggatgaa

SEQ ID NO: 938910 - DNA, 15 bp, Homo sapiens
agctttgggatgaat

SEQ ID NO: 938911 - DNA, 15 bp, Homo sapiens
gctttgggatgaatc

SEQ ID NO: 938912 - DNA, 15 bp, Homo sapiens
ctttgggatgaatct

SEQ ID NO: 938913 - DNA, 15 bp, Homo sapiens
tttgggatgaatctg

SEQ ID NO: 938914 - DNA, 15 bp, Homo sapiens
ttgggatgaatctgt

SEQ ID NO: 938915 - DNA, 15 bp, Homo sapiens
tgggatgaatctgtg

SEQ ID NO: 938916 - DNA, 15 bp, Homo sapiens
gggatgaatctgtgt

SEQ ID NO: 938917 - DNA, 15 bp, Homo sapiens
ggatgaatctgtgtt

SEQ ID NO: 938918 - DNA, 15 bp, Homo sapiens
gatgaatctgtgttc

SEQ ID NO: 938919 - DNA, 15 bp, Homo sapiens
atgaatctgtgttct

SEQ ID NO: 938920 - DNA, 15 bp, Homo sapiens
tgaatctgtgttctt

SEQ ID NO: 938921 - DNA, 15 bp, Homo sapiens
gaatctgtgttcttg

SEQ ID NO: 938922 - DNA, 15 bp, Homo sapiens
aatctgtgttcttga

SEQ ID NO: 938923 - DNA, 15 bp, Homo sapiens
atctgtgttcttgac

SEQ ID NO: 938924 - DNA, 15 bp, Homo sapiens
tctgtgttcttgaca

SEQ ID NO: 938925 - DNA, 15 bp, Homo sapiens
ctgtgttcttgacaa

SEQ ID NO: 938926 - DNA, 15 bp, Homo sapiens
tgtgttcttgacaac

SEQ ID NO: 938927 - DNA, 15 bp, Homo sapiens
gtgttcttgacaact

SEQ ID NO: 938928 - DNA, 15 bp, Homo sapiens
tgttcttgacaactc

SEQ ID NO: 938929 - DNA, 15 bp, Homo sapiens
gttcttgacaactct

SEQ ID NO: 938930 - DNA, 15 bp, Homo sapiens
ttcttgacaactctt

SEQ ID NO: 938931 - DNA, 15 bp, Homo sapiens
tcttgacaactcttt

SEQ ID NO: 938932 - DNA, 15 bp, Homo sapiens
cttgacaactctttg

SEQ ID NO: 938933 - DNA, 15 bp, Homo sapiens
ttgacaactctttgc

SEQ ID NO: 938934 - DNA, 15 bp, Homo sapiens
tgacaactctttgca

SEQ ID NO: 938935 - DNA, 15 bp, Homo sapiens
gacaactctttgcaa

SEQ ID NO: 938936 - DNA, 15 bp, Homo sapiens
acaactctttgcaag

SEQ ID NO: 938937 - DNA, 15 bp, Homo sapiens
caactctttgcaaga

SEQ ID NO: 938938 - DNA, 15 bp, Homo sapiens
aactctttgcaagag

SEQ ID NO: 938939 - DNA, 15 bp, Homo sapiens
actctttgcaagagg

SEQ ID NO: 938940 - DNA, 15 bp, Homo sapiens
ctctttgcaagaggc

SEQ ID NO: 938941 - DNA, 15 bp, Homo sapiens
tctttgcaagaggca

SEQ ID NO: 938942 - DNA, 15 bp, Homo sapiens
ctttgcaagaggcac

SEQ ID NO: 938943 - DNA, 15 bp, Homo sapiens
tttgcaagaggcacc

SEQ ID NO: 938944 - DNA, 15 bp, Homo sapiens
ttgcaagaggcacct

SEQ ID NO: 938945 - DNA, 15 bp, Homo sapiens
tgcaagaggcaccta

SEQ ID NO: 938946 - DNA, 15 bp, Homo sapiens
gcaagaggcacctac

SEQ ID NO: 938947 - DNA, 15 bp, Homo sapiens
caagaggcacctacc

SEQ ID NO: 938948 - DNA, 15 bp, Homo sapiens
aagaggcacctacca

SEQ ID NO: 938949 - DNA, 15 bp, Homo sapiens
agaggcacctaccag

SEQ ID NO: 938950 - DNA, 15 bp, Homo sapiens
gaggcacctaccagt

SEQ ID NO: 938951 - DNA, 15 bp, Homo sapiens
aggcacctaccagtc

SEQ ID NO: 938952 - DNA, 15 bp, Homo sapiens
ggcacctaccagtca

SEQ ID NO: 938953 - DNA, 15 bp, Homo sapiens
gcacctaccagtcac

SEQ ID NO: 938954 - DNA, 15 bp, Homo sapiens
cacctaccagtcacc

SEQ ID NO: 938955 - DNA, 15 bp, Homo sapiens
acctaccagtcacct

SEQ ID NO: 938956 - DNA, 15 bp, Homo sapiens
cctaccagtcacctc

SEQ ID NO: 938957 - DNA, 15 bp, Homo sapiens
ctaccagtcacctcc

SEQ ID NO: 938958 - DNA, 15 bp, Homo sapiens
taccagtcacctcca

SEQ ID NO: 938959 - DNA, 15 bp, Homo sapiens
accagtcacctccat

SEQ ID NO: 938960 - DNA, 15 bp, Homo sapiens
ccagtcacctccatt

SEQ ID NO: 938961 - DNA, 15 bp, Homo sapiens
cagtcacctccatta

SEQ ID NO: 938962 - DNA, 15 bp, Homo sapiens
agtcacctccattag

SEQ ID NO: 938963 - DNA, 15 bp, Homo sapiens
gtcacctccattagc

SEQ ID NO: 938964 - DNA, 15 bp, Homo sapiens
tcacctccattagcc

SEQ ID NO: 938965 - DNA, 15 bp, Homo sapiens
cacctccattagcct

SEQ ID NO: 938966 - DNA, 15 bp, Homo sapiens
acctccattagcctc

SEQ ID NO: 938967 - DNA, 15 bp, Homo sapiens
cctccattagcctca

SEQ ID NO: 938968 - DNA, 15 bp, Homo sapiens
ctccattagcctcag

SEQ ID NO: 938969 - DNA, 15 bp, Homo sapiens
tccattagcctcagg

SEQ ID NO: 938970 - DNA, 15 bp, Homo sapiens
ccattagcctcaggt

SEQ ID NO: 938971 - DNA, 15 bp, Homo sapiens
cattagcctcaggtc

SEQ ID NO: 938972 - DNA, 15 bp, Homo sapiens
attagcctcaggtct

SEQ ID NO: 938973 - DNA, 15 bp, Homo sapiens
ttagcctcaggtcta

SEQ ID NO: 938974 - DNA, 15 bp, Homo sapiens
tagcctcaggtctag

SEQ ID NO: 938975 - DNA, 15 bp, Homo sapiens
agcctcaggtctagg

SEQ ID NO: 938976 - DNA, 15 bp, Homo sapiens
gcctcaggtctaggg

SEQ ID NO: 938977 - DNA, 15 bp, Homo sapiens
cctcaggtctagggg

SEQ ID NO: 938978 - DNA, 15 bp, Homo sapiens
ctcaggtctaggggg

SEQ ID NO: 938979 - DNA, 15 bp, Homo sapiens
tcaggtctagggggg

SEQ ID NO: 938980 - DNA, 15 bp, Homo sapiens
caggtctaggggggt

SEQ ID NO: 938981 - DNA, 15 bp, Homo sapiens
aggtctaggggggtc

SEQ ID NO: 938982 - DNA, 15 bp, Homo sapiens
ggtctaggggggtcc

SEQ ID NO: 938983 - DNA, 15 bp, Homo sapiens
gtctaggggggtccc

SEQ ID NO: 938984 - DNA, 15 bp, Homo sapiens
tctaggggggtccca

SEQ ID NO: 938985 - DNA, 15 bp, Homo sapiens
ctaggggggtcccac

SEQ ID NO: 938986 - DNA, 15 bp, Homo sapiens
taggggggtcccact

SEQ ID NO: 938987 - DNA, 15 bp, Homo sapiens
aggggggtcccactc

SEQ ID NO: 938988 - DNA, 15 bp, Homo sapiens
ggggggtcccactct

SEQ ID NO: 938989 - DNA, 15 bp, Homo sapiens
gggggtcccactctc

SEQ ID NO: 938990 - DNA, 15 bp, Homo sapiens
ggggtcccactctct

SEQ ID NO: 938991 - DNA, 15 bp, Homo sapiens
gggtcccactctctc

SEQ ID NO: 938992 - DNA, 15 bp, Homo sapiens
ggtcccactctctct

SEQ ID NO: 938993 - DNA, 15 bp, Homo sapiens
gtcccactctctctc

SEQ ID NO: 938994 - DNA, 15 bp, Homo sapiens
tcccactctctctca

SEQ ID NO: 938995 - DNA, 15 bp, Homo sapiens
cccactctctctcat

SEQ ID NO: 938996 - DNA, 15 bp, Homo sapiens
ccactctctctcatc

SEQ ID NO: 938997 - DNA, 15 bp, Homo sapiens
cactctctctcatcc

SEQ ID NO: 938998 - DNA, 15 bp, Homo sapiens
actctctctcatcca

SEQ ID NO: 938999 - DNA, 15 bp, Homo sapiens
ctctctctcatccac

SEQ ID NO: 939000 - DNA, 15 bp, Homo sapiens
tctctctcatccact

SEQ ID NO: 939001 - DNA, 15 bp, Homo sapiens
ctctctcatccactt

SEQ ID NO: 939002 - DNA, 15 bp, Homo sapiens
tctctcatccacttt

SEQ ID NO: 939003 - DNA, 15 bp, Homo sapiens
ctctcatccactttc

SEQ ID NO: 939004 - DNA, 15 bp, Homo sapiens
tctcatccactttct

SEQ ID NO: 939005 - DNA, 15 bp, Homo sapiens
ctcatccactttctc

SEQ ID NO: 939006 - DNA, 15 bp, Homo sapiens
tcatccactttctcc

SEQ ID NO: 939007 - DNA, 15 bp, Homo sapiens
catccactttctccc

SEQ ID NO: 939008 - DNA, 15 bp, Homo sapiens
atccactttctccct

SEQ ID NO: 939009 - DNA, 15 bp, Homo sapiens
tccactttctccctc

SEQ ID NO: 939010 - DNA, 15 bp, Homo sapiens
ccactttctccctct

SEQ ID NO: 939011 - DNA, 15 bp, Homo sapiens
cactttctccctcta

SEQ ID NO: 939012 - DNA, 15 bp, Homo sapiens
actttctccctctac

SEQ ID NO: 939013 - DNA, 15 bp, Homo sapiens
ctttctccctctacc

SEQ ID NO: 939014 - DNA, 15 bp, Homo sapiens
tttctccctctacct

SEQ ID NO: 939015 - DNA, 15 bp, Homo sapiens
ttctccctctacctg

SEQ ID NO: 939016 - DNA, 15 bp, Homo sapiens
tctccctctacctgt

SEQ ID NO: 939017 - DNA, 15 bp, Homo sapiens
ctccctctacctgtg

SEQ ID NO: 939018 - DNA, 15 bp, Homo sapiens
tccctctacctgtgc

SEQ ID NO: 939019 - DNA, 15 bp, Homo sapiens
ccctctacctgtgct

SEQ ID NO: 939020 - DNA, 15 bp, Homo sapiens
cctctacctgtgctg

SEQ ID NO: 939021 - DNA, 15 bp, Homo sapiens
ctctacctgtgctgt

SEQ ID NO: 939022 - DNA, 15 bp, Homo sapiens
tctacctgtgctgtc

SEQ ID NO: 939023 - DNA, 15 bp, Homo sapiens
ctacctgtgctgtcc

SEQ ID NO: 939024 - DNA, 15 bp, Homo sapiens
tacctgtgctgtcct

SEQ ID NO: 939025 - DNA, 15 bp, Homo sapiens
acctgtgctgtcctt

SEQ ID NO: 939026 - DNA, 15 bp, Homo sapiens
cctgtgctgtccttt

SEQ ID NO: 939027 - DNA, 15 bp, Homo sapiens
ctgtgctgtcctttt

SEQ ID NO: 939028 - DNA, 15 bp, Homo sapiens
tgtgctgtcctttta

SEQ ID NO: 939029 - DNA, 15 bp, Homo sapiens
gtgctgtccttttat

SEQ ID NO: 939030 - DNA, 15 bp, Homo sapiens
tgctgtccttttata

SEQ ID NO: 939031 - DNA, 15 bp, Homo sapiens
gctgtccttttatac

SEQ ID NO: 939032 - DNA, 15 bp, Homo sapiens
ctgtccttttataca

SEQ ID NO: 939033 - DNA, 15 bp, Homo sapiens
tgtccttttatacac

SEQ ID NO: 939034 - DNA, 15 bp, Homo sapiens
gtccttttatacaca

SEQ ID NO: 939035 - DNA, 15 bp, Homo sapiens
tccttttatacacag

SEQ ID NO: 939036 - DNA, 15 bp, Homo sapiens
ccttttatacacagg

SEQ ID NO: 939037 - DNA, 15 bp, Homo sapiens
cttttatacacaggg

SEQ ID NO: 939038 - DNA, 15 bp, Homo sapiens
ttttatacacagggt

SEQ ID NO: 939039 - DNA, 15 bp, Homo sapiens
tttatacacagggtg

SEQ ID NO: 939040 - DNA, 15 bp, Homo sapiens
ttatacacagggtga

SEQ ID NO: 939041 - DNA, 15 bp, Homo sapiens
tatacacagggtgac

SEQ ID NO: 939042 - DNA, 15 bp, Homo sapiens
atacacagggtgact

SEQ ID NO: 939043 - DNA, 15 bp, Homo sapiens
tacacagggtgacta

SEQ ID NO: 939044 - DNA, 15 bp, Homo sapiens
acacagggtgactac

SEQ ID NO: 939045 - DNA, 15 bp, Homo sapiens
cacagggtgactacc

SEQ ID NO: 939046 - DNA, 15 bp, Homo sapiens
acagggtgactacct

SEQ ID NO: 939047 - DNA, 15 bp, Homo sapiens
cagggtgactacctc

SEQ ID NO: 939048 - DNA, 15 bp, Homo sapiens
agggtgactacctcc

SEQ ID NO: 939049 - DNA, 15 bp, Homo sapiens
gggtgactacctcca

SEQ ID NO: 939050 - DNA, 15 bp, Homo sapiens
ggtgactacctccat

SEQ ID NO: 939051 - DNA, 15 bp, Homo sapiens
gtgactacctccatc

SEQ ID NO: 939052 - DNA, 15 bp, Homo sapiens
tgactacctccatcc

SEQ ID NO: 939053 - DNA, 15 bp, Homo sapiens
gactacctccatcca

SEQ ID NO: 939054 - DNA, 15 bp, Homo sapiens
actacctccatccag

SEQ ID NO: 939055 - DNA, 15 bp, Homo sapiens
ctacctccatccaga

SEQ ID NO: 939056 - DNA, 15 bp, Homo sapiens
tacctccatccagag

SEQ ID NO: 939057 - DNA, 15 bp, Homo sapiens
acctccatccagagt

SEQ ID NO: 939058 - DNA, 15 bp, Homo sapiens
cctccatccagagtt

SEQ ID NO: 939059 - DNA, 15 bp, Homo sapiens
ctccatccagagtta

SEQ ID NO: 939060 - DNA, 15 bp, Homo sapiens
tccatccagagttac

SEQ ID NO: 939061 - DNA, 15 bp, Homo sapiens
ccatccagagttaca

SEQ ID NO: 939062 - DNA, 15 bp, Homo sapiens
catccagagttacaa

SEQ ID NO: 939063 - DNA, 15 bp, Homo sapiens
atccagagttacaat

SEQ ID NO: 939064 - DNA, 15 bp, Homo sapiens
tccagagttacaatt

SEQ ID NO: 939065 - DNA, 15 bp, Homo sapiens
ccagagttacaatta

SEQ ID NO: 939066 - DNA, 15 bp, Homo sapiens
cagagttacaattat

SEQ ID NO: 939067 - DNA, 15 bp, Homo sapiens
agagttacaattatg

SEQ ID NO: 939068 - DNA, 15 bp, Homo sapiens
gagttacaattatgc

SEQ ID NO: 939069 - DNA, 15 bp, Homo sapiens
agttacaattatgct

SEQ ID NO: 939070 - DNA, 15 bp, Homo sapiens
gttacaattatgctt

SEQ ID NO: 939071 - DNA, 15 bp, Homo sapiens
ttacaattatgcttc

SEQ ID NO: 939072 - DNA, 15 bp, Homo sapiens
tacaattatgcttct

SEQ ID NO: 939073 - DNA, 15 bp, Homo sapiens
acaattatgcttctt

SEQ ID NO: 939074 - DNA, 15 bp, Homo sapiens
caattatgcttcttc

SEQ ID NO: 939075 - DNA, 15 bp, Homo sapiens
aattatgcttcttca

SEQ ID NO: 939076 - DNA, 15 bp, Homo sapiens
attatgcttcttcaa

SEQ ID NO: 939077 - DNA, 15 bp, Homo sapiens
ttatgcttcttcaaa

SEQ ID NO: 939078 - DNA, 15 bp, Homo sapiens
tatgcttcttcaaaa

SEQ ID NO: 939079 - DNA, 15 bp, Homo sapiens
atgcttcttcaaaat

SEQ ID NO: 939080 - DNA, 15 bp, Homo sapiens
tgcttcttcaaaatg

SEQ ID NO: 939081 - DNA, 15 bp, Homo sapiens
gcttcttcaaaatga

SEQ ID NO: 939082 - DNA, 15 bp, Homo sapiens
cttcttcaaaatgag

SEQ ID NO: 939083 - DNA, 15 bp, Homo sapiens
ttcttcaaaatgagc

SEQ ID NO: 939084 - DNA, 15 bp, Homo sapiens
tcttcaaaatgagct

SEQ ID NO: 939085 - DNA, 15 bp, Homo sapiens
cttcaaaatgagctt

SEQ ID NO: 939086 - DNA, 15 bp, Homo sapiens
ttcaaaatgagcttt

SEQ ID NO: 939087 - DNA, 15 bp, Homo sapiens
tcaaaatgagctttt

SEQ ID NO: 939088 - DNA, 15 bp, Homo sapiens
caaaatgagcttttc

SEQ ID NO: 939089 - DNA, 15 bp, Homo sapiens
aaaatgagcttttct

SEQ ID NO: 939090 - DNA, 15 bp, Homo sapiens
aaatgagcttttcta

SEQ ID NO: 939091 - DNA, 15 bp, Homo sapiens
aatgagcttttctat

SEQ ID NO: 939092 - DNA, 15 bp, Homo sapiens
atgagcttttctatg

SEQ ID NO: 939093 - DNA, 15 bp, Homo sapiens
tgagcttttctatgg

SEQ ID NO: 939094 - DNA, 15 bp, Homo sapiens
gagcttttctatggg

SEQ ID NO: 939095 - DNA, 15 bp, Homo sapiens
agcttttctatgggg

SEQ ID NO: 939096 - DNA, 15 bp, Homo sapiens
gcttttctatgggga

SEQ ID NO: 939097 - DNA, 15 bp, Homo sapiens
cttttctatggggat

SEQ ID NO: 939098 - DNA, 15 bp, Homo sapiens
ttttctatggggata

SEQ ID NO: 939099 - DNA, 15 bp, Homo sapiens
tttctatggggatac

SEQ ID NO: 939100 - DNA, 15 bp, Homo sapiens
ttctatggggataca

SEQ ID NO: 939101 - DNA, 15 bp, Homo sapiens
tctatggggatacac

SEQ ID NO: 939102 - DNA, 15 bp, Homo sapiens
ctatggggatacact

SEQ ID NO: 939103 - DNA, 15 bp, Homo sapiens
tatggggatacactc

SEQ ID NO: 939104 - DNA, 15 bp, Homo sapiens
atggggatacactct

SEQ ID NO: 939105 - DNA, 15 bp, Homo sapiens
tggggatacactcta

SEQ ID NO: 939106 - DNA, 15 bp, Homo sapiens
ggggatacactctac

SEQ ID NO: 939107 - DNA, 15 bp, Homo sapiens
gggatacactctacc

SEQ ID NO: 939108 - DNA, 15 bp, Homo sapiens
ggatacactctacct

SEQ ID NO: 939109 - DNA, 15 bp, Homo sapiens
gatacactctaccta

SEQ ID NO: 939110 - DNA, 15 bp, Homo sapiens
atacactctacctac

SEQ ID NO: 939111 - DNA, 15 bp, Homo sapiens
tacactctacctaca

SEQ ID NO: 939112 - DNA, 15 bp, Homo sapiens
acactctacctacaa

SEQ ID NO: 939113 - DNA, 15 bp, Homo sapiens
cactctacctacaaa

SEQ ID NO: 939114 - DNA, 15 bp, Homo sapiens
actctacctacaaaa

SEQ ID NO: 939115 - DNA, 15 bp, Homo sapiens
ctctacctacaaaaa

SEQ ID NO: 939116 - DNA, 15 bp, Homo sapiens
tctacctacaaaaaa

SEQ ID NO: 939117 - DNA, 15 bp, Homo sapiens
ctacctacaaaaaat

SEQ ID NO: 939118 - DNA, 15 bp, Homo sapiens
tacctacaaaaaata

SEQ ID NO: 939119 - DNA, 15 bp, Homo sapiens
acctacaaaaaatag

SEQ ID NO: 939120 - DNA, 15 bp, Homo sapiens
cctacaaaaaatagt

SEQ ID NO: 939121 - DNA, 15 bp, Homo sapiens
ctacaaaaaatagta

SEQ ID NO: 939122 - DNA, 15 bp, Homo sapiens
tacaaaaaatagtat

SEQ ID NO: 939123 - DNA, 15 bp, Homo sapiens
acaaaaaatagtata

SEQ ID NO: 939124 - DNA, 15 bp, Homo sapiens
caaaaaatagtatat

SEQ ID NO: 939125 - DNA, 15 bp, Homo sapiens
aaaaaatagtatata

SEQ ID NO: 939126 - DNA, 15 bp, Homo sapiens
aaaaatagtatatac

SEQ ID NO: 939127 - DNA, 15 bp, Homo sapiens
aaaatagtatataca

SEQ ID NO: 939128 - DNA, 15 bp, Homo sapiens
aaatagtatatacac

SEQ ID NO: 939129 - DNA, 15 bp, Homo sapiens
aatagtatatacact

SEQ ID NO: 939130 - DNA, 15 bp, Homo sapiens
atagtatatacactt

SEQ ID NO: 939131 - DNA, 15 bp, Homo sapiens
tagtatatacacttg

SEQ ID NO: 939132 - DNA, 15 bp, Homo sapiens
agtatatacacttga

SEQ ID NO: 939133 - DNA, 15 bp, Homo sapiens
gtatatacacttgaa

SEQ ID NO: 939134 - DNA, 15 bp, Homo sapiens
tatatacacttgaaa

SEQ ID NO: 939135 - DNA, 15 bp, Homo sapiens
atatacacttgaaac

SEQ ID NO: 939136 - DNA, 15 bp, Homo sapiens
tatacacttgaaact

SEQ ID NO: 939137 - DNA, 15 bp, Homo sapiens
atacacttgaaactt

SEQ ID NO: 939138 - DNA, 15 bp, Homo sapiens
tacacttgaaacttg

SEQ ID NO: 939139 - DNA, 15 bp, Homo sapiens
acacttgaaacttgg

SEQ ID NO: 939140 - DNA, 15 bp, Homo sapiens
cacttgaaacttggc

SEQ ID NO: 939141 - DNA, 15 bp, Homo sapiens
acttgaaacttggca

SEQ ID NO: 939142 - DNA, 15 bp, Homo sapiens
cttgaaacttggcat

SEQ ID NO: 939143 - DNA, 15 bp, Homo sapiens
ttgaaacttggcatc

SEQ ID NO: 939144 - DNA, 15 bp, Homo sapiens
tgaaacttggcatct

SEQ ID NO: 939145 - DNA, 15 bp, Homo sapiens
gaaacttggcatctc

SEQ ID NO: 939146 - DNA, 15 bp, Homo sapiens
aaacttggcatctca

SEQ ID NO: 939147 - DNA, 15 bp, Homo sapiens
aacttggcatctcac

SEQ ID NO: 939148 - DNA, 15 bp, Homo sapiens
acttggcatctcacc

SEQ ID NO: 939149 - DNA, 15 bp, Homo sapiens
cttggcatctcaccc

SEQ ID NO: 939150 - DNA, 15 bp, Homo sapiens
ttggcatctcaccct

SEQ ID NO: 939151 - DNA, 15 bp, Homo sapiens
tggcatctcaccctc

SEQ ID NO: 939152 - DNA, 15 bp, Homo sapiens
ggcatctcaccctct

SEQ ID NO: 939153 - DNA, 15 bp, Homo sapiens
gcatctcaccctcta

SEQ ID NO: 939154 - DNA, 15 bp, Homo sapiens
catctcaccctctat

SEQ ID NO: 939155 - DNA, 15 bp, Homo sapiens
atctcaccctctatt

SEQ ID NO: 939156 - DNA, 15 bp, Homo sapiens
tctcaccctctatta

SEQ ID NO: 939157 - DNA, 15 bp, Homo sapiens
ctcaccctctattaa

SEQ ID NO: 939158 - DNA, 15 bp, Homo sapiens
tcaccctctattaaa

SEQ ID NO: 939159 - DNA, 15 bp, Homo sapiens
caccctctattaaat

SEQ ID NO: 939160 - DNA, 15 bp, Homo sapiens
accctctattaaatt

SEQ ID NO: 939161 - DNA, 15 bp, Homo sapiens
ccctctattaaattg

SEQ ID NO: 939162 - DNA, 15 bp, Homo sapiens
cctctattaaattga

SEQ ID NO: 939163 - DNA, 15 bp, Homo sapiens
ctctattaaattgag

SEQ ID NO: 939164 - DNA, 15 bp, Homo sapiens
tctattaaattgaga

SEQ ID NO: 939165 - DNA, 15 bp, Homo sapiens
ctattaaattgagaa

SEQ ID NO: 939166 - DNA, 15 bp, Homo sapiens
tattaaattgagaac

SEQ ID NO: 939167 - DNA, 15 bp, Homo sapiens
attaaattgagaact

SEQ ID NO: 939168 - DNA, 15 bp, Homo sapiens
ttaaattgagaactt

SEQ ID NO: 939169 - DNA, 15 bp, Homo sapiens
taaattgagaacttt

SEQ ID NO: 939170 - DNA, 15 bp, Homo sapiens
aaattgagaactttt

SEQ ID NO: 939171 - DNA, 15 bp, Homo sapiens
aattgagaacttttc

SEQ ID NO: 939172 - DNA, 15 bp, Homo sapiens
attgagaacttttct

SEQ ID NO: 939173 - DNA, 15 bp, Homo sapiens
ttgagaacttttcta

SEQ ID NO: 939174 - DNA, 15 bp, Homo sapiens
tgagaacttttctac

SEQ ID NO: 939175 - DNA, 15 bp, Homo sapiens
gagaacttttctact

SEQ ID NO: 939176 - DNA, 15 bp, Homo sapiens
agaacttttctactc

SEQ ID NO: 939177 - DNA, 15 bp, Homo sapiens
gaacttttctactcc

SEQ ID NO: 939178 - DNA, 15 bp, Homo sapiens
aacttttctactcct

SEQ ID NO: 939179 - DNA, 15 bp, Homo sapiens
acttttctactcctg

SEQ ID NO: 939180 - DNA, 15 bp, Homo sapiens
cttttctactcctgg

SEQ ID NO: 939181 - DNA, 15 bp, Homo sapiens
ttttctactcctgga

SEQ ID NO: 939182 - DNA, 15 bp, Homo sapiens
tttctactcctggaa

SEQ ID NO: 939183 - DNA, 15 bp, Homo sapiens
ttctactcctggaaa

SEQ ID NO: 939184 - DNA, 15 bp, Homo sapiens
tctactcctggaaag

SEQ ID NO: 939185 - DNA, 15 bp, Homo sapiens
ctactcctggaaagt

SEQ ID NO: 939186 - DNA, 15 bp, Homo sapiens
tactcctggaaagtt

SEQ ID NO: 939187 - DNA, 15 bp, Homo sapiens
actcctggaaagtta

SEQ ID NO: 939188 - DNA, 15 bp, Homo sapiens
ctcctggaaagttac

SEQ ID NO: 939189 - DNA, 15 bp, Homo sapiens
tcctggaaagttact

SEQ ID NO: 939190 - DNA, 15 bp, Homo sapiens
cctggaaagttactc

SEQ ID NO: 939191 - DNA, 15 bp, Homo sapiens
ctggaaagttactca

SEQ ID NO: 939192 - DNA, 15 bp, Homo sapiens
tggaaagttactcag

SEQ ID NO: 939193 - DNA, 15 bp, Homo sapiens
ggaaagttactcagg

SEQ ID NO: 939194 - DNA, 15 bp, Homo sapiens
gaaagttactcaggg

SEQ ID NO: 939195 - DNA, 15 bp, Homo sapiens
aaagttactcaggga

SEQ ID NO: 939196 - DNA, 15 bp, Homo sapiens
aagttactcagggat

SEQ ID NO: 939197 - DNA, 15 bp, Homo sapiens
agttactcagggatg

SEQ ID NO: 939198 - DNA, 15 bp, Homo sapiens
gttactcagggatgt

SEQ ID NO: 939199 - DNA, 15 bp, Homo sapiens
ttactcagggatgtg

SEQ ID NO: 939200 - DNA, 15 bp, Homo sapiens
tactcagggatgtga

SEQ ID NO: 939201 - DNA, 15 bp, Homo sapiens
actcagggatgtgat

SEQ ID NO: 939202 - DNA, 15 bp, Homo sapiens
ctcagggatgtgatc

SEQ ID NO: 939203 - DNA, 15 bp, Homo sapiens
tcagggatgtgatcc

SEQ ID NO: 939204 - DNA, 15 bp, Homo sapiens
cagggatgtgatcct

SEQ ID NO: 939205 - DNA, 15 bp, Homo sapiens
agggatgtgatccta

SEQ ID NO: 939206 - DNA, 15 bp, Homo sapiens
gggatgtgatcctat

SEQ ID NO: 939207 - DNA, 15 bp, Homo sapiens
ggatgtgatcctatt

SEQ ID NO: 939208 - DNA, 15 bp, Homo sapiens
gatgtgatcctattt

SEQ ID NO: 939209 - DNA, 15 bp, Homo sapiens
atgtgatcctatttc

SEQ ID NO: 939210 - DNA, 15 bp, Homo sapiens
tgtgatcctatttca

SEQ ID NO: 939211 - DNA, 15 bp, Homo sapiens
gtgatcctatttcat

SEQ ID NO: 939212 - DNA, 15 bp, Homo sapiens
tgatcctatttcatc

SEQ ID NO: 939213 - DNA, 15 bp, Homo sapiens
gatcctatttcatca

SEQ ID NO: 939214 - DNA, 15 bp, Homo sapiens
atcctatttcatcat

SEQ ID NO: 939215 - DNA, 15 bp, Homo sapiens
tcctatttcatcatt

SEQ ID NO: 939216 - DNA, 15 bp, Homo sapiens
cctatttcatcattt

SEQ ID NO: 939217 - DNA, 15 bp, Homo sapiens
ctatttcatcatttg

SEQ ID NO: 939218 - DNA, 15 bp, Homo sapiens
tatttcatcatttgt

SEQ ID NO: 939219 - DNA, 15 bp, Homo sapiens
atttcatcatttgtg

SEQ ID NO: 939220 - DNA, 15 bp, Homo sapiens
tttcatcatttgtgc

SEQ ID NO: 939221 - DNA, 15 bp, Homo sapiens
ttcatcatttgtgct

SEQ ID NO: 939222 - DNA, 15 bp, Homo sapiens
tcatcatttgtgctt

SEQ ID NO: 939223 - DNA, 15 bp, Homo sapiens
catcatttgtgctta

SEQ ID NO: 939224 - DNA, 15 bp, Homo sapiens
atcatttgtgcttat

SEQ ID NO: 939225 - DNA, 15 bp, Homo sapiens
tcatttgtgcttatc

SEQ ID NO: 939226 - DNA, 15 bp, Homo sapiens
catttgtgcttatct

SEQ ID NO: 939227 - DNA, 15 bp, Homo sapiens
atttgtgcttatctc

SEQ ID NO: 939228 - DNA, 15 bp, Homo sapiens
tttgtgcttatctca

SEQ ID NO: 939229 - DNA, 15 bp, Homo sapiens
ttgtgcttatctcat

SEQ ID NO: 939230 - DNA, 15 bp, Homo sapiens
tgtgcttatctcatt

SEQ ID NO: 939231 - DNA, 15 bp, Homo sapiens
gtgcttatctcattt

SEQ ID NO: 939232 - DNA, 15 bp, Homo sapiens
tgcttatctcatttt

SEQ ID NO: 939233 - DNA, 15 bp, Homo sapiens
gcttatctcattttt

SEQ ID NO: 939234 - DNA, 15 bp, Homo sapiens
cttatctcatttttc

SEQ ID NO: 939235 - DNA, 15 bp, Homo sapiens
ttatctcatttttct

SEQ ID NO: 939236 - DNA, 15 bp, Homo sapiens
tatctcatttttctc

SEQ ID NO: 939237 - DNA, 15 bp, Homo sapiens
atctcatttttctcc

SEQ ID NO: 939238 - DNA, 15 bp, Homo sapiens
tctcatttttctcca

SEQ ID NO: 939239 - DNA, 15 bp, Homo sapiens
ctcatttttctccaa

SEQ ID NO: 939240 - DNA, 15 bp, Homo sapiens
tcatttttctccaaa

SEQ ID NO: 939241 - DNA, 15 bp, Homo sapiens
catttttctccaaac

SEQ ID NO: 939242 - DNA, 15 bp, Homo sapiens
atttttctccaaact

SEQ ID NO: 939243 - DNA, 15 bp, Homo sapiens
tttttctccaaactt

SEQ ID NO: 939244 - DNA, 15 bp, Homo sapiens
ttttctccaaactta

SEQ ID NO: 939245 - DNA, 15 bp, Homo sapiens
tttctccaaacttac

SEQ ID NO: 939246 - DNA, 15 bp, Homo sapiens
ttctccaaacttact

SEQ ID NO: 939247 - DNA, 15 bp, Homo sapiens
tctccaaacttactt

SEQ ID NO: 939248 - DNA, 15 bp, Homo sapiens
ctccaaacttactta

SEQ ID NO: 939249 - DNA, 15 bp, Homo sapiens
tccaaacttacttag

SEQ ID NO: 939250 - DNA, 15 bp, Homo sapiens
ccaaacttacttagt

SEQ ID NO: 939251 - DNA, 15 bp, Homo sapiens
caaacttacttagtc

SEQ ID NO: 939252 - DNA, 15 bp, Homo sapiens
aaacttacttagtct

SEQ ID NO: 939253 - DNA, 15 bp, Homo sapiens
aacttacttagtctg

SEQ ID NO: 939254 - DNA, 15 bp, Homo sapiens
acttacttagtctgt

SEQ ID NO: 939255 - DNA, 15 bp, Homo sapiens
cttacttagtctgtt

SEQ ID NO: 939256 - DNA, 15 bp, Homo sapiens
ttacttagtctgttc

SEQ ID NO: 939257 - DNA, 15 bp, Homo sapiens
tacttagtctgttct

SEQ ID NO: 939258 - DNA, 15 bp, Homo sapiens
acttagtctgttctc

SEQ ID NO: 939259 - DNA, 15 bp, Homo sapiens
cttagtctgttctca

SEQ ID NO: 939260 - DNA, 15 bp, Homo sapiens
ttagtctgttctcaa

SEQ ID NO: 939261 - DNA, 15 bp, Homo sapiens
tagtctgttctcaac

SEQ ID NO: 939262 - DNA, 15 bp, Homo sapiens
agtctgttctcaacg

SEQ ID NO: 939263 - DNA, 15 bp, Homo sapiens
gtctgttctcaacgt

SEQ ID NO: 939264 - DNA, 15 bp, Homo sapiens
tctgttctcaacgtt

SEQ ID NO: 939265 - DNA, 15 bp, Homo sapiens
ctgttctcaacgtta

SEQ ID NO: 939266 - DNA, 15 bp, Homo sapiens
tgggaagttacatgg

SEQ ID NO: 939267 - DNA, 15 bp, Homo sapiens
gggaagttacatgga

SEQ ID NO: 939268 - DNA, 15 bp, Homo sapiens
ggaagttacatggag

SEQ ID NO: 939269 - DNA, 15 bp, Homo sapiens
gaagttacatggaga

SEQ ID NO: 939270 - DNA, 15 bp, Homo sapiens
aagttacatggagat

SEQ ID NO: 939271 - DNA, 15 bp, Homo sapiens
agttacatggagatg

SEQ ID NO: 939272 - DNA, 15 bp, Homo sapiens
gttacatggagatgg

SEQ ID NO: 939273 - DNA, 15 bp, Homo sapiens
ttacatggagatggg

SEQ ID NO: 939274 - DNA, 15 bp, Homo sapiens
tacatggagatgggc

SEQ ID NO: 939275 - DNA, 15 bp, Homo sapiens
acatggagatgggct

SEQ ID NO: 939276 - DNA, 15 bp, Homo sapiens
catggagatgggctc

SEQ ID NO: 939277 - DNA, 15 bp, Homo sapiens
atggagatgggctct

SEQ ID NO: 939278 - DNA, 15 bp, Homo sapiens
tggagatgggctctg

SEQ ID NO: 939279 - DNA, 15 bp, Homo sapiens
ggagatgggctctga

SEQ ID NO: 939280 - DNA, 15 bp, Homo sapiens
gagatgggctctgaa

SEQ ID NO: 939281 - DNA, 15 bp, Homo sapiens
agatgggctctgaac

SEQ ID NO: 939282 - DNA, 15 bp, Homo sapiens
gatgggctctgaacc

SEQ ID NO: 939283 - DNA, 15 bp, Homo sapiens
atgggctctgaacca

SEQ ID NO: 939284 - DNA, 15 bp, Homo sapiens
tgggctctgaaccat

SEQ ID NO: 939285 - DNA, 15 bp, Homo sapiens
gggctctgaaccatc

SEQ ID NO: 939286 - DNA, 15 bp, Homo sapiens
ggctctgaaccatca

SEQ ID NO: 939287 - DNA, 15 bp, Homo sapiens
gctctgaaccatcat

SEQ ID NO: 939288 - DNA, 15 bp, Homo sapiens
ctctgaaccatcatg

SEQ ID NO: 939289 - DNA, 15 bp, Homo sapiens
tctgaaccatcatgg

SEQ ID NO: 939290 - DNA, 15 bp, Homo sapiens
ctgaaccatcatggg

SEQ ID NO: 939291 - DNA, 15 bp, Homo sapiens
tgaaccatcatgggg

SEQ ID NO: 939292 - DNA, 15 bp, Homo sapiens
gaaccatcatgggga

SEQ ID NO: 939293 - DNA, 15 bp, Homo sapiens
aaccatcatggggac

SEQ ID NO: 939294 - DNA, 15 bp, Homo sapiens
accatcatggggact

SEQ ID NO: 939295 - DNA, 15 bp, Homo sapiens
ccatcatggggactt

SEQ ID NO: 939296 - DNA, 15 bp, Homo sapiens
catcatggggacttg

SEQ ID NO: 939297 - DNA, 15 bp, Homo sapiens
atcatggggacttga

SEQ ID NO: 939298 - DNA, 15 bp, Homo sapiens
tcatggggacttgag

SEQ ID NO: 939299 - DNA, 15 bp, Homo sapiens
catggggacttgagc

SEQ ID NO: 939300 - DNA, 15 bp, Homo sapiens
atggggacttgagca

SEQ ID NO: 939301 - DNA, 15 bp, Homo sapiens
tggggacttgagcac

SEQ ID NO: 939302 - DNA, 15 bp, Homo sapiens
ggggacttgagcact

SEQ ID NO: 939303 - DNA, 15 bp, Homo sapiens
gggacttgagcactc

SEQ ID NO: 939304 - DNA, 15 bp, Homo sapiens
ggacttgagcactct

SEQ ID NO: 939305 - DNA, 15 bp, Homo sapiens
gacttgagcactcta

SEQ ID NO: 939306 - DNA, 15 bp, Homo sapiens
acttgagcactctac

SEQ ID NO: 939307 - DNA, 15 bp, Homo sapiens
cttgagcactctact

SEQ ID NO: 939308 - DNA, 15 bp, Homo sapiens
ttgagcactctactc

SEQ ID NO: 939309 - DNA, 15 bp, Homo sapiens
tgagcactctactct

SEQ ID NO: 939310 - DNA, 15 bp, Homo sapiens
gagcactctactctc

SEQ ID NO: 939311 - DNA, 15 bp, Homo sapiens
agcactctactctca

SEQ ID NO: 939312 - DNA, 15 bp, Homo sapiens
gcactctactctcat

SEQ ID NO: 939313 - DNA, 15 bp, Homo sapiens
cactctactctcatt

SEQ ID NO: 939314 - DNA, 15 bp, Homo sapiens
actctactctcattt

SEQ ID NO: 939315 - DNA, 15 bp, Homo sapiens
ctctactctcattta

SEQ ID NO: 939316 - DNA, 15 bp, Homo sapiens
tctactctcatttat

SEQ ID NO: 939317 - DNA, 15 bp, Homo sapiens
ctactctcatttata

SEQ ID NO: 939318 - DNA, 15 bp, Homo sapiens
tactctcatttatat

SEQ ID NO: 939319 - DNA, 15 bp, Homo sapiens
actctcatttatatt

SEQ ID NO: 939320 - DNA, 15 bp, Homo sapiens
ctctcatttatattc

SEQ ID NO: 939321 - DNA, 15 bp, Homo sapiens
tctcatttatattcc

SEQ ID NO: 939322 - DNA, 15 bp, Homo sapiens
ctcatttatattcca

SEQ ID NO: 939323 - DNA, 15 bp, Homo sapiens
tcatttatattccag

SEQ ID NO: 939324 - DNA, 15 bp, Homo sapiens
catttatattccaga

SEQ ID NO: 939325 - DNA, 15 bp, Homo sapiens
atttatattccagaa

SEQ ID NO: 939326 - DNA, 15 bp, Homo sapiens
tttatattccagaag

SEQ ID NO: 939327 - DNA, 15 bp, Homo sapiens
ttatattccagaaga

SEQ ID NO: 939328 - DNA, 15 bp, Homo sapiens
tatattccagaagag

SEQ ID NO: 939329 - DNA, 15 bp, Homo sapiens
atattccagaagagt

SEQ ID NO: 939330 - DNA, 15 bp, Homo sapiens
tattccagaagagtt

SEQ ID NO: 939331 - DNA, 15 bp, Homo sapiens
attccagaagagttg

SEQ ID NO: 939332 - DNA, 15 bp, Homo sapiens
ttccagaagagttgt

SEQ ID NO: 939333 - DNA, 15 bp, Homo sapiens
tccagaagagttgtg

SEQ ID NO: 939334 - DNA, 15 bp, Homo sapiens
ccagaagagttgtgg

SEQ ID NO: 939335 - DNA, 15 bp, Homo sapiens
cagaagagttgtgga

SEQ ID NO: 939336 - DNA, 15 bp, Homo sapiens
agaagagttgtggac

SEQ ID NO: 939337 - DNA, 15 bp, Homo sapiens
gaagagttgtggaca

SEQ ID NO: 939338 - DNA, 15 bp, Homo sapiens
aagagttgtggacat

SEQ ID NO: 939339 - DNA, 15 bp, Homo sapiens
agagttgtggacatt

SEQ ID NO: 939340 - DNA, 15 bp, Homo sapiens
gagttgtggacattc

SEQ ID NO: 939341 - DNA, 15 bp, Homo sapiens
agttgtggacattcc

SEQ ID NO: 939342 - DNA, 15 bp, Homo sapiens
gttgtggacattcct

SEQ ID NO: 939343 - DNA, 15 bp, Homo sapiens
ttgtggacattcctg

SEQ ID NO: 939344 - DNA, 15 bp, Homo sapiens
tgtggacattcctgg

SEQ ID NO: 939345 - DNA, 15 bp, Homo sapiens
gtggacattcctggc

SEQ ID NO: 939346 - DNA, 15 bp, Homo sapiens
tggacattcctggcc

SEQ ID NO: 939347 - DNA, 15 bp, Homo sapiens
ggacattcctggcca

SEQ ID NO: 939348 - DNA, 15 bp, Homo sapiens
gacattcctggccag

SEQ ID NO: 939349 - DNA, 15 bp, Homo sapiens
acattcctggccaga

SEQ ID NO: 939350 - DNA, 15 bp, Homo sapiens
cattcctggccagat

SEQ ID NO: 939351 - DNA, 15 bp, Homo sapiens
attcctggccagatc

SEQ ID NO: 939352 - DNA, 15 bp, Homo sapiens
ttcctggccagatct

SEQ ID NO: 939353 - DNA, 15 bp, Homo sapiens
tcctggccagatctg

SEQ ID NO: 939354 - DNA, 15 bp, Homo sapiens
cctggccagatctgt

SEQ ID NO: 939355 - DNA, 15 bp, Homo sapiens
ctggccagatctgtg

SEQ ID NO: 939356 - DNA, 15 bp, Homo sapiens
tggccagatctgtgt

SEQ ID NO: 939357 - DNA, 15 bp, Homo sapiens
ggccagatctgtgta

SEQ ID NO: 939358 - DNA, 15 bp, Homo sapiens
gccagatctgtgtaa

SEQ ID NO: 939359 - DNA, 15 bp, Homo sapiens
ccagatctgtgtaac

SEQ ID NO: 939360 - DNA, 15 bp, Homo sapiens
cagatctgtgtaaca

SEQ ID NO: 939361 - DNA, 15 bp, Homo sapiens
agatctgtgtaacag

SEQ ID NO: 939362 - DNA, 15 bp, Homo sapiens
gatctgtgtaacaga

SEQ ID NO: 939363 - DNA, 15 bp, Homo sapiens
atctgtgtaacagaa

SEQ ID NO: 939364 - DNA, 15 bp, Homo sapiens
tctgtgtaacagaag

SEQ ID NO: 939365 - DNA, 15 bp, Homo sapiens
ctgtgtaacagaagc

SEQ ID NO: 939366 - DNA, 15 bp, Homo sapiens
tgtgtaacagaagcc

SEQ ID NO: 939367 - DNA, 15 bp, Homo sapiens
gtgtaacagaagcca

SEQ ID NO: 939368 - DNA, 15 bp, Homo sapiens
tgtaacagaagccag

SEQ ID NO: 939369 - DNA, 15 bp, Homo sapiens
gtaacagaagccagg

SEQ ID NO: 939370 - DNA, 15 bp, Homo sapiens
taacagaagccagga

SEQ ID NO: 939371 - DNA, 15 bp, Homo sapiens
aacagaagccaggaa

SEQ ID NO: 939372 - DNA, 15 bp, Homo sapiens
acagaagccaggaaa

SEQ ID NO: 939373 - DNA, 15 bp, Homo sapiens
cagaagccaggaaaa

SEQ ID NO: 939374 - DNA, 15 bp, Homo sapiens
agaagccaggaaaag

SEQ ID NO: 939375 - DNA, 15 bp, Homo sapiens
gaagccaggaaaagc

SEQ ID NO: 939376 - DNA, 15 bp, Homo sapiens
aagccaggaaaagca

SEQ ID NO: 939377 - DNA, 15 bp, Homo sapiens
agccaggaaaagcac

SEQ ID NO: 939378 - DNA, 15 bp, Homo sapiens
gccaggaaaagcaca

SEQ ID NO: 939379 - DNA, 15 bp, Homo sapiens
ccaggaaaagcacac

SEQ ID NO: 939380 - DNA, 15 bp, Homo sapiens
caggaaaagcacaca

SEQ ID NO: 939381 - DNA, 15 bp, Homo sapiens
aggaaaagcacacac

SEQ ID NO: 939382 - DNA, 15 bp, Homo sapiens
ggaaaagcacacact

SEQ ID NO: 939383 - DNA, 15 bp, Homo sapiens
gaaaagcacacactg

SEQ ID NO: 939384 - DNA, 15 bp, Homo sapiens
aaaagcacacactga

SEQ ID NO: 939385 - DNA, 15 bp, Homo sapiens
aaagcacacactgag

SEQ ID NO: 939386 - DNA, 15 bp, Homo sapiens
aagcacacactgagg

SEQ ID NO: 939387 - DNA, 15 bp, Homo sapiens
agcacacactgaggg

SEQ ID NO: 939388 - DNA, 15 bp, Homo sapiens
gcacacactgagggc

SEQ ID NO: 939389 - DNA, 15 bp, Homo sapiens
cacacactgagggca

SEQ ID NO: 939390 - DNA, 15 bp, Homo sapiens
acacactgagggcac

SEQ ID NO: 939391 - DNA, 15 bp, Homo sapiens
cacactgagggcacc

SEQ ID NO: 939392 - DNA, 15 bp, Homo sapiens
acactgagggcaccc

SEQ ID NO: 939393 - DNA, 15 bp, Homo sapiens
cactgagggcacccc

SEQ ID NO: 939394 - DNA, 15 bp, Homo sapiens
actgagggcaccccc

SEQ ID NO: 939395 - DNA, 15 bp, Homo sapiens
ctgagggcacccccg

SEQ ID NO: 939396 - DNA, 15 bp, Homo sapiens
tgagggcacccccgc

SEQ ID NO: 939397 - DNA, 15 bp, Homo sapiens
gagggcacccccgct

SEQ ID NO: 939398 - DNA, 15 bp, Homo sapiens
agggcacccccgctc

SEQ ID NO: 939399 - DNA, 15 bp, Homo sapiens
gggcacccccgctct

SEQ ID NO: 939400 - DNA, 15 bp, Homo sapiens
ggcacccccgctctg

SEQ ID NO: 939401 - DNA, 15 bp, Homo sapiens
gcacccccgctctgg

SEQ ID NO: 939402 - DNA, 15 bp, Homo sapiens
cacccccgctctgga

SEQ ID NO: 939403 - DNA, 15 bp, Homo sapiens
acccccgctctggac

SEQ ID NO: 939404 - DNA, 15 bp, Homo sapiens
cccccgctctggact

SEQ ID NO: 939405 - DNA, 15 bp, Homo sapiens
ccccgctctggactg

SEQ ID NO: 939406 - DNA, 15 bp, Homo sapiens
cccgctctggactgt

SEQ ID NO: 939407 - DNA, 15 bp, Homo sapiens
ccgctctggactgta

SEQ ID NO: 939408 - DNA, 15 bp, Homo sapiens
cgctctggactgtaa

SEQ ID NO: 939409 - DNA, 15 bp, Homo sapiens
gctctggactgtaat

SEQ ID NO: 939410 - DNA, 15 bp, Homo sapiens
ctctggactgtaatg

SEQ ID NO: 939411 - DNA, 15 bp, Homo sapiens
tctggactgtaatga

SEQ ID NO: 939412 - DNA, 15 bp, Homo sapiens
ctggactgtaatgaa

SEQ ID NO: 939413 - DNA, 15 bp, Homo sapiens
tggactgtaatgaag

SEQ ID NO: 939414 - DNA, 15 bp, Homo sapiens
ggactgtaatgaagg

SEQ ID NO: 939415 - DNA, 15 bp, Homo sapiens
gactgtaatgaaggc

SEQ ID NO: 939416 - DNA, 15 bp, Homo sapiens
actgtaatgaaggca

SEQ ID NO: 939417 - DNA, 15 bp, Homo sapiens
ctgtaatgaaggcaa

SEQ ID NO: 939418 - DNA, 15 bp, Homo sapiens
tgtaatgaaggcaaa

SEQ ID NO: 939419 - DNA, 15 bp, Homo sapiens
gtaatgaaggcaaaa

SEQ ID NO: 939420 - DNA, 15 bp, Homo sapiens
taatgaaggcaaaag

SEQ ID NO: 939421 - DNA, 15 bp, Homo sapiens
aatgaaggcaaaagc

SEQ ID NO: 939422 - DNA, 15 bp, Homo sapiens
atgaaggcaaaagcg

SEQ ID NO: 939423 - DNA, 15 bp, Homo sapiens
tgaaggcaaaagcgt

SEQ ID NO: 939424 - DNA, 15 bp, Homo sapiens
gaaggcaaaagcgtt

SEQ ID NO: 939425 - DNA, 15 bp, Homo sapiens
aaggcaaaagcgtta

SEQ ID NO: 939426 - DNA, 15 bp, Homo sapiens
aggcaaaagcgttag

SEQ ID NO: 939427 - DNA, 15 bp, Homo sapiens
ggcaaaagcgttagg

SEQ ID NO: 939428 - DNA, 15 bp, Homo sapiens
gcaaaagcgttaggc

SEQ ID NO: 939429 - DNA, 15 bp, Homo sapiens
caaaagcgttaggct

SEQ ID NO: 939430 - DNA, 15 bp, Homo sapiens
aaaagcgttaggctt

SEQ ID NO: 939431 - DNA, 15 bp, Homo sapiens
aaagcgttaggcttg

SEQ ID NO: 939432 - DNA, 15 bp, Homo sapiens
aagcgttaggcttgc

SEQ ID NO: 939433 - DNA, 15 bp, Homo sapiens
agcgttaggcttgcc

SEQ ID NO: 939434 - DNA, 15 bp, Homo sapiens
gcgttaggcttgcca

SEQ ID NO: 939435 - DNA, 15 bp, Homo sapiens
cgttaggcttgccaa

SEQ ID NO: 939436 - DNA, 15 bp, Homo sapiens
gttaggcttgccaag

SEQ ID NO: 939437 - DNA, 15 bp, Homo sapiens
ttaggcttgccaaga

SEQ ID NO: 939438 - DNA, 15 bp, Homo sapiens
taggcttgccaagaa

SEQ ID NO: 939439 - DNA, 15 bp, Homo sapiens
aggcttgccaagaaa

SEQ ID NO: 939440 - DNA, 15 bp, Homo sapiens
ggcttgccaagaaac

SEQ ID NO: 939441 - DNA, 15 bp, Homo sapiens
gcttgccaagaaaca

SEQ ID NO: 939442 - DNA, 15 bp, Homo sapiens
cttgccaagaaacac

SEQ ID NO: 939443 - DNA, 15 bp, Homo sapiens
ttgccaagaaacact

SEQ ID NO: 939444 - DNA, 15 bp, Homo sapiens
tgccaagaaacactt

SEQ ID NO: 939445 - DNA, 15 bp, Homo sapiens
gccaagaaacacttc

SEQ ID NO: 939446 - DNA, 15 bp, Homo sapiens
ccaagaaacacttct

SEQ ID NO: 939447 - DNA, 15 bp, Homo sapiens
caagaaacacttcta

SEQ ID NO: 939448 - DNA, 15 bp, Homo sapiens
aagaaacacttctac

SEQ ID NO: 939449 - DNA, 15 bp, Homo sapiens
agaaacacttctact

SEQ ID NO: 939450 - DNA, 15 bp, Homo sapiens
gaaacacttctactt

SEQ ID NO: 939451 - DNA, 15 bp, Homo sapiens
aaacacttctacttc

SEQ ID NO: 939452 - DNA, 15 bp, Homo sapiens
aacacttctacttcc

SEQ ID NO: 939453 - DNA, 15 bp, Homo sapiens
acacttctacttcct

SEQ ID NO: 939454 - DNA, 15 bp, Homo sapiens
cacttctacttcctt

SEQ ID NO: 939455 - DNA, 15 bp, Homo sapiens
acttctacttccttg

SEQ ID NO: 939456 - DNA, 15 bp, Homo sapiens
cttctacttccttgt

SEQ ID NO: 939457 - DNA, 15 bp, Homo sapiens
ttctacttccttgtt

SEQ ID NO: 939458 - DNA, 15 bp, Homo sapiens
tctacttccttgttc

SEQ ID NO: 939459 - DNA, 15 bp, Homo sapiens
ctacttccttgttcc

SEQ ID NO: 939460 - DNA, 15 bp, Homo sapiens
tacttccttgttccc

SEQ ID NO: 939461 - DNA, 15 bp, Homo sapiens
acttccttgttcccc

SEQ ID NO: 939462 - DNA, 15 bp, Homo sapiens
cttccttgttcccca

SEQ ID NO: 939463 - DNA, 15 bp, Homo sapiens
ttccttgttccccat

SEQ ID NO: 939464 - DNA, 15 bp, Homo sapiens
tccttgttccccatt

SEQ ID NO: 939465 - DNA, 15 bp, Homo sapiens
ccttgttccccattt

SEQ ID NO: 939466 - DNA, 15 bp, Homo sapiens
cttgttccccattta

SEQ ID NO: 939467 - DNA, 15 bp, Homo sapiens
ttgttccccatttaa

SEQ ID NO: 939468 - DNA, 15 bp, Homo sapiens
tgttccccatttaaa

SEQ ID NO: 939469 - DNA, 15 bp, Homo sapiens
gttccccatttaaac

SEQ ID NO: 939470 - DNA, 15 bp, Homo sapiens
ttccccatttaaact

SEQ ID NO: 939471 - DNA, 15 bp, Homo sapiens
tccccatttaaactt

SEQ ID NO: 939472 - DNA, 15 bp, Homo sapiens
ccccatttaaacttg

SEQ ID NO: 939473 - DNA, 15 bp, Homo sapiens
cccatttaaacttga

SEQ ID NO: 939474 - DNA, 15 bp, Homo sapiens
ccatttaaacttgaa

SEQ ID NO: 939475 - DNA, 15 bp, Homo sapiens
catttaaacttgaaa

SEQ ID NO: 939476 - DNA, 15 bp, Homo sapiens
atttaaacttgaaat

SEQ ID NO: 939477 - DNA, 15 bp, Homo sapiens
tttaaacttgaaatg

SEQ ID NO: 939478 - DNA, 15 bp, Homo sapiens
ttaaacttgaaatga

SEQ ID NO: 939479 - DNA, 15 bp, Homo sapiens
taaacttgaaatgac

SEQ ID NO: 939480 - DNA, 15 bp, Homo sapiens
aaacttgaaatgact

SEQ ID NO: 939481 - DNA, 15 bp, Homo sapiens
aacttgaaatgactt

SEQ ID NO: 939482 - DNA, 15 bp, Homo sapiens
acttgaaatgacttc

SEQ ID NO: 939483 - DNA, 15 bp, Homo sapiens
cttgaaatgacttca

SEQ ID NO: 939484 - DNA, 15 bp, Homo sapiens
ttgaaatgacttcac

SEQ ID NO: 939485 - DNA, 15 bp, Homo sapiens
tgaaatgacttcact

SEQ ID NO: 939486 - DNA, 15 bp, Homo sapiens
gaaatgacttcacta

SEQ ID NO: 939487 - DNA, 15 bp, Homo sapiens
aaatgacttcactat

SEQ ID NO: 939488 - DNA, 15 bp, Homo sapiens
aatgacttcactatc

SEQ ID NO: 939489 - DNA, 15 bp, Homo sapiens
atgacttcactatcc

SEQ ID NO: 939490 - DNA, 15 bp, Homo sapiens
tgacttcactatcct

SEQ ID NO: 939491 - DNA, 15 bp, Homo sapiens
gacttcactatcctt

SEQ ID NO: 939492 - DNA, 15 bp, Homo sapiens
acttcactatccttc

SEQ ID NO: 939493 - DNA, 15 bp, Homo sapiens
cttcactatccttct

SEQ ID NO: 939494 - DNA, 15 bp, Homo sapiens
ttcactatccttctt

SEQ ID NO: 939495 - DNA, 15 bp, Homo sapiens
tcactatccttcttt

SEQ ID NO: 939496 - DNA, 15 bp, Homo sapiens
cactatccttctttc

SEQ ID NO: 939497 - DNA, 15 bp, Homo sapiens
actatccttctttcc

SEQ ID NO: 939498 - DNA, 15 bp, Homo sapiens
ctatccttctttccc

SEQ ID NO: 939499 - DNA, 15 bp, Homo sapiens
tatccttctttcccc

SEQ ID NO: 939500 - DNA, 15 bp, Homo sapiens
atccttctttccccc

SEQ ID NO: 939501 - DNA, 15 bp, Homo sapiens
tccttctttccccct

SEQ ID NO: 939502 - DNA, 15 bp, Homo sapiens
ccttctttccccctt

SEQ ID NO: 939503 - DNA, 15 bp, Homo sapiens
cttctttcccccttt

SEQ ID NO: 939504 - DNA, 15 bp, Homo sapiens
ttctttccccctttg

SEQ ID NO: 939505 - DNA, 15 bp, Homo sapiens
tctttccccctttgt

SEQ ID NO: 939506 - DNA, 15 bp, Homo sapiens
ctttccccctttgta

SEQ ID NO: 939507 - DNA, 15 bp, Homo sapiens
tttccccctttgtaa

SEQ ID NO: 939508 - DNA, 15 bp, Homo sapiens
ttccccctttgtaat

SEQ ID NO: 939509 - DNA, 15 bp, Homo sapiens
tccccctttgtaatt

SEQ ID NO: 939510 - DNA, 15 bp, Homo sapiens
ccccctttgtaattt

SEQ ID NO: 939511 - DNA, 15 bp, Homo sapiens
cccctttgtaattta

SEQ ID NO: 939512 - DNA, 15 bp, Homo sapiens
ccctttgtaatttag

SEQ ID NO: 939513 - DNA, 15 bp, Homo sapiens
cctttgtaatttagg

SEQ ID NO: 939514 - DNA, 15 bp, Homo sapiens
ctttgtaatttagga

SEQ ID NO: 939515 - DNA, 15 bp, Homo sapiens
tttgtaatttaggat

SEQ ID NO: 939516 - DNA, 15 bp, Homo sapiens
ttgtaatttaggata

SEQ ID NO: 939517 - DNA, 15 bp, Homo sapiens
tgtaatttaggatat

SEQ ID NO: 939518 - DNA, 15 bp, Homo sapiens
gtaatttaggatatg

SEQ ID NO: 939519 - DNA, 15 bp, Homo sapiens
taatttaggatatgt

SEQ ID NO: 939520 - DNA, 15 bp, Homo sapiens
aatttaggatatgtc

SEQ ID NO: 939521 - DNA, 15 bp, Homo sapiens
atttaggatatgtcc

SEQ ID NO: 939522 - DNA, 15 bp, Homo sapiens
tttaggatatgtcca

SEQ ID NO: 939523 - DNA, 15 bp, Homo sapiens
ttaggatatgtccaa

SEQ ID NO: 939524 - DNA, 15 bp, Homo sapiens
taggatatgtccaaa

SEQ ID NO: 939525 - DNA, 15 bp, Homo sapiens
aggatatgtccaaaa

SEQ ID NO: 939526 - DNA, 15 bp, Homo sapiens
ggatatgtccaaaat

SEQ ID NO: 939527 - DNA, 15 bp, Homo sapiens
gatatgtccaaaatg

SEQ ID NO: 939528 - DNA, 15 bp, Homo sapiens
atatgtccaaaatga

SEQ ID NO: 939529 - DNA, 15 bp, Homo sapiens
tatgtccaaaatgag

SEQ ID NO: 939530 - DNA, 15 bp, Homo sapiens
atgtccaaaatgagc

SEQ ID NO: 939531 - DNA, 15 bp, Homo sapiens
tgtccaaaatgagca

SEQ ID NO: 939532 - DNA, 15 bp, Homo sapiens
gtccaaaatgagcag

SEQ ID NO: 939533 - DNA, 15 bp, Homo sapiens
tccaaaatgagcaga

SEQ ID NO: 939534 - DNA, 15 bp, Homo sapiens
ccaaaatgagcagac

SEQ ID NO: 939535 - DNA, 15 bp, Homo sapiens
caaaatgagcagaca

SEQ ID NO: 939536 - DNA, 15 bp, Homo sapiens
aaaatgagcagacag

SEQ ID NO: 939537 - DNA, 15 bp, Homo sapiens
aaatgagcagacagt

SEQ ID NO: 939538 - DNA, 15 bp, Homo sapiens
aatgagcagacagta

SEQ ID NO: 939539 - DNA, 15 bp, Homo sapiens
atgagcagacagtaa

SEQ ID NO: 939540 - DNA, 15 bp, Homo sapiens
tgagcagacagtaag

SEQ ID NO: 939541 - DNA, 15 bp, Homo sapiens
gagcagacagtaaga

SEQ ID NO: 939542 - DNA, 15 bp, Homo sapiens
agcagacagtaagaa

SEQ ID NO: 939543 - DNA, 15 bp, Homo sapiens
gcagacagtaagaac

SEQ ID NO: 939544 - DNA, 15 bp, Homo sapiens
cagacagtaagaaca

SEQ ID NO: 939545 - DNA, 15 bp, Homo sapiens
agacagtaagaacaa

SEQ ID NO: 939546 - DNA, 15 bp, Homo sapiens
gacagtaagaacaat

SEQ ID NO: 939547 - DNA, 15 bp, Homo sapiens
acagtaagaacaata

SEQ ID NO: 939548 - DNA, 15 bp, Homo sapiens
cagtaagaacaatag

SEQ ID NO: 939549 - DNA, 15 bp, Homo sapiens
agtaagaacaatagc

SEQ ID NO: 939550 - DNA, 15 bp, Homo sapiens
gtaagaacaatagct

SEQ ID NO: 939551 - DNA, 15 bp, Homo sapiens
taagaacaatagctc

SEQ ID NO: 939552 - DNA, 15 bp, Homo sapiens
aagaacaatagctct

SEQ ID NO: 939553 - DNA, 15 bp, Homo sapiens
agaacaatagctcta

SEQ ID NO: 939554 - DNA, 15 bp, Homo sapiens
gaacaatagctctaa

SEQ ID NO: 939555 - DNA, 15 bp, Homo sapiens
aacaatagctctaaa

SEQ ID NO: 939556 - DNA, 15 bp, Homo sapiens
acaatagctctaaat

SEQ ID NO: 939557 - DNA, 15 bp, Homo sapiens
caatagctctaaatt

SEQ ID NO: 939558 - DNA, 15 bp, Homo sapiens
aatagctctaaatta

SEQ ID NO: 939559 - DNA, 15 bp, Homo sapiens
atagctctaaattat

SEQ ID NO: 939560 - DNA, 15 bp, Homo sapiens
tagctctaaattata

SEQ ID NO: 939561 - DNA, 15 bp, Homo sapiens
agctctaaattatac

SEQ ID NO: 939562 - DNA, 15 bp, Homo sapiens
gctctaaattatacc

SEQ ID NO: 939563 - DNA, 15 bp, Homo sapiens
ctctaaattatacca

SEQ ID NO: 939564 - DNA, 15 bp, Homo sapiens
tctaaattataccaa

SEQ ID NO: 939565 - DNA, 15 bp, Homo sapiens
ctaaattataccaac

SEQ ID NO: 939566 - DNA, 15 bp, Homo sapiens
taaattataccaaca

SEQ ID NO: 939567 - DNA, 15 bp, Homo sapiens
aaattataccaacag

SEQ ID NO: 939568 - DNA, 15 bp, Homo sapiens
aattataccaacagt

SEQ ID NO: 939569 - DNA, 15 bp, Homo sapiens
attataccaacagtt

SEQ ID NO: 939570 - DNA, 15 bp, Homo sapiens
ttataccaacagttt

SEQ ID NO: 939571 - DNA, 15 bp, Homo sapiens
tataccaacagttta

SEQ ID NO: 939572 - DNA, 15 bp, Homo sapiens
ataccaacagtttaa

SEQ ID NO: 939573 - DNA, 15 bp, Homo sapiens
taccaacagtttaaa

SEQ ID NO: 939574 - DNA, 15 bp, Homo sapiens
accaacagtttaaat

SEQ ID NO: 939575 - DNA, 15 bp, Homo sapiens
ccaacagtttaaata

SEQ ID NO: 939576 - DNA, 15 bp, Homo sapiens
caacagtttaaatac

SEQ ID NO: 939577 - DNA, 15 bp, Homo sapiens
aacagtttaaatacc

SEQ ID NO: 939578 - DNA, 15 bp, Homo sapiens
acagtttaaatacca

SEQ ID NO: 939579 - DNA, 15 bp, Homo sapiens
cagtttaaataccat

SEQ ID NO: 939580 - DNA, 15 bp, Homo sapiens
agtttaaataccatt

SEQ ID NO: 939581 - DNA, 15 bp, Homo sapiens
gtttaaataccattt

SEQ ID NO: 939582 - DNA, 15 bp, Homo sapiens
tttaaataccatttt

SEQ ID NO: 939583 - DNA, 15 bp, Homo sapiens
ttaaataccatttta

SEQ ID NO: 939584 - DNA, 15 bp, Homo sapiens
taaataccattttaa

SEQ ID NO: 939585 - DNA, 15 bp, Homo sapiens
aaataccattttaac

SEQ ID NO: 939586 - DNA, 15 bp, Homo sapiens
aataccattttaaca

SEQ ID NO: 939587 - DNA, 15 bp, Homo sapiens
ataccattttaacac

SEQ ID NO: 939588 - DNA, 15 bp, Homo sapiens
taccattttaacact

SEQ ID NO: 939589 - DNA, 15 bp, Homo sapiens
accattttaacactt

SEQ ID NO: 939590 - DNA, 15 bp, Homo sapiens
ccattttaacactta

SEQ ID NO: 939591 - DNA, 15 bp, Homo sapiens
cattttaacacttag

SEQ ID NO: 939592 - DNA, 15 bp, Homo sapiens
attttaacacttagt

SEQ ID NO: 939593 - DNA, 15 bp, Homo sapiens
ttttaacacttagtg

SEQ ID NO: 939594 - DNA, 15 bp, Homo sapiens
tttaacacttagtgc

SEQ ID NO: 939595 - DNA, 15 bp, Homo sapiens
ttaacacttagtgca

SEQ ID NO: 939596 - DNA, 15 bp, Homo sapiens
taacacttagtgcaa

SEQ ID NO: 939597 - DNA, 15 bp, Homo sapiens
aacacttagtgcaat

SEQ ID NO: 939598 - DNA, 15 bp, Homo sapiens
acacttagtgcaatt

SEQ ID NO: 939599 - DNA, 15 bp, Homo sapiens
cacttagtgcaattt

SEQ ID NO: 939600 - DNA, 15 bp, Homo sapiens
acttagtgcaatttt

SEQ ID NO: 939601 - DNA, 15 bp, Homo sapiens
cttagtgcaatttta

SEQ ID NO: 939602 - DNA, 15 bp, Homo sapiens
ttagtgcaattttaa

SEQ ID NO: 939603 - DNA, 15 bp, Homo sapiens
tagtgcaattttaaa

SEQ ID NO: 939604 - DNA, 15 bp, Homo sapiens
agtgcaattttaaat

SEQ ID NO: 939605 - DNA, 15 bp, Homo sapiens
gtgcaattttaaatg

SEQ ID NO: 939606 - DNA, 15 bp, Homo sapiens
tgcaattttaaatgt

SEQ ID NO: 939607 - DNA, 15 bp, Homo sapiens
gcaattttaaatgtt

SEQ ID NO: 939608 - DNA, 15 bp, Homo sapiens
caattttaaatgttg

SEQ ID NO: 939609 - DNA, 15 bp, Homo sapiens
aattttaaatgttgt

SEQ ID NO: 939610 - DNA, 15 bp, Homo sapiens
attttaaatgttgtg

SEQ ID NO: 939611 - DNA, 15 bp, Homo sapiens
ttttaaatgttgtgc

SEQ ID NO: 939612 - DNA, 15 bp, Homo sapiens
tttaaatgttgtgca

SEQ ID NO: 939613 - DNA, 15 bp, Homo sapiens
ttaaatgttgtgcat

SEQ ID NO: 939614 - DNA, 15 bp, Homo sapiens
taaatgttgtgcatt

SEQ ID NO: 939615 - DNA, 15 bp, Homo sapiens
aaatgttgtgcattc

SEQ ID NO: 939616 - DNA, 15 bp, Homo sapiens
aatgttgtgcattcc

SEQ ID NO: 939617 - DNA, 15 bp, Homo sapiens
atgttgtgcattcct

SEQ ID NO: 939618 - DNA, 15 bp, Homo sapiens
tgttgtgcattcctt

SEQ ID NO: 939619 - DNA, 15 bp, Homo sapiens
gttgtgcattccttc

SEQ ID NO: 939620 - DNA, 15 bp, Homo sapiens
ttgtgcattccttct

SEQ ID NO: 939621 - DNA, 15 bp, Homo sapiens
tgtgcattccttcta

SEQ ID NO: 939622 - DNA, 15 bp, Homo sapiens
gtgcattccttctac

SEQ ID NO: 939623 - DNA, 15 bp, Homo sapiens
tgcattccttctacc

SEQ ID NO: 939624 - DNA, 15 bp, Homo sapiens
gcattccttctacct

SEQ ID NO: 939625 - DNA, 15 bp, Homo sapiens
cattccttctaccta

SEQ ID NO: 939626 - DNA, 15 bp, Homo sapiens
attccttctacctag

SEQ ID NO: 939627 - DNA, 15 bp, Homo sapiens
ttccttctacctagc

SEQ ID NO: 939628 - DNA, 15 bp, Homo sapiens
tccttctacctagca

SEQ ID NO: 939629 - DNA, 15 bp, Homo sapiens
ccttctacctagcat

SEQ ID NO: 939630 - DNA, 15 bp, Homo sapiens
cttctacctagcatc

SEQ ID NO: 939631 - DNA, 15 bp, Homo sapiens
ttctacctagcatct

SEQ ID NO: 939632 - DNA, 15 bp, Homo sapiens
tctacctagcatctc

SEQ ID NO: 939633 - DNA, 15 bp, Homo sapiens
ctacctagcatctca

SEQ ID NO: 939634 - DNA, 15 bp, Homo sapiens
tacctagcatctcag

SEQ ID NO: 939635 - DNA, 15 bp, Homo sapiens
acctagcatctcagt

SEQ ID NO: 939636 - DNA, 15 bp, Homo sapiens
cctagcatctcagta

SEQ ID NO: 939637 - DNA, 15 bp, Homo sapiens
ctagcatctcagtat

SEQ ID NO: 939638 - DNA, 15 bp, Homo sapiens
tagcatctcagtatt

SEQ ID NO: 939639 - DNA, 15 bp, Homo sapiens
agcatctcagtattt

SEQ ID NO: 939640 - DNA, 15 bp, Homo sapiens
gcatctcagtatttt

SEQ ID NO: 939641 - DNA, 15 bp, Homo sapiens
catctcagtattttc

SEQ ID NO: 939642 - DNA, 15 bp, Homo sapiens
atctcagtattttcc

SEQ ID NO: 939643 - DNA, 15 bp, Homo sapiens
tctcagtattttcct

SEQ ID NO: 939644 - DNA, 15 bp, Homo sapiens
ctcagtattttcctt

SEQ ID NO: 939645 - DNA, 15 bp, Homo sapiens
tcagtattttccttg

SEQ ID NO: 939646 - DNA, 15 bp, Homo sapiens
cagtattttccttgt

SEQ ID NO: 939647 - DNA, 15 bp, Homo sapiens
agtattttccttgtt

SEQ ID NO: 939648 - DNA, 15 bp, Homo sapiens
gtattttccttgttc

SEQ ID NO: 939649 - DNA, 15 bp, Homo sapiens
tattttccttgttcc

SEQ ID NO: 939650 - DNA, 15 bp, Homo sapiens
attttccttgttcct

SEQ ID NO: 939651 - DNA, 15 bp, Homo sapiens
ttttccttgttcctt

SEQ ID NO: 939652 - DNA, 15 bp, Homo sapiens
tttccttgttccttt

SEQ ID NO: 939653 - DNA, 15 bp, Homo sapiens
ttccttgttcctttg

SEQ ID NO: 939654 - DNA, 15 bp, Homo sapiens
tccttgttcctttga

SEQ ID NO: 939655 - DNA, 15 bp, Homo sapiens
ccttgttcctttgac

SEQ ID NO: 939656 - DNA, 15 bp, Homo sapiens
cttgttcctttgacc

SEQ ID NO: 939657 - DNA, 15 bp, Homo sapiens
ttgttcctttgacct

SEQ ID NO: 939658 - DNA, 15 bp, Homo sapiens
tgttcctttgacctt

SEQ ID NO: 939659 - DNA, 15 bp, Homo sapiens
gttcctttgacctta

SEQ ID NO: 939660 - DNA, 15 bp, Homo sapiens
ttcctttgaccttag

SEQ ID NO: 939661 - DNA, 15 bp, Homo sapiens
tcctttgaccttagt

SEQ ID NO: 939662 - DNA, 15 bp, Homo sapiens
cctttgaccttagtt

SEQ ID NO: 939663 - DNA, 15 bp, Homo sapiens
ctttgaccttagttt

SEQ ID NO: 939664 - DNA, 15 bp, Homo sapiens
tttgaccttagtttt

SEQ ID NO: 939665 - DNA, 15 bp, Homo sapiens
ttgaccttagttttg

SEQ ID NO: 939666 - DNA, 15 bp, Homo sapiens
tgaccttagttttga

SEQ ID NO: 939667 - DNA, 15 bp, Homo sapiens
gaccttagttttgac

SEQ ID NO: 939668 - DNA, 15 bp, Homo sapiens
accttagttttgact

SEQ ID NO: 939669 - DNA, 15 bp, Homo sapiens
ccttagttttgacta

SEQ ID NO: 939670 - DNA, 15 bp, Homo sapiens
cttagttttgactag

SEQ ID NO: 939671 - DNA, 15 bp, Homo sapiens
ttagttttgactaga

SEQ ID NO: 939672 - DNA, 15 bp, Homo sapiens
tagttttgactagaa

SEQ ID NO: 939673 - DNA, 15 bp, Homo sapiens
agttttgactagaag

SEQ ID NO: 939674 - DNA, 15 bp, Homo sapiens
gttttgactagaagc

SEQ ID NO: 939675 - DNA, 15 bp, Homo sapiens
ttttgactagaagct

SEQ ID NO: 939676 - DNA, 15 bp, Homo sapiens
tttgactagaagctc

SEQ ID NO: 939677 - DNA, 15 bp, Homo sapiens
ttgactagaagctct

SEQ ID NO: 939678 - DNA, 15 bp, Homo sapiens
tgactagaagctctt

SEQ ID NO: 939679 - DNA, 15 bp, Homo sapiens
gactagaagctcttc

SEQ ID NO: 939680 - DNA, 15 bp, Homo sapiens
actagaagctcttct

SEQ ID NO: 939681 - DNA, 15 bp, Homo sapiens
ctagaagctcttctg

SEQ ID NO: 939682 - DNA, 15 bp, Homo sapiens
tagaagctcttctgt

SEQ ID NO: 939683 - DNA, 15 bp, Homo sapiens
agaagctcttctgtg

SEQ ID NO: 939684 - DNA, 15 bp, Homo sapiens
gaagctcttctgtga

SEQ ID NO: 939685 - DNA, 15 bp, Homo sapiens
aagctcttctgtgag

SEQ ID NO: 939686 - DNA, 15 bp, Homo sapiens
agctcttctgtgagg

SEQ ID NO: 939687 - DNA, 15 bp, Homo sapiens
gctcttctgtgaggt

SEQ ID NO: 939688 - DNA, 15 bp, Homo sapiens
ctcttctgtgaggtt

SEQ ID NO: 939689 - DNA, 15 bp, Homo sapiens
tcttctgtgaggttg

SEQ ID NO: 939690 - DNA, 15 bp, Homo sapiens
cttctgtgaggttgc

SEQ ID NO: 939691 - DNA, 15 bp, Homo sapiens
ttctgtgaggttgca

SEQ ID NO: 939692 - DNA, 15 bp, Homo sapiens
tctgtgaggttgcaa

SEQ ID NO: 939693 - DNA, 15 bp, Homo sapiens
ctgtgaggttgcaaa

SEQ ID NO: 939694 - DNA, 15 bp, Homo sapiens
tgtgaggttgcaaaa

SEQ ID NO: 939695 - DNA, 15 bp, Homo sapiens
gtgaggttgcaaaag

SEQ ID NO: 939696 - DNA, 15 bp, Homo sapiens
tgaggttgcaaaaga

SEQ ID NO: 939697 - DNA, 15 bp, Homo sapiens
gaggttgcaaaagag

SEQ ID NO: 939698 - DNA, 15 bp, Homo sapiens
aggttgcaaaagagt

SEQ ID NO: 939699 - DNA, 15 bp, Homo sapiens
ggttgcaaaagagtt

SEQ ID NO: 939700 - DNA, 15 bp, Homo sapiens
gttgcaaaagagttc

SEQ ID NO: 939701 - DNA, 15 bp, Homo sapiens
ttgcaaaagagttca

SEQ ID NO: 939702 - DNA, 15 bp, Homo sapiens
tgcaaaagagttcaa

SEQ ID NO: 939703 - DNA, 15 bp, Homo sapiens
gcaaaagagttcaac

SEQ ID NO: 939704 - DNA, 15 bp, Homo sapiens
caaaagagttcaact

SEQ ID NO: 939705 - DNA, 15 bp, Homo sapiens
aaaagagttcaactt

SEQ ID NO: 939706 - DNA, 15 bp, Homo sapiens
aaagagttcaacttc

SEQ ID NO: 939707 - DNA, 15 bp, Homo sapiens
aagagttcaacttct

SEQ ID NO: 939708 - DNA, 15 bp, Homo sapiens
agagttcaacttctg

SEQ ID NO: 939709 - DNA, 15 bp, Homo sapiens
gagttcaacttctgg

SEQ ID NO: 939710 - DNA, 15 bp, Homo sapiens
agttcaacttctgga

SEQ ID NO: 939711 - DNA, 15 bp, Homo sapiens
gttcaacttctggag

SEQ ID NO: 939712 - DNA, 15 bp, Homo sapiens
ttcaacttctggagg

SEQ ID NO: 939713 - DNA, 15 bp, Homo sapiens
tcaacttctggaggt

SEQ ID NO: 939714 - DNA, 15 bp, Homo sapiens
caacttctggaggtt

SEQ ID NO: 939715 - DNA, 15 bp, Homo sapiens
aacttctggaggtta

SEQ ID NO: 939716 - DNA, 15 bp, Homo sapiens
acttctggaggttac

SEQ ID NO: 939717 - DNA, 15 bp, Homo sapiens
cttctggaggttacc

SEQ ID NO: 939718 - DNA, 15 bp, Homo sapiens
ttctggaggttacca

SEQ ID NO: 939719 - DNA, 15 bp, Homo sapiens
tctggaggttaccaa

SEQ ID NO: 939720 - DNA, 15 bp, Homo sapiens
ctggaggttaccaag

SEQ ID NO: 939721 - DNA, 15 bp, Homo sapiens
tggaggttaccaagc

SEQ ID NO: 939722 - DNA, 15 bp, Homo sapiens
ggaggttaccaagcc

SEQ ID NO: 939723 - DNA, 15 bp, Homo sapiens
gaggttaccaagcct

SEQ ID NO: 939724 - DNA, 15 bp, Homo sapiens
aggttaccaagcctc

SEQ ID NO: 939725 - DNA, 15 bp, Homo sapiens
ggttaccaagcctcc

SEQ ID NO: 939726 - DNA, 15 bp, Homo sapiens
gttaccaagcctccc

SEQ ID NO: 939727 - DNA, 15 bp, Homo sapiens
ttaccaagcctccca

SEQ ID NO: 939728 - DNA, 15 bp, Homo sapiens
taccaagcctcccag

SEQ ID NO: 939729 - DNA, 15 bp, Homo sapiens
accaagcctcccaga

SEQ ID NO: 939730 - DNA, 15 bp, Homo sapiens
ccaagcctcccagaa

SEQ ID NO: 939731 - DNA, 15 bp, Homo sapiens
caagcctcccagaac

SEQ ID NO: 939732 - DNA, 15 bp, Homo sapiens
aagcctcccagaacc

SEQ ID NO: 939733 - DNA, 15 bp, Homo sapiens
agcctcccagaacca

SEQ ID NO: 939734 - DNA, 15 bp, Homo sapiens
gcctcccagaaccat

SEQ ID NO: 939735 - DNA, 15 bp, Homo sapiens
cctcccagaaccatc

SEQ ID NO: 939736 - DNA, 15 bp, Homo sapiens
ctcccagaaccatct

SEQ ID NO: 939737 - DNA, 15 bp, Homo sapiens
tcccagaaccatctt

SEQ ID NO: 939738 - DNA, 15 bp, Homo sapiens
cccagaaccatcttt

SEQ ID NO: 939739 - DNA, 15 bp, Homo sapiens
ccagaaccatcttta

SEQ ID NO: 939740 - DNA, 15 bp, Homo sapiens
cagaaccatctttac

SEQ ID NO: 939741 - DNA, 15 bp, Homo sapiens
agaaccatctttaca

SEQ ID NO: 939742 - DNA, 15 bp, Homo sapiens
gaaccatctttacac

SEQ ID NO: 939743 - DNA, 15 bp, Homo sapiens
aaccatctttacaca

SEQ ID NO: 939744 - DNA, 15 bp, Homo sapiens
accatctttacacaa

SEQ ID NO: 939745 - DNA, 15 bp, Homo sapiens
ccatctttacacaaa

SEQ ID NO: 939746 - DNA, 15 bp, Homo sapiens
catctttacacaaat

SEQ ID NO: 939747 - DNA, 15 bp, Homo sapiens
atctttacacaaatg

SEQ ID NO: 939748 - DNA, 15 bp, Homo sapiens
tctttacacaaatgc

SEQ ID NO: 939749 - DNA, 15 bp, Homo sapiens
ctttacacaaatgca

SEQ ID NO: 939750 - DNA, 15 bp, Homo sapiens
tttacacaaatgcag

SEQ ID NO: 939751 - DNA, 15 bp, Homo sapiens
ttacacaaatgcagg

SEQ ID NO: 939752 - DNA, 15 bp, Homo sapiens
tacacaaatgcaggt

SEQ ID NO: 939753 - DNA, 15 bp, Homo sapiens
acacaaatgcaggta

SEQ ID NO: 939754 - DNA, 15 bp, Homo sapiens
cacaaatgcaggtat

SEQ ID NO: 939755 - DNA, 15 bp, Homo sapiens
acaaatgcaggtata

SEQ ID NO: 939756 - DNA, 15 bp, Homo sapiens
caaatgcaggtatag

SEQ ID NO: 939757 - DNA, 15 bp, Homo sapiens
aaatgcaggtataga

SEQ ID NO: 939758 - DNA, 15 bp, Homo sapiens
aatgcaggtatagat

SEQ ID NO: 939759 - DNA, 15 bp, Homo sapiens
atgcaggtatagatc

SEQ ID NO: 939760 - DNA, 15 bp, Homo sapiens
tgcaggtatagatct

SEQ ID NO: 939761 - DNA, 15 bp, Homo sapiens
gcaggtatagatctg

SEQ ID NO: 939762 - DNA, 15 bp, Homo sapiens
caggtatagatctgc

SEQ ID NO: 939763 - DNA, 15 bp, Homo sapiens
aggtatagatctgct

SEQ ID NO: 939764 - DNA, 15 bp, Homo sapiens
ggtatagatctgcta

SEQ ID NO: 939765 - DNA, 15 bp, Homo sapiens
gtatagatctgctat

SEQ ID NO: 939766 - DNA, 15 bp, Homo sapiens
tatagatctgctatc

SEQ ID NO: 939767 - DNA, 15 bp, Homo sapiens
atagatctgctatca

SEQ ID NO: 939768 - DNA, 15 bp, Homo sapiens
tagatctgctatcag

SEQ ID NO: 939769 - DNA, 15 bp, Homo sapiens
agatctgctatcaga

SEQ ID NO: 939770 - DNA, 15 bp, Homo sapiens
gatctgctatcagaa

SEQ ID NO: 939771 - DNA, 15 bp, Homo sapiens
atctgctatcagaaa

SEQ ID NO: 939772 - DNA, 15 bp, Homo sapiens
tctgctatcagaaac

SEQ ID NO: 939773 - DNA, 15 bp, Homo sapiens
ctgctatcagaaaca

SEQ ID NO: 939774 - DNA, 15 bp, Homo sapiens
tgctatcagaaacag

SEQ ID NO: 939775 - DNA, 15 bp, Homo sapiens
gctatcagaaacaga

SEQ ID NO: 939776 - DNA, 15 bp, Homo sapiens
ctatcagaaacagat

SEQ ID NO: 939777 - DNA, 15 bp, Homo sapiens
tatcagaaacagatt

SEQ ID NO: 939778 - DNA, 15 bp, Homo sapiens
atcagaaacagattc

SEQ ID NO: 939779 - DNA, 15 bp, Homo sapiens
tcagaaacagattca

SEQ ID NO: 939780 - DNA, 15 bp, Homo sapiens
cagaaacagattcac

SEQ ID NO: 939781 - DNA, 15 bp, Homo sapiens
agaaacagattcact

SEQ ID NO: 939782 - DNA, 15 bp, Homo sapiens
gaaacagattcactt

SEQ ID NO: 939783 - DNA, 15 bp, Homo sapiens
aaacagattcacttt

SEQ ID NO: 939784 - DNA, 15 bp, Homo sapiens
aacagattcactttc

SEQ ID NO: 939785 - DNA, 15 bp, Homo sapiens
acagattcactttct

SEQ ID NO: 939786 - DNA, 15 bp, Homo sapiens
cagattcactttctt

SEQ ID NO: 939787 - DNA, 15 bp, Homo sapiens
agattcactttcttt

SEQ ID NO: 939788 - DNA, 15 bp, Homo sapiens
gattcactttcttta

SEQ ID NO: 939789 - DNA, 15 bp, Homo sapiens
attcactttctttat

SEQ ID NO: 939790 - DNA, 15 bp, Homo sapiens
ttcactttctttatg

SEQ ID NO: 939791 - DNA, 15 bp, Homo sapiens
tcactttctttatgc

SEQ ID NO: 939792 - DNA, 15 bp, Homo sapiens
cactttctttatgcc

SEQ ID NO: 939793 - DNA, 15 bp, Homo sapiens
actttctttatgcca

SEQ ID NO: 939794 - DNA, 15 bp, Homo sapiens
ctttctttatgccac

SEQ ID NO: 939795 - DNA, 15 bp, Homo sapiens
tttctttatgccaca

SEQ ID NO: 939796 - DNA, 15 bp, Homo sapiens
ttctttatgccacat

SEQ ID NO: 939797 - DNA, 15 bp, Homo sapiens
tctttatgccacatg

SEQ ID NO: 939798 - DNA, 15 bp, Homo sapiens
ctttatgccacatga

SEQ ID NO: 939799 - DNA, 15 bp, Homo sapiens
tttatgccacatgat

SEQ ID NO: 939800 - DNA, 15 bp, Homo sapiens
ttatgccacatgata

SEQ ID NO: 939801 - DNA, 15 bp, Homo sapiens
tatgccacatgatat

SEQ ID NO: 939802 - DNA, 15 bp, Homo sapiens
atgccacatgatatt

SEQ ID NO: 939803 - DNA, 15 bp, Homo sapiens
tgccacatgatatta

SEQ ID NO: 939804 - DNA, 15 bp, Homo sapiens
gccacatgatattaa

SEQ ID NO: 939805 - DNA, 15 bp, Homo sapiens
ccacatgatattaat

SEQ ID NO: 939806 - DNA, 15 bp, Homo sapiens
cacatgatattaata

SEQ ID NO: 939807 - DNA, 15 bp, Homo sapiens
acatgatattaatat

SEQ ID NO: 939808 - DNA, 15 bp, Homo sapiens
catgatattaatatc

SEQ ID NO: 939809 - DNA, 15 bp, Homo sapiens
atgatattaatatcc

SEQ ID NO: 939810 - DNA, 15 bp, Homo sapiens
tgatattaatatcct

SEQ ID NO: 939811 - DNA, 15 bp, Homo sapiens
gatattaatatccta

SEQ ID NO: 939812 - DNA, 15 bp, Homo sapiens
atattaatatcctaa

SEQ ID NO: 939813 - DNA, 15 bp, Homo sapiens
tattaatatcctaat

SEQ ID NO: 939814 - DNA, 15 bp, Homo sapiens
attaatatcctaatt

SEQ ID NO: 939815 - DNA, 15 bp, Homo sapiens
ttaatatcctaattc

SEQ ID NO: 939816 - DNA, 15 bp, Homo sapiens
taatatcctaattcc

SEQ ID NO: 939817 - DNA, 15 bp, Homo sapiens
aatatcctaattcca

SEQ ID NO: 939818 - DNA, 15 bp, Homo sapiens
atatcctaattccag

SEQ ID NO: 939819 - DNA, 15 bp, Homo sapiens
tatcctaattccaga

SEQ ID NO: 939820 - DNA, 15 bp, Homo sapiens
atcctaattccagaa

SEQ ID NO: 939821 - DNA, 15 bp, Homo sapiens
tcctaattccagaaa

SEQ ID NO: 939822 - DNA, 15 bp, Homo sapiens
cctaattccagaaat

SEQ ID NO: 939823 - DNA, 15 bp, Homo sapiens
ctaattccagaaatg

SEQ ID NO: 939824 - DNA, 15 bp, Homo sapiens
taattccagaaatgc

SEQ ID NO: 939825 - DNA, 15 bp, Homo sapiens
aattccagaaatgca

SEQ ID NO: 939826 - DNA, 15 bp, Homo sapiens
attccagaaatgcat

SEQ ID NO: 939827 - DNA, 15 bp, Homo sapiens
ttccagaaatgcatc

SEQ ID NO: 939828 - DNA, 15 bp, Homo sapiens
tccagaaatgcatct

SEQ ID NO: 939829 - DNA, 15 bp, Homo sapiens
ccagaaatgcatcta

SEQ ID NO: 939830 - DNA, 15 bp, Homo sapiens
cagaaatgcatctaa

SEQ ID NO: 939831 - DNA, 15 bp, Homo sapiens
agaaatgcatctaaa

SEQ ID NO: 939832 - DNA, 15 bp, Homo sapiens
gaaatgcatctaaag

SEQ ID NO: 939833 - DNA, 15 bp, Homo sapiens
aaatgcatctaaagt

SEQ ID NO: 939834 - DNA, 15 bp, Homo sapiens
aatgcatctaaagtt

SEQ ID NO: 939835 - DNA, 15 bp, Homo sapiens
atgcatctaaagttc

SEQ ID NO: 939836 - DNA, 15 bp, Homo sapiens
tgcatctaaagttca

SEQ ID NO: 939837 - DNA, 15 bp, Homo sapiens
gcatctaaagttcaa

SEQ ID NO: 939838 - DNA, 15 bp, Homo sapiens
catctaaagttcaag

SEQ ID NO: 939839 - DNA, 15 bp, Homo sapiens
atctaaagttcaagg

SEQ ID NO: 939840 - DNA, 15 bp, Homo sapiens
tctaaagttcaagga

SEQ ID NO: 939841 - DNA, 15 bp, Homo sapiens
ctaaagttcaaggac

SEQ ID NO: 939842 - DNA, 15 bp, Homo sapiens
taaagttcaaggaca

SEQ ID NO: 939843 - DNA, 15 bp, Homo sapiens
aaagttcaaggacat

SEQ ID NO: 939844 - DNA, 15 bp, Homo sapiens
aagttcaaggacata

SEQ ID NO: 939845 - DNA, 15 bp, Homo sapiens
agttcaaggacatat

SEQ ID NO: 939846 - DNA, 15 bp, Homo sapiens
gttcaaggacatatt

SEQ ID NO: 939847 - DNA, 15 bp, Homo sapiens
ttcaaggacatattg

SEQ ID NO: 939848 - DNA, 15 bp, Homo sapiens
tcaaggacatattgt

SEQ ID NO: 939849 - DNA, 15 bp, Homo sapiens
caaggacatattgta

SEQ ID NO: 939850 - DNA, 15 bp, Homo sapiens
aaggacatattgtag

SEQ ID NO: 939851 - DNA, 15 bp, Homo sapiens
aggacatattgtagc

SEQ ID NO: 939852 - DNA, 15 bp, Homo sapiens
ggacatattgtagca

SEQ ID NO: 939853 - DNA, 15 bp, Homo sapiens
gacatattgtagcat

SEQ ID NO: 939854 - DNA, 15 bp, Homo sapiens
acatattgtagcatc

SEQ ID NO: 939855 - DNA, 15 bp, Homo sapiens
catattgtagcatct

SEQ ID NO: 939856 - DNA, 15 bp, Homo sapiens
atattgtagcatctt

SEQ ID NO: 939857 - DNA, 15 bp, Homo sapiens
tattgtagcatcttg

SEQ ID NO: 939858 - DNA, 15 bp, Homo sapiens
attgtagcatcttga

SEQ ID NO: 939859 - DNA, 15 bp, Homo sapiens
ttgtagcatcttgac

SEQ ID NO: 939860 - DNA, 15 bp, Homo sapiens
tgtagcatcttgact

SEQ ID NO: 939861 - DNA, 15 bp, Homo sapiens
gtagcatcttgactt

SEQ ID NO: 939862 - DNA, 15 bp, Homo sapiens
tagcatcttgacttt

SEQ ID NO: 939863 - DNA, 15 bp, Homo sapiens
agcatcttgactttc

SEQ ID NO: 939864 - DNA, 15 bp, Homo sapiens
gcatcttgactttct

SEQ ID NO: 939865 - DNA, 15 bp, Homo sapiens
catcttgactttctg

SEQ ID NO: 939866 - DNA, 15 bp, Homo sapiens
atcttgactttctgg

SEQ ID NO: 939867 - DNA, 15 bp, Homo sapiens
tcttgactttctgga

SEQ ID NO: 939868 - DNA, 15 bp, Homo sapiens
cttgactttctggac

SEQ ID NO: 939869 - DNA, 15 bp, Homo sapiens
ttgactttctggacc

SEQ ID NO: 939870 - DNA, 15 bp, Homo sapiens
tgactttctggacca

SEQ ID NO: 939871 - DNA, 15 bp, Homo sapiens
gactttctggaccaa

SEQ ID NO: 939872 - DNA, 15 bp, Homo sapiens
actttctggaccaag

SEQ ID NO: 939873 - DNA, 15 bp, Homo sapiens
ctttctggaccaaga

SEQ ID NO: 939874 - DNA, 15 bp, Homo sapiens
tttctggaccaagaa

SEQ ID NO: 939875 - DNA, 15 bp, Homo sapiens
ttctggaccaagaac

SEQ ID NO: 939876 - DNA, 15 bp, Homo sapiens
tctggaccaagaact

SEQ ID NO: 939877 - DNA, 15 bp, Homo sapiens
ctggaccaagaacta

SEQ ID NO: 939878 - DNA, 15 bp, Homo sapiens
tggaccaagaactaa

SEQ ID NO: 939879 - DNA, 15 bp, Homo sapiens
ggaccaagaactaat

SEQ ID NO: 939880 - DNA, 15 bp, Homo sapiens
gaccaagaactaata

SEQ ID NO: 939881 - DNA, 15 bp, Homo sapiens
accaagaactaatat

SEQ ID NO: 939882 - DNA, 15 bp, Homo sapiens
ccaagaactaatata

SEQ ID NO: 939883 - DNA, 15 bp, Homo sapiens
caagaactaatatat

SEQ ID NO: 939884 - DNA, 15 bp, Homo sapiens
aagaactaatatatg

SEQ ID NO: 939885 - DNA, 15 bp, Homo sapiens
agaactaatatatga

SEQ ID NO: 939886 - DNA, 15 bp, Homo sapiens
gaactaatatatgat

SEQ ID NO: 939887 - DNA, 15 bp, Homo sapiens
aactaatatatgatt

SEQ ID NO: 939888 - DNA, 15 bp, Homo sapiens
actaatatatgattc

SEQ ID NO: 939889 - DNA, 15 bp, Homo sapiens
ctaatatatgattca

SEQ ID NO: 939890 - DNA, 15 bp, Homo sapiens
taatatatgattcat

SEQ ID NO: 939891 - DNA, 15 bp, Homo sapiens
aatatatgattcata

SEQ ID NO: 939892 - DNA, 15 bp, Homo sapiens
atatatgattcatac

SEQ ID NO: 939893 - DNA, 15 bp, Homo sapiens
tatatgattcataca

SEQ ID NO: 939894 - DNA, 15 bp, Homo sapiens
atatgattcatacaa

SEQ ID NO: 939895 - DNA, 15 bp, Homo sapiens
tatgattcatacaaa

SEQ ID NO: 939896 - DNA, 15 bp, Homo sapiens
atgattcatacaaaa

SEQ ID NO: 939897 - DNA, 15 bp, Homo sapiens
tgattcatacaaaaa

SEQ ID NO: 939898 - DNA, 15 bp, Homo sapiens
gattcatacaaaaat

SEQ ID NO: 939899 - DNA, 15 bp, Homo sapiens
attcatacaaaaata

SEQ ID NO: 939900 - DNA, 15 bp, Homo sapiens
ttcatacaaaaataa

SEQ ID NO: 939901 - DNA, 15 bp, Homo sapiens
tcatacaaaaataag

SEQ ID NO: 939902 - DNA, 15 bp, Homo sapiens
catacaaaaataaga

SEQ ID NO: 939903 - DNA, 15 bp, Homo sapiens
atacaaaaataagaa

SEQ ID NO: 939904 - DNA, 15 bp, Homo sapiens
tacaaaaataagaat

SEQ ID NO: 939905 - DNA, 15 bp, Homo sapiens
acaaaaataagaatg

SEQ ID NO: 939906 - DNA, 15 bp, Homo sapiens
caaaaataagaatgc

SEQ ID NO: 939907 - DNA, 15 bp, Homo sapiens
aaaaataagaatgct

SEQ ID NO: 939908 - DNA, 15 bp, Homo sapiens
aaaataagaatgcta

SEQ ID NO: 939909 - DNA, 15 bp, Homo sapiens
aaataagaatgctat

SEQ ID NO: 939910 - DNA, 15 bp, Homo sapiens
aataagaatgctatt

SEQ ID NO: 939911 - DNA, 15 bp, Homo sapiens
ataagaatgctatta

SEQ ID NO: 939912 - DNA, 15 bp, Homo sapiens
taagaatgctattaa

SEQ ID NO: 939913 - DNA, 15 bp, Homo sapiens
aagaatgctattaaa

SEQ ID NO: 939914 - DNA, 15 bp, Homo sapiens
agaatgctattaaaa

SEQ ID NO: 939915 - DNA, 15 bp, Homo sapiens
gaatgctattaaaaa

SEQ ID NO: 939916 - DNA, 15 bp, Homo sapiens
aatgctattaaaaac

SEQ ID NO: 939917 - DNA, 15 bp, Homo sapiens
atgctattaaaaact

SEQ ID NO: 939918 - DNA, 15 bp, Homo sapiens
tgctattaaaaactg

SEQ ID NO: 939919 - DNA, 15 bp, Homo sapiens
gctattaaaaactgt

SEQ ID NO: 939920 - DNA, 15 bp, Homo sapiens
ctattaaaaactgtc

SEQ ID NO: 939921 - DNA, 15 bp, Homo sapiens
tattaaaaactgtct

SEQ ID NO: 939922 - DNA, 15 bp, Homo sapiens
attaaaaactgtcta

SEQ ID NO: 939923 - DNA, 15 bp, Homo sapiens
ttaaaaactgtctac

SEQ ID NO: 939924 - DNA, 15 bp, Homo sapiens
taaaaactgtctaca

SEQ ID NO: 939925 - DNA, 15 bp, Homo sapiens
aaaaactgtctacag

SEQ ID NO: 939926 - DNA, 15 bp, Homo sapiens
aaaactgtctacagt

SEQ ID NO: 939927 - DNA, 15 bp, Homo sapiens
aaactgtctacagtc

SEQ ID NO: 939928 - DNA, 15 bp, Homo sapiens
aactgtctacagtct

SEQ ID NO: 939929 - DNA, 15 bp, Homo sapiens
actgtctacagtcta

SEQ ID NO: 939930 - DNA, 15 bp, Homo sapiens
ctgtctacagtctac

SEQ ID NO: 939931 - DNA, 15 bp, Homo sapiens
tgtctacagtctacc

SEQ ID NO: 939932 - DNA, 15 bp, Homo sapiens
gtctacagtctacca

SEQ ID NO: 939933 - DNA, 15 bp, Homo sapiens
tctacagtctaccag

SEQ ID NO: 939934 - DNA, 15 bp, Homo sapiens
ctacagtctaccagt

SEQ ID NO: 939935 - DNA, 15 bp, Homo sapiens
tacagtctaccagtt

SEQ ID NO: 939936 - DNA, 15 bp, Homo sapiens
acagtctaccagtta

SEQ ID NO: 939937 - DNA, 15 bp, Homo sapiens
cagtctaccagttaa

SEQ ID NO: 939938 - DNA, 15 bp, Homo sapiens
agtctaccagttaat

SEQ ID NO: 939939 - DNA, 15 bp, Homo sapiens
gtctaccagttaata

SEQ ID NO: 939940 - DNA, 15 bp, Homo sapiens
tctaccagttaatat

SEQ ID NO: 939941 - DNA, 15 bp, Homo sapiens
ctaccagttaatatt

SEQ ID NO: 939942 - DNA, 15 bp, Homo sapiens
taccagttaatattc

SEQ ID NO: 939943 - DNA, 15 bp, Homo sapiens
accagttaatattca

SEQ ID NO: 939944 - DNA, 15 bp, Homo sapiens
ccagttaatattcac

SEQ ID NO: 939945 - DNA, 15 bp, Homo sapiens
cagttaatattcact

SEQ ID NO: 939946 - DNA, 15 bp, Homo sapiens
agttaatattcactg

SEQ ID NO: 939947 - DNA, 15 bp, Homo sapiens
gttaatattcactgc

SEQ ID NO: 939948 - DNA, 15 bp, Homo sapiens
ttaatattcactgcc

SEQ ID NO: 939949 - DNA, 15 bp, Homo sapiens
taatattcactgcca

SEQ ID NO: 939950 - DNA, 15 bp, Homo sapiens
aatattcactgccaa

SEQ ID NO: 939951 - DNA, 15 bp, Homo sapiens
atattcactgccaaa

SEQ ID NO: 939952 - DNA, 15 bp, Homo sapiens
tattcactgccaaat

SEQ ID NO: 939953 - DNA, 15 bp, Homo sapiens
attcactgccaaatc

SEQ ID NO: 939954 - DNA, 15 bp, Homo sapiens
ttcactgccaaatca

SEQ ID NO: 939955 - DNA, 15 bp, Homo sapiens
tcactgccaaatcat

SEQ ID NO: 939956 - DNA, 15 bp, Homo sapiens
cactgccaaatcata

SEQ ID NO: 939957 - DNA, 15 bp, Homo sapiens
actgccaaatcataa

SEQ ID NO: 939958 - DNA, 15 bp, Homo sapiens
ctgccaaatcataaa

SEQ ID NO: 939959 - DNA, 15 bp, Homo sapiens
tgccaaatcataaat

SEQ ID NO: 939960 - DNA, 15 bp, Homo sapiens
gccaaatcataaatt

SEQ ID NO: 939961 - DNA, 15 bp, Homo sapiens
ccaaatcataaatta

SEQ ID NO: 939962 - DNA, 15 bp, Homo sapiens
caaatcataaattac

SEQ ID NO: 939963 - DNA, 15 bp, Homo sapiens
aaatcataaattaca

SEQ ID NO: 939964 - DNA, 15 bp, Homo sapiens
aatcataaattacat

SEQ ID NO: 939965 - DNA, 15 bp, Homo sapiens
atcataaattacatt

SEQ ID NO: 939966 - DNA, 15 bp, Homo sapiens
tcataaattacattt

SEQ ID NO: 939967 - DNA, 15 bp, Homo sapiens
cataaattacatttt

SEQ ID NO: 939968 - DNA, 15 bp, Homo sapiens
ataaattacattttt

SEQ ID NO: 939969 - DNA, 15 bp, Homo sapiens
taaattacatttttt

SEQ ID NO: 939970 - DNA, 15 bp, Homo sapiens
aaattacattttttt

SEQ ID NO: 939971 - DNA, 15 bp, Homo sapiens
aattacatttttttt

SEQ ID NO: 939972 - DNA, 15 bp, Homo sapiens
attacatttttttta

SEQ ID NO: 939973 - DNA, 15 bp, Homo sapiens
ttacattttttttaa

SEQ ID NO: 939974 - DNA, 15 bp, Homo sapiens
tacattttttttaaa

SEQ ID NO: 939975 - DNA, 15 bp, Homo sapiens
acattttttttaaac

SEQ ID NO: 939976 - DNA, 15 bp, Homo sapiens
cattttttttaaaca

SEQ ID NO: 939977 - DNA, 15 bp, Homo sapiens
attttttttaaacac

SEQ ID NO: 939978 - DNA, 15 bp, Homo sapiens
ttttttttaaacact

SEQ ID NO: 939979 - DNA, 15 bp, Homo sapiens
tttttttaaacactt

SEQ ID NO: 939980 - DNA, 15 bp, Homo sapiens
ttttttaaacacttg

SEQ ID NO: 939981 - DNA, 15 bp, Homo sapiens
tttttaaacacttga

SEQ ID NO: 939982 - DNA, 15 bp, Homo sapiens
ttttaaacacttgat

SEQ ID NO: 939983 - DNA, 15 bp, Homo sapiens
tttaaacacttgatt

SEQ ID NO: 939984 - DNA, 15 bp, Homo sapiens
ttaaacacttgattt

SEQ ID NO: 939985 - DNA, 15 bp, Homo sapiens
taaacacttgatttc

SEQ ID NO: 939986 - DNA, 15 bp, Homo sapiens
aaacacttgatttct

SEQ ID NO: 939987 - DNA, 15 bp, Homo sapiens
aacacttgatttctt

SEQ ID NO: 939988 - DNA, 15 bp, Homo sapiens
acacttgatttcttt

SEQ ID NO: 939989 - DNA, 15 bp, Homo sapiens
cacttgatttctttt

SEQ ID NO: 939990 - DNA, 15 bp, Homo sapiens
acttgatttctttta

SEQ ID NO: 939991 - DNA, 15 bp, Homo sapiens
cttgatttcttttaa

SEQ ID NO: 939992 - DNA, 15 bp, Homo sapiens
ttgatttcttttaag

SEQ ID NO: 939993 - DNA, 15 bp, Homo sapiens
tgatttcttttaagg

SEQ ID NO: 939994 - DNA, 15 bp, Homo sapiens
gatttcttttaaggt

SEQ ID NO: 939995 - DNA, 15 bp, Homo sapiens
atttcttttaaggtt

SEQ ID NO: 939996 - DNA, 15 bp, Homo sapiens
tttcttttaaggttt

SEQ ID NO: 939997 - DNA, 15 bp, Homo sapiens
ttcttttaaggttta

SEQ ID NO: 939998 - DNA, 15 bp, Homo sapiens
tcttttaaggtttac

SEQ ID NO: 939999 - DNA, 15 bp, Homo sapiens
cttttaaggtttacc

SEQ ID NO: 940000 - DNA, 15 bp, Homo sapiens
ttttaaggtttacca

SEQ ID NO: 940001 - DNA, 15 bp, Homo sapiens
tttaaggtttaccat

SEQ ID NO: 940002 - DNA, 15 bp, Homo sapiens
ttaaggtttaccata

SEQ ID NO: 940003 - DNA, 15 bp, Homo sapiens
taaggtttaccatat

SEQ ID NO: 940004 - DNA, 15 bp, Homo sapiens
aaggtttaccatatt

SEQ ID NO: 940005 - DNA, 15 bp, Homo sapiens
aggtttaccatattc

SEQ ID NO: 940006 - DNA, 15 bp, Homo sapiens
ggtttaccatattcc

SEQ ID NO: 940007 - DNA, 15 bp, Homo sapiens
gtttaccatattcct

SEQ ID NO: 940008 - DNA, 15 bp, Homo sapiens
tttaccatattcctg

SEQ ID NO: 940009 - DNA, 15 bp, Homo sapiens
ttaccatattcctga

SEQ ID NO: 940010 - DNA, 15 bp, Homo sapiens
taccatattcctgat

SEQ ID NO: 940011 - DNA, 15 bp, Homo sapiens
accatattcctgata

SEQ ID NO: 940012 - DNA, 15 bp, Homo sapiens
ccatattcctgatac

SEQ ID NO: 940013 - DNA, 15 bp, Homo sapiens
catattcctgatact

SEQ ID NO: 940014 - DNA, 15 bp, Homo sapiens
atattcctgatactg

SEQ ID NO: 940015 - DNA, 15 bp, Homo sapiens
tattcctgatactgt

SEQ ID NO: 940016 - DNA, 15 bp, Homo sapiens
attcctgatactgtc

SEQ ID NO: 940017 - DNA, 15 bp, Homo sapiens
ttcctgatactgtct

SEQ ID NO: 940018 - DNA, 15 bp, Homo sapiens
tcctgatactgtctg

SEQ ID NO: 940019 - DNA, 15 bp, Homo sapiens
cctgatactgtctga

SEQ ID NO: 940020 - DNA, 15 bp, Homo sapiens
ctgatactgtctgaa

SEQ ID NO: 940021 - DNA, 15 bp, Homo sapiens
tgatactgtctgaaa

SEQ ID NO: 940022 - DNA, 15 bp, Homo sapiens
gatactgtctgaaaa

SEQ ID NO: 940023 - DNA, 15 bp, Homo sapiens
atactgtctgaaaac

SEQ ID NO: 940024 - DNA, 15 bp, Homo sapiens
tactgtctgaaaaca

SEQ ID NO: 940025 - DNA, 15 bp, Homo sapiens
actgtctgaaaacag

SEQ ID NO: 940026 - DNA, 15 bp, Homo sapiens
ctgtctgaaaacagg

SEQ ID NO: 940027 - DNA, 15 bp, Homo sapiens
tgtctgaaaacaggg

SEQ ID NO: 940028 - DNA, 15 bp, Homo sapiens
gtctgaaaacaggga

SEQ ID NO: 940029 - DNA, 15 bp, Homo sapiens
tctgaaaacagggaa

SEQ ID NO: 940030 - DNA, 15 bp, Homo sapiens
ctgaaaacagggaat

SEQ ID NO: 940031 - DNA, 15 bp, Homo sapiens
tgaaaacagggaatt

SEQ ID NO: 940032 - DNA, 15 bp, Homo sapiens
gaaaacagggaatta

SEQ ID NO: 940033 - DNA, 15 bp, Homo sapiens
aaaacagggaattaa

SEQ ID NO: 940034 - DNA, 15 bp, Homo sapiens
aaacagggaattaat

SEQ ID NO: 940035 - DNA, 15 bp, Homo sapiens
aacagggaattaatc

SEQ ID NO: 940036 - DNA, 15 bp, Homo sapiens
acagggaattaatcc

SEQ ID NO: 940037 - DNA, 15 bp, Homo sapiens
cagggaattaatcct

SEQ ID NO: 940038 - DNA, 15 bp, Homo sapiens
agggaattaatcctt

SEQ ID NO: 940039 - DNA, 15 bp, Homo sapiens
gggaattaatccttc

SEQ ID NO: 940040 - DNA, 15 bp, Homo sapiens
ggaattaatccttca

SEQ ID NO: 940041 - DNA, 15 bp, Homo sapiens
gaattaatccttcac

SEQ ID NO: 940042 - DNA, 15 bp, Homo sapiens
aattaatccttcaca

SEQ ID NO: 940043 - DNA, 15 bp, Homo sapiens
attaatccttcacat

SEQ ID NO: 940044 - DNA, 15 bp, Homo sapiens
ttaatccttcacatc

SEQ ID NO: 940045 - DNA, 15 bp, Homo sapiens
taatccttcacatct

SEQ ID NO: 940046 - DNA, 15 bp, Homo sapiens
aatccttcacatcta

SEQ ID NO: 940047 - DNA, 15 bp, Homo sapiens
atccttcacatctag

SEQ ID NO: 940048 - DNA, 15 bp, Homo sapiens
tccttcacatctagt

SEQ ID NO: 940049 - DNA, 15 bp, Homo sapiens
ccttcacatctagtg

SEQ ID NO: 940050 - DNA, 15 bp, Homo sapiens
cttcacatctagtgt

SEQ ID NO: 940051 - DNA, 15 bp, Homo sapiens
ttcacatctagtgtg

SEQ ID NO: 940052 - DNA, 15 bp, Homo sapiens
tcacatctagtgtga

SEQ ID NO: 940053 - DNA, 15 bp, Homo sapiens
cacatctagtgtgat

SEQ ID NO: 940054 - DNA, 15 bp, Homo sapiens
acatctagtgtgata

SEQ ID NO: 940055 - DNA, 15 bp, Homo sapiens
catctagtgtgatat

SEQ ID NO: 940056 - DNA, 15 bp, Homo sapiens
atctagtgtgatatc

SEQ ID NO: 940057 - DNA, 15 bp, Homo sapiens
tctagtgtgatatct

SEQ ID NO: 940058 - DNA, 15 bp, Homo sapiens
ctagtgtgatatctg

SEQ ID NO: 940059 - DNA, 15 bp, Homo sapiens
tagtgtgatatctga

SEQ ID NO: 940060 - DNA, 15 bp, Homo sapiens
agtgtgatatctgac

SEQ ID NO: 940061 - DNA, 15 bp, Homo sapiens
gtgtgatatctgaca

SEQ ID NO: 940062 - DNA, 15 bp, Homo sapiens
tgtgatatctgacac

SEQ ID NO: 940063 - DNA, 15 bp, Homo sapiens
gtgatatctgacacc

SEQ ID NO: 940064 - DNA, 15 bp, Homo sapiens
tgatatctgacacct

SEQ ID NO: 940065 - DNA, 15 bp, Homo sapiens
gatatctgacaccta

SEQ ID NO: 940066 - DNA, 15 bp, Homo sapiens
atatctgacacctac

SEQ ID NO: 940067 - DNA, 15 bp, Homo sapiens
tatctgacacctact

SEQ ID NO: 940068 - DNA, 15 bp, Homo sapiens
atctgacacctacta

SEQ ID NO: 940069 - DNA, 15 bp, Homo sapiens
tctgacacctactat

SEQ ID NO: 940070 - DNA, 15 bp, Homo sapiens
ctgacacctactatg

SEQ ID NO: 940071 - DNA, 15 bp, Homo sapiens
tgacacctactatgt

SEQ ID NO: 940072 - DNA, 15 bp, Homo sapiens
gacacctactatgtg

SEQ ID NO: 940073 - DNA, 15 bp, Homo sapiens
acacctactatgtgt

SEQ ID NO: 940074 - DNA, 15 bp, Homo sapiens
cacctactatgtgtt

SEQ ID NO: 940075 - DNA, 15 bp, Homo sapiens
acctactatgtgtta

SEQ ID NO: 940076 - DNA, 15 bp, Homo sapiens
cctactatgtgttat

SEQ ID NO: 940077 - DNA, 15 bp, Homo sapiens
ctactatgtgttata

SEQ ID NO: 940078 - DNA, 15 bp, Homo sapiens
tactatgtgttatat

SEQ ID NO: 940079 - DNA, 15 bp, Homo sapiens
actatgtgttatata

SEQ ID NO: 940080 - DNA, 15 bp, Homo sapiens
ctatgtgttatataa

SEQ ID NO: 940081 - DNA, 15 bp, Homo sapiens
tatgtgttatataac

SEQ ID NO: 940082 - DNA, 15 bp, Homo sapiens
atgtgttatataaca

SEQ ID NO: 940083 - DNA, 15 bp, Homo sapiens
tgtgttatataacaa

SEQ ID NO: 940084 - DNA, 15 bp, Homo sapiens
gtgttatataacaaa

SEQ ID NO: 940085 - DNA, 15 bp, Homo sapiens
tgttatataacaaat

SEQ ID NO: 940086 - DNA, 15 bp, Homo sapiens
gttatataacaaatg

SEQ ID NO: 940087 - DNA, 15 bp, Homo sapiens
ttatataacaaatgt

SEQ ID NO: 940088 - DNA, 15 bp, Homo sapiens
tatataacaaatgtt

SEQ ID NO: 940089 - DNA, 15 bp, Homo sapiens
atataacaaatgtta

SEQ ID NO: 940090 - DNA, 15 bp, Homo sapiens
tataacaaatgttat

SEQ ID NO: 940091 - DNA, 15 bp, Homo sapiens
ataacaaatgttatg

SEQ ID NO: 940092 - DNA, 15 bp, Homo sapiens
taacaaatgttatgt

SEQ ID NO: 940093 - DNA, 15 bp, Homo sapiens
aacaaatgttatgta

SEQ ID NO: 940094 - DNA, 15 bp, Homo sapiens
acaaatgttatgtaa

SEQ ID NO: 940095 - DNA, 15 bp, Homo sapiens
caaatgttatgtaaa

SEQ ID NO: 940096 - DNA, 15 bp, Homo sapiens
aaatgttatgtaaat

SEQ ID NO: 940097 - DNA, 15 bp, Homo sapiens
aatgttatgtaaata

SEQ ID NO: 940098 - DNA, 15 bp, Homo sapiens
atgttatgtaaataa

SEQ ID NO: 940099 - DNA, 15 bp, Homo sapiens
tgttatgtaaataaa

SEQ ID NO: 940100 - DNA, 15 bp, Homo sapiens
gttatgtaaataaat

SEQ ID NO: 940101 - DNA, 15 bp, Homo sapiens
ttatgtaaataaatg

SEQ ID NO: 940102 - DNA, 15 bp, Homo sapiens
tatgtaaataaatgc

SEQ ID NO: 940103 - DNA, 15 bp, Homo sapiens
atgtaaataaatgca

SEQ ID NO: 940104 - DNA, 15 bp, Homo sapiens
tgtaaataaatgcat

SEQ ID NO: 940105 - DNA, 15 bp, Homo sapiens
gtaaataaatgcatc

SEQ ID NO: 940106 - DNA, 15 bp, Homo sapiens
taaataaatgcatca

SEQ ID NO: 940107 - DNA, 15 bp, Homo sapiens
aaataaatgcatcag

SEQ ID NO: 940108 - DNA, 15 bp, Homo sapiens
aataaatgcatcagt

SEQ ID NO: 940109 - DNA, 15 bp, Homo sapiens
ataaatgcatcagta

SEQ ID NO: 940110 - DNA, 15 bp, Homo sapiens
taaatgcatcagtaa

SEQ ID NO: 940111 - DNA, 15 bp, Homo sapiens
aaatgcatcagtaaa

SEQ ID NO: 940112 - DNA, 15 bp, Homo sapiens
aatgcatcagtaaat

SEQ ID NO: 940113 - DNA, 15 bp, Homo sapiens
atgcatcagtaaata

SEQ ID NO: 940114 - DNA, 15 bp, Homo sapiens
tgcatcagtaaataa

SEQ ID NO: 940115 - DNA, 15 bp, Homo sapiens
gcatcagtaaataaa

SEQ ID NO: 940116 - DNA, 15 bp, Homo sapiens
catcagtaaataaaa

SEQ ID NO: 940117 - DNA, 15 bp, Homo sapiens
atcagtaaataaaac

SEQ ID NO: 940118 - DNA, 15 bp, Homo sapiens
tcagtaaataaaaca

SEQ ID NO: 940119 - DNA, 15 bp, Homo sapiens
cagtaaataaaacac

SEQ ID NO: 940120 - DNA, 15 bp, Homo sapiens
agtaaataaaacacc

SEQ ID NO: 940121 - DNA, 15 bp, Homo sapiens
gtaaataaaacaccc

SEQ ID NO: 940122 - DNA, 15 bp, Homo sapiens
taaataaaacaccca

SEQ ID NO: 940123 - DNA, 15 bp, Homo sapiens
aaataaaacacccag

SEQ ID NO: 940124 - DNA, 15 bp, Homo sapiens
aataaaacacccaga

SEQ ID NO: 940125 - DNA, 15 bp, Homo sapiens
ataaaacacccagag

SEQ ID NO: 940126 - DNA, 15 bp, Homo sapiens
taaaacacccagaga

SEQ ID NO: 940127 - DNA, 15 bp, Homo sapiens
aaaacacccagagaa

SEQ ID NO: 940128 - DNA, 15 bp, Homo sapiens
aaacacccagagaaa

SEQ ID NO: 940129 - DNA, 15 bp, Homo sapiens
aacacccagagaaat

SEQ ID NO: 940130 - DNA, 15 bp, Homo sapiens
acacccagagaaatt

SEQ ID NO: 940131 - DNA, 15 bp, Homo sapiens
cacccagagaaattg

SEQ ID NO: 940132 - DNA, 15 bp, Homo sapiens
acccagagaaattgt

SEQ ID NO: 940133 - DNA, 15 bp, Homo sapiens
cccagagaaattgtt

SEQ ID NO: 940134 - DNA, 15 bp, Homo sapiens
ccagagaaattgttt

SEQ ID NO: 940135 - DNA, 15 bp, Homo sapiens
cagagaaattgtttt

SEQ ID NO: 940136 - DNA, 15 bp, Homo sapiens
agagaaattgtttta

SEQ ID NO: 940137 - DNA, 15 bp, Homo sapiens
gagaaattgttttaa

SEQ ID NO: 940138 - DNA, 15 bp, Homo sapiens
agaaattgttttaaa

SEQ ID NO: 940139 - DNA, 15 bp, Homo sapiens
gaaattgttttaaag

SEQ ID NO: 940140 - DNA, 15 bp, Homo sapiens
aaattgttttaaaga

SEQ ID NO: 940141 - DNA, 15 bp, Homo sapiens
aattgttttaaagac

SEQ ID NO: 940142 - DNA, 15 bp, Homo sapiens
attgttttaaagaca

SEQ ID NO: 940143 - DNA, 15 bp, Homo sapiens
ttgttttaaagacaa

SEQ ID NO: 940144 - DNA, 15 bp, Homo sapiens
tgttttaaagacaaa

SEQ ID NO: 940145 - DNA, 15 bp, Homo sapiens
gttttaaagacaaag

SEQ ID NO: 940146 - DNA, 15 bp, Homo sapiens
ttttaaagacaaaga

SEQ ID NO: 940147 - DNA, 15 bp, Homo sapiens
tttaaagacaaagaa

SEQ ID NO: 940148 - DNA, 15 bp, Homo sapiens
ttaaagacaaagaaa

SEQ ID NO: 940149 - DNA, 15 bp, Homo sapiens
taaagacaaagaaaa

SEQ ID NO: 940150 - DNA, 15 bp, Homo sapiens
aaagacaaagaaaag

SEQ ID NO: 940151 - DNA, 15 bp, Homo sapiens
aagacaaagaaaagg

SEQ ID NO: 940152 - DNA, 15 bp, Homo sapiens
agacaaagaaaagga

SEQ ID NO: 940153 - DNA, 15 bp, Homo sapiens
gacaaagaaaaggag

SEQ ID NO: 940154 - DNA, 15 bp, Homo sapiens
acaaagaaaaggaga

SEQ ID NO: 940155 - DNA, 15 bp, Homo sapiens
caaagaaaaggagat

SEQ ID NO: 940156 - DNA, 15 bp, Homo sapiens
aaagaaaaggagatt

SEQ ID NO: 940157 - DNA, 15 bp, Homo sapiens
aagaaaaggagatta

SEQ ID NO: 940158 - DNA, 15 bp, Homo sapiens
agaaaaggagattaa

SEQ ID NO: 940159 - DNA, 15 bp, Homo sapiens
gaaaaggagattaac

SEQ ID NO: 940160 - DNA, 15 bp, Homo sapiens
aaaaggagattaact

SEQ ID NO: 940161 - DNA, 15 bp, Homo sapiens
aaaggagattaactt

SEQ ID NO: 940162 - DNA, 15 bp, Homo sapiens
aaggagattaacttt

SEQ ID NO: 940163 - DNA, 15 bp, Homo sapiens
aggagattaactttt

SEQ ID NO: 940164 - DNA, 15 bp, Homo sapiens
ggagattaacttttt

SEQ ID NO: 940165 - DNA, 15 bp, Homo sapiens
gagattaactttttt

SEQ ID NO: 940166 - DNA, 15 bp, Homo sapiens
agattaacttttttt

SEQ ID NO: 940167 - DNA, 15 bp, Homo sapiens
gattaacttttttta

SEQ ID NO: 940168 - DNA, 15 bp, Homo sapiens
attaactttttttag

SEQ ID NO: 940169 - DNA, 15 bp, Homo sapiens
ttaactttttttaga

SEQ ID NO: 940170 - DNA, 15 bp, Homo sapiens
taactttttttagag

SEQ ID NO: 940171 - DNA, 15 bp, Homo sapiens
aactttttttagaga

SEQ ID NO: 940172 - DNA, 15 bp, Homo sapiens
actttttttagagaa

SEQ ID NO: 940173 - DNA, 15 bp, Homo sapiens
ctttttttagagaaa

SEQ ID NO: 940174 - DNA, 15 bp, Homo sapiens
tttttttagagaaaa

SEQ ID NO: 940175 - DNA, 15 bp, Homo sapiens
ttttttagagaaaat

SEQ ID NO: 940176 - DNA, 15 bp, Homo sapiens
tttttagagaaaata

SEQ ID NO: 940177 - DNA, 15 bp, Homo sapiens
ttttagagaaaatat

SEQ ID NO: 940178 - DNA, 15 bp, Homo sapiens
tttagagaaaatatt

SEQ ID NO: 940179 - DNA, 15 bp, Homo sapiens
ttagagaaaatattg

SEQ ID NO: 940180 - DNA, 15 bp, Homo sapiens
tagagaaaatattga

SEQ ID NO: 940181 - DNA, 15 bp, Homo sapiens
agagaaaatattgag

SEQ ID NO: 940182 - DNA, 15 bp, Homo sapiens
gagaaaatattgagg

SEQ ID NO: 940183 - DNA, 15 bp, Homo sapiens
agaaaatattgagga

SEQ ID NO: 940184 - DNA, 15 bp, Homo sapiens
gaaaatattgaggag

SEQ ID NO: 940185 - DNA, 15 bp, Homo sapiens
aaaatattgaggagg

SEQ ID NO: 940186 - DNA, 15 bp, Homo sapiens
aaatattgaggagga

SEQ ID NO: 940187 - DNA, 15 bp, Homo sapiens
aatattgaggaggaa

SEQ ID NO: 940188 - DNA, 15 bp, Homo sapiens
atattgaggaggaat

SEQ ID NO: 940189 - DNA, 15 bp, Homo sapiens
tattgaggaggaatg

SEQ ID NO: 940190 - DNA, 15 bp, Homo sapiens
attgaggaggaatga

SEQ ID NO: 940191 - DNA, 15 bp, Homo sapiens
ttgaggaggaatgac

SEQ ID NO: 940192 - DNA, 15 bp, Homo sapiens
tgaggaggaatgacc

SEQ ID NO: 940193 - DNA, 15 bp, Homo sapiens
gaggaggaatgacct

SEQ ID NO: 940194 - DNA, 15 bp, Homo sapiens
aggaggaatgaccta

SEQ ID NO: 940195 - DNA, 15 bp, Homo sapiens
ggaggaatgacctaa

SEQ ID NO: 940196 - DNA, 15 bp, Homo sapiens
gaggaatgacctaac

SEQ ID NO: 940197 - DNA, 15 bp, Homo sapiens
aggaatgacctaaca

SEQ ID NO: 940198 - DNA, 15 bp, Homo sapiens
ggaatgacctaacac

SEQ ID NO: 940199 - DNA, 15 bp, Homo sapiens
gaatgacctaacact

SEQ ID NO: 940200 - DNA, 15 bp, Homo sapiens
aatgacctaacactt

SEQ ID NO: 940201 - DNA, 15 bp, Homo sapiens
atgacctaacactta

SEQ ID NO: 940202 - DNA, 15 bp, Homo sapiens
tgacctaacacttat

SEQ ID NO: 940203 - DNA, 15 bp, Homo sapiens
gacctaacacttata

SEQ ID NO: 940204 - DNA, 15 bp, Homo sapiens
acctaacacttatat

SEQ ID NO: 940205 - DNA, 15 bp, Homo sapiens
cctaacacttatatt

SEQ ID NO: 940206 - DNA, 15 bp, Homo sapiens
ctaacacttatattc

SEQ ID NO: 940207 - DNA, 15 bp, Homo sapiens
taacacttatattct

SEQ ID NO: 940208 - DNA, 15 bp, Homo sapiens
aacacttatattcta

SEQ ID NO: 940209 - DNA, 15 bp, Homo sapiens
acacttatattctag

SEQ ID NO: 940210 - DNA, 15 bp, Homo sapiens
cacttatattctaga

SEQ ID NO: 940211 - DNA, 15 bp, Homo sapiens
acttatattctagat

SEQ ID NO: 940212 - DNA, 15 bp, Homo sapiens
cttatattctagata

SEQ ID NO: 940213 - DNA, 15 bp, Homo sapiens
ttatattctagataa

SEQ ID NO: 940214 - DNA, 15 bp, Homo sapiens
tatattctagataaa

SEQ ID NO: 940215 - DNA, 15 bp, Homo sapiens
atattctagataaaa

SEQ ID NO: 940216 - DNA, 15 bp, Homo sapiens
tattctagataaaat

SEQ ID NO: 940217 - DNA, 15 bp, Homo sapiens
attctagataaaatc

SEQ ID NO: 940218 - DNA, 15 bp, Homo sapiens
ttctagataaaatcg

SEQ ID NO: 940219 - DNA, 15 bp, Homo sapiens
tctagataaaatcga

SEQ ID NO: 940220 - DNA, 15 bp, Homo sapiens
ctagataaaatcgaa

SEQ ID NO: 940221 - DNA, 15 bp, Homo sapiens
tagataaaatcgaat

SEQ ID NO: 940222 - DNA, 15 bp, Homo sapiens
agataaaatcgaatt

SEQ ID NO: 940223 - DNA, 15 bp, Homo sapiens
gataaaatcgaattt

SEQ ID NO: 940224 - DNA, 15 bp, Homo sapiens
ataaaatcgaatttt

SEQ ID NO: 940225 - DNA, 15 bp, Homo sapiens
taaaatcgaatttta

SEQ ID NO: 940226 - DNA, 15 bp, Homo sapiens
aaaatcgaattttaa

SEQ ID NO: 940227 - DNA, 15 bp, Homo sapiens
aaatcgaattttaac

SEQ ID NO: 940228 - DNA, 15 bp, Homo sapiens
aatcgaattttaact

SEQ ID NO: 940229 - DNA, 15 bp, Homo sapiens
atcgaattttaacta

SEQ ID NO: 940230 - DNA, 15 bp, Homo sapiens
tcgaattttaactat

SEQ ID NO: 940231 - DNA, 15 bp, Homo sapiens
cgaattttaactatc

SEQ ID NO: 940232 - DNA, 15 bp, Homo sapiens
gaattttaactatct

SEQ ID NO: 940233 - DNA, 15 bp, Homo sapiens
aattttaactatctt

SEQ ID NO: 940234 - DNA, 15 bp, Homo sapiens
attttaactatcttt

SEQ ID NO: 940235 - DNA, 15 bp, Homo sapiens
ttttaactatctttt

SEQ ID NO: 940236 - DNA, 15 bp, Homo sapiens
tttaactatcttttt

SEQ ID NO: 940237 - DNA, 15 bp, Homo sapiens
ttaactatcttttta

SEQ ID NO: 940238 - DNA, 15 bp, Homo sapiens
taactatctttttac

SEQ ID NO: 940239 - DNA, 15 bp, Homo sapiens
aactatctttttact

SEQ ID NO: 940240 - DNA, 15 bp, Homo sapiens
actatctttttactg

SEQ ID NO: 940241 - DNA, 15 bp, Homo sapiens
ctatctttttactga

SEQ ID NO: 940242 - DNA, 15 bp, Homo sapiens
tatctttttactgaa

SEQ ID NO: 940243 - DNA, 15 bp, Homo sapiens
atctttttactgaaa

SEQ ID NO: 940244 - DNA, 15 bp, Homo sapiens
tctttttactgaaac

SEQ ID NO: 940245 - DNA, 15 bp, Homo sapiens
ctttttactgaaacc

SEQ ID NO: 940246 - DNA, 15 bp, Homo sapiens
tttttactgaaacct

SEQ ID NO: 940247 - DNA, 15 bp, Homo sapiens
ttttactgaaaccta

SEQ ID NO: 940248 - DNA, 15 bp, Homo sapiens
tttactgaaacctaa

SEQ ID NO: 940249 - DNA, 15 bp, Homo sapiens
ttactgaaacctaaa

SEQ ID NO: 940250 - DNA, 15 bp, Homo sapiens
tactgaaacctaaac

SEQ ID NO: 940251 - DNA, 15 bp, Homo sapiens
actgaaacctaaact

SEQ ID NO: 940252 - DNA, 15 bp, Homo sapiens
ctgaaacctaaactt

SEQ ID NO: 940253 - DNA, 15 bp, Homo sapiens
tgaaacctaaacttc

SEQ ID NO: 940254 - DNA, 15 bp, Homo sapiens
gaaacctaaacttcc

SEQ ID NO: 940255 - DNA, 15 bp, Homo sapiens
aaacctaaacttcct

SEQ ID NO: 940256 - DNA, 15 bp, Homo sapiens
aacctaaacttcctg

SEQ ID NO: 940257 - DNA, 15 bp, Homo sapiens
acctaaacttcctgg

SEQ ID NO: 940258 - DNA, 15 bp, Homo sapiens
cctaaacttcctgga

SEQ ID NO: 940259 - DNA, 15 bp, Homo sapiens
ctaaacttcctggat

SEQ ID NO: 940260 - DNA, 15 bp, Homo sapiens
taaacttcctggatt

SEQ ID NO: 940261 - DNA, 15 bp, Homo sapiens
aaacttcctggattt

SEQ ID NO: 940262 - DNA, 15 bp, Homo sapiens
aacttcctggatttt

SEQ ID NO: 940263 - DNA, 15 bp, Homo sapiens
acttcctggattttc

SEQ ID NO: 940264 - DNA, 15 bp, Homo sapiens
cttcctggattttca

SEQ ID NO: 940265 - DNA, 15 bp, Homo sapiens
ttcctggattttcac

SEQ ID NO: 940266 - DNA, 15 bp, Homo sapiens
tcctggattttcacg

SEQ ID NO: 940267 - DNA, 15 bp, Homo sapiens
cctggattttcacgc

SEQ ID NO: 940268 - DNA, 15 bp, Homo sapiens
ctggattttcacgct

SEQ ID NO: 940269 - DNA, 15 bp, Homo sapiens
tggattttcacgcta

SEQ ID NO: 940270 - DNA, 15 bp, Homo sapiens
ggattttcacgctaa

SEQ ID NO: 940271 - DNA, 15 bp, Homo sapiens
gattttcacgctaaa

SEQ ID NO: 940272 - DNA, 15 bp, Homo sapiens
attttcacgctaaaa

SEQ ID NO: 940273 - DNA, 15 bp, Homo sapiens
ttttcacgctaaaaa

SEQ ID NO: 940274 - DNA, 15 bp, Homo sapiens
tttcacgctaaaaat

SEQ ID NO: 940275 - DNA, 15 bp, Homo sapiens
ttcacgctaaaaata

SEQ ID NO: 940276 - DNA, 15 bp, Homo sapiens
tcacgctaaaaatat

SEQ ID NO: 940277 - DNA, 15 bp, Homo sapiens
cacgctaaaaatatt

SEQ ID NO: 940278 - DNA, 15 bp, Homo sapiens
acgctaaaaatatta

SEQ ID NO: 940279 - DNA, 15 bp, Homo sapiens
cgctaaaaatattag

SEQ ID NO: 940280 - DNA, 15 bp, Homo sapiens
gctaaaaatattaga

SEQ ID NO: 940281 - DNA, 15 bp, Homo sapiens
ctaaaaatattagat

SEQ ID NO: 940282 - DNA, 15 bp, Homo sapiens
taaaaatattagatt

SEQ ID NO: 940283 - DNA, 15 bp, Homo sapiens
aaaaatattagattc

SEQ ID NO: 940284 - DNA, 15 bp, Homo sapiens
aaaatattagattct

SEQ ID NO: 940285 - DNA, 15 bp, Homo sapiens
aaatattagattctt

SEQ ID NO: 940286 - DNA, 15 bp, Homo sapiens
aatattagattctta

SEQ ID NO: 940287 - DNA, 15 bp, Homo sapiens
atattagattcttaa

SEQ ID NO: 940288 - DNA, 15 bp, Homo sapiens
tattagattcttaaa

SEQ ID NO: 940289 - DNA, 15 bp, Homo sapiens
attagattcttaaaa

SEQ ID NO: 940290 - DNA, 15 bp, Homo sapiens
tagattcttaaaata

SEQ ID NO: 940291 - DNA, 15 bp, Homo sapiens
agattcttaaaatag

SEQ ID NO: 940292 - DNA, 15 bp, Homo sapiens
gattcttaaaatagg

SEQ ID NO: 940293 - DNA, 15 bp, Homo sapiens
attcttaaaatagga

SEQ ID NO: 940294 - DNA, 15 bp, Homo sapiens
ttcttaaaataggag

SEQ ID NO: 940295 - DNA, 15 bp, Homo sapiens
tcttaaaataggagt

SEQ ID NO: 940296 - DNA, 15 bp, Homo sapiens
cttaaaataggagtt

SEQ ID NO: 940297 - DNA, 15 bp, Homo sapiens
ttaaaataggagttc

SEQ ID NO: 940298 - DNA, 15 bp, Homo sapiens
taaaataggagttct

SEQ ID NO: 940299 - DNA, 15 bp, Homo sapiens
aaaataggagttctt

SEQ ID NO: 940300 - DNA, 15 bp, Homo sapiens
aaataggagttcttt

SEQ ID NO: 940301 - DNA, 15 bp, Homo sapiens
aataggagttctttt

SEQ ID NO: 940302 - DNA, 15 bp, Homo sapiens
ataggagttcttttt

SEQ ID NO: 940303 - DNA, 15 bp, Homo sapiens
taggagttctttttc

SEQ ID NO: 940304 - DNA, 15 bp, Homo sapiens
aggagttctttttct

SEQ ID NO: 940305 - DNA, 15 bp, Homo sapiens
ggagttctttttctt

SEQ ID NO: 940306 - DNA, 15 bp, Homo sapiens
gagttctttttctta

SEQ ID NO: 940307 - DNA, 15 bp, Homo sapiens
agttctttttcttaa

SEQ ID NO: 940308 - DNA, 15 bp, Homo sapiens
gttctttttcttaag

SEQ ID NO: 940309 - DNA, 15 bp, Homo sapiens
ttctttttcttaagc

SEQ ID NO: 940310 - DNA, 15 bp, Homo sapiens
tctttttcttaagcg

SEQ ID NO: 940311 - DNA, 15 bp, Homo sapiens
ctttttcttaagcga

SEQ ID NO: 940312 - DNA, 15 bp, Homo sapiens
tttttcttaagcgat

SEQ ID NO: 940313 - DNA, 15 bp, Homo sapiens
ttttcttaagcgata

SEQ ID NO: 940314 - DNA, 15 bp, Homo sapiens
tttcttaagcgataa

SEQ ID NO: 940315 - DNA, 15 bp, Homo sapiens
ttcttaagcgataat

SEQ ID NO: 940316 - DNA, 15 bp, Homo sapiens
tcttaagcgataatc

SEQ ID NO: 940317 - DNA, 15 bp, Homo sapiens
cttaagcgataatca

SEQ ID NO: 940318 - DNA, 15 bp, Homo sapiens
ttaagcgataatcac

SEQ ID NO: 940319 - DNA, 15 bp, Homo sapiens
taagcgataatcact

SEQ ID NO: 940320 - DNA, 15 bp, Homo sapiens
aagcgataatcactt

SEQ ID NO: 940321 - DNA, 15 bp, Homo sapiens
agcgataatcactta

SEQ ID NO: 940322 - DNA, 15 bp, Homo sapiens
gcgataatcacttat

SEQ ID NO: 940323 - DNA, 15 bp, Homo sapiens
cgataatcacttatc

SEQ ID NO: 940324 - DNA, 15 bp, Homo sapiens
gataatcacttatcc

SEQ ID NO: 940325 - DNA, 15 bp, Homo sapiens
ataatcacttatcct

SEQ ID NO: 940326 - DNA, 15 bp, Homo sapiens
taatcacttatcctc

SEQ ID NO: 940327 - DNA, 15 bp, Homo sapiens
aatcacttatcctca

SEQ ID NO: 940328 - DNA, 15 bp, Homo sapiens
atcacttatcctcag

SEQ ID NO: 940329 - DNA, 15 bp, Homo sapiens
tcacttatcctcaga

SEQ ID NO: 940330 - DNA, 15 bp, Homo sapiens
cacttatcctcagat

SEQ ID NO: 940331 - DNA, 15 bp, Homo sapiens
acttatcctcagata

SEQ ID NO: 940332 - DNA, 15 bp, Homo sapiens
cttatcctcagatat

SEQ ID NO: 940333 - DNA, 15 bp, Homo sapiens
ttatcctcagatata

SEQ ID NO: 940334 - DNA, 15 bp, Homo sapiens
tatcctcagatatac

SEQ ID NO: 940335 - DNA, 15 bp, Homo sapiens
atcctcagatatact

SEQ ID NO: 940336 - DNA, 15 bp, Homo sapiens
tcctcagatatacta

SEQ ID NO: 940337 - DNA, 15 bp, Homo sapiens
cctcagatatactat

SEQ ID NO: 940338 - DNA, 15 bp, Homo sapiens
ctcagatatactatg

SEQ ID NO: 940339 - DNA, 15 bp, Homo sapiens
tcagatatactatgc

SEQ ID NO: 940340 - DNA, 15 bp, Homo sapiens
cagatatactatgca

SEQ ID NO: 940341 - DNA, 15 bp, Homo sapiens
agatatactatgcaa

SEQ ID NO: 940342 - DNA, 15 bp, Homo sapiens
gatatactatgcaaa

SEQ ID NO: 940343 - DNA, 15 bp, Homo sapiens
atatactatgcaaaa

SEQ ID NO: 940344 - DNA, 15 bp, Homo sapiens
tatactatgcaaaac

SEQ ID NO: 940345 - DNA, 15 bp, Homo sapiens
atactatgcaaaaca

SEQ ID NO: 940346 - DNA, 15 bp, Homo sapiens
tactatgcaaaacat

SEQ ID NO: 940347 - DNA, 15 bp, Homo sapiens
actatgcaaaacatg

SEQ ID NO: 940348 - DNA, 15 bp, Homo sapiens
ctatgcaaaacatgt

SEQ ID NO: 940349 - DNA, 15 bp, Homo sapiens
tatgcaaaacatgtc

SEQ ID NO: 940350 - DNA, 15 bp, Homo sapiens
atgcaaaacatgtcc

SEQ ID NO: 940351 - DNA, 15 bp, Homo sapiens
tgcaaaacatgtcca

SEQ ID NO: 940352 - DNA, 15 bp, Homo sapiens
gcaaaacatgtccat

SEQ ID NO: 940353 - DNA, 15 bp, Homo sapiens
caaaacatgtccatt

SEQ ID NO: 940354 - DNA, 15 bp, Homo sapiens
aaaacatgtccattt

SEQ ID NO: 940355 - DNA, 15 bp, Homo sapiens
aaacatgtccatttc

SEQ ID NO: 940356 - DNA, 15 bp, Homo sapiens
aacatgtccatttca

SEQ ID NO: 940357 - DNA, 15 bp, Homo sapiens
acatgtccatttcat

SEQ ID NO: 940358 - DNA, 15 bp, Homo sapiens
catgtccatttcata

SEQ ID NO: 940359 - DNA, 15 bp, Homo sapiens
atgtccatttcatac

SEQ ID NO: 940360 - DNA, 15 bp, Homo sapiens
tgtccatttcatacc

SEQ ID NO: 940361 - DNA, 15 bp, Homo sapiens
gtccatttcatacca

SEQ ID NO: 940362 - DNA, 15 bp, Homo sapiens
tccatttcataccaa

SEQ ID NO: 940363 - DNA, 15 bp, Homo sapiens
ccatttcataccaaa

SEQ ID NO: 940364 - DNA, 15 bp, Homo sapiens
catttcataccaaat

SEQ ID NO: 940365 - DNA, 15 bp, Homo sapiens
atttcataccaaata

SEQ ID NO: 940366 - DNA, 15 bp, Homo sapiens
tttcataccaaatag

SEQ ID NO: 940367 - DNA, 15 bp, Homo sapiens
ttcataccaaatagc

SEQ ID NO: 940368 - DNA, 15 bp, Homo sapiens
tcataccaaatagct

SEQ ID NO: 940369 - DNA, 15 bp, Homo sapiens
cataccaaatagcta

SEQ ID NO: 940370 - DNA, 15 bp, Homo sapiens
ataccaaatagctac

SEQ ID NO: 940371 - DNA, 15 bp, Homo sapiens
taccaaatagctacc

SEQ ID NO: 940372 - DNA, 15 bp, Homo sapiens
accaaatagctaccc

SEQ ID NO: 940373 - DNA, 15 bp, Homo sapiens
ccaaatagctaccct

SEQ ID NO: 940374 - DNA, 15 bp, Homo sapiens
caaatagctaccctt

SEQ ID NO: 940375 - DNA, 15 bp, Homo sapiens
aaatagctacccttc

SEQ ID NO: 940376 - DNA, 15 bp, Homo sapiens
aatagctacccttct

SEQ ID NO: 940377 - DNA, 15 bp, Homo sapiens
atagctacccttcta

SEQ ID NO: 940378 - DNA, 15 bp, Homo sapiens
tagctacccttctag

SEQ ID NO: 940379 - DNA, 15 bp, Homo sapiens
agctacccttctaga

SEQ ID NO: 940380 - DNA, 15 bp, Homo sapiens
gctacccttctagag

SEQ ID NO: 940381 - DNA, 15 bp, Homo sapiens
ctacccttctagagt

SEQ ID NO: 940382 - DNA, 15 bp, Homo sapiens
tacccttctagagta

SEQ ID NO: 940383 - DNA, 15 bp, Homo sapiens
acccttctagagtat

SEQ ID NO: 940384 - DNA, 15 bp, Homo sapiens
cccttctagagtatt

SEQ ID NO: 940385 - DNA, 15 bp, Homo sapiens
ccttctagagtattt

SEQ ID NO: 940386 - DNA, 15 bp, Homo sapiens
cttctagagtatttg

SEQ ID NO: 940387 - DNA, 15 bp, Homo sapiens
ttctagagtatttgg

SEQ ID NO: 940388 - DNA, 15 bp, Homo sapiens
tctagagtatttggg

SEQ ID NO: 940389 - DNA, 15 bp, Homo sapiens
ctagagtatttggga

SEQ ID NO: 940390 - DNA, 15 bp, Homo sapiens
tagagtatttgggaa

SEQ ID NO: 940391 - DNA, 15 bp, Homo sapiens
agagtatttgggaaa

SEQ ID NO: 940392 - DNA, 15 bp, Homo sapiens
gagtatttgggaaac

SEQ ID NO: 940393 - DNA, 15 bp, Homo sapiens
agtatttgggaaaca

SEQ ID NO: 940394 - DNA, 15 bp, Homo sapiens
gtatttgggaaacat

SEQ ID NO: 940395 - DNA, 15 bp, Homo sapiens
tatttgggaaacatt

SEQ ID NO: 940396 - DNA, 15 bp, Homo sapiens
atttgggaaacattt

SEQ ID NO: 940397 - DNA, 15 bp, Homo sapiens
tttgggaaacatttt

SEQ ID NO: 940398 - DNA, 15 bp, Homo sapiens
ttgggaaacattttg

SEQ ID NO: 940399 - DNA, 15 bp, Homo sapiens
tgggaaacattttga

SEQ ID NO: 940400 - DNA, 15 bp, Homo sapiens
gggaaacattttgat

SEQ ID NO: 940401 - DNA, 15 bp, Homo sapiens
ggaaacattttgata

SEQ ID NO: 940402 - DNA, 15 bp, Homo sapiens
gaaacattttgatat

SEQ ID NO: 940403 - DNA, 15 bp, Homo sapiens
aaacattttgatata

SEQ ID NO: 940404 - DNA, 15 bp, Homo sapiens
aacattttgatataa

SEQ ID NO: 940405 - DNA, 15 bp, Homo sapiens
acattttgatataat

SEQ ID NO: 940406 - DNA, 15 bp, Homo sapiens
cattttgatataatg

SEQ ID NO: 940407 - DNA, 15 bp, Homo sapiens
attttgatataatga

SEQ ID NO: 940408 - DNA, 15 bp, Homo sapiens
ttttgatataatgaa

SEQ ID NO: 940409 - DNA, 15 bp, Homo sapiens
tttgatataatgaat

SEQ ID NO: 940410 - DNA, 15 bp, Homo sapiens
ttgatataatgaata

SEQ ID NO: 940411 - DNA, 15 bp, Homo sapiens
tgatataatgaatat

SEQ ID NO: 940412 - DNA, 15 bp, Homo sapiens
gatataatgaatatg

SEQ ID NO: 940413 - DNA, 15 bp, Homo sapiens
atataatgaatatgg

SEQ ID NO: 940414 - DNA, 15 bp, Homo sapiens
tataatgaatatggc

SEQ ID NO: 940415 - DNA, 15 bp, Homo sapiens
ataatgaatatggct

SEQ ID NO: 940416 - DNA, 15 bp, Homo sapiens
taatgaatatggctc

SEQ ID NO: 940417 - DNA, 15 bp, Homo sapiens
aatgaatatggctct

SEQ ID NO: 940418 - DNA, 15 bp, Homo sapiens
atgaatatggctctt

SEQ ID NO: 940419 - DNA, 15 bp, Homo sapiens
tgaatatggctcttg

SEQ ID NO: 940420 - DNA, 15 bp, Homo sapiens
gaatatggctcttgt

SEQ ID NO: 940421 - DNA, 15 bp, Homo sapiens
aatatggctcttgtc

SEQ ID NO: 940422 - DNA, 15 bp, Homo sapiens
atatggctcttgtca

SEQ ID NO: 940423 - DNA, 15 bp, Homo sapiens
tatggctcttgtcaa

SEQ ID NO: 940424 - DNA, 15 bp, Homo sapiens
atggctcttgtcaaa

SEQ ID NO: 940425 - DNA, 15 bp, Homo sapiens
tggctcttgtcaaac

SEQ ID NO: 940426 - DNA, 15 bp, Homo sapiens
ggctcttgtcaaaca

SEQ ID NO: 940427 - DNA, 15 bp, Homo sapiens
gctcttgtcaaacat

SEQ ID NO: 940428 - DNA, 15 bp, Homo sapiens
ctcttgtcaaacatg

SEQ ID NO: 940429 - DNA, 15 bp, Homo sapiens
tcttgtcaaacatgt

SEQ ID NO: 940430 - DNA, 15 bp, Homo sapiens
cttgtcaaacatgtt

SEQ ID NO: 940431 - DNA, 15 bp, Homo sapiens
ttgtcaaacatgtta

SEQ ID NO: 940432 - DNA, 15 bp, Homo sapiens
tgtcaaacatgttat

SEQ ID NO: 940433 - DNA, 15 bp, Homo sapiens
gtcaaacatgttatt

SEQ ID NO: 940434 - DNA, 15 bp, Homo sapiens
tcaaacatgttattc

SEQ ID NO: 940435 - DNA, 15 bp, Homo sapiens
caaacatgttattct

SEQ ID NO: 940436 - DNA, 15 bp, Homo sapiens
aaacatgttattctc

SEQ ID NO: 940437 - DNA, 15 bp, Homo sapiens
aacatgttattctct

SEQ ID NO: 940438 - DNA, 15 bp, Homo sapiens
acatgttattctcta

SEQ ID NO: 940439 - DNA, 15 bp, Homo sapiens
catgttattctctat

SEQ ID NO: 940440 - DNA, 15 bp, Homo sapiens
atgttattctctatc

SEQ ID NO: 940441 - DNA, 15 bp, Homo sapiens
tgttattctctatct

SEQ ID NO: 940442 - DNA, 15 bp, Homo sapiens
gttattctctatcta

SEQ ID NO: 940443 - DNA, 15 bp, Homo sapiens
ttattctctatctaa

SEQ ID NO: 940444 - DNA, 15 bp, Homo sapiens
tattctctatctaaa

SEQ ID NO: 940445 - DNA, 15 bp, Homo sapiens
attctctatctaaat

SEQ ID NO: 940446 - DNA, 15 bp, Homo sapiens
ttctctatctaaatg

SEQ ID NO: 940447 - DNA, 15 bp, Homo sapiens
tctctatctaaatgc

SEQ ID NO: 940448 - DNA, 15 bp, Homo sapiens
ctctatctaaatgca

SEQ ID NO: 940449 - DNA, 15 bp, Homo sapiens
tctatctaaatgcaa

SEQ ID NO: 940450 - DNA, 15 bp, Homo sapiens
ctatctaaatgcaaa

SEQ ID NO: 940451 - DNA, 15 bp, Homo sapiens
tatctaaatgcaaat

SEQ ID NO: 940452 - DNA, 15 bp, Homo sapiens
atctaaatgcaaatt

SEQ ID NO: 940453 - DNA, 15 bp, Homo sapiens
tctaaatgcaaattc

SEQ ID NO: 940454 - DNA, 15 bp, Homo sapiens
ctaaatgcaaattca

SEQ ID NO: 940455 - DNA, 15 bp, Homo sapiens
taaatgcaaattcat

SEQ ID NO: 940456 - DNA, 15 bp, Homo sapiens
aaatgcaaattcatt

SEQ ID NO: 940457 - DNA, 15 bp, Homo sapiens
aatgcaaattcattt

SEQ ID NO: 940458 - DNA, 15 bp, Homo sapiens
atgcaaattcattta

SEQ ID NO: 940459 - DNA, 15 bp, Homo sapiens
tgcaaattcatttac

SEQ ID NO: 940460 - DNA, 15 bp, Homo sapiens
gcaaattcatttaca

SEQ ID NO: 940461 - DNA, 15 bp, Homo sapiens
caaattcatttacaa

SEQ ID NO: 940462 - DNA, 15 bp, Homo sapiens
aaattcatttacaaa

SEQ ID NO: 940463 - DNA, 15 bp, Homo sapiens
aattcatttacaaat

SEQ ID NO: 940464 - DNA, 15 bp, Homo sapiens
attcatttacaaatg

SEQ ID NO: 940465 - DNA, 15 bp, Homo sapiens
ttcatttacaaatga

SEQ ID NO: 940466 - DNA, 15 bp, Homo sapiens
tcatttacaaatgac

SEQ ID NO: 940467 - DNA, 15 bp, Homo sapiens
catttacaaatgaca

SEQ ID NO: 940468 - DNA, 15 bp, Homo sapiens
atttacaaatgacaa

SEQ ID NO: 940469 - DNA, 15 bp, Homo sapiens
tttacaaatgacaag

SEQ ID NO: 940470 - DNA, 15 bp, Homo sapiens
ttacaaatgacaagc

SEQ ID NO: 940471 - DNA, 15 bp, Homo sapiens
tacaaatgacaagca

SEQ ID NO: 940472 - DNA, 15 bp, Homo sapiens
acaaatgacaagcaa

SEQ ID NO: 940473 - DNA, 15 bp, Homo sapiens
caaatgacaagcaat

SEQ ID NO: 940474 - DNA, 15 bp, Homo sapiens
aaatgacaagcaata

SEQ ID NO: 940475 - DNA, 15 bp, Homo sapiens
aatgacaagcaataa

SEQ ID NO: 940476 - DNA, 15 bp, Homo sapiens
atgacaagcaataaa

SEQ ID NO: 940477 - DNA, 15 bp, Homo sapiens
tgacaagcaataaag

SEQ ID NO: 940478 - DNA, 15 bp, Homo sapiens
gacaagcaataaaga

SEQ ID NO: 940479 - DNA, 15 bp, Homo sapiens
acaagcaataaagaa

SEQ ID NO: 940480 - DNA, 15 bp, Homo sapiens
gcaataaagaaaatt

SEQ ID NO: 940481 - DNA, 15 bp, Homo sapiens
caataaagaaaatta

SEQ ID NO: 940482 - DNA, 15 bp, Homo sapiens
aataaagaaaattag

SEQ ID NO: 940483 - DNA, 15 bp, Homo sapiens
ataaagaaaattaga

SEQ ID NO: 940484 - DNA, 15 bp, Homo sapiens
taaagaaaattagaa

SEQ ID NO: 940485 - DNA, 15 bp, Homo sapiens
aaagaaaattagaat

SEQ ID NO: 940486 - DNA, 15 bp, Homo sapiens
aagaaaattagaatc

SEQ ID NO: 940487 - DNA, 15 bp, Homo sapiens
agaaaattagaatca

SEQ ID NO: 940488 - DNA, 15 bp, Homo sapiens
gaaaattagaatcat

SEQ ID NO: 940489 - DNA, 15 bp, Homo sapiens
aaaattagaatcatt

SEQ ID NO: 940490 - DNA, 15 bp, Homo sapiens
aaattagaatcattt

SEQ ID NO: 940491 - DNA, 15 bp, Homo sapiens
aattagaatcatttt

SEQ ID NO: 940492 - DNA, 15 bp, Homo sapiens
attagaatcattttg

SEQ ID NO: 940493 - DNA, 15 bp, Homo sapiens
ttagaatcattttgc

SEQ ID NO: 940494 - DNA, 15 bp, Homo sapiens
tagaatcattttgct

SEQ ID NO: 940495 - DNA, 15 bp, Homo sapiens
agaatcattttgctt

SEQ ID NO: 940496 - DNA, 15 bp, Homo sapiens
gaatcattttgcttg

SEQ ID NO: 940497 - DNA, 15 bp, Homo sapiens
aatcattttgcttga

SEQ ID NO: 940498 - DNA, 15 bp, Homo sapiens
atcattttgcttgag

SEQ ID NO: 940499 - DNA, 15 bp, Homo sapiens
tcattttgcttgagt

SEQ ID NO: 940500 - DNA, 15 bp, Homo sapiens
cattttgcttgagtt

SEQ ID NO: 940501 - DNA, 15 bp, Homo sapiens
attttgcttgagttt

SEQ ID NO: 940502 - DNA, 15 bp, Homo sapiens
ttttgcttgagtttt

SEQ ID NO: 940503 - DNA, 15 bp, Homo sapiens
tttgcttgagttttg

SEQ ID NO: 940504 - DNA, 15 bp, Homo sapiens
ttgcttgagttttga

SEQ ID NO: 940505 - DNA, 15 bp, Homo sapiens
tgcttgagttttgac

SEQ ID NO: 940506 - DNA, 15 bp, Homo sapiens
gcttgagttttgaca

SEQ ID NO: 940507 - DNA, 15 bp, Homo sapiens
cttgagttttgacac

SEQ ID NO: 940508 - DNA, 15 bp, Homo sapiens
ttgagttttgacaca

SEQ ID NO: 940509 - DNA, 15 bp, Homo sapiens
tgagttttgacacag

SEQ ID NO: 940510 - DNA, 15 bp, Homo sapiens
gagttttgacacagg

SEQ ID NO: 940511 - DNA, 15 bp, Homo sapiens
agttttgacacagga

SEQ ID NO: 940512 - DNA, 15 bp, Homo sapiens
gttttgacacaggaa

SEQ ID NO: 940513 - DNA, 15 bp, Homo sapiens
ttttgacacaggaag

SEQ ID NO: 940514 - DNA, 15 bp, Homo sapiens
tttgacacaggaagt

SEQ ID NO: 940515 - DNA, 15 bp, Homo sapiens
ttgacacaggaagtc

SEQ ID NO: 940516 - DNA, 15 bp, Homo sapiens
tgacacaggaagtca

SEQ ID NO: 940517 - DNA, 15 bp, Homo sapiens
gacacaggaagtcat

SEQ ID NO: 940518 - DNA, 15 bp, Homo sapiens
acacaggaagtcatc

SEQ ID NO: 940519 - DNA, 15 bp, Homo sapiens
cacaggaagtcatca

SEQ ID NO: 940520 - DNA, 15 bp, Homo sapiens
acaggaagtcatcaa

SEQ ID NO: 940521 - DNA, 15 bp, Homo sapiens
caggaagtcatcaag

SEQ ID NO: 940522 - DNA, 15 bp, Homo sapiens
aggaagtcatcaagg

SEQ ID NO: 940523 - DNA, 15 bp, Homo sapiens
ggaagtcatcaagga

SEQ ID NO: 940524 - DNA, 15 bp, Homo sapiens
gaagtcatcaaggac

SEQ ID NO: 940525 - DNA, 15 bp, Homo sapiens
aagtcatcaaggaca

SEQ ID NO: 940526 - DNA, 15 bp, Homo sapiens
agtcatcaaggacaa

SEQ ID NO: 940527 - DNA, 15 bp, Homo sapiens
gtcatcaaggacaac

SEQ ID NO: 940528 - DNA, 15 bp, Homo sapiens
tcatcaaggacaact

SEQ ID NO: 940529 - DNA, 15 bp, Homo sapiens
catcaaggacaactc

SEQ ID NO: 940530 - DNA, 15 bp, Homo sapiens
atcaaggacaactca

SEQ ID NO: 940531 - DNA, 15 bp, Homo sapiens
tcaaggacaactcag

SEQ ID NO: 940532 - DNA, 15 bp, Homo sapiens
caaggacaactcagg

SEQ ID NO: 940533 - DNA, 15 bp, Homo sapiens
aaggacaactcaggg

SEQ ID NO: 940534 - DNA, 15 bp, Homo sapiens
aggacaactcaggga

SEQ ID NO: 940535 - DNA, 15 bp, Homo sapiens
ggacaactcagggac

SEQ ID NO: 940536 - DNA, 15 bp, Homo sapiens
gacaactcagggact

SEQ ID NO: 940537 - DNA, 15 bp, Homo sapiens
acaactcagggactt

SEQ ID NO: 940538 - DNA, 15 bp, Homo sapiens
caactcagggacttt

SEQ ID NO: 940539 - DNA, 15 bp, Homo sapiens
aactcagggactttc

SEQ ID NO: 940540 - DNA, 15 bp, Homo sapiens
actcagggactttct

SEQ ID NO: 940541 - DNA, 15 bp, Homo sapiens
ctcagggactttctc

SEQ ID NO: 940542 - DNA, 15 bp, Homo sapiens
tcagggactttctcc

SEQ ID NO: 940543 - DNA, 15 bp, Homo sapiens
cagggactttctcct

SEQ ID NO: 940544 - DNA, 15 bp, Homo sapiens
agggactttctcctc

SEQ ID NO: 940545 - DNA, 15 bp, Homo sapiens
gggactttctcctct

SEQ ID NO: 940546 - DNA, 15 bp, Homo sapiens
ggactttctcctctg

SEQ ID NO: 940547 - DNA, 15 bp, Homo sapiens
gactttctcctctgg

SEQ ID NO: 940548 - DNA, 15 bp, Homo sapiens
actttctcctctggg

SEQ ID NO: 940549 - DNA, 15 bp, Homo sapiens
ctttctcctctgggg

SEQ ID NO: 940550 - DNA, 15 bp, Homo sapiens
tttctcctctggggc

SEQ ID NO: 940551 - DNA, 15 bp, Homo sapiens
ttctcctctggggct

SEQ ID NO: 940552 - DNA, 15 bp, Homo sapiens
tctcctctggggctc

SEQ ID NO: 940553 - DNA, 15 bp, Homo sapiens
ctcctctggggctcc

SEQ ID NO: 940554 - DNA, 15 bp, Homo sapiens
tcctctggggctccc

SEQ ID NO: 940555 - DNA, 15 bp, Homo sapiens
cctctggggctccca

SEQ ID NO: 940556 - DNA, 15 bp, Homo sapiens
ctctggggctcccaa

SEQ ID NO: 940557 - DNA, 15 bp, Homo sapiens
tctggggctcccaag

SEQ ID NO: 940558 - DNA, 15 bp, Homo sapiens
ctggggctcccaaga

SEQ ID NO: 940559 - DNA, 15 bp, Homo sapiens
tggggctcccaagaa

SEQ ID NO: 940560 - DNA, 15 bp, Homo sapiens
ggggctcccaagaac

SEQ ID NO: 940561 - DNA, 15 bp, Homo sapiens
gggctcccaagaaca

SEQ ID NO: 940562 - DNA, 15 bp, Homo sapiens
ggctcccaagaacaa

SEQ ID NO: 940563 - DNA, 15 bp, Homo sapiens
gctcccaagaacaaa

SEQ ID NO: 940564 - DNA, 15 bp, Homo sapiens
ctcccaagaacaaaa

SEQ ID NO: 940565 - DNA, 15 bp, Homo sapiens
tcccaagaacaaaag

SEQ ID NO: 940566 - DNA, 15 bp, Homo sapiens
cccaagaacaaaagc

SEQ ID NO: 940567 - DNA, 15 bp, Homo sapiens
ccaagaacaaaagct

SEQ ID NO: 940568 - DNA, 15 bp, Homo sapiens
caagaacaaaagcta

SEQ ID NO: 940569 - DNA, 15 bp, Homo sapiens
aagaacaaaagctaa

SEQ ID NO: 940570 - DNA, 15 bp, Homo sapiens
agaacaaaagctaaa

SEQ ID NO: 940571 - DNA, 15 bp, Homo sapiens
gaacaaaagctaaac

SEQ ID NO: 940572 - DNA, 15 bp, Homo sapiens
aacaaaagctaaact

SEQ ID NO: 940573 - DNA, 15 bp, Homo sapiens
acaaaagctaaactg

SEQ ID NO: 940574 - DNA, 15 bp, Homo sapiens
caaaagctaaactgc

SEQ ID NO: 940575 - DNA, 15 bp, Homo sapiens
aaaagctaaactgca

SEQ ID NO: 940576 - DNA, 15 bp, Homo sapiens
aaagctaaactgcag

SEQ ID NO: 940577 - DNA, 15 bp, Homo sapiens
aagctaaactgcagc

SEQ ID NO: 940578 - DNA, 15 bp, Homo sapiens
agctaaactgcagca

SEQ ID NO: 940579 - DNA, 15 bp, Homo sapiens
gctaaactgcagcac

SEQ ID NO: 940580 - DNA, 15 bp, Homo sapiens
ctaaactgcagcact

SEQ ID NO: 940581 - DNA, 15 bp, Homo sapiens
taaactgcagcactc

SEQ ID NO: 940582 - DNA, 15 bp, Homo sapiens
aaactgcagcactct

SEQ ID NO: 940583 - DNA, 15 bp, Homo sapiens
aactgcagcactctc

SEQ ID NO: 940584 - DNA, 15 bp, Homo sapiens
actgcagcactctct

SEQ ID NO: 940585 - DNA, 15 bp, Homo sapiens
ctgcagcactctcta

SEQ ID NO: 940586 - DNA, 15 bp, Homo sapiens
tgcagcactctctat

SEQ ID NO: 940587 - DNA, 15 bp, Homo sapiens
gcagcactctctatg

SEQ ID NO: 940588 - DNA, 15 bp, Homo sapiens
cagcactctctatgt

SEQ ID NO: 940589 - DNA, 15 bp, Homo sapiens
agcactctctatgta

SEQ ID NO: 940590 - DNA, 15 bp, Homo sapiens
gcactctctatgtat

SEQ ID NO: 940591 - DNA, 15 bp, Homo sapiens
cactctctatgtatc

SEQ ID NO: 940592 - DNA, 15 bp, Homo sapiens
actctctatgtatct

SEQ ID NO: 940593 - DNA, 15 bp, Homo sapiens
ctctctatgtatctc

SEQ ID NO: 940594 - DNA, 15 bp, Homo sapiens
tctctatgtatctcg

SEQ ID NO: 940595 - DNA, 15 bp, Homo sapiens
ctctatgtatctcga

SEQ ID NO: 940596 - DNA, 15 bp, Homo sapiens
tctatgtatctcgag

SEQ ID NO: 940597 - DNA, 15 bp, Homo sapiens
ctatgtatctcgagg

SEQ ID NO: 940598 - DNA, 15 bp, Homo sapiens
tatgtatctcgaggg

SEQ ID NO: 940599 - DNA, 15 bp, Homo sapiens
atgtatctcgaggga

SEQ ID NO: 940600 - DNA, 15 bp, Homo sapiens
tgtatctcgagggag

SEQ ID NO: 940601 - DNA, 15 bp, Homo sapiens
gtatctcgagggaga

SEQ ID NO: 940602 - DNA, 15 bp, Homo sapiens
tatctcgagggagat

SEQ ID NO: 940603 - DNA, 15 bp, Homo sapiens
atctcgagggagatt

SEQ ID NO: 940604 - DNA, 15 bp, Homo sapiens
tctcgagggagatta

SEQ ID NO: 940605 - DNA, 15 bp, Homo sapiens
ctcgagggagattac

SEQ ID NO: 940606 - DNA, 15 bp, Homo sapiens
tcgagggagattacc

SEQ ID NO: 940607 - DNA, 15 bp, Homo sapiens
cgagggagattacct

SEQ ID NO: 940608 - DNA, 15 bp, Homo sapiens
gagggagattacctg

SEQ ID NO: 940609 - DNA, 15 bp, Homo sapiens
agggagattacctgc

SEQ ID NO: 940610 - DNA, 15 bp, Homo sapiens
gggagattacctgcc

SEQ ID NO: 940611 - DNA, 15 bp, Homo sapiens
ggagattacctgcct

SEQ ID NO: 940612 - DNA, 15 bp, Homo sapiens
gagattacctgcctc

SEQ ID NO: 940613 - DNA, 15 bp, Homo sapiens
agattacctgcctcc

SEQ ID NO: 940614 - DNA, 15 bp, Homo sapiens
gattacctgcctcca

SEQ ID NO: 940615 - DNA, 15 bp, Homo sapiens
attacctgcctccag

SEQ ID NO: 940616 - DNA, 15 bp, Homo sapiens
ttacctgcctccaga

SEQ ID NO: 940617 - DNA, 15 bp, Homo sapiens
tacctgcctccagac

SEQ ID NO: 940618 - DNA, 15 bp, Homo sapiens
acctgcctccagact

SEQ ID NO: 940619 - DNA, 15 bp, Homo sapiens
cctgcctccagactg

SEQ ID NO: 940620 - DNA, 15 bp, Homo sapiens
ctgcctccagactgg

SEQ ID NO: 940621 - DNA, 15 bp, Homo sapiens
tgcctccagactggt

SEQ ID NO: 940622 - DNA, 15 bp, Homo sapiens
gcctccagactggtt

SEQ ID NO: 940623 - DNA, 15 bp, Homo sapiens
cctccagactggttt

SEQ ID NO: 940624 - DNA, 15 bp, Homo sapiens
ctccagactggttta

SEQ ID NO: 940625 - DNA, 15 bp, Homo sapiens
tccagactggtttaa

SEQ ID NO: 940626 - DNA, 15 bp, Homo sapiens
ccagactggtttaag

SEQ ID NO: 940627 - DNA, 15 bp, Homo sapiens
cagactggtttaagt

SEQ ID NO: 940628 - DNA, 15 bp, Homo sapiens
agactggtttaagtc

SEQ ID NO: 940629 - DNA, 15 bp, Homo sapiens
gactggtttaagtca

SEQ ID NO: 940630 - DNA, 15 bp, Homo sapiens
actggtttaagtcaa

SEQ ID NO: 940631 - DNA, 15 bp, Homo sapiens
ctggtttaagtcaat

SEQ ID NO: 940632 - DNA, 15 bp, Homo sapiens
tggtttaagtcaatg

SEQ ID NO: 940633 - DNA, 15 bp, Homo sapiens
ggtttaagtcaatgg

SEQ ID NO: 940634 - DNA, 15 bp, Homo sapiens
gtttaagtcaatgga

SEQ ID NO: 940635 - DNA, 15 bp, Homo sapiens
tttaagtcaatggat

SEQ ID NO: 940636 - DNA, 15 bp, Homo sapiens
ttaagtcaatggatc

SEQ ID NO: 940637 - DNA, 15 bp, Homo sapiens
taagtcaatggatcc

SEQ ID NO: 940638 - DNA, 15 bp, Homo sapiens
aagtcaatggatcct

SEQ ID NO: 940639 - DNA, 15 bp, Homo sapiens
agtcaatggatcctg

SEQ ID NO: 940640 - DNA, 15 bp, Homo sapiens
gtcaatggatcctgc

SEQ ID NO: 940641 - DNA, 15 bp, Homo sapiens
tcaatggatcctgct

SEQ ID NO: 940642 - DNA, 15 bp, Homo sapiens
caatggatcctgctt

SEQ ID NO: 940643 - DNA, 15 bp, Homo sapiens
aatggatcctgcttt

SEQ ID NO: 940644 - DNA, 15 bp, Homo sapiens
atggatcctgctttc

SEQ ID NO: 940645 - DNA, 15 bp, Homo sapiens
tggatcctgctttca

SEQ ID NO: 940646 - DNA, 15 bp, Homo sapiens
ggatcctgctttcat

SEQ ID NO: 940647 - DNA, 15 bp, Homo sapiens
gatcctgctttcatt

SEQ ID NO: 940648 - DNA, 15 bp, Homo sapiens
atcctgctttcattt

SEQ ID NO: 940649 - DNA, 15 bp, Homo sapiens
tcctgctttcattta

SEQ ID NO: 940650 - DNA, 15 bp, Homo sapiens
cctgctttcatttat

SEQ ID NO: 940651 - DNA, 15 bp, Homo sapiens
ctgctttcatttata

SEQ ID NO: 940652 - DNA, 15 bp, Homo sapiens
tgctttcatttataa

SEQ ID NO: 940653 - DNA, 15 bp, Homo sapiens
gctttcatttataat

SEQ ID NO: 940654 - DNA, 15 bp, Homo sapiens
ctttcatttataatt

SEQ ID NO: 940655 - DNA, 15 bp, Homo sapiens
tttcatttataattt

SEQ ID NO: 940656 - DNA, 15 bp, Homo sapiens
ttcatttataatttt

SEQ ID NO: 940657 - DNA, 15 bp, Homo sapiens
tcatttataattttc

SEQ ID NO: 940658 - DNA, 15 bp, Homo sapiens
catttataattttca

SEQ ID NO: 940659 - DNA, 15 bp, Homo sapiens
atttataattttcag

SEQ ID NO: 940660 - DNA, 15 bp, Homo sapiens
tttataattttcaga

SEQ ID NO: 940661 - DNA, 15 bp, Homo sapiens
ttataattttcagag

SEQ ID NO: 940662 - DNA, 15 bp, Homo sapiens
tataattttcagagg

SEQ ID NO: 940663 - DNA, 15 bp, Homo sapiens
ataattttcagaggt

SEQ ID NO: 940664 - DNA, 15 bp, Homo sapiens
taattttcagaggta

SEQ ID NO: 940665 - DNA, 15 bp, Homo sapiens
aattttcagaggtat

SEQ ID NO: 940666 - DNA, 15 bp, Homo sapiens
attttcagaggtatc

SEQ ID NO: 940667 - DNA, 15 bp, Homo sapiens
ttttcagaggtatcc

SEQ ID NO: 940668 - DNA, 15 bp, Homo sapiens
tttcagaggtatcca

SEQ ID NO: 940669 - DNA, 15 bp, Homo sapiens
ttcagaggtatccag

SEQ ID NO: 940670 - DNA, 15 bp, Homo sapiens
tcagaggtatccagt

SEQ ID NO: 940671 - DNA, 15 bp, Homo sapiens
cagaggtatccagta

SEQ ID NO: 940672 - DNA, 15 bp, Homo sapiens
agaggtatccagtaa

SEQ ID NO: 940673 - DNA, 15 bp, Homo sapiens
gaggtatccagtaac

SEQ ID NO: 940674 - DNA, 15 bp, Homo sapiens
aggtatccagtaact

SEQ ID NO: 940675 - DNA, 15 bp, Homo sapiens
ggtatccagtaactg

SEQ ID NO: 940676 - DNA, 15 bp, Homo sapiens
gtatccagtaactga

SEQ ID NO: 940677 - DNA, 15 bp, Homo sapiens
tatccagtaactgat

SEQ ID NO: 940678 - DNA, 15 bp, Homo sapiens
atccagtaactgatg

SEQ ID NO: 940679 - DNA, 15 bp, Homo sapiens
tccagtaactgatgc

SEQ ID NO: 940680 - DNA, 15 bp, Homo sapiens
ccagtaactgatgct

SEQ ID NO: 940681 - DNA, 15 bp, Homo sapiens
cagtaactgatgctt

SEQ ID NO: 940682 - DNA, 15 bp, Homo sapiens
agtaactgatgcttc

SEQ ID NO: 940683 - DNA, 15 bp, Homo sapiens
gtaactgatgcttct

SEQ ID NO: 940684 - DNA, 15 bp, Homo sapiens
taactgatgcttctc

SEQ ID NO: 940685 - DNA, 15 bp, Homo sapiens
aactgatgcttctcc

SEQ ID NO: 940686 - DNA, 15 bp, Homo sapiens
actgatgcttctccc

SEQ ID NO: 940687 - DNA, 15 bp, Homo sapiens
ctgatgcttctcccc

SEQ ID NO: 940688 - DNA, 15 bp, Homo sapiens
tgatgcttctcccca

SEQ ID NO: 940689 - DNA, 15 bp, Homo sapiens
gatgcttctccccag

SEQ ID NO: 940690 - DNA, 15 bp, Homo sapiens
atgcttctccccagg

SEQ ID NO: 940691 - DNA, 15 bp, Homo sapiens
tgcttctccccaggg

SEQ ID NO: 940692 - DNA, 15 bp, Homo sapiens
gcttctccccagggt

SEQ ID NO: 940693 - DNA, 15 bp, Homo sapiens
cttctccccagggtt

SEQ ID NO: 940694 - DNA, 15 bp, Homo sapiens
ttctccccagggttc

SEQ ID NO: 940695 - DNA, 15 bp, Homo sapiens
tctccccagggttcc

SEQ ID NO: 940696 - DNA, 15 bp, Homo sapiens
ctccccagggttcca

SEQ ID NO: 940697 - DNA, 15 bp, Homo sapiens
tccccagggttccat

SEQ ID NO: 940698 - DNA, 15 bp, Homo sapiens
ccccagggttccatc

SEQ ID NO: 940699 - DNA, 15 bp, Homo sapiens
cccagggttccatct

SEQ ID NO: 940700 - DNA, 15 bp, Homo sapiens
ccagggttccatctt

SEQ ID NO: 940701 - DNA, 15 bp, Homo sapiens
cagggttccatctta

SEQ ID NO: 940702 - DNA, 15 bp, Homo sapiens
agggttccatcttaa

SEQ ID NO: 940703 - DNA, 15 bp, Homo sapiens
gggttccatcttaag

SEQ ID NO: 940704 - DNA, 15 bp, Homo sapiens
ggttccatcttaagc

SEQ ID NO: 940705 - DNA, 15 bp, Homo sapiens
gttccatcttaagca

SEQ ID NO: 940706 - DNA, 15 bp, Homo sapiens
ttccatcttaagcac

SEQ ID NO: 940707 - DNA, 15 bp, Homo sapiens
tccatcttaagcacc

SEQ ID NO: 940708 - DNA, 15 bp, Homo sapiens
ccatcttaagcaccc

SEQ ID NO: 940709 - DNA, 15 bp, Homo sapiens
catcttaagcacccc

SEQ ID NO: 940710 - DNA, 15 bp, Homo sapiens
atcttaagcacccct

SEQ ID NO: 940711 - DNA, 15 bp, Homo sapiens
tcttaagcacccctt

SEQ ID NO: 940712 - DNA, 15 bp, Homo sapiens
cttaagcaccccttc

SEQ ID NO: 940713 - DNA, 15 bp, Homo sapiens
ttaagcaccccttcc

SEQ ID NO: 940714 - DNA, 15 bp, Homo sapiens
taagcaccccttccc

SEQ ID NO: 940715 - DNA, 15 bp, Homo sapiens
aagcaccccttccct

SEQ ID NO: 940716 - DNA, 15 bp, Homo sapiens
agcaccccttccctt

SEQ ID NO: 940717 - DNA, 15 bp, Homo sapiens
gcaccccttcccttc

SEQ ID NO: 940718 - DNA, 15 bp, Homo sapiens
caccccttcccttct

SEQ ID NO: 940719 - DNA, 15 bp, Homo sapiens
accccttcccttctc

SEQ ID NO: 940720 - DNA, 15 bp, Homo sapiens
ccccttcccttctca

SEQ ID NO: 940721 - DNA, 15 bp, Homo sapiens
cccttcccttctcac

SEQ ID NO: 940722 - DNA, 15 bp, Homo sapiens
ccttcccttctcacc

SEQ ID NO: 940723 - DNA, 15 bp, Homo sapiens
cttcccttctcaccc

SEQ ID NO: 940724 - DNA, 15 bp, Homo sapiens
ttcccttctcaccct

SEQ ID NO: 940725 - DNA, 15 bp, Homo sapiens
tcccttctcaccctg

SEQ ID NO: 940726 - DNA, 15 bp, Homo sapiens
cccttctcaccctgc

SEQ ID NO: 940727 - DNA, 15 bp, Homo sapiens
ccttctcaccctgca

SEQ ID NO: 940728 - DNA, 15 bp, Homo sapiens
cttctcaccctgcag

SEQ ID NO: 940729 - DNA, 15 bp, Homo sapiens
ttctcaccctgcaga

SEQ ID NO: 940730 - DNA, 15 bp, Homo sapiens
tctcaccctgcagaa

SEQ ID NO: 940731 - DNA, 15 bp, Homo sapiens
ctcaccctgcagaat

SEQ ID NO: 940732 - DNA, 15 bp, Homo sapiens
tcaccctgcagaatt

SEQ ID NO: 940733 - DNA, 15 bp, Homo sapiens
caccctgcagaattt

SEQ ID NO: 940734 - DNA, 15 bp, Homo sapiens
accctgcagaatttt

SEQ ID NO: 940735 - DNA, 15 bp, Homo sapiens
ccctgcagaattttc

SEQ ID NO: 940736 - DNA, 15 bp, Homo sapiens
cctgcagaattttct

SEQ ID NO: 940737 - DNA, 15 bp, Homo sapiens
ctgcagaattttctt

SEQ ID NO: 940738 - DNA, 15 bp, Homo sapiens
tgcagaattttctta

SEQ ID NO: 940739 - DNA, 15 bp, Homo sapiens
gcagaattttcttaa

SEQ ID NO: 940740 - DNA, 15 bp, Homo sapiens
cagaattttcttaaa

SEQ ID NO: 940741 - DNA, 15 bp, Homo sapiens
agaattttcttaaaa

SEQ ID NO: 940742 - DNA, 15 bp, Homo sapiens
gaattttcttaaaaa

SEQ ID NO: 940743 - DNA, 15 bp, Homo sapiens
aattttcttaaaaat

SEQ ID NO: 940744 - DNA, 15 bp, Homo sapiens
attttcttaaaaatt

SEQ ID NO: 940745 - DNA, 15 bp, Homo sapiens
ttttcttaaaaattc

SEQ ID NO: 940746 - DNA, 15 bp, Homo sapiens
tttcttaaaaattct

SEQ ID NO: 940747 - DNA, 15 bp, Homo sapiens
ttcttaaaaattctt

SEQ ID NO: 940748 - DNA, 15 bp, Homo sapiens
tcttaaaaattctta

SEQ ID NO: 940749 - DNA, 15 bp, Homo sapiens
cttaaaaattcttaa

SEQ ID NO: 940750 - DNA, 15 bp, Homo sapiens
ttaaaaattcttaac

SEQ ID NO: 940751 - DNA, 15 bp, Homo sapiens
taaaaattcttaaca

SEQ ID NO: 940752 - DNA, 15 bp, Homo sapiens
aaaaattcttaacac

SEQ ID NO: 940753 - DNA, 15 bp, Homo sapiens
aaaattcttaacact

SEQ ID NO: 940754 - DNA, 15 bp, Homo sapiens
aaattcttaacactc

SEQ ID NO: 940755 - DNA, 15 bp, Homo sapiens
aattcttaacactcc

SEQ ID NO: 940756 - DNA, 15 bp, Homo sapiens
attcttaacactccg

SEQ ID NO: 940757 - DNA, 15 bp, Homo sapiens
ttcttaacactccga

SEQ ID NO: 940758 - DNA, 15 bp, Homo sapiens
tcttaacactccgaa

SEQ ID NO: 940759 - DNA, 15 bp, Homo sapiens
cttaacactccgaag

SEQ ID NO: 940760 - DNA, 15 bp, Homo sapiens
ttaacactccgaagt

SEQ ID NO: 940761 - DNA, 15 bp, Homo sapiens
taacactccgaagtc

SEQ ID NO: 940762 - DNA, 15 bp, Homo sapiens
aacactccgaagtct

SEQ ID NO: 940763 - DNA, 15 bp, Homo sapiens
acactccgaagtctg

SEQ ID NO: 940764 - DNA, 15 bp, Homo sapiens
cactccgaagtctgt

SEQ ID NO: 940765 - DNA, 15 bp, Homo sapiens
actccgaagtctgta

SEQ ID NO: 940766 - DNA, 15 bp, Homo sapiens
ctccgaagtctgtat

SEQ ID NO: 940767 - DNA, 15 bp, Homo sapiens
tccgaagtctgtatc

SEQ ID NO: 940768 - DNA, 15 bp, Homo sapiens
ccgaagtctgtatct

SEQ ID NO: 940769 - DNA, 15 bp, Homo sapiens
cgaagtctgtatcta

SEQ ID NO: 940770 - DNA, 15 bp, Homo sapiens
gaagtctgtatctac

SEQ ID NO: 940771 - DNA, 15 bp, Homo sapiens
aagtctgtatctaca

SEQ ID NO: 940772 - DNA, 15 bp, Homo sapiens
agtctgtatctacaa

SEQ ID NO: 940773 - DNA, 15 bp, Homo sapiens
gtctgtatctacaac

SEQ ID NO: 940774 - DNA, 15 bp, Homo sapiens
tctgtatctacaacc

SEQ ID NO: 940775 - DNA, 15 bp, Homo sapiens
ctgtatctacaacct

SEQ ID NO: 940776 - DNA, 15 bp, Homo sapiens
tgtatctacaacctg

SEQ ID NO: 940777 - DNA, 15 bp, Homo sapiens
gtatctacaacctgg

SEQ ID NO: 940778 - DNA, 15 bp, Homo sapiens
tatctacaacctgga

SEQ ID NO: 940779 - DNA, 15 bp, Homo sapiens
atctacaacctggac

SEQ ID NO: 940780 - DNA, 15 bp, Homo sapiens
tctacaacctggacc

SEQ ID NO: 940781 - DNA, 15 bp, Homo sapiens
ctacaacctggacct

SEQ ID NO: 940782 - DNA, 15 bp, Homo sapiens
tacaacctggacctt

SEQ ID NO: 940783 - DNA, 15 bp, Homo sapiens
acaacctggaccttt

SEQ ID NO: 940784 - DNA, 15 bp, Homo sapiens
caacctggaccttta

SEQ ID NO: 940785 - DNA, 15 bp, Homo sapiens
aacctggacctttat

SEQ ID NO: 940786 - DNA, 15 bp, Homo sapiens
acctggacctttatt

SEQ ID NO: 940787 - DNA, 15 bp, Homo sapiens
cctggacctttattc

SEQ ID NO: 940788 - DNA, 15 bp, Homo sapiens
ctggacctttattct

SEQ ID NO: 940789 - DNA, 15 bp, Homo sapiens
tggacctttattctg

SEQ ID NO: 940790 - DNA, 15 bp, Homo sapiens
ggacctttattctga

SEQ ID NO: 940791 - DNA, 15 bp, Homo sapiens
gacctttattctgag

SEQ ID NO: 940792 - DNA, 15 bp, Homo sapiens
acctttattctgagt

SEQ ID NO: 940793 - DNA, 15 bp, Homo sapiens
cctttattctgagtc

SEQ ID NO: 940794 - DNA, 15 bp, Homo sapiens
ctttattctgagtcc

SEQ ID NO: 940795 - DNA, 15 bp, Homo sapiens
tttattctgagtcct

SEQ ID NO: 940796 - DNA, 15 bp, Homo sapiens
ttattctgagtccta

SEQ ID NO: 940797 - DNA, 15 bp, Homo sapiens
tattctgagtcctag

SEQ ID NO: 940798 - DNA, 15 bp, Homo sapiens
attctgagtcctagc

SEQ ID NO: 940799 - DNA, 15 bp, Homo sapiens
ttctgagtcctagca

SEQ ID NO: 940800 - DNA, 15 bp, Homo sapiens
tctgagtcctagcat

SEQ ID NO: 940801 - DNA, 15 bp, Homo sapiens
ctgagtcctagcatg

SEQ ID NO: 940802 - DNA, 15 bp, Homo sapiens
tgagtcctagcatgt

SEQ ID NO: 940803 - DNA, 15 bp, Homo sapiens
gagtcctagcatgtg

SEQ ID NO: 940804 - DNA, 15 bp, Homo sapiens
agtcctagcatgtgt

SEQ ID NO: 940805 - DNA, 15 bp, Homo sapiens
gtcctagcatgtgtc

SEQ ID NO: 940806 - DNA, 15 bp, Homo sapiens
tcctagcatgtgtca

SEQ ID NO: 940807 - DNA, 15 bp, Homo sapiens
cctagcatgtgtcaa

SEQ ID NO: 940808 - DNA, 15 bp, Homo sapiens
ctagcatgtgtcaac

SEQ ID NO: 940809 - DNA, 15 bp, Homo sapiens
tagcatgtgtcaact

SEQ ID NO: 940810 - DNA, 15 bp, Homo sapiens
agcatgtgtcaactg

SEQ ID NO: 940811 - DNA, 15 bp, Homo sapiens
gcatgtgtcaactgc

SEQ ID NO: 940812 - DNA, 15 bp, Homo sapiens
catgtgtcaactgcc

SEQ ID NO: 940813 - DNA, 15 bp, Homo sapiens
atgtgtcaactgcct

SEQ ID NO: 940814 - DNA, 15 bp, Homo sapiens
tgtgtcaactgccta

SEQ ID NO: 940815 - DNA, 15 bp, Homo sapiens
gtgtcaactgcctac

SEQ ID NO: 940816 - DNA, 15 bp, Homo sapiens
tgtcaactgcctaca

SEQ ID NO: 940817 - DNA, 15 bp, Homo sapiens
gtcaactgcctacaa

SEQ ID NO: 940818 - DNA, 15 bp, Homo sapiens
tcaactgcctacaac

SEQ ID NO: 940819 - DNA, 15 bp, Homo sapiens
caactgcctacaaca

SEQ ID NO: 940820 - DNA, 15 bp, Homo sapiens
aactgcctacaacac

SEQ ID NO: 940821 - DNA, 15 bp, Homo sapiens
actgcctacaacact

SEQ ID NO: 940822 - DNA, 15 bp, Homo sapiens
ctgcctacaacactt

SEQ ID NO: 940823 - DNA, 15 bp, Homo sapiens
tgcctacaacacttt

SEQ ID NO: 940824 - DNA, 15 bp, Homo sapiens
gcctacaacactttc

SEQ ID NO: 940825 - DNA, 15 bp, Homo sapiens
cctacaacactttcc

SEQ ID NO: 940826 - DNA, 15 bp, Homo sapiens
ctacaacactttccc

SEQ ID NO: 940827 - DNA, 15 bp, Homo sapiens
tacaacactttcccc

SEQ ID NO: 940828 - DNA, 15 bp, Homo sapiens
acaacactttcccca

SEQ ID NO: 940829 - DNA, 15 bp, Homo sapiens
caacactttccccaa

SEQ ID NO: 940830 - DNA, 15 bp, Homo sapiens
aacactttccccaag

SEQ ID NO: 940831 - DNA, 15 bp, Homo sapiens
acactttccccaagt

SEQ ID NO: 940832 - DNA, 15 bp, Homo sapiens
cactttccccaagtg

SEQ ID NO: 940833 - DNA, 15 bp, Homo sapiens
actttccccaagtgt

SEQ ID NO: 940834 - DNA, 15 bp, Homo sapiens
ctttccccaagtgtc

SEQ ID NO: 940835 - DNA, 15 bp, Homo sapiens
tttccccaagtgtct

SEQ ID NO: 940836 - DNA, 15 bp, Homo sapiens
ttccccaagtgtctt

SEQ ID NO: 940837 - DNA, 15 bp, Homo sapiens
tccccaagtgtcttc

SEQ ID NO: 940838 - DNA, 15 bp, Homo sapiens
ccccaagtgtcttct

SEQ ID NO: 940839 - DNA, 15 bp, Homo sapiens
cccaagtgtcttctt

SEQ ID NO: 940840 - DNA, 15 bp, Homo sapiens
ccaagtgtcttcttt

SEQ ID NO: 940841 - DNA, 15 bp, Homo sapiens
caagtgtcttctttg

SEQ ID NO: 940842 - DNA, 15 bp, Homo sapiens
aagtgtcttctttgt

SEQ ID NO: 940843 - DNA, 15 bp, Homo sapiens
agtgtcttctttgtc

SEQ ID NO: 940844 - DNA, 15 bp, Homo sapiens
gtgtcttctttgtca

SEQ ID NO: 940845 - DNA, 15 bp, Homo sapiens
tgtcttctttgtcat

SEQ ID NO: 940846 - DNA, 15 bp, Homo sapiens
gtcttctttgtcatt

SEQ ID NO: 940847 - DNA, 15 bp, Homo sapiens
tcttctttgtcattt

SEQ ID NO: 940848 - DNA, 15 bp, Homo sapiens
cttctttgtcatttt

SEQ ID NO: 940849 - DNA, 15 bp, Homo sapiens
ttctttgtcattttc

SEQ ID NO: 940850 - DNA, 15 bp, Homo sapiens
tctttgtcattttct

SEQ ID NO: 940851 - DNA, 15 bp, Homo sapiens
ctttgtcattttctt

SEQ ID NO: 940852 - DNA, 15 bp, Homo sapiens
tttgtcattttcttt

SEQ ID NO: 940853 - DNA, 15 bp, Homo sapiens
ttgtcattttcttta

SEQ ID NO: 940854 - DNA, 15 bp, Homo sapiens
tgtcattttctttac

SEQ ID NO: 940855 - DNA, 15 bp, Homo sapiens
gtcattttctttacc

SEQ ID NO: 940856 - DNA, 15 bp, Homo sapiens
tcattttctttacct

SEQ ID NO: 940857 - DNA, 15 bp, Homo sapiens
cattttctttacctt

SEQ ID NO: 940858 - DNA, 15 bp, Homo sapiens
attttctttaccttt

SEQ ID NO: 940859 - DNA, 15 bp, Homo sapiens
ttttctttacctttc

SEQ ID NO: 940860 - DNA, 15 bp, Homo sapiens
tttctttacctttcc

SEQ ID NO: 940861 - DNA, 15 bp, Homo sapiens
ttctttacctttccc

SEQ ID NO: 940862 - DNA, 15 bp, Homo sapiens
tctttacctttccca

SEQ ID NO: 940863 - DNA, 15 bp, Homo sapiens
ctttacctttcccaa

SEQ ID NO: 940864 - DNA, 15 bp, Homo sapiens
tttacctttcccaac

SEQ ID NO: 940865 - DNA, 15 bp, Homo sapiens
ttacctttcccaacc

SEQ ID NO: 940866 - DNA, 15 bp, Homo sapiens
tacctttcccaacca

SEQ ID NO: 940867 - DNA, 15 bp, Homo sapiens
acctttcccaaccac

SEQ ID NO: 940868 - DNA, 15 bp, Homo sapiens
cctttcccaaccact

SEQ ID NO: 940869 - DNA, 15 bp, Homo sapiens
ctttcccaaccactc

SEQ ID NO: 940870 - DNA, 15 bp, Homo sapiens
tttcccaaccactcc

SEQ ID NO: 940871 - DNA, 15 bp, Homo sapiens
ttcccaaccactccc

SEQ ID NO: 940872 - DNA, 15 bp, Homo sapiens
tcccaaccactccct

SEQ ID NO: 940873 - DNA, 15 bp, Homo sapiens
cccaaccactccctg

SEQ ID NO: 940874 - DNA, 15 bp, Homo sapiens
ccaaccactccctgc

SEQ ID NO: 940875 - DNA, 15 bp, Homo sapiens
caaccactccctgcc

SEQ ID NO: 940876 - DNA, 15 bp, Homo sapiens
aaccactccctgcct

SEQ ID NO: 940877 - DNA, 15 bp, Homo sapiens
accactccctgcctt

SEQ ID NO: 940878 - DNA, 15 bp, Homo sapiens
ccactccctgccttc

SEQ ID NO: 940879 - DNA, 15 bp, Homo sapiens
cactccctgccttcc

SEQ ID NO: 940880 - DNA, 15 bp, Homo sapiens
actccctgccttccc

SEQ ID NO: 940881 - DNA, 15 bp, Homo sapiens
ctccctgccttcccc

SEQ ID NO: 940882 - DNA, 15 bp, Homo sapiens
tccctgccttcccca

SEQ ID NO: 940883 - DNA, 15 bp, Homo sapiens
ccctgccttccccaa

SEQ ID NO: 940884 - DNA, 15 bp, Homo sapiens
cctgccttccccaac

SEQ ID NO: 940885 - DNA, 15 bp, Homo sapiens
ctgccttccccaaca

SEQ ID NO: 940886 - DNA, 15 bp, Homo sapiens
tgccttccccaacaa

SEQ ID NO: 940887 - DNA, 15 bp, Homo sapiens
gccttccccaacaac

SEQ ID NO: 940888 - DNA, 15 bp, Homo sapiens
ccttccccaacaact

SEQ ID NO: 940889 - DNA, 15 bp, Homo sapiens
cttccccaacaactc

SEQ ID NO: 940890 - DNA, 15 bp, Homo sapiens
ttccccaacaactcc

SEQ ID NO: 940891 - DNA, 15 bp, Homo sapiens
tccccaacaactcca

SEQ ID NO: 940892 - DNA, 15 bp, Homo sapiens
ccccaacaactccat

SEQ ID NO: 940893 - DNA, 15 bp, Homo sapiens
cccaacaactccatc

SEQ ID NO: 940894 - DNA, 15 bp, Homo sapiens
ccaacaactccatcc

SEQ ID NO: 940895 - DNA, 15 bp, Homo sapiens
caacaactccatcca

SEQ ID NO: 940896 - DNA, 15 bp, Homo sapiens
aacaactccatccac

SEQ ID NO: 940897 - DNA, 15 bp, Homo sapiens
acaactccatccact

SEQ ID NO: 940898 - DNA, 15 bp, Homo sapiens
caactccatccactc

SEQ ID NO: 940899 - DNA, 15 bp, Homo sapiens
aactccatccactca

SEQ ID NO: 940900 - DNA, 15 bp, Homo sapiens
actccatccactcat

SEQ ID NO: 940901 - DNA, 15 bp, Homo sapiens
ctccatccactcatc

SEQ ID NO: 940902 - DNA, 15 bp, Homo sapiens
tccatccactcatcc

SEQ ID NO: 940903 - DNA, 15 bp, Homo sapiens
ccatccactcatcca

SEQ ID NO: 940904 - DNA, 15 bp, Homo sapiens
catccactcatccac

SEQ ID NO: 940905 - DNA, 15 bp, Homo sapiens
atccactcatccact

SEQ ID NO: 940906 - DNA, 15 bp, Homo sapiens
tccactcatccactc

SEQ ID NO: 940907 - DNA, 15 bp, Homo sapiens
ccactcatccactca

SEQ ID NO: 940908 - DNA, 15 bp, Homo sapiens
cactcatccactcaa

SEQ ID NO: 940909 - DNA, 15 bp, Homo sapiens
actcatccactcaat

SEQ ID NO: 940910 - DNA, 15 bp, Homo sapiens
ctcatccactcaatc

SEQ ID NO: 940911 - DNA, 15 bp, Homo sapiens
tcatccactcaatcc

SEQ ID NO: 940912 - DNA, 15 bp, Homo sapiens
catccactcaatccc

SEQ ID NO: 940913 - DNA, 15 bp, Homo sapiens
atccactcaatccct

SEQ ID NO: 940914 - DNA, 15 bp, Homo sapiens
tccactcaatccctg

SEQ ID NO: 940915 - DNA, 15 bp, Homo sapiens
ccactcaatccctgc

SEQ ID NO: 940916 - DNA, 15 bp, Homo sapiens
cactcaatccctgct

SEQ ID NO: 940917 - DNA, 15 bp, Homo sapiens
actcaatccctgctc

SEQ ID NO: 940918 - DNA, 15 bp, Homo sapiens
ctcaatccctgctcc

SEQ ID NO: 940919 - DNA, 15 bp, Homo sapiens
tcaatccctgctcca

SEQ ID NO: 940920 - DNA, 15 bp, Homo sapiens
caatccctgctccaa

SEQ ID NO: 940921 - DNA, 15 bp, Homo sapiens
aatccctgctccaaa

SEQ ID NO: 940922 - DNA, 15 bp, Homo sapiens
atccctgctccaaag

SEQ ID NO: 940923 - DNA, 15 bp, Homo sapiens
tccctgctccaaagc

SEQ ID NO: 940924 - DNA, 15 bp, Homo sapiens
ccctgctccaaagca

SEQ ID NO: 940925 - DNA, 15 bp, Homo sapiens
cctgctccaaagcac

SEQ ID NO: 940926 - DNA, 15 bp, Homo sapiens
ctgctccaaagcacc

SEQ ID NO: 940927 - DNA, 15 bp, Homo sapiens
tgctccaaagcacct

SEQ ID NO: 940928 - DNA, 15 bp, Homo sapiens
gctccaaagcacctc

SEQ ID NO: 940929 - DNA, 15 bp, Homo sapiens
ctccaaagcacctct

SEQ ID NO: 940930 - DNA, 15 bp, Homo sapiens
tccaaagcacctctc

SEQ ID NO: 940931 - DNA, 15 bp, Homo sapiens
ccaaagcacctctca

SEQ ID NO: 940932 - DNA, 15 bp, Homo sapiens
caaagcacctctcat

SEQ ID NO: 940933 - DNA, 15 bp, Homo sapiens
aaagcacctctcatt

SEQ ID NO: 940934 - DNA, 15 bp, Homo sapiens
aagcacctctcattt

SEQ ID NO: 940935 - DNA, 15 bp, Homo sapiens
agcacctctcatttt

SEQ ID NO: 940936 - DNA, 15 bp, Homo sapiens
gcacctctcatttta

SEQ ID NO: 940937 - DNA, 15 bp, Homo sapiens
cacctctcattttat

SEQ ID NO: 940938 - DNA, 15 bp, Homo sapiens
acctctcattttatt

SEQ ID NO: 940939 - DNA, 15 bp, Homo sapiens
cctctcattttatta

SEQ ID NO: 940940 - DNA, 15 bp, Homo sapiens
ctctcattttattat

SEQ ID NO: 940941 - DNA, 15 bp, Homo sapiens
tctcattttattatt

SEQ ID NO: 940942 - DNA, 15 bp, Homo sapiens
ctcattttattattt

SEQ ID NO: 940943 - DNA, 15 bp, Homo sapiens
tcattttattatttt

SEQ ID NO: 940944 - DNA, 15 bp, Homo sapiens
cattttattatttta

SEQ ID NO: 940945 - DNA, 15 bp, Homo sapiens
attttattattttat

SEQ ID NO: 940946 - DNA, 15 bp, Homo sapiens
ttttattattttatt

SEQ ID NO: 940947 - DNA, 15 bp, Homo sapiens
tttattattttatta

SEQ ID NO: 940948 - DNA, 15 bp, Homo sapiens
ttattattttattat

SEQ ID NO: 940949 - DNA, 15 bp, Homo sapiens
tattattttattata

SEQ ID NO: 940950 - DNA, 15 bp, Homo sapiens
attattttattatat

SEQ ID NO: 940951 - DNA, 15 bp, Homo sapiens
ttattttattatatt

SEQ ID NO: 940952 - DNA, 15 bp, Homo sapiens
tattttattatattt

SEQ ID NO: 940953 - DNA, 15 bp, Homo sapiens
attttattatatttc

SEQ ID NO: 940954 - DNA, 15 bp, Homo sapiens
ttttattatatttcc

SEQ ID NO: 940955 - DNA, 15 bp, Homo sapiens
tttattatatttccc

SEQ ID NO: 940956 - DNA, 15 bp, Homo sapiens
ttattatatttccca

SEQ ID NO: 940957 - DNA, 15 bp, Homo sapiens
tattatatttcccat

SEQ ID NO: 940958 - DNA, 15 bp, Homo sapiens
attatatttcccata

SEQ ID NO: 940959 - DNA, 15 bp, Homo sapiens
ttatatttcccatac

SEQ ID NO: 940960 - DNA, 15 bp, Homo sapiens
tatatttcccatact

SEQ ID NO: 940961 - DNA, 15 bp, Homo sapiens
atatttcccatactg

SEQ ID NO: 940962 - DNA, 15 bp, Homo sapiens
tatttcccatactgg

SEQ ID NO: 940963 - DNA, 15 bp, Homo sapiens
atttcccatactggt

SEQ ID NO: 940964 - DNA, 15 bp, Homo sapiens
tttcccatactggtt

SEQ ID NO: 940965 - DNA, 15 bp, Homo sapiens
ttcccatactggtta

SEQ ID NO: 940966 - DNA, 15 bp, Homo sapiens
tcccatactggttaa

SEQ ID NO: 940967 - DNA, 15 bp, Homo sapiens
cccatactggttaat

SEQ ID NO: 940968 - DNA, 15 bp, Homo sapiens
ccatactggttaata

SEQ ID NO: 940969 - DNA, 15 bp, Homo sapiens
catactggttaataa

SEQ ID NO: 940970 - DNA, 15 bp, Homo sapiens
atactggttaataat

SEQ ID NO: 940971 - DNA, 15 bp, Homo sapiens
tactggttaataatg

SEQ ID NO: 940972 - DNA, 15 bp, Homo sapiens
actggttaataatgc

SEQ ID NO: 940973 - DNA, 15 bp, Homo sapiens
ctggttaataatgcc

SEQ ID NO: 940974 - DNA, 15 bp, Homo sapiens
tggttaataatgcca

SEQ ID NO: 940975 - DNA, 15 bp, Homo sapiens
ggttaataatgccac

SEQ ID NO: 940976 - DNA, 15 bp, Homo sapiens
gttaataatgccacc

SEQ ID NO: 940977 - DNA, 15 bp, Homo sapiens
ttaataatgccacca

SEQ ID NO: 940978 - DNA, 15 bp, Homo sapiens
taataatgccaccat

SEQ ID NO: 940979 - DNA, 15 bp, Homo sapiens
aataatgccaccatc

SEQ ID NO: 940980 - DNA, 15 bp, Homo sapiens
ataatgccaccatcc

SEQ ID NO: 940981 - DNA, 15 bp, Homo sapiens
taatgccaccatcca

SEQ ID NO: 940982 - DNA, 15 bp, Homo sapiens
aatgccaccatccac

SEQ ID NO: 940983 - DNA, 15 bp, Homo sapiens
atgccaccatccaca

SEQ ID NO: 940984 - DNA, 15 bp, Homo sapiens
tgccaccatccacac

SEQ ID NO: 940985 - DNA, 15 bp, Homo sapiens
gccaccatccacaca

SEQ ID NO: 940986 - DNA, 15 bp, Homo sapiens
ccaccatccacacag

SEQ ID NO: 940987 - DNA, 15 bp, Homo sapiens
caccatccacacagt

SEQ ID NO: 940988 - DNA, 15 bp, Homo sapiens
accatccacacagtc

SEQ ID NO: 940989 - DNA, 15 bp, Homo sapiens
ccatccacacagtcc

SEQ ID NO: 940990 - DNA, 15 bp, Homo sapiens
catccacacagtccc

SEQ ID NO: 940991 - DNA, 15 bp, Homo sapiens
atccacacagtcccc

SEQ ID NO: 940992 - DNA, 15 bp, Homo sapiens
tccacacagtcccca

SEQ ID NO: 940993 - DNA, 15 bp, Homo sapiens
ccacacagtccccaa

SEQ ID NO: 940994 - DNA, 15 bp, Homo sapiens
cacacagtccccaaa

SEQ ID NO: 940995 - DNA, 15 bp, Homo sapiens
acacagtccccaaag

SEQ ID NO: 940996 - DNA, 15 bp, Homo sapiens
cacagtccccaaaga

SEQ ID NO: 940997 - DNA, 15 bp, Homo sapiens
acagtccccaaagag

SEQ ID NO: 940998 - DNA, 15 bp, Homo sapiens
cagtccccaaagaga

SEQ ID NO: 940999 - DNA, 15 bp, Homo sapiens
agtccccaaagagag

SEQ ID NO: 941000 - DNA, 15 bp, Homo sapiens
gtccccaaagagagt

SEQ ID NO: 941001 - DNA, 15 bp, Homo sapiens
tccccaaagagagtt

SEQ ID NO: 941002 - DNA, 15 bp, Homo sapiens
ccccaaagagagttt

SEQ ID NO: 941003 - DNA, 15 bp, Homo sapiens
cccaaagagagttta

SEQ ID NO: 941004 - DNA, 15 bp, Homo sapiens
ccaaagagagtttaa

SEQ ID NO: 941005 - DNA, 15 bp, Homo sapiens
caaagagagtttaaa

SEQ ID NO: 941006 - DNA, 15 bp, Homo sapiens
aaagagagtttaaaa

SEQ ID NO: 941007 - DNA, 15 bp, Homo sapiens
aagagagtttaaaaa

SEQ ID NO: 941008 - DNA, 15 bp, Homo sapiens
agagagtttaaaaat

SEQ ID NO: 941009 - DNA, 15 bp, Homo sapiens
gagagtttaaaaatc

SEQ ID NO: 941010 - DNA, 15 bp, Homo sapiens
agagtttaaaaatca

SEQ ID NO: 941011 - DNA, 15 bp, Homo sapiens
gagtttaaaaatcat

SEQ ID NO: 941012 - DNA, 15 bp, Homo sapiens
agtttaaaaatcatt

SEQ ID NO: 941013 - DNA, 15 bp, Homo sapiens
gtttaaaaatcattt

SEQ ID NO: 941014 - DNA, 15 bp, Homo sapiens
tttaaaaatcatttt

SEQ ID NO: 941015 - DNA, 15 bp, Homo sapiens
ttaaaaatcattttt

SEQ ID NO: 941016 - DNA, 15 bp, Homo sapiens
taaaaatcattttta

SEQ ID NO: 941017 - DNA, 15 bp, Homo sapiens
aaaaatcatttttaa

SEQ ID NO: 941018 - DNA, 15 bp, Homo sapiens
aaaatcatttttaat

SEQ ID NO: 941019 - DNA, 15 bp, Homo sapiens
aaatcatttttaatt

SEQ ID NO: 941020 - DNA, 15 bp, Homo sapiens
aatcatttttaattc

SEQ ID NO: 941021 - DNA, 15 bp, Homo sapiens
atcatttttaattcc

SEQ ID NO: 941022 - DNA, 15 bp, Homo sapiens
tcatttttaattcct

SEQ ID NO: 941023 - DNA, 15 bp, Homo sapiens
catttttaattcctc

SEQ ID NO: 941024 - DNA, 15 bp, Homo sapiens
atttttaattcctcc

SEQ ID NO: 941025 - DNA, 15 bp, Homo sapiens
tttttaattcctccc

SEQ ID NO: 941026 - DNA, 15 bp, Homo sapiens
ttttaattcctccct

SEQ ID NO: 941027 - DNA, 15 bp, Homo sapiens
tttaattcctccctc

SEQ ID NO: 941028 - DNA, 15 bp, Homo sapiens
ttaattcctccctcc

SEQ ID NO: 941029 - DNA, 15 bp, Homo sapiens
taattcctccctcca

SEQ ID NO: 941030 - DNA, 15 bp, Homo sapiens
aattcctccctccat

SEQ ID NO: 941031 - DNA, 15 bp, Homo sapiens
attcctccctccatc

SEQ ID NO: 941032 - DNA, 15 bp, Homo sapiens
ttcctccctccatca

SEQ ID NO: 941033 - DNA, 15 bp, Homo sapiens
tcctccctccatcat

SEQ ID NO: 941034 - DNA, 15 bp, Homo sapiens
cctccctccatcatc

SEQ ID NO: 941035 - DNA, 15 bp, Homo sapiens
ctccctccatcatct

SEQ ID NO: 941036 - DNA, 15 bp, Homo sapiens
tccctccatcatctt

SEQ ID NO: 941037 - DNA, 15 bp, Homo sapiens
ccctccatcatcttc

SEQ ID NO: 941038 - DNA, 15 bp, Homo sapiens
cctccatcatcttca

SEQ ID NO: 941039 - DNA, 15 bp, Homo sapiens
ctccatcatcttcac

SEQ ID NO: 941040 - DNA, 15 bp, Homo sapiens
tccatcatcttcact

SEQ ID NO: 941041 - DNA, 15 bp, Homo sapiens
ccatcatcttcactc

SEQ ID NO: 941042 - DNA, 15 bp, Homo sapiens
catcatcttcactct

SEQ ID NO: 941043 - DNA, 15 bp, Homo sapiens
atcatcttcactctc

SEQ ID NO: 941044 - DNA, 15 bp, Homo sapiens
tcatcttcactctct

SEQ ID NO: 941045 - DNA, 15 bp, Homo sapiens
catcttcactctctt

SEQ ID NO: 941046 - DNA, 15 bp, Homo sapiens
atcttcactctcttt

SEQ ID NO: 941047 - DNA, 15 bp, Homo sapiens
tcttcactctcttta

SEQ ID NO: 941048 - DNA, 15 bp, Homo sapiens
cttcactctctttag

SEQ ID NO: 941049 - DNA, 15 bp, Homo sapiens
ttcactctctttagt

SEQ ID NO: 941050 - DNA, 15 bp, Homo sapiens
tcactctctttagtc

SEQ ID NO: 941051 - DNA, 15 bp, Homo sapiens
cactctctttagtct

SEQ ID NO: 941052 - DNA, 15 bp, Homo sapiens
actctctttagtcta

SEQ ID NO: 941053 - DNA, 15 bp, Homo sapiens
ctctctttagtctaa

SEQ ID NO: 941054 - DNA, 15 bp, Homo sapiens
tctctttagtctaat

SEQ ID NO: 941055 - DNA, 15 bp, Homo sapiens
ctctttagtctaatc

SEQ ID NO: 941056 - DNA, 15 bp, Homo sapiens
tctttagtctaatca

SEQ ID NO: 941057 - DNA, 15 bp, Homo sapiens
ctttagtctaatcag

SEQ ID NO: 941058 - DNA, 15 bp, Homo sapiens
tttagtctaatcagt

SEQ ID NO: 941059 - DNA, 15 bp, Homo sapiens
ttagtctaatcagtc

SEQ ID NO: 941060 - DNA, 15 bp, Homo sapiens
tagtctaatcagtca

SEQ ID NO: 941061 - DNA, 15 bp, Homo sapiens
agtctaatcagtcat

SEQ ID NO: 941062 - DNA, 15 bp, Homo sapiens
gtctaatcagtcatc

SEQ ID NO: 941063 - DNA, 15 bp, Homo sapiens
tctaatcagtcatca

SEQ ID NO: 941064 - DNA, 15 bp, Homo sapiens
ctaatcagtcatcaa

SEQ ID NO: 941065 - DNA, 15 bp, Homo sapiens
taatcagtcatcaag

SEQ ID NO: 941066 - DNA, 15 bp, Homo sapiens
aatcagtcatcaagc

SEQ ID NO: 941067 - DNA, 15 bp, Homo sapiens
atcagtcatcaagcc

SEQ ID NO: 941068 - DNA, 15 bp, Homo sapiens
tcagtcatcaagccc

SEQ ID NO: 941069 - DNA, 15 bp, Homo sapiens
cagtcatcaagccct

SEQ ID NO: 941070 - DNA, 15 bp, Homo sapiens
agtcatcaagccctg

SEQ ID NO: 941071 - DNA, 15 bp, Homo sapiens
gtcatcaagccctga

SEQ ID NO: 941072 - DNA, 15 bp, Homo sapiens
tcatcaagccctgac

SEQ ID NO: 941073 - DNA, 15 bp, Homo sapiens
catcaagccctgacc

SEQ ID NO: 941074 - DNA, 15 bp, Homo sapiens
atcaagccctgaccc

SEQ ID NO: 941075 - DNA, 15 bp, Homo sapiens
tcaagccctgaccct

SEQ ID NO: 941076 - DNA, 15 bp, Homo sapiens
caagccctgacccta

SEQ ID NO: 941077 - DNA, 15 bp, Homo sapiens
aagccctgaccctat

SEQ ID NO: 941078 - DNA, 15 bp, Homo sapiens
agccctgaccctata

SEQ ID NO: 941079 - DNA, 15 bp, Homo sapiens
gccctgaccctatat

SEQ ID NO: 941080 - DNA, 15 bp, Homo sapiens
ccctgaccctatatc

SEQ ID NO: 941081 - DNA, 15 bp, Homo sapiens
cctgaccctatatct

SEQ ID NO: 941082 - DNA, 15 bp, Homo sapiens
ctgaccctatatctt

SEQ ID NO: 941083 - DNA, 15 bp, Homo sapiens
tgaccctatatcttc

SEQ ID NO: 941084 - DNA, 15 bp, Homo sapiens
gaccctatatcttct

SEQ ID NO: 941085 - DNA, 15 bp, Homo sapiens
accctatatcttcta

SEQ ID NO: 941086 - DNA, 15 bp, Homo sapiens
ccctatatcttctaa

SEQ ID NO: 941087 - DNA, 15 bp, Homo sapiens
cctatatcttctaaa

SEQ ID NO: 941088 - DNA, 15 bp, Homo sapiens
ctatatcttctaaat

SEQ ID NO: 941089 - DNA, 15 bp, Homo sapiens
tatatcttctaaata

SEQ ID NO: 941090 - DNA, 15 bp, Homo sapiens
atatcttctaaatac

SEQ ID NO: 941091 - DNA, 15 bp, Homo sapiens
tatcttctaaatact

SEQ ID NO: 941092 - DNA, 15 bp, Homo sapiens
atcttctaaatactg

SEQ ID NO: 941093 - DNA, 15 bp, Homo sapiens
tcttctaaatactgc

SEQ ID NO: 941094 - DNA, 15 bp, Homo sapiens
cttctaaatactgcc

SEQ ID NO: 941095 - DNA, 15 bp, Homo sapiens
ttctaaatactgcct

SEQ ID NO: 941096 - DNA, 15 bp, Homo sapiens
tctaaatactgcctg

SEQ ID NO: 941097 - DNA, 15 bp, Homo sapiens
ctaaatactgcctgt

SEQ ID NO: 941098 - DNA, 15 bp, Homo sapiens
taaatactgcctgta

SEQ ID NO: 941099 - DNA, 15 bp, Homo sapiens
aaatactgcctgtat

SEQ ID NO: 941100 - DNA, 15 bp, Homo sapiens
aatactgcctgtatt

SEQ ID NO: 941101 - DNA, 15 bp, Homo sapiens
atactgcctgtattt

SEQ ID NO: 941102 - DNA, 15 bp, Homo sapiens
tactgcctgtatttg

SEQ ID NO: 941103 - DNA, 15 bp, Homo sapiens
actgcctgtatttgt

SEQ ID NO: 941104 - DNA, 15 bp, Homo sapiens
ctgcctgtatttgtt

SEQ ID NO: 941105 - DNA, 15 bp, Homo sapiens
tgcctgtatttgttc

SEQ ID NO: 941106 - DNA, 15 bp, Homo sapiens
gcctgtatttgttca

SEQ ID NO: 941107 - DNA, 15 bp, Homo sapiens
cctgtatttgttcat

SEQ ID NO: 941108 - DNA, 15 bp, Homo sapiens
ctgtatttgttcatt

SEQ ID NO: 941109 - DNA, 15 bp, Homo sapiens
tgtatttgttcattc

SEQ ID NO: 941110 - DNA, 15 bp, Homo sapiens
gtatttgttcattct

SEQ ID NO: 941111 - DNA, 15 bp, Homo sapiens
tatttgttcattctt

SEQ ID NO: 941112 - DNA, 15 bp, Homo sapiens
atttgttcattcttt

SEQ ID NO: 941113 - DNA, 15 bp, Homo sapiens
tttgttcattctttt

SEQ ID NO: 941114 - DNA, 15 bp, Homo sapiens
ttgttcattcttttc

SEQ ID NO: 941115 - DNA, 15 bp, Homo sapiens
tgttcattcttttca

SEQ ID NO: 941116 - DNA, 15 bp, Homo sapiens
gttcattcttttcac

SEQ ID NO: 941117 - DNA, 15 bp, Homo sapiens
ttcattcttttcacc

SEQ ID NO: 941118 - DNA, 15 bp, Homo sapiens
tcattcttttcaccc

SEQ ID NO: 941119 - DNA, 15 bp, Homo sapiens
cattcttttcacccc

SEQ ID NO: 941120 - DNA, 15 bp, Homo sapiens
attcttttcacccct

SEQ ID NO: 941121 - DNA, 15 bp, Homo sapiens
ttcttttcaccccta

SEQ ID NO: 941122 - DNA, 15 bp, Homo sapiens
tcttttcacccctac

SEQ ID NO: 941123 - DNA, 15 bp, Homo sapiens
cttttcacccctacc

SEQ ID NO: 941124 - DNA, 15 bp, Homo sapiens
ttttcacccctaccc

SEQ ID NO: 941125 - DNA, 15 bp, Homo sapiens
tttcacccctaccct

SEQ ID NO: 941126 - DNA, 15 bp, Homo sapiens
ttcacccctaccctt

SEQ ID NO: 941127 - DNA, 15 bp, Homo sapiens
tcacccctacccttg

SEQ ID NO: 941128 - DNA, 15 bp, Homo sapiens
cacccctacccttgg

SEQ ID NO: 941129 - DNA, 15 bp, Homo sapiens
acccctacccttggt

SEQ ID NO: 941130 - DNA, 15 bp, Homo sapiens
cccctacccttggtt

SEQ ID NO: 941131 - DNA, 15 bp, Homo sapiens
ccctacccttggttg

SEQ ID NO: 941132 - DNA, 15 bp, Homo sapiens
cctacccttggttgg

SEQ ID NO: 941133 - DNA, 15 bp, Homo sapiens
ctacccttggttgga

SEQ ID NO: 941134 - DNA, 15 bp, Homo sapiens
tacccttggttggag

SEQ ID NO: 941135 - DNA, 15 bp, Homo sapiens
acccttggttggagt

SEQ ID NO: 941136 - DNA, 15 bp, Homo sapiens
cccttggttggagta

SEQ ID NO: 941137 - DNA, 15 bp, Homo sapiens
ccttggttggagtat

SEQ ID NO: 941138 - DNA, 15 bp, Homo sapiens
cttggttggagtatg

SEQ ID NO: 941139 - DNA, 15 bp, Homo sapiens
ttggttggagtatgg

SEQ ID NO: 941140 - DNA, 15 bp, Homo sapiens
tggttggagtatggc

SEQ ID NO: 941141 - DNA, 15 bp, Homo sapiens
ggttggagtatggcc

SEQ ID NO: 941142 - DNA, 15 bp, Homo sapiens
gttggagtatggcca

SEQ ID NO: 941143 - DNA, 15 bp, Homo sapiens
ttggagtatggccat

SEQ ID NO: 941144 - DNA, 15 bp, Homo sapiens
tggagtatggccatt

SEQ ID NO: 941145 - DNA, 15 bp, Homo sapiens
ggagtatggccatta

SEQ ID NO: 941146 - DNA, 15 bp, Homo sapiens
gagtatggccattac

SEQ ID NO: 941147 - DNA, 15 bp, Homo sapiens
agtatggccattacc

SEQ ID NO: 941148 - DNA, 15 bp, Homo sapiens
gtatggccattacca

SEQ ID NO: 941149 - DNA, 15 bp, Homo sapiens
tatggccattaccat

SEQ ID NO: 941150 - DNA, 15 bp, Homo sapiens
atggccattaccatc

SEQ ID NO: 941151 - DNA, 15 bp, Homo sapiens
tggccattaccatcc

SEQ ID NO: 941152 - DNA, 15 bp, Homo sapiens
ggccattaccatcca

SEQ ID NO: 941153 - DNA, 15 bp, Homo sapiens
gccattaccatccaa

SEQ ID NO: 941154 - DNA, 15 bp, Homo sapiens
ccattaccatccaat

SEQ ID NO: 941155 - DNA, 15 bp, Homo sapiens
cattaccatccaatt

SEQ ID NO: 941156 - DNA, 15 bp, Homo sapiens
attaccatccaattc

SEQ ID NO: 941157 - DNA, 15 bp, Homo sapiens
ttaccatccaattcc

SEQ ID NO: 941158 - DNA, 15 bp, Homo sapiens
taccatccaattccc

SEQ ID NO: 941159 - DNA, 15 bp, Homo sapiens
accatccaattccct

SEQ ID NO: 941160 - DNA, 15 bp, Homo sapiens
ccatccaattccctg

SEQ ID NO: 941161 - DNA, 15 bp, Homo sapiens
catccaattccctgc

SEQ ID NO: 941162 - DNA, 15 bp, Homo sapiens
atccaattccctgct

SEQ ID NO: 941163 - DNA, 15 bp, Homo sapiens
tccaattccctgctc

SEQ ID NO: 941164 - DNA, 15 bp, Homo sapiens
ccaattccctgctca

SEQ ID NO: 941165 - DNA, 15 bp, Homo sapiens
caattccctgctcat

SEQ ID NO: 941166 - DNA, 15 bp, Homo sapiens
aattccctgctcata

SEQ ID NO: 941167 - DNA, 15 bp, Homo sapiens
attccctgctcatag

SEQ ID NO: 941168 - DNA, 15 bp, Homo sapiens
ttccctgctcatagt

SEQ ID NO: 941169 - DNA, 15 bp, Homo sapiens
tccctgctcatagtt

SEQ ID NO: 941170 - DNA, 15 bp, Homo sapiens
ccctgctcatagttt

SEQ ID NO: 941171 - DNA, 15 bp, Homo sapiens
cctgctcatagtttc

SEQ ID NO: 941172 - DNA, 15 bp, Homo sapiens
ctgctcatagtttca

SEQ ID NO: 941173 - DNA, 15 bp, Homo sapiens
tgctcatagtttcat

SEQ ID NO: 941174 - DNA, 15 bp, Homo sapiens
gctcatagtttcatc

SEQ ID NO: 941175 - DNA, 15 bp, Homo sapiens
ctcatagtttcatct

SEQ ID NO: 941176 - DNA, 15 bp, Homo sapiens
tcatagtttcatctg

SEQ ID NO: 941177 - DNA, 15 bp, Homo sapiens
catagtttcatctgc

SEQ ID NO: 941178 - DNA, 15 bp, Homo sapiens
atagtttcatctgct

SEQ ID NO: 941179 - DNA, 15 bp, Homo sapiens
tagtttcatctgctc

SEQ ID NO: 941180 - DNA, 15 bp, Homo sapiens
agtttcatctgctct

SEQ ID NO: 941181 - DNA, 15 bp, Homo sapiens
gtttcatctgctcta

SEQ ID NO: 941182 - DNA, 15 bp, Homo sapiens
tttcatctgctctaa

SEQ ID NO: 941183 - DNA, 15 bp, Homo sapiens
ttcatctgctctaat

SEQ ID NO: 941184 - DNA, 15 bp, Homo sapiens
tcatctgctctaatt

SEQ ID NO: 941185 - DNA, 15 bp, Homo sapiens
catctgctctaattt

SEQ ID NO: 941186 - DNA, 15 bp, Homo sapiens
atctgctctaattta

SEQ ID NO: 941187 - DNA, 15 bp, Homo sapiens
tctgctctaatttat

SEQ ID NO: 941188 - DNA, 15 bp, Homo sapiens
ctgctctaatttatc

SEQ ID NO: 941189 - DNA, 15 bp, Homo sapiens
tgctctaatttatcc

SEQ ID NO: 941190 - DNA, 15 bp, Homo sapiens
gctctaatttatcct

SEQ ID NO: 941191 - DNA, 15 bp, Homo sapiens
ctctaatttatcctc

SEQ ID NO: 941192 - DNA, 15 bp, Homo sapiens
tctaatttatcctca

SEQ ID NO: 941193 - DNA, 15 bp, Homo sapiens
ctaatttatcctcaa

SEQ ID NO: 941194 - DNA, 15 bp, Homo sapiens
taatttatcctcaac

SEQ ID NO: 941195 - DNA, 15 bp, Homo sapiens
aatttatcctcaaca

SEQ ID NO: 941196 - DNA, 15 bp, Homo sapiens
atttatcctcaacat

SEQ ID NO: 941197 - DNA, 15 bp, Homo sapiens
tttatcctcaacatt

SEQ ID NO: 941198 - DNA, 15 bp, Homo sapiens
ttatcctcaacatta

SEQ ID NO: 941199 - DNA, 15 bp, Homo sapiens
tatcctcaacattac

SEQ ID NO: 941200 - DNA, 15 bp, Homo sapiens
atcctcaacattacc

SEQ ID NO: 941201 - DNA, 15 bp, Homo sapiens
tcctcaacattacct

SEQ ID NO: 941202 - DNA, 15 bp, Homo sapiens
cctcaacattacctt

SEQ ID NO: 941203 - DNA, 15 bp, Homo sapiens
ctcaacattaccttc

SEQ ID NO: 941204 - DNA, 15 bp, Homo sapiens
tcaacattaccttca

SEQ ID NO: 941205 - DNA, 15 bp, Homo sapiens
caacattaccttcac

SEQ ID NO: 941206 - DNA, 15 bp, Homo sapiens
aacattaccttcaca

SEQ ID NO: 941207 - DNA, 15 bp, Homo sapiens
acattaccttcacag

SEQ ID NO: 941208 - DNA, 15 bp, Homo sapiens
cattaccttcacagt

SEQ ID NO: 941209 - DNA, 15 bp, Homo sapiens
attaccttcacagta

SEQ ID NO: 941210 - DNA, 15 bp, Homo sapiens
ttaccttcacagtaa

SEQ ID NO: 941211 - DNA, 15 bp, Homo sapiens
taccttcacagtaac

SEQ ID NO: 941212 - DNA, 15 bp, Homo sapiens
accttcacagtaaca

SEQ ID NO: 941213 - DNA, 15 bp, Homo sapiens
ccttcacagtaacat

SEQ ID NO: 941214 - DNA, 15 bp, Homo sapiens
cttcacagtaacatt

SEQ ID NO: 941215 - DNA, 15 bp, Homo sapiens
ttcacagtaacattt

SEQ ID NO: 941216 - DNA, 15 bp, Homo sapiens
tcacagtaacatttc

SEQ ID NO: 941217 - DNA, 15 bp, Homo sapiens
cacagtaacatttca

SEQ ID NO: 941218 - DNA, 15 bp, Homo sapiens
acagtaacatttcaa

SEQ ID NO: 941219 - DNA, 15 bp, Homo sapiens
cagtaacatttcaaa

SEQ ID NO: 941220 - DNA, 15 bp, Homo sapiens
agtaacatttcaaat

SEQ ID NO: 941221 - DNA, 15 bp, Homo sapiens
gtaacatttcaaata

SEQ ID NO: 941222 - DNA, 15 bp, Homo sapiens
taacatttcaaatat

SEQ ID NO: 941223 - DNA, 15 bp, Homo sapiens
aacatttcaaatatg

SEQ ID NO: 941224 - DNA, 15 bp, Homo sapiens
acatttcaaatatgt

SEQ ID NO: 941225 - DNA, 15 bp, Homo sapiens
catttcaaatatgta

SEQ ID NO: 941226 - DNA, 15 bp, Homo sapiens
atttcaaatatgtaa

SEQ ID NO: 941227 - DNA, 15 bp, Homo sapiens
tttcaaatatgtaaa

SEQ ID NO: 941228 - DNA, 15 bp, Homo sapiens
ttcaaatatgtaaat

SEQ ID NO: 941229 - DNA, 15 bp, Homo sapiens
tcaaatatgtaaata

SEQ ID NO: 941230 - DNA, 15 bp, Homo sapiens
caaatatgtaaatat

SEQ ID NO: 941231 - DNA, 15 bp, Homo sapiens
aaatatgtaaatatg

SEQ ID NO: 941232 - DNA, 15 bp, Homo sapiens
aatatgtaaatatga

SEQ ID NO: 941233 - DNA, 15 bp, Homo sapiens
atatgtaaatatgat

SEQ ID NO: 941234 - DNA, 15 bp, Homo sapiens
tatgtaaatatgatc

SEQ ID NO: 941235 - DNA, 15 bp, Homo sapiens
atgtaaatatgatcg

SEQ ID NO: 941236 - DNA, 15 bp, Homo sapiens
tgtaaatatgatcga

SEQ ID NO: 941237 - DNA, 15 bp, Homo sapiens
gtaaatatgatcgag

SEQ ID NO: 941238 - DNA, 15 bp, Homo sapiens
taaatatgatcgagt

SEQ ID NO: 941239 - DNA, 15 bp, Homo sapiens
aaatatgatcgagtg

SEQ ID NO: 941240 - DNA, 15 bp, Homo sapiens
aatatgatcgagtgg

SEQ ID NO: 941241 - DNA, 15 bp, Homo sapiens
atatgatcgagtggc

SEQ ID NO: 941242 - DNA, 15 bp, Homo sapiens
tatgatcgagtggct

SEQ ID NO: 941243 - DNA, 15 bp, Homo sapiens
atgatcgagtggctg

SEQ ID NO: 941244 - DNA, 15 bp, Homo sapiens
tgatcgagtggctga

SEQ ID NO: 941245 - DNA, 15 bp, Homo sapiens
gatcgagtggctgac

SEQ ID NO: 941246 - DNA, 15 bp, Homo sapiens
atcgagtggctgact

SEQ ID NO: 941247 - DNA, 15 bp, Homo sapiens
tcgagtggctgactc

SEQ ID NO: 941248 - DNA, 15 bp, Homo sapiens
cgagtggctgactcc

SEQ ID NO: 941249 - DNA, 15 bp, Homo sapiens
gagtggctgactccc

SEQ ID NO: 941250 - DNA, 15 bp, Homo sapiens
agtggctgactccct

SEQ ID NO: 941251 - DNA, 15 bp, Homo sapiens
gtggctgactccctt

SEQ ID NO: 941252 - DNA, 15 bp, Homo sapiens
tggctgactcccttg

SEQ ID NO: 941253 - DNA, 15 bp, Homo sapiens
ggctgactcccttgc

SEQ ID NO: 941254 - DNA, 15 bp, Homo sapiens
gctgactcccttgct

SEQ ID NO: 941255 - DNA, 15 bp, Homo sapiens
ctgactcccttgctt

SEQ ID NO: 941256 - DNA, 15 bp, Homo sapiens
tcccttgcttaaaag

SEQ ID NO: 941257 - DNA, 15 bp, Homo sapiens
cccttgcttaaaagc

SEQ ID NO: 941258 - DNA, 15 bp, Homo sapiens
ccttgcttaaaagca

SEQ ID NO: 941259 - DNA, 15 bp, Homo sapiens
cttgcttaaaagcat

SEQ ID NO: 941260 - DNA, 15 bp, Homo sapiens
ttgcttaaaagcatg

SEQ ID NO: 941261 - DNA, 15 bp, Homo sapiens
tgcttaaaagcatgt

SEQ ID NO: 941262 - DNA, 15 bp, Homo sapiens
gcttaaaagcatgtg

SEQ ID NO: 941263 - DNA, 15 bp, Homo sapiens
cttaaaagcatgtga

SEQ ID NO: 941264 - DNA, 15 bp, Homo sapiens
ttaaaagcatgtgat

SEQ ID NO: 941265 - DNA, 15 bp, Homo sapiens
taaaagcatgtgatg

SEQ ID NO: 941266 - DNA, 15 bp, Homo sapiens
aaaagcatgtgatga

SEQ ID NO: 941267 - DNA, 15 bp, Homo sapiens
aaagcatgtgatgaa

SEQ ID NO: 941268 - DNA, 15 bp, Homo sapiens
aagcatgtgatgaag

SEQ ID NO: 941269 - DNA, 15 bp, Homo sapiens
agcatgtgatgaagt

SEQ ID NO: 941270 - DNA, 15 bp, Homo sapiens
gcatgtgatgaagtt

SEQ ID NO: 941271 - DNA, 15 bp, Homo sapiens
catgtgatgaagttc

SEQ ID NO: 941272 - DNA, 15 bp, Homo sapiens
atgtgatgaagttca

SEQ ID NO: 941273 - DNA, 15 bp, Homo sapiens
tgtgatgaagttcaa

SEQ ID NO: 941274 - DNA, 15 bp, Homo sapiens
gtgatgaagttcaaa

SEQ ID NO: 941275 - DNA, 15 bp, Homo sapiens
tgatgaagttcaaat

SEQ ID NO: 941276 - DNA, 15 bp, Homo sapiens
gatgaagttcaaatt

SEQ ID NO: 941277 - DNA, 15 bp, Homo sapiens
atgaagttcaaattt

SEQ ID NO: 941278 - DNA, 15 bp, Homo sapiens
tgaagttcaaatttt

SEQ ID NO: 941279 - DNA, 15 bp, Homo sapiens
gaagttcaaattttt

SEQ ID NO: 941280 - DNA, 15 bp, Homo sapiens
aagttcaaattttta

SEQ ID NO: 941281 - DNA, 15 bp, Homo sapiens
agttcaaatttttaa

SEQ ID NO: 941282 - DNA, 15 bp, Homo sapiens
gttcaaatttttaaa

SEQ ID NO: 941283 - DNA, 15 bp, Homo sapiens
ttcaaatttttaaaa

SEQ ID NO: 941284 - DNA, 15 bp, Homo sapiens
tcaaatttttaaaaa

SEQ ID NO: 941285 - DNA, 15 bp, Homo sapiens
caaatttttaaaaaa

SEQ ID NO: 941286 - DNA, 15 bp, Homo sapiens
aaatttttaaaaaat

SEQ ID NO: 941287 - DNA, 15 bp, Homo sapiens
aatttttaaaaaata

SEQ ID NO: 941288 - DNA, 15 bp, Homo sapiens
atttttaaaaaataa

SEQ ID NO: 941289 - DNA, 15 bp, Homo sapiens
tttttaaaaaataat

SEQ ID NO: 941290 - DNA, 15 bp, Homo sapiens
ttttaaaaaataatt

SEQ ID NO: 941291 - DNA, 15 bp, Homo sapiens
tttaaaaaataattt

SEQ ID NO: 941292 - DNA, 15 bp, Homo sapiens
ttaaaaaataattta

SEQ ID NO: 941293 - DNA, 15 bp, Homo sapiens
taaaaaataatttaa

SEQ ID NO: 941294 - DNA, 15 bp, Homo sapiens
aaaaaataatttaaa

SEQ ID NO: 941295 - DNA, 15 bp, Homo sapiens
aaaaataatttaaat

SEQ ID NO: 941296 - DNA, 15 bp, Homo sapiens
aaaataatttaaatg

SEQ ID NO: 941297 - DNA, 15 bp, Homo sapiens
aaataatttaaatgt

SEQ ID NO: 941298 - DNA, 15 bp, Homo sapiens
aataatttaaatgtt

SEQ ID NO: 941299 - DNA, 15 bp, Homo sapiens
ataatttaaatgttt

SEQ ID NO: 941300 - DNA, 15 bp, Homo sapiens
taatttaaatgttta

SEQ ID NO: 941301 - DNA, 15 bp, Homo sapiens
aatttaaatgtttaa

SEQ ID NO: 941302 - DNA, 15 bp, Homo sapiens
atttaaatgtttaat

SEQ ID NO: 941303 - DNA, 15 bp, Homo sapiens
tttaaatgtttaatg

SEQ ID NO: 941304 - DNA, 15 bp, Homo sapiens
ttaaatgtttaatgg

SEQ ID NO: 941305 - DNA, 15 bp, Homo sapiens
taaatgtttaatggg

SEQ ID NO: 941306 - DNA, 15 bp, Homo sapiens
aaatgtttaatggga

SEQ ID NO: 941307 - DNA, 15 bp, Homo sapiens
aatgtttaatgggac

SEQ ID NO: 941308 - DNA, 15 bp, Homo sapiens
atgtttaatgggaca

SEQ ID NO: 941309 - DNA, 15 bp, Homo sapiens
tgtttaatgggacac

SEQ ID NO: 941310 - DNA, 15 bp, Homo sapiens
gtttaatgggacacc

SEQ ID NO: 941311 - DNA, 15 bp, Homo sapiens
tttaatgggacacca

SEQ ID NO: 941312 - DNA, 15 bp, Homo sapiens
ttaatgggacaccat

SEQ ID NO: 941313 - DNA, 15 bp, Homo sapiens
taatgggacaccatc

SEQ ID NO: 941314 - DNA, 15 bp, Homo sapiens
aatgggacaccatca

SEQ ID NO: 941315 - DNA, 15 bp, Homo sapiens
atgggacaccatcac

SEQ ID NO: 941316 - DNA, 15 bp, Homo sapiens
tgggacaccatcacc

SEQ ID NO: 941317 - DNA, 15 bp, Homo sapiens
gggacaccatcacct

SEQ ID NO: 941318 - DNA, 15 bp, Homo sapiens
ggacaccatcacctt

SEQ ID NO: 941319 - DNA, 15 bp, Homo sapiens
gacaccatcaccttt

SEQ ID NO: 941320 - DNA, 15 bp, Homo sapiens
acaccatcacctttc

SEQ ID NO: 941321 - DNA, 15 bp, Homo sapiens
caccatcacctttca

SEQ ID NO: 941322 - DNA, 15 bp, Homo sapiens
accatcacctttcaa

SEQ ID NO: 941323 - DNA, 15 bp, Homo sapiens
ccatcacctttcaag

SEQ ID NO: 941324 - DNA, 15 bp, Homo sapiens
catcacctttcaaga

SEQ ID NO: 941325 - DNA, 15 bp, Homo sapiens
atcacctttcaagat

SEQ ID NO: 941326 - DNA, 15 bp, Homo sapiens
tcacctttcaagata

SEQ ID NO: 941327 - DNA, 15 bp, Homo sapiens
cacctttcaagatag

SEQ ID NO: 941328 - DNA, 15 bp, Homo sapiens
acctttcaagataga

SEQ ID NO: 941329 - DNA, 15 bp, Homo sapiens
cctttcaagatagag

SEQ ID NO: 941330 - DNA, 15 bp, Homo sapiens
ctttcaagatagagc

SEQ ID NO: 941331 - DNA, 15 bp, Homo sapiens
tttcaagatagagcc

SEQ ID NO: 941332 - DNA, 15 bp, Homo sapiens
ttcaagatagagcct

SEQ ID NO: 941333 - DNA, 15 bp, Homo sapiens
tcaagatagagcctg

SEQ ID NO: 941334 - DNA, 15 bp, Homo sapiens
caagatagagcctgg

SEQ ID NO: 941335 - DNA, 15 bp, Homo sapiens
aagatagagcctggt

SEQ ID NO: 941336 - DNA, 15 bp, Homo sapiens
agatagagcctggta

SEQ ID NO: 941337 - DNA, 15 bp, Homo sapiens
gatagagcctggtac

SEQ ID NO: 941338 - DNA, 15 bp, Homo sapiens
atagagcctggtact

SEQ ID NO: 941339 - DNA, 15 bp, Homo sapiens
tagagcctggtactt

SEQ ID NO: 941340 - DNA, 15 bp, Homo sapiens
agagcctggtacttc

SEQ ID NO: 941341 - DNA, 15 bp, Homo sapiens
gagcctggtacttct

SEQ ID NO: 941342 - DNA, 15 bp, Homo sapiens
agcctggtacttctg

SEQ ID NO: 941343 - DNA, 15 bp, Homo sapiens
gcctggtacttctgc

SEQ ID NO: 941344 - DNA, 15 bp, Homo sapiens
cctggtacttctgca

SEQ ID NO: 941345 - DNA, 15 bp, Homo sapiens
ctggtacttctgcat

SEQ ID NO: 941346 - DNA, 15 bp, Homo sapiens
tggtacttctgcatg

SEQ ID NO: 941347 - DNA, 15 bp, Homo sapiens
ggtacttctgcatgg

SEQ ID NO: 941348 - DNA, 15 bp, Homo sapiens
gtacttctgcatggt

SEQ ID NO: 941349 - DNA, 15 bp, Homo sapiens
tacttctgcatggtc

SEQ ID NO: 941350 - DNA, 15 bp, Homo sapiens
acttctgcatggtct

SEQ ID NO: 941351 - DNA, 15 bp, Homo sapiens
cttctgcatggtctt

SEQ ID NO: 941352 - DNA, 15 bp, Homo sapiens
ttctgcatggtcttc

SEQ ID NO: 941353 - DNA, 15 bp, Homo sapiens
tctgcatggtcttca

SEQ ID NO: 941354 - DNA, 15 bp, Homo sapiens
ctgcatggtcttcac

SEQ ID NO: 941355 - DNA, 15 bp, Homo sapiens
tgcatggtcttcaca

SEQ ID NO: 941356 - DNA, 15 bp, Homo sapiens
gcatggtcttcacaa

SEQ ID NO: 941357 - DNA, 15 bp, Homo sapiens
catggtcttcacaag

SEQ ID NO: 941358 - DNA, 15 bp, Homo sapiens
atggtcttcacaagg

SEQ ID NO: 941359 - DNA, 15 bp, Homo sapiens
tggtcttcacaaggc

SEQ ID NO: 941360 - DNA, 15 bp, Homo sapiens
ggtcttcacaaggca

SEQ ID NO: 941361 - DNA, 15 bp, Homo sapiens
gtcttcacaaggcag

SEQ ID NO: 941362 - DNA, 15 bp, Homo sapiens
tcttcacaaggcagg

SEQ ID NO: 941363 - DNA, 15 bp, Homo sapiens
cttcacaaggcaggt

SEQ ID NO: 941364 - DNA, 15 bp, Homo sapiens
ttcacaaggcaggtg

SEQ ID NO: 941365 - DNA, 15 bp, Homo sapiens
tcacaaggcaggtgg

SEQ ID NO: 941366 - DNA, 15 bp, Homo sapiens
cacaaggcaggtggg

SEQ ID NO: 941367 - DNA, 15 bp, Homo sapiens
acaaggcaggtgggg

SEQ ID NO: 941368 - DNA, 15 bp, Homo sapiens
caaggcaggtgggga

SEQ ID NO: 941369 - DNA, 15 bp, Homo sapiens
aaggcaggtggggaa

SEQ ID NO: 941370 - DNA, 15 bp, Homo sapiens
aggcaggtggggaat

SEQ ID NO: 941371 - DNA, 15 bp, Homo sapiens
ggcaggtggggaatt

SEQ ID NO: 941372 - DNA, 15 bp, Homo sapiens
aactgaaagccacta

SEQ ID NO: 941373 - DNA, 15 bp, Homo sapiens
actgaaagccactaa

SEQ ID NO: 941374 - DNA, 15 bp, Homo sapiens
ctgaaagccactaat

SEQ ID NO: 941375 - DNA, 15 bp, Homo sapiens
tgaaagccactaatg

SEQ ID NO: 941376 - DNA, 15 bp, Homo sapiens
gaaagccactaatga

SEQ ID NO: 941377 - DNA, 15 bp, Homo sapiens
aaagccactaatgac

SEQ ID NO: 941378 - DNA, 15 bp, Homo sapiens
aagccactaatgact

SEQ ID NO: 941379 - DNA, 15 bp, Homo sapiens
agccactaatgacta

SEQ ID NO: 941380 - DNA, 15 bp, Homo sapiens
gccactaatgactat

SEQ ID NO: 941381 - DNA, 15 bp, Homo sapiens
ccactaatgactatg

SEQ ID NO: 941382 - DNA, 15 bp, Homo sapiens
cactaatgactatgc

SEQ ID NO: 941383 - DNA, 15 bp, Homo sapiens
actaatgactatgca

SEQ ID NO: 941384 - DNA, 15 bp, Homo sapiens
ctaatgactatgcat

SEQ ID NO: 941385 - DNA, 15 bp, Homo sapiens
taatgactatgcatc

SEQ ID NO: 941386 - DNA, 15 bp, Homo sapiens
aatgactatgcatcc

SEQ ID NO: 941387 - DNA, 15 bp, Homo sapiens
atgactatgcatcca

SEQ ID NO: 941388 - DNA, 15 bp, Homo sapiens
tgactatgcatccat

SEQ ID NO: 941389 - DNA, 15 bp, Homo sapiens
gactatgcatccatg

SEQ ID NO: 941390 - DNA, 15 bp, Homo sapiens
actatgcatccatga

SEQ ID NO: 941391 - DNA, 15 bp, Homo sapiens
ctatgcatccatgaa

SEQ ID NO: 941392 - DNA, 15 bp, Homo sapiens
tatgcatccatgaag

SEQ ID NO: 941393 - DNA, 15 bp, Homo sapiens
atgcatccatgaagg

SEQ ID NO: 941394 - DNA, 15 bp, Homo sapiens
tgcatccatgaagga

SEQ ID NO: 941395 - DNA, 15 bp, Homo sapiens
gcatccatgaaggaa

SEQ ID NO: 941396 - DNA, 15 bp, Homo sapiens
catccatgaaggaat

SEQ ID NO: 941397 - DNA, 15 bp, Homo sapiens
atccatgaaggaatc

SEQ ID NO: 941398 - DNA, 15 bp, Homo sapiens
tccatgaaggaatca

SEQ ID NO: 941399 - DNA, 15 bp, Homo sapiens
ccatgaaggaatcac

SEQ ID NO: 941400 - DNA, 15 bp, Homo sapiens
catgaaggaatcacc

SEQ ID NO: 941401 - DNA, 15 bp, Homo sapiens
atgaaggaatcacca

SEQ ID NO: 941402 - DNA, 15 bp, Homo sapiens
tgaaggaatcaccag

SEQ ID NO: 941403 - DNA, 15 bp, Homo sapiens
gaaggaatcaccagt

SEQ ID NO: 941404 - DNA, 15 bp, Homo sapiens
aaggaatcaccagtc

SEQ ID NO: 941405 - DNA, 15 bp, Homo sapiens
aggaatcaccagtct

SEQ ID NO: 941406 - DNA, 15 bp, Homo sapiens
ggaatcaccagtctt

SEQ ID NO: 941407 - DNA, 15 bp, Homo sapiens
gaatcaccagtcttc

SEQ ID NO: 941408 - DNA, 15 bp, Homo sapiens
aatcaccagtcttcc

SEQ ID NO: 941409 - DNA, 15 bp, Homo sapiens
atcaccagtcttcct

SEQ ID NO: 941410 - DNA, 15 bp, Homo sapiens
tcaccagtcttcctt

SEQ ID NO: 941411 - DNA, 15 bp, Homo sapiens
caccagtcttccttc

SEQ ID NO: 941412 - DNA, 15 bp, Homo sapiens
accagtcttccttcc

SEQ ID NO: 941413 - DNA, 15 bp, Homo sapiens
ccagtcttccttcct

SEQ ID NO: 941414 - DNA, 15 bp, Homo sapiens
cagtcttccttcctt

SEQ ID NO: 941415 - DNA, 15 bp, Homo sapiens
agtcttccttccttt

SEQ ID NO: 941416 - DNA, 15 bp, Homo sapiens
gtcttccttcctttg

SEQ ID NO: 941417 - DNA, 15 bp, Homo sapiens
tcttccttcctttgt

SEQ ID NO: 941418 - DNA, 15 bp, Homo sapiens
cttccttcctttgtt

SEQ ID NO: 941419 - DNA, 15 bp, Homo sapiens
ttccttcctttgttc

SEQ ID NO: 941420 - DNA, 15 bp, Homo sapiens
tccttcctttgttct

SEQ ID NO: 941421 - DNA, 15 bp, Homo sapiens
ccttcctttgttcta

SEQ ID NO: 941422 - DNA, 15 bp, Homo sapiens
cttcctttgttctaa

SEQ ID NO: 941423 - DNA, 15 bp, Homo sapiens
ttcctttgttctaat

SEQ ID NO: 941424 - DNA, 15 bp, Homo sapiens
tcctttgttctaatg

SEQ ID NO: 941425 - DNA, 15 bp, Homo sapiens
cctttgttctaatgt

SEQ ID NO: 941426 - DNA, 15 bp, Homo sapiens
ctttgttctaatgtg

SEQ ID NO: 941427 - DNA, 15 bp, Homo sapiens
tttgttctaatgtgt

SEQ ID NO: 941428 - DNA, 15 bp, Homo sapiens
ttgttctaatgtgtt

SEQ ID NO: 941429 - DNA, 15 bp, Homo sapiens
tgttctaatgtgtta

SEQ ID NO: 941430 - DNA, 15 bp, Homo sapiens
gttctaatgtgttaa

SEQ ID NO: 941431 - DNA, 15 bp, Homo sapiens
ttctaatgtgttaaa

SEQ ID NO: 941432 - DNA, 15 bp, Homo sapiens
tctaatgtgttaaat

SEQ ID NO: 941433 - DNA, 15 bp, Homo sapiens
ctaatgtgttaaata

SEQ ID NO: 941434 - DNA, 15 bp, Homo sapiens
taatgtgttaaatat

SEQ ID NO: 941435 - DNA, 15 bp, Homo sapiens
aatgtgttaaatatc

SEQ ID NO: 941436 - DNA, 15 bp, Homo sapiens
atgtgttaaatatca

SEQ ID NO: 941437 - DNA, 15 bp, Homo sapiens
tgtgttaaatatcat

SEQ ID NO: 941438 - DNA, 15 bp, Homo sapiens
gtgttaaatatcatt

SEQ ID NO: 941439 - DNA, 15 bp, Homo sapiens
tgttaaatatcattt

SEQ ID NO: 941440 - DNA, 15 bp, Homo sapiens
gttaaatatcatttt

SEQ ID NO: 941441 - DNA, 15 bp, Homo sapiens
ttaaatatcatttta

SEQ ID NO: 941442 - DNA, 15 bp, Homo sapiens
taaatatcattttaa

SEQ ID NO: 941443 - DNA, 15 bp, Homo sapiens
aaatatcattttaac

SEQ ID NO: 941444 - DNA, 15 bp, Homo sapiens
aatatcattttaact

SEQ ID NO: 941445 - DNA, 15 bp, Homo sapiens
atatcattttaactt

SEQ ID NO: 941446 - DNA, 15 bp, Homo sapiens
tatcattttaacttt

SEQ ID NO: 941447 - DNA, 15 bp, Homo sapiens
atcattttaactttt

SEQ ID NO: 941448 - DNA, 15 bp, Homo sapiens
tcattttaactttta

SEQ ID NO: 941449 - DNA, 15 bp, Homo sapiens
cattttaacttttat

SEQ ID NO: 941450 - DNA, 15 bp, Homo sapiens
attttaacttttata

SEQ ID NO: 941451 - DNA, 15 bp, Homo sapiens
tttaacttttatata

SEQ ID NO: 941452 - DNA, 15 bp, Homo sapiens
ttaacttttatatat

SEQ ID NO: 941453 - DNA, 15 bp, Homo sapiens
taacttttatatatg

SEQ ID NO: 941454 - DNA, 15 bp, Homo sapiens
aacttttatatatga

SEQ ID NO: 941455 - DNA, 15 bp, Homo sapiens
acttttatatatgat

SEQ ID NO: 941456 - DNA, 15 bp, Homo sapiens
cttttatatatgatt

SEQ ID NO: 941457 - DNA, 15 bp, Homo sapiens
ttttatatatgatta

SEQ ID NO: 941458 - DNA, 15 bp, Homo sapiens
tttatatatgattaa

SEQ ID NO: 941459 - DNA, 15 bp, Homo sapiens
ttatatatgattaag

SEQ ID NO: 941460 - DNA, 15 bp, Homo sapiens
tatatatgattaagg

SEQ ID NO: 941461 - DNA, 15 bp, Homo sapiens
atatatgattaaggc

SEQ ID NO: 941462 - DNA, 15 bp, Homo sapiens
tatatgattaaggct

SEQ ID NO: 941463 - DNA, 15 bp, Homo sapiens
atatgattaaggctt

SEQ ID NO: 941464 - DNA, 15 bp, Homo sapiens
tatgattaaggcttt

SEQ ID NO: 941465 - DNA, 15 bp, Homo sapiens
atgattaaggctttt

SEQ ID NO: 941466 - DNA, 15 bp, Homo sapiens
tgattaaggcttttt

SEQ ID NO: 941467 - DNA, 15 bp, Homo sapiens
gattaaggctttttt

SEQ ID NO: 941468 - DNA, 15 bp, Homo sapiens
attaaggctttttta

SEQ ID NO: 941469 - DNA, 15 bp, Homo sapiens
ttaaggcttttttat

SEQ ID NO: 941470 - DNA, 15 bp, Homo sapiens
taaggcttttttatt

SEQ ID NO: 941471 - DNA, 15 bp, Homo sapiens
aaggcttttttattt

SEQ ID NO: 941472 - DNA, 15 bp, Homo sapiens
aggcttttttattta

SEQ ID NO: 941473 - DNA, 15 bp, Homo sapiens
ggcttttttatttaa

SEQ ID NO: 941474 - DNA, 15 bp, Homo sapiens
gcttttttatttaat

SEQ ID NO: 941475 - DNA, 15 bp, Homo sapiens
cttttttatttaatg

SEQ ID NO: 941476 - DNA, 15 bp, Homo sapiens
ttttttatttaatgt

SEQ ID NO: 941477 - DNA, 15 bp, Homo sapiens
tttttatttaatgtt

SEQ ID NO: 941478 - DNA, 15 bp, Homo sapiens
ttttatttaatgttc

SEQ ID NO: 941479 - DNA, 15 bp, Homo sapiens
tttatttaatgttcc

SEQ ID NO: 941480 - DNA, 15 bp, Homo sapiens
ttatttaatgttcct

SEQ ID NO: 941481 - DNA, 15 bp, Homo sapiens
tatttaatgttccta

SEQ ID NO: 941482 - DNA, 15 bp, Homo sapiens
atttaatgttcctaa

SEQ ID NO: 941483 - DNA, 15 bp, Homo sapiens
tttaatgttcctaac

SEQ ID NO: 941484 - DNA, 15 bp, Homo sapiens
ttaatgttcctaact

SEQ ID NO: 941485 - DNA, 15 bp, Homo sapiens
taatgttcctaactc

SEQ ID NO: 941486 - DNA, 15 bp, Homo sapiens
aatgttcctaactct

SEQ ID NO: 941487 - DNA, 15 bp, Homo sapiens
atgttcctaactctc

SEQ ID NO: 941488 - DNA, 15 bp, Homo sapiens
tgttcctaactctca

SEQ ID NO: 941489 - DNA, 15 bp, Homo sapiens
gttcctaactctcaa

SEQ ID NO: 941490 - DNA, 15 bp, Homo sapiens
ttcctaactctcaag

SEQ ID NO: 941491 - DNA, 15 bp, Homo sapiens
tcctaactctcaaga

SEQ ID NO: 941492 - DNA, 15 bp, Homo sapiens
cctaactctcaagaa

SEQ ID NO: 941493 - DNA, 15 bp, Homo sapiens
ctaactctcaagaaa

SEQ ID NO: 941494 - DNA, 15 bp, Homo sapiens
taactctcaagaaaa

SEQ ID NO: 941495 - DNA, 15 bp, Homo sapiens
aactctcaagaaaat

SEQ ID NO: 941496 - DNA, 15 bp, Homo sapiens
actctcaagaaaatt

SEQ ID NO: 941497 - DNA, 15 bp, Homo sapiens
ctctcaagaaaatta

SEQ ID NO: 941498 - DNA, 15 bp, Homo sapiens
tctcaagaaaattat

SEQ ID NO: 941499 - DNA, 15 bp, Homo sapiens
ctcaagaaaattatt

SEQ ID NO: 941500 - DNA, 15 bp, Homo sapiens
tcaagaaaattatta

SEQ ID NO: 941501 - DNA, 15 bp, Homo sapiens
caagaaaattattat

SEQ ID NO: 941502 - DNA, 15 bp, Homo sapiens
aagaaaattattatt

SEQ ID NO: 941503 - DNA, 15 bp, Homo sapiens
agaaaattattatta

SEQ ID NO: 941504 - DNA, 15 bp, Homo sapiens
gaaaattattattat

SEQ ID NO: 941505 - DNA, 15 bp, Homo sapiens
aaaattattattatg

SEQ ID NO: 941506 - DNA, 15 bp, Homo sapiens
aaattattattatgt

SEQ ID NO: 941507 - DNA, 15 bp, Homo sapiens
aattattattatgtg

SEQ ID NO: 941508 - DNA, 15 bp, Homo sapiens
attattattatgtgg

SEQ ID NO: 941509 - DNA, 15 bp, Homo sapiens
ttattattatgtgga

SEQ ID NO: 941510 - DNA, 15 bp, Homo sapiens
tattattatgtggaa

SEQ ID NO: 941511 - DNA, 15 bp, Homo sapiens
attattatgtggaaa

SEQ ID NO: 941512 - DNA, 15 bp, Homo sapiens
ttattatgtggaaaa

SEQ ID NO: 941513 - DNA, 15 bp, Homo sapiens
tattatgtggaaaac

SEQ ID NO: 941514 - DNA, 15 bp, Homo sapiens
attatgtggaaaaca

SEQ ID NO: 941515 - DNA, 15 bp, Homo sapiens
ttatgtggaaaacaa

SEQ ID NO: 941516 - DNA, 15 bp, Homo sapiens
tatgtggaaaacaat

SEQ ID NO: 941517 - DNA, 15 bp, Homo sapiens
atgtggaaaacaata

SEQ ID NO: 941518 - DNA, 15 bp, Homo sapiens
tgtggaaaacaataa

SEQ ID NO: 941519 - DNA, 15 bp, Homo sapiens
gtggaaaacaataat

SEQ ID NO: 941520 - DNA, 15 bp, Homo sapiens
tggaaaacaataata

SEQ ID NO: 941521 - DNA, 15 bp, Homo sapiens
ggaaaacaataatag

SEQ ID NO: 941522 - DNA, 15 bp, Homo sapiens
gaaaacaataatagc

SEQ ID NO: 941523 - DNA, 15 bp, Homo sapiens
aaaacaataatagct

SEQ ID NO: 941524 - DNA, 15 bp, Homo sapiens
aaacaataatagcta

SEQ ID NO: 941525 - DNA, 15 bp, Homo sapiens
aacaataatagctaa

SEQ ID NO: 941526 - DNA, 15 bp, Homo sapiens
acaataatagctaac

SEQ ID NO: 941527 - DNA, 15 bp, Homo sapiens
caataatagctaact

SEQ ID NO: 941528 - DNA, 15 bp, Homo sapiens
aataatagctaacta

SEQ ID NO: 941529 - DNA, 15 bp, Homo sapiens
ataatagctaactac

SEQ ID NO: 941530 - DNA, 15 bp, Homo sapiens
taatagctaactact

SEQ ID NO: 941531 - DNA, 15 bp, Homo sapiens
aatagctaactactt

SEQ ID NO: 941532 - DNA, 15 bp, Homo sapiens
atagctaactacttt

SEQ ID NO: 941533 - DNA, 15 bp, Homo sapiens
tagctaactactttt

SEQ ID NO: 941534 - DNA, 15 bp, Homo sapiens
agctaactactttta

SEQ ID NO: 941535 - DNA, 15 bp, Homo sapiens
gctaactacttttag

SEQ ID NO: 941536 - DNA, 15 bp, Homo sapiens
ctaactacttttagt

SEQ ID NO: 941537 - DNA, 15 bp, Homo sapiens
taactacttttagtg

SEQ ID NO: 941538 - DNA, 15 bp, Homo sapiens
aactacttttagtgc

SEQ ID NO: 941539 - DNA, 15 bp, Homo sapiens
actacttttagtgct

SEQ ID NO: 941540 - DNA, 15 bp, Homo sapiens
ctacttttagtgctg

SEQ ID NO: 941541 - DNA, 15 bp, Homo sapiens
tacttttagtgctgt

SEQ ID NO: 941542 - DNA, 15 bp, Homo sapiens
acttttagtgctgtg

SEQ ID NO: 941543 - DNA, 15 bp, Homo sapiens
cttttagtgctgtgc

SEQ ID NO: 941544 - DNA, 15 bp, Homo sapiens
ttttagtgctgtgct

SEQ ID NO: 941545 - DNA, 15 bp, Homo sapiens
tttagtgctgtgctt

SEQ ID NO: 941546 - DNA, 15 bp, Homo sapiens
ttagtgctgtgctta

SEQ ID NO: 941547 - DNA, 15 bp, Homo sapiens
tagtgctgtgcttag

SEQ ID NO: 941548 - DNA, 15 bp, Homo sapiens
agtgctgtgcttaga

SEQ ID NO: 941549 - DNA, 15 bp, Homo sapiens
gtgctgtgcttagag

SEQ ID NO: 941550 - DNA, 15 bp, Homo sapiens
tgctgtgcttagaga

SEQ ID NO: 941551 - DNA, 15 bp, Homo sapiens
gctgtgcttagagag

SEQ ID NO: 941552 - DNA, 15 bp, Homo sapiens
ctgtgcttagagagg

SEQ ID NO: 941553 - DNA, 15 bp, Homo sapiens
tgtgcttagagagga

SEQ ID NO: 941554 - DNA, 15 bp, Homo sapiens
gtgcttagagaggaa

SEQ ID NO: 941555 - DNA, 15 bp, Homo sapiens
tgcttagagaggaaa

SEQ ID NO: 941556 - DNA, 15 bp, Homo sapiens
gcttagagaggaaag

SEQ ID NO: 941557 - DNA, 15 bp, Homo sapiens
cttagagaggaaaga

SEQ ID NO: 941558 - DNA, 15 bp, Homo sapiens
ttagagaggaaagaa

SEQ ID NO: 941559 - DNA, 15 bp, Homo sapiens
tagagaggaaagaac

SEQ ID NO: 941560 - DNA, 15 bp, Homo sapiens
agagaggaaagaact

SEQ ID NO: 941561 - DNA, 15 bp, Homo sapiens
gagaggaaagaactt

SEQ ID NO: 941562 - DNA, 15 bp, Homo sapiens
agaggaaagaacttc

SEQ ID NO: 941563 - DNA, 15 bp, Homo sapiens
gaggaaagaacttct

SEQ ID NO: 941564 - DNA, 15 bp, Homo sapiens
aggaaagaacttctc

SEQ ID NO: 941565 - DNA, 15 bp, Homo sapiens
ggaaagaacttctcc

SEQ ID NO: 941566 - DNA, 15 bp, Homo sapiens
gaaagaacttctccc

SEQ ID NO: 941567 - DNA, 15 bp, Homo sapiens
aaagaacttctccca

SEQ ID NO: 941568 - DNA, 15 bp, Homo sapiens
aagaacttctcccaa

SEQ ID NO: 941569 - DNA, 15 bp, Homo sapiens
agaacttctcccaaa

SEQ ID NO: 941570 - DNA, 15 bp, Homo sapiens
gaacttctcccaaag

SEQ ID NO: 941571 - DNA, 15 bp, Homo sapiens
aacttctcccaaagc

SEQ ID NO: 941572 - DNA, 15 bp, Homo sapiens
acttctcccaaagcc

SEQ ID NO: 941573 - DNA, 15 bp, Homo sapiens
cttctcccaaagcca

SEQ ID NO: 941574 - DNA, 15 bp, Homo sapiens
ttctcccaaagccaa

SEQ ID NO: 941575 - DNA, 15 bp, Homo sapiens
tctcccaaagccaag

SEQ ID NO: 941576 - DNA, 15 bp, Homo sapiens
ctcccaaagccaagt

SEQ ID NO: 941577 - DNA, 15 bp, Homo sapiens
tcccaaagccaagtc

SEQ ID NO: 941578 - DNA, 15 bp, Homo sapiens
cccaaagccaagtca

SEQ ID NO: 941579 - DNA, 15 bp, Homo sapiens
ccaaagccaagtcat

SEQ ID NO: 941580 - DNA, 15 bp, Homo sapiens
caaagccaagtcata

SEQ ID NO: 941581 - DNA, 15 bp, Homo sapiens
aaagccaagtcataa

SEQ ID NO: 941582 - DNA, 15 bp, Homo sapiens
aagccaagtcataat

SEQ ID NO: 941583 - DNA, 15 bp, Homo sapiens
agccaagtcataata

SEQ ID NO: 941584 - DNA, 15 bp, Homo sapiens
gccaagtcataataa

SEQ ID NO: 941585 - DNA, 15 bp, Homo sapiens
ccaagtcataataat

SEQ ID NO: 941586 - DNA, 15 bp, Homo sapiens
caagtcataataata

SEQ ID NO: 941587 - DNA, 15 bp, Homo sapiens
aagtcataataataa

SEQ ID NO: 941588 - DNA, 15 bp, Homo sapiens
agtcataataataat

SEQ ID NO: 941589 - DNA, 15 bp, Homo sapiens
gtcataataataata

SEQ ID NO: 941590 - DNA, 15 bp, Homo sapiens
tcataataataataa

SEQ ID NO: 941591 - DNA, 15 bp, Homo sapiens
cataataataataat

SEQ ID NO: 941592 - DNA, 15 bp, Homo sapiens
ataataataataata

SEQ ID NO: 941593 - DNA, 15 bp, Homo sapiens
taataataataataa

SEQ ID NO: 941594 - DNA, 15 bp, Homo sapiens
aataataataataat

SEQ ID NO: 941595 - DNA, 15 bp, Homo sapiens
aataataataataac

SEQ ID NO: 941596 - DNA, 15 bp, Homo sapiens
ataataataataacc

SEQ ID NO: 941597 - DNA, 15 bp, Homo sapiens
taataataataaccc

SEQ ID NO: 941598 - DNA, 15 bp, Homo sapiens
aataataataaccca

SEQ ID NO: 941599 - DNA, 15 bp, Homo sapiens
ataataataacccac

SEQ ID NO: 941600 - DNA, 15 bp, Homo sapiens
taataataacccaca

SEQ ID NO: 941601 - DNA, 15 bp, Homo sapiens
aataataacccacaa

SEQ ID NO: 941602 - DNA, 15 bp, Homo sapiens
ataataacccacaac

SEQ ID NO: 941603 - DNA, 15 bp, Homo sapiens
taataacccacaaca

SEQ ID NO: 941604 - DNA, 15 bp, Homo sapiens
aataacccacaacat

SEQ ID NO: 941605 - DNA, 15 bp, Homo sapiens
ataacccacaacatt

SEQ ID NO: 941606 - DNA, 15 bp, Homo sapiens
taacccacaacattc

SEQ ID NO: 941607 - DNA, 15 bp, Homo sapiens
aacccacaacattct

SEQ ID NO: 941608 - DNA, 15 bp, Homo sapiens
acccacaacattctt

SEQ ID NO: 941609 - DNA, 15 bp, Homo sapiens
cccacaacattctta

SEQ ID NO: 941610 - DNA, 15 bp, Homo sapiens
ccacaacattcttaa

SEQ ID NO: 941611 - DNA, 15 bp, Homo sapiens
cacaacattcttaaa

SEQ ID NO: 941612 - DNA, 15 bp, Homo sapiens
acaacattcttaaaa

SEQ ID NO: 941613 - DNA, 15 bp, Homo sapiens
caacattcttaaaat

SEQ ID NO: 941614 - DNA, 15 bp, Homo sapiens
aacattcttaaaata

SEQ ID NO: 941615 - DNA, 15 bp, Homo sapiens
acattcttaaaatat

SEQ ID NO: 941616 - DNA, 15 bp, Homo sapiens
cattcttaaaatatc

SEQ ID NO: 941617 - DNA, 15 bp, Homo sapiens
attcttaaaatatct

SEQ ID NO: 941618 - DNA, 15 bp, Homo sapiens
ttcttaaaatatctt

SEQ ID NO: 941619 - DNA, 15 bp, Homo sapiens
tcttaaaatatcttg

SEQ ID NO: 941620 - DNA, 15 bp, Homo sapiens
cttaaaatatcttga

SEQ ID NO: 941621 - DNA, 15 bp, Homo sapiens
ttaaaatatcttgac

SEQ ID NO: 941622 - DNA, 15 bp, Homo sapiens
taaaatatcttgact

SEQ ID NO: 941623 - DNA, 15 bp, Homo sapiens
aaaatatcttgactc

SEQ ID NO: 941624 - DNA, 15 bp, Homo sapiens
aaatatcttgactct

SEQ ID NO: 941625 - DNA, 15 bp, Homo sapiens
aatatcttgactcta

SEQ ID NO: 941626 - DNA, 15 bp, Homo sapiens
atatcttgactctag

SEQ ID NO: 941627 - DNA, 15 bp, Homo sapiens
tatcttgactctaga

SEQ ID NO: 941628 - DNA, 15 bp, Homo sapiens
atcttgactctagag

SEQ ID NO: 941629 - DNA, 15 bp, Homo sapiens
tcttgactctagagc

SEQ ID NO: 941630 - DNA, 15 bp, Homo sapiens
cttgactctagagcc

SEQ ID NO: 941631 - DNA, 15 bp, Homo sapiens
ttgactctagagcct

SEQ ID NO: 941632 - DNA, 15 bp, Homo sapiens
tgactctagagccta

SEQ ID NO: 941633 - DNA, 15 bp, Homo sapiens
gactctagagcctat

SEQ ID NO: 941634 - DNA, 15 bp, Homo sapiens
actctagagcctata

SEQ ID NO: 941635 - DNA, 15 bp, Homo sapiens
ctctagagcctataa

SEQ ID NO: 941636 - DNA, 15 bp, Homo sapiens
tctagagcctataaa

SEQ ID NO: 941637 - DNA, 15 bp, Homo sapiens
ctagagcctataaac

SEQ ID NO: 941638 - DNA, 15 bp, Homo sapiens
tagagcctataaacc

SEQ ID NO: 941639 - DNA, 15 bp, Homo sapiens
agagcctataaacct

SEQ ID NO: 941640 - DNA, 15 bp, Homo sapiens
gagcctataaacctg

SEQ ID NO: 941641 - DNA, 15 bp, Homo sapiens
agcctataaacctgg

SEQ ID NO: 941642 - DNA, 15 bp, Homo sapiens
gcctataaacctggc

SEQ ID NO: 941643 - DNA, 15 bp, Homo sapiens
cctataaacctggct

SEQ ID NO: 941644 - DNA, 15 bp, Homo sapiens
ctataaacctggctt

SEQ ID NO: 941645 - DNA, 15 bp, Homo sapiens
tataaacctggcttc

SEQ ID NO: 941646 - DNA, 15 bp, Homo sapiens
ataaacctggcttct

SEQ ID NO: 941647 - DNA, 15 bp, Homo sapiens
taaacctggcttctc

SEQ ID NO: 941648 - DNA, 15 bp, Homo sapiens
aaacctggcttctcc

SEQ ID NO: 941649 - DNA, 15 bp, Homo sapiens
aacctggcttctcca

SEQ ID NO: 941650 - DNA, 15 bp, Homo sapiens
acctggcttctccag

SEQ ID NO: 941651 - DNA, 15 bp, Homo sapiens
cctggcttctccaga

SEQ ID NO: 941652 - DNA, 15 bp, Homo sapiens
ctggcttctccagaa

SEQ ID NO: 941653 - DNA, 15 bp, Homo sapiens
tggcttctccagaag

SEQ ID NO: 941654 - DNA, 15 bp, Homo sapiens
ggcttctccagaagc

SEQ ID NO: 941655 - DNA, 15 bp, Homo sapiens
gcttctccagaagcc

SEQ ID NO: 941656 - DNA, 15 bp, Homo sapiens
cttctccagaagcca

SEQ ID NO: 941657 - DNA, 15 bp, Homo sapiens
ttctccagaagccag

SEQ ID NO: 941658 - DNA, 15 bp, Homo sapiens
tctccagaagccagt

SEQ ID NO: 941659 - DNA, 15 bp, Homo sapiens
ctccagaagccagtg

SEQ ID NO: 941660 - DNA, 15 bp, Homo sapiens
tccagaagccagtga

SEQ ID NO: 941661 - DNA, 15 bp, Homo sapiens
ccagaagccagtgag

SEQ ID NO: 941662 - DNA, 15 bp, Homo sapiens
cagaagccagtgagt

SEQ ID NO: 941663 - DNA, 15 bp, Homo sapiens
agaagccagtgagta

SEQ ID NO: 941664 - DNA, 15 bp, Homo sapiens
gaagccagtgagtat

SEQ ID NO: 941665 - DNA, 15 bp, Homo sapiens
aagccagtgagtatc

SEQ ID NO: 941666 - DNA, 15 bp, Homo sapiens
agccagtgagtatca

SEQ ID NO: 941667 - DNA, 15 bp, Homo sapiens
gccagtgagtatcag

SEQ ID NO: 941668 - DNA, 15 bp, Homo sapiens
ccagtgagtatcagc

SEQ ID NO: 941669 - DNA, 15 bp, Homo sapiens
cagtgagtatcagct

SEQ ID NO: 941670 - DNA, 15 bp, Homo sapiens
agtgagtatcagctg

SEQ ID NO: 941671 - DNA, 15 bp, Homo sapiens
gtgagtatcagctgc

SEQ ID NO: 941672 - DNA, 15 bp, Homo sapiens
tgagtatcagctgcc

SEQ ID NO: 941673 - DNA, 15 bp, Homo sapiens
gagtatcagctgcca

SEQ ID NO: 941674 - DNA, 15 bp, Homo sapiens
agtatcagctgccac

SEQ ID NO: 941675 - DNA, 15 bp, Homo sapiens
gtatcagctgccact

SEQ ID NO: 941676 - DNA, 15 bp, Homo sapiens
tatcagctgccactg

SEQ ID NO: 941677 - DNA, 15 bp, Homo sapiens
atcagctgccactga

SEQ ID NO: 941678 - DNA, 15 bp, Homo sapiens
tcagctgccactgat

SEQ ID NO: 941679 - DNA, 15 bp, Homo sapiens
cagctgccactgatg

SEQ ID NO: 941680 - DNA, 15 bp, Homo sapiens
agctgccactgatgc

SEQ ID NO: 941681 - DNA, 15 bp, Homo sapiens
gctgccactgatgct

SEQ ID NO: 941682 - DNA, 15 bp, Homo sapiens
ctgccactgatgctg

SEQ ID NO: 941683 - DNA, 15 bp, Homo sapiens
tgccactgatgctgt

SEQ ID NO: 941684 - DNA, 15 bp, Homo sapiens
gccactgatgctgta

SEQ ID NO: 941685 - DNA, 15 bp, Homo sapiens
ccactgatgctgtaa

SEQ ID NO: 941686 - DNA, 15 bp, Homo sapiens
cactgatgctgtaat

SEQ ID NO: 941687 - DNA, 15 bp, Homo sapiens
actgatgctgtaatt

SEQ ID NO: 941688 - DNA, 15 bp, Homo sapiens
ctgatgctgtaattt

SEQ ID NO: 941689 - DNA, 15 bp, Homo sapiens
tgatgctgtaatttt

SEQ ID NO: 941690 - DNA, 15 bp, Homo sapiens
gatgctgtaattttc

SEQ ID NO: 941691 - DNA, 15 bp, Homo sapiens
atgctgtaattttct

SEQ ID NO: 941692 - DNA, 15 bp, Homo sapiens
tgctgtaattttctt

SEQ ID NO: 941693 - DNA, 15 bp, Homo sapiens
gctgtaattttctta

SEQ ID NO: 941694 - DNA, 15 bp, Homo sapiens
ctgtaattttcttag

SEQ ID NO: 941695 - DNA, 15 bp, Homo sapiens
tgtaattttcttagg

SEQ ID NO: 941696 - DNA, 15 bp, Homo sapiens
gtaattttcttaggc

SEQ ID NO: 941697 - DNA, 15 bp, Homo sapiens
taattttcttaggca

SEQ ID NO: 941698 - DNA, 15 bp, Homo sapiens
aattttcttaggcag

SEQ ID NO: 941699 - DNA, 15 bp, Homo sapiens
attttcttaggcaga

SEQ ID NO: 941700 - DNA, 15 bp, Homo sapiens
ttttcttaggcagag

SEQ ID NO: 941701 - DNA, 15 bp, Homo sapiens
tttcttaggcagaga

SEQ ID NO: 941702 - DNA, 15 bp, Homo sapiens
ttcttaggcagagac

SEQ ID NO: 941703 - DNA, 15 bp, Homo sapiens
tcttaggcagagact

SEQ ID NO: 941704 - DNA, 15 bp, Homo sapiens
cttaggcagagactc

SEQ ID NO: 941705 - DNA, 15 bp, Homo sapiens
ttaggcagagactca

SEQ ID NO: 941706 - DNA, 15 bp, Homo sapiens
taggcagagactcaa

SEQ ID NO: 941707 - DNA, 15 bp, Homo sapiens
aggcagagactcaac

SEQ ID NO: 941708 - DNA, 15 bp, Homo sapiens
ggcagagactcaact

SEQ ID NO: 941709 - DNA, 15 bp, Homo sapiens
gcagagactcaactg

SEQ ID NO: 941710 - DNA, 15 bp, Homo sapiens
cagagactcaactgc

SEQ ID NO: 941711 - DNA, 15 bp, Homo sapiens
agagactcaactgcc

SEQ ID NO: 941712 - DNA, 15 bp, Homo sapiens
gagactcaactgcca

SEQ ID NO: 941713 - DNA, 15 bp, Homo sapiens
agactcaactgccat

SEQ ID NO: 941714 - DNA, 15 bp, Homo sapiens
gactcaactgccatg

SEQ ID NO: 941715 - DNA, 15 bp, Homo sapiens
actcaactgccatgg

SEQ ID NO: 941716 - DNA, 15 bp, Homo sapiens
ctcaactgccatggg

SEQ ID NO: 941717 - DNA, 15 bp, Homo sapiens
tcaactgccatgggc

SEQ ID NO: 941718 - DNA, 15 bp, Homo sapiens
caactgccatgggca

SEQ ID NO: 941719 - DNA, 15 bp, Homo sapiens
aactgccatgggcag

SEQ ID NO: 941720 - DNA, 15 bp, Homo sapiens
actgccatgggcaga

SEQ ID NO: 941721 - DNA, 15 bp, Homo sapiens
ctgccatgggcagat

SEQ ID NO: 941722 - DNA, 15 bp, Homo sapiens
tgccatgggcagatg

SEQ ID NO: 941723 - DNA, 15 bp, Homo sapiens
gccatgggcagatgc

SEQ ID NO: 941724 - DNA, 15 bp, Homo sapiens
ccatgggcagatgcc

SEQ ID NO: 941725 - DNA, 15 bp, Homo sapiens
catgggcagatgcca

SEQ ID NO: 941726 - DNA, 15 bp, Homo sapiens
atgggcagatgccac

SEQ ID NO: 941727 - DNA, 15 bp, Homo sapiens
tgggcagatgccaca

SEQ ID NO: 941728 - DNA, 15 bp, Homo sapiens
gggcagatgccacaa

SEQ ID NO: 941729 - DNA, 15 bp, Homo sapiens
ggcagatgccacaac

SEQ ID NO: 941730 - DNA, 15 bp, Homo sapiens
gcagatgccacaaca

SEQ ID NO: 941731 - DNA, 15 bp, Homo sapiens
cagatgccacaacat

SEQ ID NO: 941732 - DNA, 15 bp, Homo sapiens
agatgccacaacatt

SEQ ID NO: 941733 - DNA, 15 bp, Homo sapiens
gatgccacaacattg

SEQ ID NO: 941734 - DNA, 15 bp, Homo sapiens
atgccacaacattgg

SEQ ID NO: 941735 - DNA, 15 bp, Homo sapiens
tgccacaacattggc

SEQ ID NO: 941736 - DNA, 15 bp, Homo sapiens
gccacaacattggca

SEQ ID NO: 941737 - DNA, 15 bp, Homo sapiens
ccacaacattggcaa

SEQ ID NO: 941738 - DNA, 15 bp, Homo sapiens
cacaacattggcaaa

SEQ ID NO: 941739 - DNA, 15 bp, Homo sapiens
acaacattggcaaaa

SEQ ID NO: 941740 - DNA, 15 bp, Homo sapiens
caacattggcaaaag

SEQ ID NO: 941741 - DNA, 15 bp, Homo sapiens
aacattggcaaaagt

SEQ ID NO: 941742 - DNA, 15 bp, Homo sapiens
acattggcaaaagtg

SEQ ID NO: 941743 - DNA, 15 bp, Homo sapiens
cattggcaaaagtgg

SEQ ID NO: 941744 - DNA, 15 bp, Homo sapiens
attggcaaaagtggg

SEQ ID NO: 941745 - DNA, 15 bp, Homo sapiens
ttggcaaaagtgggg

SEQ ID NO: 941746 - DNA, 15 bp, Homo sapiens
tggcaaaagtggggc

SEQ ID NO: 941747 - DNA, 15 bp, Homo sapiens
ggcaaaagtggggca

SEQ ID NO: 941748 - DNA, 15 bp, Homo sapiens
gcaaaagtggggcac

SEQ ID NO: 941749 - DNA, 15 bp, Homo sapiens
caaaagtggggcaca

SEQ ID NO: 941750 - DNA, 15 bp, Homo sapiens
aaaagtggggcacag

SEQ ID NO: 941751 - DNA, 15 bp, Homo sapiens
aaagtggggcacagt

SEQ ID NO: 941752 - DNA, 15 bp, Homo sapiens
aagtggggcacagtt

SEQ ID NO: 941753 - DNA, 15 bp, Homo sapiens
agtggggcacagtta

SEQ ID NO: 941754 - DNA, 15 bp, Homo sapiens
gtggggcacagttaa

SEQ ID NO: 941755 - DNA, 15 bp, Homo sapiens
tggggcacagttaaa

SEQ ID NO: 941756 - DNA, 15 bp, Homo sapiens
ggggcacagttaaag

SEQ ID NO: 941757 - DNA, 15 bp, Homo sapiens
gggcacagttaaaga

SEQ ID NO: 941758 - DNA, 15 bp, Homo sapiens
ggcacagttaaagat

SEQ ID NO: 941759 - DNA, 15 bp, Homo sapiens
gcacagttaaagatg

SEQ ID NO: 941760 - DNA, 15 bp, Homo sapiens
cacagttaaagatga

SEQ ID NO: 941761 - DNA, 15 bp, Homo sapiens
acagttaaagatgac

SEQ ID NO: 941762 - DNA, 15 bp, Homo sapiens
cagttaaagatgacg

SEQ ID NO: 941763 - DNA, 15 bp, Homo sapiens
agttaaagatgacgt

SEQ ID NO: 941764 - DNA, 15 bp, Homo sapiens
gttaaagatgacgtt

SEQ ID NO: 941765 - DNA, 15 bp, Homo sapiens
ttaaagatgacgttt

SEQ ID NO: 941766 - DNA, 15 bp, Homo sapiens
taaagatgacgtttc

SEQ ID NO: 941767 - DNA, 15 bp, Homo sapiens
aaagatgacgtttca

SEQ ID NO: 941768 - DNA, 15 bp, Homo sapiens
aagatgacgtttcat

SEQ ID NO: 941769 - DNA, 15 bp, Homo sapiens
agatgacgtttcatc

SEQ ID NO: 941770 - DNA, 15 bp, Homo sapiens
gatgacgtttcatca

SEQ ID NO: 941771 - DNA, 15 bp, Homo sapiens
atgacgtttcatcac

SEQ ID NO: 941772 - DNA, 15 bp, Homo sapiens
tgacgtttcatcacc

SEQ ID NO: 941773 - DNA, 15 bp, Homo sapiens
gacgtttcatcacca

SEQ ID NO: 941774 - DNA, 15 bp, Homo sapiens
acgtttcatcaccaa

SEQ ID NO: 941775 - DNA, 15 bp, Homo sapiens
cgtttcatcaccaac

SEQ ID NO: 941776 - DNA, 15 bp, Homo sapiens
gtttcatcaccaaca

SEQ ID NO: 941777 - DNA, 15 bp, Homo sapiens
tttcatcaccaacat

SEQ ID NO: 941778 - DNA, 15 bp, Homo sapiens
ttcatcaccaacatg

SEQ ID NO: 941779 - DNA, 15 bp, Homo sapiens
tcatcaccaacatgt

SEQ ID NO: 941780 - DNA, 15 bp, Homo sapiens
catcaccaacatgtc

SEQ ID NO: 941781 - DNA, 15 bp, Homo sapiens
atcaccaacatgtca

SEQ ID NO: 941782 - DNA, 15 bp, Homo sapiens
tcaccaacatgtcac

SEQ ID NO: 941783 - DNA, 15 bp, Homo sapiens
caccaacatgtcaca

SEQ ID NO: 941784 - DNA, 15 bp, Homo sapiens
accaacatgtcacac

SEQ ID NO: 941785 - DNA, 15 bp, Homo sapiens
ccaacatgtcacact

SEQ ID NO: 941786 - DNA, 15 bp, Homo sapiens
caacatgtcacactt

SEQ ID NO: 941787 - DNA, 15 bp, Homo sapiens
aacatgtcacacttg

SEQ ID NO: 941788 - DNA, 15 bp, Homo sapiens
acatgtcacacttgt

SEQ ID NO: 941789 - DNA, 15 bp, Homo sapiens
catgtcacacttgtc

SEQ ID NO: 941790 - DNA, 15 bp, Homo sapiens
atgtcacacttgtca

SEQ ID NO: 941791 - DNA, 15 bp, Homo sapiens
tgtcacacttgtcag

SEQ ID NO: 941792 - DNA, 15 bp, Homo sapiens
gtcacacttgtcagc

SEQ ID NO: 941793 - DNA, 15 bp, Homo sapiens
tcacacttgtcagca

SEQ ID NO: 941794 - DNA, 15 bp, Homo sapiens
cacacttgtcagcat

SEQ ID NO: 941795 - DNA, 15 bp, Homo sapiens
acacttgtcagcatt

SEQ ID NO: 941796 - DNA, 15 bp, Homo sapiens
cacttgtcagcattt

SEQ ID NO: 941797 - DNA, 15 bp, Homo sapiens
acttgtcagcatttt

SEQ ID NO: 941798 - DNA, 15 bp, Homo sapiens
cttgtcagcatttta

SEQ ID NO: 941799 - DNA, 15 bp, Homo sapiens
ttgtcagcattttaa

SEQ ID NO: 941800 - DNA, 15 bp, Homo sapiens
tgtcagcattttaaa

SEQ ID NO: 941801 - DNA, 15 bp, Homo sapiens
gtcagcattttaaag

SEQ ID NO: 941802 - DNA, 15 bp, Homo sapiens
tcagcattttaaaga

SEQ ID NO: 941803 - DNA, 15 bp, Homo sapiens
cagcattttaaagaa

SEQ ID NO: 941804 - DNA, 15 bp, Homo sapiens
agcattttaaagaaa

SEQ ID NO: 941805 - DNA, 15 bp, Homo sapiens
gcattttaaagaaaa

SEQ ID NO: 941806 - DNA, 15 bp, Homo sapiens
cattttaaagaaaaa

SEQ ID NO: 941807 - DNA, 15 bp, Homo sapiens
attttaaagaaaaaa

SEQ ID NO: 941808 - DNA, 15 bp, Homo sapiens
ttttaaagaaaaaaa

SEQ ID NO: 941809 - DNA, 15 bp, Homo sapiens
tttaaagaaaaaaac

SEQ ID NO: 941810 - DNA, 15 bp, Homo sapiens
ttaaagaaaaaaaca

SEQ ID NO: 941811 - DNA, 15 bp, Homo sapiens
taaagaaaaaaacag

SEQ ID NO: 941812 - DNA, 15 bp, Homo sapiens
aaagaaaaaaacaga

SEQ ID NO: 941813 - DNA, 15 bp, Homo sapiens
aagaaaaaaacagat

SEQ ID NO: 941814 - DNA, 15 bp, Homo sapiens
agaaaaaaacagatt

SEQ ID NO: 941815 - DNA, 15 bp, Homo sapiens
gaaaaaaacagattg

SEQ ID NO: 941816 - DNA, 15 bp, Homo sapiens
aaaaaaacagattga

SEQ ID NO: 941817 - DNA, 15 bp, Homo sapiens
aaaaaacagattgaa

SEQ ID NO: 941818 - DNA, 15 bp, Homo sapiens
aaaaacagattgaag

SEQ ID NO: 941819 - DNA, 15 bp, Homo sapiens
aaaacagattgaaga

SEQ ID NO: 941820 - DNA, 15 bp, Homo sapiens
aaacagattgaagag

SEQ ID NO: 941821 - DNA, 15 bp, Homo sapiens
aacagattgaagagg

SEQ ID NO: 941822 - DNA, 15 bp, Homo sapiens
acagattgaagagga

SEQ ID NO: 941823 - DNA, 15 bp, Homo sapiens
cagattgaagaggaa

SEQ ID NO: 941824 - DNA, 15 bp, Homo sapiens
agattgaagaggaaa

SEQ ID NO: 941825 - DNA, 15 bp, Homo sapiens
gattgaagaggaaag

SEQ ID NO: 941826 - DNA, 15 bp, Homo sapiens
attgaagaggaaaga

SEQ ID NO: 941827 - DNA, 15 bp, Homo sapiens
ttgaagaggaaagaa

SEQ ID NO: 941828 - DNA, 15 bp, Homo sapiens
tgaagaggaaagaag

SEQ ID NO: 941829 - DNA, 15 bp, Homo sapiens
gaagaggaaagaaga

SEQ ID NO: 941830 - DNA, 15 bp, Homo sapiens
aagaggaaagaagaa

SEQ ID NO: 941831 - DNA, 15 bp, Homo sapiens
agaggaaagaagaag

SEQ ID NO: 941832 - DNA, 15 bp, Homo sapiens
gaggaaagaagaagt

SEQ ID NO: 941833 - DNA, 15 bp, Homo sapiens
aggaaagaagaagtt

SEQ ID NO: 941834 - DNA, 15 bp, Homo sapiens
ggaaagaagaagttg

SEQ ID NO: 941835 - DNA, 15 bp, Homo sapiens
gaaagaagaagttga

SEQ ID NO: 941836 - DNA, 15 bp, Homo sapiens
aaagaagaagttgag

SEQ ID NO: 941837 - DNA, 15 bp, Homo sapiens
aagaagaagttgagt

SEQ ID NO: 941838 - DNA, 15 bp, Homo sapiens
agaagaagttgagtt

SEQ ID NO: 941839 - DNA, 15 bp, Homo sapiens
gaagaagttgagttt

SEQ ID NO: 941840 - DNA, 15 bp, Homo sapiens
aagaagttgagtttt

SEQ ID NO: 941841 - DNA, 15 bp, Homo sapiens
agaagttgagtttta

SEQ ID NO: 941842 - DNA, 15 bp, Homo sapiens
gaagttgagttttag

SEQ ID NO: 941843 - DNA, 15 bp, Homo sapiens
aagttgagttttagt

SEQ ID NO: 941844 - DNA, 15 bp, Homo sapiens
agttgagttttagta

SEQ ID NO: 941845 - DNA, 15 bp, Homo sapiens
gttgagttttagtat

SEQ ID NO: 941846 - DNA, 15 bp, Homo sapiens
ttgagttttagtatc

SEQ ID NO: 941847 - DNA, 15 bp, Homo sapiens
tgagttttagtatcc

SEQ ID NO: 941848 - DNA, 15 bp, Homo sapiens
gagttttagtatcca

SEQ ID NO: 941849 - DNA, 15 bp, Homo sapiens
agttttagtatccaa

SEQ ID NO: 941850 - DNA, 15 bp, Homo sapiens
gttttagtatccaaa

SEQ ID NO: 941851 - DNA, 15 bp, Homo sapiens
ttttagtatccaaat

SEQ ID NO: 941852 - DNA, 15 bp, Homo sapiens
tttagtatccaaatt

SEQ ID NO: 941853 - DNA, 15 bp, Homo sapiens
ttagtatccaaattt

SEQ ID NO: 941854 - DNA, 15 bp, Homo sapiens
tagtatccaaatttg

SEQ ID NO: 941855 - DNA, 15 bp, Homo sapiens
agtatccaaatttga

SEQ ID NO: 941856 - DNA, 15 bp, Homo sapiens
gtatccaaatttgaa

SEQ ID NO: 941857 - DNA, 15 bp, Homo sapiens
tatccaaatttgaac

SEQ ID NO: 941858 - DNA, 15 bp, Homo sapiens
atccaaatttgaact

SEQ ID NO: 941859 - DNA, 15 bp, Homo sapiens
tccaaatttgaacta

SEQ ID NO: 941860 - DNA, 15 bp, Homo sapiens
ccaaatttgaactaa

SEQ ID NO: 941861 - DNA, 15 bp, Homo sapiens
caaatttgaactaaa

SEQ ID NO: 941862 - DNA, 15 bp, Homo sapiens
aaatttgaactaaaa

SEQ ID NO: 941863 - DNA, 15 bp, Homo sapiens
aatttgaactaaaat

SEQ ID NO: 941864 - DNA, 15 bp, Homo sapiens
atttgaactaaaatt

SEQ ID NO: 941865 - DNA, 15 bp, Homo sapiens
tttgaactaaaattt

SEQ ID NO: 941866 - DNA, 15 bp, Homo sapiens
ttgaactaaaatttt

SEQ ID NO: 941867 - DNA, 15 bp, Homo sapiens
tgaactaaaattttg

SEQ ID NO: 941868 - DNA, 15 bp, Homo sapiens
gaactaaaattttgg

SEQ ID NO: 941869 - DNA, 15 bp, Homo sapiens
aactaaaattttgga

SEQ ID NO: 941870 - DNA, 15 bp, Homo sapiens
actaaaattttggaa

SEQ ID NO: 941871 - DNA, 15 bp, Homo sapiens
ctaaaattttggaaa

SEQ ID NO: 941872 - DNA, 15 bp, Homo sapiens
taaaattttggaaaa

SEQ ID NO: 941873 - DNA, 15 bp, Homo sapiens
aaaattttggaaaaa

SEQ ID NO: 941874 - DNA, 15 bp, Homo sapiens
aaattttggaaaaat

SEQ ID NO: 941875 - DNA, 15 bp, Homo sapiens
aattttggaaaaata

SEQ ID NO: 941876 - DNA, 15 bp, Homo sapiens
attttggaaaaatac

SEQ ID NO: 941877 - DNA, 15 bp, Homo sapiens
ttttggaaaaataca

SEQ ID NO: 941878 - DNA, 15 bp, Homo sapiens
tttggaaaaatacag

SEQ ID NO: 941879 - DNA, 15 bp, Homo sapiens
ttggaaaaatacagc

SEQ ID NO: 941880 - DNA, 15 bp, Homo sapiens
tggaaaaatacagca

SEQ ID NO: 941881 - DNA, 15 bp, Homo sapiens
ggaaaaatacagcat

SEQ ID NO: 941882 - DNA, 15 bp, Homo sapiens
gaaaaatacagcata

SEQ ID NO: 941883 - DNA, 15 bp, Homo sapiens
aaaaatacagcatag

SEQ ID NO: 941884 - DNA, 15 bp, Homo sapiens
aaaatacagcatagt

SEQ ID NO: 941885 - DNA, 15 bp, Homo sapiens
aaatacagcatagta

SEQ ID NO: 941886 - DNA, 15 bp, Homo sapiens
aatacagcatagtac

SEQ ID NO: 941887 - DNA, 15 bp, Homo sapiens
atacagcatagtaca

SEQ ID NO: 941888 - DNA, 15 bp, Homo sapiens
tacagcatagtacag

SEQ ID NO: 941889 - DNA, 15 bp, Homo sapiens
acagcatagtacaga

SEQ ID NO: 941890 - DNA, 15 bp, Homo sapiens
cagcatagtacagag

SEQ ID NO: 941891 - DNA, 15 bp, Homo sapiens
agcatagtacagagt

SEQ ID NO: 941892 - DNA, 15 bp, Homo sapiens
gcatagtacagagta

SEQ ID NO: 941893 - DNA, 15 bp, Homo sapiens
catagtacagagtat

SEQ ID NO: 941894 - DNA, 15 bp, Homo sapiens
atagtacagagtatg

SEQ ID NO: 941895 - DNA, 15 bp, Homo sapiens
tagtacagagtatga

SEQ ID NO: 941896 - DNA, 15 bp, Homo sapiens
agtacagagtatgaa

SEQ ID NO: 941897 - DNA, 15 bp, Homo sapiens
gtacagagtatgaaa

SEQ ID NO: 941898 - DNA, 15 bp, Homo sapiens
tacagagtatgaaac

SEQ ID NO: 941899 - DNA, 15 bp, Homo sapiens
acagagtatgaaacc

SEQ ID NO: 941900 - DNA, 15 bp, Homo sapiens
cagagtatgaaacca

SEQ ID NO: 941901 - DNA, 15 bp, Homo sapiens
agagtatgaaaccat

SEQ ID NO: 941902 - DNA, 15 bp, Homo sapiens
gagtatgaaaccata

SEQ ID NO: 941903 - DNA, 15 bp, Homo sapiens
agtatgaaaccatac

SEQ ID NO: 941904 - DNA, 15 bp, Homo sapiens
gtatgaaaccatacc

SEQ ID NO: 941905 - DNA, 15 bp, Homo sapiens
tatgaaaccatacca

SEQ ID NO: 941906 - DNA, 15 bp, Homo sapiens
atgaaaccataccaa

SEQ ID NO: 941907 - DNA, 15 bp, Homo sapiens
tgaaaccataccaaa

SEQ ID NO: 941908 - DNA, 15 bp, Homo sapiens
gaaaccataccaaag

SEQ ID NO: 941909 - DNA, 15 bp, Homo sapiens
aaaccataccaaagt

SEQ ID NO: 941910 - DNA, 15 bp, Homo sapiens
aaccataccaaagtg

SEQ ID NO: 941911 - DNA, 15 bp, Homo sapiens
accataccaaagtga

SEQ ID NO: 941912 - DNA, 15 bp, Homo sapiens
ccataccaaagtgat

SEQ ID NO: 941913 - DNA, 15 bp, Homo sapiens
cataccaaagtgata

SEQ ID NO: 941914 - DNA, 15 bp, Homo sapiens
ataccaaagtgatat

SEQ ID NO: 941915 - DNA, 15 bp, Homo sapiens
taccaaagtgatatt

SEQ ID NO: 941916 - DNA, 15 bp, Homo sapiens
accaaagtgatattt

SEQ ID NO: 941917 - DNA, 15 bp, Homo sapiens
ccaaagtgatatttt

SEQ ID NO: 941918 - DNA, 15 bp, Homo sapiens
caaagtgatattttg

SEQ ID NO: 941919 - DNA, 15 bp, Homo sapiens
aaagtgatattttga

SEQ ID NO: 941920 - DNA, 15 bp, Homo sapiens
aagtgatattttgaa

SEQ ID NO: 941921 - DNA, 15 bp, Homo sapiens
agtgatattttgaag

SEQ ID NO: 941922 - DNA, 15 bp, Homo sapiens
gtgatattttgaagg

SEQ ID NO: 941923 - DNA, 15 bp, Homo sapiens
tgatattttgaagga

SEQ ID NO: 941924 - DNA, 15 bp, Homo sapiens
gatattttgaaggag

SEQ ID NO: 941925 - DNA, 15 bp, Homo sapiens
atattttgaaggaga

SEQ ID NO: 941926 - DNA, 15 bp, Homo sapiens
tattttgaaggagat

SEQ ID NO: 941927 - DNA, 15 bp, Homo sapiens
attttgaaggagata

SEQ ID NO: 941928 - DNA, 15 bp, Homo sapiens
ttttgaaggagatac

SEQ ID NO: 941929 - DNA, 15 bp, Homo sapiens
tttgaaggagatact

SEQ ID NO: 941930 - DNA, 15 bp, Homo sapiens
ttgaaggagatactt

SEQ ID NO: 941931 - DNA, 15 bp, Homo sapiens
tgaaggagatacttt

SEQ ID NO: 941932 - DNA, 15 bp, Homo sapiens
gaaggagatactttt

SEQ ID NO: 941933 - DNA, 15 bp, Homo sapiens
aaggagatacttttg

SEQ ID NO: 941934 - DNA, 15 bp, Homo sapiens
aggagatacttttgg

SEQ ID NO: 941935 - DNA, 15 bp, Homo sapiens
ggagatacttttggg

SEQ ID NO: 941936 - DNA, 15 bp, Homo sapiens
gagatacttttggga

SEQ ID NO: 941937 - DNA, 15 bp, Homo sapiens
agatacttttgggaa

SEQ ID NO: 941938 - DNA, 15 bp, Homo sapiens
gatacttttgggaaa

SEQ ID NO: 941939 - DNA, 15 bp, Homo sapiens
atacttttgggaaaa

SEQ ID NO: 941940 - DNA, 15 bp, Homo sapiens
tacttttgggaaaat

SEQ ID NO: 941941 - DNA, 15 bp, Homo sapiens
acttttgggaaaatg

SEQ ID NO: 941942 - DNA, 15 bp, Homo sapiens
cttttgggaaaatgt

SEQ ID NO: 941943 - DNA, 15 bp, Homo sapiens
ttttgggaaaatgtg

SEQ ID NO: 941944 - DNA, 15 bp, Homo sapiens
tttgggaaaatgtga

SEQ ID NO: 941945 - DNA, 15 bp, Homo sapiens
ttgggaaaatgtgat

SEQ ID NO: 941946 - DNA, 15 bp, Homo sapiens
tgggaaaatgtgatt

SEQ ID NO: 941947 - DNA, 15 bp, Homo sapiens
gggaaaatgtgattt

SEQ ID NO: 941948 - DNA, 15 bp, Homo sapiens
ggaaaatgtgatttt

SEQ ID NO: 941949 - DNA, 15 bp, Homo sapiens
gaaaatgtgatttta

SEQ ID NO: 941950 - DNA, 15 bp, Homo sapiens
aaaatgtgattttaa

SEQ ID NO: 941951 - DNA, 15 bp, Homo sapiens
aaatgtgattttaac

SEQ ID NO: 941952 - DNA, 15 bp, Homo sapiens
aatgtgattttaaca

SEQ ID NO: 941953 - DNA, 15 bp, Homo sapiens
atgtgattttaacat

SEQ ID NO: 941954 - DNA, 15 bp, Homo sapiens
tgtgattttaacatc

SEQ ID NO: 941955 - DNA, 15 bp, Homo sapiens
gtgattttaacatca

SEQ ID NO: 941956 - DNA, 15 bp, Homo sapiens
tgattttaacatcaa

SEQ ID NO: 941957 - DNA, 15 bp, Homo sapiens
gattttaacatcaat

SEQ ID NO: 941958 - DNA, 15 bp, Homo sapiens
attttaacatcaatt

SEQ ID NO: 941959 - DNA, 15 bp, Homo sapiens
ttttaacatcaatta

SEQ ID NO: 941960 - DNA, 15 bp, Homo sapiens
tttaacatcaattag

SEQ ID NO: 941961 - DNA, 15 bp, Homo sapiens
ttaacatcaattaga

SEQ ID NO: 941962 - DNA, 15 bp, Homo sapiens
taacatcaattagaa

SEQ ID NO: 941963 - DNA, 15 bp, Homo sapiens
aacatcaattagaaa

SEQ ID NO: 941964 - DNA, 15 bp, Homo sapiens
acatcaattagaaaa

SEQ ID NO: 941965 - DNA, 15 bp, Homo sapiens
catcaattagaaaac

SEQ ID NO: 941966 - DNA, 15 bp, Homo sapiens
atcaattagaaaacc

SEQ ID NO: 941967 - DNA, 15 bp, Homo sapiens
tcaattagaaaacca

SEQ ID NO: 941968 - DNA, 15 bp, Homo sapiens
caattagaaaaccac

SEQ ID NO: 941969 - DNA, 15 bp, Homo sapiens
aattagaaaaccacg

SEQ ID NO: 941970 - DNA, 15 bp, Homo sapiens
attagaaaaccacgt

SEQ ID NO: 941971 - DNA, 15 bp, Homo sapiens
ttagaaaaccacgtt

SEQ ID NO: 941972 - DNA, 15 bp, Homo sapiens
tagaaaaccacgttc

SEQ ID NO: 941973 - DNA, 15 bp, Homo sapiens
agaaaaccacgttct

SEQ ID NO: 941974 - DNA, 15 bp, Homo sapiens
gaaaaccacgttctc

SEQ ID NO: 941975 - DNA, 15 bp, Homo sapiens
aaaaccacgttctcc

SEQ ID NO: 941976 - DNA, 15 bp, Homo sapiens
aaaccacgttctcct

SEQ ID NO: 941977 - DNA, 15 bp, Homo sapiens
aaccacgttctccta

SEQ ID NO: 941978 - DNA, 15 bp, Homo sapiens
accacgttctcctaa

SEQ ID NO: 941979 - DNA, 15 bp, Homo sapiens
ccacgttctcctaag

SEQ ID NO: 941980 - DNA, 15 bp, Homo sapiens
cacgttctcctaagg

SEQ ID NO: 941981 - DNA, 15 bp, Homo sapiens
acgttctcctaaggc

SEQ ID NO: 941982 - DNA, 15 bp, Homo sapiens
cgttctcctaaggca

SEQ ID NO: 941983 - DNA, 15 bp, Homo sapiens
gttctcctaaggcag

SEQ ID NO: 941984 - DNA, 15 bp, Homo sapiens
ttctcctaaggcagt

SEQ ID NO: 941985 - DNA, 15 bp, Homo sapiens
tctcctaaggcagta

SEQ ID NO: 941986 - DNA, 15 bp, Homo sapiens
ctcctaaggcagtaa

SEQ ID NO: 941987 - DNA, 15 bp, Homo sapiens
tcctaaggcagtaat

SEQ ID NO: 941988 - DNA, 15 bp, Homo sapiens
cctaaggcagtaatt

SEQ ID NO: 941989 - DNA, 15 bp, Homo sapiens
ctaaggcagtaattc

SEQ ID NO: 941990 - DNA, 15 bp, Homo sapiens
taaggcagtaattct

SEQ ID NO: 941991 - DNA, 15 bp, Homo sapiens
aaggcagtaattctc

SEQ ID NO: 941992 - DNA, 15 bp, Homo sapiens
aggcagtaattctca

SEQ ID NO: 941993 - DNA, 15 bp, Homo sapiens
ggcagtaattctcaa

SEQ ID NO: 941994 - DNA, 15 bp, Homo sapiens
gcagtaattctcaat

SEQ ID NO: 941995 - DNA, 15 bp, Homo sapiens
cagtaattctcaatc

SEQ ID NO: 941996 - DNA, 15 bp, Homo sapiens
agtaattctcaatcc

SEQ ID NO: 941997 - DNA, 15 bp, Homo sapiens
gtaattctcaatccc

SEQ ID NO: 941998 - DNA, 15 bp, Homo sapiens
taattctcaatcccg

SEQ ID NO: 941999 - DNA, 15 bp, Homo sapiens
aattctcaatcccgg

SEQ ID NO: 942000 - DNA, 15 bp, Homo sapiens
attctcaatcccggc

SEQ ID NO: 942001 - DNA, 15 bp, Homo sapiens
ttctcaatcccggca

SEQ ID NO: 942002 - DNA, 15 bp, Homo sapiens
tctcaatcccggcag

SEQ ID NO: 942003 - DNA, 15 bp, Homo sapiens
ctcaatcccggcagt

SEQ ID NO: 942004 - DNA, 15 bp, Homo sapiens
tcaatcccggcagta

SEQ ID NO: 942005 - DNA, 15 bp, Homo sapiens
caatcccggcagtat

SEQ ID NO: 942006 - DNA, 15 bp, Homo sapiens
aatcccggcagtatg

SEQ ID NO: 942007 - DNA, 15 bp, Homo sapiens
atcccggcagtatgt

SEQ ID NO: 942008 - DNA, 15 bp, Homo sapiens
tcccggcagtatgtt

SEQ ID NO: 942009 - DNA, 15 bp, Homo sapiens
cccggcagtatgtta

SEQ ID NO: 942010 - DNA, 15 bp, Homo sapiens
ccggcagtatgttac

SEQ ID NO: 942011 - DNA, 15 bp, Homo sapiens
cggcagtatgttaca

SEQ ID NO: 942012 - DNA, 15 bp, Homo sapiens
ggcagtatgttacaa

SEQ ID NO: 942013 - DNA, 15 bp, Homo sapiens
gcagtatgttacaat

SEQ ID NO: 942014 - DNA, 15 bp, Homo sapiens
cagtatgttacaatc

SEQ ID NO: 942015 - DNA, 15 bp, Homo sapiens
agtatgttacaatca

SEQ ID NO: 942016 - DNA, 15 bp, Homo sapiens
gtatgttacaatcag

SEQ ID NO: 942017 - DNA, 15 bp, Homo sapiens
tatgttacaatcagc

SEQ ID NO: 942018 - DNA, 15 bp, Homo sapiens
atgttacaatcagct

SEQ ID NO: 942019 - DNA, 15 bp, Homo sapiens
tgttacaatcagcta

SEQ ID NO: 942020 - DNA, 15 bp, Homo sapiens
gttacaatcagctaa

SEQ ID NO: 942021 - DNA, 15 bp, Homo sapiens
ttacaatcagctaag

SEQ ID NO: 942022 - DNA, 15 bp, Homo sapiens
tacaatcagctaagg

SEQ ID NO: 942023 - DNA, 15 bp, Homo sapiens
acaatcagctaagga

SEQ ID NO: 942024 - DNA, 15 bp, Homo sapiens
caatcagctaaggaa

SEQ ID NO: 942025 - DNA, 15 bp, Homo sapiens
aatcagctaaggaag

SEQ ID NO: 942026 - DNA, 15 bp, Homo sapiens
atcagctaaggaaga

SEQ ID NO: 942027 - DNA, 15 bp, Homo sapiens
tcagctaaggaagat

SEQ ID NO: 942028 - DNA, 15 bp, Homo sapiens
cagctaaggaagatt

SEQ ID NO: 942029 - DNA, 15 bp, Homo sapiens
agctaaggaagattt

SEQ ID NO: 942030 - DNA, 15 bp, Homo sapiens
gctaaggaagattta

SEQ ID NO: 942031 - DNA, 15 bp, Homo sapiens
ctaaggaagatttaa

SEQ ID NO: 942032 - DNA, 15 bp, Homo sapiens
taaggaagatttaaa

SEQ ID NO: 942033 - DNA, 15 bp, Homo sapiens
aaggaagatttaaaa

SEQ ID NO: 942034 - DNA, 15 bp, Homo sapiens
aggaagatttaaaaa

SEQ ID NO: 942035 - DNA, 15 bp, Homo sapiens
ggaagatttaaaaag

SEQ ID NO: 942036 - DNA, 15 bp, Homo sapiens
gaagatttaaaaaga

SEQ ID NO: 942037 - DNA, 15 bp, Homo sapiens
aagatttaaaaagat

SEQ ID NO: 942038 - DNA, 15 bp, Homo sapiens
agatttaaaaagatt

SEQ ID NO: 942039 - DNA, 15 bp, Homo sapiens
gatttaaaaagattg

SEQ ID NO: 942040 - DNA, 15 bp, Homo sapiens
atttaaaaagattga

SEQ ID NO: 942041 - DNA, 15 bp, Homo sapiens
tttaaaaagattgaa

SEQ ID NO: 942042 - DNA, 15 bp, Homo sapiens
ttaaaaagattgaat

SEQ ID NO: 942043 - DNA, 15 bp, Homo sapiens
taaaaagattgaatg

SEQ ID NO: 942044 - DNA, 15 bp, Homo sapiens
aaaaagattgaatgc

SEQ ID NO: 942045 - DNA, 15 bp, Homo sapiens
aaaagattgaatgca

SEQ ID NO: 942046 - DNA, 15 bp, Homo sapiens
aaagattgaatgcaa

SEQ ID NO: 942047 - DNA, 15 bp, Homo sapiens
aagattgaatgcaaa

SEQ ID NO: 942048 - DNA, 15 bp, Homo sapiens
agattgaatgcaaat

SEQ ID NO: 942049 - DNA, 15 bp, Homo sapiens
gattgaatgcaaatt

SEQ ID NO: 942050 - DNA, 15 bp, Homo sapiens
attgaatgcaaattt

SEQ ID NO: 942051 - DNA, 15 bp, Homo sapiens
ttgaatgcaaatttc

SEQ ID NO: 942052 - DNA, 15 bp, Homo sapiens
tgaatgcaaatttct

SEQ ID NO: 942053 - DNA, 15 bp, Homo sapiens
gaatgcaaatttctg

SEQ ID NO: 942054 - DNA, 15 bp, Homo sapiens
aatgcaaatttctga

SEQ ID NO: 942055 - DNA, 15 bp, Homo sapiens
atgcaaatttctgag

SEQ ID NO: 942056 - DNA, 15 bp, Homo sapiens
tgcaaatttctgaga

SEQ ID NO: 942057 - DNA, 15 bp, Homo sapiens
gcaaatttctgagag

SEQ ID NO: 942058 - DNA, 15 bp, Homo sapiens
caaatttctgagaga

SEQ ID NO: 942059 - DNA, 15 bp, Homo sapiens
aaatttctgagagag

SEQ ID NO: 942060 - DNA, 15 bp, Homo sapiens
aatttctgagagagg

SEQ ID NO: 942061 - DNA, 15 bp, Homo sapiens
atttctgagagagga

SEQ ID NO: 942062 - DNA, 15 bp, Homo sapiens
tttctgagagaggac

SEQ ID NO: 942063 - DNA, 15 bp, Homo sapiens
ttctgagagaggacc

SEQ ID NO: 942064 - DNA, 15 bp, Homo sapiens
tctgagagaggacca

SEQ ID NO: 942065 - DNA, 15 bp, Homo sapiens
ctgagagaggaccag

SEQ ID NO: 942066 - DNA, 15 bp, Homo sapiens
tgagagaggaccagg

SEQ ID NO: 942067 - DNA, 15 bp, Homo sapiens
gagagaggaccaggc

SEQ ID NO: 942068 - DNA, 15 bp, Homo sapiens
agagaggaccaggct

SEQ ID NO: 942069 - DNA, 15 bp, Homo sapiens
gagaggaccaggctc

SEQ ID NO: 942070 - DNA, 15 bp, Homo sapiens
agaggaccaggctct

SEQ ID NO: 942071 - DNA, 15 bp, Homo sapiens
gaggaccaggctcta

SEQ ID NO: 942072 - DNA, 15 bp, Homo sapiens
aggaccaggctctag

SEQ ID NO: 942073 - DNA, 15 bp, Homo sapiens
ggaccaggctctagt

SEQ ID NO: 942074 - DNA, 15 bp, Homo sapiens
gaccaggctctagtg

SEQ ID NO: 942075 - DNA, 15 bp, Homo sapiens
accaggctctagtgt

SEQ ID NO: 942076 - DNA, 15 bp, Homo sapiens
ccaggctctagtgtt

SEQ ID NO: 942077 - DNA, 15 bp, Homo sapiens
caggctctagtgttt

SEQ ID NO: 942078 - DNA, 15 bp, Homo sapiens
aggctctagtgtttt

SEQ ID NO: 942079 - DNA, 15 bp, Homo sapiens
ggctctagtgttttc

SEQ ID NO: 942080 - DNA, 15 bp, Homo sapiens
gctctagtgttttct

SEQ ID NO: 942081 - DNA, 15 bp, Homo sapiens
ctctagtgttttctt

SEQ ID NO: 942082 - DNA, 15 bp, Homo sapiens
tctagtgttttctta

SEQ ID NO: 942083 - DNA, 15 bp, Homo sapiens
ctagtgttttcttaa

SEQ ID NO: 942084 - DNA, 15 bp, Homo sapiens
tagtgttttcttaaa

SEQ ID NO: 942085 - DNA, 15 bp, Homo sapiens
agtgttttcttaaaa

SEQ ID NO: 942086 - DNA, 15 bp, Homo sapiens
gtgttttcttaaaaa

SEQ ID NO: 942087 - DNA, 15 bp, Homo sapiens
tgttttcttaaaaat

SEQ ID NO: 942088 - DNA, 15 bp, Homo sapiens
gttttcttaaaaatt

SEQ ID NO: 942089 - DNA, 15 bp, Homo sapiens
tttcttaaaaattcc

SEQ ID NO: 942090 - DNA, 15 bp, Homo sapiens
ttcttaaaaattccc

SEQ ID NO: 942091 - DNA, 15 bp, Homo sapiens
tcttaaaaattccca

SEQ ID NO: 942092 - DNA, 15 bp, Homo sapiens
cttaaaaattcccag

SEQ ID NO: 942093 - DNA, 15 bp, Homo sapiens
ttaaaaattcccagt

SEQ ID NO: 942094 - DNA, 15 bp, Homo sapiens
taaaaattcccagtc

SEQ ID NO: 942095 - DNA, 15 bp, Homo sapiens
aaaaattcccagtca

SEQ ID NO: 942096 - DNA, 15 bp, Homo sapiens
aaaattcccagtcaa

SEQ ID NO: 942097 - DNA, 15 bp, Homo sapiens
aaattcccagtcaat

SEQ ID NO: 942098 - DNA, 15 bp, Homo sapiens
aattcccagtcaatt

SEQ ID NO: 942099 - DNA, 15 bp, Homo sapiens
attcccagtcaattt

SEQ ID NO: 942100 - DNA, 15 bp, Homo sapiens
ttcccagtcaatttt

SEQ ID NO: 942101 - DNA, 15 bp, Homo sapiens
tcccagtcaatttta

SEQ ID NO: 942102 - DNA, 15 bp, Homo sapiens
cccagtcaattttaa

SEQ ID NO: 942103 - DNA, 15 bp, Homo sapiens
ccagtcaattttaat

SEQ ID NO: 942104 - DNA, 15 bp, Homo sapiens
cagtcaattttaata

SEQ ID NO: 942105 - DNA, 15 bp, Homo sapiens
agtcaattttaatat

SEQ ID NO: 942106 - DNA, 15 bp, Homo sapiens
gtcaattttaatatg

SEQ ID NO: 942107 - DNA, 15 bp, Homo sapiens
tcaattttaatatgc

SEQ ID NO: 942108 - DNA, 15 bp, Homo sapiens
caattttaatatgca

SEQ ID NO: 942109 - DNA, 15 bp, Homo sapiens
aattttaatatgcag

SEQ ID NO: 942110 - DNA, 15 bp, Homo sapiens
attttaatatgcagc

SEQ ID NO: 942111 - DNA, 15 bp, Homo sapiens
ttttaatatgcagcc

SEQ ID NO: 942112 - DNA, 15 bp, Homo sapiens
tttaatatgcagccg

SEQ ID NO: 942113 - DNA, 15 bp, Homo sapiens
ttaatatgcagccgg

SEQ ID NO: 942114 - DNA, 15 bp, Homo sapiens
taatatgcagccggg

SEQ ID NO: 942115 - DNA, 15 bp, Homo sapiens
aatatgcagccggga

SEQ ID NO: 942116 - DNA, 15 bp, Homo sapiens
atatgcagccgggat

SEQ ID NO: 942117 - DNA, 15 bp, Homo sapiens
tatgcagccgggatt

SEQ ID NO: 942118 - DNA, 15 bp, Homo sapiens
atgcagccgggattg

SEQ ID NO: 942119 - DNA, 15 bp, Homo sapiens
tgcagccgggattga

SEQ ID NO: 942120 - DNA, 15 bp, Homo sapiens
gcagccgggattgaa

SEQ ID NO: 942121 - DNA, 15 bp, Homo sapiens
cagccgggattgaaa

SEQ ID NO: 942122 - DNA, 15 bp, Homo sapiens
agccgggattgaaaa

SEQ ID NO: 942123 - DNA, 15 bp, Homo sapiens
gccgggattgaaaac

SEQ ID NO: 942124 - DNA, 15 bp, Homo sapiens
ccgggattgaaaacc

SEQ ID NO: 942125 - DNA, 15 bp, Homo sapiens
cgggattgaaaacca

SEQ ID NO: 942126 - DNA, 15 bp, Homo sapiens
gggattgaaaaccac

SEQ ID NO: 942127 - DNA, 15 bp, Homo sapiens
ggattgaaaaccact

SEQ ID NO: 942128 - DNA, 15 bp, Homo sapiens
gattgaaaaccactg

SEQ ID NO: 942129 - DNA, 15 bp, Homo sapiens
attgaaaaccactgc

SEQ ID NO: 942130 - DNA, 15 bp, Homo sapiens
ttgaaaaccactgcc

SEQ ID NO: 942131 - DNA, 15 bp, Homo sapiens
tgaaaaccactgccc

SEQ ID NO: 942132 - DNA, 15 bp, Homo sapiens
gaaaaccactgcccc

SEQ ID NO: 942133 - DNA, 15 bp, Homo sapiens
aaaaccactgcccct

SEQ ID NO: 942134 - DNA, 15 bp, Homo sapiens
aaaccactgccccta

SEQ ID NO: 942135 - DNA, 15 bp, Homo sapiens
aaccactgcccctat

SEQ ID NO: 942136 - DNA, 15 bp, Homo sapiens
accactgcccctatg

SEQ ID NO: 942137 - DNA, 15 bp, Homo sapiens
ccactgcccctatgg

SEQ ID NO: 942138 - DNA, 15 bp, Homo sapiens
cactgcccctatgga

SEQ ID NO: 942139 - DNA, 15 bp, Homo sapiens
actgcccctatggaa

SEQ ID NO: 942140 - DNA, 15 bp, Homo sapiens
ctgcccctatggaat

SEQ ID NO: 942141 - DNA, 15 bp, Homo sapiens
tgcccctatggaatc

SEQ ID NO: 942142 - DNA, 15 bp, Homo sapiens
gcccctatggaatca

SEQ ID NO: 942143 - DNA, 15 bp, Homo sapiens
cccctatggaatcaa

SEQ ID NO: 942144 - DNA, 15 bp, Homo sapiens
ccctatggaatcaaa

SEQ ID NO: 942145 - DNA, 15 bp, Homo sapiens
cctatggaatcaaaa

SEQ ID NO: 942146 - DNA, 15 bp, Homo sapiens
ctatggaatcaaaac

SEQ ID NO: 942147 - DNA, 15 bp, Homo sapiens
tatggaatcaaaacc

SEQ ID NO: 942148 - DNA, 15 bp, Homo sapiens
atggaatcaaaaccc

SEQ ID NO: 942149 - DNA, 15 bp, Homo sapiens
tggaatcaaaaccct

SEQ ID NO: 942150 - DNA, 15 bp, Homo sapiens
ggaatcaaaaccctg

SEQ ID NO: 942151 - DNA, 15 bp, Homo sapiens
gaatcaaaaccctgt

SEQ ID NO: 942152 - DNA, 15 bp, Homo sapiens
aatcaaaaccctgtt

SEQ ID NO: 942153 - DNA, 15 bp, Homo sapiens
atcaaaaccctgttg

SEQ ID NO: 942154 - DNA, 15 bp, Homo sapiens
tcaaaaccctgttgt

SEQ ID NO: 942155 - DNA, 15 bp, Homo sapiens
caaaaccctgttgtt

SEQ ID NO: 942156 - DNA, 15 bp, Homo sapiens
aaaaccctgttgtta

SEQ ID NO: 942157 - DNA, 15 bp, Homo sapiens
aaaccctgttgttat

SEQ ID NO: 942158 - DNA, 15 bp, Homo sapiens
aaccctgttgttatg

SEQ ID NO: 942159 - DNA, 15 bp, Homo sapiens
accctgttgttatgt

SEQ ID NO: 942160 - DNA, 15 bp, Homo sapiens
ccctgttgttatgta

SEQ ID NO: 942161 - DNA, 15 bp, Homo sapiens
cctgttgttatgtaa

SEQ ID NO: 942162 - DNA, 15 bp, Homo sapiens
ctgttgttatgtaag

SEQ ID NO: 942163 - DNA, 15 bp, Homo sapiens
tgttgttatgtaaga

SEQ ID NO: 942164 - DNA, 15 bp, Homo sapiens
gttgttatgtaagag

SEQ ID NO: 942165 - DNA, 15 bp, Homo sapiens
ttgttatgtaagagt

SEQ ID NO: 942166 - DNA, 15 bp, Homo sapiens
tgttatgtaagagtc

SEQ ID NO: 942167 - DNA, 15 bp, Homo sapiens
gttatgtaagagtca

SEQ ID NO: 942168 - DNA, 15 bp, Homo sapiens
ttatgtaagagtcaa

SEQ ID NO: 942169 - DNA, 15 bp, Homo sapiens
tatgtaagagtcaat

SEQ ID NO: 942170 - DNA, 15 bp, Homo sapiens
atgtaagagtcaatc

SEQ ID NO: 942171 - DNA, 15 bp, Homo sapiens
tgtaagagtcaatcc

SEQ ID NO: 942172 - DNA, 15 bp, Homo sapiens
gtaagagtcaatcca

SEQ ID NO: 942173 - DNA, 15 bp, Homo sapiens
taagagtcaatccac

SEQ ID NO: 942174 - DNA, 15 bp, Homo sapiens
aagagtcaatccact

SEQ ID NO: 942175 - DNA, 15 bp, Homo sapiens
agagtcaatccactg

SEQ ID NO: 942176 - DNA, 15 bp, Homo sapiens
gagtcaatccactga

SEQ ID NO: 942177 - DNA, 15 bp, Homo sapiens
agtcaatccactgag

SEQ ID NO: 942178 - DNA, 15 bp, Homo sapiens
gtcaatccactgaga

SEQ ID NO: 942179 - DNA, 15 bp, Homo sapiens
tcaatccactgagag

SEQ ID NO: 942180 - DNA, 15 bp, Homo sapiens
caatccactgagagc

SEQ ID NO: 942181 - DNA, 15 bp, Homo sapiens
aatccactgagagct

SEQ ID NO: 942182 - DNA, 15 bp, Homo sapiens
atccactgagagcta

SEQ ID NO: 942183 - DNA, 15 bp, Homo sapiens
tccactgagagctat

SEQ ID NO: 942184 - DNA, 15 bp, Homo sapiens
ccactgagagctatt

SEQ ID NO: 942185 - DNA, 15 bp, Homo sapiens
cactgagagctattt

SEQ ID NO: 942186 - DNA, 15 bp, Homo sapiens
actgagagctatttg

SEQ ID NO: 942187 - DNA, 15 bp, Homo sapiens
ctgagagctatttgt

SEQ ID NO: 942188 - DNA, 15 bp, Homo sapiens
tgagagctatttgtt

SEQ ID NO: 942189 - DNA, 15 bp, Homo sapiens
gagagctatttgttg

SEQ ID NO: 942190 - DNA, 15 bp, Homo sapiens
agagctatttgttgc

SEQ ID NO: 942191 - DNA, 15 bp, Homo sapiens
gagctatttgttgct

SEQ ID NO: 942192 - DNA, 15 bp, Homo sapiens
agctatttgttgctg

SEQ ID NO: 942193 - DNA, 15 bp, Homo sapiens
gctatttgttgctgt

SEQ ID NO: 942194 - DNA, 15 bp, Homo sapiens
ctatttgttgctgtt

SEQ ID NO: 942195 - DNA, 15 bp, Homo sapiens
tatttgttgctgtta

SEQ ID NO: 942196 - DNA, 15 bp, Homo sapiens
atttgttgctgttaa

SEQ ID NO: 942197 - DNA, 15 bp, Homo sapiens
tttgttgctgttaac

SEQ ID NO: 942198 - DNA, 15 bp, Homo sapiens
ttgttgctgttaact

SEQ ID NO: 942199 - DNA, 15 bp, Homo sapiens
tgttgctgttaactt

SEQ ID NO: 942200 - DNA, 15 bp, Homo sapiens
gttgctgttaacttc

SEQ ID NO: 942201 - DNA, 15 bp, Homo sapiens
ttgctgttaacttca

SEQ ID NO: 942202 - DNA, 15 bp, Homo sapiens
tgctgttaacttcat

SEQ ID NO: 942203 - DNA, 15 bp, Homo sapiens
gctgttaacttcatt

SEQ ID NO: 942204 - DNA, 15 bp, Homo sapiens
ctgttaacttcattg

SEQ ID NO: 942205 - DNA, 15 bp, Homo sapiens
tgttaacttcattgt

SEQ ID NO: 942206 - DNA, 15 bp, Homo sapiens
gttaacttcattgtg

SEQ ID NO: 942207 - DNA, 15 bp, Homo sapiens
ttaacttcattgtgt

SEQ ID NO: 942208 - DNA, 15 bp, Homo sapiens
taacttcattgtgta

SEQ ID NO: 942209 - DNA, 15 bp, Homo sapiens
aacttcattgtgtac

SEQ ID NO: 942210 - DNA, 15 bp, Homo sapiens
acttcattgtgtacc

SEQ ID NO: 942211 - DNA, 15 bp, Homo sapiens
cttcattgtgtacct

SEQ ID NO: 942212 - DNA, 15 bp, Homo sapiens
ttcattgtgtacctc

SEQ ID NO: 942213 - DNA, 15 bp, Homo sapiens
tcattgtgtacctct

SEQ ID NO: 942214 - DNA, 15 bp, Homo sapiens
cattgtgtacctctt

SEQ ID NO: 942215 - DNA, 15 bp, Homo sapiens
attgtgtacctcttc

SEQ ID NO: 942216 - DNA, 15 bp, Homo sapiens
ttgtgtacctcttct

SEQ ID NO: 942217 - DNA, 15 bp, Homo sapiens
tgtgtacctcttcta

SEQ ID NO: 942218 - DNA, 15 bp, Homo sapiens
gtgtacctcttctag

SEQ ID NO: 942219 - DNA, 15 bp, Homo sapiens
tgtacctcttctagg

SEQ ID NO: 942220 - DNA, 15 bp, Homo sapiens
gtacctcttctaggt

SEQ ID NO: 942221 - DNA, 15 bp, Homo sapiens
tacctcttctaggtc

SEQ ID NO: 942222 - DNA, 15 bp, Homo sapiens
acctcttctaggtct

SEQ ID NO: 942223 - DNA, 15 bp, Homo sapiens
cctcttctaggtctt

SEQ ID NO: 942224 - DNA, 15 bp, Homo sapiens
ctcttctaggtcttt

SEQ ID NO: 942225 - DNA, 15 bp, Homo sapiens
tcttctaggtctttt

SEQ ID NO: 942226 - DNA, 15 bp, Homo sapiens
cttctaggtcttttt

SEQ ID NO: 942227 - DNA, 15 bp, Homo sapiens
ttctaggtctttttg

SEQ ID NO: 942228 - DNA, 15 bp, Homo sapiens
tctaggtctttttgc

SEQ ID NO: 942229 - DNA, 15 bp, Homo sapiens
ctaggtctttttgcc

SEQ ID NO: 942230 - DNA, 15 bp, Homo sapiens
taggtctttttgcca

SEQ ID NO: 942231 - DNA, 15 bp, Homo sapiens
aggtctttttgccat

SEQ ID NO: 942232 - DNA, 15 bp, Homo sapiens
ggtctttttgccatt

SEQ ID NO: 942233 - DNA, 15 bp, Homo sapiens
gtctttttgccattc

SEQ ID NO: 942234 - DNA, 15 bp, Homo sapiens
tctttttgccattcc

SEQ ID NO: 942235 - DNA, 15 bp, Homo sapiens
ctttttgccattcct

SEQ ID NO: 942236 - DNA, 15 bp, Homo sapiens
tttttgccattcctc

SEQ ID NO: 942237 - DNA, 15 bp, Homo sapiens
ttttgccattcctcc

SEQ ID NO: 942238 - DNA, 15 bp, Homo sapiens
tttgccattcctcca

SEQ ID NO: 942239 - DNA, 15 bp, Homo sapiens
ttgccattcctccag

SEQ ID NO: 942240 - DNA, 15 bp, Homo sapiens
tgccattcctccagg

SEQ ID NO: 942241 - DNA, 15 bp, Homo sapiens
gccattcctccagga

SEQ ID NO: 942242 - DNA, 15 bp, Homo sapiens
ccattcctccaggac

SEQ ID NO: 942243 - DNA, 15 bp, Homo sapiens
cattcctccaggaca

SEQ ID NO: 942244 - DNA, 15 bp, Homo sapiens
attcctccaggacat

SEQ ID NO: 942245 - DNA, 15 bp, Homo sapiens
ttcctccaggacatc

SEQ ID NO: 942246 - DNA, 15 bp, Homo sapiens
tcctccaggacatcc

SEQ ID NO: 942247 - DNA, 15 bp, Homo sapiens
cctccaggacatcca

SEQ ID NO: 942248 - DNA, 15 bp, Homo sapiens
ctccaggacatccac

SEQ ID NO: 942249 - DNA, 15 bp, Homo sapiens
tccaggacatccacc

SEQ ID NO: 942250 - DNA, 15 bp, Homo sapiens
ccaggacatccacca

SEQ ID NO: 942251 - DNA, 15 bp, Homo sapiens
caggacatccaccat

SEQ ID NO: 942252 - DNA, 15 bp, Homo sapiens
aggacatccaccata

SEQ ID NO: 942253 - DNA, 15 bp, Homo sapiens
ggacatccaccataa

SEQ ID NO: 942254 - DNA, 15 bp, Homo sapiens
gacatccaccataag

SEQ ID NO: 942255 - DNA, 15 bp, Homo sapiens
acatccaccataagg

SEQ ID NO: 942256 - DNA, 15 bp, Homo sapiens
catccaccataagga

SEQ ID NO: 942257 - DNA, 15 bp, Homo sapiens
atccaccataaggaa

SEQ ID NO: 942258 - DNA, 15 bp, Homo sapiens
tccaccataaggaaa

SEQ ID NO: 942259 - DNA, 15 bp, Homo sapiens
ccaccataaggaaag

SEQ ID NO: 942260 - DNA, 15 bp, Homo sapiens
caccataaggaaagg

SEQ ID NO: 942261 - DNA, 15 bp, Homo sapiens
accataaggaaagga

SEQ ID NO: 942262 - DNA, 15 bp, Homo sapiens
ccataaggaaaggag

SEQ ID NO: 942263 - DNA, 15 bp, Homo sapiens
cataaggaaaggaga

SEQ ID NO: 942264 - DNA, 15 bp, Homo sapiens
ataaggaaaggagac

SEQ ID NO: 942265 - DNA, 15 bp, Homo sapiens
taaggaaaggagacc

SEQ ID NO: 942266 - DNA, 15 bp, Homo sapiens
aaggaaaggagaccc

SEQ ID NO: 942267 - DNA, 15 bp, Homo sapiens
aggaaaggagaccct

SEQ ID NO: 942268 - DNA, 15 bp, Homo sapiens
ggaaaggagaccctg

SEQ ID NO: 942269 - DNA, 15 bp, Homo sapiens
gaaaggagaccctgg

SEQ ID NO: 942270 - DNA, 15 bp, Homo sapiens
aaaggagaccctgga

SEQ ID NO: 942271 - DNA, 15 bp, Homo sapiens
aaggagaccctggac

SEQ ID NO: 942272 - DNA, 15 bp, Homo sapiens
aggagaccctggacc

SEQ ID NO: 942273 - DNA, 15 bp, Homo sapiens
ggagaccctggacca

SEQ ID NO: 942274 - DNA, 15 bp, Homo sapiens
gagaccctggaccaa

SEQ ID NO: 942275 - DNA, 15 bp, Homo sapiens
agaccctggaccaac

SEQ ID NO: 942276 - DNA, 15 bp, Homo sapiens
gaccctggaccaaca

SEQ ID NO: 942277 - DNA, 15 bp, Homo sapiens
accctggaccaacat

SEQ ID NO: 942278 - DNA, 15 bp, Homo sapiens
ccctggaccaacatt

SEQ ID NO: 942279 - DNA, 15 bp, Homo sapiens
cctggaccaacattc

SEQ ID NO: 942280 - DNA, 15 bp, Homo sapiens
ctggaccaacattct

SEQ ID NO: 942281 - DNA, 15 bp, Homo sapiens
tggaccaacattctc

SEQ ID NO: 942282 - DNA, 15 bp, Homo sapiens
ggaccaacattctct

SEQ ID NO: 942283 - DNA, 15 bp, Homo sapiens
gaccaacattctcta

SEQ ID NO: 942284 - DNA, 15 bp, Homo sapiens
accaacattctctaa

SEQ ID NO: 942285 - DNA, 15 bp, Homo sapiens
ccaacattctctaag

SEQ ID NO: 942286 - DNA, 15 bp, Homo sapiens
caacattctctaaga

SEQ ID NO: 942287 - DNA, 15 bp, Homo sapiens
aacattctctaagat

SEQ ID NO: 942288 - DNA, 15 bp, Homo sapiens
acattctctaagatg

SEQ ID NO: 942289 - DNA, 15 bp, Homo sapiens
cattctctaagatgt

SEQ ID NO: 942290 - DNA, 15 bp, Homo sapiens
attctctaagatgtt

SEQ ID NO: 942291 - DNA, 15 bp, Homo sapiens
ttctctaagatgttt

SEQ ID NO: 942292 - DNA, 15 bp, Homo sapiens
tctctaagatgttta

SEQ ID NO: 942293 - DNA, 15 bp, Homo sapiens
ctctaagatgtttat

SEQ ID NO: 942294 - DNA, 15 bp, Homo sapiens
tctaagatgtttata

SEQ ID NO: 942295 - DNA, 15 bp, Homo sapiens
ctaagatgtttatat

SEQ ID NO: 942296 - DNA, 15 bp, Homo sapiens
taagatgtttatatg

SEQ ID NO: 942297 - DNA, 15 bp, Homo sapiens
aagatgtttatatgg

SEQ ID NO: 942298 - DNA, 15 bp, Homo sapiens
agatgtttatatgga

SEQ ID NO: 942299 - DNA, 15 bp, Homo sapiens
gatgtttatatggac

SEQ ID NO: 942300 - DNA, 15 bp, Homo sapiens
atgtttatatggacc

SEQ ID NO: 942301 - DNA, 15 bp, Homo sapiens
tgtttatatggacca

SEQ ID NO: 942302 - DNA, 15 bp, Homo sapiens
gtttatatggaccag

SEQ ID NO: 942303 - DNA, 15 bp, Homo sapiens
tttatatggaccagt

SEQ ID NO: 942304 - DNA, 15 bp, Homo sapiens
ttatatggaccagtg

SEQ ID NO: 942305 - DNA, 15 bp, Homo sapiens
tatatggaccagtgg

SEQ ID NO: 942306 - DNA, 15 bp, Homo sapiens
atatggaccagtggc

SEQ ID NO: 942307 - DNA, 15 bp, Homo sapiens
tatggaccagtggcc

SEQ ID NO: 942308 - DNA, 15 bp, Homo sapiens
atggaccagtggccg

SEQ ID NO: 942309 - DNA, 15 bp, Homo sapiens
tggaccagtggccgg

SEQ ID NO: 942310 - DNA, 15 bp, Homo sapiens
ggaccagtggccgga

SEQ ID NO: 942311 - DNA, 15 bp, Homo sapiens
gaccagtggccggac

SEQ ID NO: 942312 - DNA, 15 bp, Homo sapiens
accagtggccggacc

SEQ ID NO: 942313 - DNA, 15 bp, Homo sapiens
ccagtggccggacct

SEQ ID NO: 942314 - DNA, 15 bp, Homo sapiens
cagtggccggacctc

SEQ ID NO: 942315 - DNA, 15 bp, Homo sapiens
agtggccggacctct

SEQ ID NO: 942316 - DNA, 15 bp, Homo sapiens
gtggccggacctctt

SEQ ID NO: 942317 - DNA, 15 bp, Homo sapiens
tggccggacctcttc

SEQ ID NO: 942318 - DNA, 15 bp, Homo sapiens
ggccggacctcttca

SEQ ID NO: 942319 - DNA, 15 bp, Homo sapiens
gccggacctcttcat

SEQ ID NO: 942320 - DNA, 15 bp, Homo sapiens
ccggacctcttcatc

SEQ ID NO: 942321 - DNA, 15 bp, Homo sapiens
cggacctcttcatct

SEQ ID NO: 942322 - DNA, 15 bp, Homo sapiens
ggacctcttcatctt

SEQ ID NO: 942323 - DNA, 15 bp, Homo sapiens
gacctcttcatctta

SEQ ID NO: 942324 - DNA, 15 bp, Homo sapiens
acctcttcatcttat

SEQ ID NO: 942325 - DNA, 15 bp, Homo sapiens
cctcttcatcttata

SEQ ID NO: 942326 - DNA, 15 bp, Homo sapiens
ctcttcatcttatag

SEQ ID NO: 942327 - DNA, 15 bp, Homo sapiens
tcttcatcttataga

SEQ ID NO: 942328 - DNA, 15 bp, Homo sapiens
cttcatcttatagac

SEQ ID NO: 942329 - DNA, 15 bp, Homo sapiens
ttcatcttatagaca

SEQ ID NO: 942330 - DNA, 15 bp, Homo sapiens
tcatcttatagacat

SEQ ID NO: 942331 - DNA, 15 bp, Homo sapiens
catcttatagacatg

SEQ ID NO: 942332 - DNA, 15 bp, Homo sapiens
atcttatagacatga

SEQ ID NO: 942333 - DNA, 15 bp, Homo sapiens
tcttatagacatgat

SEQ ID NO: 942334 - DNA, 15 bp, Homo sapiens
cttatagacatgatg

SEQ ID NO: 942335 - DNA, 15 bp, Homo sapiens
ttatagacatgatga

SEQ ID NO: 942336 - DNA, 15 bp, Homo sapiens
tatagacatgatgaa

SEQ ID NO: 942337 - DNA, 15 bp, Homo sapiens
atagacatgatgaaa

SEQ ID NO: 942338 - DNA, 15 bp, Homo sapiens
tagacatgatgaaaa

SEQ ID NO: 942339 - DNA, 15 bp, Homo sapiens
agacatgatgaaaaa

SEQ ID NO: 942340 - DNA, 15 bp, Homo sapiens
gacatgatgaaaaaa

SEQ ID NO: 942341 - DNA, 15 bp, Homo sapiens
acatgatgaaaaaag

SEQ ID NO: 942342 - DNA, 15 bp, Homo sapiens
catgatgaaaaaagg

SEQ ID NO: 942343 - DNA, 15 bp, Homo sapiens
atgatgaaaaaaggt

SEQ ID NO: 942344 - DNA, 15 bp, Homo sapiens
tgatgaaaaaaggta

SEQ ID NO: 942345 - DNA, 15 bp, Homo sapiens
gatgaaaaaaggtaa

SEQ ID NO: 942346 - DNA, 15 bp, Homo sapiens
atgaaaaaaggtaaa

SEQ ID NO: 942347 - DNA, 15 bp, Homo sapiens
tgaaaaaaggtaaat

SEQ ID NO: 942348 - DNA, 15 bp, Homo sapiens
gaaaaaaggtaaatg

SEQ ID NO: 942349 - DNA, 15 bp, Homo sapiens
aaaaaaggtaaatgc

SEQ ID NO: 942350 - DNA, 15 bp, Homo sapiens
aaaaaggtaaatgca

SEQ ID NO: 942351 - DNA, 15 bp, Homo sapiens
aaaaggtaaatgcac

SEQ ID NO: 942352 - DNA, 15 bp, Homo sapiens
aaaggtaaatgcact

SEQ ID NO: 942353 - DNA, 15 bp, Homo sapiens
aaggtaaatgcactg

SEQ ID NO: 942354 - DNA, 15 bp, Homo sapiens
aggtaaatgcactgg

SEQ ID NO: 942355 - DNA, 15 bp, Homo sapiens
ggtaaatgcactggg

SEQ ID NO: 942356 - DNA, 15 bp, Homo sapiens
gtaaatgcactggga

SEQ ID NO: 942357 - DNA, 15 bp, Homo sapiens
taaatgcactgggat

SEQ ID NO: 942358 - DNA, 15 bp, Homo sapiens
aaatgcactgggatt

SEQ ID NO: 942359 - DNA, 15 bp, Homo sapiens
aatgcactgggattc

SEQ ID NO: 942360 - DNA, 15 bp, Homo sapiens
atgcactgggattct

SEQ ID NO: 942361 - DNA, 15 bp, Homo sapiens
tgcactgggattctg

SEQ ID NO: 942362 - DNA, 15 bp, Homo sapiens
gcactgggattctgg

SEQ ID NO: 942363 - DNA, 15 bp, Homo sapiens
cactgggattctggg

SEQ ID NO: 942364 - DNA, 15 bp, Homo sapiens
actgggattctgggc

SEQ ID NO: 942365 - DNA, 15 bp, Homo sapiens
ctgggattctgggca

SEQ ID NO: 942366 - DNA, 15 bp, Homo sapiens
tgggattctgggcac

SEQ ID NO: 942367 - DNA, 15 bp, Homo sapiens
gggattctgggcact

SEQ ID NO: 942368 - DNA, 15 bp, Homo sapiens
ggattctgggcactt

SEQ ID NO: 942369 - DNA, 15 bp, Homo sapiens
gattctgggcacttt

SEQ ID NO: 942370 - DNA, 15 bp, Homo sapiens
attctgggcactttt

SEQ ID NO: 942371 - DNA, 15 bp, Homo sapiens
ttctgggcacttttc

SEQ ID NO: 942372 - DNA, 15 bp, Homo sapiens
tctgggcacttttca

SEQ ID NO: 942373 - DNA, 15 bp, Homo sapiens
ctgggcacttttcag

SEQ ID NO: 942374 - DNA, 15 bp, Homo sapiens
tgggcacttttcaga

SEQ ID NO: 942375 - DNA, 15 bp, Homo sapiens
gggcacttttcagaa

SEQ ID NO: 942376 - DNA, 15 bp, Homo sapiens
ggcacttttcagaag

SEQ ID NO: 942377 - DNA, 15 bp, Homo sapiens
gcacttttcagaagc

SEQ ID NO: 942378 - DNA, 15 bp, Homo sapiens
cacttttcagaagca

SEQ ID NO: 942379 - DNA, 15 bp, Homo sapiens
acttttcagaagcat

SEQ ID NO: 942380 - DNA, 15 bp, Homo sapiens
cttttcagaagcatt

SEQ ID NO: 942381 - DNA, 15 bp, Homo sapiens
ttttcagaagcattt

SEQ ID NO: 942382 - DNA, 15 bp, Homo sapiens
tttcagaagcattta

SEQ ID NO: 942383 - DNA, 15 bp, Homo sapiens
ttcagaagcatttaa

SEQ ID NO: 942384 - DNA, 15 bp, Homo sapiens
tcagaagcatttaac

SEQ ID NO: 942385 - DNA, 15 bp, Homo sapiens
cagaagcatttaacc

SEQ ID NO: 942386 - DNA, 15 bp, Homo sapiens
agaagcatttaacct

SEQ ID NO: 942387 - DNA, 15 bp, Homo sapiens
gaagcatttaacctg

SEQ ID NO: 942388 - DNA, 15 bp, Homo sapiens
aagcatttaacctga

SEQ ID NO: 942389 - DNA, 15 bp, Homo sapiens
agcatttaacctgac

SEQ ID NO: 942390 - DNA, 15 bp, Homo sapiens
gcatttaacctgact

SEQ ID NO: 942391 - DNA, 15 bp, Homo sapiens
catttaacctgactc

SEQ ID NO: 942392 - DNA, 15 bp, Homo sapiens
atttaacctgactct

SEQ ID NO: 942393 - DNA, 15 bp, Homo sapiens
tttaacctgactctc

SEQ ID NO: 942394 - DNA, 15 bp, Homo sapiens
ttaacctgactctcc

SEQ ID NO: 942395 - DNA, 15 bp, Homo sapiens
taacctgactctcca

SEQ ID NO: 942396 - DNA, 15 bp, Homo sapiens
aacctgactctccaa

SEQ ID NO: 942397 - DNA, 15 bp, Homo sapiens
acctgactctccaaa

SEQ ID NO: 942398 - DNA, 15 bp, Homo sapiens
cctgactctccaaag

SEQ ID NO: 942399 - DNA, 15 bp, Homo sapiens
ctgactctccaaaga

SEQ ID NO: 942400 - DNA, 15 bp, Homo sapiens
tgactctccaaagag

SEQ ID NO: 942401 - DNA, 15 bp, Homo sapiens
gactctccaaagagg

SEQ ID NO: 942402 - DNA, 15 bp, Homo sapiens
actctccaaagagga

SEQ ID NO: 942403 - DNA, 15 bp, Homo sapiens
ctctccaaagaggat

SEQ ID NO: 942404 - DNA, 15 bp, Homo sapiens
tctccaaagaggata

SEQ ID NO: 942405 - DNA, 15 bp, Homo sapiens
ctccaaagaggatac

SEQ ID NO: 942406 - DNA, 15 bp, Homo sapiens
tccaaagaggatact

SEQ ID NO: 942407 - DNA, 15 bp, Homo sapiens
ccaaagaggatactg

SEQ ID NO: 942408 - DNA, 15 bp, Homo sapiens
caaagaggatactga

SEQ ID NO: 942409 - DNA, 15 bp, Homo sapiens
aaagaggatactgac

SEQ ID NO: 942410 - DNA, 15 bp, Homo sapiens
aagaggatactgaca

SEQ ID NO: 942411 - DNA, 15 bp, Homo sapiens
agaggatactgacag

SEQ ID NO: 942412 - DNA, 15 bp, Homo sapiens
gaggatactgacagg

SEQ ID NO: 942413 - DNA, 15 bp, Homo sapiens
aggatactgacagga

SEQ ID NO: 942414 - DNA, 15 bp, Homo sapiens
ggatactgacaggaa

SEQ ID NO: 942415 - DNA, 15 bp, Homo sapiens
gatactgacaggaaa

SEQ ID NO: 942416 - DNA, 15 bp, Homo sapiens
atactgacaggaaag

SEQ ID NO: 942417 - DNA, 15 bp, Homo sapiens
tactgacaggaaagt

SEQ ID NO: 942418 - DNA, 15 bp, Homo sapiens
actgacaggaaagta

SEQ ID NO: 942419 - DNA, 15 bp, Homo sapiens
ctgacaggaaagtag

SEQ ID NO: 942420 - DNA, 15 bp, Homo sapiens
tgacaggaaagtagt

SEQ ID NO: 942421 - DNA, 15 bp, Homo sapiens
gacaggaaagtagta

SEQ ID NO: 942422 - DNA, 15 bp, Homo sapiens
acaggaaagtagtag

SEQ ID NO: 942423 - DNA, 15 bp, Homo sapiens
caggaaagtagtagg

SEQ ID NO: 942424 - DNA, 15 bp, Homo sapiens
aggaaagtagtaggc

SEQ ID NO: 942425 - DNA, 15 bp, Homo sapiens
ggaaagtagtaggca

SEQ ID NO: 942426 - DNA, 15 bp, Homo sapiens
gaaagtagtaggcaa

SEQ ID NO: 942427 - DNA, 15 bp, Homo sapiens
aaagtagtaggcaac

SEQ ID NO: 942428 - DNA, 15 bp, Homo sapiens
aagtagtaggcaact

SEQ ID NO: 942429 - DNA, 15 bp, Homo sapiens
agtagtaggcaactg

SEQ ID NO: 942430 - DNA, 15 bp, Homo sapiens
gtagtaggcaactga

SEQ ID NO: 942431 - DNA, 15 bp, Homo sapiens
tagtaggcaactgag

SEQ ID NO: 942432 - DNA, 15 bp, Homo sapiens
agtaggcaactgagc

SEQ ID NO: 942433 - DNA, 15 bp, Homo sapiens
gtaggcaactgagcc

SEQ ID NO: 942434 - DNA, 15 bp, Homo sapiens
taggcaactgagcct

SEQ ID NO: 942435 - DNA, 15 bp, Homo sapiens
aggcaactgagcctt

SEQ ID NO: 942436 - DNA, 15 bp, Homo sapiens
ggcaactgagcctta

SEQ ID NO: 942437 - DNA, 15 bp, Homo sapiens
gcaactgagccttat

SEQ ID NO: 942438 - DNA, 15 bp, Homo sapiens
caactgagccttatg

SEQ ID NO: 942439 - DNA, 15 bp, Homo sapiens
aactgagccttatgc

SEQ ID NO: 942440 - DNA, 15 bp, Homo sapiens
actgagccttatgct

SEQ ID NO: 942441 - DNA, 15 bp, Homo sapiens
ctgagccttatgctt

SEQ ID NO: 942442 - DNA, 15 bp, Homo sapiens
tgagccttatgcttt

SEQ ID NO: 942443 - DNA, 15 bp, Homo sapiens
gagccttatgctttg

SEQ ID NO: 942444 - DNA, 15 bp, Homo sapiens
agccttatgctttgc

SEQ ID NO: 942445 - DNA, 15 bp, Homo sapiens
gccttatgctttgca

SEQ ID NO: 942446 - DNA, 15 bp, Homo sapiens
ccttatgctttgcaa

SEQ ID NO: 942447 - DNA, 15 bp, Homo sapiens
cttatgctttgcaat

SEQ ID NO: 942448 - DNA, 15 bp, Homo sapiens
ttatgctttgcaatg

SEQ ID NO: 942449 - DNA, 15 bp, Homo sapiens
tatgctttgcaatgt

SEQ ID NO: 942450 - DNA, 15 bp, Homo sapiens
atgctttgcaatgtg

SEQ ID NO: 942451 - DNA, 15 bp, Homo sapiens
tgctttgcaatgtgg

SEQ ID NO: 942452 - DNA, 15 bp, Homo sapiens
gctttgcaatgtggg

SEQ ID NO: 942453 - DNA, 15 bp, Homo sapiens
ctttgcaatgtgggg

SEQ ID NO: 942454 - DNA, 15 bp, Homo sapiens
tttgcaatgtgggga

SEQ ID NO: 942455 - DNA, 15 bp, Homo sapiens
ttgcaatgtggggac

SEQ ID NO: 942456 - DNA, 15 bp, Homo sapiens
tgcaatgtggggaca

SEQ ID NO: 942457 - DNA, 15 bp, Homo sapiens
gcaatgtggggacag

SEQ ID NO: 942458 - DNA, 15 bp, Homo sapiens
caatgtggggacaga

SEQ ID NO: 942459 - DNA, 15 bp, Homo sapiens
aatgtggggacagac

SEQ ID NO: 942460 - DNA, 15 bp, Homo sapiens
atgtggggacagact

SEQ ID NO: 942461 - DNA, 15 bp, Homo sapiens
tgtggggacagactc

SEQ ID NO: 942462 - DNA, 15 bp, Homo sapiens
gtggggacagactct

SEQ ID NO: 942463 - DNA, 15 bp, Homo sapiens
tggggacagactcta

SEQ ID NO: 942464 - DNA, 15 bp, Homo sapiens
ggggacagactctac

SEQ ID NO: 942465 - DNA, 15 bp, Homo sapiens
gggacagactctaca

SEQ ID NO: 942466 - DNA, 15 bp, Homo sapiens
ggacagactctacag

SEQ ID NO: 942467 - DNA, 15 bp, Homo sapiens
gacagactctacagt

SEQ ID NO: 942468 - DNA, 15 bp, Homo sapiens
acagactctacagta

SEQ ID NO: 942469 - DNA, 15 bp, Homo sapiens
cagactctacagtac

SEQ ID NO: 942470 - DNA, 15 bp, Homo sapiens
agactctacagtaca

SEQ ID NO: 942471 - DNA, 15 bp, Homo sapiens
gactctacagtacag

SEQ ID NO: 942472 - DNA, 15 bp, Homo sapiens
actctacagtacagg

SEQ ID NO: 942473 - DNA, 15 bp, Homo sapiens
ctctacagtacagga

SEQ ID NO: 942474 - DNA, 15 bp, Homo sapiens
tctacagtacaggag

SEQ ID NO: 942475 - DNA, 15 bp, Homo sapiens
ctacagtacaggagt

SEQ ID NO: 942476 - DNA, 15 bp, Homo sapiens
tacagtacaggagta

SEQ ID NO: 942477 - DNA, 15 bp, Homo sapiens
acagtacaggagtag

SEQ ID NO: 942478 - DNA, 15 bp, Homo sapiens
cagtacaggagtagg

SEQ ID NO: 942479 - DNA, 15 bp, Homo sapiens
agtacaggagtaggg

SEQ ID NO: 942480 - DNA, 15 bp, Homo sapiens
gtacaggagtagggt

SEQ ID NO: 942481 - DNA, 15 bp, Homo sapiens
tacaggagtagggtt

SEQ ID NO: 942482 - DNA, 15 bp, Homo sapiens
acaggagtagggttt

SEQ ID NO: 942483 - DNA, 15 bp, Homo sapiens
caggagtagggtttc

SEQ ID NO: 942484 - DNA, 15 bp, Homo sapiens
aggagtagggtttca

SEQ ID NO: 942485 - DNA, 15 bp, Homo sapiens
ggagtagggtttcag

SEQ ID NO: 942486 - DNA, 15 bp, Homo sapiens
gagtagggtttcaga

SEQ ID NO: 942487 - DNA, 15 bp, Homo sapiens
agtagggtttcagac

SEQ ID NO: 942488 - DNA, 15 bp, Homo sapiens
gtagggtttcagaca

SEQ ID NO: 942489 - DNA, 15 bp, Homo sapiens
tagggtttcagacac

SEQ ID NO: 942490 - DNA, 15 bp, Homo sapiens
agggtttcagacact

SEQ ID NO: 942491 - DNA, 15 bp, Homo sapiens
gggtttcagacactt

SEQ ID NO: 942492 - DNA, 15 bp, Homo sapiens
ggtttcagacacttt

SEQ ID NO: 942493 - DNA, 15 bp, Homo sapiens
gtttcagacactttg

SEQ ID NO: 942494 - DNA, 15 bp, Homo sapiens
tttcagacactttgg

SEQ ID NO: 942495 - DNA, 15 bp, Homo sapiens
ttcagacactttggc

SEQ ID NO: 942496 - DNA, 15 bp, Homo sapiens
tcagacactttggcc

SEQ ID NO: 942497 - DNA, 15 bp, Homo sapiens
cagacactttggcct

SEQ ID NO: 942498 - DNA, 15 bp, Homo sapiens
agacactttggcctt

SEQ ID NO: 942499 - DNA, 15 bp, Homo sapiens
gacactttggccttc

SEQ ID NO: 942500 - DNA, 15 bp, Homo sapiens
acactttggccttcc

SEQ ID NO: 942501 - DNA, 15 bp, Homo sapiens
cactttggccttcct

SEQ ID NO: 942502 - DNA, 15 bp, Homo sapiens
actttggccttcctt

SEQ ID NO: 942503 - DNA, 15 bp, Homo sapiens
ctttggccttccttc

SEQ ID NO: 942504 - DNA, 15 bp, Homo sapiens
tttggccttccttct

SEQ ID NO: 942505 - DNA, 15 bp, Homo sapiens
ttggccttccttctc

SEQ ID NO: 942506 - DNA, 15 bp, Homo sapiens
tggccttccttctcc

SEQ ID NO: 942507 - DNA, 15 bp, Homo sapiens
ggccttccttctcct

SEQ ID NO: 942508 - DNA, 15 bp, Homo sapiens
gccttccttctcctt

SEQ ID NO: 942509 - DNA, 15 bp, Homo sapiens
ccttccttctccttg

SEQ ID NO: 942510 - DNA, 15 bp, Homo sapiens
cttccttctccttgc

SEQ ID NO: 942511 - DNA, 15 bp, Homo sapiens
ttccttctccttgca

SEQ ID NO: 942512 - DNA, 15 bp, Homo sapiens
tccttctccttgcac

SEQ ID NO: 942513 - DNA, 15 bp, Homo sapiens
ccttctccttgcact

SEQ ID NO: 942514 - DNA, 15 bp, Homo sapiens
cttctccttgcactt

SEQ ID NO: 942515 - DNA, 15 bp, Homo sapiens
ttctccttgcacttt

SEQ ID NO: 942516 - DNA, 15 bp, Homo sapiens
tctccttgcacttta

SEQ ID NO: 942517 - DNA, 15 bp, Homo sapiens
ctccttgcactttac

SEQ ID NO: 942518 - DNA, 15 bp, Homo sapiens
tccttgcactttaca

SEQ ID NO: 942519 - DNA, 15 bp, Homo sapiens
ccttgcactttacat

SEQ ID NO: 942520 - DNA, 15 bp, Homo sapiens
cttgcactttacatg

SEQ ID NO: 942521 - DNA, 15 bp, Homo sapiens
ttgcactttacatgt

SEQ ID NO: 942522 - DNA, 15 bp, Homo sapiens
tgcactttacatgtt

SEQ ID NO: 942523 - DNA, 15 bp, Homo sapiens
gcactttacatgttc

SEQ ID NO: 942524 - DNA, 15 bp, Homo sapiens
cactttacatgttcg

SEQ ID NO: 942525 - DNA, 15 bp, Homo sapiens
actttacatgttcgc

SEQ ID NO: 942526 - DNA, 15 bp, Homo sapiens
ctttacatgttcgct

SEQ ID NO: 942527 - DNA, 15 bp, Homo sapiens
tttacatgttcgctt

SEQ ID NO: 942528 - DNA, 15 bp, Homo sapiens
ttacatgttcgcttt

SEQ ID NO: 942529 - DNA, 15 bp, Homo sapiens
tacatgttcgctttc

SEQ ID NO: 942530 - DNA, 15 bp, Homo sapiens
acatgttcgctttca

SEQ ID NO: 942531 - DNA, 15 bp, Homo sapiens
catgttcgctttcag

SEQ ID NO: 942532 - DNA, 15 bp, Homo sapiens
atgttcgctttcagc

SEQ ID NO: 942533 - DNA, 15 bp, Homo sapiens
tgttcgctttcagca

SEQ ID NO: 942534 - DNA, 15 bp, Homo sapiens
gttcgctttcagcac

SEQ ID NO: 942535 - DNA, 15 bp, Homo sapiens
ttcgctttcagcaca

SEQ ID NO: 942536 - DNA, 15 bp, Homo sapiens
tcgctttcagcacat

SEQ ID NO: 942537 - DNA, 15 bp, Homo sapiens
cgctttcagcacata

SEQ ID NO: 942538 - DNA, 15 bp, Homo sapiens
gctttcagcacatag

SEQ ID NO: 942539 - DNA, 15 bp, Homo sapiens
ctttcagcacatagc

SEQ ID NO: 942540 - DNA, 15 bp, Homo sapiens
tttcagcacatagct

SEQ ID NO: 942541 - DNA, 15 bp, Homo sapiens
ttcagcacatagctt

SEQ ID NO: 942542 - DNA, 15 bp, Homo sapiens
tcagcacatagcttt

SEQ ID NO: 942543 - DNA, 15 bp, Homo sapiens
cagcacatagctttg

SEQ ID NO: 942544 - DNA, 15 bp, Homo sapiens
agcacatagctttgc

SEQ ID NO: 942545 - DNA, 15 bp, Homo sapiens
gcacatagctttgca

SEQ ID NO: 942546 - DNA, 15 bp, Homo sapiens
cacatagctttgcaa

SEQ ID NO: 942547 - DNA, 15 bp, Homo sapiens
acatagctttgcaaa

SEQ ID NO: 942548 - DNA, 15 bp, Homo sapiens
catagctttgcaaaa

SEQ ID NO: 942549 - DNA, 15 bp, Homo sapiens
atagctttgcaaaag

SEQ ID NO: 942550 - DNA, 15 bp, Homo sapiens
tagctttgcaaaagt

SEQ ID NO: 942551 - DNA, 15 bp, Homo sapiens
agctttgcaaaagtt

SEQ ID NO: 942552 - DNA, 15 bp, Homo sapiens
gctttgcaaaagttg

SEQ ID NO: 942553 - DNA, 15 bp, Homo sapiens
ctttgcaaaagttgt

SEQ ID NO: 942554 - DNA, 15 bp, Homo sapiens
tttgcaaaagttgtt

SEQ ID NO: 942555 - DNA, 15 bp, Homo sapiens
ttgcaaaagttgttc

SEQ ID NO: 942556 - DNA, 15 bp, Homo sapiens
tgcaaaagttgttcc

SEQ ID NO: 942557 - DNA, 15 bp, Homo sapiens
gcaaaagttgttccc

SEQ ID NO: 942558 - DNA, 15 bp, Homo sapiens
caaaagttgttccct

SEQ ID NO: 942559 - DNA, 15 bp, Homo sapiens
aaaagttgttccctg

SEQ ID NO: 942560 - DNA, 15 bp, Homo sapiens
aaagttgttccctgt

SEQ ID NO: 942561 - DNA, 15 bp, Homo sapiens
aagttgttccctgtc

SEQ ID NO: 942562 - DNA, 15 bp, Homo sapiens
agttgttccctgtca

SEQ ID NO: 942563 - DNA, 15 bp, Homo sapiens
gttgttccctgtcag

SEQ ID NO: 942564 - DNA, 15 bp, Homo sapiens
ttgttccctgtcaga

SEQ ID NO: 942565 - DNA, 15 bp, Homo sapiens
tgttccctgtcagaa

SEQ ID NO: 942566 - DNA, 15 bp, Homo sapiens
gttccctgtcagaaa

SEQ ID NO: 942567 - DNA, 15 bp, Homo sapiens
ttccctgtcagaaat

SEQ ID NO: 942568 - DNA, 15 bp, Homo sapiens
tccctgtcagaaatt

SEQ ID NO: 942569 - DNA, 15 bp, Homo sapiens
ccctgtcagaaattc

SEQ ID NO: 942570 - DNA, 15 bp, Homo sapiens
cctgtcagaaattcc

SEQ ID NO: 942571 - DNA, 15 bp, Homo sapiens
ctgtcagaaattccc

SEQ ID NO: 942572 - DNA, 15 bp, Homo sapiens
tgtcagaaattccca

SEQ ID NO: 942573 - DNA, 15 bp, Homo sapiens
gtcagaaattcccat

SEQ ID NO: 942574 - DNA, 15 bp, Homo sapiens
tcagaaattcccatg

SEQ ID NO: 942575 - DNA, 15 bp, Homo sapiens
cagaaattcccatgt

SEQ ID NO: 942576 - DNA, 15 bp, Homo sapiens
agaaattcccatgtc

SEQ ID NO: 942577 - DNA, 15 bp, Homo sapiens
gaaattcccatgtca

SEQ ID NO: 942578 - DNA, 15 bp, Homo sapiens
aaattcccatgtcac

SEQ ID NO: 942579 - DNA, 15 bp, Homo sapiens
aattcccatgtcaca

SEQ ID NO: 942580 - DNA, 15 bp, Homo sapiens
attcccatgtcacaa

SEQ ID NO: 942581 - DNA, 15 bp, Homo sapiens
ttcccatgtcacaag

SEQ ID NO: 942582 - DNA, 15 bp, Homo sapiens
tcccatgtcacaagc

SEQ ID NO: 942583 - DNA, 15 bp, Homo sapiens
cccatgtcacaagct

SEQ ID NO: 942584 - DNA, 15 bp, Homo sapiens
ccatgtcacaagctc

SEQ ID NO: 942585 - DNA, 15 bp, Homo sapiens
catgtcacaagctct

SEQ ID NO: 942586 - DNA, 15 bp, Homo sapiens
atgtcacaagctctt

SEQ ID NO: 942587 - DNA, 15 bp, Homo sapiens
tgtcacaagctcttt

SEQ ID NO: 942588 - DNA, 15 bp, Homo sapiens
gtcacaagctctttg

SEQ ID NO: 942589 - DNA, 15 bp, Homo sapiens
tcacaagctctttgc

SEQ ID NO: 942590 - DNA, 15 bp, Homo sapiens
cacaagctctttgct

SEQ ID NO: 942591 - DNA, 15 bp, Homo sapiens
acaagctctttgctt

SEQ ID NO: 942592 - DNA, 15 bp, Homo sapiens
caagctctttgctta

SEQ ID NO: 942593 - DNA, 15 bp, Homo sapiens
aagctctttgcttag

SEQ ID NO: 942594 - DNA, 15 bp, Homo sapiens
agctctttgcttagc

SEQ ID NO: 942595 - DNA, 15 bp, Homo sapiens
gctctttgcttagct

SEQ ID NO: 942596 - DNA, 15 bp, Homo sapiens
ctctttgcttagcta

SEQ ID NO: 942597 - DNA, 15 bp, Homo sapiens
tctttgcttagctaa

SEQ ID NO: 942598 - DNA, 15 bp, Homo sapiens
ctttgcttagctaac

SEQ ID NO: 942599 - DNA, 15 bp, Homo sapiens
tttgcttagctaact

SEQ ID NO: 942600 - DNA, 15 bp, Homo sapiens
ttgcttagctaactc

SEQ ID NO: 942601 - DNA, 15 bp, Homo sapiens
tgcttagctaactcc

SEQ ID NO: 942602 - DNA, 15 bp, Homo sapiens
gcttagctaactcca

SEQ ID NO: 942603 - DNA, 15 bp, Homo sapiens
cttagctaactccag

SEQ ID NO: 942604 - DNA, 15 bp, Homo sapiens
ttagctaactccagc

SEQ ID NO: 942605 - DNA, 15 bp, Homo sapiens
tagctaactccagct

SEQ ID NO: 942606 - DNA, 15 bp, Homo sapiens
agctaactccagctc

SEQ ID NO: 942607 - DNA, 15 bp, Homo sapiens
gctaactccagctct

SEQ ID NO: 942608 - DNA, 15 bp, Homo sapiens
ctaactccagctctg

SEQ ID NO: 942609 - DNA, 15 bp, Homo sapiens
taactccagctctgc

SEQ ID NO: 942610 - DNA, 15 bp, Homo sapiens
aactccagctctgct

SEQ ID NO: 942611 - DNA, 15 bp, Homo sapiens
actccagctctgctt

SEQ ID NO: 942612 - DNA, 15 bp, Homo sapiens
ctccagctctgcttt

SEQ ID NO: 942613 - DNA, 15 bp, Homo sapiens
tccagctctgctttc

SEQ ID NO: 942614 - DNA, 15 bp, Homo sapiens
ccagctctgctttca

SEQ ID NO: 942615 - DNA, 15 bp, Homo sapiens
cagctctgctttcag

SEQ ID NO: 942616 - DNA, 15 bp, Homo sapiens
agctctgctttcaga

SEQ ID NO: 942617 - DNA, 15 bp, Homo sapiens
gctctgctttcagat

SEQ ID NO: 942618 - DNA, 15 bp, Homo sapiens
ctctgctttcagata

SEQ ID NO: 942619 - DNA, 15 bp, Homo sapiens
tctgctttcagatat

SEQ ID NO: 942620 - DNA, 15 bp, Homo sapiens
ctgctttcagatatc

SEQ ID NO: 942621 - DNA, 15 bp, Homo sapiens
tgctttcagatatca

SEQ ID NO: 942622 - DNA, 15 bp, Homo sapiens
gctttcagatatcaa

SEQ ID NO: 942623 - DNA, 15 bp, Homo sapiens
ctttcagatatcaat

SEQ ID NO: 942624 - DNA, 15 bp, Homo sapiens
tttcagatatcaata

SEQ ID NO: 942625 - DNA, 15 bp, Homo sapiens
ttcagatatcaataa

SEQ ID NO: 942626 - DNA, 15 bp, Homo sapiens
tcagatatcaataag

SEQ ID NO: 942627 - DNA, 15 bp, Homo sapiens
cagatatcaataaga

SEQ ID NO: 942628 - DNA, 15 bp, Homo sapiens
agatatcaataagaa

SEQ ID NO: 942629 - DNA, 15 bp, Homo sapiens
gatatcaataagaac

SEQ ID NO: 942630 - DNA, 15 bp, Homo sapiens
atatcaataagaacc

SEQ ID NO: 942631 - DNA, 15 bp, Homo sapiens
tatcaataagaacca

SEQ ID NO: 942632 - DNA, 15 bp, Homo sapiens
atcaataagaaccac

SEQ ID NO: 942633 - DNA, 15 bp, Homo sapiens
tcaataagaaccacc

SEQ ID NO: 942634 - DNA, 15 bp, Homo sapiens
caataagaaccacca

SEQ ID NO: 942635 - DNA, 15 bp, Homo sapiens
aataagaaccaccac

SEQ ID NO: 942636 - DNA, 15 bp, Homo sapiens
ataagaaccaccact

SEQ ID NO: 942637 - DNA, 15 bp, Homo sapiens
taagaaccaccactc

SEQ ID NO: 942638 - DNA, 15 bp, Homo sapiens
aagaaccaccactcc

SEQ ID NO: 942639 - DNA, 15 bp, Homo sapiens
agaaccaccactccc

SEQ ID NO: 942640 - DNA, 15 bp, Homo sapiens
gaaccaccactccca

SEQ ID NO: 942641 - DNA, 15 bp, Homo sapiens
aaccaccactcccat

SEQ ID NO: 942642 - DNA, 15 bp, Homo sapiens
accaccactcccatc

SEQ ID NO: 942643 - DNA, 15 bp, Homo sapiens
ccaccactcccatca

SEQ ID NO: 942644 - DNA, 15 bp, Homo sapiens
caccactcccatcat

SEQ ID NO: 942645 - DNA, 15 bp, Homo sapiens
accactcccatcatc

SEQ ID NO: 942646 - DNA, 15 bp, Homo sapiens
ccactcccatcatct

SEQ ID NO: 942647 - DNA, 15 bp, Homo sapiens
cactcccatcatctt

SEQ ID NO: 942648 - DNA, 15 bp, Homo sapiens
actcccatcatcttc

SEQ ID NO: 942649 - DNA, 15 bp, Homo sapiens
ctcccatcatcttct

SEQ ID NO: 942650 - DNA, 15 bp, Homo sapiens
tcccatcatcttctt

SEQ ID NO: 942651 - DNA, 15 bp, Homo sapiens
cccatcatcttcttt

SEQ ID NO: 942652 - DNA, 15 bp, Homo sapiens
ccatcatcttcttta

SEQ ID NO: 942653 - DNA, 15 bp, Homo sapiens
catcatcttctttaa

SEQ ID NO: 942654 - DNA, 15 bp, Homo sapiens
atcatcttctttaac

SEQ ID NO: 942655 - DNA, 15 bp, Homo sapiens
tcatcttctttaacc

SEQ ID NO: 942656 - DNA, 15 bp, Homo sapiens
catcttctttaacca

SEQ ID NO: 942657 - DNA, 15 bp, Homo sapiens
atcttctttaaccaa

SEQ ID NO: 942658 - DNA, 15 bp, Homo sapiens
tcttctttaaccaaa

SEQ ID NO: 942659 - DNA, 15 bp, Homo sapiens
cttctttaaccaaac

SEQ ID NO: 942660 - DNA, 15 bp, Homo sapiens
ttctttaaccaaaca

SEQ ID NO: 942661 - DNA, 15 bp, Homo sapiens
tctttaaccaaacag

SEQ ID NO: 942662 - DNA, 15 bp, Homo sapiens
ctttaaccaaacaga

SEQ ID NO: 942663 - DNA, 15 bp, Homo sapiens
tttaaccaaacagac

SEQ ID NO: 942664 - DNA, 15 bp, Homo sapiens
ttaaccaaacagact

SEQ ID NO: 942665 - DNA, 15 bp, Homo sapiens
taaccaaacagacta

SEQ ID NO: 942666 - DNA, 15 bp, Homo sapiens
aaccaaacagactat

SEQ ID NO: 942667 - DNA, 15 bp, Homo sapiens
accaaacagactatg

SEQ ID NO: 942668 - DNA, 15 bp, Homo sapiens
ccaaacagactatgt

SEQ ID NO: 942669 - DNA, 15 bp, Homo sapiens
caaacagactatgtt

SEQ ID NO: 942670 - DNA, 15 bp, Homo sapiens
aaacagactatgttg

SEQ ID NO: 942671 - DNA, 15 bp, Homo sapiens
aacagactatgttgt

SEQ ID NO: 942672 - DNA, 15 bp, Homo sapiens
acagactatgttgtt

SEQ ID NO: 942673 - DNA, 15 bp, Homo sapiens
cagactatgttgttg

SEQ ID NO: 942674 - DNA, 15 bp, Homo sapiens
agactatgttgttga

SEQ ID NO: 942675 - DNA, 15 bp, Homo sapiens
gactatgttgttgaa

SEQ ID NO: 942676 - DNA, 15 bp, Homo sapiens
actatgttgttgaat

SEQ ID NO: 942677 - DNA, 15 bp, Homo sapiens
ctatgttgttgaatt

SEQ ID NO: 942678 - DNA, 15 bp, Homo sapiens
tatgttgttgaattt

SEQ ID NO: 942679 - DNA, 15 bp, Homo sapiens
atgttgttgaatttc

SEQ ID NO: 942680 - DNA, 15 bp, Homo sapiens
tgttgttgaatttcc

SEQ ID NO: 942681 - DNA, 15 bp, Homo sapiens
gttgttgaatttcca

SEQ ID NO: 942682 - DNA, 15 bp, Homo sapiens
ttgttgaatttccag

SEQ ID NO: 942683 - DNA, 15 bp, Homo sapiens
tgttgaatttccagc

SEQ ID NO: 942684 - DNA, 15 bp, Homo sapiens
gttgaatttccagca

SEQ ID NO: 942685 - DNA, 15 bp, Homo sapiens
ttgaatttccagcac

SEQ ID NO: 942686 - DNA, 15 bp, Homo sapiens
tgaatttccagcacc

SEQ ID NO: 942687 - DNA, 15 bp, Homo sapiens
gaatttccagcacct

SEQ ID NO: 942688 - DNA, 15 bp, Homo sapiens
aatttccagcaccta

SEQ ID NO: 942689 - DNA, 15 bp, Homo sapiens
atttccagcacctag

SEQ ID NO: 942690 - DNA, 15 bp, Homo sapiens
tttccagcacctagc

SEQ ID NO: 942691 - DNA, 15 bp, Homo sapiens
ttccagcacctagca

SEQ ID NO: 942692 - DNA, 15 bp, Homo sapiens
tccagcacctagcac

SEQ ID NO: 942693 - DNA, 15 bp, Homo sapiens
ccagcacctagcact

SEQ ID NO: 942694 - DNA, 15 bp, Homo sapiens
cagcacctagcactg

SEQ ID NO: 942695 - DNA, 15 bp, Homo sapiens
agcacctagcactgt

SEQ ID NO: 942696 - DNA, 15 bp, Homo sapiens
gcacctagcactgta

SEQ ID NO: 942697 - DNA, 15 bp, Homo sapiens
cacctagcactgtac

SEQ ID NO: 942698 - DNA, 15 bp, Homo sapiens
acctagcactgtacc

SEQ ID NO: 942699 - DNA, 15 bp, Homo sapiens
cctagcactgtacct

SEQ ID NO: 942700 - DNA, 15 bp, Homo sapiens
ctagcactgtacctg

SEQ ID NO: 942701 - DNA, 15 bp, Homo sapiens
tagcactgtacctgg

SEQ ID NO: 942702 - DNA, 15 bp, Homo sapiens
agcactgtacctggc

SEQ ID NO: 942703 - DNA, 15 bp, Homo sapiens
gcactgtacctggca

SEQ ID NO: 942704 - DNA, 15 bp, Homo sapiens
cactgtacctggcac

SEQ ID NO: 942705 - DNA, 15 bp, Homo sapiens
actgtacctggcaca

SEQ ID NO: 942706 - DNA, 15 bp, Homo sapiens
ctgtacctggcacat

SEQ ID NO: 942707 - DNA, 15 bp, Homo sapiens
tgtacctggcacatg

SEQ ID NO: 942708 - DNA, 15 bp, Homo sapiens
gtacctggcacatgg

SEQ ID NO: 942709 - DNA, 15 bp, Homo sapiens
tacctggcacatggc

SEQ ID NO: 942710 - DNA, 15 bp, Homo sapiens
acctggcacatggcg

SEQ ID NO: 942711 - DNA, 15 bp, Homo sapiens
cctggcacatggcgc

SEQ ID NO: 942712 - DNA, 15 bp, Homo sapiens
ctggcacatggcgct

SEQ ID NO: 942713 - DNA, 15 bp, Homo sapiens
tggcacatggcgctc

SEQ ID NO: 942714 - DNA, 15 bp, Homo sapiens
ggcacatggcgctca

SEQ ID NO: 942715 - DNA, 15 bp, Homo sapiens
gcacatggcgctcaa

SEQ ID NO: 942716 - DNA, 15 bp, Homo sapiens
cacatggcgctcaat

SEQ ID NO: 942717 - DNA, 15 bp, Homo sapiens
acatggcgctcaata

SEQ ID NO: 942718 - DNA, 15 bp, Homo sapiens
catggcgctcaataa

SEQ ID NO: 942719 - DNA, 15 bp, Homo sapiens
atggcgctcaataaa

SEQ ID NO: 942720 - DNA, 15 bp, Homo sapiens
tggcgctcaataaat

SEQ ID NO: 942721 - DNA, 15 bp, Homo sapiens
ggcgctcaataaata

SEQ ID NO: 942722 - DNA, 15 bp, Homo sapiens
gcgctcaataaatac

SEQ ID NO: 942723 - DNA, 15 bp, Homo sapiens
cgctcaataaatact

SEQ ID NO: 942724 - DNA, 15 bp, Homo sapiens
gctcaataaatactg

SEQ ID NO: 942725 - DNA, 15 bp, Homo sapiens
ctcaataaatactga

SEQ ID NO: 942726 - DNA, 15 bp, Homo sapiens
tcaataaatactgag

SEQ ID NO: 942727 - DNA, 15 bp, Homo sapiens
caataaatactgagc

SEQ ID NO: 942728 - DNA, 15 bp, Homo sapiens
aataaatactgagca

SEQ ID NO: 942729 - DNA, 15 bp, Homo sapiens
ataaatactgagcac

SEQ ID NO: 942730 - DNA, 15 bp, Homo sapiens
taaatactgagcacc

SEQ ID NO: 942731 - DNA, 15 bp, Homo sapiens
aaatactgagcacca

SEQ ID NO: 942732 - DNA, 15 bp, Homo sapiens
aatactgagcaccaa

SEQ ID NO: 942733 - DNA, 15 bp, Homo sapiens
atactgagcaccaaa

SEQ ID NO: 942734 - DNA, 15 bp, Homo sapiens
tactgagcaccaaat

SEQ ID NO: 942735 - DNA, 15 bp, Homo sapiens
actgagcaccaaatg

SEQ ID NO: 942736 - DNA, 15 bp, Homo sapiens
ctgagcaccaaatgt

SEQ ID NO: 942737 - DNA, 15 bp, Homo sapiens
tgagcaccaaatgta

SEQ ID NO: 942738 - DNA, 15 bp, Homo sapiens
gagcaccaaatgtat

SEQ ID NO: 942739 - DNA, 15 bp, Homo sapiens
agcaccaaatgtatt

SEQ ID NO: 942740 - DNA, 15 bp, Homo sapiens
gcaccaaatgtatta

SEQ ID NO: 942741 - DNA, 15 bp, Homo sapiens
caccaaatgtattaa

SEQ ID NO: 942742 - DNA, 15 bp, Homo sapiens
accaaatgtattaat

SEQ ID NO: 942743 - DNA, 15 bp, Homo sapiens
ccaaatgtattaata

SEQ ID NO: 942744 - DNA, 15 bp, Homo sapiens
caaatgtattaataa

SEQ ID NO: 942745 - DNA, 15 bp, Homo sapiens
aaatgtattaataat

SEQ ID NO: 942746 - DNA, 15 bp, Homo sapiens
aatgtattaataata

SEQ ID NO: 942747 - DNA, 15 bp, Homo sapiens
atgtattaataataa

SEQ ID NO: 942748 - DNA, 15 bp, Homo sapiens
tgtattaataataat

SEQ ID NO: 942749 - DNA, 15 bp, Homo sapiens
gtattaataataatt

SEQ ID NO: 942750 - DNA, 15 bp, Homo sapiens
tattaataataattt

SEQ ID NO: 942751 - DNA, 15 bp, Homo sapiens
attaataataattta

SEQ ID NO: 942752 - DNA, 15 bp, Homo sapiens
ttaataataatttat

SEQ ID NO: 942753 - DNA, 15 bp, Homo sapiens
taataataatttatt

SEQ ID NO: 942754 - DNA, 15 bp, Homo sapiens
aataataatttatta

SEQ ID NO: 942755 - DNA, 15 bp, Homo sapiens
ataataatttattaa

SEQ ID NO: 942756 - DNA, 15 bp, Homo sapiens
taataatttattaac

SEQ ID NO: 942757 - DNA, 15 bp, Homo sapiens
aataatttattaact

SEQ ID NO: 942758 - DNA, 15 bp, Homo sapiens
ataatttattaactg

SEQ ID NO: 942759 - DNA, 15 bp, Homo sapiens
taatttattaactga

SEQ ID NO: 942760 - DNA, 15 bp, Homo sapiens
aatttattaactgaa

SEQ ID NO: 942761 - DNA, 15 bp, Homo sapiens
atttattaactgaat

SEQ ID NO: 942762 - DNA, 15 bp, Homo sapiens
tttattaactgaatt

SEQ ID NO: 942763 - DNA, 15 bp, Homo sapiens
ttattaactgaatta

SEQ ID NO: 942764 - DNA, 15 bp, Homo sapiens
tattaactgaattaa

SEQ ID NO: 942765 - DNA, 15 bp, Homo sapiens
attaactgaattaat

SEQ ID NO: 942766 - DNA, 15 bp, Homo sapiens
ttaactgaattaatt

SEQ ID NO: 942767 - DNA, 15 bp, Homo sapiens
taactgaattaattt

SEQ ID NO: 942768 - DNA, 15 bp, Homo sapiens
aactgaattaatttt

SEQ ID NO: 942769 - DNA, 15 bp, Homo sapiens
actgaattaatttta

SEQ ID NO: 942770 - DNA, 15 bp, Homo sapiens
ctgaattaattttat

SEQ ID NO: 942771 - DNA, 15 bp, Homo sapiens
tgaattaattttatt

SEQ ID NO: 942772 - DNA, 15 bp, Homo sapiens
gaattaattttatta

SEQ ID NO: 942773 - DNA, 15 bp, Homo sapiens
aattaattttattaa

SEQ ID NO: 942774 - DNA, 15 bp, Homo sapiens
attaattttattaac

SEQ ID NO: 942775 - DNA, 15 bp, Homo sapiens
ttaattttattaaca

SEQ ID NO: 942776 - DNA, 15 bp, Homo sapiens
taattttattaacaa

SEQ ID NO: 942777 - DNA, 15 bp, Homo sapiens
aattttattaacaac

SEQ ID NO: 942778 - DNA, 15 bp, Homo sapiens
attttattaacaaca

SEQ ID NO: 942779 - DNA, 15 bp, Homo sapiens
ttttattaacaacaa

SEQ ID NO: 942780 - DNA, 15 bp, Homo sapiens
tttattaacaacaaa

SEQ ID NO: 942781 - DNA, 15 bp, Homo sapiens
ttattaacaacaaaa

SEQ ID NO: 942782 - DNA, 15 bp, Homo sapiens
tattaacaacaaaaa

SEQ ID NO: 942783 - DNA, 15 bp, Homo sapiens
attaacaacaaaaaa

SEQ ID NO: 942784 - DNA, 15 bp, Homo sapiens
ttaacaacaaaaaat

SEQ ID NO: 942785 - DNA, 15 bp, Homo sapiens
taacaacaaaaaata

SEQ ID NO: 942786 - DNA, 15 bp, Homo sapiens
aacaacaaaaaataa

SEQ ID NO: 942787 - DNA, 15 bp, Homo sapiens
acaacaaaaaataat

SEQ ID NO: 942788 - DNA, 15 bp, Homo sapiens
caacaaaaaataata

SEQ ID NO: 942789 - DNA, 15 bp, Homo sapiens
aacaaaaaataataa

SEQ ID NO: 942790 - DNA, 15 bp, Homo sapiens
acaaaaaataataaa

SEQ ID NO: 942791 - DNA, 15 bp, Homo sapiens
caaaaaataataaaa

SEQ ID NO: 942792 - DNA, 15 bp, Homo sapiens
aaaaaataataaaaa

SEQ ID NO: 942793 - DNA, 15 bp, Homo sapiens
aaaaataataaaaat

SEQ ID NO: 942794 - DNA, 15 bp, Homo sapiens
aaaataataaaaata

SEQ ID NO: 942795 - DNA, 15 bp, Homo sapiens
aaataataaaaatat

SEQ ID NO: 942796 - DNA, 15 bp, Homo sapiens
aataataaaaatata

SEQ ID NO: 942797 - DNA, 15 bp, Homo sapiens
ataataaaaatataa

SEQ ID NO: 942798 - DNA, 15 bp, Homo sapiens
taataaaaatataat

SEQ ID NO: 942799 - DNA, 15 bp, Homo sapiens
aataaaaatataata

SEQ ID NO: 942800 - DNA, 15 bp, Homo sapiens
ataaaaatataatat

SEQ ID NO: 942801 - DNA, 15 bp, Homo sapiens
taaaaatataatata

SEQ ID NO: 942802 - DNA, 15 bp, Homo sapiens
aaaaatataatataa

SEQ ID NO: 942803 - DNA, 15 bp, Homo sapiens
aaaatataatataat

SEQ ID NO: 942804 - DNA, 15 bp, Homo sapiens
aaatataatataatt

SEQ ID NO: 942805 - DNA, 15 bp, Homo sapiens
aatataatataatta

SEQ ID NO: 942806 - DNA, 15 bp, Homo sapiens
atataatataattaa

SEQ ID NO: 942807 - DNA, 15 bp, Homo sapiens
tataatataattaat

SEQ ID NO: 942808 - DNA, 15 bp, Homo sapiens
ataatataattaata

SEQ ID NO: 942809 - DNA, 15 bp, Homo sapiens
taatataattaataa

SEQ ID NO: 942810 - DNA, 15 bp, Homo sapiens
aatataattaataaa

SEQ ID NO: 942811 - DNA, 15 bp, Homo sapiens
atataattaataaaa

SEQ ID NO: 942812 - DNA, 15 bp, Homo sapiens
tataattaataaaat

SEQ ID NO: 942813 - DNA, 15 bp, Homo sapiens
ataattaataaaata

SEQ ID NO: 942814 - DNA, 15 bp, Homo sapiens
taattaataaaataa

SEQ ID NO: 942815 - DNA, 15 bp, Homo sapiens
aattaataaaataat

SEQ ID NO: 942816 - DNA, 15 bp, Homo sapiens
attaataaaataata

SEQ ID NO: 942817 - DNA, 15 bp, Homo sapiens
ttaataaaataataa

SEQ ID NO: 942818 - DNA, 15 bp, Homo sapiens
taataaaataataaa

SEQ ID NO: 942819 - DNA, 15 bp, Homo sapiens
aataaaataataaat

SEQ ID NO: 942820 - DNA, 15 bp, Homo sapiens
ataaaataataaata

SEQ ID NO: 942821 - DNA, 15 bp, Homo sapiens
taaaataataaatac

SEQ ID NO: 942822 - DNA, 15 bp, Homo sapiens
aaaataataaatact

SEQ ID NO: 942823 - DNA, 15 bp, Homo sapiens
aaataataaatactg

SEQ ID NO: 942824 - DNA, 15 bp, Homo sapiens
aataataaatactga

SEQ ID NO: 942825 - DNA, 15 bp, Homo sapiens
ataataaatactgag

SEQ ID NO: 942826 - DNA, 15 bp, Homo sapiens
taataaatactgaga

SEQ ID NO: 942827 - DNA, 15 bp, Homo sapiens
aataaatactgagaa

SEQ ID NO: 942828 - DNA, 15 bp, Homo sapiens
ataaatactgagaac

SEQ ID NO: 942829 - DNA, 15 bp, Homo sapiens
taaatactgagaact

SEQ ID NO: 942830 - DNA, 15 bp, Homo sapiens
aaatactgagaacta

SEQ ID NO: 942831 - DNA, 15 bp, Homo sapiens
aatactgagaactac

SEQ ID NO: 942832 - DNA, 15 bp, Homo sapiens
atactgagaactact

SEQ ID NO: 942833 - DNA, 15 bp, Homo sapiens
tactgagaactactg

SEQ ID NO: 942834 - DNA, 15 bp, Homo sapiens
actgagaactactgg

SEQ ID NO: 942835 - DNA, 15 bp, Homo sapiens
ctgagaactactggc

SEQ ID NO: 942836 - DNA, 15 bp, Homo sapiens
tgagaactactggca

SEQ ID NO: 942837 - DNA, 15 bp, Homo sapiens
gagaactactggcaa

SEQ ID NO: 942838 - DNA, 15 bp, Homo sapiens
agaactactggcaat

SEQ ID NO: 942839 - DNA, 15 bp, Homo sapiens
gaactactggcaatt

SEQ ID NO: 942840 - DNA, 15 bp, Homo sapiens
aactactggcaattc

SEQ ID NO: 942841 - DNA, 15 bp, Homo sapiens
actactggcaattca

SEQ ID NO: 942842 - DNA, 15 bp, Homo sapiens
ctactggcaattcag

SEQ ID NO: 942843 - DNA, 15 bp, Homo sapiens
tactggcaattcagt

SEQ ID NO: 942844 - DNA, 15 bp, Homo sapiens
actggcaattcagtt

SEQ ID NO: 942845 - DNA, 15 bp, Homo sapiens
ctggcaattcagttt

SEQ ID NO: 942846 - DNA, 15 bp, Homo sapiens
tggcaattcagtttc

SEQ ID NO: 942847 - DNA, 15 bp, Homo sapiens
ggcaattcagtttct

SEQ ID NO: 942848 - DNA, 15 bp, Homo sapiens
gcaattcagtttctt

SEQ ID NO: 942849 - DNA, 15 bp, Homo sapiens
caattcagtttcttc

SEQ ID NO: 942850 - DNA, 15 bp, Homo sapiens
aattcagtttcttct

SEQ ID NO: 942851 - DNA, 15 bp, Homo sapiens
attcagtttcttctt

SEQ ID NO: 942852 - DNA, 15 bp, Homo sapiens
ttcagtttcttcttc

SEQ ID NO: 942853 - DNA, 15 bp, Homo sapiens
tcagtttcttcttct

SEQ ID NO: 942854 - DNA, 15 bp, Homo sapiens
cagtttcttcttctg

SEQ ID NO: 942855 - DNA, 15 bp, Homo sapiens
agtttcttcttctga

SEQ ID NO: 942856 - DNA, 15 bp, Homo sapiens
gtttcttcttctgaa

SEQ ID NO: 942857 - DNA, 15 bp, Homo sapiens
tttcttcttctgaag

SEQ ID NO: 942858 - DNA, 15 bp, Homo sapiens
ttcttcttctgaagt

SEQ ID NO: 942859 - DNA, 15 bp, Homo sapiens
tcttcttctgaagtg

SEQ ID NO: 942860 - DNA, 15 bp, Homo sapiens
cttcttctgaagtga

SEQ ID NO: 942861 - DNA, 15 bp, Homo sapiens
ttcttctgaagtgat

SEQ ID NO: 942862 - DNA, 15 bp, Homo sapiens
tcttctgaagtgatg

SEQ ID NO: 942863 - DNA, 15 bp, Homo sapiens
cttctgaagtgatga

SEQ ID NO: 942864 - DNA, 15 bp, Homo sapiens
ttctgaagtgatgaa

SEQ ID NO: 942865 - DNA, 15 bp, Homo sapiens
tctgaagtgatgaaa

SEQ ID NO: 942866 - DNA, 15 bp, Homo sapiens
ctgaagtgatgaaaa

SEQ ID NO: 942867 - DNA, 15 bp, Homo sapiens
tgaagtgatgaaaac

SEQ ID NO: 942868 - DNA, 15 bp, Homo sapiens
gaagtgatgaaaact

SEQ ID NO: 942869 - DNA, 15 bp, Homo sapiens
aagtgatgaaaactg

SEQ ID NO: 942870 - DNA, 15 bp, Homo sapiens
agtgatgaaaactgc

SEQ ID NO: 942871 - DNA, 15 bp, Homo sapiens
gtgatgaaaactgca

SEQ ID NO: 942872 - DNA, 15 bp, Homo sapiens
tgatgaaaactgcat

SEQ ID NO: 942873 - DNA, 15 bp, Homo sapiens
gatgaaaactgcatt

SEQ ID NO: 942874 - DNA, 15 bp, Homo sapiens
atgaaaactgcattt

SEQ ID NO: 942875 - DNA, 15 bp, Homo sapiens
tgaaaactgcatttc

SEQ ID NO: 942876 - DNA, 15 bp, Homo sapiens
gaaaactgcatttct

SEQ ID NO: 942877 - DNA, 15 bp, Homo sapiens
aaaactgcatttctg

SEQ ID NO: 942878 - DNA, 15 bp, Homo sapiens
aaactgcatttctgg

SEQ ID NO: 942879 - DNA, 15 bp, Homo sapiens
aactgcatttctggg

SEQ ID NO: 942880 - DNA, 15 bp, Homo sapiens
actgcatttctgggc

SEQ ID NO: 942881 - DNA, 15 bp, Homo sapiens
ctgcatttctgggca

SEQ ID NO: 942882 - DNA, 15 bp, Homo sapiens
tgcatttctgggcac

SEQ ID NO: 942883 - DNA, 15 bp, Homo sapiens
gcatttctgggcact

SEQ ID NO: 942884 - DNA, 15 bp, Homo sapiens
catttctgggcactg

SEQ ID NO: 942885 - DNA, 15 bp, Homo sapiens
atttctgggcactgg

SEQ ID NO: 942886 - DNA, 15 bp, Homo sapiens
tttctgggcactgga

SEQ ID NO: 942887 - DNA, 15 bp, Homo sapiens
ttctgggcactggac

SEQ ID NO: 942888 - DNA, 15 bp, Homo sapiens
tctgggcactggaca

SEQ ID NO: 942889 - DNA, 15 bp, Homo sapiens
ctgggcactggacat

SEQ ID NO: 942890 - DNA, 15 bp, Homo sapiens
tgggcactggacata

SEQ ID NO: 942891 - DNA, 15 bp, Homo sapiens
gggcactggacatat

SEQ ID NO: 942892 - DNA, 15 bp, Homo sapiens
ggcactggacatatg

SEQ ID NO: 942893 - DNA, 15 bp, Homo sapiens
gcactggacatatgg

SEQ ID NO: 942894 - DNA, 15 bp, Homo sapiens
cactggacatatggc

SEQ ID NO: 942895 - DNA, 15 bp, Homo sapiens
actggacatatggca

SEQ ID NO: 942896 - DNA, 15 bp, Homo sapiens
ctggacatatggcag

SEQ ID NO: 942897 - DNA, 15 bp, Homo sapiens
tggacatatggcagg

SEQ ID NO: 942898 - DNA, 15 bp, Homo sapiens
ggacatatggcaggg

SEQ ID NO: 942899 - DNA, 15 bp, Homo sapiens
gacatatggcaggga

SEQ ID NO: 942900 - DNA, 15 bp, Homo sapiens
acatatggcagggaa

SEQ ID NO: 942901 - DNA, 15 bp, Homo sapiens
catatggcagggaag

SEQ ID NO: 942902 - DNA, 15 bp, Homo sapiens
atatggcagggaagg

SEQ ID NO: 942903 - DNA, 15 bp, Homo sapiens
tatggcagggaagga

SEQ ID NO: 942904 - DNA, 15 bp, Homo sapiens
atggcagggaaggaa

SEQ ID NO: 942905 - DNA, 15 bp, Homo sapiens
tggcagggaaggaaa

SEQ ID NO: 942906 - DNA, 15 bp, Homo sapiens
ggcagggaaggaaaa

SEQ ID NO: 942907 - DNA, 15 bp, Homo sapiens
gcagggaaggaaaac

SEQ ID NO: 942908 - DNA, 15 bp, Homo sapiens
cagggaaggaaaaca

SEQ ID NO: 942909 - DNA, 15 bp, Homo sapiens
agggaaggaaaacag

SEQ ID NO: 942910 - DNA, 15 bp, Homo sapiens
gggaaggaaaacaga

SEQ ID NO: 942911 - DNA, 15 bp, Homo sapiens
ggaaggaaaacagaa

SEQ ID NO: 942912 - DNA, 15 bp, Homo sapiens
gaaggaaaacagaaa

SEQ ID NO: 942913 - DNA, 15 bp, Homo sapiens
aaggaaaacagaaag

SEQ ID NO: 942914 - DNA, 15 bp, Homo sapiens
aggaaaacagaaagt

SEQ ID NO: 942915 - DNA, 15 bp, Homo sapiens
ggaaaacagaaagta

SEQ ID NO: 942916 - DNA, 15 bp, Homo sapiens
gaaaacagaaagtat

SEQ ID NO: 942917 - DNA, 15 bp, Homo sapiens
aaaacagaaagtatg

SEQ ID NO: 942918 - DNA, 15 bp, Homo sapiens
aaacagaaagtatga

SEQ ID NO: 942919 - DNA, 15 bp, Homo sapiens
aacagaaagtatgag

SEQ ID NO: 942920 - DNA, 15 bp, Homo sapiens
acagaaagtatgaga

SEQ ID NO: 942921 - DNA, 15 bp, Homo sapiens
cagaaagtatgagag

SEQ ID NO: 942922 - DNA, 15 bp, Homo sapiens
agaaagtatgagagg

SEQ ID NO: 942923 - DNA, 15 bp, Homo sapiens
gaaagtatgagagga

SEQ ID NO: 942924 - DNA, 15 bp, Homo sapiens
aaagtatgagaggag

SEQ ID NO: 942925 - DNA, 15 bp, Homo sapiens
aagtatgagaggagg

SEQ ID NO: 942926 - DNA, 15 bp, Homo sapiens
agtatgagaggagga

SEQ ID NO: 942927 - DNA, 15 bp, Homo sapiens
gtatgagaggaggaa

SEQ ID NO: 942928 - DNA, 15 bp, Homo sapiens
tatgagaggaggaaa

SEQ ID NO: 942929 - DNA, 15 bp, Homo sapiens
atgagaggaggaaaa

SEQ ID NO: 942930 - DNA, 15 bp, Homo sapiens
tgagaggaggaaaag

SEQ ID NO: 942931 - DNA, 15 bp, Homo sapiens
gagaggaggaaaaga

SEQ ID NO: 942932 - DNA, 15 bp, Homo sapiens
agaggaggaaaagag

SEQ ID NO: 942933 - DNA, 15 bp, Homo sapiens
gaggaggaaaagagg

SEQ ID NO: 942934 - DNA, 15 bp, Homo sapiens
aggaggaaaagagga

SEQ ID NO: 942935 - DNA, 15 bp, Homo sapiens
ggaggaaaagaggac

SEQ ID NO: 942936 - DNA, 15 bp, Homo sapiens
gaggaaaagaggaca

SEQ ID NO: 942937 - DNA, 15 bp, Homo sapiens
aggaaaagaggacat

SEQ ID NO: 942938 - DNA, 15 bp, Homo sapiens
ggaaaagaggacata

SEQ ID NO: 942939 - DNA, 15 bp, Homo sapiens
gaaaagaggacatac

SEQ ID NO: 942940 - DNA, 15 bp, Homo sapiens
aaaagaggacataca

SEQ ID NO: 942941 - DNA, 15 bp, Homo sapiens
aaagaggacatacaa

SEQ ID NO: 942942 - DNA, 15 bp, Homo sapiens
aagaggacatacaaa

SEQ ID NO: 942943 - DNA, 15 bp, Homo sapiens
agaggacatacaaat

SEQ ID NO: 942944 - DNA, 15 bp, Homo sapiens
gaggacatacaaatc

SEQ ID NO: 942945 - DNA, 15 bp, Homo sapiens
aggacatacaaatcc

SEQ ID NO: 942946 - DNA, 15 bp, Homo sapiens
ggacatacaaatcca

SEQ ID NO: 942947 - DNA, 15 bp, Homo sapiens
gacatacaaatccat

SEQ ID NO: 942948 - DNA, 15 bp, Homo sapiens
acatacaaatccatt

SEQ ID NO: 942949 - DNA, 15 bp, Homo sapiens
catacaaatccattg

SEQ ID NO: 942950 - DNA, 15 bp, Homo sapiens
atacaaatccattga

SEQ ID NO: 942951 - DNA, 15 bp, Homo sapiens
tacaaatccattgag

SEQ ID NO: 942952 - DNA, 15 bp, Homo sapiens
acaaatccattgagc

SEQ ID NO: 942953 - DNA, 15 bp, Homo sapiens
caaatccattgagcc

SEQ ID NO: 942954 - DNA, 15 bp, Homo sapiens
aaatccattgagccc

SEQ ID NO: 942955 - DNA, 15 bp, Homo sapiens
aatccattgagccct

SEQ ID NO: 942956 - DNA, 15 bp, Homo sapiens
atccattgagccctt

SEQ ID NO: 942957 - DNA, 15 bp, Homo sapiens
tccattgagccctta

SEQ ID NO: 942958 - DNA, 15 bp, Homo sapiens
ccattgagcccttaa

SEQ ID NO: 942959 - DNA, 15 bp, Homo sapiens
cattgagcccttaaa

SEQ ID NO: 942960 - DNA, 15 bp, Homo sapiens
attgagcccttaaaa

SEQ ID NO: 942961 - DNA, 15 bp, Homo sapiens
ttgagcccttaaaat

SEQ ID NO: 942962 - DNA, 15 bp, Homo sapiens
tgagcccttaaaatc

SEQ ID NO: 942963 - DNA, 15 bp, Homo sapiens
gagcccttaaaatcc

SEQ ID NO: 942964 - DNA, 15 bp, Homo sapiens
agcccttaaaatcct

SEQ ID NO: 942965 - DNA, 15 bp, Homo sapiens
gcccttaaaatcctt

SEQ ID NO: 942966 - DNA, 15 bp, Homo sapiens
cccttaaaatccttg

SEQ ID NO: 942967 - DNA, 15 bp, Homo sapiens
ccttaaaatccttgg

SEQ ID NO: 942968 - DNA, 15 bp, Homo sapiens
cttaaaatccttgga

SEQ ID NO: 942969 - DNA, 15 bp, Homo sapiens
ttaaaatccttggaa

SEQ ID NO: 942970 - DNA, 15 bp, Homo sapiens
taaaatccttggaag

SEQ ID NO: 942971 - DNA, 15 bp, Homo sapiens
aaaatccttggaaga

SEQ ID NO: 942972 - DNA, 15 bp, Homo sapiens
aaatccttggaagaa

SEQ ID NO: 942973 - DNA, 15 bp, Homo sapiens
aatccttggaagaat

SEQ ID NO: 942974 - DNA, 15 bp, Homo sapiens
atccttggaagaata

SEQ ID NO: 942975 - DNA, 15 bp, Homo sapiens
tccttggaagaatag

SEQ ID NO: 942976 - DNA, 15 bp, Homo sapiens
ccttggaagaatagc

SEQ ID NO: 942977 - DNA, 15 bp, Homo sapiens
cttggaagaatagcc

SEQ ID NO: 942978 - DNA, 15 bp, Homo sapiens
ttggaagaatagcct

SEQ ID NO: 942979 - DNA, 15 bp, Homo sapiens
tggaagaatagcctg

SEQ ID NO: 942980 - DNA, 15 bp, Homo sapiens
ggaagaatagcctgg

SEQ ID NO: 942981 - DNA, 15 bp, Homo sapiens
gaagaatagcctggg

SEQ ID NO: 942982 - DNA, 15 bp, Homo sapiens
aagaatagcctggga

SEQ ID NO: 942983 - DNA, 15 bp, Homo sapiens
agaatagcctgggag

SEQ ID NO: 942984 - DNA, 15 bp, Homo sapiens
gaatagcctgggagg

SEQ ID NO: 942985 - DNA, 15 bp, Homo sapiens
aatagcctgggagga

SEQ ID NO: 942986 - DNA, 15 bp, Homo sapiens
atagcctgggaggaa

SEQ ID NO: 942987 - DNA, 15 bp, Homo sapiens
tagcctgggaggaag

SEQ ID NO: 942988 - DNA, 15 bp, Homo sapiens
agcctgggaggaagg

SEQ ID NO: 942989 - DNA, 15 bp, Homo sapiens
gcctgggaggaaggg

SEQ ID NO: 942990 - DNA, 15 bp, Homo sapiens
cctgggaggaaggga

SEQ ID NO: 942991 - DNA, 15 bp, Homo sapiens
ctgggaggaagggaa

SEQ ID NO: 942992 - DNA, 15 bp, Homo sapiens
tgggaggaagggaaa

SEQ ID NO: 942993 - DNA, 15 bp, Homo sapiens
aggaagggaaaaatg

SEQ ID NO: 942994 - DNA, 15 bp, Homo sapiens
ggaagggaaaaatga

SEQ ID NO: 942995 - DNA, 15 bp, Homo sapiens
gaagggaaaaatgag

SEQ ID NO: 942996 - DNA, 15 bp, Homo sapiens
aagggaaaaatgagg

SEQ ID NO: 942997 - DNA, 15 bp, Homo sapiens
agggaaaaatgaggg

SEQ ID NO: 942998 - DNA, 15 bp, Homo sapiens
gggaaaaatgaggga

SEQ ID NO: 942999 - DNA, 15 bp, Homo sapiens
ggaaaaatgagggaa

SEQ ID NO: 943000 - DNA, 15 bp, Homo sapiens
gaaaaatgagggaat

SEQ ID NO: 943001 - DNA, 15 bp, Homo sapiens
aaaaatgagggaata

SEQ ID NO: 943002 - DNA, 15 bp, Homo sapiens
aaaatgagggaataa

SEQ ID NO: 943003 - DNA, 15 bp, Homo sapiens
aaatgagggaataag

SEQ ID NO: 943004 - DNA, 15 bp, Homo sapiens
aatgagggaataaga

SEQ ID NO: 943005 - DNA, 15 bp, Homo sapiens
atgagggaataagaa

SEQ ID NO: 943006 - DNA, 15 bp, Homo sapiens
tgagggaataagaag

SEQ ID NO: 943007 - DNA, 15 bp, Homo sapiens
gagggaataagaaga

SEQ ID NO: 943008 - DNA, 15 bp, Homo sapiens
agggaataagaagaa

SEQ ID NO: 943009 - DNA, 15 bp, Homo sapiens
gggaataagaagaaa

SEQ ID NO: 943010 - DNA, 15 bp, Homo sapiens
ggaataagaagaaag

SEQ ID NO: 943011 - DNA, 15 bp, Homo sapiens
gaataagaagaaaga

SEQ ID NO: 943012 - DNA, 15 bp, Homo sapiens
aataagaagaaagat

SEQ ID NO: 943013 - DNA, 15 bp, Homo sapiens
ataagaagaaagata

SEQ ID NO: 943014 - DNA, 15 bp, Homo sapiens
taagaagaaagataa

SEQ ID NO: 943015 - DNA, 15 bp, Homo sapiens
aagaagaaagataaa

SEQ ID NO: 943016 - DNA, 15 bp, Homo sapiens
agaagaaagataaag

SEQ ID NO: 943017 - DNA, 15 bp, Homo sapiens
gaagaaagataaagg

SEQ ID NO: 943018 - DNA, 15 bp, Homo sapiens
aagaaagataaaggg

SEQ ID NO: 943019 - DNA, 15 bp, Homo sapiens
agaaagataaagggc

SEQ ID NO: 943020 - DNA, 15 bp, Homo sapiens
gaaagataaagggca

SEQ ID NO: 943021 - DNA, 15 bp, Homo sapiens
aaagataaagggcaa

SEQ ID NO: 943022 - DNA, 15 bp, Homo sapiens
aagataaagggcaaa

SEQ ID NO: 943023 - DNA, 15 bp, Homo sapiens
agataaagggcaaag

SEQ ID NO: 943024 - DNA, 15 bp, Homo sapiens
gataaagggcaaagg

SEQ ID NO: 943025 - DNA, 15 bp, Homo sapiens
ataaagggcaaaggc

SEQ ID NO: 943026 - DNA, 15 bp, Homo sapiens
taaagggcaaaggca

SEQ ID NO: 943027 - DNA, 15 bp, Homo sapiens
aaagggcaaaggcag

SEQ ID NO: 943028 - DNA, 15 bp, Homo sapiens
aagggcaaaggcagc

SEQ ID NO: 943029 - DNA, 15 bp, Homo sapiens
agggcaaaggcagca

SEQ ID NO: 943030 - DNA, 15 bp, Homo sapiens
gggcaaaggcagcat

SEQ ID NO: 943031 - DNA, 15 bp, Homo sapiens
ggcaaaggcagcatt

SEQ ID NO: 943032 - DNA, 15 bp, Homo sapiens
gcaaaggcagcatta

SEQ ID NO: 943033 - DNA, 15 bp, Homo sapiens
caaaggcagcattaa

SEQ ID NO: 943034 - DNA, 15 bp, Homo sapiens
aaaggcagcattaat

SEQ ID NO: 943035 - DNA, 15 bp, Homo sapiens
aaggcagcattaatg

SEQ ID NO: 943036 - DNA, 15 bp, Homo sapiens
aggcagcattaatga

SEQ ID NO: 943037 - DNA, 15 bp, Homo sapiens
ggcagcattaatgaa

SEQ ID NO: 943038 - DNA, 15 bp, Homo sapiens
gcagcattaatgaaa

SEQ ID NO: 943039 - DNA, 15 bp, Homo sapiens
cagcattaatgaaag

SEQ ID NO: 943040 - DNA, 15 bp, Homo sapiens
agcattaatgaaaga

SEQ ID NO: 943041 - DNA, 15 bp, Homo sapiens
gcattaatgaaagac

SEQ ID NO: 943042 - DNA, 15 bp, Homo sapiens
cattaatgaaagaca

SEQ ID NO: 943043 - DNA, 15 bp, Homo sapiens
attaatgaaagacaa

SEQ ID NO: 943044 - DNA, 15 bp, Homo sapiens
ttaatgaaagacaag

SEQ ID NO: 943045 - DNA, 15 bp, Homo sapiens
taatgaaagacaaga

SEQ ID NO: 943046 - DNA, 15 bp, Homo sapiens
aatgaaagacaagat

SEQ ID NO: 943047 - DNA, 15 bp, Homo sapiens
atgaaagacaagatg

SEQ ID NO: 943048 - DNA, 15 bp, Homo sapiens
tgaaagacaagatga

SEQ ID NO: 943049 - DNA, 15 bp, Homo sapiens
gaaagacaagatgac

SEQ ID NO: 943050 - DNA, 15 bp, Homo sapiens
aaagacaagatgacc

SEQ ID NO: 943051 - DNA, 15 bp, Homo sapiens
aagacaagatgacct

SEQ ID NO: 943052 - DNA, 15 bp, Homo sapiens
agacaagatgacctt

SEQ ID NO: 943053 - DNA, 15 bp, Homo sapiens
gacaagatgaccttt

SEQ ID NO: 943054 - DNA, 15 bp, Homo sapiens
acaagatgacctttg

SEQ ID NO: 943055 - DNA, 15 bp, Homo sapiens
caagatgacctttgt

SEQ ID NO: 943056 - DNA, 15 bp, Homo sapiens
aagatgacctttgtg

SEQ ID NO: 943057 - DNA, 15 bp, Homo sapiens
agatgacctttgtgc

SEQ ID NO: 943058 - DNA, 15 bp, Homo sapiens
gatgacctttgtgca

SEQ ID NO: 943059 - DNA, 15 bp, Homo sapiens
atgacctttgtgcaa

SEQ ID NO: 943060 - DNA, 15 bp, Homo sapiens
tgacctttgtgcaac

SEQ ID NO: 943061 - DNA, 15 bp, Homo sapiens
gacctttgtgcaact

SEQ ID NO: 943062 - DNA, 15 bp, Homo sapiens
acctttgtgcaactc

SEQ ID NO: 943063 - DNA, 15 bp, Homo sapiens
cctttgtgcaactca

SEQ ID NO: 943064 - DNA, 15 bp, Homo sapiens
ctttgtgcaactcaa

SEQ ID NO: 943065 - DNA, 15 bp, Homo sapiens
tttgtgcaactcaat

SEQ ID NO: 943066 - DNA, 15 bp, Homo sapiens
ttgtgcaactcaatc

SEQ ID NO: 943067 - DNA, 15 bp, Homo sapiens
tgtgcaactcaatcc

SEQ ID NO: 943068 - DNA, 15 bp, Homo sapiens
gtgcaactcaatcca

SEQ ID NO: 943069 - DNA, 15 bp, Homo sapiens
tgcaactcaatccag

SEQ ID NO: 943070 - DNA, 15 bp, Homo sapiens
gcaactcaatccagt

SEQ ID NO: 943071 - DNA, 15 bp, Homo sapiens
caactcaatccagtc

SEQ ID NO: 943072 - DNA, 15 bp, Homo sapiens
aactcaatccagtcc

SEQ ID NO: 943073 - DNA, 15 bp, Homo sapiens
actcaatccagtcct

SEQ ID NO: 943074 - DNA, 15 bp, Homo sapiens
ctcaatccagtcctc

SEQ ID NO: 943075 - DNA, 15 bp, Homo sapiens
tcaatccagtcctct

SEQ ID NO: 943076 - DNA, 15 bp, Homo sapiens
caatccagtcctctc

SEQ ID NO: 943077 - DNA, 15 bp, Homo sapiens
aatccagtcctctca

SEQ ID NO: 943078 - DNA, 15 bp, Homo sapiens
atccagtcctctcac

SEQ ID NO: 943079 - DNA, 15 bp, Homo sapiens
tccagtcctctcact

SEQ ID NO: 943080 - DNA, 15 bp, Homo sapiens
ccagtcctctcactt

SEQ ID NO: 943081 - DNA, 15 bp, Homo sapiens
cagtcctctcacttg

SEQ ID NO: 943082 - DNA, 15 bp, Homo sapiens
agtcctctcacttgg

SEQ ID NO: 943083 - DNA, 15 bp, Homo sapiens
gtcctctcacttggg

SEQ ID NO: 943084 - DNA, 15 bp, Homo sapiens
tcctctcacttgggt

SEQ ID NO: 943085 - DNA, 15 bp, Homo sapiens
cctctcacttgggtt

SEQ ID NO: 943086 - DNA, 15 bp, Homo sapiens
ctctcacttgggttt

SEQ ID NO: 943087 - DNA, 15 bp, Homo sapiens
tctcacttgggttta

SEQ ID NO: 943088 - DNA, 15 bp, Homo sapiens
ctcacttgggtttag

SEQ ID NO: 943089 - DNA, 15 bp, Homo sapiens
tcacttgggtttagg

SEQ ID NO: 943090 - DNA, 15 bp, Homo sapiens
cacttgggtttaggg

SEQ ID NO: 943091 - DNA, 15 bp, Homo sapiens
acttgggtttaggga

SEQ ID NO: 943092 - DNA, 15 bp, Homo sapiens
cttgggtttagggag

SEQ ID NO: 943093 - DNA, 15 bp, Homo sapiens
ttgggtttagggagt

SEQ ID NO: 943094 - DNA, 15 bp, Homo sapiens
tgggtttagggagta

SEQ ID NO: 943095 - DNA, 15 bp, Homo sapiens
gggtttagggagtaa

SEQ ID NO: 943096 - DNA, 15 bp, Homo sapiens
ggtttagggagtaaa

SEQ ID NO: 943097 - DNA, 15 bp, Homo sapiens
gtttagggagtaaat

SEQ ID NO: 943098 - DNA, 15 bp, Homo sapiens
tttagggagtaaatg

SEQ ID NO: 943099 - DNA, 15 bp, Homo sapiens
ttagggagtaaatgt

SEQ ID NO: 943100 - DNA, 15 bp, Homo sapiens
tagggagtaaatgta

SEQ ID NO: 943101 - DNA, 15 bp, Homo sapiens
agggagtaaatgtat

SEQ ID NO: 943102 - DNA, 15 bp, Homo sapiens
gggagtaaatgtatt

SEQ ID NO: 943103 - DNA, 15 bp, Homo sapiens
ggagtaaatgtattc

SEQ ID NO: 943104 - DNA, 15 bp, Homo sapiens
gagtaaatgtattca

SEQ ID NO: 943105 - DNA, 15 bp, Homo sapiens
agtaaatgtattcat

SEQ ID NO: 943106 - DNA, 15 bp, Homo sapiens
gtaaatgtattcata

SEQ ID NO: 943107 - DNA, 15 bp, Homo sapiens
taaatgtattcataa

SEQ ID NO: 943108 - DNA, 15 bp, Homo sapiens
aaatgtattcataaa

SEQ ID NO: 943109 - DNA, 15 bp, Homo sapiens
aatgtattcataaaa

SEQ ID NO: 943110 - DNA, 15 bp, Homo sapiens
atgtattcataaaat

SEQ ID NO: 943111 - DNA, 15 bp, Homo sapiens
tgtattcataaaatt

SEQ ID NO: 943112 - DNA, 15 bp, Homo sapiens
gtattcataaaattc

SEQ ID NO: 943113 - DNA, 15 bp, Homo sapiens
tattcataaaattct

SEQ ID NO: 943114 - DNA, 15 bp, Homo sapiens
attcataaaattctc

SEQ ID NO: 943115 - DNA, 15 bp, Homo sapiens
ttcataaaattctct

SEQ ID NO: 943116 - DNA, 15 bp, Homo sapiens
tcataaaattctcta

SEQ ID NO: 943117 - DNA, 15 bp, Homo sapiens
cataaaattctctag

SEQ ID NO: 943118 - DNA, 15 bp, Homo sapiens
ataaaattctctagt

SEQ ID NO: 943119 - DNA, 15 bp, Homo sapiens
taaaattctctagtc

SEQ ID NO: 943120 - DNA, 15 bp, Homo sapiens
aaaattctctagtca

SEQ ID NO: 943121 - DNA, 15 bp, Homo sapiens
aaattctctagtcat

SEQ ID NO: 943122 - DNA, 15 bp, Homo sapiens
aattctctagtcatt

SEQ ID NO: 943123 - DNA, 15 bp, Homo sapiens
attctctagtcattt

SEQ ID NO: 943124 - DNA, 15 bp, Homo sapiens
ttctctagtcatttt

SEQ ID NO: 943125 - DNA, 15 bp, Homo sapiens
tctctagtcattttt

SEQ ID NO: 943126 - DNA, 15 bp, Homo sapiens
ctctagtcattttta

SEQ ID NO: 943127 - DNA, 15 bp, Homo sapiens
tctagtcatttttaa

SEQ ID NO: 943128 - DNA, 15 bp, Homo sapiens
ctagtcatttttaaa

SEQ ID NO: 943129 - DNA, 15 bp, Homo sapiens
tagtcatttttaaat

SEQ ID NO: 943130 - DNA, 15 bp, Homo sapiens
agtcatttttaaata

SEQ ID NO: 943131 - DNA, 15 bp, Homo sapiens
gtcatttttaaatat

SEQ ID NO: 943132 - DNA, 15 bp, Homo sapiens
tcatttttaaatatt

SEQ ID NO: 943133 - DNA, 15 bp, Homo sapiens
catttttaaatattt

SEQ ID NO: 943134 - DNA, 15 bp, Homo sapiens
atttttaaatattta

SEQ ID NO: 943135 - DNA, 15 bp, Homo sapiens
tttttaaatatttag

SEQ ID NO: 943136 - DNA, 15 bp, Homo sapiens
ttttaaatatttagt

SEQ ID NO: 943137 - DNA, 15 bp, Homo sapiens
tttaaatatttagtc

SEQ ID NO: 943138 - DNA, 15 bp, Homo sapiens
ttaaatatttagtct

SEQ ID NO: 943139 - DNA, 15 bp, Homo sapiens
taaatatttagtctt

SEQ ID NO: 943140 - DNA, 15 bp, Homo sapiens
aaatatttagtcttc

SEQ ID NO: 943141 - DNA, 15 bp, Homo sapiens
aatatttagtcttcc

SEQ ID NO: 943142 - DNA, 15 bp, Homo sapiens
atatttagtcttcct

SEQ ID NO: 943143 - DNA, 15 bp, Homo sapiens
tatttagtcttcctc

SEQ ID NO: 943144 - DNA, 15 bp, Homo sapiens
atttagtcttcctct

SEQ ID NO: 943145 - DNA, 15 bp, Homo sapiens
tttagtcttcctctt

SEQ ID NO: 943146 - DNA, 15 bp, Homo sapiens
ttagtcttcctcttt

SEQ ID NO: 943147 - DNA, 15 bp, Homo sapiens
tagtcttcctctttc

SEQ ID NO: 943148 - DNA, 15 bp, Homo sapiens
agtcttcctctttct

SEQ ID NO: 943149 - DNA, 15 bp, Homo sapiens
gtcttcctctttctc

SEQ ID NO: 943150 - DNA, 15 bp, Homo sapiens
tcttcctctttctca

SEQ ID NO: 943151 - DNA, 15 bp, Homo sapiens
cttcctctttctcat

SEQ ID NO: 943152 - DNA, 15 bp, Homo sapiens
ttcctctttctcatt

SEQ ID NO: 943153 - DNA, 15 bp, Homo sapiens
tcctctttctcattg

SEQ ID NO: 943154 - DNA, 15 bp, Homo sapiens
cctctttctcattga

SEQ ID NO: 943155 - DNA, 15 bp, Homo sapiens
ctctttctcattgac

SEQ ID NO: 943156 - DNA, 15 bp, Homo sapiens
tctttctcattgacc

SEQ ID NO: 943157 - DNA, 15 bp, Homo sapiens
ctttctcattgacct

SEQ ID NO: 943158 - DNA, 15 bp, Homo sapiens
tttctcattgacctt

SEQ ID NO: 943159 - DNA, 15 bp, Homo sapiens
ttctcattgaccttg

SEQ ID NO: 943160 - DNA, 15 bp, Homo sapiens
tctcattgaccttgc

SEQ ID NO: 943161 - DNA, 15 bp, Homo sapiens
ctcattgaccttgca

SEQ ID NO: 943162 - DNA, 15 bp, Homo sapiens
tcattgaccttgcac

SEQ ID NO: 943163 - DNA, 15 bp, Homo sapiens
cattgaccttgcact

SEQ ID NO: 943164 - DNA, 15 bp, Homo sapiens
attgaccttgcacta

SEQ ID NO: 943165 - DNA, 15 bp, Homo sapiens
ttgaccttgcactat

SEQ ID NO: 943166 - DNA, 15 bp, Homo sapiens
tgaccttgcactatt

SEQ ID NO: 943167 - DNA, 15 bp, Homo sapiens
gaccttgcactatta

SEQ ID NO: 943168 - DNA, 15 bp, Homo sapiens
accttgcactattat

SEQ ID NO: 943169 - DNA, 15 bp, Homo sapiens
ccttgcactattatc

SEQ ID NO: 943170 - DNA, 15 bp, Homo sapiens
cttgcactattatct

SEQ ID NO: 943171 - DNA, 15 bp, Homo sapiens
ttgcactattatctg

SEQ ID NO: 943172 - DNA, 15 bp, Homo sapiens
tgcactattatctgg

SEQ ID NO: 943173 - DNA, 15 bp, Homo sapiens
gcactattatctggg

SEQ ID NO: 943174 - DNA, 15 bp, Homo sapiens
cactattatctgggt

SEQ ID NO: 943175 - DNA, 15 bp, Homo sapiens
actattatctgggtt

SEQ ID NO: 943176 - DNA, 15 bp, Homo sapiens
ctattatctgggtta

SEQ ID NO: 943177 - DNA, 15 bp, Homo sapiens
tattatctgggttaa

SEQ ID NO: 943178 - DNA, 15 bp, Homo sapiens
attatctgggttaag

SEQ ID NO: 943179 - DNA, 15 bp, Homo sapiens
ttatctgggttaagt

SEQ ID NO: 943180 - DNA, 15 bp, Homo sapiens
tatctgggttaagtg

SEQ ID NO: 943181 - DNA, 15 bp, Homo sapiens
atctgggttaagtga

SEQ ID NO: 943182 - DNA, 15 bp, Homo sapiens
tctgggttaagtgaa

SEQ ID NO: 943183 - DNA, 15 bp, Homo sapiens
ctgggttaagtgaag

SEQ ID NO: 943184 - DNA, 15 bp, Homo sapiens
tgggttaagtgaagc

SEQ ID NO: 943185 - DNA, 15 bp, Homo sapiens
gggttaagtgaagct

SEQ ID NO: 943186 - DNA, 15 bp, Homo sapiens
ggttaagtgaagcta

SEQ ID NO: 943187 - DNA, 15 bp, Homo sapiens
gttaagtgaagctaa

SEQ ID NO: 943188 - DNA, 15 bp, Homo sapiens
ttaagtgaagctaaa

SEQ ID NO: 943189 - DNA, 15 bp, Homo sapiens
taagtgaagctaaat

SEQ ID NO: 943190 - DNA, 15 bp, Homo sapiens
aagtgaagctaaatt

SEQ ID NO: 943191 - DNA, 15 bp, Homo sapiens
agtgaagctaaattt

SEQ ID NO: 943192 - DNA, 15 bp, Homo sapiens
gtgaagctaaatttt

SEQ ID NO: 943193 - DNA, 15 bp, Homo sapiens
tgaagctaaatttta

SEQ ID NO: 943194 - DNA, 15 bp, Homo sapiens
gaagctaaattttaa

SEQ ID NO: 943195 - DNA, 15 bp, Homo sapiens
aagctaaattttaag

SEQ ID NO: 943196 - DNA, 15 bp, Homo sapiens
agctaaattttaagt

SEQ ID NO: 943197 - DNA, 15 bp, Homo sapiens
gctaaattttaagta

SEQ ID NO: 943198 - DNA, 15 bp, Homo sapiens
ctaaattttaagtat

SEQ ID NO: 943199 - DNA, 15 bp, Homo sapiens
taaattttaagtata

SEQ ID NO: 943200 - DNA, 15 bp, Homo sapiens
aaattttaagtataa

SEQ ID NO: 943201 - DNA, 15 bp, Homo sapiens
aattttaagtataat

SEQ ID NO: 943202 - DNA, 15 bp, Homo sapiens
attttaagtataatt

SEQ ID NO: 943203 - DNA, 15 bp, Homo sapiens
ttttaagtataattg

SEQ ID NO: 943204 - DNA, 15 bp, Homo sapiens
tttaagtataattgc

SEQ ID NO: 943205 - DNA, 15 bp, Homo sapiens
ttaagtataattgcc

SEQ ID NO: 943206 - DNA, 15 bp, Homo sapiens
taagtataattgcct

SEQ ID NO: 943207 - DNA, 15 bp, Homo sapiens
aagtataattgcctt

SEQ ID NO: 943208 - DNA, 15 bp, Homo sapiens
agtataattgccttt

SEQ ID NO: 943209 - DNA, 15 bp, Homo sapiens
gtataattgccttta

SEQ ID NO: 943210 - DNA, 15 bp, Homo sapiens
tataattgcctttac

SEQ ID NO: 943211 - DNA, 15 bp, Homo sapiens
ataattgcctttacc

SEQ ID NO: 943212 - DNA, 15 bp, Homo sapiens
taattgcctttacca

SEQ ID NO: 943213 - DNA, 15 bp, Homo sapiens
aattgcctttaccag

SEQ ID NO: 943214 - DNA, 15 bp, Homo sapiens
attgcctttaccagc

SEQ ID NO: 943215 - DNA, 15 bp, Homo sapiens
ttgcctttaccagca

SEQ ID NO: 943216 - DNA, 15 bp, Homo sapiens
tgcctttaccagcat

SEQ ID NO: 943217 - DNA, 15 bp, Homo sapiens
gcctttaccagcata

SEQ ID NO: 943218 - DNA, 15 bp, Homo sapiens
cctttaccagcatat

SEQ ID NO: 943219 - DNA, 15 bp, Homo sapiens
ctttaccagcatatt

SEQ ID NO: 943220 - DNA, 15 bp, Homo sapiens
tttaccagcatattg

SEQ ID NO: 943221 - DNA, 15 bp, Homo sapiens
ttaccagcatattgc

SEQ ID NO: 943222 - DNA, 15 bp, Homo sapiens
taccagcatattgca

SEQ ID NO: 943223 - DNA, 15 bp, Homo sapiens
accagcatattgcaa

SEQ ID NO: 943224 - DNA, 15 bp, Homo sapiens
ccagcatattgcaat

SEQ ID NO: 943225 - DNA, 15 bp, Homo sapiens
cagcatattgcaatg

SEQ ID NO: 943226 - DNA, 15 bp, Homo sapiens
agcatattgcaatgt

SEQ ID NO: 943227 - DNA, 15 bp, Homo sapiens
gcatattgcaatgta

SEQ ID NO: 943228 - DNA, 15 bp, Homo sapiens
catattgcaatgtaa

SEQ ID NO: 943229 - DNA, 15 bp, Homo sapiens
atattgcaatgtaag

SEQ ID NO: 943230 - DNA, 15 bp, Homo sapiens
tattgcaatgtaagc

SEQ ID NO: 943231 - DNA, 15 bp, Homo sapiens
attgcaatgtaagca

SEQ ID NO: 943232 - DNA, 15 bp, Homo sapiens
ttgcaatgtaagcaa

SEQ ID NO: 943233 - DNA, 15 bp, Homo sapiens
tgcaatgtaagcaag

SEQ ID NO: 943234 - DNA, 15 bp, Homo sapiens
gcaatgtaagcaagt

SEQ ID NO: 943235 - DNA, 15 bp, Homo sapiens
caatgtaagcaagtt

SEQ ID NO: 943236 - DNA, 15 bp, Homo sapiens
aatgtaagcaagttg

SEQ ID NO: 943237 - DNA, 15 bp, Homo sapiens
atgtaagcaagttgc

SEQ ID NO: 943238 - DNA, 15 bp, Homo sapiens
tgtaagcaagttgcg

SEQ ID NO: 943239 - DNA, 15 bp, Homo sapiens
gtaagcaagttgcgc

SEQ ID NO: 943240 - DNA, 15 bp, Homo sapiens
taagcaagttgcgca

SEQ ID NO: 943241 - DNA, 15 bp, Homo sapiens
aagcaagttgcgcat

SEQ ID NO: 943242 - DNA, 15 bp, Homo sapiens
agcaagttgcgcatc

SEQ ID NO: 943243 - DNA, 15 bp, Homo sapiens
gcaagttgcgcatca

SEQ ID NO: 943244 - DNA, 15 bp, Homo sapiens
caagttgcgcatcag

SEQ ID NO: 943245 - DNA, 15 bp, Homo sapiens
aagttgcgcatcagg

SEQ ID NO: 943246 - DNA, 15 bp, Homo sapiens
agttgcgcatcaggc

SEQ ID NO: 943247 - DNA, 15 bp, Homo sapiens
gttgcgcatcaggca

SEQ ID NO: 943248 - DNA, 15 bp, Homo sapiens
ttgcgcatcaggcag

SEQ ID NO: 943249 - DNA, 15 bp, Homo sapiens
tgcgcatcaggcaga

SEQ ID NO: 943250 - DNA, 15 bp, Homo sapiens
gcgcatcaggcagaa

SEQ ID NO: 943251 - DNA, 15 bp, Homo sapiens
cgcatcaggcagaat

SEQ ID NO: 943252 - DNA, 15 bp, Homo sapiens
gcatcaggcagaatc

SEQ ID NO: 943253 - DNA, 15 bp, Homo sapiens
catcaggcagaatct

SEQ ID NO: 943254 - DNA, 15 bp, Homo sapiens
atcaggcagaatctg

SEQ ID NO: 943255 - DNA, 15 bp, Homo sapiens
tcaggcagaatctga

SEQ ID NO: 943256 - DNA, 15 bp, Homo sapiens
caggcagaatctgat

SEQ ID NO: 943257 - DNA, 15 bp, Homo sapiens
aggcagaatctgata

SEQ ID NO: 943258 - DNA, 15 bp, Homo sapiens
ggcagaatctgatag

SEQ ID NO: 943259 - DNA, 15 bp, Homo sapiens
gcagaatctgataga

SEQ ID NO: 943260 - DNA, 15 bp, Homo sapiens
cagaatctgatagaa

SEQ ID NO: 943261 - DNA, 15 bp, Homo sapiens
agaatctgatagaag

SEQ ID NO: 943262 - DNA, 15 bp, Homo sapiens
gaatctgatagaagt

SEQ ID NO: 943263 - DNA, 15 bp, Homo sapiens
aatctgatagaagtc

SEQ ID NO: 943264 - DNA, 15 bp, Homo sapiens
atctgatagaagtca

SEQ ID NO: 943265 - DNA, 15 bp, Homo sapiens
tctgatagaagtcag

SEQ ID NO: 943266 - DNA, 15 bp, Homo sapiens
ctgatagaagtcagg

SEQ ID NO: 943267 - DNA, 15 bp, Homo sapiens
tgatagaagtcagga

SEQ ID NO: 943268 - DNA, 15 bp, Homo sapiens
gatagaagtcaggat

SEQ ID NO: 943269 - DNA, 15 bp, Homo sapiens
atagaagtcaggatt

SEQ ID NO: 943270 - DNA, 15 bp, Homo sapiens
tagaagtcaggattg

SEQ ID NO: 943271 - DNA, 15 bp, Homo sapiens
agaagtcaggattga

SEQ ID NO: 943272 - DNA, 15 bp, Homo sapiens
gaagtcaggattgat

SEQ ID NO: 943273 - DNA, 15 bp, Homo sapiens
aagtcaggattgatt

SEQ ID NO: 943274 - DNA, 15 bp, Homo sapiens
agtcaggattgattt

SEQ ID NO: 943275 - DNA, 15 bp, Homo sapiens
gtcaggattgatttg

SEQ ID NO: 943276 - DNA, 15 bp, Homo sapiens
tcaggattgatttgg

SEQ ID NO: 943277 - DNA, 15 bp, Homo sapiens
caggattgatttggt

SEQ ID NO: 943278 - DNA, 15 bp, Homo sapiens
aggattgatttggtt

SEQ ID NO: 943279 - DNA, 15 bp, Homo sapiens
ggattgatttggttg

SEQ ID NO: 943280 - DNA, 15 bp, Homo sapiens
gattgatttggttga

SEQ ID NO: 943281 - DNA, 15 bp, Homo sapiens
attgatttggttgaa

SEQ ID NO: 943282 - DNA, 15 bp, Homo sapiens
ttgatttggttgaag

SEQ ID NO: 943283 - DNA, 15 bp, Homo sapiens
tgatttggttgaagg

SEQ ID NO: 943284 - DNA, 15 bp, Homo sapiens
gatttggttgaagga

SEQ ID NO: 943285 - DNA, 15 bp, Homo sapiens
atttggttgaaggaa

SEQ ID NO: 943286 - DNA, 15 bp, Homo sapiens
tttggttgaaggaaa

SEQ ID NO: 943287 - DNA, 15 bp, Homo sapiens
ttggttgaaggaaat

SEQ ID NO: 943288 - DNA, 15 bp, Homo sapiens
tggttgaaggaaatt

SEQ ID NO: 943289 - DNA, 15 bp, Homo sapiens
ggttgaaggaaattt

SEQ ID NO: 943290 - DNA, 15 bp, Homo sapiens
gttgaaggaaatttg

SEQ ID NO: 943291 - DNA, 15 bp, Homo sapiens
ttgaaggaaatttgt

SEQ ID NO: 943292 - DNA, 15 bp, Homo sapiens
tgaaggaaatttgtg

SEQ ID NO: 943293 - DNA, 15 bp, Homo sapiens
gaaggaaatttgtga

SEQ ID NO: 943294 - DNA, 15 bp, Homo sapiens
aaggaaatttgtgaa

SEQ ID NO: 943295 - DNA, 15 bp, Homo sapiens
aggaaatttgtgaaa

SEQ ID NO: 943296 - DNA, 15 bp, Homo sapiens
ggaaatttgtgaaaa

SEQ ID NO: 943297 - DNA, 15 bp, Homo sapiens
gaaatttgtgaaaaa

SEQ ID NO: 943298 - DNA, 15 bp, Homo sapiens
aaatttgtgaaaaaa

SEQ ID NO: 943299 - DNA, 15 bp, Homo sapiens
aatttgtgaaaaaat

SEQ ID NO: 943300 - DNA, 15 bp, Homo sapiens
atttgtgaaaaaata

SEQ ID NO: 943301 - DNA, 15 bp, Homo sapiens
tttgtgaaaaaataa

SEQ ID NO: 943302 - DNA, 15 bp, Homo sapiens
ttgtgaaaaaataat

SEQ ID NO: 943303 - DNA, 15 bp, Homo sapiens
tgtgaaaaaataata

SEQ ID NO: 943304 - DNA, 15 bp, Homo sapiens
gtgaaaaaataataa

SEQ ID NO: 943305 - DNA, 15 bp, Homo sapiens
gaaaaaataataata

SEQ ID NO: 943306 - DNA, 15 bp, Homo sapiens
aaaaataataataaa

SEQ ID NO: 943307 - DNA, 15 bp, Homo sapiens
aaaataataataaaa

SEQ ID NO: 943308 - DNA, 15 bp, Homo sapiens
aaataataataaaat

SEQ ID NO: 943309 - DNA, 15 bp, Homo sapiens
aataataataaaata

SEQ ID NO: 943310 - DNA, 15 bp, Homo sapiens
ataataataaaataa

SEQ ID NO: 943311 - DNA, 15 bp, Homo sapiens
taataataaaataaa

SEQ ID NO: 943312 - DNA, 15 bp, Homo sapiens
ataataaaataaaaa

SEQ ID NO: 943313 - DNA, 15 bp, Homo sapiens
taataaaataaaaat

SEQ ID NO: 943314 - DNA, 15 bp, Homo sapiens
aataaaataaaaatt

SEQ ID NO: 943315 - DNA, 15 bp, Homo sapiens
ataaaataaaaatta

SEQ ID NO: 943316 - DNA, 15 bp, Homo sapiens
taaaataaaaattaa

SEQ ID NO: 943317 - DNA, 15 bp, Homo sapiens
aaaataaaaattaaa

SEQ ID NO: 943318 - DNA, 15 bp, Homo sapiens
aaataaaaattaaaa

SEQ ID NO: 943319 - DNA, 15 bp, Homo sapiens
aataaaaattaaaaa

SEQ ID NO: 943320 - DNA, 15 bp, Homo sapiens
ataaaaattaaaaac

SEQ ID NO: 943321 - DNA, 15 bp, Homo sapiens
taaaaattaaaaact

SEQ ID NO: 943322 - DNA, 15 bp, Homo sapiens
aaaaattaaaaacta

SEQ ID NO: 943323 - DNA, 15 bp, Homo sapiens
aaaattaaaaactac

SEQ ID NO: 943324 - DNA, 15 bp, Homo sapiens
aaattaaaaactaca

SEQ ID NO: 943325 - DNA, 15 bp, Homo sapiens
aattaaaaactacaa

SEQ ID NO: 943326 - DNA, 15 bp, Homo sapiens
attaaaaactacaat

SEQ ID NO: 943327 - DNA, 15 bp, Homo sapiens
ttaaaaactacaatt

SEQ ID NO: 943328 - DNA, 15 bp, Homo sapiens
taaaaactacaattg

SEQ ID NO: 943329 - DNA, 15 bp, Homo sapiens
aaaaactacaattga

SEQ ID NO: 943330 - DNA, 15 bp, Homo sapiens
aaaactacaattgat

SEQ ID NO: 943331 - DNA, 15 bp, Homo sapiens
aaactacaattgata

SEQ ID NO: 943332 - DNA, 15 bp, Homo sapiens
aactacaattgataa

SEQ ID NO: 943333 - DNA, 15 bp, Homo sapiens
actacaattgataaa

SEQ ID NO: 943334 - DNA, 15 bp, Homo sapiens
ctacaattgataaat

SEQ ID NO: 943335 - DNA, 15 bp, Homo sapiens
tacaattgataaatg

SEQ ID NO: 943336 - DNA, 15 bp, Homo sapiens
acaattgataaatgg

SEQ ID NO: 943337 - DNA, 15 bp, Homo sapiens
caattgataaatggt

SEQ ID NO: 943338 - DNA, 15 bp, Homo sapiens
aattgataaatggtg

SEQ ID NO: 943339 - DNA, 15 bp, Homo sapiens
attgataaatggtgc

SEQ ID NO: 943340 - DNA, 15 bp, Homo sapiens
ttgataaatggtgct

SEQ ID NO: 943341 - DNA, 15 bp, Homo sapiens
tgataaatggtgctg

SEQ ID NO: 943342 - DNA, 15 bp, Homo sapiens
gataaatggtgctgg

SEQ ID NO: 943343 - DNA, 15 bp, Homo sapiens
taaatggtgctgggc

SEQ ID NO: 943344 - DNA, 15 bp, Homo sapiens
aaatggtgctgggca

SEQ ID NO: 943345 - DNA, 15 bp, Homo sapiens
aatggtgctgggcac

SEQ ID NO: 943346 - DNA, 15 bp, Homo sapiens
atggtgctgggcaca

SEQ ID NO: 943347 - DNA, 15 bp, Homo sapiens
tggtgctgggcacaa

SEQ ID NO: 943348 - DNA, 15 bp, Homo sapiens
ggtgctgggcacaag

SEQ ID NO: 943349 - DNA, 15 bp, Homo sapiens
gtgctgggcacaagg

SEQ ID NO: 943350 - DNA, 15 bp, Homo sapiens
tgctgggcacaagga

SEQ ID NO: 943351 - DNA, 15 bp, Homo sapiens
gctgggcacaaggag

SEQ ID NO: 943352 - DNA, 15 bp, Homo sapiens
ctgggcacaaggaga

SEQ ID NO: 943353 - DNA, 15 bp, Homo sapiens
tgggcacaaggagaa

SEQ ID NO: 943354 - DNA, 15 bp, Homo sapiens
gggcacaaggagaag

SEQ ID NO: 943355 - DNA, 15 bp, Homo sapiens
ggcacaaggagaaga

SEQ ID NO: 943356 - DNA, 15 bp, Homo sapiens
gcacaaggagaagaa

SEQ ID NO: 943357 - DNA, 15 bp, Homo sapiens
cacaaggagaagaac

SEQ ID NO: 943358 - DNA, 15 bp, Homo sapiens
acaaggagaagaacc

SEQ ID NO: 943359 - DNA, 15 bp, Homo sapiens
caaggagaagaacct

SEQ ID NO: 943360 - DNA, 15 bp, Homo sapiens
aaggagaagaacctg

SEQ ID NO: 943361 - DNA, 15 bp, Homo sapiens
aggagaagaacctga

SEQ ID NO: 943362 - DNA, 15 bp, Homo sapiens
ggagaagaacctgaa

SEQ ID NO: 943363 - DNA, 15 bp, Homo sapiens
gagaagaacctgaag

SEQ ID NO: 943364 - DNA, 15 bp, Homo sapiens
agaagaacctgaagg

SEQ ID NO: 943365 - DNA, 15 bp, Homo sapiens
gaagaacctgaagga

SEQ ID NO: 943366 - DNA, 15 bp, Homo sapiens
aagaacctgaaggag

SEQ ID NO: 943367 - DNA, 15 bp, Homo sapiens
agaacctgaaggagg

SEQ ID NO: 943368 - DNA, 15 bp, Homo sapiens
gaacctgaaggaggt

SEQ ID NO: 943369 - DNA, 15 bp, Homo sapiens
aacctgaaggaggtt

SEQ ID NO: 943370 - DNA, 15 bp, Homo sapiens
acctgaaggaggttt

SEQ ID NO: 943371 - DNA, 15 bp, Homo sapiens
cctgaaggaggtttg

SEQ ID NO: 943372 - DNA, 15 bp, Homo sapiens
ctgaaggaggtttgc

SEQ ID NO: 943373 - DNA, 15 bp, Homo sapiens
tgaaggaggtttgcc

SEQ ID NO: 943374 - DNA, 15 bp, Homo sapiens
gaaggaggtttgcct

SEQ ID NO: 943375 - DNA, 15 bp, Homo sapiens
aaggaggtttgcctg

SEQ ID NO: 943376 - DNA, 15 bp, Homo sapiens
aggaggtttgcctga

SEQ ID NO: 943377 - DNA, 15 bp, Homo sapiens
ggaggtttgcctgaa

SEQ ID NO: 943378 - DNA, 15 bp, Homo sapiens
gaggtttgcctgaat

SEQ ID NO: 943379 - DNA, 15 bp, Homo sapiens
aggtttgcctgaata

SEQ ID NO: 943380 - DNA, 15 bp, Homo sapiens
ggtttgcctgaatac

SEQ ID NO: 943381 - DNA, 15 bp, Homo sapiens
gtttgcctgaatact

SEQ ID NO: 943382 - DNA, 15 bp, Homo sapiens
tttgcctgaatactg

SEQ ID NO: 943383 - DNA, 15 bp, Homo sapiens
ttgcctgaatactgt

SEQ ID NO: 943384 - DNA, 15 bp, Homo sapiens
tgcctgaatactgtt

SEQ ID NO: 943385 - DNA, 15 bp, Homo sapiens
gcctgaatactgttt

SEQ ID NO: 943386 - DNA, 15 bp, Homo sapiens
cctgaatactgtttt

SEQ ID NO: 943387 - DNA, 15 bp, Homo sapiens
ctgaatactgttttc

SEQ ID NO: 943388 - DNA, 15 bp, Homo sapiens
tgaatactgttttca

SEQ ID NO: 943389 - DNA, 15 bp, Homo sapiens
gaatactgttttcag

SEQ ID NO: 943390 - DNA, 15 bp, Homo sapiens
aatactgttttcaga

SEQ ID NO: 943391 - DNA, 15 bp, Homo sapiens
atactgttttcagag

SEQ ID NO: 943392 - DNA, 15 bp, Homo sapiens
tactgttttcagagc

SEQ ID NO: 943393 - DNA, 15 bp, Homo sapiens
actgttttcagagct

SEQ ID NO: 943394 - DNA, 15 bp, Homo sapiens
ctgttttcagagctg

SEQ ID NO: 943395 - DNA, 15 bp, Homo sapiens
tgttttcagagctga

SEQ ID NO: 943396 - DNA, 15 bp, Homo sapiens
gttttcagagctgat

SEQ ID NO: 943397 - DNA, 15 bp, Homo sapiens
ttttcagagctgata

SEQ ID NO: 943398 - DNA, 15 bp, Homo sapiens
tttcagagctgatac

SEQ ID NO: 943399 - DNA, 15 bp, Homo sapiens
ttcagagctgatact

SEQ ID NO: 943400 - DNA, 15 bp, Homo sapiens
tcagagctgatactt

SEQ ID NO: 943401 - DNA, 15 bp, Homo sapiens
cagagctgatacttt

SEQ ID NO: 943402 - DNA, 15 bp, Homo sapiens
agagctgatactttt

SEQ ID NO: 943403 - DNA, 15 bp, Homo sapiens
gagctgatactttta

SEQ ID NO: 943404 - DNA, 15 bp, Homo sapiens
agctgatacttttat

SEQ ID NO: 943405 - DNA, 15 bp, Homo sapiens
gctgatacttttatt

SEQ ID NO: 943406 - DNA, 15 bp, Homo sapiens
ctgatacttttattt

SEQ ID NO: 943407 - DNA, 15 bp, Homo sapiens
tgatacttttatttt

SEQ ID NO: 943408 - DNA, 15 bp, Homo sapiens
gatacttttattttc

SEQ ID NO: 943409 - DNA, 15 bp, Homo sapiens
atacttttattttcc

SEQ ID NO: 943410 - DNA, 15 bp, Homo sapiens
tacttttattttcct

SEQ ID NO: 943411 - DNA, 15 bp, Homo sapiens
acttttattttcctt

SEQ ID NO: 943412 - DNA, 15 bp, Homo sapiens
cttttattttccttc

SEQ ID NO: 943413 - DNA, 15 bp, Homo sapiens
ttttattttccttct

SEQ ID NO: 943414 - DNA, 15 bp, Homo sapiens
tttattttccttcta

SEQ ID NO: 943415 - DNA, 15 bp, Homo sapiens
ttattttccttctaa

SEQ ID NO: 943416 - DNA, 15 bp, Homo sapiens
tattttccttctaaa

SEQ ID NO: 943417 - DNA, 15 bp, Homo sapiens
attttccttctaaaa

SEQ ID NO: 943418 - DNA, 15 bp, Homo sapiens
ttttccttctaaaac

SEQ ID NO: 943419 - DNA, 15 bp, Homo sapiens
tttccttctaaaacc

SEQ ID NO: 943420 - DNA, 15 bp, Homo sapiens
ttccttctaaaacct

SEQ ID NO: 943421 - DNA, 15 bp, Homo sapiens
tccttctaaaacctg

SEQ ID NO: 943422 - DNA, 15 bp, Homo sapiens
ccttctaaaacctga

SEQ ID NO: 943423 - DNA, 15 bp, Homo sapiens
cttctaaaacctgaa

SEQ ID NO: 943424 - DNA, 15 bp, Homo sapiens
ttctaaaacctgaat

SEQ ID NO: 943425 - DNA, 15 bp, Homo sapiens
tctaaaacctgaatt

SEQ ID NO: 943426 - DNA, 15 bp, Homo sapiens
ctaaaacctgaattg

SEQ ID NO: 943427 - DNA, 15 bp, Homo sapiens
taaaacctgaattgc

SEQ ID NO: 943428 - DNA, 15 bp, Homo sapiens
aaaacctgaattgcc

SEQ ID NO: 943429 - DNA, 15 bp, Homo sapiens
aaacctgaattgcct

SEQ ID NO: 943430 - DNA, 15 bp, Homo sapiens
aacctgaattgcctc

SEQ ID NO: 943431 - DNA, 15 bp, Homo sapiens
acctgaattgcctca

SEQ ID NO: 943432 - DNA, 15 bp, Homo sapiens
cctgaattgcctcac

SEQ ID NO: 943433 - DNA, 15 bp, Homo sapiens
ctgaattgcctcaca

SEQ ID NO: 943434 - DNA, 15 bp, Homo sapiens
tgaattgcctcacag

SEQ ID NO: 943435 - DNA, 15 bp, Homo sapiens
gaattgcctcacaga

SEQ ID NO: 943436 - DNA, 15 bp, Homo sapiens
aattgcctcacagat

SEQ ID NO: 943437 - DNA, 15 bp, Homo sapiens
attgcctcacagata

SEQ ID NO: 943438 - DNA, 15 bp, Homo sapiens
ttgcctcacagataa

SEQ ID NO: 943439 - DNA, 15 bp, Homo sapiens
tgcctcacagataaa

SEQ ID NO: 943440 - DNA, 15 bp, Homo sapiens
gcctcacagataaaa

SEQ ID NO: 943441 - DNA, 15 bp, Homo sapiens
cctcacagataaaaa

SEQ ID NO: 943442 - DNA, 15 bp, Homo sapiens
ctcacagataaaaat

SEQ ID NO: 943443 - DNA, 15 bp, Homo sapiens
tcacagataaaaatt

SEQ ID NO: 943444 - DNA, 15 bp, Homo sapiens
cacagataaaaattc

SEQ ID NO: 943445 - DNA, 15 bp, Homo sapiens
acagataaaaattct

SEQ ID NO: 943446 - DNA, 15 bp, Homo sapiens
cagataaaaattctt

SEQ ID NO: 943447 - DNA, 15 bp, Homo sapiens
agataaaaattcttt

SEQ ID NO: 943448 - DNA, 15 bp, Homo sapiens
gataaaaattctttt

SEQ ID NO: 943449 - DNA, 15 bp, Homo sapiens
ataaaaattctttta

SEQ ID NO: 943450 - DNA, 15 bp, Homo sapiens
taaaaattcttttaa

SEQ ID NO: 943451 - DNA, 15 bp, Homo sapiens
aaaaattcttttaaa

SEQ ID NO: 943452 - DNA, 15 bp, Homo sapiens
aaaattcttttaaaa

SEQ ID NO: 943453 - DNA, 15 bp, Homo sapiens
aaattcttttaaaaa

SEQ ID NO: 943454 - DNA, 15 bp, Homo sapiens
aattcttttaaaaat

SEQ ID NO: 943455 - DNA, 15 bp, Homo sapiens
attcttttaaaaatt

SEQ ID NO: 943456 - DNA, 15 bp, Homo sapiens
ttcttttaaaaattt

SEQ ID NO: 943457 - DNA, 15 bp, Homo sapiens
tcttttaaaaatttc

SEQ ID NO: 943458 - DNA, 15 bp, Homo sapiens
cttttaaaaatttca

SEQ ID NO: 943459 - DNA, 15 bp, Homo sapiens
ttttaaaaatttcaa

SEQ ID NO: 943460 - DNA, 15 bp, Homo sapiens
tttaaaaatttcaaa

SEQ ID NO: 943461 - DNA, 15 bp, Homo sapiens
ttaaaaatttcaaaa

SEQ ID NO: 943462 - DNA, 15 bp, Homo sapiens
taaaaatttcaaaag

SEQ ID NO: 943463 - DNA, 15 bp, Homo sapiens
aaaaatttcaaaagc

SEQ ID NO: 943464 - DNA, 15 bp, Homo sapiens
atttcaaaagcaaag

SEQ ID NO: 943465 - DNA, 15 bp, Homo sapiens
tttcaaaagcaaagt

SEQ ID NO: 943466 - DNA, 15 bp, Homo sapiens
ttcaaaagcaaagtt

SEQ ID NO: 943467 - DNA, 15 bp, Homo sapiens
tcaaaagcaaagttg

SEQ ID NO: 943468 - DNA, 15 bp, Homo sapiens
caaaagcaaagttgt

SEQ ID NO: 943469 - DNA, 15 bp, Homo sapiens
aaaagcaaagttgtt

SEQ ID NO: 943470 - DNA, 15 bp, Homo sapiens
aaagcaaagttgttc

SEQ ID NO: 943471 - DNA, 15 bp, Homo sapiens
aagcaaagttgttct

SEQ ID NO: 943472 - DNA, 15 bp, Homo sapiens
agcaaagttgttctt

SEQ ID NO: 943473 - DNA, 15 bp, Homo sapiens
gcaaagttgttcttc

SEQ ID NO: 943474 - DNA, 15 bp, Homo sapiens
caaagttgttcttca

SEQ ID NO: 943475 - DNA, 15 bp, Homo sapiens
aaagttgttcttcac

SEQ ID NO: 943476 - DNA, 15 bp, Homo sapiens
aagttgttcttcaca

SEQ ID NO: 943477 - DNA, 15 bp, Homo sapiens
agttgttcttcacaa

SEQ ID NO: 943478 - DNA, 15 bp, Homo sapiens
gttgttcttcacaat

SEQ ID NO: 943479 - DNA, 15 bp, Homo sapiens
ttgttcttcacaata

SEQ ID NO: 943480 - DNA, 15 bp, Homo sapiens
tgttcttcacaataa

SEQ ID NO: 943481 - DNA, 15 bp, Homo sapiens
gttcttcacaataat

SEQ ID NO: 943482 - DNA, 15 bp, Homo sapiens
ttcttcacaataatt

SEQ ID NO: 943483 - DNA, 15 bp, Homo sapiens
tcttcacaataatta

SEQ ID NO: 943484 - DNA, 15 bp, Homo sapiens
cttcacaataattat

SEQ ID NO: 943485 - DNA, 15 bp, Homo sapiens
ttcacaataattata

SEQ ID NO: 943486 - DNA, 15 bp, Homo sapiens
tcacaataattatat

SEQ ID NO: 943487 - DNA, 15 bp, Homo sapiens
cacaataattatata

SEQ ID NO: 943488 - DNA, 15 bp, Homo sapiens
acaataattatatat

SEQ ID NO: 943489 - DNA, 15 bp, Homo sapiens
caataattatatatt

SEQ ID NO: 943490 - DNA, 15 bp, Homo sapiens
aataattatatatta

SEQ ID NO: 943491 - DNA, 15 bp, Homo sapiens
ataattatatattat

SEQ ID NO: 943492 - DNA, 15 bp, Homo sapiens
taattatatattata

SEQ ID NO: 943493 - DNA, 15 bp, Homo sapiens
aattatatattatag

SEQ ID NO: 943494 - DNA, 15 bp, Homo sapiens
attatatattatagc

SEQ ID NO: 943495 - DNA, 15 bp, Homo sapiens
ttatatattatagca

SEQ ID NO: 943496 - DNA, 15 bp, Homo sapiens
tatatattatagcaa

SEQ ID NO: 943497 - DNA, 15 bp, Homo sapiens
atatattatagcaaa

SEQ ID NO: 943498 - DNA, 15 bp, Homo sapiens
tatattatagcaaaa

SEQ ID NO: 943499 - DNA, 15 bp, Homo sapiens
atattatagcaaaaa

SEQ ID NO: 943500 - DNA, 15 bp, Homo sapiens
tattatagcaaaaat

SEQ ID NO: 943501 - DNA, 15 bp, Homo sapiens
attatagcaaaaatt

SEQ ID NO: 943502 - DNA, 15 bp, Homo sapiens
ttatagcaaaaattg

SEQ ID NO: 943503 - DNA, 15 bp, Homo sapiens
tatagcaaaaattgg

SEQ ID NO: 943504 - DNA, 15 bp, Homo sapiens
atagcaaaaattggg

SEQ ID NO: 943505 - DNA, 15 bp, Homo sapiens
tagcaaaaattggga

SEQ ID NO: 943506 - DNA, 15 bp, Homo sapiens
agcaaaaattgggaa

SEQ ID NO: 943507 - DNA, 15 bp, Homo sapiens
gcaaaaattgggaag

SEQ ID NO: 943508 - DNA, 15 bp, Homo sapiens
caaaaattgggaagc

SEQ ID NO: 943509 - DNA, 15 bp, Homo sapiens
aaaaattgggaagca

SEQ ID NO: 943510 - DNA, 15 bp, Homo sapiens
aaaattgggaagcaa

SEQ ID NO: 943511 - DNA, 15 bp, Homo sapiens
aaattgggaagcaac

SEQ ID NO: 943512 - DNA, 15 bp, Homo sapiens
aattgggaagcaact

SEQ ID NO: 943513 - DNA, 15 bp, Homo sapiens
attgggaagcaactt

SEQ ID NO: 943514 - DNA, 15 bp, Homo sapiens
ttgggaagcaacttg

SEQ ID NO: 943515 - DNA, 15 bp, Homo sapiens
tgggaagcaacttga

SEQ ID NO: 943516 - DNA, 15 bp, Homo sapiens
gggaagcaacttgaa

SEQ ID NO: 943517 - DNA, 15 bp, Homo sapiens
ggaagcaacttgaaa

SEQ ID NO: 943518 - DNA, 15 bp, Homo sapiens
gaagcaacttgaaaa

SEQ ID NO: 943519 - DNA, 15 bp, Homo sapiens
aagcaacttgaaaat

SEQ ID NO: 943520 - DNA, 15 bp, Homo sapiens
agcaacttgaaaatt

SEQ ID NO: 943521 - DNA, 15 bp, Homo sapiens
gcaacttgaaaattc

SEQ ID NO: 943522 - DNA, 15 bp, Homo sapiens
caacttgaaaattca

SEQ ID NO: 943523 - DNA, 15 bp, Homo sapiens
aacttgaaaattcac

SEQ ID NO: 943524 - DNA, 15 bp, Homo sapiens
acttgaaaattcaca

SEQ ID NO: 943525 - DNA, 15 bp, Homo sapiens
cttgaaaattcacaa

SEQ ID NO: 943526 - DNA, 15 bp, Homo sapiens
ttgaaaattcacaat

SEQ ID NO: 943527 - DNA, 15 bp, Homo sapiens
tgaaaattcacaata

SEQ ID NO: 943528 - DNA, 15 bp, Homo sapiens
gaaaattcacaatag

SEQ ID NO: 943529 - DNA, 15 bp, Homo sapiens
aaaattcacaataga

SEQ ID NO: 943530 - DNA, 15 bp, Homo sapiens
aaattcacaatagaa

SEQ ID NO: 943531 - DNA, 15 bp, Homo sapiens
aattcacaatagaaa

SEQ ID NO: 943532 - DNA, 15 bp, Homo sapiens
attcacaatagaaaa

SEQ ID NO: 943533 - DNA, 15 bp, Homo sapiens
ttcacaatagaaaat

SEQ ID NO: 943534 - DNA, 15 bp, Homo sapiens
tcacaatagaaaatg

SEQ ID NO: 943535 - DNA, 15 bp, Homo sapiens
cacaatagaaaatgt

SEQ ID NO: 943536 - DNA, 15 bp, Homo sapiens
acaatagaaaatgtg

SEQ ID NO: 943537 - DNA, 15 bp, Homo sapiens
caatagaaaatgtgc

SEQ ID NO: 943538 - DNA, 15 bp, Homo sapiens
aatagaaaatgtgct

SEQ ID NO: 943539 - DNA, 15 bp, Homo sapiens
atagaaaatgtgcta

SEQ ID NO: 943540 - DNA, 15 bp, Homo sapiens
tagaaaatgtgctaa

SEQ ID NO: 943541 - DNA, 15 bp, Homo sapiens
agaaaatgtgctaaa

SEQ ID NO: 943542 - DNA, 15 bp, Homo sapiens
gaaaatgtgctaaat

SEQ ID NO: 943543 - DNA, 15 bp, Homo sapiens
aaaatgtgctaaata

SEQ ID NO: 943544 - DNA, 15 bp, Homo sapiens
aaatgtgctaaataa

SEQ ID NO: 943545 - DNA, 15 bp, Homo sapiens
aatgtgctaaataaa

SEQ ID NO: 943546 - DNA, 15 bp, Homo sapiens
atgtgctaaataaat

SEQ ID NO: 943547 - DNA, 15 bp, Homo sapiens
tgtgctaaataaatc

SEQ ID NO: 943548 - DNA, 15 bp, Homo sapiens
gtgctaaataaatca

SEQ ID NO: 943549 - DNA, 15 bp, Homo sapiens
tgctaaataaatcac

SEQ ID NO: 943550 - DNA, 15 bp, Homo sapiens
gctaaataaatcact

SEQ ID NO: 943551 - DNA, 15 bp, Homo sapiens
ctaaataaatcactg

SEQ ID NO: 943552 - DNA, 15 bp, Homo sapiens
taaataaatcactga

SEQ ID NO: 943553 - DNA, 15 bp, Homo sapiens
aaataaatcactgaa

SEQ ID NO: 943554 - DNA, 15 bp, Homo sapiens
aataaatcactgaat

SEQ ID NO: 943555 - DNA, 15 bp, Homo sapiens
ataaatcactgaatg

SEQ ID NO: 943556 - DNA, 15 bp, Homo sapiens
taaatcactgaatgt

SEQ ID NO: 943557 - DNA, 15 bp, Homo sapiens
aaatcactgaatgta

SEQ ID NO: 943558 - DNA, 15 bp, Homo sapiens
aatcactgaatgtaa

SEQ ID NO: 943559 - DNA, 15 bp, Homo sapiens
atcactgaatgtaat

SEQ ID NO: 943560 - DNA, 15 bp, Homo sapiens
tcactgaatgtaata

SEQ ID NO: 943561 - DNA, 15 bp, Homo sapiens
cactgaatgtaatat

SEQ ID NO: 943562 - DNA, 15 bp, Homo sapiens
actgaatgtaatata

SEQ ID NO: 943563 - DNA, 15 bp, Homo sapiens
ctgaatgtaatatac

SEQ ID NO: 943564 - DNA, 15 bp, Homo sapiens
tgaatgtaatatacc

SEQ ID NO: 943565 - DNA, 15 bp, Homo sapiens
gaatgtaatatacca

SEQ ID NO: 943566 - DNA, 15 bp, Homo sapiens
aatgtaatataccac

SEQ ID NO: 943567 - DNA, 15 bp, Homo sapiens
atgtaatataccact

SEQ ID NO: 943568 - DNA, 15 bp, Homo sapiens
tgtaatataccactt

SEQ ID NO: 943569 - DNA, 15 bp, Homo sapiens
gtaatataccactta

SEQ ID NO: 943570 - DNA, 15 bp, Homo sapiens
taatataccacttag

SEQ ID NO: 943571 - DNA, 15 bp, Homo sapiens
aatataccacttagc

SEQ ID NO: 943572 - DNA, 15 bp, Homo sapiens
atataccacttagca

SEQ ID NO: 943573 - DNA, 15 bp, Homo sapiens
tataccacttagcac

SEQ ID NO: 943574 - DNA, 15 bp, Homo sapiens
ataccacttagcact

SEQ ID NO: 943575 - DNA, 15 bp, Homo sapiens
taccacttagcactt

SEQ ID NO: 943576 - DNA, 15 bp, Homo sapiens
accacttagcacttt

SEQ ID NO: 943577 - DNA, 15 bp, Homo sapiens
ccacttagcacttta

SEQ ID NO: 943578 - DNA, 15 bp, Homo sapiens
cacttagcactttaa

SEQ ID NO: 943579 - DNA, 15 bp, Homo sapiens
acttagcactttaaa

SEQ ID NO: 943580 - DNA, 15 bp, Homo sapiens
cttagcactttaaaa

SEQ ID NO: 943581 - DNA, 15 bp, Homo sapiens
ttagcactttaaaat

SEQ ID NO: 943582 - DNA, 15 bp, Homo sapiens
tagcactttaaaatg

SEQ ID NO: 943583 - DNA, 15 bp, Homo sapiens
agcactttaaaatgc

SEQ ID NO: 943584 - DNA, 15 bp, Homo sapiens
gcactttaaaatgct

SEQ ID NO: 943585 - DNA, 15 bp, Homo sapiens
cactttaaaatgctt

SEQ ID NO: 943586 - DNA, 15 bp, Homo sapiens
actttaaaatgcttt

SEQ ID NO: 943587 - DNA, 15 bp, Homo sapiens
ctttaaaatgctttg

SEQ ID NO: 943588 - DNA, 15 bp, Homo sapiens
tttaaaatgctttga

SEQ ID NO: 943589 - DNA, 15 bp, Homo sapiens
ttaaaatgctttgac

SEQ ID NO: 943590 - DNA, 15 bp, Homo sapiens
taaaatgctttgaca

SEQ ID NO: 943591 - DNA, 15 bp, Homo sapiens
aaaatgctttgacac

SEQ ID NO: 943592 - DNA, 15 bp, Homo sapiens
aaatgctttgacaca

SEQ ID NO: 943593 - DNA, 15 bp, Homo sapiens
aatgctttgacacaa

SEQ ID NO: 943594 - DNA, 15 bp, Homo sapiens
atgctttgacacaat

SEQ ID NO: 943595 - DNA, 15 bp, Homo sapiens
tgctttgacacaata

SEQ ID NO: 943596 - DNA, 15 bp, Homo sapiens
gctttgacacaatat

SEQ ID NO: 943597 - DNA, 15 bp, Homo sapiens
ctttgacacaatatt

SEQ ID NO: 943598 - DNA, 15 bp, Homo sapiens
tttgacacaatatta

SEQ ID NO: 943599 - DNA, 15 bp, Homo sapiens
ttgacacaatattaa

SEQ ID NO: 943600 - DNA, 15 bp, Homo sapiens
tgacacaatattaac

SEQ ID NO: 943601 - DNA, 15 bp, Homo sapiens
gacacaatattaact

SEQ ID NO: 943602 - DNA, 15 bp, Homo sapiens
acacaatattaactg

SEQ ID NO: 943603 - DNA, 15 bp, Homo sapiens
cacaatattaactga

SEQ ID NO: 943604 - DNA, 15 bp, Homo sapiens
acaatattaactgaa

SEQ ID NO: 943605 - DNA, 15 bp, Homo sapiens
caatattaactgaaa

SEQ ID NO: 943606 - DNA, 15 bp, Homo sapiens
aatattaactgaaaa

SEQ ID NO: 943607 - DNA, 15 bp, Homo sapiens
atattaactgaaaaa

SEQ ID NO: 943608 - DNA, 15 bp, Homo sapiens
tattaactgaaaaaa

SEQ ID NO: 943609 - DNA, 15 bp, Homo sapiens
attaactgaaaaaag

SEQ ID NO: 943610 - DNA, 15 bp, Homo sapiens
ttaactgaaaaaagc

SEQ ID NO: 943611 - DNA, 15 bp, Homo sapiens
taactgaaaaaagca

SEQ ID NO: 943612 - DNA, 15 bp, Homo sapiens
aactgaaaaaagcaa

SEQ ID NO: 943613 - DNA, 15 bp, Homo sapiens
actgaaaaaagcaag

SEQ ID NO: 943614 - DNA, 15 bp, Homo sapiens
ctgaaaaaagcaagt

SEQ ID NO: 943615 - DNA, 15 bp, Homo sapiens
tgaaaaaagcaagtt

SEQ ID NO: 943616 - DNA, 15 bp, Homo sapiens
gaaaaaagcaagttg

SEQ ID NO: 943617 - DNA, 15 bp, Homo sapiens
aaaaaagcaagttga

SEQ ID NO: 943618 - DNA, 15 bp, Homo sapiens
aaaaagcaagttgaa

SEQ ID NO: 943619 - DNA, 15 bp, Homo sapiens
aaaagcaagttgaaa

SEQ ID NO: 943620 - DNA, 15 bp, Homo sapiens
aaagcaagttgaaaa

SEQ ID NO: 943621 - DNA, 15 bp, Homo sapiens
aagcaagttgaaaat

SEQ ID NO: 943622 - DNA, 15 bp, Homo sapiens
agcaagttgaaaatt

SEQ ID NO: 943623 - DNA, 15 bp, Homo sapiens
gcaagttgaaaattt

SEQ ID NO: 943624 - DNA, 15 bp, Homo sapiens
caagttgaaaatttg

SEQ ID NO: 943625 - DNA, 15 bp, Homo sapiens
aagttgaaaatttgc

SEQ ID NO: 943626 - DNA, 15 bp, Homo sapiens
agttgaaaatttgca

SEQ ID NO: 943627 - DNA, 15 bp, Homo sapiens
gttgaaaatttgcat

SEQ ID NO: 943628 - DNA, 15 bp, Homo sapiens
tgaaaatttgcatgc

SEQ ID NO: 943629 - DNA, 15 bp, Homo sapiens
gaaaatttgcatgca

SEQ ID NO: 943630 - DNA, 15 bp, Homo sapiens
aaaatttgcatgcaa

SEQ ID NO: 943631 - DNA, 15 bp, Homo sapiens
aaatttgcatgcaaa

SEQ ID NO: 943632 - DNA, 15 bp, Homo sapiens
aatttgcatgcaaac

SEQ ID NO: 943633 - DNA, 15 bp, Homo sapiens
atttgcatgcaaact

SEQ ID NO: 943634 - DNA, 15 bp, Homo sapiens
tttgcatgcaaacta

SEQ ID NO: 943635 - DNA, 15 bp, Homo sapiens
ttgcatgcaaactac

SEQ ID NO: 943636 - DNA, 15 bp, Homo sapiens
tgcatgcaaactacg

SEQ ID NO: 943637 - DNA, 15 bp, Homo sapiens
gcatgcaaactacga

SEQ ID NO: 943638 - DNA, 15 bp, Homo sapiens
catgcaaactacgat

SEQ ID NO: 943639 - DNA, 15 bp, Homo sapiens
atgcaaactacgatt

SEQ ID NO: 943640 - DNA, 15 bp, Homo sapiens
tgcaaactacgattg

SEQ ID NO: 943641 - DNA, 15 bp, Homo sapiens
gcaaactacgattgc

SEQ ID NO: 943642 - DNA, 15 bp, Homo sapiens
caaactacgattgca

SEQ ID NO: 943643 - DNA, 15 bp, Homo sapiens
aaactacgattgcag

SEQ ID NO: 943644 - DNA, 15 bp, Homo sapiens
aactacgattgcagc

SEQ ID NO: 943645 - DNA, 15 bp, Homo sapiens
actacgattgcagcc

SEQ ID NO: 943646 - DNA, 15 bp, Homo sapiens
ctacgattgcagcca

SEQ ID NO: 943647 - DNA, 15 bp, Homo sapiens
tacgattgcagccac

SEQ ID NO: 943648 - DNA, 15 bp, Homo sapiens
acgattgcagccaca

SEQ ID NO: 943649 - DNA, 15 bp, Homo sapiens
cgattgcagccacaa

SEQ ID NO: 943650 - DNA, 15 bp, Homo sapiens
gattgcagccacaaa

SEQ ID NO: 943651 - DNA, 15 bp, Homo sapiens
attgcagccacaaaa

SEQ ID NO: 943652 - DNA, 15 bp, Homo sapiens
ttgcagccacaaaaa

SEQ ID NO: 943653 - DNA, 15 bp, Homo sapiens
tgcagccacaaaaaa

SEQ ID NO: 943654 - DNA, 15 bp, Homo sapiens
gcagccacaaaaaat

SEQ ID NO: 943655 - DNA, 15 bp, Homo sapiens
cagccacaaaaaata

SEQ ID NO: 943656 - DNA, 15 bp, Homo sapiens
agccacaaaaaatat

SEQ ID NO: 943657 - DNA, 15 bp, Homo sapiens
gccacaaaaaatata

SEQ ID NO: 943658 - DNA, 15 bp, Homo sapiens
ccacaaaaaatatat

SEQ ID NO: 943659 - DNA, 15 bp, Homo sapiens
cacaaaaaatatata

SEQ ID NO: 943660 - DNA, 15 bp, Homo sapiens
acaaaaaatatatat

SEQ ID NO: 943661 - DNA, 15 bp, Homo sapiens
caaaaaatatatata

SEQ ID NO: 943662 - DNA, 15 bp, Homo sapiens
aaaaaatatatatag

SEQ ID NO: 943663 - DNA, 15 bp, Homo sapiens
aaaaatatatatagg

SEQ ID NO: 943664 - DNA, 15 bp, Homo sapiens
aaaatatatataggc

SEQ ID NO: 943665 - DNA, 15 bp, Homo sapiens
aaatatatataggca

SEQ ID NO: 943666 - DNA, 15 bp, Homo sapiens
aatatatataggcaa

SEQ ID NO: 943667 - DNA, 15 bp, Homo sapiens
atatatataggcaaa

SEQ ID NO: 943668 - DNA, 15 bp, Homo sapiens
tatatataggcaaaa

SEQ ID NO: 943669 - DNA, 15 bp, Homo sapiens
atatataggcaaaag

SEQ ID NO: 943670 - DNA, 15 bp, Homo sapiens
tatataggcaaaagt

SEQ ID NO: 943671 - DNA, 15 bp, Homo sapiens
atataggcaaaagtc

SEQ ID NO: 943672 - DNA, 15 bp, Homo sapiens
tataggcaaaagtct

SEQ ID NO: 943673 - DNA, 15 bp, Homo sapiens
ataggcaaaagtctg

SEQ ID NO: 943674 - DNA, 15 bp, Homo sapiens
taggcaaaagtctgg

SEQ ID NO: 943675 - DNA, 15 bp, Homo sapiens
aggcaaaagtctgga

SEQ ID NO: 943676 - DNA, 15 bp, Homo sapiens
ggcaaaagtctggaa

SEQ ID NO: 943677 - DNA, 15 bp, Homo sapiens
gcaaaagtctggaag

SEQ ID NO: 943678 - DNA, 15 bp, Homo sapiens
caaaagtctggaaga

SEQ ID NO: 943679 - DNA, 15 bp, Homo sapiens
aaaagtctggaagaa

SEQ ID NO: 943680 - DNA, 15 bp, Homo sapiens
aaagtctggaagaaa

SEQ ID NO: 943681 - DNA, 15 bp, Homo sapiens
aagtctggaagaaat

SEQ ID NO: 943682 - DNA, 15 bp, Homo sapiens
agtctggaagaaata

SEQ ID NO: 943683 - DNA, 15 bp, Homo sapiens
gtctggaagaaatag

SEQ ID NO: 943684 - DNA, 15 bp, Homo sapiens
tctggaagaaatagc

SEQ ID NO: 943685 - DNA, 15 bp, Homo sapiens
ctggaagaaatagca

SEQ ID NO: 943686 - DNA, 15 bp, Homo sapiens
tggaagaaatagcat

SEQ ID NO: 943687 - DNA, 15 bp, Homo sapiens
ggaagaaatagcatg

SEQ ID NO: 943688 - DNA, 15 bp, Homo sapiens
gaagaaatagcatgg

SEQ ID NO: 943689 - DNA, 15 bp, Homo sapiens
aagaaatagcatggt

SEQ ID NO: 943690 - DNA, 15 bp, Homo sapiens
agaaatagcatggtt

SEQ ID NO: 943691 - DNA, 15 bp, Homo sapiens
gaaatagcatggttt

SEQ ID NO: 943692 - DNA, 15 bp, Homo sapiens
aaatagcatggtttt

SEQ ID NO: 943693 - DNA, 15 bp, Homo sapiens
aatagcatggttttt

SEQ ID NO: 943694 - DNA, 15 bp, Homo sapiens
atagcatggttttta

SEQ ID NO: 943695 - DNA, 15 bp, Homo sapiens
tagcatggtttttac

SEQ ID NO: 943696 - DNA, 15 bp, Homo sapiens
agcatggtttttact

SEQ ID NO: 943697 - DNA, 15 bp, Homo sapiens
gcatggtttttactg

SEQ ID NO: 943698 - DNA, 15 bp, Homo sapiens
catggtttttactgc

SEQ ID NO: 943699 - DNA, 15 bp, Homo sapiens
atggtttttactgct

SEQ ID NO: 943700 - DNA, 15 bp, Homo sapiens
tggtttttactgctc

SEQ ID NO: 943701 - DNA, 15 bp, Homo sapiens
ggtttttactgctct

SEQ ID NO: 943702 - DNA, 15 bp, Homo sapiens
gtttttactgctctg

SEQ ID NO: 943703 - DNA, 15 bp, Homo sapiens
tttttactgctctgc

SEQ ID NO: 943704 - DNA, 15 bp, Homo sapiens
ttttactgctctgct

SEQ ID NO: 943705 - DNA, 15 bp, Homo sapiens
tttactgctctgctt

SEQ ID NO: 943706 - DNA, 15 bp, Homo sapiens
ttactgctctgcttt

SEQ ID NO: 943707 - DNA, 15 bp, Homo sapiens
tactgctctgctttc

SEQ ID NO: 943708 - DNA, 15 bp, Homo sapiens
actgctctgctttcc

SEQ ID NO: 943709 - DNA, 15 bp, Homo sapiens
ctgctctgctttcca

SEQ ID NO: 943710 - DNA, 15 bp, Homo sapiens
tgctctgctttccaa

SEQ ID NO: 943711 - DNA, 15 bp, Homo sapiens
gctctgctttccaaa

SEQ ID NO: 943712 - DNA, 15 bp, Homo sapiens
ctctgctttccaaat

SEQ ID NO: 943713 - DNA, 15 bp, Homo sapiens
tctgctttccaaatg

SEQ ID NO: 943714 - DNA, 15 bp, Homo sapiens
ctgctttccaaatgc

SEQ ID NO: 943715 - DNA, 15 bp, Homo sapiens
tgctttccaaatgct

SEQ ID NO: 943716 - DNA, 15 bp, Homo sapiens
gctttccaaatgctt

SEQ ID NO: 943717 - DNA, 15 bp, Homo sapiens
ctttccaaatgcttt

SEQ ID NO: 943718 - DNA, 15 bp, Homo sapiens
tttccaaatgctttg

SEQ ID NO: 943719 - DNA, 15 bp, Homo sapiens
ttccaaatgctttgt

SEQ ID NO: 943720 - DNA, 15 bp, Homo sapiens
tccaaatgctttgta

SEQ ID NO: 943721 - DNA, 15 bp, Homo sapiens
ccaaatgctttgtaa

SEQ ID NO: 943722 - DNA, 15 bp, Homo sapiens
caaatgctttgtaac

SEQ ID NO: 943723 - DNA, 15 bp, Homo sapiens
aaatgctttgtaaca

SEQ ID NO: 943724 - DNA, 15 bp, Homo sapiens
aatgctttgtaacat

SEQ ID NO: 943725 - DNA, 15 bp, Homo sapiens
atgctttgtaacata

SEQ ID NO: 943726 - DNA, 15 bp, Homo sapiens
tgctttgtaacatat

SEQ ID NO: 943727 - DNA, 15 bp, Homo sapiens
gctttgtaacatatt

SEQ ID NO: 943728 - DNA, 15 bp, Homo sapiens
ctttgtaacatattg

SEQ ID NO: 943729 - DNA, 15 bp, Homo sapiens
tttgtaacatattgt

SEQ ID NO: 943730 - DNA, 15 bp, Homo sapiens
ttgtaacatattgtt

SEQ ID NO: 943731 - DNA, 15 bp, Homo sapiens
tgtaacatattgtta

SEQ ID NO: 943732 - DNA, 15 bp, Homo sapiens
gtaacatattgttac

SEQ ID NO: 943733 - DNA, 15 bp, Homo sapiens
taacatattgttacc

SEQ ID NO: 943734 - DNA, 15 bp, Homo sapiens
aacatattgttacct

SEQ ID NO: 943735 - DNA, 15 bp, Homo sapiens
acatattgttacctt

SEQ ID NO: 943736 - DNA, 15 bp, Homo sapiens
catattgttacctta

SEQ ID NO: 943737 - DNA, 15 bp, Homo sapiens
atattgttaccttaa

SEQ ID NO: 943738 - DNA, 15 bp, Homo sapiens
tattgttaccttaat

SEQ ID NO: 943739 - DNA, 15 bp, Homo sapiens
attgttaccttaatt

SEQ ID NO: 943740 - DNA, 15 bp, Homo sapiens
ttgttaccttaatta

SEQ ID NO: 943741 - DNA, 15 bp, Homo sapiens
tgttaccttaattat

SEQ ID NO: 943742 - DNA, 15 bp, Homo sapiens
gttaccttaattatg

SEQ ID NO: 943743 - DNA, 15 bp, Homo sapiens
ttaccttaattatgg

SEQ ID NO: 943744 - DNA, 15 bp, Homo sapiens
taccttaattatgga

SEQ ID NO: 943745 - DNA, 15 bp, Homo sapiens
accttaattatggaa

SEQ ID NO: 943746 - DNA, 15 bp, Homo sapiens
ccttaattatggaaa

SEQ ID NO: 943747 - DNA, 15 bp, Homo sapiens
cttaattatggaaaa

SEQ ID NO: 943748 - DNA, 15 bp, Homo sapiens
ttaattatggaaaaa

SEQ ID NO: 943749 - DNA, 15 bp, Homo sapiens
taattatggaaaaaa

SEQ ID NO: 943750 - DNA, 15 bp, Homo sapiens
aattatggaaaaaat

SEQ ID NO: 943751 - DNA, 15 bp, Homo sapiens
attatggaaaaaata

SEQ ID NO: 943752 - DNA, 15 bp, Homo sapiens
ttatggaaaaaataa

SEQ ID NO: 943753 - DNA, 15 bp, Homo sapiens
tatggaaaaaataat

SEQ ID NO: 943754 - DNA, 15 bp, Homo sapiens
atggaaaaaataatt

SEQ ID NO: 943755 - DNA, 15 bp, Homo sapiens
tggaaaaaataatta

SEQ ID NO: 943756 - DNA, 15 bp, Homo sapiens
ggaaaaaataattat

SEQ ID NO: 943757 - DNA, 15 bp, Homo sapiens
gaaaaaataattata

SEQ ID NO: 943758 - DNA, 15 bp, Homo sapiens
aaaaaataattatat

SEQ ID NO: 943759 - DNA, 15 bp, Homo sapiens
aaaaataattatatg

SEQ ID NO: 943760 - DNA, 15 bp, Homo sapiens
aaaataattatatga

SEQ ID NO: 943761 - DNA, 15 bp, Homo sapiens
aaataattatatgat

SEQ ID NO: 943762 - DNA, 15 bp, Homo sapiens
aataattatatgata

SEQ ID NO: 943763 - DNA, 15 bp, Homo sapiens
ataattatatgatat

SEQ ID NO: 943764 - DNA, 15 bp, Homo sapiens
taattatatgatatt

SEQ ID NO: 943765 - DNA, 15 bp, Homo sapiens
aattatatgatattt

SEQ ID NO: 943766 - DNA, 15 bp, Homo sapiens
attatatgatattta

SEQ ID NO: 943767 - DNA, 15 bp, Homo sapiens
ttatatgatatttaa

SEQ ID NO: 943768 - DNA, 15 bp, Homo sapiens
tatatgatatttaag

SEQ ID NO: 943769 - DNA, 15 bp, Homo sapiens
atatgatatttaagt

SEQ ID NO: 943770 - DNA, 15 bp, Homo sapiens
tatgatatttaagta

SEQ ID NO: 943771 - DNA, 15 bp, Homo sapiens
atgatatttaagtaa

SEQ ID NO: 943772 - DNA, 15 bp, Homo sapiens
tgatatttaagtaaa

SEQ ID NO: 943773 - DNA, 15 bp, Homo sapiens
gatatttaagtaaaa

SEQ ID NO: 943774 - DNA, 15 bp, Homo sapiens
atatttaagtaaaat

SEQ ID NO: 943775 - DNA, 15 bp, Homo sapiens
tatttaagtaaaatt

SEQ ID NO: 943776 - DNA, 15 bp, Homo sapiens
atttaagtaaaatta

SEQ ID NO: 943777 - DNA, 15 bp, Homo sapiens
tttaagtaaaattat

SEQ ID NO: 943778 - DNA, 15 bp, Homo sapiens
ttaagtaaaattata

SEQ ID NO: 943779 - DNA, 15 bp, Homo sapiens
taagtaaaattatag

SEQ ID NO: 943780 - DNA, 15 bp, Homo sapiens
aagtaaaattatagc

SEQ ID NO: 943781 - DNA, 15 bp, Homo sapiens
agtaaaattatagcc

SEQ ID NO: 943782 - DNA, 15 bp, Homo sapiens
gtaaaattatagccc

SEQ ID NO: 943783 - DNA, 15 bp, Homo sapiens
taaaattatagccca

SEQ ID NO: 943784 - DNA, 15 bp, Homo sapiens
aaaattatagcccag

SEQ ID NO: 943785 - DNA, 15 bp, Homo sapiens
aaattatagcccaga

SEQ ID NO: 943786 - DNA, 15 bp, Homo sapiens
aattatagcccagaa

SEQ ID NO: 943787 - DNA, 15 bp, Homo sapiens
attatagcccagaag

SEQ ID NO: 943788 - DNA, 15 bp, Homo sapiens
ttatagcccagaagg

SEQ ID NO: 943789 - DNA, 15 bp, Homo sapiens
tatagcccagaaggc

SEQ ID NO: 943790 - DNA, 15 bp, Homo sapiens
atagcccagaaggca

SEQ ID NO: 943791 - DNA, 15 bp, Homo sapiens
tagcccagaaggcaa

SEQ ID NO: 943792 - DNA, 15 bp, Homo sapiens
agcccagaaggcaaa

SEQ ID NO: 943793 - DNA, 15 bp, Homo sapiens
gcccagaaggcaaat

SEQ ID NO: 943794 - DNA, 15 bp, Homo sapiens
cccagaaggcaaata

SEQ ID NO: 943795 - DNA, 15 bp, Homo sapiens
ccagaaggcaaataa

SEQ ID NO: 943796 - DNA, 15 bp, Homo sapiens
cagaaggcaaataat

SEQ ID NO: 943797 - DNA, 15 bp, Homo sapiens
agaaggcaaataatg

SEQ ID NO: 943798 - DNA, 15 bp, Homo sapiens
gaaggcaaataatgt

SEQ ID NO: 943799 - DNA, 15 bp, Homo sapiens
aaggcaaataatgtt

SEQ ID NO: 943800 - DNA, 15 bp, Homo sapiens
aggcaaataatgttg

SEQ ID NO: 943801 - DNA, 15 bp, Homo sapiens
ggcaaataatgttgc

SEQ ID NO: 943802 - DNA, 15 bp, Homo sapiens
gcaaataatgttgcc

SEQ ID NO: 943803 - DNA, 15 bp, Homo sapiens
caaataatgttgcct

SEQ ID NO: 943804 - DNA, 15 bp, Homo sapiens
aaataatgttgcctt

SEQ ID NO: 943805 - DNA, 15 bp, Homo sapiens
aataatgttgccttg

SEQ ID NO: 943806 - DNA, 15 bp, Homo sapiens
ataatgttgccttgt

SEQ ID NO: 943807 - DNA, 15 bp, Homo sapiens
taatgttgccttgtc

SEQ ID NO: 943808 - DNA, 15 bp, Homo sapiens
aatgttgccttgtca

SEQ ID NO: 943809 - DNA, 15 bp, Homo sapiens
atgttgccttgtcag

SEQ ID NO: 943810 - DNA, 15 bp, Homo sapiens
tgttgccttgtcagc

SEQ ID NO: 943811 - DNA, 15 bp, Homo sapiens
gttgccttgtcagca

SEQ ID NO: 943812 - DNA, 15 bp, Homo sapiens
ttgccttgtcagcat

SEQ ID NO: 943813 - DNA, 15 bp, Homo sapiens
tgccttgtcagcatt

SEQ ID NO: 943814 - DNA, 15 bp, Homo sapiens
gccttgtcagcattt

SEQ ID NO: 943815 - DNA, 15 bp, Homo sapiens
ccttgtcagcattta

SEQ ID NO: 943816 - DNA, 15 bp, Homo sapiens
cttgtcagcatttaa

SEQ ID NO: 943817 - DNA, 15 bp, Homo sapiens
ttgtcagcatttaaa

SEQ ID NO: 943818 - DNA, 15 bp, Homo sapiens
tgtcagcatttaaaa

SEQ ID NO: 943819 - DNA, 15 bp, Homo sapiens
gtcagcatttaaaaa

SEQ ID NO: 943820 - DNA, 15 bp, Homo sapiens
tcagcatttaaaaaa

SEQ ID NO: 943821 - DNA, 15 bp, Homo sapiens
cagcatttaaaaaac

SEQ ID NO: 943822 - DNA, 15 bp, Homo sapiens
agcatttaaaaaaca

SEQ ID NO: 943823 - DNA, 15 bp, Homo sapiens
gcatttaaaaaacaa

SEQ ID NO: 943824 - DNA, 15 bp, Homo sapiens
catttaaaaaacaag

SEQ ID NO: 943825 - DNA, 15 bp, Homo sapiens
atttaaaaaacaagt

SEQ ID NO: 943826 - DNA, 15 bp, Homo sapiens
tttaaaaaacaagtc

SEQ ID NO: 943827 - DNA, 15 bp, Homo sapiens
ttaaaaaacaagtcc

SEQ ID NO: 943828 - DNA, 15 bp, Homo sapiens
taaaaaacaagtccc

SEQ ID NO: 943829 - DNA, 15 bp, Homo sapiens
aaaaaacaagtccca

SEQ ID NO: 943830 - DNA, 15 bp, Homo sapiens
aaaaacaagtcccag

SEQ ID NO: 943831 - DNA, 15 bp, Homo sapiens
aaaacaagtcccagt

SEQ ID NO: 943832 - DNA, 15 bp, Homo sapiens
aaacaagtcccagtg

SEQ ID NO: 943833 - DNA, 15 bp, Homo sapiens
aacaagtcccagtgc

SEQ ID NO: 943834 - DNA, 15 bp, Homo sapiens
acaagtcccagtgct

SEQ ID NO: 943835 - DNA, 15 bp, Homo sapiens
caagtcccagtgctc

SEQ ID NO: 943836 - DNA, 15 bp, Homo sapiens
aagtcccagtgctca

SEQ ID NO: 943837 - DNA, 15 bp, Homo sapiens
agtcccagtgctcat

SEQ ID NO: 943838 - DNA, 15 bp, Homo sapiens
gtcccagtgctcatc

SEQ ID NO: 943839 - DNA, 15 bp, Homo sapiens
tcccagtgctcatca

SEQ ID NO: 943840 - DNA, 15 bp, Homo sapiens
cccagtgctcatcat

SEQ ID NO: 943841 - DNA, 15 bp, Homo sapiens
ccagtgctcatcatg

SEQ ID NO: 943842 - DNA, 15 bp, Homo sapiens
cagtgctcatcatga

SEQ ID NO: 943843 - DNA, 15 bp, Homo sapiens
agtgctcatcatgac

SEQ ID NO: 943844 - DNA, 15 bp, Homo sapiens
gtgctcatcatgaca

SEQ ID NO: 943845 - DNA, 15 bp, Homo sapiens
tgctcatcatgacac

SEQ ID NO: 943846 - DNA, 15 bp, Homo sapiens
gctcatcatgacacc

SEQ ID NO: 943847 - DNA, 15 bp, Homo sapiens
ctcatcatgacacca

SEQ ID NO: 943848 - DNA, 15 bp, Homo sapiens
tcatcatgacaccaa

SEQ ID NO: 943849 - DNA, 15 bp, Homo sapiens
catcatgacaccaag

SEQ ID NO: 943850 - DNA, 15 bp, Homo sapiens
atcatgacaccaagc

SEQ ID NO: 943851 - DNA, 15 bp, Homo sapiens
tcatgacaccaagca

SEQ ID NO: 943852 - DNA, 15 bp, Homo sapiens
catgacaccaagcag

SEQ ID NO: 943853 - DNA, 15 bp, Homo sapiens
atgacaccaagcaga

SEQ ID NO: 943854 - DNA, 15 bp, Homo sapiens
tgacaccaagcagat

SEQ ID NO: 943855 - DNA, 15 bp, Homo sapiens
gacaccaagcagatt

SEQ ID NO: 943856 - DNA, 15 bp, Homo sapiens
acaccaagcagatta

SEQ ID NO: 943857 - DNA, 15 bp, Homo sapiens
caccaagcagattaa

SEQ ID NO: 943858 - DNA, 15 bp, Homo sapiens
accaagcagattaac

SEQ ID NO: 943859 - DNA, 15 bp, Homo sapiens
ccaagcagattaact

SEQ ID NO: 943860 - DNA, 15 bp, Homo sapiens
caagcagattaactg

SEQ ID NO: 943861 - DNA, 15 bp, Homo sapiens
aagcagattaactga

SEQ ID NO: 943862 - DNA, 15 bp, Homo sapiens
agcagattaactgaa

SEQ ID NO: 943863 - DNA, 15 bp, Homo sapiens
gcagattaactgaaa

SEQ ID NO: 943864 - DNA, 15 bp, Homo sapiens
cagattaactgaaaa

SEQ ID NO: 943865 - DNA, 15 bp, Homo sapiens
agattaactgaaaat

SEQ ID NO: 943866 - DNA, 15 bp, Homo sapiens
gattaactgaaaatt

SEQ ID NO: 943867 - DNA, 15 bp, Homo sapiens
attaactgaaaattt

SEQ ID NO: 943868 - DNA, 15 bp, Homo sapiens
ttaactgaaaattta

SEQ ID NO: 943869 - DNA, 15 bp, Homo sapiens
taactgaaaatttac

SEQ ID NO: 943870 - DNA, 15 bp, Homo sapiens
aactgaaaatttact

SEQ ID NO: 943871 - DNA, 15 bp, Homo sapiens
actgaaaatttactt

SEQ ID NO: 943872 - DNA, 15 bp, Homo sapiens
ctgaaaatttacttt

SEQ ID NO: 943873 - DNA, 15 bp, Homo sapiens
tgaaaatttacttta

SEQ ID NO: 943874 - DNA, 15 bp, Homo sapiens
gaaaatttactttac

SEQ ID NO: 943875 - DNA, 15 bp, Homo sapiens
aaaatttactttact

SEQ ID NO: 943876 - DNA, 15 bp, Homo sapiens
aaatttactttactt

SEQ ID NO: 943877 - DNA, 15 bp, Homo sapiens
aatttactttacttg

SEQ ID NO: 943878 - DNA, 15 bp, Homo sapiens
atttactttacttga

SEQ ID NO: 943879 - DNA, 15 bp, Homo sapiens
tttactttacttgat

SEQ ID NO: 943880 - DNA, 15 bp, Homo sapiens
ttactttacttgatc

SEQ ID NO: 943881 - DNA, 15 bp, Homo sapiens
tactttacttgatca

SEQ ID NO: 943882 - DNA, 15 bp, Homo sapiens
actttacttgatcat

SEQ ID NO: 943883 - DNA, 15 bp, Homo sapiens
ctttacttgatcatc

SEQ ID NO: 943884 - DNA, 15 bp, Homo sapiens
tttacttgatcatct

SEQ ID NO: 943885 - DNA, 15 bp, Homo sapiens
ttacttgatcatctc

SEQ ID NO: 943886 - DNA, 15 bp, Homo sapiens
tacttgatcatctct

SEQ ID NO: 943887 - DNA, 15 bp, Homo sapiens
acttgatcatctcta

SEQ ID NO: 943888 - DNA, 15 bp, Homo sapiens
cttgatcatctctag

SEQ ID NO: 943889 - DNA, 15 bp, Homo sapiens
ttgatcatctctagg

SEQ ID NO: 943890 - DNA, 15 bp, Homo sapiens
tgatcatctctaggt

SEQ ID NO: 943891 - DNA, 15 bp, Homo sapiens
gatcatctctaggtt

SEQ ID NO: 943892 - DNA, 15 bp, Homo sapiens
atcatctctaggttt

SEQ ID NO: 943893 - DNA, 15 bp, Homo sapiens
tcatctctaggtttt

SEQ ID NO: 943894 - DNA, 15 bp, Homo sapiens
catctctaggttttc

SEQ ID NO: 943895 - DNA, 15 bp, Homo sapiens
atctctaggttttca

SEQ ID NO: 943896 - DNA, 15 bp, Homo sapiens
tctctaggttttcac

SEQ ID NO: 943897 - DNA, 15 bp, Homo sapiens
ctctaggttttcact

SEQ ID NO: 943898 - DNA, 15 bp, Homo sapiens
tctaggttttcactg

SEQ ID NO: 943899 - DNA, 15 bp, Homo sapiens
ctaggttttcactgc

SEQ ID NO: 943900 - DNA, 15 bp, Homo sapiens
taggttttcactgct

SEQ ID NO: 943901 - DNA, 15 bp, Homo sapiens
aggttttcactgctt

SEQ ID NO: 943902 - DNA, 15 bp, Homo sapiens
ggttttcactgcttt

SEQ ID NO: 943903 - DNA, 15 bp, Homo sapiens
gttttcactgctttt

SEQ ID NO: 943904 - DNA, 15 bp, Homo sapiens
ttttcactgcttttt

SEQ ID NO: 943905 - DNA, 15 bp, Homo sapiens
tttcactgctttttc

SEQ ID NO: 943906 - DNA, 15 bp, Homo sapiens
ttcactgctttttct

SEQ ID NO: 943907 - DNA, 15 bp, Homo sapiens
tcactgctttttctc

SEQ ID NO: 943908 - DNA, 15 bp, Homo sapiens
cactgctttttctca

SEQ ID NO: 943909 - DNA, 15 bp, Homo sapiens
actgctttttctcaa

SEQ ID NO: 943910 - DNA, 15 bp, Homo sapiens
ctgctttttctcaag

SEQ ID NO: 943911 - DNA, 15 bp, Homo sapiens
tgctttttctcaagg

SEQ ID NO: 943912 - DNA, 15 bp, Homo sapiens
gctttttctcaaggc

SEQ ID NO: 943913 - DNA, 15 bp, Homo sapiens
ctttttctcaaggct

SEQ ID NO: 943914 - DNA, 15 bp, Homo sapiens
tttttctcaaggctt

SEQ ID NO: 943915 - DNA, 15 bp, Homo sapiens
ttttctcaaggctta

SEQ ID NO: 943916 - DNA, 15 bp, Homo sapiens
tttctcaaggcttaa

SEQ ID NO: 943917 - DNA, 15 bp, Homo sapiens
ttctcaaggcttaat

SEQ ID NO: 943918 - DNA, 15 bp, Homo sapiens
tctcaaggcttaatc

SEQ ID NO: 943919 - DNA, 15 bp, Homo sapiens
ctcaaggcttaatca

SEQ ID NO: 943920 - DNA, 15 bp, Homo sapiens
tcaaggcttaatcaa

SEQ ID NO: 943921 - DNA, 15 bp, Homo sapiens
caaggcttaatcaaa

SEQ ID NO: 943922 - DNA, 15 bp, Homo sapiens
aaggcttaatcaaat

SEQ ID NO: 943923 - DNA, 15 bp, Homo sapiens
aggcttaatcaaatt

SEQ ID NO: 943924 - DNA, 15 bp, Homo sapiens
ggcttaatcaaatta

SEQ ID NO: 943925 - DNA, 15 bp, Homo sapiens
gcttaatcaaattat

SEQ ID NO: 943926 - DNA, 15 bp, Homo sapiens
cttaatcaaattatt

SEQ ID NO: 943927 - DNA, 15 bp, Homo sapiens
ttaatcaaattattt

SEQ ID NO: 943928 - DNA, 15 bp, Homo sapiens
taatcaaattatttt

SEQ ID NO: 943929 - DNA, 15 bp, Homo sapiens
aatcaaattattttt

SEQ ID NO: 943930 - DNA, 15 bp, Homo sapiens
atcaaattatttttc

SEQ ID NO: 943931 - DNA, 15 bp, Homo sapiens
tcaaattatttttca

SEQ ID NO: 943932 - DNA, 15 bp, Homo sapiens
caaattatttttcat

SEQ ID NO: 943933 - DNA, 15 bp, Homo sapiens
aaattatttttcatt

SEQ ID NO: 943934 - DNA, 15 bp, Homo sapiens
aattatttttcattt

SEQ ID NO: 943935 - DNA, 15 bp, Homo sapiens
attatttttcatttg

SEQ ID NO: 943936 - DNA, 15 bp, Homo sapiens
ttatttttcatttgc

SEQ ID NO: 943937 - DNA, 15 bp, Homo sapiens
tatttttcatttgct

SEQ ID NO: 943938 - DNA, 15 bp, Homo sapiens
atttttcatttgctt

SEQ ID NO: 943939 - DNA, 15 bp, Homo sapiens
tttttcatttgcttt

SEQ ID NO: 943940 - DNA, 15 bp, Homo sapiens
ttttcatttgctttc

SEQ ID NO: 943941 - DNA, 15 bp, Homo sapiens
tttcatttgctttca

SEQ ID NO: 943942 - DNA, 15 bp, Homo sapiens
ttcatttgctttcaa

SEQ ID NO: 943943 - DNA, 15 bp, Homo sapiens
tcatttgctttcaag

SEQ ID NO: 943944 - DNA, 15 bp, Homo sapiens
catttgctttcaagt

SEQ ID NO: 943945 - DNA, 15 bp, Homo sapiens
atttgctttcaagtt

SEQ ID NO: 943946 - DNA, 15 bp, Homo sapiens
tttgctttcaagttg

SEQ ID NO: 943947 - DNA, 15 bp, Homo sapiens
ttgctttcaagttga

SEQ ID NO: 943948 - DNA, 15 bp, Homo sapiens
tgctttcaagttgaa

SEQ ID NO: 943949 - DNA, 15 bp, Homo sapiens
gctttcaagttgaat

SEQ ID NO: 943950 - DNA, 15 bp, Homo sapiens
ctttcaagttgaatc

SEQ ID NO: 943951 - DNA, 15 bp, Homo sapiens
tttcaagttgaatca

SEQ ID NO: 943952 - DNA, 15 bp, Homo sapiens
ttcaagttgaatcat

SEQ ID NO: 943953 - DNA, 15 bp, Homo sapiens
tcaagttgaatcatc

SEQ ID NO: 943954 - DNA, 15 bp, Homo sapiens
caagttgaatcatct

SEQ ID NO: 943955 - DNA, 15 bp, Homo sapiens
aagttgaatcatctt

SEQ ID NO: 943956 - DNA, 15 bp, Homo sapiens
agttgaatcatcttt

SEQ ID NO: 943957 - DNA, 15 bp, Homo sapiens
gttgaatcatctttc

SEQ ID NO: 943958 - DNA, 15 bp, Homo sapiens
ttgaatcatctttca

SEQ ID NO: 943959 - DNA, 15 bp, Homo sapiens
tgaatcatctttcag

SEQ ID NO: 943960 - DNA, 15 bp, Homo sapiens
gaatcatctttcagc

SEQ ID NO: 943961 - DNA, 15 bp, Homo sapiens
aatcatctttcagca

SEQ ID NO: 943962 - DNA, 15 bp, Homo sapiens
atcatctttcagcaa

SEQ ID NO: 943963 - DNA, 15 bp, Homo sapiens
tcatctttcagcaag

SEQ ID NO: 943964 - DNA, 15 bp, Homo sapiens
catctttcagcaaga

SEQ ID NO: 943965 - DNA, 15 bp, Homo sapiens
atctttcagcaagat

SEQ ID NO: 943966 - DNA, 15 bp, Homo sapiens
tctttcagcaagatc

SEQ ID NO: 943967 - DNA, 15 bp, Homo sapiens
ctttcagcaagatct

SEQ ID NO: 943968 - DNA, 15 bp, Homo sapiens
tttcagcaagatctt

SEQ ID NO: 943969 - DNA, 15 bp, Homo sapiens
ttcagcaagatcttt

SEQ ID NO: 943970 - DNA, 15 bp, Homo sapiens
tcagcaagatctttt

SEQ ID NO: 943971 - DNA, 15 bp, Homo sapiens
cagcaagatcttttc

SEQ ID NO: 943972 - DNA, 15 bp, Homo sapiens
agcaagatcttttct

SEQ ID NO: 943973 - DNA, 15 bp, Homo sapiens
gcaagatcttttctg

SEQ ID NO: 943974 - DNA, 15 bp, Homo sapiens
caagatcttttctgt

SEQ ID NO: 943975 - DNA, 15 bp, Homo sapiens
aagatcttttctgta

SEQ ID NO: 943976 - DNA, 15 bp, Homo sapiens
agatcttttctgtaa

SEQ ID NO: 943977 - DNA, 15 bp, Homo sapiens
gatcttttctgtaac

SEQ ID NO: 943978 - DNA, 15 bp, Homo sapiens
atcttttctgtaaca

SEQ ID NO: 943979 - DNA, 15 bp, Homo sapiens
tcttttctgtaacac

SEQ ID NO: 943980 - DNA, 15 bp, Homo sapiens
cttttctgtaacact

SEQ ID NO: 943981 - DNA, 15 bp, Homo sapiens
ttttctgtaacacta

SEQ ID NO: 943982 - DNA, 15 bp, Homo sapiens
tttctgtaacactat

SEQ ID NO: 943983 - DNA, 15 bp, Homo sapiens
ttctgtaacactata

SEQ ID NO: 943984 - DNA, 15 bp, Homo sapiens
tctgtaacactataa

SEQ ID NO: 943985 - DNA, 15 bp, Homo sapiens
ctgtaacactataaa

SEQ ID NO: 943986 - DNA, 15 bp, Homo sapiens
tgtaacactataaaa

SEQ ID NO: 943987 - DNA, 15 bp, Homo sapiens
gtaacactataaaat

SEQ ID NO: 943988 - DNA, 15 bp, Homo sapiens
taacactataaaatt

SEQ ID NO: 943989 - DNA, 15 bp, Homo sapiens
aacactataaaattt

SEQ ID NO: 943990 - DNA, 15 bp, Homo sapiens
acactataaaatttc

SEQ ID NO: 943991 - DNA, 15 bp, Homo sapiens
cactataaaatttca

SEQ ID NO: 943992 - DNA, 15 bp, Homo sapiens
actataaaatttcat

SEQ ID NO: 943993 - DNA, 15 bp, Homo sapiens
ctataaaatttcata

SEQ ID NO: 943994 - DNA, 15 bp, Homo sapiens
tataaaatttcatat

SEQ ID NO: 943995 - DNA, 15 bp, Homo sapiens
ataaaatttcatatg

SEQ ID NO: 943996 - DNA, 15 bp, Homo sapiens
taaaatttcatatgt

SEQ ID NO: 943997 - DNA, 15 bp, Homo sapiens
aaaatttcatatgtc

SEQ ID NO: 943998 - DNA, 15 bp, Homo sapiens
aaatttcatatgtca

SEQ ID NO: 943999 - DNA, 15 bp, Homo sapiens
aatttcatatgtcat

SEQ ID NO: 944000 - DNA, 15 bp, Homo sapiens
atttcatatgtcatt

SEQ ID NO: 944001 - DNA, 15 bp, Homo sapiens
tttcatatgtcattt

SEQ ID NO: 944002 - DNA, 15 bp, Homo sapiens
ttcatatgtcatttc

SEQ ID NO: 944003 - DNA, 15 bp, Homo sapiens
tcatatgtcatttca

SEQ ID NO: 944004 - DNA, 15 bp, Homo sapiens
catatgtcatttcaa

SEQ ID NO: 944005 - DNA, 15 bp, Homo sapiens
atatgtcatttcaaa

SEQ ID NO: 944006 - DNA, 15 bp, Homo sapiens
tatgtcatttcaaat

SEQ ID NO: 944007 - DNA, 15 bp, Homo sapiens
atgtcatttcaaatt

SEQ ID NO: 944008 - DNA, 15 bp, Homo sapiens
tgtcatttcaaattc

SEQ ID NO: 944009 - DNA, 15 bp, Homo sapiens
gtcatttcaaattct

SEQ ID NO: 944010 - DNA, 15 bp, Homo sapiens
tcatttcaaattcta

SEQ ID NO: 944011 - DNA, 15 bp, Homo sapiens
catttcaaattctat

SEQ ID NO: 944012 - DNA, 15 bp, Homo sapiens
atttcaaattctata

SEQ ID NO: 944013 - DNA, 15 bp, Homo sapiens
tttcaaattctatat

SEQ ID NO: 944014 - DNA, 15 bp, Homo sapiens
ttcaaattctatatt

SEQ ID NO: 944015 - DNA, 15 bp, Homo sapiens
tcaaattctatattt

SEQ ID NO: 944016 - DNA, 15 bp, Homo sapiens
caaattctatatttg

SEQ ID NO: 944017 - DNA, 15 bp, Homo sapiens
aaattctatatttga

SEQ ID NO: 944018 - DNA, 15 bp, Homo sapiens
aattctatatttgaa

SEQ ID NO: 944019 - DNA, 15 bp, Homo sapiens
attctatatttgaaa

SEQ ID NO: 944020 - DNA, 15 bp, Homo sapiens
ttctatatttgaaag

SEQ ID NO: 944021 - DNA, 15 bp, Homo sapiens
tctatatttgaaagt

SEQ ID NO: 944022 - DNA, 15 bp, Homo sapiens
ctatatttgaaagtg

SEQ ID NO: 944023 - DNA, 15 bp, Homo sapiens
tatatttgaaagtgc

SEQ ID NO: 944024 - DNA, 15 bp, Homo sapiens
atatttgaaagtgca

SEQ ID NO: 944025 - DNA, 15 bp, Homo sapiens
tatttgaaagtgcag

SEQ ID NO: 944026 - DNA, 15 bp, Homo sapiens
atttgaaagtgcaga

SEQ ID NO: 944027 - DNA, 15 bp, Homo sapiens
tttgaaagtgcagaa

SEQ ID NO: 944028 - DNA, 15 bp, Homo sapiens
ttgaaagtgcagaaa

SEQ ID NO: 944029 - DNA, 15 bp, Homo sapiens
tgaaagtgcagaaag

SEQ ID NO: 944030 - DNA, 15 bp, Homo sapiens
gaaagtgcagaaaga

SEQ ID NO: 944031 - DNA, 15 bp, Homo sapiens
aaagtgcagaaagac

SEQ ID NO: 944032 - DNA, 15 bp, Homo sapiens
aagtgcagaaagaca

SEQ ID NO: 944033 - DNA, 15 bp, Homo sapiens
agtgcagaaagacag

SEQ ID NO: 944034 - DNA, 15 bp, Homo sapiens
gtgcagaaagacaga

SEQ ID NO: 944035 - DNA, 15 bp, Homo sapiens
tgcagaaagacagag

SEQ ID NO: 944036 - DNA, 15 bp, Homo sapiens
gcagaaagacagagg

SEQ ID NO: 944037 - DNA, 15 bp, Homo sapiens
cagaaagacagaggt

SEQ ID NO: 944038 - DNA, 15 bp, Homo sapiens
agaaagacagaggtt

SEQ ID NO: 944039 - DNA, 15 bp, Homo sapiens
gaaagacagaggttt

SEQ ID NO: 944040 - DNA, 15 bp, Homo sapiens
aaagacagaggtttg

SEQ ID NO: 944041 - DNA, 15 bp, Homo sapiens
aagacagaggtttgg

SEQ ID NO: 944042 - DNA, 15 bp, Homo sapiens
agacagaggtttggt

SEQ ID NO: 944043 - DNA, 15 bp, Homo sapiens
gacagaggtttggtc

SEQ ID NO: 944044 - DNA, 15 bp, Homo sapiens
acagaggtttggtcc

SEQ ID NO: 944045 - DNA, 15 bp, Homo sapiens
cagaggtttggtcct

SEQ ID NO: 944046 - DNA, 15 bp, Homo sapiens
agaggtttggtcctg

SEQ ID NO: 944047 - DNA, 15 bp, Homo sapiens
gaggtttggtcctgc

SEQ ID NO: 944048 - DNA, 15 bp, Homo sapiens
aggtttggtcctgca

SEQ ID NO: 944049 - DNA, 15 bp, Homo sapiens
ggtttggtcctgcaa

SEQ ID NO: 944050 - DNA, 15 bp, Homo sapiens
gtttggtcctgcaac

SEQ ID NO: 944051 - DNA, 15 bp, Homo sapiens
tttggtcctgcaact

SEQ ID NO: 944052 - DNA, 15 bp, Homo sapiens
ttggtcctgcaactt

SEQ ID NO: 944053 - DNA, 15 bp, Homo sapiens
tggtcctgcaacttt

SEQ ID NO: 944054 - DNA, 15 bp, Homo sapiens
ggtcctgcaactttc

SEQ ID NO: 944055 - DNA, 15 bp, Homo sapiens
gtcctgcaactttca

SEQ ID NO: 944056 - DNA, 15 bp, Homo sapiens
tcctgcaactttcat

SEQ ID NO: 944057 - DNA, 15 bp, Homo sapiens
cctgcaactttcatg

SEQ ID NO: 944058 - DNA, 15 bp, Homo sapiens
ctgcaactttcatgc

SEQ ID NO: 944059 - DNA, 15 bp, Homo sapiens
tgcaactttcatgcc

SEQ ID NO: 944060 - DNA, 15 bp, Homo sapiens
gcaactttcatgcca

SEQ ID NO: 944061 - DNA, 15 bp, Homo sapiens
caactttcatgccag

SEQ ID NO: 944062 - DNA, 15 bp, Homo sapiens
aactttcatgccagg

SEQ ID NO: 944063 - DNA, 15 bp, Homo sapiens
actttcatgccagga

SEQ ID NO: 944064 - DNA, 15 bp, Homo sapiens
ctttcatgccaggac

SEQ ID NO: 944065 - DNA, 15 bp, Homo sapiens
tttcatgccaggacc

SEQ ID NO: 944066 - DNA, 15 bp, Homo sapiens
ttcatgccaggacca

SEQ ID NO: 944067 - DNA, 15 bp, Homo sapiens
tcatgccaggaccaa

SEQ ID NO: 944068 - DNA, 15 bp, Homo sapiens
catgccaggaccaaa

SEQ ID NO: 944069 - DNA, 15 bp, Homo sapiens
atgccaggaccaaat

SEQ ID NO: 944070 - DNA, 15 bp, Homo sapiens
tgccaggaccaaatc

SEQ ID NO: 944071 - DNA, 15 bp, Homo sapiens
gccaggaccaaatcc

SEQ ID NO: 944072 - DNA, 15 bp, Homo sapiens
ccaggaccaaatcca

SEQ ID NO: 944073 - DNA, 15 bp, Homo sapiens
caggaccaaatccaa

SEQ ID NO: 944074 - DNA, 15 bp, Homo sapiens
aggaccaaatccaag

SEQ ID NO: 944075 - DNA, 15 bp, Homo sapiens
ggaccaaatccaaga

SEQ ID NO: 944076 - DNA, 15 bp, Homo sapiens
gaccaaatccaagag

SEQ ID NO: 944077 - DNA, 15 bp, Homo sapiens
accaaatccaagagt

SEQ ID NO: 944078 - DNA, 15 bp, Homo sapiens
ccaaatccaagagtt

SEQ ID NO: 944079 - DNA, 15 bp, Homo sapiens
caaatccaagagttt

SEQ ID NO: 944080 - DNA, 15 bp, Homo sapiens
aaatccaagagtttt

SEQ ID NO: 944081 - DNA, 15 bp, Homo sapiens
aatccaagagttttg

SEQ ID NO: 944082 - DNA, 15 bp, Homo sapiens
atccaagagttttgt

SEQ ID NO: 944083 - DNA, 15 bp, Homo sapiens
tccaagagttttgtt

SEQ ID NO: 944084 - DNA, 15 bp, Homo sapiens
ccaagagttttgttg

SEQ ID NO: 944085 - DNA, 15 bp, Homo sapiens
caagagttttgttgc

SEQ ID NO: 944086 - DNA, 15 bp, Homo sapiens
aagagttttgttgcc

SEQ ID NO: 944087 - DNA, 15 bp, Homo sapiens
agagttttgttgccc

SEQ ID NO: 944088 - DNA, 15 bp, Homo sapiens
gagttttgttgccct

SEQ ID NO: 944089 - DNA, 15 bp, Homo sapiens
agttttgttgcccta

SEQ ID NO: 944090 - DNA, 15 bp, Homo sapiens
gttttgttgccctac

SEQ ID NO: 944091 - DNA, 15 bp, Homo sapiens
ttttgttgccctaca

SEQ ID NO: 944092 - DNA, 15 bp, Homo sapiens
tttgttgccctacag

SEQ ID NO: 944093 - DNA, 15 bp, Homo sapiens
ttgttgccctacagg

SEQ ID NO: 944094 - DNA, 15 bp, Homo sapiens
tgttgccctacagga

SEQ ID NO: 944095 - DNA, 15 bp, Homo sapiens
gttgccctacaggaa

SEQ ID NO: 944096 - DNA, 15 bp, Homo sapiens
ttgccctacaggaat

SEQ ID NO: 944097 - DNA, 15 bp, Homo sapiens
tgccctacaggaata

SEQ ID NO: 944098 - DNA, 15 bp, Homo sapiens
gccctacaggaatat

SEQ ID NO: 944099 - DNA, 15 bp, Homo sapiens
ccctacaggaatatt

SEQ ID NO: 944100 - DNA, 15 bp, Homo sapiens
cctacaggaatattg

SEQ ID NO: 944101 - DNA, 15 bp, Homo sapiens
ctacaggaatattgt

SEQ ID NO: 944102 - DNA, 15 bp, Homo sapiens
tacaggaatattgta

SEQ ID NO: 944103 - DNA, 15 bp, Homo sapiens
acaggaatattgtaa

SEQ ID NO: 944104 - DNA, 15 bp, Homo sapiens
caggaatattgtaac

SEQ ID NO: 944105 - DNA, 15 bp, Homo sapiens
aggaatattgtaact

SEQ ID NO: 944106 - DNA, 15 bp, Homo sapiens
ggaatattgtaactg

SEQ ID NO: 944107 - DNA, 15 bp, Homo sapiens
gaatattgtaactgt

SEQ ID NO: 944108 - DNA, 15 bp, Homo sapiens
aatattgtaactgtc

SEQ ID NO: 944109 - DNA, 15 bp, Homo sapiens
atattgtaactgtca

SEQ ID NO: 944110 - DNA, 15 bp, Homo sapiens
tattgtaactgtcaa

SEQ ID NO: 944111 - DNA, 15 bp, Homo sapiens
attgtaactgtcaac

SEQ ID NO: 944112 - DNA, 15 bp, Homo sapiens
ttgtaactgtcaaca

SEQ ID NO: 944113 - DNA, 15 bp, Homo sapiens
tgtaactgtcaacag

SEQ ID NO: 944114 - DNA, 15 bp, Homo sapiens
gtaactgtcaacagc

SEQ ID NO: 944115 - DNA, 15 bp, Homo sapiens
taactgtcaacagcc

SEQ ID NO: 944116 - DNA, 15 bp, Homo sapiens
aactgtcaacagcca

SEQ ID NO: 944117 - DNA, 15 bp, Homo sapiens
actgtcaacagccag

SEQ ID NO: 944118 - DNA, 15 bp, Homo sapiens
ctgtcaacagccagc

SEQ ID NO: 944119 - DNA, 15 bp, Homo sapiens
tgtcaacagccagct

SEQ ID NO: 944120 - DNA, 15 bp, Homo sapiens
gtcaacagccagctg

SEQ ID NO: 944121 - DNA, 15 bp, Homo sapiens
tcaacagccagctgt

SEQ ID NO: 944122 - DNA, 15 bp, Homo sapiens
caacagccagctgtc

SEQ ID NO: 944123 - DNA, 15 bp, Homo sapiens
aacagccagctgtcc

SEQ ID NO: 944124 - DNA, 15 bp, Homo sapiens
acagccagctgtcct

SEQ ID NO: 944125 - DNA, 15 bp, Homo sapiens
cagccagctgtcctg

SEQ ID NO: 944126 - DNA, 15 bp, Homo sapiens
agccagctgtcctga

SEQ ID NO: 944127 - DNA, 15 bp, Homo sapiens
gccagctgtcctgaa

SEQ ID NO: 944128 - DNA, 15 bp, Homo sapiens
ccagctgtcctgaaa

SEQ ID NO: 944129 - DNA, 15 bp, Homo sapiens
cagctgtcctgaaat

SEQ ID NO: 944130 - DNA, 15 bp, Homo sapiens
agctgtcctgaaatt

SEQ ID NO: 944131 - DNA, 15 bp, Homo sapiens
gctgtcctgaaattc

SEQ ID NO: 944132 - DNA, 15 bp, Homo sapiens
ctgtcctgaaattct

SEQ ID NO: 944133 - DNA, 15 bp, Homo sapiens
tgtcctgaaattctg

SEQ ID NO: 944134 - DNA, 15 bp, Homo sapiens
gtcctgaaattctga

SEQ ID NO: 944135 - DNA, 15 bp, Homo sapiens
tcctgaaattctgaa

SEQ ID NO: 944136 - DNA, 15 bp, Homo sapiens
cctgaaattctgaag

SEQ ID NO: 944137 - DNA, 15 bp, Homo sapiens
ctgaaattctgaagg

SEQ ID NO: 944138 - DNA, 15 bp, Homo sapiens
tgaaattctgaaggc

SEQ ID NO: 944139 - DNA, 15 bp, Homo sapiens
gaaattctgaaggct

SEQ ID NO: 944140 - DNA, 15 bp, Homo sapiens
aaattctgaaggctt

SEQ ID NO: 944141 - DNA, 15 bp, Homo sapiens
aattctgaaggcttt

SEQ ID NO: 944142 - DNA, 15 bp, Homo sapiens
attctgaaggcttta

SEQ ID NO: 944143 - DNA, 15 bp, Homo sapiens
ttctgaaggctttat

SEQ ID NO: 944144 - DNA, 15 bp, Homo sapiens
tctgaaggctttatt

SEQ ID NO: 944145 - DNA, 15 bp, Homo sapiens
ctgaaggctttatta

SEQ ID NO: 944146 - DNA, 15 bp, Homo sapiens
tgaaggctttattag

SEQ ID NO: 944147 - DNA, 15 bp, Homo sapiens
gaaggctttattaga

SEQ ID NO: 944148 - DNA, 15 bp, Homo sapiens
aaggctttattagag

SEQ ID NO: 944149 - DNA, 15 bp, Homo sapiens
aggctttattagagc

SEQ ID NO: 944150 - DNA, 15 bp, Homo sapiens
ggctttattagagca

SEQ ID NO: 944151 - DNA, 15 bp, Homo sapiens
gctttattagagcaa

SEQ ID NO: 944152 - DNA, 15 bp, Homo sapiens
ctttattagagcaag

SEQ ID NO: 944153 - DNA, 15 bp, Homo sapiens
tttattagagcaagc

SEQ ID NO: 944154 - DNA, 15 bp, Homo sapiens
ttattagagcaagcg

SEQ ID NO: 944155 - DNA, 15 bp, Homo sapiens
tattagagcaagcga

SEQ ID NO: 944156 - DNA, 15 bp, Homo sapiens
attagagcaagcgaa

SEQ ID NO: 944157 - DNA, 15 bp, Homo sapiens
ttagagcaagcgaag

SEQ ID NO: 944158 - DNA, 15 bp, Homo sapiens
tagagcaagcgaagt

SEQ ID NO: 944159 - DNA, 15 bp, Homo sapiens
agagcaagcgaagtg

SEQ ID NO: 944160 - DNA, 15 bp, Homo sapiens
gagcaagcgaagtgt

SEQ ID NO: 944161 - DNA, 15 bp, Homo sapiens
agcaagcgaagtgta

SEQ ID NO: 944162 - DNA, 15 bp, Homo sapiens
gcaagcgaagtgtaa

SEQ ID NO: 944163 - DNA, 15 bp, Homo sapiens
caagcgaagtgtaat

SEQ ID NO: 944164 - DNA, 15 bp, Homo sapiens
aagcgaagtgtaata

SEQ ID NO: 944165 - DNA, 15 bp, Homo sapiens
agcgaagtgtaatat

SEQ ID NO: 944166 - DNA, 15 bp, Homo sapiens
gcgaagtgtaatata

SEQ ID NO: 944167 - DNA, 15 bp, Homo sapiens
cgaagtgtaatatat

SEQ ID NO: 944168 - DNA, 15 bp, Homo sapiens
gaagtgtaatatatt

SEQ ID NO: 944169 - DNA, 15 bp, Homo sapiens
aagtgtaatatattt

SEQ ID NO: 944170 - DNA, 15 bp, Homo sapiens
agtgtaatatatttc

SEQ ID NO: 944171 - DNA, 15 bp, Homo sapiens
gtgtaatatatttct

SEQ ID NO: 944172 - DNA, 15 bp, Homo sapiens
tgtaatatatttctt

SEQ ID NO: 944173 - DNA, 15 bp, Homo sapiens
gtaatatatttcttt

SEQ ID NO: 944174 - DNA, 15 bp, Homo sapiens
taatatatttctttc

SEQ ID NO: 944175 - DNA, 15 bp, Homo sapiens
aatatatttctttca

SEQ ID NO: 944176 - DNA, 15 bp, Homo sapiens
atatatttctttcac

SEQ ID NO: 944177 - DNA, 15 bp, Homo sapiens
tatatttctttcacc

SEQ ID NO: 944178 - DNA, 15 bp, Homo sapiens
atatttctttcacct

SEQ ID NO: 944179 - DNA, 15 bp, Homo sapiens
tatttctttcacctt

SEQ ID NO: 944180 - DNA, 15 bp, Homo sapiens
atttctttcaccttc

SEQ ID NO: 944181 - DNA, 15 bp, Homo sapiens
tttctttcaccttct

SEQ ID NO: 944182 - DNA, 15 bp, Homo sapiens
ttctttcaccttcta

SEQ ID NO: 944183 - DNA, 15 bp, Homo sapiens
tctttcaccttctat

SEQ ID NO: 944184 - DNA, 15 bp, Homo sapiens
ctttcaccttctatt

SEQ ID NO: 944185 - DNA, 15 bp, Homo sapiens
tttcaccttctattt

SEQ ID NO: 944186 - DNA, 15 bp, Homo sapiens
ttcaccttctattta

SEQ ID NO: 944187 - DNA, 15 bp, Homo sapiens
tcaccttctatttac

SEQ ID NO: 944188 - DNA, 15 bp, Homo sapiens
caccttctatttact

SEQ ID NO: 944189 - DNA, 15 bp, Homo sapiens
accttctatttactc

SEQ ID NO: 944190 - DNA, 15 bp, Homo sapiens
ccttctatttactct

SEQ ID NO: 944191 - DNA, 15 bp, Homo sapiens
cttctatttactctc

SEQ ID NO: 944192 - DNA, 15 bp, Homo sapiens
ttctatttactctca

SEQ ID NO: 944193 - DNA, 15 bp, Homo sapiens
tctatttactctcag

SEQ ID NO: 944194 - DNA, 15 bp, Homo sapiens
ctatttactctcagc

SEQ ID NO: 944195 - DNA, 15 bp, Homo sapiens
tatttactctcagca

SEQ ID NO: 944196 - DNA, 15 bp, Homo sapiens
atttactctcagcaa

SEQ ID NO: 944197 - DNA, 15 bp, Homo sapiens
tttactctcagcaaa

SEQ ID NO: 944198 - DNA, 15 bp, Homo sapiens
ttactctcagcaaat

SEQ ID NO: 944199 - DNA, 15 bp, Homo sapiens
tactctcagcaaata

SEQ ID NO: 944200 - DNA, 15 bp, Homo sapiens
actctcagcaaataa

SEQ ID NO: 944201 - DNA, 15 bp, Homo sapiens
ctctcagcaaataat

SEQ ID NO: 944202 - DNA, 15 bp, Homo sapiens
tctcagcaaataatt

SEQ ID NO: 944203 - DNA, 15 bp, Homo sapiens
ctcagcaaataattt

SEQ ID NO: 944204 - DNA, 15 bp, Homo sapiens
tcagcaaataattta

SEQ ID NO: 944205 - DNA, 15 bp, Homo sapiens
cagcaaataatttaa

SEQ ID NO: 944206 - DNA, 15 bp, Homo sapiens
agcaaataatttaat

SEQ ID NO: 944207 - DNA, 15 bp, Homo sapiens
gcaaataatttaata

SEQ ID NO: 944208 - DNA, 15 bp, Homo sapiens
caaataatttaatat

SEQ ID NO: 944209 - DNA, 15 bp, Homo sapiens
aaataatttaatata

SEQ ID NO: 944210 - DNA, 15 bp, Homo sapiens
aataatttaatatat

SEQ ID NO: 944211 - DNA, 15 bp, Homo sapiens
ataatttaatatatt

SEQ ID NO: 944212 - DNA, 15 bp, Homo sapiens
taatttaatatattt

SEQ ID NO: 944213 - DNA, 15 bp, Homo sapiens
aatttaatatatttt

SEQ ID NO: 944214 - DNA, 15 bp, Homo sapiens
atttaatatattttg

SEQ ID NO: 944215 - DNA, 15 bp, Homo sapiens
tttaatatattttgc

SEQ ID NO: 944216 - DNA, 15 bp, Homo sapiens
ttaatatattttgct

SEQ ID NO: 944217 - DNA, 15 bp, Homo sapiens
taatatattttgcta

SEQ ID NO: 944218 - DNA, 15 bp, Homo sapiens
aatatattttgctac

SEQ ID NO: 944219 - DNA, 15 bp, Homo sapiens
atatattttgctact

SEQ ID NO: 944220 - DNA, 15 bp, Homo sapiens
tatattttgctactt

SEQ ID NO: 944221 - DNA, 15 bp, Homo sapiens
atattttgctacttt

SEQ ID NO: 944222 - DNA, 15 bp, Homo sapiens
tattttgctactttt

SEQ ID NO: 944223 - DNA, 15 bp, Homo sapiens
attttgctacttttt

SEQ ID NO: 944224 - DNA, 15 bp, Homo sapiens
ttttgctacttttta

SEQ ID NO: 944225 - DNA, 15 bp, Homo sapiens
tttgctactttttat

SEQ ID NO: 944226 - DNA, 15 bp, Homo sapiens
ttgctactttttatg

SEQ ID NO: 944227 - DNA, 15 bp, Homo sapiens
tgctactttttatga

SEQ ID NO: 944228 - DNA, 15 bp, Homo sapiens
gctactttttatgaa

SEQ ID NO: 944229 - DNA, 15 bp, Homo sapiens
ctactttttatgaac

SEQ ID NO: 944230 - DNA, 15 bp, Homo sapiens
tactttttatgaaca

SEQ ID NO: 944231 - DNA, 15 bp, Homo sapiens
actttttatgaacaa

SEQ ID NO: 944232 - DNA, 15 bp, Homo sapiens
ctttttatgaacaaa

SEQ ID NO: 944233 - DNA, 15 bp, Homo sapiens
tttttatgaacaaag

SEQ ID NO: 944234 - DNA, 15 bp, Homo sapiens
ttttatgaacaaagg

SEQ ID NO: 944235 - DNA, 15 bp, Homo sapiens
tttatgaacaaagga

SEQ ID NO: 944236 - DNA, 15 bp, Homo sapiens
ttatgaacaaaggaa

SEQ ID NO: 944237 - DNA, 15 bp, Homo sapiens
tatgaacaaaggaat

SEQ ID NO: 944238 - DNA, 15 bp, Homo sapiens
atgaacaaaggaatt

SEQ ID NO: 944239 - DNA, 15 bp, Homo sapiens
tgaacaaaggaatta

SEQ ID NO: 944240 - DNA, 15 bp, Homo sapiens
gaacaaaggaattaa

SEQ ID NO: 944241 - DNA, 15 bp, Homo sapiens
aacaaaggaattaac

SEQ ID NO: 944242 - DNA, 15 bp, Homo sapiens
acaaaggaattaaca

SEQ ID NO: 944243 - DNA, 15 bp, Homo sapiens
caaaggaattaacat

SEQ ID NO: 944244 - DNA, 15 bp, Homo sapiens
aaaggaattaacatt

SEQ ID NO: 944245 - DNA, 15 bp, Homo sapiens
aaggaattaacattt

SEQ ID NO: 944246 - DNA, 15 bp, Homo sapiens
aggaattaacattta

SEQ ID NO: 944247 - DNA, 15 bp, Homo sapiens
ggaattaacatttaa

SEQ ID NO: 944248 - DNA, 15 bp, Homo sapiens
gaattaacatttaag

SEQ ID NO: 944249 - DNA, 15 bp, Homo sapiens
aattaacatttaaga

SEQ ID NO: 944250 - DNA, 15 bp, Homo sapiens
attaacatttaagaa

SEQ ID NO: 944251 - DNA, 15 bp, Homo sapiens
ttaacatttaagaag

SEQ ID NO: 944252 - DNA, 15 bp, Homo sapiens
taacatttaagaagc

SEQ ID NO: 944253 - DNA, 15 bp, Homo sapiens
aacatttaagaagca

SEQ ID NO: 944254 - DNA, 15 bp, Homo sapiens
acatttaagaagcaa

SEQ ID NO: 944255 - DNA, 15 bp, Homo sapiens
catttaagaagcaat

SEQ ID NO: 944256 - DNA, 15 bp, Homo sapiens
atttaagaagcaatt

SEQ ID NO: 944257 - DNA, 15 bp, Homo sapiens
tttaagaagcaatta

SEQ ID NO: 944258 - DNA, 15 bp, Homo sapiens
ttaagaagcaattac

SEQ ID NO: 944259 - DNA, 15 bp, Homo sapiens
taagaagcaattact

SEQ ID NO: 944260 - DNA, 15 bp, Homo sapiens
aagaagcaattactg

SEQ ID NO: 944261 - DNA, 15 bp, Homo sapiens
agaagcaattactgt

SEQ ID NO: 944262 - DNA, 15 bp, Homo sapiens
gaagcaattactgtg

SEQ ID NO: 944263 - DNA, 15 bp, Homo sapiens
aagcaattactgtgt

SEQ ID NO: 944264 - DNA, 15 bp, Homo sapiens
agcaattactgtgta

SEQ ID NO: 944265 - DNA, 15 bp, Homo sapiens
gcaattactgtgtac

SEQ ID NO: 944266 - DNA, 15 bp, Homo sapiens
caattactgtgtact

SEQ ID NO: 944267 - DNA, 15 bp, Homo sapiens
aattactgtgtactg

SEQ ID NO: 944268 - DNA, 15 bp, Homo sapiens
attactgtgtactgt

SEQ ID NO: 944269 - DNA, 15 bp, Homo sapiens
ttactgtgtactgta

SEQ ID NO: 944270 - DNA, 15 bp, Homo sapiens
tactgtgtactgtag

SEQ ID NO: 944271 - DNA, 15 bp, Homo sapiens
actgtgtactgtagg

SEQ ID NO: 944272 - DNA, 15 bp, Homo sapiens
ctgtgtactgtaggt

SEQ ID NO: 944273 - DNA, 15 bp, Homo sapiens
tgtgtactgtaggtt

SEQ ID NO: 944274 - DNA, 15 bp, Homo sapiens
gtgtactgtaggttt

SEQ ID NO: 944275 - DNA, 15 bp, Homo sapiens
tgtactgtaggtttt

SEQ ID NO: 944276 - DNA, 15 bp, Homo sapiens
gtactgtaggtttta

SEQ ID NO: 944277 - DNA, 15 bp, Homo sapiens
tactgtaggttttaa

SEQ ID NO: 944278 - DNA, 15 bp, Homo sapiens
actgtaggttttaat

SEQ ID NO: 944279 - DNA, 15 bp, Homo sapiens
ctgtaggttttaatt

SEQ ID NO: 944280 - DNA, 15 bp, Homo sapiens
tgtaggttttaattg

SEQ ID NO: 944281 - DNA, 15 bp, Homo sapiens
gtaggttttaattgt

SEQ ID NO: 944282 - DNA, 15 bp, Homo sapiens
taggttttaattgtg

SEQ ID NO: 944283 - DNA, 15 bp, Homo sapiens
aggttttaattgtgt

SEQ ID NO: 944284 - DNA, 15 bp, Homo sapiens
ggttttaattgtgtt

SEQ ID NO: 944285 - DNA, 15 bp, Homo sapiens
gttttaattgtgttc

SEQ ID NO: 944286 - DNA, 15 bp, Homo sapiens
ttttaattgtgttct

SEQ ID NO: 944287 - DNA, 15 bp, Homo sapiens
tttaattgtgttctc

SEQ ID NO: 944288 - DNA, 15 bp, Homo sapiens
ttaattgtgttctct

SEQ ID NO: 944289 - DNA, 15 bp, Homo sapiens
taattgtgttctctt

SEQ ID NO: 944290 - DNA, 15 bp, Homo sapiens
aattgtgttctctta

SEQ ID NO: 944291 - DNA, 15 bp, Homo sapiens
attgtgttctcttaa

SEQ ID NO: 944292 - DNA, 15 bp, Homo sapiens
ttgtgttctcttaag

SEQ ID NO: 944293 - DNA, 15 bp, Homo sapiens
tgtgttctcttaaga

SEQ ID NO: 944294 - DNA, 15 bp, Homo sapiens
gtgttctcttaagat

SEQ ID NO: 944295 - DNA, 15 bp, Homo sapiens
tgttctcttaagata

SEQ ID NO: 944296 - DNA, 15 bp, Homo sapiens
gttctcttaagatag

SEQ ID NO: 944297 - DNA, 15 bp, Homo sapiens
ttctcttaagataga

SEQ ID NO: 944298 - DNA, 15 bp, Homo sapiens
tctcttaagatagat

SEQ ID NO: 944299 - DNA, 15 bp, Homo sapiens
ctcttaagatagata

SEQ ID NO: 944300 - DNA, 15 bp, Homo sapiens
tcttaagatagatat

SEQ ID NO: 944301 - DNA, 15 bp, Homo sapiens
cttaagatagatatt

SEQ ID NO: 944302 - DNA, 15 bp, Homo sapiens
ttaagatagatatta

SEQ ID NO: 944303 - DNA, 15 bp, Homo sapiens
taagatagatattat

SEQ ID NO: 944304 - DNA, 15 bp, Homo sapiens
aagatagatattatt

SEQ ID NO: 944305 - DNA, 15 bp, Homo sapiens
agatagatattatta

SEQ ID NO: 944306 - DNA, 15 bp, Homo sapiens
gatagatattattat

SEQ ID NO: 944307 - DNA, 15 bp, Homo sapiens
atagatattattatg

SEQ ID NO: 944308 - DNA, 15 bp, Homo sapiens
tagatattattatgc

SEQ ID NO: 944309 - DNA, 15 bp, Homo sapiens
agatattattatgct

SEQ ID NO: 944310 - DNA, 15 bp, Homo sapiens
gatattattatgctg

SEQ ID NO: 944311 - DNA, 15 bp, Homo sapiens
atattattatgctgg

SEQ ID NO: 944312 - DNA, 15 bp, Homo sapiens
tattattatgctggc

SEQ ID NO: 944313 - DNA, 15 bp, Homo sapiens
attattatgctggct

SEQ ID NO: 944314 - DNA, 15 bp, Homo sapiens
ttattatgctggctt

SEQ ID NO: 944315 - DNA, 15 bp, Homo sapiens
tattatgctggcttc

SEQ ID NO: 944316 - DNA, 15 bp, Homo sapiens
attatgctggcttca

SEQ ID NO: 944317 - DNA, 15 bp, Homo sapiens
ttatgctggcttcac

SEQ ID NO: 944318 - DNA, 15 bp, Homo sapiens
tatgctggcttcaca

SEQ ID NO: 944319 - DNA, 15 bp, Homo sapiens
atgctggcttcacag

SEQ ID NO: 944320 - DNA, 15 bp, Homo sapiens
tgctggcttcacaga

SEQ ID NO: 944321 - DNA, 15 bp, Homo sapiens
gctggcttcacagat

SEQ ID NO: 944322 - DNA, 15 bp, Homo sapiens
ctggcttcacagatg

SEQ ID NO: 944323 - DNA, 15 bp, Homo sapiens
tggcttcacagatga

SEQ ID NO: 944324 - DNA, 15 bp, Homo sapiens
ggcttcacagatgag

SEQ ID NO: 944325 - DNA, 15 bp, Homo sapiens
gcttcacagatgagg

SEQ ID NO: 944326 - DNA, 15 bp, Homo sapiens
cttcacagatgagga

SEQ ID NO: 944327 - DNA, 15 bp, Homo sapiens
ttcacagatgaggaa

SEQ ID NO: 944328 - DNA, 15 bp, Homo sapiens
tcacagatgaggaaa

SEQ ID NO: 944329 - DNA, 15 bp, Homo sapiens
cacagatgaggaaac

SEQ ID NO: 944330 - DNA, 15 bp, Homo sapiens
acagatgaggaaact

SEQ ID NO: 944331 - DNA, 15 bp, Homo sapiens
cagatgaggaaactg

SEQ ID NO: 944332 - DNA, 15 bp, Homo sapiens
agatgaggaaactga

SEQ ID NO: 944333 - DNA, 15 bp, Homo sapiens
gatgaggaaactgag

SEQ ID NO: 944334 - DNA, 15 bp, Homo sapiens
atgaggaaactgagg

SEQ ID NO: 944335 - DNA, 15 bp, Homo sapiens
gaggaaactgaggct

SEQ ID NO: 944336 - DNA, 15 bp, Homo sapiens
aggaaactgaggctt

SEQ ID NO: 944337 - DNA, 15 bp, Homo sapiens
ggaaactgaggcttt

SEQ ID NO: 944338 - DNA, 15 bp, Homo sapiens
gaaactgaggctttt

SEQ ID NO: 944339 - DNA, 15 bp, Homo sapiens
aaactgaggcttttt

SEQ ID NO: 944340 - DNA, 15 bp, Homo sapiens
aactgaggcttttta

SEQ ID NO: 944341 - DNA, 15 bp, Homo sapiens
actgaggctttttaa

SEQ ID NO: 944342 - DNA, 15 bp, Homo sapiens
ctgaggctttttaaa

SEQ ID NO: 944343 - DNA, 15 bp, Homo sapiens
tgaggctttttaaat

SEQ ID NO: 944344 - DNA, 15 bp, Homo sapiens
gaggctttttaaata

SEQ ID NO: 944345 - DNA, 15 bp, Homo sapiens
aggctttttaaataa

SEQ ID NO: 944346 - DNA, 15 bp, Homo sapiens
ggctttttaaataac

SEQ ID NO: 944347 - DNA, 15 bp, Homo sapiens
gctttttaaataact

SEQ ID NO: 944348 - DNA, 15 bp, Homo sapiens
ctttttaaataactg

SEQ ID NO: 944349 - DNA, 15 bp, Homo sapiens
tttttaaataactga

SEQ ID NO: 944350 - DNA, 15 bp, Homo sapiens
ttttaaataactgag

SEQ ID NO: 944351 - DNA, 15 bp, Homo sapiens
tttaaataactgagt

SEQ ID NO: 944352 - DNA, 15 bp, Homo sapiens
ttaaataactgagtg

SEQ ID NO: 944353 - DNA, 15 bp, Homo sapiens
taaataactgagtga

SEQ ID NO: 944354 - DNA, 15 bp, Homo sapiens
aaataactgagtgat

SEQ ID NO: 944355 - DNA, 15 bp, Homo sapiens
aataactgagtgatt

SEQ ID NO: 944356 - DNA, 15 bp, Homo sapiens
ataactgagtgattt

SEQ ID NO: 944357 - DNA, 15 bp, Homo sapiens
taactgagtgatttt

SEQ ID NO: 944358 - DNA, 15 bp, Homo sapiens
aactgagtgattttc

SEQ ID NO: 944359 - DNA, 15 bp, Homo sapiens
actgagtgattttca

SEQ ID NO: 944360 - DNA, 15 bp, Homo sapiens
ctgagtgattttcaa

SEQ ID NO: 944361 - DNA, 15 bp, Homo sapiens
tgagtgattttcaat

SEQ ID NO: 944362 - DNA, 15 bp, Homo sapiens
gagtgattttcaata

SEQ ID NO: 944363 - DNA, 15 bp, Homo sapiens
agtgattttcaataa

SEQ ID NO: 944364 - DNA, 15 bp, Homo sapiens
gtgattttcaataac

SEQ ID NO: 944365 - DNA, 15 bp, Homo sapiens
tgattttcaataact

SEQ ID NO: 944366 - DNA, 15 bp, Homo sapiens
gattttcaataactt

SEQ ID NO: 944367 - DNA, 15 bp, Homo sapiens
attttcaataacttc

SEQ ID NO: 944368 - DNA, 15 bp, Homo sapiens
ttttcaataacttcc

SEQ ID NO: 944369 - DNA, 15 bp, Homo sapiens
tttcaataacttcca

SEQ ID NO: 944370 - DNA, 15 bp, Homo sapiens
ttcaataacttccaa

SEQ ID NO: 944371 - DNA, 15 bp, Homo sapiens
tcaataacttccaaa

SEQ ID NO: 944372 - DNA, 15 bp, Homo sapiens
caataacttccaaag

SEQ ID NO: 944373 - DNA, 15 bp, Homo sapiens
aataacttccaaagg

SEQ ID NO: 944374 - DNA, 15 bp, Homo sapiens
ataacttccaaaggc

SEQ ID NO: 944375 - DNA, 15 bp, Homo sapiens
taacttccaaaggcc

SEQ ID NO: 944376 - DNA, 15 bp, Homo sapiens
aacttccaaaggccc

SEQ ID NO: 944377 - DNA, 15 bp, Homo sapiens
acttccaaaggccca

SEQ ID NO: 944378 - DNA, 15 bp, Homo sapiens
cttccaaaggcccaa

SEQ ID NO: 944379 - DNA, 15 bp, Homo sapiens
ttccaaaggcccaac

SEQ ID NO: 944380 - DNA, 15 bp, Homo sapiens
tccaaaggcccaaca

SEQ ID NO: 944381 - DNA, 15 bp, Homo sapiens
ccaaaggcccaacaa

SEQ ID NO: 944382 - DNA, 15 bp, Homo sapiens
caaaggcccaacaac

SEQ ID NO: 944383 - DNA, 15 bp, Homo sapiens
aaaggcccaacaact

SEQ ID NO: 944384 - DNA, 15 bp, Homo sapiens
aaggcccaacaacta

SEQ ID NO: 944385 - DNA, 15 bp, Homo sapiens
aggcccaacaactag

SEQ ID NO: 944386 - DNA, 15 bp, Homo sapiens
ggcccaacaactagc

SEQ ID NO: 944387 - DNA, 15 bp, Homo sapiens
gcccaacaactagcc

SEQ ID NO: 944388 - DNA, 15 bp, Homo sapiens
cccaacaactagcca

SEQ ID NO: 944389 - DNA, 15 bp, Homo sapiens
ccaacaactagccag

SEQ ID NO: 944390 - DNA, 15 bp, Homo sapiens
caacaactagccagt

SEQ ID NO: 944391 - DNA, 15 bp, Homo sapiens
aacaactagccagtg

SEQ ID NO: 944392 - DNA, 15 bp, Homo sapiens
acaactagccagtga

SEQ ID NO: 944393 - DNA, 15 bp, Homo sapiens
caactagccagtgat

SEQ ID NO: 944394 - DNA, 15 bp, Homo sapiens
aactagccagtgatg

SEQ ID NO: 944395 - DNA, 15 bp, Homo sapiens
actagccagtgatgg

SEQ ID NO: 944396 - DNA, 15 bp, Homo sapiens
ctagccagtgatgga

SEQ ID NO: 944397 - DNA, 15 bp, Homo sapiens
tagccagtgatggaa

SEQ ID NO: 944398 - DNA, 15 bp, Homo sapiens
agccagtgatggaat

SEQ ID NO: 944399 - DNA, 15 bp, Homo sapiens
gccagtgatggaatc

SEQ ID NO: 944400 - DNA, 15 bp, Homo sapiens
ccagtgatggaatca

SEQ ID NO: 944401 - DNA, 15 bp, Homo sapiens
cagtgatggaatcag

SEQ ID NO: 944402 - DNA, 15 bp, Homo sapiens
agtgatggaatcagg

SEQ ID NO: 944403 - DNA, 15 bp, Homo sapiens
gtgatggaatcagga

SEQ ID NO: 944404 - DNA, 15 bp, Homo sapiens
tgatggaatcaggat

SEQ ID NO: 944405 - DNA, 15 bp, Homo sapiens
gatggaatcaggatt

SEQ ID NO: 944406 - DNA, 15 bp, Homo sapiens
atggaatcaggattt

SEQ ID NO: 944407 - DNA, 15 bp, Homo sapiens
tggaatcaggatttg

SEQ ID NO: 944408 - DNA, 15 bp, Homo sapiens
ggaatcaggatttga

SEQ ID NO: 944409 - DNA, 15 bp, Homo sapiens
gaatcaggatttgaa

SEQ ID NO: 944410 - DNA, 15 bp, Homo sapiens
aatcaggatttgaac

SEQ ID NO: 944411 - DNA, 15 bp, Homo sapiens
atcaggatttgaacc

SEQ ID NO: 944412 - DNA, 15 bp, Homo sapiens
tcaggatttgaaccc

SEQ ID NO: 944413 - DNA, 15 bp, Homo sapiens
caggatttgaaccca

SEQ ID NO: 944414 - DNA, 15 bp, Homo sapiens
aggatttgaacccag

SEQ ID NO: 944415 - DNA, 15 bp, Homo sapiens
ggatttgaacccagc

SEQ ID NO: 944416 - DNA, 15 bp, Homo sapiens
gatttgaacccagct

SEQ ID NO: 944417 - DNA, 15 bp, Homo sapiens
atttgaacccagctg

SEQ ID NO: 944418 - DNA, 15 bp, Homo sapiens
tttgaacccagctga

SEQ ID NO: 944419 - DNA, 15 bp, Homo sapiens
ttgaacccagctgat

SEQ ID NO: 944420 - DNA, 15 bp, Homo sapiens
tgaacccagctgatg

SEQ ID NO: 944421 - DNA, 15 bp, Homo sapiens
gaacccagctgatgc

SEQ ID NO: 944422 - DNA, 15 bp, Homo sapiens
aacccagctgatgct

SEQ ID NO: 944423 - DNA, 15 bp, Homo sapiens
acccagctgatgctc

SEQ ID NO: 944424 - DNA, 15 bp, Homo sapiens
cccagctgatgctct

SEQ ID NO: 944425 - DNA, 15 bp, Homo sapiens
ccagctgatgctctc

SEQ ID NO: 944426 - DNA, 15 bp, Homo sapiens
cagctgatgctctct

SEQ ID NO: 944427 - DNA, 15 bp, Homo sapiens
agctgatgctctctc

SEQ ID NO: 944428 - DNA, 15 bp, Homo sapiens
gctgatgctctctcc

SEQ ID NO: 944429 - DNA, 15 bp, Homo sapiens
ctgatgctctctccc

SEQ ID NO: 944430 - DNA, 15 bp, Homo sapiens
tgatgctctctccct

SEQ ID NO: 944431 - DNA, 15 bp, Homo sapiens
gatgctctctccctg

SEQ ID NO: 944432 - DNA, 15 bp, Homo sapiens
atgctctctccctgt

SEQ ID NO: 944433 - DNA, 15 bp, Homo sapiens
tgctctctccctgta

SEQ ID NO: 944434 - DNA, 15 bp, Homo sapiens
gctctctccctgtac

SEQ ID NO: 944435 - DNA, 15 bp, Homo sapiens
ctctctccctgtacc

SEQ ID NO: 944436 - DNA, 15 bp, Homo sapiens
tctctccctgtaccc

SEQ ID NO: 944437 - DNA, 15 bp, Homo sapiens
ctctccctgtacccc

SEQ ID NO: 944438 - DNA, 15 bp, Homo sapiens
tctccctgtacccca

SEQ ID NO: 944439 - DNA, 15 bp, Homo sapiens
ctccctgtaccccag

SEQ ID NO: 944440 - DNA, 15 bp, Homo sapiens
tccctgtaccccagt

SEQ ID NO: 944441 - DNA, 15 bp, Homo sapiens
ccctgtaccccagta

SEQ ID NO: 944442 - DNA, 15 bp, Homo sapiens
cctgtaccccagtac

SEQ ID NO: 944443 - DNA, 15 bp, Homo sapiens
ctgtaccccagtacc

SEQ ID NO: 944444 - DNA, 15 bp, Homo sapiens
tgtaccccagtacct

SEQ ID NO: 944445 - DNA, 15 bp, Homo sapiens
gtaccccagtacctg

SEQ ID NO: 944446 - DNA, 15 bp, Homo sapiens
taccccagtacctgc

SEQ ID NO: 944447 - DNA, 15 bp, Homo sapiens
accccagtacctgcc

SEQ ID NO: 944448 - DNA, 15 bp, Homo sapiens
ccccagtacctgccc

SEQ ID NO: 944449 - DNA, 15 bp, Homo sapiens
cccagtacctgccca

SEQ ID NO: 944450 - DNA, 15 bp, Homo sapiens
ccagtacctgcccag

SEQ ID NO: 944451 - DNA, 15 bp, Homo sapiens
cagtacctgcccagg

SEQ ID NO: 944452 - DNA, 15 bp, Homo sapiens
agtacctgcccaggc

SEQ ID NO: 944453 - DNA, 15 bp, Homo sapiens
gtacctgcccaggct

SEQ ID NO: 944454 - DNA, 15 bp, Homo sapiens
tacctgcccaggctc

SEQ ID NO: 944455 - DNA, 15 bp, Homo sapiens
acctgcccaggctct

SEQ ID NO: 944456 - DNA, 15 bp, Homo sapiens
cctgcccaggctctt

SEQ ID NO: 944457 - DNA, 15 bp, Homo sapiens
ctgcccaggctcttg

SEQ ID NO: 944458 - DNA, 15 bp, Homo sapiens
tgcccaggctcttgt

SEQ ID NO: 944459 - DNA, 15 bp, Homo sapiens
gcccaggctcttgtc

SEQ ID NO: 944460 - DNA, 15 bp, Homo sapiens
cccaggctcttgtca

SEQ ID NO: 944461 - DNA, 15 bp, Homo sapiens
ccaggctcttgtcaa

SEQ ID NO: 944462 - DNA, 15 bp, Homo sapiens
caggctcttgtcaaa

SEQ ID NO: 944463 - DNA, 15 bp, Homo sapiens
aggctcttgtcaaac

SEQ ID NO: 944464 - DNA, 15 bp, Homo sapiens
ggctcttgtcaaact

SEQ ID NO: 944465 - DNA, 15 bp, Homo sapiens
gctcttgtcaaactt

SEQ ID NO: 944466 - DNA, 15 bp, Homo sapiens
ctcttgtcaaacttg

SEQ ID NO: 944467 - DNA, 15 bp, Homo sapiens
tcttgtcaaacttga

SEQ ID NO: 944468 - DNA, 15 bp, Homo sapiens
cttgtcaaacttgaa

SEQ ID NO: 944469 - DNA, 15 bp, Homo sapiens
ttgtcaaacttgaaa

SEQ ID NO: 944470 - DNA, 15 bp, Homo sapiens
tgtcaaacttgaaat

SEQ ID NO: 944471 - DNA, 15 bp, Homo sapiens
gtcaaacttgaaata

SEQ ID NO: 944472 - DNA, 15 bp, Homo sapiens
tcaaacttgaaatat

SEQ ID NO: 944473 - DNA, 15 bp, Homo sapiens
caaacttgaaatatt

SEQ ID NO: 944474 - DNA, 15 bp, Homo sapiens
aaacttgaaatattt

SEQ ID NO: 944475 - DNA, 15 bp, Homo sapiens
aacttgaaatatttg

SEQ ID NO: 944476 - DNA, 15 bp, Homo sapiens
acttgaaatatttgg

SEQ ID NO: 944477 - DNA, 15 bp, Homo sapiens
cttgaaatatttgga

SEQ ID NO: 944478 - DNA, 15 bp, Homo sapiens
ttgaaatatttggag

SEQ ID NO: 944479 - DNA, 15 bp, Homo sapiens
tgaaatatttggagt

SEQ ID NO: 944480 - DNA, 15 bp, Homo sapiens
gaaatatttggagtg

SEQ ID NO: 944481 - DNA, 15 bp, Homo sapiens
aaatatttggagtga

SEQ ID NO: 944482 - DNA, 15 bp, Homo sapiens
aatatttggagtgat

SEQ ID NO: 944483 - DNA, 15 bp, Homo sapiens
atatttggagtgata

SEQ ID NO: 944484 - DNA, 15 bp, Homo sapiens
tatttggagtgatag

SEQ ID NO: 944485 - DNA, 15 bp, Homo sapiens
atttggagtgatagt

SEQ ID NO: 944486 - DNA, 15 bp, Homo sapiens
tttggagtgatagtg

SEQ ID NO: 944487 - DNA, 15 bp, Homo sapiens
ttggagtgatagtga

SEQ ID NO: 944488 - DNA, 15 bp, Homo sapiens
tggagtgatagtgaa

SEQ ID NO: 944489 - DNA, 15 bp, Homo sapiens
ggagtgatagtgaac

SEQ ID NO: 944490 - DNA, 15 bp, Homo sapiens
gagtgatagtgaaca

SEQ ID NO: 944491 - DNA, 15 bp, Homo sapiens
agtgatagtgaacag

SEQ ID NO: 944492 - DNA, 15 bp, Homo sapiens
gtgatagtgaacagc

SEQ ID NO: 944493 - DNA, 15 bp, Homo sapiens
tgatagtgaacagcc

SEQ ID NO: 944494 - DNA, 15 bp, Homo sapiens
gatagtgaacagcca

SEQ ID NO: 944495 - DNA, 15 bp, Homo sapiens
atagtgaacagccaa

SEQ ID NO: 944496 - DNA, 15 bp, Homo sapiens
tagtgaacagccaag

SEQ ID NO: 944497 - DNA, 15 bp, Homo sapiens
agtgaacagccaagc

SEQ ID NO: 944498 - DNA, 15 bp, Homo sapiens
gtgaacagccaagcc

SEQ ID NO: 944499 - DNA, 15 bp, Homo sapiens
tgaacagccaagccc

SEQ ID NO: 944500 - DNA, 15 bp, Homo sapiens
gaacagccaagccca

SEQ ID NO: 944501 - DNA, 15 bp, Homo sapiens
aacagccaagcccac

SEQ ID NO: 944502 - DNA, 15 bp, Homo sapiens
acagccaagcccaca

SEQ ID NO: 944503 - DNA, 15 bp, Homo sapiens
cagccaagcccacaa

SEQ ID NO: 944504 - DNA, 15 bp, Homo sapiens
agccaagcccacaag

SEQ ID NO: 944505 - DNA, 15 bp, Homo sapiens
gccaagcccacaagg

SEQ ID NO: 944506 - DNA, 15 bp, Homo sapiens
ccaagcccacaaggg

SEQ ID NO: 944507 - DNA, 15 bp, Homo sapiens
caagcccacaagggg

SEQ ID NO: 944508 - DNA, 15 bp, Homo sapiens
aagcccacaagggga

SEQ ID NO: 944509 - DNA, 15 bp, Homo sapiens
agcccacaaggggaa

SEQ ID NO: 944510 - DNA, 15 bp, Homo sapiens
gcccacaaggggaaa

SEQ ID NO: 944511 - DNA, 15 bp, Homo sapiens
cccacaaggggaaaa

SEQ ID NO: 944512 - DNA, 15 bp, Homo sapiens
ccacaaggggaaaag

SEQ ID NO: 944513 - DNA, 15 bp, Homo sapiens
cacaaggggaaaagt

SEQ ID NO: 944514 - DNA, 15 bp, Homo sapiens
acaaggggaaaagta

SEQ ID NO: 944515 - DNA, 15 bp, Homo sapiens
caaggggaaaagtat

SEQ ID NO: 944516 - DNA, 15 bp, Homo sapiens
aaggggaaaagtatg

SEQ ID NO: 944517 - DNA, 15 bp, Homo sapiens
aggggaaaagtatgt

SEQ ID NO: 944518 - DNA, 15 bp, Homo sapiens
ggggaaaagtatgtt

SEQ ID NO: 944519 - DNA, 15 bp, Homo sapiens
gggaaaagtatgtta

SEQ ID NO: 944520 - DNA, 15 bp, Homo sapiens
ggaaaagtatgttaa

SEQ ID NO: 944521 - DNA, 15 bp, Homo sapiens
gaaaagtatgttaaa

SEQ ID NO: 944522 - DNA, 15 bp, Homo sapiens
aaaagtatgttaaaa

SEQ ID NO: 944523 - DNA, 15 bp, Homo sapiens
aaagtatgttaaaat

SEQ ID NO: 944524 - DNA, 15 bp, Homo sapiens
aagtatgttaaaata

SEQ ID NO: 944525 - DNA, 15 bp, Homo sapiens
agtatgttaaaatag

SEQ ID NO: 944526 - DNA, 15 bp, Homo sapiens
gtatgttaaaataga

SEQ ID NO: 944527 - DNA, 15 bp, Homo sapiens
tatgttaaaatagag

SEQ ID NO: 944528 - DNA, 15 bp, Homo sapiens
atgttaaaatagagt

SEQ ID NO: 944529 - DNA, 15 bp, Homo sapiens
tgttaaaatagagtt

SEQ ID NO: 944530 - DNA, 15 bp, Homo sapiens
gttaaaatagagttg

SEQ ID NO: 944531 - DNA, 15 bp, Homo sapiens
ttaaaatagagttgg

SEQ ID NO: 944532 - DNA, 15 bp, Homo sapiens
taaaatagagttgga

SEQ ID NO: 944533 - DNA, 15 bp, Homo sapiens
aaaatagagttggat

SEQ ID NO: 944534 - DNA, 15 bp, Homo sapiens
aaatagagttggata

SEQ ID NO: 944535 - DNA, 15 bp, Homo sapiens
aatagagttggatat

SEQ ID NO: 944536 - DNA, 15 bp, Homo sapiens
atagagttggatatt

SEQ ID NO: 944537 - DNA, 15 bp, Homo sapiens
tagagttggatattg

SEQ ID NO: 944538 - DNA, 15 bp, Homo sapiens
agagttggatattgc

SEQ ID NO: 944539 - DNA, 15 bp, Homo sapiens
gagttggatattgca

SEQ ID NO: 944540 - DNA, 15 bp, Homo sapiens
agttggatattgcat

SEQ ID NO: 944541 - DNA, 15 bp, Homo sapiens
gttggatattgcata

SEQ ID NO: 944542 - DNA, 15 bp, Homo sapiens
ttggatattgcatat

SEQ ID NO: 944543 - DNA, 15 bp, Homo sapiens
tggatattgcatatc

SEQ ID NO: 944544 - DNA, 15 bp, Homo sapiens
ggatattgcatatca

SEQ ID NO: 944545 - DNA, 15 bp, Homo sapiens
gatattgcatatcaa

SEQ ID NO: 944546 - DNA, 15 bp, Homo sapiens
atattgcatatcaaa

SEQ ID NO: 944547 - DNA, 15 bp, Homo sapiens
tattgcatatcaaag

SEQ ID NO: 944548 - DNA, 15 bp, Homo sapiens
attgcatatcaaaga

SEQ ID NO: 944549 - DNA, 15 bp, Homo sapiens
ttgcatatcaaagaa

SEQ ID NO: 944550 - DNA, 15 bp, Homo sapiens
tgcatatcaaagaag

SEQ ID NO: 944551 - DNA, 15 bp, Homo sapiens
gcatatcaaagaaga

SEQ ID NO: 944552 - DNA, 15 bp, Homo sapiens
catatcaaagaagat

SEQ ID NO: 944553 - DNA, 15 bp, Homo sapiens
atatcaaagaagata

SEQ ID NO: 944554 - DNA, 15 bp, Homo sapiens
tatcaaagaagataa

SEQ ID NO: 944555 - DNA, 15 bp, Homo sapiens
atcaaagaagataat

SEQ ID NO: 944556 - DNA, 15 bp, Homo sapiens
tcaaagaagataata

SEQ ID NO: 944557 - DNA, 15 bp, Homo sapiens
caaagaagataataa

SEQ ID NO: 944558 - DNA, 15 bp, Homo sapiens
aaagaagataataaa

SEQ ID NO: 944559 - DNA, 15 bp, Homo sapiens
aagaagataataaac

SEQ ID NO: 944560 - DNA, 15 bp, Homo sapiens
agaagataataaaca

SEQ ID NO: 944561 - DNA, 15 bp, Homo sapiens
gaagataataaacat

SEQ ID NO: 944562 - DNA, 15 bp, Homo sapiens
aagataataaacatg

SEQ ID NO: 944563 - DNA, 15 bp, Homo sapiens
agataataaacatgt

SEQ ID NO: 944564 - DNA, 15 bp, Homo sapiens
gataataaacatgtg

SEQ ID NO: 944565 - DNA, 15 bp, Homo sapiens
ataataaacatgtga

SEQ ID NO: 944566 - DNA, 15 bp, Homo sapiens
taataaacatgtgac

SEQ ID NO: 944567 - DNA, 15 bp, Homo sapiens
aataaacatgtgact

SEQ ID NO: 944568 - DNA, 15 bp, Homo sapiens
ataaacatgtgactg

SEQ ID NO: 944569 - DNA, 15 bp, Homo sapiens
taaacatgtgactga

SEQ ID NO: 944570 - DNA, 15 bp, Homo sapiens
aaacatgtgactgac

SEQ ID NO: 944571 - DNA, 15 bp, Homo sapiens
aacatgtgactgacg

SEQ ID NO: 944572 - DNA, 15 bp, Homo sapiens
acatgtgactgacgt

SEQ ID NO: 944573 - DNA, 15 bp, Homo sapiens
catgtgactgacgta

SEQ ID NO: 944574 - DNA, 15 bp, Homo sapiens
atgtgactgacgtat

SEQ ID NO: 944575 - DNA, 15 bp, Homo sapiens
tgtgactgacgtatt

SEQ ID NO: 944576 - DNA, 15 bp, Homo sapiens
gtgactgacgtattg

SEQ ID NO: 944577 - DNA, 15 bp, Homo sapiens
tgactgacgtattgg

SEQ ID NO: 944578 - DNA, 15 bp, Homo sapiens
gactgacgtattggt

SEQ ID NO: 944579 - DNA, 15 bp, Homo sapiens
actgacgtattggta

SEQ ID NO: 944580 - DNA, 15 bp, Homo sapiens
ctgacgtattggtaa

SEQ ID NO: 944581 - DNA, 15 bp, Homo sapiens
tgacgtattggtaat

SEQ ID NO: 944582 - DNA, 15 bp, Homo sapiens
gacgtattggtaata

SEQ ID NO: 944583 - DNA, 15 bp, Homo sapiens
acgtattggtaatat

SEQ ID NO: 944584 - DNA, 15 bp, Homo sapiens
cgtattggtaatatt

SEQ ID NO: 944585 - DNA, 15 bp, Homo sapiens
gtattggtaatattt

SEQ ID NO: 944586 - DNA, 15 bp, Homo sapiens
tattggtaatatttg

SEQ ID NO: 944587 - DNA, 15 bp, Homo sapiens
attggtaatatttgt

SEQ ID NO: 944588 - DNA, 15 bp, Homo sapiens
ttggtaatatttgtg

SEQ ID NO: 944589 - DNA, 15 bp, Homo sapiens
tggtaatatttgtgg

SEQ ID NO: 944590 - DNA, 15 bp, Homo sapiens
ggtaatatttgtgga

SEQ ID NO: 944591 - DNA, 15 bp, Homo sapiens
gtaatatttgtggag

SEQ ID NO: 944592 - DNA, 15 bp, Homo sapiens
taatatttgtggagt

SEQ ID NO: 944593 - DNA, 15 bp, Homo sapiens
aatatttgtggagtt

SEQ ID NO: 944594 - DNA, 15 bp, Homo sapiens
atatttgtggagttt

SEQ ID NO: 944595 - DNA, 15 bp, Homo sapiens
tatttgtggagtttg

SEQ ID NO: 944596 - DNA, 15 bp, Homo sapiens
atttgtggagtttga

SEQ ID NO: 944597 - DNA, 15 bp, Homo sapiens
tttgtggagtttgaa

SEQ ID NO: 944598 - DNA, 15 bp, Homo sapiens
ttgtggagtttgaaa

SEQ ID NO: 944599 - DNA, 15 bp, Homo sapiens
tgtggagtttgaaag

SEQ ID NO: 944600 - DNA, 15 bp, Homo sapiens
gtggagtttgaaagg

SEQ ID NO: 944601 - DNA, 15 bp, Homo sapiens
tggagtttgaaaggt

SEQ ID NO: 944602 - DNA, 15 bp, Homo sapiens
ggagtttgaaaggtg

SEQ ID NO: 944603 - DNA, 15 bp, Homo sapiens
gagtttgaaaggtgt

SEQ ID NO: 944604 - DNA, 15 bp, Homo sapiens
agtttgaaaggtgtg

SEQ ID NO: 944605 - DNA, 15 bp, Homo sapiens
gtttgaaaggtgtga

SEQ ID NO: 944606 - DNA, 15 bp, Homo sapiens
tttgaaaggtgtgaa

SEQ ID NO: 944607 - DNA, 15 bp, Homo sapiens
ttgaaaggtgtgaac

SEQ ID NO: 944608 - DNA, 15 bp, Homo sapiens
tgaaaggtgtgaaca

SEQ ID NO: 944609 - DNA, 15 bp, Homo sapiens
gaaaggtgtgaacaa

SEQ ID NO: 944610 - DNA, 15 bp, Homo sapiens
aaaggtgtgaacaat

SEQ ID NO: 944611 - DNA, 15 bp, Homo sapiens
aaggtgtgaacaatt

SEQ ID NO: 944612 - DNA, 15 bp, Homo sapiens
aggtgtgaacaatta

SEQ ID NO: 944613 - DNA, 15 bp, Homo sapiens
ggtgtgaacaattag

SEQ ID NO: 944614 - DNA, 15 bp, Homo sapiens
gtgtgaacaattagc

SEQ ID NO: 944615 - DNA, 15 bp, Homo sapiens
tgtgaacaattagct

SEQ ID NO: 944616 - DNA, 15 bp, Homo sapiens
gtgaacaattagctt

SEQ ID NO: 944617 - DNA, 15 bp, Homo sapiens
tgaacaattagctta

SEQ ID NO: 944618 - DNA, 15 bp, Homo sapiens
gaacaattagcttag

SEQ ID NO: 944619 - DNA, 15 bp, Homo sapiens
aacaattagcttagt

SEQ ID NO: 944620 - DNA, 15 bp, Homo sapiens
acaattagcttagta

SEQ ID NO: 944621 - DNA, 15 bp, Homo sapiens
caattagcttagtat

SEQ ID NO: 944622 - DNA, 15 bp, Homo sapiens
aattagcttagtatt

SEQ ID NO: 944623 - DNA, 15 bp, Homo sapiens
attagcttagtattc

SEQ ID NO: 944624 - DNA, 15 bp, Homo sapiens
ttagcttagtattct

SEQ ID NO: 944625 - DNA, 15 bp, Homo sapiens
tagcttagtattctg

SEQ ID NO: 944626 - DNA, 15 bp, Homo sapiens
agcttagtattctgc

SEQ ID NO: 944627 - DNA, 15 bp, Homo sapiens
gcttagtattctgca

SEQ ID NO: 944628 - DNA, 15 bp, Homo sapiens
cttagtattctgcat

SEQ ID NO: 944629 - DNA, 15 bp, Homo sapiens
ttagtattctgcatc

SEQ ID NO: 944630 - DNA, 15 bp, Homo sapiens
tagtattctgcatca

SEQ ID NO: 944631 - DNA, 15 bp, Homo sapiens
agtattctgcatcag

SEQ ID NO: 944632 - DNA, 15 bp, Homo sapiens
gtattctgcatcagt

SEQ ID NO: 944633 - DNA, 15 bp, Homo sapiens
tattctgcatcagta

SEQ ID NO: 944634 - DNA, 15 bp, Homo sapiens
attctgcatcagtaa

SEQ ID NO: 944635 - DNA, 15 bp, Homo sapiens
ttctgcatcagtaag

SEQ ID NO: 944636 - DNA, 15 bp, Homo sapiens
tctgcatcagtaaga

SEQ ID NO: 944637 - DNA, 15 bp, Homo sapiens
ctgcatcagtaagat

SEQ ID NO: 944638 - DNA, 15 bp, Homo sapiens
tgcatcagtaagatt

SEQ ID NO: 944639 - DNA, 15 bp, Homo sapiens
gcatcagtaagattc

SEQ ID NO: 944640 - DNA, 15 bp, Homo sapiens
catcagtaagattct

SEQ ID NO: 944641 - DNA, 15 bp, Homo sapiens
atcagtaagattcta

SEQ ID NO: 944642 - DNA, 15 bp, Homo sapiens
tcagtaagattctat

SEQ ID NO: 944643 - DNA, 15 bp, Homo sapiens
cagtaagattctatg

SEQ ID NO: 944644 - DNA, 15 bp, Homo sapiens
agtaagattctatga

SEQ ID NO: 944645 - DNA, 15 bp, Homo sapiens
gtaagattctatgaa

SEQ ID NO: 944646 - DNA, 15 bp, Homo sapiens
taagattctatgaaa

SEQ ID NO: 944647 - DNA, 15 bp, Homo sapiens
aagattctatgaaac

SEQ ID NO: 944648 - DNA, 15 bp, Homo sapiens
agattctatgaaact

SEQ ID NO: 944649 - DNA, 15 bp, Homo sapiens
gattctatgaaactg

SEQ ID NO: 944650 - DNA, 15 bp, Homo sapiens
attctatgaaactga

SEQ ID NO: 944651 - DNA, 15 bp, Homo sapiens
ttctatgaaactgaa

SEQ ID NO: 944652 - DNA, 15 bp, Homo sapiens
tctatgaaactgaaa

SEQ ID NO: 944653 - DNA, 15 bp, Homo sapiens
ctatgaaactgaaat

SEQ ID NO: 944654 - DNA, 15 bp, Homo sapiens
tatgaaactgaaatt

SEQ ID NO: 944655 - DNA, 15 bp, Homo sapiens
atgaaactgaaatta

SEQ ID NO: 944656 - DNA, 15 bp, Homo sapiens
tgaaactgaaattac

SEQ ID NO: 944657 - DNA, 15 bp, Homo sapiens
gaaactgaaattact

SEQ ID NO: 944658 - DNA, 15 bp, Homo sapiens
aaactgaaattactg

SEQ ID NO: 944659 - DNA, 15 bp, Homo sapiens
aactgaaattactgt

SEQ ID NO: 944660 - DNA, 15 bp, Homo sapiens
actgaaattactgtt

SEQ ID NO: 944661 - DNA, 15 bp, Homo sapiens
ctgaaattactgttt

SEQ ID NO: 944662 - DNA, 15 bp, Homo sapiens
tgaaattactgtttt

SEQ ID NO: 944663 - DNA, 15 bp, Homo sapiens
gaaattactgtttta

SEQ ID NO: 944664 - DNA, 15 bp, Homo sapiens
aaattactgttttaa

SEQ ID NO: 944665 - DNA, 15 bp, Homo sapiens
aattactgttttaat

SEQ ID NO: 944666 - DNA, 15 bp, Homo sapiens
attactgttttaatt

SEQ ID NO: 944667 - DNA, 15 bp, Homo sapiens
ttactgttttaattt

SEQ ID NO: 944668 - DNA, 15 bp, Homo sapiens
tactgttttaatttt

SEQ ID NO: 944669 - DNA, 15 bp, Homo sapiens
actgttttaattttt

SEQ ID NO: 944670 - DNA, 15 bp, Homo sapiens
ctgttttaatttttt

SEQ ID NO: 944671 - DNA, 15 bp, Homo sapiens
tgttttaatttttta

SEQ ID NO: 944672 - DNA, 15 bp, Homo sapiens
gttttaattttttat

SEQ ID NO: 944673 - DNA, 15 bp, Homo sapiens
ttttaattttttatt

SEQ ID NO: 944674 - DNA, 15 bp, Homo sapiens
tttaattttttattt

SEQ ID NO: 944675 - DNA, 15 bp, Homo sapiens
ttaattttttatttt

SEQ ID NO: 944676 - DNA, 15 bp, Homo sapiens
taattttttattttt

SEQ ID NO: 944677 - DNA, 15 bp, Homo sapiens
aattttttattttta

SEQ ID NO: 944678 - DNA, 15 bp, Homo sapiens
attttttatttttaa

SEQ ID NO: 944679 - DNA, 15 bp, Homo sapiens
tttttatttttaaag

SEQ ID NO: 944680 - DNA, 15 bp, Homo sapiens
ttttatttttaaagt

SEQ ID NO: 944681 - DNA, 15 bp, Homo sapiens
tttatttttaaagta

SEQ ID NO: 944682 - DNA, 15 bp, Homo sapiens
ttatttttaaagtat

SEQ ID NO: 944683 - DNA, 15 bp, Homo sapiens
tatttttaaagtatg

SEQ ID NO: 944684 - DNA, 15 bp, Homo sapiens
atttttaaagtatga

SEQ ID NO: 944685 - DNA, 15 bp, Homo sapiens
tttttaaagtatgat

SEQ ID NO: 944686 - DNA, 15 bp, Homo sapiens
ttttaaagtatgatt

SEQ ID NO: 944687 - DNA, 15 bp, Homo sapiens
tttaaagtatgattt

SEQ ID NO: 944688 - DNA, 15 bp, Homo sapiens
ttaaagtatgatttc

SEQ ID NO: 944689 - DNA, 15 bp, Homo sapiens
taaagtatgatttca

SEQ ID NO: 944690 - DNA, 15 bp, Homo sapiens
aaagtatgatttcag

SEQ ID NO: 944691 - DNA, 15 bp, Homo sapiens
aagtatgatttcaga

SEQ ID NO: 944692 - DNA, 15 bp, Homo sapiens
agtatgatttcagaa

SEQ ID NO: 944693 - DNA, 15 bp, Homo sapiens
gtatgatttcagaac

SEQ ID NO: 944694 - DNA, 15 bp, Homo sapiens
tatgatttcagaact

SEQ ID NO: 944695 - DNA, 15 bp, Homo sapiens
atgatttcagaacta

SEQ ID NO: 944696 - DNA, 15 bp, Homo sapiens
tgatttcagaactat

SEQ ID NO: 944697 - DNA, 15 bp, Homo sapiens
gatttcagaactatg

SEQ ID NO: 944698 - DNA, 15 bp, Homo sapiens
atttcagaactatgg

SEQ ID NO: 944699 - DNA, 15 bp, Homo sapiens
tttcagaactatggg

SEQ ID NO: 944700 - DNA, 15 bp, Homo sapiens
ttcagaactatggga

SEQ ID NO: 944701 - DNA, 15 bp, Homo sapiens
tcagaactatgggat

SEQ ID NO: 944702 - DNA, 15 bp, Homo sapiens
cagaactatgggatt

SEQ ID NO: 944703 - DNA, 15 bp, Homo sapiens
agaactatgggattt

SEQ ID NO: 944704 - DNA, 15 bp, Homo sapiens
gaactatgggattta

SEQ ID NO: 944705 - DNA, 15 bp, Homo sapiens
aactatgggatttat

SEQ ID NO: 944706 - DNA, 15 bp, Homo sapiens
actatgggatttata

SEQ ID NO: 944707 - DNA, 15 bp, Homo sapiens
ctatgggatttataa

SEQ ID NO: 944708 - DNA, 15 bp, Homo sapiens
tatgggatttataat

SEQ ID NO: 944709 - DNA, 15 bp, Homo sapiens
atgggatttataata

SEQ ID NO: 944710 - DNA, 15 bp, Homo sapiens
tgggatttataataa

SEQ ID NO: 944711 - DNA, 15 bp, Homo sapiens
gggatttataataat

SEQ ID NO: 944712 - DNA, 15 bp, Homo sapiens
ggatttataataatt

SEQ ID NO: 944713 - DNA, 15 bp, Homo sapiens
gatttataataatta

SEQ ID NO: 944714 - DNA, 15 bp, Homo sapiens
atttataataattaa

SEQ ID NO: 944715 - DNA, 15 bp, Homo sapiens
ttataataattaaaa

SEQ ID NO: 944716 - DNA, 15 bp, Homo sapiens
tataataattaaaat

SEQ ID NO: 944717 - DNA, 15 bp, Homo sapiens
ataataattaaaata

SEQ ID NO: 944718 - DNA, 15 bp, Homo sapiens
taataattaaaatat

SEQ ID NO: 944719 - DNA, 15 bp, Homo sapiens
aataattaaaatatt

SEQ ID NO: 944720 - DNA, 15 bp, Homo sapiens
ataattaaaatattg

SEQ ID NO: 944721 - DNA, 15 bp, Homo sapiens
taattaaaatattga

SEQ ID NO: 944722 - DNA, 15 bp, Homo sapiens
aattaaaatattgac

SEQ ID NO: 944723 - DNA, 15 bp, Homo sapiens
attaaaatattgact

SEQ ID NO: 944724 - DNA, 15 bp, Homo sapiens
ttaaaatattgacta

SEQ ID NO: 944725 - DNA, 15 bp, Homo sapiens
taaaatattgactac

SEQ ID NO: 944726 - DNA, 15 bp, Homo sapiens
aaaatattgactacg

SEQ ID NO: 944727 - DNA, 15 bp, Homo sapiens
aaatattgactacga

SEQ ID NO: 944728 - DNA, 15 bp, Homo sapiens
aatattgactacgaa

SEQ ID NO: 944729 - DNA, 15 bp, Homo sapiens
atattgactacgaag

SEQ ID NO: 944730 - DNA, 15 bp, Homo sapiens
tattgactacgaaga

SEQ ID NO: 944731 - DNA, 15 bp, Homo sapiens
attgactacgaagaa

SEQ ID NO: 944732 - DNA, 15 bp, Homo sapiens
ttgactacgaagaaa

SEQ ID NO: 944733 - DNA, 15 bp, Homo sapiens
tgactacgaagaaat

SEQ ID NO: 944734 - DNA, 15 bp, Homo sapiens
gactacgaagaaatc

SEQ ID NO: 944735 - DNA, 15 bp, Homo sapiens
actacgaagaaatca

SEQ ID NO: 944736 - DNA, 15 bp, Homo sapiens
ctacgaagaaatcat

SEQ ID NO: 944737 - DNA, 15 bp, Homo sapiens
tacgaagaaatcatt

SEQ ID NO: 944738 - DNA, 15 bp, Homo sapiens
acgaagaaatcattt

SEQ ID NO: 944739 - DNA, 15 bp, Homo sapiens
cgaagaaatcatttt

SEQ ID NO: 944740 - DNA, 15 bp, Homo sapiens
gaagaaatcattttt

SEQ ID NO: 944741 - DNA, 15 bp, Homo sapiens
aagaaatcatttttc

SEQ ID NO: 944742 - DNA, 15 bp, Homo sapiens
agaaatcatttttca

SEQ ID NO: 944743 - DNA, 15 bp, Homo sapiens
gaaatcatttttcag

SEQ ID NO: 944744 - DNA, 15 bp, Homo sapiens
aaatcatttttcagc

SEQ ID NO: 944745 - DNA, 15 bp, Homo sapiens
aatcatttttcagct

SEQ ID NO: 944746 - DNA, 15 bp, Homo sapiens
atcatttttcagctt

SEQ ID NO: 944747 - DNA, 15 bp, Homo sapiens
tcatttttcagcttt

SEQ ID NO: 944748 - DNA, 15 bp, Homo sapiens
catttttcagcttta

SEQ ID NO: 944749 - DNA, 15 bp, Homo sapiens
atttttcagctttat

SEQ ID NO: 944750 - DNA, 15 bp, Homo sapiens
tttttcagctttatt

SEQ ID NO: 944751 - DNA, 15 bp, Homo sapiens
ttttcagctttattt

SEQ ID NO: 944752 - DNA, 15 bp, Homo sapiens
tttcagctttattta

SEQ ID NO: 944753 - DNA, 15 bp, Homo sapiens
ttcagctttatttat

SEQ ID NO: 944754 - DNA, 15 bp, Homo sapiens
tcagctttatttatg

SEQ ID NO: 944755 - DNA, 15 bp, Homo sapiens
cagctttatttatgg

SEQ ID NO: 944756 - DNA, 15 bp, Homo sapiens
agctttatttatggg

SEQ ID NO: 944757 - DNA, 15 bp, Homo sapiens
gctttatttatggga

SEQ ID NO: 944758 - DNA, 15 bp, Homo sapiens
ctttatttatgggat

SEQ ID NO: 944759 - DNA, 15 bp, Homo sapiens
tttatttatgggatg

SEQ ID NO: 944760 - DNA, 15 bp, Homo sapiens
ttatttatgggatgg

SEQ ID NO: 944761 - DNA, 15 bp, Homo sapiens
tatttatgggatggg

SEQ ID NO: 944762 - DNA, 15 bp, Homo sapiens
atttatgggatgggg

SEQ ID NO: 944763 - DNA, 15 bp, Homo sapiens
tttatgggatgggga

SEQ ID NO: 944764 - DNA, 15 bp, Homo sapiens
ttatgggatggggat

SEQ ID NO: 944765 - DNA, 15 bp, Homo sapiens
tatgggatggggatg

SEQ ID NO: 944766 - DNA, 15 bp, Homo sapiens
atgggatggggatgc

SEQ ID NO: 944767 - DNA, 15 bp, Homo sapiens
tgggatggggatgca

SEQ ID NO: 944768 - DNA, 15 bp, Homo sapiens
gggatggggatgcaa

SEQ ID NO: 944769 - DNA, 15 bp, Homo sapiens
ggatggggatgcaaa

SEQ ID NO: 944770 - DNA, 15 bp, Homo sapiens
gatggggatgcaaaa

SEQ ID NO: 944771 - DNA, 15 bp, Homo sapiens
atggggatgcaaaag

SEQ ID NO: 944772 - DNA, 15 bp, Homo sapiens
tggggatgcaaaagc

SEQ ID NO: 944773 - DNA, 15 bp, Homo sapiens
ggggatgcaaaagct

SEQ ID NO: 944774 - DNA, 15 bp, Homo sapiens
gggatgcaaaagctt

SEQ ID NO: 944775 - DNA, 15 bp, Homo sapiens
ggatgcaaaagctta

SEQ ID NO: 944776 - DNA, 15 bp, Homo sapiens
gatgcaaaagcttat

SEQ ID NO: 944777 - DNA, 15 bp, Homo sapiens
atgcaaaagcttatt

SEQ ID NO: 944778 - DNA, 15 bp, Homo sapiens
tgcaaaagcttatta

SEQ ID NO: 944779 - DNA, 15 bp, Homo sapiens
gcaaaagcttattaa

SEQ ID NO: 944780 - DNA, 15 bp, Homo sapiens
caaaagcttattaaa

SEQ ID NO: 944781 - DNA, 15 bp, Homo sapiens
aaaagcttattaaat

SEQ ID NO: 944782 - DNA, 15 bp, Homo sapiens
aaagcttattaaata

SEQ ID NO: 944783 - DNA, 15 bp, Homo sapiens
aagcttattaaataa

SEQ ID NO: 944784 - DNA, 15 bp, Homo sapiens
agcttattaaataag

SEQ ID NO: 944785 - DNA, 15 bp, Homo sapiens
gcttattaaataagt

SEQ ID NO: 944786 - DNA, 15 bp, Homo sapiens
cttattaaataagtc

SEQ ID NO: 944787 - DNA, 15 bp, Homo sapiens
ttattaaataagtct

SEQ ID NO: 944788 - DNA, 15 bp, Homo sapiens
tattaaataagtctg

SEQ ID NO: 944789 - DNA, 15 bp, Homo sapiens
attaaataagtctgc

SEQ ID NO: 944790 - DNA, 15 bp, Homo sapiens
ttaaataagtctgca

SEQ ID NO: 944791 - DNA, 15 bp, Homo sapiens
taaataagtctgcat

SEQ ID NO: 944792 - DNA, 15 bp, Homo sapiens
aaataagtctgcatg

SEQ ID NO: 944793 - DNA, 15 bp, Homo sapiens
aataagtctgcatgg

SEQ ID NO: 944794 - DNA, 15 bp, Homo sapiens
ataagtctgcatggc

SEQ ID NO: 944795 - DNA, 15 bp, Homo sapiens
taagtctgcatggcc

SEQ ID NO: 944796 - DNA, 15 bp, Homo sapiens
aagtctgcatggcca

SEQ ID NO: 944797 - DNA, 15 bp, Homo sapiens
agtctgcatggccaa

SEQ ID NO: 944798 - DNA, 15 bp, Homo sapiens
gtctgcatggccaaa

SEQ ID NO: 944799 - DNA, 15 bp, Homo sapiens
tctgcatggccaaaa

SEQ ID NO: 944800 - DNA, 15 bp, Homo sapiens
ctgcatggccaaaaa

SEQ ID NO: 944801 - DNA, 15 bp, Homo sapiens
tgcatggccaaaaaa

SEQ ID NO: 944802 - DNA, 15 bp, Homo sapiens
gcatggccaaaaaat

SEQ ID NO: 944803 - DNA, 15 bp, Homo sapiens
catggccaaaaaata

SEQ ID NO: 944804 - DNA, 15 bp, Homo sapiens
atggccaaaaaatac

SEQ ID NO: 944805 - DNA, 15 bp, Homo sapiens
tggccaaaaaataca

SEQ ID NO: 944806 - DNA, 15 bp, Homo sapiens
ggccaaaaaatacaa

SEQ ID NO: 944807 - DNA, 15 bp, Homo sapiens
gccaaaaaatacaag

SEQ ID NO: 944808 - DNA, 15 bp, Homo sapiens
ccaaaaaatacaagc

SEQ ID NO: 944809 - DNA, 15 bp, Homo sapiens
caaaaaatacaagca

SEQ ID NO: 944810 - DNA, 15 bp, Homo sapiens
aaaaaatacaagcaa

SEQ ID NO: 944811 - DNA, 15 bp, Homo sapiens
aaaaatacaagcaat

SEQ ID NO: 944812 - DNA, 15 bp, Homo sapiens
aaaatacaagcaata

SEQ ID NO: 944813 - DNA, 15 bp, Homo sapiens
aaatacaagcaatag

SEQ ID NO: 944814 - DNA, 15 bp, Homo sapiens
aatacaagcaataga

SEQ ID NO: 944815 - DNA, 15 bp, Homo sapiens
atacaagcaatagaa

SEQ ID NO: 944816 - DNA, 15 bp, Homo sapiens
tacaagcaatagaat

SEQ ID NO: 944817 - DNA, 15 bp, Homo sapiens
acaagcaatagaatc

SEQ ID NO: 944818 - DNA, 15 bp, Homo sapiens
caagcaatagaatct

SEQ ID NO: 944819 - DNA, 15 bp, Homo sapiens
aagcaatagaatctg

SEQ ID NO: 944820 - DNA, 15 bp, Homo sapiens
agcaatagaatctgc

SEQ ID NO: 944821 - DNA, 15 bp, Homo sapiens
gcaatagaatctgcc

SEQ ID NO: 944822 - DNA, 15 bp, Homo sapiens
caatagaatctgcca

SEQ ID NO: 944823 - DNA, 15 bp, Homo sapiens
aatagaatctgccat

SEQ ID NO: 944824 - DNA, 15 bp, Homo sapiens
atagaatctgccatt

SEQ ID NO: 944825 - DNA, 15 bp, Homo sapiens
tagaatctgccatta

SEQ ID NO: 944826 - DNA, 15 bp, Homo sapiens
agaatctgccattaa

SEQ ID NO: 944827 - DNA, 15 bp, Homo sapiens
gaatctgccattaag

SEQ ID NO: 944828 - DNA, 15 bp, Homo sapiens
aatctgccattaagc

SEQ ID NO: 944829 - DNA, 15 bp, Homo sapiens
atctgccattaagca

SEQ ID NO: 944830 - DNA, 15 bp, Homo sapiens
tctgccattaagcaa

SEQ ID NO: 944831 - DNA, 15 bp, Homo sapiens
ctgccattaagcaat

SEQ ID NO: 944832 - DNA, 15 bp, Homo sapiens
tgccattaagcaata

SEQ ID NO: 944833 - DNA, 15 bp, Homo sapiens
gccattaagcaatag

SEQ ID NO: 944834 - DNA, 15 bp, Homo sapiens
ccattaagcaataga

SEQ ID NO: 944835 - DNA, 15 bp, Homo sapiens
cattaagcaatagaa

SEQ ID NO: 944836 - DNA, 15 bp, Homo sapiens
attaagcaatagaat

SEQ ID NO: 944837 - DNA, 15 bp, Homo sapiens
ttaagcaatagaatc

SEQ ID NO: 944838 - DNA, 15 bp, Homo sapiens
taagcaatagaatct

SEQ ID NO: 944839 - DNA, 15 bp, Homo sapiens
tagaatctgccattc

SEQ ID NO: 944840 - DNA, 15 bp, Homo sapiens
agaatctgccattcc

SEQ ID NO: 944841 - DNA, 15 bp, Homo sapiens
gaatctgccattcct

SEQ ID NO: 944842 - DNA, 15 bp, Homo sapiens
aatctgccattcctt

SEQ ID NO: 944843 - DNA, 15 bp, Homo sapiens
atctgccattcctta

SEQ ID NO: 944844 - DNA, 15 bp, Homo sapiens
tctgccattccttag

SEQ ID NO: 944845 - DNA, 15 bp, Homo sapiens
ctgccattccttagt

SEQ ID NO: 944846 - DNA, 15 bp, Homo sapiens
tgccattccttagtt

SEQ ID NO: 944847 - DNA, 15 bp, Homo sapiens
gccattccttagttt

SEQ ID NO: 944848 - DNA, 15 bp, Homo sapiens
ccattccttagttta

SEQ ID NO: 944849 - DNA, 15 bp, Homo sapiens
cattccttagtttaa

SEQ ID NO: 944850 - DNA, 15 bp, Homo sapiens
attccttagtttaat

SEQ ID NO: 944851 - DNA, 15 bp, Homo sapiens
ttccttagtttaatg

SEQ ID NO: 944852 - DNA, 15 bp, Homo sapiens
tccttagtttaatgt

SEQ ID NO: 944853 - DNA, 15 bp, Homo sapiens
ccttagtttaatgtt

SEQ ID NO: 944854 - DNA, 15 bp, Homo sapiens
cttagtttaatgttg

SEQ ID NO: 944855 - DNA, 15 bp, Homo sapiens
ttagtttaatgttgg

SEQ ID NO: 944856 - DNA, 15 bp, Homo sapiens
tagtttaatgttgga

SEQ ID NO: 944857 - DNA, 15 bp, Homo sapiens
agtttaatgttggaa

SEQ ID NO: 944858 - DNA, 15 bp, Homo sapiens
gtttaatgttggaag

SEQ ID NO: 944859 - DNA, 15 bp, Homo sapiens
tttaatgttggaagt

SEQ ID NO: 944860 - DNA, 15 bp, Homo sapiens
ttaatgttggaagtt

SEQ ID NO: 944861 - DNA, 15 bp, Homo sapiens
taatgttggaagtta

SEQ ID NO: 944862 - DNA, 15 bp, Homo sapiens
aatgttggaagttaa

SEQ ID NO: 944863 - DNA, 15 bp, Homo sapiens
atgttggaagttaat

SEQ ID NO: 944864 - DNA, 15 bp, Homo sapiens
tgttggaagttaatt

SEQ ID NO: 944865 - DNA, 15 bp, Homo sapiens
gttggaagttaattt

SEQ ID NO: 944866 - DNA, 15 bp, Homo sapiens
ttggaagttaatttg

SEQ ID NO: 944867 - DNA, 15 bp, Homo sapiens
tggaagttaatttgt

SEQ ID NO: 944868 - DNA, 15 bp, Homo sapiens
ggaagttaatttgtc

SEQ ID NO: 944869 - DNA, 15 bp, Homo sapiens
gaagttaatttgtct

SEQ ID NO: 944870 - DNA, 15 bp, Homo sapiens
aagttaatttgtctg

SEQ ID NO: 944871 - DNA, 15 bp, Homo sapiens
agttaatttgtctgt

SEQ ID NO: 944872 - DNA, 15 bp, Homo sapiens
gttaatttgtctgtg

SEQ ID NO: 944873 - DNA, 15 bp, Homo sapiens
ttaatttgtctgtgc

SEQ ID NO: 944874 - DNA, 15 bp, Homo sapiens
taatttgtctgtgct

SEQ ID NO: 944875 - DNA, 15 bp, Homo sapiens
aatttgtctgtgctt

SEQ ID NO: 944876 - DNA, 15 bp, Homo sapiens
atttgtctgtgcttt

SEQ ID NO: 944877 - DNA, 15 bp, Homo sapiens
tttgtctgtgctttt

SEQ ID NO: 944878 - DNA, 15 bp, Homo sapiens
ttgtctgtgcttttt

SEQ ID NO: 944879 - DNA, 15 bp, Homo sapiens
tgtctgtgctttttt

SEQ ID NO: 944880 - DNA, 15 bp, Homo sapiens
gtctgtgcttttttt

SEQ ID NO: 944881 - DNA, 15 bp, Homo sapiens
tctgtgctttttttt

SEQ ID NO: 944882 - DNA, 15 bp, Homo sapiens
ctgtgcttttttttt

SEQ ID NO: 944883 - DNA, 15 bp, Homo sapiens
tgtgctttttttttg

SEQ ID NO: 944884 - DNA, 15 bp, Homo sapiens
gtgctttttttttga

SEQ ID NO: 944885 - DNA, 15 bp, Homo sapiens
tgctttttttttgac

SEQ ID NO: 944886 - DNA, 15 bp, Homo sapiens
gctttttttttgacc

SEQ ID NO: 944887 - DNA, 15 bp, Homo sapiens
ctttttttttgacca

SEQ ID NO: 944888 - DNA, 15 bp, Homo sapiens
tttttttttgaccac

SEQ ID NO: 944889 - DNA, 15 bp, Homo sapiens
ttttttttgaccaca

SEQ ID NO: 944890 - DNA, 15 bp, Homo sapiens
tttttttgaccacat

SEQ ID NO: 944891 - DNA, 15 bp, Homo sapiens
ttttttgaccacatc

SEQ ID NO: 944892 - DNA, 15 bp, Homo sapiens
tttttgaccacatct

SEQ ID NO: 944893 - DNA, 15 bp, Homo sapiens
ttttgaccacatctt

SEQ ID NO: 944894 - DNA, 15 bp, Homo sapiens
tttgaccacatcttc

SEQ ID NO: 944895 - DNA, 15 bp, Homo sapiens
ttgaccacatcttcg

SEQ ID NO: 944896 - DNA, 15 bp, Homo sapiens
tgaccacatcttcgt

SEQ ID NO: 944897 - DNA, 15 bp, Homo sapiens
gaccacatcttcgtc

SEQ ID NO: 944898 - DNA, 15 bp, Homo sapiens
accacatcttcgtct

SEQ ID NO: 944899 - DNA, 15 bp, Homo sapiens
ccacatcttcgtctt

SEQ ID NO: 944900 - DNA, 15 bp, Homo sapiens
cacatcttcgtcttt

SEQ ID NO: 944901 - DNA, 15 bp, Homo sapiens
acatcttcgtctttg

SEQ ID NO: 944902 - DNA, 15 bp, Homo sapiens
catcttcgtctttgc

SEQ ID NO: 944903 - DNA, 15 bp, Homo sapiens
atcttcgtctttgct

SEQ ID NO: 944904 - DNA, 15 bp, Homo sapiens
tcttcgtctttgctg

SEQ ID NO: 944905 - DNA, 15 bp, Homo sapiens
cttcgtctttgctgc

SEQ ID NO: 944906 - DNA, 15 bp, Homo sapiens
ttcgtctttgctgct

SEQ ID NO: 944907 - DNA, 15 bp, Homo sapiens
tcgtctttgctgctt

SEQ ID NO: 944908 - DNA, 15 bp, Homo sapiens
cgtctttgctgctta

SEQ ID NO: 944909 - DNA, 15 bp, Homo sapiens
gtctttgctgcttaa

SEQ ID NO: 944910 - DNA, 15 bp, Homo sapiens
tctttgctgcttaat

SEQ ID NO: 944911 - DNA, 15 bp, Homo sapiens
ctttgctgcttaatt

SEQ ID NO: 944912 - DNA, 15 bp, Homo sapiens
tttgctgcttaattc

SEQ ID NO: 944913 - DNA, 15 bp, Homo sapiens
ttgctgcttaattca

SEQ ID NO: 944914 - DNA, 15 bp, Homo sapiens
tgctgcttaattcac

SEQ ID NO: 944915 - DNA, 15 bp, Homo sapiens
gctgcttaattcaca

SEQ ID NO: 944916 - DNA, 15 bp, Homo sapiens
ctgcttaattcacaa

SEQ ID NO: 944917 - DNA, 15 bp, Homo sapiens
tgcttaattcacaaa

SEQ ID NO: 944918 - DNA, 15 bp, Homo sapiens
gcttaattcacaaac

SEQ ID NO: 944919 - DNA, 15 bp, Homo sapiens
cttaattcacaaact

SEQ ID NO: 944920 - DNA, 15 bp, Homo sapiens
ttaattcacaaactc

SEQ ID NO: 944921 - DNA, 15 bp, Homo sapiens
taattcacaaactct

SEQ ID NO: 944922 - DNA, 15 bp, Homo sapiens
aattcacaaactctt

SEQ ID NO: 944923 - DNA, 15 bp, Homo sapiens
attcacaaactcttg

SEQ ID NO: 944924 - DNA, 15 bp, Homo sapiens
ttcacaaactcttgg

SEQ ID NO: 944925 - DNA, 15 bp, Homo sapiens
tcacaaactcttgga

SEQ ID NO: 944926 - DNA, 15 bp, Homo sapiens
cacaaactcttggaa

SEQ ID NO: 944927 - DNA, 15 bp, Homo sapiens
acaaactcttggaag

SEQ ID NO: 944928 - DNA, 15 bp, Homo sapiens
caaactcttggaaga

SEQ ID NO: 944929 - DNA, 15 bp, Homo sapiens
aaactcttggaagat

SEQ ID NO: 944930 - DNA, 15 bp, Homo sapiens
aactcttggaagata

SEQ ID NO: 944931 - DNA, 15 bp, Homo sapiens
actcttggaagatat

SEQ ID NO: 944932 - DNA, 15 bp, Homo sapiens
ctcttggaagatatg

SEQ ID NO: 944933 - DNA, 15 bp, Homo sapiens
tcttggaagatatga

SEQ ID NO: 944934 - DNA, 15 bp, Homo sapiens
cttggaagatatgac

SEQ ID NO: 944935 - DNA, 15 bp, Homo sapiens
ttggaagatatgact

SEQ ID NO: 944936 - DNA, 15 bp, Homo sapiens
tggaagatatgactc

SEQ ID NO: 944937 - DNA, 15 bp, Homo sapiens
ggaagatatgactca

SEQ ID NO: 944938 - DNA, 15 bp, Homo sapiens
gaagatatgactcag

SEQ ID NO: 944939 - DNA, 15 bp, Homo sapiens
aagatatgactcaga

SEQ ID NO: 944940 - DNA, 15 bp, Homo sapiens
agatatgactcagat

SEQ ID NO: 944941 - DNA, 15 bp, Homo sapiens
gatatgactcagatt

SEQ ID NO: 944942 - DNA, 15 bp, Homo sapiens
atatgactcagattt

SEQ ID NO: 944943 - DNA, 15 bp, Homo sapiens
tatgactcagatttt

SEQ ID NO: 944944 - DNA, 15 bp, Homo sapiens
atgactcagatttta

SEQ ID NO: 944945 - DNA, 15 bp, Homo sapiens
tgactcagattttaa

SEQ ID NO: 944946 - DNA, 15 bp, Homo sapiens
gactcagattttaaa

SEQ ID NO: 944947 - DNA, 15 bp, Homo sapiens
actcagattttaaac

SEQ ID NO: 944948 - DNA, 15 bp, Homo sapiens
ctcagattttaaact

SEQ ID NO: 944949 - DNA, 15 bp, Homo sapiens
tcagattttaaactg

SEQ ID NO: 944950 - DNA, 15 bp, Homo sapiens
cagattttaaactga

SEQ ID NO: 944951 - DNA, 15 bp, Homo sapiens
agattttaaactgac

SEQ ID NO: 944952 - DNA, 15 bp, Homo sapiens
gattttaaactgact

SEQ ID NO: 944953 - DNA, 15 bp, Homo sapiens
attttaaactgactt

SEQ ID NO: 944954 - DNA, 15 bp, Homo sapiens
ttttaaactgacttt

SEQ ID NO: 944955 - DNA, 15 bp, Homo sapiens
tttaaactgactttg

SEQ ID NO: 944956 - DNA, 15 bp, Homo sapiens
ttaaactgactttga

SEQ ID NO: 944957 - DNA, 15 bp, Homo sapiens
taaactgactttgag

SEQ ID NO: 944958 - DNA, 15 bp, Homo sapiens
aaactgactttgagc

SEQ ID NO: 944959 - DNA, 15 bp, Homo sapiens
aactgactttgagca

SEQ ID NO: 944960 - DNA, 15 bp, Homo sapiens
actgactttgagcag

SEQ ID NO: 944961 - DNA, 15 bp, Homo sapiens
ctgactttgagcagt

SEQ ID NO: 944962 - DNA, 15 bp, Homo sapiens
tgactttgagcagta

SEQ ID NO: 944963 - DNA, 15 bp, Homo sapiens
gactttgagcagtat

SEQ ID NO: 944964 - DNA, 15 bp, Homo sapiens
actttgagcagtatc

SEQ ID NO: 944965 - DNA, 15 bp, Homo sapiens
ctttgagcagtatct

SEQ ID NO: 944966 - DNA, 15 bp, Homo sapiens
tttgagcagtatctg

SEQ ID NO: 944967 - DNA, 15 bp, Homo sapiens
ttgagcagtatctgt

SEQ ID NO: 944968 - DNA, 15 bp, Homo sapiens
tgagcagtatctgtg

SEQ ID NO: 944969 - DNA, 15 bp, Homo sapiens
gagcagtatctgtgg

SEQ ID NO: 944970 - DNA, 15 bp, Homo sapiens
agcagtatctgtggc

SEQ ID NO: 944971 - DNA, 15 bp, Homo sapiens
gcagtatctgtggct

SEQ ID NO: 944972 - DNA, 15 bp, Homo sapiens
cagtatctgtggctc

SEQ ID NO: 944973 - DNA, 15 bp, Homo sapiens
agtatctgtggctct

SEQ ID NO: 944974 - DNA, 15 bp, Homo sapiens
gtatctgtggctctg

SEQ ID NO: 944975 - DNA, 15 bp, Homo sapiens
tatctgtggctctgt

SEQ ID NO: 944976 - DNA, 15 bp, Homo sapiens
atctgtggctctgtt

SEQ ID NO: 944977 - DNA, 15 bp, Homo sapiens
tctgtggctctgttt

SEQ ID NO: 944978 - DNA, 15 bp, Homo sapiens
ctgtggctctgttta

SEQ ID NO: 944979 - DNA, 15 bp, Homo sapiens
tgtggctctgtttaa

SEQ ID NO: 944980 - DNA, 15 bp, Homo sapiens
gtggctctgtttaag

SEQ ID NO: 944981 - DNA, 15 bp, Homo sapiens
tggctctgtttaagg

SEQ ID NO: 944982 - DNA, 15 bp, Homo sapiens
ggctctgtttaaggt

SEQ ID NO: 944983 - DNA, 15 bp, Homo sapiens
gctctgtttaaggtg

SEQ ID NO: 944984 - DNA, 15 bp, Homo sapiens
ctctgtttaaggtgt

SEQ ID NO: 944985 - DNA, 15 bp, Homo sapiens
tctgtttaaggtgtt

SEQ ID NO: 944986 - DNA, 15 bp, Homo sapiens
ctgtttaaggtgttc

SEQ ID NO: 944987 - DNA, 15 bp, Homo sapiens
tgtttaaggtgttct

SEQ ID NO: 944988 - DNA, 15 bp, Homo sapiens
gtttaaggtgttctt

SEQ ID NO: 944989 - DNA, 15 bp, Homo sapiens
tttaaggtgttcttg

SEQ ID NO: 944990 - DNA, 15 bp, Homo sapiens
ttaaggtgttcttgg

SEQ ID NO: 944991 - DNA, 15 bp, Homo sapiens
taaggtgttcttggt

SEQ ID NO: 944992 - DNA, 15 bp, Homo sapiens
aaggtgttcttggtg

SEQ ID NO: 944993 - DNA, 15 bp, Homo sapiens
aggtgttcttggtgg

SEQ ID NO: 944994 - DNA, 15 bp, Homo sapiens
ggtgttcttggtggc

SEQ ID NO: 944995 - DNA, 15 bp, Homo sapiens
gtgttcttggtggca

SEQ ID NO: 944996 - DNA, 15 bp, Homo sapiens
tgttcttggtggcaa

SEQ ID NO: 944997 - DNA, 15 bp, Homo sapiens
gttcttggtggcaat

SEQ ID NO: 944998 - DNA, 15 bp, Homo sapiens
ttcttggtggcaata

SEQ ID NO: 944999 - DNA, 15 bp, Homo sapiens
tcttggtggcaataa

SEQ ID NO: 945000 - DNA, 15 bp, Homo sapiens
cttggtggcaataaa

SEQ ID NO: 945001 - DNA, 15 bp, Homo sapiens
ttggtggcaataaac

SEQ ID NO: 945002 - DNA, 15 bp, Homo sapiens
tggtggcaataaaca

SEQ ID NO: 945003 - DNA, 15 bp, Homo sapiens
ggtggcaataaacat

SEQ ID NO: 945004 - DNA, 15 bp, Homo sapiens
gtggcaataaacatg

SEQ ID NO: 945005 - DNA, 15 bp, Homo sapiens
tggcaataaacatgg

SEQ ID NO: 945006 - DNA, 15 bp, Homo sapiens
ggcaataaacatggt

SEQ ID NO: 945007 - DNA, 15 bp, Homo sapiens
gcaataaacatggtg

SEQ ID NO: 945008 - DNA, 15 bp, Homo sapiens
caataaacatggtga

SEQ ID NO: 945009 - DNA, 15 bp, Homo sapiens
aataaacatggtgat

SEQ ID NO: 945010 - DNA, 15 bp, Homo sapiens
ataaacatggtgata

SEQ ID NO: 945011 - DNA, 15 bp, Homo sapiens
taaacatggtgataa

SEQ ID NO: 945012 - DNA, 15 bp, Homo sapiens
aaacatggtgataat

SEQ ID NO: 945013 - DNA, 15 bp, Homo sapiens
aacatggtgataatg

SEQ ID NO: 945014 - DNA, 15 bp, Homo sapiens
acatggtgataatga

SEQ ID NO: 945015 - DNA, 15 bp, Homo sapiens
catggtgataatgaa

SEQ ID NO: 945016 - DNA, 15 bp, Homo sapiens
atggtgataatgaag

SEQ ID NO: 945017 - DNA, 15 bp, Homo sapiens
tggtgataatgaaga

SEQ ID NO: 945018 - DNA, 15 bp, Homo sapiens
ggtgataatgaagat

SEQ ID NO: 945019 - DNA, 15 bp, Homo sapiens
gtgataatgaagatg

SEQ ID NO: 945020 - DNA, 15 bp, Homo sapiens
tgataatgaagatga

SEQ ID NO: 945021 - DNA, 15 bp, Homo sapiens
gataatgaagatgat

SEQ ID NO: 945022 - DNA, 15 bp, Homo sapiens
ataatgaagatgatg

SEQ ID NO: 945023 - DNA, 15 bp, Homo sapiens
taatgaagatgatga

SEQ ID NO: 945024 - DNA, 15 bp, Homo sapiens
aatgaagatgatgat

SEQ ID NO: 945025 - DNA, 15 bp, Homo sapiens
atgaagatgatgatg

SEQ ID NO: 945026 - DNA, 15 bp, Homo sapiens
tgaagatgatgatgg

SEQ ID NO: 945027 - DNA, 15 bp, Homo sapiens
gaagatgatgatggc

SEQ ID NO: 945028 - DNA, 15 bp, Homo sapiens
aagatgatgatggct

SEQ ID NO: 945029 - DNA, 15 bp, Homo sapiens
agatgatgatggctg

SEQ ID NO: 945030 - DNA, 15 bp, Homo sapiens
gatgatgatggctga

SEQ ID NO: 945031 - DNA, 15 bp, Homo sapiens
atgatgatggctgat

SEQ ID NO: 945032 - DNA, 15 bp, Homo sapiens
tgatgatggctgata

SEQ ID NO: 945033 - DNA, 15 bp, Homo sapiens
gatgatggctgataa

SEQ ID NO: 945034 - DNA, 15 bp, Homo sapiens
atgatggctgataat

SEQ ID NO: 945035 - DNA, 15 bp, Homo sapiens
tgatggctgataatt

SEQ ID NO: 945036 - DNA, 15 bp, Homo sapiens
gatggctgataatta

SEQ ID NO: 945037 - DNA, 15 bp, Homo sapiens
atggctgataattaa

SEQ ID NO: 945038 - DNA, 15 bp, Homo sapiens
tggctgataattaat

SEQ ID NO: 945039 - DNA, 15 bp, Homo sapiens
ggctgataattaatc

SEQ ID NO: 945040 - DNA, 15 bp, Homo sapiens
gctgataattaatct

SEQ ID NO: 945041 - DNA, 15 bp, Homo sapiens
ctgataattaatcta

SEQ ID NO: 945042 - DNA, 15 bp, Homo sapiens
tgataattaatctac

SEQ ID NO: 945043 - DNA, 15 bp, Homo sapiens
gataattaatctaca

SEQ ID NO: 945044 - DNA, 15 bp, Homo sapiens
ataattaatctacat

SEQ ID NO: 945045 - DNA, 15 bp, Homo sapiens
taattaatctacata

SEQ ID NO: 945046 - DNA, 15 bp, Homo sapiens
aattaatctacataa

SEQ ID NO: 945047 - DNA, 15 bp, Homo sapiens
attaatctacataat

SEQ ID NO: 945048 - DNA, 15 bp, Homo sapiens
ttaatctacataatt

SEQ ID NO: 945049 - DNA, 15 bp, Homo sapiens
taatctacataatta

SEQ ID NO: 945050 - DNA, 15 bp, Homo sapiens
aatctacataattaa

SEQ ID NO: 945051 - DNA, 15 bp, Homo sapiens
atctacataattaag

SEQ ID NO: 945052 - DNA, 15 bp, Homo sapiens
tctacataattaagg

SEQ ID NO: 945053 - DNA, 15 bp, Homo sapiens
ctacataattaaggt

SEQ ID NO: 945054 - DNA, 15 bp, Homo sapiens
tacataattaaggtc

SEQ ID NO: 945055 - DNA, 15 bp, Homo sapiens
acataattaaggtcc

SEQ ID NO: 945056 - DNA, 15 bp, Homo sapiens
cataattaaggtcct

SEQ ID NO: 945057 - DNA, 15 bp, Homo sapiens
ataattaaggtcctc

SEQ ID NO: 945058 - DNA, 15 bp, Homo sapiens
taattaaggtcctcc

SEQ ID NO: 945059 - DNA, 15 bp, Homo sapiens
aattaaggtcctcca

SEQ ID NO: 945060 - DNA, 15 bp, Homo sapiens
attaaggtcctccag

SEQ ID NO: 945061 - DNA, 15 bp, Homo sapiens
ttaaggtcctccagt

SEQ ID NO: 945062 - DNA, 15 bp, Homo sapiens
taaggtcctccagtt

SEQ ID NO: 945063 - DNA, 15 bp, Homo sapiens
aaggtcctccagtta

SEQ ID NO: 945064 - DNA, 15 bp, Homo sapiens
aggtcctccagttaa

SEQ ID NO: 945065 - DNA, 15 bp, Homo sapiens
ggtcctccagttaat

SEQ ID NO: 945066 - DNA, 15 bp, Homo sapiens
gtcctccagttaatt

SEQ ID NO: 945067 - DNA, 15 bp, Homo sapiens
tcctccagttaatta

SEQ ID NO: 945068 - DNA, 15 bp, Homo sapiens
cctccagttaattat

SEQ ID NO: 945069 - DNA, 15 bp, Homo sapiens
ctccagttaattatt

SEQ ID NO: 945070 - DNA, 15 bp, Homo sapiens
tccagttaattattt

SEQ ID NO: 945071 - DNA, 15 bp, Homo sapiens
ccagttaattatttg

SEQ ID NO: 945072 - DNA, 15 bp, Homo sapiens
cagttaattatttgg

SEQ ID NO: 945073 - DNA, 15 bp, Homo sapiens
agttaattatttgga

SEQ ID NO: 945074 - DNA, 15 bp, Homo sapiens
gttaattatttggaa

SEQ ID NO: 945075 - DNA, 15 bp, Homo sapiens
ttaattatttggaaa

SEQ ID NO: 945076 - DNA, 15 bp, Homo sapiens
taattatttggaaat

SEQ ID NO: 945077 - DNA, 15 bp, Homo sapiens
aattatttggaaata

SEQ ID NO: 945078 - DNA, 15 bp, Homo sapiens
attatttggaaataa

SEQ ID NO: 945079 - DNA, 15 bp, Homo sapiens
ttatttggaaataaa

SEQ ID NO: 945080 - DNA, 15 bp, Homo sapiens
tatttggaaataaat

SEQ ID NO: 945081 - DNA, 15 bp, Homo sapiens
atttggaaataaatt

SEQ ID NO: 945082 - DNA, 15 bp, Homo sapiens
tttggaaataaatta

SEQ ID NO: 945083 - DNA, 15 bp, Homo sapiens
ttggaaataaattaa

SEQ ID NO: 945084 - DNA, 15 bp, Homo sapiens
tggaaataaattaac

SEQ ID NO: 945085 - DNA, 15 bp, Homo sapiens
ggaaataaattaact

SEQ ID NO: 945086 - DNA, 15 bp, Homo sapiens
gaaataaattaacta

SEQ ID NO: 945087 - DNA, 15 bp, Homo sapiens
aaataaattaactag

SEQ ID NO: 945088 - DNA, 15 bp, Homo sapiens
aataaattaactaga

SEQ ID NO: 945089 - DNA, 15 bp, Homo sapiens
ataaattaactagat

SEQ ID NO: 945090 - DNA, 15 bp, Homo sapiens
taaattaactagatt

SEQ ID NO: 945091 - DNA, 15 bp, Homo sapiens
aaattaactagattg

SEQ ID NO: 945092 - DNA, 15 bp, Homo sapiens
aattaactagattgt

SEQ ID NO: 945093 - DNA, 15 bp, Homo sapiens
attaactagattgtc

SEQ ID NO: 945094 - DNA, 15 bp, Homo sapiens
ttaactagattgtct

SEQ ID NO: 945095 - DNA, 15 bp, Homo sapiens
taactagattgtctg

SEQ ID NO: 945096 - DNA, 15 bp, Homo sapiens
ccactttagagtcaa

SEQ ID NO: 945097 - DNA, 15 bp, Homo sapiens
cactttagagtcaac

SEQ ID NO: 945098 - DNA, 15 bp, Homo sapiens
actttagagtcaact

SEQ ID NO: 945099 - DNA, 15 bp, Homo sapiens
ctttagagtcaactc

SEQ ID NO: 945100 - DNA, 15 bp, Homo sapiens
tttagagtcaactct

SEQ ID NO: 945101 - DNA, 15 bp, Homo sapiens
ttagagtcaactctg

SEQ ID NO: 945102 - DNA, 15 bp, Homo sapiens
tagagtcaactctgg

SEQ ID NO: 945103 - DNA, 15 bp, Homo sapiens
agagtcaactctggt

SEQ ID NO: 945104 - DNA, 15 bp, Homo sapiens
gagtcaactctggtt

SEQ ID NO: 945105 - DNA, 15 bp, Homo sapiens
agtcaactctggttc

SEQ ID NO: 945106 - DNA, 15 bp, Homo sapiens
gtcaactctggttcc

SEQ ID NO: 945107 - DNA, 15 bp, Homo sapiens
tcaactctggttcct

SEQ ID NO: 945108 - DNA, 15 bp, Homo sapiens
caactctggttcctc

SEQ ID NO: 945109 - DNA, 15 bp, Homo sapiens
aactctggttcctct

SEQ ID NO: 945110 - DNA, 15 bp, Homo sapiens
actctggttcctctc

SEQ ID NO: 945111 - DNA, 15 bp, Homo sapiens
ctctggttcctctcc

SEQ ID NO: 945112 - DNA, 15 bp, Homo sapiens
tctggttcctctccc

SEQ ID NO: 945113 - DNA, 15 bp, Homo sapiens
ctggttcctctccca

SEQ ID NO: 945114 - DNA, 15 bp, Homo sapiens
tggttcctctcccaa

SEQ ID NO: 945115 - DNA, 15 bp, Homo sapiens
ggttcctctcccaag

SEQ ID NO: 945116 - DNA, 15 bp, Homo sapiens
gttcctctcccaagc

SEQ ID NO: 945117 - DNA, 15 bp, Homo sapiens
ttcctctcccaagca

SEQ ID NO: 945118 - DNA, 15 bp, Homo sapiens
tcctctcccaagcaa

SEQ ID NO: 945119 - DNA, 15 bp, Homo sapiens
cctctcccaagcaac

SEQ ID NO: 945120 - DNA, 15 bp, Homo sapiens
ctctcccaagcaaca

SEQ ID NO: 945121 - DNA, 15 bp, Homo sapiens
tctcccaagcaacaa

SEQ ID NO: 945122 - DNA, 15 bp, Homo sapiens
ctcccaagcaacaag

SEQ ID NO: 945123 - DNA, 15 bp, Homo sapiens
tcccaagcaacaaga

SEQ ID NO: 945124 - DNA, 15 bp, Homo sapiens
cccaagcaacaagag

SEQ ID NO: 945125 - DNA, 15 bp, Homo sapiens
ccaagcaacaagagc

SEQ ID NO: 945126 - DNA, 15 bp, Homo sapiens
caagcaacaagagcg

SEQ ID NO: 945127 - DNA, 15 bp, Homo sapiens
aagcaacaagagcga

SEQ ID NO: 945128 - DNA, 15 bp, Homo sapiens
agcaacaagagcgat

SEQ ID NO: 945129 - DNA, 15 bp, Homo sapiens
gcaacaagagcgatt

SEQ ID NO: 945130 - DNA, 15 bp, Homo sapiens
caacaagagcgatta

SEQ ID NO: 945131 - DNA, 15 bp, Homo sapiens
aacaagagcgattag

SEQ ID NO: 945132 - DNA, 15 bp, Homo sapiens
acaagagcgattagc

SEQ ID NO: 945133 - DNA, 15 bp, Homo sapiens
caagagcgattagcc

SEQ ID NO: 945134 - DNA, 15 bp, Homo sapiens
aagagcgattagcca

SEQ ID NO: 945135 - DNA, 15 bp, Homo sapiens
agagcgattagccat

SEQ ID NO: 945136 - DNA, 15 bp, Homo sapiens
gagcgattagccata

SEQ ID NO: 945137 - DNA, 15 bp, Homo sapiens
agcgattagccataa

SEQ ID NO: 945138 - DNA, 15 bp, Homo sapiens
gcgattagccataaa

SEQ ID NO: 945139 - DNA, 15 bp, Homo sapiens
cgattagccataaaa

SEQ ID NO: 945140 - DNA, 15 bp, Homo sapiens
gattagccataaaaa

SEQ ID NO: 945141 - DNA, 15 bp, Homo sapiens
attagccataaaaat

SEQ ID NO: 945142 - DNA, 15 bp, Homo sapiens
ttagccataaaaatt

SEQ ID NO: 945143 - DNA, 15 bp, Homo sapiens
tagccataaaaattt

SEQ ID NO: 945144 - DNA, 15 bp, Homo sapiens
agccataaaaatttg

SEQ ID NO: 945145 - DNA, 15 bp, Homo sapiens
gccataaaaatttga

SEQ ID NO: 945146 - DNA, 15 bp, Homo sapiens
ccataaaaatttgaa

SEQ ID NO: 945147 - DNA, 15 bp, Homo sapiens
cataaaaatttgaat

SEQ ID NO: 945148 - DNA, 15 bp, Homo sapiens
ataaaaatttgaatg

SEQ ID NO: 945149 - DNA, 15 bp, Homo sapiens
taaaaatttgaatga

SEQ ID NO: 945150 - DNA, 15 bp, Homo sapiens
aaaaatttgaatgaa

SEQ ID NO: 945151 - DNA, 15 bp, Homo sapiens
aaaatttgaatgaaa

SEQ ID NO: 945152 - DNA, 15 bp, Homo sapiens
aaatttgaatgaaaa

SEQ ID NO: 945153 - DNA, 15 bp, Homo sapiens
aatttgaatgaaaaa

SEQ ID NO: 945154 - DNA, 15 bp, Homo sapiens
atttgaatgaaaaat

SEQ ID NO: 945155 - DNA, 15 bp, Homo sapiens
tttgaatgaaaaatc

SEQ ID NO: 945156 - DNA, 15 bp, Homo sapiens
ttgaatgaaaaatct

SEQ ID NO: 945157 - DNA, 15 bp, Homo sapiens
tgaatgaaaaatctg

SEQ ID NO: 945158 - DNA, 15 bp, Homo sapiens
gaatgaaaaatctga

SEQ ID NO: 945159 - DNA, 15 bp, Homo sapiens
aatgaaaaatctgaa

SEQ ID NO: 945160 - DNA, 15 bp, Homo sapiens
atgaaaaatctgaag

SEQ ID NO: 945161 - DNA, 15 bp, Homo sapiens
tgaaaaatctgaagt

SEQ ID NO: 945162 - DNA, 15 bp, Homo sapiens
gaaaaatctgaagtt

SEQ ID NO: 945163 - DNA, 15 bp, Homo sapiens
aaaaatctgaagtta

SEQ ID NO: 945164 - DNA, 15 bp, Homo sapiens
aaaatctgaagttat

SEQ ID NO: 945165 - DNA, 15 bp, Homo sapiens
aaatctgaagttatt

SEQ ID NO: 945166 - DNA, 15 bp, Homo sapiens
aatctgaagttattc

SEQ ID NO: 945167 - DNA, 15 bp, Homo sapiens
atctgaagttattct

SEQ ID NO: 945168 - DNA, 15 bp, Homo sapiens
tctgaagttattctt

SEQ ID NO: 945169 - DNA, 15 bp, Homo sapiens
ctgaagttattcttg

SEQ ID NO: 945170 - DNA, 15 bp, Homo sapiens
tgaagttattcttgt

SEQ ID NO: 945171 - DNA, 15 bp, Homo sapiens
gaagttattcttgtg

SEQ ID NO: 945172 - DNA, 15 bp, Homo sapiens
aagttattcttgtgc

SEQ ID NO: 945173 - DNA, 15 bp, Homo sapiens
agttattcttgtgca

SEQ ID NO: 945174 - DNA, 15 bp, Homo sapiens
gttattcttgtgcat

SEQ ID NO: 945175 - DNA, 15 bp, Homo sapiens
ttattcttgtgcata

SEQ ID NO: 945176 - DNA, 15 bp, Homo sapiens
tattcttgtgcatat

SEQ ID NO: 945177 - DNA, 15 bp, Homo sapiens
attcttgtgcatatt

SEQ ID NO: 945178 - DNA, 15 bp, Homo sapiens
ttcttgtgcatattg

SEQ ID NO: 945179 - DNA, 15 bp, Homo sapiens
tcttgtgcatattgg

SEQ ID NO: 945180 - DNA, 15 bp, Homo sapiens
cttgtgcatattggc

SEQ ID NO: 945181 - DNA, 15 bp, Homo sapiens
ttgtgcatattggct

SEQ ID NO: 945182 - DNA, 15 bp, Homo sapiens
tgtgcatattggctt

SEQ ID NO: 945183 - DNA, 15 bp, Homo sapiens
gtgcatattggcttt

SEQ ID NO: 945184 - DNA, 15 bp, Homo sapiens
tgcatattggctttt

SEQ ID NO: 945185 - DNA, 15 bp, Homo sapiens
gcatattggcttttt

SEQ ID NO: 945186 - DNA, 15 bp, Homo sapiens
catattggctttttg

SEQ ID NO: 945187 - DNA, 15 bp, Homo sapiens
atattggctttttgc

SEQ ID NO: 945188 - DNA, 15 bp, Homo sapiens
tattggctttttgcc

SEQ ID NO: 945189 - DNA, 15 bp, Homo sapiens
attggctttttgcct

SEQ ID NO: 945190 - DNA, 15 bp, Homo sapiens
ttggctttttgcctg

SEQ ID NO: 945191 - DNA, 15 bp, Homo sapiens
tggctttttgcctga

SEQ ID NO: 945192 - DNA, 15 bp, Homo sapiens
ggctttttgcctgaa

SEQ ID NO: 945193 - DNA, 15 bp, Homo sapiens
gctttttgcctgaag

SEQ ID NO: 945194 - DNA, 15 bp, Homo sapiens
ctttttgcctgaagc

SEQ ID NO: 945195 - DNA, 15 bp, Homo sapiens
tttttgcctgaagct

SEQ ID NO: 945196 - DNA, 15 bp, Homo sapiens
ttttgcctgaagcta

SEQ ID NO: 945197 - DNA, 15 bp, Homo sapiens
tttgcctgaagctaa

SEQ ID NO: 945198 - DNA, 15 bp, Homo sapiens
ttgcctgaagctaaa

SEQ ID NO: 945199 - DNA, 15 bp, Homo sapiens
tgcctgaagctaaaa

SEQ ID NO: 945200 - DNA, 15 bp, Homo sapiens
gcctgaagctaaaaa

SEQ ID NO: 945201 - DNA, 15 bp, Homo sapiens
cctgaagctaaaaaa

SEQ ID NO: 945202 - DNA, 15 bp, Homo sapiens
ctgaagctaaaaaaa

SEQ ID NO: 945203 - DNA, 15 bp, Homo sapiens
tgaagctaaaaaaaa

SEQ ID NO: 945204 - DNA, 15 bp, Homo sapiens
gaagctaaaaaaaaa

SEQ ID NO: 945205 - DNA, 15 bp, Homo sapiens
aagctaaaaaaaaat

SEQ ID NO: 945206 - DNA, 15 bp, Homo sapiens
agctaaaaaaaaatg

SEQ ID NO: 945207 - DNA, 15 bp, Homo sapiens
gctaaaaaaaaatga

SEQ ID NO: 945208 - DNA, 15 bp, Homo sapiens
ctaaaaaaaaatgac

SEQ ID NO: 945209 - DNA, 15 bp, Homo sapiens
taaaaaaaaatgact

SEQ ID NO: 945210 - DNA, 15 bp, Homo sapiens
aaaaaaaaatgactt

SEQ ID NO: 945211 - DNA, 15 bp, Homo sapiens
aaaaaaaatgacttc

SEQ ID NO: 945212 - DNA, 15 bp, Homo sapiens
aaaaaaatgacttca

SEQ ID NO: 945213 - DNA, 15 bp, Homo sapiens
aaaaaatgacttcag

SEQ ID NO: 945214 - DNA, 15 bp, Homo sapiens
aaaaatgacttcagt

SEQ ID NO: 945215 - DNA, 15 bp, Homo sapiens
aaaatgacttcagtt

SEQ ID NO: 945216 - DNA, 15 bp, Homo sapiens
aaatgacttcagttt

SEQ ID NO: 945217 - DNA, 15 bp, Homo sapiens
aatgacttcagtttc

SEQ ID NO: 945218 - DNA, 15 bp, Homo sapiens
atgacttcagtttct

SEQ ID NO: 945219 - DNA, 15 bp, Homo sapiens
tgacttcagtttctt

SEQ ID NO: 945220 - DNA, 15 bp, Homo sapiens
gacttcagtttcttt

SEQ ID NO: 945221 - DNA, 15 bp, Homo sapiens
acttcagtttctttt

SEQ ID NO: 945222 - DNA, 15 bp, Homo sapiens
cttcagtttcttttt

SEQ ID NO: 945223 - DNA, 15 bp, Homo sapiens
ttcagtttctttttc

SEQ ID NO: 945224 - DNA, 15 bp, Homo sapiens
tcagtttctttttcc

SEQ ID NO: 945225 - DNA, 15 bp, Homo sapiens
cagtttctttttcca

SEQ ID NO: 945226 - DNA, 15 bp, Homo sapiens
agtttctttttccat

SEQ ID NO: 945227 - DNA, 15 bp, Homo sapiens
gtttctttttccatt

SEQ ID NO: 945228 - DNA, 15 bp, Homo sapiens
tttctttttccattt

SEQ ID NO: 945229 - DNA, 15 bp, Homo sapiens
ttctttttccatttt

SEQ ID NO: 945230 - DNA, 15 bp, Homo sapiens
tctttttccattttc

SEQ ID NO: 945231 - DNA, 15 bp, Homo sapiens
ctttttccattttca

SEQ ID NO: 945232 - DNA, 15 bp, Homo sapiens
tttttccattttcag

SEQ ID NO: 945233 - DNA, 15 bp, Homo sapiens
ttttccattttcagc

SEQ ID NO: 945234 - DNA, 15 bp, Homo sapiens
tttccattttcagca

SEQ ID NO: 945235 - DNA, 15 bp, Homo sapiens
ttccattttcagcat

SEQ ID NO: 945236 - DNA, 15 bp, Homo sapiens
tccattttcagcatt

SEQ ID NO: 945237 - DNA, 15 bp, Homo sapiens
ccattttcagcattt

SEQ ID NO: 945238 - DNA, 15 bp, Homo sapiens
cattttcagcatttt

SEQ ID NO: 945239 - DNA, 15 bp, Homo sapiens
attttcagcatttta

SEQ ID NO: 945240 - DNA, 15 bp, Homo sapiens
ttttcagcattttat

SEQ ID NO: 945241 - DNA, 15 bp, Homo sapiens
tttcagcattttatt

SEQ ID NO: 945242 - DNA, 15 bp, Homo sapiens
ttcagcattttattt

SEQ ID NO: 945243 - DNA, 15 bp, Homo sapiens
tcagcattttatttg

SEQ ID NO: 945244 - DNA, 15 bp, Homo sapiens
cagcattttatttgt

SEQ ID NO: 945245 - DNA, 15 bp, Homo sapiens
agcattttatttgtc

SEQ ID NO: 945246 - DNA, 15 bp, Homo sapiens
gcattttatttgtcc

SEQ ID NO: 945247 - DNA, 15 bp, Homo sapiens
cattttatttgtcct

SEQ ID NO: 945248 - DNA, 15 bp, Homo sapiens
attttatttgtcctc

SEQ ID NO: 945249 - DNA, 15 bp, Homo sapiens
ttttatttgtcctcc

SEQ ID NO: 945250 - DNA, 15 bp, Homo sapiens
tttatttgtcctcct

SEQ ID NO: 945251 - DNA, 15 bp, Homo sapiens
ttatttgtcctcctt

SEQ ID NO: 945252 - DNA, 15 bp, Homo sapiens
tatttgtcctccttg

SEQ ID NO: 945253 - DNA, 15 bp, Homo sapiens
atttgtcctccttgc

SEQ ID NO: 945254 - DNA, 15 bp, Homo sapiens
tttgtcctccttgct

SEQ ID NO: 945255 - DNA, 15 bp, Homo sapiens
ttgtcctccttgctg

SEQ ID NO: 945256 - DNA, 15 bp, Homo sapiens
tgtcctccttgctgt

SEQ ID NO: 945257 - DNA, 15 bp, Homo sapiens
gtcctccttgctgtt

SEQ ID NO: 945258 - DNA, 15 bp, Homo sapiens
tcctccttgctgttt

SEQ ID NO: 945259 - DNA, 15 bp, Homo sapiens
cctccttgctgtttc

SEQ ID NO: 945260 - DNA, 15 bp, Homo sapiens
ctccttgctgtttct

SEQ ID NO: 945261 - DNA, 15 bp, Homo sapiens
tccttgctgtttcta

SEQ ID NO: 945262 - DNA, 15 bp, Homo sapiens
ccttgctgtttctag

SEQ ID NO: 945263 - DNA, 15 bp, Homo sapiens
cttgctgtttctagg

SEQ ID NO: 945264 - DNA, 15 bp, Homo sapiens
ttgctgtttctaggc

SEQ ID NO: 945265 - DNA, 15 bp, Homo sapiens
tgctgtttctaggct

SEQ ID NO: 945266 - DNA, 15 bp, Homo sapiens
gctgtttctaggctc

SEQ ID NO: 945267 - DNA, 15 bp, Homo sapiens
ctgtttctaggctct

SEQ ID NO: 945268 - DNA, 15 bp, Homo sapiens
tgtttctaggctcta

SEQ ID NO: 945269 - DNA, 15 bp, Homo sapiens
gtttctaggctctaa

SEQ ID NO: 945270 - DNA, 15 bp, Homo sapiens
tttctaggctctaaa

SEQ ID NO: 945271 - DNA, 15 bp, Homo sapiens
ttctaggctctaaag

SEQ ID NO: 945272 - DNA, 15 bp, Homo sapiens
tctaggctctaaagg

SEQ ID NO: 945273 - DNA, 15 bp, Homo sapiens
ctaggctctaaaggc

SEQ ID NO: 945274 - DNA, 15 bp, Homo sapiens
taggctctaaaggcc

SEQ ID NO: 945275 - DNA, 15 bp, Homo sapiens
aggctctaaaggcca

SEQ ID NO: 945276 - DNA, 15 bp, Homo sapiens
ggctctaaaggccag

SEQ ID NO: 945277 - DNA, 15 bp, Homo sapiens
gctctaaaggccagc

SEQ ID NO: 945278 - DNA, 15 bp, Homo sapiens
ctctaaaggccagcg

SEQ ID NO: 945279 - DNA, 15 bp, Homo sapiens
tctaaaggccagcga

SEQ ID NO: 945280 - DNA, 15 bp, Homo sapiens
ctaaaggccagcgat

SEQ ID NO: 945281 - DNA, 15 bp, Homo sapiens
taaaggccagcgatt

SEQ ID NO: 945282 - DNA, 15 bp, Homo sapiens
aaaggccagcgattt

SEQ ID NO: 945283 - DNA, 15 bp, Homo sapiens
aaggccagcgatttt

SEQ ID NO: 945284 - DNA, 15 bp, Homo sapiens
aggccagcgattttc

SEQ ID NO: 945285 - DNA, 15 bp, Homo sapiens
ggccagcgattttcc

SEQ ID NO: 945286 - DNA, 15 bp, Homo sapiens
gccagcgattttccc

SEQ ID NO: 945287 - DNA, 15 bp, Homo sapiens
ccagcgattttccca

SEQ ID NO: 945288 - DNA, 15 bp, Homo sapiens
cagcgattttcccat

SEQ ID NO: 945289 - DNA, 15 bp, Homo sapiens
agcgattttcccatt

SEQ ID NO: 945290 - DNA, 15 bp, Homo sapiens
gcgattttcccattt

SEQ ID NO: 945291 - DNA, 15 bp, Homo sapiens
cgattttcccatttc

SEQ ID NO: 945292 - DNA, 15 bp, Homo sapiens
gattttcccatttcc

SEQ ID NO: 945293 - DNA, 15 bp, Homo sapiens
attttcccatttcca

SEQ ID NO: 945294 - DNA, 15 bp, Homo sapiens
ttttcccatttccac

SEQ ID NO: 945295 - DNA, 15 bp, Homo sapiens
tttcccatttccact

SEQ ID NO: 945296 - DNA, 15 bp, Homo sapiens
ttcccatttccactg

SEQ ID NO: 945297 - DNA, 15 bp, Homo sapiens
tcccatttccactgc

SEQ ID NO: 945298 - DNA, 15 bp, Homo sapiens
cccatttccactgcc

SEQ ID NO: 945299 - DNA, 15 bp, Homo sapiens
ccatttccactgccc

SEQ ID NO: 945300 - DNA, 15 bp, Homo sapiens
catttccactgccct

SEQ ID NO: 945301 - DNA, 15 bp, Homo sapiens
atttccactgccctg

SEQ ID NO: 945302 - DNA, 15 bp, Homo sapiens
tttccactgccctgc

SEQ ID NO: 945303 - DNA, 15 bp, Homo sapiens
ttccactgccctgca

SEQ ID NO: 945304 - DNA, 15 bp, Homo sapiens
tccactgccctgcaa

SEQ ID NO: 945305 - DNA, 15 bp, Homo sapiens
ccactgccctgcaat

SEQ ID NO: 945306 - DNA, 15 bp, Homo sapiens
cactgccctgcaatc

SEQ ID NO: 945307 - DNA, 15 bp, Homo sapiens
actgccctgcaatcc

SEQ ID NO: 945308 - DNA, 15 bp, Homo sapiens
ctgccctgcaatcca

SEQ ID NO: 945309 - DNA, 15 bp, Homo sapiens
tgccctgcaatccaa

SEQ ID NO: 945310 - DNA, 15 bp, Homo sapiens
gccctgcaatccaaa

SEQ ID NO: 945311 - DNA, 15 bp, Homo sapiens
ccctgcaatccaaag

SEQ ID NO: 945312 - DNA, 15 bp, Homo sapiens
cctgcaatccaaagc

SEQ ID NO: 945313 - DNA, 15 bp, Homo sapiens
ctgcaatccaaagct

SEQ ID NO: 945314 - DNA, 15 bp, Homo sapiens
tgcaatccaaagctc

SEQ ID NO: 945315 - DNA, 15 bp, Homo sapiens
gcaatccaaagctcc

SEQ ID NO: 945316 - DNA, 15 bp, Homo sapiens
caatccaaagctccc

SEQ ID NO: 945317 - DNA, 15 bp, Homo sapiens
aatccaaagctccct

SEQ ID NO: 945318 - DNA, 15 bp, Homo sapiens
atccaaagctccctt

SEQ ID NO: 945319 - DNA, 15 bp, Homo sapiens
tccaaagctcccttc

SEQ ID NO: 945320 - DNA, 15 bp, Homo sapiens
ccaaagctcccttct

SEQ ID NO: 945321 - DNA, 15 bp, Homo sapiens
caaagctcccttctc

SEQ ID NO: 945322 - DNA, 15 bp, Homo sapiens
aaagctcccttctca

SEQ ID NO: 945323 - DNA, 15 bp, Homo sapiens
aagctcccttctcaa

SEQ ID NO: 945324 - DNA, 15 bp, Homo sapiens
agctcccttctcaaa

SEQ ID NO: 945325 - DNA, 15 bp, Homo sapiens
gctcccttctcaaaa

SEQ ID NO: 945326 - DNA, 15 bp, Homo sapiens
ctcccttctcaaaat

SEQ ID NO: 945327 - DNA, 15 bp, Homo sapiens
tcccttctcaaaata

SEQ ID NO: 945328 - DNA, 15 bp, Homo sapiens
cccttctcaaaatag

SEQ ID NO: 945329 - DNA, 15 bp, Homo sapiens
ccttctcaaaataga

SEQ ID NO: 945330 - DNA, 15 bp, Homo sapiens
cttctcaaaatagac

SEQ ID NO: 945331 - DNA, 15 bp, Homo sapiens
ttctcaaaatagaca

SEQ ID NO: 945332 - DNA, 15 bp, Homo sapiens
tctcaaaatagacat

SEQ ID NO: 945333 - DNA, 15 bp, Homo sapiens
ctcaaaatagacatt

SEQ ID NO: 945334 - DNA, 15 bp, Homo sapiens
tcaaaatagacattg

SEQ ID NO: 945335 - DNA, 15 bp, Homo sapiens
caaaatagacattga

SEQ ID NO: 945336 - DNA, 15 bp, Homo sapiens
aaaatagacattgaa

SEQ ID NO: 945337 - DNA, 15 bp, Homo sapiens
aaatagacattgaaa

SEQ ID NO: 945338 - DNA, 15 bp, Homo sapiens
aatagacattgaaaa

SEQ ID NO: 945339 - DNA, 15 bp, Homo sapiens
atagacattgaaaaa

SEQ ID NO: 945340 - DNA, 15 bp, Homo sapiens
tagacattgaaaaat

SEQ ID NO: 945341 - DNA, 15 bp, Homo sapiens
agacattgaaaaatc

SEQ ID NO: 945342 - DNA, 15 bp, Homo sapiens
gacattgaaaaatca

SEQ ID NO: 945343 - DNA, 15 bp, Homo sapiens
acattgaaaaatcat

SEQ ID NO: 945344 - DNA, 15 bp, Homo sapiens
cattgaaaaatcatg

SEQ ID NO: 945345 - DNA, 15 bp, Homo sapiens
attgaaaaatcatga

SEQ ID NO: 945346 - DNA, 15 bp, Homo sapiens
ttgaaaaatcatgag

SEQ ID NO: 945347 - DNA, 15 bp, Homo sapiens
tgaaaaatcatgagc

SEQ ID NO: 945348 - DNA, 15 bp, Homo sapiens
gaaaaatcatgagct

SEQ ID NO: 945349 - DNA, 15 bp, Homo sapiens
aaaaatcatgagctg

SEQ ID NO: 945350 - DNA, 15 bp, Homo sapiens
aaaatcatgagctgt

SEQ ID NO: 945351 - DNA, 15 bp, Homo sapiens
aaatcatgagctgtt

SEQ ID NO: 945352 - DNA, 15 bp, Homo sapiens
aatcatgagctgttt

SEQ ID NO: 945353 - DNA, 15 bp, Homo sapiens
atcatgagctgtttc

SEQ ID NO: 945354 - DNA, 15 bp, Homo sapiens
tcatgagctgtttct

SEQ ID NO: 945355 - DNA, 15 bp, Homo sapiens
catgagctgtttctt

SEQ ID NO: 945356 - DNA, 15 bp, Homo sapiens
atgagctgtttcttg

SEQ ID NO: 945357 - DNA, 15 bp, Homo sapiens
tgagctgtttcttgg

SEQ ID NO: 945358 - DNA, 15 bp, Homo sapiens
gagctgtttcttggt

SEQ ID NO: 945359 - DNA, 15 bp, Homo sapiens
agctgtttcttggtc

SEQ ID NO: 945360 - DNA, 15 bp, Homo sapiens
gctgtttcttggtca

SEQ ID NO: 945361 - DNA, 15 bp, Homo sapiens
ctgtttcttggtcac

SEQ ID NO: 945362 - DNA, 15 bp, Homo sapiens
tgtttcttggtcaca

SEQ ID NO: 945363 - DNA, 15 bp, Homo sapiens
gtttcttggtcacag

SEQ ID NO: 945364 - DNA, 15 bp, Homo sapiens
tttcttggtcacagg

SEQ ID NO: 945365 - DNA, 15 bp, Homo sapiens
ttcttggtcacaggc

SEQ ID NO: 945366 - DNA, 15 bp, Homo sapiens
tcttggtcacaggcc

SEQ ID NO: 945367 - DNA, 15 bp, Homo sapiens
cttggtcacaggcct

SEQ ID NO: 945368 - DNA, 15 bp, Homo sapiens
ttggtcacaggcctt

SEQ ID NO: 945369 - DNA, 15 bp, Homo sapiens
tggtcacaggccttg

SEQ ID NO: 945370 - DNA, 15 bp, Homo sapiens
ggtcacaggccttgc

SEQ ID NO: 945371 - DNA, 15 bp, Homo sapiens
gtcacaggccttgca

SEQ ID NO: 945372 - DNA, 15 bp, Homo sapiens
tcacaggccttgcag

SEQ ID NO: 945373 - DNA, 15 bp, Homo sapiens
cacaggccttgcagg

SEQ ID NO: 945374 - DNA, 15 bp, Homo sapiens
acaggccttgcagga

SEQ ID NO: 945375 - DNA, 15 bp, Homo sapiens
caggccttgcaggaa

SEQ ID NO: 945376 - DNA, 15 bp, Homo sapiens
aggccttgcaggaat

SEQ ID NO: 945377 - DNA, 15 bp, Homo sapiens
ggccttgcaggaatt

SEQ ID NO: 945378 - DNA, 15 bp, Homo sapiens
gccttgcaggaattc

SEQ ID NO: 945379 - DNA, 15 bp, Homo sapiens
ccttgcaggaattcc

SEQ ID NO: 945380 - DNA, 15 bp, Homo sapiens
cttgcaggaattcct

SEQ ID NO: 945381 - DNA, 15 bp, Homo sapiens
ttgcaggaattcctg

SEQ ID NO: 945382 - DNA, 15 bp, Homo sapiens
tgcaggaattcctga

SEQ ID NO: 945383 - DNA, 15 bp, Homo sapiens
gcaggaattcctgag

SEQ ID NO: 945384 - DNA, 15 bp, Homo sapiens
caggaattcctgagc

SEQ ID NO: 945385 - DNA, 15 bp, Homo sapiens
aggaattcctgagca

SEQ ID NO: 945386 - DNA, 15 bp, Homo sapiens
ggaattcctgagcat

SEQ ID NO: 945387 - DNA, 15 bp, Homo sapiens
gaattcctgagcatt

SEQ ID NO: 945388 - DNA, 15 bp, Homo sapiens
aattcctgagcattg

SEQ ID NO: 945389 - DNA, 15 bp, Homo sapiens
attcctgagcattgc

SEQ ID NO: 945390 - DNA, 15 bp, Homo sapiens
ttcctgagcattgcc

SEQ ID NO: 945391 - DNA, 15 bp, Homo sapiens
tcctgagcattgcct

SEQ ID NO: 945392 - DNA, 15 bp, Homo sapiens
cctgagcattgcctt

SEQ ID NO: 945393 - DNA, 15 bp, Homo sapiens
ctgagcattgccttc

SEQ ID NO: 945394 - DNA, 15 bp, Homo sapiens
tgagcattgccttcc

SEQ ID NO: 945395 - DNA, 15 bp, Homo sapiens
gagcattgccttcct

SEQ ID NO: 945396 - DNA, 15 bp, Homo sapiens
agcattgccttccta

SEQ ID NO: 945397 - DNA, 15 bp, Homo sapiens
gcattgccttcctac

SEQ ID NO: 945398 - DNA, 15 bp, Homo sapiens
cattgccttcctact

SEQ ID NO: 945399 - DNA, 15 bp, Homo sapiens
attgccttcctactc

SEQ ID NO: 945400 - DNA, 15 bp, Homo sapiens
ttgccttcctactca

SEQ ID NO: 945401 - DNA, 15 bp, Homo sapiens
tgccttcctactcaa

SEQ ID NO: 945402 - DNA, 15 bp, Homo sapiens
gccttcctactcaag

SEQ ID NO: 945403 - DNA, 15 bp, Homo sapiens
ccttcctactcaagc

SEQ ID NO: 945404 - DNA, 15 bp, Homo sapiens
cttcctactcaagct

SEQ ID NO: 945405 - DNA, 15 bp, Homo sapiens
ttcctactcaagctt

SEQ ID NO: 945406 - DNA, 15 bp, Homo sapiens
tcctactcaagcttc

SEQ ID NO: 945407 - DNA, 15 bp, Homo sapiens
cctactcaagcttct

SEQ ID NO: 945408 - DNA, 15 bp, Homo sapiens
ctactcaagcttctc

SEQ ID NO: 945409 - DNA, 15 bp, Homo sapiens
tactcaagcttctca

SEQ ID NO: 945410 - DNA, 15 bp, Homo sapiens
actcaagcttctcat

SEQ ID NO: 945411 - DNA, 15 bp, Homo sapiens
ctcaagcttctcatc

SEQ ID NO: 945412 - DNA, 15 bp, Homo sapiens
tcaagcttctcatca

SEQ ID NO: 945413 - DNA, 15 bp, Homo sapiens
caagcttctcatcat

SEQ ID NO: 945414 - DNA, 15 bp, Homo sapiens
aagcttctcatcatc

SEQ ID NO: 945415 - DNA, 15 bp, Homo sapiens
agcttctcatcatct

SEQ ID NO: 945416 - DNA, 15 bp, Homo sapiens
gcttctcatcatctc

SEQ ID NO: 945417 - DNA, 15 bp, Homo sapiens
cttctcatcatctcc

SEQ ID NO: 945418 - DNA, 15 bp, Homo sapiens
ttctcatcatctccc

SEQ ID NO: 945419 - DNA, 15 bp, Homo sapiens
tctcatcatctcccc

SEQ ID NO: 945420 - DNA, 15 bp, Homo sapiens
ctcatcatctcccca

SEQ ID NO: 945421 - DNA, 15 bp, Homo sapiens
tcatcatctccccaa

SEQ ID NO: 945422 - DNA, 15 bp, Homo sapiens
catcatctccccaag

SEQ ID NO: 945423 - DNA, 15 bp, Homo sapiens
atcatctccccaagc

SEQ ID NO: 945424 - DNA, 15 bp, Homo sapiens
tcatctccccaagca

SEQ ID NO: 945425 - DNA, 15 bp, Homo sapiens
catctccccaagcac

SEQ ID NO: 945426 - DNA, 15 bp, Homo sapiens
atctccccaagcacc

SEQ ID NO: 945427 - DNA, 15 bp, Homo sapiens
tctccccaagcaccc

SEQ ID NO: 945428 - DNA, 15 bp, Homo sapiens
ctccccaagcaccca

SEQ ID NO: 945429 - DNA, 15 bp, Homo sapiens
tccccaagcacccag

SEQ ID NO: 945430 - DNA, 15 bp, Homo sapiens
ccccaagcacccagc

SEQ ID NO: 945431 - DNA, 15 bp, Homo sapiens
cccaagcacccagca

SEQ ID NO: 945432 - DNA, 15 bp, Homo sapiens
ccaagcacccagcac

SEQ ID NO: 945433 - DNA, 15 bp, Homo sapiens
caagcacccagcact

SEQ ID NO: 945434 - DNA, 15 bp, Homo sapiens
aagcacccagcactt

SEQ ID NO: 945435 - DNA, 15 bp, Homo sapiens
agcacccagcacttc

SEQ ID NO: 945436 - DNA, 15 bp, Homo sapiens
gcacccagcacttcc

SEQ ID NO: 945437 - DNA, 15 bp, Homo sapiens
cacccagcacttccg

SEQ ID NO: 945438 - DNA, 15 bp, Homo sapiens
acccagcacttccgc

SEQ ID NO: 945439 - DNA, 15 bp, Homo sapiens
cccagcacttccgca

SEQ ID NO: 945440 - DNA, 15 bp, Homo sapiens
ccagcacttccgcat

SEQ ID NO: 945441 - DNA, 15 bp, Homo sapiens
cagcacttccgcatt

SEQ ID NO: 945442 - DNA, 15 bp, Homo sapiens
agcacttccgcattt

SEQ ID NO: 945443 - DNA, 15 bp, Homo sapiens
gcacttccgcatttc

SEQ ID NO: 945444 - DNA, 15 bp, Homo sapiens
cacttccgcatttct

SEQ ID NO: 945445 - DNA, 15 bp, Homo sapiens
acttccgcatttctt

SEQ ID NO: 945446 - DNA, 15 bp, Homo sapiens
cttccgcatttcttt

SEQ ID NO: 945447 - DNA, 15 bp, Homo sapiens
ttccgcatttctttt

SEQ ID NO: 945448 - DNA, 15 bp, Homo sapiens
tccgcatttcttttc

SEQ ID NO: 945449 - DNA, 15 bp, Homo sapiens
ccgcatttcttttct

SEQ ID NO: 945450 - DNA, 15 bp, Homo sapiens
cgcatttcttttcta

SEQ ID NO: 945451 - DNA, 15 bp, Homo sapiens
gcatttcttttctac

SEQ ID NO: 945452 - DNA, 15 bp, Homo sapiens
catttcttttctacc

SEQ ID NO: 945453 - DNA, 15 bp, Homo sapiens
atttcttttctacct

SEQ ID NO: 945454 - DNA, 15 bp, Homo sapiens
tttcttttctacctt

SEQ ID NO: 945455 - DNA, 15 bp, Homo sapiens
ttcttttctaccttc

SEQ ID NO: 945456 - DNA, 15 bp, Homo sapiens
tcttttctaccttct

SEQ ID NO: 945457 - DNA, 15 bp, Homo sapiens
cttttctaccttctc

SEQ ID NO: 945458 - DNA, 15 bp, Homo sapiens
ttttctaccttctcc

SEQ ID NO: 945459 - DNA, 15 bp, Homo sapiens
tttctaccttctcct

SEQ ID NO: 945460 - DNA, 15 bp, Homo sapiens
ttctaccttctcctc

SEQ ID NO: 945461 - DNA, 15 bp, Homo sapiens
tctaccttctcctcc

SEQ ID NO: 945462 - DNA, 15 bp, Homo sapiens
ctaccttctcctcca

SEQ ID NO: 945463 - DNA, 15 bp, Homo sapiens
taccttctcctccag

SEQ ID NO: 945464 - DNA, 15 bp, Homo sapiens
accttctcctccaga

SEQ ID NO: 945465 - DNA, 15 bp, Homo sapiens
ccttctcctccagac

SEQ ID NO: 945466 - DNA, 15 bp, Homo sapiens
cttctcctccagacc

SEQ ID NO: 945467 - DNA, 15 bp, Homo sapiens
ttctcctccagacct

SEQ ID NO: 945468 - DNA, 15 bp, Homo sapiens
tctcctccagacctg

SEQ ID NO: 945469 - DNA, 15 bp, Homo sapiens
ctcctccagacctgg

SEQ ID NO: 945470 - DNA, 15 bp, Homo sapiens
tcctccagacctggt

SEQ ID NO: 945471 - DNA, 15 bp, Homo sapiens
cctccagacctggtt

SEQ ID NO: 945472 - DNA, 15 bp, Homo sapiens
ctccagacctggttt

SEQ ID NO: 945473 - DNA, 15 bp, Homo sapiens
tccagacctggtttc

SEQ ID NO: 945474 - DNA, 15 bp, Homo sapiens
ccagacctggtttca

SEQ ID NO: 945475 - DNA, 15 bp, Homo sapiens
cagacctggtttcaa

SEQ ID NO: 945476 - DNA, 15 bp, Homo sapiens
agacctggtttcaaa

SEQ ID NO: 945477 - DNA, 15 bp, Homo sapiens
gacctggtttcaaat

SEQ ID NO: 945478 - DNA, 15 bp, Homo sapiens
acctggtttcaaatc

SEQ ID NO: 945479 - DNA, 15 bp, Homo sapiens
cctggtttcaaatcc

SEQ ID NO: 945480 - DNA, 15 bp, Homo sapiens
ctggtttcaaatcca

SEQ ID NO: 945481 - DNA, 15 bp, Homo sapiens
tggtttcaaatccaa

SEQ ID NO: 945482 - DNA, 15 bp, Homo sapiens
ggtttcaaatccaat

SEQ ID NO: 945483 - DNA, 15 bp, Homo sapiens
gtttcaaatccaatc

SEQ ID NO: 945484 - DNA, 15 bp, Homo sapiens
tttcaaatccaatcc

SEQ ID NO: 945485 - DNA, 15 bp, Homo sapiens
ttcaaatccaatcct

SEQ ID NO: 945486 - DNA, 15 bp, Homo sapiens
tcaaatccaatcctc

SEQ ID NO: 945487 - DNA, 15 bp, Homo sapiens
caaatccaatcctcc

SEQ ID NO: 945488 - DNA, 15 bp, Homo sapiens
aaatccaatcctcca

SEQ ID NO: 945489 - DNA, 15 bp, Homo sapiens
aatccaatcctccat

SEQ ID NO: 945490 - DNA, 15 bp, Homo sapiens
atccaatcctccatc

SEQ ID NO: 945491 - DNA, 15 bp, Homo sapiens
tccaatcctccatcc

SEQ ID NO: 945492 - DNA, 15 bp, Homo sapiens
ccaatcctccatccc

SEQ ID NO: 945493 - DNA, 15 bp, Homo sapiens
caatcctccatcccc

SEQ ID NO: 945494 - DNA, 15 bp, Homo sapiens
aatcctccatcccca

SEQ ID NO: 945495 - DNA, 15 bp, Homo sapiens
atcctccatccccaa

SEQ ID NO: 945496 - DNA, 15 bp, Homo sapiens
tcctccatccccaag

SEQ ID NO: 945497 - DNA, 15 bp, Homo sapiens
cctccatccccaagc

SEQ ID NO: 945498 - DNA, 15 bp, Homo sapiens
ctccatccccaagct

SEQ ID NO: 945499 - DNA, 15 bp, Homo sapiens
tccatccccaagctt

SEQ ID NO: 945500 - DNA, 15 bp, Homo sapiens
ccatccccaagcttt

SEQ ID NO: 945501 - DNA, 15 bp, Homo sapiens
catccccaagcttta

SEQ ID NO: 945502 - DNA, 15 bp, Homo sapiens
atccccaagctttat

SEQ ID NO: 945503 - DNA, 15 bp, Homo sapiens
tccccaagctttata

SEQ ID NO: 945504 - DNA, 15 bp, Homo sapiens
ccccaagctttatac

SEQ ID NO: 945505 - DNA, 15 bp, Homo sapiens
cccaagctttataca

SEQ ID NO: 945506 - DNA, 15 bp, Homo sapiens
ccaagctttatacac

SEQ ID NO: 945507 - DNA, 15 bp, Homo sapiens
caagctttatacact

SEQ ID NO: 945508 - DNA, 15 bp, Homo sapiens
aagctttatacacta

SEQ ID NO: 945509 - DNA, 15 bp, Homo sapiens
agctttatacactac

SEQ ID NO: 945510 - DNA, 15 bp, Homo sapiens
gctttatacactact

SEQ ID NO: 945511 - DNA, 15 bp, Homo sapiens
ctttatacactactc

SEQ ID NO: 945512 - DNA, 15 bp, Homo sapiens
tttatacactactca

SEQ ID NO: 945513 - DNA, 15 bp, Homo sapiens
ttatacactactcat

SEQ ID NO: 945514 - DNA, 15 bp, Homo sapiens
tatacactactcatt

SEQ ID NO: 945515 - DNA, 15 bp, Homo sapiens
atacactactcattt

SEQ ID NO: 945516 - DNA, 15 bp, Homo sapiens
tacactactcatttt

SEQ ID NO: 945517 - DNA, 15 bp, Homo sapiens
acactactcattttc

SEQ ID NO: 945518 - DNA, 15 bp, Homo sapiens
cactactcattttct

SEQ ID NO: 945519 - DNA, 15 bp, Homo sapiens
actactcattttctt

SEQ ID NO: 945520 - DNA, 15 bp, Homo sapiens
ctactcattttcttg

SEQ ID NO: 945521 - DNA, 15 bp, Homo sapiens
tactcattttcttgc

SEQ ID NO: 945522 - DNA, 15 bp, Homo sapiens
actcattttcttgcc

SEQ ID NO: 945523 - DNA, 15 bp, Homo sapiens
ctcattttcttgcca

SEQ ID NO: 945524 - DNA, 15 bp, Homo sapiens
tcattttcttgccat

SEQ ID NO: 945525 - DNA, 15 bp, Homo sapiens
cattttcttgccatt

SEQ ID NO: 945526 - DNA, 15 bp, Homo sapiens
attttcttgccattt

SEQ ID NO: 945527 - DNA, 15 bp, Homo sapiens
ttttcttgccatttt

SEQ ID NO: 945528 - DNA, 15 bp, Homo sapiens
tttcttgccattttg

SEQ ID NO: 945529 - DNA, 15 bp, Homo sapiens
ttcttgccattttgt

SEQ ID NO: 945530 - DNA, 15 bp, Homo sapiens
tcttgccattttgtc

SEQ ID NO: 945531 - DNA, 15 bp, Homo sapiens
cttgccattttgtcc

SEQ ID NO: 945532 - DNA, 15 bp, Homo sapiens
ttgccattttgtcca

SEQ ID NO: 945533 - DNA, 15 bp, Homo sapiens
tgccattttgtccat

SEQ ID NO: 945534 - DNA, 15 bp, Homo sapiens
gccattttgtccatt

SEQ ID NO: 945535 - DNA, 15 bp, Homo sapiens
ccattttgtccatta

SEQ ID NO: 945536 - DNA, 15 bp, Homo sapiens
cattttgtccattaa

SEQ ID NO: 945537 - DNA, 15 bp, Homo sapiens
attttgtccattaaa

SEQ ID NO: 945538 - DNA, 15 bp, Homo sapiens
ttttgtccattaaaa

SEQ ID NO: 945539 - DNA, 15 bp, Homo sapiens
tttgtccattaaaaa

SEQ ID NO: 945540 - DNA, 15 bp, Homo sapiens
ttgtccattaaaaat

SEQ ID NO: 945541 - DNA, 15 bp, Homo sapiens
tgtccattaaaaatt

SEQ ID NO: 945542 - DNA, 15 bp, Homo sapiens
gtccattaaaaattc

SEQ ID NO: 945543 - DNA, 15 bp, Homo sapiens
tccattaaaaattct

SEQ ID NO: 945544 - DNA, 15 bp, Homo sapiens
ccattaaaaattctc

SEQ ID NO: 945545 - DNA, 15 bp, Homo sapiens
cattaaaaattctct

SEQ ID NO: 945546 - DNA, 15 bp, Homo sapiens
attaaaaattctctg

SEQ ID NO: 945547 - DNA, 15 bp, Homo sapiens
ttaaaaattctctgt

SEQ ID NO: 945548 - DNA, 15 bp, Homo sapiens
taaaaattctctgta

SEQ ID NO: 945549 - DNA, 15 bp, Homo sapiens
aaaaattctctgtag

SEQ ID NO: 945550 - DNA, 15 bp, Homo sapiens
aaaattctctgtaga

SEQ ID NO: 945551 - DNA, 15 bp, Homo sapiens
aaattctctgtagaa

SEQ ID NO: 945552 - DNA, 15 bp, Homo sapiens
aattctctgtagaat

SEQ ID NO: 945553 - DNA, 15 bp, Homo sapiens
attctctgtagaata

SEQ ID NO: 945554 - DNA, 15 bp, Homo sapiens
ttctctgtagaatag

SEQ ID NO: 945555 - DNA, 15 bp, Homo sapiens
tctctgtagaatagt

SEQ ID NO: 945556 - DNA, 15 bp, Homo sapiens
ctctgtagaatagta

SEQ ID NO: 945557 - DNA, 15 bp, Homo sapiens
tctgtagaatagtag

SEQ ID NO: 945558 - DNA, 15 bp, Homo sapiens
ctgtagaatagtagc

SEQ ID NO: 945559 - DNA, 15 bp, Homo sapiens
tgtagaatagtagca

SEQ ID NO: 945560 - DNA, 15 bp, Homo sapiens
gtagaatagtagcaa

SEQ ID NO: 945561 - DNA, 15 bp, Homo sapiens
tagaatagtagcaat

SEQ ID NO: 945562 - DNA, 15 bp, Homo sapiens
agaatagtagcaatt

SEQ ID NO: 945563 - DNA, 15 bp, Homo sapiens
gaatagtagcaattt

SEQ ID NO: 945564 - DNA, 15 bp, Homo sapiens
aatagtagcaatttt

SEQ ID NO: 945565 - DNA, 15 bp, Homo sapiens
atagtagcaatttta

SEQ ID NO: 945566 - DNA, 15 bp, Homo sapiens
tagtagcaattttag

SEQ ID NO: 945567 - DNA, 15 bp, Homo sapiens
agtagcaattttagg

SEQ ID NO: 945568 - DNA, 15 bp, Homo sapiens
gtagcaattttagga

SEQ ID NO: 945569 - DNA, 15 bp, Homo sapiens
tagcaattttaggat

SEQ ID NO: 945570 - DNA, 15 bp, Homo sapiens
agcaattttaggatg

SEQ ID NO: 945571 - DNA, 15 bp, Homo sapiens
gcaattttaggatgt

SEQ ID NO: 945572 - DNA, 15 bp, Homo sapiens
caattttaggatgtt

SEQ ID NO: 945573 - DNA, 15 bp, Homo sapiens
aattttaggatgttc

SEQ ID NO: 945574 - DNA, 15 bp, Homo sapiens
attttaggatgttct

SEQ ID NO: 945575 - DNA, 15 bp, Homo sapiens
ttttaggatgttctg

SEQ ID NO: 945576 - DNA, 15 bp, Homo sapiens
tttaggatgttctga

SEQ ID NO: 945577 - DNA, 15 bp, Homo sapiens
ttaggatgttctgat

SEQ ID NO: 945578 - DNA, 15 bp, Homo sapiens
taggatgttctgatg

SEQ ID NO: 945579 - DNA, 15 bp, Homo sapiens
aggatgttctgatgt

SEQ ID NO: 945580 - DNA, 15 bp, Homo sapiens
ggatgttctgatgtc

SEQ ID NO: 945581 - DNA, 15 bp, Homo sapiens
gatgttctgatgtcc

SEQ ID NO: 945582 - DNA, 15 bp, Homo sapiens
atgttctgatgtccg

SEQ ID NO: 945583 - DNA, 15 bp, Homo sapiens
tgttctgatgtccgt

SEQ ID NO: 945584 - DNA, 15 bp, Homo sapiens
gttctgatgtccgtg

SEQ ID NO: 945585 - DNA, 15 bp, Homo sapiens
ttctgatgtccgtgt

SEQ ID NO: 945586 - DNA, 15 bp, Homo sapiens
tctgatgtccgtgtc

SEQ ID NO: 945587 - DNA, 15 bp, Homo sapiens
ctgatgtccgtgtca

SEQ ID NO: 945588 - DNA, 15 bp, Homo sapiens
tgatgtccgtgtcat

SEQ ID NO: 945589 - DNA, 15 bp, Homo sapiens
gatgtccgtgtcatt

SEQ ID NO: 945590 - DNA, 15 bp, Homo sapiens
atgtccgtgtcattg

SEQ ID NO: 945591 - DNA, 15 bp, Homo sapiens
tgtccgtgtcattga

SEQ ID NO: 945592 - DNA, 15 bp, Homo sapiens
gtccgtgtcattgag

SEQ ID NO: 945593 - DNA, 15 bp, Homo sapiens
tccgtgtcattgagc

SEQ ID NO: 945594 - DNA, 15 bp, Homo sapiens
ccgtgtcattgagct

SEQ ID NO: 945595 - DNA, 15 bp, Homo sapiens
cgtgtcattgagctg

SEQ ID NO: 945596 - DNA, 15 bp, Homo sapiens
gtgtcattgagctgt

SEQ ID NO: 945597 - DNA, 15 bp, Homo sapiens
tgtcattgagctgta

SEQ ID NO: 945598 - DNA, 15 bp, Homo sapiens
gtcattgagctgtag

SEQ ID NO: 945599 - DNA, 15 bp, Homo sapiens
tcattgagctgtagc

SEQ ID NO: 945600 - DNA, 15 bp, Homo sapiens
cattgagctgtagct

SEQ ID NO: 945601 - DNA, 15 bp, Homo sapiens
attgagctgtagctc

SEQ ID NO: 945602 - DNA, 15 bp, Homo sapiens
ttgagctgtagctcc

SEQ ID NO: 945603 - DNA, 15 bp, Homo sapiens
tgagctgtagctccc

SEQ ID NO: 945604 - DNA, 15 bp, Homo sapiens
gagctgtagctcccc

SEQ ID NO: 945605 - DNA, 15 bp, Homo sapiens
agctgtagctcccca

SEQ ID NO: 945606 - DNA, 15 bp, Homo sapiens
gctgtagctccccac

SEQ ID NO: 945607 - DNA, 15 bp, Homo sapiens
ctgtagctccccacc

SEQ ID NO: 945608 - DNA, 15 bp, Homo sapiens
tgtagctccccaccc

SEQ ID NO: 945609 - DNA, 15 bp, Homo sapiens
gtagctccccacccc

SEQ ID NO: 945610 - DNA, 15 bp, Homo sapiens
tagctccccacccca

SEQ ID NO: 945611 - DNA, 15 bp, Homo sapiens
agctccccaccccat

SEQ ID NO: 945612 - DNA, 15 bp, Homo sapiens
gctccccaccccatt

SEQ ID NO: 945613 - DNA, 15 bp, Homo sapiens
ctccccaccccattt

SEQ ID NO: 945614 - DNA, 15 bp, Homo sapiens
tccccaccccatttt

SEQ ID NO: 945615 - DNA, 15 bp, Homo sapiens
ccccaccccattttt

SEQ ID NO: 945616 - DNA, 15 bp, Homo sapiens
cccaccccatttttg

SEQ ID NO: 945617 - DNA, 15 bp, Homo sapiens
ccaccccatttttga

SEQ ID NO: 945618 - DNA, 15 bp, Homo sapiens
caccccatttttgaa

SEQ ID NO: 945619 - DNA, 15 bp, Homo sapiens
accccatttttgaat

SEQ ID NO: 945620 - DNA, 15 bp, Homo sapiens
ccccatttttgaatg

SEQ ID NO: 945621 - DNA, 15 bp, Homo sapiens
cccatttttgaatgg

SEQ ID NO: 945622 - DNA, 15 bp, Homo sapiens
ccatttttgaatggg

SEQ ID NO: 945623 - DNA, 15 bp, Homo sapiens
catttttgaatggga

SEQ ID NO: 945624 - DNA, 15 bp, Homo sapiens
atttttgaatgggag

SEQ ID NO: 945625 - DNA, 15 bp, Homo sapiens
tttttgaatgggagc

SEQ ID NO: 945626 - DNA, 15 bp, Homo sapiens
ttttgaatgggagca

SEQ ID NO: 945627 - DNA, 15 bp, Homo sapiens
tttgaatgggagcat

SEQ ID NO: 945628 - DNA, 15 bp, Homo sapiens
ttgaatgggagcatt

SEQ ID NO: 945629 - DNA, 15 bp, Homo sapiens
tgaatgggagcattt

SEQ ID NO: 945630 - DNA, 15 bp, Homo sapiens
gaatgggagcattta

SEQ ID NO: 945631 - DNA, 15 bp, Homo sapiens
aatgggagcatttat

SEQ ID NO: 945632 - DNA, 15 bp, Homo sapiens
atgggagcatttatt

SEQ ID NO: 945633 - DNA, 15 bp, Homo sapiens
tgggagcatttatta

SEQ ID NO: 945634 - DNA, 15 bp, Homo sapiens
gggagcatttattac

SEQ ID NO: 945635 - DNA, 15 bp, Homo sapiens
ggagcatttattact

SEQ ID NO: 945636 - DNA, 15 bp, Homo sapiens
gagcatttattacta

SEQ ID NO: 945637 - DNA, 15 bp, Homo sapiens
agcatttattactaa

SEQ ID NO: 945638 - DNA, 15 bp, Homo sapiens
gcatttattactaat

SEQ ID NO: 945639 - DNA, 15 bp, Homo sapiens
catttattactaatc

SEQ ID NO: 945640 - DNA, 15 bp, Homo sapiens
atttattactaatct

SEQ ID NO: 945641 - DNA, 15 bp, Homo sapiens
tttattactaatctc

SEQ ID NO: 945642 - DNA, 15 bp, Homo sapiens
ttattactaatctct

SEQ ID NO: 945643 - DNA, 15 bp, Homo sapiens
tattactaatctctt

SEQ ID NO: 945644 - DNA, 15 bp, Homo sapiens
attactaatctcttg

SEQ ID NO: 945645 - DNA, 15 bp, Homo sapiens
ttactaatctcttgt

SEQ ID NO: 945646 - DNA, 15 bp, Homo sapiens
tactaatctcttgtc

SEQ ID NO: 945647 - DNA, 15 bp, Homo sapiens
actaatctcttgtca

SEQ ID NO: 945648 - DNA, 15 bp, Homo sapiens
ctaatctcttgtcac

SEQ ID NO: 945649 - DNA, 15 bp, Homo sapiens
taatctcttgtcact

SEQ ID NO: 945650 - DNA, 15 bp, Homo sapiens
aatctcttgtcactc

SEQ ID NO: 945651 - DNA, 15 bp, Homo sapiens
atctcttgtcactca

SEQ ID NO: 945652 - DNA, 15 bp, Homo sapiens
tctcttgtcactcat

SEQ ID NO: 945653 - DNA, 15 bp, Homo sapiens
ctcttgtcactcatt

SEQ ID NO: 945654 - DNA, 15 bp, Homo sapiens
tcttgtcactcattg

SEQ ID NO: 945655 - DNA, 15 bp, Homo sapiens
cttgtcactcattgt

SEQ ID NO: 945656 - DNA, 15 bp, Homo sapiens
ttgtcactcattgtc

SEQ ID NO: 945657 - DNA, 15 bp, Homo sapiens
tgtcactcattgtct

SEQ ID NO: 945658 - DNA, 15 bp, Homo sapiens
gtcactcattgtctt

SEQ ID NO: 945659 - DNA, 15 bp, Homo sapiens
tcactcattgtcttt

SEQ ID NO: 945660 - DNA, 15 bp, Homo sapiens
cactcattgtctttt

SEQ ID NO: 945661 - DNA, 15 bp, Homo sapiens
actcattgtcttttt

SEQ ID NO: 945662 - DNA, 15 bp, Homo sapiens
ctcattgtctttttt

SEQ ID NO: 945663 - DNA, 15 bp, Homo sapiens
tcattgtcttttttt

SEQ ID NO: 945664 - DNA, 15 bp, Homo sapiens
cattgtctttttttt

SEQ ID NO: 945665 - DNA, 15 bp, Homo sapiens
attgtcttttttttt

SEQ ID NO: 945666 - DNA, 15 bp, Homo sapiens
ttgtctttttttttt

SEQ ID NO: 945667 - DNA, 15 bp, Homo sapiens
tgtcttttttttttc

SEQ ID NO: 945668 - DNA, 15 bp, Homo sapiens
gtcttttttttttcg

SEQ ID NO: 945669 - DNA, 15 bp, Homo sapiens
tcttttttttttcga

SEQ ID NO: 945670 - DNA, 15 bp, Homo sapiens
cttttttttttcgag

SEQ ID NO: 945671 - DNA, 15 bp, Homo sapiens
ttttttttttcgaga

SEQ ID NO: 945672 - DNA, 15 bp, Homo sapiens
tttttttttcgagat

SEQ ID NO: 945673 - DNA, 15 bp, Homo sapiens
ttttttttcgagatg

SEQ ID NO: 945674 - DNA, 15 bp, Homo sapiens
tttttttcgagatgg

SEQ ID NO: 945675 - DNA, 15 bp, Homo sapiens
ttttttcgagatgga

SEQ ID NO: 945676 - DNA, 15 bp, Homo sapiens
tttttcgagatggag

SEQ ID NO: 945677 - DNA, 15 bp, Homo sapiens
ttttcgagatggaga

SEQ ID NO: 945678 - DNA, 15 bp, Homo sapiens
tttcgagatggagac

SEQ ID NO: 945679 - DNA, 15 bp, Homo sapiens
ttcgagatggagact

SEQ ID NO: 945680 - DNA, 15 bp, Homo sapiens
tcgagatggagactc

SEQ ID NO: 945681 - DNA, 15 bp, Homo sapiens
cgagatggagactcg

SEQ ID NO: 945682 - DNA, 15 bp, Homo sapiens
gagatggagactcgc

SEQ ID NO: 945683 - DNA, 15 bp, Homo sapiens
agatggagactcgct

SEQ ID NO: 945684 - DNA, 15 bp, Homo sapiens
gatggagactcgctc

SEQ ID NO: 945685 - DNA, 15 bp, Homo sapiens
atggagactcgctct

SEQ ID NO: 945686 - DNA, 15 bp, Homo sapiens
tggagactcgctctt

SEQ ID NO: 945687 - DNA, 15 bp, Homo sapiens
ggagactcgctcttt

SEQ ID NO: 945688 - DNA, 15 bp, Homo sapiens
gagactcgctctttc

SEQ ID NO: 945689 - DNA, 15 bp, Homo sapiens
agactcgctctttca

SEQ ID NO: 945690 - DNA, 15 bp, Homo sapiens
gactcgctctttcac

SEQ ID NO: 945691 - DNA, 15 bp, Homo sapiens
actcgctctttcacc

SEQ ID NO: 945692 - DNA, 15 bp, Homo sapiens
ctcgctctttcaccc

SEQ ID NO: 945693 - DNA, 15 bp, Homo sapiens
tcgctctttcaccca

SEQ ID NO: 945694 - DNA, 15 bp, Homo sapiens
cgctctttcacccag

SEQ ID NO: 945695 - DNA, 15 bp, Homo sapiens
gctctttcacccagg

SEQ ID NO: 945696 - DNA, 15 bp, Homo sapiens
ctctttcacccaggc

SEQ ID NO: 945697 - DNA, 15 bp, Homo sapiens
tctttcacccaggct

SEQ ID NO: 945698 - DNA, 15 bp, Homo sapiens
ctttcacccaggctg

SEQ ID NO: 945699 - DNA, 15 bp, Homo sapiens
tttcacccaggctgg

SEQ ID NO: 945700 - DNA, 15 bp, Homo sapiens
ttcacccaggctgga

SEQ ID NO: 945701 - DNA, 15 bp, Homo sapiens
cagtggcatgatctt

SEQ ID NO: 945702 - DNA, 15 bp, Homo sapiens
ttggctcactgcaag

SEQ ID NO: 945703 - DNA, 15 bp, Homo sapiens
tggctcactgcaagc

SEQ ID NO: 945704 - DNA, 15 bp, Homo sapiens
ggctcactgcaagct

SEQ ID NO: 945705 - DNA, 15 bp, Homo sapiens
gctcactgcaagctc

SEQ ID NO: 945706 - DNA, 15 bp, Homo sapiens
ctcactgcaagctcc

SEQ ID NO: 945707 - DNA, 15 bp, Homo sapiens
tcactgcaagctccg

SEQ ID NO: 945708 - DNA, 15 bp, Homo sapiens
cactgcaagctccgc

SEQ ID NO: 945709 - DNA, 15 bp, Homo sapiens
actgcaagctccgcc

SEQ ID NO: 945710 - DNA, 15 bp, Homo sapiens
ctgcaagctccgcct

SEQ ID NO: 945711 - DNA, 15 bp, Homo sapiens
tgcaagctccgcctc

SEQ ID NO: 945712 - DNA, 15 bp, Homo sapiens
gcaagctccgcctcc

SEQ ID NO: 945713 - DNA, 15 bp, Homo sapiens
caagctccgcctccc

SEQ ID NO: 945714 - DNA, 15 bp, Homo sapiens
aagctccgcctccca

SEQ ID NO: 945715 - DNA, 15 bp, Homo sapiens
agctccgcctcccag

SEQ ID NO: 945716 - DNA, 15 bp, Homo sapiens
gctccgcctcccagg

SEQ ID NO: 945717 - DNA, 15 bp, Homo sapiens
ctccgcctcccaggt

SEQ ID NO: 945718 - DNA, 15 bp, Homo sapiens
tccgcctcccaggtt

SEQ ID NO: 945719 - DNA, 15 bp, Homo sapiens
ccgcctcccaggttc

SEQ ID NO: 945720 - DNA, 15 bp, Homo sapiens
cgcctcccaggttca

SEQ ID NO: 945721 - DNA, 15 bp, Homo sapiens
gcctcccaggttcac

SEQ ID NO: 945722 - DNA, 15 bp, Homo sapiens
cctcccaggttcacg

SEQ ID NO: 945723 - DNA, 15 bp, Homo sapiens
ctcccaggttcacgc

SEQ ID NO: 945724 - DNA, 15 bp, Homo sapiens
tcccaggttcacgcc

SEQ ID NO: 945725 - DNA, 15 bp, Homo sapiens
cccaggttcacgcca

SEQ ID NO: 945726 - DNA, 15 bp, Homo sapiens
ccaggttcacgccat

SEQ ID NO: 945727 - DNA, 15 bp, Homo sapiens
caggttcacgccatt

SEQ ID NO: 945728 - DNA, 15 bp, Homo sapiens
aggttcacgccattc

SEQ ID NO: 945729 - DNA, 15 bp, Homo sapiens
ggttcacgccattct

SEQ ID NO: 945730 - DNA, 15 bp, Homo sapiens
gttcacgccattctc

SEQ ID NO: 945731 - DNA, 15 bp, Homo sapiens
ttcacgccattctct

SEQ ID NO: 945732 - DNA, 15 bp, Homo sapiens
tcacgccattctctt

SEQ ID NO: 945733 - DNA, 15 bp, Homo sapiens
cacgccattctcttg

SEQ ID NO: 945734 - DNA, 15 bp, Homo sapiens
acgccattctcttgc

SEQ ID NO: 945735 - DNA, 15 bp, Homo sapiens
cgccattctcttgcc

SEQ ID NO: 945736 - DNA, 15 bp, Homo sapiens
gccattctcttgcct

SEQ ID NO: 945737 - DNA, 15 bp, Homo sapiens
ccattctcttgcctc

SEQ ID NO: 945738 - DNA, 15 bp, Homo sapiens
cattctcttgcctca

SEQ ID NO: 945739 - DNA, 15 bp, Homo sapiens
gcgcccgccaccacg

SEQ ID NO: 945740 - DNA, 15 bp, Homo sapiens
cgcccgccaccacgc

SEQ ID NO: 945741 - DNA, 15 bp, Homo sapiens
gcccgccaccacgcc

SEQ ID NO: 945742 - DNA, 15 bp, Homo sapiens
cccgccaccacgccc

SEQ ID NO: 945743 - DNA, 15 bp, Homo sapiens
ccgccaccacgcccg

SEQ ID NO: 945744 - DNA, 15 bp, Homo sapiens
cgccaccacgcccgg

SEQ ID NO: 945745 - DNA, 15 bp, Homo sapiens
gccaccacgcccggc

SEQ ID NO: 945746 - DNA, 15 bp, Homo sapiens
ccaccacgcccggct

SEQ ID NO: 945747 - DNA, 15 bp, Homo sapiens
caccacgcccggcta

SEQ ID NO: 945748 - DNA, 15 bp, Homo sapiens
accacgcccggctaa

SEQ ID NO: 945749 - DNA, 15 bp, Homo sapiens
ccacgcccggctaat

SEQ ID NO: 945750 - DNA, 15 bp, Homo sapiens
cacgcccggctaatt

SEQ ID NO: 945751 - DNA, 15 bp, Homo sapiens
acgcccggctaattt

SEQ ID NO: 945752 - DNA, 15 bp, Homo sapiens
cgcccggctaatttt

SEQ ID NO: 945753 - DNA, 15 bp, Homo sapiens
gcccggctaattttt

SEQ ID NO: 945754 - DNA, 15 bp, Homo sapiens
cggctaattttttgt

SEQ ID NO: 945755 - DNA, 15 bp, Homo sapiens
ggctaattttttgta

SEQ ID NO: 945756 - DNA, 15 bp, Homo sapiens
gctaattttttgtat

SEQ ID NO: 945757 - DNA, 15 bp, Homo sapiens
ctaattttttgtatt

SEQ ID NO: 945758 - DNA, 15 bp, Homo sapiens
taattttttgtattt

SEQ ID NO: 945759 - DNA, 15 bp, Homo sapiens
aattttttgtatttt

SEQ ID NO: 945760 - DNA, 15 bp, Homo sapiens
attttttgtattttt

SEQ ID NO: 945761 - DNA, 15 bp, Homo sapiens
ttttttgtatttttt

SEQ ID NO: 945762 - DNA, 15 bp, Homo sapiens
tttttgtattttttt

SEQ ID NO: 945763 - DNA, 15 bp, Homo sapiens
ttttgtatttttttt

SEQ ID NO: 945764 - DNA, 15 bp, Homo sapiens
tttgtattttttttt

SEQ ID NO: 945765 - DNA, 15 bp, Homo sapiens
ttgtatttttttttt

SEQ ID NO: 945766 - DNA, 15 bp, Homo sapiens
tgtattttttttttt

SEQ ID NO: 945767 - DNA, 15 bp, Homo sapiens
gtatttttttttttt

SEQ ID NO: 945768 - DNA, 15 bp, Homo sapiens
tatttttttttttta

SEQ ID NO: 945769 - DNA, 15 bp, Homo sapiens
attttttttttttag

SEQ ID NO: 945770 - DNA, 15 bp, Homo sapiens
tttttttttttagta

SEQ ID NO: 945771 - DNA, 15 bp, Homo sapiens
ttttttttttagtag

SEQ ID NO: 945772 - DNA, 15 bp, Homo sapiens
tttttttttagtaga

SEQ ID NO: 945773 - DNA, 15 bp, Homo sapiens
ttttttttagtagag

SEQ ID NO: 945774 - DNA, 15 bp, Homo sapiens
tttttttagtagaga

SEQ ID NO: 945775 - DNA, 15 bp, Homo sapiens
ttttttagtagagac

SEQ ID NO: 945776 - DNA, 15 bp, Homo sapiens
ggtttcaccatgtta

SEQ ID NO: 945777 - DNA, 15 bp, Homo sapiens
tgttagccaggatga

SEQ ID NO: 945778 - DNA, 15 bp, Homo sapiens
gttagccaggatgat

SEQ ID NO: 945779 - DNA, 15 bp, Homo sapiens
ttagccaggatgatc

SEQ ID NO: 945780 - DNA, 15 bp, Homo sapiens
tagccaggatgatct

SEQ ID NO: 945781 - DNA, 15 bp, Homo sapiens
agccaggatgatctc

SEQ ID NO: 945782 - DNA, 15 bp, Homo sapiens
gccaggatgatctca

SEQ ID NO: 945783 - DNA, 15 bp, Homo sapiens
ccaggatgatctcaa

SEQ ID NO: 945784 - DNA, 15 bp, Homo sapiens
caggatgatctcaat

SEQ ID NO: 945785 - DNA, 15 bp, Homo sapiens
aggatgatctcaatc

SEQ ID NO: 945786 - DNA, 15 bp, Homo sapiens
ggatgatctcaatcg

SEQ ID NO: 945787 - DNA, 15 bp, Homo sapiens
gatgatctcaatcgt

SEQ ID NO: 945788 - DNA, 15 bp, Homo sapiens
atgatctcaatcgtc

SEQ ID NO: 945789 - DNA, 15 bp, Homo sapiens
tgatctcaatcgtct

SEQ ID NO: 945790 - DNA, 15 bp, Homo sapiens
gatctcaatcgtctg

SEQ ID NO: 945791 - DNA, 15 bp, Homo sapiens
atctcaatcgtctga

SEQ ID NO: 945792 - DNA, 15 bp, Homo sapiens
tctcaatcgtctgat

SEQ ID NO: 945793 - DNA, 15 bp, Homo sapiens
ctcaatcgtctgatc

SEQ ID NO: 945794 - DNA, 15 bp, Homo sapiens
tcaatcgtctgatct

SEQ ID NO: 945795 - DNA, 15 bp, Homo sapiens
caatcgtctgatctt

SEQ ID NO: 945796 - DNA, 15 bp, Homo sapiens
aatcgtctgatcttg

SEQ ID NO: 945797 - DNA, 15 bp, Homo sapiens
atcgtctgatcttgt

SEQ ID NO: 945798 - DNA, 15 bp, Homo sapiens
tcgtctgatcttgtg

SEQ ID NO: 945799 - DNA, 15 bp, Homo sapiens
cgtctgatcttgtga

SEQ ID NO: 945800 - DNA, 15 bp, Homo sapiens
gtctgatcttgtgat

SEQ ID NO: 945801 - DNA, 15 bp, Homo sapiens
tctgatcttgtgatc

SEQ ID NO: 945802 - DNA, 15 bp, Homo sapiens
ctgatcttgtgatcc

SEQ ID NO: 945803 - DNA, 15 bp, Homo sapiens
tgatcttgtgatccg

SEQ ID NO: 945804 - DNA, 15 bp, Homo sapiens
gatcttgtgatccgc

SEQ ID NO: 945805 - DNA, 15 bp, Homo sapiens
atcttgtgatccgcc

SEQ ID NO: 945806 - DNA, 15 bp, Homo sapiens
tcttgtgatccgccc

SEQ ID NO: 945807 - DNA, 15 bp, Homo sapiens
cttgtgatccgcccg

SEQ ID NO: 945808 - DNA, 15 bp, Homo sapiens
ttgtgatccgcccgc

SEQ ID NO: 945809 - DNA, 15 bp, Homo sapiens
tgtgatccgcccgcc

SEQ ID NO: 945810 - DNA, 15 bp, Homo sapiens
gtgatccgcccgcct

SEQ ID NO: 945811 - DNA, 15 bp, Homo sapiens
tgatccgcccgcctc

SEQ ID NO: 945812 - DNA, 15 bp, Homo sapiens
gatccgcccgcctcg

SEQ ID NO: 945813 - DNA, 15 bp, Homo sapiens
atccgcccgcctcgg

SEQ ID NO: 945814 - DNA, 15 bp, Homo sapiens
tccgcccgcctcggc

SEQ ID NO: 945815 - DNA, 15 bp, Homo sapiens
ccgcccgcctcggca

SEQ ID NO: 945816 - DNA, 15 bp, Homo sapiens
cgcccgcctcggcat

SEQ ID NO: 945817 - DNA, 15 bp, Homo sapiens
gcccgcctcggcatc

SEQ ID NO: 945818 - DNA, 15 bp, Homo sapiens
cccgcctcggcatcc

SEQ ID NO: 945819 - DNA, 15 bp, Homo sapiens
ccgcctcggcatccg

SEQ ID NO: 945820 - DNA, 15 bp, Homo sapiens
cgcctcggcatccga

SEQ ID NO: 945821 - DNA, 15 bp, Homo sapiens
gcctcggcatccgaa

SEQ ID NO: 945822 - DNA, 15 bp, Homo sapiens
cctcggcatccgaaa

SEQ ID NO: 945823 - DNA, 15 bp, Homo sapiens
ctcggcatccgaaag

SEQ ID NO: 945824 - DNA, 15 bp, Homo sapiens
tcggcatccgaaagt

SEQ ID NO: 945825 - DNA, 15 bp, Homo sapiens
cggcatccgaaagtg

SEQ ID NO: 945826 - DNA, 15 bp, Homo sapiens
ggcatccgaaagtgc

SEQ ID NO: 945827 - DNA, 15 bp, Homo sapiens
gcatccgaaagtgct

SEQ ID NO: 945828 - DNA, 15 bp, Homo sapiens
catccgaaagtgctg

SEQ ID NO: 945829 - DNA, 15 bp, Homo sapiens
atccgaaagtgctgg

SEQ ID NO: 945830 - DNA, 15 bp, Homo sapiens
tccgaaagtgctggg

SEQ ID NO: 945831 - DNA, 15 bp, Homo sapiens
ccgaaagtgctggga

SEQ ID NO: 945832 - DNA, 15 bp, Homo sapiens
cgaaagtgctgggat

SEQ ID NO: 945833 - DNA, 15 bp, Homo sapiens
gaaagtgctgggatt

SEQ ID NO: 945834 - DNA, 15 bp, Homo sapiens
tgagccaccacaccc

SEQ ID NO: 945835 - DNA, 15 bp, Homo sapiens
gagccaccacacccg

SEQ ID NO: 945836 - DNA, 15 bp, Homo sapiens
agccaccacacccgg

SEQ ID NO: 945837 - DNA, 15 bp, Homo sapiens
caccacacccggcca

SEQ ID NO: 945838 - DNA, 15 bp, Homo sapiens
accacacccggccaa

SEQ ID NO: 945839 - DNA, 15 bp, Homo sapiens
ccacacccggccaaa

SEQ ID NO: 945840 - DNA, 15 bp, Homo sapiens
cacacccggccaaat

SEQ ID NO: 945841 - DNA, 15 bp, Homo sapiens
acacccggccaaatc

SEQ ID NO: 945842 - DNA, 15 bp, Homo sapiens
cacccggccaaatct

SEQ ID NO: 945843 - DNA, 15 bp, Homo sapiens
acccggccaaatctc

SEQ ID NO: 945844 - DNA, 15 bp, Homo sapiens
cccggccaaatctca

SEQ ID NO: 945845 - DNA, 15 bp, Homo sapiens
ccggccaaatctcat

SEQ ID NO: 945846 - DNA, 15 bp, Homo sapiens
cggccaaatctcatg

SEQ ID NO: 945847 - DNA, 15 bp, Homo sapiens
ggccaaatctcatgt

SEQ ID NO: 945848 - DNA, 15 bp, Homo sapiens
gccaaatctcatgtc

SEQ ID NO: 945849 - DNA, 15 bp, Homo sapiens
ccaaatctcatgtca

SEQ ID NO: 945850 - DNA, 15 bp, Homo sapiens
caaatctcatgtcag

SEQ ID NO: 945851 - DNA, 15 bp, Homo sapiens
aaatctcatgtcagt

SEQ ID NO: 945852 - DNA, 15 bp, Homo sapiens
aatctcatgtcagtc

SEQ ID NO: 945853 - DNA, 15 bp, Homo sapiens
atctcatgtcagtca

SEQ ID NO: 945854 - DNA, 15 bp, Homo sapiens
tctcatgtcagtcat

SEQ ID NO: 945855 - DNA, 15 bp, Homo sapiens
ctcatgtcagtcatt

SEQ ID NO: 945856 - DNA, 15 bp, Homo sapiens
tcatgtcagtcattc

SEQ ID NO: 945857 - DNA, 15 bp, Homo sapiens
catgtcagtcattct

SEQ ID NO: 945858 - DNA, 15 bp, Homo sapiens
atgtcagtcattctc

SEQ ID NO: 945859 - DNA, 15 bp, Homo sapiens
tgtcagtcattctct

SEQ ID NO: 945860 - DNA, 15 bp, Homo sapiens
gtcagtcattctctt

SEQ ID NO: 945861 - DNA, 15 bp, Homo sapiens
tcagtcattctctta

SEQ ID NO: 945862 - DNA, 15 bp, Homo sapiens
cagtcattctcttaa

SEQ ID NO: 945863 - DNA, 15 bp, Homo sapiens
agtcattctcttaaa

SEQ ID NO: 945864 - DNA, 15 bp, Homo sapiens
gtcattctcttaaat

SEQ ID NO: 945865 - DNA, 15 bp, Homo sapiens
tcattctcttaaata

SEQ ID NO: 945866 - DNA, 15 bp, Homo sapiens
cattctcttaaataa

SEQ ID NO: 945867 - DNA, 15 bp, Homo sapiens
attctcttaaataat

SEQ ID NO: 945868 - DNA, 15 bp, Homo sapiens
ttctcttaaataatt

SEQ ID NO: 945869 - DNA, 15 bp, Homo sapiens
tctcttaaataattt

SEQ ID NO: 945870 - DNA, 15 bp, Homo sapiens
ctcttaaataatttg

SEQ ID NO: 945871 - DNA, 15 bp, Homo sapiens
tcttaaataatttgc

SEQ ID NO: 945872 - DNA, 15 bp, Homo sapiens
cttaaataatttgcg

SEQ ID NO: 945873 - DNA, 15 bp, Homo sapiens
ttaaataatttgcgt

SEQ ID NO: 945874 - DNA, 15 bp, Homo sapiens
taaataatttgcgtg

SEQ ID NO: 945875 - DNA, 15 bp, Homo sapiens
aaataatttgcgtgt

SEQ ID NO: 945876 - DNA, 15 bp, Homo sapiens
aataatttgcgtgta

SEQ ID NO: 945877 - DNA, 15 bp, Homo sapiens
ataatttgcgtgtat

SEQ ID NO: 945878 - DNA, 15 bp, Homo sapiens
taatttgcgtgtatc

SEQ ID NO: 945879 - DNA, 15 bp, Homo sapiens
aatttgcgtgtatca

SEQ ID NO: 945880 - DNA, 15 bp, Homo sapiens
atttgcgtgtatcat

SEQ ID NO: 945881 - DNA, 15 bp, Homo sapiens
tttgcgtgtatcatg

SEQ ID NO: 945882 - DNA, 15 bp, Homo sapiens
ttgcgtgtatcatgt

SEQ ID NO: 945883 - DNA, 15 bp, Homo sapiens
tgcgtgtatcatgtc

SEQ ID NO: 945884 - DNA, 15 bp, Homo sapiens
gcgtgtatcatgtca

SEQ ID NO: 945885 - DNA, 15 bp, Homo sapiens
cgtgtatcatgtcac

SEQ ID NO: 945886 - DNA, 15 bp, Homo sapiens
gtgtatcatgtcact

SEQ ID NO: 945887 - DNA, 15 bp, Homo sapiens
tgtatcatgtcactt

SEQ ID NO: 945888 - DNA, 15 bp, Homo sapiens
gtatcatgtcactta

SEQ ID NO: 945889 - DNA, 15 bp, Homo sapiens
tatcatgtcacttag

SEQ ID NO: 945890 - DNA, 15 bp, Homo sapiens
atcatgtcacttagc

SEQ ID NO: 945891 - DNA, 15 bp, Homo sapiens
tcatgtcacttagcc

SEQ ID NO: 945892 - DNA, 15 bp, Homo sapiens
catgtcacttagcca

SEQ ID NO: 945893 - DNA, 15 bp, Homo sapiens
atgtcacttagccat

SEQ ID NO: 945894 - DNA, 15 bp, Homo sapiens
tgtcacttagccatt

SEQ ID NO: 945895 - DNA, 15 bp, Homo sapiens
gtcacttagccatta

SEQ ID NO: 945896 - DNA, 15 bp, Homo sapiens
tcacttagccattaa

SEQ ID NO: 945897 - DNA, 15 bp, Homo sapiens
cacttagccattaaa

SEQ ID NO: 945898 - DNA, 15 bp, Homo sapiens
acttagccattaaaa

SEQ ID NO: 945899 - DNA, 15 bp, Homo sapiens
cttagccattaaaat

SEQ ID NO: 945900 - DNA, 15 bp, Homo sapiens
ttagccattaaaatg

SEQ ID NO: 945901 - DNA, 15 bp, Homo sapiens
tagccattaaaatgc

SEQ ID NO: 945902 - DNA, 15 bp, Homo sapiens
agccattaaaatgca

SEQ ID NO: 945903 - DNA, 15 bp, Homo sapiens
gccattaaaatgcat

SEQ ID NO: 945904 - DNA, 15 bp, Homo sapiens
ccattaaaatgcatt

SEQ ID NO: 945905 - DNA, 15 bp, Homo sapiens
cattaaaatgcattt

SEQ ID NO: 945906 - DNA, 15 bp, Homo sapiens
attaaaatgcattta

SEQ ID NO: 945907 - DNA, 15 bp, Homo sapiens
ttaaaatgcatttaa

SEQ ID NO: 945908 - DNA, 15 bp, Homo sapiens
taaaatgcatttaaa

SEQ ID NO: 945909 - DNA, 15 bp, Homo sapiens
aaaatgcatttaaac

SEQ ID NO: 945910 - DNA, 15 bp, Homo sapiens
aaatgcatttaaaca

SEQ ID NO: 945911 - DNA, 15 bp, Homo sapiens
aatgcatttaaacat

SEQ ID NO: 945912 - DNA, 15 bp, Homo sapiens
atgcatttaaacatt

SEQ ID NO: 945913 - DNA, 15 bp, Homo sapiens
tgcatttaaacatta

SEQ ID NO: 945914 - DNA, 15 bp, Homo sapiens
gcatttaaacattat

SEQ ID NO: 945915 - DNA, 15 bp, Homo sapiens
catttaaacattatt

SEQ ID NO: 945916 - DNA, 15 bp, Homo sapiens
atttaaacattattt

SEQ ID NO: 945917 - DNA, 15 bp, Homo sapiens
tttaaacattatttt

SEQ ID NO: 945918 - DNA, 15 bp, Homo sapiens
ttaaacattattttc

SEQ ID NO: 945919 - DNA, 15 bp, Homo sapiens
taaacattattttca

SEQ ID NO: 945920 - DNA, 15 bp, Homo sapiens
aaacattattttcac

SEQ ID NO: 945921 - DNA, 15 bp, Homo sapiens
aacattattttcact

SEQ ID NO: 945922 - DNA, 15 bp, Homo sapiens
acattattttcactt

SEQ ID NO: 945923 - DNA, 15 bp, Homo sapiens
cattattttcacttt

SEQ ID NO: 945924 - DNA, 15 bp, Homo sapiens
attattttcactttg

SEQ ID NO: 945925 - DNA, 15 bp, Homo sapiens
ttattttcactttgc

SEQ ID NO: 945926 - DNA, 15 bp, Homo sapiens
tattttcactttgca

SEQ ID NO: 945927 - DNA, 15 bp, Homo sapiens
attttcactttgcag

SEQ ID NO: 945928 - DNA, 15 bp, Homo sapiens
ttttcactttgcagg

SEQ ID NO: 945929 - DNA, 15 bp, Homo sapiens
tttcactttgcaggc

SEQ ID NO: 945930 - DNA, 15 bp, Homo sapiens
ttcactttgcaggcg

SEQ ID NO: 945931 - DNA, 15 bp, Homo sapiens
tcactttgcaggcga

SEQ ID NO: 945932 - DNA, 15 bp, Homo sapiens
cactttgcaggcgac

SEQ ID NO: 945933 - DNA, 15 bp, Homo sapiens
actttgcaggcgact

SEQ ID NO: 945934 - DNA, 15 bp, Homo sapiens
ctttgcaggcgactg

SEQ ID NO: 945935 - DNA, 15 bp, Homo sapiens
tttgcaggcgactgg

SEQ ID NO: 945936 - DNA, 15 bp, Homo sapiens
ttgcaggcgactggg

SEQ ID NO: 945937 - DNA, 15 bp, Homo sapiens
tgcaggcgactgggg

SEQ ID NO: 945938 - DNA, 15 bp, Homo sapiens
gcaggcgactgggga

SEQ ID NO: 945939 - DNA, 15 bp, Homo sapiens
caggcgactggggat

SEQ ID NO: 945940 - DNA, 15 bp, Homo sapiens
aggcgactggggatc

SEQ ID NO: 945941 - DNA, 15 bp, Homo sapiens
ggcgactggggatca

SEQ ID NO: 945942 - DNA, 15 bp, Homo sapiens
gcgactggggatcag

SEQ ID NO: 945943 - DNA, 15 bp, Homo sapiens
cgactggggatcaga

SEQ ID NO: 945944 - DNA, 15 bp, Homo sapiens
gactggggatcagaa

SEQ ID NO: 945945 - DNA, 15 bp, Homo sapiens
actggggatcagaaa

SEQ ID NO: 945946 - DNA, 15 bp, Homo sapiens
ctggggatcagaaag

SEQ ID NO: 945947 - DNA, 15 bp, Homo sapiens
tggggatcagaaaga

SEQ ID NO: 945948 - DNA, 15 bp, Homo sapiens
ggggatcagaaagac

SEQ ID NO: 945949 - DNA, 15 bp, Homo sapiens
gggatcagaaagact

SEQ ID NO: 945950 - DNA, 15 bp, Homo sapiens
ggatcagaaagacta

SEQ ID NO: 945951 - DNA, 15 bp, Homo sapiens
gatcagaaagactaa

SEQ ID NO: 945952 - DNA, 15 bp, Homo sapiens
atcagaaagactaag

SEQ ID NO: 945953 - DNA, 15 bp, Homo sapiens
tcagaaagactaagg

SEQ ID NO: 945954 - DNA, 15 bp, Homo sapiens
cagaaagactaaggc

SEQ ID NO: 945955 - DNA, 15 bp, Homo sapiens
agaaagactaaggca

SEQ ID NO: 945956 - DNA, 15 bp, Homo sapiens
gaaagactaaggcac

SEQ ID NO: 945957 - DNA, 15 bp, Homo sapiens
aaagactaaggcact

SEQ ID NO: 945958 - DNA, 15 bp, Homo sapiens
aagactaaggcactt

SEQ ID NO: 945959 - DNA, 15 bp, Homo sapiens
agactaaggcacttg

SEQ ID NO: 945960 - DNA, 15 bp, Homo sapiens
gactaaggcacttgt

SEQ ID NO: 945961 - DNA, 15 bp, Homo sapiens
actaaggcacttgtt

SEQ ID NO: 945962 - DNA, 15 bp, Homo sapiens
ctaaggcacttgtta

SEQ ID NO: 945963 - DNA, 15 bp, Homo sapiens
taaggcacttgttat

SEQ ID NO: 945964 - DNA, 15 bp, Homo sapiens
aaggcacttgttatt

SEQ ID NO: 945965 - DNA, 15 bp, Homo sapiens
aggcacttgttattg

SEQ ID NO: 945966 - DNA, 15 bp, Homo sapiens
ggcacttgttattga

SEQ ID NO: 945967 - DNA, 15 bp, Homo sapiens
gcacttgttattgat

SEQ ID NO: 945968 - DNA, 15 bp, Homo sapiens
cacttgttattgatc

SEQ ID NO: 945969 - DNA, 15 bp, Homo sapiens
acttgttattgatca

SEQ ID NO: 945970 - DNA, 15 bp, Homo sapiens
cttgttattgatcac

SEQ ID NO: 945971 - DNA, 15 bp, Homo sapiens
ttgttattgatcaca

SEQ ID NO: 945972 - DNA, 15 bp, Homo sapiens
tgttattgatcacac

SEQ ID NO: 945973 - DNA, 15 bp, Homo sapiens
gttattgatcacaca

SEQ ID NO: 945974 - DNA, 15 bp, Homo sapiens
ttattgatcacacag

SEQ ID NO: 945975 - DNA, 15 bp, Homo sapiens
tattgatcacacagc

SEQ ID NO: 945976 - DNA, 15 bp, Homo sapiens
attgatcacacagct

SEQ ID NO: 945977 - DNA, 15 bp, Homo sapiens
ttgatcacacagcta

SEQ ID NO: 945978 - DNA, 15 bp, Homo sapiens
tgatcacacagctaa

SEQ ID NO: 945979 - DNA, 15 bp, Homo sapiens
gatcacacagctaac

SEQ ID NO: 945980 - DNA, 15 bp, Homo sapiens
atcacacagctaaca

SEQ ID NO: 945981 - DNA, 15 bp, Homo sapiens
tcacacagctaacaa

SEQ ID NO: 945982 - DNA, 15 bp, Homo sapiens
cacacagctaacaag

SEQ ID NO: 945983 - DNA, 15 bp, Homo sapiens
acacagctaacaagc

SEQ ID NO: 945984 - DNA, 15 bp, Homo sapiens
cacagctaacaagca

SEQ ID NO: 945985 - DNA, 15 bp, Homo sapiens
acagctaacaagcag

SEQ ID NO: 945986 - DNA, 15 bp, Homo sapiens
cagctaacaagcagt

SEQ ID NO: 945987 - DNA, 15 bp, Homo sapiens
agctaacaagcagtg

SEQ ID NO: 945988 - DNA, 15 bp, Homo sapiens
gctaacaagcagtga

SEQ ID NO: 945989 - DNA, 15 bp, Homo sapiens
ctaacaagcagtgaa

SEQ ID NO: 945990 - DNA, 15 bp, Homo sapiens
taacaagcagtgaaa

SEQ ID NO: 945991 - DNA, 15 bp, Homo sapiens
aacaagcagtgaaat

SEQ ID NO: 945992 - DNA, 15 bp, Homo sapiens
acaagcagtgaaatc

SEQ ID NO: 945993 - DNA, 15 bp, Homo sapiens
caagcagtgaaatca

SEQ ID NO: 945994 - DNA, 15 bp, Homo sapiens
aagcagtgaaatcag

SEQ ID NO: 945995 - DNA, 15 bp, Homo sapiens
agcagtgaaatcagt

SEQ ID NO: 945996 - DNA, 15 bp, Homo sapiens
gcagtgaaatcagtc

SEQ ID NO: 945997 - DNA, 15 bp, Homo sapiens
cagtgaaatcagtct

SEQ ID NO: 945998 - DNA, 15 bp, Homo sapiens
agtgaaatcagtctg

SEQ ID NO: 945999 - DNA, 15 bp, Homo sapiens
gtgaaatcagtctga

SEQ ID NO: 946000 - DNA, 15 bp, Homo sapiens
tgaaatcagtctgaa

SEQ ID NO: 946001 - DNA, 15 bp, Homo sapiens
gaaatcagtctgaac

SEQ ID NO: 946002 - DNA, 15 bp, Homo sapiens
aaatcagtctgaact

SEQ ID NO: 946003 - DNA, 15 bp, Homo sapiens
aatcagtctgaactc

SEQ ID NO: 946004 - DNA, 15 bp, Homo sapiens
atcagtctgaactca

SEQ ID NO: 946005 - DNA, 15 bp, Homo sapiens
tcagtctgaactcag

SEQ ID NO: 946006 - DNA, 15 bp, Homo sapiens
cagtctgaactcagg

SEQ ID NO: 946007 - DNA, 15 bp, Homo sapiens
agtctgaactcagga

SEQ ID NO: 946008 - DNA, 15 bp, Homo sapiens
gtctgaactcaggag

SEQ ID NO: 946009 - DNA, 15 bp, Homo sapiens
tctgaactcaggaga

SEQ ID NO: 946010 - DNA, 15 bp, Homo sapiens
ctgaactcaggagac

SEQ ID NO: 946011 - DNA, 15 bp, Homo sapiens
tgaactcaggagaca

SEQ ID NO: 946012 - DNA, 15 bp, Homo sapiens
gaactcaggagacag

SEQ ID NO: 946013 - DNA, 15 bp, Homo sapiens
aactcaggagacagt

SEQ ID NO: 946014 - DNA, 15 bp, Homo sapiens
actcaggagacagtt

SEQ ID NO: 946015 - DNA, 15 bp, Homo sapiens
ctcaggagacagttg

SEQ ID NO: 946016 - DNA, 15 bp, Homo sapiens
tcaggagacagttga

SEQ ID NO: 946017 - DNA, 15 bp, Homo sapiens
caggagacagttgat

SEQ ID NO: 946018 - DNA, 15 bp, Homo sapiens
aggagacagttgatt

SEQ ID NO: 946019 - DNA, 15 bp, Homo sapiens
ggagacagttgattt

SEQ ID NO: 946020 - DNA, 15 bp, Homo sapiens
gagacagttgatttc

SEQ ID NO: 946021 - DNA, 15 bp, Homo sapiens
agacagttgatttca

SEQ ID NO: 946022 - DNA, 15 bp, Homo sapiens
gacagttgatttcaa

SEQ ID NO: 946023 - DNA, 15 bp, Homo sapiens
acagttgatttcaat

SEQ ID NO: 946024 - DNA, 15 bp, Homo sapiens
cagttgatttcaatt

SEQ ID NO: 946025 - DNA, 15 bp, Homo sapiens
agttgatttcaattt

SEQ ID NO: 946026 - DNA, 15 bp, Homo sapiens
gttgatttcaatttc

SEQ ID NO: 946027 - DNA, 15 bp, Homo sapiens
ttgatttcaatttct

SEQ ID NO: 946028 - DNA, 15 bp, Homo sapiens
tgatttcaatttctt

SEQ ID NO: 946029 - DNA, 15 bp, Homo sapiens
gatttcaatttcttg

SEQ ID NO: 946030 - DNA, 15 bp, Homo sapiens
atttcaatttcttgt

SEQ ID NO: 946031 - DNA, 15 bp, Homo sapiens
tttcaatttcttgtt

SEQ ID NO: 946032 - DNA, 15 bp, Homo sapiens
ttcaatttcttgttc

SEQ ID NO: 946033 - DNA, 15 bp, Homo sapiens
tcaatttcttgttct

SEQ ID NO: 946034 - DNA, 15 bp, Homo sapiens
caatttcttgttctt

SEQ ID NO: 946035 - DNA, 15 bp, Homo sapiens
aatttcttgttcttt

SEQ ID NO: 946036 - DNA, 15 bp, Homo sapiens
atttcttgttctttc

SEQ ID NO: 946037 - DNA, 15 bp, Homo sapiens
tttcttgttctttct

SEQ ID NO: 946038 - DNA, 15 bp, Homo sapiens
ttcttgttctttctt

SEQ ID NO: 946039 - DNA, 15 bp, Homo sapiens
tcttgttctttctta

SEQ ID NO: 946040 - DNA, 15 bp, Homo sapiens
cttgttctttcttac

SEQ ID NO: 946041 - DNA, 15 bp, Homo sapiens
ttgttctttcttacc

SEQ ID NO: 946042 - DNA, 15 bp, Homo sapiens
tgttctttcttaccc

SEQ ID NO: 946043 - DNA, 15 bp, Homo sapiens
gttctttcttaccct

SEQ ID NO: 946044 - DNA, 15 bp, Homo sapiens
ttctttcttacccta

SEQ ID NO: 946045 - DNA, 15 bp, Homo sapiens
tctttcttaccctac

SEQ ID NO: 946046 - DNA, 15 bp, Homo sapiens
ctttcttaccctaca

SEQ ID NO: 946047 - DNA, 15 bp, Homo sapiens
tttcttaccctacat

SEQ ID NO: 946048 - DNA, 15 bp, Homo sapiens
ttcttaccctacatt

SEQ ID NO: 946049 - DNA, 15 bp, Homo sapiens
tcttaccctacattg

SEQ ID NO: 946050 - DNA, 15 bp, Homo sapiens
cttaccctacattgc

SEQ ID NO: 946051 - DNA, 15 bp, Homo sapiens
ttaccctacattgct

SEQ ID NO: 946052 - DNA, 15 bp, Homo sapiens
taccctacattgctg

SEQ ID NO: 946053 - DNA, 15 bp, Homo sapiens
accctacattgctgc

SEQ ID NO: 946054 - DNA, 15 bp, Homo sapiens
ccctacattgctgct

SEQ ID NO: 946055 - DNA, 15 bp, Homo sapiens
cctacattgctgctc

SEQ ID NO: 946056 - DNA, 15 bp, Homo sapiens
ctacattgctgctct

SEQ ID NO: 946057 - DNA, 15 bp, Homo sapiens
tacattgctgctcta

SEQ ID NO: 946058 - DNA, 15 bp, Homo sapiens
acattgctgctctaa

SEQ ID NO: 946059 - DNA, 15 bp, Homo sapiens
cattgctgctctaaa

SEQ ID NO: 946060 - DNA, 15 bp, Homo sapiens
attgctgctctaaaa

SEQ ID NO: 946061 - DNA, 15 bp, Homo sapiens
ttgctgctctaaaat

SEQ ID NO: 946062 - DNA, 15 bp, Homo sapiens
tgctgctctaaaata

SEQ ID NO: 946063 - DNA, 15 bp, Homo sapiens
gctgctctaaaataa

SEQ ID NO: 946064 - DNA, 15 bp, Homo sapiens
ctgctctaaaataaa

SEQ ID NO: 946065 - DNA, 15 bp, Homo sapiens
tgctctaaaataaaa

SEQ ID NO: 946066 - DNA, 15 bp, Homo sapiens
gctctaaaataaaaa

SEQ ID NO: 946067 - DNA, 15 bp, Homo sapiens
ctctaaaataaaaaa

SEQ ID NO: 946068 - DNA, 15 bp, Homo sapiens
tctaaaataaaaaac

SEQ ID NO: 946069 - DNA, 15 bp, Homo sapiens
ctaaaataaaaaaca

SEQ ID NO: 946070 - DNA, 15 bp, Homo sapiens
taaaataaaaaacaa

SEQ ID NO: 946071 - DNA, 15 bp, Homo sapiens
aaaataaaaaacaaa

SEQ ID NO: 946072 - DNA, 15 bp, Homo sapiens
aaataaaaaacaaaa

SEQ ID NO: 946073 - DNA, 15 bp, Homo sapiens
aataaaaaacaaaaa

SEQ ID NO: 946074 - DNA, 15 bp, Homo sapiens
ataaaaaacaaaaat

SEQ ID NO: 946075 - DNA, 15 bp, Homo sapiens
taaaaaacaaaaata

SEQ ID NO: 946076 - DNA, 15 bp, Homo sapiens
aaaaaacaaaaatac

SEQ ID NO: 946077 - DNA, 15 bp, Homo sapiens
aaaaacaaaaatact

SEQ ID NO: 946078 - DNA, 15 bp, Homo sapiens
aaaacaaaaatacta

SEQ ID NO: 946079 - DNA, 15 bp, Homo sapiens
aaacaaaaatactaa

SEQ ID NO: 946080 - DNA, 15 bp, Homo sapiens
aacaaaaatactaat

SEQ ID NO: 946081 - DNA, 15 bp, Homo sapiens
acaaaaatactaata

SEQ ID NO: 946082 - DNA, 15 bp, Homo sapiens
caaaaatactaataa

SEQ ID NO: 946083 - DNA, 15 bp, Homo sapiens
aaaaatactaataaa

SEQ ID NO: 946084 - DNA, 15 bp, Homo sapiens
aaaatactaataaaa

SEQ ID NO: 946085 - DNA, 15 bp, Homo sapiens
aaatactaataaaat

SEQ ID NO: 946086 - DNA, 15 bp, Homo sapiens
aatactaataaaatt

SEQ ID NO: 946087 - DNA, 15 bp, Homo sapiens
atactaataaaattg

SEQ ID NO: 946088 - DNA, 15 bp, Homo sapiens
tactaataaaattgt

SEQ ID NO: 946089 - DNA, 15 bp, Homo sapiens
actaataaaattgtc

SEQ ID NO: 946090 - DNA, 15 bp, Homo sapiens
ctaataaaattgtcc

SEQ ID NO: 946091 - DNA, 15 bp, Homo sapiens
taataaaattgtcca

SEQ ID NO: 946092 - DNA, 15 bp, Homo sapiens
aataaaattgtccaa

SEQ ID NO: 946093 - DNA, 15 bp, Homo sapiens
ataaaattgtccaaa

SEQ ID NO: 946094 - DNA, 15 bp, Homo sapiens
taaaattgtccaaag

SEQ ID NO: 946095 - DNA, 15 bp, Homo sapiens
aaaattgtccaaagt

SEQ ID NO: 946096 - DNA, 15 bp, Homo sapiens
aaattgtccaaagtt

SEQ ID NO: 946097 - DNA, 15 bp, Homo sapiens
aattgtccaaagtta

SEQ ID NO: 946098 - DNA, 15 bp, Homo sapiens
attgtccaaagttat

SEQ ID NO: 946099 - DNA, 15 bp, Homo sapiens
ttgtccaaagttata

SEQ ID NO: 946100 - DNA, 15 bp, Homo sapiens
tgtccaaagttatag

SEQ ID NO: 946101 - DNA, 15 bp, Homo sapiens
gtccaaagttatagg

SEQ ID NO: 946102 - DNA, 15 bp, Homo sapiens
tccaaagttataggg

SEQ ID NO: 946103 - DNA, 15 bp, Homo sapiens
ccaaagttatagggc

SEQ ID NO: 946104 - DNA, 15 bp, Homo sapiens
caaagttatagggcc

SEQ ID NO: 946105 - DNA, 15 bp, Homo sapiens
aaagttatagggcct

SEQ ID NO: 946106 - DNA, 15 bp, Homo sapiens
aagttatagggcctg

SEQ ID NO: 946107 - DNA, 15 bp, Homo sapiens
agttatagggcctgg

SEQ ID NO: 946108 - DNA, 15 bp, Homo sapiens
gttatagggcctggg

SEQ ID NO: 946109 - DNA, 15 bp, Homo sapiens
ttatagggcctgggc

SEQ ID NO: 946110 - DNA, 15 bp, Homo sapiens
tatagggcctgggct

SEQ ID NO: 946111 - DNA, 15 bp, Homo sapiens
atagggcctgggctc

SEQ ID NO: 946112 - DNA, 15 bp, Homo sapiens
tagggcctgggctcg

SEQ ID NO: 946113 - DNA, 15 bp, Homo sapiens
agggcctgggctcga

SEQ ID NO: 946114 - DNA, 15 bp, Homo sapiens
gggcctgggctcgat

SEQ ID NO: 946115 - DNA, 15 bp, Homo sapiens
ggcctgggctcgatt

SEQ ID NO: 946116 - DNA, 15 bp, Homo sapiens
gcctgggctcgattt

SEQ ID NO: 946117 - DNA, 15 bp, Homo sapiens
cctgggctcgatttg

SEQ ID NO: 946118 - DNA, 15 bp, Homo sapiens
ctgggctcgatttga

SEQ ID NO: 946119 - DNA, 15 bp, Homo sapiens
tgggctcgatttgaa

SEQ ID NO: 946120 - DNA, 15 bp, Homo sapiens
gggctcgatttgaat

SEQ ID NO: 946121 - DNA, 15 bp, Homo sapiens
ggctcgatttgaatg

SEQ ID NO: 946122 - DNA, 15 bp, Homo sapiens
gctcgatttgaatga

SEQ ID NO: 946123 - DNA, 15 bp, Homo sapiens
ctcgatttgaatgac

SEQ ID NO: 946124 - DNA, 15 bp, Homo sapiens
tcgatttgaatgaca

SEQ ID NO: 946125 - DNA, 15 bp, Homo sapiens
cgatttgaatgacac

SEQ ID NO: 946126 - DNA, 15 bp, Homo sapiens
gatttgaatgacact

SEQ ID NO: 946127 - DNA, 15 bp, Homo sapiens
atttgaatgacactt

SEQ ID NO: 946128 - DNA, 15 bp, Homo sapiens
tttgaatgacacttt

SEQ ID NO: 946129 - DNA, 15 bp, Homo sapiens
ttgaatgacactttt

SEQ ID NO: 946130 - DNA, 15 bp, Homo sapiens
tgaatgacacttttc

SEQ ID NO: 946131 - DNA, 15 bp, Homo sapiens
gaatgacacttttct

SEQ ID NO: 946132 - DNA, 15 bp, Homo sapiens
aatgacacttttcta

SEQ ID NO: 946133 - DNA, 15 bp, Homo sapiens
atgacacttttctaa

SEQ ID NO: 946134 - DNA, 15 bp, Homo sapiens
tgacacttttctaac

SEQ ID NO: 946135 - DNA, 15 bp, Homo sapiens
gacacttttctaact

SEQ ID NO: 946136 - DNA, 15 bp, Homo sapiens
acacttttctaactc

SEQ ID NO: 946137 - DNA, 15 bp, Homo sapiens
cacttttctaactca

SEQ ID NO: 946138 - DNA, 15 bp, Homo sapiens
acttttctaactcaa

SEQ ID NO: 946139 - DNA, 15 bp, Homo sapiens
cttttctaactcaat

SEQ ID NO: 946140 - DNA, 15 bp, Homo sapiens
ttttctaactcaatc

SEQ ID NO: 946141 - DNA, 15 bp, Homo sapiens
tttctaactcaatcg

SEQ ID NO: 946142 - DNA, 15 bp, Homo sapiens
ttctaactcaatcga

SEQ ID NO: 946143 - DNA, 15 bp, Homo sapiens
tctaactcaatcgaa

SEQ ID NO: 946144 - DNA, 15 bp, Homo sapiens
ctaactcaatcgaaa

SEQ ID NO: 946145 - DNA, 15 bp, Homo sapiens
taactcaatcgaaag

SEQ ID NO: 946146 - DNA, 15 bp, Homo sapiens
aactcaatcgaaagt

SEQ ID NO: 946147 - DNA, 15 bp, Homo sapiens
actcaatcgaaagtt

SEQ ID NO: 946148 - DNA, 15 bp, Homo sapiens
ctcaatcgaaagttt

SEQ ID NO: 946149 - DNA, 15 bp, Homo sapiens
tcaatcgaaagtttt

SEQ ID NO: 946150 - DNA, 15 bp, Homo sapiens
caatcgaaagttttc

SEQ ID NO: 946151 - DNA, 15 bp, Homo sapiens
aatcgaaagttttca

SEQ ID NO: 946152 - DNA, 15 bp, Homo sapiens
atcgaaagttttcac

SEQ ID NO: 946153 - DNA, 15 bp, Homo sapiens
tcgaaagttttcaca

SEQ ID NO: 946154 - DNA, 15 bp, Homo sapiens
cgaaagttttcacat

SEQ ID NO: 946155 - DNA, 15 bp, Homo sapiens
gaaagttttcacata

SEQ ID NO: 946156 - DNA, 15 bp, Homo sapiens
aaagttttcacatat

SEQ ID NO: 946157 - DNA, 15 bp, Homo sapiens
aagttttcacatata

SEQ ID NO: 946158 - DNA, 15 bp, Homo sapiens
agttttcacatataa

SEQ ID NO: 946159 - DNA, 15 bp, Homo sapiens
gttttcacatataag

SEQ ID NO: 946160 - DNA, 15 bp, Homo sapiens
ttttcacatataaga

SEQ ID NO: 946161 - DNA, 15 bp, Homo sapiens
tttcacatataagaa

SEQ ID NO: 946162 - DNA, 15 bp, Homo sapiens
ttcacatataagaat

SEQ ID NO: 946163 - DNA, 15 bp, Homo sapiens
tcacatataagaata

SEQ ID NO: 946164 - DNA, 15 bp, Homo sapiens
cacatataagaatag

SEQ ID NO: 946165 - DNA, 15 bp, Homo sapiens
acatataagaatagc

SEQ ID NO: 946166 - DNA, 15 bp, Homo sapiens
catataagaatagct

SEQ ID NO: 946167 - DNA, 15 bp, Homo sapiens
atataagaatagctg

SEQ ID NO: 946168 - DNA, 15 bp, Homo sapiens
tataagaatagctgg

SEQ ID NO: 946169 - DNA, 15 bp, Homo sapiens
ataagaatagctggg

SEQ ID NO: 946170 - DNA, 15 bp, Homo sapiens
taagaatagctgggt

SEQ ID NO: 946171 - DNA, 15 bp, Homo sapiens
aagaatagctgggtc

SEQ ID NO: 946172 - DNA, 15 bp, Homo sapiens
agaatagctgggtca

SEQ ID NO: 946173 - DNA, 15 bp, Homo sapiens
gaatagctgggtcac

SEQ ID NO: 946174 - DNA, 15 bp, Homo sapiens
aatagctgggtcacc

SEQ ID NO: 946175 - DNA, 15 bp, Homo sapiens
atagctgggtcacca

SEQ ID NO: 946176 - DNA, 15 bp, Homo sapiens
tagctgggtcaccac

SEQ ID NO: 946177 - DNA, 15 bp, Homo sapiens
agctgggtcaccact

SEQ ID NO: 946178 - DNA, 15 bp, Homo sapiens
gctgggtcaccactc

SEQ ID NO: 946179 - DNA, 15 bp, Homo sapiens
ctgggtcaccactct

SEQ ID NO: 946180 - DNA, 15 bp, Homo sapiens
tgggtcaccactcta

SEQ ID NO: 946181 - DNA, 15 bp, Homo sapiens
gggtcaccactctac

SEQ ID NO: 946182 - DNA, 15 bp, Homo sapiens
ggtcaccactctaca

SEQ ID NO: 946183 - DNA, 15 bp, Homo sapiens
gtcaccactctacat

SEQ ID NO: 946184 - DNA, 15 bp, Homo sapiens
tcaccactctacatc

SEQ ID NO: 946185 - DNA, 15 bp, Homo sapiens
caccactctacatct

SEQ ID NO: 946186 - DNA, 15 bp, Homo sapiens
accactctacatctt

SEQ ID NO: 946187 - DNA, 15 bp, Homo sapiens
ccactctacatcttc

SEQ ID NO: 946188 - DNA, 15 bp, Homo sapiens
cactctacatcttca

SEQ ID NO: 946189 - DNA, 15 bp, Homo sapiens
actctacatcttcac

SEQ ID NO: 946190 - DNA, 15 bp, Homo sapiens
ctctacatcttcaca

SEQ ID NO: 946191 - DNA, 15 bp, Homo sapiens
tctacatcttcacac

SEQ ID NO: 946192 - DNA, 15 bp, Homo sapiens
ctacatcttcacact

SEQ ID NO: 946193 - DNA, 15 bp, Homo sapiens
tacatcttcacactg

SEQ ID NO: 946194 - DNA, 15 bp, Homo sapiens
acatcttcacactgc

SEQ ID NO: 946195 - DNA, 15 bp, Homo sapiens
catcttcacactgct

SEQ ID NO: 946196 - DNA, 15 bp, Homo sapiens
atcttcacactgctt

SEQ ID NO: 946197 - DNA, 15 bp, Homo sapiens
tcttcacactgctta

SEQ ID NO: 946198 - DNA, 15 bp, Homo sapiens
cttcacactgcttat

SEQ ID NO: 946199 - DNA, 15 bp, Homo sapiens
ttcacactgcttatc

SEQ ID NO: 946200 - DNA, 15 bp, Homo sapiens
tcacactgcttatca

SEQ ID NO: 946201 - DNA, 15 bp, Homo sapiens
cacactgcttatcaa

SEQ ID NO: 946202 - DNA, 15 bp, Homo sapiens
acactgcttatcaat

SEQ ID NO: 946203 - DNA, 15 bp, Homo sapiens
cactgcttatcaatc

SEQ ID NO: 946204 - DNA, 15 bp, Homo sapiens
actgcttatcaatct

SEQ ID NO: 946205 - DNA, 15 bp, Homo sapiens
ctgcttatcaatctc

SEQ ID NO: 946206 - DNA, 15 bp, Homo sapiens
tgcttatcaatctca

SEQ ID NO: 946207 - DNA, 15 bp, Homo sapiens
gcttatcaatctcaa

SEQ ID NO: 946208 - DNA, 15 bp, Homo sapiens
cttatcaatctcaag

SEQ ID NO: 946209 - DNA, 15 bp, Homo sapiens
ttatcaatctcaagc

SEQ ID NO: 946210 - DNA, 15 bp, Homo sapiens
tatcaatctcaagcc

SEQ ID NO: 946211 - DNA, 15 bp, Homo sapiens
atcaatctcaagcca

SEQ ID NO: 946212 - DNA, 15 bp, Homo sapiens
tcaatctcaagccaa

SEQ ID NO: 946213 - DNA, 15 bp, Homo sapiens
caatctcaagccaac

SEQ ID NO: 946214 - DNA, 15 bp, Homo sapiens
aatctcaagccaaca

SEQ ID NO: 946215 - DNA, 15 bp, Homo sapiens
atctcaagccaacaa

SEQ ID NO: 946216 - DNA, 15 bp, Homo sapiens
tctcaagccaacaaa

SEQ ID NO: 946217 - DNA, 15 bp, Homo sapiens
ctcaagccaacaaag

SEQ ID NO: 946218 - DNA, 15 bp, Homo sapiens
tcaagccaacaaagc

SEQ ID NO: 946219 - DNA, 15 bp, Homo sapiens
caagccaacaaagcc

SEQ ID NO: 946220 - DNA, 15 bp, Homo sapiens
aagccaacaaagccc

SEQ ID NO: 946221 - DNA, 15 bp, Homo sapiens
agccaacaaagccct

SEQ ID NO: 946222 - DNA, 15 bp, Homo sapiens
gccaacaaagcccta

SEQ ID NO: 946223 - DNA, 15 bp, Homo sapiens
ccaacaaagccctaa

SEQ ID NO: 946224 - DNA, 15 bp, Homo sapiens
caacaaagccctaag

SEQ ID NO: 946225 - DNA, 15 bp, Homo sapiens
aacaaagccctaagc

SEQ ID NO: 946226 - DNA, 15 bp, Homo sapiens
acaaagccctaagca

SEQ ID NO: 946227 - DNA, 15 bp, Homo sapiens
caaagccctaagcag

SEQ ID NO: 946228 - DNA, 15 bp, Homo sapiens
aaagccctaagcagc

SEQ ID NO: 946229 - DNA, 15 bp, Homo sapiens
aagccctaagcagct

SEQ ID NO: 946230 - DNA, 15 bp, Homo sapiens
agccctaagcagctc

SEQ ID NO: 946231 - DNA, 15 bp, Homo sapiens
gccctaagcagctct

SEQ ID NO: 946232 - DNA, 15 bp, Homo sapiens
ccctaagcagctctc

SEQ ID NO: 946233 - DNA, 15 bp, Homo sapiens
cctaagcagctctca

SEQ ID NO: 946234 - DNA, 15 bp, Homo sapiens
ctaagcagctctcag

SEQ ID NO: 946235 - DNA, 15 bp, Homo sapiens
taagcagctctcagc

SEQ ID NO: 946236 - DNA, 15 bp, Homo sapiens
aagcagctctcagct

SEQ ID NO: 946237 - DNA, 15 bp, Homo sapiens
agcagctctcagctt

SEQ ID NO: 946238 - DNA, 15 bp, Homo sapiens
gcagctctcagcttg

SEQ ID NO: 946239 - DNA, 15 bp, Homo sapiens
cagctctcagcttga

SEQ ID NO: 946240 - DNA, 15 bp, Homo sapiens
agctctcagcttgag

SEQ ID NO: 946241 - DNA, 15 bp, Homo sapiens
gctctcagcttgaga

SEQ ID NO: 946242 - DNA, 15 bp, Homo sapiens
ctctcagcttgagaa

SEQ ID NO: 946243 - DNA, 15 bp, Homo sapiens
tctcagcttgagaaa

SEQ ID NO: 946244 - DNA, 15 bp, Homo sapiens
ctcagcttgagaaaa

SEQ ID NO: 946245 - DNA, 15 bp, Homo sapiens
tcagcttgagaaaaa

SEQ ID NO: 946246 - DNA, 15 bp, Homo sapiens
cagcttgagaaaaat

SEQ ID NO: 946247 - DNA, 15 bp, Homo sapiens
agcttgagaaaaatg

SEQ ID NO: 946248 - DNA, 15 bp, Homo sapiens
gcttgagaaaaatgt

SEQ ID NO: 946249 - DNA, 15 bp, Homo sapiens
cttgagaaaaatgtt

SEQ ID NO: 946250 - DNA, 15 bp, Homo sapiens
ttgagaaaaatgtta

SEQ ID NO: 946251 - DNA, 15 bp, Homo sapiens
tgagaaaaatgttaa

SEQ ID NO: 946252 - DNA, 15 bp, Homo sapiens
gagaaaaatgttaac

SEQ ID NO: 946253 - DNA, 15 bp, Homo sapiens
agaaaaatgttaacc

SEQ ID NO: 946254 - DNA, 15 bp, Homo sapiens
gaaaaatgttaacca

SEQ ID NO: 946255 - DNA, 15 bp, Homo sapiens
aaaaatgttaaccaa

SEQ ID NO: 946256 - DNA, 15 bp, Homo sapiens
aaaatgttaaccaaa

SEQ ID NO: 946257 - DNA, 15 bp, Homo sapiens
aaatgttaaccaaaa

SEQ ID NO: 946258 - DNA, 15 bp, Homo sapiens
aatgttaaccaaaat

SEQ ID NO: 946259 - DNA, 15 bp, Homo sapiens
atgttaaccaaaata

SEQ ID NO: 946260 - DNA, 15 bp, Homo sapiens
tgttaaccaaaataa

SEQ ID NO: 946261 - DNA, 15 bp, Homo sapiens
gttaaccaaaataac

SEQ ID NO: 946262 - DNA, 15 bp, Homo sapiens
ttaaccaaaataact

SEQ ID NO: 946263 - DNA, 15 bp, Homo sapiens
taaccaaaataactt

SEQ ID NO: 946264 - DNA, 15 bp, Homo sapiens
aaccaaaataacttc

SEQ ID NO: 946265 - DNA, 15 bp, Homo sapiens
accaaaataacttct

SEQ ID NO: 946266 - DNA, 15 bp, Homo sapiens
ccaaaataacttcta

SEQ ID NO: 946267 - DNA, 15 bp, Homo sapiens
caaaataacttctac

SEQ ID NO: 946268 - DNA, 15 bp, Homo sapiens
aaaataacttctacc

SEQ ID NO: 946269 - DNA, 15 bp, Homo sapiens
aaataacttctacct

SEQ ID NO: 946270 - DNA, 15 bp, Homo sapiens
aataacttctaccta

SEQ ID NO: 946271 - DNA, 15 bp, Homo sapiens
ataacttctacctat

SEQ ID NO: 946272 - DNA, 15 bp, Homo sapiens
taacttctacctatc

SEQ ID NO: 946273 - DNA, 15 bp, Homo sapiens
aacttctacctatca

SEQ ID NO: 946274 - DNA, 15 bp, Homo sapiens
acttctacctatcac

SEQ ID NO: 946275 - DNA, 15 bp, Homo sapiens
cttctacctatcact

SEQ ID NO: 946276 - DNA, 15 bp, Homo sapiens
ttctacctatcacta

SEQ ID NO: 946277 - DNA, 15 bp, Homo sapiens
tctacctatcactac

SEQ ID NO: 946278 - DNA, 15 bp, Homo sapiens
ctacctatcactact

SEQ ID NO: 946279 - DNA, 15 bp, Homo sapiens
tacctatcactactg

SEQ ID NO: 946280 - DNA, 15 bp, Homo sapiens
acctatcactactga

SEQ ID NO: 946281 - DNA, 15 bp, Homo sapiens
cctatcactactgaa

SEQ ID NO: 946282 - DNA, 15 bp, Homo sapiens
ctatcactactgaag

SEQ ID NO: 946283 - DNA, 15 bp, Homo sapiens
tatcactactgaaga

SEQ ID NO: 946284 - DNA, 15 bp, Homo sapiens
atcactactgaagaa

SEQ ID NO: 946285 - DNA, 15 bp, Homo sapiens
tcactactgaagaaa

SEQ ID NO: 946286 - DNA, 15 bp, Homo sapiens
cactactgaagaaaa

SEQ ID NO: 946287 - DNA, 15 bp, Homo sapiens
actactgaagaaaaa

SEQ ID NO: 946288 - DNA, 15 bp, Homo sapiens
ctactgaagaaaaat

SEQ ID NO: 946289 - DNA, 15 bp, Homo sapiens
tactgaagaaaaatg

SEQ ID NO: 946290 - DNA, 15 bp, Homo sapiens
actgaagaaaaatga

SEQ ID NO: 946291 - DNA, 15 bp, Homo sapiens
ctgaagaaaaatgaa

SEQ ID NO: 946292 - DNA, 15 bp, Homo sapiens
tgaagaaaaatgaaa

SEQ ID NO: 946293 - DNA, 15 bp, Homo sapiens
gaagaaaaatgaaag

SEQ ID NO: 946294 - DNA, 15 bp, Homo sapiens
aagaaaaatgaaaga

SEQ ID NO: 946295 - DNA, 15 bp, Homo sapiens
agaaaaatgaaagat

SEQ ID NO: 946296 - DNA, 15 bp, Homo sapiens
gaaaaatgaaagatt

SEQ ID NO: 946297 - DNA, 15 bp, Homo sapiens
aaaaatgaaagatta

SEQ ID NO: 946298 - DNA, 15 bp, Homo sapiens
aaaatgaaagattaa

SEQ ID NO: 946299 - DNA, 15 bp, Homo sapiens
aaatgaaagattaat

SEQ ID NO: 946300 - DNA, 15 bp, Homo sapiens
aatgaaagattaatt

SEQ ID NO: 946301 - DNA, 15 bp, Homo sapiens
atgaaagattaattt

SEQ ID NO: 946302 - DNA, 15 bp, Homo sapiens
tgaaagattaatttg

SEQ ID NO: 946303 - DNA, 15 bp, Homo sapiens
gaaagattaatttga

SEQ ID NO: 946304 - DNA, 15 bp, Homo sapiens
aaagattaatttgat

SEQ ID NO: 946305 - DNA, 15 bp, Homo sapiens
aagattaatttgata

SEQ ID NO: 946306 - DNA, 15 bp, Homo sapiens
agattaatttgatat

SEQ ID NO: 946307 - DNA, 15 bp, Homo sapiens
gattaatttgatata

SEQ ID NO: 946308 - DNA, 15 bp, Homo sapiens
attaatttgatatat

SEQ ID NO: 946309 - DNA, 15 bp, Homo sapiens
ttaatttgatatatt

SEQ ID NO: 946310 - DNA, 15 bp, Homo sapiens
taatttgatatattc

SEQ ID NO: 946311 - DNA, 15 bp, Homo sapiens
aatttgatatattcc

SEQ ID NO: 946312 - DNA, 15 bp, Homo sapiens
atttgatatattcct

SEQ ID NO: 946313 - DNA, 15 bp, Homo sapiens
tttgatatattccta

SEQ ID NO: 946314 - DNA, 15 bp, Homo sapiens
ttgatatattcctag

SEQ ID NO: 946315 - DNA, 15 bp, Homo sapiens
tgatatattcctagt

SEQ ID NO: 946316 - DNA, 15 bp, Homo sapiens
gatatattcctagta

SEQ ID NO: 946317 - DNA, 15 bp, Homo sapiens
atatattcctagtat

SEQ ID NO: 946318 - DNA, 15 bp, Homo sapiens
tatattcctagtata

SEQ ID NO: 946319 - DNA, 15 bp, Homo sapiens
atattcctagtatat

SEQ ID NO: 946320 - DNA, 15 bp, Homo sapiens
tattcctagtatatg

SEQ ID NO: 946321 - DNA, 15 bp, Homo sapiens
attcctagtatatgt

SEQ ID NO: 946322 - DNA, 15 bp, Homo sapiens
ttcctagtatatgtt

SEQ ID NO: 946323 - DNA, 15 bp, Homo sapiens
tcctagtatatgttg

SEQ ID NO: 946324 - DNA, 15 bp, Homo sapiens
cctagtatatgttgc

SEQ ID NO: 946325 - DNA, 15 bp, Homo sapiens
ctagtatatgttgcc

SEQ ID NO: 946326 - DNA, 15 bp, Homo sapiens
tagtatatgttgcca

SEQ ID NO: 946327 - DNA, 15 bp, Homo sapiens
agtatatgttgccat

SEQ ID NO: 946328 - DNA, 15 bp, Homo sapiens
gtatatgttgccatt

SEQ ID NO: 946329 - DNA, 15 bp, Homo sapiens
tatatgttgccattt

SEQ ID NO: 946330 - DNA, 15 bp, Homo sapiens
atatgttgccattta

SEQ ID NO: 946331 - DNA, 15 bp, Homo sapiens
tatgttgccatttat

SEQ ID NO: 946332 - DNA, 15 bp, Homo sapiens
atgttgccatttatt

SEQ ID NO: 946333 - DNA, 15 bp, Homo sapiens
tgttgccatttattt

SEQ ID NO: 946334 - DNA, 15 bp, Homo sapiens
gttgccatttatttg

SEQ ID NO: 946335 - DNA, 15 bp, Homo sapiens
ttgccatttatttga

SEQ ID NO: 946336 - DNA, 15 bp, Homo sapiens
tgccatttatttgaa

SEQ ID NO: 946337 - DNA, 15 bp, Homo sapiens
gccatttatttgaat

SEQ ID NO: 946338 - DNA, 15 bp, Homo sapiens
ccatttatttgaatc

SEQ ID NO: 946339 - DNA, 15 bp, Homo sapiens
catttatttgaatca

SEQ ID NO: 946340 - DNA, 15 bp, Homo sapiens
atttatttgaatcaa

SEQ ID NO: 946341 - DNA, 15 bp, Homo sapiens
tttatttgaatcaat

SEQ ID NO: 946342 - DNA, 15 bp, Homo sapiens
ttatttgaatcaatg

SEQ ID NO: 946343 - DNA, 15 bp, Homo sapiens
tatttgaatcaatgc

SEQ ID NO: 946344 - DNA, 15 bp, Homo sapiens
atttgaatcaatgct

SEQ ID NO: 946345 - DNA, 15 bp, Homo sapiens
tttgaatcaatgctc

SEQ ID NO: 946346 - DNA, 15 bp, Homo sapiens
ttgaatcaatgctcc

SEQ ID NO: 946347 - DNA, 15 bp, Homo sapiens
tgaatcaatgctcca

SEQ ID NO: 946348 - DNA, 15 bp, Homo sapiens
gaatcaatgctccat

SEQ ID NO: 946349 - DNA, 15 bp, Homo sapiens
aatcaatgctccatt

SEQ ID NO: 946350 - DNA, 15 bp, Homo sapiens
atcaatgctccatta

SEQ ID NO: 946351 - DNA, 15 bp, Homo sapiens
tcaatgctccattag

SEQ ID NO: 946352 - DNA, 15 bp, Homo sapiens
caatgctccattagg

SEQ ID NO: 946353 - DNA, 15 bp, Homo sapiens
aatgctccattaggt

SEQ ID NO: 946354 - DNA, 15 bp, Homo sapiens
atgctccattaggta

SEQ ID NO: 946355 - DNA, 15 bp, Homo sapiens
tgctccattaggtat

SEQ ID NO: 946356 - DNA, 15 bp, Homo sapiens
gctccattaggtatt

SEQ ID NO: 946357 - DNA, 15 bp, Homo sapiens
ctccattaggtattc

SEQ ID NO: 946358 - DNA, 15 bp, Homo sapiens
tccattaggtattcc

SEQ ID NO: 946359 - DNA, 15 bp, Homo sapiens
ccattaggtattcca

SEQ ID NO: 946360 - DNA, 15 bp, Homo sapiens
cattaggtattccaa

SEQ ID NO: 946361 - DNA, 15 bp, Homo sapiens
attaggtattccaaa

SEQ ID NO: 946362 - DNA, 15 bp, Homo sapiens
ttaggtattccaaaa

SEQ ID NO: 946363 - DNA, 15 bp, Homo sapiens
taggtattccaaaat

SEQ ID NO: 946364 - DNA, 15 bp, Homo sapiens
aggtattccaaaatt

SEQ ID NO: 946365 - DNA, 15 bp, Homo sapiens
ggtattccaaaatta

SEQ ID NO: 946366 - DNA, 15 bp, Homo sapiens
gtattccaaaattat

SEQ ID NO: 946367 - DNA, 15 bp, Homo sapiens
tattccaaaattatc

SEQ ID NO: 946368 - DNA, 15 bp, Homo sapiens
attccaaaattatct

SEQ ID NO: 946369 - DNA, 15 bp, Homo sapiens
ttccaaaattatcta

SEQ ID NO: 946370 - DNA, 15 bp, Homo sapiens
tccaaaattatctaa

SEQ ID NO: 946371 - DNA, 15 bp, Homo sapiens
ccaaaattatctaaa

SEQ ID NO: 946372 - DNA, 15 bp, Homo sapiens
caaaattatctaaaa

SEQ ID NO: 946373 - DNA, 15 bp, Homo sapiens
aaaattatctaaaaa

SEQ ID NO: 946374 - DNA, 15 bp, Homo sapiens
aaattatctaaaaat

SEQ ID NO: 946375 - DNA, 15 bp, Homo sapiens
aattatctaaaaatc

SEQ ID NO: 946376 - DNA, 15 bp, Homo sapiens
attatctaaaaatca

SEQ ID NO: 946377 - DNA, 15 bp, Homo sapiens
ttatctaaaaatcaa

SEQ ID NO: 946378 - DNA, 15 bp, Homo sapiens
tatctaaaaatcaat

SEQ ID NO: 946379 - DNA, 15 bp, Homo sapiens
atctaaaaatcaata

SEQ ID NO: 946380 - DNA, 15 bp, Homo sapiens
tctaaaaatcaataa

SEQ ID NO: 946381 - DNA, 15 bp, Homo sapiens
ctaaaaatcaataat

SEQ ID NO: 946382 - DNA, 15 bp, Homo sapiens
taaaaatcaataatg

SEQ ID NO: 946383 - DNA, 15 bp, Homo sapiens
aaaaatcaataatga

SEQ ID NO: 946384 - DNA, 15 bp, Homo sapiens
aaaatcaataatgat

SEQ ID NO: 946385 - DNA, 15 bp, Homo sapiens
aaatcaataatgatc

SEQ ID NO: 946386 - DNA, 15 bp, Homo sapiens
aatcaataatgatca

SEQ ID NO: 946387 - DNA, 15 bp, Homo sapiens
atcaataatgatcag

SEQ ID NO: 946388 - DNA, 15 bp, Homo sapiens
tcaataatgatcaga

SEQ ID NO: 946389 - DNA, 15 bp, Homo sapiens
caataatgatcagat

SEQ ID NO: 946390 - DNA, 15 bp, Homo sapiens
aataatgatcagatt

SEQ ID NO: 946391 - DNA, 15 bp, Homo sapiens
ataatgatcagattt

SEQ ID NO: 946392 - DNA, 15 bp, Homo sapiens
taatgatcagatttg

SEQ ID NO: 946393 - DNA, 15 bp, Homo sapiens
aatgatcagatttgg

SEQ ID NO: 946394 - DNA, 15 bp, Homo sapiens
atgatcagatttggg

SEQ ID NO: 946395 - DNA, 15 bp, Homo sapiens
tgatcagatttgggt

SEQ ID NO: 946396 - DNA, 15 bp, Homo sapiens
gatcagatttgggtt

SEQ ID NO: 946397 - DNA, 15 bp, Homo sapiens
atcagatttgggtta

SEQ ID NO: 946398 - DNA, 15 bp, Homo sapiens
tcagatttgggttaa

SEQ ID NO: 946399 - DNA, 15 bp, Homo sapiens
cagatttgggttaaa

SEQ ID NO: 946400 - DNA, 15 bp, Homo sapiens
agatttgggttaaat

SEQ ID NO: 946401 - DNA, 15 bp, Homo sapiens
gatttgggttaaatg

SEQ ID NO: 946402 - DNA, 15 bp, Homo sapiens
atttgggttaaatgg

SEQ ID NO: 946403 - DNA, 15 bp, Homo sapiens
tttgggttaaatggt

SEQ ID NO: 946404 - DNA, 15 bp, Homo sapiens
ttgggttaaatggta

SEQ ID NO: 946405 - DNA, 15 bp, Homo sapiens
tgggttaaatggtaa

SEQ ID NO: 946406 - DNA, 15 bp, Homo sapiens
gggttaaatggtaaa

SEQ ID NO: 946407 - DNA, 15 bp, Homo sapiens
ggttaaatggtaaag

SEQ ID NO: 946408 - DNA, 15 bp, Homo sapiens
gttaaatggtaaagt

SEQ ID NO: 946409 - DNA, 15 bp, Homo sapiens
ttaaatggtaaagtc

SEQ ID NO: 946410 - DNA, 15 bp, Homo sapiens
taaatggtaaagtca

SEQ ID NO: 946411 - DNA, 15 bp, Homo sapiens
aaatggtaaagtcaa

SEQ ID NO: 946412 - DNA, 15 bp, Homo sapiens
aatggtaaagtcaac

SEQ ID NO: 946413 - DNA, 15 bp, Homo sapiens
atggtaaagtcaaca

SEQ ID NO: 946414 - DNA, 15 bp, Homo sapiens
tggtaaagtcaacaa

SEQ ID NO: 946415 - DNA, 15 bp, Homo sapiens
ggtaaagtcaacaaa

SEQ ID NO: 946416 - DNA, 15 bp, Homo sapiens
gtaaagtcaacaaac

SEQ ID NO: 946417 - DNA, 15 bp, Homo sapiens
taaagtcaacaaacc

SEQ ID NO: 946418 - DNA, 15 bp, Homo sapiens
aaagtcaacaaaccc

SEQ ID NO: 946419 - DNA, 15 bp, Homo sapiens
aagtcaacaaaccca

SEQ ID NO: 946420 - DNA, 15 bp, Homo sapiens
agtcaacaaacccaa

SEQ ID NO: 946421 - DNA, 15 bp, Homo sapiens
gtcaacaaacccaaa

SEQ ID NO: 946422 - DNA, 15 bp, Homo sapiens
tcaacaaacccaaag

SEQ ID NO: 946423 - DNA, 15 bp, Homo sapiens
caacaaacccaaagc

SEQ ID NO: 946424 - DNA, 15 bp, Homo sapiens
aacaaacccaaagca

SEQ ID NO: 946425 - DNA, 15 bp, Homo sapiens
acaaacccaaagcat

SEQ ID NO: 946426 - DNA, 15 bp, Homo sapiens
caaacccaaagcatt

SEQ ID NO: 946427 - DNA, 15 bp, Homo sapiens
aaacccaaagcatta

SEQ ID NO: 946428 - DNA, 15 bp, Homo sapiens
aacccaaagcattat

SEQ ID NO: 946429 - DNA, 15 bp, Homo sapiens
acccaaagcattatt

SEQ ID NO: 946430 - DNA, 15 bp, Homo sapiens
cccaaagcattattt

SEQ ID NO: 946431 - DNA, 15 bp, Homo sapiens
ccaaagcattatttt

SEQ ID NO: 946432 - DNA, 15 bp, Homo sapiens
caaagcattattttg

SEQ ID NO: 946433 - DNA, 15 bp, Homo sapiens
aaagcattattttga

SEQ ID NO: 946434 - DNA, 15 bp, Homo sapiens
aagcattattttgag

SEQ ID NO: 946435 - DNA, 15 bp, Homo sapiens
agcattattttgagg

SEQ ID NO: 946436 - DNA, 15 bp, Homo sapiens
gcattattttgaggg

SEQ ID NO: 946437 - DNA, 15 bp, Homo sapiens
cattattttgagggt

SEQ ID NO: 946438 - DNA, 15 bp, Homo sapiens
attattttgagggtt

SEQ ID NO: 946439 - DNA, 15 bp, Homo sapiens
ttattttgagggttg

SEQ ID NO: 946440 - DNA, 15 bp, Homo sapiens
tattttgagggttga

SEQ ID NO: 946441 - DNA, 15 bp, Homo sapiens
attttgagggttgag

SEQ ID NO: 946442 - DNA, 15 bp, Homo sapiens
ttttgagggttgagg

SEQ ID NO: 946443 - DNA, 15 bp, Homo sapiens
tttgagggttgaggg

SEQ ID NO: 946444 - DNA, 15 bp, Homo sapiens
ttgagggttgagggg

SEQ ID NO: 946445 - DNA, 15 bp, Homo sapiens
tgagggttgagggga

SEQ ID NO: 946446 - DNA, 15 bp, Homo sapiens
gagggttgaggggat

SEQ ID NO: 946447 - DNA, 15 bp, Homo sapiens
agggttgaggggatt

SEQ ID NO: 946448 - DNA, 15 bp, Homo sapiens
gggttgaggggattg

SEQ ID NO: 946449 - DNA, 15 bp, Homo sapiens
ggttgaggggattgg

SEQ ID NO: 946450 - DNA, 15 bp, Homo sapiens
gttgaggggattggt

SEQ ID NO: 946451 - DNA, 15 bp, Homo sapiens
ttgaggggattggtt

SEQ ID NO: 946452 - DNA, 15 bp, Homo sapiens
tgaggggattggttt

SEQ ID NO: 946453 - DNA, 15 bp, Homo sapiens
gaggggattggtttc

SEQ ID NO: 946454 - DNA, 15 bp, Homo sapiens
aggggattggtttct

SEQ ID NO: 946455 - DNA, 15 bp, Homo sapiens
ggggattggtttctt

SEQ ID NO: 946456 - DNA, 15 bp, Homo sapiens
gggattggtttcttt

SEQ ID NO: 946457 - DNA, 15 bp, Homo sapiens
ggattggtttctttc

SEQ ID NO: 946458 - DNA, 15 bp, Homo sapiens
gattggtttctttct

SEQ ID NO: 946459 - DNA, 15 bp, Homo sapiens
attggtttctttctt

SEQ ID NO: 946460 - DNA, 15 bp, Homo sapiens
ttggtttctttcttt

SEQ ID NO: 946461 - DNA, 15 bp, Homo sapiens
tggtttctttcttta

SEQ ID NO: 946462 - DNA, 15 bp, Homo sapiens
ggtttctttctttag

SEQ ID NO: 946463 - DNA, 15 bp, Homo sapiens
gtttctttctttaga

SEQ ID NO: 946464 - DNA, 15 bp, Homo sapiens
tttctttctttagaa

SEQ ID NO: 946465 - DNA, 15 bp, Homo sapiens
ttctttctttagaat

SEQ ID NO: 946466 - DNA, 15 bp, Homo sapiens
tctttctttagaatt

SEQ ID NO: 946467 - DNA, 15 bp, Homo sapiens
ctttctttagaatta

SEQ ID NO: 946468 - DNA, 15 bp, Homo sapiens
tttctttagaattag

SEQ ID NO: 946469 - DNA, 15 bp, Homo sapiens
ttctttagaattaga

SEQ ID NO: 946470 - DNA, 15 bp, Homo sapiens
tctttagaattagat

SEQ ID NO: 946471 - DNA, 15 bp, Homo sapiens
ctttagaattagata

SEQ ID NO: 946472 - DNA, 15 bp, Homo sapiens
tttagaattagatag

SEQ ID NO: 946473 - DNA, 15 bp, Homo sapiens
ttagaattagataga

SEQ ID NO: 946474 - DNA, 15 bp, Homo sapiens
tagaattagatagaa

SEQ ID NO: 946475 - DNA, 15 bp, Homo sapiens
agaattagatagaag

SEQ ID NO: 946476 - DNA, 15 bp, Homo sapiens
gaattagatagaagg

SEQ ID NO: 946477 - DNA, 15 bp, Homo sapiens
aattagatagaagga

SEQ ID NO: 946478 - DNA, 15 bp, Homo sapiens
attagatagaaggaa

SEQ ID NO: 946479 - DNA, 15 bp, Homo sapiens
ttagatagaaggaaa

SEQ ID NO: 946480 - DNA, 15 bp, Homo sapiens
tagatagaaggaaaa

SEQ ID NO: 946481 - DNA, 15 bp, Homo sapiens
agatagaaggaaaat

SEQ ID NO: 946482 - DNA, 15 bp, Homo sapiens
gatagaaggaaaatt

SEQ ID NO: 946483 - DNA, 15 bp, Homo sapiens
atagaaggaaaatta

SEQ ID NO: 946484 - DNA, 15 bp, Homo sapiens
tagaaggaaaattaa

SEQ ID NO: 946485 - DNA, 15 bp, Homo sapiens
agaaggaaaattaat

SEQ ID NO: 946486 - DNA, 15 bp, Homo sapiens
gaaggaaaattaatt

SEQ ID NO: 946487 - DNA, 15 bp, Homo sapiens
aaggaaaattaattt

SEQ ID NO: 946488 - DNA, 15 bp, Homo sapiens
aggaaaattaatttg

SEQ ID NO: 946489 - DNA, 15 bp, Homo sapiens
ggaaaattaatttgc

SEQ ID NO: 946490 - DNA, 15 bp, Homo sapiens
gaaaattaatttgca

SEQ ID NO: 946491 - DNA, 15 bp, Homo sapiens
aaaattaatttgcag

SEQ ID NO: 946492 - DNA, 15 bp, Homo sapiens
aaattaatttgcagt

SEQ ID NO: 946493 - DNA, 15 bp, Homo sapiens
aattaatttgcagtt

SEQ ID NO: 946494 - DNA, 15 bp, Homo sapiens
attaatttgcagtta

SEQ ID NO: 946495 - DNA, 15 bp, Homo sapiens
ttaatttgcagttaa

SEQ ID NO: 946496 - DNA, 15 bp, Homo sapiens
taatttgcagttaag

SEQ ID NO: 946497 - DNA, 15 bp, Homo sapiens
aatttgcagttaaga

SEQ ID NO: 946498 - DNA, 15 bp, Homo sapiens
atttgcagttaagac

SEQ ID NO: 946499 - DNA, 15 bp, Homo sapiens
tttgcagttaagaca

SEQ ID NO: 946500 - DNA, 15 bp, Homo sapiens
ttgcagttaagacat

SEQ ID NO: 946501 - DNA, 15 bp, Homo sapiens
tgcagttaagacatt

SEQ ID NO: 946502 - DNA, 15 bp, Homo sapiens
gcagttaagacattg

SEQ ID NO: 946503 - DNA, 15 bp, Homo sapiens
cagttaagacattgg

SEQ ID NO: 946504 - DNA, 15 bp, Homo sapiens
agttaagacattggc

SEQ ID NO: 946505 - DNA, 15 bp, Homo sapiens
gttaagacattggcc

SEQ ID NO: 946506 - DNA, 15 bp, Homo sapiens
ttaagacattggccc

SEQ ID NO: 946507 - DNA, 15 bp, Homo sapiens
taagacattggcccc

SEQ ID NO: 946508 - DNA, 15 bp, Homo sapiens
aagacattggcccca

SEQ ID NO: 946509 - DNA, 15 bp, Homo sapiens
agacattggccccag

SEQ ID NO: 946510 - DNA, 15 bp, Homo sapiens
gacattggccccaga

SEQ ID NO: 946511 - DNA, 15 bp, Homo sapiens
acattggccccagag

SEQ ID NO: 946512 - DNA, 15 bp, Homo sapiens
cattggccccagagt

SEQ ID NO: 946513 - DNA, 15 bp, Homo sapiens
attggccccagagta

SEQ ID NO: 946514 - DNA, 15 bp, Homo sapiens
ttggccccagagtaa

SEQ ID NO: 946515 - DNA, 15 bp, Homo sapiens
tggccccagagtaaa

SEQ ID NO: 946516 - DNA, 15 bp, Homo sapiens
ggccccagagtaaag

SEQ ID NO: 946517 - DNA, 15 bp, Homo sapiens
gccccagagtaaaga

SEQ ID NO: 946518 - DNA, 15 bp, Homo sapiens
ccccagagtaaagaa

SEQ ID NO: 946519 - DNA, 15 bp, Homo sapiens
cccagagtaaagaag

SEQ ID NO: 946520 - DNA, 15 bp, Homo sapiens
ccagagtaaagaagg

SEQ ID NO: 946521 - DNA, 15 bp, Homo sapiens
cagagtaaagaagga

SEQ ID NO: 946522 - DNA, 15 bp, Homo sapiens
agagtaaagaaggag

SEQ ID NO: 946523 - DNA, 15 bp, Homo sapiens
gagtaaagaaggagg

SEQ ID NO: 946524 - DNA, 15 bp, Homo sapiens
agtaaagaaggaggg

SEQ ID NO: 946525 - DNA, 15 bp, Homo sapiens
gtaaagaaggagggc

SEQ ID NO: 946526 - DNA, 15 bp, Homo sapiens
taaagaaggagggct

SEQ ID NO: 946527 - DNA, 15 bp, Homo sapiens
aaagaaggagggctt

SEQ ID NO: 946528 - DNA, 15 bp, Homo sapiens
aagaaggagggctta

SEQ ID NO: 946529 - DNA, 15 bp, Homo sapiens
agaaggagggcttat

SEQ ID NO: 946530 - DNA, 15 bp, Homo sapiens
gaaggagggcttatt

SEQ ID NO: 946531 - DNA, 15 bp, Homo sapiens
aaggagggcttattt

SEQ ID NO: 946532 - DNA, 15 bp, Homo sapiens
aggagggcttatttc

SEQ ID NO: 946533 - DNA, 15 bp, Homo sapiens
ggagggcttatttct

SEQ ID NO: 946534 - DNA, 15 bp, Homo sapiens
gagggcttatttctg

SEQ ID NO: 946535 - DNA, 15 bp, Homo sapiens
agggcttatttctgc

SEQ ID NO: 946536 - DNA, 15 bp, Homo sapiens
gggcttatttctgct

SEQ ID NO: 946537 - DNA, 15 bp, Homo sapiens
ggcttatttctgctc

SEQ ID NO: 946538 - DNA, 15 bp, Homo sapiens
gcttatttctgctca

SEQ ID NO: 946539 - DNA, 15 bp, Homo sapiens
cttatttctgctcag

SEQ ID NO: 946540 - DNA, 15 bp, Homo sapiens
ttatttctgctcagg

SEQ ID NO: 946541 - DNA, 15 bp, Homo sapiens
tatttctgctcagga

SEQ ID NO: 946542 - DNA, 15 bp, Homo sapiens
atttctgctcaggac

SEQ ID NO: 946543 - DNA, 15 bp, Homo sapiens
tttctgctcaggact

SEQ ID NO: 946544 - DNA, 15 bp, Homo sapiens
ttctgctcaggactg

SEQ ID NO: 946545 - DNA, 15 bp, Homo sapiens
tctgctcaggactgg

SEQ ID NO: 946546 - DNA, 15 bp, Homo sapiens
ctgctcaggactggt

SEQ ID NO: 946547 - DNA, 15 bp, Homo sapiens
tgctcaggactggta

SEQ ID NO: 946548 - DNA, 15 bp, Homo sapiens
gctcaggactggtac

SEQ ID NO: 946549 - DNA, 15 bp, Homo sapiens
ctcaggactggtaca

SEQ ID NO: 946550 - DNA, 15 bp, Homo sapiens
tcaggactggtacac

SEQ ID NO: 946551 - DNA, 15 bp, Homo sapiens
caggactggtacaca

SEQ ID NO: 946552 - DNA, 15 bp, Homo sapiens
aggactggtacacat

SEQ ID NO: 946553 - DNA, 15 bp, Homo sapiens
ggactggtacacata

SEQ ID NO: 946554 - DNA, 15 bp, Homo sapiens
gactggtacacatac

SEQ ID NO: 946555 - DNA, 15 bp, Homo sapiens
actggtacacataca

SEQ ID NO: 946556 - DNA, 15 bp, Homo sapiens
ctggtacacatacaa

SEQ ID NO: 946557 - DNA, 15 bp, Homo sapiens
tggtacacatacaag

SEQ ID NO: 946558 - DNA, 15 bp, Homo sapiens
ggtacacatacaagc

SEQ ID NO: 946559 - DNA, 15 bp, Homo sapiens
gtacacatacaagcg

SEQ ID NO: 946560 - DNA, 15 bp, Homo sapiens
tacacatacaagcgt

SEQ ID NO: 946561 - DNA, 15 bp, Homo sapiens
acacatacaagcgtg

SEQ ID NO: 946562 - DNA, 15 bp, Homo sapiens
cacatacaagcgtgc

SEQ ID NO: 946563 - DNA, 15 bp, Homo sapiens
acatacaagcgtgca

SEQ ID NO: 946564 - DNA, 15 bp, Homo sapiens
catacaagcgtgcat

SEQ ID NO: 946565 - DNA, 15 bp, Homo sapiens
atacaagcgtgcatg

SEQ ID NO: 946566 - DNA, 15 bp, Homo sapiens
tacaagcgtgcatgt

SEQ ID NO: 946567 - DNA, 15 bp, Homo sapiens
acaagcgtgcatgtg

SEQ ID NO: 946568 - DNA, 15 bp, Homo sapiens
caagcgtgcatgtgc

SEQ ID NO: 946569 - DNA, 15 bp, Homo sapiens
aagcgtgcatgtgct

SEQ ID NO: 946570 - DNA, 15 bp, Homo sapiens
agcgtgcatgtgctt

SEQ ID NO: 946571 - DNA, 15 bp, Homo sapiens
gcgtgcatgtgcttg

SEQ ID NO: 946572 - DNA, 15 bp, Homo sapiens
cgtgcatgtgcttgt

SEQ ID NO: 946573 - DNA, 15 bp, Homo sapiens
gtgcatgtgcttgtg

SEQ ID NO: 946574 - DNA, 15 bp, Homo sapiens
tgcatgtgcttgtga

SEQ ID NO: 946575 - DNA, 15 bp, Homo sapiens
gcatgtgcttgtgag

SEQ ID NO: 946576 - DNA, 15 bp, Homo sapiens
catgtgcttgtgagt

SEQ ID NO: 946577 - DNA, 15 bp, Homo sapiens
atgtgcttgtgagtg

SEQ ID NO: 946578 - DNA, 15 bp, Homo sapiens
tgtgcttgtgagtgt

SEQ ID NO: 946579 - DNA, 15 bp, Homo sapiens
gtgcttgtgagtgtg

SEQ ID NO: 946580 - DNA, 15 bp, Homo sapiens
tgcttgtgagtgtgt

SEQ ID NO: 946581 - DNA, 15 bp, Homo sapiens
gcttgtgagtgtgtg

SEQ ID NO: 946582 - DNA, 15 bp, Homo sapiens
cttgtgagtgtgtgt

SEQ ID NO: 946583 - DNA, 15 bp, Homo sapiens
ttgtgagtgtgtgta

SEQ ID NO: 946584 - DNA, 15 bp, Homo sapiens
tgtgagtgtgtgtac

SEQ ID NO: 946585 - DNA, 15 bp, Homo sapiens
gtgagtgtgtgtaca

SEQ ID NO: 946586 - DNA, 15 bp, Homo sapiens
tgagtgtgtgtacat

SEQ ID NO: 946587 - DNA, 15 bp, Homo sapiens
gagtgtgtgtacatg

SEQ ID NO: 946588 - DNA, 15 bp, Homo sapiens
agtgtgtgtacatgc

SEQ ID NO: 946589 - DNA, 15 bp, Homo sapiens
gtgtgtgtacatgca

SEQ ID NO: 946590 - DNA, 15 bp, Homo sapiens
tgtgtgtacatgcat

SEQ ID NO: 946591 - DNA, 15 bp, Homo sapiens
gtgtgtacatgcatg

SEQ ID NO: 946592 - DNA, 15 bp, Homo sapiens
tgtgtacatgcatgt

SEQ ID NO: 946593 - DNA, 15 bp, Homo sapiens
gtgtacatgcatgtg

SEQ ID NO: 946594 - DNA, 15 bp, Homo sapiens
tgtacatgcatgtgt

SEQ ID NO: 946595 - DNA, 15 bp, Homo sapiens
gtacatgcatgtgtg

SEQ ID NO: 946596 - DNA, 15 bp, Homo sapiens
tacatgcatgtgtgt

SEQ ID NO: 946597 - DNA, 15 bp, Homo sapiens
acatgcatgtgtgtg

SEQ ID NO: 946598 - DNA, 15 bp, Homo sapiens
catgcatgtgtgtgc

SEQ ID NO: 946599 - DNA, 15 bp, Homo sapiens
atgcatgtgtgtgct

SEQ ID NO: 946600 - DNA, 15 bp, Homo sapiens
tgcatgtgtgtgctt

SEQ ID NO: 946601 - DNA, 15 bp, Homo sapiens
gcatgtgtgtgcttg

SEQ ID NO: 946602 - DNA, 15 bp, Homo sapiens
catgtgtgtgcttgt

SEQ ID NO: 946603 - DNA, 15 bp, Homo sapiens
atgtgtgtgcttgtg

SEQ ID NO: 946604 - DNA, 15 bp, Homo sapiens
tgtgtgtgcttgtgt

SEQ ID NO: 946605 - DNA, 15 bp, Homo sapiens
gtgtgtgcttgtgtg

SEQ ID NO: 946606 - DNA, 15 bp, Homo sapiens
tgtgtgcttgtgtgg

SEQ ID NO: 946607 - DNA, 15 bp, Homo sapiens
gtgtgcttgtgtggg

SEQ ID NO: 946608 - DNA, 15 bp, Homo sapiens
tgtgcttgtgtggga

SEQ ID NO: 946609 - DNA, 15 bp, Homo sapiens
gtgcttgtgtgggag

SEQ ID NO: 946610 - DNA, 15 bp, Homo sapiens
tgcttgtgtgggagg

SEQ ID NO: 946611 - DNA, 15 bp, Homo sapiens
gcttgtgtgggaggt

SEQ ID NO: 946612 - DNA, 15 bp, Homo sapiens
cttgtgtgggaggta

SEQ ID NO: 946613 - DNA, 15 bp, Homo sapiens
ttgtgtgggaggtag

SEQ ID NO: 946614 - DNA, 15 bp, Homo sapiens
tgtgtgggaggtagt

SEQ ID NO: 946615 - DNA, 15 bp, Homo sapiens
gtgtgggaggtagtg

SEQ ID NO: 946616 - DNA, 15 bp, Homo sapiens
tgtgggaggtagtgg

SEQ ID NO: 946617 - DNA, 15 bp, Homo sapiens
gtgggaggtagtgga

SEQ ID NO: 946618 - DNA, 15 bp, Homo sapiens
tgggaggtagtggac

SEQ ID NO: 946619 - DNA, 15 bp, Homo sapiens
gggaggtagtggaca

SEQ ID NO: 946620 - DNA, 15 bp, Homo sapiens
ggaggtagtggacac

SEQ ID NO: 946621 - DNA, 15 bp, Homo sapiens
gaggtagtggacaca

SEQ ID NO: 946622 - DNA, 15 bp, Homo sapiens
aggtagtggacacac

SEQ ID NO: 946623 - DNA, 15 bp, Homo sapiens
ggtagtggacacaca

SEQ ID NO: 946624 - DNA, 15 bp, Homo sapiens
gtagtggacacacac

SEQ ID NO: 946625 - DNA, 15 bp, Homo sapiens
tagtggacacacact

SEQ ID NO: 946626 - DNA, 15 bp, Homo sapiens
agtggacacacactg

SEQ ID NO: 946627 - DNA, 15 bp, Homo sapiens
gtggacacacactga

SEQ ID NO: 946628 - DNA, 15 bp, Homo sapiens
tggacacacactgag

SEQ ID NO: 946629 - DNA, 15 bp, Homo sapiens
ggacacacactgagg

SEQ ID NO: 946630 - DNA, 15 bp, Homo sapiens
gacacacactgaggt

SEQ ID NO: 946631 - DNA, 15 bp, Homo sapiens
acacacactgaggtc

SEQ ID NO: 946632 - DNA, 15 bp, Homo sapiens
cacacactgaggtcc

SEQ ID NO: 946633 - DNA, 15 bp, Homo sapiens
acacactgaggtcca

SEQ ID NO: 946634 - DNA, 15 bp, Homo sapiens
cacactgaggtccag

SEQ ID NO: 946635 - DNA, 15 bp, Homo sapiens
acactgaggtccagc

SEQ ID NO: 946636 - DNA, 15 bp, Homo sapiens
cactgaggtccagct

SEQ ID NO: 946637 - DNA, 15 bp, Homo sapiens
actgaggtccagctg

SEQ ID NO: 946638 - DNA, 15 bp, Homo sapiens
ctgaggtccagctgc

SEQ ID NO: 946639 - DNA, 15 bp, Homo sapiens
tgaggtccagctgca

SEQ ID NO: 946640 - DNA, 15 bp, Homo sapiens
gaggtccagctgcac

SEQ ID NO: 946641 - DNA, 15 bp, Homo sapiens
aggtccagctgcact

SEQ ID NO: 946642 - DNA, 15 bp, Homo sapiens
ggtccagctgcactg

SEQ ID NO: 946643 - DNA, 15 bp, Homo sapiens
gtccagctgcactga

SEQ ID NO: 946644 - DNA, 15 bp, Homo sapiens
tccagctgcactgaa

SEQ ID NO: 946645 - DNA, 15 bp, Homo sapiens
ccagctgcactgaag

SEQ ID NO: 946646 - DNA, 15 bp, Homo sapiens
cagctgcactgaagc

SEQ ID NO: 946647 - DNA, 15 bp, Homo sapiens
agctgcactgaagca

SEQ ID NO: 946648 - DNA, 15 bp, Homo sapiens
gctgcactgaagcag

SEQ ID NO: 946649 - DNA, 15 bp, Homo sapiens
ctgcactgaagcagg

SEQ ID NO: 946650 - DNA, 15 bp, Homo sapiens
tgcactgaagcaggt

SEQ ID NO: 946651 - DNA, 15 bp, Homo sapiens
gcactgaagcaggtt

SEQ ID NO: 946652 - DNA, 15 bp, Homo sapiens
cactgaagcaggttt

SEQ ID NO: 946653 - DNA, 15 bp, Homo sapiens
actgaagcaggtttg

SEQ ID NO: 946654 - DNA, 15 bp, Homo sapiens
ctgaagcaggtttgg

SEQ ID NO: 946655 - DNA, 15 bp, Homo sapiens
tgaagcaggtttgga

SEQ ID NO: 946656 - DNA, 15 bp, Homo sapiens
gaagcaggtttggag

SEQ ID NO: 946657 - DNA, 15 bp, Homo sapiens
aagcaggtttggagg

SEQ ID NO: 946658 - DNA, 15 bp, Homo sapiens
agcaggtttggaggg

SEQ ID NO: 946659 - DNA, 15 bp, Homo sapiens
gcaggtttggagggc

SEQ ID NO: 946660 - DNA, 15 bp, Homo sapiens
caggtttggagggcc

SEQ ID NO: 946661 - DNA, 15 bp, Homo sapiens
aggtttggagggccc

SEQ ID NO: 946662 - DNA, 15 bp, Homo sapiens
ggtttggagggccct

SEQ ID NO: 946663 - DNA, 15 bp, Homo sapiens
gtttggagggcccta

SEQ ID NO: 946664 - DNA, 15 bp, Homo sapiens
tttggagggccctag

SEQ ID NO: 946665 - DNA, 15 bp, Homo sapiens
ttggagggccctagg

SEQ ID NO: 946666 - DNA, 15 bp, Homo sapiens
tggagggccctagga

SEQ ID NO: 946667 - DNA, 15 bp, Homo sapiens
ggagggccctaggaa

SEQ ID NO: 946668 - DNA, 15 bp, Homo sapiens
gagggccctaggaag

SEQ ID NO: 946669 - DNA, 15 bp, Homo sapiens
agggccctaggaagg

SEQ ID NO: 946670 - DNA, 15 bp, Homo sapiens
gggccctaggaaggc

SEQ ID NO: 946671 - DNA, 15 bp, Homo sapiens
ggccctaggaaggca

SEQ ID NO: 946672 - DNA, 15 bp, Homo sapiens
gccctaggaaggcat

SEQ ID NO: 946673 - DNA, 15 bp, Homo sapiens
ccctaggaaggcatg

SEQ ID NO: 946674 - DNA, 15 bp, Homo sapiens
cctaggaaggcatgg

SEQ ID NO: 946675 - DNA, 15 bp, Homo sapiens
ctaggaaggcatggg

SEQ ID NO: 946676 - DNA, 15 bp, Homo sapiens
taggaaggcatgggc

SEQ ID NO: 946677 - DNA, 15 bp, Homo sapiens
aggaaggcatgggca

SEQ ID NO: 946678 - DNA, 15 bp, Homo sapiens
ggaaggcatgggcag

SEQ ID NO: 946679 - DNA, 15 bp, Homo sapiens
gaaggcatgggcaga

SEQ ID NO: 946680 - DNA, 15 bp, Homo sapiens
aaggcatgggcagaa

SEQ ID NO: 946681 - DNA, 15 bp, Homo sapiens
aggcatgggcagaaa

SEQ ID NO: 946682 - DNA, 15 bp, Homo sapiens
ggcatgggcagaaac

SEQ ID NO: 946683 - DNA, 15 bp, Homo sapiens
gcatgggcagaaact

SEQ ID NO: 946684 - DNA, 15 bp, Homo sapiens
catgggcagaaactg

SEQ ID NO: 946685 - DNA, 15 bp, Homo sapiens
atgggcagaaactga

SEQ ID NO: 946686 - DNA, 15 bp, Homo sapiens
tgggcagaaactgac

SEQ ID NO: 946687 - DNA, 15 bp, Homo sapiens
gggcagaaactgacc

SEQ ID NO: 946688 - DNA, 15 bp, Homo sapiens
ggcagaaactgacct

SEQ ID NO: 946689 - DNA, 15 bp, Homo sapiens
gcagaaactgacctg

SEQ ID NO: 946690 - DNA, 15 bp, Homo sapiens
cagaaactgacctgc

SEQ ID NO: 946691 - DNA, 15 bp, Homo sapiens
agaaactgacctgct

SEQ ID NO: 946692 - DNA, 15 bp, Homo sapiens
gaaactgacctgctc

SEQ ID NO: 946693 - DNA, 15 bp, Homo sapiens
aaactgacctgctct

SEQ ID NO: 946694 - DNA, 15 bp, Homo sapiens
aactgacctgctctc

SEQ ID NO: 946695 - DNA, 15 bp, Homo sapiens
actgacctgctctct

SEQ ID NO: 946696 - DNA, 15 bp, Homo sapiens
ctgacctgctctcta

SEQ ID NO: 946697 - DNA, 15 bp, Homo sapiens
tgacctgctctctag

SEQ ID NO: 946698 - DNA, 15 bp, Homo sapiens
gacctgctctctagg

SEQ ID NO: 946699 - DNA, 15 bp, Homo sapiens
acctgctctctaggg

SEQ ID NO: 946700 - DNA, 15 bp, Homo sapiens
cctgctctctagggg

SEQ ID NO: 946701 - DNA, 15 bp, Homo sapiens
ctgctctctaggggc

SEQ ID NO: 946702 - DNA, 15 bp, Homo sapiens
tgctctctaggggca

SEQ ID NO: 946703 - DNA, 15 bp, Homo sapiens
gctctctaggggcat

SEQ ID NO: 946704 - DNA, 15 bp, Homo sapiens
ctctctaggggcatg

SEQ ID NO: 946705 - DNA, 15 bp, Homo sapiens
tctctaggggcatgc

SEQ ID NO: 946706 - DNA, 15 bp, Homo sapiens
ctctaggggcatgct

SEQ ID NO: 946707 - DNA, 15 bp, Homo sapiens
tctaggggcatgctg

SEQ ID NO: 946708 - DNA, 15 bp, Homo sapiens
ctaggggcatgctga

SEQ ID NO: 946709 - DNA, 15 bp, Homo sapiens
taggggcatgctgat

SEQ ID NO: 946710 - DNA, 15 bp, Homo sapiens
aggggcatgctgatt

SEQ ID NO: 946711 - DNA, 15 bp, Homo sapiens
ggggcatgctgatta

SEQ ID NO: 946712 - DNA, 15 bp, Homo sapiens
gggcatgctgattaa

SEQ ID NO: 946713 - DNA, 15 bp, Homo sapiens
ggcatgctgattaac

SEQ ID NO: 946714 - DNA, 15 bp, Homo sapiens
gcatgctgattaact

SEQ ID NO: 946715 - DNA, 15 bp, Homo sapiens
catgctgattaacta

SEQ ID NO: 946716 - DNA, 15 bp, Homo sapiens
atgctgattaactaa

SEQ ID NO: 946717 - DNA, 15 bp, Homo sapiens
tgctgattaactaaa

SEQ ID NO: 946718 - DNA, 15 bp, Homo sapiens
gctgattaactaaac

SEQ ID NO: 946719 - DNA, 15 bp, Homo sapiens
ctgattaactaaact

SEQ ID NO: 946720 - DNA, 15 bp, Homo sapiens
tgattaactaaactt

SEQ ID NO: 946721 - DNA, 15 bp, Homo sapiens
gattaactaaactta

SEQ ID NO: 946722 - DNA, 15 bp, Homo sapiens
attaactaaacttaa

SEQ ID NO: 946723 - DNA, 15 bp, Homo sapiens
ttaactaaacttaat

SEQ ID NO: 946724 - DNA, 15 bp, Homo sapiens
taactaaacttaatg

SEQ ID NO: 946725 - DNA, 15 bp, Homo sapiens
aactaaacttaatgt

SEQ ID NO: 946726 - DNA, 15 bp, Homo sapiens
actaaacttaatgta

SEQ ID NO: 946727 - DNA, 15 bp, Homo sapiens
ctaaacttaatgtaa

SEQ ID NO: 946728 - DNA, 15 bp, Homo sapiens
taaacttaatgtaag

SEQ ID NO: 946729 - DNA, 15 bp, Homo sapiens
aaacttaatgtaaga

SEQ ID NO: 946730 - DNA, 15 bp, Homo sapiens
aacttaatgtaagac

SEQ ID NO: 946731 - DNA, 15 bp, Homo sapiens
acttaatgtaagacc

SEQ ID NO: 946732 - DNA, 15 bp, Homo sapiens
cttaatgtaagacca

SEQ ID NO: 946733 - DNA, 15 bp, Homo sapiens
ttaatgtaagaccat

SEQ ID NO: 946734 - DNA, 15 bp, Homo sapiens
taatgtaagaccata

SEQ ID NO: 946735 - DNA, 15 bp, Homo sapiens
aatgtaagaccatat

SEQ ID NO: 946736 - DNA, 15 bp, Homo sapiens
atgtaagaccatatt

SEQ ID NO: 946737 - DNA, 15 bp, Homo sapiens
tgtaagaccatattg

SEQ ID NO: 946738 - DNA, 15 bp, Homo sapiens
gtaagaccatattgt

SEQ ID NO: 946739 - DNA, 15 bp, Homo sapiens
taagaccatattgtt

SEQ ID NO: 946740 - DNA, 15 bp, Homo sapiens
aagaccatattgttt

SEQ ID NO: 946741 - DNA, 15 bp, Homo sapiens
agaccatattgtttt

SEQ ID NO: 946742 - DNA, 15 bp, Homo sapiens
gaccatattgttttt

SEQ ID NO: 946743 - DNA, 15 bp, Homo sapiens
accatattgttttta

SEQ ID NO: 946744 - DNA, 15 bp, Homo sapiens
ccatattgtttttaa

SEQ ID NO: 946745 - DNA, 15 bp, Homo sapiens
catattgtttttaac

SEQ ID NO: 946746 - DNA, 15 bp, Homo sapiens
atattgtttttaacc

SEQ ID NO: 946747 - DNA, 15 bp, Homo sapiens
tattgtttttaacct

SEQ ID NO: 946748 - DNA, 15 bp, Homo sapiens
attgtttttaacctc

SEQ ID NO: 946749 - DNA, 15 bp, Homo sapiens
ttgtttttaacctca

SEQ ID NO: 946750 - DNA, 15 bp, Homo sapiens
tgtttttaacctcag

SEQ ID NO: 946751 - DNA, 15 bp, Homo sapiens
gtttttaacctcaga

SEQ ID NO: 946752 - DNA, 15 bp, Homo sapiens
tttttaacctcagaa

SEQ ID NO: 946753 - DNA, 15 bp, Homo sapiens
ttttaacctcagaaa

SEQ ID NO: 946754 - DNA, 15 bp, Homo sapiens
tttaacctcagaaat

SEQ ID NO: 946755 - DNA, 15 bp, Homo sapiens
ttaacctcagaaata

SEQ ID NO: 946756 - DNA, 15 bp, Homo sapiens
taacctcagaaatat

SEQ ID NO: 946757 - DNA, 15 bp, Homo sapiens
aacctcagaaatatt

SEQ ID NO: 946758 - DNA, 15 bp, Homo sapiens
acctcagaaatattt

SEQ ID NO: 946759 - DNA, 15 bp, Homo sapiens
cctcagaaatattta

SEQ ID NO: 946760 - DNA, 15 bp, Homo sapiens
ctcagaaatatttac

SEQ ID NO: 946761 - DNA, 15 bp, Homo sapiens
tcagaaatatttacc

SEQ ID NO: 946762 - DNA, 15 bp, Homo sapiens
cagaaatatttacca

SEQ ID NO: 946763 - DNA, 15 bp, Homo sapiens
agaaatatttaccag

SEQ ID NO: 946764 - DNA, 15 bp, Homo sapiens
gaaatatttaccaga

SEQ ID NO: 946765 - DNA, 15 bp, Homo sapiens
aaatatttaccagaa

SEQ ID NO: 946766 - DNA, 15 bp, Homo sapiens
aatatttaccagaaa

SEQ ID NO: 946767 - DNA, 15 bp, Homo sapiens
atatttaccagaaaa

SEQ ID NO: 946768 - DNA, 15 bp, Homo sapiens
tatttaccagaaaat

SEQ ID NO: 946769 - DNA, 15 bp, Homo sapiens
atttaccagaaaatc

SEQ ID NO: 946770 - DNA, 15 bp, Homo sapiens
tttaccagaaaatca

SEQ ID NO: 946771 - DNA, 15 bp, Homo sapiens
ttaccagaaaatcag

SEQ ID NO: 946772 - DNA, 15 bp, Homo sapiens
taccagaaaatcagg

SEQ ID NO: 946773 - DNA, 15 bp, Homo sapiens
accagaaaatcaggg

SEQ ID NO: 946774 - DNA, 15 bp, Homo sapiens
ccagaaaatcaggga

SEQ ID NO: 946775 - DNA, 15 bp, Homo sapiens
cagaaaatcagggac

SEQ ID NO: 946776 - DNA, 15 bp, Homo sapiens
agaaaatcagggacc

SEQ ID NO: 946777 - DNA, 15 bp, Homo sapiens
gaaaatcagggacca

SEQ ID NO: 946778 - DNA, 15 bp, Homo sapiens
aaaatcagggaccat

SEQ ID NO: 946779 - DNA, 15 bp, Homo sapiens
aaatcagggaccatg

SEQ ID NO: 946780 - DNA, 15 bp, Homo sapiens
aatcagggaccatga

SEQ ID NO: 946781 - DNA, 15 bp, Homo sapiens
atcagggaccatgac

SEQ ID NO: 946782 - DNA, 15 bp, Homo sapiens
tcagggaccatgacc

SEQ ID NO: 946783 - DNA, 15 bp, Homo sapiens
cagggaccatgacct

SEQ ID NO: 946784 - DNA, 15 bp, Homo sapiens
agggaccatgacctc

SEQ ID NO: 946785 - DNA, 15 bp, Homo sapiens
gggaccatgacctcc

SEQ ID NO: 946786 - DNA, 15 bp, Homo sapiens
ggaccatgacctcct

SEQ ID NO: 946787 - DNA, 15 bp, Homo sapiens
gaccatgacctcctg

SEQ ID NO: 946788 - DNA, 15 bp, Homo sapiens
accatgacctcctgg

SEQ ID NO: 946789 - DNA, 15 bp, Homo sapiens
ccatgacctcctgga

SEQ ID NO: 946790 - DNA, 15 bp, Homo sapiens
catgacctcctggac

SEQ ID NO: 946791 - DNA, 15 bp, Homo sapiens
atgacctcctggaca

SEQ ID NO: 946792 - DNA, 15 bp, Homo sapiens
tgacctcctggacaa

SEQ ID NO: 946793 - DNA, 15 bp, Homo sapiens
gacctcctggacaaa

SEQ ID NO: 946794 - DNA, 15 bp, Homo sapiens
acctcctggacaaaa

SEQ ID NO: 946795 - DNA, 15 bp, Homo sapiens
cctcctggacaaaag

SEQ ID NO: 946796 - DNA, 15 bp, Homo sapiens
ctcctggacaaaagg

SEQ ID NO: 946797 - DNA, 15 bp, Homo sapiens
tcctggacaaaagga

SEQ ID NO: 946798 - DNA, 15 bp, Homo sapiens
cctggacaaaaggaa

SEQ ID NO: 946799 - DNA, 15 bp, Homo sapiens
ctggacaaaaggaaa

SEQ ID NO: 946800 - DNA, 15 bp, Homo sapiens
tggacaaaaggaaaa

SEQ ID NO: 946801 - DNA, 15 bp, Homo sapiens
ggacaaaaggaaaac

SEQ ID NO: 946802 - DNA, 15 bp, Homo sapiens
gacaaaaggaaaaca

SEQ ID NO: 946803 - DNA, 15 bp, Homo sapiens
acaaaaggaaaacag

SEQ ID NO: 946804 - DNA, 15 bp, Homo sapiens
caaaaggaaaacagt

SEQ ID NO: 946805 - DNA, 15 bp, Homo sapiens
aaaaggaaaacagtc

SEQ ID NO: 946806 - DNA, 15 bp, Homo sapiens
aaaggaaaacagtca

SEQ ID NO: 946807 - DNA, 15 bp, Homo sapiens
aaggaaaacagtcac

SEQ ID NO: 946808 - DNA, 15 bp, Homo sapiens
aggaaaacagtcaca

SEQ ID NO: 946809 - DNA, 15 bp, Homo sapiens
ggaaaacagtcacag

SEQ ID NO: 946810 - DNA, 15 bp, Homo sapiens
gaaaacagtcacagc

SEQ ID NO: 946811 - DNA, 15 bp, Homo sapiens
aaaacagtcacagca

SEQ ID NO: 946812 - DNA, 15 bp, Homo sapiens
aaacagtcacagcac

SEQ ID NO: 946813 - DNA, 15 bp, Homo sapiens
aacagtcacagcact

SEQ ID NO: 946814 - DNA, 15 bp, Homo sapiens
acagtcacagcactg

SEQ ID NO: 946815 - DNA, 15 bp, Homo sapiens
cagtcacagcactga

SEQ ID NO: 946816 - DNA, 15 bp, Homo sapiens
agtcacagcactgaa

SEQ ID NO: 946817 - DNA, 15 bp, Homo sapiens
gtcacagcactgaag

SEQ ID NO: 946818 - DNA, 15 bp, Homo sapiens
tcacagcactgaagg

SEQ ID NO: 946819 - DNA, 15 bp, Homo sapiens
cacagcactgaaggc

SEQ ID NO: 946820 - DNA, 15 bp, Homo sapiens
acagcactgaaggca

SEQ ID NO: 946821 - DNA, 15 bp, Homo sapiens
cagcactgaaggcag

SEQ ID NO: 946822 - DNA, 15 bp, Homo sapiens
agcactgaaggcagg

SEQ ID NO: 946823 - DNA, 15 bp, Homo sapiens
gcactgaaggcagga

SEQ ID NO: 946824 - DNA, 15 bp, Homo sapiens
cactgaaggcaggag

SEQ ID NO: 946825 - DNA, 15 bp, Homo sapiens
actgaaggcaggaga

SEQ ID NO: 946826 - DNA, 15 bp, Homo sapiens
ctgaaggcaggagag

SEQ ID NO: 946827 - DNA, 15 bp, Homo sapiens
tgaaggcaggagagg

SEQ ID NO: 946828 - DNA, 15 bp, Homo sapiens
gaaggcaggagagga

SEQ ID NO: 946829 - DNA, 15 bp, Homo sapiens
aaggcaggagaggac

SEQ ID NO: 946830 - DNA, 15 bp, Homo sapiens
aggcaggagaggacc

SEQ ID NO: 946831 - DNA, 15 bp, Homo sapiens
ggcaggagaggaccg

SEQ ID NO: 946832 - DNA, 15 bp, Homo sapiens
gcaggagaggaccga

SEQ ID NO: 946833 - DNA, 15 bp, Homo sapiens
caggagaggaccgag

SEQ ID NO: 946834 - DNA, 15 bp, Homo sapiens
aggagaggaccgagc

SEQ ID NO: 946835 - DNA, 15 bp, Homo sapiens
ggagaggaccgagct

SEQ ID NO: 946836 - DNA, 15 bp, Homo sapiens
gagaggaccgagcta

SEQ ID NO: 946837 - DNA, 15 bp, Homo sapiens
agaggaccgagctat

SEQ ID NO: 946838 - DNA, 15 bp, Homo sapiens
gaggaccgagctatt

SEQ ID NO: 946839 - DNA, 15 bp, Homo sapiens
aggaccgagctattc

SEQ ID NO: 946840 - DNA, 15 bp, Homo sapiens
ggaccgagctattct

SEQ ID NO: 946841 - DNA, 15 bp, Homo sapiens
gaccgagctattctc

SEQ ID NO: 946842 - DNA, 15 bp, Homo sapiens
accgagctattctcc

SEQ ID NO: 946843 - DNA, 15 bp, Homo sapiens
ccgagctattctcct

SEQ ID NO: 946844 - DNA, 15 bp, Homo sapiens
cgagctattctcctg

SEQ ID NO: 946845 - DNA, 15 bp, Homo sapiens
gagctattctcctgg

SEQ ID NO: 946846 - DNA, 15 bp, Homo sapiens
agctattctcctggg

SEQ ID NO: 946847 - DNA, 15 bp, Homo sapiens
gctattctcctggga

SEQ ID NO: 946848 - DNA, 15 bp, Homo sapiens
ctattctcctgggac

SEQ ID NO: 946849 - DNA, 15 bp, Homo sapiens
tattctcctgggact

SEQ ID NO: 946850 - DNA, 15 bp, Homo sapiens
attctcctgggactg

SEQ ID NO: 946851 - DNA, 15 bp, Homo sapiens
ttctcctgggactgg

SEQ ID NO: 946852 - DNA, 15 bp, Homo sapiens
tctcctgggactggc

SEQ ID NO: 946853 - DNA, 15 bp, Homo sapiens
ctcctgggactggct

SEQ ID NO: 946854 - DNA, 15 bp, Homo sapiens
tcctgggactggcta

SEQ ID NO: 946855 - DNA, 15 bp, Homo sapiens
cctgggactggctat

SEQ ID NO: 946856 - DNA, 15 bp, Homo sapiens
ctgggactggctatg

SEQ ID NO: 946857 - DNA, 15 bp, Homo sapiens
tgggactggctatga

SEQ ID NO: 946858 - DNA, 15 bp, Homo sapiens
gggactggctatgat

SEQ ID NO: 946859 - DNA, 15 bp, Homo sapiens
ggactggctatgatg

SEQ ID NO: 946860 - DNA, 15 bp, Homo sapiens
gactggctatgatgg

SEQ ID NO: 946861 - DNA, 15 bp, Homo sapiens
actggctatgatggt

SEQ ID NO: 946862 - DNA, 15 bp, Homo sapiens
ctggctatgatggtg

SEQ ID NO: 946863 - DNA, 15 bp, Homo sapiens
tggctatgatggtgt

SEQ ID NO: 946864 - DNA, 15 bp, Homo sapiens
ggctatgatggtgtg

SEQ ID NO: 946865 - DNA, 15 bp, Homo sapiens
gctatgatggtgtgc

SEQ ID NO: 946866 - DNA, 15 bp, Homo sapiens
ctatgatggtgtgct

SEQ ID NO: 946867 - DNA, 15 bp, Homo sapiens
tatgatggtgtgctc

SEQ ID NO: 946868 - DNA, 15 bp, Homo sapiens
atgatggtgtgctcc

SEQ ID NO: 946869 - DNA, 15 bp, Homo sapiens
tgatggtgtgctcca

SEQ ID NO: 946870 - DNA, 15 bp, Homo sapiens
gatggtgtgctccat

SEQ ID NO: 946871 - DNA, 15 bp, Homo sapiens
atggtgtgctccatc

SEQ ID NO: 946872 - DNA, 15 bp, Homo sapiens
tggtgtgctccatca

SEQ ID NO: 946873 - DNA, 15 bp, Homo sapiens
ggtgtgctccatcat

SEQ ID NO: 946874 - DNA, 15 bp, Homo sapiens
gtgtgctccatcatg

SEQ ID NO: 946875 - DNA, 15 bp, Homo sapiens
tgtgctccatcatga

SEQ ID NO: 946876 - DNA, 15 bp, Homo sapiens
gtgctccatcatgat

SEQ ID NO: 946877 - DNA, 15 bp, Homo sapiens
tgctccatcatgatg

SEQ ID NO: 946878 - DNA, 15 bp, Homo sapiens
gctccatcatgatgt

SEQ ID NO: 946879 - DNA, 15 bp, Homo sapiens
ctccatcatgatgta

SEQ ID NO: 946880 - DNA, 15 bp, Homo sapiens
tccatcatgatgtat

SEQ ID NO: 946881 - DNA, 15 bp, Homo sapiens
ccatcatgatgtatt

SEQ ID NO: 946882 - DNA, 15 bp, Homo sapiens
catcatgatgtattt

SEQ ID NO: 946883 - DNA, 15 bp, Homo sapiens
atcatgatgtatttt

SEQ ID NO: 946884 - DNA, 15 bp, Homo sapiens
tcatgatgtattttc

SEQ ID NO: 946885 - DNA, 15 bp, Homo sapiens
catgatgtattttct

SEQ ID NO: 946886 - DNA, 15 bp, Homo sapiens
atgatgtattttctg

SEQ ID NO: 946887 - DNA, 15 bp, Homo sapiens
tgatgtattttctgc

SEQ ID NO: 946888 - DNA, 15 bp, Homo sapiens
gatgtattttctgct

SEQ ID NO: 946889 - DNA, 15 bp, Homo sapiens
atgtattttctgctg

SEQ ID NO: 946890 - DNA, 15 bp, Homo sapiens
tgtattttctgctgg

SEQ ID NO: 946891 - DNA, 15 bp, Homo sapiens
gtattttctgctggg

SEQ ID NO: 946892 - DNA, 15 bp, Homo sapiens
tattttctgctggga

SEQ ID NO: 946893 - DNA, 15 bp, Homo sapiens
attttctgctgggaa

SEQ ID NO: 946894 - DNA, 15 bp, Homo sapiens
ttttctgctgggaat

SEQ ID NO: 946895 - DNA, 15 bp, Homo sapiens
tttctgctgggaatc

SEQ ID NO: 946896 - DNA, 15 bp, Homo sapiens
ttctgctgggaatca

SEQ ID NO: 946897 - DNA, 15 bp, Homo sapiens
tctgctgggaatcac

SEQ ID NO: 946898 - DNA, 15 bp, Homo sapiens
ctgctgggaatcaca

SEQ ID NO: 946899 - DNA, 15 bp, Homo sapiens
tgctgggaatcacac

SEQ ID NO: 946900 - DNA, 15 bp, Homo sapiens
gctgggaatcacact

SEQ ID NO: 946901 - DNA, 15 bp, Homo sapiens
ctgggaatcacactc

SEQ ID NO: 946902 - DNA, 15 bp, Homo sapiens
tgggaatcacactcc

SEQ ID NO: 946903 - DNA, 15 bp, Homo sapiens
gggaatcacactcct

SEQ ID NO: 946904 - DNA, 15 bp, Homo sapiens
ggaatcacactcctg

SEQ ID NO: 946905 - DNA, 15 bp, Homo sapiens
gaatcacactcctgc

SEQ ID NO: 946906 - DNA, 15 bp, Homo sapiens
aatcacactcctgcg

SEQ ID NO: 946907 - DNA, 15 bp, Homo sapiens
atcacactcctgcgc

SEQ ID NO: 946908 - DNA, 15 bp, Homo sapiens
tcacactcctgcgct

SEQ ID NO: 946909 - DNA, 15 bp, Homo sapiens
cacactcctgcgctc

SEQ ID NO: 946910 - DNA, 15 bp, Homo sapiens
acactcctgcgctca

SEQ ID NO: 946911 - DNA, 15 bp, Homo sapiens
cactcctgcgctcat

SEQ ID NO: 946912 - DNA, 15 bp, Homo sapiens
actcctgcgctcata

SEQ ID NO: 946913 - DNA, 15 bp, Homo sapiens
ctcctgcgctcatac

SEQ ID NO: 946914 - DNA, 15 bp, Homo sapiens
tcctgcgctcataca

SEQ ID NO: 946915 - DNA, 15 bp, Homo sapiens
cctgcgctcatacat

SEQ ID NO: 946916 - DNA, 15 bp, Homo sapiens
ctgcgctcatacatg

SEQ ID NO: 946917 - DNA, 15 bp, Homo sapiens
tgcgctcatacatgc

SEQ ID NO: 946918 - DNA, 15 bp, Homo sapiens
gcgctcatacatgca

SEQ ID NO: 946919 - DNA, 15 bp, Homo sapiens
cgctcatacatgcag

SEQ ID NO: 946920 - DNA, 15 bp, Homo sapiens
gctcatacatgcaga

SEQ ID NO: 946921 - DNA, 15 bp, Homo sapiens
ctcatacatgcagag

SEQ ID NO: 946922 - DNA, 15 bp, Homo sapiens
tcatacatgcagagg

SEQ ID NO: 946923 - DNA, 15 bp, Homo sapiens
catacatgcagaggt

SEQ ID NO: 946924 - DNA, 15 bp, Homo sapiens
atacatgcagaggta

SEQ ID NO: 946925 - DNA, 15 bp, Homo sapiens
tacatgcagaggtaa

SEQ ID NO: 946926 - DNA, 15 bp, Homo sapiens
acatgcagaggtaat

SEQ ID NO: 946927 - DNA, 15 bp, Homo sapiens
catgcagaggtaata

SEQ ID NO: 946928 - DNA, 15 bp, Homo sapiens
atgcagaggtaatac

SEQ ID NO: 946929 - DNA, 15 bp, Homo sapiens
tgcagaggtaatacc

SEQ ID NO: 946930 - DNA, 15 bp, Homo sapiens
gcagaggtaatacca

SEQ ID NO: 946931 - DNA, 15 bp, Homo sapiens
cagaggtaataccac

SEQ ID NO: 946932 - DNA, 15 bp, Homo sapiens
agaggtaataccact

SEQ ID NO: 946933 - DNA, 15 bp, Homo sapiens
gaggtaataccactg

SEQ ID NO: 946934 - DNA, 15 bp, Homo sapiens
aggtaataccactgg

SEQ ID NO: 946935 - DNA, 15 bp, Homo sapiens
ggtaataccactggg

SEQ ID NO: 946936 - DNA, 15 bp, Homo sapiens
gtaataccactgggt

SEQ ID NO: 946937 - DNA, 15 bp, Homo sapiens
taataccactgggtg

SEQ ID NO: 946938 - DNA, 15 bp, Homo sapiens
aataccactgggtgg

SEQ ID NO: 946939 - DNA, 15 bp, Homo sapiens
ataccactgggtggg

SEQ ID NO: 946940 - DNA, 15 bp, Homo sapiens
taccactgggtgggt

SEQ ID NO: 946941 - DNA, 15 bp, Homo sapiens
accactgggtgggtg

SEQ ID NO: 946942 - DNA, 15 bp, Homo sapiens
ccactgggtgggtgg

SEQ ID NO: 946943 - DNA, 15 bp, Homo sapiens
cactgggtgggtggg

SEQ ID NO: 946944 - DNA, 15 bp, Homo sapiens
actgggtgggtggga

SEQ ID NO: 946945 - DNA, 15 bp, Homo sapiens
ctgggtgggtgggac

SEQ ID NO: 946946 - DNA, 15 bp, Homo sapiens
tgggtgggtgggacc

SEQ ID NO: 946947 - DNA, 15 bp, Homo sapiens
gggtgggtgggaccc

SEQ ID NO: 946948 - DNA, 15 bp, Homo sapiens
ggtgggtgggaccct

SEQ ID NO: 946949 - DNA, 15 bp, Homo sapiens
gtgggtgggaccctg

SEQ ID NO: 946950 - DNA, 15 bp, Homo sapiens
tgggtgggaccctgc

SEQ ID NO: 946951 - DNA, 15 bp, Homo sapiens
gggtgggaccctgct

SEQ ID NO: 946952 - DNA, 15 bp, Homo sapiens
ggtgggaccctgctg

SEQ ID NO: 946953 - DNA, 15 bp, Homo sapiens
gtgggaccctgctgt

SEQ ID NO: 946954 - DNA, 15 bp, Homo sapiens
tgggaccctgctgtt

SEQ ID NO: 946955 - DNA, 15 bp, Homo sapiens
gggaccctgctgttt

SEQ ID NO: 946956 - DNA, 15 bp, Homo sapiens
ggaccctgctgtttg

SEQ ID NO: 946957 - DNA, 15 bp, Homo sapiens
gaccctgctgtttgt

SEQ ID NO: 946958 - DNA, 15 bp, Homo sapiens
accctgctgtttgtc

SEQ ID NO: 946959 - DNA, 15 bp, Homo sapiens
ccctgctgtttgtct

SEQ ID NO: 946960 - DNA, 15 bp, Homo sapiens
cctgctgtttgtctc

SEQ ID NO: 946961 - DNA, 15 bp, Homo sapiens
ctgctgtttgtctcc

SEQ ID NO: 946962 - DNA, 15 bp, Homo sapiens
tgctgtttgtctcct

SEQ ID NO: 946963 - DNA, 15 bp, Homo sapiens
gctgtttgtctcctg

SEQ ID NO: 946964 - DNA, 15 bp, Homo sapiens
ctgtttgtctcctgc

SEQ ID NO: 946965 - DNA, 15 bp, Homo sapiens
tgtttgtctcctgct

SEQ ID NO: 946966 - DNA, 15 bp, Homo sapiens
gtttgtctcctgctc

SEQ ID NO: 946967 - DNA, 15 bp, Homo sapiens
tttgtctcctgctcc

SEQ ID NO: 946968 - DNA, 15 bp, Homo sapiens
ttgtctcctgctcca

SEQ ID NO: 946969 - DNA, 15 bp, Homo sapiens
tgtctcctgctccat

SEQ ID NO: 946970 - DNA, 15 bp, Homo sapiens
gtctcctgctccatc

SEQ ID NO: 946971 - DNA, 15 bp, Homo sapiens
tctcctgctccatcc

SEQ ID NO: 946972 - DNA, 15 bp, Homo sapiens
ctcctgctccatcct

SEQ ID NO: 946973 - DNA, 15 bp, Homo sapiens
tcctgctccatcctc

SEQ ID NO: 946974 - DNA, 15 bp, Homo sapiens
cctgctccatcctcc

SEQ ID NO: 946975 - DNA, 15 bp, Homo sapiens
ctgctccatcctccc

SEQ ID NO: 946976 - DNA, 15 bp, Homo sapiens
tgctccatcctcccc

SEQ ID NO: 946977 - DNA, 15 bp, Homo sapiens
gctccatcctccccc

SEQ ID NO: 946978 - DNA, 15 bp, Homo sapiens
ctccatcctccccca

SEQ ID NO: 946979 - DNA, 15 bp, Homo sapiens
tccatcctcccccat

SEQ ID NO: 946980 - DNA, 15 bp, Homo sapiens
ccatcctcccccatc

SEQ ID NO: 946981 - DNA, 15 bp, Homo sapiens
catcctcccccatca

SEQ ID NO: 946982 - DNA, 15 bp, Homo sapiens
atcctcccccatcac

SEQ ID NO: 946983 - DNA, 15 bp, Homo sapiens
tcctcccccatcact

SEQ ID NO: 946984 - DNA, 15 bp, Homo sapiens
cctcccccatcactt

SEQ ID NO: 946985 - DNA, 15 bp, Homo sapiens
ctcccccatcactta

SEQ ID NO: 946986 - DNA, 15 bp, Homo sapiens
tcccccatcacttag

SEQ ID NO: 946987 - DNA, 15 bp, Homo sapiens
cccccatcacttagg

SEQ ID NO: 946988 - DNA, 15 bp, Homo sapiens
ccccatcacttaggc

SEQ ID NO: 946989 - DNA, 15 bp, Homo sapiens
cccatcacttaggca

SEQ ID NO: 946990 - DNA, 15 bp, Homo sapiens
ccatcacttaggcaa

SEQ ID NO: 946991 - DNA, 15 bp, Homo sapiens
catcacttaggcaac

SEQ ID NO: 946992 - DNA, 15 bp, Homo sapiens
atcacttaggcaacc

SEQ ID NO: 946993 - DNA, 15 bp, Homo sapiens
tcacttaggcaaccc

SEQ ID NO: 946994 - DNA, 15 bp, Homo sapiens
cacttaggcaaccct

SEQ ID NO: 946995 - DNA, 15 bp, Homo sapiens
acttaggcaacccta

SEQ ID NO: 946996 - DNA, 15 bp, Homo sapiens
cttaggcaaccctaa

SEQ ID NO: 946997 - DNA, 15 bp, Homo sapiens
ttaggcaaccctaag

SEQ ID NO: 946998 - DNA, 15 bp, Homo sapiens
taggcaaccctaagg

SEQ ID NO: 946999 - DNA, 15 bp, Homo sapiens
aggcaaccctaaggt

SEQ ID NO: 947000 - DNA, 15 bp, Homo sapiens
ggcaaccctaaggtc

SEQ ID NO: 947001 - DNA, 15 bp, Homo sapiens
gcaaccctaaggtca

SEQ ID NO: 947002 - DNA, 15 bp, Homo sapiens
caaccctaaggtcat

SEQ ID NO: 947003 - DNA, 15 bp, Homo sapiens
aaccctaaggtcatc

SEQ ID NO: 947004 - DNA, 15 bp, Homo sapiens
accctaaggtcatct

SEQ ID NO: 947005 - DNA, 15 bp, Homo sapiens
ccctaaggtcatctt

SEQ ID NO: 947006 - DNA, 15 bp, Homo sapiens
cctaaggtcatcttc

SEQ ID NO: 947007 - DNA, 15 bp, Homo sapiens
ctaaggtcatcttcc

SEQ ID NO: 947008 - DNA, 15 bp, Homo sapiens
taaggtcatcttcct

SEQ ID NO: 947009 - DNA, 15 bp, Homo sapiens
aaggtcatcttcctc

SEQ ID NO: 947010 - DNA, 15 bp, Homo sapiens
aggtcatcttcctca

SEQ ID NO: 947011 - DNA, 15 bp, Homo sapiens
ggtcatcttcctcac

SEQ ID NO: 947012 - DNA, 15 bp, Homo sapiens
gtcatcttcctcacc

SEQ ID NO: 947013 - DNA, 15 bp, Homo sapiens
tcatcttcctcacct

SEQ ID NO: 947014 - DNA, 15 bp, Homo sapiens
catcttcctcacctt

SEQ ID NO: 947015 - DNA, 15 bp, Homo sapiens
atcttcctcaccttc

SEQ ID NO: 947016 - DNA, 15 bp, Homo sapiens
tcttcctcaccttct

SEQ ID NO: 947017 - DNA, 15 bp, Homo sapiens
cttcctcaccttctt

SEQ ID NO: 947018 - DNA, 15 bp, Homo sapiens
ttcctcaccttcttt

SEQ ID NO: 947019 - DNA, 15 bp, Homo sapiens
tcctcaccttctttc

SEQ ID NO: 947020 - DNA, 15 bp, Homo sapiens
cctcaccttctttcc

SEQ ID NO: 947021 - DNA, 15 bp, Homo sapiens
ctcaccttctttcct

SEQ ID NO: 947022 - DNA, 15 bp, Homo sapiens
tcaccttctttcctg

SEQ ID NO: 947023 - DNA, 15 bp, Homo sapiens
caccttctttcctga

SEQ ID NO: 947024 - DNA, 15 bp, Homo sapiens
accttctttcctgat

SEQ ID NO: 947025 - DNA, 15 bp, Homo sapiens
ccttctttcctgata

SEQ ID NO: 947026 - DNA, 15 bp, Homo sapiens
cttctttcctgataa

SEQ ID NO: 947027 - DNA, 15 bp, Homo sapiens
ttctttcctgataag

SEQ ID NO: 947028 - DNA, 15 bp, Homo sapiens
tctttcctgataaga

SEQ ID NO: 947029 - DNA, 15 bp, Homo sapiens
ctttcctgataagaa

SEQ ID NO: 947030 - DNA, 15 bp, Homo sapiens
tttcctgataagaac

SEQ ID NO: 947031 - DNA, 15 bp, Homo sapiens
ttcctgataagaact

SEQ ID NO: 947032 - DNA, 15 bp, Homo sapiens
tcctgataagaactt

SEQ ID NO: 947033 - DNA, 15 bp, Homo sapiens
cctgataagaacttt

SEQ ID NO: 947034 - DNA, 15 bp, Homo sapiens
ctgataagaactttg

SEQ ID NO: 947035 - DNA, 15 bp, Homo sapiens
tgataagaactttga

SEQ ID NO: 947036 - DNA, 15 bp, Homo sapiens
gataagaactttgag

SEQ ID NO: 947037 - DNA, 15 bp, Homo sapiens
ataagaactttgaga

SEQ ID NO: 947038 - DNA, 15 bp, Homo sapiens
taagaactttgagaa

SEQ ID NO: 947039 - DNA, 15 bp, Homo sapiens
aagaactttgagaag

SEQ ID NO: 947040 - DNA, 15 bp, Homo sapiens
agaactttgagaagt

SEQ ID NO: 947041 - DNA, 15 bp, Homo sapiens
gaactttgagaagtt

SEQ ID NO: 947042 - DNA, 15 bp, Homo sapiens
aactttgagaagttc

SEQ ID NO: 947043 - DNA, 15 bp, Homo sapiens
actttgagaagttcc

SEQ ID NO: 947044 - DNA, 15 bp, Homo sapiens
ctttgagaagttcct

SEQ ID NO: 947045 - DNA, 15 bp, Homo sapiens
tttgagaagttcctg

SEQ ID NO: 947046 - DNA, 15 bp, Homo sapiens
ttgagaagttcctgg

SEQ ID NO: 947047 - DNA, 15 bp, Homo sapiens
tgagaagttcctggt

SEQ ID NO: 947048 - DNA, 15 bp, Homo sapiens
gagaagttcctggta

SEQ ID NO: 947049 - DNA, 15 bp, Homo sapiens
agaagttcctggtaa

SEQ ID NO: 947050 - DNA, 15 bp, Homo sapiens
gaagttcctggtaaa

SEQ ID NO: 947051 - DNA, 15 bp, Homo sapiens
aagttcctggtaaat

SEQ ID NO: 947052 - DNA, 15 bp, Homo sapiens
agttcctggtaaata

SEQ ID NO: 947053 - DNA, 15 bp, Homo sapiens
gttcctggtaaataa

SEQ ID NO: 947054 - DNA, 15 bp, Homo sapiens
ttcctggtaaataat

SEQ ID NO: 947055 - DNA, 15 bp, Homo sapiens
tcctggtaaataata

SEQ ID NO: 947056 - DNA, 15 bp, Homo sapiens
cctggtaaataatac

SEQ ID NO: 947057 - DNA, 15 bp, Homo sapiens
ctggtaaataatact

SEQ ID NO: 947058 - DNA, 15 bp, Homo sapiens
tggtaaataatactt

SEQ ID NO: 947059 - DNA, 15 bp, Homo sapiens
ggtaaataatacttt

SEQ ID NO: 947060 - DNA, 15 bp, Homo sapiens
gtaaataatactttt

SEQ ID NO: 947061 - DNA, 15 bp, Homo sapiens
taaataatacttttc

SEQ ID NO: 947062 - DNA, 15 bp, Homo sapiens
aaataatacttttca

SEQ ID NO: 947063 - DNA, 15 bp, Homo sapiens
aataatacttttcaa

SEQ ID NO: 947064 - DNA, 15 bp, Homo sapiens
ataatacttttcaat

SEQ ID NO: 947065 - DNA, 15 bp, Homo sapiens
taatacttttcaata

SEQ ID NO: 947066 - DNA, 15 bp, Homo sapiens
aatacttttcaataa

SEQ ID NO: 947067 - DNA, 15 bp, Homo sapiens
atacttttcaataat

SEQ ID NO: 947068 - DNA, 15 bp, Homo sapiens
tacttttcaataatg

SEQ ID NO: 947069 - DNA, 15 bp, Homo sapiens
acttttcaataatgt

SEQ ID NO: 947070 - DNA, 15 bp, Homo sapiens
cttttcaataatgtt

SEQ ID NO: 947071 - DNA, 15 bp, Homo sapiens
ttttcaataatgtta

SEQ ID NO: 947072 - DNA, 15 bp, Homo sapiens
tttcaataatgttat

SEQ ID NO: 947073 - DNA, 15 bp, Homo sapiens
ttcaataatgttatc

SEQ ID NO: 947074 - DNA, 15 bp, Homo sapiens
tcaataatgttatct

SEQ ID NO: 947075 - DNA, 15 bp, Homo sapiens
caataatgttatcta

SEQ ID NO: 947076 - DNA, 15 bp, Homo sapiens
aataatgttatctaa

SEQ ID NO: 947077 - DNA, 15 bp, Homo sapiens
ataatgttatctaat

SEQ ID NO: 947078 - DNA, 15 bp, Homo sapiens
taatgttatctaata

SEQ ID NO: 947079 - DNA, 15 bp, Homo sapiens
aatgttatctaataa

SEQ ID NO: 947080 - DNA, 15 bp, Homo sapiens
atgttatctaataat

SEQ ID NO: 947081 - DNA, 15 bp, Homo sapiens
tgttatctaataata

SEQ ID NO: 947082 - DNA, 15 bp, Homo sapiens
gttatctaataataa

SEQ ID NO: 947083 - DNA, 15 bp, Homo sapiens
ttatctaataataat

SEQ ID NO: 947084 - DNA, 15 bp, Homo sapiens
tatctaataataatg

SEQ ID NO: 947085 - DNA, 15 bp, Homo sapiens
atctaataataatga

SEQ ID NO: 947086 - DNA, 15 bp, Homo sapiens
tctaataataatgat

SEQ ID NO: 947087 - DNA, 15 bp, Homo sapiens
ctaataataatgata

SEQ ID NO: 947088 - DNA, 15 bp, Homo sapiens
taataataatgatac

SEQ ID NO: 947089 - DNA, 15 bp, Homo sapiens
aataataatgataca

SEQ ID NO: 947090 - DNA, 15 bp, Homo sapiens
ataataatgatacat

SEQ ID NO: 947091 - DNA, 15 bp, Homo sapiens
taataatgatacata

SEQ ID NO: 947092 - DNA, 15 bp, Homo sapiens
aataatgatacatat

SEQ ID NO: 947093 - DNA, 15 bp, Homo sapiens
ataatgatacatata

SEQ ID NO: 947094 - DNA, 15 bp, Homo sapiens
taatgatacatatag

SEQ ID NO: 947095 - DNA, 15 bp, Homo sapiens
aatgatacatatagc

SEQ ID NO: 947096 - DNA, 15 bp, Homo sapiens
atgatacatatagct

SEQ ID NO: 947097 - DNA, 15 bp, Homo sapiens
tgatacatatagctc

SEQ ID NO: 947098 - DNA, 15 bp, Homo sapiens
gatacatatagctct

SEQ ID NO: 947099 - DNA, 15 bp, Homo sapiens
atacatatagctcta

SEQ ID NO: 947100 - DNA, 15 bp, Homo sapiens
tacatatagctctat

SEQ ID NO: 947101 - DNA, 15 bp, Homo sapiens
acatatagctctatg

SEQ ID NO: 947102 - DNA, 15 bp, Homo sapiens
catatagctctatgt

SEQ ID NO: 947103 - DNA, 15 bp, Homo sapiens
atatagctctatgta

SEQ ID NO: 947104 - DNA, 15 bp, Homo sapiens
tatagctctatgtat

SEQ ID NO: 947105 - DNA, 15 bp, Homo sapiens
atagctctatgtata

SEQ ID NO: 947106 - DNA, 15 bp, Homo sapiens
tagctctatgtataa

SEQ ID NO: 947107 - DNA, 15 bp, Homo sapiens
agctctatgtataat

SEQ ID NO: 947108 - DNA, 15 bp, Homo sapiens
gctctatgtataatc

SEQ ID NO: 947109 - DNA, 15 bp, Homo sapiens
ctctatgtataatct

SEQ ID NO: 947110 - DNA, 15 bp, Homo sapiens
tctatgtataatctg

SEQ ID NO: 947111 - DNA, 15 bp, Homo sapiens
ctatgtataatctgg

SEQ ID NO: 947112 - DNA, 15 bp, Homo sapiens
tatgtataatctgga

SEQ ID NO: 947113 - DNA, 15 bp, Homo sapiens
atgtataatctggat

SEQ ID NO: 947114 - DNA, 15 bp, Homo sapiens
tgtataatctggata

SEQ ID NO: 947115 - DNA, 15 bp, Homo sapiens
gtataatctggatac

SEQ ID NO: 947116 - DNA, 15 bp, Homo sapiens
tataatctggatacc

SEQ ID NO: 947117 - DNA, 15 bp, Homo sapiens
ataatctggatacca

SEQ ID NO: 947118 - DNA, 15 bp, Homo sapiens
taatctggataccag

SEQ ID NO: 947119 - DNA, 15 bp, Homo sapiens
aatctggataccagg

SEQ ID NO: 947120 - DNA, 15 bp, Homo sapiens
atctggataccaggt

SEQ ID NO: 947121 - DNA, 15 bp, Homo sapiens
tctggataccaggtg

SEQ ID NO: 947122 - DNA, 15 bp, Homo sapiens
ctggataccaggtgt

SEQ ID NO: 947123 - DNA, 15 bp, Homo sapiens
tggataccaggtgtc

SEQ ID NO: 947124 - DNA, 15 bp, Homo sapiens
ggataccaggtgtca

SEQ ID NO: 947125 - DNA, 15 bp, Homo sapiens
gataccaggtgtcaa

SEQ ID NO: 947126 - DNA, 15 bp, Homo sapiens
ataccaggtgtcaaa

SEQ ID NO: 947127 - DNA, 15 bp, Homo sapiens
taccaggtgtcaaag

SEQ ID NO: 947128 - DNA, 15 bp, Homo sapiens
accaggtgtcaaaga

SEQ ID NO: 947129 - DNA, 15 bp, Homo sapiens
ccaggtgtcaaagac

SEQ ID NO: 947130 - DNA, 15 bp, Homo sapiens
caggtgtcaaagact

SEQ ID NO: 947131 - DNA, 15 bp, Homo sapiens
aggtgtcaaagactt

SEQ ID NO: 947132 - DNA, 15 bp, Homo sapiens
ggtgtcaaagacttc

SEQ ID NO: 947133 - DNA, 15 bp, Homo sapiens
gtgtcaaagacttct

SEQ ID NO: 947134 - DNA, 15 bp, Homo sapiens
tgtcaaagacttcta

SEQ ID NO: 947135 - DNA, 15 bp, Homo sapiens
gtcaaagacttctac

SEQ ID NO: 947136 - DNA, 15 bp, Homo sapiens
tcaaagacttctact

SEQ ID NO: 947137 - DNA, 15 bp, Homo sapiens
caaagacttctactt

SEQ ID NO: 947138 - DNA, 15 bp, Homo sapiens
aaagacttctacttc

SEQ ID NO: 947139 - DNA, 15 bp, Homo sapiens
aagacttctacttct

SEQ ID NO: 947140 - DNA, 15 bp, Homo sapiens
agacttctacttctt

SEQ ID NO: 947141 - DNA, 15 bp, Homo sapiens
gacttctacttcttt

SEQ ID NO: 947142 - DNA, 15 bp, Homo sapiens
acttctacttcttta

SEQ ID NO: 947143 - DNA, 15 bp, Homo sapiens
cttctacttctttaa

SEQ ID NO: 947144 - DNA, 15 bp, Homo sapiens
ttctacttctttaat

SEQ ID NO: 947145 - DNA, 15 bp, Homo sapiens
tctacttctttaatt

SEQ ID NO: 947146 - DNA, 15 bp, Homo sapiens
ctacttctttaatta

SEQ ID NO: 947147 - DNA, 15 bp, Homo sapiens
tacttctttaattat

SEQ ID NO: 947148 - DNA, 15 bp, Homo sapiens
acttctttaattatc

SEQ ID NO: 947149 - DNA, 15 bp, Homo sapiens
cttctttaattatca

SEQ ID NO: 947150 - DNA, 15 bp, Homo sapiens
ttctttaattatcac

SEQ ID NO: 947151 - DNA, 15 bp, Homo sapiens
tctttaattatcaca

SEQ ID NO: 947152 - DNA, 15 bp, Homo sapiens
ctttaattatcacaa

SEQ ID NO: 947153 - DNA, 15 bp, Homo sapiens
tttaattatcacaat

SEQ ID NO: 947154 - DNA, 15 bp, Homo sapiens
ttaattatcacaatt

SEQ ID NO: 947155 - DNA, 15 bp, Homo sapiens
taattatcacaatta

SEQ ID NO: 947156 - DNA, 15 bp, Homo sapiens
aattatcacaattac

SEQ ID NO: 947157 - DNA, 15 bp, Homo sapiens
attatcacaattact

SEQ ID NO: 947158 - DNA, 15 bp, Homo sapiens
ttatcacaattactc

SEQ ID NO: 947159 - DNA, 15 bp, Homo sapiens
tatcacaattactct

SEQ ID NO: 947160 - DNA, 15 bp, Homo sapiens
atcacaattactcta

SEQ ID NO: 947161 - DNA, 15 bp, Homo sapiens
tcacaattactctat

SEQ ID NO: 947162 - DNA, 15 bp, Homo sapiens
cacaattactctata

SEQ ID NO: 947163 - DNA, 15 bp, Homo sapiens
acaattactctataa

SEQ ID NO: 947164 - DNA, 15 bp, Homo sapiens
caattactctataag

SEQ ID NO: 947165 - DNA, 15 bp, Homo sapiens
aattactctataagg

SEQ ID NO: 947166 - DNA, 15 bp, Homo sapiens
attactctataaggt

SEQ ID NO: 947167 - DNA, 15 bp, Homo sapiens
ttactctataaggta

SEQ ID NO: 947168 - DNA, 15 bp, Homo sapiens
tactctataaggtaa

SEQ ID NO: 947169 - DNA, 15 bp, Homo sapiens
actctataaggtaag

SEQ ID NO: 947170 - DNA, 15 bp, Homo sapiens
ctctataaggtaagt

SEQ ID NO: 947171 - DNA, 15 bp, Homo sapiens
tctataaggtaagta

SEQ ID NO: 947172 - DNA, 15 bp, Homo sapiens
ctataaggtaagtat

SEQ ID NO: 947173 - DNA, 15 bp, Homo sapiens
tataaggtaagtata

SEQ ID NO: 947174 - DNA, 15 bp, Homo sapiens
ataaggtaagtataa

SEQ ID NO: 947175 - DNA, 15 bp, Homo sapiens
taaggtaagtataaa

SEQ ID NO: 947176 - DNA, 15 bp, Homo sapiens
aaggtaagtataaat

SEQ ID NO: 947177 - DNA, 15 bp, Homo sapiens
aggtaagtataaata

SEQ ID NO: 947178 - DNA, 15 bp, Homo sapiens
ggtaagtataaatat

SEQ ID NO: 947179 - DNA, 15 bp, Homo sapiens
gtaagtataaatata

SEQ ID NO: 947180 - DNA, 15 bp, Homo sapiens
taagtataaatatac

SEQ ID NO: 947181 - DNA, 15 bp, Homo sapiens
aagtataaatatact

SEQ ID NO: 947182 - DNA, 15 bp, Homo sapiens
agtataaatatactc

SEQ ID NO: 947183 - DNA, 15 bp, Homo sapiens
gtataaatatactca

SEQ ID NO: 947184 - DNA, 15 bp, Homo sapiens
tataaatatactcat

SEQ ID NO: 947185 - DNA, 15 bp, Homo sapiens
ataaatatactcatt

SEQ ID NO: 947186 - DNA, 15 bp, Homo sapiens
taaatatactcatta

SEQ ID NO: 947187 - DNA, 15 bp, Homo sapiens
aaatatactcattat

SEQ ID NO: 947188 - DNA, 15 bp, Homo sapiens
aatatactcattata

SEQ ID NO: 947189 - DNA, 15 bp, Homo sapiens
atatactcattataa

SEQ ID NO: 947190 - DNA, 15 bp, Homo sapiens
tatactcattataaa

SEQ ID NO: 947191 - DNA, 15 bp, Homo sapiens
atactcattataaaa

SEQ ID NO: 947192 - DNA, 15 bp, Homo sapiens
tactcattataaaaa

SEQ ID NO: 947193 - DNA, 15 bp, Homo sapiens
actcattataaaaac

SEQ ID NO: 947194 - DNA, 15 bp, Homo sapiens
ctcattataaaaacg

SEQ ID NO: 947195 - DNA, 15 bp, Homo sapiens
tcattataaaaacgg

SEQ ID NO: 947196 - DNA, 15 bp, Homo sapiens
cattataaaaacggc

SEQ ID NO: 947197 - DNA, 15 bp, Homo sapiens
attataaaaacggca

SEQ ID NO: 947198 - DNA, 15 bp, Homo sapiens
ttataaaaacggcaa

SEQ ID NO: 947199 - DNA, 15 bp, Homo sapiens
tataaaaacggcaaa

SEQ ID NO: 947200 - DNA, 15 bp, Homo sapiens
ataaaaacggcaaaa

SEQ ID NO: 947201 - DNA, 15 bp, Homo sapiens
taaaaacggcaaaac

SEQ ID NO: 947202 - DNA, 15 bp, Homo sapiens
aaaaacggcaaaact

SEQ ID NO: 947203 - DNA, 15 bp, Homo sapiens
aaaacggcaaaactg

SEQ ID NO: 947204 - DNA, 15 bp, Homo sapiens
aaacggcaaaactga

SEQ ID NO: 947205 - DNA, 15 bp, Homo sapiens
aacggcaaaactgag

SEQ ID NO: 947206 - DNA, 15 bp, Homo sapiens
acggcaaaactgagg

SEQ ID NO: 947207 - DNA, 15 bp, Homo sapiens
cggcaaaactgaggc

SEQ ID NO: 947208 - DNA, 15 bp, Homo sapiens
ggcaaaactgaggct

SEQ ID NO: 947209 - DNA, 15 bp, Homo sapiens
gcaaaactgaggctc

SEQ ID NO: 947210 - DNA, 15 bp, Homo sapiens
caaaactgaggctca

SEQ ID NO: 947211 - DNA, 15 bp, Homo sapiens
aactgaggctcaaga

SEQ ID NO: 947212 - DNA, 15 bp, Homo sapiens
actgaggctcaagag

SEQ ID NO: 947213 - DNA, 15 bp, Homo sapiens
ctgaggctcaagaga

SEQ ID NO: 947214 - DNA, 15 bp, Homo sapiens
tgaggctcaagagag

SEQ ID NO: 947215 - DNA, 15 bp, Homo sapiens
gaggctcaagagaga

SEQ ID NO: 947216 - DNA, 15 bp, Homo sapiens
aggctcaagagagat

SEQ ID NO: 947217 - DNA, 15 bp, Homo sapiens
ggctcaagagagata

SEQ ID NO: 947218 - DNA, 15 bp, Homo sapiens
gctcaagagagatat

SEQ ID NO: 947219 - DNA, 15 bp, Homo sapiens
ctcaagagagatatg

SEQ ID NO: 947220 - DNA, 15 bp, Homo sapiens
tcaagagagatatga

SEQ ID NO: 947221 - DNA, 15 bp, Homo sapiens
caagagagatatgat

SEQ ID NO: 947222 - DNA, 15 bp, Homo sapiens
aagagagatatgatt

SEQ ID NO: 947223 - DNA, 15 bp, Homo sapiens
agagagatatgattt

SEQ ID NO: 947224 - DNA, 15 bp, Homo sapiens
gagagatatgatttc

SEQ ID NO: 947225 - DNA, 15 bp, Homo sapiens
agagatatgatttcc

SEQ ID NO: 947226 - DNA, 15 bp, Homo sapiens
gagatatgatttccc

SEQ ID NO: 947227 - DNA, 15 bp, Homo sapiens
agatatgatttcccc

SEQ ID NO: 947228 - DNA, 15 bp, Homo sapiens
gatatgatttcccca

SEQ ID NO: 947229 - DNA, 15 bp, Homo sapiens
atatgatttccccag

SEQ ID NO: 947230 - DNA, 15 bp, Homo sapiens
tatgatttccccagt

SEQ ID NO: 947231 - DNA, 15 bp, Homo sapiens
atgatttccccagtg

SEQ ID NO: 947232 - DNA, 15 bp, Homo sapiens
tgatttccccagtgt

SEQ ID NO: 947233 - DNA, 15 bp, Homo sapiens
gatttccccagtgtc

SEQ ID NO: 947234 - DNA, 15 bp, Homo sapiens
atttccccagtgtca

SEQ ID NO: 947235 - DNA, 15 bp, Homo sapiens
tttccccagtgtcat

SEQ ID NO: 947236 - DNA, 15 bp, Homo sapiens
ttccccagtgtcata

SEQ ID NO: 947237 - DNA, 15 bp, Homo sapiens
tccccagtgtcatac

SEQ ID NO: 947238 - DNA, 15 bp, Homo sapiens
ccccagtgtcataca

SEQ ID NO: 947239 - DNA, 15 bp, Homo sapiens
cccagtgtcatacag

SEQ ID NO: 947240 - DNA, 15 bp, Homo sapiens
ccagtgtcatacagc

SEQ ID NO: 947241 - DNA, 15 bp, Homo sapiens
cagtgtcatacagct

SEQ ID NO: 947242 - DNA, 15 bp, Homo sapiens
agtgtcatacagctc

SEQ ID NO: 947243 - DNA, 15 bp, Homo sapiens
gtgtcatacagctct

SEQ ID NO: 947244 - DNA, 15 bp, Homo sapiens
tgtcatacagctctt

SEQ ID NO: 947245 - DNA, 15 bp, Homo sapiens
gtcatacagctcttg

SEQ ID NO: 947246 - DNA, 15 bp, Homo sapiens
tcatacagctcttgc

SEQ ID NO: 947247 - DNA, 15 bp, Homo sapiens
catacagctcttgct

SEQ ID NO: 947248 - DNA, 15 bp, Homo sapiens
atacagctcttgctt

SEQ ID NO: 947249 - DNA, 15 bp, Homo sapiens
tacagctcttgcttg

SEQ ID NO: 947250 - DNA, 15 bp, Homo sapiens
acagctcttgcttgt

SEQ ID NO: 947251 - DNA, 15 bp, Homo sapiens
cagctcttgcttgtg

SEQ ID NO: 947252 - DNA, 15 bp, Homo sapiens
agctcttgcttgtgg

SEQ ID NO: 947253 - DNA, 15 bp, Homo sapiens
gctcttgcttgtggc

SEQ ID NO: 947254 - DNA, 15 bp, Homo sapiens
ctcttgcttgtggca

SEQ ID NO: 947255 - DNA, 15 bp, Homo sapiens
tcttgcttgtggcag

SEQ ID NO: 947256 - DNA, 15 bp, Homo sapiens
cttgcttgtggcaga

SEQ ID NO: 947257 - DNA, 15 bp, Homo sapiens
ttgcttgtggcagag

SEQ ID NO: 947258 - DNA, 15 bp, Homo sapiens
tgcttgtggcagagc

SEQ ID NO: 947259 - DNA, 15 bp, Homo sapiens
gcttgtggcagagct

SEQ ID NO: 947260 - DNA, 15 bp, Homo sapiens
cttgtggcagagcta

SEQ ID NO: 947261 - DNA, 15 bp, Homo sapiens
ttgtggcagagctaa

SEQ ID NO: 947262 - DNA, 15 bp, Homo sapiens
tgtggcagagctaag

SEQ ID NO: 947263 - DNA, 15 bp, Homo sapiens
gtggcagagctaaga

SEQ ID NO: 947264 - DNA, 15 bp, Homo sapiens
tggcagagctaagat

SEQ ID NO: 947265 - DNA, 15 bp, Homo sapiens
ggcagagctaagatt

SEQ ID NO: 947266 - DNA, 15 bp, Homo sapiens
gcagagctaagattc

SEQ ID NO: 947267 - DNA, 15 bp, Homo sapiens
cagagctaagattca

SEQ ID NO: 947268 - DNA, 15 bp, Homo sapiens
agagctaagattcaa

SEQ ID NO: 947269 - DNA, 15 bp, Homo sapiens
gagctaagattcaag

SEQ ID NO: 947270 - DNA, 15 bp, Homo sapiens
agctaagattcaagc

SEQ ID NO: 947271 - DNA, 15 bp, Homo sapiens
gctaagattcaagcc

SEQ ID NO: 947272 - DNA, 15 bp, Homo sapiens
ctaagattcaagccc

SEQ ID NO: 947273 - DNA, 15 bp, Homo sapiens
taagattcaagccca

SEQ ID NO: 947274 - DNA, 15 bp, Homo sapiens
aagattcaagcccac

SEQ ID NO: 947275 - DNA, 15 bp, Homo sapiens
agattcaagcccaca

SEQ ID NO: 947276 - DNA, 15 bp, Homo sapiens
gattcaagcccacat

SEQ ID NO: 947277 - DNA, 15 bp, Homo sapiens
attcaagcccacatc

SEQ ID NO: 947278 - DNA, 15 bp, Homo sapiens
ttcaagcccacatct

SEQ ID NO: 947279 - DNA, 15 bp, Homo sapiens
tcaagcccacatctc

SEQ ID NO: 947280 - DNA, 15 bp, Homo sapiens
caagcccacatctcg

SEQ ID NO: 947281 - DNA, 15 bp, Homo sapiens
aagcccacatctcgc

SEQ ID NO: 947282 - DNA, 15 bp, Homo sapiens
agcccacatctcgct

SEQ ID NO: 947283 - DNA, 15 bp, Homo sapiens
gcccacatctcgctt

SEQ ID NO: 947284 - DNA, 15 bp, Homo sapiens
cccacatctcgctta

SEQ ID NO: 947285 - DNA, 15 bp, Homo sapiens
ccacatctcgcttat

SEQ ID NO: 947286 - DNA, 15 bp, Homo sapiens
cacatctcgcttatt

SEQ ID NO: 947287 - DNA, 15 bp, Homo sapiens
acatctcgcttattc

SEQ ID NO: 947288 - DNA, 15 bp, Homo sapiens
catctcgcttattcc

SEQ ID NO: 947289 - DNA, 15 bp, Homo sapiens
atctcgcttattcca

SEQ ID NO: 947290 - DNA, 15 bp, Homo sapiens
tctcgcttattccaa

SEQ ID NO: 947291 - DNA, 15 bp, Homo sapiens
ctcgcttattccaaa

SEQ ID NO: 947292 - DNA, 15 bp, Homo sapiens
tcgcttattccaaag

SEQ ID NO: 947293 - DNA, 15 bp, Homo sapiens
cgcttattccaaagt

SEQ ID NO: 947294 - DNA, 15 bp, Homo sapiens
gcttattccaaagtc

SEQ ID NO: 947295 - DNA, 15 bp, Homo sapiens
cttattccaaagtca

SEQ ID NO: 947296 - DNA, 15 bp, Homo sapiens
ttattccaaagtcac

SEQ ID NO: 947297 - DNA, 15 bp, Homo sapiens
tattccaaagtcact

SEQ ID NO: 947298 - DNA, 15 bp, Homo sapiens
attccaaagtcactg

SEQ ID NO: 947299 - DNA, 15 bp, Homo sapiens
ttccaaagtcactgt

SEQ ID NO: 947300 - DNA, 15 bp, Homo sapiens
tccaaagtcactgtt

SEQ ID NO: 947301 - DNA, 15 bp, Homo sapiens
ccaaagtcactgttc

SEQ ID NO: 947302 - DNA, 15 bp, Homo sapiens
caaagtcactgttcc

SEQ ID NO: 947303 - DNA, 15 bp, Homo sapiens
aaagtcactgttcct

SEQ ID NO: 947304 - DNA, 15 bp, Homo sapiens
aagtcactgttcctg

SEQ ID NO: 947305 - DNA, 15 bp, Homo sapiens
agtcactgttcctgc

SEQ ID NO: 947306 - DNA, 15 bp, Homo sapiens
gtcactgttcctgcc

SEQ ID NO: 947307 - DNA, 15 bp, Homo sapiens
tcactgttcctgcca

SEQ ID NO: 947308 - DNA, 15 bp, Homo sapiens
cactgttcctgccac

SEQ ID NO: 947309 - DNA, 15 bp, Homo sapiens
actgttcctgccact

SEQ ID NO: 947310 - DNA, 15 bp, Homo sapiens
ctgttcctgccactt

SEQ ID NO: 947311 - DNA, 15 bp, Homo sapiens
tgttcctgccacttc

SEQ ID NO: 947312 - DNA, 15 bp, Homo sapiens
gttcctgccacttca

SEQ ID NO: 947313 - DNA, 15 bp, Homo sapiens
ttcctgccacttcac

SEQ ID NO: 947314 - DNA, 15 bp, Homo sapiens
tcctgccacttcaca

SEQ ID NO: 947315 - DNA, 15 bp, Homo sapiens
cctgccacttcacac

SEQ ID NO: 947316 - DNA, 15 bp, Homo sapiens
ctgccacttcacact

SEQ ID NO: 947317 - DNA, 15 bp, Homo sapiens
tgccacttcacactt

SEQ ID NO: 947318 - DNA, 15 bp, Homo sapiens
gccacttcacacttc

SEQ ID NO: 947319 - DNA, 15 bp, Homo sapiens
ccacttcacacttct

SEQ ID NO: 947320 - DNA, 15 bp, Homo sapiens
cacttcacacttctg

SEQ ID NO: 947321 - DNA, 15 bp, Homo sapiens
acttcacacttctgt

SEQ ID NO: 947322 - DNA, 15 bp, Homo sapiens
cttcacacttctgtc

SEQ ID NO: 947323 - DNA, 15 bp, Homo sapiens
ttcacacttctgtcc

SEQ ID NO: 947324 - DNA, 15 bp, Homo sapiens
tcacacttctgtccg

SEQ ID NO: 947325 - DNA, 15 bp, Homo sapiens
cacacttctgtccgt

SEQ ID NO: 947326 - DNA, 15 bp, Homo sapiens
acacttctgtccgtt

SEQ ID NO: 947327 - DNA, 15 bp, Homo sapiens
cacttctgtccgttc

SEQ ID NO: 947328 - DNA, 15 bp, Homo sapiens
acttctgtccgttcc

SEQ ID NO: 947329 - DNA, 15 bp, Homo sapiens
cttctgtccgttccc

SEQ ID NO: 947330 - DNA, 15 bp, Homo sapiens
ttctgtccgttcccc

SEQ ID NO: 947331 - DNA, 15 bp, Homo sapiens
tctgtccgttcccca

SEQ ID NO: 947332 - DNA, 15 bp, Homo sapiens
ctgtccgttccccac

SEQ ID NO: 947333 - DNA, 15 bp, Homo sapiens
tgtccgttccccacc

SEQ ID NO: 947334 - DNA, 15 bp, Homo sapiens
gtccgttccccaccc

SEQ ID NO: 947335 - DNA, 15 bp, Homo sapiens
tccgttccccaccct

SEQ ID NO: 947336 - DNA, 15 bp, Homo sapiens
ccgttccccaccctc

SEQ ID NO: 947337 - DNA, 15 bp, Homo sapiens
cgttccccaccctcc

SEQ ID NO: 947338 - DNA, 15 bp, Homo sapiens
gttccccaccctcct

SEQ ID NO: 947339 - DNA, 15 bp, Homo sapiens
ttccccaccctcctc

SEQ ID NO: 947340 - DNA, 15 bp, Homo sapiens
tccccaccctcctcc

SEQ ID NO: 947341 - DNA, 15 bp, Homo sapiens
ccccaccctcctccc

SEQ ID NO: 947342 - DNA, 15 bp, Homo sapiens
cccaccctcctccct

SEQ ID NO: 947343 - DNA, 15 bp, Homo sapiens
ccaccctcctccctt

SEQ ID NO: 947344 - DNA, 15 bp, Homo sapiens
caccctcctcccttt

SEQ ID NO: 947345 - DNA, 15 bp, Homo sapiens
accctcctccctttt

SEQ ID NO: 947346 - DNA, 15 bp, Homo sapiens
ccctcctcccttttc

SEQ ID NO: 947347 - DNA, 15 bp, Homo sapiens
cctcctcccttttcc

SEQ ID NO: 947348 - DNA, 15 bp, Homo sapiens
ctcctcccttttcca

SEQ ID NO: 947349 - DNA, 15 bp, Homo sapiens
tcctcccttttccac

SEQ ID NO: 947350 - DNA, 15 bp, Homo sapiens
cctcccttttccacc

SEQ ID NO: 947351 - DNA, 15 bp, Homo sapiens
ctcccttttccaccc

SEQ ID NO: 947352 - DNA, 15 bp, Homo sapiens
tcccttttccacccc

SEQ ID NO: 947353 - DNA, 15 bp, Homo sapiens
cccttttccacccca

SEQ ID NO: 947354 - DNA, 15 bp, Homo sapiens
ccttttccaccccaa

SEQ ID NO: 947355 - DNA, 15 bp, Homo sapiens
cttttccaccccaac

SEQ ID NO: 947356 - DNA, 15 bp, Homo sapiens
ttttccaccccaacc

SEQ ID NO: 947357 - DNA, 15 bp, Homo sapiens
tttccaccccaacca

SEQ ID NO: 947358 - DNA, 15 bp, Homo sapiens
ttccaccccaaccaa

SEQ ID NO: 947359 - DNA, 15 bp, Homo sapiens
tccaccccaaccaac

SEQ ID NO: 947360 - DNA, 15 bp, Homo sapiens
ccaccccaaccaacc

SEQ ID NO: 947361 - DNA, 15 bp, Homo sapiens
caccccaaccaaccc

SEQ ID NO: 947362 - DNA, 15 bp, Homo sapiens
accccaaccaacccc

SEQ ID NO: 947363 - DNA, 15 bp, Homo sapiens
ccccaaccaacccct

SEQ ID NO: 947364 - DNA, 15 bp, Homo sapiens
cccaaccaacccctc

SEQ ID NO: 947365 - DNA, 15 bp, Homo sapiens
ccaaccaacccctcc

SEQ ID NO: 947366 - DNA, 15 bp, Homo sapiens
caaccaacccctccc

SEQ ID NO: 947367 - DNA, 15 bp, Homo sapiens
aaccaacccctccct

SEQ ID NO: 947368 - DNA, 15 bp, Homo sapiens
accaacccctccctc

SEQ ID NO: 947369 - DNA, 15 bp, Homo sapiens
ccaacccctccctca

SEQ ID NO: 947370 - DNA, 15 bp, Homo sapiens
caacccctccctcac

SEQ ID NO: 947371 - DNA, 15 bp, Homo sapiens
aacccctccctcacc

SEQ ID NO: 947372 - DNA, 15 bp, Homo sapiens
acccctccctcacct

SEQ ID NO: 947373 - DNA, 15 bp, Homo sapiens
cccctccctcacctt

SEQ ID NO: 947374 - DNA, 15 bp, Homo sapiens
ccctccctcaccttc

SEQ ID NO: 947375 - DNA, 15 bp, Homo sapiens
cctccctcaccttcc

SEQ ID NO: 947376 - DNA, 15 bp, Homo sapiens
ctccctcaccttcca

SEQ ID NO: 947377 - DNA, 15 bp, Homo sapiens
tccctcaccttccac

SEQ ID NO: 947378 - DNA, 15 bp, Homo sapiens
ccctcaccttccacg

SEQ ID NO: 947379 - DNA, 15 bp, Homo sapiens
cctcaccttccacgt

SEQ ID NO: 947380 - DNA, 15 bp, Homo sapiens
ctcaccttccacgtg

SEQ ID NO: 947381 - DNA, 15 bp, Homo sapiens
tcaccttccacgtga

SEQ ID NO: 947382 - DNA, 15 bp, Homo sapiens
caccttccacgtgag

SEQ ID NO: 947383 - DNA, 15 bp, Homo sapiens
accttccacgtgagt

SEQ ID NO: 947384 - DNA, 15 bp, Homo sapiens
ccttccacgtgagtg

SEQ ID NO: 947385 - DNA, 15 bp, Homo sapiens
cttccacgtgagtgg

SEQ ID NO: 947386 - DNA, 15 bp, Homo sapiens
ttccacgtgagtggt

SEQ ID NO: 947387 - DNA, 15 bp, Homo sapiens
tccacgtgagtggtt

SEQ ID NO: 947388 - DNA, 15 bp, Homo sapiens
ccacgtgagtggttc

SEQ ID NO: 947389 - DNA, 15 bp, Homo sapiens
cacgtgagtggttct

SEQ ID NO: 947390 - DNA, 15 bp, Homo sapiens
acgtgagtggttctc

SEQ ID NO: 947391 - DNA, 15 bp, Homo sapiens
cgtgagtggttctca

SEQ ID NO: 947392 - DNA, 15 bp, Homo sapiens
gtgagtggttctcaa

SEQ ID NO: 947393 - DNA, 15 bp, Homo sapiens
tgagtggttctcaac

SEQ ID NO: 947394 - DNA, 15 bp, Homo sapiens
gagtggttctcaact

SEQ ID NO: 947395 - DNA, 15 bp, Homo sapiens
agtggttctcaactg

SEQ ID NO: 947396 - DNA, 15 bp, Homo sapiens
gtggttctcaactgt

SEQ ID NO: 947397 - DNA, 15 bp, Homo sapiens
tggttctcaactgta

SEQ ID NO: 947398 - DNA, 15 bp, Homo sapiens
ggttctcaactgtat

SEQ ID NO: 947399 - DNA, 15 bp, Homo sapiens
gttctcaactgtata

SEQ ID NO: 947400 - DNA, 15 bp, Homo sapiens
ttctcaactgtatat

SEQ ID NO: 947401 - DNA, 15 bp, Homo sapiens
tctcaactgtatatt

SEQ ID NO: 947402 - DNA, 15 bp, Homo sapiens
ctcaactgtatattc

SEQ ID NO: 947403 - DNA, 15 bp, Homo sapiens
tcaactgtatattcc

SEQ ID NO: 947404 - DNA, 15 bp, Homo sapiens
caactgtatattcca

SEQ ID NO: 947405 - DNA, 15 bp, Homo sapiens
aactgtatattccaa

SEQ ID NO: 947406 - DNA, 15 bp, Homo sapiens
actgtatattccaat

SEQ ID NO: 947407 - DNA, 15 bp, Homo sapiens
ctgtatattccaatt

SEQ ID NO: 947408 - DNA, 15 bp, Homo sapiens
tgtatattccaattt

SEQ ID NO: 947409 - DNA, 15 bp, Homo sapiens
gtatattccaatttc

SEQ ID NO: 947410 - DNA, 15 bp, Homo sapiens
tatattccaatttcc

SEQ ID NO: 947411 - DNA, 15 bp, Homo sapiens
atattccaatttccc

SEQ ID NO: 947412 - DNA, 15 bp, Homo sapiens
tattccaatttcccc

SEQ ID NO: 947413 - DNA, 15 bp, Homo sapiens
attccaatttcccca

SEQ ID NO: 947414 - DNA, 15 bp, Homo sapiens
ttccaatttccccag

SEQ ID NO: 947415 - DNA, 15 bp, Homo sapiens
tccaatttccccaga

SEQ ID NO: 947416 - DNA, 15 bp, Homo sapiens
ccaatttccccagaa

SEQ ID NO: 947417 - DNA, 15 bp, Homo sapiens
caatttccccagaaa

SEQ ID NO: 947418 - DNA, 15 bp, Homo sapiens
aatttccccagaaac

SEQ ID NO: 947419 - DNA, 15 bp, Homo sapiens
atttccccagaaact

SEQ ID NO: 947420 - DNA, 15 bp, Homo sapiens
tttccccagaaactc

SEQ ID NO: 947421 - DNA, 15 bp, Homo sapiens
ttccccagaaactct

SEQ ID NO: 947422 - DNA, 15 bp, Homo sapiens
tccccagaaactctt

SEQ ID NO: 947423 - DNA, 15 bp, Homo sapiens
ccccagaaactctta

SEQ ID NO: 947424 - DNA, 15 bp, Homo sapiens
cccagaaactcttaa

SEQ ID NO: 947425 - DNA, 15 bp, Homo sapiens
ccagaaactcttaaa

SEQ ID NO: 947426 - DNA, 15 bp, Homo sapiens
cagaaactcttaaaa

SEQ ID NO: 947427 - DNA, 15 bp, Homo sapiens
agaaactcttaaaaa

SEQ ID NO: 947428 - DNA, 15 bp, Homo sapiens
gaaactcttaaaaat

SEQ ID NO: 947429 - DNA, 15 bp, Homo sapiens
aaactcttaaaaatg

SEQ ID NO: 947430 - DNA, 15 bp, Homo sapiens
aactcttaaaaatgc

SEQ ID NO: 947431 - DNA, 15 bp, Homo sapiens
actcttaaaaatgct

SEQ ID NO: 947432 - DNA, 15 bp, Homo sapiens
ctcttaaaaatgcta

SEQ ID NO: 947433 - DNA, 15 bp, Homo sapiens
tcttaaaaatgctaa

SEQ ID NO: 947434 - DNA, 15 bp, Homo sapiens
cttaaaaatgctaat

SEQ ID NO: 947435 - DNA, 15 bp, Homo sapiens
ttaaaaatgctaata

SEQ ID NO: 947436 - DNA, 15 bp, Homo sapiens
taaaaatgctaatac

SEQ ID NO: 947437 - DNA, 15 bp, Homo sapiens
aaaaatgctaatacc

SEQ ID NO: 947438 - DNA, 15 bp, Homo sapiens
aaaatgctaataccc

SEQ ID NO: 947439 - DNA, 15 bp, Homo sapiens
aaatgctaataccca

SEQ ID NO: 947440 - DNA, 15 bp, Homo sapiens
aatgctaatacccag

SEQ ID NO: 947441 - DNA, 15 bp, Homo sapiens
atgctaatacccagc

SEQ ID NO: 947442 - DNA, 15 bp, Homo sapiens
tgctaatacccagcc

SEQ ID NO: 947443 - DNA, 15 bp, Homo sapiens
gctaatacccagccc

SEQ ID NO: 947444 - DNA, 15 bp, Homo sapiens
ctaatacccagcccc

SEQ ID NO: 947445 - DNA, 15 bp, Homo sapiens
taatacccagccccc

SEQ ID NO: 947446 - DNA, 15 bp, Homo sapiens
aatacccagccccca

SEQ ID NO: 947447 - DNA, 15 bp, Homo sapiens
atacccagcccccat

SEQ ID NO: 947448 - DNA, 15 bp, Homo sapiens
tacccagcccccatc

SEQ ID NO: 947449 - DNA, 15 bp, Homo sapiens
acccagcccccatca

SEQ ID NO: 947450 - DNA, 15 bp, Homo sapiens
cccagcccccatcat

SEQ ID NO: 947451 - DNA, 15 bp, Homo sapiens
ccagcccccatcatc

SEQ ID NO: 947452 - DNA, 15 bp, Homo sapiens
cagcccccatcatca

SEQ ID NO: 947453 - DNA, 15 bp, Homo sapiens
agcccccatcatcat

SEQ ID NO: 947454 - DNA, 15 bp, Homo sapiens
gcccccatcatcatc

SEQ ID NO: 947455 - DNA, 15 bp, Homo sapiens
cccccatcatcatca

SEQ ID NO: 947456 - DNA, 15 bp, Homo sapiens
ccccatcatcatcaa

SEQ ID NO: 947457 - DNA, 15 bp, Homo sapiens
cccatcatcatcaac

SEQ ID NO: 947458 - DNA, 15 bp, Homo sapiens
ccatcatcatcaacc

SEQ ID NO: 947459 - DNA, 15 bp, Homo sapiens
catcatcatcaaccc

SEQ ID NO: 947460 - DNA, 15 bp, Homo sapiens
atcatcatcaaccca

SEQ ID NO: 947461 - DNA, 15 bp, Homo sapiens
tcatcatcaacccag

SEQ ID NO: 947462 - DNA, 15 bp, Homo sapiens
catcatcaacccaga

SEQ ID NO: 947463 - DNA, 15 bp, Homo sapiens
atcatcaacccagaa

SEQ ID NO: 947464 - DNA, 15 bp, Homo sapiens
tcatcaacccagaag

SEQ ID NO: 947465 - DNA, 15 bp, Homo sapiens
catcaacccagaagg

SEQ ID NO: 947466 - DNA, 15 bp, Homo sapiens
atcaacccagaaggt

SEQ ID NO: 947467 - DNA, 15 bp, Homo sapiens
tcaacccagaaggtc

SEQ ID NO: 947468 - DNA, 15 bp, Homo sapiens
caacccagaaggtca

SEQ ID NO: 947469 - DNA, 15 bp, Homo sapiens
aacccagaaggtcag

SEQ ID NO: 947470 - DNA, 15 bp, Homo sapiens
acccagaaggtcaga

SEQ ID NO: 947471 - DNA, 15 bp, Homo sapiens
cccagaaggtcagat

SEQ ID NO: 947472 - DNA, 15 bp, Homo sapiens
ccagaaggtcagatt

SEQ ID NO: 947473 - DNA, 15 bp, Homo sapiens
cagaaggtcagattt

SEQ ID NO: 947474 - DNA, 15 bp, Homo sapiens
agaaggtcagattta

SEQ ID NO: 947475 - DNA, 15 bp, Homo sapiens
gaaggtcagatttaa

SEQ ID NO: 947476 - DNA, 15 bp, Homo sapiens
aaggtcagatttaat

SEQ ID NO: 947477 - DNA, 15 bp, Homo sapiens
aggtcagatttaatt

SEQ ID NO: 947478 - DNA, 15 bp, Homo sapiens
ggtcagatttaattg

SEQ ID NO: 947479 - DNA, 15 bp, Homo sapiens
gtcagatttaattgg

SEQ ID NO: 947480 - DNA, 15 bp, Homo sapiens
tcagatttaattggt

SEQ ID NO: 947481 - DNA, 15 bp, Homo sapiens
cagatttaattggtc

SEQ ID NO: 947482 - DNA, 15 bp, Homo sapiens
agatttaattggtcc

SEQ ID NO: 947483 - DNA, 15 bp, Homo sapiens
gatttaattggtccg

SEQ ID NO: 947484 - DNA, 15 bp, Homo sapiens
atttaattggtccgg

SEQ ID NO: 947485 - DNA, 15 bp, Homo sapiens
tttaattggtccgga

SEQ ID NO: 947486 - DNA, 15 bp, Homo sapiens
ttaattggtccggag

SEQ ID NO: 947487 - DNA, 15 bp, Homo sapiens
taattggtccggagt

SEQ ID NO: 947488 - DNA, 15 bp, Homo sapiens
aattggtccggagtg

SEQ ID NO: 947489 - DNA, 15 bp, Homo sapiens
attggtccggagtgg

SEQ ID NO: 947490 - DNA, 15 bp, Homo sapiens
ttggtccggagtggg

SEQ ID NO: 947491 - DNA, 15 bp, Homo sapiens
tggtccggagtggga

SEQ ID NO: 947492 - DNA, 15 bp, Homo sapiens
ggtccggagtgggac

SEQ ID NO: 947493 - DNA, 15 bp, Homo sapiens
gtccggagtgggacc

SEQ ID NO: 947494 - DNA, 15 bp, Homo sapiens
tccggagtgggaccc

SEQ ID NO: 947495 - DNA, 15 bp, Homo sapiens
ccggagtgggaccca

SEQ ID NO: 947496 - DNA, 15 bp, Homo sapiens
cggagtgggacccag

SEQ ID NO: 947497 - DNA, 15 bp, Homo sapiens
ggagtgggacccagt

SEQ ID NO: 947498 - DNA, 15 bp, Homo sapiens
gagtgggacccagtc

SEQ ID NO: 947499 - DNA, 15 bp, Homo sapiens
agtgggacccagtca

SEQ ID NO: 947500 - DNA, 15 bp, Homo sapiens
gtgggacccagtcac

SEQ ID NO: 947501 - DNA, 15 bp, Homo sapiens
tgggacccagtcacc

SEQ ID NO: 947502 - DNA, 15 bp, Homo sapiens
gggacccagtcacca

SEQ ID NO: 947503 - DNA, 15 bp, Homo sapiens
ggacccagtcaccag

SEQ ID NO: 947504 - DNA, 15 bp, Homo sapiens
gacccagtcaccagt

SEQ ID NO: 947505 - DNA, 15 bp, Homo sapiens
acccagtcaccagta

SEQ ID NO: 947506 - DNA, 15 bp, Homo sapiens
cccagtcaccagtat

SEQ ID NO: 947507 - DNA, 15 bp, Homo sapiens
ccagtcaccagtatc

SEQ ID NO: 947508 - DNA, 15 bp, Homo sapiens
cagtcaccagtatct

SEQ ID NO: 947509 - DNA, 15 bp, Homo sapiens
agtcaccagtatcta

SEQ ID NO: 947510 - DNA, 15 bp, Homo sapiens
gtcaccagtatctat

SEQ ID NO: 947511 - DNA, 15 bp, Homo sapiens
tcaccagtatctatt

SEQ ID NO: 947512 - DNA, 15 bp, Homo sapiens
caccagtatctatta

SEQ ID NO: 947513 - DNA, 15 bp, Homo sapiens
accagtatctattaa

SEQ ID NO: 947514 - DNA, 15 bp, Homo sapiens
ccagtatctattaaa

SEQ ID NO: 947515 - DNA, 15 bp, Homo sapiens
cagtatctattaaag

SEQ ID NO: 947516 - DNA, 15 bp, Homo sapiens
agtatctattaaagc

SEQ ID NO: 947517 - DNA, 15 bp, Homo sapiens
gtatctattaaagct

SEQ ID NO: 947518 - DNA, 15 bp, Homo sapiens
tatctattaaagctc

SEQ ID NO: 947519 - DNA, 15 bp, Homo sapiens
atctattaaagctcc

SEQ ID NO: 947520 - DNA, 15 bp, Homo sapiens
tctattaaagctccc

SEQ ID NO: 947521 - DNA, 15 bp, Homo sapiens
ctattaaagctcccc

SEQ ID NO: 947522 - DNA, 15 bp, Homo sapiens
tattaaagctcccca

SEQ ID NO: 947523 - DNA, 15 bp, Homo sapiens
attaaagctccccag

SEQ ID NO: 947524 - DNA, 15 bp, Homo sapiens
ttaaagctccccagg

SEQ ID NO: 947525 - DNA, 15 bp, Homo sapiens
taaagctccccaggt

SEQ ID NO: 947526 - DNA, 15 bp, Homo sapiens
aaagctccccaggtt

SEQ ID NO: 947527 - DNA, 15 bp, Homo sapiens
aagctccccaggttg

SEQ ID NO: 947528 - DNA, 15 bp, Homo sapiens
agctccccaggttgt

SEQ ID NO: 947529 - DNA, 15 bp, Homo sapiens
gctccccaggttgtt

SEQ ID NO: 947530 - DNA, 15 bp, Homo sapiens
ctccccaggttgttc

SEQ ID NO: 947531 - DNA, 15 bp, Homo sapiens
tccccaggttgttct

SEQ ID NO: 947532 - DNA, 15 bp, Homo sapiens
ccccaggttgttcta

SEQ ID NO: 947533 - DNA, 15 bp, Homo sapiens
cccaggttgttctaa

SEQ ID NO: 947534 - DNA, 15 bp, Homo sapiens
ccaggttgttctaat

SEQ ID NO: 947535 - DNA, 15 bp, Homo sapiens
caggttgttctaatg

SEQ ID NO: 947536 - DNA, 15 bp, Homo sapiens
aggttgttctaatgg

SEQ ID NO: 947537 - DNA, 15 bp, Homo sapiens
ggttgttctaatggg

SEQ ID NO: 947538 - DNA, 15 bp, Homo sapiens
gttgttctaatgggc

SEQ ID NO: 947539 - DNA, 15 bp, Homo sapiens
ttgttctaatgggcc

SEQ ID NO: 947540 - DNA, 15 bp, Homo sapiens
tgttctaatgggcct

SEQ ID NO: 947541 - DNA, 15 bp, Homo sapiens
gttctaatgggcctt

SEQ ID NO: 947542 - DNA, 15 bp, Homo sapiens
ttctaatgggccttc

SEQ ID NO: 947543 - DNA, 15 bp, Homo sapiens
tctaatgggccttct

SEQ ID NO: 947544 - DNA, 15 bp, Homo sapiens
ctaatgggccttcta

SEQ ID NO: 947545 - DNA, 15 bp, Homo sapiens
taatgggccttctag

SEQ ID NO: 947546 - DNA, 15 bp, Homo sapiens
aatgggccttctagg

SEQ ID NO: 947547 - DNA, 15 bp, Homo sapiens
atgggccttctaggc

SEQ ID NO: 947548 - DNA, 15 bp, Homo sapiens
tgggccttctaggct

SEQ ID NO: 947549 - DNA, 15 bp, Homo sapiens
gggccttctaggctg

SEQ ID NO: 947550 - DNA, 15 bp, Homo sapiens
ggccttctaggctga

SEQ ID NO: 947551 - DNA, 15 bp, Homo sapiens
gccttctaggctgag

SEQ ID NO: 947552 - DNA, 15 bp, Homo sapiens
ccttctaggctgaga

SEQ ID NO: 947553 - DNA, 15 bp, Homo sapiens
cttctaggctgagaa

SEQ ID NO: 947554 - DNA, 15 bp, Homo sapiens
ttctaggctgagaaa

SEQ ID NO: 947555 - DNA, 15 bp, Homo sapiens
tctaggctgagaaac

SEQ ID NO: 947556 - DNA, 15 bp, Homo sapiens
ctaggctgagaaaca

SEQ ID NO: 947557 - DNA, 15 bp, Homo sapiens
taggctgagaaacac

SEQ ID NO: 947558 - DNA, 15 bp, Homo sapiens
aggctgagaaacact

SEQ ID NO: 947559 - DNA, 15 bp, Homo sapiens
ggctgagaaacactg

SEQ ID NO: 947560 - DNA, 15 bp, Homo sapiens
gctgagaaacactgc

SEQ ID NO: 947561 - DNA, 15 bp, Homo sapiens
ctgagaaacactgct

SEQ ID NO: 947562 - DNA, 15 bp, Homo sapiens
tgagaaacactgcta

SEQ ID NO: 947563 - DNA, 15 bp, Homo sapiens
gagaaacactgctat

SEQ ID NO: 947564 - DNA, 15 bp, Homo sapiens
agaaacactgctatg

SEQ ID NO: 947565 - DNA, 15 bp, Homo sapiens
gaaacactgctatgc

SEQ ID NO: 947566 - DNA, 15 bp, Homo sapiens
aaacactgctatgca

SEQ ID NO: 947567 - DNA, 15 bp, Homo sapiens
aacactgctatgcat

SEQ ID NO: 947568 - DNA, 15 bp, Homo sapiens
acactgctatgcatc

SEQ ID NO: 947569 - DNA, 15 bp, Homo sapiens
cactgctatgcatca

SEQ ID NO: 947570 - DNA, 15 bp, Homo sapiens
actgctatgcatcaa

SEQ ID NO: 947571 - DNA, 15 bp, Homo sapiens
ctgctatgcatcaac

SEQ ID NO: 947572 - DNA, 15 bp, Homo sapiens
tgctatgcatcaact

SEQ ID NO: 947573 - DNA, 15 bp, Homo sapiens
gctatgcatcaactt

SEQ ID NO: 947574 - DNA, 15 bp, Homo sapiens
ctatgcatcaacttt

SEQ ID NO: 947575 - DNA, 15 bp, Homo sapiens
tatgcatcaactttt

SEQ ID NO: 947576 - DNA, 15 bp, Homo sapiens
atgcatcaactttta

SEQ ID NO: 947577 - DNA, 15 bp, Homo sapiens
tgcatcaacttttaa

SEQ ID NO: 947578 - DNA, 15 bp, Homo sapiens
gcatcaacttttaaa

SEQ ID NO: 947579 - DNA, 15 bp, Homo sapiens
catcaacttttaaaa

SEQ ID NO: 947580 - DNA, 15 bp, Homo sapiens
atcaacttttaaaaa

SEQ ID NO: 947581 - DNA, 15 bp, Homo sapiens
tcaacttttaaaaat

SEQ ID NO: 947582 - DNA, 15 bp, Homo sapiens
caacttttaaaaata

SEQ ID NO: 947583 - DNA, 15 bp, Homo sapiens
aacttttaaaaataa

SEQ ID NO: 947584 - DNA, 15 bp, Homo sapiens
acttttaaaaataac

SEQ ID NO: 947585 - DNA, 15 bp, Homo sapiens
cttttaaaaataaca

SEQ ID NO: 947586 - DNA, 15 bp, Homo sapiens
ttttaaaaataacag

SEQ ID NO: 947587 - DNA, 15 bp, Homo sapiens
tttaaaaataacaga

SEQ ID NO: 947588 - DNA, 15 bp, Homo sapiens
ttaaaaataacagat

SEQ ID NO: 947589 - DNA, 15 bp, Homo sapiens
taaaaataacagatt

SEQ ID NO: 947590 - DNA, 15 bp, Homo sapiens
aaaaataacagattt

SEQ ID NO: 947591 - DNA, 15 bp, Homo sapiens
aaaataacagatttt

SEQ ID NO: 947592 - DNA, 15 bp, Homo sapiens
aaataacagattttg

SEQ ID NO: 947593 - DNA, 15 bp, Homo sapiens
aataacagattttga

SEQ ID NO: 947594 - DNA, 15 bp, Homo sapiens
ataacagattttgaa

SEQ ID NO: 947595 - DNA, 15 bp, Homo sapiens
taacagattttgaat

SEQ ID NO: 947596 - DNA, 15 bp, Homo sapiens
aacagattttgaatc

SEQ ID NO: 947597 - DNA, 15 bp, Homo sapiens
acagattttgaatct

SEQ ID NO: 947598 - DNA, 15 bp, Homo sapiens
cagattttgaatctt

SEQ ID NO: 947599 - DNA, 15 bp, Homo sapiens
agattttgaatcttt

SEQ ID NO: 947600 - DNA, 15 bp, Homo sapiens
gattttgaatctttt

SEQ ID NO: 947601 - DNA, 15 bp, Homo sapiens
attttgaatcttttc

SEQ ID NO: 947602 - DNA, 15 bp, Homo sapiens
ttttgaatcttttca

SEQ ID NO: 947603 - DNA, 15 bp, Homo sapiens
tttgaatcttttcat

SEQ ID NO: 947604 - DNA, 15 bp, Homo sapiens
ttgaatcttttcatt

SEQ ID NO: 947605 - DNA, 15 bp, Homo sapiens
tgaatcttttcattt

SEQ ID NO: 947606 - DNA, 15 bp, Homo sapiens
gaatcttttcatttc

SEQ ID NO: 947607 - DNA, 15 bp, Homo sapiens
aatcttttcatttca

SEQ ID NO: 947608 - DNA, 15 bp, Homo sapiens
atcttttcatttcaa

SEQ ID NO: 947609 - DNA, 15 bp, Homo sapiens
tcttttcatttcaat

SEQ ID NO: 947610 - DNA, 15 bp, Homo sapiens
cttttcatttcaata

SEQ ID NO: 947611 - DNA, 15 bp, Homo sapiens
ttttcatttcaatat

SEQ ID NO: 947612 - DNA, 15 bp, Homo sapiens
tcatttcaatatttg

SEQ ID NO: 947613 - DNA, 15 bp, Homo sapiens
catttcaatatttgc

SEQ ID NO: 947614 - DNA, 15 bp, Homo sapiens
atttcaatatttgct

SEQ ID NO: 947615 - DNA, 15 bp, Homo sapiens
tttcaatatttgctg

SEQ ID NO: 947616 - DNA, 15 bp, Homo sapiens
ttcaatatttgctgt

SEQ ID NO: 947617 - DNA, 15 bp, Homo sapiens
tcaatatttgctgta

SEQ ID NO: 947618 - DNA, 15 bp, Homo sapiens
caatatttgctgtag

SEQ ID NO: 947619 - DNA, 15 bp, Homo sapiens
aatatttgctgtagg

SEQ ID NO: 947620 - DNA, 15 bp, Homo sapiens
atatttgctgtaggt

SEQ ID NO: 947621 - DNA, 15 bp, Homo sapiens
tatttgctgtaggtg

SEQ ID NO: 947622 - DNA, 15 bp, Homo sapiens
atttgctgtaggtgt

SEQ ID NO: 947623 - DNA, 15 bp, Homo sapiens
tttgctgtaggtgta

SEQ ID NO: 947624 - DNA, 15 bp, Homo sapiens
ttgctgtaggtgtat

SEQ ID NO: 947625 - DNA, 15 bp, Homo sapiens
tgctgtaggtgtatt

SEQ ID NO: 947626 - DNA, 15 bp, Homo sapiens
gctgtaggtgtattg

SEQ ID NO: 947627 - DNA, 15 bp, Homo sapiens
ctgtaggtgtattga

SEQ ID NO: 947628 - DNA, 15 bp, Homo sapiens
tgtaggtgtattgaa

SEQ ID NO: 947629 - DNA, 15 bp, Homo sapiens
gtaggtgtattgaat

SEQ ID NO: 947630 - DNA, 15 bp, Homo sapiens
taggtgtattgaatg

SEQ ID NO: 947631 - DNA, 15 bp, Homo sapiens
aggtgtattgaatgg

SEQ ID NO: 947632 - DNA, 15 bp, Homo sapiens
ggtgtattgaatgga

SEQ ID NO: 947633 - DNA, 15 bp, Homo sapiens
gtgtattgaatggat

SEQ ID NO: 947634 - DNA, 15 bp, Homo sapiens
tgtattgaatggata

SEQ ID NO: 947635 - DNA, 15 bp, Homo sapiens
gtattgaatggatag

SEQ ID NO: 947636 - DNA, 15 bp, Homo sapiens
tattgaatggatagg

SEQ ID NO: 947637 - DNA, 15 bp, Homo sapiens
attgaatggataggg

SEQ ID NO: 947638 - DNA, 15 bp, Homo sapiens
ttgaatggataggga

SEQ ID NO: 947639 - DNA, 15 bp, Homo sapiens
tgaatggatagggag

SEQ ID NO: 947640 - DNA, 15 bp, Homo sapiens
gaatggatagggagg

SEQ ID NO: 947641 - DNA, 15 bp, Homo sapiens
aatggatagggaggc

SEQ ID NO: 947642 - DNA, 15 bp, Homo sapiens
atggatagggaggca

SEQ ID NO: 947643 - DNA, 15 bp, Homo sapiens
tggatagggaggcaa

SEQ ID NO: 947644 - DNA, 15 bp, Homo sapiens
ggatagggaggcaaa

SEQ ID NO: 947645 - DNA, 15 bp, Homo sapiens
gatagggaggcaaat

SEQ ID NO: 947646 - DNA, 15 bp, Homo sapiens
atagggaggcaaata

SEQ ID NO: 947647 - DNA, 15 bp, Homo sapiens
tagggaggcaaataa

SEQ ID NO: 947648 - DNA, 15 bp, Homo sapiens
agggaggcaaataaa

SEQ ID NO: 947649 - DNA, 15 bp, Homo sapiens
gggaggcaaataaat

SEQ ID NO: 947650 - DNA, 15 bp, Homo sapiens
ggaggcaaataaatt

SEQ ID NO: 947651 - DNA, 15 bp, Homo sapiens
gaggcaaataaattg

SEQ ID NO: 947652 - DNA, 15 bp, Homo sapiens
aggcaaataaattgt

SEQ ID NO: 947653 - DNA, 15 bp, Homo sapiens
ggcaaataaattgtg

SEQ ID NO: 947654 - DNA, 15 bp, Homo sapiens
gcaaataaattgtgg

SEQ ID NO: 947655 - DNA, 15 bp, Homo sapiens
caaataaattgtggg

SEQ ID NO: 947656 - DNA, 15 bp, Homo sapiens
aaataaattgtggga

SEQ ID NO: 947657 - DNA, 15 bp, Homo sapiens
aataaattgtgggat

SEQ ID NO: 947658 - DNA, 15 bp, Homo sapiens
ataaattgtgggata

SEQ ID NO: 947659 - DNA, 15 bp, Homo sapiens
taaattgtgggatag

SEQ ID NO: 947660 - DNA, 15 bp, Homo sapiens
aaattgtgggatagc

SEQ ID NO: 947661 - DNA, 15 bp, Homo sapiens
aattgtgggatagca

SEQ ID NO: 947662 - DNA, 15 bp, Homo sapiens
attgtgggatagcaa

SEQ ID NO: 947663 - DNA, 15 bp, Homo sapiens
ttgtgggatagcaag

SEQ ID NO: 947664 - DNA, 15 bp, Homo sapiens
tgtgggatagcaagt

SEQ ID NO: 947665 - DNA, 15 bp, Homo sapiens
gtgggatagcaagtg

SEQ ID NO: 947666 - DNA, 15 bp, Homo sapiens
tgggatagcaagtgt

SEQ ID NO: 947667 - DNA, 15 bp, Homo sapiens
gggatagcaagtgta

SEQ ID NO: 947668 - DNA, 15 bp, Homo sapiens
ggatagcaagtgtac

SEQ ID NO: 947669 - DNA, 15 bp, Homo sapiens
gatagcaagtgtact

SEQ ID NO: 947670 - DNA, 15 bp, Homo sapiens
atagcaagtgtactc

SEQ ID NO: 947671 - DNA, 15 bp, Homo sapiens
tagcaagtgtactcc

SEQ ID NO: 947672 - DNA, 15 bp, Homo sapiens
agcaagtgtactcct

SEQ ID NO: 947673 - DNA, 15 bp, Homo sapiens
gcaagtgtactcctg

SEQ ID NO: 947674 - DNA, 15 bp, Homo sapiens
caagtgtactcctgt

SEQ ID NO: 947675 - DNA, 15 bp, Homo sapiens
aagtgtactcctgtc

SEQ ID NO: 947676 - DNA, 15 bp, Homo sapiens
agtgtactcctgtcc

SEQ ID NO: 947677 - DNA, 15 bp, Homo sapiens
gtgtactcctgtcct

SEQ ID NO: 947678 - DNA, 15 bp, Homo sapiens
tgtactcctgtcctc

SEQ ID NO: 947679 - DNA, 15 bp, Homo sapiens
gtactcctgtcctca

SEQ ID NO: 947680 - DNA, 15 bp, Homo sapiens
tactcctgtcctcag

SEQ ID NO: 947681 - DNA, 15 bp, Homo sapiens
actcctgtcctcagt

SEQ ID NO: 947682 - DNA, 15 bp, Homo sapiens
ctcctgtcctcagta

SEQ ID NO: 947683 - DNA, 15 bp, Homo sapiens
tcctgtcctcagtaa

SEQ ID NO: 947684 - DNA, 15 bp, Homo sapiens
cctgtcctcagtaag

SEQ ID NO: 947685 - DNA, 15 bp, Homo sapiens
ctgtcctcagtaagc

SEQ ID NO: 947686 - DNA, 15 bp, Homo sapiens
tgtcctcagtaagcc

SEQ ID NO: 947687 - DNA, 15 bp, Homo sapiens
gtcctcagtaagcca

SEQ ID NO: 947688 - DNA, 15 bp, Homo sapiens
tcctcagtaagccat

SEQ ID NO: 947689 - DNA, 15 bp, Homo sapiens
cctcagtaagccatg

SEQ ID NO: 947690 - DNA, 15 bp, Homo sapiens
ctcagtaagccatgt

SEQ ID NO: 947691 - DNA, 15 bp, Homo sapiens
tcagtaagccatgta

SEQ ID NO: 947692 - DNA, 15 bp, Homo sapiens
cagtaagccatgtag

SEQ ID NO: 947693 - DNA, 15 bp, Homo sapiens
agtaagccatgtagt

SEQ ID NO: 947694 - DNA, 15 bp, Homo sapiens
gtaagccatgtagta

SEQ ID NO: 947695 - DNA, 15 bp, Homo sapiens
taagccatgtagtaa

SEQ ID NO: 947696 - DNA, 15 bp, Homo sapiens
aagccatgtagtaaa

SEQ ID NO: 947697 - DNA, 15 bp, Homo sapiens
agccatgtagtaaat

SEQ ID NO: 947698 - DNA, 15 bp, Homo sapiens
gccatgtagtaaatc

SEQ ID NO: 947699 - DNA, 15 bp, Homo sapiens
ccatgtagtaaatcc

SEQ ID NO: 947700 - DNA, 15 bp, Homo sapiens
catgtagtaaatccc

SEQ ID NO: 947701 - DNA, 15 bp, Homo sapiens
atgtagtaaatccca

SEQ ID NO: 947702 - DNA, 15 bp, Homo sapiens
tgtagtaaatcccac

SEQ ID NO: 947703 - DNA, 15 bp, Homo sapiens
gtagtaaatcccacc

SEQ ID NO: 947704 - DNA, 15 bp, Homo sapiens
tagtaaatcccacca

SEQ ID NO: 947705 - DNA, 15 bp, Homo sapiens
agtaaatcccaccag

SEQ ID NO: 947706 - DNA, 15 bp, Homo sapiens
gtaaatcccaccagc

SEQ ID NO: 947707 - DNA, 15 bp, Homo sapiens
taaatcccaccagca

SEQ ID NO: 947708 - DNA, 15 bp, Homo sapiens
aaatcccaccagcat

SEQ ID NO: 947709 - DNA, 15 bp, Homo sapiens
aatcccaccagcatc

SEQ ID NO: 947710 - DNA, 15 bp, Homo sapiens
atcccaccagcatct

SEQ ID NO: 947711 - DNA, 15 bp, Homo sapiens
tcccaccagcatctc

SEQ ID NO: 947712 - DNA, 15 bp, Homo sapiens
cccaccagcatctct

SEQ ID NO: 947713 - DNA, 15 bp, Homo sapiens
ccaccagcatctcta

SEQ ID NO: 947714 - DNA, 15 bp, Homo sapiens
caccagcatctctag

SEQ ID NO: 947715 - DNA, 15 bp, Homo sapiens
accagcatctctagc

SEQ ID NO: 947716 - DNA, 15 bp, Homo sapiens
ccagcatctctagct

SEQ ID NO: 947717 - DNA, 15 bp, Homo sapiens
cagcatctctagcta

SEQ ID NO: 947718 - DNA, 15 bp, Homo sapiens
agcatctctagctaa

SEQ ID NO: 947719 - DNA, 15 bp, Homo sapiens
gcatctctagctaac

SEQ ID NO: 947720 - DNA, 15 bp, Homo sapiens
catctctagctaact

SEQ ID NO: 947721 - DNA, 15 bp, Homo sapiens
atctctagctaactg

SEQ ID NO: 947722 - DNA, 15 bp, Homo sapiens
tctctagctaactgt

SEQ ID NO: 947723 - DNA, 15 bp, Homo sapiens
ctctagctaactgtt

SEQ ID NO: 947724 - DNA, 15 bp, Homo sapiens
tctagctaactgttg

SEQ ID NO: 947725 - DNA, 15 bp, Homo sapiens
ctagctaactgttgt

SEQ ID NO: 947726 - DNA, 15 bp, Homo sapiens
tagctaactgttgtc

SEQ ID NO: 947727 - DNA, 15 bp, Homo sapiens
agctaactgttgtcc

SEQ ID NO: 947728 - DNA, 15 bp, Homo sapiens
gctaactgttgtcca

SEQ ID NO: 947729 - DNA, 15 bp, Homo sapiens
ctaactgttgtccat

SEQ ID NO: 947730 - DNA, 15 bp, Homo sapiens
taactgttgtccata

SEQ ID NO: 947731 - DNA, 15 bp, Homo sapiens
aactgttgtccataa

SEQ ID NO: 947732 - DNA, 15 bp, Homo sapiens
actgttgtccataaa

SEQ ID NO: 947733 - DNA, 15 bp, Homo sapiens
ctgttgtccataaat

SEQ ID NO: 947734 - DNA, 15 bp, Homo sapiens
tgttgtccataaatt

SEQ ID NO: 947735 - DNA, 15 bp, Homo sapiens
gttgtccataaattg

SEQ ID NO: 947736 - DNA, 15 bp, Homo sapiens
ttgtccataaattgg

SEQ ID NO: 947737 - DNA, 15 bp, Homo sapiens
tgtccataaattgga

SEQ ID NO: 947738 - DNA, 15 bp, Homo sapiens
gtccataaattggac

SEQ ID NO: 947739 - DNA, 15 bp, Homo sapiens
tccataaattggaca

SEQ ID NO: 947740 - DNA, 15 bp, Homo sapiens
ccataaattggacac

SEQ ID NO: 947741 - DNA, 15 bp, Homo sapiens
cataaattggacact

SEQ ID NO: 947742 - DNA, 15 bp, Homo sapiens
ataaattggacactc

SEQ ID NO: 947743 - DNA, 15 bp, Homo sapiens
taaattggacactct

SEQ ID NO: 947744 - DNA, 15 bp, Homo sapiens
aaattggacactcta

SEQ ID NO: 947745 - DNA, 15 bp, Homo sapiens
aattggacactctaa

SEQ ID NO: 947746 - DNA, 15 bp, Homo sapiens
attggacactctaaa

SEQ ID NO: 947747 - DNA, 15 bp, Homo sapiens
ttggacactctaaac

SEQ ID NO: 947748 - DNA, 15 bp, Homo sapiens
tggacactctaaaca

SEQ ID NO: 947749 - DNA, 15 bp, Homo sapiens
ggacactctaaacac

SEQ ID NO: 947750 - DNA, 15 bp, Homo sapiens
gacactctaaacaca

SEQ ID NO: 947751 - DNA, 15 bp, Homo sapiens
acactctaaacacag

SEQ ID NO: 947752 - DNA, 15 bp, Homo sapiens
cactctaaacacagg

SEQ ID NO: 947753 - DNA, 15 bp, Homo sapiens
actctaaacacaggc

SEQ ID NO: 947754 - DNA, 15 bp, Homo sapiens
ctctaaacacaggca

SEQ ID NO: 947755 - DNA, 15 bp, Homo sapiens
tctaaacacaggcaa

SEQ ID NO: 947756 - DNA, 15 bp, Homo sapiens
ctaaacacaggcaag

SEQ ID NO: 947757 - DNA, 15 bp, Homo sapiens
taaacacaggcaagc

SEQ ID NO: 947758 - DNA, 15 bp, Homo sapiens
aaacacaggcaagcc

SEQ ID NO: 947759 - DNA, 15 bp, Homo sapiens
aacacaggcaagccc

SEQ ID NO: 947760 - DNA, 15 bp, Homo sapiens
acacaggcaagccca

SEQ ID NO: 947761 - DNA, 15 bp, Homo sapiens
cacaggcaagcccag

SEQ ID NO: 947762 - DNA, 15 bp, Homo sapiens
acaggcaagcccagc

SEQ ID NO: 947763 - DNA, 15 bp, Homo sapiens
caggcaagcccagcc

SEQ ID NO: 947764 - DNA, 15 bp, Homo sapiens
aggcaagcccagccc

SEQ ID NO: 947765 - DNA, 15 bp, Homo sapiens
ggcaagcccagccct

SEQ ID NO: 947766 - DNA, 15 bp, Homo sapiens
gcaagcccagccctg

SEQ ID NO: 947767 - DNA, 15 bp, Homo sapiens
caagcccagccctga

SEQ ID NO: 947768 - DNA, 15 bp, Homo sapiens
aagcccagccctgat

SEQ ID NO: 947769 - DNA, 15 bp, Homo sapiens
agcccagccctgatg

SEQ ID NO: 947770 - DNA, 15 bp, Homo sapiens
gcccagccctgatgt

SEQ ID NO: 947771 - DNA, 15 bp, Homo sapiens
cccagccctgatgta

SEQ ID NO: 947772 - DNA, 15 bp, Homo sapiens
ccagccctgatgtat

SEQ ID NO: 947773 - DNA, 15 bp, Homo sapiens
cagccctgatgtatc

SEQ ID NO: 947774 - DNA, 15 bp, Homo sapiens
agccctgatgtatcg

SEQ ID NO: 947775 - DNA, 15 bp, Homo sapiens
gccctgatgtatcga

SEQ ID NO: 947776 - DNA, 15 bp, Homo sapiens
ccctgatgtatcgaa

SEQ ID NO: 947777 - DNA, 15 bp, Homo sapiens
cctgatgtatcgaat

SEQ ID NO: 947778 - DNA, 15 bp, Homo sapiens
ctgatgtatcgaatg

SEQ ID NO: 947779 - DNA, 15 bp, Homo sapiens
tgatgtatcgaatga

SEQ ID NO: 947780 - DNA, 15 bp, Homo sapiens
gatgtatcgaatgaa

SEQ ID NO: 947781 - DNA, 15 bp, Homo sapiens
atgtatcgaatgaag

SEQ ID NO: 947782 - DNA, 15 bp, Homo sapiens
tgtatcgaatgaagt

SEQ ID NO: 947783 - DNA, 15 bp, Homo sapiens
gtatcgaatgaagtc

SEQ ID NO: 947784 - DNA, 15 bp, Homo sapiens
tatcgaatgaagtct

SEQ ID NO: 947785 - DNA, 15 bp, Homo sapiens
atcgaatgaagtctc

SEQ ID NO: 947786 - DNA, 15 bp, Homo sapiens
tcgaatgaagtctca

SEQ ID NO: 947787 - DNA, 15 bp, Homo sapiens
cgaatgaagtctcac

SEQ ID NO: 947788 - DNA, 15 bp, Homo sapiens
gaatgaagtctcaca

SEQ ID NO: 947789 - DNA, 15 bp, Homo sapiens
aatgaagtctcacag

SEQ ID NO: 947790 - DNA, 15 bp, Homo sapiens
atgaagtctcacagc

SEQ ID NO: 947791 - DNA, 15 bp, Homo sapiens
tgaagtctcacagca

SEQ ID NO: 947792 - DNA, 15 bp, Homo sapiens
gaagtctcacagcag

SEQ ID NO: 947793 - DNA, 15 bp, Homo sapiens
aagtctcacagcagt

SEQ ID NO: 947794 - DNA, 15 bp, Homo sapiens
agtctcacagcagtt

SEQ ID NO: 947795 - DNA, 15 bp, Homo sapiens
gtctcacagcagttc

SEQ ID NO: 947796 - DNA, 15 bp, Homo sapiens
tctcacagcagttca

SEQ ID NO: 947797 - DNA, 15 bp, Homo sapiens
ctcacagcagttcag

SEQ ID NO: 947798 - DNA, 15 bp, Homo sapiens
tcacagcagttcagc

SEQ ID NO: 947799 - DNA, 15 bp, Homo sapiens
cacagcagttcagct

SEQ ID NO: 947800 - DNA, 15 bp, Homo sapiens
acagcagttcagctt

SEQ ID NO: 947801 - DNA, 15 bp, Homo sapiens
cagcagttcagctta

SEQ ID NO: 947802 - DNA, 15 bp, Homo sapiens
agcagttcagcttaa

SEQ ID NO: 947803 - DNA, 15 bp, Homo sapiens
gcagttcagcttaaa

SEQ ID NO: 947804 - DNA, 15 bp, Homo sapiens
cagttcagcttaaag

SEQ ID NO: 947805 - DNA, 15 bp, Homo sapiens
agttcagcttaaaga

SEQ ID NO: 947806 - DNA, 15 bp, Homo sapiens
gttcagcttaaagaa

SEQ ID NO: 947807 - DNA, 15 bp, Homo sapiens
ttcagcttaaagaaa

SEQ ID NO: 947808 - DNA, 15 bp, Homo sapiens
tcagcttaaagaaac

SEQ ID NO: 947809 - DNA, 15 bp, Homo sapiens
cagcttaaagaaaca

SEQ ID NO: 947810 - DNA, 15 bp, Homo sapiens
agcttaaagaaacaa

SEQ ID NO: 947811 - DNA, 15 bp, Homo sapiens
gcttaaagaaacaag

SEQ ID NO: 947812 - DNA, 15 bp, Homo sapiens
cttaaagaaacaaga

SEQ ID NO: 947813 - DNA, 15 bp, Homo sapiens
ttaaagaaacaagac

SEQ ID NO: 947814 - DNA, 15 bp, Homo sapiens
taaagaaacaagacc

SEQ ID NO: 947815 - DNA, 15 bp, Homo sapiens
aaagaaacaagacct

SEQ ID NO: 947816 - DNA, 15 bp, Homo sapiens
aagaaacaagacctt

SEQ ID NO: 947817 - DNA, 15 bp, Homo sapiens
agaaacaagaccttt

SEQ ID NO: 947818 - DNA, 15 bp, Homo sapiens
gaaacaagacctttt

SEQ ID NO: 947819 - DNA, 15 bp, Homo sapiens
aaacaagaccttttc

SEQ ID NO: 947820 - DNA, 15 bp, Homo sapiens
aacaagaccttttca

SEQ ID NO: 947821 - DNA, 15 bp, Homo sapiens
acaagaccttttcaa

SEQ ID NO: 947822 - DNA, 15 bp, Homo sapiens
caagaccttttcaaa

SEQ ID NO: 947823 - DNA, 15 bp, Homo sapiens
aagaccttttcaaat

SEQ ID NO: 947824 - DNA, 15 bp, Homo sapiens
agaccttttcaaatg

SEQ ID NO: 947825 - DNA, 15 bp, Homo sapiens
gaccttttcaaatga

SEQ ID NO: 947826 - DNA, 15 bp, Homo sapiens
accttttcaaatgaa

SEQ ID NO: 947827 - DNA, 15 bp, Homo sapiens
ccttttcaaatgaaa

SEQ ID NO: 947828 - DNA, 15 bp, Homo sapiens
cttttcaaatgaaaa

SEQ ID NO: 947829 - DNA, 15 bp, Homo sapiens
ttttcaaatgaaaaa

SEQ ID NO: 947830 - DNA, 15 bp, Homo sapiens
tttcaaatgaaaaat

SEQ ID NO: 947831 - DNA, 15 bp, Homo sapiens
ttcaaatgaaaaatt

SEQ ID NO: 947832 - DNA, 15 bp, Homo sapiens
tcaaatgaaaaattg

SEQ ID NO: 947833 - DNA, 15 bp, Homo sapiens
caaatgaaaaattga

SEQ ID NO: 947834 - DNA, 15 bp, Homo sapiens
aaatgaaaaattgag

SEQ ID NO: 947835 - DNA, 15 bp, Homo sapiens
aatgaaaaattgagg

SEQ ID NO: 947836 - DNA, 15 bp, Homo sapiens
atgaaaaattgaggt

SEQ ID NO: 947837 - DNA, 15 bp, Homo sapiens
tgaaaaattgaggtt

SEQ ID NO: 947838 - DNA, 15 bp, Homo sapiens
gaaaaattgaggttt

SEQ ID NO: 947839 - DNA, 15 bp, Homo sapiens
aaaaattgaggtttc

SEQ ID NO: 947840 - DNA, 15 bp, Homo sapiens
aaaattgaggtttca

SEQ ID NO: 947841 - DNA, 15 bp, Homo sapiens
aaattgaggtttcaa

SEQ ID NO: 947842 - DNA, 15 bp, Homo sapiens
aattgaggtttcaat

SEQ ID NO: 947843 - DNA, 15 bp, Homo sapiens
attgaggtttcaatc

SEQ ID NO: 947844 - DNA, 15 bp, Homo sapiens
ttgaggtttcaatcc

SEQ ID NO: 947845 - DNA, 15 bp, Homo sapiens
tgaggtttcaatcca

SEQ ID NO: 947846 - DNA, 15 bp, Homo sapiens
gaggtttcaatccaa

SEQ ID NO: 947847 - DNA, 15 bp, Homo sapiens
aggtttcaatccaaa

SEQ ID NO: 947848 - DNA, 15 bp, Homo sapiens
ggtttcaatccaaaa

SEQ ID NO: 947849 - DNA, 15 bp, Homo sapiens
gtttcaatccaaaag

SEQ ID NO: 947850 - DNA, 15 bp, Homo sapiens
tttcaatccaaaaga

SEQ ID NO: 947851 - DNA, 15 bp, Homo sapiens
ttcaatccaaaagaa

SEQ ID NO: 947852 - DNA, 15 bp, Homo sapiens
tcaatccaaaagaaa

SEQ ID NO: 947853 - DNA, 15 bp, Homo sapiens
caatccaaaagaaaa

SEQ ID NO: 947854 - DNA, 15 bp, Homo sapiens
aatccaaaagaaaat

SEQ ID NO: 947855 - DNA, 15 bp, Homo sapiens
atccaaaagaaaatg

SEQ ID NO: 947856 - DNA, 15 bp, Homo sapiens
tccaaaagaaaatga

SEQ ID NO: 947857 - DNA, 15 bp, Homo sapiens
ccaaaagaaaatgaa

SEQ ID NO: 947858 - DNA, 15 bp, Homo sapiens
caaaagaaaatgaaa

SEQ ID NO: 947859 - DNA, 15 bp, Homo sapiens
aaaagaaaatgaaac

SEQ ID NO: 947860 - DNA, 15 bp, Homo sapiens
aaagaaaatgaaacc

SEQ ID NO: 947861 - DNA, 15 bp, Homo sapiens
aagaaaatgaaacca

SEQ ID NO: 947862 - DNA, 15 bp, Homo sapiens
agaaaatgaaaccat

SEQ ID NO: 947863 - DNA, 15 bp, Homo sapiens
gaaaatgaaaccatt

SEQ ID NO: 947864 - DNA, 15 bp, Homo sapiens
aaaatgaaaccattt

SEQ ID NO: 947865 - DNA, 15 bp, Homo sapiens
aaatgaaaccatttt

SEQ ID NO: 947866 - DNA, 15 bp, Homo sapiens
aatgaaaccattttg

SEQ ID NO: 947867 - DNA, 15 bp, Homo sapiens
atgaaaccattttgt

SEQ ID NO: 947868 - DNA, 15 bp, Homo sapiens
tgaaaccattttgtg

SEQ ID NO: 947869 - DNA, 15 bp, Homo sapiens
gaaaccattttgtgg

SEQ ID NO: 947870 - DNA, 15 bp, Homo sapiens
aaaccattttgtggc

SEQ ID NO: 947871 - DNA, 15 bp, Homo sapiens
aaccattttgtggca

SEQ ID NO: 947872 - DNA, 15 bp, Homo sapiens
accattttgtggcat

SEQ ID NO: 947873 - DNA, 15 bp, Homo sapiens
ccattttgtggcatt

SEQ ID NO: 947874 - DNA, 15 bp, Homo sapiens
cattttgtggcattt

SEQ ID NO: 947875 - DNA, 15 bp, Homo sapiens
attttgtggcatttg

SEQ ID NO: 947876 - DNA, 15 bp, Homo sapiens
ttttgtggcatttgt

SEQ ID NO: 947877 - DNA, 15 bp, Homo sapiens
tgtggcatttgtttc

SEQ ID NO: 947878 - DNA, 15 bp, Homo sapiens
gtggcatttgtttct

SEQ ID NO: 947879 - DNA, 15 bp, Homo sapiens
tggcatttgtttctc

SEQ ID NO: 947880 - DNA, 15 bp, Homo sapiens
ggcatttgtttctcc

SEQ ID NO: 947881 - DNA, 15 bp, Homo sapiens
gcatttgtttctcca

SEQ ID NO: 947882 - DNA, 15 bp, Homo sapiens
catttgtttctccat

SEQ ID NO: 947883 - DNA, 15 bp, Homo sapiens
atttgtttctccatc

SEQ ID NO: 947884 - DNA, 15 bp, Homo sapiens
tttgtttctccatct

SEQ ID NO: 947885 - DNA, 15 bp, Homo sapiens
ttgtttctccatcta

SEQ ID NO: 947886 - DNA, 15 bp, Homo sapiens
tgtttctccatctaa

SEQ ID NO: 947887 - DNA, 15 bp, Homo sapiens
gtttctccatctaaa

SEQ ID NO: 947888 - DNA, 15 bp, Homo sapiens
tttctccatctaaat

SEQ ID NO: 947889 - DNA, 15 bp, Homo sapiens
ttctccatctaaatt

SEQ ID NO: 947890 - DNA, 15 bp, Homo sapiens
tctccatctaaatta

SEQ ID NO: 947891 - DNA, 15 bp, Homo sapiens
ctccatctaaattaa

SEQ ID NO: 947892 - DNA, 15 bp, Homo sapiens
tccatctaaattaat

SEQ ID NO: 947893 - DNA, 15 bp, Homo sapiens
ccatctaaattaata

SEQ ID NO: 947894 - DNA, 15 bp, Homo sapiens
catctaaattaatac

SEQ ID NO: 947895 - DNA, 15 bp, Homo sapiens
atctaaattaatact

SEQ ID NO: 947896 - DNA, 15 bp, Homo sapiens
tctaaattaatactt

SEQ ID NO: 947897 - DNA, 15 bp, Homo sapiens
ctaaattaatacttt

SEQ ID NO: 947898 - DNA, 15 bp, Homo sapiens
taaattaatactttc

SEQ ID NO: 947899 - DNA, 15 bp, Homo sapiens
aaattaatactttca

SEQ ID NO: 947900 - DNA, 15 bp, Homo sapiens
aattaatactttcat

SEQ ID NO: 947901 - DNA, 15 bp, Homo sapiens
attaatactttcatt

SEQ ID NO: 947902 - DNA, 15 bp, Homo sapiens
ttaatactttcattt

SEQ ID NO: 947903 - DNA, 15 bp, Homo sapiens
taatactttcatttt

SEQ ID NO: 947904 - DNA, 15 bp, Homo sapiens
aatactttcatttta

SEQ ID NO: 947905 - DNA, 15 bp, Homo sapiens
atactttcattttag

SEQ ID NO: 947906 - DNA, 15 bp, Homo sapiens
tactttcattttaga

SEQ ID NO: 947907 - DNA, 15 bp, Homo sapiens
actttcattttagaa

SEQ ID NO: 947908 - DNA, 15 bp, Homo sapiens
ctttcattttagaag

SEQ ID NO: 947909 - DNA, 15 bp, Homo sapiens
tttcattttagaagc

SEQ ID NO: 947910 - DNA, 15 bp, Homo sapiens
ttcattttagaagca

SEQ ID NO: 947911 - DNA, 15 bp, Homo sapiens
tcattttagaagcaa

SEQ ID NO: 947912 - DNA, 15 bp, Homo sapiens
cattttagaagcaaa

SEQ ID NO: 947913 - DNA, 15 bp, Homo sapiens
attttagaagcaaaa

SEQ ID NO: 947914 - DNA, 15 bp, Homo sapiens
ttttagaagcaaaat

SEQ ID NO: 947915 - DNA, 15 bp, Homo sapiens
tttagaagcaaaatc

SEQ ID NO: 947916 - DNA, 15 bp, Homo sapiens
ttagaagcaaaatct

SEQ ID NO: 947917 - DNA, 15 bp, Homo sapiens
tagaagcaaaatcta

SEQ ID NO: 947918 - DNA, 15 bp, Homo sapiens
agaagcaaaatctag

SEQ ID NO: 947919 - DNA, 15 bp, Homo sapiens
gaagcaaaatctagc

SEQ ID NO: 947920 - DNA, 15 bp, Homo sapiens
aagcaaaatctagct

SEQ ID NO: 947921 - DNA, 15 bp, Homo sapiens
agcaaaatctagctg

SEQ ID NO: 947922 - DNA, 15 bp, Homo sapiens
gcaaaatctagctga

SEQ ID NO: 947923 - DNA, 15 bp, Homo sapiens
caaaatctagctgaa

SEQ ID NO: 947924 - DNA, 15 bp, Homo sapiens
aaaatctagctgaaa

SEQ ID NO: 947925 - DNA, 15 bp, Homo sapiens
aaatctagctgaaat

SEQ ID NO: 947926 - DNA, 15 bp, Homo sapiens
aatctagctgaaata

SEQ ID NO: 947927 - DNA, 15 bp, Homo sapiens
atctagctgaaatac

SEQ ID NO: 947928 - DNA, 15 bp, Homo sapiens
tctagctgaaataca

SEQ ID NO: 947929 - DNA, 15 bp, Homo sapiens
ctagctgaaatacag

SEQ ID NO: 947930 - DNA, 15 bp, Homo sapiens
tagctgaaatacagt

SEQ ID NO: 947931 - DNA, 15 bp, Homo sapiens
agctgaaatacagta

SEQ ID NO: 947932 - DNA, 15 bp, Homo sapiens
gctgaaatacagtaa

SEQ ID NO: 947933 - DNA, 15 bp, Homo sapiens
ctgaaatacagtaat

SEQ ID NO: 947934 - DNA, 15 bp, Homo sapiens
tgaaatacagtaatt

SEQ ID NO: 947935 - DNA, 15 bp, Homo sapiens
gaaatacagtaattt

SEQ ID NO: 947936 - DNA, 15 bp, Homo sapiens
aaatacagtaatttg

SEQ ID NO: 947937 - DNA, 15 bp, Homo sapiens
aatacagtaatttgc

SEQ ID NO: 947938 - DNA, 15 bp, Homo sapiens
atacagtaatttgct

SEQ ID NO: 947939 - DNA, 15 bp, Homo sapiens
tacagtaatttgctg

SEQ ID NO: 947940 - DNA, 15 bp, Homo sapiens
acagtaatttgctga

SEQ ID NO: 947941 - DNA, 15 bp, Homo sapiens
cagtaatttgctgaa

SEQ ID NO: 947942 - DNA, 15 bp, Homo sapiens
agtaatttgctgaaa

SEQ ID NO: 947943 - DNA, 15 bp, Homo sapiens
gtaatttgctgaaat

SEQ ID NO: 947944 - DNA, 15 bp, Homo sapiens
taatttgctgaaatt

SEQ ID NO: 947945 - DNA, 15 bp, Homo sapiens
aatttgctgaaatta

SEQ ID NO: 947946 - DNA, 15 bp, Homo sapiens
atttgctgaaattaa

SEQ ID NO: 947947 - DNA, 15 bp, Homo sapiens
tttgctgaaattaag

SEQ ID NO: 947948 - DNA, 15 bp, Homo sapiens
ttgctgaaattaagg

SEQ ID NO: 947949 - DNA, 15 bp, Homo sapiens
tgctgaaattaaggc

SEQ ID NO: 947950 - DNA, 15 bp, Homo sapiens
gctgaaattaaggca

SEQ ID NO: 947951 - DNA, 15 bp, Homo sapiens
ctgaaattaaggcat

SEQ ID NO: 947952 - DNA, 15 bp, Homo sapiens
tgaaattaaggcatc

SEQ ID NO: 947953 - DNA, 15 bp, Homo sapiens
gaaattaaggcatcg

SEQ ID NO: 947954 - DNA, 15 bp, Homo sapiens
aaattaaggcatcgt

SEQ ID NO: 947955 - DNA, 15 bp, Homo sapiens
aattaaggcatcgtc

SEQ ID NO: 947956 - DNA, 15 bp, Homo sapiens
attaaggcatcgtct

SEQ ID NO: 947957 - DNA, 15 bp, Homo sapiens
ttaaggcatcgtctt

SEQ ID NO: 947958 - DNA, 15 bp, Homo sapiens
taaggcatcgtcttt

SEQ ID NO: 947959 - DNA, 15 bp, Homo sapiens
aaggcatcgtctttc

SEQ ID NO: 947960 - DNA, 15 bp, Homo sapiens
aggcatcgtctttca

SEQ ID NO: 947961 - DNA, 15 bp, Homo sapiens
ggcatcgtctttcac

SEQ ID NO: 947962 - DNA, 15 bp, Homo sapiens
gcatcgtctttcaca

SEQ ID NO: 947963 - DNA, 15 bp, Homo sapiens
catcgtctttcacat

SEQ ID NO: 947964 - DNA, 15 bp, Homo sapiens
atcgtctttcacatt

SEQ ID NO: 947965 - DNA, 15 bp, Homo sapiens
tcgtctttcacattt

SEQ ID NO: 947966 - DNA, 15 bp, Homo sapiens
cgtctttcacatttg

SEQ ID NO: 947967 - DNA, 15 bp, Homo sapiens
gtctttcacatttgt

SEQ ID NO: 947968 - DNA, 15 bp, Homo sapiens
tctttcacatttgtg

SEQ ID NO: 947969 - DNA, 15 bp, Homo sapiens
ctttcacatttgtgg

SEQ ID NO: 947970 - DNA, 15 bp, Homo sapiens
tttcacatttgtggc

SEQ ID NO: 947971 - DNA, 15 bp, Homo sapiens
ttcacatttgtggct

SEQ ID NO: 947972 - DNA, 15 bp, Homo sapiens
tcacatttgtggctg

SEQ ID NO: 947973 - DNA, 15 bp, Homo sapiens
cacatttgtggctgc

SEQ ID NO: 947974 - DNA, 15 bp, Homo sapiens
acatttgtggctgct

SEQ ID NO: 947975 - DNA, 15 bp, Homo sapiens
catttgtggctgctc

SEQ ID NO: 947976 - DNA, 15 bp, Homo sapiens
atttgtggctgctct

SEQ ID NO: 947977 - DNA, 15 bp, Homo sapiens
tttgtggctgctctg

SEQ ID NO: 947978 - DNA, 15 bp, Homo sapiens
ttgtggctgctctgc

SEQ ID NO: 947979 - DNA, 15 bp, Homo sapiens
tgtggctgctctgct

SEQ ID NO: 947980 - DNA, 15 bp, Homo sapiens
gtggctgctctgctc

SEQ ID NO: 947981 - DNA, 15 bp, Homo sapiens
tggctgctctgctct

SEQ ID NO: 947982 - DNA, 15 bp, Homo sapiens
ggctgctctgctctg

SEQ ID NO: 947983 - DNA, 15 bp, Homo sapiens
gctgctctgctctgt

SEQ ID NO: 947984 - DNA, 15 bp, Homo sapiens
ctgctctgctctgtt

SEQ ID NO: 947985 - DNA, 15 bp, Homo sapiens
tgctctgctctgttt

SEQ ID NO: 947986 - DNA, 15 bp, Homo sapiens
gctctgctctgtttc

SEQ ID NO: 947987 - DNA, 15 bp, Homo sapiens
ctctgctctgtttct

SEQ ID NO: 947988 - DNA, 15 bp, Homo sapiens
tctgctctgtttctc

SEQ ID NO: 947989 - DNA, 15 bp, Homo sapiens
ctgctctgtttctct

SEQ ID NO: 947990 - DNA, 15 bp, Homo sapiens
tgctctgtttctctg

SEQ ID NO: 947991 - DNA, 15 bp, Homo sapiens
gctctgtttctctga

SEQ ID NO: 947992 - DNA, 15 bp, Homo sapiens
ctctgtttctctgat

SEQ ID NO: 947993 - DNA, 15 bp, Homo sapiens
tctgtttctctgatg

SEQ ID NO: 947994 - DNA, 15 bp, Homo sapiens
ctgtttctctgatgg

SEQ ID NO: 947995 - DNA, 15 bp, Homo sapiens
tgtttctctgatggc

SEQ ID NO: 947996 - DNA, 15 bp, Homo sapiens
gtttctctgatggcc

SEQ ID NO: 947997 - DNA, 15 bp, Homo sapiens
tttctctgatggcct

SEQ ID NO: 947998 - DNA, 15 bp, Homo sapiens
ttctctgatggcctt

SEQ ID NO: 947999 - DNA, 15 bp, Homo sapiens
tctctgatggccttc

SEQ ID NO: 948000 - DNA, 15 bp, Homo sapiens
ctctgatggccttca

SEQ ID NO: 948001 - DNA, 15 bp, Homo sapiens
tctgatggccttcag

SEQ ID NO: 948002 - DNA, 15 bp, Homo sapiens
ctgatggccttcagc

SEQ ID NO: 948003 - DNA, 15 bp, Homo sapiens
tgatggccttcagct

SEQ ID NO: 948004 - DNA, 15 bp, Homo sapiens
gatggccttcagctg

SEQ ID NO: 948005 - DNA, 15 bp, Homo sapiens
atggccttcagctgt

SEQ ID NO: 948006 - DNA, 15 bp, Homo sapiens
tggccttcagctgtg

SEQ ID NO: 948007 - DNA, 15 bp, Homo sapiens
ggccttcagctgtgc

SEQ ID NO: 948008 - DNA, 15 bp, Homo sapiens
gccttcagctgtgct

SEQ ID NO: 948009 - DNA, 15 bp, Homo sapiens
ccttcagctgtgctc

SEQ ID NO: 948010 - DNA, 15 bp, Homo sapiens
cttcagctgtgctca

SEQ ID NO: 948011 - DNA, 15 bp, Homo sapiens
ttcagctgtgctcat

SEQ ID NO: 948012 - DNA, 15 bp, Homo sapiens
tcagctgtgctcatt

SEQ ID NO: 948013 - DNA, 15 bp, Homo sapiens
cagctgtgctcattt

SEQ ID NO: 948014 - DNA, 15 bp, Homo sapiens
agctgtgctcatttt

SEQ ID NO: 948015 - DNA, 15 bp, Homo sapiens
gctgtgctcattttc

SEQ ID NO: 948016 - DNA, 15 bp, Homo sapiens
ctgtgctcattttct

SEQ ID NO: 948017 - DNA, 15 bp, Homo sapiens
tgtgctcattttcta

SEQ ID NO: 948018 - DNA, 15 bp, Homo sapiens
gtgctcattttctat

SEQ ID NO: 948019 - DNA, 15 bp, Homo sapiens
tgctcattttctatg

SEQ ID NO: 948020 - DNA, 15 bp, Homo sapiens
gctcattttctatga

SEQ ID NO: 948021 - DNA, 15 bp, Homo sapiens
ctcattttctatgaa

SEQ ID NO: 948022 - DNA, 15 bp, Homo sapiens
tcattttctatgaaa

SEQ ID NO: 948023 - DNA, 15 bp, Homo sapiens
cattttctatgaaag

SEQ ID NO: 948024 - DNA, 15 bp, Homo sapiens
attttctatgaaagt

SEQ ID NO: 948025 - DNA, 15 bp, Homo sapiens
ttttctatgaaagtg

SEQ ID NO: 948026 - DNA, 15 bp, Homo sapiens
tttctatgaaagtgc

SEQ ID NO: 948027 - DNA, 15 bp, Homo sapiens
ttctatgaaagtgct

SEQ ID NO: 948028 - DNA, 15 bp, Homo sapiens
tctatgaaagtgctg

SEQ ID NO: 948029 - DNA, 15 bp, Homo sapiens
ctatgaaagtgctga

SEQ ID NO: 948030 - DNA, 15 bp, Homo sapiens
tatgaaagtgctgat

SEQ ID NO: 948031 - DNA, 15 bp, Homo sapiens
atgaaagtgctgatg

SEQ ID NO: 948032 - DNA, 15 bp, Homo sapiens
tgaaagtgctgatgc

SEQ ID NO: 948033 - DNA, 15 bp, Homo sapiens
gaaagtgctgatgcc

SEQ ID NO: 948034 - DNA, 15 bp, Homo sapiens
aaagtgctgatgcct

SEQ ID NO: 948035 - DNA, 15 bp, Homo sapiens
aagtgctgatgcctc

SEQ ID NO: 948036 - DNA, 15 bp, Homo sapiens
agtgctgatgcctca

SEQ ID NO: 948037 - DNA, 15 bp, Homo sapiens
gtgctgatgcctcag

SEQ ID NO: 948038 - DNA, 15 bp, Homo sapiens
tgctgatgcctcagg

SEQ ID NO: 948039 - DNA, 15 bp, Homo sapiens
gctgatgcctcaggc

SEQ ID NO: 948040 - DNA, 15 bp, Homo sapiens
ctgatgcctcaggcc

SEQ ID NO: 948041 - DNA, 15 bp, Homo sapiens
tgatgcctcaggccc

SEQ ID NO: 948042 - DNA, 15 bp, Homo sapiens
gatgcctcaggcccc

SEQ ID NO: 948043 - DNA, 15 bp, Homo sapiens
atgcctcaggcccca

SEQ ID NO: 948044 - DNA, 15 bp, Homo sapiens
tgcctcaggccccaa

SEQ ID NO: 948045 - DNA, 15 bp, Homo sapiens
gcctcaggccccaag

SEQ ID NO: 948046 - DNA, 15 bp, Homo sapiens
cctcaggccccaagt

SEQ ID NO: 948047 - DNA, 15 bp, Homo sapiens
ctcaggccccaagtg

SEQ ID NO: 948048 - DNA, 15 bp, Homo sapiens
tcaggccccaagtgg

SEQ ID NO: 948049 - DNA, 15 bp, Homo sapiens
caggccccaagtggt

SEQ ID NO: 948050 - DNA, 15 bp, Homo sapiens
aggccccaagtggtc

SEQ ID NO: 948051 - DNA, 15 bp, Homo sapiens
ggccccaagtggtcg

SEQ ID NO: 948052 - DNA, 15 bp, Homo sapiens
gccccaagtggtcgt

SEQ ID NO: 948053 - DNA, 15 bp, Homo sapiens
ccccaagtggtcgtt

SEQ ID NO: 948054 - DNA, 15 bp, Homo sapiens
cccaagtggtcgttg

SEQ ID NO: 948055 - DNA, 15 bp, Homo sapiens
ccaagtggtcgttga

SEQ ID NO: 948056 - DNA, 15 bp, Homo sapiens
caagtggtcgttgat

SEQ ID NO: 948057 - DNA, 15 bp, Homo sapiens
aagtggtcgttgatt

SEQ ID NO: 948058 - DNA, 15 bp, Homo sapiens
agtggtcgttgattc

SEQ ID NO: 948059 - DNA, 15 bp, Homo sapiens
gtggtcgttgattcc

SEQ ID NO: 948060 - DNA, 15 bp, Homo sapiens
tggtcgttgattcca

SEQ ID NO: 948061 - DNA, 15 bp, Homo sapiens
ggtcgttgattccaa

SEQ ID NO: 948062 - DNA, 15 bp, Homo sapiens
gtcgttgattccaaa

SEQ ID NO: 948063 - DNA, 15 bp, Homo sapiens
tcgttgattccaaaa

SEQ ID NO: 948064 - DNA, 15 bp, Homo sapiens
cgttgattccaaaat

SEQ ID NO: 948065 - DNA, 15 bp, Homo sapiens
gttgattccaaaatg

SEQ ID NO: 948066 - DNA, 15 bp, Homo sapiens
ttgattccaaaatgc

SEQ ID NO: 948067 - DNA, 15 bp, Homo sapiens
tgattccaaaatgct

SEQ ID NO: 948068 - DNA, 15 bp, Homo sapiens
gattccaaaatgctt

SEQ ID NO: 948069 - DNA, 15 bp, Homo sapiens
attccaaaatgcttt

SEQ ID NO: 948070 - DNA, 15 bp, Homo sapiens
ttccaaaatgctttc

SEQ ID NO: 948071 - DNA, 15 bp, Homo sapiens
tccaaaatgctttca

SEQ ID NO: 948072 - DNA, 15 bp, Homo sapiens
ccaaaatgctttcag

SEQ ID NO: 948073 - DNA, 15 bp, Homo sapiens
caaaatgctttcagc

SEQ ID NO: 948074 - DNA, 15 bp, Homo sapiens
aaaatgctttcagct

SEQ ID NO: 948075 - DNA, 15 bp, Homo sapiens
aaatgctttcagctc

SEQ ID NO: 948076 - DNA, 15 bp, Homo sapiens
aatgctttcagctct

SEQ ID NO: 948077 - DNA, 15 bp, Homo sapiens
atgctttcagctctt

SEQ ID NO: 948078 - DNA, 15 bp, Homo sapiens
tgctttcagctcttc

SEQ ID NO: 948079 - DNA, 15 bp, Homo sapiens
gctttcagctcttca

SEQ ID NO: 948080 - DNA, 15 bp, Homo sapiens
ctttcagctcttcac

SEQ ID NO: 948081 - DNA, 15 bp, Homo sapiens
tttcagctcttcaca

SEQ ID NO: 948082 - DNA, 15 bp, Homo sapiens
ttcagctcttcacat

SEQ ID NO: 948083 - DNA, 15 bp, Homo sapiens
tcagctcttcacatc

SEQ ID NO: 948084 - DNA, 15 bp, Homo sapiens
cagctcttcacatct

SEQ ID NO: 948085 - DNA, 15 bp, Homo sapiens
agctcttcacatctg

SEQ ID NO: 948086 - DNA, 15 bp, Homo sapiens
gctcttcacatctgg

SEQ ID NO: 948087 - DNA, 15 bp, Homo sapiens
ctcttcacatctggt

SEQ ID NO: 948088 - DNA, 15 bp, Homo sapiens
tcttcacatctggtt

SEQ ID NO: 948089 - DNA, 15 bp, Homo sapiens
cttcacatctggtta

SEQ ID NO: 948090 - DNA, 15 bp, Homo sapiens
ttcacatctggttag

SEQ ID NO: 948091 - DNA, 15 bp, Homo sapiens
tcacatctggttaga

SEQ ID NO: 948092 - DNA, 15 bp, Homo sapiens
cacatctggttagaa

SEQ ID NO: 948093 - DNA, 15 bp, Homo sapiens
acatctggttagaac

SEQ ID NO: 948094 - DNA, 15 bp, Homo sapiens
catctggttagaacc

SEQ ID NO: 948095 - DNA, 15 bp, Homo sapiens
atctggttagaacca

SEQ ID NO: 948096 - DNA, 15 bp, Homo sapiens
tctggttagaaccat

SEQ ID NO: 948097 - DNA, 15 bp, Homo sapiens
ctggttagaaccatc

SEQ ID NO: 948098 - DNA, 15 bp, Homo sapiens
tggttagaaccatca

SEQ ID NO: 948099 - DNA, 15 bp, Homo sapiens
ggttagaaccatcag

SEQ ID NO: 948100 - DNA, 15 bp, Homo sapiens
gttagaaccatcaga

SEQ ID NO: 948101 - DNA, 15 bp, Homo sapiens
ttagaaccatcagag

SEQ ID NO: 948102 - DNA, 15 bp, Homo sapiens
tagaaccatcagaga

SEQ ID NO: 948103 - DNA, 15 bp, Homo sapiens
agaaccatcagagac

SEQ ID NO: 948104 - DNA, 15 bp, Homo sapiens
gaaccatcagagact

SEQ ID NO: 948105 - DNA, 15 bp, Homo sapiens
aaccatcagagactt

SEQ ID NO: 948106 - DNA, 15 bp, Homo sapiens
accatcagagacttt

SEQ ID NO: 948107 - DNA, 15 bp, Homo sapiens
ccatcagagactttt

SEQ ID NO: 948108 - DNA, 15 bp, Homo sapiens
catcagagacttttt

SEQ ID NO: 948109 - DNA, 15 bp, Homo sapiens
atcagagactttttc

SEQ ID NO: 948110 - DNA, 15 bp, Homo sapiens
tcagagactttttcc

SEQ ID NO: 948111 - DNA, 15 bp, Homo sapiens
cagagactttttcct

SEQ ID NO: 948112 - DNA, 15 bp, Homo sapiens
agagactttttcctc

SEQ ID NO: 948113 - DNA, 15 bp, Homo sapiens
gagactttttcctca

SEQ ID NO: 948114 - DNA, 15 bp, Homo sapiens
agactttttcctcag

SEQ ID NO: 948115 - DNA, 15 bp, Homo sapiens
gactttttcctcagt

SEQ ID NO: 948116 - DNA, 15 bp, Homo sapiens
actttttcctcagta

SEQ ID NO: 948117 - DNA, 15 bp, Homo sapiens
ctttttcctcagtat

SEQ ID NO: 948118 - DNA, 15 bp, Homo sapiens
tttttcctcagtata

SEQ ID NO: 948119 - DNA, 15 bp, Homo sapiens
ttttcctcagtatat

SEQ ID NO: 948120 - DNA, 15 bp, Homo sapiens
tttcctcagtatata

SEQ ID NO: 948121 - DNA, 15 bp, Homo sapiens
ttcctcagtatataa

SEQ ID NO: 948122 - DNA, 15 bp, Homo sapiens
tcctcagtatataag

SEQ ID NO: 948123 - DNA, 15 bp, Homo sapiens
cctcagtatataagc

SEQ ID NO: 948124 - DNA, 15 bp, Homo sapiens
ctcagtatataagca

SEQ ID NO: 948125 - DNA, 15 bp, Homo sapiens
tcagtatataagcaa

SEQ ID NO: 948126 - DNA, 15 bp, Homo sapiens
gtatataagcaaaat

SEQ ID NO: 948127 - DNA, 15 bp, Homo sapiens
tatataagcaaaatg

SEQ ID NO: 948128 - DNA, 15 bp, Homo sapiens
atataagcaaaatgt

SEQ ID NO: 948129 - DNA, 15 bp, Homo sapiens
tataagcaaaatgtg

SEQ ID NO: 948130 - DNA, 15 bp, Homo sapiens
ataagcaaaatgtga

SEQ ID NO: 948131 - DNA, 15 bp, Homo sapiens
taagcaaaatgtgac

SEQ ID NO: 948132 - DNA, 15 bp, Homo sapiens
aagcaaaatgtgacc

SEQ ID NO: 948133 - DNA, 15 bp, Homo sapiens
agcaaaatgtgacca

SEQ ID NO: 948134 - DNA, 15 bp, Homo sapiens
gcaaaatgtgaccac

SEQ ID NO: 948135 - DNA, 15 bp, Homo sapiens
caaaatgtgaccacc

SEQ ID NO: 948136 - DNA, 15 bp, Homo sapiens
aaaatgtgaccaccc

SEQ ID NO: 948137 - DNA, 15 bp, Homo sapiens
aaatgtgaccaccca

SEQ ID NO: 948138 - DNA, 15 bp, Homo sapiens
aatgtgaccacccat

SEQ ID NO: 948139 - DNA, 15 bp, Homo sapiens
atgtgaccacccatg

SEQ ID NO: 948140 - DNA, 15 bp, Homo sapiens
tgtgaccacccatgt

SEQ ID NO: 948141 - DNA, 15 bp, Homo sapiens
gtgaccacccatgtt

SEQ ID NO: 948142 - DNA, 15 bp, Homo sapiens
tgaccacccatgttc

SEQ ID NO: 948143 - DNA, 15 bp, Homo sapiens
gaccacccatgttcc

SEQ ID NO: 948144 - DNA, 15 bp, Homo sapiens
accacccatgttcca

SEQ ID NO: 948145 - DNA, 15 bp, Homo sapiens
ccacccatgttccag

SEQ ID NO: 948146 - DNA, 15 bp, Homo sapiens
cacccatgttccagg

SEQ ID NO: 948147 - DNA, 15 bp, Homo sapiens
acccatgttccagga

SEQ ID NO: 948148 - DNA, 15 bp, Homo sapiens
cccatgttccaggaa

SEQ ID NO: 948149 - DNA, 15 bp, Homo sapiens
ccatgttccaggaaa

SEQ ID NO: 948150 - DNA, 15 bp, Homo sapiens
catgttccaggaaaa

SEQ ID NO: 948151 - DNA, 15 bp, Homo sapiens
atgttccaggaaaat

SEQ ID NO: 948152 - DNA, 15 bp, Homo sapiens
tgttccaggaaaata

SEQ ID NO: 948153 - DNA, 15 bp, Homo sapiens
gttccaggaaaatac

SEQ ID NO: 948154 - DNA, 15 bp, Homo sapiens
ttccaggaaaataca

SEQ ID NO: 948155 - DNA, 15 bp, Homo sapiens
tccaggaaaatacag

SEQ ID NO: 948156 - DNA, 15 bp, Homo sapiens
ccaggaaaatacagt

SEQ ID NO: 948157 - DNA, 15 bp, Homo sapiens
caggaaaatacagtt

SEQ ID NO: 948158 - DNA, 15 bp, Homo sapiens
aggaaaatacagttt

SEQ ID NO: 948159 - DNA, 15 bp, Homo sapiens
ggaaaatacagtttg

SEQ ID NO: 948160 - DNA, 15 bp, Homo sapiens
gaaaatacagtttgc

SEQ ID NO: 948161 - DNA, 15 bp, Homo sapiens
aaaatacagtttgcc

SEQ ID NO: 948162 - DNA, 15 bp, Homo sapiens
aaatacagtttgcca

SEQ ID NO: 948163 - DNA, 15 bp, Homo sapiens
aatacagtttgccac

SEQ ID NO: 948164 - DNA, 15 bp, Homo sapiens
atacagtttgccaca

SEQ ID NO: 948165 - DNA, 15 bp, Homo sapiens
tacagtttgccacac

SEQ ID NO: 948166 - DNA, 15 bp, Homo sapiens
acagtttgccacacc

SEQ ID NO: 948167 - DNA, 15 bp, Homo sapiens
cagtttgccacacca

SEQ ID NO: 948168 - DNA, 15 bp, Homo sapiens
agtttgccacaccaa

SEQ ID NO: 948169 - DNA, 15 bp, Homo sapiens
gtttgccacaccaag

SEQ ID NO: 948170 - DNA, 15 bp, Homo sapiens
tttgccacaccaagg

SEQ ID NO: 948171 - DNA, 15 bp, Homo sapiens
ttgccacaccaaggg

SEQ ID NO: 948172 - DNA, 15 bp, Homo sapiens
tgccacaccaaggga

SEQ ID NO: 948173 - DNA, 15 bp, Homo sapiens
gccacaccaagggag

SEQ ID NO: 948174 - DNA, 15 bp, Homo sapiens
ccacaccaagggagg

SEQ ID NO: 948175 - DNA, 15 bp, Homo sapiens
cacaccaagggaggg

SEQ ID NO: 948176 - DNA, 15 bp, Homo sapiens
acaccaagggagggg

SEQ ID NO: 948177 - DNA, 15 bp, Homo sapiens
caccaagggagggga

SEQ ID NO: 948178 - DNA, 15 bp, Homo sapiens
accaagggaggggat

SEQ ID NO: 948179 - DNA, 15 bp, Homo sapiens
ccaagggaggggatc

SEQ ID NO: 948180 - DNA, 15 bp, Homo sapiens
caagggaggggatca

SEQ ID NO: 948181 - DNA, 15 bp, Homo sapiens
aagggaggggatcag

SEQ ID NO: 948182 - DNA, 15 bp, Homo sapiens
agggaggggatcagg

SEQ ID NO: 948183 - DNA, 15 bp, Homo sapiens
gggaggggatcaggt

SEQ ID NO: 948184 - DNA, 15 bp, Homo sapiens
ggaggggatcaggtc

SEQ ID NO: 948185 - DNA, 15 bp, Homo sapiens
gaggggatcaggtct

SEQ ID NO: 948186 - DNA, 15 bp, Homo sapiens
aggggatcaggtcta

SEQ ID NO: 948187 - DNA, 15 bp, Homo sapiens
ggggatcaggtctag

SEQ ID NO: 948188 - DNA, 15 bp, Homo sapiens
gggatcaggtctagt

SEQ ID NO: 948189 - DNA, 15 bp, Homo sapiens
ggatcaggtctagta

SEQ ID NO: 948190 - DNA, 15 bp, Homo sapiens
gatcaggtctagtat

SEQ ID NO: 948191 - DNA, 15 bp, Homo sapiens
atcaggtctagtatc

SEQ ID NO: 948192 - DNA, 15 bp, Homo sapiens
tcaggtctagtatcc

SEQ ID NO: 948193 - DNA, 15 bp, Homo sapiens
caggtctagtatcct

SEQ ID NO: 948194 - DNA, 15 bp, Homo sapiens
aggtctagtatcctg

SEQ ID NO: 948195 - DNA, 15 bp, Homo sapiens
ggtctagtatcctgc

SEQ ID NO: 948196 - DNA, 15 bp, Homo sapiens
gtctagtatcctgct

SEQ ID NO: 948197 - DNA, 15 bp, Homo sapiens
tctagtatcctgctt

SEQ ID NO: 948198 - DNA, 15 bp, Homo sapiens
ctagtatcctgcttc

SEQ ID NO: 948199 - DNA, 15 bp, Homo sapiens
tagtatcctgcttct

SEQ ID NO: 948200 - DNA, 15 bp, Homo sapiens
agtatcctgcttctg

SEQ ID NO: 948201 - DNA, 15 bp, Homo sapiens
gtatcctgcttctgg

SEQ ID NO: 948202 - DNA, 15 bp, Homo sapiens
tatcctgcttctgga

SEQ ID NO: 948203 - DNA, 15 bp, Homo sapiens
atcctgcttctggaa

SEQ ID NO: 948204 - DNA, 15 bp, Homo sapiens
tcctgcttctggaat

SEQ ID NO: 948205 - DNA, 15 bp, Homo sapiens
cctgcttctggaata

SEQ ID NO: 948206 - DNA, 15 bp, Homo sapiens
ctgcttctggaataa

SEQ ID NO: 948207 - DNA, 15 bp, Homo sapiens
tgcttctggaataaa

SEQ ID NO: 948208 - DNA, 15 bp, Homo sapiens
gcttctggaataaaa

SEQ ID NO: 948209 - DNA, 15 bp, Homo sapiens
cttctggaataaaac

SEQ ID NO: 948210 - DNA, 15 bp, Homo sapiens
ttctggaataaaact

SEQ ID NO: 948211 - DNA, 15 bp, Homo sapiens
tctggaataaaactt

SEQ ID NO: 948212 - DNA, 15 bp, Homo sapiens
ctggaataaaacttc

SEQ ID NO: 948213 - DNA, 15 bp, Homo sapiens
tggaataaaacttca

SEQ ID NO: 948214 - DNA, 15 bp, Homo sapiens
ggaataaaacttcac

SEQ ID NO: 948215 - DNA, 15 bp, Homo sapiens
gaataaaacttcaca

SEQ ID NO: 948216 - DNA, 15 bp, Homo sapiens
aataaaacttcacac

SEQ ID NO: 948217 - DNA, 15 bp, Homo sapiens
ataaaacttcacaca

SEQ ID NO: 948218 - DNA, 15 bp, Homo sapiens
taaaacttcacacat

SEQ ID NO: 948219 - DNA, 15 bp, Homo sapiens
aaaacttcacacatg

SEQ ID NO: 948220 - DNA, 15 bp, Homo sapiens
aaacttcacacatgc

SEQ ID NO: 948221 - DNA, 15 bp, Homo sapiens
aacttcacacatgca

SEQ ID NO: 948222 - DNA, 15 bp, Homo sapiens
acttcacacatgcaa

SEQ ID NO: 948223 - DNA, 15 bp, Homo sapiens
cttcacacatgcaaa

SEQ ID NO: 948224 - DNA, 15 bp, Homo sapiens
ttcacacatgcaaag

SEQ ID NO: 948225 - DNA, 15 bp, Homo sapiens
tcacacatgcaaagg

SEQ ID NO: 948226 - DNA, 15 bp, Homo sapiens
cacacatgcaaaggg

SEQ ID NO: 948227 - DNA, 15 bp, Homo sapiens
acacatgcaaagggg

SEQ ID NO: 948228 - DNA, 15 bp, Homo sapiens
cacatgcaaaggggt

SEQ ID NO: 948229 - DNA, 15 bp, Homo sapiens
acatgcaaaggggta

SEQ ID NO: 948230 - DNA, 15 bp, Homo sapiens
catgcaaaggggtag

SEQ ID NO: 948231 - DNA, 15 bp, Homo sapiens
atgcaaaggggtagg

SEQ ID NO: 948232 - DNA, 15 bp, Homo sapiens
tgcaaaggggtagga

SEQ ID NO: 948233 - DNA, 15 bp, Homo sapiens
gcaaaggggtaggaa

SEQ ID NO: 948234 - DNA, 15 bp, Homo sapiens
caaaggggtaggaag

SEQ ID NO: 948235 - DNA, 15 bp, Homo sapiens
aaaggggtaggaagc

SEQ ID NO: 948236 - DNA, 15 bp, Homo sapiens
aaggggtaggaagct

SEQ ID NO: 948237 - DNA, 15 bp, Homo sapiens
aggggtaggaagctg

SEQ ID NO: 948238 - DNA, 15 bp, Homo sapiens
ggggtaggaagctgt

SEQ ID NO: 948239 - DNA, 15 bp, Homo sapiens
gggtaggaagctgtg

SEQ ID NO: 948240 - DNA, 15 bp, Homo sapiens
ggtaggaagctgtgg

SEQ ID NO: 948241 - DNA, 15 bp, Homo sapiens
gtaggaagctgtgga

SEQ ID NO: 948242 - DNA, 15 bp, Homo sapiens
taggaagctgtggat

SEQ ID NO: 948243 - DNA, 15 bp, Homo sapiens
aggaagctgtggatg

SEQ ID NO: 948244 - DNA, 15 bp, Homo sapiens
ggaagctgtggatgc

SEQ ID NO: 948245 - DNA, 15 bp, Homo sapiens
gaagctgtggatgcc

SEQ ID NO: 948246 - DNA, 15 bp, Homo sapiens
aagctgtggatgcct

SEQ ID NO: 948247 - DNA, 15 bp, Homo sapiens
agctgtggatgcctg

SEQ ID NO: 948248 - DNA, 15 bp, Homo sapiens
gctgtggatgcctgt

SEQ ID NO: 948249 - DNA, 15 bp, Homo sapiens
ctgtggatgcctgtc

SEQ ID NO: 948250 - DNA, 15 bp, Homo sapiens
tgtggatgcctgtcc

SEQ ID NO: 948251 - DNA, 15 bp, Homo sapiens
gtggatgcctgtcca

SEQ ID NO: 948252 - DNA, 15 bp, Homo sapiens
tggatgcctgtccaa

SEQ ID NO: 948253 - DNA, 15 bp, Homo sapiens
ggatgcctgtccaac

SEQ ID NO: 948254 - DNA, 15 bp, Homo sapiens
gatgcctgtccaaca

SEQ ID NO: 948255 - DNA, 15 bp, Homo sapiens
atgcctgtccaacaa

SEQ ID NO: 948256 - DNA, 15 bp, Homo sapiens
tgcctgtccaacaaa

SEQ ID NO: 948257 - DNA, 15 bp, Homo sapiens
gcctgtccaacaaaa

SEQ ID NO: 948258 - DNA, 15 bp, Homo sapiens
cctgtccaacaaaag

SEQ ID NO: 948259 - DNA, 15 bp, Homo sapiens
ctgtccaacaaaagg

SEQ ID NO: 948260 - DNA, 15 bp, Homo sapiens
tgtccaacaaaagga

SEQ ID NO: 948261 - DNA, 15 bp, Homo sapiens
gtccaacaaaaggaa

SEQ ID NO: 948262 - DNA, 15 bp, Homo sapiens
tccaacaaaaggaaa

SEQ ID NO: 948263 - DNA, 15 bp, Homo sapiens
ccaacaaaaggaaag

SEQ ID NO: 948264 - DNA, 15 bp, Homo sapiens
caacaaaaggaaagc

SEQ ID NO: 948265 - DNA, 15 bp, Homo sapiens
aacaaaaggaaagcg

SEQ ID NO: 948266 - DNA, 15 bp, Homo sapiens
acaaaaggaaagcgt

SEQ ID NO: 948267 - DNA, 15 bp, Homo sapiens
caaaaggaaagcgta

SEQ ID NO: 948268 - DNA, 15 bp, Homo sapiens
aaaaggaaagcgtat

SEQ ID NO: 948269 - DNA, 15 bp, Homo sapiens
aaaggaaagcgtatt

SEQ ID NO: 948270 - DNA, 15 bp, Homo sapiens
aaggaaagcgtatta

SEQ ID NO: 948271 - DNA, 15 bp, Homo sapiens
aggaaagcgtattaa

SEQ ID NO: 948272 - DNA, 15 bp, Homo sapiens
ggaaagcgtattaat

SEQ ID NO: 948273 - DNA, 15 bp, Homo sapiens
gaaagcgtattaatc

SEQ ID NO: 948274 - DNA, 15 bp, Homo sapiens
aaagcgtattaatct

SEQ ID NO: 948275 - DNA, 15 bp, Homo sapiens
aagcgtattaatctg

SEQ ID NO: 948276 - DNA, 15 bp, Homo sapiens
agcgtattaatctgc

SEQ ID NO: 948277 - DNA, 15 bp, Homo sapiens
gcgtattaatctgca

SEQ ID NO: 948278 - DNA, 15 bp, Homo sapiens
cgtattaatctgcaa

SEQ ID NO: 948279 - DNA, 15 bp, Homo sapiens
gtattaatctgcaaa

SEQ ID NO: 948280 - DNA, 15 bp, Homo sapiens
tattaatctgcaaag

SEQ ID NO: 948281 - DNA, 15 bp, Homo sapiens
attaatctgcaaaga

SEQ ID NO: 948282 - DNA, 15 bp, Homo sapiens
ttaatctgcaaagaa

SEQ ID NO: 948283 - DNA, 15 bp, Homo sapiens
taatctgcaaagaaa

SEQ ID NO: 948284 - DNA, 15 bp, Homo sapiens
aatctgcaaagaaaa

SEQ ID NO: 948285 - DNA, 15 bp, Homo sapiens
atctgcaaagaaaac

SEQ ID NO: 948286 - DNA, 15 bp, Homo sapiens
tctgcaaagaaaaca

SEQ ID NO: 948287 - DNA, 15 bp, Homo sapiens
ctgcaaagaaaacat

SEQ ID NO: 948288 - DNA, 15 bp, Homo sapiens
tgcaaagaaaacatg

SEQ ID NO: 948289 - DNA, 15 bp, Homo sapiens
gcaaagaaaacatgt

SEQ ID NO: 948290 - DNA, 15 bp, Homo sapiens
caaagaaaacatgtt

SEQ ID NO: 948291 - DNA, 15 bp, Homo sapiens
aaagaaaacatgttt

SEQ ID NO: 948292 - DNA, 15 bp, Homo sapiens
aagaaaacatgtttt

SEQ ID NO: 948293 - DNA, 15 bp, Homo sapiens
agaaaacatgttttc

SEQ ID NO: 948294 - DNA, 15 bp, Homo sapiens
gaaaacatgttttcc

SEQ ID NO: 948295 - DNA, 15 bp, Homo sapiens
aaaacatgttttccc

SEQ ID NO: 948296 - DNA, 15 bp, Homo sapiens
aaacatgttttccca

SEQ ID NO: 948297 - DNA, 15 bp, Homo sapiens
aacatgttttcccat

SEQ ID NO: 948298 - DNA, 15 bp, Homo sapiens
acatgttttcccatt

SEQ ID NO: 948299 - DNA, 15 bp, Homo sapiens
catgttttcccattg

SEQ ID NO: 948300 - DNA, 15 bp, Homo sapiens
atgttttcccattgc

SEQ ID NO: 948301 - DNA, 15 bp, Homo sapiens
tgttttcccattgct

SEQ ID NO: 948302 - DNA, 15 bp, Homo sapiens
gttttcccattgcta

SEQ ID NO: 948303 - DNA, 15 bp, Homo sapiens
ttttcccattgctat

SEQ ID NO: 948304 - DNA, 15 bp, Homo sapiens
tttcccattgctatg

SEQ ID NO: 948305 - DNA, 15 bp, Homo sapiens
ttcccattgctatgg

SEQ ID NO: 948306 - DNA, 15 bp, Homo sapiens
tcccattgctatggt

SEQ ID NO: 948307 - DNA, 15 bp, Homo sapiens
cccattgctatggtg

SEQ ID NO: 948308 - DNA, 15 bp, Homo sapiens
ccattgctatggtga

SEQ ID NO: 948309 - DNA, 15 bp, Homo sapiens
cattgctatggtgat

SEQ ID NO: 948310 - DNA, 15 bp, Homo sapiens
attgctatggtgatc

SEQ ID NO: 948311 - DNA, 15 bp, Homo sapiens
ttgctatggtgatca

SEQ ID NO: 948312 - DNA, 15 bp, Homo sapiens
tgctatggtgatcag

SEQ ID NO: 948313 - DNA, 15 bp, Homo sapiens
gctatggtgatcagc

SEQ ID NO: 948314 - DNA, 15 bp, Homo sapiens
ctatggtgatcagct

SEQ ID NO: 948315 - DNA, 15 bp, Homo sapiens
tatggtgatcagctt

SEQ ID NO: 948316 - DNA, 15 bp, Homo sapiens
atggtgatcagctta

SEQ ID NO: 948317 - DNA, 15 bp, Homo sapiens
tggtgatcagcttat

SEQ ID NO: 948318 - DNA, 15 bp, Homo sapiens
ggtgatcagcttata

SEQ ID NO: 948319 - DNA, 15 bp, Homo sapiens
gtgatcagcttatac

SEQ ID NO: 948320 - DNA, 15 bp, Homo sapiens
tgatcagcttatacc

SEQ ID NO: 948321 - DNA, 15 bp, Homo sapiens
gatcagcttataccc

SEQ ID NO: 948322 - DNA, 15 bp, Homo sapiens
atcagcttataccca

SEQ ID NO: 948323 - DNA, 15 bp, Homo sapiens
tcagcttatacccaa

SEQ ID NO: 948324 - DNA, 15 bp, Homo sapiens
cagcttatacccaaa

SEQ ID NO: 948325 - DNA, 15 bp, Homo sapiens
agcttatacccaaaa

SEQ ID NO: 948326 - DNA, 15 bp, Homo sapiens
gcttatacccaaaac

SEQ ID NO: 948327 - DNA, 15 bp, Homo sapiens
cttatacccaaaacc

SEQ ID NO: 948328 - DNA, 15 bp, Homo sapiens
ttatacccaaaacca

SEQ ID NO: 948329 - DNA, 15 bp, Homo sapiens
tatacccaaaaccaa

SEQ ID NO: 948330 - DNA, 15 bp, Homo sapiens
atacccaaaaccaaa

SEQ ID NO: 948331 - DNA, 15 bp, Homo sapiens
tacccaaaaccaaac

SEQ ID NO: 948332 - DNA, 15 bp, Homo sapiens
acccaaaaccaaacc

SEQ ID NO: 948333 - DNA, 15 bp, Homo sapiens
cccaaaaccaaacca

SEQ ID NO: 948334 - DNA, 15 bp, Homo sapiens
ccaaaaccaaaccat

SEQ ID NO: 948335 - DNA, 15 bp, Homo sapiens
caaaaccaaaccatc

SEQ ID NO: 948336 - DNA, 15 bp, Homo sapiens
aaaaccaaaccatca

SEQ ID NO: 948337 - DNA, 15 bp, Homo sapiens
aaaccaaaccatcaa

SEQ ID NO: 948338 - DNA, 15 bp, Homo sapiens
aaccaaaccatcaat

SEQ ID NO: 948339 - DNA, 15 bp, Homo sapiens
accaaaccatcaatt

SEQ ID NO: 948340 - DNA, 15 bp, Homo sapiens
ccaaaccatcaattg

SEQ ID NO: 948341 - DNA, 15 bp, Homo sapiens
caaaccatcaattgc

SEQ ID NO: 948342 - DNA, 15 bp, Homo sapiens
aaaccatcaattgct

SEQ ID NO: 948343 - DNA, 15 bp, Homo sapiens
aaccatcaattgctg

SEQ ID NO: 948344 - DNA, 15 bp, Homo sapiens
accatcaattgctgg

SEQ ID NO: 948345 - DNA, 15 bp, Homo sapiens
ccatcaattgctggt

SEQ ID NO: 948346 - DNA, 15 bp, Homo sapiens
catcaattgctggtg

SEQ ID NO: 948347 - DNA, 15 bp, Homo sapiens
atcaattgctggtgt

SEQ ID NO: 948348 - DNA, 15 bp, Homo sapiens
tcaattgctggtgtg

SEQ ID NO: 948349 - DNA, 15 bp, Homo sapiens
caattgctggtgtgt

SEQ ID NO: 948350 - DNA, 15 bp, Homo sapiens
aattgctggtgtgtt

SEQ ID NO: 948351 - DNA, 15 bp, Homo sapiens
attgctggtgtgtta

SEQ ID NO: 948352 - DNA, 15 bp, Homo sapiens
ttgctggtgtgttaa

SEQ ID NO: 948353 - DNA, 15 bp, Homo sapiens
tgctggtgtgttaat

SEQ ID NO: 948354 - DNA, 15 bp, Homo sapiens
gctggtgtgttaatt

SEQ ID NO: 948355 - DNA, 15 bp, Homo sapiens
ctggtgtgttaattc

SEQ ID NO: 948356 - DNA, 15 bp, Homo sapiens
tggtgtgttaattcc

SEQ ID NO: 948357 - DNA, 15 bp, Homo sapiens
ggtgtgttaattcct

SEQ ID NO: 948358 - DNA, 15 bp, Homo sapiens
gtgtgttaattccta

SEQ ID NO: 948359 - DNA, 15 bp, Homo sapiens
tgtgttaattcctaa

SEQ ID NO: 948360 - DNA, 15 bp, Homo sapiens
gtgttaattcctaat

SEQ ID NO: 948361 - DNA, 15 bp, Homo sapiens
tgttaattcctaatt

SEQ ID NO: 948362 - DNA, 15 bp, Homo sapiens
gttaattcctaatta

SEQ ID NO: 948363 - DNA, 15 bp, Homo sapiens
ttaattcctaattac

SEQ ID NO: 948364 - DNA, 15 bp, Homo sapiens
taattcctaattaca

SEQ ID NO: 948365 - DNA, 15 bp, Homo sapiens
aattcctaattacaa

SEQ ID NO: 948366 - DNA, 15 bp, Homo sapiens
attcctaattacaaa

SEQ ID NO: 948367 - DNA, 15 bp, Homo sapiens
ttcctaattacaaat

SEQ ID NO: 948368 - DNA, 15 bp, Homo sapiens
tcctaattacaaatg

SEQ ID NO: 948369 - DNA, 15 bp, Homo sapiens
cctaattacaaatgt

SEQ ID NO: 948370 - DNA, 15 bp, Homo sapiens
ctaattacaaatgtt

SEQ ID NO: 948371 - DNA, 15 bp, Homo sapiens
taattacaaatgtta

SEQ ID NO: 948372 - DNA, 15 bp, Homo sapiens
aattacaaatgttaa

SEQ ID NO: 948373 - DNA, 15 bp, Homo sapiens
attacaaatgttaat

SEQ ID NO: 948374 - DNA, 15 bp, Homo sapiens
ttacaaatgttaatc

SEQ ID NO: 948375 - DNA, 15 bp, Homo sapiens
tacaaatgttaatct

SEQ ID NO: 948376 - DNA, 15 bp, Homo sapiens
acaaatgttaatctt

SEQ ID NO: 948377 - DNA, 15 bp, Homo sapiens
caaatgttaatcttg

SEQ ID NO: 948378 - DNA, 15 bp, Homo sapiens
aaatgttaatcttga

SEQ ID NO: 948379 - DNA, 15 bp, Homo sapiens
aatgttaatcttgat

SEQ ID NO: 948380 - DNA, 15 bp, Homo sapiens
atgttaatcttgatc

SEQ ID NO: 948381 - DNA, 15 bp, Homo sapiens
tgttaatcttgatca

SEQ ID NO: 948382 - DNA, 15 bp, Homo sapiens
gttaatcttgatcat

SEQ ID NO: 948383 - DNA, 15 bp, Homo sapiens
ttaatcttgatcata

SEQ ID NO: 948384 - DNA, 15 bp, Homo sapiens
taatcttgatcataa

SEQ ID NO: 948385 - DNA, 15 bp, Homo sapiens
aatcttgatcataaa

SEQ ID NO: 948386 - DNA, 15 bp, Homo sapiens
atcttgatcataaaa

SEQ ID NO: 948387 - DNA, 15 bp, Homo sapiens
tcttgatcataaaat

SEQ ID NO: 948388 - DNA, 15 bp, Homo sapiens
cttgatcataaaatt

SEQ ID NO: 948389 - DNA, 15 bp, Homo sapiens
ttgatcataaaatta

SEQ ID NO: 948390 - DNA, 15 bp, Homo sapiens
tgatcataaaattaa

SEQ ID NO: 948391 - DNA, 15 bp, Homo sapiens
gatcataaaattaaa

SEQ ID NO: 948392 - DNA, 15 bp, Homo sapiens
atcataaaattaaag

SEQ ID NO: 948393 - DNA, 15 bp, Homo sapiens
tcataaaattaaagg

SEQ ID NO: 948394 - DNA, 15 bp, Homo sapiens
cataaaattaaaggt

SEQ ID NO: 948395 - DNA, 15 bp, Homo sapiens
ataaaattaaaggta

SEQ ID NO: 948396 - DNA, 15 bp, Homo sapiens
taaaattaaaggtat

SEQ ID NO: 948397 - DNA, 15 bp, Homo sapiens
aaaattaaaggtatt

SEQ ID NO: 948398 - DNA, 15 bp, Homo sapiens
aaattaaaggtattt

SEQ ID NO: 948399 - DNA, 15 bp, Homo sapiens
aattaaaggtatttt

SEQ ID NO: 948400 - DNA, 15 bp, Homo sapiens
attaaaggtattttt

SEQ ID NO: 948401 - DNA, 15 bp, Homo sapiens
ttaaaggtattttta

SEQ ID NO: 948402 - DNA, 15 bp, Homo sapiens
taaaggtatttttaa

SEQ ID NO: 948403 - DNA, 15 bp, Homo sapiens
aaaggtatttttaaa

SEQ ID NO: 948404 - DNA, 15 bp, Homo sapiens
aaggtatttttaaat

SEQ ID NO: 948405 - DNA, 15 bp, Homo sapiens
aggtatttttaaatg

SEQ ID NO: 948406 - DNA, 15 bp, Homo sapiens
ggtatttttaaatga

SEQ ID NO: 948407 - DNA, 15 bp, Homo sapiens
gtatttttaaatgac

SEQ ID NO: 948408 - DNA, 15 bp, Homo sapiens
tatttttaaatgacc

SEQ ID NO: 948409 - DNA, 15 bp, Homo sapiens
atttttaaatgacca

SEQ ID NO: 948410 - DNA, 15 bp, Homo sapiens
tttttaaatgaccag

SEQ ID NO: 948411 - DNA, 15 bp, Homo sapiens
ttttaaatgaccagt

SEQ ID NO: 948412 - DNA, 15 bp, Homo sapiens
tttaaatgaccagtt

SEQ ID NO: 948413 - DNA, 15 bp, Homo sapiens
ttaaatgaccagttg

SEQ ID NO: 948414 - DNA, 15 bp, Homo sapiens
taaatgaccagttga

SEQ ID NO: 948415 - DNA, 15 bp, Homo sapiens
aaatgaccagttgac

SEQ ID NO: 948416 - DNA, 15 bp, Homo sapiens
aatgaccagttgacc

SEQ ID NO: 948417 - DNA, 15 bp, Homo sapiens
atgaccagttgacca

SEQ ID NO: 948418 - DNA, 15 bp, Homo sapiens
tgaccagttgaccaa

SEQ ID NO: 948419 - DNA, 15 bp, Homo sapiens
gaccagttgaccaat

SEQ ID NO: 948420 - DNA, 15 bp, Homo sapiens
accagttgaccaatg

SEQ ID NO: 948421 - DNA, 15 bp, Homo sapiens
ccagttgaccaatgg

SEQ ID NO: 948422 - DNA, 15 bp, Homo sapiens
cagttgaccaatggg

SEQ ID NO: 948423 - DNA, 15 bp, Homo sapiens
agttgaccaatgggc

SEQ ID NO: 948424 - DNA, 15 bp, Homo sapiens
gttgaccaatgggca

SEQ ID NO: 948425 - DNA, 15 bp, Homo sapiens
ttgaccaatgggcag

SEQ ID NO: 948426 - DNA, 15 bp, Homo sapiens
tgaccaatgggcagc

SEQ ID NO: 948427 - DNA, 15 bp, Homo sapiens
gaccaatgggcagct

SEQ ID NO: 948428 - DNA, 15 bp, Homo sapiens
accaatgggcagctg

SEQ ID NO: 948429 - DNA, 15 bp, Homo sapiens
ccaatgggcagctgg

SEQ ID NO: 948430 - DNA, 15 bp, Homo sapiens
caatgggcagctgga

SEQ ID NO: 948431 - DNA, 15 bp, Homo sapiens
aatgggcagctggaa

SEQ ID NO: 948432 - DNA, 15 bp, Homo sapiens
atgggcagctggaat

SEQ ID NO: 948433 - DNA, 15 bp, Homo sapiens
tgggcagctggaatc

SEQ ID NO: 948434 - DNA, 15 bp, Homo sapiens
gggcagctggaatcc

SEQ ID NO: 948435 - DNA, 15 bp, Homo sapiens
ggcagctggaatcct

SEQ ID NO: 948436 - DNA, 15 bp, Homo sapiens
gcagctggaatcctt

SEQ ID NO: 948437 - DNA, 15 bp, Homo sapiens
cagctggaatccttc

SEQ ID NO: 948438 - DNA, 15 bp, Homo sapiens
agctggaatccttcc

SEQ ID NO: 948439 - DNA, 15 bp, Homo sapiens
gctggaatccttcca

SEQ ID NO: 948440 - DNA, 15 bp, Homo sapiens
ctggaatccttccag

SEQ ID NO: 948441 - DNA, 15 bp, Homo sapiens
tggaatccttccagg

SEQ ID NO: 948442 - DNA, 15 bp, Homo sapiens
ggaatccttccaggt

SEQ ID NO: 948443 - DNA, 15 bp, Homo sapiens
gaatccttccaggtg

SEQ ID NO: 948444 - DNA, 15 bp, Homo sapiens
aatccttccaggtga

SEQ ID NO: 948445 - DNA, 15 bp, Homo sapiens
atccttccaggtgag

SEQ ID NO: 948446 - DNA, 15 bp, Homo sapiens
tccttccaggtgaga

SEQ ID NO: 948447 - DNA, 15 bp, Homo sapiens
ccttccaggtgagag

SEQ ID NO: 948448 - DNA, 15 bp, Homo sapiens
cttccaggtgagaga

SEQ ID NO: 948449 - DNA, 15 bp, Homo sapiens
ttccaggtgagagat

SEQ ID NO: 948450 - DNA, 15 bp, Homo sapiens
tccaggtgagagata

SEQ ID NO: 948451 - DNA, 15 bp, Homo sapiens
ccaggtgagagataa

SEQ ID NO: 948452 - DNA, 15 bp, Homo sapiens
caggtgagagataac

SEQ ID NO: 948453 - DNA, 15 bp, Homo sapiens
aggtgagagataaca

SEQ ID NO: 948454 - DNA, 15 bp, Homo sapiens
ggtgagagataacag

SEQ ID NO: 948455 - DNA, 15 bp, Homo sapiens
gtgagagataacagg

SEQ ID NO: 948456 - DNA, 15 bp, Homo sapiens
tgagagataacaggg

SEQ ID NO: 948457 - DNA, 15 bp, Homo sapiens
gagagataacagggc

SEQ ID NO: 948458 - DNA, 15 bp, Homo sapiens
agagataacagggca

SEQ ID NO: 948459 - DNA, 15 bp, Homo sapiens
gagataacagggcac

SEQ ID NO: 948460 - DNA, 15 bp, Homo sapiens
agataacagggcacc

SEQ ID NO: 948461 - DNA, 15 bp, Homo sapiens
gataacagggcaccc

SEQ ID NO: 948462 - DNA, 15 bp, Homo sapiens
ataacagggcaccct

SEQ ID NO: 948463 - DNA, 15 bp, Homo sapiens
taacagggcaccctt

SEQ ID NO: 948464 - DNA, 15 bp, Homo sapiens
aacagggcaccctta

SEQ ID NO: 948465 - DNA, 15 bp, Homo sapiens
acagggcacccttat

SEQ ID NO: 948466 - DNA, 15 bp, Homo sapiens
cagggcacccttatt

SEQ ID NO: 948467 - DNA, 15 bp, Homo sapiens
agggcacccttattc

SEQ ID NO: 948468 - DNA, 15 bp, Homo sapiens
gggcacccttattca

SEQ ID NO: 948469 - DNA, 15 bp, Homo sapiens
ggcacccttattcat

SEQ ID NO: 948470 - DNA, 15 bp, Homo sapiens
gcacccttattcatc

SEQ ID NO: 948471 - DNA, 15 bp, Homo sapiens
cacccttattcatcc

SEQ ID NO: 948472 - DNA, 15 bp, Homo sapiens
acccttattcatcca

SEQ ID NO: 948473 - DNA, 15 bp, Homo sapiens
cccttattcatccat

SEQ ID NO: 948474 - DNA, 15 bp, Homo sapiens
ccttattcatccatt

SEQ ID NO: 948475 - DNA, 15 bp, Homo sapiens
cttattcatccatta

SEQ ID NO: 948476 - DNA, 15 bp, Homo sapiens
ttattcatccattag

SEQ ID NO: 948477 - DNA, 15 bp, Homo sapiens
tattcatccattagt

SEQ ID NO: 948478 - DNA, 15 bp, Homo sapiens
attcatccattagtc

SEQ ID NO: 948479 - DNA, 15 bp, Homo sapiens
ttcatccattagtct

SEQ ID NO: 948480 - DNA, 15 bp, Homo sapiens
tcatccattagtctg

SEQ ID NO: 948481 - DNA, 15 bp, Homo sapiens
catccattagtctgc

SEQ ID NO: 948482 - DNA, 15 bp, Homo sapiens
atccattagtctgca

SEQ ID NO: 948483 - DNA, 15 bp, Homo sapiens
tccattagtctgcat

SEQ ID NO: 948484 - DNA, 15 bp, Homo sapiens
ccattagtctgcata

SEQ ID NO: 948485 - DNA, 15 bp, Homo sapiens
cattagtctgcataa

SEQ ID NO: 948486 - DNA, 15 bp, Homo sapiens
attagtctgcataaa

SEQ ID NO: 948487 - DNA, 15 bp, Homo sapiens
ttagtctgcataaaa

SEQ ID NO: 948488 - DNA, 15 bp, Homo sapiens
tagtctgcataaaag

SEQ ID NO: 948489 - DNA, 15 bp, Homo sapiens
agtctgcataaaagg

SEQ ID NO: 948490 - DNA, 15 bp, Homo sapiens
gtctgcataaaaggg

SEQ ID NO: 948491 - DNA, 15 bp, Homo sapiens
tctgcataaaagggt

SEQ ID NO: 948492 - DNA, 15 bp, Homo sapiens
ctgcataaaagggtt

SEQ ID NO: 948493 - DNA, 15 bp, Homo sapiens
tgcataaaagggttt

SEQ ID NO: 948494 - DNA, 15 bp, Homo sapiens
gcataaaagggtttc

SEQ ID NO: 948495 - DNA, 15 bp, Homo sapiens
cataaaagggtttct

SEQ ID NO: 948496 - DNA, 15 bp, Homo sapiens
ataaaagggtttctt

SEQ ID NO: 948497 - DNA, 15 bp, Homo sapiens
taaaagggtttcttt

SEQ ID NO: 948498 - DNA, 15 bp, Homo sapiens
aaaagggtttctttt

SEQ ID NO: 948499 - DNA, 15 bp, Homo sapiens
aaagggtttcttttc

SEQ ID NO: 948500 - DNA, 15 bp, Homo sapiens
aagggtttcttttcc

SEQ ID NO: 948501 - DNA, 15 bp, Homo sapiens
agggtttcttttcca

SEQ ID NO: 948502 - DNA, 15 bp, Homo sapiens
gggtttcttttccat

SEQ ID NO: 948503 - DNA, 15 bp, Homo sapiens
ggtttcttttccatt

SEQ ID NO: 948504 - DNA, 15 bp, Homo sapiens
gtttcttttccattg

SEQ ID NO: 948505 - DNA, 15 bp, Homo sapiens
tttcttttccattgt

SEQ ID NO: 948506 - DNA, 15 bp, Homo sapiens
ttcttttccattgtg

SEQ ID NO: 948507 - DNA, 15 bp, Homo sapiens
tcttttccattgtgt

SEQ ID NO: 948508 - DNA, 15 bp, Homo sapiens
cttttccattgtgtt

SEQ ID NO: 948509 - DNA, 15 bp, Homo sapiens
ttttccattgtgttt

SEQ ID NO: 948510 - DNA, 15 bp, Homo sapiens
tttccattgtgtttg

SEQ ID NO: 948511 - DNA, 15 bp, Homo sapiens
ttccattgtgtttgt

SEQ ID NO: 948512 - DNA, 15 bp, Homo sapiens
tccattgtgtttgtg

SEQ ID NO: 948513 - DNA, 15 bp, Homo sapiens
ccattgtgtttgtgg

SEQ ID NO: 948514 - DNA, 15 bp, Homo sapiens
cattgtgtttgtggg

SEQ ID NO: 948515 - DNA, 15 bp, Homo sapiens
attgtgtttgtgggg

SEQ ID NO: 948516 - DNA, 15 bp, Homo sapiens
ttgtgtttgtgggga

SEQ ID NO: 948517 - DNA, 15 bp, Homo sapiens
tgtgtttgtggggag

SEQ ID NO: 948518 - DNA, 15 bp, Homo sapiens
gtgtttgtggggaga

SEQ ID NO: 948519 - DNA, 15 bp, Homo sapiens
tgtttgtggggagac

SEQ ID NO: 948520 - DNA, 15 bp, Homo sapiens
gtttgtggggagaca

SEQ ID NO: 948521 - DNA, 15 bp, Homo sapiens
tttgtggggagacag

SEQ ID NO: 948522 - DNA, 15 bp, Homo sapiens
ttgtggggagacagc

SEQ ID NO: 948523 - DNA, 15 bp, Homo sapiens
tgtggggagacagca

SEQ ID NO: 948524 - DNA, 15 bp, Homo sapiens
gtggggagacagcaa

SEQ ID NO: 948525 - DNA, 15 bp, Homo sapiens
tggggagacagcaaa

SEQ ID NO: 948526 - DNA, 15 bp, Homo sapiens
ggggagacagcaaaa

SEQ ID NO: 948527 - DNA, 15 bp, Homo sapiens
gggagacagcaaaac

SEQ ID NO: 948528 - DNA, 15 bp, Homo sapiens
ggagacagcaaaaca

SEQ ID NO: 948529 - DNA, 15 bp, Homo sapiens
gagacagcaaaacac

SEQ ID NO: 948530 - DNA, 15 bp, Homo sapiens
agacagcaaaacaca

SEQ ID NO: 948531 - DNA, 15 bp, Homo sapiens
gacagcaaaacacaa

SEQ ID NO: 948532 - DNA, 15 bp, Homo sapiens
acagcaaaacacaat

SEQ ID NO: 948533 - DNA, 15 bp, Homo sapiens
cagcaaaacacaata

SEQ ID NO: 948534 - DNA, 15 bp, Homo sapiens
agcaaaacacaatag

SEQ ID NO: 948535 - DNA, 15 bp, Homo sapiens
gcaaaacacaataga

SEQ ID NO: 948536 - DNA, 15 bp, Homo sapiens
caaaacacaatagaa

SEQ ID NO: 948537 - DNA, 15 bp, Homo sapiens
aaaacacaatagaat

SEQ ID NO: 948538 - DNA, 15 bp, Homo sapiens
aaacacaatagaatg

SEQ ID NO: 948539 - DNA, 15 bp, Homo sapiens
aacacaatagaatga

SEQ ID NO: 948540 - DNA, 15 bp, Homo sapiens
acacaatagaatgag

SEQ ID NO: 948541 - DNA, 15 bp, Homo sapiens
cacaatagaatgagc

SEQ ID NO: 948542 - DNA, 15 bp, Homo sapiens
acaatagaatgagcc

SEQ ID NO: 948543 - DNA, 15 bp, Homo sapiens
caatagaatgagcct

SEQ ID NO: 948544 - DNA, 15 bp, Homo sapiens
aatagaatgagcctg

SEQ ID NO: 948545 - DNA, 15 bp, Homo sapiens
atagaatgagcctgg

SEQ ID NO: 948546 - DNA, 15 bp, Homo sapiens
tagaatgagcctggg

SEQ ID NO: 948547 - DNA, 15 bp, Homo sapiens
agaatgagcctgggc

SEQ ID NO: 948548 - DNA, 15 bp, Homo sapiens
gaatgagcctgggcc

SEQ ID NO: 948549 - DNA, 15 bp, Homo sapiens
aatgagcctgggcct

SEQ ID NO: 948550 - DNA, 15 bp, Homo sapiens
atgagcctgggcctt

SEQ ID NO: 948551 - DNA, 15 bp, Homo sapiens
tgagcctgggcctta

SEQ ID NO: 948552 - DNA, 15 bp, Homo sapiens
gagcctgggccttag

SEQ ID NO: 948553 - DNA, 15 bp, Homo sapiens
agcctgggccttaga

SEQ ID NO: 948554 - DNA, 15 bp, Homo sapiens
gcctgggccttagag

SEQ ID NO: 948555 - DNA, 15 bp, Homo sapiens
cctgggccttagaga

SEQ ID NO: 948556 - DNA, 15 bp, Homo sapiens
ctgggccttagagaa

SEQ ID NO: 948557 - DNA, 15 bp, Homo sapiens
tgggccttagagaat

SEQ ID NO: 948558 - DNA, 15 bp, Homo sapiens
gggccttagagaatt

SEQ ID NO: 948559 - DNA, 15 bp, Homo sapiens
ggccttagagaatta

SEQ ID NO: 948560 - DNA, 15 bp, Homo sapiens
gccttagagaattac

SEQ ID NO: 948561 - DNA, 15 bp, Homo sapiens
ccttagagaattaca

SEQ ID NO: 948562 - DNA, 15 bp, Homo sapiens
cttagagaattacaa

SEQ ID NO: 948563 - DNA, 15 bp, Homo sapiens
ttagagaattacaag

SEQ ID NO: 948564 - DNA, 15 bp, Homo sapiens
tagagaattacaaga

SEQ ID NO: 948565 - DNA, 15 bp, Homo sapiens
agagaattacaagat

SEQ ID NO: 948566 - DNA, 15 bp, Homo sapiens
gagaattacaagatt

SEQ ID NO: 948567 - DNA, 15 bp, Homo sapiens
agaattacaagattg

SEQ ID NO: 948568 - DNA, 15 bp, Homo sapiens
gaattacaagattgg

SEQ ID NO: 948569 - DNA, 15 bp, Homo sapiens
aattacaagattgga

SEQ ID NO: 948570 - DNA, 15 bp, Homo sapiens
attacaagattggat

SEQ ID NO: 948571 - DNA, 15 bp, Homo sapiens
ttacaagattggatc

SEQ ID NO: 948572 - DNA, 15 bp, Homo sapiens
tacaagattggatca

SEQ ID NO: 948573 - DNA, 15 bp, Homo sapiens
acaagattggatcac

SEQ ID NO: 948574 - DNA, 15 bp, Homo sapiens
caagattggatcaca

SEQ ID NO: 948575 - DNA, 15 bp, Homo sapiens
aagattggatcacaa

SEQ ID NO: 948576 - DNA, 15 bp, Homo sapiens
agattggatcacaat

SEQ ID NO: 948577 - DNA, 15 bp, Homo sapiens
gattggatcacaatt

SEQ ID NO: 948578 - DNA, 15 bp, Homo sapiens
attggatcacaattt

SEQ ID NO: 948579 - DNA, 15 bp, Homo sapiens
ttggatcacaatttc

SEQ ID NO: 948580 - DNA, 15 bp, Homo sapiens
tggatcacaatttcc

SEQ ID NO: 948581 - DNA, 15 bp, Homo sapiens
ggatcacaatttcca

SEQ ID NO: 948582 - DNA, 15 bp, Homo sapiens
gatcacaatttccaa

SEQ ID NO: 948583 - DNA, 15 bp, Homo sapiens
atcacaatttccaac

SEQ ID NO: 948584 - DNA, 15 bp, Homo sapiens
tcacaatttccaaca

SEQ ID NO: 948585 - DNA, 15 bp, Homo sapiens
cacaatttccaacac

SEQ ID NO: 948586 - DNA, 15 bp, Homo sapiens
acaatttccaacact

SEQ ID NO: 948587 - DNA, 15 bp, Homo sapiens
caatttccaacactt

SEQ ID NO: 948588 - DNA, 15 bp, Homo sapiens
aatttccaacactta

SEQ ID NO: 948589 - DNA, 15 bp, Homo sapiens
atttccaacacttac

SEQ ID NO: 948590 - DNA, 15 bp, Homo sapiens
tttccaacacttact

SEQ ID NO: 948591 - DNA, 15 bp, Homo sapiens
ttccaacacttactg

SEQ ID NO: 948592 - DNA, 15 bp, Homo sapiens
tccaacacttactgc

SEQ ID NO: 948593 - DNA, 15 bp, Homo sapiens
ccaacacttactgcc

SEQ ID NO: 948594 - DNA, 15 bp, Homo sapiens
caacacttactgccc

SEQ ID NO: 948595 - DNA, 15 bp, Homo sapiens
aacacttactgccca

SEQ ID NO: 948596 - DNA, 15 bp, Homo sapiens
acacttactgcccat

SEQ ID NO: 948597 - DNA, 15 bp, Homo sapiens
cacttactgcccata

SEQ ID NO: 948598 - DNA, 15 bp, Homo sapiens
acttactgcccatat

SEQ ID NO: 948599 - DNA, 15 bp, Homo sapiens
cttactgcccatatg

SEQ ID NO: 948600 - DNA, 15 bp, Homo sapiens
ttactgcccatatgt

SEQ ID NO: 948601 - DNA, 15 bp, Homo sapiens
tactgcccatatgtc

SEQ ID NO: 948602 - DNA, 15 bp, Homo sapiens
actgcccatatgtcc

SEQ ID NO: 948603 - DNA, 15 bp, Homo sapiens
ctgcccatatgtcct

SEQ ID NO: 948604 - DNA, 15 bp, Homo sapiens
tgcccatatgtcctt

SEQ ID NO: 948605 - DNA, 15 bp, Homo sapiens
gcccatatgtccttg

SEQ ID NO: 948606 - DNA, 15 bp, Homo sapiens
cccatatgtccttgc

SEQ ID NO: 948607 - DNA, 15 bp, Homo sapiens
ccatatgtccttgca

SEQ ID NO: 948608 - DNA, 15 bp, Homo sapiens
catatgtccttgcat

SEQ ID NO: 948609 - DNA, 15 bp, Homo sapiens
atatgtccttgcata

SEQ ID NO: 948610 - DNA, 15 bp, Homo sapiens
tatgtccttgcatat

SEQ ID NO: 948611 - DNA, 15 bp, Homo sapiens
atgtccttgcatatg

SEQ ID NO: 948612 - DNA, 15 bp, Homo sapiens
tgtccttgcatatgt

SEQ ID NO: 948613 - DNA, 15 bp, Homo sapiens
gtccttgcatatgtc

SEQ ID NO: 948614 - DNA, 15 bp, Homo sapiens
tccttgcatatgtca

SEQ ID NO: 948615 - DNA, 15 bp, Homo sapiens
ccttgcatatgtcat

SEQ ID NO: 948616 - DNA, 15 bp, Homo sapiens
cttgcatatgtcatg

SEQ ID NO: 948617 - DNA, 15 bp, Homo sapiens
ttgcatatgtcatgg

SEQ ID NO: 948618 - DNA, 15 bp, Homo sapiens
tgcatatgtcatggg

SEQ ID NO: 948619 - DNA, 15 bp, Homo sapiens
gcatatgtcatggga

SEQ ID NO: 948620 - DNA, 15 bp, Homo sapiens
catatgtcatgggat

SEQ ID NO: 948621 - DNA, 15 bp, Homo sapiens
atatgtcatgggatt

SEQ ID NO: 948622 - DNA, 15 bp, Homo sapiens
tatgtcatgggattt

SEQ ID NO: 948623 - DNA, 15 bp, Homo sapiens
atgtcatgggatttc

SEQ ID NO: 948624 - DNA, 15 bp, Homo sapiens
tgtcatgggatttct

SEQ ID NO: 948625 - DNA, 15 bp, Homo sapiens
gtcatgggatttctc

SEQ ID NO: 948626 - DNA, 15 bp, Homo sapiens
tcatgggatttctca

SEQ ID NO: 948627 - DNA, 15 bp, Homo sapiens
catgggatttctcag

SEQ ID NO: 948628 - DNA, 15 bp, Homo sapiens
atgggatttctcagt

SEQ ID NO: 948629 - DNA, 15 bp, Homo sapiens
tgggatttctcagtt

SEQ ID NO: 948630 - DNA, 15 bp, Homo sapiens
gggatttctcagttc

SEQ ID NO: 948631 - DNA, 15 bp, Homo sapiens
ggatttctcagttca

SEQ ID NO: 948632 - DNA, 15 bp, Homo sapiens
gatttctcagttcac

SEQ ID NO: 948633 - DNA, 15 bp, Homo sapiens
atttctcagttcact

SEQ ID NO: 948634 - DNA, 15 bp, Homo sapiens
tttctcagttcactc

SEQ ID NO: 948635 - DNA, 15 bp, Homo sapiens
ttctcagttcactca

SEQ ID NO: 948636 - DNA, 15 bp, Homo sapiens
tctcagttcactcac

SEQ ID NO: 948637 - DNA, 15 bp, Homo sapiens
ctcagttcactcact

SEQ ID NO: 948638 - DNA, 15 bp, Homo sapiens
tcagttcactcactt

SEQ ID NO: 948639 - DNA, 15 bp, Homo sapiens
cagttcactcacttt

SEQ ID NO: 948640 - DNA, 15 bp, Homo sapiens
agttcactcactttt

SEQ ID NO: 948641 - DNA, 15 bp, Homo sapiens
gttcactcactttta

SEQ ID NO: 948642 - DNA, 15 bp, Homo sapiens
ttcactcacttttaa

SEQ ID NO: 948643 - DNA, 15 bp, Homo sapiens
tcactcacttttaaa

SEQ ID NO: 948644 - DNA, 15 bp, Homo sapiens
cactcacttttaaaa

SEQ ID NO: 948645 - DNA, 15 bp, Homo sapiens
actcacttttaaaaa

SEQ ID NO: 948646 - DNA, 15 bp, Homo sapiens
ctcacttttaaaaag

SEQ ID NO: 948647 - DNA, 15 bp, Homo sapiens
tcacttttaaaaaga

SEQ ID NO: 948648 - DNA, 15 bp, Homo sapiens
cacttttaaaaagaa

SEQ ID NO: 948649 - DNA, 15 bp, Homo sapiens
acttttaaaaagaaa

SEQ ID NO: 948650 - DNA, 15 bp, Homo sapiens
cttttaaaaagaaat

SEQ ID NO: 948651 - DNA, 15 bp, Homo sapiens
ttttaaaaagaaatt

SEQ ID NO: 948652 - DNA, 15 bp, Homo sapiens
tttaaaaagaaatta

SEQ ID NO: 948653 - DNA, 15 bp, Homo sapiens
ttaaaaagaaattac

SEQ ID NO: 948654 - DNA, 15 bp, Homo sapiens
taaaaagaaattact

SEQ ID NO: 948655 - DNA, 15 bp, Homo sapiens
aaaaagaaattacta

SEQ ID NO: 948656 - DNA, 15 bp, Homo sapiens
aaaagaaattactac

SEQ ID NO: 948657 - DNA, 15 bp, Homo sapiens
aaagaaattactacc

SEQ ID NO: 948658 - DNA, 15 bp, Homo sapiens
aagaaattactaccc

SEQ ID NO: 948659 - DNA, 15 bp, Homo sapiens
agaaattactaccca

SEQ ID NO: 948660 - DNA, 15 bp, Homo sapiens
gaaattactacccaa

SEQ ID NO: 948661 - DNA, 15 bp, Homo sapiens
aaattactacccaac

SEQ ID NO: 948662 - DNA, 15 bp, Homo sapiens
aattactacccaact

SEQ ID NO: 948663 - DNA, 15 bp, Homo sapiens
attactacccaactt

SEQ ID NO: 948664 - DNA, 15 bp, Homo sapiens
ttactacccaacttg

SEQ ID NO: 948665 - DNA, 15 bp, Homo sapiens
tactacccaacttgc

SEQ ID NO: 948666 - DNA, 15 bp, Homo sapiens
actacccaacttgca

SEQ ID NO: 948667 - DNA, 15 bp, Homo sapiens
ctacccaacttgcac

SEQ ID NO: 948668 - DNA, 15 bp, Homo sapiens
tacccaacttgcaca

SEQ ID NO: 948669 - DNA, 15 bp, Homo sapiens
acccaacttgcacag

SEQ ID NO: 948670 - DNA, 15 bp, Homo sapiens
cccaacttgcacagc

SEQ ID NO: 948671 - DNA, 15 bp, Homo sapiens
ccaacttgcacagct

SEQ ID NO: 948672 - DNA, 15 bp, Homo sapiens
caacttgcacagctg

SEQ ID NO: 948673 - DNA, 15 bp, Homo sapiens
aacttgcacagctgt

SEQ ID NO: 948674 - DNA, 15 bp, Homo sapiens
acttgcacagctgtt

SEQ ID NO: 948675 - DNA, 15 bp, Homo sapiens
cttgcacagctgttg

SEQ ID NO: 948676 - DNA, 15 bp, Homo sapiens
ttgcacagctgttga

SEQ ID NO: 948677 - DNA, 15 bp, Homo sapiens
tgcacagctgttgag

SEQ ID NO: 948678 - DNA, 15 bp, Homo sapiens
gcacagctgttgaga

SEQ ID NO: 948679 - DNA, 15 bp, Homo sapiens
cacagctgttgagag

SEQ ID NO: 948680 - DNA, 15 bp, Homo sapiens
acagctgttgagaga

SEQ ID NO: 948681 - DNA, 15 bp, Homo sapiens
cagctgttgagagaa

SEQ ID NO: 948682 - DNA, 15 bp, Homo sapiens
agctgttgagagaac

SEQ ID NO: 948683 - DNA, 15 bp, Homo sapiens
gctgttgagagaaca

SEQ ID NO: 948684 - DNA, 15 bp, Homo sapiens
ctgttgagagaacaa

SEQ ID NO: 948685 - DNA, 15 bp, Homo sapiens
tgttgagagaacaaa

SEQ ID NO: 948686 - DNA, 15 bp, Homo sapiens
gttgagagaacaaaa

SEQ ID NO: 948687 - DNA, 15 bp, Homo sapiens
ttgagagaacaaaag

SEQ ID NO: 948688 - DNA, 15 bp, Homo sapiens
tgagagaacaaaaga

SEQ ID NO: 948689 - DNA, 15 bp, Homo sapiens
gagagaacaaaagaa

SEQ ID NO: 948690 - DNA, 15 bp, Homo sapiens
agagaacaaaagaag

SEQ ID NO: 948691 - DNA, 15 bp, Homo sapiens
gagaacaaaagaagg

SEQ ID NO: 948692 - DNA, 15 bp, Homo sapiens
agaacaaaagaaggt

SEQ ID NO: 948693 - DNA, 15 bp, Homo sapiens
gaacaaaagaaggta

SEQ ID NO: 948694 - DNA, 15 bp, Homo sapiens
aacaaaagaaggtaa

SEQ ID NO: 948695 - DNA, 15 bp, Homo sapiens
acaaaagaaggtaat

SEQ ID NO: 948696 - DNA, 15 bp, Homo sapiens
caaaagaaggtaatg

SEQ ID NO: 948697 - DNA, 15 bp, Homo sapiens
aaaagaaggtaatgt

SEQ ID NO: 948698 - DNA, 15 bp, Homo sapiens
aaagaaggtaatgta

SEQ ID NO: 948699 - DNA, 15 bp, Homo sapiens
aagaaggtaatgtat

SEQ ID NO: 948700 - DNA, 15 bp, Homo sapiens
agaaggtaatgtatg

SEQ ID NO: 948701 - DNA, 15 bp, Homo sapiens
gaaggtaatgtatgt

SEQ ID NO: 948702 - DNA, 15 bp, Homo sapiens
aaggtaatgtatgta

SEQ ID NO: 948703 - DNA, 15 bp, Homo sapiens
aggtaatgtatgtaa

SEQ ID NO: 948704 - DNA, 15 bp, Homo sapiens
ggtaatgtatgtaaa

SEQ ID NO: 948705 - DNA, 15 bp, Homo sapiens
gtaatgtatgtaaat

SEQ ID NO: 948706 - DNA, 15 bp, Homo sapiens
taatgtatgtaaatt

SEQ ID NO: 948707 - DNA, 15 bp, Homo sapiens
aatgtatgtaaatta

SEQ ID NO: 948708 - DNA, 15 bp, Homo sapiens
atgtatgtaaattac

SEQ ID NO: 948709 - DNA, 15 bp, Homo sapiens
tgtatgtaaattacc

SEQ ID NO: 948710 - DNA, 15 bp, Homo sapiens
gtatgtaaattacca

SEQ ID NO: 948711 - DNA, 15 bp, Homo sapiens
tatgtaaattaccaa

SEQ ID NO: 948712 - DNA, 15 bp, Homo sapiens
atgtaaattaccaat

SEQ ID NO: 948713 - DNA, 15 bp, Homo sapiens
tgtaaattaccaatt

SEQ ID NO: 948714 - DNA, 15 bp, Homo sapiens
gtaaattaccaatta

SEQ ID NO: 948715 - DNA, 15 bp, Homo sapiens
taaattaccaattag

SEQ ID NO: 948716 - DNA, 15 bp, Homo sapiens
aaattaccaattagg

SEQ ID NO: 948717 - DNA, 15 bp, Homo sapiens
aattaccaattaggg

SEQ ID NO: 948718 - DNA, 15 bp, Homo sapiens
attaccaattagggt

SEQ ID NO: 948719 - DNA, 15 bp, Homo sapiens
ttaccaattagggtg

SEQ ID NO: 948720 - DNA, 15 bp, Homo sapiens
taccaattagggtga

SEQ ID NO: 948721 - DNA, 15 bp, Homo sapiens
accaattagggtgaa

SEQ ID NO: 948722 - DNA, 15 bp, Homo sapiens
ccaattagggtgaaa

SEQ ID NO: 948723 - DNA, 15 bp, Homo sapiens
caattagggtgaaag

SEQ ID NO: 948724 - DNA, 15 bp, Homo sapiens
aattagggtgaaagg

SEQ ID NO: 948725 - DNA, 15 bp, Homo sapiens
attagggtgaaagga

SEQ ID NO: 948726 - DNA, 15 bp, Homo sapiens
ttagggtgaaaggaa

SEQ ID NO: 948727 - DNA, 15 bp, Homo sapiens
tagggtgaaaggaat

SEQ ID NO: 948728 - DNA, 15 bp, Homo sapiens
agggtgaaaggaatg

SEQ ID NO: 948729 - DNA, 15 bp, Homo sapiens
gggtgaaaggaatgt

SEQ ID NO: 948730 - DNA, 15 bp, Homo sapiens
ggtgaaaggaatgtg

SEQ ID NO: 948731 - DNA, 15 bp, Homo sapiens
gtgaaaggaatgtgc

SEQ ID NO: 948732 - DNA, 15 bp, Homo sapiens
tgaaaggaatgtgca

SEQ ID NO: 948733 - DNA, 15 bp, Homo sapiens
gaaaggaatgtgcag

SEQ ID NO: 948734 - DNA, 15 bp, Homo sapiens
aaggaatgtgcagta

SEQ ID NO: 948735 - DNA, 15 bp, Homo sapiens
aggaatgtgcagtaa

SEQ ID NO: 948736 - DNA, 15 bp, Homo sapiens
ggaatgtgcagtaag

SEQ ID NO: 948737 - DNA, 15 bp, Homo sapiens
gaatgtgcagtaagt

SEQ ID NO: 948738 - DNA, 15 bp, Homo sapiens
aatgtgcagtaagtg

SEQ ID NO: 948739 - DNA, 15 bp, Homo sapiens
atgtgcagtaagtga

SEQ ID NO: 948740 - DNA, 15 bp, Homo sapiens
tgtgcagtaagtgat

SEQ ID NO: 948741 - DNA, 15 bp, Homo sapiens
gtgcagtaagtgatt

SEQ ID NO: 948742 - DNA, 15 bp, Homo sapiens
tgcagtaagtgattg

SEQ ID NO: 948743 - DNA, 15 bp, Homo sapiens
gcagtaagtgattgc

SEQ ID NO: 948744 - DNA, 15 bp, Homo sapiens
cagtaagtgattgct

SEQ ID NO: 948745 - DNA, 15 bp, Homo sapiens
agtaagtgattgctc

SEQ ID NO: 948746 - DNA, 15 bp, Homo sapiens
gtaagtgattgctca

SEQ ID NO: 948747 - DNA, 15 bp, Homo sapiens
taagtgattgctcat

SEQ ID NO: 948748 - DNA, 15 bp, Homo sapiens
aagtgattgctcatg

SEQ ID NO: 948749 - DNA, 15 bp, Homo sapiens
agtgattgctcatga

SEQ ID NO: 948750 - DNA, 15 bp, Homo sapiens
gtgattgctcatgac

SEQ ID NO: 948751 - DNA, 15 bp, Homo sapiens
tgattgctcatgaca

SEQ ID NO: 948752 - DNA, 15 bp, Homo sapiens
gattgctcatgacat

SEQ ID NO: 948753 - DNA, 15 bp, Homo sapiens
attgctcatgacata

SEQ ID NO: 948754 - DNA, 15 bp, Homo sapiens
ttgctcatgacataa

SEQ ID NO: 948755 - DNA, 15 bp, Homo sapiens
tgctcatgacataat

SEQ ID NO: 948756 - DNA, 15 bp, Homo sapiens
gctcatgacataatg

SEQ ID NO: 948757 - DNA, 15 bp, Homo sapiens
ctcatgacataatga

SEQ ID NO: 948758 - DNA, 15 bp, Homo sapiens
tcatgacataatgaa

SEQ ID NO: 948759 - DNA, 15 bp, Homo sapiens
catgacataatgaaa

SEQ ID NO: 948760 - DNA, 15 bp, Homo sapiens
atgacataatgaaag

SEQ ID NO: 948761 - DNA, 15 bp, Homo sapiens
tgacataatgaaagg

SEQ ID NO: 948762 - DNA, 15 bp, Homo sapiens
gacataatgaaaggg

SEQ ID NO: 948763 - DNA, 15 bp, Homo sapiens
acataatgaaagggt

SEQ ID NO: 948764 - DNA, 15 bp, Homo sapiens
cataatgaaagggtt

SEQ ID NO: 948765 - DNA, 15 bp, Homo sapiens
ataatgaaagggttg

SEQ ID NO: 948766 - DNA, 15 bp, Homo sapiens
taatgaaagggttga

SEQ ID NO: 948767 - DNA, 15 bp, Homo sapiens
aatgaaagggttgag

SEQ ID NO: 948768 - DNA, 15 bp, Homo sapiens
atgaaagggttgagt

SEQ ID NO: 948769 - DNA, 15 bp, Homo sapiens
tgaaagggttgagtt

SEQ ID NO: 948770 - DNA, 15 bp, Homo sapiens
gaaagggttgagtta

SEQ ID NO: 948771 - DNA, 15 bp, Homo sapiens
aaagggttgagttat

SEQ ID NO: 948772 - DNA, 15 bp, Homo sapiens
aagggttgagttatc

SEQ ID NO: 948773 - DNA, 15 bp, Homo sapiens
agggttgagttatct

SEQ ID NO: 948774 - DNA, 15 bp, Homo sapiens
gggttgagttatctt

SEQ ID NO: 948775 - DNA, 15 bp, Homo sapiens
ggttgagttatcttt

SEQ ID NO: 948776 - DNA, 15 bp, Homo sapiens
gttgagttatctttt

SEQ ID NO: 948777 - DNA, 15 bp, Homo sapiens
ttgagttatcttttt

SEQ ID NO: 948778 - DNA, 15 bp, Homo sapiens
tgagttatctttttt

SEQ ID NO: 948779 - DNA, 15 bp, Homo sapiens
gagttatcttttttc

SEQ ID NO: 948780 - DNA, 15 bp, Homo sapiens
agttatcttttttcc

SEQ ID NO: 948781 - DNA, 15 bp, Homo sapiens
gttatcttttttccc

SEQ ID NO: 948782 - DNA, 15 bp, Homo sapiens
ttatcttttttccct

SEQ ID NO: 948783 - DNA, 15 bp, Homo sapiens
tatcttttttccctt

SEQ ID NO: 948784 - DNA, 15 bp, Homo sapiens
atcttttttccctta

SEQ ID NO: 948785 - DNA, 15 bp, Homo sapiens
tcttttttcccttat

SEQ ID NO: 948786 - DNA, 15 bp, Homo sapiens
cttttttcccttatt

SEQ ID NO: 948787 - DNA, 15 bp, Homo sapiens
ttttttcccttatta

SEQ ID NO: 948788 - DNA, 15 bp, Homo sapiens
tttttcccttattag

SEQ ID NO: 948789 - DNA, 15 bp, Homo sapiens
ttttcccttattaga

SEQ ID NO: 948790 - DNA, 15 bp, Homo sapiens
tttcccttattagaa

SEQ ID NO: 948791 - DNA, 15 bp, Homo sapiens
ttcccttattagaaa

SEQ ID NO: 948792 - DNA, 15 bp, Homo sapiens
tcccttattagaaag

SEQ ID NO: 948793 - DNA, 15 bp, Homo sapiens
cccttattagaaaga

SEQ ID NO: 948794 - DNA, 15 bp, Homo sapiens
ccttattagaaagac

SEQ ID NO: 948795 - DNA, 15 bp, Homo sapiens
cttattagaaagacc

SEQ ID NO: 948796 - DNA, 15 bp, Homo sapiens
ttattagaaagacct

SEQ ID NO: 948797 - DNA, 15 bp, Homo sapiens
tattagaaagacctt

SEQ ID NO: 948798 - DNA, 15 bp, Homo sapiens
attagaaagacctta

SEQ ID NO: 948799 - DNA, 15 bp, Homo sapiens
ttagaaagaccttaa

SEQ ID NO: 948800 - DNA, 15 bp, Homo sapiens
tagaaagaccttaag

SEQ ID NO: 948801 - DNA, 15 bp, Homo sapiens
agaaagaccttaagg

SEQ ID NO: 948802 - DNA, 15 bp, Homo sapiens
gaaagaccttaaggc

SEQ ID NO: 948803 - DNA, 15 bp, Homo sapiens
aaagaccttaaggca

SEQ ID NO: 948804 - DNA, 15 bp, Homo sapiens
aagaccttaaggcat

SEQ ID NO: 948805 - DNA, 15 bp, Homo sapiens
agaccttaaggcatt

SEQ ID NO: 948806 - DNA, 15 bp, Homo sapiens
gaccttaaggcattc

SEQ ID NO: 948807 - DNA, 15 bp, Homo sapiens
accttaaggcattct

SEQ ID NO: 948808 - DNA, 15 bp, Homo sapiens
ccttaaggcattctg

SEQ ID NO: 948809 - DNA, 15 bp, Homo sapiens
cttaaggcattctgt

SEQ ID NO: 948810 - DNA, 15 bp, Homo sapiens
ttaaggcattctgtc

SEQ ID NO: 948811 - DNA, 15 bp, Homo sapiens
taaggcattctgtca

SEQ ID NO: 948812 - DNA, 15 bp, Homo sapiens
aaggcattctgtcac

SEQ ID NO: 948813 - DNA, 15 bp, Homo sapiens
aggcattctgtcact

SEQ ID NO: 948814 - DNA, 15 bp, Homo sapiens
ggcattctgtcactg

SEQ ID NO: 948815 - DNA, 15 bp, Homo sapiens
gcattctgtcactgt

SEQ ID NO: 948816 - DNA, 15 bp, Homo sapiens
cattctgtcactgtc

SEQ ID NO: 948817 - DNA, 15 bp, Homo sapiens
attctgtcactgtcc

SEQ ID NO: 948818 - DNA, 15 bp, Homo sapiens
ttctgtcactgtcct

SEQ ID NO: 948819 - DNA, 15 bp, Homo sapiens
tctgtcactgtcctt

SEQ ID NO: 948820 - DNA, 15 bp, Homo sapiens
ctgtcactgtccttc

SEQ ID NO: 948821 - DNA, 15 bp, Homo sapiens
tgtcactgtccttcc

SEQ ID NO: 948822 - DNA, 15 bp, Homo sapiens
gtcactgtccttcca

SEQ ID NO: 948823 - DNA, 15 bp, Homo sapiens
tcactgtccttccat

SEQ ID NO: 948824 - DNA, 15 bp, Homo sapiens
cactgtccttccatc

SEQ ID NO: 948825 - DNA, 15 bp, Homo sapiens
actgtccttccatct

SEQ ID NO: 948826 - DNA, 15 bp, Homo sapiens
ctgtccttccatctc

SEQ ID NO: 948827 - DNA, 15 bp, Homo sapiens
tgtccttccatctct

SEQ ID NO: 948828 - DNA, 15 bp, Homo sapiens
gtccttccatctctg

SEQ ID NO: 948829 - DNA, 15 bp, Homo sapiens
tccttccatctctgt

SEQ ID NO: 948830 - DNA, 15 bp, Homo sapiens
ccttccatctctgtc

SEQ ID NO: 948831 - DNA, 15 bp, Homo sapiens
cttccatctctgtca

SEQ ID NO: 948832 - DNA, 15 bp, Homo sapiens
ttccatctctgtcaa

SEQ ID NO: 948833 - DNA, 15 bp, Homo sapiens
tccatctctgtcaag

SEQ ID NO: 948834 - DNA, 15 bp, Homo sapiens
ccatctctgtcaagc

SEQ ID NO: 948835 - DNA, 15 bp, Homo sapiens
catctctgtcaagct

SEQ ID NO: 948836 - DNA, 15 bp, Homo sapiens
atctctgtcaagctg

SEQ ID NO: 948837 - DNA, 15 bp, Homo sapiens
tctctgtcaagctgg

SEQ ID NO: 948838 - DNA, 15 bp, Homo sapiens
ctctgtcaagctgga

SEQ ID NO: 948839 - DNA, 15 bp, Homo sapiens
tctgtcaagctggac

SEQ ID NO: 948840 - DNA, 15 bp, Homo sapiens
ctgtcaagctggacc

SEQ ID NO: 948841 - DNA, 15 bp, Homo sapiens
tgtcaagctggacca

SEQ ID NO: 948842 - DNA, 15 bp, Homo sapiens
gtcaagctggaccac

SEQ ID NO: 948843 - DNA, 15 bp, Homo sapiens
tcaagctggaccaca

SEQ ID NO: 948844 - DNA, 15 bp, Homo sapiens
caagctggaccacat

SEQ ID NO: 948845 - DNA, 15 bp, Homo sapiens
aagctggaccacatg

SEQ ID NO: 948846 - DNA, 15 bp, Homo sapiens
agctggaccacatga

SEQ ID NO: 948847 - DNA, 15 bp, Homo sapiens
gctggaccacatgac

SEQ ID NO: 948848 - DNA, 15 bp, Homo sapiens
ctggaccacatgacc

SEQ ID NO: 948849 - DNA, 15 bp, Homo sapiens
tggaccacatgaccc

SEQ ID NO: 948850 - DNA, 15 bp, Homo sapiens
ggaccacatgaccct

SEQ ID NO: 948851 - DNA, 15 bp, Homo sapiens
gaccacatgaccctc

SEQ ID NO: 948852 - DNA, 15 bp, Homo sapiens
accacatgaccctcc

SEQ ID NO: 948853 - DNA, 15 bp, Homo sapiens
ccacatgaccctcca

SEQ ID NO: 948854 - DNA, 15 bp, Homo sapiens
cacatgaccctccac

SEQ ID NO: 948855 - DNA, 15 bp, Homo sapiens
acatgaccctccact

SEQ ID NO: 948856 - DNA, 15 bp, Homo sapiens
catgaccctccactc

SEQ ID NO: 948857 - DNA, 15 bp, Homo sapiens
atgaccctccactcc

SEQ ID NO: 948858 - DNA, 15 bp, Homo sapiens
tgaccctccactcct

SEQ ID NO: 948859 - DNA, 15 bp, Homo sapiens
gaccctccactcctt

SEQ ID NO: 948860 - DNA, 15 bp, Homo sapiens
accctccactccttt

SEQ ID NO: 948861 - DNA, 15 bp, Homo sapiens
ccctccactcctttg

SEQ ID NO: 948862 - DNA, 15 bp, Homo sapiens
cctccactcctttgc

SEQ ID NO: 948863 - DNA, 15 bp, Homo sapiens
ctccactcctttgcc

SEQ ID NO: 948864 - DNA, 15 bp, Homo sapiens
tccactcctttgcca

SEQ ID NO: 948865 - DNA, 15 bp, Homo sapiens
ccactcctttgccat

SEQ ID NO: 948866 - DNA, 15 bp, Homo sapiens
cactcctttgccatc

SEQ ID NO: 948867 - DNA, 15 bp, Homo sapiens
actcctttgccatct

SEQ ID NO: 948868 - DNA, 15 bp, Homo sapiens
ctcctttgccatctc

SEQ ID NO: 948869 - DNA, 15 bp, Homo sapiens
tcctttgccatctct

SEQ ID NO: 948870 - DNA, 15 bp, Homo sapiens
cctttgccatctctc

SEQ ID NO: 948871 - DNA, 15 bp, Homo sapiens
ctttgccatctctcc

SEQ ID NO: 948872 - DNA, 15 bp, Homo sapiens
tttgccatctctccc

SEQ ID NO: 948873 - DNA, 15 bp, Homo sapiens
ttgccatctctcccc

SEQ ID NO: 948874 - DNA, 15 bp, Homo sapiens
tgccatctctcccct

SEQ ID NO: 948875 - DNA, 15 bp, Homo sapiens
gccatctctcccctc

SEQ ID NO: 948876 - DNA, 15 bp, Homo sapiens
ccatctctcccctcc

SEQ ID NO: 948877 - DNA, 15 bp, Homo sapiens
catctctcccctcct

SEQ ID NO: 948878 - DNA, 15 bp, Homo sapiens
atctctcccctcctt

SEQ ID NO: 948879 - DNA, 15 bp, Homo sapiens
tctctcccctccttc

SEQ ID NO: 948880 - DNA, 15 bp, Homo sapiens
ctctcccctccttct

SEQ ID NO: 948881 - DNA, 15 bp, Homo sapiens
tctcccctccttctc

SEQ ID NO: 948882 - DNA, 15 bp, Homo sapiens
ctcccctccttctcc

SEQ ID NO: 948883 - DNA, 15 bp, Homo sapiens
tcccctccttctccc

SEQ ID NO: 948884 - DNA, 15 bp, Homo sapiens
cccctccttctccct

SEQ ID NO: 948885 - DNA, 15 bp, Homo sapiens
ccctccttctccctc

SEQ ID NO: 948886 - DNA, 15 bp, Homo sapiens
cctccttctccctca

SEQ ID NO: 948887 - DNA, 15 bp, Homo sapiens
ctccttctccctcac

SEQ ID NO: 948888 - DNA, 15 bp, Homo sapiens
tccttctccctcaca

SEQ ID NO: 948889 - DNA, 15 bp, Homo sapiens
ccttctccctcacac

SEQ ID NO: 948890 - DNA, 15 bp, Homo sapiens
cttctccctcacacc

SEQ ID NO: 948891 - DNA, 15 bp, Homo sapiens
ttctccctcacacct

SEQ ID NO: 948892 - DNA, 15 bp, Homo sapiens
tctccctcacacctt

SEQ ID NO: 948893 - DNA, 15 bp, Homo sapiens
ctccctcacaccttc

SEQ ID NO: 948894 - DNA, 15 bp, Homo sapiens
tccctcacaccttct

SEQ ID NO: 948895 - DNA, 15 bp, Homo sapiens
ccctcacaccttctg

SEQ ID NO: 948896 - DNA, 15 bp, Homo sapiens
cctcacaccttctgt

SEQ ID NO: 948897 - DNA, 15 bp, Homo sapiens
ctcacaccttctgtg

SEQ ID NO: 948898 - DNA, 15 bp, Homo sapiens
tcacaccttctgtgc

SEQ ID NO: 948899 - DNA, 15 bp, Homo sapiens
cacaccttctgtgcc

SEQ ID NO: 948900 - DNA, 15 bp, Homo sapiens
acaccttctgtgcct

SEQ ID NO: 948901 - DNA, 15 bp, Homo sapiens
caccttctgtgccta

SEQ ID NO: 948902 - DNA, 15 bp, Homo sapiens
accttctgtgcctac

SEQ ID NO: 948903 - DNA, 15 bp, Homo sapiens
ccttctgtgcctaca

SEQ ID NO: 948904 - DNA, 15 bp, Homo sapiens
cttctgtgcctacaa

SEQ ID NO: 948905 - DNA, 15 bp, Homo sapiens
ttctgtgcctacaaa

SEQ ID NO: 948906 - DNA, 15 bp, Homo sapiens
tctgtgcctacaaac

SEQ ID NO: 948907 - DNA, 15 bp, Homo sapiens
ctgtgcctacaaact

SEQ ID NO: 948908 - DNA, 15 bp, Homo sapiens
tgtgcctacaaactg

SEQ ID NO: 948909 - DNA, 15 bp, Homo sapiens
gtgcctacaaactgg

SEQ ID NO: 948910 - DNA, 15 bp, Homo sapiens
tgcctacaaactggg

SEQ ID NO: 948911 - DNA, 15 bp, Homo sapiens
gcctacaaactgggc

SEQ ID NO: 948912 - DNA, 15 bp, Homo sapiens
cctacaaactgggct

SEQ ID NO: 948913 - DNA, 15 bp, Homo sapiens
ctacaaactgggctg

SEQ ID NO: 948914 - DNA, 15 bp, Homo sapiens
tacaaactgggctgg

SEQ ID NO: 948915 - DNA, 15 bp, Homo sapiens
acaaactgggctggg

SEQ ID NO: 948916 - DNA, 15 bp, Homo sapiens
caaactgggctgggg

SEQ ID NO: 948917 - DNA, 15 bp, Homo sapiens
aaactgggctgggga

SEQ ID NO: 948918 - DNA, 15 bp, Homo sapiens
aactgggctggggag

SEQ ID NO: 948919 - DNA, 15 bp, Homo sapiens
actgggctggggagg

SEQ ID NO: 948920 - DNA, 15 bp, Homo sapiens
ctgggctggggaggg

SEQ ID NO: 948921 - DNA, 15 bp, Homo sapiens
tgggctggggaggga

SEQ ID NO: 948922 - DNA, 15 bp, Homo sapiens
gggctggggagggag

SEQ ID NO: 948923 - DNA, 15 bp, Homo sapiens
ggctggggagggagc

SEQ ID NO: 948924 - DNA, 15 bp, Homo sapiens
gctggggagggagct

SEQ ID NO: 948925 - DNA, 15 bp, Homo sapiens
ctggggagggagctg

SEQ ID NO: 948926 - DNA, 15 bp, Homo sapiens
tggggagggagctgg

SEQ ID NO: 948927 - DNA, 15 bp, Homo sapiens
ggggagggagctggg

SEQ ID NO: 948928 - DNA, 15 bp, Homo sapiens
gggagggagctggga

SEQ ID NO: 948929 - DNA, 15 bp, Homo sapiens
ggagggagctgggat

SEQ ID NO: 948930 - DNA, 15 bp, Homo sapiens
gagggagctgggatg

SEQ ID NO: 948931 - DNA, 15 bp, Homo sapiens
agggagctgggatgc

SEQ ID NO: 948932 - DNA, 15 bp, Homo sapiens
gggagctgggatgca

SEQ ID NO: 948933 - DNA, 15 bp, Homo sapiens
ggagctgggatgcag

SEQ ID NO: 948934 - DNA, 15 bp, Homo sapiens
gagctgggatgcaga

SEQ ID NO: 948935 - DNA, 15 bp, Homo sapiens
agctgggatgcagaa

SEQ ID NO: 948936 - DNA, 15 bp, Homo sapiens
gctgggatgcagaaa

SEQ ID NO: 948937 - DNA, 15 bp, Homo sapiens
ctgggatgcagaaag

SEQ ID NO: 948938 - DNA, 15 bp, Homo sapiens
tgggatgcagaaagt

SEQ ID NO: 948939 - DNA, 15 bp, Homo sapiens
gggatgcagaaagta

SEQ ID NO: 948940 - DNA, 15 bp, Homo sapiens
ggatgcagaaagtac

SEQ ID NO: 948941 - DNA, 15 bp, Homo sapiens
gatgcagaaagtaca

SEQ ID NO: 948942 - DNA, 15 bp, Homo sapiens
atgcagaaagtacaa

SEQ ID NO: 948943 - DNA, 15 bp, Homo sapiens
tgcagaaagtacaaa

SEQ ID NO: 948944 - DNA, 15 bp, Homo sapiens
gcagaaagtacaaag

SEQ ID NO: 948945 - DNA, 15 bp, Homo sapiens
cagaaagtacaaagt

SEQ ID NO: 948946 - DNA, 15 bp, Homo sapiens
agaaagtacaaagta

SEQ ID NO: 948947 - DNA, 15 bp, Homo sapiens
gaaagtacaaagtaa

SEQ ID NO: 948948 - DNA, 15 bp, Homo sapiens
aaagtacaaagtaaa

SEQ ID NO: 948949 - DNA, 15 bp, Homo sapiens
aagtacaaagtaaaa

SEQ ID NO: 948950 - DNA, 15 bp, Homo sapiens
agtacaaagtaaaac

SEQ ID NO: 948951 - DNA, 15 bp, Homo sapiens
gtacaaagtaaaaca

SEQ ID NO: 948952 - DNA, 15 bp, Homo sapiens
tacaaagtaaaacat

SEQ ID NO: 948953 - DNA, 15 bp, Homo sapiens
acaaagtaaaacata

SEQ ID NO: 948954 - DNA, 15 bp, Homo sapiens
caaagtaaaacatac

SEQ ID NO: 948955 - DNA, 15 bp, Homo sapiens
aaagtaaaacataca

SEQ ID NO: 948956 - DNA, 15 bp, Homo sapiens
aagtaaaacatacag

SEQ ID NO: 948957 - DNA, 15 bp, Homo sapiens
agtaaaacatacaga

SEQ ID NO: 948958 - DNA, 15 bp, Homo sapiens
gtaaaacatacagag

SEQ ID NO: 948959 - DNA, 15 bp, Homo sapiens
taaaacatacagagg

SEQ ID NO: 948960 - DNA, 15 bp, Homo sapiens
aaaacatacagaggt

SEQ ID NO: 948961 - DNA, 15 bp, Homo sapiens
aaacatacagaggta

SEQ ID NO: 948962 - DNA, 15 bp, Homo sapiens
aacatacagaggtag

SEQ ID NO: 948963 - DNA, 15 bp, Homo sapiens
acatacagaggtagg

SEQ ID NO: 948964 - DNA, 15 bp, Homo sapiens
catacagaggtaggg

SEQ ID NO: 948965 - DNA, 15 bp, Homo sapiens
atacagaggtagggg

SEQ ID NO: 948966 - DNA, 15 bp, Homo sapiens
tacagaggtaggggc

SEQ ID NO: 948967 - DNA, 15 bp, Homo sapiens
acagaggtaggggct

SEQ ID NO: 948968 - DNA, 15 bp, Homo sapiens
cagaggtaggggctg

SEQ ID NO: 948969 - DNA, 15 bp, Homo sapiens
agaggtaggggctgg

SEQ ID NO: 948970 - DNA, 15 bp, Homo sapiens
gaggtaggggctgga

SEQ ID NO: 948971 - DNA, 15 bp, Homo sapiens
aggtaggggctggag

SEQ ID NO: 948972 - DNA, 15 bp, Homo sapiens
ggtaggggctggagc

SEQ ID NO: 948973 - DNA, 15 bp, Homo sapiens
gtaggggctggagca

SEQ ID NO: 948974 - DNA, 15 bp, Homo sapiens
taggggctggagcat

SEQ ID NO: 948975 - DNA, 15 bp, Homo sapiens
aggggctggagcatg

SEQ ID NO: 948976 - DNA, 15 bp, Homo sapiens
ggggctggagcatgt

SEQ ID NO: 948977 - DNA, 15 bp, Homo sapiens
gggctggagcatgtc

SEQ ID NO: 948978 - DNA, 15 bp, Homo sapiens
ggctggagcatgtca

SEQ ID NO: 948979 - DNA, 15 bp, Homo sapiens
gctggagcatgtcaa

SEQ ID NO: 948980 - DNA, 15 bp, Homo sapiens
ctggagcatgtcaag

SEQ ID NO: 948981 - DNA, 15 bp, Homo sapiens
tggagcatgtcaaga

SEQ ID NO: 948982 - DNA, 15 bp, Homo sapiens
ggagcatgtcaagaa

SEQ ID NO: 948983 - DNA, 15 bp, Homo sapiens
gagcatgtcaagaag

SEQ ID NO: 948984 - DNA, 15 bp, Homo sapiens
agcatgtcaagaagc

SEQ ID NO: 948985 - DNA, 15 bp, Homo sapiens
gcatgtcaagaagct

SEQ ID NO: 948986 - DNA, 15 bp, Homo sapiens
catgtcaagaagctg

SEQ ID NO: 948987 - DNA, 15 bp, Homo sapiens
atgtcaagaagctgc

SEQ ID NO: 948988 - DNA, 15 bp, Homo sapiens
tgtcaagaagctgcc

SEQ ID NO: 948989 - DNA, 15 bp, Homo sapiens
gtcaagaagctgcct

SEQ ID NO: 948990 - DNA, 15 bp, Homo sapiens
tcaagaagctgccta

SEQ ID NO: 948991 - DNA, 15 bp, Homo sapiens
caagaagctgcctac

SEQ ID NO: 948992 - DNA, 15 bp, Homo sapiens
aagaagctgcctaca

SEQ ID NO: 948993 - DNA, 15 bp, Homo sapiens
agaagctgcctacaa

SEQ ID NO: 948994 - DNA, 15 bp, Homo sapiens
gaagctgcctacaat

SEQ ID NO: 948995 - DNA, 15 bp, Homo sapiens
aagctgcctacaatg

SEQ ID NO: 948996 - DNA, 15 bp, Homo sapiens
agctgcctacaatgt

SEQ ID NO: 948997 - DNA, 15 bp, Homo sapiens
gctgcctacaatgta

SEQ ID NO: 948998 - DNA, 15 bp, Homo sapiens
ctgcctacaatgtag

SEQ ID NO: 948999 - DNA, 15 bp, Homo sapiens
tgcctacaatgtaga

SEQ ID NO: 949000 - DNA, 15 bp, Homo sapiens
gcctacaatgtagaa

SEQ ID NO: 949001 - DNA, 15 bp, Homo sapiens
cctacaatgtagaaa

SEQ ID NO: 949002 - DNA, 15 bp, Homo sapiens
ctacaatgtagaaat

SEQ ID NO: 949003 - DNA, 15 bp, Homo sapiens
tacaatgtagaaata

SEQ ID NO: 949004 - DNA, 15 bp, Homo sapiens
acaatgtagaaatac

SEQ ID NO: 949005 - DNA, 15 bp, Homo sapiens
caatgtagaaataca

SEQ ID NO: 949006 - DNA, 15 bp, Homo sapiens
aatgtagaaatacag

SEQ ID NO: 949007 - DNA, 15 bp, Homo sapiens
atgtagaaatacagg

SEQ ID NO: 949008 - DNA, 15 bp, Homo sapiens
tgtagaaatacaggg

SEQ ID NO: 949009 - DNA, 15 bp, Homo sapiens
gtagaaatacagggt

SEQ ID NO: 949010 - DNA, 15 bp, Homo sapiens
tagaaatacagggtg

SEQ ID NO: 949011 - DNA, 15 bp, Homo sapiens
agaaatacagggtga

SEQ ID NO: 949012 - DNA, 15 bp, Homo sapiens
gaaatacagggtgag

SEQ ID NO: 949013 - DNA, 15 bp, Homo sapiens
aaatacagggtgagg

SEQ ID NO: 949014 - DNA, 15 bp, Homo sapiens
aatacagggtgagga

SEQ ID NO: 949015 - DNA, 15 bp, Homo sapiens
atacagggtgaggac

SEQ ID NO: 949016 - DNA, 15 bp, Homo sapiens
tacagggtgaggaca

SEQ ID NO: 949017 - DNA, 15 bp, Homo sapiens
acagggtgaggacag

SEQ ID NO: 949018 - DNA, 15 bp, Homo sapiens
cagggtgaggacagg

SEQ ID NO: 949019 - DNA, 15 bp, Homo sapiens
agggtgaggacaggt

SEQ ID NO: 949020 - DNA, 15 bp, Homo sapiens
gggtgaggacaggtg

SEQ ID NO: 949021 - DNA, 15 bp, Homo sapiens
ggtgaggacaggtga

SEQ ID NO: 949022 - DNA, 15 bp, Homo sapiens
gtgaggacaggtgat

SEQ ID NO: 949023 - DNA, 15 bp, Homo sapiens
tgaggacaggtgatg

SEQ ID NO: 949024 - DNA, 15 bp, Homo sapiens
gaggacaggtgatga

SEQ ID NO: 949025 - DNA, 15 bp, Homo sapiens
aggacaggtgatgat

SEQ ID NO: 949026 - DNA, 15 bp, Homo sapiens
ggacaggtgatgatt

SEQ ID NO: 949027 - DNA, 15 bp, Homo sapiens
gacaggtgatgattt

SEQ ID NO: 949028 - DNA, 15 bp, Homo sapiens
acaggtgatgatttt

SEQ ID NO: 949029 - DNA, 15 bp, Homo sapiens
caggtgatgatttta

SEQ ID NO: 949030 - DNA, 15 bp, Homo sapiens
aggtgatgattttaa

SEQ ID NO: 949031 - DNA, 15 bp, Homo sapiens
ggtgatgattttaaa

SEQ ID NO: 949032 - DNA, 15 bp, Homo sapiens
gtgatgattttaaag

SEQ ID NO: 949033 - DNA, 15 bp, Homo sapiens
tgatgattttaaagt

SEQ ID NO: 949034 - DNA, 15 bp, Homo sapiens
gatgattttaaagta

SEQ ID NO: 949035 - DNA, 15 bp, Homo sapiens
atgattttaaagtat

SEQ ID NO: 949036 - DNA, 15 bp, Homo sapiens
tgattttaaagtatg

SEQ ID NO: 949037 - DNA, 15 bp, Homo sapiens
gattttaaagtatgc

SEQ ID NO: 949038 - DNA, 15 bp, Homo sapiens
attttaaagtatgcc

SEQ ID NO: 949039 - DNA, 15 bp, Homo sapiens
ttttaaagtatgcct

SEQ ID NO: 949040 - DNA, 15 bp, Homo sapiens
tttaaagtatgcctc

SEQ ID NO: 949041 - DNA, 15 bp, Homo sapiens
ttaaagtatgcctca

SEQ ID NO: 949042 - DNA, 15 bp, Homo sapiens
taaagtatgcctcat

SEQ ID NO: 949043 - DNA, 15 bp, Homo sapiens
aaagtatgcctcatg

SEQ ID NO: 949044 - DNA, 15 bp, Homo sapiens
aagtatgcctcatgt

SEQ ID NO: 949045 - DNA, 15 bp, Homo sapiens
agtatgcctcatgtt

SEQ ID NO: 949046 - DNA, 15 bp, Homo sapiens
gtatgcctcatgtta

SEQ ID NO: 949047 - DNA, 15 bp, Homo sapiens
tatgcctcatgttac

SEQ ID NO: 949048 - DNA, 15 bp, Homo sapiens
atgcctcatgttacc

SEQ ID NO: 949049 - DNA, 15 bp, Homo sapiens
tgcctcatgttacca

SEQ ID NO: 949050 - DNA, 15 bp, Homo sapiens
gcctcatgttaccag

SEQ ID NO: 949051 - DNA, 15 bp, Homo sapiens
cctcatgttaccagt

SEQ ID NO: 949052 - DNA, 15 bp, Homo sapiens
ctcatgttaccagtg

SEQ ID NO: 949053 - DNA, 15 bp, Homo sapiens
tcatgttaccagtga

SEQ ID NO: 949054 - DNA, 15 bp, Homo sapiens
catgttaccagtgag

SEQ ID NO: 949055 - DNA, 15 bp, Homo sapiens
atgttaccagtgagt

SEQ ID NO: 949056 - DNA, 15 bp, Homo sapiens
tgttaccagtgagtt

SEQ ID NO: 949057 - DNA, 15 bp, Homo sapiens
gttaccagtgagttc

SEQ ID NO: 949058 - DNA, 15 bp, Homo sapiens
ttaccagtgagttcc

SEQ ID NO: 949059 - DNA, 15 bp, Homo sapiens
taccagtgagttcca

SEQ ID NO: 949060 - DNA, 15 bp, Homo sapiens
accagtgagttccat

SEQ ID NO: 949061 - DNA, 15 bp, Homo sapiens
ccagtgagttccata

SEQ ID NO: 949062 - DNA, 15 bp, Homo sapiens
cagtgagttccataa

SEQ ID NO: 949063 - DNA, 15 bp, Homo sapiens
agtgagttccataag

SEQ ID NO: 949064 - DNA, 15 bp, Homo sapiens
gtgagttccataagg

SEQ ID NO: 949065 - DNA, 15 bp, Homo sapiens
tgagttccataaggg

SEQ ID NO: 949066 - DNA, 15 bp, Homo sapiens
gagttccataaggga

SEQ ID NO: 949067 - DNA, 15 bp, Homo sapiens
agttccataagggaa

SEQ ID NO: 949068 - DNA, 15 bp, Homo sapiens
gttccataagggaaa

SEQ ID NO: 949069 - DNA, 15 bp, Homo sapiens
ttccataagggaaaa

SEQ ID NO: 949070 - DNA, 15 bp, Homo sapiens
tccataagggaaaaa

SEQ ID NO: 949071 - DNA, 15 bp, Homo sapiens
ccataagggaaaaaa

SEQ ID NO: 949072 - DNA, 15 bp, Homo sapiens
cataagggaaaaaag

SEQ ID NO: 949073 - DNA, 15 bp, Homo sapiens
ataagggaaaaaaga

SEQ ID NO: 949074 - DNA, 15 bp, Homo sapiens
taagggaaaaaagaa

SEQ ID NO: 949075 - DNA, 15 bp, Homo sapiens
aagggaaaaaagaac

SEQ ID NO: 949076 - DNA, 15 bp, Homo sapiens
agggaaaaaagaact

SEQ ID NO: 949077 - DNA, 15 bp, Homo sapiens
gggaaaaaagaactt

SEQ ID NO: 949078 - DNA, 15 bp, Homo sapiens
ggaaaaaagaactta

SEQ ID NO: 949079 - DNA, 15 bp, Homo sapiens
gaaaaaagaacttaa

SEQ ID NO: 949080 - DNA, 15 bp, Homo sapiens
aaaaaagaacttaag

SEQ ID NO: 949081 - DNA, 15 bp, Homo sapiens
aaaaagaacttaagt

SEQ ID NO: 949082 - DNA, 15 bp, Homo sapiens
aaaagaacttaagtc

SEQ ID NO: 949083 - DNA, 15 bp, Homo sapiens
aaagaacttaagtca

SEQ ID NO: 949084 - DNA, 15 bp, Homo sapiens
aagaacttaagtcaa

SEQ ID NO: 949085 - DNA, 15 bp, Homo sapiens
agaacttaagtcaag

SEQ ID NO: 949086 - DNA, 15 bp, Homo sapiens
gaacttaagtcaagc

SEQ ID NO: 949087 - DNA, 15 bp, Homo sapiens
aacttaagtcaagca

SEQ ID NO: 949088 - DNA, 15 bp, Homo sapiens
acttaagtcaagcac

SEQ ID NO: 949089 - DNA, 15 bp, Homo sapiens
cttaagtcaagcact

SEQ ID NO: 949090 - DNA, 15 bp, Homo sapiens
ttaagtcaagcactg

SEQ ID NO: 949091 - DNA, 15 bp, Homo sapiens
taagtcaagcactgg

SEQ ID NO: 949092 - DNA, 15 bp, Homo sapiens
aagtcaagcactgga

SEQ ID NO: 949093 - DNA, 15 bp, Homo sapiens
agtcaagcactggag

SEQ ID NO: 949094 - DNA, 15 bp, Homo sapiens
gtcaagcactggaga

SEQ ID NO: 949095 - DNA, 15 bp, Homo sapiens
tcaagcactggagaa

SEQ ID NO: 949096 - DNA, 15 bp, Homo sapiens
caagcactggagaat

SEQ ID NO: 949097 - DNA, 15 bp, Homo sapiens
aagcactggagaata

SEQ ID NO: 949098 - DNA, 15 bp, Homo sapiens
agcactggagaatac

SEQ ID NO: 949099 - DNA, 15 bp, Homo sapiens
gcactggagaatacc

SEQ ID NO: 949100 - DNA, 15 bp, Homo sapiens
cactggagaatacca

SEQ ID NO: 949101 - DNA, 15 bp, Homo sapiens
actggagaataccat

SEQ ID NO: 949102 - DNA, 15 bp, Homo sapiens
ctggagaataccata

SEQ ID NO: 949103 - DNA, 15 bp, Homo sapiens
tggagaataccatat

SEQ ID NO: 949104 - DNA, 15 bp, Homo sapiens
ggagaataccatatc

SEQ ID NO: 949105 - DNA, 15 bp, Homo sapiens
gagaataccatatcc

SEQ ID NO: 949106 - DNA, 15 bp, Homo sapiens
agaataccatatcca

SEQ ID NO: 949107 - DNA, 15 bp, Homo sapiens
gaataccatatccaa

SEQ ID NO: 949108 - DNA, 15 bp, Homo sapiens
aataccatatccaat

SEQ ID NO: 949109 - DNA, 15 bp, Homo sapiens
ataccatatccaatg

SEQ ID NO: 949110 - DNA, 15 bp, Homo sapiens
taccatatccaatgg

SEQ ID NO: 949111 - DNA, 15 bp, Homo sapiens
accatatccaatgga

SEQ ID NO: 949112 - DNA, 15 bp, Homo sapiens
ccatatccaatggaa

SEQ ID NO: 949113 - DNA, 15 bp, Homo sapiens
catatccaatggaag

SEQ ID NO: 949114 - DNA, 15 bp, Homo sapiens
atatccaatggaagt

SEQ ID NO: 949115 - DNA, 15 bp, Homo sapiens
tatccaatggaagtc

SEQ ID NO: 949116 - DNA, 15 bp, Homo sapiens
atccaatggaagtca

SEQ ID NO: 949117 - DNA, 15 bp, Homo sapiens
tccaatggaagtcat

SEQ ID NO: 949118 - DNA, 15 bp, Homo sapiens
ccaatggaagtcatt

SEQ ID NO: 949119 - DNA, 15 bp, Homo sapiens
caatggaagtcattg

SEQ ID NO: 949120 - DNA, 15 bp, Homo sapiens
aatggaagtcattga

SEQ ID NO: 949121 - DNA, 15 bp, Homo sapiens
atggaagtcattgaa

SEQ ID NO: 949122 - DNA, 15 bp, Homo sapiens
tggaagtcattgaaa

SEQ ID NO: 949123 - DNA, 15 bp, Homo sapiens
ggaagtcattgaaaa

SEQ ID NO: 949124 - DNA, 15 bp, Homo sapiens
gaagtcattgaaaac

SEQ ID NO: 949125 - DNA, 15 bp, Homo sapiens
aagtcattgaaaacg

SEQ ID NO: 949126 - DNA, 15 bp, Homo sapiens
agtcattgaaaacgt

SEQ ID NO: 949127 - DNA, 15 bp, Homo sapiens
gtcattgaaaacgtt

SEQ ID NO: 949128 - DNA, 15 bp, Homo sapiens
tcattgaaaacgttc

SEQ ID NO: 949129 - DNA, 15 bp, Homo sapiens
cattgaaaacgttct

SEQ ID NO: 949130 - DNA, 15 bp, Homo sapiens
attgaaaacgttctc

SEQ ID NO: 949131 - DNA, 15 bp, Homo sapiens
ttgaaaacgttctca

SEQ ID NO: 949132 - DNA, 15 bp, Homo sapiens
tgaaaacgttctcac

SEQ ID NO: 949133 - DNA, 15 bp, Homo sapiens
gaaaacgttctcacg

SEQ ID NO: 949134 - DNA, 15 bp, Homo sapiens
aaaacgttctcacgt

SEQ ID NO: 949135 - DNA, 15 bp, Homo sapiens
aaacgttctcacgtg

SEQ ID NO: 949136 - DNA, 15 bp, Homo sapiens
aacgttctcacgtgt

SEQ ID NO: 949137 - DNA, 15 bp, Homo sapiens
acgttctcacgtgtc

SEQ ID NO: 949138 - DNA, 15 bp, Homo sapiens
cgttctcacgtgtcc

SEQ ID NO: 949139 - DNA, 15 bp, Homo sapiens
gttctcacgtgtcca

SEQ ID NO: 949140 - DNA, 15 bp, Homo sapiens
ttctcacgtgtccac

SEQ ID NO: 949141 - DNA, 15 bp, Homo sapiens
tctcacgtgtccacg

SEQ ID NO: 949142 - DNA, 15 bp, Homo sapiens
ctcacgtgtccacgt

SEQ ID NO: 949143 - DNA, 15 bp, Homo sapiens
tcacgtgtccacgtt

SEQ ID NO: 949144 - DNA, 15 bp, Homo sapiens
cacgtgtccacgttt

SEQ ID NO: 949145 - DNA, 15 bp, Homo sapiens
acgtgtccacgtttg

SEQ ID NO: 949146 - DNA, 15 bp, Homo sapiens
cgtgtccacgtttgt

SEQ ID NO: 949147 - DNA, 15 bp, Homo sapiens
gtgtccacgtttgtc

SEQ ID NO: 949148 - DNA, 15 bp, Homo sapiens
tgtccacgtttgtct

SEQ ID NO: 949149 - DNA, 15 bp, Homo sapiens
gtccacgtttgtcta

SEQ ID NO: 949150 - DNA, 15 bp, Homo sapiens
tccacgtttgtctat

SEQ ID NO: 949151 - DNA, 15 bp, Homo sapiens
ccacgtttgtctatg

SEQ ID NO: 949152 - DNA, 15 bp, Homo sapiens
cacgtttgtctatgt

SEQ ID NO: 949153 - DNA, 15 bp, Homo sapiens
acgtttgtctatgtt

SEQ ID NO: 949154 - DNA, 15 bp, Homo sapiens
cgtttgtctatgtta

SEQ ID NO: 949155 - DNA, 15 bp, Homo sapiens
gtttgtctatgttat

SEQ ID NO: 949156 - DNA, 15 bp, Homo sapiens
tttgtctatgttata

SEQ ID NO: 949157 - DNA, 15 bp, Homo sapiens
ttgtctatgttatac

SEQ ID NO: 949158 - DNA, 15 bp, Homo sapiens
tgtctatgttatacg

SEQ ID NO: 949159 - DNA, 15 bp, Homo sapiens
gtctatgttatacgg

SEQ ID NO: 949160 - DNA, 15 bp, Homo sapiens
tctatgttatacggt

SEQ ID NO: 949161 - DNA, 15 bp, Homo sapiens
ctatgttatacggta

SEQ ID NO: 949162 - DNA, 15 bp, Homo sapiens
tatgttatacggtag

SEQ ID NO: 949163 - DNA, 15 bp, Homo sapiens
atgttatacggtagt

SEQ ID NO: 949164 - DNA, 15 bp, Homo sapiens
tgttatacggtagtt

SEQ ID NO: 949165 - DNA, 15 bp, Homo sapiens
gttatacggtagttt

SEQ ID NO: 949166 - DNA, 15 bp, Homo sapiens
ttatacggtagtttg

SEQ ID NO: 949167 - DNA, 15 bp, Homo sapiens
tatacggtagtttgc

SEQ ID NO: 949168 - DNA, 15 bp, Homo sapiens
atacggtagtttgct

SEQ ID NO: 949169 - DNA, 15 bp, Homo sapiens
tacggtagtttgctt

SEQ ID NO: 949170 - DNA, 15 bp, Homo sapiens
acggtagtttgctta

SEQ ID NO: 949171 - DNA, 15 bp, Homo sapiens
cggtagtttgcttaa

SEQ ID NO: 949172 - DNA, 15 bp, Homo sapiens
ggtagtttgcttaaa

SEQ ID NO: 949173 - DNA, 15 bp, Homo sapiens
gtagtttgcttaaag

SEQ ID NO: 949174 - DNA, 15 bp, Homo sapiens
tagtttgcttaaagc

SEQ ID NO: 949175 - DNA, 15 bp, Homo sapiens
agtttgcttaaagct

SEQ ID NO: 949176 - DNA, 15 bp, Homo sapiens
gtttgcttaaagctg

SEQ ID NO: 949177 - DNA, 15 bp, Homo sapiens
tttgcttaaagctgt

SEQ ID NO: 949178 - DNA, 15 bp, Homo sapiens
ttgcttaaagctgtt

SEQ ID NO: 949179 - DNA, 15 bp, Homo sapiens
tgcttaaagctgttc

SEQ ID NO: 949180 - DNA, 15 bp, Homo sapiens
gcttaaagctgttct

SEQ ID NO: 949181 - DNA, 15 bp, Homo sapiens
cttaaagctgttcta

SEQ ID NO: 949182 - DNA, 15 bp, Homo sapiens
ttaaagctgttctat

SEQ ID NO: 949183 - DNA, 15 bp, Homo sapiens
taaagctgttctatt

SEQ ID NO: 949184 - DNA, 15 bp, Homo sapiens
aaagctgttctattc

SEQ ID NO: 949185 - DNA, 15 bp, Homo sapiens
aagctgttctattcg

SEQ ID NO: 949186 - DNA, 15 bp, Homo sapiens
agctgttctattcga

SEQ ID NO: 949187 - DNA, 15 bp, Homo sapiens
gctgttctattcgaa

SEQ ID NO: 949188 - DNA, 15 bp, Homo sapiens
ctgttctattcgaag

SEQ ID NO: 949189 - DNA, 15 bp, Homo sapiens
tgttctattcgaagg

SEQ ID NO: 949190 - DNA, 15 bp, Homo sapiens
gttctattcgaaggc

SEQ ID NO: 949191 - DNA, 15 bp, Homo sapiens
ttctattcgaaggcc

SEQ ID NO: 949192 - DNA, 15 bp, Homo sapiens
tctattcgaaggcct

SEQ ID NO: 949193 - DNA, 15 bp, Homo sapiens
ctattcgaaggccta

SEQ ID NO: 949194 - DNA, 15 bp, Homo sapiens
tattcgaaggcctaa

SEQ ID NO: 949195 - DNA, 15 bp, Homo sapiens
attcgaaggcctaaa

SEQ ID NO: 949196 - DNA, 15 bp, Homo sapiens
ttcgaaggcctaaac

SEQ ID NO: 949197 - DNA, 15 bp, Homo sapiens
tcgaaggcctaaact

SEQ ID NO: 949198 - DNA, 15 bp, Homo sapiens
cgaaggcctaaactt

SEQ ID NO: 949199 - DNA, 15 bp, Homo sapiens
gaaggcctaaacttt

SEQ ID NO: 949200 - DNA, 15 bp, Homo sapiens
aaggcctaaacttta

SEQ ID NO: 949201 - DNA, 15 bp, Homo sapiens
aggcctaaactttac

SEQ ID NO: 949202 - DNA, 15 bp, Homo sapiens
ggcctaaactttaca

SEQ ID NO: 949203 - DNA, 15 bp, Homo sapiens
gcctaaactttacac

SEQ ID NO: 949204 - DNA, 15 bp, Homo sapiens
cctaaactttacaca

SEQ ID NO: 949205 - DNA, 15 bp, Homo sapiens
ctaaactttacacag

SEQ ID NO: 949206 - DNA, 15 bp, Homo sapiens
taaactttacacaga

SEQ ID NO: 949207 - DNA, 15 bp, Homo sapiens
aaactttacacagat

SEQ ID NO: 949208 - DNA, 15 bp, Homo sapiens
aactttacacagata

SEQ ID NO: 949209 - DNA, 15 bp, Homo sapiens
actttacacagatag

SEQ ID NO: 949210 - DNA, 15 bp, Homo sapiens
ctttacacagataga

SEQ ID NO: 949211 - DNA, 15 bp, Homo sapiens
tttacacagatagat

SEQ ID NO: 949212 - DNA, 15 bp, Homo sapiens
ttacacagatagatc

SEQ ID NO: 949213 - DNA, 15 bp, Homo sapiens
tacacagatagatca

SEQ ID NO: 949214 - DNA, 15 bp, Homo sapiens
acacagatagatcat

SEQ ID NO: 949215 - DNA, 15 bp, Homo sapiens
cacagatagatcata

SEQ ID NO: 949216 - DNA, 15 bp, Homo sapiens
acagatagatcatat

SEQ ID NO: 949217 - DNA, 15 bp, Homo sapiens
cagatagatcatatt

SEQ ID NO: 949218 - DNA, 15 bp, Homo sapiens
agatagatcatatta

SEQ ID NO: 949219 - DNA, 15 bp, Homo sapiens
gatagatcatattag

SEQ ID NO: 949220 - DNA, 15 bp, Homo sapiens
atagatcatattaga

SEQ ID NO: 949221 - DNA, 15 bp, Homo sapiens
tagatcatattagag

SEQ ID NO: 949222 - DNA, 15 bp, Homo sapiens
agatcatattagaga

SEQ ID NO: 949223 - DNA, 15 bp, Homo sapiens
gatcatattagagat

SEQ ID NO: 949224 - DNA, 15 bp, Homo sapiens
atcatattagagatt

SEQ ID NO: 949225 - DNA, 15 bp, Homo sapiens
tcatattagagattt

SEQ ID NO: 949226 - DNA, 15 bp, Homo sapiens
catattagagattta

SEQ ID NO: 949227 - DNA, 15 bp, Homo sapiens
atattagagatttag

SEQ ID NO: 949228 - DNA, 15 bp, Homo sapiens
tattagagatttaga

SEQ ID NO: 949229 - DNA, 15 bp, Homo sapiens
attagagatttagaa

SEQ ID NO: 949230 - DNA, 15 bp, Homo sapiens
ttagagatttagaaa

SEQ ID NO: 949231 - DNA, 15 bp, Homo sapiens
tagagatttagaaaa

SEQ ID NO: 949232 - DNA, 15 bp, Homo sapiens
agagatttagaaaag

SEQ ID NO: 949233 - DNA, 15 bp, Homo sapiens
gagatttagaaaaga

SEQ ID NO: 949234 - DNA, 15 bp, Homo sapiens
agatttagaaaagat

SEQ ID NO: 949235 - DNA, 15 bp, Homo sapiens
gatttagaaaagatt

SEQ ID NO: 949236 - DNA, 15 bp, Homo sapiens
atttagaaaagattt

SEQ ID NO: 949237 - DNA, 15 bp, Homo sapiens
tttagaaaagatttt

SEQ ID NO: 949238 - DNA, 15 bp, Homo sapiens
ttagaaaagattttt

SEQ ID NO: 949239 - DNA, 15 bp, Homo sapiens
tagaaaagatttttc

SEQ ID NO: 949240 - DNA, 15 bp, Homo sapiens
agaaaagatttttca

SEQ ID NO: 949241 - DNA, 15 bp, Homo sapiens
gaaaagatttttcag

SEQ ID NO: 949242 - DNA, 15 bp, Homo sapiens
aaaagatttttcagc

SEQ ID NO: 949243 - DNA, 15 bp, Homo sapiens
aaagatttttcagct

SEQ ID NO: 949244 - DNA, 15 bp, Homo sapiens
gatttttcagcttca

SEQ ID NO: 949245 - DNA, 15 bp, Homo sapiens
atttttcagcttcag

SEQ ID NO: 949246 - DNA, 15 bp, Homo sapiens
tttttcagcttcagg

SEQ ID NO: 949247 - DNA, 15 bp, Homo sapiens
ttttcagcttcagga

SEQ ID NO: 949248 - DNA, 15 bp, Homo sapiens
tttcagcttcaggag

SEQ ID NO: 949249 - DNA, 15 bp, Homo sapiens
ttcagcttcaggaga

SEQ ID NO: 949250 - DNA, 15 bp, Homo sapiens
tcagcttcaggagat

SEQ ID NO: 949251 - DNA, 15 bp, Homo sapiens
cagcttcaggagatg

SEQ ID NO: 949252 - DNA, 15 bp, Homo sapiens
agcttcaggagatga

SEQ ID NO: 949253 - DNA, 15 bp, Homo sapiens
gcttcaggagatgag

SEQ ID NO: 949254 - DNA, 15 bp, Homo sapiens
cttcaggagatgaga

SEQ ID NO: 949255 - DNA, 15 bp, Homo sapiens
ttcaggagatgagaa

SEQ ID NO: 949256 - DNA, 15 bp, Homo sapiens
tcaggagatgagaaa

SEQ ID NO: 949257 - DNA, 15 bp, Homo sapiens
caggagatgagaaat

SEQ ID NO: 949258 - DNA, 15 bp, Homo sapiens
aggagatgagaaata

SEQ ID NO: 949259 - DNA, 15 bp, Homo sapiens
ggagatgagaaataa

SEQ ID NO: 949260 - DNA, 15 bp, Homo sapiens
gagatgagaaataat

SEQ ID NO: 949261 - DNA, 15 bp, Homo sapiens
agatgagaaataatt

SEQ ID NO: 949262 - DNA, 15 bp, Homo sapiens
gatgagaaataattc

SEQ ID NO: 949263 - DNA, 15 bp, Homo sapiens
atgagaaataattcc

SEQ ID NO: 949264 - DNA, 15 bp, Homo sapiens
tgagaaataattccc

SEQ ID NO: 949265 - DNA, 15 bp, Homo sapiens
gagaaataattccct

SEQ ID NO: 949266 - DNA, 15 bp, Homo sapiens
agaaataattccctc

SEQ ID NO: 949267 - DNA, 15 bp, Homo sapiens
gaaataattccctcg

SEQ ID NO: 949268 - DNA, 15 bp, Homo sapiens
aaataattccctcgg

SEQ ID NO: 949269 - DNA, 15 bp, Homo sapiens
aataattccctcgga

SEQ ID NO: 949270 - DNA, 15 bp, Homo sapiens
ataattccctcggac

SEQ ID NO: 949271 - DNA, 15 bp, Homo sapiens
taattccctcggact

SEQ ID NO: 949272 - DNA, 15 bp, Homo sapiens
aattccctcggacta

SEQ ID NO: 949273 - DNA, 15 bp, Homo sapiens
attccctcggactat

SEQ ID NO: 949274 - DNA, 15 bp, Homo sapiens
ttccctcggactata

SEQ ID NO: 949275 - DNA, 15 bp, Homo sapiens
tccctcggactatac

SEQ ID NO: 949276 - DNA, 15 bp, Homo sapiens
ccctcggactatacc

SEQ ID NO: 949277 - DNA, 15 bp, Homo sapiens
cctcggactatacct

SEQ ID NO: 949278 - DNA, 15 bp, Homo sapiens
ctcggactatacctt

SEQ ID NO: 949279 - DNA, 15 bp, Homo sapiens
tcggactataccttt

SEQ ID NO: 949280 - DNA, 15 bp, Homo sapiens
cggactatacctttc

SEQ ID NO: 949281 - DNA, 15 bp, Homo sapiens
ggactatacctttct

SEQ ID NO: 949282 - DNA, 15 bp, Homo sapiens
gactatacctttctc

SEQ ID NO: 949283 - DNA, 15 bp, Homo sapiens
actatacctttctca

SEQ ID NO: 949284 - DNA, 15 bp, Homo sapiens
ctatacctttctcac

SEQ ID NO: 949285 - DNA, 15 bp, Homo sapiens
tatacctttctcact

SEQ ID NO: 949286 - DNA, 15 bp, Homo sapiens
atacctttctcacta

SEQ ID NO: 949287 - DNA, 15 bp, Homo sapiens
tacctttctcactat

SEQ ID NO: 949288 - DNA, 15 bp, Homo sapiens
acctttctcactatt

SEQ ID NO: 949289 - DNA, 15 bp, Homo sapiens
cctttctcactatta

SEQ ID NO: 949290 - DNA, 15 bp, Homo sapiens
ctttctcactattag

SEQ ID NO: 949291 - DNA, 15 bp, Homo sapiens
tttctcactattagc

SEQ ID NO: 949292 - DNA, 15 bp, Homo sapiens
ttctcactattagct

SEQ ID NO: 949293 - DNA, 15 bp, Homo sapiens
tctcactattagctc

SEQ ID NO: 949294 - DNA, 15 bp, Homo sapiens
ctcactattagctct

SEQ ID NO: 949295 - DNA, 15 bp, Homo sapiens
tcactattagctctt

SEQ ID NO: 949296 - DNA, 15 bp, Homo sapiens
cactattagctcttg

SEQ ID NO: 949297 - DNA, 15 bp, Homo sapiens
actattagctcttgg

SEQ ID NO: 949298 - DNA, 15 bp, Homo sapiens
ctattagctcttggg

SEQ ID NO: 949299 - DNA, 15 bp, Homo sapiens
tattagctcttgggc

SEQ ID NO: 949300 - DNA, 15 bp, Homo sapiens
attagctcttgggcc

SEQ ID NO: 949301 - DNA, 15 bp, Homo sapiens
ttagctcttgggcct

SEQ ID NO: 949302 - DNA, 15 bp, Homo sapiens
tagctcttgggcctg

SEQ ID NO: 949303 - DNA, 15 bp, Homo sapiens
agctcttgggcctgt

SEQ ID NO: 949304 - DNA, 15 bp, Homo sapiens
gctcttgggcctgtg

SEQ ID NO: 949305 - DNA, 15 bp, Homo sapiens
ctcttgggcctgtgt

SEQ ID NO: 949306 - DNA, 15 bp, Homo sapiens
tcttgggcctgtgtt

SEQ ID NO: 949307 - DNA, 15 bp, Homo sapiens
cttgggcctgtgttt

SEQ ID NO: 949308 - DNA, 15 bp, Homo sapiens
ttgggcctgtgttta

SEQ ID NO: 949309 - DNA, 15 bp, Homo sapiens
tgggcctgtgtttac

SEQ ID NO: 949310 - DNA, 15 bp, Homo sapiens
gggcctgtgtttact

SEQ ID NO: 949311 - DNA, 15 bp, Homo sapiens
ggcctgtgtttactc

SEQ ID NO: 949312 - DNA, 15 bp, Homo sapiens
gcctgtgtttactct

SEQ ID NO: 949313 - DNA, 15 bp, Homo sapiens
cctgtgtttactctc

SEQ ID NO: 949314 - DNA, 15 bp, Homo sapiens
ctgtgtttactctca

SEQ ID NO: 949315 - DNA, 15 bp, Homo sapiens
tgtgtttactctcac

SEQ ID NO: 949316 - DNA, 15 bp, Homo sapiens
gtgtttactctcacc

SEQ ID NO: 949317 - DNA, 15 bp, Homo sapiens
tgtttactctcaccc

SEQ ID NO: 949318 - DNA, 15 bp, Homo sapiens
gtttactctcacccc

SEQ ID NO: 949319 - DNA, 15 bp, Homo sapiens
tttactctcacccct

SEQ ID NO: 949320 - DNA, 15 bp, Homo sapiens
ttactctcacccctt

SEQ ID NO: 949321 - DNA, 15 bp, Homo sapiens
actctcacccctttc

SEQ ID NO: 949322 - DNA, 15 bp, Homo sapiens
ctctcacccctttct

SEQ ID NO: 949323 - DNA, 15 bp, Homo sapiens
tctcacccctttctc

SEQ ID NO: 949324 - DNA, 15 bp, Homo sapiens
ctcacccctttctct

SEQ ID NO: 949325 - DNA, 15 bp, Homo sapiens
tcacccctttctctg

SEQ ID NO: 949326 - DNA, 15 bp, Homo sapiens
cacccctttctctgc

SEQ ID NO: 949327 - DNA, 15 bp, Homo sapiens
acccctttctctgca

SEQ ID NO: 949328 - DNA, 15 bp, Homo sapiens
cccctttctctgcag

SEQ ID NO: 949329 - DNA, 15 bp, Homo sapiens
ccctttctctgcagc

SEQ ID NO: 949330 - DNA, 15 bp, Homo sapiens
cctttctctgcagcg

SEQ ID NO: 949331 - DNA, 15 bp, Homo sapiens
ctttctctgcagcgt

SEQ ID NO: 949332 - DNA, 15 bp, Homo sapiens
tttctctgcagcgtg

SEQ ID NO: 949333 - DNA, 15 bp, Homo sapiens
ttctctgcagcgtgt

SEQ ID NO: 949334 - DNA, 15 bp, Homo sapiens
tctctgcagcgtgtg

SEQ ID NO: 949335 - DNA, 15 bp, Homo sapiens
ctctgcagcgtgtgg

SEQ ID NO: 949336 - DNA, 15 bp, Homo sapiens
tctgcagcgtgtgga

SEQ ID NO: 949337 - DNA, 15 bp, Homo sapiens
ctgcagcgtgtggac

SEQ ID NO: 949338 - DNA, 15 bp, Homo sapiens
tgcagcgtgtggacc

SEQ ID NO: 949339 - DNA, 15 bp, Homo sapiens
gcagcgtgtggaccg

SEQ ID NO: 949340 - DNA, 15 bp, Homo sapiens
cagcgtgtggaccga

SEQ ID NO: 949341 - DNA, 15 bp, Homo sapiens
agcgtgtggaccgaa

SEQ ID NO: 949342 - DNA, 15 bp, Homo sapiens
gcgtgtggaccgaag

SEQ ID NO: 949343 - DNA, 15 bp, Homo sapiens
cgtgtggaccgaaga

SEQ ID NO: 949344 - DNA, 15 bp, Homo sapiens
gtgtggaccgaagag

SEQ ID NO: 949345 - DNA, 15 bp, Homo sapiens
tgtggaccgaagagt

SEQ ID NO: 949346 - DNA, 15 bp, Homo sapiens
gtggaccgaagagtc

SEQ ID NO: 949347 - DNA, 15 bp, Homo sapiens
tggaccgaagagtct

SEQ ID NO: 949348 - DNA, 15 bp, Homo sapiens
ggaccgaagagtctc

SEQ ID NO: 949349 - DNA, 15 bp, Homo sapiens
gaccgaagagtctca

SEQ ID NO: 949350 - DNA, 15 bp, Homo sapiens
accgaagagtctcaa

SEQ ID NO: 949351 - DNA, 15 bp, Homo sapiens
ccgaagagtctcaat

SEQ ID NO: 949352 - DNA, 15 bp, Homo sapiens
cgaagagtctcaatg

SEQ ID NO: 949353 - DNA, 15 bp, Homo sapiens
gaagagtctcaatgc

SEQ ID NO: 949354 - DNA, 15 bp, Homo sapiens
aagagtctcaatgca

SEQ ID NO: 949355 - DNA, 15 bp, Homo sapiens
agagtctcaatgcac

SEQ ID NO: 949356 - DNA, 15 bp, Homo sapiens
gagtctcaatgcacc

SEQ ID NO: 949357 - DNA, 15 bp, Homo sapiens
agtctcaatgcacct

SEQ ID NO: 949358 - DNA, 15 bp, Homo sapiens
gtctcaatgcacctt

SEQ ID NO: 949359 - DNA, 15 bp, Homo sapiens
tctcaatgcaccttg

SEQ ID NO: 949360 - DNA, 15 bp, Homo sapiens
ctcaatgcaccttgc

SEQ ID NO: 949361 - DNA, 15 bp, Homo sapiens
tcaatgcaccttgct

SEQ ID NO: 949362 - DNA, 15 bp, Homo sapiens
caatgcaccttgctg

SEQ ID NO: 949363 - DNA, 15 bp, Homo sapiens
aatgcaccttgctga

SEQ ID NO: 949364 - DNA, 15 bp, Homo sapiens
atgcaccttgctgaa

SEQ ID NO: 949365 - DNA, 15 bp, Homo sapiens
tgcaccttgctgaat

SEQ ID NO: 949366 - DNA, 15 bp, Homo sapiens
gcaccttgctgaatg

SEQ ID NO: 949367 - DNA, 15 bp, Homo sapiens
caccttgctgaatgc

SEQ ID NO: 949368 - DNA, 15 bp, Homo sapiens
accttgctgaatgcg

SEQ ID NO: 949369 - DNA, 15 bp, Homo sapiens
ccttgctgaatgcgt

SEQ ID NO: 949370 - DNA, 15 bp, Homo sapiens
cttgctgaatgcgtc

SEQ ID NO: 949371 - DNA, 15 bp, Homo sapiens
ttgctgaatgcgtcc

SEQ ID NO: 949372 - DNA, 15 bp, Homo sapiens
tgctgaatgcgtcca

SEQ ID NO: 949373 - DNA, 15 bp, Homo sapiens
gctgaatgcgtccat

SEQ ID NO: 949374 - DNA, 15 bp, Homo sapiens
ctgaatgcgtccatc

SEQ ID NO: 949375 - DNA, 15 bp, Homo sapiens
tgaatgcgtccatca

SEQ ID NO: 949376 - DNA, 15 bp, Homo sapiens
gaatgcgtccatcac

SEQ ID NO: 949377 - DNA, 15 bp, Homo sapiens
aatgcgtccatcacg

SEQ ID NO: 949378 - DNA, 15 bp, Homo sapiens
atgcgtccatcacgg

SEQ ID NO: 949379 - DNA, 15 bp, Homo sapiens
tgcgtccatcacgga

SEQ ID NO: 949380 - DNA, 15 bp, Homo sapiens
gcgtccatcacggaa

SEQ ID NO: 949381 - DNA, 15 bp, Homo sapiens
cgtccatcacggaaa

SEQ ID NO: 949382 - DNA, 15 bp, Homo sapiens
gtccatcacggaaac

SEQ ID NO: 949383 - DNA, 15 bp, Homo sapiens
tccatcacggaaaca

SEQ ID NO: 949384 - DNA, 15 bp, Homo sapiens
ccatcacggaaacat

SEQ ID NO: 949385 - DNA, 15 bp, Homo sapiens
catcacggaaacatt

SEQ ID NO: 949386 - DNA, 15 bp, Homo sapiens
atcacggaaacattt

SEQ ID NO: 949387 - DNA, 15 bp, Homo sapiens
tcacggaaacattta

SEQ ID NO: 949388 - DNA, 15 bp, Homo sapiens
cacggaaacatttaa

SEQ ID NO: 949389 - DNA, 15 bp, Homo sapiens
acggaaacatttaat

SEQ ID NO: 949390 - DNA, 15 bp, Homo sapiens
cggaaacatttaatt

SEQ ID NO: 949391 - DNA, 15 bp, Homo sapiens
ggaaacatttaattg

SEQ ID NO: 949392 - DNA, 15 bp, Homo sapiens
gaaacatttaattgc

SEQ ID NO: 949393 - DNA, 15 bp, Homo sapiens
aaacatttaattgct

SEQ ID NO: 949394 - DNA, 15 bp, Homo sapiens
aacatttaattgctc

SEQ ID NO: 949395 - DNA, 15 bp, Homo sapiens
acatttaattgctcc

SEQ ID NO: 949396 - DNA, 15 bp, Homo sapiens
catttaattgctcct

SEQ ID NO: 949397 - DNA, 15 bp, Homo sapiens
atttaattgctcctt

SEQ ID NO: 949398 - DNA, 15 bp, Homo sapiens
tttaattgctccttc

SEQ ID NO: 949399 - DNA, 15 bp, Homo sapiens
ttaattgctccttca

SEQ ID NO: 949400 - DNA, 15 bp, Homo sapiens
taattgctccttcag

SEQ ID NO: 949401 - DNA, 15 bp, Homo sapiens
aattgctccttcagc

SEQ ID NO: 949402 - DNA, 15 bp, Homo sapiens
attgctccttcagct

SEQ ID NO: 949403 - DNA, 15 bp, Homo sapiens
ttgctccttcagctg

SEQ ID NO: 949404 - DNA, 15 bp, Homo sapiens
tgctccttcagctgt

SEQ ID NO: 949405 - DNA, 15 bp, Homo sapiens
gctccttcagctgtg

SEQ ID NO: 949406 - DNA, 15 bp, Homo sapiens
ctccttcagctgtgg

SEQ ID NO: 949407 - DNA, 15 bp, Homo sapiens
tccttcagctgtggt

SEQ ID NO: 949408 - DNA, 15 bp, Homo sapiens
ccttcagctgtggtc

SEQ ID NO: 949409 - DNA, 15 bp, Homo sapiens
cttcagctgtggtcc

SEQ ID NO: 949410 - DNA, 15 bp, Homo sapiens
ttcagctgtggtcca

SEQ ID NO: 949411 - DNA, 15 bp, Homo sapiens
tcagctgtggtccag

SEQ ID NO: 949412 - DNA, 15 bp, Homo sapiens
cagctgtggtccaga

SEQ ID NO: 949413 - DNA, 15 bp, Homo sapiens
agctgtggtccagac

SEQ ID NO: 949414 - DNA, 15 bp, Homo sapiens
gctgtggtccagact

SEQ ID NO: 949415 - DNA, 15 bp, Homo sapiens
ctgtggtccagactg

SEQ ID NO: 949416 - DNA, 15 bp, Homo sapiens
tgtggtccagactgc

SEQ ID NO: 949417 - DNA, 15 bp, Homo sapiens
gtggtccagactgct

SEQ ID NO: 949418 - DNA, 15 bp, Homo sapiens
tggtccagactgctg

SEQ ID NO: 949419 - DNA, 15 bp, Homo sapiens
ggtccagactgctgg

SEQ ID NO: 949420 - DNA, 15 bp, Homo sapiens
gtccagactgctgga

SEQ ID NO: 949421 - DNA, 15 bp, Homo sapiens
tccagactgctggaa

SEQ ID NO: 949422 - DNA, 15 bp, Homo sapiens
ccagactgctggaaa

SEQ ID NO: 949423 - DNA, 15 bp, Homo sapiens
cagactgctggaaac

SEQ ID NO: 949424 - DNA, 15 bp, Homo sapiens
agactgctggaaact

SEQ ID NO: 949425 - DNA, 15 bp, Homo sapiens
gactgctggaaactt

SEQ ID NO: 949426 - DNA, 15 bp, Homo sapiens
actgctggaaacttt

SEQ ID NO: 949427 - DNA, 15 bp, Homo sapiens
ctgctggaaactttc

SEQ ID NO: 949428 - DNA, 15 bp, Homo sapiens
tgctggaaactttct

SEQ ID NO: 949429 - DNA, 15 bp, Homo sapiens
gctggaaactttctc

SEQ ID NO: 949430 - DNA, 15 bp, Homo sapiens
ctggaaactttctca

SEQ ID NO: 949431 - DNA, 15 bp, Homo sapiens
tggaaactttctcag

SEQ ID NO: 949432 - DNA, 15 bp, Homo sapiens
ggaaactttctcagt

SEQ ID NO: 949433 - DNA, 15 bp, Homo sapiens
gaaactttctcagta

SEQ ID NO: 949434 - DNA, 15 bp, Homo sapiens
aaactttctcagtac

SEQ ID NO: 949435 - DNA, 15 bp, Homo sapiens
aactttctcagtacc

SEQ ID NO: 949436 - DNA, 15 bp, Homo sapiens
actttctcagtaccc

SEQ ID NO: 949437 - DNA, 15 bp, Homo sapiens
ctttctcagtacccc

SEQ ID NO: 949438 - DNA, 15 bp, Homo sapiens
tttctcagtacccct

SEQ ID NO: 949439 - DNA, 15 bp, Homo sapiens
ttctcagtacccctg

SEQ ID NO: 949440 - DNA, 15 bp, Homo sapiens
tctcagtacccctgc

SEQ ID NO: 949441 - DNA, 15 bp, Homo sapiens
ctcagtacccctgcc

SEQ ID NO: 949442 - DNA, 15 bp, Homo sapiens
tcagtacccctgcct

SEQ ID NO: 949443 - DNA, 15 bp, Homo sapiens
cagtacccctgcctc

SEQ ID NO: 949444 - DNA, 15 bp, Homo sapiens
agtacccctgcctcc

SEQ ID NO: 949445 - DNA, 15 bp, Homo sapiens
gtacccctgcctcca

SEQ ID NO: 949446 - DNA, 15 bp, Homo sapiens
tacccctgcctccag

SEQ ID NO: 949447 - DNA, 15 bp, Homo sapiens
acccctgcctccagg

SEQ ID NO: 949448 - DNA, 15 bp, Homo sapiens
cccctgcctccaggt

SEQ ID NO: 949449 - DNA, 15 bp, Homo sapiens
ccctgcctccaggtg

SEQ ID NO: 949450 - DNA, 15 bp, Homo sapiens
cctgcctccaggtgt

SEQ ID NO: 949451 - DNA, 15 bp, Homo sapiens
ctgcctccaggtgta

SEQ ID NO: 949452 - DNA, 15 bp, Homo sapiens
tgcctccaggtgtac

SEQ ID NO: 949453 - DNA, 15 bp, Homo sapiens
gcctccaggtgtacg

SEQ ID NO: 949454 - DNA, 15 bp, Homo sapiens
cctccaggtgtacgt

SEQ ID NO: 949455 - DNA, 15 bp, Homo sapiens
ctccaggtgtacgtt

SEQ ID NO: 949456 - DNA, 15 bp, Homo sapiens
tccaggtgtacgtta

SEQ ID NO: 949457 - DNA, 15 bp, Homo sapiens
ccaggtgtacgttaa

SEQ ID NO: 949458 - DNA, 15 bp, Homo sapiens
caggtgtacgttaac

SEQ ID NO: 949459 - DNA, 15 bp, Homo sapiens
aggtgtacgttaacc

SEQ ID NO: 949460 - DNA, 15 bp, Homo sapiens
ggtgtacgttaacct

SEQ ID NO: 949461 - DNA, 15 bp, Homo sapiens
gtgtacgttaacctg

SEQ ID NO: 949462 - DNA, 15 bp, Homo sapiens
tgtacgttaacctga

SEQ ID NO: 949463 - DNA, 15 bp, Homo sapiens
gtacgttaacctgac

SEQ ID NO: 949464 - DNA, 15 bp, Homo sapiens
tacgttaacctgact

SEQ ID NO: 949465 - DNA, 15 bp, Homo sapiens
acgttaacctgactt

SEQ ID NO: 949466 - DNA, 15 bp, Homo sapiens
cgttaacctgacttc

SEQ ID NO: 949467 - DNA, 15 bp, Homo sapiens
gttaacctgacttct

SEQ ID NO: 949468 - DNA, 15 bp, Homo sapiens
ttaacctgacttctt

SEQ ID NO: 949469 - DNA, 15 bp, Homo sapiens
taacctgacttcttc

SEQ ID NO: 949470 - DNA, 15 bp, Homo sapiens
aacctgacttcttcc

SEQ ID NO: 949471 - DNA, 15 bp, Homo sapiens
acctgacttcttccg

SEQ ID NO: 949472 - DNA, 15 bp, Homo sapiens
cctgacttcttccgg

SEQ ID NO: 949473 - DNA, 15 bp, Homo sapiens
ctgacttcttccggg

SEQ ID NO: 949474 - DNA, 15 bp, Homo sapiens
tgacttcttccgggg

SEQ ID NO: 949475 - DNA, 15 bp, Homo sapiens
gacttcttccgggga

SEQ ID NO: 949476 - DNA, 15 bp, Homo sapiens
acttcttccggggaa

SEQ ID NO: 949477 - DNA, 15 bp, Homo sapiens
cttcttccggggaaa

SEQ ID NO: 949478 - DNA, 15 bp, Homo sapiens
ttcttccggggaaaa

SEQ ID NO: 949479 - DNA, 15 bp, Homo sapiens
tcttccggggaaaag

SEQ ID NO: 949480 - DNA, 15 bp, Homo sapiens
cttccggggaaaagc

SEQ ID NO: 949481 - DNA, 15 bp, Homo sapiens
ttccggggaaaagct

SEQ ID NO: 949482 - DNA, 15 bp, Homo sapiens
tccggggaaaagctc

SEQ ID NO: 949483 - DNA, 15 bp, Homo sapiens
ccggggaaaagctcc

SEQ ID NO: 949484 - DNA, 15 bp, Homo sapiens
cggggaaaagctcct

SEQ ID NO: 949485 - DNA, 15 bp, Homo sapiens
ggggaaaagctcctc

SEQ ID NO: 949486 - DNA, 15 bp, Homo sapiens
gggaaaagctcctcc

SEQ ID NO: 949487 - DNA, 15 bp, Homo sapiens
ggaaaagctcctcct

SEQ ID NO: 949488 - DNA, 15 bp, Homo sapiens
gaaaagctcctcctc

SEQ ID NO: 949489 - DNA, 15 bp, Homo sapiens
aaaagctcctcctct

SEQ ID NO: 949490 - DNA, 15 bp, Homo sapiens
aaagctcctcctcta

SEQ ID NO: 949491 - DNA, 15 bp, Homo sapiens
aagctcctcctctac

SEQ ID NO: 949492 - DNA, 15 bp, Homo sapiens
agctcctcctctacc

SEQ ID NO: 949493 - DNA, 15 bp, Homo sapiens
gctcctcctctacca

SEQ ID NO: 949494 - DNA, 15 bp, Homo sapiens
ctcctcctctaccac

SEQ ID NO: 949495 - DNA, 15 bp, Homo sapiens
tcctcctctaccaca

SEQ ID NO: 949496 - DNA, 15 bp, Homo sapiens
cctcctctaccacac

SEQ ID NO: 949497 - DNA, 15 bp, Homo sapiens
ctcctctaccacaca

SEQ ID NO: 949498 - DNA, 15 bp, Homo sapiens
tcctctaccacacag

SEQ ID NO: 949499 - DNA, 15 bp, Homo sapiens
cctctaccacacaga

SEQ ID NO: 949500 - DNA, 15 bp, Homo sapiens
ctctaccacacagaa

SEQ ID NO: 949501 - DNA, 15 bp, Homo sapiens
tctaccacacagaag

SEQ ID NO: 949502 - DNA, 15 bp, Homo sapiens
ctaccacacagaaga

SEQ ID NO: 949503 - DNA, 15 bp, Homo sapiens
taccacacagaagag

SEQ ID NO: 949504 - DNA, 15 bp, Homo sapiens
accacacagaagaga

SEQ ID NO: 949505 - DNA, 15 bp, Homo sapiens
ccacacagaagagac

SEQ ID NO: 949506 - DNA, 15 bp, Homo sapiens
cacacagaagagaca

SEQ ID NO: 949507 - DNA, 15 bp, Homo sapiens
acacagaagagacaa

SEQ ID NO: 949508 - DNA, 15 bp, Homo sapiens
cacagaagagacaat

SEQ ID NO: 949509 - DNA, 15 bp, Homo sapiens
acagaagagacaata

SEQ ID NO: 949510 - DNA, 15 bp, Homo sapiens
cagaagagacaataa

SEQ ID NO: 949511 - DNA, 15 bp, Homo sapiens
agaagagacaataaa

SEQ ID NO: 949512 - DNA, 15 bp, Homo sapiens
gaagagacaataaaa

SEQ ID NO: 949513 - DNA, 15 bp, Homo sapiens
aagagacaataaaaa

SEQ ID NO: 949514 - DNA, 15 bp, Homo sapiens
agagacaataaaaat

SEQ ID NO: 949515 - DNA, 15 bp, Homo sapiens
gagacaataaaaatc

SEQ ID NO: 949516 - DNA, 15 bp, Homo sapiens
agacaataaaaatca

SEQ ID NO: 949517 - DNA, 15 bp, Homo sapiens
gacaataaaaatcaa

SEQ ID NO: 949518 - DNA, 15 bp, Homo sapiens
acaataaaaatcaat

SEQ ID NO: 949519 - DNA, 15 bp, Homo sapiens
caataaaaatcaatc

SEQ ID NO: 949520 - DNA, 15 bp, Homo sapiens
aataaaaatcaatca

SEQ ID NO: 949521 - DNA, 15 bp, Homo sapiens
ataaaaatcaatcag

SEQ ID NO: 949522 - DNA, 15 bp, Homo sapiens
taaaaatcaatcaga

SEQ ID NO: 949523 - DNA, 15 bp, Homo sapiens
aaaaatcaatcagaa

SEQ ID NO: 949524 - DNA, 15 bp, Homo sapiens
aaaatcaatcagaag

SEQ ID NO: 949525 - DNA, 15 bp, Homo sapiens
aaatcaatcagaagg

SEQ ID NO: 949526 - DNA, 15 bp, Homo sapiens
aatcaatcagaaggt

SEQ ID NO: 949527 - DNA, 15 bp, Homo sapiens
atcaatcagaaggta

SEQ ID NO: 949528 - DNA, 15 bp, Homo sapiens
tcaatcagaaggtag

SEQ ID NO: 949529 - DNA, 15 bp, Homo sapiens
caatcagaaggtagg

SEQ ID NO: 949530 - DNA, 15 bp, Homo sapiens
aatcagaaggtagga

SEQ ID NO: 949531 - DNA, 15 bp, Homo sapiens
atcagaaggtaggaa

SEQ ID NO: 949532 - DNA, 15 bp, Homo sapiens
tcagaaggtaggaac

SEQ ID NO: 949533 - DNA, 15 bp, Homo sapiens
cagaaggtaggaact

SEQ ID NO: 949534 - DNA, 15 bp, Homo sapiens
agaaggtaggaactt

SEQ ID NO: 949535 - DNA, 15 bp, Homo sapiens
gaaggtaggaacttg

SEQ ID NO: 949536 - DNA, 15 bp, Homo sapiens
aaggtaggaacttgg

SEQ ID NO: 949537 - DNA, 15 bp, Homo sapiens
aggtaggaacttggc

SEQ ID NO: 949538 - DNA, 15 bp, Homo sapiens
ggtaggaacttggcg

SEQ ID NO: 949539 - DNA, 15 bp, Homo sapiens
gtaggaacttggcgt

SEQ ID NO: 949540 - DNA, 15 bp, Homo sapiens
taggaacttggcgta

SEQ ID NO: 949541 - DNA, 15 bp, Homo sapiens
aggaacttggcgtac

SEQ ID NO: 949542 - DNA, 15 bp, Homo sapiens
ggaacttggcgtact

SEQ ID NO: 949543 - DNA, 15 bp, Homo sapiens
gaacttggcgtactg

SEQ ID NO: 949544 - DNA, 15 bp, Homo sapiens
aacttggcgtactgc

SEQ ID NO: 949545 - DNA, 15 bp, Homo sapiens
acttggcgtactgca

SEQ ID NO: 949546 - DNA, 15 bp, Homo sapiens
cttggcgtactgcat

SEQ ID NO: 949547 - DNA, 15 bp, Homo sapiens
ttggcgtactgcatt

SEQ ID NO: 949548 - DNA, 15 bp, Homo sapiens
tggcgtactgcattt

SEQ ID NO: 949549 - DNA, 15 bp, Homo sapiens
ggcgtactgcatttc

SEQ ID NO: 949550 - DNA, 15 bp, Homo sapiens
gcgtactgcatttca

SEQ ID NO: 949551 - DNA, 15 bp, Homo sapiens
cgtactgcatttcag

SEQ ID NO: 949552 - DNA, 15 bp, Homo sapiens
gtactgcatttcagt

SEQ ID NO: 949553 - DNA, 15 bp, Homo sapiens
tactgcatttcagtt

SEQ ID NO: 949554 - DNA, 15 bp, Homo sapiens
actgcatttcagtta

SEQ ID NO: 949555 - DNA, 15 bp, Homo sapiens
ctgcatttcagttac

SEQ ID NO: 949556 - DNA, 15 bp, Homo sapiens
tgcatttcagttacc

SEQ ID NO: 949557 - DNA, 15 bp, Homo sapiens
gcatttcagttaccc

SEQ ID NO: 949558 - DNA, 15 bp, Homo sapiens
catttcagttacccc

SEQ ID NO: 949559 - DNA, 15 bp, Homo sapiens
atttcagttacccca

SEQ ID NO: 949560 - DNA, 15 bp, Homo sapiens
tttcagttaccccac

SEQ ID NO: 949561 - DNA, 15 bp, Homo sapiens
ttcagttaccccaca

SEQ ID NO: 949562 - DNA, 15 bp, Homo sapiens
tcagttaccccacag

SEQ ID NO: 949563 - DNA, 15 bp, Homo sapiens
cagttaccccacaga

SEQ ID NO: 949564 - DNA, 15 bp, Homo sapiens
agttaccccacagag

SEQ ID NO: 949565 - DNA, 15 bp, Homo sapiens
gttaccccacagagc

SEQ ID NO: 949566 - DNA, 15 bp, Homo sapiens
ttaccccacagagct

SEQ ID NO: 949567 - DNA, 15 bp, Homo sapiens
taccccacagagctt

SEQ ID NO: 949568 - DNA, 15 bp, Homo sapiens
accccacagagcttc

SEQ ID NO: 949569 - DNA, 15 bp, Homo sapiens
ccccacagagcttca

SEQ ID NO: 949570 - DNA, 15 bp, Homo sapiens
cccacagagcttcac

SEQ ID NO: 949571 - DNA, 15 bp, Homo sapiens
ccacagagcttcaca

SEQ ID NO: 949572 - DNA, 15 bp, Homo sapiens
cacagagcttcacac

SEQ ID NO: 949573 - DNA, 15 bp, Homo sapiens
acagagcttcacacc

SEQ ID NO: 949574 - DNA, 15 bp, Homo sapiens
cagagcttcacacca

SEQ ID NO: 949575 - DNA, 15 bp, Homo sapiens
agagcttcacaccag

SEQ ID NO: 949576 - DNA, 15 bp, Homo sapiens
gagcttcacaccagg

SEQ ID NO: 949577 - DNA, 15 bp, Homo sapiens
agcttcacaccaggc

SEQ ID NO: 949578 - DNA, 15 bp, Homo sapiens
gcttcacaccaggct

SEQ ID NO: 949579 - DNA, 15 bp, Homo sapiens
cttcacaccaggctc

SEQ ID NO: 949580 - DNA, 15 bp, Homo sapiens
ttcacaccaggctct

SEQ ID NO: 949581 - DNA, 15 bp, Homo sapiens
tcacaccaggctctc

SEQ ID NO: 949582 - DNA, 15 bp, Homo sapiens
cacaccaggctctct

SEQ ID NO: 949583 - DNA, 15 bp, Homo sapiens
acaccaggctctctg

SEQ ID NO: 949584 - DNA, 15 bp, Homo sapiens
caccaggctctctgc

SEQ ID NO: 949585 - DNA, 15 bp, Homo sapiens
accaggctctctgcc

SEQ ID NO: 949586 - DNA, 15 bp, Homo sapiens
ccaggctctctgcct

SEQ ID NO: 949587 - DNA, 15 bp, Homo sapiens
caggctctctgcctc

SEQ ID NO: 949588 - DNA, 15 bp, Homo sapiens
aggctctctgcctct

SEQ ID NO: 949589 - DNA, 15 bp, Homo sapiens
ggctctctgcctctg

SEQ ID NO: 949590 - DNA, 15 bp, Homo sapiens
gctctctgcctctga

SEQ ID NO: 949591 - DNA, 15 bp, Homo sapiens
ctctctgcctctgaa

SEQ ID NO: 949592 - DNA, 15 bp, Homo sapiens
tctctgcctctgaag

SEQ ID NO: 949593 - DNA, 15 bp, Homo sapiens
ctctgcctctgaagt

SEQ ID NO: 949594 - DNA, 15 bp, Homo sapiens
tctgcctctgaagtt

SEQ ID NO: 949595 - DNA, 15 bp, Homo sapiens
ctgcctctgaagttc

SEQ ID NO: 949596 - DNA, 15 bp, Homo sapiens
tgcctctgaagttcc

SEQ ID NO: 949597 - DNA, 15 bp, Homo sapiens
gcctctgaagttccc

SEQ ID NO: 949598 - DNA, 15 bp, Homo sapiens
cctctgaagttcccc

SEQ ID NO: 949599 - DNA, 15 bp, Homo sapiens
ctctgaagttcccct

SEQ ID NO: 949600 - DNA, 15 bp, Homo sapiens
tctgaagttcccctt

SEQ ID NO: 949601 - DNA, 15 bp, Homo sapiens
ctgaagttccccttt

SEQ ID NO: 949602 - DNA, 15 bp, Homo sapiens
tgaagttcccctttg

SEQ ID NO: 949603 - DNA, 15 bp, Homo sapiens
gaagttcccctttgc

SEQ ID NO: 949604 - DNA, 15 bp, Homo sapiens
aagttcccctttgcc

SEQ ID NO: 949605 - DNA, 15 bp, Homo sapiens
agttcccctttgcca

SEQ ID NO: 949606 - DNA, 15 bp, Homo sapiens
gttcccctttgccag

SEQ ID NO: 949607 - DNA, 15 bp, Homo sapiens
ttcccctttgccagc

SEQ ID NO: 949608 - DNA, 15 bp, Homo sapiens
tcccctttgccagca

SEQ ID NO: 949609 - DNA, 15 bp, Homo sapiens
cccctttgccagcat

SEQ ID NO: 949610 - DNA, 15 bp, Homo sapiens
ccctttgccagcatt

SEQ ID NO: 949611 - DNA, 15 bp, Homo sapiens
cctttgccagcattt

SEQ ID NO: 949612 - DNA, 15 bp, Homo sapiens
ctttgccagcatttc

SEQ ID NO: 949613 - DNA, 15 bp, Homo sapiens
tttgccagcatttca

SEQ ID NO: 949614 - DNA, 15 bp, Homo sapiens
ttgccagcatttcaa

SEQ ID NO: 949615 - DNA, 15 bp, Homo sapiens
tgccagcatttcaaa

SEQ ID NO: 949616 - DNA, 15 bp, Homo sapiens
gccagcatttcaaag

SEQ ID NO: 949617 - DNA, 15 bp, Homo sapiens
ccagcatttcaaagg

SEQ ID NO: 949618 - DNA, 15 bp, Homo sapiens
cagcatttcaaagga

SEQ ID NO: 949619 - DNA, 15 bp, Homo sapiens
agcatttcaaaggaa

SEQ ID NO: 949620 - DNA, 15 bp, Homo sapiens
gcatttcaaaggaaa

SEQ ID NO: 949621 - DNA, 15 bp, Homo sapiens
catttcaaaggaaaa

SEQ ID NO: 949622 - DNA, 15 bp, Homo sapiens
atttcaaaggaaaat

SEQ ID NO: 949623 - DNA, 15 bp, Homo sapiens
tttcaaaggaaaata

SEQ ID NO: 949624 - DNA, 15 bp, Homo sapiens
ttcaaaggaaaatac

SEQ ID NO: 949625 - DNA, 15 bp, Homo sapiens
tcaaaggaaaatact

SEQ ID NO: 949626 - DNA, 15 bp, Homo sapiens
caaaggaaaatactt

SEQ ID NO: 949627 - DNA, 15 bp, Homo sapiens
aaaggaaaatacttc

SEQ ID NO: 949628 - DNA, 15 bp, Homo sapiens
aaggaaaatacttcc

SEQ ID NO: 949629 - DNA, 15 bp, Homo sapiens
aggaaaatacttcca

SEQ ID NO: 949630 - DNA, 15 bp, Homo sapiens
ggaaaatacttccag

SEQ ID NO: 949631 - DNA, 15 bp, Homo sapiens
gaaaatacttccagg

SEQ ID NO: 949632 - DNA, 15 bp, Homo sapiens
aaaatacttccagga

SEQ ID NO: 949633 - DNA, 15 bp, Homo sapiens
aaatacttccaggaa

SEQ ID NO: 949634 - DNA, 15 bp, Homo sapiens
aatacttccaggaag

SEQ ID NO: 949635 - DNA, 15 bp, Homo sapiens
atacttccaggaagc

SEQ ID NO: 949636 - DNA, 15 bp, Homo sapiens
tacttccaggaagca

SEQ ID NO: 949637 - DNA, 15 bp, Homo sapiens
acttccaggaagcag

SEQ ID NO: 949638 - DNA, 15 bp, Homo sapiens
cttccaggaagcaga

SEQ ID NO: 949639 - DNA, 15 bp, Homo sapiens
ttccaggaagcagag

SEQ ID NO: 949640 - DNA, 15 bp, Homo sapiens
tccaggaagcagagc

SEQ ID NO: 949641 - DNA, 15 bp, Homo sapiens
ccaggaagcagagcc

SEQ ID NO: 949642 - DNA, 15 bp, Homo sapiens
caggaagcagagcct

SEQ ID NO: 949643 - DNA, 15 bp, Homo sapiens
aggaagcagagcctg

SEQ ID NO: 949644 - DNA, 15 bp, Homo sapiens
ggaagcagagcctgc

SEQ ID NO: 949645 - DNA, 15 bp, Homo sapiens
gaagcagagcctgcc

SEQ ID NO: 949646 - DNA, 15 bp, Homo sapiens
aagcagagcctgcct

SEQ ID NO: 949647 - DNA, 15 bp, Homo sapiens
agcagagcctgcctc

SEQ ID NO: 949648 - DNA, 15 bp, Homo sapiens
gcagagcctgcctct

SEQ ID NO: 949649 - DNA, 15 bp, Homo sapiens
cagagcctgcctctt

SEQ ID NO: 949650 - DNA, 15 bp, Homo sapiens
agagcctgcctcttc

SEQ ID NO: 949651 - DNA, 15 bp, Homo sapiens
gagcctgcctcttcc

SEQ ID NO: 949652 - DNA, 15 bp, Homo sapiens
agcctgcctcttcca

SEQ ID NO: 949653 - DNA, 15 bp, Homo sapiens
gcctgcctcttccat

SEQ ID NO: 949654 - DNA, 15 bp, Homo sapiens
cctgcctcttccatt

SEQ ID NO: 949655 - DNA, 15 bp, Homo sapiens
ctgcctcttccattc

SEQ ID NO: 949656 - DNA, 15 bp, Homo sapiens
tgcctcttccattca

SEQ ID NO: 949657 - DNA, 15 bp, Homo sapiens
gcctcttccattcag

SEQ ID NO: 949658 - DNA, 15 bp, Homo sapiens
cctcttccattcaga

SEQ ID NO: 949659 - DNA, 15 bp, Homo sapiens
ctcttccattcagag

SEQ ID NO: 949660 - DNA, 15 bp, Homo sapiens
tcttccattcagaga

SEQ ID NO: 949661 - DNA, 15 bp, Homo sapiens
cttccattcagagaa

SEQ ID NO: 949662 - DNA, 15 bp, Homo sapiens
ttccattcagagaac

SEQ ID NO: 949663 - DNA, 15 bp, Homo sapiens
tccattcagagaact

SEQ ID NO: 949664 - DNA, 15 bp, Homo sapiens
ccattcagagaactt

SEQ ID NO: 949665 - DNA, 15 bp, Homo sapiens
cattcagagaacttg

SEQ ID NO: 949666 - DNA, 15 bp, Homo sapiens
attcagagaacttgc

SEQ ID NO: 949667 - DNA, 15 bp, Homo sapiens
ttcagagaacttgct

SEQ ID NO: 949668 - DNA, 15 bp, Homo sapiens
tcagagaacttgcta

SEQ ID NO: 949669 - DNA, 15 bp, Homo sapiens
cagagaacttgctat

SEQ ID NO: 949670 - DNA, 15 bp, Homo sapiens
agagaacttgctatg

SEQ ID NO: 949671 - DNA, 15 bp, Homo sapiens
gagaacttgctatgt

SEQ ID NO: 949672 - DNA, 15 bp, Homo sapiens
agaacttgctatgtg

SEQ ID NO: 949673 - DNA, 15 bp, Homo sapiens
gaacttgctatgtga

SEQ ID NO: 949674 - DNA, 15 bp, Homo sapiens
aacttgctatgtgac

SEQ ID NO: 949675 - DNA, 15 bp, Homo sapiens
acttgctatgtgact

SEQ ID NO: 949676 - DNA, 15 bp, Homo sapiens
cttgctatgtgactc

SEQ ID NO: 949677 - DNA, 15 bp, Homo sapiens
ttgctatgtgactct

SEQ ID NO: 949678 - DNA, 15 bp, Homo sapiens
tgctatgtgactctt

SEQ ID NO: 949679 - DNA, 15 bp, Homo sapiens
gctatgtgactcttg

SEQ ID NO: 949680 - DNA, 15 bp, Homo sapiens
ctatgtgactcttgc

SEQ ID NO: 949681 - DNA, 15 bp, Homo sapiens
tatgtgactcttgcc

SEQ ID NO: 949682 - DNA, 15 bp, Homo sapiens
atgtgactcttgcct

SEQ ID NO: 949683 - DNA, 15 bp, Homo sapiens
tgtgactcttgccta

SEQ ID NO: 949684 - DNA, 15 bp, Homo sapiens
gtgactcttgcctag

SEQ ID NO: 949685 - DNA, 15 bp, Homo sapiens
tgactcttgcctaga

SEQ ID NO: 949686 - DNA, 15 bp, Homo sapiens
gactcttgcctagaa

SEQ ID NO: 949687 - DNA, 15 bp, Homo sapiens
actcttgcctagaaa

SEQ ID NO: 949688 - DNA, 15 bp, Homo sapiens
ctcttgcctagaaaa

SEQ ID NO: 949689 - DNA, 15 bp, Homo sapiens
tcttgcctagaaaat

SEQ ID NO: 949690 - DNA, 15 bp, Homo sapiens
cttgcctagaaaata

SEQ ID NO: 949691 - DNA, 15 bp, Homo sapiens
ttgcctagaaaatat

SEQ ID NO: 949692 - DNA, 15 bp, Homo sapiens
tgcctagaaaatatt

SEQ ID NO: 949693 - DNA, 15 bp, Homo sapiens
gcctagaaaatattt

SEQ ID NO: 949694 - DNA, 15 bp, Homo sapiens
cctagaaaatattta

SEQ ID NO: 949695 - DNA, 15 bp, Homo sapiens
ctagaaaatatttat

SEQ ID NO: 949696 - DNA, 15 bp, Homo sapiens
tagaaaatatttatt

SEQ ID NO: 949697 - DNA, 15 bp, Homo sapiens
agaaaatatttattt

SEQ ID NO: 949698 - DNA, 15 bp, Homo sapiens
gaaaatatttatttt

SEQ ID NO: 949699 - DNA, 15 bp, Homo sapiens
aaaatatttattttc

SEQ ID NO: 949700 - DNA, 15 bp, Homo sapiens
aaatatttattttct

SEQ ID NO: 949701 - DNA, 15 bp, Homo sapiens
aatatttattttctg

SEQ ID NO: 949702 - DNA, 15 bp, Homo sapiens
atatttattttctgt

SEQ ID NO: 949703 - DNA, 15 bp, Homo sapiens
tatttattttctgtg

SEQ ID NO: 949704 - DNA, 15 bp, Homo sapiens
atttattttctgtgc

SEQ ID NO: 949705 - DNA, 15 bp, Homo sapiens
tttattttctgtgca

SEQ ID NO: 949706 - DNA, 15 bp, Homo sapiens
ttattttctgtgcaa

SEQ ID NO: 949707 - DNA, 15 bp, Homo sapiens
tattttctgtgcaag

SEQ ID NO: 949708 - DNA, 15 bp, Homo sapiens
attttctgtgcaagt

SEQ ID NO: 949709 - DNA, 15 bp, Homo sapiens
ttttctgtgcaagtt

SEQ ID NO: 949710 - DNA, 15 bp, Homo sapiens
tttctgtgcaagttg

SEQ ID NO: 949711 - DNA, 15 bp, Homo sapiens
ttctgtgcaagttgt

SEQ ID NO: 949712 - DNA, 15 bp, Homo sapiens
tctgtgcaagttgtg

SEQ ID NO: 949713 - DNA, 15 bp, Homo sapiens
ctgtgcaagttgtgg

SEQ ID NO: 949714 - DNA, 15 bp, Homo sapiens
tgtgcaagttgtgga

SEQ ID NO: 949715 - DNA, 15 bp, Homo sapiens
gtgcaagttgtggac

SEQ ID NO: 949716 - DNA, 15 bp, Homo sapiens
tgcaagttgtggaca

SEQ ID NO: 949717 - DNA, 15 bp, Homo sapiens
gcaagttgtggacaa

SEQ ID NO: 949718 - DNA, 15 bp, Homo sapiens
caagttgtggacaaa

SEQ ID NO: 949719 - DNA, 15 bp, Homo sapiens
aagttgtggacaaat

SEQ ID NO: 949720 - DNA, 15 bp, Homo sapiens
agttgtggacaaatc

SEQ ID NO: 949721 - DNA, 15 bp, Homo sapiens
gttgtggacaaatca

SEQ ID NO: 949722 - DNA, 15 bp, Homo sapiens
ttgtggacaaatcat

SEQ ID NO: 949723 - DNA, 15 bp, Homo sapiens
tgtggacaaatcatt

SEQ ID NO: 949724 - DNA, 15 bp, Homo sapiens
gtggacaaatcattc

SEQ ID NO: 949725 - DNA, 15 bp, Homo sapiens
tggacaaatcattcc

SEQ ID NO: 949726 - DNA, 15 bp, Homo sapiens
ggacaaatcattcct

SEQ ID NO: 949727 - DNA, 15 bp, Homo sapiens
gacaaatcattccta

SEQ ID NO: 949728 - DNA, 15 bp, Homo sapiens
acaaatcattcctac

SEQ ID NO: 949729 - DNA, 15 bp, Homo sapiens
caaatcattcctaca

SEQ ID NO: 949730 - DNA, 15 bp, Homo sapiens
aaatcattcctacat

SEQ ID NO: 949731 - DNA, 15 bp, Homo sapiens
aatcattcctacatt

SEQ ID NO: 949732 - DNA, 15 bp, Homo sapiens
atcattcctacattt

SEQ ID NO: 949733 - DNA, 15 bp, Homo sapiens
tcattcctacatttg

SEQ ID NO: 949734 - DNA, 15 bp, Homo sapiens
cattcctacatttgt

SEQ ID NO: 949735 - DNA, 15 bp, Homo sapiens
attcctacatttgtg

SEQ ID NO: 949736 - DNA, 15 bp, Homo sapiens
ttcctacatttgtgg

SEQ ID NO: 949737 - DNA, 15 bp, Homo sapiens
tcctacatttgtggt

SEQ ID NO: 949738 - DNA, 15 bp, Homo sapiens
cctacatttgtggta

SEQ ID NO: 949739 - DNA, 15 bp, Homo sapiens
ctacatttgtggtag

SEQ ID NO: 949740 - DNA, 15 bp, Homo sapiens
tacatttgtggtagt

SEQ ID NO: 949741 - DNA, 15 bp, Homo sapiens
acatttgtggtagtg

SEQ ID NO: 949742 - DNA, 15 bp, Homo sapiens
catttgtggtagtgc

SEQ ID NO: 949743 - DNA, 15 bp, Homo sapiens
atttgtggtagtgca

SEQ ID NO: 949744 - DNA, 15 bp, Homo sapiens
tttgtggtagtgcag

SEQ ID NO: 949745 - DNA, 15 bp, Homo sapiens
ttgtggtagtgcaga

SEQ ID NO: 949746 - DNA, 15 bp, Homo sapiens
tgtggtagtgcagat

SEQ ID NO: 949747 - DNA, 15 bp, Homo sapiens
gtggtagtgcagatt

SEQ ID NO: 949748 - DNA, 15 bp, Homo sapiens
tggtagtgcagattt

SEQ ID NO: 949749 - DNA, 15 bp, Homo sapiens
ggtagtgcagattta

SEQ ID NO: 949750 - DNA, 15 bp, Homo sapiens
gtagtgcagatttag

SEQ ID NO: 949751 - DNA, 15 bp, Homo sapiens
tagtgcagatttagc

SEQ ID NO: 949752 - DNA, 15 bp, Homo sapiens
agtgcagatttagct

SEQ ID NO: 949753 - DNA, 15 bp, Homo sapiens
gtgcagatttagctt

SEQ ID NO: 949754 - DNA, 15 bp, Homo sapiens
tgcagatttagcttt

SEQ ID NO: 949755 - DNA, 15 bp, Homo sapiens
gcagatttagctttc

SEQ ID NO: 949756 - DNA, 15 bp, Homo sapiens
cagatttagctttca

SEQ ID NO: 949757 - DNA, 15 bp, Homo sapiens
agatttagctttcac

SEQ ID NO: 949758 - DNA, 15 bp, Homo sapiens
gatttagctttcact

SEQ ID NO: 949759 - DNA, 15 bp, Homo sapiens
atttagctttcactt

SEQ ID NO: 949760 - DNA, 15 bp, Homo sapiens
tttagctttcacttc

SEQ ID NO: 949761 - DNA, 15 bp, Homo sapiens
ttagctttcacttcc

SEQ ID NO: 949762 - DNA, 15 bp, Homo sapiens
tagctttcacttcca

SEQ ID NO: 949763 - DNA, 15 bp, Homo sapiens
agctttcacttccat

SEQ ID NO: 949764 - DNA, 15 bp, Homo sapiens
gctttcacttccatt

SEQ ID NO: 949765 - DNA, 15 bp, Homo sapiens
ctttcacttccattt

SEQ ID NO: 949766 - DNA, 15 bp, Homo sapiens
tttcacttccatttg

SEQ ID NO: 949767 - DNA, 15 bp, Homo sapiens
ttcacttccatttga

SEQ ID NO: 949768 - DNA, 15 bp, Homo sapiens
tcacttccatttgaa

SEQ ID NO: 949769 - DNA, 15 bp, Homo sapiens
cacttccatttgaaa

SEQ ID NO: 949770 - DNA, 15 bp, Homo sapiens
acttccatttgaaag

SEQ ID NO: 949771 - DNA, 15 bp, Homo sapiens
cttccatttgaaagg

SEQ ID NO: 949772 - DNA, 15 bp, Homo sapiens
ttccatttgaaaggg

SEQ ID NO: 949773 - DNA, 15 bp, Homo sapiens
tccatttgaaagggt

SEQ ID NO: 949774 - DNA, 15 bp, Homo sapiens
ccatttgaaagggta

SEQ ID NO: 949775 - DNA, 15 bp, Homo sapiens
catttgaaagggtaa

SEQ ID NO: 949776 - DNA, 15 bp, Homo sapiens
atttgaaagggtaaa

SEQ ID NO: 949777 - DNA, 15 bp, Homo sapiens
tttgaaagggtaaat

SEQ ID NO: 949778 - DNA, 15 bp, Homo sapiens
ttgaaagggtaaata

SEQ ID NO: 949779 - DNA, 15 bp, Homo sapiens
tgaaagggtaaatat

SEQ ID NO: 949780 - DNA, 15 bp, Homo sapiens
gaaagggtaaatatt

SEQ ID NO: 949781 - DNA, 15 bp, Homo sapiens
aaagggtaaatatta

SEQ ID NO: 949782 - DNA, 15 bp, Homo sapiens
aagggtaaatattaa

SEQ ID NO: 949783 - DNA, 15 bp, Homo sapiens
agggtaaatattaat

SEQ ID NO: 949784 - DNA, 15 bp, Homo sapiens
gggtaaatattaata

SEQ ID NO: 949785 - DNA, 15 bp, Homo sapiens
ggtaaatattaatat

SEQ ID NO: 949786 - DNA, 15 bp, Homo sapiens
gtaaatattaatata

SEQ ID NO: 949787 - DNA, 15 bp, Homo sapiens
taaatattaatatat

SEQ ID NO: 949788 - DNA, 15 bp, Homo sapiens
aaatattaatatatc

SEQ ID NO: 949789 - DNA, 15 bp, Homo sapiens
aatattaatatatct

SEQ ID NO: 949790 - DNA, 15 bp, Homo sapiens
atattaatatatctt

SEQ ID NO: 949791 - DNA, 15 bp, Homo sapiens
tattaatatatcttt

SEQ ID NO: 949792 - DNA, 15 bp, Homo sapiens
attaatatatcttta

SEQ ID NO: 949793 - DNA, 15 bp, Homo sapiens
ttaatatatctttac

SEQ ID NO: 949794 - DNA, 15 bp, Homo sapiens
taatatatctttaca

SEQ ID NO: 949795 - DNA, 15 bp, Homo sapiens
aatatatctttacac

SEQ ID NO: 949796 - DNA, 15 bp, Homo sapiens
atatatctttacaca

SEQ ID NO: 949797 - DNA, 15 bp, Homo sapiens
tatatctttacacaa

SEQ ID NO: 949798 - DNA, 15 bp, Homo sapiens
atatctttacacaaa

SEQ ID NO: 949799 - DNA, 15 bp, Homo sapiens
tatctttacacaaat

SEQ ID NO: 949800 - DNA, 15 bp, Homo sapiens
atctttacacaaata

SEQ ID NO: 949801 - DNA, 15 bp, Homo sapiens
tctttacacaaatag

SEQ ID NO: 949802 - DNA, 15 bp, Homo sapiens
ctttacacaaataga

SEQ ID NO: 949803 - DNA, 15 bp, Homo sapiens
tttacacaaatagac

SEQ ID NO: 949804 - DNA, 15 bp, Homo sapiens
ttacacaaatagact

SEQ ID NO: 949805 - DNA, 15 bp, Homo sapiens
tacacaaatagactg

SEQ ID NO: 949806 - DNA, 15 bp, Homo sapiens
acacaaatagactga

SEQ ID NO: 949807 - DNA, 15 bp, Homo sapiens
cacaaatagactgag

SEQ ID NO: 949808 - DNA, 15 bp, Homo sapiens
acaaatagactgagt

SEQ ID NO: 949809 - DNA, 15 bp, Homo sapiens
caaatagactgagtc

SEQ ID NO: 949810 - DNA, 15 bp, Homo sapiens
aaatagactgagtct

SEQ ID NO: 949811 - DNA, 15 bp, Homo sapiens
aatagactgagtctt

SEQ ID NO: 949812 - DNA, 15 bp, Homo sapiens
atagactgagtcttt

SEQ ID NO: 949813 - DNA, 15 bp, Homo sapiens
tagactgagtctttc

SEQ ID NO: 949814 - DNA, 15 bp, Homo sapiens
agactgagtctttca

SEQ ID NO: 949815 - DNA, 15 bp, Homo sapiens
gactgagtctttcaa

SEQ ID NO: 949816 - DNA, 15 bp, Homo sapiens
actgagtctttcaaa

SEQ ID NO: 949817 - DNA, 15 bp, Homo sapiens
ctgagtctttcaaag

SEQ ID NO: 949818 - DNA, 15 bp, Homo sapiens
tgagtctttcaaagc

SEQ ID NO: 949819 - DNA, 15 bp, Homo sapiens
gagtctttcaaagca

SEQ ID NO: 949820 - DNA, 15 bp, Homo sapiens
agtctttcaaagcaa

SEQ ID NO: 949821 - DNA, 15 bp, Homo sapiens
gtctttcaaagcaag

SEQ ID NO: 949822 - DNA, 15 bp, Homo sapiens
tctttcaaagcaagt

SEQ ID NO: 949823 - DNA, 15 bp, Homo sapiens
ctttcaaagcaagta

SEQ ID NO: 949824 - DNA, 15 bp, Homo sapiens
tttcaaagcaagtat

SEQ ID NO: 949825 - DNA, 15 bp, Homo sapiens
ttcaaagcaagtatg

SEQ ID NO: 949826 - DNA, 15 bp, Homo sapiens
tcaaagcaagtatgc

SEQ ID NO: 949827 - DNA, 15 bp, Homo sapiens
caaagcaagtatgca

SEQ ID NO: 949828 - DNA, 15 bp, Homo sapiens
aaagcaagtatgcaa

SEQ ID NO: 949829 - DNA, 15 bp, Homo sapiens
aagcaagtatgcaac

SEQ ID NO: 949830 - DNA, 15 bp, Homo sapiens
agcaagtatgcaact

SEQ ID NO: 949831 - DNA, 15 bp, Homo sapiens
gcaagtatgcaactt

SEQ ID NO: 949832 - DNA, 15 bp, Homo sapiens
caagtatgcaactta

SEQ ID NO: 949833 - DNA, 15 bp, Homo sapiens
aagtatgcaacttag

SEQ ID NO: 949834 - DNA, 15 bp, Homo sapiens
agtatgcaacttaga

SEQ ID NO: 949835 - DNA, 15 bp, Homo sapiens
gtatgcaacttagag

SEQ ID NO: 949836 - DNA, 15 bp, Homo sapiens
tatgcaacttagaga

SEQ ID NO: 949837 - DNA, 15 bp, Homo sapiens
atgcaacttagagat

SEQ ID NO: 949838 - DNA, 15 bp, Homo sapiens
tgcaacttagagatg

SEQ ID NO: 949839 - DNA, 15 bp, Homo sapiens
gcaacttagagatgt

SEQ ID NO: 949840 - DNA, 15 bp, Homo sapiens
caacttagagatgta

SEQ ID NO: 949841 - DNA, 15 bp, Homo sapiens
aacttagagatgtac

SEQ ID NO: 949842 - DNA, 15 bp, Homo sapiens
acttagagatgtaca

SEQ ID NO: 949843 - DNA, 15 bp, Homo sapiens
cttagagatgtacaa

SEQ ID NO: 949844 - DNA, 15 bp, Homo sapiens
ttagagatgtacaag

SEQ ID NO: 949845 - DNA, 15 bp, Homo sapiens
tagagatgtacaaga

SEQ ID NO: 949846 - DNA, 15 bp, Homo sapiens
agagatgtacaagac

SEQ ID NO: 949847 - DNA, 15 bp, Homo sapiens
gagatgtacaagaca

SEQ ID NO: 949848 - DNA, 15 bp, Homo sapiens
agatgtacaagacaa

SEQ ID NO: 949849 - DNA, 15 bp, Homo sapiens
gatgtacaagacaaa

SEQ ID NO: 949850 - DNA, 15 bp, Homo sapiens
atgtacaagacaaaa

SEQ ID NO: 949851 - DNA, 15 bp, Homo sapiens
tgtacaagacaaaac

SEQ ID NO: 949852 - DNA, 15 bp, Homo sapiens
gtacaagacaaaacc

SEQ ID NO: 949853 - DNA, 15 bp, Homo sapiens
tacaagacaaaacca

SEQ ID NO: 949854 - DNA, 15 bp, Homo sapiens
acaagacaaaaccat

SEQ ID NO: 949855 - DNA, 15 bp, Homo sapiens
caagacaaaaccatg

SEQ ID NO: 949856 - DNA, 15 bp, Homo sapiens
aagacaaaaccatgt

SEQ ID NO: 949857 - DNA, 15 bp, Homo sapiens
agacaaaaccatgtg

SEQ ID NO: 949858 - DNA, 15 bp, Homo sapiens
gacaaaaccatgtgt

SEQ ID NO: 949859 - DNA, 15 bp, Homo sapiens
acaaaaccatgtgtt

SEQ ID NO: 949860 - DNA, 15 bp, Homo sapiens
caaaaccatgtgttt

SEQ ID NO: 949861 - DNA, 15 bp, Homo sapiens
aaaaccatgtgtttg

SEQ ID NO: 949862 - DNA, 15 bp, Homo sapiens
aaaccatgtgtttgt

SEQ ID NO: 949863 - DNA, 15 bp, Homo sapiens
aaccatgtgtttgtc

SEQ ID NO: 949864 - DNA, 15 bp, Homo sapiens
accatgtgtttgtcc

SEQ ID NO: 949865 - DNA, 15 bp, Homo sapiens
ccatgtgtttgtcct

SEQ ID NO: 949866 - DNA, 15 bp, Homo sapiens
catgtgtttgtcctg

SEQ ID NO: 949867 - DNA, 15 bp, Homo sapiens
atgtgtttgtcctgt

SEQ ID NO: 949868 - DNA, 15 bp, Homo sapiens
tgtgtttgtcctgta

SEQ ID NO: 949869 - DNA, 15 bp, Homo sapiens
gtgtttgtcctgtac

SEQ ID NO: 949870 - DNA, 15 bp, Homo sapiens
tgtttgtcctgtacc

SEQ ID NO: 949871 - DNA, 15 bp, Homo sapiens
gtttgtcctgtacct

SEQ ID NO: 949872 - DNA, 15 bp, Homo sapiens
tttgtcctgtacctg

SEQ ID NO: 949873 - DNA, 15 bp, Homo sapiens
ttgtcctgtacctgg

SEQ ID NO: 949874 - DNA, 15 bp, Homo sapiens
tgtcctgtacctggg

SEQ ID NO: 949875 - DNA, 15 bp, Homo sapiens
gtcctgtacctggga

SEQ ID NO: 949876 - DNA, 15 bp, Homo sapiens
tcctgtacctgggaa

SEQ ID NO: 949877 - DNA, 15 bp, Homo sapiens
cctgtacctgggaac

SEQ ID NO: 949878 - DNA, 15 bp, Homo sapiens
ctgtacctgggaacc

SEQ ID NO: 949879 - DNA, 15 bp, Homo sapiens
tgtacctgggaacca

SEQ ID NO: 949880 - DNA, 15 bp, Homo sapiens
gtacctgggaaccat

SEQ ID NO: 949881 - DNA, 15 bp, Homo sapiens
tacctgggaaccatc

SEQ ID NO: 949882 - DNA, 15 bp, Homo sapiens
acctgggaaccatca

SEQ ID NO: 949883 - DNA, 15 bp, Homo sapiens
cctgggaaccatcag

SEQ ID NO: 949884 - DNA, 15 bp, Homo sapiens
ctgggaaccatcagg

SEQ ID NO: 949885 - DNA, 15 bp, Homo sapiens
tgggaaccatcaggt

SEQ ID NO: 949886 - DNA, 15 bp, Homo sapiens
gggaaccatcaggta

SEQ ID NO: 949887 - DNA, 15 bp, Homo sapiens
ggaaccatcaggtaa

SEQ ID NO: 949888 - DNA, 15 bp, Homo sapiens
gaaccatcaggtaaa

SEQ ID NO: 949889 - DNA, 15 bp, Homo sapiens
aaccatcaggtaaag

SEQ ID NO: 949890 - DNA, 15 bp, Homo sapiens
accatcaggtaaagg

SEQ ID NO: 949891 - DNA, 15 bp, Homo sapiens
ccatcaggtaaaggt

SEQ ID NO: 949892 - DNA, 15 bp, Homo sapiens
catcaggtaaaggtg

SEQ ID NO: 949893 - DNA, 15 bp, Homo sapiens
atcaggtaaaggtgt

SEQ ID NO: 949894 - DNA, 15 bp, Homo sapiens
tcaggtaaaggtgta

SEQ ID NO: 949895 - DNA, 15 bp, Homo sapiens
caggtaaaggtgtat

SEQ ID NO: 949896 - DNA, 15 bp, Homo sapiens
aggtaaaggtgtatt

SEQ ID NO: 949897 - DNA, 15 bp, Homo sapiens
ggtaaaggtgtattc

SEQ ID NO: 949898 - DNA, 15 bp, Homo sapiens
gtaaaggtgtattct

SEQ ID NO: 949899 - DNA, 15 bp, Homo sapiens
taaaggtgtattctg

SEQ ID NO: 949900 - DNA, 15 bp, Homo sapiens
aaaggtgtattctgt

SEQ ID NO: 949901 - DNA, 15 bp, Homo sapiens
aaggtgtattctgtt

SEQ ID NO: 949902 - DNA, 15 bp, Homo sapiens
aggtgtattctgttt

SEQ ID NO: 949903 - DNA, 15 bp, Homo sapiens
ggtgtattctgtttg

SEQ ID NO: 949904 - DNA, 15 bp, Homo sapiens
gtgtattctgtttgt

SEQ ID NO: 949905 - DNA, 15 bp, Homo sapiens
tgtattctgtttgtc

SEQ ID NO: 949906 - DNA, 15 bp, Homo sapiens
gtattctgtttgtcc

SEQ ID NO: 949907 - DNA, 15 bp, Homo sapiens
tattctgtttgtcca

SEQ ID NO: 949908 - DNA, 15 bp, Homo sapiens
attctgtttgtccat

SEQ ID NO: 949909 - DNA, 15 bp, Homo sapiens
ttctgtttgtccatg

SEQ ID NO: 949910 - DNA, 15 bp, Homo sapiens
tctgtttgtccatgg

SEQ ID NO: 949911 - DNA, 15 bp, Homo sapiens
ctgtttgtccatggt

SEQ ID NO: 949912 - DNA, 15 bp, Homo sapiens
tgtttgtccatggtc

SEQ ID NO: 949913 - DNA, 15 bp, Homo sapiens
gtttgtccatggtca

SEQ ID NO: 949914 - DNA, 15 bp, Homo sapiens
tttgtccatggtcaa

SEQ ID NO: 949915 - DNA, 15 bp, Homo sapiens
ttgtccatggtcaat

SEQ ID NO: 949916 - DNA, 15 bp, Homo sapiens
tgtccatggtcaatg

SEQ ID NO: 949917 - DNA, 15 bp, Homo sapiens
gtccatggtcaatgt

SEQ ID NO: 949918 - DNA, 15 bp, Homo sapiens
tccatggtcaatgtc

SEQ ID NO: 949919 - DNA, 15 bp, Homo sapiens
ccatggtcaatgtca

SEQ ID NO: 949920 - DNA, 15 bp, Homo sapiens
catggtcaatgtcat

SEQ ID NO: 949921 - DNA, 15 bp, Homo sapiens
atggtcaatgtcatt

SEQ ID NO: 949922 - DNA, 15 bp, Homo sapiens
tggtcaatgtcattt

SEQ ID NO: 949923 - DNA, 15 bp, Homo sapiens
ggtcaatgtcattta

SEQ ID NO: 949924 - DNA, 15 bp, Homo sapiens
gtcaatgtcatttag

SEQ ID NO: 949925 - DNA, 15 bp, Homo sapiens
tcaatgtcatttagt

SEQ ID NO: 949926 - DNA, 15 bp, Homo sapiens
caatgtcatttagtt

SEQ ID NO: 949927 - DNA, 15 bp, Homo sapiens
aatgtcatttagttc

SEQ ID NO: 949928 - DNA, 15 bp, Homo sapiens
atgtcatttagttct

SEQ ID NO: 949929 - DNA, 15 bp, Homo sapiens
tgtcatttagttctg

SEQ ID NO: 949930 - DNA, 15 bp, Homo sapiens
gtcatttagttctgt

SEQ ID NO: 949931 - DNA, 15 bp, Homo sapiens
tcatttagttctgtg

SEQ ID NO: 949932 - DNA, 15 bp, Homo sapiens
catttagttctgtga

SEQ ID NO: 949933 - DNA, 15 bp, Homo sapiens
atttagttctgtgac

SEQ ID NO: 949934 - DNA, 15 bp, Homo sapiens
tttagttctgtgacc

SEQ ID NO: 949935 - DNA, 15 bp, Homo sapiens
ttagttctgtgacct

SEQ ID NO: 949936 - DNA, 15 bp, Homo sapiens
tagttctgtgacctc

SEQ ID NO: 949937 - DNA, 15 bp, Homo sapiens
agttctgtgacctca

SEQ ID NO: 949938 - DNA, 15 bp, Homo sapiens
gttctgtgacctcag

SEQ ID NO: 949939 - DNA, 15 bp, Homo sapiens
ttctgtgacctcagg

SEQ ID NO: 949940 - DNA, 15 bp, Homo sapiens
tctgtgacctcaggg

SEQ ID NO: 949941 - DNA, 15 bp, Homo sapiens
ctgtgacctcaggga

SEQ ID NO: 949942 - DNA, 15 bp, Homo sapiens
tgtgacctcagggat

SEQ ID NO: 949943 - DNA, 15 bp, Homo sapiens
gtgacctcagggata

SEQ ID NO: 949944 - DNA, 15 bp, Homo sapiens
tgacctcagggatat

SEQ ID NO: 949945 - DNA, 15 bp, Homo sapiens
gacctcagggatata

SEQ ID NO: 949946 - DNA, 15 bp, Homo sapiens
acctcagggatataa

SEQ ID NO: 949947 - DNA, 15 bp, Homo sapiens
cctcagggatataac

SEQ ID NO: 949948 - DNA, 15 bp, Homo sapiens
ctcagggatataaca

SEQ ID NO: 949949 - DNA, 15 bp, Homo sapiens
tcagggatataacaa

SEQ ID NO: 949950 - DNA, 15 bp, Homo sapiens
cagggatataacaac

SEQ ID NO: 949951 - DNA, 15 bp, Homo sapiens
agggatataacaacc

SEQ ID NO: 949952 - DNA, 15 bp, Homo sapiens
gggatataacaacct

SEQ ID NO: 949953 - DNA, 15 bp, Homo sapiens
ggatataacaacctt

SEQ ID NO: 949954 - DNA, 15 bp, Homo sapiens
gatataacaaccttt

SEQ ID NO: 949955 - DNA, 15 bp, Homo sapiens
atataacaacctttc

SEQ ID NO: 949956 - DNA, 15 bp, Homo sapiens
tataacaacctttct

SEQ ID NO: 949957 - DNA, 15 bp, Homo sapiens
ataacaacctttctg

SEQ ID NO: 949958 - DNA, 15 bp, Homo sapiens
taacaacctttctga

SEQ ID NO: 949959 - DNA, 15 bp, Homo sapiens
aacaacctttctgat

SEQ ID NO: 949960 - DNA, 15 bp, Homo sapiens
acaacctttctgatc

SEQ ID NO: 949961 - DNA, 15 bp, Homo sapiens
caacctttctgatcc

SEQ ID NO: 949962 - DNA, 15 bp, Homo sapiens
aacctttctgatcct

SEQ ID NO: 949963 - DNA, 15 bp, Homo sapiens
acctttctgatcctc

SEQ ID NO: 949964 - DNA, 15 bp, Homo sapiens
cctttctgatcctca

SEQ ID NO: 949965 - DNA, 15 bp, Homo sapiens
ctttctgatcctcag

SEQ ID NO: 949966 - DNA, 15 bp, Homo sapiens
tttctgatcctcagc

SEQ ID NO: 949967 - DNA, 15 bp, Homo sapiens
ttctgatcctcagct

SEQ ID NO: 949968 - DNA, 15 bp, Homo sapiens
tctgatcctcagctt

SEQ ID NO: 949969 - DNA, 15 bp, Homo sapiens
ctgatcctcagcttc

SEQ ID NO: 949970 - DNA, 15 bp, Homo sapiens
tgatcctcagcttcc

SEQ ID NO: 949971 - DNA, 15 bp, Homo sapiens
gatcctcagcttcct

SEQ ID NO: 949972 - DNA, 15 bp, Homo sapiens
atcctcagcttcctt

SEQ ID NO: 949973 - DNA, 15 bp, Homo sapiens
tcctcagcttccttt

SEQ ID NO: 949974 - DNA, 15 bp, Homo sapiens
cctcagcttcctttt

SEQ ID NO: 949975 - DNA, 15 bp, Homo sapiens
ctcagcttccttttc

SEQ ID NO: 949976 - DNA, 15 bp, Homo sapiens
tcagcttccttttct

SEQ ID NO: 949977 - DNA, 15 bp, Homo sapiens
cagcttccttttctc

SEQ ID NO: 949978 - DNA, 15 bp, Homo sapiens
agcttccttttctct

SEQ ID NO: 949979 - DNA, 15 bp, Homo sapiens
gcttccttttctcta

SEQ ID NO: 949980 - DNA, 15 bp, Homo sapiens
cttccttttctctaa

SEQ ID NO: 949981 - DNA, 15 bp, Homo sapiens
ttccttttctctaaa

SEQ ID NO: 949982 - DNA, 15 bp, Homo sapiens
tccttttctctaaaa

SEQ ID NO: 949983 - DNA, 15 bp, Homo sapiens
ccttttctctaaaaa

SEQ ID NO: 949984 - DNA, 15 bp, Homo sapiens
cttttctctaaaaag

SEQ ID NO: 949985 - DNA, 15 bp, Homo sapiens
ttttctctaaaaagt

SEQ ID NO: 949986 - DNA, 15 bp, Homo sapiens
tttctctaaaaagta

SEQ ID NO: 949987 - DNA, 15 bp, Homo sapiens
ttctctaaaaagtaa

SEQ ID NO: 949988 - DNA, 15 bp, Homo sapiens
tctctaaaaagtaac

SEQ ID NO: 949989 - DNA, 15 bp, Homo sapiens
ctctaaaaagtaaca

SEQ ID NO: 949990 - DNA, 15 bp, Homo sapiens
tctaaaaagtaacaa

SEQ ID NO: 949991 - DNA, 15 bp, Homo sapiens
ctaaaaagtaacaaa

SEQ ID NO: 949992 - DNA, 15 bp, Homo sapiens
taaaaagtaacaaat

SEQ ID NO: 949993 - DNA, 15 bp, Homo sapiens
aaaaagtaacaaatg

SEQ ID NO: 949994 - DNA, 15 bp, Homo sapiens
aaaagtaacaaatgg

SEQ ID NO: 949995 - DNA, 15 bp, Homo sapiens
aaagtaacaaatggc

SEQ ID NO: 949996 - DNA, 15 bp, Homo sapiens
aagtaacaaatggcc

SEQ ID NO: 949997 - DNA, 15 bp, Homo sapiens
agtaacaaatggcca

SEQ ID NO: 949998 - DNA, 15 bp, Homo sapiens
gtaacaaatggccac

SEQ ID NO: 949999 - DNA, 15 bp, Homo sapiens
taacaaatggccacc

SEQ ID NO: 950000 - DNA, 15 bp, Homo sapiens
aacaaatggccacct

SEQ ID NO: 950001 - DNA, 15 bp, Homo sapiens
acaaatggccacctt

SEQ ID NO: 950002 - DNA, 15 bp, Homo sapiens
caaatggccaccttg

SEQ ID NO: 950003 - DNA, 15 bp, Homo sapiens
aaatggccaccttgc

SEQ ID NO: 950004 - DNA, 15 bp, Homo sapiens
aatggccaccttgca

SEQ ID NO: 950005 - DNA, 15 bp, Homo sapiens
atggccaccttgcaa

SEQ ID NO: 950006 - DNA, 15 bp, Homo sapiens
tggccaccttgcaag

SEQ ID NO: 950007 - DNA, 15 bp, Homo sapiens
ggccaccttgcaagg

SEQ ID NO: 950008 - DNA, 15 bp, Homo sapiens
gccaccttgcaaggt

SEQ ID NO: 950009 - DNA, 15 bp, Homo sapiens
ccaccttgcaaggtc

SEQ ID NO: 950010 - DNA, 15 bp, Homo sapiens
caccttgcaaggtcc

SEQ ID NO: 950011 - DNA, 15 bp, Homo sapiens
accttgcaaggtcct

SEQ ID NO: 950012 - DNA, 15 bp, Homo sapiens
ccttgcaaggtcctt

SEQ ID NO: 950013 - DNA, 15 bp, Homo sapiens
cttgcaaggtcctta

SEQ ID NO: 950014 - DNA, 15 bp, Homo sapiens
ttgcaaggtccttat

SEQ ID NO: 950015 - DNA, 15 bp, Homo sapiens
tgcaaggtccttatg

SEQ ID NO: 950016 - DNA, 15 bp, Homo sapiens
gcaaggtccttatga

SEQ ID NO: 950017 - DNA, 15 bp, Homo sapiens
caaggtccttatgaa

SEQ ID NO: 950018 - DNA, 15 bp, Homo sapiens
aaggtccttatgaag

SEQ ID NO: 950019 - DNA, 15 bp, Homo sapiens
aggtccttatgaaga

SEQ ID NO: 950020 - DNA, 15 bp, Homo sapiens
ggtccttatgaagat

SEQ ID NO: 950021 - DNA, 15 bp, Homo sapiens
gtccttatgaagatg

SEQ ID NO: 950022 - DNA, 15 bp, Homo sapiens
tccttatgaagatga

SEQ ID NO: 950023 - DNA, 15 bp, Homo sapiens
ccttatgaagatgag

SEQ ID NO: 950024 - DNA, 15 bp, Homo sapiens
cttatgaagatgagt

SEQ ID NO: 950025 - DNA, 15 bp, Homo sapiens
ttatgaagatgagtc

SEQ ID NO: 950026 - DNA, 15 bp, Homo sapiens
tatgaagatgagtcc

SEQ ID NO: 950027 - DNA, 15 bp, Homo sapiens
atgaagatgagtcct

SEQ ID NO: 950028 - DNA, 15 bp, Homo sapiens
tgaagatgagtcctg

SEQ ID NO: 950029 - DNA, 15 bp, Homo sapiens
gaagatgagtcctga

SEQ ID NO: 950030 - DNA, 15 bp, Homo sapiens
aagatgagtcctgag

SEQ ID NO: 950031 - DNA, 15 bp, Homo sapiens
agatgagtcctgagc

SEQ ID NO: 950032 - DNA, 15 bp, Homo sapiens
gatgagtcctgagca

SEQ ID NO: 950033 - DNA, 15 bp, Homo sapiens
atgagtcctgagcat

SEQ ID NO: 950034 - DNA, 15 bp, Homo sapiens
tgagtcctgagcatg

SEQ ID NO: 950035 - DNA, 15 bp, Homo sapiens
gagtcctgagcatgt

SEQ ID NO: 950036 - DNA, 15 bp, Homo sapiens
agtcctgagcatgta

SEQ ID NO: 950037 - DNA, 15 bp, Homo sapiens
gtcctgagcatgtac

SEQ ID NO: 950038 - DNA, 15 bp, Homo sapiens
tcctgagcatgtaca

SEQ ID NO: 950039 - DNA, 15 bp, Homo sapiens
cctgagcatgtacaa

SEQ ID NO: 950040 - DNA, 15 bp, Homo sapiens
ctgagcatgtacaat

SEQ ID NO: 950041 - DNA, 15 bp, Homo sapiens
tgagcatgtacaatg

SEQ ID NO: 950042 - DNA, 15 bp, Homo sapiens
gagcatgtacaatgt

SEQ ID NO: 950043 - DNA, 15 bp, Homo sapiens
agcatgtacaatgtt

SEQ ID NO: 950044 - DNA, 15 bp, Homo sapiens
gcatgtacaatgtta

SEQ ID NO: 950045 - DNA, 15 bp, Homo sapiens
catgtacaatgttaa

SEQ ID NO: 950046 - DNA, 15 bp, Homo sapiens
atgtacaatgttaag

SEQ ID NO: 950047 - DNA, 15 bp, Homo sapiens
tgtacaatgttaagc

SEQ ID NO: 950048 - DNA, 15 bp, Homo sapiens
gtacaatgttaagca

SEQ ID NO: 950049 - DNA, 15 bp, Homo sapiens
tacaatgttaagcag

SEQ ID NO: 950050 - DNA, 15 bp, Homo sapiens
acaatgttaagcaga

SEQ ID NO: 950051 - DNA, 15 bp, Homo sapiens
caatgttaagcagag

SEQ ID NO: 950052 - DNA, 15 bp, Homo sapiens
aatgttaagcagagc

SEQ ID NO: 950053 - DNA, 15 bp, Homo sapiens
atgttaagcagagca

SEQ ID NO: 950054 - DNA, 15 bp, Homo sapiens
tgttaagcagagcat

SEQ ID NO: 950055 - DNA, 15 bp, Homo sapiens
gttaagcagagcatg

SEQ ID NO: 950056 - DNA, 15 bp, Homo sapiens
ttaagcagagcatgc

SEQ ID NO: 950057 - DNA, 15 bp, Homo sapiens
taagcagagcatgct

SEQ ID NO: 950058 - DNA, 15 bp, Homo sapiens
aagcagagcatgcta

SEQ ID NO: 950059 - DNA, 15 bp, Homo sapiens
agcagagcatgctac

SEQ ID NO: 950060 - DNA, 15 bp, Homo sapiens
gcagagcatgctact

SEQ ID NO: 950061 - DNA, 15 bp, Homo sapiens
cagagcatgctactt

SEQ ID NO: 950062 - DNA, 15 bp, Homo sapiens
agagcatgctacttt

SEQ ID NO: 950063 - DNA, 15 bp, Homo sapiens
gagcatgctactttc

SEQ ID NO: 950064 - DNA, 15 bp, Homo sapiens
agcatgctactttca

SEQ ID NO: 950065 - DNA, 15 bp, Homo sapiens
gcatgctactttcaa

SEQ ID NO: 950066 - DNA, 15 bp, Homo sapiens
catgctactttcaac

SEQ ID NO: 950067 - DNA, 15 bp, Homo sapiens
atgctactttcaacc

SEQ ID NO: 950068 - DNA, 15 bp, Homo sapiens
tgctactttcaaccc

SEQ ID NO: 950069 - DNA, 15 bp, Homo sapiens
gctactttcaaccca

SEQ ID NO: 950070 - DNA, 15 bp, Homo sapiens
ctactttcaacccat

SEQ ID NO: 950071 - DNA, 15 bp, Homo sapiens
tactttcaacccatg

SEQ ID NO: 950072 - DNA, 15 bp, Homo sapiens
actttcaacccatgg

SEQ ID NO: 950073 - DNA, 15 bp, Homo sapiens
ctttcaacccatggt

SEQ ID NO: 950074 - DNA, 15 bp, Homo sapiens
tttcaacccatggtc

SEQ ID NO: 950075 - DNA, 15 bp, Homo sapiens
ttcaacccatggtca

SEQ ID NO: 950076 - DNA, 15 bp, Homo sapiens
tcaacccatggtcac

SEQ ID NO: 950077 - DNA, 15 bp, Homo sapiens
caacccatggtcact

SEQ ID NO: 950078 - DNA, 15 bp, Homo sapiens
aacccatggtcactg

SEQ ID NO: 950079 - DNA, 15 bp, Homo sapiens
acccatggtcactgt

SEQ ID NO: 950080 - DNA, 15 bp, Homo sapiens
cccatggtcactgtg

SEQ ID NO: 950081 - DNA, 15 bp, Homo sapiens
ccatggtcactgtgt

SEQ ID NO: 950082 - DNA, 15 bp, Homo sapiens
catggtcactgtgtg

SEQ ID NO: 950083 - DNA, 15 bp, Homo sapiens
atggtcactgtgtgt

SEQ ID NO: 950084 - DNA, 15 bp, Homo sapiens
tggtcactgtgtgtg

SEQ ID NO: 950085 - DNA, 15 bp, Homo sapiens
ggtcactgtgtgtgt

SEQ ID NO: 950086 - DNA, 15 bp, Homo sapiens
gtcactgtgtgtgtg

SEQ ID NO: 950087 - DNA, 15 bp, Homo sapiens
tcactgtgtgtgtgt

SEQ ID NO: 950088 - DNA, 15 bp, Homo sapiens
cactgtgtgtgtgtg

SEQ ID NO: 950089 - DNA, 15 bp, Homo sapiens
actgtgtgtgtgtgt

SEQ ID NO: 950090 - DNA, 15 bp, Homo sapiens
ctgtgtgtgtgtgtg

SEQ ID NO: 950091 - DNA, 15 bp, Homo sapiens
tgtgtgtgtgtgttc

SEQ ID NO: 950092 - DNA, 15 bp, Homo sapiens
gtgtgtgtgtgttct

SEQ ID NO: 950093 - DNA, 15 bp, Homo sapiens
tgtgtgtgtgttctt

SEQ ID NO: 950094 - DNA, 15 bp, Homo sapiens
gtgtgtgtgttcttc

SEQ ID NO: 950095 - DNA, 15 bp, Homo sapiens
tgtgtgtgttcttca

SEQ ID NO: 950096 - DNA, 15 bp, Homo sapiens
gtgtgtgttcttcac

SEQ ID NO: 950097 - DNA, 15 bp, Homo sapiens
tgtgtgttcttcaca

SEQ ID NO: 950098 - DNA, 15 bp, Homo sapiens
gtgtgttcttcacat

SEQ ID NO: 950099 - DNA, 15 bp, Homo sapiens
tgtgttcttcacata

SEQ ID NO: 950100 - DNA, 15 bp, Homo sapiens
gtgttcttcacatat

SEQ ID NO: 950101 - DNA, 15 bp, Homo sapiens
tgttcttcacatatg

SEQ ID NO: 950102 - DNA, 15 bp, Homo sapiens
gttcttcacatatgt

SEQ ID NO: 950103 - DNA, 15 bp, Homo sapiens
ttcttcacatatgtt

SEQ ID NO: 950104 - DNA, 15 bp, Homo sapiens
tcttcacatatgtta

SEQ ID NO: 950105 - DNA, 15 bp, Homo sapiens
cttcacatatgttat

SEQ ID NO: 950106 - DNA, 15 bp, Homo sapiens
ttcacatatgttata

SEQ ID NO: 950107 - DNA, 15 bp, Homo sapiens
tcacatatgttatat

SEQ ID NO: 950108 - DNA, 15 bp, Homo sapiens
cacatatgttatatt

SEQ ID NO: 950109 - DNA, 15 bp, Homo sapiens
acatatgttatattc

SEQ ID NO: 950110 - DNA, 15 bp, Homo sapiens
catatgttatattca

SEQ ID NO: 950111 - DNA, 15 bp, Homo sapiens
atatgttatattcat

SEQ ID NO: 950112 - DNA, 15 bp, Homo sapiens
tatgttatattcata

SEQ ID NO: 950113 - DNA, 15 bp, Homo sapiens
atgttatattcatag

SEQ ID NO: 950114 - DNA, 15 bp, Homo sapiens
tgttatattcataga

SEQ ID NO: 950115 - DNA, 15 bp, Homo sapiens
gttatattcatagag

SEQ ID NO: 950116 - DNA, 15 bp, Homo sapiens
ttatattcatagagg

SEQ ID NO: 950117 - DNA, 15 bp, Homo sapiens
tatattcatagaggc

SEQ ID NO: 950118 - DNA, 15 bp, Homo sapiens
atattcatagaggct

SEQ ID NO: 950119 - DNA, 15 bp, Homo sapiens
tattcatagaggctg

SEQ ID NO: 950120 - DNA, 15 bp, Homo sapiens
attcatagaggctga

SEQ ID NO: 950121 - DNA, 15 bp, Homo sapiens
ttcatagaggctgaa

SEQ ID NO: 950122 - DNA, 15 bp, Homo sapiens
tcatagaggctgaat

SEQ ID NO: 950123 - DNA, 15 bp, Homo sapiens
catagaggctgaatt

SEQ ID NO: 950124 - DNA, 15 bp, Homo sapiens
atagaggctgaattt

SEQ ID NO: 950125 - DNA, 15 bp, Homo sapiens
tagaggctgaatttt

SEQ ID NO: 950126 - DNA, 15 bp, Homo sapiens
agaggctgaattttc

SEQ ID NO: 950127 - DNA, 15 bp, Homo sapiens
gaggctgaattttcc

SEQ ID NO: 950128 - DNA, 15 bp, Homo sapiens
aggctgaattttcca

SEQ ID NO: 950129 - DNA, 15 bp, Homo sapiens
ggctgaattttccag

SEQ ID NO: 950130 - DNA, 15 bp, Homo sapiens
gctgaattttccagt

SEQ ID NO: 950131 - DNA, 15 bp, Homo sapiens
ctgaattttccagtc

SEQ ID NO: 950132 - DNA, 15 bp, Homo sapiens
tgaattttccagtcc

SEQ ID NO: 950133 - DNA, 15 bp, Homo sapiens
gaattttccagtcca

SEQ ID NO: 950134 - DNA, 15 bp, Homo sapiens
aattttccagtccac

SEQ ID NO: 950135 - DNA, 15 bp, Homo sapiens
attttccagtccact

SEQ ID NO: 950136 - DNA, 15 bp, Homo sapiens
ttttccagtccacta

SEQ ID NO: 950137 - DNA, 15 bp, Homo sapiens
tttccagtccactaa

SEQ ID NO: 950138 - DNA, 15 bp, Homo sapiens
ttccagtccactaag

SEQ ID NO: 950139 - DNA, 15 bp, Homo sapiens
tccagtccactaaga

SEQ ID NO: 950140 - DNA, 15 bp, Homo sapiens
ccagtccactaagat

SEQ ID NO: 950141 - DNA, 15 bp, Homo sapiens
cagtccactaagata

SEQ ID NO: 950142 - DNA, 15 bp, Homo sapiens
agtccactaagatat

SEQ ID NO: 950143 - DNA, 15 bp, Homo sapiens
gtccactaagatatt

SEQ ID NO: 950144 - DNA, 15 bp, Homo sapiens
tccactaagatattc

SEQ ID NO: 950145 - DNA, 15 bp, Homo sapiens
ccactaagatattca

SEQ ID NO: 950146 - DNA, 15 bp, Homo sapiens
cactaagatattcaa

SEQ ID NO: 950147 - DNA, 15 bp, Homo sapiens
actaagatattcaag

SEQ ID NO: 950148 - DNA, 15 bp, Homo sapiens
ctaagatattcaagt

SEQ ID NO: 950149 - DNA, 15 bp, Homo sapiens
taagatattcaagtc

SEQ ID NO: 950150 - DNA, 15 bp, Homo sapiens
aagatattcaagtcc

SEQ ID NO: 950151 - DNA, 15 bp, Homo sapiens
agatattcaagtcca

SEQ ID NO: 950152 - DNA, 15 bp, Homo sapiens
gatattcaagtccac

SEQ ID NO: 950153 - DNA, 15 bp, Homo sapiens
atattcaagtccaca

SEQ ID NO: 950154 - DNA, 15 bp, Homo sapiens
tattcaagtccacat

SEQ ID NO: 950155 - DNA, 15 bp, Homo sapiens
attcaagtccacatg

SEQ ID NO: 950156 - DNA, 15 bp, Homo sapiens
ttcaagtccacatgg

SEQ ID NO: 950157 - DNA, 15 bp, Homo sapiens
tcaagtccacatggt

SEQ ID NO: 950158 - DNA, 15 bp, Homo sapiens
caagtccacatggta

SEQ ID NO: 950159 - DNA, 15 bp, Homo sapiens
aagtccacatggtag

SEQ ID NO: 950160 - DNA, 15 bp, Homo sapiens
agtccacatggtaga

SEQ ID NO: 950161 - DNA, 15 bp, Homo sapiens
gtccacatggtagat

SEQ ID NO: 950162 - DNA, 15 bp, Homo sapiens
tccacatggtagata

SEQ ID NO: 950163 - DNA, 15 bp, Homo sapiens
ccacatggtagatat

SEQ ID NO: 950164 - DNA, 15 bp, Homo sapiens
cacatggtagatatt

SEQ ID NO: 950165 - DNA, 15 bp, Homo sapiens
acatggtagatattc

SEQ ID NO: 950166 - DNA, 15 bp, Homo sapiens
catggtagatattca

SEQ ID NO: 950167 - DNA, 15 bp, Homo sapiens
atggtagatattcaa

SEQ ID NO: 950168 - DNA, 15 bp, Homo sapiens
tggtagatattcaac

SEQ ID NO: 950169 - DNA, 15 bp, Homo sapiens
ggtagatattcaacg

SEQ ID NO: 950170 - DNA, 15 bp, Homo sapiens
gtagatattcaacga

SEQ ID NO: 950171 - DNA, 15 bp, Homo sapiens
tagatattcaacgaa

SEQ ID NO: 950172 - DNA, 15 bp, Homo sapiens
agatattcaacgaat

SEQ ID NO: 950173 - DNA, 15 bp, Homo sapiens
gatattcaacgaatg

SEQ ID NO: 950174 - DNA, 15 bp, Homo sapiens
atattcaacgaatgt

SEQ ID NO: 950175 - DNA, 15 bp, Homo sapiens
tattcaacgaatgtg

SEQ ID NO: 950176 - DNA, 15 bp, Homo sapiens
attcaacgaatgtgt

SEQ ID NO: 950177 - DNA, 15 bp, Homo sapiens
ttcaacgaatgtgta

SEQ ID NO: 950178 - DNA, 15 bp, Homo sapiens
tcaacgaatgtgtat

SEQ ID NO: 950179 - DNA, 15 bp, Homo sapiens
caacgaatgtgtatt

SEQ ID NO: 950180 - DNA, 15 bp, Homo sapiens
aacgaatgtgtattt

SEQ ID NO: 950181 - DNA, 15 bp, Homo sapiens
acgaatgtgtatttt

SEQ ID NO: 950182 - DNA, 15 bp, Homo sapiens
cgaatgtgtatttta

SEQ ID NO: 950183 - DNA, 15 bp, Homo sapiens
gaatgtgtattttat

SEQ ID NO: 950184 - DNA, 15 bp, Homo sapiens
aatgtgtattttatt

SEQ ID NO: 950185 - DNA, 15 bp, Homo sapiens
atgtgtattttatta

SEQ ID NO: 950186 - DNA, 15 bp, Homo sapiens
tgtgtattttattaa

SEQ ID NO: 950187 - DNA, 15 bp, Homo sapiens
gtgtattttattaaa

SEQ ID NO: 950188 - DNA, 15 bp, Homo sapiens
tgtattttattaaag

SEQ ID NO: 950189 - DNA, 15 bp, Homo sapiens
gtattttattaaagc

SEQ ID NO: 950190 - DNA, 15 bp, Homo sapiens
tattttattaaagct

SEQ ID NO: 950191 - DNA, 15 bp, Homo sapiens
attttattaaagctt

SEQ ID NO: 950192 - DNA, 15 bp, Homo sapiens
ttttattaaagcttt

SEQ ID NO: 950193 - DNA, 15 bp, Homo sapiens
tttattaaagcttta

SEQ ID NO: 950194 - DNA, 15 bp, Homo sapiens
ttattaaagctttac

SEQ ID NO: 950195 - DNA, 15 bp, Homo sapiens
tattaaagctttaca

SEQ ID NO: 950196 - DNA, 15 bp, Homo sapiens
attaaagctttacat

SEQ ID NO: 950197 - DNA, 15 bp, Homo sapiens
ttaaagctttacata

SEQ ID NO: 950198 - DNA, 15 bp, Homo sapiens
taaagctttacataa

SEQ ID NO: 950199 - DNA, 15 bp, Homo sapiens
aaagctttacataaa

SEQ ID NO: 950200 - DNA, 15 bp, Homo sapiens
aagctttacataaaa

SEQ ID NO: 950201 - DNA, 15 bp, Homo sapiens
agctttacataaaat

SEQ ID NO: 950202 - DNA, 15 bp, Homo sapiens
gctttacataaaatt

SEQ ID NO: 950203 - DNA, 15 bp, Homo sapiens
ctttacataaaattt

SEQ ID NO: 950204 - DNA, 15 bp, Homo sapiens
tttacataaaattta

SEQ ID NO: 950205 - DNA, 15 bp, Homo sapiens
ttacataaaatttac

SEQ ID NO: 950206 - DNA, 15 bp, Homo sapiens
tacataaaatttaca

SEQ ID NO: 950207 - DNA, 15 bp, Homo sapiens
acataaaatttacat

SEQ ID NO: 950208 - DNA, 15 bp, Homo sapiens
cataaaatttacatt

SEQ ID NO: 950209 - DNA, 15 bp, Homo sapiens
ataaaatttacattt

SEQ ID NO: 950210 - DNA, 15 bp, Homo sapiens
taaaatttacattta

SEQ ID NO: 950211 - DNA, 15 bp, Homo sapiens
aaaatttacatttat

SEQ ID NO: 950212 - DNA, 15 bp, Homo sapiens
aaatttacatttata

SEQ ID NO: 950213 - DNA, 15 bp, Homo sapiens
aatttacatttataa

SEQ ID NO: 950214 - DNA, 15 bp, Homo sapiens
atttacatttataag

SEQ ID NO: 950215 - DNA, 15 bp, Homo sapiens
tttacatttataagg

SEQ ID NO: 950216 - DNA, 15 bp, Homo sapiens
ttacatttataaggt

SEQ ID NO: 950217 - DNA, 15 bp, Homo sapiens
tacatttataaggtc

SEQ ID NO: 950218 - DNA, 15 bp, Homo sapiens
acatttataaggtct

SEQ ID NO: 950219 - DNA, 15 bp, Homo sapiens
catttataaggtctg

SEQ ID NO: 950220 - DNA, 15 bp, Homo sapiens
atttataaggtctgg

SEQ ID NO: 950221 - DNA, 15 bp, Homo sapiens
tttataaggtctggg

SEQ ID NO: 950222 - DNA, 15 bp, Homo sapiens
ttataaggtctggga

SEQ ID NO: 950223 - DNA, 15 bp, Homo sapiens
tataaggtctgggat

SEQ ID NO: 950224 - DNA, 15 bp, Homo sapiens
ataaggtctgggatg

SEQ ID NO: 950225 - DNA, 15 bp, Homo sapiens
taaggtctgggatga

SEQ ID NO: 950226 - DNA, 15 bp, Homo sapiens
aaggtctgggatgac

SEQ ID NO: 950227 - DNA, 15 bp, Homo sapiens
aggtctgggatgacc

SEQ ID NO: 950228 - DNA, 15 bp, Homo sapiens
ggtctgggatgacca

SEQ ID NO: 950229 - DNA, 15 bp, Homo sapiens
gtctgggatgaccag

SEQ ID NO: 950230 - DNA, 15 bp, Homo sapiens
tctgggatgaccagg

SEQ ID NO: 950231 - DNA, 15 bp, Homo sapiens
ctgggatgaccagga

SEQ ID NO: 950232 - DNA, 15 bp, Homo sapiens
tgggatgaccaggaa

SEQ ID NO: 950233 - DNA, 15 bp, Homo sapiens
gggatgaccaggaag

SEQ ID NO: 950234 - DNA, 15 bp, Homo sapiens
ggatgaccaggaagg

SEQ ID NO: 950235 - DNA, 15 bp, Homo sapiens
gatgaccaggaaggt

SEQ ID NO: 950236 - DNA, 15 bp, Homo sapiens
atgaccaggaaggtg

SEQ ID NO: 950237 - DNA, 15 bp, Homo sapiens
tgaccaggaaggtgt

SEQ ID NO: 950238 - DNA, 15 bp, Homo sapiens
gaccaggaaggtgtc

SEQ ID NO: 950239 - DNA, 15 bp, Homo sapiens
accaggaaggtgtca

SEQ ID NO: 950240 - DNA, 15 bp, Homo sapiens
ccaggaaggtgtcag

SEQ ID NO: 950241 - DNA, 15 bp, Homo sapiens
caggaaggtgtcagc

SEQ ID NO: 950242 - DNA, 15 bp, Homo sapiens
aggaaggtgtcagca

SEQ ID NO: 950243 - DNA, 15 bp, Homo sapiens
ggaaggtgtcagcag

SEQ ID NO: 950244 - DNA, 15 bp, Homo sapiens
gaaggtgtcagcaga

SEQ ID NO: 950245 - DNA, 15 bp, Homo sapiens
aaggtgtcagcagaa

SEQ ID NO: 950246 - DNA, 15 bp, Homo sapiens
aggtgtcagcagaac

SEQ ID NO: 950247 - DNA, 15 bp, Homo sapiens
ggtgtcagcagaacc

SEQ ID NO: 950248 - DNA, 15 bp, Homo sapiens
gtgtcagcagaacca

SEQ ID NO: 950249 - DNA, 15 bp, Homo sapiens
tgtcagcagaaccaa

SEQ ID NO: 950250 - DNA, 15 bp, Homo sapiens
gtcagcagaaccaac

SEQ ID NO: 950251 - DNA, 15 bp, Homo sapiens
tcagcagaaccaact

SEQ ID NO: 950252 - DNA, 15 bp, Homo sapiens
cagcagaaccaactt

SEQ ID NO: 950253 - DNA, 15 bp, Homo sapiens
agcagaaccaacttg

SEQ ID NO: 950254 - DNA, 15 bp, Homo sapiens
gcagaaccaacttgc

SEQ ID NO: 950255 - DNA, 15 bp, Homo sapiens
cagaaccaacttgcc

SEQ ID NO: 950256 - DNA, 15 bp, Homo sapiens
agaaccaacttgcca

SEQ ID NO: 950257 - DNA, 15 bp, Homo sapiens
gaaccaacttgccat

SEQ ID NO: 950258 - DNA, 15 bp, Homo sapiens
aaccaacttgccatt

SEQ ID NO: 950259 - DNA, 15 bp, Homo sapiens
accaacttgccatta

SEQ ID NO: 950260 - DNA, 15 bp, Homo sapiens
ccaacttgccattac

SEQ ID NO: 950261 - DNA, 15 bp, Homo sapiens
caacttgccattaca

SEQ ID NO: 950262 - DNA, 15 bp, Homo sapiens
aacttgccattacaa

SEQ ID NO: 950263 - DNA, 15 bp, Homo sapiens
acttgccattacaat

SEQ ID NO: 950264 - DNA, 15 bp, Homo sapiens
cttgccattacaatt

SEQ ID NO: 950265 - DNA, 15 bp, Homo sapiens
ttgccattacaattt

SEQ ID NO: 950266 - DNA, 15 bp, Homo sapiens
tgccattacaatttt

SEQ ID NO: 950267 - DNA, 15 bp, Homo sapiens
gccattacaatttta

SEQ ID NO: 950268 - DNA, 15 bp, Homo sapiens
ccattacaattttaa

SEQ ID NO: 950269 - DNA, 15 bp, Homo sapiens
cattacaattttaag

SEQ ID NO: 950270 - DNA, 15 bp, Homo sapiens
attacaattttaagt

SEQ ID NO: 950271 - DNA, 15 bp, Homo sapiens
ttacaattttaagtt

SEQ ID NO: 950272 - DNA, 15 bp, Homo sapiens
tacaattttaagtta

SEQ ID NO: 950273 - DNA, 15 bp, Homo sapiens
acaattttaagttaa

SEQ ID NO: 950274 - DNA, 15 bp, Homo sapiens
caattttaagttaaa

SEQ ID NO: 950275 - DNA, 15 bp, Homo sapiens
aattttaagttaaat

SEQ ID NO: 950276 - DNA, 15 bp, Homo sapiens
attttaagttaaata

SEQ ID NO: 950277 - DNA, 15 bp, Homo sapiens
ttttaagttaaatat

SEQ ID NO: 950278 - DNA, 15 bp, Homo sapiens
tttaagttaaatata

SEQ ID NO: 950279 - DNA, 15 bp, Homo sapiens
ttaagttaaatatat

SEQ ID NO: 950280 - DNA, 15 bp, Homo sapiens
taagttaaatatatt

SEQ ID NO: 950281 - DNA, 15 bp, Homo sapiens
aagttaaatatattg

SEQ ID NO: 950282 - DNA, 15 bp, Homo sapiens
agttaaatatattga

SEQ ID NO: 950283 - DNA, 15 bp, Homo sapiens
gttaaatatattgag

SEQ ID NO: 950284 - DNA, 15 bp, Homo sapiens
ttaaatatattgagt

SEQ ID NO: 950285 - DNA, 15 bp, Homo sapiens
taaatatattgagtt

SEQ ID NO: 950286 - DNA, 15 bp, Homo sapiens
aaatatattgagttt

SEQ ID NO: 950287 - DNA, 15 bp, Homo sapiens
aatatattgagtttt

SEQ ID NO: 950288 - DNA, 15 bp, Homo sapiens
atatattgagttttg

SEQ ID NO: 950289 - DNA, 15 bp, Homo sapiens
tatattgagttttgg

SEQ ID NO: 950290 - DNA, 15 bp, Homo sapiens
atattgagttttgga

SEQ ID NO: 950291 - DNA, 15 bp, Homo sapiens
tattgagttttggat

SEQ ID NO: 950292 - DNA, 15 bp, Homo sapiens
attgagttttggatt

SEQ ID NO: 950293 - DNA, 15 bp, Homo sapiens
ttgagttttggattt

SEQ ID NO: 950294 - DNA, 15 bp, Homo sapiens
tgagttttggatttg

SEQ ID NO: 950295 - DNA, 15 bp, Homo sapiens
gagttttggatttgt

SEQ ID NO: 950296 - DNA, 15 bp, Homo sapiens
agttttggatttgtg

SEQ ID NO: 950297 - DNA, 15 bp, Homo sapiens
gttttggatttgtgg

SEQ ID NO: 950298 - DNA, 15 bp, Homo sapiens
ttttggatttgtggt

SEQ ID NO: 950299 - DNA, 15 bp, Homo sapiens
tttggatttgtggta

SEQ ID NO: 950300 - DNA, 15 bp, Homo sapiens
ttggatttgtggtaa

SEQ ID NO: 950301 - DNA, 15 bp, Homo sapiens
tggatttgtggtaac

SEQ ID NO: 950302 - DNA, 15 bp, Homo sapiens
ggatttgtggtaaca

SEQ ID NO: 950303 - DNA, 15 bp, Homo sapiens
gatttgtggtaacaa

SEQ ID NO: 950304 - DNA, 15 bp, Homo sapiens
atttgtggtaacaat

SEQ ID NO: 950305 - DNA, 15 bp, Homo sapiens
tttgtggtaacaatt

SEQ ID NO: 950306 - DNA, 15 bp, Homo sapiens
ttgtggtaacaattc

SEQ ID NO: 950307 - DNA, 15 bp, Homo sapiens
tgtggtaacaattcg

SEQ ID NO: 950308 - DNA, 15 bp, Homo sapiens
gtggtaacaattcga

SEQ ID NO: 950309 - DNA, 15 bp, Homo sapiens
tggtaacaattcgat

SEQ ID NO: 950310 - DNA, 15 bp, Homo sapiens
ggtaacaattcgata

SEQ ID NO: 950311 - DNA, 15 bp, Homo sapiens
gtaacaattcgatat

SEQ ID NO: 950312 - DNA, 15 bp, Homo sapiens
taacaattcgatatg

SEQ ID NO: 950313 - DNA, 15 bp, Homo sapiens
aacaattcgatatgc

SEQ ID NO: 950314 - DNA, 15 bp, Homo sapiens
acaattcgatatgca

SEQ ID NO: 950315 - DNA, 15 bp, Homo sapiens
caattcgatatgcag

SEQ ID NO: 950316 - DNA, 15 bp, Homo sapiens
aattcgatatgcaga

SEQ ID NO: 950317 - DNA, 15 bp, Homo sapiens
attcgatatgcagaa

SEQ ID NO: 950318 - DNA, 15 bp, Homo sapiens
ttcgatatgcagaat

SEQ ID NO: 950319 - DNA, 15 bp, Homo sapiens
tcgatatgcagaata

SEQ ID NO: 950320 - DNA, 15 bp, Homo sapiens
cgatatgcagaataa

SEQ ID NO: 950321 - DNA, 15 bp, Homo sapiens
gatatgcagaataat

SEQ ID NO: 950322 - DNA, 15 bp, Homo sapiens
atatgcagaataatc

SEQ ID NO: 950323 - DNA, 15 bp, Homo sapiens
tatgcagaataatct

SEQ ID NO: 950324 - DNA, 15 bp, Homo sapiens
atgcagaataatctc

SEQ ID NO: 950325 - DNA, 15 bp, Homo sapiens
tgcagaataatctca

SEQ ID NO: 950326 - DNA, 15 bp, Homo sapiens
gcagaataatctcat

SEQ ID NO: 950327 - DNA, 15 bp, Homo sapiens
cagaataatctcata

SEQ ID NO: 950328 - DNA, 15 bp, Homo sapiens
agaataatctcatat

SEQ ID NO: 950329 - DNA, 15 bp, Homo sapiens
gaataatctcatatg

SEQ ID NO: 950330 - DNA, 15 bp, Homo sapiens
aataatctcatatgc

SEQ ID NO: 950331 - DNA, 15 bp, Homo sapiens
ataatctcatatgcc

SEQ ID NO: 950332 - DNA, 15 bp, Homo sapiens
taatctcatatgcca

SEQ ID NO: 950333 - DNA, 15 bp, Homo sapiens
aatctcatatgccaa

SEQ ID NO: 950334 - DNA, 15 bp, Homo sapiens
atctcatatgccaag

SEQ ID NO: 950335 - DNA, 15 bp, Homo sapiens
tctcatatgccaaga

SEQ ID NO: 950336 - DNA, 15 bp, Homo sapiens
ctcatatgccaagac

SEQ ID NO: 950337 - DNA, 15 bp, Homo sapiens
tcatatgccaagaca

SEQ ID NO: 950338 - DNA, 15 bp, Homo sapiens
catatgccaagacaa

SEQ ID NO: 950339 - DNA, 15 bp, Homo sapiens
atatgccaagacaac

SEQ ID NO: 950340 - DNA, 15 bp, Homo sapiens
tatgccaagacaact

SEQ ID NO: 950341 - DNA, 15 bp, Homo sapiens
atgccaagacaactc

SEQ ID NO: 950342 - DNA, 15 bp, Homo sapiens
tgccaagacaactcg

SEQ ID NO: 950343 - DNA, 15 bp, Homo sapiens
gccaagacaactcga

SEQ ID NO: 950344 - DNA, 15 bp, Homo sapiens
ccaagacaactcgat

SEQ ID NO: 950345 - DNA, 15 bp, Homo sapiens
caagacaactcgatg

SEQ ID NO: 950346 - DNA, 15 bp, Homo sapiens
aagacaactcgatgc

SEQ ID NO: 950347 - DNA, 15 bp, Homo sapiens
agacaactcgatgcc

SEQ ID NO: 950348 - DNA, 15 bp, Homo sapiens
gacaactcgatgcca

SEQ ID NO: 950349 - DNA, 15 bp, Homo sapiens
acaactcgatgccac

SEQ ID NO: 950350 - DNA, 15 bp, Homo sapiens
caactcgatgccact

SEQ ID NO: 950351 - DNA, 15 bp, Homo sapiens
aactcgatgccactc

SEQ ID NO: 950352 - DNA, 15 bp, Homo sapiens
actcgatgccactct

SEQ ID NO: 950353 - DNA, 15 bp, Homo sapiens
ctcgatgccactctt

SEQ ID NO: 950354 - DNA, 15 bp, Homo sapiens
tcgatgccactcttg

SEQ ID NO: 950355 - DNA, 15 bp, Homo sapiens
cgatgccactcttgg

SEQ ID NO: 950356 - DNA, 15 bp, Homo sapiens
gatgccactcttggc

SEQ ID NO: 950357 - DNA, 15 bp, Homo sapiens
atgccactcttggct

SEQ ID NO: 950358 - DNA, 15 bp, Homo sapiens
tgccactcttggctc

SEQ ID NO: 950359 - DNA, 15 bp, Homo sapiens
gccactcttggctct

SEQ ID NO: 950360 - DNA, 15 bp, Homo sapiens
ccactcttggctctt

SEQ ID NO: 950361 - DNA, 15 bp, Homo sapiens
cactcttggctctta

SEQ ID NO: 950362 - DNA, 15 bp, Homo sapiens
actcttggctcttat

SEQ ID NO: 950363 - DNA, 15 bp, Homo sapiens
ctcttggctcttatt

SEQ ID NO: 950364 - DNA, 15 bp, Homo sapiens
tcttggctcttatta

SEQ ID NO: 950365 - DNA, 15 bp, Homo sapiens
cttggctcttattac

SEQ ID NO: 950366 - DNA, 15 bp, Homo sapiens
ttggctcttattacc

SEQ ID NO: 950367 - DNA, 15 bp, Homo sapiens
tggctcttattacca

SEQ ID NO: 950368 - DNA, 15 bp, Homo sapiens
ggctcttattaccag

SEQ ID NO: 950369 - DNA, 15 bp, Homo sapiens
gctcttattaccagg

SEQ ID NO: 950370 - DNA, 15 bp, Homo sapiens
ctcttattaccagga

SEQ ID NO: 950371 - DNA, 15 bp, Homo sapiens
tcttattaccaggat

SEQ ID NO: 950372 - DNA, 15 bp, Homo sapiens
cttattaccaggata

SEQ ID NO: 950373 - DNA, 15 bp, Homo sapiens
ttattaccaggataa

SEQ ID NO: 950374 - DNA, 15 bp, Homo sapiens
tattaccaggataaa

SEQ ID NO: 950375 - DNA, 15 bp, Homo sapiens
attaccaggataaac

SEQ ID NO: 950376 - DNA, 15 bp, Homo sapiens
ttaccaggataaacc

SEQ ID NO: 950377 - DNA, 15 bp, Homo sapiens
taccaggataaaccc

SEQ ID NO: 950378 - DNA, 15 bp, Homo sapiens
accaggataaaccct

SEQ ID NO: 950379 - DNA, 15 bp, Homo sapiens
ccaggataaaccctt

SEQ ID NO: 950380 - DNA, 15 bp, Homo sapiens
caggataaacccttc

SEQ ID NO: 950381 - DNA, 15 bp, Homo sapiens
aggataaacccttct

SEQ ID NO: 950382 - DNA, 15 bp, Homo sapiens
ggataaacccttctg

SEQ ID NO: 950383 - DNA, 15 bp, Homo sapiens
gataaacccttctga

SEQ ID NO: 950384 - DNA, 15 bp, Homo sapiens
ataaacccttctgac

SEQ ID NO: 950385 - DNA, 15 bp, Homo sapiens
taaacccttctgacc

SEQ ID NO: 950386 - DNA, 15 bp, Homo sapiens
aaacccttctgacct

SEQ ID NO: 950387 - DNA, 15 bp, Homo sapiens
aacccttctgacctc

SEQ ID NO: 950388 - DNA, 15 bp, Homo sapiens
acccttctgacctct

SEQ ID NO: 950389 - DNA, 15 bp, Homo sapiens
cccttctgacctcta

SEQ ID NO: 950390 - DNA, 15 bp, Homo sapiens
ccttctgacctctaa

SEQ ID NO: 950391 - DNA, 15 bp, Homo sapiens
cttctgacctctaat

SEQ ID NO: 950392 - DNA, 15 bp, Homo sapiens
ttctgacctctaatc

SEQ ID NO: 950393 - DNA, 15 bp, Homo sapiens
tctgacctctaatct

SEQ ID NO: 950394 - DNA, 15 bp, Homo sapiens
ctgacctctaatctt

SEQ ID NO: 950395 - DNA, 15 bp, Homo sapiens
tgacctctaatcttt

SEQ ID NO: 950396 - DNA, 15 bp, Homo sapiens
gacctctaatctttc

SEQ ID NO: 950397 - DNA, 15 bp, Homo sapiens
acctctaatctttct

SEQ ID NO: 950398 - DNA, 15 bp, Homo sapiens
cctctaatctttctt

SEQ ID NO: 950399 - DNA, 15 bp, Homo sapiens
ctctaatctttcttg

SEQ ID NO: 950400 - DNA, 15 bp, Homo sapiens
tctaatctttcttgt

SEQ ID NO: 950401 - DNA, 15 bp, Homo sapiens
ctaatctttcttgta

SEQ ID NO: 950402 - DNA, 15 bp, Homo sapiens
taatctttcttgtaa

SEQ ID NO: 950403 - DNA, 15 bp, Homo sapiens
aatctttcttgtaaa

SEQ ID NO: 950404 - DNA, 15 bp, Homo sapiens
atctttcttgtaaaa

SEQ ID NO: 950405 - DNA, 15 bp, Homo sapiens
tctttcttgtaaaag

SEQ ID NO: 950406 - DNA, 15 bp, Homo sapiens
ctttcttgtaaaagc

SEQ ID NO: 950407 - DNA, 15 bp, Homo sapiens
tttcttgtaaaagct

SEQ ID NO: 950408 - DNA, 15 bp, Homo sapiens
ttcttgtaaaagctt

SEQ ID NO: 950409 - DNA, 15 bp, Homo sapiens
tcttgtaaaagcttt

SEQ ID NO: 950410 - DNA, 15 bp, Homo sapiens
cttgtaaaagctttt

SEQ ID NO: 950411 - DNA, 15 bp, Homo sapiens
ttgtaaaagcttttc

SEQ ID NO: 950412 - DNA, 15 bp, Homo sapiens
tgtaaaagcttttct

SEQ ID NO: 950413 - DNA, 15 bp, Homo sapiens
gtaaaagcttttctt

SEQ ID NO: 950414 - DNA, 15 bp, Homo sapiens
taaaagcttttcttt

SEQ ID NO: 950415 - DNA, 15 bp, Homo sapiens
aaaagcttttctttt

SEQ ID NO: 950416 - DNA, 15 bp, Homo sapiens
aaagcttttcttttc

SEQ ID NO: 950417 - DNA, 15 bp, Homo sapiens
aagcttttcttttca

SEQ ID NO: 950418 - DNA, 15 bp, Homo sapiens
agcttttcttttcat

SEQ ID NO: 950419 - DNA, 15 bp, Homo sapiens
gcttttcttttcatt

SEQ ID NO: 950420 - DNA, 15 bp, Homo sapiens
cttttcttttcatta

SEQ ID NO: 950421 - DNA, 15 bp, Homo sapiens
ttttcttttcattaa

SEQ ID NO: 950422 - DNA, 15 bp, Homo sapiens
tttcttttcattaaa

SEQ ID NO: 950423 - DNA, 15 bp, Homo sapiens
ttcttttcattaaat

SEQ ID NO: 950424 - DNA, 15 bp, Homo sapiens
tcttttcattaaatt

SEQ ID NO: 950425 - DNA, 15 bp, Homo sapiens
cttttcattaaattg

SEQ ID NO: 950426 - DNA, 15 bp, Homo sapiens
ttttcattaaattgt

SEQ ID NO: 950427 - DNA, 15 bp, Homo sapiens
tttcattaaattgtc

SEQ ID NO: 950428 - DNA, 15 bp, Homo sapiens
ttcattaaattgtca

SEQ ID NO: 950429 - DNA, 15 bp, Homo sapiens
tcattaaattgtcag

SEQ ID NO: 950430 - DNA, 15 bp, Homo sapiens
cattaaattgtcagc

SEQ ID NO: 950431 - DNA, 15 bp, Homo sapiens
attaaattgtcagca

SEQ ID NO: 950432 - DNA, 15 bp, Homo sapiens
ttaaattgtcagcac

SEQ ID NO: 950433 - DNA, 15 bp, Homo sapiens
taaattgtcagcact

SEQ ID NO: 950434 - DNA, 15 bp, Homo sapiens
aaattgtcagcactt

SEQ ID NO: 950435 - DNA, 15 bp, Homo sapiens
aattgtcagcactta

SEQ ID NO: 950436 - DNA, 15 bp, Homo sapiens
attgtcagcacttaa

SEQ ID NO: 950437 - DNA, 15 bp, Homo sapiens
ttgtcagcacttaaa

SEQ ID NO: 950438 - DNA, 15 bp, Homo sapiens
tgtcagcacttaaat

SEQ ID NO: 950439 - DNA, 15 bp, Homo sapiens
gtcagcacttaaatg

SEQ ID NO: 950440 - DNA, 15 bp, Homo sapiens
tcagcacttaaatga

SEQ ID NO: 950441 - DNA, 15 bp, Homo sapiens
cagcacttaaatgat

SEQ ID NO: 950442 - DNA, 15 bp, Homo sapiens
agcacttaaatgata

SEQ ID NO: 950443 - DNA, 15 bp, Homo sapiens
gcacttaaatgatat

SEQ ID NO: 950444 - DNA, 15 bp, Homo sapiens
cacttaaatgatata

SEQ ID NO: 950445 - DNA, 15 bp, Homo sapiens
acttaaatgatataa

SEQ ID NO: 950446 - DNA, 15 bp, Homo sapiens
cttaaatgatataac

SEQ ID NO: 950447 - DNA, 15 bp, Homo sapiens
ttaaatgatataact

SEQ ID NO: 950448 - DNA, 15 bp, Homo sapiens
taaatgatataactt

SEQ ID NO: 950449 - DNA, 15 bp, Homo sapiens
aaatgatataactta

SEQ ID NO: 950450 - DNA, 15 bp, Homo sapiens
aatgatataacttat

SEQ ID NO: 950451 - DNA, 15 bp, Homo sapiens
atgatataacttata

SEQ ID NO: 950452 - DNA, 15 bp, Homo sapiens
tgatataacttatag

SEQ ID NO: 950453 - DNA, 15 bp, Homo sapiens
gatataacttatagt

SEQ ID NO: 950454 - DNA, 15 bp, Homo sapiens
atataacttatagtt

SEQ ID NO: 950455 - DNA, 15 bp, Homo sapiens
tataacttatagtta

SEQ ID NO: 950456 - DNA, 15 bp, Homo sapiens
ataacttatagttat

SEQ ID NO: 950457 - DNA, 15 bp, Homo sapiens
taacttatagttatt

SEQ ID NO: 950458 - DNA, 15 bp, Homo sapiens
aacttatagttattg

SEQ ID NO: 950459 - DNA, 15 bp, Homo sapiens
acttatagttattga

SEQ ID NO: 950460 - DNA, 15 bp, Homo sapiens
cttatagttattgaa

SEQ ID NO: 950461 - DNA, 15 bp, Homo sapiens
ttatagttattgaaa

SEQ ID NO: 950462 - DNA, 15 bp, Homo sapiens
tatagttattgaaaa

SEQ ID NO: 950463 - DNA, 15 bp, Homo sapiens
atagttattgaaaaa

SEQ ID NO: 950464 - DNA, 15 bp, Homo sapiens
tagttattgaaaaaa

SEQ ID NO: 950465 - DNA, 15 bp, Homo sapiens
agttattgaaaaaaa

SEQ ID NO: 950466 - DNA, 15 bp, Homo sapiens
gttattgaaaaaaat

SEQ ID NO: 950467 - DNA, 15 bp, Homo sapiens
ttattgaaaaaaatg

SEQ ID NO: 950468 - DNA, 15 bp, Homo sapiens
tattgaaaaaaatgc

SEQ ID NO: 950469 - DNA, 15 bp, Homo sapiens
attgaaaaaaatgca

SEQ ID NO: 950470 - DNA, 15 bp, Homo sapiens
ttgaaaaaaatgcag

SEQ ID NO: 950471 - DNA, 15 bp, Homo sapiens
tgaaaaaaatgcagt

SEQ ID NO: 950472 - DNA, 15 bp, Homo sapiens
gaaaaaaatgcagta

SEQ ID NO: 950473 - DNA, 15 bp, Homo sapiens
aaaaaaatgcagtag

SEQ ID NO: 950474 - DNA, 15 bp, Homo sapiens
aaaaaatgcagtaga

SEQ ID NO: 950475 - DNA, 15 bp, Homo sapiens
aaaaatgcagtagat

SEQ ID NO: 950476 - DNA, 15 bp, Homo sapiens
aaaatgcagtagatt

SEQ ID NO: 950477 - DNA, 15 bp, Homo sapiens
aaatgcagtagattc

SEQ ID NO: 950478 - DNA, 15 bp, Homo sapiens
aatgcagtagattca

SEQ ID NO: 950479 - DNA, 15 bp, Homo sapiens
atgcagtagattcaa

SEQ ID NO: 950480 - DNA, 15 bp, Homo sapiens
tgcagtagattcaag

SEQ ID NO: 950481 - DNA, 15 bp, Homo sapiens
gcagtagattcaagg

SEQ ID NO: 950482 - DNA, 15 bp, Homo sapiens
cagtagattcaaggt

SEQ ID NO: 950483 - DNA, 15 bp, Homo sapiens
agtagattcaaggtt

SEQ ID NO: 950484 - DNA, 15 bp, Homo sapiens
gtagattcaaggttc

SEQ ID NO: 950485 - DNA, 15 bp, Homo sapiens
tagattcaaggttca

SEQ ID NO: 950486 - DNA, 15 bp, Homo sapiens
agattcaaggttcaa

SEQ ID NO: 950487 - DNA, 15 bp, Homo sapiens
gattcaaggttcaat

SEQ ID NO: 950488 - DNA, 15 bp, Homo sapiens
attcaaggttcaata

SEQ ID NO: 950489 - DNA, 15 bp, Homo sapiens
ttcaaggttcaatac

SEQ ID NO: 950490 - DNA, 15 bp, Homo sapiens
tcaaggttcaatact

SEQ ID NO: 950491 - DNA, 15 bp, Homo sapiens
caaggttcaatacta

SEQ ID NO: 950492 - DNA, 15 bp, Homo sapiens
aaggttcaatactag

SEQ ID NO: 950493 - DNA, 15 bp, Homo sapiens
aggttcaatactagc

SEQ ID NO: 950494 - DNA, 15 bp, Homo sapiens
ggttcaatactagca

SEQ ID NO: 950495 - DNA, 15 bp, Homo sapiens
gttcaatactagcac

SEQ ID NO: 950496 - DNA, 15 bp, Homo sapiens
ttcaatactagcaca

SEQ ID NO: 950497 - DNA, 15 bp, Homo sapiens
tcaatactagcacat

SEQ ID NO: 950498 - DNA, 15 bp, Homo sapiens
caatactagcacata

SEQ ID NO: 950499 - DNA, 15 bp, Homo sapiens
aatactagcacatag

SEQ ID NO: 950500 - DNA, 15 bp, Homo sapiens
atactagcacataga

SEQ ID NO: 950501 - DNA, 15 bp, Homo sapiens
tactagcacatagag

SEQ ID NO: 950502 - DNA, 15 bp, Homo sapiens
actagcacatagaga

SEQ ID NO: 950503 - DNA, 15 bp, Homo sapiens
ctagcacatagagag

SEQ ID NO: 950504 - DNA, 15 bp, Homo sapiens
tagcacatagagagt

SEQ ID NO: 950505 - DNA, 15 bp, Homo sapiens
agcacatagagagtg

SEQ ID NO: 950506 - DNA, 15 bp, Homo sapiens
gcacatagagagtga

SEQ ID NO: 950507 - DNA, 15 bp, Homo sapiens
cacatagagagtgaa

SEQ ID NO: 950508 - DNA, 15 bp, Homo sapiens
acatagagagtgaat

SEQ ID NO: 950509 - DNA, 15 bp, Homo sapiens
catagagagtgaatg

SEQ ID NO: 950510 - DNA, 15 bp, Homo sapiens
atagagagtgaatgg

SEQ ID NO: 950511 - DNA, 15 bp, Homo sapiens
tagagagtgaatggg

SEQ ID NO: 950512 - DNA, 15 bp, Homo sapiens
agagagtgaatggga

SEQ ID NO: 950513 - DNA, 15 bp, Homo sapiens
gagagtgaatgggat

SEQ ID NO: 950514 - DNA, 15 bp, Homo sapiens
agagtgaatgggatt

SEQ ID NO: 950515 - DNA, 15 bp, Homo sapiens
gagtgaatgggattt

SEQ ID NO: 950516 - DNA, 15 bp, Homo sapiens
agtgaatgggatttg

SEQ ID NO: 950517 - DNA, 15 bp, Homo sapiens
gtgaatgggatttgt

SEQ ID NO: 950518 - DNA, 15 bp, Homo sapiens
tgaatgggatttgtt

SEQ ID NO: 950519 - DNA, 15 bp, Homo sapiens
gaatgggatttgttt

SEQ ID NO: 950520 - DNA, 15 bp, Homo sapiens
aatgggatttgtttc

SEQ ID NO: 950521 - DNA, 15 bp, Homo sapiens
atgggatttgtttct

SEQ ID NO: 950522 - DNA, 15 bp, Homo sapiens
tgggatttgtttctg

SEQ ID NO: 950523 - DNA, 15 bp, Homo sapiens
gggatttgtttctga

SEQ ID NO: 950524 - DNA, 15 bp, Homo sapiens
ggatttgtttctgat

SEQ ID NO: 950525 - DNA, 15 bp, Homo sapiens
gatttgtttctgata

SEQ ID NO: 950526 - DNA, 15 bp, Homo sapiens
atttgtttctgataa

SEQ ID NO: 950527 - DNA, 15 bp, Homo sapiens
tttgtttctgataaa

SEQ ID NO: 950528 - DNA, 15 bp, Homo sapiens
ttgtttctgataaac

SEQ ID NO: 950529 - DNA, 15 bp, Homo sapiens
tgtttctgataaacc

SEQ ID NO: 950530 - DNA, 15 bp, Homo sapiens
gtttctgataaaccc

SEQ ID NO: 950531 - DNA, 15 bp, Homo sapiens
tttctgataaaccca

SEQ ID NO: 950532 - DNA, 15 bp, Homo sapiens
ttctgataaacccac

SEQ ID NO: 950533 - DNA, 15 bp, Homo sapiens
tctgataaacccacc

SEQ ID NO: 950534 - DNA, 15 bp, Homo sapiens
ctgataaacccacct

SEQ ID NO: 950535 - DNA, 15 bp, Homo sapiens
tgataaacccacctt

SEQ ID NO: 950536 - DNA, 15 bp, Homo sapiens
gataaacccaccttg

SEQ ID NO: 950537 - DNA, 15 bp, Homo sapiens
ataaacccaccttga

SEQ ID NO: 950538 - DNA, 15 bp, Homo sapiens
taaacccaccttgaa

SEQ ID NO: 950539 - DNA, 15 bp, Homo sapiens
aaacccaccttgaac

SEQ ID NO: 950540 - DNA, 15 bp, Homo sapiens
aacccaccttgaact

SEQ ID NO: 950541 - DNA, 15 bp, Homo sapiens
acccaccttgaactt

SEQ ID NO: 950542 - DNA, 15 bp, Homo sapiens
cccaccttgaacttt

SEQ ID NO: 950543 - DNA, 15 bp, Homo sapiens
ccaccttgaactttt

SEQ ID NO: 950544 - DNA, 15 bp, Homo sapiens
caccttgaacttttg

SEQ ID NO: 950545 - DNA, 15 bp, Homo sapiens
accttgaacttttgt

SEQ ID NO: 950546 - DNA, 15 bp, Homo sapiens
ccttgaacttttgtt

SEQ ID NO: 950547 - DNA, 15 bp, Homo sapiens
cttgaacttttgtta

SEQ ID NO: 950548 - DNA, 15 bp, Homo sapiens
ttgaacttttgttac

SEQ ID NO: 950549 - DNA, 15 bp, Homo sapiens
tgaacttttgttaca

SEQ ID NO: 950550 - DNA, 15 bp, Homo sapiens
gaacttttgttacaa

SEQ ID NO: 950551 - DNA, 15 bp, Homo sapiens
aacttttgttacaat

SEQ ID NO: 950552 - DNA, 15 bp, Homo sapiens
acttttgttacaata

SEQ ID NO: 950553 - DNA, 15 bp, Homo sapiens
cttttgttacaataa

SEQ ID NO: 950554 - DNA, 15 bp, Homo sapiens
ttttgttacaataac

SEQ ID NO: 950555 - DNA, 15 bp, Homo sapiens
tttgttacaataact

SEQ ID NO: 950556 - DNA, 15 bp, Homo sapiens
ttgttacaataactt

SEQ ID NO: 950557 - DNA, 15 bp, Homo sapiens
tgttacaataactta

SEQ ID NO: 950558 - DNA, 15 bp, Homo sapiens
gttacaataacttaa

SEQ ID NO: 950559 - DNA, 15 bp, Homo sapiens
ttacaataacttaaa

SEQ ID NO: 950560 - DNA, 15 bp, Homo sapiens
tacaataacttaaag

SEQ ID NO: 950561 - DNA, 15 bp, Homo sapiens
acaataacttaaagg

SEQ ID NO: 950562 - DNA, 15 bp, Homo sapiens
caataacttaaagga

SEQ ID NO: 950563 - DNA, 15 bp, Homo sapiens
aataacttaaaggaa

SEQ ID NO: 950564 - DNA, 15 bp, Homo sapiens
ataacttaaaggaat

SEQ ID NO: 950565 - DNA, 15 bp, Homo sapiens
taacttaaaggaatt

SEQ ID NO: 950566 - DNA, 15 bp, Homo sapiens
aacttaaaggaattc

SEQ ID NO: 950567 - DNA, 15 bp, Homo sapiens
acttaaaggaattct

SEQ ID NO: 950568 - DNA, 15 bp, Homo sapiens
cttaaaggaattctt

SEQ ID NO: 950569 - DNA, 15 bp, Homo sapiens
ttaaaggaattcttg

SEQ ID NO: 950570 - DNA, 15 bp, Homo sapiens
taaaggaattcttgc

SEQ ID NO: 950571 - DNA, 15 bp, Homo sapiens
aaaggaattcttgca

SEQ ID NO: 950572 - DNA, 15 bp, Homo sapiens
aaggaattcttgcaa

SEQ ID NO: 950573 - DNA, 15 bp, Homo sapiens
aggaattcttgcaaa

SEQ ID NO: 950574 - DNA, 15 bp, Homo sapiens
ggaattcttgcaaat

SEQ ID NO: 950575 - DNA, 15 bp, Homo sapiens
gaattcttgcaaata

SEQ ID NO: 950576 - DNA, 15 bp, Homo sapiens
aattcttgcaaatat

SEQ ID NO: 950577 - DNA, 15 bp, Homo sapiens
attcttgcaaatatc

SEQ ID NO: 950578 - DNA, 15 bp, Homo sapiens
ttcttgcaaatatct

SEQ ID NO: 950579 - DNA, 15 bp, Homo sapiens
tcttgcaaatatctc

SEQ ID NO: 950580 - DNA, 15 bp, Homo sapiens
cttgcaaatatctct

SEQ ID NO: 950581 - DNA, 15 bp, Homo sapiens
ttgcaaatatctctg

SEQ ID NO: 950582 - DNA, 15 bp, Homo sapiens
tgcaaatatctctga

SEQ ID NO: 950583 - DNA, 15 bp, Homo sapiens
gcaaatatctctgag

SEQ ID NO: 950584 - DNA, 15 bp, Homo sapiens
caaatatctctgagg

SEQ ID NO: 950585 - DNA, 15 bp, Homo sapiens
aaatatctctgagga

SEQ ID NO: 950586 - DNA, 15 bp, Homo sapiens
aatatctctgaggac

SEQ ID NO: 950587 - DNA, 15 bp, Homo sapiens
atatctctgaggact

SEQ ID NO: 950588 - DNA, 15 bp, Homo sapiens
tatctctgaggactc

SEQ ID NO: 950589 - DNA, 15 bp, Homo sapiens
atctctgaggactca

SEQ ID NO: 950590 - DNA, 15 bp, Homo sapiens
tctctgaggactcaa

SEQ ID NO: 950591 - DNA, 15 bp, Homo sapiens
ctctgaggactcaac

SEQ ID NO: 950592 - DNA, 15 bp, Homo sapiens
tctgaggactcaaca

SEQ ID NO: 950593 - DNA, 15 bp, Homo sapiens
ctgaggactcaacat

SEQ ID NO: 950594 - DNA, 15 bp, Homo sapiens
tgaggactcaacata

SEQ ID NO: 950595 - DNA, 15 bp, Homo sapiens
gaggactcaacataa

SEQ ID NO: 950596 - DNA, 15 bp, Homo sapiens
aggactcaacataat

SEQ ID NO: 950597 - DNA, 15 bp, Homo sapiens
ggactcaacataata

SEQ ID NO: 950598 - DNA, 15 bp, Homo sapiens
gactcaacataataa

SEQ ID NO: 950599 - DNA, 15 bp, Homo sapiens
actcaacataataaa

SEQ ID NO: 950600 - DNA, 15 bp, Homo sapiens
ctcaacataataaat

SEQ ID NO: 950601 - DNA, 15 bp, Homo sapiens
tcaacataataaata

SEQ ID NO: 950602 - DNA, 15 bp, Homo sapiens
caacataataaatat

SEQ ID NO: 950603 - DNA, 15 bp, Homo sapiens
aacataataaatatt

SEQ ID NO: 950604 - DNA, 15 bp, Homo sapiens
acataataaatattt

SEQ ID NO: 950605 - DNA, 15 bp, Homo sapiens
cataataaatatttc

SEQ ID NO: 950606 - DNA, 15 bp, Homo sapiens
ataataaatatttca

SEQ ID NO: 950607 - DNA, 15 bp, Homo sapiens
taataaatatttcag

SEQ ID NO: 950608 - DNA, 15 bp, Homo sapiens
aataaatatttcaga

SEQ ID NO: 950609 - DNA, 15 bp, Homo sapiens
ataaatatttcagag

SEQ ID NO: 950610 - DNA, 15 bp, Homo sapiens
taaatatttcagaga

SEQ ID NO: 950611 - DNA, 15 bp, Homo sapiens
aaatatttcagagaa

SEQ ID NO: 950612 - DNA, 15 bp, Homo sapiens
aatatttcagagaat

SEQ ID NO: 950613 - DNA, 15 bp, Homo sapiens
atatttcagagaatg

SEQ ID NO: 950614 - DNA, 15 bp, Homo sapiens
tatttcagagaatgt

SEQ ID NO: 950615 - DNA, 15 bp, Homo sapiens
atttcagagaatgtt

SEQ ID NO: 950616 - DNA, 15 bp, Homo sapiens
tttcagagaatgttg

SEQ ID NO: 950617 - DNA, 15 bp, Homo sapiens
ttcagagaatgttgt

SEQ ID NO: 950618 - DNA, 15 bp, Homo sapiens
tcagagaatgttgtt

SEQ ID NO: 950619 - DNA, 15 bp, Homo sapiens
cagagaatgttgttt

SEQ ID NO: 950620 - DNA, 15 bp, Homo sapiens
agagaatgttgtttg

SEQ ID NO: 950621 - DNA, 15 bp, Homo sapiens
gagaatgttgtttga

SEQ ID NO: 950622 - DNA, 15 bp, Homo sapiens
agaatgttgtttgaa

SEQ ID NO: 950623 - DNA, 15 bp, Homo sapiens
gaatgttgtttgaaa

SEQ ID NO: 950624 - DNA, 15 bp, Homo sapiens
aatgttgtttgaaaa

SEQ ID NO: 950625 - DNA, 15 bp, Homo sapiens
atgttgtttgaaaat

SEQ ID NO: 950626 - DNA, 15 bp, Homo sapiens
tgttgtttgaaaatg

SEQ ID NO: 950627 - DNA, 15 bp, Homo sapiens
gttgtttgaaaatgc

SEQ ID NO: 950628 - DNA, 15 bp, Homo sapiens
ttgtttgaaaatgct

SEQ ID NO: 950629 - DNA, 15 bp, Homo sapiens
tgtttgaaaatgctg

SEQ ID NO: 950630 - DNA, 15 bp, Homo sapiens
gtttgaaaatgctgg

SEQ ID NO: 950631 - DNA, 15 bp, Homo sapiens
tttgaaaatgctggc

SEQ ID NO: 950632 - DNA, 15 bp, Homo sapiens
ttgaaaatgctggct

SEQ ID NO: 950633 - DNA, 15 bp, Homo sapiens
tgaaaatgctggctc

SEQ ID NO: 950634 - DNA, 15 bp, Homo sapiens
gaaaatgctggctct

SEQ ID NO: 950635 - DNA, 15 bp, Homo sapiens
aaaatgctggctctg

SEQ ID NO: 950636 - DNA, 15 bp, Homo sapiens
aaatgctggctctga

SEQ ID NO: 950637 - DNA, 15 bp, Homo sapiens
aatgctggctctgat

SEQ ID NO: 950638 - DNA, 15 bp, Homo sapiens
atgctggctctgatt

SEQ ID NO: 950639 - DNA, 15 bp, Homo sapiens
tgctggctctgattt

SEQ ID NO: 950640 - DNA, 15 bp, Homo sapiens
gctggctctgatttt

SEQ ID NO: 950641 - DNA, 15 bp, Homo sapiens
ctggctctgattttc

SEQ ID NO: 950642 - DNA, 15 bp, Homo sapiens
tggctctgattttct

SEQ ID NO: 950643 - DNA, 15 bp, Homo sapiens
ggctctgattttctt

SEQ ID NO: 950644 - DNA, 15 bp, Homo sapiens
gctctgattttcttt

SEQ ID NO: 950645 - DNA, 15 bp, Homo sapiens
ctctgattttctttc

SEQ ID NO: 950646 - DNA, 15 bp, Homo sapiens
tctgattttctttca

SEQ ID NO: 950647 - DNA, 15 bp, Homo sapiens
ctgattttctttcat

SEQ ID NO: 950648 - DNA, 15 bp, Homo sapiens
tgattttctttcatt

SEQ ID NO: 950649 - DNA, 15 bp, Homo sapiens
gattttctttcattt

SEQ ID NO: 950650 - DNA, 15 bp, Homo sapiens
attttctttcatttg

SEQ ID NO: 950651 - DNA, 15 bp, Homo sapiens
ttttctttcatttgt

SEQ ID NO: 950652 - DNA, 15 bp, Homo sapiens
tttctttcatttgta

SEQ ID NO: 950653 - DNA, 15 bp, Homo sapiens
ttctttcatttgtag

SEQ ID NO: 950654 - DNA, 15 bp, Homo sapiens
tctttcatttgtagt

SEQ ID NO: 950655 - DNA, 15 bp, Homo sapiens
ctttcatttgtagta

SEQ ID NO: 950656 - DNA, 15 bp, Homo sapiens
tttcatttgtagtag

SEQ ID NO: 950657 - DNA, 15 bp, Homo sapiens
ttcatttgtagtagc

SEQ ID NO: 950658 - DNA, 15 bp, Homo sapiens
tcatttgtagtagcc

SEQ ID NO: 950659 - DNA, 15 bp, Homo sapiens
catttgtagtagcca

SEQ ID NO: 950660 - DNA, 15 bp, Homo sapiens
atttgtagtagccac

SEQ ID NO: 950661 - DNA, 15 bp, Homo sapiens
tttgtagtagccaca

SEQ ID NO: 950662 - DNA, 15 bp, Homo sapiens
ttgtagtagccacaa

SEQ ID NO: 950663 - DNA, 15 bp, Homo sapiens
tgtagtagccacaaa

SEQ ID NO: 950664 - DNA, 15 bp, Homo sapiens
gtagtagccacaaat

SEQ ID NO: 950665 - DNA, 15 bp, Homo sapiens
tagtagccacaaata

SEQ ID NO: 950666 - DNA, 15 bp, Homo sapiens
agtagccacaaataa

SEQ ID NO: 950667 - DNA, 15 bp, Homo sapiens
gtagccacaaataat

SEQ ID NO: 950668 - DNA, 15 bp, Homo sapiens
tagccacaaataata

SEQ ID NO: 950669 - DNA, 15 bp, Homo sapiens
agccacaaataatac

SEQ ID NO: 950670 - DNA, 15 bp, Homo sapiens
gccacaaataatacc

SEQ ID NO: 950671 - DNA, 15 bp, Homo sapiens
ccacaaataatacca

SEQ ID NO: 950672 - DNA, 15 bp, Homo sapiens
cacaaataataccag

SEQ ID NO: 950673 - DNA, 15 bp, Homo sapiens
acaaataataccagt

SEQ ID NO: 950674 - DNA, 15 bp, Homo sapiens
caaataataccagtc

SEQ ID NO: 950675 - DNA, 15 bp, Homo sapiens
aaataataccagtcc

SEQ ID NO: 950676 - DNA, 15 bp, Homo sapiens
aataataccagtccc

SEQ ID NO: 950677 - DNA, 15 bp, Homo sapiens
ataataccagtccca

SEQ ID NO: 950678 - DNA, 15 bp, Homo sapiens
taataccagtcccag

SEQ ID NO: 950679 - DNA, 15 bp, Homo sapiens
aataccagtcccagc

SEQ ID NO: 950680 - DNA, 15 bp, Homo sapiens
ataccagtcccagcg

SEQ ID NO: 950681 - DNA, 15 bp, Homo sapiens
taccagtcccagcgc

SEQ ID NO: 950682 - DNA, 15 bp, Homo sapiens
accagtcccagcgct

SEQ ID NO: 950683 - DNA, 15 bp, Homo sapiens
ccagtcccagcgctg

SEQ ID NO: 950684 - DNA, 15 bp, Homo sapiens
cagtcccagcgctgt

SEQ ID NO: 950685 - DNA, 15 bp, Homo sapiens
agtcccagcgctgtg

SEQ ID NO: 950686 - DNA, 15 bp, Homo sapiens
gtcccagcgctgtgc

SEQ ID NO: 950687 - DNA, 15 bp, Homo sapiens
tcccagcgctgtgct

SEQ ID NO: 950688 - DNA, 15 bp, Homo sapiens
cccagcgctgtgctg

SEQ ID NO: 950689 - DNA, 15 bp, Homo sapiens
ccagcgctgtgctgc

SEQ ID NO: 950690 - DNA, 15 bp, Homo sapiens
cagcgctgtgctgca

SEQ ID NO: 950691 - DNA, 15 bp, Homo sapiens
agcgctgtgctgcag

SEQ ID NO: 950692 - DNA, 15 bp, Homo sapiens
gcgctgtgctgcagt

SEQ ID NO: 950693 - DNA, 15 bp, Homo sapiens
cgctgtgctgcagta

SEQ ID NO: 950694 - DNA, 15 bp, Homo sapiens
gctgtgctgcagtat

SEQ ID NO: 950695 - DNA, 15 bp, Homo sapiens
ctgtgctgcagtatg

SEQ ID NO: 950696 - DNA, 15 bp, Homo sapiens
tgtgctgcagtatgt

SEQ ID NO: 950697 - DNA, 15 bp, Homo sapiens
gtgctgcagtatgta

SEQ ID NO: 950698 - DNA, 15 bp, Homo sapiens
tgctgcagtatgtaa

SEQ ID NO: 950699 - DNA, 15 bp, Homo sapiens
gctgcagtatgtaaa

SEQ ID NO: 950700 - DNA, 15 bp, Homo sapiens
ctgcagtatgtaaag

SEQ ID NO: 950701 - DNA, 15 bp, Homo sapiens
tgcagtatgtaaagc

SEQ ID NO: 950702 - DNA, 15 bp, Homo sapiens
gcagtatgtaaagcc

SEQ ID NO: 950703 - DNA, 15 bp, Homo sapiens
cagtatgtaaagcct

SEQ ID NO: 950704 - DNA, 15 bp, Homo sapiens
agtatgtaaagccta

SEQ ID NO: 950705 - DNA, 15 bp, Homo sapiens
gtatgtaaagcctag

SEQ ID NO: 950706 - DNA, 15 bp, Homo sapiens
tatgtaaagcctagc

SEQ ID NO: 950707 - DNA, 15 bp, Homo sapiens
atgtaaagcctagct

SEQ ID NO: 950708 - DNA, 15 bp, Homo sapiens
tgtaaagcctagctc

SEQ ID NO: 950709 - DNA, 15 bp, Homo sapiens
gtaaagcctagctct

SEQ ID NO: 950710 - DNA, 15 bp, Homo sapiens
taaagcctagctctc

SEQ ID NO: 950711 - DNA, 15 bp, Homo sapiens
aaagcctagctctct

SEQ ID NO: 950712 - DNA, 15 bp, Homo sapiens
aagcctagctctctc

SEQ ID NO: 950713 - DNA, 15 bp, Homo sapiens
agcctagctctctca

SEQ ID NO: 950714 - DNA, 15 bp, Homo sapiens
gcctagctctctcac

SEQ ID NO: 950715 - DNA, 15 bp, Homo sapiens
cctagctctctcaca

SEQ ID NO: 950716 - DNA, 15 bp, Homo sapiens
ctagctctctcacaa

SEQ ID NO: 950717 - DNA, 15 bp, Homo sapiens
tagctctctcacaaa

SEQ ID NO: 950718 - DNA, 15 bp, Homo sapiens
agctctctcacaaag

SEQ ID NO: 950719 - DNA, 15 bp, Homo sapiens
gctctctcacaaagt

SEQ ID NO: 950720 - DNA, 15 bp, Homo sapiens
ctctctcacaaagtg

SEQ ID NO: 950721 - DNA, 15 bp, Homo sapiens
tctctcacaaagtgc

SEQ ID NO: 950722 - DNA, 15 bp, Homo sapiens
ctctcacaaagtgct

SEQ ID NO: 950723 - DNA, 15 bp, Homo sapiens
tctcacaaagtgctt

SEQ ID NO: 950724 - DNA, 15 bp, Homo sapiens
ctcacaaagtgcttg

SEQ ID NO: 950725 - DNA, 15 bp, Homo sapiens
tcacaaagtgcttgt

SEQ ID NO: 950726 - DNA, 15 bp, Homo sapiens
cacaaagtgcttgtc

SEQ ID NO: 950727 - DNA, 15 bp, Homo sapiens
acaaagtgcttgtct

SEQ ID NO: 950728 - DNA, 15 bp, Homo sapiens
caaagtgcttgtctt

SEQ ID NO: 950729 - DNA, 15 bp, Homo sapiens
aaagtgcttgtcttt

SEQ ID NO: 950730 - DNA, 15 bp, Homo sapiens
aagtgcttgtctttc

SEQ ID NO: 950731 - DNA, 15 bp, Homo sapiens
agtgcttgtctttca

SEQ ID NO: 950732 - DNA, 15 bp, Homo sapiens
gtgcttgtctttcaa

SEQ ID NO: 950733 - DNA, 15 bp, Homo sapiens
tgcttgtctttcaag

SEQ ID NO: 950734 - DNA, 15 bp, Homo sapiens
gcttgtctttcaaga

SEQ ID NO: 950735 - DNA, 15 bp, Homo sapiens
cttgtctttcaagat

SEQ ID NO: 950736 - DNA, 15 bp, Homo sapiens
ttgtctttcaagatc

SEQ ID NO: 950737 - DNA, 15 bp, Homo sapiens
tgtctttcaagatct

SEQ ID NO: 950738 - DNA, 15 bp, Homo sapiens
gtctttcaagatctt

SEQ ID NO: 950739 - DNA, 15 bp, Homo sapiens
tctttcaagatcttc

SEQ ID NO: 950740 - DNA, 15 bp, Homo sapiens
ctttcaagatcttcc

SEQ ID NO: 950741 - DNA, 15 bp, Homo sapiens
tttcaagatcttccc

SEQ ID NO: 950742 - DNA, 15 bp, Homo sapiens
ttcaagatcttccct

SEQ ID NO: 950743 - DNA, 15 bp, Homo sapiens
tcaagatcttccctt

SEQ ID NO: 950744 - DNA, 15 bp, Homo sapiens
caagatcttccctta

SEQ ID NO: 950745 - DNA, 15 bp, Homo sapiens
aagatcttcccttaa

SEQ ID NO: 950746 - DNA, 15 bp, Homo sapiens
agatcttcccttaag

SEQ ID NO: 950747 - DNA, 15 bp, Homo sapiens
gatcttcccttaagt

SEQ ID NO: 950748 - DNA, 15 bp, Homo sapiens
atcttcccttaagtc

SEQ ID NO: 950749 - DNA, 15 bp, Homo sapiens
tcttcccttaagtca

SEQ ID NO: 950750 - DNA, 15 bp, Homo sapiens
cttcccttaagtcag

SEQ ID NO: 950751 - DNA, 15 bp, Homo sapiens
ttcccttaagtcaga

SEQ ID NO: 950752 - DNA, 15 bp, Homo sapiens
tcccttaagtcagat

SEQ ID NO: 950753 - DNA, 15 bp, Homo sapiens
cccttaagtcagatc

SEQ ID NO: 950754 - DNA, 15 bp, Homo sapiens
ccttaagtcagatct

SEQ ID NO: 950755 - DNA, 15 bp, Homo sapiens
cttaagtcagatctt

SEQ ID NO: 950756 - DNA, 15 bp, Homo sapiens
ttaagtcagatctta

SEQ ID NO: 950757 - DNA, 15 bp, Homo sapiens
taagtcagatcttaa

SEQ ID NO: 950758 - DNA, 15 bp, Homo sapiens
aagtcagatcttaaa

SEQ ID NO: 950759 - DNA, 15 bp, Homo sapiens
agtcagatcttaaaa

SEQ ID NO: 950760 - DNA, 15 bp, Homo sapiens
gtcagatcttaaaat

SEQ ID NO: 950761 - DNA, 15 bp, Homo sapiens
tcagatcttaaaatc

SEQ ID NO: 950762 - DNA, 15 bp, Homo sapiens
cagatcttaaaatca

SEQ ID NO: 950763 - DNA, 15 bp, Homo sapiens
agatcttaaaatcaa

SEQ ID NO: 950764 - DNA, 15 bp, Homo sapiens
gatcttaaaatcaaa

SEQ ID NO: 950765 - DNA, 15 bp, Homo sapiens
atcttaaaatcaaag

SEQ ID NO: 950766 - DNA, 15 bp, Homo sapiens
tcttaaaatcaaagc

SEQ ID NO: 950767 - DNA, 15 bp, Homo sapiens
cttaaaatcaaagct

SEQ ID NO: 950768 - DNA, 15 bp, Homo sapiens
ttaaaatcaaagctg

SEQ ID NO: 950769 - DNA, 15 bp, Homo sapiens
taaaatcaaagctga

SEQ ID NO: 950770 - DNA, 15 bp, Homo sapiens
aaaatcaaagctgac

SEQ ID NO: 950771 - DNA, 15 bp, Homo sapiens
aaatcaaagctgacc

SEQ ID NO: 950772 - DNA, 15 bp, Homo sapiens
aatcaaagctgacca

SEQ ID NO: 950773 - DNA, 15 bp, Homo sapiens
atcaaagctgaccag

SEQ ID NO: 950774 - DNA, 15 bp, Homo sapiens
tcaaagctgaccagt

SEQ ID NO: 950775 - DNA, 15 bp, Homo sapiens
caaagctgaccagta

SEQ ID NO: 950776 - DNA, 15 bp, Homo sapiens
aaagctgaccagtaa

SEQ ID NO: 950777 - DNA, 15 bp, Homo sapiens
aagctgaccagtaat

SEQ ID NO: 950778 - DNA, 15 bp, Homo sapiens
agctgaccagtaatg

SEQ ID NO: 950779 - DNA, 15 bp, Homo sapiens
gctgaccagtaatga

SEQ ID NO: 950780 - DNA, 15 bp, Homo sapiens
ctgaccagtaatgac

SEQ ID NO: 950781 - DNA, 15 bp, Homo sapiens
tgaccagtaatgaca

SEQ ID NO: 950782 - DNA, 15 bp, Homo sapiens
gaccagtaatgacaa

SEQ ID NO: 950783 - DNA, 15 bp, Homo sapiens
accagtaatgacaaa

SEQ ID NO: 950784 - DNA, 15 bp, Homo sapiens
ccagtaatgacaaat

SEQ ID NO: 950785 - DNA, 15 bp, Homo sapiens
cagtaatgacaaatg

SEQ ID NO: 950786 - DNA, 15 bp, Homo sapiens
agtaatgacaaatgc

SEQ ID NO: 950787 - DNA, 15 bp, Homo sapiens
gtaatgacaaatgcc

SEQ ID NO: 950788 - DNA, 15 bp, Homo sapiens
taatgacaaatgcct

SEQ ID NO: 950789 - DNA, 15 bp, Homo sapiens
aatgacaaatgccta

SEQ ID NO: 950790 - DNA, 15 bp, Homo sapiens
atgacaaatgcctat

SEQ ID NO: 950791 - DNA, 15 bp, Homo sapiens
tgacaaatgcctata

SEQ ID NO: 950792 - DNA, 15 bp, Homo sapiens
gacaaatgcctataa

SEQ ID NO: 950793 - DNA, 15 bp, Homo sapiens
acaaatgcctataaa

SEQ ID NO: 950794 - DNA, 15 bp, Homo sapiens
caaatgcctataaaa

SEQ ID NO: 950795 - DNA, 15 bp, Homo sapiens
aaatgcctataaaac

SEQ ID NO: 950796 - DNA, 15 bp, Homo sapiens
aatgcctataaaact

SEQ ID NO: 950797 - DNA, 15 bp, Homo sapiens
atgcctataaaactc

SEQ ID NO: 950798 - DNA, 15 bp, Homo sapiens
tgcctataaaactct

SEQ ID NO: 950799 - DNA, 15 bp, Homo sapiens
gcctataaaactctt

SEQ ID NO: 950800 - DNA, 15 bp, Homo sapiens
cctataaaactctta

SEQ ID NO: 950801 - DNA, 15 bp, Homo sapiens
ctataaaactcttaa

SEQ ID NO: 950802 - DNA, 15 bp, Homo sapiens
tataaaactcttaaa

SEQ ID NO: 950803 - DNA, 15 bp, Homo sapiens
ataaaactcttaaac

SEQ ID NO: 950804 - DNA, 15 bp, Homo sapiens
taaaactcttaaacc

SEQ ID NO: 950805 - DNA, 15 bp, Homo sapiens
aaaactcttaaacct

SEQ ID NO: 950806 - DNA, 15 bp, Homo sapiens
aaactcttaaacctg

SEQ ID NO: 950807 - DNA, 15 bp, Homo sapiens
aactcttaaacctga

SEQ ID NO: 950808 - DNA, 15 bp, Homo sapiens
actcttaaacctgaa

SEQ ID NO: 950809 - DNA, 15 bp, Homo sapiens
ctcttaaacctgaat

SEQ ID NO: 950810 - DNA, 15 bp, Homo sapiens
tcttaaacctgaata

SEQ ID NO: 950811 - DNA, 15 bp, Homo sapiens
cttaaacctgaatag

SEQ ID NO: 950812 - DNA, 15 bp, Homo sapiens
ttaaacctgaatagg

SEQ ID NO: 950813 - DNA, 15 bp, Homo sapiens
taaacctgaataggc

SEQ ID NO: 950814 - DNA, 15 bp, Homo sapiens
aaacctgaataggca

SEQ ID NO: 950815 - DNA, 15 bp, Homo sapiens
aacctgaataggcat

SEQ ID NO: 950816 - DNA, 15 bp, Homo sapiens
acctgaataggcatc

SEQ ID NO: 950817 - DNA, 15 bp, Homo sapiens
cctgaataggcatca

SEQ ID NO: 950818 - DNA, 15 bp, Homo sapiens
ctgaataggcatcaa

SEQ ID NO: 950819 - DNA, 15 bp, Homo sapiens
tgaataggcatcaaa

SEQ ID NO: 950820 - DNA, 15 bp, Homo sapiens
gaataggcatcaaaa

SEQ ID NO: 950821 - DNA, 15 bp, Homo sapiens
aataggcatcaaaaa

SEQ ID NO: 950822 - DNA, 15 bp, Homo sapiens
ataggcatcaaaaag

SEQ ID NO: 950823 - DNA, 15 bp, Homo sapiens
taggcatcaaaaagt

SEQ ID NO: 950824 - DNA, 15 bp, Homo sapiens
aggcatcaaaaagtg

SEQ ID NO: 950825 - DNA, 15 bp, Homo sapiens
ggcatcaaaaagtgg

SEQ ID NO: 950826 - DNA, 15 bp, Homo sapiens
gcatcaaaaagtggg

SEQ ID NO: 950827 - DNA, 15 bp, Homo sapiens
atcaaaaagtgggac

SEQ ID NO: 950828 - DNA, 15 bp, Homo sapiens
tcaaaaagtgggaca

SEQ ID NO: 950829 - DNA, 15 bp, Homo sapiens
caaaaagtgggacat

SEQ ID NO: 950830 - DNA, 15 bp, Homo sapiens
aaaaagtgggacata

SEQ ID NO: 950831 - DNA, 15 bp, Homo sapiens
aaaagtgggacatat

SEQ ID NO: 950832 - DNA, 15 bp, Homo sapiens
aaagtgggacatatt

SEQ ID NO: 950833 - DNA, 15 bp, Homo sapiens
aagtgggacatattt

SEQ ID NO: 950834 - DNA, 15 bp, Homo sapiens
agtgggacatatttt

SEQ ID NO: 950835 - DNA, 15 bp, Homo sapiens
gtgggacatattttc

SEQ ID NO: 950836 - DNA, 15 bp, Homo sapiens
tgggacatattttca

SEQ ID NO: 950837 - DNA, 15 bp, Homo sapiens
gggacatattttcat

SEQ ID NO: 950838 - DNA, 15 bp, Homo sapiens
ggacatattttcatt

SEQ ID NO: 950839 - DNA, 15 bp, Homo sapiens
gacatattttcattt

SEQ ID NO: 950840 - DNA, 15 bp, Homo sapiens
acatattttcatttc

SEQ ID NO: 950841 - DNA, 15 bp, Homo sapiens
catattttcatttcc

SEQ ID NO: 950842 - DNA, 15 bp, Homo sapiens
atattttcatttcct

SEQ ID NO: 950843 - DNA, 15 bp, Homo sapiens
tattttcatttcctc

SEQ ID NO: 950844 - DNA, 15 bp, Homo sapiens
attttcatttcctca

SEQ ID NO: 950845 - DNA, 15 bp, Homo sapiens
ttttcatttcctcat

SEQ ID NO: 950846 - DNA, 15 bp, Homo sapiens
tttcatttcctcatt

SEQ ID NO: 950847 - DNA, 15 bp, Homo sapiens
ttcatttcctcattt

SEQ ID NO: 950848 - DNA, 15 bp, Homo sapiens
tcatttcctcatttt

SEQ ID NO: 950849 - DNA, 15 bp, Homo sapiens
catttcctcattttg

SEQ ID NO: 950850 - DNA, 15 bp, Homo sapiens
atttcctcattttga

SEQ ID NO: 950851 - DNA, 15 bp, Homo sapiens
tttcctcattttgac

SEQ ID NO: 950852 - DNA, 15 bp, Homo sapiens
ttcctcattttgaca

SEQ ID NO: 950853 - DNA, 15 bp, Homo sapiens
tcctcattttgacaa

SEQ ID NO: 950854 - DNA, 15 bp, Homo sapiens
cctcattttgacaat

SEQ ID NO: 950855 - DNA, 15 bp, Homo sapiens
ctcattttgacaatt

SEQ ID NO: 950856 - DNA, 15 bp, Homo sapiens
tcattttgacaattt

SEQ ID NO: 950857 - DNA, 15 bp, Homo sapiens
cattttgacaattta

SEQ ID NO: 950858 - DNA, 15 bp, Homo sapiens
attttgacaatttat

SEQ ID NO: 950859 - DNA, 15 bp, Homo sapiens
ttttgacaatttatc

SEQ ID NO: 950860 - DNA, 15 bp, Homo sapiens
tttgacaatttatca

SEQ ID NO: 950861 - DNA, 15 bp, Homo sapiens
ttgacaatttatcac

SEQ ID NO: 950862 - DNA, 15 bp, Homo sapiens
tgacaatttatcact

SEQ ID NO: 950863 - DNA, 15 bp, Homo sapiens
gacaatttatcacta

SEQ ID NO: 950864 - DNA, 15 bp, Homo sapiens
acaatttatcactac

SEQ ID NO: 950865 - DNA, 15 bp, Homo sapiens
caatttatcactaca

SEQ ID NO: 950866 - DNA, 15 bp, Homo sapiens
aatttatcactacag

SEQ ID NO: 950867 - DNA, 15 bp, Homo sapiens
atttatcactacagc

SEQ ID NO: 950868 - DNA, 15 bp, Homo sapiens
tttatcactacagcc

SEQ ID NO: 950869 - DNA, 15 bp, Homo sapiens
ttatcactacagccc

SEQ ID NO: 950870 - DNA, 15 bp, Homo sapiens
tatcactacagccct

SEQ ID NO: 950871 - DNA, 15 bp, Homo sapiens
atcactacagccctg

SEQ ID NO: 950872 - DNA, 15 bp, Homo sapiens
tcactacagccctgt

SEQ ID NO: 950873 - DNA, 15 bp, Homo sapiens
cactacagccctgtg

SEQ ID NO: 950874 - DNA, 15 bp, Homo sapiens
actacagccctgtga

SEQ ID NO: 950875 - DNA, 15 bp, Homo sapiens
ctacagccctgtgaa

SEQ ID NO: 950876 - DNA, 15 bp, Homo sapiens
tacagccctgtgaat

SEQ ID NO: 950877 - DNA, 15 bp, Homo sapiens
acagccctgtgaatg

SEQ ID NO: 950878 - DNA, 15 bp, Homo sapiens
cagccctgtgaatgc

SEQ ID NO: 950879 - DNA, 15 bp, Homo sapiens
agccctgtgaatgca

SEQ ID NO: 950880 - DNA, 15 bp, Homo sapiens
gccctgtgaatgcat

SEQ ID NO: 950881 - DNA, 15 bp, Homo sapiens
ccctgtgaatgcatt

SEQ ID NO: 950882 - DNA, 15 bp, Homo sapiens
cctgtgaatgcatta

SEQ ID NO: 950883 - DNA, 15 bp, Homo sapiens
ctgtgaatgcattat

SEQ ID NO: 950884 - DNA, 15 bp, Homo sapiens
tgtgaatgcattatt

SEQ ID NO: 950885 - DNA, 15 bp, Homo sapiens
gtgaatgcattattt

SEQ ID NO: 950886 - DNA, 15 bp, Homo sapiens
tgaatgcattattta

SEQ ID NO: 950887 - DNA, 15 bp, Homo sapiens
gaatgcattatttag

SEQ ID NO: 950888 - DNA, 15 bp, Homo sapiens
aatgcattatttagg

SEQ ID NO: 950889 - DNA, 15 bp, Homo sapiens
atgcattatttaggc

SEQ ID NO: 950890 - DNA, 15 bp, Homo sapiens
tgcattatttaggct

SEQ ID NO: 950891 - DNA, 15 bp, Homo sapiens
gcattatttaggcta

SEQ ID NO: 950892 - DNA, 15 bp, Homo sapiens
cattatttaggctat

SEQ ID NO: 950893 - DNA, 15 bp, Homo sapiens
attatttaggctata

SEQ ID NO: 950894 - DNA, 15 bp, Homo sapiens
ttatttaggctataa

SEQ ID NO: 950895 - DNA, 15 bp, Homo sapiens
tatttaggctataaa

SEQ ID NO: 950896 - DNA, 15 bp, Homo sapiens
atttaggctataaac

SEQ ID NO: 950897 - DNA, 15 bp, Homo sapiens
tttaggctataaacg

SEQ ID NO: 950898 - DNA, 15 bp, Homo sapiens
ttaggctataaacgg

SEQ ID NO: 950899 - DNA, 15 bp, Homo sapiens
taggctataaacgga

SEQ ID NO: 950900 - DNA, 15 bp, Homo sapiens
aggctataaacggag

SEQ ID NO: 950901 - DNA, 15 bp, Homo sapiens
ggctataaacggaga

SEQ ID NO: 950902 - DNA, 15 bp, Homo sapiens
gctataaacggagag

SEQ ID NO: 950903 - DNA, 15 bp, Homo sapiens
ctataaacggagagg

SEQ ID NO: 950904 - DNA, 15 bp, Homo sapiens
tataaacggagaggg

SEQ ID NO: 950905 - DNA, 15 bp, Homo sapiens
ataaacggagaggga

SEQ ID NO: 950906 - DNA, 15 bp, Homo sapiens
taaacggagagggaa

SEQ ID NO: 950907 - DNA, 15 bp, Homo sapiens
aaacggagagggaag

SEQ ID NO: 950908 - DNA, 15 bp, Homo sapiens
aacggagagggaagc

SEQ ID NO: 950909 - DNA, 15 bp, Homo sapiens
acggagagggaagct

SEQ ID NO: 950910 - DNA, 15 bp, Homo sapiens
cggagagggaagcta

SEQ ID NO: 950911 - DNA, 15 bp, Homo sapiens
ggagagggaagctac

SEQ ID NO: 950912 - DNA, 15 bp, Homo sapiens
gagagggaagctacc

SEQ ID NO: 950913 - DNA, 15 bp, Homo sapiens
agagggaagctacca

SEQ ID NO: 950914 - DNA, 15 bp, Homo sapiens
gagggaagctaccaa

SEQ ID NO: 950915 - DNA, 15 bp, Homo sapiens
agggaagctaccaat

SEQ ID NO: 950916 - DNA, 15 bp, Homo sapiens
gggaagctaccaata

SEQ ID NO: 950917 - DNA, 15 bp, Homo sapiens
ggaagctaccaataa

SEQ ID NO: 950918 - DNA, 15 bp, Homo sapiens
gaagctaccaataaa

SEQ ID NO: 950919 - DNA, 15 bp, Homo sapiens
aagctaccaataaat

SEQ ID NO: 950920 - DNA, 15 bp, Homo sapiens
agctaccaataaatg

SEQ ID NO: 950921 - DNA, 15 bp, Homo sapiens
gctaccaataaatgt

SEQ ID NO: 950922 - DNA, 15 bp, Homo sapiens
ctaccaataaatgtc

SEQ ID NO: 950923 - DNA, 15 bp, Homo sapiens
taccaataaatgtcc

SEQ ID NO: 950924 - DNA, 15 bp, Homo sapiens
accaataaatgtccc

SEQ ID NO: 950925 - DNA, 15 bp, Homo sapiens
ccaataaatgtccca

SEQ ID NO: 950926 - DNA, 15 bp, Homo sapiens
caataaatgtcccag

SEQ ID NO: 950927 - DNA, 15 bp, Homo sapiens
aataaatgtcccaga

SEQ ID NO: 950928 - DNA, 15 bp, Homo sapiens
ataaatgtcccagat

SEQ ID NO: 950929 - DNA, 15 bp, Homo sapiens
taaatgtcccagata

SEQ ID NO: 950930 - DNA, 15 bp, Homo sapiens
aaatgtcccagatat

SEQ ID NO: 950931 - DNA, 15 bp, Homo sapiens
aatgtcccagatatg

SEQ ID NO: 950932 - DNA, 15 bp, Homo sapiens
atgtcccagatatgt

SEQ ID NO: 950933 - DNA, 15 bp, Homo sapiens
tgtcccagatatgta

SEQ ID NO: 950934 - DNA, 15 bp, Homo sapiens
gtcccagatatgtat

SEQ ID NO: 950935 - DNA, 15 bp, Homo sapiens
tcccagatatgtatt

SEQ ID NO: 950936 - DNA, 15 bp, Homo sapiens
cccagatatgtattc

SEQ ID NO: 950937 - DNA, 15 bp, Homo sapiens
ccagatatgtattca

SEQ ID NO: 950938 - DNA, 15 bp, Homo sapiens
cagatatgtattcag

SEQ ID NO: 950939 - DNA, 15 bp, Homo sapiens
agatatgtattcagg

SEQ ID NO: 950940 - DNA, 15 bp, Homo sapiens
gatatgtattcagga

SEQ ID NO: 950941 - DNA, 15 bp, Homo sapiens
atatgtattcaggac

SEQ ID NO: 950942 - DNA, 15 bp, Homo sapiens
tatgtattcaggact

SEQ ID NO: 950943 - DNA, 15 bp, Homo sapiens
atgtattcaggactg

SEQ ID NO: 950944 - DNA, 15 bp, Homo sapiens
tgtattcaggactgg

SEQ ID NO: 950945 - DNA, 15 bp, Homo sapiens
gtattcaggactggt

SEQ ID NO: 950946 - DNA, 15 bp, Homo sapiens
tattcaggactggta

SEQ ID NO: 950947 - DNA, 15 bp, Homo sapiens
attcaggactggtac

SEQ ID NO: 950948 - DNA, 15 bp, Homo sapiens
ttcaggactggtacc

SEQ ID NO: 950949 - DNA, 15 bp, Homo sapiens
tcaggactggtacct

SEQ ID NO: 950950 - DNA, 15 bp, Homo sapiens
caggactggtacctt

SEQ ID NO: 950951 - DNA, 15 bp, Homo sapiens
aggactggtacctta

SEQ ID NO: 950952 - DNA, 15 bp, Homo sapiens
ggactggtaccttat

SEQ ID NO: 950953 - DNA, 15 bp, Homo sapiens
gactggtaccttatt

SEQ ID NO: 950954 - DNA, 15 bp, Homo sapiens
actggtaccttattt

SEQ ID NO: 950955 - DNA, 15 bp, Homo sapiens
ctggtaccttatttg

SEQ ID NO: 950956 - DNA, 15 bp, Homo sapiens
tggtaccttatttgc

SEQ ID NO: 950957 - DNA, 15 bp, Homo sapiens
ggtaccttatttgct

SEQ ID NO: 950958 - DNA, 15 bp, Homo sapiens
gtaccttatttgctc

SEQ ID NO: 950959 - DNA, 15 bp, Homo sapiens
taccttatttgctct

SEQ ID NO: 950960 - DNA, 15 bp, Homo sapiens
accttatttgctctc

SEQ ID NO: 950961 - DNA, 15 bp, Homo sapiens
ccttatttgctctca

SEQ ID NO: 950962 - DNA, 15 bp, Homo sapiens
cttatttgctctcag

SEQ ID NO: 950963 - DNA, 15 bp, Homo sapiens
ttatttgctctcagc

SEQ ID NO: 950964 - DNA, 15 bp, Homo sapiens
tatttgctctcagca

SEQ ID NO: 950965 - DNA, 15 bp, Homo sapiens
atttgctctcagcat

SEQ ID NO: 950966 - DNA, 15 bp, Homo sapiens
tttgctctcagcata

SEQ ID NO: 950967 - DNA, 15 bp, Homo sapiens
tgctctcagcataat

SEQ ID NO: 950968 - DNA, 15 bp, Homo sapiens
gctctcagcataata

SEQ ID NO: 950969 - DNA, 15 bp, Homo sapiens
ctctcagcataatac

SEQ ID NO: 950970 - DNA, 15 bp, Homo sapiens
tctcagcataatact

SEQ ID NO: 950971 - DNA, 15 bp, Homo sapiens
ctcagcataatacta

SEQ ID NO: 950972 - DNA, 15 bp, Homo sapiens
tcagcataatactag

SEQ ID NO: 950973 - DNA, 15 bp, Homo sapiens
cagcataatactagg

SEQ ID NO: 950974 - DNA, 15 bp, Homo sapiens
agcataatactaggt

SEQ ID NO: 950975 - DNA, 15 bp, Homo sapiens
gcataatactaggtc

SEQ ID NO: 950976 - DNA, 15 bp, Homo sapiens
cataatactaggtca

SEQ ID NO: 950977 - DNA, 15 bp, Homo sapiens
ataatactaggtcat

SEQ ID NO: 950978 - DNA, 15 bp, Homo sapiens
taatactaggtcatc

SEQ ID NO: 950979 - DNA, 15 bp, Homo sapiens
aatactaggtcatca

SEQ ID NO: 950980 - DNA, 15 bp, Homo sapiens
atactaggtcatcat

SEQ ID NO: 950981 - DNA, 15 bp, Homo sapiens
tactaggtcatcatt

SEQ ID NO: 950982 - DNA, 15 bp, Homo sapiens
actaggtcatcattt

SEQ ID NO: 950983 - DNA, 15 bp, Homo sapiens
ctaggtcatcatttg

SEQ ID NO: 950984 - DNA, 15 bp, Homo sapiens
taggtcatcatttgt

SEQ ID NO: 950985 - DNA, 15 bp, Homo sapiens
aggtcatcatttgtt

SEQ ID NO: 950986 - DNA, 15 bp, Homo sapiens
ggtcatcatttgttt

SEQ ID NO: 950987 - DNA, 15 bp, Homo sapiens
gtcatcatttgtttt

SEQ ID NO: 950988 - DNA, 15 bp, Homo sapiens
tcatcatttgtttta

SEQ ID NO: 950989 - DNA, 15 bp, Homo sapiens
catcatttgttttat

SEQ ID NO: 950990 - DNA, 15 bp, Homo sapiens
atcatttgttttatt

SEQ ID NO: 950991 - DNA, 15 bp, Homo sapiens
tcatttgttttattg

SEQ ID NO: 950992 - DNA, 15 bp, Homo sapiens
catttgttttattgg

SEQ ID NO: 950993 - DNA, 15 bp, Homo sapiens
atttgttttattggc

SEQ ID NO: 950994 - DNA, 15 bp, Homo sapiens
tttgttttattggcc

SEQ ID NO: 950995 - DNA, 15 bp, Homo sapiens
ttgttttattggccc

SEQ ID NO: 950996 - DNA, 15 bp, Homo sapiens
tgttttattggcccc

SEQ ID NO: 950997 - DNA, 15 bp, Homo sapiens
gttttattggcccca

SEQ ID NO: 950998 - DNA, 15 bp, Homo sapiens
ttttattggccccac

SEQ ID NO: 950999 - DNA, 15 bp, Homo sapiens
tttattggccccact

SEQ ID NO: 951000 - DNA, 15 bp, Homo sapiens
ttattggccccacta

SEQ ID NO: 951001 - DNA, 15 bp, Homo sapiens
tattggccccactat

SEQ ID NO: 951002 - DNA, 15 bp, Homo sapiens
attggccccactatc

SEQ ID NO: 951003 - DNA, 15 bp, Homo sapiens
ttggccccactatct

SEQ ID NO: 951004 - DNA, 15 bp, Homo sapiens
tggccccactatctt

SEQ ID NO: 951005 - DNA, 15 bp, Homo sapiens
ggccccactatcttg

SEQ ID NO: 951006 - DNA, 15 bp, Homo sapiens
gccccactatcttgt

SEQ ID NO: 951007 - DNA, 15 bp, Homo sapiens
ccccactatcttgtt

SEQ ID NO: 951008 - DNA, 15 bp, Homo sapiens
cccactatcttgttt

SEQ ID NO: 951009 - DNA, 15 bp, Homo sapiens
ccactatcttgtttt

SEQ ID NO: 951010 - DNA, 15 bp, Homo sapiens
cactatcttgttttt

SEQ ID NO: 951011 - DNA, 15 bp, Homo sapiens
actatcttgtttttt

SEQ ID NO: 951012 - DNA, 15 bp, Homo sapiens
ctatcttgtttttta

SEQ ID NO: 951013 - DNA, 15 bp, Homo sapiens
tatcttgttttttaa

SEQ ID NO: 951014 - DNA, 15 bp, Homo sapiens
atcttgttttttaaa

SEQ ID NO: 951015 - DNA, 15 bp, Homo sapiens
tcttgttttttaaag

SEQ ID NO: 951016 - DNA, 15 bp, Homo sapiens
cttgttttttaaagt

SEQ ID NO: 951017 - DNA, 15 bp, Homo sapiens
ttgttttttaaagta

SEQ ID NO: 951018 - DNA, 15 bp, Homo sapiens
tgttttttaaagtaa

SEQ ID NO: 951019 - DNA, 15 bp, Homo sapiens
gttttttaaagtaaa

SEQ ID NO: 951020 - DNA, 15 bp, Homo sapiens
ttttttaaagtaaat

SEQ ID NO: 951021 - DNA, 15 bp, Homo sapiens
tttttaaagtaaatt

SEQ ID NO: 951022 - DNA, 15 bp, Homo sapiens
ttttaaagtaaatta

SEQ ID NO: 951023 - DNA, 15 bp, Homo sapiens
tttaaagtaaattat

SEQ ID NO: 951024 - DNA, 15 bp, Homo sapiens
ttaaagtaaattata

SEQ ID NO: 951025 - DNA, 15 bp, Homo sapiens
taaagtaaattataa

SEQ ID NO: 951026 - DNA, 15 bp, Homo sapiens
aaagtaaattataac

SEQ ID NO: 951027 - DNA, 15 bp, Homo sapiens
aagtaaattataaca

SEQ ID NO: 951028 - DNA, 15 bp, Homo sapiens
agtaaattataacat

SEQ ID NO: 951029 - DNA, 15 bp, Homo sapiens
gtaaattataacata

SEQ ID NO: 951030 - DNA, 15 bp, Homo sapiens
taaattataacatac

SEQ ID NO: 951031 - DNA, 15 bp, Homo sapiens
aaattataacataca

SEQ ID NO: 951032 - DNA, 15 bp, Homo sapiens
aattataacatacag

SEQ ID NO: 951033 - DNA, 15 bp, Homo sapiens
attataacatacaga

SEQ ID NO: 951034 - DNA, 15 bp, Homo sapiens
ttataacatacagaa

SEQ ID NO: 951035 - DNA, 15 bp, Homo sapiens
tataacatacagaac

SEQ ID NO: 951036 - DNA, 15 bp, Homo sapiens
ataacatacagaact

SEQ ID NO: 951037 - DNA, 15 bp, Homo sapiens
taacatacagaactg

SEQ ID NO: 951038 - DNA, 15 bp, Homo sapiens
aacatacagaactgt

SEQ ID NO: 951039 - DNA, 15 bp, Homo sapiens
acatacagaactgtg

SEQ ID NO: 951040 - DNA, 15 bp, Homo sapiens
catacagaactgtgc

SEQ ID NO: 951041 - DNA, 15 bp, Homo sapiens
atacagaactgtgca

SEQ ID NO: 951042 - DNA, 15 bp, Homo sapiens
tacagaactgtgcat

SEQ ID NO: 951043 - DNA, 15 bp, Homo sapiens
acagaactgtgcatg

SEQ ID NO: 951044 - DNA, 15 bp, Homo sapiens
cagaactgtgcatga

SEQ ID NO: 951045 - DNA, 15 bp, Homo sapiens
agaactgtgcatgaa

SEQ ID NO: 951046 - DNA, 15 bp, Homo sapiens
gaactgtgcatgaaa

SEQ ID NO: 951047 - DNA, 15 bp, Homo sapiens
aactgtgcatgaaat

SEQ ID NO: 951048 - DNA, 15 bp, Homo sapiens
actgtgcatgaaatg

SEQ ID NO: 951049 - DNA, 15 bp, Homo sapiens
ctgtgcatgaaatga

SEQ ID NO: 951050 - DNA, 15 bp, Homo sapiens
tgtgcatgaaatgaa

SEQ ID NO: 951051 - DNA, 15 bp, Homo sapiens
gtgcatgaaatgaaa

SEQ ID NO: 951052 - DNA, 15 bp, Homo sapiens
tgcatgaaatgaaaa

SEQ ID NO: 951053 - DNA, 15 bp, Homo sapiens
gcatgaaatgaaaaa

SEQ ID NO: 951054 - DNA, 15 bp, Homo sapiens
catgaaatgaaaaag

SEQ ID NO: 951055 - DNA, 15 bp, Homo sapiens
atgaaatgaaaaagt

SEQ ID NO: 951056 - DNA, 15 bp, Homo sapiens
tgaaatgaaaaagta

SEQ ID NO: 951057 - DNA, 15 bp, Homo sapiens
gaaatgaaaaagtac

SEQ ID NO: 951058 - DNA, 15 bp, Homo sapiens
aaatgaaaaagtaca

SEQ ID NO: 951059 - DNA, 15 bp, Homo sapiens
aatgaaaaagtacag

SEQ ID NO: 951060 - DNA, 15 bp, Homo sapiens
atgaaaaagtacagc

SEQ ID NO: 951061 - DNA, 15 bp, Homo sapiens
tgaaaaagtacagct

SEQ ID NO: 951062 - DNA, 15 bp, Homo sapiens
gaaaaagtacagctc

SEQ ID NO: 951063 - DNA, 15 bp, Homo sapiens
aaaaagtacagctca

SEQ ID NO: 951064 - DNA, 15 bp, Homo sapiens
aaaagtacagctcaa

SEQ ID NO: 951065 - DNA, 15 bp, Homo sapiens
aaagtacagctcaag

SEQ ID NO: 951066 - DNA, 15 bp, Homo sapiens
aagtacagctcaagt

SEQ ID NO: 951067 - DNA, 15 bp, Homo sapiens
agtacagctcaagta

SEQ ID NO: 951068 - DNA, 15 bp, Homo sapiens
gtacagctcaagtat

SEQ ID NO: 951069 - DNA, 15 bp, Homo sapiens
tacagctcaagtatg

SEQ ID NO: 951070 - DNA, 15 bp, Homo sapiens
acagctcaagtatga

SEQ ID NO: 951071 - DNA, 15 bp, Homo sapiens
cagctcaagtatgac

SEQ ID NO: 951072 - DNA, 15 bp, Homo sapiens
agctcaagtatgaca

SEQ ID NO: 951073 - DNA, 15 bp, Homo sapiens
gctcaagtatgacaa

SEQ ID NO: 951074 - DNA, 15 bp, Homo sapiens
ctcaagtatgacaaa

SEQ ID NO: 951075 - DNA, 15 bp, Homo sapiens
tcaagtatgacaaac

SEQ ID NO: 951076 - DNA, 15 bp, Homo sapiens
caagtatgacaaaca

SEQ ID NO: 951077 - DNA, 15 bp, Homo sapiens
aagtatgacaaacag

SEQ ID NO: 951078 - DNA, 15 bp, Homo sapiens
agtatgacaaacaga

SEQ ID NO: 951079 - DNA, 15 bp, Homo sapiens
gtatgacaaacagat

SEQ ID NO: 951080 - DNA, 15 bp, Homo sapiens
tatgacaaacagatt

SEQ ID NO: 951081 - DNA, 15 bp, Homo sapiens
atgacaaacagattc

SEQ ID NO: 951082 - DNA, 15 bp, Homo sapiens
tgacaaacagattcg

SEQ ID NO: 951083 - DNA, 15 bp, Homo sapiens
gacaaacagattcgt

SEQ ID NO: 951084 - DNA, 15 bp, Homo sapiens
acaaacagattcgta

SEQ ID NO: 951085 - DNA, 15 bp, Homo sapiens
caaacagattcgtaa

SEQ ID NO: 951086 - DNA, 15 bp, Homo sapiens
aaacagattcgtaac

SEQ ID NO: 951087 - DNA, 15 bp, Homo sapiens
aacagattcgtaacc

SEQ ID NO: 951088 - DNA, 15 bp, Homo sapiens
acagattcgtaacca

SEQ ID NO: 951089 - DNA, 15 bp, Homo sapiens
cagattcgtaaccac

SEQ ID NO: 951090 - DNA, 15 bp, Homo sapiens
agattcgtaaccacc

SEQ ID NO: 951091 - DNA, 15 bp, Homo sapiens
gattcgtaaccaccg

SEQ ID NO: 951092 - DNA, 15 bp, Homo sapiens
attcgtaaccaccgt

SEQ ID NO: 951093 - DNA, 15 bp, Homo sapiens
ttcgtaaccaccgtg

SEQ ID NO: 951094 - DNA, 15 bp, Homo sapiens
tcgtaaccaccgtgt

SEQ ID NO: 951095 - DNA, 15 bp, Homo sapiens
cgtaaccaccgtgta

SEQ ID NO: 951096 - DNA, 15 bp, Homo sapiens
gtaaccaccgtgtaa

SEQ ID NO: 951097 - DNA, 15 bp, Homo sapiens
taaccaccgtgtaac

SEQ ID NO: 951098 - DNA, 15 bp, Homo sapiens
aaccaccgtgtaacc

SEQ ID NO: 951099 - DNA, 15 bp, Homo sapiens
accaccgtgtaacca

SEQ ID NO: 951100 - DNA, 15 bp, Homo sapiens
ccaccgtgtaaccac

SEQ ID NO: 951101 - DNA, 15 bp, Homo sapiens
caccgtgtaaccacc

SEQ ID NO: 951102 - DNA, 15 bp, Homo sapiens
accgtgtaaccacct

SEQ ID NO: 951103 - DNA, 15 bp, Homo sapiens
ccgtgtaaccacctt

SEQ ID NO: 951104 - DNA, 15 bp, Homo sapiens
cgtgtaaccacctta

SEQ ID NO: 951105 - DNA, 15 bp, Homo sapiens
gtgtaaccaccttaa

SEQ ID NO: 951106 - DNA, 15 bp, Homo sapiens
tgtaaccaccttaag

SEQ ID NO: 951107 - DNA, 15 bp, Homo sapiens
gtaaccaccttaagg

SEQ ID NO: 951108 - DNA, 15 bp, Homo sapiens
taaccaccttaaggg

SEQ ID NO: 951109 - DNA, 15 bp, Homo sapiens
aaccaccttaagggt

SEQ ID NO: 951110 - DNA, 15 bp, Homo sapiens
accaccttaagggta

SEQ ID NO: 951111 - DNA, 15 bp, Homo sapiens
ccaccttaagggtaa

SEQ ID NO: 951112 - DNA, 15 bp, Homo sapiens
caccttaagggtaaa

SEQ ID NO: 951113 - DNA, 15 bp, Homo sapiens
accttaagggtaaag

SEQ ID NO: 951114 - DNA, 15 bp, Homo sapiens
ccttaagggtaaaga

SEQ ID NO: 951115 - DNA, 15 bp, Homo sapiens
cttaagggtaaagaa

SEQ ID NO: 951116 - DNA, 15 bp, Homo sapiens
ttaagggtaaagaaa

SEQ ID NO: 951117 - DNA, 15 bp, Homo sapiens
taagggtaaagaaat

SEQ ID NO: 951118 - DNA, 15 bp, Homo sapiens
aagggtaaagaaata

SEQ ID NO: 951119 - DNA, 15 bp, Homo sapiens
agggtaaagaaatac

SEQ ID NO: 951120 - DNA, 15 bp, Homo sapiens
gggtaaagaaataca

SEQ ID NO: 951121 - DNA, 15 bp, Homo sapiens
ggtaaagaaatacaa

SEQ ID NO: 951122 - DNA, 15 bp, Homo sapiens
gtaaagaaatacaac

SEQ ID NO: 951123 - DNA, 15 bp, Homo sapiens
taaagaaatacaaca

SEQ ID NO: 951124 - DNA, 15 bp, Homo sapiens
aaagaaatacaacat

SEQ ID NO: 951125 - DNA, 15 bp, Homo sapiens
aagaaatacaacatt

SEQ ID NO: 951126 - DNA, 15 bp, Homo sapiens
agaaatacaacattt

SEQ ID NO: 951127 - DNA, 15 bp, Homo sapiens
gaaatacaacatttt

SEQ ID NO: 951128 - DNA, 15 bp, Homo sapiens
aaatacaacattttc

SEQ ID NO: 951129 - DNA, 15 bp, Homo sapiens
aatacaacattttct

SEQ ID NO: 951130 - DNA, 15 bp, Homo sapiens
atacaacattttctg

SEQ ID NO: 951131 - DNA, 15 bp, Homo sapiens
tacaacattttctgt

SEQ ID NO: 951132 - DNA, 15 bp, Homo sapiens
acaacattttctgta

SEQ ID NO: 951133 - DNA, 15 bp, Homo sapiens
caacattttctgtac

SEQ ID NO: 951134 - DNA, 15 bp, Homo sapiens
aacattttctgtacc

SEQ ID NO: 951135 - DNA, 15 bp, Homo sapiens
acattttctgtaccc

SEQ ID NO: 951136 - DNA, 15 bp, Homo sapiens
cattttctgtacccc

SEQ ID NO: 951137 - DNA, 15 bp, Homo sapiens
attttctgtacccca

SEQ ID NO: 951138 - DNA, 15 bp, Homo sapiens
ttttctgtaccccaa

SEQ ID NO: 951139 - DNA, 15 bp, Homo sapiens
tttctgtaccccaaa

SEQ ID NO: 951140 - DNA, 15 bp, Homo sapiens
ttctgtaccccaaaa

SEQ ID NO: 951141 - DNA, 15 bp, Homo sapiens
tctgtaccccaaaaa

SEQ ID NO: 951142 - DNA, 15 bp, Homo sapiens
ctgtaccccaaaaac

SEQ ID NO: 951143 - DNA, 15 bp, Homo sapiens
tgtaccccaaaaaca

SEQ ID NO: 951144 - DNA, 15 bp, Homo sapiens
taccccaaaaacacc

SEQ ID NO: 951145 - DNA, 15 bp, Homo sapiens
accccaaaaacaccc

SEQ ID NO: 951146 - DNA, 15 bp, Homo sapiens
ccccaaaaacaccct

SEQ ID NO: 951147 - DNA, 15 bp, Homo sapiens
cccaaaaacacccta

SEQ ID NO: 951148 - DNA, 15 bp, Homo sapiens
ccaaaaacaccctac

SEQ ID NO: 951149 - DNA, 15 bp, Homo sapiens
caaaaacaccctaca

SEQ ID NO: 951150 - DNA, 15 bp, Homo sapiens
aaaaacaccctacat

SEQ ID NO: 951151 - DNA, 15 bp, Homo sapiens
aaaacaccctacatg

SEQ ID NO: 951152 - DNA, 15 bp, Homo sapiens
aaacaccctacatgc

SEQ ID NO: 951153 - DNA, 15 bp, Homo sapiens
aacaccctacatgcc

SEQ ID NO: 951154 - DNA, 15 bp, Homo sapiens
acaccctacatgccc

SEQ ID NO: 951155 - DNA, 15 bp, Homo sapiens
caccctacatgcccc

SEQ ID NO: 951156 - DNA, 15 bp, Homo sapiens
accctacatgccccc

SEQ ID NO: 951157 - DNA, 15 bp, Homo sapiens
ccctacatgccccct

SEQ ID NO: 951158 - DNA, 15 bp, Homo sapiens
cctacatgccccctc

SEQ ID NO: 951159 - DNA, 15 bp, Homo sapiens
ctacatgccccctct

SEQ ID NO: 951160 - DNA, 15 bp, Homo sapiens
tacatgccccctctc

SEQ ID NO: 951161 - DNA, 15 bp, Homo sapiens
acatgccccctctca

SEQ ID NO: 951162 - DNA, 15 bp, Homo sapiens
catgccccctctcaa

SEQ ID NO: 951163 - DNA, 15 bp, Homo sapiens
atgccccctctcaat

SEQ ID NO: 951164 - DNA, 15 bp, Homo sapiens
tgccccctctcaata

SEQ ID NO: 951165 - DNA, 15 bp, Homo sapiens
gccccctctcaataa

SEQ ID NO: 951166 - DNA, 15 bp, Homo sapiens
ccccctctcaataac

SEQ ID NO: 951167 - DNA, 15 bp, Homo sapiens
cccctctcaataact

SEQ ID NO: 951168 - DNA, 15 bp, Homo sapiens
ccctctcaataacta

SEQ ID NO: 951169 - DNA, 15 bp, Homo sapiens
cctctcaataactac

SEQ ID NO: 951170 - DNA, 15 bp, Homo sapiens
ctctcaataactaca

SEQ ID NO: 951171 - DNA, 15 bp, Homo sapiens
tctcaataactacag

SEQ ID NO: 951172 - DNA, 15 bp, Homo sapiens
ctcaataactacagg

SEQ ID NO: 951173 - DNA, 15 bp, Homo sapiens
tcaataactacaggc

SEQ ID NO: 951174 - DNA, 15 bp, Homo sapiens
caataactacaggct

SEQ ID NO: 951175 - DNA, 15 bp, Homo sapiens
aataactacaggctc

SEQ ID NO: 951176 - DNA, 15 bp, Homo sapiens
ataactacaggctct

SEQ ID NO: 951177 - DNA, 15 bp, Homo sapiens
taactacaggctctg

SEQ ID NO: 951178 - DNA, 15 bp, Homo sapiens
aactacaggctctgc

SEQ ID NO: 951179 - DNA, 15 bp, Homo sapiens
actacaggctctgcc

SEQ ID NO: 951180 - DNA, 15 bp, Homo sapiens
ctacaggctctgcct

SEQ ID NO: 951181 - DNA, 15 bp, Homo sapiens
tacaggctctgcctc

SEQ ID NO: 951182 - DNA, 15 bp, Homo sapiens
acaggctctgcctcc

SEQ ID NO: 951183 - DNA, 15 bp, Homo sapiens
caggctctgcctcca

SEQ ID NO: 951184 - DNA, 15 bp, Homo sapiens
aggctctgcctccac

SEQ ID NO: 951185 - DNA, 15 bp, Homo sapiens
ggctctgcctccacc

SEQ ID NO: 951186 - DNA, 15 bp, Homo sapiens
gctctgcctccacca

SEQ ID NO: 951187 - DNA, 15 bp, Homo sapiens
ctctgcctccaccaa

SEQ ID NO: 951188 - DNA, 15 bp, Homo sapiens
tctgcctccaccaaa

SEQ ID NO: 951189 - DNA, 15 bp, Homo sapiens
ctgcctccaccaaag

SEQ ID NO: 951190 - DNA, 15 bp, Homo sapiens
tgcctccaccaaaga

SEQ ID NO: 951191 - DNA, 15 bp, Homo sapiens
gcctccaccaaagac

SEQ ID NO: 951192 - DNA, 15 bp, Homo sapiens
cctccaccaaagaca

SEQ ID NO: 951193 - DNA, 15 bp, Homo sapiens
ctccaccaaagacaa

SEQ ID NO: 951194 - DNA, 15 bp, Homo sapiens
tccaccaaagacaac

SEQ ID NO: 951195 - DNA, 15 bp, Homo sapiens
ccaccaaagacaact

SEQ ID NO: 951196 - DNA, 15 bp, Homo sapiens
caccaaagacaacta

SEQ ID NO: 951197 - DNA, 15 bp, Homo sapiens
accaaagacaactat

SEQ ID NO: 951198 - DNA, 15 bp, Homo sapiens
ccaaagacaactatc

SEQ ID NO: 951199 - DNA, 15 bp, Homo sapiens
caaagacaactatcc

SEQ ID NO: 951200 - DNA, 15 bp, Homo sapiens
aaagacaactatcct

SEQ ID NO: 951201 - DNA, 15 bp, Homo sapiens
aagacaactatcctg

SEQ ID NO: 951202 - DNA, 15 bp, Homo sapiens
agacaactatcctga

SEQ ID NO: 951203 - DNA, 15 bp, Homo sapiens
gacaactatcctgac

SEQ ID NO: 951204 - DNA, 15 bp, Homo sapiens
acaactatcctgact

SEQ ID NO: 951205 - DNA, 15 bp, Homo sapiens
caactatcctgactg

SEQ ID NO: 951206 - DNA, 15 bp, Homo sapiens
aactatcctgactgt

SEQ ID NO: 951207 - DNA, 15 bp, Homo sapiens
actatcctgactgtt

SEQ ID NO: 951208 - DNA, 15 bp, Homo sapiens
ctatcctgactgttt

SEQ ID NO: 951209 - DNA, 15 bp, Homo sapiens
tatcctgactgttta

SEQ ID NO: 951210 - DNA, 15 bp, Homo sapiens
atcctgactgtttat

SEQ ID NO: 951211 - DNA, 15 bp, Homo sapiens
tcctgactgtttatg

SEQ ID NO: 951212 - DNA, 15 bp, Homo sapiens
cctgactgtttatgg

SEQ ID NO: 951213 - DNA, 15 bp, Homo sapiens
ctgactgtttatggc

SEQ ID NO: 951214 - DNA, 15 bp, Homo sapiens
tgactgtttatggca

SEQ ID NO: 951215 - DNA, 15 bp, Homo sapiens
gactgtttatggcaa

SEQ ID NO: 951216 - DNA, 15 bp, Homo sapiens
actgtttatggcaat

SEQ ID NO: 951217 - DNA, 15 bp, Homo sapiens
ctgtttatggcaatt

SEQ ID NO: 951218 - DNA, 15 bp, Homo sapiens
tgtttatggcaatta

SEQ ID NO: 951219 - DNA, 15 bp, Homo sapiens
gtttatggcaattac

SEQ ID NO: 951220 - DNA, 15 bp, Homo sapiens
tttatggcaattact

SEQ ID NO: 951221 - DNA, 15 bp, Homo sapiens
ttatggcaattactt

SEQ ID NO: 951222 - DNA, 15 bp, Homo sapiens
tatggcaattacttt

SEQ ID NO: 951223 - DNA, 15 bp, Homo sapiens
atggcaattactttc

SEQ ID NO: 951224 - DNA, 15 bp, Homo sapiens
tggcaattactttct

SEQ ID NO: 951225 - DNA, 15 bp, Homo sapiens
ggcaattactttctt

SEQ ID NO: 951226 - DNA, 15 bp, Homo sapiens
gcaattactttctta

SEQ ID NO: 951227 - DNA, 15 bp, Homo sapiens
caattactttcttac

SEQ ID NO: 951228 - DNA, 15 bp, Homo sapiens
aattactttcttact

SEQ ID NO: 951229 - DNA, 15 bp, Homo sapiens
attactttcttactt

SEQ ID NO: 951230 - DNA, 15 bp, Homo sapiens
ttactttcttacttt

SEQ ID NO: 951231 - DNA, 15 bp, Homo sapiens
tactttcttactttc

SEQ ID NO: 951232 - DNA, 15 bp, Homo sapiens
actttcttactttcc

SEQ ID NO: 951233 - DNA, 15 bp, Homo sapiens
ctttcttactttcct

SEQ ID NO: 951234 - DNA, 15 bp, Homo sapiens
tttcttactttcctt

SEQ ID NO: 951235 - DNA, 15 bp, Homo sapiens
ttcttactttccttt

SEQ ID NO: 951236 - DNA, 15 bp, Homo sapiens
tcttactttcctttg

SEQ ID NO: 951237 - DNA, 15 bp, Homo sapiens
cttactttcctttgt

SEQ ID NO: 951238 - DNA, 15 bp, Homo sapiens
ttactttcctttgta

SEQ ID NO: 951239 - DNA, 15 bp, Homo sapiens
tactttcctttgtac

SEQ ID NO: 951240 - DNA, 15 bp, Homo sapiens
actttcctttgtact

SEQ ID NO: 951241 - DNA, 15 bp, Homo sapiens
ctttcctttgtactt

SEQ ID NO: 951242 - DNA, 15 bp, Homo sapiens
tttcctttgtacttt

SEQ ID NO: 951243 - DNA, 15 bp, Homo sapiens
ttcctttgtactttt

SEQ ID NO: 951244 - DNA, 15 bp, Homo sapiens
tcctttgtactttta

SEQ ID NO: 951245 - DNA, 15 bp, Homo sapiens
cctttgtacttttat

SEQ ID NO: 951246 - DNA, 15 bp, Homo sapiens
ctttgtacttttatc

SEQ ID NO: 951247 - DNA, 15 bp, Homo sapiens
tttgtacttttatca

SEQ ID NO: 951248 - DNA, 15 bp, Homo sapiens
ttgtacttttatcac

SEQ ID NO: 951249 - DNA, 15 bp, Homo sapiens
tgtacttttatcacc

SEQ ID NO: 951250 - DNA, 15 bp, Homo sapiens
gtacttttatcacct

SEQ ID NO: 951251 - DNA, 15 bp, Homo sapiens
tacttttatcaccta

SEQ ID NO: 951252 - DNA, 15 bp, Homo sapiens
acttttatcacctaa

SEQ ID NO: 951253 - DNA, 15 bp, Homo sapiens
cttttatcacctaag

SEQ ID NO: 951254 - DNA, 15 bp, Homo sapiens
ttttatcacctaagg

SEQ ID NO: 951255 - DNA, 15 bp, Homo sapiens
tttatcacctaagga

SEQ ID NO: 951256 - DNA, 15 bp, Homo sapiens
ttatcacctaaggat

SEQ ID NO: 951257 - DNA, 15 bp, Homo sapiens
tatcacctaaggata

SEQ ID NO: 951258 - DNA, 15 bp, Homo sapiens
atcacctaaggatat

SEQ ID NO: 951259 - DNA, 15 bp, Homo sapiens
tcacctaaggatata

SEQ ID NO: 951260 - DNA, 15 bp, Homo sapiens
cacctaaggatatat

SEQ ID NO: 951261 - DNA, 15 bp, Homo sapiens
acctaaggatatatc

SEQ ID NO: 951262 - DNA, 15 bp, Homo sapiens
cctaaggatatatcc

SEQ ID NO: 951263 - DNA, 15 bp, Homo sapiens
ctaaggatatatcct

SEQ ID NO: 951264 - DNA, 15 bp, Homo sapiens
taaggatatatcctt

SEQ ID NO: 951265 - DNA, 15 bp, Homo sapiens
aaggatatatcctta

SEQ ID NO: 951266 - DNA, 15 bp, Homo sapiens
aggatatatccttaa

SEQ ID NO: 951267 - DNA, 15 bp, Homo sapiens
ggatatatccttaaa

SEQ ID NO: 951268 - DNA, 15 bp, Homo sapiens
gatatatccttaaac

SEQ ID NO: 951269 - DNA, 15 bp, Homo sapiens
atatatccttaaaca

SEQ ID NO: 951270 - DNA, 15 bp, Homo sapiens
tatatccttaaacat

SEQ ID NO: 951271 - DNA, 15 bp, Homo sapiens
atatccttaaacata

SEQ ID NO: 951272 - DNA, 15 bp, Homo sapiens
tatccttaaacatat

SEQ ID NO: 951273 - DNA, 15 bp, Homo sapiens
atccttaaacatata

SEQ ID NO: 951274 - DNA, 15 bp, Homo sapiens
tccttaaacatatat

SEQ ID NO: 951275 - DNA, 15 bp, Homo sapiens
ccttaaacatatata

SEQ ID NO: 951276 - DNA, 15 bp, Homo sapiens
cttaaacatatatat

SEQ ID NO: 951277 - DNA, 15 bp, Homo sapiens
ttaaacatatatatt

SEQ ID NO: 951278 - DNA, 15 bp, Homo sapiens
taaacatatatattt

SEQ ID NO: 951279 - DNA, 15 bp, Homo sapiens
aaacatatatatttt

SEQ ID NO: 951280 - DNA, 15 bp, Homo sapiens
aacatatatattttg

SEQ ID NO: 951281 - DNA, 15 bp, Homo sapiens
acatatatattttgt

SEQ ID NO: 951282 - DNA, 15 bp, Homo sapiens
catatatattttgtt

SEQ ID NO: 951283 - DNA, 15 bp, Homo sapiens
atatatattttgtta

SEQ ID NO: 951284 - DNA, 15 bp, Homo sapiens
tatatattttgttaa

SEQ ID NO: 951285 - DNA, 15 bp, Homo sapiens
atatattttgttaat

SEQ ID NO: 951286 - DNA, 15 bp, Homo sapiens
tatattttgttaata

SEQ ID NO: 951287 - DNA, 15 bp, Homo sapiens
atattttgttaatag

SEQ ID NO: 951288 - DNA, 15 bp, Homo sapiens
tattttgttaatagt

SEQ ID NO: 951289 - DNA, 15 bp, Homo sapiens
attttgttaatagtt

SEQ ID NO: 951290 - DNA, 15 bp, Homo sapiens
ttttgttaatagttt

SEQ ID NO: 951291 - DNA, 15 bp, Homo sapiens
tttgttaatagtttt

SEQ ID NO: 951292 - DNA, 15 bp, Homo sapiens
ttgttaatagttttg

SEQ ID NO: 951293 - DNA, 15 bp, Homo sapiens
tgttaatagttttgc

SEQ ID NO: 951294 - DNA, 15 bp, Homo sapiens
gttaatagttttgcc

SEQ ID NO: 951295 - DNA, 15 bp, Homo sapiens
ttaatagttttgcct

SEQ ID NO: 951296 - DNA, 15 bp, Homo sapiens
taatagttttgcctc

SEQ ID NO: 951297 - DNA, 15 bp, Homo sapiens
aatagttttgcctca

SEQ ID NO: 951298 - DNA, 15 bp, Homo sapiens
atagttttgcctcat

SEQ ID NO: 951299 - DNA, 15 bp, Homo sapiens
tagttttgcctcatt

SEQ ID NO: 951300 - DNA, 15 bp, Homo sapiens
agttttgcctcattt

SEQ ID NO: 951301 - DNA, 15 bp, Homo sapiens
gttttgcctcatttt

SEQ ID NO: 951302 - DNA, 15 bp, Homo sapiens
ttttgcctcattttt

SEQ ID NO: 951303 - DNA, 15 bp, Homo sapiens
tttgcctcattttta

SEQ ID NO: 951304 - DNA, 15 bp, Homo sapiens
ttgcctcatttttaa

SEQ ID NO: 951305 - DNA, 15 bp, Homo sapiens
tgcctcatttttaag

SEQ ID NO: 951306 - DNA, 15 bp, Homo sapiens
gcctcatttttaagc

SEQ ID NO: 951307 - DNA, 15 bp, Homo sapiens
cctcatttttaagca

SEQ ID NO: 951308 - DNA, 15 bp, Homo sapiens
ctcatttttaagcat

SEQ ID NO: 951309 - DNA, 15 bp, Homo sapiens
tcatttttaagcatt

SEQ ID NO: 951310 - DNA, 15 bp, Homo sapiens
catttttaagcatta

SEQ ID NO: 951311 - DNA, 15 bp, Homo sapiens
atttttaagcattat

SEQ ID NO: 951312 - DNA, 15 bp, Homo sapiens
tttttaagcattata

SEQ ID NO: 951313 - DNA, 15 bp, Homo sapiens
ttttaagcattatat

SEQ ID NO: 951314 - DNA, 15 bp, Homo sapiens
tttaagcattatata

SEQ ID NO: 951315 - DNA, 15 bp, Homo sapiens
ttaagcattatataa

SEQ ID NO: 951316 - DNA, 15 bp, Homo sapiens
taagcattatataaa

SEQ ID NO: 951317 - DNA, 15 bp, Homo sapiens
aagcattatataaat

SEQ ID NO: 951318 - DNA, 15 bp, Homo sapiens
agcattatataaatg

SEQ ID NO: 951319 - DNA, 15 bp, Homo sapiens
gcattatataaatgg

SEQ ID NO: 951320 - DNA, 15 bp, Homo sapiens
cattatataaatgga

SEQ ID NO: 951321 - DNA, 15 bp, Homo sapiens
attatataaatggaa

SEQ ID NO: 951322 - DNA, 15 bp, Homo sapiens
ttatataaatggaat

SEQ ID NO: 951323 - DNA, 15 bp, Homo sapiens
tatataaatggaatc

SEQ ID NO: 951324 - DNA, 15 bp, Homo sapiens
atataaatggaatca

SEQ ID NO: 951325 - DNA, 15 bp, Homo sapiens
tataaatggaatcac

SEQ ID NO: 951326 - DNA, 15 bp, Homo sapiens
ataaatggaatcaca

SEQ ID NO: 951327 - DNA, 15 bp, Homo sapiens
taaatggaatcacat

SEQ ID NO: 951328 - DNA, 15 bp, Homo sapiens
aaatggaatcacata

SEQ ID NO: 951329 - DNA, 15 bp, Homo sapiens
aatggaatcacatag

SEQ ID NO: 951330 - DNA, 15 bp, Homo sapiens
atggaatcacataga

SEQ ID NO: 951331 - DNA, 15 bp, Homo sapiens
tggaatcacatagaa

SEQ ID NO: 951332 - DNA, 15 bp, Homo sapiens
ggaatcacatagaat

SEQ ID NO: 951333 - DNA, 15 bp, Homo sapiens
gaatcacatagaata

SEQ ID NO: 951334 - DNA, 15 bp, Homo sapiens
aatcacatagaatac

SEQ ID NO: 951335 - DNA, 15 bp, Homo sapiens
atcacatagaatact

SEQ ID NO: 951336 - DNA, 15 bp, Homo sapiens
tcacatagaatactt

SEQ ID NO: 951337 - DNA, 15 bp, Homo sapiens
cacatagaatacttt

SEQ ID NO: 951338 - DNA, 15 bp, Homo sapiens
acatagaatactttc

SEQ ID NO: 951339 - DNA, 15 bp, Homo sapiens
catagaatactttcc

SEQ ID NO: 951340 - DNA, 15 bp, Homo sapiens
atagaatactttcct

SEQ ID NO: 951341 - DNA, 15 bp, Homo sapiens
tagaatactttcctt

SEQ ID NO: 951342 - DNA, 15 bp, Homo sapiens
agaatactttccttt

SEQ ID NO: 951343 - DNA, 15 bp, Homo sapiens
gaatactttcctttc

SEQ ID NO: 951344 - DNA, 15 bp, Homo sapiens
aatactttcctttct

SEQ ID NO: 951345 - DNA, 15 bp, Homo sapiens
atactttcctttctg

SEQ ID NO: 951346 - DNA, 15 bp, Homo sapiens
tactttcctttctgt

SEQ ID NO: 951347 - DNA, 15 bp, Homo sapiens
actttcctttctgtc

SEQ ID NO: 951348 - DNA, 15 bp, Homo sapiens
ctttcctttctgtct

SEQ ID NO: 951349 - DNA, 15 bp, Homo sapiens
tttcctttctgtctg

SEQ ID NO: 951350 - DNA, 15 bp, Homo sapiens
ttcctttctgtctgg

SEQ ID NO: 951351 - DNA, 15 bp, Homo sapiens
tcctttctgtctggt

SEQ ID NO: 951352 - DNA, 15 bp, Homo sapiens
cctttctgtctggtt

SEQ ID NO: 951353 - DNA, 15 bp, Homo sapiens
ctttctgtctggttt

SEQ ID NO: 951354 - DNA, 15 bp, Homo sapiens
tttctgtctggtttt

SEQ ID NO: 951355 - DNA, 15 bp, Homo sapiens
ttctgtctggttttc

SEQ ID NO: 951356 - DNA, 15 bp, Homo sapiens
tctgtctggttttct

SEQ ID NO: 951357 - DNA, 15 bp, Homo sapiens
ctgtctggttttctt

SEQ ID NO: 951358 - DNA, 15 bp, Homo sapiens
tgtctggttttcttc

SEQ ID NO: 951359 - DNA, 15 bp, Homo sapiens
gtctggttttcttca

SEQ ID NO: 951360 - DNA, 15 bp, Homo sapiens
tctggttttcttcac

SEQ ID NO: 951361 - DNA, 15 bp, Homo sapiens
ctggttttcttcaca

SEQ ID NO: 951362 - DNA, 15 bp, Homo sapiens
tggttttcttcacat

SEQ ID NO: 951363 - DNA, 15 bp, Homo sapiens
ggttttcttcacata

SEQ ID NO: 951364 - DNA, 15 bp, Homo sapiens
gttttcttcacatag

SEQ ID NO: 951365 - DNA, 15 bp, Homo sapiens
ttttcttcacatagc

SEQ ID NO: 951366 - DNA, 15 bp, Homo sapiens
tttcttcacatagcg

SEQ ID NO: 951367 - DNA, 15 bp, Homo sapiens
ttcttcacatagcgt

SEQ ID NO: 951368 - DNA, 15 bp, Homo sapiens
tcttcacatagcgtt

SEQ ID NO: 951369 - DNA, 15 bp, Homo sapiens
cttcacatagcgtta

SEQ ID NO: 951370 - DNA, 15 bp, Homo sapiens
ttcacatagcgttat

SEQ ID NO: 951371 - DNA, 15 bp, Homo sapiens
tcacatagcgttatg

SEQ ID NO: 951372 - DNA, 15 bp, Homo sapiens
cacatagcgttatgt

SEQ ID NO: 951373 - DNA, 15 bp, Homo sapiens
acatagcgttatgtt

SEQ ID NO: 951374 - DNA, 15 bp, Homo sapiens
catagcgttatgttt

SEQ ID NO: 951375 - DNA, 15 bp, Homo sapiens
atagcgttatgtttg

SEQ ID NO: 951376 - DNA, 15 bp, Homo sapiens
tagcgttatgtttgt

SEQ ID NO: 951377 - DNA, 15 bp, Homo sapiens
agcgttatgtttgtt

SEQ ID NO: 951378 - DNA, 15 bp, Homo sapiens
gcgttatgtttgtta

SEQ ID NO: 951379 - DNA, 15 bp, Homo sapiens
cgttatgtttgttag

SEQ ID NO: 951380 - DNA, 15 bp, Homo sapiens
gttatgtttgttaga

SEQ ID NO: 951381 - DNA, 15 bp, Homo sapiens
ttatgtttgttagat

SEQ ID NO: 951382 - DNA, 15 bp, Homo sapiens
tatgtttgttagatt

SEQ ID NO: 951383 - DNA, 15 bp, Homo sapiens
atgtttgttagattt

SEQ ID NO: 951384 - DNA, 15 bp, Homo sapiens
tgtttgttagattta

SEQ ID NO: 951385 - DNA, 15 bp, Homo sapiens
gtttgttagatttat

SEQ ID NO: 951386 - DNA, 15 bp, Homo sapiens
tttgttagatttatt

SEQ ID NO: 951387 - DNA, 15 bp, Homo sapiens
ttgttagatttattc

SEQ ID NO: 951388 - DNA, 15 bp, Homo sapiens
tgttagatttattcc

SEQ ID NO: 951389 - DNA, 15 bp, Homo sapiens
gttagatttattcca

SEQ ID NO: 951390 - DNA, 15 bp, Homo sapiens
ttagatttattccat

SEQ ID NO: 951391 - DNA, 15 bp, Homo sapiens
tagatttattccatt

SEQ ID NO: 951392 - DNA, 15 bp, Homo sapiens
agatttattccattt

SEQ ID NO: 951393 - DNA, 15 bp, Homo sapiens
gatttattccatttg

SEQ ID NO: 951394 - DNA, 15 bp, Homo sapiens
atttattccatttgg

SEQ ID NO: 951395 - DNA, 15 bp, Homo sapiens
tttattccatttggt

SEQ ID NO: 951396 - DNA, 15 bp, Homo sapiens
ttattccatttggtt

SEQ ID NO: 951397 - DNA, 15 bp, Homo sapiens
tattccatttggtta

SEQ ID NO: 951398 - DNA, 15 bp, Homo sapiens
attccatttggttac

SEQ ID NO: 951399 - DNA, 15 bp, Homo sapiens
ttccatttggttaca

SEQ ID NO: 951400 - DNA, 15 bp, Homo sapiens
tccatttggttacag

SEQ ID NO: 951401 - DNA, 15 bp, Homo sapiens
ccatttggttacagt

SEQ ID NO: 951402 - DNA, 15 bp, Homo sapiens
catttggttacagtt

SEQ ID NO: 951403 - DNA, 15 bp, Homo sapiens
atttggttacagttc

SEQ ID NO: 951404 - DNA, 15 bp, Homo sapiens
tttggttacagttca

SEQ ID NO: 951405 - DNA, 15 bp, Homo sapiens
ttggttacagttcat

SEQ ID NO: 951406 - DNA, 15 bp, Homo sapiens
tggttacagttcatt

SEQ ID NO: 951407 - DNA, 15 bp, Homo sapiens
ggttacagttcattc

SEQ ID NO: 951408 - DNA, 15 bp, Homo sapiens
gttacagttcattca

SEQ ID NO: 951409 - DNA, 15 bp, Homo sapiens
ttacagttcattcat

SEQ ID NO: 951410 - DNA, 15 bp, Homo sapiens
tacagttcattcatt

SEQ ID NO: 951411 - DNA, 15 bp, Homo sapiens
acagttcattcattt

SEQ ID NO: 951412 - DNA, 15 bp, Homo sapiens
cagttcattcatttt

SEQ ID NO: 951413 - DNA, 15 bp, Homo sapiens
agttcattcattttc

SEQ ID NO: 951414 - DNA, 15 bp, Homo sapiens
gttcattcattttca

SEQ ID NO: 951415 - DNA, 15 bp, Homo sapiens
ttcattcattttcat

SEQ ID NO: 951416 - DNA, 15 bp, Homo sapiens
tcattcattttcatt

SEQ ID NO: 951417 - DNA, 15 bp, Homo sapiens
cattcattttcatta

SEQ ID NO: 951418 - DNA, 15 bp, Homo sapiens
attcattttcattac

SEQ ID NO: 951419 - DNA, 15 bp, Homo sapiens
ttcattttcattact

SEQ ID NO: 951420 - DNA, 15 bp, Homo sapiens
tcattttcattactg

SEQ ID NO: 951421 - DNA, 15 bp, Homo sapiens
cattttcattactgt

SEQ ID NO: 951422 - DNA, 15 bp, Homo sapiens
attttcattactgta

SEQ ID NO: 951423 - DNA, 15 bp, Homo sapiens
ttttcattactgtat

SEQ ID NO: 951424 - DNA, 15 bp, Homo sapiens
tttcattactgtatc

SEQ ID NO: 951425 - DNA, 15 bp, Homo sapiens
ttcattactgtatca

SEQ ID NO: 951426 - DNA, 15 bp, Homo sapiens
tcattactgtatcat

SEQ ID NO: 951427 - DNA, 15 bp, Homo sapiens
cattactgtatcata

SEQ ID NO: 951428 - DNA, 15 bp, Homo sapiens
attactgtatcatat

SEQ ID NO: 951429 - DNA, 15 bp, Homo sapiens
ttactgtatcatatt

SEQ ID NO: 951430 - DNA, 15 bp, Homo sapiens
tactgtatcatattc

SEQ ID NO: 951431 - DNA, 15 bp, Homo sapiens
actgtatcatattcc

SEQ ID NO: 951432 - DNA, 15 bp, Homo sapiens
ctgtatcatattcca

SEQ ID NO: 951433 - DNA, 15 bp, Homo sapiens
tgtatcatattccat

SEQ ID NO: 951434 - DNA, 15 bp, Homo sapiens
gtatcatattccatt

SEQ ID NO: 951435 - DNA, 15 bp, Homo sapiens
tatcatattccattg

SEQ ID NO: 951436 - DNA, 15 bp, Homo sapiens
atcatattccattgt

SEQ ID NO: 951437 - DNA, 15 bp, Homo sapiens
tcatattccattgta

SEQ ID NO: 951438 - DNA, 15 bp, Homo sapiens
catattccattgtat

SEQ ID NO: 951439 - DNA, 15 bp, Homo sapiens
atattccattgtatg

SEQ ID NO: 951440 - DNA, 15 bp, Homo sapiens
tattccattgtatga

SEQ ID NO: 951441 - DNA, 15 bp, Homo sapiens
attccattgtatgag

SEQ ID NO: 951442 - DNA, 15 bp, Homo sapiens
ttccattgtatgagt

SEQ ID NO: 951443 - DNA, 15 bp, Homo sapiens
tccattgtatgagta

SEQ ID NO: 951444 - DNA, 15 bp, Homo sapiens
ccattgtatgagtat

SEQ ID NO: 951445 - DNA, 15 bp, Homo sapiens
cattgtatgagtatg

SEQ ID NO: 951446 - DNA, 15 bp, Homo sapiens
attgtatgagtatgt

SEQ ID NO: 951447 - DNA, 15 bp, Homo sapiens
ttgtatgagtatgtc

SEQ ID NO: 951448 - DNA, 15 bp, Homo sapiens
tgtatgagtatgtct

SEQ ID NO: 951449 - DNA, 15 bp, Homo sapiens
gtatgagtatgtctg

SEQ ID NO: 951450 - DNA, 15 bp, Homo sapiens
tatgagtatgtctgt

SEQ ID NO: 951451 - DNA, 15 bp, Homo sapiens
atgagtatgtctgtt

SEQ ID NO: 951452 - DNA, 15 bp, Homo sapiens
tgagtatgtctgttt

SEQ ID NO: 951453 - DNA, 15 bp, Homo sapiens
gagtatgtctgttta

SEQ ID NO: 951454 - DNA, 15 bp, Homo sapiens
agtatgtctgtttat

SEQ ID NO: 951455 - DNA, 15 bp, Homo sapiens
gtatgtctgtttatt

SEQ ID NO: 951456 - DNA, 15 bp, Homo sapiens
tatgtctgtttattt

SEQ ID NO: 951457 - DNA, 15 bp, Homo sapiens
atgtctgtttattta

SEQ ID NO: 951458 - DNA, 15 bp, Homo sapiens
tgtctgtttatttat

SEQ ID NO: 951459 - DNA, 15 bp, Homo sapiens
gtctgtttatttatt

SEQ ID NO: 951460 - DNA, 15 bp, Homo sapiens
tctgtttatttattc

SEQ ID NO: 951461 - DNA, 15 bp, Homo sapiens
ctgtttatttattca

SEQ ID NO: 951462 - DNA, 15 bp, Homo sapiens
tgtttatttattcat

SEQ ID NO: 951463 - DNA, 15 bp, Homo sapiens
gtttatttattcatt

SEQ ID NO: 951464 - DNA, 15 bp, Homo sapiens
tttatttattcattc

SEQ ID NO: 951465 - DNA, 15 bp, Homo sapiens
ttatttattcattct

SEQ ID NO: 951466 - DNA, 15 bp, Homo sapiens
tatttattcattcta

SEQ ID NO: 951467 - DNA, 15 bp, Homo sapiens
atttattcattctac

SEQ ID NO: 951468 - DNA, 15 bp, Homo sapiens
tttattcattctact

SEQ ID NO: 951469 - DNA, 15 bp, Homo sapiens
ttattcattctactg

SEQ ID NO: 951470 - DNA, 15 bp, Homo sapiens
tattcattctactgc

SEQ ID NO: 951471 - DNA, 15 bp, Homo sapiens
attcattctactgct

SEQ ID NO: 951472 - DNA, 15 bp, Homo sapiens
ttcattctactgctg

SEQ ID NO: 951473 - DNA, 15 bp, Homo sapiens
tcattctactgctga

SEQ ID NO: 951474 - DNA, 15 bp, Homo sapiens
cattctactgctgat

SEQ ID NO: 951475 - DNA, 15 bp, Homo sapiens
attctactgctgatg

SEQ ID NO: 951476 - DNA, 15 bp, Homo sapiens
ttctactgctgatgg

SEQ ID NO: 951477 - DNA, 15 bp, Homo sapiens
tctactgctgatgga

SEQ ID NO: 951478 - DNA, 15 bp, Homo sapiens
ctactgctgatggac

SEQ ID NO: 951479 - DNA, 15 bp, Homo sapiens
tactgctgatggaca

SEQ ID NO: 951480 - DNA, 15 bp, Homo sapiens
actgctgatggacat

SEQ ID NO: 951481 - DNA, 15 bp, Homo sapiens
ctgctgatggacatt

SEQ ID NO: 951482 - DNA, 15 bp, Homo sapiens
tgctgatggacattt

SEQ ID NO: 951483 - DNA, 15 bp, Homo sapiens
gctgatggacatttt

SEQ ID NO: 951484 - DNA, 15 bp, Homo sapiens
ctgatggacattttg

SEQ ID NO: 951485 - DNA, 15 bp, Homo sapiens
tgatggacattttga

SEQ ID NO: 951486 - DNA, 15 bp, Homo sapiens
gatggacattttgaa

SEQ ID NO: 951487 - DNA, 15 bp, Homo sapiens
atggacattttgaat

SEQ ID NO: 951488 - DNA, 15 bp, Homo sapiens
tggacattttgaatt

SEQ ID NO: 951489 - DNA, 15 bp, Homo sapiens
ggacattttgaattg

SEQ ID NO: 951490 - DNA, 15 bp, Homo sapiens
gacattttgaattgt

SEQ ID NO: 951491 - DNA, 15 bp, Homo sapiens
acattttgaattgtc

SEQ ID NO: 951492 - DNA, 15 bp, Homo sapiens
cattttgaattgtct

SEQ ID NO: 951493 - DNA, 15 bp, Homo sapiens
attttgaattgtcta

SEQ ID NO: 951494 - DNA, 15 bp, Homo sapiens
ttttgaattgtctat

SEQ ID NO: 951495 - DNA, 15 bp, Homo sapiens
tttgaattgtctata

SEQ ID NO: 951496 - DNA, 15 bp, Homo sapiens
ttgaattgtctatag

SEQ ID NO: 951497 - DNA, 15 bp, Homo sapiens
tgaattgtctatagt

SEQ ID NO: 951498 - DNA, 15 bp, Homo sapiens
gaattgtctatagtt

SEQ ID NO: 951499 - DNA, 15 bp, Homo sapiens
aattgtctatagttt

SEQ ID NO: 951500 - DNA, 15 bp, Homo sapiens
attgtctatagtttg

SEQ ID NO: 951501 - DNA, 15 bp, Homo sapiens
ttgtctatagtttgg

SEQ ID NO: 951502 - DNA, 15 bp, Homo sapiens
tgtctatagtttggg

SEQ ID NO: 951503 - DNA, 15 bp, Homo sapiens
gtctatagtttggga

SEQ ID NO: 951504 - DNA, 15 bp, Homo sapiens
tctatagtttgggac

SEQ ID NO: 951505 - DNA, 15 bp, Homo sapiens
ctatagtttgggact

SEQ ID NO: 951506 - DNA, 15 bp, Homo sapiens
tatagtttgggacta

SEQ ID NO: 951507 - DNA, 15 bp, Homo sapiens
atagtttgggactac

SEQ ID NO: 951508 - DNA, 15 bp, Homo sapiens
tagtttgggactact

SEQ ID NO: 951509 - DNA, 15 bp, Homo sapiens
agtttgggactacta

SEQ ID NO: 951510 - DNA, 15 bp, Homo sapiens
gtttgggactactac

SEQ ID NO: 951511 - DNA, 15 bp, Homo sapiens
tttgggactactaca

SEQ ID NO: 951512 - DNA, 15 bp, Homo sapiens
ttgggactactacaa

SEQ ID NO: 951513 - DNA, 15 bp, Homo sapiens
tgggactactacaag

SEQ ID NO: 951514 - DNA, 15 bp, Homo sapiens
gggactactacaagt

SEQ ID NO: 951515 - DNA, 15 bp, Homo sapiens
ggactactacaagta

SEQ ID NO: 951516 - DNA, 15 bp, Homo sapiens
gactactacaagtaa

SEQ ID NO: 951517 - DNA, 15 bp, Homo sapiens
actactacaagtaat

SEQ ID NO: 951518 - DNA, 15 bp, Homo sapiens
ctactacaagtaatt

SEQ ID NO: 951519 - DNA, 15 bp, Homo sapiens
tactacaagtaattc

SEQ ID NO: 951520 - DNA, 15 bp, Homo sapiens
actacaagtaattct

SEQ ID NO: 951521 - DNA, 15 bp, Homo sapiens
ctacaagtaattcta

SEQ ID NO: 951522 - DNA, 15 bp, Homo sapiens
tacaagtaattctac

SEQ ID NO: 951523 - DNA, 15 bp, Homo sapiens
acaagtaattctacc

SEQ ID NO: 951524 - DNA, 15 bp, Homo sapiens
caagtaattctacca

SEQ ID NO: 951525 - DNA, 15 bp, Homo sapiens
aagtaattctaccat

SEQ ID NO: 951526 - DNA, 15 bp, Homo sapiens
agtaattctaccatg

SEQ ID NO: 951527 - DNA, 15 bp, Homo sapiens
gtaattctaccatga

SEQ ID NO: 951528 - DNA, 15 bp, Homo sapiens
taattctaccatgaa

SEQ ID NO: 951529 - DNA, 15 bp, Homo sapiens
aattctaccatgaat

SEQ ID NO: 951530 - DNA, 15 bp, Homo sapiens
attctaccatgaata

SEQ ID NO: 951531 - DNA, 15 bp, Homo sapiens
ttctaccatgaatat

SEQ ID NO: 951532 - DNA, 15 bp, Homo sapiens
tctaccatgaatatt

SEQ ID NO: 951533 - DNA, 15 bp, Homo sapiens
ctaccatgaatattc

SEQ ID NO: 951534 - DNA, 15 bp, Homo sapiens
taccatgaatattct

SEQ ID NO: 951535 - DNA, 15 bp, Homo sapiens
accatgaatattctc

SEQ ID NO: 951536 - DNA, 15 bp, Homo sapiens
ccatgaatattctca

SEQ ID NO: 951537 - DNA, 15 bp, Homo sapiens
catgaatattctcat

SEQ ID NO: 951538 - DNA, 15 bp, Homo sapiens
atgaatattctcata

SEQ ID NO: 951539 - DNA, 15 bp, Homo sapiens
tgaatattctcatat

SEQ ID NO: 951540 - DNA, 15 bp, Homo sapiens
gaatattctcatata

SEQ ID NO: 951541 - DNA, 15 bp, Homo sapiens
aatattctcatatat

SEQ ID NO: 951542 - DNA, 15 bp, Homo sapiens
atattctcatatatg

SEQ ID NO: 951543 - DNA, 15 bp, Homo sapiens
tattctcatatatgt

SEQ ID NO: 951544 - DNA, 15 bp, Homo sapiens
attctcatatatgtc

SEQ ID NO: 951545 - DNA, 15 bp, Homo sapiens
ttctcatatatgtct

SEQ ID NO: 951546 - DNA, 15 bp, Homo sapiens
tctcatatatgtctc

SEQ ID NO: 951547 - DNA, 15 bp, Homo sapiens
ctcatatatgtctct

SEQ ID NO: 951548 - DNA, 15 bp, Homo sapiens
tcatatatgtctctg

SEQ ID NO: 951549 - DNA, 15 bp, Homo sapiens
catatatgtctctgg

SEQ ID NO: 951550 - DNA, 15 bp, Homo sapiens
atatatgtctctggt

SEQ ID NO: 951551 - DNA, 15 bp, Homo sapiens
tatatgtctctggtg

SEQ ID NO: 951552 - DNA, 15 bp, Homo sapiens
atatgtctctggtgc

SEQ ID NO: 951553 - DNA, 15 bp, Homo sapiens
tatgtctctggtgca

SEQ ID NO: 951554 - DNA, 15 bp, Homo sapiens
atgtctctggtgcac

SEQ ID NO: 951555 - DNA, 15 bp, Homo sapiens
tgtctctggtgcaca

SEQ ID NO: 951556 - DNA, 15 bp, Homo sapiens
gtctctggtgcacaa

SEQ ID NO: 951557 - DNA, 15 bp, Homo sapiens
tctctggtgcacaag

SEQ ID NO: 951558 - DNA, 15 bp, Homo sapiens
ctctggtgcacaagc

SEQ ID NO: 951559 - DNA, 15 bp, Homo sapiens
tctggtgcacaagca

SEQ ID NO: 951560 - DNA, 15 bp, Homo sapiens
ctggtgcacaagcac

SEQ ID NO: 951561 - DNA, 15 bp, Homo sapiens
tggtgcacaagcaca

SEQ ID NO: 951562 - DNA, 15 bp, Homo sapiens
ggtgcacaagcacac

SEQ ID NO: 951563 - DNA, 15 bp, Homo sapiens
gtgcacaagcacaca

SEQ ID NO: 951564 - DNA, 15 bp, Homo sapiens
tgcacaagcacacac

SEQ ID NO: 951565 - DNA, 15 bp, Homo sapiens
gcacaagcacacaca

SEQ ID NO: 951566 - DNA, 15 bp, Homo sapiens
cacaagcacacacac

SEQ ID NO: 951567 - DNA, 15 bp, Homo sapiens
acaagcacacacact

SEQ ID NO: 951568 - DNA, 15 bp, Homo sapiens
caagcacacacactt

SEQ ID NO: 951569 - DNA, 15 bp, Homo sapiens
aagcacacacacttc

SEQ ID NO: 951570 - DNA, 15 bp, Homo sapiens
agcacacacacttcc

SEQ ID NO: 951571 - DNA, 15 bp, Homo sapiens
gcacacacacttcca

SEQ ID NO: 951572 - DNA, 15 bp, Homo sapiens
cacacacacttccat

SEQ ID NO: 951573 - DNA, 15 bp, Homo sapiens
acacacacttccatc

SEQ ID NO: 951574 - DNA, 15 bp, Homo sapiens
cacacacttccatcg

SEQ ID NO: 951575 - DNA, 15 bp, Homo sapiens
acacacttccatcgg

SEQ ID NO: 951576 - DNA, 15 bp, Homo sapiens
cacacttccatcggg

SEQ ID NO: 951577 - DNA, 15 bp, Homo sapiens
acacttccatcgggt

SEQ ID NO: 951578 - DNA, 15 bp, Homo sapiens
cacttccatcgggta

SEQ ID NO: 951579 - DNA, 15 bp, Homo sapiens
acttccatcgggtat

SEQ ID NO: 951580 - DNA, 15 bp, Homo sapiens
cttccatcgggtata

SEQ ID NO: 951581 - DNA, 15 bp, Homo sapiens
ttccatcgggtataa

SEQ ID NO: 951582 - DNA, 15 bp, Homo sapiens
tccatcgggtataaa

SEQ ID NO: 951583 - DNA, 15 bp, Homo sapiens
ccatcgggtataaac

SEQ ID NO: 951584 - DNA, 15 bp, Homo sapiens
catcgggtataaacc

SEQ ID NO: 951585 - DNA, 15 bp, Homo sapiens
atcgggtataaacct

SEQ ID NO: 951586 - DNA, 15 bp, Homo sapiens
tcgggtataaacctg

SEQ ID NO: 951587 - DNA, 15 bp, Homo sapiens
cgggtataaacctgg

SEQ ID NO: 951588 - DNA, 15 bp, Homo sapiens
gggtataaacctggg

SEQ ID NO: 951589 - DNA, 15 bp, Homo sapiens
ggtataaacctggga

SEQ ID NO: 951590 - DNA, 15 bp, Homo sapiens
gtataaacctgggaa

SEQ ID NO: 951591 - DNA, 15 bp, Homo sapiens
tataaacctgggaat

SEQ ID NO: 951592 - DNA, 15 bp, Homo sapiens
ataaacctgggaatg

SEQ ID NO: 951593 - DNA, 15 bp, Homo sapiens
taaacctgggaatgg

SEQ ID NO: 951594 - DNA, 15 bp, Homo sapiens
aaacctgggaatgga

SEQ ID NO: 951595 - DNA, 15 bp, Homo sapiens
aacctgggaatggaa

SEQ ID NO: 951596 - DNA, 15 bp, Homo sapiens
acctgggaatggaat

SEQ ID NO: 951597 - DNA, 15 bp, Homo sapiens
cctgggaatggaata

SEQ ID NO: 951598 - DNA, 15 bp, Homo sapiens
ctgggaatggaatat

SEQ ID NO: 951599 - DNA, 15 bp, Homo sapiens
tgggaatggaatatt

SEQ ID NO: 951600 - DNA, 15 bp, Homo sapiens
gggaatggaatattt

SEQ ID NO: 951601 - DNA, 15 bp, Homo sapiens
ggaatggaatattta

SEQ ID NO: 951602 - DNA, 15 bp, Homo sapiens
gaatggaatatttaa

SEQ ID NO: 951603 - DNA, 15 bp, Homo sapiens
aatggaatatttaaa

SEQ ID NO: 951604 - DNA, 15 bp, Homo sapiens
atggaatatttaaat

SEQ ID NO: 951605 - DNA, 15 bp, Homo sapiens
tggaatatttaaatc

SEQ ID NO: 951606 - DNA, 15 bp, Homo sapiens
ggaatatttaaatca

SEQ ID NO: 951607 - DNA, 15 bp, Homo sapiens
gaatatttaaatcat

SEQ ID NO: 951608 - DNA, 15 bp, Homo sapiens
aatatttaaatcata

SEQ ID NO: 951609 - DNA, 15 bp, Homo sapiens
atatttaaatcatag

SEQ ID NO: 951610 - DNA, 15 bp, Homo sapiens
tatttaaatcataga

SEQ ID NO: 951611 - DNA, 15 bp, Homo sapiens
atttaaatcatagag

SEQ ID NO: 951612 - DNA, 15 bp, Homo sapiens
tttaaatcatagagt

SEQ ID NO: 951613 - DNA, 15 bp, Homo sapiens
ttaaatcatagagta

SEQ ID NO: 951614 - DNA, 15 bp, Homo sapiens
taaatcatagagtat

SEQ ID NO: 951615 - DNA, 15 bp, Homo sapiens
aaatcatagagtatc

SEQ ID NO: 951616 - DNA, 15 bp, Homo sapiens
aatcatagagtatcc

SEQ ID NO: 951617 - DNA, 15 bp, Homo sapiens
atcatagagtatcca

SEQ ID NO: 951618 - DNA, 15 bp, Homo sapiens
tcatagagtatccat

SEQ ID NO: 951619 - DNA, 15 bp, Homo sapiens
catagagtatccata

SEQ ID NO: 951620 - DNA, 15 bp, Homo sapiens
atagagtatccatat

SEQ ID NO: 951621 - DNA, 15 bp, Homo sapiens
tagagtatccatatc

SEQ ID NO: 951622 - DNA, 15 bp, Homo sapiens
agagtatccatatct

SEQ ID NO: 951623 - DNA, 15 bp, Homo sapiens
gagtatccatatctt

SEQ ID NO: 951624 - DNA, 15 bp, Homo sapiens
agtatccatatctta

SEQ ID NO: 951625 - DNA, 15 bp, Homo sapiens
gtatccatatcttaa

SEQ ID NO: 951626 - DNA, 15 bp, Homo sapiens
tatccatatcttaaa

SEQ ID NO: 951627 - DNA, 15 bp, Homo sapiens
atccatatcttaaag

SEQ ID NO: 951628 - DNA, 15 bp, Homo sapiens
tccatatcttaaagt

SEQ ID NO: 951629 - DNA, 15 bp, Homo sapiens
ccatatcttaaagtt

SEQ ID NO: 951630 - DNA, 15 bp, Homo sapiens
catatcttaaagtta

SEQ ID NO: 951631 - DNA, 15 bp, Homo sapiens
atatcttaaagttaa

SEQ ID NO: 951632 - DNA, 15 bp, Homo sapiens
tatcttaaagttaag

SEQ ID NO: 951633 - DNA, 15 bp, Homo sapiens
atcttaaagttaagt

SEQ ID NO: 951634 - DNA, 15 bp, Homo sapiens
tcttaaagttaagta

SEQ ID NO: 951635 - DNA, 15 bp, Homo sapiens
cttaaagttaagtag

SEQ ID NO: 951636 - DNA, 15 bp, Homo sapiens
ttaaagttaagtaga

SEQ ID NO: 951637 - DNA, 15 bp, Homo sapiens
taaagttaagtagat

SEQ ID NO: 951638 - DNA, 15 bp, Homo sapiens
aaagttaagtagata

SEQ ID NO: 951639 - DNA, 15 bp, Homo sapiens
aagttaagtagataa

SEQ ID NO: 951640 - DNA, 15 bp, Homo sapiens
agttaagtagataat

SEQ ID NO: 951641 - DNA, 15 bp, Homo sapiens
gttaagtagataatg

SEQ ID NO: 951642 - DNA, 15 bp, Homo sapiens
ttaagtagataatgc

SEQ ID NO: 951643 - DNA, 15 bp, Homo sapiens
taagtagataatgcc

SEQ ID NO: 951644 - DNA, 15 bp, Homo sapiens
aagtagataatgcca

SEQ ID NO: 951645 - DNA, 15 bp, Homo sapiens
agtagataatgccaa

SEQ ID NO: 951646 - DNA, 15 bp, Homo sapiens
gtagataatgccaag

SEQ ID NO: 951647 - DNA, 15 bp, Homo sapiens
tagataatgccaagt

SEQ ID NO: 951648 - DNA, 15 bp, Homo sapiens
agataatgccaagta

SEQ ID NO: 951649 - DNA, 15 bp, Homo sapiens
gataatgccaagtag

SEQ ID NO: 951650 - DNA, 15 bp, Homo sapiens
ataatgccaagtagt

SEQ ID NO: 951651 - DNA, 15 bp, Homo sapiens
taatgccaagtagtt

SEQ ID NO: 951652 - DNA, 15 bp, Homo sapiens
aatgccaagtagttt

SEQ ID NO: 951653 - DNA, 15 bp, Homo sapiens
atgccaagtagtttt

SEQ ID NO: 951654 - DNA, 15 bp, Homo sapiens
tgccaagtagttttc

SEQ ID NO: 951655 - DNA, 15 bp, Homo sapiens
gccaagtagttttcc

SEQ ID NO: 951656 - DNA, 15 bp, Homo sapiens
ccaagtagttttcca

SEQ ID NO: 951657 - DNA, 15 bp, Homo sapiens
caagtagttttccaa

SEQ ID NO: 951658 - DNA, 15 bp, Homo sapiens
aagtagttttccaaa

SEQ ID NO: 951659 - DNA, 15 bp, Homo sapiens
agtagttttccaaaa

SEQ ID NO: 951660 - DNA, 15 bp, Homo sapiens
gtagttttccaaaat

SEQ ID NO: 951661 - DNA, 15 bp, Homo sapiens
tagttttccaaaatg

SEQ ID NO: 951662 - DNA, 15 bp, Homo sapiens
agttttccaaaatgt

SEQ ID NO: 951663 - DNA, 15 bp, Homo sapiens
gttttccaaaatgta

SEQ ID NO: 951664 - DNA, 15 bp, Homo sapiens
ttttccaaaatgtat

SEQ ID NO: 951665 - DNA, 15 bp, Homo sapiens
tttccaaaatgtata

SEQ ID NO: 951666 - DNA, 15 bp, Homo sapiens
ttccaaaatgtatat

SEQ ID NO: 951667 - DNA, 15 bp, Homo sapiens
tccaaaatgtatatg

SEQ ID NO: 951668 - DNA, 15 bp, Homo sapiens
ccaaaatgtatatgc

SEQ ID NO: 951669 - DNA, 15 bp, Homo sapiens
caaaatgtatatgca

SEQ ID NO: 951670 - DNA, 15 bp, Homo sapiens
aaaatgtatatgcaa

SEQ ID NO: 951671 - DNA, 15 bp, Homo sapiens
aaatgtatatgcaaa

SEQ ID NO: 951672 - DNA, 15 bp, Homo sapiens
aatgtatatgcaaat

SEQ ID NO: 951673 - DNA, 15 bp, Homo sapiens
atgtatatgcaaata

SEQ ID NO: 951674 - DNA, 15 bp, Homo sapiens
tgtatatgcaaatat

SEQ ID NO: 951675 - DNA, 15 bp, Homo sapiens
gtatatgcaaatata

SEQ ID NO: 951676 - DNA, 15 bp, Homo sapiens
tatatgcaaatatac

SEQ ID NO: 951677 - DNA, 15 bp, Homo sapiens
atatgcaaatataca

SEQ ID NO: 951678 - DNA, 15 bp, Homo sapiens
tatgcaaatatacat

SEQ ID NO: 951679 - DNA, 15 bp, Homo sapiens
atgcaaatatacatt

SEQ ID NO: 951680 - DNA, 15 bp, Homo sapiens
tgcaaatatacattc

SEQ ID NO: 951681 - DNA, 15 bp, Homo sapiens
gcaaatatacattct

SEQ ID NO: 951682 - DNA, 15 bp, Homo sapiens
caaatatacattctc

SEQ ID NO: 951683 - DNA, 15 bp, Homo sapiens
aaatatacattctca

SEQ ID NO: 951684 - DNA, 15 bp, Homo sapiens
aatatacattctcac

SEQ ID NO: 951685 - DNA, 15 bp, Homo sapiens
atatacattctcacc

SEQ ID NO: 951686 - DNA, 15 bp, Homo sapiens
tatacattctcacca

SEQ ID NO: 951687 - DNA, 15 bp, Homo sapiens
atacattctcaccaa

SEQ ID NO: 951688 - DNA, 15 bp, Homo sapiens
tacattctcaccaac

SEQ ID NO: 951689 - DNA, 15 bp, Homo sapiens
acattctcaccaacc

SEQ ID NO: 951690 - DNA, 15 bp, Homo sapiens
cattctcaccaaccc

SEQ ID NO: 951691 - DNA, 15 bp, Homo sapiens
attctcaccaaccct

SEQ ID NO: 951692 - DNA, 15 bp, Homo sapiens
ttctcaccaacccta

SEQ ID NO: 951693 - DNA, 15 bp, Homo sapiens
tctcaccaaccctat

SEQ ID NO: 951694 - DNA, 15 bp, Homo sapiens
ctcaccaaccctatg

SEQ ID NO: 951695 - DNA, 15 bp, Homo sapiens
tcaccaaccctatgg

SEQ ID NO: 951696 - DNA, 15 bp, Homo sapiens
caccaaccctatggg

SEQ ID NO: 951697 - DNA, 15 bp, Homo sapiens
accaaccctatgggt

SEQ ID NO: 951698 - DNA, 15 bp, Homo sapiens
ccaaccctatgggta

SEQ ID NO: 951699 - DNA, 15 bp, Homo sapiens
caaccctatgggtat

SEQ ID NO: 951700 - DNA, 15 bp, Homo sapiens
aaccctatgggtatg

SEQ ID NO: 951701 - DNA, 15 bp, Homo sapiens
accctatgggtatga

SEQ ID NO: 951702 - DNA, 15 bp, Homo sapiens
ccctatgggtatgag

SEQ ID NO: 951703 - DNA, 15 bp, Homo sapiens
cctatgggtatgaga

SEQ ID NO: 951704 - DNA, 15 bp, Homo sapiens
ctatgggtatgagag

SEQ ID NO: 951705 - DNA, 15 bp, Homo sapiens
tatgggtatgagagt

SEQ ID NO: 951706 - DNA, 15 bp, Homo sapiens
atgggtatgagagtt

SEQ ID NO: 951707 - DNA, 15 bp, Homo sapiens
tgggtatgagagttc

SEQ ID NO: 951708 - DNA, 15 bp, Homo sapiens
gggtatgagagttct

SEQ ID NO: 951709 - DNA, 15 bp, Homo sapiens
ggtatgagagttctt

SEQ ID NO: 951710 - DNA, 15 bp, Homo sapiens
gtatgagagttctta

SEQ ID NO: 951711 - DNA, 15 bp, Homo sapiens
tatgagagttcttac

SEQ ID NO: 951712 - DNA, 15 bp, Homo sapiens
atgagagttcttact

SEQ ID NO: 951713 - DNA, 15 bp, Homo sapiens
tgagagttcttactg

SEQ ID NO: 951714 - DNA, 15 bp, Homo sapiens
gagagttcttactgc

SEQ ID NO: 951715 - DNA, 15 bp, Homo sapiens
agagttcttactgct

SEQ ID NO: 951716 - DNA, 15 bp, Homo sapiens
gagttcttactgctc

SEQ ID NO: 951717 - DNA, 15 bp, Homo sapiens
agttcttactgctcc

SEQ ID NO: 951718 - DNA, 15 bp, Homo sapiens
gttcttactgctcca

SEQ ID NO: 951719 - DNA, 15 bp, Homo sapiens
ttcttactgctccaa

SEQ ID NO: 951720 - DNA, 15 bp, Homo sapiens
tcttactgctccaaa

SEQ ID NO: 951721 - DNA, 15 bp, Homo sapiens
cttactgctccaaat

SEQ ID NO: 951722 - DNA, 15 bp, Homo sapiens
ttactgctccaaatc

SEQ ID NO: 951723 - DNA, 15 bp, Homo sapiens
tactgctccaaatct

SEQ ID NO: 951724 - DNA, 15 bp, Homo sapiens
actgctccaaatctt

SEQ ID NO: 951725 - DNA, 15 bp, Homo sapiens
ctgctccaaatcttt

SEQ ID NO: 951726 - DNA, 15 bp, Homo sapiens
tgctccaaatctttg

SEQ ID NO: 951727 - DNA, 15 bp, Homo sapiens
gctccaaatctttgc

SEQ ID NO: 951728 - DNA, 15 bp, Homo sapiens
ctccaaatctttgcc

SEQ ID NO: 951729 - DNA, 15 bp, Homo sapiens
tccaaatctttgcca

SEQ ID NO: 951730 - DNA, 15 bp, Homo sapiens
ccaaatctttgccaa

SEQ ID NO: 951731 - DNA, 15 bp, Homo sapiens
caaatctttgccaac

SEQ ID NO: 951732 - DNA, 15 bp, Homo sapiens
aaatctttgccaaca

SEQ ID NO: 951733 - DNA, 15 bp, Homo sapiens
aatctttgccaacat

SEQ ID NO: 951734 - DNA, 15 bp, Homo sapiens
atctttgccaacatt

SEQ ID NO: 951735 - DNA, 15 bp, Homo sapiens
tctttgccaacattt

SEQ ID NO: 951736 - DNA, 15 bp, Homo sapiens
ctttgccaacatttg

SEQ ID NO: 951737 - DNA, 15 bp, Homo sapiens
tttgccaacatttgg

SEQ ID NO: 951738 - DNA, 15 bp, Homo sapiens
ttgccaacatttggt

SEQ ID NO: 951739 - DNA, 15 bp, Homo sapiens
tgccaacatttggta

SEQ ID NO: 951740 - DNA, 15 bp, Homo sapiens
gccaacatttggtaa

SEQ ID NO: 951741 - DNA, 15 bp, Homo sapiens
ccaacatttggtaat

SEQ ID NO: 951742 - DNA, 15 bp, Homo sapiens
caacatttggtaata

SEQ ID NO: 951743 - DNA, 15 bp, Homo sapiens
aacatttggtaatat

SEQ ID NO: 951744 - DNA, 15 bp, Homo sapiens
acatttggtaatatc

SEQ ID NO: 951745 - DNA, 15 bp, Homo sapiens
catttggtaatatct

SEQ ID NO: 951746 - DNA, 15 bp, Homo sapiens
atttggtaatatctg

SEQ ID NO: 951747 - DNA, 15 bp, Homo sapiens
tttggtaatatctgt

SEQ ID NO: 951748 - DNA, 15 bp, Homo sapiens
ttggtaatatctgta

SEQ ID NO: 951749 - DNA, 15 bp, Homo sapiens
tggtaatatctgtaa

SEQ ID NO: 951750 - DNA, 15 bp, Homo sapiens
ggtaatatctgtaat

SEQ ID NO: 951751 - DNA, 15 bp, Homo sapiens
gtaatatctgtaatt

SEQ ID NO: 951752 - DNA, 15 bp, Homo sapiens
taatatctgtaattt

SEQ ID NO: 951753 - DNA, 15 bp, Homo sapiens
aatatctgtaatttt

SEQ ID NO: 951754 - DNA, 15 bp, Homo sapiens
atatctgtaatttta

SEQ ID NO: 951755 - DNA, 15 bp, Homo sapiens
tatctgtaattttaa

SEQ ID NO: 951756 - DNA, 15 bp, Homo sapiens
atctgtaattttaat

SEQ ID NO: 951757 - DNA, 15 bp, Homo sapiens
tctgtaattttaatt

SEQ ID NO: 951758 - DNA, 15 bp, Homo sapiens
ctgtaattttaattt

SEQ ID NO: 951759 - DNA, 15 bp, Homo sapiens
tgtaattttaattta

SEQ ID NO: 951760 - DNA, 15 bp, Homo sapiens
gtaattttaatttag

SEQ ID NO: 951761 - DNA, 15 bp, Homo sapiens
taattttaatttagc

SEQ ID NO: 951762 - DNA, 15 bp, Homo sapiens
aattttaatttagct

SEQ ID NO: 951763 - DNA, 15 bp, Homo sapiens
attttaatttagcta

SEQ ID NO: 951764 - DNA, 15 bp, Homo sapiens
ttttaatttagctaa

SEQ ID NO: 951765 - DNA, 15 bp, Homo sapiens
tttaatttagctaat

SEQ ID NO: 951766 - DNA, 15 bp, Homo sapiens
ttaatttagctaatg

SEQ ID NO: 951767 - DNA, 15 bp, Homo sapiens
taatttagctaatgt

SEQ ID NO: 951768 - DNA, 15 bp, Homo sapiens
aatttagctaatgta

SEQ ID NO: 951769 - DNA, 15 bp, Homo sapiens
atttagctaatgtag

SEQ ID NO: 951770 - DNA, 15 bp, Homo sapiens
tttagctaatgtagt

SEQ ID NO: 951771 - DNA, 15 bp, Homo sapiens
ttagctaatgtagtg

SEQ ID NO: 951772 - DNA, 15 bp, Homo sapiens
tagctaatgtagtga

SEQ ID NO: 951773 - DNA, 15 bp, Homo sapiens
agctaatgtagtgat

SEQ ID NO: 951774 - DNA, 15 bp, Homo sapiens
gctaatgtagtgata

SEQ ID NO: 951775 - DNA, 15 bp, Homo sapiens
ctaatgtagtgatat

SEQ ID NO: 951776 - DNA, 15 bp, Homo sapiens
taatgtagtgatatt

SEQ ID NO: 951777 - DNA, 15 bp, Homo sapiens
aatgtagtgatattt

SEQ ID NO: 951778 - DNA, 15 bp, Homo sapiens
atgtagtgatatttc

SEQ ID NO: 951779 - DNA, 15 bp, Homo sapiens
tgtagtgatatttcc

SEQ ID NO: 951780 - DNA, 15 bp, Homo sapiens
gtagtgatatttcct

SEQ ID NO: 951781 - DNA, 15 bp, Homo sapiens
tagtgatatttcctc

SEQ ID NO: 951782 - DNA, 15 bp, Homo sapiens
agtgatatttcctca

SEQ ID NO: 951783 - DNA, 15 bp, Homo sapiens
gtgatatttcctcat

SEQ ID NO: 951784 - DNA, 15 bp, Homo sapiens
tgatatttcctcatg

SEQ ID NO: 951785 - DNA, 15 bp, Homo sapiens
gatatttcctcatga

SEQ ID NO: 951786 - DNA, 15 bp, Homo sapiens
atatttcctcatgat

SEQ ID NO: 951787 - DNA, 15 bp, Homo sapiens
tatttcctcatgatt

SEQ ID NO: 951788 - DNA, 15 bp, Homo sapiens
atttcctcatgattc

SEQ ID NO: 951789 - DNA, 15 bp, Homo sapiens
tttcctcatgattct

SEQ ID NO: 951790 - DNA, 15 bp, Homo sapiens
ttcctcatgattctg

SEQ ID NO: 951791 - DNA, 15 bp, Homo sapiens
tcctcatgattctga

SEQ ID NO: 951792 - DNA, 15 bp, Homo sapiens
cctcatgattctgat

SEQ ID NO: 951793 - DNA, 15 bp, Homo sapiens
ctcatgattctgatg

SEQ ID NO: 951794 - DNA, 15 bp, Homo sapiens
tcatgattctgatga

SEQ ID NO: 951795 - DNA, 15 bp, Homo sapiens
catgattctgatgac

SEQ ID NO: 951796 - DNA, 15 bp, Homo sapiens
atgattctgatgact

SEQ ID NO: 951797 - DNA, 15 bp, Homo sapiens
tgattctgatgacta

SEQ ID NO: 951798 - DNA, 15 bp, Homo sapiens
gattctgatgactaa

SEQ ID NO: 951799 - DNA, 15 bp, Homo sapiens
attctgatgactaat

SEQ ID NO: 951800 - DNA, 15 bp, Homo sapiens
ttctgatgactaatg

SEQ ID NO: 951801 - DNA, 15 bp, Homo sapiens
tctgatgactaatgt

SEQ ID NO: 951802 - DNA, 15 bp, Homo sapiens
ctgatgactaatgtt

SEQ ID NO: 951803 - DNA, 15 bp, Homo sapiens
tgatgactaatgtta

SEQ ID NO: 951804 - DNA, 15 bp, Homo sapiens
gatgactaatgttat

SEQ ID NO: 951805 - DNA, 15 bp, Homo sapiens
atgactaatgttatc

SEQ ID NO: 951806 - DNA, 15 bp, Homo sapiens
tgactaatgttatca

SEQ ID NO: 951807 - DNA, 15 bp, Homo sapiens
gactaatgttatcaa

SEQ ID NO: 951808 - DNA, 15 bp, Homo sapiens
actaatgttatcaag

SEQ ID NO: 951809 - DNA, 15 bp, Homo sapiens
ctaatgttatcaagt

SEQ ID NO: 951810 - DNA, 15 bp, Homo sapiens
taatgttatcaagtg

SEQ ID NO: 951811 - DNA, 15 bp, Homo sapiens
aatgttatcaagtgc

SEQ ID NO: 951812 - DNA, 15 bp, Homo sapiens
atgttatcaagtgcc

SEQ ID NO: 951813 - DNA, 15 bp, Homo sapiens
tgttatcaagtgcct

SEQ ID NO: 951814 - DNA, 15 bp, Homo sapiens
gttatcaagtgcctt

SEQ ID NO: 951815 - DNA, 15 bp, Homo sapiens
ttatcaagtgccttt

SEQ ID NO: 951816 - DNA, 15 bp, Homo sapiens
tatcaagtgcctttt

SEQ ID NO: 951817 - DNA, 15 bp, Homo sapiens
atcaagtgccttttc

SEQ ID NO: 951818 - DNA, 15 bp, Homo sapiens
tcaagtgccttttca

SEQ ID NO: 951819 - DNA, 15 bp, Homo sapiens
caagtgccttttcat

SEQ ID NO: 951820 - DNA, 15 bp, Homo sapiens
aagtgccttttcatt

SEQ ID NO: 951821 - DNA, 15 bp, Homo sapiens
agtgccttttcattt

SEQ ID NO: 951822 - DNA, 15 bp, Homo sapiens
gtgccttttcattta

SEQ ID NO: 951823 - DNA, 15 bp, Homo sapiens
tgccttttcatttat

SEQ ID NO: 951824 - DNA, 15 bp, Homo sapiens
gccttttcatttatt

SEQ ID NO: 951825 - DNA, 15 bp, Homo sapiens
ccttttcatttattt

SEQ ID NO: 951826 - DNA, 15 bp, Homo sapiens
cttttcatttattta

SEQ ID NO: 951827 - DNA, 15 bp, Homo sapiens
ttttcatttatttat

SEQ ID NO: 951828 - DNA, 15 bp, Homo sapiens
tttcatttatttatt

SEQ ID NO: 951829 - DNA, 15 bp, Homo sapiens
ttcatttatttattg

SEQ ID NO: 951830 - DNA, 15 bp, Homo sapiens
tcatttatttattgg

SEQ ID NO: 951831 - DNA, 15 bp, Homo sapiens
catttatttattggc

SEQ ID NO: 951832 - DNA, 15 bp, Homo sapiens
atttatttattggcc

SEQ ID NO: 951833 - DNA, 15 bp, Homo sapiens
tttatttattggcca

SEQ ID NO: 951834 - DNA, 15 bp, Homo sapiens
ttatttattggccat

SEQ ID NO: 951835 - DNA, 15 bp, Homo sapiens
tatttattggccatt

SEQ ID NO: 951836 - DNA, 15 bp, Homo sapiens
atttattggccattt

SEQ ID NO: 951837 - DNA, 15 bp, Homo sapiens
tttattggccatttg

SEQ ID NO: 951838 - DNA, 15 bp, Homo sapiens
ttattggccatttgg

SEQ ID NO: 951839 - DNA, 15 bp, Homo sapiens
tattggccatttggg

SEQ ID NO: 951840 - DNA, 15 bp, Homo sapiens
attggccatttgggt

SEQ ID NO: 951841 - DNA, 15 bp, Homo sapiens
ttggccatttgggta

SEQ ID NO: 951842 - DNA, 15 bp, Homo sapiens
tggccatttgggtat

SEQ ID NO: 951843 - DNA, 15 bp, Homo sapiens
ggccatttgggtatc

SEQ ID NO: 951844 - DNA, 15 bp, Homo sapiens
gccatttgggtatcc

SEQ ID NO: 951845 - DNA, 15 bp, Homo sapiens
ccatttgggtatcca

SEQ ID NO: 951846 - DNA, 15 bp, Homo sapiens
catttgggtatccat

SEQ ID NO: 951847 - DNA, 15 bp, Homo sapiens
atttgggtatccatt

SEQ ID NO: 951848 - DNA, 15 bp, Homo sapiens
tttgggtatccattt

SEQ ID NO: 951849 - DNA, 15 bp, Homo sapiens
ttgggtatccatttt

SEQ ID NO: 951850 - DNA, 15 bp, Homo sapiens
tgggtatccattttg

SEQ ID NO: 951851 - DNA, 15 bp, Homo sapiens
gggtatccattttgg

SEQ ID NO: 951852 - DNA, 15 bp, Homo sapiens
ggtatccattttggg

SEQ ID NO: 951853 - DNA, 15 bp, Homo sapiens
gtatccattttgggc

SEQ ID NO: 951854 - DNA, 15 bp, Homo sapiens
tatccattttgggca

SEQ ID NO: 951855 - DNA, 15 bp, Homo sapiens
atccattttgggcag

SEQ ID NO: 951856 - DNA, 15 bp, Homo sapiens
tccattttgggcagt

SEQ ID NO: 951857 - DNA, 15 bp, Homo sapiens
ccattttgggcagtg

SEQ ID NO: 951858 - DNA, 15 bp, Homo sapiens
cattttgggcagtgt

SEQ ID NO: 951859 - DNA, 15 bp, Homo sapiens
attttgggcagtgtc

SEQ ID NO: 951860 - DNA, 15 bp, Homo sapiens
ttttgggcagtgtcc

SEQ ID NO: 951861 - DNA, 15 bp, Homo sapiens
tttgggcagtgtccg

SEQ ID NO: 951862 - DNA, 15 bp, Homo sapiens
ttgggcagtgtccgt

SEQ ID NO: 951863 - DNA, 15 bp, Homo sapiens
tgggcagtgtccgtg

SEQ ID NO: 951864 - DNA, 15 bp, Homo sapiens
gggcagtgtccgtgc

SEQ ID NO: 951865 - DNA, 15 bp, Homo sapiens
ggcagtgtccgtgca

SEQ ID NO: 951866 - DNA, 15 bp, Homo sapiens
gcagtgtccgtgcaa

SEQ ID NO: 951867 - DNA, 15 bp, Homo sapiens
cagtgtccgtgcaag

SEQ ID NO: 951868 - DNA, 15 bp, Homo sapiens
agtgtccgtgcaagt

SEQ ID NO: 951869 - DNA, 15 bp, Homo sapiens
gtgtccgtgcaagtt

SEQ ID NO: 951870 - DNA, 15 bp, Homo sapiens
tgtccgtgcaagttg

SEQ ID NO: 951871 - DNA, 15 bp, Homo sapiens
gtccgtgcaagttgt

SEQ ID NO: 951872 - DNA, 15 bp, Homo sapiens
tccgtgcaagttgtt

SEQ ID NO: 951873 - DNA, 15 bp, Homo sapiens
ccgtgcaagttgttt

SEQ ID NO: 951874 - DNA, 15 bp, Homo sapiens
cgtgcaagttgtttg

SEQ ID NO: 951875 - DNA, 15 bp, Homo sapiens
gtgcaagttgtttgc

SEQ ID NO: 951876 - DNA, 15 bp, Homo sapiens
tgcaagttgtttgcc

SEQ ID NO: 951877 - DNA, 15 bp, Homo sapiens
gcaagttgtttgccc

SEQ ID NO: 951878 - DNA, 15 bp, Homo sapiens
caagttgtttgccca

SEQ ID NO: 951879 - DNA, 15 bp, Homo sapiens
aagttgtttgcccat

SEQ ID NO: 951880 - DNA, 15 bp, Homo sapiens
agttgtttgcccatt

SEQ ID NO: 951881 - DNA, 15 bp, Homo sapiens
gttgtttgcccattt

SEQ ID NO: 951882 - DNA, 15 bp, Homo sapiens
ttgtttgcccatttt

SEQ ID NO: 951883 - DNA, 15 bp, Homo sapiens
tgtttgcccattttt

SEQ ID NO: 951884 - DNA, 15 bp, Homo sapiens
gtttgcccatttttc

SEQ ID NO: 951885 - DNA, 15 bp, Homo sapiens
tttgcccatttttct

SEQ ID NO: 951886 - DNA, 15 bp, Homo sapiens
ttgcccatttttctg

SEQ ID NO: 951887 - DNA, 15 bp, Homo sapiens
tgcccatttttctgt

SEQ ID NO: 951888 - DNA, 15 bp, Homo sapiens
gcccatttttctgtg

SEQ ID NO: 951889 - DNA, 15 bp, Homo sapiens
cccatttttctgtgg

SEQ ID NO: 951890 - DNA, 15 bp, Homo sapiens
ccatttttctgtgga

SEQ ID NO: 951891 - DNA, 15 bp, Homo sapiens
catttttctgtggaa

SEQ ID NO: 951892 - DNA, 15 bp, Homo sapiens
atttttctgtggaat

SEQ ID NO: 951893 - DNA, 15 bp, Homo sapiens
tttttctgtggaatt

SEQ ID NO: 951894 - DNA, 15 bp, Homo sapiens
ttttctgtggaattg

SEQ ID NO: 951895 - DNA, 15 bp, Homo sapiens
tttctgtggaattgt

SEQ ID NO: 951896 - DNA, 15 bp, Homo sapiens
ttctgtggaattgtt

SEQ ID NO: 951897 - DNA, 15 bp, Homo sapiens
tctgtggaattgttt

SEQ ID NO: 951898 - DNA, 15 bp, Homo sapiens
ctgtggaattgtttc

SEQ ID NO: 951899 - DNA, 15 bp, Homo sapiens
tgtggaattgtttct

SEQ ID NO: 951900 - DNA, 15 bp, Homo sapiens
gtggaattgtttctt

SEQ ID NO: 951901 - DNA, 15 bp, Homo sapiens
tggaattgtttcttc

SEQ ID NO: 951902 - DNA, 15 bp, Homo sapiens
ggaattgtttcttct

SEQ ID NO: 951903 - DNA, 15 bp, Homo sapiens
gaattgtttcttctt

SEQ ID NO: 951904 - DNA, 15 bp, Homo sapiens
aattgtttcttcttt

SEQ ID NO: 951905 - DNA, 15 bp, Homo sapiens
attgtttcttcttta

SEQ ID NO: 951906 - DNA, 15 bp, Homo sapiens
ttgtttcttctttac

SEQ ID NO: 951907 - DNA, 15 bp, Homo sapiens
tgtttcttctttaca

SEQ ID NO: 951908 - DNA, 15 bp, Homo sapiens
gtttcttctttacat

SEQ ID NO: 951909 - DNA, 15 bp, Homo sapiens
tttcttctttacatt

SEQ ID NO: 951910 - DNA, 15 bp, Homo sapiens
ttcttctttacattc

SEQ ID NO: 951911 - DNA, 15 bp, Homo sapiens
tcttctttacattca

SEQ ID NO: 951912 - DNA, 15 bp, Homo sapiens
cttctttacattcaa

SEQ ID NO: 951913 - DNA, 15 bp, Homo sapiens
ttctttacattcaat

SEQ ID NO: 951914 - DNA, 15 bp, Homo sapiens
tctttacattcaata

SEQ ID NO: 951915 - DNA, 15 bp, Homo sapiens
ctttacattcaatat

SEQ ID NO: 951916 - DNA, 15 bp, Homo sapiens
tttacattcaatata

SEQ ID NO: 951917 - DNA, 15 bp, Homo sapiens
ttacattcaatatag

SEQ ID NO: 951918 - DNA, 15 bp, Homo sapiens
tacattcaatatagg

SEQ ID NO: 951919 - DNA, 15 bp, Homo sapiens
acattcaatatagga

SEQ ID NO: 951920 - DNA, 15 bp, Homo sapiens
cattcaatataggaa

SEQ ID NO: 951921 - DNA, 15 bp, Homo sapiens
attcaatataggaat

SEQ ID NO: 951922 - DNA, 15 bp, Homo sapiens
ttcaatataggaatc

SEQ ID NO: 951923 - DNA, 15 bp, Homo sapiens
tcaatataggaatca

SEQ ID NO: 951924 - DNA, 15 bp, Homo sapiens
caatataggaatcat

SEQ ID NO: 951925 - DNA, 15 bp, Homo sapiens
aatataggaatcatt

SEQ ID NO: 951926 - DNA, 15 bp, Homo sapiens
atataggaatcattt

SEQ ID NO: 951927 - DNA, 15 bp, Homo sapiens
tataggaatcattta

SEQ ID NO: 951928 - DNA, 15 bp, Homo sapiens
ataggaatcatttaa

SEQ ID NO: 951929 - DNA, 15 bp, Homo sapiens
taggaatcatttaaa

SEQ ID NO: 951930 - DNA, 15 bp, Homo sapiens
aggaatcatttaaat

SEQ ID NO: 951931 - DNA, 15 bp, Homo sapiens
ggaatcatttaaata

SEQ ID NO: 951932 - DNA, 15 bp, Homo sapiens
gaatcatttaaatat

SEQ ID NO: 951933 - DNA, 15 bp, Homo sapiens
aatcatttaaatatg

SEQ ID NO: 951934 - DNA, 15 bp, Homo sapiens
atcatttaaatatga

SEQ ID NO: 951935 - DNA, 15 bp, Homo sapiens
tcatttaaatatgaa

SEQ ID NO: 951936 - DNA, 15 bp, Homo sapiens
catttaaatatgaac

SEQ ID NO: 951937 - DNA, 15 bp, Homo sapiens
atttaaatatgaacc

SEQ ID NO: 951938 - DNA, 15 bp, Homo sapiens
tttaaatatgaacct

SEQ ID NO: 951939 - DNA, 15 bp, Homo sapiens
ttaaatatgaacctc

SEQ ID NO: 951940 - DNA, 15 bp, Homo sapiens
taaatatgaacctct

SEQ ID NO: 951941 - DNA, 15 bp, Homo sapiens
aaatatgaacctctg

SEQ ID NO: 951942 - DNA, 15 bp, Homo sapiens
aatatgaacctctgt

SEQ ID NO: 951943 - DNA, 15 bp, Homo sapiens
atatgaacctctgtt

SEQ ID NO: 951944 - DNA, 15 bp, Homo sapiens
tatgaacctctgttg

SEQ ID NO: 951945 - DNA, 15 bp, Homo sapiens
atgaacctctgttgg

SEQ ID NO: 951946 - DNA, 15 bp, Homo sapiens
tgaacctctgttggt

SEQ ID NO: 951947 - DNA, 15 bp, Homo sapiens
gaacctctgttggtt

SEQ ID NO: 951948 - DNA, 15 bp, Homo sapiens
aacctctgttggtta

SEQ ID NO: 951949 - DNA, 15 bp, Homo sapiens
acctctgttggttat

SEQ ID NO: 951950 - DNA, 15 bp, Homo sapiens
cctctgttggttata

SEQ ID NO: 951951 - DNA, 15 bp, Homo sapiens
ctctgttggttatat

SEQ ID NO: 951952 - DNA, 15 bp, Homo sapiens
tctgttggttatatg

SEQ ID NO: 951953 - DNA, 15 bp, Homo sapiens
ctgttggttatatgt

SEQ ID NO: 951954 - DNA, 15 bp, Homo sapiens
tgttggttatatgtg

SEQ ID NO: 951955 - DNA, 15 bp, Homo sapiens
gttggttatatgtgt

SEQ ID NO: 951956 - DNA, 15 bp, Homo sapiens
ttggttatatgtgtt

SEQ ID NO: 951957 - DNA, 15 bp, Homo sapiens
tggttatatgtgttg

SEQ ID NO: 951958 - DNA, 15 bp, Homo sapiens
ggttatatgtgttgt

SEQ ID NO: 951959 - DNA, 15 bp, Homo sapiens
gttatatgtgttgta

SEQ ID NO: 951960 - DNA, 15 bp, Homo sapiens
ttatatgtgttgtaa

SEQ ID NO: 951961 - DNA, 15 bp, Homo sapiens
tatatgtgttgtaaa

SEQ ID NO: 951962 - DNA, 15 bp, Homo sapiens
atatgtgttgtaaat

SEQ ID NO: 951963 - DNA, 15 bp, Homo sapiens
tatgtgttgtaaata

SEQ ID NO: 951964 - DNA, 15 bp, Homo sapiens
atgtgttgtaaatat

SEQ ID NO: 951965 - DNA, 15 bp, Homo sapiens
tgtgttgtaaatatc

SEQ ID NO: 951966 - DNA, 15 bp, Homo sapiens
gtgttgtaaatatct

SEQ ID NO: 951967 - DNA, 15 bp, Homo sapiens
tgttgtaaatatctt

SEQ ID NO: 951968 - DNA, 15 bp, Homo sapiens
gttgtaaatatcttc

SEQ ID NO: 951969 - DNA, 15 bp, Homo sapiens
ttgtaaatatcttct

SEQ ID NO: 951970 - DNA, 15 bp, Homo sapiens
tgtaaatatcttctc

SEQ ID NO: 951971 - DNA, 15 bp, Homo sapiens
gtaaatatcttctcg

SEQ ID NO: 951972 - DNA, 15 bp, Homo sapiens
taaatatcttctcgc

SEQ ID NO: 951973 - DNA, 15 bp, Homo sapiens
aaatatcttctcgca

SEQ ID NO: 951974 - DNA, 15 bp, Homo sapiens
aatatcttctcgcat

SEQ ID NO: 951975 - DNA, 15 bp, Homo sapiens
atatcttctcgcatt

SEQ ID NO: 951976 - DNA, 15 bp, Homo sapiens
tatcttctcgcatta

SEQ ID NO: 951977 - DNA, 15 bp, Homo sapiens
atcttctcgcattat

SEQ ID NO: 951978 - DNA, 15 bp, Homo sapiens
tcttctcgcattatg

SEQ ID NO: 951979 - DNA, 15 bp, Homo sapiens
cttctcgcattatgt

SEQ ID NO: 951980 - DNA, 15 bp, Homo sapiens
ttctcgcattatgtg

SEQ ID NO: 951981 - DNA, 15 bp, Homo sapiens
tctcgcattatgtgg

SEQ ID NO: 951982 - DNA, 15 bp, Homo sapiens
ctcgcattatgtggc

SEQ ID NO: 951983 - DNA, 15 bp, Homo sapiens
tcgcattatgtggcc

SEQ ID NO: 951984 - DNA, 15 bp, Homo sapiens
cgcattatgtggcct

SEQ ID NO: 951985 - DNA, 15 bp, Homo sapiens
gcattatgtggcctt

SEQ ID NO: 951986 - DNA, 15 bp, Homo sapiens
cattatgtggccttt

SEQ ID NO: 951987 - DNA, 15 bp, Homo sapiens
attatgtggcctttt

SEQ ID NO: 951988 - DNA, 15 bp, Homo sapiens
ttatgtggccttttc

SEQ ID NO: 951989 - DNA, 15 bp, Homo sapiens
tatgtggccttttca

SEQ ID NO: 951990 - DNA, 15 bp, Homo sapiens
atgtggccttttcac

SEQ ID NO: 951991 - DNA, 15 bp, Homo sapiens
tgtggccttttcact

SEQ ID NO: 951992 - DNA, 15 bp, Homo sapiens
gtggccttttcactc

SEQ ID NO: 951993 - DNA, 15 bp, Homo sapiens
tggccttttcactct

SEQ ID NO: 951994 - DNA, 15 bp, Homo sapiens
ggccttttcactctc

SEQ ID NO: 951995 - DNA, 15 bp, Homo sapiens
gccttttcactctct

SEQ ID NO: 951996 - DNA, 15 bp, Homo sapiens
ccttttcactctctg

SEQ ID NO: 951997 - DNA, 15 bp, Homo sapiens
cttttcactctctga

SEQ ID NO: 951998 - DNA, 15 bp, Homo sapiens
ttttcactctctgaa

SEQ ID NO: 951999 - DNA, 15 bp, Homo sapiens
tttcactctctgaat

SEQ ID NO: 952000 - DNA, 15 bp, Homo sapiens
ttcactctctgaatg

SEQ ID NO: 952001 - DNA, 15 bp, Homo sapiens
tcactctctgaatgt

SEQ ID NO: 952002 - DNA, 15 bp, Homo sapiens
cactctctgaatgtc

SEQ ID NO: 952003 - DNA, 15 bp, Homo sapiens
actctctgaatgtct

SEQ ID NO: 952004 - DNA, 15 bp, Homo sapiens
ctctctgaatgtctt

SEQ ID NO: 952005 - DNA, 15 bp, Homo sapiens
tctctgaatgtcttt

SEQ ID NO: 952006 - DNA, 15 bp, Homo sapiens
ctctgaatgtctttc

SEQ ID NO: 952007 - DNA, 15 bp, Homo sapiens
tctgaatgtctttca

SEQ ID NO: 952008 - DNA, 15 bp, Homo sapiens
ctgaatgtctttcag

SEQ ID NO: 952009 - DNA, 15 bp, Homo sapiens
tgaatgtctttcagt

SEQ ID NO: 952010 - DNA, 15 bp, Homo sapiens
gaatgtctttcagtg

SEQ ID NO: 952011 - DNA, 15 bp, Homo sapiens
aatgtctttcagtgg

SEQ ID NO: 952012 - DNA, 15 bp, Homo sapiens
atgtctttcagtgga

SEQ ID NO: 952013 - DNA, 15 bp, Homo sapiens
tgtctttcagtggaa

SEQ ID NO: 952014 - DNA, 15 bp, Homo sapiens
gtctttcagtggaag

SEQ ID NO: 952015 - DNA, 15 bp, Homo sapiens
tctttcagtggaaga

SEQ ID NO: 952016 - DNA, 15 bp, Homo sapiens
ctttcagtggaagaa

SEQ ID NO: 952017 - DNA, 15 bp, Homo sapiens
tttcagtggaagaaa

SEQ ID NO: 952018 - DNA, 15 bp, Homo sapiens
ttcagtggaagaaac

SEQ ID NO: 952019 - DNA, 15 bp, Homo sapiens
tcagtggaagaaact

SEQ ID NO: 952020 - DNA, 15 bp, Homo sapiens
cagtggaagaaactt

SEQ ID NO: 952021 - DNA, 15 bp, Homo sapiens
agtggaagaaacttc

SEQ ID NO: 952022 - DNA, 15 bp, Homo sapiens
gtggaagaaacttct

SEQ ID NO: 952023 - DNA, 15 bp, Homo sapiens
tggaagaaacttcta

SEQ ID NO: 952024 - DNA, 15 bp, Homo sapiens
ggaagaaacttctaa

SEQ ID NO: 952025 - DNA, 15 bp, Homo sapiens
gaagaaacttctaat

SEQ ID NO: 952026 - DNA, 15 bp, Homo sapiens
aagaaacttctaatt

SEQ ID NO: 952027 - DNA, 15 bp, Homo sapiens
agaaacttctaattt

SEQ ID NO: 952028 - DNA, 15 bp, Homo sapiens
gaaacttctaatttc

SEQ ID NO: 952029 - DNA, 15 bp, Homo sapiens
aaacttctaatttca

SEQ ID NO: 952030 - DNA, 15 bp, Homo sapiens
aacttctaatttcag

SEQ ID NO: 952031 - DNA, 15 bp, Homo sapiens
acttctaatttcagt

SEQ ID NO: 952032 - DNA, 15 bp, Homo sapiens
cttctaatttcagtg

SEQ ID NO: 952033 - DNA, 15 bp, Homo sapiens
ttctaatttcagtgt

SEQ ID NO: 952034 - DNA, 15 bp, Homo sapiens
tctaatttcagtgta

SEQ ID NO: 952035 - DNA, 15 bp, Homo sapiens
ctaatttcagtgtaa

SEQ ID NO: 952036 - DNA, 15 bp, Homo sapiens
taatttcagtgtaac

SEQ ID NO: 952037 - DNA, 15 bp, Homo sapiens
aatttcagtgtaacc

SEQ ID NO: 952038 - DNA, 15 bp, Homo sapiens
atttcagtgtaacca

SEQ ID NO: 952039 - DNA, 15 bp, Homo sapiens
tttcagtgtaaccag

SEQ ID NO: 952040 - DNA, 15 bp, Homo sapiens
ttcagtgtaaccaga

SEQ ID NO: 952041 - DNA, 15 bp, Homo sapiens
tcagtgtaaccagat

SEQ ID NO: 952042 - DNA, 15 bp, Homo sapiens
cagtgtaaccagatt

SEQ ID NO: 952043 - DNA, 15 bp, Homo sapiens
agtgtaaccagattt

SEQ ID NO: 952044 - DNA, 15 bp, Homo sapiens
gtgtaaccagatttt

SEQ ID NO: 952045 - DNA, 15 bp, Homo sapiens
tgtaaccagattttg

SEQ ID NO: 952046 - DNA, 15 bp, Homo sapiens
gtaaccagattttgt

SEQ ID NO: 952047 - DNA, 15 bp, Homo sapiens
taaccagattttgtc

SEQ ID NO: 952048 - DNA, 15 bp, Homo sapiens
aaccagattttgtca

SEQ ID NO: 952049 - DNA, 15 bp, Homo sapiens
accagattttgtcaa

SEQ ID NO: 952050 - DNA, 15 bp, Homo sapiens
ccagattttgtcaat

SEQ ID NO: 952051 - DNA, 15 bp, Homo sapiens
cagattttgtcaatc

SEQ ID NO: 952052 - DNA, 15 bp, Homo sapiens
agattttgtcaatct

SEQ ID NO: 952053 - DNA, 15 bp, Homo sapiens
gattttgtcaatctt

SEQ ID NO: 952054 - DNA, 15 bp, Homo sapiens
attttgtcaatcttt

SEQ ID NO: 952055 - DNA, 15 bp, Homo sapiens
ttttgtcaatctttt

SEQ ID NO: 952056 - DNA, 15 bp, Homo sapiens
tttgtcaatcttttt

SEQ ID NO: 952057 - DNA, 15 bp, Homo sapiens
ttgtcaatctttttc

SEQ ID NO: 952058 - DNA, 15 bp, Homo sapiens
tgtcaatctttttct

SEQ ID NO: 952059 - DNA, 15 bp, Homo sapiens
gtcaatctttttctt

SEQ ID NO: 952060 - DNA, 15 bp, Homo sapiens
tcaatctttttcttt

SEQ ID NO: 952061 - DNA, 15 bp, Homo sapiens
caatctttttctttc

SEQ ID NO: 952062 - DNA, 15 bp, Homo sapiens
aatctttttctttct

SEQ ID NO: 952063 - DNA, 15 bp, Homo sapiens
atctttttctttctg

SEQ ID NO: 952064 - DNA, 15 bp, Homo sapiens
tctttttctttctgt

SEQ ID NO: 952065 - DNA, 15 bp, Homo sapiens
ctttttctttctgtt

SEQ ID NO: 952066 - DNA, 15 bp, Homo sapiens
tttttctttctgttc

SEQ ID NO: 952067 - DNA, 15 bp, Homo sapiens
ttttctttctgttca

SEQ ID NO: 952068 - DNA, 15 bp, Homo sapiens
tttctttctgttcag

SEQ ID NO: 952069 - DNA, 15 bp, Homo sapiens
ttctttctgttcagt

SEQ ID NO: 952070 - DNA, 15 bp, Homo sapiens
tctttctgttcagtg

SEQ ID NO: 952071 - DNA, 15 bp, Homo sapiens
ctttctgttcagtgc

SEQ ID NO: 952072 - DNA, 15 bp, Homo sapiens
tttctgttcagtgct

SEQ ID NO: 952073 - DNA, 15 bp, Homo sapiens
ttctgttcagtgctt

SEQ ID NO: 952074 - DNA, 15 bp, Homo sapiens
tctgttcagtgcttt

SEQ ID NO: 952075 - DNA, 15 bp, Homo sapiens
ctgttcagtgctttt

SEQ ID NO: 952076 - DNA, 15 bp, Homo sapiens
tgttcagtgcttttg

SEQ ID NO: 952077 - DNA, 15 bp, Homo sapiens
gttcagtgcttttgc

SEQ ID NO: 952078 - DNA, 15 bp, Homo sapiens
ttcagtgcttttgct

SEQ ID NO: 952079 - DNA, 15 bp, Homo sapiens
tcagtgcttttgctg

SEQ ID NO: 952080 - DNA, 15 bp, Homo sapiens
cagtgcttttgctgt

SEQ ID NO: 952081 - DNA, 15 bp, Homo sapiens
agtgcttttgctgtt

SEQ ID NO: 952082 - DNA, 15 bp, Homo sapiens
gtgcttttgctgttc

SEQ ID NO: 952083 - DNA, 15 bp, Homo sapiens
gcttttgctgttctg

SEQ ID NO: 952084 - DNA, 15 bp, Homo sapiens
cttttgctgttctgt

SEQ ID NO: 952085 - DNA, 15 bp, Homo sapiens
ttttgctgttctgtt

SEQ ID NO: 952086 - DNA, 15 bp, Homo sapiens
tttgctgttctgttt

SEQ ID NO: 952087 - DNA, 15 bp, Homo sapiens
ttgctgttctgttta

SEQ ID NO: 952088 - DNA, 15 bp, Homo sapiens
tgctgttctgtttaa

SEQ ID NO: 952089 - DNA, 15 bp, Homo sapiens
gctgttctgtttaag

SEQ ID NO: 952090 - DNA, 15 bp, Homo sapiens
ctgttctgtttaagt

SEQ ID NO: 952091 - DNA, 15 bp, Homo sapiens
tgttctgtttaagtc

SEQ ID NO: 952092 - DNA, 15 bp, Homo sapiens
gttctgtttaagtct

SEQ ID NO: 952093 - DNA, 15 bp, Homo sapiens
ttctgtttaagtctt

SEQ ID NO: 952094 - DNA, 15 bp, Homo sapiens
tctgtttaagtctta

SEQ ID NO: 952095 - DNA, 15 bp, Homo sapiens
ctgtttaagtcttat

SEQ ID NO: 952096 - DNA, 15 bp, Homo sapiens
tgtttaagtcttatg

SEQ ID NO: 952097 - DNA, 15 bp, Homo sapiens
gtttaagtcttatgt

SEQ ID NO: 952098 - DNA, 15 bp, Homo sapiens
tttaagtcttatgtc

SEQ ID NO: 952099 - DNA, 15 bp, Homo sapiens
ttaagtcttatgtcc

SEQ ID NO: 952100 - DNA, 15 bp, Homo sapiens
taagtcttatgtcca

SEQ ID NO: 952101 - DNA, 15 bp, Homo sapiens
aagtcttatgtccac

SEQ ID NO: 952102 - DNA, 15 bp, Homo sapiens
agtcttatgtccacc

SEQ ID NO: 952103 - DNA, 15 bp, Homo sapiens
gtcttatgtccaccc

SEQ ID NO: 952104 - DNA, 15 bp, Homo sapiens
tcttatgtccaccct

SEQ ID NO: 952105 - DNA, 15 bp, Homo sapiens
cttatgtccacccta

SEQ ID NO: 952106 - DNA, 15 bp, Homo sapiens
ttatgtccaccctaa

SEQ ID NO: 952107 - DNA, 15 bp, Homo sapiens
tatgtccaccctaat

SEQ ID NO: 952108 - DNA, 15 bp, Homo sapiens
atgtccaccctaata

SEQ ID NO: 952109 - DNA, 15 bp, Homo sapiens
tgtccaccctaatat

SEQ ID NO: 952110 - DNA, 15 bp, Homo sapiens
gtccaccctaatatc

SEQ ID NO: 952111 - DNA, 15 bp, Homo sapiens
tccaccctaatatca

SEQ ID NO: 952112 - DNA, 15 bp, Homo sapiens
ccaccctaatatcat

SEQ ID NO: 952113 - DNA, 15 bp, Homo sapiens
caccctaatatcata

SEQ ID NO: 952114 - DNA, 15 bp, Homo sapiens
accctaatatcataa

SEQ ID NO: 952115 - DNA, 15 bp, Homo sapiens
ccctaatatcataaa

SEQ ID NO: 952116 - DNA, 15 bp, Homo sapiens
cctaatatcataaag

SEQ ID NO: 952117 - DNA, 15 bp, Homo sapiens
ctaatatcataaagt

SEQ ID NO: 952118 - DNA, 15 bp, Homo sapiens
taatatcataaagtc

SEQ ID NO: 952119 - DNA, 15 bp, Homo sapiens
aatatcataaagtca

SEQ ID NO: 952120 - DNA, 15 bp, Homo sapiens
atatcataaagtcat

SEQ ID NO: 952121 - DNA, 15 bp, Homo sapiens
tatcataaagtcatt

SEQ ID NO: 952122 - DNA, 15 bp, Homo sapiens
atcataaagtcattc

SEQ ID NO: 952123 - DNA, 15 bp, Homo sapiens
tcataaagtcattct

SEQ ID NO: 952124 - DNA, 15 bp, Homo sapiens
cataaagtcattctc

SEQ ID NO: 952125 - DNA, 15 bp, Homo sapiens
ataaagtcattctcc

SEQ ID NO: 952126 - DNA, 15 bp, Homo sapiens
taaagtcattctcct

SEQ ID NO: 952127 - DNA, 15 bp, Homo sapiens
aaagtcattctccta

SEQ ID NO: 952128 - DNA, 15 bp, Homo sapiens
aagtcattctcctaa

SEQ ID NO: 952129 - DNA, 15 bp, Homo sapiens
agtcattctcctaaa

SEQ ID NO: 952130 - DNA, 15 bp, Homo sapiens
gtcattctcctaaat

SEQ ID NO: 952131 - DNA, 15 bp, Homo sapiens
tcattctcctaaatg

SEQ ID NO: 952132 - DNA, 15 bp, Homo sapiens
cattctcctaaatgt

SEQ ID NO: 952133 - DNA, 15 bp, Homo sapiens
attctcctaaatgtc

SEQ ID NO: 952134 - DNA, 15 bp, Homo sapiens
ttctcctaaatgtca

SEQ ID NO: 952135 - DNA, 15 bp, Homo sapiens
tctcctaaatgtcat

SEQ ID NO: 952136 - DNA, 15 bp, Homo sapiens
ctcctaaatgtcatt

SEQ ID NO: 952137 - DNA, 15 bp, Homo sapiens
tcctaaatgtcattc

SEQ ID NO: 952138 - DNA, 15 bp, Homo sapiens
cctaaatgtcattct

SEQ ID NO: 952139 - DNA, 15 bp, Homo sapiens
ctaaatgtcattcta

SEQ ID NO: 952140 - DNA, 15 bp, Homo sapiens
taaatgtcattctag

SEQ ID NO: 952141 - DNA, 15 bp, Homo sapiens
aaatgtcattctagg

SEQ ID NO: 952142 - DNA, 15 bp, Homo sapiens
aatgtcattctaggt

SEQ ID NO: 952143 - DNA, 15 bp, Homo sapiens
atgtcattctaggtg

SEQ ID NO: 952144 - DNA, 15 bp, Homo sapiens
tgtcattctaggtgt

SEQ ID NO: 952145 - DNA, 15 bp, Homo sapiens
gtcattctaggtgta

SEQ ID NO: 952146 - DNA, 15 bp, Homo sapiens
tcattctaggtgtac

SEQ ID NO: 952147 - DNA, 15 bp, Homo sapiens
cattctaggtgtact

SEQ ID NO: 952148 - DNA, 15 bp, Homo sapiens
attctaggtgtacta

SEQ ID NO: 952149 - DNA, 15 bp, Homo sapiens
ttctaggtgtactat

SEQ ID NO: 952150 - DNA, 15 bp, Homo sapiens
tctaggtgtactatt

SEQ ID NO: 952151 - DNA, 15 bp, Homo sapiens
ctaggtgtactattg

SEQ ID NO: 952152 - DNA, 15 bp, Homo sapiens
taggtgtactattgt

SEQ ID NO: 952153 - DNA, 15 bp, Homo sapiens
aggtgtactattgtt

SEQ ID NO: 952154 - DNA, 15 bp, Homo sapiens
ggtgtactattgttt

SEQ ID NO: 952155 - DNA, 15 bp, Homo sapiens
gtgtactattgtttt

SEQ ID NO: 952156 - DNA, 15 bp, Homo sapiens
tgtactattgttttc

SEQ ID NO: 952157 - DNA, 15 bp, Homo sapiens
gtactattgttttcc

SEQ ID NO: 952158 - DNA, 15 bp, Homo sapiens
tactattgttttccc

SEQ ID NO: 952159 - DNA, 15 bp, Homo sapiens
actattgttttccct

SEQ ID NO: 952160 - DNA, 15 bp, Homo sapiens
ctattgttttccctt

SEQ ID NO: 952161 - DNA, 15 bp, Homo sapiens
tattgttttcccttt

SEQ ID NO: 952162 - DNA, 15 bp, Homo sapiens
attgttttccctttc

SEQ ID NO: 952163 - DNA, 15 bp, Homo sapiens
ttgttttccctttca

SEQ ID NO: 952164 - DNA, 15 bp, Homo sapiens
tgttttccctttcat

SEQ ID NO: 952165 - DNA, 15 bp, Homo sapiens
gttttccctttcatg

SEQ ID NO: 952166 - DNA, 15 bp, Homo sapiens
ttttccctttcatgt

SEQ ID NO: 952167 - DNA, 15 bp, Homo sapiens
tttccctttcatgta

SEQ ID NO: 952168 - DNA, 15 bp, Homo sapiens
ttccctttcatgtat

SEQ ID NO: 952169 - DNA, 15 bp, Homo sapiens
tccctttcatgtata

SEQ ID NO: 952170 - DNA, 15 bp, Homo sapiens
ccctttcatgtatac

SEQ ID NO: 952171 - DNA, 15 bp, Homo sapiens
cctttcatgtataca

SEQ ID NO: 952172 - DNA, 15 bp, Homo sapiens
ctttcatgtatacag

SEQ ID NO: 952173 - DNA, 15 bp, Homo sapiens
tttcatgtatacagt

SEQ ID NO: 952174 - DNA, 15 bp, Homo sapiens
ttcatgtatacagta

SEQ ID NO: 952175 - DNA, 15 bp, Homo sapiens
tcatgtatacagtaa

SEQ ID NO: 952176 - DNA, 15 bp, Homo sapiens
catgtatacagtaaa

SEQ ID NO: 952177 - DNA, 15 bp, Homo sapiens
atgtatacagtaaaa

SEQ ID NO: 952178 - DNA, 15 bp, Homo sapiens
tgtatacagtaaaat

SEQ ID NO: 952179 - DNA, 15 bp, Homo sapiens
gtatacagtaaaatc

SEQ ID NO: 952180 - DNA, 15 bp, Homo sapiens
tatacagtaaaatct

SEQ ID NO: 952181 - DNA, 15 bp, Homo sapiens
atacagtaaaatctg

SEQ ID NO: 952182 - DNA, 15 bp, Homo sapiens
tacagtaaaatctga

SEQ ID NO: 952183 - DNA, 15 bp, Homo sapiens
acagtaaaatctgac

SEQ ID NO: 952184 - DNA, 15 bp, Homo sapiens
cagtaaaatctgact

SEQ ID NO: 952185 - DNA, 15 bp, Homo sapiens
agtaaaatctgactg

SEQ ID NO: 952186 - DNA, 15 bp, Homo sapiens
gtaaaatctgactgg

SEQ ID NO: 952187 - DNA, 15 bp, Homo sapiens
taaaatctgactgga

SEQ ID NO: 952188 - DNA, 15 bp, Homo sapiens
aaaatctgactggaa

SEQ ID NO: 952189 - DNA, 15 bp, Homo sapiens
aaatctgactggaat

SEQ ID NO: 952190 - DNA, 15 bp, Homo sapiens
aatctgactggaatt

SEQ ID NO: 952191 - DNA, 15 bp, Homo sapiens
atctgactggaatta

SEQ ID NO: 952192 - DNA, 15 bp, Homo sapiens
tctgactggaattaa

SEQ ID NO: 952193 - DNA, 15 bp, Homo sapiens
ctgactggaattaat

SEQ ID NO: 952194 - DNA, 15 bp, Homo sapiens
tgactggaattaatt

SEQ ID NO: 952195 - DNA, 15 bp, Homo sapiens
gactggaattaattt

SEQ ID NO: 952196 - DNA, 15 bp, Homo sapiens
actggaattaatttt

SEQ ID NO: 952197 - DNA, 15 bp, Homo sapiens
ctggaattaattttt

SEQ ID NO: 952198 - DNA, 15 bp, Homo sapiens
tggaattaattttta

SEQ ID NO: 952199 - DNA, 15 bp, Homo sapiens
ggaattaatttttat

SEQ ID NO: 952200 - DNA, 15 bp, Homo sapiens
gaattaatttttata

SEQ ID NO: 952201 - DNA, 15 bp, Homo sapiens
aattaatttttatat

SEQ ID NO: 952202 - DNA, 15 bp, Homo sapiens
attaatttttatata

SEQ ID NO: 952203 - DNA, 15 bp, Homo sapiens
ttaatttttatatat

SEQ ID NO: 952204 - DNA, 15 bp, Homo sapiens
taatttttatatatg

SEQ ID NO: 952205 - DNA, 15 bp, Homo sapiens
aatttttatatatgg

SEQ ID NO: 952206 - DNA, 15 bp, Homo sapiens
atttttatatatgga

SEQ ID NO: 952207 - DNA, 15 bp, Homo sapiens
tttttatatatggat

SEQ ID NO: 952208 - DNA, 15 bp, Homo sapiens
ttttatatatggatc

SEQ ID NO: 952209 - DNA, 15 bp, Homo sapiens
tttatatatggatca

SEQ ID NO: 952210 - DNA, 15 bp, Homo sapiens
ttatatatggatcaa

SEQ ID NO: 952211 - DNA, 15 bp, Homo sapiens
tatatatggatcaag

SEQ ID NO: 952212 - DNA, 15 bp, Homo sapiens
atatatggatcaagt

SEQ ID NO: 952213 - DNA, 15 bp, Homo sapiens
tatatggatcaagtt

SEQ ID NO: 952214 - DNA, 15 bp, Homo sapiens
atatggatcaagttt

SEQ ID NO: 952215 - DNA, 15 bp, Homo sapiens
tatggatcaagtttc

SEQ ID NO: 952216 - DNA, 15 bp, Homo sapiens
atggatcaagtttct

SEQ ID NO: 952217 - DNA, 15 bp, Homo sapiens
tggatcaagtttctt

SEQ ID NO: 952218 - DNA, 15 bp, Homo sapiens
ggatcaagtttcttt

SEQ ID NO: 952219 - DNA, 15 bp, Homo sapiens
gatcaagtttctttt

SEQ ID NO: 952220 - DNA, 15 bp, Homo sapiens
atcaagtttcttttt

SEQ ID NO: 952221 - DNA, 15 bp, Homo sapiens
tcaagtttctttttt

SEQ ID NO: 952222 - DNA, 15 bp, Homo sapiens
caagtttcttttttg

SEQ ID NO: 952223 - DNA, 15 bp, Homo sapiens
aagtttcttttttgt

SEQ ID NO: 952224 - DNA, 15 bp, Homo sapiens
agtttcttttttgtt

SEQ ID NO: 952225 - DNA, 15 bp, Homo sapiens
gtttcttttttgttt

SEQ ID NO: 952226 - DNA, 15 bp, Homo sapiens
tttcttttttgtttg

SEQ ID NO: 952227 - DNA, 15 bp, Homo sapiens
ttcttttttgtttgt

SEQ ID NO: 952228 - DNA, 15 bp, Homo sapiens
tcttttttgtttgtt

SEQ ID NO: 952229 - DNA, 15 bp, Homo sapiens
cttttttgtttgttt

SEQ ID NO: 952230 - DNA, 15 bp, Homo sapiens
ttttttgtttgtttt

SEQ ID NO: 952231 - DNA, 15 bp, Homo sapiens
tttgtttgttttttc

SEQ ID NO: 952232 - DNA, 15 bp, Homo sapiens
ttgtttgttttttca

SEQ ID NO: 952233 - DNA, 15 bp, Homo sapiens
tgtttgttttttcat

SEQ ID NO: 952234 - DNA, 15 bp, Homo sapiens
gtttgttttttcata

SEQ ID NO: 952235 - DNA, 15 bp, Homo sapiens
tttgttttttcatat

SEQ ID NO: 952236 - DNA, 15 bp, Homo sapiens
ttgttttttcatatg

SEQ ID NO: 952237 - DNA, 15 bp, Homo sapiens
tgttttttcatatgg

SEQ ID NO: 952238 - DNA, 15 bp, Homo sapiens
gttttttcatatgga

SEQ ID NO: 952239 - DNA, 15 bp, Homo sapiens
ttttttcatatggac

SEQ ID NO: 952240 - DNA, 15 bp, Homo sapiens
tttttcatatggaca

SEQ ID NO: 952241 - DNA, 15 bp, Homo sapiens
ttttcatatggacac

SEQ ID NO: 952242 - DNA, 15 bp, Homo sapiens
tttcatatggacacc

SEQ ID NO: 952243 - DNA, 15 bp, Homo sapiens
ttcatatggacaccc

SEQ ID NO: 952244 - DNA, 15 bp, Homo sapiens
tcatatggacaccca

SEQ ID NO: 952245 - DNA, 15 bp, Homo sapiens
catatggacacccac

SEQ ID NO: 952246 - DNA, 15 bp, Homo sapiens
atatggacacccacg

SEQ ID NO: 952247 - DNA, 15 bp, Homo sapiens
tatggacacccacgt

SEQ ID NO: 952248 - DNA, 15 bp, Homo sapiens
atggacacccacgtg

SEQ ID NO: 952249 - DNA, 15 bp, Homo sapiens
tggacacccacgtgc

SEQ ID NO: 952250 - DNA, 15 bp, Homo sapiens
ggacacccacgtgct

SEQ ID NO: 952251 - DNA, 15 bp, Homo sapiens
gacacccacgtgctc

SEQ ID NO: 952252 - DNA, 15 bp, Homo sapiens
acacccacgtgctcc

SEQ ID NO: 952253 - DNA, 15 bp, Homo sapiens
cacccacgtgctcca

SEQ ID NO: 952254 - DNA, 15 bp, Homo sapiens
acccacgtgctccag

SEQ ID NO: 952255 - DNA, 15 bp, Homo sapiens
cccacgtgctccagt

SEQ ID NO: 952256 - DNA, 15 bp, Homo sapiens
ccacgtgctccagtc

SEQ ID NO: 952257 - DNA, 15 bp, Homo sapiens
cacgtgctccagtcc

SEQ ID NO: 952258 - DNA, 15 bp, Homo sapiens
acgtgctccagtcca

SEQ ID NO: 952259 - DNA, 15 bp, Homo sapiens
cgtgctccagtccat

SEQ ID NO: 952260 - DNA, 15 bp, Homo sapiens
gtgctccagtccatt

SEQ ID NO: 952261 - DNA, 15 bp, Homo sapiens
tgctccagtccattt

SEQ ID NO: 952262 - DNA, 15 bp, Homo sapiens
gctccagtccatttt

SEQ ID NO: 952263 - DNA, 15 bp, Homo sapiens
ctccagtccattttt

SEQ ID NO: 952264 - DNA, 15 bp, Homo sapiens
tccagtccatttttg

SEQ ID NO: 952265 - DNA, 15 bp, Homo sapiens
ccagtccatttttga

SEQ ID NO: 952266 - DNA, 15 bp, Homo sapiens
cagtccatttttgaa

SEQ ID NO: 952267 - DNA, 15 bp, Homo sapiens
agtccatttttgaag

SEQ ID NO: 952268 - DNA, 15 bp, Homo sapiens
gtccatttttgaaga

SEQ ID NO: 952269 - DNA, 15 bp, Homo sapiens
tccatttttgaagag

SEQ ID NO: 952270 - DNA, 15 bp, Homo sapiens
ccatttttgaagaga

SEQ ID NO: 952271 - DNA, 15 bp, Homo sapiens
catttttgaagagat

SEQ ID NO: 952272 - DNA, 15 bp, Homo sapiens
atttttgaagagatc

SEQ ID NO: 952273 - DNA, 15 bp, Homo sapiens
tttttgaagagatca

SEQ ID NO: 952274 - DNA, 15 bp, Homo sapiens
ttttgaagagatcac

SEQ ID NO: 952275 - DNA, 15 bp, Homo sapiens
tttgaagagatcaca

SEQ ID NO: 952276 - DNA, 15 bp, Homo sapiens
ttgaagagatcacac

SEQ ID NO: 952277 - DNA, 15 bp, Homo sapiens
tgaagagatcacact

SEQ ID NO: 952278 - DNA, 15 bp, Homo sapiens
gaagagatcacactt

SEQ ID NO: 952279 - DNA, 15 bp, Homo sapiens
aagagatcacacttt

SEQ ID NO: 952280 - DNA, 15 bp, Homo sapiens
agagatcacactttt

SEQ ID NO: 952281 - DNA, 15 bp, Homo sapiens
gagatcacacttttc

SEQ ID NO: 952282 - DNA, 15 bp, Homo sapiens
agatcacacttttcc

SEQ ID NO: 952283 - DNA, 15 bp, Homo sapiens
gatcacacttttcct

SEQ ID NO: 952284 - DNA, 15 bp, Homo sapiens
atcacacttttcctc

SEQ ID NO: 952285 - DNA, 15 bp, Homo sapiens
tcacacttttcctca

SEQ ID NO: 952286 - DNA, 15 bp, Homo sapiens
cacacttttcctcat

SEQ ID NO: 952287 - DNA, 15 bp, Homo sapiens
acacttttcctcatt

SEQ ID NO: 952288 - DNA, 15 bp, Homo sapiens
cacttttcctcattg

SEQ ID NO: 952289 - DNA, 15 bp, Homo sapiens
acttttcctcattga

SEQ ID NO: 952290 - DNA, 15 bp, Homo sapiens
cttttcctcattgaa

SEQ ID NO: 952291 - DNA, 15 bp, Homo sapiens
ttttcctcattgaat

SEQ ID NO: 952292 - DNA, 15 bp, Homo sapiens
tttcctcattgaatt

SEQ ID NO: 952293 - DNA, 15 bp, Homo sapiens
ttcctcattgaatta

SEQ ID NO: 952294 - DNA, 15 bp, Homo sapiens
tcctcattgaattat

SEQ ID NO: 952295 - DNA, 15 bp, Homo sapiens
cctcattgaattatt

SEQ ID NO: 952296 - DNA, 15 bp, Homo sapiens
ctcattgaattattt

SEQ ID NO: 952297 - DNA, 15 bp, Homo sapiens
tcattgaattatttt

SEQ ID NO: 952298 - DNA, 15 bp, Homo sapiens
cattgaattattttt

SEQ ID NO: 952299 - DNA, 15 bp, Homo sapiens
attgaattattttta

SEQ ID NO: 952300 - DNA, 15 bp, Homo sapiens
ttgaattatttttag

SEQ ID NO: 952301 - DNA, 15 bp, Homo sapiens
tgaattatttttaga

SEQ ID NO: 952302 - DNA, 15 bp, Homo sapiens
gaattatttttagaa

SEQ ID NO: 952303 - DNA, 15 bp, Homo sapiens
aattatttttagaat

SEQ ID NO: 952304 - DNA, 15 bp, Homo sapiens
attatttttagaatc

SEQ ID NO: 952305 - DNA, 15 bp, Homo sapiens
ttatttttagaatct

SEQ ID NO: 952306 - DNA, 15 bp, Homo sapiens
tatttttagaatctc

SEQ ID NO: 952307 - DNA, 15 bp, Homo sapiens
atttttagaatctca

SEQ ID NO: 952308 - DNA, 15 bp, Homo sapiens
tttttagaatctcat

SEQ ID NO: 952309 - DNA, 15 bp, Homo sapiens
ttttagaatctcatt

SEQ ID NO: 952310 - DNA, 15 bp, Homo sapiens
tttagaatctcattt

SEQ ID NO: 952311 - DNA, 15 bp, Homo sapiens
ttagaatctcatttc

SEQ ID NO: 952312 - DNA, 15 bp, Homo sapiens
tagaatctcatttct

SEQ ID NO: 952313 - DNA, 15 bp, Homo sapiens
agaatctcatttctt

SEQ ID NO: 952314 - DNA, 15 bp, Homo sapiens
gaatctcatttcttc

SEQ ID NO: 952315 - DNA, 15 bp, Homo sapiens
aatctcatttcttcc

SEQ ID NO: 952316 - DNA, 15 bp, Homo sapiens
atctcatttcttcct

SEQ ID NO: 952317 - DNA, 15 bp, Homo sapiens
tctcatttcttcctc

SEQ ID NO: 952318 - DNA, 15 bp, Homo sapiens
ctcatttcttcctct

SEQ ID NO: 952319 - DNA, 15 bp, Homo sapiens
tcatttcttcctctg

SEQ ID NO: 952320 - DNA, 15 bp, Homo sapiens
catttcttcctctgt

SEQ ID NO: 952321 - DNA, 15 bp, Homo sapiens
atttcttcctctgtt

SEQ ID NO: 952322 - DNA, 15 bp, Homo sapiens
tttcttcctctgttt

SEQ ID NO: 952323 - DNA, 15 bp, Homo sapiens
ttcttcctctgtttt

SEQ ID NO: 952324 - DNA, 15 bp, Homo sapiens
tcttcctctgtttta

SEQ ID NO: 952325 - DNA, 15 bp, Homo sapiens
cttcctctgttttat

SEQ ID NO: 952326 - DNA, 15 bp, Homo sapiens
ttcctctgttttatc

SEQ ID NO: 952327 - DNA, 15 bp, Homo sapiens
tcctctgttttatca

SEQ ID NO: 952328 - DNA, 15 bp, Homo sapiens
cctctgttttatcag

SEQ ID NO: 952329 - DNA, 15 bp, Homo sapiens
ctctgttttatcaga

SEQ ID NO: 952330 - DNA, 15 bp, Homo sapiens
tctgttttatcagaa

SEQ ID NO: 952331 - DNA, 15 bp, Homo sapiens
ctgttttatcagaag

SEQ ID NO: 952332 - DNA, 15 bp, Homo sapiens
tgttttatcagaagt

SEQ ID NO: 952333 - DNA, 15 bp, Homo sapiens
gttttatcagaagtt

SEQ ID NO: 952334 - DNA, 15 bp, Homo sapiens
ttttatcagaagtta

SEQ ID NO: 952335 - DNA, 15 bp, Homo sapiens
tttatcagaagttat

SEQ ID NO: 952336 - DNA, 15 bp, Homo sapiens
ttatcagaagttatc

SEQ ID NO: 952337 - DNA, 15 bp, Homo sapiens
tatcagaagttatct

SEQ ID NO: 952338 - DNA, 15 bp, Homo sapiens
atcagaagttatcta

SEQ ID NO: 952339 - DNA, 15 bp, Homo sapiens
tcagaagttatctat

SEQ ID NO: 952340 - DNA, 15 bp, Homo sapiens
cagaagttatctatt

SEQ ID NO: 952341 - DNA, 15 bp, Homo sapiens
agaagttatctattc

SEQ ID NO: 952342 - DNA, 15 bp, Homo sapiens
gaagttatctattct

SEQ ID NO: 952343 - DNA, 15 bp, Homo sapiens
aagttatctattctg

SEQ ID NO: 952344 - DNA, 15 bp, Homo sapiens
agttatctattctgt

SEQ ID NO: 952345 - DNA, 15 bp, Homo sapiens
gttatctattctgtt

SEQ ID NO: 952346 - DNA, 15 bp, Homo sapiens
ttatctattctgtta

SEQ ID NO: 952347 - DNA, 15 bp, Homo sapiens
tatctattctgttac

SEQ ID NO: 952348 - DNA, 15 bp, Homo sapiens
atctattctgttact

SEQ ID NO: 952349 - DNA, 15 bp, Homo sapiens
tctattctgttacta

SEQ ID NO: 952350 - DNA, 15 bp, Homo sapiens
ctattctgttactat

SEQ ID NO: 952351 - DNA, 15 bp, Homo sapiens
tattctgttactatt

SEQ ID NO: 952352 - DNA, 15 bp, Homo sapiens
attctgttactattc

SEQ ID NO: 952353 - DNA, 15 bp, Homo sapiens
ttctgttactattct

SEQ ID NO: 952354 - DNA, 15 bp, Homo sapiens
tctgttactattctt

SEQ ID NO: 952355 - DNA, 15 bp, Homo sapiens
ctgttactattcttt

SEQ ID NO: 952356 - DNA, 15 bp, Homo sapiens
tgttactattctttt

SEQ ID NO: 952357 - DNA, 15 bp, Homo sapiens
gttactattcttttt

SEQ ID NO: 952358 - DNA, 15 bp, Homo sapiens
ttactattcttttta

SEQ ID NO: 952359 - DNA, 15 bp, Homo sapiens
tactattctttttaa

SEQ ID NO: 952360 - DNA, 15 bp, Homo sapiens
actattctttttaaa

SEQ ID NO: 952361 - DNA, 15 bp, Homo sapiens
ctattctttttaaag

SEQ ID NO: 952362 - DNA, 15 bp, Homo sapiens
tattctttttaaagt

SEQ ID NO: 952363 - DNA, 15 bp, Homo sapiens
attctttttaaagtc

SEQ ID NO: 952364 - DNA, 15 bp, Homo sapiens
ttctttttaaagtca

SEQ ID NO: 952365 - DNA, 15 bp, Homo sapiens
tctttttaaagtcaa

SEQ ID NO: 952366 - DNA, 15 bp, Homo sapiens
ctttttaaagtcaaa

SEQ ID NO: 952367 - DNA, 15 bp, Homo sapiens
tttttaaagtcaaaa

SEQ ID NO: 952368 - DNA, 15 bp, Homo sapiens
ttttaaagtcaaaaa

SEQ ID NO: 952369 - DNA, 15 bp, Homo sapiens
tttaaagtcaaaaaa

SEQ ID NO: 952370 - DNA, 15 bp, Homo sapiens
ttaaagtcaaaaaat

SEQ ID NO: 952371 - DNA, 15 bp, Homo sapiens
taaagtcaaaaaata

SEQ ID NO: 952372 - DNA, 15 bp, Homo sapiens
aaagtcaaaaaataa

SEQ ID NO: 952373 - DNA, 15 bp, Homo sapiens
aagtcaaaaaataac

SEQ ID NO: 952374 - DNA, 15 bp, Homo sapiens
agtcaaaaaataaca

SEQ ID NO: 952375 - DNA, 15 bp, Homo sapiens
gtcaaaaaataacag

SEQ ID NO: 952376 - DNA, 15 bp, Homo sapiens
tcaaaaaataacaga

SEQ ID NO: 952377 - DNA, 15 bp, Homo sapiens
caaaaaataacagat

SEQ ID NO: 952378 - DNA, 15 bp, Homo sapiens
aaaaaataacagata

SEQ ID NO: 952379 - DNA, 15 bp, Homo sapiens
aaaaataacagataa

SEQ ID NO: 952380 - DNA, 15 bp, Homo sapiens
aaaataacagataat

SEQ ID NO: 952381 - DNA, 15 bp, Homo sapiens
aaataacagataatg

SEQ ID NO: 952382 - DNA, 15 bp, Homo sapiens
aataacagataatgg

SEQ ID NO: 952383 - DNA, 15 bp, Homo sapiens
ataacagataatggt

SEQ ID NO: 952384 - DNA, 15 bp, Homo sapiens
taacagataatggtg

SEQ ID NO: 952385 - DNA, 15 bp, Homo sapiens
aacagataatggtga

SEQ ID NO: 952386 - DNA, 15 bp, Homo sapiens
acagataatggtgag

SEQ ID NO: 952387 - DNA, 15 bp, Homo sapiens
cagataatggtgagg

SEQ ID NO: 952388 - DNA, 15 bp, Homo sapiens
agataatggtgaggt

SEQ ID NO: 952389 - DNA, 15 bp, Homo sapiens
gataatggtgaggtt

SEQ ID NO: 952390 - DNA, 15 bp, Homo sapiens
ataatggtgaggttg

SEQ ID NO: 952391 - DNA, 15 bp, Homo sapiens
taatggtgaggttgc

SEQ ID NO: 952392 - DNA, 15 bp, Homo sapiens
aatggtgaggttgca

SEQ ID NO: 952393 - DNA, 15 bp, Homo sapiens
atggtgaggttgcaa

SEQ ID NO: 952394 - DNA, 15 bp, Homo sapiens
tggtgaggttgcaaa

SEQ ID NO: 952395 - DNA, 15 bp, Homo sapiens
ggtgaggttgcaaag

SEQ ID NO: 952396 - DNA, 15 bp, Homo sapiens
gtgaggttgcaaaga

SEQ ID NO: 952397 - DNA, 15 bp, Homo sapiens
tgaggttgcaaagaa

SEQ ID NO: 952398 - DNA, 15 bp, Homo sapiens
gaggttgcaaagaaa

SEQ ID NO: 952399 - DNA, 15 bp, Homo sapiens
aggttgcaaagaaaa

SEQ ID NO: 952400 - DNA, 15 bp, Homo sapiens
ggttgcaaagaaaaa

SEQ ID NO: 952401 - DNA, 15 bp, Homo sapiens
gttgcaaagaaaaag

SEQ ID NO: 952402 - DNA, 15 bp, Homo sapiens
ttgcaaagaaaaagg

SEQ ID NO: 952403 - DNA, 15 bp, Homo sapiens
tgcaaagaaaaagga

SEQ ID NO: 952404 - DNA, 15 bp, Homo sapiens
gcaaagaaaaaggaa

SEQ ID NO: 952405 - DNA, 15 bp, Homo sapiens
caaagaaaaaggaac

SEQ ID NO: 952406 - DNA, 15 bp, Homo sapiens
aaagaaaaaggaacg

SEQ ID NO: 952407 - DNA, 15 bp, Homo sapiens
aagaaaaaggaacgc

SEQ ID NO: 952408 - DNA, 15 bp, Homo sapiens
agaaaaaggaacgcc

SEQ ID NO: 952409 - DNA, 15 bp, Homo sapiens
gaaaaaggaacgcct

SEQ ID NO: 952410 - DNA, 15 bp, Homo sapiens
aaaaaggaacgccta

SEQ ID NO: 952411 - DNA, 15 bp, Homo sapiens
aaaaggaacgcctat

SEQ ID NO: 952412 - DNA, 15 bp, Homo sapiens
aaaggaacgcctatc

SEQ ID NO: 952413 - DNA, 15 bp, Homo sapiens
aaggaacgcctatcc

SEQ ID NO: 952414 - DNA, 15 bp, Homo sapiens
aggaacgcctatcca

SEQ ID NO: 952415 - DNA, 15 bp, Homo sapiens
ggaacgcctatccac

SEQ ID NO: 952416 - DNA, 15 bp, Homo sapiens
gaacgcctatccact

SEQ ID NO: 952417 - DNA, 15 bp, Homo sapiens
aacgcctatccactt

SEQ ID NO: 952418 - DNA, 15 bp, Homo sapiens
acgcctatccacttt

SEQ ID NO: 952419 - DNA, 15 bp, Homo sapiens
cgcctatccactttt

SEQ ID NO: 952420 - DNA, 15 bp, Homo sapiens
gcctatccacttttg

SEQ ID NO: 952421 - DNA, 15 bp, Homo sapiens
cctatccacttttgg

SEQ ID NO: 952422 - DNA, 15 bp, Homo sapiens
ctatccacttttggt

SEQ ID NO: 952423 - DNA, 15 bp, Homo sapiens
tatccacttttggtg

SEQ ID NO: 952424 - DNA, 15 bp, Homo sapiens
atccacttttggtgg

SEQ ID NO: 952425 - DNA, 15 bp, Homo sapiens
tccacttttggtggg

SEQ ID NO: 952426 - DNA, 15 bp, Homo sapiens
ccacttttggtggga

SEQ ID NO: 952427 - DNA, 15 bp, Homo sapiens
cacttttggtgggaa

SEQ ID NO: 952428 - DNA, 15 bp, Homo sapiens
acttttggtgggaaa

SEQ ID NO: 952429 - DNA, 15 bp, Homo sapiens
cttttggtgggaaag

SEQ ID NO: 952430 - DNA, 15 bp, Homo sapiens
ttttggtgggaaagt

SEQ ID NO: 952431 - DNA, 15 bp, Homo sapiens
tttggtgggaaagta

SEQ ID NO: 952432 - DNA, 15 bp, Homo sapiens
ttggtgggaaagtaa

SEQ ID NO: 952433 - DNA, 15 bp, Homo sapiens
tggtgggaaagtaaa

SEQ ID NO: 952434 - DNA, 15 bp, Homo sapiens
ggtgggaaagtaaac

SEQ ID NO: 952435 - DNA, 15 bp, Homo sapiens
gtgggaaagtaaact

SEQ ID NO: 952436 - DNA, 15 bp, Homo sapiens
tgggaaagtaaactg

SEQ ID NO: 952437 - DNA, 15 bp, Homo sapiens
gggaaagtaaactgg

SEQ ID NO: 952438 - DNA, 15 bp, Homo sapiens
ggaaagtaaactggt

SEQ ID NO: 952439 - DNA, 15 bp, Homo sapiens
gaaagtaaactggtt

SEQ ID NO: 952440 - DNA, 15 bp, Homo sapiens
aaagtaaactggttc

SEQ ID NO: 952441 - DNA, 15 bp, Homo sapiens
aagtaaactggttca

SEQ ID NO: 952442 - DNA, 15 bp, Homo sapiens
agtaaactggttcag

SEQ ID NO: 952443 - DNA, 15 bp, Homo sapiens
gtaaactggttcagc

SEQ ID NO: 952444 - DNA, 15 bp, Homo sapiens
taaactggttcagcc

SEQ ID NO: 952445 - DNA, 15 bp, Homo sapiens
aaactggttcagcca

SEQ ID NO: 952446 - DNA, 15 bp, Homo sapiens
aactggttcagccat

SEQ ID NO: 952447 - DNA, 15 bp, Homo sapiens
actggttcagccatt

SEQ ID NO: 952448 - DNA, 15 bp, Homo sapiens
ctggttcagccattg

SEQ ID NO: 952449 - DNA, 15 bp, Homo sapiens
tggttcagccattgt

SEQ ID NO: 952450 - DNA, 15 bp, Homo sapiens
ggttcagccattgtg

SEQ ID NO: 952451 - DNA, 15 bp, Homo sapiens
gttcagccattgtgt

SEQ ID NO: 952452 - DNA, 15 bp, Homo sapiens
ttcagccattgtgtt

SEQ ID NO: 952453 - DNA, 15 bp, Homo sapiens
tcagccattgtgttc

SEQ ID NO: 952454 - DNA, 15 bp, Homo sapiens
cagccattgtgttca

SEQ ID NO: 952455 - DNA, 15 bp, Homo sapiens
agccattgtgttcag

SEQ ID NO: 952456 - DNA, 15 bp, Homo sapiens
gccattgtgttcaga

SEQ ID NO: 952457 - DNA, 15 bp, Homo sapiens
ccattgtgttcagag

SEQ ID NO: 952458 - DNA, 15 bp, Homo sapiens
cattgtgttcagaga

SEQ ID NO: 952459 - DNA, 15 bp, Homo sapiens
attgtgttcagagaa

SEQ ID NO: 952460 - DNA, 15 bp, Homo sapiens
ttgtgttcagagaac

SEQ ID NO: 952461 - DNA, 15 bp, Homo sapiens
tgtgttcagagaaca

SEQ ID NO: 952462 - DNA, 15 bp, Homo sapiens
gtgttcagagaacac

SEQ ID NO: 952463 - DNA, 15 bp, Homo sapiens
tgttcagagaacaca

SEQ ID NO: 952464 - DNA, 15 bp, Homo sapiens
gttcagagaacacaa

SEQ ID NO: 952465 - DNA, 15 bp, Homo sapiens
ttcagagaacacaaa

SEQ ID NO: 952466 - DNA, 15 bp, Homo sapiens
tcagagaacacaaag

SEQ ID NO: 952467 - DNA, 15 bp, Homo sapiens
cagagaacacaaagc

SEQ ID NO: 952468 - DNA, 15 bp, Homo sapiens
agagaacacaaagca

SEQ ID NO: 952469 - DNA, 15 bp, Homo sapiens
gagaacacaaagcag

SEQ ID NO: 952470 - DNA, 15 bp, Homo sapiens
agaacacaaagcaga

SEQ ID NO: 952471 - DNA, 15 bp, Homo sapiens
gaacacaaagcagaa

SEQ ID NO: 952472 - DNA, 15 bp, Homo sapiens
aacacaaagcagaac

SEQ ID NO: 952473 - DNA, 15 bp, Homo sapiens
acacaaagcagaact

SEQ ID NO: 952474 - DNA, 15 bp, Homo sapiens
cacaaagcagaacta

SEQ ID NO: 952475 - DNA, 15 bp, Homo sapiens
acaaagcagaactat

SEQ ID NO: 952476 - DNA, 15 bp, Homo sapiens
caaagcagaactatc

SEQ ID NO: 952477 - DNA, 15 bp, Homo sapiens
aaagcagaactatca

SEQ ID NO: 952478 - DNA, 15 bp, Homo sapiens
aagcagaactatcat

SEQ ID NO: 952479 - DNA, 15 bp, Homo sapiens
agcagaactatcatt

SEQ ID NO: 952480 - DNA, 15 bp, Homo sapiens
gcagaactatcattc

SEQ ID NO: 952481 - DNA, 15 bp, Homo sapiens
cagaactatcattca

SEQ ID NO: 952482 - DNA, 15 bp, Homo sapiens
agaactatcattcat

SEQ ID NO: 952483 - DNA, 15 bp, Homo sapiens
gaactatcattcatc

SEQ ID NO: 952484 - DNA, 15 bp, Homo sapiens
aactatcattcatcc

SEQ ID NO: 952485 - DNA, 15 bp, Homo sapiens
actatcattcatccc

SEQ ID NO: 952486 - DNA, 15 bp, Homo sapiens
ctatcattcatccca

SEQ ID NO: 952487 - DNA, 15 bp, Homo sapiens
tatcattcatcccag

SEQ ID NO: 952488 - DNA, 15 bp, Homo sapiens
atcattcatcccagc

SEQ ID NO: 952489 - DNA, 15 bp, Homo sapiens
tcattcatcccagca

SEQ ID NO: 952490 - DNA, 15 bp, Homo sapiens
cattcatcccagcaa

SEQ ID NO: 952491 - DNA, 15 bp, Homo sapiens
attcatcccagcaat

SEQ ID NO: 952492 - DNA, 15 bp, Homo sapiens
ttcatcccagcaatc

SEQ ID NO: 952493 - DNA, 15 bp, Homo sapiens
tcatcccagcaatcc

SEQ ID NO: 952494 - DNA, 15 bp, Homo sapiens
catcccagcaatccc

SEQ ID NO: 952495 - DNA, 15 bp, Homo sapiens
atcccagcaatccca

SEQ ID NO: 952496 - DNA, 15 bp, Homo sapiens
tcccagcaatcccag

SEQ ID NO: 952497 - DNA, 15 bp, Homo sapiens
cccagcaatcccagt

SEQ ID NO: 952498 - DNA, 15 bp, Homo sapiens
ccagcaatcccagta

SEQ ID NO: 952499 - DNA, 15 bp, Homo sapiens
cagcaatcccagtat

SEQ ID NO: 952500 - DNA, 15 bp, Homo sapiens
agcaatcccagtatt

SEQ ID NO: 952501 - DNA, 15 bp, Homo sapiens
gcaatcccagtattg

SEQ ID NO: 952502 - DNA, 15 bp, Homo sapiens
caatcccagtattgg

SEQ ID NO: 952503 - DNA, 15 bp, Homo sapiens
aatcccagtattggg

SEQ ID NO: 952504 - DNA, 15 bp, Homo sapiens
atcccagtattgggt

SEQ ID NO: 952505 - DNA, 15 bp, Homo sapiens
tcccagtattgggta

SEQ ID NO: 952506 - DNA, 15 bp, Homo sapiens
cccagtattgggtat

SEQ ID NO: 952507 - DNA, 15 bp, Homo sapiens
ccagtattgggtata

SEQ ID NO: 952508 - DNA, 15 bp, Homo sapiens
cagtattgggtatat

SEQ ID NO: 952509 - DNA, 15 bp, Homo sapiens
agtattgggtatata

SEQ ID NO: 952510 - DNA, 15 bp, Homo sapiens
gtattgggtatatac

SEQ ID NO: 952511 - DNA, 15 bp, Homo sapiens
tattgggtatatacc

SEQ ID NO: 952512 - DNA, 15 bp, Homo sapiens
attgggtatataccc

SEQ ID NO: 952513 - DNA, 15 bp, Homo sapiens
ttgggtatataccct

SEQ ID NO: 952514 - DNA, 15 bp, Homo sapiens
tgggtatataccctg

SEQ ID NO: 952515 - DNA, 15 bp, Homo sapiens
gggtatataccctga

SEQ ID NO: 952516 - DNA, 15 bp, Homo sapiens
ggtatataccctgaa

SEQ ID NO: 952517 - DNA, 15 bp, Homo sapiens
gtatataccctgaac

SEQ ID NO: 952518 - DNA, 15 bp, Homo sapiens
tatataccctgaaca

SEQ ID NO: 952519 - DNA, 15 bp, Homo sapiens
atataccctgaacaa

SEQ ID NO: 952520 - DNA, 15 bp, Homo sapiens
tataccctgaacaat

SEQ ID NO: 952521 - DNA, 15 bp, Homo sapiens
ataccctgaacaata

SEQ ID NO: 952522 - DNA, 15 bp, Homo sapiens
taccctgaacaatac

SEQ ID NO: 952523 - DNA, 15 bp, Homo sapiens
accctgaacaataca

SEQ ID NO: 952524 - DNA, 15 bp, Homo sapiens
ccctgaacaatacaa

SEQ ID NO: 952525 - DNA, 15 bp, Homo sapiens
cctgaacaatacaaa

SEQ ID NO: 952526 - DNA, 15 bp, Homo sapiens
ctgaacaatacaaat

SEQ ID NO: 952527 - DNA, 15 bp, Homo sapiens
tgaacaatacaaatt

SEQ ID NO: 952528 - DNA, 15 bp, Homo sapiens
gaacaatacaaattg

SEQ ID NO: 952529 - DNA, 15 bp, Homo sapiens
aacaatacaaattgt

SEQ ID NO: 952530 - DNA, 15 bp, Homo sapiens
acaatacaaattgtt

SEQ ID NO: 952531 - DNA, 15 bp, Homo sapiens
caatacaaattgttc

SEQ ID NO: 952532 - DNA, 15 bp, Homo sapiens
aatacaaattgttct

SEQ ID NO: 952533 - DNA, 15 bp, Homo sapiens
atacaaattgttctg

SEQ ID NO: 952534 - DNA, 15 bp, Homo sapiens
tacaaattgttctgc

SEQ ID NO: 952535 - DNA, 15 bp, Homo sapiens
acaaattgttctgcc

SEQ ID NO: 952536 - DNA, 15 bp, Homo sapiens
caaattgttctgcca

SEQ ID NO: 952537 - DNA, 15 bp, Homo sapiens
aaattgttctgccac

SEQ ID NO: 952538 - DNA, 15 bp, Homo sapiens
aattgttctgccaca

SEQ ID NO: 952539 - DNA, 15 bp, Homo sapiens
attgttctgccacaa

SEQ ID NO: 952540 - DNA, 15 bp, Homo sapiens
ttgttctgccacaaa

SEQ ID NO: 952541 - DNA, 15 bp, Homo sapiens
tgttctgccacaaag

SEQ ID NO: 952542 - DNA, 15 bp, Homo sapiens
gttctgccacaaaga

SEQ ID NO: 952543 - DNA, 15 bp, Homo sapiens
ttctgccacaaagac

SEQ ID NO: 952544 - DNA, 15 bp, Homo sapiens
tctgccacaaagaca

SEQ ID NO: 952545 - DNA, 15 bp, Homo sapiens
ctgccacaaagacac

SEQ ID NO: 952546 - DNA, 15 bp, Homo sapiens
tgccacaaagacaca

SEQ ID NO: 952547 - DNA, 15 bp, Homo sapiens
gccacaaagacacat

SEQ ID NO: 952548 - DNA, 15 bp, Homo sapiens
ccacaaagacacatg

SEQ ID NO: 952549 - DNA, 15 bp, Homo sapiens
cacaaagacacatgt

SEQ ID NO: 952550 - DNA, 15 bp, Homo sapiens
acaaagacacatgta

SEQ ID NO: 952551 - DNA, 15 bp, Homo sapiens
caaagacacatgtac

SEQ ID NO: 952552 - DNA, 15 bp, Homo sapiens
aaagacacatgtaca

SEQ ID NO: 952553 - DNA, 15 bp, Homo sapiens
aagacacatgtacat

SEQ ID NO: 952554 - DNA, 15 bp, Homo sapiens
agacacatgtacatg

SEQ ID NO: 952555 - DNA, 15 bp, Homo sapiens
gacacatgtacatgt

SEQ ID NO: 952556 - DNA, 15 bp, Homo sapiens
acacatgtacatgta

SEQ ID NO: 952557 - DNA, 15 bp, Homo sapiens
cacatgtacatgtat

SEQ ID NO: 952558 - DNA, 15 bp, Homo sapiens
acatgtacatgtatg

SEQ ID NO: 952559 - DNA, 15 bp, Homo sapiens
catgtacatgtatgt

SEQ ID NO: 952560 - DNA, 15 bp, Homo sapiens
atgtacatgtatgtt

SEQ ID NO: 952561 - DNA, 15 bp, Homo sapiens
tgtacatgtatgttc

SEQ ID NO: 952562 - DNA, 15 bp, Homo sapiens
gtacatgtatgttca

SEQ ID NO: 952563 - DNA, 15 bp, Homo sapiens
tacatgtatgttcat

SEQ ID NO: 952564 - DNA, 15 bp, Homo sapiens
acatgtatgttcatg

SEQ ID NO: 952565 - DNA, 15 bp, Homo sapiens
catgtatgttcatgg

SEQ ID NO: 952566 - DNA, 15 bp, Homo sapiens
atgtatgttcatggc

SEQ ID NO: 952567 - DNA, 15 bp, Homo sapiens
tgtatgttcatggca

SEQ ID NO: 952568 - DNA, 15 bp, Homo sapiens
gtatgttcatggcag

SEQ ID NO: 952569 - DNA, 15 bp, Homo sapiens
tatgttcatggcagc

SEQ ID NO: 952570 - DNA, 15 bp, Homo sapiens
atgttcatggcagca

SEQ ID NO: 952571 - DNA, 15 bp, Homo sapiens
tgttcatggcagcag

SEQ ID NO: 952572 - DNA, 15 bp, Homo sapiens
gttcatggcagcagt

SEQ ID NO: 952573 - DNA, 15 bp, Homo sapiens
ttcatggcagcagtt

SEQ ID NO: 952574 - DNA, 15 bp, Homo sapiens
tcatggcagcagttc

SEQ ID NO: 952575 - DNA, 15 bp, Homo sapiens
catggcagcagttct

SEQ ID NO: 952576 - DNA, 15 bp, Homo sapiens
atggcagcagttctc

SEQ ID NO: 952577 - DNA, 15 bp, Homo sapiens
tggcagcagttctca

SEQ ID NO: 952578 - DNA, 15 bp, Homo sapiens
ggcagcagttctcac

SEQ ID NO: 952579 - DNA, 15 bp, Homo sapiens
gcagcagttctcaca

SEQ ID NO: 952580 - DNA, 15 bp, Homo sapiens
cagcagttctcacaa

SEQ ID NO: 952581 - DNA, 15 bp, Homo sapiens
agcagttctcacaat

SEQ ID NO: 952582 - DNA, 15 bp, Homo sapiens
gcagttctcacaata

SEQ ID NO: 952583 - DNA, 15 bp, Homo sapiens
cagttctcacaatag

SEQ ID NO: 952584 - DNA, 15 bp, Homo sapiens
agttctcacaatagc

SEQ ID NO: 952585 - DNA, 15 bp, Homo sapiens
gttctcacaatagca

SEQ ID NO: 952586 - DNA, 15 bp, Homo sapiens
ttctcacaatagcaa

SEQ ID NO: 952587 - DNA, 15 bp, Homo sapiens
tctcacaatagcaaa

SEQ ID NO: 952588 - DNA, 15 bp, Homo sapiens
cacaatagcaaagat

SEQ ID NO: 952589 - DNA, 15 bp, Homo sapiens
acaatagcaaagata

SEQ ID NO: 952590 - DNA, 15 bp, Homo sapiens
caatagcaaagatat

SEQ ID NO: 952591 - DNA, 15 bp, Homo sapiens
aatagcaaagatatg

SEQ ID NO: 952592 - DNA, 15 bp, Homo sapiens
atagcaaagatatgg

SEQ ID NO: 952593 - DNA, 15 bp, Homo sapiens
tagcaaagatatgga

SEQ ID NO: 952594 - DNA, 15 bp, Homo sapiens
agcaaagatatggaa

SEQ ID NO: 952595 - DNA, 15 bp, Homo sapiens
gcaaagatatggaat

SEQ ID NO: 952596 - DNA, 15 bp, Homo sapiens
caaagatatggaatc

SEQ ID NO: 952597 - DNA, 15 bp, Homo sapiens
aaagatatggaatca

SEQ ID NO: 952598 - DNA, 15 bp, Homo sapiens
aagatatggaatcaa

SEQ ID NO: 952599 - DNA, 15 bp, Homo sapiens
agatatggaatcaac

SEQ ID NO: 952600 - DNA, 15 bp, Homo sapiens
gatatggaatcaacc

SEQ ID NO: 952601 - DNA, 15 bp, Homo sapiens
atatggaatcaacct

SEQ ID NO: 952602 - DNA, 15 bp, Homo sapiens
tatggaatcaaccta

SEQ ID NO: 952603 - DNA, 15 bp, Homo sapiens
atggaatcaacctaa

SEQ ID NO: 952604 - DNA, 15 bp, Homo sapiens
tggaatcaacctaaa

SEQ ID NO: 952605 - DNA, 15 bp, Homo sapiens
ggaatcaacctaaat

SEQ ID NO: 952606 - DNA, 15 bp, Homo sapiens
gaatcaacctaaatg

SEQ ID NO: 952607 - DNA, 15 bp, Homo sapiens
aatcaacctaaatgc

SEQ ID NO: 952608 - DNA, 15 bp, Homo sapiens
atcaacctaaatgcc

SEQ ID NO: 952609 - DNA, 15 bp, Homo sapiens
tcaacctaaatgccc

SEQ ID NO: 952610 - DNA, 15 bp, Homo sapiens
caacctaaatgccca

SEQ ID NO: 952611 - DNA, 15 bp, Homo sapiens
aacctaaatgcccat

SEQ ID NO: 952612 - DNA, 15 bp, Homo sapiens
acctaaatgcccatc

SEQ ID NO: 952613 - DNA, 15 bp, Homo sapiens
cctaaatgcccatca

SEQ ID NO: 952614 - DNA, 15 bp, Homo sapiens
ctaaatgcccatcaa

SEQ ID NO: 952615 - DNA, 15 bp, Homo sapiens
taaatgcccatcaac

SEQ ID NO: 952616 - DNA, 15 bp, Homo sapiens
aaatgcccatcaaca

SEQ ID NO: 952617 - DNA, 15 bp, Homo sapiens
aatgcccatcaacag

SEQ ID NO: 952618 - DNA, 15 bp, Homo sapiens
atgcccatcaacagt

SEQ ID NO: 952619 - DNA, 15 bp, Homo sapiens
tgcccatcaacagtg

SEQ ID NO: 952620 - DNA, 15 bp, Homo sapiens
gcccatcaacagtgg

SEQ ID NO: 952621 - DNA, 15 bp, Homo sapiens
cccatcaacagtgga

SEQ ID NO: 952622 - DNA, 15 bp, Homo sapiens
ccatcaacagtggac

SEQ ID NO: 952623 - DNA, 15 bp, Homo sapiens
catcaacagtggaca

SEQ ID NO: 952624 - DNA, 15 bp, Homo sapiens
atcaacagtggacag

SEQ ID NO: 952625 - DNA, 15 bp, Homo sapiens
tcaacagtggacagg

SEQ ID NO: 952626 - DNA, 15 bp, Homo sapiens
caacagtggacagga

SEQ ID NO: 952627 - DNA, 15 bp, Homo sapiens
aacagtggacaggat

SEQ ID NO: 952628 - DNA, 15 bp, Homo sapiens
acagtggacaggata

SEQ ID NO: 952629 - DNA, 15 bp, Homo sapiens
cagtggacaggataa

SEQ ID NO: 952630 - DNA, 15 bp, Homo sapiens
agtggacaggataaa

SEQ ID NO: 952631 - DNA, 15 bp, Homo sapiens
gtggacaggataaag

SEQ ID NO: 952632 - DNA, 15 bp, Homo sapiens
tggacaggataaaga

SEQ ID NO: 952633 - DNA, 15 bp, Homo sapiens
ggacaggataaagaa

SEQ ID NO: 952634 - DNA, 15 bp, Homo sapiens
gacaggataaagaaa

SEQ ID NO: 952635 - DNA, 15 bp, Homo sapiens
acaggataaagaaaa

SEQ ID NO: 952636 - DNA, 15 bp, Homo sapiens
caggataaagaaaat

SEQ ID NO: 952637 - DNA, 15 bp, Homo sapiens
aggataaagaaaatg

SEQ ID NO: 952638 - DNA, 15 bp, Homo sapiens
tacaccatggaataa

SEQ ID NO: 952639 - DNA, 15 bp, Homo sapiens
acaccatggaataat

SEQ ID NO: 952640 - DNA, 15 bp, Homo sapiens
caccatggaataata

SEQ ID NO: 952641 - DNA, 15 bp, Homo sapiens
accatggaataatac

SEQ ID NO: 952642 - DNA, 15 bp, Homo sapiens
ccatggaataatact

SEQ ID NO: 952643 - DNA, 15 bp, Homo sapiens
catggaataatacta

SEQ ID NO: 952644 - DNA, 15 bp, Homo sapiens
atggaataatactac

SEQ ID NO: 952645 - DNA, 15 bp, Homo sapiens
tggaataatactacg

SEQ ID NO: 952646 - DNA, 15 bp, Homo sapiens
ggaataatactacgc

SEQ ID NO: 952647 - DNA, 15 bp, Homo sapiens
gaataatactacgca

SEQ ID NO: 952648 - DNA, 15 bp, Homo sapiens
aataatactacgcag

SEQ ID NO: 952649 - DNA, 15 bp, Homo sapiens
ataatactacgcagt

SEQ ID NO: 952650 - DNA, 15 bp, Homo sapiens
taatactacgcagtc

SEQ ID NO: 952651 - DNA, 15 bp, Homo sapiens
aatactacgcagtca

SEQ ID NO: 952652 - DNA, 15 bp, Homo sapiens
atactacgcagtcat

SEQ ID NO: 952653 - DNA, 15 bp, Homo sapiens
tactacgcagtcatg

SEQ ID NO: 952654 - DNA, 15 bp, Homo sapiens
actacgcagtcatga

SEQ ID NO: 952655 - DNA, 15 bp, Homo sapiens
ctacgcagtcatgaa

SEQ ID NO: 952656 - DNA, 15 bp, Homo sapiens
tacgcagtcatgaaa

SEQ ID NO: 952657 - DNA, 15 bp, Homo sapiens
acgcagtcatgaaaa

SEQ ID NO: 952658 - DNA, 15 bp, Homo sapiens
cgcagtcatgaaaaa

SEQ ID NO: 952659 - DNA, 15 bp, Homo sapiens
gcagtcatgaaaaag

SEQ ID NO: 952660 - DNA, 15 bp, Homo sapiens
cagtcatgaaaaaga

SEQ ID NO: 952661 - DNA, 15 bp, Homo sapiens
agtcatgaaaaagaa

SEQ ID NO: 952662 - DNA, 15 bp, Homo sapiens
gtcatgaaaaagaat

SEQ ID NO: 952663 - DNA, 15 bp, Homo sapiens
tcatgaaaaagaatg

SEQ ID NO: 952664 - DNA, 15 bp, Homo sapiens
catgaaaaagaatga

SEQ ID NO: 952665 - DNA, 15 bp, Homo sapiens
atgaaaaagaatgag

SEQ ID NO: 952666 - DNA, 15 bp, Homo sapiens
tgaaaaagaatgaga

SEQ ID NO: 952667 - DNA, 15 bp, Homo sapiens
gaaaaagaatgagat

SEQ ID NO: 952668 - DNA, 15 bp, Homo sapiens
aaaaagaatgagatc

SEQ ID NO: 952669 - DNA, 15 bp, Homo sapiens
aaaagaatgagatca

SEQ ID NO: 952670 - DNA, 15 bp, Homo sapiens
aaagaatgagatcat

SEQ ID NO: 952671 - DNA, 15 bp, Homo sapiens
aagaatgagatcatg

SEQ ID NO: 952672 - DNA, 15 bp, Homo sapiens
agaatgagatcatgt

SEQ ID NO: 952673 - DNA, 15 bp, Homo sapiens
gaatgagatcatgtc

SEQ ID NO: 952674 - DNA, 15 bp, Homo sapiens
aatgagatcatgtcc

SEQ ID NO: 952675 - DNA, 15 bp, Homo sapiens
atgagatcatgtcct

SEQ ID NO: 952676 - DNA, 15 bp, Homo sapiens
tgagatcatgtcctt

SEQ ID NO: 952677 - DNA, 15 bp, Homo sapiens
gagatcatgtccttt

SEQ ID NO: 952678 - DNA, 15 bp, Homo sapiens
agatcatgtcctttg

SEQ ID NO: 952679 - DNA, 15 bp, Homo sapiens
gatcatgtcctttgc

SEQ ID NO: 952680 - DNA, 15 bp, Homo sapiens
atcatgtcctttgca

SEQ ID NO: 952681 - DNA, 15 bp, Homo sapiens
catgtcctttgcagc

SEQ ID NO: 952682 - DNA, 15 bp, Homo sapiens
atgtcctttgcagca

SEQ ID NO: 952683 - DNA, 15 bp, Homo sapiens
tgtcctttgcagcaa

SEQ ID NO: 952684 - DNA, 15 bp, Homo sapiens
gtcctttgcagcaac

SEQ ID NO: 952685 - DNA, 15 bp, Homo sapiens
tcctttgcagcaacc

SEQ ID NO: 952686 - DNA, 15 bp, Homo sapiens
cctttgcagcaacca

SEQ ID NO: 952687 - DNA, 15 bp, Homo sapiens
ctttgcagcaaccat

SEQ ID NO: 952688 - DNA, 15 bp, Homo sapiens
tttgcagcaaccatg

SEQ ID NO: 952689 - DNA, 15 bp, Homo sapiens
ttgcagcaaccatgg

SEQ ID NO: 952690 - DNA, 15 bp, Homo sapiens
tgcagcaaccatgga

SEQ ID NO: 952691 - DNA, 15 bp, Homo sapiens
gcagcaaccatggat

SEQ ID NO: 952692 - DNA, 15 bp, Homo sapiens
cagcaaccatggatg

SEQ ID NO: 952693 - DNA, 15 bp, Homo sapiens
agcaaccatggatgg

SEQ ID NO: 952694 - DNA, 15 bp, Homo sapiens
gcaaccatggatgga

SEQ ID NO: 952695 - DNA, 15 bp, Homo sapiens
caaccatggatggag

SEQ ID NO: 952696 - DNA, 15 bp, Homo sapiens
aaccatggatggagc

SEQ ID NO: 952697 - DNA, 15 bp, Homo sapiens
accatggatggagct

SEQ ID NO: 952698 - DNA, 15 bp, Homo sapiens
ccatggatggagctg

SEQ ID NO: 952699 - DNA, 15 bp, Homo sapiens
tggatggagctggag

SEQ ID NO: 952700 - DNA, 15 bp, Homo sapiens
ggatggagctggagg

SEQ ID NO: 952701 - DNA, 15 bp, Homo sapiens
gatggagctggaggt

SEQ ID NO: 952702 - DNA, 15 bp, Homo sapiens
atggagctggaggtc

SEQ ID NO: 952703 - DNA, 15 bp, Homo sapiens
tggagctggaggtca

SEQ ID NO: 952704 - DNA, 15 bp, Homo sapiens
ggagctggaggtcat

SEQ ID NO: 952705 - DNA, 15 bp, Homo sapiens
gagctggaggtcatc

SEQ ID NO: 952706 - DNA, 15 bp, Homo sapiens
agctggaggtcatca

SEQ ID NO: 952707 - DNA, 15 bp, Homo sapiens
gctggaggtcatcat

SEQ ID NO: 952708 - DNA, 15 bp, Homo sapiens
ctggaggtcatcatg

SEQ ID NO: 952709 - DNA, 15 bp, Homo sapiens
tggaggtcatcatgc

SEQ ID NO: 952710 - DNA, 15 bp, Homo sapiens
ggaggtcatcatgct

SEQ ID NO: 952711 - DNA, 15 bp, Homo sapiens
gaggtcatcatgcta

SEQ ID NO: 952712 - DNA, 15 bp, Homo sapiens
aggtcatcatgctaa

SEQ ID NO: 952713 - DNA, 15 bp, Homo sapiens
ggtcatcatgctaag

SEQ ID NO: 952714 - DNA, 15 bp, Homo sapiens
gtcatcatgctaagt

SEQ ID NO: 952715 - DNA, 15 bp, Homo sapiens
tcatcatgctaagta

SEQ ID NO: 952716 - DNA, 15 bp, Homo sapiens
catcatgctaagtaa

SEQ ID NO: 952717 - DNA, 15 bp, Homo sapiens
atcatgctaagtaaa

SEQ ID NO: 952718 - DNA, 15 bp, Homo sapiens
tcatgctaagtaaac

SEQ ID NO: 952719 - DNA, 15 bp, Homo sapiens
catgctaagtaaact

SEQ ID NO: 952720 - DNA, 15 bp, Homo sapiens
atgctaagtaaacta

SEQ ID NO: 952721 - DNA, 15 bp, Homo sapiens
tgctaagtaaactaa

SEQ ID NO: 952722 - DNA, 15 bp, Homo sapiens
gctaagtaaactaac

SEQ ID NO: 952723 - DNA, 15 bp, Homo sapiens
ctaagtaaactaaca

SEQ ID NO: 952724 - DNA, 15 bp, Homo sapiens
taagtaaactaacac

SEQ ID NO: 952725 - DNA, 15 bp, Homo sapiens
aagtaaactaacaca

SEQ ID NO: 952726 - DNA, 15 bp, Homo sapiens
agtaaactaacacag

SEQ ID NO: 952727 - DNA, 15 bp, Homo sapiens
gtaaactaacacagg

SEQ ID NO: 952728 - DNA, 15 bp, Homo sapiens
taaactaacacagga

SEQ ID NO: 952729 - DNA, 15 bp, Homo sapiens
gaaaaccaaatacca

SEQ ID NO: 952730 - DNA, 15 bp, Homo sapiens
aaaaccaaataccac

SEQ ID NO: 952731 - DNA, 15 bp, Homo sapiens
aaaccaaataccaca

SEQ ID NO: 952732 - DNA, 15 bp, Homo sapiens
aaccaaataccacat

SEQ ID NO: 952733 - DNA, 15 bp, Homo sapiens
accaaataccacata

SEQ ID NO: 952734 - DNA, 15 bp, Homo sapiens
ccaaataccacatat

SEQ ID NO: 952735 - DNA, 15 bp, Homo sapiens
caaataccacatatt

SEQ ID NO: 952736 - DNA, 15 bp, Homo sapiens
aaataccacatattc

SEQ ID NO: 952737 - DNA, 15 bp, Homo sapiens
aataccacatattct

SEQ ID NO: 952738 - DNA, 15 bp, Homo sapiens
ataccacatattctc

SEQ ID NO: 952739 - DNA, 15 bp, Homo sapiens
taccacatattctca

SEQ ID NO: 952740 - DNA, 15 bp, Homo sapiens
accacatattctcac

SEQ ID NO: 952741 - DNA, 15 bp, Homo sapiens
ccacatattctcact

SEQ ID NO: 952742 - DNA, 15 bp, Homo sapiens
cacatattctcactt

SEQ ID NO: 952743 - DNA, 15 bp, Homo sapiens
acatattctcactta

SEQ ID NO: 952744 - DNA, 15 bp, Homo sapiens
catattctcacttaa

SEQ ID NO: 952745 - DNA, 15 bp, Homo sapiens
atattctcacttaaa

SEQ ID NO: 952746 - DNA, 15 bp, Homo sapiens
tattctcacttaaaa

SEQ ID NO: 952747 - DNA, 15 bp, Homo sapiens
attctcacttaaaag

SEQ ID NO: 952748 - DNA, 15 bp, Homo sapiens
ttctcacttaaaagt

SEQ ID NO: 952749 - DNA, 15 bp, Homo sapiens
tctcacttaaaagtg

SEQ ID NO: 952750 - DNA, 15 bp, Homo sapiens
ctcacttaaaagtgg

SEQ ID NO: 952751 - DNA, 15 bp, Homo sapiens
tcacttaaaagtggt

SEQ ID NO: 952752 - DNA, 15 bp, Homo sapiens
cacttaaaagtggta

SEQ ID NO: 952753 - DNA, 15 bp, Homo sapiens
acttaaaagtggtag

SEQ ID NO: 952754 - DNA, 15 bp, Homo sapiens
cttaaaagtggtagc

SEQ ID NO: 952755 - DNA, 15 bp, Homo sapiens
ttaaaagtggtagct

SEQ ID NO: 952756 - DNA, 15 bp, Homo sapiens
taaaagtggtagcta

SEQ ID NO: 952757 - DNA, 15 bp, Homo sapiens
aaaagtggtagctaa

SEQ ID NO: 952758 - DNA, 15 bp, Homo sapiens
aaagtggtagctaaa

SEQ ID NO: 952759 - DNA, 15 bp, Homo sapiens
aagtggtagctaaac

SEQ ID NO: 952760 - DNA, 15 bp, Homo sapiens
agtggtagctaaaca

SEQ ID NO: 952761 - DNA, 15 bp, Homo sapiens
gtggtagctaaacat

SEQ ID NO: 952762 - DNA, 15 bp, Homo sapiens
tggtagctaaacatt

SEQ ID NO: 952763 - DNA, 15 bp, Homo sapiens
ggtagctaaacattg

SEQ ID NO: 952764 - DNA, 15 bp, Homo sapiens
gtagctaaacattga

SEQ ID NO: 952765 - DNA, 15 bp, Homo sapiens
tagctaaacattgag

SEQ ID NO: 952766 - DNA, 15 bp, Homo sapiens
agctaaacattgagt

SEQ ID NO: 952767 - DNA, 15 bp, Homo sapiens
gctaaacattgagta

SEQ ID NO: 952768 - DNA, 15 bp, Homo sapiens
ctaaacattgagtac

SEQ ID NO: 952769 - DNA, 15 bp, Homo sapiens
taaacattgagtaca

SEQ ID NO: 952770 - DNA, 15 bp, Homo sapiens
aaacattgagtacac

SEQ ID NO: 952771 - DNA, 15 bp, Homo sapiens
aacattgagtacaca

SEQ ID NO: 952772 - DNA, 15 bp, Homo sapiens
acattgagtacacat

SEQ ID NO: 952773 - DNA, 15 bp, Homo sapiens
cattgagtacacatg

SEQ ID NO: 952774 - DNA, 15 bp, Homo sapiens
attgagtacacatgg

SEQ ID NO: 952775 - DNA, 15 bp, Homo sapiens
ttgagtacacatgga

SEQ ID NO: 952776 - DNA, 15 bp, Homo sapiens
tgagtacacatggac

SEQ ID NO: 952777 - DNA, 15 bp, Homo sapiens
gagtacacatggaca

SEQ ID NO: 952778 - DNA, 15 bp, Homo sapiens
agtacacatggacat

SEQ ID NO: 952779 - DNA, 15 bp, Homo sapiens
gtacacatggacata

SEQ ID NO: 952780 - DNA, 15 bp, Homo sapiens
tacacatggacataa

SEQ ID NO: 952781 - DNA, 15 bp, Homo sapiens
acacatggacataat

SEQ ID NO: 952782 - DNA, 15 bp, Homo sapiens
cacatggacataatg

SEQ ID NO: 952783 - DNA, 15 bp, Homo sapiens
acatggacataatga

SEQ ID NO: 952784 - DNA, 15 bp, Homo sapiens
catggacataatgaa

SEQ ID NO: 952785 - DNA, 15 bp, Homo sapiens
atggacataatgaat

SEQ ID NO: 952786 - DNA, 15 bp, Homo sapiens
tggacataatgaatg

SEQ ID NO: 952787 - DNA, 15 bp, Homo sapiens
ttttgggacagagtc

SEQ ID NO: 952788 - DNA, 15 bp, Homo sapiens
tttgggacagagtcg

SEQ ID NO: 952789 - DNA, 15 bp, Homo sapiens
ttgggacagagtcgg

SEQ ID NO: 952790 - DNA, 15 bp, Homo sapiens
tgggacagagtcggc

SEQ ID NO: 952791 - DNA, 15 bp, Homo sapiens
gggacagagtcggcc

SEQ ID NO: 952792 - DNA, 15 bp, Homo sapiens
ggacagagtcggcct

SEQ ID NO: 952793 - DNA, 15 bp, Homo sapiens
gacagagtcggcctc

SEQ ID NO: 952794 - DNA, 15 bp, Homo sapiens
acagagtcggcctct

SEQ ID NO: 952795 - DNA, 15 bp, Homo sapiens
cagagtcggcctctg

SEQ ID NO: 952796 - DNA, 15 bp, Homo sapiens
agagtcggcctctgt

SEQ ID NO: 952797 - DNA, 15 bp, Homo sapiens
gagtcggcctctgtt

SEQ ID NO: 952798 - DNA, 15 bp, Homo sapiens
agtcggcctctgttg

SEQ ID NO: 952799 - DNA, 15 bp, Homo sapiens
gtcggcctctgttgc

SEQ ID NO: 952800 - DNA, 15 bp, Homo sapiens
tcggcctctgttgcc

SEQ ID NO: 952801 - DNA, 15 bp, Homo sapiens
cggcctctgttgccc

SEQ ID NO: 952802 - DNA, 15 bp, Homo sapiens
ggcctctgttgccct

SEQ ID NO: 952803 - DNA, 15 bp, Homo sapiens
gcctctgttgccctg

SEQ ID NO: 952804 - DNA, 15 bp, Homo sapiens
cctctgttgccctgg

SEQ ID NO: 952805 - DNA, 15 bp, Homo sapiens
ctctgttgccctggc

SEQ ID NO: 952806 - DNA, 15 bp, Homo sapiens
tctgttgccctggct

SEQ ID NO: 952807 - DNA, 15 bp, Homo sapiens
ctgttgccctggctg

SEQ ID NO: 952808 - DNA, 15 bp, Homo sapiens
tgttgccctggctgg

SEQ ID NO: 952809 - DNA, 15 bp, Homo sapiens
gttgccctggctgga

SEQ ID NO: 952810 - DNA, 15 bp, Homo sapiens
ttgccctggctggag

SEQ ID NO: 952811 - DNA, 15 bp, Homo sapiens
tgccctggctggagt

SEQ ID NO: 952812 - DNA, 15 bp, Homo sapiens
gccctggctggagtg

SEQ ID NO: 952813 - DNA, 15 bp, Homo sapiens
ccctggctggagtgc

SEQ ID NO: 952814 - DNA, 15 bp, Homo sapiens
cctggctggagtgca

SEQ ID NO: 952815 - DNA, 15 bp, Homo sapiens
ctggctggagtgcag

SEQ ID NO: 952816 - DNA, 15 bp, Homo sapiens
tggctggagtgcagt

SEQ ID NO: 952817 - DNA, 15 bp, Homo sapiens
gcagtggcacaatct

SEQ ID NO: 952818 - DNA, 15 bp, Homo sapiens
cagtggcacaatctt

SEQ ID NO: 952819 - DNA, 15 bp, Homo sapiens
agtggcacaatcttg

SEQ ID NO: 952820 - DNA, 15 bp, Homo sapiens
gtggcacaatcttgg

SEQ ID NO: 952821 - DNA, 15 bp, Homo sapiens
tggcacaatcttggc

SEQ ID NO: 952822 - DNA, 15 bp, Homo sapiens
ggcacaatcttggct

SEQ ID NO: 952823 - DNA, 15 bp, Homo sapiens
gcacaatcttggctc

SEQ ID NO: 952824 - DNA, 15 bp, Homo sapiens
cacaatcttggctca

SEQ ID NO: 952825 - DNA, 15 bp, Homo sapiens
acaatcttggctcac

SEQ ID NO: 952826 - DNA, 15 bp, Homo sapiens
tggctcactgcaact

SEQ ID NO: 952827 - DNA, 15 bp, Homo sapiens
ggctcactgcaactt

SEQ ID NO: 952828 - DNA, 15 bp, Homo sapiens
gctcactgcaacttc

SEQ ID NO: 952829 - DNA, 15 bp, Homo sapiens
ctcactgcaacttct

SEQ ID NO: 952830 - DNA, 15 bp, Homo sapiens
tcactgcaacttctg

SEQ ID NO: 952831 - DNA, 15 bp, Homo sapiens
cactgcaacttctgc

SEQ ID NO: 952832 - DNA, 15 bp, Homo sapiens
actgcaacttctgcc

SEQ ID NO: 952833 - DNA, 15 bp, Homo sapiens
ctgcaacttctgcct

SEQ ID NO: 952834 - DNA, 15 bp, Homo sapiens
tgcaacttctgcctc

SEQ ID NO: 952835 - DNA, 15 bp, Homo sapiens
gcaacttctgcctcc

SEQ ID NO: 952836 - DNA, 15 bp, Homo sapiens
caacttctgcctccc

SEQ ID NO: 952837 - DNA, 15 bp, Homo sapiens
aacttctgcctcccg

SEQ ID NO: 952838 - DNA, 15 bp, Homo sapiens
acttctgcctcccgg

SEQ ID NO: 952839 - DNA, 15 bp, Homo sapiens
cttctgcctcccggg

SEQ ID NO: 952840 - DNA, 15 bp, Homo sapiens
ttctgcctcccgggt

SEQ ID NO: 952841 - DNA, 15 bp, Homo sapiens
tctgcctcccgggtt

SEQ ID NO: 952842 - DNA, 15 bp, Homo sapiens
ctgcctcccgggttt

SEQ ID NO: 952843 - DNA, 15 bp, Homo sapiens
tgcctcccgggttta

SEQ ID NO: 952844 - DNA, 15 bp, Homo sapiens
gcctcccgggtttaa

SEQ ID NO: 952845 - DNA, 15 bp, Homo sapiens
cctcccgggtttaag

SEQ ID NO: 952846 - DNA, 15 bp, Homo sapiens
ctcccgggtttaagc

SEQ ID NO: 952847 - DNA, 15 bp, Homo sapiens
tcccgggtttaagca

SEQ ID NO: 952848 - DNA, 15 bp, Homo sapiens
cccgggtttaagcaa

SEQ ID NO: 952849 - DNA, 15 bp, Homo sapiens
ccgggtttaagcaat

SEQ ID NO: 952850 - DNA, 15 bp, Homo sapiens
cgggtttaagcaatt

SEQ ID NO: 952851 - DNA, 15 bp, Homo sapiens
gggtttaagcaattc

SEQ ID NO: 952852 - DNA, 15 bp, Homo sapiens
ggtttaagcaattct

SEQ ID NO: 952853 - DNA, 15 bp, Homo sapiens
gtttaagcaattctc

SEQ ID NO: 952854 - DNA, 15 bp, Homo sapiens
tttaagcaattctcc

SEQ ID NO: 952855 - DNA, 15 bp, Homo sapiens
ttaagcaattctcct

SEQ ID NO: 952856 - DNA, 15 bp, Homo sapiens
taagcaattctcctg

SEQ ID NO: 952857 - DNA, 15 bp, Homo sapiens
aagcaattctcctgc

SEQ ID NO: 952858 - DNA, 15 bp, Homo sapiens
agcaattctcctgcc

SEQ ID NO: 952859 - DNA, 15 bp, Homo sapiens
gcaattctcctgcct

SEQ ID NO: 952860 - DNA, 15 bp, Homo sapiens
caattctcctgcctc

SEQ ID NO: 952861 - DNA, 15 bp, Homo sapiens
aattctcctgcctca

SEQ ID NO: 952862 - DNA, 15 bp, Homo sapiens
attctcctgcctcag

SEQ ID NO: 952863 - DNA, 15 bp, Homo sapiens
tgcctcagcctccta

SEQ ID NO: 952864 - DNA, 15 bp, Homo sapiens
gcctcagcctcctat

SEQ ID NO: 952865 - DNA, 15 bp, Homo sapiens
cctcagcctcctata

SEQ ID NO: 952866 - DNA, 15 bp, Homo sapiens
ctcagcctcctatat

SEQ ID NO: 952867 - DNA, 15 bp, Homo sapiens
tcagcctcctatata

SEQ ID NO: 952868 - DNA, 15 bp, Homo sapiens
cagcctcctatatag

SEQ ID NO: 952869 - DNA, 15 bp, Homo sapiens
agcctcctatatagc

SEQ ID NO: 952870 - DNA, 15 bp, Homo sapiens
gcctcctatatagct

SEQ ID NO: 952871 - DNA, 15 bp, Homo sapiens
cctcctatatagctg

SEQ ID NO: 952872 - DNA, 15 bp, Homo sapiens
ctcctatatagctgg

SEQ ID NO: 952873 - DNA, 15 bp, Homo sapiens
tcctatatagctggg

SEQ ID NO: 952874 - DNA, 15 bp, Homo sapiens
cctatatagctggga

SEQ ID NO: 952875 - DNA, 15 bp, Homo sapiens
ctatatagctgggat

SEQ ID NO: 952876 - DNA, 15 bp, Homo sapiens
tatatagctgggatt

SEQ ID NO: 952877 - DNA, 15 bp, Homo sapiens
atatagctgggatta

SEQ ID NO: 952878 - DNA, 15 bp, Homo sapiens
tatagctgggattac

SEQ ID NO: 952879 - DNA, 15 bp, Homo sapiens
atagctgggattaca

SEQ ID NO: 952880 - DNA, 15 bp, Homo sapiens
ggattacaggtgccg

SEQ ID NO: 952881 - DNA, 15 bp, Homo sapiens
gattacaggtgccgg

SEQ ID NO: 952882 - DNA, 15 bp, Homo sapiens
attacaggtgccggc

SEQ ID NO: 952883 - DNA, 15 bp, Homo sapiens
ttacaggtgccggcc

SEQ ID NO: 952884 - DNA, 15 bp, Homo sapiens
tacaggtgccggcca

SEQ ID NO: 952885 - DNA, 15 bp, Homo sapiens
acaggtgccggccac

SEQ ID NO: 952886 - DNA, 15 bp, Homo sapiens
caggtgccggccacc

SEQ ID NO: 952887 - DNA, 15 bp, Homo sapiens
aggtgccggccacca

SEQ ID NO: 952888 - DNA, 15 bp, Homo sapiens
ggtgccggccaccat

SEQ ID NO: 952889 - DNA, 15 bp, Homo sapiens
gtgccggccaccatg

SEQ ID NO: 952890 - DNA, 15 bp, Homo sapiens
tgccggccaccatgc

SEQ ID NO: 952891 - DNA, 15 bp, Homo sapiens
gccggccaccatgcc

SEQ ID NO: 952892 - DNA, 15 bp, Homo sapiens
ccggccaccatgccc

SEQ ID NO: 952893 - DNA, 15 bp, Homo sapiens
cggccaccatgccca

SEQ ID NO: 952894 - DNA, 15 bp, Homo sapiens
ggccaccatgcccag

SEQ ID NO: 952895 - DNA, 15 bp, Homo sapiens
gccaccatgcccagc

SEQ ID NO: 952896 - DNA, 15 bp, Homo sapiens
ccaccatgcccagct

SEQ ID NO: 952897 - DNA, 15 bp, Homo sapiens
caccatgcccagcta

SEQ ID NO: 952898 - DNA, 15 bp, Homo sapiens
accatgcccagctaa

SEQ ID NO: 952899 - DNA, 15 bp, Homo sapiens
ccatgcccagctaat

SEQ ID NO: 952900 - DNA, 15 bp, Homo sapiens
catgcccagctaatt

SEQ ID NO: 952901 - DNA, 15 bp, Homo sapiens
atgcccagctaattt

SEQ ID NO: 952902 - DNA, 15 bp, Homo sapiens
tgcccagctaatttt

SEQ ID NO: 952903 - DNA, 15 bp, Homo sapiens
cccagctaatttttg

SEQ ID NO: 952904 - DNA, 15 bp, Homo sapiens
aatttttgtattttc

SEQ ID NO: 952905 - DNA, 15 bp, Homo sapiens
atttttgtattttca

SEQ ID NO: 952906 - DNA, 15 bp, Homo sapiens
tttttgtattttcag

SEQ ID NO: 952907 - DNA, 15 bp, Homo sapiens
ttttgtattttcagt

SEQ ID NO: 952908 - DNA, 15 bp, Homo sapiens
tttgtattttcagtg

SEQ ID NO: 952909 - DNA, 15 bp, Homo sapiens
ttgtattttcagtga

SEQ ID NO: 952910 - DNA, 15 bp, Homo sapiens
tgtattttcagtgaa

SEQ ID NO: 952911 - DNA, 15 bp, Homo sapiens
gtattttcagtgaag

SEQ ID NO: 952912 - DNA, 15 bp, Homo sapiens
tattttcagtgaaga

SEQ ID NO: 952913 - DNA, 15 bp, Homo sapiens
attttcagtgaagac

SEQ ID NO: 952914 - DNA, 15 bp, Homo sapiens
ttttcagtgaagacg

SEQ ID NO: 952915 - DNA, 15 bp, Homo sapiens
tttcagtgaagacgt

SEQ ID NO: 952916 - DNA, 15 bp, Homo sapiens
ttcagtgaagacgtg

SEQ ID NO: 952917 - DNA, 15 bp, Homo sapiens
tcagtgaagacgtgg

SEQ ID NO: 952918 - DNA, 15 bp, Homo sapiens
cagtgaagacgtggt

SEQ ID NO: 952919 - DNA, 15 bp, Homo sapiens
agtgaagacgtggtt

SEQ ID NO: 952920 - DNA, 15 bp, Homo sapiens
gtgaagacgtggttt

SEQ ID NO: 952921 - DNA, 15 bp, Homo sapiens
tgaagacgtggtttc

SEQ ID NO: 952922 - DNA, 15 bp, Homo sapiens
gaagacgtggtttcg

SEQ ID NO: 952923 - DNA, 15 bp, Homo sapiens
aagacgtggtttcgc

SEQ ID NO: 952924 - DNA, 15 bp, Homo sapiens
agacgtggtttcgcc

SEQ ID NO: 952925 - DNA, 15 bp, Homo sapiens
gacgtggtttcgcca

SEQ ID NO: 952926 - DNA, 15 bp, Homo sapiens
acgtggtttcgccat

SEQ ID NO: 952927 - DNA, 15 bp, Homo sapiens
cgtggtttcgccatg

SEQ ID NO: 952928 - DNA, 15 bp, Homo sapiens
gtggtttcgccatgt

SEQ ID NO: 952929 - DNA, 15 bp, Homo sapiens
tggtttcgccatgtt

SEQ ID NO: 952930 - DNA, 15 bp, Homo sapiens
tttcgccatgttggc

SEQ ID NO: 952931 - DNA, 15 bp, Homo sapiens
ttcgccatgttggcc

SEQ ID NO: 952932 - DNA, 15 bp, Homo sapiens
tcgccatgttggcca

SEQ ID NO: 952933 - DNA, 15 bp, Homo sapiens
cgccatgttggccag

SEQ ID NO: 952934 - DNA, 15 bp, Homo sapiens
ccaggctggtctcaa

SEQ ID NO: 952935 - DNA, 15 bp, Homo sapiens
gtctcaaactcctgg

SEQ ID NO: 952936 - DNA, 15 bp, Homo sapiens
tctcaaactcctggc

SEQ ID NO: 952937 - DNA, 15 bp, Homo sapiens
ctcaaactcctggcc

SEQ ID NO: 952938 - DNA, 15 bp, Homo sapiens
tcaaactcctggcct

SEQ ID NO: 952939 - DNA, 15 bp, Homo sapiens
caaactcctggcctc

SEQ ID NO: 952940 - DNA, 15 bp, Homo sapiens
aaactcctggcctca

SEQ ID NO: 952941 - DNA, 15 bp, Homo sapiens
aactcctggcctcaa

SEQ ID NO: 952942 - DNA, 15 bp, Homo sapiens
actcctggcctcaag

SEQ ID NO: 952943 - DNA, 15 bp, Homo sapiens
ctcctggcctcaagt

SEQ ID NO: 952944 - DNA, 15 bp, Homo sapiens
tcctggcctcaagtg

SEQ ID NO: 952945 - DNA, 15 bp, Homo sapiens
cctggcctcaagtga

SEQ ID NO: 952946 - DNA, 15 bp, Homo sapiens
ctggcctcaagtgat

SEQ ID NO: 952947 - DNA, 15 bp, Homo sapiens
ggcctcaagtgatct

SEQ ID NO: 952948 - DNA, 15 bp, Homo sapiens
gcctcaagtgatctg

SEQ ID NO: 952949 - DNA, 15 bp, Homo sapiens
cctcaagtgatctgc

SEQ ID NO: 952950 - DNA, 15 bp, Homo sapiens
ctcaagtgatctgcc

SEQ ID NO: 952951 - DNA, 15 bp, Homo sapiens
tcaagtgatctgccc

SEQ ID NO: 952952 - DNA, 15 bp, Homo sapiens
caagtgatctgcccg

SEQ ID NO: 952953 - DNA, 15 bp, Homo sapiens
aagtgatctgcccgc

SEQ ID NO: 952954 - DNA, 15 bp, Homo sapiens
agtgatctgcccgcc

SEQ ID NO: 952955 - DNA, 15 bp, Homo sapiens
tgatctgcccgcctc

SEQ ID NO: 952956 - DNA, 15 bp, Homo sapiens
gatctgcccgcctcg

SEQ ID NO: 952957 - DNA, 15 bp, Homo sapiens
atctgcccgcctcgg

SEQ ID NO: 952958 - DNA, 15 bp, Homo sapiens
tctgcccgcctcggc

SEQ ID NO: 952959 - DNA, 15 bp, Homo sapiens
ctgcccgcctcggcc

SEQ ID NO: 952960 - DNA, 15 bp, Homo sapiens
tgcccgcctcggcct

SEQ ID NO: 952961 - DNA, 15 bp, Homo sapiens
gcccgcctcggcctc

SEQ ID NO: 952962 - DNA, 15 bp, Homo sapiens
cccgcctcggcctcc

SEQ ID NO: 952963 - DNA, 15 bp, Homo sapiens
ccgcctcggcctccc

SEQ ID NO: 952964 - DNA, 15 bp, Homo sapiens
cgcctcggcctccca

SEQ ID NO: 952965 - DNA, 15 bp, Homo sapiens
gcctcggcctcccaa

SEQ ID NO: 952966 - DNA, 15 bp, Homo sapiens
cctcggcctcccaaa

SEQ ID NO: 952967 - DNA, 15 bp, Homo sapiens
ctcggcctcccaaag

SEQ ID NO: 952968 - DNA, 15 bp, Homo sapiens
tcggcctcccaaagt

SEQ ID NO: 952969 - DNA, 15 bp, Homo sapiens
cggcctcccaaagtg

SEQ ID NO: 952970 - DNA, 15 bp, Homo sapiens
tgctgggattatagg

SEQ ID NO: 952971 - DNA, 15 bp, Homo sapiens
gctgggattataggc

SEQ ID NO: 952972 - DNA, 15 bp, Homo sapiens
ctgggattataggca

SEQ ID NO: 952973 - DNA, 15 bp, Homo sapiens
tgggattataggcat

SEQ ID NO: 952974 - DNA, 15 bp, Homo sapiens
gggattataggcatg

SEQ ID NO: 952975 - DNA, 15 bp, Homo sapiens
ggattataggcatga

SEQ ID NO: 952976 - DNA, 15 bp, Homo sapiens
gattataggcatgag

SEQ ID NO: 952977 - DNA, 15 bp, Homo sapiens
attataggcatgagc

SEQ ID NO: 952978 - DNA, 15 bp, Homo sapiens
ttataggcatgagcc

SEQ ID NO: 952979 - DNA, 15 bp, Homo sapiens
taggcatgagccact

SEQ ID NO: 952980 - DNA, 15 bp, Homo sapiens
aggcatgagccactg

SEQ ID NO: 952981 - DNA, 15 bp, Homo sapiens
ggcatgagccactgc

SEQ ID NO: 952982 - DNA, 15 bp, Homo sapiens
gcatgagccactgcg

SEQ ID NO: 952983 - DNA, 15 bp, Homo sapiens
catgagccactgcgc

SEQ ID NO: 952984 - DNA, 15 bp, Homo sapiens
atgagccactgcgcc

SEQ ID NO: 952985 - DNA, 15 bp, Homo sapiens
tgagccactgcgcct

SEQ ID NO: 952986 - DNA, 15 bp, Homo sapiens
gagccactgcgcctg

SEQ ID NO: 952987 - DNA, 15 bp, Homo sapiens
agccactgcgcctgg

SEQ ID NO: 952988 - DNA, 15 bp, Homo sapiens
gccactgcgcctggc

SEQ ID NO: 952989 - DNA, 15 bp, Homo sapiens
ccactgcgcctggcc

SEQ ID NO: 952990 - DNA, 15 bp, Homo sapiens
cactgcgcctggccc

SEQ ID NO: 952991 - DNA, 15 bp, Homo sapiens
actgcgcctggccct

SEQ ID NO: 952992 - DNA, 15 bp, Homo sapiens
ctgcgcctggccctg

SEQ ID NO: 952993 - DNA, 15 bp, Homo sapiens
tgcgcctggccctgc

SEQ ID NO: 952994 - DNA, 15 bp, Homo sapiens
gcgcctggccctgct

SEQ ID NO: 952995 - DNA, 15 bp, Homo sapiens
cgcctggccctgctt

SEQ ID NO: 952996 - DNA, 15 bp, Homo sapiens
gcctggccctgcttt

SEQ ID NO: 952997 - DNA, 15 bp, Homo sapiens
cctggccctgctttt

SEQ ID NO: 952998 - DNA, 15 bp, Homo sapiens
ctggccctgcttttc

SEQ ID NO: 952999 - DNA, 15 bp, Homo sapiens
tggccctgcttttca

SEQ ID NO: 953000 - DNA, 15 bp, Homo sapiens
ggccctgcttttcaa

SEQ ID NO: 953001 - DNA, 15 bp, Homo sapiens
gccctgcttttcaaa

SEQ ID NO: 953002 - DNA, 15 bp, Homo sapiens
ccctgcttttcaaac

SEQ ID NO: 953003 - DNA, 15 bp, Homo sapiens
cctgcttttcaaaca

SEQ ID NO: 953004 - DNA, 15 bp, Homo sapiens
ctgcttttcaaacat

SEQ ID NO: 953005 - DNA, 15 bp, Homo sapiens
tgcttttcaaacatt

SEQ ID NO: 953006 - DNA, 15 bp, Homo sapiens
gcttttcaaacattc

SEQ ID NO: 953007 - DNA, 15 bp, Homo sapiens
cttttcaaacattct

SEQ ID NO: 953008 - DNA, 15 bp, Homo sapiens
ttttcaaacattctg

SEQ ID NO: 953009 - DNA, 15 bp, Homo sapiens
tttcaaacattctga

SEQ ID NO: 953010 - DNA, 15 bp, Homo sapiens
ttcaaacattctgac

SEQ ID NO: 953011 - DNA, 15 bp, Homo sapiens
tcaaacattctgact

SEQ ID NO: 953012 - DNA, 15 bp, Homo sapiens
caaacattctgactt

SEQ ID NO: 953013 - DNA, 15 bp, Homo sapiens
aaacattctgacttt

SEQ ID NO: 953014 - DNA, 15 bp, Homo sapiens
aacattctgacttta

SEQ ID NO: 953015 - DNA, 15 bp, Homo sapiens
acattctgactttag

SEQ ID NO: 953016 - DNA, 15 bp, Homo sapiens
cattctgactttaga

SEQ ID NO: 953017 - DNA, 15 bp, Homo sapiens
attctgactttagag

SEQ ID NO: 953018 - DNA, 15 bp, Homo sapiens
ttctgactttagagc

SEQ ID NO: 953019 - DNA, 15 bp, Homo sapiens
tctgactttagagct

SEQ ID NO: 953020 - DNA, 15 bp, Homo sapiens
ctgactttagagctt

SEQ ID NO: 953021 - DNA, 15 bp, Homo sapiens
tgactttagagcttg

SEQ ID NO: 953022 - DNA, 15 bp, Homo sapiens
gactttagagcttgc

SEQ ID NO: 953023 - DNA, 15 bp, Homo sapiens
actttagagcttgct

SEQ ID NO: 953024 - DNA, 15 bp, Homo sapiens
ctttagagcttgcta

SEQ ID NO: 953025 - DNA, 15 bp, Homo sapiens
tttagagcttgctaa

SEQ ID NO: 953026 - DNA, 15 bp, Homo sapiens
ttagagcttgctaat

SEQ ID NO: 953027 - DNA, 15 bp, Homo sapiens
tagagcttgctaatc

SEQ ID NO: 953028 - DNA, 15 bp, Homo sapiens
agagcttgctaatct

SEQ ID NO: 953029 - DNA, 15 bp, Homo sapiens
gagcttgctaatcta

SEQ ID NO: 953030 - DNA, 15 bp, Homo sapiens
agcttgctaatctaa

SEQ ID NO: 953031 - DNA, 15 bp, Homo sapiens
gcttgctaatctaac

SEQ ID NO: 953032 - DNA, 15 bp, Homo sapiens
cttgctaatctaact

SEQ ID NO: 953033 - DNA, 15 bp, Homo sapiens
ttgctaatctaactt

SEQ ID NO: 953034 - DNA, 15 bp, Homo sapiens
tgctaatctaactta

SEQ ID NO: 953035 - DNA, 15 bp, Homo sapiens
gctaatctaacttat

SEQ ID NO: 953036 - DNA, 15 bp, Homo sapiens
ctaatctaacttatt

SEQ ID NO: 953037 - DNA, 15 bp, Homo sapiens
taatctaacttatta

SEQ ID NO: 953038 - DNA, 15 bp, Homo sapiens
aatctaacttattat

SEQ ID NO: 953039 - DNA, 15 bp, Homo sapiens
atctaacttattatg

SEQ ID NO: 953040 - DNA, 15 bp, Homo sapiens
tctaacttattatgt

SEQ ID NO: 953041 - DNA, 15 bp, Homo sapiens
ctaacttattatgtt

SEQ ID NO: 953042 - DNA, 15 bp, Homo sapiens
taacttattatgttt

SEQ ID NO: 953043 - DNA, 15 bp, Homo sapiens
aacttattatgttta

SEQ ID NO: 953044 - DNA, 15 bp, Homo sapiens
acttattatgtttaa

SEQ ID NO: 953045 - DNA, 15 bp, Homo sapiens
cttattatgtttaag

SEQ ID NO: 953046 - DNA, 15 bp, Homo sapiens
ttattatgtttaagg

SEQ ID NO: 953047 - DNA, 15 bp, Homo sapiens
tattatgtttaagga

SEQ ID NO: 953048 - DNA, 15 bp, Homo sapiens
attatgtttaaggaa

SEQ ID NO: 953049 - DNA, 15 bp, Homo sapiens
ttatgtttaaggaac

SEQ ID NO: 953050 - DNA, 15 bp, Homo sapiens
tatgtttaaggaacc

SEQ ID NO: 953051 - DNA, 15 bp, Homo sapiens
atgtttaaggaaccg

SEQ ID NO: 953052 - DNA, 15 bp, Homo sapiens
tgtttaaggaaccgg

SEQ ID NO: 953053 - DNA, 15 bp, Homo sapiens
gtttaaggaaccggt

SEQ ID NO: 953054 - DNA, 15 bp, Homo sapiens
tttaaggaaccggta

SEQ ID NO: 953055 - DNA, 15 bp, Homo sapiens
ttaaggaaccggtaa

SEQ ID NO: 953056 - DNA, 15 bp, Homo sapiens
taaggaaccggtaag

SEQ ID NO: 953057 - DNA, 15 bp, Homo sapiens
aaggaaccggtaagt

SEQ ID NO: 953058 - DNA, 15 bp, Homo sapiens
aggaaccggtaagta

SEQ ID NO: 953059 - DNA, 15 bp, Homo sapiens
ggaaccggtaagtaa

SEQ ID NO: 953060 - DNA, 15 bp, Homo sapiens
gaaccggtaagtaaa

SEQ ID NO: 953061 - DNA, 15 bp, Homo sapiens
aaccggtaagtaaac

SEQ ID NO: 953062 - DNA, 15 bp, Homo sapiens
accggtaagtaaaca

SEQ ID NO: 953063 - DNA, 15 bp, Homo sapiens
ccggtaagtaaacac

SEQ ID NO: 953064 - DNA, 15 bp, Homo sapiens
cggtaagtaaacaca

SEQ ID NO: 953065 - DNA, 15 bp, Homo sapiens
ggtaagtaaacacag

SEQ ID NO: 953066 - DNA, 15 bp, Homo sapiens
gtaagtaaacacagg

SEQ ID NO: 953067 - DNA, 15 bp, Homo sapiens
taagtaaacacagga

SEQ ID NO: 953068 - DNA, 15 bp, Homo sapiens
aagtaaacacaggag

SEQ ID NO: 953069 - DNA, 15 bp, Homo sapiens
agtaaacacaggagt

SEQ ID NO: 953070 - DNA, 15 bp, Homo sapiens
gtaaacacaggagtc

SEQ ID NO: 953071 - DNA, 15 bp, Homo sapiens
taaacacaggagtcc

SEQ ID NO: 953072 - DNA, 15 bp, Homo sapiens
aaacacaggagtcca

SEQ ID NO: 953073 - DNA, 15 bp, Homo sapiens
aacacaggagtccac

SEQ ID NO: 953074 - DNA, 15 bp, Homo sapiens
acacaggagtccacc

SEQ ID NO: 953075 - DNA, 15 bp, Homo sapiens
cacaggagtccacct

SEQ ID NO: 953076 - DNA, 15 bp, Homo sapiens
acaggagtccaccta

SEQ ID NO: 953077 - DNA, 15 bp, Homo sapiens
caggagtccacctat

SEQ ID NO: 953078 - DNA, 15 bp, Homo sapiens
aggagtccacctata

SEQ ID NO: 953079 - DNA, 15 bp, Homo sapiens
ggagtccacctatat

SEQ ID NO: 953080 - DNA, 15 bp, Homo sapiens
gagtccacctatatg

SEQ ID NO: 953081 - DNA, 15 bp, Homo sapiens
agtccacctatatgt

SEQ ID NO: 953082 - DNA, 15 bp, Homo sapiens
gtccacctatatgtg

SEQ ID NO: 953083 - DNA, 15 bp, Homo sapiens
tccacctatatgtga

SEQ ID NO: 953084 - DNA, 15 bp, Homo sapiens
ccacctatatgtgag

SEQ ID NO: 953085 - DNA, 15 bp, Homo sapiens
cacctatatgtgagt

SEQ ID NO: 953086 - DNA, 15 bp, Homo sapiens
acctatatgtgagtg

SEQ ID NO: 953087 - DNA, 15 bp, Homo sapiens
cctatatgtgagtgt

SEQ ID NO: 953088 - DNA, 15 bp, Homo sapiens
ctatatgtgagtgtg

SEQ ID NO: 953089 - DNA, 15 bp, Homo sapiens
tatatgtgagtgtga

SEQ ID NO: 953090 - DNA, 15 bp, Homo sapiens
atatgtgagtgtgag

SEQ ID NO: 953091 - DNA, 15 bp, Homo sapiens
tatgtgagtgtgagg

SEQ ID NO: 953092 - DNA, 15 bp, Homo sapiens
atgtgagtgtgaggg

SEQ ID NO: 953093 - DNA, 15 bp, Homo sapiens
tgtgagtgtgagggt

SEQ ID NO: 953094 - DNA, 15 bp, Homo sapiens
gtgagtgtgagggta

SEQ ID NO: 953095 - DNA, 15 bp, Homo sapiens
tgagtgtgagggtat

SEQ ID NO: 953096 - DNA, 15 bp, Homo sapiens
gagtgtgagggtata

SEQ ID NO: 953097 - DNA, 15 bp, Homo sapiens
agtgtgagggtatat

SEQ ID NO: 953098 - DNA, 15 bp, Homo sapiens
gtgtgagggtatatg

SEQ ID NO: 953099 - DNA, 15 bp, Homo sapiens
tgtgagggtatatga

SEQ ID NO: 953100 - DNA, 15 bp, Homo sapiens
gtgagggtatatgaa

SEQ ID NO: 953101 - DNA, 15 bp, Homo sapiens
tgagggtatatgaag

SEQ ID NO: 953102 - DNA, 15 bp, Homo sapiens
gagggtatatgaaga

SEQ ID NO: 953103 - DNA, 15 bp, Homo sapiens
agggtatatgaagag

SEQ ID NO: 953104 - DNA, 15 bp, Homo sapiens
gggtatatgaagagc

SEQ ID NO: 953105 - DNA, 15 bp, Homo sapiens
ggtatatgaagagct

SEQ ID NO: 953106 - DNA, 15 bp, Homo sapiens
gtatatgaagagctg

SEQ ID NO: 953107 - DNA, 15 bp, Homo sapiens
tatatgaagagctgg

SEQ ID NO: 953108 - DNA, 15 bp, Homo sapiens
atatgaagagctggt

SEQ ID NO: 953109 - DNA, 15 bp, Homo sapiens
tatgaagagctggtc

SEQ ID NO: 953110 - DNA, 15 bp, Homo sapiens
atgaagagctggtct

SEQ ID NO: 953111 - DNA, 15 bp, Homo sapiens
tgaagagctggtctc

SEQ ID NO: 953112 - DNA, 15 bp, Homo sapiens
gaagagctggtctca

SEQ ID NO: 953113 - DNA, 15 bp, Homo sapiens
aagagctggtctcat

SEQ ID NO: 953114 - DNA, 15 bp, Homo sapiens
agagctggtctcata

SEQ ID NO: 953115 - DNA, 15 bp, Homo sapiens
gagctggtctcatat

SEQ ID NO: 953116 - DNA, 15 bp, Homo sapiens
agctggtctcatata

SEQ ID NO: 953117 - DNA, 15 bp, Homo sapiens
gctggtctcatatat

SEQ ID NO: 953118 - DNA, 15 bp, Homo sapiens
ctggtctcatatatt

SEQ ID NO: 953119 - DNA, 15 bp, Homo sapiens
tggtctcatatattc

SEQ ID NO: 953120 - DNA, 15 bp, Homo sapiens
ggtctcatatattca

SEQ ID NO: 953121 - DNA, 15 bp, Homo sapiens
gtctcatatattcaa

SEQ ID NO: 953122 - DNA, 15 bp, Homo sapiens
tctcatatattcaat

SEQ ID NO: 953123 - DNA, 15 bp, Homo sapiens
ctcatatattcaatc

SEQ ID NO: 953124 - DNA, 15 bp, Homo sapiens
tcatatattcaatca

SEQ ID NO: 953125 - DNA, 15 bp, Homo sapiens
catatattcaatcaa

SEQ ID NO: 953126 - DNA, 15 bp, Homo sapiens
atatattcaatcaaa

SEQ ID NO: 953127 - DNA, 15 bp, Homo sapiens
tatattcaatcaaag

SEQ ID NO: 953128 - DNA, 15 bp, Homo sapiens
atattcaatcaaagc

SEQ ID NO: 953129 - DNA, 15 bp, Homo sapiens
tattcaatcaaagcg

SEQ ID NO: 953130 - DNA, 15 bp, Homo sapiens
attcaatcaaagcgt

SEQ ID NO: 953131 - DNA, 15 bp, Homo sapiens
ttcaatcaaagcgtt

SEQ ID NO: 953132 - DNA, 15 bp, Homo sapiens
tcaatcaaagcgttt

SEQ ID NO: 953133 - DNA, 15 bp, Homo sapiens
caatcaaagcgtttc

SEQ ID NO: 953134 - DNA, 15 bp, Homo sapiens
aatcaaagcgtttcc

SEQ ID NO: 953135 - DNA, 15 bp, Homo sapiens
atcaaagcgtttcct

SEQ ID NO: 953136 - DNA, 15 bp, Homo sapiens
tcaaagcgtttcctc

SEQ ID NO: 953137 - DNA, 15 bp, Homo sapiens
caaagcgtttcctct

SEQ ID NO: 953138 - DNA, 15 bp, Homo sapiens
aaagcgtttcctctt

SEQ ID NO: 953139 - DNA, 15 bp, Homo sapiens
aagcgtttcctcttc

SEQ ID NO: 953140 - DNA, 15 bp, Homo sapiens
agcgtttcctcttcc

SEQ ID NO: 953141 - DNA, 15 bp, Homo sapiens
gcgtttcctcttccc

SEQ ID NO: 953142 - DNA, 15 bp, Homo sapiens
cgtttcctcttcccc

SEQ ID NO: 953143 - DNA, 15 bp, Homo sapiens
gtttcctcttcccct

SEQ ID NO: 953144 - DNA, 15 bp, Homo sapiens
tttcctcttcccctc

SEQ ID NO: 953145 - DNA, 15 bp, Homo sapiens
ttcctcttcccctcg

SEQ ID NO: 953146 - DNA, 15 bp, Homo sapiens
tcctcttcccctcgt

SEQ ID NO: 953147 - DNA, 15 bp, Homo sapiens
cctcttcccctcgtt

SEQ ID NO: 953148 - DNA, 15 bp, Homo sapiens
ctcttcccctcgttt

SEQ ID NO: 953149 - DNA, 15 bp, Homo sapiens
tcttcccctcgttta

SEQ ID NO: 953150 - DNA, 15 bp, Homo sapiens
cttcccctcgtttac

SEQ ID NO: 953151 - DNA, 15 bp, Homo sapiens
ttcccctcgtttact

SEQ ID NO: 953152 - DNA, 15 bp, Homo sapiens
tcccctcgtttactt

SEQ ID NO: 953153 - DNA, 15 bp, Homo sapiens
cccctcgtttacttt

SEQ ID NO: 953154 - DNA, 15 bp, Homo sapiens
ccctcgtttactttg

SEQ ID NO: 953155 - DNA, 15 bp, Homo sapiens
cctcgtttactttgt

SEQ ID NO: 953156 - DNA, 15 bp, Homo sapiens
ctcgtttactttgtc

SEQ ID NO: 953157 - DNA, 15 bp, Homo sapiens
tcgtttactttgtct

SEQ ID NO: 953158 - DNA, 15 bp, Homo sapiens
cgtttactttgtctt

SEQ ID NO: 953159 - DNA, 15 bp, Homo sapiens
gtttactttgtcttg

SEQ ID NO: 953160 - DNA, 15 bp, Homo sapiens
tttactttgtcttgg

SEQ ID NO: 953161 - DNA, 15 bp, Homo sapiens
ttactttgtcttgga

SEQ ID NO: 953162 - DNA, 15 bp, Homo sapiens
tactttgtcttggac

SEQ ID NO: 953163 - DNA, 15 bp, Homo sapiens
actttgtcttggact

SEQ ID NO: 953164 - DNA, 15 bp, Homo sapiens
ctttgtcttggactt

SEQ ID NO: 953165 - DNA, 15 bp, Homo sapiens
tttgtcttggacttg

SEQ ID NO: 953166 - DNA, 15 bp, Homo sapiens
ttgtcttggacttgt

SEQ ID NO: 953167 - DNA, 15 bp, Homo sapiens
tgtcttggacttgtt

SEQ ID NO: 953168 - DNA, 15 bp, Homo sapiens
gtcttggacttgttt

SEQ ID NO: 953169 - DNA, 15 bp, Homo sapiens
tcttggacttgtttt

SEQ ID NO: 953170 - DNA, 15 bp, Homo sapiens
cttggacttgttttc

SEQ ID NO: 953171 - DNA, 15 bp, Homo sapiens
ttggacttgttttca

SEQ ID NO: 953172 - DNA, 15 bp, Homo sapiens
tggacttgttttcaa

SEQ ID NO: 953173 - DNA, 15 bp, Homo sapiens
ggacttgttttcaaa

SEQ ID NO: 953174 - DNA, 15 bp, Homo sapiens
gacttgttttcaaat

SEQ ID NO: 953175 - DNA, 15 bp, Homo sapiens
acttgttttcaaatt

SEQ ID NO: 953176 - DNA, 15 bp, Homo sapiens
cttgttttcaaatta

SEQ ID NO: 953177 - DNA, 15 bp, Homo sapiens
ttgttttcaaattat

SEQ ID NO: 953178 - DNA, 15 bp, Homo sapiens
tgttttcaaattatt

SEQ ID NO: 953179 - DNA, 15 bp, Homo sapiens
gttttcaaattattt

SEQ ID NO: 953180 - DNA, 15 bp, Homo sapiens
ttttcaaattatttc

SEQ ID NO: 953181 - DNA, 15 bp, Homo sapiens
tttcaaattatttca

SEQ ID NO: 953182 - DNA, 15 bp, Homo sapiens
ttcaaattatttcat

SEQ ID NO: 953183 - DNA, 15 bp, Homo sapiens
tcaaattatttcata

SEQ ID NO: 953184 - DNA, 15 bp, Homo sapiens
caaattatttcatac

SEQ ID NO: 953185 - DNA, 15 bp, Homo sapiens
aaattatttcataca

SEQ ID NO: 953186 - DNA, 15 bp, Homo sapiens
aattatttcatacat

SEQ ID NO: 953187 - DNA, 15 bp, Homo sapiens
attatttcatacata

SEQ ID NO: 953188 - DNA, 15 bp, Homo sapiens
ttatttcatacatat

SEQ ID NO: 953189 - DNA, 15 bp, Homo sapiens
tatttcatacatata

SEQ ID NO: 953190 - DNA, 15 bp, Homo sapiens
atttcatacatatac

SEQ ID NO: 953191 - DNA, 15 bp, Homo sapiens
tttcatacatataca

SEQ ID NO: 953192 - DNA, 15 bp, Homo sapiens
ttcatacatatacac

SEQ ID NO: 953193 - DNA, 15 bp, Homo sapiens
tcatacatatacaca

SEQ ID NO: 953194 - DNA, 15 bp, Homo sapiens
catacatatacacat

SEQ ID NO: 953195 - DNA, 15 bp, Homo sapiens
atacatatacacatg

SEQ ID NO: 953196 - DNA, 15 bp, Homo sapiens
tacatatacacatgt

SEQ ID NO: 953197 - DNA, 15 bp, Homo sapiens
acatatacacatgtc

SEQ ID NO: 953198 - DNA, 15 bp, Homo sapiens
catatacacatgtcc

SEQ ID NO: 953199 - DNA, 15 bp, Homo sapiens
atatacacatgtcct

SEQ ID NO: 953200 - DNA, 15 bp, Homo sapiens
tatacacatgtcctt

SEQ ID NO: 953201 - DNA, 15 bp, Homo sapiens
atacacatgtccttt

SEQ ID NO: 953202 - DNA, 15 bp, Homo sapiens
tacacatgtcctttc

SEQ ID NO: 953203 - DNA, 15 bp, Homo sapiens
acacatgtcctttct

SEQ ID NO: 953204 - DNA, 15 bp, Homo sapiens
cacatgtcctttctc

SEQ ID NO: 953205 - DNA, 15 bp, Homo sapiens
acatgtcctttctct

SEQ ID NO: 953206 - DNA, 15 bp, Homo sapiens
catgtcctttctctt

SEQ ID NO: 953207 - DNA, 15 bp, Homo sapiens
atgtcctttctcttc

SEQ ID NO: 953208 - DNA, 15 bp, Homo sapiens
tgtcctttctcttca

SEQ ID NO: 953209 - DNA, 15 bp, Homo sapiens
gtcctttctcttcaa

SEQ ID NO: 953210 - DNA, 15 bp, Homo sapiens
tcctttctcttcaac

SEQ ID NO: 953211 - DNA, 15 bp, Homo sapiens
cctttctcttcaaca

SEQ ID NO: 953212 - DNA, 15 bp, Homo sapiens
ctttctcttcaacat

SEQ ID NO: 953213 - DNA, 15 bp, Homo sapiens
tttctcttcaacatc

SEQ ID NO: 953214 - DNA, 15 bp, Homo sapiens
ttctcttcaacatca

SEQ ID NO: 953215 - DNA, 15 bp, Homo sapiens
tctcttcaacatcac

SEQ ID NO: 953216 - DNA, 15 bp, Homo sapiens
ctcttcaacatcacc

SEQ ID NO: 953217 - DNA, 15 bp, Homo sapiens
tcttcaacatcacca

SEQ ID NO: 953218 - DNA, 15 bp, Homo sapiens
cttcaacatcaccac

SEQ ID NO: 953219 - DNA, 15 bp, Homo sapiens
ttcaacatcaccaca

SEQ ID NO: 953220 - DNA, 15 bp, Homo sapiens
tcaacatcaccacaa

SEQ ID NO: 953221 - DNA, 15 bp, Homo sapiens
caacatcaccacaag

SEQ ID NO: 953222 - DNA, 15 bp, Homo sapiens
aacatcaccacaagg

SEQ ID NO: 953223 - DNA, 15 bp, Homo sapiens
acatcaccacaaggt

SEQ ID NO: 953224 - DNA, 15 bp, Homo sapiens
catcaccacaaggtc

SEQ ID NO: 953225 - DNA, 15 bp, Homo sapiens
atcaccacaaggtct

SEQ ID NO: 953226 - DNA, 15 bp, Homo sapiens
tcaccacaaggtctt

SEQ ID NO: 953227 - DNA, 15 bp, Homo sapiens
caccacaaggtcttc

SEQ ID NO: 953228 - DNA, 15 bp, Homo sapiens
accacaaggtcttca

SEQ ID NO: 953229 - DNA, 15 bp, Homo sapiens
ccacaaggtcttcat

SEQ ID NO: 953230 - DNA, 15 bp, Homo sapiens
cacaaggtcttcatg

SEQ ID NO: 953231 - DNA, 15 bp, Homo sapiens
acaaggtcttcatgg

SEQ ID NO: 953232 - DNA, 15 bp, Homo sapiens
caaggtcttcatggc

SEQ ID NO: 953233 - DNA, 15 bp, Homo sapiens
aaggtcttcatggca

SEQ ID NO: 953234 - DNA, 15 bp, Homo sapiens
aggtcttcatggcag

SEQ ID NO: 953235 - DNA, 15 bp, Homo sapiens
ggtcttcatggcagg

SEQ ID NO: 953236 - DNA, 15 bp, Homo sapiens
gtcttcatggcagga

SEQ ID NO: 953237 - DNA, 15 bp, Homo sapiens
tcttcatggcaggaa

SEQ ID NO: 953238 - DNA, 15 bp, Homo sapiens
cttcatggcaggaat

SEQ ID NO: 953239 - DNA, 15 bp, Homo sapiens
ttcatggcaggaatt

SEQ ID NO: 953240 - DNA, 15 bp, Homo sapiens
tcatggcaggaattt

SEQ ID NO: 953241 - DNA, 15 bp, Homo sapiens
catggcaggaatttt

SEQ ID NO: 953242 - DNA, 15 bp, Homo sapiens
atggcaggaattttg

SEQ ID NO: 953243 - DNA, 15 bp, Homo sapiens
tggcaggaattttgt

SEQ ID NO: 953244 - DNA, 15 bp, Homo sapiens
ggcaggaattttgtc

SEQ ID NO: 953245 - DNA, 15 bp, Homo sapiens
gcaggaattttgtct

SEQ ID NO: 953246 - DNA, 15 bp, Homo sapiens
caggaattttgtctg

SEQ ID NO: 953247 - DNA, 15 bp, Homo sapiens
aggaattttgtctgt

SEQ ID NO: 953248 - DNA, 15 bp, Homo sapiens
ggaattttgtctgtc

SEQ ID NO: 953249 - DNA, 15 bp, Homo sapiens
gaattttgtctgtcc

SEQ ID NO: 953250 - DNA, 15 bp, Homo sapiens
aattttgtctgtccc

SEQ ID NO: 953251 - DNA, 15 bp, Homo sapiens
attttgtctgtccct

SEQ ID NO: 953252 - DNA, 15 bp, Homo sapiens
ttttgtctgtccctt

SEQ ID NO: 953253 - DNA, 15 bp, Homo sapiens
tttgtctgtcccttc

SEQ ID NO: 953254 - DNA, 15 bp, Homo sapiens
ttgtctgtcccttct

SEQ ID NO: 953255 - DNA, 15 bp, Homo sapiens
tgtctgtcccttctg

SEQ ID NO: 953256 - DNA, 15 bp, Homo sapiens
gtctgtcccttctgg

SEQ ID NO: 953257 - DNA, 15 bp, Homo sapiens
tctgtcccttctggg

SEQ ID NO: 953258 - DNA, 15 bp, Homo sapiens
ctgtcccttctggga

SEQ ID NO: 953259 - DNA, 15 bp, Homo sapiens
tgtcccttctgggat

SEQ ID NO: 953260 - DNA, 15 bp, Homo sapiens
gtcccttctgggatg

SEQ ID NO: 953261 - DNA, 15 bp, Homo sapiens
tcccttctgggatgt

SEQ ID NO: 953262 - DNA, 15 bp, Homo sapiens
cccttctgggatgtt

SEQ ID NO: 953263 - DNA, 15 bp, Homo sapiens
ccttctgggatgttt

SEQ ID NO: 953264 - DNA, 15 bp, Homo sapiens
cttctgggatgtttt

SEQ ID NO: 953265 - DNA, 15 bp, Homo sapiens
ttctgggatgttttg

SEQ ID NO: 953266 - DNA, 15 bp, Homo sapiens
tctgggatgttttgc

SEQ ID NO: 953267 - DNA, 15 bp, Homo sapiens
ctgggatgttttgca

SEQ ID NO: 953268 - DNA, 15 bp, Homo sapiens
tgggatgttttgcat

SEQ ID NO: 953269 - DNA, 15 bp, Homo sapiens
gggatgttttgcata

SEQ ID NO: 953270 - DNA, 15 bp, Homo sapiens
ggatgttttgcatat

SEQ ID NO: 953271 - DNA, 15 bp, Homo sapiens
gatgttttgcatatg

SEQ ID NO: 953272 - DNA, 15 bp, Homo sapiens
atgttttgcatatgt

SEQ ID NO: 953273 - DNA, 15 bp, Homo sapiens
tgttttgcatatgta

SEQ ID NO: 953274 - DNA, 15 bp, Homo sapiens
gttttgcatatgtat

SEQ ID NO: 953275 - DNA, 15 bp, Homo sapiens
ttttgcatatgtatt

SEQ ID NO: 953276 - DNA, 15 bp, Homo sapiens
tttgcatatgtatta

SEQ ID NO: 953277 - DNA, 15 bp, Homo sapiens
ttgcatatgtattac

SEQ ID NO: 953278 - DNA, 15 bp, Homo sapiens
tgcatatgtattaca

SEQ ID NO: 953279 - DNA, 15 bp, Homo sapiens
gcatatgtattacat

SEQ ID NO: 953280 - DNA, 15 bp, Homo sapiens
catatgtattacatg

SEQ ID NO: 953281 - DNA, 15 bp, Homo sapiens
atatgtattacatgt

SEQ ID NO: 953282 - DNA, 15 bp, Homo sapiens
tatgtattacatgtg

SEQ ID NO: 953283 - DNA, 15 bp, Homo sapiens
atgtattacatgtga

SEQ ID NO: 953284 - DNA, 15 bp, Homo sapiens
tgtattacatgtgaa

SEQ ID NO: 953285 - DNA, 15 bp, Homo sapiens
gtattacatgtgaaa

SEQ ID NO: 953286 - DNA, 15 bp, Homo sapiens
tattacatgtgaaaa

SEQ ID NO: 953287 - DNA, 15 bp, Homo sapiens
attacatgtgaaaat

SEQ ID NO: 953288 - DNA, 15 bp, Homo sapiens
ttacatgtgaaaatt

SEQ ID NO: 953289 - DNA, 15 bp, Homo sapiens
tacatgtgaaaattc

SEQ ID NO: 953290 - DNA, 15 bp, Homo sapiens
acatgtgaaaattct

SEQ ID NO: 953291 - DNA, 15 bp, Homo sapiens
catgtgaaaattctc

SEQ ID NO: 953292 - DNA, 15 bp, Homo sapiens
atgtgaaaattctca

SEQ ID NO: 953293 - DNA, 15 bp, Homo sapiens
tgtgaaaattctcaa

SEQ ID NO: 953294 - DNA, 15 bp, Homo sapiens
gtgaaaattctcaag

SEQ ID NO: 953295 - DNA, 15 bp, Homo sapiens
tgaaaattctcaaga

SEQ ID NO: 953296 - DNA, 15 bp, Homo sapiens
gaaaattctcaagaa

SEQ ID NO: 953297 - DNA, 15 bp, Homo sapiens
aaaattctcaagaaa

SEQ ID NO: 953298 - DNA, 15 bp, Homo sapiens
aaattctcaagaaat

SEQ ID NO: 953299 - DNA, 15 bp, Homo sapiens
aattctcaagaaatt

SEQ ID NO: 953300 - DNA, 15 bp, Homo sapiens
attctcaagaaattt

SEQ ID NO: 953301 - DNA, 15 bp, Homo sapiens
ttctcaagaaatttt

SEQ ID NO: 953302 - DNA, 15 bp, Homo sapiens
tctcaagaaattttc

SEQ ID NO: 953303 - DNA, 15 bp, Homo sapiens
ctcaagaaattttcc

SEQ ID NO: 953304 - DNA, 15 bp, Homo sapiens
tcaagaaattttcca

SEQ ID NO: 953305 - DNA, 15 bp, Homo sapiens
caagaaattttccaa

SEQ ID NO: 953306 - DNA, 15 bp, Homo sapiens
aagaaattttccaag

SEQ ID NO: 953307 - DNA, 15 bp, Homo sapiens
agaaattttccaagt

SEQ ID NO: 953308 - DNA, 15 bp, Homo sapiens
gaaattttccaagta

SEQ ID NO: 953309 - DNA, 15 bp, Homo sapiens
aaattttccaagtaa

SEQ ID NO: 953310 - DNA, 15 bp, Homo sapiens
aattttccaagtaaa

SEQ ID NO: 953311 - DNA, 15 bp, Homo sapiens
attttccaagtaaaa

SEQ ID NO: 953312 - DNA, 15 bp, Homo sapiens
ttttccaagtaaaat

SEQ ID NO: 953313 - DNA, 15 bp, Homo sapiens
tttccaagtaaaatt

SEQ ID NO: 953314 - DNA, 15 bp, Homo sapiens
ttccaagtaaaattt

SEQ ID NO: 953315 - DNA, 15 bp, Homo sapiens
tccaagtaaaattta

SEQ ID NO: 953316 - DNA, 15 bp, Homo sapiens
ccaagtaaaatttaa

SEQ ID NO: 953317 - DNA, 15 bp, Homo sapiens
caagtaaaatttaat

SEQ ID NO: 953318 - DNA, 15 bp, Homo sapiens
aagtaaaatttaatt

SEQ ID NO: 953319 - DNA, 15 bp, Homo sapiens
agtaaaatttaattc

SEQ ID NO: 953320 - DNA, 15 bp, Homo sapiens
gtaaaatttaattca

SEQ ID NO: 953321 - DNA, 15 bp, Homo sapiens
taaaatttaattcag

SEQ ID NO: 953322 - DNA, 15 bp, Homo sapiens
aaaatttaattcaga

SEQ ID NO: 953323 - DNA, 15 bp, Homo sapiens
aaatttaattcagac

SEQ ID NO: 953324 - DNA, 15 bp, Homo sapiens
aatttaattcagacc

SEQ ID NO: 953325 - DNA, 15 bp, Homo sapiens
atttaattcagacca

SEQ ID NO: 953326 - DNA, 15 bp, Homo sapiens
tttaattcagaccag

SEQ ID NO: 953327 - DNA, 15 bp, Homo sapiens
ttaattcagaccagg

SEQ ID NO: 953328 - DNA, 15 bp, Homo sapiens
taattcagaccagga

SEQ ID NO: 953329 - DNA, 15 bp, Homo sapiens
aattcagaccaggag

SEQ ID NO: 953330 - DNA, 15 bp, Homo sapiens
attcagaccaggagc

SEQ ID NO: 953331 - DNA, 15 bp, Homo sapiens
ttcagaccaggagcc

SEQ ID NO: 953332 - DNA, 15 bp, Homo sapiens
tcagaccaggagccg

SEQ ID NO: 953333 - DNA, 15 bp, Homo sapiens
cagaccaggagccgt

SEQ ID NO: 953334 - DNA, 15 bp, Homo sapiens
agaccaggagccgtg

SEQ ID NO: 953335 - DNA, 15 bp, Homo sapiens
gaccaggagccgtgg

SEQ ID NO: 953336 - DNA, 15 bp, Homo sapiens
accaggagccgtggc

SEQ ID NO: 953337 - DNA, 15 bp, Homo sapiens
ccaggagccgtggct

SEQ ID NO: 953338 - DNA, 15 bp, Homo sapiens
caggagccgtggctc

SEQ ID NO: 953339 - DNA, 15 bp, Homo sapiens
aggagccgtggctca

SEQ ID NO: 953340 - DNA, 15 bp, Homo sapiens
ggagccgtggctcac

SEQ ID NO: 953341 - DNA, 15 bp, Homo sapiens
gagccgtggctcacg

SEQ ID NO: 953342 - DNA, 15 bp, Homo sapiens
agccgtggctcacgc

SEQ ID NO: 953343 - DNA, 15 bp, Homo sapiens
gccgtggctcacgcc

SEQ ID NO: 953344 - DNA, 15 bp, Homo sapiens
ccgtggctcacgcct

SEQ ID NO: 953345 - DNA, 15 bp, Homo sapiens
cgtggctcacgcctg

SEQ ID NO: 953346 - DNA, 15 bp, Homo sapiens
cactttgggaggcca

SEQ ID NO: 953347 - DNA, 15 bp, Homo sapiens
actttgggaggccaa

SEQ ID NO: 953348 - DNA, 15 bp, Homo sapiens
ctttgggaggccaag

SEQ ID NO: 953349 - DNA, 15 bp, Homo sapiens
tttgggaggccaagg

SEQ ID NO: 953350 - DNA, 15 bp, Homo sapiens
ttgggaggccaaggt

SEQ ID NO: 953351 - DNA, 15 bp, Homo sapiens
tgggaggccaaggtg

SEQ ID NO: 953352 - DNA, 15 bp, Homo sapiens
gggaggccaaggtgg

SEQ ID NO: 953353 - DNA, 15 bp, Homo sapiens
ggaggccaaggtggg

SEQ ID NO: 953354 - DNA, 15 bp, Homo sapiens
gaggccaaggtggga

SEQ ID NO: 953355 - DNA, 15 bp, Homo sapiens
aggccaaggtgggag

SEQ ID NO: 953356 - DNA, 15 bp, Homo sapiens
ggccaaggtgggagg

SEQ ID NO: 953357 - DNA, 15 bp, Homo sapiens
gccaaggtgggagga

SEQ ID NO: 953358 - DNA, 15 bp, Homo sapiens
ccaaggtgggaggat

SEQ ID NO: 953359 - DNA, 15 bp, Homo sapiens
caaggtgggaggatg

SEQ ID NO: 953360 - DNA, 15 bp, Homo sapiens
aaggtgggaggatga

SEQ ID NO: 953361 - DNA, 15 bp, Homo sapiens
aggtgggaggatgac

SEQ ID NO: 953362 - DNA, 15 bp, Homo sapiens
ggtgggaggatgacg

SEQ ID NO: 953363 - DNA, 15 bp, Homo sapiens
gtgggaggatgacga

SEQ ID NO: 953364 - DNA, 15 bp, Homo sapiens
tgggaggatgacgag

SEQ ID NO: 953365 - DNA, 15 bp, Homo sapiens
gggaggatgacgagg

SEQ ID NO: 953366 - DNA, 15 bp, Homo sapiens
ggaggatgacgaggt

SEQ ID NO: 953367 - DNA, 15 bp, Homo sapiens
gaggatgacgaggtc

SEQ ID NO: 953368 - DNA, 15 bp, Homo sapiens
aggatgacgaggtca

SEQ ID NO: 953369 - DNA, 15 bp, Homo sapiens
ggatgacgaggtcag

SEQ ID NO: 953370 - DNA, 15 bp, Homo sapiens
gatgacgaggtcagg

SEQ ID NO: 953371 - DNA, 15 bp, Homo sapiens
atgacgaggtcagga

SEQ ID NO: 953372 - DNA, 15 bp, Homo sapiens
tgacgaggtcaggag

SEQ ID NO: 953373 - DNA, 15 bp, Homo sapiens
gacgaggtcaggagt

SEQ ID NO: 953374 - DNA, 15 bp, Homo sapiens
acgaggtcaggagtt

SEQ ID NO: 953375 - DNA, 15 bp, Homo sapiens
cgaggtcaggagttc

SEQ ID NO: 953376 - DNA, 15 bp, Homo sapiens
gaggtcaggagttca

SEQ ID NO: 953377 - DNA, 15 bp, Homo sapiens
aggtcaggagttcaa

SEQ ID NO: 953378 - DNA, 15 bp, Homo sapiens
ggtcaggagttcaag

SEQ ID NO: 953379 - DNA, 15 bp, Homo sapiens
gtcaggagttcaagg

SEQ ID NO: 953380 - DNA, 15 bp, Homo sapiens
tcaggagttcaaggc

SEQ ID NO: 953381 - DNA, 15 bp, Homo sapiens
caggagttcaaggcc

SEQ ID NO: 953382 - DNA, 15 bp, Homo sapiens
aggagttcaaggcca

SEQ ID NO: 953383 - DNA, 15 bp, Homo sapiens
ggagttcaaggccag

SEQ ID NO: 953384 - DNA, 15 bp, Homo sapiens
gagttcaaggccagc

SEQ ID NO: 953385 - DNA, 15 bp, Homo sapiens
gttcaaggccagcca

SEQ ID NO: 953386 - DNA, 15 bp, Homo sapiens
ttcaaggccagccag

SEQ ID NO: 953387 - DNA, 15 bp, Homo sapiens
tcaaggccagccagg

SEQ ID NO: 953388 - DNA, 15 bp, Homo sapiens
caaggccagccaggc

SEQ ID NO: 953389 - DNA, 15 bp, Homo sapiens
aaggccagccaggcc

SEQ ID NO: 953390 - DNA, 15 bp, Homo sapiens
aggccagccaggcca

SEQ ID NO: 953391 - DNA, 15 bp, Homo sapiens
ggccagccaggccaa

SEQ ID NO: 953392 - DNA, 15 bp, Homo sapiens
gccagccaggccaat

SEQ ID NO: 953393 - DNA, 15 bp, Homo sapiens
ccagccaggccaatg

SEQ ID NO: 953394 - DNA, 15 bp, Homo sapiens
cagccaggccaatgc

SEQ ID NO: 953395 - DNA, 15 bp, Homo sapiens
agccaggccaatgcg

SEQ ID NO: 953396 - DNA, 15 bp, Homo sapiens
gccaggccaatgcgg

SEQ ID NO: 953397 - DNA, 15 bp, Homo sapiens
ccaggccaatgcggt

SEQ ID NO: 953398 - DNA, 15 bp, Homo sapiens
caggccaatgcggtg

SEQ ID NO: 953399 - DNA, 15 bp, Homo sapiens
aggccaatgcggtga

SEQ ID NO: 953400 - DNA, 15 bp, Homo sapiens
ggccaatgcggtgaa

SEQ ID NO: 953401 - DNA, 15 bp, Homo sapiens
gccaatgcggtgaaa

SEQ ID NO: 953402 - DNA, 15 bp, Homo sapiens
ccaatgcggtgaaac

SEQ ID NO: 953403 - DNA, 15 bp, Homo sapiens
caatgcggtgaaacc

SEQ ID NO: 953404 - DNA, 15 bp, Homo sapiens
aatgcggtgaaaccc

SEQ ID NO: 953405 - DNA, 15 bp, Homo sapiens
atgcggtgaaacccc

SEQ ID NO: 953406 - DNA, 15 bp, Homo sapiens
tgcggtgaaacccca

SEQ ID NO: 953407 - DNA, 15 bp, Homo sapiens
gcggtgaaaccccat

SEQ ID NO: 953408 - DNA, 15 bp, Homo sapiens
cggtgaaaccccatc

SEQ ID NO: 953409 - DNA, 15 bp, Homo sapiens
ggtgaaaccccatct

SEQ ID NO: 953410 - DNA, 15 bp, Homo sapiens
gtgaaaccccatctc

SEQ ID NO: 953411 - DNA, 15 bp, Homo sapiens
tgaaaccccatctct

SEQ ID NO: 953412 - DNA, 15 bp, Homo sapiens
gaaaccccatctcta

SEQ ID NO: 953413 - DNA, 15 bp, Homo sapiens
aaaccccatctctac

SEQ ID NO: 953414 - DNA, 15 bp, Homo sapiens
aaccccatctctact

SEQ ID NO: 953415 - DNA, 15 bp, Homo sapiens
accccatctctacta

SEQ ID NO: 953416 - DNA, 15 bp, Homo sapiens
ccccatctctactaa

SEQ ID NO: 953417 - DNA, 15 bp, Homo sapiens
cccatctctactaaa

SEQ ID NO: 953418 - DNA, 15 bp, Homo sapiens
ccatctctactaaaa

SEQ ID NO: 953419 - DNA, 15 bp, Homo sapiens
catctctactaaaaa

SEQ ID NO: 953420 - DNA, 15 bp, Homo sapiens
atctctactaaaaat

SEQ ID NO: 953421 - DNA, 15 bp, Homo sapiens
tacaaaaaattagct

SEQ ID NO: 953422 - DNA, 15 bp, Homo sapiens
acaaaaaattagctg

SEQ ID NO: 953423 - DNA, 15 bp, Homo sapiens
caaaaaattagctgg

SEQ ID NO: 953424 - DNA, 15 bp, Homo sapiens
attagctgggcgtga

SEQ ID NO: 953425 - DNA, 15 bp, Homo sapiens
ttagctgggcgtgat

SEQ ID NO: 953426 - DNA, 15 bp, Homo sapiens
tagctgggcgtgatg

SEQ ID NO: 953427 - DNA, 15 bp, Homo sapiens
agctgggcgtgatgg

SEQ ID NO: 953428 - DNA, 15 bp, Homo sapiens
gctgggcgtgatggt

SEQ ID NO: 953429 - DNA, 15 bp, Homo sapiens
ctgggcgtgatggtg

SEQ ID NO: 953430 - DNA, 15 bp, Homo sapiens
tgggcgtgatggtgc

SEQ ID NO: 953431 - DNA, 15 bp, Homo sapiens
gggcgtgatggtgcg

SEQ ID NO: 953432 - DNA, 15 bp, Homo sapiens
ggcgtgatggtgcgc

SEQ ID NO: 953433 - DNA, 15 bp, Homo sapiens
gcgtgatggtgcgca

SEQ ID NO: 953434 - DNA, 15 bp, Homo sapiens
cgtgatggtgcgcac

SEQ ID NO: 953435 - DNA, 15 bp, Homo sapiens
gtgatggtgcgcacc

SEQ ID NO: 953436 - DNA, 15 bp, Homo sapiens
tgatggtgcgcacct

SEQ ID NO: 953437 - DNA, 15 bp, Homo sapiens
gatggtgcgcacctg

SEQ ID NO: 953438 - DNA, 15 bp, Homo sapiens
atggtgcgcacctgt

SEQ ID NO: 953439 - DNA, 15 bp, Homo sapiens
tggtgcgcacctgta

SEQ ID NO: 953440 - DNA, 15 bp, Homo sapiens
ggtgcgcacctgtaa

SEQ ID NO: 953441 - DNA, 15 bp, Homo sapiens
gtgcgcacctgtaat

SEQ ID NO: 953442 - DNA, 15 bp, Homo sapiens
tgcgcacctgtaatc

SEQ ID NO: 953443 - DNA, 15 bp, Homo sapiens
gcgcacctgtaatcc

SEQ ID NO: 953444 - DNA, 15 bp, Homo sapiens
cgcacctgtaatccc

SEQ ID NO: 953445 - DNA, 15 bp, Homo sapiens
gcacctgtaatccca

SEQ ID NO: 953446 - DNA, 15 bp, Homo sapiens
gaggctgaggcaggc

SEQ ID NO: 953447 - DNA, 15 bp, Homo sapiens
aggctgaggcaggcg

SEQ ID NO: 953448 - DNA, 15 bp, Homo sapiens
ggctgaggcaggcga

SEQ ID NO: 953449 - DNA, 15 bp, Homo sapiens
gctgaggcaggcgaa

SEQ ID NO: 953450 - DNA, 15 bp, Homo sapiens
ctgaggcaggcgaat

SEQ ID NO: 953451 - DNA, 15 bp, Homo sapiens
tgaggcaggcgaatc

SEQ ID NO: 953452 - DNA, 15 bp, Homo sapiens
gaggcaggcgaatcg

SEQ ID NO: 953453 - DNA, 15 bp, Homo sapiens
aggcaggcgaatcgc

SEQ ID NO: 953454 - DNA, 15 bp, Homo sapiens
ggcaggcgaatcgct

SEQ ID NO: 953455 - DNA, 15 bp, Homo sapiens
gcaggcgaatcgctt

SEQ ID NO: 953456 - DNA, 15 bp, Homo sapiens
caggcgaatcgcttg

SEQ ID NO: 953457 - DNA, 15 bp, Homo sapiens
aggcgaatcgcttga

SEQ ID NO: 953458 - DNA, 15 bp, Homo sapiens
ggcgaatcgcttgaa

SEQ ID NO: 953459 - DNA, 15 bp, Homo sapiens
gcgaatcgcttgaaa

SEQ ID NO: 953460 - DNA, 15 bp, Homo sapiens
cgaatcgcttgaaac

SEQ ID NO: 953461 - DNA, 15 bp, Homo sapiens
gaatcgcttgaaacc

SEQ ID NO: 953462 - DNA, 15 bp, Homo sapiens
aatcgcttgaaacca

SEQ ID NO: 953463 - DNA, 15 bp, Homo sapiens
atcgcttgaaaccag

SEQ ID NO: 953464 - DNA, 15 bp, Homo sapiens
tcgcttgaaaccaga

SEQ ID NO: 953465 - DNA, 15 bp, Homo sapiens
cgcttgaaaccagaa

SEQ ID NO: 953466 - DNA, 15 bp, Homo sapiens
gcttgaaaccagaag

SEQ ID NO: 953467 - DNA, 15 bp, Homo sapiens
cttgaaaccagaagg

SEQ ID NO: 953468 - DNA, 15 bp, Homo sapiens
ttgaaaccagaaggc

SEQ ID NO: 953469 - DNA, 15 bp, Homo sapiens
tgaaaccagaaggcg

SEQ ID NO: 953470 - DNA, 15 bp, Homo sapiens
gaaaccagaaggcgg

SEQ ID NO: 953471 - DNA, 15 bp, Homo sapiens
aaaccagaaggcgga

SEQ ID NO: 953472 - DNA, 15 bp, Homo sapiens
aaccagaaggcggag

SEQ ID NO: 953473 - DNA, 15 bp, Homo sapiens
accagaaggcggagg

SEQ ID NO: 953474 - DNA, 15 bp, Homo sapiens
ccagaaggcggaggt

SEQ ID NO: 953475 - DNA, 15 bp, Homo sapiens
cagaaggcggaggtt

SEQ ID NO: 953476 - DNA, 15 bp, Homo sapiens
agaaggcggaggttg

SEQ ID NO: 953477 - DNA, 15 bp, Homo sapiens
gaaggcggaggttgc

SEQ ID NO: 953478 - DNA, 15 bp, Homo sapiens
aaggcggaggttgca

SEQ ID NO: 953479 - DNA, 15 bp, Homo sapiens
aggcggaggttgcag

SEQ ID NO: 953480 - DNA, 15 bp, Homo sapiens
ggcggaggttgcagt

SEQ ID NO: 953481 - DNA, 15 bp, Homo sapiens
gcggaggttgcagtg

SEQ ID NO: 953482 - DNA, 15 bp, Homo sapiens
tgagccgagattgca

SEQ ID NO: 953483 - DNA, 15 bp, Homo sapiens
gagccgagattgcac

SEQ ID NO: 953484 - DNA, 15 bp, Homo sapiens
agccgagattgcacc

SEQ ID NO: 953485 - DNA, 15 bp, Homo sapiens
gccgagattgcacca

SEQ ID NO: 953486 - DNA, 15 bp, Homo sapiens
ccgagattgcaccac

SEQ ID NO: 953487 - DNA, 15 bp, Homo sapiens
cgagattgcaccact

SEQ ID NO: 953488 - DNA, 15 bp, Homo sapiens
gagattgcaccactc

SEQ ID NO: 953489 - DNA, 15 bp, Homo sapiens
agattgcaccactcc

SEQ ID NO: 953490 - DNA, 15 bp, Homo sapiens
gattgcaccactcca

SEQ ID NO: 953491 - DNA, 15 bp, Homo sapiens
attgcaccactccag

SEQ ID NO: 953492 - DNA, 15 bp, Homo sapiens
ttgcaccactccagc

SEQ ID NO: 953493 - DNA, 15 bp, Homo sapiens
tgcaccactccagcc

SEQ ID NO: 953494 - DNA, 15 bp, Homo sapiens
gcaccactccagcct

SEQ ID NO: 953495 - DNA, 15 bp, Homo sapiens
caccactccagcctg

SEQ ID NO: 953496 - DNA, 15 bp, Homo sapiens
accactccagcctgg

SEQ ID NO: 953497 - DNA, 15 bp, Homo sapiens
ccactccagcctggg

SEQ ID NO: 953498 - DNA, 15 bp, Homo sapiens
actccagcctgggca

SEQ ID NO: 953499 - DNA, 15 bp, Homo sapiens
ctccagcctgggcaa

SEQ ID NO: 953500 - DNA, 15 bp, Homo sapiens
tccagcctgggcaac

SEQ ID NO: 953501 - DNA, 15 bp, Homo sapiens
cagcctgggcaacaa

SEQ ID NO: 953502 - DNA, 15 bp, Homo sapiens
agcctgggcaacaag

SEQ ID NO: 953503 - DNA, 15 bp, Homo sapiens
gcctgggcaacaaga

SEQ ID NO: 953504 - DNA, 15 bp, Homo sapiens
cctgggcaacaagag

SEQ ID NO: 953505 - DNA, 15 bp, Homo sapiens
ctgggcaacaagagc

SEQ ID NO: 953506 - DNA, 15 bp, Homo sapiens
tgggcaacaagagcg

SEQ ID NO: 953507 - DNA, 15 bp, Homo sapiens
gggcaacaagagcga

SEQ ID NO: 953508 - DNA, 15 bp, Homo sapiens
ggcaacaagagcgaa

SEQ ID NO: 953509 - DNA, 15 bp, Homo sapiens
gcaacaagagcgaaa

SEQ ID NO: 953510 - DNA, 15 bp, Homo sapiens
caacaagagcgaaac

SEQ ID NO: 953511 - DNA, 15 bp, Homo sapiens
aacaagagcgaaact

SEQ ID NO: 953512 - DNA, 15 bp, Homo sapiens
acaagagcgaaactc

SEQ ID NO: 953513 - DNA, 15 bp, Homo sapiens
caagagcgaaactcc

SEQ ID NO: 953514 - DNA, 15 bp, Homo sapiens
aagagcgaaactcca

SEQ ID NO: 953515 - DNA, 15 bp, Homo sapiens
agagcgaaactccat

SEQ ID NO: 953516 - DNA, 15 bp, Homo sapiens
gagcgaaactccatc

SEQ ID NO: 953517 - DNA, 15 bp, Homo sapiens
agcgaaactccatcc

SEQ ID NO: 953518 - DNA, 15 bp, Homo sapiens
gcgaaactccatccc

SEQ ID NO: 953519 - DNA, 15 bp, Homo sapiens
cgaaactccatcccc

SEQ ID NO: 953520 - DNA, 15 bp, Homo sapiens
gaaactccatccccc

SEQ ID NO: 953521 - DNA, 15 bp, Homo sapiens
aaactccatcccccc

SEQ ID NO: 953522 - DNA, 15 bp, Homo sapiens
aactccatccccccc

SEQ ID NO: 953523 - DNA, 15 bp, Homo sapiens
actccatcccccccc

SEQ ID NO: 953524 - DNA, 15 bp, Homo sapiens
ctccatccccccccc

SEQ ID NO: 953525 - DNA, 15 bp, Homo sapiens
tccatcccccccccc

SEQ ID NO: 953526 - DNA, 15 bp, Homo sapiens
ccatcccccccccca

SEQ ID NO: 953527 - DNA, 15 bp, Homo sapiens
catccccccccccaa

SEQ ID NO: 953528 - DNA, 15 bp, Homo sapiens
atccccccccccaaa

SEQ ID NO: 953529 - DNA, 15 bp, Homo sapiens
tccccccccccaaaa

SEQ ID NO: 953530 - DNA, 15 bp, Homo sapiens
ccccccccccaaaaa

SEQ ID NO: 953531 - DNA, 15 bp, Homo sapiens
cccccccccaaaaaa

SEQ ID NO: 953532 - DNA, 15 bp, Homo sapiens
ccccccccaaaaaaa

SEQ ID NO: 953533 - DNA, 15 bp, Homo sapiens
cccccccaaaaaaat

SEQ ID NO: 953534 - DNA, 15 bp, Homo sapiens
ccccccaaaaaaatt

SEQ ID NO: 953535 - DNA, 15 bp, Homo sapiens
cccccaaaaaaatta

SEQ ID NO: 953536 - DNA, 15 bp, Homo sapiens
ccccaaaaaaattaa

SEQ ID NO: 953537 - DNA, 15 bp, Homo sapiens
cccaaaaaaattaat

SEQ ID NO: 953538 - DNA, 15 bp, Homo sapiens
ccaaaaaaattaatt

SEQ ID NO: 953539 - DNA, 15 bp, Homo sapiens
caaaaaaattaattc

SEQ ID NO: 953540 - DNA, 15 bp, Homo sapiens
aaaaaaattaattca

SEQ ID NO: 953541 - DNA, 15 bp, Homo sapiens
aaaaaattaattcag

SEQ ID NO: 953542 - DNA, 15 bp, Homo sapiens
aaaaattaattcagt

SEQ ID NO: 953543 - DNA, 15 bp, Homo sapiens
aaaattaattcagta

SEQ ID NO: 953544 - DNA, 15 bp, Homo sapiens
aaattaattcagtac

SEQ ID NO: 953545 - DNA, 15 bp, Homo sapiens
aattaattcagtaca

SEQ ID NO: 953546 - DNA, 15 bp, Homo sapiens
attaattcagtacag

SEQ ID NO: 953547 - DNA, 15 bp, Homo sapiens
ttaattcagtacagc

SEQ ID NO: 953548 - DNA, 15 bp, Homo sapiens
taattcagtacagca

SEQ ID NO: 953549 - DNA, 15 bp, Homo sapiens
aattcagtacagcac

SEQ ID NO: 953550 - DNA, 15 bp, Homo sapiens
attcagtacagcact

SEQ ID NO: 953551 - DNA, 15 bp, Homo sapiens
ttcagtacagcactt

SEQ ID NO: 953552 - DNA, 15 bp, Homo sapiens
tcagtacagcactta

SEQ ID NO: 953553 - DNA, 15 bp, Homo sapiens
cagtacagcacttat

SEQ ID NO: 953554 - DNA, 15 bp, Homo sapiens
agtacagcacttatt

SEQ ID NO: 953555 - DNA, 15 bp, Homo sapiens
gtacagcacttatta

SEQ ID NO: 953556 - DNA, 15 bp, Homo sapiens
tacagcacttattaa

SEQ ID NO: 953557 - DNA, 15 bp, Homo sapiens
acagcacttattaaa

SEQ ID NO: 953558 - DNA, 15 bp, Homo sapiens
cagcacttattaaac

SEQ ID NO: 953559 - DNA, 15 bp, Homo sapiens
agcacttattaaaca

SEQ ID NO: 953560 - DNA, 15 bp, Homo sapiens
gcacttattaaacat

SEQ ID NO: 953561 - DNA, 15 bp, Homo sapiens
cacttattaaacatc

SEQ ID NO: 953562 - DNA, 15 bp, Homo sapiens
acttattaaacatct

SEQ ID NO: 953563 - DNA, 15 bp, Homo sapiens
cttattaaacatcta

SEQ ID NO: 953564 - DNA, 15 bp, Homo sapiens
ttattaaacatctac

SEQ ID NO: 953565 - DNA, 15 bp, Homo sapiens
tattaaacatctact

SEQ ID NO: 953566 - DNA, 15 bp, Homo sapiens
attaaacatctactc

SEQ ID NO: 953567 - DNA, 15 bp, Homo sapiens
ttaaacatctactca

SEQ ID NO: 953568 - DNA, 15 bp, Homo sapiens
taaacatctactcag

SEQ ID NO: 953569 - DNA, 15 bp, Homo sapiens
aaacatctactcagt

SEQ ID NO: 953570 - DNA, 15 bp, Homo sapiens
aacatctactcagtg

SEQ ID NO: 953571 - DNA, 15 bp, Homo sapiens
acatctactcagtga

SEQ ID NO: 953572 - DNA, 15 bp, Homo sapiens
catctactcagtgag

SEQ ID NO: 953573 - DNA, 15 bp, Homo sapiens
atctactcagtgaga

SEQ ID NO: 953574 - DNA, 15 bp, Homo sapiens
tctactcagtgagaa

SEQ ID NO: 953575 - DNA, 15 bp, Homo sapiens
ctactcagtgagaag

SEQ ID NO: 953576 - DNA, 15 bp, Homo sapiens
tactcagtgagaagc

SEQ ID NO: 953577 - DNA, 15 bp, Homo sapiens
actcagtgagaagca

SEQ ID NO: 953578 - DNA, 15 bp, Homo sapiens
ctcagtgagaagcat

SEQ ID NO: 953579 - DNA, 15 bp, Homo sapiens
tcagtgagaagcatt

SEQ ID NO: 953580 - DNA, 15 bp, Homo sapiens
cagtgagaagcattc

SEQ ID NO: 953581 - DNA, 15 bp, Homo sapiens
agtgagaagcattct

SEQ ID NO: 953582 - DNA, 15 bp, Homo sapiens
gtgagaagcattctg

SEQ ID NO: 953583 - DNA, 15 bp, Homo sapiens
tgagaagcattctgt

SEQ ID NO: 953584 - DNA, 15 bp, Homo sapiens
gagaagcattctgtt

SEQ ID NO: 953585 - DNA, 15 bp, Homo sapiens
agaagcattctgttt

SEQ ID NO: 953586 - DNA, 15 bp, Homo sapiens
gaagcattctgtttc

SEQ ID NO: 953587 - DNA, 15 bp, Homo sapiens
aagcattctgtttca

SEQ ID NO: 953588 - DNA, 15 bp, Homo sapiens
agcattctgtttcat

SEQ ID NO: 953589 - DNA, 15 bp, Homo sapiens
gcattctgtttcatg

SEQ ID NO: 953590 - DNA, 15 bp, Homo sapiens
cattctgtttcatgc

SEQ ID NO: 953591 - DNA, 15 bp, Homo sapiens
attctgtttcatgct

SEQ ID NO: 953592 - DNA, 15 bp, Homo sapiens
ttctgtttcatgctt

SEQ ID NO: 953593 - DNA, 15 bp, Homo sapiens
tctgtttcatgcttt

SEQ ID NO: 953594 - DNA, 15 bp, Homo sapiens
ctgtttcatgctttg

SEQ ID NO: 953595 - DNA, 15 bp, Homo sapiens
tgtttcatgctttga

SEQ ID NO: 953596 - DNA, 15 bp, Homo sapiens
gtttcatgctttgag

SEQ ID NO: 953597 - DNA, 15 bp, Homo sapiens
tttcatgctttgagg

SEQ ID NO: 953598 - DNA, 15 bp, Homo sapiens
ttcatgctttgagga

SEQ ID NO: 953599 - DNA, 15 bp, Homo sapiens
tcatgctttgaggaa

SEQ ID NO: 953600 - DNA, 15 bp, Homo sapiens
catgctttgaggaac

SEQ ID NO: 953601 - DNA, 15 bp, Homo sapiens
atgctttgaggaaca

SEQ ID NO: 953602 - DNA, 15 bp, Homo sapiens
tgctttgaggaacat

SEQ ID NO: 953603 - DNA, 15 bp, Homo sapiens
gctttgaggaacata

SEQ ID NO: 953604 - DNA, 15 bp, Homo sapiens
ctttgaggaacatac

SEQ ID NO: 953605 - DNA, 15 bp, Homo sapiens
tttgaggaacatacg

SEQ ID NO: 953606 - DNA, 15 bp, Homo sapiens
ttgaggaacatacgg

SEQ ID NO: 953607 - DNA, 15 bp, Homo sapiens
tgaggaacatacgga

SEQ ID NO: 953608 - DNA, 15 bp, Homo sapiens
gaggaacatacggat

SEQ ID NO: 953609 - DNA, 15 bp, Homo sapiens
aggaacatacggatg

SEQ ID NO: 953610 - DNA, 15 bp, Homo sapiens
ggaacatacggatga

SEQ ID NO: 953611 - DNA, 15 bp, Homo sapiens
gaacatacggatgaa

SEQ ID NO: 953612 - DNA, 15 bp, Homo sapiens
aacatacggatgaat

SEQ ID NO: 953613 - DNA, 15 bp, Homo sapiens
acatacggatgaatt

SEQ ID NO: 953614 - DNA, 15 bp, Homo sapiens
catacggatgaattg

SEQ ID NO: 953615 - DNA, 15 bp, Homo sapiens
atacggatgaattgg

SEQ ID NO: 953616 - DNA, 15 bp, Homo sapiens
tacggatgaattgga

SEQ ID NO: 953617 - DNA, 15 bp, Homo sapiens
acggatgaattggat

SEQ ID NO: 953618 - DNA, 15 bp, Homo sapiens
cggatgaattggata

SEQ ID NO: 953619 - DNA, 15 bp, Homo sapiens
ggatgaattggatat

SEQ ID NO: 953620 - DNA, 15 bp, Homo sapiens
gatgaattggatata

SEQ ID NO: 953621 - DNA, 15 bp, Homo sapiens
atgaattggatatag

SEQ ID NO: 953622 - DNA, 15 bp, Homo sapiens
tgaattggatatagc

SEQ ID NO: 953623 - DNA, 15 bp, Homo sapiens
gaattggatatagct

SEQ ID NO: 953624 - DNA, 15 bp, Homo sapiens
aattggatatagctc

SEQ ID NO: 953625 - DNA, 15 bp, Homo sapiens
attggatatagctct

SEQ ID NO: 953626 - DNA, 15 bp, Homo sapiens
ttggatatagctctt

SEQ ID NO: 953627 - DNA, 15 bp, Homo sapiens
tggatatagctcttg

SEQ ID NO: 953628 - DNA, 15 bp, Homo sapiens
ggatatagctcttga

SEQ ID NO: 953629 - DNA, 15 bp, Homo sapiens
gatatagctcttgac

SEQ ID NO: 953630 - DNA, 15 bp, Homo sapiens
atatagctcttgacc

SEQ ID NO: 953631 - DNA, 15 bp, Homo sapiens
tatagctcttgacct

SEQ ID NO: 953632 - DNA, 15 bp, Homo sapiens
atagctcttgacctc

SEQ ID NO: 953633 - DNA, 15 bp, Homo sapiens
tagctcttgacctct

SEQ ID NO: 953634 - DNA, 15 bp, Homo sapiens
agctcttgacctcta

SEQ ID NO: 953635 - DNA, 15 bp, Homo sapiens
gctcttgacctctag

SEQ ID NO: 953636 - DNA, 15 bp, Homo sapiens
ctcttgacctctagg

SEQ ID NO: 953637 - DNA, 15 bp, Homo sapiens
tcttgacctctagga

SEQ ID NO: 953638 - DNA, 15 bp, Homo sapiens
cttgacctctaggaa

SEQ ID NO: 953639 - DNA, 15 bp, Homo sapiens
ttgacctctaggaac

SEQ ID NO: 953640 - DNA, 15 bp, Homo sapiens
tgacctctaggaact

SEQ ID NO: 953641 - DNA, 15 bp, Homo sapiens
gacctctaggaactt

SEQ ID NO: 953642 - DNA, 15 bp, Homo sapiens
acctctaggaactta

SEQ ID NO: 953643 - DNA, 15 bp, Homo sapiens
cctctaggaacttaa

SEQ ID NO: 953644 - DNA, 15 bp, Homo sapiens
ctctaggaacttaat

SEQ ID NO: 953645 - DNA, 15 bp, Homo sapiens
tctaggaacttaatt

SEQ ID NO: 953646 - DNA, 15 bp, Homo sapiens
ctaggaacttaattg

SEQ ID NO: 953647 - DNA, 15 bp, Homo sapiens
taggaacttaattga

SEQ ID NO: 953648 - DNA, 15 bp, Homo sapiens
aggaacttaattgat

SEQ ID NO: 953649 - DNA, 15 bp, Homo sapiens
ggaacttaattgata

SEQ ID NO: 953650 - DNA, 15 bp, Homo sapiens
gaacttaattgatag

SEQ ID NO: 953651 - DNA, 15 bp, Homo sapiens
aacttaattgatagc

SEQ ID NO: 953652 - DNA, 15 bp, Homo sapiens
acttaattgatagca

SEQ ID NO: 953653 - DNA, 15 bp, Homo sapiens
cttaattgatagcaa

SEQ ID NO: 953654 - DNA, 15 bp, Homo sapiens
ttaattgatagcaaa

SEQ ID NO: 953655 - DNA, 15 bp, Homo sapiens
taattgatagcaaaa

SEQ ID NO: 953656 - DNA, 15 bp, Homo sapiens
aattgatagcaaaaa

SEQ ID NO: 953657 - DNA, 15 bp, Homo sapiens
attgatagcaaaaat

SEQ ID NO: 953658 - DNA, 15 bp, Homo sapiens
ttgatagcaaaaata

SEQ ID NO: 953659 - DNA, 15 bp, Homo sapiens
tgatagcaaaaatat

SEQ ID NO: 953660 - DNA, 15 bp, Homo sapiens
gatagcaaaaatatg

SEQ ID NO: 953661 - DNA, 15 bp, Homo sapiens
atagcaaaaatatgg

SEQ ID NO: 953662 - DNA, 15 bp, Homo sapiens
tagcaaaaatatggt

SEQ ID NO: 953663 - DNA, 15 bp, Homo sapiens
agcaaaaatatggta

SEQ ID NO: 953664 - DNA, 15 bp, Homo sapiens
gcaaaaatatggtaa

SEQ ID NO: 953665 - DNA, 15 bp, Homo sapiens
caaaaatatggtaag

SEQ ID NO: 953666 - DNA, 15 bp, Homo sapiens
aaaaatatggtaagt

SEQ ID NO: 953667 - DNA, 15 bp, Homo sapiens
aaaatatggtaagta

SEQ ID NO: 953668 - DNA, 15 bp, Homo sapiens
aaatatggtaagtat

SEQ ID NO: 953669 - DNA, 15 bp, Homo sapiens
aatatggtaagtatt

SEQ ID NO: 953670 - DNA, 15 bp, Homo sapiens
atatggtaagtattc

SEQ ID NO: 953671 - DNA, 15 bp, Homo sapiens
tatggtaagtattct

SEQ ID NO: 953672 - DNA, 15 bp, Homo sapiens
atggtaagtattcta

SEQ ID NO: 953673 - DNA, 15 bp, Homo sapiens
tggtaagtattctac

SEQ ID NO: 953674 - DNA, 15 bp, Homo sapiens
ggtaagtattctact

SEQ ID NO: 953675 - DNA, 15 bp, Homo sapiens
gtaagtattctactg

SEQ ID NO: 953676 - DNA, 15 bp, Homo sapiens
taagtattctactga

SEQ ID NO: 953677 - DNA, 15 bp, Homo sapiens
aagtattctactgag

SEQ ID NO: 953678 - DNA, 15 bp, Homo sapiens
agtattctactgaga

SEQ ID NO: 953679 - DNA, 15 bp, Homo sapiens
gtattctactgagag

SEQ ID NO: 953680 - DNA, 15 bp, Homo sapiens
tattctactgagaga

SEQ ID NO: 953681 - DNA, 15 bp, Homo sapiens
attctactgagagat

SEQ ID NO: 953682 - DNA, 15 bp, Homo sapiens
ttctactgagagatt

SEQ ID NO: 953683 - DNA, 15 bp, Homo sapiens
tctactgagagattc

SEQ ID NO: 953684 - DNA, 15 bp, Homo sapiens
ctactgagagattcc

SEQ ID NO: 953685 - DNA, 15 bp, Homo sapiens
tactgagagattcca

SEQ ID NO: 953686 - DNA, 15 bp, Homo sapiens
actgagagattccat

SEQ ID NO: 953687 - DNA, 15 bp, Homo sapiens
ctgagagattccatg

SEQ ID NO: 953688 - DNA, 15 bp, Homo sapiens
tgagagattccatgt

SEQ ID NO: 953689 - DNA, 15 bp, Homo sapiens
gagagattccatgta

SEQ ID NO: 953690 - DNA, 15 bp, Homo sapiens
agagattccatgtat

SEQ ID NO: 953691 - DNA, 15 bp, Homo sapiens
gagattccatgtatg

SEQ ID NO: 953692 - DNA, 15 bp, Homo sapiens
agattccatgtatga

SEQ ID NO: 953693 - DNA, 15 bp, Homo sapiens
gattccatgtatgat

SEQ ID NO: 953694 - DNA, 15 bp, Homo sapiens
attccatgtatgatt

SEQ ID NO: 953695 - DNA, 15 bp, Homo sapiens
ttccatgtatgattt

SEQ ID NO: 953696 - DNA, 15 bp, Homo sapiens
tccatgtatgatttg

SEQ ID NO: 953697 - DNA, 15 bp, Homo sapiens
ccatgtatgatttgc

SEQ ID NO: 953698 - DNA, 15 bp, Homo sapiens
catgtatgatttgca

SEQ ID NO: 953699 - DNA, 15 bp, Homo sapiens
atgtatgatttgcac

SEQ ID NO: 953700 - DNA, 15 bp, Homo sapiens
tgtatgatttgcact

SEQ ID NO: 953701 - DNA, 15 bp, Homo sapiens
gtatgatttgcactt

SEQ ID NO: 953702 - DNA, 15 bp, Homo sapiens
tatgatttgcacttg

SEQ ID NO: 953703 - DNA, 15 bp, Homo sapiens
atgatttgcacttgc

SEQ ID NO: 953704 - DNA, 15 bp, Homo sapiens
tgatttgcacttgcc

SEQ ID NO: 953705 - DNA, 15 bp, Homo sapiens
gatttgcacttgcct

SEQ ID NO: 953706 - DNA, 15 bp, Homo sapiens
atttgcacttgcctc

SEQ ID NO: 953707 - DNA, 15 bp, Homo sapiens
tttgcacttgcctct

SEQ ID NO: 953708 - DNA, 15 bp, Homo sapiens
ttgcacttgcctctt

SEQ ID NO: 953709 - DNA, 15 bp, Homo sapiens
tgcacttgcctcttt

SEQ ID NO: 953710 - DNA, 15 bp, Homo sapiens
gcacttgcctctttg

SEQ ID NO: 953711 - DNA, 15 bp, Homo sapiens
cacttgcctctttgg

SEQ ID NO: 953712 - DNA, 15 bp, Homo sapiens
acttgcctctttgga

SEQ ID NO: 953713 - DNA, 15 bp, Homo sapiens
cttgcctctttggaa

SEQ ID NO: 953714 - DNA, 15 bp, Homo sapiens
ttgcctctttggaag

SEQ ID NO: 953715 - DNA, 15 bp, Homo sapiens
tgcctctttggaagt

SEQ ID NO: 953716 - DNA, 15 bp, Homo sapiens
gcctctttggaagta

SEQ ID NO: 953717 - DNA, 15 bp, Homo sapiens
cctctttggaagtag

SEQ ID NO: 953718 - DNA, 15 bp, Homo sapiens
ctctttggaagtagt

SEQ ID NO: 953719 - DNA, 15 bp, Homo sapiens
tctttggaagtagtg

SEQ ID NO: 953720 - DNA, 15 bp, Homo sapiens
ctttggaagtagtgg

SEQ ID NO: 953721 - DNA, 15 bp, Homo sapiens
tttggaagtagtggg

SEQ ID NO: 953722 - DNA, 15 bp, Homo sapiens
ttggaagtagtgggt

SEQ ID NO: 953723 - DNA, 15 bp, Homo sapiens
tggaagtagtgggta

SEQ ID NO: 953724 - DNA, 15 bp, Homo sapiens
ggaagtagtgggtat

SEQ ID NO: 953725 - DNA, 15 bp, Homo sapiens
gaagtagtgggtatg

SEQ ID NO: 953726 - DNA, 15 bp, Homo sapiens
aagtagtgggtatgt

SEQ ID NO: 953727 - DNA, 15 bp, Homo sapiens
agtagtgggtatgtg

SEQ ID NO: 953728 - DNA, 15 bp, Homo sapiens
gtagtgggtatgtgg

SEQ ID NO: 953729 - DNA, 15 bp, Homo sapiens
tagtgggtatgtgga

SEQ ID NO: 953730 - DNA, 15 bp, Homo sapiens
agtgggtatgtggaa

SEQ ID NO: 953731 - DNA, 15 bp, Homo sapiens
gtgggtatgtggaat

SEQ ID NO: 953732 - DNA, 15 bp, Homo sapiens
tgggtatgtggaatt

SEQ ID NO: 953733 - DNA, 15 bp, Homo sapiens
gggtatgtggaattg

SEQ ID NO: 953734 - DNA, 15 bp, Homo sapiens
ggtatgtggaattgt

SEQ ID NO: 953735 - DNA, 15 bp, Homo sapiens
gtatgtggaattgta

SEQ ID NO: 953736 - DNA, 15 bp, Homo sapiens
tatgtggaattgtac

SEQ ID NO: 953737 - DNA, 15 bp, Homo sapiens
atgtggaattgtacc

SEQ ID NO: 953738 - DNA, 15 bp, Homo sapiens
tgtggaattgtacct

SEQ ID NO: 953739 - DNA, 15 bp, Homo sapiens
gtggaattgtacctt

SEQ ID NO: 953740 - DNA, 15 bp, Homo sapiens
tggaattgtaccttg

SEQ ID NO: 953741 - DNA, 15 bp, Homo sapiens
ggaattgtaccttgt

SEQ ID NO: 953742 - DNA, 15 bp, Homo sapiens
gaattgtaccttgtt

SEQ ID NO: 953743 - DNA, 15 bp, Homo sapiens
aattgtaccttgttg

SEQ ID NO: 953744 - DNA, 15 bp, Homo sapiens
attgtaccttgttgc

SEQ ID NO: 953745 - DNA, 15 bp, Homo sapiens
ttgtaccttgttgcc

SEQ ID NO: 953746 - DNA, 15 bp, Homo sapiens
tgtaccttgttgcca

SEQ ID NO: 953747 - DNA, 15 bp, Homo sapiens
gtaccttgttgccag

SEQ ID NO: 953748 - DNA, 15 bp, Homo sapiens
taccttgttgccaga

SEQ ID NO: 953749 - DNA, 15 bp, Homo sapiens
accttgttgccagaa

SEQ ID NO: 953750 - DNA, 15 bp, Homo sapiens
ccttgttgccagaaa

SEQ ID NO: 953751 - DNA, 15 bp, Homo sapiens
cttgttgccagaaat

SEQ ID NO: 953752 - DNA, 15 bp, Homo sapiens
ttgttgccagaaatt

SEQ ID NO: 953753 - DNA, 15 bp, Homo sapiens
tgttgccagaaattg

SEQ ID NO: 953754 - DNA, 15 bp, Homo sapiens
gttgccagaaattgt

SEQ ID NO: 953755 - DNA, 15 bp, Homo sapiens
ttgccagaaattgtg

SEQ ID NO: 953756 - DNA, 15 bp, Homo sapiens
tgccagaaattgtgt

SEQ ID NO: 953757 - DNA, 15 bp, Homo sapiens
gccagaaattgtgta

SEQ ID NO: 953758 - DNA, 15 bp, Homo sapiens
ccagaaattgtgtag

SEQ ID NO: 953759 - DNA, 15 bp, Homo sapiens
cagaaattgtgtagg

SEQ ID NO: 953760 - DNA, 15 bp, Homo sapiens
agaaattgtgtaggc

SEQ ID NO: 953761 - DNA, 15 bp, Homo sapiens
gaaattgtgtaggct

SEQ ID NO: 953762 - DNA, 15 bp, Homo sapiens
aaattgtgtaggcta

SEQ ID NO: 953763 - DNA, 15 bp, Homo sapiens
aattgtgtaggctat

SEQ ID NO: 953764 - DNA, 15 bp, Homo sapiens
attgtgtaggctatg

SEQ ID NO: 953765 - DNA, 15 bp, Homo sapiens
ttgtgtaggctatgt

SEQ ID NO: 953766 - DNA, 15 bp, Homo sapiens
tgtgtaggctatgtt

SEQ ID NO: 953767 - DNA, 15 bp, Homo sapiens
gtgtaggctatgttg

SEQ ID NO: 953768 - DNA, 15 bp, Homo sapiens
tgtaggctatgttga

SEQ ID NO: 953769 - DNA, 15 bp, Homo sapiens
gtaggctatgttgac

SEQ ID NO: 953770 - DNA, 15 bp, Homo sapiens
taggctatgttgacc

SEQ ID NO: 953771 - DNA, 15 bp, Homo sapiens
aggctatgttgacca

SEQ ID NO: 953772 - DNA, 15 bp, Homo sapiens
ggctatgttgaccaa

SEQ ID NO: 953773 - DNA, 15 bp, Homo sapiens
gctatgttgaccaac

SEQ ID NO: 953774 - DNA, 15 bp, Homo sapiens
ctatgttgaccaacg

SEQ ID NO: 953775 - DNA, 15 bp, Homo sapiens
tatgttgaccaacgg

SEQ ID NO: 953776 - DNA, 15 bp, Homo sapiens
atgttgaccaacggc

SEQ ID NO: 953777 - DNA, 15 bp, Homo sapiens
tgttgaccaacggcc

SEQ ID NO: 953778 - DNA, 15 bp, Homo sapiens
gttgaccaacggccc

SEQ ID NO: 953779 - DNA, 15 bp, Homo sapiens
ttgaccaacggccct

SEQ ID NO: 953780 - DNA, 15 bp, Homo sapiens
tgaccaacggccctg

SEQ ID NO: 953781 - DNA, 15 bp, Homo sapiens
gaccaacggccctgt

SEQ ID NO: 953782 - DNA, 15 bp, Homo sapiens
accaacggccctgta

SEQ ID NO: 953783 - DNA, 15 bp, Homo sapiens
ccaacggccctgtag

SEQ ID NO: 953784 - DNA, 15 bp, Homo sapiens
caacggccctgtagt

SEQ ID NO: 953785 - DNA, 15 bp, Homo sapiens
aacggccctgtagtt

SEQ ID NO: 953786 - DNA, 15 bp, Homo sapiens
acggccctgtagtta

SEQ ID NO: 953787 - DNA, 15 bp, Homo sapiens
cggccctgtagttag

SEQ ID NO: 953788 - DNA, 15 bp, Homo sapiens
ggccctgtagttaga

SEQ ID NO: 953789 - DNA, 15 bp, Homo sapiens
gccctgtagttagac

SEQ ID NO: 953790 - DNA, 15 bp, Homo sapiens
ccctgtagttagact

SEQ ID NO: 953791 - DNA, 15 bp, Homo sapiens
cctgtagttagactc

SEQ ID NO: 953792 - DNA, 15 bp, Homo sapiens
ctgtagttagactcc

SEQ ID NO: 953793 - DNA, 15 bp, Homo sapiens
tgtagttagactcct

SEQ ID NO: 953794 - DNA, 15 bp, Homo sapiens
gtagttagactcctt

SEQ ID NO: 953795 - DNA, 15 bp, Homo sapiens
tagttagactccttc

SEQ ID NO: 953796 - DNA, 15 bp, Homo sapiens
agttagactccttcc

SEQ ID NO: 953797 - DNA, 15 bp, Homo sapiens
gttagactccttcca

SEQ ID NO: 953798 - DNA, 15 bp, Homo sapiens
ttagactccttccaa

SEQ ID NO: 953799 - DNA, 15 bp, Homo sapiens
tagactccttccaaa

SEQ ID NO: 953800 - DNA, 15 bp, Homo sapiens
agactccttccaaag

SEQ ID NO: 953801 - DNA, 15 bp, Homo sapiens
gactccttccaaagg

SEQ ID NO: 953802 - DNA, 15 bp, Homo sapiens
actccttccaaaggc

SEQ ID NO: 953803 - DNA, 15 bp, Homo sapiens
ctccttccaaaggca

SEQ ID NO: 953804 - DNA, 15 bp, Homo sapiens
tccttccaaaggcac

SEQ ID NO: 953805 - DNA, 15 bp, Homo sapiens
ccttccaaaggcaca

SEQ ID NO: 953806 - DNA, 15 bp, Homo sapiens
cttccaaaggcacat

SEQ ID NO: 953807 - DNA, 15 bp, Homo sapiens
ttccaaaggcacatt

SEQ ID NO: 953808 - DNA, 15 bp, Homo sapiens
tccaaaggcacattt

SEQ ID NO: 953809 - DNA, 15 bp, Homo sapiens
ccaaaggcacatttt

SEQ ID NO: 953810 - DNA, 15 bp, Homo sapiens
caaaggcacattttc

SEQ ID NO: 953811 - DNA, 15 bp, Homo sapiens
aaaggcacattttca

SEQ ID NO: 953812 - DNA, 15 bp, Homo sapiens
aaggcacattttcat

SEQ ID NO: 953813 - DNA, 15 bp, Homo sapiens
aggcacattttcatc

SEQ ID NO: 953814 - DNA, 15 bp, Homo sapiens
ggcacattttcatca

SEQ ID NO: 953815 - DNA, 15 bp, Homo sapiens
gcacattttcatcag

SEQ ID NO: 953816 - DNA, 15 bp, Homo sapiens
cacattttcatcagg

SEQ ID NO: 953817 - DNA, 15 bp, Homo sapiens
acattttcatcagga

SEQ ID NO: 953818 - DNA, 15 bp, Homo sapiens
cattttcatcaggac

SEQ ID NO: 953819 - DNA, 15 bp, Homo sapiens
attttcatcaggaca

SEQ ID NO: 953820 - DNA, 15 bp, Homo sapiens
ttttcatcaggacaa

SEQ ID NO: 953821 - DNA, 15 bp, Homo sapiens
tttcatcaggacaag

SEQ ID NO: 953822 - DNA, 15 bp, Homo sapiens
ttcatcaggacaagc

SEQ ID NO: 953823 - DNA, 15 bp, Homo sapiens
tcatcaggacaagcc

SEQ ID NO: 953824 - DNA, 15 bp, Homo sapiens
catcaggacaagcca

SEQ ID NO: 953825 - DNA, 15 bp, Homo sapiens
atcaggacaagccag

SEQ ID NO: 953826 - DNA, 15 bp, Homo sapiens
tcaggacaagccagt

SEQ ID NO: 953827 - DNA, 15 bp, Homo sapiens
caggacaagccagtg

SEQ ID NO: 953828 - DNA, 15 bp, Homo sapiens
aggacaagccagtgc

SEQ ID NO: 953829 - DNA, 15 bp, Homo sapiens
ggacaagccagtgca

SEQ ID NO: 953830 - DNA, 15 bp, Homo sapiens
gacaagccagtgcat

SEQ ID NO: 953831 - DNA, 15 bp, Homo sapiens
acaagccagtgcatc

SEQ ID NO: 953832 - DNA, 15 bp, Homo sapiens
caagccagtgcatct

SEQ ID NO: 953833 - DNA, 15 bp, Homo sapiens
aagccagtgcatctt

SEQ ID NO: 953834 - DNA, 15 bp, Homo sapiens
agccagtgcatcttg

SEQ ID NO: 953835 - DNA, 15 bp, Homo sapiens
gccagtgcatcttga

SEQ ID NO: 953836 - DNA, 15 bp, Homo sapiens
ccagtgcatcttgag

SEQ ID NO: 953837 - DNA, 15 bp, Homo sapiens
cagtgcatcttgaga

SEQ ID NO: 953838 - DNA, 15 bp, Homo sapiens
agtgcatcttgagat

SEQ ID NO: 953839 - DNA, 15 bp, Homo sapiens
gtgcatcttgagatg

SEQ ID NO: 953840 - DNA, 15 bp, Homo sapiens
tgcatcttgagatga

SEQ ID NO: 953841 - DNA, 15 bp, Homo sapiens
gcatcttgagatgat

SEQ ID NO: 953842 - DNA, 15 bp, Homo sapiens
catcttgagatgatg

SEQ ID NO: 953843 - DNA, 15 bp, Homo sapiens
atcttgagatgatga

SEQ ID NO: 953844 - DNA, 15 bp, Homo sapiens
tcttgagatgatgag

SEQ ID NO: 953845 - DNA, 15 bp, Homo sapiens
cttgagatgatgagc

SEQ ID NO: 953846 - DNA, 15 bp, Homo sapiens
ttgagatgatgagca

SEQ ID NO: 953847 - DNA, 15 bp, Homo sapiens
tgagatgatgagcat

SEQ ID NO: 953848 - DNA, 15 bp, Homo sapiens
gagatgatgagcatg

SEQ ID NO: 953849 - DNA, 15 bp, Homo sapiens
agatgatgagcatga

SEQ ID NO: 953850 - DNA, 15 bp, Homo sapiens
gatgatgagcatgag

SEQ ID NO: 953851 - DNA, 15 bp, Homo sapiens
atgatgagcatgaga

SEQ ID NO: 953852 - DNA, 15 bp, Homo sapiens
tgatgagcatgagag

SEQ ID NO: 953853 - DNA, 15 bp, Homo sapiens
gatgagcatgagagg

SEQ ID NO: 953854 - DNA, 15 bp, Homo sapiens
atgagcatgagaggt

SEQ ID NO: 953855 - DNA, 15 bp, Homo sapiens
tgagcatgagaggtg

SEQ ID NO: 953856 - DNA, 15 bp, Homo sapiens
gagcatgagaggtga

SEQ ID NO: 953857 - DNA, 15 bp, Homo sapiens
agcatgagaggtgat

SEQ ID NO: 953858 - DNA, 15 bp, Homo sapiens
gcatgagaggtgatg

SEQ ID NO: 953859 - DNA, 15 bp, Homo sapiens
catgagaggtgatga

SEQ ID NO: 953860 - DNA, 15 bp, Homo sapiens
atgagaggtgatgag

SEQ ID NO: 953861 - DNA, 15 bp, Homo sapiens
tgagaggtgatgaga

SEQ ID NO: 953862 - DNA, 15 bp, Homo sapiens
gagaggtgatgagat

SEQ ID NO: 953863 - DNA, 15 bp, Homo sapiens
agaggtgatgagatt

SEQ ID NO: 953864 - DNA, 15 bp, Homo sapiens
gaggtgatgagattc

SEQ ID NO: 953865 - DNA, 15 bp, Homo sapiens
aggtgatgagattcc

SEQ ID NO: 953866 - DNA, 15 bp, Homo sapiens
ggtgatgagattcct

SEQ ID NO: 953867 - DNA, 15 bp, Homo sapiens
gtgatgagattcctg

SEQ ID NO: 953868 - DNA, 15 bp, Homo sapiens
tgatgagattcctga

SEQ ID NO: 953869 - DNA, 15 bp, Homo sapiens
gatgagattcctgag

SEQ ID NO: 953870 - DNA, 15 bp, Homo sapiens
atgagattcctgagt

SEQ ID NO: 953871 - DNA, 15 bp, Homo sapiens
tgagattcctgagtg

SEQ ID NO: 953872 - DNA, 15 bp, Homo sapiens
gagattcctgagtga

SEQ ID NO: 953873 - DNA, 15 bp, Homo sapiens
agattcctgagtgag

SEQ ID NO: 953874 - DNA, 15 bp, Homo sapiens
gattcctgagtgagg

SEQ ID NO: 953875 - DNA, 15 bp, Homo sapiens
attcctgagtgaggg

SEQ ID NO: 953876 - DNA, 15 bp, Homo sapiens
ttcctgagtgagggt

SEQ ID NO: 953877 - DNA, 15 bp, Homo sapiens
tcctgagtgagggtg

SEQ ID NO: 953878 - DNA, 15 bp, Homo sapiens
cctgagtgagggtga

SEQ ID NO: 953879 - DNA, 15 bp, Homo sapiens
ctgagtgagggtgaa

SEQ ID NO: 953880 - DNA, 15 bp, Homo sapiens
tgagtgagggtgaat

SEQ ID NO: 953881 - DNA, 15 bp, Homo sapiens
gagtgagggtgaatc

SEQ ID NO: 953882 - DNA, 15 bp, Homo sapiens
agtgagggtgaatct

SEQ ID NO: 953883 - DNA, 15 bp, Homo sapiens
gtgagggtgaatctt

SEQ ID NO: 953884 - DNA, 15 bp, Homo sapiens
tgagggtgaatcttg

SEQ ID NO: 953885 - DNA, 15 bp, Homo sapiens
gagggtgaatcttgg

SEQ ID NO: 953886 - DNA, 15 bp, Homo sapiens
agggtgaatcttggt

SEQ ID NO: 953887 - DNA, 15 bp, Homo sapiens
gggtgaatcttggtg

SEQ ID NO: 953888 - DNA, 15 bp, Homo sapiens
ggtgaatcttggtgg

SEQ ID NO: 953889 - DNA, 15 bp, Homo sapiens
gtgaatcttggtggt

SEQ ID NO: 953890 - DNA, 15 bp, Homo sapiens
tgaatcttggtggtt

SEQ ID NO: 953891 - DNA, 15 bp, Homo sapiens
gaatcttggtggtta

SEQ ID NO: 953892 - DNA, 15 bp, Homo sapiens
aatcttggtggttac

SEQ ID NO: 953893 - DNA, 15 bp, Homo sapiens
atcttggtggttaca

SEQ ID NO: 953894 - DNA, 15 bp, Homo sapiens
tcttggtggttacag

SEQ ID NO: 953895 - DNA, 15 bp, Homo sapiens
cttggtggttacagc

SEQ ID NO: 953896 - DNA, 15 bp, Homo sapiens
ttggtggttacagca

SEQ ID NO: 953897 - DNA, 15 bp, Homo sapiens
tggtggttacagcat

SEQ ID NO: 953898 - DNA, 15 bp, Homo sapiens
ggtggttacagcatt

SEQ ID NO: 953899 - DNA, 15 bp, Homo sapiens
gtggttacagcatta

SEQ ID NO: 953900 - DNA, 15 bp, Homo sapiens
tggttacagcattat

SEQ ID NO: 953901 - DNA, 15 bp, Homo sapiens
ggttacagcattatg

SEQ ID NO: 953902 - DNA, 15 bp, Homo sapiens
gttacagcattatgg

SEQ ID NO: 953903 - DNA, 15 bp, Homo sapiens
ttacagcattatggt

SEQ ID NO: 953904 - DNA, 15 bp, Homo sapiens
tacagcattatggta

SEQ ID NO: 953905 - DNA, 15 bp, Homo sapiens
acagcattatggtaa

SEQ ID NO: 953906 - DNA, 15 bp, Homo sapiens
cagcattatggtaat

SEQ ID NO: 953907 - DNA, 15 bp, Homo sapiens
agcattatggtaatg

SEQ ID NO: 953908 - DNA, 15 bp, Homo sapiens
gcattatggtaatgc

SEQ ID NO: 953909 - DNA, 15 bp, Homo sapiens
cattatggtaatgct

SEQ ID NO: 953910 - DNA, 15 bp, Homo sapiens
attatggtaatgcta

SEQ ID NO: 953911 - DNA, 15 bp, Homo sapiens
ttatggtaatgctaa

SEQ ID NO: 953912 - DNA, 15 bp, Homo sapiens
tatggtaatgctaac

SEQ ID NO: 953913 - DNA, 15 bp, Homo sapiens
atggtaatgctaaca

SEQ ID NO: 953914 - DNA, 15 bp, Homo sapiens
tggtaatgctaacac

SEQ ID NO: 953915 - DNA, 15 bp, Homo sapiens
ggtaatgctaacact

SEQ ID NO: 953916 - DNA, 15 bp, Homo sapiens
gtaatgctaacactg

SEQ ID NO: 953917 - DNA, 15 bp, Homo sapiens
taatgctaacactgt

SEQ ID NO: 953918 - DNA, 15 bp, Homo sapiens
aatgctaacactgtt

SEQ ID NO: 953919 - DNA, 15 bp, Homo sapiens
atgctaacactgttt

SEQ ID NO: 953920 - DNA, 15 bp, Homo sapiens
tgctaacactgttta

SEQ ID NO: 953921 - DNA, 15 bp, Homo sapiens
gctaacactgtttac

SEQ ID NO: 953922 - DNA, 15 bp, Homo sapiens
ctaacactgtttaca

SEQ ID NO: 953923 - DNA, 15 bp, Homo sapiens
taacactgtttacac

SEQ ID NO: 953924 - DNA, 15 bp, Homo sapiens
aacactgtttacact

SEQ ID NO: 953925 - DNA, 15 bp, Homo sapiens
acactgtttacactg

SEQ ID NO: 953926 - DNA, 15 bp, Homo sapiens
cactgtttacactgt

SEQ ID NO: 953927 - DNA, 15 bp, Homo sapiens
actgtttacactgtg

SEQ ID NO: 953928 - DNA, 15 bp, Homo sapiens
ctgtttacactgtgg

SEQ ID NO: 953929 - DNA, 15 bp, Homo sapiens
tgtttacactgtggt

SEQ ID NO: 953930 - DNA, 15 bp, Homo sapiens
gtttacactgtggtt

SEQ ID NO: 953931 - DNA, 15 bp, Homo sapiens
tttacactgtggttc

SEQ ID NO: 953932 - DNA, 15 bp, Homo sapiens
ttacactgtggttct

SEQ ID NO: 953933 - DNA, 15 bp, Homo sapiens
tacactgtggttctc

SEQ ID NO: 953934 - DNA, 15 bp, Homo sapiens
acactgtggttctcc

SEQ ID NO: 953935 - DNA, 15 bp, Homo sapiens
cactgtggttctcca

SEQ ID NO: 953936 - DNA, 15 bp, Homo sapiens
actgtggttctccaa

SEQ ID NO: 953937 - DNA, 15 bp, Homo sapiens
ctgtggttctccaaa

SEQ ID NO: 953938 - DNA, 15 bp, Homo sapiens
tgtggttctccaaat

SEQ ID NO: 953939 - DNA, 15 bp, Homo sapiens
gtggttctccaaata

SEQ ID NO: 953940 - DNA, 15 bp, Homo sapiens
tggttctccaaatac

SEQ ID NO: 953941 - DNA, 15 bp, Homo sapiens
ggttctccaaatacc

SEQ ID NO: 953942 - DNA, 15 bp, Homo sapiens
gttctccaaatacct

SEQ ID NO: 953943 - DNA, 15 bp, Homo sapiens
ttctccaaatacctg

SEQ ID NO: 953944 - DNA, 15 bp, Homo sapiens
tctccaaatacctgc

SEQ ID NO: 953945 - DNA, 15 bp, Homo sapiens
ctccaaatacctgca

SEQ ID NO: 953946 - DNA, 15 bp, Homo sapiens
tccaaatacctgcat

SEQ ID NO: 953947 - DNA, 15 bp, Homo sapiens
ccaaatacctgcatc

SEQ ID NO: 953948 - DNA, 15 bp, Homo sapiens
caaatacctgcatct

SEQ ID NO: 953949 - DNA, 15 bp, Homo sapiens
aaatacctgcatctt

SEQ ID NO: 953950 - DNA, 15 bp, Homo sapiens
aatacctgcatctta

SEQ ID NO: 953951 - DNA, 15 bp, Homo sapiens
atacctgcatcttaa

SEQ ID NO: 953952 - DNA, 15 bp, Homo sapiens
tacctgcatcttaaa

SEQ ID NO: 953953 - DNA, 15 bp, Homo sapiens
acctgcatcttaaat

SEQ ID NO: 953954 - DNA, 15 bp, Homo sapiens
cctgcatcttaaata

SEQ ID NO: 953955 - DNA, 15 bp, Homo sapiens
ctgcatcttaaatac

SEQ ID NO: 953956 - DNA, 15 bp, Homo sapiens
tgcatcttaaatact

SEQ ID NO: 953957 - DNA, 15 bp, Homo sapiens
gcatcttaaatacta

SEQ ID NO: 953958 - DNA, 15 bp, Homo sapiens
catcttaaatactat

SEQ ID NO: 953959 - DNA, 15 bp, Homo sapiens
atcttaaatactatt

SEQ ID NO: 953960 - DNA, 15 bp, Homo sapiens
tcttaaatactatta

SEQ ID NO: 953961 - DNA, 15 bp, Homo sapiens
cttaaatactattaa

SEQ ID NO: 953962 - DNA, 15 bp, Homo sapiens
ttaaatactattaaa

SEQ ID NO: 953963 - DNA, 15 bp, Homo sapiens
taaatactattaaag

SEQ ID NO: 953964 - DNA, 15 bp, Homo sapiens
aaatactattaaaga

SEQ ID NO: 953965 - DNA, 15 bp, Homo sapiens
aatactattaaagat

SEQ ID NO: 953966 - DNA, 15 bp, Homo sapiens
atactattaaagatt

SEQ ID NO: 953967 - DNA, 15 bp, Homo sapiens
tactattaaagattc

SEQ ID NO: 953968 - DNA, 15 bp, Homo sapiens
actattaaagattcc

SEQ ID NO: 953969 - DNA, 15 bp, Homo sapiens
ctattaaagattcct

SEQ ID NO: 953970 - DNA, 15 bp, Homo sapiens
tattaaagattcctg

SEQ ID NO: 953971 - DNA, 15 bp, Homo sapiens
attaaagattcctgg

SEQ ID NO: 953972 - DNA, 15 bp, Homo sapiens
ttaaagattcctggg

SEQ ID NO: 953973 - DNA, 15 bp, Homo sapiens
taaagattcctgggc

SEQ ID NO: 953974 - DNA, 15 bp, Homo sapiens
aaagattcctgggcc

SEQ ID NO: 953975 - DNA, 15 bp, Homo sapiens
aagattcctgggcct

SEQ ID NO: 953976 - DNA, 15 bp, Homo sapiens
agattcctgggcctc

SEQ ID NO: 953977 - DNA, 15 bp, Homo sapiens
gattcctgggcctca

SEQ ID NO: 953978 - DNA, 15 bp, Homo sapiens
attcctgggcctcaa

SEQ ID NO: 953979 - DNA, 15 bp, Homo sapiens
ttcctgggcctcaag

SEQ ID NO: 953980 - DNA, 15 bp, Homo sapiens
tcctgggcctcaagt

SEQ ID NO: 953981 - DNA, 15 bp, Homo sapiens
cctgggcctcaagtc

SEQ ID NO: 953982 - DNA, 15 bp, Homo sapiens
ctgggcctcaagtca

SEQ ID NO: 953983 - DNA, 15 bp, Homo sapiens
tgggcctcaagtcag

SEQ ID NO: 953984 - DNA, 15 bp, Homo sapiens
gggcctcaagtcaga

SEQ ID NO: 953985 - DNA, 15 bp, Homo sapiens
ggcctcaagtcagac

SEQ ID NO: 953986 - DNA, 15 bp, Homo sapiens
gcctcaagtcagacc

SEQ ID NO: 953987 - DNA, 15 bp, Homo sapiens
cctcaagtcagacct

SEQ ID NO: 953988 - DNA, 15 bp, Homo sapiens
ctcaagtcagaccta

SEQ ID NO: 953989 - DNA, 15 bp, Homo sapiens
tcaagtcagacctac

SEQ ID NO: 953990 - DNA, 15 bp, Homo sapiens
caagtcagacctacc

SEQ ID NO: 953991 - DNA, 15 bp, Homo sapiens
aagtcagacctacca

SEQ ID NO: 953992 - DNA, 15 bp, Homo sapiens
agtcagacctaccaa

SEQ ID NO: 953993 - DNA, 15 bp, Homo sapiens
gtcagacctaccaaa

SEQ ID NO: 953994 - DNA, 15 bp, Homo sapiens
tcagacctaccaaat

SEQ ID NO: 953995 - DNA, 15 bp, Homo sapiens
cagacctaccaaatc

SEQ ID NO: 953996 - DNA, 15 bp, Homo sapiens
agacctaccaaatca

SEQ ID NO: 953997 - DNA, 15 bp, Homo sapiens
gacctaccaaatcag

SEQ ID NO: 953998 - DNA, 15 bp, Homo sapiens
acctaccaaatcaga

SEQ ID NO: 953999 - DNA, 15 bp, Homo sapiens
cctaccaaatcagaa

SEQ ID NO: 954000 - DNA, 15 bp, Homo sapiens
ctaccaaatcagaat

SEQ ID NO: 954001 - DNA, 15 bp, Homo sapiens
taccaaatcagaatt

SEQ ID NO: 954002 - DNA, 15 bp, Homo sapiens
accaaatcagaattt

SEQ ID NO: 954003 - DNA, 15 bp, Homo sapiens
ccaaatcagaatttc

SEQ ID NO: 954004 - DNA, 15 bp, Homo sapiens
caaatcagaatttct

SEQ ID NO: 954005 - DNA, 15 bp, Homo sapiens
aaatcagaatttctg

SEQ ID NO: 954006 - DNA, 15 bp, Homo sapiens
aatcagaatttctgg

SEQ ID NO: 954007 - DNA, 15 bp, Homo sapiens
atcagaatttctgga

SEQ ID NO: 954008 - DNA, 15 bp, Homo sapiens
tcagaatttctggaa

SEQ ID NO: 954009 - DNA, 15 bp, Homo sapiens
cagaatttctggaat

SEQ ID NO: 954010 - DNA, 15 bp, Homo sapiens
agaatttctggaatg

SEQ ID NO: 954011 - DNA, 15 bp, Homo sapiens
gaatttctggaatga

SEQ ID NO: 954012 - DNA, 15 bp, Homo sapiens
aatttctggaatgaa

SEQ ID NO: 954013 - DNA, 15 bp, Homo sapiens
atttctggaatgaag

SEQ ID NO: 954014 - DNA, 15 bp, Homo sapiens
tttctggaatgaagc

SEQ ID NO: 954015 - DNA, 15 bp, Homo sapiens
ttctggaatgaagcc

SEQ ID NO: 954016 - DNA, 15 bp, Homo sapiens
tctggaatgaagccc

SEQ ID NO: 954017 - DNA, 15 bp, Homo sapiens
ctggaatgaagccct

SEQ ID NO: 954018 - DNA, 15 bp, Homo sapiens
tggaatgaagccctg

SEQ ID NO: 954019 - DNA, 15 bp, Homo sapiens
ggaatgaagccctgg

SEQ ID NO: 954020 - DNA, 15 bp, Homo sapiens
gaatgaagccctgga

SEQ ID NO: 954021 - DNA, 15 bp, Homo sapiens
aatgaagccctggaa

SEQ ID NO: 954022 - DNA, 15 bp, Homo sapiens
atgaagccctggaat

SEQ ID NO: 954023 - DNA, 15 bp, Homo sapiens
tgaagccctggaatc

SEQ ID NO: 954024 - DNA, 15 bp, Homo sapiens
gaagccctggaatcc

SEQ ID NO: 954025 - DNA, 15 bp, Homo sapiens
aagccctggaatcca

SEQ ID NO: 954026 - DNA, 15 bp, Homo sapiens
agccctggaatccac

SEQ ID NO: 954027 - DNA, 15 bp, Homo sapiens
gccctggaatccaca

SEQ ID NO: 954028 - DNA, 15 bp, Homo sapiens
ccctggaatccacag

SEQ ID NO: 954029 - DNA, 15 bp, Homo sapiens
cctggaatccacagt

SEQ ID NO: 954030 - DNA, 15 bp, Homo sapiens
ctggaatccacagtt

SEQ ID NO: 954031 - DNA, 15 bp, Homo sapiens
tggaatccacagttt

SEQ ID NO: 954032 - DNA, 15 bp, Homo sapiens
ggaatccacagttta

SEQ ID NO: 954033 - DNA, 15 bp, Homo sapiens
gaatccacagtttaa

SEQ ID NO: 954034 - DNA, 15 bp, Homo sapiens
aatccacagtttaac

SEQ ID NO: 954035 - DNA, 15 bp, Homo sapiens
atccacagtttaaca

SEQ ID NO: 954036 - DNA, 15 bp, Homo sapiens
tccacagtttaacaa

SEQ ID NO: 954037 - DNA, 15 bp, Homo sapiens
ccacagtttaacaaa

SEQ ID NO: 954038 - DNA, 15 bp, Homo sapiens
cacagtttaacaaat

SEQ ID NO: 954039 - DNA, 15 bp, Homo sapiens
acagtttaacaaatt

SEQ ID NO: 954040 - DNA, 15 bp, Homo sapiens
cagtttaacaaattc

SEQ ID NO: 954041 - DNA, 15 bp, Homo sapiens
agtttaacaaattct

SEQ ID NO: 954042 - DNA, 15 bp, Homo sapiens
gtttaacaaattctt

SEQ ID NO: 954043 - DNA, 15 bp, Homo sapiens
tttaacaaattcttc

SEQ ID NO: 954044 - DNA, 15 bp, Homo sapiens
ttaacaaattcttca

SEQ ID NO: 954045 - DNA, 15 bp, Homo sapiens
taacaaattcttcat

SEQ ID NO: 954046 - DNA, 15 bp, Homo sapiens
aacaaattcttcatt

SEQ ID NO: 954047 - DNA, 15 bp, Homo sapiens
acaaattcttcattc

SEQ ID NO: 954048 - DNA, 15 bp, Homo sapiens
caaattcttcattct

SEQ ID NO: 954049 - DNA, 15 bp, Homo sapiens
aaattcttcattcta

SEQ ID NO: 954050 - DNA, 15 bp, Homo sapiens
aattcttcattctaa

SEQ ID NO: 954051 - DNA, 15 bp, Homo sapiens
attcttcattctaac

SEQ ID NO: 954052 - DNA, 15 bp, Homo sapiens
ttcttcattctaaca

SEQ ID NO: 954053 - DNA, 15 bp, Homo sapiens
tcttcattctaacaa

SEQ ID NO: 954054 - DNA, 15 bp, Homo sapiens
cttcattctaacaaa

SEQ ID NO: 954055 - DNA, 15 bp, Homo sapiens
ttcattctaacaaac

SEQ ID NO: 954056 - DNA, 15 bp, Homo sapiens
tcattctaacaaact

SEQ ID NO: 954057 - DNA, 15 bp, Homo sapiens
cattctaacaaactc

SEQ ID NO: 954058 - DNA, 15 bp, Homo sapiens
attctaacaaactca

SEQ ID NO: 954059 - DNA, 15 bp, Homo sapiens
ttctaacaaactcac

SEQ ID NO: 954060 - DNA, 15 bp, Homo sapiens
tctaacaaactcaca

SEQ ID NO: 954061 - DNA, 15 bp, Homo sapiens
ctaacaaactcacag

SEQ ID NO: 954062 - DNA, 15 bp, Homo sapiens
taacaaactcacaga

SEQ ID NO: 954063 - DNA, 15 bp, Homo sapiens
aacaaactcacagat

SEQ ID NO: 954064 - DNA, 15 bp, Homo sapiens
acaaactcacagatg

SEQ ID NO: 954065 - DNA, 15 bp, Homo sapiens
caaactcacagatga

SEQ ID NO: 954066 - DNA, 15 bp, Homo sapiens
aaactcacagatgat

SEQ ID NO: 954067 - DNA, 15 bp, Homo sapiens
aactcacagatgatt

SEQ ID NO: 954068 - DNA, 15 bp, Homo sapiens
actcacagatgattc

SEQ ID NO: 954069 - DNA, 15 bp, Homo sapiens
ctcacagatgattct

SEQ ID NO: 954070 - DNA, 15 bp, Homo sapiens
tcacagatgattctg

SEQ ID NO: 954071 - DNA, 15 bp, Homo sapiens
cacagatgattctga

SEQ ID NO: 954072 - DNA, 15 bp, Homo sapiens
acagatgattctgaa

SEQ ID NO: 954073 - DNA, 15 bp, Homo sapiens
cagatgattctgaag

SEQ ID NO: 954074 - DNA, 15 bp, Homo sapiens
agatgattctgaagt

SEQ ID NO: 954075 - DNA, 15 bp, Homo sapiens
gatgattctgaagtt

SEQ ID NO: 954076 - DNA, 15 bp, Homo sapiens
atgattctgaagttt

SEQ ID NO: 954077 - DNA, 15 bp, Homo sapiens
tgattctgaagtttg

SEQ ID NO: 954078 - DNA, 15 bp, Homo sapiens
gattctgaagtttga

SEQ ID NO: 954079 - DNA, 15 bp, Homo sapiens
attctgaagtttgaa

SEQ ID NO: 954080 - DNA, 15 bp, Homo sapiens
ttctgaagtttgaaa

SEQ ID NO: 954081 - DNA, 15 bp, Homo sapiens
tctgaagtttgaaaa

SEQ ID NO: 954082 - DNA, 15 bp, Homo sapiens
ctgaagtttgaaaac

SEQ ID NO: 954083 - DNA, 15 bp, Homo sapiens
tgaagtttgaaaacc

SEQ ID NO: 954084 - DNA, 15 bp, Homo sapiens
gaagtttgaaaacca

SEQ ID NO: 954085 - DNA, 15 bp, Homo sapiens
aagtttgaaaaccac

SEQ ID NO: 954086 - DNA, 15 bp, Homo sapiens
agtttgaaaaccact

SEQ ID NO: 954087 - DNA, 15 bp, Homo sapiens
gtttgaaaaccactg

SEQ ID NO: 954088 - DNA, 15 bp, Homo sapiens
tttgaaaaccactgg

SEQ ID NO: 954089 - DNA, 15 bp, Homo sapiens
ttgaaaaccactggt

SEQ ID NO: 954090 - DNA, 15 bp, Homo sapiens
tgaaaaccactggtg

SEQ ID NO: 954091 - DNA, 15 bp, Homo sapiens
gaaaaccactggtgt

SEQ ID NO: 954092 - DNA, 15 bp, Homo sapiens
aaaaccactggtgta

SEQ ID NO: 954093 - DNA, 15 bp, Homo sapiens
aaaccactggtgtag

SEQ ID NO: 954094 - DNA, 15 bp, Homo sapiens
aaccactggtgtagt

SEQ ID NO: 954095 - DNA, 15 bp, Homo sapiens
accactggtgtagtg

SEQ ID NO: 954096 - DNA, 15 bp, Homo sapiens
ccactggtgtagtga

SEQ ID NO: 954097 - DNA, 15 bp, Homo sapiens
cactggtgtagtgag

SEQ ID NO: 954098 - DNA, 15 bp, Homo sapiens
actggtgtagtgaga

SEQ ID NO: 954099 - DNA, 15 bp, Homo sapiens
ctggtgtagtgagaa

SEQ ID NO: 954100 - DNA, 15 bp, Homo sapiens
tggtgtagtgagaaa

SEQ ID NO: 954101 - DNA, 15 bp, Homo sapiens
ggtgtagtgagaaat

SEQ ID NO: 954102 - DNA, 15 bp, Homo sapiens
gtgtagtgagaaata

SEQ ID NO: 954103 - DNA, 15 bp, Homo sapiens
tgtagtgagaaatat

SEQ ID NO: 954104 - DNA, 15 bp, Homo sapiens
gtagtgagaaatatg

SEQ ID NO: 954105 - DNA, 15 bp, Homo sapiens
tagtgagaaatatgc

SEQ ID NO: 954106 - DNA, 15 bp, Homo sapiens
agtgagaaatatgcc

SEQ ID NO: 954107 - DNA, 15 bp, Homo sapiens
gtgagaaatatgcca

SEQ ID NO: 954108 - DNA, 15 bp, Homo sapiens
tgagaaatatgccag

SEQ ID NO: 954109 - DNA, 15 bp, Homo sapiens
gagaaatatgccagt

SEQ ID NO: 954110 - DNA, 15 bp, Homo sapiens
agaaatatgccagta

SEQ ID NO: 954111 - DNA, 15 bp, Homo sapiens
gaaatatgccagtag

SEQ ID NO: 954112 - DNA, 15 bp, Homo sapiens
aaatatgccagtagg

SEQ ID NO: 954113 - DNA, 15 bp, Homo sapiens
aatatgccagtaggg

SEQ ID NO: 954114 - DNA, 15 bp, Homo sapiens
atatgccagtagggt

SEQ ID NO: 954115 - DNA, 15 bp, Homo sapiens
tatgccagtagggtc

SEQ ID NO: 954116 - DNA, 15 bp, Homo sapiens
atgccagtagggtca

SEQ ID NO: 954117 - DNA, 15 bp, Homo sapiens
tgccagtagggtcat

SEQ ID NO: 954118 - DNA, 15 bp, Homo sapiens
gccagtagggtcatc

SEQ ID NO: 954119 - DNA, 15 bp, Homo sapiens
ccagtagggtcatca

SEQ ID NO: 954120 - DNA, 15 bp, Homo sapiens
cagtagggtcatcag

SEQ ID NO: 954121 - DNA, 15 bp, Homo sapiens
agtagggtcatcaga

SEQ ID NO: 954122 - DNA, 15 bp, Homo sapiens
gtagggtcatcagaa

SEQ ID NO: 954123 - DNA, 15 bp, Homo sapiens
tagggtcatcagaag

SEQ ID NO: 954124 - DNA, 15 bp, Homo sapiens
agggtcatcagaagt

SEQ ID NO: 954125 - DNA, 15 bp, Homo sapiens
gggtcatcagaagtg

SEQ ID NO: 954126 - DNA, 15 bp, Homo sapiens
ggtcatcagaagtga

SEQ ID NO: 954127 - DNA, 15 bp, Homo sapiens
gtcatcagaagtgag

SEQ ID NO: 954128 - DNA, 15 bp, Homo sapiens
tcatcagaagtgagg

SEQ ID NO: 954129 - DNA, 15 bp, Homo sapiens
catcagaagtgaggt

SEQ ID NO: 954130 - DNA, 15 bp, Homo sapiens
atcagaagtgaggtg

SEQ ID NO: 954131 - DNA, 15 bp, Homo sapiens
tcagaagtgaggtgg

SEQ ID NO: 954132 - DNA, 15 bp, Homo sapiens
cagaagtgaggtgga

SEQ ID NO: 954133 - DNA, 15 bp, Homo sapiens
agaagtgaggtggaa

SEQ ID NO: 954134 - DNA, 15 bp, Homo sapiens
gaagtgaggtggaac

SEQ ID NO: 954135 - DNA, 15 bp, Homo sapiens
aagtgaggtggaact

SEQ ID NO: 954136 - DNA, 15 bp, Homo sapiens
agtgaggtggaactt

SEQ ID NO: 954137 - DNA, 15 bp, Homo sapiens
gtgaggtggaacttg

SEQ ID NO: 954138 - DNA, 15 bp, Homo sapiens
tgaggtggaacttgg

SEQ ID NO: 954139 - DNA, 15 bp, Homo sapiens
gaggtggaacttggc

SEQ ID NO: 954140 - DNA, 15 bp, Homo sapiens
aggtggaacttggca

SEQ ID NO: 954141 - DNA, 15 bp, Homo sapiens
ggtggaacttggcac

SEQ ID NO: 954142 - DNA, 15 bp, Homo sapiens
gtggaacttggcact

SEQ ID NO: 954143 - DNA, 15 bp, Homo sapiens
tggaacttggcactt

SEQ ID NO: 954144 - DNA, 15 bp, Homo sapiens
ggaacttggcacttt

SEQ ID NO: 954145 - DNA, 15 bp, Homo sapiens
gaacttggcactttg

SEQ ID NO: 954146 - DNA, 15 bp, Homo sapiens
aacttggcactttgt

SEQ ID NO: 954147 - DNA, 15 bp, Homo sapiens
acttggcactttgtg

SEQ ID NO: 954148 - DNA, 15 bp, Homo sapiens
cttggcactttgtgg

SEQ ID NO: 954149 - DNA, 15 bp, Homo sapiens
ttggcactttgtggc

SEQ ID NO: 954150 - DNA, 15 bp, Homo sapiens
tggcactttgtggct

SEQ ID NO: 954151 - DNA, 15 bp, Homo sapiens
ggcactttgtggctc

SEQ ID NO: 954152 - DNA, 15 bp, Homo sapiens
gcactttgtggctct

SEQ ID NO: 954153 - DNA, 15 bp, Homo sapiens
cactttgtggctctt

SEQ ID NO: 954154 - DNA, 15 bp, Homo sapiens
actttgtggctcttt

SEQ ID NO: 954155 - DNA, 15 bp, Homo sapiens
ctttgtggctcttta

SEQ ID NO: 954156 - DNA, 15 bp, Homo sapiens
tttgtggctctttac

SEQ ID NO: 954157 - DNA, 15 bp, Homo sapiens
ttgtggctctttacc

SEQ ID NO: 954158 - DNA, 15 bp, Homo sapiens
tgtggctctttaccc

SEQ ID NO: 954159 - DNA, 15 bp, Homo sapiens
gtggctctttacccc

SEQ ID NO: 954160 - DNA, 15 bp, Homo sapiens
tggctctttacccca

SEQ ID NO: 954161 - DNA, 15 bp, Homo sapiens
ggctctttaccccaa

SEQ ID NO: 954162 - DNA, 15 bp, Homo sapiens
gctctttaccccaac

SEQ ID NO: 954163 - DNA, 15 bp, Homo sapiens
ctctttaccccaact

SEQ ID NO: 954164 - DNA, 15 bp, Homo sapiens
tctttaccccaactc

SEQ ID NO: 954165 - DNA, 15 bp, Homo sapiens
ctttaccccaactct

SEQ ID NO: 954166 - DNA, 15 bp, Homo sapiens
tttaccccaactctg

SEQ ID NO: 954167 - DNA, 15 bp, Homo sapiens
ttaccccaactctgt

SEQ ID NO: 954168 - DNA, 15 bp, Homo sapiens
taccccaactctgtg

SEQ ID NO: 954169 - DNA, 15 bp, Homo sapiens
accccaactctgtgt

SEQ ID NO: 954170 - DNA, 15 bp, Homo sapiens
ccccaactctgtgtc

SEQ ID NO: 954171 - DNA, 15 bp, Homo sapiens
cccaactctgtgtct

SEQ ID NO: 954172 - DNA, 15 bp, Homo sapiens
ccaactctgtgtctt

SEQ ID NO: 954173 - DNA, 15 bp, Homo sapiens
caactctgtgtcttc

SEQ ID NO: 954174 - DNA, 15 bp, Homo sapiens
aactctgtgtcttcc

SEQ ID NO: 954175 - DNA, 15 bp, Homo sapiens
actctgtgtcttcca

SEQ ID NO: 954176 - DNA, 15 bp, Homo sapiens
ctctgtgtcttccat

SEQ ID NO: 954177 - DNA, 15 bp, Homo sapiens
tctgtgtcttccatg

SEQ ID NO: 954178 - DNA, 15 bp, Homo sapiens
ctgtgtcttccatgc

SEQ ID NO: 954179 - DNA, 15 bp, Homo sapiens
tgtgtcttccatgct

SEQ ID NO: 954180 - DNA, 15 bp, Homo sapiens
gtgtcttccatgctc

SEQ ID NO: 954181 - DNA, 15 bp, Homo sapiens
tgtcttccatgctcc

SEQ ID NO: 954182 - DNA, 15 bp, Homo sapiens
gtcttccatgctccc

SEQ ID NO: 954183 - DNA, 15 bp, Homo sapiens
tcttccatgctccct

SEQ ID NO: 954184 - DNA, 15 bp, Homo sapiens
cttccatgctccctg

SEQ ID NO: 954185 - DNA, 15 bp, Homo sapiens
ttccatgctccctgt

SEQ ID NO: 954186 - DNA, 15 bp, Homo sapiens
tccatgctccctgtt

SEQ ID NO: 954187 - DNA, 15 bp, Homo sapiens
ccatgctccctgttt

SEQ ID NO: 954188 - DNA, 15 bp, Homo sapiens
catgctccctgttta

SEQ ID NO: 954189 - DNA, 15 bp, Homo sapiens
atgctccctgtttat

SEQ ID NO: 954190 - DNA, 15 bp, Homo sapiens
tgctccctgtttatt

SEQ ID NO: 954191 - DNA, 15 bp, Homo sapiens
gctccctgtttatta

SEQ ID NO: 954192 - DNA, 15 bp, Homo sapiens
ctccctgtttattat

SEQ ID NO: 954193 - DNA, 15 bp, Homo sapiens
tccctgtttattatg

SEQ ID NO: 954194 - DNA, 15 bp, Homo sapiens
ccctgtttattatgt

SEQ ID NO: 954195 - DNA, 15 bp, Homo sapiens
cctgtttattatgtg

SEQ ID NO: 954196 - DNA, 15 bp, Homo sapiens
ctgtttattatgtgc

SEQ ID NO: 954197 - DNA, 15 bp, Homo sapiens
tgtttattatgtgcc

SEQ ID NO: 954198 - DNA, 15 bp, Homo sapiens
gtttattatgtgcct

SEQ ID NO: 954199 - DNA, 15 bp, Homo sapiens
tttattatgtgcctg

SEQ ID NO: 954200 - DNA, 15 bp, Homo sapiens
ttattatgtgcctgc

SEQ ID NO: 954201 - DNA, 15 bp, Homo sapiens
tattatgtgcctgct

SEQ ID NO: 954202 - DNA, 15 bp, Homo sapiens
attatgtgcctgctg

SEQ ID NO: 954203 - DNA, 15 bp, Homo sapiens
ttatgtgcctgctgt

SEQ ID NO: 954204 - DNA, 15 bp, Homo sapiens
tatgtgcctgctgta

SEQ ID NO: 954205 - DNA, 15 bp, Homo sapiens
atgtgcctgctgtaa

SEQ ID NO: 954206 - DNA, 15 bp, Homo sapiens
tgtgcctgctgtaag

SEQ ID NO: 954207 - DNA, 15 bp, Homo sapiens
gtgcctgctgtaagg

SEQ ID NO: 954208 - DNA, 15 bp, Homo sapiens
tgcctgctgtaagga

SEQ ID NO: 954209 - DNA, 15 bp, Homo sapiens
gcctgctgtaaggat

SEQ ID NO: 954210 - DNA, 15 bp, Homo sapiens
cctgctgtaaggatc

SEQ ID NO: 954211 - DNA, 15 bp, Homo sapiens
ctgctgtaaggatcc

SEQ ID NO: 954212 - DNA, 15 bp, Homo sapiens
tgctgtaaggatcct

SEQ ID NO: 954213 - DNA, 15 bp, Homo sapiens
gctgtaaggatcctg

SEQ ID NO: 954214 - DNA, 15 bp, Homo sapiens
ctgtaaggatcctgc

SEQ ID NO: 954215 - DNA, 15 bp, Homo sapiens
tgtaaggatcctgca

SEQ ID NO: 954216 - DNA, 15 bp, Homo sapiens
gtaaggatcctgcac

SEQ ID NO: 954217 - DNA, 15 bp, Homo sapiens
taaggatcctgcacc

SEQ ID NO: 954218 - DNA, 15 bp, Homo sapiens
aaggatcctgcacca

SEQ ID NO: 954219 - DNA, 15 bp, Homo sapiens
aggatcctgcaccac

SEQ ID NO: 954220 - DNA, 15 bp, Homo sapiens
ggatcctgcaccacc

SEQ ID NO: 954221 - DNA, 15 bp, Homo sapiens
gatcctgcaccacct

SEQ ID NO: 954222 - DNA, 15 bp, Homo sapiens
atcctgcaccacctc

SEQ ID NO: 954223 - DNA, 15 bp, Homo sapiens
tcctgcaccacctca

SEQ ID NO: 954224 - DNA, 15 bp, Homo sapiens
cctgcaccacctcaa

SEQ ID NO: 954225 - DNA, 15 bp, Homo sapiens
ctgcaccacctcaaa

SEQ ID NO: 954226 - DNA, 15 bp, Homo sapiens
tgcaccacctcaaaa

SEQ ID NO: 954227 - DNA, 15 bp, Homo sapiens
gcaccacctcaaaat

SEQ ID NO: 954228 - DNA, 15 bp, Homo sapiens
caccacctcaaaata

SEQ ID NO: 954229 - DNA, 15 bp, Homo sapiens
accacctcaaaatac

SEQ ID NO: 954230 - DNA, 15 bp, Homo sapiens
ccacctcaaaataca

SEQ ID NO: 954231 - DNA, 15 bp, Homo sapiens
cacctcaaaatacac

SEQ ID NO: 954232 - DNA, 15 bp, Homo sapiens
acctcaaaatacaca

SEQ ID NO: 954233 - DNA, 15 bp, Homo sapiens
cctcaaaatacacaa

SEQ ID NO: 954234 - DNA, 15 bp, Homo sapiens
ctcaaaatacacaaa

SEQ ID NO: 954235 - DNA, 15 bp, Homo sapiens
tcaaaatacacaaat

SEQ ID NO: 954236 - DNA, 15 bp, Homo sapiens
caaaatacacaaatg

SEQ ID NO: 954237 - DNA, 15 bp, Homo sapiens
aaaatacacaaatgc

SEQ ID NO: 954238 - DNA, 15 bp, Homo sapiens
aaatacacaaatgcc

SEQ ID NO: 954239 - DNA, 15 bp, Homo sapiens
aatacacaaatgcct

SEQ ID NO: 954240 - DNA, 15 bp, Homo sapiens
atacacaaatgcctt

SEQ ID NO: 954241 - DNA, 15 bp, Homo sapiens
tacacaaatgccttg

SEQ ID NO: 954242 - DNA, 15 bp, Homo sapiens
acacaaatgccttgt

SEQ ID NO: 954243 - DNA, 15 bp, Homo sapiens
cacaaatgccttgta

SEQ ID NO: 954244 - DNA, 15 bp, Homo sapiens
acaaatgccttgtac

SEQ ID NO: 954245 - DNA, 15 bp, Homo sapiens
caaatgccttgtaca

SEQ ID NO: 954246 - DNA, 15 bp, Homo sapiens
aaatgccttgtacac

SEQ ID NO: 954247 - DNA, 15 bp, Homo sapiens
aatgccttgtacaca

SEQ ID NO: 954248 - DNA, 15 bp, Homo sapiens
atgccttgtacacaa

SEQ ID NO: 954249 - DNA, 15 bp, Homo sapiens
tgccttgtacacaaa

SEQ ID NO: 954250 - DNA, 15 bp, Homo sapiens
gccttgtacacaaat

SEQ ID NO: 954251 - DNA, 15 bp, Homo sapiens
ccttgtacacaaatg

SEQ ID NO: 954252 - DNA, 15 bp, Homo sapiens
cttgtacacaaatgc

SEQ ID NO: 954253 - DNA, 15 bp, Homo sapiens
ttgtacacaaatgcc

SEQ ID NO: 954254 - DNA, 15 bp, Homo sapiens
tgtacacaaatgcct

SEQ ID NO: 954255 - DNA, 15 bp, Homo sapiens
gtacacaaatgcctt

SEQ ID NO: 954256 - DNA, 15 bp, Homo sapiens
acacaaatgccttgg

SEQ ID NO: 954257 - DNA, 15 bp, Homo sapiens
cacaaatgccttggg

SEQ ID NO: 954258 - DNA, 15 bp, Homo sapiens
acaaatgccttgggc

SEQ ID NO: 954259 - DNA, 15 bp, Homo sapiens
caaatgccttgggca

SEQ ID NO: 954260 - DNA, 15 bp, Homo sapiens
aaatgccttgggcat

SEQ ID NO: 954261 - DNA, 15 bp, Homo sapiens
aatgccttgggcatt

SEQ ID NO: 954262 - DNA, 15 bp, Homo sapiens
atgccttgggcattg

SEQ ID NO: 954263 - DNA, 15 bp, Homo sapiens
tgccttgggcattgt

SEQ ID NO: 954264 - DNA, 15 bp, Homo sapiens
gccttgggcattgtg

SEQ ID NO: 954265 - DNA, 15 bp, Homo sapiens
ccttgggcattgtgt

SEQ ID NO: 954266 - DNA, 15 bp, Homo sapiens
cttgggcattgtgta

SEQ ID NO: 954267 - DNA, 15 bp, Homo sapiens
ttgggcattgtgtac

SEQ ID NO: 954268 - DNA, 15 bp, Homo sapiens
tgggcattgtgtaca

SEQ ID NO: 954269 - DNA, 15 bp, Homo sapiens
gggcattgtgtacat

SEQ ID NO: 954270 - DNA, 15 bp, Homo sapiens
ggcattgtgtacata

SEQ ID NO: 954271 - DNA, 15 bp, Homo sapiens
gcattgtgtacataa

SEQ ID NO: 954272 - DNA, 15 bp, Homo sapiens
cattgtgtacataag

SEQ ID NO: 954273 - DNA, 15 bp, Homo sapiens
attgtgtacataagc

SEQ ID NO: 954274 - DNA, 15 bp, Homo sapiens
ttgtgtacataagct

SEQ ID NO: 954275 - DNA, 15 bp, Homo sapiens
tgtgtacataagctc

SEQ ID NO: 954276 - DNA, 15 bp, Homo sapiens
gtgtacataagctca

SEQ ID NO: 954277 - DNA, 15 bp, Homo sapiens
tgtacataagctcat

SEQ ID NO: 954278 - DNA, 15 bp, Homo sapiens
gtacataagctcata

SEQ ID NO: 954279 - DNA, 15 bp, Homo sapiens
tacataagctcataa

SEQ ID NO: 954280 - DNA, 15 bp, Homo sapiens
acataagctcataac

SEQ ID NO: 954281 - DNA, 15 bp, Homo sapiens
cataagctcataacc

SEQ ID NO: 954282 - DNA, 15 bp, Homo sapiens
ataagctcataacca

SEQ ID NO: 954283 - DNA, 15 bp, Homo sapiens
taagctcataaccac

SEQ ID NO: 954284 - DNA, 15 bp, Homo sapiens
aagctcataaccaca

SEQ ID NO: 954285 - DNA, 15 bp, Homo sapiens
agctcataaccacac

SEQ ID NO: 954286 - DNA, 15 bp, Homo sapiens
gctcataaccacacc

SEQ ID NO: 954287 - DNA, 15 bp, Homo sapiens
ctcataaccacacca

SEQ ID NO: 954288 - DNA, 15 bp, Homo sapiens
tcataaccacaccaa

SEQ ID NO: 954289 - DNA, 15 bp, Homo sapiens
cataaccacaccaaa

SEQ ID NO: 954290 - DNA, 15 bp, Homo sapiens
ataaccacaccaaaa

SEQ ID NO: 954291 - DNA, 15 bp, Homo sapiens
taaccacaccaaaat

SEQ ID NO: 954292 - DNA, 15 bp, Homo sapiens
aaccacaccaaaatg

SEQ ID NO: 954293 - DNA, 15 bp, Homo sapiens
accacaccaaaatgt

SEQ ID NO: 954294 - DNA, 15 bp, Homo sapiens
ccacaccaaaatgta

SEQ ID NO: 954295 - DNA, 15 bp, Homo sapiens
cacaccaaaatgtag

SEQ ID NO: 954296 - DNA, 15 bp, Homo sapiens
acaccaaaatgtaga

SEQ ID NO: 954297 - DNA, 15 bp, Homo sapiens
caccaaaatgtagaa

SEQ ID NO: 954298 - DNA, 15 bp, Homo sapiens
accaaaatgtagaat

SEQ ID NO: 954299 - DNA, 15 bp, Homo sapiens
ccaaaatgtagaatg

SEQ ID NO: 954300 - DNA, 15 bp, Homo sapiens
caaaatgtagaatga

SEQ ID NO: 954301 - DNA, 15 bp, Homo sapiens
aaaatgtagaatgaa

SEQ ID NO: 954302 - DNA, 15 bp, Homo sapiens
aaatgtagaatgaaa

SEQ ID NO: 954303 - DNA, 15 bp, Homo sapiens
aatgtagaatgaaat

SEQ ID NO: 954304 - DNA, 15 bp, Homo sapiens
atgtagaatgaaatt

SEQ ID NO: 954305 - DNA, 15 bp, Homo sapiens
tgtagaatgaaattt

SEQ ID NO: 954306 - DNA, 15 bp, Homo sapiens
gtagaatgaaatttt

SEQ ID NO: 954307 - DNA, 15 bp, Homo sapiens
tagaatgaaattttc

SEQ ID NO: 954308 - DNA, 15 bp, Homo sapiens
agaatgaaattttct

SEQ ID NO: 954309 - DNA, 15 bp, Homo sapiens
gaatgaaattttcta

SEQ ID NO: 954310 - DNA, 15 bp, Homo sapiens
aatgaaattttctaa

SEQ ID NO: 954311 - DNA, 15 bp, Homo sapiens
atgaaattttctaat

SEQ ID NO: 954312 - DNA, 15 bp, Homo sapiens
tgaaattttctaata

SEQ ID NO: 954313 - DNA, 15 bp, Homo sapiens
gaaattttctaataa

SEQ ID NO: 954314 - DNA, 15 bp, Homo sapiens
aaattttctaataag

SEQ ID NO: 954315 - DNA, 15 bp, Homo sapiens
aattttctaataagt

SEQ ID NO: 954316 - DNA, 15 bp, Homo sapiens
attttctaataagtg

SEQ ID NO: 954317 - DNA, 15 bp, Homo sapiens
ttttctaataagtga

SEQ ID NO: 954318 - DNA, 15 bp, Homo sapiens
tttctaataagtgaa

SEQ ID NO: 954319 - DNA, 15 bp, Homo sapiens
ttctaataagtgaag

SEQ ID NO: 954320 - DNA, 15 bp, Homo sapiens
tctaataagtgaaga

SEQ ID NO: 954321 - DNA, 15 bp, Homo sapiens
ctaataagtgaagaa

SEQ ID NO: 954322 - DNA, 15 bp, Homo sapiens
taataagtgaagaac

SEQ ID NO: 954323 - DNA, 15 bp, Homo sapiens
aataagtgaagaaca

SEQ ID NO: 954324 - DNA, 15 bp, Homo sapiens
ataagtgaagaacat

SEQ ID NO: 954325 - DNA, 15 bp, Homo sapiens
taagtgaagaacatt

SEQ ID NO: 954326 - DNA, 15 bp, Homo sapiens
aagtgaagaacattt

SEQ ID NO: 954327 - DNA, 15 bp, Homo sapiens
agtgaagaacatttt

SEQ ID NO: 954328 - DNA, 15 bp, Homo sapiens
gtgaagaacattttt

SEQ ID NO: 954329 - DNA, 15 bp, Homo sapiens
tgaagaacatttttt

SEQ ID NO: 954330 - DNA, 15 bp, Homo sapiens
gaagaacattttttt

SEQ ID NO: 954331 - DNA, 15 bp, Homo sapiens
aagaacatttttttt

SEQ ID NO: 954332 - DNA, 15 bp, Homo sapiens
agaacattttttttt

SEQ ID NO: 954333 - DNA, 15 bp, Homo sapiens
gaacatttttttttt

SEQ ID NO: 954334 - DNA, 15 bp, Homo sapiens
aacattttttttttt

SEQ ID NO: 954335 - DNA, 15 bp, Homo sapiens
acatttttttttttt

SEQ ID NO: 954336 - DNA, 15 bp, Homo sapiens
cattttttttttttc

SEQ ID NO: 954337 - DNA, 15 bp, Homo sapiens
attttttttttttca

SEQ ID NO: 954338 - DNA, 15 bp, Homo sapiens
ttttttttttttcaa

SEQ ID NO: 954339 - DNA, 15 bp, Homo sapiens
tttttttttttcaaa

SEQ ID NO: 954340 - DNA, 15 bp, Homo sapiens
ttttttttttcaaat

SEQ ID NO: 954341 - DNA, 15 bp, Homo sapiens
tttttttttcaaatt

SEQ ID NO: 954342 - DNA, 15 bp, Homo sapiens
ttttttttcaaattg

SEQ ID NO: 954343 - DNA, 15 bp, Homo sapiens
tttttttcaaattga

SEQ ID NO: 954344 - DNA, 15 bp, Homo sapiens
ttttttcaaattgaa

SEQ ID NO: 954345 - DNA, 15 bp, Homo sapiens
tttttcaaattgaag

SEQ ID NO: 954346 - DNA, 15 bp, Homo sapiens
ttttcaaattgaagc

SEQ ID NO: 954347 - DNA, 15 bp, Homo sapiens
tttcaaattgaagca

SEQ ID NO: 954348 - DNA, 15 bp, Homo sapiens
ttcaaattgaagcat

SEQ ID NO: 954349 - DNA, 15 bp, Homo sapiens
tcaaattgaagcatt

SEQ ID NO: 954350 - DNA, 15 bp, Homo sapiens
caaattgaagcattc

SEQ ID NO: 954351 - DNA, 15 bp, Homo sapiens
aaattgaagcattca

SEQ ID NO: 954352 - DNA, 15 bp, Homo sapiens
aattgaagcattcag

SEQ ID NO: 954353 - DNA, 15 bp, Homo sapiens
attgaagcattcaga

SEQ ID NO: 954354 - DNA, 15 bp, Homo sapiens
ttgaagcattcagag

SEQ ID NO: 954355 - DNA, 15 bp, Homo sapiens
tgaagcattcagaga

SEQ ID NO: 954356 - DNA, 15 bp, Homo sapiens
gaagcattcagagag

SEQ ID NO: 954357 - DNA, 15 bp, Homo sapiens
aagcattcagagaga

SEQ ID NO: 954358 - DNA, 15 bp, Homo sapiens
agcattcagagagaa

SEQ ID NO: 954359 - DNA, 15 bp, Homo sapiens
gcattcagagagaag

SEQ ID NO: 954360 - DNA, 15 bp, Homo sapiens
cattcagagagaaga

SEQ ID NO: 954361 - DNA, 15 bp, Homo sapiens
attcagagagaagaa

SEQ ID NO: 954362 - DNA, 15 bp, Homo sapiens
ttcagagagaagaat

SEQ ID NO: 954363 - DNA, 15 bp, Homo sapiens
tcagagagaagaatc

SEQ ID NO: 954364 - DNA, 15 bp, Homo sapiens
cagagagaagaatcg

SEQ ID NO: 954365 - DNA, 15 bp, Homo sapiens
agagagaagaatcga

SEQ ID NO: 954366 - DNA, 15 bp, Homo sapiens
gagagaagaatcgac

SEQ ID NO: 954367 - DNA, 15 bp, Homo sapiens
agagaagaatcgacc

SEQ ID NO: 954368 - DNA, 15 bp, Homo sapiens
gagaagaatcgacct

SEQ ID NO: 954369 - DNA, 15 bp, Homo sapiens
agaagaatcgacctg

SEQ ID NO: 954370 - DNA, 15 bp, Homo sapiens
gaagaatcgacctgc

SEQ ID NO: 954371 - DNA, 15 bp, Homo sapiens
aagaatcgacctgca

SEQ ID NO: 954372 - DNA, 15 bp, Homo sapiens
agaatcgacctgcac

SEQ ID NO: 954373 - DNA, 15 bp, Homo sapiens
gaatcgacctgcact

SEQ ID NO: 954374 - DNA, 15 bp, Homo sapiens
aatcgacctgcactg

SEQ ID NO: 954375 - DNA, 15 bp, Homo sapiens
atcgacctgcactgc

SEQ ID NO: 954376 - DNA, 15 bp, Homo sapiens
tcgacctgcactgcc

SEQ ID NO: 954377 - DNA, 15 bp, Homo sapiens
cgacctgcactgcca

SEQ ID NO: 954378 - DNA, 15 bp, Homo sapiens
gacctgcactgccat

SEQ ID NO: 954379 - DNA, 15 bp, Homo sapiens
acctgcactgccatc

SEQ ID NO: 954380 - DNA, 15 bp, Homo sapiens
cctgcactgccatcc

SEQ ID NO: 954381 - DNA, 15 bp, Homo sapiens
ctgcactgccatcca

SEQ ID NO: 954382 - DNA, 15 bp, Homo sapiens
tgcactgccatccac

SEQ ID NO: 954383 - DNA, 15 bp, Homo sapiens
gcactgccatccaca

SEQ ID NO: 954384 - DNA, 15 bp, Homo sapiens
cactgccatccacac

SEQ ID NO: 954385 - DNA, 15 bp, Homo sapiens
actgccatccacaca

SEQ ID NO: 954386 - DNA, 15 bp, Homo sapiens
ctgccatccacacag

SEQ ID NO: 954387 - DNA, 15 bp, Homo sapiens
tgccatccacacaga

SEQ ID NO: 954388 - DNA, 15 bp, Homo sapiens
gccatccacacagat

SEQ ID NO: 954389 - DNA, 15 bp, Homo sapiens
ccatccacacagata

SEQ ID NO: 954390 - DNA, 15 bp, Homo sapiens
catccacacagatat

SEQ ID NO: 954391 - DNA, 15 bp, Homo sapiens
atccacacagatatc

SEQ ID NO: 954392 - DNA, 15 bp, Homo sapiens
tccacacagatatca

SEQ ID NO: 954393 - DNA, 15 bp, Homo sapiens
ccacacagatatcat

SEQ ID NO: 954394 - DNA, 15 bp, Homo sapiens
cacacagatatcatg

SEQ ID NO: 954395 - DNA, 15 bp, Homo sapiens
acacagatatcatgg

SEQ ID NO: 954396 - DNA, 15 bp, Homo sapiens
cacagatatcatgga

SEQ ID NO: 954397 - DNA, 15 bp, Homo sapiens
acagatatcatggac

SEQ ID NO: 954398 - DNA, 15 bp, Homo sapiens
cagatatcatggacg

SEQ ID NO: 954399 - DNA, 15 bp, Homo sapiens
agatatcatggacga

SEQ ID NO: 954400 - DNA, 15 bp, Homo sapiens
gatatcatggacgac

SEQ ID NO: 954401 - DNA, 15 bp, Homo sapiens
atatcatggacgact

SEQ ID NO: 954402 - DNA, 15 bp, Homo sapiens
tatcatggacgactg

SEQ ID NO: 954403 - DNA, 15 bp, Homo sapiens
atcatggacgactgg

SEQ ID NO: 954404 - DNA, 15 bp, Homo sapiens
tcatggacgactggc

SEQ ID NO: 954405 - DNA, 15 bp, Homo sapiens
catggacgactggct

SEQ ID NO: 954406 - DNA, 15 bp, Homo sapiens
atggacgactggctg

SEQ ID NO: 954407 - DNA, 15 bp, Homo sapiens
tggacgactggctgg

SEQ ID NO: 954408 - DNA, 15 bp, Homo sapiens
ggacgactggctgga

SEQ ID NO: 954409 - DNA, 15 bp, Homo sapiens
gacgactggctggac

SEQ ID NO: 954410 - DNA, 15 bp, Homo sapiens
acgactggctggact

SEQ ID NO: 954411 - DNA, 15 bp, Homo sapiens
cgactggctggactg

SEQ ID NO: 954412 - DNA, 15 bp, Homo sapiens
gactggctggactgt

SEQ ID NO: 954413 - DNA, 15 bp, Homo sapiens
actggctggactgtg

SEQ ID NO: 954414 - DNA, 15 bp, Homo sapiens
ctggctggactgtgc

SEQ ID NO: 954415 - DNA, 15 bp, Homo sapiens
tggctggactgtgcc

SEQ ID NO: 954416 - DNA, 15 bp, Homo sapiens
ggctggactgtgcct

SEQ ID NO: 954417 - DNA, 15 bp, Homo sapiens
gctggactgtgcctt

SEQ ID NO: 954418 - DNA, 15 bp, Homo sapiens
ctggactgtgccttc

SEQ ID NO: 954419 - DNA, 15 bp, Homo sapiens
tggactgtgccttca

SEQ ID NO: 954420 - DNA, 15 bp, Homo sapiens
ggactgtgccttcac

SEQ ID NO: 954421 - DNA, 15 bp, Homo sapiens
gactgtgccttcacc

SEQ ID NO: 954422 - DNA, 15 bp, Homo sapiens
actgtgccttcacct

SEQ ID NO: 954423 - DNA, 15 bp, Homo sapiens
ctgtgccttcacctg

SEQ ID NO: 954424 - DNA, 15 bp, Homo sapiens
tgtgccttcacctgt

SEQ ID NO: 954425 - DNA, 15 bp, Homo sapiens
gtgccttcacctgtg

SEQ ID NO: 954426 - DNA, 15 bp, Homo sapiens
tgccttcacctgtgg

SEQ ID NO: 954427 - DNA, 15 bp, Homo sapiens
gccttcacctgtggt

SEQ ID NO: 954428 - DNA, 15 bp, Homo sapiens
ccttcacctgtggtg

SEQ ID NO: 954429 - DNA, 15 bp, Homo sapiens
cttcacctgtggtgt

SEQ ID NO: 954430 - DNA, 15 bp, Homo sapiens
ttcacctgtggtgtg

SEQ ID NO: 954431 - DNA, 15 bp, Homo sapiens
tcacctgtggtgtgc

SEQ ID NO: 954432 - DNA, 15 bp, Homo sapiens
cacctgtggtgtgca

SEQ ID NO: 954433 - DNA, 15 bp, Homo sapiens
acctgtggtgtgcac

SEQ ID NO: 954434 - DNA, 15 bp, Homo sapiens
cctgtggtgtgcact

SEQ ID NO: 954435 - DNA, 15 bp, Homo sapiens
ctgtggtgtgcactg

SEQ ID NO: 954436 - DNA, 15 bp, Homo sapiens
tgtggtgtgcactgc

SEQ ID NO: 954437 - DNA, 15 bp, Homo sapiens
gtggtgtgcactgcc

SEQ ID NO: 954438 - DNA, 15 bp, Homo sapiens
tggtgtgcactgcca

SEQ ID NO: 954439 - DNA, 15 bp, Homo sapiens
ggtgtgcactgccac

SEQ ID NO: 954440 - DNA, 15 bp, Homo sapiens
gtgtgcactgccacg

SEQ ID NO: 954441 - DNA, 15 bp, Homo sapiens
tgtgcactgccacgg

SEQ ID NO: 954442 - DNA, 15 bp, Homo sapiens
gtgcactgccacggt

SEQ ID NO: 954443 - DNA, 15 bp, Homo sapiens
tgcactgccacggtc

SEQ ID NO: 954444 - DNA, 15 bp, Homo sapiens
gcactgccacggtca

SEQ ID NO: 954445 - DNA, 15 bp, Homo sapiens
cactgccacggtcag

SEQ ID NO: 954446 - DNA, 15 bp, Homo sapiens
actgccacggtcagg

SEQ ID NO: 954447 - DNA, 15 bp, Homo sapiens
ctgccacggtcaggg

SEQ ID NO: 954448 - DNA, 15 bp, Homo sapiens
tgccacggtcagggg

SEQ ID NO: 954449 - DNA, 15 bp, Homo sapiens
gccacggtcagggga

SEQ ID NO: 954450 - DNA, 15 bp, Homo sapiens
ccacggtcaggggaa

SEQ ID NO: 954451 - DNA, 15 bp, Homo sapiens
cacggtcaggggaag

SEQ ID NO: 954452 - DNA, 15 bp, Homo sapiens
acggtcaggggaagt

SEQ ID NO: 954453 - DNA, 15 bp, Homo sapiens
cggtcaggggaagta

SEQ ID NO: 954454 - DNA, 15 bp, Homo sapiens
ggtcaggggaagtac

SEQ ID NO: 954455 - DNA, 15 bp, Homo sapiens
gtcaggggaagtacc

SEQ ID NO: 954456 - DNA, 15 bp, Homo sapiens
tcaggggaagtaccc

SEQ ID NO: 954457 - DNA, 15 bp, Homo sapiens
caggggaagtacccg

SEQ ID NO: 954458 - DNA, 15 bp, Homo sapiens
aggggaagtacccgt

SEQ ID NO: 954459 - DNA, 15 bp, Homo sapiens
ggggaagtacccgtg

SEQ ID NO: 954460 - DNA, 15 bp, Homo sapiens
gggaagtacccgtgt

SEQ ID NO: 954461 - DNA, 15 bp, Homo sapiens
ggaagtacccgtgtc

SEQ ID NO: 954462 - DNA, 15 bp, Homo sapiens
gaagtacccgtgtct

SEQ ID NO: 954463 - DNA, 15 bp, Homo sapiens
aagtacccgtgtctt

SEQ ID NO: 954464 - DNA, 15 bp, Homo sapiens
agtacccgtgtcttc

SEQ ID NO: 954465 - DNA, 15 bp, Homo sapiens
gtacccgtgtcttca

SEQ ID NO: 954466 - DNA, 15 bp, Homo sapiens
tacccgtgtcttcag

SEQ ID NO: 954467 - DNA, 15 bp, Homo sapiens
acccgtgtcttcagg

SEQ ID NO: 954468 - DNA, 15 bp, Homo sapiens
cccgtgtcttcaggt

SEQ ID NO: 954469 - DNA, 15 bp, Homo sapiens
ccgtgtcttcaggtg

SEQ ID NO: 954470 - DNA, 15 bp, Homo sapiens
cgtgtcttcaggtgt

SEQ ID NO: 954471 - DNA, 15 bp, Homo sapiens
gtgtcttcaggtgtt

SEQ ID NO: 954472 - DNA, 15 bp, Homo sapiens
tgtcttcaggtgttt

SEQ ID NO: 954473 - DNA, 15 bp, Homo sapiens
gtcttcaggtgtttg

SEQ ID NO: 954474 - DNA, 15 bp, Homo sapiens
tcttcaggtgtttgt

SEQ ID NO: 954475 - DNA, 15 bp, Homo sapiens
cttcaggtgtttgtg

SEQ ID NO: 954476 - DNA, 15 bp, Homo sapiens
ttcaggtgtttgtga

SEQ ID NO: 954477 - DNA, 15 bp, Homo sapiens
tcaggtgtttgtgaa

SEQ ID NO: 954478 - DNA, 15 bp, Homo sapiens
caggtgtttgtgaac

SEQ ID NO: 954479 - DNA, 15 bp, Homo sapiens
aggtgtttgtgaacc

SEQ ID NO: 954480 - DNA, 15 bp, Homo sapiens
ggtgtttgtgaacct

SEQ ID NO: 954481 - DNA, 15 bp, Homo sapiens
gtgtttgtgaacctc

SEQ ID NO: 954482 - DNA, 15 bp, Homo sapiens
tgtttgtgaacctca

SEQ ID NO: 954483 - DNA, 15 bp, Homo sapiens
gtttgtgaacctcag

SEQ ID NO: 954484 - DNA, 15 bp, Homo sapiens
tttgtgaacctcagc

SEQ ID NO: 954485 - DNA, 15 bp, Homo sapiens
ttgtgaacctcagcc

SEQ ID NO: 954486 - DNA, 15 bp, Homo sapiens
tgtgaacctcagcca

SEQ ID NO: 954487 - DNA, 15 bp, Homo sapiens
gtgaacctcagccat

SEQ ID NO: 954488 - DNA, 15 bp, Homo sapiens
tgaacctcagccatc

SEQ ID NO: 954489 - DNA, 15 bp, Homo sapiens
gaacctcagccatcc

SEQ ID NO: 954490 - DNA, 15 bp, Homo sapiens
aacctcagccatcca

SEQ ID NO: 954491 - DNA, 15 bp, Homo sapiens
acctcagccatccag

SEQ ID NO: 954492 - DNA, 15 bp, Homo sapiens
cctcagccatccagg

SEQ ID NO: 954493 - DNA, 15 bp, Homo sapiens
ctcagccatccaggt

SEQ ID NO: 954494 - DNA, 15 bp, Homo sapiens
tcagccatccaggtc

SEQ ID NO: 954495 - DNA, 15 bp, Homo sapiens
cagccatccaggtca

SEQ ID NO: 954496 - DNA, 15 bp, Homo sapiens
agccatccaggtcag

SEQ ID NO: 954497 - DNA, 15 bp, Homo sapiens
gccatccaggtcaga

SEQ ID NO: 954498 - DNA, 15 bp, Homo sapiens
ccatccaggtcagaa

SEQ ID NO: 954499 - DNA, 15 bp, Homo sapiens
catccaggtcagaaa

SEQ ID NO: 954500 - DNA, 15 bp, Homo sapiens
atccaggtcagaaag

SEQ ID NO: 954501 - DNA, 15 bp, Homo sapiens
tccaggtcagaaagc

SEQ ID NO: 954502 - DNA, 15 bp, Homo sapiens
ccaggtcagaaagct

SEQ ID NO: 954503 - DNA, 15 bp, Homo sapiens
caggtcagaaagctc

SEQ ID NO: 954504 - DNA, 15 bp, Homo sapiens
aggtcagaaagctct

SEQ ID NO: 954505 - DNA, 15 bp, Homo sapiens
ggtcagaaagctctc

SEQ ID NO: 954506 - DNA, 15 bp, Homo sapiens
gtcagaaagctctcc

SEQ ID NO: 954507 - DNA, 15 bp, Homo sapiens
tcagaaagctctcct

SEQ ID NO: 954508 - DNA, 15 bp, Homo sapiens
cagaaagctctccta

SEQ ID NO: 954509 - DNA, 15 bp, Homo sapiens
agaaagctctcctac

SEQ ID NO: 954510 - DNA, 15 bp, Homo sapiens
gaaagctctcctaca

SEQ ID NO: 954511 - DNA, 15 bp, Homo sapiens
aaagctctcctacat

SEQ ID NO: 954512 - DNA, 15 bp, Homo sapiens
aagctctcctacatt

SEQ ID NO: 954513 - DNA, 15 bp, Homo sapiens
agctctcctacatta

SEQ ID NO: 954514 - DNA, 15 bp, Homo sapiens
gctctcctacattat

SEQ ID NO: 954515 - DNA, 15 bp, Homo sapiens
ctctcctacattata

SEQ ID NO: 954516 - DNA, 15 bp, Homo sapiens
tctcctacattataa

SEQ ID NO: 954517 - DNA, 15 bp, Homo sapiens
ctcctacattataat

SEQ ID NO: 954518 - DNA, 15 bp, Homo sapiens
tcctacattataatg

SEQ ID NO: 954519 - DNA, 15 bp, Homo sapiens
cctacattataatga

SEQ ID NO: 954520 - DNA, 15 bp, Homo sapiens
ctacattataatgaa

SEQ ID NO: 954521 - DNA, 15 bp, Homo sapiens
tacattataatgaag

SEQ ID NO: 954522 - DNA, 15 bp, Homo sapiens
acattataatgaaga

SEQ ID NO: 954523 - DNA, 15 bp, Homo sapiens
cattataatgaagag

SEQ ID NO: 954524 - DNA, 15 bp, Homo sapiens
attataatgaagagg

SEQ ID NO: 954525 - DNA, 15 bp, Homo sapiens
ttataatgaagaggc

SEQ ID NO: 954526 - DNA, 15 bp, Homo sapiens
tataatgaagaggct

SEQ ID NO: 954527 - DNA, 15 bp, Homo sapiens
ataatgaagaggctg

SEQ ID NO: 954528 - DNA, 15 bp, Homo sapiens
taatgaagaggctgt

SEQ ID NO: 954529 - DNA, 15 bp, Homo sapiens
aatgaagaggctgtc

SEQ ID NO: 954530 - DNA, 15 bp, Homo sapiens
atgaagaggctgtcc

SEQ ID NO: 954531 - DNA, 15 bp, Homo sapiens
tgaagaggctgtcca

SEQ ID NO: 954532 - DNA, 15 bp, Homo sapiens
gaagaggctgtccag

SEQ ID NO: 954533 - DNA, 15 bp, Homo sapiens
aagaggctgtccaga

SEQ ID NO: 954534 - DNA, 15 bp, Homo sapiens
agaggctgtccagat

SEQ ID NO: 954535 - DNA, 15 bp, Homo sapiens
gaggctgtccagata

SEQ ID NO: 954536 - DNA, 15 bp, Homo sapiens
aggctgtccagataa

SEQ ID NO: 954537 - DNA, 15 bp, Homo sapiens
ggctgtccagataaa

SEQ ID NO: 954538 - DNA, 15 bp, Homo sapiens
gctgtccagataaat

SEQ ID NO: 954539 - DNA, 15 bp, Homo sapiens
ctgtccagataaatc

SEQ ID NO: 954540 - DNA, 15 bp, Homo sapiens
tgtccagataaatcc

SEQ ID NO: 954541 - DNA, 15 bp, Homo sapiens
gtccagataaatccc

SEQ ID NO: 954542 - DNA, 15 bp, Homo sapiens
tccagataaatccca

SEQ ID NO: 954543 - DNA, 15 bp, Homo sapiens
ccagataaatcccaa

SEQ ID NO: 954544 - DNA, 15 bp, Homo sapiens
cagataaatcccaag

SEQ ID NO: 954545 - DNA, 15 bp, Homo sapiens
agataaatcccaagg

SEQ ID NO: 954546 - DNA, 15 bp, Homo sapiens
gataaatcccaaggt

SEQ ID NO: 954547 - DNA, 15 bp, Homo sapiens
ataaatcccaaggta

SEQ ID NO: 954548 - DNA, 15 bp, Homo sapiens
taaatcccaaggtat

SEQ ID NO: 954549 - DNA, 15 bp, Homo sapiens
aaatcccaaggtatt

SEQ ID NO: 954550 - DNA, 15 bp, Homo sapiens
aatcccaaggtattg

SEQ ID NO: 954551 - DNA, 15 bp, Homo sapiens
atcccaaggtattgt

SEQ ID NO: 954552 - DNA, 15 bp, Homo sapiens
tcccaaggtattgta

SEQ ID NO: 954553 - DNA, 15 bp, Homo sapiens
cccaaggtattgtaa

SEQ ID NO: 954554 - DNA, 15 bp, Homo sapiens
ccaaggtattgtaaa

SEQ ID NO: 954555 - DNA, 15 bp, Homo sapiens
caaggtattgtaaag

SEQ ID NO: 954556 - DNA, 15 bp, Homo sapiens
aaggtattgtaaagt

SEQ ID NO: 954557 - DNA, 15 bp, Homo sapiens
aggtattgtaaagtt

SEQ ID NO: 954558 - DNA, 15 bp, Homo sapiens
ggtattgtaaagttt

SEQ ID NO: 954559 - DNA, 15 bp, Homo sapiens
gtattgtaaagttta

SEQ ID NO: 954560 - DNA, 15 bp, Homo sapiens
tattgtaaagtttaa

SEQ ID NO: 954561 - DNA, 15 bp, Homo sapiens
attgtaaagtttaaa

SEQ ID NO: 954562 - DNA, 15 bp, Homo sapiens
ttgtaaagtttaaag

SEQ ID NO: 954563 - DNA, 15 bp, Homo sapiens
tgtaaagtttaaaga

SEQ ID NO: 954564 - DNA, 15 bp, Homo sapiens
gtaaagtttaaagag

SEQ ID NO: 954565 - DNA, 15 bp, Homo sapiens
taaagtttaaagagt

SEQ ID NO: 954566 - DNA, 15 bp, Homo sapiens
aaagtttaaagagtt

SEQ ID NO: 954567 - DNA, 15 bp, Homo sapiens
aagtttaaagagttc

SEQ ID NO: 954568 - DNA, 15 bp, Homo sapiens
agtttaaagagttct

SEQ ID NO: 954569 - DNA, 15 bp, Homo sapiens
gtttaaagagttctt

SEQ ID NO: 954570 - DNA, 15 bp, Homo sapiens
tttaaagagttctta

SEQ ID NO: 954571 - DNA, 15 bp, Homo sapiens
ttaaagagttcttat

SEQ ID NO: 954572 - DNA, 15 bp, Homo sapiens
taaagagttcttatg

SEQ ID NO: 954573 - DNA, 15 bp, Homo sapiens
aaagagttcttatga

SEQ ID NO: 954574 - DNA, 15 bp, Homo sapiens
aagagttcttatgac

SEQ ID NO: 954575 - DNA, 15 bp, Homo sapiens
agagttcttatgaca

SEQ ID NO: 954576 - DNA, 15 bp, Homo sapiens
gagttcttatgacag

SEQ ID NO: 954577 - DNA, 15 bp, Homo sapiens
agttcttatgacagc

SEQ ID NO: 954578 - DNA, 15 bp, Homo sapiens
gttcttatgacagca

SEQ ID NO: 954579 - DNA, 15 bp, Homo sapiens
ttcttatgacagcaa

SEQ ID NO: 954580 - DNA, 15 bp, Homo sapiens
tcttatgacagcaac

SEQ ID NO: 954581 - DNA, 15 bp, Homo sapiens
cttatgacagcaacc

SEQ ID NO: 954582 - DNA, 15 bp, Homo sapiens
ttatgacagcaaccc

SEQ ID NO: 954583 - DNA, 15 bp, Homo sapiens
tatgacagcaaccct

SEQ ID NO: 954584 - DNA, 15 bp, Homo sapiens
atgacagcaaccctt

SEQ ID NO: 954585 - DNA, 15 bp, Homo sapiens
tgacagcaacccttc

SEQ ID NO: 954586 - DNA, 15 bp, Homo sapiens
gacagcaacccttcc

SEQ ID NO: 954587 - DNA, 15 bp, Homo sapiens
acagcaacccttccc

SEQ ID NO: 954588 - DNA, 15 bp, Homo sapiens
cagcaacccttccct

SEQ ID NO: 954589 - DNA, 15 bp, Homo sapiens
agcaacccttccctg

SEQ ID NO: 954590 - DNA, 15 bp, Homo sapiens
gcaacccttccctgc

SEQ ID NO: 954591 - DNA, 15 bp, Homo sapiens
caacccttccctgcc

SEQ ID NO: 954592 - DNA, 15 bp, Homo sapiens
aacccttccctgcca

SEQ ID NO: 954593 - DNA, 15 bp, Homo sapiens
acccttccctgccag

SEQ ID NO: 954594 - DNA, 15 bp, Homo sapiens
cccttccctgccaga

SEQ ID NO: 954595 - DNA, 15 bp, Homo sapiens
ccttccctgccagac

SEQ ID NO: 954596 - DNA, 15 bp, Homo sapiens
cttccctgccagact

SEQ ID NO: 954597 - DNA, 15 bp, Homo sapiens
ttccctgccagactg

SEQ ID NO: 954598 - DNA, 15 bp, Homo sapiens
tccctgccagactgt

SEQ ID NO: 954599 - DNA, 15 bp, Homo sapiens
ccctgccagactgtc

SEQ ID NO: 954600 - DNA, 15 bp, Homo sapiens
cctgccagactgtcc

SEQ ID NO: 954601 - DNA, 15 bp, Homo sapiens
ctgccagactgtccc

SEQ ID NO: 954602 - DNA, 15 bp, Homo sapiens
tgccagactgtccct

SEQ ID NO: 954603 - DNA, 15 bp, Homo sapiens
gccagactgtcccta

SEQ ID NO: 954604 - DNA, 15 bp, Homo sapiens
ccagactgtccctag

SEQ ID NO: 954605 - DNA, 15 bp, Homo sapiens
cagactgtccctagc

SEQ ID NO: 954606 - DNA, 15 bp, Homo sapiens
agactgtccctagca

SEQ ID NO: 954607 - DNA, 15 bp, Homo sapiens
gactgtccctagcag

SEQ ID NO: 954608 - DNA, 15 bp, Homo sapiens
actgtccctagcagg

SEQ ID NO: 954609 - DNA, 15 bp, Homo sapiens
ctgtccctagcaggg

SEQ ID NO: 954610 - DNA, 15 bp, Homo sapiens
tgtccctagcagggt

SEQ ID NO: 954611 - DNA, 15 bp, Homo sapiens
gtccctagcagggta

SEQ ID NO: 954612 - DNA, 15 bp, Homo sapiens
tccctagcagggtac

SEQ ID NO: 954613 - DNA, 15 bp, Homo sapiens
ccctagcagggtaca

SEQ ID NO: 954614 - DNA, 15 bp, Homo sapiens
cctagcagggtacat

SEQ ID NO: 954615 - DNA, 15 bp, Homo sapiens
ctagcagggtacata

SEQ ID NO: 954616 - DNA, 15 bp, Homo sapiens
tagcagggtacataa

SEQ ID NO: 954617 - DNA, 15 bp, Homo sapiens
agcagggtacataaa

SEQ ID NO: 954618 - DNA, 15 bp, Homo sapiens
gcagggtacataaat

SEQ ID NO: 954619 - DNA, 15 bp, Homo sapiens
cagggtacataaata

SEQ ID NO: 954620 - DNA, 15 bp, Homo sapiens
agggtacataaataa

SEQ ID NO: 954621 - DNA, 15 bp, Homo sapiens
gggtacataaataac

SEQ ID NO: 954622 - DNA, 15 bp, Homo sapiens
ggtacataaataacc

SEQ ID NO: 954623 - DNA, 15 bp, Homo sapiens
gtacataaataaccc

SEQ ID NO: 954624 - DNA, 15 bp, Homo sapiens
tacataaataaccca

SEQ ID NO: 954625 - DNA, 15 bp, Homo sapiens
acataaataacccag

SEQ ID NO: 954626 - DNA, 15 bp, Homo sapiens
cataaataacccagg

SEQ ID NO: 954627 - DNA, 15 bp, Homo sapiens
ataaataacccaggg

SEQ ID NO: 954628 - DNA, 15 bp, Homo sapiens
taaataacccagggc

SEQ ID NO: 954629 - DNA, 15 bp, Homo sapiens
aaataacccagggct

SEQ ID NO: 954630 - DNA, 15 bp, Homo sapiens
aataacccagggctg

SEQ ID NO: 954631 - DNA, 15 bp, Homo sapiens
ataacccagggctgt

SEQ ID NO: 954632 - DNA, 15 bp, Homo sapiens
taacccagggctgtc

SEQ ID NO: 954633 - DNA, 15 bp, Homo sapiens
aacccagggctgtct

SEQ ID NO: 954634 - DNA, 15 bp, Homo sapiens
acccagggctgtctt

SEQ ID NO: 954635 - DNA, 15 bp, Homo sapiens
cccagggctgtcttt

SEQ ID NO: 954636 - DNA, 15 bp, Homo sapiens
ccagggctgtcttta

SEQ ID NO: 954637 - DNA, 15 bp, Homo sapiens
cagggctgtctttag

SEQ ID NO: 954638 - DNA, 15 bp, Homo sapiens
agggctgtctttagg

SEQ ID NO: 954639 - DNA, 15 bp, Homo sapiens
gggctgtctttaggg

SEQ ID NO: 954640 - DNA, 15 bp, Homo sapiens
ggctgtctttaggga

SEQ ID NO: 954641 - DNA, 15 bp, Homo sapiens
gctgtctttagggat

SEQ ID NO: 954642 - DNA, 15 bp, Homo sapiens
ctgtctttagggata

SEQ ID NO: 954643 - DNA, 15 bp, Homo sapiens
tgtctttagggataa

SEQ ID NO: 954644 - DNA, 15 bp, Homo sapiens
gtctttagggataaa

SEQ ID NO: 954645 - DNA, 15 bp, Homo sapiens
tctttagggataaat

SEQ ID NO: 954646 - DNA, 15 bp, Homo sapiens
ctttagggataaatc

SEQ ID NO: 954647 - DNA, 15 bp, Homo sapiens
tttagggataaatct

SEQ ID NO: 954648 - DNA, 15 bp, Homo sapiens
ttagggataaatcta

SEQ ID NO: 954649 - DNA, 15 bp, Homo sapiens
tagggataaatctat

SEQ ID NO: 954650 - DNA, 15 bp, Homo sapiens
agggataaatctatt

SEQ ID NO: 954651 - DNA, 15 bp, Homo sapiens
gggataaatctattt

SEQ ID NO: 954652 - DNA, 15 bp, Homo sapiens
ggataaatctatttt

SEQ ID NO: 954653 - DNA, 15 bp, Homo sapiens
gataaatctattttt

SEQ ID NO: 954654 - DNA, 15 bp, Homo sapiens
ataaatctatttttt

SEQ ID NO: 954655 - DNA, 15 bp, Homo sapiens
taaatctattttttt

SEQ ID NO: 954656 - DNA, 15 bp, Homo sapiens
aaatctatttttttg

SEQ ID NO: 954657 - DNA, 15 bp, Homo sapiens
aatctatttttttgg

SEQ ID NO: 954658 - DNA, 15 bp, Homo sapiens
atctatttttttgga

SEQ ID NO: 954659 - DNA, 15 bp, Homo sapiens
tctatttttttggag

SEQ ID NO: 954660 - DNA, 15 bp, Homo sapiens
ctatttttttggagt

SEQ ID NO: 954661 - DNA, 15 bp, Homo sapiens
tatttttttggagtg

SEQ ID NO: 954662 - DNA, 15 bp, Homo sapiens
atttttttggagtga

SEQ ID NO: 954663 - DNA, 15 bp, Homo sapiens
tttttttggagtgaa

SEQ ID NO: 954664 - DNA, 15 bp, Homo sapiens
ttttttggagtgaac

SEQ ID NO: 954665 - DNA, 15 bp, Homo sapiens
tttttggagtgaaca

SEQ ID NO: 954666 - DNA, 15 bp, Homo sapiens
ttttggagtgaacat

SEQ ID NO: 954667 - DNA, 15 bp, Homo sapiens
tttggagtgaacatt

SEQ ID NO: 954668 - DNA, 15 bp, Homo sapiens
ttggagtgaacattt

SEQ ID NO: 954669 - DNA, 15 bp, Homo sapiens
tggagtgaacatttt

SEQ ID NO: 954670 - DNA, 15 bp, Homo sapiens
ggagtgaacattttt

SEQ ID NO: 954671 - DNA, 15 bp, Homo sapiens
gagtgaacattttta

SEQ ID NO: 954672 - DNA, 15 bp, Homo sapiens
agtgaacatttttat

SEQ ID NO: 954673 - DNA, 15 bp, Homo sapiens
gtgaacatttttata

SEQ ID NO: 954674 - DNA, 15 bp, Homo sapiens
tgaacatttttatag

SEQ ID NO: 954675 - DNA, 15 bp, Homo sapiens
gaacatttttatagt

SEQ ID NO: 954676 - DNA, 15 bp, Homo sapiens
aacatttttatagtg

SEQ ID NO: 954677 - DNA, 15 bp, Homo sapiens
acatttttatagtga

SEQ ID NO: 954678 - DNA, 15 bp, Homo sapiens
catttttatagtgat

SEQ ID NO: 954679 - DNA, 15 bp, Homo sapiens
atttttatagtgatc

SEQ ID NO: 954680 - DNA, 15 bp, Homo sapiens
tttttatagtgatca

SEQ ID NO: 954681 - DNA, 15 bp, Homo sapiens
ttttatagtgatcaa

SEQ ID NO: 954682 - DNA, 15 bp, Homo sapiens
tttatagtgatcaaa

SEQ ID NO: 954683 - DNA, 15 bp, Homo sapiens
ttatagtgatcaaat

SEQ ID NO: 954684 - DNA, 15 bp, Homo sapiens
tatagtgatcaaatc

SEQ ID NO: 954685 - DNA, 15 bp, Homo sapiens
atagtgatcaaatca

SEQ ID NO: 954686 - DNA, 15 bp, Homo sapiens
tagtgatcaaatcag

SEQ ID NO: 954687 - DNA, 15 bp, Homo sapiens
agtgatcaaatcagg

SEQ ID NO: 954688 - DNA, 15 bp, Homo sapiens
gtgatcaaatcagga

SEQ ID NO: 954689 - DNA, 15 bp, Homo sapiens
tgatcaaatcaggat

SEQ ID NO: 954690 - DNA, 15 bp, Homo sapiens
gatcaaatcaggata

SEQ ID NO: 954691 - DNA, 15 bp, Homo sapiens
atcaaatcaggataa

SEQ ID NO: 954692 - DNA, 15 bp, Homo sapiens
tcaaatcaggataaa

SEQ ID NO: 954693 - DNA, 15 bp, Homo sapiens
caaatcaggataaat

SEQ ID NO: 954694 - DNA, 15 bp, Homo sapiens
aaatcaggataaatg

SEQ ID NO: 954695 - DNA, 15 bp, Homo sapiens
aatcaggataaatga

SEQ ID NO: 954696 - DNA, 15 bp, Homo sapiens
atcaggataaatgaa

SEQ ID NO: 954697 - DNA, 15 bp, Homo sapiens
tcaggataaatgaag

SEQ ID NO: 954698 - DNA, 15 bp, Homo sapiens
caggataaatgaagc

SEQ ID NO: 954699 - DNA, 15 bp, Homo sapiens
aggataaatgaagct

SEQ ID NO: 954700 - DNA, 15 bp, Homo sapiens
ggataaatgaagctt

SEQ ID NO: 954701 - DNA, 15 bp, Homo sapiens
gataaatgaagcttt

SEQ ID NO: 954702 - DNA, 15 bp, Homo sapiens
ataaatgaagctttc

SEQ ID NO: 954703 - DNA, 15 bp, Homo sapiens
taaatgaagctttct

SEQ ID NO: 954704 - DNA, 15 bp, Homo sapiens
aaatgaagctttctt

SEQ ID NO: 954705 - DNA, 15 bp, Homo sapiens
aatgaagctttcttc

SEQ ID NO: 954706 - DNA, 15 bp, Homo sapiens
atgaagctttcttct

SEQ ID NO: 954707 - DNA, 15 bp, Homo sapiens
tgaagctttcttctt

SEQ ID NO: 954708 - DNA, 15 bp, Homo sapiens
gaagctttcttcttg

SEQ ID NO: 954709 - DNA, 15 bp, Homo sapiens
aagctttcttcttgg

SEQ ID NO: 954710 - DNA, 15 bp, Homo sapiens
agctttcttcttggt

SEQ ID NO: 954711 - DNA, 15 bp, Homo sapiens
gctttcttcttggtg

SEQ ID NO: 954712 - DNA, 15 bp, Homo sapiens
ctttcttcttggtgg

SEQ ID NO: 954713 - DNA, 15 bp, Homo sapiens
tttcttcttggtgga

SEQ ID NO: 954714 - DNA, 15 bp, Homo sapiens
ttcttcttggtggag

SEQ ID NO: 954715 - DNA, 15 bp, Homo sapiens
tcttcttggtggaga

SEQ ID NO: 954716 - DNA, 15 bp, Homo sapiens
cttcttggtggagaa

SEQ ID NO: 954717 - DNA, 15 bp, Homo sapiens
ttcttggtggagaaa

SEQ ID NO: 954718 - DNA, 15 bp, Homo sapiens
tcttggtggagaaat

SEQ ID NO: 954719 - DNA, 15 bp, Homo sapiens
cttggtggagaaatg

SEQ ID NO: 954720 - DNA, 15 bp, Homo sapiens
ttggtggagaaatgg

SEQ ID NO: 954721 - DNA, 15 bp, Homo sapiens
tggtggagaaatggg

SEQ ID NO: 954722 - DNA, 15 bp, Homo sapiens
ggtggagaaatgggg

SEQ ID NO: 954723 - DNA, 15 bp, Homo sapiens
gtggagaaatggggt

SEQ ID NO: 954724 - DNA, 15 bp, Homo sapiens
tggagaaatggggta

SEQ ID NO: 954725 - DNA, 15 bp, Homo sapiens
ggagaaatggggtat

SEQ ID NO: 954726 - DNA, 15 bp, Homo sapiens
gagaaatggggtata

SEQ ID NO: 954727 - DNA, 15 bp, Homo sapiens
agaaatggggtatat

SEQ ID NO: 954728 - DNA, 15 bp, Homo sapiens
gaaatggggtatata

SEQ ID NO: 954729 - DNA, 15 bp, Homo sapiens
aaatggggtatatag

SEQ ID NO: 954730 - DNA, 15 bp, Homo sapiens
aatggggtatataga

SEQ ID NO: 954731 - DNA, 15 bp, Homo sapiens
atggggtatatagaa

SEQ ID NO: 954732 - DNA, 15 bp, Homo sapiens
tggggtatatagaaa

SEQ ID NO: 954733 - DNA, 15 bp, Homo sapiens
ggggtatatagaaag

SEQ ID NO: 954734 - DNA, 15 bp, Homo sapiens
gggtatatagaaagg

SEQ ID NO: 954735 - DNA, 15 bp, Homo sapiens
ggtatatagaaagga

SEQ ID NO: 954736 - DNA, 15 bp, Homo sapiens
gtatatagaaaggag

SEQ ID NO: 954737 - DNA, 15 bp, Homo sapiens
tatatagaaaggaga

SEQ ID NO: 954738 - DNA, 15 bp, Homo sapiens
atatagaaaggagag

SEQ ID NO: 954739 - DNA, 15 bp, Homo sapiens
tatagaaaggagaga

SEQ ID NO: 954740 - DNA, 15 bp, Homo sapiens
atagaaaggagagaa

SEQ ID NO: 954741 - DNA, 15 bp, Homo sapiens
tagaaaggagagaaa

SEQ ID NO: 954742 - DNA, 15 bp, Homo sapiens
agaaaggagagaaat

SEQ ID NO: 954743 - DNA, 15 bp, Homo sapiens
gaaaggagagaaatt

SEQ ID NO: 954744 - DNA, 15 bp, Homo sapiens
aaaggagagaaatta

SEQ ID NO: 954745 - DNA, 15 bp, Homo sapiens
aaggagagaaattat

SEQ ID NO: 954746 - DNA, 15 bp, Homo sapiens
aggagagaaattatt

SEQ ID NO: 954747 - DNA, 15 bp, Homo sapiens
ggagagaaattattc

SEQ ID NO: 954748 - DNA, 15 bp, Homo sapiens
gagagaaattattcc

SEQ ID NO: 954749 - DNA, 15 bp, Homo sapiens
agagaaattattcca

SEQ ID NO: 954750 - DNA, 15 bp, Homo sapiens
gagaaattattccaa

SEQ ID NO: 954751 - DNA, 15 bp, Homo sapiens
agaaattattccaat

SEQ ID NO: 954752 - DNA, 15 bp, Homo sapiens
gaaattattccaatt

SEQ ID NO: 954753 - DNA, 15 bp, Homo sapiens
aaattattccaattt

SEQ ID NO: 954754 - DNA, 15 bp, Homo sapiens
aattattccaatttc

SEQ ID NO: 954755 - DNA, 15 bp, Homo sapiens
attattccaatttca

SEQ ID NO: 954756 - DNA, 15 bp, Homo sapiens
ttattccaatttcac

SEQ ID NO: 954757 - DNA, 15 bp, Homo sapiens
tattccaatttcaca

SEQ ID NO: 954758 - DNA, 15 bp, Homo sapiens
attccaatttcacaa

SEQ ID NO: 954759 - DNA, 15 bp, Homo sapiens
ttccaatttcacaac

SEQ ID NO: 954760 - DNA, 15 bp, Homo sapiens
tccaatttcacaact

SEQ ID NO: 954761 - DNA, 15 bp, Homo sapiens
ccaatttcacaactt

SEQ ID NO: 954762 - DNA, 15 bp, Homo sapiens
caatttcacaacttg

SEQ ID NO: 954763 - DNA, 15 bp, Homo sapiens
aatttcacaacttgg

SEQ ID NO: 954764 - DNA, 15 bp, Homo sapiens
atttcacaacttggt

SEQ ID NO: 954765 - DNA, 15 bp, Homo sapiens
tttcacaacttggtg

SEQ ID NO: 954766 - DNA, 15 bp, Homo sapiens
ttcacaacttggtgt

SEQ ID NO: 954767 - DNA, 15 bp, Homo sapiens
tcacaacttggtgtc

SEQ ID NO: 954768 - DNA, 15 bp, Homo sapiens
cacaacttggtgtct

SEQ ID NO: 954769 - DNA, 15 bp, Homo sapiens
acaacttggtgtctg

SEQ ID NO: 954770 - DNA, 15 bp, Homo sapiens
caacttggtgtctgg

SEQ ID NO: 954771 - DNA, 15 bp, Homo sapiens
aacttggtgtctgga

SEQ ID NO: 954772 - DNA, 15 bp, Homo sapiens
acttggtgtctggaa

SEQ ID NO: 954773 - DNA, 15 bp, Homo sapiens
cttggtgtctggaat

SEQ ID NO: 954774 - DNA, 15 bp, Homo sapiens
ttggtgtctggaatt

SEQ ID NO: 954775 - DNA, 15 bp, Homo sapiens
tggtgtctggaattt

SEQ ID NO: 954776 - DNA, 15 bp, Homo sapiens
ggtgtctggaattta

SEQ ID NO: 954777 - DNA, 15 bp, Homo sapiens
gtgtctggaatttat

SEQ ID NO: 954778 - DNA, 15 bp, Homo sapiens
tgtctggaatttata

SEQ ID NO: 954779 - DNA, 15 bp, Homo sapiens
gtctggaatttatag

SEQ ID NO: 954780 - DNA, 15 bp, Homo sapiens
tctggaatttatagg

SEQ ID NO: 954781 - DNA, 15 bp, Homo sapiens
ctggaatttataggc

SEQ ID NO: 954782 - DNA, 15 bp, Homo sapiens
tggaatttataggct

SEQ ID NO: 954783 - DNA, 15 bp, Homo sapiens
ggaatttataggctg

SEQ ID NO: 954784 - DNA, 15 bp, Homo sapiens
gaatttataggctga

SEQ ID NO: 954785 - DNA, 15 bp, Homo sapiens
aatttataggctgag

SEQ ID NO: 954786 - DNA, 15 bp, Homo sapiens
atttataggctgagc

SEQ ID NO: 954787 - DNA, 15 bp, Homo sapiens
tttataggctgagcc

SEQ ID NO: 954788 - DNA, 15 bp, Homo sapiens
ttataggctgagcca

SEQ ID NO: 954789 - DNA, 15 bp, Homo sapiens
tataggctgagccaa

SEQ ID NO: 954790 - DNA, 15 bp, Homo sapiens
ataggctgagccaat

SEQ ID NO: 954791 - DNA, 15 bp, Homo sapiens
taggctgagccaatg

SEQ ID NO: 954792 - DNA, 15 bp, Homo sapiens
aggctgagccaatga

SEQ ID NO: 954793 - DNA, 15 bp, Homo sapiens
ggctgagccaatgag

SEQ ID NO: 954794 - DNA, 15 bp, Homo sapiens
gctgagccaatgagt

SEQ ID NO: 954795 - DNA, 15 bp, Homo sapiens
ctgagccaatgagta

SEQ ID NO: 954796 - DNA, 15 bp, Homo sapiens
tgagccaatgagtag

SEQ ID NO: 954797 - DNA, 15 bp, Homo sapiens
gagccaatgagtagt

SEQ ID NO: 954798 - DNA, 15 bp, Homo sapiens
agccaatgagtagtc

SEQ ID NO: 954799 - DNA, 15 bp, Homo sapiens
gccaatgagtagtca

SEQ ID NO: 954800 - DNA, 15 bp, Homo sapiens
ccaatgagtagtcat

SEQ ID NO: 954801 - DNA, 15 bp, Homo sapiens
caatgagtagtcatt

SEQ ID NO: 954802 - DNA, 15 bp, Homo sapiens
aatgagtagtcattt

SEQ ID NO: 954803 - DNA, 15 bp, Homo sapiens
atgagtagtcatttg

SEQ ID NO: 954804 - DNA, 15 bp, Homo sapiens
tgagtagtcatttgt

SEQ ID NO: 954805 - DNA, 15 bp, Homo sapiens
gagtagtcatttgtg

SEQ ID NO: 954806 - DNA, 15 bp, Homo sapiens
agtagtcatttgtgg

SEQ ID NO: 954807 - DNA, 15 bp, Homo sapiens
gtagtcatttgtggg

SEQ ID NO: 954808 - DNA, 15 bp, Homo sapiens
tagtcatttgtgggg

SEQ ID NO: 954809 - DNA, 15 bp, Homo sapiens
agtcatttgtgggga

SEQ ID NO: 954810 - DNA, 15 bp, Homo sapiens
gtcatttgtggggag

SEQ ID NO: 954811 - DNA, 15 bp, Homo sapiens
tcatttgtggggagt

SEQ ID NO: 954812 - DNA, 15 bp, Homo sapiens
catttgtggggagtc

SEQ ID NO: 954813 - DNA, 15 bp, Homo sapiens
atttgtggggagtct

SEQ ID NO: 954814 - DNA, 15 bp, Homo sapiens
tttgtggggagtctt

SEQ ID NO: 954815 - DNA, 15 bp, Homo sapiens
ttgtggggagtcttt

SEQ ID NO: 954816 - DNA, 15 bp, Homo sapiens
tgtggggagtctttc

SEQ ID NO: 954817 - DNA, 15 bp, Homo sapiens
gtggggagtctttct

SEQ ID NO: 954818 - DNA, 15 bp, Homo sapiens
tggggagtctttctt

SEQ ID NO: 954819 - DNA, 15 bp, Homo sapiens
ggggagtctttcttt

SEQ ID NO: 954820 - DNA, 15 bp, Homo sapiens
gggagtctttctttt

SEQ ID NO: 954821 - DNA, 15 bp, Homo sapiens
ggagtctttcttttg

SEQ ID NO: 954822 - DNA, 15 bp, Homo sapiens
gagtctttcttttgg

SEQ ID NO: 954823 - DNA, 15 bp, Homo sapiens
agtctttcttttgga

SEQ ID NO: 954824 - DNA, 15 bp, Homo sapiens
gtctttcttttggag

SEQ ID NO: 954825 - DNA, 15 bp, Homo sapiens
tctttcttttggaga

SEQ ID NO: 954826 - DNA, 15 bp, Homo sapiens
ctttcttttggagat

SEQ ID NO: 954827 - DNA, 15 bp, Homo sapiens
tttcttttggagatt

SEQ ID NO: 954828 - DNA, 15 bp, Homo sapiens
ttcttttggagattc

SEQ ID NO: 954829 - DNA, 15 bp, Homo sapiens
tcttttggagattcc

SEQ ID NO: 954830 - DNA, 15 bp, Homo sapiens
cttttggagattcca

SEQ ID NO: 954831 - DNA, 15 bp, Homo sapiens
ttttggagattccac

SEQ ID NO: 954832 - DNA, 15 bp, Homo sapiens
tttggagattccact

SEQ ID NO: 954833 - DNA, 15 bp, Homo sapiens
ttggagattccactc

SEQ ID NO: 954834 - DNA, 15 bp, Homo sapiens
tggagattccactcc

SEQ ID NO: 954835 - DNA, 15 bp, Homo sapiens
ggagattccactccg

SEQ ID NO: 954836 - DNA, 15 bp, Homo sapiens
gagattccactccgc

SEQ ID NO: 954837 - DNA, 15 bp, Homo sapiens
agattccactccgcg

SEQ ID NO: 954838 - DNA, 15 bp, Homo sapiens
gattccactccgcgc

SEQ ID NO: 954839 - DNA, 15 bp, Homo sapiens
attccactccgcgcc

SEQ ID NO: 954840 - DNA, 15 bp, Homo sapiens
ttccactccgcgcca

SEQ ID NO: 954841 - DNA, 15 bp, Homo sapiens
tccactccgcgccat

SEQ ID NO: 954842 - DNA, 15 bp, Homo sapiens
ccactccgcgccata

SEQ ID NO: 954843 - DNA, 15 bp, Homo sapiens
cactccgcgccatat

SEQ ID NO: 954844 - DNA, 15 bp, Homo sapiens
actccgcgccatatg

SEQ ID NO: 954845 - DNA, 15 bp, Homo sapiens
ctccgcgccatatga

SEQ ID NO: 954846 - DNA, 15 bp, Homo sapiens
tccgcgccatatgac

SEQ ID NO: 954847 - DNA, 15 bp, Homo sapiens
ccgcgccatatgaca

SEQ ID NO: 954848 - DNA, 15 bp, Homo sapiens
cgcgccatatgacat

SEQ ID NO: 954849 - DNA, 15 bp, Homo sapiens
gcgccatatgacata

SEQ ID NO: 954850 - DNA, 15 bp, Homo sapiens
cgccatatgacatat

SEQ ID NO: 954851 - DNA, 15 bp, Homo sapiens
gccatatgacatatg

SEQ ID NO: 954852 - DNA, 15 bp, Homo sapiens
ccatatgacatatgc

SEQ ID NO: 954853 - DNA, 15 bp, Homo sapiens
catatgacatatgct

SEQ ID NO: 954854 - DNA, 15 bp, Homo sapiens
atatgacatatgcta

SEQ ID NO: 954855 - DNA, 15 bp, Homo sapiens
tatgacatatgctac

SEQ ID NO: 954856 - DNA, 15 bp, Homo sapiens
atgacatatgctaca

SEQ ID NO: 954857 - DNA, 15 bp, Homo sapiens
tgacatatgctacag

SEQ ID NO: 954858 - DNA, 15 bp, Homo sapiens
gacatatgctacagt

SEQ ID NO: 954859 - DNA, 15 bp, Homo sapiens
acatatgctacagtg

SEQ ID NO: 954860 - DNA, 15 bp, Homo sapiens
catatgctacagtgt

SEQ ID NO: 954861 - DNA, 15 bp, Homo sapiens
atatgctacagtgta

SEQ ID NO: 954862 - DNA, 15 bp, Homo sapiens
tatgctacagtgtac

SEQ ID NO: 954863 - DNA, 15 bp, Homo sapiens
atgctacagtgtact

SEQ ID NO: 954864 - DNA, 15 bp, Homo sapiens
tgctacagtgtactc

SEQ ID NO: 954865 - DNA, 15 bp, Homo sapiens
gctacagtgtactca

SEQ ID NO: 954866 - DNA, 15 bp, Homo sapiens
ctacagtgtactcac

SEQ ID NO: 954867 - DNA, 15 bp, Homo sapiens
tacagtgtactcaca

SEQ ID NO: 954868 - DNA, 15 bp, Homo sapiens
acagtgtactcacag

SEQ ID NO: 954869 - DNA, 15 bp, Homo sapiens
cagtgtactcacagt

SEQ ID NO: 954870 - DNA, 15 bp, Homo sapiens
agtgtactcacagtc

SEQ ID NO: 954871 - DNA, 15 bp, Homo sapiens
gtgtactcacagtct

SEQ ID NO: 954872 - DNA, 15 bp, Homo sapiens
tgtactcacagtctc

SEQ ID NO: 954873 - DNA, 15 bp, Homo sapiens
gtactcacagtctcc

SEQ ID NO: 954874 - DNA, 15 bp, Homo sapiens
tactcacagtctccc

SEQ ID NO: 954875 - DNA, 15 bp, Homo sapiens
actcacagtctccct

SEQ ID NO: 954876 - DNA, 15 bp, Homo sapiens
ctcacagtctccctt

SEQ ID NO: 954877 - DNA, 15 bp, Homo sapiens
tcacagtctcccttg

SEQ ID NO: 954878 - DNA, 15 bp, Homo sapiens
cacagtctcccttga

SEQ ID NO: 954879 - DNA, 15 bp, Homo sapiens
acagtctcccttgaa

SEQ ID NO: 954880 - DNA, 15 bp, Homo sapiens
cagtctcccttgaat

SEQ ID NO: 954881 - DNA, 15 bp, Homo sapiens
agtctcccttgaatc

SEQ ID NO: 954882 - DNA, 15 bp, Homo sapiens
gtctcccttgaatca

SEQ ID NO: 954883 - DNA, 15 bp, Homo sapiens
tctcccttgaatcaa

SEQ ID NO: 954884 - DNA, 15 bp, Homo sapiens
ctcccttgaatcaag

SEQ ID NO: 954885 - DNA, 15 bp, Homo sapiens
tcccttgaatcaagt

SEQ ID NO: 954886 - DNA, 15 bp, Homo sapiens
cccttgaatcaagta

SEQ ID NO: 954887 - DNA, 15 bp, Homo sapiens
ccttgaatcaagtaa

SEQ ID NO: 954888 - DNA, 15 bp, Homo sapiens
cttgaatcaagtaat

SEQ ID NO: 954889 - DNA, 15 bp, Homo sapiens
ttgaatcaagtaatt

SEQ ID NO: 954890 - DNA, 15 bp, Homo sapiens
tgaatcaagtaattt

SEQ ID NO: 954891 - DNA, 15 bp, Homo sapiens
gaatcaagtaatttt

SEQ ID NO: 954892 - DNA, 15 bp, Homo sapiens
aatcaagtaattttt

SEQ ID NO: 954893 - DNA, 15 bp, Homo sapiens
atcaagtaatttttc

SEQ ID NO: 954894 - DNA, 15 bp, Homo sapiens
tcaagtaatttttct

SEQ ID NO: 954895 - DNA, 15 bp, Homo sapiens
caagtaatttttctt

SEQ ID NO: 954896 - DNA, 15 bp, Homo sapiens
aagtaatttttctta

SEQ ID NO: 954897 - DNA, 15 bp, Homo sapiens
agtaatttttcttat

SEQ ID NO: 954898 - DNA, 15 bp, Homo sapiens
gtaatttttcttatc

SEQ ID NO: 954899 - DNA, 15 bp, Homo sapiens
taatttttcttatca

SEQ ID NO: 954900 - DNA, 15 bp, Homo sapiens
aatttttcttatcaa

SEQ ID NO: 954901 - DNA, 15 bp, Homo sapiens
atttttcttatcaaa

SEQ ID NO: 954902 - DNA, 15 bp, Homo sapiens
tttttcttatcaaat

SEQ ID NO: 954903 - DNA, 15 bp, Homo sapiens
ttttcttatcaaata

SEQ ID NO: 954904 - DNA, 15 bp, Homo sapiens
tttcttatcaaataa

SEQ ID NO: 954905 - DNA, 15 bp, Homo sapiens
ttcttatcaaataaa

SEQ ID NO: 954906 - DNA, 15 bp, Homo sapiens
tcttatcaaataaat

SEQ ID NO: 954907 - DNA, 15 bp, Homo sapiens
cttatcaaataaatg

SEQ ID NO: 954908 - DNA, 15 bp, Homo sapiens
ttatcaaataaatgt

SEQ ID NO: 954909 - DNA, 15 bp, Homo sapiens
tatcaaataaatgta

SEQ ID NO: 954910 - DNA, 15 bp, Homo sapiens
atcaaataaatgtaa

SEQ ID NO: 954911 - DNA, 15 bp, Homo sapiens
tcaaataaatgtaaa

SEQ ID NO: 954912 - DNA, 15 bp, Homo sapiens
caaataaatgtaaag

SEQ ID NO: 954913 - DNA, 15 bp, Homo sapiens
aaataaatgtaaaga

SEQ ID NO: 954914 - DNA, 15 bp, Homo sapiens
aataaatgtaaagat

SEQ ID NO: 954915 - DNA, 15 bp, Homo sapiens
ataaatgtaaagatt

SEQ ID NO: 954916 - DNA, 15 bp, Homo sapiens
taaatgtaaagatta

SEQ ID NO: 954917 - DNA, 15 bp, Homo sapiens
aaatgtaaagattat

SEQ ID NO: 954918 - DNA, 15 bp, Homo sapiens
aatgtaaagattatt

SEQ ID NO: 954919 - DNA, 15 bp, Homo sapiens
atgtaaagattattt

SEQ ID NO: 954920 - DNA, 15 bp, Homo sapiens
tgtaaagattatttt

SEQ ID NO: 954921 - DNA, 15 bp, Homo sapiens
gtaaagattattttt

SEQ ID NO: 954922 - DNA, 15 bp, Homo sapiens
taaagattattttta

SEQ ID NO: 954923 - DNA, 15 bp, Homo sapiens
aaagattatttttat

SEQ ID NO: 954924 - DNA, 15 bp, Homo sapiens
aagattatttttatt

SEQ ID NO: 954925 - DNA, 15 bp, Homo sapiens
agattatttttattt

SEQ ID NO: 954926 - DNA, 15 bp, Homo sapiens
gattatttttatttt

SEQ ID NO: 954927 - DNA, 15 bp, Homo sapiens
attatttttatttta

SEQ ID NO: 954928 - DNA, 15 bp, Homo sapiens
ttatttttattttag

SEQ ID NO: 954929 - DNA, 15 bp, Homo sapiens
tatttttattttagt

SEQ ID NO: 954930 - DNA, 15 bp, Homo sapiens
atttttattttagta

SEQ ID NO: 954931 - DNA, 15 bp, Homo sapiens
tttttattttagtaa

SEQ ID NO: 954932 - DNA, 15 bp, Homo sapiens
ttttattttagtaag

SEQ ID NO: 954933 - DNA, 15 bp, Homo sapiens
tttattttagtaagt

SEQ ID NO: 954934 - DNA, 15 bp, Homo sapiens
ttattttagtaagtt

SEQ ID NO: 954935 - DNA, 15 bp, Homo sapiens
tattttagtaagtta

SEQ ID NO: 954936 - DNA, 15 bp, Homo sapiens
attttagtaagttac

SEQ ID NO: 954937 - DNA, 15 bp, Homo sapiens
ttttagtaagttaca

SEQ ID NO: 954938 - DNA, 15 bp, Homo sapiens
tttagtaagttacac

SEQ ID NO: 954939 - DNA, 15 bp, Homo sapiens
ttagtaagttacaca

SEQ ID NO: 954940 - DNA, 15 bp, Homo sapiens
tagtaagttacacaa

SEQ ID NO: 954941 - DNA, 15 bp, Homo sapiens
agtaagttacacaat

SEQ ID NO: 954942 - DNA, 15 bp, Homo sapiens
gtaagttacacaatg

SEQ ID NO: 954943 - DNA, 15 bp, Homo sapiens
taagttacacaatgg

SEQ ID NO: 954944 - DNA, 15 bp, Homo sapiens
aagttacacaatggg

SEQ ID NO: 954945 - DNA, 15 bp, Homo sapiens
agttacacaatgggt

SEQ ID NO: 954946 - DNA, 15 bp, Homo sapiens
gttacacaatgggtt

SEQ ID NO: 954947 - DNA, 15 bp, Homo sapiens
ttacacaatgggttc

SEQ ID NO: 954948 - DNA, 15 bp, Homo sapiens
tacacaatgggttca

SEQ ID NO: 954949 - DNA, 15 bp, Homo sapiens
acacaatgggttcat

SEQ ID NO: 954950 - DNA, 15 bp, Homo sapiens
cacaatgggttcata

SEQ ID NO: 954951 - DNA, 15 bp, Homo sapiens
acaatgggttcatat

SEQ ID NO: 954952 - DNA, 15 bp, Homo sapiens
caatgggttcatatg

SEQ ID NO: 954953 - DNA, 15 bp, Homo sapiens
aatgggttcatatga

SEQ ID NO: 954954 - DNA, 15 bp, Homo sapiens
atgggttcatatgat

SEQ ID NO: 954955 - DNA, 15 bp, Homo sapiens
tgggttcatatgatt

SEQ ID NO: 954956 - DNA, 15 bp, Homo sapiens
gggttcatatgattt

SEQ ID NO: 954957 - DNA, 15 bp, Homo sapiens
ggttcatatgattta

SEQ ID NO: 954958 - DNA, 15 bp, Homo sapiens
gttcatatgatttaa

SEQ ID NO: 954959 - DNA, 15 bp, Homo sapiens
ttcatatgatttaac

SEQ ID NO: 954960 - DNA, 15 bp, Homo sapiens
tcatatgatttaacg

SEQ ID NO: 954961 - DNA, 15 bp, Homo sapiens
catatgatttaacga

SEQ ID NO: 954962 - DNA, 15 bp, Homo sapiens
atatgatttaacgaa

SEQ ID NO: 954963 - DNA, 15 bp, Homo sapiens
tatgatttaacgaat

SEQ ID NO: 954964 - DNA, 15 bp, Homo sapiens
atgatttaacgaatt

SEQ ID NO: 954965 - DNA, 15 bp, Homo sapiens
tgatttaacgaatta

SEQ ID NO: 954966 - DNA, 15 bp, Homo sapiens
gatttaacgaattat

SEQ ID NO: 954967 - DNA, 15 bp, Homo sapiens
atttaacgaattata

SEQ ID NO: 954968 - DNA, 15 bp, Homo sapiens
tttaacgaattatag

SEQ ID NO: 954969 - DNA, 15 bp, Homo sapiens
ttaacgaattataga

SEQ ID NO: 954970 - DNA, 15 bp, Homo sapiens
taacgaattatagaa

SEQ ID NO: 954971 - DNA, 15 bp, Homo sapiens
aacgaattatagaaa

SEQ ID NO: 954972 - DNA, 15 bp, Homo sapiens
acgaattatagaaat

SEQ ID NO: 954973 - DNA, 15 bp, Homo sapiens
cgaattatagaaatg

SEQ ID NO: 954974 - DNA, 15 bp, Homo sapiens
gaattatagaaatga

SEQ ID NO: 954975 - DNA, 15 bp, Homo sapiens
aattatagaaatgat

SEQ ID NO: 954976 - DNA, 15 bp, Homo sapiens
attatagaaatgatc

SEQ ID NO: 954977 - DNA, 15 bp, Homo sapiens
ttatagaaatgatcc

SEQ ID NO: 954978 - DNA, 15 bp, Homo sapiens
tatagaaatgatccc

SEQ ID NO: 954979 - DNA, 15 bp, Homo sapiens
atagaaatgatccct

SEQ ID NO: 954980 - DNA, 15 bp, Homo sapiens
tagaaatgatccctg

SEQ ID NO: 954981 - DNA, 15 bp, Homo sapiens
agaaatgatccctga

SEQ ID NO: 954982 - DNA, 15 bp, Homo sapiens
gaaatgatccctgaa

SEQ ID NO: 954983 - DNA, 15 bp, Homo sapiens
aaatgatccctgaaa

SEQ ID NO: 954984 - DNA, 15 bp, Homo sapiens
aatgatccctgaaat

SEQ ID NO: 954985 - DNA, 15 bp, Homo sapiens
atgatccctgaaata

SEQ ID NO: 954986 - DNA, 15 bp, Homo sapiens
tgatccctgaaatag

SEQ ID NO: 954987 - DNA, 15 bp, Homo sapiens
gatccctgaaatagt

SEQ ID NO: 954988 - DNA, 15 bp, Homo sapiens
atccctgaaatagtc

SEQ ID NO: 954989 - DNA, 15 bp, Homo sapiens
tccctgaaatagtct

SEQ ID NO: 954990 - DNA, 15 bp, Homo sapiens
ccctgaaatagtctt

SEQ ID NO: 954991 - DNA, 15 bp, Homo sapiens
cctgaaatagtcttt

SEQ ID NO: 954992 - DNA, 15 bp, Homo sapiens
ctgaaatagtctttc

SEQ ID NO: 954993 - DNA, 15 bp, Homo sapiens
tgaaatagtctttca

SEQ ID NO: 954994 - DNA, 15 bp, Homo sapiens
gaaatagtctttcat

SEQ ID NO: 954995 - DNA, 15 bp, Homo sapiens
aaatagtctttcata

SEQ ID NO: 954996 - DNA, 15 bp, Homo sapiens
aatagtctttcatat

SEQ ID NO: 954997 - DNA, 15 bp, Homo sapiens
atagtctttcatatg

SEQ ID NO: 954998 - DNA, 15 bp, Homo sapiens
tagtctttcatatga

SEQ ID NO: 954999 - DNA, 15 bp, Homo sapiens
agtctttcatatgat

SEQ ID NO: 955000 - DNA, 15 bp, Homo sapiens
gtctttcatatgatt

SEQ ID NO: 955001 - DNA, 15 bp, Homo sapiens
tctttcatatgattt

SEQ ID NO: 955002 - DNA, 15 bp, Homo sapiens
ctttcatatgattta

SEQ ID NO: 955003 - DNA, 15 bp, Homo sapiens
tttcatatgatttaa

SEQ ID NO: 955004 - DNA, 15 bp, Homo sapiens
ttcatatgatttaaa

SEQ ID NO: 955005 - DNA, 15 bp, Homo sapiens
tcatatgatttaaaa

SEQ ID NO: 955006 - DNA, 15 bp, Homo sapiens
catatgatttaaaat

SEQ ID NO: 955007 - DNA, 15 bp, Homo sapiens
atatgatttaaaatt

SEQ ID NO: 955008 - DNA, 15 bp, Homo sapiens
tatgatttaaaattt

SEQ ID NO: 955009 - DNA, 15 bp, Homo sapiens
atgatttaaaattta

SEQ ID NO: 955010 - DNA, 15 bp, Homo sapiens
tgatttaaaatttat

SEQ ID NO: 955011 - DNA, 15 bp, Homo sapiens
gatttaaaatttata

SEQ ID NO: 955012 - DNA, 15 bp, Homo sapiens
atttaaaatttatat

SEQ ID NO: 955013 - DNA, 15 bp, Homo sapiens
tttaaaatttatatt

SEQ ID NO: 955014 - DNA, 15 bp, Homo sapiens
ttaaaatttatattt

SEQ ID NO: 955015 - DNA, 15 bp, Homo sapiens
taaaatttatattta

SEQ ID NO: 955016 - DNA, 15 bp, Homo sapiens
aaaatttatatttat

SEQ ID NO: 955017 - DNA, 15 bp, Homo sapiens
aaatttatatttata

SEQ ID NO: 955018 - DNA, 15 bp, Homo sapiens
aatttatatttatac

SEQ ID NO: 955019 - DNA, 15 bp, Homo sapiens
atttatatttatacc

SEQ ID NO: 955020 - DNA, 15 bp, Homo sapiens
tttatatttatacct

SEQ ID NO: 955021 - DNA, 15 bp, Homo sapiens
ttatatttataccta

SEQ ID NO: 955022 - DNA, 15 bp, Homo sapiens
tatatttatacctaa

SEQ ID NO: 955023 - DNA, 15 bp, Homo sapiens
atatttatacctaac

SEQ ID NO: 955024 - DNA, 15 bp, Homo sapiens
tatttatacctaact

SEQ ID NO: 955025 - DNA, 15 bp, Homo sapiens
atttatacctaacta

SEQ ID NO: 955026 - DNA, 15 bp, Homo sapiens
tttatacctaactat

SEQ ID NO: 955027 - DNA, 15 bp, Homo sapiens
ttatacctaactata

SEQ ID NO: 955028 - DNA, 15 bp, Homo sapiens
tatacctaactataa

SEQ ID NO: 955029 - DNA, 15 bp, Homo sapiens
atacctaactataaa

SEQ ID NO: 955030 - DNA, 15 bp, Homo sapiens
tacctaactataaaa

SEQ ID NO: 955031 - DNA, 15 bp, Homo sapiens
acctaactataaaag

SEQ ID NO: 955032 - DNA, 15 bp, Homo sapiens
cctaactataaaagt

SEQ ID NO: 955033 - DNA, 15 bp, Homo sapiens
ctaactataaaagtt

SEQ ID NO: 955034 - DNA, 15 bp, Homo sapiens
taactataaaagttg

SEQ ID NO: 955035 - DNA, 15 bp, Homo sapiens
aactataaaagttga

SEQ ID NO: 955036 - DNA, 15 bp, Homo sapiens
actataaaagttgag

SEQ ID NO: 955037 - DNA, 15 bp, Homo sapiens
ctataaaagttgagt

SEQ ID NO: 955038 - DNA, 15 bp, Homo sapiens
tataaaagttgagtt

SEQ ID NO: 955039 - DNA, 15 bp, Homo sapiens
ataaaagttgagttg

SEQ ID NO: 955040 - DNA, 15 bp, Homo sapiens
taaaagttgagttgt

SEQ ID NO: 955041 - DNA, 15 bp, Homo sapiens
aaaagttgagttgtg

SEQ ID NO: 955042 - DNA, 15 bp, Homo sapiens
aaagttgagttgtgt

SEQ ID NO: 955043 - DNA, 15 bp, Homo sapiens
aagttgagttgtgtt

SEQ ID NO: 955044 - DNA, 15 bp, Homo sapiens
agttgagttgtgtta

SEQ ID NO: 955045 - DNA, 15 bp, Homo sapiens
gttgagttgtgttag

SEQ ID NO: 955046 - DNA, 15 bp, Homo sapiens
ttgagttgtgttaga

SEQ ID NO: 955047 - DNA, 15 bp, Homo sapiens
tgagttgtgttagat

SEQ ID NO: 955048 - DNA, 15 bp, Homo sapiens
gagttgtgttagatt

SEQ ID NO: 955049 - DNA, 15 bp, Homo sapiens
agttgtgttagatta

SEQ ID NO: 955050 - DNA, 15 bp, Homo sapiens
gttgtgttagattag

SEQ ID NO: 955051 - DNA, 15 bp, Homo sapiens
ttgtgttagattagt

SEQ ID NO: 955052 - DNA, 15 bp, Homo sapiens
tgtgttagattagtt

SEQ ID NO: 955053 - DNA, 15 bp, Homo sapiens
gtgttagattagttg

SEQ ID NO: 955054 - DNA, 15 bp, Homo sapiens
tgttagattagttga

SEQ ID NO: 955055 - DNA, 15 bp, Homo sapiens
gttagattagttgac

SEQ ID NO: 955056 - DNA, 15 bp, Homo sapiens
ttagattagttgaca

SEQ ID NO: 955057 - DNA, 15 bp, Homo sapiens
tagattagttgacat

SEQ ID NO: 955058 - DNA, 15 bp, Homo sapiens
agattagttgacatg

SEQ ID NO: 955059 - DNA, 15 bp, Homo sapiens
gattagttgacatgt

SEQ ID NO: 955060 - DNA, 15 bp, Homo sapiens
attagttgacatgtt

SEQ ID NO: 955061 - DNA, 15 bp, Homo sapiens
ttagttgacatgtta

SEQ ID NO: 955062 - DNA, 15 bp, Homo sapiens
tagttgacatgttac

SEQ ID NO: 955063 - DNA, 15 bp, Homo sapiens
agttgacatgttaca

SEQ ID NO: 955064 - DNA, 15 bp, Homo sapiens
gttgacatgttacat

SEQ ID NO: 955065 - DNA, 15 bp, Homo sapiens
ttgacatgttacatt

SEQ ID NO: 955066 - DNA, 15 bp, Homo sapiens
tgacatgttacattt

SEQ ID NO: 955067 - DNA, 15 bp, Homo sapiens
gacatgttacatttt

SEQ ID NO: 955068 - DNA, 15 bp, Homo sapiens
acatgttacatttta

SEQ ID NO: 955069 - DNA, 15 bp, Homo sapiens
catgttacattttat

SEQ ID NO: 955070 - DNA, 15 bp, Homo sapiens
atgttacattttatt

SEQ ID NO: 955071 - DNA, 15 bp, Homo sapiens
tgttacattttattg

SEQ ID NO: 955072 - DNA, 15 bp, Homo sapiens
gttacattttattgt

SEQ ID NO: 955073 - DNA, 15 bp, Homo sapiens
ttacattttattgtc

SEQ ID NO: 955074 - DNA, 15 bp, Homo sapiens
tacattttattgtct

SEQ ID NO: 955075 - DNA, 15 bp, Homo sapiens
acattttattgtctt

SEQ ID NO: 955076 - DNA, 15 bp, Homo sapiens
cattttattgtcttt

SEQ ID NO: 955077 - DNA, 15 bp, Homo sapiens
attttattgtcttta

SEQ ID NO: 955078 - DNA, 15 bp, Homo sapiens
ttttattgtctttaa

SEQ ID NO: 955079 - DNA, 15 bp, Homo sapiens
tttattgtctttaag

SEQ ID NO: 955080 - DNA, 15 bp, Homo sapiens
ttattgtctttaagc

SEQ ID NO: 955081 - DNA, 15 bp, Homo sapiens
tattgtctttaagca

SEQ ID NO: 955082 - DNA, 15 bp, Homo sapiens
attgtctttaagcat

SEQ ID NO: 955083 - DNA, 15 bp, Homo sapiens
ttgtctttaagcatc

SEQ ID NO: 955084 - DNA, 15 bp, Homo sapiens
tgtctttaagcatca

SEQ ID NO: 955085 - DNA, 15 bp, Homo sapiens
gtctttaagcatcaa

SEQ ID NO: 955086 - DNA, 15 bp, Homo sapiens
tctttaagcatcaat

SEQ ID NO: 955087 - DNA, 15 bp, Homo sapiens
ctttaagcatcaatt

SEQ ID NO: 955088 - DNA, 15 bp, Homo sapiens
tttaagcatcaattt

SEQ ID NO: 955089 - DNA, 15 bp, Homo sapiens
ttaagcatcaatttc

SEQ ID NO: 955090 - DNA, 15 bp, Homo sapiens
taagcatcaatttca

SEQ ID NO: 955091 - DNA, 15 bp, Homo sapiens
aagcatcaatttcaa

SEQ ID NO: 955092 - DNA, 15 bp, Homo sapiens
agcatcaatttcaat

SEQ ID NO: 955093 - DNA, 15 bp, Homo sapiens
gcatcaatttcaatc

SEQ ID NO: 955094 - DNA, 15 bp, Homo sapiens
catcaatttcaatcc

SEQ ID NO: 955095 - DNA, 15 bp, Homo sapiens
atcaatttcaatccg

SEQ ID NO: 955096 - DNA, 15 bp, Homo sapiens
tcaatttcaatccga

SEQ ID NO: 955097 - DNA, 15 bp, Homo sapiens
caatttcaatccgat

SEQ ID NO: 955098 - DNA, 15 bp, Homo sapiens
aatttcaatccgatg

SEQ ID NO: 955099 - DNA, 15 bp, Homo sapiens
atttcaatccgatga

SEQ ID NO: 955100 - DNA, 15 bp, Homo sapiens
tttcaatccgatgac

SEQ ID NO: 955101 - DNA, 15 bp, Homo sapiens
ttcaatccgatgact

SEQ ID NO: 955102 - DNA, 15 bp, Homo sapiens
tcaatccgatgactt

SEQ ID NO: 955103 - DNA, 15 bp, Homo sapiens
caatccgatgacttt

SEQ ID NO: 955104 - DNA, 15 bp, Homo sapiens
aatccgatgactttt

SEQ ID NO: 955105 - DNA, 15 bp, Homo sapiens
atccgatgacttttg

SEQ ID NO: 955106 - DNA, 15 bp, Homo sapiens
tccgatgacttttgt

SEQ ID NO: 955107 - DNA, 15 bp, Homo sapiens
ccgatgacttttgtt

SEQ ID NO: 955108 - DNA, 15 bp, Homo sapiens
cgatgacttttgttt

SEQ ID NO: 955109 - DNA, 15 bp, Homo sapiens
gatgacttttgtttt

SEQ ID NO: 955110 - DNA, 15 bp, Homo sapiens
atgacttttgttttc

SEQ ID NO: 955111 - DNA, 15 bp, Homo sapiens
tgacttttgttttct

SEQ ID NO: 955112 - DNA, 15 bp, Homo sapiens
gacttttgttttctg

SEQ ID NO: 955113 - DNA, 15 bp, Homo sapiens
acttttgttttctgt

SEQ ID NO: 955114 - DNA, 15 bp, Homo sapiens
cttttgttttctgtt

SEQ ID NO: 955115 - DNA, 15 bp, Homo sapiens
ttttgttttctgttt

SEQ ID NO: 955116 - DNA, 15 bp, Homo sapiens
tttgttttctgtttg

SEQ ID NO: 955117 - DNA, 15 bp, Homo sapiens
ttgttttctgtttgg

SEQ ID NO: 955118 - DNA, 15 bp, Homo sapiens
tgttttctgtttggg

SEQ ID NO: 955119 - DNA, 15 bp, Homo sapiens
gttttctgtttggga

SEQ ID NO: 955120 - DNA, 15 bp, Homo sapiens
ttttctgtttgggat

SEQ ID NO: 955121 - DNA, 15 bp, Homo sapiens
tttctgtttgggatg

SEQ ID NO: 955122 - DNA, 15 bp, Homo sapiens
ttctgtttgggatgc

SEQ ID NO: 955123 - DNA, 15 bp, Homo sapiens
tctgtttgggatgca

SEQ ID NO: 955124 - DNA, 15 bp, Homo sapiens
ctgtttgggatgcaa

SEQ ID NO: 955125 - DNA, 15 bp, Homo sapiens
tgtttgggatgcaat

SEQ ID NO: 955126 - DNA, 15 bp, Homo sapiens
gtttgggatgcaatg

SEQ ID NO: 955127 - DNA, 15 bp, Homo sapiens
tttgggatgcaatga

SEQ ID NO: 955128 - DNA, 15 bp, Homo sapiens
ttgggatgcaatgat

SEQ ID NO: 955129 - DNA, 15 bp, Homo sapiens
tgggatgcaatgatt

SEQ ID NO: 955130 - DNA, 15 bp, Homo sapiens
gggatgcaatgattt

SEQ ID NO: 955131 - DNA, 15 bp, Homo sapiens
ggatgcaatgatttt

SEQ ID NO: 955132 - DNA, 15 bp, Homo sapiens
gatgcaatgattttt

SEQ ID NO: 955133 - DNA, 15 bp, Homo sapiens
atgcaatgattttta

SEQ ID NO: 955134 - DNA, 15 bp, Homo sapiens
tgcaatgatttttaa

SEQ ID NO: 955135 - DNA, 15 bp, Homo sapiens
gcaatgatttttaag

SEQ ID NO: 955136 - DNA, 15 bp, Homo sapiens
caatgatttttaaga

SEQ ID NO: 955137 - DNA, 15 bp, Homo sapiens
aatgatttttaagat

SEQ ID NO: 955138 - DNA, 15 bp, Homo sapiens
atgatttttaagatt

SEQ ID NO: 955139 - DNA, 15 bp, Homo sapiens
tgatttttaagattt

SEQ ID NO: 955140 - DNA, 15 bp, Homo sapiens
gatttttaagatttc

SEQ ID NO: 955141 - DNA, 15 bp, Homo sapiens
atttttaagatttca

SEQ ID NO: 955142 - DNA, 15 bp, Homo sapiens
tttttaagatttcaa

SEQ ID NO: 955143 - DNA, 15 bp, Homo sapiens
ttttaagatttcaaa

SEQ ID NO: 955144 - DNA, 15 bp, Homo sapiens
tttaagatttcaaac

SEQ ID NO: 955145 - DNA, 15 bp, Homo sapiens
ttaagatttcaaaca

SEQ ID NO: 955146 - DNA, 15 bp, Homo sapiens
taagatttcaaacag

SEQ ID NO: 955147 - DNA, 15 bp, Homo sapiens
aagatttcaaacagt

SEQ ID NO: 955148 - DNA, 15 bp, Homo sapiens
agatttcaaacagtt

SEQ ID NO: 955149 - DNA, 15 bp, Homo sapiens
gatttcaaacagttt

SEQ ID NO: 955150 - DNA, 15 bp, Homo sapiens
atttcaaacagtttt

SEQ ID NO: 955151 - DNA, 15 bp, Homo sapiens
tttcaaacagttttt

SEQ ID NO: 955152 - DNA, 15 bp, Homo sapiens
ttcaaacagtttttg

SEQ ID NO: 955153 - DNA, 15 bp, Homo sapiens
tcaaacagtttttgg

SEQ ID NO: 955154 - DNA, 15 bp, Homo sapiens
caaacagtttttggc

SEQ ID NO: 955155 - DNA, 15 bp, Homo sapiens
aaacagtttttggcc

SEQ ID NO: 955156 - DNA, 15 bp, Homo sapiens
aacagtttttggcct

SEQ ID NO: 955157 - DNA, 15 bp, Homo sapiens
acagtttttggcctt

SEQ ID NO: 955158 - DNA, 15 bp, Homo sapiens
cagtttttggccttt

SEQ ID NO: 955159 - DNA, 15 bp, Homo sapiens
agtttttggccttta

SEQ ID NO: 955160 - DNA, 15 bp, Homo sapiens
gtttttggcctttag

SEQ ID NO: 955161 - DNA, 15 bp, Homo sapiens
tttttggcctttagc

SEQ ID NO: 955162 - DNA, 15 bp, Homo sapiens
ttttggcctttagca

SEQ ID NO: 955163 - DNA, 15 bp, Homo sapiens
tttggcctttagcac

SEQ ID NO: 955164 - DNA, 15 bp, Homo sapiens
ttggcctttagcaca

SEQ ID NO: 955165 - DNA, 15 bp, Homo sapiens
tggcctttagcacag

SEQ ID NO: 955166 - DNA, 15 bp, Homo sapiens
ggcctttagcacagt

SEQ ID NO: 955167 - DNA, 15 bp, Homo sapiens
gcctttagcacagta

SEQ ID NO: 955168 - DNA, 15 bp, Homo sapiens
cctttagcacagtac

SEQ ID NO: 955169 - DNA, 15 bp, Homo sapiens
ctttagcacagtacc

SEQ ID NO: 955170 - DNA, 15 bp, Homo sapiens
tttagcacagtacct

SEQ ID NO: 955171 - DNA, 15 bp, Homo sapiens
ttagcacagtacctc

SEQ ID NO: 955172 - DNA, 15 bp, Homo sapiens
tagcacagtacctca

SEQ ID NO: 955173 - DNA, 15 bp, Homo sapiens
agcacagtacctcaa

SEQ ID NO: 955174 - DNA, 15 bp, Homo sapiens
gcacagtacctcaag

SEQ ID NO: 955175 - DNA, 15 bp, Homo sapiens
cacagtacctcaagt

SEQ ID NO: 955176 - DNA, 15 bp, Homo sapiens
acagtacctcaagta

SEQ ID NO: 955177 - DNA, 15 bp, Homo sapiens
cagtacctcaagtac

SEQ ID NO: 955178 - DNA, 15 bp, Homo sapiens
agtacctcaagtacc

SEQ ID NO: 955179 - DNA, 15 bp, Homo sapiens
gtacctcaagtacct

SEQ ID NO: 955180 - DNA, 15 bp, Homo sapiens
tacctcaagtaccta

SEQ ID NO: 955181 - DNA, 15 bp, Homo sapiens
acctcaagtacctaa

SEQ ID NO: 955182 - DNA, 15 bp, Homo sapiens
cctcaagtacctaat

SEQ ID NO: 955183 - DNA, 15 bp, Homo sapiens
ctcaagtacctaatg

SEQ ID NO: 955184 - DNA, 15 bp, Homo sapiens
tcaagtacctaatgg

SEQ ID NO: 955185 - DNA, 15 bp, Homo sapiens
caagtacctaatgga

SEQ ID NO: 955186 - DNA, 15 bp, Homo sapiens
aagtacctaatggat

SEQ ID NO: 955187 - DNA, 15 bp, Homo sapiens
agtacctaatggata

SEQ ID NO: 955188 - DNA, 15 bp, Homo sapiens
gtacctaatggatat

SEQ ID NO: 955189 - DNA, 15 bp, Homo sapiens
tacctaatggatatg

SEQ ID NO: 955190 - DNA, 15 bp, Homo sapiens
acctaatggatatgg

SEQ ID NO: 955191 - DNA, 15 bp, Homo sapiens
cctaatggatatggt

SEQ ID NO: 955192 - DNA, 15 bp, Homo sapiens
ctaatggatatggta

SEQ ID NO: 955193 - DNA, 15 bp, Homo sapiens
taatggatatggtaa

SEQ ID NO: 955194 - DNA, 15 bp, Homo sapiens
aatggatatggtaat

SEQ ID NO: 955195 - DNA, 15 bp, Homo sapiens
atggatatggtaata

SEQ ID NO: 955196 - DNA, 15 bp, Homo sapiens
tggatatggtaataa

SEQ ID NO: 955197 - DNA, 15 bp, Homo sapiens
ggatatggtaataaa

SEQ ID NO: 955198 - DNA, 15 bp, Homo sapiens
gatatggtaataaac

SEQ ID NO: 955199 - DNA, 15 bp, Homo sapiens
atatggtaataaacc

SEQ ID NO: 955200 - DNA, 15 bp, Homo sapiens
tatggtaataaacct

SEQ ID NO: 955201 - DNA, 15 bp, Homo sapiens
atggtaataaacctc

SEQ ID NO: 955202 - DNA, 15 bp, Homo sapiens
tggtaataaacctca

SEQ ID NO: 955203 - DNA, 15 bp, Homo sapiens
ggtaataaacctcaa

SEQ ID NO: 955204 - DNA, 15 bp, Homo sapiens
gtaataaacctcaag

SEQ ID NO: 955205 - DNA, 15 bp, Homo sapiens
taataaacctcaagc

SEQ ID NO: 955206 - DNA, 15 bp, Homo sapiens
aataaacctcaagct

SEQ ID NO: 955207 - DNA, 15 bp, Homo sapiens
ataaacctcaagctt

SEQ ID NO: 955208 - DNA, 15 bp, Homo sapiens
taaacctcaagcttt

SEQ ID NO: 955209 - DNA, 15 bp, Homo sapiens
aaacctcaagctttt

SEQ ID NO: 955210 - DNA, 15 bp, Homo sapiens
aacctcaagcttttt

SEQ ID NO: 955211 - DNA, 15 bp, Homo sapiens
acctcaagctttttt

SEQ ID NO: 955212 - DNA, 15 bp, Homo sapiens
cctcaagcttttttg

SEQ ID NO: 955213 - DNA, 15 bp, Homo sapiens
ctcaagcttttttga

SEQ ID NO: 955214 - DNA, 15 bp, Homo sapiens
tcaagcttttttgaa

SEQ ID NO: 955215 - DNA, 15 bp, Homo sapiens
caagcttttttgaaa

SEQ ID NO: 955216 - DNA, 15 bp, Homo sapiens
aagcttttttgaaaa

SEQ ID NO: 955217 - DNA, 15 bp, Homo sapiens
agcttttttgaaaaa

SEQ ID NO: 955218 - DNA, 15 bp, Homo sapiens
gcttttttgaaaaaa

SEQ ID NO: 955219 - DNA, 15 bp, Homo sapiens
cttttttgaaaaaag

SEQ ID NO: 955220 - DNA, 15 bp, Homo sapiens
ttttttgaaaaaagt

SEQ ID NO: 955221 - DNA, 15 bp, Homo sapiens
tttttgaaaaaagtc

SEQ ID NO: 955222 - DNA, 15 bp, Homo sapiens
ttttgaaaaaagtca

SEQ ID NO: 955223 - DNA, 15 bp, Homo sapiens
tttgaaaaaagtcac

SEQ ID NO: 955224 - DNA, 15 bp, Homo sapiens
ttgaaaaaagtcacc

SEQ ID NO: 955225 - DNA, 15 bp, Homo sapiens
tgaaaaaagtcacca

SEQ ID NO: 955226 - DNA, 15 bp, Homo sapiens
gaaaaaagtcaccag

SEQ ID NO: 955227 - DNA, 15 bp, Homo sapiens
aaaaaagtcaccagc

SEQ ID NO: 955228 - DNA, 15 bp, Homo sapiens
aaaaagtcaccagct

SEQ ID NO: 955229 - DNA, 15 bp, Homo sapiens
aaaagtcaccagctg

SEQ ID NO: 955230 - DNA, 15 bp, Homo sapiens
aaagtcaccagctga

SEQ ID NO: 955231 - DNA, 15 bp, Homo sapiens
aagtcaccagctgac

SEQ ID NO: 955232 - DNA, 15 bp, Homo sapiens
agtcaccagctgaca

SEQ ID NO: 955233 - DNA, 15 bp, Homo sapiens
gtcaccagctgacag

SEQ ID NO: 955234 - DNA, 15 bp, Homo sapiens
tcaccagctgacaga

SEQ ID NO: 955235 - DNA, 15 bp, Homo sapiens
caccagctgacagag

SEQ ID NO: 955236 - DNA, 15 bp, Homo sapiens
accagctgacagagc

SEQ ID NO: 955237 - DNA, 15 bp, Homo sapiens
ccagctgacagagct

SEQ ID NO: 955238 - DNA, 15 bp, Homo sapiens
cagctgacagagctc

SEQ ID NO: 955239 - DNA, 15 bp, Homo sapiens
agctgacagagctcc

SEQ ID NO: 955240 - DNA, 15 bp, Homo sapiens
gctgacagagctccc

SEQ ID NO: 955241 - DNA, 15 bp, Homo sapiens
ctgacagagctccct

SEQ ID NO: 955242 - DNA, 15 bp, Homo sapiens
tgacagagctccctt

SEQ ID NO: 955243 - DNA, 15 bp, Homo sapiens
gacagagctcccttc

SEQ ID NO: 955244 - DNA, 15 bp, Homo sapiens
acagagctcccttct

SEQ ID NO: 955245 - DNA, 15 bp, Homo sapiens
cagagctcccttctc

SEQ ID NO: 955246 - DNA, 15 bp, Homo sapiens
agagctcccttctcc

SEQ ID NO: 955247 - DNA, 15 bp, Homo sapiens
gagctcccttctcca

SEQ ID NO: 955248 - DNA, 15 bp, Homo sapiens
agctcccttctccac

SEQ ID NO: 955249 - DNA, 15 bp, Homo sapiens
gctcccttctccact

SEQ ID NO: 955250 - DNA, 15 bp, Homo sapiens
ctcccttctccactg

SEQ ID NO: 955251 - DNA, 15 bp, Homo sapiens
tcccttctccactgg

SEQ ID NO: 955252 - DNA, 15 bp, Homo sapiens
cccttctccactggt

SEQ ID NO: 955253 - DNA, 15 bp, Homo sapiens
ccttctccactggtt

SEQ ID NO: 955254 - DNA, 15 bp, Homo sapiens
cttctccactggttc

SEQ ID NO: 955255 - DNA, 15 bp, Homo sapiens
ttctccactggttct

SEQ ID NO: 955256 - DNA, 15 bp, Homo sapiens
tctccactggttctg

SEQ ID NO: 955257 - DNA, 15 bp, Homo sapiens
ctccactggttctgt

SEQ ID NO: 955258 - DNA, 15 bp, Homo sapiens
tccactggttctgtc

SEQ ID NO: 955259 - DNA, 15 bp, Homo sapiens
ccactggttctgtct

SEQ ID NO: 955260 - DNA, 15 bp, Homo sapiens
cactggttctgtctc

SEQ ID NO: 955261 - DNA, 15 bp, Homo sapiens
actggttctgtctcc

SEQ ID NO: 955262 - DNA, 15 bp, Homo sapiens
ctggttctgtctccc

SEQ ID NO: 955263 - DNA, 15 bp, Homo sapiens
tggttctgtctccca

SEQ ID NO: 955264 - DNA, 15 bp, Homo sapiens
ggttctgtctcccag

SEQ ID NO: 955265 - DNA, 15 bp, Homo sapiens
gttctgtctcccagg

SEQ ID NO: 955266 - DNA, 15 bp, Homo sapiens
ttctgtctcccagga

SEQ ID NO: 955267 - DNA, 15 bp, Homo sapiens
tctgtctcccaggaa

SEQ ID NO: 955268 - DNA, 15 bp, Homo sapiens
ctgtctcccaggaac

SEQ ID NO: 955269 - DNA, 15 bp, Homo sapiens
tgtctcccaggaacc

SEQ ID NO: 955270 - DNA, 15 bp, Homo sapiens
gtctcccaggaacca

SEQ ID NO: 955271 - DNA, 15 bp, Homo sapiens
tctcccaggaaccaa

SEQ ID NO: 955272 - DNA, 15 bp, Homo sapiens
ctcccaggaaccaaa

SEQ ID NO: 955273 - DNA, 15 bp, Homo sapiens
tcccaggaaccaaag

SEQ ID NO: 955274 - DNA, 15 bp, Homo sapiens
cccaggaaccaaagt

SEQ ID NO: 955275 - DNA, 15 bp, Homo sapiens
ccaggaaccaaagtc

SEQ ID NO: 955276 - DNA, 15 bp, Homo sapiens
caggaaccaaagtcc

SEQ ID NO: 955277 - DNA, 15 bp, Homo sapiens
aggaaccaaagtcca

SEQ ID NO: 955278 - DNA, 15 bp, Homo sapiens
ggaaccaaagtccag

SEQ ID NO: 955279 - DNA, 15 bp, Homo sapiens
gaaccaaagtccagg

SEQ ID NO: 955280 - DNA, 15 bp, Homo sapiens
aaccaaagtccaggt

SEQ ID NO: 955281 - DNA, 15 bp, Homo sapiens
accaaagtccaggtg

SEQ ID NO: 955282 - DNA, 15 bp, Homo sapiens
ccaaagtccaggtgg

SEQ ID NO: 955283 - DNA, 15 bp, Homo sapiens
caaagtccaggtggg

SEQ ID NO: 955284 - DNA, 15 bp, Homo sapiens
aaagtccaggtgggg

SEQ ID NO: 955285 - DNA, 15 bp, Homo sapiens
aagtccaggtggggc

SEQ ID NO: 955286 - DNA, 15 bp, Homo sapiens
agtccaggtggggct

SEQ ID NO: 955287 - DNA, 15 bp, Homo sapiens
gtccaggtggggctc

SEQ ID NO: 955288 - DNA, 15 bp, Homo sapiens
tccaggtggggctcc

SEQ ID NO: 955289 - DNA, 15 bp, Homo sapiens
ccaggtggggctccc

SEQ ID NO: 955290 - DNA, 15 bp, Homo sapiens
caggtggggctccct

SEQ ID NO: 955291 - DNA, 15 bp, Homo sapiens
aggtggggctccctc

SEQ ID NO: 955292 - DNA, 15 bp, Homo sapiens
ggtggggctccctct

SEQ ID NO: 955293 - DNA, 15 bp, Homo sapiens
gtggggctccctctc

SEQ ID NO: 955294 - DNA, 15 bp, Homo sapiens
tggggctccctctct

SEQ ID NO: 955295 - DNA, 15 bp, Homo sapiens
ggggctccctctctg

SEQ ID NO: 955296 - DNA, 15 bp, Homo sapiens
gggctccctctctgt

SEQ ID NO: 955297 - DNA, 15 bp, Homo sapiens
ggctccctctctgtg

SEQ ID NO: 955298 - DNA, 15 bp, Homo sapiens
gctccctctctgtga

SEQ ID NO: 955299 - DNA, 15 bp, Homo sapiens
ctccctctctgtgag

SEQ ID NO: 955300 - DNA, 15 bp, Homo sapiens
tccctctctgtgagt

SEQ ID NO: 955301 - DNA, 15 bp, Homo sapiens
ccctctctgtgagtc

SEQ ID NO: 955302 - DNA, 15 bp, Homo sapiens
cctctctgtgagtct

SEQ ID NO: 955303 - DNA, 15 bp, Homo sapiens
ctctctgtgagtcta

SEQ ID NO: 955304 - DNA, 15 bp, Homo sapiens
tctctgtgagtctag

SEQ ID NO: 955305 - DNA, 15 bp, Homo sapiens
ctctgtgagtctaga

SEQ ID NO: 955306 - DNA, 15 bp, Homo sapiens
tctgtgagtctagag

SEQ ID NO: 955307 - DNA, 15 bp, Homo sapiens
ctgtgagtctagagc

SEQ ID NO: 955308 - DNA, 15 bp, Homo sapiens
tgtgagtctagagca

SEQ ID NO: 955309 - DNA, 15 bp, Homo sapiens
gtgagtctagagcaa

SEQ ID NO: 955310 - DNA, 15 bp, Homo sapiens
tgagtctagagcaaa

SEQ ID NO: 955311 - DNA, 15 bp, Homo sapiens
gagtctagagcaaaa

SEQ ID NO: 955312 - DNA, 15 bp, Homo sapiens
agtctagagcaaaag

SEQ ID NO: 955313 - DNA, 15 bp, Homo sapiens
gtctagagcaaaagc

SEQ ID NO: 955314 - DNA, 15 bp, Homo sapiens
tctagagcaaaagcc

SEQ ID NO: 955315 - DNA, 15 bp, Homo sapiens
ctagagcaaaagcct

SEQ ID NO: 955316 - DNA, 15 bp, Homo sapiens
tagagcaaaagcctc

SEQ ID NO: 955317 - DNA, 15 bp, Homo sapiens
agagcaaaagcctca

SEQ ID NO: 955318 - DNA, 15 bp, Homo sapiens
gagcaaaagcctcaa

SEQ ID NO: 955319 - DNA, 15 bp, Homo sapiens
agcaaaagcctcaac

SEQ ID NO: 955320 - DNA, 15 bp, Homo sapiens
gcaaaagcctcaacg

SEQ ID NO: 955321 - DNA, 15 bp, Homo sapiens
caaaagcctcaacgt

SEQ ID NO: 955322 - DNA, 15 bp, Homo sapiens
aaaagcctcaacgtg

SEQ ID NO: 955323 - DNA, 15 bp, Homo sapiens
aaagcctcaacgtgc

SEQ ID NO: 955324 - DNA, 15 bp, Homo sapiens
aagcctcaacgtgct

SEQ ID NO: 955325 - DNA, 15 bp, Homo sapiens
agcctcaacgtgctt

SEQ ID NO: 955326 - DNA, 15 bp, Homo sapiens
gcctcaacgtgcttt

SEQ ID NO: 955327 - DNA, 15 bp, Homo sapiens
cctcaacgtgctttt

SEQ ID NO: 955328 - DNA, 15 bp, Homo sapiens
ctcaacgtgcttttc

SEQ ID NO: 955329 - DNA, 15 bp, Homo sapiens
tcaacgtgcttttct

SEQ ID NO: 955330 - DNA, 15 bp, Homo sapiens
caacgtgcttttctt

SEQ ID NO: 955331 - DNA, 15 bp, Homo sapiens
aacgtgcttttcttc

SEQ ID NO: 955332 - DNA, 15 bp, Homo sapiens
acgtgcttttcttca

SEQ ID NO: 955333 - DNA, 15 bp, Homo sapiens
cgtgcttttcttcag

SEQ ID NO: 955334 - DNA, 15 bp, Homo sapiens
gtgcttttcttcagg

SEQ ID NO: 955335 - DNA, 15 bp, Homo sapiens
tgcttttcttcaggg

SEQ ID NO: 955336 - DNA, 15 bp, Homo sapiens
gcttttcttcagggt

SEQ ID NO: 955337 - DNA, 15 bp, Homo sapiens
cttttcttcagggtg

SEQ ID NO: 955338 - DNA, 15 bp, Homo sapiens
ttttcttcagggtga

SEQ ID NO: 955339 - DNA, 15 bp, Homo sapiens
tttcttcagggtgat

SEQ ID NO: 955340 - DNA, 15 bp, Homo sapiens
ttcttcagggtgata

SEQ ID NO: 955341 - DNA, 15 bp, Homo sapiens
tcttcagggtgatat

SEQ ID NO: 955342 - DNA, 15 bp, Homo sapiens
cttcagggtgatatt

SEQ ID NO: 955343 - DNA, 15 bp, Homo sapiens
ttcagggtgatattt

SEQ ID NO: 955344 - DNA, 15 bp, Homo sapiens
tcagggtgatatttt

SEQ ID NO: 955345 - DNA, 15 bp, Homo sapiens
cagggtgatattttg

SEQ ID NO: 955346 - DNA, 15 bp, Homo sapiens
agggtgatattttgc

SEQ ID NO: 955347 - DNA, 15 bp, Homo sapiens
gggtgatattttgct

SEQ ID NO: 955348 - DNA, 15 bp, Homo sapiens
ggtgatattttgcta

SEQ ID NO: 955349 - DNA, 15 bp, Homo sapiens
gtgatattttgctac

SEQ ID NO: 955350 - DNA, 15 bp, Homo sapiens
tgatattttgctaca

SEQ ID NO: 955351 - DNA, 15 bp, Homo sapiens
gatattttgctacag

SEQ ID NO: 955352 - DNA, 15 bp, Homo sapiens
atattttgctacagg

SEQ ID NO: 955353 - DNA, 15 bp, Homo sapiens
tattttgctacagga

SEQ ID NO: 955354 - DNA, 15 bp, Homo sapiens
attttgctacaggag

SEQ ID NO: 955355 - DNA, 15 bp, Homo sapiens
ttttgctacaggaga

SEQ ID NO: 955356 - DNA, 15 bp, Homo sapiens
tttgctacaggagat

SEQ ID NO: 955357 - DNA, 15 bp, Homo sapiens
ttgctacaggagatc

SEQ ID NO: 955358 - DNA, 15 bp, Homo sapiens
tgctacaggagatca

SEQ ID NO: 955359 - DNA, 15 bp, Homo sapiens
gctacaggagatcaa

SEQ ID NO: 955360 - DNA, 15 bp, Homo sapiens
ctacaggagatcaag

SEQ ID NO: 955361 - DNA, 15 bp, Homo sapiens
tacaggagatcaaga

SEQ ID NO: 955362 - DNA, 15 bp, Homo sapiens
acaggagatcaagac

SEQ ID NO: 955363 - DNA, 15 bp, Homo sapiens
caggagatcaagaca

SEQ ID NO: 955364 - DNA, 15 bp, Homo sapiens
aggagatcaagacag

SEQ ID NO: 955365 - DNA, 15 bp, Homo sapiens
ggagatcaagacaga

SEQ ID NO: 955366 - DNA, 15 bp, Homo sapiens
gagatcaagacagag

SEQ ID NO: 955367 - DNA, 15 bp, Homo sapiens
agatcaagacagaga

SEQ ID NO: 955368 - DNA, 15 bp, Homo sapiens
gatcaagacagagac

SEQ ID NO: 955369 - DNA, 15 bp, Homo sapiens
atcaagacagagaca

SEQ ID NO: 955370 - DNA, 15 bp, Homo sapiens
tcaagacagagacaa

SEQ ID NO: 955371 - DNA, 15 bp, Homo sapiens
caagacagagacaac

SEQ ID NO: 955372 - DNA, 15 bp, Homo sapiens
aagacagagacaaca

SEQ ID NO: 955373 - DNA, 15 bp, Homo sapiens
agacagagacaacag

SEQ ID NO: 955374 - DNA, 15 bp, Homo sapiens
gacagagacaacaga

SEQ ID NO: 955375 - DNA, 15 bp, Homo sapiens
acagagacaacagag

SEQ ID NO: 955376 - DNA, 15 bp, Homo sapiens
cagagacaacagagg

SEQ ID NO: 955377 - DNA, 15 bp, Homo sapiens
agagacaacagaggc

SEQ ID NO: 955378 - DNA, 15 bp, Homo sapiens
gagacaacagaggca

SEQ ID NO: 955379 - DNA, 15 bp, Homo sapiens
agacaacagaggcat

SEQ ID NO: 955380 - DNA, 15 bp, Homo sapiens
gacaacagaggcatt

SEQ ID NO: 955381 - DNA, 15 bp, Homo sapiens
acaacagaggcatta

SEQ ID NO: 955382 - DNA, 15 bp, Homo sapiens
caacagaggcattac

SEQ ID NO: 955383 - DNA, 15 bp, Homo sapiens
aacagaggcattact

SEQ ID NO: 955384 - DNA, 15 bp, Homo sapiens
acagaggcattacta

SEQ ID NO: 955385 - DNA, 15 bp, Homo sapiens
cagaggcattactaa

SEQ ID NO: 955386 - DNA, 15 bp, Homo sapiens
agaggcattactaag

SEQ ID NO: 955387 - DNA, 15 bp, Homo sapiens
gaggcattactaagc

SEQ ID NO: 955388 - DNA, 15 bp, Homo sapiens
aggcattactaagcg

SEQ ID NO: 955389 - DNA, 15 bp, Homo sapiens
ggcattactaagcgt

SEQ ID NO: 955390 - DNA, 15 bp, Homo sapiens
gcattactaagcgtt

SEQ ID NO: 955391 - DNA, 15 bp, Homo sapiens
cattactaagcgttg

SEQ ID NO: 955392 - DNA, 15 bp, Homo sapiens
attactaagcgttga

SEQ ID NO: 955393 - DNA, 15 bp, Homo sapiens
ttactaagcgttgaa

SEQ ID NO: 955394 - DNA, 15 bp, Homo sapiens
tactaagcgttgaaa

SEQ ID NO: 955395 - DNA, 15 bp, Homo sapiens
actaagcgttgaaag

SEQ ID NO: 955396 - DNA, 15 bp, Homo sapiens
ctaagcgttgaaagc

SEQ ID NO: 955397 - DNA, 15 bp, Homo sapiens
taagcgttgaaagct

SEQ ID NO: 955398 - DNA, 15 bp, Homo sapiens
aagcgttgaaagctc

SEQ ID NO: 955399 - DNA, 15 bp, Homo sapiens
agcgttgaaagctca

SEQ ID NO: 955400 - DNA, 15 bp, Homo sapiens
gcgttgaaagctcat

SEQ ID NO: 955401 - DNA, 15 bp, Homo sapiens
cgttgaaagctcata

SEQ ID NO: 955402 - DNA, 15 bp, Homo sapiens
gttgaaagctcatag

SEQ ID NO: 955403 - DNA, 15 bp, Homo sapiens
ttgaaagctcatagt

SEQ ID NO: 955404 - DNA, 15 bp, Homo sapiens
tgaaagctcatagtg

SEQ ID NO: 955405 - DNA, 15 bp, Homo sapiens
gaaagctcatagtga

SEQ ID NO: 955406 - DNA, 15 bp, Homo sapiens
aaagctcatagtgag

SEQ ID NO: 955407 - DNA, 15 bp, Homo sapiens
aagctcatagtgagg

SEQ ID NO: 955408 - DNA, 15 bp, Homo sapiens
agctcatagtgaggc

SEQ ID NO: 955409 - DNA, 15 bp, Homo sapiens
gctcatagtgaggcc

SEQ ID NO: 955410 - DNA, 15 bp, Homo sapiens
ctcatagtgaggccc

SEQ ID NO: 955411 - DNA, 15 bp, Homo sapiens
tcatagtgaggccca

SEQ ID NO: 955412 - DNA, 15 bp, Homo sapiens
catagtgaggcccaa

SEQ ID NO: 955413 - DNA, 15 bp, Homo sapiens
atagtgaggcccaat

SEQ ID NO: 955414 - DNA, 15 bp, Homo sapiens
tagtgaggcccaata

SEQ ID NO: 955415 - DNA, 15 bp, Homo sapiens
agtgaggcccaatac

SEQ ID NO: 955416 - DNA, 15 bp, Homo sapiens
gtgaggcccaataca

SEQ ID NO: 955417 - DNA, 15 bp, Homo sapiens
tgaggcccaatacat

SEQ ID NO: 955418 - DNA, 15 bp, Homo sapiens
gaggcccaatacatt

SEQ ID NO: 955419 - DNA, 15 bp, Homo sapiens
aggcccaatacattt

SEQ ID NO: 955420 - DNA, 15 bp, Homo sapiens
ggcccaatacatttt

SEQ ID NO: 955421 - DNA, 15 bp, Homo sapiens
gcccaatacattttt

SEQ ID NO: 955422 - DNA, 15 bp, Homo sapiens
cccaatacatttttg

SEQ ID NO: 955423 - DNA, 15 bp, Homo sapiens
ccaatacatttttgt

SEQ ID NO: 955424 - DNA, 15 bp, Homo sapiens
caatacatttttgtt

SEQ ID NO: 955425 - DNA, 15 bp, Homo sapiens
aatacatttttgttc

SEQ ID NO: 955426 - DNA, 15 bp, Homo sapiens
atacatttttgttca

SEQ ID NO: 955427 - DNA, 15 bp, Homo sapiens
tacatttttgttcaa

SEQ ID NO: 955428 - DNA, 15 bp, Homo sapiens
acatttttgttcaat

SEQ ID NO: 955429 - DNA, 15 bp, Homo sapiens
catttttgttcaatg

SEQ ID NO: 955430 - DNA, 15 bp, Homo sapiens
atttttgttcaatgg

SEQ ID NO: 955431 - DNA, 15 bp, Homo sapiens
tttttgttcaatgga

SEQ ID NO: 955432 - DNA, 15 bp, Homo sapiens
ttttgttcaatggac

SEQ ID NO: 955433 - DNA, 15 bp, Homo sapiens
tttgttcaatggaca

SEQ ID NO: 955434 - DNA, 15 bp, Homo sapiens
ttgttcaatggacaa

SEQ ID NO: 955435 - DNA, 15 bp, Homo sapiens
tgttcaatggacaaa

SEQ ID NO: 955436 - DNA, 15 bp, Homo sapiens
gttcaatggacaaac

SEQ ID NO: 955437 - DNA, 15 bp, Homo sapiens
ttcaatggacaaacg

SEQ ID NO: 955438 - DNA, 15 bp, Homo sapiens
tcaatggacaaacgg

SEQ ID NO: 955439 - DNA, 15 bp, Homo sapiens
caatggacaaacgga

SEQ ID NO: 955440 - DNA, 15 bp, Homo sapiens
aatggacaaacggat

SEQ ID NO: 955441 - DNA, 15 bp, Homo sapiens
atggacaaacggatt

SEQ ID NO: 955442 - DNA, 15 bp, Homo sapiens
tggacaaacggattc

SEQ ID NO: 955443 - DNA, 15 bp, Homo sapiens
ggacaaacggattca

SEQ ID NO: 955444 - DNA, 15 bp, Homo sapiens
gacaaacggattcat

SEQ ID NO: 955445 - DNA, 15 bp, Homo sapiens
acaaacggattcata

SEQ ID NO: 955446 - DNA, 15 bp, Homo sapiens
caaacggattcatac

SEQ ID NO: 955447 - DNA, 15 bp, Homo sapiens
aaacggattcatact

SEQ ID NO: 955448 - DNA, 15 bp, Homo sapiens
aacggattcatactg

SEQ ID NO: 955449 - DNA, 15 bp, Homo sapiens
acggattcatactgt

SEQ ID NO: 955450 - DNA, 15 bp, Homo sapiens
cggattcatactgtc

SEQ ID NO: 955451 - DNA, 15 bp, Homo sapiens
ggattcatactgtcc

SEQ ID NO: 955452 - DNA, 15 bp, Homo sapiens
gattcatactgtcca

SEQ ID NO: 955453 - DNA, 15 bp, Homo sapiens
attcatactgtccaa

SEQ ID NO: 955454 - DNA, 15 bp, Homo sapiens
ttcatactgtccaag

SEQ ID NO: 955455 - DNA, 15 bp, Homo sapiens
tcatactgtccaaga

SEQ ID NO: 955456 - DNA, 15 bp, Homo sapiens
catactgtccaagag

SEQ ID NO: 955457 - DNA, 15 bp, Homo sapiens
atactgtccaagagt

SEQ ID NO: 955458 - DNA, 15 bp, Homo sapiens
tactgtccaagagtc

SEQ ID NO: 955459 - DNA, 15 bp, Homo sapiens
actgtccaagagtcc

SEQ ID NO: 955460 - DNA, 15 bp, Homo sapiens
ctgtccaagagtcca

SEQ ID NO: 955461 - DNA, 15 bp, Homo sapiens
tgtccaagagtccaa

SEQ ID NO: 955462 - DNA, 15 bp, Homo sapiens
gtccaagagtccaag

SEQ ID NO: 955463 - DNA, 15 bp, Homo sapiens
tccaagagtccaaga

SEQ ID NO: 955464 - DNA, 15 bp, Homo sapiens
ccaagagtccaagaa

SEQ ID NO: 955465 - DNA, 15 bp, Homo sapiens
caagagtccaagaac

SEQ ID NO: 955466 - DNA, 15 bp, Homo sapiens
aagagtccaagaacc

SEQ ID NO: 955467 - DNA, 15 bp, Homo sapiens
agagtccaagaacct

SEQ ID NO: 955468 - DNA, 15 bp, Homo sapiens
gagtccaagaacctg

SEQ ID NO: 955469 - DNA, 15 bp, Homo sapiens
agtccaagaacctgc

SEQ ID NO: 955470 - DNA, 15 bp, Homo sapiens
gtccaagaacctgca

SEQ ID NO: 955471 - DNA, 15 bp, Homo sapiens
tccaagaacctgcat

SEQ ID NO: 955472 - DNA, 15 bp, Homo sapiens
ccaagaacctgcatg

SEQ ID NO: 955473 - DNA, 15 bp, Homo sapiens
caagaacctgcatgt

SEQ ID NO: 955474 - DNA, 15 bp, Homo sapiens
aagaacctgcatgta

SEQ ID NO: 955475 - DNA, 15 bp, Homo sapiens
agaacctgcatgtag

SEQ ID NO: 955476 - DNA, 15 bp, Homo sapiens
gaacctgcatgtagg

SEQ ID NO: 955477 - DNA, 15 bp, Homo sapiens
aacctgcatgtaggg

SEQ ID NO: 955478 - DNA, 15 bp, Homo sapiens
acctgcatgtaggga

SEQ ID NO: 955479 - DNA, 15 bp, Homo sapiens
cctgcatgtagggag

SEQ ID NO: 955480 - DNA, 15 bp, Homo sapiens
ctgcatgtagggagg

SEQ ID NO: 955481 - DNA, 15 bp, Homo sapiens
tgcatgtagggagga

SEQ ID NO: 955482 - DNA, 15 bp, Homo sapiens
gcatgtagggaggag

SEQ ID NO: 955483 - DNA, 15 bp, Homo sapiens
catgtagggaggagt

SEQ ID NO: 955484 - DNA, 15 bp, Homo sapiens
atgtagggaggagtc

SEQ ID NO: 955485 - DNA, 15 bp, Homo sapiens
tgtagggaggagtca

SEQ ID NO: 955486 - DNA, 15 bp, Homo sapiens
gtagggaggagtcat

SEQ ID NO: 955487 - DNA, 15 bp, Homo sapiens
tagggaggagtcata

SEQ ID NO: 955488 - DNA, 15 bp, Homo sapiens
agggaggagtcatat

SEQ ID NO: 955489 - DNA, 15 bp, Homo sapiens
gggaggagtcatatt

SEQ ID NO: 955490 - DNA, 15 bp, Homo sapiens
ggaggagtcatattc

SEQ ID NO: 955491 - DNA, 15 bp, Homo sapiens
gaggagtcatattcc

SEQ ID NO: 955492 - DNA, 15 bp, Homo sapiens
aggagtcatattcct

SEQ ID NO: 955493 - DNA, 15 bp, Homo sapiens
ggagtcatattcctt

SEQ ID NO: 955494 - DNA, 15 bp, Homo sapiens
gagtcatattcctta

SEQ ID NO: 955495 - DNA, 15 bp, Homo sapiens
agtcatattccttat

SEQ ID NO: 955496 - DNA, 15 bp, Homo sapiens
gtcatattccttatg

SEQ ID NO: 955497 - DNA, 15 bp, Homo sapiens
tcatattccttatga

SEQ ID NO: 955498 - DNA, 15 bp, Homo sapiens
catattccttatgaa

SEQ ID NO: 955499 - DNA, 15 bp, Homo sapiens
atattccttatgaag

SEQ ID NO: 955500 - DNA, 15 bp, Homo sapiens
tattccttatgaagt

SEQ ID NO: 955501 - DNA, 15 bp, Homo sapiens
attccttatgaagtt

SEQ ID NO: 955502 - DNA, 15 bp, Homo sapiens
ttccttatgaagttg

SEQ ID NO: 955503 - DNA, 15 bp, Homo sapiens
tccttatgaagttgg

SEQ ID NO: 955504 - DNA, 15 bp, Homo sapiens
ccttatgaagttggt

SEQ ID NO: 955505 - DNA, 15 bp, Homo sapiens
cttatgaagttggtc

SEQ ID NO: 955506 - DNA, 15 bp, Homo sapiens
ttatgaagttggtca

SEQ ID NO: 955507 - DNA, 15 bp, Homo sapiens
tatgaagttggtcac

SEQ ID NO: 955508 - DNA, 15 bp, Homo sapiens
atgaagttggtcact

SEQ ID NO: 955509 - DNA, 15 bp, Homo sapiens
tgaagttggtcactg

SEQ ID NO: 955510 - DNA, 15 bp, Homo sapiens
gaagttggtcactga

SEQ ID NO: 955511 - DNA, 15 bp, Homo sapiens
aagttggtcactgac

SEQ ID NO: 955512 - DNA, 15 bp, Homo sapiens
agttggtcactgact

SEQ ID NO: 955513 - DNA, 15 bp, Homo sapiens
gttggtcactgactc

SEQ ID NO: 955514 - DNA, 15 bp, Homo sapiens
ttggtcactgactct

SEQ ID NO: 955515 - DNA, 15 bp, Homo sapiens
tggtcactgactctc

SEQ ID NO: 955516 - DNA, 15 bp, Homo sapiens
ggtcactgactctcc

SEQ ID NO: 955517 - DNA, 15 bp, Homo sapiens
gtcactgactctcct

SEQ ID NO: 955518 - DNA, 15 bp, Homo sapiens
tcactgactctcctg

SEQ ID NO: 955519 - DNA, 15 bp, Homo sapiens
cactgactctcctgc

SEQ ID NO: 955520 - DNA, 15 bp, Homo sapiens
actgactctcctgca

SEQ ID NO: 955521 - DNA, 15 bp, Homo sapiens
ctgactctcctgcaa

SEQ ID NO: 955522 - DNA, 15 bp, Homo sapiens
tgactctcctgcaat

SEQ ID NO: 955523 - DNA, 15 bp, Homo sapiens
gactctcctgcaatg

SEQ ID NO: 955524 - DNA, 15 bp, Homo sapiens
actctcctgcaatgt

SEQ ID NO: 955525 - DNA, 15 bp, Homo sapiens
ctctcctgcaatgtc

SEQ ID NO: 955526 - DNA, 15 bp, Homo sapiens
tctcctgcaatgtca

SEQ ID NO: 955527 - DNA, 15 bp, Homo sapiens
ctcctgcaatgtcat

SEQ ID NO: 955528 - DNA, 15 bp, Homo sapiens
tcctgcaatgtcata

SEQ ID NO: 955529 - DNA, 15 bp, Homo sapiens
cctgcaatgtcatat

SEQ ID NO: 955530 - DNA, 15 bp, Homo sapiens
ctgcaatgtcatata

SEQ ID NO: 955531 - DNA, 15 bp, Homo sapiens
tgcaatgtcatataa

SEQ ID NO: 955532 - DNA, 15 bp, Homo sapiens
gcaatgtcatataac

SEQ ID NO: 955533 - DNA, 15 bp, Homo sapiens
caatgtcatataact

SEQ ID NO: 955534 - DNA, 15 bp, Homo sapiens
aatgtcatataacta

SEQ ID NO: 955535 - DNA, 15 bp, Homo sapiens
atgtcatataactaa

SEQ ID NO: 955536 - DNA, 15 bp, Homo sapiens
tgtcatataactaag

SEQ ID NO: 955537 - DNA, 15 bp, Homo sapiens
gtcatataactaaga

SEQ ID NO: 955538 - DNA, 15 bp, Homo sapiens
tcatataactaagaa

SEQ ID NO: 955539 - DNA, 15 bp, Homo sapiens
catataactaagaat

SEQ ID NO: 955540 - DNA, 15 bp, Homo sapiens
atataactaagaatt

SEQ ID NO: 955541 - DNA, 15 bp, Homo sapiens
tataactaagaattc

SEQ ID NO: 955542 - DNA, 15 bp, Homo sapiens
ataactaagaattct

SEQ ID NO: 955543 - DNA, 15 bp, Homo sapiens
taactaagaattctc

SEQ ID NO: 955544 - DNA, 15 bp, Homo sapiens
aactaagaattctct

SEQ ID NO: 955545 - DNA, 15 bp, Homo sapiens
actaagaattctctt

SEQ ID NO: 955546 - DNA, 15 bp, Homo sapiens
ctaagaattctcttc

SEQ ID NO: 955547 - DNA, 15 bp, Homo sapiens
taagaattctcttcc

SEQ ID NO: 955548 - DNA, 15 bp, Homo sapiens
aagaattctcttcca

SEQ ID NO: 955549 - DNA, 15 bp, Homo sapiens
agaattctcttccac

SEQ ID NO: 955550 - DNA, 15 bp, Homo sapiens
gaattctcttccaca

SEQ ID NO: 955551 - DNA, 15 bp, Homo sapiens
aattctcttccacat

SEQ ID NO: 955552 - DNA, 15 bp, Homo sapiens
attctcttccacatc

SEQ ID NO: 955553 - DNA, 15 bp, Homo sapiens
ttctcttccacatcc

SEQ ID NO: 955554 - DNA, 15 bp, Homo sapiens
tctcttccacatcct

SEQ ID NO: 955555 - DNA, 15 bp, Homo sapiens
ctcttccacatcctt

SEQ ID NO: 955556 - DNA, 15 bp, Homo sapiens
tcttccacatccttg

SEQ ID NO: 955557 - DNA, 15 bp, Homo sapiens
cttccacatccttgc

SEQ ID NO: 955558 - DNA, 15 bp, Homo sapiens
ttccacatccttgct

SEQ ID NO: 955559 - DNA, 15 bp, Homo sapiens
tccacatccttgctt

SEQ ID NO: 955560 - DNA, 15 bp, Homo sapiens
ccacatccttgctta

SEQ ID NO: 955561 - DNA, 15 bp, Homo sapiens
cacatccttgcttaa

SEQ ID NO: 955562 - DNA, 15 bp, Homo sapiens
acatccttgcttaat

SEQ ID NO: 955563 - DNA, 15 bp, Homo sapiens
catccttgcttaatg

SEQ ID NO: 955564 - DNA, 15 bp, Homo sapiens
atccttgcttaatga

SEQ ID NO: 955565 - DNA, 15 bp, Homo sapiens
tccttgcttaatgac

SEQ ID NO: 955566 - DNA, 15 bp, Homo sapiens
ccttgcttaatgact

SEQ ID NO: 955567 - DNA, 15 bp, Homo sapiens
cttgcttaatgactg

SEQ ID NO: 955568 - DNA, 15 bp, Homo sapiens
ttgcttaatgactgg

SEQ ID NO: 955569 - DNA, 15 bp, Homo sapiens
tgcttaatgactgga

SEQ ID NO: 955570 - DNA, 15 bp, Homo sapiens
gcttaatgactggaa

SEQ ID NO: 955571 - DNA, 15 bp, Homo sapiens
cttaatgactggaaa

SEQ ID NO: 955572 - DNA, 15 bp, Homo sapiens
ttaatgactggaaat

SEQ ID NO: 955573 - DNA, 15 bp, Homo sapiens
taatgactggaaatg

SEQ ID NO: 955574 - DNA, 15 bp, Homo sapiens
aatgactggaaatgg

SEQ ID NO: 955575 - DNA, 15 bp, Homo sapiens
atgactggaaatggc

SEQ ID NO: 955576 - DNA, 15 bp, Homo sapiens
tgactggaaatggcc

SEQ ID NO: 955577 - DNA, 15 bp, Homo sapiens
gactggaaatggcca

SEQ ID NO: 955578 - DNA, 15 bp, Homo sapiens
actggaaatggccat

SEQ ID NO: 955579 - DNA, 15 bp, Homo sapiens
ctggaaatggccatt

SEQ ID NO: 955580 - DNA, 15 bp, Homo sapiens
tggaaatggccattt

SEQ ID NO: 955581 - DNA, 15 bp, Homo sapiens
ggaaatggccatttc

SEQ ID NO: 955582 - DNA, 15 bp, Homo sapiens
gaaatggccatttca

SEQ ID NO: 955583 - DNA, 15 bp, Homo sapiens
aaatggccatttcac

SEQ ID NO: 955584 - DNA, 15 bp, Homo sapiens
aatggccatttcact

SEQ ID NO: 955585 - DNA, 15 bp, Homo sapiens
atggccatttcactg

SEQ ID NO: 955586 - DNA, 15 bp, Homo sapiens
tggccatttcactgt

SEQ ID NO: 955587 - DNA, 15 bp, Homo sapiens
ggccatttcactgtg

SEQ ID NO: 955588 - DNA, 15 bp, Homo sapiens
gccatttcactgtgg

SEQ ID NO: 955589 - DNA, 15 bp, Homo sapiens
ccatttcactgtggc

SEQ ID NO: 955590 - DNA, 15 bp, Homo sapiens
catttcactgtggcc

SEQ ID NO: 955591 - DNA, 15 bp, Homo sapiens
atttcactgtggccc

SEQ ID NO: 955592 - DNA, 15 bp, Homo sapiens
tttcactgtggccct

SEQ ID NO: 955593 - DNA, 15 bp, Homo sapiens
ttcactgtggccctc

SEQ ID NO: 955594 - DNA, 15 bp, Homo sapiens
tcactgtggccctcc

SEQ ID NO: 955595 - DNA, 15 bp, Homo sapiens
cactgtggccctcca

SEQ ID NO: 955596 - DNA, 15 bp, Homo sapiens
actgtggccctccaa

SEQ ID NO: 955597 - DNA, 15 bp, Homo sapiens
ctgtggccctccaat

SEQ ID NO: 955598 - DNA, 15 bp, Homo sapiens
tgtggccctccaatc

SEQ ID NO: 955599 - DNA, 15 bp, Homo sapiens
gtggccctccaatca

SEQ ID NO: 955600 - DNA, 15 bp, Homo sapiens
tggccctccaatcaa

SEQ ID NO: 955601 - DNA, 15 bp, Homo sapiens
ggccctccaatcaac

SEQ ID NO: 955602 - DNA, 15 bp, Homo sapiens
gccctccaatcaacc

SEQ ID NO: 955603 - DNA, 15 bp, Homo sapiens
ccctccaatcaaccc

SEQ ID NO: 955604 - DNA, 15 bp, Homo sapiens
cctccaatcaaccct

SEQ ID NO: 955605 - DNA, 15 bp, Homo sapiens
ctccaatcaaccctt

SEQ ID NO: 955606 - DNA, 15 bp, Homo sapiens
tccaatcaacccttt

SEQ ID NO: 955607 - DNA, 15 bp, Homo sapiens
ccaatcaaccctttc

SEQ ID NO: 955608 - DNA, 15 bp, Homo sapiens
caatcaaccctttcc

SEQ ID NO: 955609 - DNA, 15 bp, Homo sapiens
aatcaaccctttccc

SEQ ID NO: 955610 - DNA, 15 bp, Homo sapiens
atcaaccctttccca

SEQ ID NO: 955611 - DNA, 15 bp, Homo sapiens
tcaaccctttcccat

SEQ ID NO: 955612 - DNA, 15 bp, Homo sapiens
caaccctttcccatg

SEQ ID NO: 955613 - DNA, 15 bp, Homo sapiens
aaccctttcccatga

SEQ ID NO: 955614 - DNA, 15 bp, Homo sapiens
accctttcccatgag

SEQ ID NO: 955615 - DNA, 15 bp, Homo sapiens
ccctttcccatgagc

SEQ ID NO: 955616 - DNA, 15 bp, Homo sapiens
cctttcccatgagct

SEQ ID NO: 955617 - DNA, 15 bp, Homo sapiens
ctttcccatgagcta

SEQ ID NO: 955618 - DNA, 15 bp, Homo sapiens
tttcccatgagctat

SEQ ID NO: 955619 - DNA, 15 bp, Homo sapiens
ttcccatgagctatg

SEQ ID NO: 955620 - DNA, 15 bp, Homo sapiens
tcccatgagctatgt

SEQ ID NO: 955621 - DNA, 15 bp, Homo sapiens
cccatgagctatgta

SEQ ID NO: 955622 - DNA, 15 bp, Homo sapiens
ccatgagctatgtaa

SEQ ID NO: 955623 - DNA, 15 bp, Homo sapiens
catgagctatgtaat

SEQ ID NO: 955624 - DNA, 15 bp, Homo sapiens
atgagctatgtaata

SEQ ID NO: 955625 - DNA, 15 bp, Homo sapiens
tgagctatgtaatat

SEQ ID NO: 955626 - DNA, 15 bp, Homo sapiens
gagctatgtaatatt

SEQ ID NO: 955627 - DNA, 15 bp, Homo sapiens
agctatgtaatattt

SEQ ID NO: 955628 - DNA, 15 bp, Homo sapiens
gctatgtaatatttt

SEQ ID NO: 955629 - DNA, 15 bp, Homo sapiens
ctatgtaatatttta

SEQ ID NO: 955630 - DNA, 15 bp, Homo sapiens
tatgtaatattttac

SEQ ID NO: 955631 - DNA, 15 bp, Homo sapiens
atgtaatattttacc

SEQ ID NO: 955632 - DNA, 15 bp, Homo sapiens
tgtaatattttacca

SEQ ID NO: 955633 - DNA, 15 bp, Homo sapiens
gtaatattttaccac

SEQ ID NO: 955634 - DNA, 15 bp, Homo sapiens
taatattttaccacc

SEQ ID NO: 955635 - DNA, 15 bp, Homo sapiens
aatattttaccacct

SEQ ID NO: 955636 - DNA, 15 bp, Homo sapiens
atattttaccacctt

SEQ ID NO: 955637 - DNA, 15 bp, Homo sapiens
tattttaccaccttc

SEQ ID NO: 955638 - DNA, 15 bp, Homo sapiens
attttaccaccttct

SEQ ID NO: 955639 - DNA, 15 bp, Homo sapiens
ttttaccaccttcta

SEQ ID NO: 955640 - DNA, 15 bp, Homo sapiens
tttaccaccttctaa

SEQ ID NO: 955641 - DNA, 15 bp, Homo sapiens
ttaccaccttctaag

SEQ ID NO: 955642 - DNA, 15 bp, Homo sapiens
taccaccttctaaga

SEQ ID NO: 955643 - DNA, 15 bp, Homo sapiens
accaccttctaagat

SEQ ID NO: 955644 - DNA, 15 bp, Homo sapiens
ccaccttctaagatt

SEQ ID NO: 955645 - DNA, 15 bp, Homo sapiens
caccttctaagattg

SEQ ID NO: 955646 - DNA, 15 bp, Homo sapiens
accttctaagattga

SEQ ID NO: 955647 - DNA, 15 bp, Homo sapiens
ccttctaagattgaa

SEQ ID NO: 955648 - DNA, 15 bp, Homo sapiens
cttctaagattgaaa

SEQ ID NO: 955649 - DNA, 15 bp, Homo sapiens
ttctaagattgaaac

SEQ ID NO: 955650 - DNA, 15 bp, Homo sapiens
tctaagattgaaact

SEQ ID NO: 955651 - DNA, 15 bp, Homo sapiens
ctaagattgaaactg

SEQ ID NO: 955652 - DNA, 15 bp, Homo sapiens
taagattgaaactgc

SEQ ID NO: 955653 - DNA, 15 bp, Homo sapiens
aagattgaaactgcc

SEQ ID NO: 955654 - DNA, 15 bp, Homo sapiens
agattgaaactgccc

SEQ ID NO: 955655 - DNA, 15 bp, Homo sapiens
gattgaaactgccca

SEQ ID NO: 955656 - DNA, 15 bp, Homo sapiens
attgaaactgcccac

SEQ ID NO: 955657 - DNA, 15 bp, Homo sapiens
ttgaaactgcccact

SEQ ID NO: 955658 - DNA, 15 bp, Homo sapiens
tgaaactgcccacta

SEQ ID NO: 955659 - DNA, 15 bp, Homo sapiens
gaaactgcccactaa

SEQ ID NO: 955660 - DNA, 15 bp, Homo sapiens
aaactgcccactaat

SEQ ID NO: 955661 - DNA, 15 bp, Homo sapiens
aactgcccactaata

SEQ ID NO: 955662 - DNA, 15 bp, Homo sapiens
actgcccactaataa

SEQ ID NO: 955663 - DNA, 15 bp, Homo sapiens
ctgcccactaataac

SEQ ID NO: 955664 - DNA, 15 bp, Homo sapiens
tgcccactaataact

SEQ ID NO: 955665 - DNA, 15 bp, Homo sapiens
gcccactaataactt

SEQ ID NO: 955666 - DNA, 15 bp, Homo sapiens
cccactaataacttc

SEQ ID NO: 955667 - DNA, 15 bp, Homo sapiens
ccactaataacttca

SEQ ID NO: 955668 - DNA, 15 bp, Homo sapiens
cactaataacttcag

SEQ ID NO: 955669 - DNA, 15 bp, Homo sapiens
actaataacttcagc

SEQ ID NO: 955670 - DNA, 15 bp, Homo sapiens
ctaataacttcagcc

SEQ ID NO: 955671 - DNA, 15 bp, Homo sapiens
taataacttcagcct

SEQ ID NO: 955672 - DNA, 15 bp, Homo sapiens
aataacttcagcctg

SEQ ID NO: 955673 - DNA, 15 bp, Homo sapiens
ataacttcagcctga

SEQ ID NO: 955674 - DNA, 15 bp, Homo sapiens
taacttcagcctgaa

SEQ ID NO: 955675 - DNA, 15 bp, Homo sapiens
aacttcagcctgaag

SEQ ID NO: 955676 - DNA, 15 bp, Homo sapiens
acttcagcctgaagc

SEQ ID NO: 955677 - DNA, 15 bp, Homo sapiens
cttcagcctgaagct

SEQ ID NO: 955678 - DNA, 15 bp, Homo sapiens
ttcagcctgaagcta

SEQ ID NO: 955679 - DNA, 15 bp, Homo sapiens
tcagcctgaagctat

SEQ ID NO: 955680 - DNA, 15 bp, Homo sapiens
cagcctgaagctatt

SEQ ID NO: 955681 - DNA, 15 bp, Homo sapiens
agcctgaagctattt

SEQ ID NO: 955682 - DNA, 15 bp, Homo sapiens
gcctgaagctatttc

SEQ ID NO: 955683 - DNA, 15 bp, Homo sapiens
cctgaagctatttca

SEQ ID NO: 955684 - DNA, 15 bp, Homo sapiens
ctgaagctatttcat

SEQ ID NO: 955685 - DNA, 15 bp, Homo sapiens
tgaagctatttcata

SEQ ID NO: 955686 - DNA, 15 bp, Homo sapiens
gaagctatttcataa

SEQ ID NO: 955687 - DNA, 15 bp, Homo sapiens
aagctatttcataat

SEQ ID NO: 955688 - DNA, 15 bp, Homo sapiens
agctatttcataatt

SEQ ID NO: 955689 - DNA, 15 bp, Homo sapiens
gctatttcataatta

SEQ ID NO: 955690 - DNA, 15 bp, Homo sapiens
ctatttcataattaa

SEQ ID NO: 955691 - DNA, 15 bp, Homo sapiens
tatttcataattaaa

SEQ ID NO: 955692 - DNA, 15 bp, Homo sapiens
atttcataattaaaa

SEQ ID NO: 955693 - DNA, 15 bp, Homo sapiens
tttcataattaaaaa

SEQ ID NO: 955694 - DNA, 15 bp, Homo sapiens
ttcataattaaaaac

SEQ ID NO: 955695 - DNA, 15 bp, Homo sapiens
tcataattaaaaact

SEQ ID NO: 955696 - DNA, 15 bp, Homo sapiens
cataattaaaaactg

SEQ ID NO: 955697 - DNA, 15 bp, Homo sapiens
ataattaaaaactgt

SEQ ID NO: 955698 - DNA, 15 bp, Homo sapiens
taattaaaaactgtt

SEQ ID NO: 955699 - DNA, 15 bp, Homo sapiens
aattaaaaactgtta

SEQ ID NO: 955700 - DNA, 15 bp, Homo sapiens
attaaaaactgttaa

SEQ ID NO: 955701 - DNA, 15 bp, Homo sapiens
ttaaaaactgttaag

SEQ ID NO: 955702 - DNA, 15 bp, Homo sapiens
taaaaactgttaagt

SEQ ID NO: 955703 - DNA, 15 bp, Homo sapiens
aaaaactgttaagta

SEQ ID NO: 955704 - DNA, 15 bp, Homo sapiens
aaaactgttaagtat

SEQ ID NO: 955705 - DNA, 15 bp, Homo sapiens
aaactgttaagtatt

SEQ ID NO: 955706 - DNA, 15 bp, Homo sapiens
aactgttaagtattt

SEQ ID NO: 955707 - DNA, 15 bp, Homo sapiens
actgttaagtatttg

SEQ ID NO: 955708 - DNA, 15 bp, Homo sapiens
ctgttaagtatttgg

SEQ ID NO: 955709 - DNA, 15 bp, Homo sapiens
tgttaagtatttggt

SEQ ID NO: 955710 - DNA, 15 bp, Homo sapiens
gttaagtatttggta

SEQ ID NO: 955711 - DNA, 15 bp, Homo sapiens
ttaagtatttggtat

SEQ ID NO: 955712 - DNA, 15 bp, Homo sapiens
taagtatttggtatt

SEQ ID NO: 955713 - DNA, 15 bp, Homo sapiens
aagtatttggtattg

SEQ ID NO: 955714 - DNA, 15 bp, Homo sapiens
agtatttggtattgg

SEQ ID NO: 955715 - DNA, 15 bp, Homo sapiens
gtatttggtattggt

SEQ ID NO: 955716 - DNA, 15 bp, Homo sapiens
tatttggtattggtg

SEQ ID NO: 955717 - DNA, 15 bp, Homo sapiens
atttggtattggtga

SEQ ID NO: 955718 - DNA, 15 bp, Homo sapiens
tttggtattggtgac

SEQ ID NO: 955719 - DNA, 15 bp, Homo sapiens
ttggtattggtgaca

SEQ ID NO: 955720 - DNA, 15 bp, Homo sapiens
tggtattggtgacag

SEQ ID NO: 955721 - DNA, 15 bp, Homo sapiens
ggtattggtgacagt

SEQ ID NO: 955722 - DNA, 15 bp, Homo sapiens
gtattggtgacagtg

SEQ ID NO: 955723 - DNA, 15 bp, Homo sapiens
tattggtgacagtgc

SEQ ID NO: 955724 - DNA, 15 bp, Homo sapiens
attggtgacagtgcc

SEQ ID NO: 955725 - DNA, 15 bp, Homo sapiens
ttggtgacagtgcct

SEQ ID NO: 955726 - DNA, 15 bp, Homo sapiens
tggtgacagtgcctt

SEQ ID NO: 955727 - DNA, 15 bp, Homo sapiens
ggtgacagtgccttt

SEQ ID NO: 955728 - DNA, 15 bp, Homo sapiens
gtgacagtgccttta

SEQ ID NO: 955729 - DNA, 15 bp, Homo sapiens
tgacagtgcctttat

SEQ ID NO: 955730 - DNA, 15 bp, Homo sapiens
gacagtgcctttatc

SEQ ID NO: 955731 - DNA, 15 bp, Homo sapiens
acagtgcctttatct

SEQ ID NO: 955732 - DNA, 15 bp, Homo sapiens
cagtgcctttatctt

SEQ ID NO: 955733 - DNA, 15 bp, Homo sapiens
agtgcctttatcttt

SEQ ID NO: 955734 - DNA, 15 bp, Homo sapiens
gtgcctttatctttt

SEQ ID NO: 955735 - DNA, 15 bp, Homo sapiens
tgcctttatcttttt

SEQ ID NO: 955736 - DNA, 15 bp, Homo sapiens
gcctttatctttttc

SEQ ID NO: 955737 - DNA, 15 bp, Homo sapiens
cctttatctttttcc

SEQ ID NO: 955738 - DNA, 15 bp, Homo sapiens
ctttatctttttccc

SEQ ID NO: 955739 - DNA, 15 bp, Homo sapiens
tttatctttttccct

SEQ ID NO: 955740 - DNA, 15 bp, Homo sapiens
ttatctttttccctc

SEQ ID NO: 955741 - DNA, 15 bp, Homo sapiens
tatctttttccctct

SEQ ID NO: 955742 - DNA, 15 bp, Homo sapiens
atctttttccctctt

SEQ ID NO: 955743 - DNA, 15 bp, Homo sapiens
tctttttccctcttc

SEQ ID NO: 955744 - DNA, 15 bp, Homo sapiens
ctttttccctcttcc

SEQ ID NO: 955745 - DNA, 15 bp, Homo sapiens
tttttccctcttcca

SEQ ID NO: 955746 - DNA, 15 bp, Homo sapiens
ttttccctcttccat

SEQ ID NO: 955747 - DNA, 15 bp, Homo sapiens
tttccctcttccata

SEQ ID NO: 955748 - DNA, 15 bp, Homo sapiens
ttccctcttccatat

SEQ ID NO: 955749 - DNA, 15 bp, Homo sapiens
tccctcttccatatt

SEQ ID NO: 955750 - DNA, 15 bp, Homo sapiens
ccctcttccatattc

SEQ ID NO: 955751 - DNA, 15 bp, Homo sapiens
cctcttccatattcc

SEQ ID NO: 955752 - DNA, 15 bp, Homo sapiens
ctcttccatattcct

SEQ ID NO: 955753 - DNA, 15 bp, Homo sapiens
tcttccatattccta

SEQ ID NO: 955754 - DNA, 15 bp, Homo sapiens
cttccatattcctag

SEQ ID NO: 955755 - DNA, 15 bp, Homo sapiens
ttccatattcctagt

SEQ ID NO: 955756 - DNA, 15 bp, Homo sapiens
tccatattcctagtg

SEQ ID NO: 955757 - DNA, 15 bp, Homo sapiens
ccatattcctagtgc

SEQ ID NO: 955758 - DNA, 15 bp, Homo sapiens
catattcctagtgct

SEQ ID NO: 955759 - DNA, 15 bp, Homo sapiens
atattcctagtgctt

SEQ ID NO: 955760 - DNA, 15 bp, Homo sapiens
tattcctagtgcttt

SEQ ID NO: 955761 - DNA, 15 bp, Homo sapiens
attcctagtgctttt

SEQ ID NO: 955762 - DNA, 15 bp, Homo sapiens
ttcctagtgctttta

SEQ ID NO: 955763 - DNA, 15 bp, Homo sapiens
tcctagtgcttttac

SEQ ID NO: 955764 - DNA, 15 bp, Homo sapiens
cctagtgcttttaca

SEQ ID NO: 955765 - DNA, 15 bp, Homo sapiens
ctagtgcttttacac

SEQ ID NO: 955766 - DNA, 15 bp, Homo sapiens
tagtgcttttacaca

SEQ ID NO: 955767 - DNA, 15 bp, Homo sapiens
agtgcttttacacac

SEQ ID NO: 955768 - DNA, 15 bp, Homo sapiens
gtgcttttacacacc

SEQ ID NO: 955769 - DNA, 15 bp, Homo sapiens
tgcttttacacacct

SEQ ID NO: 955770 - DNA, 15 bp, Homo sapiens
gcttttacacaccta

SEQ ID NO: 955771 - DNA, 15 bp, Homo sapiens
cttttacacacctaa

SEQ ID NO: 955772 - DNA, 15 bp, Homo sapiens
ttttacacacctaag

SEQ ID NO: 955773 - DNA, 15 bp, Homo sapiens
tttacacacctaagt

SEQ ID NO: 955774 - DNA, 15 bp, Homo sapiens
ttacacacctaagtg

SEQ ID NO: 955775 - DNA, 15 bp, Homo sapiens
tacacacctaagtgc

SEQ ID NO: 955776 - DNA, 15 bp, Homo sapiens
acacacctaagtgcc

SEQ ID NO: 955777 - DNA, 15 bp, Homo sapiens
cacacctaagtgcca

SEQ ID NO: 955778 - DNA, 15 bp, Homo sapiens
acacctaagtgccac

SEQ ID NO: 955779 - DNA, 15 bp, Homo sapiens
cacctaagtgccacc

SEQ ID NO: 955780 - DNA, 15 bp, Homo sapiens
acctaagtgccacca

SEQ ID NO: 955781 - DNA, 15 bp, Homo sapiens
cctaagtgccaccaa

SEQ ID NO: 955782 - DNA, 15 bp, Homo sapiens
ctaagtgccaccaag

SEQ ID NO: 955783 - DNA, 15 bp, Homo sapiens
taagtgccaccaaga

SEQ ID NO: 955784 - DNA, 15 bp, Homo sapiens
aagtgccaccaagat

SEQ ID NO: 955785 - DNA, 15 bp, Homo sapiens
agtgccaccaagata

SEQ ID NO: 955786 - DNA, 15 bp, Homo sapiens
gtgccaccaagatag

SEQ ID NO: 955787 - DNA, 15 bp, Homo sapiens
tgccaccaagataga

SEQ ID NO: 955788 - DNA, 15 bp, Homo sapiens
gccaccaagatagaa

SEQ ID NO: 955789 - DNA, 15 bp, Homo sapiens
ccaccaagatagaaa

SEQ ID NO: 955790 - DNA, 15 bp, Homo sapiens
caccaagatagaaat

SEQ ID NO: 955791 - DNA, 15 bp, Homo sapiens
accaagatagaaatg

SEQ ID NO: 955792 - DNA, 15 bp, Homo sapiens
ccaagatagaaatga

SEQ ID NO: 955793 - DNA, 15 bp, Homo sapiens
caagatagaaatgat

SEQ ID NO: 955794 - DNA, 15 bp, Homo sapiens
aagatagaaatgatt

SEQ ID NO: 955795 - DNA, 15 bp, Homo sapiens
agatagaaatgattt

SEQ ID NO: 955796 - DNA, 15 bp, Homo sapiens
gatagaaatgatttg

SEQ ID NO: 955797 - DNA, 15 bp, Homo sapiens
atagaaatgatttgc

SEQ ID NO: 955798 - DNA, 15 bp, Homo sapiens
tagaaatgatttgct

SEQ ID NO: 955799 - DNA, 15 bp, Homo sapiens
agaaatgatttgctc

SEQ ID NO: 955800 - DNA, 15 bp, Homo sapiens
gaaatgatttgctca

SEQ ID NO: 955801 - DNA, 15 bp, Homo sapiens
aaatgatttgctcaa

SEQ ID NO: 955802 - DNA, 15 bp, Homo sapiens
aatgatttgctcaac

SEQ ID NO: 955803 - DNA, 15 bp, Homo sapiens
atgatttgctcaaca

SEQ ID NO: 955804 - DNA, 15 bp, Homo sapiens
tgatttgctcaacag

SEQ ID NO: 955805 - DNA, 15 bp, Homo sapiens
gatttgctcaacagt

SEQ ID NO: 955806 - DNA, 15 bp, Homo sapiens
atttgctcaacagtg

SEQ ID NO: 955807 - DNA, 15 bp, Homo sapiens
tttgctcaacagtgc

SEQ ID NO: 955808 - DNA, 15 bp, Homo sapiens
ttgctcaacagtgct

SEQ ID NO: 955809 - DNA, 15 bp, Homo sapiens
tgctcaacagtgctc

SEQ ID NO: 955810 - DNA, 15 bp, Homo sapiens
gctcaacagtgctct

SEQ ID NO: 955811 - DNA, 15 bp, Homo sapiens
ctcaacagtgctctg

SEQ ID NO: 955812 - DNA, 15 bp, Homo sapiens
tcaacagtgctctgg

SEQ ID NO: 955813 - DNA, 15 bp, Homo sapiens
caacagtgctctgga

SEQ ID NO: 955814 - DNA, 15 bp, Homo sapiens
aacagtgctctggac

SEQ ID NO: 955815 - DNA, 15 bp, Homo sapiens
acagtgctctggaca

SEQ ID NO: 955816 - DNA, 15 bp, Homo sapiens
cagtgctctggacat

SEQ ID NO: 955817 - DNA, 15 bp, Homo sapiens
agtgctctggacata

SEQ ID NO: 955818 - DNA, 15 bp, Homo sapiens
gtgctctggacataa

SEQ ID NO: 955819 - DNA, 15 bp, Homo sapiens
tgctctggacataaa

SEQ ID NO: 955820 - DNA, 15 bp, Homo sapiens
gctctggacataaaa

SEQ ID NO: 955821 - DNA, 15 bp, Homo sapiens
ctctggacataaaag

SEQ ID NO: 955822 - DNA, 15 bp, Homo sapiens
tctggacataaaaga

SEQ ID NO: 955823 - DNA, 15 bp, Homo sapiens
ctggacataaaagaa

SEQ ID NO: 955824 - DNA, 15 bp, Homo sapiens
tggacataaaagaat

SEQ ID NO: 955825 - DNA, 15 bp, Homo sapiens
ggacataaaagaatt

SEQ ID NO: 955826 - DNA, 15 bp, Homo sapiens
gacataaaagaattc

SEQ ID NO: 955827 - DNA, 15 bp, Homo sapiens
acataaaagaattct

SEQ ID NO: 955828 - DNA, 15 bp, Homo sapiens
cataaaagaattctt

SEQ ID NO: 955829 - DNA, 15 bp, Homo sapiens
ataaaagaattcttc

SEQ ID NO: 955830 - DNA, 15 bp, Homo sapiens
taaaagaattcttcg

SEQ ID NO: 955831 - DNA, 15 bp, Homo sapiens
aaaagaattcttcga

SEQ ID NO: 955832 - DNA, 15 bp, Homo sapiens
aaagaattcttcgat

SEQ ID NO: 955833 - DNA, 15 bp, Homo sapiens
aagaattcttcgatc

SEQ ID NO: 955834 - DNA, 15 bp, Homo sapiens
agaattcttcgatca

SEQ ID NO: 955835 - DNA, 15 bp, Homo sapiens
gaattcttcgatcac

SEQ ID NO: 955836 - DNA, 15 bp, Homo sapiens
aattcttcgatcaca

SEQ ID NO: 955837 - DNA, 15 bp, Homo sapiens
attcttcgatcacaa

SEQ ID NO: 955838 - DNA, 15 bp, Homo sapiens
ttcttcgatcacaaa

SEQ ID NO: 955839 - DNA, 15 bp, Homo sapiens
tcttcgatcacaaaa

SEQ ID NO: 955840 - DNA, 15 bp, Homo sapiens
cttcgatcacaaaaa

SEQ ID NO: 955841 - DNA, 15 bp, Homo sapiens
ttcgatcacaaaaat

SEQ ID NO: 955842 - DNA, 15 bp, Homo sapiens
tcgatcacaaaaatg

SEQ ID NO: 955843 - DNA, 15 bp, Homo sapiens
cgatcacaaaaatgg

SEQ ID NO: 955844 - DNA, 15 bp, Homo sapiens
gatcacaaaaatgga

SEQ ID NO: 955845 - DNA, 15 bp, Homo sapiens
atcacaaaaatggaa

SEQ ID NO: 955846 - DNA, 15 bp, Homo sapiens
tcacaaaaatggaac

SEQ ID NO: 955847 - DNA, 15 bp, Homo sapiens
cacaaaaatggaacc

SEQ ID NO: 955848 - DNA, 15 bp, Homo sapiens
acaaaaatggaaccc

SEQ ID NO: 955849 - DNA, 15 bp, Homo sapiens
caaaaatggaacccc

SEQ ID NO: 955850 - DNA, 15 bp, Homo sapiens
aaaaatggaaccccc

SEQ ID NO: 955851 - DNA, 15 bp, Homo sapiens
aaaatggaaccccct

SEQ ID NO: 955852 - DNA, 15 bp, Homo sapiens
aaatggaaccccctt

SEQ ID NO: 955853 - DNA, 15 bp, Homo sapiens
aatggaacccccttt

SEQ ID NO: 955854 - DNA, 15 bp, Homo sapiens
atggaaccccctttt

SEQ ID NO: 955855 - DNA, 15 bp, Homo sapiens
tggaacccccttttc

SEQ ID NO: 955856 - DNA, 15 bp, Homo sapiens
ggaacccccttttca

SEQ ID NO: 955857 - DNA, 15 bp, Homo sapiens
gaacccccttttcat

SEQ ID NO: 955858 - DNA, 15 bp, Homo sapiens
aacccccttttcatg

SEQ ID NO: 955859 - DNA, 15 bp, Homo sapiens
acccccttttcatgc

SEQ ID NO: 955860 - DNA, 15 bp, Homo sapiens
cccccttttcatgct

SEQ ID NO: 955861 - DNA, 15 bp, Homo sapiens
ccccttttcatgctt

SEQ ID NO: 955862 - DNA, 15 bp, Homo sapiens
cccttttcatgcttc

SEQ ID NO: 955863 - DNA, 15 bp, Homo sapiens
ccttttcatgcttct

SEQ ID NO: 955864 - DNA, 15 bp, Homo sapiens
cttttcatgcttcta

SEQ ID NO: 955865 - DNA, 15 bp, Homo sapiens
ttttcatgcttctac

SEQ ID NO: 955866 - DNA, 15 bp, Homo sapiens
tttcatgcttctaca

SEQ ID NO: 955867 - DNA, 15 bp, Homo sapiens
ttcatgcttctacag

SEQ ID NO: 955868 - DNA, 15 bp, Homo sapiens
tcatgcttctacagt

SEQ ID NO: 955869 - DNA, 15 bp, Homo sapiens
catgcttctacagtc

SEQ ID NO: 955870 - DNA, 15 bp, Homo sapiens
atgcttctacagtcc

SEQ ID NO: 955871 - DNA, 15 bp, Homo sapiens
tgcttctacagtcca

SEQ ID NO: 955872 - DNA, 15 bp, Homo sapiens
gcttctacagtccag

SEQ ID NO: 955873 - DNA, 15 bp, Homo sapiens
cttctacagtccagc

SEQ ID NO: 955874 - DNA, 15 bp, Homo sapiens
ttctacagtccagcc

SEQ ID NO: 955875 - DNA, 15 bp, Homo sapiens
tctacagtccagcca

SEQ ID NO: 955876 - DNA, 15 bp, Homo sapiens
ctacagtccagccag

SEQ ID NO: 955877 - DNA, 15 bp, Homo sapiens
tacagtccagccagc

SEQ ID NO: 955878 - DNA, 15 bp, Homo sapiens
acagtccagccagcc

SEQ ID NO: 955879 - DNA, 15 bp, Homo sapiens
cagtccagccagcca

SEQ ID NO: 955880 - DNA, 15 bp, Homo sapiens
agtccagccagccaa

SEQ ID NO: 955881 - DNA, 15 bp, Homo sapiens
gtccagccagccaat

SEQ ID NO: 955882 - DNA, 15 bp, Homo sapiens
tccagccagccaatc

SEQ ID NO: 955883 - DNA, 15 bp, Homo sapiens
ccagccagccaatct

SEQ ID NO: 955884 - DNA, 15 bp, Homo sapiens
cagccagccaatctg

SEQ ID NO: 955885 - DNA, 15 bp, Homo sapiens
agccagccaatctga

SEQ ID NO: 955886 - DNA, 15 bp, Homo sapiens
gccagccaatctgaa

SEQ ID NO: 955887 - DNA, 15 bp, Homo sapiens
ccagccaatctgaag

SEQ ID NO: 955888 - DNA, 15 bp, Homo sapiens
cagccaatctgaaga

SEQ ID NO: 955889 - DNA, 15 bp, Homo sapiens
agccaatctgaagat

SEQ ID NO: 955890 - DNA, 15 bp, Homo sapiens
gccaatctgaagatg

SEQ ID NO: 955891 - DNA, 15 bp, Homo sapiens
ccaatctgaagatgt

SEQ ID NO: 955892 - DNA, 15 bp, Homo sapiens
caatctgaagatgtc

SEQ ID NO: 955893 - DNA, 15 bp, Homo sapiens
aatctgaagatgtca

SEQ ID NO: 955894 - DNA, 15 bp, Homo sapiens
atctgaagatgtcat

SEQ ID NO: 955895 - DNA, 15 bp, Homo sapiens
tctgaagatgtcatt

SEQ ID NO: 955896 - DNA, 15 bp, Homo sapiens
ctgaagatgtcattc

SEQ ID NO: 955897 - DNA, 15 bp, Homo sapiens
tgaagatgtcattct

SEQ ID NO: 955898 - DNA, 15 bp, Homo sapiens
gaagatgtcattctt

SEQ ID NO: 955899 - DNA, 15 bp, Homo sapiens
aagatgtcattctta

SEQ ID NO: 955900 - DNA, 15 bp, Homo sapiens
agatgtcattcttat

SEQ ID NO: 955901 - DNA, 15 bp, Homo sapiens
gatgtcattcttata

SEQ ID NO: 955902 - DNA, 15 bp, Homo sapiens
atgtcattcttataa

SEQ ID NO: 955903 - DNA, 15 bp, Homo sapiens
tgtcattcttataaa

SEQ ID NO: 955904 - DNA, 15 bp, Homo sapiens
gtcattcttataaaa

SEQ ID NO: 955905 - DNA, 15 bp, Homo sapiens
tcattcttataaaaa

SEQ ID NO: 955906 - DNA, 15 bp, Homo sapiens
cattcttataaaaaa

SEQ ID NO: 955907 - DNA, 15 bp, Homo sapiens
attcttataaaaaag

SEQ ID NO: 955908 - DNA, 15 bp, Homo sapiens
ttcttataaaaaagt

SEQ ID NO: 955909 - DNA, 15 bp, Homo sapiens
tcttataaaaaagta

SEQ ID NO: 955910 - DNA, 15 bp, Homo sapiens
cttataaaaaagtat

SEQ ID NO: 955911 - DNA, 15 bp, Homo sapiens
ttataaaaaagtatg

SEQ ID NO: 955912 - DNA, 15 bp, Homo sapiens
tataaaaaagtatga

SEQ ID NO: 955913 - DNA, 15 bp, Homo sapiens
ataaaaaagtatgac

SEQ ID NO: 955914 - DNA, 15 bp, Homo sapiens
taaaaaagtatgacc

SEQ ID NO: 955915 - DNA, 15 bp, Homo sapiens
aaaaaagtatgacca

SEQ ID NO: 955916 - DNA, 15 bp, Homo sapiens
aaaaagtatgaccaa

SEQ ID NO: 955917 - DNA, 15 bp, Homo sapiens
aaaagtatgaccaaa

SEQ ID NO: 955918 - DNA, 15 bp, Homo sapiens
aaagtatgaccaaat

SEQ ID NO: 955919 - DNA, 15 bp, Homo sapiens
aagtatgaccaaatg

SEQ ID NO: 955920 - DNA, 15 bp, Homo sapiens
agtatgaccaaatgg

SEQ ID NO: 955921 - DNA, 15 bp, Homo sapiens
gtatgaccaaatggc

SEQ ID NO: 955922 - DNA, 15 bp, Homo sapiens
tatgaccaaatggct

SEQ ID NO: 955923 - DNA, 15 bp, Homo sapiens
atgaccaaatggcta

SEQ ID NO: 955924 - DNA, 15 bp, Homo sapiens
tgaccaaatggctat

SEQ ID NO: 955925 - DNA, 15 bp, Homo sapiens
gaccaaatggctatc

SEQ ID NO: 955926 - DNA, 15 bp, Homo sapiens
accaaatggctatct

SEQ ID NO: 955927 - DNA, 15 bp, Homo sapiens
ccaaatggctatctt

SEQ ID NO: 955928 - DNA, 15 bp, Homo sapiens
caaatggctatcttc

SEQ ID NO: 955929 - DNA, 15 bp, Homo sapiens
aaatggctatcttcc

SEQ ID NO: 955930 - DNA, 15 bp, Homo sapiens
aatggctatcttcca

SEQ ID NO: 955931 - DNA, 15 bp, Homo sapiens
atggctatcttccac

SEQ ID NO: 955932 - DNA, 15 bp, Homo sapiens
tggctatcttccact

SEQ ID NO: 955933 - DNA, 15 bp, Homo sapiens
ggctatcttccactg

SEQ ID NO: 955934 - DNA, 15 bp, Homo sapiens
gctatcttccactgt

SEQ ID NO: 955935 - DNA, 15 bp, Homo sapiens
ctatcttccactgtt

SEQ ID NO: 955936 - DNA, 15 bp, Homo sapiens
tatcttccactgttt

SEQ ID NO: 955937 - DNA, 15 bp, Homo sapiens
atcttccactgttta

SEQ ID NO: 955938 - DNA, 15 bp, Homo sapiens
tcttccactgtttat

SEQ ID NO: 955939 - DNA, 15 bp, Homo sapiens
cttccactgtttatt

SEQ ID NO: 955940 - DNA, 15 bp, Homo sapiens
ttccactgtttattt

SEQ ID NO: 955941 - DNA, 15 bp, Homo sapiens
tccactgtttatttt

SEQ ID NO: 955942 - DNA, 15 bp, Homo sapiens
ccactgtttattttg

SEQ ID NO: 955943 - DNA, 15 bp, Homo sapiens
cactgtttattttgg

SEQ ID NO: 955944 - DNA, 15 bp, Homo sapiens
actgtttattttggc

SEQ ID NO: 955945 - DNA, 15 bp, Homo sapiens
ctgtttattttggcc

SEQ ID NO: 955946 - DNA, 15 bp, Homo sapiens
tgtttattttggcct

SEQ ID NO: 955947 - DNA, 15 bp, Homo sapiens
gtttattttggcctt

SEQ ID NO: 955948 - DNA, 15 bp, Homo sapiens
tttattttggccttc

SEQ ID NO: 955949 - DNA, 15 bp, Homo sapiens
ttattttggccttca

SEQ ID NO: 955950 - DNA, 15 bp, Homo sapiens
tattttggccttcac

SEQ ID NO: 955951 - DNA, 15 bp, Homo sapiens
attttggccttcact

SEQ ID NO: 955952 - DNA, 15 bp, Homo sapiens
ttttggccttcactg

SEQ ID NO: 955953 - DNA, 15 bp, Homo sapiens
tttggccttcactga

SEQ ID NO: 955954 - DNA, 15 bp, Homo sapiens
ttggccttcactgac

SEQ ID NO: 955955 - DNA, 15 bp, Homo sapiens
tggccttcactgact

SEQ ID NO: 955956 - DNA, 15 bp, Homo sapiens
ggccttcactgactc

SEQ ID NO: 955957 - DNA, 15 bp, Homo sapiens
gccttcactgactct

SEQ ID NO: 955958 - DNA, 15 bp, Homo sapiens
ccttcactgactctg

SEQ ID NO: 955959 - DNA, 15 bp, Homo sapiens
cttcactgactctgc

SEQ ID NO: 955960 - DNA, 15 bp, Homo sapiens
ttcactgactctgct

SEQ ID NO: 955961 - DNA, 15 bp, Homo sapiens
tcactgactctgcta

SEQ ID NO: 955962 - DNA, 15 bp, Homo sapiens
cactgactctgctag

SEQ ID NO: 955963 - DNA, 15 bp, Homo sapiens
actgactctgctagg

SEQ ID NO: 955964 - DNA, 15 bp, Homo sapiens
ctgactctgctaggt

SEQ ID NO: 955965 - DNA, 15 bp, Homo sapiens
tgactctgctaggtg

SEQ ID NO: 955966 - DNA, 15 bp, Homo sapiens
gactctgctaggtgg

SEQ ID NO: 955967 - DNA, 15 bp, Homo sapiens
actctgctaggtggt

SEQ ID NO: 955968 - DNA, 15 bp, Homo sapiens
ctctgctaggtggtg

SEQ ID NO: 955969 - DNA, 15 bp, Homo sapiens
tctgctaggtggtgc

SEQ ID NO: 955970 - DNA, 15 bp, Homo sapiens
ctgctaggtggtgcc

SEQ ID NO: 955971 - DNA, 15 bp, Homo sapiens
tgctaggtggtgccc

SEQ ID NO: 955972 - DNA, 15 bp, Homo sapiens
gctaggtggtgccct

SEQ ID NO: 955973 - DNA, 15 bp, Homo sapiens
ctaggtggtgccctg

SEQ ID NO: 955974 - DNA, 15 bp, Homo sapiens
taggtggtgccctga

SEQ ID NO: 955975 - DNA, 15 bp, Homo sapiens
aggtggtgccctgat

SEQ ID NO: 955976 - DNA, 15 bp, Homo sapiens
ggtggtgccctgatt

SEQ ID NO: 955977 - DNA, 15 bp, Homo sapiens
gtggtgccctgattg

SEQ ID NO: 955978 - DNA, 15 bp, Homo sapiens
tggtgccctgattgt

SEQ ID NO: 955979 - DNA, 15 bp, Homo sapiens
ggtgccctgattgtt

SEQ ID NO: 955980 - DNA, 15 bp, Homo sapiens
gtgccctgattgttg

SEQ ID NO: 955981 - DNA, 15 bp, Homo sapiens
tgccctgattgttgg

SEQ ID NO: 955982 - DNA, 15 bp, Homo sapiens
gccctgattgttggc

SEQ ID NO: 955983 - DNA, 15 bp, Homo sapiens
ccctgattgttggca

SEQ ID NO: 955984 - DNA, 15 bp, Homo sapiens
cctgattgttggcat

SEQ ID NO: 955985 - DNA, 15 bp, Homo sapiens
ctgattgttggcatg

SEQ ID NO: 955986 - DNA, 15 bp, Homo sapiens
tgattgttggcatgg

SEQ ID NO: 955987 - DNA, 15 bp, Homo sapiens
gattgttggcatggt

SEQ ID NO: 955988 - DNA, 15 bp, Homo sapiens
attgttggcatggtg

SEQ ID NO: 955989 - DNA, 15 bp, Homo sapiens
ttgttggcatggtga

SEQ ID NO: 955990 - DNA, 15 bp, Homo sapiens
tgttggcatggtgag

SEQ ID NO: 955991 - DNA, 15 bp, Homo sapiens
gttggcatggtgaga

SEQ ID NO: 955992 - DNA, 15 bp, Homo sapiens
ttggcatggtgagat

SEQ ID NO: 955993 - DNA, 15 bp, Homo sapiens
tggcatggtgagatt

SEQ ID NO: 955994 - DNA, 15 bp, Homo sapiens
ggcatggtgagatta

SEQ ID NO: 955995 - DNA, 15 bp, Homo sapiens
gcatggtgagattaa

SEQ ID NO: 955996 - DNA, 15 bp, Homo sapiens
catggtgagattaac

SEQ ID NO: 955997 - DNA, 15 bp, Homo sapiens
atggtgagattaaca

SEQ ID NO: 955998 - DNA, 15 bp, Homo sapiens
tggtgagattaacac

SEQ ID NO: 955999 - DNA, 15 bp, Homo sapiens
ggtgagattaacaca

SEQ ID NO: 956000 - DNA, 15 bp, Homo sapiens
gtgagattaacacaa

SEQ ID NO: 956001 - DNA, 15 bp, Homo sapiens
tgagattaacacaac

SEQ ID NO: 956002 - DNA, 15 bp, Homo sapiens
gagattaacacaaca

SEQ ID NO: 956003 - DNA, 15 bp, Homo sapiens
agattaacacaacac

SEQ ID NO: 956004 - DNA, 15 bp, Homo sapiens
gattaacacaacacc

SEQ ID NO: 956005 - DNA, 15 bp, Homo sapiens
attaacacaacacct

SEQ ID NO: 956006 - DNA, 15 bp, Homo sapiens
ttaacacaacacctg

SEQ ID NO: 956007 - DNA, 15 bp, Homo sapiens
taacacaacacctgt

SEQ ID NO: 956008 - DNA, 15 bp, Homo sapiens
aacacaacacctgtc

SEQ ID NO: 956009 - DNA, 15 bp, Homo sapiens
acacaacacctgtcc

SEQ ID NO: 956010 - DNA, 15 bp, Homo sapiens
cacaacacctgtcct

SEQ ID NO: 956011 - DNA, 15 bp, Homo sapiens
acaacacctgtcctt

SEQ ID NO: 956012 - DNA, 15 bp, Homo sapiens
caacacctgtcctta

SEQ ID NO: 956013 - DNA, 15 bp, Homo sapiens
aacacctgtccttac

SEQ ID NO: 956014 - DNA, 15 bp, Homo sapiens
acacctgtccttact

SEQ ID NO: 956015 - DNA, 15 bp, Homo sapiens
cacctgtccttactg

SEQ ID NO: 956016 - DNA, 15 bp, Homo sapiens
acctgtccttactgt

SEQ ID NO: 956017 - DNA, 15 bp, Homo sapiens
cctgtccttactgtg

SEQ ID NO: 956018 - DNA, 15 bp, Homo sapiens
ctgtccttactgtgt

SEQ ID NO: 956019 - DNA, 15 bp, Homo sapiens
tgtccttactgtgtg

SEQ ID NO: 956020 - DNA, 15 bp, Homo sapiens
gtccttactgtgtga

SEQ ID NO: 956021 - DNA, 15 bp, Homo sapiens
tccttactgtgtgaa

SEQ ID NO: 956022 - DNA, 15 bp, Homo sapiens
ccttactgtgtgaaa

SEQ ID NO: 956023 - DNA, 15 bp, Homo sapiens
cttactgtgtgaaaa

SEQ ID NO: 956024 - DNA, 15 bp, Homo sapiens
ttactgtgtgaaaaa

SEQ ID NO: 956025 - DNA, 15 bp, Homo sapiens
tactgtgtgaaaaat

SEQ ID NO: 956026 - DNA, 15 bp, Homo sapiens
actgtgtgaaaaata

SEQ ID NO: 956027 - DNA, 15 bp, Homo sapiens
ctgtgtgaaaaatat

SEQ ID NO: 956028 - DNA, 15 bp, Homo sapiens
tgtgtgaaaaatata

SEQ ID NO: 956029 - DNA, 15 bp, Homo sapiens
gtgtgaaaaatatag

SEQ ID NO: 956030 - DNA, 15 bp, Homo sapiens
tgtgaaaaatatagc

SEQ ID NO: 956031 - DNA, 15 bp, Homo sapiens
gtgaaaaatatagca

SEQ ID NO: 956032 - DNA, 15 bp, Homo sapiens
tgaaaaatatagcac

SEQ ID NO: 956033 - DNA, 15 bp, Homo sapiens
gaaaaatatagcact

SEQ ID NO: 956034 - DNA, 15 bp, Homo sapiens
aaaaatatagcactg

SEQ ID NO: 956035 - DNA, 15 bp, Homo sapiens
aaaatatagcactgt

SEQ ID NO: 956036 - DNA, 15 bp, Homo sapiens
aaatatagcactgta

SEQ ID NO: 956037 - DNA, 15 bp, Homo sapiens
aatatagcactgtag

SEQ ID NO: 956038 - DNA, 15 bp, Homo sapiens
atatagcactgtagt

SEQ ID NO: 956039 - DNA, 15 bp, Homo sapiens
tatagcactgtagtc

SEQ ID NO: 956040 - DNA, 15 bp, Homo sapiens
atagcactgtagtca

SEQ ID NO: 956041 - DNA, 15 bp, Homo sapiens
tagcactgtagtcag

SEQ ID NO: 956042 - DNA, 15 bp, Homo sapiens
agcactgtagtcaga

SEQ ID NO: 956043 - DNA, 15 bp, Homo sapiens
gcactgtagtcagag

SEQ ID NO: 956044 - DNA, 15 bp, Homo sapiens
cactgtagtcagaga

SEQ ID NO: 956045 - DNA, 15 bp, Homo sapiens
actgtagtcagagat

SEQ ID NO: 956046 - DNA, 15 bp, Homo sapiens
ctgtagtcagagatg

SEQ ID NO: 956047 - DNA, 15 bp, Homo sapiens
tgtagtcagagatga

SEQ ID NO: 956048 - DNA, 15 bp, Homo sapiens
gtagtcagagatgag

SEQ ID NO: 956049 - DNA, 15 bp, Homo sapiens
tagtcagagatgagg

SEQ ID NO: 956050 - DNA, 15 bp, Homo sapiens
agtcagagatgaggt

SEQ ID NO: 956051 - DNA, 15 bp, Homo sapiens
gtcagagatgaggta

SEQ ID NO: 956052 - DNA, 15 bp, Homo sapiens
tcagagatgaggtag

SEQ ID NO: 956053 - DNA, 15 bp, Homo sapiens
cagagatgaggtagg

SEQ ID NO: 956054 - DNA, 15 bp, Homo sapiens
agagatgaggtaggt

SEQ ID NO: 956055 - DNA, 15 bp, Homo sapiens
gagatgaggtaggtg

SEQ ID NO: 956056 - DNA, 15 bp, Homo sapiens
agatgaggtaggtgg

SEQ ID NO: 956057 - DNA, 15 bp, Homo sapiens
gatgaggtaggtgga

SEQ ID NO: 956058 - DNA, 15 bp, Homo sapiens
atgaggtaggtggaa

SEQ ID NO: 956059 - DNA, 15 bp, Homo sapiens
tgaggtaggtggaaa

SEQ ID NO: 956060 - DNA, 15 bp, Homo sapiens
gaggtaggtggaaaa

SEQ ID NO: 956061 - DNA, 15 bp, Homo sapiens
aggtaggtggaaaag

SEQ ID NO: 956062 - DNA, 15 bp, Homo sapiens
ggtaggtggaaaagt

SEQ ID NO: 956063 - DNA, 15 bp, Homo sapiens
gtaggtggaaaagta

SEQ ID NO: 956064 - DNA, 15 bp, Homo sapiens
taggtggaaaagtac

SEQ ID NO: 956065 - DNA, 15 bp, Homo sapiens
aggtggaaaagtacc

SEQ ID NO: 956066 - DNA, 15 bp, Homo sapiens
ggtggaaaagtacct

SEQ ID NO: 956067 - DNA, 15 bp, Homo sapiens
gtggaaaagtacctt

SEQ ID NO: 956068 - DNA, 15 bp, Homo sapiens
tggaaaagtacctta

SEQ ID NO: 956069 - DNA, 15 bp, Homo sapiens
ggaaaagtaccttat

SEQ ID NO: 956070 - DNA, 15 bp, Homo sapiens
gaaaagtaccttata

SEQ ID NO: 956071 - DNA, 15 bp, Homo sapiens
aaaagtaccttatat

SEQ ID NO: 956072 - DNA, 15 bp, Homo sapiens
aaagtaccttatata

SEQ ID NO: 956073 - DNA, 15 bp, Homo sapiens
aagtaccttatatag

SEQ ID NO: 956074 - DNA, 15 bp, Homo sapiens
agtaccttatataga

SEQ ID NO: 956075 - DNA, 15 bp, Homo sapiens
gtaccttatatagaa

SEQ ID NO: 956076 - DNA, 15 bp, Homo sapiens
taccttatatagaac

SEQ ID NO: 956077 - DNA, 15 bp, Homo sapiens
accttatatagaaca

SEQ ID NO: 956078 - DNA, 15 bp, Homo sapiens
ccttatatagaacag

SEQ ID NO: 956079 - DNA, 15 bp, Homo sapiens
cttatatagaacagc

SEQ ID NO: 956080 - DNA, 15 bp, Homo sapiens
ttatatagaacagca

SEQ ID NO: 956081 - DNA, 15 bp, Homo sapiens
tatatagaacagcat

SEQ ID NO: 956082 - DNA, 15 bp, Homo sapiens
atatagaacagcatc

SEQ ID NO: 956083 - DNA, 15 bp, Homo sapiens
tatagaacagcatca

SEQ ID NO: 956084 - DNA, 15 bp, Homo sapiens
atagaacagcatcag

SEQ ID NO: 956085 - DNA, 15 bp, Homo sapiens
tagaacagcatcagt

SEQ ID NO: 956086 - DNA, 15 bp, Homo sapiens
agaacagcatcagtt

SEQ ID NO: 956087 - DNA, 15 bp, Homo sapiens
gaacagcatcagttc

SEQ ID NO: 956088 - DNA, 15 bp, Homo sapiens
aacagcatcagttca

SEQ ID NO: 956089 - DNA, 15 bp, Homo sapiens
acagcatcagttcaa

SEQ ID NO: 956090 - DNA, 15 bp, Homo sapiens
cagcatcagttcaaa

SEQ ID NO: 956091 - DNA, 15 bp, Homo sapiens
agcatcagttcaaac

SEQ ID NO: 956092 - DNA, 15 bp, Homo sapiens
gcatcagttcaaact

SEQ ID NO: 956093 - DNA, 15 bp, Homo sapiens
catcagttcaaactg

SEQ ID NO: 956094 - DNA, 15 bp, Homo sapiens
atcagttcaaactgt

SEQ ID NO: 956095 - DNA, 15 bp, Homo sapiens
tcagttcaaactgtg

SEQ ID NO: 956096 - DNA, 15 bp, Homo sapiens
cagttcaaactgtgc

SEQ ID NO: 956097 - DNA, 15 bp, Homo sapiens
agttcaaactgtgca

SEQ ID NO: 956098 - DNA, 15 bp, Homo sapiens
gttcaaactgtgcat

SEQ ID NO: 956099 - DNA, 15 bp, Homo sapiens
ttcaaactgtgcatt

SEQ ID NO: 956100 - DNA, 15 bp, Homo sapiens
tcaaactgtgcatta

SEQ ID NO: 956101 - DNA, 15 bp, Homo sapiens
caaactgtgcattat

SEQ ID NO: 956102 - DNA, 15 bp, Homo sapiens
aaactgtgcattatg

SEQ ID NO: 956103 - DNA, 15 bp, Homo sapiens
aactgtgcattatga

SEQ ID NO: 956104 - DNA, 15 bp, Homo sapiens
actgtgcattatgag

SEQ ID NO: 956105 - DNA, 15 bp, Homo sapiens
ctgtgcattatgagg

SEQ ID NO: 956106 - DNA, 15 bp, Homo sapiens
tgtgcattatgagga

SEQ ID NO: 956107 - DNA, 15 bp, Homo sapiens
gtgcattatgaggag

SEQ ID NO: 956108 - DNA, 15 bp, Homo sapiens
tgcattatgaggagg

SEQ ID NO: 956109 - DNA, 15 bp, Homo sapiens
gcattatgaggagga

SEQ ID NO: 956110 - DNA, 15 bp, Homo sapiens
cattatgaggaggag

SEQ ID NO: 956111 - DNA, 15 bp, Homo sapiens
attatgaggaggagc

SEQ ID NO: 956112 - DNA, 15 bp, Homo sapiens
ttatgaggaggagca

SEQ ID NO: 956113 - DNA, 15 bp, Homo sapiens
tatgaggaggagcaa

SEQ ID NO: 956114 - DNA, 15 bp, Homo sapiens
atgaggaggagcaaa

SEQ ID NO: 956115 - DNA, 15 bp, Homo sapiens
tgaggaggagcaaag

SEQ ID NO: 956116 - DNA, 15 bp, Homo sapiens
gaggaggagcaaagg

SEQ ID NO: 956117 - DNA, 15 bp, Homo sapiens
aggaggagcaaagga

SEQ ID NO: 956118 - DNA, 15 bp, Homo sapiens
ggaggagcaaaggaa

SEQ ID NO: 956119 - DNA, 15 bp, Homo sapiens
gaggagcaaaggaag

SEQ ID NO: 956120 - DNA, 15 bp, Homo sapiens
aggagcaaaggaaga

SEQ ID NO: 956121 - DNA, 15 bp, Homo sapiens
ggagcaaaggaagag

SEQ ID NO: 956122 - DNA, 15 bp, Homo sapiens
gagcaaaggaagagc

SEQ ID NO: 956123 - DNA, 15 bp, Homo sapiens
agcaaaggaagagca

SEQ ID NO: 956124 - DNA, 15 bp, Homo sapiens
gcaaaggaagagcag

SEQ ID NO: 956125 - DNA, 15 bp, Homo sapiens
caaaggaagagcaga

SEQ ID NO: 956126 - DNA, 15 bp, Homo sapiens
aaaggaagagcagag

SEQ ID NO: 956127 - DNA, 15 bp, Homo sapiens
aaggaagagcagaga

SEQ ID NO: 956128 - DNA, 15 bp, Homo sapiens
aggaagagcagagaa

SEQ ID NO: 956129 - DNA, 15 bp, Homo sapiens
ggaagagcagagaaa

SEQ ID NO: 956130 - DNA, 15 bp, Homo sapiens
gaagagcagagaaat

SEQ ID NO: 956131 - DNA, 15 bp, Homo sapiens
aagagcagagaaatc

SEQ ID NO: 956132 - DNA, 15 bp, Homo sapiens
agagcagagaaatct

SEQ ID NO: 956133 - DNA, 15 bp, Homo sapiens
gagcagagaaatctt

SEQ ID NO: 956134 - DNA, 15 bp, Homo sapiens
agcagagaaatctta

SEQ ID NO: 956135 - DNA, 15 bp, Homo sapiens
gcagagaaatcttaa

SEQ ID NO: 956136 - DNA, 15 bp, Homo sapiens
cagagaaatcttaag

SEQ ID NO: 956137 - DNA, 15 bp, Homo sapiens
agagaaatcttaaga

SEQ ID NO: 956138 - DNA, 15 bp, Homo sapiens
gagaaatcttaagac

SEQ ID NO: 956139 - DNA, 15 bp, Homo sapiens
agaaatcttaagacg

SEQ ID NO: 956140 - DNA, 15 bp, Homo sapiens
gaaatcttaagacgg

SEQ ID NO: 956141 - DNA, 15 bp, Homo sapiens
aaatcttaagacggt

SEQ ID NO: 956142 - DNA, 15 bp, Homo sapiens
aatcttaagacggtg

SEQ ID NO: 956143 - DNA, 15 bp, Homo sapiens
atcttaagacggtgg

SEQ ID NO: 956144 - DNA, 15 bp, Homo sapiens
tcttaagacggtggc

SEQ ID NO: 956145 - DNA, 15 bp, Homo sapiens
cttaagacggtggcc

SEQ ID NO: 956146 - DNA, 15 bp, Homo sapiens
ttaagacggtggcca

SEQ ID NO: 956147 - DNA, 15 bp, Homo sapiens
taagacggtggccaa

SEQ ID NO: 956148 - DNA, 15 bp, Homo sapiens
aagacggtggccaaa

SEQ ID NO: 956149 - DNA, 15 bp, Homo sapiens
agacggtggccaaat

SEQ ID NO: 956150 - DNA, 15 bp, Homo sapiens
gacggtggccaaatt

SEQ ID NO: 956151 - DNA, 15 bp, Homo sapiens
acggtggccaaatta

SEQ ID NO: 956152 - DNA, 15 bp, Homo sapiens
cggtggccaaattaa

SEQ ID NO: 956153 - DNA, 15 bp, Homo sapiens
ggtggccaaattaaa

SEQ ID NO: 956154 - DNA, 15 bp, Homo sapiens
gtggccaaattaaag

SEQ ID NO: 956155 - DNA, 15 bp, Homo sapiens
tggccaaattaaagt

SEQ ID NO: 956156 - DNA, 15 bp, Homo sapiens
ggccaaattaaagtg

SEQ ID NO: 956157 - DNA, 15 bp, Homo sapiens
gccaaattaaagtgc

SEQ ID NO: 956158 - DNA, 15 bp, Homo sapiens
ccaaattaaagtgct

SEQ ID NO: 956159 - DNA, 15 bp, Homo sapiens
caaattaaagtgctg

SEQ ID NO: 956160 - DNA, 15 bp, Homo sapiens
aaattaaagtgctgg

SEQ ID NO: 956161 - DNA, 15 bp, Homo sapiens
aattaaagtgctggc

SEQ ID NO: 956162 - DNA, 15 bp, Homo sapiens
attaaagtgctggcc

SEQ ID NO: 956163 - DNA, 15 bp, Homo sapiens
ttaaagtgctggcct

SEQ ID NO: 956164 - DNA, 15 bp, Homo sapiens
taaagtgctggcctt

SEQ ID NO: 956165 - DNA, 15 bp, Homo sapiens
aaagtgctggccttc

SEQ ID NO: 956166 - DNA, 15 bp, Homo sapiens
aagtgctggccttca

SEQ ID NO: 956167 - DNA, 15 bp, Homo sapiens
agtgctggccttcag

SEQ ID NO: 956168 - DNA, 15 bp, Homo sapiens
gtgctggccttcaga

SEQ ID NO: 956169 - DNA, 15 bp, Homo sapiens
tgctggccttcagat

SEQ ID NO: 956170 - DNA, 15 bp, Homo sapiens
gctggccttcagatg

SEQ ID NO: 956171 - DNA, 15 bp, Homo sapiens
ctggccttcagatgt

SEQ ID NO: 956172 - DNA, 15 bp, Homo sapiens
tggccttcagatgtc

SEQ ID NO: 956173 - DNA, 15 bp, Homo sapiens
ggccttcagatgtct

SEQ ID NO: 956174 - DNA, 15 bp, Homo sapiens
gccttcagatgtctg

SEQ ID NO: 956175 - DNA, 15 bp, Homo sapiens
ccttcagatgtctgt

SEQ ID NO: 956176 - DNA, 15 bp, Homo sapiens
cttcagatgtctgtg

SEQ ID NO: 956177 - DNA, 15 bp, Homo sapiens
ttcagatgtctgtga

SEQ ID NO: 956178 - DNA, 15 bp, Homo sapiens
tcagatgtctgtgat

SEQ ID NO: 956179 - DNA, 15 bp, Homo sapiens
cagatgtctgtgatt

SEQ ID NO: 956180 - DNA, 15 bp, Homo sapiens
agatgtctgtgattt

SEQ ID NO: 956181 - DNA, 15 bp, Homo sapiens
gatgtctgtgatttc

SEQ ID NO: 956182 - DNA, 15 bp, Homo sapiens
atgtctgtgatttct

SEQ ID NO: 956183 - DNA, 15 bp, Homo sapiens
tgtctgtgatttctg

SEQ ID NO: 956184 - DNA, 15 bp, Homo sapiens
gtctgtgatttctgc

SEQ ID NO: 956185 - DNA, 15 bp, Homo sapiens
tctgtgatttctgca

SEQ ID NO: 956186 - DNA, 15 bp, Homo sapiens
ctgtgatttctgcaa

SEQ ID NO: 956187 - DNA, 15 bp, Homo sapiens
tgtgatttctgcaac

SEQ ID NO: 956188 - DNA, 15 bp, Homo sapiens
gtgatttctgcaact

SEQ ID NO: 956189 - DNA, 15 bp, Homo sapiens
tgatttctgcaactg

SEQ ID NO: 956190 - DNA, 15 bp, Homo sapiens
gatttctgcaactga

SEQ ID NO: 956191 - DNA, 15 bp, Homo sapiens
atttctgcaactgag

SEQ ID NO: 956192 - DNA, 15 bp, Homo sapiens
tttctgcaactgagg

SEQ ID NO: 956193 - DNA, 15 bp, Homo sapiens
ttctgcaactgagga

SEQ ID NO: 956194 - DNA, 15 bp, Homo sapiens
tctgcaactgaggac

SEQ ID NO: 956195 - DNA, 15 bp, Homo sapiens
ctgcaactgaggacc

SEQ ID NO: 956196 - DNA, 15 bp, Homo sapiens
tgcaactgaggacct

SEQ ID NO: 956197 - DNA, 15 bp, Homo sapiens
gcaactgaggaccta

SEQ ID NO: 956198 - DNA, 15 bp, Homo sapiens
caactgaggacctaa

SEQ ID NO: 956199 - DNA, 15 bp, Homo sapiens
aactgaggacctaat

SEQ ID NO: 956200 - DNA, 15 bp, Homo sapiens
actgaggacctaatt

SEQ ID NO: 956201 - DNA, 15 bp, Homo sapiens
ctgaggacctaatta

SEQ ID NO: 956202 - DNA, 15 bp, Homo sapiens
tgaggacctaattat

SEQ ID NO: 956203 - DNA, 15 bp, Homo sapiens
gaggacctaattatg

SEQ ID NO: 956204 - DNA, 15 bp, Homo sapiens
aggacctaattatgc

SEQ ID NO: 956205 - DNA, 15 bp, Homo sapiens
ggacctaattatgcc

SEQ ID NO: 956206 - DNA, 15 bp, Homo sapiens
gacctaattatgcct

SEQ ID NO: 956207 - DNA, 15 bp, Homo sapiens
acctaattatgcctg

SEQ ID NO: 956208 - DNA, 15 bp, Homo sapiens
cctaattatgcctgt

SEQ ID NO: 956209 - DNA, 15 bp, Homo sapiens
ctaattatgcctgtc

SEQ ID NO: 956210 - DNA, 15 bp, Homo sapiens
taattatgcctgtct

SEQ ID NO: 956211 - DNA, 15 bp, Homo sapiens
aattatgcctgtctg

SEQ ID NO: 956212 - DNA, 15 bp, Homo sapiens
attatgcctgtctgc

SEQ ID NO: 956213 - DNA, 15 bp, Homo sapiens
ttatgcctgtctgca

SEQ ID NO: 956214 - DNA, 15 bp, Homo sapiens
tatgcctgtctgcaa

SEQ ID NO: 956215 - DNA, 15 bp, Homo sapiens
atgcctgtctgcaaa

SEQ ID NO: 956216 - DNA, 15 bp, Homo sapiens
tgcctgtctgcaaac

SEQ ID NO: 956217 - DNA, 15 bp, Homo sapiens
gcctgtctgcaaact

SEQ ID NO: 956218 - DNA, 15 bp, Homo sapiens
cctgtctgcaaacta

SEQ ID NO: 956219 - DNA, 15 bp, Homo sapiens
ctgtctgcaaactaa

SEQ ID NO: 956220 - DNA, 15 bp, Homo sapiens
tgtctgcaaactaat

SEQ ID NO: 956221 - DNA, 15 bp, Homo sapiens
gtctgcaaactaata

SEQ ID NO: 956222 - DNA, 15 bp, Homo sapiens
tctgcaaactaataa

SEQ ID NO: 956223 - DNA, 15 bp, Homo sapiens
ctgcaaactaataat

SEQ ID NO: 956224 - DNA, 15 bp, Homo sapiens
tgcaaactaataatg

SEQ ID NO: 956225 - DNA, 15 bp, Homo sapiens
gcaaactaataatgt

SEQ ID NO: 956226 - DNA, 15 bp, Homo sapiens
caaactaataatgta

SEQ ID NO: 956227 - DNA, 15 bp, Homo sapiens
aaactaataatgtaa

SEQ ID NO: 956228 - DNA, 15 bp, Homo sapiens
aactaataatgtaaa

SEQ ID NO: 956229 - DNA, 15 bp, Homo sapiens
actaataatgtaaaa

SEQ ID NO: 956230 - DNA, 15 bp, Homo sapiens
ctaataatgtaaaag

SEQ ID NO: 956231 - DNA, 15 bp, Homo sapiens
taataatgtaaaagg

SEQ ID NO: 956232 - DNA, 15 bp, Homo sapiens
aataatgtaaaaggt

SEQ ID NO: 956233 - DNA, 15 bp, Homo sapiens
ataatgtaaaaggta

SEQ ID NO: 956234 - DNA, 15 bp, Homo sapiens
taatgtaaaaggtaa

SEQ ID NO: 956235 - DNA, 15 bp, Homo sapiens
aatgtaaaaggtaat

SEQ ID NO: 956236 - DNA, 15 bp, Homo sapiens
atgtaaaaggtaata

SEQ ID NO: 956237 - DNA, 15 bp, Homo sapiens
tgtaaaaggtaataa

SEQ ID NO: 956238 - DNA, 15 bp, Homo sapiens
gtaaaaggtaataat

SEQ ID NO: 956239 - DNA, 15 bp, Homo sapiens
taaaaggtaataatt

SEQ ID NO: 956240 - DNA, 15 bp, Homo sapiens
aaaaggtaataatta

SEQ ID NO: 956241 - DNA, 15 bp, Homo sapiens
aaaggtaataattaa

SEQ ID NO: 956242 - DNA, 15 bp, Homo sapiens
aaggtaataattaaa

SEQ ID NO: 956243 - DNA, 15 bp, Homo sapiens
aggtaataattaaag

SEQ ID NO: 956244 - DNA, 15 bp, Homo sapiens
ggtaataattaaagt

SEQ ID NO: 956245 - DNA, 15 bp, Homo sapiens
gtaataattaaagta

SEQ ID NO: 956246 - DNA, 15 bp, Homo sapiens
taataattaaagtat

SEQ ID NO: 956247 - DNA, 15 bp, Homo sapiens
aataattaaagtatc

SEQ ID NO: 956248 - DNA, 15 bp, Homo sapiens
ataattaaagtatca

SEQ ID NO: 956249 - DNA, 15 bp, Homo sapiens
taattaaagtatcat

SEQ ID NO: 956250 - DNA, 15 bp, Homo sapiens
aattaaagtatcata

SEQ ID NO: 956251 - DNA, 15 bp, Homo sapiens
attaaagtatcatat

SEQ ID NO: 956252 - DNA, 15 bp, Homo sapiens
ttaaagtatcatatt

SEQ ID NO: 956253 - DNA, 15 bp, Homo sapiens
taaagtatcatattt

SEQ ID NO: 956254 - DNA, 15 bp, Homo sapiens
aaagtatcatatttt

SEQ ID NO: 956255 - DNA, 15 bp, Homo sapiens
aagtatcatattttc

SEQ ID NO: 956256 - DNA, 15 bp, Homo sapiens
agtatcatattttca

SEQ ID NO: 956257 - DNA, 15 bp, Homo sapiens
gtatcatattttcat

SEQ ID NO: 956258 - DNA, 15 bp, Homo sapiens
tatcatattttcatg

SEQ ID NO: 956259 - DNA, 15 bp, Homo sapiens
atcatattttcatgt

SEQ ID NO: 956260 - DNA, 15 bp, Homo sapiens
tcatattttcatgtg

SEQ ID NO: 956261 - DNA, 15 bp, Homo sapiens
catattttcatgtgg

SEQ ID NO: 956262 - DNA, 15 bp, Homo sapiens
atattttcatgtggg

SEQ ID NO: 956263 - DNA, 15 bp, Homo sapiens
tattttcatgtggga

SEQ ID NO: 956264 - DNA, 15 bp, Homo sapiens
attttcatgtgggaa

SEQ ID NO: 956265 - DNA, 15 bp, Homo sapiens
ttttcatgtgggaaa

SEQ ID NO: 956266 - DNA, 15 bp, Homo sapiens
tttcatgtgggaaaa

SEQ ID NO: 956267 - DNA, 15 bp, Homo sapiens
ttcatgtgggaaaaa

SEQ ID NO: 956268 - DNA, 15 bp, Homo sapiens
tcatgtgggaaaaaa

SEQ ID NO: 956269 - DNA, 15 bp, Homo sapiens
catgtgggaaaaaat

SEQ ID NO: 956270 - DNA, 15 bp, Homo sapiens
atgtgggaaaaaatt

SEQ ID NO: 956271 - DNA, 15 bp, Homo sapiens
tgtgggaaaaaattt

SEQ ID NO: 956272 - DNA, 15 bp, Homo sapiens
gtgggaaaaaattta

SEQ ID NO: 956273 - DNA, 15 bp, Homo sapiens
tgggaaaaaatttaa

SEQ ID NO: 956274 - DNA, 15 bp, Homo sapiens
gggaaaaaatttaaa

SEQ ID NO: 956275 - DNA, 15 bp, Homo sapiens
ggaaaaaatttaaaa

SEQ ID NO: 956276 - DNA, 15 bp, Homo sapiens
gaaaaaatttaaaag

SEQ ID NO: 956277 - DNA, 15 bp, Homo sapiens
aaaaaatttaaaagc

SEQ ID NO: 956278 - DNA, 15 bp, Homo sapiens
aaaaatttaaaagcc

SEQ ID NO: 956279 - DNA, 15 bp, Homo sapiens
aaaatttaaaagcct

SEQ ID NO: 956280 - DNA, 15 bp, Homo sapiens
aaatttaaaagcctc

SEQ ID NO: 956281 - DNA, 15 bp, Homo sapiens
aatttaaaagcctca

SEQ ID NO: 956282 - DNA, 15 bp, Homo sapiens
atttaaaagcctcat

SEQ ID NO: 956283 - DNA, 15 bp, Homo sapiens
tttaaaagcctcatt

SEQ ID NO: 956284 - DNA, 15 bp, Homo sapiens
ttaaaagcctcattt

SEQ ID NO: 956285 - DNA, 15 bp, Homo sapiens
taaaagcctcatttt

SEQ ID NO: 956286 - DNA, 15 bp, Homo sapiens
aaaagcctcattttg

SEQ ID NO: 956287 - DNA, 15 bp, Homo sapiens
aaagcctcattttgt

SEQ ID NO: 956288 - DNA, 15 bp, Homo sapiens
aagcctcattttgta

SEQ ID NO: 956289 - DNA, 15 bp, Homo sapiens
agcctcattttgtat

SEQ ID NO: 956290 - DNA, 15 bp, Homo sapiens
gcctcattttgtatt

SEQ ID NO: 956291 - DNA, 15 bp, Homo sapiens
cctcattttgtattc

SEQ ID NO: 956292 - DNA, 15 bp, Homo sapiens
ctcattttgtattct

SEQ ID NO: 956293 - DNA, 15 bp, Homo sapiens
tcattttgtattcta

SEQ ID NO: 956294 - DNA, 15 bp, Homo sapiens
cattttgtattctat

SEQ ID NO: 956295 - DNA, 15 bp, Homo sapiens
attttgtattctatt

SEQ ID NO: 956296 - DNA, 15 bp, Homo sapiens
ttttgtattctattt

SEQ ID NO: 956297 - DNA, 15 bp, Homo sapiens
tttgtattctattta

SEQ ID NO: 956298 - DNA, 15 bp, Homo sapiens
ttgtattctatttat

SEQ ID NO: 956299 - DNA, 15 bp, Homo sapiens
tgtattctatttatt

SEQ ID NO: 956300 - DNA, 15 bp, Homo sapiens
gtattctatttattt

SEQ ID NO: 956301 - DNA, 15 bp, Homo sapiens
tattctatttatttc

SEQ ID NO: 956302 - DNA, 15 bp, Homo sapiens
attctatttatttct

SEQ ID NO: 956303 - DNA, 15 bp, Homo sapiens
ttctatttatttcta

SEQ ID NO: 956304 - DNA, 15 bp, Homo sapiens
tctatttatttctat

SEQ ID NO: 956305 - DNA, 15 bp, Homo sapiens
ctatttatttctata

SEQ ID NO: 956306 - DNA, 15 bp, Homo sapiens
tatttatttctataa

SEQ ID NO: 956307 - DNA, 15 bp, Homo sapiens
atttatttctataaa

SEQ ID NO: 956308 - DNA, 15 bp, Homo sapiens
tttatttctataaat

SEQ ID NO: 956309 - DNA, 15 bp, Homo sapiens
ttatttctataaata

SEQ ID NO: 956310 - DNA, 15 bp, Homo sapiens
tatttctataaatac

SEQ ID NO: 956311 - DNA, 15 bp, Homo sapiens
atttctataaataca

SEQ ID NO: 956312 - DNA, 15 bp, Homo sapiens
tttctataaatacat

SEQ ID NO: 956313 - DNA, 15 bp, Homo sapiens
ttctataaatacata

SEQ ID NO: 956314 - DNA, 15 bp, Homo sapiens
tctataaatacatac

SEQ ID NO: 956315 - DNA, 15 bp, Homo sapiens
ctataaatacataca

SEQ ID NO: 956316 - DNA, 15 bp, Homo sapiens
tataaatacatacaa

SEQ ID NO: 956317 - DNA, 15 bp, Homo sapiens
ataaatacatacaaa

SEQ ID NO: 956318 - DNA, 15 bp, Homo sapiens
taaatacatacaaat

SEQ ID NO: 956319 - DNA, 15 bp, Homo sapiens
aaatacatacaaatt

SEQ ID NO: 956320 - DNA, 15 bp, Homo sapiens
aatacatacaaattc

SEQ ID NO: 956321 - DNA, 15 bp, Homo sapiens
atacatacaaattca

SEQ ID NO: 956322 - DNA, 15 bp, Homo sapiens
tacatacaaattcac

SEQ ID NO: 956323 - DNA, 15 bp, Homo sapiens
acatacaaattcacc

SEQ ID NO: 956324 - DNA, 15 bp, Homo sapiens
catacaaattcacca

SEQ ID NO: 956325 - DNA, 15 bp, Homo sapiens
atacaaattcaccat

SEQ ID NO: 956326 - DNA, 15 bp, Homo sapiens
tacaaattcaccatc

SEQ ID NO: 956327 - DNA, 15 bp, Homo sapiens
acaaattcaccatct

SEQ ID NO: 956328 - DNA, 15 bp, Homo sapiens
caaattcaccatctt

SEQ ID NO: 956329 - DNA, 15 bp, Homo sapiens
aaattcaccatcttt

SEQ ID NO: 956330 - DNA, 15 bp, Homo sapiens
aattcaccatctttt

SEQ ID NO: 956331 - DNA, 15 bp, Homo sapiens
attcaccatcttttc

SEQ ID NO: 956332 - DNA, 15 bp, Homo sapiens
ttcaccatcttttct

SEQ ID NO: 956333 - DNA, 15 bp, Homo sapiens
tcaccatcttttcta

SEQ ID NO: 956334 - DNA, 15 bp, Homo sapiens
caccatcttttctaa

SEQ ID NO: 956335 - DNA, 15 bp, Homo sapiens
accatcttttctaat

SEQ ID NO: 956336 - DNA, 15 bp, Homo sapiens
ccatcttttctaatc

SEQ ID NO: 956337 - DNA, 15 bp, Homo sapiens
catcttttctaatcc

SEQ ID NO: 956338 - DNA, 15 bp, Homo sapiens
atcttttctaatccc

SEQ ID NO: 956339 - DNA, 15 bp, Homo sapiens
tcttttctaatccca

SEQ ID NO: 956340 - DNA, 15 bp, Homo sapiens
cttttctaatcccaa

SEQ ID NO: 956341 - DNA, 15 bp, Homo sapiens
ttttctaatcccaat

SEQ ID NO: 956342 - DNA, 15 bp, Homo sapiens
tttctaatcccaatc

SEQ ID NO: 956343 - DNA, 15 bp, Homo sapiens
ttctaatcccaatct

SEQ ID NO: 956344 - DNA, 15 bp, Homo sapiens
tctaatcccaatctc

SEQ ID NO: 956345 - DNA, 15 bp, Homo sapiens
ctaatcccaatctct

SEQ ID NO: 956346 - DNA, 15 bp, Homo sapiens
taatcccaatctctt

SEQ ID NO: 956347 - DNA, 15 bp, Homo sapiens
aatcccaatctcttt

SEQ ID NO: 956348 - DNA, 15 bp, Homo sapiens
atcccaatctctttc

SEQ ID NO: 956349 - DNA, 15 bp, Homo sapiens
tcccaatctctttcc

SEQ ID NO: 956350 - DNA, 15 bp, Homo sapiens
cccaatctctttcca

SEQ ID NO: 956351 - DNA, 15 bp, Homo sapiens
ccaatctctttccaa

SEQ ID NO: 956352 - DNA, 15 bp, Homo sapiens
caatctctttccaaa

SEQ ID NO: 956353 - DNA, 15 bp, Homo sapiens
aatctctttccaaat

SEQ ID NO: 956354 - DNA, 15 bp, Homo sapiens
atctctttccaaatg

SEQ ID NO: 956355 - DNA, 15 bp, Homo sapiens
tctctttccaaatga

SEQ ID NO: 956356 - DNA, 15 bp, Homo sapiens
ctctttccaaatgag

SEQ ID NO: 956357 - DNA, 15 bp, Homo sapiens
tctttccaaatgagc

SEQ ID NO: 956358 - DNA, 15 bp, Homo sapiens
ctttccaaatgagct

SEQ ID NO: 956359 - DNA, 15 bp, Homo sapiens
tttccaaatgagcta

SEQ ID NO: 956360 - DNA, 15 bp, Homo sapiens
ttccaaatgagctaa

SEQ ID NO: 956361 - DNA, 15 bp, Homo sapiens
tccaaatgagctaag

SEQ ID NO: 956362 - DNA, 15 bp, Homo sapiens
ccaaatgagctaagg

SEQ ID NO: 956363 - DNA, 15 bp, Homo sapiens
caaatgagctaagga

SEQ ID NO: 956364 - DNA, 15 bp, Homo sapiens
aaatgagctaaggaa

SEQ ID NO: 956365 - DNA, 15 bp, Homo sapiens
aatgagctaaggaag

SEQ ID NO: 956366 - DNA, 15 bp, Homo sapiens
atgagctaaggaagc

SEQ ID NO: 956367 - DNA, 15 bp, Homo sapiens
tgagctaaggaagca

SEQ ID NO: 956368 - DNA, 15 bp, Homo sapiens
gagctaaggaagcac

SEQ ID NO: 956369 - DNA, 15 bp, Homo sapiens
agctaaggaagcact

SEQ ID NO: 956370 - DNA, 15 bp, Homo sapiens
gctaaggaagcactg

SEQ ID NO: 956371 - DNA, 15 bp, Homo sapiens
ctaaggaagcactgt

SEQ ID NO: 956372 - DNA, 15 bp, Homo sapiens
taaggaagcactgtt

SEQ ID NO: 956373 - DNA, 15 bp, Homo sapiens
aaggaagcactgttt

SEQ ID NO: 956374 - DNA, 15 bp, Homo sapiens
aggaagcactgtttt

SEQ ID NO: 956375 - DNA, 15 bp, Homo sapiens
ggaagcactgttttt

SEQ ID NO: 956376 - DNA, 15 bp, Homo sapiens
gaagcactgtttttt

SEQ ID NO: 956377 - DNA, 15 bp, Homo sapiens
aagcactgttttttt

SEQ ID NO: 956378 - DNA, 15 bp, Homo sapiens
agcactgtttttttt

SEQ ID NO: 956379 - DNA, 15 bp, Homo sapiens
gcactgttttttttc

SEQ ID NO: 956380 - DNA, 15 bp, Homo sapiens
cactgttttttttcc

SEQ ID NO: 956381 - DNA, 15 bp, Homo sapiens
actgttttttttcct

SEQ ID NO: 956382 - DNA, 15 bp, Homo sapiens
ctgttttttttcctg

SEQ ID NO: 956383 - DNA, 15 bp, Homo sapiens
tgttttttttcctgt

SEQ ID NO: 956384 - DNA, 15 bp, Homo sapiens
gttttttttcctgta

SEQ ID NO: 956385 - DNA, 15 bp, Homo sapiens
ttttttttcctgtat

SEQ ID NO: 956386 - DNA, 15 bp, Homo sapiens
tttttttcctgtata

SEQ ID NO: 956387 - DNA, 15 bp, Homo sapiens
ttttttcctgtatag

SEQ ID NO: 956388 - DNA, 15 bp, Homo sapiens
tttttcctgtatagc

SEQ ID NO: 956389 - DNA, 15 bp, Homo sapiens
ttttcctgtatagca

SEQ ID NO: 956390 - DNA, 15 bp, Homo sapiens
tttcctgtatagcaa

SEQ ID NO: 956391 - DNA, 15 bp, Homo sapiens
ttcctgtatagcaaa

SEQ ID NO: 956392 - DNA, 15 bp, Homo sapiens
tcctgtatagcaaaa

SEQ ID NO: 956393 - DNA, 15 bp, Homo sapiens
cctgtatagcaaaat

SEQ ID NO: 956394 - DNA, 15 bp, Homo sapiens
ctgtatagcaaaatg

SEQ ID NO: 956395 - DNA, 15 bp, Homo sapiens
tgtatagcaaaatga

SEQ ID NO: 956396 - DNA, 15 bp, Homo sapiens
gtatagcaaaatgag

SEQ ID NO: 956397 - DNA, 15 bp, Homo sapiens
tatagcaaaatgagt

SEQ ID NO: 956398 - DNA, 15 bp, Homo sapiens
atagcaaaatgagtt

SEQ ID NO: 956399 - DNA, 15 bp, Homo sapiens
tagcaaaatgagttc

SEQ ID NO: 956400 - DNA, 15 bp, Homo sapiens
agcaaaatgagttca

SEQ ID NO: 956401 - DNA, 15 bp, Homo sapiens
gcaaaatgagttcaa

SEQ ID NO: 956402 - DNA, 15 bp, Homo sapiens
caaaatgagttcaag

SEQ ID NO: 956403 - DNA, 15 bp, Homo sapiens
aaaatgagttcaaga

SEQ ID NO: 956404 - DNA, 15 bp, Homo sapiens
aaatgagttcaagat

SEQ ID NO: 956405 - DNA, 15 bp, Homo sapiens
aatgagttcaagata

SEQ ID NO: 956406 - DNA, 15 bp, Homo sapiens
atgagttcaagatat

SEQ ID NO: 956407 - DNA, 15 bp, Homo sapiens
tgagttcaagatatt

SEQ ID NO: 956408 - DNA, 15 bp, Homo sapiens
gagttcaagatattc

SEQ ID NO: 956409 - DNA, 15 bp, Homo sapiens
agttcaagatattct

SEQ ID NO: 956410 - DNA, 15 bp, Homo sapiens
gttcaagatattctt

SEQ ID NO: 956411 - DNA, 15 bp, Homo sapiens
ttcaagatattcttt

SEQ ID NO: 956412 - DNA, 15 bp, Homo sapiens
tcaagatattctttg

SEQ ID NO: 956413 - DNA, 15 bp, Homo sapiens
caagatattctttgc

SEQ ID NO: 956414 - DNA, 15 bp, Homo sapiens
aagatattctttgcc

SEQ ID NO: 956415 - DNA, 15 bp, Homo sapiens
agatattctttgcct

SEQ ID NO: 956416 - DNA, 15 bp, Homo sapiens
gatattctttgccta

SEQ ID NO: 956417 - DNA, 15 bp, Homo sapiens
atattctttgcctaa

SEQ ID NO: 956418 - DNA, 15 bp, Homo sapiens
tattctttgcctaat

SEQ ID NO: 956419 - DNA, 15 bp, Homo sapiens
attctttgcctaatt

SEQ ID NO: 956420 - DNA, 15 bp, Homo sapiens
ttctttgcctaattt

SEQ ID NO: 956421 - DNA, 15 bp, Homo sapiens
tctttgcctaatttc

SEQ ID NO: 956422 - DNA, 15 bp, Homo sapiens
ctttgcctaatttca

SEQ ID NO: 956423 - DNA, 15 bp, Homo sapiens
tttgcctaatttcag

SEQ ID NO: 956424 - DNA, 15 bp, Homo sapiens
ttgcctaatttcagc

SEQ ID NO: 956425 - DNA, 15 bp, Homo sapiens
tgcctaatttcagct

SEQ ID NO: 956426 - DNA, 15 bp, Homo sapiens
gcctaatttcagctc

SEQ ID NO: 956427 - DNA, 15 bp, Homo sapiens
cctaatttcagctct

SEQ ID NO: 956428 - DNA, 15 bp, Homo sapiens
ctaatttcagctcta

SEQ ID NO: 956429 - DNA, 15 bp, Homo sapiens
taatttcagctctag

SEQ ID NO: 956430 - DNA, 15 bp, Homo sapiens
aatttcagctctagc

SEQ ID NO: 956431 - DNA, 15 bp, Homo sapiens
atttcagctctagct

SEQ ID NO: 956432 - DNA, 15 bp, Homo sapiens
tttcagctctagcta

SEQ ID NO: 956433 - DNA, 15 bp, Homo sapiens
ttcagctctagctag

SEQ ID NO: 956434 - DNA, 15 bp, Homo sapiens
tcagctctagctaga

SEQ ID NO: 956435 - DNA, 15 bp, Homo sapiens
cagctctagctagaa

SEQ ID NO: 956436 - DNA, 15 bp, Homo sapiens
agctctagctagaac

SEQ ID NO: 956437 - DNA, 15 bp, Homo sapiens
gctctagctagaacc

SEQ ID NO: 956438 - DNA, 15 bp, Homo sapiens
ctctagctagaacca

SEQ ID NO: 956439 - DNA, 15 bp, Homo sapiens
tctagctagaaccag

SEQ ID NO: 956440 - DNA, 15 bp, Homo sapiens
ctagctagaaccagt

SEQ ID NO: 956441 - DNA, 15 bp, Homo sapiens
tagctagaaccagtc

SEQ ID NO: 956442 - DNA, 15 bp, Homo sapiens
agctagaaccagtca

SEQ ID NO: 956443 - DNA, 15 bp, Homo sapiens
gctagaaccagtcaa

SEQ ID NO: 956444 - DNA, 15 bp, Homo sapiens
ctagaaccagtcaat

SEQ ID NO: 956445 - DNA, 15 bp, Homo sapiens
tagaaccagtcaata

SEQ ID NO: 956446 - DNA, 15 bp, Homo sapiens
agaaccagtcaatat

SEQ ID NO: 956447 - DNA, 15 bp, Homo sapiens
gaaccagtcaatatg

SEQ ID NO: 956448 - DNA, 15 bp, Homo sapiens
aaccagtcaatatgg

SEQ ID NO: 956449 - DNA, 15 bp, Homo sapiens
accagtcaatatgga

SEQ ID NO: 956450 - DNA, 15 bp, Homo sapiens
ccagtcaatatggaa

SEQ ID NO: 956451 - DNA, 15 bp, Homo sapiens
cagtcaatatggaaa

SEQ ID NO: 956452 - DNA, 15 bp, Homo sapiens
agtcaatatggaaat

SEQ ID NO: 956453 - DNA, 15 bp, Homo sapiens
gtcaatatggaaata

SEQ ID NO: 956454 - DNA, 15 bp, Homo sapiens
tcaatatggaaataa

SEQ ID NO: 956455 - DNA, 15 bp, Homo sapiens
caatatggaaataaa

SEQ ID NO: 956456 - DNA, 15 bp, Homo sapiens
aatatggaaataaac

SEQ ID NO: 956457 - DNA, 15 bp, Homo sapiens
atatggaaataaaca

SEQ ID NO: 956458 - DNA, 15 bp, Homo sapiens
tatggaaataaacaa

SEQ ID NO: 956459 - DNA, 15 bp, Homo sapiens
atggaaataaacaat

SEQ ID NO: 956460 - DNA, 15 bp, Homo sapiens
tggaaataaacaatg

SEQ ID NO: 956461 - DNA, 15 bp, Homo sapiens
ggaaataaacaatga

SEQ ID NO: 956462 - DNA, 15 bp, Homo sapiens
gaaataaacaatgag

SEQ ID NO: 956463 - DNA, 15 bp, Homo sapiens
aaataaacaatgagg

SEQ ID NO: 956464 - DNA, 15 bp, Homo sapiens
aataaacaatgaggg

SEQ ID NO: 956465 - DNA, 15 bp, Homo sapiens
ataaacaatgagggt

SEQ ID NO: 956466 - DNA, 15 bp, Homo sapiens
taaacaatgagggta

SEQ ID NO: 956467 - DNA, 15 bp, Homo sapiens
aaacaatgagggtat

SEQ ID NO: 956468 - DNA, 15 bp, Homo sapiens
aacaatgagggtatc

SEQ ID NO: 956469 - DNA, 15 bp, Homo sapiens
acaatgagggtatct

SEQ ID NO: 956470 - DNA, 15 bp, Homo sapiens
caatgagggtatcta

SEQ ID NO: 956471 - DNA, 15 bp, Homo sapiens
aatgagggtatctaa

SEQ ID NO: 956472 - DNA, 15 bp, Homo sapiens
atgagggtatctaat

SEQ ID NO: 956473 - DNA, 15 bp, Homo sapiens
tgagggtatctaatc

SEQ ID NO: 956474 - DNA, 15 bp, Homo sapiens
gagggtatctaatct

SEQ ID NO: 956475 - DNA, 15 bp, Homo sapiens
agggtatctaatcta

SEQ ID NO: 956476 - DNA, 15 bp, Homo sapiens
gggtatctaatctac

SEQ ID NO: 956477 - DNA, 15 bp, Homo sapiens
ggtatctaatctact

SEQ ID NO: 956478 - DNA, 15 bp, Homo sapiens
gtatctaatctactg

SEQ ID NO: 956479 - DNA, 15 bp, Homo sapiens
tatctaatctactga

SEQ ID NO: 956480 - DNA, 15 bp, Homo sapiens
atctaatctactgaa

SEQ ID NO: 956481 - DNA, 15 bp, Homo sapiens
tctaatctactgaac

SEQ ID NO: 956482 - DNA, 15 bp, Homo sapiens
ctaatctactgaaca

SEQ ID NO: 956483 - DNA, 15 bp, Homo sapiens
taatctactgaacac

SEQ ID NO: 956484 - DNA, 15 bp, Homo sapiens
aatctactgaacact

SEQ ID NO: 956485 - DNA, 15 bp, Homo sapiens
atctactgaacactg

SEQ ID NO: 956486 - DNA, 15 bp, Homo sapiens
tctactgaacactga

SEQ ID NO: 956487 - DNA, 15 bp, Homo sapiens
ctactgaacactgaa

SEQ ID NO: 956488 - DNA, 15 bp, Homo sapiens
tactgaacactgaac

SEQ ID NO: 956489 - DNA, 15 bp, Homo sapiens
actgaacactgaacc

SEQ ID NO: 956490 - DNA, 15 bp, Homo sapiens
ctgaacactgaacca

SEQ ID NO: 956491 - DNA, 15 bp, Homo sapiens
tgaacactgaaccat

SEQ ID NO: 956492 - DNA, 15 bp, Homo sapiens
gaacactgaaccatc

SEQ ID NO: 956493 - DNA, 15 bp, Homo sapiens
aacactgaaccatca

SEQ ID NO: 956494 - DNA, 15 bp, Homo sapiens
acactgaaccatcag

SEQ ID NO: 956495 - DNA, 15 bp, Homo sapiens
cactgaaccatcagc

SEQ ID NO: 956496 - DNA, 15 bp, Homo sapiens
actgaaccatcagcc

SEQ ID NO: 956497 - DNA, 15 bp, Homo sapiens
ctgaaccatcagcct

SEQ ID NO: 956498 - DNA, 15 bp, Homo sapiens
tgaaccatcagccta

SEQ ID NO: 956499 - DNA, 15 bp, Homo sapiens
gaaccatcagcctaa

SEQ ID NO: 956500 - DNA, 15 bp, Homo sapiens
aaccatcagcctaac

SEQ ID NO: 956501 - DNA, 15 bp, Homo sapiens
accatcagcctaact

SEQ ID NO: 956502 - DNA, 15 bp, Homo sapiens
ccatcagcctaactc

SEQ ID NO: 956503 - DNA, 15 bp, Homo sapiens
catcagcctaactct

SEQ ID NO: 956504 - DNA, 15 bp, Homo sapiens
atcagcctaactcta

SEQ ID NO: 956505 - DNA, 15 bp, Homo sapiens
tcagcctaactctat

SEQ ID NO: 956506 - DNA, 15 bp, Homo sapiens
cagcctaactctatg

SEQ ID NO: 956507 - DNA, 15 bp, Homo sapiens
agcctaactctatgc

SEQ ID NO: 956508 - DNA, 15 bp, Homo sapiens
gcctaactctatgca

SEQ ID NO: 956509 - DNA, 15 bp, Homo sapiens
cctaactctatgcaa

SEQ ID NO: 956510 - DNA, 15 bp, Homo sapiens
ctaactctatgcaat

SEQ ID NO: 956511 - DNA, 15 bp, Homo sapiens
taactctatgcaata

SEQ ID NO: 956512 - DNA, 15 bp, Homo sapiens
aactctatgcaatat

SEQ ID NO: 956513 - DNA, 15 bp, Homo sapiens
actctatgcaatata

SEQ ID NO: 956514 - DNA, 15 bp, Homo sapiens
ctctatgcaatatag

SEQ ID NO: 956515 - DNA, 15 bp, Homo sapiens
tctatgcaatatagt

SEQ ID NO: 956516 - DNA, 15 bp, Homo sapiens
ctatgcaatatagtc

SEQ ID NO: 956517 - DNA, 15 bp, Homo sapiens
tatgcaatatagtca

SEQ ID NO: 956518 - DNA, 15 bp, Homo sapiens
atgcaatatagtcat

SEQ ID NO: 956519 - DNA, 15 bp, Homo sapiens
tgcaatatagtcata

SEQ ID NO: 956520 - DNA, 15 bp, Homo sapiens
gcaatatagtcatac

SEQ ID NO: 956521 - DNA, 15 bp, Homo sapiens
caatatagtcatact

SEQ ID NO: 956522 - DNA, 15 bp, Homo sapiens
aatatagtcatacta

SEQ ID NO: 956523 - DNA, 15 bp, Homo sapiens
atatagtcatactaa

SEQ ID NO: 956524 - DNA, 15 bp, Homo sapiens
tatagtcatactaaa

SEQ ID NO: 956525 - DNA, 15 bp, Homo sapiens
atagtcatactaaaa

SEQ ID NO: 956526 - DNA, 15 bp, Homo sapiens
tagtcatactaaaat

SEQ ID NO: 956527 - DNA, 15 bp, Homo sapiens
agtcatactaaaata

SEQ ID NO: 956528 - DNA, 15 bp, Homo sapiens
gtcatactaaaatat

SEQ ID NO: 956529 - DNA, 15 bp, Homo sapiens
tcatactaaaatatt

SEQ ID NO: 956530 - DNA, 15 bp, Homo sapiens
catactaaaatattt

SEQ ID NO: 956531 - DNA, 15 bp, Homo sapiens
atactaaaatatttc

SEQ ID NO: 956532 - DNA, 15 bp, Homo sapiens
tactaaaatatttct

SEQ ID NO: 956533 - DNA, 15 bp, Homo sapiens
actaaaatatttctc

SEQ ID NO: 956534 - DNA, 15 bp, Homo sapiens
ctaaaatatttctca

SEQ ID NO: 956535 - DNA, 15 bp, Homo sapiens
taaaatatttctcat

SEQ ID NO: 956536 - DNA, 15 bp, Homo sapiens
aaaatatttctcata

SEQ ID NO: 956537 - DNA, 15 bp, Homo sapiens
aaatatttctcataa

SEQ ID NO: 956538 - DNA, 15 bp, Homo sapiens
aatatttctcataaa

SEQ ID NO: 956539 - DNA, 15 bp, Homo sapiens
atatttctcataaaa

SEQ ID NO: 956540 - DNA, 15 bp, Homo sapiens
tatttctcataaaaa

SEQ ID NO: 956541 - DNA, 15 bp, Homo sapiens
atttctcataaaaaa

SEQ ID NO: 956542 - DNA, 15 bp, Homo sapiens
tttctcataaaaaag

SEQ ID NO: 956543 - DNA, 15 bp, Homo sapiens
ttctcataaaaaagt

SEQ ID NO: 956544 - DNA, 15 bp, Homo sapiens
tctcataaaaaagtt

SEQ ID NO: 956545 - DNA, 15 bp, Homo sapiens
ctcataaaaaagttc

SEQ ID NO: 956546 - DNA, 15 bp, Homo sapiens
tcataaaaaagttct

SEQ ID NO: 956547 - DNA, 15 bp, Homo sapiens
cataaaaaagttctt

SEQ ID NO: 956548 - DNA, 15 bp, Homo sapiens
ataaaaaagttctta

SEQ ID NO: 956549 - DNA, 15 bp, Homo sapiens
taaaaaagttcttaa

SEQ ID NO: 956550 - DNA, 15 bp, Homo sapiens
aaaaaagttcttaac

SEQ ID NO: 956551 - DNA, 15 bp, Homo sapiens
aaaaagttcttaaca

SEQ ID NO: 956552 - DNA, 15 bp, Homo sapiens
aaaagttcttaacag

SEQ ID NO: 956553 - DNA, 15 bp, Homo sapiens
aaagttcttaacagt

SEQ ID NO: 956554 - DNA, 15 bp, Homo sapiens
aagttcttaacagtt

SEQ ID NO: 956555 - DNA, 15 bp, Homo sapiens
agttcttaacagttt

SEQ ID NO: 956556 - DNA, 15 bp, Homo sapiens
gttcttaacagtttg

SEQ ID NO: 956557 - DNA, 15 bp, Homo sapiens
ttcttaacagtttgt

SEQ ID NO: 956558 - DNA, 15 bp, Homo sapiens
tcttaacagtttgtt

SEQ ID NO: 956559 - DNA, 15 bp, Homo sapiens
cttaacagtttgttc

SEQ ID NO: 956560 - DNA, 15 bp, Homo sapiens
ttaacagtttgttca

SEQ ID NO: 956561 - DNA, 15 bp, Homo sapiens
taacagtttgttcac

SEQ ID NO: 956562 - DNA, 15 bp, Homo sapiens
aacagtttgttcact

SEQ ID NO: 956563 - DNA, 15 bp, Homo sapiens
acagtttgttcacta

SEQ ID NO: 956564 - DNA, 15 bp, Homo sapiens
cagtttgttcactat

SEQ ID NO: 956565 - DNA, 15 bp, Homo sapiens
agtttgttcactata

SEQ ID NO: 956566 - DNA, 15 bp, Homo sapiens
gtttgttcactatac

SEQ ID NO: 956567 - DNA, 15 bp, Homo sapiens
tttgttcactataca

SEQ ID NO: 956568 - DNA, 15 bp, Homo sapiens
ttgttcactatacaa

SEQ ID NO: 956569 - DNA, 15 bp, Homo sapiens
tgttcactatacaaa

SEQ ID NO: 956570 - DNA, 15 bp, Homo sapiens
gttcactatacaaag

SEQ ID NO: 956571 - DNA, 15 bp, Homo sapiens
ttcactatacaaaga

SEQ ID NO: 956572 - DNA, 15 bp, Homo sapiens
tcactatacaaagac

SEQ ID NO: 956573 - DNA, 15 bp, Homo sapiens
cactatacaaagaca

SEQ ID NO: 956574 - DNA, 15 bp, Homo sapiens
actatacaaagacaa

SEQ ID NO: 956575 - DNA, 15 bp, Homo sapiens
ctatacaaagacaaa

SEQ ID NO: 956576 - DNA, 15 bp, Homo sapiens
tatacaaagacaaaa

SEQ ID NO: 956577 - DNA, 15 bp, Homo sapiens
atacaaagacaaaaa

SEQ ID NO: 956578 - DNA, 15 bp, Homo sapiens
tacaaagacaaaaat

SEQ ID NO: 956579 - DNA, 15 bp, Homo sapiens
acaaagacaaaaatc

SEQ ID NO: 956580 - DNA, 15 bp, Homo sapiens
caaagacaaaaatct

SEQ ID NO: 956581 - DNA, 15 bp, Homo sapiens
aaagacaaaaatctg

SEQ ID NO: 956582 - DNA, 15 bp, Homo sapiens
aagacaaaaatctgg

SEQ ID NO: 956583 - DNA, 15 bp, Homo sapiens
agacaaaaatctggt

SEQ ID NO: 956584 - DNA, 15 bp, Homo sapiens
gacaaaaatctggta

SEQ ID NO: 956585 - DNA, 15 bp, Homo sapiens
acaaaaatctggtag

SEQ ID NO: 956586 - DNA, 15 bp, Homo sapiens
caaaaatctggtaga

SEQ ID NO: 956587 - DNA, 15 bp, Homo sapiens
aaaaatctggtagaa

SEQ ID NO: 956588 - DNA, 15 bp, Homo sapiens
aaaatctggtagaaa

SEQ ID NO: 956589 - DNA, 15 bp, Homo sapiens
aaatctggtagaaaa

SEQ ID NO: 956590 - DNA, 15 bp, Homo sapiens
aatctggtagaaaac

SEQ ID NO: 956591 - DNA, 15 bp, Homo sapiens
atctggtagaaaact

SEQ ID NO: 956592 - DNA, 15 bp, Homo sapiens
tctggtagaaaactt

SEQ ID NO: 956593 - DNA, 15 bp, Homo sapiens
ctggtagaaaactta

SEQ ID NO: 956594 - DNA, 15 bp, Homo sapiens
tggtagaaaacttaa

SEQ ID NO: 956595 - DNA, 15 bp, Homo sapiens
ggtagaaaacttaag

SEQ ID NO: 956596 - DNA, 15 bp, Homo sapiens
gtagaaaacttaaga

SEQ ID NO: 956597 - DNA, 15 bp, Homo sapiens
tagaaaacttaagaa

SEQ ID NO: 956598 - DNA, 15 bp, Homo sapiens
agaaaacttaagaaa

SEQ ID NO: 956599 - DNA, 15 bp, Homo sapiens
gaaaacttaagaaaa

SEQ ID NO: 956600 - DNA, 15 bp, Homo sapiens
aaaacttaagaaaac

SEQ ID NO: 956601 - DNA, 15 bp, Homo sapiens
aaacttaagaaaaca

SEQ ID NO: 956602 - DNA, 15 bp, Homo sapiens
aacttaagaaaacat

SEQ ID NO: 956603 - DNA, 15 bp, Homo sapiens
acttaagaaaacatg

SEQ ID NO: 956604 - DNA, 15 bp, Homo sapiens
cttaagaaaacatgg

SEQ ID NO: 956605 - DNA, 15 bp, Homo sapiens
ttaagaaaacatgga

SEQ ID NO: 956606 - DNA, 15 bp, Homo sapiens
taagaaaacatggag

SEQ ID NO: 956607 - DNA, 15 bp, Homo sapiens
aagaaaacatggagc

SEQ ID NO: 956608 - DNA, 15 bp, Homo sapiens
agaaaacatggagct

SEQ ID NO: 956609 - DNA, 15 bp, Homo sapiens
gaaaacatggagcta

SEQ ID NO: 956610 - DNA, 15 bp, Homo sapiens
aaaacatggagctaa

SEQ ID NO: 956611 - DNA, 15 bp, Homo sapiens
aaacatggagctaac

SEQ ID NO: 956612 - DNA, 15 bp, Homo sapiens
aacatggagctaaca

SEQ ID NO: 956613 - DNA, 15 bp, Homo sapiens
acatggagctaacat

SEQ ID NO: 956614 - DNA, 15 bp, Homo sapiens
catggagctaacata

SEQ ID NO: 956615 - DNA, 15 bp, Homo sapiens
atggagctaacatat

SEQ ID NO: 956616 - DNA, 15 bp, Homo sapiens
tggagctaacatatt

SEQ ID NO: 956617 - DNA, 15 bp, Homo sapiens
ggagctaacatattt

SEQ ID NO: 956618 - DNA, 15 bp, Homo sapiens
gagctaacatattta

SEQ ID NO: 956619 - DNA, 15 bp, Homo sapiens
agctaacatatttat

SEQ ID NO: 956620 - DNA, 15 bp, Homo sapiens
gctaacatatttatt

SEQ ID NO: 956621 - DNA, 15 bp, Homo sapiens
ctaacatatttatta

SEQ ID NO: 956622 - DNA, 15 bp, Homo sapiens
taacatatttattat

SEQ ID NO: 956623 - DNA, 15 bp, Homo sapiens
aacatatttattata

SEQ ID NO: 956624 - DNA, 15 bp, Homo sapiens
acatatttattatag

SEQ ID NO: 956625 - DNA, 15 bp, Homo sapiens
catatttattatagt

SEQ ID NO: 956626 - DNA, 15 bp, Homo sapiens
atatttattatagtt

SEQ ID NO: 956627 - DNA, 15 bp, Homo sapiens
tatttattatagttt

SEQ ID NO: 956628 - DNA, 15 bp, Homo sapiens
atttattatagtttt

SEQ ID NO: 956629 - DNA, 15 bp, Homo sapiens
tttattatagttttt

SEQ ID NO: 956630 - DNA, 15 bp, Homo sapiens
ttattatagtttttt

SEQ ID NO: 956631 - DNA, 15 bp, Homo sapiens
tattatagttttttt

SEQ ID NO: 956632 - DNA, 15 bp, Homo sapiens
attatagtttttttt

SEQ ID NO: 956633 - DNA, 15 bp, Homo sapiens
ttatagttttttttt

SEQ ID NO: 956634 - DNA, 15 bp, Homo sapiens
tatagtttttttttt

SEQ ID NO: 956635 - DNA, 15 bp, Homo sapiens
atagttttttttttt

SEQ ID NO: 956636 - DNA, 15 bp, Homo sapiens
tagtttttttttttt

SEQ ID NO: 956637 - DNA, 15 bp, Homo sapiens
ttttttttttttttc

SEQ ID NO: 956638 - DNA, 15 bp, Homo sapiens
tttttttttttttcc

SEQ ID NO: 956639 - DNA, 15 bp, Homo sapiens
ttttttttttttcct

SEQ ID NO: 956640 - DNA, 15 bp, Homo sapiens
tttttttttttcctt

SEQ ID NO: 956641 - DNA, 15 bp, Homo sapiens
ttttttttttccttt

SEQ ID NO: 956642 - DNA, 15 bp, Homo sapiens
tttttttttcctttt

SEQ ID NO: 956643 - DNA, 15 bp, Homo sapiens
ttttttttccttttt

SEQ ID NO: 956644 - DNA, 15 bp, Homo sapiens
tttttttcctttttg

SEQ ID NO: 956645 - DNA, 15 bp, Homo sapiens
ttttttcctttttga

SEQ ID NO: 956646 - DNA, 15 bp, Homo sapiens
tttttcctttttgag

SEQ ID NO: 956647 - DNA, 15 bp, Homo sapiens
ttttcctttttgaga

SEQ ID NO: 956648 - DNA, 15 bp, Homo sapiens
tttcctttttgagat

SEQ ID NO: 956649 - DNA, 15 bp, Homo sapiens
ttcctttttgagatg

SEQ ID NO: 956650 - DNA, 15 bp, Homo sapiens
tcctttttgagatgg

SEQ ID NO: 956651 - DNA, 15 bp, Homo sapiens
cctttttgagatgga

SEQ ID NO: 956652 - DNA, 15 bp, Homo sapiens
ctttttgagatggag

SEQ ID NO: 956653 - DNA, 15 bp, Homo sapiens
ttttgagatggagtt

SEQ ID NO: 956654 - DNA, 15 bp, Homo sapiens
tttgagatggagttt

SEQ ID NO: 956655 - DNA, 15 bp, Homo sapiens
ttgagatggagtttt

SEQ ID NO: 956656 - DNA, 15 bp, Homo sapiens
tgagatggagttttg

SEQ ID NO: 956657 - DNA, 15 bp, Homo sapiens
gagatggagttttgc

SEQ ID NO: 956658 - DNA, 15 bp, Homo sapiens
agatggagttttgct

SEQ ID NO: 956659 - DNA, 15 bp, Homo sapiens
gatggagttttgctc

SEQ ID NO: 956660 - DNA, 15 bp, Homo sapiens
atggagttttgctcg

SEQ ID NO: 956661 - DNA, 15 bp, Homo sapiens
tggagttttgctcgt

SEQ ID NO: 956662 - DNA, 15 bp, Homo sapiens
ggagttttgctcgtc

SEQ ID NO: 956663 - DNA, 15 bp, Homo sapiens
gagttttgctcgtcg

SEQ ID NO: 956664 - DNA, 15 bp, Homo sapiens
agttttgctcgtcgc

SEQ ID NO: 956665 - DNA, 15 bp, Homo sapiens
gttttgctcgtcgcc

SEQ ID NO: 956666 - DNA, 15 bp, Homo sapiens
ttttgctcgtcgccc

SEQ ID NO: 956667 - DNA, 15 bp, Homo sapiens
tttgctcgtcgccca

SEQ ID NO: 956668 - DNA, 15 bp, Homo sapiens
ttgctcgtcgcccag

SEQ ID NO: 956669 - DNA, 15 bp, Homo sapiens
tgctcgtcgcccagg

SEQ ID NO: 956670 - DNA, 15 bp, Homo sapiens
gctcgtcgcccaggc

SEQ ID NO: 956671 - DNA, 15 bp, Homo sapiens
tcttgttggcaatat

SEQ ID NO: 956672 - DNA, 15 bp, Homo sapiens
cttgttggcaatatt

SEQ ID NO: 956673 - DNA, 15 bp, Homo sapiens
ttgttggcaatatta

SEQ ID NO: 956674 - DNA, 15 bp, Homo sapiens
tgttggcaatattat

SEQ ID NO: 956675 - DNA, 15 bp, Homo sapiens
gttggcaatattata

SEQ ID NO: 956676 - DNA, 15 bp, Homo sapiens
ttggcaatattatat

SEQ ID NO: 956677 - DNA, 15 bp, Homo sapiens
tggcaatattatata

SEQ ID NO: 956678 - DNA, 15 bp, Homo sapiens
ggcaatattatatac

SEQ ID NO: 956679 - DNA, 15 bp, Homo sapiens
gcaatattatataca

SEQ ID NO: 956680 - DNA, 15 bp, Homo sapiens
caatattatatacat

SEQ ID NO: 956681 - DNA, 15 bp, Homo sapiens
aatattatatacatg

SEQ ID NO: 956682 - DNA, 15 bp, Homo sapiens
atattatatacatgc

SEQ ID NO: 956683 - DNA, 15 bp, Homo sapiens
tattatatacatgct

SEQ ID NO: 956684 - DNA, 15 bp, Homo sapiens
attatatacatgctt

SEQ ID NO: 956685 - DNA, 15 bp, Homo sapiens
ttatatacatgcttt

SEQ ID NO: 956686 - DNA, 15 bp, Homo sapiens
tatatacatgcttta

SEQ ID NO: 956687 - DNA, 15 bp, Homo sapiens
atatacatgctttag

SEQ ID NO: 956688 - DNA, 15 bp, Homo sapiens
tatacatgctttagt

SEQ ID NO: 956689 - DNA, 15 bp, Homo sapiens
atacatgctttagtg

SEQ ID NO: 956690 - DNA, 15 bp, Homo sapiens
tacatgctttagtga

SEQ ID NO: 956691 - DNA, 15 bp, Homo sapiens
acatgctttagtgaa

SEQ ID NO: 956692 - DNA, 15 bp, Homo sapiens
catgctttagtgaaa

SEQ ID NO: 956693 - DNA, 15 bp, Homo sapiens
atgctttagtgaaat

SEQ ID NO: 956694 - DNA, 15 bp, Homo sapiens
tgctttagtgaaata

SEQ ID NO: 956695 - DNA, 15 bp, Homo sapiens
gctttagtgaaatac

SEQ ID NO: 956696 - DNA, 15 bp, Homo sapiens
ctttagtgaaatacc

SEQ ID NO: 956697 - DNA, 15 bp, Homo sapiens
tttagtgaaatacct

SEQ ID NO: 956698 - DNA, 15 bp, Homo sapiens
ttagtgaaataccta

SEQ ID NO: 956699 - DNA, 15 bp, Homo sapiens
tagtgaaatacctaa

SEQ ID NO: 956700 - DNA, 15 bp, Homo sapiens
agtgaaatacctaaa

SEQ ID NO: 956701 - DNA, 15 bp, Homo sapiens
gtgaaatacctaaat

SEQ ID NO: 956702 - DNA, 15 bp, Homo sapiens
tgaaatacctaaatt

SEQ ID NO: 956703 - DNA, 15 bp, Homo sapiens
gaaatacctaaattt

SEQ ID NO: 956704 - DNA, 15 bp, Homo sapiens
aaatacctaaatttc

SEQ ID NO: 956705 - DNA, 15 bp, Homo sapiens
aatacctaaatttcc

SEQ ID NO: 956706 - DNA, 15 bp, Homo sapiens
atacctaaatttcca

SEQ ID NO: 956707 - DNA, 15 bp, Homo sapiens
tacctaaatttccaa

SEQ ID NO: 956708 - DNA, 15 bp, Homo sapiens
acctaaatttccaat

SEQ ID NO: 956709 - DNA, 15 bp, Homo sapiens
cctaaatttccaata

SEQ ID NO: 956710 - DNA, 15 bp, Homo sapiens
ctaaatttccaataa

SEQ ID NO: 956711 - DNA, 15 bp, Homo sapiens
taaatttccaataat

SEQ ID NO: 956712 - DNA, 15 bp, Homo sapiens
aaatttccaataatt

SEQ ID NO: 956713 - DNA, 15 bp, Homo sapiens
aatttccaataatta

SEQ ID NO: 956714 - DNA, 15 bp, Homo sapiens
atttccaataattat

SEQ ID NO: 956715 - DNA, 15 bp, Homo sapiens
tttccaataattatg

SEQ ID NO: 956716 - DNA, 15 bp, Homo sapiens
ttccaataattatgc

SEQ ID NO: 956717 - DNA, 15 bp, Homo sapiens
tccaataattatgcc

SEQ ID NO: 956718 - DNA, 15 bp, Homo sapiens
ccaataattatgccc

SEQ ID NO: 956719 - DNA, 15 bp, Homo sapiens
caataattatgccct

SEQ ID NO: 956720 - DNA, 15 bp, Homo sapiens
aataattatgccctt

SEQ ID NO: 956721 - DNA, 15 bp, Homo sapiens
ataattatgcccttt

SEQ ID NO: 956722 - DNA, 15 bp, Homo sapiens
taattatgcccttta

SEQ ID NO: 956723 - DNA, 15 bp, Homo sapiens
aattatgccctttaa

SEQ ID NO: 956724 - DNA, 15 bp, Homo sapiens
attatgccctttaag

SEQ ID NO: 956725 - DNA, 15 bp, Homo sapiens
ttatgccctttaagg

SEQ ID NO: 956726 - DNA, 15 bp, Homo sapiens
tatgccctttaaggg

SEQ ID NO: 956727 - DNA, 15 bp, Homo sapiens
atgccctttaaggga

SEQ ID NO: 956728 - DNA, 15 bp, Homo sapiens
tgccctttaagggat

SEQ ID NO: 956729 - DNA, 15 bp, Homo sapiens
gccctttaagggatc

SEQ ID NO: 956730 - DNA, 15 bp, Homo sapiens
ccctttaagggatct

SEQ ID NO: 956731 - DNA, 15 bp, Homo sapiens
cctttaagggatcta

SEQ ID NO: 956732 - DNA, 15 bp, Homo sapiens
ctttaagggatctaa

SEQ ID NO: 956733 - DNA, 15 bp, Homo sapiens
tttaagggatctaaa

SEQ ID NO: 956734 - DNA, 15 bp, Homo sapiens
ttaagggatctaaaa

SEQ ID NO: 956735 - DNA, 15 bp, Homo sapiens
taagggatctaaaat

SEQ ID NO: 956736 - DNA, 15 bp, Homo sapiens
aagggatctaaaata

SEQ ID NO: 956737 - DNA, 15 bp, Homo sapiens
agggatctaaaatag

SEQ ID NO: 956738 - DNA, 15 bp, Homo sapiens
gggatctaaaatagc

SEQ ID NO: 956739 - DNA, 15 bp, Homo sapiens
ggatctaaaatagcc

SEQ ID NO: 956740 - DNA, 15 bp, Homo sapiens
gatctaaaatagcca

SEQ ID NO: 956741 - DNA, 15 bp, Homo sapiens
atctaaaatagccag

SEQ ID NO: 956742 - DNA, 15 bp, Homo sapiens
tctaaaatagccaga

SEQ ID NO: 956743 - DNA, 15 bp, Homo sapiens
ctaaaatagccagat

SEQ ID NO: 956744 - DNA, 15 bp, Homo sapiens
taaaatagccagata

SEQ ID NO: 956745 - DNA, 15 bp, Homo sapiens
aaaatagccagatat

SEQ ID NO: 956746 - DNA, 15 bp, Homo sapiens
aaatagccagatatt

SEQ ID NO: 956747 - DNA, 15 bp, Homo sapiens
aatagccagatatta

SEQ ID NO: 956748 - DNA, 15 bp, Homo sapiens
atagccagatattaa

SEQ ID NO: 956749 - DNA, 15 bp, Homo sapiens
tagccagatattaag

SEQ ID NO: 956750 - DNA, 15 bp, Homo sapiens
agccagatattaaga

SEQ ID NO: 956751 - DNA, 15 bp, Homo sapiens
gccagatattaagag

SEQ ID NO: 956752 - DNA, 15 bp, Homo sapiens
ccagatattaagagt

SEQ ID NO: 956753 - DNA, 15 bp, Homo sapiens
cagatattaagagta

SEQ ID NO: 956754 - DNA, 15 bp, Homo sapiens
agatattaagagtat

SEQ ID NO: 956755 - DNA, 15 bp, Homo sapiens
gatattaagagtatt

SEQ ID NO: 956756 - DNA, 15 bp, Homo sapiens
atattaagagtattg

SEQ ID NO: 956757 - DNA, 15 bp, Homo sapiens
tattaagagtattgg

SEQ ID NO: 956758 - DNA, 15 bp, Homo sapiens
attaagagtattggt

SEQ ID NO: 956759 - DNA, 15 bp, Homo sapiens
ttaagagtattggta

SEQ ID NO: 956760 - DNA, 15 bp, Homo sapiens
taagagtattggtat

SEQ ID NO: 956761 - DNA, 15 bp, Homo sapiens
aagagtattggtatt

SEQ ID NO: 956762 - DNA, 15 bp, Homo sapiens
agagtattggtatta

SEQ ID NO: 956763 - DNA, 15 bp, Homo sapiens
gagtattggtattag

SEQ ID NO: 956764 - DNA, 15 bp, Homo sapiens
agtattggtattaga

SEQ ID NO: 956765 - DNA, 15 bp, Homo sapiens
gtattggtattagag

SEQ ID NO: 956766 - DNA, 15 bp, Homo sapiens
tattggtattagagt

SEQ ID NO: 956767 - DNA, 15 bp, Homo sapiens
attggtattagagtc

SEQ ID NO: 956768 - DNA, 15 bp, Homo sapiens
ttggtattagagtcc

SEQ ID NO: 956769 - DNA, 15 bp, Homo sapiens
tggtattagagtccc

SEQ ID NO: 956770 - DNA, 15 bp, Homo sapiens
ggtattagagtccct

SEQ ID NO: 956771 - DNA, 15 bp, Homo sapiens
gtattagagtccctt

SEQ ID NO: 956772 - DNA, 15 bp, Homo sapiens
tattagagtcccttg

SEQ ID NO: 956773 - DNA, 15 bp, Homo sapiens
attagagtcccttgt

SEQ ID NO: 956774 - DNA, 15 bp, Homo sapiens
ttagagtcccttgtt

SEQ ID NO: 956775 - DNA, 15 bp, Homo sapiens
tagagtcccttgttc

SEQ ID NO: 956776 - DNA, 15 bp, Homo sapiens
agagtcccttgttca

SEQ ID NO: 956777 - DNA, 15 bp, Homo sapiens
gagtcccttgttcac

SEQ ID NO: 956778 - DNA, 15 bp, Homo sapiens
agtcccttgttcact

SEQ ID NO: 956779 - DNA, 15 bp, Homo sapiens
gtcccttgttcacta

SEQ ID NO: 956780 - DNA, 15 bp, Homo sapiens
tcccttgttcactac

SEQ ID NO: 956781 - DNA, 15 bp, Homo sapiens
cccttgttcactact

SEQ ID NO: 956782 - DNA, 15 bp, Homo sapiens
ccttgttcactactc

SEQ ID NO: 956783 - DNA, 15 bp, Homo sapiens
cttgttcactactca

SEQ ID NO: 956784 - DNA, 15 bp, Homo sapiens
ttgttcactactcaa

SEQ ID NO: 956785 - DNA, 15 bp, Homo sapiens
tgttcactactcaag

SEQ ID NO: 956786 - DNA, 15 bp, Homo sapiens
gttcactactcaaga

SEQ ID NO: 956787 - DNA, 15 bp, Homo sapiens
ttcactactcaagac

SEQ ID NO: 956788 - DNA, 15 bp, Homo sapiens
tcactactcaagact

SEQ ID NO: 956789 - DNA, 15 bp, Homo sapiens
cactactcaagactt

SEQ ID NO: 956790 - DNA, 15 bp, Homo sapiens
actactcaagacttc

SEQ ID NO: 956791 - DNA, 15 bp, Homo sapiens
ctactcaagacttca

SEQ ID NO: 956792 - DNA, 15 bp, Homo sapiens
tactcaagacttcaa

SEQ ID NO: 956793 - DNA, 15 bp, Homo sapiens
actcaagacttcaac

SEQ ID NO: 956794 - DNA, 15 bp, Homo sapiens
ctcaagacttcaact

SEQ ID NO: 956795 - DNA, 15 bp, Homo sapiens
tcaagacttcaacta

SEQ ID NO: 956796 - DNA, 15 bp, Homo sapiens
caagacttcaactat

SEQ ID NO: 956797 - DNA, 15 bp, Homo sapiens
aagacttcaactata

SEQ ID NO: 956798 - DNA, 15 bp, Homo sapiens
agacttcaactatag

SEQ ID NO: 956799 - DNA, 15 bp, Homo sapiens
gacttcaactatagg

SEQ ID NO: 956800 - DNA, 15 bp, Homo sapiens
acttcaactataggt

SEQ ID NO: 956801 - DNA, 15 bp, Homo sapiens
cttcaactataggta

SEQ ID NO: 956802 - DNA, 15 bp, Homo sapiens
ttcaactataggtaa

SEQ ID NO: 956803 - DNA, 15 bp, Homo sapiens
tcaactataggtaac

SEQ ID NO: 956804 - DNA, 15 bp, Homo sapiens
caactataggtaaca

SEQ ID NO: 956805 - DNA, 15 bp, Homo sapiens
aactataggtaacag

SEQ ID NO: 956806 - DNA, 15 bp, Homo sapiens
actataggtaacaga

SEQ ID NO: 956807 - DNA, 15 bp, Homo sapiens
ctataggtaacagat

SEQ ID NO: 956808 - DNA, 15 bp, Homo sapiens
tataggtaacagatt

SEQ ID NO: 956809 - DNA, 15 bp, Homo sapiens
ataggtaacagattt

SEQ ID NO: 956810 - DNA, 15 bp, Homo sapiens
taggtaacagatttc

SEQ ID NO: 956811 - DNA, 15 bp, Homo sapiens
aggtaacagatttca

SEQ ID NO: 956812 - DNA, 15 bp, Homo sapiens
ggtaacagatttcat

SEQ ID NO: 956813 - DNA, 15 bp, Homo sapiens
gtaacagatttcata

SEQ ID NO: 956814 - DNA, 15 bp, Homo sapiens
taacagatttcataa

SEQ ID NO: 956815 - DNA, 15 bp, Homo sapiens
aacagatttcataaa

SEQ ID NO: 956816 - DNA, 15 bp, Homo sapiens
acagatttcataaat

SEQ ID NO: 956817 - DNA, 15 bp, Homo sapiens
cagatttcataaatg

SEQ ID NO: 956818 - DNA, 15 bp, Homo sapiens
agatttcataaatga

SEQ ID NO: 956819 - DNA, 15 bp, Homo sapiens
gatttcataaatgaa

SEQ ID NO: 956820 - DNA, 15 bp, Homo sapiens
atttcataaatgaat

SEQ ID NO: 956821 - DNA, 15 bp, Homo sapiens
tttcataaatgaata

SEQ ID NO: 956822 - DNA, 15 bp, Homo sapiens
ttcataaatgaatat

SEQ ID NO: 956823 - DNA, 15 bp, Homo sapiens
tcataaatgaatatt

SEQ ID NO: 956824 - DNA, 15 bp, Homo sapiens
cataaatgaatattt

SEQ ID NO: 956825 - DNA, 15 bp, Homo sapiens
ataaatgaatatttt

SEQ ID NO: 956826 - DNA, 15 bp, Homo sapiens
taaatgaatattttt

SEQ ID NO: 956827 - DNA, 15 bp, Homo sapiens
aaatgaatattttta

SEQ ID NO: 956828 - DNA, 15 bp, Homo sapiens
aatgaatatttttaa

SEQ ID NO: 956829 - DNA, 15 bp, Homo sapiens
atgaatatttttaaa

SEQ ID NO: 956830 - DNA, 15 bp, Homo sapiens
tgaatatttttaaag

SEQ ID NO: 956831 - DNA, 15 bp, Homo sapiens
gaatatttttaaagt

SEQ ID NO: 956832 - DNA, 15 bp, Homo sapiens
aatatttttaaagtg

SEQ ID NO: 956833 - DNA, 15 bp, Homo sapiens
atatttttaaagtga

SEQ ID NO: 956834 - DNA, 15 bp, Homo sapiens
tatttttaaagtgat

SEQ ID NO: 956835 - DNA, 15 bp, Homo sapiens
atttttaaagtgatg

SEQ ID NO: 956836 - DNA, 15 bp, Homo sapiens
tttttaaagtgatgc

SEQ ID NO: 956837 - DNA, 15 bp, Homo sapiens
ttttaaagtgatgct

SEQ ID NO: 956838 - DNA, 15 bp, Homo sapiens
tttaaagtgatgctg

SEQ ID NO: 956839 - DNA, 15 bp, Homo sapiens
ttaaagtgatgctgt

SEQ ID NO: 956840 - DNA, 15 bp, Homo sapiens
taaagtgatgctgtt

SEQ ID NO: 956841 - DNA, 15 bp, Homo sapiens
aaagtgatgctgttt

SEQ ID NO: 956842 - DNA, 15 bp, Homo sapiens
aagtgatgctgtttt

SEQ ID NO: 956843 - DNA, 15 bp, Homo sapiens
agtgatgctgtttta

SEQ ID NO: 956844 - DNA, 15 bp, Homo sapiens
gtgatgctgttttac

SEQ ID NO: 956845 - DNA, 15 bp, Homo sapiens
tgatgctgttttact

SEQ ID NO: 956846 - DNA, 15 bp, Homo sapiens
gatgctgttttacta

SEQ ID NO: 956847 - DNA, 15 bp, Homo sapiens
atgctgttttactag

SEQ ID NO: 956848 - DNA, 15 bp, Homo sapiens
tgctgttttactaga

SEQ ID NO: 956849 - DNA, 15 bp, Homo sapiens
gctgttttactagag

SEQ ID NO: 956850 - DNA, 15 bp, Homo sapiens
ctgttttactagagt

SEQ ID NO: 956851 - DNA, 15 bp, Homo sapiens
tgttttactagagta

SEQ ID NO: 956852 - DNA, 15 bp, Homo sapiens
gttttactagagtat

SEQ ID NO: 956853 - DNA, 15 bp, Homo sapiens
ttttactagagtata

SEQ ID NO: 956854 - DNA, 15 bp, Homo sapiens
tttactagagtatac

SEQ ID NO: 956855 - DNA, 15 bp, Homo sapiens
ttactagagtataca

SEQ ID NO: 956856 - DNA, 15 bp, Homo sapiens
tactagagtatacaa

SEQ ID NO: 956857 - DNA, 15 bp, Homo sapiens
actagagtatacaat

SEQ ID NO: 956858 - DNA, 15 bp, Homo sapiens
ctagagtatacaatg

SEQ ID NO: 956859 - DNA, 15 bp, Homo sapiens
tagagtatacaatgt

SEQ ID NO: 956860 - DNA, 15 bp, Homo sapiens
agagtatacaatgtt

SEQ ID NO: 956861 - DNA, 15 bp, Homo sapiens
gagtatacaatgttc

SEQ ID NO: 956862 - DNA, 15 bp, Homo sapiens
agtatacaatgttca

SEQ ID NO: 956863 - DNA, 15 bp, Homo sapiens
gtatacaatgttcac

SEQ ID NO: 956864 - DNA, 15 bp, Homo sapiens
tatacaatgttcact

SEQ ID NO: 956865 - DNA, 15 bp, Homo sapiens
atacaatgttcactc

SEQ ID NO: 956866 - DNA, 15 bp, Homo sapiens
tacaatgttcactct

SEQ ID NO: 956867 - DNA, 15 bp, Homo sapiens
acaatgttcactctt

SEQ ID NO: 956868 - DNA, 15 bp, Homo sapiens
caatgttcactcttt

SEQ ID NO: 956869 - DNA, 15 bp, Homo sapiens
aatgttcactcttta

SEQ ID NO: 956870 - DNA, 15 bp, Homo sapiens
atgttcactctttat

SEQ ID NO: 956871 - DNA, 15 bp, Homo sapiens
tgttcactctttata

SEQ ID NO: 956872 - DNA, 15 bp, Homo sapiens
gttcactctttataa

SEQ ID NO: 956873 - DNA, 15 bp, Homo sapiens
ttcactctttataaa

SEQ ID NO: 956874 - DNA, 15 bp, Homo sapiens
tcactctttataaag

SEQ ID NO: 956875 - DNA, 15 bp, Homo sapiens
cactctttataaagt

SEQ ID NO: 956876 - DNA, 15 bp, Homo sapiens
actctttataaagtt

SEQ ID NO: 956877 - DNA, 15 bp, Homo sapiens
ctctttataaagttg

SEQ ID NO: 956878 - DNA, 15 bp, Homo sapiens
tctttataaagttgt

SEQ ID NO: 956879 - DNA, 15 bp, Homo sapiens
ctttataaagttgtt

SEQ ID NO: 956880 - DNA, 15 bp, Homo sapiens
tttataaagttgttt

SEQ ID NO: 956881 - DNA, 15 bp, Homo sapiens
ttataaagttgtttt

SEQ ID NO: 956882 - DNA, 15 bp, Homo sapiens
tataaagttgttttc

SEQ ID NO: 956883 - DNA, 15 bp, Homo sapiens
ataaagttgttttcc

SEQ ID NO: 956884 - DNA, 15 bp, Homo sapiens
taaagttgttttcca

SEQ ID NO: 956885 - DNA, 15 bp, Homo sapiens
aaagttgttttccaa

SEQ ID NO: 956886 - DNA, 15 bp, Homo sapiens
aagttgttttccaat

SEQ ID NO: 956887 - DNA, 15 bp, Homo sapiens
agttgttttccaata

SEQ ID NO: 956888 - DNA, 15 bp, Homo sapiens
gttgttttccaataa

SEQ ID NO: 956889 - DNA, 15 bp, Homo sapiens
ttgttttccaataat

SEQ ID NO: 956890 - DNA, 15 bp, Homo sapiens
tgttttccaataata

SEQ ID NO: 956891 - DNA, 15 bp, Homo sapiens
gttttccaataatat

SEQ ID NO: 956892 - DNA, 15 bp, Homo sapiens
ttttccaataatatg

SEQ ID NO: 956893 - DNA, 15 bp, Homo sapiens
tttccaataatatgc

SEQ ID NO: 956894 - DNA, 15 bp, Homo sapiens
ttccaataatatgcc

SEQ ID NO: 956895 - DNA, 15 bp, Homo sapiens
tccaataatatgcct

SEQ ID NO: 956896 - DNA, 15 bp, Homo sapiens
ccaataatatgccta

SEQ ID NO: 956897 - DNA, 15 bp, Homo sapiens
caataatatgcctaa

SEQ ID NO: 956898 - DNA, 15 bp, Homo sapiens
aataatatgcctaat

SEQ ID NO: 956899 - DNA, 15 bp, Homo sapiens
ataatatgcctaatc

SEQ ID NO: 956900 - DNA, 15 bp, Homo sapiens
taatatgcctaatct

SEQ ID NO: 956901 - DNA, 15 bp, Homo sapiens
aatatgcctaatcta

SEQ ID NO: 956902 - DNA, 15 bp, Homo sapiens
atatgcctaatctaa

SEQ ID NO: 956903 - DNA, 15 bp, Homo sapiens
tatgcctaatctaaa

SEQ ID NO: 956904 - DNA, 15 bp, Homo sapiens
atgcctaatctaaaa

SEQ ID NO: 956905 - DNA, 15 bp, Homo sapiens
tgcctaatctaaaaa

SEQ ID NO: 956906 - DNA, 15 bp, Homo sapiens
gcctaatctaaaaaa

SEQ ID NO: 956907 - DNA, 15 bp, Homo sapiens
cctaatctaaaaaac

SEQ ID NO: 956908 - DNA, 15 bp, Homo sapiens
ctaatctaaaaaact

SEQ ID NO: 956909 - DNA, 15 bp, Homo sapiens
taatctaaaaaactg

SEQ ID NO: 956910 - DNA, 15 bp, Homo sapiens
aatctaaaaaactgt

SEQ ID NO: 956911 - DNA, 15 bp, Homo sapiens
atctaaaaaactgtc

SEQ ID NO: 956912 - DNA, 15 bp, Homo sapiens
tctaaaaaactgtca

SEQ ID NO: 956913 - DNA, 15 bp, Homo sapiens
ctaaaaaactgtcaa

SEQ ID NO: 956914 - DNA, 15 bp, Homo sapiens
taaaaaactgtcaat

SEQ ID NO: 956915 - DNA, 15 bp, Homo sapiens
aaaaaactgtcaata

SEQ ID NO: 956916 - DNA, 15 bp, Homo sapiens
aaaaactgtcaataa

SEQ ID NO: 956917 - DNA, 15 bp, Homo sapiens
aaaactgtcaataat

SEQ ID NO: 956918 - DNA, 15 bp, Homo sapiens
aaactgtcaataatt

SEQ ID NO: 956919 - DNA, 15 bp, Homo sapiens
aactgtcaataatta

SEQ ID NO: 956920 - DNA, 15 bp, Homo sapiens
actgtcaataattat

SEQ ID NO: 956921 - DNA, 15 bp, Homo sapiens
ctgtcaataattatt

SEQ ID NO: 956922 - DNA, 15 bp, Homo sapiens
tgtcaataattattg

SEQ ID NO: 956923 - DNA, 15 bp, Homo sapiens
gtcaataattattgc

SEQ ID NO: 956924 - DNA, 15 bp, Homo sapiens
tcaataattattgca

SEQ ID NO: 956925 - DNA, 15 bp, Homo sapiens
caataattattgcac

SEQ ID NO: 956926 - DNA, 15 bp, Homo sapiens
aataattattgcact

SEQ ID NO: 956927 - DNA, 15 bp, Homo sapiens
ataattattgcactt

SEQ ID NO: 956928 - DNA, 15 bp, Homo sapiens
taattattgcacttt

SEQ ID NO: 956929 - DNA, 15 bp, Homo sapiens
aattattgcactttt

SEQ ID NO: 956930 - DNA, 15 bp, Homo sapiens
attattgcacttttt

SEQ ID NO: 956931 - DNA, 15 bp, Homo sapiens
ttattgcactttttt

SEQ ID NO: 956932 - DNA, 15 bp, Homo sapiens
tattgcacttttttg

SEQ ID NO: 956933 - DNA, 15 bp, Homo sapiens
attgcacttttttga

SEQ ID NO: 956934 - DNA, 15 bp, Homo sapiens
ttgcacttttttgat

SEQ ID NO: 956935 - DNA, 15 bp, Homo sapiens
tgcacttttttgatg

SEQ ID NO: 956936 - DNA, 15 bp, Homo sapiens
gcacttttttgatgt

SEQ ID NO: 956937 - DNA, 15 bp, Homo sapiens
cacttttttgatgtg

SEQ ID NO: 956938 - DNA, 15 bp, Homo sapiens
acttttttgatgtgg

SEQ ID NO: 956939 - DNA, 15 bp, Homo sapiens
cttttttgatgtggc

SEQ ID NO: 956940 - DNA, 15 bp, Homo sapiens
ttttttgatgtggca

SEQ ID NO: 956941 - DNA, 15 bp, Homo sapiens
tttttgatgtggcac

SEQ ID NO: 956942 - DNA, 15 bp, Homo sapiens
ttttgatgtggcacc

SEQ ID NO: 956943 - DNA, 15 bp, Homo sapiens
tttgatgtggcacct

SEQ ID NO: 956944 - DNA, 15 bp, Homo sapiens
ttgatgtggcacctg

SEQ ID NO: 956945 - DNA, 15 bp, Homo sapiens
tgatgtggcacctgg

SEQ ID NO: 956946 - DNA, 15 bp, Homo sapiens
gatgtggcacctgga

SEQ ID NO: 956947 - DNA, 15 bp, Homo sapiens
atgtggcacctggac

SEQ ID NO: 956948 - DNA, 15 bp, Homo sapiens
tgtggcacctggaca

SEQ ID NO: 956949 - DNA, 15 bp, Homo sapiens
gtggcacctggacat

SEQ ID NO: 956950 - DNA, 15 bp, Homo sapiens
tggcacctggacatc

SEQ ID NO: 956951 - DNA, 15 bp, Homo sapiens
ggcacctggacatct

SEQ ID NO: 956952 - DNA, 15 bp, Homo sapiens
gcacctggacatctg

SEQ ID NO: 956953 - DNA, 15 bp, Homo sapiens
cacctggacatctgc

SEQ ID NO: 956954 - DNA, 15 bp, Homo sapiens
acctggacatctgct

SEQ ID NO: 956955 - DNA, 15 bp, Homo sapiens
cctggacatctgcta

SEQ ID NO: 956956 - DNA, 15 bp, Homo sapiens
ctggacatctgctaa

SEQ ID NO: 956957 - DNA, 15 bp, Homo sapiens
tggacatctgctaaa

SEQ ID NO: 956958 - DNA, 15 bp, Homo sapiens
ggacatctgctaaag

SEQ ID NO: 956959 - DNA, 15 bp, Homo sapiens
gacatctgctaaagc

SEQ ID NO: 956960 - DNA, 15 bp, Homo sapiens
acatctgctaaagct

SEQ ID NO: 956961 - DNA, 15 bp, Homo sapiens
catctgctaaagcta

SEQ ID NO: 956962 - DNA, 15 bp, Homo sapiens
atctgctaaagctaa

SEQ ID NO: 956963 - DNA, 15 bp, Homo sapiens
tctgctaaagctaat

SEQ ID NO: 956964 - DNA, 15 bp, Homo sapiens
ctgctaaagctaatt

SEQ ID NO: 956965 - DNA, 15 bp, Homo sapiens
tgctaaagctaattt

SEQ ID NO: 956966 - DNA, 15 bp, Homo sapiens
gctaaagctaatttc

SEQ ID NO: 956967 - DNA, 15 bp, Homo sapiens
ctaaagctaatttcc

SEQ ID NO: 956968 - DNA, 15 bp, Homo sapiens
taaagctaatttcct

SEQ ID NO: 956969 - DNA, 15 bp, Homo sapiens
aaagctaatttccta

SEQ ID NO: 956970 - DNA, 15 bp, Homo sapiens
aagctaatttcctag

SEQ ID NO: 956971 - DNA, 15 bp, Homo sapiens
agctaatttcctagg

SEQ ID NO: 956972 - DNA, 15 bp, Homo sapiens
gctaatttcctagga

SEQ ID NO: 956973 - DNA, 15 bp, Homo sapiens
ctaatttcctaggac

SEQ ID NO: 956974 - DNA, 15 bp, Homo sapiens
taatttcctaggaca

SEQ ID NO: 956975 - DNA, 15 bp, Homo sapiens
aatttcctaggacat

SEQ ID NO: 956976 - DNA, 15 bp, Homo sapiens
atttcctaggacatt

SEQ ID NO: 956977 - DNA, 15 bp, Homo sapiens
tttcctaggacatta

SEQ ID NO: 956978 - DNA, 15 bp, Homo sapiens
ttcctaggacattaa

SEQ ID NO: 956979 - DNA, 15 bp, Homo sapiens
tcctaggacattaat

SEQ ID NO: 956980 - DNA, 15 bp, Homo sapiens
cctaggacattaatc

SEQ ID NO: 956981 - DNA, 15 bp, Homo sapiens
ctaggacattaatca

SEQ ID NO: 956982 - DNA, 15 bp, Homo sapiens
taggacattaatcat

SEQ ID NO: 956983 - DNA, 15 bp, Homo sapiens
aggacattaatcatt

SEQ ID NO: 956984 - DNA, 15 bp, Homo sapiens
ggacattaatcattc

SEQ ID NO: 956985 - DNA, 15 bp, Homo sapiens
gacattaatcattca

SEQ ID NO: 956986 - DNA, 15 bp, Homo sapiens
acattaatcattcat

SEQ ID NO: 956987 - DNA, 15 bp, Homo sapiens
cattaatcattcatt

SEQ ID NO: 956988 - DNA, 15 bp, Homo sapiens
attaatcattcattt

SEQ ID NO: 956989 - DNA, 15 bp, Homo sapiens
ttaatcattcatttc

SEQ ID NO: 956990 - DNA, 15 bp, Homo sapiens
taatcattcatttca

SEQ ID NO: 956991 - DNA, 15 bp, Homo sapiens
aatcattcatttcaa

SEQ ID NO: 956992 - DNA, 15 bp, Homo sapiens
atcattcatttcaaa

SEQ ID NO: 956993 - DNA, 15 bp, Homo sapiens
tcattcatttcaaat

SEQ ID NO: 956994 - DNA, 15 bp, Homo sapiens
cattcatttcaaata

SEQ ID NO: 956995 - DNA, 15 bp, Homo sapiens
attcatttcaaatac

SEQ ID NO: 956996 - DNA, 15 bp, Homo sapiens
ttcatttcaaataca

SEQ ID NO: 956997 - DNA, 15 bp, Homo sapiens
tcatttcaaatacag

SEQ ID NO: 956998 - DNA, 15 bp, Homo sapiens
catttcaaatacaga

SEQ ID NO: 956999 - DNA, 15 bp, Homo sapiens
atttcaaatacagag

SEQ ID NO: 957000 - DNA, 15 bp, Homo sapiens
tttcaaatacagagt

SEQ ID NO: 957001 - DNA, 15 bp, Homo sapiens
ttcaaatacagagta

SEQ ID NO: 957002 - DNA, 15 bp, Homo sapiens
tcaaatacagagtaa

SEQ ID NO: 957003 - DNA, 15 bp, Homo sapiens
caaatacagagtaaa

SEQ ID NO: 957004 - DNA, 15 bp, Homo sapiens
aaatacagagtaaaa

SEQ ID NO: 957005 - DNA, 15 bp, Homo sapiens
aatacagagtaaaat

SEQ ID NO: 957006 - DNA, 15 bp, Homo sapiens
atacagagtaaaata

SEQ ID NO: 957007 - DNA, 15 bp, Homo sapiens
tacagagtaaaatat

SEQ ID NO: 957008 - DNA, 15 bp, Homo sapiens
acagagtaaaatatc

SEQ ID NO: 957009 - DNA, 15 bp, Homo sapiens
cagagtaaaatatca

SEQ ID NO: 957010 - DNA, 15 bp, Homo sapiens
agagtaaaatatcag

SEQ ID NO: 957011 - DNA, 15 bp, Homo sapiens
gagtaaaatatcaga

SEQ ID NO: 957012 - DNA, 15 bp, Homo sapiens
agtaaaatatcagat

SEQ ID NO: 957013 - DNA, 15 bp, Homo sapiens
gtaaaatatcagatt

SEQ ID NO: 957014 - DNA, 15 bp, Homo sapiens
taaaatatcagattc

SEQ ID NO: 957015 - DNA, 15 bp, Homo sapiens
aaaatatcagattct

SEQ ID NO: 957016 - DNA, 15 bp, Homo sapiens
aaatatcagattcta

SEQ ID NO: 957017 - DNA, 15 bp, Homo sapiens
aatatcagattctag

SEQ ID NO: 957018 - DNA, 15 bp, Homo sapiens
atatcagattctaga

SEQ ID NO: 957019 - DNA, 15 bp, Homo sapiens
tatcagattctagaa

SEQ ID NO: 957020 - DNA, 15 bp, Homo sapiens
atcagattctagaat

SEQ ID NO: 957021 - DNA, 15 bp, Homo sapiens
tcagattctagaatg

SEQ ID NO: 957022 - DNA, 15 bp, Homo sapiens
cagattctagaatga

SEQ ID NO: 957023 - DNA, 15 bp, Homo sapiens
agattctagaatgac

SEQ ID NO: 957024 - DNA, 15 bp, Homo sapiens
gattctagaatgacg

SEQ ID NO: 957025 - DNA, 15 bp, Homo sapiens
attctagaatgacga

SEQ ID NO: 957026 - DNA, 15 bp, Homo sapiens
ttctagaatgacgac

SEQ ID NO: 957027 - DNA, 15 bp, Homo sapiens
tctagaatgacgact

SEQ ID NO: 957028 - DNA, 15 bp, Homo sapiens
ctagaatgacgacta

SEQ ID NO: 957029 - DNA, 15 bp, Homo sapiens
tagaatgacgactag

SEQ ID NO: 957030 - DNA, 15 bp, Homo sapiens
agaatgacgactagc

SEQ ID NO: 957031 - DNA, 15 bp, Homo sapiens
gaatgacgactagca

SEQ ID NO: 957032 - DNA, 15 bp, Homo sapiens
aatgacgactagcag

SEQ ID NO: 957033 - DNA, 15 bp, Homo sapiens
atgacgactagcagt

SEQ ID NO: 957034 - DNA, 15 bp, Homo sapiens
tgacgactagcagta

SEQ ID NO: 957035 - DNA, 15 bp, Homo sapiens
gacgactagcagtag

SEQ ID NO: 957036 - DNA, 15 bp, Homo sapiens
acgactagcagtagc

SEQ ID NO: 957037 - DNA, 15 bp, Homo sapiens
cgactagcagtagcc

SEQ ID NO: 957038 - DNA, 15 bp, Homo sapiens
gactagcagtagcct

SEQ ID NO: 957039 - DNA, 15 bp, Homo sapiens
actagcagtagcctc

SEQ ID NO: 957040 - DNA, 15 bp, Homo sapiens
ctagcagtagcctct

SEQ ID NO: 957041 - DNA, 15 bp, Homo sapiens
tagcagtagcctcta

SEQ ID NO: 957042 - DNA, 15 bp, Homo sapiens
agcagtagcctctac

SEQ ID NO: 957043 - DNA, 15 bp, Homo sapiens
gcagtagcctctaca

SEQ ID NO: 957044 - DNA, 15 bp, Homo sapiens
cagtagcctctacat

SEQ ID NO: 957045 - DNA, 15 bp, Homo sapiens
agtagcctctacatc

SEQ ID NO: 957046 - DNA, 15 bp, Homo sapiens
gtagcctctacatct

SEQ ID NO: 957047 - DNA, 15 bp, Homo sapiens
tagcctctacatctt

SEQ ID NO: 957048 - DNA, 15 bp, Homo sapiens
agcctctacatcttg

SEQ ID NO: 957049 - DNA, 15 bp, Homo sapiens
gcctctacatcttgg

SEQ ID NO: 957050 - DNA, 15 bp, Homo sapiens
cctctacatcttggg

SEQ ID NO: 957051 - DNA, 15 bp, Homo sapiens
ctctacatcttgggt

SEQ ID NO: 957052 - DNA, 15 bp, Homo sapiens
tctacatcttgggtt

SEQ ID NO: 957053 - DNA, 15 bp, Homo sapiens
ctacatcttgggtta

SEQ ID NO: 957054 - DNA, 15 bp, Homo sapiens
tacatcttgggttaa

SEQ ID NO: 957055 - DNA, 15 bp, Homo sapiens
acatcttgggttaat

SEQ ID NO: 957056 - DNA, 15 bp, Homo sapiens
catcttgggttaatg

SEQ ID NO: 957057 - DNA, 15 bp, Homo sapiens
atcttgggttaatgt

SEQ ID NO: 957058 - DNA, 15 bp, Homo sapiens
tcttgggttaatgtt

SEQ ID NO: 957059 - DNA, 15 bp, Homo sapiens
cttgggttaatgttt

SEQ ID NO: 957060 - DNA, 15 bp, Homo sapiens
ttgggttaatgtttt

SEQ ID NO: 957061 - DNA, 15 bp, Homo sapiens
tgggttaatgttttt

SEQ ID NO: 957062 - DNA, 15 bp, Homo sapiens
gggttaatgtttttc

SEQ ID NO: 957063 - DNA, 15 bp, Homo sapiens
ggttaatgtttttca

SEQ ID NO: 957064 - DNA, 15 bp, Homo sapiens
gttaatgtttttcaa

SEQ ID NO: 957065 - DNA, 15 bp, Homo sapiens
ttaatgtttttcaaa

SEQ ID NO: 957066 - DNA, 15 bp, Homo sapiens
taatgtttttcaaaa

SEQ ID NO: 957067 - DNA, 15 bp, Homo sapiens
aatgtttttcaaaat

SEQ ID NO: 957068 - DNA, 15 bp, Homo sapiens
atgtttttcaaaatg

SEQ ID NO: 957069 - DNA, 15 bp, Homo sapiens
tgtttttcaaaatgt

SEQ ID NO: 957070 - DNA, 15 bp, Homo sapiens
gtttttcaaaatgtt

SEQ ID NO: 957071 - DNA, 15 bp, Homo sapiens
tttttcaaaatgttt

SEQ ID NO: 957072 - DNA, 15 bp, Homo sapiens
ttttcaaaatgttta

SEQ ID NO: 957073 - DNA, 15 bp, Homo sapiens
tttcaaaatgtttaa

SEQ ID NO: 957074 - DNA, 15 bp, Homo sapiens
ttcaaaatgtttaag

SEQ ID NO: 957075 - DNA, 15 bp, Homo sapiens
tcaaaatgtttaaga

SEQ ID NO: 957076 - DNA, 15 bp, Homo sapiens
caaaatgtttaagaa

SEQ ID NO: 957077 - DNA, 15 bp, Homo sapiens
aaaatgtttaagaat

SEQ ID NO: 957078 - DNA, 15 bp, Homo sapiens
aaatgtttaagaatg

SEQ ID NO: 957079 - DNA, 15 bp, Homo sapiens
aatgtttaagaatgt

SEQ ID NO: 957080 - DNA, 15 bp, Homo sapiens
atgtttaagaatgtg

SEQ ID NO: 957081 - DNA, 15 bp, Homo sapiens
tgtttaagaatgtgt

SEQ ID NO: 957082 - DNA, 15 bp, Homo sapiens
gtttaagaatgtgtc

SEQ ID NO: 957083 - DNA, 15 bp, Homo sapiens
tttaagaatgtgtcc

SEQ ID NO: 957084 - DNA, 15 bp, Homo sapiens
ttaagaatgtgtcct

SEQ ID NO: 957085 - DNA, 15 bp, Homo sapiens
taagaatgtgtcctg

SEQ ID NO: 957086 - DNA, 15 bp, Homo sapiens
aagaatgtgtcctgt

SEQ ID NO: 957087 - DNA, 15 bp, Homo sapiens
agaatgtgtcctgtg

SEQ ID NO: 957088 - DNA, 15 bp, Homo sapiens
gaatgtgtcctgtgc

SEQ ID NO: 957089 - DNA, 15 bp, Homo sapiens
aatgtgtcctgtgct

SEQ ID NO: 957090 - DNA, 15 bp, Homo sapiens
atgtgtcctgtgctc

SEQ ID NO: 957091 - DNA, 15 bp, Homo sapiens
tgtgtcctgtgctca

SEQ ID NO: 957092 - DNA, 15 bp, Homo sapiens
gtgtcctgtgctcaa

SEQ ID NO: 957093 - DNA, 15 bp, Homo sapiens
tgtcctgtgctcaaa

SEQ ID NO: 957094 - DNA, 15 bp, Homo sapiens
gtcctgtgctcaaat

SEQ ID NO: 957095 - DNA, 15 bp, Homo sapiens
tcctgtgctcaaata

SEQ ID NO: 957096 - DNA, 15 bp, Homo sapiens
cctgtgctcaaatag

SEQ ID NO: 957097 - DNA, 15 bp, Homo sapiens
ctgtgctcaaatagt

SEQ ID NO: 957098 - DNA, 15 bp, Homo sapiens
tgtgctcaaatagta

SEQ ID NO: 957099 - DNA, 15 bp, Homo sapiens
gtgctcaaatagtat

SEQ ID NO: 957100 - DNA, 15 bp, Homo sapiens
tgctcaaatagtatt

SEQ ID NO: 957101 - DNA, 15 bp, Homo sapiens
gctcaaatagtattt

SEQ ID NO: 957102 - DNA, 15 bp, Homo sapiens
ctcaaatagtattta

SEQ ID NO: 957103 - DNA, 15 bp, Homo sapiens
tcaaatagtatttaa

SEQ ID NO: 957104 - DNA, 15 bp, Homo sapiens
caaatagtatttaat

SEQ ID NO: 957105 - DNA, 15 bp, Homo sapiens
aaatagtatttaata

SEQ ID NO: 957106 - DNA, 15 bp, Homo sapiens
aatagtatttaataa

SEQ ID NO: 957107 - DNA, 15 bp, Homo sapiens
atagtatttaataaa

SEQ ID NO: 957108 - DNA, 15 bp, Homo sapiens
tagtatttaataaag

SEQ ID NO: 957109 - DNA, 15 bp, Homo sapiens
agtatttaataaagt

SEQ ID NO: 957110 - DNA, 15 bp, Homo sapiens
gtatttaataaagtt

SEQ ID NO: 957111 - DNA, 15 bp, Homo sapiens
tatttaataaagttg

SEQ ID NO: 957112 - DNA, 15 bp, Homo sapiens
atttaataaagttgg

SEQ ID NO: 957113 - DNA, 15 bp, Homo sapiens
tttaataaagttgga

SEQ ID NO: 957114 - DNA, 15 bp, Homo sapiens
ttaataaagttggag

SEQ ID NO: 957115 - DNA, 15 bp, Homo sapiens
taataaagttggaga

SEQ ID NO: 957116 - DNA, 15 bp, Homo sapiens
aataaagttggagag

SEQ ID NO: 957117 - DNA, 15 bp, Homo sapiens
ataaagttggagagt

SEQ ID NO: 957118 - DNA, 15 bp, Homo sapiens
taaagttggagagtg

SEQ ID NO: 957119 - DNA, 15 bp, Homo sapiens
aaagttggagagtga

SEQ ID NO: 957120 - DNA, 15 bp, Homo sapiens
aagttggagagtgag

SEQ ID NO: 957121 - DNA, 15 bp, Homo sapiens
agttggagagtgagc

SEQ ID NO: 957122 - DNA, 15 bp, Homo sapiens
gttggagagtgagct

SEQ ID NO: 957123 - DNA, 15 bp, Homo sapiens
ttggagagtgagctc

SEQ ID NO: 957124 - DNA, 15 bp, Homo sapiens
tggagagtgagctct

SEQ ID NO: 957125 - DNA, 15 bp, Homo sapiens
ggagagtgagctctg

SEQ ID NO: 957126 - DNA, 15 bp, Homo sapiens
gagagtgagctctga

SEQ ID NO: 957127 - DNA, 15 bp, Homo sapiens
agagtgagctctgac

SEQ ID NO: 957128 - DNA, 15 bp, Homo sapiens
gagtgagctctgact

SEQ ID NO: 957129 - DNA, 15 bp, Homo sapiens
agtgagctctgacta

SEQ ID NO: 957130 - DNA, 15 bp, Homo sapiens
gtgagctctgactac

SEQ ID NO: 957131 - DNA, 15 bp, Homo sapiens
tgagctctgactact

SEQ ID NO: 957132 - DNA, 15 bp, Homo sapiens
gagctctgactactt

SEQ ID NO: 957133 - DNA, 15 bp, Homo sapiens
agctctgactacttg

SEQ ID NO: 957134 - DNA, 15 bp, Homo sapiens
gctctgactacttgg

SEQ ID NO: 957135 - DNA, 15 bp, Homo sapiens
ctctgactacttggg

SEQ ID NO: 957136 - DNA, 15 bp, Homo sapiens
tctgactacttggga

SEQ ID NO: 957137 - DNA, 15 bp, Homo sapiens
ctgactacttgggaa

SEQ ID NO: 957138 - DNA, 15 bp, Homo sapiens
tgactacttgggaat

SEQ ID NO: 957139 - DNA, 15 bp, Homo sapiens
gactacttgggaatg

SEQ ID NO: 957140 - DNA, 15 bp, Homo sapiens
actacttgggaatga

SEQ ID NO: 957141 - DNA, 15 bp, Homo sapiens
ctacttgggaatgag

SEQ ID NO: 957142 - DNA, 15 bp, Homo sapiens
tacttgggaatgaga

SEQ ID NO: 957143 - DNA, 15 bp, Homo sapiens
acttgggaatgagac

SEQ ID NO: 957144 - DNA, 15 bp, Homo sapiens
cttgggaatgagaca

SEQ ID NO: 957145 - DNA, 15 bp, Homo sapiens
ttgggaatgagacat

SEQ ID NO: 957146 - DNA, 15 bp, Homo sapiens
tgggaatgagacata

SEQ ID NO: 957147 - DNA, 15 bp, Homo sapiens
gggaatgagacatat

SEQ ID NO: 957148 - DNA, 15 bp, Homo sapiens
ggaatgagacatatc

SEQ ID NO: 957149 - DNA, 15 bp, Homo sapiens
gaatgagacatatct

SEQ ID NO: 957150 - DNA, 15 bp, Homo sapiens
aatgagacatatctt

SEQ ID NO: 957151 - DNA, 15 bp, Homo sapiens
atgagacatatctta

SEQ ID NO: 957152 - DNA, 15 bp, Homo sapiens
tgagacatatcttaa

SEQ ID NO: 957153 - DNA, 15 bp, Homo sapiens
gagacatatcttaaa

SEQ ID NO: 957154 - DNA, 15 bp, Homo sapiens
agacatatcttaaaa

SEQ ID NO: 957155 - DNA, 15 bp, Homo sapiens
gacatatcttaaaat

SEQ ID NO: 957156 - DNA, 15 bp, Homo sapiens
acatatcttaaaatg

SEQ ID NO: 957157 - DNA, 15 bp, Homo sapiens
catatcttaaaatgg

SEQ ID NO: 957158 - DNA, 15 bp, Homo sapiens
atatcttaaaatggt

SEQ ID NO: 957159 - DNA, 15 bp, Homo sapiens
tatcttaaaatggtt

SEQ ID NO: 957160 - DNA, 15 bp, Homo sapiens
atcttaaaatggttt

SEQ ID NO: 957161 - DNA, 15 bp, Homo sapiens
tcttaaaatggttta

SEQ ID NO: 957162 - DNA, 15 bp, Homo sapiens
cttaaaatggtttaa

SEQ ID NO: 957163 - DNA, 15 bp, Homo sapiens
ttaaaatggtttaat

SEQ ID NO: 957164 - DNA, 15 bp, Homo sapiens
taaaatggtttaatg

SEQ ID NO: 957165 - DNA, 15 bp, Homo sapiens
aaaatggtttaatgt

SEQ ID NO: 957166 - DNA, 15 bp, Homo sapiens
aaatggtttaatgtt

SEQ ID NO: 957167 - DNA, 15 bp, Homo sapiens
aatggtttaatgttc

SEQ ID NO: 957168 - DNA, 15 bp, Homo sapiens
atggtttaatgttct

SEQ ID NO: 957169 - DNA, 15 bp, Homo sapiens
tggtttaatgttcta

SEQ ID NO: 957170 - DNA, 15 bp, Homo sapiens
ggtttaatgttctac

SEQ ID NO: 957171 - DNA, 15 bp, Homo sapiens
gtttaatgttctact

SEQ ID NO: 957172 - DNA, 15 bp, Homo sapiens
tttaatgttctactt

SEQ ID NO: 957173 - DNA, 15 bp, Homo sapiens
ttaatgttctacttt

SEQ ID NO: 957174 - DNA, 15 bp, Homo sapiens
taatgttctactttg

SEQ ID NO: 957175 - DNA, 15 bp, Homo sapiens
aatgttctactttgg

SEQ ID NO: 957176 - DNA, 15 bp, Homo sapiens
atgttctactttgga

SEQ ID NO: 957177 - DNA, 15 bp, Homo sapiens
tgttctactttggag

SEQ ID NO: 957178 - DNA, 15 bp, Homo sapiens
gttctactttggaga

SEQ ID NO: 957179 - DNA, 15 bp, Homo sapiens
ttctactttggagat

SEQ ID NO: 957180 - DNA, 15 bp, Homo sapiens
tctactttggagata

SEQ ID NO: 957181 - DNA, 15 bp, Homo sapiens
ctactttggagatat

SEQ ID NO: 957182 - DNA, 15 bp, Homo sapiens
tactttggagatatg

SEQ ID NO: 957183 - DNA, 15 bp, Homo sapiens
actttggagatatgg

SEQ ID NO: 957184 - DNA, 15 bp, Homo sapiens
ctttggagatatgga

SEQ ID NO: 957185 - DNA, 15 bp, Homo sapiens
tttggagatatggat

SEQ ID NO: 957186 - DNA, 15 bp, Homo sapiens
ttggagatatggata

SEQ ID NO: 957187 - DNA, 15 bp, Homo sapiens
tggagatatggataa

SEQ ID NO: 957188 - DNA, 15 bp, Homo sapiens
ggagatatggataaa

SEQ ID NO: 957189 - DNA, 15 bp, Homo sapiens
gagatatggataaat

SEQ ID NO: 957190 - DNA, 15 bp, Homo sapiens
agatatggataaata

SEQ ID NO: 957191 - DNA, 15 bp, Homo sapiens
gatatggataaatag

SEQ ID NO: 957192 - DNA, 15 bp, Homo sapiens
atatggataaatagt

SEQ ID NO: 957193 - DNA, 15 bp, Homo sapiens
tatggataaatagtt

SEQ ID NO: 957194 - DNA, 15 bp, Homo sapiens
atggataaatagttt

SEQ ID NO: 957195 - DNA, 15 bp, Homo sapiens
tggataaatagttta

SEQ ID NO: 957196 - DNA, 15 bp, Homo sapiens
ggataaatagtttaa

SEQ ID NO: 957197 - DNA, 15 bp, Homo sapiens
gataaatagtttaaa

SEQ ID NO: 957198 - DNA, 15 bp, Homo sapiens
ataaatagtttaaaa

SEQ ID NO: 957199 - DNA, 15 bp, Homo sapiens
taaatagtttaaaaa

SEQ ID NO: 957200 - DNA, 15 bp, Homo sapiens
aaatagtttaaaaag

SEQ ID NO: 957201 - DNA, 15 bp, Homo sapiens
aatagtttaaaaagg

SEQ ID NO: 957202 - DNA, 15 bp, Homo sapiens
atagtttaaaaaggt

SEQ ID NO: 957203 - DNA, 15 bp, Homo sapiens
tagtttaaaaaggta

SEQ ID NO: 957204 - DNA, 15 bp, Homo sapiens
agtttaaaaaggtaa

SEQ ID NO: 957205 - DNA, 15 bp, Homo sapiens
gtttaaaaaggtaaa

SEQ ID NO: 957206 - DNA, 15 bp, Homo sapiens
tttaaaaaggtaaaa

SEQ ID NO: 957207 - DNA, 15 bp, Homo sapiens
ttaaaaaggtaaaaa

SEQ ID NO: 957208 - DNA, 15 bp, Homo sapiens
taaaaaggtaaaaag

SEQ ID NO: 957209 - DNA, 15 bp, Homo sapiens
aaaaaggtaaaaagt

SEQ ID NO: 957210 - DNA, 15 bp, Homo sapiens
aaaaggtaaaaagtt

SEQ ID NO: 957211 - DNA, 15 bp, Homo sapiens
aaaggtaaaaagttc

SEQ ID NO: 957212 - DNA, 15 bp, Homo sapiens
aaggtaaaaagttca

SEQ ID NO: 957213 - DNA, 15 bp, Homo sapiens
aggtaaaaagttcat

SEQ ID NO: 957214 - DNA, 15 bp, Homo sapiens
ggtaaaaagttcatg

SEQ ID NO: 957215 - DNA, 15 bp, Homo sapiens
gtaaaaagttcatgg

SEQ ID NO: 957216 - DNA, 15 bp, Homo sapiens
taaaaagttcatggt

SEQ ID NO: 957217 - DNA, 15 bp, Homo sapiens
aaaaagttcatggtt

SEQ ID NO: 957218 - DNA, 15 bp, Homo sapiens
aaaagttcatggttt

SEQ ID NO: 957219 - DNA, 15 bp, Homo sapiens
aaagttcatggtttc

SEQ ID NO: 957220 - DNA, 15 bp, Homo sapiens
aagttcatggtttct

SEQ ID NO: 957221 - DNA, 15 bp, Homo sapiens
agttcatggtttcta

SEQ ID NO: 957222 - DNA, 15 bp, Homo sapiens
gttcatggtttctat

SEQ ID NO: 957223 - DNA, 15 bp, Homo sapiens
ttcatggtttctatt

SEQ ID NO: 957224 - DNA, 15 bp, Homo sapiens
tcatggtttctattc

SEQ ID NO: 957225 - DNA, 15 bp, Homo sapiens
catggtttctattcc

SEQ ID NO: 957226 - DNA, 15 bp, Homo sapiens
atggtttctattccc

SEQ ID NO: 957227 - DNA, 15 bp, Homo sapiens
tggtttctattcccc

SEQ ID NO: 957228 - DNA, 15 bp, Homo sapiens
ggtttctattccccc

SEQ ID NO: 957229 - DNA, 15 bp, Homo sapiens
gtttctattccccca

SEQ ID NO: 957230 - DNA, 15 bp, Homo sapiens
tttctattcccccat

SEQ ID NO: 957231 - DNA, 15 bp, Homo sapiens
ttctattcccccata

SEQ ID NO: 957232 - DNA, 15 bp, Homo sapiens
tctattcccccatat

SEQ ID NO: 957233 - DNA, 15 bp, Homo sapiens
ctattcccccatatt

SEQ ID NO: 957234 - DNA, 15 bp, Homo sapiens
tattcccccatattt

SEQ ID NO: 957235 - DNA, 15 bp, Homo sapiens
attcccccatatttt

SEQ ID NO: 957236 - DNA, 15 bp, Homo sapiens
ttcccccatatttta

SEQ ID NO: 957237 - DNA, 15 bp, Homo sapiens
tcccccatattttaa

SEQ ID NO: 957238 - DNA, 15 bp, Homo sapiens
cccccatattttaaa

SEQ ID NO: 957239 - DNA, 15 bp, Homo sapiens
ccccatattttaaag

SEQ ID NO: 957240 - DNA, 15 bp, Homo sapiens
cccatattttaaagt

SEQ ID NO: 957241 - DNA, 15 bp, Homo sapiens
ccatattttaaagta

SEQ ID NO: 957242 - DNA, 15 bp, Homo sapiens
catattttaaagtat

SEQ ID NO: 957243 - DNA, 15 bp, Homo sapiens
atattttaaagtatt

SEQ ID NO: 957244 - DNA, 15 bp, Homo sapiens
tattttaaagtatta

SEQ ID NO: 957245 - DNA, 15 bp, Homo sapiens
attttaaagtattat

SEQ ID NO: 957246 - DNA, 15 bp, Homo sapiens
ttttaaagtattatt

SEQ ID NO: 957247 - DNA, 15 bp, Homo sapiens
tttaaagtattattc

SEQ ID NO: 957248 - DNA, 15 bp, Homo sapiens
ttaaagtattattca

SEQ ID NO: 957249 - DNA, 15 bp, Homo sapiens
taaagtattattcat

SEQ ID NO: 957250 - DNA, 15 bp, Homo sapiens
aaagtattattcatg

SEQ ID NO: 957251 - DNA, 15 bp, Homo sapiens
aagtattattcatga

SEQ ID NO: 957252 - DNA, 15 bp, Homo sapiens
agtattattcatgag

SEQ ID NO: 957253 - DNA, 15 bp, Homo sapiens
gtattattcatgagt

SEQ ID NO: 957254 - DNA, 15 bp, Homo sapiens
tattattcatgagta

SEQ ID NO: 957255 - DNA, 15 bp, Homo sapiens
attattcatgagtat

SEQ ID NO: 957256 - DNA, 15 bp, Homo sapiens
ttattcatgagtata

SEQ ID NO: 957257 - DNA, 15 bp, Homo sapiens
tattcatgagtatac

SEQ ID NO: 957258 - DNA, 15 bp, Homo sapiens
attcatgagtatact

SEQ ID NO: 957259 - DNA, 15 bp, Homo sapiens
ttcatgagtatactt

SEQ ID NO: 957260 - DNA, 15 bp, Homo sapiens
tcatgagtatacttc

SEQ ID NO: 957261 - DNA, 15 bp, Homo sapiens
catgagtatacttca

SEQ ID NO: 957262 - DNA, 15 bp, Homo sapiens
atgagtatacttcag

SEQ ID NO: 957263 - DNA, 15 bp, Homo sapiens
tgagtatacttcagt

SEQ ID NO: 957264 - DNA, 15 bp, Homo sapiens
gagtatacttcagta

SEQ ID NO: 957265 - DNA, 15 bp, Homo sapiens
agtatacttcagtaa

SEQ ID NO: 957266 - DNA, 15 bp, Homo sapiens
gtatacttcagtaaa

SEQ ID NO: 957267 - DNA, 15 bp, Homo sapiens
tatacttcagtaaag

SEQ ID NO: 957268 - DNA, 15 bp, Homo sapiens
atacttcagtaaagg

SEQ ID NO: 957269 - DNA, 15 bp, Homo sapiens
tacttcagtaaaggg

SEQ ID NO: 957270 - DNA, 15 bp, Homo sapiens
acttcagtaaagggg

SEQ ID NO: 957271 - DNA, 15 bp, Homo sapiens
cttcagtaaaggggt

SEQ ID NO: 957272 - DNA, 15 bp, Homo sapiens
ttcagtaaaggggtt

SEQ ID NO: 957273 - DNA, 15 bp, Homo sapiens
tcagtaaaggggttt

SEQ ID NO: 957274 - DNA, 15 bp, Homo sapiens
cagtaaaggggttta

SEQ ID NO: 957275 - DNA, 15 bp, Homo sapiens
agtaaaggggtttaa

SEQ ID NO: 957276 - DNA, 15 bp, Homo sapiens
gtaaaggggtttaag

SEQ ID NO: 957277 - DNA, 15 bp, Homo sapiens
taaaggggtttaagg

SEQ ID NO: 957278 - DNA, 15 bp, Homo sapiens
aaaggggtttaagga

SEQ ID NO: 957279 - DNA, 15 bp, Homo sapiens
aaggggtttaaggaa

SEQ ID NO: 957280 - DNA, 15 bp, Homo sapiens
aggggtttaaggaat

SEQ ID NO: 957281 - DNA, 15 bp, Homo sapiens
ggggtttaaggaatc

SEQ ID NO: 957282 - DNA, 15 bp, Homo sapiens
gggtttaaggaatca

SEQ ID NO: 957283 - DNA, 15 bp, Homo sapiens
ggtttaaggaatcag

SEQ ID NO: 957284 - DNA, 15 bp, Homo sapiens
gtttaaggaatcagg

SEQ ID NO: 957285 - DNA, 15 bp, Homo sapiens
tttaaggaatcagga

SEQ ID NO: 957286 - DNA, 15 bp, Homo sapiens
ttaaggaatcaggaa

SEQ ID NO: 957287 - DNA, 15 bp, Homo sapiens
taaggaatcaggaag

SEQ ID NO: 957288 - DNA, 15 bp, Homo sapiens
aaggaatcaggaaga

SEQ ID NO: 957289 - DNA, 15 bp, Homo sapiens
aggaatcaggaagat

SEQ ID NO: 957290 - DNA, 15 bp, Homo sapiens
ggaatcaggaagata

SEQ ID NO: 957291 - DNA, 15 bp, Homo sapiens
gaatcaggaagatag

SEQ ID NO: 957292 - DNA, 15 bp, Homo sapiens
aatcaggaagatagt

SEQ ID NO: 957293 - DNA, 15 bp, Homo sapiens
atcaggaagatagtc

SEQ ID NO: 957294 - DNA, 15 bp, Homo sapiens
tcaggaagatagtct

SEQ ID NO: 957295 - DNA, 15 bp, Homo sapiens
caggaagatagtcta

SEQ ID NO: 957296 - DNA, 15 bp, Homo sapiens
aggaagatagtctaa

SEQ ID NO: 957297 - DNA, 15 bp, Homo sapiens
ggaagatagtctaaa

SEQ ID NO: 957298 - DNA, 15 bp, Homo sapiens
gaagatagtctaaat

SEQ ID NO: 957299 - DNA, 15 bp, Homo sapiens
aagatagtctaaatt

SEQ ID NO: 957300 - DNA, 15 bp, Homo sapiens
agatagtctaaattg

SEQ ID NO: 957301 - DNA, 15 bp, Homo sapiens
gatagtctaaattgt

SEQ ID NO: 957302 - DNA, 15 bp, Homo sapiens
atagtctaaattgtg

SEQ ID NO: 957303 - DNA, 15 bp, Homo sapiens
tagtctaaattgtgt

SEQ ID NO: 957304 - DNA, 15 bp, Homo sapiens
agtctaaattgtgtt

SEQ ID NO: 957305 - DNA, 15 bp, Homo sapiens
gtctaaattgtgtta

SEQ ID NO: 957306 - DNA, 15 bp, Homo sapiens
tctaaattgtgttaa

SEQ ID NO: 957307 - DNA, 15 bp, Homo sapiens
ctaaattgtgttaat

SEQ ID NO: 957308 - DNA, 15 bp, Homo sapiens
taaattgtgttaatt

SEQ ID NO: 957309 - DNA, 15 bp, Homo sapiens
aaattgtgttaattc

SEQ ID NO: 957310 - DNA, 15 bp, Homo sapiens
aattgtgttaattct

SEQ ID NO: 957311 - DNA, 15 bp, Homo sapiens
attgtgttaattctg

SEQ ID NO: 957312 - DNA, 15 bp, Homo sapiens
ttgtgttaattctgg

SEQ ID NO: 957313 - DNA, 15 bp, Homo sapiens
tgtgttaattctggt

SEQ ID NO: 957314 - DNA, 15 bp, Homo sapiens
gtgttaattctggta

SEQ ID NO: 957315 - DNA, 15 bp, Homo sapiens
tgttaattctggtaa

SEQ ID NO: 957316 - DNA, 15 bp, Homo sapiens
gttaattctggtaac

SEQ ID NO: 957317 - DNA, 15 bp, Homo sapiens
ttaattctggtaact

SEQ ID NO: 957318 - DNA, 15 bp, Homo sapiens
taattctggtaacta

SEQ ID NO: 957319 - DNA, 15 bp, Homo sapiens
aattctggtaactaa

SEQ ID NO: 957320 - DNA, 15 bp, Homo sapiens
attctggtaactaat

SEQ ID NO: 957321 - DNA, 15 bp, Homo sapiens
ttctggtaactaatt

SEQ ID NO: 957322 - DNA, 15 bp, Homo sapiens
tctggtaactaattt

SEQ ID NO: 957323 - DNA, 15 bp, Homo sapiens
ctggtaactaatttc

SEQ ID NO: 957324 - DNA, 15 bp, Homo sapiens
tggtaactaatttca

SEQ ID NO: 957325 - DNA, 15 bp, Homo sapiens
ggtaactaatttcat

SEQ ID NO: 957326 - DNA, 15 bp, Homo sapiens
gtaactaatttcata

SEQ ID NO: 957327 - DNA, 15 bp, Homo sapiens
taactaatttcatat

SEQ ID NO: 957328 - DNA, 15 bp, Homo sapiens
aactaatttcatatg

SEQ ID NO: 957329 - DNA, 15 bp, Homo sapiens
actaatttcatatga

SEQ ID NO: 957330 - DNA, 15 bp, Homo sapiens
ctaatttcatatgat

SEQ ID NO: 957331 - DNA, 15 bp, Homo sapiens
taatttcatatgatt

SEQ ID NO: 957332 - DNA, 15 bp, Homo sapiens
aatttcatatgattg

SEQ ID NO: 957333 - DNA, 15 bp, Homo sapiens
atttcatatgattga

SEQ ID NO: 957334 - DNA, 15 bp, Homo sapiens
tttcatatgattgag

SEQ ID NO: 957335 - DNA, 15 bp, Homo sapiens
ttcatatgattgaga

SEQ ID NO: 957336 - DNA, 15 bp, Homo sapiens
tcatatgattgagac

SEQ ID NO: 957337 - DNA, 15 bp, Homo sapiens
catatgattgagaca

SEQ ID NO: 957338 - DNA, 15 bp, Homo sapiens
atatgattgagacat

SEQ ID NO: 957339 - DNA, 15 bp, Homo sapiens
tatgattgagacatt

SEQ ID NO: 957340 - DNA, 15 bp, Homo sapiens
atgattgagacattc

SEQ ID NO: 957341 - DNA, 15 bp, Homo sapiens
tgattgagacattct

SEQ ID NO: 957342 - DNA, 15 bp, Homo sapiens
gattgagacattctc

SEQ ID NO: 957343 - DNA, 15 bp, Homo sapiens
attgagacattctca

SEQ ID NO: 957344 - DNA, 15 bp, Homo sapiens
ttgagacattctcaa

SEQ ID NO: 957345 - DNA, 15 bp, Homo sapiens
tgagacattctcaat

SEQ ID NO: 957346 - DNA, 15 bp, Homo sapiens
gagacattctcaatt

SEQ ID NO: 957347 - DNA, 15 bp, Homo sapiens
agacattctcaatta

SEQ ID NO: 957348 - DNA, 15 bp, Homo sapiens
gacattctcaattat

SEQ ID NO: 957349 - DNA, 15 bp, Homo sapiens
acattctcaattata

SEQ ID NO: 957350 - DNA, 15 bp, Homo sapiens
cattctcaattataa

SEQ ID NO: 957351 - DNA, 15 bp, Homo sapiens
attctcaattataaa

SEQ ID NO: 957352 - DNA, 15 bp, Homo sapiens
ttctcaattataaaa

SEQ ID NO: 957353 - DNA, 15 bp, Homo sapiens
tctcaattataaaag

SEQ ID NO: 957354 - DNA, 15 bp, Homo sapiens
ctcaattataaaaga

SEQ ID NO: 957355 - DNA, 15 bp, Homo sapiens
tcaattataaaagag

SEQ ID NO: 957356 - DNA, 15 bp, Homo sapiens
caattataaaagaga

SEQ ID NO: 957357 - DNA, 15 bp, Homo sapiens
aattataaaagagaa

SEQ ID NO: 957358 - DNA, 15 bp, Homo sapiens
attataaaagagaat

SEQ ID NO: 957359 - DNA, 15 bp, Homo sapiens
ttataaaagagaatg

SEQ ID NO: 957360 - DNA, 15 bp, Homo sapiens
tataaaagagaatgg

SEQ ID NO: 957361 - DNA, 15 bp, Homo sapiens
ataaaagagaatgga

SEQ ID NO: 957362 - DNA, 15 bp, Homo sapiens
taaaagagaatggaa

SEQ ID NO: 957363 - DNA, 15 bp, Homo sapiens
aaaagagaatggaag

SEQ ID NO: 957364 - DNA, 15 bp, Homo sapiens
aaagagaatggaaga

SEQ ID NO: 957365 - DNA, 15 bp, Homo sapiens
aagagaatggaagac

SEQ ID NO: 957366 - DNA, 15 bp, Homo sapiens
agagaatggaagacg

SEQ ID NO: 957367 - DNA, 15 bp, Homo sapiens
gagaatggaagacgg

SEQ ID NO: 957368 - DNA, 15 bp, Homo sapiens
agaatggaagacggg

SEQ ID NO: 957369 - DNA, 15 bp, Homo sapiens
gaatggaagacggga

SEQ ID NO: 957370 - DNA, 15 bp, Homo sapiens
aatggaagacgggag

SEQ ID NO: 957371 - DNA, 15 bp, Homo sapiens
atggaagacgggaga

SEQ ID NO: 957372 - DNA, 15 bp, Homo sapiens
tggaagacgggagat

SEQ ID NO: 957373 - DNA, 15 bp, Homo sapiens
ggaagacgggagatt

SEQ ID NO: 957374 - DNA, 15 bp, Homo sapiens
gaagacgggagattc

SEQ ID NO: 957375 - DNA, 15 bp, Homo sapiens
aagacgggagattca

SEQ ID NO: 957376 - DNA, 15 bp, Homo sapiens
agacgggagattcac

SEQ ID NO: 957377 - DNA, 15 bp, Homo sapiens
gacgggagattcaca

SEQ ID NO: 957378 - DNA, 15 bp, Homo sapiens
acgggagattcacat

SEQ ID NO: 957379 - DNA, 15 bp, Homo sapiens
cgggagattcacata

SEQ ID NO: 957380 - DNA, 15 bp, Homo sapiens
gggagattcacataa

SEQ ID NO: 957381 - DNA, 15 bp, Homo sapiens
ggagattcacataag

SEQ ID NO: 957382 - DNA, 15 bp, Homo sapiens
gagattcacataaga

SEQ ID NO: 957383 - DNA, 15 bp, Homo sapiens
agattcacataagaa

SEQ ID NO: 957384 - DNA, 15 bp, Homo sapiens
gattcacataagaaa

SEQ ID NO: 957385 - DNA, 15 bp, Homo sapiens
attcacataagaaat

SEQ ID NO: 957386 - DNA, 15 bp, Homo sapiens
ttcacataagaaata

SEQ ID NO: 957387 - DNA, 15 bp, Homo sapiens
tcacataagaaataa

SEQ ID NO: 957388 - DNA, 15 bp, Homo sapiens
cacataagaaataaa

SEQ ID NO: 957389 - DNA, 15 bp, Homo sapiens
acataagaaataaaa

SEQ ID NO: 957390 - DNA, 15 bp, Homo sapiens
cataagaaataaaag

SEQ ID NO: 957391 - DNA, 15 bp, Homo sapiens
ataagaaataaaagg

SEQ ID NO: 957392 - DNA, 15 bp, Homo sapiens
taagaaataaaagga

SEQ ID NO: 957393 - DNA, 15 bp, Homo sapiens
aagaaataaaaggaa

SEQ ID NO: 957394 - DNA, 15 bp, Homo sapiens
agaaataaaaggaaa

SEQ ID NO: 957395 - DNA, 15 bp, Homo sapiens
gaaataaaaggaaag

SEQ ID NO: 957396 - DNA, 15 bp, Homo sapiens
aaataaaaggaaaga

SEQ ID NO: 957397 - DNA, 15 bp, Homo sapiens
aataaaaggaaagaa

SEQ ID NO: 957398 - DNA, 15 bp, Homo sapiens
ataaaaggaaagaag

SEQ ID NO: 957399 - DNA, 15 bp, Homo sapiens
taaaaggaaagaaga

SEQ ID NO: 957400 - DNA, 15 bp, Homo sapiens
aaaaggaaagaagat

SEQ ID NO: 957401 - DNA, 15 bp, Homo sapiens
aaaggaaagaagatg

SEQ ID NO: 957402 - DNA, 15 bp, Homo sapiens
aaggaaagaagatga

SEQ ID NO: 957403 - DNA, 15 bp, Homo sapiens
aggaaagaagatgaa

SEQ ID NO: 957404 - DNA, 15 bp, Homo sapiens
ggaaagaagatgaag

SEQ ID NO: 957405 - DNA, 15 bp, Homo sapiens
gaaagaagatgaagt

SEQ ID NO: 957406 - DNA, 15 bp, Homo sapiens
aaagaagatgaagtt

SEQ ID NO: 957407 - DNA, 15 bp, Homo sapiens
aagaagatgaagttt

SEQ ID NO: 957408 - DNA, 15 bp, Homo sapiens
agaagatgaagtttt

SEQ ID NO: 957409 - DNA, 15 bp, Homo sapiens
gaagatgaagttttt

SEQ ID NO: 957410 - DNA, 15 bp, Homo sapiens
aagatgaagttttta

SEQ ID NO: 957411 - DNA, 15 bp, Homo sapiens
agatgaagtttttat

SEQ ID NO: 957412 - DNA, 15 bp, Homo sapiens
gatgaagtttttatg

SEQ ID NO: 957413 - DNA, 15 bp, Homo sapiens
atgaagtttttatgt

SEQ ID NO: 957414 - DNA, 15 bp, Homo sapiens
tgaagtttttatgtt

SEQ ID NO: 957415 - DNA, 15 bp, Homo sapiens
gaagtttttatgttt

SEQ ID NO: 957416 - DNA, 15 bp, Homo sapiens
aagtttttatgtttt

SEQ ID NO: 957417 - DNA, 15 bp, Homo sapiens
agtttttatgttttc

SEQ ID NO: 957418 - DNA, 15 bp, Homo sapiens
gtttttatgttttcc

SEQ ID NO: 957419 - DNA, 15 bp, Homo sapiens
tttttatgttttcct

SEQ ID NO: 957420 - DNA, 15 bp, Homo sapiens
ttttatgttttcctt

SEQ ID NO: 957421 - DNA, 15 bp, Homo sapiens
tttatgttttcctta

SEQ ID NO: 957422 - DNA, 15 bp, Homo sapiens
ttatgttttccttaa

SEQ ID NO: 957423 - DNA, 15 bp, Homo sapiens
tatgttttccttaag

SEQ ID NO: 957424 - DNA, 15 bp, Homo sapiens
atgttttccttaagt

SEQ ID NO: 957425 - DNA, 15 bp, Homo sapiens
tgttttccttaagta

SEQ ID NO: 957426 - DNA, 15 bp, Homo sapiens
gttttccttaagtag

SEQ ID NO: 957427 - DNA, 15 bp, Homo sapiens
ttttccttaagtagt

SEQ ID NO: 957428 - DNA, 15 bp, Homo sapiens
tttccttaagtagtt

SEQ ID NO: 957429 - DNA, 15 bp, Homo sapiens
ttccttaagtagtta

SEQ ID NO: 957430 - DNA, 15 bp, Homo sapiens
tccttaagtagttat

SEQ ID NO: 957431 - DNA, 15 bp, Homo sapiens
ccttaagtagttata

SEQ ID NO: 957432 - DNA, 15 bp, Homo sapiens
cttaagtagttatac

SEQ ID NO: 957433 - DNA, 15 bp, Homo sapiens
ttaagtagttataca

SEQ ID NO: 957434 - DNA, 15 bp, Homo sapiens
taagtagttatacac

SEQ ID NO: 957435 - DNA, 15 bp, Homo sapiens
aagtagttatacact

SEQ ID NO: 957436 - DNA, 15 bp, Homo sapiens
agtagttatacactg

SEQ ID NO: 957437 - DNA, 15 bp, Homo sapiens
gtagttatacactgg

SEQ ID NO: 957438 - DNA, 15 bp, Homo sapiens
tagttatacactggt

SEQ ID NO: 957439 - DNA, 15 bp, Homo sapiens
agttatacactggtt

SEQ ID NO: 957440 - DNA, 15 bp, Homo sapiens
gttatacactggtta

SEQ ID NO: 957441 - DNA, 15 bp, Homo sapiens
ttatacactggttat

SEQ ID NO: 957442 - DNA, 15 bp, Homo sapiens
tatacactggttatt

SEQ ID NO: 957443 - DNA, 15 bp, Homo sapiens
atacactggttattg

SEQ ID NO: 957444 - DNA, 15 bp, Homo sapiens
tacactggttattgg

SEQ ID NO: 957445 - DNA, 15 bp, Homo sapiens
acactggttattggt

SEQ ID NO: 957446 - DNA, 15 bp, Homo sapiens
cactggttattggta

SEQ ID NO: 957447 - DNA, 15 bp, Homo sapiens
actggttattggtat

SEQ ID NO: 957448 - DNA, 15 bp, Homo sapiens
ctggttattggtata

SEQ ID NO: 957449 - DNA, 15 bp, Homo sapiens
tggttattggtataa

SEQ ID NO: 957450 - DNA, 15 bp, Homo sapiens
ggttattggtataaa

SEQ ID NO: 957451 - DNA, 15 bp, Homo sapiens
gttattggtataaat

SEQ ID NO: 957452 - DNA, 15 bp, Homo sapiens
ttattggtataaatg

SEQ ID NO: 957453 - DNA, 15 bp, Homo sapiens
tattggtataaatgg

SEQ ID NO: 957454 - DNA, 15 bp, Homo sapiens
attggtataaatggg

SEQ ID NO: 957455 - DNA, 15 bp, Homo sapiens
ttggtataaatggga

SEQ ID NO: 957456 - DNA, 15 bp, Homo sapiens
tggtataaatgggat

SEQ ID NO: 957457 - DNA, 15 bp, Homo sapiens
ggtataaatgggata

SEQ ID NO: 957458 - DNA, 15 bp, Homo sapiens
gtataaatgggatag

SEQ ID NO: 957459 - DNA, 15 bp, Homo sapiens
tataaatgggatagt

SEQ ID NO: 957460 - DNA, 15 bp, Homo sapiens
ataaatgggatagtg

SEQ ID NO: 957461 - DNA, 15 bp, Homo sapiens
taaatgggatagtgc

SEQ ID NO: 957462 - DNA, 15 bp, Homo sapiens
aaatgggatagtgcc

SEQ ID NO: 957463 - DNA, 15 bp, Homo sapiens
aatgggatagtgcct

SEQ ID NO: 957464 - DNA, 15 bp, Homo sapiens
atgggatagtgcctg

SEQ ID NO: 957465 - DNA, 15 bp, Homo sapiens
tgggatagtgcctga

SEQ ID NO: 957466 - DNA, 15 bp, Homo sapiens
gggatagtgcctgag

SEQ ID NO: 957467 - DNA, 15 bp, Homo sapiens
ggatagtgcctgagc

SEQ ID NO: 957468 - DNA, 15 bp, Homo sapiens
gatagtgcctgagcc

SEQ ID NO: 957469 - DNA, 15 bp, Homo sapiens
atagtgcctgagcct

SEQ ID NO: 957470 - DNA, 15 bp, Homo sapiens
tagtgcctgagcctc

SEQ ID NO: 957471 - DNA, 15 bp, Homo sapiens
agtgcctgagcctca

SEQ ID NO: 957472 - DNA, 15 bp, Homo sapiens
gtgcctgagcctcat

SEQ ID NO: 957473 - DNA, 15 bp, Homo sapiens
tgcctgagcctcatc

SEQ ID NO: 957474 - DNA, 15 bp, Homo sapiens
gcctgagcctcatct

SEQ ID NO: 957475 - DNA, 15 bp, Homo sapiens
cctgagcctcatcta

SEQ ID NO: 957476 - DNA, 15 bp, Homo sapiens
ctgagcctcatctat

SEQ ID NO: 957477 - DNA, 15 bp, Homo sapiens
tgagcctcatctata

SEQ ID NO: 957478 - DNA, 15 bp, Homo sapiens
gagcctcatctatag

SEQ ID NO: 957479 - DNA, 15 bp, Homo sapiens
agcctcatctataga

SEQ ID NO: 957480 - DNA, 15 bp, Homo sapiens
gcctcatctatagat

SEQ ID NO: 957481 - DNA, 15 bp, Homo sapiens
cctcatctatagatc

SEQ ID NO: 957482 - DNA, 15 bp, Homo sapiens
ctcatctatagatca

SEQ ID NO: 957483 - DNA, 15 bp, Homo sapiens
tcatctatagatcaa

SEQ ID NO: 957484 - DNA, 15 bp, Homo sapiens
catctatagatcaag

SEQ ID NO: 957485 - DNA, 15 bp, Homo sapiens
atctatagatcaaga

SEQ ID NO: 957486 - DNA, 15 bp, Homo sapiens
tctatagatcaagaa

SEQ ID NO: 957487 - DNA, 15 bp, Homo sapiens
ctatagatcaagaag

SEQ ID NO: 957488 - DNA, 15 bp, Homo sapiens
tatagatcaagaaga

SEQ ID NO: 957489 - DNA, 15 bp, Homo sapiens
atagatcaagaagaa

SEQ ID NO: 957490 - DNA, 15 bp, Homo sapiens
tagatcaagaagaaa

SEQ ID NO: 957491 - DNA, 15 bp, Homo sapiens
agatcaagaagaaag

SEQ ID NO: 957492 - DNA, 15 bp, Homo sapiens
gatcaagaagaaagc

SEQ ID NO: 957493 - DNA, 15 bp, Homo sapiens
atcaagaagaaagct

SEQ ID NO: 957494 - DNA, 15 bp, Homo sapiens
tcaagaagaaagctg

SEQ ID NO: 957495 - DNA, 15 bp, Homo sapiens
caagaagaaagctga

SEQ ID NO: 957496 - DNA, 15 bp, Homo sapiens
aagaagaaagctgac

SEQ ID NO: 957497 - DNA, 15 bp, Homo sapiens
agaagaaagctgacc

SEQ ID NO: 957498 - DNA, 15 bp, Homo sapiens
gaagaaagctgacca

SEQ ID NO: 957499 - DNA, 15 bp, Homo sapiens
aagaaagctgaccat

SEQ ID NO: 957500 - DNA, 15 bp, Homo sapiens
agaaagctgaccatg

SEQ ID NO: 957501 - DNA, 15 bp, Homo sapiens
gaaagctgaccatgc

SEQ ID NO: 957502 - DNA, 15 bp, Homo sapiens
aaagctgaccatgct

SEQ ID NO: 957503 - DNA, 15 bp, Homo sapiens
aagctgaccatgctg

SEQ ID NO: 957504 - DNA, 15 bp, Homo sapiens
agctgaccatgctgc

SEQ ID NO: 957505 - DNA, 15 bp, Homo sapiens
gctgaccatgctgct

SEQ ID NO: 957506 - DNA, 15 bp, Homo sapiens
ctgaccatgctgcta

SEQ ID NO: 957507 - DNA, 15 bp, Homo sapiens
tgaccatgctgctat

SEQ ID NO: 957508 - DNA, 15 bp, Homo sapiens
gaccatgctgctatg

SEQ ID NO: 957509 - DNA, 15 bp, Homo sapiens
accatgctgctatga

SEQ ID NO: 957510 - DNA, 15 bp, Homo sapiens
ccatgctgctatgaa

SEQ ID NO: 957511 - DNA, 15 bp, Homo sapiens
catgctgctatgaac

SEQ ID NO: 957512 - DNA, 15 bp, Homo sapiens
atgctgctatgaaca

SEQ ID NO: 957513 - DNA, 15 bp, Homo sapiens
tgctgctatgaacaa

SEQ ID NO: 957514 - DNA, 15 bp, Homo sapiens
gctgctatgaacaat

SEQ ID NO: 957515 - DNA, 15 bp, Homo sapiens
ctgctatgaacaata

SEQ ID NO: 957516 - DNA, 15 bp, Homo sapiens
tgctatgaacaataa

SEQ ID NO: 957517 - DNA, 15 bp, Homo sapiens
gctatgaacaataaa

SEQ ID NO: 957518 - DNA, 15 bp, Homo sapiens
ctatgaacaataaaa

SEQ ID NO: 957519 - DNA, 15 bp, Homo sapiens
tatgaacaataaaaa

SEQ ID NO: 957520 - DNA, 15 bp, Homo sapiens
atgaacaataaaaaa

SEQ ID NO: 957521 - DNA, 15 bp, Homo sapiens
tgaacaataaaaaat

SEQ ID NO: 957522 - DNA, 15 bp, Homo sapiens
gaacaataaaaaatt

SEQ ID NO: 957523 - DNA, 15 bp, Homo sapiens
aacaataaaaaattt

SEQ ID NO: 957524 - DNA, 15 bp, Homo sapiens
acaataaaaaatttg

SEQ ID NO: 957525 - DNA, 15 bp, Homo sapiens
caataaaaaatttgg

SEQ ID NO: 957526 - DNA, 15 bp, Homo sapiens
aataaaaaatttggg

SEQ ID NO: 957527 - DNA, 15 bp, Homo sapiens
ataaaaaatttgggg

SEQ ID NO: 957528 - DNA, 15 bp, Homo sapiens
taaaaaatttggggt

SEQ ID NO: 957529 - DNA, 15 bp, Homo sapiens
aaaaaatttggggtg

SEQ ID NO: 957530 - DNA, 15 bp, Homo sapiens
aaaaatttggggtgc

SEQ ID NO: 957531 - DNA, 15 bp, Homo sapiens
aaaatttggggtgca

SEQ ID NO: 957532 - DNA, 15 bp, Homo sapiens
aaatttggggtgcaa

SEQ ID NO: 957533 - DNA, 15 bp, Homo sapiens
aatttggggtgcaaa

SEQ ID NO: 957534 - DNA, 15 bp, Homo sapiens
atttggggtgcaaaa

SEQ ID NO: 957535 - DNA, 15 bp, Homo sapiens
tttggggtgcaaaac

SEQ ID NO: 957536 - DNA, 15 bp, Homo sapiens
ttggggtgcaaaaca

SEQ ID NO: 957537 - DNA, 15 bp, Homo sapiens
tggggtgcaaaacaa

SEQ ID NO: 957538 - DNA, 15 bp, Homo sapiens
ggggtgcaaaacaat

SEQ ID NO: 957539 - DNA, 15 bp, Homo sapiens
gggtgcaaaacaatg

SEQ ID NO: 957540 - DNA, 15 bp, Homo sapiens
ggtgcaaaacaatgc

SEQ ID NO: 957541 - DNA, 15 bp, Homo sapiens
gtgcaaaacaatgca

SEQ ID NO: 957542 - DNA, 15 bp, Homo sapiens
tgcaaaacaatgcat

SEQ ID NO: 957543 - DNA, 15 bp, Homo sapiens
gcaaaacaatgcatg

SEQ ID NO: 957544 - DNA, 15 bp, Homo sapiens
caaaacaatgcatga

SEQ ID NO: 957545 - DNA, 15 bp, Homo sapiens
aaaacaatgcatgac

SEQ ID NO: 957546 - DNA, 15 bp, Homo sapiens
aaacaatgcatgact

SEQ ID NO: 957547 - DNA, 15 bp, Homo sapiens
aacaatgcatgacta

SEQ ID NO: 957548 - DNA, 15 bp, Homo sapiens
acaatgcatgactat

SEQ ID NO: 957549 - DNA, 15 bp, Homo sapiens
caatgcatgactatg

SEQ ID NO: 957550 - DNA, 15 bp, Homo sapiens
aatgcatgactatgg

SEQ ID NO: 957551 - DNA, 15 bp, Homo sapiens
atgcatgactatggg

SEQ ID NO: 957552 - DNA, 15 bp, Homo sapiens
tgcatgactatggga

SEQ ID NO: 957553 - DNA, 15 bp, Homo sapiens
gcatgactatgggac

SEQ ID NO: 957554 - DNA, 15 bp, Homo sapiens
catgactatgggaca

SEQ ID NO: 957555 - DNA, 15 bp, Homo sapiens
atgactatgggacag

SEQ ID NO: 957556 - DNA, 15 bp, Homo sapiens
tgactatgggacaga

SEQ ID NO: 957557 - DNA, 15 bp, Homo sapiens
gactatgggacagat

SEQ ID NO: 957558 - DNA, 15 bp, Homo sapiens
actatgggacagatc

SEQ ID NO: 957559 - DNA, 15 bp, Homo sapiens
ctatgggacagatca

SEQ ID NO: 957560 - DNA, 15 bp, Homo sapiens
tatgggacagatcat

SEQ ID NO: 957561 - DNA, 15 bp, Homo sapiens
atgggacagatcatg

SEQ ID NO: 957562 - DNA, 15 bp, Homo sapiens
tgggacagatcatgt

SEQ ID NO: 957563 - DNA, 15 bp, Homo sapiens
gggacagatcatgta

SEQ ID NO: 957564 - DNA, 15 bp, Homo sapiens
ggacagatcatgtaa

SEQ ID NO: 957565 - DNA, 15 bp, Homo sapiens
gacagatcatgtaaa

SEQ ID NO: 957566 - DNA, 15 bp, Homo sapiens
acagatcatgtaaat

SEQ ID NO: 957567 - DNA, 15 bp, Homo sapiens
cagatcatgtaaata

SEQ ID NO: 957568 - DNA, 15 bp, Homo sapiens
agatcatgtaaataa

SEQ ID NO: 957569 - DNA, 15 bp, Homo sapiens
gatcatgtaaataaa

SEQ ID NO: 957570 - DNA, 15 bp, Homo sapiens
atcatgtaaataaag

SEQ ID NO: 957571 - DNA, 15 bp, Homo sapiens
tcatgtaaataaaga

SEQ ID NO: 957572 - DNA, 15 bp, Homo sapiens
catgtaaataaagaa

SEQ ID NO: 957573 - DNA, 15 bp, Homo sapiens
atgtaaataaagaat

SEQ ID NO: 957574 - DNA, 15 bp, Homo sapiens
tgtaaataaagaata

SEQ ID NO: 957575 - DNA, 15 bp, Homo sapiens
gtaaataaagaatat

SEQ ID NO: 957576 - DNA, 15 bp, Homo sapiens
taaataaagaatata

SEQ ID NO: 957577 - DNA, 15 bp, Homo sapiens
aaataaagaatatat

SEQ ID NO: 957578 - DNA, 15 bp, Homo sapiens
aataaagaatatata

SEQ ID NO: 957579 - DNA, 15 bp, Homo sapiens
ataaagaatatatat

SEQ ID NO: 957580 - DNA, 15 bp, Homo sapiens
taaagaatatatatt

SEQ ID NO: 957581 - DNA, 15 bp, Homo sapiens
aaagaatatatatta

SEQ ID NO: 957582 - DNA, 15 bp, Homo sapiens
aagaatatatattaa

SEQ ID NO: 957583 - DNA, 15 bp, Homo sapiens
agaatatatattaat

SEQ ID NO: 957584 - DNA, 15 bp, Homo sapiens
gaatatatattaatg

SEQ ID NO: 957585 - DNA, 15 bp, Homo sapiens
aatatatattaatga

SEQ ID NO: 957586 - DNA, 15 bp, Homo sapiens
atatatattaatgat

SEQ ID NO: 957587 - DNA, 15 bp, Homo sapiens
tatatattaatgata

SEQ ID NO: 957588 - DNA, 15 bp, Homo sapiens
atatattaatgatag

SEQ ID NO: 957589 - DNA, 15 bp, Homo sapiens
tatattaatgatagt

SEQ ID NO: 957590 - DNA, 15 bp, Homo sapiens
atattaatgatagtt

SEQ ID NO: 957591 - DNA, 15 bp, Homo sapiens
tattaatgatagttt

SEQ ID NO: 957592 - DNA, 15 bp, Homo sapiens
attaatgatagtttc

SEQ ID NO: 957593 - DNA, 15 bp, Homo sapiens
ttaatgatagtttct

SEQ ID NO: 957594 - DNA, 15 bp, Homo sapiens
taatgatagtttcta

SEQ ID NO: 957595 - DNA, 15 bp, Homo sapiens
aatgatagtttctat

SEQ ID NO: 957596 - DNA, 15 bp, Homo sapiens
atgatagtttctata

SEQ ID NO: 957597 - DNA, 15 bp, Homo sapiens
tgatagtttctataa

SEQ ID NO: 957598 - DNA, 15 bp, Homo sapiens
gatagtttctataat

SEQ ID NO: 957599 - DNA, 15 bp, Homo sapiens
atagtttctataata

SEQ ID NO: 957600 - DNA, 15 bp, Homo sapiens
tagtttctataatat

SEQ ID NO: 957601 - DNA, 15 bp, Homo sapiens
agtttctataatata

SEQ ID NO: 957602 - DNA, 15 bp, Homo sapiens
gtttctataatataa

SEQ ID NO: 957603 - DNA, 15 bp, Homo sapiens
tttctataatataaa

SEQ ID NO: 957604 - DNA, 15 bp, Homo sapiens
ttctataatataaat

SEQ ID NO: 957605 - DNA, 15 bp, Homo sapiens
tctataatataaata

SEQ ID NO: 957606 - DNA, 15 bp, Homo sapiens
ctataatataaatag

SEQ ID NO: 957607 - DNA, 15 bp, Homo sapiens
tataatataaatagc

SEQ ID NO: 957608 - DNA, 15 bp, Homo sapiens
ataatataaatagcc

SEQ ID NO: 957609 - DNA, 15 bp, Homo sapiens
taatataaatagcct

SEQ ID NO: 957610 - DNA, 15 bp, Homo sapiens
aatataaatagcctt

SEQ ID NO: 957611 - DNA, 15 bp, Homo sapiens
atataaatagccttt

SEQ ID NO: 957612 - DNA, 15 bp, Homo sapiens
tataaatagccttta

SEQ ID NO: 957613 - DNA, 15 bp, Homo sapiens
ataaatagcctttaa

SEQ ID NO: 957614 - DNA, 15 bp, Homo sapiens
taaatagcctttaat

SEQ ID NO: 957615 - DNA, 15 bp, Homo sapiens
aaatagcctttaata

SEQ ID NO: 957616 - DNA, 15 bp, Homo sapiens
aatagcctttaataa

SEQ ID NO: 957617 - DNA, 15 bp, Homo sapiens
atagcctttaataaa

SEQ ID NO: 957618 - DNA, 15 bp, Homo sapiens
tagcctttaataaaa

SEQ ID NO: 957619 - DNA, 15 bp, Homo sapiens
agcctttaataaaaa

SEQ ID NO: 957620 - DNA, 15 bp, Homo sapiens
gcctttaataaaaaa

SEQ ID NO: 957621 - DNA, 15 bp, Homo sapiens
cctttaataaaaaaa

SEQ ID NO: 957622 - DNA, 15 bp, Homo sapiens
ctttaataaaaaaaa

SEQ ID NO: 957623 - DNA, 15 bp, Homo sapiens
tttaataaaaaaaat

SEQ ID NO: 957624 - DNA, 15 bp, Homo sapiens
ttaataaaaaaaata

SEQ ID NO: 957625 - DNA, 15 bp, Homo sapiens
taataaaaaaaataa

SEQ ID NO: 957626 - DNA, 15 bp, Homo sapiens
aataaaaaaaataat

SEQ ID NO: 957627 - DNA, 15 bp, Homo sapiens
ataaaaaaaataatc

SEQ ID NO: 957628 - DNA, 15 bp, Homo sapiens
taaaaaaaataatct

SEQ ID NO: 957629 - DNA, 15 bp, Homo sapiens
aaaaaaaataatctt

SEQ ID NO: 957630 - DNA, 15 bp, Homo sapiens
aaaaaaataatcttt

SEQ ID NO: 957631 - DNA, 15 bp, Homo sapiens
aaaaaataatctttt

SEQ ID NO: 957632 - DNA, 15 bp, Homo sapiens
aaaaataatcttttt

SEQ ID NO: 957633 - DNA, 15 bp, Homo sapiens
aaaataatcttttta

SEQ ID NO: 957634 - DNA, 15 bp, Homo sapiens
aaataatctttttaa

SEQ ID NO: 957635 - DNA, 15 bp, Homo sapiens
aataatctttttaat

SEQ ID NO: 957636 - DNA, 15 bp, Homo sapiens
ataatctttttaata

SEQ ID NO: 957637 - DNA, 15 bp, Homo sapiens
taatctttttaataa

SEQ ID NO: 957638 - DNA, 15 bp, Homo sapiens
aatctttttaataac

SEQ ID NO: 957639 - DNA, 15 bp, Homo sapiens
atctttttaataaca

SEQ ID NO: 957640 - DNA, 15 bp, Homo sapiens
tctttttaataacat

SEQ ID NO: 957641 - DNA, 15 bp, Homo sapiens
ctttttaataacatt

SEQ ID NO: 957642 - DNA, 15 bp, Homo sapiens
tttttaataacatta

SEQ ID NO: 957643 - DNA, 15 bp, Homo sapiens
ttttaataacattaa

SEQ ID NO: 957644 - DNA, 15 bp, Homo sapiens
tttaataacattaat

SEQ ID NO: 957645 - DNA, 15 bp, Homo sapiens
ttaataacattaata

SEQ ID NO: 957646 - DNA, 15 bp, Homo sapiens
taataacattaatac

SEQ ID NO: 957647 - DNA, 15 bp, Homo sapiens
aataacattaatact

SEQ ID NO: 957648 - DNA, 15 bp, Homo sapiens
ataacattaatactt

SEQ ID NO: 957649 - DNA, 15 bp, Homo sapiens
taacattaatacttc

SEQ ID NO: 957650 - DNA, 15 bp, Homo sapiens
aacattaatacttct

SEQ ID NO: 957651 - DNA, 15 bp, Homo sapiens
acattaatacttcta

SEQ ID NO: 957652 - DNA, 15 bp, Homo sapiens
cattaatacttctat

SEQ ID NO: 957653 - DNA, 15 bp, Homo sapiens
attaatacttctatt

SEQ ID NO: 957654 - DNA, 15 bp, Homo sapiens
ttaatacttctattt

SEQ ID NO: 957655 - DNA, 15 bp, Homo sapiens
taatacttctatttt

SEQ ID NO: 957656 - DNA, 15 bp, Homo sapiens
aatacttctattttc

SEQ ID NO: 957657 - DNA, 15 bp, Homo sapiens
atacttctattttct

SEQ ID NO: 957658 - DNA, 15 bp, Homo sapiens
tacttctattttctg

SEQ ID NO: 957659 - DNA, 15 bp, Homo sapiens
acttctattttctgg

SEQ ID NO: 957660 - DNA, 15 bp, Homo sapiens
cttctattttctgga

SEQ ID NO: 957661 - DNA, 15 bp, Homo sapiens
ttctattttctggaa

SEQ ID NO: 957662 - DNA, 15 bp, Homo sapiens
tctattttctggaaa

SEQ ID NO: 957663 - DNA, 15 bp, Homo sapiens
ctattttctggaaaa

SEQ ID NO: 957664 - DNA, 15 bp, Homo sapiens
tattttctggaaaac

SEQ ID NO: 957665 - DNA, 15 bp, Homo sapiens
attttctggaaaaca

SEQ ID NO: 957666 - DNA, 15 bp, Homo sapiens
ttttctggaaaacat

SEQ ID NO: 957667 - DNA, 15 bp, Homo sapiens
tttctggaaaacatg

SEQ ID NO: 957668 - DNA, 15 bp, Homo sapiens
ttctggaaaacatgc

SEQ ID NO: 957669 - DNA, 15 bp, Homo sapiens
tctggaaaacatgca

SEQ ID NO: 957670 - DNA, 15 bp, Homo sapiens
ctggaaaacatgcat

SEQ ID NO: 957671 - DNA, 15 bp, Homo sapiens
tggaaaacatgcatg

SEQ ID NO: 957672 - DNA, 15 bp, Homo sapiens
ggaaaacatgcatga

SEQ ID NO: 957673 - DNA, 15 bp, Homo sapiens
gaaaacatgcatgaa

SEQ ID NO: 957674 - DNA, 15 bp, Homo sapiens
aaaacatgcatgaaa

SEQ ID NO: 957675 - DNA, 15 bp, Homo sapiens
aaacatgcatgaaaa

SEQ ID NO: 957676 - DNA, 15 bp, Homo sapiens
aacatgcatgaaaaa

SEQ ID NO: 957677 - DNA, 15 bp, Homo sapiens
acatgcatgaaaaat

SEQ ID NO: 957678 - DNA, 15 bp, Homo sapiens
catgcatgaaaaatg

SEQ ID NO: 957679 - DNA, 15 bp, Homo sapiens
atgcatgaaaaatgt

SEQ ID NO: 957680 - DNA, 15 bp, Homo sapiens
tgcatgaaaaatgta

SEQ ID NO: 957681 - DNA, 15 bp, Homo sapiens
gcatgaaaaatgtat

SEQ ID NO: 957682 - DNA, 15 bp, Homo sapiens
catgaaaaatgtatt

SEQ ID NO: 957683 - DNA, 15 bp, Homo sapiens
atgaaaaatgtattc

SEQ ID NO: 957684 - DNA, 15 bp, Homo sapiens
tgaaaaatgtattca

SEQ ID NO: 957685 - DNA, 15 bp, Homo sapiens
gaaaaatgtattcag

SEQ ID NO: 957686 - DNA, 15 bp, Homo sapiens
aaaaatgtattcagt

SEQ ID NO: 957687 - DNA, 15 bp, Homo sapiens
aaaatgtattcagtt

SEQ ID NO: 957688 - DNA, 15 bp, Homo sapiens
aaatgtattcagttc

SEQ ID NO: 957689 - DNA, 15 bp, Homo sapiens
aatgtattcagttca

SEQ ID NO: 957690 - DNA, 15 bp, Homo sapiens
atgtattcagttcaa

SEQ ID NO: 957691 - DNA, 15 bp, Homo sapiens
tgtattcagttcaat

SEQ ID NO: 957692 - DNA, 15 bp, Homo sapiens
gtattcagttcaatt

SEQ ID NO: 957693 - DNA, 15 bp, Homo sapiens
tattcagttcaattg

SEQ ID NO: 957694 - DNA, 15 bp, Homo sapiens
attcagttcaattgc

SEQ ID NO: 957695 - DNA, 15 bp, Homo sapiens
ttcagttcaattgca

SEQ ID NO: 957696 - DNA, 15 bp, Homo sapiens
tcagttcaattgcag

SEQ ID NO: 957697 - DNA, 15 bp, Homo sapiens
cagttcaattgcaga

SEQ ID NO: 957698 - DNA, 15 bp, Homo sapiens
agttcaattgcagaa

SEQ ID NO: 957699 - DNA, 15 bp, Homo sapiens
gttcaattgcagaag

SEQ ID NO: 957700 - DNA, 15 bp, Homo sapiens
ttcaattgcagaagg

SEQ ID NO: 957701 - DNA, 15 bp, Homo sapiens
tcaattgcagaagga

SEQ ID NO: 957702 - DNA, 15 bp, Homo sapiens
caattgcagaaggag

SEQ ID NO: 957703 - DNA, 15 bp, Homo sapiens
aattgcagaaggaga

SEQ ID NO: 957704 - DNA, 15 bp, Homo sapiens
attgcagaaggagaa

SEQ ID NO: 957705 - DNA, 15 bp, Homo sapiens
ttgcagaaggagaaa

SEQ ID NO: 957706 - DNA, 15 bp, Homo sapiens
tgcagaaggagaaaa

SEQ ID NO: 957707 - DNA, 15 bp, Homo sapiens
gcagaaggagaaaaa

SEQ ID NO: 957708 - DNA, 15 bp, Homo sapiens
cagaaggagaaaaaa

SEQ ID NO: 957709 - DNA, 15 bp, Homo sapiens
agaaggagaaaaaaa

SEQ ID NO: 957710 - DNA, 15 bp, Homo sapiens
gaaggagaaaaaaaa

SEQ ID NO: 957711 - DNA, 15 bp, Homo sapiens
aaggagaaaaaaaat

SEQ ID NO: 957712 - DNA, 15 bp, Homo sapiens
aggagaaaaaaaatc

SEQ ID NO: 957713 - DNA, 15 bp, Homo sapiens
ggagaaaaaaaatca

SEQ ID NO: 957714 - DNA, 15 bp, Homo sapiens
gagaaaaaaaatcaa

SEQ ID NO: 957715 - DNA, 15 bp, Homo sapiens
agaaaaaaaatcaac

SEQ ID NO: 957716 - DNA, 15 bp, Homo sapiens
gaaaaaaaatcaact

SEQ ID NO: 957717 - DNA, 15 bp, Homo sapiens
aaaaaaaatcaactt

SEQ ID NO: 957718 - DNA, 15 bp, Homo sapiens
aaaaaaatcaactta

SEQ ID NO: 957719 - DNA, 15 bp, Homo sapiens
aaaaaatcaacttaa

SEQ ID NO: 957720 - DNA, 15 bp, Homo sapiens
aaaaatcaacttaag

SEQ ID NO: 957721 - DNA, 15 bp, Homo sapiens
aaaatcaacttaagg

SEQ ID NO: 957722 - DNA, 15 bp, Homo sapiens
aaatcaacttaaggt

SEQ ID NO: 957723 - DNA, 15 bp, Homo sapiens
aatcaacttaaggtg

SEQ ID NO: 957724 - DNA, 15 bp, Homo sapiens
atcaacttaaggtga

SEQ ID NO: 957725 - DNA, 15 bp, Homo sapiens
tcaacttaaggtgaa

SEQ ID NO: 957726 - DNA, 15 bp, Homo sapiens
caacttaaggtgaat

SEQ ID NO: 957727 - DNA, 15 bp, Homo sapiens
aacttaaggtgaata

SEQ ID NO: 957728 - DNA, 15 bp, Homo sapiens
acttaaggtgaatac

SEQ ID NO: 957729 - DNA, 15 bp, Homo sapiens
cttaaggtgaatact

SEQ ID NO: 957730 - DNA, 15 bp, Homo sapiens
ttaaggtgaatactg

SEQ ID NO: 957731 - DNA, 15 bp, Homo sapiens
taaggtgaatactgt

SEQ ID NO: 957732 - DNA, 15 bp, Homo sapiens
aaggtgaatactgta

SEQ ID NO: 957733 - DNA, 15 bp, Homo sapiens
aggtgaatactgtac

SEQ ID NO: 957734 - DNA, 15 bp, Homo sapiens
ggtgaatactgtaca

SEQ ID NO: 957735 - DNA, 15 bp, Homo sapiens
gtgaatactgtacaa

SEQ ID NO: 957736 - DNA, 15 bp, Homo sapiens
tgaatactgtacaat

SEQ ID NO: 957737 - DNA, 15 bp, Homo sapiens
gaatactgtacaatt

SEQ ID NO: 957738 - DNA, 15 bp, Homo sapiens
aatactgtacaattc

SEQ ID NO: 957739 - DNA, 15 bp, Homo sapiens
atactgtacaattct

SEQ ID NO: 957740 - DNA, 15 bp, Homo sapiens
tactgtacaattctg

SEQ ID NO: 957741 - DNA, 15 bp, Homo sapiens
actgtacaattctgg

SEQ ID NO: 957742 - DNA, 15 bp, Homo sapiens
ctgtacaattctgga

SEQ ID NO: 957743 - DNA, 15 bp, Homo sapiens
tgtacaattctggaa

SEQ ID NO: 957744 - DNA, 15 bp, Homo sapiens
gtacaattctggaat

SEQ ID NO: 957745 - DNA, 15 bp, Homo sapiens
tacaattctggaata

SEQ ID NO: 957746 - DNA, 15 bp, Homo sapiens
acaattctggaataa

SEQ ID NO: 957747 - DNA, 15 bp, Homo sapiens
caattctggaataag

SEQ ID NO: 957748 - DNA, 15 bp, Homo sapiens
aattctggaataaga

SEQ ID NO: 957749 - DNA, 15 bp, Homo sapiens
attctggaataagaa

SEQ ID NO: 957750 - DNA, 15 bp, Homo sapiens
ttctggaataagaac

SEQ ID NO: 957751 - DNA, 15 bp, Homo sapiens
tctggaataagaact

SEQ ID NO: 957752 - DNA, 15 bp, Homo sapiens
ctggaataagaacta

SEQ ID NO: 957753 - DNA, 15 bp, Homo sapiens
tggaataagaactat

SEQ ID NO: 957754 - DNA, 15 bp, Homo sapiens
ggaataagaactatt

SEQ ID NO: 957755 - DNA, 15 bp, Homo sapiens
gaataagaactattc

SEQ ID NO: 957756 - DNA, 15 bp, Homo sapiens
aataagaactattcc

SEQ ID NO: 957757 - DNA, 15 bp, Homo sapiens
ataagaactattcct

SEQ ID NO: 957758 - DNA, 15 bp, Homo sapiens
taagaactattcctg

SEQ ID NO: 957759 - DNA, 15 bp, Homo sapiens
aagaactattcctgc

SEQ ID NO: 957760 - DNA, 15 bp, Homo sapiens
agaactattcctgct

SEQ ID NO: 957761 - DNA, 15 bp, Homo sapiens
gaactattcctgctc

SEQ ID NO: 957762 - DNA, 15 bp, Homo sapiens
aactattcctgctca

SEQ ID NO: 957763 - DNA, 15 bp, Homo sapiens
actattcctgctcat

SEQ ID NO: 957764 - DNA, 15 bp, Homo sapiens
ctattcctgctcatt

SEQ ID NO: 957765 - DNA, 15 bp, Homo sapiens
tattcctgctcattc

SEQ ID NO: 957766 - DNA, 15 bp, Homo sapiens
attcctgctcattct

SEQ ID NO: 957767 - DNA, 15 bp, Homo sapiens
ttcctgctcattctt

SEQ ID NO: 957768 - DNA, 15 bp, Homo sapiens
tcctgctcattcttt

SEQ ID NO: 957769 - DNA, 15 bp, Homo sapiens
cctgctcattctttt

SEQ ID NO: 957770 - DNA, 15 bp, Homo sapiens
ctgctcattcttttt

SEQ ID NO: 957771 - DNA, 15 bp, Homo sapiens
tgctcattctttttc

SEQ ID NO: 957772 - DNA, 15 bp, Homo sapiens
gctcattctttttct

SEQ ID NO: 957773 - DNA, 15 bp, Homo sapiens
ctcattctttttcta

SEQ ID NO: 957774 - DNA, 15 bp, Homo sapiens
tcattctttttctat

SEQ ID NO: 957775 - DNA, 15 bp, Homo sapiens
cattctttttctatg

SEQ ID NO: 957776 - DNA, 15 bp, Homo sapiens
attctttttctatga

SEQ ID NO: 957777 - DNA, 15 bp, Homo sapiens
ttctttttctatgat

SEQ ID NO: 957778 - DNA, 15 bp, Homo sapiens
tctttttctatgatt

SEQ ID NO: 957779 - DNA, 15 bp, Homo sapiens
ctttttctatgattt

SEQ ID NO: 957780 - DNA, 15 bp, Homo sapiens
tttttctatgatttt

SEQ ID NO: 957781 - DNA, 15 bp, Homo sapiens
ttttctatgattttt

SEQ ID NO: 957782 - DNA, 15 bp, Homo sapiens
tttctatgatttttt

SEQ ID NO: 957783 - DNA, 15 bp, Homo sapiens
ttctatgattttttt

SEQ ID NO: 957784 - DNA, 15 bp, Homo sapiens
tctatgatttttttt

SEQ ID NO: 957785 - DNA, 15 bp, Homo sapiens
ctatgattttttttt

SEQ ID NO: 957786 - DNA, 15 bp, Homo sapiens
tatgatttttttttt

SEQ ID NO: 957787 - DNA, 15 bp, Homo sapiens
atgattttttttttt

SEQ ID NO: 957788 - DNA, 15 bp, Homo sapiens
tgatttttttttttt

SEQ ID NO: 957789 - DNA, 15 bp, Homo sapiens
gattttttttttttt

SEQ ID NO: 957790 - DNA, 15 bp, Homo sapiens
atttttttttttttt

SEQ ID NO: 957791 - DNA, 15 bp, Homo sapiens
tttttttttttttta

SEQ ID NO: 957792 - DNA, 15 bp, Homo sapiens
tttttttttttttac

SEQ ID NO: 957793 - DNA, 15 bp, Homo sapiens
ttttttttttttact

SEQ ID NO: 957794 - DNA, 15 bp, Homo sapiens
tttttttttttactt

SEQ ID NO: 957795 - DNA, 15 bp, Homo sapiens
ttttttttttacttt

SEQ ID NO: 957796 - DNA, 15 bp, Homo sapiens
tttttttttactttg

SEQ ID NO: 957797 - DNA, 15 bp, Homo sapiens
ttttttttactttgt

SEQ ID NO: 957798 - DNA, 15 bp, Homo sapiens
tttttttactttgtg

SEQ ID NO: 957799 - DNA, 15 bp, Homo sapiens
ttttttactttgtgg

SEQ ID NO: 957800 - DNA, 15 bp, Homo sapiens
tttttactttgtggg

SEQ ID NO: 957801 - DNA, 15 bp, Homo sapiens
ttttactttgtggga

SEQ ID NO: 957802 - DNA, 15 bp, Homo sapiens
tttactttgtgggag

SEQ ID NO: 957803 - DNA, 15 bp, Homo sapiens
ttactttgtgggagc

SEQ ID NO: 957804 - DNA, 15 bp, Homo sapiens
tactttgtgggagcc

SEQ ID NO: 957805 - DNA, 15 bp, Homo sapiens
actttgtgggagccc

SEQ ID NO: 957806 - DNA, 15 bp, Homo sapiens
ctttgtgggagccca

SEQ ID NO: 957807 - DNA, 15 bp, Homo sapiens
tttgtgggagcccag

SEQ ID NO: 957808 - DNA, 15 bp, Homo sapiens
ttgtgggagcccaga

SEQ ID NO: 957809 - DNA, 15 bp, Homo sapiens
tgtgggagcccagaa

SEQ ID NO: 957810 - DNA, 15 bp, Homo sapiens
gtgggagcccagaat

SEQ ID NO: 957811 - DNA, 15 bp, Homo sapiens
tgggagcccagaatt

SEQ ID NO: 957812 - DNA, 15 bp, Homo sapiens
gggagcccagaattt

SEQ ID NO: 957813 - DNA, 15 bp, Homo sapiens
ggagcccagaatttc

SEQ ID NO: 957814 - DNA, 15 bp, Homo sapiens
gagcccagaatttcc

SEQ ID NO: 957815 - DNA, 15 bp, Homo sapiens
agcccagaatttccc

SEQ ID NO: 957816 - DNA, 15 bp, Homo sapiens
gcccagaatttccct

SEQ ID NO: 957817 - DNA, 15 bp, Homo sapiens
cccagaatttccctg

SEQ ID NO: 957818 - DNA, 15 bp, Homo sapiens
ccagaatttccctgg

SEQ ID NO: 957819 - DNA, 15 bp, Homo sapiens
cagaatttccctggg

SEQ ID NO: 957820 - DNA, 15 bp, Homo sapiens
agaatttccctggga

SEQ ID NO: 957821 - DNA, 15 bp, Homo sapiens
gaatttccctgggaa

SEQ ID NO: 957822 - DNA, 15 bp, Homo sapiens
aatttccctgggaaa

SEQ ID NO: 957823 - DNA, 15 bp, Homo sapiens
atttccctgggaaat

SEQ ID NO: 957824 - DNA, 15 bp, Homo sapiens
tttccctgggaaata

SEQ ID NO: 957825 - DNA, 15 bp, Homo sapiens
ttccctgggaaataa

SEQ ID NO: 957826 - DNA, 15 bp, Homo sapiens
tccctgggaaataag

SEQ ID NO: 957827 - DNA, 15 bp, Homo sapiens
ccctgggaaataaga

SEQ ID NO: 957828 - DNA, 15 bp, Homo sapiens
cctgggaaataagaa

SEQ ID NO: 957829 - DNA, 15 bp, Homo sapiens
ctgggaaataagaat

SEQ ID NO: 957830 - DNA, 15 bp, Homo sapiens
tgggaaataagaata

SEQ ID NO: 957831 - DNA, 15 bp, Homo sapiens
gggaaataagaataa

SEQ ID NO: 957832 - DNA, 15 bp, Homo sapiens
ggaaataagaataag

SEQ ID NO: 957833 - DNA, 15 bp, Homo sapiens
gaaataagaataaga

SEQ ID NO: 957834 - DNA, 15 bp, Homo sapiens
aaataagaataagat

SEQ ID NO: 957835 - DNA, 15 bp, Homo sapiens
aataagaataagatc

SEQ ID NO: 957836 - DNA, 15 bp, Homo sapiens
ataagaataagatcc

SEQ ID NO: 957837 - DNA, 15 bp, Homo sapiens
taagaataagatcct

SEQ ID NO: 957838 - DNA, 15 bp, Homo sapiens
aagaataagatcctt

SEQ ID NO: 957839 - DNA, 15 bp, Homo sapiens
agaataagatccttt

SEQ ID NO: 957840 - DNA, 15 bp, Homo sapiens
gaataagatccttta

SEQ ID NO: 957841 - DNA, 15 bp, Homo sapiens
aataagatcctttaa

SEQ ID NO: 957842 - DNA, 15 bp, Homo sapiens
ataagatcctttaaa

SEQ ID NO: 957843 - DNA, 15 bp, Homo sapiens
taagatcctttaaat

SEQ ID NO: 957844 - DNA, 15 bp, Homo sapiens
aagatcctttaaata

SEQ ID NO: 957845 - DNA, 15 bp, Homo sapiens
agatcctttaaatac

SEQ ID NO: 957846 - DNA, 15 bp, Homo sapiens
gatcctttaaatact

SEQ ID NO: 957847 - DNA, 15 bp, Homo sapiens
atcctttaaatactg

SEQ ID NO: 957848 - DNA, 15 bp, Homo sapiens
tcctttaaatactgt

SEQ ID NO: 957849 - DNA, 15 bp, Homo sapiens
cctttaaatactgtc

SEQ ID NO: 957850 - DNA, 15 bp, Homo sapiens
ctttaaatactgtcc

SEQ ID NO: 957851 - DNA, 15 bp, Homo sapiens
tttaaatactgtcca

SEQ ID NO: 957852 - DNA, 15 bp, Homo sapiens
ttaaatactgtccag

SEQ ID NO: 957853 - DNA, 15 bp, Homo sapiens
taaatactgtccaga

SEQ ID NO: 957854 - DNA, 15 bp, Homo sapiens
aaatactgtccagaa

SEQ ID NO: 957855 - DNA, 15 bp, Homo sapiens
aatactgtccagaag

SEQ ID NO: 957856 - DNA, 15 bp, Homo sapiens
atactgtccagaaga

SEQ ID NO: 957857 - DNA, 15 bp, Homo sapiens
tactgtccagaagaa

SEQ ID NO: 957858 - DNA, 15 bp, Homo sapiens
actgtccagaagaaa

SEQ ID NO: 957859 - DNA, 15 bp, Homo sapiens
ctgtccagaagaaaa

SEQ ID NO: 957860 - DNA, 15 bp, Homo sapiens
tgtccagaagaaaaa

SEQ ID NO: 957861 - DNA, 15 bp, Homo sapiens
gtccagaagaaaaaa

SEQ ID NO: 957862 - DNA, 15 bp, Homo sapiens
tccagaagaaaaaaa

SEQ ID NO: 957863 - DNA, 15 bp, Homo sapiens
ccagaagaaaaaaaa

SEQ ID NO: 957864 - DNA, 15 bp, Homo sapiens
cagaagaaaaaaaaa

SEQ ID NO: 957865 - DNA, 15 bp, Homo sapiens
agaagaaaaaaaaaa

SEQ ID NO: 957866 - DNA, 15 bp, Homo sapiens
gaagaaaaaaaaaaa

SEQ ID NO: 957867 - DNA, 15 bp, Homo sapiens
aagaaaaaaaaaaat

SEQ ID NO: 957868 - DNA, 15 bp, Homo sapiens
agaaaaaaaaaaata

SEQ ID NO: 957869 - DNA, 15 bp, Homo sapiens
gaaaaaaaaaaatac

SEQ ID NO: 957870 - DNA, 15 bp, Homo sapiens
aaaaaaaaaaatacc

SEQ ID NO: 957871 - DNA, 15 bp, Homo sapiens
aaaaaaaaaatacca

SEQ ID NO: 957872 - DNA, 15 bp, Homo sapiens
aaaaaaaaataccac

SEQ ID NO: 957873 - DNA, 15 bp, Homo sapiens
aaaaaaaataccacc

SEQ ID NO: 957874 - DNA, 15 bp, Homo sapiens
aaaaaaataccacct

SEQ ID NO: 957875 - DNA, 15 bp, Homo sapiens
aaaaaataccacctt

SEQ ID NO: 957876 - DNA, 15 bp, Homo sapiens
aaaaataccacctta

SEQ ID NO: 957877 - DNA, 15 bp, Homo sapiens
aaaataccaccttat

SEQ ID NO: 957878 - DNA, 15 bp, Homo sapiens
aaataccaccttata

SEQ ID NO: 957879 - DNA, 15 bp, Homo sapiens
aataccaccttataa

SEQ ID NO: 957880 - DNA, 15 bp, Homo sapiens
ataccaccttataac

SEQ ID NO: 957881 - DNA, 15 bp, Homo sapiens
taccaccttataaca

SEQ ID NO: 957882 - DNA, 15 bp, Homo sapiens
accaccttataacag

SEQ ID NO: 957883 - DNA, 15 bp, Homo sapiens
ccaccttataacagg

SEQ ID NO: 957884 - DNA, 15 bp, Homo sapiens
caccttataacaggt

SEQ ID NO: 957885 - DNA, 15 bp, Homo sapiens
accttataacaggtc

SEQ ID NO: 957886 - DNA, 15 bp, Homo sapiens
ccttataacaggtct

SEQ ID NO: 957887 - DNA, 15 bp, Homo sapiens
cttataacaggtctc

SEQ ID NO: 957888 - DNA, 15 bp, Homo sapiens
ttataacaggtctca

SEQ ID NO: 957889 - DNA, 15 bp, Homo sapiens
tataacaggtctcat

SEQ ID NO: 957890 - DNA, 15 bp, Homo sapiens
ataacaggtctcatt

SEQ ID NO: 957891 - DNA, 15 bp, Homo sapiens
taacaggtctcattt

SEQ ID NO: 957892 - DNA, 15 bp, Homo sapiens
aacaggtctcatttg

SEQ ID NO: 957893 - DNA, 15 bp, Homo sapiens
acaggtctcatttgt

SEQ ID NO: 957894 - DNA, 15 bp, Homo sapiens
caggtctcatttgtg

SEQ ID NO: 957895 - DNA, 15 bp, Homo sapiens
aggtctcatttgtga

SEQ ID NO: 957896 - DNA, 15 bp, Homo sapiens
ggtctcatttgtgac

SEQ ID NO: 957897 - DNA, 15 bp, Homo sapiens
gtctcatttgtgact

SEQ ID NO: 957898 - DNA, 15 bp, Homo sapiens
tctcatttgtgactg

SEQ ID NO: 957899 - DNA, 15 bp, Homo sapiens
ctcatttgtgactgc

SEQ ID NO: 957900 - DNA, 15 bp, Homo sapiens
tcatttgtgactgct

SEQ ID NO: 957901 - DNA, 15 bp, Homo sapiens
catttgtgactgctt

SEQ ID NO: 957902 - DNA, 15 bp, Homo sapiens
atttgtgactgcttc

SEQ ID NO: 957903 - DNA, 15 bp, Homo sapiens
tttgtgactgcttcc

SEQ ID NO: 957904 - DNA, 15 bp, Homo sapiens
ttgtgactgcttcca

SEQ ID NO: 957905 - DNA, 15 bp, Homo sapiens
tgtgactgcttccaa

SEQ ID NO: 957906 - DNA, 15 bp, Homo sapiens
gtgactgcttccaaa

SEQ ID NO: 957907 - DNA, 15 bp, Homo sapiens
tgactgcttccaaaa

SEQ ID NO: 957908 - DNA, 15 bp, Homo sapiens
gactgcttccaaaac

SEQ ID NO: 957909 - DNA, 15 bp, Homo sapiens
actgcttccaaaact

SEQ ID NO: 957910 - DNA, 15 bp, Homo sapiens
ctgcttccaaaactg

SEQ ID NO: 957911 - DNA, 15 bp, Homo sapiens
tgcttccaaaactgc

SEQ ID NO: 957912 - DNA, 15 bp, Homo sapiens
gcttccaaaactgca

SEQ ID NO: 957913 - DNA, 15 bp, Homo sapiens
cttccaaaactgcag

SEQ ID NO: 957914 - DNA, 15 bp, Homo sapiens
ttccaaaactgcaga

SEQ ID NO: 957915 - DNA, 15 bp, Homo sapiens
tccaaaactgcagat

SEQ ID NO: 957916 - DNA, 15 bp, Homo sapiens
ccaaaactgcagata

SEQ ID NO: 957917 - DNA, 15 bp, Homo sapiens
caaaactgcagataa

SEQ ID NO: 957918 - DNA, 15 bp, Homo sapiens
aaaactgcagataaa

SEQ ID NO: 957919 - DNA, 15 bp, Homo sapiens
aaactgcagataaaa

SEQ ID NO: 957920 - DNA, 15 bp, Homo sapiens
aactgcagataaaac

SEQ ID NO: 957921 - DNA, 15 bp, Homo sapiens
actgcagataaaacc

SEQ ID NO: 957922 - DNA, 15 bp, Homo sapiens
ctgcagataaaacct

SEQ ID NO: 957923 - DNA, 15 bp, Homo sapiens
tgcagataaaacctc

SEQ ID NO: 957924 - DNA, 15 bp, Homo sapiens
gcagataaaacctca

SEQ ID NO: 957925 - DNA, 15 bp, Homo sapiens
cagataaaacctcaa

SEQ ID NO: 957926 - DNA, 15 bp, Homo sapiens
agataaaacctcaaa

SEQ ID NO: 957927 - DNA, 15 bp, Homo sapiens
gataaaacctcaaat

SEQ ID NO: 957928 - DNA, 15 bp, Homo sapiens
ataaaacctcaaatc

SEQ ID NO: 957929 - DNA, 15 bp, Homo sapiens
taaaacctcaaatca

SEQ ID NO: 957930 - DNA, 15 bp, Homo sapiens
aaaacctcaaatcat

SEQ ID NO: 957931 - DNA, 15 bp, Homo sapiens
aaacctcaaatcatc

SEQ ID NO: 957932 - DNA, 15 bp, Homo sapiens
aacctcaaatcatca

SEQ ID NO: 957933 - DNA, 15 bp, Homo sapiens
acctcaaatcatcaa

SEQ ID NO: 957934 - DNA, 15 bp, Homo sapiens
cctcaaatcatcaaa

SEQ ID NO: 957935 - DNA, 15 bp, Homo sapiens
ctcaaatcatcaaaa

SEQ ID NO: 957936 - DNA, 15 bp, Homo sapiens
tcaaatcatcaaaag

SEQ ID NO: 957937 - DNA, 15 bp, Homo sapiens
caaatcatcaaaagg

SEQ ID NO: 957938 - DNA, 15 bp, Homo sapiens
aaatcatcaaaaggt

SEQ ID NO: 957939 - DNA, 15 bp, Homo sapiens
aatcatcaaaaggtt

SEQ ID NO: 957940 - DNA, 15 bp, Homo sapiens
atcatcaaaaggttt

SEQ ID NO: 957941 - DNA, 15 bp, Homo sapiens
tcatcaaaaggtttg

SEQ ID NO: 957942 - DNA, 15 bp, Homo sapiens
catcaaaaggtttga

SEQ ID NO: 957943 - DNA, 15 bp, Homo sapiens
atcaaaaggtttgat

SEQ ID NO: 957944 - DNA, 15 bp, Homo sapiens
tcaaaaggtttgatt

SEQ ID NO: 957945 - DNA, 15 bp, Homo sapiens
caaaaggtttgattt

SEQ ID NO: 957946 - DNA, 15 bp, Homo sapiens
aaaaggtttgattta

SEQ ID NO: 957947 - DNA, 15 bp, Homo sapiens
aaaggtttgatttat

SEQ ID NO: 957948 - DNA, 15 bp, Homo sapiens
aaggtttgatttatt

SEQ ID NO: 957949 - DNA, 15 bp, Homo sapiens
aggtttgatttatta

SEQ ID NO: 957950 - DNA, 15 bp, Homo sapiens
ggtttgatttattaa

SEQ ID NO: 957951 - DNA, 15 bp, Homo sapiens
gtttgatttattaaa

SEQ ID NO: 957952 - DNA, 15 bp, Homo sapiens
tttgatttattaaaa

SEQ ID NO: 957953 - DNA, 15 bp, Homo sapiens
ttgatttattaaaaa

SEQ ID NO: 957954 - DNA, 15 bp, Homo sapiens
tgatttattaaaaag

SEQ ID NO: 957955 - DNA, 15 bp, Homo sapiens
gatttattaaaaaga

SEQ ID NO: 957956 - DNA, 15 bp, Homo sapiens
atttattaaaaagaa

SEQ ID NO: 957957 - DNA, 15 bp, Homo sapiens
tttattaaaaagaaa

SEQ ID NO: 957958 - DNA, 15 bp, Homo sapiens
ttattaaaaagaaaa

SEQ ID NO: 957959 - DNA, 15 bp, Homo sapiens
tattaaaaagaaaaa

SEQ ID NO: 957960 - DNA, 15 bp, Homo sapiens
attaaaaagaaaaag

SEQ ID NO: 957961 - DNA, 15 bp, Homo sapiens
ttaaaaagaaaaagt

SEQ ID NO: 957962 - DNA, 15 bp, Homo sapiens
taaaaagaaaaagtc

SEQ ID NO: 957963 - DNA, 15 bp, Homo sapiens
aaaaagaaaaagtct

SEQ ID NO: 957964 - DNA, 15 bp, Homo sapiens
aaaagaaaaagtctc

SEQ ID NO: 957965 - DNA, 15 bp, Homo sapiens
aaagaaaaagtctct

SEQ ID NO: 957966 - DNA, 15 bp, Homo sapiens
aagaaaaagtctctg

SEQ ID NO: 957967 - DNA, 15 bp, Homo sapiens
agaaaaagtctctgg

SEQ ID NO: 957968 - DNA, 15 bp, Homo sapiens
gaaaaagtctctggt

SEQ ID NO: 957969 - DNA, 15 bp, Homo sapiens
aaaaagtctctggtg

SEQ ID NO: 957970 - DNA, 15 bp, Homo sapiens
aaaagtctctggtga

SEQ ID NO: 957971 - DNA, 15 bp, Homo sapiens
aaagtctctggtgaa

SEQ ID NO: 957972 - DNA, 15 bp, Homo sapiens
aagtctctggtgaaa

SEQ ID NO: 957973 - DNA, 15 bp, Homo sapiens
agtctctggtgaaat

SEQ ID NO: 957974 - DNA, 15 bp, Homo sapiens
gtctctggtgaaatc

SEQ ID NO: 957975 - DNA, 15 bp, Homo sapiens
tctctggtgaaatct

SEQ ID NO: 957976 - DNA, 15 bp, Homo sapiens
ctctggtgaaatctc

SEQ ID NO: 957977 - DNA, 15 bp, Homo sapiens
tctggtgaaatctca

SEQ ID NO: 957978 - DNA, 15 bp, Homo sapiens
ctggtgaaatctcaa

SEQ ID NO: 957979 - DNA, 15 bp, Homo sapiens
tggtgaaatctcaag

SEQ ID NO: 957980 - DNA, 15 bp, Homo sapiens
ggtgaaatctcaaga

SEQ ID NO: 957981 - DNA, 15 bp, Homo sapiens
gtgaaatctcaagag

SEQ ID NO: 957982 - DNA, 15 bp, Homo sapiens
tgaaatctcaagagt

SEQ ID NO: 957983 - DNA, 15 bp, Homo sapiens
gaaatctcaagagtc

SEQ ID NO: 957984 - DNA, 15 bp, Homo sapiens
aaatctcaagagtcc

SEQ ID NO: 957985 - DNA, 15 bp, Homo sapiens
aatctcaagagtccc

SEQ ID NO: 957986 - DNA, 15 bp, Homo sapiens
atctcaagagtccct

SEQ ID NO: 957987 - DNA, 15 bp, Homo sapiens
tctcaagagtccctt

SEQ ID NO: 957988 - DNA, 15 bp, Homo sapiens
ctcaagagtcccttc

SEQ ID NO: 957989 - DNA, 15 bp, Homo sapiens
tcaagagtcccttcc

SEQ ID NO: 957990 - DNA, 15 bp, Homo sapiens
caagagtcccttcca

SEQ ID NO: 957991 - DNA, 15 bp, Homo sapiens
aagagtcccttccac

SEQ ID NO: 957992 - DNA, 15 bp, Homo sapiens
agagtcccttccacc

SEQ ID NO: 957993 - DNA, 15 bp, Homo sapiens
gagtcccttccaccc

SEQ ID NO: 957994 - DNA, 15 bp, Homo sapiens
agtcccttccacccc

SEQ ID NO: 957995 - DNA, 15 bp, Homo sapiens
gtcccttccacccca

SEQ ID NO: 957996 - DNA, 15 bp, Homo sapiens
tcccttccaccccaa

SEQ ID NO: 957997 - DNA, 15 bp, Homo sapiens
cccttccaccccaag

SEQ ID NO: 957998 - DNA, 15 bp, Homo sapiens
ccttccaccccaagc

SEQ ID NO: 957999 - DNA, 15 bp, Homo sapiens
cttccaccccaagca

SEQ ID NO: 958000 - DNA, 15 bp, Homo sapiens
ttccaccccaagcat

SEQ ID NO: 958001 - DNA, 15 bp, Homo sapiens
tccaccccaagcatt

SEQ ID NO: 958002 - DNA, 15 bp, Homo sapiens
ccaccccaagcattt

SEQ ID NO: 958003 - DNA, 15 bp, Homo sapiens
caccccaagcatttt

SEQ ID NO: 958004 - DNA, 15 bp, Homo sapiens
accccaagcattttt

SEQ ID NO: 958005 - DNA, 15 bp, Homo sapiens
ccccaagcatttttc

SEQ ID NO: 958006 - DNA, 15 bp, Homo sapiens
cccaagcatttttct

SEQ ID NO: 958007 - DNA, 15 bp, Homo sapiens
ccaagcatttttctt

SEQ ID NO: 958008 - DNA, 15 bp, Homo sapiens
caagcatttttcttc

SEQ ID NO: 958009 - DNA, 15 bp, Homo sapiens
aagcatttttcttca

SEQ ID NO: 958010 - DNA, 15 bp, Homo sapiens
agcatttttcttcat

SEQ ID NO: 958011 - DNA, 15 bp, Homo sapiens
gcatttttcttcatt

SEQ ID NO: 958012 - DNA, 15 bp, Homo sapiens
catttttcttcatta

SEQ ID NO: 958013 - DNA, 15 bp, Homo sapiens
atttttcttcattaa

SEQ ID NO: 958014 - DNA, 15 bp, Homo sapiens
tttttcttcattaaa

SEQ ID NO: 958015 - DNA, 15 bp, Homo sapiens
ttttcttcattaaac

SEQ ID NO: 958016 - DNA, 15 bp, Homo sapiens
tttcttcattaaaca

SEQ ID NO: 958017 - DNA, 15 bp, Homo sapiens
ttcttcattaaacaa

SEQ ID NO: 958018 - DNA, 15 bp, Homo sapiens
tcttcattaaacaag

SEQ ID NO: 958019 - DNA, 15 bp, Homo sapiens
cttcattaaacaagc

SEQ ID NO: 958020 - DNA, 15 bp, Homo sapiens
ttcattaaacaagca

SEQ ID NO: 958021 - DNA, 15 bp, Homo sapiens
tcattaaacaagcag

SEQ ID NO: 958022 - DNA, 15 bp, Homo sapiens
cattaaacaagcagt

SEQ ID NO: 958023 - DNA, 15 bp, Homo sapiens
attaaacaagcagtc

SEQ ID NO: 958024 - DNA, 15 bp, Homo sapiens
ttaaacaagcagtca

SEQ ID NO: 958025 - DNA, 15 bp, Homo sapiens
taaacaagcagtcaa

SEQ ID NO: 958026 - DNA, 15 bp, Homo sapiens
aaacaagcagtcaaa

SEQ ID NO: 958027 - DNA, 15 bp, Homo sapiens
aacaagcagtcaaaa

SEQ ID NO: 958028 - DNA, 15 bp, Homo sapiens
acaagcagtcaaaaa

SEQ ID NO: 958029 - DNA, 15 bp, Homo sapiens
caagcagtcaaaaac

SEQ ID NO: 958030 - DNA, 15 bp, Homo sapiens
aagcagtcaaaaacc

SEQ ID NO: 958031 - DNA, 15 bp, Homo sapiens
agcagtcaaaaaccc

SEQ ID NO: 958032 - DNA, 15 bp, Homo sapiens
gcagtcaaaaaccca

SEQ ID NO: 958033 - DNA, 15 bp, Homo sapiens
cagtcaaaaacccac

SEQ ID NO: 958034 - DNA, 15 bp, Homo sapiens
agtcaaaaacccact

SEQ ID NO: 958035 - DNA, 15 bp, Homo sapiens
gtcaaaaacccactt

SEQ ID NO: 958036 - DNA, 15 bp, Homo sapiens
tcaaaaacccacttc

SEQ ID NO: 958037 - DNA, 15 bp, Homo sapiens
caaaaacccacttca

SEQ ID NO: 958038 - DNA, 15 bp, Homo sapiens
aaaaacccacttcaa

SEQ ID NO: 958039 - DNA, 15 bp, Homo sapiens
aaaacccacttcaaa

SEQ ID NO: 958040 - DNA, 15 bp, Homo sapiens
aaacccacttcaaac

SEQ ID NO: 958041 - DNA, 15 bp, Homo sapiens
aacccacttcaaact

SEQ ID NO: 958042 - DNA, 15 bp, Homo sapiens
acccacttcaaacta

SEQ ID NO: 958043 - DNA, 15 bp, Homo sapiens
cccacttcaaactat

SEQ ID NO: 958044 - DNA, 15 bp, Homo sapiens
ccacttcaaactata

SEQ ID NO: 958045 - DNA, 15 bp, Homo sapiens
cacttcaaactataa

SEQ ID NO: 958046 - DNA, 15 bp, Homo sapiens
acttcaaactataaa

SEQ ID NO: 958047 - DNA, 15 bp, Homo sapiens
cttcaaactataaat

SEQ ID NO: 958048 - DNA, 15 bp, Homo sapiens
ttcaaactataaatt

SEQ ID NO: 958049 - DNA, 15 bp, Homo sapiens
tcaaactataaattg

SEQ ID NO: 958050 - DNA, 15 bp, Homo sapiens
caaactataaattga

SEQ ID NO: 958051 - DNA, 15 bp, Homo sapiens
aaactataaattgaa

SEQ ID NO: 958052 - DNA, 15 bp, Homo sapiens
aactataaattgaac

SEQ ID NO: 958053 - DNA, 15 bp, Homo sapiens
actataaattgaaca

SEQ ID NO: 958054 - DNA, 15 bp, Homo sapiens
ctataaattgaacag

SEQ ID NO: 958055 - DNA, 15 bp, Homo sapiens
tataaattgaacagc

SEQ ID NO: 958056 - DNA, 15 bp, Homo sapiens
ataaattgaacagca

SEQ ID NO: 958057 - DNA, 15 bp, Homo sapiens
taaattgaacagcaa

SEQ ID NO: 958058 - DNA, 15 bp, Homo sapiens
aaattgaacagcaat

SEQ ID NO: 958059 - DNA, 15 bp, Homo sapiens
aattgaacagcaatg

SEQ ID NO: 958060 - DNA, 15 bp, Homo sapiens
attgaacagcaatgg

SEQ ID NO: 958061 - DNA, 15 bp, Homo sapiens
ttgaacagcaatgga

SEQ ID NO: 958062 - DNA, 15 bp, Homo sapiens
tgaacagcaatggaa

SEQ ID NO: 958063 - DNA, 15 bp, Homo sapiens
gaacagcaatggaaa

SEQ ID NO: 958064 - DNA, 15 bp, Homo sapiens
aacagcaatggaaaa

SEQ ID NO: 958065 - DNA, 15 bp, Homo sapiens
acagcaatggaaaaa

SEQ ID NO: 958066 - DNA, 15 bp, Homo sapiens
cagcaatggaaaaat

SEQ ID NO: 958067 - DNA, 15 bp, Homo sapiens
agcaatggaaaaata

SEQ ID NO: 958068 - DNA, 15 bp, Homo sapiens
gcaatggaaaaataa

SEQ ID NO: 958069 - DNA, 15 bp, Homo sapiens
caatggaaaaataag

SEQ ID NO: 958070 - DNA, 15 bp, Homo sapiens
aatggaaaaataaga

SEQ ID NO: 958071 - DNA, 15 bp, Homo sapiens
atggaaaaataagaa

SEQ ID NO: 958072 - DNA, 15 bp, Homo sapiens
tggaaaaataagaaa

SEQ ID NO: 958073 - DNA, 15 bp, Homo sapiens
ggaaaaataagaaat

SEQ ID NO: 958074 - DNA, 15 bp, Homo sapiens
gaaaaataagaaatt

SEQ ID NO: 958075 - DNA, 15 bp, Homo sapiens
aaaaataagaaattt

SEQ ID NO: 958076 - DNA, 15 bp, Homo sapiens
aaaataagaaatttt

SEQ ID NO: 958077 - DNA, 15 bp, Homo sapiens
aaataagaaattttc

SEQ ID NO: 958078 - DNA, 15 bp, Homo sapiens
aataagaaattttca

SEQ ID NO: 958079 - DNA, 15 bp, Homo sapiens
ataagaaattttcat

SEQ ID NO: 958080 - DNA, 15 bp, Homo sapiens
taagaaattttcatt

SEQ ID NO: 958081 - DNA, 15 bp, Homo sapiens
aagaaattttcattc

SEQ ID NO: 958082 - DNA, 15 bp, Homo sapiens
agaaattttcattct

SEQ ID NO: 958083 - DNA, 15 bp, Homo sapiens
gaaattttcattctt

SEQ ID NO: 958084 - DNA, 15 bp, Homo sapiens
aaattttcattcttt

SEQ ID NO: 958085 - DNA, 15 bp, Homo sapiens
aattttcattctttt

SEQ ID NO: 958086 - DNA, 15 bp, Homo sapiens
attttcattcttttc

SEQ ID NO: 958087 - DNA, 15 bp, Homo sapiens
ttttcattcttttcc

SEQ ID NO: 958088 - DNA, 15 bp, Homo sapiens
tttcattcttttcca

SEQ ID NO: 958089 - DNA, 15 bp, Homo sapiens
ttcattcttttccaa

SEQ ID NO: 958090 - DNA, 15 bp, Homo sapiens
tcattcttttccaat

SEQ ID NO: 958091 - DNA, 15 bp, Homo sapiens
cattcttttccaatc

SEQ ID NO: 958092 - DNA, 15 bp, Homo sapiens
attcttttccaatca

SEQ ID NO: 958093 - DNA, 15 bp, Homo sapiens
ttcttttccaatcaa

SEQ ID NO: 958094 - DNA, 15 bp, Homo sapiens
tcttttccaatcaat

SEQ ID NO: 958095 - DNA, 15 bp, Homo sapiens
cttttccaatcaatg

SEQ ID NO: 958096 - DNA, 15 bp, Homo sapiens
ttttccaatcaatgt

SEQ ID NO: 958097 - DNA, 15 bp, Homo sapiens
tttccaatcaatgta

SEQ ID NO: 958098 - DNA, 15 bp, Homo sapiens
ttccaatcaatgtaa

SEQ ID NO: 958099 - DNA, 15 bp, Homo sapiens
tccaatcaatgtaat

SEQ ID NO: 958100 - DNA, 15 bp, Homo sapiens
ccaatcaatgtaatt

SEQ ID NO: 958101 - DNA, 15 bp, Homo sapiens
caatcaatgtaattt

SEQ ID NO: 958102 - DNA, 15 bp, Homo sapiens
aatcaatgtaattta

SEQ ID NO: 958103 - DNA, 15 bp, Homo sapiens
atcaatgtaatttaa

SEQ ID NO: 958104 - DNA, 15 bp, Homo sapiens
tcaatgtaatttaac

SEQ ID NO: 958105 - DNA, 15 bp, Homo sapiens
caatgtaatttaaca

SEQ ID NO: 958106 - DNA, 15 bp, Homo sapiens
aatgtaatttaacat

SEQ ID NO: 958107 - DNA, 15 bp, Homo sapiens
atgtaatttaacata

SEQ ID NO: 958108 - DNA, 15 bp, Homo sapiens
tgtaatttaacataa

SEQ ID NO: 958109 - DNA, 15 bp, Homo sapiens
gtaatttaacataaa

SEQ ID NO: 958110 - DNA, 15 bp, Homo sapiens
taatttaacataaac

SEQ ID NO: 958111 - DNA, 15 bp, Homo sapiens
aatttaacataaact

SEQ ID NO: 958112 - DNA, 15 bp, Homo sapiens
atttaacataaactc

SEQ ID NO: 958113 - DNA, 15 bp, Homo sapiens
tttaacataaactcc

SEQ ID NO: 958114 - DNA, 15 bp, Homo sapiens
ttaacataaactcca

SEQ ID NO: 958115 - DNA, 15 bp, Homo sapiens
taacataaactccag

SEQ ID NO: 958116 - DNA, 15 bp, Homo sapiens
aacataaactccagt

SEQ ID NO: 958117 - DNA, 15 bp, Homo sapiens
acataaactccagtt

SEQ ID NO: 958118 - DNA, 15 bp, Homo sapiens
cataaactccagttt

SEQ ID NO: 958119 - DNA, 15 bp, Homo sapiens
ataaactccagttta

SEQ ID NO: 958120 - DNA, 15 bp, Homo sapiens
taaactccagtttac

SEQ ID NO: 958121 - DNA, 15 bp, Homo sapiens
aaactccagtttact

SEQ ID NO: 958122 - DNA, 15 bp, Homo sapiens
aactccagtttactt

SEQ ID NO: 958123 - DNA, 15 bp, Homo sapiens
actccagtttactta

SEQ ID NO: 958124 - DNA, 15 bp, Homo sapiens
ctccagtttacttac

SEQ ID NO: 958125 - DNA, 15 bp, Homo sapiens
tccagtttacttaca

SEQ ID NO: 958126 - DNA, 15 bp, Homo sapiens
ccagtttacttacac

SEQ ID NO: 958127 - DNA, 15 bp, Homo sapiens
cagtttacttacacc

SEQ ID NO: 958128 - DNA, 15 bp, Homo sapiens
agtttacttacacct

SEQ ID NO: 958129 - DNA, 15 bp, Homo sapiens
gtttacttacaccta

SEQ ID NO: 958130 - DNA, 15 bp, Homo sapiens
tttacttacacctaa

SEQ ID NO: 958131 - DNA, 15 bp, Homo sapiens
ttacttacacctaat

SEQ ID NO: 958132 - DNA, 15 bp, Homo sapiens
tacttacacctaatg

SEQ ID NO: 958133 - DNA, 15 bp, Homo sapiens
acttacacctaatgc

SEQ ID NO: 958134 - DNA, 15 bp, Homo sapiens
cttacacctaatgca

SEQ ID NO: 958135 - DNA, 15 bp, Homo sapiens
ttacacctaatgcaa

SEQ ID NO: 958136 - DNA, 15 bp, Homo sapiens
tacacctaatgcaat

SEQ ID NO: 958137 - DNA, 15 bp, Homo sapiens
acacctaatgcaata

SEQ ID NO: 958138 - DNA, 15 bp, Homo sapiens
cacctaatgcaataa

SEQ ID NO: 958139 - DNA, 15 bp, Homo sapiens
acctaatgcaataac

SEQ ID NO: 958140 - DNA, 15 bp, Homo sapiens
cctaatgcaataaca

SEQ ID NO: 958141 - DNA, 15 bp, Homo sapiens
ctaatgcaataacag

SEQ ID NO: 958142 - DNA, 15 bp, Homo sapiens
taatgcaataacagc

SEQ ID NO: 958143 - DNA, 15 bp, Homo sapiens
aatgcaataacagcc

SEQ ID NO: 958144 - DNA, 15 bp, Homo sapiens
atgcaataacagcct

SEQ ID NO: 958145 - DNA, 15 bp, Homo sapiens
tgcaataacagcctt

SEQ ID NO: 958146 - DNA, 15 bp, Homo sapiens
gcaataacagccttt

SEQ ID NO: 958147 - DNA, 15 bp, Homo sapiens
caataacagcctttg

SEQ ID NO: 958148 - DNA, 15 bp, Homo sapiens
aataacagcctttgt

SEQ ID NO: 958149 - DNA, 15 bp, Homo sapiens
ataacagcctttgtt

SEQ ID NO: 958150 - DNA, 15 bp, Homo sapiens
taacagcctttgttg

SEQ ID NO: 958151 - DNA, 15 bp, Homo sapiens
aacagcctttgttgt

SEQ ID NO: 958152 - DNA, 15 bp, Homo sapiens
acagcctttgttgtg

SEQ ID NO: 958153 - DNA, 15 bp, Homo sapiens
cagcctttgttgtgt

SEQ ID NO: 958154 - DNA, 15 bp, Homo sapiens
agcctttgttgtgtc

SEQ ID NO: 958155 - DNA, 15 bp, Homo sapiens
gcctttgttgtgtcc

SEQ ID NO: 958156 - DNA, 15 bp, Homo sapiens
cctttgttgtgtcca

SEQ ID NO: 958157 - DNA, 15 bp, Homo sapiens
ctttgttgtgtccac

SEQ ID NO: 958158 - DNA, 15 bp, Homo sapiens
tttgttgtgtccaca

SEQ ID NO: 958159 - DNA, 15 bp, Homo sapiens
ttgttgtgtccacat

SEQ ID NO: 958160 - DNA, 15 bp, Homo sapiens
tgttgtgtccacatt

SEQ ID NO: 958161 - DNA, 15 bp, Homo sapiens
gttgtgtccacattt

SEQ ID NO: 958162 - DNA, 15 bp, Homo sapiens
ttgtgtccacatttc

SEQ ID NO: 958163 - DNA, 15 bp, Homo sapiens
tgtgtccacatttca

SEQ ID NO: 958164 - DNA, 15 bp, Homo sapiens
gtgtccacatttcaa

SEQ ID NO: 958165 - DNA, 15 bp, Homo sapiens
tgtccacatttcaaa

SEQ ID NO: 958166 - DNA, 15 bp, Homo sapiens
gtccacatttcaaaa

SEQ ID NO: 958167 - DNA, 15 bp, Homo sapiens
tccacatttcaaaac

SEQ ID NO: 958168 - DNA, 15 bp, Homo sapiens
ccacatttcaaaaca

SEQ ID NO: 958169 - DNA, 15 bp, Homo sapiens
cacatttcaaaacat

SEQ ID NO: 958170 - DNA, 15 bp, Homo sapiens
acatttcaaaacata

SEQ ID NO: 958171 - DNA, 15 bp, Homo sapiens
catttcaaaacatag

SEQ ID NO: 958172 - DNA, 15 bp, Homo sapiens
atttcaaaacataga

SEQ ID NO: 958173 - DNA, 15 bp, Homo sapiens
tttcaaaacatagaa

SEQ ID NO: 958174 - DNA, 15 bp, Homo sapiens
ttcaaaacatagaac

SEQ ID NO: 958175 - DNA, 15 bp, Homo sapiens
tcaaaacatagaaca

SEQ ID NO: 958176 - DNA, 15 bp, Homo sapiens
caaaacatagaacat

SEQ ID NO: 958177 - DNA, 15 bp, Homo sapiens
aaaacatagaacatt

SEQ ID NO: 958178 - DNA, 15 bp, Homo sapiens
aaacatagaacattt

SEQ ID NO: 958179 - DNA, 15 bp, Homo sapiens
aacatagaacatttg

SEQ ID NO: 958180 - DNA, 15 bp, Homo sapiens
acatagaacatttgc

SEQ ID NO: 958181 - DNA, 15 bp, Homo sapiens
catagaacatttgca

SEQ ID NO: 958182 - DNA, 15 bp, Homo sapiens
atagaacatttgcaa

SEQ ID NO: 958183 - DNA, 15 bp, Homo sapiens
tagaacatttgcaag

SEQ ID NO: 958184 - DNA, 15 bp, Homo sapiens
agaacatttgcaaga

SEQ ID NO: 958185 - DNA, 15 bp, Homo sapiens
gaacatttgcaagac

SEQ ID NO: 958186 - DNA, 15 bp, Homo sapiens
aacatttgcaagaca

SEQ ID NO: 958187 - DNA, 15 bp, Homo sapiens
acatttgcaagacaa

SEQ ID NO: 958188 - DNA, 15 bp, Homo sapiens
catttgcaagacaaa

SEQ ID NO: 958189 - DNA, 15 bp, Homo sapiens
atttgcaagacaaaa

SEQ ID NO: 958190 - DNA, 15 bp, Homo sapiens
tttgcaagacaaaaa

SEQ ID NO: 958191 - DNA, 15 bp, Homo sapiens
ttgcaagacaaaaaa

SEQ ID NO: 958192 - DNA, 15 bp, Homo sapiens
tgcaagacaaaaaaa

SEQ ID NO: 958193 - DNA, 15 bp, Homo sapiens
gcaagacaaaaaaaa

SEQ ID NO: 958194 - DNA, 15 bp, Homo sapiens
caagacaaaaaaaac

SEQ ID NO: 958195 - DNA, 15 bp, Homo sapiens
aagacaaaaaaaacc

SEQ ID NO: 958196 - DNA, 15 bp, Homo sapiens
agacaaaaaaaacca

SEQ ID NO: 958197 - DNA, 15 bp, Homo sapiens
gacaaaaaaaaccat

SEQ ID NO: 958198 - DNA, 15 bp, Homo sapiens
acaaaaaaaaccatc

SEQ ID NO: 958199 - DNA, 15 bp, Homo sapiens
caaaaaaaaccatca

SEQ ID NO: 958200 - DNA, 15 bp, Homo sapiens
aaaaaaaaccatcac

SEQ ID NO: 958201 - DNA, 15 bp, Homo sapiens
aaaaaaaccatcact

SEQ ID NO: 958202 - DNA, 15 bp, Homo sapiens
aaaaaaccatcactt

SEQ ID NO: 958203 - DNA, 15 bp, Homo sapiens
aaaaaccatcacttt

SEQ ID NO: 958204 - DNA, 15 bp, Homo sapiens
aaaaccatcactttt

SEQ ID NO: 958205 - DNA, 15 bp, Homo sapiens
aaaccatcacttttt

SEQ ID NO: 958206 - DNA, 15 bp, Homo sapiens
aaccatcactttttc

SEQ ID NO: 958207 - DNA, 15 bp, Homo sapiens
accatcactttttcc

SEQ ID NO: 958208 - DNA, 15 bp, Homo sapiens
ccatcactttttcct

SEQ ID NO: 958209 - DNA, 15 bp, Homo sapiens
catcactttttcctt

SEQ ID NO: 958210 - DNA, 15 bp, Homo sapiens
atcactttttccttc

SEQ ID NO: 958211 - DNA, 15 bp, Homo sapiens
tcactttttccttct

SEQ ID NO: 958212 - DNA, 15 bp, Homo sapiens
cactttttccttctc

SEQ ID NO: 958213 - DNA, 15 bp, Homo sapiens
actttttccttctcc

SEQ ID NO: 958214 - DNA, 15 bp, Homo sapiens
ctttttccttctcca

SEQ ID NO: 958215 - DNA, 15 bp, Homo sapiens
tttttccttctccat

SEQ ID NO: 958216 - DNA, 15 bp, Homo sapiens
ttttccttctccatc

SEQ ID NO: 958217 - DNA, 15 bp, Homo sapiens
tttccttctccatca

SEQ ID NO: 958218 - DNA, 15 bp, Homo sapiens
ttccttctccatcat

SEQ ID NO: 958219 - DNA, 15 bp, Homo sapiens
tccttctccatcatt

SEQ ID NO: 958220 - DNA, 15 bp, Homo sapiens
ccttctccatcattt

SEQ ID NO: 958221 - DNA, 15 bp, Homo sapiens
cttctccatcatttc

SEQ ID NO: 958222 - DNA, 15 bp, Homo sapiens
ttctccatcatttct

SEQ ID NO: 958223 - DNA, 15 bp, Homo sapiens
tctccatcatttcta

SEQ ID NO: 958224 - DNA, 15 bp, Homo sapiens
ctccatcatttctat

SEQ ID NO: 958225 - DNA, 15 bp, Homo sapiens
tccatcatttctata

SEQ ID NO: 958226 - DNA, 15 bp, Homo sapiens
ccatcatttctatat

SEQ ID NO: 958227 - DNA, 15 bp, Homo sapiens
catcatttctatata

SEQ ID NO: 958228 - DNA, 15 bp, Homo sapiens
atcatttctatatat

SEQ ID NO: 958229 - DNA, 15 bp, Homo sapiens
tcatttctatatatt

SEQ ID NO: 958230 - DNA, 15 bp, Homo sapiens
catttctatatattt

SEQ ID NO: 958231 - DNA, 15 bp, Homo sapiens
atttctatatatttt

SEQ ID NO: 958232 - DNA, 15 bp, Homo sapiens
tttctatatattttg

SEQ ID NO: 958233 - DNA, 15 bp, Homo sapiens
ttctatatattttgg

SEQ ID NO: 958234 - DNA, 15 bp, Homo sapiens
tctatatattttggg

SEQ ID NO: 958235 - DNA, 15 bp, Homo sapiens
ctatatattttgggg

SEQ ID NO: 958236 - DNA, 15 bp, Homo sapiens
tatatattttgggga

SEQ ID NO: 958237 - DNA, 15 bp, Homo sapiens
atatattttggggat

SEQ ID NO: 958238 - DNA, 15 bp, Homo sapiens
tatattttggggatt

SEQ ID NO: 958239 - DNA, 15 bp, Homo sapiens
atattttggggattt

SEQ ID NO: 958240 - DNA, 15 bp, Homo sapiens
tattttggggatttt

SEQ ID NO: 958241 - DNA, 15 bp, Homo sapiens
attttggggattttt

SEQ ID NO: 958242 - DNA, 15 bp, Homo sapiens
ttttggggatttttg

SEQ ID NO: 958243 - DNA, 15 bp, Homo sapiens
tttggggatttttgt

SEQ ID NO: 958244 - DNA, 15 bp, Homo sapiens
ttggggatttttgtt

SEQ ID NO: 958245 - DNA, 15 bp, Homo sapiens
tggggatttttgttt

SEQ ID NO: 958246 - DNA, 15 bp, Homo sapiens
ggggatttttgtttt

SEQ ID NO: 958247 - DNA, 15 bp, Homo sapiens
gggatttttgttttg

SEQ ID NO: 958248 - DNA, 15 bp, Homo sapiens
ggatttttgttttgt

SEQ ID NO: 958249 - DNA, 15 bp, Homo sapiens
gatttttgttttgtt

SEQ ID NO: 958250 - DNA, 15 bp, Homo sapiens
atttttgttttgttt

SEQ ID NO: 958251 - DNA, 15 bp, Homo sapiens
tttgttttgttttgt

SEQ ID NO: 958252 - DNA, 15 bp, Homo sapiens
ttgttttgttttgtt

SEQ ID NO: 958253 - DNA, 15 bp, Homo sapiens
tgttttgttttgttt

SEQ ID NO: 958254 - DNA, 15 bp, Homo sapiens
gttttgttttgtttt

SEQ ID NO: 958255 - DNA, 15 bp, Homo sapiens
ttttgttttgttttt

SEQ ID NO: 958256 - DNA, 15 bp, Homo sapiens
tttgttttgtttttt

SEQ ID NO: 958257 - DNA, 15 bp, Homo sapiens
ttgttttgtttttta

SEQ ID NO: 958258 - DNA, 15 bp, Homo sapiens
tgttttgttttttaa

SEQ ID NO: 958259 - DNA, 15 bp, Homo sapiens
gttttgttttttaaa

SEQ ID NO: 958260 - DNA, 15 bp, Homo sapiens
ttttgttttttaaaa

SEQ ID NO: 958261 - DNA, 15 bp, Homo sapiens
tttgttttttaaaaa

SEQ ID NO: 958262 - DNA, 15 bp, Homo sapiens
ttgttttttaaaaaa

SEQ ID NO: 958263 - DNA, 15 bp, Homo sapiens
tgttttttaaaaaaa

SEQ ID NO: 958264 - DNA, 15 bp, Homo sapiens
gttttttaaaaaaag

SEQ ID NO: 958265 - DNA, 15 bp, Homo sapiens
ttttttaaaaaaaga

SEQ ID NO: 958266 - DNA, 15 bp, Homo sapiens
tttttaaaaaaagat

SEQ ID NO: 958267 - DNA, 15 bp, Homo sapiens
ttttaaaaaaagata

SEQ ID NO: 958268 - DNA, 15 bp, Homo sapiens
tttaaaaaaagatac

SEQ ID NO: 958269 - DNA, 15 bp, Homo sapiens
ttaaaaaaagataca

SEQ ID NO: 958270 - DNA, 15 bp, Homo sapiens
taaaaaaagatacaa

SEQ ID NO: 958271 - DNA, 15 bp, Homo sapiens
aaaaaaagatacaaa

SEQ ID NO: 958272 - DNA, 15 bp, Homo sapiens
aaaaaagatacaaac

SEQ ID NO: 958273 - DNA, 15 bp, Homo sapiens
aaaaagatacaaaca

SEQ ID NO: 958274 - DNA, 15 bp, Homo sapiens
aaaagatacaaacaa

SEQ ID NO: 958275 - DNA, 15 bp, Homo sapiens
aaagatacaaacaat

SEQ ID NO: 958276 - DNA, 15 bp, Homo sapiens
aagatacaaacaatc

SEQ ID NO: 958277 - DNA, 15 bp, Homo sapiens
agatacaaacaatct

SEQ ID NO: 958278 - DNA, 15 bp, Homo sapiens
gatacaaacaatctt

SEQ ID NO: 958279 - DNA, 15 bp, Homo sapiens
atacaaacaatcttc

SEQ ID NO: 958280 - DNA, 15 bp, Homo sapiens
tacaaacaatcttca

SEQ ID NO: 958281 - DNA, 15 bp, Homo sapiens
acaaacaatcttcaa

SEQ ID NO: 958282 - DNA, 15 bp, Homo sapiens
caaacaatcttcaaa

SEQ ID NO: 958283 - DNA, 15 bp, Homo sapiens
aaacaatcttcaaag

SEQ ID NO: 958284 - DNA, 15 bp, Homo sapiens
aacaatcttcaaagt

SEQ ID NO: 958285 - DNA, 15 bp, Homo sapiens
acaatcttcaaagtt

SEQ ID NO: 958286 - DNA, 15 bp, Homo sapiens
caatcttcaaagttt

SEQ ID NO: 958287 - DNA, 15 bp, Homo sapiens
aatcttcaaagttta

SEQ ID NO: 958288 - DNA, 15 bp, Homo sapiens
atcttcaaagtttac

SEQ ID NO: 958289 - DNA, 15 bp, Homo sapiens
tcttcaaagtttacc

SEQ ID NO: 958290 - DNA, 15 bp, Homo sapiens
cttcaaagtttacct

SEQ ID NO: 958291 - DNA, 15 bp, Homo sapiens
ttcaaagtttacctt

SEQ ID NO: 958292 - DNA, 15 bp, Homo sapiens
tcaaagtttaccttt

SEQ ID NO: 958293 - DNA, 15 bp, Homo sapiens
caaagtttacctttt

SEQ ID NO: 958294 - DNA, 15 bp, Homo sapiens
aaagtttaccttttt

SEQ ID NO: 958295 - DNA, 15 bp, Homo sapiens
aagtttacctttttg

SEQ ID NO: 958296 - DNA, 15 bp, Homo sapiens
agtttacctttttgg

SEQ ID NO: 958297 - DNA, 15 bp, Homo sapiens
gtttacctttttgga

SEQ ID NO: 958298 - DNA, 15 bp, Homo sapiens
tttacctttttggac

SEQ ID NO: 958299 - DNA, 15 bp, Homo sapiens
ttacctttttggact

SEQ ID NO: 958300 - DNA, 15 bp, Homo sapiens
tacctttttggactt

SEQ ID NO: 958301 - DNA, 15 bp, Homo sapiens
acctttttggactta

SEQ ID NO: 958302 - DNA, 15 bp, Homo sapiens
cctttttggacttaa

SEQ ID NO: 958303 - DNA, 15 bp, Homo sapiens
ctttttggacttaag

SEQ ID NO: 958304 - DNA, 15 bp, Homo sapiens
tttttggacttaagg

SEQ ID NO: 958305 - DNA, 15 bp, Homo sapiens
ttttggacttaaggc

SEQ ID NO: 958306 - DNA, 15 bp, Homo sapiens
tttggacttaaggca

SEQ ID NO: 958307 - DNA, 15 bp, Homo sapiens
ttggacttaaggcat

SEQ ID NO: 958308 - DNA, 15 bp, Homo sapiens
tggacttaaggcata

SEQ ID NO: 958309 - DNA, 15 bp, Homo sapiens
ggacttaaggcataa

SEQ ID NO: 958310 - DNA, 15 bp, Homo sapiens
gacttaaggcataac

SEQ ID NO: 958311 - DNA, 15 bp, Homo sapiens
acttaaggcataaca

SEQ ID NO: 958312 - DNA, 15 bp, Homo sapiens
cttaaggcataacat

SEQ ID NO: 958313 - DNA, 15 bp, Homo sapiens
ttaaggcataacatg

SEQ ID NO: 958314 - DNA, 15 bp, Homo sapiens
taaggcataacatga

SEQ ID NO: 958315 - DNA, 15 bp, Homo sapiens
aaggcataacatgaa

SEQ ID NO: 958316 - DNA, 15 bp, Homo sapiens
aggcataacatgaaa

SEQ ID NO: 958317 - DNA, 15 bp, Homo sapiens
ggcataacatgaaat

SEQ ID NO: 958318 - DNA, 15 bp, Homo sapiens
gcataacatgaaatt

SEQ ID NO: 958319 - DNA, 15 bp, Homo sapiens
cataacatgaaattg

SEQ ID NO: 958320 - DNA, 15 bp, Homo sapiens
ataacatgaaattgc

SEQ ID NO: 958321 - DNA, 15 bp, Homo sapiens
taacatgaaattgcg

SEQ ID NO: 958322 - DNA, 15 bp, Homo sapiens
aacatgaaattgcgc

SEQ ID NO: 958323 - DNA, 15 bp, Homo sapiens
acatgaaattgcgca

SEQ ID NO: 958324 - DNA, 15 bp, Homo sapiens
catgaaattgcgcat

SEQ ID NO: 958325 - DNA, 15 bp, Homo sapiens
atgaaattgcgcatt

SEQ ID NO: 958326 - DNA, 15 bp, Homo sapiens
tgaaattgcgcatta

SEQ ID NO: 958327 - DNA, 15 bp, Homo sapiens
gaaattgcgcattat

SEQ ID NO: 958328 - DNA, 15 bp, Homo sapiens
aaattgcgcattatt

SEQ ID NO: 958329 - DNA, 15 bp, Homo sapiens
aattgcgcattattc

SEQ ID NO: 958330 - DNA, 15 bp, Homo sapiens
attgcgcattattct

SEQ ID NO: 958331 - DNA, 15 bp, Homo sapiens
ttgcgcattattcta

SEQ ID NO: 958332 - DNA, 15 bp, Homo sapiens
tgcgcattattctaa

SEQ ID NO: 958333 - DNA, 15 bp, Homo sapiens
gcgcattattctaaa

SEQ ID NO: 958334 - DNA, 15 bp, Homo sapiens
cgcattattctaaag

SEQ ID NO: 958335 - DNA, 15 bp, Homo sapiens
gcattattctaaagc

SEQ ID NO: 958336 - DNA, 15 bp, Homo sapiens
cattattctaaagct

SEQ ID NO: 958337 - DNA, 15 bp, Homo sapiens
attattctaaagctt

SEQ ID NO: 958338 - DNA, 15 bp, Homo sapiens
ttattctaaagctta

SEQ ID NO: 958339 - DNA, 15 bp, Homo sapiens
tattctaaagcttaa

SEQ ID NO: 958340 - DNA, 15 bp, Homo sapiens
attctaaagcttaat

SEQ ID NO: 958341 - DNA, 15 bp, Homo sapiens
ttctaaagcttaatt

SEQ ID NO: 958342 - DNA, 15 bp, Homo sapiens
tctaaagcttaattt

SEQ ID NO: 958343 - DNA, 15 bp, Homo sapiens
ctaaagcttaatttt

SEQ ID NO: 958344 - DNA, 15 bp, Homo sapiens
taaagcttaattttg

SEQ ID NO: 958345 - DNA, 15 bp, Homo sapiens
aaagcttaattttga

SEQ ID NO: 958346 - DNA, 15 bp, Homo sapiens
aagcttaattttgaa

SEQ ID NO: 958347 - DNA, 15 bp, Homo sapiens
agcttaattttgaaa

SEQ ID NO: 958348 - DNA, 15 bp, Homo sapiens
gcttaattttgaaat

SEQ ID NO: 958349 - DNA, 15 bp, Homo sapiens
cttaattttgaaatg

SEQ ID NO: 958350 - DNA, 15 bp, Homo sapiens
ttaattttgaaatga

SEQ ID NO: 958351 - DNA, 15 bp, Homo sapiens
taattttgaaatgaa

SEQ ID NO: 958352 - DNA, 15 bp, Homo sapiens
aattttgaaatgaac

SEQ ID NO: 958353 - DNA, 15 bp, Homo sapiens
attttgaaatgaact

SEQ ID NO: 958354 - DNA, 15 bp, Homo sapiens
ttttgaaatgaacta

SEQ ID NO: 958355 - DNA, 15 bp, Homo sapiens
tttgaaatgaactag

SEQ ID NO: 958356 - DNA, 15 bp, Homo sapiens
ttgaaatgaactagt

SEQ ID NO: 958357 - DNA, 15 bp, Homo sapiens
tgaaatgaactagtt

SEQ ID NO: 958358 - DNA, 15 bp, Homo sapiens
gaaatgaactagttt

SEQ ID NO: 958359 - DNA, 15 bp, Homo sapiens
aaatgaactagttta

SEQ ID NO: 958360 - DNA, 15 bp, Homo sapiens
aatgaactagtttaa

SEQ ID NO: 958361 - DNA, 15 bp, Homo sapiens
atgaactagtttaag

SEQ ID NO: 958362 - DNA, 15 bp, Homo sapiens
tgaactagtttaagt

SEQ ID NO: 958363 - DNA, 15 bp, Homo sapiens
gaactagtttaagtg

SEQ ID NO: 958364 - DNA, 15 bp, Homo sapiens
aactagtttaagtgc

SEQ ID NO: 958365 - DNA, 15 bp, Homo sapiens
actagtttaagtgct

SEQ ID NO: 958366 - DNA, 15 bp, Homo sapiens
ctagtttaagtgcta

SEQ ID NO: 958367 - DNA, 15 bp, Homo sapiens
tagtttaagtgctat

SEQ ID NO: 958368 - DNA, 15 bp, Homo sapiens
agtttaagtgctatc

SEQ ID NO: 958369 - DNA, 15 bp, Homo sapiens
gtttaagtgctatca

SEQ ID NO: 958370 - DNA, 15 bp, Homo sapiens
tttaagtgctatcaa

SEQ ID NO: 958371 - DNA, 15 bp, Homo sapiens
ttaagtgctatcaaa

SEQ ID NO: 958372 - DNA, 15 bp, Homo sapiens
taagtgctatcaaac

SEQ ID NO: 958373 - DNA, 15 bp, Homo sapiens
aagtgctatcaaacc

SEQ ID NO: 958374 - DNA, 15 bp, Homo sapiens
agtgctatcaaaccc

SEQ ID NO: 958375 - DNA, 15 bp, Homo sapiens
gtgctatcaaaccct

SEQ ID NO: 958376 - DNA, 15 bp, Homo sapiens
tgctatcaaaccctg

SEQ ID NO: 958377 - DNA, 15 bp, Homo sapiens
gctatcaaaccctgt

SEQ ID NO: 958378 - DNA, 15 bp, Homo sapiens
ctatcaaaccctgtt

SEQ ID NO: 958379 - DNA, 15 bp, Homo sapiens
tatcaaaccctgttt

SEQ ID NO: 958380 - DNA, 15 bp, Homo sapiens
atcaaaccctgtttg

SEQ ID NO: 958381 - DNA, 15 bp, Homo sapiens
tcaaaccctgtttgc

SEQ ID NO: 958382 - DNA, 15 bp, Homo sapiens
caaaccctgtttgcg

SEQ ID NO: 958383 - DNA, 15 bp, Homo sapiens
aaaccctgtttgcgt

SEQ ID NO: 958384 - DNA, 15 bp, Homo sapiens
aaccctgtttgcgtt

SEQ ID NO: 958385 - DNA, 15 bp, Homo sapiens
accctgtttgcgttt

SEQ ID NO: 958386 - DNA, 15 bp, Homo sapiens
ccctgtttgcgttta

SEQ ID NO: 958387 - DNA, 15 bp, Homo sapiens
cctgtttgcgtttac

SEQ ID NO: 958388 - DNA, 15 bp, Homo sapiens
ctgtttgcgtttaca

SEQ ID NO: 958389 - DNA, 15 bp, Homo sapiens
tgtttgcgtttacat

SEQ ID NO: 958390 - DNA, 15 bp, Homo sapiens
gtttgcgtttacatt

SEQ ID NO: 958391 - DNA, 15 bp, Homo sapiens
tttgcgtttacatta

SEQ ID NO: 958392 - DNA, 15 bp, Homo sapiens
ttgcgtttacattat

SEQ ID NO: 958393 - DNA, 15 bp, Homo sapiens
tgcgtttacattatt

SEQ ID NO: 958394 - DNA, 15 bp, Homo sapiens
gcgtttacattattt

SEQ ID NO: 958395 - DNA, 15 bp, Homo sapiens
cgtttacattattta

SEQ ID NO: 958396 - DNA, 15 bp, Homo sapiens
gtttacattatttaa

SEQ ID NO: 958397 - DNA, 15 bp, Homo sapiens
tttacattatttaaa

SEQ ID NO: 958398 - DNA, 15 bp, Homo sapiens
ttacattatttaaat

SEQ ID NO: 958399 - DNA, 15 bp, Homo sapiens
tacattatttaaatt

SEQ ID NO: 958400 - DNA, 15 bp, Homo sapiens
acattatttaaatta

SEQ ID NO: 958401 - DNA, 15 bp, Homo sapiens
cattatttaaattat

SEQ ID NO: 958402 - DNA, 15 bp, Homo sapiens
attatttaaattata

SEQ ID NO: 958403 - DNA, 15 bp, Homo sapiens
ttatttaaattatat

SEQ ID NO: 958404 - DNA, 15 bp, Homo sapiens
tatttaaattatata

SEQ ID NO: 958405 - DNA, 15 bp, Homo sapiens
atttaaattatatag

SEQ ID NO: 958406 - DNA, 15 bp, Homo sapiens
tttaaattatatagt

SEQ ID NO: 958407 - DNA, 15 bp, Homo sapiens
ttaaattatatagta

SEQ ID NO: 958408 - DNA, 15 bp, Homo sapiens
taaattatatagtat

SEQ ID NO: 958409 - DNA, 15 bp, Homo sapiens
aaattatatagtatt

SEQ ID NO: 958410 - DNA, 15 bp, Homo sapiens
aattatatagtattt

SEQ ID NO: 958411 - DNA, 15 bp, Homo sapiens
attatatagtatttt

SEQ ID NO: 958412 - DNA, 15 bp, Homo sapiens
ttatatagtatttta

SEQ ID NO: 958413 - DNA, 15 bp, Homo sapiens
tatatagtattttat

SEQ ID NO: 958414 - DNA, 15 bp, Homo sapiens
atatagtattttatt

SEQ ID NO: 958415 - DNA, 15 bp, Homo sapiens
tatagtattttattt

SEQ ID NO: 958416 - DNA, 15 bp, Homo sapiens
atagtattttatttc

SEQ ID NO: 958417 - DNA, 15 bp, Homo sapiens
tagtattttatttct

SEQ ID NO: 958418 - DNA, 15 bp, Homo sapiens
agtattttatttctg

SEQ ID NO: 958419 - DNA, 15 bp, Homo sapiens
gtattttatttctgt

SEQ ID NO: 958420 - DNA, 15 bp, Homo sapiens
tattttatttctgtt

SEQ ID NO: 958421 - DNA, 15 bp, Homo sapiens
attttatttctgttc

SEQ ID NO: 958422 - DNA, 15 bp, Homo sapiens
ttttatttctgttct

SEQ ID NO: 958423 - DNA, 15 bp, Homo sapiens
tttatttctgttctt

SEQ ID NO: 958424 - DNA, 15 bp, Homo sapiens
ttatttctgttcttg

SEQ ID NO: 958425 - DNA, 15 bp, Homo sapiens
tatttctgttcttgc

SEQ ID NO: 958426 - DNA, 15 bp, Homo sapiens
atttctgttcttgct

SEQ ID NO: 958427 - DNA, 15 bp, Homo sapiens
tttctgttcttgctg

SEQ ID NO: 958428 - DNA, 15 bp, Homo sapiens
ttctgttcttgctgt

SEQ ID NO: 958429 - DNA, 15 bp, Homo sapiens
tctgttcttgctgta

SEQ ID NO: 958430 - DNA, 15 bp, Homo sapiens
ctgttcttgctgtaa

SEQ ID NO: 958431 - DNA, 15 bp, Homo sapiens
tgttcttgctgtaaa

SEQ ID NO: 958432 - DNA, 15 bp, Homo sapiens
gttcttgctgtaaat

SEQ ID NO: 958433 - DNA, 15 bp, Homo sapiens
ttcttgctgtaaatt

SEQ ID NO: 958434 - DNA, 15 bp, Homo sapiens
tcttgctgtaaattc

SEQ ID NO: 958435 - DNA, 15 bp, Homo sapiens
cttgctgtaaattct

SEQ ID NO: 958436 - DNA, 15 bp, Homo sapiens
ttgctgtaaattcta

SEQ ID NO: 958437 - DNA, 15 bp, Homo sapiens
tgctgtaaattctaa

SEQ ID NO: 958438 - DNA, 15 bp, Homo sapiens
gctgtaaattctaat

SEQ ID NO: 958439 - DNA, 15 bp, Homo sapiens
ctgtaaattctaatg

SEQ ID NO: 958440 - DNA, 15 bp, Homo sapiens
tgtaaattctaatgc

SEQ ID NO: 958441 - DNA, 15 bp, Homo sapiens
gtaaattctaatgct

SEQ ID NO: 958442 - DNA, 15 bp, Homo sapiens
taaattctaatgctg

SEQ ID NO: 958443 - DNA, 15 bp, Homo sapiens
aaattctaatgctgt

SEQ ID NO: 958444 - DNA, 15 bp, Homo sapiens
aattctaatgctgtt

SEQ ID NO: 958445 - DNA, 15 bp, Homo sapiens
attctaatgctgttc

SEQ ID NO: 958446 - DNA, 15 bp, Homo sapiens
ttctaatgctgttca

SEQ ID NO: 958447 - DNA, 15 bp, Homo sapiens
tctaatgctgttcat

SEQ ID NO: 958448 - DNA, 15 bp, Homo sapiens
ctaatgctgttcatg

SEQ ID NO: 958449 - DNA, 15 bp, Homo sapiens
taatgctgttcatgg

SEQ ID NO: 958450 - DNA, 15 bp, Homo sapiens
aatgctgttcatgga

SEQ ID NO: 958451 - DNA, 15 bp, Homo sapiens
atgctgttcatggat

SEQ ID NO: 958452 - DNA, 15 bp, Homo sapiens
tgctgttcatggatt

SEQ ID NO: 958453 - DNA, 15 bp, Homo sapiens
gctgttcatggattg

SEQ ID NO: 958454 - DNA, 15 bp, Homo sapiens
ctgttcatggattgt

SEQ ID NO: 958455 - DNA, 15 bp, Homo sapiens
tgttcatggattgtg

SEQ ID NO: 958456 - DNA, 15 bp, Homo sapiens
gttcatggattgtgc

SEQ ID NO: 958457 - DNA, 15 bp, Homo sapiens
ttcatggattgtgca

SEQ ID NO: 958458 - DNA, 15 bp, Homo sapiens
tcatggattgtgcaa

SEQ ID NO: 958459 - DNA, 15 bp, Homo sapiens
catggattgtgcaat

SEQ ID NO: 958460 - DNA, 15 bp, Homo sapiens
atggattgtgcaatt

SEQ ID NO: 958461 - DNA, 15 bp, Homo sapiens
tggattgtgcaattc

SEQ ID NO: 958462 - DNA, 15 bp, Homo sapiens
ggattgtgcaattcc

SEQ ID NO: 958463 - DNA, 15 bp, Homo sapiens
gattgtgcaattcct

SEQ ID NO: 958464 - DNA, 15 bp, Homo sapiens
attgtgcaattccta

SEQ ID NO: 958465 - DNA, 15 bp, Homo sapiens
ttgtgcaattcctat

SEQ ID NO: 958466 - DNA, 15 bp, Homo sapiens
tgtgcaattcctatg

SEQ ID NO: 958467 - DNA, 15 bp, Homo sapiens
gtgcaattcctatgc

SEQ ID NO: 958468 - DNA, 15 bp, Homo sapiens
tgcaattcctatgca

SEQ ID NO: 958469 - DNA, 15 bp, Homo sapiens
gcaattcctatgcaa

SEQ ID NO: 958470 - DNA, 15 bp, Homo sapiens
caattcctatgcaat

SEQ ID NO: 958471 - DNA, 15 bp, Homo sapiens
aattcctatgcaatc

SEQ ID NO: 958472 - DNA, 15 bp, Homo sapiens
attcctatgcaatcg

SEQ ID NO: 958473 - DNA, 15 bp, Homo sapiens
ttcctatgcaatcgg

SEQ ID NO: 958474 - DNA, 15 bp, Homo sapiens
tcctatgcaatcggt

SEQ ID NO: 958475 - DNA, 15 bp, Homo sapiens
cctatgcaatcggtc

SEQ ID NO: 958476 - DNA, 15 bp, Homo sapiens
ctatgcaatcggtct

SEQ ID NO: 958477 - DNA, 15 bp, Homo sapiens
tatgcaatcggtctt

SEQ ID NO: 958478 - DNA, 15 bp, Homo sapiens
atgcaatcggtcttt

SEQ ID NO: 958479 - DNA, 15 bp, Homo sapiens
tgcaatcggtctttg

SEQ ID NO: 958480 - DNA, 15 bp, Homo sapiens
gcaatcggtctttgc

SEQ ID NO: 958481 - DNA, 15 bp, Homo sapiens
caatcggtctttgcc

SEQ ID NO: 958482 - DNA, 15 bp, Homo sapiens
aatcggtctttgcct

SEQ ID NO: 958483 - DNA, 15 bp, Homo sapiens
atcggtctttgcctg

SEQ ID NO: 958484 - DNA, 15 bp, Homo sapiens
tcggtctttgcctgc

SEQ ID NO: 958485 - DNA, 15 bp, Homo sapiens
cggtctttgcctgct

SEQ ID NO: 958486 - DNA, 15 bp, Homo sapiens
ggtctttgcctgctg

SEQ ID NO: 958487 - DNA, 15 bp, Homo sapiens
gtctttgcctgctga

SEQ ID NO: 958488 - DNA, 15 bp, Homo sapiens
tctttgcctgctgag

SEQ ID NO: 958489 - DNA, 15 bp, Homo sapiens
ctttgcctgctgaga

SEQ ID NO: 958490 - DNA, 15 bp, Homo sapiens
tttgcctgctgagag

SEQ ID NO: 958491 - DNA, 15 bp, Homo sapiens
ttgcctgctgagagt

SEQ ID NO: 958492 - DNA, 15 bp, Homo sapiens
tgcctgctgagagtt

SEQ ID NO: 958493 - DNA, 15 bp, Homo sapiens
gcctgctgagagtta

SEQ ID NO: 958494 - DNA, 15 bp, Homo sapiens
cctgctgagagttat

SEQ ID NO: 958495 - DNA, 15 bp, Homo sapiens
ctgctgagagttatt

SEQ ID NO: 958496 - DNA, 15 bp, Homo sapiens
tgctgagagttatta

SEQ ID NO: 958497 - DNA, 15 bp, Homo sapiens
gctgagagttattaa

SEQ ID NO: 958498 - DNA, 15 bp, Homo sapiens
ctgagagttattaac

SEQ ID NO: 958499 - DNA, 15 bp, Homo sapiens
tgagagttattaaca

SEQ ID NO: 958500 - DNA, 15 bp, Homo sapiens
gagagttattaacag

SEQ ID NO: 958501 - DNA, 15 bp, Homo sapiens
agagttattaacagt

SEQ ID NO: 958502 - DNA, 15 bp, Homo sapiens
gagttattaacagtg

SEQ ID NO: 958503 - DNA, 15 bp, Homo sapiens
agttattaacagtgc

SEQ ID NO: 958504 - DNA, 15 bp, Homo sapiens
gttattaacagtgca

SEQ ID NO: 958505 - DNA, 15 bp, Homo sapiens
ttattaacagtgcag

SEQ ID NO: 958506 - DNA, 15 bp, Homo sapiens
tattaacagtgcagt

SEQ ID NO: 958507 - DNA, 15 bp, Homo sapiens
attaacagtgcagtg

SEQ ID NO: 958508 - DNA, 15 bp, Homo sapiens
ttaacagtgcagtgt

SEQ ID NO: 958509 - DNA, 15 bp, Homo sapiens
taacagtgcagtgtg

SEQ ID NO: 958510 - DNA, 15 bp, Homo sapiens
aacagtgcagtgtgg

SEQ ID NO: 958511 - DNA, 15 bp, Homo sapiens
acagtgcagtgtgga

SEQ ID NO: 958512 - DNA, 15 bp, Homo sapiens
cagtgcagtgtggaa

SEQ ID NO: 958513 - DNA, 15 bp, Homo sapiens
agtgcagtgtggaat

SEQ ID NO: 958514 - DNA, 15 bp, Homo sapiens
gtgcagtgtggaatc

SEQ ID NO: 958515 - DNA, 15 bp, Homo sapiens
tgcagtgtggaatcc

SEQ ID NO: 958516 - DNA, 15 bp, Homo sapiens
gcagtgtggaatcca

SEQ ID NO: 958517 - DNA, 15 bp, Homo sapiens
cagtgtggaatccag

SEQ ID NO: 958518 - DNA, 15 bp, Homo sapiens
agtgtggaatccaga

SEQ ID NO: 958519 - DNA, 15 bp, Homo sapiens
gtgtggaatccagag

SEQ ID NO: 958520 - DNA, 15 bp, Homo sapiens
tgtggaatccagagt

SEQ ID NO: 958521 - DNA, 15 bp, Homo sapiens
gtggaatccagagtg

SEQ ID NO: 958522 - DNA, 15 bp, Homo sapiens
tggaatccagagtga

SEQ ID NO: 958523 - DNA, 15 bp, Homo sapiens
ggaatccagagtgag

SEQ ID NO: 958524 - DNA, 15 bp, Homo sapiens
gaatccagagtgagc

SEQ ID NO: 958525 - DNA, 15 bp, Homo sapiens
aatccagagtgagct

SEQ ID NO: 958526 - DNA, 15 bp, Homo sapiens
atccagagtgagctt

SEQ ID NO: 958527 - DNA, 15 bp, Homo sapiens
tccagagtgagcttt

SEQ ID NO: 958528 - DNA, 15 bp, Homo sapiens
ccagagtgagctttc

SEQ ID NO: 958529 - DNA, 15 bp, Homo sapiens
cagagtgagctttca

SEQ ID NO: 958530 - DNA, 15 bp, Homo sapiens
agagtgagctttcat

SEQ ID NO: 958531 - DNA, 15 bp, Homo sapiens
gagtgagctttcatt

SEQ ID NO: 958532 - DNA, 15 bp, Homo sapiens
agtgagctttcattt

SEQ ID NO: 958533 - DNA, 15 bp, Homo sapiens
gtgagctttcatttt

SEQ ID NO: 958534 - DNA, 15 bp, Homo sapiens
tgagctttcattttc

SEQ ID NO: 958535 - DNA, 15 bp, Homo sapiens
gagctttcattttct

SEQ ID NO: 958536 - DNA, 15 bp, Homo sapiens
agctttcattttctc

SEQ ID NO: 958537 - DNA, 15 bp, Homo sapiens
gctttcattttctca

SEQ ID NO: 958538 - DNA, 15 bp, Homo sapiens
ctttcattttctcag

SEQ ID NO: 958539 - DNA, 15 bp, Homo sapiens
tttcattttctcagt

SEQ ID NO: 958540 - DNA, 15 bp, Homo sapiens
ttcattttctcagtt

SEQ ID NO: 958541 - DNA, 15 bp, Homo sapiens
tcattttctcagtta

SEQ ID NO: 958542 - DNA, 15 bp, Homo sapiens
cattttctcagttat

SEQ ID NO: 958543 - DNA, 15 bp, Homo sapiens
attttctcagttatc

SEQ ID NO: 958544 - DNA, 15 bp, Homo sapiens
ttttctcagttatct

SEQ ID NO: 958545 - DNA, 15 bp, Homo sapiens
tttctcagttatctt

SEQ ID NO: 958546 - DNA, 15 bp, Homo sapiens
ttctcagttatcttt

SEQ ID NO: 958547 - DNA, 15 bp, Homo sapiens
tctcagttatctttt

SEQ ID NO: 958548 - DNA, 15 bp, Homo sapiens
ctcagttatcttttc

SEQ ID NO: 958549 - DNA, 15 bp, Homo sapiens
tcagttatcttttca

SEQ ID NO: 958550 - DNA, 15 bp, Homo sapiens
cagttatcttttcag

SEQ ID NO: 958551 - DNA, 15 bp, Homo sapiens
agttatcttttcagt

SEQ ID NO: 958552 - DNA, 15 bp, Homo sapiens
gttatcttttcagtt

SEQ ID NO: 958553 - DNA, 15 bp, Homo sapiens
ttatcttttcagttc

SEQ ID NO: 958554 - DNA, 15 bp, Homo sapiens
tatcttttcagttca

SEQ ID NO: 958555 - DNA, 15 bp, Homo sapiens
atcttttcagttcaa

SEQ ID NO: 958556 - DNA, 15 bp, Homo sapiens
tcttttcagttcaat

SEQ ID NO: 958557 - DNA, 15 bp, Homo sapiens
cttttcagttcaatg

SEQ ID NO: 958558 - DNA, 15 bp, Homo sapiens
ttttcagttcaatgc

SEQ ID NO: 958559 - DNA, 15 bp, Homo sapiens
tttcagttcaatgca

SEQ ID NO: 958560 - DNA, 15 bp, Homo sapiens
ttcagttcaatgcat

SEQ ID NO: 958561 - DNA, 15 bp, Homo sapiens
tcagttcaatgcatg

SEQ ID NO: 958562 - DNA, 15 bp, Homo sapiens
cagttcaatgcatgc

SEQ ID NO: 958563 - DNA, 15 bp, Homo sapiens
agttcaatgcatgct

SEQ ID NO: 958564 - DNA, 15 bp, Homo sapiens
gttcaatgcatgctg

SEQ ID NO: 958565 - DNA, 15 bp, Homo sapiens
ttcaatgcatgctgt

SEQ ID NO: 958566 - DNA, 15 bp, Homo sapiens
tcaatgcatgctgtt

SEQ ID NO: 958567 - DNA, 15 bp, Homo sapiens
caatgcatgctgttt

SEQ ID NO: 958568 - DNA, 15 bp, Homo sapiens
aatgcatgctgttta

SEQ ID NO: 958569 - DNA, 15 bp, Homo sapiens
atgcatgctgtttaa

SEQ ID NO: 958570 - DNA, 15 bp, Homo sapiens
tgcatgctgtttaat

SEQ ID NO: 958571 - DNA, 15 bp, Homo sapiens
gcatgctgtttaatt

SEQ ID NO: 958572 - DNA, 15 bp, Homo sapiens
catgctgtttaattg

SEQ ID NO: 958573 - DNA, 15 bp, Homo sapiens
atgctgtttaattgt

SEQ ID NO: 958574 - DNA, 15 bp, Homo sapiens
tgctgtttaattgtg

SEQ ID NO: 958575 - DNA, 15 bp, Homo sapiens
gctgtttaattgtgt

SEQ ID NO: 958576 - DNA, 15 bp, Homo sapiens
ctgtttaattgtgtg

SEQ ID NO: 958577 - DNA, 15 bp, Homo sapiens
tgtttaattgtgtgg

SEQ ID NO: 958578 - DNA, 15 bp, Homo sapiens
gtttaattgtgtgga

SEQ ID NO: 958579 - DNA, 15 bp, Homo sapiens
tttaattgtgtggaa

SEQ ID NO: 958580 - DNA, 15 bp, Homo sapiens
ttaattgtgtggaag

SEQ ID NO: 958581 - DNA, 15 bp, Homo sapiens
taattgtgtggaaga

SEQ ID NO: 958582 - DNA, 15 bp, Homo sapiens
aattgtgtggaagat

SEQ ID NO: 958583 - DNA, 15 bp, Homo sapiens
attgtgtggaagatc

SEQ ID NO: 958584 - DNA, 15 bp, Homo sapiens
ttgtgtggaagatcc

SEQ ID NO: 958585 - DNA, 15 bp, Homo sapiens
tgtgtggaagatcca

SEQ ID NO: 958586 - DNA, 15 bp, Homo sapiens
gtgtggaagatccaa

SEQ ID NO: 958587 - DNA, 15 bp, Homo sapiens
tgtggaagatccaat

SEQ ID NO: 958588 - DNA, 15 bp, Homo sapiens
gtggaagatccaatc

SEQ ID NO: 958589 - DNA, 15 bp, Homo sapiens
tggaagatccaatcc

SEQ ID NO: 958590 - DNA, 15 bp, Homo sapiens
ggaagatccaatcca

SEQ ID NO: 958591 - DNA, 15 bp, Homo sapiens
gaagatccaatccat

SEQ ID NO: 958592 - DNA, 15 bp, Homo sapiens
aagatccaatccatt

SEQ ID NO: 958593 - DNA, 15 bp, Homo sapiens
agatccaatccattt

SEQ ID NO: 958594 - DNA, 15 bp, Homo sapiens
gatccaatccatttt

SEQ ID NO: 958595 - DNA, 15 bp, Homo sapiens
atccaatccattttt

SEQ ID NO: 958596 - DNA, 15 bp, Homo sapiens
tccaatccatttttg

SEQ ID NO: 958597 - DNA, 15 bp, Homo sapiens
ccaatccatttttgt

SEQ ID NO: 958598 - DNA, 15 bp, Homo sapiens
caatccatttttgtt

SEQ ID NO: 958599 - DNA, 15 bp, Homo sapiens
aatccatttttgttg

SEQ ID NO: 958600 - DNA, 15 bp, Homo sapiens
atccatttttgttgt

SEQ ID NO: 958601 - DNA, 15 bp, Homo sapiens
tccatttttgttgtc

SEQ ID NO: 958602 - DNA, 15 bp, Homo sapiens
ccatttttgttgtcc

SEQ ID NO: 958603 - DNA, 15 bp, Homo sapiens
catttttgttgtcca

SEQ ID NO: 958604 - DNA, 15 bp, Homo sapiens
atttttgttgtccag

SEQ ID NO: 958605 - DNA, 15 bp, Homo sapiens
tttttgttgtccagc

SEQ ID NO: 958606 - DNA, 15 bp, Homo sapiens
ttttgttgtccagcc

SEQ ID NO: 958607 - DNA, 15 bp, Homo sapiens
tttgttgtccagcca

SEQ ID NO: 958608 - DNA, 15 bp, Homo sapiens
ttgttgtccagccac

SEQ ID NO: 958609 - DNA, 15 bp, Homo sapiens
tgttgtccagccacc

SEQ ID NO: 958610 - DNA, 15 bp, Homo sapiens
gttgtccagccacca

SEQ ID NO: 958611 - DNA, 15 bp, Homo sapiens
ttgtccagccaccat

SEQ ID NO: 958612 - DNA, 15 bp, Homo sapiens
tgtccagccaccatg

SEQ ID NO: 958613 - DNA, 15 bp, Homo sapiens
gtccagccaccatga

SEQ ID NO: 958614 - DNA, 15 bp, Homo sapiens
tccagccaccatgat

SEQ ID NO: 958615 - DNA, 15 bp, Homo sapiens
ccagccaccatgatg

SEQ ID NO: 958616 - DNA, 15 bp, Homo sapiens
cagccaccatgatgt

SEQ ID NO: 958617 - DNA, 15 bp, Homo sapiens
agccaccatgatgtg

SEQ ID NO: 958618 - DNA, 15 bp, Homo sapiens
gccaccatgatgtgc

SEQ ID NO: 958619 - DNA, 15 bp, Homo sapiens
ccaccatgatgtgca

SEQ ID NO: 958620 - DNA, 15 bp, Homo sapiens
caccatgatgtgcat

SEQ ID NO: 958621 - DNA, 15 bp, Homo sapiens
accatgatgtgcatc

SEQ ID NO: 958622 - DNA, 15 bp, Homo sapiens
ccatgatgtgcatca

SEQ ID NO: 958623 - DNA, 15 bp, Homo sapiens
catgatgtgcatcat

SEQ ID NO: 958624 - DNA, 15 bp, Homo sapiens
atgatgtgcatcatt

SEQ ID NO: 958625 - DNA, 15 bp, Homo sapiens
tgatgtgcatcattc

SEQ ID NO: 958626 - DNA, 15 bp, Homo sapiens
gatgtgcatcattca

SEQ ID NO: 958627 - DNA, 15 bp, Homo sapiens
atgtgcatcattcat

SEQ ID NO: 958628 - DNA, 15 bp, Homo sapiens
tgtgcatcattcatt

SEQ ID NO: 958629 - DNA, 15 bp, Homo sapiens
gtgcatcattcattt

SEQ ID NO: 958630 - DNA, 15 bp, Homo sapiens
tgcatcattcatttg

SEQ ID NO: 958631 - DNA, 15 bp, Homo sapiens
gcatcattcatttgt

SEQ ID NO: 958632 - DNA, 15 bp, Homo sapiens
catcattcatttgtt

SEQ ID NO: 958633 - DNA, 15 bp, Homo sapiens
atcattcatttgttt

SEQ ID NO: 958634 - DNA, 15 bp, Homo sapiens
tcattcatttgtttc

SEQ ID NO: 958635 - DNA, 15 bp, Homo sapiens
cattcatttgtttca

SEQ ID NO: 958636 - DNA, 15 bp, Homo sapiens
attcatttgtttcat

SEQ ID NO: 958637 - DNA, 15 bp, Homo sapiens
ttcatttgtttcatg

SEQ ID NO: 958638 - DNA, 15 bp, Homo sapiens
tcatttgtttcatga

SEQ ID NO: 958639 - DNA, 15 bp, Homo sapiens
catttgtttcatgaa

SEQ ID NO: 958640 - DNA, 15 bp, Homo sapiens
atttgtttcatgaaa

SEQ ID NO: 958641 - DNA, 15 bp, Homo sapiens
tttgtttcatgaaat

SEQ ID NO: 958642 - DNA, 15 bp, Homo sapiens
ttgtttcatgaaata

SEQ ID NO: 958643 - DNA, 15 bp, Homo sapiens
tgtttcatgaaatac

SEQ ID NO: 958644 - DNA, 15 bp, Homo sapiens
gtttcatgaaatact

SEQ ID NO: 958645 - DNA, 15 bp, Homo sapiens
tttcatgaaatactc

SEQ ID NO: 958646 - DNA, 15 bp, Homo sapiens
ttcatgaaatactcc

SEQ ID NO: 958647 - DNA, 15 bp, Homo sapiens
tcatgaaatactcca

SEQ ID NO: 958648 - DNA, 15 bp, Homo sapiens
catgaaatactccaa

SEQ ID NO: 958649 - DNA, 15 bp, Homo sapiens
atgaaatactccaaa

SEQ ID NO: 958650 - DNA, 15 bp, Homo sapiens
tgaaatactccaaag

SEQ ID NO: 958651 - DNA, 15 bp, Homo sapiens
gaaatactccaaagc

SEQ ID NO: 958652 - DNA, 15 bp, Homo sapiens
aaatactccaaagcc

SEQ ID NO: 958653 - DNA, 15 bp, Homo sapiens
aatactccaaagcct

SEQ ID NO: 958654 - DNA, 15 bp, Homo sapiens
atactccaaagcctc

SEQ ID NO: 958655 - DNA, 15 bp, Homo sapiens
tactccaaagcctct

SEQ ID NO: 958656 - DNA, 15 bp, Homo sapiens
actccaaagcctctt

SEQ ID NO: 958657 - DNA, 15 bp, Homo sapiens
ctccaaagcctcttg

SEQ ID NO: 958658 - DNA, 15 bp, Homo sapiens
tccaaagcctcttgc

SEQ ID NO: 958659 - DNA, 15 bp, Homo sapiens
ccaaagcctcttgct

SEQ ID NO: 958660 - DNA, 15 bp, Homo sapiens
caaagcctcttgctc

SEQ ID NO: 958661 - DNA, 15 bp, Homo sapiens
aaagcctcttgctca

SEQ ID NO: 958662 - DNA, 15 bp, Homo sapiens
aagcctcttgctcag

SEQ ID NO: 958663 - DNA, 15 bp, Homo sapiens
agcctcttgctcagt

SEQ ID NO: 958664 - DNA, 15 bp, Homo sapiens
gcctcttgctcagtt

SEQ ID NO: 958665 - DNA, 15 bp, Homo sapiens
cctcttgctcagttt

SEQ ID NO: 958666 - DNA, 15 bp, Homo sapiens
ctcttgctcagtttt

SEQ ID NO: 958667 - DNA, 15 bp, Homo sapiens
tcttgctcagtttta

SEQ ID NO: 958668 - DNA, 15 bp, Homo sapiens
cttgctcagttttat

SEQ ID NO: 958669 - DNA, 15 bp, Homo sapiens
ttgctcagttttatc

SEQ ID NO: 958670 - DNA, 15 bp, Homo sapiens
tgctcagttttatct

SEQ ID NO: 958671 - DNA, 15 bp, Homo sapiens
gctcagttttatcta

SEQ ID NO: 958672 - DNA, 15 bp, Homo sapiens
ctcagttttatctaa

SEQ ID NO: 958673 - DNA, 15 bp, Homo sapiens
tcagttttatctaag

SEQ ID NO: 958674 - DNA, 15 bp, Homo sapiens
cagttttatctaagg

SEQ ID NO: 958675 - DNA, 15 bp, Homo sapiens
agttttatctaaggc

SEQ ID NO: 958676 - DNA, 15 bp, Homo sapiens
gttttatctaaggct

SEQ ID NO: 958677 - DNA, 15 bp, Homo sapiens
ttttatctaaggcta

SEQ ID NO: 958678 - DNA, 15 bp, Homo sapiens
tttatctaaggctag

SEQ ID NO: 958679 - DNA, 15 bp, Homo sapiens
ttatctaaggctagg

SEQ ID NO: 958680 - DNA, 15 bp, Homo sapiens
tatctaaggctaggg

SEQ ID NO: 958681 - DNA, 15 bp, Homo sapiens
atctaaggctagggt

SEQ ID NO: 958682 - DNA, 15 bp, Homo sapiens
tctaaggctagggtc

SEQ ID NO: 958683 - DNA, 15 bp, Homo sapiens
ctaaggctagggtct

SEQ ID NO: 958684 - DNA, 15 bp, Homo sapiens
taaggctagggtctt

SEQ ID NO: 958685 - DNA, 15 bp, Homo sapiens
aaggctagggtcttt

SEQ ID NO: 958686 - DNA, 15 bp, Homo sapiens
aggctagggtctttc

SEQ ID NO: 958687 - DNA, 15 bp, Homo sapiens
ggctagggtctttcg

SEQ ID NO: 958688 - DNA, 15 bp, Homo sapiens
gctagggtctttcga

SEQ ID NO: 958689 - DNA, 15 bp, Homo sapiens
ctagggtctttcgaa

SEQ ID NO: 958690 - DNA, 15 bp, Homo sapiens
tagggtctttcgaat

SEQ ID NO: 958691 - DNA, 15 bp, Homo sapiens
agggtctttcgaatg

SEQ ID NO: 958692 - DNA, 15 bp, Homo sapiens
gggtctttcgaatgt

SEQ ID NO: 958693 - DNA, 15 bp, Homo sapiens
ggtctttcgaatgta

SEQ ID NO: 958694 - DNA, 15 bp, Homo sapiens
gtctttcgaatgtat

SEQ ID NO: 958695 - DNA, 15 bp, Homo sapiens
tctttcgaatgtatg

SEQ ID NO: 958696 - DNA, 15 bp, Homo sapiens
ctttcgaatgtatgc

SEQ ID NO: 958697 - DNA, 15 bp, Homo sapiens
tttcgaatgtatgca

SEQ ID NO: 958698 - DNA, 15 bp, Homo sapiens
ttcgaatgtatgcaa

SEQ ID NO: 958699 - DNA, 15 bp, Homo sapiens
tcgaatgtatgcaat

SEQ ID NO: 958700 - DNA, 15 bp, Homo sapiens
cgaatgtatgcaatg

SEQ ID NO: 958701 - DNA, 15 bp, Homo sapiens
gaatgtatgcaatgt

SEQ ID NO: 958702 - DNA, 15 bp, Homo sapiens
aatgtatgcaatgtc

SEQ ID NO: 958703 - DNA, 15 bp, Homo sapiens
atgtatgcaatgtca

SEQ ID NO: 958704 - DNA, 15 bp, Homo sapiens
tgtatgcaatgtcat

SEQ ID NO: 958705 - DNA, 15 bp, Homo sapiens
gtatgcaatgtcatc

SEQ ID NO: 958706 - DNA, 15 bp, Homo sapiens
tatgcaatgtcatca

SEQ ID NO: 958707 - DNA, 15 bp, Homo sapiens
atgcaatgtcatcaa

SEQ ID NO: 958708 - DNA, 15 bp, Homo sapiens
tgcaatgtcatcaaa

SEQ ID NO: 958709 - DNA, 15 bp, Homo sapiens
gcaatgtcatcaaaa

SEQ ID NO: 958710 - DNA, 15 bp, Homo sapiens
caatgtcatcaaaag

SEQ ID NO: 958711 - DNA, 15 bp, Homo sapiens
aatgtcatcaaaaga

SEQ ID NO: 958712 - DNA, 15 bp, Homo sapiens
atgtcatcaaaagat

SEQ ID NO: 958713 - DNA, 15 bp, Homo sapiens
tgtcatcaaaagatt

SEQ ID NO: 958714 - DNA, 15 bp, Homo sapiens
gtcatcaaaagattg

SEQ ID NO: 958715 - DNA, 15 bp, Homo sapiens
tcatcaaaagattgt

SEQ ID NO: 958716 - DNA, 15 bp, Homo sapiens
catcaaaagattgta

SEQ ID NO: 958717 - DNA, 15 bp, Homo sapiens
atcaaaagattgtag

SEQ ID NO: 958718 - DNA, 15 bp, Homo sapiens
tcaaaagattgtagt

SEQ ID NO: 958719 - DNA, 15 bp, Homo sapiens
caaaagattgtagtt

SEQ ID NO: 958720 - DNA, 15 bp, Homo sapiens
aaaagattgtagttc

SEQ ID NO: 958721 - DNA, 15 bp, Homo sapiens
aaagattgtagttct

SEQ ID NO: 958722 - DNA, 15 bp, Homo sapiens
aagattgtagttctg

SEQ ID NO: 958723 - DNA, 15 bp, Homo sapiens
agattgtagttctgg

SEQ ID NO: 958724 - DNA, 15 bp, Homo sapiens
gattgtagttctggc

SEQ ID NO: 958725 - DNA, 15 bp, Homo sapiens
attgtagttctggca

SEQ ID NO: 958726 - DNA, 15 bp, Homo sapiens
ttgtagttctggcat

SEQ ID NO: 958727 - DNA, 15 bp, Homo sapiens
tgtagttctggcatt

SEQ ID NO: 958728 - DNA, 15 bp, Homo sapiens
gtagttctggcattc

SEQ ID NO: 958729 - DNA, 15 bp, Homo sapiens
tagttctggcattcc

SEQ ID NO: 958730 - DNA, 15 bp, Homo sapiens
agttctggcattcca

SEQ ID NO: 958731 - DNA, 15 bp, Homo sapiens
gttctggcattccag

SEQ ID NO: 958732 - DNA, 15 bp, Homo sapiens
ttctggcattccaga

SEQ ID NO: 958733 - DNA, 15 bp, Homo sapiens
tctggcattccagag

SEQ ID NO: 958734 - DNA, 15 bp, Homo sapiens
ctggcattccagagc

SEQ ID NO: 958735 - DNA, 15 bp, Homo sapiens
tggcattccagagcc

SEQ ID NO: 958736 - DNA, 15 bp, Homo sapiens
ggcattccagagcca

SEQ ID NO: 958737 - DNA, 15 bp, Homo sapiens
gcattccagagccaa

SEQ ID NO: 958738 - DNA, 15 bp, Homo sapiens
cattccagagccaag

SEQ ID NO: 958739 - DNA, 15 bp, Homo sapiens
attccagagccaagc

SEQ ID NO: 958740 - DNA, 15 bp, Homo sapiens
ttccagagccaagca

SEQ ID NO: 958741 - DNA, 15 bp, Homo sapiens
tccagagccaagcat

SEQ ID NO: 958742 - DNA, 15 bp, Homo sapiens
ccagagccaagcatc

SEQ ID NO: 958743 - DNA, 15 bp, Homo sapiens
cagagccaagcatca

SEQ ID NO: 958744 - DNA, 15 bp, Homo sapiens
agagccaagcatcat

SEQ ID NO: 958745 - DNA, 15 bp, Homo sapiens
gagccaagcatcatt

SEQ ID NO: 958746 - DNA, 15 bp, Homo sapiens
agccaagcatcattg

SEQ ID NO: 958747 - DNA, 15 bp, Homo sapiens
gccaagcatcattga

SEQ ID NO: 958748 - DNA, 15 bp, Homo sapiens
ccaagcatcattgag

SEQ ID NO: 958749 - DNA, 15 bp, Homo sapiens
caagcatcattgaga

SEQ ID NO: 958750 - DNA, 15 bp, Homo sapiens
aagcatcattgagaa

SEQ ID NO: 958751 - DNA, 15 bp, Homo sapiens
agcatcattgagaaa

SEQ ID NO: 958752 - DNA, 15 bp, Homo sapiens
gcatcattgagaaaa

SEQ ID NO: 958753 - DNA, 15 bp, Homo sapiens
catcattgagaaaag

SEQ ID NO: 958754 - DNA, 15 bp, Homo sapiens
atcattgagaaaaga

SEQ ID NO: 958755 - DNA, 15 bp, Homo sapiens
tcattgagaaaagat

SEQ ID NO: 958756 - DNA, 15 bp, Homo sapiens
cattgagaaaagatt

SEQ ID NO: 958757 - DNA, 15 bp, Homo sapiens
attgagaaaagattt

SEQ ID NO: 958758 - DNA, 15 bp, Homo sapiens
ttgagaaaagattta

SEQ ID NO: 958759 - DNA, 15 bp, Homo sapiens
tgagaaaagatttat

SEQ ID NO: 958760 - DNA, 15 bp, Homo sapiens
gagaaaagatttatg

SEQ ID NO: 958761 - DNA, 15 bp, Homo sapiens
agaaaagatttatga

SEQ ID NO: 958762 - DNA, 15 bp, Homo sapiens
gaaaagatttatgaa

SEQ ID NO: 958763 - DNA, 15 bp, Homo sapiens
aaaagatttatgaag

SEQ ID NO: 958764 - DNA, 15 bp, Homo sapiens
aaagatttatgaaga

SEQ ID NO: 958765 - DNA, 15 bp, Homo sapiens
aagatttatgaagag

SEQ ID NO: 958766 - DNA, 15 bp, Homo sapiens
agatttatgaagaga

SEQ ID NO: 958767 - DNA, 15 bp, Homo sapiens
gatttatgaagagat

SEQ ID NO: 958768 - DNA, 15 bp, Homo sapiens
atttatgaagagatt

SEQ ID NO: 958769 - DNA, 15 bp, Homo sapiens
tttatgaagagattg

SEQ ID NO: 958770 - DNA, 15 bp, Homo sapiens
ttatgaagagattgg

SEQ ID NO: 958771 - DNA, 15 bp, Homo sapiens
tatgaagagattggc

SEQ ID NO: 958772 - DNA, 15 bp, Homo sapiens
atgaagagattggca

SEQ ID NO: 958773 - DNA, 15 bp, Homo sapiens
tgaagagattggcat

SEQ ID NO: 958774 - DNA, 15 bp, Homo sapiens
gaagagattggcatg

SEQ ID NO: 958775 - DNA, 15 bp, Homo sapiens
aagagattggcatgc

SEQ ID NO: 958776 - DNA, 15 bp, Homo sapiens
agagattggcatgct

SEQ ID NO: 958777 - DNA, 15 bp, Homo sapiens
gagattggcatgctg

SEQ ID NO: 958778 - DNA, 15 bp, Homo sapiens
agattggcatgctgt

SEQ ID NO: 958779 - DNA, 15 bp, Homo sapiens
gattggcatgctgtc

SEQ ID NO: 958780 - DNA, 15 bp, Homo sapiens
attggcatgctgtcg

SEQ ID NO: 958781 - DNA, 15 bp, Homo sapiens
ttggcatgctgtcga

SEQ ID NO: 958782 - DNA, 15 bp, Homo sapiens
tggcatgctgtcgaa

SEQ ID NO: 958783 - DNA, 15 bp, Homo sapiens
ggcatgctgtcgaat

SEQ ID NO: 958784 - DNA, 15 bp, Homo sapiens
gcatgctgtcgaata

SEQ ID NO: 958785 - DNA, 15 bp, Homo sapiens
catgctgtcgaatag

SEQ ID NO: 958786 - DNA, 15 bp, Homo sapiens
atgctgtcgaatagc

SEQ ID NO: 958787 - DNA, 15 bp, Homo sapiens
tgctgtcgaatagct

SEQ ID NO: 958788 - DNA, 15 bp, Homo sapiens
gctgtcgaatagcta

SEQ ID NO: 958789 - DNA, 15 bp, Homo sapiens
ctgtcgaatagctag

SEQ ID NO: 958790 - DNA, 15 bp, Homo sapiens
tgtcgaatagctaga

SEQ ID NO: 958791 - DNA, 15 bp, Homo sapiens
gtcgaatagctagat

SEQ ID NO: 958792 - DNA, 15 bp, Homo sapiens
tcgaatagctagata

SEQ ID NO: 958793 - DNA, 15 bp, Homo sapiens
cgaatagctagataa

SEQ ID NO: 958794 - DNA, 15 bp, Homo sapiens
gaatagctagataag

SEQ ID NO: 958795 - DNA, 15 bp, Homo sapiens
aatagctagataagc

SEQ ID NO: 958796 - DNA, 15 bp, Homo sapiens
atagctagataagcc

SEQ ID NO: 958797 - DNA, 15 bp, Homo sapiens
tagctagataagcct

SEQ ID NO: 958798 - DNA, 15 bp, Homo sapiens
agctagataagcctt

SEQ ID NO: 958799 - DNA, 15 bp, Homo sapiens
gctagataagccttg

SEQ ID NO: 958800 - DNA, 15 bp, Homo sapiens
ctagataagccttgt

SEQ ID NO: 958801 - DNA, 15 bp, Homo sapiens
tagataagccttgta

SEQ ID NO: 958802 - DNA, 15 bp, Homo sapiens
agataagccttgtaa

SEQ ID NO: 958803 - DNA, 15 bp, Homo sapiens
gataagccttgtaac

SEQ ID NO: 958804 - DNA, 15 bp, Homo sapiens
ataagccttgtaaca

SEQ ID NO: 958805 - DNA, 15 bp, Homo sapiens
taagccttgtaacac

SEQ ID NO: 958806 - DNA, 15 bp, Homo sapiens
aagccttgtaacaca

SEQ ID NO: 958807 - DNA, 15 bp, Homo sapiens
agccttgtaacacat

SEQ ID NO: 958808 - DNA, 15 bp, Homo sapiens
gccttgtaacacatc

SEQ ID NO: 958809 - DNA, 15 bp, Homo sapiens
ccttgtaacacatct

SEQ ID NO: 958810 - DNA, 15 bp, Homo sapiens
cttgtaacacatctc

SEQ ID NO: 958811 - DNA, 15 bp, Homo sapiens
ttgtaacacatctcc

SEQ ID NO: 958812 - DNA, 15 bp, Homo sapiens
tgtaacacatctcct

SEQ ID NO: 958813 - DNA, 15 bp, Homo sapiens
gtaacacatctcctg

SEQ ID NO: 958814 - DNA, 15 bp, Homo sapiens
taacacatctcctga

SEQ ID NO: 958815 - DNA, 15 bp, Homo sapiens
aacacatctcctgaa

SEQ ID NO: 958816 - DNA, 15 bp, Homo sapiens
acacatctcctgaaa

SEQ ID NO: 958817 - DNA, 15 bp, Homo sapiens
cacatctcctgaaac

SEQ ID NO: 958818 - DNA, 15 bp, Homo sapiens
acatctcctgaaacc

SEQ ID NO: 958819 - DNA, 15 bp, Homo sapiens
catctcctgaaacct

SEQ ID NO: 958820 - DNA, 15 bp, Homo sapiens
atctcctgaaaccta

SEQ ID NO: 958821 - DNA, 15 bp, Homo sapiens
tctcctgaaacctat

SEQ ID NO: 958822 - DNA, 15 bp, Homo sapiens
ctcctgaaacctata

SEQ ID NO: 958823 - DNA, 15 bp, Homo sapiens
tcctgaaacctataa

SEQ ID NO: 958824 - DNA, 15 bp, Homo sapiens
cctgaaacctataag

SEQ ID NO: 958825 - DNA, 15 bp, Homo sapiens
ctgaaacctataagt

SEQ ID NO: 958826 - DNA, 15 bp, Homo sapiens
tgaaacctataagta

SEQ ID NO: 958827 - DNA, 15 bp, Homo sapiens
gaaacctataagtaa

SEQ ID NO: 958828 - DNA, 15 bp, Homo sapiens
aaacctataagtaat

SEQ ID NO: 958829 - DNA, 15 bp, Homo sapiens
aacctataagtaata

SEQ ID NO: 958830 - DNA, 15 bp, Homo sapiens
acctataagtaataa

SEQ ID NO: 958831 - DNA, 15 bp, Homo sapiens
cctataagtaataag

SEQ ID NO: 958832 - DNA, 15 bp, Homo sapiens
ctataagtaataaga

SEQ ID NO: 958833 - DNA, 15 bp, Homo sapiens
tataagtaataagaa

SEQ ID NO: 958834 - DNA, 15 bp, Homo sapiens
ataagtaataagaac

SEQ ID NO: 958835 - DNA, 15 bp, Homo sapiens
taagtaataagaaca

SEQ ID NO: 958836 - DNA, 15 bp, Homo sapiens
aagtaataagaacag

SEQ ID NO: 958837 - DNA, 15 bp, Homo sapiens
agtaataagaacagt

SEQ ID NO: 958838 - DNA, 15 bp, Homo sapiens
gtaataagaacagtt

SEQ ID NO: 958839 - DNA, 15 bp, Homo sapiens
taataagaacagttt

SEQ ID NO: 958840 - DNA, 15 bp, Homo sapiens
aataagaacagtttg

SEQ ID NO: 958841 - DNA, 15 bp, Homo sapiens
ataagaacagtttgg

SEQ ID NO: 958842 - DNA, 15 bp, Homo sapiens
taagaacagtttggt

SEQ ID NO: 958843 - DNA, 15 bp, Homo sapiens
aagaacagtttggtc

SEQ ID NO: 958844 - DNA, 15 bp, Homo sapiens
agaacagtttggtca

SEQ ID NO: 958845 - DNA, 15 bp, Homo sapiens
gaacagtttggtcag

SEQ ID NO: 958846 - DNA, 15 bp, Homo sapiens
aacagtttggtcagt

SEQ ID NO: 958847 - DNA, 15 bp, Homo sapiens
acagtttggtcagtt

SEQ ID NO: 958848 - DNA, 15 bp, Homo sapiens
cagtttggtcagttt

SEQ ID NO: 958849 - DNA, 15 bp, Homo sapiens
agtttggtcagtttg

SEQ ID NO: 958850 - DNA, 15 bp, Homo sapiens
gtttggtcagtttgg

SEQ ID NO: 958851 - DNA, 15 bp, Homo sapiens
tttggtcagtttgga

SEQ ID NO: 958852 - DNA, 15 bp, Homo sapiens
ttggtcagtttggag

SEQ ID NO: 958853 - DNA, 15 bp, Homo sapiens
tggtcagtttggagc

SEQ ID NO: 958854 - DNA, 15 bp, Homo sapiens
ggtcagtttggagca

SEQ ID NO: 958855 - DNA, 15 bp, Homo sapiens
gtcagtttggagcaa

SEQ ID NO: 958856 - DNA, 15 bp, Homo sapiens
tcagtttggagcaaa

SEQ ID NO: 958857 - DNA, 15 bp, Homo sapiens
cagtttggagcaaat

SEQ ID NO: 958858 - DNA, 15 bp, Homo sapiens
agtttggagcaaatg

SEQ ID NO: 958859 - DNA, 15 bp, Homo sapiens
gtttggagcaaatga

SEQ ID NO: 958860 - DNA, 15 bp, Homo sapiens
tttggagcaaatgat

SEQ ID NO: 958861 - DNA, 15 bp, Homo sapiens
ttggagcaaatgatg

SEQ ID NO: 958862 - DNA, 15 bp, Homo sapiens
tggagcaaatgatgt

SEQ ID NO: 958863 - DNA, 15 bp, Homo sapiens
ggagcaaatgatgtt

SEQ ID NO: 958864 - DNA, 15 bp, Homo sapiens
gagcaaatgatgtta

SEQ ID NO: 958865 - DNA, 15 bp, Homo sapiens
agcaaatgatgttaa

SEQ ID NO: 958866 - DNA, 15 bp, Homo sapiens
gcaaatgatgttaat

SEQ ID NO: 958867 - DNA, 15 bp, Homo sapiens
caaatgatgttaata

SEQ ID NO: 958868 - DNA, 15 bp, Homo sapiens
aaatgatgttaatac

SEQ ID NO: 958869 - DNA, 15 bp, Homo sapiens
aatgatgttaatacc

SEQ ID NO: 958870 - DNA, 15 bp, Homo sapiens
atgatgttaatacct

SEQ ID NO: 958871 - DNA, 15 bp, Homo sapiens
tgatgttaatacctt

SEQ ID NO: 958872 - DNA, 15 bp, Homo sapiens
gatgttaataccttc

SEQ ID NO: 958873 - DNA, 15 bp, Homo sapiens
atgttaataccttca

SEQ ID NO: 958874 - DNA, 15 bp, Homo sapiens
tgttaataccttcag

SEQ ID NO: 958875 - DNA, 15 bp, Homo sapiens
gttaataccttcagg

SEQ ID NO: 958876 - DNA, 15 bp, Homo sapiens
ttaataccttcaggt

SEQ ID NO: 958877 - DNA, 15 bp, Homo sapiens
taataccttcaggtc

SEQ ID NO: 958878 - DNA, 15 bp, Homo sapiens
aataccttcaggtct

SEQ ID NO: 958879 - DNA, 15 bp, Homo sapiens
ataccttcaggtctt

SEQ ID NO: 958880 - DNA, 15 bp, Homo sapiens
taccttcaggtcttt

SEQ ID NO: 958881 - DNA, 15 bp, Homo sapiens
accttcaggtctttg

SEQ ID NO: 958882 - DNA, 15 bp, Homo sapiens
ccttcaggtctttgc

SEQ ID NO: 958883 - DNA, 15 bp, Homo sapiens
cttcaggtctttgct

SEQ ID NO: 958884 - DNA, 15 bp, Homo sapiens
ttcaggtctttgctc

SEQ ID NO: 958885 - DNA, 15 bp, Homo sapiens
tcaggtctttgctca

SEQ ID NO: 958886 - DNA, 15 bp, Homo sapiens
caggtctttgctcaa

SEQ ID NO: 958887 - DNA, 15 bp, Homo sapiens
aggtctttgctcaaa

SEQ ID NO: 958888 - DNA, 15 bp, Homo sapiens
ggtctttgctcaaat

SEQ ID NO: 958889 - DNA, 15 bp, Homo sapiens
gtctttgctcaaatg

SEQ ID NO: 958890 - DNA, 15 bp, Homo sapiens
tctttgctcaaatgt

SEQ ID NO: 958891 - DNA, 15 bp, Homo sapiens
ctttgctcaaatgtc

SEQ ID NO: 958892 - DNA, 15 bp, Homo sapiens
tttgctcaaatgtca

SEQ ID NO: 958893 - DNA, 15 bp, Homo sapiens
ttgctcaaatgtcac

SEQ ID NO: 958894 - DNA, 15 bp, Homo sapiens
tgctcaaatgtcaca

SEQ ID NO: 958895 - DNA, 15 bp, Homo sapiens
gctcaaatgtcacaa

SEQ ID NO: 958896 - DNA, 15 bp, Homo sapiens
ctcaaatgtcacaaa

SEQ ID NO: 958897 - DNA, 15 bp, Homo sapiens
tcaaatgtcacaaaa

SEQ ID NO: 958898 - DNA, 15 bp, Homo sapiens
caaatgtcacaaaat

SEQ ID NO: 958899 - DNA, 15 bp, Homo sapiens
aaatgtcacaaaatt

SEQ ID NO: 958900 - DNA, 15 bp, Homo sapiens
aatgtcacaaaatta

SEQ ID NO: 958901 - DNA, 15 bp, Homo sapiens
atgtcacaaaattag

SEQ ID NO: 958902 - DNA, 15 bp, Homo sapiens
tgtcacaaaattaga

SEQ ID NO: 958903 - DNA, 15 bp, Homo sapiens
gtcacaaaattagag

SEQ ID NO: 958904 - DNA, 15 bp, Homo sapiens
tcacaaaattagaga

SEQ ID NO: 958905 - DNA, 15 bp, Homo sapiens
cacaaaattagagag

SEQ ID NO: 958906 - DNA, 15 bp, Homo sapiens
acaaaattagagagg

SEQ ID NO: 958907 - DNA, 15 bp, Homo sapiens
caaaattagagaggc

SEQ ID NO: 958908 - DNA, 15 bp, Homo sapiens
aaaattagagaggct

SEQ ID NO: 958909 - DNA, 15 bp, Homo sapiens
aaattagagaggctt

SEQ ID NO: 958910 - DNA, 15 bp, Homo sapiens
aattagagaggcttt

SEQ ID NO: 958911 - DNA, 15 bp, Homo sapiens
attagagaggctttc

SEQ ID NO: 958912 - DNA, 15 bp, Homo sapiens
ttagagaggctttcg

SEQ ID NO: 958913 - DNA, 15 bp, Homo sapiens
tagagaggctttcgt

SEQ ID NO: 958914 - DNA, 15 bp, Homo sapiens
agagaggctttcgta

SEQ ID NO: 958915 - DNA, 15 bp, Homo sapiens
gagaggctttcgtag

SEQ ID NO: 958916 - DNA, 15 bp, Homo sapiens
agaggctttcgtaga

SEQ ID NO: 958917 - DNA, 15 bp, Homo sapiens
gaggctttcgtagac

SEQ ID NO: 958918 - DNA, 15 bp, Homo sapiens
aggctttcgtagaca

SEQ ID NO: 958919 - DNA, 15 bp, Homo sapiens
ggctttcgtagacaa

SEQ ID NO: 958920 - DNA, 15 bp, Homo sapiens
gctttcgtagacaaa

SEQ ID NO: 958921 - DNA, 15 bp, Homo sapiens
ctttcgtagacaaag

SEQ ID NO: 958922 - DNA, 15 bp, Homo sapiens
tttcgtagacaaagc

SEQ ID NO: 958923 - DNA, 15 bp, Homo sapiens
ttcgtagacaaagct

SEQ ID NO: 958924 - DNA, 15 bp, Homo sapiens
tcgtagacaaagcta

SEQ ID NO: 958925 - DNA, 15 bp, Homo sapiens
cgtagacaaagctat

SEQ ID NO: 958926 - DNA, 15 bp, Homo sapiens
gtagacaaagctata

SEQ ID NO: 958927 - DNA, 15 bp, Homo sapiens
tagacaaagctataa

SEQ ID NO: 958928 - DNA, 15 bp, Homo sapiens
agacaaagctataaa

SEQ ID NO: 958929 - DNA, 15 bp, Homo sapiens
gacaaagctataaaa

SEQ ID NO: 958930 - DNA, 15 bp, Homo sapiens
acaaagctataaaaa

SEQ ID NO: 958931 - DNA, 15 bp, Homo sapiens
caaagctataaaaaa

SEQ ID NO: 958932 - DNA, 15 bp, Homo sapiens
aaagctataaaaaaa

SEQ ID NO: 958933 - DNA, 15 bp, Homo sapiens
aagctataaaaaaat

SEQ ID NO: 958934 - DNA, 15 bp, Homo sapiens
agctataaaaaaata

SEQ ID NO: 958935 - DNA, 15 bp, Homo sapiens
gctataaaaaaatag

SEQ ID NO: 958936 - DNA, 15 bp, Homo sapiens
ctataaaaaaatagc

SEQ ID NO: 958937 - DNA, 15 bp, Homo sapiens
tataaaaaaatagca

SEQ ID NO: 958938 - DNA, 15 bp, Homo sapiens
ataaaaaaatagcat

SEQ ID NO: 958939 - DNA, 15 bp, Homo sapiens
taaaaaaatagcatt

SEQ ID NO: 958940 - DNA, 15 bp, Homo sapiens
aaaaaaatagcattc

SEQ ID NO: 958941 - DNA, 15 bp, Homo sapiens
aaaaaatagcattcc

SEQ ID NO: 958942 - DNA, 15 bp, Homo sapiens
aaaaatagcattcct

SEQ ID NO: 958943 - DNA, 15 bp, Homo sapiens
aaaatagcattcctc

SEQ ID NO: 958944 - DNA, 15 bp, Homo sapiens
aaatagcattcctct

SEQ ID NO: 958945 - DNA, 15 bp, Homo sapiens
aatagcattcctctc

SEQ ID NO: 958946 - DNA, 15 bp, Homo sapiens
atagcattcctctct

SEQ ID NO: 958947 - DNA, 15 bp, Homo sapiens
tagcattcctctctc

SEQ ID NO: 958948 - DNA, 15 bp, Homo sapiens
agcattcctctctca

SEQ ID NO: 958949 - DNA, 15 bp, Homo sapiens
gcattcctctctcac

SEQ ID NO: 958950 - DNA, 15 bp, Homo sapiens
cattcctctctcact

SEQ ID NO: 958951 - DNA, 15 bp, Homo sapiens
attcctctctcactt

SEQ ID NO: 958952 - DNA, 15 bp, Homo sapiens
ttcctctctcacttc

SEQ ID NO: 958953 - DNA, 15 bp, Homo sapiens
tcctctctcacttct

SEQ ID NO: 958954 - DNA, 15 bp, Homo sapiens
cctctctcacttctc

SEQ ID NO: 958955 - DNA, 15 bp, Homo sapiens
ctctctcacttctct

SEQ ID NO: 958956 - DNA, 15 bp, Homo sapiens
tctctcacttctctt

SEQ ID NO: 958957 - DNA, 15 bp, Homo sapiens
ctctcacttctctta

SEQ ID NO: 958958 - DNA, 15 bp, Homo sapiens
tctcacttctcttac

SEQ ID NO: 958959 - DNA, 15 bp, Homo sapiens
ctcacttctcttacc

SEQ ID NO: 958960 - DNA, 15 bp, Homo sapiens
tcacttctcttacca

SEQ ID NO: 958961 - DNA, 15 bp, Homo sapiens
cacttctcttaccaa

SEQ ID NO: 958962 - DNA, 15 bp, Homo sapiens
acttctcttaccaac

SEQ ID NO: 958963 - DNA, 15 bp, Homo sapiens
cttctcttaccaaca

SEQ ID NO: 958964 - DNA, 15 bp, Homo sapiens
ttctcttaccaacat

SEQ ID NO: 958965 - DNA, 15 bp, Homo sapiens
tctcttaccaacatc

SEQ ID NO: 958966 - DNA, 15 bp, Homo sapiens
ctcttaccaacatct

SEQ ID NO: 958967 - DNA, 15 bp, Homo sapiens
tcttaccaacatctt

SEQ ID NO: 958968 - DNA, 15 bp, Homo sapiens
cttaccaacatcttt

SEQ ID NO: 958969 - DNA, 15 bp, Homo sapiens
ttaccaacatctttt

SEQ ID NO: 958970 - DNA, 15 bp, Homo sapiens
taccaacatcttttg

SEQ ID NO: 958971 - DNA, 15 bp, Homo sapiens
accaacatcttttga

SEQ ID NO: 958972 - DNA, 15 bp, Homo sapiens
ccaacatcttttgat

SEQ ID NO: 958973 - DNA, 15 bp, Homo sapiens
caacatcttttgatt

SEQ ID NO: 958974 - DNA, 15 bp, Homo sapiens
aacatcttttgattc

SEQ ID NO: 958975 - DNA, 15 bp, Homo sapiens
acatcttttgattcc

SEQ ID NO: 958976 - DNA, 15 bp, Homo sapiens
catcttttgattccc

SEQ ID NO: 958977 - DNA, 15 bp, Homo sapiens
atcttttgattccct

SEQ ID NO: 958978 - DNA, 15 bp, Homo sapiens
tcttttgattccctt

SEQ ID NO: 958979 - DNA, 15 bp, Homo sapiens
cttttgattcccttt

SEQ ID NO: 958980 - DNA, 15 bp, Homo sapiens
ttttgattcccttta

SEQ ID NO: 958981 - DNA, 15 bp, Homo sapiens
tttgattccctttac

SEQ ID NO: 958982 - DNA, 15 bp, Homo sapiens
ttgattccctttacc

SEQ ID NO: 958983 - DNA, 15 bp, Homo sapiens
tgattccctttaccc

SEQ ID NO: 958984 - DNA, 15 bp, Homo sapiens
gattccctttacccc

SEQ ID NO: 958985 - DNA, 15 bp, Homo sapiens
attccctttacccca

SEQ ID NO: 958986 - DNA, 15 bp, Homo sapiens
ttccctttaccccac

SEQ ID NO: 958987 - DNA, 15 bp, Homo sapiens
tccctttaccccact

SEQ ID NO: 958988 - DNA, 15 bp, Homo sapiens
ccctttaccccacta

SEQ ID NO: 958989 - DNA, 15 bp, Homo sapiens
cctttaccccactag

SEQ ID NO: 958990 - DNA, 15 bp, Homo sapiens
ctttaccccactaga

SEQ ID NO: 958991 - DNA, 15 bp, Homo sapiens
tttaccccactagaa

SEQ ID NO: 958992 - DNA, 15 bp, Homo sapiens
ttaccccactagaat

SEQ ID NO: 958993 - DNA, 15 bp, Homo sapiens
taccccactagaatg

SEQ ID NO: 958994 - DNA, 15 bp, Homo sapiens
accccactagaatgt

SEQ ID NO: 958995 - DNA, 15 bp, Homo sapiens
ccccactagaatgta

SEQ ID NO: 958996 - DNA, 15 bp, Homo sapiens
cccactagaatgtaa

SEQ ID NO: 958997 - DNA, 15 bp, Homo sapiens
ccactagaatgtaaa

SEQ ID NO: 958998 - DNA, 15 bp, Homo sapiens
cactagaatgtaaac

SEQ ID NO: 958999 - DNA, 15 bp, Homo sapiens
actagaatgtaaact

SEQ ID NO: 959000 - DNA, 15 bp, Homo sapiens
ctagaatgtaaactt

SEQ ID NO: 959001 - DNA, 15 bp, Homo sapiens
tagaatgtaaacttc

SEQ ID NO: 959002 - DNA, 15 bp, Homo sapiens
agaatgtaaacttca

SEQ ID NO: 959003 - DNA, 15 bp, Homo sapiens
gaatgtaaacttcaa

SEQ ID NO: 959004 - DNA, 15 bp, Homo sapiens
aatgtaaacttcaag

SEQ ID NO: 959005 - DNA, 15 bp, Homo sapiens
atgtaaacttcaaga

SEQ ID NO: 959006 - DNA, 15 bp, Homo sapiens
tgtaaacttcaagag

SEQ ID NO: 959007 - DNA, 15 bp, Homo sapiens
gtaaacttcaagaga

SEQ ID NO: 959008 - DNA, 15 bp, Homo sapiens
taaacttcaagagaa

SEQ ID NO: 959009 - DNA, 15 bp, Homo sapiens
aaacttcaagagaat

SEQ ID NO: 959010 - DNA, 15 bp, Homo sapiens
aacttcaagagaata

SEQ ID NO: 959011 - DNA, 15 bp, Homo sapiens
acttcaagagaataa

SEQ ID NO: 959012 - DNA, 15 bp, Homo sapiens
cttcaagagaataag

SEQ ID NO: 959013 - DNA, 15 bp, Homo sapiens
ttcaagagaataagg

SEQ ID NO: 959014 - DNA, 15 bp, Homo sapiens
tcaagagaataagga

SEQ ID NO: 959015 - DNA, 15 bp, Homo sapiens
caagagaataaggac

SEQ ID NO: 959016 - DNA, 15 bp, Homo sapiens
aagagaataaggact

SEQ ID NO: 959017 - DNA, 15 bp, Homo sapiens
agagaataaggactt

SEQ ID NO: 959018 - DNA, 15 bp, Homo sapiens
gagaataaggacttt

SEQ ID NO: 959019 - DNA, 15 bp, Homo sapiens
agaataaggactttt

SEQ ID NO: 959020 - DNA, 15 bp, Homo sapiens
gaataaggacttttt

SEQ ID NO: 959021 - DNA, 15 bp, Homo sapiens
aataaggacttttta

SEQ ID NO: 959022 - DNA, 15 bp, Homo sapiens
ataaggactttttaa

SEQ ID NO: 959023 - DNA, 15 bp, Homo sapiens
taaggactttttaaa

SEQ ID NO: 959024 - DNA, 15 bp, Homo sapiens
aaggactttttaaaa

SEQ ID NO: 959025 - DNA, 15 bp, Homo sapiens
aggactttttaaaaa

SEQ ID NO: 959026 - DNA, 15 bp, Homo sapiens
ggactttttaaaaac

SEQ ID NO: 959027 - DNA, 15 bp, Homo sapiens
gactttttaaaaact

SEQ ID NO: 959028 - DNA, 15 bp, Homo sapiens
actttttaaaaactg

SEQ ID NO: 959029 - DNA, 15 bp, Homo sapiens
ctttttaaaaactgc

SEQ ID NO: 959030 - DNA, 15 bp, Homo sapiens
tttttaaaaactgct

SEQ ID NO: 959031 - DNA, 15 bp, Homo sapiens
ttttaaaaactgctt

SEQ ID NO: 959032 - DNA, 15 bp, Homo sapiens
tttaaaaactgcttt

SEQ ID NO: 959033 - DNA, 15 bp, Homo sapiens
ttaaaaactgcttta

SEQ ID NO: 959034 - DNA, 15 bp, Homo sapiens
taaaaactgctttat

SEQ ID NO: 959035 - DNA, 15 bp, Homo sapiens
aaaaactgctttatt

SEQ ID NO: 959036 - DNA, 15 bp, Homo sapiens
aaaactgctttatta

SEQ ID NO: 959037 - DNA, 15 bp, Homo sapiens
aaactgctttattac

SEQ ID NO: 959038 - DNA, 15 bp, Homo sapiens
aactgctttattacc

SEQ ID NO: 959039 - DNA, 15 bp, Homo sapiens
actgctttattacca

SEQ ID NO: 959040 - DNA, 15 bp, Homo sapiens
ctgctttattaccag

SEQ ID NO: 959041 - DNA, 15 bp, Homo sapiens
tgctttattaccagc

SEQ ID NO: 959042 - DNA, 15 bp, Homo sapiens
gctttattaccagca

SEQ ID NO: 959043 - DNA, 15 bp, Homo sapiens
ctttattaccagcac

SEQ ID NO: 959044 - DNA, 15 bp, Homo sapiens
tttattaccagcacc

SEQ ID NO: 959045 - DNA, 15 bp, Homo sapiens
ttattaccagcacct

SEQ ID NO: 959046 - DNA, 15 bp, Homo sapiens
tattaccagcaccta

SEQ ID NO: 959047 - DNA, 15 bp, Homo sapiens
attaccagcacctac

SEQ ID NO: 959048 - DNA, 15 bp, Homo sapiens
ttaccagcacctaca

SEQ ID NO: 959049 - DNA, 15 bp, Homo sapiens
taccagcacctacaa

SEQ ID NO: 959050 - DNA, 15 bp, Homo sapiens
accagcacctacaac

SEQ ID NO: 959051 - DNA, 15 bp, Homo sapiens
ccagcacctacaaca

SEQ ID NO: 959052 - DNA, 15 bp, Homo sapiens
cagcacctacaacaa

SEQ ID NO: 959053 - DNA, 15 bp, Homo sapiens
agcacctacaacaat

SEQ ID NO: 959054 - DNA, 15 bp, Homo sapiens
gcacctacaacaatg

SEQ ID NO: 959055 - DNA, 15 bp, Homo sapiens
cacctacaacaatgc

SEQ ID NO: 959056 - DNA, 15 bp, Homo sapiens
acctacaacaatgcc

SEQ ID NO: 959057 - DNA, 15 bp, Homo sapiens
cctacaacaatgcct

SEQ ID NO: 959058 - DNA, 15 bp, Homo sapiens
ctacaacaatgcctg

SEQ ID NO: 959059 - DNA, 15 bp, Homo sapiens
tacaacaatgcctgg

SEQ ID NO: 959060 - DNA, 15 bp, Homo sapiens
acaacaatgcctggc

SEQ ID NO: 959061 - DNA, 15 bp, Homo sapiens
caacaatgcctggca

SEQ ID NO: 959062 - DNA, 15 bp, Homo sapiens
aacaatgcctggcat

SEQ ID NO: 959063 - DNA, 15 bp, Homo sapiens
acaatgcctggcatg

SEQ ID NO: 959064 - DNA, 15 bp, Homo sapiens
caatgcctggcatgt

SEQ ID NO: 959065 - DNA, 15 bp, Homo sapiens
aatgcctggcatgtc

SEQ ID NO: 959066 - DNA, 15 bp, Homo sapiens
atgcctggcatgtca

SEQ ID NO: 959067 - DNA, 15 bp, Homo sapiens
tgcctggcatgtcag

SEQ ID NO: 959068 - DNA, 15 bp, Homo sapiens
gcctggcatgtcagg

SEQ ID NO: 959069 - DNA, 15 bp, Homo sapiens
cctggcatgtcagga

SEQ ID NO: 959070 - DNA, 15 bp, Homo sapiens
ctggcatgtcaggag

SEQ ID NO: 959071 - DNA, 15 bp, Homo sapiens
tggcatgtcaggagt

SEQ ID NO: 959072 - DNA, 15 bp, Homo sapiens
ggcatgtcaggagtt

SEQ ID NO: 959073 - DNA, 15 bp, Homo sapiens
gcatgtcaggagttt

SEQ ID NO: 959074 - DNA, 15 bp, Homo sapiens
catgtcaggagttta

SEQ ID NO: 959075 - DNA, 15 bp, Homo sapiens
atgtcaggagtttaa

SEQ ID NO: 959076 - DNA, 15 bp, Homo sapiens
tgtcaggagtttaat

SEQ ID NO: 959077 - DNA, 15 bp, Homo sapiens
gtcaggagtttaata

SEQ ID NO: 959078 - DNA, 15 bp, Homo sapiens
tcaggagtttaataa

SEQ ID NO: 959079 - DNA, 15 bp, Homo sapiens
caggagtttaataag

SEQ ID NO: 959080 - DNA, 15 bp, Homo sapiens
aggagtttaataagt

SEQ ID NO: 959081 - DNA, 15 bp, Homo sapiens
ggagtttaataagta

SEQ ID NO: 959082 - DNA, 15 bp, Homo sapiens
gagtttaataagtat

SEQ ID NO: 959083 - DNA, 15 bp, Homo sapiens
agtttaataagtatt

SEQ ID NO: 959084 - DNA, 15 bp, Homo sapiens
gtttaataagtatta

SEQ ID NO: 959085 - DNA, 15 bp, Homo sapiens
tttaataagtattaa

SEQ ID NO: 959086 - DNA, 15 bp, Homo sapiens
ttaataagtattaaa

SEQ ID NO: 959087 - DNA, 15 bp, Homo sapiens
taataagtattaaat

SEQ ID NO: 959088 - DNA, 15 bp, Homo sapiens
aataagtattaaatg

SEQ ID NO: 959089 - DNA, 15 bp, Homo sapiens
ataagtattaaatgt

SEQ ID NO: 959090 - DNA, 15 bp, Homo sapiens
taagtattaaatgta

SEQ ID NO: 959091 - DNA, 15 bp, Homo sapiens
aagtattaaatgtat

SEQ ID NO: 959092 - DNA, 15 bp, Homo sapiens
agtattaaatgtatg

SEQ ID NO: 959093 - DNA, 15 bp, Homo sapiens
gtattaaatgtatga

SEQ ID NO: 959094 - DNA, 15 bp, Homo sapiens
tattaaatgtatgaa

SEQ ID NO: 959095 - DNA, 15 bp, Homo sapiens
attaaatgtatgaat

SEQ ID NO: 959096 - DNA, 15 bp, Homo sapiens
ttaaatgtatgaatt

SEQ ID NO: 959097 - DNA, 15 bp, Homo sapiens
taaatgtatgaattg

SEQ ID NO: 959098 - DNA, 15 bp, Homo sapiens
aaatgtatgaattgg

SEQ ID NO: 959099 - DNA, 15 bp, Homo sapiens
aatgtatgaattggt

SEQ ID NO: 959100 - DNA, 15 bp, Homo sapiens
atgtatgaattggtt

SEQ ID NO: 959101 - DNA, 15 bp, Homo sapiens
tgtatgaattggttc

SEQ ID NO: 959102 - DNA, 15 bp, Homo sapiens
gtatgaattggttca

SEQ ID NO: 959103 - DNA, 15 bp, Homo sapiens
tatgaattggttcat

SEQ ID NO: 959104 - DNA, 15 bp, Homo sapiens
atgaattggttcata

SEQ ID NO: 959105 - DNA, 15 bp, Homo sapiens
tgaattggttcatac

SEQ ID NO: 959106 - DNA, 15 bp, Homo sapiens
gaattggttcatact

SEQ ID NO: 959107 - DNA, 15 bp, Homo sapiens
aattggttcatacta

SEQ ID NO: 959108 - DNA, 15 bp, Homo sapiens
attggttcatactaa

SEQ ID NO: 959109 - DNA, 15 bp, Homo sapiens
ttggttcatactaaa

SEQ ID NO: 959110 - DNA, 15 bp, Homo sapiens
tggttcatactaaat

SEQ ID NO: 959111 - DNA, 15 bp, Homo sapiens
ggttcatactaaatc

SEQ ID NO: 959112 - DNA, 15 bp, Homo sapiens
gttcatactaaatcc

SEQ ID NO: 959113 - DNA, 15 bp, Homo sapiens
ttcatactaaatcct

SEQ ID NO: 959114 - DNA, 15 bp, Homo sapiens
tcatactaaatcctt

SEQ ID NO: 959115 - DNA, 15 bp, Homo sapiens
catactaaatccttt

SEQ ID NO: 959116 - DNA, 15 bp, Homo sapiens
atactaaatcctttt

SEQ ID NO: 959117 - DNA, 15 bp, Homo sapiens
tactaaatccttttg

SEQ ID NO: 959118 - DNA, 15 bp, Homo sapiens
actaaatccttttgt

SEQ ID NO: 959119 - DNA, 15 bp, Homo sapiens
ctaaatccttttgtg

SEQ ID NO: 959120 - DNA, 15 bp, Homo sapiens
taaatccttttgtgc

SEQ ID NO: 959121 - DNA, 15 bp, Homo sapiens
aaatccttttgtgct

SEQ ID NO: 959122 - DNA, 15 bp, Homo sapiens
aatccttttgtgctt

SEQ ID NO: 959123 - DNA, 15 bp, Homo sapiens
atccttttgtgctta

SEQ ID NO: 959124 - DNA, 15 bp, Homo sapiens
tccttttgtgcttaa

SEQ ID NO: 959125 - DNA, 15 bp, Homo sapiens
ccttttgtgcttaag

SEQ ID NO: 959126 - DNA, 15 bp, Homo sapiens
cttttgtgcttaagc

SEQ ID NO: 959127 - DNA, 15 bp, Homo sapiens
ttttgtgcttaagct

SEQ ID NO: 959128 - DNA, 15 bp, Homo sapiens
tttgtgcttaagcta

SEQ ID NO: 959129 - DNA, 15 bp, Homo sapiens
ttgtgcttaagctag

SEQ ID NO: 959130 - DNA, 15 bp, Homo sapiens
tgtgcttaagctaga

SEQ ID NO: 959131 - DNA, 15 bp, Homo sapiens
gtgcttaagctagag

SEQ ID NO: 959132 - DNA, 15 bp, Homo sapiens
tgcttaagctagagt

SEQ ID NO: 959133 - DNA, 15 bp, Homo sapiens
gcttaagctagagtc

SEQ ID NO: 959134 - DNA, 15 bp, Homo sapiens
cttaagctagagtca

SEQ ID NO: 959135 - DNA, 15 bp, Homo sapiens
ttaagctagagtcag

SEQ ID NO: 959136 - DNA, 15 bp, Homo sapiens
taagctagagtcagg

SEQ ID NO: 959137 - DNA, 15 bp, Homo sapiens
aagctagagtcagga

SEQ ID NO: 959138 - DNA, 15 bp, Homo sapiens
agctagagtcaggac

SEQ ID NO: 959139 - DNA, 15 bp, Homo sapiens
gctagagtcaggact

SEQ ID NO: 959140 - DNA, 15 bp, Homo sapiens
ctagagtcaggactg

SEQ ID NO: 959141 - DNA, 15 bp, Homo sapiens
tagagtcaggactgt

SEQ ID NO: 959142 - DNA, 15 bp, Homo sapiens
agagtcaggactgtg

SEQ ID NO: 959143 - DNA, 15 bp, Homo sapiens
gagtcaggactgtgt

SEQ ID NO: 959144 - DNA, 15 bp, Homo sapiens
agtcaggactgtgtt

SEQ ID NO: 959145 - DNA, 15 bp, Homo sapiens
gtcaggactgtgttg

SEQ ID NO: 959146 - DNA, 15 bp, Homo sapiens
tcaggactgtgttgt

SEQ ID NO: 959147 - DNA, 15 bp, Homo sapiens
caggactgtgttgta

SEQ ID NO: 959148 - DNA, 15 bp, Homo sapiens
aggactgtgttgtag

SEQ ID NO: 959149 - DNA, 15 bp, Homo sapiens
ggactgtgttgtaga

SEQ ID NO: 959150 - DNA, 15 bp, Homo sapiens
gactgtgttgtagac

SEQ ID NO: 959151 - DNA, 15 bp, Homo sapiens
actgtgttgtagaca

SEQ ID NO: 959152 - DNA, 15 bp, Homo sapiens
ctgtgttgtagacaa

SEQ ID NO: 959153 - DNA, 15 bp, Homo sapiens
tgtgttgtagacaaa

SEQ ID NO: 959154 - DNA, 15 bp, Homo sapiens
gtgttgtagacaaag

SEQ ID NO: 959155 - DNA, 15 bp, Homo sapiens
tgttgtagacaaagc

SEQ ID NO: 959156 - DNA, 15 bp, Homo sapiens
gttgtagacaaagca

SEQ ID NO: 959157 - DNA, 15 bp, Homo sapiens
ttgtagacaaagcag

SEQ ID NO: 959158 - DNA, 15 bp, Homo sapiens
tgtagacaaagcaga

SEQ ID NO: 959159 - DNA, 15 bp, Homo sapiens
gtagacaaagcagaa

SEQ ID NO: 959160 - DNA, 15 bp, Homo sapiens
tagacaaagcagaat

SEQ ID NO: 959161 - DNA, 15 bp, Homo sapiens
agacaaagcagaatt

SEQ ID NO: 959162 - DNA, 15 bp, Homo sapiens
gacaaagcagaattt

SEQ ID NO: 959163 - DNA, 15 bp, Homo sapiens
acaaagcagaatttt

SEQ ID NO: 959164 - DNA, 15 bp, Homo sapiens
caaagcagaatttta

SEQ ID NO: 959165 - DNA, 15 bp, Homo sapiens
aaagcagaattttat

SEQ ID NO: 959166 - DNA, 15 bp, Homo sapiens
aagcagaattttata

SEQ ID NO: 959167 - DNA, 15 bp, Homo sapiens
agcagaattttatag

SEQ ID NO: 959168 - DNA, 15 bp, Homo sapiens
gcagaattttataga

SEQ ID NO: 959169 - DNA, 15 bp, Homo sapiens
cagaattttatagaa

SEQ ID NO: 959170 - DNA, 15 bp, Homo sapiens
agaattttatagaag

SEQ ID NO: 959171 - DNA, 15 bp, Homo sapiens
gaattttatagaaga

SEQ ID NO: 959172 - DNA, 15 bp, Homo sapiens
aattttatagaagat

SEQ ID NO: 959173 - DNA, 15 bp, Homo sapiens
attttatagaagatt

SEQ ID NO: 959174 - DNA, 15 bp, Homo sapiens
ttttatagaagattg

SEQ ID NO: 959175 - DNA, 15 bp, Homo sapiens
tttatagaagattgt

SEQ ID NO: 959176 - DNA, 15 bp, Homo sapiens
ttatagaagattgta

SEQ ID NO: 959177 - DNA, 15 bp, Homo sapiens
tatagaagattgtaa

SEQ ID NO: 959178 - DNA, 15 bp, Homo sapiens
atagaagattgtaaa

SEQ ID NO: 959179 - DNA, 15 bp, Homo sapiens
tagaagattgtaaaa

SEQ ID NO: 959180 - DNA, 15 bp, Homo sapiens
agaagattgtaaaaa

SEQ ID NO: 959181 - DNA, 15 bp, Homo sapiens
gaagattgtaaaaag

SEQ ID NO: 959182 - DNA, 15 bp, Homo sapiens
aagattgtaaaaagt

SEQ ID NO: 959183 - DNA, 15 bp, Homo sapiens
agattgtaaaaagta

SEQ ID NO: 959184 - DNA, 15 bp, Homo sapiens
gattgtaaaaagtac

SEQ ID NO: 959185 - DNA, 15 bp, Homo sapiens
attgtaaaaagtact

SEQ ID NO: 959186 - DNA, 15 bp, Homo sapiens
ttgtaaaaagtactt

SEQ ID NO: 959187 - DNA, 15 bp, Homo sapiens
tgtaaaaagtacttt

SEQ ID NO: 959188 - DNA, 15 bp, Homo sapiens
gtaaaaagtacttta

SEQ ID NO: 959189 - DNA, 15 bp, Homo sapiens
taaaaagtactttaa

SEQ ID NO: 959190 - DNA, 15 bp, Homo sapiens
aaaaagtactttaaa

SEQ ID NO: 959191 - DNA, 15 bp, Homo sapiens
aaaagtactttaaag

SEQ ID NO: 959192 - DNA, 15 bp, Homo sapiens
aaagtactttaaagt

SEQ ID NO: 959193 - DNA, 15 bp, Homo sapiens
aagtactttaaagtc

SEQ ID NO: 959194 - DNA, 15 bp, Homo sapiens
agtactttaaagtct

SEQ ID NO: 959195 - DNA, 15 bp, Homo sapiens
gtactttaaagtctg

SEQ ID NO: 959196 - DNA, 15 bp, Homo sapiens
tactttaaagtctga

SEQ ID NO: 959197 - DNA, 15 bp, Homo sapiens
actttaaagtctgat

SEQ ID NO: 959198 - DNA, 15 bp, Homo sapiens
ctttaaagtctgata

SEQ ID NO: 959199 - DNA, 15 bp, Homo sapiens
tttaaagtctgatat

SEQ ID NO: 959200 - DNA, 15 bp, Homo sapiens
ttaaagtctgatata

SEQ ID NO: 959201 - DNA, 15 bp, Homo sapiens
taaagtctgatatag

SEQ ID NO: 959202 - DNA, 15 bp, Homo sapiens
aaagtctgatatagt

SEQ ID NO: 959203 - DNA, 15 bp, Homo sapiens
aagtctgatatagtc

SEQ ID NO: 959204 - DNA, 15 bp, Homo sapiens
agtctgatatagtct

SEQ ID NO: 959205 - DNA, 15 bp, Homo sapiens
gtctgatatagtcta

SEQ ID NO: 959206 - DNA, 15 bp, Homo sapiens
tctgatatagtctaa

SEQ ID NO: 959207 - DNA, 15 bp, Homo sapiens
ctgatatagtctaat

SEQ ID NO: 959208 - DNA, 15 bp, Homo sapiens
tgatatagtctaatg

SEQ ID NO: 959209 - DNA, 15 bp, Homo sapiens
gatatagtctaatga

SEQ ID NO: 959210 - DNA, 15 bp, Homo sapiens
atatagtctaatgag

SEQ ID NO: 959211 - DNA, 15 bp, Homo sapiens
tatagtctaatgaga

SEQ ID NO: 959212 - DNA, 15 bp, Homo sapiens
atagtctaatgagat

SEQ ID NO: 959213 - DNA, 15 bp, Homo sapiens
tagtctaatgagata

SEQ ID NO: 959214 - DNA, 15 bp, Homo sapiens
agtctaatgagatac

SEQ ID NO: 959215 - DNA, 15 bp, Homo sapiens
gtctaatgagatacc

SEQ ID NO: 959216 - DNA, 15 bp, Homo sapiens
tctaatgagatacca

SEQ ID NO: 959217 - DNA, 15 bp, Homo sapiens
ctaatgagataccat

SEQ ID NO: 959218 - DNA, 15 bp, Homo sapiens
taatgagataccata

SEQ ID NO: 959219 - DNA, 15 bp, Homo sapiens
aatgagataccataa

SEQ ID NO: 959220 - DNA, 15 bp, Homo sapiens
atgagataccataag

SEQ ID NO: 959221 - DNA, 15 bp, Homo sapiens
tgagataccataagg

SEQ ID NO: 959222 - DNA, 15 bp, Homo sapiens
gagataccataaggt

SEQ ID NO: 959223 - DNA, 15 bp, Homo sapiens
agataccataaggtg

SEQ ID NO: 959224 - DNA, 15 bp, Homo sapiens
gataccataaggtgg

SEQ ID NO: 959225 - DNA, 15 bp, Homo sapiens
ataccataaggtggt

SEQ ID NO: 959226 - DNA, 15 bp, Homo sapiens
taccataaggtggta

SEQ ID NO: 959227 - DNA, 15 bp, Homo sapiens
accataaggtggtaa

SEQ ID NO: 959228 - DNA, 15 bp, Homo sapiens
ccataaggtggtaaa

SEQ ID NO: 959229 - DNA, 15 bp, Homo sapiens
cataaggtggtaaaa

SEQ ID NO: 959230 - DNA, 15 bp, Homo sapiens
ataaggtggtaaaaa

SEQ ID NO: 959231 - DNA, 15 bp, Homo sapiens
taaggtggtaaaaaa

SEQ ID NO: 959232 - DNA, 15 bp, Homo sapiens
aaggtggtaaaaaag

SEQ ID NO: 959233 - DNA, 15 bp, Homo sapiens
aggtggtaaaaaagt

SEQ ID NO: 959234 - DNA, 15 bp, Homo sapiens
ggtggtaaaaaagtt

SEQ ID NO: 959235 - DNA, 15 bp, Homo sapiens
gtggtaaaaaagtta

SEQ ID NO: 959236 - DNA, 15 bp, Homo sapiens
tggtaaaaaagttat

SEQ ID NO: 959237 - DNA, 15 bp, Homo sapiens
ggtaaaaaagttatg

SEQ ID NO: 959238 - DNA, 15 bp, Homo sapiens
gtaaaaaagttatga

SEQ ID NO: 959239 - DNA, 15 bp, Homo sapiens
taaaaaagttatgaa

SEQ ID NO: 959240 - DNA, 15 bp, Homo sapiens
aaaaaagttatgaat

SEQ ID NO: 959241 - DNA, 15 bp, Homo sapiens
aaaaagttatgaata

SEQ ID NO: 959242 - DNA, 15 bp, Homo sapiens
aaaagttatgaataa

SEQ ID NO: 959243 - DNA, 15 bp, Homo sapiens
aaagttatgaataaa

SEQ ID NO: 959244 - DNA, 15 bp, Homo sapiens
aagttatgaataaac

SEQ ID NO: 959245 - DNA, 15 bp, Homo sapiens
agttatgaataaaca

SEQ ID NO: 959246 - DNA, 15 bp, Homo sapiens
gttatgaataaacaa

SEQ ID NO: 959247 - DNA, 15 bp, Homo sapiens
ttatgaataaacaag

SEQ ID NO: 959248 - DNA, 15 bp, Homo sapiens
tatgaataaacaagg

SEQ ID NO: 959249 - DNA, 15 bp, Homo sapiens
atgaataaacaaggt

SEQ ID NO: 959250 - DNA, 15 bp, Homo sapiens
tgaataaacaaggtg

SEQ ID NO: 959251 - DNA, 15 bp, Homo sapiens
gaataaacaaggtga

SEQ ID NO: 959252 - DNA, 15 bp, Homo sapiens
aataaacaaggtgat

SEQ ID NO: 959253 - DNA, 15 bp, Homo sapiens
ataaacaaggtgatt

SEQ ID NO: 959254 - DNA, 15 bp, Homo sapiens
taaacaaggtgatta

SEQ ID NO: 959255 - DNA, 15 bp, Homo sapiens
aaacaaggtgattat

SEQ ID NO: 959256 - DNA, 15 bp, Homo sapiens
aacaaggtgattatg

SEQ ID NO: 959257 - DNA, 15 bp, Homo sapiens
acaaggtgattatgg

SEQ ID NO: 959258 - DNA, 15 bp, Homo sapiens
caaggtgattatggt

SEQ ID NO: 959259 - DNA, 15 bp, Homo sapiens
aaggtgattatggtt

SEQ ID NO: 959260 - DNA, 15 bp, Homo sapiens
aggtgattatggttg

SEQ ID NO: 959261 - DNA, 15 bp, Homo sapiens
ggtgattatggttga

SEQ ID NO: 959262 - DNA, 15 bp, Homo sapiens
gtgattatggttgac

SEQ ID NO: 959263 - DNA, 15 bp, Homo sapiens
tgattatggttgact

SEQ ID NO: 959264 - DNA, 15 bp, Homo sapiens
gattatggttgactg

SEQ ID NO: 959265 - DNA, 15 bp, Homo sapiens
attatggttgactga

SEQ ID NO: 959266 - DNA, 15 bp, Homo sapiens
ttatggttgactgac

SEQ ID NO: 959267 - DNA, 15 bp, Homo sapiens
tatggttgactgact

SEQ ID NO: 959268 - DNA, 15 bp, Homo sapiens
atggttgactgactt

SEQ ID NO: 959269 - DNA, 15 bp, Homo sapiens
tggttgactgacttt

SEQ ID NO: 959270 - DNA, 15 bp, Homo sapiens
ggttgactgactttc

SEQ ID NO: 959271 - DNA, 15 bp, Homo sapiens
gttgactgactttcc

SEQ ID NO: 959272 - DNA, 15 bp, Homo sapiens
ttgactgactttcct

SEQ ID NO: 959273 - DNA, 15 bp, Homo sapiens
tgactgactttcctc

SEQ ID NO: 959274 - DNA, 15 bp, Homo sapiens
gactgactttcctca

SEQ ID NO: 959275 - DNA, 15 bp, Homo sapiens
actgactttcctcaa

SEQ ID NO: 959276 - DNA, 15 bp, Homo sapiens
ctgactttcctcaaa

SEQ ID NO: 959277 - DNA, 15 bp, Homo sapiens
tgactttcctcaaag

SEQ ID NO: 959278 - DNA, 15 bp, Homo sapiens
gactttcctcaaagt

SEQ ID NO: 959279 - DNA, 15 bp, Homo sapiens
actttcctcaaagtg

SEQ ID NO: 959280 - DNA, 15 bp, Homo sapiens
ctttcctcaaagtgt

SEQ ID NO: 959281 - DNA, 15 bp, Homo sapiens
tttcctcaaagtgta

SEQ ID NO: 959282 - DNA, 15 bp, Homo sapiens
ttcctcaaagtgtat

SEQ ID NO: 959283 - DNA, 15 bp, Homo sapiens
tcctcaaagtgtatg

SEQ ID NO: 959284 - DNA, 15 bp, Homo sapiens
cctcaaagtgtatga

SEQ ID NO: 959285 - DNA, 15 bp, Homo sapiens
ctcaaagtgtatgac

SEQ ID NO: 959286 - DNA, 15 bp, Homo sapiens
tcaaagtgtatgacc

SEQ ID NO: 959287 - DNA, 15 bp, Homo sapiens
caaagtgtatgacca

SEQ ID NO: 959288 - DNA, 15 bp, Homo sapiens
aaagtgtatgaccaa

SEQ ID NO: 959289 - DNA, 15 bp, Homo sapiens
aagtgtatgaccaaa

SEQ ID NO: 959290 - DNA, 15 bp, Homo sapiens
agtgtatgaccaaaa

SEQ ID NO: 959291 - DNA, 15 bp, Homo sapiens
gtgtatgaccaaaaa

SEQ ID NO: 959292 - DNA, 15 bp, Homo sapiens
tgtatgaccaaaaaa

SEQ ID NO: 959293 - DNA, 15 bp, Homo sapiens
gtatgaccaaaaaat

SEQ ID NO: 959294 - DNA, 15 bp, Homo sapiens
tatgaccaaaaaatg

SEQ ID NO: 959295 - DNA, 15 bp, Homo sapiens
atgaccaaaaaatgt

SEQ ID NO: 959296 - DNA, 15 bp, Homo sapiens
tgaccaaaaaatgtc

SEQ ID NO: 959297 - DNA, 15 bp, Homo sapiens
gaccaaaaaatgtcg

SEQ ID NO: 959298 - DNA, 15 bp, Homo sapiens
accaaaaaatgtcgt

SEQ ID NO: 959299 - DNA, 15 bp, Homo sapiens
ccaaaaaatgtcgta

SEQ ID NO: 959300 - DNA, 15 bp, Homo sapiens
caaaaaatgtcgtat

SEQ ID NO: 959301 - DNA, 15 bp, Homo sapiens
aaaaaatgtcgtatt

SEQ ID NO: 959302 - DNA, 15 bp, Homo sapiens
aaaaatgtcgtatta

SEQ ID NO: 959303 - DNA, 15 bp, Homo sapiens
aaaatgtcgtattaa

SEQ ID NO: 959304 - DNA, 15 bp, Homo sapiens
aaatgtcgtattaag

SEQ ID NO: 959305 - DNA, 15 bp, Homo sapiens
aatgtcgtattaagc

SEQ ID NO: 959306 - DNA, 15 bp, Homo sapiens
atgtcgtattaagca

SEQ ID NO: 959307 - DNA, 15 bp, Homo sapiens
tgtcgtattaagcac

SEQ ID NO: 959308 - DNA, 15 bp, Homo sapiens
gtcgtattaagcact

SEQ ID NO: 959309 - DNA, 15 bp, Homo sapiens
tcgtattaagcacta

SEQ ID NO: 959310 - DNA, 15 bp, Homo sapiens
cgtattaagcactat

SEQ ID NO: 959311 - DNA, 15 bp, Homo sapiens
gtattaagcactata

SEQ ID NO: 959312 - DNA, 15 bp, Homo sapiens
tattaagcactatac

SEQ ID NO: 959313 - DNA, 15 bp, Homo sapiens
attaagcactataca

SEQ ID NO: 959314 - DNA, 15 bp, Homo sapiens
ttaagcactatacat

SEQ ID NO: 959315 - DNA, 15 bp, Homo sapiens
taagcactatacatt

SEQ ID NO: 959316 - DNA, 15 bp, Homo sapiens
aagcactatacatta

SEQ ID NO: 959317 - DNA, 15 bp, Homo sapiens
agcactatacattat

SEQ ID NO: 959318 - DNA, 15 bp, Homo sapiens
gcactatacattatt

SEQ ID NO: 959319 - DNA, 15 bp, Homo sapiens
cactatacattattt

SEQ ID NO: 959320 - DNA, 15 bp, Homo sapiens
actatacattatttg

SEQ ID NO: 959321 - DNA, 15 bp, Homo sapiens
ctatacattatttgt

SEQ ID NO: 959322 - DNA, 15 bp, Homo sapiens
tatacattatttgtc

SEQ ID NO: 959323 - DNA, 15 bp, Homo sapiens
atacattatttgtca

SEQ ID NO: 959324 - DNA, 15 bp, Homo sapiens
tacattatttgtcaa

SEQ ID NO: 959325 - DNA, 15 bp, Homo sapiens
acattatttgtcaat

SEQ ID NO: 959326 - DNA, 15 bp, Homo sapiens
cattatttgtcaata

SEQ ID NO: 959327 - DNA, 15 bp, Homo sapiens
attatttgtcaatat

SEQ ID NO: 959328 - DNA, 15 bp, Homo sapiens
ttatttgtcaatata

SEQ ID NO: 959329 - DNA, 15 bp, Homo sapiens
tatttgtcaatatag

SEQ ID NO: 959330 - DNA, 15 bp, Homo sapiens
atttgtcaatataga

SEQ ID NO: 959331 - DNA, 15 bp, Homo sapiens
tttgtcaatatagag

SEQ ID NO: 959332 - DNA, 15 bp, Homo sapiens
ttgtcaatatagagg

SEQ ID NO: 959333 - DNA, 15 bp, Homo sapiens
tgtcaatatagaggt

SEQ ID NO: 959334 - DNA, 15 bp, Homo sapiens
gtcaatatagaggtg

SEQ ID NO: 959335 - DNA, 15 bp, Homo sapiens
tcaatatagaggtgg

SEQ ID NO: 959336 - DNA, 15 bp, Homo sapiens
caatatagaggtgga

SEQ ID NO: 959337 - DNA, 15 bp, Homo sapiens
aatatagaggtggag

SEQ ID NO: 959338 - DNA, 15 bp, Homo sapiens
atatagaggtggagt

SEQ ID NO: 959339 - DNA, 15 bp, Homo sapiens
tatagaggtggagtc

SEQ ID NO: 959340 - DNA, 15 bp, Homo sapiens
atagaggtggagtcc

SEQ ID NO: 959341 - DNA, 15 bp, Homo sapiens
tagaggtggagtcca

SEQ ID NO: 959342 - DNA, 15 bp, Homo sapiens
agaggtggagtccaa

SEQ ID NO: 959343 - DNA, 15 bp, Homo sapiens
gaggtggagtccaac

SEQ ID NO: 959344 - DNA, 15 bp, Homo sapiens
aggtggagtccaact

SEQ ID NO: 959345 - DNA, 15 bp, Homo sapiens
ggtggagtccaacta

SEQ ID NO: 959346 - DNA, 15 bp, Homo sapiens
gtggagtccaactat

SEQ ID NO: 959347 - DNA, 15 bp, Homo sapiens
tggagtccaactatt

SEQ ID NO: 959348 - DNA, 15 bp, Homo sapiens
ggagtccaactattt

SEQ ID NO: 959349 - DNA, 15 bp, Homo sapiens
gagtccaactattta

SEQ ID NO: 959350 - DNA, 15 bp, Homo sapiens
agtccaactatttaa

SEQ ID NO: 959351 - DNA, 15 bp, Homo sapiens
gtccaactatttaaa

SEQ ID NO: 959352 - DNA, 15 bp, Homo sapiens
tccaactatttaaag

SEQ ID NO: 959353 - DNA, 15 bp, Homo sapiens
ccaactatttaaagc

SEQ ID NO: 959354 - DNA, 15 bp, Homo sapiens
caactatttaaagct

SEQ ID NO: 959355 - DNA, 15 bp, Homo sapiens
aactatttaaagctc

SEQ ID NO: 959356 - DNA, 15 bp, Homo sapiens
actatttaaagctca

SEQ ID NO: 959357 - DNA, 15 bp, Homo sapiens
ctatttaaagctcag

SEQ ID NO: 959358 - DNA, 15 bp, Homo sapiens
tatttaaagctcagt

SEQ ID NO: 959359 - DNA, 15 bp, Homo sapiens
atttaaagctcagta

SEQ ID NO: 959360 - DNA, 15 bp, Homo sapiens
tttaaagctcagtaa

SEQ ID NO: 959361 - DNA, 15 bp, Homo sapiens
ttaaagctcagtaaa

SEQ ID NO: 959362 - DNA, 15 bp, Homo sapiens
taaagctcagtaaat

SEQ ID NO: 959363 - DNA, 15 bp, Homo sapiens
aaagctcagtaaata

SEQ ID NO: 959364 - DNA, 15 bp, Homo sapiens
aagctcagtaaataa

SEQ ID NO: 959365 - DNA, 15 bp, Homo sapiens
agctcagtaaataaa

SEQ ID NO: 959366 - DNA, 15 bp, Homo sapiens
gctcagtaaataaaa

SEQ ID NO: 959367 - DNA, 15 bp, Homo sapiens
ctcagtaaataaaaa

SEQ ID NO: 959368 - DNA, 15 bp, Homo sapiens
tcagtaaataaaaac

SEQ ID NO: 959369 - DNA, 15 bp, Homo sapiens
cagtaaataaaaacc

SEQ ID NO: 959370 - DNA, 15 bp, Homo sapiens
agtaaataaaaacct

SEQ ID NO: 959371 - DNA, 15 bp, Homo sapiens
gtaaataaaaacctt

SEQ ID NO: 959372 - DNA, 15 bp, Homo sapiens
taaataaaaaccttt

SEQ ID NO: 959373 - DNA, 15 bp, Homo sapiens
aaataaaaaccttta

SEQ ID NO: 959374 - DNA, 15 bp, Homo sapiens
aataaaaacctttaa

SEQ ID NO: 959375 - DNA, 15 bp, Homo sapiens
ataaaaacctttaat

SEQ ID NO: 959376 - DNA, 15 bp, Homo sapiens
taaaaacctttaatg

SEQ ID NO: 959377 - DNA, 15 bp, Homo sapiens
aaaaacctttaatgt

SEQ ID NO: 959378 - DNA, 15 bp, Homo sapiens
aaaacctttaatgtg

SEQ ID NO: 959379 - DNA, 15 bp, Homo sapiens
aaacctttaatgtgt

SEQ ID NO: 959380 - DNA, 15 bp, Homo sapiens
aacctttaatgtgtt

SEQ ID NO: 959381 - DNA, 15 bp, Homo sapiens
acctttaatgtgtta

SEQ ID NO: 959382 - DNA, 15 bp, Homo sapiens
cctttaatgtgttat

SEQ ID NO: 959383 - DNA, 15 bp, Homo sapiens
ctttaatgtgttatg

SEQ ID NO: 959384 - DNA, 15 bp, Homo sapiens
tttaatgtgttatga

SEQ ID NO: 959385 - DNA, 15 bp, Homo sapiens
ttaatgtgttatgaa

SEQ ID NO: 959386 - DNA, 15 bp, Homo sapiens
taatgtgttatgaag

SEQ ID NO: 959387 - DNA, 15 bp, Homo sapiens
aatgtgttatgaagt

SEQ ID NO: 959388 - DNA, 15 bp, Homo sapiens
atgtgttatgaagtt

SEQ ID NO: 959389 - DNA, 15 bp, Homo sapiens
tgtgttatgaagttt

SEQ ID NO: 959390 - DNA, 15 bp, Homo sapiens
gtgttatgaagttta

SEQ ID NO: 959391 - DNA, 15 bp, Homo sapiens
tgttatgaagtttaa

SEQ ID NO: 959392 - DNA, 15 bp, Homo sapiens
gttatgaagtttaag

SEQ ID NO: 959393 - DNA, 15 bp, Homo sapiens
ttatgaagtttaagg

SEQ ID NO: 959394 - DNA, 15 bp, Homo sapiens
tatgaagtttaagga

SEQ ID NO: 959395 - DNA, 15 bp, Homo sapiens
atgaagtttaaggat

SEQ ID NO: 959396 - DNA, 15 bp, Homo sapiens
tgaagtttaaggatt

SEQ ID NO: 959397 - DNA, 15 bp, Homo sapiens
gaagtttaaggatta

SEQ ID NO: 959398 - DNA, 15 bp, Homo sapiens
aagtttaaggattac

SEQ ID NO: 959399 - DNA, 15 bp, Homo sapiens
agtttaaggattact

SEQ ID NO: 959400 - DNA, 15 bp, Homo sapiens
gtttaaggattactt

SEQ ID NO: 959401 - DNA, 15 bp, Homo sapiens
tttaaggattacttt

SEQ ID NO: 959402 - DNA, 15 bp, Homo sapiens
ttaaggattactttc

SEQ ID NO: 959403 - DNA, 15 bp, Homo sapiens
taaggattactttct

SEQ ID NO: 959404 - DNA, 15 bp, Homo sapiens
aaggattactttctt

SEQ ID NO: 959405 - DNA, 15 bp, Homo sapiens
aggattactttcttt

SEQ ID NO: 959406 - DNA, 15 bp, Homo sapiens
ggattactttctttt

SEQ ID NO: 959407 - DNA, 15 bp, Homo sapiens
gattactttcttttt

SEQ ID NO: 959408 - DNA, 15 bp, Homo sapiens
attactttcttttta

SEQ ID NO: 959409 - DNA, 15 bp, Homo sapiens
ttactttctttttag

SEQ ID NO: 959410 - DNA, 15 bp, Homo sapiens
tactttctttttagg

SEQ ID NO: 959411 - DNA, 15 bp, Homo sapiens
actttctttttaggc

SEQ ID NO: 959412 - DNA, 15 bp, Homo sapiens
ctttctttttaggcc

SEQ ID NO: 959413 - DNA, 15 bp, Homo sapiens
tttctttttaggcct

SEQ ID NO: 959414 - DNA, 15 bp, Homo sapiens
ttctttttaggcctt

SEQ ID NO: 959415 - DNA, 15 bp, Homo sapiens
tctttttaggcctta

SEQ ID NO: 959416 - DNA, 15 bp, Homo sapiens
ctttttaggccttaa

SEQ ID NO: 959417 - DNA, 15 bp, Homo sapiens
tttttaggccttaat

SEQ ID NO: 959418 - DNA, 15 bp, Homo sapiens
ttttaggccttaatt

SEQ ID NO: 959419 - DNA, 15 bp, Homo sapiens
tttaggccttaatta

SEQ ID NO: 959420 - DNA, 15 bp, Homo sapiens
ttaggccttaattag

SEQ ID NO: 959421 - DNA, 15 bp, Homo sapiens
taggccttaattagc

SEQ ID NO: 959422 - DNA, 15 bp, Homo sapiens
aggccttaattagct

SEQ ID NO: 959423 - DNA, 15 bp, Homo sapiens
ggccttaattagctc

SEQ ID NO: 959424 - DNA, 15 bp, Homo sapiens
gccttaattagctca

SEQ ID NO: 959425 - DNA, 15 bp, Homo sapiens
ccttaattagctcaa

SEQ ID NO: 959426 - DNA, 15 bp, Homo sapiens
cttaattagctcaac

SEQ ID NO: 959427 - DNA, 15 bp, Homo sapiens
ttaattagctcaaca

SEQ ID NO: 959428 - DNA, 15 bp, Homo sapiens
taattagctcaacaa

SEQ ID NO: 959429 - DNA, 15 bp, Homo sapiens
aattagctcaacaaa

SEQ ID NO: 959430 - DNA, 15 bp, Homo sapiens
attagctcaacaaat

SEQ ID NO: 959431 - DNA, 15 bp, Homo sapiens
ttagctcaacaaatt

SEQ ID NO: 959432 - DNA, 15 bp, Homo sapiens
tagctcaacaaatta

SEQ ID NO: 959433 - DNA, 15 bp, Homo sapiens
agctcaacaaattaa

SEQ ID NO: 959434 - DNA, 15 bp, Homo sapiens
gctcaacaaattaaa

SEQ ID NO: 959435 - DNA, 15 bp, Homo sapiens
ctcaacaaattaaat

SEQ ID NO: 959436 - DNA, 15 bp, Homo sapiens
tcaacaaattaaatt

SEQ ID NO: 959437 - DNA, 15 bp, Homo sapiens
caacaaattaaattg

SEQ ID NO: 959438 - DNA, 15 bp, Homo sapiens
aacaaattaaattgt

SEQ ID NO: 959439 - DNA, 15 bp, Homo sapiens
acaaattaaattgta

SEQ ID NO: 959440 - DNA, 15 bp, Homo sapiens
caaattaaattgtat

SEQ ID NO: 959441 - DNA, 15 bp, Homo sapiens
aaattaaattgtatt

SEQ ID NO: 959442 - DNA, 15 bp, Homo sapiens
aattaaattgtattc

SEQ ID NO: 959443 - DNA, 15 bp, Homo sapiens
attaaattgtattcc

SEQ ID NO: 959444 - DNA, 15 bp, Homo sapiens
ttaaattgtattccc

SEQ ID NO: 959445 - DNA, 15 bp, Homo sapiens
taaattgtattccct

SEQ ID NO: 959446 - DNA, 15 bp, Homo sapiens
aaattgtattccctt

SEQ ID NO: 959447 - DNA, 15 bp, Homo sapiens
aattgtattcccttt

SEQ ID NO: 959448 - DNA, 15 bp, Homo sapiens
attgtattccctttc

SEQ ID NO: 959449 - DNA, 15 bp, Homo sapiens
ttgtattccctttcc

SEQ ID NO: 959450 - DNA, 15 bp, Homo sapiens
tgtattccctttcca

SEQ ID NO: 959451 - DNA, 15 bp, Homo sapiens
gtattccctttccat

SEQ ID NO: 959452 - DNA, 15 bp, Homo sapiens
tattccctttccatt

SEQ ID NO: 959453 - DNA, 15 bp, Homo sapiens
attccctttccattt

SEQ ID NO: 959454 - DNA, 15 bp, Homo sapiens
ttccctttccatttt

SEQ ID NO: 959455 - DNA, 15 bp, Homo sapiens
tccctttccattttc

SEQ ID NO: 959456 - DNA, 15 bp, Homo sapiens
ccctttccattttcc

SEQ ID NO: 959457 - DNA, 15 bp, Homo sapiens
cctttccattttcct

SEQ ID NO: 959458 - DNA, 15 bp, Homo sapiens
ctttccattttcctt

SEQ ID NO: 959459 - DNA, 15 bp, Homo sapiens
tttccattttccttc

SEQ ID NO: 959460 - DNA, 15 bp, Homo sapiens
ttccattttccttca

SEQ ID NO: 959461 - DNA, 15 bp, Homo sapiens
tccattttccttcac

SEQ ID NO: 959462 - DNA, 15 bp, Homo sapiens
ccattttccttcaca

SEQ ID NO: 959463 - DNA, 15 bp, Homo sapiens
cattttccttcacag

SEQ ID NO: 959464 - DNA, 15 bp, Homo sapiens
attttccttcacagc

SEQ ID NO: 959465 - DNA, 15 bp, Homo sapiens
ttttccttcacagca

SEQ ID NO: 959466 - DNA, 15 bp, Homo sapiens
tttccttcacagcat

SEQ ID NO: 959467 - DNA, 15 bp, Homo sapiens
ttccttcacagcatc

SEQ ID NO: 959468 - DNA, 15 bp, Homo sapiens
tccttcacagcatca

SEQ ID NO: 959469 - DNA, 15 bp, Homo sapiens
ccttcacagcatcac

SEQ ID NO: 959470 - DNA, 15 bp, Homo sapiens
cttcacagcatcaca

SEQ ID NO: 959471 - DNA, 15 bp, Homo sapiens
ttcacagcatcacac

SEQ ID NO: 959472 - DNA, 15 bp, Homo sapiens
tcacagcatcacaca

SEQ ID NO: 959473 - DNA, 15 bp, Homo sapiens
cacagcatcacacaa

SEQ ID NO: 959474 - DNA, 15 bp, Homo sapiens
acagcatcacacaaa

SEQ ID NO: 959475 - DNA, 15 bp, Homo sapiens
cagcatcacacaaat

SEQ ID NO: 959476 - DNA, 15 bp, Homo sapiens
agcatcacacaaata

SEQ ID NO: 959477 - DNA, 15 bp, Homo sapiens
gcatcacacaaataa

SEQ ID NO: 959478 - DNA, 15 bp, Homo sapiens
catcacacaaataaa

SEQ ID NO: 959479 - DNA, 15 bp, Homo sapiens
atcacacaaataaat

SEQ ID NO: 959480 - DNA, 15 bp, Homo sapiens
tcacacaaataaata

SEQ ID NO: 959481 - DNA, 15 bp, Homo sapiens
cacacaaataaatac

SEQ ID NO: 959482 - DNA, 15 bp, Homo sapiens
acacaaataaataca

SEQ ID NO: 959483 - DNA, 15 bp, Homo sapiens
cacaaataaatacaa

SEQ ID NO: 959484 - DNA, 15 bp, Homo sapiens
acaaataaatacaaa

SEQ ID NO: 959485 - DNA, 15 bp, Homo sapiens
caaataaatacaaaa

SEQ ID NO: 959486 - DNA, 15 bp, Homo sapiens
aaataaatacaaaaa

SEQ ID NO: 959487 - DNA, 15 bp, Homo sapiens
aataaatacaaaaaa

SEQ ID NO: 959488 - DNA, 15 bp, Homo sapiens
ataaatacaaaaaaa

SEQ ID NO: 959489 - DNA, 15 bp, Homo sapiens
taaatacaaaaaaaa

SEQ ID NO: 959490 - DNA, 15 bp, Homo sapiens
aaatacaaaaaaaaa

SEQ ID NO: 959491 - DNA, 15 bp, Homo sapiens
aatacaaaaaaaaaa

SEQ ID NO: 959492 - DNA, 15 bp, Homo sapiens
atacaaaaaaaaaaa

SEQ ID NO: 959493 - DNA, 15 bp, Homo sapiens
tacaaaaaaaaaaaa

SEQ ID NO: 959494 - DNA, 15 bp, Homo sapiens
acaaaaaaaaaaaat

SEQ ID NO: 959495 - DNA, 15 bp, Homo sapiens
caaaaaaaaaaaatt

SEQ ID NO: 959496 - DNA, 15 bp, Homo sapiens
aaaaaaaaaaaatta

SEQ ID NO: 959497 - DNA, 15 bp, Homo sapiens
aaaaaaaaaaattaa

SEQ ID NO: 959498 - DNA, 15 bp, Homo sapiens
aaaaaaaaaattaaa

SEQ ID NO: 959499 - DNA, 15 bp, Homo sapiens
aaaaaaaaattaaaa

SEQ ID NO: 959500 - DNA, 15 bp, Homo sapiens
aaaaaaaattaaaat

SEQ ID NO: 959501 - DNA, 15 bp, Homo sapiens
aaaaaaattaaaata

SEQ ID NO: 959502 - DNA, 15 bp, Homo sapiens
aaaaaattaaaatag

SEQ ID NO: 959503 - DNA, 15 bp, Homo sapiens
aaaaattaaaatagt

SEQ ID NO: 959504 - DNA, 15 bp, Homo sapiens
aaaattaaaatagtt

SEQ ID NO: 959505 - DNA, 15 bp, Homo sapiens
aaattaaaatagttt

SEQ ID NO: 959506 - DNA, 15 bp, Homo sapiens
aattaaaatagtttt

SEQ ID NO: 959507 - DNA, 15 bp, Homo sapiens
attaaaatagttttt

SEQ ID NO: 959508 - DNA, 15 bp, Homo sapiens
ttaaaatagtttttc

SEQ ID NO: 959509 - DNA, 15 bp, Homo sapiens
taaaatagtttttca

SEQ ID NO: 959510 - DNA, 15 bp, Homo sapiens
aaaatagtttttcac

SEQ ID NO: 959511 - DNA, 15 bp, Homo sapiens
aaatagtttttcact

SEQ ID NO: 959512 - DNA, 15 bp, Homo sapiens
aatagtttttcactc

SEQ ID NO: 959513 - DNA, 15 bp, Homo sapiens
atagtttttcactca

SEQ ID NO: 959514 - DNA, 15 bp, Homo sapiens
tagtttttcactcaa

SEQ ID NO: 959515 - DNA, 15 bp, Homo sapiens
agtttttcactcaac

SEQ ID NO: 959516 - DNA, 15 bp, Homo sapiens
gtttttcactcaaca

SEQ ID NO: 959517 - DNA, 15 bp, Homo sapiens
tttttcactcaacaa

SEQ ID NO: 959518 - DNA, 15 bp, Homo sapiens
ttttcactcaacaaa

SEQ ID NO: 959519 - DNA, 15 bp, Homo sapiens
tttcactcaacaaac

SEQ ID NO: 959520 - DNA, 15 bp, Homo sapiens
ttcactcaacaaact

SEQ ID NO: 959521 - DNA, 15 bp, Homo sapiens
tcactcaacaaacta

SEQ ID NO: 959522 - DNA, 15 bp, Homo sapiens
cactcaacaaactag

SEQ ID NO: 959523 - DNA, 15 bp, Homo sapiens
actcaacaaactagg

SEQ ID NO: 959524 - DNA, 15 bp, Homo sapiens
ctcaacaaactaggc

SEQ ID NO: 959525 - DNA, 15 bp, Homo sapiens
tcaacaaactaggca

SEQ ID NO: 959526 - DNA, 15 bp, Homo sapiens
caacaaactaggcat

SEQ ID NO: 959527 - DNA, 15 bp, Homo sapiens
aacaaactaggcata

SEQ ID NO: 959528 - DNA, 15 bp, Homo sapiens
acaaactaggcatag

SEQ ID NO: 959529 - DNA, 15 bp, Homo sapiens
caaactaggcataga

SEQ ID NO: 959530 - DNA, 15 bp, Homo sapiens
aaactaggcatagaa

SEQ ID NO: 959531 - DNA, 15 bp, Homo sapiens
aactaggcatagaag

SEQ ID NO: 959532 - DNA, 15 bp, Homo sapiens
actaggcatagaagg

SEQ ID NO: 959533 - DNA, 15 bp, Homo sapiens
ctaggcatagaaggg

SEQ ID NO: 959534 - DNA, 15 bp, Homo sapiens
taggcatagaaggga

SEQ ID NO: 959535 - DNA, 15 bp, Homo sapiens
aggcatagaagggac

SEQ ID NO: 959536 - DNA, 15 bp, Homo sapiens
ggcatagaagggact

SEQ ID NO: 959537 - DNA, 15 bp, Homo sapiens
gcatagaagggactt

SEQ ID NO: 959538 - DNA, 15 bp, Homo sapiens
catagaagggactta

SEQ ID NO: 959539 - DNA, 15 bp, Homo sapiens
atagaagggacttac

SEQ ID NO: 959540 - DNA, 15 bp, Homo sapiens
tagaagggacttacc

SEQ ID NO: 959541 - DNA, 15 bp, Homo sapiens
agaagggacttacct

SEQ ID NO: 959542 - DNA, 15 bp, Homo sapiens
gaagggacttacctc

SEQ ID NO: 959543 - DNA, 15 bp, Homo sapiens
aagggacttacctca

SEQ ID NO: 959544 - DNA, 15 bp, Homo sapiens
agggacttacctcaa

SEQ ID NO: 959545 - DNA, 15 bp, Homo sapiens
gggacttacctcaaa

SEQ ID NO: 959546 - DNA, 15 bp, Homo sapiens
ggacttacctcaaaa

SEQ ID NO: 959547 - DNA, 15 bp, Homo sapiens
gacttacctcaaaat

SEQ ID NO: 959548 - DNA, 15 bp, Homo sapiens
acttacctcaaaata

SEQ ID NO: 959549 - DNA, 15 bp, Homo sapiens
cttacctcaaaataa

SEQ ID NO: 959550 - DNA, 15 bp, Homo sapiens
ttacctcaaaataat

SEQ ID NO: 959551 - DNA, 15 bp, Homo sapiens
tacctcaaaataata

SEQ ID NO: 959552 - DNA, 15 bp, Homo sapiens
acctcaaaataataa

SEQ ID NO: 959553 - DNA, 15 bp, Homo sapiens
cctcaaaataataaa

SEQ ID NO: 959554 - DNA, 15 bp, Homo sapiens
ctcaaaataataaaa

SEQ ID NO: 959555 - DNA, 15 bp, Homo sapiens
tcaaaataataaaag

SEQ ID NO: 959556 - DNA, 15 bp, Homo sapiens
caaaataataaaagt

SEQ ID NO: 959557 - DNA, 15 bp, Homo sapiens
aaaataataaaagtc

SEQ ID NO: 959558 - DNA, 15 bp, Homo sapiens
aaataataaaagtca

SEQ ID NO: 959559 - DNA, 15 bp, Homo sapiens
aataataaaagtcat

SEQ ID NO: 959560 - DNA, 15 bp, Homo sapiens
ataataaaagtcatg

SEQ ID NO: 959561 - DNA, 15 bp, Homo sapiens
taataaaagtcatgt

SEQ ID NO: 959562 - DNA, 15 bp, Homo sapiens
aataaaagtcatgtg

SEQ ID NO: 959563 - DNA, 15 bp, Homo sapiens
ataaaagtcatgtga

SEQ ID NO: 959564 - DNA, 15 bp, Homo sapiens
taaaagtcatgtgac

SEQ ID NO: 959565 - DNA, 15 bp, Homo sapiens
aaaagtcatgtgaca

SEQ ID NO: 959566 - DNA, 15 bp, Homo sapiens
aaagtcatgtgacaa

SEQ ID NO: 959567 - DNA, 15 bp, Homo sapiens
aagtcatgtgacaaa

SEQ ID NO: 959568 - DNA, 15 bp, Homo sapiens
agtcatgtgacaaac

SEQ ID NO: 959569 - DNA, 15 bp, Homo sapiens
gtcatgtgacaaacc

SEQ ID NO: 959570 - DNA, 15 bp, Homo sapiens
tcatgtgacaaaccc

SEQ ID NO: 959571 - DNA, 15 bp, Homo sapiens
catgtgacaaaccca

SEQ ID NO: 959572 - DNA, 15 bp, Homo sapiens
atgtgacaaacccac

SEQ ID NO: 959573 - DNA, 15 bp, Homo sapiens
tgtgacaaacccacg

SEQ ID NO: 959574 - DNA, 15 bp, Homo sapiens
gtgacaaacccacgg

SEQ ID NO: 959575 - DNA, 15 bp, Homo sapiens
tgacaaacccacggc

SEQ ID NO: 959576 - DNA, 15 bp, Homo sapiens
gacaaacccacggcc

SEQ ID NO: 959577 - DNA, 15 bp, Homo sapiens
acaaacccacggcca

SEQ ID NO: 959578 - DNA, 15 bp, Homo sapiens
caaacccacggccaa

SEQ ID NO: 959579 - DNA, 15 bp, Homo sapiens
aaacccacggccaat

SEQ ID NO: 959580 - DNA, 15 bp, Homo sapiens
aacccacggccaata

SEQ ID NO: 959581 - DNA, 15 bp, Homo sapiens
acccacggccaatat

SEQ ID NO: 959582 - DNA, 15 bp, Homo sapiens
cccacggccaatatc

SEQ ID NO: 959583 - DNA, 15 bp, Homo sapiens
ccacggccaatatca

SEQ ID NO: 959584 - DNA, 15 bp, Homo sapiens
cacggccaatatcat

SEQ ID NO: 959585 - DNA, 15 bp, Homo sapiens
acggccaatatcata

SEQ ID NO: 959586 - DNA, 15 bp, Homo sapiens
cggccaatatcatac

SEQ ID NO: 959587 - DNA, 15 bp, Homo sapiens
ggccaatatcatact

SEQ ID NO: 959588 - DNA, 15 bp, Homo sapiens
gccaatatcatactg

SEQ ID NO: 959589 - DNA, 15 bp, Homo sapiens
ccaatatcatactga

SEQ ID NO: 959590 - DNA, 15 bp, Homo sapiens
caatatcatactgaa

SEQ ID NO: 959591 - DNA, 15 bp, Homo sapiens
aatatcatactgaat

SEQ ID NO: 959592 - DNA, 15 bp, Homo sapiens
atatcatactgaatg

SEQ ID NO: 959593 - DNA, 15 bp, Homo sapiens
tatcatactgaatgg

SEQ ID NO: 959594 - DNA, 15 bp, Homo sapiens
atcatactgaatggg

SEQ ID NO: 959595 - DNA, 15 bp, Homo sapiens
tcatactgaatgggg

SEQ ID NO: 959596 - DNA, 15 bp, Homo sapiens
catactgaatgggga

SEQ ID NO: 959597 - DNA, 15 bp, Homo sapiens
atactgaatggggaa

SEQ ID NO: 959598 - DNA, 15 bp, Homo sapiens
tactgaatggggaaa

SEQ ID NO: 959599 - DNA, 15 bp, Homo sapiens
actgaatggggaaaa

SEQ ID NO: 959600 - DNA, 15 bp, Homo sapiens
ctgaatggggaaaag

SEQ ID NO: 959601 - DNA, 15 bp, Homo sapiens
tgaatggggaaaagc

SEQ ID NO: 959602 - DNA, 15 bp, Homo sapiens
gaatggggaaaagct

SEQ ID NO: 959603 - DNA, 15 bp, Homo sapiens
aatggggaaaagctg

SEQ ID NO: 959604 - DNA, 15 bp, Homo sapiens
atggggaaaagctga

SEQ ID NO: 959605 - DNA, 15 bp, Homo sapiens
tggggaaaagctgaa

SEQ ID NO: 959606 - DNA, 15 bp, Homo sapiens
ggggaaaagctgaaa

SEQ ID NO: 959607 - DNA, 15 bp, Homo sapiens
gggaaaagctgaaag

SEQ ID NO: 959608 - DNA, 15 bp, Homo sapiens
ggaaaagctgaaagc

SEQ ID NO: 959609 - DNA, 15 bp, Homo sapiens
gaaaagctgaaagca

SEQ ID NO: 959610 - DNA, 15 bp, Homo sapiens
aaaagctgaaagcac

SEQ ID NO: 959611 - DNA, 15 bp, Homo sapiens
aaagctgaaagcact

SEQ ID NO: 959612 - DNA, 15 bp, Homo sapiens
aagctgaaagcactc

SEQ ID NO: 959613 - DNA, 15 bp, Homo sapiens
agctgaaagcactcc

SEQ ID NO: 959614 - DNA, 15 bp, Homo sapiens
gctgaaagcactccc

SEQ ID NO: 959615 - DNA, 15 bp, Homo sapiens
ctgaaagcactcccc

SEQ ID NO: 959616 - DNA, 15 bp, Homo sapiens
tgaaagcactccccc

SEQ ID NO: 959617 - DNA, 15 bp, Homo sapiens
gaaagcactccccct

SEQ ID NO: 959618 - DNA, 15 bp, Homo sapiens
aaagcactccccctg

SEQ ID NO: 959619 - DNA, 15 bp, Homo sapiens
aagcactccccctga

SEQ ID NO: 959620 - DNA, 15 bp, Homo sapiens
agcactccccctgag

SEQ ID NO: 959621 - DNA, 15 bp, Homo sapiens
gcactccccctgaga

SEQ ID NO: 959622 - DNA, 15 bp, Homo sapiens
cactccccctgagaa

SEQ ID NO: 959623 - DNA, 15 bp, Homo sapiens
actccccctgagaac

SEQ ID NO: 959624 - DNA, 15 bp, Homo sapiens
ctccccctgagaact

SEQ ID NO: 959625 - DNA, 15 bp, Homo sapiens
tccccctgagaacta

SEQ ID NO: 959626 - DNA, 15 bp, Homo sapiens
ccccctgagaactag

SEQ ID NO: 959627 - DNA, 15 bp, Homo sapiens
cccctgagaactaga

SEQ ID NO: 959628 - DNA, 15 bp, Homo sapiens
ccctgagaactagaa

SEQ ID NO: 959629 - DNA, 15 bp, Homo sapiens
cctgagaactagaac

SEQ ID NO: 959630 - DNA, 15 bp, Homo sapiens
ctgagaactagaaca

SEQ ID NO: 959631 - DNA, 15 bp, Homo sapiens
tgagaactagaacaa

SEQ ID NO: 959632 - DNA, 15 bp, Homo sapiens
gagaactagaacaag

SEQ ID NO: 959633 - DNA, 15 bp, Homo sapiens
agaactagaacaaga

SEQ ID NO: 959634 - DNA, 15 bp, Homo sapiens
gaactagaacaagac

SEQ ID NO: 959635 - DNA, 15 bp, Homo sapiens
aactagaacaagaca

SEQ ID NO: 959636 - DNA, 15 bp, Homo sapiens
actagaacaagacaa

SEQ ID NO: 959637 - DNA, 15 bp, Homo sapiens
ctagaacaagacaag

SEQ ID NO: 959638 - DNA, 15 bp, Homo sapiens
tagaacaagacaagg

SEQ ID NO: 959639 - DNA, 15 bp, Homo sapiens
agaacaagacaagga

SEQ ID NO: 959640 - DNA, 15 bp, Homo sapiens
gaacaagacaaggaa

SEQ ID NO: 959641 - DNA, 15 bp, Homo sapiens
aacaagacaaggaag

SEQ ID NO: 959642 - DNA, 15 bp, Homo sapiens
acaagacaaggaagc

SEQ ID NO: 959643 - DNA, 15 bp, Homo sapiens
caagacaaggaagcc

SEQ ID NO: 959644 - DNA, 15 bp, Homo sapiens
aagacaaggaagccc

SEQ ID NO: 959645 - DNA, 15 bp, Homo sapiens
agacaaggaagccca

SEQ ID NO: 959646 - DNA, 15 bp, Homo sapiens
gacaaggaagcccac

SEQ ID NO: 959647 - DNA, 15 bp, Homo sapiens
acaaggaagcccaca

SEQ ID NO: 959648 - DNA, 15 bp, Homo sapiens
caaggaagcccacat

SEQ ID NO: 959649 - DNA, 15 bp, Homo sapiens
aaggaagcccacatt

SEQ ID NO: 959650 - DNA, 15 bp, Homo sapiens
aggaagcccacattg

SEQ ID NO: 959651 - DNA, 15 bp, Homo sapiens
ggaagcccacattgg

SEQ ID NO: 959652 - DNA, 15 bp, Homo sapiens
gaagcccacattggc

SEQ ID NO: 959653 - DNA, 15 bp, Homo sapiens
aagcccacattggca

SEQ ID NO: 959654 - DNA, 15 bp, Homo sapiens
agcccacattggcat

SEQ ID NO: 959655 - DNA, 15 bp, Homo sapiens
gcccacattggcatc

SEQ ID NO: 959656 - DNA, 15 bp, Homo sapiens
cccacattggcatcc

SEQ ID NO: 959657 - DNA, 15 bp, Homo sapiens
ccacattggcatcca

SEQ ID NO: 959658 - DNA, 15 bp, Homo sapiens
cacattggcatccaa

SEQ ID NO: 959659 - DNA, 15 bp, Homo sapiens
acattggcatccaaa

SEQ ID NO: 959660 - DNA, 15 bp, Homo sapiens
cattggcatccaaat

SEQ ID NO: 959661 - DNA, 15 bp, Homo sapiens
attggcatccaaatt

SEQ ID NO: 959662 - DNA, 15 bp, Homo sapiens
ttggcatccaaattg

SEQ ID NO: 959663 - DNA, 15 bp, Homo sapiens
tggcatccaaattgg

SEQ ID NO: 959664 - DNA, 15 bp, Homo sapiens
ggcatccaaattgga

SEQ ID NO: 959665 - DNA, 15 bp, Homo sapiens
gcatccaaattggaa

SEQ ID NO: 959666 - DNA, 15 bp, Homo sapiens
catccaaattggaaa

SEQ ID NO: 959667 - DNA, 15 bp, Homo sapiens
atccaaattggaaaa

SEQ ID NO: 959668 - DNA, 15 bp, Homo sapiens
tccaaattggaaaag

SEQ ID NO: 959669 - DNA, 15 bp, Homo sapiens
ccaaattggaaaaga

SEQ ID NO: 959670 - DNA, 15 bp, Homo sapiens
caaattggaaaagag

SEQ ID NO: 959671 - DNA, 15 bp, Homo sapiens
aaattggaaaagagg

SEQ ID NO: 959672 - DNA, 15 bp, Homo sapiens
aattggaaaagagga

SEQ ID NO: 959673 - DNA, 15 bp, Homo sapiens
attggaaaagaggaa

SEQ ID NO: 959674 - DNA, 15 bp, Homo sapiens
ttggaaaagaggaag

SEQ ID NO: 959675 - DNA, 15 bp, Homo sapiens
tggaaaagaggaagt

SEQ ID NO: 959676 - DNA, 15 bp, Homo sapiens
ggaaaagaggaagtc

SEQ ID NO: 959677 - DNA, 15 bp, Homo sapiens
gaaaagaggaagtca

SEQ ID NO: 959678 - DNA, 15 bp, Homo sapiens
aaaagaggaagtcaa

SEQ ID NO: 959679 - DNA, 15 bp, Homo sapiens
aaagaggaagtcaaa

SEQ ID NO: 959680 - DNA, 15 bp, Homo sapiens
aagaggaagtcaaac

SEQ ID NO: 959681 - DNA, 15 bp, Homo sapiens
agaggaagtcaaact

SEQ ID NO: 959682 - DNA, 15 bp, Homo sapiens
gaggaagtcaaacta

SEQ ID NO: 959683 - DNA, 15 bp, Homo sapiens
aggaagtcaaactat

SEQ ID NO: 959684 - DNA, 15 bp, Homo sapiens
ggaagtcaaactata

SEQ ID NO: 959685 - DNA, 15 bp, Homo sapiens
gaagtcaaactatag

SEQ ID NO: 959686 - DNA, 15 bp, Homo sapiens
aagtcaaactatagc

SEQ ID NO: 959687 - DNA, 15 bp, Homo sapiens
agtcaaactatagct

SEQ ID NO: 959688 - DNA, 15 bp, Homo sapiens
gtcaaactatagctg

SEQ ID NO: 959689 - DNA, 15 bp, Homo sapiens
tcaaactatagctgt

SEQ ID NO: 959690 - DNA, 15 bp, Homo sapiens
caaactatagctgtt

SEQ ID NO: 959691 - DNA, 15 bp, Homo sapiens
aaactatagctgttt

SEQ ID NO: 959692 - DNA, 15 bp, Homo sapiens
aactatagctgttta

SEQ ID NO: 959693 - DNA, 15 bp, Homo sapiens
actatagctgtttac

SEQ ID NO: 959694 - DNA, 15 bp, Homo sapiens
ctatagctgtttacc

SEQ ID NO: 959695 - DNA, 15 bp, Homo sapiens
tatagctgtttacca

SEQ ID NO: 959696 - DNA, 15 bp, Homo sapiens
atagctgtttaccaa

SEQ ID NO: 959697 - DNA, 15 bp, Homo sapiens
tagctgtttaccaat

SEQ ID NO: 959698 - DNA, 15 bp, Homo sapiens
agctgtttaccaatg

SEQ ID NO: 959699 - DNA, 15 bp, Homo sapiens
gctgtttaccaatga

SEQ ID NO: 959700 - DNA, 15 bp, Homo sapiens
ctgtttaccaatgac

SEQ ID NO: 959701 - DNA, 15 bp, Homo sapiens
tgtttaccaatgaca

SEQ ID NO: 959702 - DNA, 15 bp, Homo sapiens
gtttaccaatgacat

SEQ ID NO: 959703 - DNA, 15 bp, Homo sapiens
tttaccaatgacata

SEQ ID NO: 959704 - DNA, 15 bp, Homo sapiens
ttaccaatgacataa

SEQ ID NO: 959705 - DNA, 15 bp, Homo sapiens
taccaatgacataat

SEQ ID NO: 959706 - DNA, 15 bp, Homo sapiens
accaatgacataatc

SEQ ID NO: 959707 - DNA, 15 bp, Homo sapiens
ccaatgacataatca

SEQ ID NO: 959708 - DNA, 15 bp, Homo sapiens
caatgacataatcat

SEQ ID NO: 959709 - DNA, 15 bp, Homo sapiens
aatgacataatcata

SEQ ID NO: 959710 - DNA, 15 bp, Homo sapiens
atgacataatcatat

SEQ ID NO: 959711 - DNA, 15 bp, Homo sapiens
tgacataatcatata

SEQ ID NO: 959712 - DNA, 15 bp, Homo sapiens
gacataatcatatac

SEQ ID NO: 959713 - DNA, 15 bp, Homo sapiens
acataatcatatacc

SEQ ID NO: 959714 - DNA, 15 bp, Homo sapiens
cataatcatatacct

SEQ ID NO: 959715 - DNA, 15 bp, Homo sapiens
ataatcatataccta

SEQ ID NO: 959716 - DNA, 15 bp, Homo sapiens
taatcatatacctag

SEQ ID NO: 959717 - DNA, 15 bp, Homo sapiens
aatcatatacctaga

SEQ ID NO: 959718 - DNA, 15 bp, Homo sapiens
atcatatacctagaa

SEQ ID NO: 959719 - DNA, 15 bp, Homo sapiens
tcatatacctagaaa

SEQ ID NO: 959720 - DNA, 15 bp, Homo sapiens
catatacctagaaaa

SEQ ID NO: 959721 - DNA, 15 bp, Homo sapiens
atatacctagaaaac

SEQ ID NO: 959722 - DNA, 15 bp, Homo sapiens
tatacctagaaaacc

SEQ ID NO: 959723 - DNA, 15 bp, Homo sapiens
atacctagaaaaccc

SEQ ID NO: 959724 - DNA, 15 bp, Homo sapiens
tacctagaaaaccca

SEQ ID NO: 959725 - DNA, 15 bp, Homo sapiens
acctagaaaacccaa

SEQ ID NO: 959726 - DNA, 15 bp, Homo sapiens
cctagaaaacccaag

SEQ ID NO: 959727 - DNA, 15 bp, Homo sapiens
ctagaaaacccaaga

SEQ ID NO: 959728 - DNA, 15 bp, Homo sapiens
tagaaaacccaagag

SEQ ID NO: 959729 - DNA, 15 bp, Homo sapiens
agaaaacccaagagt

SEQ ID NO: 959730 - DNA, 15 bp, Homo sapiens
gaaaacccaagagtt

SEQ ID NO: 959731 - DNA, 15 bp, Homo sapiens
aaaacccaagagttc

SEQ ID NO: 959732 - DNA, 15 bp, Homo sapiens
aaacccaagagttct

SEQ ID NO: 959733 - DNA, 15 bp, Homo sapiens
aacccaagagttctc

SEQ ID NO: 959734 - DNA, 15 bp, Homo sapiens
acccaagagttctcc

SEQ ID NO: 959735 - DNA, 15 bp, Homo sapiens
cccaagagttctcca

SEQ ID NO: 959736 - DNA, 15 bp, Homo sapiens
ccaagagttctccaa

SEQ ID NO: 959737 - DNA, 15 bp, Homo sapiens
caagagttctccaaa

SEQ ID NO: 959738 - DNA, 15 bp, Homo sapiens
aagagttctccaaaa

SEQ ID NO: 959739 - DNA, 15 bp, Homo sapiens
agagttctccaaaaa

SEQ ID NO: 959740 - DNA, 15 bp, Homo sapiens
gagttctccaaaaaa

SEQ ID NO: 959741 - DNA, 15 bp, Homo sapiens
agttctccaaaaaat

SEQ ID NO: 959742 - DNA, 15 bp, Homo sapiens
gttctccaaaaaatt

SEQ ID NO: 959743 - DNA, 15 bp, Homo sapiens
ttctccaaaaaattc

SEQ ID NO: 959744 - DNA, 15 bp, Homo sapiens
tctccaaaaaattcc

SEQ ID NO: 959745 - DNA, 15 bp, Homo sapiens
ctccaaaaaattcct

SEQ ID NO: 959746 - DNA, 15 bp, Homo sapiens
tccaaaaaattccta

SEQ ID NO: 959747 - DNA, 15 bp, Homo sapiens
ccaaaaaattcctag

SEQ ID NO: 959748 - DNA, 15 bp, Homo sapiens
caaaaaattcctaga

SEQ ID NO: 959749 - DNA, 15 bp, Homo sapiens
aaaaaattcctagat

SEQ ID NO: 959750 - DNA, 15 bp, Homo sapiens
aaaaattcctagatt

SEQ ID NO: 959751 - DNA, 15 bp, Homo sapiens
aaaattcctagattt

SEQ ID NO: 959752 - DNA, 15 bp, Homo sapiens
aaattcctagatttc

SEQ ID NO: 959753 - DNA, 15 bp, Homo sapiens
aattcctagatttca

SEQ ID NO: 959754 - DNA, 15 bp, Homo sapiens
attcctagatttcag

SEQ ID NO: 959755 - DNA, 15 bp, Homo sapiens
ttcctagatttcagc

SEQ ID NO: 959756 - DNA, 15 bp, Homo sapiens
tcctagatttcagcc

SEQ ID NO: 959757 - DNA, 15 bp, Homo sapiens
cctagatttcagcca

SEQ ID NO: 959758 - DNA, 15 bp, Homo sapiens
ctagatttcagccag

SEQ ID NO: 959759 - DNA, 15 bp, Homo sapiens
tagatttcagccagg

SEQ ID NO: 959760 - DNA, 15 bp, Homo sapiens
agatttcagccaggt

SEQ ID NO: 959761 - DNA, 15 bp, Homo sapiens
gatttcagccaggtg

SEQ ID NO: 959762 - DNA, 15 bp, Homo sapiens
atttcagccaggtgt

SEQ ID NO: 959763 - DNA, 15 bp, Homo sapiens
tttcagccaggtgtg

SEQ ID NO: 959764 - DNA, 15 bp, Homo sapiens
ttcagccaggtgtgg

SEQ ID NO: 959765 - DNA, 15 bp, Homo sapiens
tcagccaggtgtggt

SEQ ID NO: 959766 - DNA, 15 bp, Homo sapiens
cagccaggtgtggtg

SEQ ID NO: 959767 - DNA, 15 bp, Homo sapiens
agccaggtgtggtgg

SEQ ID NO: 959768 - DNA, 15 bp, Homo sapiens
ggtgtggtggctcat

SEQ ID NO: 959769 - DNA, 15 bp, Homo sapiens
gtgtggtggctcatt

SEQ ID NO: 959770 - DNA, 15 bp, Homo sapiens
tgtggtggctcattt

SEQ ID NO: 959771 - DNA, 15 bp, Homo sapiens
gtggtggctcatttc

SEQ ID NO: 959772 - DNA, 15 bp, Homo sapiens
tggtggctcatttct

SEQ ID NO: 959773 - DNA, 15 bp, Homo sapiens
ggtggctcatttcta

SEQ ID NO: 959774 - DNA, 15 bp, Homo sapiens
gtggctcatttctat

SEQ ID NO: 959775 - DNA, 15 bp, Homo sapiens
tggctcatttctata

SEQ ID NO: 959776 - DNA, 15 bp, Homo sapiens
ggctcatttctataa

SEQ ID NO: 959777 - DNA, 15 bp, Homo sapiens
gctcatttctataat

SEQ ID NO: 959778 - DNA, 15 bp, Homo sapiens
ctcatttctataatc

SEQ ID NO: 959779 - DNA, 15 bp, Homo sapiens
tcatttctataatcc

SEQ ID NO: 959780 - DNA, 15 bp, Homo sapiens
catttctataatccc

SEQ ID NO: 959781 - DNA, 15 bp, Homo sapiens
atttctataatccca

SEQ ID NO: 959782 - DNA, 15 bp, Homo sapiens
tttctataatcccag

SEQ ID NO: 959783 - DNA, 15 bp, Homo sapiens
ttctataatcccagc

SEQ ID NO: 959784 - DNA, 15 bp, Homo sapiens
tctataatcccagca

SEQ ID NO: 959785 - DNA, 15 bp, Homo sapiens
ccagcactttgggaa

SEQ ID NO: 959786 - DNA, 15 bp, Homo sapiens
cagcactttgggaag

SEQ ID NO: 959787 - DNA, 15 bp, Homo sapiens
agcactttgggaagc

SEQ ID NO: 959788 - DNA, 15 bp, Homo sapiens
gcactttgggaagcc

SEQ ID NO: 959789 - DNA, 15 bp, Homo sapiens
cactttgggaagccg

SEQ ID NO: 959790 - DNA, 15 bp, Homo sapiens
actttgggaagccga

SEQ ID NO: 959791 - DNA, 15 bp, Homo sapiens
ctttgggaagccgag

SEQ ID NO: 959792 - DNA, 15 bp, Homo sapiens
tttgggaagccgagg

SEQ ID NO: 959793 - DNA, 15 bp, Homo sapiens
ttgggaagccgaggc

SEQ ID NO: 959794 - DNA, 15 bp, Homo sapiens
tgggaagccgaggca

SEQ ID NO: 959795 - DNA, 15 bp, Homo sapiens
gggaagccgaggcag

SEQ ID NO: 959796 - DNA, 15 bp, Homo sapiens
ggaagccgaggcagg

SEQ ID NO: 959797 - DNA, 15 bp, Homo sapiens
gaagccgaggcagga

SEQ ID NO: 959798 - DNA, 15 bp, Homo sapiens
aagccgaggcaggag

SEQ ID NO: 959799 - DNA, 15 bp, Homo sapiens
agccgaggcaggagg

SEQ ID NO: 959800 - DNA, 15 bp, Homo sapiens
gccgaggcaggagga

SEQ ID NO: 959801 - DNA, 15 bp, Homo sapiens
ccgaggcaggaggat

SEQ ID NO: 959802 - DNA, 15 bp, Homo sapiens
cgaggcaggaggatc

SEQ ID NO: 959803 - DNA, 15 bp, Homo sapiens
gaggcaggaggatca

SEQ ID NO: 959804 - DNA, 15 bp, Homo sapiens
aggcaggaggatcac

SEQ ID NO: 959805 - DNA, 15 bp, Homo sapiens
ggcaggaggatcacc

SEQ ID NO: 959806 - DNA, 15 bp, Homo sapiens
gcaggaggatcaccc

SEQ ID NO: 959807 - DNA, 15 bp, Homo sapiens
caggaggatcacccg

SEQ ID NO: 959808 - DNA, 15 bp, Homo sapiens
aggaggatcacccga

SEQ ID NO: 959809 - DNA, 15 bp, Homo sapiens
ggaggatcacccgag

SEQ ID NO: 959810 - DNA, 15 bp, Homo sapiens
gaggatcacccgaga

SEQ ID NO: 959811 - DNA, 15 bp, Homo sapiens
aggatcacccgagat

SEQ ID NO: 959812 - DNA, 15 bp, Homo sapiens
ggatcacccgagatt

SEQ ID NO: 959813 - DNA, 15 bp, Homo sapiens
gatcacccgagattg

SEQ ID NO: 959814 - DNA, 15 bp, Homo sapiens
atcacccgagattgg

SEQ ID NO: 959815 - DNA, 15 bp, Homo sapiens
tcacccgagattggg

SEQ ID NO: 959816 - DNA, 15 bp, Homo sapiens
cacccgagattggga

SEQ ID NO: 959817 - DNA, 15 bp, Homo sapiens
acccgagattgggag

SEQ ID NO: 959818 - DNA, 15 bp, Homo sapiens
cccgagattgggagt

SEQ ID NO: 959819 - DNA, 15 bp, Homo sapiens
ccgagattgggagtt

SEQ ID NO: 959820 - DNA, 15 bp, Homo sapiens
cgagattgggagttc

SEQ ID NO: 959821 - DNA, 15 bp, Homo sapiens
gagattgggagttca

SEQ ID NO: 959822 - DNA, 15 bp, Homo sapiens
agattgggagttcaa

SEQ ID NO: 959823 - DNA, 15 bp, Homo sapiens
gattgggagttcaag

SEQ ID NO: 959824 - DNA, 15 bp, Homo sapiens
attgggagttcaaga

SEQ ID NO: 959825 - DNA, 15 bp, Homo sapiens
ttgggagttcaagac

SEQ ID NO: 959826 - DNA, 15 bp, Homo sapiens
tgggagttcaagacc

SEQ ID NO: 959827 - DNA, 15 bp, Homo sapiens
gggagttcaagacca

SEQ ID NO: 959828 - DNA, 15 bp, Homo sapiens
ggagttcaagaccag

SEQ ID NO: 959829 - DNA, 15 bp, Homo sapiens
gagttcaagaccagc

SEQ ID NO: 959830 - DNA, 15 bp, Homo sapiens
agttcaagaccagcc

SEQ ID NO: 959831 - DNA, 15 bp, Homo sapiens
gttcaagaccagcct

SEQ ID NO: 959832 - DNA, 15 bp, Homo sapiens
ttcaagaccagcctg

SEQ ID NO: 959833 - DNA, 15 bp, Homo sapiens
tcaagaccagcctgg

SEQ ID NO: 959834 - DNA, 15 bp, Homo sapiens
caagaccagcctggc

SEQ ID NO: 959835 - DNA, 15 bp, Homo sapiens
aagaccagcctggcc

SEQ ID NO: 959836 - DNA, 15 bp, Homo sapiens
agaccagcctggcca

SEQ ID NO: 959837 - DNA, 15 bp, Homo sapiens
gaccagcctggccaa

SEQ ID NO: 959838 - DNA, 15 bp, Homo sapiens
accagcctggccaac

SEQ ID NO: 959839 - DNA, 15 bp, Homo sapiens
cagcctggccaacaa

SEQ ID NO: 959840 - DNA, 15 bp, Homo sapiens
agcctggccaacaaa

SEQ ID NO: 959841 - DNA, 15 bp, Homo sapiens
gcctggccaacaaag

SEQ ID NO: 959842 - DNA, 15 bp, Homo sapiens
cctggccaacaaagt

SEQ ID NO: 959843 - DNA, 15 bp, Homo sapiens
ctggccaacaaagtg

SEQ ID NO: 959844 - DNA, 15 bp, Homo sapiens
tggccaacaaagtga

SEQ ID NO: 959845 - DNA, 15 bp, Homo sapiens
ggccaacaaagtgaa

SEQ ID NO: 959846 - DNA, 15 bp, Homo sapiens
gccaacaaagtgaaa

SEQ ID NO: 959847 - DNA, 15 bp, Homo sapiens
ccaacaaagtgaaac

SEQ ID NO: 959848 - DNA, 15 bp, Homo sapiens
caacaaagtgaaacc

SEQ ID NO: 959849 - DNA, 15 bp, Homo sapiens
aacaaagtgaaaccc

SEQ ID NO: 959850 - DNA, 15 bp, Homo sapiens
acaaagtgaaacccc

SEQ ID NO: 959851 - DNA, 15 bp, Homo sapiens
caaagtgaaacccca

SEQ ID NO: 959852 - DNA, 15 bp, Homo sapiens
aaagtgaaaccccat

SEQ ID NO: 959853 - DNA, 15 bp, Homo sapiens
aagtgaaaccccatc

SEQ ID NO: 959854 - DNA, 15 bp, Homo sapiens
agtgaaaccccatct

SEQ ID NO: 959855 - DNA, 15 bp, Homo sapiens
atctctactaaaaaa

SEQ ID NO: 959856 - DNA, 15 bp, Homo sapiens
tctctactaaaaaat

SEQ ID NO: 959857 - DNA, 15 bp, Homo sapiens
ctctactaaaaaata

SEQ ID NO: 959858 - DNA, 15 bp, Homo sapiens
tctactaaaaaatat

SEQ ID NO: 959859 - DNA, 15 bp, Homo sapiens
ctactaaaaaatata

SEQ ID NO: 959860 - DNA, 15 bp, Homo sapiens
tactaaaaaatataa

SEQ ID NO: 959861 - DNA, 15 bp, Homo sapiens
actaaaaaatataaa

SEQ ID NO: 959862 - DNA, 15 bp, Homo sapiens
ctaaaaaatataaaa

SEQ ID NO: 959863 - DNA, 15 bp, Homo sapiens
taaaaaatataaaaa

SEQ ID NO: 959864 - DNA, 15 bp, Homo sapiens
aaaaaatataaaaat

SEQ ID NO: 959865 - DNA, 15 bp, Homo sapiens
aaaaatataaaaatt

SEQ ID NO: 959866 - DNA, 15 bp, Homo sapiens
aaaatataaaaatta

SEQ ID NO: 959867 - DNA, 15 bp, Homo sapiens
aaatataaaaattag

SEQ ID NO: 959868 - DNA, 15 bp, Homo sapiens
aatataaaaattagc

SEQ ID NO: 959869 - DNA, 15 bp, Homo sapiens
atataaaaattagct

SEQ ID NO: 959870 - DNA, 15 bp, Homo sapiens
tataaaaattagctg

SEQ ID NO: 959871 - DNA, 15 bp, Homo sapiens
ataaaaattagctga

SEQ ID NO: 959872 - DNA, 15 bp, Homo sapiens
taaaaattagctgag

SEQ ID NO: 959873 - DNA, 15 bp, Homo sapiens
aaaaattagctgagc

SEQ ID NO: 959874 - DNA, 15 bp, Homo sapiens
aaaattagctgagca

SEQ ID NO: 959875 - DNA, 15 bp, Homo sapiens
aaattagctgagcat

SEQ ID NO: 959876 - DNA, 15 bp, Homo sapiens
aattagctgagcatg

SEQ ID NO: 959877 - DNA, 15 bp, Homo sapiens
attagctgagcatgg

SEQ ID NO: 959878 - DNA, 15 bp, Homo sapiens
ttagctgagcatggt

SEQ ID NO: 959879 - DNA, 15 bp, Homo sapiens
tagctgagcatggtg

SEQ ID NO: 959880 - DNA, 15 bp, Homo sapiens
agctgagcatggtgg

SEQ ID NO: 959881 - DNA, 15 bp, Homo sapiens
gctgagcatggtggt

SEQ ID NO: 959882 - DNA, 15 bp, Homo sapiens
ctgagcatggtggtg

SEQ ID NO: 959883 - DNA, 15 bp, Homo sapiens
tgagcatggtggtgc

SEQ ID NO: 959884 - DNA, 15 bp, Homo sapiens
gagcatggtggtgca

SEQ ID NO: 959885 - DNA, 15 bp, Homo sapiens
agcatggtggtgcat

SEQ ID NO: 959886 - DNA, 15 bp, Homo sapiens
gcatggtggtgcatg

SEQ ID NO: 959887 - DNA, 15 bp, Homo sapiens
catggtggtgcatgc

SEQ ID NO: 959888 - DNA, 15 bp, Homo sapiens
atggtggtgcatgcc

SEQ ID NO: 959889 - DNA, 15 bp, Homo sapiens
tggtggtgcatgcct

SEQ ID NO: 959890 - DNA, 15 bp, Homo sapiens
ggtggtgcatgcctg

SEQ ID NO: 959891 - DNA, 15 bp, Homo sapiens
gtggtgcatgcctgt

SEQ ID NO: 959892 - DNA, 15 bp, Homo sapiens
tggtgcatgcctgta

SEQ ID NO: 959893 - DNA, 15 bp, Homo sapiens
ggtgcatgcctgtaa

SEQ ID NO: 959894 - DNA, 15 bp, Homo sapiens
gtgcatgcctgtaat

SEQ ID NO: 959895 - DNA, 15 bp, Homo sapiens
tgcatgcctgtaatc

SEQ ID NO: 959896 - DNA, 15 bp, Homo sapiens
gcatgcctgtaatcc

SEQ ID NO: 959897 - DNA, 15 bp, Homo sapiens
tcccagctacttgga

SEQ ID NO: 959898 - DNA, 15 bp, Homo sapiens
cccagctacttggaa

SEQ ID NO: 959899 - DNA, 15 bp, Homo sapiens
ccagctacttggaaa

SEQ ID NO: 959900 - DNA, 15 bp, Homo sapiens
cagctacttggaaag

SEQ ID NO: 959901 - DNA, 15 bp, Homo sapiens
agctacttggaaagc

SEQ ID NO: 959902 - DNA, 15 bp, Homo sapiens
gctacttggaaagct

SEQ ID NO: 959903 - DNA, 15 bp, Homo sapiens
ctacttggaaagctg

SEQ ID NO: 959904 - DNA, 15 bp, Homo sapiens
tacttggaaagctga

SEQ ID NO: 959905 - DNA, 15 bp, Homo sapiens
acttggaaagctgag

SEQ ID NO: 959906 - DNA, 15 bp, Homo sapiens
cttggaaagctgagg

SEQ ID NO: 959907 - DNA, 15 bp, Homo sapiens
ttggaaagctgaggc

SEQ ID NO: 959908 - DNA, 15 bp, Homo sapiens
tggaaagctgaggca

SEQ ID NO: 959909 - DNA, 15 bp, Homo sapiens
ggaaagctgaggcag

SEQ ID NO: 959910 - DNA, 15 bp, Homo sapiens
gaaagctgaggcagg

SEQ ID NO: 959911 - DNA, 15 bp, Homo sapiens
aaagctgaggcagga

SEQ ID NO: 959912 - DNA, 15 bp, Homo sapiens
aagctgaggcaggag

SEQ ID NO: 959913 - DNA, 15 bp, Homo sapiens
agctgaggcaggaga

SEQ ID NO: 959914 - DNA, 15 bp, Homo sapiens
caggagaattgctta

SEQ ID NO: 959915 - DNA, 15 bp, Homo sapiens
aggagaattgcttaa

SEQ ID NO: 959916 - DNA, 15 bp, Homo sapiens
ggagaattgcttaaa

SEQ ID NO: 959917 - DNA, 15 bp, Homo sapiens
gagaattgcttaaac

SEQ ID NO: 959918 - DNA, 15 bp, Homo sapiens
agaattgcttaaacc

SEQ ID NO: 959919 - DNA, 15 bp, Homo sapiens
gaattgcttaaaccc

SEQ ID NO: 959920 - DNA, 15 bp, Homo sapiens
aattgcttaaaccca

SEQ ID NO: 959921 - DNA, 15 bp, Homo sapiens
attgcttaaacccag

SEQ ID NO: 959922 - DNA, 15 bp, Homo sapiens
ttgcttaaacccagg

SEQ ID NO: 959923 - DNA, 15 bp, Homo sapiens
tgcttaaacccagga

SEQ ID NO: 959924 - DNA, 15 bp, Homo sapiens
gcttaaacccaggag

SEQ ID NO: 959925 - DNA, 15 bp, Homo sapiens
cttaaacccaggagg

SEQ ID NO: 959926 - DNA, 15 bp, Homo sapiens
ttaaacccaggaggt

SEQ ID NO: 959927 - DNA, 15 bp, Homo sapiens
taaacccaggaggtg

SEQ ID NO: 959928 - DNA, 15 bp, Homo sapiens
aaacccaggaggtgg

SEQ ID NO: 959929 - DNA, 15 bp, Homo sapiens
cccaggaggtggagg

SEQ ID NO: 959930 - DNA, 15 bp, Homo sapiens
ccaggaggtggaggt

SEQ ID NO: 959931 - DNA, 15 bp, Homo sapiens
caggaggtggaggtt

SEQ ID NO: 959932 - DNA, 15 bp, Homo sapiens
aggaggtggaggttg

SEQ ID NO: 959933 - DNA, 15 bp, Homo sapiens
aggttgcagtgagct

SEQ ID NO: 959934 - DNA, 15 bp, Homo sapiens
ggttgcagtgagctg

SEQ ID NO: 959935 - DNA, 15 bp, Homo sapiens
gttgcagtgagctga

SEQ ID NO: 959936 - DNA, 15 bp, Homo sapiens
ttgcagtgagctgag

SEQ ID NO: 959937 - DNA, 15 bp, Homo sapiens
tgcagtgagctgaga

SEQ ID NO: 959938 - DNA, 15 bp, Homo sapiens
gcagtgagctgagat

SEQ ID NO: 959939 - DNA, 15 bp, Homo sapiens
cagtgagctgagatc

SEQ ID NO: 959940 - DNA, 15 bp, Homo sapiens
agtgagctgagatcg

SEQ ID NO: 959941 - DNA, 15 bp, Homo sapiens
gtgagctgagatcgc

SEQ ID NO: 959942 - DNA, 15 bp, Homo sapiens
tgagctgagatcgca

SEQ ID NO: 959943 - DNA, 15 bp, Homo sapiens
gagctgagatcgcac

SEQ ID NO: 959944 - DNA, 15 bp, Homo sapiens
agctgagatcgcacc

SEQ ID NO: 959945 - DNA, 15 bp, Homo sapiens
gctgagatcgcacca

SEQ ID NO: 959946 - DNA, 15 bp, Homo sapiens
ctgagatcgcaccac

SEQ ID NO: 959947 - DNA, 15 bp, Homo sapiens
tgagatcgcaccact

SEQ ID NO: 959948 - DNA, 15 bp, Homo sapiens
gagatcgcaccacta

SEQ ID NO: 959949 - DNA, 15 bp, Homo sapiens
agatcgcaccactac

SEQ ID NO: 959950 - DNA, 15 bp, Homo sapiens
gatcgcaccactacg

SEQ ID NO: 959951 - DNA, 15 bp, Homo sapiens
atcgcaccactacgc

SEQ ID NO: 959952 - DNA, 15 bp, Homo sapiens
tcgcaccactacgct

SEQ ID NO: 959953 - DNA, 15 bp, Homo sapiens
cgcaccactacgctc

SEQ ID NO: 959954 - DNA, 15 bp, Homo sapiens
gcaccactacgctct

SEQ ID NO: 959955 - DNA, 15 bp, Homo sapiens
caccactacgctcta

SEQ ID NO: 959956 - DNA, 15 bp, Homo sapiens
accactacgctctag

SEQ ID NO: 959957 - DNA, 15 bp, Homo sapiens
ccactacgctctagc

SEQ ID NO: 959958 - DNA, 15 bp, Homo sapiens
cactacgctctagcc

SEQ ID NO: 959959 - DNA, 15 bp, Homo sapiens
actacgctctagcct

SEQ ID NO: 959960 - DNA, 15 bp, Homo sapiens
ctacgctctagcctg

SEQ ID NO: 959961 - DNA, 15 bp, Homo sapiens
tacgctctagcctgg

SEQ ID NO: 959962 - DNA, 15 bp, Homo sapiens
acgctctagcctggg

SEQ ID NO: 959963 - DNA, 15 bp, Homo sapiens
cgctctagcctgggg

SEQ ID NO: 959964 - DNA, 15 bp, Homo sapiens
gctctagcctggggg

SEQ ID NO: 959965 - DNA, 15 bp, Homo sapiens
ctctagcctggggga

SEQ ID NO: 959966 - DNA, 15 bp, Homo sapiens
tctagcctgggggac

SEQ ID NO: 959967 - DNA, 15 bp, Homo sapiens
ctagcctgggggaca

SEQ ID NO: 959968 - DNA, 15 bp, Homo sapiens
tagcctgggggacag

SEQ ID NO: 959969 - DNA, 15 bp, Homo sapiens
agcctgggggacaga

SEQ ID NO: 959970 - DNA, 15 bp, Homo sapiens
gcctgggggacagag

SEQ ID NO: 959971 - DNA, 15 bp, Homo sapiens
cctgggggacagagc

SEQ ID NO: 959972 - DNA, 15 bp, Homo sapiens
ctgggggacagagca

SEQ ID NO: 959973 - DNA, 15 bp, Homo sapiens
tgggggacagagcaa

SEQ ID NO: 959974 - DNA, 15 bp, Homo sapiens
gggggacagagcaag

SEQ ID NO: 959975 - DNA, 15 bp, Homo sapiens
ggggacagagcaaga

SEQ ID NO: 959976 - DNA, 15 bp, Homo sapiens
gggacagagcaagac

SEQ ID NO: 959977 - DNA, 15 bp, Homo sapiens
ggacagagcaagact

SEQ ID NO: 959978 - DNA, 15 bp, Homo sapiens
gacagagcaagactc

SEQ ID NO: 959979 - DNA, 15 bp, Homo sapiens
acagagcaagactct

SEQ ID NO: 959980 - DNA, 15 bp, Homo sapiens
cagagcaagactctg

SEQ ID NO: 959981 - DNA, 15 bp, Homo sapiens
agagcaagactctgt

SEQ ID NO: 959982 - DNA, 15 bp, Homo sapiens
gagcaagactctgtc

SEQ ID NO: 959983 - DNA, 15 bp, Homo sapiens
agcaagactctgtct

SEQ ID NO: 959984 - DNA, 15 bp, Homo sapiens
gcaagactctgtctt

SEQ ID NO: 959985 - DNA, 15 bp, Homo sapiens
caagactctgtctta

SEQ ID NO: 959986 - DNA, 15 bp, Homo sapiens
aagactctgtcttaa

SEQ ID NO: 959987 - DNA, 15 bp, Homo sapiens
agactctgtcttaaa

SEQ ID NO: 959988 - DNA, 15 bp, Homo sapiens
gactctgtcttaaaa

SEQ ID NO: 959989 - DNA, 15 bp, Homo sapiens
actctgtcttaaaaa

SEQ ID NO: 959990 - DNA, 15 bp, Homo sapiens
ctctgtcttaaaaaa

SEQ ID NO: 959991 - DNA, 15 bp, Homo sapiens
tctgtcttaaaaaag

SEQ ID NO: 959992 - DNA, 15 bp, Homo sapiens
ctgtcttaaaaaaga

SEQ ID NO: 959993 - DNA, 15 bp, Homo sapiens
tgtcttaaaaaagat

SEQ ID NO: 959994 - DNA, 15 bp, Homo sapiens
gtcttaaaaaagata

SEQ ID NO: 959995 - DNA, 15 bp, Homo sapiens
tcttaaaaaagataa

SEQ ID NO: 959996 - DNA, 15 bp, Homo sapiens
cttaaaaaagataaa

SEQ ID NO: 959997 - DNA, 15 bp, Homo sapiens
ttaaaaaagataaaa

SEQ ID NO: 959998 - DNA, 15 bp, Homo sapiens
taaaaaagataaaaa

SEQ ID NO: 959999 - DNA, 15 bp, Homo sapiens
aaaaaagataaaaaa

SEQ ID NO: 960000 - DNA, 15 bp, Homo sapiens
aaaaagataaaaaaa

SEQ ID NO: 960001 - DNA, 15 bp, Homo sapiens
aaaagataaaaaaaa

SEQ ID NO: 960002 - DNA, 15 bp, Homo sapiens
aaagataaaaaaaaa

SEQ ID NO: 960003 - DNA, 15 bp, Homo sapiens
aagataaaaaaaaag

SEQ ID NO: 960004 - DNA, 15 bp, Homo sapiens
agataaaaaaaaaga

SEQ ID NO: 960005 - DNA, 15 bp, Homo sapiens
gataaaaaaaaagac

SEQ ID NO: 960006 - DNA, 15 bp, Homo sapiens
ataaaaaaaaagact

SEQ ID NO: 960007 - DNA, 15 bp, Homo sapiens
taaaaaaaaagactc

SEQ ID NO: 960008 - DNA, 15 bp, Homo sapiens
aaaaaaaaagactcc

SEQ ID NO: 960009 - DNA, 15 bp, Homo sapiens
aaaaaaaagactcct

SEQ ID NO: 960010 - DNA, 15 bp, Homo sapiens
aaaaaaagactccta

SEQ ID NO: 960011 - DNA, 15 bp, Homo sapiens
aaaaaagactcctag

SEQ ID NO: 960012 - DNA, 15 bp, Homo sapiens
aaaaagactcctaga

SEQ ID NO: 960013 - DNA, 15 bp, Homo sapiens
aaaagactcctagat

SEQ ID NO: 960014 - DNA, 15 bp, Homo sapiens
aaagactcctagatt

SEQ ID NO: 960015 - DNA, 15 bp, Homo sapiens
aagactcctagattt

SEQ ID NO: 960016 - DNA, 15 bp, Homo sapiens
agactcctagatttg

SEQ ID NO: 960017 - DNA, 15 bp, Homo sapiens
gactcctagatttga

SEQ ID NO: 960018 - DNA, 15 bp, Homo sapiens
actcctagatttgat

SEQ ID NO: 960019 - DNA, 15 bp, Homo sapiens
ctcctagatttgata

SEQ ID NO: 960020 - DNA, 15 bp, Homo sapiens
tcctagatttgataa

SEQ ID NO: 960021 - DNA, 15 bp, Homo sapiens
cctagatttgataaa

SEQ ID NO: 960022 - DNA, 15 bp, Homo sapiens
ctagatttgataaat

SEQ ID NO: 960023 - DNA, 15 bp, Homo sapiens
tagatttgataaatg

SEQ ID NO: 960024 - DNA, 15 bp, Homo sapiens
agatttgataaatga

SEQ ID NO: 960025 - DNA, 15 bp, Homo sapiens
gatttgataaatgaa

SEQ ID NO: 960026 - DNA, 15 bp, Homo sapiens
atttgataaatgaat

SEQ ID NO: 960027 - DNA, 15 bp, Homo sapiens
tttgataaatgaatt

SEQ ID NO: 960028 - DNA, 15 bp, Homo sapiens
ttgataaatgaattc

SEQ ID NO: 960029 - DNA, 15 bp, Homo sapiens
tgataaatgaattca

SEQ ID NO: 960030 - DNA, 15 bp, Homo sapiens
gataaatgaattcag

SEQ ID NO: 960031 - DNA, 15 bp, Homo sapiens
ataaatgaattcagt

SEQ ID NO: 960032 - DNA, 15 bp, Homo sapiens
taaatgaattcagta

SEQ ID NO: 960033 - DNA, 15 bp, Homo sapiens
aaatgaattcagtaa

SEQ ID NO: 960034 - DNA, 15 bp, Homo sapiens
aatgaattcagtaaa

SEQ ID NO: 960035 - DNA, 15 bp, Homo sapiens
atgaattcagtaaag

SEQ ID NO: 960036 - DNA, 15 bp, Homo sapiens
tgaattcagtaaagt

SEQ ID NO: 960037 - DNA, 15 bp, Homo sapiens
gaattcagtaaagtc

SEQ ID NO: 960038 - DNA, 15 bp, Homo sapiens
aattcagtaaagtct

SEQ ID NO: 960039 - DNA, 15 bp, Homo sapiens
attcagtaaagtctc

SEQ ID NO: 960040 - DNA, 15 bp, Homo sapiens
ttcagtaaagtctca

SEQ ID NO: 960041 - DNA, 15 bp, Homo sapiens
tcagtaaagtctcag

SEQ ID NO: 960042 - DNA, 15 bp, Homo sapiens
cagtaaagtctcagg

SEQ ID NO: 960043 - DNA, 15 bp, Homo sapiens
agtaaagtctcaggt

SEQ ID NO: 960044 - DNA, 15 bp, Homo sapiens
gtaaagtctcaggtt

SEQ ID NO: 960045 - DNA, 15 bp, Homo sapiens
taaagtctcaggtta

SEQ ID NO: 960046 - DNA, 15 bp, Homo sapiens
aaagtctcaggttac

SEQ ID NO: 960047 - DNA, 15 bp, Homo sapiens
aagtctcaggttaca

SEQ ID NO: 960048 - DNA, 15 bp, Homo sapiens
agtctcaggttacaa

SEQ ID NO: 960049 - DNA, 15 bp, Homo sapiens
gtctcaggttacaaa

SEQ ID NO: 960050 - DNA, 15 bp, Homo sapiens
tctcaggttacaaaa

SEQ ID NO: 960051 - DNA, 15 bp, Homo sapiens
ctcaggttacaaaat

SEQ ID NO: 960052 - DNA, 15 bp, Homo sapiens
tcaggttacaaaatc

SEQ ID NO: 960053 - DNA, 15 bp, Homo sapiens
caggttacaaaatca

SEQ ID NO: 960054 - DNA, 15 bp, Homo sapiens
aggttacaaaatcag

SEQ ID NO: 960055 - DNA, 15 bp, Homo sapiens
ggttacaaaatcagt

SEQ ID NO: 960056 - DNA, 15 bp, Homo sapiens
gttacaaaatcagtg

SEQ ID NO: 960057 - DNA, 15 bp, Homo sapiens
ttacaaaatcagtgt

SEQ ID NO: 960058 - DNA, 15 bp, Homo sapiens
tacaaaatcagtgta

SEQ ID NO: 960059 - DNA, 15 bp, Homo sapiens
acaaaatcagtgtac

SEQ ID NO: 960060 - DNA, 15 bp, Homo sapiens
caaaatcagtgtaca

SEQ ID NO: 960061 - DNA, 15 bp, Homo sapiens
aaaatcagtgtacac

SEQ ID NO: 960062 - DNA, 15 bp, Homo sapiens
aaatcagtgtacaca

SEQ ID NO: 960063 - DNA, 15 bp, Homo sapiens
aatcagtgtacacaa

SEQ ID NO: 960064 - DNA, 15 bp, Homo sapiens
atcagtgtacacaaa

SEQ ID NO: 960065 - DNA, 15 bp, Homo sapiens
tcagtgtacacaaat

SEQ ID NO: 960066 - DNA, 15 bp, Homo sapiens
cagtgtacacaaatc

SEQ ID NO: 960067 - DNA, 15 bp, Homo sapiens
agtgtacacaaatca

SEQ ID NO: 960068 - DNA, 15 bp, Homo sapiens
gtgtacacaaatcag

SEQ ID NO: 960069 - DNA, 15 bp, Homo sapiens
tgtacacaaatcagc

SEQ ID NO: 960070 - DNA, 15 bp, Homo sapiens
gtacacaaatcagca

SEQ ID NO: 960071 - DNA, 15 bp, Homo sapiens
tacacaaatcagcag

SEQ ID NO: 960072 - DNA, 15 bp, Homo sapiens
acacaaatcagcagc

SEQ ID NO: 960073 - DNA, 15 bp, Homo sapiens
cacaaatcagcagca

SEQ ID NO: 960074 - DNA, 15 bp, Homo sapiens
acaaatcagcagcat

SEQ ID NO: 960075 - DNA, 15 bp, Homo sapiens
caaatcagcagcatt

SEQ ID NO: 960076 - DNA, 15 bp, Homo sapiens
aaatcagcagcattg

SEQ ID NO: 960077 - DNA, 15 bp, Homo sapiens
aatcagcagcattgc

SEQ ID NO: 960078 - DNA, 15 bp, Homo sapiens
atcagcagcattgct

SEQ ID NO: 960079 - DNA, 15 bp, Homo sapiens
tcagcagcattgcta

SEQ ID NO: 960080 - DNA, 15 bp, Homo sapiens
cagcagcattgctat

SEQ ID NO: 960081 - DNA, 15 bp, Homo sapiens
agcagcattgctata

SEQ ID NO: 960082 - DNA, 15 bp, Homo sapiens
gcagcattgctatac

SEQ ID NO: 960083 - DNA, 15 bp, Homo sapiens
cagcattgctataca

SEQ ID NO: 960084 - DNA, 15 bp, Homo sapiens
agcattgctatacac

SEQ ID NO: 960085 - DNA, 15 bp, Homo sapiens
gcattgctatacacc

SEQ ID NO: 960086 - DNA, 15 bp, Homo sapiens
cattgctatacacca

SEQ ID NO: 960087 - DNA, 15 bp, Homo sapiens
attgctatacaccaa

SEQ ID NO: 960088 - DNA, 15 bp, Homo sapiens
ttgctatacaccaac

SEQ ID NO: 960089 - DNA, 15 bp, Homo sapiens
tgctatacaccaaca

SEQ ID NO: 960090 - DNA, 15 bp, Homo sapiens
gctatacaccaacaa

SEQ ID NO: 960091 - DNA, 15 bp, Homo sapiens
ctatacaccaacaac

SEQ ID NO: 960092 - DNA, 15 bp, Homo sapiens
tatacaccaacaaca

SEQ ID NO: 960093 - DNA, 15 bp, Homo sapiens
atacaccaacaacaa

SEQ ID NO: 960094 - DNA, 15 bp, Homo sapiens
tacaccaacaacaac

SEQ ID NO: 960095 - DNA, 15 bp, Homo sapiens
acaccaacaacaacc

SEQ ID NO: 960096 - DNA, 15 bp, Homo sapiens
caccaacaacaacca

SEQ ID NO: 960097 - DNA, 15 bp, Homo sapiens
accaacaacaaccaa

SEQ ID NO: 960098 - DNA, 15 bp, Homo sapiens
ccaacaacaaccaag

SEQ ID NO: 960099 - DNA, 15 bp, Homo sapiens
caacaacaaccaagc

SEQ ID NO: 960100 - DNA, 15 bp, Homo sapiens
aacaacaaccaagct

SEQ ID NO: 960101 - DNA, 15 bp, Homo sapiens
acaacaaccaagctg

SEQ ID NO: 960102 - DNA, 15 bp, Homo sapiens
caacaaccaagctga

SEQ ID NO: 960103 - DNA, 15 bp, Homo sapiens
aacaaccaagctgag

SEQ ID NO: 960104 - DNA, 15 bp, Homo sapiens
acaaccaagctgaga

SEQ ID NO: 960105 - DNA, 15 bp, Homo sapiens
caaccaagctgagaa

SEQ ID NO: 960106 - DNA, 15 bp, Homo sapiens
aaccaagctgagaat

SEQ ID NO: 960107 - DNA, 15 bp, Homo sapiens
accaagctgagaatc

SEQ ID NO: 960108 - DNA, 15 bp, Homo sapiens
ccaagctgagaatca

SEQ ID NO: 960109 - DNA, 15 bp, Homo sapiens
caagctgagaatcaa

SEQ ID NO: 960110 - DNA, 15 bp, Homo sapiens
aagctgagaatcaaa

SEQ ID NO: 960111 - DNA, 15 bp, Homo sapiens
agctgagaatcaaat

SEQ ID NO: 960112 - DNA, 15 bp, Homo sapiens
gctgagaatcaaatt

SEQ ID NO: 960113 - DNA, 15 bp, Homo sapiens
ctgagaatcaaatta

SEQ ID NO: 960114 - DNA, 15 bp, Homo sapiens
tgagaatcaaattaa

SEQ ID NO: 960115 - DNA, 15 bp, Homo sapiens
gagaatcaaattaag

SEQ ID NO: 960116 - DNA, 15 bp, Homo sapiens
agaatcaaattaaga

SEQ ID NO: 960117 - DNA, 15 bp, Homo sapiens
gaatcaaattaagaa

SEQ ID NO: 960118 - DNA, 15 bp, Homo sapiens
aatcaaattaagaac

SEQ ID NO: 960119 - DNA, 15 bp, Homo sapiens
atcaaattaagaaca

SEQ ID NO: 960120 - DNA, 15 bp, Homo sapiens
tcaaattaagaacac

SEQ ID NO: 960121 - DNA, 15 bp, Homo sapiens
caaattaagaacaca

SEQ ID NO: 960122 - DNA, 15 bp, Homo sapiens
aaattaagaacacaa

SEQ ID NO: 960123 - DNA, 15 bp, Homo sapiens
aattaagaacacaag

SEQ ID NO: 960124 - DNA, 15 bp, Homo sapiens
attaagaacacaagc

SEQ ID NO: 960125 - DNA, 15 bp, Homo sapiens
ttaagaacacaagcc

SEQ ID NO: 960126 - DNA, 15 bp, Homo sapiens
taagaacacaagccc

SEQ ID NO: 960127 - DNA, 15 bp, Homo sapiens
aagaacacaagccct

SEQ ID NO: 960128 - DNA, 15 bp, Homo sapiens
agaacacaagccctt

SEQ ID NO: 960129 - DNA, 15 bp, Homo sapiens
gaacacaagcccttt

SEQ ID NO: 960130 - DNA, 15 bp, Homo sapiens
aacacaagccctttt

SEQ ID NO: 960131 - DNA, 15 bp, Homo sapiens
acacaagccctttta

SEQ ID NO: 960132 - DNA, 15 bp, Homo sapiens
cacaagcccttttag

SEQ ID NO: 960133 - DNA, 15 bp, Homo sapiens
acaagcccttttagc

SEQ ID NO: 960134 - DNA, 15 bp, Homo sapiens
caagcccttttagct

SEQ ID NO: 960135 - DNA, 15 bp, Homo sapiens
aagcccttttagctt

SEQ ID NO: 960136 - DNA, 15 bp, Homo sapiens
agcccttttagcttc

SEQ ID NO: 960137 - DNA, 15 bp, Homo sapiens
gcccttttagcttca

SEQ ID NO: 960138 - DNA, 15 bp, Homo sapiens
cccttttagcttcaa

SEQ ID NO: 960139 - DNA, 15 bp, Homo sapiens
ccttttagcttcaaa

SEQ ID NO: 960140 - DNA, 15 bp, Homo sapiens
cttttagcttcaaaa

SEQ ID NO: 960141 - DNA, 15 bp, Homo sapiens
ttttagcttcaaaaa

SEQ ID NO: 960142 - DNA, 15 bp, Homo sapiens
tttagcttcaaaaaa

SEQ ID NO: 960143 - DNA, 15 bp, Homo sapiens
ttagcttcaaaaaaa

SEQ ID NO: 960144 - DNA, 15 bp, Homo sapiens
tagcttcaaaaaaat

SEQ ID NO: 960145 - DNA, 15 bp, Homo sapiens
agcttcaaaaaaata

SEQ ID NO: 960146 - DNA, 15 bp, Homo sapiens
gcttcaaaaaaatac

SEQ ID NO: 960147 - DNA, 15 bp, Homo sapiens
cttcaaaaaaatacc

SEQ ID NO: 960148 - DNA, 15 bp, Homo sapiens
ttcaaaaaaatacct

SEQ ID NO: 960149 - DNA, 15 bp, Homo sapiens
tcaaaaaaataccta

SEQ ID NO: 960150 - DNA, 15 bp, Homo sapiens
caaaaaaatacctag

SEQ ID NO: 960151 - DNA, 15 bp, Homo sapiens
aaaaaaatacctagg

SEQ ID NO: 960152 - DNA, 15 bp, Homo sapiens
aaaaaatacctagga

SEQ ID NO: 960153 - DNA, 15 bp, Homo sapiens
aaaaatacctaggaa

SEQ ID NO: 960154 - DNA, 15 bp, Homo sapiens
aaaatacctaggaat

SEQ ID NO: 960155 - DNA, 15 bp, Homo sapiens
aaatacctaggaatg

SEQ ID NO: 960156 - DNA, 15 bp, Homo sapiens
aatacctaggaatgt

SEQ ID NO: 960157 - DNA, 15 bp, Homo sapiens
atacctaggaatgta

SEQ ID NO: 960158 - DNA, 15 bp, Homo sapiens
tacctaggaatgtac

SEQ ID NO: 960159 - DNA, 15 bp, Homo sapiens
acctaggaatgtact

SEQ ID NO: 960160 - DNA, 15 bp, Homo sapiens
cctaggaatgtactt

SEQ ID NO: 960161 - DNA, 15 bp, Homo sapiens
ctaggaatgtactta

SEQ ID NO: 960162 - DNA, 15 bp, Homo sapiens
taggaatgtacttaa

SEQ ID NO: 960163 - DNA, 15 bp, Homo sapiens
aggaatgtacttaac

SEQ ID NO: 960164 - DNA, 15 bp, Homo sapiens
ggaatgtacttaacc

SEQ ID NO: 960165 - DNA, 15 bp, Homo sapiens
gaatgtacttaacca

SEQ ID NO: 960166 - DNA, 15 bp, Homo sapiens
aatgtacttaaccaa

SEQ ID NO: 960167 - DNA, 15 bp, Homo sapiens
atgtacttaaccaag

SEQ ID NO: 960168 - DNA, 15 bp, Homo sapiens
tgtacttaaccaagg

SEQ ID NO: 960169 - DNA, 15 bp, Homo sapiens
gtacttaaccaaggg

SEQ ID NO: 960170 - DNA, 15 bp, Homo sapiens
tacttaaccaagggg

SEQ ID NO: 960171 - DNA, 15 bp, Homo sapiens
acttaaccaaggggg

SEQ ID NO: 960172 - DNA, 15 bp, Homo sapiens
cttaaccaagggggt

SEQ ID NO: 960173 - DNA, 15 bp, Homo sapiens
ttaaccaagggggtg

SEQ ID NO: 960174 - DNA, 15 bp, Homo sapiens
taaccaagggggtga

SEQ ID NO: 960175 - DNA, 15 bp, Homo sapiens
aaccaagggggtgaa

SEQ ID NO: 960176 - DNA, 15 bp, Homo sapiens
accaagggggtgaaa

SEQ ID NO: 960177 - DNA, 15 bp, Homo sapiens
ccaagggggtgaaag

SEQ ID NO: 960178 - DNA, 15 bp, Homo sapiens
caagggggtgaaaga

SEQ ID NO: 960179 - DNA, 15 bp, Homo sapiens
aagggggtgaaagat

SEQ ID NO: 960180 - DNA, 15 bp, Homo sapiens
agggggtgaaagatc

SEQ ID NO: 960181 - DNA, 15 bp, Homo sapiens
gggggtgaaagatct

SEQ ID NO: 960182 - DNA, 15 bp, Homo sapiens
ggggtgaaagatctt

SEQ ID NO: 960183 - DNA, 15 bp, Homo sapiens
gggtgaaagatcttt

SEQ ID NO: 960184 - DNA, 15 bp, Homo sapiens
ggtgaaagatctttt

SEQ ID NO: 960185 - DNA, 15 bp, Homo sapiens
gtgaaagatcttttc

SEQ ID NO: 960186 - DNA, 15 bp, Homo sapiens
tgaaagatcttttca

SEQ ID NO: 960187 - DNA, 15 bp, Homo sapiens
gaaagatcttttcaa

SEQ ID NO: 960188 - DNA, 15 bp, Homo sapiens
aaagatcttttcaag

SEQ ID NO: 960189 - DNA, 15 bp, Homo sapiens
aagatcttttcaagg

SEQ ID NO: 960190 - DNA, 15 bp, Homo sapiens
agatcttttcaagga

SEQ ID NO: 960191 - DNA, 15 bp, Homo sapiens
gatcttttcaaggaa

SEQ ID NO: 960192 - DNA, 15 bp, Homo sapiens
atcttttcaaggaaa

SEQ ID NO: 960193 - DNA, 15 bp, Homo sapiens
tcttttcaaggaaaa

SEQ ID NO: 960194 - DNA, 15 bp, Homo sapiens
cttttcaaggaaaac

SEQ ID NO: 960195 - DNA, 15 bp, Homo sapiens
ttttcaaggaaaact

SEQ ID NO: 960196 - DNA, 15 bp, Homo sapiens
tttcaaggaaaacta

SEQ ID NO: 960197 - DNA, 15 bp, Homo sapiens
ttcaaggaaaactac

SEQ ID NO: 960198 - DNA, 15 bp, Homo sapiens
tcaaggaaaactaca

SEQ ID NO: 960199 - DNA, 15 bp, Homo sapiens
caaggaaaactacaa

SEQ ID NO: 960200 - DNA, 15 bp, Homo sapiens
aaggaaaactacaaa

SEQ ID NO: 960201 - DNA, 15 bp, Homo sapiens
aggaaaactacaaaa

SEQ ID NO: 960202 - DNA, 15 bp, Homo sapiens
ggaaaactacaaaac

SEQ ID NO: 960203 - DNA, 15 bp, Homo sapiens
gaaaactacaaaaca

SEQ ID NO: 960204 - DNA, 15 bp, Homo sapiens
aaaactacaaaacac

SEQ ID NO: 960205 - DNA, 15 bp, Homo sapiens
aaactacaaaacact

SEQ ID NO: 960206 - DNA, 15 bp, Homo sapiens
aactacaaaacactg

SEQ ID NO: 960207 - DNA, 15 bp, Homo sapiens
actacaaaacactgt

SEQ ID NO: 960208 - DNA, 15 bp, Homo sapiens
ctacaaaacactgtc

SEQ ID NO: 960209 - DNA, 15 bp, Homo sapiens
tacaaaacactgtca

SEQ ID NO: 960210 - DNA, 15 bp, Homo sapiens
acaaaacactgtcac

SEQ ID NO: 960211 - DNA, 15 bp, Homo sapiens
caaaacactgtcacc

SEQ ID NO: 960212 - DNA, 15 bp, Homo sapiens
aaaacactgtcacca

SEQ ID NO: 960213 - DNA, 15 bp, Homo sapiens
aaacactgtcaccat

SEQ ID NO: 960214 - DNA, 15 bp, Homo sapiens
aacactgtcaccatc

SEQ ID NO: 960215 - DNA, 15 bp, Homo sapiens
acactgtcaccatca

SEQ ID NO: 960216 - DNA, 15 bp, Homo sapiens
cactgtcaccatcat

SEQ ID NO: 960217 - DNA, 15 bp, Homo sapiens
actgtcaccatcatt

SEQ ID NO: 960218 - DNA, 15 bp, Homo sapiens
ctgtcaccatcattt

SEQ ID NO: 960219 - DNA, 15 bp, Homo sapiens
tgtcaccatcatttt

SEQ ID NO: 960220 - DNA, 15 bp, Homo sapiens
gtcaccatcattttt

SEQ ID NO: 960221 - DNA, 15 bp, Homo sapiens
tcaccatcatttttc

SEQ ID NO: 960222 - DNA, 15 bp, Homo sapiens
caccatcatttttca

SEQ ID NO: 960223 - DNA, 15 bp, Homo sapiens
accatcatttttcac

SEQ ID NO: 960224 - DNA, 15 bp, Homo sapiens
ccatcatttttcaca

SEQ ID NO: 960225 - DNA, 15 bp, Homo sapiens
catcatttttcacag

SEQ ID NO: 960226 - DNA, 15 bp, Homo sapiens
atcatttttcacaga

SEQ ID NO: 960227 - DNA, 15 bp, Homo sapiens
tcatttttcacagaa

SEQ ID NO: 960228 - DNA, 15 bp, Homo sapiens
catttttcacagaat

SEQ ID NO: 960229 - DNA, 15 bp, Homo sapiens
atttttcacagaatt

SEQ ID NO: 960230 - DNA, 15 bp, Homo sapiens
tttttcacagaatta

SEQ ID NO: 960231 - DNA, 15 bp, Homo sapiens
ttttcacagaattag

SEQ ID NO: 960232 - DNA, 15 bp, Homo sapiens
tttcacagaattaga

SEQ ID NO: 960233 - DNA, 15 bp, Homo sapiens
ttcacagaattagaa

SEQ ID NO: 960234 - DNA, 15 bp, Homo sapiens
tcacagaattagaaa

SEQ ID NO: 960235 - DNA, 15 bp, Homo sapiens
cacagaattagaaaa

SEQ ID NO: 960236 - DNA, 15 bp, Homo sapiens
acagaattagaaaaa

SEQ ID NO: 960237 - DNA, 15 bp, Homo sapiens
cagaattagaaaaaa

SEQ ID NO: 960238 - DNA, 15 bp, Homo sapiens
agaattagaaaaaaa

SEQ ID NO: 960239 - DNA, 15 bp, Homo sapiens
gaattagaaaaaaaa

SEQ ID NO: 960240 - DNA, 15 bp, Homo sapiens
aattagaaaaaaaaa

SEQ ID NO: 960241 - DNA, 15 bp, Homo sapiens
attagaaaaaaaaat

SEQ ID NO: 960242 - DNA, 15 bp, Homo sapiens
ttagaaaaaaaaatc

SEQ ID NO: 960243 - DNA, 15 bp, Homo sapiens
tagaaaaaaaaatcc

SEQ ID NO: 960244 - DNA, 15 bp, Homo sapiens
agaaaaaaaaatcct

SEQ ID NO: 960245 - DNA, 15 bp, Homo sapiens
gaaaaaaaaatccta

SEQ ID NO: 960246 - DNA, 15 bp, Homo sapiens
aaaaaaaaatcctaa

SEQ ID NO: 960247 - DNA, 15 bp, Homo sapiens
aaaaaaaatcctaaa

SEQ ID NO: 960248 - DNA, 15 bp, Homo sapiens
aaaaaaatcctaaaa

SEQ ID NO: 960249 - DNA, 15 bp, Homo sapiens
aaaaaatcctaaaat

SEQ ID NO: 960250 - DNA, 15 bp, Homo sapiens
aaaaatcctaaaatt

SEQ ID NO: 960251 - DNA, 15 bp, Homo sapiens
aaaatcctaaaattc

SEQ ID NO: 960252 - DNA, 15 bp, Homo sapiens
aaatcctaaaattca

SEQ ID NO: 960253 - DNA, 15 bp, Homo sapiens
aatcctaaaattcat

SEQ ID NO: 960254 - DNA, 15 bp, Homo sapiens
atcctaaaattcata

SEQ ID NO: 960255 - DNA, 15 bp, Homo sapiens
tcctaaaattcatat

SEQ ID NO: 960256 - DNA, 15 bp, Homo sapiens
cctaaaattcatata

SEQ ID NO: 960257 - DNA, 15 bp, Homo sapiens
ctaaaattcatataa

SEQ ID NO: 960258 - DNA, 15 bp, Homo sapiens
taaaattcatataaa

SEQ ID NO: 960259 - DNA, 15 bp, Homo sapiens
aaaattcatataaaa

SEQ ID NO: 960260 - DNA, 15 bp, Homo sapiens
aaattcatataaaac

SEQ ID NO: 960261 - DNA, 15 bp, Homo sapiens
aattcatataaaacc

SEQ ID NO: 960262 - DNA, 15 bp, Homo sapiens
attcatataaaaccg

SEQ ID NO: 960263 - DNA, 15 bp, Homo sapiens
ttcatataaaaccga

SEQ ID NO: 960264 - DNA, 15 bp, Homo sapiens
tcatataaaaccgac

SEQ ID NO: 960265 - DNA, 15 bp, Homo sapiens
catataaaaccgacc

SEQ ID NO: 960266 - DNA, 15 bp, Homo sapiens
atataaaaccgacca

SEQ ID NO: 960267 - DNA, 15 bp, Homo sapiens
tataaaaccgaccaa

SEQ ID NO: 960268 - DNA, 15 bp, Homo sapiens
ataaaaccgaccaaa

SEQ ID NO: 960269 - DNA, 15 bp, Homo sapiens
taaaaccgaccaaaa

SEQ ID NO: 960270 - DNA, 15 bp, Homo sapiens
aaaaccgaccaaaaa

SEQ ID NO: 960271 - DNA, 15 bp, Homo sapiens
aaaccgaccaaaaag

SEQ ID NO: 960272 - DNA, 15 bp, Homo sapiens
aaccgaccaaaaaga

SEQ ID NO: 960273 - DNA, 15 bp, Homo sapiens
accgaccaaaaagag

SEQ ID NO: 960274 - DNA, 15 bp, Homo sapiens
ccgaccaaaaagagt

SEQ ID NO: 960275 - DNA, 15 bp, Homo sapiens
cgaccaaaaagagtc

SEQ ID NO: 960276 - DNA, 15 bp, Homo sapiens
gaccaaaaagagtct

SEQ ID NO: 960277 - DNA, 15 bp, Homo sapiens
accaaaaagagtctg

SEQ ID NO: 960278 - DNA, 15 bp, Homo sapiens
ccaaaaagagtctga

SEQ ID NO: 960279 - DNA, 15 bp, Homo sapiens
caaaaagagtctgaa

SEQ ID NO: 960280 - DNA, 15 bp, Homo sapiens
aaaaagagtctgaat

SEQ ID NO: 960281 - DNA, 15 bp, Homo sapiens
aaaagagtctgaata

SEQ ID NO: 960282 - DNA, 15 bp, Homo sapiens
aaagagtctgaatag

SEQ ID NO: 960283 - DNA, 15 bp, Homo sapiens
aagagtctgaatagc

SEQ ID NO: 960284 - DNA, 15 bp, Homo sapiens
agagtctgaatagcc

SEQ ID NO: 960285 - DNA, 15 bp, Homo sapiens
gagtctgaatagcca

SEQ ID NO: 960286 - DNA, 15 bp, Homo sapiens
agtctgaatagccaa

SEQ ID NO: 960287 - DNA, 15 bp, Homo sapiens
gtctgaatagccaaa

SEQ ID NO: 960288 - DNA, 15 bp, Homo sapiens
tctgaatagccaaag

SEQ ID NO: 960289 - DNA, 15 bp, Homo sapiens
ctgaatagccaaagc

SEQ ID NO: 960290 - DNA, 15 bp, Homo sapiens
tgaatagccaaagca

SEQ ID NO: 960291 - DNA, 15 bp, Homo sapiens
gaatagccaaagcaa

SEQ ID NO: 960292 - DNA, 15 bp, Homo sapiens
aatagccaaagcaag

SEQ ID NO: 960293 - DNA, 15 bp, Homo sapiens
atagccaaagcaaga

SEQ ID NO: 960294 - DNA, 15 bp, Homo sapiens
tagccaaagcaagac

SEQ ID NO: 960295 - DNA, 15 bp, Homo sapiens
agccaaagcaagact

SEQ ID NO: 960296 - DNA, 15 bp, Homo sapiens
gccaaagcaagacta

SEQ ID NO: 960297 - DNA, 15 bp, Homo sapiens
ccaaagcaagactaa

SEQ ID NO: 960298 - DNA, 15 bp, Homo sapiens
caaagcaagactaag

SEQ ID NO: 960299 - DNA, 15 bp, Homo sapiens
aaagcaagactaagc

SEQ ID NO: 960300 - DNA, 15 bp, Homo sapiens
aagcaagactaagca

SEQ ID NO: 960301 - DNA, 15 bp, Homo sapiens
agcaagactaagcaa

SEQ ID NO: 960302 - DNA, 15 bp, Homo sapiens
gcaagactaagcaaa

SEQ ID NO: 960303 - DNA, 15 bp, Homo sapiens
caagactaagcaaaa

SEQ ID NO: 960304 - DNA, 15 bp, Homo sapiens
aagactaagcaaaaa

SEQ ID NO: 960305 - DNA, 15 bp, Homo sapiens
agactaagcaaaaag

SEQ ID NO: 960306 - DNA, 15 bp, Homo sapiens
gactaagcaaaaaga

SEQ ID NO: 960307 - DNA, 15 bp, Homo sapiens
actaagcaaaaagaa

SEQ ID NO: 960308 - DNA, 15 bp, Homo sapiens
ctaagcaaaaagaac

SEQ ID NO: 960309 - DNA, 15 bp, Homo sapiens
taagcaaaaagaaca

SEQ ID NO: 960310 - DNA, 15 bp, Homo sapiens
aagcaaaaagaacaa

SEQ ID NO: 960311 - DNA, 15 bp, Homo sapiens
agcaaaaagaacaaa

SEQ ID NO: 960312 - DNA, 15 bp, Homo sapiens
gcaaaaagaacaaat

SEQ ID NO: 960313 - DNA, 15 bp, Homo sapiens
caaaaagaacaaatc

SEQ ID NO: 960314 - DNA, 15 bp, Homo sapiens
aaaaagaacaaatct

SEQ ID NO: 960315 - DNA, 15 bp, Homo sapiens
aaaagaacaaatctg

SEQ ID NO: 960316 - DNA, 15 bp, Homo sapiens
aaagaacaaatctgg

SEQ ID NO: 960317 - DNA, 15 bp, Homo sapiens
aagaacaaatctgga

SEQ ID NO: 960318 - DNA, 15 bp, Homo sapiens
agaacaaatctggag

SEQ ID NO: 960319 - DNA, 15 bp, Homo sapiens
gaacaaatctggagg

SEQ ID NO: 960320 - DNA, 15 bp, Homo sapiens
aacaaatctggaggc

SEQ ID NO: 960321 - DNA, 15 bp, Homo sapiens
acaaatctggaggca

SEQ ID NO: 960322 - DNA, 15 bp, Homo sapiens
caaatctggaggcat

SEQ ID NO: 960323 - DNA, 15 bp, Homo sapiens
aaatctggaggcatc

SEQ ID NO: 960324 - DNA, 15 bp, Homo sapiens
aatctggaggcatca

SEQ ID NO: 960325 - DNA, 15 bp, Homo sapiens
atctggaggcatcac

SEQ ID NO: 960326 - DNA, 15 bp, Homo sapiens
tctggaggcatcaca

SEQ ID NO: 960327 - DNA, 15 bp, Homo sapiens
ctggaggcatcacat

SEQ ID NO: 960328 - DNA, 15 bp, Homo sapiens
tggaggcatcacatt

SEQ ID NO: 960329 - DNA, 15 bp, Homo sapiens
ggaggcatcacatta

SEQ ID NO: 960330 - DNA, 15 bp, Homo sapiens
gaggcatcacattac

SEQ ID NO: 960331 - DNA, 15 bp, Homo sapiens
aggcatcacattact

SEQ ID NO: 960332 - DNA, 15 bp, Homo sapiens
ggcatcacattactg

SEQ ID NO: 960333 - DNA, 15 bp, Homo sapiens
gcatcacattactgg

SEQ ID NO: 960334 - DNA, 15 bp, Homo sapiens
catcacattactgga

SEQ ID NO: 960335 - DNA, 15 bp, Homo sapiens
atcacattactggac

SEQ ID NO: 960336 - DNA, 15 bp, Homo sapiens
tcacattactggact

SEQ ID NO: 960337 - DNA, 15 bp, Homo sapiens
cacattactggactt

SEQ ID NO: 960338 - DNA, 15 bp, Homo sapiens
acattactggacttc

SEQ ID NO: 960339 - DNA, 15 bp, Homo sapiens
cattactggacttca

SEQ ID NO: 960340 - DNA, 15 bp, Homo sapiens
attactggacttcaa

SEQ ID NO: 960341 - DNA, 15 bp, Homo sapiens
ttactggacttcaaa

SEQ ID NO: 960342 - DNA, 15 bp, Homo sapiens
tactggacttcaaat

SEQ ID NO: 960343 - DNA, 15 bp, Homo sapiens
actggacttcaaatt

SEQ ID NO: 960344 - DNA, 15 bp, Homo sapiens
ctggacttcaaatta

SEQ ID NO: 960345 - DNA, 15 bp, Homo sapiens
tggacttcaaattat

SEQ ID NO: 960346 - DNA, 15 bp, Homo sapiens
ggacttcaaattata

SEQ ID NO: 960347 - DNA, 15 bp, Homo sapiens
gacttcaaattatac

SEQ ID NO: 960348 - DNA, 15 bp, Homo sapiens
acttcaaattatacc

SEQ ID NO: 960349 - DNA, 15 bp, Homo sapiens
cttcaaattatacca

SEQ ID NO: 960350 - DNA, 15 bp, Homo sapiens
ttcaaattataccag

SEQ ID NO: 960351 - DNA, 15 bp, Homo sapiens
tcaaattataccagg

SEQ ID NO: 960352 - DNA, 15 bp, Homo sapiens
caaattataccagga

SEQ ID NO: 960353 - DNA, 15 bp, Homo sapiens
aaattataccaggaa

SEQ ID NO: 960354 - DNA, 15 bp, Homo sapiens
aattataccaggaaa

SEQ ID NO: 960355 - DNA, 15 bp, Homo sapiens
attataccaggaaac

SEQ ID NO: 960356 - DNA, 15 bp, Homo sapiens
ttataccaggaaact

SEQ ID NO: 960357 - DNA, 15 bp, Homo sapiens
tataccaggaaacta

SEQ ID NO: 960358 - DNA, 15 bp, Homo sapiens
ataccaggaaactat

SEQ ID NO: 960359 - DNA, 15 bp, Homo sapiens
taccaggaaactata

SEQ ID NO: 960360 - DNA, 15 bp, Homo sapiens
accaggaaactataa

SEQ ID NO: 960361 - DNA, 15 bp, Homo sapiens
ccaggaaactataat

SEQ ID NO: 960362 - DNA, 15 bp, Homo sapiens
caggaaactataatt

SEQ ID NO: 960363 - DNA, 15 bp, Homo sapiens
aggaaactataatta

SEQ ID NO: 960364 - DNA, 15 bp, Homo sapiens
ggaaactataattac

SEQ ID NO: 960365 - DNA, 15 bp, Homo sapiens
gaaactataattacc

SEQ ID NO: 960366 - DNA, 15 bp, Homo sapiens
aaactataattacca

SEQ ID NO: 960367 - DNA, 15 bp, Homo sapiens
aactataattaccaa

SEQ ID NO: 960368 - DNA, 15 bp, Homo sapiens
actataattaccaaa

SEQ ID NO: 960369 - DNA, 15 bp, Homo sapiens
ctataattaccaaaa

SEQ ID NO: 960370 - DNA, 15 bp, Homo sapiens
tataattaccaaaac

SEQ ID NO: 960371 - DNA, 15 bp, Homo sapiens
ataattaccaaaaca

SEQ ID NO: 960372 - DNA, 15 bp, Homo sapiens
taattaccaaaacag

SEQ ID NO: 960373 - DNA, 15 bp, Homo sapiens
aattaccaaaacagc

SEQ ID NO: 960374 - DNA, 15 bp, Homo sapiens
attaccaaaacagca

SEQ ID NO: 960375 - DNA, 15 bp, Homo sapiens
ttaccaaaacagcag

SEQ ID NO: 960376 - DNA, 15 bp, Homo sapiens
taccaaaacagcaga

SEQ ID NO: 960377 - DNA, 15 bp, Homo sapiens
accaaaacagcagat

SEQ ID NO: 960378 - DNA, 15 bp, Homo sapiens
ccaaaacagcagata

SEQ ID NO: 960379 - DNA, 15 bp, Homo sapiens
caaaacagcagatac

SEQ ID NO: 960380 - DNA, 15 bp, Homo sapiens
aaaacagcagataca

SEQ ID NO: 960381 - DNA, 15 bp, Homo sapiens
aaacagcagatacac

SEQ ID NO: 960382 - DNA, 15 bp, Homo sapiens
aacagcagatacaca

SEQ ID NO: 960383 - DNA, 15 bp, Homo sapiens
acagcagatacacac

SEQ ID NO: 960384 - DNA, 15 bp, Homo sapiens
cagcagatacacaca

SEQ ID NO: 960385 - DNA, 15 bp, Homo sapiens
agcagatacacacaa

SEQ ID NO: 960386 - DNA, 15 bp, Homo sapiens
gcagatacacacaaa

SEQ ID NO: 960387 - DNA, 15 bp, Homo sapiens
cagatacacacaaaa

SEQ ID NO: 960388 - DNA, 15 bp, Homo sapiens
agatacacacaaaag

SEQ ID NO: 960389 - DNA, 15 bp, Homo sapiens
gatacacacaaaagc

SEQ ID NO: 960390 - DNA, 15 bp, Homo sapiens
atacacacaaaagca

SEQ ID NO: 960391 - DNA, 15 bp, Homo sapiens
tacacacaaaagcag

SEQ ID NO: 960392 - DNA, 15 bp, Homo sapiens
acacacaaaagcaga

SEQ ID NO: 960393 - DNA, 15 bp, Homo sapiens
cacacaaaagcagac

SEQ ID NO: 960394 - DNA, 15 bp, Homo sapiens
acacaaaagcagaca

SEQ ID NO: 960395 - DNA, 15 bp, Homo sapiens
cacaaaagcagacac

SEQ ID NO: 960396 - DNA, 15 bp, Homo sapiens
acaaaagcagacaca

SEQ ID NO: 960397 - DNA, 15 bp, Homo sapiens
caaaagcagacacac

SEQ ID NO: 960398 - DNA, 15 bp, Homo sapiens
aaaagcagacacaca

SEQ ID NO: 960399 - DNA, 15 bp, Homo sapiens
aaagcagacacacag

SEQ ID NO: 960400 - DNA, 15 bp, Homo sapiens
aagcagacacacaga

SEQ ID NO: 960401 - DNA, 15 bp, Homo sapiens
agcagacacacagac

SEQ ID NO: 960402 - DNA, 15 bp, Homo sapiens
gcagacacacagacc

SEQ ID NO: 960403 - DNA, 15 bp, Homo sapiens
cagacacacagacca

SEQ ID NO: 960404 - DNA, 15 bp, Homo sapiens
agacacacagaccaa

SEQ ID NO: 960405 - DNA, 15 bp, Homo sapiens
gacacacagaccaat

SEQ ID NO: 960406 - DNA, 15 bp, Homo sapiens
acacacagaccaatg

SEQ ID NO: 960407 - DNA, 15 bp, Homo sapiens
cacacagaccaatgg

SEQ ID NO: 960408 - DNA, 15 bp, Homo sapiens
acacagaccaatgga

SEQ ID NO: 960409 - DNA, 15 bp, Homo sapiens
cacagaccaatggaa

SEQ ID NO: 960410 - DNA, 15 bp, Homo sapiens
acagaccaatggaac

SEQ ID NO: 960411 - DNA, 15 bp, Homo sapiens
cagaccaatggaaca

SEQ ID NO: 960412 - DNA, 15 bp, Homo sapiens
agaccaatggaacag

SEQ ID NO: 960413 - DNA, 15 bp, Homo sapiens
gaccaatggaacaga

SEQ ID NO: 960414 - DNA, 15 bp, Homo sapiens
accaatggaacagaa

SEQ ID NO: 960415 - DNA, 15 bp, Homo sapiens
ccaatggaacagaat

SEQ ID NO: 960416 - DNA, 15 bp, Homo sapiens
caatggaacagaatg

SEQ ID NO: 960417 - DNA, 15 bp, Homo sapiens
aatggaacagaatgg

SEQ ID NO: 960418 - DNA, 15 bp, Homo sapiens
atggaacagaatgga

SEQ ID NO: 960419 - DNA, 15 bp, Homo sapiens
tggaacagaatggag

SEQ ID NO: 960420 - DNA, 15 bp, Homo sapiens
ggaacagaatggaga

SEQ ID NO: 960421 - DNA, 15 bp, Homo sapiens
gaacagaatggagaa

SEQ ID NO: 960422 - DNA, 15 bp, Homo sapiens
aacagaatggagaac

SEQ ID NO: 960423 - DNA, 15 bp, Homo sapiens
acagaatggagaacc

SEQ ID NO: 960424 - DNA, 15 bp, Homo sapiens
cagaatggagaacct

SEQ ID NO: 960425 - DNA, 15 bp, Homo sapiens
agaatggagaaccta

SEQ ID NO: 960426 - DNA, 15 bp, Homo sapiens
gaatggagaacctag

SEQ ID NO: 960427 - DNA, 15 bp, Homo sapiens
aatggagaacctaga

SEQ ID NO: 960428 - DNA, 15 bp, Homo sapiens
atggagaacctagaa

SEQ ID NO: 960429 - DNA, 15 bp, Homo sapiens
tggagaacctagaaa

SEQ ID NO: 960430 - DNA, 15 bp, Homo sapiens
ggagaacctagaaat

SEQ ID NO: 960431 - DNA, 15 bp, Homo sapiens
gagaacctagaaata

SEQ ID NO: 960432 - DNA, 15 bp, Homo sapiens
agaacctagaaataa

SEQ ID NO: 960433 - DNA, 15 bp, Homo sapiens
gaacctagaaataaa

SEQ ID NO: 960434 - DNA, 15 bp, Homo sapiens
aacctagaaataaag

SEQ ID NO: 960435 - DNA, 15 bp, Homo sapiens
acctagaaataaagc

SEQ ID NO: 960436 - DNA, 15 bp, Homo sapiens
cctagaaataaagcc

SEQ ID NO: 960437 - DNA, 15 bp, Homo sapiens
ctagaaataaagcca

SEQ ID NO: 960438 - DNA, 15 bp, Homo sapiens
tagaaataaagccaa

SEQ ID NO: 960439 - DNA, 15 bp, Homo sapiens
agaaataaagccaaa

SEQ ID NO: 960440 - DNA, 15 bp, Homo sapiens
gaaataaagccaaaa

SEQ ID NO: 960441 - DNA, 15 bp, Homo sapiens
aaataaagccaaaaa

SEQ ID NO: 960442 - DNA, 15 bp, Homo sapiens
aataaagccaaaaac

SEQ ID NO: 960443 - DNA, 15 bp, Homo sapiens
ataaagccaaaaact

SEQ ID NO: 960444 - DNA, 15 bp, Homo sapiens
taaagccaaaaactt

SEQ ID NO: 960445 - DNA, 15 bp, Homo sapiens
aaagccaaaaactta

SEQ ID NO: 960446 - DNA, 15 bp, Homo sapiens
aagccaaaaacttac

SEQ ID NO: 960447 - DNA, 15 bp, Homo sapiens
agccaaaaacttaca

SEQ ID NO: 960448 - DNA, 15 bp, Homo sapiens
gccaaaaacttacaa

SEQ ID NO: 960449 - DNA, 15 bp, Homo sapiens
ccaaaaacttacaac

SEQ ID NO: 960450 - DNA, 15 bp, Homo sapiens
caaaaacttacaacg

SEQ ID NO: 960451 - DNA, 15 bp, Homo sapiens
aaaaacttacaacga

SEQ ID NO: 960452 - DNA, 15 bp, Homo sapiens
aaaacttacaacgaa

SEQ ID NO: 960453 - DNA, 15 bp, Homo sapiens
aaacttacaacgaac

SEQ ID NO: 960454 - DNA, 15 bp, Homo sapiens
aacttacaacgaact

SEQ ID NO: 960455 - DNA, 15 bp, Homo sapiens
acttacaacgaactg

SEQ ID NO: 960456 - DNA, 15 bp, Homo sapiens
cttacaacgaactga

SEQ ID NO: 960457 - DNA, 15 bp, Homo sapiens
ttacaacgaactgat

SEQ ID NO: 960458 - DNA, 15 bp, Homo sapiens
tacaacgaactgatc

SEQ ID NO: 960459 - DNA, 15 bp, Homo sapiens
acaacgaactgatct

SEQ ID NO: 960460 - DNA, 15 bp, Homo sapiens
caacgaactgatctt

SEQ ID NO: 960461 - DNA, 15 bp, Homo sapiens
aacgaactgatctta

SEQ ID NO: 960462 - DNA, 15 bp, Homo sapiens
acgaactgatcttag

SEQ ID NO: 960463 - DNA, 15 bp, Homo sapiens
cgaactgatcttaga

SEQ ID NO: 960464 - DNA, 15 bp, Homo sapiens
gaactgatcttagac

SEQ ID NO: 960465 - DNA, 15 bp, Homo sapiens
aactgatcttagaca

SEQ ID NO: 960466 - DNA, 15 bp, Homo sapiens
actgatcttagacat

SEQ ID NO: 960467 - DNA, 15 bp, Homo sapiens
ctgatcttagacata

SEQ ID NO: 960468 - DNA, 15 bp, Homo sapiens
tgatcttagacatat

SEQ ID NO: 960469 - DNA, 15 bp, Homo sapiens
gatcttagacatata

SEQ ID NO: 960470 - DNA, 15 bp, Homo sapiens
atcttagacatataa

SEQ ID NO: 960471 - DNA, 15 bp, Homo sapiens
tcttagacatataaa

SEQ ID NO: 960472 - DNA, 15 bp, Homo sapiens
cttagacatataaaa

SEQ ID NO: 960473 - DNA, 15 bp, Homo sapiens
ttagacatataaaaa

SEQ ID NO: 960474 - DNA, 15 bp, Homo sapiens
tagacatataaaaac

SEQ ID NO: 960475 - DNA, 15 bp, Homo sapiens
agacatataaaaaca

SEQ ID NO: 960476 - DNA, 15 bp, Homo sapiens
gacatataaaaacat

SEQ ID NO: 960477 - DNA, 15 bp, Homo sapiens
acatataaaaacata

SEQ ID NO: 960478 - DNA, 15 bp, Homo sapiens
catataaaaacataa

SEQ ID NO: 960479 - DNA, 15 bp, Homo sapiens
atataaaaacataaa

SEQ ID NO: 960480 - DNA, 15 bp, Homo sapiens
tataaaaacataaat

SEQ ID NO: 960481 - DNA, 15 bp, Homo sapiens
ataaaaacataaatt

SEQ ID NO: 960482 - DNA, 15 bp, Homo sapiens
taaaaacataaattg

SEQ ID NO: 960483 - DNA, 15 bp, Homo sapiens
aaaaacataaattgg

SEQ ID NO: 960484 - DNA, 15 bp, Homo sapiens
aaaacataaattgga

SEQ ID NO: 960485 - DNA, 15 bp, Homo sapiens
aaacataaattggag

SEQ ID NO: 960486 - DNA, 15 bp, Homo sapiens
aacataaattggaga

SEQ ID NO: 960487 - DNA, 15 bp, Homo sapiens
acataaattggagaa

SEQ ID NO: 960488 - DNA, 15 bp, Homo sapiens
cataaattggagaaa

SEQ ID NO: 960489 - DNA, 15 bp, Homo sapiens
ataaattggagaaag

SEQ ID NO: 960490 - DNA, 15 bp, Homo sapiens
taaattggagaaagg

SEQ ID NO: 960491 - DNA, 15 bp, Homo sapiens
aaattggagaaagga

SEQ ID NO: 960492 - DNA, 15 bp, Homo sapiens
aattggagaaaggac

SEQ ID NO: 960493 - DNA, 15 bp, Homo sapiens
attggagaaaggaca

SEQ ID NO: 960494 - DNA, 15 bp, Homo sapiens
ttggagaaaggacat

SEQ ID NO: 960495 - DNA, 15 bp, Homo sapiens
tggagaaaggacatt

SEQ ID NO: 960496 - DNA, 15 bp, Homo sapiens
ggagaaaggacattc

SEQ ID NO: 960497 - DNA, 15 bp, Homo sapiens
gagaaaggacattct

SEQ ID NO: 960498 - DNA, 15 bp, Homo sapiens
agaaaggacattctg

SEQ ID NO: 960499 - DNA, 15 bp, Homo sapiens
gaaaggacattctgt

SEQ ID NO: 960500 - DNA, 15 bp, Homo sapiens
aaaggacattctgtt

SEQ ID NO: 960501 - DNA, 15 bp, Homo sapiens
aaggacattctgttt

SEQ ID NO: 960502 - DNA, 15 bp, Homo sapiens
aggacattctgttta

SEQ ID NO: 960503 - DNA, 15 bp, Homo sapiens
ggacattctgtttaa

SEQ ID NO: 960504 - DNA, 15 bp, Homo sapiens
gacattctgtttaat

SEQ ID NO: 960505 - DNA, 15 bp, Homo sapiens
acattctgtttaata

SEQ ID NO: 960506 - DNA, 15 bp, Homo sapiens
cattctgtttaataa

SEQ ID NO: 960507 - DNA, 15 bp, Homo sapiens
attctgtttaataaa

SEQ ID NO: 960508 - DNA, 15 bp, Homo sapiens
ttctgtttaataaat

SEQ ID NO: 960509 - DNA, 15 bp, Homo sapiens
tctgtttaataaatg

SEQ ID NO: 960510 - DNA, 15 bp, Homo sapiens
ctgtttaataaatgg

SEQ ID NO: 960511 - DNA, 15 bp, Homo sapiens
tgtttaataaatggt

SEQ ID NO: 960512 - DNA, 15 bp, Homo sapiens
gtttaataaatggtg

SEQ ID NO: 960513 - DNA, 15 bp, Homo sapiens
tttaataaatggtgg

SEQ ID NO: 960514 - DNA, 15 bp, Homo sapiens
ttaataaatggtggt

SEQ ID NO: 960515 - DNA, 15 bp, Homo sapiens
taataaatggtggtg

SEQ ID NO: 960516 - DNA, 15 bp, Homo sapiens
aataaatggtggtgg

SEQ ID NO: 960517 - DNA, 15 bp, Homo sapiens
ataaatggtggtggg

SEQ ID NO: 960518 - DNA, 15 bp, Homo sapiens
taaatggtggtggga

SEQ ID NO: 960519 - DNA, 15 bp, Homo sapiens
aaatggtggtgggaa

SEQ ID NO: 960520 - DNA, 15 bp, Homo sapiens
aatggtggtgggaaa

SEQ ID NO: 960521 - DNA, 15 bp, Homo sapiens
atggtggtgggaaaa

SEQ ID NO: 960522 - DNA, 15 bp, Homo sapiens
tggtggtgggaaaac

SEQ ID NO: 960523 - DNA, 15 bp, Homo sapiens
ggtggtgggaaaact

SEQ ID NO: 960524 - DNA, 15 bp, Homo sapiens
gtggtgggaaaacta

SEQ ID NO: 960525 - DNA, 15 bp, Homo sapiens
tggtgggaaaactag

SEQ ID NO: 960526 - DNA, 15 bp, Homo sapiens
ggtgggaaaactagc

SEQ ID NO: 960527 - DNA, 15 bp, Homo sapiens
gtgggaaaactagct

SEQ ID NO: 960528 - DNA, 15 bp, Homo sapiens
tgggaaaactagcta

SEQ ID NO: 960529 - DNA, 15 bp, Homo sapiens
gggaaaactagctag

SEQ ID NO: 960530 - DNA, 15 bp, Homo sapiens
ggaaaactagctagc

SEQ ID NO: 960531 - DNA, 15 bp, Homo sapiens
gaaaactagctagcc

SEQ ID NO: 960532 - DNA, 15 bp, Homo sapiens
aaaactagctagcca

SEQ ID NO: 960533 - DNA, 15 bp, Homo sapiens
aaactagctagccac

SEQ ID NO: 960534 - DNA, 15 bp, Homo sapiens
aactagctagccaca

SEQ ID NO: 960535 - DNA, 15 bp, Homo sapiens
actagctagccacat

SEQ ID NO: 960536 - DNA, 15 bp, Homo sapiens
ctagctagccacatg

SEQ ID NO: 960537 - DNA, 15 bp, Homo sapiens
tagctagccacatgt

SEQ ID NO: 960538 - DNA, 15 bp, Homo sapiens
agctagccacatgta

SEQ ID NO: 960539 - DNA, 15 bp, Homo sapiens
gctagccacatgtaa

SEQ ID NO: 960540 - DNA, 15 bp, Homo sapiens
ctagccacatgtaaa

SEQ ID NO: 960541 - DNA, 15 bp, Homo sapiens
tagccacatgtaaaa

SEQ ID NO: 960542 - DNA, 15 bp, Homo sapiens
agccacatgtaaaag

SEQ ID NO: 960543 - DNA, 15 bp, Homo sapiens
gccacatgtaaaaga

SEQ ID NO: 960544 - DNA, 15 bp, Homo sapiens
ccacatgtaaaagaa

SEQ ID NO: 960545 - DNA, 15 bp, Homo sapiens
cacatgtaaaagaat

SEQ ID NO: 960546 - DNA, 15 bp, Homo sapiens
acatgtaaaagaatg

SEQ ID NO: 960547 - DNA, 15 bp, Homo sapiens
catgtaaaagaatga

SEQ ID NO: 960548 - DNA, 15 bp, Homo sapiens
atgtaaaagaatgaa

SEQ ID NO: 960549 - DNA, 15 bp, Homo sapiens
tgtaaaagaatgaaa

SEQ ID NO: 960550 - DNA, 15 bp, Homo sapiens
gtaaaagaatgaaac

SEQ ID NO: 960551 - DNA, 15 bp, Homo sapiens
taaaagaatgaaact

SEQ ID NO: 960552 - DNA, 15 bp, Homo sapiens
aaaagaatgaaactg

SEQ ID NO: 960553 - DNA, 15 bp, Homo sapiens
aaagaatgaaactgg

SEQ ID NO: 960554 - DNA, 15 bp, Homo sapiens
aagaatgaaactgga

SEQ ID NO: 960555 - DNA, 15 bp, Homo sapiens
agaatgaaactggat

SEQ ID NO: 960556 - DNA, 15 bp, Homo sapiens
gaatgaaactggatc

SEQ ID NO: 960557 - DNA, 15 bp, Homo sapiens
aatgaaactggatcc

SEQ ID NO: 960558 - DNA, 15 bp, Homo sapiens
atgaaactggatccc

SEQ ID NO: 960559 - DNA, 15 bp, Homo sapiens
tgaaactggatccct

SEQ ID NO: 960560 - DNA, 15 bp, Homo sapiens
gaaactggatccctg

SEQ ID NO: 960561 - DNA, 15 bp, Homo sapiens
aaactggatccctgt

SEQ ID NO: 960562 - DNA, 15 bp, Homo sapiens
aactggatccctgtc

SEQ ID NO: 960563 - DNA, 15 bp, Homo sapiens
actggatccctgtct

SEQ ID NO: 960564 - DNA, 15 bp, Homo sapiens
ctggatccctgtctc

SEQ ID NO: 960565 - DNA, 15 bp, Homo sapiens
tggatccctgtctct

SEQ ID NO: 960566 - DNA, 15 bp, Homo sapiens
ggatccctgtctctc

SEQ ID NO: 960567 - DNA, 15 bp, Homo sapiens
gatccctgtctctca

SEQ ID NO: 960568 - DNA, 15 bp, Homo sapiens
atccctgtctctcac

SEQ ID NO: 960569 - DNA, 15 bp, Homo sapiens
tccctgtctctcacc

SEQ ID NO: 960570 - DNA, 15 bp, Homo sapiens
ccctgtctctcacct

SEQ ID NO: 960571 - DNA, 15 bp, Homo sapiens
cctgtctctcacctt

SEQ ID NO: 960572 - DNA, 15 bp, Homo sapiens
ctgtctctcacctta

SEQ ID NO: 960573 - DNA, 15 bp, Homo sapiens
tgtctctcaccttat

SEQ ID NO: 960574 - DNA, 15 bp, Homo sapiens
gtctctcaccttata

SEQ ID NO: 960575 - DNA, 15 bp, Homo sapiens
tctctcaccttatac

SEQ ID NO: 960576 - DNA, 15 bp, Homo sapiens
ctctcaccttataca

SEQ ID NO: 960577 - DNA, 15 bp, Homo sapiens
tctcaccttatacaa

SEQ ID NO: 960578 - DNA, 15 bp, Homo sapiens
ctcaccttatacaaa

SEQ ID NO: 960579 - DNA, 15 bp, Homo sapiens
tcaccttatacaaaa

SEQ ID NO: 960580 - DNA, 15 bp, Homo sapiens
caccttatacaaaaa

SEQ ID NO: 960581 - DNA, 15 bp, Homo sapiens
accttatacaaaaat

SEQ ID NO: 960582 - DNA, 15 bp, Homo sapiens
ccttatacaaaaatc

SEQ ID NO: 960583 - DNA, 15 bp, Homo sapiens
cttatacaaaaatca

SEQ ID NO: 960584 - DNA, 15 bp, Homo sapiens
ttatacaaaaatcaa

SEQ ID NO: 960585 - DNA, 15 bp, Homo sapiens
tatacaaaaatcaac

SEQ ID NO: 960586 - DNA, 15 bp, Homo sapiens
atacaaaaatcaact

SEQ ID NO: 960587 - DNA, 15 bp, Homo sapiens
tacaaaaatcaactc

SEQ ID NO: 960588 - DNA, 15 bp, Homo sapiens
acaaaaatcaactca

SEQ ID NO: 960589 - DNA, 15 bp, Homo sapiens
caaaaatcaactcaa

SEQ ID NO: 960590 - DNA, 15 bp, Homo sapiens
aaaaatcaactcaag

SEQ ID NO: 960591 - DNA, 15 bp, Homo sapiens
aaaatcaactcaaga

SEQ ID NO: 960592 - DNA, 15 bp, Homo sapiens
aaatcaactcaagat

SEQ ID NO: 960593 - DNA, 15 bp, Homo sapiens
aatcaactcaagatg

SEQ ID NO: 960594 - DNA, 15 bp, Homo sapiens
atcaactcaagatgg

SEQ ID NO: 960595 - DNA, 15 bp, Homo sapiens
tcaactcaagatgga

SEQ ID NO: 960596 - DNA, 15 bp, Homo sapiens
caactcaagatggat

SEQ ID NO: 960597 - DNA, 15 bp, Homo sapiens
aactcaagatggatc

SEQ ID NO: 960598 - DNA, 15 bp, Homo sapiens
actcaagatggatcg

SEQ ID NO: 960599 - DNA, 15 bp, Homo sapiens
ctcaagatggatcga

SEQ ID NO: 960600 - DNA, 15 bp, Homo sapiens
tcaagatggatcgaa

SEQ ID NO: 960601 - DNA, 15 bp, Homo sapiens
caagatggatcgaag

SEQ ID NO: 960602 - DNA, 15 bp, Homo sapiens
aagatggatcgaaga

SEQ ID NO: 960603 - DNA, 15 bp, Homo sapiens
agatggatcgaagac

SEQ ID NO: 960604 - DNA, 15 bp, Homo sapiens
gatggatcgaagact

SEQ ID NO: 960605 - DNA, 15 bp, Homo sapiens
atggatcgaagactt

SEQ ID NO: 960606 - DNA, 15 bp, Homo sapiens
tggatcgaagactta

SEQ ID NO: 960607 - DNA, 15 bp, Homo sapiens
ggatcgaagacttaa

SEQ ID NO: 960608 - DNA, 15 bp, Homo sapiens
gatcgaagacttaaa

SEQ ID NO: 960609 - DNA, 15 bp, Homo sapiens
atcgaagacttaaat

SEQ ID NO: 960610 - DNA, 15 bp, Homo sapiens
tcgaagacttaaatc

SEQ ID NO: 960611 - DNA, 15 bp, Homo sapiens
cgaagacttaaatct

SEQ ID NO: 960612 - DNA, 15 bp, Homo sapiens
gaagacttaaatcta

SEQ ID NO: 960613 - DNA, 15 bp, Homo sapiens
aagacttaaatctaa

SEQ ID NO: 960614 - DNA, 15 bp, Homo sapiens
agacttaaatctaag

SEQ ID NO: 960615 - DNA, 15 bp, Homo sapiens
gacttaaatctaaga

SEQ ID NO: 960616 - DNA, 15 bp, Homo sapiens
acttaaatctaagac

SEQ ID NO: 960617 - DNA, 15 bp, Homo sapiens
cttaaatctaagacc

SEQ ID NO: 960618 - DNA, 15 bp, Homo sapiens
ttaaatctaagacct

SEQ ID NO: 960619 - DNA, 15 bp, Homo sapiens
taaatctaagacctg

SEQ ID NO: 960620 - DNA, 15 bp, Homo sapiens
aaatctaagacctga

SEQ ID NO: 960621 - DNA, 15 bp, Homo sapiens
aatctaagacctgaa

SEQ ID NO: 960622 - DNA, 15 bp, Homo sapiens
atctaagacctgaaa

SEQ ID NO: 960623 - DNA, 15 bp, Homo sapiens
tctaagacctgaaac

SEQ ID NO: 960624 - DNA, 15 bp, Homo sapiens
ctaagacctgaaacc

SEQ ID NO: 960625 - DNA, 15 bp, Homo sapiens
taagacctgaaacca

SEQ ID NO: 960626 - DNA, 15 bp, Homo sapiens
aagacctgaaaccat

SEQ ID NO: 960627 - DNA, 15 bp, Homo sapiens
agacctgaaaccata

SEQ ID NO: 960628 - DNA, 15 bp, Homo sapiens
gacctgaaaccataa

SEQ ID NO: 960629 - DNA, 15 bp, Homo sapiens
acctgaaaccataaa

SEQ ID NO: 960630 - DNA, 15 bp, Homo sapiens
cctgaaaccataaaa

SEQ ID NO: 960631 - DNA, 15 bp, Homo sapiens
ctgaaaccataaaaa

SEQ ID NO: 960632 - DNA, 15 bp, Homo sapiens
tgaaaccataaaaat

SEQ ID NO: 960633 - DNA, 15 bp, Homo sapiens
gaaaccataaaaatt

SEQ ID NO: 960634 - DNA, 15 bp, Homo sapiens
aaaccataaaaattc

SEQ ID NO: 960635 - DNA, 15 bp, Homo sapiens
aaccataaaaattct

SEQ ID NO: 960636 - DNA, 15 bp, Homo sapiens
accataaaaattcta

SEQ ID NO: 960637 - DNA, 15 bp, Homo sapiens
ccataaaaattctag

SEQ ID NO: 960638 - DNA, 15 bp, Homo sapiens
cataaaaattctaga

SEQ ID NO: 960639 - DNA, 15 bp, Homo sapiens
ataaaaattctagaa

SEQ ID NO: 960640 - DNA, 15 bp, Homo sapiens
taaaaattctagaag

SEQ ID NO: 960641 - DNA, 15 bp, Homo sapiens
aaaaattctagaaga

SEQ ID NO: 960642 - DNA, 15 bp, Homo sapiens
aaaattctagaagat

SEQ ID NO: 960643 - DNA, 15 bp, Homo sapiens
aaattctagaagata

SEQ ID NO: 960644 - DNA, 15 bp, Homo sapiens
aattctagaagataa

SEQ ID NO: 960645 - DNA, 15 bp, Homo sapiens
attctagaagataac

SEQ ID NO: 960646 - DNA, 15 bp, Homo sapiens
ttctagaagataact

SEQ ID NO: 960647 - DNA, 15 bp, Homo sapiens
tctagaagataactt

SEQ ID NO: 960648 - DNA, 15 bp, Homo sapiens
ctagaagataactta

SEQ ID NO: 960649 - DNA, 15 bp, Homo sapiens
tagaagataacttag

SEQ ID NO: 960650 - DNA, 15 bp, Homo sapiens
agaagataacttagg

SEQ ID NO: 960651 - DNA, 15 bp, Homo sapiens
gaagataacttagga

SEQ ID NO: 960652 - DNA, 15 bp, Homo sapiens
aagataacttaggaa

SEQ ID NO: 960653 - DNA, 15 bp, Homo sapiens
agataacttaggaaa

SEQ ID NO: 960654 - DNA, 15 bp, Homo sapiens
gataacttaggaaaa

SEQ ID NO: 960655 - DNA, 15 bp, Homo sapiens
ataacttaggaaaaa

SEQ ID NO: 960656 - DNA, 15 bp, Homo sapiens
taacttaggaaaaac

SEQ ID NO: 960657 - DNA, 15 bp, Homo sapiens
aacttaggaaaaact

SEQ ID NO: 960658 - DNA, 15 bp, Homo sapiens
acttaggaaaaactc

SEQ ID NO: 960659 - DNA, 15 bp, Homo sapiens
cttaggaaaaactct

SEQ ID NO: 960660 - DNA, 15 bp, Homo sapiens
ttaggaaaaactctt

SEQ ID NO: 960661 - DNA, 15 bp, Homo sapiens
taggaaaaactcttt

SEQ ID NO: 960662 - DNA, 15 bp, Homo sapiens
aggaaaaactctttt

SEQ ID NO: 960663 - DNA, 15 bp, Homo sapiens
ggaaaaactctttta

SEQ ID NO: 960664 - DNA, 15 bp, Homo sapiens
gaaaaactcttttaa

SEQ ID NO: 960665 - DNA, 15 bp, Homo sapiens
aaaaactcttttaaa

SEQ ID NO: 960666 - DNA, 15 bp, Homo sapiens
aaaactcttttaaac

SEQ ID NO: 960667 - DNA, 15 bp, Homo sapiens
aaactcttttaaaca

SEQ ID NO: 960668 - DNA, 15 bp, Homo sapiens
aactcttttaaacac

SEQ ID NO: 960669 - DNA, 15 bp, Homo sapiens
actcttttaaacact

SEQ ID NO: 960670 - DNA, 15 bp, Homo sapiens
ctcttttaaacactg

SEQ ID NO: 960671 - DNA, 15 bp, Homo sapiens
tcttttaaacactgg

SEQ ID NO: 960672 - DNA, 15 bp, Homo sapiens
cttttaaacactggc

SEQ ID NO: 960673 - DNA, 15 bp, Homo sapiens
ttttaaacactggcc

SEQ ID NO: 960674 - DNA, 15 bp, Homo sapiens
tttaaacactggcct

SEQ ID NO: 960675 - DNA, 15 bp, Homo sapiens
ttaaacactggccta

SEQ ID NO: 960676 - DNA, 15 bp, Homo sapiens
taaacactggcctag

SEQ ID NO: 960677 - DNA, 15 bp, Homo sapiens
aaacactggcctagg

SEQ ID NO: 960678 - DNA, 15 bp, Homo sapiens
aacactggcctaggc

SEQ ID NO: 960679 - DNA, 15 bp, Homo sapiens
acactggcctaggca

SEQ ID NO: 960680 - DNA, 15 bp, Homo sapiens
cactggcctaggcaa

SEQ ID NO: 960681 - DNA, 15 bp, Homo sapiens
actggcctaggcaaa

SEQ ID NO: 960682 - DNA, 15 bp, Homo sapiens
ctggcctaggcaaat

SEQ ID NO: 960683 - DNA, 15 bp, Homo sapiens
tggcctaggcaaata

SEQ ID NO: 960684 - DNA, 15 bp, Homo sapiens
ggcctaggcaaataa

SEQ ID NO: 960685 - DNA, 15 bp, Homo sapiens
gcctaggcaaataat

SEQ ID NO: 960686 - DNA, 15 bp, Homo sapiens
cctaggcaaataata

SEQ ID NO: 960687 - DNA, 15 bp, Homo sapiens
ctaggcaaataataa

SEQ ID NO: 960688 - DNA, 15 bp, Homo sapiens
taggcaaataataaa

SEQ ID NO: 960689 - DNA, 15 bp, Homo sapiens
aggcaaataataaat

SEQ ID NO: 960690 - DNA, 15 bp, Homo sapiens
ggcaaataataaatg

SEQ ID NO: 960691 - DNA, 15 bp, Homo sapiens
gcaaataataaatga

SEQ ID NO: 960692 - DNA, 15 bp, Homo sapiens
caaataataaatgac

SEQ ID NO: 960693 - DNA, 15 bp, Homo sapiens
aaataataaatgact

SEQ ID NO: 960694 - DNA, 15 bp, Homo sapiens
aataataaatgacta

SEQ ID NO: 960695 - DNA, 15 bp, Homo sapiens
ataataaatgactaa

SEQ ID NO: 960696 - DNA, 15 bp, Homo sapiens
taataaatgactaag

SEQ ID NO: 960697 - DNA, 15 bp, Homo sapiens
aataaatgactaaga

SEQ ID NO: 960698 - DNA, 15 bp, Homo sapiens
ataaatgactaagac

SEQ ID NO: 960699 - DNA, 15 bp, Homo sapiens
taaatgactaagacc

SEQ ID NO: 960700 - DNA, 15 bp, Homo sapiens
aaatgactaagaccc

SEQ ID NO: 960701 - DNA, 15 bp, Homo sapiens
aatgactaagacccc

SEQ ID NO: 960702 - DNA, 15 bp, Homo sapiens
atgactaagacccca

SEQ ID NO: 960703 - DNA, 15 bp, Homo sapiens
tgactaagaccccaa

SEQ ID NO: 960704 - DNA, 15 bp, Homo sapiens
gactaagaccccaaa

SEQ ID NO: 960705 - DNA, 15 bp, Homo sapiens
actaagaccccaaaa

SEQ ID NO: 960706 - DNA, 15 bp, Homo sapiens
ctaagaccccaaaag

SEQ ID NO: 960707 - DNA, 15 bp, Homo sapiens
taagaccccaaaagc

SEQ ID NO: 960708 - DNA, 15 bp, Homo sapiens
aagaccccaaaagca

SEQ ID NO: 960709 - DNA, 15 bp, Homo sapiens
agaccccaaaagcaa

SEQ ID NO: 960710 - DNA, 15 bp, Homo sapiens
gaccccaaaagcaaa

SEQ ID NO: 960711 - DNA, 15 bp, Homo sapiens
accccaaaagcaaat

SEQ ID NO: 960712 - DNA, 15 bp, Homo sapiens
ccccaaaagcaaatg

SEQ ID NO: 960713 - DNA, 15 bp, Homo sapiens
cccaaaagcaaatgc

SEQ ID NO: 960714 - DNA, 15 bp, Homo sapiens
ccaaaagcaaatgcg

SEQ ID NO: 960715 - DNA, 15 bp, Homo sapiens
caaaagcaaatgcga

SEQ ID NO: 960716 - DNA, 15 bp, Homo sapiens
aaaagcaaatgcgac

SEQ ID NO: 960717 - DNA, 15 bp, Homo sapiens
aaagcaaatgcgaca

SEQ ID NO: 960718 - DNA, 15 bp, Homo sapiens
aagcaaatgcgacaa

SEQ ID NO: 960719 - DNA, 15 bp, Homo sapiens
agcaaatgcgacaaa

SEQ ID NO: 960720 - DNA, 15 bp, Homo sapiens
gcaaatgcgacaaaa

SEQ ID NO: 960721 - DNA, 15 bp, Homo sapiens
caaatgcgacaaaaa

SEQ ID NO: 960722 - DNA, 15 bp, Homo sapiens
aaatgcgacaaaaac

SEQ ID NO: 960723 - DNA, 15 bp, Homo sapiens
aatgcgacaaaaaca

SEQ ID NO: 960724 - DNA, 15 bp, Homo sapiens
atgcgacaaaaacaa

SEQ ID NO: 960725 - DNA, 15 bp, Homo sapiens
tgcgacaaaaacaaa

SEQ ID NO: 960726 - DNA, 15 bp, Homo sapiens
gcgacaaaaacaaac

SEQ ID NO: 960727 - DNA, 15 bp, Homo sapiens
cgacaaaaacaaaca

SEQ ID NO: 960728 - DNA, 15 bp, Homo sapiens
gacaaaaacaaacaa

SEQ ID NO: 960729 - DNA, 15 bp, Homo sapiens
acaaaaacaaacaaa

SEQ ID NO: 960730 - DNA, 15 bp, Homo sapiens
caaaaacaaacaaaa

SEQ ID NO: 960731 - DNA, 15 bp, Homo sapiens
aaaaacaaacaaaat

SEQ ID NO: 960732 - DNA, 15 bp, Homo sapiens
aaaacaaacaaaata

SEQ ID NO: 960733 - DNA, 15 bp, Homo sapiens
aaacaaacaaaataa

SEQ ID NO: 960734 - DNA, 15 bp, Homo sapiens
aacaaacaaaataaa

SEQ ID NO: 960735 - DNA, 15 bp, Homo sapiens
acaaacaaaataaat

SEQ ID NO: 960736 - DNA, 15 bp, Homo sapiens
caaacaaaataaatg

SEQ ID NO: 960737 - DNA, 15 bp, Homo sapiens
aaacaaaataaatgg

SEQ ID NO: 960738 - DNA, 15 bp, Homo sapiens
aacaaaataaatggg

SEQ ID NO: 960739 - DNA, 15 bp, Homo sapiens
acaaaataaatggga

SEQ ID NO: 960740 - DNA, 15 bp, Homo sapiens
caaaataaatgggac

SEQ ID NO: 960741 - DNA, 15 bp, Homo sapiens
aaaataaatgggacc

SEQ ID NO: 960742 - DNA, 15 bp, Homo sapiens
aaataaatgggacct

SEQ ID NO: 960743 - DNA, 15 bp, Homo sapiens
aataaatgggaccta

SEQ ID NO: 960744 - DNA, 15 bp, Homo sapiens
ataaatgggacctaa

SEQ ID NO: 960745 - DNA, 15 bp, Homo sapiens
taaatgggacctaat

SEQ ID NO: 960746 - DNA, 15 bp, Homo sapiens
aaatgggacctaatt

SEQ ID NO: 960747 - DNA, 15 bp, Homo sapiens
aatgggacctaatta

SEQ ID NO: 960748 - DNA, 15 bp, Homo sapiens
atgggacctaattaa

SEQ ID NO: 960749 - DNA, 15 bp, Homo sapiens
tgggacctaattaaa

SEQ ID NO: 960750 - DNA, 15 bp, Homo sapiens
gggacctaattaaac

SEQ ID NO: 960751 - DNA, 15 bp, Homo sapiens
ggacctaattaaact

SEQ ID NO: 960752 - DNA, 15 bp, Homo sapiens
gacctaattaaacta

SEQ ID NO: 960753 - DNA, 15 bp, Homo sapiens
acctaattaaactaa

SEQ ID NO: 960754 - DNA, 15 bp, Homo sapiens
cctaattaaactaaa

SEQ ID NO: 960755 - DNA, 15 bp, Homo sapiens
ctaattaaactaaaa

SEQ ID NO: 960756 - DNA, 15 bp, Homo sapiens
taattaaactaaaaa

SEQ ID NO: 960757 - DNA, 15 bp, Homo sapiens
aattaaactaaaaag

SEQ ID NO: 960758 - DNA, 15 bp, Homo sapiens
attaaactaaaaagc

SEQ ID NO: 960759 - DNA, 15 bp, Homo sapiens
ttaaactaaaaagcc

SEQ ID NO: 960760 - DNA, 15 bp, Homo sapiens
taaactaaaaagcct

SEQ ID NO: 960761 - DNA, 15 bp, Homo sapiens
aaactaaaaagcctc

SEQ ID NO: 960762 - DNA, 15 bp, Homo sapiens
aactaaaaagcctct

SEQ ID NO: 960763 - DNA, 15 bp, Homo sapiens
actaaaaagcctctg

SEQ ID NO: 960764 - DNA, 15 bp, Homo sapiens
ctaaaaagcctctgc

SEQ ID NO: 960765 - DNA, 15 bp, Homo sapiens
taaaaagcctctgca

SEQ ID NO: 960766 - DNA, 15 bp, Homo sapiens
aaaaagcctctgcat

SEQ ID NO: 960767 - DNA, 15 bp, Homo sapiens
aaaagcctctgcata

SEQ ID NO: 960768 - DNA, 15 bp, Homo sapiens
aaagcctctgcataa

SEQ ID NO: 960769 - DNA, 15 bp, Homo sapiens
aagcctctgcataac

SEQ ID NO: 960770 - DNA, 15 bp, Homo sapiens
agcctctgcataaca

SEQ ID NO: 960771 - DNA, 15 bp, Homo sapiens
gcctctgcataacaa

SEQ ID NO: 960772 - DNA, 15 bp, Homo sapiens
cctctgcataacaaa

SEQ ID NO: 960773 - DNA, 15 bp, Homo sapiens
ctctgcataacaaaa

SEQ ID NO: 960774 - DNA, 15 bp, Homo sapiens
tctgcataacaaaag

SEQ ID NO: 960775 - DNA, 15 bp, Homo sapiens
ctgcataacaaaaga

SEQ ID NO: 960776 - DNA, 15 bp, Homo sapiens
tgcataacaaaagaa

SEQ ID NO: 960777 - DNA, 15 bp, Homo sapiens
gcataacaaaagaaa

SEQ ID NO: 960778 - DNA, 15 bp, Homo sapiens
cataacaaaagaaag

SEQ ID NO: 960779 - DNA, 15 bp, Homo sapiens
ataacaaaagaaaga

SEQ ID NO: 960780 - DNA, 15 bp, Homo sapiens
taacaaaagaaagaa

SEQ ID NO: 960781 - DNA, 15 bp, Homo sapiens
aacaaaagaaagaat

SEQ ID NO: 960782 - DNA, 15 bp, Homo sapiens
acaaaagaaagaatc

SEQ ID NO: 960783 - DNA, 15 bp, Homo sapiens
caaaagaaagaatca

SEQ ID NO: 960784 - DNA, 15 bp, Homo sapiens
aaaagaaagaatcat

SEQ ID NO: 960785 - DNA, 15 bp, Homo sapiens
aaagaaagaatcatc

SEQ ID NO: 960786 - DNA, 15 bp, Homo sapiens
aagaaagaatcatca

SEQ ID NO: 960787 - DNA, 15 bp, Homo sapiens
agaaagaatcatcaa

SEQ ID NO: 960788 - DNA, 15 bp, Homo sapiens
gaaagaatcatcaaa

SEQ ID NO: 960789 - DNA, 15 bp, Homo sapiens
aaagaatcatcaaag

SEQ ID NO: 960790 - DNA, 15 bp, Homo sapiens
aagaatcatcaaagt

SEQ ID NO: 960791 - DNA, 15 bp, Homo sapiens
agaatcatcaaagtt

SEQ ID NO: 960792 - DNA, 15 bp, Homo sapiens
gaatcatcaaagtta

SEQ ID NO: 960793 - DNA, 15 bp, Homo sapiens
aatcatcaaagttaa

SEQ ID NO: 960794 - DNA, 15 bp, Homo sapiens
atcatcaaagttaac

SEQ ID NO: 960795 - DNA, 15 bp, Homo sapiens
tcatcaaagttaaca

SEQ ID NO: 960796 - DNA, 15 bp, Homo sapiens
catcaaagttaacag

SEQ ID NO: 960797 - DNA, 15 bp, Homo sapiens
atcaaagttaacaga

SEQ ID NO: 960798 - DNA, 15 bp, Homo sapiens
tcaaagttaacagac

SEQ ID NO: 960799 - DNA, 15 bp, Homo sapiens
caaagttaacagaca

SEQ ID NO: 960800 - DNA, 15 bp, Homo sapiens
aaagttaacagacaa

SEQ ID NO: 960801 - DNA, 15 bp, Homo sapiens
aagttaacagacaac

SEQ ID NO: 960802 - DNA, 15 bp, Homo sapiens
agttaacagacaacc

SEQ ID NO: 960803 - DNA, 15 bp, Homo sapiens
gttaacagacaaccc

SEQ ID NO: 960804 - DNA, 15 bp, Homo sapiens
ttaacagacaacccg

SEQ ID NO: 960805 - DNA, 15 bp, Homo sapiens
taacagacaacccgt

SEQ ID NO: 960806 - DNA, 15 bp, Homo sapiens
aacagacaacccgta

SEQ ID NO: 960807 - DNA, 15 bp, Homo sapiens
acagacaacccgtag

SEQ ID NO: 960808 - DNA, 15 bp, Homo sapiens
cagacaacccgtaga

SEQ ID NO: 960809 - DNA, 15 bp, Homo sapiens
agacaacccgtagaa

SEQ ID NO: 960810 - DNA, 15 bp, Homo sapiens
gacaacccgtagaat

SEQ ID NO: 960811 - DNA, 15 bp, Homo sapiens
acaacccgtagaatg

SEQ ID NO: 960812 - DNA, 15 bp, Homo sapiens
caacccgtagaatgg

SEQ ID NO: 960813 - DNA, 15 bp, Homo sapiens
aacccgtagaatggg

SEQ ID NO: 960814 - DNA, 15 bp, Homo sapiens
acccgtagaatggga

SEQ ID NO: 960815 - DNA, 15 bp, Homo sapiens
cccgtagaatgggag

SEQ ID NO: 960816 - DNA, 15 bp, Homo sapiens
ccgtagaatgggaga

SEQ ID NO: 960817 - DNA, 15 bp, Homo sapiens
cgtagaatgggagaa

SEQ ID NO: 960818 - DNA, 15 bp, Homo sapiens
gtagaatgggagaaa

SEQ ID NO: 960819 - DNA, 15 bp, Homo sapiens
tagaatgggagaaaa

SEQ ID NO: 960820 - DNA, 15 bp, Homo sapiens
agaatgggagaaaat

SEQ ID NO: 960821 - DNA, 15 bp, Homo sapiens
gaatgggagaaaata

SEQ ID NO: 960822 - DNA, 15 bp, Homo sapiens
aatgggagaaaatat

SEQ ID NO: 960823 - DNA, 15 bp, Homo sapiens
atgggagaaaatatt

SEQ ID NO: 960824 - DNA, 15 bp, Homo sapiens
tgggagaaaatattc

SEQ ID NO: 960825 - DNA, 15 bp, Homo sapiens
gggagaaaatattcc

SEQ ID NO: 960826 - DNA, 15 bp, Homo sapiens
ggagaaaatattccc

SEQ ID NO: 960827 - DNA, 15 bp, Homo sapiens
gagaaaatattccca

SEQ ID NO: 960828 - DNA, 15 bp, Homo sapiens
agaaaatattcccaa

SEQ ID NO: 960829 - DNA, 15 bp, Homo sapiens
gaaaatattcccaaa

SEQ ID NO: 960830 - DNA, 15 bp, Homo sapiens
aaaatattcccaaac

SEQ ID NO: 960831 - DNA, 15 bp, Homo sapiens
aaatattcccaaact

SEQ ID NO: 960832 - DNA, 15 bp, Homo sapiens
aatattcccaaacta

SEQ ID NO: 960833 - DNA, 15 bp, Homo sapiens
atattcccaaactat

SEQ ID NO: 960834 - DNA, 15 bp, Homo sapiens
tattcccaaactatg

SEQ ID NO: 960835 - DNA, 15 bp, Homo sapiens
attcccaaactatgc

SEQ ID NO: 960836 - DNA, 15 bp, Homo sapiens
ttcccaaactatgca

SEQ ID NO: 960837 - DNA, 15 bp, Homo sapiens
tcccaaactatgcat

SEQ ID NO: 960838 - DNA, 15 bp, Homo sapiens
cccaaactatgcatc

SEQ ID NO: 960839 - DNA, 15 bp, Homo sapiens
ccaaactatgcatct

SEQ ID NO: 960840 - DNA, 15 bp, Homo sapiens
caaactatgcatctg

SEQ ID NO: 960841 - DNA, 15 bp, Homo sapiens
aaactatgcatctga

SEQ ID NO: 960842 - DNA, 15 bp, Homo sapiens
aactatgcatctgac

SEQ ID NO: 960843 - DNA, 15 bp, Homo sapiens
actatgcatctgaca

SEQ ID NO: 960844 - DNA, 15 bp, Homo sapiens
ctatgcatctgacaa

SEQ ID NO: 960845 - DNA, 15 bp, Homo sapiens
tatgcatctgacaaa

SEQ ID NO: 960846 - DNA, 15 bp, Homo sapiens
atgcatctgacaaag

SEQ ID NO: 960847 - DNA, 15 bp, Homo sapiens
tgcatctgacaaagg

SEQ ID NO: 960848 - DNA, 15 bp, Homo sapiens
gcatctgacaaagga

SEQ ID NO: 960849 - DNA, 15 bp, Homo sapiens
catctgacaaaggac

SEQ ID NO: 960850 - DNA, 15 bp, Homo sapiens
atctgacaaaggact

SEQ ID NO: 960851 - DNA, 15 bp, Homo sapiens
tctgacaaaggacta

SEQ ID NO: 960852 - DNA, 15 bp, Homo sapiens
ctgacaaaggactaa

SEQ ID NO: 960853 - DNA, 15 bp, Homo sapiens
tgacaaaggactaat

SEQ ID NO: 960854 - DNA, 15 bp, Homo sapiens
gacaaaggactaata

SEQ ID NO: 960855 - DNA, 15 bp, Homo sapiens
acaaaggactaatat

SEQ ID NO: 960856 - DNA, 15 bp, Homo sapiens
caaaggactaatatc

SEQ ID NO: 960857 - DNA, 15 bp, Homo sapiens
aaaggactaatatcc

SEQ ID NO: 960858 - DNA, 15 bp, Homo sapiens
aaggactaatatcca

SEQ ID NO: 960859 - DNA, 15 bp, Homo sapiens
aggactaatatccag

SEQ ID NO: 960860 - DNA, 15 bp, Homo sapiens
ggactaatatccaga

SEQ ID NO: 960861 - DNA, 15 bp, Homo sapiens
gactaatatccagaa

SEQ ID NO: 960862 - DNA, 15 bp, Homo sapiens
actaatatccagaat

SEQ ID NO: 960863 - DNA, 15 bp, Homo sapiens
ctaatatccagaatc

SEQ ID NO: 960864 - DNA, 15 bp, Homo sapiens
taatatccagaatct

SEQ ID NO: 960865 - DNA, 15 bp, Homo sapiens
aatatccagaatcta

SEQ ID NO: 960866 - DNA, 15 bp, Homo sapiens
atatccagaatctat

SEQ ID NO: 960867 - DNA, 15 bp, Homo sapiens
tatccagaatctata

SEQ ID NO: 960868 - DNA, 15 bp, Homo sapiens
atccagaatctataa

SEQ ID NO: 960869 - DNA, 15 bp, Homo sapiens
tccagaatctataag

SEQ ID NO: 960870 - DNA, 15 bp, Homo sapiens
ccagaatctataagg

SEQ ID NO: 960871 - DNA, 15 bp, Homo sapiens
cagaatctataagga

SEQ ID NO: 960872 - DNA, 15 bp, Homo sapiens
agaatctataaggaa

SEQ ID NO: 960873 - DNA, 15 bp, Homo sapiens
gaatctataaggaac

SEQ ID NO: 960874 - DNA, 15 bp, Homo sapiens
aatctataaggaact

SEQ ID NO: 960875 - DNA, 15 bp, Homo sapiens
atctataaggaactc

SEQ ID NO: 960876 - DNA, 15 bp, Homo sapiens
tctataaggaactca

SEQ ID NO: 960877 - DNA, 15 bp, Homo sapiens
ctataaggaactcaa

SEQ ID NO: 960878 - DNA, 15 bp, Homo sapiens
tataaggaactcaaa

SEQ ID NO: 960879 - DNA, 15 bp, Homo sapiens
ataaggaactcaaat

SEQ ID NO: 960880 - DNA, 15 bp, Homo sapiens
taaggaactcaaatc

SEQ ID NO: 960881 - DNA, 15 bp, Homo sapiens
aaggaactcaaatca

SEQ ID NO: 960882 - DNA, 15 bp, Homo sapiens
aggaactcaaatcag

SEQ ID NO: 960883 - DNA, 15 bp, Homo sapiens
ggaactcaaatcagc

SEQ ID NO: 960884 - DNA, 15 bp, Homo sapiens
gaactcaaatcagca

SEQ ID NO: 960885 - DNA, 15 bp, Homo sapiens
aactcaaatcagcaa

SEQ ID NO: 960886 - DNA, 15 bp, Homo sapiens
actcaaatcagcaag

SEQ ID NO: 960887 - DNA, 15 bp, Homo sapiens
ctcaaatcagcaaga

SEQ ID NO: 960888 - DNA, 15 bp, Homo sapiens
tcaaatcagcaagaa

SEQ ID NO: 960889 - DNA, 15 bp, Homo sapiens
caaatcagcaagaaa

SEQ ID NO: 960890 - DNA, 15 bp, Homo sapiens
aaatcagcaagaaac

SEQ ID NO: 960891 - DNA, 15 bp, Homo sapiens
aatcagcaagaaaca

SEQ ID NO: 960892 - DNA, 15 bp, Homo sapiens
atcagcaagaaacaa

SEQ ID NO: 960893 - DNA, 15 bp, Homo sapiens
tcagcaagaaacaaa

SEQ ID NO: 960894 - DNA, 15 bp, Homo sapiens
cagcaagaaacaaag

SEQ ID NO: 960895 - DNA, 15 bp, Homo sapiens
agcaagaaacaaaga

SEQ ID NO: 960896 - DNA, 15 bp, Homo sapiens
gcaagaaacaaagaa

SEQ ID NO: 960897 - DNA, 15 bp, Homo sapiens
caagaaacaaagaat

SEQ ID NO: 960898 - DNA, 15 bp, Homo sapiens
aagaaacaaagaatc

SEQ ID NO: 960899 - DNA, 15 bp, Homo sapiens
agaaacaaagaatcc

SEQ ID NO: 960900 - DNA, 15 bp, Homo sapiens
gaaacaaagaatccc

SEQ ID NO: 960901 - DNA, 15 bp, Homo sapiens
aaacaaagaatccca

SEQ ID NO: 960902 - DNA, 15 bp, Homo sapiens
aacaaagaatcccat

SEQ ID NO: 960903 - DNA, 15 bp, Homo sapiens
acaaagaatcccatc

SEQ ID NO: 960904 - DNA, 15 bp, Homo sapiens
caaagaatcccatca

SEQ ID NO: 960905 - DNA, 15 bp, Homo sapiens
aaagaatcccatcaa

SEQ ID NO: 960906 - DNA, 15 bp, Homo sapiens
aagaatcccatcaaa

SEQ ID NO: 960907 - DNA, 15 bp, Homo sapiens
agaatcccatcaaaa

SEQ ID NO: 960908 - DNA, 15 bp, Homo sapiens
gaatcccatcaaaaa

SEQ ID NO: 960909 - DNA, 15 bp, Homo sapiens
aatcccatcaaaaag

SEQ ID NO: 960910 - DNA, 15 bp, Homo sapiens
atcccatcaaaaagt

SEQ ID NO: 960911 - DNA, 15 bp, Homo sapiens
tcccatcaaaaagtg

SEQ ID NO: 960912 - DNA, 15 bp, Homo sapiens
cccatcaaaaagtgg

SEQ ID NO: 960913 - DNA, 15 bp, Homo sapiens
ccatcaaaaagtggg

SEQ ID NO: 960914 - DNA, 15 bp, Homo sapiens
catcaaaaagtgggt

SEQ ID NO: 960915 - DNA, 15 bp, Homo sapiens
atcaaaaagtgggtt

SEQ ID NO: 960916 - DNA, 15 bp, Homo sapiens
tcaaaaagtgggtta

SEQ ID NO: 960917 - DNA, 15 bp, Homo sapiens
caaaaagtgggttaa

SEQ ID NO: 960918 - DNA, 15 bp, Homo sapiens
aaaaagtgggttaaa

SEQ ID NO: 960919 - DNA, 15 bp, Homo sapiens
aaaagtgggttaaag

SEQ ID NO: 960920 - DNA, 15 bp, Homo sapiens
aaagtgggttaaagc

SEQ ID NO: 960921 - DNA, 15 bp, Homo sapiens
aagtgggttaaagca

SEQ ID NO: 960922 - DNA, 15 bp, Homo sapiens
agtgggttaaagcag

SEQ ID NO: 960923 - DNA, 15 bp, Homo sapiens
gtgggttaaagcagg

SEQ ID NO: 960924 - DNA, 15 bp, Homo sapiens
tgggttaaagcagga

SEQ ID NO: 960925 - DNA, 15 bp, Homo sapiens
gggttaaagcaggat

SEQ ID NO: 960926 - DNA, 15 bp, Homo sapiens
ggttaaagcaggatg

SEQ ID NO: 960927 - DNA, 15 bp, Homo sapiens
gttaaagcaggatgc

SEQ ID NO: 960928 - DNA, 15 bp, Homo sapiens
ttaaagcaggatgca

SEQ ID NO: 960929 - DNA, 15 bp, Homo sapiens
taaagcaggatgcag

SEQ ID NO: 960930 - DNA, 15 bp, Homo sapiens
aaagcaggatgcagt

SEQ ID NO: 960931 - DNA, 15 bp, Homo sapiens
aagcaggatgcagtg

SEQ ID NO: 960932 - DNA, 15 bp, Homo sapiens
agcaggatgcagtgg

SEQ ID NO: 960933 - DNA, 15 bp, Homo sapiens
gcaggatgcagtggc

SEQ ID NO: 960934 - DNA, 15 bp, Homo sapiens
caggatgcagtggct

SEQ ID NO: 960935 - DNA, 15 bp, Homo sapiens
aggatgcagtggctc

SEQ ID NO: 960936 - DNA, 15 bp, Homo sapiens
ggatgcagtggctca

SEQ ID NO: 960937 - DNA, 15 bp, Homo sapiens
gatgcagtggctcaa

SEQ ID NO: 960938 - DNA, 15 bp, Homo sapiens
atgcagtggctcaag

SEQ ID NO: 960939 - DNA, 15 bp, Homo sapiens
tgcagtggctcaagc

SEQ ID NO: 960940 - DNA, 15 bp, Homo sapiens
gcagtggctcaagcc

SEQ ID NO: 960941 - DNA, 15 bp, Homo sapiens
cagtggctcaagcct

SEQ ID NO: 960942 - DNA, 15 bp, Homo sapiens
agtggctcaagcctg

SEQ ID NO: 960943 - DNA, 15 bp, Homo sapiens
gtggctcaagcctgt

SEQ ID NO: 960944 - DNA, 15 bp, Homo sapiens
tggctcaagcctgta

SEQ ID NO: 960945 - DNA, 15 bp, Homo sapiens
ggctcaagcctgtaa

SEQ ID NO: 960946 - DNA, 15 bp, Homo sapiens
gctcaagcctgtaat

SEQ ID NO: 960947 - DNA, 15 bp, Homo sapiens
ctcaagcctgtaatc

SEQ ID NO: 960948 - DNA, 15 bp, Homo sapiens
tcaagcctgtaatcc

SEQ ID NO: 960949 - DNA, 15 bp, Homo sapiens
caagcctgtaatccc

SEQ ID NO: 960950 - DNA, 15 bp, Homo sapiens
aagcctgtaatccca

SEQ ID NO: 960951 - DNA, 15 bp, Homo sapiens
agcctgtaatcccag

SEQ ID NO: 960952 - DNA, 15 bp, Homo sapiens
taatcccagcactta

SEQ ID NO: 960953 - DNA, 15 bp, Homo sapiens
aatcccagcacttag

SEQ ID NO: 960954 - DNA, 15 bp, Homo sapiens
atcccagcacttagg

SEQ ID NO: 960955 - DNA, 15 bp, Homo sapiens
tcccagcacttaggg

SEQ ID NO: 960956 - DNA, 15 bp, Homo sapiens
cccagcacttaggga

SEQ ID NO: 960957 - DNA, 15 bp, Homo sapiens
ccagcacttagggag

SEQ ID NO: 960958 - DNA, 15 bp, Homo sapiens
cagcacttagggagg

SEQ ID NO: 960959 - DNA, 15 bp, Homo sapiens
agcacttagggaggc

SEQ ID NO: 960960 - DNA, 15 bp, Homo sapiens
gcacttagggaggct

SEQ ID NO: 960961 - DNA, 15 bp, Homo sapiens
cacttagggaggctg

SEQ ID NO: 960962 - DNA, 15 bp, Homo sapiens
acttagggaggctga

SEQ ID NO: 960963 - DNA, 15 bp, Homo sapiens
cttagggaggctgag

SEQ ID NO: 960964 - DNA, 15 bp, Homo sapiens
ttagggaggctgagg

SEQ ID NO: 960965 - DNA, 15 bp, Homo sapiens
agggaggctgaggcg

SEQ ID NO: 960966 - DNA, 15 bp, Homo sapiens
gggaggctgaggcgg

SEQ ID NO: 960967 - DNA, 15 bp, Homo sapiens
ggaggctgaggcggg

SEQ ID NO: 960968 - DNA, 15 bp, Homo sapiens
gaggctgaggcgggt

SEQ ID NO: 960969 - DNA, 15 bp, Homo sapiens
aggctgaggcgggtg

SEQ ID NO: 960970 - DNA, 15 bp, Homo sapiens
ggctgaggcgggtgg

SEQ ID NO: 960971 - DNA, 15 bp, Homo sapiens
gctgaggcgggtgga

SEQ ID NO: 960972 - DNA, 15 bp, Homo sapiens
ctgaggcgggtggat

SEQ ID NO: 960973 - DNA, 15 bp, Homo sapiens
tgaggcgggtggatc

SEQ ID NO: 960974 - DNA, 15 bp, Homo sapiens
gaggcgggtggatca

SEQ ID NO: 960975 - DNA, 15 bp, Homo sapiens
acctgaggtcaggaa

SEQ ID NO: 960976 - DNA, 15 bp, Homo sapiens
cctgaggtcaggaat

SEQ ID NO: 960977 - DNA, 15 bp, Homo sapiens
ctgaggtcaggaatt

SEQ ID NO: 960978 - DNA, 15 bp, Homo sapiens
tgaggtcaggaattc

SEQ ID NO: 960979 - DNA, 15 bp, Homo sapiens
gaggtcaggaattca

SEQ ID NO: 960980 - DNA, 15 bp, Homo sapiens
aggtcaggaattcaa

SEQ ID NO: 960981 - DNA, 15 bp, Homo sapiens
ggtcaggaattcaag

SEQ ID NO: 960982 - DNA, 15 bp, Homo sapiens
gtcaggaattcaaga

SEQ ID NO: 960983 - DNA, 15 bp, Homo sapiens
tcaggaattcaagac

SEQ ID NO: 960984 - DNA, 15 bp, Homo sapiens
caggaattcaagacc

SEQ ID NO: 960985 - DNA, 15 bp, Homo sapiens
aggaattcaagacca

SEQ ID NO: 960986 - DNA, 15 bp, Homo sapiens
ggaattcaagaccag

SEQ ID NO: 960987 - DNA, 15 bp, Homo sapiens
gaattcaagaccagc

SEQ ID NO: 960988 - DNA, 15 bp, Homo sapiens
aattcaagaccagcc

SEQ ID NO: 960989 - DNA, 15 bp, Homo sapiens
attcaagaccagcct

SEQ ID NO: 960990 - DNA, 15 bp, Homo sapiens
tcaagaccagcctga

SEQ ID NO: 960991 - DNA, 15 bp, Homo sapiens
caagaccagcctgac

SEQ ID NO: 960992 - DNA, 15 bp, Homo sapiens
aagaccagcctgacc

SEQ ID NO: 960993 - DNA, 15 bp, Homo sapiens
agaccagcctgacca

SEQ ID NO: 960994 - DNA, 15 bp, Homo sapiens
gaccagcctgaccaa

SEQ ID NO: 960995 - DNA, 15 bp, Homo sapiens
accagcctgaccaac

SEQ ID NO: 960996 - DNA, 15 bp, Homo sapiens
ccagcctgaccaaca

SEQ ID NO: 960997 - DNA, 15 bp, Homo sapiens
cagcctgaccaacat

SEQ ID NO: 960998 - DNA, 15 bp, Homo sapiens
agcctgaccaacatg

SEQ ID NO: 960999 - DNA, 15 bp, Homo sapiens
gcctgaccaacatgg

SEQ ID NO: 961000 - DNA, 15 bp, Homo sapiens
cctgaccaacatggt

SEQ ID NO: 961001 - DNA, 15 bp, Homo sapiens
ctgaccaacatggtg

SEQ ID NO: 961002 - DNA, 15 bp, Homo sapiens
tgaccaacatggtga

SEQ ID NO: 961003 - DNA, 15 bp, Homo sapiens
gaccaacatggtgaa

SEQ ID NO: 961004 - DNA, 15 bp, Homo sapiens
accaacatggtgaaa

SEQ ID NO: 961005 - DNA, 15 bp, Homo sapiens
tctctactaaaaatt

SEQ ID NO: 961006 - DNA, 15 bp, Homo sapiens
ctctactaaaaattc

SEQ ID NO: 961007 - DNA, 15 bp, Homo sapiens
tctactaaaaattca

SEQ ID NO: 961008 - DNA, 15 bp, Homo sapiens
ctactaaaaattcaa

SEQ ID NO: 961009 - DNA, 15 bp, Homo sapiens
tactaaaaattcaaa

SEQ ID NO: 961010 - DNA, 15 bp, Homo sapiens
actaaaaattcaaaa

SEQ ID NO: 961011 - DNA, 15 bp, Homo sapiens
ctaaaaattcaaaaa

SEQ ID NO: 961012 - DNA, 15 bp, Homo sapiens
taaaaattcaaaaat

SEQ ID NO: 961013 - DNA, 15 bp, Homo sapiens
aaaaattcaaaaatt

SEQ ID NO: 961014 - DNA, 15 bp, Homo sapiens
aaaattcaaaaatta

SEQ ID NO: 961015 - DNA, 15 bp, Homo sapiens
aaattcaaaaattag

SEQ ID NO: 961016 - DNA, 15 bp, Homo sapiens
aattcaaaaattagc

SEQ ID NO: 961017 - DNA, 15 bp, Homo sapiens
attcaaaaattagcc

SEQ ID NO: 961018 - DNA, 15 bp, Homo sapiens
ttcaaaaattagccg

SEQ ID NO: 961019 - DNA, 15 bp, Homo sapiens
tcaaaaattagccgt

SEQ ID NO: 961020 - DNA, 15 bp, Homo sapiens
caaaaattagccgtg

SEQ ID NO: 961021 - DNA, 15 bp, Homo sapiens
aaaaattagccgtgt

SEQ ID NO: 961022 - DNA, 15 bp, Homo sapiens
aaaattagccgtgtg

SEQ ID NO: 961023 - DNA, 15 bp, Homo sapiens
aaattagccgtgtgt

SEQ ID NO: 961024 - DNA, 15 bp, Homo sapiens
aattagccgtgtgtg

SEQ ID NO: 961025 - DNA, 15 bp, Homo sapiens
attagccgtgtgtgg

SEQ ID NO: 961026 - DNA, 15 bp, Homo sapiens
ttagccgtgtgtggt

SEQ ID NO: 961027 - DNA, 15 bp, Homo sapiens
tagccgtgtgtggtg

SEQ ID NO: 961028 - DNA, 15 bp, Homo sapiens
agccgtgtgtggtgg

SEQ ID NO: 961029 - DNA, 15 bp, Homo sapiens
gccgtgtgtggtggc

SEQ ID NO: 961030 - DNA, 15 bp, Homo sapiens
ccgtgtgtggtggca

SEQ ID NO: 961031 - DNA, 15 bp, Homo sapiens
cgtgtgtggtggcat

SEQ ID NO: 961032 - DNA, 15 bp, Homo sapiens
gtgtgtggtggcatg

SEQ ID NO: 961033 - DNA, 15 bp, Homo sapiens
tgtgtggtggcatgt

SEQ ID NO: 961034 - DNA, 15 bp, Homo sapiens
gtgtggtggcatgtg

SEQ ID NO: 961035 - DNA, 15 bp, Homo sapiens
tgtggtggcatgtgc

SEQ ID NO: 961036 - DNA, 15 bp, Homo sapiens
gtggtggcatgtgcc

SEQ ID NO: 961037 - DNA, 15 bp, Homo sapiens
tggtggcatgtgcct

SEQ ID NO: 961038 - DNA, 15 bp, Homo sapiens
ggtggcatgtgcctg

SEQ ID NO: 961039 - DNA, 15 bp, Homo sapiens
gtggcatgtgcctgt

SEQ ID NO: 961040 - DNA, 15 bp, Homo sapiens
tggcatgtgcctgta

SEQ ID NO: 961041 - DNA, 15 bp, Homo sapiens
ggcatgtgcctgtag

SEQ ID NO: 961042 - DNA, 15 bp, Homo sapiens
gcatgtgcctgtagt

SEQ ID NO: 961043 - DNA, 15 bp, Homo sapiens
catgtgcctgtagtc

SEQ ID NO: 961044 - DNA, 15 bp, Homo sapiens
atgtgcctgtagtcc

SEQ ID NO: 961045 - DNA, 15 bp, Homo sapiens
tgtgcctgtagtccc

SEQ ID NO: 961046 - DNA, 15 bp, Homo sapiens
gtgcctgtagtccca

SEQ ID NO: 961047 - DNA, 15 bp, Homo sapiens
tgcctgtagtcccag

SEQ ID NO: 961048 - DNA, 15 bp, Homo sapiens
tagtcccagctactt

SEQ ID NO: 961049 - DNA, 15 bp, Homo sapiens
agtcccagctacttg

SEQ ID NO: 961050 - DNA, 15 bp, Homo sapiens
gtcccagctacttgg

SEQ ID NO: 961051 - DNA, 15 bp, Homo sapiens
caggagaattgcttt

SEQ ID NO: 961052 - DNA, 15 bp, Homo sapiens
aggagaattgctttg

SEQ ID NO: 961053 - DNA, 15 bp, Homo sapiens
ggagaattgctttga

SEQ ID NO: 961054 - DNA, 15 bp, Homo sapiens
gagaattgctttgaa

SEQ ID NO: 961055 - DNA, 15 bp, Homo sapiens
agaattgctttgaac

SEQ ID NO: 961056 - DNA, 15 bp, Homo sapiens
gaattgctttgaacc

SEQ ID NO: 961057 - DNA, 15 bp, Homo sapiens
aattgctttgaaccc

SEQ ID NO: 961058 - DNA, 15 bp, Homo sapiens
attgctttgaaccca

SEQ ID NO: 961059 - DNA, 15 bp, Homo sapiens
ttgctttgaacccag

SEQ ID NO: 961060 - DNA, 15 bp, Homo sapiens
tgctttgaacccagg

SEQ ID NO: 961061 - DNA, 15 bp, Homo sapiens
gctttgaacccagga

SEQ ID NO: 961062 - DNA, 15 bp, Homo sapiens
ctttgaacccaggag

SEQ ID NO: 961063 - DNA, 15 bp, Homo sapiens
tttgaacccaggagg

SEQ ID NO: 961064 - DNA, 15 bp, Homo sapiens
ttgaacccaggaggt

SEQ ID NO: 961065 - DNA, 15 bp, Homo sapiens
gaggtggaggttgcg

SEQ ID NO: 961066 - DNA, 15 bp, Homo sapiens
aggtggaggttgcgg

SEQ ID NO: 961067 - DNA, 15 bp, Homo sapiens
ggtggaggttgcggt

SEQ ID NO: 961068 - DNA, 15 bp, Homo sapiens
gtggaggttgcggtg

SEQ ID NO: 961069 - DNA, 15 bp, Homo sapiens
tggaggttgcggtga

SEQ ID NO: 961070 - DNA, 15 bp, Homo sapiens
ggaggttgcggtgag

SEQ ID NO: 961071 - DNA, 15 bp, Homo sapiens
gaggttgcggtgagc

SEQ ID NO: 961072 - DNA, 15 bp, Homo sapiens
aggttgcggtgagct

SEQ ID NO: 961073 - DNA, 15 bp, Homo sapiens
ggttgcggtgagctg

SEQ ID NO: 961074 - DNA, 15 bp, Homo sapiens
gttgcggtgagctga

SEQ ID NO: 961075 - DNA, 15 bp, Homo sapiens
ttgcggtgagctgag

SEQ ID NO: 961076 - DNA, 15 bp, Homo sapiens
tgcggtgagctgaga

SEQ ID NO: 961077 - DNA, 15 bp, Homo sapiens
gcggtgagctgagat

SEQ ID NO: 961078 - DNA, 15 bp, Homo sapiens
cggtgagctgagatc

SEQ ID NO: 961079 - DNA, 15 bp, Homo sapiens
ggtgagctgagatca

SEQ ID NO: 961080 - DNA, 15 bp, Homo sapiens
ctgagatcatgccat

SEQ ID NO: 961081 - DNA, 15 bp, Homo sapiens
tgagatcatgccatt

SEQ ID NO: 961082 - DNA, 15 bp, Homo sapiens
gagatcatgccattg

SEQ ID NO: 961083 - DNA, 15 bp, Homo sapiens
agatcatgccattgt

SEQ ID NO: 961084 - DNA, 15 bp, Homo sapiens
gatcatgccattgta

SEQ ID NO: 961085 - DNA, 15 bp, Homo sapiens
atcatgccattgtac

SEQ ID NO: 961086 - DNA, 15 bp, Homo sapiens
tcatgccattgtact

SEQ ID NO: 961087 - DNA, 15 bp, Homo sapiens
catgccattgtactc

SEQ ID NO: 961088 - DNA, 15 bp, Homo sapiens
atgccattgtactcc

SEQ ID NO: 961089 - DNA, 15 bp, Homo sapiens
tgccattgtactcca

SEQ ID NO: 961090 - DNA, 15 bp, Homo sapiens
gtactccagcctggg

SEQ ID NO: 961091 - DNA, 15 bp, Homo sapiens
tactccagcctgggc

SEQ ID NO: 961092 - DNA, 15 bp, Homo sapiens
ctgggcaacaagagt

SEQ ID NO: 961093 - DNA, 15 bp, Homo sapiens
tgggcaacaagagtg

SEQ ID NO: 961094 - DNA, 15 bp, Homo sapiens
gggcaacaagagtga

SEQ ID NO: 961095 - DNA, 15 bp, Homo sapiens
ggcaacaagagtgag

SEQ ID NO: 961096 - DNA, 15 bp, Homo sapiens
gcaacaagagtgaga

SEQ ID NO: 961097 - DNA, 15 bp, Homo sapiens
caacaagagtgagac

SEQ ID NO: 961098 - DNA, 15 bp, Homo sapiens
aacaagagtgagact

SEQ ID NO: 961099 - DNA, 15 bp, Homo sapiens
acaagagtgagactc

SEQ ID NO: 961100 - DNA, 15 bp, Homo sapiens
caagagtgagactcc

SEQ ID NO: 961101 - DNA, 15 bp, Homo sapiens
aagagtgagactcca

SEQ ID NO: 961102 - DNA, 15 bp, Homo sapiens
aaaaaaaaaaaagtg

SEQ ID NO: 961103 - DNA, 15 bp, Homo sapiens
aaaaaaaaaaagtgg

SEQ ID NO: 961104 - DNA, 15 bp, Homo sapiens
aaaaaaaaaagtggg

SEQ ID NO: 961105 - DNA, 15 bp, Homo sapiens
aaaaaaaaagtgggc

SEQ ID NO: 961106 - DNA, 15 bp, Homo sapiens
aaaaaaaagtgggct

SEQ ID NO: 961107 - DNA, 15 bp, Homo sapiens
aaaaaaagtgggcta

SEQ ID NO: 961108 - DNA, 15 bp, Homo sapiens
aaaaaagtgggctaa

SEQ ID NO: 961109 - DNA, 15 bp, Homo sapiens
aaaaagtgggctaag

SEQ ID NO: 961110 - DNA, 15 bp, Homo sapiens
aaaagtgggctaagg

SEQ ID NO: 961111 - DNA, 15 bp, Homo sapiens
aaagtgggctaagga

SEQ ID NO: 961112 - DNA, 15 bp, Homo sapiens
aagtgggctaaggac

SEQ ID NO: 961113 - DNA, 15 bp, Homo sapiens
agtgggctaaggaca

SEQ ID NO: 961114 - DNA, 15 bp, Homo sapiens
gtgggctaaggacat

SEQ ID NO: 961115 - DNA, 15 bp, Homo sapiens
tgggctaaggacatg

SEQ ID NO: 961116 - DNA, 15 bp, Homo sapiens
gggctaaggacatga

SEQ ID NO: 961117 - DNA, 15 bp, Homo sapiens
ggctaaggacatgaa

SEQ ID NO: 961118 - DNA, 15 bp, Homo sapiens
gctaaggacatgaat

SEQ ID NO: 961119 - DNA, 15 bp, Homo sapiens
ctaaggacatgaata

SEQ ID NO: 961120 - DNA, 15 bp, Homo sapiens
taaggacatgaatag

SEQ ID NO: 961121 - DNA, 15 bp, Homo sapiens
aaggacatgaataga

SEQ ID NO: 961122 - DNA, 15 bp, Homo sapiens
aggacatgaatagac

SEQ ID NO: 961123 - DNA, 15 bp, Homo sapiens
ggacatgaatagaca

SEQ ID NO: 961124 - DNA, 15 bp, Homo sapiens
gacatgaatagacaa

SEQ ID NO: 961125 - DNA, 15 bp, Homo sapiens
acatgaatagacaat

SEQ ID NO: 961126 - DNA, 15 bp, Homo sapiens
catgaatagacaatt

SEQ ID NO: 961127 - DNA, 15 bp, Homo sapiens
atgaatagacaattc

SEQ ID NO: 961128 - DNA, 15 bp, Homo sapiens
tgaatagacaattct

SEQ ID NO: 961129 - DNA, 15 bp, Homo sapiens
gaatagacaattctc

SEQ ID NO: 961130 - DNA, 15 bp, Homo sapiens
aatagacaattctca

SEQ ID NO: 961131 - DNA, 15 bp, Homo sapiens
atagacaattctcaa

SEQ ID NO: 961132 - DNA, 15 bp, Homo sapiens
tagacaattctcaaa

SEQ ID NO: 961133 - DNA, 15 bp, Homo sapiens
agacaattctcaaaa

SEQ ID NO: 961134 - DNA, 15 bp, Homo sapiens
gacaattctcaaaag

SEQ ID NO: 961135 - DNA, 15 bp, Homo sapiens
acaattctcaaaaga

SEQ ID NO: 961136 - DNA, 15 bp, Homo sapiens
caattctcaaaagaa

SEQ ID NO: 961137 - DNA, 15 bp, Homo sapiens
aattctcaaaagaag

SEQ ID NO: 961138 - DNA, 15 bp, Homo sapiens
attctcaaaagaaga

SEQ ID NO: 961139 - DNA, 15 bp, Homo sapiens
ttctcaaaagaagat

SEQ ID NO: 961140 - DNA, 15 bp, Homo sapiens
tctcaaaagaagata

SEQ ID NO: 961141 - DNA, 15 bp, Homo sapiens
ctcaaaagaagatat

SEQ ID NO: 961142 - DNA, 15 bp, Homo sapiens
tcaaaagaagatata

SEQ ID NO: 961143 - DNA, 15 bp, Homo sapiens
caaaagaagatatat

SEQ ID NO: 961144 - DNA, 15 bp, Homo sapiens
aaaagaagatatata

SEQ ID NO: 961145 - DNA, 15 bp, Homo sapiens
aaagaagatatataa

SEQ ID NO: 961146 - DNA, 15 bp, Homo sapiens
aagaagatatataaa

SEQ ID NO: 961147 - DNA, 15 bp, Homo sapiens
agaagatatataaat

SEQ ID NO: 961148 - DNA, 15 bp, Homo sapiens
gaagatatataaatg

SEQ ID NO: 961149 - DNA, 15 bp, Homo sapiens
aagatatataaatgg

SEQ ID NO: 961150 - DNA, 15 bp, Homo sapiens
agatatataaatggt

SEQ ID NO: 961151 - DNA, 15 bp, Homo sapiens
gatatataaatggtc

SEQ ID NO: 961152 - DNA, 15 bp, Homo sapiens
atatataaatggtca

SEQ ID NO: 961153 - DNA, 15 bp, Homo sapiens
tatataaatggtcaa

SEQ ID NO: 961154 - DNA, 15 bp, Homo sapiens
atataaatggtcaac

SEQ ID NO: 961155 - DNA, 15 bp, Homo sapiens
tataaatggtcaaca

SEQ ID NO: 961156 - DNA, 15 bp, Homo sapiens
ataaatggtcaacaa

SEQ ID NO: 961157 - DNA, 15 bp, Homo sapiens
taaatggtcaacaaa

SEQ ID NO: 961158 - DNA, 15 bp, Homo sapiens
aaatggtcaacaaac

SEQ ID NO: 961159 - DNA, 15 bp, Homo sapiens
aatggtcaacaaaca

SEQ ID NO: 961160 - DNA, 15 bp, Homo sapiens
atggtcaacaaacat

SEQ ID NO: 961161 - DNA, 15 bp, Homo sapiens
tggtcaacaaacatg

SEQ ID NO: 961162 - DNA, 15 bp, Homo sapiens
ggtcaacaaacatga

SEQ ID NO: 961163 - DNA, 15 bp, Homo sapiens
gtcaacaaacatgaa

SEQ ID NO: 961164 - DNA, 15 bp, Homo sapiens
tcaacaaacatgaaa

SEQ ID NO: 961165 - DNA, 15 bp, Homo sapiens
caacaaacatgaaaa

SEQ ID NO: 961166 - DNA, 15 bp, Homo sapiens
aacaaacatgaaaaa

SEQ ID NO: 961167 - DNA, 15 bp, Homo sapiens
acaaacatgaaaaaa

SEQ ID NO: 961168 - DNA, 15 bp, Homo sapiens
caaacatgaaaaaat

SEQ ID NO: 961169 - DNA, 15 bp, Homo sapiens
aaacatgaaaaaatg

SEQ ID NO: 961170 - DNA, 15 bp, Homo sapiens
aacatgaaaaaatgc

SEQ ID NO: 961171 - DNA, 15 bp, Homo sapiens
acatgaaaaaatgct

SEQ ID NO: 961172 - DNA, 15 bp, Homo sapiens
catgaaaaaatgctc

SEQ ID NO: 961173 - DNA, 15 bp, Homo sapiens
atgaaaaaatgctca

SEQ ID NO: 961174 - DNA, 15 bp, Homo sapiens
tgaaaaaatgctcaa

SEQ ID NO: 961175 - DNA, 15 bp, Homo sapiens
gaaaaaatgctcaac

SEQ ID NO: 961176 - DNA, 15 bp, Homo sapiens
aaaaaatgctcaaca

SEQ ID NO: 961177 - DNA, 15 bp, Homo sapiens
aaaaatgctcaacat

SEQ ID NO: 961178 - DNA, 15 bp, Homo sapiens
aaaatgctcaacatc

SEQ ID NO: 961179 - DNA, 15 bp, Homo sapiens
aaatgctcaacatca

SEQ ID NO: 961180 - DNA, 15 bp, Homo sapiens
aatgctcaacatcat

SEQ ID NO: 961181 - DNA, 15 bp, Homo sapiens
atgctcaacatcatt

SEQ ID NO: 961182 - DNA, 15 bp, Homo sapiens
tgctcaacatcatta

SEQ ID NO: 961183 - DNA, 15 bp, Homo sapiens
gctcaacatcattaa

SEQ ID NO: 961184 - DNA, 15 bp, Homo sapiens
ctcaacatcattaat

SEQ ID NO: 961185 - DNA, 15 bp, Homo sapiens
tcaacatcattaatc

SEQ ID NO: 961186 - DNA, 15 bp, Homo sapiens
caacatcattaatca

SEQ ID NO: 961187 - DNA, 15 bp, Homo sapiens
aacatcattaatcat

SEQ ID NO: 961188 - DNA, 15 bp, Homo sapiens
acatcattaatcatc

SEQ ID NO: 961189 - DNA, 15 bp, Homo sapiens
catcattaatcatca

SEQ ID NO: 961190 - DNA, 15 bp, Homo sapiens
atcattaatcatcag

SEQ ID NO: 961191 - DNA, 15 bp, Homo sapiens
tcattaatcatcagg

SEQ ID NO: 961192 - DNA, 15 bp, Homo sapiens
cattaatcatcaggg

SEQ ID NO: 961193 - DNA, 15 bp, Homo sapiens
attaatcatcaggga

SEQ ID NO: 961194 - DNA, 15 bp, Homo sapiens
ttaatcatcagggaa

SEQ ID NO: 961195 - DNA, 15 bp, Homo sapiens
taatcatcagggaaa

SEQ ID NO: 961196 - DNA, 15 bp, Homo sapiens
aatcatcagggaaat

SEQ ID NO: 961197 - DNA, 15 bp, Homo sapiens
atcatcagggaaatg

SEQ ID NO: 961198 - DNA, 15 bp, Homo sapiens
tcatcagggaaatgc

SEQ ID NO: 961199 - DNA, 15 bp, Homo sapiens
catcagggaaatgca

SEQ ID NO: 961200 - DNA, 15 bp, Homo sapiens
atcagggaaatgcaa

SEQ ID NO: 961201 - DNA, 15 bp, Homo sapiens
tcagggaaatgcaaa

SEQ ID NO: 961202 - DNA, 15 bp, Homo sapiens
cagggaaatgcaaat

SEQ ID NO: 961203 - DNA, 15 bp, Homo sapiens
agggaaatgcaaatt

SEQ ID NO: 961204 - DNA, 15 bp, Homo sapiens
gggaaatgcaaatta

SEQ ID NO: 961205 - DNA, 15 bp, Homo sapiens
ggaaatgcaaattaa

SEQ ID NO: 961206 - DNA, 15 bp, Homo sapiens
gaaatgcaaattaaa

SEQ ID NO: 961207 - DNA, 15 bp, Homo sapiens
aaatgcaaattaaaa

SEQ ID NO: 961208 - DNA, 15 bp, Homo sapiens
aatgcaaattaaaac

SEQ ID NO: 961209 - DNA, 15 bp, Homo sapiens
atgcaaattaaaacc

SEQ ID NO: 961210 - DNA, 15 bp, Homo sapiens
tgcaaattaaaacca

SEQ ID NO: 961211 - DNA, 15 bp, Homo sapiens
gcaaattaaaaccac

SEQ ID NO: 961212 - DNA, 15 bp, Homo sapiens
caaattaaaaccaca

SEQ ID NO: 961213 - DNA, 15 bp, Homo sapiens
aaattaaaaccacaa

SEQ ID NO: 961214 - DNA, 15 bp, Homo sapiens
aattaaaaccacaat

SEQ ID NO: 961215 - DNA, 15 bp, Homo sapiens
attaaaaccacaatg

SEQ ID NO: 961216 - DNA, 15 bp, Homo sapiens
ttaaaaccacaatga

SEQ ID NO: 961217 - DNA, 15 bp, Homo sapiens
taaaaccacaatgag

SEQ ID NO: 961218 - DNA, 15 bp, Homo sapiens
aaaaccacaatgaga

SEQ ID NO: 961219 - DNA, 15 bp, Homo sapiens
aaaccacaatgagat

SEQ ID NO: 961220 - DNA, 15 bp, Homo sapiens
aaccacaatgagata

SEQ ID NO: 961221 - DNA, 15 bp, Homo sapiens
accacaatgagatac

SEQ ID NO: 961222 - DNA, 15 bp, Homo sapiens
ccacaatgagatacc

SEQ ID NO: 961223 - DNA, 15 bp, Homo sapiens
cacaatgagatacca

SEQ ID NO: 961224 - DNA, 15 bp, Homo sapiens
acaatgagataccac

SEQ ID NO: 961225 - DNA, 15 bp, Homo sapiens
caatgagataccacc

SEQ ID NO: 961226 - DNA, 15 bp, Homo sapiens
aatgagataccacct

SEQ ID NO: 961227 - DNA, 15 bp, Homo sapiens
atgagataccacctt

SEQ ID NO: 961228 - DNA, 15 bp, Homo sapiens
tgagataccacctta

SEQ ID NO: 961229 - DNA, 15 bp, Homo sapiens
gagataccaccttac

SEQ ID NO: 961230 - DNA, 15 bp, Homo sapiens
agataccaccttact

SEQ ID NO: 961231 - DNA, 15 bp, Homo sapiens
gataccaccttactc

SEQ ID NO: 961232 - DNA, 15 bp, Homo sapiens
ataccaccttactcc

SEQ ID NO: 961233 - DNA, 15 bp, Homo sapiens
taccaccttactcct

SEQ ID NO: 961234 - DNA, 15 bp, Homo sapiens
accaccttactcctg

SEQ ID NO: 961235 - DNA, 15 bp, Homo sapiens
ccaccttactcctgc

SEQ ID NO: 961236 - DNA, 15 bp, Homo sapiens
caccttactcctgca

SEQ ID NO: 961237 - DNA, 15 bp, Homo sapiens
accttactcctgcaa

SEQ ID NO: 961238 - DNA, 15 bp, Homo sapiens
ccttactcctgcaag

SEQ ID NO: 961239 - DNA, 15 bp, Homo sapiens
cttactcctgcaaga

SEQ ID NO: 961240 - DNA, 15 bp, Homo sapiens
ttactcctgcaagaa

SEQ ID NO: 961241 - DNA, 15 bp, Homo sapiens
tactcctgcaagaat

SEQ ID NO: 961242 - DNA, 15 bp, Homo sapiens
actcctgcaagaatg

SEQ ID NO: 961243 - DNA, 15 bp, Homo sapiens
ctcctgcaagaatgg

SEQ ID NO: 961244 - DNA, 15 bp, Homo sapiens
tcctgcaagaatggc

SEQ ID NO: 961245 - DNA, 15 bp, Homo sapiens
cctgcaagaatggcc

SEQ ID NO: 961246 - DNA, 15 bp, Homo sapiens
ctgcaagaatggcca

SEQ ID NO: 961247 - DNA, 15 bp, Homo sapiens
tgcaagaatggccat

SEQ ID NO: 961248 - DNA, 15 bp, Homo sapiens
gcaagaatggccata

SEQ ID NO: 961249 - DNA, 15 bp, Homo sapiens
caagaatggccataa

SEQ ID NO: 961250 - DNA, 15 bp, Homo sapiens
aagaatggccataat

SEQ ID NO: 961251 - DNA, 15 bp, Homo sapiens
agaatggccataatt

SEQ ID NO: 961252 - DNA, 15 bp, Homo sapiens
gaatggccataatta

SEQ ID NO: 961253 - DNA, 15 bp, Homo sapiens
aatggccataattaa

SEQ ID NO: 961254 - DNA, 15 bp, Homo sapiens
atggccataattaaa

SEQ ID NO: 961255 - DNA, 15 bp, Homo sapiens
tggccataattaaaa

SEQ ID NO: 961256 - DNA, 15 bp, Homo sapiens
ggccataattaaaaa

SEQ ID NO: 961257 - DNA, 15 bp, Homo sapiens
gccataattaaaaag

SEQ ID NO: 961258 - DNA, 15 bp, Homo sapiens
ccataattaaaaagt

SEQ ID NO: 961259 - DNA, 15 bp, Homo sapiens
cataattaaaaagtc

SEQ ID NO: 961260 - DNA, 15 bp, Homo sapiens
ataattaaaaagtca

SEQ ID NO: 961261 - DNA, 15 bp, Homo sapiens
taattaaaaagtcaa

SEQ ID NO: 961262 - DNA, 15 bp, Homo sapiens
aattaaaaagtcaaa

SEQ ID NO: 961263 - DNA, 15 bp, Homo sapiens
attaaaaagtcaaaa

SEQ ID NO: 961264 - DNA, 15 bp, Homo sapiens
ttaaaaagtcaaaaa

SEQ ID NO: 961265 - DNA, 15 bp, Homo sapiens
taaaaagtcaaaaaa

SEQ ID NO: 961266 - DNA, 15 bp, Homo sapiens
aaaaagtcaaaaaac

SEQ ID NO: 961267 - DNA, 15 bp, Homo sapiens
aaaagtcaaaaaaca

SEQ ID NO: 961268 - DNA, 15 bp, Homo sapiens
aaagtcaaaaaacaa

SEQ ID NO: 961269 - DNA, 15 bp, Homo sapiens
aagtcaaaaaacaac

SEQ ID NO: 961270 - DNA, 15 bp, Homo sapiens
agtcaaaaaacaaca

SEQ ID NO: 961271 - DNA, 15 bp, Homo sapiens
gtcaaaaaacaacag

SEQ ID NO: 961272 - DNA, 15 bp, Homo sapiens
tcaaaaaacaacaga

SEQ ID NO: 961273 - DNA, 15 bp, Homo sapiens
caaaaaacaacagat

SEQ ID NO: 961274 - DNA, 15 bp, Homo sapiens
aaaaaacaacagatg

SEQ ID NO: 961275 - DNA, 15 bp, Homo sapiens
aaaaacaacagatgt

SEQ ID NO: 961276 - DNA, 15 bp, Homo sapiens
aaaacaacagatgtt

SEQ ID NO: 961277 - DNA, 15 bp, Homo sapiens
aaacaacagatgttg

SEQ ID NO: 961278 - DNA, 15 bp, Homo sapiens
aacaacagatgttga

SEQ ID NO: 961279 - DNA, 15 bp, Homo sapiens
acaacagatgttgac

SEQ ID NO: 961280 - DNA, 15 bp, Homo sapiens
caacagatgttgaca

SEQ ID NO: 961281 - DNA, 15 bp, Homo sapiens
aacagatgttgacat

SEQ ID NO: 961282 - DNA, 15 bp, Homo sapiens
acagatgttgacatg

SEQ ID NO: 961283 - DNA, 15 bp, Homo sapiens
cagatgttgacatgg

SEQ ID NO: 961284 - DNA, 15 bp, Homo sapiens
agatgttgacatgga

SEQ ID NO: 961285 - DNA, 15 bp, Homo sapiens
gatgttgacatggat

SEQ ID NO: 961286 - DNA, 15 bp, Homo sapiens
atgttgacatggatg

SEQ ID NO: 961287 - DNA, 15 bp, Homo sapiens
tgttgacatggatgt

SEQ ID NO: 961288 - DNA, 15 bp, Homo sapiens
gttgacatggatgtg

SEQ ID NO: 961289 - DNA, 15 bp, Homo sapiens
ttgacatggatgtgg

SEQ ID NO: 961290 - DNA, 15 bp, Homo sapiens
tgacatggatgtggt

SEQ ID NO: 961291 - DNA, 15 bp, Homo sapiens
gacatggatgtggtg

SEQ ID NO: 961292 - DNA, 15 bp, Homo sapiens
acatggatgtggtga

SEQ ID NO: 961293 - DNA, 15 bp, Homo sapiens
catggatgtggtgaa

SEQ ID NO: 961294 - DNA, 15 bp, Homo sapiens
atggatgtggtgaaa

SEQ ID NO: 961295 - DNA, 15 bp, Homo sapiens
tggatgtggtgaaat

SEQ ID NO: 961296 - DNA, 15 bp, Homo sapiens
ggatgtggtgaaatg

SEQ ID NO: 961297 - DNA, 15 bp, Homo sapiens
gatgtggtgaaatga

SEQ ID NO: 961298 - DNA, 15 bp, Homo sapiens
atgtggtgaaatgag

SEQ ID NO: 961299 - DNA, 15 bp, Homo sapiens
tgtggtgaaatgaga

SEQ ID NO: 961300 - DNA, 15 bp, Homo sapiens
gtggtgaaatgagaa

SEQ ID NO: 961301 - DNA, 15 bp, Homo sapiens
tggtgaaatgagaat

SEQ ID NO: 961302 - DNA, 15 bp, Homo sapiens
ggtgaaatgagaatg

SEQ ID NO: 961303 - DNA, 15 bp, Homo sapiens
gtgaaatgagaatgc

SEQ ID NO: 961304 - DNA, 15 bp, Homo sapiens
tgaaatgagaatgct

SEQ ID NO: 961305 - DNA, 15 bp, Homo sapiens
gaaatgagaatgctt

SEQ ID NO: 961306 - DNA, 15 bp, Homo sapiens
aaatgagaatgctta

SEQ ID NO: 961307 - DNA, 15 bp, Homo sapiens
aatgagaatgcttat

SEQ ID NO: 961308 - DNA, 15 bp, Homo sapiens
atgagaatgcttata

SEQ ID NO: 961309 - DNA, 15 bp, Homo sapiens
tgagaatgcttatac

SEQ ID NO: 961310 - DNA, 15 bp, Homo sapiens
gagaatgcttataca

SEQ ID NO: 961311 - DNA, 15 bp, Homo sapiens
agaatgcttatacac

SEQ ID NO: 961312 - DNA, 15 bp, Homo sapiens
gaatgcttatacact

SEQ ID NO: 961313 - DNA, 15 bp, Homo sapiens
aatgcttatacactc

SEQ ID NO: 961314 - DNA, 15 bp, Homo sapiens
atgcttatacactcc

SEQ ID NO: 961315 - DNA, 15 bp, Homo sapiens
tgcttatacactcct

SEQ ID NO: 961316 - DNA, 15 bp, Homo sapiens
gcttatacactcctg

SEQ ID NO: 961317 - DNA, 15 bp, Homo sapiens
cttatacactcctgg

SEQ ID NO: 961318 - DNA, 15 bp, Homo sapiens
ttatacactcctggt

SEQ ID NO: 961319 - DNA, 15 bp, Homo sapiens
tatacactcctggtg

SEQ ID NO: 961320 - DNA, 15 bp, Homo sapiens
atacactcctggtgg

SEQ ID NO: 961321 - DNA, 15 bp, Homo sapiens
tacactcctggtggg

SEQ ID NO: 961322 - DNA, 15 bp, Homo sapiens
acactcctggtggga

SEQ ID NO: 961323 - DNA, 15 bp, Homo sapiens
cactcctggtgggaa

SEQ ID NO: 961324 - DNA, 15 bp, Homo sapiens
actcctggtgggaat

SEQ ID NO: 961325 - DNA, 15 bp, Homo sapiens
ctcctggtgggaatg

SEQ ID NO: 961326 - DNA, 15 bp, Homo sapiens
tcctggtgggaatgt

SEQ ID NO: 961327 - DNA, 15 bp, Homo sapiens
cctggtgggaatgta

SEQ ID NO: 961328 - DNA, 15 bp, Homo sapiens
ctggtgggaatgtaa

SEQ ID NO: 961329 - DNA, 15 bp, Homo sapiens
tggtgggaatgtaaa

SEQ ID NO: 961330 - DNA, 15 bp, Homo sapiens
ggtgggaatgtaaat

SEQ ID NO: 961331 - DNA, 15 bp, Homo sapiens
gtgggaatgtaaatt

SEQ ID NO: 961332 - DNA, 15 bp, Homo sapiens
tgggaatgtaaatta

SEQ ID NO: 961333 - DNA, 15 bp, Homo sapiens
gggaatgtaaattag

SEQ ID NO: 961334 - DNA, 15 bp, Homo sapiens
ggaatgtaaattagt

SEQ ID NO: 961335 - DNA, 15 bp, Homo sapiens
gaatgtaaattagta

SEQ ID NO: 961336 - DNA, 15 bp, Homo sapiens
aatgtaaattagtac

SEQ ID NO: 961337 - DNA, 15 bp, Homo sapiens
atgtaaattagtaca

SEQ ID NO: 961338 - DNA, 15 bp, Homo sapiens
tgtaaattagtacag

SEQ ID NO: 961339 - DNA, 15 bp, Homo sapiens
gtaaattagtacagc

SEQ ID NO: 961340 - DNA, 15 bp, Homo sapiens
taaattagtacagcc

SEQ ID NO: 961341 - DNA, 15 bp, Homo sapiens
aaattagtacagcct

SEQ ID NO: 961342 - DNA, 15 bp, Homo sapiens
aattagtacagcctc

SEQ ID NO: 961343 - DNA, 15 bp, Homo sapiens
attagtacagcctct

SEQ ID NO: 961344 - DNA, 15 bp, Homo sapiens
ttagtacagcctcta

SEQ ID NO: 961345 - DNA, 15 bp, Homo sapiens
tagtacagcctctat

SEQ ID NO: 961346 - DNA, 15 bp, Homo sapiens
agtacagcctctatg

SEQ ID NO: 961347 - DNA, 15 bp, Homo sapiens
gtacagcctctatgg

SEQ ID NO: 961348 - DNA, 15 bp, Homo sapiens
tacagcctctatgga

SEQ ID NO: 961349 - DNA, 15 bp, Homo sapiens
acagcctctatggaa

SEQ ID NO: 961350 - DNA, 15 bp, Homo sapiens
cagcctctatggaaa

SEQ ID NO: 961351 - DNA, 15 bp, Homo sapiens
agcctctatggaaaa

SEQ ID NO: 961352 - DNA, 15 bp, Homo sapiens
gcctctatggaaaac

SEQ ID NO: 961353 - DNA, 15 bp, Homo sapiens
cctctatggaaaaca

SEQ ID NO: 961354 - DNA, 15 bp, Homo sapiens
ctctatggaaaacag

SEQ ID NO: 961355 - DNA, 15 bp, Homo sapiens
tctatggaaaacagt

SEQ ID NO: 961356 - DNA, 15 bp, Homo sapiens
ctatggaaaacagta

SEQ ID NO: 961357 - DNA, 15 bp, Homo sapiens
tatggaaaacagtat

SEQ ID NO: 961358 - DNA, 15 bp, Homo sapiens
atggaaaacagtatg

SEQ ID NO: 961359 - DNA, 15 bp, Homo sapiens
tggaaaacagtatgg

SEQ ID NO: 961360 - DNA, 15 bp, Homo sapiens
ggaaaacagtatgga

SEQ ID NO: 961361 - DNA, 15 bp, Homo sapiens
gaaaacagtatggag

SEQ ID NO: 961362 - DNA, 15 bp, Homo sapiens
aaaacagtatggaga

SEQ ID NO: 961363 - DNA, 15 bp, Homo sapiens
aaacagtatggagat

SEQ ID NO: 961364 - DNA, 15 bp, Homo sapiens
aacagtatggagatt

SEQ ID NO: 961365 - DNA, 15 bp, Homo sapiens
acagtatggagattt

SEQ ID NO: 961366 - DNA, 15 bp, Homo sapiens
cagtatggagatttc

SEQ ID NO: 961367 - DNA, 15 bp, Homo sapiens
agtatggagatttct

SEQ ID NO: 961368 - DNA, 15 bp, Homo sapiens
gtatggagatttctt

SEQ ID NO: 961369 - DNA, 15 bp, Homo sapiens
tatggagatttctta

SEQ ID NO: 961370 - DNA, 15 bp, Homo sapiens
atggagatttcttaa

SEQ ID NO: 961371 - DNA, 15 bp, Homo sapiens
tggagatttcttaaa

SEQ ID NO: 961372 - DNA, 15 bp, Homo sapiens
ggagatttcttaaag

SEQ ID NO: 961373 - DNA, 15 bp, Homo sapiens
gagatttcttaaaga

SEQ ID NO: 961374 - DNA, 15 bp, Homo sapiens
agatttcttaaagaa

SEQ ID NO: 961375 - DNA, 15 bp, Homo sapiens
gatttcttaaagaac

SEQ ID NO: 961376 - DNA, 15 bp, Homo sapiens
atttcttaaagaact

SEQ ID NO: 961377 - DNA, 15 bp, Homo sapiens
tttcttaaagaacta

SEQ ID NO: 961378 - DNA, 15 bp, Homo sapiens
ttcttaaagaactaa

SEQ ID NO: 961379 - DNA, 15 bp, Homo sapiens
tcttaaagaactaaa

SEQ ID NO: 961380 - DNA, 15 bp, Homo sapiens
cttaaagaactaaaa

SEQ ID NO: 961381 - DNA, 15 bp, Homo sapiens
ttaaagaactaaaag

SEQ ID NO: 961382 - DNA, 15 bp, Homo sapiens
taaagaactaaaagt

SEQ ID NO: 961383 - DNA, 15 bp, Homo sapiens
aaagaactaaaagta

SEQ ID NO: 961384 - DNA, 15 bp, Homo sapiens
aagaactaaaagtag

SEQ ID NO: 961385 - DNA, 15 bp, Homo sapiens
agaactaaaagtaga

SEQ ID NO: 961386 - DNA, 15 bp, Homo sapiens
gaactaaaagtagat

SEQ ID NO: 961387 - DNA, 15 bp, Homo sapiens
aactaaaagtagatc

SEQ ID NO: 961388 - DNA, 15 bp, Homo sapiens
actaaaagtagatct

SEQ ID NO: 961389 - DNA, 15 bp, Homo sapiens
ctaaaagtagatcta

SEQ ID NO: 961390 - DNA, 15 bp, Homo sapiens
taaaagtagatctac

SEQ ID NO: 961391 - DNA, 15 bp, Homo sapiens
aaaagtagatctacc

SEQ ID NO: 961392 - DNA, 15 bp, Homo sapiens
aaagtagatctacca

SEQ ID NO: 961393 - DNA, 15 bp, Homo sapiens
aagtagatctaccat

SEQ ID NO: 961394 - DNA, 15 bp, Homo sapiens
agtagatctaccatt

SEQ ID NO: 961395 - DNA, 15 bp, Homo sapiens
gtagatctaccattt

SEQ ID NO: 961396 - DNA, 15 bp, Homo sapiens
tagatctaccatttg

SEQ ID NO: 961397 - DNA, 15 bp, Homo sapiens
agatctaccatttgg

SEQ ID NO: 961398 - DNA, 15 bp, Homo sapiens
gatctaccatttggt

SEQ ID NO: 961399 - DNA, 15 bp, Homo sapiens
atctaccatttggtc

SEQ ID NO: 961400 - DNA, 15 bp, Homo sapiens
tctaccatttggtcc

SEQ ID NO: 961401 - DNA, 15 bp, Homo sapiens
ctaccatttggtcca

SEQ ID NO: 961402 - DNA, 15 bp, Homo sapiens
taccatttggtccag

SEQ ID NO: 961403 - DNA, 15 bp, Homo sapiens
accatttggtccagg

SEQ ID NO: 961404 - DNA, 15 bp, Homo sapiens
ccatttggtccagga

SEQ ID NO: 961405 - DNA, 15 bp, Homo sapiens
catttggtccaggaa

SEQ ID NO: 961406 - DNA, 15 bp, Homo sapiens
atttggtccaggaat

SEQ ID NO: 961407 - DNA, 15 bp, Homo sapiens
tttggtccaggaatc

SEQ ID NO: 961408 - DNA, 15 bp, Homo sapiens
ttggtccaggaatcc

SEQ ID NO: 961409 - DNA, 15 bp, Homo sapiens
tggtccaggaatccc

SEQ ID NO: 961410 - DNA, 15 bp, Homo sapiens
ggtccaggaatccct

SEQ ID NO: 961411 - DNA, 15 bp, Homo sapiens
gtccaggaatccctc

SEQ ID NO: 961412 - DNA, 15 bp, Homo sapiens
tccaggaatccctct

SEQ ID NO: 961413 - DNA, 15 bp, Homo sapiens
ccaggaatccctcta

SEQ ID NO: 961414 - DNA, 15 bp, Homo sapiens
caggaatccctctac

SEQ ID NO: 961415 - DNA, 15 bp, Homo sapiens
aggaatccctctacc

SEQ ID NO: 961416 - DNA, 15 bp, Homo sapiens
ggaatccctctaccc

SEQ ID NO: 961417 - DNA, 15 bp, Homo sapiens
gaatccctctaccca

SEQ ID NO: 961418 - DNA, 15 bp, Homo sapiens
aatccctctacccag

SEQ ID NO: 961419 - DNA, 15 bp, Homo sapiens
atccctctacccaga

SEQ ID NO: 961420 - DNA, 15 bp, Homo sapiens
tccctctacccagag

SEQ ID NO: 961421 - DNA, 15 bp, Homo sapiens
ccctctacccagagg

SEQ ID NO: 961422 - DNA, 15 bp, Homo sapiens
cctctacccagagga

SEQ ID NO: 961423 - DNA, 15 bp, Homo sapiens
ctctacccagaggaa

SEQ ID NO: 961424 - DNA, 15 bp, Homo sapiens
tctacccagaggaaa

SEQ ID NO: 961425 - DNA, 15 bp, Homo sapiens
ctacccagaggaaaa

SEQ ID NO: 961426 - DNA, 15 bp, Homo sapiens
tacccagaggaaaag

SEQ ID NO: 961427 - DNA, 15 bp, Homo sapiens
acccagaggaaaaga

SEQ ID NO: 961428 - DNA, 15 bp, Homo sapiens
cccagaggaaaagaa

SEQ ID NO: 961429 - DNA, 15 bp, Homo sapiens
ccagaggaaaagaag

SEQ ID NO: 961430 - DNA, 15 bp, Homo sapiens
cagaggaaaagaagt

SEQ ID NO: 961431 - DNA, 15 bp, Homo sapiens
agaggaaaagaagtc

SEQ ID NO: 961432 - DNA, 15 bp, Homo sapiens
gaggaaaagaagtca

SEQ ID NO: 961433 - DNA, 15 bp, Homo sapiens
aggaaaagaagtcat

SEQ ID NO: 961434 - DNA, 15 bp, Homo sapiens
ggaaaagaagtcatt

SEQ ID NO: 961435 - DNA, 15 bp, Homo sapiens
gaaaagaagtcatta

SEQ ID NO: 961436 - DNA, 15 bp, Homo sapiens
aaaagaagtcattat

SEQ ID NO: 961437 - DNA, 15 bp, Homo sapiens
aaagaagtcattata

SEQ ID NO: 961438 - DNA, 15 bp, Homo sapiens
aagaagtcattatat

SEQ ID NO: 961439 - DNA, 15 bp, Homo sapiens
agaagtcattatatc

SEQ ID NO: 961440 - DNA, 15 bp, Homo sapiens
gaagtcattatatca

SEQ ID NO: 961441 - DNA, 15 bp, Homo sapiens
aagtcattatatcaa

SEQ ID NO: 961442 - DNA, 15 bp, Homo sapiens
agtcattatatcaaa

SEQ ID NO: 961443 - DNA, 15 bp, Homo sapiens
gtcattatatcaaaa

SEQ ID NO: 961444 - DNA, 15 bp, Homo sapiens
tcattatatcaaaaa

SEQ ID NO: 961445 - DNA, 15 bp, Homo sapiens
cattatatcaaaaag

SEQ ID NO: 961446 - DNA, 15 bp, Homo sapiens
attatatcaaaaagg

SEQ ID NO: 961447 - DNA, 15 bp, Homo sapiens
ttatatcaaaaaggc

SEQ ID NO: 961448 - DNA, 15 bp, Homo sapiens
tatatcaaaaaggca

SEQ ID NO: 961449 - DNA, 15 bp, Homo sapiens
atatcaaaaaggcat

SEQ ID NO: 961450 - DNA, 15 bp, Homo sapiens
tatcaaaaaggcatc

SEQ ID NO: 961451 - DNA, 15 bp, Homo sapiens
atcaaaaaggcatct

SEQ ID NO: 961452 - DNA, 15 bp, Homo sapiens
tcaaaaaggcatctg

SEQ ID NO: 961453 - DNA, 15 bp, Homo sapiens
caaaaaggcatctgc

SEQ ID NO: 961454 - DNA, 15 bp, Homo sapiens
aaaaaggcatctgca

SEQ ID NO: 961455 - DNA, 15 bp, Homo sapiens
aaaaggcatctgcat

SEQ ID NO: 961456 - DNA, 15 bp, Homo sapiens
aaaggcatctgcatg

SEQ ID NO: 961457 - DNA, 15 bp, Homo sapiens
aaggcatctgcatgc

SEQ ID NO: 961458 - DNA, 15 bp, Homo sapiens
aggcatctgcatgca

SEQ ID NO: 961459 - DNA, 15 bp, Homo sapiens
ggcatctgcatgcat

SEQ ID NO: 961460 - DNA, 15 bp, Homo sapiens
gcatctgcatgcata

SEQ ID NO: 961461 - DNA, 15 bp, Homo sapiens
catctgcatgcatat

SEQ ID NO: 961462 - DNA, 15 bp, Homo sapiens
atctgcatgcatatc

SEQ ID NO: 961463 - DNA, 15 bp, Homo sapiens
tctgcatgcatatcg

SEQ ID NO: 961464 - DNA, 15 bp, Homo sapiens
ctgcatgcatatcgt

SEQ ID NO: 961465 - DNA, 15 bp, Homo sapiens
tgcatgcatatcgta

SEQ ID NO: 961466 - DNA, 15 bp, Homo sapiens
gcatgcatatcgtat

SEQ ID NO: 961467 - DNA, 15 bp, Homo sapiens
catgcatatcgtatg

SEQ ID NO: 961468 - DNA, 15 bp, Homo sapiens
atgcatatcgtatgt

SEQ ID NO: 961469 - DNA, 15 bp, Homo sapiens
tgcatatcgtatgtt

SEQ ID NO: 961470 - DNA, 15 bp, Homo sapiens
gcatatcgtatgttt

SEQ ID NO: 961471 - DNA, 15 bp, Homo sapiens
catatcgtatgttta

SEQ ID NO: 961472 - DNA, 15 bp, Homo sapiens
atatcgtatgtttac

SEQ ID NO: 961473 - DNA, 15 bp, Homo sapiens
tatcgtatgtttact

SEQ ID NO: 961474 - DNA, 15 bp, Homo sapiens
atcgtatgtttactg

SEQ ID NO: 961475 - DNA, 15 bp, Homo sapiens
tcgtatgtttactgc

SEQ ID NO: 961476 - DNA, 15 bp, Homo sapiens
cgtatgtttactgca

SEQ ID NO: 961477 - DNA, 15 bp, Homo sapiens
gtatgtttactgcag

SEQ ID NO: 961478 - DNA, 15 bp, Homo sapiens
tatgtttactgcagc

SEQ ID NO: 961479 - DNA, 15 bp, Homo sapiens
atgtttactgcagca

SEQ ID NO: 961480 - DNA, 15 bp, Homo sapiens
tgtttactgcagcac

SEQ ID NO: 961481 - DNA, 15 bp, Homo sapiens
gtttactgcagcaca

SEQ ID NO: 961482 - DNA, 15 bp, Homo sapiens
tttactgcagcacaa

SEQ ID NO: 961483 - DNA, 15 bp, Homo sapiens
ttactgcagcacaat

SEQ ID NO: 961484 - DNA, 15 bp, Homo sapiens
tactgcagcacaatt

SEQ ID NO: 961485 - DNA, 15 bp, Homo sapiens
actgcagcacaattc

SEQ ID NO: 961486 - DNA, 15 bp, Homo sapiens
ctgcagcacaattca

SEQ ID NO: 961487 - DNA, 15 bp, Homo sapiens
tgcagcacaattcac

SEQ ID NO: 961488 - DNA, 15 bp, Homo sapiens
gcagcacaattcaca

SEQ ID NO: 961489 - DNA, 15 bp, Homo sapiens
cagcacaattcacaa

SEQ ID NO: 961490 - DNA, 15 bp, Homo sapiens
agcacaattcacaat

SEQ ID NO: 961491 - DNA, 15 bp, Homo sapiens
gcacaattcacaatt

SEQ ID NO: 961492 - DNA, 15 bp, Homo sapiens
cacaattcacaattg

SEQ ID NO: 961493 - DNA, 15 bp, Homo sapiens
acaattcacaattgc

SEQ ID NO: 961494 - DNA, 15 bp, Homo sapiens
caattcacaattgca

SEQ ID NO: 961495 - DNA, 15 bp, Homo sapiens
aattcacaattgcaa

SEQ ID NO: 961496 - DNA, 15 bp, Homo sapiens
attcacaattgcaaa

SEQ ID NO: 961497 - DNA, 15 bp, Homo sapiens
ttcacaattgcaaag

SEQ ID NO: 961498 - DNA, 15 bp, Homo sapiens
tcacaattgcaaaga

SEQ ID NO: 961499 - DNA, 15 bp, Homo sapiens
cacaattgcaaagat

SEQ ID NO: 961500 - DNA, 15 bp, Homo sapiens
acaattgcaaagata

SEQ ID NO: 961501 - DNA, 15 bp, Homo sapiens
caattgcaaagatat

SEQ ID NO: 961502 - DNA, 15 bp, Homo sapiens
aattgcaaagatatg

SEQ ID NO: 961503 - DNA, 15 bp, Homo sapiens
attgcaaagatatga

SEQ ID NO: 961504 - DNA, 15 bp, Homo sapiens
ttgcaaagatatgaa

SEQ ID NO: 961505 - DNA, 15 bp, Homo sapiens
tgcaaagatatgaaa

SEQ ID NO: 961506 - DNA, 15 bp, Homo sapiens
gcaaagatatgaaac

SEQ ID NO: 961507 - DNA, 15 bp, Homo sapiens
caaagatatgaaacc

SEQ ID NO: 961508 - DNA, 15 bp, Homo sapiens
aaagatatgaaacca

SEQ ID NO: 961509 - DNA, 15 bp, Homo sapiens
aagatatgaaaccaa

SEQ ID NO: 961510 - DNA, 15 bp, Homo sapiens
agatatgaaaccaac

SEQ ID NO: 961511 - DNA, 15 bp, Homo sapiens
gatatgaaaccaacg

SEQ ID NO: 961512 - DNA, 15 bp, Homo sapiens
atatgaaaccaacgt

SEQ ID NO: 961513 - DNA, 15 bp, Homo sapiens
tatgaaaccaacgtt

SEQ ID NO: 961514 - DNA, 15 bp, Homo sapiens
atgaaaccaacgtta

SEQ ID NO: 961515 - DNA, 15 bp, Homo sapiens
tgaaaccaacgttaa

SEQ ID NO: 961516 - DNA, 15 bp, Homo sapiens
gaaaccaacgttaag

SEQ ID NO: 961517 - DNA, 15 bp, Homo sapiens
aaaccaacgttaagt

SEQ ID NO: 961518 - DNA, 15 bp, Homo sapiens
aaccaacgttaagta

SEQ ID NO: 961519 - DNA, 15 bp, Homo sapiens
accaacgttaagtac

SEQ ID NO: 961520 - DNA, 15 bp, Homo sapiens
ccaacgttaagtacc

SEQ ID NO: 961521 - DNA, 15 bp, Homo sapiens
caacgttaagtaccc

SEQ ID NO: 961522 - DNA, 15 bp, Homo sapiens
aacgttaagtaccca

SEQ ID NO: 961523 - DNA, 15 bp, Homo sapiens
acgttaagtacccac

SEQ ID NO: 961524 - DNA, 15 bp, Homo sapiens
cgttaagtacccact

SEQ ID NO: 961525 - DNA, 15 bp, Homo sapiens
gttaagtacccactg

SEQ ID NO: 961526 - DNA, 15 bp, Homo sapiens
ttaagtacccactga

SEQ ID NO: 961527 - DNA, 15 bp, Homo sapiens
taagtacccactgac

SEQ ID NO: 961528 - DNA, 15 bp, Homo sapiens
aagtacccactgacc

SEQ ID NO: 961529 - DNA, 15 bp, Homo sapiens
agtacccactgacca

SEQ ID NO: 961530 - DNA, 15 bp, Homo sapiens
gtacccactgaccaa

SEQ ID NO: 961531 - DNA, 15 bp, Homo sapiens
tacccactgaccaat

SEQ ID NO: 961532 - DNA, 15 bp, Homo sapiens
acccactgaccaatg

SEQ ID NO: 961533 - DNA, 15 bp, Homo sapiens
cccactgaccaatga

SEQ ID NO: 961534 - DNA, 15 bp, Homo sapiens
ccactgaccaatgag

SEQ ID NO: 961535 - DNA, 15 bp, Homo sapiens
cactgaccaatgagt

SEQ ID NO: 961536 - DNA, 15 bp, Homo sapiens
actgaccaatgagtg

SEQ ID NO: 961537 - DNA, 15 bp, Homo sapiens
ctgaccaatgagtgg

SEQ ID NO: 961538 - DNA, 15 bp, Homo sapiens
tgaccaatgagtgga

SEQ ID NO: 961539 - DNA, 15 bp, Homo sapiens
gaccaatgagtggat

SEQ ID NO: 961540 - DNA, 15 bp, Homo sapiens
accaatgagtggata

SEQ ID NO: 961541 - DNA, 15 bp, Homo sapiens
ccaatgagtggataa

SEQ ID NO: 961542 - DNA, 15 bp, Homo sapiens
caatgagtggataaa

SEQ ID NO: 961543 - DNA, 15 bp, Homo sapiens
aatgagtggataaag

SEQ ID NO: 961544 - DNA, 15 bp, Homo sapiens
atgagtggataaaga

SEQ ID NO: 961545 - DNA, 15 bp, Homo sapiens
tgagtggataaagaa

SEQ ID NO: 961546 - DNA, 15 bp, Homo sapiens
gagtggataaagaaa

SEQ ID NO: 961547 - DNA, 15 bp, Homo sapiens
agtggataaagaaag

SEQ ID NO: 961548 - DNA, 15 bp, Homo sapiens
gtggataaagaaagt

SEQ ID NO: 961549 - DNA, 15 bp, Homo sapiens
tggataaagaaagtg

SEQ ID NO: 961550 - DNA, 15 bp, Homo sapiens
ggataaagaaagtgt

SEQ ID NO: 961551 - DNA, 15 bp, Homo sapiens
gataaagaaagtgta

SEQ ID NO: 961552 - DNA, 15 bp, Homo sapiens
ataaagaaagtgtac

SEQ ID NO: 961553 - DNA, 15 bp, Homo sapiens
taaagaaagtgtaca

SEQ ID NO: 961554 - DNA, 15 bp, Homo sapiens
aaagaaagtgtacat

SEQ ID NO: 961555 - DNA, 15 bp, Homo sapiens
aagaaagtgtacata

SEQ ID NO: 961556 - DNA, 15 bp, Homo sapiens
agaaagtgtacatat

SEQ ID NO: 961557 - DNA, 15 bp, Homo sapiens
gaaagtgtacatata

SEQ ID NO: 961558 - DNA, 15 bp, Homo sapiens
aaagtgtacatatac

SEQ ID NO: 961559 - DNA, 15 bp, Homo sapiens
aagtgtacatataca

SEQ ID NO: 961560 - DNA, 15 bp, Homo sapiens
agtgtacatatacac

SEQ ID NO: 961561 - DNA, 15 bp, Homo sapiens
gtgtacatatacacc

SEQ ID NO: 961562 - DNA, 15 bp, Homo sapiens
tgtacatatacacca

SEQ ID NO: 961563 - DNA, 15 bp, Homo sapiens
gtacatatacaccac

SEQ ID NO: 961564 - DNA, 15 bp, Homo sapiens
tacatatacaccaca

SEQ ID NO: 961565 - DNA, 15 bp, Homo sapiens
acatatacaccacag

SEQ ID NO: 961566 - DNA, 15 bp, Homo sapiens
catatacaccacaga

SEQ ID NO: 961567 - DNA, 15 bp, Homo sapiens
atatacaccacagaa

SEQ ID NO: 961568 - DNA, 15 bp, Homo sapiens
tatacaccacagaat

SEQ ID NO: 961569 - DNA, 15 bp, Homo sapiens
atacaccacagaata

SEQ ID NO: 961570 - DNA, 15 bp, Homo sapiens
tacaccacagaatac

SEQ ID NO: 961571 - DNA, 15 bp, Homo sapiens
acaccacagaatact

SEQ ID NO: 961572 - DNA, 15 bp, Homo sapiens
caccacagaatacta

SEQ ID NO: 961573 - DNA, 15 bp, Homo sapiens
accacagaatactac

SEQ ID NO: 961574 - DNA, 15 bp, Homo sapiens
ccacagaatactact

SEQ ID NO: 961575 - DNA, 15 bp, Homo sapiens
cacagaatactactc

SEQ ID NO: 961576 - DNA, 15 bp, Homo sapiens
acagaatactactcc

SEQ ID NO: 961577 - DNA, 15 bp, Homo sapiens
cagaatactactcca

SEQ ID NO: 961578 - DNA, 15 bp, Homo sapiens
agaatactactccac

SEQ ID NO: 961579 - DNA, 15 bp, Homo sapiens
gaatactactccacc

SEQ ID NO: 961580 - DNA, 15 bp, Homo sapiens
aatactactccacca

SEQ ID NO: 961581 - DNA, 15 bp, Homo sapiens
atactactccaccac

SEQ ID NO: 961582 - DNA, 15 bp, Homo sapiens
tactactccaccaca

SEQ ID NO: 961583 - DNA, 15 bp, Homo sapiens
actactccaccacag

SEQ ID NO: 961584 - DNA, 15 bp, Homo sapiens
ctactccaccacaga

SEQ ID NO: 961585 - DNA, 15 bp, Homo sapiens
tactccaccacagaa

SEQ ID NO: 961586 - DNA, 15 bp, Homo sapiens
actccaccacagaaa

SEQ ID NO: 961587 - DNA, 15 bp, Homo sapiens
ctccaccacagaaaa

SEQ ID NO: 961588 - DNA, 15 bp, Homo sapiens
tccaccacagaaaag

SEQ ID NO: 961589 - DNA, 15 bp, Homo sapiens
ccaccacagaaaaga

SEQ ID NO: 961590 - DNA, 15 bp, Homo sapiens
caccacagaaaagaa

SEQ ID NO: 961591 - DNA, 15 bp, Homo sapiens
accacagaaaagaat

SEQ ID NO: 961592 - DNA, 15 bp, Homo sapiens
ccacagaaaagaatg

SEQ ID NO: 961593 - DNA, 15 bp, Homo sapiens
cacagaaaagaatga

SEQ ID NO: 961594 - DNA, 15 bp, Homo sapiens
acagaaaagaatgaa

SEQ ID NO: 961595 - DNA, 15 bp, Homo sapiens
cagaaaagaatgaaa

SEQ ID NO: 961596 - DNA, 15 bp, Homo sapiens
agaaaagaatgaaat

SEQ ID NO: 961597 - DNA, 15 bp, Homo sapiens
gaaaagaatgaaata

SEQ ID NO: 961598 - DNA, 15 bp, Homo sapiens
aaaagaatgaaataa

SEQ ID NO: 961599 - DNA, 15 bp, Homo sapiens
aaagaatgaaataat

SEQ ID NO: 961600 - DNA, 15 bp, Homo sapiens
aagaatgaaataatg

SEQ ID NO: 961601 - DNA, 15 bp, Homo sapiens
agaatgaaataatgt

SEQ ID NO: 961602 - DNA, 15 bp, Homo sapiens
gaatgaaataatgtc

SEQ ID NO: 961603 - DNA, 15 bp, Homo sapiens
aatgaaataatgtct

SEQ ID NO: 961604 - DNA, 15 bp, Homo sapiens
atgaaataatgtctt

SEQ ID NO: 961605 - DNA, 15 bp, Homo sapiens
tgaaataatgtcttt

SEQ ID NO: 961606 - DNA, 15 bp, Homo sapiens
gaaataatgtctttt

SEQ ID NO: 961607 - DNA, 15 bp, Homo sapiens
aaataatgtcttttg

SEQ ID NO: 961608 - DNA, 15 bp, Homo sapiens
aataatgtcttttgc

SEQ ID NO: 961609 - DNA, 15 bp, Homo sapiens
ataatgtcttttgca

SEQ ID NO: 961610 - DNA, 15 bp, Homo sapiens
taatgtcttttgcag

SEQ ID NO: 961611 - DNA, 15 bp, Homo sapiens
aatgtcttttgcagc

SEQ ID NO: 961612 - DNA, 15 bp, Homo sapiens
atgtcttttgcagca

SEQ ID NO: 961613 - DNA, 15 bp, Homo sapiens
tgtcttttgcagcaa

SEQ ID NO: 961614 - DNA, 15 bp, Homo sapiens
gtcttttgcagcaac

SEQ ID NO: 961615 - DNA, 15 bp, Homo sapiens
tcttttgcagcaact

SEQ ID NO: 961616 - DNA, 15 bp, Homo sapiens
cttttgcagcaactg

SEQ ID NO: 961617 - DNA, 15 bp, Homo sapiens
ttttgcagcaactgg

SEQ ID NO: 961618 - DNA, 15 bp, Homo sapiens
tttgcagcaactggg

SEQ ID NO: 961619 - DNA, 15 bp, Homo sapiens
ttgcagcaactggga

SEQ ID NO: 961620 - DNA, 15 bp, Homo sapiens
tgcagcaactgggat

SEQ ID NO: 961621 - DNA, 15 bp, Homo sapiens
gcagcaactgggatg

SEQ ID NO: 961622 - DNA, 15 bp, Homo sapiens
cagcaactgggatgg

SEQ ID NO: 961623 - DNA, 15 bp, Homo sapiens
agcaactgggatgga

SEQ ID NO: 961624 - DNA, 15 bp, Homo sapiens
gcaactgggatggag

SEQ ID NO: 961625 - DNA, 15 bp, Homo sapiens
caactgggatggagc

SEQ ID NO: 961626 - DNA, 15 bp, Homo sapiens
aactgggatggagct

SEQ ID NO: 961627 - DNA, 15 bp, Homo sapiens
actgggatggagctg

SEQ ID NO: 961628 - DNA, 15 bp, Homo sapiens
ctgggatggagctgg

SEQ ID NO: 961629 - DNA, 15 bp, Homo sapiens
tgggatggagctgga

SEQ ID NO: 961630 - DNA, 15 bp, Homo sapiens
gggatggagctggag

SEQ ID NO: 961631 - DNA, 15 bp, Homo sapiens
ggatggagctggagg

SEQ ID NO: 961632 - DNA, 15 bp, Homo sapiens
gatggagctggaggc

SEQ ID NO: 961633 - DNA, 15 bp, Homo sapiens
atggagctggaggcc

SEQ ID NO: 961634 - DNA, 15 bp, Homo sapiens
tggagctggaggcca

SEQ ID NO: 961635 - DNA, 15 bp, Homo sapiens
ggagctggaggccag

SEQ ID NO: 961636 - DNA, 15 bp, Homo sapiens
gagctggaggccagg

SEQ ID NO: 961637 - DNA, 15 bp, Homo sapiens
agctggaggccagga

SEQ ID NO: 961638 - DNA, 15 bp, Homo sapiens
gctggaggccaggaa

SEQ ID NO: 961639 - DNA, 15 bp, Homo sapiens
ctggaggccaggaat

SEQ ID NO: 961640 - DNA, 15 bp, Homo sapiens
tggaggccaggaatg

SEQ ID NO: 961641 - DNA, 15 bp, Homo sapiens
ggaggccaggaatgg

SEQ ID NO: 961642 - DNA, 15 bp, Homo sapiens
gaggccaggaatgga

SEQ ID NO: 961643 - DNA, 15 bp, Homo sapiens
aggccaggaatggaa

SEQ ID NO: 961644 - DNA, 15 bp, Homo sapiens
ggccaggaatggaaa

SEQ ID NO: 961645 - DNA, 15 bp, Homo sapiens
gccaggaatggaaaa

SEQ ID NO: 961646 - DNA, 15 bp, Homo sapiens
ccaggaatggaaaac

SEQ ID NO: 961647 - DNA, 15 bp, Homo sapiens
caggaatggaaaacc

SEQ ID NO: 961648 - DNA, 15 bp, Homo sapiens
aggaatggaaaacct

SEQ ID NO: 961649 - DNA, 15 bp, Homo sapiens
ggaatggaaaacctg

SEQ ID NO: 961650 - DNA, 15 bp, Homo sapiens
gaatggaaaacctga

SEQ ID NO: 961651 - DNA, 15 bp, Homo sapiens
aatggaaaacctgaa

SEQ ID NO: 961652 - DNA, 15 bp, Homo sapiens
atggaaaacctgaaa

SEQ ID NO: 961653 - DNA, 15 bp, Homo sapiens
tggaaaacctgaaaa

SEQ ID NO: 961654 - DNA, 15 bp, Homo sapiens
ggaaaacctgaaaat

SEQ ID NO: 961655 - DNA, 15 bp, Homo sapiens
gaaaacctgaaaata

SEQ ID NO: 961656 - DNA, 15 bp, Homo sapiens
aaaacctgaaaatac

SEQ ID NO: 961657 - DNA, 15 bp, Homo sapiens
aaacctgaaaataca

SEQ ID NO: 961658 - DNA, 15 bp, Homo sapiens
aacctgaaaatacag

SEQ ID NO: 961659 - DNA, 15 bp, Homo sapiens
acctgaaaatacagt

SEQ ID NO: 961660 - DNA, 15 bp, Homo sapiens
cctgaaaatacagta

SEQ ID NO: 961661 - DNA, 15 bp, Homo sapiens
ctgaaaatacagtat

SEQ ID NO: 961662 - DNA, 15 bp, Homo sapiens
tgaaaatacagtatg

SEQ ID NO: 961663 - DNA, 15 bp, Homo sapiens
gaaaatacagtatgt

SEQ ID NO: 961664 - DNA, 15 bp, Homo sapiens
aaaatacagtatgtt

SEQ ID NO: 961665 - DNA, 15 bp, Homo sapiens
aaatacagtatgttc

SEQ ID NO: 961666 - DNA, 15 bp, Homo sapiens
aatacagtatgttct

SEQ ID NO: 961667 - DNA, 15 bp, Homo sapiens
atacagtatgttctc

SEQ ID NO: 961668 - DNA, 15 bp, Homo sapiens
tacagtatgttctca

SEQ ID NO: 961669 - DNA, 15 bp, Homo sapiens
acagtatgttctcac

SEQ ID NO: 961670 - DNA, 15 bp, Homo sapiens
cagtatgttctcact

SEQ ID NO: 961671 - DNA, 15 bp, Homo sapiens
agtatgttctcactt

SEQ ID NO: 961672 - DNA, 15 bp, Homo sapiens
gtatgttctcacttg

SEQ ID NO: 961673 - DNA, 15 bp, Homo sapiens
tatgttctcacttgt

SEQ ID NO: 961674 - DNA, 15 bp, Homo sapiens
atgttctcacttgta

SEQ ID NO: 961675 - DNA, 15 bp, Homo sapiens
tgttctcacttgtaa

SEQ ID NO: 961676 - DNA, 15 bp, Homo sapiens
gttctcacttgtaag

SEQ ID NO: 961677 - DNA, 15 bp, Homo sapiens
ttctcacttgtaagt

SEQ ID NO: 961678 - DNA, 15 bp, Homo sapiens
tctcacttgtaagtg

SEQ ID NO: 961679 - DNA, 15 bp, Homo sapiens
ctcacttgtaagtgg

SEQ ID NO: 961680 - DNA, 15 bp, Homo sapiens
tcacttgtaagtggg

SEQ ID NO: 961681 - DNA, 15 bp, Homo sapiens
cacttgtaagtggga

SEQ ID NO: 961682 - DNA, 15 bp, Homo sapiens
acttgtaagtgggag

SEQ ID NO: 961683 - DNA, 15 bp, Homo sapiens
cttgtaagtgggagc

SEQ ID NO: 961684 - DNA, 15 bp, Homo sapiens
ttgtaagtgggagct

SEQ ID NO: 961685 - DNA, 15 bp, Homo sapiens
tgtaagtgggagcta

SEQ ID NO: 961686 - DNA, 15 bp, Homo sapiens
gtaagtgggagctaa

SEQ ID NO: 961687 - DNA, 15 bp, Homo sapiens
taagtgggagctaag

SEQ ID NO: 961688 - DNA, 15 bp, Homo sapiens
aagtgggagctaagc

SEQ ID NO: 961689 - DNA, 15 bp, Homo sapiens
agtgggagctaagct

SEQ ID NO: 961690 - DNA, 15 bp, Homo sapiens
gtgggagctaagcta

SEQ ID NO: 961691 - DNA, 15 bp, Homo sapiens
tgggagctaagctat

SEQ ID NO: 961692 - DNA, 15 bp, Homo sapiens
gggagctaagctata

SEQ ID NO: 961693 - DNA, 15 bp, Homo sapiens
ggagctaagctatag

SEQ ID NO: 961694 - DNA, 15 bp, Homo sapiens
gagctaagctatagg

SEQ ID NO: 961695 - DNA, 15 bp, Homo sapiens
agctaagctataggt

SEQ ID NO: 961696 - DNA, 15 bp, Homo sapiens
gctaagctataggta

SEQ ID NO: 961697 - DNA, 15 bp, Homo sapiens
ctaagctataggtac

SEQ ID NO: 961698 - DNA, 15 bp, Homo sapiens
taagctataggtaca

SEQ ID NO: 961699 - DNA, 15 bp, Homo sapiens
aagctataggtacac

SEQ ID NO: 961700 - DNA, 15 bp, Homo sapiens
agctataggtacaca

SEQ ID NO: 961701 - DNA, 15 bp, Homo sapiens
gctataggtacacaa

SEQ ID NO: 961702 - DNA, 15 bp, Homo sapiens
ctataggtacacaaa

SEQ ID NO: 961703 - DNA, 15 bp, Homo sapiens
tataggtacacaaag

SEQ ID NO: 961704 - DNA, 15 bp, Homo sapiens
ataggtacacaaagg

SEQ ID NO: 961705 - DNA, 15 bp, Homo sapiens
taggtacacaaaggc

SEQ ID NO: 961706 - DNA, 15 bp, Homo sapiens
aggtacacaaaggca

SEQ ID NO: 961707 - DNA, 15 bp, Homo sapiens
ggtacacaaaggcat

SEQ ID NO: 961708 - DNA, 15 bp, Homo sapiens
gtacacaaaggcata

SEQ ID NO: 961709 - DNA, 15 bp, Homo sapiens
tacacaaaggcatac

SEQ ID NO: 961710 - DNA, 15 bp, Homo sapiens
acacaaaggcataca

SEQ ID NO: 961711 - DNA, 15 bp, Homo sapiens
cacaaaggcatacag

SEQ ID NO: 961712 - DNA, 15 bp, Homo sapiens
acaaaggcatacaga

SEQ ID NO: 961713 - DNA, 15 bp, Homo sapiens
caaaggcatacagag

SEQ ID NO: 961714 - DNA, 15 bp, Homo sapiens
aaaggcatacagagt

SEQ ID NO: 961715 - DNA, 15 bp, Homo sapiens
aaggcatacagagtg

SEQ ID NO: 961716 - DNA, 15 bp, Homo sapiens
aggcatacagagtga

SEQ ID NO: 961717 - DNA, 15 bp, Homo sapiens
ggcatacagagtgat

SEQ ID NO: 961718 - DNA, 15 bp, Homo sapiens
gcatacagagtgata

SEQ ID NO: 961719 - DNA, 15 bp, Homo sapiens
catacagagtgatat

SEQ ID NO: 961720 - DNA, 15 bp, Homo sapiens
atacagagtgatata

SEQ ID NO: 961721 - DNA, 15 bp, Homo sapiens
tacagagtgatataa

SEQ ID NO: 961722 - DNA, 15 bp, Homo sapiens
acagagtgatataat

SEQ ID NO: 961723 - DNA, 15 bp, Homo sapiens
cagagtgatataatg

SEQ ID NO: 961724 - DNA, 15 bp, Homo sapiens
agagtgatataatgg

SEQ ID NO: 961725 - DNA, 15 bp, Homo sapiens
gagtgatataatgga

SEQ ID NO: 961726 - DNA, 15 bp, Homo sapiens
agtgatataatggac

SEQ ID NO: 961727 - DNA, 15 bp, Homo sapiens
gtgatataatggact

SEQ ID NO: 961728 - DNA, 15 bp, Homo sapiens
tgatataatggacta

SEQ ID NO: 961729 - DNA, 15 bp, Homo sapiens
gatataatggactac

SEQ ID NO: 961730 - DNA, 15 bp, Homo sapiens
atataatggactaca

SEQ ID NO: 961731 - DNA, 15 bp, Homo sapiens
tataatggactacag

SEQ ID NO: 961732 - DNA, 15 bp, Homo sapiens
ataatggactacaga

SEQ ID NO: 961733 - DNA, 15 bp, Homo sapiens
taatggactacagag

SEQ ID NO: 961734 - DNA, 15 bp, Homo sapiens
aatggactacagaga

SEQ ID NO: 961735 - DNA, 15 bp, Homo sapiens
atggactacagagac

SEQ ID NO: 961736 - DNA, 15 bp, Homo sapiens
tggactacagagact

SEQ ID NO: 961737 - DNA, 15 bp, Homo sapiens
ggactacagagactc

SEQ ID NO: 961738 - DNA, 15 bp, Homo sapiens
gactacagagactca

SEQ ID NO: 961739 - DNA, 15 bp, Homo sapiens
actacagagactcag

SEQ ID NO: 961740 - DNA, 15 bp, Homo sapiens
ctacagagactcaga

SEQ ID NO: 961741 - DNA, 15 bp, Homo sapiens
tacagagactcagat

SEQ ID NO: 961742 - DNA, 15 bp, Homo sapiens
acagagactcagatg

SEQ ID NO: 961743 - DNA, 15 bp, Homo sapiens
cagagactcagatgg

SEQ ID NO: 961744 - DNA, 15 bp, Homo sapiens
agagactcagatggg

SEQ ID NO: 961745 - DNA, 15 bp, Homo sapiens
gagactcagatggga

SEQ ID NO: 961746 - DNA, 15 bp, Homo sapiens
agactcagatgggag

SEQ ID NO: 961747 - DNA, 15 bp, Homo sapiens
gactcagatgggaga

SEQ ID NO: 961748 - DNA, 15 bp, Homo sapiens
actcagatgggagac

SEQ ID NO: 961749 - DNA, 15 bp, Homo sapiens
ctcagatgggagacg

SEQ ID NO: 961750 - DNA, 15 bp, Homo sapiens
tcagatgggagacgg

SEQ ID NO: 961751 - DNA, 15 bp, Homo sapiens
cagatgggagacggt

SEQ ID NO: 961752 - DNA, 15 bp, Homo sapiens
agatgggagacggtg

SEQ ID NO: 961753 - DNA, 15 bp, Homo sapiens
gatgggagacggtgg

SEQ ID NO: 961754 - DNA, 15 bp, Homo sapiens
atgggagacggtggg

SEQ ID NO: 961755 - DNA, 15 bp, Homo sapiens
tgggagacggtggga

SEQ ID NO: 961756 - DNA, 15 bp, Homo sapiens
gggagacggtgggaa

SEQ ID NO: 961757 - DNA, 15 bp, Homo sapiens
ggagacggtgggaag

SEQ ID NO: 961758 - DNA, 15 bp, Homo sapiens
gagacggtgggaaga

SEQ ID NO: 961759 - DNA, 15 bp, Homo sapiens
agacggtgggaagaa

SEQ ID NO: 961760 - DNA, 15 bp, Homo sapiens
gacggtgggaagaac

SEQ ID NO: 961761 - DNA, 15 bp, Homo sapiens
acggtgggaagaaca

SEQ ID NO: 961762 - DNA, 15 bp, Homo sapiens
cggtgggaagaacag

SEQ ID NO: 961763 - DNA, 15 bp, Homo sapiens
ggtgggaagaacagt

SEQ ID NO: 961764 - DNA, 15 bp, Homo sapiens
gtgggaagaacagtg

SEQ ID NO: 961765 - DNA, 15 bp, Homo sapiens
tgggaagaacagtga

SEQ ID NO: 961766 - DNA, 15 bp, Homo sapiens
gggaagaacagtgag

SEQ ID NO: 961767 - DNA, 15 bp, Homo sapiens
ggaagaacagtgagg

SEQ ID NO: 961768 - DNA, 15 bp, Homo sapiens
gaagaacagtgaggg

SEQ ID NO: 961769 - DNA, 15 bp, Homo sapiens
aagaacagtgaggga

SEQ ID NO: 961770 - DNA, 15 bp, Homo sapiens
agaacagtgagggat

SEQ ID NO: 961771 - DNA, 15 bp, Homo sapiens
gaacagtgagggata

SEQ ID NO: 961772 - DNA, 15 bp, Homo sapiens
aacagtgagggataa

SEQ ID NO: 961773 - DNA, 15 bp, Homo sapiens
acagtgagggataaa

SEQ ID NO: 961774 - DNA, 15 bp, Homo sapiens
cagtgagggataaaa

SEQ ID NO: 961775 - DNA, 15 bp, Homo sapiens
agtgagggataaaaa

SEQ ID NO: 961776 - DNA, 15 bp, Homo sapiens
gtgagggataaaaaa

SEQ ID NO: 961777 - DNA, 15 bp, Homo sapiens
tgagggataaaaaag

SEQ ID NO: 961778 - DNA, 15 bp, Homo sapiens
gagggataaaaaagt

SEQ ID NO: 961779 - DNA, 15 bp, Homo sapiens
agggataaaaaagta

SEQ ID NO: 961780 - DNA, 15 bp, Homo sapiens
gggataaaaaagtat

SEQ ID NO: 961781 - DNA, 15 bp, Homo sapiens
ggataaaaaagtata

SEQ ID NO: 961782 - DNA, 15 bp, Homo sapiens
gataaaaaagtatat

SEQ ID NO: 961783 - DNA, 15 bp, Homo sapiens
ataaaaaagtatata

SEQ ID NO: 961784 - DNA, 15 bp, Homo sapiens
taaaaaagtatatac

SEQ ID NO: 961785 - DNA, 15 bp, Homo sapiens
aaaaaagtatatact

SEQ ID NO: 961786 - DNA, 15 bp, Homo sapiens
aaaaagtatatactg

SEQ ID NO: 961787 - DNA, 15 bp, Homo sapiens
aaaagtatatactgg

SEQ ID NO: 961788 - DNA, 15 bp, Homo sapiens
aaagtatatactggg

SEQ ID NO: 961789 - DNA, 15 bp, Homo sapiens
aagtatatactgggg

SEQ ID NO: 961790 - DNA, 15 bp, Homo sapiens
agtatatactggggg

SEQ ID NO: 961791 - DNA, 15 bp, Homo sapiens
gtatatactgggggc

SEQ ID NO: 961792 - DNA, 15 bp, Homo sapiens
tatatactgggggca

SEQ ID NO: 961793 - DNA, 15 bp, Homo sapiens
atatactgggggcaa

SEQ ID NO: 961794 - DNA, 15 bp, Homo sapiens
tatactgggggcaaa

SEQ ID NO: 961795 - DNA, 15 bp, Homo sapiens
atactgggggcaaag

SEQ ID NO: 961796 - DNA, 15 bp, Homo sapiens
tactgggggcaaagc

SEQ ID NO: 961797 - DNA, 15 bp, Homo sapiens
actgggggcaaagca

SEQ ID NO: 961798 - DNA, 15 bp, Homo sapiens
ctgggggcaaagcac

SEQ ID NO: 961799 - DNA, 15 bp, Homo sapiens
tgggggcaaagcaca

SEQ ID NO: 961800 - DNA, 15 bp, Homo sapiens
gggggcaaagcacac

SEQ ID NO: 961801 - DNA, 15 bp, Homo sapiens
ggggcaaagcacact

SEQ ID NO: 961802 - DNA, 15 bp, Homo sapiens
gggcaaagcacacta

SEQ ID NO: 961803 - DNA, 15 bp, Homo sapiens
ggcaaagcacactac

SEQ ID NO: 961804 - DNA, 15 bp, Homo sapiens
gcaaagcacactact

SEQ ID NO: 961805 - DNA, 15 bp, Homo sapiens
caaagcacactactt

SEQ ID NO: 961806 - DNA, 15 bp, Homo sapiens
aaagcacactacttg

SEQ ID NO: 961807 - DNA, 15 bp, Homo sapiens
aagcacactacttgg

SEQ ID NO: 961808 - DNA, 15 bp, Homo sapiens
agcacactacttggg

SEQ ID NO: 961809 - DNA, 15 bp, Homo sapiens
gcacactacttgggt

SEQ ID NO: 961810 - DNA, 15 bp, Homo sapiens
cacactacttgggtt

SEQ ID NO: 961811 - DNA, 15 bp, Homo sapiens
acactacttgggtta

SEQ ID NO: 961812 - DNA, 15 bp, Homo sapiens
cactacttgggttac

SEQ ID NO: 961813 - DNA, 15 bp, Homo sapiens
actacttgggttaca

SEQ ID NO: 961814 - DNA, 15 bp, Homo sapiens
ctacttgggttacag

SEQ ID NO: 961815 - DNA, 15 bp, Homo sapiens
tacttgggttacagg

SEQ ID NO: 961816 - DNA, 15 bp, Homo sapiens
acttgggttacaggt

SEQ ID NO: 961817 - DNA, 15 bp, Homo sapiens
cttgggttacaggtg

SEQ ID NO: 961818 - DNA, 15 bp, Homo sapiens
ttgggttacaggtgc

SEQ ID NO: 961819 - DNA, 15 bp, Homo sapiens
tgggttacaggtgcg

SEQ ID NO: 961820 - DNA, 15 bp, Homo sapiens
gggttacaggtgcgc

SEQ ID NO: 961821 - DNA, 15 bp, Homo sapiens
ggttacaggtgcgct

SEQ ID NO: 961822 - DNA, 15 bp, Homo sapiens
gttacaggtgcgcta

SEQ ID NO: 961823 - DNA, 15 bp, Homo sapiens
ttacaggtgcgctaa

SEQ ID NO: 961824 - DNA, 15 bp, Homo sapiens
tacaggtgcgctaaa

SEQ ID NO: 961825 - DNA, 15 bp, Homo sapiens
acaggtgcgctaaaa

SEQ ID NO: 961826 - DNA, 15 bp, Homo sapiens
caggtgcgctaaaat

SEQ ID NO: 961827 - DNA, 15 bp, Homo sapiens
aggtgcgctaaaatc

SEQ ID NO: 961828 - DNA, 15 bp, Homo sapiens
ggtgcgctaaaatct

SEQ ID NO: 961829 - DNA, 15 bp, Homo sapiens
gtgcgctaaaatctc

SEQ ID NO: 961830 - DNA, 15 bp, Homo sapiens
tgcgctaaaatctca

SEQ ID NO: 961831 - DNA, 15 bp, Homo sapiens
gcgctaaaatctcag

SEQ ID NO: 961832 - DNA, 15 bp, Homo sapiens
cgctaaaatctcaga

SEQ ID NO: 961833 - DNA, 15 bp, Homo sapiens
gctaaaatctcagac

SEQ ID NO: 961834 - DNA, 15 bp, Homo sapiens
ctaaaatctcagact

SEQ ID NO: 961835 - DNA, 15 bp, Homo sapiens
taaaatctcagactt

SEQ ID NO: 961836 - DNA, 15 bp, Homo sapiens
aaaatctcagacttt

SEQ ID NO: 961837 - DNA, 15 bp, Homo sapiens
aaatctcagacttta

SEQ ID NO: 961838 - DNA, 15 bp, Homo sapiens
aatctcagactttac

SEQ ID NO: 961839 - DNA, 15 bp, Homo sapiens
atctcagactttacc

SEQ ID NO: 961840 - DNA, 15 bp, Homo sapiens
tctcagactttacca

SEQ ID NO: 961841 - DNA, 15 bp, Homo sapiens
ctcagactttaccac

SEQ ID NO: 961842 - DNA, 15 bp, Homo sapiens
tcagactttaccact

SEQ ID NO: 961843 - DNA, 15 bp, Homo sapiens
cagactttaccacta

SEQ ID NO: 961844 - DNA, 15 bp, Homo sapiens
agactttaccactat

SEQ ID NO: 961845 - DNA, 15 bp, Homo sapiens
gactttaccactatt

SEQ ID NO: 961846 - DNA, 15 bp, Homo sapiens
actttaccactattt

SEQ ID NO: 961847 - DNA, 15 bp, Homo sapiens
ctttaccactattta

SEQ ID NO: 961848 - DNA, 15 bp, Homo sapiens
tttaccactatttaa

SEQ ID NO: 961849 - DNA, 15 bp, Homo sapiens
ttaccactatttaat

SEQ ID NO: 961850 - DNA, 15 bp, Homo sapiens
taccactatttaatt

SEQ ID NO: 961851 - DNA, 15 bp, Homo sapiens
accactatttaattc

SEQ ID NO: 961852 - DNA, 15 bp, Homo sapiens
ccactatttaattca

SEQ ID NO: 961853 - DNA, 15 bp, Homo sapiens
cactatttaattcat

SEQ ID NO: 961854 - DNA, 15 bp, Homo sapiens
actatttaattcatc

SEQ ID NO: 961855 - DNA, 15 bp, Homo sapiens
ctatttaattcatcc

SEQ ID NO: 961856 - DNA, 15 bp, Homo sapiens
tatttaattcatcca

SEQ ID NO: 961857 - DNA, 15 bp, Homo sapiens
atttaattcatccat

SEQ ID NO: 961858 - DNA, 15 bp, Homo sapiens
tttaattcatccatg

SEQ ID NO: 961859 - DNA, 15 bp, Homo sapiens
ttaattcatccatgt

SEQ ID NO: 961860 - DNA, 15 bp, Homo sapiens
taattcatccatgta

SEQ ID NO: 961861 - DNA, 15 bp, Homo sapiens
aattcatccatgtaa

SEQ ID NO: 961862 - DNA, 15 bp, Homo sapiens
attcatccatgtaat

SEQ ID NO: 961863 - DNA, 15 bp, Homo sapiens
ttcatccatgtaatc

SEQ ID NO: 961864 - DNA, 15 bp, Homo sapiens
tcatccatgtaatca

SEQ ID NO: 961865 - DNA, 15 bp, Homo sapiens
catccatgtaatcaa

SEQ ID NO: 961866 - DNA, 15 bp, Homo sapiens
atccatgtaatcaaa

SEQ ID NO: 961867 - DNA, 15 bp, Homo sapiens
tccatgtaatcaaaa

SEQ ID NO: 961868 - DNA, 15 bp, Homo sapiens
ccatgtaatcaaaaa

SEQ ID NO: 961869 - DNA, 15 bp, Homo sapiens
catgtaatcaaaaac

SEQ ID NO: 961870 - DNA, 15 bp, Homo sapiens
atgtaatcaaaaacc

SEQ ID NO: 961871 - DNA, 15 bp, Homo sapiens
tgtaatcaaaaacca

SEQ ID NO: 961872 - DNA, 15 bp, Homo sapiens
gtaatcaaaaaccac

SEQ ID NO: 961873 - DNA, 15 bp, Homo sapiens
taatcaaaaaccacg

SEQ ID NO: 961874 - DNA, 15 bp, Homo sapiens
aatcaaaaaccacgt

SEQ ID NO: 961875 - DNA, 15 bp, Homo sapiens
atcaaaaaccacgtg

SEQ ID NO: 961876 - DNA, 15 bp, Homo sapiens
tcaaaaaccacgtgt

SEQ ID NO: 961877 - DNA, 15 bp, Homo sapiens
caaaaaccacgtgta

SEQ ID NO: 961878 - DNA, 15 bp, Homo sapiens
aaaaaccacgtgtac

SEQ ID NO: 961879 - DNA, 15 bp, Homo sapiens
aaaaccacgtgtacc

SEQ ID NO: 961880 - DNA, 15 bp, Homo sapiens
aaaccacgtgtaccc

SEQ ID NO: 961881 - DNA, 15 bp, Homo sapiens
aaccacgtgtacccc

SEQ ID NO: 961882 - DNA, 15 bp, Homo sapiens
accacgtgtacccca

SEQ ID NO: 961883 - DNA, 15 bp, Homo sapiens
ccacgtgtaccccaa

SEQ ID NO: 961884 - DNA, 15 bp, Homo sapiens
cacgtgtaccccaaa

SEQ ID NO: 961885 - DNA, 15 bp, Homo sapiens
acgtgtaccccaaaa

SEQ ID NO: 961886 - DNA, 15 bp, Homo sapiens
cgtgtaccccaaaag

SEQ ID NO: 961887 - DNA, 15 bp, Homo sapiens
gtgtaccccaaaagc

SEQ ID NO: 961888 - DNA, 15 bp, Homo sapiens
tgtaccccaaaagct

SEQ ID NO: 961889 - DNA, 15 bp, Homo sapiens
gtaccccaaaagcta

SEQ ID NO: 961890 - DNA, 15 bp, Homo sapiens
taccccaaaagctat

SEQ ID NO: 961891 - DNA, 15 bp, Homo sapiens
accccaaaagctatt

SEQ ID NO: 961892 - DNA, 15 bp, Homo sapiens
ccccaaaagctattg

SEQ ID NO: 961893 - DNA, 15 bp, Homo sapiens
cccaaaagctattga

SEQ ID NO: 961894 - DNA, 15 bp, Homo sapiens
ccaaaagctattgaa

SEQ ID NO: 961895 - DNA, 15 bp, Homo sapiens
caaaagctattgaaa

SEQ ID NO: 961896 - DNA, 15 bp, Homo sapiens
aaaagctattgaaat

SEQ ID NO: 961897 - DNA, 15 bp, Homo sapiens
aaagctattgaaata

SEQ ID NO: 961898 - DNA, 15 bp, Homo sapiens
aagctattgaaataa

SEQ ID NO: 961899 - DNA, 15 bp, Homo sapiens
agctattgaaataag

SEQ ID NO: 961900 - DNA, 15 bp, Homo sapiens
gctattgaaataaga

SEQ ID NO: 961901 - DNA, 15 bp, Homo sapiens
ctattgaaataagat

SEQ ID NO: 961902 - DNA, 15 bp, Homo sapiens
tattgaaataagata

SEQ ID NO: 961903 - DNA, 15 bp, Homo sapiens
attgaaataagatag

SEQ ID NO: 961904 - DNA, 15 bp, Homo sapiens
ttgaaataagataga

SEQ ID NO: 961905 - DNA, 15 bp, Homo sapiens
tgaaataagatagaa

SEQ ID NO: 961906 - DNA, 15 bp, Homo sapiens
gaaataagatagaat

SEQ ID NO: 961907 - DNA, 15 bp, Homo sapiens
aaataagatagaata

SEQ ID NO: 961908 - DNA, 15 bp, Homo sapiens
aataagatagaataa

SEQ ID NO: 961909 - DNA, 15 bp, Homo sapiens
ataagatagaataaa

SEQ ID NO: 961910 - DNA, 15 bp, Homo sapiens
taagatagaataaaa

SEQ ID NO: 961911 - DNA, 15 bp, Homo sapiens
aagatagaataaaaa

SEQ ID NO: 961912 - DNA, 15 bp, Homo sapiens
agatagaataaaaaa

SEQ ID NO: 961913 - DNA, 15 bp, Homo sapiens
gatagaataaaaaac

SEQ ID NO: 961914 - DNA, 15 bp, Homo sapiens
atagaataaaaaaca

SEQ ID NO: 961915 - DNA, 15 bp, Homo sapiens
tagaataaaaaacaa

SEQ ID NO: 961916 - DNA, 15 bp, Homo sapiens
agaataaaaaacaaa

SEQ ID NO: 961917 - DNA, 15 bp, Homo sapiens
gaataaaaaacaaac

SEQ ID NO: 961918 - DNA, 15 bp, Homo sapiens
aataaaaaacaaaca

SEQ ID NO: 961919 - DNA, 15 bp, Homo sapiens
ataaaaaacaaacaa

SEQ ID NO: 961920 - DNA, 15 bp, Homo sapiens
taaaaaacaaacaaa

SEQ ID NO: 961921 - DNA, 15 bp, Homo sapiens
aaaaaacaaacaaaa

SEQ ID NO: 961922 - DNA, 15 bp, Homo sapiens
aaaaacaaacaaaaa

SEQ ID NO: 961923 - DNA, 15 bp, Homo sapiens
aaaacaaacaaaaaa

SEQ ID NO: 961924 - DNA, 15 bp, Homo sapiens
aaacaaacaaaaaat

SEQ ID NO: 961925 - DNA, 15 bp, Homo sapiens
aacaaacaaaaaata

SEQ ID NO: 961926 - DNA, 15 bp, Homo sapiens
acaaacaaaaaatag

SEQ ID NO: 961927 - DNA, 15 bp, Homo sapiens
caaacaaaaaatagt

SEQ ID NO: 961928 - DNA, 15 bp, Homo sapiens
aaacaaaaaatagtt

SEQ ID NO: 961929 - DNA, 15 bp, Homo sapiens
aacaaaaaatagttt

SEQ ID NO: 961930 - DNA, 15 bp, Homo sapiens
acaaaaaatagtttt

SEQ ID NO: 961931 - DNA, 15 bp, Homo sapiens
caaaaaatagttttt

SEQ ID NO: 961932 - DNA, 15 bp, Homo sapiens
aaaaaatagtttttg

SEQ ID NO: 961933 - DNA, 15 bp, Homo sapiens
aaaaatagtttttgc

SEQ ID NO: 961934 - DNA, 15 bp, Homo sapiens
aaaatagtttttgct

SEQ ID NO: 961935 - DNA, 15 bp, Homo sapiens
aaatagtttttgctg

SEQ ID NO: 961936 - DNA, 15 bp, Homo sapiens
aatagtttttgctga

SEQ ID NO: 961937 - DNA, 15 bp, Homo sapiens
atagtttttgctgaa

SEQ ID NO: 961938 - DNA, 15 bp, Homo sapiens
tagtttttgctgaag

SEQ ID NO: 961939 - DNA, 15 bp, Homo sapiens
agtttttgctgaagt

SEQ ID NO: 961940 - DNA, 15 bp, Homo sapiens
gtttttgctgaagtg

SEQ ID NO: 961941 - DNA, 15 bp, Homo sapiens
tttttgctgaagtgg

SEQ ID NO: 961942 - DNA, 15 bp, Homo sapiens
ttttgctgaagtggt

SEQ ID NO: 961943 - DNA, 15 bp, Homo sapiens
tttgctgaagtggta

SEQ ID NO: 961944 - DNA, 15 bp, Homo sapiens
ttgctgaagtggtaa

SEQ ID NO: 961945 - DNA, 15 bp, Homo sapiens
tgctgaagtggtaaa

SEQ ID NO: 961946 - DNA, 15 bp, Homo sapiens
gctgaagtggtaaaa

SEQ ID NO: 961947 - DNA, 15 bp, Homo sapiens
ctgaagtggtaaaag

SEQ ID NO: 961948 - DNA, 15 bp, Homo sapiens
tgaagtggtaaaaga

SEQ ID NO: 961949 - DNA, 15 bp, Homo sapiens
gaagtggtaaaagaa

SEQ ID NO: 961950 - DNA, 15 bp, Homo sapiens
aagtggtaaaagaac

SEQ ID NO: 961951 - DNA, 15 bp, Homo sapiens
agtggtaaaagaact

SEQ ID NO: 961952 - DNA, 15 bp, Homo sapiens
gtggtaaaagaactt

SEQ ID NO: 961953 - DNA, 15 bp, Homo sapiens
tggtaaaagaacttc

SEQ ID NO: 961954 - DNA, 15 bp, Homo sapiens
ggtaaaagaacttct

SEQ ID NO: 961955 - DNA, 15 bp, Homo sapiens
gtaaaagaacttcta

SEQ ID NO: 961956 - DNA, 15 bp, Homo sapiens
taaaagaacttctat

SEQ ID NO: 961957 - DNA, 15 bp, Homo sapiens
aaaagaacttctatt

SEQ ID NO: 961958 - DNA, 15 bp, Homo sapiens
aaagaacttctatta

SEQ ID NO: 961959 - DNA, 15 bp, Homo sapiens
aagaacttctattat

SEQ ID NO: 961960 - DNA, 15 bp, Homo sapiens
agaacttctattatt

SEQ ID NO: 961961 - DNA, 15 bp, Homo sapiens
gaacttctattattt

SEQ ID NO: 961962 - DNA, 15 bp, Homo sapiens
aacttctattatttc

SEQ ID NO: 961963 - DNA, 15 bp, Homo sapiens
acttctattatttca

SEQ ID NO: 961964 - DNA, 15 bp, Homo sapiens
cttctattatttcat

SEQ ID NO: 961965 - DNA, 15 bp, Homo sapiens
ttctattatttcatt

SEQ ID NO: 961966 - DNA, 15 bp, Homo sapiens
tctattatttcattt

SEQ ID NO: 961967 - DNA, 15 bp, Homo sapiens
ctattatttcatttt

SEQ ID NO: 961968 - DNA, 15 bp, Homo sapiens
tattatttcatttta

SEQ ID NO: 961969 - DNA, 15 bp, Homo sapiens
attatttcattttat

SEQ ID NO: 961970 - DNA, 15 bp, Homo sapiens
ttatttcattttatt

SEQ ID NO: 961971 - DNA, 15 bp, Homo sapiens
tatttcattttattt

SEQ ID NO: 961972 - DNA, 15 bp, Homo sapiens
atttcattttattta

SEQ ID NO: 961973 - DNA, 15 bp, Homo sapiens
tttcattttatttat

SEQ ID NO: 961974 - DNA, 15 bp, Homo sapiens
ttcattttatttatt

SEQ ID NO: 961975 - DNA, 15 bp, Homo sapiens
tcattttatttattt

SEQ ID NO: 961976 - DNA, 15 bp, Homo sapiens
cattttatttatttt

SEQ ID NO: 961977 - DNA, 15 bp, Homo sapiens
attttatttattttg

SEQ ID NO: 961978 - DNA, 15 bp, Homo sapiens
ttttatttattttga

SEQ ID NO: 961979 - DNA, 15 bp, Homo sapiens
tttatttattttgat

SEQ ID NO: 961980 - DNA, 15 bp, Homo sapiens
ttatttattttgata

SEQ ID NO: 961981 - DNA, 15 bp, Homo sapiens
tatttattttgatac

SEQ ID NO: 961982 - DNA, 15 bp, Homo sapiens
atttattttgataca

SEQ ID NO: 961983 - DNA, 15 bp, Homo sapiens
tttattttgatacag

SEQ ID NO: 961984 - DNA, 15 bp, Homo sapiens
ttattttgatacagg

SEQ ID NO: 961985 - DNA, 15 bp, Homo sapiens
tattttgatacaggg

SEQ ID NO: 961986 - DNA, 15 bp, Homo sapiens
attttgatacagggt

SEQ ID NO: 961987 - DNA, 15 bp, Homo sapiens
ttttgatacagggtc

SEQ ID NO: 961988 - DNA, 15 bp, Homo sapiens
tttgatacagggtct

SEQ ID NO: 961989 - DNA, 15 bp, Homo sapiens
ttgatacagggtctc

SEQ ID NO: 961990 - DNA, 15 bp, Homo sapiens
tgatacagggtctca

SEQ ID NO: 961991 - DNA, 15 bp, Homo sapiens
gatacagggtctcac

SEQ ID NO: 961992 - DNA, 15 bp, Homo sapiens
atacagggtctcact

SEQ ID NO: 961993 - DNA, 15 bp, Homo sapiens
tacagggtctcactc

SEQ ID NO: 961994 - DNA, 15 bp, Homo sapiens
acagggtctcactct

SEQ ID NO: 961995 - DNA, 15 bp, Homo sapiens
cagggtctcactctg

SEQ ID NO: 961996 - DNA, 15 bp, Homo sapiens
agggtctcactctgt

SEQ ID NO: 961997 - DNA, 15 bp, Homo sapiens
gggtctcactctgtt

SEQ ID NO: 961998 - DNA, 15 bp, Homo sapiens
ggtctcactctgttg

SEQ ID NO: 961999 - DNA, 15 bp, Homo sapiens
gtctcactctgttgc

SEQ ID NO: 962000 - DNA, 15 bp, Homo sapiens
tctcactctgttgcc

SEQ ID NO: 962001 - DNA, 15 bp, Homo sapiens
ctcactctgttgccc

SEQ ID NO: 962002 - DNA, 15 bp, Homo sapiens
tcactctgttgccca

SEQ ID NO: 962003 - DNA, 15 bp, Homo sapiens
cactctgttgcccag

SEQ ID NO: 962004 - DNA, 15 bp, Homo sapiens
actctgttgcccagg

SEQ ID NO: 962005 - DNA, 15 bp, Homo sapiens
ctctgttgcccaggt

SEQ ID NO: 962006 - DNA, 15 bp, Homo sapiens
tctgttgcccaggtt

SEQ ID NO: 962007 - DNA, 15 bp, Homo sapiens
ctgttgcccaggttg

SEQ ID NO: 962008 - DNA, 15 bp, Homo sapiens
tgttgcccaggttgg

SEQ ID NO: 962009 - DNA, 15 bp, Homo sapiens
gttgcccaggttgga

SEQ ID NO: 962010 - DNA, 15 bp, Homo sapiens
ttgcccaggttggag

SEQ ID NO: 962011 - DNA, 15 bp, Homo sapiens
tgcccaggttggagt

SEQ ID NO: 962012 - DNA, 15 bp, Homo sapiens
gcccaggttggagta

SEQ ID NO: 962013 - DNA, 15 bp, Homo sapiens
cccaggttggagtac

SEQ ID NO: 962014 - DNA, 15 bp, Homo sapiens
ccaggttggagtaca

SEQ ID NO: 962015 - DNA, 15 bp, Homo sapiens
caggttggagtacag

SEQ ID NO: 962016 - DNA, 15 bp, Homo sapiens
aggttggagtacagt

SEQ ID NO: 962017 - DNA, 15 bp, Homo sapiens
ggttggagtacagtg

SEQ ID NO: 962018 - DNA, 15 bp, Homo sapiens
gttggagtacagtgg

SEQ ID NO: 962019 - DNA, 15 bp, Homo sapiens
ttggagtacagtggc

SEQ ID NO: 962020 - DNA, 15 bp, Homo sapiens
tggagtacagtggcg

SEQ ID NO: 962021 - DNA, 15 bp, Homo sapiens
ggagtacagtggcgt

SEQ ID NO: 962022 - DNA, 15 bp, Homo sapiens
gagtacagtggcgtg

SEQ ID NO: 962023 - DNA, 15 bp, Homo sapiens
agtacagtggcgtga

SEQ ID NO: 962024 - DNA, 15 bp, Homo sapiens
gtacagtggcgtgat

SEQ ID NO: 962025 - DNA, 15 bp, Homo sapiens
tacagtggcgtgata

SEQ ID NO: 962026 - DNA, 15 bp, Homo sapiens
acagtggcgtgataa

SEQ ID NO: 962027 - DNA, 15 bp, Homo sapiens
cagtggcgtgataat

SEQ ID NO: 962028 - DNA, 15 bp, Homo sapiens
agtggcgtgataatg

SEQ ID NO: 962029 - DNA, 15 bp, Homo sapiens
gtggcgtgataatgg

SEQ ID NO: 962030 - DNA, 15 bp, Homo sapiens
tggcgtgataatggc

SEQ ID NO: 962031 - DNA, 15 bp, Homo sapiens
ggcgtgataatggct

SEQ ID NO: 962032 - DNA, 15 bp, Homo sapiens
gcgtgataatggctc

SEQ ID NO: 962033 - DNA, 15 bp, Homo sapiens
cgtgataatggctca

SEQ ID NO: 962034 - DNA, 15 bp, Homo sapiens
gtgataatggctcac

SEQ ID NO: 962035 - DNA, 15 bp, Homo sapiens
tgataatggctcact

SEQ ID NO: 962036 - DNA, 15 bp, Homo sapiens
gataatggctcactg

SEQ ID NO: 962037 - DNA, 15 bp, Homo sapiens
ataatggctcactgc

SEQ ID NO: 962038 - DNA, 15 bp, Homo sapiens
taatggctcactgca

SEQ ID NO: 962039 - DNA, 15 bp, Homo sapiens
aatggctcactgcaa

SEQ ID NO: 962040 - DNA, 15 bp, Homo sapiens
atggctcactgcaac

SEQ ID NO: 962041 - DNA, 15 bp, Homo sapiens
ctcactgcaacctca

SEQ ID NO: 962042 - DNA, 15 bp, Homo sapiens
tcactgcaacctcaa

SEQ ID NO: 962043 - DNA, 15 bp, Homo sapiens
cactgcaacctcaac

SEQ ID NO: 962044 - DNA, 15 bp, Homo sapiens
actgcaacctcaacc

SEQ ID NO: 962045 - DNA, 15 bp, Homo sapiens
ctgcaacctcaacct

SEQ ID NO: 962046 - DNA, 15 bp, Homo sapiens
tgcaacctcaacctc

SEQ ID NO: 962047 - DNA, 15 bp, Homo sapiens
gcaacctcaacctcc

SEQ ID NO: 962048 - DNA, 15 bp, Homo sapiens
caacctcaacctcct

SEQ ID NO: 962049 - DNA, 15 bp, Homo sapiens
aacctcaacctcctg

SEQ ID NO: 962050 - DNA, 15 bp, Homo sapiens
acctcaacctcctgg

SEQ ID NO: 962051 - DNA, 15 bp, Homo sapiens
cctcaacctcctggg

SEQ ID NO: 962052 - DNA, 15 bp, Homo sapiens
ctcaacctcctgggc

SEQ ID NO: 962053 - DNA, 15 bp, Homo sapiens
tcaacctcctgggct

SEQ ID NO: 962054 - DNA, 15 bp, Homo sapiens
caacctcctgggctc

SEQ ID NO: 962055 - DNA, 15 bp, Homo sapiens
aacctcctgggctca

SEQ ID NO: 962056 - DNA, 15 bp, Homo sapiens
acctcctgggctcaa

SEQ ID NO: 962057 - DNA, 15 bp, Homo sapiens
cctcctgggctcaag

SEQ ID NO: 962058 - DNA, 15 bp, Homo sapiens
ctcctgggctcaagt

SEQ ID NO: 962059 - DNA, 15 bp, Homo sapiens
tcctgggctcaagtg

SEQ ID NO: 962060 - DNA, 15 bp, Homo sapiens
cctgggctcaagtga

SEQ ID NO: 962061 - DNA, 15 bp, Homo sapiens
ctgggctcaagtgat

SEQ ID NO: 962062 - DNA, 15 bp, Homo sapiens
tgggctcaagtgatc

SEQ ID NO: 962063 - DNA, 15 bp, Homo sapiens
gggctcaagtgatcc

SEQ ID NO: 962064 - DNA, 15 bp, Homo sapiens
ggctcaagtgatcct

SEQ ID NO: 962065 - DNA, 15 bp, Homo sapiens
gctcaagtgatcctc

SEQ ID NO: 962066 - DNA, 15 bp, Homo sapiens
ctcaagtgatcctcc

SEQ ID NO: 962067 - DNA, 15 bp, Homo sapiens
tcaagtgatcctccc

SEQ ID NO: 962068 - DNA, 15 bp, Homo sapiens
caagtgatcctccca

SEQ ID NO: 962069 - DNA, 15 bp, Homo sapiens
aagtgatcctcccat

SEQ ID NO: 962070 - DNA, 15 bp, Homo sapiens
agtgatcctcccatc

SEQ ID NO: 962071 - DNA, 15 bp, Homo sapiens
gtgatcctcccatct

SEQ ID NO: 962072 - DNA, 15 bp, Homo sapiens
tgatcctcccatctc

SEQ ID NO: 962073 - DNA, 15 bp, Homo sapiens
gatcctcccatctca

SEQ ID NO: 962074 - DNA, 15 bp, Homo sapiens
atcctcccatctcag

SEQ ID NO: 962075 - DNA, 15 bp, Homo sapiens
tcctcccatctcagc

SEQ ID NO: 962076 - DNA, 15 bp, Homo sapiens
cctcccatctcagcc

SEQ ID NO: 962077 - DNA, 15 bp, Homo sapiens
ctcccatctcagcct

SEQ ID NO: 962078 - DNA, 15 bp, Homo sapiens
tcccatctcagcctc

SEQ ID NO: 962079 - DNA, 15 bp, Homo sapiens
cccatctcagcctcc

SEQ ID NO: 962080 - DNA, 15 bp, Homo sapiens
ccatctcagcctcct

SEQ ID NO: 962081 - DNA, 15 bp, Homo sapiens
catctcagcctcctg

SEQ ID NO: 962082 - DNA, 15 bp, Homo sapiens
atctcagcctcctga

SEQ ID NO: 962083 - DNA, 15 bp, Homo sapiens
tctcagcctcctgag

SEQ ID NO: 962084 - DNA, 15 bp, Homo sapiens
ctgagtagctgggac

SEQ ID NO: 962085 - DNA, 15 bp, Homo sapiens
tgagtagctgggact

SEQ ID NO: 962086 - DNA, 15 bp, Homo sapiens
gagtagctgggacta

SEQ ID NO: 962087 - DNA, 15 bp, Homo sapiens
agctgggactacagt

SEQ ID NO: 962088 - DNA, 15 bp, Homo sapiens
gctgggactacagtg

SEQ ID NO: 962089 - DNA, 15 bp, Homo sapiens
ctgggactacagtgc

SEQ ID NO: 962090 - DNA, 15 bp, Homo sapiens
tgggactacagtgca

SEQ ID NO: 962091 - DNA, 15 bp, Homo sapiens
gggactacagtgcat

SEQ ID NO: 962092 - DNA, 15 bp, Homo sapiens
ggactacagtgcatg

SEQ ID NO: 962093 - DNA, 15 bp, Homo sapiens
gactacagtgcatgc

SEQ ID NO: 962094 - DNA, 15 bp, Homo sapiens
actacagtgcatgcc

SEQ ID NO: 962095 - DNA, 15 bp, Homo sapiens
ctacagtgcatgcca

SEQ ID NO: 962096 - DNA, 15 bp, Homo sapiens
tacagtgcatgccac

SEQ ID NO: 962097 - DNA, 15 bp, Homo sapiens
acagtgcatgccacc

SEQ ID NO: 962098 - DNA, 15 bp, Homo sapiens
cagtgcatgccacca

SEQ ID NO: 962099 - DNA, 15 bp, Homo sapiens
agtgcatgccaccac

SEQ ID NO: 962100 - DNA, 15 bp, Homo sapiens
gtgcatgccaccacg

SEQ ID NO: 962101 - DNA, 15 bp, Homo sapiens
tgcatgccaccacgc

SEQ ID NO: 962102 - DNA, 15 bp, Homo sapiens
gcatgccaccacgcc

SEQ ID NO: 962103 - DNA, 15 bp, Homo sapiens
catgccaccacgcct

SEQ ID NO: 962104 - DNA, 15 bp, Homo sapiens
atgccaccacgcctg

SEQ ID NO: 962105 - DNA, 15 bp, Homo sapiens
tgccaccacgcctgg

SEQ ID NO: 962106 - DNA, 15 bp, Homo sapiens
gccaccacgcctggc

SEQ ID NO: 962107 - DNA, 15 bp, Homo sapiens
ccaccacgcctggct

SEQ ID NO: 962108 - DNA, 15 bp, Homo sapiens
caccacgcctggcta

SEQ ID NO: 962109 - DNA, 15 bp, Homo sapiens
accacgcctggctac

SEQ ID NO: 962110 - DNA, 15 bp, Homo sapiens
ccacgcctggctact

SEQ ID NO: 962111 - DNA, 15 bp, Homo sapiens
cacgcctggctactt

SEQ ID NO: 962112 - DNA, 15 bp, Homo sapiens
acgcctggctacttt

SEQ ID NO: 962113 - DNA, 15 bp, Homo sapiens
cgcctggctactttt

SEQ ID NO: 962114 - DNA, 15 bp, Homo sapiens
gcctggctacttttt

SEQ ID NO: 962115 - DNA, 15 bp, Homo sapiens
cctggctacttttta

SEQ ID NO: 962116 - DNA, 15 bp, Homo sapiens
ctggctactttttaa

SEQ ID NO: 962117 - DNA, 15 bp, Homo sapiens
tggctactttttaaa

SEQ ID NO: 962118 - DNA, 15 bp, Homo sapiens
ggctactttttaaat

SEQ ID NO: 962119 - DNA, 15 bp, Homo sapiens
gctactttttaaatt

SEQ ID NO: 962120 - DNA, 15 bp, Homo sapiens
ctactttttaaattt

SEQ ID NO: 962121 - DNA, 15 bp, Homo sapiens
tactttttaaatttt

SEQ ID NO: 962122 - DNA, 15 bp, Homo sapiens
actttttaaattttt

SEQ ID NO: 962123 - DNA, 15 bp, Homo sapiens
ctttttaaatttttt

SEQ ID NO: 962124 - DNA, 15 bp, Homo sapiens
tttttaaattttttt

SEQ ID NO: 962125 - DNA, 15 bp, Homo sapiens
ttttaaatttttttg

SEQ ID NO: 962126 - DNA, 15 bp, Homo sapiens
tttaaatttttttgt

SEQ ID NO: 962127 - DNA, 15 bp, Homo sapiens
ttaaatttttttgta

SEQ ID NO: 962128 - DNA, 15 bp, Homo sapiens
taaatttttttgtag

SEQ ID NO: 962129 - DNA, 15 bp, Homo sapiens
aaatttttttgtaga

SEQ ID NO: 962130 - DNA, 15 bp, Homo sapiens
aatttttttgtagac

SEQ ID NO: 962131 - DNA, 15 bp, Homo sapiens
ttttttgtagacatg

SEQ ID NO: 962132 - DNA, 15 bp, Homo sapiens
tttttgtagacatga

SEQ ID NO: 962133 - DNA, 15 bp, Homo sapiens
ttttgtagacatgaa

SEQ ID NO: 962134 - DNA, 15 bp, Homo sapiens
tttgtagacatgaat

SEQ ID NO: 962135 - DNA, 15 bp, Homo sapiens
ttgtagacatgaatt

SEQ ID NO: 962136 - DNA, 15 bp, Homo sapiens
tgtagacatgaattc

SEQ ID NO: 962137 - DNA, 15 bp, Homo sapiens
gtagacatgaattct

SEQ ID NO: 962138 - DNA, 15 bp, Homo sapiens
tagacatgaattctc

SEQ ID NO: 962139 - DNA, 15 bp, Homo sapiens
agacatgaattctct

SEQ ID NO: 962140 - DNA, 15 bp, Homo sapiens
gacatgaattctctc

SEQ ID NO: 962141 - DNA, 15 bp, Homo sapiens
acatgaattctctct

SEQ ID NO: 962142 - DNA, 15 bp, Homo sapiens
catgaattctctcta

SEQ ID NO: 962143 - DNA, 15 bp, Homo sapiens
atgaattctctctat

SEQ ID NO: 962144 - DNA, 15 bp, Homo sapiens
tgaattctctctatg

SEQ ID NO: 962145 - DNA, 15 bp, Homo sapiens
gaattctctctatgt

SEQ ID NO: 962146 - DNA, 15 bp, Homo sapiens
aattctctctatgtt

SEQ ID NO: 962147 - DNA, 15 bp, Homo sapiens
attctctctatgtta

SEQ ID NO: 962148 - DNA, 15 bp, Homo sapiens
ttctctctatgttac

SEQ ID NO: 962149 - DNA, 15 bp, Homo sapiens
tctctctatgttacc

SEQ ID NO: 962150 - DNA, 15 bp, Homo sapiens
ctctctatgttaccc

SEQ ID NO: 962151 - DNA, 15 bp, Homo sapiens
tctctatgttaccca

SEQ ID NO: 962152 - DNA, 15 bp, Homo sapiens
ctctatgttacccag

SEQ ID NO: 962153 - DNA, 15 bp, Homo sapiens
tctatgttacccagg

SEQ ID NO: 962154 - DNA, 15 bp, Homo sapiens
ctatgttacccaggc

SEQ ID NO: 962155 - DNA, 15 bp, Homo sapiens
tatgttacccaggct

SEQ ID NO: 962156 - DNA, 15 bp, Homo sapiens
atgttacccaggctg

SEQ ID NO: 962157 - DNA, 15 bp, Homo sapiens
tgttacccaggctgg

SEQ ID NO: 962158 - DNA, 15 bp, Homo sapiens
gttacccaggctggt

SEQ ID NO: 962159 - DNA, 15 bp, Homo sapiens
ttacccaggctggtt

SEQ ID NO: 962160 - DNA, 15 bp, Homo sapiens
tacccaggctggttt

SEQ ID NO: 962161 - DNA, 15 bp, Homo sapiens
acccaggctggtttc

SEQ ID NO: 962162 - DNA, 15 bp, Homo sapiens
cccaggctggtttca

SEQ ID NO: 962163 - DNA, 15 bp, Homo sapiens
ccaggctggtttcaa

SEQ ID NO: 962164 - DNA, 15 bp, Homo sapiens
caggctggtttcaat

SEQ ID NO: 962165 - DNA, 15 bp, Homo sapiens
aggctggtttcaatt

SEQ ID NO: 962166 - DNA, 15 bp, Homo sapiens
ggctggtttcaattc

SEQ ID NO: 962167 - DNA, 15 bp, Homo sapiens
gctggtttcaattcc

SEQ ID NO: 962168 - DNA, 15 bp, Homo sapiens
ctggtttcaattcct

SEQ ID NO: 962169 - DNA, 15 bp, Homo sapiens
tggtttcaattcctg

SEQ ID NO: 962170 - DNA, 15 bp, Homo sapiens
ggtttcaattcctga

SEQ ID NO: 962171 - DNA, 15 bp, Homo sapiens
gtttcaattcctgag

SEQ ID NO: 962172 - DNA, 15 bp, Homo sapiens
tttcaattcctgagc

SEQ ID NO: 962173 - DNA, 15 bp, Homo sapiens
ttcaattcctgagct

SEQ ID NO: 962174 - DNA, 15 bp, Homo sapiens
tcaattcctgagctc

SEQ ID NO: 962175 - DNA, 15 bp, Homo sapiens
caattcctgagctca

SEQ ID NO: 962176 - DNA, 15 bp, Homo sapiens
aattcctgagctcaa

SEQ ID NO: 962177 - DNA, 15 bp, Homo sapiens
attcctgagctcaag

SEQ ID NO: 962178 - DNA, 15 bp, Homo sapiens
ttcctgagctcaagt

SEQ ID NO: 962179 - DNA, 15 bp, Homo sapiens
tcctgagctcaagtg

SEQ ID NO: 962180 - DNA, 15 bp, Homo sapiens
cctgagctcaagtga

SEQ ID NO: 962181 - DNA, 15 bp, Homo sapiens
ctgagctcaagtgat

SEQ ID NO: 962182 - DNA, 15 bp, Homo sapiens
tgagctcaagtgatc

SEQ ID NO: 962183 - DNA, 15 bp, Homo sapiens
gagctcaagtgatcc

SEQ ID NO: 962184 - DNA, 15 bp, Homo sapiens
agctcaagtgatcct

SEQ ID NO: 962185 - DNA, 15 bp, Homo sapiens
tcaagtgatcctcca

SEQ ID NO: 962186 - DNA, 15 bp, Homo sapiens
caagtgatcctccag

SEQ ID NO: 962187 - DNA, 15 bp, Homo sapiens
aagtgatcctccagc

SEQ ID NO: 962188 - DNA, 15 bp, Homo sapiens
agtgatcctccagcc

SEQ ID NO: 962189 - DNA, 15 bp, Homo sapiens
gtgatcctccagcct

SEQ ID NO: 962190 - DNA, 15 bp, Homo sapiens
tgatcctccagcctc

SEQ ID NO: 962191 - DNA, 15 bp, Homo sapiens
gatcctccagcctcg

SEQ ID NO: 962192 - DNA, 15 bp, Homo sapiens
atcctccagcctcgg

SEQ ID NO: 962193 - DNA, 15 bp, Homo sapiens
tcctccagcctcggc

SEQ ID NO: 962194 - DNA, 15 bp, Homo sapiens
cctccagcctcggcc

SEQ ID NO: 962195 - DNA, 15 bp, Homo sapiens
ctccagcctcggcct

SEQ ID NO: 962196 - DNA, 15 bp, Homo sapiens
tccagcctcggcctc

SEQ ID NO: 962197 - DNA, 15 bp, Homo sapiens
ccagcctcggcctcc

SEQ ID NO: 962198 - DNA, 15 bp, Homo sapiens
cagcctcggcctccc

SEQ ID NO: 962199 - DNA, 15 bp, Homo sapiens
agcctcggcctccca

SEQ ID NO: 962200 - DNA, 15 bp, Homo sapiens
tcggcctcccaaaga

SEQ ID NO: 962201 - DNA, 15 bp, Homo sapiens
cggcctcccaaagag

SEQ ID NO: 962202 - DNA, 15 bp, Homo sapiens
ggcctcccaaagagt

SEQ ID NO: 962203 - DNA, 15 bp, Homo sapiens
gcctcccaaagagtt

SEQ ID NO: 962204 - DNA, 15 bp, Homo sapiens
cctcccaaagagttg

SEQ ID NO: 962205 - DNA, 15 bp, Homo sapiens
ctcccaaagagttgg

SEQ ID NO: 962206 - DNA, 15 bp, Homo sapiens
tcccaaagagttggg

SEQ ID NO: 962207 - DNA, 15 bp, Homo sapiens
cccaaagagttggga

SEQ ID NO: 962208 - DNA, 15 bp, Homo sapiens
ccaaagagttgggat

SEQ ID NO: 962209 - DNA, 15 bp, Homo sapiens
caaagagttgggatt

SEQ ID NO: 962210 - DNA, 15 bp, Homo sapiens
aaagagttgggatta

SEQ ID NO: 962211 - DNA, 15 bp, Homo sapiens
aagagttgggattac

SEQ ID NO: 962212 - DNA, 15 bp, Homo sapiens
agagttgggattaca

SEQ ID NO: 962213 - DNA, 15 bp, Homo sapiens
gagttgggattacag

SEQ ID NO: 962214 - DNA, 15 bp, Homo sapiens
agttgggattacagg

SEQ ID NO: 962215 - DNA, 15 bp, Homo sapiens
ttgggattacaggca

SEQ ID NO: 962216 - DNA, 15 bp, Homo sapiens
gattacaggcatgaa

SEQ ID NO: 962217 - DNA, 15 bp, Homo sapiens
attacaggcatgaac

SEQ ID NO: 962218 - DNA, 15 bp, Homo sapiens
ttacaggcatgaacc

SEQ ID NO: 962219 - DNA, 15 bp, Homo sapiens
tacaggcatgaacca

SEQ ID NO: 962220 - DNA, 15 bp, Homo sapiens
acaggcatgaaccac

SEQ ID NO: 962221 - DNA, 15 bp, Homo sapiens
caggcatgaaccacc

SEQ ID NO: 962222 - DNA, 15 bp, Homo sapiens
aggcatgaaccacca

SEQ ID NO: 962223 - DNA, 15 bp, Homo sapiens
ggcatgaaccaccac

SEQ ID NO: 962224 - DNA, 15 bp, Homo sapiens
gcatgaaccaccaca

SEQ ID NO: 962225 - DNA, 15 bp, Homo sapiens
catgaaccaccacac

SEQ ID NO: 962226 - DNA, 15 bp, Homo sapiens
atgaaccaccacacc

SEQ ID NO: 962227 - DNA, 15 bp, Homo sapiens
tgaaccaccacaccc

SEQ ID NO: 962228 - DNA, 15 bp, Homo sapiens
gaaccaccacaccca

SEQ ID NO: 962229 - DNA, 15 bp, Homo sapiens
aaccaccacacccag

SEQ ID NO: 962230 - DNA, 15 bp, Homo sapiens
accaccacacccagc

SEQ ID NO: 962231 - DNA, 15 bp, Homo sapiens
ccaccacacccagcc

SEQ ID NO: 962232 - DNA, 15 bp, Homo sapiens
caccacacccagcca

SEQ ID NO: 962233 - DNA, 15 bp, Homo sapiens
accacacccagccaa

SEQ ID NO: 962234 - DNA, 15 bp, Homo sapiens
ccacacccagccaac

SEQ ID NO: 962235 - DNA, 15 bp, Homo sapiens
cacacccagccaaca

SEQ ID NO: 962236 - DNA, 15 bp, Homo sapiens
acacccagccaacat

SEQ ID NO: 962237 - DNA, 15 bp, Homo sapiens
cacccagccaacatt

SEQ ID NO: 962238 - DNA, 15 bp, Homo sapiens
acccagccaacattt

SEQ ID NO: 962239 - DNA, 15 bp, Homo sapiens
cccagccaacattta

SEQ ID NO: 962240 - DNA, 15 bp, Homo sapiens
ccagccaacatttat

SEQ ID NO: 962241 - DNA, 15 bp, Homo sapiens
cagccaacatttatt

SEQ ID NO: 962242 - DNA, 15 bp, Homo sapiens
agccaacatttatta

SEQ ID NO: 962243 - DNA, 15 bp, Homo sapiens
gccaacatttattat

SEQ ID NO: 962244 - DNA, 15 bp, Homo sapiens
ccaacatttattatt

SEQ ID NO: 962245 - DNA, 15 bp, Homo sapiens
caacatttattattt

SEQ ID NO: 962246 - DNA, 15 bp, Homo sapiens
aacatttattatttt

SEQ ID NO: 962247 - DNA, 15 bp, Homo sapiens
acatttattattttg

SEQ ID NO: 962248 - DNA, 15 bp, Homo sapiens
catttattattttga

SEQ ID NO: 962249 - DNA, 15 bp, Homo sapiens
atttattattttgaa

SEQ ID NO: 962250 - DNA, 15 bp, Homo sapiens
tttattattttgaaa

SEQ ID NO: 962251 - DNA, 15 bp, Homo sapiens
ttattattttgaaat

SEQ ID NO: 962252 - DNA, 15 bp, Homo sapiens
tattattttgaaatt

SEQ ID NO: 962253 - DNA, 15 bp, Homo sapiens
attattttgaaattg

SEQ ID NO: 962254 - DNA, 15 bp, Homo sapiens
ttattttgaaattgc

SEQ ID NO: 962255 - DNA, 15 bp, Homo sapiens
tattttgaaattgct

SEQ ID NO: 962256 - DNA, 15 bp, Homo sapiens
attttgaaattgctt

SEQ ID NO: 962257 - DNA, 15 bp, Homo sapiens
ttttgaaattgcttg

SEQ ID NO: 962258 - DNA, 15 bp, Homo sapiens
tttgaaattgcttga

SEQ ID NO: 962259 - DNA, 15 bp, Homo sapiens
ttgaaattgcttgaa

SEQ ID NO: 962260 - DNA, 15 bp, Homo sapiens
tgaaattgcttgaaa

SEQ ID NO: 962261 - DNA, 15 bp, Homo sapiens
gaaattgcttgaaaa

SEQ ID NO: 962262 - DNA, 15 bp, Homo sapiens
aaattgcttgaaaaa

SEQ ID NO: 962263 - DNA, 15 bp, Homo sapiens
aattgcttgaaaaat

SEQ ID NO: 962264 - DNA, 15 bp, Homo sapiens
attgcttgaaaaata

SEQ ID NO: 962265 - DNA, 15 bp, Homo sapiens
ttgcttgaaaaatat

SEQ ID NO: 962266 - DNA, 15 bp, Homo sapiens
tgcttgaaaaatatt

SEQ ID NO: 962267 - DNA, 15 bp, Homo sapiens
gcttgaaaaatattg

SEQ ID NO: 962268 - DNA, 15 bp, Homo sapiens
cttgaaaaatattga

SEQ ID NO: 962269 - DNA, 15 bp, Homo sapiens
ttgaaaaatattgat

SEQ ID NO: 962270 - DNA, 15 bp, Homo sapiens
tgaaaaatattgatt

SEQ ID NO: 962271 - DNA, 15 bp, Homo sapiens
gaaaaatattgattg

SEQ ID NO: 962272 - DNA, 15 bp, Homo sapiens
aaaaatattgattgt

SEQ ID NO: 962273 - DNA, 15 bp, Homo sapiens
aaaatattgattgtt

SEQ ID NO: 962274 - DNA, 15 bp, Homo sapiens
aaatattgattgttt

SEQ ID NO: 962275 - DNA, 15 bp, Homo sapiens
aatattgattgtttc

SEQ ID NO: 962276 - DNA, 15 bp, Homo sapiens
atattgattgtttct

SEQ ID NO: 962277 - DNA, 15 bp, Homo sapiens
tattgattgtttcta

SEQ ID NO: 962278 - DNA, 15 bp, Homo sapiens
attgattgtttctaa

SEQ ID NO: 962279 - DNA, 15 bp, Homo sapiens
ttgattgtttctaat

SEQ ID NO: 962280 - DNA, 15 bp, Homo sapiens
tgattgtttctaata

SEQ ID NO: 962281 - DNA, 15 bp, Homo sapiens
gattgtttctaatag

SEQ ID NO: 962282 - DNA, 15 bp, Homo sapiens
attgtttctaataga

SEQ ID NO: 962283 - DNA, 15 bp, Homo sapiens
ttgtttctaatagag

SEQ ID NO: 962284 - DNA, 15 bp, Homo sapiens
tgtttctaatagagc

SEQ ID NO: 962285 - DNA, 15 bp, Homo sapiens
gtttctaatagagca

SEQ ID NO: 962286 - DNA, 15 bp, Homo sapiens
tttctaatagagcag

SEQ ID NO: 962287 - DNA, 15 bp, Homo sapiens
ttctaatagagcagc

SEQ ID NO: 962288 - DNA, 15 bp, Homo sapiens
tctaatagagcagcc

SEQ ID NO: 962289 - DNA, 15 bp, Homo sapiens
ctaatagagcagcca

SEQ ID NO: 962290 - DNA, 15 bp, Homo sapiens
taatagagcagccag

SEQ ID NO: 962291 - DNA, 15 bp, Homo sapiens
aatagagcagccaga

SEQ ID NO: 962292 - DNA, 15 bp, Homo sapiens
atagagcagccagaa

SEQ ID NO: 962293 - DNA, 15 bp, Homo sapiens
tagagcagccagaac

SEQ ID NO: 962294 - DNA, 15 bp, Homo sapiens
agagcagccagaact

SEQ ID NO: 962295 - DNA, 15 bp, Homo sapiens
gagcagccagaactc

SEQ ID NO: 962296 - DNA, 15 bp, Homo sapiens
agcagccagaactct

SEQ ID NO: 962297 - DNA, 15 bp, Homo sapiens
gcagccagaactctt

SEQ ID NO: 962298 - DNA, 15 bp, Homo sapiens
cagccagaactcttt

SEQ ID NO: 962299 - DNA, 15 bp, Homo sapiens
agccagaactcttta

SEQ ID NO: 962300 - DNA, 15 bp, Homo sapiens
gccagaactctttat

SEQ ID NO: 962301 - DNA, 15 bp, Homo sapiens
ccagaactctttatt

SEQ ID NO: 962302 - DNA, 15 bp, Homo sapiens
cagaactctttattt

SEQ ID NO: 962303 - DNA, 15 bp, Homo sapiens
agaactctttatttt

SEQ ID NO: 962304 - DNA, 15 bp, Homo sapiens
gaactctttattttg

SEQ ID NO: 962305 - DNA, 15 bp, Homo sapiens
aactctttattttgt

SEQ ID NO: 962306 - DNA, 15 bp, Homo sapiens
actctttattttgtg

SEQ ID NO: 962307 - DNA, 15 bp, Homo sapiens
ctctttattttgtgt

SEQ ID NO: 962308 - DNA, 15 bp, Homo sapiens
tctttattttgtgtt

SEQ ID NO: 962309 - DNA, 15 bp, Homo sapiens
ctttattttgtgttt

SEQ ID NO: 962310 - DNA, 15 bp, Homo sapiens
tttattttgtgtttt

SEQ ID NO: 962311 - DNA, 15 bp, Homo sapiens
ttattttgtgttttt

SEQ ID NO: 962312 - DNA, 15 bp, Homo sapiens
tattttgtgttttta

SEQ ID NO: 962313 - DNA, 15 bp, Homo sapiens
attttgtgtttttaa

SEQ ID NO: 962314 - DNA, 15 bp, Homo sapiens
ttttgtgtttttaat

SEQ ID NO: 962315 - DNA, 15 bp, Homo sapiens
tttgtgtttttaatt

SEQ ID NO: 962316 - DNA, 15 bp, Homo sapiens
ttgtgtttttaattg

SEQ ID NO: 962317 - DNA, 15 bp, Homo sapiens
tgtgtttttaattgc

SEQ ID NO: 962318 - DNA, 15 bp, Homo sapiens
gtgtttttaattgct

SEQ ID NO: 962319 - DNA, 15 bp, Homo sapiens
tgtttttaattgctc

SEQ ID NO: 962320 - DNA, 15 bp, Homo sapiens
gtttttaattgctcg

SEQ ID NO: 962321 - DNA, 15 bp, Homo sapiens
tttttaattgctcga

SEQ ID NO: 962322 - DNA, 15 bp, Homo sapiens
ttttaattgctcgag

SEQ ID NO: 962323 - DNA, 15 bp, Homo sapiens
tttaattgctcgagc

SEQ ID NO: 962324 - DNA, 15 bp, Homo sapiens
ttaattgctcgagct

SEQ ID NO: 962325 - DNA, 15 bp, Homo sapiens
taattgctcgagctc

SEQ ID NO: 962326 - DNA, 15 bp, Homo sapiens
aattgctcgagctca

SEQ ID NO: 962327 - DNA, 15 bp, Homo sapiens
attgctcgagctcac

SEQ ID NO: 962328 - DNA, 15 bp, Homo sapiens
ttgctcgagctcacc

SEQ ID NO: 962329 - DNA, 15 bp, Homo sapiens
tgctcgagctcacct

SEQ ID NO: 962330 - DNA, 15 bp, Homo sapiens
gctcgagctcacctc

SEQ ID NO: 962331 - DNA, 15 bp, Homo sapiens
ctcgagctcacctct

SEQ ID NO: 962332 - DNA, 15 bp, Homo sapiens
tcgagctcacctctc

SEQ ID NO: 962333 - DNA, 15 bp, Homo sapiens
cgagctcacctctca

SEQ ID NO: 962334 - DNA, 15 bp, Homo sapiens
gagctcacctctcaa

SEQ ID NO: 962335 - DNA, 15 bp, Homo sapiens
agctcacctctcaaa

SEQ ID NO: 962336 - DNA, 15 bp, Homo sapiens
gctcacctctcaaat

SEQ ID NO: 962337 - DNA, 15 bp, Homo sapiens
ctcacctctcaaatt

SEQ ID NO: 962338 - DNA, 15 bp, Homo sapiens
tcacctctcaaattc

SEQ ID NO: 962339 - DNA, 15 bp, Homo sapiens
cacctctcaaattct

SEQ ID NO: 962340 - DNA, 15 bp, Homo sapiens
acctctcaaattctc

SEQ ID NO: 962341 - DNA, 15 bp, Homo sapiens
cctctcaaattctct

SEQ ID NO: 962342 - DNA, 15 bp, Homo sapiens
ctctcaaattctctt

SEQ ID NO: 962343 - DNA, 15 bp, Homo sapiens
tctcaaattctcttg

SEQ ID NO: 962344 - DNA, 15 bp, Homo sapiens
ctcaaattctcttgt

SEQ ID NO: 962345 - DNA, 15 bp, Homo sapiens
tcaaattctcttgtc

SEQ ID NO: 962346 - DNA, 15 bp, Homo sapiens
caaattctcttgtct

SEQ ID NO: 962347 - DNA, 15 bp, Homo sapiens
aaattctcttgtctt

SEQ ID NO: 962348 - DNA, 15 bp, Homo sapiens
aattctcttgtcttt

SEQ ID NO: 962349 - DNA, 15 bp, Homo sapiens
attctcttgtctttg

SEQ ID NO: 962350 - DNA, 15 bp, Homo sapiens
tctcttgtctttgtg

SEQ ID NO: 962351 - DNA, 15 bp, Homo sapiens
ctcttgtctttgtgc

SEQ ID NO: 962352 - DNA, 15 bp, Homo sapiens
tcttgtctttgtgca

SEQ ID NO: 962353 - DNA, 15 bp, Homo sapiens
cttgtctttgtgcat

SEQ ID NO: 962354 - DNA, 15 bp, Homo sapiens
ttgtctttgtgcatt

SEQ ID NO: 962355 - DNA, 15 bp, Homo sapiens
tgtctttgtgcattc

SEQ ID NO: 962356 - DNA, 15 bp, Homo sapiens
gtctttgtgcattct

SEQ ID NO: 962357 - DNA, 15 bp, Homo sapiens
tctttgtgcattctt

SEQ ID NO: 962358 - DNA, 15 bp, Homo sapiens
ctttgtgcattcttg

SEQ ID NO: 962359 - DNA, 15 bp, Homo sapiens
tttgtgcattcttgg

SEQ ID NO: 962360 - DNA, 15 bp, Homo sapiens
ttgtgcattcttggg

SEQ ID NO: 962361 - DNA, 15 bp, Homo sapiens
tgtgcattcttgggc

SEQ ID NO: 962362 - DNA, 15 bp, Homo sapiens
gtgcattcttgggct

SEQ ID NO: 962363 - DNA, 15 bp, Homo sapiens
tgcattcttgggctc

SEQ ID NO: 962364 - DNA, 15 bp, Homo sapiens
gcattcttgggctcc

SEQ ID NO: 962365 - DNA, 15 bp, Homo sapiens
cattcttgggctcct

SEQ ID NO: 962366 - DNA, 15 bp, Homo sapiens
attcttgggctcctt

SEQ ID NO: 962367 - DNA, 15 bp, Homo sapiens
ttcttgggctccttt

SEQ ID NO: 962368 - DNA, 15 bp, Homo sapiens
tcttgggctccttta

SEQ ID NO: 962369 - DNA, 15 bp, Homo sapiens
cttgggctcctttac

SEQ ID NO: 962370 - DNA, 15 bp, Homo sapiens
ttgggctcctttact

SEQ ID NO: 962371 - DNA, 15 bp, Homo sapiens
tgggctcctttacta

SEQ ID NO: 962372 - DNA, 15 bp, Homo sapiens
gggctcctttactaa

SEQ ID NO: 962373 - DNA, 15 bp, Homo sapiens
ggctcctttactaat

SEQ ID NO: 962374 - DNA, 15 bp, Homo sapiens
gctcctttactaatc

SEQ ID NO: 962375 - DNA, 15 bp, Homo sapiens
ctcctttactaatca

SEQ ID NO: 962376 - DNA, 15 bp, Homo sapiens
tcctttactaatcac

SEQ ID NO: 962377 - DNA, 15 bp, Homo sapiens
cctttactaatcact

SEQ ID NO: 962378 - DNA, 15 bp, Homo sapiens
ctttactaatcacta

SEQ ID NO: 962379 - DNA, 15 bp, Homo sapiens
tttactaatcactat

SEQ ID NO: 962380 - DNA, 15 bp, Homo sapiens
ttactaatcactatt

SEQ ID NO: 962381 - DNA, 15 bp, Homo sapiens
tactaatcactatta

SEQ ID NO: 962382 - DNA, 15 bp, Homo sapiens
actaatcactattaa

SEQ ID NO: 962383 - DNA, 15 bp, Homo sapiens
ctaatcactattaag

SEQ ID NO: 962384 - DNA, 15 bp, Homo sapiens
taatcactattaaga

SEQ ID NO: 962385 - DNA, 15 bp, Homo sapiens
aatcactattaagaa

SEQ ID NO: 962386 - DNA, 15 bp, Homo sapiens
atcactattaagaaa

SEQ ID NO: 962387 - DNA, 15 bp, Homo sapiens
tcactattaagaaat

SEQ ID NO: 962388 - DNA, 15 bp, Homo sapiens
cactattaagaaatc

SEQ ID NO: 962389 - DNA, 15 bp, Homo sapiens
actattaagaaatcc

SEQ ID NO: 962390 - DNA, 15 bp, Homo sapiens
ctattaagaaatcct

SEQ ID NO: 962391 - DNA, 15 bp, Homo sapiens
tattaagaaatcctg

SEQ ID NO: 962392 - DNA, 15 bp, Homo sapiens
attaagaaatcctgt

SEQ ID NO: 962393 - DNA, 15 bp, Homo sapiens
ttaagaaatcctgtg

SEQ ID NO: 962394 - DNA, 15 bp, Homo sapiens
taagaaatcctgtgt

SEQ ID NO: 962395 - DNA, 15 bp, Homo sapiens
aagaaatcctgtgtc

SEQ ID NO: 962396 - DNA, 15 bp, Homo sapiens
agaaatcctgtgtca

SEQ ID NO: 962397 - DNA, 15 bp, Homo sapiens
gaaatcctgtgtcaa

SEQ ID NO: 962398 - DNA, 15 bp, Homo sapiens
aaatcctgtgtcaaa

SEQ ID NO: 962399 - DNA, 15 bp, Homo sapiens
aatcctgtgtcaaaa

SEQ ID NO: 962400 - DNA, 15 bp, Homo sapiens
atcctgtgtcaaaac

SEQ ID NO: 962401 - DNA, 15 bp, Homo sapiens
tcctgtgtcaaaaca

SEQ ID NO: 962402 - DNA, 15 bp, Homo sapiens
cctgtgtcaaaacaa

SEQ ID NO: 962403 - DNA, 15 bp, Homo sapiens
ctgtgtcaaaacaaa

SEQ ID NO: 962404 - DNA, 15 bp, Homo sapiens
tgtgtcaaaacaaat

SEQ ID NO: 962405 - DNA, 15 bp, Homo sapiens
gtgtcaaaacaaatg

SEQ ID NO: 962406 - DNA, 15 bp, Homo sapiens
tgtcaaaacaaatgg

SEQ ID NO: 962407 - DNA, 15 bp, Homo sapiens
gtcaaaacaaatggc

SEQ ID NO: 962408 - DNA, 15 bp, Homo sapiens
tcaaaacaaatggca

SEQ ID NO: 962409 - DNA, 15 bp, Homo sapiens
caaaacaaatggcac

SEQ ID NO: 962410 - DNA, 15 bp, Homo sapiens
aaaacaaatggcaca

SEQ ID NO: 962411 - DNA, 15 bp, Homo sapiens
aaacaaatggcacac

SEQ ID NO: 962412 - DNA, 15 bp, Homo sapiens
aacaaatggcacacg

SEQ ID NO: 962413 - DNA, 15 bp, Homo sapiens
acaaatggcacacgt

SEQ ID NO: 962414 - DNA, 15 bp, Homo sapiens
caaatggcacacgtt

SEQ ID NO: 962415 - DNA, 15 bp, Homo sapiens
aaatggcacacgttc

SEQ ID NO: 962416 - DNA, 15 bp, Homo sapiens
aatggcacacgttct

SEQ ID NO: 962417 - DNA, 15 bp, Homo sapiens
atggcacacgttctc

SEQ ID NO: 962418 - DNA, 15 bp, Homo sapiens
tggcacacgttctcg

SEQ ID NO: 962419 - DNA, 15 bp, Homo sapiens
ggcacacgttctcgt

SEQ ID NO: 962420 - DNA, 15 bp, Homo sapiens
gcacacgttctcgtt

SEQ ID NO: 962421 - DNA, 15 bp, Homo sapiens
cacacgttctcgttt

SEQ ID NO: 962422 - DNA, 15 bp, Homo sapiens
acacgttctcgttta

SEQ ID NO: 962423 - DNA, 15 bp, Homo sapiens
cacgttctcgtttat

SEQ ID NO: 962424 - DNA, 15 bp, Homo sapiens
acgttctcgtttata

SEQ ID NO: 962425 - DNA, 15 bp, Homo sapiens
cgttctcgtttataa

SEQ ID NO: 962426 - DNA, 15 bp, Homo sapiens
gttctcgtttataac

SEQ ID NO: 962427 - DNA, 15 bp, Homo sapiens
ttctcgtttataacc

SEQ ID NO: 962428 - DNA, 15 bp, Homo sapiens
tctcgtttataacca

SEQ ID NO: 962429 - DNA, 15 bp, Homo sapiens
ctcgtttataaccaa

SEQ ID NO: 962430 - DNA, 15 bp, Homo sapiens
tcgtttataaccaaa

SEQ ID NO: 962431 - DNA, 15 bp, Homo sapiens
cgtttataaccaaat

SEQ ID NO: 962432 - DNA, 15 bp, Homo sapiens
gtttataaccaaatt

SEQ ID NO: 962433 - DNA, 15 bp, Homo sapiens
tttataaccaaattt

SEQ ID NO: 962434 - DNA, 15 bp, Homo sapiens
ttataaccaaatttt

SEQ ID NO: 962435 - DNA, 15 bp, Homo sapiens
tataaccaaattttt

SEQ ID NO: 962436 - DNA, 15 bp, Homo sapiens
ataaccaaatttttt

SEQ ID NO: 962437 - DNA, 15 bp, Homo sapiens
taaccaaattttttc

SEQ ID NO: 962438 - DNA, 15 bp, Homo sapiens
aaccaaattttttct

SEQ ID NO: 962439 - DNA, 15 bp, Homo sapiens
accaaattttttctt

SEQ ID NO: 962440 - DNA, 15 bp, Homo sapiens
ccaaattttttcttc

SEQ ID NO: 962441 - DNA, 15 bp, Homo sapiens
caaattttttcttct

SEQ ID NO: 962442 - DNA, 15 bp, Homo sapiens
aaattttttcttctt

SEQ ID NO: 962443 - DNA, 15 bp, Homo sapiens
aattttttcttcttg

SEQ ID NO: 962444 - DNA, 15 bp, Homo sapiens
attttttcttcttgt

SEQ ID NO: 962445 - DNA, 15 bp, Homo sapiens
ttttttcttcttgtg

SEQ ID NO: 962446 - DNA, 15 bp, Homo sapiens
tttttcttcttgtga

SEQ ID NO: 962447 - DNA, 15 bp, Homo sapiens
ttttcttcttgtgat

SEQ ID NO: 962448 - DNA, 15 bp, Homo sapiens
tttcttcttgtgatc

SEQ ID NO: 962449 - DNA, 15 bp, Homo sapiens
ttcttcttgtgatcc

SEQ ID NO: 962450 - DNA, 15 bp, Homo sapiens
tcttcttgtgatcca

SEQ ID NO: 962451 - DNA, 15 bp, Homo sapiens
cttcttgtgatccaa

SEQ ID NO: 962452 - DNA, 15 bp, Homo sapiens
ttcttgtgatccaaa

SEQ ID NO: 962453 - DNA, 15 bp, Homo sapiens
tcttgtgatccaaaa

SEQ ID NO: 962454 - DNA, 15 bp, Homo sapiens
cttgtgatccaaaaa

SEQ ID NO: 962455 - DNA, 15 bp, Homo sapiens
ttgtgatccaaaaag

SEQ ID NO: 962456 - DNA, 15 bp, Homo sapiens
tgtgatccaaaaagt

SEQ ID NO: 962457 - DNA, 15 bp, Homo sapiens
gtgatccaaaaagtg

SEQ ID NO: 962458 - DNA, 15 bp, Homo sapiens
tgatccaaaaagtgt

SEQ ID NO: 962459 - DNA, 15 bp, Homo sapiens
gatccaaaaagtgtc

SEQ ID NO: 962460 - DNA, 15 bp, Homo sapiens
atccaaaaagtgtcc

SEQ ID NO: 962461 - DNA, 15 bp, Homo sapiens
tccaaaaagtgtcca

SEQ ID NO: 962462 - DNA, 15 bp, Homo sapiens
ccaaaaagtgtccaa

SEQ ID NO: 962463 - DNA, 15 bp, Homo sapiens
caaaaagtgtccaaa

SEQ ID NO: 962464 - DNA, 15 bp, Homo sapiens
aaaaagtgtccaaaa

SEQ ID NO: 962465 - DNA, 15 bp, Homo sapiens
aaaagtgtccaaaat

SEQ ID NO: 962466 - DNA, 15 bp, Homo sapiens
aaagtgtccaaaatc

SEQ ID NO: 962467 - DNA, 15 bp, Homo sapiens
aagtgtccaaaatct

SEQ ID NO: 962468 - DNA, 15 bp, Homo sapiens
agtgtccaaaatcta

SEQ ID NO: 962469 - DNA, 15 bp, Homo sapiens
gtgtccaaaatctat

SEQ ID NO: 962470 - DNA, 15 bp, Homo sapiens
tgtccaaaatctata

SEQ ID NO: 962471 - DNA, 15 bp, Homo sapiens
gtccaaaatctatat

SEQ ID NO: 962472 - DNA, 15 bp, Homo sapiens
tccaaaatctatatg

SEQ ID NO: 962473 - DNA, 15 bp, Homo sapiens
ccaaaatctatatga

SEQ ID NO: 962474 - DNA, 15 bp, Homo sapiens
caaaatctatatgaa

SEQ ID NO: 962475 - DNA, 15 bp, Homo sapiens
aaaatctatatgaaa

SEQ ID NO: 962476 - DNA, 15 bp, Homo sapiens
aaatctatatgaaac

SEQ ID NO: 962477 - DNA, 15 bp, Homo sapiens
aatctatatgaaaca

SEQ ID NO: 962478 - DNA, 15 bp, Homo sapiens
atctatatgaaacag

SEQ ID NO: 962479 - DNA, 15 bp, Homo sapiens
tctatatgaaacagc

SEQ ID NO: 962480 - DNA, 15 bp, Homo sapiens
ctatatgaaacagct

SEQ ID NO: 962481 - DNA, 15 bp, Homo sapiens
tatatgaaacagctt

SEQ ID NO: 962482 - DNA, 15 bp, Homo sapiens
atatgaaacagcttt

SEQ ID NO: 962483 - DNA, 15 bp, Homo sapiens
tatgaaacagctttc

SEQ ID NO: 962484 - DNA, 15 bp, Homo sapiens
atgaaacagctttca

SEQ ID NO: 962485 - DNA, 15 bp, Homo sapiens
tgaaacagctttcaa

SEQ ID NO: 962486 - DNA, 15 bp, Homo sapiens
gaaacagctttcaaa

SEQ ID NO: 962487 - DNA, 15 bp, Homo sapiens
aaacagctttcaaaa

SEQ ID NO: 962488 - DNA, 15 bp, Homo sapiens
aacagctttcaaaaa

SEQ ID NO: 962489 - DNA, 15 bp, Homo sapiens
acagctttcaaaaat

SEQ ID NO: 962490 - DNA, 15 bp, Homo sapiens
cagctttcaaaaata

SEQ ID NO: 962491 - DNA, 15 bp, Homo sapiens
agctttcaaaaataa

SEQ ID NO: 962492 - DNA, 15 bp, Homo sapiens
gctttcaaaaataag

SEQ ID NO: 962493 - DNA, 15 bp, Homo sapiens
ctttcaaaaataaga

SEQ ID NO: 962494 - DNA, 15 bp, Homo sapiens
tttcaaaaataagaa

SEQ ID NO: 962495 - DNA, 15 bp, Homo sapiens
ttcaaaaataagaaa

SEQ ID NO: 962496 - DNA, 15 bp, Homo sapiens
tcaaaaataagaaat

SEQ ID NO: 962497 - DNA, 15 bp, Homo sapiens
caaaaataagaaatt

SEQ ID NO: 962498 - DNA, 15 bp, Homo sapiens
aaaaataagaaatta

SEQ ID NO: 962499 - DNA, 15 bp, Homo sapiens
aaaataagaaattat

SEQ ID NO: 962500 - DNA, 15 bp, Homo sapiens
aaataagaaattatg

SEQ ID NO: 962501 - DNA, 15 bp, Homo sapiens
aataagaaattatgt

SEQ ID NO: 962502 - DNA, 15 bp, Homo sapiens
ataagaaattatgtt

SEQ ID NO: 962503 - DNA, 15 bp, Homo sapiens
taagaaattatgtta

SEQ ID NO: 962504 - DNA, 15 bp, Homo sapiens
aagaaattatgttat

SEQ ID NO: 962505 - DNA, 15 bp, Homo sapiens
agaaattatgttata

SEQ ID NO: 962506 - DNA, 15 bp, Homo sapiens
gaaattatgttatag

SEQ ID NO: 962507 - DNA, 15 bp, Homo sapiens
aaattatgttatagt

SEQ ID NO: 962508 - DNA, 15 bp, Homo sapiens
aattatgttatagtt

SEQ ID NO: 962509 - DNA, 15 bp, Homo sapiens
attatgttatagttt

SEQ ID NO: 962510 - DNA, 15 bp, Homo sapiens
ttatgttatagtttg

SEQ ID NO: 962511 - DNA, 15 bp, Homo sapiens
tatgttatagtttga

SEQ ID NO: 962512 - DNA, 15 bp, Homo sapiens
atgttatagtttgat

SEQ ID NO: 962513 - DNA, 15 bp, Homo sapiens
tgttatagtttgata

SEQ ID NO: 962514 - DNA, 15 bp, Homo sapiens
gttatagtttgatat

SEQ ID NO: 962515 - DNA, 15 bp, Homo sapiens
ttatagtttgatata

SEQ ID NO: 962516 - DNA, 15 bp, Homo sapiens
tatagtttgatatat

SEQ ID NO: 962517 - DNA, 15 bp, Homo sapiens
atagtttgatatatg

SEQ ID NO: 962518 - DNA, 15 bp, Homo sapiens
tagtttgatatatgc

SEQ ID NO: 962519 - DNA, 15 bp, Homo sapiens
agtttgatatatgca

SEQ ID NO: 962520 - DNA, 15 bp, Homo sapiens
gtttgatatatgcag

SEQ ID NO: 962521 - DNA, 15 bp, Homo sapiens
tttgatatatgcaga

SEQ ID NO: 962522 - DNA, 15 bp, Homo sapiens
ttgatatatgcagat

SEQ ID NO: 962523 - DNA, 15 bp, Homo sapiens
tgatatatgcagata

SEQ ID NO: 962524 - DNA, 15 bp, Homo sapiens
gatatatgcagatac

SEQ ID NO: 962525 - DNA, 15 bp, Homo sapiens
atatatgcagataca

SEQ ID NO: 962526 - DNA, 15 bp, Homo sapiens
tatatgcagatacaa

SEQ ID NO: 962527 - DNA, 15 bp, Homo sapiens
atatgcagatacaaa

SEQ ID NO: 962528 - DNA, 15 bp, Homo sapiens
tatgcagatacaaaa

SEQ ID NO: 962529 - DNA, 15 bp, Homo sapiens
atgcagatacaaaat

SEQ ID NO: 962530 - DNA, 15 bp, Homo sapiens
tgcagatacaaaatg

SEQ ID NO: 962531 - DNA, 15 bp, Homo sapiens
gcagatacaaaatgt

SEQ ID NO: 962532 - DNA, 15 bp, Homo sapiens
cagatacaaaatgtc

SEQ ID NO: 962533 - DNA, 15 bp, Homo sapiens
agatacaaaatgtct

SEQ ID NO: 962534 - DNA, 15 bp, Homo sapiens
gatacaaaatgtctt

SEQ ID NO: 962535 - DNA, 15 bp, Homo sapiens
atacaaaatgtcttg

SEQ ID NO: 962536 - DNA, 15 bp, Homo sapiens
tacaaaatgtcttga

SEQ ID NO: 962537 - DNA, 15 bp, Homo sapiens
acaaaatgtcttgaa

SEQ ID NO: 962538 - DNA, 15 bp, Homo sapiens
caaaatgtcttgaat

SEQ ID NO: 962539 - DNA, 15 bp, Homo sapiens
aaaatgtcttgaata

SEQ ID NO: 962540 - DNA, 15 bp, Homo sapiens
aaatgtcttgaataa

SEQ ID NO: 962541 - DNA, 15 bp, Homo sapiens
aatgtcttgaataaa

SEQ ID NO: 962542 - DNA, 15 bp, Homo sapiens
atgtcttgaataaat

SEQ ID NO: 962543 - DNA, 15 bp, Homo sapiens
tgtcttgaataaatt

SEQ ID NO: 962544 - DNA, 15 bp, Homo sapiens
gtcttgaataaatta

SEQ ID NO: 962545 - DNA, 15 bp, Homo sapiens
tcttgaataaattaa

SEQ ID NO: 962546 - DNA, 15 bp, Homo sapiens
cttgaataaattaag

SEQ ID NO: 962547 - DNA, 15 bp, Homo sapiens
ttgaataaattaaga

SEQ ID NO: 962548 - DNA, 15 bp, Homo sapiens
tgaataaattaagaa

SEQ ID NO: 962549 - DNA, 15 bp, Homo sapiens
gaataaattaagaac

SEQ ID NO: 962550 - DNA, 15 bp, Homo sapiens
aataaattaagaaca

SEQ ID NO: 962551 - DNA, 15 bp, Homo sapiens
ataaattaagaacac

SEQ ID NO: 962552 - DNA, 15 bp, Homo sapiens
taaattaagaacacc

SEQ ID NO: 962553 - DNA, 15 bp, Homo sapiens
aaattaagaacacca

SEQ ID NO: 962554 - DNA, 15 bp, Homo sapiens
aattaagaacaccaa

SEQ ID NO: 962555 - DNA, 15 bp, Homo sapiens
attaagaacaccaaa

SEQ ID NO: 962556 - DNA, 15 bp, Homo sapiens
ttaagaacaccaaaa

SEQ ID NO: 962557 - DNA, 15 bp, Homo sapiens
taagaacaccaaaac

SEQ ID NO: 962558 - DNA, 15 bp, Homo sapiens
aagaacaccaaaaca

SEQ ID NO: 962559 - DNA, 15 bp, Homo sapiens
agaacaccaaaacat

SEQ ID NO: 962560 - DNA, 15 bp, Homo sapiens
gaacaccaaaacatt

SEQ ID NO: 962561 - DNA, 15 bp, Homo sapiens
aacaccaaaacattt

SEQ ID NO: 962562 - DNA, 15 bp, Homo sapiens
acaccaaaacatttt

SEQ ID NO: 962563 - DNA, 15 bp, Homo sapiens
caccaaaacatttta

SEQ ID NO: 962564 - DNA, 15 bp, Homo sapiens
accaaaacattttaa

SEQ ID NO: 962565 - DNA, 15 bp, Homo sapiens
ccaaaacattttaaa

SEQ ID NO: 962566 - DNA, 15 bp, Homo sapiens
caaaacattttaaac

SEQ ID NO: 962567 - DNA, 15 bp, Homo sapiens
aaaacattttaaaca

SEQ ID NO: 962568 - DNA, 15 bp, Homo sapiens
aaacattttaaacag

SEQ ID NO: 962569 - DNA, 15 bp, Homo sapiens
aacattttaaacaga

SEQ ID NO: 962570 - DNA, 15 bp, Homo sapiens
acattttaaacagag

SEQ ID NO: 962571 - DNA, 15 bp, Homo sapiens
cattttaaacagaga

SEQ ID NO: 962572 - DNA, 15 bp, Homo sapiens
attttaaacagagaa

SEQ ID NO: 962573 - DNA, 15 bp, Homo sapiens
ttttaaacagagaaa

SEQ ID NO: 962574 - DNA, 15 bp, Homo sapiens
tttaaacagagaaaa

SEQ ID NO: 962575 - DNA, 15 bp, Homo sapiens
ttaaacagagaaaac

SEQ ID NO: 962576 - DNA, 15 bp, Homo sapiens
taaacagagaaaacc

SEQ ID NO: 962577 - DNA, 15 bp, Homo sapiens
aaacagagaaaacca

SEQ ID NO: 962578 - DNA, 15 bp, Homo sapiens
aacagagaaaaccat

SEQ ID NO: 962579 - DNA, 15 bp, Homo sapiens
acagagaaaaccatt

SEQ ID NO: 962580 - DNA, 15 bp, Homo sapiens
cagagaaaaccatta

SEQ ID NO: 962581 - DNA, 15 bp, Homo sapiens
agagaaaaccattac

SEQ ID NO: 962582 - DNA, 15 bp, Homo sapiens
gagaaaaccattact

SEQ ID NO: 962583 - DNA, 15 bp, Homo sapiens
agaaaaccattactt

SEQ ID NO: 962584 - DNA, 15 bp, Homo sapiens
gaaaaccattacttg

SEQ ID NO: 962585 - DNA, 15 bp, Homo sapiens
aaaaccattacttgt

SEQ ID NO: 962586 - DNA, 15 bp, Homo sapiens
aaaccattacttgtc

SEQ ID NO: 962587 - DNA, 15 bp, Homo sapiens
aaccattacttgtcc

SEQ ID NO: 962588 - DNA, 15 bp, Homo sapiens
accattacttgtcca

SEQ ID NO: 962589 - DNA, 15 bp, Homo sapiens
ccattacttgtccat

SEQ ID NO: 962590 - DNA, 15 bp, Homo sapiens
cattacttgtccatc

SEQ ID NO: 962591 - DNA, 15 bp, Homo sapiens
attacttgtccatcg

SEQ ID NO: 962592 - DNA, 15 bp, Homo sapiens
ttacttgtccatcgt

SEQ ID NO: 962593 - DNA, 15 bp, Homo sapiens
tacttgtccatcgtc

SEQ ID NO: 962594 - DNA, 15 bp, Homo sapiens
acttgtccatcgtct

SEQ ID NO: 962595 - DNA, 15 bp, Homo sapiens
cttgtccatcgtctt

SEQ ID NO: 962596 - DNA, 15 bp, Homo sapiens
ttgtccatcgtcttt

SEQ ID NO: 962597 - DNA, 15 bp, Homo sapiens
tgtccatcgtctttc

SEQ ID NO: 962598 - DNA, 15 bp, Homo sapiens
gtccatcgtctttca

SEQ ID NO: 962599 - DNA, 15 bp, Homo sapiens
tccatcgtctttcac

SEQ ID NO: 962600 - DNA, 15 bp, Homo sapiens
ccatcgtctttcacc

SEQ ID NO: 962601 - DNA, 15 bp, Homo sapiens
catcgtctttcacca

SEQ ID NO: 962602 - DNA, 15 bp, Homo sapiens
atcgtctttcaccat

SEQ ID NO: 962603 - DNA, 15 bp, Homo sapiens
tcgtctttcaccatg

SEQ ID NO: 962604 - DNA, 15 bp, Homo sapiens
cgtctttcaccatga

SEQ ID NO: 962605 - DNA, 15 bp, Homo sapiens
gtctttcaccatgat

SEQ ID NO: 962606 - DNA, 15 bp, Homo sapiens
tctttcaccatgatg

SEQ ID NO: 962607 - DNA, 15 bp, Homo sapiens
ctttcaccatgatgt

SEQ ID NO: 962608 - DNA, 15 bp, Homo sapiens
tttcaccatgatgtt

SEQ ID NO: 962609 - DNA, 15 bp, Homo sapiens
ttcaccatgatgtta

SEQ ID NO: 962610 - DNA, 15 bp, Homo sapiens
tcaccatgatgttac

SEQ ID NO: 962611 - DNA, 15 bp, Homo sapiens
caccatgatgttact

SEQ ID NO: 962612 - DNA, 15 bp, Homo sapiens
accatgatgttacta

SEQ ID NO: 962613 - DNA, 15 bp, Homo sapiens
ccatgatgttactat

SEQ ID NO: 962614 - DNA, 15 bp, Homo sapiens
catgatgttactatt

SEQ ID NO: 962615 - DNA, 15 bp, Homo sapiens
atgatgttactattg

SEQ ID NO: 962616 - DNA, 15 bp, Homo sapiens
tgatgttactattgt

SEQ ID NO: 962617 - DNA, 15 bp, Homo sapiens
gatgttactattgtg

SEQ ID NO: 962618 - DNA, 15 bp, Homo sapiens
atgttactattgtga

SEQ ID NO: 962619 - DNA, 15 bp, Homo sapiens
tgttactattgtgac

SEQ ID NO: 962620 - DNA, 15 bp, Homo sapiens
gttactattgtgacg

SEQ ID NO: 962621 - DNA, 15 bp, Homo sapiens
ttactattgtgacga

SEQ ID NO: 962622 - DNA, 15 bp, Homo sapiens
tactattgtgacgat

SEQ ID NO: 962623 - DNA, 15 bp, Homo sapiens
actattgtgacgatc

SEQ ID NO: 962624 - DNA, 15 bp, Homo sapiens
ctattgtgacgatct

SEQ ID NO: 962625 - DNA, 15 bp, Homo sapiens
tattgtgacgatctc

SEQ ID NO: 962626 - DNA, 15 bp, Homo sapiens
attgtgacgatctcc

SEQ ID NO: 962627 - DNA, 15 bp, Homo sapiens
ttgtgacgatctcca

SEQ ID NO: 962628 - DNA, 15 bp, Homo sapiens
tgtgacgatctccaa

SEQ ID NO: 962629 - DNA, 15 bp, Homo sapiens
gtgacgatctccaat

SEQ ID NO: 962630 - DNA, 15 bp, Homo sapiens
tgacgatctccaatt

SEQ ID NO: 962631 - DNA, 15 bp, Homo sapiens
gacgatctccaattc

SEQ ID NO: 962632 - DNA, 15 bp, Homo sapiens
acgatctccaattcc

SEQ ID NO: 962633 - DNA, 15 bp, Homo sapiens
cgatctccaattccc

SEQ ID NO: 962634 - DNA, 15 bp, Homo sapiens
gatctccaattccca

SEQ ID NO: 962635 - DNA, 15 bp, Homo sapiens
atctccaattcccaa

SEQ ID NO: 962636 - DNA, 15 bp, Homo sapiens
tctccaattcccaaa

SEQ ID NO: 962637 - DNA, 15 bp, Homo sapiens
ctccaattcccaaaa

SEQ ID NO: 962638 - DNA, 15 bp, Homo sapiens
tccaattcccaaaat

SEQ ID NO: 962639 - DNA, 15 bp, Homo sapiens
ccaattcccaaaatg

SEQ ID NO: 962640 - DNA, 15 bp, Homo sapiens
caattcccaaaatga

SEQ ID NO: 962641 - DNA, 15 bp, Homo sapiens
aattcccaaaatgaa

SEQ ID NO: 962642 - DNA, 15 bp, Homo sapiens
attcccaaaatgaag

SEQ ID NO: 962643 - DNA, 15 bp, Homo sapiens
ttcccaaaatgaagg

SEQ ID NO: 962644 - DNA, 15 bp, Homo sapiens
tcccaaaatgaaggt

SEQ ID NO: 962645 - DNA, 15 bp, Homo sapiens
cccaaaatgaaggta

SEQ ID NO: 962646 - DNA, 15 bp, Homo sapiens
ccaaaatgaaggtag

SEQ ID NO: 962647 - DNA, 15 bp, Homo sapiens
caaaatgaaggtagc

SEQ ID NO: 962648 - DNA, 15 bp, Homo sapiens
aaaatgaaggtagct

SEQ ID NO: 962649 - DNA, 15 bp, Homo sapiens
aaatgaaggtagcta

SEQ ID NO: 962650 - DNA, 15 bp, Homo sapiens
aatgaaggtagctac

SEQ ID NO: 962651 - DNA, 15 bp, Homo sapiens
atgaaggtagctaca

SEQ ID NO: 962652 - DNA, 15 bp, Homo sapiens
tgaaggtagctacac

SEQ ID NO: 962653 - DNA, 15 bp, Homo sapiens
gaaggtagctacaca

SEQ ID NO: 962654 - DNA, 15 bp, Homo sapiens
aaggtagctacacag

SEQ ID NO: 962655 - DNA, 15 bp, Homo sapiens
aggtagctacacagt

SEQ ID NO: 962656 - DNA, 15 bp, Homo sapiens
ggtagctacacagta

SEQ ID NO: 962657 - DNA, 15 bp, Homo sapiens
gtagctacacagtat

SEQ ID NO: 962658 - DNA, 15 bp, Homo sapiens
tagctacacagtatc

SEQ ID NO: 962659 - DNA, 15 bp, Homo sapiens
agctacacagtatcc

SEQ ID NO: 962660 - DNA, 15 bp, Homo sapiens
gctacacagtatcca

SEQ ID NO: 962661 - DNA, 15 bp, Homo sapiens
ctacacagtatccag

SEQ ID NO: 962662 - DNA, 15 bp, Homo sapiens
tacacagtatccagc

SEQ ID NO: 962663 - DNA, 15 bp, Homo sapiens
acacagtatccagca

SEQ ID NO: 962664 - DNA, 15 bp, Homo sapiens
cacagtatccagcac

SEQ ID NO: 962665 - DNA, 15 bp, Homo sapiens
acagtatccagcaca

SEQ ID NO: 962666 - DNA, 15 bp, Homo sapiens
cagtatccagcacat

SEQ ID NO: 962667 - DNA, 15 bp, Homo sapiens
agtatccagcacatg

SEQ ID NO: 962668 - DNA, 15 bp, Homo sapiens
gtatccagcacatga

SEQ ID NO: 962669 - DNA, 15 bp, Homo sapiens
tatccagcacatgaa

SEQ ID NO: 962670 - DNA, 15 bp, Homo sapiens
atccagcacatgaac

SEQ ID NO: 962671 - DNA, 15 bp, Homo sapiens
tccagcacatgaacg

SEQ ID NO: 962672 - DNA, 15 bp, Homo sapiens
ccagcacatgaacgt

SEQ ID NO: 962673 - DNA, 15 bp, Homo sapiens
cagcacatgaacgtg

SEQ ID NO: 962674 - DNA, 15 bp, Homo sapiens
agcacatgaacgtgt

SEQ ID NO: 962675 - DNA, 15 bp, Homo sapiens
gcacatgaacgtgta

SEQ ID NO: 962676 - DNA, 15 bp, Homo sapiens
cacatgaacgtgtaa

SEQ ID NO: 962677 - DNA, 15 bp, Homo sapiens
acatgaacgtgtaaa

SEQ ID NO: 962678 - DNA, 15 bp, Homo sapiens
catgaacgtgtaaac

SEQ ID NO: 962679 - DNA, 15 bp, Homo sapiens
atgaacgtgtaaaca

SEQ ID NO: 962680 - DNA, 15 bp, Homo sapiens
tgaacgtgtaaacag

SEQ ID NO: 962681 - DNA, 15 bp, Homo sapiens
gaacgtgtaaacagg

SEQ ID NO: 962682 - DNA, 15 bp, Homo sapiens
aacgtgtaaacaggt

SEQ ID NO: 962683 - DNA, 15 bp, Homo sapiens
acgtgtaaacaggtc

SEQ ID NO: 962684 - DNA, 15 bp, Homo sapiens
cgtgtaaacaggtca

SEQ ID NO: 962685 - DNA, 15 bp, Homo sapiens
gtgtaaacaggtcaa

SEQ ID NO: 962686 - DNA, 15 bp, Homo sapiens
tgtaaacaggtcaat

SEQ ID NO: 962687 - DNA, 15 bp, Homo sapiens
gtaaacaggtcaatg

SEQ ID NO: 962688 - DNA, 15 bp, Homo sapiens
taaacaggtcaatgg

SEQ ID NO: 962689 - DNA, 15 bp, Homo sapiens
aaacaggtcaatggc

SEQ ID NO: 962690 - DNA, 15 bp, Homo sapiens
aacaggtcaatggct

SEQ ID NO: 962691 - DNA, 15 bp, Homo sapiens
acaggtcaatggctg

SEQ ID NO: 962692 - DNA, 15 bp, Homo sapiens
caggtcaatggctgc

SEQ ID NO: 962693 - DNA, 15 bp, Homo sapiens
aggtcaatggctgca

SEQ ID NO: 962694 - DNA, 15 bp, Homo sapiens
ggtcaatggctgcat

SEQ ID NO: 962695 - DNA, 15 bp, Homo sapiens
gtcaatggctgcatc

SEQ ID NO: 962696 - DNA, 15 bp, Homo sapiens
tcaatggctgcatca

SEQ ID NO: 962697 - DNA, 15 bp, Homo sapiens
caatggctgcatcat

SEQ ID NO: 962698 - DNA, 15 bp, Homo sapiens
aatggctgcatcata

SEQ ID NO: 962699 - DNA, 15 bp, Homo sapiens
atggctgcatcatat

SEQ ID NO: 962700 - DNA, 15 bp, Homo sapiens
tggctgcatcatatc

SEQ ID NO: 962701 - DNA, 15 bp, Homo sapiens
ggctgcatcatatct

SEQ ID NO: 962702 - DNA, 15 bp, Homo sapiens
gctgcatcatatcta

SEQ ID NO: 962703 - DNA, 15 bp, Homo sapiens
ctgcatcatatctac

SEQ ID NO: 962704 - DNA, 15 bp, Homo sapiens
tgcatcatatctaca

SEQ ID NO: 962705 - DNA, 15 bp, Homo sapiens
gcatcatatctacaa

SEQ ID NO: 962706 - DNA, 15 bp, Homo sapiens
catcatatctacaaa

SEQ ID NO: 962707 - DNA, 15 bp, Homo sapiens
atcatatctacaaag

SEQ ID NO: 962708 - DNA, 15 bp, Homo sapiens
tcatatctacaaaga

SEQ ID NO: 962709 - DNA, 15 bp, Homo sapiens
catatctacaaagaa

SEQ ID NO: 962710 - DNA, 15 bp, Homo sapiens
atatctacaaagaat

SEQ ID NO: 962711 - DNA, 15 bp, Homo sapiens
tatctacaaagaata

SEQ ID NO: 962712 - DNA, 15 bp, Homo sapiens
atctacaaagaataa

SEQ ID NO: 962713 - DNA, 15 bp, Homo sapiens
tctacaaagaataaa

SEQ ID NO: 962714 - DNA, 15 bp, Homo sapiens
ctacaaagaataaac

SEQ ID NO: 962715 - DNA, 15 bp, Homo sapiens
tacaaagaataaaca

SEQ ID NO: 962716 - DNA, 15 bp, Homo sapiens
acaaagaataaacac

SEQ ID NO: 962717 - DNA, 15 bp, Homo sapiens
caaagaataaacacc

SEQ ID NO: 962718 - DNA, 15 bp, Homo sapiens
aaagaataaacacct

SEQ ID NO: 962719 - DNA, 15 bp, Homo sapiens
aagaataaacacctc

SEQ ID NO: 962720 - DNA, 15 bp, Homo sapiens
agaataaacacctca

SEQ ID NO: 962721 - DNA, 15 bp, Homo sapiens
gaataaacacctcat

SEQ ID NO: 962722 - DNA, 15 bp, Homo sapiens
aataaacacctcatg

SEQ ID NO: 962723 - DNA, 15 bp, Homo sapiens
ataaacacctcatga

SEQ ID NO: 962724 - DNA, 15 bp, Homo sapiens
taaacacctcatgag

SEQ ID NO: 962725 - DNA, 15 bp, Homo sapiens
aaacacctcatgagt

SEQ ID NO: 962726 - DNA, 15 bp, Homo sapiens
aacacctcatgagta

SEQ ID NO: 962727 - DNA, 15 bp, Homo sapiens
acacctcatgagtag

SEQ ID NO: 962728 - DNA, 15 bp, Homo sapiens
cacctcatgagtagt

SEQ ID NO: 962729 - DNA, 15 bp, Homo sapiens
acctcatgagtagta

SEQ ID NO: 962730 - DNA, 15 bp, Homo sapiens
cctcatgagtagtat

SEQ ID NO: 962731 - DNA, 15 bp, Homo sapiens
ctcatgagtagtatg

SEQ ID NO: 962732 - DNA, 15 bp, Homo sapiens
tcatgagtagtatgg

SEQ ID NO: 962733 - DNA, 15 bp, Homo sapiens
catgagtagtatgga

SEQ ID NO: 962734 - DNA, 15 bp, Homo sapiens
atgagtagtatggaa

SEQ ID NO: 962735 - DNA, 15 bp, Homo sapiens
tgagtagtatggaaa

SEQ ID NO: 962736 - DNA, 15 bp, Homo sapiens
gagtagtatggaaat

SEQ ID NO: 962737 - DNA, 15 bp, Homo sapiens
agtagtatggaaata

SEQ ID NO: 962738 - DNA, 15 bp, Homo sapiens
gtagtatggaaatat

SEQ ID NO: 962739 - DNA, 15 bp, Homo sapiens
tagtatggaaatata

SEQ ID NO: 962740 - DNA, 15 bp, Homo sapiens
agtatggaaatatag

SEQ ID NO: 962741 - DNA, 15 bp, Homo sapiens
gtatggaaatatagt

SEQ ID NO: 962742 - DNA, 15 bp, Homo sapiens
tatggaaatatagtg

SEQ ID NO: 962743 - DNA, 15 bp, Homo sapiens
atggaaatatagtga

SEQ ID NO: 962744 - DNA, 15 bp, Homo sapiens
tggaaatatagtgat

SEQ ID NO: 962745 - DNA, 15 bp, Homo sapiens
ggaaatatagtgatt

SEQ ID NO: 962746 - DNA, 15 bp, Homo sapiens
gaaatatagtgattc

SEQ ID NO: 962747 - DNA, 15 bp, Homo sapiens
aaatatagtgattca

SEQ ID NO: 962748 - DNA, 15 bp, Homo sapiens
aatatagtgattcag

SEQ ID NO: 962749 - DNA, 15 bp, Homo sapiens
atatagtgattcagg

SEQ ID NO: 962750 - DNA, 15 bp, Homo sapiens
tatagtgattcaggc

SEQ ID NO: 962751 - DNA, 15 bp, Homo sapiens
atagtgattcaggcc

SEQ ID NO: 962752 - DNA, 15 bp, Homo sapiens
tagtgattcaggcca

SEQ ID NO: 962753 - DNA, 15 bp, Homo sapiens
agtgattcaggccaa

SEQ ID NO: 962754 - DNA, 15 bp, Homo sapiens
gtgattcaggccaac

SEQ ID NO: 962755 - DNA, 15 bp, Homo sapiens
tgattcaggccaact

SEQ ID NO: 962756 - DNA, 15 bp, Homo sapiens
gattcaggccaactt

SEQ ID NO: 962757 - DNA, 15 bp, Homo sapiens
attcaggccaacttg

SEQ ID NO: 962758 - DNA, 15 bp, Homo sapiens
ttcaggccaacttga

SEQ ID NO: 962759 - DNA, 15 bp, Homo sapiens
tcaggccaacttgag

SEQ ID NO: 962760 - DNA, 15 bp, Homo sapiens
caggccaacttgaga

SEQ ID NO: 962761 - DNA, 15 bp, Homo sapiens
aggccaacttgagaa

SEQ ID NO: 962762 - DNA, 15 bp, Homo sapiens
ggccaacttgagaaa

SEQ ID NO: 962763 - DNA, 15 bp, Homo sapiens
gccaacttgagaaaa

SEQ ID NO: 962764 - DNA, 15 bp, Homo sapiens
ccaacttgagaaaag

SEQ ID NO: 962765 - DNA, 15 bp, Homo sapiens
caacttgagaaaaga

SEQ ID NO: 962766 - DNA, 15 bp, Homo sapiens
aacttgagaaaagaa

SEQ ID NO: 962767 - DNA, 15 bp, Homo sapiens
acttgagaaaagaaa

SEQ ID NO: 962768 - DNA, 15 bp, Homo sapiens
cttgagaaaagaaaa

SEQ ID NO: 962769 - DNA, 15 bp, Homo sapiens
ttgagaaaagaaaac

SEQ ID NO: 962770 - DNA, 15 bp, Homo sapiens
tgagaaaagaaaaca

SEQ ID NO: 962771 - DNA, 15 bp, Homo sapiens
gagaaaagaaaacag

SEQ ID NO: 962772 - DNA, 15 bp, Homo sapiens
agaaaagaaaacagg

SEQ ID NO: 962773 - DNA, 15 bp, Homo sapiens
gaaaagaaaacaggg

SEQ ID NO: 962774 - DNA, 15 bp, Homo sapiens
aaaagaaaacagggt

SEQ ID NO: 962775 - DNA, 15 bp, Homo sapiens
aaagaaaacagggtg

SEQ ID NO: 962776 - DNA, 15 bp, Homo sapiens
aagaaaacagggtgc

SEQ ID NO: 962777 - DNA, 15 bp, Homo sapiens
agaaaacagggtgca

SEQ ID NO: 962778 - DNA, 15 bp, Homo sapiens
gaaaacagggtgcaa

SEQ ID NO: 962779 - DNA, 15 bp, Homo sapiens
aaaacagggtgcaag

SEQ ID NO: 962780 - DNA, 15 bp, Homo sapiens
aaacagggtgcaagt

SEQ ID NO: 962781 - DNA, 15 bp, Homo sapiens
aacagggtgcaagtt

SEQ ID NO: 962782 - DNA, 15 bp, Homo sapiens
acagggtgcaagttt

SEQ ID NO: 962783 - DNA, 15 bp, Homo sapiens
cagggtgcaagtttc

SEQ ID NO: 962784 - DNA, 15 bp, Homo sapiens
agggtgcaagtttcc

SEQ ID NO: 962785 - DNA, 15 bp, Homo sapiens
gggtgcaagtttcca

SEQ ID NO: 962786 - DNA, 15 bp, Homo sapiens
ggtgcaagtttccat

SEQ ID NO: 962787 - DNA, 15 bp, Homo sapiens
gtgcaagtttccatt

SEQ ID NO: 962788 - DNA, 15 bp, Homo sapiens
tgcaagtttccattt

SEQ ID NO: 962789 - DNA, 15 bp, Homo sapiens
gcaagtttccattta

SEQ ID NO: 962790 - DNA, 15 bp, Homo sapiens
caagtttccatttaa

SEQ ID NO: 962791 - DNA, 15 bp, Homo sapiens
aagtttccatttaaa

SEQ ID NO: 962792 - DNA, 15 bp, Homo sapiens
agtttccatttaaac

SEQ ID NO: 962793 - DNA, 15 bp, Homo sapiens
gtttccatttaaaca

SEQ ID NO: 962794 - DNA, 15 bp, Homo sapiens
tttccatttaaacaa

SEQ ID NO: 962795 - DNA, 15 bp, Homo sapiens
ttccatttaaacaat

SEQ ID NO: 962796 - DNA, 15 bp, Homo sapiens
tccatttaaacaatg

SEQ ID NO: 962797 - DNA, 15 bp, Homo sapiens
ccatttaaacaatga

SEQ ID NO: 962798 - DNA, 15 bp, Homo sapiens
catttaaacaatgaa

SEQ ID NO: 962799 - DNA, 15 bp, Homo sapiens
atttaaacaatgaaa

SEQ ID NO: 962800 - DNA, 15 bp, Homo sapiens
tttaaacaatgaaaa

SEQ ID NO: 962801 - DNA, 15 bp, Homo sapiens
ttaaacaatgaaaac

SEQ ID NO: 962802 - DNA, 15 bp, Homo sapiens
taaacaatgaaaaca

SEQ ID NO: 962803 - DNA, 15 bp, Homo sapiens
aaacaatgaaaacaa

SEQ ID NO: 962804 - DNA, 15 bp, Homo sapiens
aacaatgaaaacaat

SEQ ID NO: 962805 - DNA, 15 bp, Homo sapiens
acaatgaaaacaatc

SEQ ID NO: 962806 - DNA, 15 bp, Homo sapiens
caatgaaaacaatca

SEQ ID NO: 962807 - DNA, 15 bp, Homo sapiens
aatgaaaacaatcac

SEQ ID NO: 962808 - DNA, 15 bp, Homo sapiens
atgaaaacaatcact

SEQ ID NO: 962809 - DNA, 15 bp, Homo sapiens
tgaaaacaatcactg

SEQ ID NO: 962810 - DNA, 15 bp, Homo sapiens
gaaaacaatcactga

SEQ ID NO: 962811 - DNA, 15 bp, Homo sapiens
aaaacaatcactgac

SEQ ID NO: 962812 - DNA, 15 bp, Homo sapiens
aaacaatcactgaca

SEQ ID NO: 962813 - DNA, 15 bp, Homo sapiens
aacaatcactgacaa

SEQ ID NO: 962814 - DNA, 15 bp, Homo sapiens
acaatcactgacaac

SEQ ID NO: 962815 - DNA, 15 bp, Homo sapiens
caatcactgacaacg

SEQ ID NO: 962816 - DNA, 15 bp, Homo sapiens
aatcactgacaacga

SEQ ID NO: 962817 - DNA, 15 bp, Homo sapiens
atcactgacaacgaa

SEQ ID NO: 962818 - DNA, 15 bp, Homo sapiens
tcactgacaacgaat

SEQ ID NO: 962819 - DNA, 15 bp, Homo sapiens
cactgacaacgaata

SEQ ID NO: 962820 - DNA, 15 bp, Homo sapiens
actgacaacgaataa

SEQ ID NO: 962821 - DNA, 15 bp, Homo sapiens
ctgacaacgaataag

SEQ ID NO: 962822 - DNA, 15 bp, Homo sapiens
tgacaacgaataagg

SEQ ID NO: 962823 - DNA, 15 bp, Homo sapiens
gacaacgaataagga

SEQ ID NO: 962824 - DNA, 15 bp, Homo sapiens
acaacgaataaggaa

SEQ ID NO: 962825 - DNA, 15 bp, Homo sapiens
caacgaataaggaaa

SEQ ID NO: 962826 - DNA, 15 bp, Homo sapiens
aacgaataaggaaat

SEQ ID NO: 962827 - DNA, 15 bp, Homo sapiens
acgaataaggaaatt

SEQ ID NO: 962828 - DNA, 15 bp, Homo sapiens
cgaataaggaaatta

SEQ ID NO: 962829 - DNA, 15 bp, Homo sapiens
gaataaggaaattat

SEQ ID NO: 962830 - DNA, 15 bp, Homo sapiens
aataaggaaattatg

SEQ ID NO: 962831 - DNA, 15 bp, Homo sapiens
ataaggaaattatgt

SEQ ID NO: 962832 - DNA, 15 bp, Homo sapiens
taaggaaattatgtc

SEQ ID NO: 962833 - DNA, 15 bp, Homo sapiens
aaggaaattatgtcc

SEQ ID NO: 962834 - DNA, 15 bp, Homo sapiens
aggaaattatgtcca

SEQ ID NO: 962835 - DNA, 15 bp, Homo sapiens
ggaaattatgtccaa

SEQ ID NO: 962836 - DNA, 15 bp, Homo sapiens
gaaattatgtccaaa

SEQ ID NO: 962837 - DNA, 15 bp, Homo sapiens
aaattatgtccaaag

SEQ ID NO: 962838 - DNA, 15 bp, Homo sapiens
aattatgtccaaaga

SEQ ID NO: 962839 - DNA, 15 bp, Homo sapiens
attatgtccaaagat

SEQ ID NO: 962840 - DNA, 15 bp, Homo sapiens
ttatgtccaaagatt

SEQ ID NO: 962841 - DNA, 15 bp, Homo sapiens
tatgtccaaagattt

SEQ ID NO: 962842 - DNA, 15 bp, Homo sapiens
atgtccaaagatttt

SEQ ID NO: 962843 - DNA, 15 bp, Homo sapiens
tgtccaaagattttg

SEQ ID NO: 962844 - DNA, 15 bp, Homo sapiens
gtccaaagattttga

SEQ ID NO: 962845 - DNA, 15 bp, Homo sapiens
tccaaagattttgag

SEQ ID NO: 962846 - DNA, 15 bp, Homo sapiens
ccaaagattttgaga

SEQ ID NO: 962847 - DNA, 15 bp, Homo sapiens
caaagattttgagat

SEQ ID NO: 962848 - DNA, 15 bp, Homo sapiens
aaagattttgagatt

SEQ ID NO: 962849 - DNA, 15 bp, Homo sapiens
aagattttgagattg

SEQ ID NO: 962850 - DNA, 15 bp, Homo sapiens
agattttgagattgt

SEQ ID NO: 962851 - DNA, 15 bp, Homo sapiens
gattttgagattgtg

SEQ ID NO: 962852 - DNA, 15 bp, Homo sapiens
attttgagattgtga

SEQ ID NO: 962853 - DNA, 15 bp, Homo sapiens
ttttgagattgtgaa

SEQ ID NO: 962854 - DNA, 15 bp, Homo sapiens
tttgagattgtgaag

SEQ ID NO: 962855 - DNA, 15 bp, Homo sapiens
ttgagattgtgaagt

SEQ ID NO: 962856 - DNA, 15 bp, Homo sapiens
tgagattgtgaagtt

SEQ ID NO: 962857 - DNA, 15 bp, Homo sapiens
gagattgtgaagttt

SEQ ID NO: 962858 - DNA, 15 bp, Homo sapiens
agattgtgaagtttt

SEQ ID NO: 962859 - DNA, 15 bp, Homo sapiens
gattgtgaagttttc

SEQ ID NO: 962860 - DNA, 15 bp, Homo sapiens
attgtgaagttttca

SEQ ID NO: 962861 - DNA, 15 bp, Homo sapiens
ttgtgaagttttcat

SEQ ID NO: 962862 - DNA, 15 bp, Homo sapiens
tgtgaagttttcatg

SEQ ID NO: 962863 - DNA, 15 bp, Homo sapiens
gtgaagttttcatgg

SEQ ID NO: 962864 - DNA, 15 bp, Homo sapiens
tgaagttttcatggg

SEQ ID NO: 962865 - DNA, 15 bp, Homo sapiens
gaagttttcatgggt

SEQ ID NO: 962866 - DNA, 15 bp, Homo sapiens
aagttttcatgggtt

SEQ ID NO: 962867 - DNA, 15 bp, Homo sapiens
agttttcatgggttt

SEQ ID NO: 962868 - DNA, 15 bp, Homo sapiens
gttttcatgggtttc

SEQ ID NO: 962869 - DNA, 15 bp, Homo sapiens
ttttcatgggtttct

SEQ ID NO: 962870 - DNA, 15 bp, Homo sapiens
tttcatgggtttcta

SEQ ID NO: 962871 - DNA, 15 bp, Homo sapiens
ttcatgggtttctaa

SEQ ID NO: 962872 - DNA, 15 bp, Homo sapiens
tcatgggtttctaag

SEQ ID NO: 962873 - DNA, 15 bp, Homo sapiens
catgggtttctaagg

SEQ ID NO: 962874 - DNA, 15 bp, Homo sapiens
atgggtttctaagga

SEQ ID NO: 962875 - DNA, 15 bp, Homo sapiens
tgggtttctaaggaa

SEQ ID NO: 962876 - DNA, 15 bp, Homo sapiens
gggtttctaaggaaa

SEQ ID NO: 962877 - DNA, 15 bp, Homo sapiens
ggtttctaaggaaat

SEQ ID NO: 962878 - DNA, 15 bp, Homo sapiens
gtttctaaggaaatt

SEQ ID NO: 962879 - DNA, 15 bp, Homo sapiens
tttctaaggaaattt

SEQ ID NO: 962880 - DNA, 15 bp, Homo sapiens
ttctaaggaaatttc

SEQ ID NO: 962881 - DNA, 15 bp, Homo sapiens
tctaaggaaatttcc

SEQ ID NO: 962882 - DNA, 15 bp, Homo sapiens
ctaaggaaatttcca

SEQ ID NO: 962883 - DNA, 15 bp, Homo sapiens
taaggaaatttccag

SEQ ID NO: 962884 - DNA, 15 bp, Homo sapiens
aaggaaatttccaga

SEQ ID NO: 962885 - DNA, 15 bp, Homo sapiens
aggaaatttccagat

SEQ ID NO: 962886 - DNA, 15 bp, Homo sapiens
ggaaatttccagatg

SEQ ID NO: 962887 - DNA, 15 bp, Homo sapiens
gaaatttccagatgt

SEQ ID NO: 962888 - DNA, 15 bp, Homo sapiens
aaatttccagatgtt

SEQ ID NO: 962889 - DNA, 15 bp, Homo sapiens
aatttccagatgttc

SEQ ID NO: 962890 - DNA, 15 bp, Homo sapiens
atttccagatgttcc

SEQ ID NO: 962891 - DNA, 15 bp, Homo sapiens
tttccagatgttccc

SEQ ID NO: 962892 - DNA, 15 bp, Homo sapiens
ttccagatgttccct

SEQ ID NO: 962893 - DNA, 15 bp, Homo sapiens
tccagatgttccctg

SEQ ID NO: 962894 - DNA, 15 bp, Homo sapiens
ccagatgttccctga

SEQ ID NO: 962895 - DNA, 15 bp, Homo sapiens
cagatgttccctgac

SEQ ID NO: 962896 - DNA, 15 bp, Homo sapiens
agatgttccctgacc

SEQ ID NO: 962897 - DNA, 15 bp, Homo sapiens
gatgttccctgacca

SEQ ID NO: 962898 - DNA, 15 bp, Homo sapiens
atgttccctgaccaa

SEQ ID NO: 962899 - DNA, 15 bp, Homo sapiens
tgttccctgaccaaa

SEQ ID NO: 962900 - DNA, 15 bp, Homo sapiens
gttccctgaccaaag

SEQ ID NO: 962901 - DNA, 15 bp, Homo sapiens
ttccctgaccaaagc

SEQ ID NO: 962902 - DNA, 15 bp, Homo sapiens
tccctgaccaaagca

SEQ ID NO: 962903 - DNA, 15 bp, Homo sapiens
ccctgaccaaagcat

SEQ ID NO: 962904 - DNA, 15 bp, Homo sapiens
cctgaccaaagcata

SEQ ID NO: 962905 - DNA, 15 bp, Homo sapiens
ctgaccaaagcataa

SEQ ID NO: 962906 - DNA, 15 bp, Homo sapiens
tgaccaaagcataat

SEQ ID NO: 962907 - DNA, 15 bp, Homo sapiens
gaccaaagcataatt

SEQ ID NO: 962908 - DNA, 15 bp, Homo sapiens
accaaagcataattc

SEQ ID NO: 962909 - DNA, 15 bp, Homo sapiens
ccaaagcataattct

SEQ ID NO: 962910 - DNA, 15 bp, Homo sapiens
caaagcataattctt

SEQ ID NO: 962911 - DNA, 15 bp, Homo sapiens
aaagcataattcttc

SEQ ID NO: 962912 - DNA, 15 bp, Homo sapiens
aagcataattcttca

SEQ ID NO: 962913 - DNA, 15 bp, Homo sapiens
agcataattcttcat

SEQ ID NO: 962914 - DNA, 15 bp, Homo sapiens
gcataattcttcatg

SEQ ID NO: 962915 - DNA, 15 bp, Homo sapiens
cataattcttcatgt

SEQ ID NO: 962916 - DNA, 15 bp, Homo sapiens
ataattcttcatgtg

SEQ ID NO: 962917 - DNA, 15 bp, Homo sapiens
taattcttcatgtga

SEQ ID NO: 962918 - DNA, 15 bp, Homo sapiens
aattcttcatgtgaa

SEQ ID NO: 962919 - DNA, 15 bp, Homo sapiens
attcttcatgtgaaa

SEQ ID NO: 962920 - DNA, 15 bp, Homo sapiens
ttcttcatgtgaaaa

SEQ ID NO: 962921 - DNA, 15 bp, Homo sapiens
tcttcatgtgaaaaa

SEQ ID NO: 962922 - DNA, 15 bp, Homo sapiens
cttcatgtgaaaaaa

SEQ ID NO: 962923 - DNA, 15 bp, Homo sapiens
ttcatgtgaaaaaat

SEQ ID NO: 962924 - DNA, 15 bp, Homo sapiens
tcatgtgaaaaaata

SEQ ID NO: 962925 - DNA, 15 bp, Homo sapiens
catgtgaaaaaatac

SEQ ID NO: 962926 - DNA, 15 bp, Homo sapiens
atgtgaaaaaatact

SEQ ID NO: 962927 - DNA, 15 bp, Homo sapiens
tgtgaaaaaatactt

SEQ ID NO: 962928 - DNA, 15 bp, Homo sapiens
gtgaaaaaatactta

SEQ ID NO: 962929 - DNA, 15 bp, Homo sapiens
tgaaaaaatacttag

SEQ ID NO: 962930 - DNA, 15 bp, Homo sapiens
gaaaaaatacttagc

SEQ ID NO: 962931 - DNA, 15 bp, Homo sapiens
aaaaaatacttagca

SEQ ID NO: 962932 - DNA, 15 bp, Homo sapiens
aaaaatacttagcat

SEQ ID NO: 962933 - DNA, 15 bp, Homo sapiens
aaaatacttagcatg

SEQ ID NO: 962934 - DNA, 15 bp, Homo sapiens
aaatacttagcatgt

SEQ ID NO: 962935 - DNA, 15 bp, Homo sapiens
aatacttagcatgtc

SEQ ID NO: 962936 - DNA, 15 bp, Homo sapiens
atacttagcatgtca

SEQ ID NO: 962937 - DNA, 15 bp, Homo sapiens
tacttagcatgtcat

SEQ ID NO: 962938 - DNA, 15 bp, Homo sapiens
acttagcatgtcatt

SEQ ID NO: 962939 - DNA, 15 bp, Homo sapiens
cttagcatgtcatta

SEQ ID NO: 962940 - DNA, 15 bp, Homo sapiens
ttagcatgtcattaa

SEQ ID NO: 962941 - DNA, 15 bp, Homo sapiens
tagcatgtcattaaa

SEQ ID NO: 962942 - DNA, 15 bp, Homo sapiens
agcatgtcattaaaa

SEQ ID NO: 962943 - DNA, 15 bp, Homo sapiens
gcatgtcattaaaat

SEQ ID NO: 962944 - DNA, 15 bp, Homo sapiens
catgtcattaaaatt

SEQ ID NO: 962945 - DNA, 15 bp, Homo sapiens
atgtcattaaaatta

SEQ ID NO: 962946 - DNA, 15 bp, Homo sapiens
tgtcattaaaattat

SEQ ID NO: 962947 - DNA, 15 bp, Homo sapiens
gtcattaaaattatt

SEQ ID NO: 962948 - DNA, 15 bp, Homo sapiens
tcattaaaattattt

SEQ ID NO: 962949 - DNA, 15 bp, Homo sapiens
cattaaaattatttt

SEQ ID NO: 962950 - DNA, 15 bp, Homo sapiens
attaaaattattttt

SEQ ID NO: 962951 - DNA, 15 bp, Homo sapiens
ttaaaattatttttt

SEQ ID NO: 962952 - DNA, 15 bp, Homo sapiens
taaaattattttttt

SEQ ID NO: 962953 - DNA, 15 bp, Homo sapiens
aaaattatttttttc

SEQ ID NO: 962954 - DNA, 15 bp, Homo sapiens
aaattatttttttct

SEQ ID NO: 962955 - DNA, 15 bp, Homo sapiens
aattatttttttcta

SEQ ID NO: 962956 - DNA, 15 bp, Homo sapiens
attatttttttctaa

SEQ ID NO: 962957 - DNA, 15 bp, Homo sapiens
ttatttttttctaat

SEQ ID NO: 962958 - DNA, 15 bp, Homo sapiens
tatttttttctaatc

SEQ ID NO: 962959 - DNA, 15 bp, Homo sapiens
atttttttctaatca

SEQ ID NO: 962960 - DNA, 15 bp, Homo sapiens
tttttttctaatcat

SEQ ID NO: 962961 - DNA, 15 bp, Homo sapiens
ttttttctaatcatt

SEQ ID NO: 962962 - DNA, 15 bp, Homo sapiens
tttttctaatcattt

SEQ ID NO: 962963 - DNA, 15 bp, Homo sapiens
ttttctaatcatttt

SEQ ID NO: 962964 - DNA, 15 bp, Homo sapiens
tttctaatcatttta

SEQ ID NO: 962965 - DNA, 15 bp, Homo sapiens
ttctaatcattttaa

SEQ ID NO: 962966 - DNA, 15 bp, Homo sapiens
tctaatcattttaac

SEQ ID NO: 962967 - DNA, 15 bp, Homo sapiens
ctaatcattttaaca

SEQ ID NO: 962968 - DNA, 15 bp, Homo sapiens
taatcattttaacaa

SEQ ID NO: 962969 - DNA, 15 bp, Homo sapiens
aatcattttaacaat

SEQ ID NO: 962970 - DNA, 15 bp, Homo sapiens
atcattttaacaatg

SEQ ID NO: 962971 - DNA, 15 bp, Homo sapiens
tcattttaacaatga

SEQ ID NO: 962972 - DNA, 15 bp, Homo sapiens
cattttaacaatgaa

SEQ ID NO: 962973 - DNA, 15 bp, Homo sapiens
attttaacaatgaat

SEQ ID NO: 962974 - DNA, 15 bp, Homo sapiens
ttttaacaatgaatt

SEQ ID NO: 962975 - DNA, 15 bp, Homo sapiens
tttaacaatgaatta

SEQ ID NO: 962976 - DNA, 15 bp, Homo sapiens
ttaacaatgaattag

SEQ ID NO: 962977 - DNA, 15 bp, Homo sapiens
taacaatgaattaga

SEQ ID NO: 962978 - DNA, 15 bp, Homo sapiens
aacaatgaattagaa

SEQ ID NO: 962979 - DNA, 15 bp, Homo sapiens
acaatgaattagaaa

SEQ ID NO: 962980 - DNA, 15 bp, Homo sapiens
caatgaattagaaat

SEQ ID NO: 962981 - DNA, 15 bp, Homo sapiens
aatgaattagaaata

SEQ ID NO: 962982 - DNA, 15 bp, Homo sapiens
atgaattagaaataa

SEQ ID NO: 962983 - DNA, 15 bp, Homo sapiens
tgaattagaaataaa

SEQ ID NO: 962984 - DNA, 15 bp, Homo sapiens
gaattagaaataaaa

SEQ ID NO: 962985 - DNA, 15 bp, Homo sapiens
aattagaaataaaat

SEQ ID NO: 962986 - DNA, 15 bp, Homo sapiens
attagaaataaaatt

SEQ ID NO: 962987 - DNA, 15 bp, Homo sapiens
ttagaaataaaattt

SEQ ID NO: 962988 - DNA, 15 bp, Homo sapiens
tagaaataaaatttt

SEQ ID NO: 962989 - DNA, 15 bp, Homo sapiens
agaaataaaattttg

SEQ ID NO: 962990 - DNA, 15 bp, Homo sapiens
gaaataaaattttga

SEQ ID NO: 962991 - DNA, 15 bp, Homo sapiens
aaataaaattttgaa

SEQ ID NO: 962992 - DNA, 15 bp, Homo sapiens
aataaaattttgaat

SEQ ID NO: 962993 - DNA, 15 bp, Homo sapiens
ataaaattttgaatg

SEQ ID NO: 962994 - DNA, 15 bp, Homo sapiens
taaaattttgaatgt

SEQ ID NO: 962995 - DNA, 15 bp, Homo sapiens
aaaattttgaatgtg

SEQ ID NO: 962996 - DNA, 15 bp, Homo sapiens
aaattttgaatgtgc

SEQ ID NO: 962997 - DNA, 15 bp, Homo sapiens
aattttgaatgtgca

SEQ ID NO: 962998 - DNA, 15 bp, Homo sapiens
attttgaatgtgcaa

SEQ ID NO: 962999 - DNA, 15 bp, Homo sapiens
ttttgaatgtgcaat

SEQ ID NO: 963000 - DNA, 15 bp, Homo sapiens
tttgaatgtgcaata

SEQ ID NO: 963001 - DNA, 15 bp, Homo sapiens
ttgaatgtgcaatat

SEQ ID NO: 963002 - DNA, 15 bp, Homo sapiens
tgaatgtgcaatatt

SEQ ID NO: 963003 - DNA, 15 bp, Homo sapiens
gaatgtgcaatattc

SEQ ID NO: 963004 - DNA, 15 bp, Homo sapiens
aatgtgcaatattca

SEQ ID NO: 963005 - DNA, 15 bp, Homo sapiens
atgtgcaatattcat

SEQ ID NO: 963006 - DNA, 15 bp, Homo sapiens
tgtgcaatattcatt

SEQ ID NO: 963007 - DNA, 15 bp, Homo sapiens
gtgcaatattcattt

SEQ ID NO: 963008 - DNA, 15 bp, Homo sapiens
tgcaatattcatttg

SEQ ID NO: 963009 - DNA, 15 bp, Homo sapiens
gcaatattcatttgt

SEQ ID NO: 963010 - DNA, 15 bp, Homo sapiens
caatattcatttgtt

SEQ ID NO: 963011 - DNA, 15 bp, Homo sapiens
aatattcatttgttt

SEQ ID NO: 963012 - DNA, 15 bp, Homo sapiens
atattcatttgtttt

SEQ ID NO: 963013 - DNA, 15 bp, Homo sapiens
tattcatttgtttta

SEQ ID NO: 963014 - DNA, 15 bp, Homo sapiens
attcatttgttttaa

SEQ ID NO: 963015 - DNA, 15 bp, Homo sapiens
ttcatttgttttaaa

SEQ ID NO: 963016 - DNA, 15 bp, Homo sapiens
tcatttgttttaaaa

SEQ ID NO: 963017 - DNA, 15 bp, Homo sapiens
catttgttttaaaaa

SEQ ID NO: 963018 - DNA, 15 bp, Homo sapiens
atttgttttaaaaag

SEQ ID NO: 963019 - DNA, 15 bp, Homo sapiens
tttgttttaaaaaga

SEQ ID NO: 963020 - DNA, 15 bp, Homo sapiens
ttgttttaaaaagaa

SEQ ID NO: 963021 - DNA, 15 bp, Homo sapiens
tgttttaaaaagaat

SEQ ID NO: 963022 - DNA, 15 bp, Homo sapiens
gttttaaaaagaata

SEQ ID NO: 963023 - DNA, 15 bp, Homo sapiens
ttttaaaaagaataa

SEQ ID NO: 963024 - DNA, 15 bp, Homo sapiens
tttaaaaagaataag

SEQ ID NO: 963025 - DNA, 15 bp, Homo sapiens
ttaaaaagaataagc

SEQ ID NO: 963026 - DNA, 15 bp, Homo sapiens
taaaaagaataagca

SEQ ID NO: 963027 - DNA, 15 bp, Homo sapiens
aaaaagaataagcaa

SEQ ID NO: 963028 - DNA, 15 bp, Homo sapiens
aaaagaataagcaat

SEQ ID NO: 963029 - DNA, 15 bp, Homo sapiens
aaagaataagcaata

SEQ ID NO: 963030 - DNA, 15 bp, Homo sapiens
aagaataagcaataa

SEQ ID NO: 963031 - DNA, 15 bp, Homo sapiens
agaataagcaataac

SEQ ID NO: 963032 - DNA, 15 bp, Homo sapiens
gaataagcaataaca

SEQ ID NO: 963033 - DNA, 15 bp, Homo sapiens
aataagcaataacaa

SEQ ID NO: 963034 - DNA, 15 bp, Homo sapiens
ataagcaataacaat

SEQ ID NO: 963035 - DNA, 15 bp, Homo sapiens
taagcaataacaata

SEQ ID NO: 963036 - DNA, 15 bp, Homo sapiens
aagcaataacaatac

SEQ ID NO: 963037 - DNA, 15 bp, Homo sapiens
agcaataacaataca

SEQ ID NO: 963038 - DNA, 15 bp, Homo sapiens
gcaataacaatacat

SEQ ID NO: 963039 - DNA, 15 bp, Homo sapiens
caataacaatacatt

SEQ ID NO: 963040 - DNA, 15 bp, Homo sapiens
aataacaatacattt

SEQ ID NO: 963041 - DNA, 15 bp, Homo sapiens
ataacaatacatttt

SEQ ID NO: 963042 - DNA, 15 bp, Homo sapiens
taacaatacatttta

SEQ ID NO: 963043 - DNA, 15 bp, Homo sapiens
aacaatacattttag

SEQ ID NO: 963044 - DNA, 15 bp, Homo sapiens
acaatacattttaga

SEQ ID NO: 963045 - DNA, 15 bp, Homo sapiens
caatacattttagat

SEQ ID NO: 963046 - DNA, 15 bp, Homo sapiens
aatacattttagata

SEQ ID NO: 963047 - DNA, 15 bp, Homo sapiens
atacattttagataa

SEQ ID NO: 963048 - DNA, 15 bp, Homo sapiens
tacattttagataat

SEQ ID NO: 963049 - DNA, 15 bp, Homo sapiens
acattttagataata

SEQ ID NO: 963050 - DNA, 15 bp, Homo sapiens
cattttagataatac

SEQ ID NO: 963051 - DNA, 15 bp, Homo sapiens
attttagataataca

SEQ ID NO: 963052 - DNA, 15 bp, Homo sapiens
ttttagataatacat

SEQ ID NO: 963053 - DNA, 15 bp, Homo sapiens
tttagataatacata

SEQ ID NO: 963054 - DNA, 15 bp, Homo sapiens
ttagataatacataa

SEQ ID NO: 963055 - DNA, 15 bp, Homo sapiens
tagataatacataag

SEQ ID NO: 963056 - DNA, 15 bp, Homo sapiens
agataatacataaga

SEQ ID NO: 963057 - DNA, 15 bp, Homo sapiens
gataatacataagat

SEQ ID NO: 963058 - DNA, 15 bp, Homo sapiens
ataatacataagatg

SEQ ID NO: 963059 - DNA, 15 bp, Homo sapiens
taatacataagatga

SEQ ID NO: 963060 - DNA, 15 bp, Homo sapiens
aatacataagatgaa

SEQ ID NO: 963061 - DNA, 15 bp, Homo sapiens
atacataagatgaat

SEQ ID NO: 963062 - DNA, 15 bp, Homo sapiens
tacataagatgaatg

SEQ ID NO: 963063 - DNA, 15 bp, Homo sapiens
acataagatgaatgt

SEQ ID NO: 963064 - DNA, 15 bp, Homo sapiens
cataagatgaatgtt

SEQ ID NO: 963065 - DNA, 15 bp, Homo sapiens
ataagatgaatgttt

SEQ ID NO: 963066 - DNA, 15 bp, Homo sapiens
taagatgaatgttta

SEQ ID NO: 963067 - DNA, 15 bp, Homo sapiens
aagatgaatgtttaa

SEQ ID NO: 963068 - DNA, 15 bp, Homo sapiens
agatgaatgtttaag

SEQ ID NO: 963069 - DNA, 15 bp, Homo sapiens
gatgaatgtttaaga

SEQ ID NO: 963070 - DNA, 15 bp, Homo sapiens
atgaatgtttaagat

SEQ ID NO: 963071 - DNA, 15 bp, Homo sapiens
tgaatgtttaagatt

SEQ ID NO: 963072 - DNA, 15 bp, Homo sapiens
gaatgtttaagattt

SEQ ID NO: 963073 - DNA, 15 bp, Homo sapiens
aatgtttaagatttt

SEQ ID NO: 963074 - DNA, 15 bp, Homo sapiens
atgtttaagatttta

SEQ ID NO: 963075 - DNA, 15 bp, Homo sapiens
tgtttaagattttac

SEQ ID NO: 963076 - DNA, 15 bp, Homo sapiens
gtttaagattttacc

SEQ ID NO: 963077 - DNA, 15 bp, Homo sapiens
tttaagattttacca

SEQ ID NO: 963078 - DNA, 15 bp, Homo sapiens
ttaagattttaccaa

SEQ ID NO: 963079 - DNA, 15 bp, Homo sapiens
taagattttaccaaa

SEQ ID NO: 963080 - DNA, 15 bp, Homo sapiens
aagattttaccaaat

SEQ ID NO: 963081 - DNA, 15 bp, Homo sapiens
agattttaccaaatt

SEQ ID NO: 963082 - DNA, 15 bp, Homo sapiens
gattttaccaaatta

SEQ ID NO: 963083 - DNA, 15 bp, Homo sapiens
attttaccaaattaa

SEQ ID NO: 963084 - DNA, 15 bp, Homo sapiens
ttttaccaaattaaa

SEQ ID NO: 963085 - DNA, 15 bp, Homo sapiens
tttaccaaattaaaa

SEQ ID NO: 963086 - DNA, 15 bp, Homo sapiens
ttaccaaattaaaag

SEQ ID NO: 963087 - DNA, 15 bp, Homo sapiens
taccaaattaaaagt

SEQ ID NO: 963088 - DNA, 15 bp, Homo sapiens
accaaattaaaagta

SEQ ID NO: 963089 - DNA, 15 bp, Homo sapiens
ccaaattaaaagtaa

SEQ ID NO: 963090 - DNA, 15 bp, Homo sapiens
caaattaaaagtaat

SEQ ID NO: 963091 - DNA, 15 bp, Homo sapiens
aaattaaaagtaatt

SEQ ID NO: 963092 - DNA, 15 bp, Homo sapiens
aattaaaagtaatta

SEQ ID NO: 963093 - DNA, 15 bp, Homo sapiens
attaaaagtaattat

SEQ ID NO: 963094 - DNA, 15 bp, Homo sapiens
ttaaaagtaattata

SEQ ID NO: 963095 - DNA, 15 bp, Homo sapiens
taaaagtaattataa

SEQ ID NO: 963096 - DNA, 15 bp, Homo sapiens
aaaagtaattataat

SEQ ID NO: 963097 - DNA, 15 bp, Homo sapiens
aaagtaattataatc

SEQ ID NO: 963098 - DNA, 15 bp, Homo sapiens
aagtaattataatca

SEQ ID NO: 963099 - DNA, 15 bp, Homo sapiens
agtaattataatcat

SEQ ID NO: 963100 - DNA, 15 bp, Homo sapiens
gtaattataatcatt

SEQ ID NO: 963101 - DNA, 15 bp, Homo sapiens
taattataatcattt

SEQ ID NO: 963102 - DNA, 15 bp, Homo sapiens
aattataatcattta

SEQ ID NO: 963103 - DNA, 15 bp, Homo sapiens
attataatcatttaa

SEQ ID NO: 963104 - DNA, 15 bp, Homo sapiens
ttataatcatttaaa

SEQ ID NO: 963105 - DNA, 15 bp, Homo sapiens
tataatcatttaaat

SEQ ID NO: 963106 - DNA, 15 bp, Homo sapiens
ataatcatttaaatc

SEQ ID NO: 963107 - DNA, 15 bp, Homo sapiens
taatcatttaaatcc

SEQ ID NO: 963108 - DNA, 15 bp, Homo sapiens
aatcatttaaatcca

SEQ ID NO: 963109 - DNA, 15 bp, Homo sapiens
atcatttaaatccat

SEQ ID NO: 963110 - DNA, 15 bp, Homo sapiens
tcatttaaatccatt

SEQ ID NO: 963111 - DNA, 15 bp, Homo sapiens
catttaaatccatta

SEQ ID NO: 963112 - DNA, 15 bp, Homo sapiens
atttaaatccattaa

SEQ ID NO: 963113 - DNA, 15 bp, Homo sapiens
tttaaatccattaac

SEQ ID NO: 963114 - DNA, 15 bp, Homo sapiens
ttaaatccattaaca

SEQ ID NO: 963115 - DNA, 15 bp, Homo sapiens
taaatccattaacat

SEQ ID NO: 963116 - DNA, 15 bp, Homo sapiens
aaatccattaacatc

SEQ ID NO: 963117 - DNA, 15 bp, Homo sapiens
aatccattaacatca

SEQ ID NO: 963118 - DNA, 15 bp, Homo sapiens
atccattaacatcaa

SEQ ID NO: 963119 - DNA, 15 bp, Homo sapiens
tccattaacatcaaa

SEQ ID NO: 963120 - DNA, 15 bp, Homo sapiens
ccattaacatcaaat

SEQ ID NO: 963121 - DNA, 15 bp, Homo sapiens
cattaacatcaaata

SEQ ID NO: 963122 - DNA, 15 bp, Homo sapiens
attaacatcaaatat

SEQ ID NO: 963123 - DNA, 15 bp, Homo sapiens
ttaacatcaaatatt

SEQ ID NO: 963124 - DNA, 15 bp, Homo sapiens
taacatcaaatattt

SEQ ID NO: 963125 - DNA, 15 bp, Homo sapiens
aacatcaaatatttc

SEQ ID NO: 963126 - DNA, 15 bp, Homo sapiens
acatcaaatatttca

SEQ ID NO: 963127 - DNA, 15 bp, Homo sapiens
catcaaatatttcaa

SEQ ID NO: 963128 - DNA, 15 bp, Homo sapiens
atcaaatatttcaaa

SEQ ID NO: 963129 - DNA, 15 bp, Homo sapiens
tcaaatatttcaaag

SEQ ID NO: 963130 - DNA, 15 bp, Homo sapiens
caaatatttcaaagg

SEQ ID NO: 963131 - DNA, 15 bp, Homo sapiens
aaatatttcaaaggt

SEQ ID NO: 963132 - DNA, 15 bp, Homo sapiens
aatatttcaaaggtt

SEQ ID NO: 963133 - DNA, 15 bp, Homo sapiens
atatttcaaaggttg

SEQ ID NO: 963134 - DNA, 15 bp, Homo sapiens
tatttcaaaggttga

SEQ ID NO: 963135 - DNA, 15 bp, Homo sapiens
atttcaaaggttgag

SEQ ID NO: 963136 - DNA, 15 bp, Homo sapiens
tttcaaaggttgagc

SEQ ID NO: 963137 - DNA, 15 bp, Homo sapiens
ttcaaaggttgagca

SEQ ID NO: 963138 - DNA, 15 bp, Homo sapiens
tcaaaggttgagcat

SEQ ID NO: 963139 - DNA, 15 bp, Homo sapiens
caaaggttgagcata

SEQ ID NO: 963140 - DNA, 15 bp, Homo sapiens
aaaggttgagcatat

SEQ ID NO: 963141 - DNA, 15 bp, Homo sapiens
aaggttgagcatatt

SEQ ID NO: 963142 - DNA, 15 bp, Homo sapiens
aggttgagcatattt

SEQ ID NO: 963143 - DNA, 15 bp, Homo sapiens
ggttgagcatatttt

SEQ ID NO: 963144 - DNA, 15 bp, Homo sapiens
gttgagcatattttt

SEQ ID NO: 963145 - DNA, 15 bp, Homo sapiens
ttgagcatatttttt

SEQ ID NO: 963146 - DNA, 15 bp, Homo sapiens
tgagcatattttttt

SEQ ID NO: 963147 - DNA, 15 bp, Homo sapiens
gagcatatttttttc

SEQ ID NO: 963148 - DNA, 15 bp, Homo sapiens
agcatatttttttcc

SEQ ID NO: 963149 - DNA, 15 bp, Homo sapiens
gcatatttttttcca

SEQ ID NO: 963150 - DNA, 15 bp, Homo sapiens
catatttttttccat

SEQ ID NO: 963151 - DNA, 15 bp, Homo sapiens
atatttttttccata

SEQ ID NO: 963152 - DNA, 15 bp, Homo sapiens
tatttttttccatag

SEQ ID NO: 963153 - DNA, 15 bp, Homo sapiens
atttttttccataga

SEQ ID NO: 963154 - DNA, 15 bp, Homo sapiens
tttttttccatagaa

SEQ ID NO: 963155 - DNA, 15 bp, Homo sapiens
ttttttccatagaaa

SEQ ID NO: 963156 - DNA, 15 bp, Homo sapiens
tttttccatagaaag

SEQ ID NO: 963157 - DNA, 15 bp, Homo sapiens
ttttccatagaaagt

SEQ ID NO: 963158 - DNA, 15 bp, Homo sapiens
tttccatagaaagta

SEQ ID NO: 963159 - DNA, 15 bp, Homo sapiens
ttccatagaaagtac

SEQ ID NO: 963160 - DNA, 15 bp, Homo sapiens
tccatagaaagtaca

SEQ ID NO: 963161 - DNA, 15 bp, Homo sapiens
ccatagaaagtacaa

SEQ ID NO: 963162 - DNA, 15 bp, Homo sapiens
catagaaagtacaat

SEQ ID NO: 963163 - DNA, 15 bp, Homo sapiens
atagaaagtacaatt

SEQ ID NO: 963164 - DNA, 15 bp, Homo sapiens
tagaaagtacaattg

SEQ ID NO: 963165 - DNA, 15 bp, Homo sapiens
agaaagtacaattgt

SEQ ID NO: 963166 - DNA, 15 bp, Homo sapiens
gaaagtacaattgtt

SEQ ID NO: 963167 - DNA, 15 bp, Homo sapiens
aaagtacaattgttt

SEQ ID NO: 963168 - DNA, 15 bp, Homo sapiens
aagtacaattgtttt

SEQ ID NO: 963169 - DNA, 15 bp, Homo sapiens
agtacaattgttttc

SEQ ID NO: 963170 - DNA, 15 bp, Homo sapiens
gtacaattgttttct

SEQ ID NO: 963171 - DNA, 15 bp, Homo sapiens
tacaattgttttctc

SEQ ID NO: 963172 - DNA, 15 bp, Homo sapiens
acaattgttttctct

SEQ ID NO: 963173 - DNA, 15 bp, Homo sapiens
caattgttttctctg

SEQ ID NO: 963174 - DNA, 15 bp, Homo sapiens
aattgttttctctgt

SEQ ID NO: 963175 - DNA, 15 bp, Homo sapiens
attgttttctctgtt

SEQ ID NO: 963176 - DNA, 15 bp, Homo sapiens
ttgttttctctgttc

SEQ ID NO: 963177 - DNA, 15 bp, Homo sapiens
tgttttctctgttct

SEQ ID NO: 963178 - DNA, 15 bp, Homo sapiens
gttttctctgttcta

SEQ ID NO: 963179 - DNA, 15 bp, Homo sapiens
ttttctctgttctaa

SEQ ID NO: 963180 - DNA, 15 bp, Homo sapiens
tttctctgttctaac

SEQ ID NO: 963181 - DNA, 15 bp, Homo sapiens
ttctctgttctaact

SEQ ID NO: 963182 - DNA, 15 bp, Homo sapiens
tctctgttctaactc

SEQ ID NO: 963183 - DNA, 15 bp, Homo sapiens
ctctgttctaactca

SEQ ID NO: 963184 - DNA, 15 bp, Homo sapiens
tctgttctaactcag

SEQ ID NO: 963185 - DNA, 15 bp, Homo sapiens
ctgttctaactcaga

SEQ ID NO: 963186 - DNA, 15 bp, Homo sapiens
tgttctaactcagag

SEQ ID NO: 963187 - DNA, 15 bp, Homo sapiens
gttctaactcagagg

SEQ ID NO: 963188 - DNA, 15 bp, Homo sapiens
ttctaactcagagga

SEQ ID NO: 963189 - DNA, 15 bp, Homo sapiens
tctaactcagaggaa

SEQ ID NO: 963190 - DNA, 15 bp, Homo sapiens
ctaactcagaggaat

SEQ ID NO: 963191 - DNA, 15 bp, Homo sapiens
taactcagaggaata

SEQ ID NO: 963192 - DNA, 15 bp, Homo sapiens
aactcagaggaatac

SEQ ID NO: 963193 - DNA, 15 bp, Homo sapiens
actcagaggaataca

SEQ ID NO: 963194 - DNA, 15 bp, Homo sapiens
ctcagaggaatacac

SEQ ID NO: 963195 - DNA, 15 bp, Homo sapiens
tcagaggaatacaca

SEQ ID NO: 963196 - DNA, 15 bp, Homo sapiens
cagaggaatacacaa

SEQ ID NO: 963197 - DNA, 15 bp, Homo sapiens
agaggaatacacaaa

SEQ ID NO: 963198 - DNA, 15 bp, Homo sapiens
gaggaatacacaaac

SEQ ID NO: 963199 - DNA, 15 bp, Homo sapiens
aggaatacacaaaca

SEQ ID NO: 963200 - DNA, 15 bp, Homo sapiens
ggaatacacaaacac

SEQ ID NO: 963201 - DNA, 15 bp, Homo sapiens
gaatacacaaacacc

SEQ ID NO: 963202 - DNA, 15 bp, Homo sapiens
aatacacaaacaccg

SEQ ID NO: 963203 - DNA, 15 bp, Homo sapiens
atacacaaacaccga

SEQ ID NO: 963204 - DNA, 15 bp, Homo sapiens
tacacaaacaccgac

SEQ ID NO: 963205 - DNA, 15 bp, Homo sapiens
acacaaacaccgaca

SEQ ID NO: 963206 - DNA, 15 bp, Homo sapiens
cacaaacaccgacag

SEQ ID NO: 963207 - DNA, 15 bp, Homo sapiens
acaaacaccgacaga

SEQ ID NO: 963208 - DNA, 15 bp, Homo sapiens
caaacaccgacagac

SEQ ID NO: 963209 - DNA, 15 bp, Homo sapiens
aaacaccgacagact

SEQ ID NO: 963210 - DNA, 15 bp, Homo sapiens
aacaccgacagactc

SEQ ID NO: 963211 - DNA, 15 bp, Homo sapiens
acaccgacagactca

SEQ ID NO: 963212 - DNA, 15 bp, Homo sapiens
caccgacagactcat

SEQ ID NO: 963213 - DNA, 15 bp, Homo sapiens
accgacagactcatc

SEQ ID NO: 963214 - DNA, 15 bp, Homo sapiens
ccgacagactcatct

SEQ ID NO: 963215 - DNA, 15 bp, Homo sapiens
cgacagactcatcta

SEQ ID NO: 963216 - DNA, 15 bp, Homo sapiens
gacagactcatctaa

SEQ ID NO: 963217 - DNA, 15 bp, Homo sapiens
acagactcatctaac

SEQ ID NO: 963218 - DNA, 15 bp, Homo sapiens
cagactcatctaaca

SEQ ID NO: 963219 - DNA, 15 bp, Homo sapiens
agactcatctaacaa

SEQ ID NO: 963220 - DNA, 15 bp, Homo sapiens
gactcatctaacaaa

SEQ ID NO: 963221 - DNA, 15 bp, Homo sapiens
actcatctaacaaaa

SEQ ID NO: 963222 - DNA, 15 bp, Homo sapiens
ctcatctaacaaaaa

SEQ ID NO: 963223 - DNA, 15 bp, Homo sapiens
tcatctaacaaaaac

SEQ ID NO: 963224 - DNA, 15 bp, Homo sapiens
catctaacaaaaact

SEQ ID NO: 963225 - DNA, 15 bp, Homo sapiens
atctaacaaaaactt

SEQ ID NO: 963226 - DNA, 15 bp, Homo sapiens
tctaacaaaaactta

SEQ ID NO: 963227 - DNA, 15 bp, Homo sapiens
ctaacaaaaacttag

SEQ ID NO: 963228 - DNA, 15 bp, Homo sapiens
taacaaaaacttaga

SEQ ID NO: 963229 - DNA, 15 bp, Homo sapiens
aacaaaaacttagat

SEQ ID NO: 963230 - DNA, 15 bp, Homo sapiens
acaaaaacttagatt

SEQ ID NO: 963231 - DNA, 15 bp, Homo sapiens
caaaaacttagatta

SEQ ID NO: 963232 - DNA, 15 bp, Homo sapiens
aaaaacttagattaa

SEQ ID NO: 963233 - DNA, 15 bp, Homo sapiens
aaaacttagattaac

SEQ ID NO: 963234 - DNA, 15 bp, Homo sapiens
aaacttagattaaca

SEQ ID NO: 963235 - DNA, 15 bp, Homo sapiens
aacttagattaacat

SEQ ID NO: 963236 - DNA, 15 bp, Homo sapiens
acttagattaacata

SEQ ID NO: 963237 - DNA, 15 bp, Homo sapiens
cttagattaacatag

SEQ ID NO: 963238 - DNA, 15 bp, Homo sapiens
ttagattaacatagg

SEQ ID NO: 963239 - DNA, 15 bp, Homo sapiens
tagattaacatagga

SEQ ID NO: 963240 - DNA, 15 bp, Homo sapiens
agattaacataggaa

SEQ ID NO: 963241 - DNA, 15 bp, Homo sapiens
gattaacataggaag

SEQ ID NO: 963242 - DNA, 15 bp, Homo sapiens
attaacataggaaga

SEQ ID NO: 963243 - DNA, 15 bp, Homo sapiens
ttaacataggaagaa

SEQ ID NO: 963244 - DNA, 15 bp, Homo sapiens
taacataggaagaaa

SEQ ID NO: 963245 - DNA, 15 bp, Homo sapiens
aacataggaagaaag

SEQ ID NO: 963246 - DNA, 15 bp, Homo sapiens
acataggaagaaaga

SEQ ID NO: 963247 - DNA, 15 bp, Homo sapiens
cataggaagaaagaa

SEQ ID NO: 963248 - DNA, 15 bp, Homo sapiens
ataggaagaaagaat

SEQ ID NO: 963249 - DNA, 15 bp, Homo sapiens
taggaagaaagaata

SEQ ID NO: 963250 - DNA, 15 bp, Homo sapiens
aggaagaaagaataa

SEQ ID NO: 963251 - DNA, 15 bp, Homo sapiens
ggaagaaagaataat

SEQ ID NO: 963252 - DNA, 15 bp, Homo sapiens
gaagaaagaataata

SEQ ID NO: 963253 - DNA, 15 bp, Homo sapiens
aagaaagaataatac

SEQ ID NO: 963254 - DNA, 15 bp, Homo sapiens
agaaagaataataca

SEQ ID NO: 963255 - DNA, 15 bp, Homo sapiens
gaaagaataatacaa

SEQ ID NO: 963256 - DNA, 15 bp, Homo sapiens
aaagaataatacaac

SEQ ID NO: 963257 - DNA, 15 bp, Homo sapiens
aagaataatacaact

SEQ ID NO: 963258 - DNA, 15 bp, Homo sapiens
agaataatacaactc

SEQ ID NO: 963259 - DNA, 15 bp, Homo sapiens
gaataatacaactca

SEQ ID NO: 963260 - DNA, 15 bp, Homo sapiens
aataatacaactcac

SEQ ID NO: 963261 - DNA, 15 bp, Homo sapiens
ataatacaactcaca

SEQ ID NO: 963262 - DNA, 15 bp, Homo sapiens
taatacaactcacat

SEQ ID NO: 963263 - DNA, 15 bp, Homo sapiens
aatacaactcacatt

SEQ ID NO: 963264 - DNA, 15 bp, Homo sapiens
atacaactcacattt

SEQ ID NO: 963265 - DNA, 15 bp, Homo sapiens
tacaactcacatttc

SEQ ID NO: 963266 - DNA, 15 bp, Homo sapiens
acaactcacatttct

SEQ ID NO: 963267 - DNA, 15 bp, Homo sapiens
caactcacatttctc

SEQ ID NO: 963268 - DNA, 15 bp, Homo sapiens
aactcacatttctcc

SEQ ID NO: 963269 - DNA, 15 bp, Homo sapiens
actcacatttctcct

SEQ ID NO: 963270 - DNA, 15 bp, Homo sapiens
ctcacatttctcctt

SEQ ID NO: 963271 - DNA, 15 bp, Homo sapiens
tcacatttctccttt

SEQ ID NO: 963272 - DNA, 15 bp, Homo sapiens
cacatttctcctttg

SEQ ID NO: 963273 - DNA, 15 bp, Homo sapiens
acatttctcctttgt

SEQ ID NO: 963274 - DNA, 15 bp, Homo sapiens
catttctcctttgtt

SEQ ID NO: 963275 - DNA, 15 bp, Homo sapiens
atttctcctttgttc

SEQ ID NO: 963276 - DNA, 15 bp, Homo sapiens
tttctcctttgttct

SEQ ID NO: 963277 - DNA, 15 bp, Homo sapiens
ttctcctttgttctt

SEQ ID NO: 963278 - DNA, 15 bp, Homo sapiens
tctcctttgttcttg

SEQ ID NO: 963279 - DNA, 15 bp, Homo sapiens
ctcctttgttcttgt

SEQ ID NO: 963280 - DNA, 15 bp, Homo sapiens
tcctttgttcttgtc

SEQ ID NO: 963281 - DNA, 15 bp, Homo sapiens
cctttgttcttgtct

SEQ ID NO: 963282 - DNA, 15 bp, Homo sapiens
ctttgttcttgtctt

SEQ ID NO: 963283 - DNA, 15 bp, Homo sapiens
tttgttcttgtcttt

SEQ ID NO: 963284 - DNA, 15 bp, Homo sapiens
ttgttcttgtctttg

SEQ ID NO: 963285 - DNA, 15 bp, Homo sapiens
tgttcttgtctttga

SEQ ID NO: 963286 - DNA, 15 bp, Homo sapiens
gttcttgtctttgag

SEQ ID NO: 963287 - DNA, 15 bp, Homo sapiens
ttcttgtctttgagc

SEQ ID NO: 963288 - DNA, 15 bp, Homo sapiens
tcttgtctttgagcc

SEQ ID NO: 963289 - DNA, 15 bp, Homo sapiens
cttgtctttgagcca

SEQ ID NO: 963290 - DNA, 15 bp, Homo sapiens
ttgtctttgagccac

SEQ ID NO: 963291 - DNA, 15 bp, Homo sapiens
tgtctttgagccact

SEQ ID NO: 963292 - DNA, 15 bp, Homo sapiens
gtctttgagccactg

SEQ ID NO: 963293 - DNA, 15 bp, Homo sapiens
tctttgagccactga

SEQ ID NO: 963294 - DNA, 15 bp, Homo sapiens
ctttgagccactgat

SEQ ID NO: 963295 - DNA, 15 bp, Homo sapiens
tttgagccactgatg

SEQ ID NO: 963296 - DNA, 15 bp, Homo sapiens
ttgagccactgatgt

SEQ ID NO: 963297 - DNA, 15 bp, Homo sapiens
tgagccactgatgta

SEQ ID NO: 963298 - DNA, 15 bp, Homo sapiens
gagccactgatgtag

SEQ ID NO: 963299 - DNA, 15 bp, Homo sapiens
agccactgatgtagt

SEQ ID NO: 963300 - DNA, 15 bp, Homo sapiens
gccactgatgtagtg

SEQ ID NO: 963301 - DNA, 15 bp, Homo sapiens
ccactgatgtagtgt

SEQ ID NO: 963302 - DNA, 15 bp, Homo sapiens
cactgatgtagtgtg

SEQ ID NO: 963303 - DNA, 15 bp, Homo sapiens
actgatgtagtgtgt

SEQ ID NO: 963304 - DNA, 15 bp, Homo sapiens
ctgatgtagtgtgtg

SEQ ID NO: 963305 - DNA, 15 bp, Homo sapiens
tgatgtagtgtgtgg

SEQ ID NO: 963306 - DNA, 15 bp, Homo sapiens
gatgtagtgtgtggc

SEQ ID NO: 963307 - DNA, 15 bp, Homo sapiens
atgtagtgtgtggct

SEQ ID NO: 963308 - DNA, 15 bp, Homo sapiens
tgtagtgtgtggctg

SEQ ID NO: 963309 - DNA, 15 bp, Homo sapiens
gtagtgtgtggctgt

SEQ ID NO: 963310 - DNA, 15 bp, Homo sapiens
tagtgtgtggctgtt

SEQ ID NO: 963311 - DNA, 15 bp, Homo sapiens
agtgtgtggctgttg

SEQ ID NO: 963312 - DNA, 15 bp, Homo sapiens
gtgtgtggctgttga

SEQ ID NO: 963313 - DNA, 15 bp, Homo sapiens
tgtgtggctgttgaa

SEQ ID NO: 963314 - DNA, 15 bp, Homo sapiens
gtgtggctgttgaac

SEQ ID NO: 963315 - DNA, 15 bp, Homo sapiens
tgtggctgttgaact

SEQ ID NO: 963316 - DNA, 15 bp, Homo sapiens
gtggctgttgaactg

SEQ ID NO: 963317 - DNA, 15 bp, Homo sapiens
tggctgttgaactgc

SEQ ID NO: 963318 - DNA, 15 bp, Homo sapiens
ggctgttgaactgca

SEQ ID NO: 963319 - DNA, 15 bp, Homo sapiens
gctgttgaactgcag

SEQ ID NO: 963320 - DNA, 15 bp, Homo sapiens
ctgttgaactgcagt

SEQ ID NO: 963321 - DNA, 15 bp, Homo sapiens
tgttgaactgcagtg

SEQ ID NO: 963322 - DNA, 15 bp, Homo sapiens
gttgaactgcagtgc

SEQ ID NO: 963323 - DNA, 15 bp, Homo sapiens
ttgaactgcagtgca

SEQ ID NO: 963324 - DNA, 15 bp, Homo sapiens
tgaactgcagtgcac

SEQ ID NO: 963325 - DNA, 15 bp, Homo sapiens
gaactgcagtgcacc

SEQ ID NO: 963326 - DNA, 15 bp, Homo sapiens
aactgcagtgcacct

SEQ ID NO: 963327 - DNA, 15 bp, Homo sapiens
actgcagtgcacctt

SEQ ID NO: 963328 - DNA, 15 bp, Homo sapiens
ctgcagtgcaccttt

SEQ ID NO: 963329 - DNA, 15 bp, Homo sapiens
tgcagtgcacctttc

SEQ ID NO: 963330 - DNA, 15 bp, Homo sapiens
gcagtgcacctttca

SEQ ID NO: 963331 - DNA, 15 bp, Homo sapiens
cagtgcacctttcaa

SEQ ID NO: 963332 - DNA, 15 bp, Homo sapiens
agtgcacctttcaag

SEQ ID NO: 963333 - DNA, 15 bp, Homo sapiens
gtgcacctttcaagc

SEQ ID NO: 963334 - DNA, 15 bp, Homo sapiens
tgcacctttcaagcc

SEQ ID NO: 963335 - DNA, 15 bp, Homo sapiens
gcacctttcaagccg

SEQ ID NO: 963336 - DNA, 15 bp, Homo sapiens
cacctttcaagccgc

SEQ ID NO: 963337 - DNA, 15 bp, Homo sapiens
acctttcaagccgcc

SEQ ID NO: 963338 - DNA, 15 bp, Homo sapiens
cctttcaagccgcct

SEQ ID NO: 963339 - DNA, 15 bp, Homo sapiens
ctttcaagccgcctt

SEQ ID NO: 963340 - DNA, 15 bp, Homo sapiens
tttcaagccgccttt

SEQ ID NO: 963341 - DNA, 15 bp, Homo sapiens
ttcaagccgcctttg

SEQ ID NO: 963342 - DNA, 15 bp, Homo sapiens
tcaagccgcctttgc

SEQ ID NO: 963343 - DNA, 15 bp, Homo sapiens
caagccgcctttgca

SEQ ID NO: 963344 - DNA, 15 bp, Homo sapiens
aagccgcctttgcac

SEQ ID NO: 963345 - DNA, 15 bp, Homo sapiens
agccgcctttgcact

SEQ ID NO: 963346 - DNA, 15 bp, Homo sapiens
gccgcctttgcactg

SEQ ID NO: 963347 - DNA, 15 bp, Homo sapiens
ccgcctttgcactga

SEQ ID NO: 963348 - DNA, 15 bp, Homo sapiens
cgcctttgcactgaa

SEQ ID NO: 963349 - DNA, 15 bp, Homo sapiens
gcctttgcactgaat

SEQ ID NO: 963350 - DNA, 15 bp, Homo sapiens
cctttgcactgaatt

SEQ ID NO: 963351 - DNA, 15 bp, Homo sapiens
ctttgcactgaattt

SEQ ID NO: 963352 - DNA, 15 bp, Homo sapiens
tttgcactgaatttg

SEQ ID NO: 963353 - DNA, 15 bp, Homo sapiens
ttgcactgaatttgc

SEQ ID NO: 963354 - DNA, 15 bp, Homo sapiens
tgcactgaatttgca

SEQ ID NO: 963355 - DNA, 15 bp, Homo sapiens
gcactgaatttgcat

SEQ ID NO: 963356 - DNA, 15 bp, Homo sapiens
cactgaatttgcata

SEQ ID NO: 963357 - DNA, 15 bp, Homo sapiens
actgaatttgcataa

SEQ ID NO: 963358 - DNA, 15 bp, Homo sapiens
ctgaatttgcataat

SEQ ID NO: 963359 - DNA, 15 bp, Homo sapiens
tgaatttgcataata

SEQ ID NO: 963360 - DNA, 15 bp, Homo sapiens
gaatttgcataatag

SEQ ID NO: 963361 - DNA, 15 bp, Homo sapiens
aatttgcataatagt

SEQ ID NO: 963362 - DNA, 15 bp, Homo sapiens
atttgcataatagtg

SEQ ID NO: 963363 - DNA, 15 bp, Homo sapiens
tttgcataatagtgt

SEQ ID NO: 963364 - DNA, 15 bp, Homo sapiens
ttgcataatagtgtg

SEQ ID NO: 963365 - DNA, 15 bp, Homo sapiens
tgcataatagtgtga

SEQ ID NO: 963366 - DNA, 15 bp, Homo sapiens
gcataatagtgtgag

SEQ ID NO: 963367 - DNA, 15 bp, Homo sapiens
cataatagtgtgaga

SEQ ID NO: 963368 - DNA, 15 bp, Homo sapiens
ataatagtgtgagaa

SEQ ID NO: 963369 - DNA, 15 bp, Homo sapiens
taatagtgtgagaat

SEQ ID NO: 963370 - DNA, 15 bp, Homo sapiens
aatagtgtgagaatt

SEQ ID NO: 963371 - DNA, 15 bp, Homo sapiens
atagtgtgagaattt

SEQ ID NO: 963372 - DNA, 15 bp, Homo sapiens
tagtgtgagaatttc

SEQ ID NO: 963373 - DNA, 15 bp, Homo sapiens
agtgtgagaatttcg

SEQ ID NO: 963374 - DNA, 15 bp, Homo sapiens
gtgtgagaatttcgc

SEQ ID NO: 963375 - DNA, 15 bp, Homo sapiens
tgtgagaatttcgca

SEQ ID NO: 963376 - DNA, 15 bp, Homo sapiens
gtgagaatttcgcac

SEQ ID NO: 963377 - DNA, 15 bp, Homo sapiens
tgagaatttcgcacc

SEQ ID NO: 963378 - DNA, 15 bp, Homo sapiens
gagaatttcgcacca

SEQ ID NO: 963379 - DNA, 15 bp, Homo sapiens
agaatttcgcaccac

SEQ ID NO: 963380 - DNA, 15 bp, Homo sapiens
gaatttcgcaccacc

SEQ ID NO: 963381 - DNA, 15 bp, Homo sapiens
aatttcgcaccacct

SEQ ID NO: 963382 - DNA, 15 bp, Homo sapiens
atttcgcaccacctc

SEQ ID NO: 963383 - DNA, 15 bp, Homo sapiens
tttcgcaccacctca

SEQ ID NO: 963384 - DNA, 15 bp, Homo sapiens
ttcgcaccacctcaa

SEQ ID NO: 963385 - DNA, 15 bp, Homo sapiens
tcgcaccacctcaat

SEQ ID NO: 963386 - DNA, 15 bp, Homo sapiens
cgcaccacctcaata

SEQ ID NO: 963387 - DNA, 15 bp, Homo sapiens
gcaccacctcaataa

SEQ ID NO: 963388 - DNA, 15 bp, Homo sapiens
caccacctcaataag

SEQ ID NO: 963389 - DNA, 15 bp, Homo sapiens
accacctcaataagt

SEQ ID NO: 963390 - DNA, 15 bp, Homo sapiens
ccacctcaataagtc

SEQ ID NO: 963391 - DNA, 15 bp, Homo sapiens
cacctcaataagtcc

SEQ ID NO: 963392 - DNA, 15 bp, Homo sapiens
acctcaataagtccc

SEQ ID NO: 963393 - DNA, 15 bp, Homo sapiens
cctcaataagtccca

SEQ ID NO: 963394 - DNA, 15 bp, Homo sapiens
ctcaataagtcccac

SEQ ID NO: 963395 - DNA, 15 bp, Homo sapiens
tcaataagtcccaca

SEQ ID NO: 963396 - DNA, 15 bp, Homo sapiens
caataagtcccacac

SEQ ID NO: 963397 - DNA, 15 bp, Homo sapiens
aataagtcccacaca

SEQ ID NO: 963398 - DNA, 15 bp, Homo sapiens
ataagtcccacacag

SEQ ID NO: 963399 - DNA, 15 bp, Homo sapiens
taagtcccacacagt

SEQ ID NO: 963400 - DNA, 15 bp, Homo sapiens
aagtcccacacagtc

SEQ ID NO: 963401 - DNA, 15 bp, Homo sapiens
agtcccacacagtca

SEQ ID NO: 963402 - DNA, 15 bp, Homo sapiens
gtcccacacagtcac

SEQ ID NO: 963403 - DNA, 15 bp, Homo sapiens
tcccacacagtcacc

SEQ ID NO: 963404 - DNA, 15 bp, Homo sapiens
cccacacagtcaccg

SEQ ID NO: 963405 - DNA, 15 bp, Homo sapiens
ccacacagtcaccga

SEQ ID NO: 963406 - DNA, 15 bp, Homo sapiens
cacacagtcaccgat

SEQ ID NO: 963407 - DNA, 15 bp, Homo sapiens
acacagtcaccgatt

SEQ ID NO: 963408 - DNA, 15 bp, Homo sapiens
cacagtcaccgattg

SEQ ID NO: 963409 - DNA, 15 bp, Homo sapiens
acagtcaccgattga

SEQ ID NO: 963410 - DNA, 15 bp, Homo sapiens
cagtcaccgattgac

SEQ ID NO: 963411 - DNA, 15 bp, Homo sapiens
agtcaccgattgaca

SEQ ID NO: 963412 - DNA, 15 bp, Homo sapiens
gtcaccgattgacag

SEQ ID NO: 963413 - DNA, 15 bp, Homo sapiens
tcaccgattgacaga

SEQ ID NO: 963414 - DNA, 15 bp, Homo sapiens
caccgattgacagac

SEQ ID NO: 963415 - DNA, 15 bp, Homo sapiens
accgattgacagaca

SEQ ID NO: 963416 - DNA, 15 bp, Homo sapiens
ccgattgacagacaa

SEQ ID NO: 963417 - DNA, 15 bp, Homo sapiens
cgattgacagacaac

SEQ ID NO: 963418 - DNA, 15 bp, Homo sapiens
gattgacagacaacc

SEQ ID NO: 963419 - DNA, 15 bp, Homo sapiens
attgacagacaacca

SEQ ID NO: 963420 - DNA, 15 bp, Homo sapiens
ttgacagacaaccat

SEQ ID NO: 963421 - DNA, 15 bp, Homo sapiens
tgacagacaaccata

SEQ ID NO: 963422 - DNA, 15 bp, Homo sapiens
gacagacaaccataa

SEQ ID NO: 963423 - DNA, 15 bp, Homo sapiens
acagacaaccataag

SEQ ID NO: 963424 - DNA, 15 bp, Homo sapiens
cagacaaccataagg

SEQ ID NO: 963425 - DNA, 15 bp, Homo sapiens
agacaaccataaggt

SEQ ID NO: 963426 - DNA, 15 bp, Homo sapiens
gacaaccataaggta

SEQ ID NO: 963427 - DNA, 15 bp, Homo sapiens
acaaccataaggtaa

SEQ ID NO: 963428 - DNA, 15 bp, Homo sapiens
caaccataaggtaac

SEQ ID NO: 963429 - DNA, 15 bp, Homo sapiens
aaccataaggtaaca

SEQ ID NO: 963430 - DNA, 15 bp, Homo sapiens
accataaggtaacat

SEQ ID NO: 963431 - DNA, 15 bp, Homo sapiens
ccataaggtaacatt

SEQ ID NO: 963432 - DNA, 15 bp, Homo sapiens
cataaggtaacattc

SEQ ID NO: 963433 - DNA, 15 bp, Homo sapiens
ataaggtaacattct

SEQ ID NO: 963434 - DNA, 15 bp, Homo sapiens
taaggtaacattctg

SEQ ID NO: 963435 - DNA, 15 bp, Homo sapiens
aaggtaacattctga

SEQ ID NO: 963436 - DNA, 15 bp, Homo sapiens
aggtaacattctgaa

SEQ ID NO: 963437 - DNA, 15 bp, Homo sapiens
ggtaacattctgaaa

SEQ ID NO: 963438 - DNA, 15 bp, Homo sapiens
gtaacattctgaaag

SEQ ID NO: 963439 - DNA, 15 bp, Homo sapiens
taacattctgaaaga

SEQ ID NO: 963440 - DNA, 15 bp, Homo sapiens
aacattctgaaagag

SEQ ID NO: 963441 - DNA, 15 bp, Homo sapiens
acattctgaaagagg

SEQ ID NO: 963442 - DNA, 15 bp, Homo sapiens
cattctgaaagagga

SEQ ID NO: 963443 - DNA, 15 bp, Homo sapiens
attctgaaagaggag

SEQ ID NO: 963444 - DNA, 15 bp, Homo sapiens
ttctgaaagaggagt

SEQ ID NO: 963445 - DNA, 15 bp, Homo sapiens
tctgaaagaggagta

SEQ ID NO: 963446 - DNA, 15 bp, Homo sapiens
ctgaaagaggagtaa

SEQ ID NO: 963447 - DNA, 15 bp, Homo sapiens
tgaaagaggagtaac

SEQ ID NO: 963448 - DNA, 15 bp, Homo sapiens
gaaagaggagtaaca

SEQ ID NO: 963449 - DNA, 15 bp, Homo sapiens
aaagaggagtaacac

SEQ ID NO: 963450 - DNA, 15 bp, Homo sapiens
aagaggagtaacacg

SEQ ID NO: 963451 - DNA, 15 bp, Homo sapiens
agaggagtaacacgt

SEQ ID NO: 963452 - DNA, 15 bp, Homo sapiens
gaggagtaacacgtt

SEQ ID NO: 963453 - DNA, 15 bp, Homo sapiens
aggagtaacacgttt

SEQ ID NO: 963454 - DNA, 15 bp, Homo sapiens
ggagtaacacgttta

SEQ ID NO: 963455 - DNA, 15 bp, Homo sapiens
gagtaacacgtttac

SEQ ID NO: 963456 - DNA, 15 bp, Homo sapiens
agtaacacgtttaca

SEQ ID NO: 963457 - DNA, 15 bp, Homo sapiens
gtaacacgtttacaa

SEQ ID NO: 963458 - DNA, 15 bp, Homo sapiens
taacacgtttacaat

SEQ ID NO: 963459 - DNA, 15 bp, Homo sapiens
aacacgtttacaatt

SEQ ID NO: 963460 - DNA, 15 bp, Homo sapiens
acacgtttacaatta

SEQ ID NO: 963461 - DNA, 15 bp, Homo sapiens
cacgtttacaattaa

SEQ ID NO: 963462 - DNA, 15 bp, Homo sapiens
acgtttacaattaaa

SEQ ID NO: 963463 - DNA, 15 bp, Homo sapiens
cgtttacaattaaat

SEQ ID NO: 963464 - DNA, 15 bp, Homo sapiens
gtttacaattaaatg

SEQ ID NO: 963465 - DNA, 15 bp, Homo sapiens
tttacaattaaatga

SEQ ID NO: 963466 - DNA, 15 bp, Homo sapiens
ttacaattaaatgat

SEQ ID NO: 963467 - DNA, 15 bp, Homo sapiens
tacaattaaatgatg

SEQ ID NO: 963468 - DNA, 15 bp, Homo sapiens
acaattaaatgatgg

SEQ ID NO: 963469 - DNA, 15 bp, Homo sapiens
caattaaatgatgga

SEQ ID NO: 963470 - DNA, 15 bp, Homo sapiens
aattaaatgatggaa

SEQ ID NO: 963471 - DNA, 15 bp, Homo sapiens
attaaatgatggaat

SEQ ID NO: 963472 - DNA, 15 bp, Homo sapiens
ttaaatgatggaatt

SEQ ID NO: 963473 - DNA, 15 bp, Homo sapiens
taaatgatggaattt

SEQ ID NO: 963474 - DNA, 15 bp, Homo sapiens
aaatgatggaatttt

SEQ ID NO: 963475 - DNA, 15 bp, Homo sapiens
aatgatggaatttta

SEQ ID NO: 963476 - DNA, 15 bp, Homo sapiens
atgatggaattttaa

SEQ ID NO: 963477 - DNA, 15 bp, Homo sapiens
tgatggaattttaaa

SEQ ID NO: 963478 - DNA, 15 bp, Homo sapiens
gatggaattttaaaa

SEQ ID NO: 963479 - DNA, 15 bp, Homo sapiens
atggaattttaaaat

SEQ ID NO: 963480 - DNA, 15 bp, Homo sapiens
tggaattttaaaata

SEQ ID NO: 963481 - DNA, 15 bp, Homo sapiens
ggaattttaaaatag

SEQ ID NO: 963482 - DNA, 15 bp, Homo sapiens
gaattttaaaatagc

SEQ ID NO: 963483 - DNA, 15 bp, Homo sapiens
aattttaaaatagca

SEQ ID NO: 963484 - DNA, 15 bp, Homo sapiens
attttaaaatagcaa

SEQ ID NO: 963485 - DNA, 15 bp, Homo sapiens
ttttaaaatagcaaa

SEQ ID NO: 963486 - DNA, 15 bp, Homo sapiens
tttaaaatagcaaat

SEQ ID NO: 963487 - DNA, 15 bp, Homo sapiens
ttaaaatagcaaatg

SEQ ID NO: 963488 - DNA, 15 bp, Homo sapiens
taaaatagcaaatgt

SEQ ID NO: 963489 - DNA, 15 bp, Homo sapiens
aaaatagcaaatgtt

SEQ ID NO: 963490 - DNA, 15 bp, Homo sapiens
aaatagcaaatgttt

SEQ ID NO: 963491 - DNA, 15 bp, Homo sapiens
aatagcaaatgtttt

SEQ ID NO: 963492 - DNA, 15 bp, Homo sapiens
atagcaaatgtttta

SEQ ID NO: 963493 - DNA, 15 bp, Homo sapiens
tagcaaatgttttaa

SEQ ID NO: 963494 - DNA, 15 bp, Homo sapiens
agcaaatgttttaac

SEQ ID NO: 963495 - DNA, 15 bp, Homo sapiens
gcaaatgttttaaca

SEQ ID NO: 963496 - DNA, 15 bp, Homo sapiens
caaatgttttaacag

SEQ ID NO: 963497 - DNA, 15 bp, Homo sapiens
aaatgttttaacagg

SEQ ID NO: 963498 - DNA, 15 bp, Homo sapiens
aatgttttaacaggc

SEQ ID NO: 963499 - DNA, 15 bp, Homo sapiens
atgttttaacaggct

SEQ ID NO: 963500 - DNA, 15 bp, Homo sapiens
tgttttaacaggcta

SEQ ID NO: 963501 - DNA, 15 bp, Homo sapiens
gttttaacaggctaa

SEQ ID NO: 963502 - DNA, 15 bp, Homo sapiens
ttttaacaggctaaa

SEQ ID NO: 963503 - DNA, 15 bp, Homo sapiens
tttaacaggctaaaa

SEQ ID NO: 963504 - DNA, 15 bp, Homo sapiens
ttaacaggctaaaac

SEQ ID NO: 963505 - DNA, 15 bp, Homo sapiens
taacaggctaaaaca

SEQ ID NO: 963506 - DNA, 15 bp, Homo sapiens
aacaggctaaaacat

SEQ ID NO: 963507 - DNA, 15 bp, Homo sapiens
acaggctaaaacatg

SEQ ID NO: 963508 - DNA, 15 bp, Homo sapiens
caggctaaaacatga

SEQ ID NO: 963509 - DNA, 15 bp, Homo sapiens
aggctaaaacatgag

SEQ ID NO: 963510 - DNA, 15 bp, Homo sapiens
ggctaaaacatgagt

SEQ ID NO: 963511 - DNA, 15 bp, Homo sapiens
gctaaaacatgagta

SEQ ID NO: 963512 - DNA, 15 bp, Homo sapiens
ctaaaacatgagtat

SEQ ID NO: 963513 - DNA, 15 bp, Homo sapiens
taaaacatgagtatt

SEQ ID NO: 963514 - DNA, 15 bp, Homo sapiens
aaaacatgagtattt

SEQ ID NO: 963515 - DNA, 15 bp, Homo sapiens
aaacatgagtatttt

SEQ ID NO: 963516 - DNA, 15 bp, Homo sapiens
aacatgagtatttta

SEQ ID NO: 963517 - DNA, 15 bp, Homo sapiens
acatgagtattttat

SEQ ID NO: 963518 - DNA, 15 bp, Homo sapiens
catgagtattttatt

SEQ ID NO: 963519 - DNA, 15 bp, Homo sapiens
atgagtattttatta

SEQ ID NO: 963520 - DNA, 15 bp, Homo sapiens
tgagtattttattag

SEQ ID NO: 963521 - DNA, 15 bp, Homo sapiens
gagtattttattagt

SEQ ID NO: 963522 - DNA, 15 bp, Homo sapiens
agtattttattagta

SEQ ID NO: 963523 - DNA, 15 bp, Homo sapiens
gtattttattagtaa

SEQ ID NO: 963524 - DNA, 15 bp, Homo sapiens
tattttattagtaaa

SEQ ID NO: 963525 - DNA, 15 bp, Homo sapiens
attttattagtaaat

SEQ ID NO: 963526 - DNA, 15 bp, Homo sapiens
ttttattagtaaatt

SEQ ID NO: 963527 - DNA, 15 bp, Homo sapiens
tttattagtaaattt

SEQ ID NO: 963528 - DNA, 15 bp, Homo sapiens
ttattagtaaatttg

SEQ ID NO: 963529 - DNA, 15 bp, Homo sapiens
tattagtaaatttgt

SEQ ID NO: 963530 - DNA, 15 bp, Homo sapiens
attagtaaatttgtc

SEQ ID NO: 963531 - DNA, 15 bp, Homo sapiens
ttagtaaatttgtca

SEQ ID NO: 963532 - DNA, 15 bp, Homo sapiens
tagtaaatttgtcat

SEQ ID NO: 963533 - DNA, 15 bp, Homo sapiens
agtaaatttgtcatg

SEQ ID NO: 963534 - DNA, 15 bp, Homo sapiens
gtaaatttgtcatgc

SEQ ID NO: 963535 - DNA, 15 bp, Homo sapiens
taaatttgtcatgca

SEQ ID NO: 963536 - DNA, 15 bp, Homo sapiens
aaatttgtcatgcat

SEQ ID NO: 963537 - DNA, 15 bp, Homo sapiens
aatttgtcatgcatg

SEQ ID NO: 963538 - DNA, 15 bp, Homo sapiens
atttgtcatgcatga

SEQ ID NO: 963539 - DNA, 15 bp, Homo sapiens
tttgtcatgcatgac

SEQ ID NO: 963540 - DNA, 15 bp, Homo sapiens
ttgtcatgcatgacc

SEQ ID NO: 963541 - DNA, 15 bp, Homo sapiens
tgtcatgcatgacct

SEQ ID NO: 963542 - DNA, 15 bp, Homo sapiens
gtcatgcatgacctt

SEQ ID NO: 963543 - DNA, 15 bp, Homo sapiens
tcatgcatgaccttt

SEQ ID NO: 963544 - DNA, 15 bp, Homo sapiens
catgcatgaccttta

SEQ ID NO: 963545 - DNA, 15 bp, Homo sapiens
atgcatgacctttac

SEQ ID NO: 963546 - DNA, 15 bp, Homo sapiens
tgcatgacctttact

SEQ ID NO: 963547 - DNA, 15 bp, Homo sapiens
gcatgacctttactg

SEQ ID NO: 963548 - DNA, 15 bp, Homo sapiens
catgacctttactgc

SEQ ID NO: 963549 - DNA, 15 bp, Homo sapiens
atgacctttactgcc

SEQ ID NO: 963550 - DNA, 15 bp, Homo sapiens
tgacctttactgcct

SEQ ID NO: 963551 - DNA, 15 bp, Homo sapiens
gacctttactgcctt

SEQ ID NO: 963552 - DNA, 15 bp, Homo sapiens
acctttactgccttt

SEQ ID NO: 963553 - DNA, 15 bp, Homo sapiens
cctttactgcctttc

SEQ ID NO: 963554 - DNA, 15 bp, Homo sapiens
ctttactgcctttcc

SEQ ID NO: 963555 - DNA, 15 bp, Homo sapiens
tttactgcctttccc

SEQ ID NO: 963556 - DNA, 15 bp, Homo sapiens
ttactgcctttcccc

SEQ ID NO: 963557 - DNA, 15 bp, Homo sapiens
tactgcctttcccca

SEQ ID NO: 963558 - DNA, 15 bp, Homo sapiens
actgcctttccccaa

SEQ ID NO: 963559 - DNA, 15 bp, Homo sapiens
ctgcctttccccaat

SEQ ID NO: 963560 - DNA, 15 bp, Homo sapiens
tgcctttccccaatt

SEQ ID NO: 963561 - DNA, 15 bp, Homo sapiens
gcctttccccaattt

SEQ ID NO: 963562 - DNA, 15 bp, Homo sapiens
cctttccccaatttt

SEQ ID NO: 963563 - DNA, 15 bp, Homo sapiens
ctttccccaatttta

SEQ ID NO: 963564 - DNA, 15 bp, Homo sapiens
tttccccaattttaa

SEQ ID NO: 963565 - DNA, 15 bp, Homo sapiens
ttccccaattttaat

SEQ ID NO: 963566 - DNA, 15 bp, Homo sapiens
tccccaattttaatt

SEQ ID NO: 963567 - DNA, 15 bp, Homo sapiens
ccccaattttaattt

SEQ ID NO: 963568 - DNA, 15 bp, Homo sapiens
cccaattttaatttt

SEQ ID NO: 963569 - DNA, 15 bp, Homo sapiens
ccaattttaattttc

SEQ ID NO: 963570 - DNA, 15 bp, Homo sapiens
caattttaattttct

SEQ ID NO: 963571 - DNA, 15 bp, Homo sapiens
aattttaattttctt

SEQ ID NO: 963572 - DNA, 15 bp, Homo sapiens
attttaattttcttt

SEQ ID NO: 963573 - DNA, 15 bp, Homo sapiens
ttttaattttctttt

SEQ ID NO: 963574 - DNA, 15 bp, Homo sapiens
tttaattttcttttt

SEQ ID NO: 963575 - DNA, 15 bp, Homo sapiens
ttaattttctttttt

SEQ ID NO: 963576 - DNA, 15 bp, Homo sapiens
taattttctttttta

SEQ ID NO: 963577 - DNA, 15 bp, Homo sapiens
aattttcttttttat

SEQ ID NO: 963578 - DNA, 15 bp, Homo sapiens
attttcttttttatg

SEQ ID NO: 963579 - DNA, 15 bp, Homo sapiens
ttttcttttttatgg

SEQ ID NO: 963580 - DNA, 15 bp, Homo sapiens
tttcttttttatggt

SEQ ID NO: 963581 - DNA, 15 bp, Homo sapiens
ttcttttttatggtg

SEQ ID NO: 963582 - DNA, 15 bp, Homo sapiens
tcttttttatggtgt

SEQ ID NO: 963583 - DNA, 15 bp, Homo sapiens
cttttttatggtgtg

SEQ ID NO: 963584 - DNA, 15 bp, Homo sapiens
ttttttatggtgtga

SEQ ID NO: 963585 - DNA, 15 bp, Homo sapiens
tttttatggtgtgat

SEQ ID NO: 963586 - DNA, 15 bp, Homo sapiens
ttttatggtgtgata

SEQ ID NO: 963587 - DNA, 15 bp, Homo sapiens
tttatggtgtgataa

SEQ ID NO: 963588 - DNA, 15 bp, Homo sapiens
ttatggtgtgataaa

SEQ ID NO: 963589 - DNA, 15 bp, Homo sapiens
tatggtgtgataaac

SEQ ID NO: 963590 - DNA, 15 bp, Homo sapiens
atggtgtgataaaca

SEQ ID NO: 963591 - DNA, 15 bp, Homo sapiens
tggtgtgataaacat

SEQ ID NO: 963592 - DNA, 15 bp, Homo sapiens
ggtgtgataaacata

SEQ ID NO: 963593 - DNA, 15 bp, Homo sapiens
gtgtgataaacatac

SEQ ID NO: 963594 - DNA, 15 bp, Homo sapiens
tgtgataaacatact

SEQ ID NO: 963595 - DNA, 15 bp, Homo sapiens
gtgataaacatactc

SEQ ID NO: 963596 - DNA, 15 bp, Homo sapiens
tgataaacatactcc

SEQ ID NO: 963597 - DNA, 15 bp, Homo sapiens
gataaacatactcct

SEQ ID NO: 963598 - DNA, 15 bp, Homo sapiens
ataaacatactcctg

SEQ ID NO: 963599 - DNA, 15 bp, Homo sapiens
taaacatactcctgg

SEQ ID NO: 963600 - DNA, 15 bp, Homo sapiens
aaacatactcctgga

SEQ ID NO: 963601 - DNA, 15 bp, Homo sapiens
aacatactcctggaa

SEQ ID NO: 963602 - DNA, 15 bp, Homo sapiens
acatactcctggaat

SEQ ID NO: 963603 - DNA, 15 bp, Homo sapiens
catactcctggaata

SEQ ID NO: 963604 - DNA, 15 bp, Homo sapiens
atactcctggaataa

SEQ ID NO: 963605 - DNA, 15 bp, Homo sapiens
tactcctggaataat

SEQ ID NO: 963606 - DNA, 15 bp, Homo sapiens
actcctggaataatc

SEQ ID NO: 963607 - DNA, 15 bp, Homo sapiens
ctcctggaataatcc

SEQ ID NO: 963608 - DNA, 15 bp, Homo sapiens
tcctggaataatcct

SEQ ID NO: 963609 - DNA, 15 bp, Homo sapiens
cctggaataatcctc

SEQ ID NO: 963610 - DNA, 15 bp, Homo sapiens
ctggaataatcctca

SEQ ID NO: 963611 - DNA, 15 bp, Homo sapiens
tggaataatcctcaa

SEQ ID NO: 963612 - DNA, 15 bp, Homo sapiens
ggaataatcctcaaa

SEQ ID NO: 963613 - DNA, 15 bp, Homo sapiens
gaataatcctcaaaa

SEQ ID NO: 963614 - DNA, 15 bp, Homo sapiens
aataatcctcaaaat

SEQ ID NO: 963615 - DNA, 15 bp, Homo sapiens
ataatcctcaaaatt

SEQ ID NO: 963616 - DNA, 15 bp, Homo sapiens
taatcctcaaaatta

SEQ ID NO: 963617 - DNA, 15 bp, Homo sapiens
aatcctcaaaattac

SEQ ID NO: 963618 - DNA, 15 bp, Homo sapiens
atcctcaaaattacc

SEQ ID NO: 963619 - DNA, 15 bp, Homo sapiens
tcctcaaaattacct

SEQ ID NO: 963620 - DNA, 15 bp, Homo sapiens
cctcaaaattacctg

SEQ ID NO: 963621 - DNA, 15 bp, Homo sapiens
ctcaaaattacctgt

SEQ ID NO: 963622 - DNA, 15 bp, Homo sapiens
tcaaaattacctgtc

SEQ ID NO: 963623 - DNA, 15 bp, Homo sapiens
caaaattacctgtca

SEQ ID NO: 963624 - DNA, 15 bp, Homo sapiens
aaaattacctgtcat

SEQ ID NO: 963625 - DNA, 15 bp, Homo sapiens
aaattacctgtcatc

SEQ ID NO: 963626 - DNA, 15 bp, Homo sapiens
aattacctgtcatca

SEQ ID NO: 963627 - DNA, 15 bp, Homo sapiens
attacctgtcatcat

SEQ ID NO: 963628 - DNA, 15 bp, Homo sapiens
ttacctgtcatcatt

SEQ ID NO: 963629 - DNA, 15 bp, Homo sapiens
tacctgtcatcattt

SEQ ID NO: 963630 - DNA, 15 bp, Homo sapiens
acctgtcatcattta

SEQ ID NO: 963631 - DNA, 15 bp, Homo sapiens
cctgtcatcatttat

SEQ ID NO: 963632 - DNA, 15 bp, Homo sapiens
ctgtcatcatttatt

SEQ ID NO: 963633 - DNA, 15 bp, Homo sapiens
tgtcatcatttatta

SEQ ID NO: 963634 - DNA, 15 bp, Homo sapiens
gtcatcatttattat

SEQ ID NO: 963635 - DNA, 15 bp, Homo sapiens
tcatcatttattata

SEQ ID NO: 963636 - DNA, 15 bp, Homo sapiens
catcatttattataa

SEQ ID NO: 963637 - DNA, 15 bp, Homo sapiens
atcatttattataac

SEQ ID NO: 963638 - DNA, 15 bp, Homo sapiens
tcatttattataacc

SEQ ID NO: 963639 - DNA, 15 bp, Homo sapiens
catttattataacct

SEQ ID NO: 963640 - DNA, 15 bp, Homo sapiens
atttattataacctt

SEQ ID NO: 963641 - DNA, 15 bp, Homo sapiens
tttattataaccttc

SEQ ID NO: 963642 - DNA, 15 bp, Homo sapiens
ttattataaccttca

SEQ ID NO: 963643 - DNA, 15 bp, Homo sapiens
tattataaccttcaa

SEQ ID NO: 963644 - DNA, 15 bp, Homo sapiens
attataaccttcaac

SEQ ID NO: 963645 - DNA, 15 bp, Homo sapiens
ttataaccttcaact

SEQ ID NO: 963646 - DNA, 15 bp, Homo sapiens
tataaccttcaactg

SEQ ID NO: 963647 - DNA, 15 bp, Homo sapiens
ataaccttcaactga

SEQ ID NO: 963648 - DNA, 15 bp, Homo sapiens
taaccttcaactgag

SEQ ID NO: 963649 - DNA, 15 bp, Homo sapiens
aaccttcaactgaga

SEQ ID NO: 963650 - DNA, 15 bp, Homo sapiens
accttcaactgagaa

SEQ ID NO: 963651 - DNA, 15 bp, Homo sapiens
ccttcaactgagaaa

SEQ ID NO: 963652 - DNA, 15 bp, Homo sapiens
cttcaactgagaaag

SEQ ID NO: 963653 - DNA, 15 bp, Homo sapiens
ttcaactgagaaagc

SEQ ID NO: 963654 - DNA, 15 bp, Homo sapiens
tcaactgagaaagca

SEQ ID NO: 963655 - DNA, 15 bp, Homo sapiens
caactgagaaagcac

SEQ ID NO: 963656 - DNA, 15 bp, Homo sapiens
aactgagaaagcact

SEQ ID NO: 963657 - DNA, 15 bp, Homo sapiens
actgagaaagcactg

SEQ ID NO: 963658 - DNA, 15 bp, Homo sapiens
ctgagaaagcactgt

SEQ ID NO: 963659 - DNA, 15 bp, Homo sapiens
tgagaaagcactgta

SEQ ID NO: 963660 - DNA, 15 bp, Homo sapiens
gagaaagcactgtat

SEQ ID NO: 963661 - DNA, 15 bp, Homo sapiens
agaaagcactgtatt

SEQ ID NO: 963662 - DNA, 15 bp, Homo sapiens
gaaagcactgtattt

SEQ ID NO: 963663 - DNA, 15 bp, Homo sapiens
aaagcactgtatttt

SEQ ID NO: 963664 - DNA, 15 bp, Homo sapiens
aagcactgtattttt

SEQ ID NO: 963665 - DNA, 15 bp, Homo sapiens
agcactgtattttta

SEQ ID NO: 963666 - DNA, 15 bp, Homo sapiens
gcactgtatttttat

SEQ ID NO: 963667 - DNA, 15 bp, Homo sapiens
cactgtatttttatc

SEQ ID NO: 963668 - DNA, 15 bp, Homo sapiens
actgtatttttatca

SEQ ID NO: 963669 - DNA, 15 bp, Homo sapiens
ctgtatttttatcag

SEQ ID NO: 963670 - DNA, 15 bp, Homo sapiens
tgtatttttatcaga

SEQ ID NO: 963671 - DNA, 15 bp, Homo sapiens
gtatttttatcagaa

SEQ ID NO: 963672 - DNA, 15 bp, Homo sapiens
tatttttatcagaaa

SEQ ID NO: 963673 - DNA, 15 bp, Homo sapiens
atttttatcagaaaa

SEQ ID NO: 963674 - DNA, 15 bp, Homo sapiens
tttttatcagaaaag

SEQ ID NO: 963675 - DNA, 15 bp, Homo sapiens
ttttatcagaaaaga

SEQ ID NO: 963676 - DNA, 15 bp, Homo sapiens
tttatcagaaaagaa

SEQ ID NO: 963677 - DNA, 15 bp, Homo sapiens
ttatcagaaaagaat

SEQ ID NO: 963678 - DNA, 15 bp, Homo sapiens
tatcagaaaagaatt

SEQ ID NO: 963679 - DNA, 15 bp, Homo sapiens
atcagaaaagaatta

SEQ ID NO: 963680 - DNA, 15 bp, Homo sapiens
tcagaaaagaattaa

SEQ ID NO: 963681 - DNA, 15 bp, Homo sapiens
cagaaaagaattaag

SEQ ID NO: 963682 - DNA, 15 bp, Homo sapiens
agaaaagaattaaga

SEQ ID NO: 963683 - DNA, 15 bp, Homo sapiens
gaaaagaattaagaa

SEQ ID NO: 963684 - DNA, 15 bp, Homo sapiens
aaaagaattaagaaa

SEQ ID NO: 963685 - DNA, 15 bp, Homo sapiens
aaagaattaagaaaa

SEQ ID NO: 963686 - DNA, 15 bp, Homo sapiens
aagaattaagaaaat

SEQ ID NO: 963687 - DNA, 15 bp, Homo sapiens
agaattaagaaaatt

SEQ ID NO: 963688 - DNA, 15 bp, Homo sapiens
gaattaagaaaatta

SEQ ID NO: 963689 - DNA, 15 bp, Homo sapiens
aattaagaaaattat

SEQ ID NO: 963690 - DNA, 15 bp, Homo sapiens
attaagaaaattatt

SEQ ID NO: 963691 - DNA, 15 bp, Homo sapiens
ttaagaaaattattg

SEQ ID NO: 963692 - DNA, 15 bp, Homo sapiens
taagaaaattattgt

SEQ ID NO: 963693 - DNA, 15 bp, Homo sapiens
aagaaaattattgtg

SEQ ID NO: 963694 - DNA, 15 bp, Homo sapiens
agaaaattattgtgg

SEQ ID NO: 963695 - DNA, 15 bp, Homo sapiens
gaaaattattgtggc

SEQ ID NO: 963696 - DNA, 15 bp, Homo sapiens
aaaattattgtggca

SEQ ID NO: 963697 - DNA, 15 bp, Homo sapiens
aaattattgtggcaa

SEQ ID NO: 963698 - DNA, 15 bp, Homo sapiens
aattattgtggcaat

SEQ ID NO: 963699 - DNA, 15 bp, Homo sapiens
attattgtggcaatt

SEQ ID NO: 963700 - DNA, 15 bp, Homo sapiens
ttattgtggcaatta

SEQ ID NO: 963701 - DNA, 15 bp, Homo sapiens
tattgtggcaattaa

SEQ ID NO: 963702 - DNA, 15 bp, Homo sapiens
attgtggcaattaaa

SEQ ID NO: 963703 - DNA, 15 bp, Homo sapiens
ttgtggcaattaaaa

SEQ ID NO: 963704 - DNA, 15 bp, Homo sapiens
tgtggcaattaaaat

SEQ ID NO: 963705 - DNA, 15 bp, Homo sapiens
gtggcaattaaaatt

SEQ ID NO: 963706 - DNA, 15 bp, Homo sapiens
tggcaattaaaattt

SEQ ID NO: 963707 - DNA, 15 bp, Homo sapiens
ggcaattaaaatttt

SEQ ID NO: 963708 - DNA, 15 bp, Homo sapiens
gcaattaaaatttta

SEQ ID NO: 963709 - DNA, 15 bp, Homo sapiens
caattaaaattttac

SEQ ID NO: 963710 - DNA, 15 bp, Homo sapiens
aattaaaattttaca

SEQ ID NO: 963711 - DNA, 15 bp, Homo sapiens
attaaaattttacaa

SEQ ID NO: 963712 - DNA, 15 bp, Homo sapiens
ttaaaattttacaaa

SEQ ID NO: 963713 - DNA, 15 bp, Homo sapiens
taaaattttacaaac

SEQ ID NO: 963714 - DNA, 15 bp, Homo sapiens
aaaattttacaaaca

SEQ ID NO: 963715 - DNA, 15 bp, Homo sapiens
aaattttacaaacat

SEQ ID NO: 963716 - DNA, 15 bp, Homo sapiens
aattttacaaacatt

SEQ ID NO: 963717 - DNA, 15 bp, Homo sapiens
attttacaaacattt

SEQ ID NO: 963718 - DNA, 15 bp, Homo sapiens
ttttacaaacattta

SEQ ID NO: 963719 - DNA, 15 bp, Homo sapiens
tttacaaacatttat

SEQ ID NO: 963720 - DNA, 15 bp, Homo sapiens
ttacaaacatttatg

SEQ ID NO: 963721 - DNA, 15 bp, Homo sapiens
tacaaacatttatga

SEQ ID NO: 963722 - DNA, 15 bp, Homo sapiens
acaaacatttatgat

SEQ ID NO: 963723 - DNA, 15 bp, Homo sapiens
caaacatttatgatt

SEQ ID NO: 963724 - DNA, 15 bp, Homo sapiens
aaacatttatgattt

SEQ ID NO: 963725 - DNA, 15 bp, Homo sapiens
aacatttatgatttt

SEQ ID NO: 963726 - DNA, 15 bp, Homo sapiens
acatttatgatttta

SEQ ID NO: 963727 - DNA, 15 bp, Homo sapiens
catttatgattttaa

SEQ ID NO: 963728 - DNA, 15 bp, Homo sapiens
atttatgattttaaa

SEQ ID NO: 963729 - DNA, 15 bp, Homo sapiens
tttatgattttaaaa

SEQ ID NO: 963730 - DNA, 15 bp, Homo sapiens
ttatgattttaaaaa

SEQ ID NO: 963731 - DNA, 15 bp, Homo sapiens
tatgattttaaaaat

SEQ ID NO: 963732 - DNA, 15 bp, Homo sapiens
atgattttaaaaata

SEQ ID NO: 963733 - DNA, 15 bp, Homo sapiens
tgattttaaaaatat

SEQ ID NO: 963734 - DNA, 15 bp, Homo sapiens
gattttaaaaatatg

SEQ ID NO: 963735 - DNA, 15 bp, Homo sapiens
attttaaaaatatgt

SEQ ID NO: 963736 - DNA, 15 bp, Homo sapiens
ttttaaaaatatgtg

SEQ ID NO: 963737 - DNA, 15 bp, Homo sapiens
tttaaaaatatgtgt

SEQ ID NO: 963738 - DNA, 15 bp, Homo sapiens
ttaaaaatatgtgtt

SEQ ID NO: 963739 - DNA, 15 bp, Homo sapiens
taaaaatatgtgtta

SEQ ID NO: 963740 - DNA, 15 bp, Homo sapiens
aaaaatatgtgttaa

SEQ ID NO: 963741 - DNA, 15 bp, Homo sapiens
aaaatatgtgttaat

SEQ ID NO: 963742 - DNA, 15 bp, Homo sapiens
aaatatgtgttaatt

SEQ ID NO: 963743 - DNA, 15 bp, Homo sapiens
aatatgtgttaattt

SEQ ID NO: 963744 - DNA, 15 bp, Homo sapiens
atatgtgttaattta

SEQ ID NO: 963745 - DNA, 15 bp, Homo sapiens
tatgtgttaatttaa

SEQ ID NO: 963746 - DNA, 15 bp, Homo sapiens
atgtgttaatttaaa

SEQ ID NO: 963747 - DNA, 15 bp, Homo sapiens
tgtgttaatttaaag

SEQ ID NO: 963748 - DNA, 15 bp, Homo sapiens
gtgttaatttaaaga

SEQ ID NO: 963749 - DNA, 15 bp, Homo sapiens
tgttaatttaaagat

SEQ ID NO: 963750 - DNA, 15 bp, Homo sapiens
gttaatttaaagatg

SEQ ID NO: 963751 - DNA, 15 bp, Homo sapiens
ttaatttaaagatgt

SEQ ID NO: 963752 - DNA, 15 bp, Homo sapiens
taatttaaagatgtt

SEQ ID NO: 963753 - DNA, 15 bp, Homo sapiens
aatttaaagatgttt

SEQ ID NO: 963754 - DNA, 15 bp, Homo sapiens
atttaaagatgttta

SEQ ID NO: 963755 - DNA, 15 bp, Homo sapiens
tttaaagatgtttaa

SEQ ID NO: 963756 - DNA, 15 bp, Homo sapiens
ttaaagatgtttaat

SEQ ID NO: 963757 - DNA, 15 bp, Homo sapiens
taaagatgtttaatt

SEQ ID NO: 963758 - DNA, 15 bp, Homo sapiens
aaagatgtttaattg

SEQ ID NO: 963759 - DNA, 15 bp, Homo sapiens
aagatgtttaattga

SEQ ID NO: 963760 - DNA, 15 bp, Homo sapiens
agatgtttaattgac

SEQ ID NO: 963761 - DNA, 15 bp, Homo sapiens
gatgtttaattgaca

SEQ ID NO: 963762 - DNA, 15 bp, Homo sapiens
atgtttaattgacat

SEQ ID NO: 963763 - DNA, 15 bp, Homo sapiens
tgtttaattgacatc

SEQ ID NO: 963764 - DNA, 15 bp, Homo sapiens
gtttaattgacatcg

SEQ ID NO: 963765 - DNA, 15 bp, Homo sapiens
tttaattgacatcga

SEQ ID NO: 963766 - DNA, 15 bp, Homo sapiens
ttaattgacatcgaa

SEQ ID NO: 963767 - DNA, 15 bp, Homo sapiens
taattgacatcgaaa

SEQ ID NO: 963768 - DNA, 15 bp, Homo sapiens
aattgacatcgaaat

SEQ ID NO: 963769 - DNA, 15 bp, Homo sapiens
attgacatcgaaata

SEQ ID NO: 963770 - DNA, 15 bp, Homo sapiens
ttgacatcgaaataa

SEQ ID NO: 963771 - DNA, 15 bp, Homo sapiens
tgacatcgaaataaa

SEQ ID NO: 963772 - DNA, 15 bp, Homo sapiens
gacatcgaaataaaa

SEQ ID NO: 963773 - DNA, 15 bp, Homo sapiens
acatcgaaataaaac

SEQ ID NO: 963774 - DNA, 15 bp, Homo sapiens
catcgaaataaaact

SEQ ID NO: 963775 - DNA, 15 bp, Homo sapiens
atcgaaataaaactg

SEQ ID NO: 963776 - DNA, 15 bp, Homo sapiens
tcgaaataaaactgt

SEQ ID NO: 963777 - DNA, 15 bp, Homo sapiens
cgaaataaaactgta

SEQ ID NO: 963778 - DNA, 15 bp, Homo sapiens
gaaataaaactgtag

SEQ ID NO: 963779 - DNA, 15 bp, Homo sapiens
aaataaaactgtagg

SEQ ID NO: 963780 - DNA, 15 bp, Homo sapiens
aataaaactgtaggg

SEQ ID NO: 963781 - DNA, 15 bp, Homo sapiens
ataaaactgtagggc

SEQ ID NO: 963782 - DNA, 15 bp, Homo sapiens
taaaactgtagggca

SEQ ID NO: 963783 - DNA, 15 bp, Homo sapiens
aaaactgtagggcag

SEQ ID NO: 963784 - DNA, 15 bp, Homo sapiens
aaactgtagggcaga

SEQ ID NO: 963785 - DNA, 15 bp, Homo sapiens
aactgtagggcagaa

SEQ ID NO: 963786 - DNA, 15 bp, Homo sapiens
actgtagggcagaag

SEQ ID NO: 963787 - DNA, 15 bp, Homo sapiens
ctgtagggcagaagt

SEQ ID NO: 963788 - DNA, 15 bp, Homo sapiens
tgtagggcagaagtt

SEQ ID NO: 963789 - DNA, 15 bp, Homo sapiens
gtagggcagaagttc

SEQ ID NO: 963790 - DNA, 15 bp, Homo sapiens
tagggcagaagttct

SEQ ID NO: 963791 - DNA, 15 bp, Homo sapiens
agggcagaagttctc

SEQ ID NO: 963792 - DNA, 15 bp, Homo sapiens
gggcagaagttctca

SEQ ID NO: 963793 - DNA, 15 bp, Homo sapiens
ggcagaagttctcaa

SEQ ID NO: 963794 - DNA, 15 bp, Homo sapiens
gcagaagttctcaat

SEQ ID NO: 963795 - DNA, 15 bp, Homo sapiens
cagaagttctcaatt

SEQ ID NO: 963796 - DNA, 15 bp, Homo sapiens
agaagttctcaattt

SEQ ID NO: 963797 - DNA, 15 bp, Homo sapiens
gaagttctcaatttt

SEQ ID NO: 963798 - DNA, 15 bp, Homo sapiens
aagttctcaattttg

SEQ ID NO: 963799 - DNA, 15 bp, Homo sapiens
agttctcaattttgg

SEQ ID NO: 963800 - DNA, 15 bp, Homo sapiens
gttctcaattttggt

SEQ ID NO: 963801 - DNA, 15 bp, Homo sapiens
ttctcaattttggtc

SEQ ID NO: 963802 - DNA, 15 bp, Homo sapiens
tctcaattttggtct

SEQ ID NO: 963803 - DNA, 15 bp, Homo sapiens
ctcaattttggtctc

SEQ ID NO: 963804 - DNA, 15 bp, Homo sapiens
tcaattttggtctca

SEQ ID NO: 963805 - DNA, 15 bp, Homo sapiens
caattttggtctcag

SEQ ID NO: 963806 - DNA, 15 bp, Homo sapiens
aattttggtctcagg

SEQ ID NO: 963807 - DNA, 15 bp, Homo sapiens
attttggtctcagga

SEQ ID NO: 963808 - DNA, 15 bp, Homo sapiens
ttttggtctcaggac

SEQ ID NO: 963809 - DNA, 15 bp, Homo sapiens
tttggtctcaggact

SEQ ID NO: 963810 - DNA, 15 bp, Homo sapiens
ttggtctcaggactc

SEQ ID NO: 963811 - DNA, 15 bp, Homo sapiens
tggtctcaggactcc

SEQ ID NO: 963812 - DNA, 15 bp, Homo sapiens
ggtctcaggactcct

SEQ ID NO: 963813 - DNA, 15 bp, Homo sapiens
gtctcaggactcctt

SEQ ID NO: 963814 - DNA, 15 bp, Homo sapiens
tctcaggactccttt

SEQ ID NO: 963815 - DNA, 15 bp, Homo sapiens
ctcaggactccttta

SEQ ID NO: 963816 - DNA, 15 bp, Homo sapiens
tcaggactcctttac

SEQ ID NO: 963817 - DNA, 15 bp, Homo sapiens
caggactcctttaca

SEQ ID NO: 963818 - DNA, 15 bp, Homo sapiens
aggactcctttacac

SEQ ID NO: 963819 - DNA, 15 bp, Homo sapiens
ggactcctttacact

SEQ ID NO: 963820 - DNA, 15 bp, Homo sapiens
gactcctttacactt

SEQ ID NO: 963821 - DNA, 15 bp, Homo sapiens
actcctttacacttg

SEQ ID NO: 963822 - DNA, 15 bp, Homo sapiens
ctcctttacacttgt

SEQ ID NO: 963823 - DNA, 15 bp, Homo sapiens
tcctttacacttgta

SEQ ID NO: 963824 - DNA, 15 bp, Homo sapiens
cctttacacttgtag

SEQ ID NO: 963825 - DNA, 15 bp, Homo sapiens
ctttacacttgtaga

SEQ ID NO: 963826 - DNA, 15 bp, Homo sapiens
tttacacttgtagaa

SEQ ID NO: 963827 - DNA, 15 bp, Homo sapiens
ttacacttgtagaaa

SEQ ID NO: 963828 - DNA, 15 bp, Homo sapiens
tacacttgtagaaat

SEQ ID NO: 963829 - DNA, 15 bp, Homo sapiens
acacttgtagaaatt

SEQ ID NO: 963830 - DNA, 15 bp, Homo sapiens
cacttgtagaaatta

SEQ ID NO: 963831 - DNA, 15 bp, Homo sapiens
acttgtagaaattac

SEQ ID NO: 963832 - DNA, 15 bp, Homo sapiens
cttgtagaaattact

SEQ ID NO: 963833 - DNA, 15 bp, Homo sapiens
ttgtagaaattactg

SEQ ID NO: 963834 - DNA, 15 bp, Homo sapiens
tgtagaaattactga

SEQ ID NO: 963835 - DNA, 15 bp, Homo sapiens
gtagaaattactgag

SEQ ID NO: 963836 - DNA, 15 bp, Homo sapiens
tagaaattactgagg

SEQ ID NO: 963837 - DNA, 15 bp, Homo sapiens
agaaattactgagga

SEQ ID NO: 963838 - DNA, 15 bp, Homo sapiens
gaaattactgaggac

SEQ ID NO: 963839 - DNA, 15 bp, Homo sapiens
aaattactgaggact

SEQ ID NO: 963840 - DNA, 15 bp, Homo sapiens
aattactgaggactc

SEQ ID NO: 963841 - DNA, 15 bp, Homo sapiens
attactgaggactcc

SEQ ID NO: 963842 - DNA, 15 bp, Homo sapiens
ttactgaggactcca

SEQ ID NO: 963843 - DNA, 15 bp, Homo sapiens
tactgaggactccaa

SEQ ID NO: 963844 - DNA, 15 bp, Homo sapiens
actgaggactccaaa

SEQ ID NO: 963845 - DNA, 15 bp, Homo sapiens
ctgaggactccaaag

SEQ ID NO: 963846 - DNA, 15 bp, Homo sapiens
tgaggactccaaaga

SEQ ID NO: 963847 - DNA, 15 bp, Homo sapiens
gaggactccaaagag

SEQ ID NO: 963848 - DNA, 15 bp, Homo sapiens
aggactccaaagagc

SEQ ID NO: 963849 - DNA, 15 bp, Homo sapiens
ggactccaaagagct

SEQ ID NO: 963850 - DNA, 15 bp, Homo sapiens
gactccaaagagctt

SEQ ID NO: 963851 - DNA, 15 bp, Homo sapiens
actccaaagagcttt

SEQ ID NO: 963852 - DNA, 15 bp, Homo sapiens
ctccaaagagctttt

SEQ ID NO: 963853 - DNA, 15 bp, Homo sapiens
tccaaagagctttta

SEQ ID NO: 963854 - DNA, 15 bp, Homo sapiens
ccaaagagcttttag

SEQ ID NO: 963855 - DNA, 15 bp, Homo sapiens
caaagagcttttagt

SEQ ID NO: 963856 - DNA, 15 bp, Homo sapiens
aaagagcttttagtt

SEQ ID NO: 963857 - DNA, 15 bp, Homo sapiens
aagagcttttagtta

SEQ ID NO: 963858 - DNA, 15 bp, Homo sapiens
agagcttttagttat

SEQ ID NO: 963859 - DNA, 15 bp, Homo sapiens
gagcttttagttatg

SEQ ID NO: 963860 - DNA, 15 bp, Homo sapiens
agcttttagttatgt

SEQ ID NO: 963861 - DNA, 15 bp, Homo sapiens
gcttttagttatgtg

SEQ ID NO: 963862 - DNA, 15 bp, Homo sapiens
cttttagttatgtga

SEQ ID NO: 963863 - DNA, 15 bp, Homo sapiens
ttttagttatgtgaa

SEQ ID NO: 963864 - DNA, 15 bp, Homo sapiens
tttagttatgtgaat

SEQ ID NO: 963865 - DNA, 15 bp, Homo sapiens
ttagttatgtgaatt

SEQ ID NO: 963866 - DNA, 15 bp, Homo sapiens
tagttatgtgaatta

SEQ ID NO: 963867 - DNA, 15 bp, Homo sapiens
agttatgtgaattac

SEQ ID NO: 963868 - DNA, 15 bp, Homo sapiens
gttatgtgaattaca

SEQ ID NO: 963869 - DNA, 15 bp, Homo sapiens
ttatgtgaattacat

SEQ ID NO: 963870 - DNA, 15 bp, Homo sapiens
tatgtgaattacatc

SEQ ID NO: 963871 - DNA, 15 bp, Homo sapiens
atgtgaattacatct

SEQ ID NO: 963872 - DNA, 15 bp, Homo sapiens
tgtgaattacatcta

SEQ ID NO: 963873 - DNA, 15 bp, Homo sapiens
gtgaattacatctaa

SEQ ID NO: 963874 - DNA, 15 bp, Homo sapiens
tgaattacatctaat

SEQ ID NO: 963875 - DNA, 15 bp, Homo sapiens
gaattacatctaatg

SEQ ID NO: 963876 - DNA, 15 bp, Homo sapiens
aattacatctaatga

SEQ ID NO: 963877 - DNA, 15 bp, Homo sapiens
attacatctaatgat

SEQ ID NO: 963878 - DNA, 15 bp, Homo sapiens
ttacatctaatgata

SEQ ID NO: 963879 - DNA, 15 bp, Homo sapiens
tacatctaatgatat

SEQ ID NO: 963880 - DNA, 15 bp, Homo sapiens
acatctaatgatatt

SEQ ID NO: 963881 - DNA, 15 bp, Homo sapiens
catctaatgatatta

SEQ ID NO: 963882 - DNA, 15 bp, Homo sapiens
atctaatgatattag

SEQ ID NO: 963883 - DNA, 15 bp, Homo sapiens
tctaatgatattaga

SEQ ID NO: 963884 - DNA, 15 bp, Homo sapiens
ctaatgatattagaa

SEQ ID NO: 963885 - DNA, 15 bp, Homo sapiens
taatgatattagaaa

SEQ ID NO: 963886 - DNA, 15 bp, Homo sapiens
aatgatattagaaat

SEQ ID NO: 963887 - DNA, 15 bp, Homo sapiens
atgatattagaaatt

SEQ ID NO: 963888 - DNA, 15 bp, Homo sapiens
tgatattagaaattg

SEQ ID NO: 963889 - DNA, 15 bp, Homo sapiens
gatattagaaattga

SEQ ID NO: 963890 - DNA, 15 bp, Homo sapiens
atattagaaattgaa

SEQ ID NO: 963891 - DNA, 15 bp, Homo sapiens
tattagaaattgaaa

SEQ ID NO: 963892 - DNA, 15 bp, Homo sapiens
attagaaattgaaat

SEQ ID NO: 963893 - DNA, 15 bp, Homo sapiens
ttagaaattgaaata

SEQ ID NO: 963894 - DNA, 15 bp, Homo sapiens
tagaaattgaaatag

SEQ ID NO: 963895 - DNA, 15 bp, Homo sapiens
agaaattgaaatagg

SEQ ID NO: 963896 - DNA, 15 bp, Homo sapiens
gaaattgaaataggg

SEQ ID NO: 963897 - DNA, 15 bp, Homo sapiens
aaattgaaataggga

SEQ ID NO: 963898 - DNA, 15 bp, Homo sapiens
aattgaaatagggaa

SEQ ID NO: 963899 - DNA, 15 bp, Homo sapiens
attgaaatagggaaa

SEQ ID NO: 963900 - DNA, 15 bp, Homo sapiens
ttgaaatagggaaaa

SEQ ID NO: 963901 - DNA, 15 bp, Homo sapiens
tgaaatagggaaaat

SEQ ID NO: 963902 - DNA, 15 bp, Homo sapiens
gaaatagggaaaata

SEQ ID NO: 963903 - DNA, 15 bp, Homo sapiens
aaatagggaaaataa

SEQ ID NO: 963904 - DNA, 15 bp, Homo sapiens
aatagggaaaataaa

SEQ ID NO: 963905 - DNA, 15 bp, Homo sapiens
atagggaaaataaaa

SEQ ID NO: 963906 - DNA, 15 bp, Homo sapiens
tagggaaaataaaaa

SEQ ID NO: 963907 - DNA, 15 bp, Homo sapiens
agggaaaataaaaat

SEQ ID NO: 963908 - DNA, 15 bp, Homo sapiens
gggaaaataaaaatt

SEQ ID NO: 963909 - DNA, 15 bp, Homo sapiens
ggaaaataaaaattt

SEQ ID NO: 963910 - DNA, 15 bp, Homo sapiens
gaaaataaaaatttt

SEQ ID NO: 963911 - DNA, 15 bp, Homo sapiens
aaaataaaaatttta

SEQ ID NO: 963912 - DNA, 15 bp, Homo sapiens
aaataaaaattttaa

SEQ ID NO: 963913 - DNA, 15 bp, Homo sapiens
aataaaaattttaaa

SEQ ID NO: 963914 - DNA, 15 bp, Homo sapiens
ataaaaattttaaat

SEQ ID NO: 963915 - DNA, 15 bp, Homo sapiens
taaaaattttaaata

SEQ ID NO: 963916 - DNA, 15 bp, Homo sapiens
aaaaattttaaatat

SEQ ID NO: 963917 - DNA, 15 bp, Homo sapiens
aaaattttaaatatt

SEQ ID NO: 963918 - DNA, 15 bp, Homo sapiens
aaattttaaatattt

SEQ ID NO: 963919 - DNA, 15 bp, Homo sapiens
aattttaaatattta

SEQ ID NO: 963920 - DNA, 15 bp, Homo sapiens
attttaaatatttac

SEQ ID NO: 963921 - DNA, 15 bp, Homo sapiens
ttttaaatatttact

SEQ ID NO: 963922 - DNA, 15 bp, Homo sapiens
tttaaatatttacta

SEQ ID NO: 963923 - DNA, 15 bp, Homo sapiens
ttaaatatttactaa

SEQ ID NO: 963924 - DNA, 15 bp, Homo sapiens
taaatatttactaat

SEQ ID NO: 963925 - DNA, 15 bp, Homo sapiens
aaatatttactaatt

SEQ ID NO: 963926 - DNA, 15 bp, Homo sapiens
aatatttactaattc

SEQ ID NO: 963927 - DNA, 15 bp, Homo sapiens
atatttactaattca

SEQ ID NO: 963928 - DNA, 15 bp, Homo sapiens
tatttactaattcat

SEQ ID NO: 963929 - DNA, 15 bp, Homo sapiens
atttactaattcatt

SEQ ID NO: 963930 - DNA, 15 bp, Homo sapiens
tttactaattcattt

SEQ ID NO: 963931 - DNA, 15 bp, Homo sapiens
ttactaattcattta

SEQ ID NO: 963932 - DNA, 15 bp, Homo sapiens
tactaattcatttaa

SEQ ID NO: 963933 - DNA, 15 bp, Homo sapiens
actaattcatttaaa

SEQ ID NO: 963934 - DNA, 15 bp, Homo sapiens
ctaattcatttaaaa

SEQ ID NO: 963935 - DNA, 15 bp, Homo sapiens
taattcatttaaaag

SEQ ID NO: 963936 - DNA, 15 bp, Homo sapiens
aattcatttaaaagc

SEQ ID NO: 963937 - DNA, 15 bp, Homo sapiens
attcatttaaaagca

SEQ ID NO: 963938 - DNA, 15 bp, Homo sapiens
ttcatttaaaagcaa

SEQ ID NO: 963939 - DNA, 15 bp, Homo sapiens
tcatttaaaagcaac

SEQ ID NO: 963940 - DNA, 15 bp, Homo sapiens
catttaaaagcaaca

SEQ ID NO: 963941 - DNA, 15 bp, Homo sapiens
atttaaaagcaacaa

SEQ ID NO: 963942 - DNA, 15 bp, Homo sapiens
tttaaaagcaacaaa

SEQ ID NO: 963943 - DNA, 15 bp, Homo sapiens
ttaaaagcaacaaac

SEQ ID NO: 963944 - DNA, 15 bp, Homo sapiens
taaaagcaacaaact

SEQ ID NO: 963945 - DNA, 15 bp, Homo sapiens
aaaagcaacaaacta

SEQ ID NO: 963946 - DNA, 15 bp, Homo sapiens
aaagcaacaaactat

SEQ ID NO: 963947 - DNA, 15 bp, Homo sapiens
aagcaacaaactatg

SEQ ID NO: 963948 - DNA, 15 bp, Homo sapiens
agcaacaaactatga

SEQ ID NO: 963949 - DNA, 15 bp, Homo sapiens
gcaacaaactatgac

SEQ ID NO: 963950 - DNA, 15 bp, Homo sapiens
caacaaactatgaca

SEQ ID NO: 963951 - DNA, 15 bp, Homo sapiens
aacaaactatgacat

SEQ ID NO: 963952 - DNA, 15 bp, Homo sapiens
acaaactatgacatg

SEQ ID NO: 963953 - DNA, 15 bp, Homo sapiens
caaactatgacatgt

SEQ ID NO: 963954 - DNA, 15 bp, Homo sapiens
aaactatgacatgtt

SEQ ID NO: 963955 - DNA, 15 bp, Homo sapiens
aactatgacatgtta

SEQ ID NO: 963956 - DNA, 15 bp, Homo sapiens
actatgacatgttaa

SEQ ID NO: 963957 - DNA, 15 bp, Homo sapiens
ctatgacatgttaat

SEQ ID NO: 963958 - DNA, 15 bp, Homo sapiens
tatgacatgttaata

SEQ ID NO: 963959 - DNA, 15 bp, Homo sapiens
atgacatgttaatat

SEQ ID NO: 963960 - DNA, 15 bp, Homo sapiens
tgacatgttaatata

SEQ ID NO: 963961 - DNA, 15 bp, Homo sapiens
gacatgttaatataa

SEQ ID NO: 963962 - DNA, 15 bp, Homo sapiens
acatgttaatataag

SEQ ID NO: 963963 - DNA, 15 bp, Homo sapiens
catgttaatataagt

SEQ ID NO: 963964 - DNA, 15 bp, Homo sapiens
atgttaatataagta

SEQ ID NO: 963965 - DNA, 15 bp, Homo sapiens
tgttaatataagtaa

SEQ ID NO: 963966 - DNA, 15 bp, Homo sapiens
gttaatataagtaac

SEQ ID NO: 963967 - DNA, 15 bp, Homo sapiens
ttaatataagtaaca

SEQ ID NO: 963968 - DNA, 15 bp, Homo sapiens
taatataagtaacat

SEQ ID NO: 963969 - DNA, 15 bp, Homo sapiens
aatataagtaacata

SEQ ID NO: 963970 - DNA, 15 bp, Homo sapiens
atataagtaacatat

SEQ ID NO: 963971 - DNA, 15 bp, Homo sapiens
tataagtaacatatt

SEQ ID NO: 963972 - DNA, 15 bp, Homo sapiens
ataagtaacatattt

SEQ ID NO: 963973 - DNA, 15 bp, Homo sapiens
taagtaacatatttc

SEQ ID NO: 963974 - DNA, 15 bp, Homo sapiens
aagtaacatatttca

SEQ ID NO: 963975 - DNA, 15 bp, Homo sapiens
agtaacatatttcat

SEQ ID NO: 963976 - DNA, 15 bp, Homo sapiens
gtaacatatttcatg

SEQ ID NO: 963977 - DNA, 15 bp, Homo sapiens
taacatatttcatga

SEQ ID NO: 963978 - DNA, 15 bp, Homo sapiens
aacatatttcatgaa

SEQ ID NO: 963979 - DNA, 15 bp, Homo sapiens
acatatttcatgaaa

SEQ ID NO: 963980 - DNA, 15 bp, Homo sapiens
catatttcatgaaac

SEQ ID NO: 963981 - DNA, 15 bp, Homo sapiens
atatttcatgaaaca

SEQ ID NO: 963982 - DNA, 15 bp, Homo sapiens
tatttcatgaaacaa

SEQ ID NO: 963983 - DNA, 15 bp, Homo sapiens
atttcatgaaacaaa

SEQ ID NO: 963984 - DNA, 15 bp, Homo sapiens
tttcatgaaacaaaa

SEQ ID NO: 963985 - DNA, 15 bp, Homo sapiens
ttcatgaaacaaaaa

SEQ ID NO: 963986 - DNA, 15 bp, Homo sapiens
tcatgaaacaaaaaa

SEQ ID NO: 963987 - DNA, 15 bp, Homo sapiens
catgaaacaaaaaat

SEQ ID NO: 963988 - DNA, 15 bp, Homo sapiens
atgaaacaaaaaatg

SEQ ID NO: 963989 - DNA, 15 bp, Homo sapiens
tgaaacaaaaaatgc

SEQ ID NO: 963990 - DNA, 15 bp, Homo sapiens
gaaacaaaaaatgca

SEQ ID NO: 963991 - DNA, 15 bp, Homo sapiens
aaacaaaaaatgcat

SEQ ID NO: 963992 - DNA, 15 bp, Homo sapiens
aacaaaaaatgcatt

SEQ ID NO: 963993 - DNA, 15 bp, Homo sapiens
acaaaaaatgcattt

SEQ ID NO: 963994 - DNA, 15 bp, Homo sapiens
caaaaaatgcattta

SEQ ID NO: 963995 - DNA, 15 bp, Homo sapiens
aaaaaatgcatttaa

SEQ ID NO: 963996 - DNA, 15 bp, Homo sapiens
aaaaatgcatttaaa

SEQ ID NO: 963997 - DNA, 15 bp, Homo sapiens
aaaatgcatttaaaa

SEQ ID NO: 963998 - DNA, 15 bp, Homo sapiens
aaatgcatttaaaaa

SEQ ID NO: 963999 - DNA, 15 bp, Homo sapiens
aatgcatttaaaaaa

SEQ ID NO: 964000 - DNA, 15 bp, Homo sapiens
atgcatttaaaaaat

SEQ ID NO: 964001 - DNA, 15 bp, Homo sapiens
tgcatttaaaaaatt

SEQ ID NO: 964002 - DNA, 15 bp, Homo sapiens
gcatttaaaaaattt

SEQ ID NO: 964003 - DNA, 15 bp, Homo sapiens
catttaaaaaattta

SEQ ID NO: 964004 - DNA, 15 bp, Homo sapiens
atttaaaaaatttag

SEQ ID NO: 964005 - DNA, 15 bp, Homo sapiens
tttaaaaaatttagt

SEQ ID NO: 964006 - DNA, 15 bp, Homo sapiens
ttaaaaaatttagtg

SEQ ID NO: 964007 - DNA, 15 bp, Homo sapiens
taaaaaatttagtga

SEQ ID NO: 964008 - DNA, 15 bp, Homo sapiens
aaaaaatttagtgag

SEQ ID NO: 964009 - DNA, 15 bp, Homo sapiens
aaaaatttagtgaga

SEQ ID NO: 964010 - DNA, 15 bp, Homo sapiens
aaaatttagtgagaa

SEQ ID NO: 964011 - DNA, 15 bp, Homo sapiens
aaatttagtgagaag

SEQ ID NO: 964012 - DNA, 15 bp, Homo sapiens
aatttagtgagaaga

SEQ ID NO: 964013 - DNA, 15 bp, Homo sapiens
atttagtgagaagag

SEQ ID NO: 964014 - DNA, 15 bp, Homo sapiens
tttagtgagaagagt

SEQ ID NO: 964015 - DNA, 15 bp, Homo sapiens
ttagtgagaagagtg

SEQ ID NO: 964016 - DNA, 15 bp, Homo sapiens
tagtgagaagagtga

SEQ ID NO: 964017 - DNA, 15 bp, Homo sapiens
agtgagaagagtgaa

SEQ ID NO: 964018 - DNA, 15 bp, Homo sapiens
gtgagaagagtgaaa

SEQ ID NO: 964019 - DNA, 15 bp, Homo sapiens
tgagaagagtgaaat

SEQ ID NO: 964020 - DNA, 15 bp, Homo sapiens
gagaagagtgaaatt

SEQ ID NO: 964021 - DNA, 15 bp, Homo sapiens
agaagagtgaaattc

SEQ ID NO: 964022 - DNA, 15 bp, Homo sapiens
gaagagtgaaattct

SEQ ID NO: 964023 - DNA, 15 bp, Homo sapiens
aagagtgaaattctt

SEQ ID NO: 964024 - DNA, 15 bp, Homo sapiens
agagtgaaattcttt

SEQ ID NO: 964025 - DNA, 15 bp, Homo sapiens
gagtgaaattctttc

SEQ ID NO: 964026 - DNA, 15 bp, Homo sapiens
agtgaaattctttca

SEQ ID NO: 964027 - DNA, 15 bp, Homo sapiens
gtgaaattctttcac

SEQ ID NO: 964028 - DNA, 15 bp, Homo sapiens
tgaaattctttcaca

SEQ ID NO: 964029 - DNA, 15 bp, Homo sapiens
gaaattctttcacat

SEQ ID NO: 964030 - DNA, 15 bp, Homo sapiens
aaattctttcacatt

SEQ ID NO: 964031 - DNA, 15 bp, Homo sapiens
aattctttcacattt

SEQ ID NO: 964032 - DNA, 15 bp, Homo sapiens
attctttcacattta

SEQ ID NO: 964033 - DNA, 15 bp, Homo sapiens
ttctttcacatttaa

SEQ ID NO: 964034 - DNA, 15 bp, Homo sapiens
tctttcacatttaaa

SEQ ID NO: 964035 - DNA, 15 bp, Homo sapiens
ctttcacatttaaaa

SEQ ID NO: 964036 - DNA, 15 bp, Homo sapiens
tttcacatttaaaaa

SEQ ID NO: 964037 - DNA, 15 bp, Homo sapiens
ttcacatttaaaaaa

SEQ ID NO: 964038 - DNA, 15 bp, Homo sapiens
tcacatttaaaaaaa

SEQ ID NO: 964039 - DNA, 15 bp, Homo sapiens
cacatttaaaaaaat

SEQ ID NO: 964040 - DNA, 15 bp, Homo sapiens
acatttaaaaaaatt

SEQ ID NO: 964041 - DNA, 15 bp, Homo sapiens
catttaaaaaaattt

SEQ ID NO: 964042 - DNA, 15 bp, Homo sapiens
atttaaaaaaatttt

SEQ ID NO: 964043 - DNA, 15 bp, Homo sapiens
aaaaatttttaaatg

SEQ ID NO: 964044 - DNA, 15 bp, Homo sapiens
aaaatttttaaatgt

SEQ ID NO: 964045 - DNA, 15 bp, Homo sapiens
aaatttttaaatgtc

SEQ ID NO: 964046 - DNA, 15 bp, Homo sapiens
aatttttaaatgtct

SEQ ID NO: 964047 - DNA, 15 bp, Homo sapiens
atttttaaatgtctg

SEQ ID NO: 964048 - DNA, 15 bp, Homo sapiens
tttttaaatgtctgg

SEQ ID NO: 964049 - DNA, 15 bp, Homo sapiens
ttttaaatgtctggc

SEQ ID NO: 964050 - DNA, 15 bp, Homo sapiens
tttaaatgtctggct

SEQ ID NO: 964051 - DNA, 15 bp, Homo sapiens
ttaaatgtctggctt

SEQ ID NO: 964052 - DNA, 15 bp, Homo sapiens
taaatgtctggcttc

SEQ ID NO: 964053 - DNA, 15 bp, Homo sapiens
aaatgtctggcttca

SEQ ID NO: 964054 - DNA, 15 bp, Homo sapiens
aatgtctggcttcat

SEQ ID NO: 964055 - DNA, 15 bp, Homo sapiens
atgtctggcttcata

SEQ ID NO: 964056 - DNA, 15 bp, Homo sapiens
tgtctggcttcatag

SEQ ID NO: 964057 - DNA, 15 bp, Homo sapiens
gtctggcttcatagt

SEQ ID NO: 964058 - DNA, 15 bp, Homo sapiens
tctggcttcatagta

SEQ ID NO: 964059 - DNA, 15 bp, Homo sapiens
ctggcttcatagtac

SEQ ID NO: 964060 - DNA, 15 bp, Homo sapiens
tggcttcatagtacc

SEQ ID NO: 964061 - DNA, 15 bp, Homo sapiens
ggcttcatagtaccc

SEQ ID NO: 964062 - DNA, 15 bp, Homo sapiens
gcttcatagtaccca

SEQ ID NO: 964063 - DNA, 15 bp, Homo sapiens
cttcatagtacccag

SEQ ID NO: 964064 - DNA, 15 bp, Homo sapiens
ttcatagtacccagc

SEQ ID NO: 964065 - DNA, 15 bp, Homo sapiens
tcatagtacccagct

SEQ ID NO: 964066 - DNA, 15 bp, Homo sapiens
catagtacccagctg

SEQ ID NO: 964067 - DNA, 15 bp, Homo sapiens
atagtacccagctgg

SEQ ID NO: 964068 - DNA, 15 bp, Homo sapiens
tagtacccagctgga

SEQ ID NO: 964069 - DNA, 15 bp, Homo sapiens
agtacccagctggat

SEQ ID NO: 964070 - DNA, 15 bp, Homo sapiens
gtacccagctggatt

SEQ ID NO: 964071 - DNA, 15 bp, Homo sapiens
tacccagctggattc

SEQ ID NO: 964072 - DNA, 15 bp, Homo sapiens
acccagctggattct

SEQ ID NO: 964073 - DNA, 15 bp, Homo sapiens
cccagctggattctc

SEQ ID NO: 964074 - DNA, 15 bp, Homo sapiens
ccagctggattctca

SEQ ID NO: 964075 - DNA, 15 bp, Homo sapiens
cagctggattctcat

SEQ ID NO: 964076 - DNA, 15 bp, Homo sapiens
agctggattctcata

SEQ ID NO: 964077 - DNA, 15 bp, Homo sapiens
gctggattctcatat

SEQ ID NO: 964078 - DNA, 15 bp, Homo sapiens
ctggattctcatata

SEQ ID NO: 964079 - DNA, 15 bp, Homo sapiens
tggattctcatatat

SEQ ID NO: 964080 - DNA, 15 bp, Homo sapiens
ggattctcatatatg

SEQ ID NO: 964081 - DNA, 15 bp, Homo sapiens
gattctcatatatgc

SEQ ID NO: 964082 - DNA, 15 bp, Homo sapiens
attctcatatatgct

SEQ ID NO: 964083 - DNA, 15 bp, Homo sapiens
ttctcatatatgctt

SEQ ID NO: 964084 - DNA, 15 bp, Homo sapiens
tctcatatatgcttt

SEQ ID NO: 964085 - DNA, 15 bp, Homo sapiens
ctcatatatgctttt

SEQ ID NO: 964086 - DNA, 15 bp, Homo sapiens
tcatatatgcttttg

SEQ ID NO: 964087 - DNA, 15 bp, Homo sapiens
catatatgcttttgt

SEQ ID NO: 964088 - DNA, 15 bp, Homo sapiens
atatatgcttttgta

SEQ ID NO: 964089 - DNA, 15 bp, Homo sapiens
tatatgcttttgtat

SEQ ID NO: 964090 - DNA, 15 bp, Homo sapiens
atatgcttttgtatg

SEQ ID NO: 964091 - DNA, 15 bp, Homo sapiens
tatgcttttgtatgc

SEQ ID NO: 964092 - DNA, 15 bp, Homo sapiens
atgcttttgtatgca

SEQ ID NO: 964093 - DNA, 15 bp, Homo sapiens
tgcttttgtatgcaa

SEQ ID NO: 964094 - DNA, 15 bp, Homo sapiens
gcttttgtatgcaat

SEQ ID NO: 964095 - DNA, 15 bp, Homo sapiens
cttttgtatgcaatc

SEQ ID NO: 964096 - DNA, 15 bp, Homo sapiens
ttttgtatgcaatct

SEQ ID NO: 964097 - DNA, 15 bp, Homo sapiens
tttgtatgcaatcta

SEQ ID NO: 964098 - DNA, 15 bp, Homo sapiens
ttgtatgcaatctaa

SEQ ID NO: 964099 - DNA, 15 bp, Homo sapiens
tgtatgcaatctaat

SEQ ID NO: 964100 - DNA, 15 bp, Homo sapiens
gtatgcaatctaatg

SEQ ID NO: 964101 - DNA, 15 bp, Homo sapiens
tatgcaatctaatgc

SEQ ID NO: 964102 - DNA, 15 bp, Homo sapiens
atgcaatctaatgca

SEQ ID NO: 964103 - DNA, 15 bp, Homo sapiens
tgcaatctaatgcaa

SEQ ID NO: 964104 - DNA, 15 bp, Homo sapiens
gcaatctaatgcaat

SEQ ID NO: 964105 - DNA, 15 bp, Homo sapiens
caatctaatgcaatg

SEQ ID NO: 964106 - DNA, 15 bp, Homo sapiens
aatctaatgcaatgt

SEQ ID NO: 964107 - DNA, 15 bp, Homo sapiens
atctaatgcaatgtt

SEQ ID NO: 964108 - DNA, 15 bp, Homo sapiens
tctaatgcaatgttt

SEQ ID NO: 964109 - DNA, 15 bp, Homo sapiens
ctaatgcaatgtttt

SEQ ID NO: 964110 - DNA, 15 bp, Homo sapiens
taatgcaatgtttta

SEQ ID NO: 964111 - DNA, 15 bp, Homo sapiens
aatgcaatgttttaa

SEQ ID NO: 964112 - DNA, 15 bp, Homo sapiens
atgcaatgttttaat

SEQ ID NO: 964113 - DNA, 15 bp, Homo sapiens
tgcaatgttttaatt

SEQ ID NO: 964114 - DNA, 15 bp, Homo sapiens
gcaatgttttaatta

SEQ ID NO: 964115 - DNA, 15 bp, Homo sapiens
caatgttttaattaa

SEQ ID NO: 964116 - DNA, 15 bp, Homo sapiens
aatgttttaattaaa

SEQ ID NO: 964117 - DNA, 15 bp, Homo sapiens
atgttttaattaaag

SEQ ID NO: 964118 - DNA, 15 bp, Homo sapiens
tgttttaattaaagt

SEQ ID NO: 964119 - DNA, 15 bp, Homo sapiens
gttttaattaaagta

SEQ ID NO: 964120 - DNA, 15 bp, Homo sapiens
ttttaattaaagtat

SEQ ID NO: 964121 - DNA, 15 bp, Homo sapiens
tttaattaaagtata

SEQ ID NO: 964122 - DNA, 15 bp, Homo sapiens
ttaattaaagtataa

SEQ ID NO: 964123 - DNA, 15 bp, Homo sapiens
taattaaagtataaa

SEQ ID NO: 964124 - DNA, 15 bp, Homo sapiens
aattaaagtataaaa

SEQ ID NO: 964125 - DNA, 15 bp, Homo sapiens
attaaagtataaaaa

SEQ ID NO: 964126 - DNA, 15 bp, Homo sapiens
ttaaagtataaaaag

SEQ ID NO: 964127 - DNA, 15 bp, Homo sapiens
taaagtataaaaaga

SEQ ID NO: 964128 - DNA, 15 bp, Homo sapiens
aaagtataaaaagaa

SEQ ID NO: 964129 - DNA, 15 bp, Homo sapiens
aagtataaaaagaaa

SEQ ID NO: 964130 - DNA, 15 bp, Homo sapiens
agtataaaaagaaaa

SEQ ID NO: 964131 - DNA, 15 bp, Homo sapiens
gtataaaaagaaaat

SEQ ID NO: 964132 - DNA, 15 bp, Homo sapiens
tataaaaagaaaatc

SEQ ID NO: 964133 - DNA, 15 bp, Homo sapiens
ataaaaagaaaatct

SEQ ID NO: 964134 - DNA, 15 bp, Homo sapiens
taaaaagaaaatctg

SEQ ID NO: 964135 - DNA, 15 bp, Homo sapiens
aaaaagaaaatctgg

SEQ ID NO: 964136 - DNA, 15 bp, Homo sapiens
aaaagaaaatctggc

SEQ ID NO: 964137 - DNA, 15 bp, Homo sapiens
aaagaaaatctggcc

SEQ ID NO: 964138 - DNA, 15 bp, Homo sapiens
aagaaaatctggcct

SEQ ID NO: 964139 - DNA, 15 bp, Homo sapiens
agaaaatctggcctc

SEQ ID NO: 964140 - DNA, 15 bp, Homo sapiens
gaaaatctggcctca

SEQ ID NO: 964141 - DNA, 15 bp, Homo sapiens
aaaatctggcctcac

SEQ ID NO: 964142 - DNA, 15 bp, Homo sapiens
aaatctggcctcaca

SEQ ID NO: 964143 - DNA, 15 bp, Homo sapiens
aatctggcctcacaa

SEQ ID NO: 964144 - DNA, 15 bp, Homo sapiens
atctggcctcacaaa

SEQ ID NO: 964145 - DNA, 15 bp, Homo sapiens
tctggcctcacaaag

SEQ ID NO: 964146 - DNA, 15 bp, Homo sapiens
ctggcctcacaaaga

SEQ ID NO: 964147 - DNA, 15 bp, Homo sapiens
tggcctcacaaagat

SEQ ID NO: 964148 - DNA, 15 bp, Homo sapiens
ggcctcacaaagata

SEQ ID NO: 964149 - DNA, 15 bp, Homo sapiens
gcctcacaaagatag

SEQ ID NO: 964150 - DNA, 15 bp, Homo sapiens
cctcacaaagatagg

SEQ ID NO: 964151 - DNA, 15 bp, Homo sapiens
ctcacaaagataggt

SEQ ID NO: 964152 - DNA, 15 bp, Homo sapiens
tcacaaagataggta

SEQ ID NO: 964153 - DNA, 15 bp, Homo sapiens
cacaaagataggtag

SEQ ID NO: 964154 - DNA, 15 bp, Homo sapiens
acaaagataggtagg

SEQ ID NO: 964155 - DNA, 15 bp, Homo sapiens
caaagataggtaggt

SEQ ID NO: 964156 - DNA, 15 bp, Homo sapiens
aaagataggtaggta

SEQ ID NO: 964157 - DNA, 15 bp, Homo sapiens
aagataggtaggtag

SEQ ID NO: 964158 - DNA, 15 bp, Homo sapiens
agataggtaggtaga

SEQ ID NO: 964159 - DNA, 15 bp, Homo sapiens
gataggtaggtagaa

SEQ ID NO: 964160 - DNA, 15 bp, Homo sapiens
ataggtaggtagaaa

SEQ ID NO: 964161 - DNA, 15 bp, Homo sapiens
taggtaggtagaaaa

SEQ ID NO: 964162 - DNA, 15 bp, Homo sapiens
aggtaggtagaaaaa

SEQ ID NO: 964163 - DNA, 15 bp, Homo sapiens
ggtaggtagaaaaag

SEQ ID NO: 964164 - DNA, 15 bp, Homo sapiens
gtaggtagaaaaaga

SEQ ID NO: 964165 - DNA, 15 bp, Homo sapiens
taggtagaaaaagaa

SEQ ID NO: 964166 - DNA, 15 bp, Homo sapiens
aggtagaaaaagaag

SEQ ID NO: 964167 - DNA, 15 bp, Homo sapiens
ggtagaaaaagaagg

SEQ ID NO: 964168 - DNA, 15 bp, Homo sapiens
gtagaaaaagaagga

SEQ ID NO: 964169 - DNA, 15 bp, Homo sapiens
tagaaaaagaaggag

SEQ ID NO: 964170 - DNA, 15 bp, Homo sapiens
agaaaaagaaggagt

SEQ ID NO: 964171 - DNA, 15 bp, Homo sapiens
gaaaaagaaggagta

SEQ ID NO: 964172 - DNA, 15 bp, Homo sapiens
aaaaagaaggagtat

SEQ ID NO: 964173 - DNA, 15 bp, Homo sapiens
aaaagaaggagtatt

SEQ ID NO: 964174 - DNA, 15 bp, Homo sapiens
aaagaaggagtatta

SEQ ID NO: 964175 - DNA, 15 bp, Homo sapiens
aagaaggagtattat

SEQ ID NO: 964176 - DNA, 15 bp, Homo sapiens
agaaggagtattata

SEQ ID NO: 964177 - DNA, 15 bp, Homo sapiens
gaaggagtattataa

SEQ ID NO: 964178 - DNA, 15 bp, Homo sapiens
aaggagtattataat

SEQ ID NO: 964179 - DNA, 15 bp, Homo sapiens
aggagtattataata

SEQ ID NO: 964180 - DNA, 15 bp, Homo sapiens
ggagtattataatag

SEQ ID NO: 964181 - DNA, 15 bp, Homo sapiens
gagtattataataga

SEQ ID NO: 964182 - DNA, 15 bp, Homo sapiens
agtattataatagac

SEQ ID NO: 964183 - DNA, 15 bp, Homo sapiens
gtattataatagact

SEQ ID NO: 964184 - DNA, 15 bp, Homo sapiens
tattataatagactt

SEQ ID NO: 964185 - DNA, 15 bp, Homo sapiens
attataatagacttt

SEQ ID NO: 964186 - DNA, 15 bp, Homo sapiens
ttataatagactttt

SEQ ID NO: 964187 - DNA, 15 bp, Homo sapiens
tataatagacttttc

SEQ ID NO: 964188 - DNA, 15 bp, Homo sapiens
ataatagacttttca

SEQ ID NO: 964189 - DNA, 15 bp, Homo sapiens
taatagacttttcag

SEQ ID NO: 964190 - DNA, 15 bp, Homo sapiens
aatagacttttcaga

SEQ ID NO: 964191 - DNA, 15 bp, Homo sapiens
atagacttttcagat

SEQ ID NO: 964192 - DNA, 15 bp, Homo sapiens
tagacttttcagata

SEQ ID NO: 964193 - DNA, 15 bp, Homo sapiens
agacttttcagataa

SEQ ID NO: 964194 - DNA, 15 bp, Homo sapiens
gacttttcagataat

SEQ ID NO: 964195 - DNA, 15 bp, Homo sapiens
acttttcagataatt

SEQ ID NO: 964196 - DNA, 15 bp, Homo sapiens
cttttcagataattg

SEQ ID NO: 964197 - DNA, 15 bp, Homo sapiens
ttttcagataattgt

SEQ ID NO: 964198 - DNA, 15 bp, Homo sapiens
tttcagataattgtg

SEQ ID NO: 964199 - DNA, 15 bp, Homo sapiens
ttcagataattgtga

SEQ ID NO: 964200 - DNA, 15 bp, Homo sapiens
tcagataattgtgat

SEQ ID NO: 964201 - DNA, 15 bp, Homo sapiens
cagataattgtgata

SEQ ID NO: 964202 - DNA, 15 bp, Homo sapiens
agataattgtgatat

SEQ ID NO: 964203 - DNA, 15 bp, Homo sapiens
gataattgtgatatt

SEQ ID NO: 964204 - DNA, 15 bp, Homo sapiens
ataattgtgatattt

SEQ ID NO: 964205 - DNA, 15 bp, Homo sapiens
taattgtgatatttt

SEQ ID NO: 964206 - DNA, 15 bp, Homo sapiens
aattgtgatattttt

SEQ ID NO: 964207 - DNA, 15 bp, Homo sapiens
attgtgatatttttc

SEQ ID NO: 964208 - DNA, 15 bp, Homo sapiens
ttgtgatatttttct

SEQ ID NO: 964209 - DNA, 15 bp, Homo sapiens
tgtgatatttttctt

SEQ ID NO: 964210 - DNA, 15 bp, Homo sapiens
gtgatatttttcttt

SEQ ID NO: 964211 - DNA, 15 bp, Homo sapiens
tgatatttttctttg

SEQ ID NO: 964212 - DNA, 15 bp, Homo sapiens
gatatttttctttgg

SEQ ID NO: 964213 - DNA, 15 bp, Homo sapiens
atatttttctttggt

SEQ ID NO: 964214 - DNA, 15 bp, Homo sapiens
tatttttctttggta

SEQ ID NO: 964215 - DNA, 15 bp, Homo sapiens
atttttctttggtac

SEQ ID NO: 964216 - DNA, 15 bp, Homo sapiens
tttttctttggtact

SEQ ID NO: 964217 - DNA, 15 bp, Homo sapiens
ttttctttggtacta

SEQ ID NO: 964218 - DNA, 15 bp, Homo sapiens
tttctttggtactat

SEQ ID NO: 964219 - DNA, 15 bp, Homo sapiens
ttctttggtactatt

SEQ ID NO: 964220 - DNA, 15 bp, Homo sapiens
tctttggtactattc

SEQ ID NO: 964221 - DNA, 15 bp, Homo sapiens
ctttggtactattct

SEQ ID NO: 964222 - DNA, 15 bp, Homo sapiens
tttggtactattcta

SEQ ID NO: 964223 - DNA, 15 bp, Homo sapiens
ttggtactattctaa

SEQ ID NO: 964224 - DNA, 15 bp, Homo sapiens
tggtactattctaaa

SEQ ID NO: 964225 - DNA, 15 bp, Homo sapiens
ggtactattctaaaa

SEQ ID NO: 964226 - DNA, 15 bp, Homo sapiens
gtactattctaaaac

SEQ ID NO: 964227 - DNA, 15 bp, Homo sapiens
tactattctaaaacc

SEQ ID NO: 964228 - DNA, 15 bp, Homo sapiens
actattctaaaacct

SEQ ID NO: 964229 - DNA, 15 bp, Homo sapiens
ctattctaaaacctg

SEQ ID NO: 964230 - DNA, 15 bp, Homo sapiens
tattctaaaacctga

SEQ ID NO: 964231 - DNA, 15 bp, Homo sapiens
attctaaaacctgac

SEQ ID NO: 964232 - DNA, 15 bp, Homo sapiens
ttctaaaacctgaca

SEQ ID NO: 964233 - DNA, 15 bp, Homo sapiens
tctaaaacctgacaa

SEQ ID NO: 964234 - DNA, 15 bp, Homo sapiens
ctaaaacctgacaag

SEQ ID NO: 964235 - DNA, 15 bp, Homo sapiens
taaaacctgacaaga

SEQ ID NO: 964236 - DNA, 15 bp, Homo sapiens
aaaacctgacaagat

SEQ ID NO: 964237 - DNA, 15 bp, Homo sapiens
aaacctgacaagata

SEQ ID NO: 964238 - DNA, 15 bp, Homo sapiens
aacctgacaagataa

SEQ ID NO: 964239 - DNA, 15 bp, Homo sapiens
acctgacaagataag

SEQ ID NO: 964240 - DNA, 15 bp, Homo sapiens
cctgacaagataagt

SEQ ID NO: 964241 - DNA, 15 bp, Homo sapiens
ctgacaagataagtt

SEQ ID NO: 964242 - DNA, 15 bp, Homo sapiens
tgacaagataagttt

SEQ ID NO: 964243 - DNA, 15 bp, Homo sapiens
gacaagataagtttc

SEQ ID NO: 964244 - DNA, 15 bp, Homo sapiens
acaagataagtttct

SEQ ID NO: 964245 - DNA, 15 bp, Homo sapiens
caagataagtttctt

SEQ ID NO: 964246 - DNA, 15 bp, Homo sapiens
aagataagtttctta

SEQ ID NO: 964247 - DNA, 15 bp, Homo sapiens
agataagtttcttaa

SEQ ID NO: 964248 - DNA, 15 bp, Homo sapiens
gataagtttcttaag

SEQ ID NO: 964249 - DNA, 15 bp, Homo sapiens
ataagtttcttaagt

SEQ ID NO: 964250 - DNA, 15 bp, Homo sapiens
taagtttcttaagtt

SEQ ID NO: 964251 - DNA, 15 bp, Homo sapiens
aagtttcttaagttg

SEQ ID NO: 964252 - DNA, 15 bp, Homo sapiens
agtttcttaagttgc

SEQ ID NO: 964253 - DNA, 15 bp, Homo sapiens
gtttcttaagttgca

SEQ ID NO: 964254 - DNA, 15 bp, Homo sapiens
tttcttaagttgcaa

SEQ ID NO: 964255 - DNA, 15 bp, Homo sapiens
ttcttaagttgcaaa

SEQ ID NO: 964256 - DNA, 15 bp, Homo sapiens
tcttaagttgcaaaa

SEQ ID NO: 964257 - DNA, 15 bp, Homo sapiens
cttaagttgcaaaat

SEQ ID NO: 964258 - DNA, 15 bp, Homo sapiens
ttaagttgcaaaatg

SEQ ID NO: 964259 - DNA, 15 bp, Homo sapiens
taagttgcaaaatgt

SEQ ID NO: 964260 - DNA, 15 bp, Homo sapiens
aagttgcaaaatgta

SEQ ID NO: 964261 - DNA, 15 bp, Homo sapiens
agttgcaaaatgtaa

SEQ ID NO: 964262 - DNA, 15 bp, Homo sapiens
gttgcaaaatgtaat

SEQ ID NO: 964263 - DNA, 15 bp, Homo sapiens
ttgcaaaatgtaatc

SEQ ID NO: 964264 - DNA, 15 bp, Homo sapiens
tgcaaaatgtaatct

SEQ ID NO: 964265 - DNA, 15 bp, Homo sapiens
gcaaaatgtaatcta

SEQ ID NO: 964266 - DNA, 15 bp, Homo sapiens
caaaatgtaatctaa

SEQ ID NO: 964267 - DNA, 15 bp, Homo sapiens
aaaatgtaatctaaa

SEQ ID NO: 964268 - DNA, 15 bp, Homo sapiens
aaatgtaatctaaaa

SEQ ID NO: 964269 - DNA, 15 bp, Homo sapiens
aatgtaatctaaaac

SEQ ID NO: 964270 - DNA, 15 bp, Homo sapiens
atgtaatctaaaact

SEQ ID NO: 964271 - DNA, 15 bp, Homo sapiens
tgtaatctaaaactg

SEQ ID NO: 964272 - DNA, 15 bp, Homo sapiens
gtaatctaaaactgt

SEQ ID NO: 964273 - DNA, 15 bp, Homo sapiens
taatctaaaactgta

SEQ ID NO: 964274 - DNA, 15 bp, Homo sapiens
aatctaaaactgtat

SEQ ID NO: 964275 - DNA, 15 bp, Homo sapiens
atctaaaactgtatc

SEQ ID NO: 964276 - DNA, 15 bp, Homo sapiens
tctaaaactgtatca

SEQ ID NO: 964277 - DNA, 15 bp, Homo sapiens
ctaaaactgtatcaa

SEQ ID NO: 964278 - DNA, 15 bp, Homo sapiens
taaaactgtatcaat

SEQ ID NO: 964279 - DNA, 15 bp, Homo sapiens
aaaactgtatcaata

SEQ ID NO: 964280 - DNA, 15 bp, Homo sapiens
aaactgtatcaataa

SEQ ID NO: 964281 - DNA, 15 bp, Homo sapiens
aactgtatcaataaa

SEQ ID NO: 964282 - DNA, 15 bp, Homo sapiens
actgtatcaataaac

SEQ ID NO: 964283 - DNA, 15 bp, Homo sapiens
ctgtatcaataaact

SEQ ID NO: 964284 - DNA, 15 bp, Homo sapiens
tgtatcaataaactt

SEQ ID NO: 964285 - DNA, 15 bp, Homo sapiens
gtatcaataaacttt

SEQ ID NO: 964286 - DNA, 15 bp, Homo sapiens
tatcaataaactttt

SEQ ID NO: 964287 - DNA, 15 bp, Homo sapiens
atcaataaacttttc

SEQ ID NO: 964288 - DNA, 15 bp, Homo sapiens
tcaataaacttttca

SEQ ID NO: 964289 - DNA, 15 bp, Homo sapiens
caataaacttttcat

SEQ ID NO: 964290 - DNA, 15 bp, Homo sapiens
aataaacttttcata

SEQ ID NO: 964291 - DNA, 15 bp, Homo sapiens
ataaacttttcatac

SEQ ID NO: 964292 - DNA, 15 bp, Homo sapiens
taaacttttcatact

SEQ ID NO: 964293 - DNA, 15 bp, Homo sapiens
aaacttttcatactc

SEQ ID NO: 964294 - DNA, 15 bp, Homo sapiens
aacttttcatactca

SEQ ID NO: 964295 - DNA, 15 bp, Homo sapiens
acttttcatactcag

SEQ ID NO: 964296 - DNA, 15 bp, Homo sapiens
cttttcatactcagt

SEQ ID NO: 964297 - DNA, 15 bp, Homo sapiens
ttttcatactcagtt

SEQ ID NO: 964298 - DNA, 15 bp, Homo sapiens
tttcatactcagtta

SEQ ID NO: 964299 - DNA, 15 bp, Homo sapiens
ttcatactcagttac

SEQ ID NO: 964300 - DNA, 15 bp, Homo sapiens
tcatactcagttaca

SEQ ID NO: 964301 - DNA, 15 bp, Homo sapiens
catactcagttacat

SEQ ID NO: 964302 - DNA, 15 bp, Homo sapiens
atactcagttacatt

SEQ ID NO: 964303 - DNA, 15 bp, Homo sapiens
tactcagttacatta

SEQ ID NO: 964304 - DNA, 15 bp, Homo sapiens
actcagttacattaa

SEQ ID NO: 964305 - DNA, 15 bp, Homo sapiens
ctcagttacattaaa

SEQ ID NO: 964306 - DNA, 15 bp, Homo sapiens
tcagttacattaaaa

SEQ ID NO: 964307 - DNA, 15 bp, Homo sapiens
cagttacattaaaat

SEQ ID NO: 964308 - DNA, 15 bp, Homo sapiens
agttacattaaaatc

SEQ ID NO: 964309 - DNA, 15 bp, Homo sapiens
gttacattaaaatca

SEQ ID NO: 964310 - DNA, 15 bp, Homo sapiens
ttacattaaaatcaa

SEQ ID NO: 964311 - DNA, 15 bp, Homo sapiens
tacattaaaatcaat

SEQ ID NO: 964312 - DNA, 15 bp, Homo sapiens
acattaaaatcaatt

SEQ ID NO: 964313 - DNA, 15 bp, Homo sapiens
cattaaaatcaattt

SEQ ID NO: 964314 - DNA, 15 bp, Homo sapiens
attaaaatcaatttg

SEQ ID NO: 964315 - DNA, 15 bp, Homo sapiens
ttaaaatcaatttgt

SEQ ID NO: 964316 - DNA, 15 bp, Homo sapiens
taaaatcaatttgtc

SEQ ID NO: 964317 - DNA, 15 bp, Homo sapiens
aaaatcaatttgtct

SEQ ID NO: 964318 - DNA, 15 bp, Homo sapiens
aaatcaatttgtctt

SEQ ID NO: 964319 - DNA, 15 bp, Homo sapiens
aatcaatttgtcttt

SEQ ID NO: 964320 - DNA, 15 bp, Homo sapiens
atcaatttgtctttc

SEQ ID NO: 964321 - DNA, 15 bp, Homo sapiens
tcaatttgtctttct

SEQ ID NO: 964322 - DNA, 15 bp, Homo sapiens
caatttgtctttctt

SEQ ID NO: 964323 - DNA, 15 bp, Homo sapiens
aatttgtctttcttg

SEQ ID NO: 964324 - DNA, 15 bp, Homo sapiens
atttgtctttcttgc

SEQ ID NO: 964325 - DNA, 15 bp, Homo sapiens
tttgtctttcttgcc

SEQ ID NO: 964326 - DNA, 15 bp, Homo sapiens
ttgtctttcttgcct

SEQ ID NO: 964327 - DNA, 15 bp, Homo sapiens
tgtctttcttgcctt

SEQ ID NO: 964328 - DNA, 15 bp, Homo sapiens
gtctttcttgccttt

SEQ ID NO: 964329 - DNA, 15 bp, Homo sapiens
tctttcttgcctttt

SEQ ID NO: 964330 - DNA, 15 bp, Homo sapiens
ctttcttgcctttta

SEQ ID NO: 964331 - DNA, 15 bp, Homo sapiens
tttcttgccttttaa

SEQ ID NO: 964332 - DNA, 15 bp, Homo sapiens
ttcttgccttttaat

SEQ ID NO: 964333 - DNA, 15 bp, Homo sapiens
tcttgccttttaatg

SEQ ID NO: 964334 - DNA, 15 bp, Homo sapiens
cttgccttttaatgg

SEQ ID NO: 964335 - DNA, 15 bp, Homo sapiens
ttgccttttaatgga

SEQ ID NO: 964336 - DNA, 15 bp, Homo sapiens
tgccttttaatggat

SEQ ID NO: 964337 - DNA, 15 bp, Homo sapiens
gccttttaatggatc

SEQ ID NO: 964338 - DNA, 15 bp, Homo sapiens
ccttttaatggatct

SEQ ID NO: 964339 - DNA, 15 bp, Homo sapiens
cttttaatggatctc

SEQ ID NO: 964340 - DNA, 15 bp, Homo sapiens
ttttaatggatctct

SEQ ID NO: 964341 - DNA, 15 bp, Homo sapiens
tttaatggatctctt

SEQ ID NO: 964342 - DNA, 15 bp, Homo sapiens
ttaatggatctctta

SEQ ID NO: 964343 - DNA, 15 bp, Homo sapiens
taatggatctcttac

SEQ ID NO: 964344 - DNA, 15 bp, Homo sapiens
aatggatctcttacc

SEQ ID NO: 964345 - DNA, 15 bp, Homo sapiens
atggatctcttaccc

SEQ ID NO: 964346 - DNA, 15 bp, Homo sapiens
tggatctcttaccca

SEQ ID NO: 964347 - DNA, 15 bp, Homo sapiens
ggatctcttacccat

SEQ ID NO: 964348 - DNA, 15 bp, Homo sapiens
gatctcttacccata

SEQ ID NO: 964349 - DNA, 15 bp, Homo sapiens
atctcttacccatac

SEQ ID NO: 964350 - DNA, 15 bp, Homo sapiens
tctcttacccataca

SEQ ID NO: 964351 - DNA, 15 bp, Homo sapiens
ctcttacccatacat

SEQ ID NO: 964352 - DNA, 15 bp, Homo sapiens
tcttacccatacatg

SEQ ID NO: 964353 - DNA, 15 bp, Homo sapiens
cttacccatacatga

SEQ ID NO: 964354 - DNA, 15 bp, Homo sapiens
ttacccatacatgat

SEQ ID NO: 964355 - DNA, 15 bp, Homo sapiens
tacccatacatgatt

SEQ ID NO: 964356 - DNA, 15 bp, Homo sapiens
acccatacatgattt

SEQ ID NO: 964357 - DNA, 15 bp, Homo sapiens
cccatacatgatttt

SEQ ID NO: 964358 - DNA, 15 bp, Homo sapiens
ccatacatgatttta

SEQ ID NO: 964359 - DNA, 15 bp, Homo sapiens
catacatgattttat

SEQ ID NO: 964360 - DNA, 15 bp, Homo sapiens
atacatgattttata

SEQ ID NO: 964361 - DNA, 15 bp, Homo sapiens
tacatgattttatag

SEQ ID NO: 964362 - DNA, 15 bp, Homo sapiens
acatgattttatagt

SEQ ID NO: 964363 - DNA, 15 bp, Homo sapiens
catgattttatagta

SEQ ID NO: 964364 - DNA, 15 bp, Homo sapiens
atgattttatagtat

SEQ ID NO: 964365 - DNA, 15 bp, Homo sapiens
tgattttatagtatc

SEQ ID NO: 964366 - DNA, 15 bp, Homo sapiens
gattttatagtatcc

SEQ ID NO: 964367 - DNA, 15 bp, Homo sapiens
attttatagtatcct

SEQ ID NO: 964368 - DNA, 15 bp, Homo sapiens
ttttatagtatcctg

SEQ ID NO: 964369 - DNA, 15 bp, Homo sapiens
tttatagtatcctgc

SEQ ID NO: 964370 - DNA, 15 bp, Homo sapiens
ttatagtatcctgca

SEQ ID NO: 964371 - DNA, 15 bp, Homo sapiens
tatagtatcctgcat

SEQ ID NO: 964372 - DNA, 15 bp, Homo sapiens
atagtatcctgcatg

SEQ ID NO: 964373 - DNA, 15 bp, Homo sapiens
tagtatcctgcatgg

SEQ ID NO: 964374 - DNA, 15 bp, Homo sapiens
agtatcctgcatggt

SEQ ID NO: 964375 - DNA, 15 bp, Homo sapiens
gtatcctgcatggtc

SEQ ID NO: 964376 - DNA, 15 bp, Homo sapiens
tatcctgcatggtca

SEQ ID NO: 964377 - DNA, 15 bp, Homo sapiens
atcctgcatggtcat

SEQ ID NO: 964378 - DNA, 15 bp, Homo sapiens
tcctgcatggtcatt

SEQ ID NO: 964379 - DNA, 15 bp, Homo sapiens
cctgcatggtcattt

SEQ ID NO: 964380 - DNA, 15 bp, Homo sapiens
ctgcatggtcatttg

SEQ ID NO: 964381 - DNA, 15 bp, Homo sapiens
tgcatggtcatttgt

SEQ ID NO: 964382 - DNA, 15 bp, Homo sapiens
gcatggtcatttgta

SEQ ID NO: 964383 - DNA, 15 bp, Homo sapiens
catggtcatttgtag

SEQ ID NO: 964384 - DNA, 15 bp, Homo sapiens
atggtcatttgtaga

SEQ ID NO: 964385 - DNA, 15 bp, Homo sapiens
tggtcatttgtagat

SEQ ID NO: 964386 - DNA, 15 bp, Homo sapiens
ggtcatttgtagatg

SEQ ID NO: 964387 - DNA, 15 bp, Homo sapiens
gtcatttgtagatgt

SEQ ID NO: 964388 - DNA, 15 bp, Homo sapiens
tcatttgtagatgtt

SEQ ID NO: 964389 - DNA, 15 bp, Homo sapiens
catttgtagatgttc

SEQ ID NO: 964390 - DNA, 15 bp, Homo sapiens
atttgtagatgttcc

SEQ ID NO: 964391 - DNA, 15 bp, Homo sapiens
aaaaatcttacagac

SEQ ID NO: 964392 - DNA, 15 bp, Homo sapiens
aaaatcttacagaca

SEQ ID NO: 964393 - DNA, 15 bp, Homo sapiens
aaatcttacagacag

SEQ ID NO: 964394 - DNA, 15 bp, Homo sapiens
aatcttacagacagg

SEQ ID NO: 964395 - DNA, 15 bp, Homo sapiens
atcttacagacaggg

SEQ ID NO: 964396 - DNA, 15 bp, Homo sapiens
tcttacagacagggt

SEQ ID NO: 964397 - DNA, 15 bp, Homo sapiens
cttacagacagggtt

SEQ ID NO: 964398 - DNA, 15 bp, Homo sapiens
ttacagacagggttt

SEQ ID NO: 964399 - DNA, 15 bp, Homo sapiens
tacagacagggtttc

SEQ ID NO: 964400 - DNA, 15 bp, Homo sapiens
acagacagggtttca

SEQ ID NO: 964401 - DNA, 15 bp, Homo sapiens
cagacagggtttcaa

SEQ ID NO: 964402 - DNA, 15 bp, Homo sapiens
agacagggtttcaaa

SEQ ID NO: 964403 - DNA, 15 bp, Homo sapiens
gacagggtttcaaat

SEQ ID NO: 964404 - DNA, 15 bp, Homo sapiens
acagggtttcaaatc

SEQ ID NO: 964405 - DNA, 15 bp, Homo sapiens
cagggtttcaaatca

SEQ ID NO: 964406 - DNA, 15 bp, Homo sapiens
agggtttcaaatcat

SEQ ID NO: 964407 - DNA, 15 bp, Homo sapiens
gggtttcaaatcatg

SEQ ID NO: 964408 - DNA, 15 bp, Homo sapiens
ggtttcaaatcatgt

SEQ ID NO: 964409 - DNA, 15 bp, Homo sapiens
gtttcaaatcatgtc

SEQ ID NO: 964410 - DNA, 15 bp, Homo sapiens
tttcaaatcatgtca

SEQ ID NO: 964411 - DNA, 15 bp, Homo sapiens
ttcaaatcatgtcat

SEQ ID NO: 964412 - DNA, 15 bp, Homo sapiens
tcaaatcatgtcatt

SEQ ID NO: 964413 - DNA, 15 bp, Homo sapiens
caaatcatgtcatta

SEQ ID NO: 964414 - DNA, 15 bp, Homo sapiens
aaatcatgtcattat

SEQ ID NO: 964415 - DNA, 15 bp, Homo sapiens
aatcatgtcattatt

SEQ ID NO: 964416 - DNA, 15 bp, Homo sapiens
atcatgtcattattt

SEQ ID NO: 964417 - DNA, 15 bp, Homo sapiens
tcatgtcattatttt

SEQ ID NO: 964418 - DNA, 15 bp, Homo sapiens
catgtcattatttta

SEQ ID NO: 964419 - DNA, 15 bp, Homo sapiens
atgtcattattttaa

SEQ ID NO: 964420 - DNA, 15 bp, Homo sapiens
tgtcattattttaaa

SEQ ID NO: 964421 - DNA, 15 bp, Homo sapiens
gtcattattttaaat

SEQ ID NO: 964422 - DNA, 15 bp, Homo sapiens
tcattattttaaatt

SEQ ID NO: 964423 - DNA, 15 bp, Homo sapiens
cattattttaaattg

SEQ ID NO: 964424 - DNA, 15 bp, Homo sapiens
attattttaaattgt

SEQ ID NO: 964425 - DNA, 15 bp, Homo sapiens
ttattttaaattgtg

SEQ ID NO: 964426 - DNA, 15 bp, Homo sapiens
tattttaaattgtgt

SEQ ID NO: 964427 - DNA, 15 bp, Homo sapiens
attttaaattgtgta

SEQ ID NO: 964428 - DNA, 15 bp, Homo sapiens
ttttaaattgtgtaa

SEQ ID NO: 964429 - DNA, 15 bp, Homo sapiens
tttaaattgtgtaat

SEQ ID NO: 964430 - DNA, 15 bp, Homo sapiens
ttaaattgtgtaatc

SEQ ID NO: 964431 - DNA, 15 bp, Homo sapiens
taaattgtgtaatcc

SEQ ID NO: 964432 - DNA, 15 bp, Homo sapiens
aaattgtgtaatcct

SEQ ID NO: 964433 - DNA, 15 bp, Homo sapiens
aattgtgtaatcctg

SEQ ID NO: 964434 - DNA, 15 bp, Homo sapiens
attgtgtaatcctgg

SEQ ID NO: 964435 - DNA, 15 bp, Homo sapiens
ttgtgtaatcctggg

SEQ ID NO: 964436 - DNA, 15 bp, Homo sapiens
tgtgtaatcctgggg

SEQ ID NO: 964437 - DNA, 15 bp, Homo sapiens
gtgtaatcctgggga

SEQ ID NO: 964438 - DNA, 15 bp, Homo sapiens
tgtaatcctggggaa

SEQ ID NO: 964439 - DNA, 15 bp, Homo sapiens
gtaatcctggggaaa

SEQ ID NO: 964440 - DNA, 15 bp, Homo sapiens
taatcctggggaaac

SEQ ID NO: 964441 - DNA, 15 bp, Homo sapiens
aatcctggggaaact

SEQ ID NO: 964442 - DNA, 15 bp, Homo sapiens
atcctggggaaacta

SEQ ID NO: 964443 - DNA, 15 bp, Homo sapiens
tcctggggaaactaa

SEQ ID NO: 964444 - DNA, 15 bp, Homo sapiens
cctggggaaactaat

SEQ ID NO: 964445 - DNA, 15 bp, Homo sapiens
ctggggaaactaatc

SEQ ID NO: 964446 - DNA, 15 bp, Homo sapiens
tggggaaactaatct

SEQ ID NO: 964447 - DNA, 15 bp, Homo sapiens
ggggaaactaatctt

SEQ ID NO: 964448 - DNA, 15 bp, Homo sapiens
gggaaactaatcttt

SEQ ID NO: 964449 - DNA, 15 bp, Homo sapiens
ggaaactaatctttt

SEQ ID NO: 964450 - DNA, 15 bp, Homo sapiens
gaaactaatcttttt

SEQ ID NO: 964451 - DNA, 15 bp, Homo sapiens
aaactaatctttttt

SEQ ID NO: 964452 - DNA, 15 bp, Homo sapiens
aactaatctttttta

SEQ ID NO: 964453 - DNA, 15 bp, Homo sapiens
actaatcttttttac

SEQ ID NO: 964454 - DNA, 15 bp, Homo sapiens
ctaatcttttttacc

SEQ ID NO: 964455 - DNA, 15 bp, Homo sapiens
taatcttttttacct

SEQ ID NO: 964456 - DNA, 15 bp, Homo sapiens
aatcttttttacctc

SEQ ID NO: 964457 - DNA, 15 bp, Homo sapiens
atcttttttacctca

SEQ ID NO: 964458 - DNA, 15 bp, Homo sapiens
tcttttttacctcag

SEQ ID NO: 964459 - DNA, 15 bp, Homo sapiens
cttttttacctcagt

SEQ ID NO: 964460 - DNA, 15 bp, Homo sapiens
ttttttacctcagtt

SEQ ID NO: 964461 - DNA, 15 bp, Homo sapiens
tttttacctcagttt

SEQ ID NO: 964462 - DNA, 15 bp, Homo sapiens
ttttacctcagtttc

SEQ ID NO: 964463 - DNA, 15 bp, Homo sapiens
tttacctcagtttct

SEQ ID NO: 964464 - DNA, 15 bp, Homo sapiens
ttacctcagtttctt

SEQ ID NO: 964465 - DNA, 15 bp, Homo sapiens
tacctcagtttcttc

SEQ ID NO: 964466 - DNA, 15 bp, Homo sapiens
acctcagtttcttcc

SEQ ID NO: 964467 - DNA, 15 bp, Homo sapiens
cctcagtttcttcca

SEQ ID NO: 964468 - DNA, 15 bp, Homo sapiens
ctcagtttcttccat

SEQ ID NO: 964469 - DNA, 15 bp, Homo sapiens
tcagtttcttccatt

SEQ ID NO: 964470 - DNA, 15 bp, Homo sapiens
cagtttcttccatta

SEQ ID NO: 964471 - DNA, 15 bp, Homo sapiens
agtttcttccattat

SEQ ID NO: 964472 - DNA, 15 bp, Homo sapiens
gtttcttccattata

SEQ ID NO: 964473 - DNA, 15 bp, Homo sapiens
tttcttccattataa

SEQ ID NO: 964474 - DNA, 15 bp, Homo sapiens
ttcttccattataaa

SEQ ID NO: 964475 - DNA, 15 bp, Homo sapiens
tcttccattataaag

SEQ ID NO: 964476 - DNA, 15 bp, Homo sapiens
cttccattataaagt

SEQ ID NO: 964477 - DNA, 15 bp, Homo sapiens
ttccattataaagtg

SEQ ID NO: 964478 - DNA, 15 bp, Homo sapiens
tccattataaagtga

SEQ ID NO: 964479 - DNA, 15 bp, Homo sapiens
ccattataaagtgaa

SEQ ID NO: 964480 - DNA, 15 bp, Homo sapiens
cattataaagtgaaa

SEQ ID NO: 964481 - DNA, 15 bp, Homo sapiens
attataaagtgaaaa

SEQ ID NO: 964482 - DNA, 15 bp, Homo sapiens
ttataaagtgaaaat

SEQ ID NO: 964483 - DNA, 15 bp, Homo sapiens
tataaagtgaaaatt

SEQ ID NO: 964484 - DNA, 15 bp, Homo sapiens
ataaagtgaaaatta

SEQ ID NO: 964485 - DNA, 15 bp, Homo sapiens
taaagtgaaaattaa

SEQ ID NO: 964486 - DNA, 15 bp, Homo sapiens
aaagtgaaaattaaa

SEQ ID NO: 964487 - DNA, 15 bp, Homo sapiens
aagtgaaaattaaaa

SEQ ID NO: 964488 - DNA, 15 bp, Homo sapiens
agtgaaaattaaaaa

SEQ ID NO: 964489 - DNA, 15 bp, Homo sapiens
gtgaaaattaaaaat

SEQ ID NO: 964490 - DNA, 15 bp, Homo sapiens
tgaaaattaaaaatt

SEQ ID NO: 964491 - DNA, 15 bp, Homo sapiens
gaaaattaaaaatta

SEQ ID NO: 964492 - DNA, 15 bp, Homo sapiens
aaaattaaaaattac

SEQ ID NO: 964493 - DNA, 15 bp, Homo sapiens
aaattaaaaattact

SEQ ID NO: 964494 - DNA, 15 bp, Homo sapiens
aattaaaaattactt

SEQ ID NO: 964495 - DNA, 15 bp, Homo sapiens
attaaaaattacttg

SEQ ID NO: 964496 - DNA, 15 bp, Homo sapiens
ttaaaaattacttga

SEQ ID NO: 964497 - DNA, 15 bp, Homo sapiens
taaaaattacttgag

SEQ ID NO: 964498 - DNA, 15 bp, Homo sapiens
aaaaattacttgagc

SEQ ID NO: 964499 - DNA, 15 bp, Homo sapiens
aaaattacttgagca

SEQ ID NO: 964500 - DNA, 15 bp, Homo sapiens
aaattacttgagcaa

SEQ ID NO: 964501 - DNA, 15 bp, Homo sapiens
aattacttgagcaaa

SEQ ID NO: 964502 - DNA, 15 bp, Homo sapiens
attacttgagcaaag

SEQ ID NO: 964503 - DNA, 15 bp, Homo sapiens
ttacttgagcaaagg

SEQ ID NO: 964504 - DNA, 15 bp, Homo sapiens
tacttgagcaaaggg

SEQ ID NO: 964505 - DNA, 15 bp, Homo sapiens
acttgagcaaagggt

SEQ ID NO: 964506 - DNA, 15 bp, Homo sapiens
cttgagcaaagggtc

SEQ ID NO: 964507 - DNA, 15 bp, Homo sapiens
ttgagcaaagggtca

SEQ ID NO: 964508 - DNA, 15 bp, Homo sapiens
tgagcaaagggtcat

SEQ ID NO: 964509 - DNA, 15 bp, Homo sapiens
gagcaaagggtcatt

SEQ ID NO: 964510 - DNA, 15 bp, Homo sapiens
agcaaagggtcattt

SEQ ID NO: 964511 - DNA, 15 bp, Homo sapiens
gcaaagggtcatttt

SEQ ID NO: 964512 - DNA, 15 bp, Homo sapiens
caaagggtcatttta

SEQ ID NO: 964513 - DNA, 15 bp, Homo sapiens
aaagggtcattttaa

SEQ ID NO: 964514 - DNA, 15 bp, Homo sapiens
aagggtcattttaag

SEQ ID NO: 964515 - DNA, 15 bp, Homo sapiens
agggtcattttaagg

SEQ ID NO: 964516 - DNA, 15 bp, Homo sapiens
gggtcattttaagga

SEQ ID NO: 964517 - DNA, 15 bp, Homo sapiens
ggtcattttaaggat

SEQ ID NO: 964518 - DNA, 15 bp, Homo sapiens
gtcattttaaggatc

SEQ ID NO: 964519 - DNA, 15 bp, Homo sapiens
tcattttaaggatca

SEQ ID NO: 964520 - DNA, 15 bp, Homo sapiens
cattttaaggatcaa

SEQ ID NO: 964521 - DNA, 15 bp, Homo sapiens
attttaaggatcaaa

SEQ ID NO: 964522 - DNA, 15 bp, Homo sapiens
ttttaaggatcaaat

SEQ ID NO: 964523 - DNA, 15 bp, Homo sapiens
tttaaggatcaaatg

SEQ ID NO: 964524 - DNA, 15 bp, Homo sapiens
ttaaggatcaaatga

SEQ ID NO: 964525 - DNA, 15 bp, Homo sapiens
taaggatcaaatgag

SEQ ID NO: 964526 - DNA, 15 bp, Homo sapiens
aaggatcaaatgagt

SEQ ID NO: 964527 - DNA, 15 bp, Homo sapiens
aggatcaaatgagtc

SEQ ID NO: 964528 - DNA, 15 bp, Homo sapiens
ggatcaaatgagtct

SEQ ID NO: 964529 - DNA, 15 bp, Homo sapiens
gatcaaatgagtctg

SEQ ID NO: 964530 - DNA, 15 bp, Homo sapiens
atcaaatgagtctga

SEQ ID NO: 964531 - DNA, 15 bp, Homo sapiens
tcaaatgagtctgaa

SEQ ID NO: 964532 - DNA, 15 bp, Homo sapiens
caaatgagtctgaat

SEQ ID NO: 964533 - DNA, 15 bp, Homo sapiens
aaatgagtctgaatg

SEQ ID NO: 964534 - DNA, 15 bp, Homo sapiens
aatgagtctgaatgt

SEQ ID NO: 964535 - DNA, 15 bp, Homo sapiens
atgagtctgaatgtc

SEQ ID NO: 964536 - DNA, 15 bp, Homo sapiens
tgagtctgaatgtcc

SEQ ID NO: 964537 - DNA, 15 bp, Homo sapiens
gagtctgaatgtcct

SEQ ID NO: 964538 - DNA, 15 bp, Homo sapiens
agtctgaatgtccta

SEQ ID NO: 964539 - DNA, 15 bp, Homo sapiens
gtctgaatgtcctac

SEQ ID NO: 964540 - DNA, 15 bp, Homo sapiens
tctgaatgtcctacc

SEQ ID NO: 964541 - DNA, 15 bp, Homo sapiens
ctgaatgtcctacca

SEQ ID NO: 964542 - DNA, 15 bp, Homo sapiens
tgaatgtcctaccac

SEQ ID NO: 964543 - DNA, 15 bp, Homo sapiens
gaatgtcctaccaca

SEQ ID NO: 964544 - DNA, 15 bp, Homo sapiens
aatgtcctaccacag

SEQ ID NO: 964545 - DNA, 15 bp, Homo sapiens
atgtcctaccacagc

SEQ ID NO: 964546 - DNA, 15 bp, Homo sapiens
tgtcctaccacagca

SEQ ID NO: 964547 - DNA, 15 bp, Homo sapiens
gtcctaccacagcac

SEQ ID NO: 964548 - DNA, 15 bp, Homo sapiens
tcctaccacagcacc

SEQ ID NO: 964549 - DNA, 15 bp, Homo sapiens
cctaccacagcaccg

SEQ ID NO: 964550 - DNA, 15 bp, Homo sapiens
ctaccacagcaccgg

SEQ ID NO: 964551 - DNA, 15 bp, Homo sapiens
taccacagcaccggg

SEQ ID NO: 964552 - DNA, 15 bp, Homo sapiens
accacagcaccggga

SEQ ID NO: 964553 - DNA, 15 bp, Homo sapiens
ccacagcaccgggag

SEQ ID NO: 964554 - DNA, 15 bp, Homo sapiens
cacagcaccgggagg

SEQ ID NO: 964555 - DNA, 15 bp, Homo sapiens
acagcaccgggagga

SEQ ID NO: 964556 - DNA, 15 bp, Homo sapiens
cagcaccgggaggat

SEQ ID NO: 964557 - DNA, 15 bp, Homo sapiens
agcaccgggaggata

SEQ ID NO: 964558 - DNA, 15 bp, Homo sapiens
gcaccgggaggatag

SEQ ID NO: 964559 - DNA, 15 bp, Homo sapiens
caccgggaggataga

SEQ ID NO: 964560 - DNA, 15 bp, Homo sapiens
accgggaggatagaa

SEQ ID NO: 964561 - DNA, 15 bp, Homo sapiens
ccgggaggatagaaa

SEQ ID NO: 964562 - DNA, 15 bp, Homo sapiens
cgggaggatagaaag

SEQ ID NO: 964563 - DNA, 15 bp, Homo sapiens
gggaggatagaaagc

SEQ ID NO: 964564 - DNA, 15 bp, Homo sapiens
ggaggatagaaagca

SEQ ID NO: 964565 - DNA, 15 bp, Homo sapiens
gaggatagaaagcac

SEQ ID NO: 964566 - DNA, 15 bp, Homo sapiens
aggatagaaagcaca

SEQ ID NO: 964567 - DNA, 15 bp, Homo sapiens
ggatagaaagcacat

SEQ ID NO: 964568 - DNA, 15 bp, Homo sapiens
gatagaaagcacata

SEQ ID NO: 964569 - DNA, 15 bp, Homo sapiens
atagaaagcacataa

SEQ ID NO: 964570 - DNA, 15 bp, Homo sapiens
tagaaagcacataat

SEQ ID NO: 964571 - DNA, 15 bp, Homo sapiens
agaaagcacataata

SEQ ID NO: 964572 - DNA, 15 bp, Homo sapiens
gaaagcacataataa

SEQ ID NO: 964573 - DNA, 15 bp, Homo sapiens
aaagcacataataaa

SEQ ID NO: 964574 - DNA, 15 bp, Homo sapiens
aagcacataataaat

SEQ ID NO: 964575 - DNA, 15 bp, Homo sapiens
agcacataataaatg

SEQ ID NO: 964576 - DNA, 15 bp, Homo sapiens
gcacataataaatgc

SEQ ID NO: 964577 - DNA, 15 bp, Homo sapiens
cacataataaatgct

SEQ ID NO: 964578 - DNA, 15 bp, Homo sapiens
acataataaatgctg

SEQ ID NO: 964579 - DNA, 15 bp, Homo sapiens
cataataaatgctga

SEQ ID NO: 964580 - DNA, 15 bp, Homo sapiens
ataataaatgctgac

SEQ ID NO: 964581 - DNA, 15 bp, Homo sapiens
taataaatgctgact

SEQ ID NO: 964582 - DNA, 15 bp, Homo sapiens
aataaatgctgactg

SEQ ID NO: 964583 - DNA, 15 bp, Homo sapiens
ataaatgctgactgt

SEQ ID NO: 964584 - DNA, 15 bp, Homo sapiens
taaatgctgactgtc

SEQ ID NO: 964585 - DNA, 15 bp, Homo sapiens
aaatgctgactgtca

SEQ ID NO: 964586 - DNA, 15 bp, Homo sapiens
aatgctgactgtcat

SEQ ID NO: 964587 - DNA, 15 bp, Homo sapiens
atgctgactgtcatt

SEQ ID NO: 964588 - DNA, 15 bp, Homo sapiens
tgctgactgtcatta

SEQ ID NO: 964589 - DNA, 15 bp, Homo sapiens
gctgactgtcattat

SEQ ID NO: 964590 - DNA, 15 bp, Homo sapiens
ctgactgtcattatt

SEQ ID NO: 964591 - DNA, 15 bp, Homo sapiens
tgactgtcattatta

SEQ ID NO: 964592 - DNA, 15 bp, Homo sapiens
gactgtcattattat

SEQ ID NO: 964593 - DNA, 15 bp, Homo sapiens
actgtcattattatc

SEQ ID NO: 964594 - DNA, 15 bp, Homo sapiens
ctgtcattattatca

SEQ ID NO: 964595 - DNA, 15 bp, Homo sapiens
tgtcattattatcac

SEQ ID NO: 964596 - DNA, 15 bp, Homo sapiens
gtcattattatcacc

SEQ ID NO: 964597 - DNA, 15 bp, Homo sapiens
tcattattatcacca

SEQ ID NO: 964598 - DNA, 15 bp, Homo sapiens
cattattatcaccac

SEQ ID NO: 964599 - DNA, 15 bp, Homo sapiens
attattatcaccaca

SEQ ID NO: 964600 - DNA, 15 bp, Homo sapiens
ttattatcaccacat

SEQ ID NO: 964601 - DNA, 15 bp, Homo sapiens
tattatcaccacata

SEQ ID NO: 964602 - DNA, 15 bp, Homo sapiens
attatcaccacatat

SEQ ID NO: 964603 - DNA, 15 bp, Homo sapiens
ttatcaccacatatt

SEQ ID NO: 964604 - DNA, 15 bp, Homo sapiens
tatcaccacatattt

SEQ ID NO: 964605 - DNA, 15 bp, Homo sapiens
atcaccacatatttt

SEQ ID NO: 964606 - DNA, 15 bp, Homo sapiens
tcaccacatattttc

SEQ ID NO: 964607 - DNA, 15 bp, Homo sapiens
caccacatattttca

SEQ ID NO: 964608 - DNA, 15 bp, Homo sapiens
accacatattttcaa

SEQ ID NO: 964609 - DNA, 15 bp, Homo sapiens
ccacatattttcaaa

SEQ ID NO: 964610 - DNA, 15 bp, Homo sapiens
cacatattttcaaac

SEQ ID NO: 964611 - DNA, 15 bp, Homo sapiens
acatattttcaaacc

SEQ ID NO: 964612 - DNA, 15 bp, Homo sapiens
catattttcaaacct

SEQ ID NO: 964613 - DNA, 15 bp, Homo sapiens
atattttcaaacctt

SEQ ID NO: 964614 - DNA, 15 bp, Homo sapiens
tattttcaaaccttg

SEQ ID NO: 964615 - DNA, 15 bp, Homo sapiens
attttcaaaccttga

SEQ ID NO: 964616 - DNA, 15 bp, Homo sapiens
ttttcaaaccttgac

SEQ ID NO: 964617 - DNA, 15 bp, Homo sapiens
tttcaaaccttgact

SEQ ID NO: 964618 - DNA, 15 bp, Homo sapiens
ttcaaaccttgactc

SEQ ID NO: 964619 - DNA, 15 bp, Homo sapiens
tcaaaccttgactca

SEQ ID NO: 964620 - DNA, 15 bp, Homo sapiens
caaaccttgactcag

SEQ ID NO: 964621 - DNA, 15 bp, Homo sapiens
aaaccttgactcagg

SEQ ID NO: 964622 - DNA, 15 bp, Homo sapiens
aaccttgactcaggg

SEQ ID NO: 964623 - DNA, 15 bp, Homo sapiens
accttgactcagggt

SEQ ID NO: 964624 - DNA, 15 bp, Homo sapiens
ccttgactcagggta

SEQ ID NO: 964625 - DNA, 15 bp, Homo sapiens
cttgactcagggtag

SEQ ID NO: 964626 - DNA, 15 bp, Homo sapiens
ttgactcagggtagt

SEQ ID NO: 964627 - DNA, 15 bp, Homo sapiens
tgactcagggtagtg

SEQ ID NO: 964628 - DNA, 15 bp, Homo sapiens
gactcagggtagtgc

SEQ ID NO: 964629 - DNA, 15 bp, Homo sapiens
actcagggtagtgcc

SEQ ID NO: 964630 - DNA, 15 bp, Homo sapiens
ctcagggtagtgcca

SEQ ID NO: 964631 - DNA, 15 bp, Homo sapiens
tcagggtagtgccag

SEQ ID NO: 964632 - DNA, 15 bp, Homo sapiens
cagggtagtgccagt

SEQ ID NO: 964633 - DNA, 15 bp, Homo sapiens
agggtagtgccagtg

SEQ ID NO: 964634 - DNA, 15 bp, Homo sapiens
gggtagtgccagtgc

SEQ ID NO: 964635 - DNA, 15 bp, Homo sapiens
ggtagtgccagtgct

SEQ ID NO: 964636 - DNA, 15 bp, Homo sapiens
gtagtgccagtgctt

SEQ ID NO: 964637 - DNA, 15 bp, Homo sapiens
tagtgccagtgctta

SEQ ID NO: 964638 - DNA, 15 bp, Homo sapiens
agtgccagtgcttag

SEQ ID NO: 964639 - DNA, 15 bp, Homo sapiens
gtgccagtgcttagg

SEQ ID NO: 964640 - DNA, 15 bp, Homo sapiens
tgccagtgcttaggg

SEQ ID NO: 964641 - DNA, 15 bp, Homo sapiens
gccagtgcttaggga

SEQ ID NO: 964642 - DNA, 15 bp, Homo sapiens
ccagtgcttagggaa

SEQ ID NO: 964643 - DNA, 15 bp, Homo sapiens
cagtgcttagggaag

SEQ ID NO: 964644 - DNA, 15 bp, Homo sapiens
agtgcttagggaagt

SEQ ID NO: 964645 - DNA, 15 bp, Homo sapiens
gtgcttagggaagtt

SEQ ID NO: 964646 - DNA, 15 bp, Homo sapiens
tgcttagggaagttt

SEQ ID NO: 964647 - DNA, 15 bp, Homo sapiens
gcttagggaagtttt

SEQ ID NO: 964648 - DNA, 15 bp, Homo sapiens
cttagggaagttttt

SEQ ID NO: 964649 - DNA, 15 bp, Homo sapiens
ttagggaagtttttc

SEQ ID NO: 964650 - DNA, 15 bp, Homo sapiens
tagggaagtttttct

SEQ ID NO: 964651 - DNA, 15 bp, Homo sapiens
agggaagtttttcta

SEQ ID NO: 964652 - DNA, 15 bp, Homo sapiens
gggaagtttttctat

SEQ ID NO: 964653 - DNA, 15 bp, Homo sapiens
ggaagtttttctatg

SEQ ID NO: 964654 - DNA, 15 bp, Homo sapiens
gaagtttttctatgg

SEQ ID NO: 964655 - DNA, 15 bp, Homo sapiens
aagtttttctatggg

SEQ ID NO: 964656 - DNA, 15 bp, Homo sapiens
agtttttctatgggt

SEQ ID NO: 964657 - DNA, 15 bp, Homo sapiens
gtttttctatgggta

SEQ ID NO: 964658 - DNA, 15 bp, Homo sapiens
tttttctatgggtac

SEQ ID NO: 964659 - DNA, 15 bp, Homo sapiens
ttttctatgggtacc

SEQ ID NO: 964660 - DNA, 15 bp, Homo sapiens
tttctatgggtaccc

SEQ ID NO: 964661 - DNA, 15 bp, Homo sapiens
ttctatgggtaccca

SEQ ID NO: 964662 - DNA, 15 bp, Homo sapiens
tctatgggtacccac

SEQ ID NO: 964663 - DNA, 15 bp, Homo sapiens
ctatgggtacccaca

SEQ ID NO: 964664 - DNA, 15 bp, Homo sapiens
tatgggtacccacag

SEQ ID NO: 964665 - DNA, 15 bp, Homo sapiens
atgggtacccacagt

SEQ ID NO: 964666 - DNA, 15 bp, Homo sapiens
tgggtacccacagta

SEQ ID NO: 964667 - DNA, 15 bp, Homo sapiens
gggtacccacagtat

SEQ ID NO: 964668 - DNA, 15 bp, Homo sapiens
ggtacccacagtatt

SEQ ID NO: 964669 - DNA, 15 bp, Homo sapiens
gtacccacagtattt

SEQ ID NO: 964670 - DNA, 15 bp, Homo sapiens
tacccacagtattta

SEQ ID NO: 964671 - DNA, 15 bp, Homo sapiens
acccacagtatttac

SEQ ID NO: 964672 - DNA, 15 bp, Homo sapiens
cccacagtatttact

SEQ ID NO: 964673 - DNA, 15 bp, Homo sapiens
ccacagtatttactc

SEQ ID NO: 964674 - DNA, 15 bp, Homo sapiens
cacagtatttactct

SEQ ID NO: 964675 - DNA, 15 bp, Homo sapiens
acagtatttactctt

SEQ ID NO: 964676 - DNA, 15 bp, Homo sapiens
cagtatttactcttc

SEQ ID NO: 964677 - DNA, 15 bp, Homo sapiens
agtatttactcttct

SEQ ID NO: 964678 - DNA, 15 bp, Homo sapiens
gtatttactcttctt

SEQ ID NO: 964679 - DNA, 15 bp, Homo sapiens
tatttactcttcttt

SEQ ID NO: 964680 - DNA, 15 bp, Homo sapiens
atttactcttctttt

SEQ ID NO: 964681 - DNA, 15 bp, Homo sapiens
tttactcttcttttg

SEQ ID NO: 964682 - DNA, 15 bp, Homo sapiens
ttactcttcttttgt

SEQ ID NO: 964683 - DNA, 15 bp, Homo sapiens
tactcttcttttgta

SEQ ID NO: 964684 - DNA, 15 bp, Homo sapiens
actcttcttttgtag

SEQ ID NO: 964685 - DNA, 15 bp, Homo sapiens
ctcttcttttgtagc

SEQ ID NO: 964686 - DNA, 15 bp, Homo sapiens
tcttcttttgtagcc

SEQ ID NO: 964687 - DNA, 15 bp, Homo sapiens
cttcttttgtagccc

SEQ ID NO: 964688 - DNA, 15 bp, Homo sapiens
ttcttttgtagccct

SEQ ID NO: 964689 - DNA, 15 bp, Homo sapiens
tcttttgtagccctg

SEQ ID NO: 964690 - DNA, 15 bp, Homo sapiens
cttttgtagccctga

SEQ ID NO: 964691 - DNA, 15 bp, Homo sapiens
ttttgtagccctgac

SEQ ID NO: 964692 - DNA, 15 bp, Homo sapiens
tttgtagccctgacc

SEQ ID NO: 964693 - DNA, 15 bp, Homo sapiens
ttgtagccctgaccc

SEQ ID NO: 964694 - DNA, 15 bp, Homo sapiens
tgtagccctgaccca

SEQ ID NO: 964695 - DNA, 15 bp, Homo sapiens
gtagccctgacccag

SEQ ID NO: 964696 - DNA, 15 bp, Homo sapiens
tagccctgacccagg

SEQ ID NO: 964697 - DNA, 15 bp, Homo sapiens
agccctgacccaggg

SEQ ID NO: 964698 - DNA, 15 bp, Homo sapiens
gccctgacccagggc

SEQ ID NO: 964699 - DNA, 15 bp, Homo sapiens
ccctgacccagggct

SEQ ID NO: 964700 - DNA, 15 bp, Homo sapiens
cctgacccagggctt

SEQ ID NO: 964701 - DNA, 15 bp, Homo sapiens
ctgacccagggctta

SEQ ID NO: 964702 - DNA, 15 bp, Homo sapiens
tgacccagggcttaa

SEQ ID NO: 964703 - DNA, 15 bp, Homo sapiens
gacccagggcttaaa

SEQ ID NO: 964704 - DNA, 15 bp, Homo sapiens
acccagggcttaaaa

SEQ ID NO: 964705 - DNA, 15 bp, Homo sapiens
cccagggcttaaaag

SEQ ID NO: 964706 - DNA, 15 bp, Homo sapiens
ccagggcttaaaagt

SEQ ID NO: 964707 - DNA, 15 bp, Homo sapiens
cagggcttaaaagtg

SEQ ID NO: 964708 - DNA, 15 bp, Homo sapiens
agggcttaaaagtgt

SEQ ID NO: 964709 - DNA, 15 bp, Homo sapiens
gggcttaaaagtgtt

SEQ ID NO: 964710 - DNA, 15 bp, Homo sapiens
ggcttaaaagtgttt

SEQ ID NO: 964711 - DNA, 15 bp, Homo sapiens
gcttaaaagtgtttt

SEQ ID NO: 964712 - DNA, 15 bp, Homo sapiens
cttaaaagtgttttt

SEQ ID NO: 964713 - DNA, 15 bp, Homo sapiens
ttaaaagtgtttttc

SEQ ID NO: 964714 - DNA, 15 bp, Homo sapiens
taaaagtgtttttca

SEQ ID NO: 964715 - DNA, 15 bp, Homo sapiens
aaaagtgtttttcat

SEQ ID NO: 964716 - DNA, 15 bp, Homo sapiens
aaagtgtttttcatt

SEQ ID NO: 964717 - DNA, 15 bp, Homo sapiens
aagtgtttttcattt

SEQ ID NO: 964718 - DNA, 15 bp, Homo sapiens
agtgtttttcatttg

SEQ ID NO: 964719 - DNA, 15 bp, Homo sapiens
gtgtttttcatttgt

SEQ ID NO: 964720 - DNA, 15 bp, Homo sapiens
tgtttttcatttgtg

SEQ ID NO: 964721 - DNA, 15 bp, Homo sapiens
gtttttcatttgtgt

SEQ ID NO: 964722 - DNA, 15 bp, Homo sapiens
tttttcatttgtgtt

SEQ ID NO: 964723 - DNA, 15 bp, Homo sapiens
ttttcatttgtgttc

SEQ ID NO: 964724 - DNA, 15 bp, Homo sapiens
tttcatttgtgttcc

SEQ ID NO: 964725 - DNA, 15 bp, Homo sapiens
ttcatttgtgttcct

SEQ ID NO: 964726 - DNA, 15 bp, Homo sapiens
tcatttgtgttcctg

SEQ ID NO: 964727 - DNA, 15 bp, Homo sapiens
catttgtgttcctgc

SEQ ID NO: 964728 - DNA, 15 bp, Homo sapiens
atttgtgttcctgca

SEQ ID NO: 964729 - DNA, 15 bp, Homo sapiens
tttgtgttcctgcat

SEQ ID NO: 964730 - DNA, 15 bp, Homo sapiens
ttgtgttcctgcata

SEQ ID NO: 964731 - DNA, 15 bp, Homo sapiens
tgtgttcctgcatac

SEQ ID NO: 964732 - DNA, 15 bp, Homo sapiens
gtgttcctgcatact

SEQ ID NO: 964733 - DNA, 15 bp, Homo sapiens
tgttcctgcatactc

SEQ ID NO: 964734 - DNA, 15 bp, Homo sapiens
gttcctgcatactcc

SEQ ID NO: 964735 - DNA, 15 bp, Homo sapiens
ttcctgcatactcca

SEQ ID NO: 964736 - DNA, 15 bp, Homo sapiens
tcctgcatactccaa

SEQ ID NO: 964737 - DNA, 15 bp, Homo sapiens
cctgcatactccaag

SEQ ID NO: 964738 - DNA, 15 bp, Homo sapiens
ctgcatactccaaga

SEQ ID NO: 964739 - DNA, 15 bp, Homo sapiens
tgcatactccaagag

SEQ ID NO: 964740 - DNA, 15 bp, Homo sapiens
gcatactccaagaga

SEQ ID NO: 964741 - DNA, 15 bp, Homo sapiens
catactccaagagaa

SEQ ID NO: 964742 - DNA, 15 bp, Homo sapiens
atactccaagagaaa

SEQ ID NO: 964743 - DNA, 15 bp, Homo sapiens
tactccaagagaaat

SEQ ID NO: 964744 - DNA, 15 bp, Homo sapiens
actccaagagaaatc

SEQ ID NO: 964745 - DNA, 15 bp, Homo sapiens
ctccaagagaaatct

SEQ ID NO: 964746 - DNA, 15 bp, Homo sapiens
tccaagagaaatctc

SEQ ID NO: 964747 - DNA, 15 bp, Homo sapiens
ccaagagaaatctct

SEQ ID NO: 964748 - DNA, 15 bp, Homo sapiens
caagagaaatctctt

SEQ ID NO: 964749 - DNA, 15 bp, Homo sapiens
aagagaaatctcttg

SEQ ID NO: 964750 - DNA, 15 bp, Homo sapiens
agagaaatctcttgc

SEQ ID NO: 964751 - DNA, 15 bp, Homo sapiens
gagaaatctcttgct

SEQ ID NO: 964752 - DNA, 15 bp, Homo sapiens
agaaatctcttgctt

SEQ ID NO: 964753 - DNA, 15 bp, Homo sapiens
gaaatctcttgcttg

SEQ ID NO: 964754 - DNA, 15 bp, Homo sapiens
aaatctcttgcttgc

SEQ ID NO: 964755 - DNA, 15 bp, Homo sapiens
aatctcttgcttgct

SEQ ID NO: 964756 - DNA, 15 bp, Homo sapiens
atctcttgcttgctt

SEQ ID NO: 964757 - DNA, 15 bp, Homo sapiens
tctcttgcttgcttt

SEQ ID NO: 964758 - DNA, 15 bp, Homo sapiens
ctcttgcttgctttt

SEQ ID NO: 964759 - DNA, 15 bp, Homo sapiens
tcttgcttgcttttt

SEQ ID NO: 964760 - DNA, 15 bp, Homo sapiens
cttgcttgctttttt

SEQ ID NO: 964761 - DNA, 15 bp, Homo sapiens
ttgcttgcttttttg

SEQ ID NO: 964762 - DNA, 15 bp, Homo sapiens
tgcttgcttttttga

SEQ ID NO: 964763 - DNA, 15 bp, Homo sapiens
gcttgcttttttgaa

SEQ ID NO: 964764 - DNA, 15 bp, Homo sapiens
cttgcttttttgaag

SEQ ID NO: 964765 - DNA, 15 bp, Homo sapiens
ttgcttttttgaagt

SEQ ID NO: 964766 - DNA, 15 bp, Homo sapiens
tgcttttttgaagtc

SEQ ID NO: 964767 - DNA, 15 bp, Homo sapiens
gcttttttgaagtcc

SEQ ID NO: 964768 - DNA, 15 bp, Homo sapiens
cttttttgaagtccc

SEQ ID NO: 964769 - DNA, 15 bp, Homo sapiens
ttttttgaagtccct

SEQ ID NO: 964770 - DNA, 15 bp, Homo sapiens
tttttgaagtcccta

SEQ ID NO: 964771 - DNA, 15 bp, Homo sapiens
ttttgaagtccctag

SEQ ID NO: 964772 - DNA, 15 bp, Homo sapiens
tttgaagtccctaga

SEQ ID NO: 964773 - DNA, 15 bp, Homo sapiens
ttgaagtccctagat

SEQ ID NO: 964774 - DNA, 15 bp, Homo sapiens
tgaagtccctagata

SEQ ID NO: 964775 - DNA, 15 bp, Homo sapiens
gaagtccctagatat

SEQ ID NO: 964776 - DNA, 15 bp, Homo sapiens
aagtccctagatata

SEQ ID NO: 964777 - DNA, 15 bp, Homo sapiens
agtccctagatatag

SEQ ID NO: 964778 - DNA, 15 bp, Homo sapiens
gtccctagatataga

SEQ ID NO: 964779 - DNA, 15 bp, Homo sapiens
tccctagatatagag

SEQ ID NO: 964780 - DNA, 15 bp, Homo sapiens
ccctagatatagagt

SEQ ID NO: 964781 - DNA, 15 bp, Homo sapiens
cctagatatagagta

SEQ ID NO: 964782 - DNA, 15 bp, Homo sapiens
ctagatatagagtaa

SEQ ID NO: 964783 - DNA, 15 bp, Homo sapiens
tagatatagagtaat

SEQ ID NO: 964784 - DNA, 15 bp, Homo sapiens
agatatagagtaatt

SEQ ID NO: 964785 - DNA, 15 bp, Homo sapiens
gatatagagtaatta

SEQ ID NO: 964786 - DNA, 15 bp, Homo sapiens
atatagagtaattac

SEQ ID NO: 964787 - DNA, 15 bp, Homo sapiens
tatagagtaattacc

SEQ ID NO: 964788 - DNA, 15 bp, Homo sapiens
atagagtaattaccc

SEQ ID NO: 964789 - DNA, 15 bp, Homo sapiens
tagagtaattacccc

SEQ ID NO: 964790 - DNA, 15 bp, Homo sapiens
agagtaattacccct

SEQ ID NO: 964791 - DNA, 15 bp, Homo sapiens
gagtaattacccctt

SEQ ID NO: 964792 - DNA, 15 bp, Homo sapiens
agtaattaccccttt

SEQ ID NO: 964793 - DNA, 15 bp, Homo sapiens
gtaattacccctttt

SEQ ID NO: 964794 - DNA, 15 bp, Homo sapiens
taattaccccttttt

SEQ ID NO: 964795 - DNA, 15 bp, Homo sapiens
aattacccctttttt

SEQ ID NO: 964796 - DNA, 15 bp, Homo sapiens
attaccccttttttg

SEQ ID NO: 964797 - DNA, 15 bp, Homo sapiens
ttaccccttttttgc

SEQ ID NO: 964798 - DNA, 15 bp, Homo sapiens
taccccttttttgct

SEQ ID NO: 964799 - DNA, 15 bp, Homo sapiens
accccttttttgctt

SEQ ID NO: 964800 - DNA, 15 bp, Homo sapiens
ccccttttttgctta

SEQ ID NO: 964801 - DNA, 15 bp, Homo sapiens
cccttttttgcttat

SEQ ID NO: 964802 - DNA, 15 bp, Homo sapiens
ccttttttgcttatt

SEQ ID NO: 964803 - DNA, 15 bp, Homo sapiens
cttttttgcttattg

SEQ ID NO: 964804 - DNA, 15 bp, Homo sapiens
ttttttgcttattgt

SEQ ID NO: 964805 - DNA, 15 bp, Homo sapiens
tttttgcttattgtc

SEQ ID NO: 964806 - DNA, 15 bp, Homo sapiens
ttttgcttattgtcc

SEQ ID NO: 964807 - DNA, 15 bp, Homo sapiens
tttgcttattgtcca

SEQ ID NO: 964808 - DNA, 15 bp, Homo sapiens
ttgcttattgtccac

SEQ ID NO: 964809 - DNA, 15 bp, Homo sapiens
tgcttattgtccaca

SEQ ID NO: 964810 - DNA, 15 bp, Homo sapiens
gcttattgtccacat

SEQ ID NO: 964811 - DNA, 15 bp, Homo sapiens
cttattgtccacata

SEQ ID NO: 964812 - DNA, 15 bp, Homo sapiens
ttattgtccacatat

SEQ ID NO: 964813 - DNA, 15 bp, Homo sapiens
tattgtccacatatt

SEQ ID NO: 964814 - DNA, 15 bp, Homo sapiens
attgtccacatattc

SEQ ID NO: 964815 - DNA, 15 bp, Homo sapiens
ttgtccacatattct

SEQ ID NO: 964816 - DNA, 15 bp, Homo sapiens
tgtccacatattctt

SEQ ID NO: 964817 - DNA, 15 bp, Homo sapiens
gtccacatattcttg

SEQ ID NO: 964818 - DNA, 15 bp, Homo sapiens
tccacatattcttgt

SEQ ID NO: 964819 - DNA, 15 bp, Homo sapiens
ccacatattcttgtc

SEQ ID NO: 964820 - DNA, 15 bp, Homo sapiens
cacatattcttgtca

SEQ ID NO: 964821 - DNA, 15 bp, Homo sapiens
acatattcttgtcac

SEQ ID NO: 964822 - DNA, 15 bp, Homo sapiens
catattcttgtcacc

SEQ ID NO: 964823 - DNA, 15 bp, Homo sapiens
atattcttgtcacca

SEQ ID NO: 964824 - DNA, 15 bp, Homo sapiens
tattcttgtcaccat

SEQ ID NO: 964825 - DNA, 15 bp, Homo sapiens
attcttgtcaccatc

SEQ ID NO: 964826 - DNA, 15 bp, Homo sapiens
ttcttgtcaccatcc

SEQ ID NO: 964827 - DNA, 15 bp, Homo sapiens
tcttgtcaccatcct

SEQ ID NO: 964828 - DNA, 15 bp, Homo sapiens
cttgtcaccatcctg

SEQ ID NO: 964829 - DNA, 15 bp, Homo sapiens
ttgtcaccatcctgg

SEQ ID NO: 964830 - DNA, 15 bp, Homo sapiens
tgtcaccatcctggt

SEQ ID NO: 964831 - DNA, 15 bp, Homo sapiens
gtcaccatcctggtt

SEQ ID NO: 964832 - DNA, 15 bp, Homo sapiens
tcaccatcctggttt

SEQ ID NO: 964833 - DNA, 15 bp, Homo sapiens
caccatcctggtttt

SEQ ID NO: 964834 - DNA, 15 bp, Homo sapiens
accatcctggtttta

SEQ ID NO: 964835 - DNA, 15 bp, Homo sapiens
ccatcctggttttat

SEQ ID NO: 964836 - DNA, 15 bp, Homo sapiens
catcctggttttatt

SEQ ID NO: 964837 - DNA, 15 bp, Homo sapiens
atcctggttttatta

SEQ ID NO: 964838 - DNA, 15 bp, Homo sapiens
tcctggttttattat

SEQ ID NO: 964839 - DNA, 15 bp, Homo sapiens
cctggttttattatg

SEQ ID NO: 964840 - DNA, 15 bp, Homo sapiens
ctggttttattatgt

SEQ ID NO: 964841 - DNA, 15 bp, Homo sapiens
tggttttattatgtc

SEQ ID NO: 964842 - DNA, 15 bp, Homo sapiens
ggttttattatgtca

SEQ ID NO: 964843 - DNA, 15 bp, Homo sapiens
gttttattatgtcag

SEQ ID NO: 964844 - DNA, 15 bp, Homo sapiens
ttttattatgtcagc

SEQ ID NO: 964845 - DNA, 15 bp, Homo sapiens
tttattatgtcagct

SEQ ID NO: 964846 - DNA, 15 bp, Homo sapiens
ttattatgtcagctc

SEQ ID NO: 964847 - DNA, 15 bp, Homo sapiens
tattatgtcagctcc

SEQ ID NO: 964848 - DNA, 15 bp, Homo sapiens
attatgtcagctccc

SEQ ID NO: 964849 - DNA, 15 bp, Homo sapiens
ttatgtcagctcccg

SEQ ID NO: 964850 - DNA, 15 bp, Homo sapiens
tatgtcagctcccgt

SEQ ID NO: 964851 - DNA, 15 bp, Homo sapiens
atgtcagctcccgtc

SEQ ID NO: 964852 - DNA, 15 bp, Homo sapiens
tgtcagctcccgtca

SEQ ID NO: 964853 - DNA, 15 bp, Homo sapiens
gtcagctcccgtcat

SEQ ID NO: 964854 - DNA, 15 bp, Homo sapiens
tcagctcccgtcatg

SEQ ID NO: 964855 - DNA, 15 bp, Homo sapiens
cagctcccgtcatgc

SEQ ID NO: 964856 - DNA, 15 bp, Homo sapiens
agctcccgtcatgcc

SEQ ID NO: 964857 - DNA, 15 bp, Homo sapiens
gctcccgtcatgcca

SEQ ID NO: 964858 - DNA, 15 bp, Homo sapiens
ctcccgtcatgccat

SEQ ID NO: 964859 - DNA, 15 bp, Homo sapiens
tcccgtcatgccatt

SEQ ID NO: 964860 - DNA, 15 bp, Homo sapiens
cccgtcatgccattt

SEQ ID NO: 964861 - DNA, 15 bp, Homo sapiens
ccgtcatgccattta

SEQ ID NO: 964862 - DNA, 15 bp, Homo sapiens
cgtcatgccatttat

SEQ ID NO: 964863 - DNA, 15 bp, Homo sapiens
gtcatgccatttatc

SEQ ID NO: 964864 - DNA, 15 bp, Homo sapiens
tcatgccatttatcc

SEQ ID NO: 964865 - DNA, 15 bp, Homo sapiens
catgccatttatcca

SEQ ID NO: 964866 - DNA, 15 bp, Homo sapiens
atgccatttatccag

SEQ ID NO: 964867 - DNA, 15 bp, Homo sapiens
tgccatttatccagt

SEQ ID NO: 964868 - DNA, 15 bp, Homo sapiens
gccatttatccagtt

SEQ ID NO: 964869 - DNA, 15 bp, Homo sapiens
ccatttatccagttt

SEQ ID NO: 964870 - DNA, 15 bp, Homo sapiens
catttatccagtttg

SEQ ID NO: 964871 - DNA, 15 bp, Homo sapiens
atttatccagtttgc

SEQ ID NO: 964872 - DNA, 15 bp, Homo sapiens
tttatccagtttgcc

SEQ ID NO: 964873 - DNA, 15 bp, Homo sapiens
ttatccagtttgcca

SEQ ID NO: 964874 - DNA, 15 bp, Homo sapiens
tatccagtttgccac

SEQ ID NO: 964875 - DNA, 15 bp, Homo sapiens
atccagtttgccaca

SEQ ID NO: 964876 - DNA, 15 bp, Homo sapiens
tccagtttgccacat

SEQ ID NO: 964877 - DNA, 15 bp, Homo sapiens
ccagtttgccacatg

SEQ ID NO: 964878 - DNA, 15 bp, Homo sapiens
cagtttgccacatgt

SEQ ID NO: 964879 - DNA, 15 bp, Homo sapiens
agtttgccacatgtg

SEQ ID NO: 964880 - DNA, 15 bp, Homo sapiens
gtttgccacatgtgg

SEQ ID NO: 964881 - DNA, 15 bp, Homo sapiens
tttgccacatgtggc

SEQ ID NO: 964882 - DNA, 15 bp, Homo sapiens
ttgccacatgtggca

SEQ ID NO: 964883 - DNA, 15 bp, Homo sapiens
tgccacatgtggcaa

SEQ ID NO: 964884 - DNA, 15 bp, Homo sapiens
gccacatgtggcaaa

SEQ ID NO: 964885 - DNA, 15 bp, Homo sapiens
ccacatgtggcaaac

SEQ ID NO: 964886 - DNA, 15 bp, Homo sapiens
cacatgtggcaaaca

SEQ ID NO: 964887 - DNA, 15 bp, Homo sapiens
acatgtggcaaacag

SEQ ID NO: 964888 - DNA, 15 bp, Homo sapiens
catgtggcaaacagt

SEQ ID NO: 964889 - DNA, 15 bp, Homo sapiens
atgtggcaaacagtg

SEQ ID NO: 964890 - DNA, 15 bp, Homo sapiens
tgtggcaaacagtga

SEQ ID NO: 964891 - DNA, 15 bp, Homo sapiens
gtggcaaacagtgat

SEQ ID NO: 964892 - DNA, 15 bp, Homo sapiens
tggcaaacagtgatt

SEQ ID NO: 964893 - DNA, 15 bp, Homo sapiens
ggcaaacagtgatta

SEQ ID NO: 964894 - DNA, 15 bp, Homo sapiens
gcaaacagtgattat

SEQ ID NO: 964895 - DNA, 15 bp, Homo sapiens
caaacagtgattatt

SEQ ID NO: 964896 - DNA, 15 bp, Homo sapiens
aaacagtgattattt

SEQ ID NO: 964897 - DNA, 15 bp, Homo sapiens
aacagtgattattta

SEQ ID NO: 964898 - DNA, 15 bp, Homo sapiens
acagtgattatttat

SEQ ID NO: 964899 - DNA, 15 bp, Homo sapiens
cagtgattatttata

SEQ ID NO: 964900 - DNA, 15 bp, Homo sapiens
agtgattatttataa

SEQ ID NO: 964901 - DNA, 15 bp, Homo sapiens
gtgattatttataaa

SEQ ID NO: 964902 - DNA, 15 bp, Homo sapiens
tgattatttataaag

SEQ ID NO: 964903 - DNA, 15 bp, Homo sapiens
gattatttataaaga

SEQ ID NO: 964904 - DNA, 15 bp, Homo sapiens
attatttataaagaa

SEQ ID NO: 964905 - DNA, 15 bp, Homo sapiens
ttatttataaagaaa

SEQ ID NO: 964906 - DNA, 15 bp, Homo sapiens
tatttataaagaaat

SEQ ID NO: 964907 - DNA, 15 bp, Homo sapiens
atttataaagaaatt

SEQ ID NO: 964908 - DNA, 15 bp, Homo sapiens
tttataaagaaattg

SEQ ID NO: 964909 - DNA, 15 bp, Homo sapiens
ttataaagaaattgt

SEQ ID NO: 964910 - DNA, 15 bp, Homo sapiens
tataaagaaattgta

SEQ ID NO: 964911 - DNA, 15 bp, Homo sapiens
ataaagaaattgtag

SEQ ID NO: 964912 - DNA, 15 bp, Homo sapiens
taaagaaattgtagt

SEQ ID NO: 964913 - DNA, 15 bp, Homo sapiens
aaagaaattgtagtt

SEQ ID NO: 964914 - DNA, 15 bp, Homo sapiens
aagaaattgtagttc

SEQ ID NO: 964915 - DNA, 15 bp, Homo sapiens
agaaattgtagttca

SEQ ID NO: 964916 - DNA, 15 bp, Homo sapiens
gaaattgtagttcat

SEQ ID NO: 964917 - DNA, 15 bp, Homo sapiens
aaattgtagttcatt

SEQ ID NO: 964918 - DNA, 15 bp, Homo sapiens
aattgtagttcattc

SEQ ID NO: 964919 - DNA, 15 bp, Homo sapiens
attgtagttcattcc

SEQ ID NO: 964920 - DNA, 15 bp, Homo sapiens
ttgtagttcattccc

SEQ ID NO: 964921 - DNA, 15 bp, Homo sapiens
tgtagttcattccct

SEQ ID NO: 964922 - DNA, 15 bp, Homo sapiens
gtagttcattcccta

SEQ ID NO: 964923 - DNA, 15 bp, Homo sapiens
tagttcattccctac

SEQ ID NO: 964924 - DNA, 15 bp, Homo sapiens
agttcattccctacc

SEQ ID NO: 964925 - DNA, 15 bp, Homo sapiens
gttcattccctacca

SEQ ID NO: 964926 - DNA, 15 bp, Homo sapiens
ttcattccctaccat

SEQ ID NO: 964927 - DNA, 15 bp, Homo sapiens
tcattccctaccata

SEQ ID NO: 964928 - DNA, 15 bp, Homo sapiens
cattccctaccatat

SEQ ID NO: 964929 - DNA, 15 bp, Homo sapiens
attccctaccatata

SEQ ID NO: 964930 - DNA, 15 bp, Homo sapiens
ttccctaccatataa

SEQ ID NO: 964931 - DNA, 15 bp, Homo sapiens
tccctaccatataat

SEQ ID NO: 964932 - DNA, 15 bp, Homo sapiens
ccctaccatataatt

SEQ ID NO: 964933 - DNA, 15 bp, Homo sapiens
cctaccatataatta

SEQ ID NO: 964934 - DNA, 15 bp, Homo sapiens
ctaccatataattac

SEQ ID NO: 964935 - DNA, 15 bp, Homo sapiens
taccatataattacg

SEQ ID NO: 964936 - DNA, 15 bp, Homo sapiens
accatataattacgg

SEQ ID NO: 964937 - DNA, 15 bp, Homo sapiens
ccatataattacggc

SEQ ID NO: 964938 - DNA, 15 bp, Homo sapiens
catataattacggca

SEQ ID NO: 964939 - DNA, 15 bp, Homo sapiens
atataattacggcaa

SEQ ID NO: 964940 - DNA, 15 bp, Homo sapiens
tataattacggcaaa

SEQ ID NO: 964941 - DNA, 15 bp, Homo sapiens
ataattacggcaaat

SEQ ID NO: 964942 - DNA, 15 bp, Homo sapiens
taattacggcaaatt

SEQ ID NO: 964943 - DNA, 15 bp, Homo sapiens
aattacggcaaattg

SEQ ID NO: 964944 - DNA, 15 bp, Homo sapiens
attacggcaaattga

SEQ ID NO: 964945 - DNA, 15 bp, Homo sapiens
ttacggcaaattgaa

SEQ ID NO: 964946 - DNA, 15 bp, Homo sapiens
tacggcaaattgaat

SEQ ID NO: 964947 - DNA, 15 bp, Homo sapiens
acggcaaattgaatt

SEQ ID NO: 964948 - DNA, 15 bp, Homo sapiens
cggcaaattgaattc

SEQ ID NO: 964949 - DNA, 15 bp, Homo sapiens
ggcaaattgaattct

SEQ ID NO: 964950 - DNA, 15 bp, Homo sapiens
gcaaattgaattcta

SEQ ID NO: 964951 - DNA, 15 bp, Homo sapiens
caaattgaattctaa

SEQ ID NO: 964952 - DNA, 15 bp, Homo sapiens
aaattgaattctaag

SEQ ID NO: 964953 - DNA, 15 bp, Homo sapiens
aattgaattctaagc

SEQ ID NO: 964954 - DNA, 15 bp, Homo sapiens
attgaattctaagcc

SEQ ID NO: 964955 - DNA, 15 bp, Homo sapiens
ttgaattctaagccc

SEQ ID NO: 964956 - DNA, 15 bp, Homo sapiens
tgaattctaagccca

SEQ ID NO: 964957 - DNA, 15 bp, Homo sapiens
gaattctaagcccaa

SEQ ID NO: 964958 - DNA, 15 bp, Homo sapiens
aattctaagcccaaa

SEQ ID NO: 964959 - DNA, 15 bp, Homo sapiens
attctaagcccaaac

SEQ ID NO: 964960 - DNA, 15 bp, Homo sapiens
ttctaagcccaaacc

SEQ ID NO: 964961 - DNA, 15 bp, Homo sapiens
tctaagcccaaaccc

SEQ ID NO: 964962 - DNA, 15 bp, Homo sapiens
ctaagcccaaacccc

SEQ ID NO: 964963 - DNA, 15 bp, Homo sapiens
taagcccaaacccct

SEQ ID NO: 964964 - DNA, 15 bp, Homo sapiens
aagcccaaacccctt

SEQ ID NO: 964965 - DNA, 15 bp, Homo sapiens
agcccaaaccccttt

SEQ ID NO: 964966 - DNA, 15 bp, Homo sapiens
gcccaaacccctttg

SEQ ID NO: 964967 - DNA, 15 bp, Homo sapiens
cccaaacccctttgc

SEQ ID NO: 964968 - DNA, 15 bp, Homo sapiens
ccaaacccctttgca

SEQ ID NO: 964969 - DNA, 15 bp, Homo sapiens
caaacccctttgcaa

SEQ ID NO: 964970 - DNA, 15 bp, Homo sapiens
aaacccctttgcaaa

SEQ ID NO: 964971 - DNA, 15 bp, Homo sapiens
aacccctttgcaaat

SEQ ID NO: 964972 - DNA, 15 bp, Homo sapiens
acccctttgcaaata

SEQ ID NO: 964973 - DNA, 15 bp, Homo sapiens
cccctttgcaaatag

SEQ ID NO: 964974 - DNA, 15 bp, Homo sapiens
ccctttgcaaatagt

SEQ ID NO: 964975 - DNA, 15 bp, Homo sapiens
cctttgcaaatagtt

SEQ ID NO: 964976 - DNA, 15 bp, Homo sapiens
ctttgcaaatagttt

SEQ ID NO: 964977 - DNA, 15 bp, Homo sapiens
tttgcaaatagtttt

SEQ ID NO: 964978 - DNA, 15 bp, Homo sapiens
ttgcaaatagttttt

SEQ ID NO: 964979 - DNA, 15 bp, Homo sapiens
tgcaaatagtttttg

SEQ ID NO: 964980 - DNA, 15 bp, Homo sapiens
gcaaatagtttttgg

SEQ ID NO: 964981 - DNA, 15 bp, Homo sapiens
caaatagtttttggc

SEQ ID NO: 964982 - DNA, 15 bp, Homo sapiens
aaatagtttttggct

SEQ ID NO: 964983 - DNA, 15 bp, Homo sapiens
aatagtttttggcta

SEQ ID NO: 964984 - DNA, 15 bp, Homo sapiens
atagtttttggctaa

SEQ ID NO: 964985 - DNA, 15 bp, Homo sapiens
tagtttttggctaaa

SEQ ID NO: 964986 - DNA, 15 bp, Homo sapiens
agtttttggctaaac

SEQ ID NO: 964987 - DNA, 15 bp, Homo sapiens
gtttttggctaaaca

SEQ ID NO: 964988 - DNA, 15 bp, Homo sapiens
tttttggctaaacaa

SEQ ID NO: 964989 - DNA, 15 bp, Homo sapiens
ttttggctaaacaat

SEQ ID NO: 964990 - DNA, 15 bp, Homo sapiens
tttggctaaacaatc

SEQ ID NO: 964991 - DNA, 15 bp, Homo sapiens
ttggctaaacaatct

SEQ ID NO: 964992 - DNA, 15 bp, Homo sapiens
tggctaaacaatctg

SEQ ID NO: 964993 - DNA, 15 bp, Homo sapiens
ggctaaacaatctga

SEQ ID NO: 964994 - DNA, 15 bp, Homo sapiens
gctaaacaatctgaa

SEQ ID NO: 964995 - DNA, 15 bp, Homo sapiens
ctaaacaatctgaaa

SEQ ID NO: 964996 - DNA, 15 bp, Homo sapiens
taaacaatctgaaaa

SEQ ID NO: 964997 - DNA, 15 bp, Homo sapiens
aaacaatctgaaaac

SEQ ID NO: 964998 - DNA, 15 bp, Homo sapiens
aacaatctgaaaact

SEQ ID NO: 964999 - DNA, 15 bp, Homo sapiens
acaatctgaaaactg

SEQ ID NO: 965000 - DNA, 15 bp, Homo sapiens
caatctgaaaactgc

SEQ ID NO: 965001 - DNA, 15 bp, Homo sapiens
aatctgaaaactgcc

SEQ ID NO: 965002 - DNA, 15 bp, Homo sapiens
atctgaaaactgcct

SEQ ID NO: 965003 - DNA, 15 bp, Homo sapiens
tctgaaaactgcctg

SEQ ID NO: 965004 - DNA, 15 bp, Homo sapiens
ctgaaaactgcctgc

SEQ ID NO: 965005 - DNA, 15 bp, Homo sapiens
tgaaaactgcctgcc

SEQ ID NO: 965006 - DNA, 15 bp, Homo sapiens
gaaaactgcctgcct

SEQ ID NO: 965007 - DNA, 15 bp, Homo sapiens
aaaactgcctgcctg

SEQ ID NO: 965008 - DNA, 15 bp, Homo sapiens
aaactgcctgcctga

SEQ ID NO: 965009 - DNA, 15 bp, Homo sapiens
aactgcctgcctgat

SEQ ID NO: 965010 - DNA, 15 bp, Homo sapiens
actgcctgcctgata

SEQ ID NO: 965011 - DNA, 15 bp, Homo sapiens
ctgcctgcctgataa

SEQ ID NO: 965012 - DNA, 15 bp, Homo sapiens
tgcctgcctgataaa

SEQ ID NO: 965013 - DNA, 15 bp, Homo sapiens
gcctgcctgataaaa

SEQ ID NO: 965014 - DNA, 15 bp, Homo sapiens
cctgcctgataaaat

SEQ ID NO: 965015 - DNA, 15 bp, Homo sapiens
ctgcctgataaaatt

SEQ ID NO: 965016 - DNA, 15 bp, Homo sapiens
tgcctgataaaattg

SEQ ID NO: 965017 - DNA, 15 bp, Homo sapiens
gcctgataaaattgg

SEQ ID NO: 965018 - DNA, 15 bp, Homo sapiens
cctgataaaattgga

SEQ ID NO: 965019 - DNA, 15 bp, Homo sapiens
ctgataaaattggag

SEQ ID NO: 965020 - DNA, 15 bp, Homo sapiens
tgataaaattggagg

SEQ ID NO: 965021 - DNA, 15 bp, Homo sapiens
gataaaattggagga

SEQ ID NO: 965022 - DNA, 15 bp, Homo sapiens
ataaaattggaggaa

SEQ ID NO: 965023 - DNA, 15 bp, Homo sapiens
taaaattggaggaaa

SEQ ID NO: 965024 - DNA, 15 bp, Homo sapiens
aaaattggaggaaac

SEQ ID NO: 965025 - DNA, 15 bp, Homo sapiens
aaattggaggaaact

SEQ ID NO: 965026 - DNA, 15 bp, Homo sapiens
aattggaggaaactg

SEQ ID NO: 965027 - DNA, 15 bp, Homo sapiens
attggaggaaactga

SEQ ID NO: 965028 - DNA, 15 bp, Homo sapiens
ttggaggaaactgag

SEQ ID NO: 965029 - DNA, 15 bp, Homo sapiens
tggaggaaactgaga

SEQ ID NO: 965030 - DNA, 15 bp, Homo sapiens
ggaggaaactgagac

SEQ ID NO: 965031 - DNA, 15 bp, Homo sapiens
gaggaaactgagaca

SEQ ID NO: 965032 - DNA, 15 bp, Homo sapiens
aggaaactgagacag

SEQ ID NO: 965033 - DNA, 15 bp, Homo sapiens
ggaaactgagacagg

SEQ ID NO: 965034 - DNA, 15 bp, Homo sapiens
gaaactgagacaggg

SEQ ID NO: 965035 - DNA, 15 bp, Homo sapiens
aaactgagacagggg

SEQ ID NO: 965036 - DNA, 15 bp, Homo sapiens
aactgagacagggga

SEQ ID NO: 965037 - DNA, 15 bp, Homo sapiens
actgagacaggggag

SEQ ID NO: 965038 - DNA, 15 bp, Homo sapiens
ctgagacaggggagt

SEQ ID NO: 965039 - DNA, 15 bp, Homo sapiens
tgagacaggggagtg

SEQ ID NO: 965040 - DNA, 15 bp, Homo sapiens
gagacaggggagtgc

SEQ ID NO: 965041 - DNA, 15 bp, Homo sapiens
agacaggggagtgcc

SEQ ID NO: 965042 - DNA, 15 bp, Homo sapiens
gacaggggagtgcct

SEQ ID NO: 965043 - DNA, 15 bp, Homo sapiens
acaggggagtgcctt

SEQ ID NO: 965044 - DNA, 15 bp, Homo sapiens
caggggagtgccttc

SEQ ID NO: 965045 - DNA, 15 bp, Homo sapiens
aggggagtgccttca

SEQ ID NO: 965046 - DNA, 15 bp, Homo sapiens
ggggagtgccttcaa

SEQ ID NO: 965047 - DNA, 15 bp, Homo sapiens
gggagtgccttcaat

SEQ ID NO: 965048 - DNA, 15 bp, Homo sapiens
ggagtgccttcaatt

SEQ ID NO: 965049 - DNA, 15 bp, Homo sapiens
gagtgccttcaatta

SEQ ID NO: 965050 - DNA, 15 bp, Homo sapiens
agtgccttcaattaa

SEQ ID NO: 965051 - DNA, 15 bp, Homo sapiens
gtgccttcaattaag

SEQ ID NO: 965052 - DNA, 15 bp, Homo sapiens
tgccttcaattaagg

SEQ ID NO: 965053 - DNA, 15 bp, Homo sapiens
gccttcaattaaggc

SEQ ID NO: 965054 - DNA, 15 bp, Homo sapiens
ccttcaattaaggca

SEQ ID NO: 965055 - DNA, 15 bp, Homo sapiens
cttcaattaaggcac

SEQ ID NO: 965056 - DNA, 15 bp, Homo sapiens
ttcaattaaggcact

SEQ ID NO: 965057 - DNA, 15 bp, Homo sapiens
tcaattaaggcacta

SEQ ID NO: 965058 - DNA, 15 bp, Homo sapiens
caattaaggcactac

SEQ ID NO: 965059 - DNA, 15 bp, Homo sapiens
aattaaggcactaca

SEQ ID NO: 965060 - DNA, 15 bp, Homo sapiens
attaaggcactacaa

SEQ ID NO: 965061 - DNA, 15 bp, Homo sapiens
ttaaggcactacaag

SEQ ID NO: 965062 - DNA, 15 bp, Homo sapiens
taaggcactacaagc

SEQ ID NO: 965063 - DNA, 15 bp, Homo sapiens
aaggcactacaagcc

SEQ ID NO: 965064 - DNA, 15 bp, Homo sapiens
aggcactacaagccc

SEQ ID NO: 965065 - DNA, 15 bp, Homo sapiens
ggcactacaagccca

SEQ ID NO: 965066 - DNA, 15 bp, Homo sapiens
gcactacaagcccag

SEQ ID NO: 965067 - DNA, 15 bp, Homo sapiens
cactacaagcccagt

SEQ ID NO: 965068 - DNA, 15 bp, Homo sapiens
actacaagcccagtt

SEQ ID NO: 965069 - DNA, 15 bp, Homo sapiens
ctacaagcccagttt

SEQ ID NO: 965070 - DNA, 15 bp, Homo sapiens
tacaagcccagtttg

SEQ ID NO: 965071 - DNA, 15 bp, Homo sapiens
acaagcccagtttga

SEQ ID NO: 965072 - DNA, 15 bp, Homo sapiens
caagcccagtttgaa

SEQ ID NO: 965073 - DNA, 15 bp, Homo sapiens
aagcccagtttgaat

SEQ ID NO: 965074 - DNA, 15 bp, Homo sapiens
agcccagtttgaatg

SEQ ID NO: 965075 - DNA, 15 bp, Homo sapiens
gcccagtttgaatga

SEQ ID NO: 965076 - DNA, 15 bp, Homo sapiens
cccagtttgaatgag

SEQ ID NO: 965077 - DNA, 15 bp, Homo sapiens
ccagtttgaatgagc

SEQ ID NO: 965078 - DNA, 15 bp, Homo sapiens
cagtttgaatgagct

SEQ ID NO: 965079 - DNA, 15 bp, Homo sapiens
agtttgaatgagcta

SEQ ID NO: 965080 - DNA, 15 bp, Homo sapiens
gtttgaatgagctag

SEQ ID NO: 965081 - DNA, 15 bp, Homo sapiens
tttgaatgagctaga

SEQ ID NO: 965082 - DNA, 15 bp, Homo sapiens
ttgaatgagctagac

SEQ ID NO: 965083 - DNA, 15 bp, Homo sapiens
tgaatgagctagact

SEQ ID NO: 965084 - DNA, 15 bp, Homo sapiens
gaatgagctagactt

SEQ ID NO: 965085 - DNA, 15 bp, Homo sapiens
aatgagctagacttt

SEQ ID NO: 965086 - DNA, 15 bp, Homo sapiens
atgagctagacttta

SEQ ID NO: 965087 - DNA, 15 bp, Homo sapiens
tgagctagactttaa

SEQ ID NO: 965088 - DNA, 15 bp, Homo sapiens
gagctagactttaat

SEQ ID NO: 965089 - DNA, 15 bp, Homo sapiens
agctagactttaatt

SEQ ID NO: 965090 - DNA, 15 bp, Homo sapiens
gctagactttaatta

SEQ ID NO: 965091 - DNA, 15 bp, Homo sapiens
ctagactttaattag

SEQ ID NO: 965092 - DNA, 15 bp, Homo sapiens
tagactttaattagg

SEQ ID NO: 965093 - DNA, 15 bp, Homo sapiens
agactttaattagga

SEQ ID NO: 965094 - DNA, 15 bp, Homo sapiens
gactttaattaggac

SEQ ID NO: 965095 - DNA, 15 bp, Homo sapiens
actttaattaggaca

SEQ ID NO: 965096 - DNA, 15 bp, Homo sapiens
ctttaattaggacac

SEQ ID NO: 965097 - DNA, 15 bp, Homo sapiens
tttaattaggacaca

SEQ ID NO: 965098 - DNA, 15 bp, Homo sapiens
ttaattaggacacaa

SEQ ID NO: 965099 - DNA, 15 bp, Homo sapiens
taattaggacacaag

SEQ ID NO: 965100 - DNA, 15 bp, Homo sapiens
aattaggacacaaga

SEQ ID NO: 965101 - DNA, 15 bp, Homo sapiens
attaggacacaagaa

SEQ ID NO: 965102 - DNA, 15 bp, Homo sapiens
ttaggacacaagaag

SEQ ID NO: 965103 - DNA, 15 bp, Homo sapiens
taggacacaagaagc

SEQ ID NO: 965104 - DNA, 15 bp, Homo sapiens
aggacacaagaagca

SEQ ID NO: 965105 - DNA, 15 bp, Homo sapiens
ggacacaagaagcaa

SEQ ID NO: 965106 - DNA, 15 bp, Homo sapiens
gacacaagaagcaat

SEQ ID NO: 965107 - DNA, 15 bp, Homo sapiens
acacaagaagcaatt

SEQ ID NO: 965108 - DNA, 15 bp, Homo sapiens
cacaagaagcaattt

SEQ ID NO: 965109 - DNA, 15 bp, Homo sapiens
acaagaagcaattta

SEQ ID NO: 965110 - DNA, 15 bp, Homo sapiens
caagaagcaatttag

SEQ ID NO: 965111 - DNA, 15 bp, Homo sapiens
aagaagcaatttaga

SEQ ID NO: 965112 - DNA, 15 bp, Homo sapiens
agaagcaatttagag

SEQ ID NO: 965113 - DNA, 15 bp, Homo sapiens
gaagcaatttagaga

SEQ ID NO: 965114 - DNA, 15 bp, Homo sapiens
aagcaatttagagat

SEQ ID NO: 965115 - DNA, 15 bp, Homo sapiens
agcaatttagagata

SEQ ID NO: 965116 - DNA, 15 bp, Homo sapiens
gcaatttagagataa

SEQ ID NO: 965117 - DNA, 15 bp, Homo sapiens
caatttagagataat

SEQ ID NO: 965118 - DNA, 15 bp, Homo sapiens
aatttagagataatc

SEQ ID NO: 965119 - DNA, 15 bp, Homo sapiens
atttagagataatct

SEQ ID NO: 965120 - DNA, 15 bp, Homo sapiens
tttagagataatctc

SEQ ID NO: 965121 - DNA, 15 bp, Homo sapiens
ttagagataatctca

SEQ ID NO: 965122 - DNA, 15 bp, Homo sapiens
tagagataatctcac

SEQ ID NO: 965123 - DNA, 15 bp, Homo sapiens
agagataatctcact

SEQ ID NO: 965124 - DNA, 15 bp, Homo sapiens
gagataatctcacta

SEQ ID NO: 965125 - DNA, 15 bp, Homo sapiens
agataatctcactaa

SEQ ID NO: 965126 - DNA, 15 bp, Homo sapiens
gataatctcactaaa

SEQ ID NO: 965127 - DNA, 15 bp, Homo sapiens
ataatctcactaaat

SEQ ID NO: 965128 - DNA, 15 bp, Homo sapiens
taatctcactaaatc

SEQ ID NO: 965129 - DNA, 15 bp, Homo sapiens
aatctcactaaatca

SEQ ID NO: 965130 - DNA, 15 bp, Homo sapiens
atctcactaaatcaa

SEQ ID NO: 965131 - DNA, 15 bp, Homo sapiens
tctcactaaatcaaa

SEQ ID NO: 965132 - DNA, 15 bp, Homo sapiens
ctcactaaatcaaaa

SEQ ID NO: 965133 - DNA, 15 bp, Homo sapiens
tcactaaatcaaaaa

SEQ ID NO: 965134 - DNA, 15 bp, Homo sapiens
cactaaatcaaaaaa

SEQ ID NO: 965135 - DNA, 15 bp, Homo sapiens
actaaatcaaaaaac

SEQ ID NO: 965136 - DNA, 15 bp, Homo sapiens
ctaaatcaaaaaact

SEQ ID NO: 965137 - DNA, 15 bp, Homo sapiens
taaatcaaaaaactg

SEQ ID NO: 965138 - DNA, 15 bp, Homo sapiens
aaatcaaaaaactga

SEQ ID NO: 965139 - DNA, 15 bp, Homo sapiens
aatcaaaaaactgaa

SEQ ID NO: 965140 - DNA, 15 bp, Homo sapiens
atcaaaaaactgaat

SEQ ID NO: 965141 - DNA, 15 bp, Homo sapiens
tcaaaaaactgaatg

SEQ ID NO: 965142 - DNA, 15 bp, Homo sapiens
caaaaaactgaatga

SEQ ID NO: 965143 - DNA, 15 bp, Homo sapiens
aaaaaactgaatgat

SEQ ID NO: 965144 - DNA, 15 bp, Homo sapiens
aaaaactgaatgata

SEQ ID NO: 965145 - DNA, 15 bp, Homo sapiens
aaaactgaatgataa

SEQ ID NO: 965146 - DNA, 15 bp, Homo sapiens
aaactgaatgataag

SEQ ID NO: 965147 - DNA, 15 bp, Homo sapiens
aactgaatgataagc

SEQ ID NO: 965148 - DNA, 15 bp, Homo sapiens
actgaatgataagcg

SEQ ID NO: 965149 - DNA, 15 bp, Homo sapiens
ctgaatgataagcgt

SEQ ID NO: 965150 - DNA, 15 bp, Homo sapiens
tgaatgataagcgtg

SEQ ID NO: 965151 - DNA, 15 bp, Homo sapiens
gaatgataagcgtga

SEQ ID NO: 965152 - DNA, 15 bp, Homo sapiens
aatgataagcgtgag

SEQ ID NO: 965153 - DNA, 15 bp, Homo sapiens
atgataagcgtgagc

SEQ ID NO: 965154 - DNA, 15 bp, Homo sapiens
tgataagcgtgagca

SEQ ID NO: 965155 - DNA, 15 bp, Homo sapiens
gataagcgtgagcat

SEQ ID NO: 965156 - DNA, 15 bp, Homo sapiens
ataagcgtgagcatt

SEQ ID NO: 965157 - DNA, 15 bp, Homo sapiens
taagcgtgagcatta

SEQ ID NO: 965158 - DNA, 15 bp, Homo sapiens
aagcgtgagcattac

SEQ ID NO: 965159 - DNA, 15 bp, Homo sapiens
agcgtgagcattact

SEQ ID NO: 965160 - DNA, 15 bp, Homo sapiens
gcgtgagcattactg

SEQ ID NO: 965161 - DNA, 15 bp, Homo sapiens
cgtgagcattactgt

SEQ ID NO: 965162 - DNA, 15 bp, Homo sapiens
gtgagcattactgtg

SEQ ID NO: 965163 - DNA, 15 bp, Homo sapiens
tgagcattactgtgc

SEQ ID NO: 965164 - DNA, 15 bp, Homo sapiens
gagcattactgtgca

SEQ ID NO: 965165 - DNA, 15 bp, Homo sapiens
agcattactgtgcag

SEQ ID NO: 965166 - DNA, 15 bp, Homo sapiens
gcattactgtgcaga

SEQ ID NO: 965167 - DNA, 15 bp, Homo sapiens
cattactgtgcagag

SEQ ID NO: 965168 - DNA, 15 bp, Homo sapiens
attactgtgcagaga

SEQ ID NO: 965169 - DNA, 15 bp, Homo sapiens
ttactgtgcagagaa

SEQ ID NO: 965170 - DNA, 15 bp, Homo sapiens
tactgtgcagagaaa

SEQ ID NO: 965171 - DNA, 15 bp, Homo sapiens
actgtgcagagaaat

SEQ ID NO: 965172 - DNA, 15 bp, Homo sapiens
ctgtgcagagaaatg

SEQ ID NO: 965173 - DNA, 15 bp, Homo sapiens
tgtgcagagaaatga

SEQ ID NO: 965174 - DNA, 15 bp, Homo sapiens
gtgcagagaaatgat

SEQ ID NO: 965175 - DNA, 15 bp, Homo sapiens
tgcagagaaatgatt

SEQ ID NO: 965176 - DNA, 15 bp, Homo sapiens
gcagagaaatgattt

SEQ ID NO: 965177 - DNA, 15 bp, Homo sapiens
cagagaaatgatttt

SEQ ID NO: 965178 - DNA, 15 bp, Homo sapiens
agagaaatgattttc

SEQ ID NO: 965179 - DNA, 15 bp, Homo sapiens
gagaaatgattttcc

SEQ ID NO: 965180 - DNA, 15 bp, Homo sapiens
agaaatgattttcct

SEQ ID NO: 965181 - DNA, 15 bp, Homo sapiens
gaaatgattttcctg

SEQ ID NO: 965182 - DNA, 15 bp, Homo sapiens
aaatgattttcctgt

SEQ ID NO: 965183 - DNA, 15 bp, Homo sapiens
aatgattttcctgtt

SEQ ID NO: 965184 - DNA, 15 bp, Homo sapiens
atgattttcctgttg

SEQ ID NO: 965185 - DNA, 15 bp, Homo sapiens
tgattttcctgttga

SEQ ID NO: 965186 - DNA, 15 bp, Homo sapiens
gattttcctgttgaa

SEQ ID NO: 965187 - DNA, 15 bp, Homo sapiens
attttcctgttgaag

SEQ ID NO: 965188 - DNA, 15 bp, Homo sapiens
ttttcctgttgaagg

SEQ ID NO: 965189 - DNA, 15 bp, Homo sapiens
tttcctgttgaagga

SEQ ID NO: 965190 - DNA, 15 bp, Homo sapiens
ttcctgttgaaggag

SEQ ID NO: 965191 - DNA, 15 bp, Homo sapiens
tcctgttgaaggaga

SEQ ID NO: 965192 - DNA, 15 bp, Homo sapiens
cctgttgaaggagat

SEQ ID NO: 965193 - DNA, 15 bp, Homo sapiens
ctgttgaaggagatt

SEQ ID NO: 965194 - DNA, 15 bp, Homo sapiens
tgttgaaggagatta

SEQ ID NO: 965195 - DNA, 15 bp, Homo sapiens
gttgaaggagattat

SEQ ID NO: 965196 - DNA, 15 bp, Homo sapiens
ttgaaggagattatg

SEQ ID NO: 965197 - DNA, 15 bp, Homo sapiens
tgaaggagattatgg

SEQ ID NO: 965198 - DNA, 15 bp, Homo sapiens
gaaggagattatgga

SEQ ID NO: 965199 - DNA, 15 bp, Homo sapiens
aaggagattatggag

SEQ ID NO: 965200 - DNA, 15 bp, Homo sapiens
aggagattatggagc

SEQ ID NO: 965201 - DNA, 15 bp, Homo sapiens
ggagattatggagca

SEQ ID NO: 965202 - DNA, 15 bp, Homo sapiens
gagattatggagcac

SEQ ID NO: 965203 - DNA, 15 bp, Homo sapiens
agattatggagcacc

SEQ ID NO: 965204 - DNA, 15 bp, Homo sapiens
gattatggagcacct

SEQ ID NO: 965205 - DNA, 15 bp, Homo sapiens
attatggagcacctt

SEQ ID NO: 965206 - DNA, 15 bp, Homo sapiens
ttatggagcacctta

SEQ ID NO: 965207 - DNA, 15 bp, Homo sapiens
tatggagcaccttag

SEQ ID NO: 965208 - DNA, 15 bp, Homo sapiens
atggagcaccttaga

SEQ ID NO: 965209 - DNA, 15 bp, Homo sapiens
tggagcaccttagag

SEQ ID NO: 965210 - DNA, 15 bp, Homo sapiens
ggagcaccttagagc

SEQ ID NO: 965211 - DNA, 15 bp, Homo sapiens
gagcaccttagagct

SEQ ID NO: 965212 - DNA, 15 bp, Homo sapiens
agcaccttagagctg

SEQ ID NO: 965213 - DNA, 15 bp, Homo sapiens
gcaccttagagctgt

SEQ ID NO: 965214 - DNA, 15 bp, Homo sapiens
caccttagagctgta

SEQ ID NO: 965215 - DNA, 15 bp, Homo sapiens
accttagagctgtag

SEQ ID NO: 965216 - DNA, 15 bp, Homo sapiens
ccttagagctgtagg

SEQ ID NO: 965217 - DNA, 15 bp, Homo sapiens
cttagagctgtagga

SEQ ID NO: 965218 - DNA, 15 bp, Homo sapiens
ttagagctgtaggaa

SEQ ID NO: 965219 - DNA, 15 bp, Homo sapiens
tagagctgtaggaag

SEQ ID NO: 965220 - DNA, 15 bp, Homo sapiens
agagctgtaggaagt

SEQ ID NO: 965221 - DNA, 15 bp, Homo sapiens
gagctgtaggaagtg

SEQ ID NO: 965222 - DNA, 15 bp, Homo sapiens
agctgtaggaagtgg

SEQ ID NO: 965223 - DNA, 15 bp, Homo sapiens
gctgtaggaagtgga

SEQ ID NO: 965224 - DNA, 15 bp, Homo sapiens
ctgtaggaagtggaa

SEQ ID NO: 965225 - DNA, 15 bp, Homo sapiens
tgtaggaagtggaaa

SEQ ID NO: 965226 - DNA, 15 bp, Homo sapiens
gtaggaagtggaaac

SEQ ID NO: 965227 - DNA, 15 bp, Homo sapiens
taggaagtggaaacg

SEQ ID NO: 965228 - DNA, 15 bp, Homo sapiens
aggaagtggaaacgg

SEQ ID NO: 965229 - DNA, 15 bp, Homo sapiens
ggaagtggaaacgga

SEQ ID NO: 965230 - DNA, 15 bp, Homo sapiens
gaagtggaaacggac

SEQ ID NO: 965231 - DNA, 15 bp, Homo sapiens
aagtggaaacggaca

SEQ ID NO: 965232 - DNA, 15 bp, Homo sapiens
agtggaaacggacat

SEQ ID NO: 965233 - DNA, 15 bp, Homo sapiens
gtggaaacggacatg

SEQ ID NO: 965234 - DNA, 15 bp, Homo sapiens
tggaaacggacatga

SEQ ID NO: 965235 - DNA, 15 bp, Homo sapiens
ggaaacggacatgaa

SEQ ID NO: 965236 - DNA, 15 bp, Homo sapiens
gaaacggacatgaat

SEQ ID NO: 965237 - DNA, 15 bp, Homo sapiens
aaacggacatgaatt

SEQ ID NO: 965238 - DNA, 15 bp, Homo sapiens
aacggacatgaatta

SEQ ID NO: 965239 - DNA, 15 bp, Homo sapiens
acggacatgaattat

SEQ ID NO: 965240 - DNA, 15 bp, Homo sapiens
cggacatgaattatt

SEQ ID NO: 965241 - DNA, 15 bp, Homo sapiens
ggacatgaattattt

SEQ ID NO: 965242 - DNA, 15 bp, Homo sapiens
gacatgaattatttt

SEQ ID NO: 965243 - DNA, 15 bp, Homo sapiens
acatgaattattttt

SEQ ID NO: 965244 - DNA, 15 bp, Homo sapiens
catgaattattttta

SEQ ID NO: 965245 - DNA, 15 bp, Homo sapiens
atgaattatttttaa

SEQ ID NO: 965246 - DNA, 15 bp, Homo sapiens
tgaattatttttaaa

SEQ ID NO: 965247 - DNA, 15 bp, Homo sapiens
gaattatttttaaag

SEQ ID NO: 965248 - DNA, 15 bp, Homo sapiens
aattatttttaaaga

SEQ ID NO: 965249 - DNA, 15 bp, Homo sapiens
attatttttaaagaa

SEQ ID NO: 965250 - DNA, 15 bp, Homo sapiens
ttatttttaaagaaa

SEQ ID NO: 965251 - DNA, 15 bp, Homo sapiens
tatttttaaagaaat

SEQ ID NO: 965252 - DNA, 15 bp, Homo sapiens
atttttaaagaaatg

SEQ ID NO: 965253 - DNA, 15 bp, Homo sapiens
tttttaaagaaatgt

SEQ ID NO: 965254 - DNA, 15 bp, Homo sapiens
ttttaaagaaatgtg

SEQ ID NO: 965255 - DNA, 15 bp, Homo sapiens
tttaaagaaatgtgt

SEQ ID NO: 965256 - DNA, 15 bp, Homo sapiens
ttaaagaaatgtgta

SEQ ID NO: 965257 - DNA, 15 bp, Homo sapiens
taaagaaatgtgtac

SEQ ID NO: 965258 - DNA, 15 bp, Homo sapiens
aaagaaatgtgtaca

SEQ ID NO: 965259 - DNA, 15 bp, Homo sapiens
aagaaatgtgtacat

SEQ ID NO: 965260 - DNA, 15 bp, Homo sapiens
agaaatgtgtacatt

SEQ ID NO: 965261 - DNA, 15 bp, Homo sapiens
gaaatgtgtacattt

SEQ ID NO: 965262 - DNA, 15 bp, Homo sapiens
aaatgtgtacattta

SEQ ID NO: 965263 - DNA, 15 bp, Homo sapiens
aatgtgtacatttat

SEQ ID NO: 965264 - DNA, 15 bp, Homo sapiens
atgtgtacatttata

SEQ ID NO: 965265 - DNA, 15 bp, Homo sapiens
tgtgtacatttatat

SEQ ID NO: 965266 - DNA, 15 bp, Homo sapiens
gtgtacatttatata

SEQ ID NO: 965267 - DNA, 15 bp, Homo sapiens
tgtacatttatatat

SEQ ID NO: 965268 - DNA, 15 bp, Homo sapiens
gtacatttatatata

SEQ ID NO: 965269 - DNA, 15 bp, Homo sapiens
tacatttatatataa

SEQ ID NO: 965270 - DNA, 15 bp, Homo sapiens
acatttatatataac

SEQ ID NO: 965271 - DNA, 15 bp, Homo sapiens
catttatatataaca

SEQ ID NO: 965272 - DNA, 15 bp, Homo sapiens
atttatatataacat

SEQ ID NO: 965273 - DNA, 15 bp, Homo sapiens
tttatatataacatt

SEQ ID NO: 965274 - DNA, 15 bp, Homo sapiens
ttatatataacattt

SEQ ID NO: 965275 - DNA, 15 bp, Homo sapiens
tatatataacatttg

SEQ ID NO: 965276 - DNA, 15 bp, Homo sapiens
atatataacatttgc

SEQ ID NO: 965277 - DNA, 15 bp, Homo sapiens
tatataacatttgca

SEQ ID NO: 965278 - DNA, 15 bp, Homo sapiens
atataacatttgcac

SEQ ID NO: 965279 - DNA, 15 bp, Homo sapiens
tataacatttgcacc

SEQ ID NO: 965280 - DNA, 15 bp, Homo sapiens
ataacatttgcacct

SEQ ID NO: 965281 - DNA, 15 bp, Homo sapiens
taacatttgcacctc

SEQ ID NO: 965282 - DNA, 15 bp, Homo sapiens
aacatttgcacctca

SEQ ID NO: 965283 - DNA, 15 bp, Homo sapiens
acatttgcacctcaa

SEQ ID NO: 965284 - DNA, 15 bp, Homo sapiens
catttgcacctcaaa

SEQ ID NO: 965285 - DNA, 15 bp, Homo sapiens
atttgcacctcaaag

SEQ ID NO: 965286 - DNA, 15 bp, Homo sapiens
tttgcacctcaaaga

SEQ ID NO: 965287 - DNA, 15 bp, Homo sapiens
ttgcacctcaaagaa

SEQ ID NO: 965288 - DNA, 15 bp, Homo sapiens
tgcacctcaaagaac

SEQ ID NO: 965289 - DNA, 15 bp, Homo sapiens
gcacctcaaagaacg

SEQ ID NO: 965290 - DNA, 15 bp, Homo sapiens
cacctcaaagaacgc

SEQ ID NO: 965291 - DNA, 15 bp, Homo sapiens
acctcaaagaacgct

SEQ ID NO: 965292 - DNA, 15 bp, Homo sapiens
cctcaaagaacgctt

SEQ ID NO: 965293 - DNA, 15 bp, Homo sapiens
ctcaaagaacgcttt

SEQ ID NO: 965294 - DNA, 15 bp, Homo sapiens
tcaaagaacgctttt

SEQ ID NO: 965295 - DNA, 15 bp, Homo sapiens
caaagaacgcttttg

SEQ ID NO: 965296 - DNA, 15 bp, Homo sapiens
aaagaacgcttttga

SEQ ID NO: 965297 - DNA, 15 bp, Homo sapiens
aagaacgcttttgaa

SEQ ID NO: 965298 - DNA, 15 bp, Homo sapiens
agaacgcttttgaag

SEQ ID NO: 965299 - DNA, 15 bp, Homo sapiens
gaacgcttttgaagt

SEQ ID NO: 965300 - DNA, 15 bp, Homo sapiens
aacgcttttgaagta

SEQ ID NO: 965301 - DNA, 15 bp, Homo sapiens
acgcttttgaagtaa

SEQ ID NO: 965302 - DNA, 15 bp, Homo sapiens
cgcttttgaagtaat

SEQ ID NO: 965303 - DNA, 15 bp, Homo sapiens
gcttttgaagtaatt

SEQ ID NO: 965304 - DNA, 15 bp, Homo sapiens
cttttgaagtaatta

SEQ ID NO: 965305 - DNA, 15 bp, Homo sapiens
ttttgaagtaattac

SEQ ID NO: 965306 - DNA, 15 bp, Homo sapiens
tttgaagtaattaca

SEQ ID NO: 965307 - DNA, 15 bp, Homo sapiens
ttgaagtaattacaa

SEQ ID NO: 965308 - DNA, 15 bp, Homo sapiens
tgaagtaattacaaa

SEQ ID NO: 965309 - DNA, 15 bp, Homo sapiens
gaagtaattacaaat

SEQ ID NO: 965310 - DNA, 15 bp, Homo sapiens
aagtaattacaaatt

SEQ ID NO: 965311 - DNA, 15 bp, Homo sapiens
agtaattacaaattc

SEQ ID NO: 965312 - DNA, 15 bp, Homo sapiens
gtaattacaaattca

SEQ ID NO: 965313 - DNA, 15 bp, Homo sapiens
taattacaaattcag

SEQ ID NO: 965314 - DNA, 15 bp, Homo sapiens
aattacaaattcagt

SEQ ID NO: 965315 - DNA, 15 bp, Homo sapiens
attacaaattcagta

SEQ ID NO: 965316 - DNA, 15 bp, Homo sapiens
ttacaaattcagtat

SEQ ID NO: 965317 - DNA, 15 bp, Homo sapiens
tacaaattcagtata

SEQ ID NO: 965318 - DNA, 15 bp, Homo sapiens
acaaattcagtatag

SEQ ID NO: 965319 - DNA, 15 bp, Homo sapiens
caaattcagtatagc

SEQ ID NO: 965320 - DNA, 15 bp, Homo sapiens
aaattcagtatagct

SEQ ID NO: 965321 - DNA, 15 bp, Homo sapiens
aattcagtatagcta

SEQ ID NO: 965322 - DNA, 15 bp, Homo sapiens
attcagtatagctaa

SEQ ID NO: 965323 - DNA, 15 bp, Homo sapiens
ttcagtatagctaac

SEQ ID NO: 965324 - DNA, 15 bp, Homo sapiens
tcagtatagctaact

SEQ ID NO: 965325 - DNA, 15 bp, Homo sapiens
cagtatagctaactc

SEQ ID NO: 965326 - DNA, 15 bp, Homo sapiens
agtatagctaactcg

SEQ ID NO: 965327 - DNA, 15 bp, Homo sapiens
gtatagctaactcgg

SEQ ID NO: 965328 - DNA, 15 bp, Homo sapiens
tatagctaactcgga

SEQ ID NO: 965329 - DNA, 15 bp, Homo sapiens
atagctaactcggag

SEQ ID NO: 965330 - DNA, 15 bp, Homo sapiens
tagctaactcggagg

SEQ ID NO: 965331 - DNA, 15 bp, Homo sapiens
agctaactcggaggg

SEQ ID NO: 965332 - DNA, 15 bp, Homo sapiens
gctaactcggaggga

SEQ ID NO: 965333 - DNA, 15 bp, Homo sapiens
ctaactcggagggac

SEQ ID NO: 965334 - DNA, 15 bp, Homo sapiens
taactcggagggact

SEQ ID NO: 965335 - DNA, 15 bp, Homo sapiens
aactcggagggactg

SEQ ID NO: 965336 - DNA, 15 bp, Homo sapiens
actcggagggactga

SEQ ID NO: 965337 - DNA, 15 bp, Homo sapiens
ctcggagggactgat

SEQ ID NO: 965338 - DNA, 15 bp, Homo sapiens
tcggagggactgatg

SEQ ID NO: 965339 - DNA, 15 bp, Homo sapiens
cggagggactgatgt

SEQ ID NO: 965340 - DNA, 15 bp, Homo sapiens
ggagggactgatgtt

SEQ ID NO: 965341 - DNA, 15 bp, Homo sapiens
gagggactgatgttg

SEQ ID NO: 965342 - DNA, 15 bp, Homo sapiens
agggactgatgttgt

SEQ ID NO: 965343 - DNA, 15 bp, Homo sapiens
gggactgatgttgtt

SEQ ID NO: 965344 - DNA, 15 bp, Homo sapiens
ggactgatgttgttt

SEQ ID NO: 965345 - DNA, 15 bp, Homo sapiens
gactgatgttgtttt

SEQ ID NO: 965346 - DNA, 15 bp, Homo sapiens
actgatgttgttttg

SEQ ID NO: 965347 - DNA, 15 bp, Homo sapiens
ctgatgttgttttgt

SEQ ID NO: 965348 - DNA, 15 bp, Homo sapiens
tgatgttgttttgtc

SEQ ID NO: 965349 - DNA, 15 bp, Homo sapiens
gatgttgttttgtca

SEQ ID NO: 965350 - DNA, 15 bp, Homo sapiens
atgttgttttgtcat

SEQ ID NO: 965351 - DNA, 15 bp, Homo sapiens
tgttgttttgtcatt

SEQ ID NO: 965352 - DNA, 15 bp, Homo sapiens
gttgttttgtcattt

SEQ ID NO: 965353 - DNA, 15 bp, Homo sapiens
ttgttttgtcattta

SEQ ID NO: 965354 - DNA, 15 bp, Homo sapiens
tgttttgtcatttaa

SEQ ID NO: 965355 - DNA, 15 bp, Homo sapiens
gttttgtcatttaag

SEQ ID NO: 965356 - DNA, 15 bp, Homo sapiens
ttttgtcatttaaga

SEQ ID NO: 965357 - DNA, 15 bp, Homo sapiens
tttgtcatttaagat

SEQ ID NO: 965358 - DNA, 15 bp, Homo sapiens
ttgtcatttaagata

SEQ ID NO: 965359 - DNA, 15 bp, Homo sapiens
tgtcatttaagatat

SEQ ID NO: 965360 - DNA, 15 bp, Homo sapiens
gtcatttaagatatt

SEQ ID NO: 965361 - DNA, 15 bp, Homo sapiens
tcatttaagatatta

SEQ ID NO: 965362 - DNA, 15 bp, Homo sapiens
catttaagatattaa

SEQ ID NO: 965363 - DNA, 15 bp, Homo sapiens
atttaagatattaaa

SEQ ID NO: 965364 - DNA, 15 bp, Homo sapiens
tttaagatattaaaa

SEQ ID NO: 965365 - DNA, 15 bp, Homo sapiens
ttaagatattaaaat

SEQ ID NO: 965366 - DNA, 15 bp, Homo sapiens
taagatattaaaata

SEQ ID NO: 965367 - DNA, 15 bp, Homo sapiens
aagatattaaaataa

SEQ ID NO: 965368 - DNA, 15 bp, Homo sapiens
agatattaaaataaa

SEQ ID NO: 965369 - DNA, 15 bp, Homo sapiens
gatattaaaataaag

SEQ ID NO: 965370 - DNA, 15 bp, Homo sapiens
atattaaaataaagt

SEQ ID NO: 965371 - DNA, 15 bp, Homo sapiens
tattaaaataaagtt

SEQ ID NO: 965372 - DNA, 15 bp, Homo sapiens
attaaaataaagttt

SEQ ID NO: 965373 - DNA, 15 bp, Homo sapiens
ttaaaataaagtttt

SEQ ID NO: 965374 - DNA, 15 bp, Homo sapiens
taaaataaagtttta

SEQ ID NO: 965375 - DNA, 15 bp, Homo sapiens
aaaataaagttttac

SEQ ID NO: 965376 - DNA, 15 bp, Homo sapiens
aaataaagttttact

SEQ ID NO: 965377 - DNA, 15 bp, Homo sapiens
aataaagttttactc

SEQ ID NO: 965378 - DNA, 15 bp, Homo sapiens
ataaagttttactcc

SEQ ID NO: 965379 - DNA, 15 bp, Homo sapiens
taaagttttactcca

SEQ ID NO: 965380 - DNA, 15 bp, Homo sapiens
aaagttttactccaa

SEQ ID NO: 965381 - DNA, 15 bp, Homo sapiens
aagttttactccaag

SEQ ID NO: 965382 - DNA, 15 bp, Homo sapiens
agttttactccaagc

SEQ ID NO: 965383 - DNA, 15 bp, Homo sapiens
gttttactccaagcg

SEQ ID NO: 965384 - DNA, 15 bp, Homo sapiens
ttttactccaagcgc

SEQ ID NO: 965385 - DNA, 15 bp, Homo sapiens
tttactccaagcgct

SEQ ID NO: 965386 - DNA, 15 bp, Homo sapiens
ttactccaagcgctc

SEQ ID NO: 965387 - DNA, 15 bp, Homo sapiens
tactccaagcgctct

SEQ ID NO: 965388 - DNA, 15 bp, Homo sapiens
actccaagcgctctg

SEQ ID NO: 965389 - DNA, 15 bp, Homo sapiens
ctccaagcgctctgg

SEQ ID NO: 965390 - DNA, 15 bp, Homo sapiens
tccaagcgctctggt

SEQ ID NO: 965391 - DNA, 15 bp, Homo sapiens
ccaagcgctctggta

SEQ ID NO: 965392 - DNA, 15 bp, Homo sapiens
caagcgctctggtag

SEQ ID NO: 965393 - DNA, 15 bp, Homo sapiens
aagcgctctggtagg

SEQ ID NO: 965394 - DNA, 15 bp, Homo sapiens
agcgctctggtagga

SEQ ID NO: 965395 - DNA, 15 bp, Homo sapiens
gcgctctggtaggag

SEQ ID NO: 965396 - DNA, 15 bp, Homo sapiens
cgctctggtaggagg

SEQ ID NO: 965397 - DNA, 15 bp, Homo sapiens
gctctggtaggaggt

SEQ ID NO: 965398 - DNA, 15 bp, Homo sapiens
ctctggtaggaggtg

SEQ ID NO: 965399 - DNA, 15 bp, Homo sapiens
tctggtaggaggtgg

SEQ ID NO: 965400 - DNA, 15 bp, Homo sapiens
ctggtaggaggtgga

SEQ ID NO: 965401 - DNA, 15 bp, Homo sapiens
tggtaggaggtggaa

SEQ ID NO: 965402 - DNA, 15 bp, Homo sapiens
ggtaggaggtggaat

SEQ ID NO: 965403 - DNA, 15 bp, Homo sapiens
gtaggaggtggaatg

SEQ ID NO: 965404 - DNA, 15 bp, Homo sapiens
taggaggtggaatgc

SEQ ID NO: 965405 - DNA, 15 bp, Homo sapiens
aggaggtggaatgcc

SEQ ID NO: 965406 - DNA, 15 bp, Homo sapiens
ggaggtggaatgcca

SEQ ID NO: 965407 - DNA, 15 bp, Homo sapiens
gaggtggaatgccaa

SEQ ID NO: 965408 - DNA, 15 bp, Homo sapiens
aggtggaatgccaag

SEQ ID NO: 965409 - DNA, 15 bp, Homo sapiens
ggtggaatgccaaga

SEQ ID NO: 965410 - DNA, 15 bp, Homo sapiens
gtggaatgccaagaa

SEQ ID NO: 965411 - DNA, 15 bp, Homo sapiens
tggaatgccaagaag

SEQ ID NO: 965412 - DNA, 15 bp, Homo sapiens
ggaatgccaagaagt

SEQ ID NO: 965413 - DNA, 15 bp, Homo sapiens
gaatgccaagaagtt

SEQ ID NO: 965414 - DNA, 15 bp, Homo sapiens
aatgccaagaagttt

SEQ ID NO: 965415 - DNA, 15 bp, Homo sapiens
atgccaagaagtttc

SEQ ID NO: 965416 - DNA, 15 bp, Homo sapiens
tgccaagaagtttct

SEQ ID NO: 965417 - DNA, 15 bp, Homo sapiens
gccaagaagtttctg

SEQ ID NO: 965418 - DNA, 15 bp, Homo sapiens
ccaagaagtttctga

SEQ ID NO: 965419 - DNA, 15 bp, Homo sapiens
caagaagtttctgaa

SEQ ID NO: 965420 - DNA, 15 bp, Homo sapiens
aagaagtttctgaat

SEQ ID NO: 965421 - DNA, 15 bp, Homo sapiens
agaagtttctgaata

SEQ ID NO: 965422 - DNA, 15 bp, Homo sapiens
gaagtttctgaataa

SEQ ID NO: 965423 - DNA, 15 bp, Homo sapiens
aagtttctgaataaa

SEQ ID NO: 965424 - DNA, 15 bp, Homo sapiens
agtttctgaataaaa

SEQ ID NO: 965425 - DNA, 15 bp, Homo sapiens
gtttctgaataaaac

SEQ ID NO: 965426 - DNA, 15 bp, Homo sapiens
tttctgaataaaaca

SEQ ID NO: 965427 - DNA, 15 bp, Homo sapiens
ttctgaataaaacaa

SEQ ID NO: 965428 - DNA, 15 bp, Homo sapiens
tctgaataaaacaaa

SEQ ID NO: 965429 - DNA, 15 bp, Homo sapiens
ctgaataaaacaaat

SEQ ID NO: 965430 - DNA, 15 bp, Homo sapiens
tgaataaaacaaata

SEQ ID NO: 965431 - DNA, 15 bp, Homo sapiens
gaataaaacaaatat

SEQ ID NO: 965432 - DNA, 15 bp, Homo sapiens
aataaaacaaatatc

SEQ ID NO: 965433 - DNA, 15 bp, Homo sapiens
ataaaacaaatatct

SEQ ID NO: 965434 - DNA, 15 bp, Homo sapiens
taaaacaaatatctg

SEQ ID NO: 965435 - DNA, 15 bp, Homo sapiens
aaaacaaatatctgg

SEQ ID NO: 965436 - DNA, 15 bp, Homo sapiens
aaacaaatatctggg

SEQ ID NO: 965437 - DNA, 15 bp, Homo sapiens
aacaaatatctgggt

SEQ ID NO: 965438 - DNA, 15 bp, Homo sapiens
acaaatatctgggtc

SEQ ID NO: 965439 - DNA, 15 bp, Homo sapiens
caaatatctgggtcc

SEQ ID NO: 965440 - DNA, 15 bp, Homo sapiens
aaatatctgggtcca

SEQ ID NO: 965441 - DNA, 15 bp, Homo sapiens
aatatctgggtccag

SEQ ID NO: 965442 - DNA, 15 bp, Homo sapiens
atatctgggtccagc

SEQ ID NO: 965443 - DNA, 15 bp, Homo sapiens
tatctgggtccagca

SEQ ID NO: 965444 - DNA, 15 bp, Homo sapiens
atctgggtccagcat

SEQ ID NO: 965445 - DNA, 15 bp, Homo sapiens
tctgggtccagcatt

SEQ ID NO: 965446 - DNA, 15 bp, Homo sapiens
ctgggtccagcattt

SEQ ID NO: 965447 - DNA, 15 bp, Homo sapiens
tgggtccagcatttt

SEQ ID NO: 965448 - DNA, 15 bp, Homo sapiens
gggtccagcattttc

SEQ ID NO: 965449 - DNA, 15 bp, Homo sapiens
ggtccagcattttcc

SEQ ID NO: 965450 - DNA, 15 bp, Homo sapiens
gtccagcattttcca

SEQ ID NO: 965451 - DNA, 15 bp, Homo sapiens
tccagcattttccag

SEQ ID NO: 965452 - DNA, 15 bp, Homo sapiens
ccagcattttccagt

SEQ ID NO: 965453 - DNA, 15 bp, Homo sapiens
cagcattttccagtt

SEQ ID NO: 965454 - DNA, 15 bp, Homo sapiens
agcattttccagtta

SEQ ID NO: 965455 - DNA, 15 bp, Homo sapiens
gcattttccagttat

SEQ ID NO: 965456 - DNA, 15 bp, Homo sapiens
cattttccagttatt

SEQ ID NO: 965457 - DNA, 15 bp, Homo sapiens
attttccagttatta

SEQ ID NO: 965458 - DNA, 15 bp, Homo sapiens
ttttccagttattat

SEQ ID NO: 965459 - DNA, 15 bp, Homo sapiens
tttccagttattatt

SEQ ID NO: 965460 - DNA, 15 bp, Homo sapiens
ttccagttattattt

SEQ ID NO: 965461 - DNA, 15 bp, Homo sapiens
tccagttattatttt

SEQ ID NO: 965462 - DNA, 15 bp, Homo sapiens
ccagttattattttt

SEQ ID NO: 965463 - DNA, 15 bp, Homo sapiens
cagttattatttttc

SEQ ID NO: 965464 - DNA, 15 bp, Homo sapiens
agttattatttttct

SEQ ID NO: 965465 - DNA, 15 bp, Homo sapiens
gttattatttttctc

SEQ ID NO: 965466 - DNA, 15 bp, Homo sapiens
ttattatttttctct

SEQ ID NO: 965467 - DNA, 15 bp, Homo sapiens
tattatttttctctc

SEQ ID NO: 965468 - DNA, 15 bp, Homo sapiens
attatttttctctcc

SEQ ID NO: 965469 - DNA, 15 bp, Homo sapiens
ttatttttctctcct

SEQ ID NO: 965470 - DNA, 15 bp, Homo sapiens
tatttttctctcctc

SEQ ID NO: 965471 - DNA, 15 bp, Homo sapiens
atttttctctcctcc

SEQ ID NO: 965472 - DNA, 15 bp, Homo sapiens
tttttctctcctcct

SEQ ID NO: 965473 - DNA, 15 bp, Homo sapiens
ttttctctcctcctc

SEQ ID NO: 965474 - DNA, 15 bp, Homo sapiens
tttctctcctcctct

SEQ ID NO: 965475 - DNA, 15 bp, Homo sapiens
ttctctcctcctctt

SEQ ID NO: 965476 - DNA, 15 bp, Homo sapiens
tctctcctcctcttc

SEQ ID NO: 965477 - DNA, 15 bp, Homo sapiens
ctctcctcctcttct

SEQ ID NO: 965478 - DNA, 15 bp, Homo sapiens
tctcctcctcttctt

SEQ ID NO: 965479 - DNA, 15 bp, Homo sapiens
ctcctcctcttcttt

SEQ ID NO: 965480 - DNA, 15 bp, Homo sapiens
tcctcctcttctttt

SEQ ID NO: 965481 - DNA, 15 bp, Homo sapiens
cctcctcttcttttt

SEQ ID NO: 965482 - DNA, 15 bp, Homo sapiens
ctcctcttcttttta

SEQ ID NO: 965483 - DNA, 15 bp, Homo sapiens
tcctcttctttttac

SEQ ID NO: 965484 - DNA, 15 bp, Homo sapiens
cctcttctttttact

SEQ ID NO: 965485 - DNA, 15 bp, Homo sapiens
ctcttctttttactc

SEQ ID NO: 965486 - DNA, 15 bp, Homo sapiens
tcttctttttactca

SEQ ID NO: 965487 - DNA, 15 bp, Homo sapiens
cttctttttactcac

SEQ ID NO: 965488 - DNA, 15 bp, Homo sapiens
ttctttttactcaca

SEQ ID NO: 965489 - DNA, 15 bp, Homo sapiens
tctttttactcacat

SEQ ID NO: 965490 - DNA, 15 bp, Homo sapiens
ctttttactcacatt

SEQ ID NO: 965491 - DNA, 15 bp, Homo sapiens
tttttactcacattc

SEQ ID NO: 965492 - DNA, 15 bp, Homo sapiens
ttttactcacattct

SEQ ID NO: 965493 - DNA, 15 bp, Homo sapiens
tttactcacattctt

SEQ ID NO: 965494 - DNA, 15 bp, Homo sapiens
ttactcacattcttt

SEQ ID NO: 965495 - DNA, 15 bp, Homo sapiens
tactcacattctttt

SEQ ID NO: 965496 - DNA, 15 bp, Homo sapiens
actcacattcttttt

SEQ ID NO: 965497 - DNA, 15 bp, Homo sapiens
ctcacattctttttt

SEQ ID NO: 965498 - DNA, 15 bp, Homo sapiens
tcacattcttttttg

SEQ ID NO: 965499 - DNA, 15 bp, Homo sapiens
cacattcttttttgg

SEQ ID NO: 965500 - DNA, 15 bp, Homo sapiens
acattcttttttggt

SEQ ID NO: 965501 - DNA, 15 bp, Homo sapiens
cattcttttttggta

SEQ ID NO: 965502 - DNA, 15 bp, Homo sapiens
attcttttttggtac

SEQ ID NO: 965503 - DNA, 15 bp, Homo sapiens
ttcttttttggtaca

SEQ ID NO: 965504 - DNA, 15 bp, Homo sapiens
tcttttttggtacat

SEQ ID NO: 965505 - DNA, 15 bp, Homo sapiens
cttttttggtacatg

SEQ ID NO: 965506 - DNA, 15 bp, Homo sapiens
ttttttggtacatgt

SEQ ID NO: 965507 - DNA, 15 bp, Homo sapiens
tttttggtacatgtt

SEQ ID NO: 965508 - DNA, 15 bp, Homo sapiens
ttttggtacatgttc

SEQ ID NO: 965509 - DNA, 15 bp, Homo sapiens
tttggtacatgttct

SEQ ID NO: 965510 - DNA, 15 bp, Homo sapiens
ttggtacatgttctt

SEQ ID NO: 965511 - DNA, 15 bp, Homo sapiens
tggtacatgttcttc

SEQ ID NO: 965512 - DNA, 15 bp, Homo sapiens
ggtacatgttcttca

SEQ ID NO: 965513 - DNA, 15 bp, Homo sapiens
gtacatgttcttcaa

SEQ ID NO: 965514 - DNA, 15 bp, Homo sapiens
tacatgttcttcaaa

SEQ ID NO: 965515 - DNA, 15 bp, Homo sapiens
acatgttcttcaaac

SEQ ID NO: 965516 - DNA, 15 bp, Homo sapiens
catgttcttcaaact

SEQ ID NO: 965517 - DNA, 15 bp, Homo sapiens
atgttcttcaaactg

SEQ ID NO: 965518 - DNA, 15 bp, Homo sapiens
tgttcttcaaactgt

SEQ ID NO: 965519 - DNA, 15 bp, Homo sapiens
gttcttcaaactgtg

SEQ ID NO: 965520 - DNA, 15 bp, Homo sapiens
ttcttcaaactgtgt

SEQ ID NO: 965521 - DNA, 15 bp, Homo sapiens
tcttcaaactgtgtt

SEQ ID NO: 965522 - DNA, 15 bp, Homo sapiens
cttcaaactgtgttt

SEQ ID NO: 965523 - DNA, 15 bp, Homo sapiens
ttcaaactgtgtttc

SEQ ID NO: 965524 - DNA, 15 bp, Homo sapiens
tcaaactgtgtttca

SEQ ID NO: 965525 - DNA, 15 bp, Homo sapiens
caaactgtgtttcag

SEQ ID NO: 965526 - DNA, 15 bp, Homo sapiens
aaactgtgtttcaga

SEQ ID NO: 965527 - DNA, 15 bp, Homo sapiens
aactgtgtttcagaa

SEQ ID NO: 965528 - DNA, 15 bp, Homo sapiens
actgtgtttcagaaa

SEQ ID NO: 965529 - DNA, 15 bp, Homo sapiens
ctgtgtttcagaaaa

SEQ ID NO: 965530 - DNA, 15 bp, Homo sapiens
tgtgtttcagaaaat

SEQ ID NO: 965531 - DNA, 15 bp, Homo sapiens
gtgtttcagaaaata

SEQ ID NO: 965532 - DNA, 15 bp, Homo sapiens
tgtttcagaaaatat

SEQ ID NO: 965533 - DNA, 15 bp, Homo sapiens
gtttcagaaaatatg

SEQ ID NO: 965534 - DNA, 15 bp, Homo sapiens
tttcagaaaatatgt

SEQ ID NO: 965535 - DNA, 15 bp, Homo sapiens
ttcagaaaatatgta

SEQ ID NO: 965536 - DNA, 15 bp, Homo sapiens
tcagaaaatatgtat

SEQ ID NO: 965537 - DNA, 15 bp, Homo sapiens
cagaaaatatgtatg

SEQ ID NO: 965538 - DNA, 15 bp, Homo sapiens
agaaaatatgtatga

SEQ ID NO: 965539 - DNA, 15 bp, Homo sapiens
gaaaatatgtatgat

SEQ ID NO: 965540 - DNA, 15 bp, Homo sapiens
aaaatatgtatgatt

SEQ ID NO: 965541 - DNA, 15 bp, Homo sapiens
aaatatgtatgattc

SEQ ID NO: 965542 - DNA, 15 bp, Homo sapiens
aatatgtatgattcc

SEQ ID NO: 965543 - DNA, 15 bp, Homo sapiens
atatgtatgattccc

SEQ ID NO: 965544 - DNA, 15 bp, Homo sapiens
tatgtatgattccca

SEQ ID NO: 965545 - DNA, 15 bp, Homo sapiens
atgtatgattcccac

SEQ ID NO: 965546 - DNA, 15 bp, Homo sapiens
tgtatgattcccacc

SEQ ID NO: 965547 - DNA, 15 bp, Homo sapiens
gtatgattcccacca

SEQ ID NO: 965548 - DNA, 15 bp, Homo sapiens
tatgattcccaccac

SEQ ID NO: 965549 - DNA, 15 bp, Homo sapiens
atgattcccaccact

SEQ ID NO: 965550 - DNA, 15 bp, Homo sapiens
tgattcccaccactg

SEQ ID NO: 965551 - DNA, 15 bp, Homo sapiens
gattcccaccactgt

SEQ ID NO: 965552 - DNA, 15 bp, Homo sapiens
attcccaccactgtc

SEQ ID NO: 965553 - DNA, 15 bp, Homo sapiens
ttcccaccactgtca

SEQ ID NO: 965554 - DNA, 15 bp, Homo sapiens
tcccaccactgtcat

SEQ ID NO: 965555 - DNA, 15 bp, Homo sapiens
cccaccactgtcatc

SEQ ID NO: 965556 - DNA, 15 bp, Homo sapiens
ccaccactgtcatct

SEQ ID NO: 965557 - DNA, 15 bp, Homo sapiens
caccactgtcatctg

SEQ ID NO: 965558 - DNA, 15 bp, Homo sapiens
accactgtcatctgg

SEQ ID NO: 965559 - DNA, 15 bp, Homo sapiens
ccactgtcatctggg

SEQ ID NO: 965560 - DNA, 15 bp, Homo sapiens
cactgtcatctgggc

SEQ ID NO: 965561 - DNA, 15 bp, Homo sapiens
actgtcatctgggct

SEQ ID NO: 965562 - DNA, 15 bp, Homo sapiens
ctgtcatctgggcta

SEQ ID NO: 965563 - DNA, 15 bp, Homo sapiens
tgtcatctgggctat

SEQ ID NO: 965564 - DNA, 15 bp, Homo sapiens
gtcatctgggctatt

SEQ ID NO: 965565 - DNA, 15 bp, Homo sapiens
tcatctgggctattt

SEQ ID NO: 965566 - DNA, 15 bp, Homo sapiens
catctgggctatttt

SEQ ID NO: 965567 - DNA, 15 bp, Homo sapiens
atctgggctattttt

SEQ ID NO: 965568 - DNA, 15 bp, Homo sapiens
tctgggctatttttc

SEQ ID NO: 965569 - DNA, 15 bp, Homo sapiens
ctgggctatttttct

SEQ ID NO: 965570 - DNA, 15 bp, Homo sapiens
tgggctatttttctg

SEQ ID NO: 965571 - DNA, 15 bp, Homo sapiens
gggctatttttctgg

SEQ ID NO: 965572 - DNA, 15 bp, Homo sapiens
ggctatttttctggc

SEQ ID NO: 965573 - DNA, 15 bp, Homo sapiens
gctatttttctggct

SEQ ID NO: 965574 - DNA, 15 bp, Homo sapiens
ctatttttctggctc

SEQ ID NO: 965575 - DNA, 15 bp, Homo sapiens
tatttttctggctca

SEQ ID NO: 965576 - DNA, 15 bp, Homo sapiens
atttttctggctcaa

SEQ ID NO: 965577 - DNA, 15 bp, Homo sapiens
tttttctggctcaat

SEQ ID NO: 965578 - DNA, 15 bp, Homo sapiens
ttttctggctcaatt

SEQ ID NO: 965579 - DNA, 15 bp, Homo sapiens
tttctggctcaattg

SEQ ID NO: 965580 - DNA, 15 bp, Homo sapiens
ttctggctcaattgc

SEQ ID NO: 965581 - DNA, 15 bp, Homo sapiens
tctggctcaattgca

SEQ ID NO: 965582 - DNA, 15 bp, Homo sapiens
ctggctcaattgcac

SEQ ID NO: 965583 - DNA, 15 bp, Homo sapiens
tggctcaattgcaca

SEQ ID NO: 965584 - DNA, 15 bp, Homo sapiens
ggctcaattgcacaa

SEQ ID NO: 965585 - DNA, 15 bp, Homo sapiens
gctcaattgcacaat

SEQ ID NO: 965586 - DNA, 15 bp, Homo sapiens
ctcaattgcacaata

SEQ ID NO: 965587 - DNA, 15 bp, Homo sapiens
tcaattgcacaatat

SEQ ID NO: 965588 - DNA, 15 bp, Homo sapiens
caattgcacaatatt

SEQ ID NO: 965589 - DNA, 15 bp, Homo sapiens
aattgcacaatattg

SEQ ID NO: 965590 - DNA, 15 bp, Homo sapiens
attgcacaatattgt

SEQ ID NO: 965591 - DNA, 15 bp, Homo sapiens
ttgcacaatattgtg

SEQ ID NO: 965592 - DNA, 15 bp, Homo sapiens
tgcacaatattgtga

SEQ ID NO: 965593 - DNA, 15 bp, Homo sapiens
gcacaatattgtgaa

SEQ ID NO: 965594 - DNA, 15 bp, Homo sapiens
cacaatattgtgaaa

SEQ ID NO: 965595 - DNA, 15 bp, Homo sapiens
acaatattgtgaaag

SEQ ID NO: 965596 - DNA, 15 bp, Homo sapiens
caatattgtgaaagc

SEQ ID NO: 965597 - DNA, 15 bp, Homo sapiens
aatattgtgaaagca

SEQ ID NO: 965598 - DNA, 15 bp, Homo sapiens
atattgtgaaagcat

SEQ ID NO: 965599 - DNA, 15 bp, Homo sapiens
tattgtgaaagcatt

SEQ ID NO: 965600 - DNA, 15 bp, Homo sapiens
attgtgaaagcattc

SEQ ID NO: 965601 - DNA, 15 bp, Homo sapiens
ttgtgaaagcattca

SEQ ID NO: 965602 - DNA, 15 bp, Homo sapiens
tgtgaaagcattcaa

SEQ ID NO: 965603 - DNA, 15 bp, Homo sapiens
gtgaaagcattcaac

SEQ ID NO: 965604 - DNA, 15 bp, Homo sapiens
tgaaagcattcaaca

SEQ ID NO: 965605 - DNA, 15 bp, Homo sapiens
gaaagcattcaacat

SEQ ID NO: 965606 - DNA, 15 bp, Homo sapiens
aaagcattcaacatc

SEQ ID NO: 965607 - DNA, 15 bp, Homo sapiens
aagcattcaacatca

SEQ ID NO: 965608 - DNA, 15 bp, Homo sapiens
agcattcaacatcag

SEQ ID NO: 965609 - DNA, 15 bp, Homo sapiens
gcattcaacatcagt

SEQ ID NO: 965610 - DNA, 15 bp, Homo sapiens
cattcaacatcagtt

SEQ ID NO: 965611 - DNA, 15 bp, Homo sapiens
attcaacatcagtta

SEQ ID NO: 965612 - DNA, 15 bp, Homo sapiens
ttcaacatcagttaa

SEQ ID NO: 965613 - DNA, 15 bp, Homo sapiens
tcaacatcagttaag

SEQ ID NO: 965614 - DNA, 15 bp, Homo sapiens
caacatcagttaaga

SEQ ID NO: 965615 - DNA, 15 bp, Homo sapiens
aacatcagttaagag

SEQ ID NO: 965616 - DNA, 15 bp, Homo sapiens
acatcagttaagagt

SEQ ID NO: 965617 - DNA, 15 bp, Homo sapiens
catcagttaagagtg

SEQ ID NO: 965618 - DNA, 15 bp, Homo sapiens
atcagttaagagtga

SEQ ID NO: 965619 - DNA, 15 bp, Homo sapiens
tcagttaagagtgac

SEQ ID NO: 965620 - DNA, 15 bp, Homo sapiens
cagttaagagtgact

SEQ ID NO: 965621 - DNA, 15 bp, Homo sapiens
agttaagagtgactg

SEQ ID NO: 965622 - DNA, 15 bp, Homo sapiens
gttaagagtgactgg

SEQ ID NO: 965623 - DNA, 15 bp, Homo sapiens
ttaagagtgactgga

SEQ ID NO: 965624 - DNA, 15 bp, Homo sapiens
taagagtgactggag

SEQ ID NO: 965625 - DNA, 15 bp, Homo sapiens
aagagtgactggagt

SEQ ID NO: 965626 - DNA, 15 bp, Homo sapiens
agagtgactggagta

SEQ ID NO: 965627 - DNA, 15 bp, Homo sapiens
gagtgactggagtat

SEQ ID NO: 965628 - DNA, 15 bp, Homo sapiens
agtgactggagtatg

SEQ ID NO: 965629 - DNA, 15 bp, Homo sapiens
gtgactggagtatga

SEQ ID NO: 965630 - DNA, 15 bp, Homo sapiens
tgactggagtatgaa

SEQ ID NO: 965631 - DNA, 15 bp, Homo sapiens
gactggagtatgaat

SEQ ID NO: 965632 - DNA, 15 bp, Homo sapiens
actggagtatgaata

SEQ ID NO: 965633 - DNA, 15 bp, Homo sapiens
ctggagtatgaatac

SEQ ID NO: 965634 - DNA, 15 bp, Homo sapiens
tggagtatgaataca

SEQ ID NO: 965635 - DNA, 15 bp, Homo sapiens
ggagtatgaatacaa

SEQ ID NO: 965636 - DNA, 15 bp, Homo sapiens
gagtatgaatacaaa

SEQ ID NO: 965637 - DNA, 15 bp, Homo sapiens
agtatgaatacaaac

SEQ ID NO: 965638 - DNA, 15 bp, Homo sapiens
gtatgaatacaaacg

SEQ ID NO: 965639 - DNA, 15 bp, Homo sapiens
tatgaatacaaacga

SEQ ID NO: 965640 - DNA, 15 bp, Homo sapiens
atgaatacaaacgag

SEQ ID NO: 965641 - DNA, 15 bp, Homo sapiens
tgaatacaaacgagg

SEQ ID NO: 965642 - DNA, 15 bp, Homo sapiens
gaatacaaacgagga

SEQ ID NO: 965643 - DNA, 15 bp, Homo sapiens
aatacaaacgaggat

SEQ ID NO: 965644 - DNA, 15 bp, Homo sapiens
atacaaacgaggatc

SEQ ID NO: 965645 - DNA, 15 bp, Homo sapiens
tacaaacgaggatcc

SEQ ID NO: 965646 - DNA, 15 bp, Homo sapiens
acaaacgaggatcca

SEQ ID NO: 965647 - DNA, 15 bp, Homo sapiens
caaacgaggatccac

SEQ ID NO: 965648 - DNA, 15 bp, Homo sapiens
aaacgaggatccacg

SEQ ID NO: 965649 - DNA, 15 bp, Homo sapiens
aacgaggatccacgc

SEQ ID NO: 965650 - DNA, 15 bp, Homo sapiens
acgaggatccacgct

SEQ ID NO: 965651 - DNA, 15 bp, Homo sapiens
cgaggatccacgctg

SEQ ID NO: 965652 - DNA, 15 bp, Homo sapiens
gaggatccacgctga

SEQ ID NO: 965653 - DNA, 15 bp, Homo sapiens
aggatccacgctgaa

SEQ ID NO: 965654 - DNA, 15 bp, Homo sapiens
ggatccacgctgaag

SEQ ID NO: 965655 - DNA, 15 bp, Homo sapiens
gatccacgctgaagc

SEQ ID NO: 965656 - DNA, 15 bp, Homo sapiens
atccacgctgaagca

SEQ ID NO: 965657 - DNA, 15 bp, Homo sapiens
tccacgctgaagcat

SEQ ID NO: 965658 - DNA, 15 bp, Homo sapiens
ccacgctgaagcatt

SEQ ID NO: 965659 - DNA, 15 bp, Homo sapiens
cacgctgaagcattt

SEQ ID NO: 965660 - DNA, 15 bp, Homo sapiens
acgctgaagcatttt

SEQ ID NO: 965661 - DNA, 15 bp, Homo sapiens
cgctgaagcatttta

SEQ ID NO: 965662 - DNA, 15 bp, Homo sapiens
gctgaagcattttac

SEQ ID NO: 965663 - DNA, 15 bp, Homo sapiens
ctgaagcattttact

SEQ ID NO: 965664 - DNA, 15 bp, Homo sapiens
tgaagcattttacta

SEQ ID NO: 965665 - DNA, 15 bp, Homo sapiens
gaagcattttactag

SEQ ID NO: 965666 - DNA, 15 bp, Homo sapiens
aagcattttactaga

SEQ ID NO: 965667 - DNA, 15 bp, Homo sapiens
agcattttactagaa

SEQ ID NO: 965668 - DNA, 15 bp, Homo sapiens
gcattttactagaaa

SEQ ID NO: 965669 - DNA, 15 bp, Homo sapiens
cattttactagaaaa

SEQ ID NO: 965670 - DNA, 15 bp, Homo sapiens
attttactagaaaat

SEQ ID NO: 965671 - DNA, 15 bp, Homo sapiens
ttttactagaaaatt

SEQ ID NO: 965672 - DNA, 15 bp, Homo sapiens
tttactagaaaatta

SEQ ID NO: 965673 - DNA, 15 bp, Homo sapiens
ttactagaaaattag

SEQ ID NO: 965674 - DNA, 15 bp, Homo sapiens
tactagaaaattagt

SEQ ID NO: 965675 - DNA, 15 bp, Homo sapiens
actagaaaattagtt

SEQ ID NO: 965676 - DNA, 15 bp, Homo sapiens
ctagaaaattagttg

SEQ ID NO: 965677 - DNA, 15 bp, Homo sapiens
tagaaaattagttgc

SEQ ID NO: 965678 - DNA, 15 bp, Homo sapiens
agaaaattagttgca

SEQ ID NO: 965679 - DNA, 15 bp, Homo sapiens
gaaaattagttgcaa

SEQ ID NO: 965680 - DNA, 15 bp, Homo sapiens
aaaattagttgcaaa

SEQ ID NO: 965681 - DNA, 15 bp, Homo sapiens
aaattagttgcaaaa

SEQ ID NO: 965682 - DNA, 15 bp, Homo sapiens
aattagttgcaaaaa

SEQ ID NO: 965683 - DNA, 15 bp, Homo sapiens
attagttgcaaaaac

SEQ ID NO: 965684 - DNA, 15 bp, Homo sapiens
ttagttgcaaaaaca

SEQ ID NO: 965685 - DNA, 15 bp, Homo sapiens
tagttgcaaaaacat

SEQ ID NO: 965686 - DNA, 15 bp, Homo sapiens
agttgcaaaaacata

SEQ ID NO: 965687 - DNA, 15 bp, Homo sapiens
gttgcaaaaacatat

SEQ ID NO: 965688 - DNA, 15 bp, Homo sapiens
ttgcaaaaacatatt

SEQ ID NO: 965689 - DNA, 15 bp, Homo sapiens
tgcaaaaacatatta

SEQ ID NO: 965690 - DNA, 15 bp, Homo sapiens
gcaaaaacatattac

SEQ ID NO: 965691 - DNA, 15 bp, Homo sapiens
caaaaacatattact

SEQ ID NO: 965692 - DNA, 15 bp, Homo sapiens
aaaaacatattactt

SEQ ID NO: 965693 - DNA, 15 bp, Homo sapiens
aaaacatattactta

SEQ ID NO: 965694 - DNA, 15 bp, Homo sapiens
aaacatattacttat

SEQ ID NO: 965695 - DNA, 15 bp, Homo sapiens
aacatattacttatg

SEQ ID NO: 965696 - DNA, 15 bp, Homo sapiens
acatattacttatgg

SEQ ID NO: 965697 - DNA, 15 bp, Homo sapiens
catattacttatgga

SEQ ID NO: 965698 - DNA, 15 bp, Homo sapiens
atattacttatggaa

SEQ ID NO: 965699 - DNA, 15 bp, Homo sapiens
tattacttatggaaa

SEQ ID NO: 965700 - DNA, 15 bp, Homo sapiens
attacttatggaaat

SEQ ID NO: 965701 - DNA, 15 bp, Homo sapiens
ttacttatggaaatt

SEQ ID NO: 965702 - DNA, 15 bp, Homo sapiens
tacttatggaaatta

SEQ ID NO: 965703 - DNA, 15 bp, Homo sapiens
acttatggaaattac

SEQ ID NO: 965704 - DNA, 15 bp, Homo sapiens
cttatggaaattaca

SEQ ID NO: 965705 - DNA, 15 bp, Homo sapiens
ttatggaaattacat

SEQ ID NO: 965706 - DNA, 15 bp, Homo sapiens
tatggaaattacatg

SEQ ID NO: 965707 - DNA, 15 bp, Homo sapiens
atggaaattacatgc

SEQ ID NO: 965708 - DNA, 15 bp, Homo sapiens
tggaaattacatgca

SEQ ID NO: 965709 - DNA, 15 bp, Homo sapiens
ggaaattacatgcac

SEQ ID NO: 965710 - DNA, 15 bp, Homo sapiens
gaaattacatgcaca

SEQ ID NO: 965711 - DNA, 15 bp, Homo sapiens
aaattacatgcacat

SEQ ID NO: 965712 - DNA, 15 bp, Homo sapiens
aattacatgcacatt

SEQ ID NO: 965713 - DNA, 15 bp, Homo sapiens
attacatgcacattt

SEQ ID NO: 965714 - DNA, 15 bp, Homo sapiens
ttacatgcacattta

SEQ ID NO: 965715 - DNA, 15 bp, Homo sapiens
tacatgcacatttat

SEQ ID NO: 965716 - DNA, 15 bp, Homo sapiens
acatgcacatttatt

SEQ ID NO: 965717 - DNA, 15 bp, Homo sapiens
catgcacatttatta

SEQ ID NO: 965718 - DNA, 15 bp, Homo sapiens
atgcacatttattaa

SEQ ID NO: 965719 - DNA, 15 bp, Homo sapiens
tgcacatttattaaa

SEQ ID NO: 965720 - DNA, 15 bp, Homo sapiens
gcacatttattaaaa

SEQ ID NO: 965721 - DNA, 15 bp, Homo sapiens
cacatttattaaaat

SEQ ID NO: 965722 - DNA, 15 bp, Homo sapiens
acatttattaaaata

SEQ ID NO: 965723 - DNA, 15 bp, Homo sapiens
catttattaaaataa

SEQ ID NO: 965724 - DNA, 15 bp, Homo sapiens
atttattaaaataat

SEQ ID NO: 965725 - DNA, 15 bp, Homo sapiens
tttattaaaataatg

SEQ ID NO: 965726 - DNA, 15 bp, Homo sapiens
ttattaaaataatgt

SEQ ID NO: 965727 - DNA, 15 bp, Homo sapiens
tattaaaataatgtt

SEQ ID NO: 965728 - DNA, 15 bp, Homo sapiens
attaaaataatgtta

SEQ ID NO: 965729 - DNA, 15 bp, Homo sapiens
ttaaaataatgttaa

SEQ ID NO: 965730 - DNA, 15 bp, Homo sapiens
taaaataatgttaaa

SEQ ID NO: 965731 - DNA, 15 bp, Homo sapiens
aaaataatgttaaaa

SEQ ID NO: 965732 - DNA, 15 bp, Homo sapiens
aaataatgttaaaaa

SEQ ID NO: 965733 - DNA, 15 bp, Homo sapiens
aataatgttaaaaaa

SEQ ID NO: 965734 - DNA, 15 bp, Homo sapiens
ataatgttaaaaaat

SEQ ID NO: 965735 - DNA, 15 bp, Homo sapiens
taatgttaaaaaatc

SEQ ID NO: 965736 - DNA, 15 bp, Homo sapiens
aatgttaaaaaatcc

SEQ ID NO: 965737 - DNA, 15 bp, Homo sapiens
atgttaaaaaatcca

SEQ ID NO: 965738 - DNA, 15 bp, Homo sapiens
tgttaaaaaatccaa

SEQ ID NO: 965739 - DNA, 15 bp, Homo sapiens
gttaaaaaatccaag

SEQ ID NO: 965740 - DNA, 15 bp, Homo sapiens
ttaaaaaatccaagt

SEQ ID NO: 965741 - DNA, 15 bp, Homo sapiens
taaaaaatccaagtc

SEQ ID NO: 965742 - DNA, 15 bp, Homo sapiens
aaaaaatccaagtcc

SEQ ID NO: 965743 - DNA, 15 bp, Homo sapiens
aaaaatccaagtccc

SEQ ID NO: 965744 - DNA, 15 bp, Homo sapiens
aaaatccaagtccct

SEQ ID NO: 965745 - DNA, 15 bp, Homo sapiens
aaatccaagtccctc

SEQ ID NO: 965746 - DNA, 15 bp, Homo sapiens
aatccaagtccctca

SEQ ID NO: 965747 - DNA, 15 bp, Homo sapiens
atccaagtccctcac

SEQ ID NO: 965748 - DNA, 15 bp, Homo sapiens
tccaagtccctcacc

SEQ ID NO: 965749 - DNA, 15 bp, Homo sapiens
ccaagtccctcaccc

SEQ ID NO: 965750 - DNA, 15 bp, Homo sapiens
caagtccctcaccct

SEQ ID NO: 965751 - DNA, 15 bp, Homo sapiens
aagtccctcaccctg

SEQ ID NO: 965752 - DNA, 15 bp, Homo sapiens
agtccctcaccctga

SEQ ID NO: 965753 - DNA, 15 bp, Homo sapiens
gtccctcaccctgaa

SEQ ID NO: 965754 - DNA, 15 bp, Homo sapiens
tccctcaccctgaat

SEQ ID NO: 965755 - DNA, 15 bp, Homo sapiens
ccctcaccctgaatc

SEQ ID NO: 965756 - DNA, 15 bp, Homo sapiens
cctcaccctgaatcc

SEQ ID NO: 965757 - DNA, 15 bp, Homo sapiens
ctcaccctgaatcct

SEQ ID NO: 965758 - DNA, 15 bp, Homo sapiens
tcaccctgaatcctt

SEQ ID NO: 965759 - DNA, 15 bp, Homo sapiens
caccctgaatccttt

SEQ ID NO: 965760 - DNA, 15 bp, Homo sapiens
accctgaatcctttt

SEQ ID NO: 965761 - DNA, 15 bp, Homo sapiens
ccctgaatccttttt

SEQ ID NO: 965762 - DNA, 15 bp, Homo sapiens
cctgaatcctttttc

SEQ ID NO: 965763 - DNA, 15 bp, Homo sapiens
ctgaatcctttttct

SEQ ID NO: 965764 - DNA, 15 bp, Homo sapiens
tgaatcctttttctt

SEQ ID NO: 965765 - DNA, 15 bp, Homo sapiens
gaatcctttttcttt

SEQ ID NO: 965766 - DNA, 15 bp, Homo sapiens
aatcctttttctttt

SEQ ID NO: 965767 - DNA, 15 bp, Homo sapiens
atcctttttcttttt

SEQ ID NO: 965768 - DNA, 15 bp, Homo sapiens
tcctttttctttttt

SEQ ID NO: 965769 - DNA, 15 bp, Homo sapiens
cctttttcttttttt

SEQ ID NO: 965770 - DNA, 15 bp, Homo sapiens
ctttttctttttttt

SEQ ID NO: 965771 - DNA, 15 bp, Homo sapiens
tttttctttttttta

SEQ ID NO: 965772 - DNA, 15 bp, Homo sapiens
ttttcttttttttaa

SEQ ID NO: 965773 - DNA, 15 bp, Homo sapiens
tttcttttttttaac

SEQ ID NO: 965774 - DNA, 15 bp, Homo sapiens
ttcttttttttaaca

SEQ ID NO: 965775 - DNA, 15 bp, Homo sapiens
tcttttttttaacat

SEQ ID NO: 965776 - DNA, 15 bp, Homo sapiens
cttttttttaacatc

SEQ ID NO: 965777 - DNA, 15 bp, Homo sapiens
ttttttttaacatca

SEQ ID NO: 965778 - DNA, 15 bp, Homo sapiens
tttttttaacatcaa

SEQ ID NO: 965779 - DNA, 15 bp, Homo sapiens
ttttttaacatcaaa

SEQ ID NO: 965780 - DNA, 15 bp, Homo sapiens
tttttaacatcaaaa

SEQ ID NO: 965781 - DNA, 15 bp, Homo sapiens
ttttaacatcaaaac

SEQ ID NO: 965782 - DNA, 15 bp, Homo sapiens
tttaacatcaaaacc

SEQ ID NO: 965783 - DNA, 15 bp, Homo sapiens
ttaacatcaaaacca

SEQ ID NO: 965784 - DNA, 15 bp, Homo sapiens
taacatcaaaaccat

SEQ ID NO: 965785 - DNA, 15 bp, Homo sapiens
aacatcaaaaccatt

SEQ ID NO: 965786 - DNA, 15 bp, Homo sapiens
acatcaaaaccattt

SEQ ID NO: 965787 - DNA, 15 bp, Homo sapiens
catcaaaaccatttt

SEQ ID NO: 965788 - DNA, 15 bp, Homo sapiens
atcaaaaccattttt

SEQ ID NO: 965789 - DNA, 15 bp, Homo sapiens
tcaaaaccatttttt

SEQ ID NO: 965790 - DNA, 15 bp, Homo sapiens
caaaaccattttttt

SEQ ID NO: 965791 - DNA, 15 bp, Homo sapiens
aaaaccatttttttt

SEQ ID NO: 965792 - DNA, 15 bp, Homo sapiens
aaaccattttttttt

SEQ ID NO: 965793 - DNA, 15 bp, Homo sapiens
aaccatttttttttc

SEQ ID NO: 965794 - DNA, 15 bp, Homo sapiens
accatttttttttct

SEQ ID NO: 965795 - DNA, 15 bp, Homo sapiens
ccatttttttttctt

SEQ ID NO: 965796 - DNA, 15 bp, Homo sapiens
catttttttttcttt

SEQ ID NO: 965797 - DNA, 15 bp, Homo sapiens
atttttttttctttt

SEQ ID NO: 965798 - DNA, 15 bp, Homo sapiens
tttttttttcttttg

SEQ ID NO: 965799 - DNA, 15 bp, Homo sapiens
ttttttttcttttgg

SEQ ID NO: 965800 - DNA, 15 bp, Homo sapiens
tttttttcttttgga

SEQ ID NO: 965801 - DNA, 15 bp, Homo sapiens
ttttttcttttggag

SEQ ID NO: 965802 - DNA, 15 bp, Homo sapiens
tttttcttttggagg

SEQ ID NO: 965803 - DNA, 15 bp, Homo sapiens
ttttcttttggaggc

SEQ ID NO: 965804 - DNA, 15 bp, Homo sapiens
tttcttttggaggca

SEQ ID NO: 965805 - DNA, 15 bp, Homo sapiens
ttcttttggaggcag

SEQ ID NO: 965806 - DNA, 15 bp, Homo sapiens
tcttttggaggcagg

SEQ ID NO: 965807 - DNA, 15 bp, Homo sapiens
cttttggaggcaggg

SEQ ID NO: 965808 - DNA, 15 bp, Homo sapiens
ttttggaggcagggt

SEQ ID NO: 965809 - DNA, 15 bp, Homo sapiens
tttggaggcagggtg

SEQ ID NO: 965810 - DNA, 15 bp, Homo sapiens
ttggaggcagggtgt

SEQ ID NO: 965811 - DNA, 15 bp, Homo sapiens
tggaggcagggtgtc

SEQ ID NO: 965812 - DNA, 15 bp, Homo sapiens
ggaggcagggtgtca

SEQ ID NO: 965813 - DNA, 15 bp, Homo sapiens
gaggcagggtgtcac

SEQ ID NO: 965814 - DNA, 15 bp, Homo sapiens
aggcagggtgtcact

SEQ ID NO: 965815 - DNA, 15 bp, Homo sapiens
ggcagggtgtcactc

SEQ ID NO: 965816 - DNA, 15 bp, Homo sapiens
gcagggtgtcactct

SEQ ID NO: 965817 - DNA, 15 bp, Homo sapiens
cagggtgtcactctg

SEQ ID NO: 965818 - DNA, 15 bp, Homo sapiens
agggtgtcactctgt

SEQ ID NO: 965819 - DNA, 15 bp, Homo sapiens
gggtgtcactctgtc

SEQ ID NO: 965820 - DNA, 15 bp, Homo sapiens
ggtgtcactctgtca

SEQ ID NO: 965821 - DNA, 15 bp, Homo sapiens
gtgtcactctgtcac

SEQ ID NO: 965822 - DNA, 15 bp, Homo sapiens
tgtcactctgtcacc

SEQ ID NO: 965823 - DNA, 15 bp, Homo sapiens
gtcactctgtcaccc

SEQ ID NO: 965824 - DNA, 15 bp, Homo sapiens
cactctgtcacccaa

SEQ ID NO: 965825 - DNA, 15 bp, Homo sapiens
actctgtcacccaag

SEQ ID NO: 965826 - DNA, 15 bp, Homo sapiens
ctctgtcacccaagc

SEQ ID NO: 965827 - DNA, 15 bp, Homo sapiens
tctgtcacccaagct

SEQ ID NO: 965828 - DNA, 15 bp, Homo sapiens
ctgtcacccaagctg

SEQ ID NO: 965829 - DNA, 15 bp, Homo sapiens
tgtcacccaagctgg

SEQ ID NO: 965830 - DNA, 15 bp, Homo sapiens
gtcacccaagctgga

SEQ ID NO: 965831 - DNA, 15 bp, Homo sapiens
tcacccaagctggag

SEQ ID NO: 965832 - DNA, 15 bp, Homo sapiens
cacccaagctggagt

SEQ ID NO: 965833 - DNA, 15 bp, Homo sapiens
acccaagctggagtg

SEQ ID NO: 965834 - DNA, 15 bp, Homo sapiens
cccaagctggagtgc

SEQ ID NO: 965835 - DNA, 15 bp, Homo sapiens
ccaagctggagtgca

SEQ ID NO: 965836 - DNA, 15 bp, Homo sapiens
caagctggagtgcag

SEQ ID NO: 965837 - DNA, 15 bp, Homo sapiens
aagctggagtgcagc

SEQ ID NO: 965838 - DNA, 15 bp, Homo sapiens
agctggagtgcagca

SEQ ID NO: 965839 - DNA, 15 bp, Homo sapiens
gctggagtgcagcag

SEQ ID NO: 965840 - DNA, 15 bp, Homo sapiens
ctggagtgcagcagc

SEQ ID NO: 965841 - DNA, 15 bp, Homo sapiens
tggagtgcagcagct

SEQ ID NO: 965842 - DNA, 15 bp, Homo sapiens
ggagtgcagcagctt

SEQ ID NO: 965843 - DNA, 15 bp, Homo sapiens
gagtgcagcagcttg

SEQ ID NO: 965844 - DNA, 15 bp, Homo sapiens
agtgcagcagcttga

SEQ ID NO: 965845 - DNA, 15 bp, Homo sapiens
gtgcagcagcttgat

SEQ ID NO: 965846 - DNA, 15 bp, Homo sapiens
tgcagcagcttgatc

SEQ ID NO: 965847 - DNA, 15 bp, Homo sapiens
gcagcagcttgatcg

SEQ ID NO: 965848 - DNA, 15 bp, Homo sapiens
cagcagcttgatcgt

SEQ ID NO: 965849 - DNA, 15 bp, Homo sapiens
agcagcttgatcgtg

SEQ ID NO: 965850 - DNA, 15 bp, Homo sapiens
gcagcttgatcgtgg

SEQ ID NO: 965851 - DNA, 15 bp, Homo sapiens
cagcttgatcgtggc

SEQ ID NO: 965852 - DNA, 15 bp, Homo sapiens
agcttgatcgtggct

SEQ ID NO: 965853 - DNA, 15 bp, Homo sapiens
gcttgatcgtggctc

SEQ ID NO: 965854 - DNA, 15 bp, Homo sapiens
cttgatcgtggctca

SEQ ID NO: 965855 - DNA, 15 bp, Homo sapiens
ttgatcgtggctcac

SEQ ID NO: 965856 - DNA, 15 bp, Homo sapiens
tgatcgtggctcact

SEQ ID NO: 965857 - DNA, 15 bp, Homo sapiens
gatcgtggctcactg

SEQ ID NO: 965858 - DNA, 15 bp, Homo sapiens
atcgtggctcactgc

SEQ ID NO: 965859 - DNA, 15 bp, Homo sapiens
tcgtggctcactgca

SEQ ID NO: 965860 - DNA, 15 bp, Homo sapiens
cgtggctcactgcag

SEQ ID NO: 965861 - DNA, 15 bp, Homo sapiens
gtggctcactgcagc

SEQ ID NO: 965862 - DNA, 15 bp, Homo sapiens
ctcactgcagcctcg

SEQ ID NO: 965863 - DNA, 15 bp, Homo sapiens
tcactgcagcctcga

SEQ ID NO: 965864 - DNA, 15 bp, Homo sapiens
cactgcagcctcgac

SEQ ID NO: 965865 - DNA, 15 bp, Homo sapiens
actgcagcctcgacc

SEQ ID NO: 965866 - DNA, 15 bp, Homo sapiens
ctgcagcctcgacct

SEQ ID NO: 965867 - DNA, 15 bp, Homo sapiens
tgcagcctcgacctc

SEQ ID NO: 965868 - DNA, 15 bp, Homo sapiens
gcagcctcgacctcc

SEQ ID NO: 965869 - DNA, 15 bp, Homo sapiens
cagcctcgacctcct

SEQ ID NO: 965870 - DNA, 15 bp, Homo sapiens
agcctcgacctcctg

SEQ ID NO: 965871 - DNA, 15 bp, Homo sapiens
gcctcgacctcctgg

SEQ ID NO: 965872 - DNA, 15 bp, Homo sapiens
cctcgacctcctggg

SEQ ID NO: 965873 - DNA, 15 bp, Homo sapiens
ctcgacctcctgggc

SEQ ID NO: 965874 - DNA, 15 bp, Homo sapiens
tcgacctcctgggct

SEQ ID NO: 965875 - DNA, 15 bp, Homo sapiens
cgacctcctgggctc

SEQ ID NO: 965876 - DNA, 15 bp, Homo sapiens
gacctcctgggctcg

SEQ ID NO: 965877 - DNA, 15 bp, Homo sapiens
acctcctgggctcga

SEQ ID NO: 965878 - DNA, 15 bp, Homo sapiens
cctcctgggctcgag

SEQ ID NO: 965879 - DNA, 15 bp, Homo sapiens
ctcctgggctcgaga

SEQ ID NO: 965880 - DNA, 15 bp, Homo sapiens
tcctgggctcgagag

SEQ ID NO: 965881 - DNA, 15 bp, Homo sapiens
cctgggctcgagaga

SEQ ID NO: 965882 - DNA, 15 bp, Homo sapiens
ctgggctcgagagat

SEQ ID NO: 965883 - DNA, 15 bp, Homo sapiens
tgggctcgagagatc

SEQ ID NO: 965884 - DNA, 15 bp, Homo sapiens
gggctcgagagatct

SEQ ID NO: 965885 - DNA, 15 bp, Homo sapiens
ggctcgagagatctc

SEQ ID NO: 965886 - DNA, 15 bp, Homo sapiens
gctcgagagatctcc

SEQ ID NO: 965887 - DNA, 15 bp, Homo sapiens
ctcgagagatctccc

SEQ ID NO: 965888 - DNA, 15 bp, Homo sapiens
tcgagagatctccca

SEQ ID NO: 965889 - DNA, 15 bp, Homo sapiens
cgagagatctcccac

SEQ ID NO: 965890 - DNA, 15 bp, Homo sapiens
gagagatctcccacc

SEQ ID NO: 965891 - DNA, 15 bp, Homo sapiens
agagatctcccacct

SEQ ID NO: 965892 - DNA, 15 bp, Homo sapiens
gagatctcccacctc

SEQ ID NO: 965893 - DNA, 15 bp, Homo sapiens
agatctcccacctca

SEQ ID NO: 965894 - DNA, 15 bp, Homo sapiens
gatctcccacctcag

SEQ ID NO: 965895 - DNA, 15 bp, Homo sapiens
atctcccacctcagc

SEQ ID NO: 965896 - DNA, 15 bp, Homo sapiens
tctcccacctcagcc

SEQ ID NO: 965897 - DNA, 15 bp, Homo sapiens
ctcagcctcccaaat

SEQ ID NO: 965898 - DNA, 15 bp, Homo sapiens
tcagcctcccaaata

SEQ ID NO: 965899 - DNA, 15 bp, Homo sapiens
cagcctcccaaataa

SEQ ID NO: 965900 - DNA, 15 bp, Homo sapiens
agcctcccaaataac

SEQ ID NO: 965901 - DNA, 15 bp, Homo sapiens
gcctcccaaataact

SEQ ID NO: 965902 - DNA, 15 bp, Homo sapiens
cctcccaaataacta

SEQ ID NO: 965903 - DNA, 15 bp, Homo sapiens
ctcccaaataactag

SEQ ID NO: 965904 - DNA, 15 bp, Homo sapiens
tcccaaataactagg

SEQ ID NO: 965905 - DNA, 15 bp, Homo sapiens
cccaaataactaggt

SEQ ID NO: 965906 - DNA, 15 bp, Homo sapiens
ccaaataactaggtc

SEQ ID NO: 965907 - DNA, 15 bp, Homo sapiens
caaataactaggtct

SEQ ID NO: 965908 - DNA, 15 bp, Homo sapiens
aaataactaggtcta

SEQ ID NO: 965909 - DNA, 15 bp, Homo sapiens
aataactaggtctac

SEQ ID NO: 965910 - DNA, 15 bp, Homo sapiens
ataactaggtctaca

SEQ ID NO: 965911 - DNA, 15 bp, Homo sapiens
taactaggtctacag

SEQ ID NO: 965912 - DNA, 15 bp, Homo sapiens
aactaggtctacagg

SEQ ID NO: 965913 - DNA, 15 bp, Homo sapiens
actaggtctacaggc

SEQ ID NO: 965914 - DNA, 15 bp, Homo sapiens
ctaggtctacaggca

SEQ ID NO: 965915 - DNA, 15 bp, Homo sapiens
taggtctacaggcat

SEQ ID NO: 965916 - DNA, 15 bp, Homo sapiens
aggtctacaggcatg

SEQ ID NO: 965917 - DNA, 15 bp, Homo sapiens
ggtctacaggcatgt

SEQ ID NO: 965918 - DNA, 15 bp, Homo sapiens
gtctacaggcatgta

SEQ ID NO: 965919 - DNA, 15 bp, Homo sapiens
tctacaggcatgtag

SEQ ID NO: 965920 - DNA, 15 bp, Homo sapiens
ctacaggcatgtagt

SEQ ID NO: 965921 - DNA, 15 bp, Homo sapiens
tacaggcatgtagtt

SEQ ID NO: 965922 - DNA, 15 bp, Homo sapiens
acaggcatgtagttt

SEQ ID NO: 965923 - DNA, 15 bp, Homo sapiens
caggcatgtagtttt

SEQ ID NO: 965924 - DNA, 15 bp, Homo sapiens
aggcatgtagttttt

SEQ ID NO: 965925 - DNA, 15 bp, Homo sapiens
ggcatgtagtttttt

SEQ ID NO: 965926 - DNA, 15 bp, Homo sapiens
gcatgtagttttttg

SEQ ID NO: 965927 - DNA, 15 bp, Homo sapiens
catgtagttttttgt

SEQ ID NO: 965928 - DNA, 15 bp, Homo sapiens
atgtagttttttgta

SEQ ID NO: 965929 - DNA, 15 bp, Homo sapiens
tgtagttttttgtag

SEQ ID NO: 965930 - DNA, 15 bp, Homo sapiens
gtagttttttgtaga

SEQ ID NO: 965931 - DNA, 15 bp, Homo sapiens
tagttttttgtagag

SEQ ID NO: 965932 - DNA, 15 bp, Homo sapiens
agttttttgtagaga

SEQ ID NO: 965933 - DNA, 15 bp, Homo sapiens
gttttttgtagagac

SEQ ID NO: 965934 - DNA, 15 bp, Homo sapiens
ttttttgtagagaca

SEQ ID NO: 965935 - DNA, 15 bp, Homo sapiens
tttttgtagagacag

SEQ ID NO: 965936 - DNA, 15 bp, Homo sapiens
tgtagagacagggtt

SEQ ID NO: 965937 - DNA, 15 bp, Homo sapiens
agagacagggtttcg

SEQ ID NO: 965938 - DNA, 15 bp, Homo sapiens
gagacagggtttcgc

SEQ ID NO: 965939 - DNA, 15 bp, Homo sapiens
agacagggtttcgct

SEQ ID NO: 965940 - DNA, 15 bp, Homo sapiens
gacagggtttcgcta

SEQ ID NO: 965941 - DNA, 15 bp, Homo sapiens
acagggtttcgctat

SEQ ID NO: 965942 - DNA, 15 bp, Homo sapiens
cagggtttcgctatg

SEQ ID NO: 965943 - DNA, 15 bp, Homo sapiens
agggtttcgctatgt

SEQ ID NO: 965944 - DNA, 15 bp, Homo sapiens
gggtttcgctatgtt

SEQ ID NO: 965945 - DNA, 15 bp, Homo sapiens
ggtttcgctatgttg

SEQ ID NO: 965946 - DNA, 15 bp, Homo sapiens
gtttcgctatgttgc

SEQ ID NO: 965947 - DNA, 15 bp, Homo sapiens
tttcgctatgttgcc

SEQ ID NO: 965948 - DNA, 15 bp, Homo sapiens
ttcgctatgttgccc

SEQ ID NO: 965949 - DNA, 15 bp, Homo sapiens
tcgctatgttgccca

SEQ ID NO: 965950 - DNA, 15 bp, Homo sapiens
cgctatgttgcccag

SEQ ID NO: 965951 - DNA, 15 bp, Homo sapiens
gctatgttgcccagg

SEQ ID NO: 965952 - DNA, 15 bp, Homo sapiens
ggtcttgaactcctc

SEQ ID NO: 965953 - DNA, 15 bp, Homo sapiens
gtcttgaactcctca

SEQ ID NO: 965954 - DNA, 15 bp, Homo sapiens
tcttgaactcctcat

SEQ ID NO: 965955 - DNA, 15 bp, Homo sapiens
cttgaactcctcatc

SEQ ID NO: 965956 - DNA, 15 bp, Homo sapiens
ttgaactcctcatct

SEQ ID NO: 965957 - DNA, 15 bp, Homo sapiens
tgaactcctcatctc

SEQ ID NO: 965958 - DNA, 15 bp, Homo sapiens
gaactcctcatctca

SEQ ID NO: 965959 - DNA, 15 bp, Homo sapiens
aactcctcatctcaa

SEQ ID NO: 965960 - DNA, 15 bp, Homo sapiens
actcctcatctcaag

SEQ ID NO: 965961 - DNA, 15 bp, Homo sapiens
ctcctcatctcaagc

SEQ ID NO: 965962 - DNA, 15 bp, Homo sapiens
tcctcatctcaagca

SEQ ID NO: 965963 - DNA, 15 bp, Homo sapiens
cctcatctcaagcat

SEQ ID NO: 965964 - DNA, 15 bp, Homo sapiens
ctcatctcaagcatc

SEQ ID NO: 965965 - DNA, 15 bp, Homo sapiens
tcatctcaagcatcc

SEQ ID NO: 965966 - DNA, 15 bp, Homo sapiens
catctcaagcatcct

SEQ ID NO: 965967 - DNA, 15 bp, Homo sapiens
atctcaagcatcctg

SEQ ID NO: 965968 - DNA, 15 bp, Homo sapiens
tctcaagcatcctgc

SEQ ID NO: 965969 - DNA, 15 bp, Homo sapiens
ctcaagcatcctgcc

SEQ ID NO: 965970 - DNA, 15 bp, Homo sapiens
tcaagcatcctgccc

SEQ ID NO: 965971 - DNA, 15 bp, Homo sapiens
caagcatcctgcccg

SEQ ID NO: 965972 - DNA, 15 bp, Homo sapiens
aagcatcctgcccgc

SEQ ID NO: 965973 - DNA, 15 bp, Homo sapiens
agcatcctgcccgcc

SEQ ID NO: 965974 - DNA, 15 bp, Homo sapiens
gcatcctgcccgcct

SEQ ID NO: 965975 - DNA, 15 bp, Homo sapiens
catcctgcccgcctc

SEQ ID NO: 965976 - DNA, 15 bp, Homo sapiens
atcctgcccgcctct

SEQ ID NO: 965977 - DNA, 15 bp, Homo sapiens
tcctgcccgcctctg

SEQ ID NO: 965978 - DNA, 15 bp, Homo sapiens
cctgcccgcctctgt

SEQ ID NO: 965979 - DNA, 15 bp, Homo sapiens
ctgcccgcctctgtc

SEQ ID NO: 965980 - DNA, 15 bp, Homo sapiens
tgcccgcctctgtct

SEQ ID NO: 965981 - DNA, 15 bp, Homo sapiens
gcccgcctctgtctc

SEQ ID NO: 965982 - DNA, 15 bp, Homo sapiens
cccgcctctgtctcc

SEQ ID NO: 965983 - DNA, 15 bp, Homo sapiens
ccgcctctgtctccc

SEQ ID NO: 965984 - DNA, 15 bp, Homo sapiens
cgcctctgtctccca

SEQ ID NO: 965985 - DNA, 15 bp, Homo sapiens
gcctctgtctcccaa

SEQ ID NO: 965986 - DNA, 15 bp, Homo sapiens
cctctgtctcccaaa

SEQ ID NO: 965987 - DNA, 15 bp, Homo sapiens
ctctgtctcccaaag

SEQ ID NO: 965988 - DNA, 15 bp, Homo sapiens
tctgtctcccaaagt

SEQ ID NO: 965989 - DNA, 15 bp, Homo sapiens
ctgtctcccaaagtg

SEQ ID NO: 965990 - DNA, 15 bp, Homo sapiens
tgtctcccaaagtgc

SEQ ID NO: 965991 - DNA, 15 bp, Homo sapiens
gtctcccaaagtgct

SEQ ID NO: 965992 - DNA, 15 bp, Homo sapiens
tctcccaaagtgctg

SEQ ID NO: 965993 - DNA, 15 bp, Homo sapiens
caggcatgagccact

SEQ ID NO: 965994 - DNA, 15 bp, Homo sapiens
aggcatgagccacta

SEQ ID NO: 965995 - DNA, 15 bp, Homo sapiens
ggcatgagccactac

SEQ ID NO: 965996 - DNA, 15 bp, Homo sapiens
gcatgagccactacg

SEQ ID NO: 965997 - DNA, 15 bp, Homo sapiens
catgagccactacgc

SEQ ID NO: 965998 - DNA, 15 bp, Homo sapiens
atgagccactacgcc

SEQ ID NO: 965999 - DNA, 15 bp, Homo sapiens
tgagccactacgccc

SEQ ID NO: 966000 - DNA, 15 bp, Homo sapiens
gagccactacgccca

SEQ ID NO: 966001 - DNA, 15 bp, Homo sapiens
agccactacgcccag

SEQ ID NO: 966002 - DNA, 15 bp, Homo sapiens
gccactacgcccagc

SEQ ID NO: 966003 - DNA, 15 bp, Homo sapiens
ccactacgcccagcc

SEQ ID NO: 966004 - DNA, 15 bp, Homo sapiens
cactacgcccagcca

SEQ ID NO: 966005 - DNA, 15 bp, Homo sapiens
actacgcccagccat

SEQ ID NO: 966006 - DNA, 15 bp, Homo sapiens
ctacgcccagccatc

SEQ ID NO: 966007 - DNA, 15 bp, Homo sapiens
tacgcccagccatct

SEQ ID NO: 966008 - DNA, 15 bp, Homo sapiens
acgcccagccatctt

SEQ ID NO: 966009 - DNA, 15 bp, Homo sapiens
cgcccagccatctta

SEQ ID NO: 966010 - DNA, 15 bp, Homo sapiens
gcccagccatcttaa

SEQ ID NO: 966011 - DNA, 15 bp, Homo sapiens
cccagccatcttaac

SEQ ID NO: 966012 - DNA, 15 bp, Homo sapiens
ccagccatcttaacc

SEQ ID NO: 966013 - DNA, 15 bp, Homo sapiens
cagccatcttaacca

SEQ ID NO: 966014 - DNA, 15 bp, Homo sapiens
agccatcttaaccat

SEQ ID NO: 966015 - DNA, 15 bp, Homo sapiens
gccatcttaaccatt

SEQ ID NO: 966016 - DNA, 15 bp, Homo sapiens
ccatcttaaccattt

SEQ ID NO: 966017 - DNA, 15 bp, Homo sapiens
catcttaaccatttt

SEQ ID NO: 966018 - DNA, 15 bp, Homo sapiens
atcttaaccatttta

SEQ ID NO: 966019 - DNA, 15 bp, Homo sapiens
tcttaaccattttaa

SEQ ID NO: 966020 - DNA, 15 bp, Homo sapiens
cttaaccattttaaa

SEQ ID NO: 966021 - DNA, 15 bp, Homo sapiens
ttaaccattttaaaa

SEQ ID NO: 966022 - DNA, 15 bp, Homo sapiens
taaccattttaaaat

SEQ ID NO: 966023 - DNA, 15 bp, Homo sapiens
aaccattttaaaatg

SEQ ID NO: 966024 - DNA, 15 bp, Homo sapiens
accattttaaaatgt

SEQ ID NO: 966025 - DNA, 15 bp, Homo sapiens
ccattttaaaatgta

SEQ ID NO: 966026 - DNA, 15 bp, Homo sapiens
cattttaaaatgtac

SEQ ID NO: 966027 - DNA, 15 bp, Homo sapiens
ttttaaaatgtacac

SEQ ID NO: 966028 - DNA, 15 bp, Homo sapiens
tttaaaatgtacact

SEQ ID NO: 966029 - DNA, 15 bp, Homo sapiens
ttaaaatgtacactt

SEQ ID NO: 966030 - DNA, 15 bp, Homo sapiens
taaaatgtacacttc

SEQ ID NO: 966031 - DNA, 15 bp, Homo sapiens
aaaatgtacacttca

SEQ ID NO: 966032 - DNA, 15 bp, Homo sapiens
aaatgtacacttcag

SEQ ID NO: 966033 - DNA, 15 bp, Homo sapiens
aatgtacacttcagt

SEQ ID NO: 966034 - DNA, 15 bp, Homo sapiens
atgtacacttcagtg

SEQ ID NO: 966035 - DNA, 15 bp, Homo sapiens
tgtacacttcagtga

SEQ ID NO: 966036 - DNA, 15 bp, Homo sapiens
gtacacttcagtgat

SEQ ID NO: 966037 - DNA, 15 bp, Homo sapiens
tacacttcagtgata

SEQ ID NO: 966038 - DNA, 15 bp, Homo sapiens
acacttcagtgatac

SEQ ID NO: 966039 - DNA, 15 bp, Homo sapiens
cacttcagtgatact

SEQ ID NO: 966040 - DNA, 15 bp, Homo sapiens
acttcagtgatacta

SEQ ID NO: 966041 - DNA, 15 bp, Homo sapiens
cttcagtgatactaa

SEQ ID NO: 966042 - DNA, 15 bp, Homo sapiens
ttcagtgatactaag

SEQ ID NO: 966043 - DNA, 15 bp, Homo sapiens
tcagtgatactaagt

SEQ ID NO: 966044 - DNA, 15 bp, Homo sapiens
cagtgatactaagta

SEQ ID NO: 966045 - DNA, 15 bp, Homo sapiens
agtgatactaagtaa

SEQ ID NO: 966046 - DNA, 15 bp, Homo sapiens
gtgatactaagtaaa

SEQ ID NO: 966047 - DNA, 15 bp, Homo sapiens
tgatactaagtaaaa

SEQ ID NO: 966048 - DNA, 15 bp, Homo sapiens
gatactaagtaaaat

SEQ ID NO: 966049 - DNA, 15 bp, Homo sapiens
atactaagtaaaatt

SEQ ID NO: 966050 - DNA, 15 bp, Homo sapiens
tactaagtaaaattc

SEQ ID NO: 966051 - DNA, 15 bp, Homo sapiens
actaagtaaaattca

SEQ ID NO: 966052 - DNA, 15 bp, Homo sapiens
ctaagtaaaattcac

SEQ ID NO: 966053 - DNA, 15 bp, Homo sapiens
taagtaaaattcaca

SEQ ID NO: 966054 - DNA, 15 bp, Homo sapiens
aagtaaaattcacat

SEQ ID NO: 966055 - DNA, 15 bp, Homo sapiens
agtaaaattcacatt

SEQ ID NO: 966056 - DNA, 15 bp, Homo sapiens
gtaaaattcacattg

SEQ ID NO: 966057 - DNA, 15 bp, Homo sapiens
taaaattcacattgt

SEQ ID NO: 966058 - DNA, 15 bp, Homo sapiens
aaaattcacattgtt

SEQ ID NO: 966059 - DNA, 15 bp, Homo sapiens
aaattcacattgttg

SEQ ID NO: 966060 - DNA, 15 bp, Homo sapiens
aattcacattgttgt

SEQ ID NO: 966061 - DNA, 15 bp, Homo sapiens
attcacattgttgtg

SEQ ID NO: 966062 - DNA, 15 bp, Homo sapiens
ttcacattgttgtgc

SEQ ID NO: 966063 - DNA, 15 bp, Homo sapiens
tcacattgttgtgca

SEQ ID NO: 966064 - DNA, 15 bp, Homo sapiens
cacattgttgtgcac

SEQ ID NO: 966065 - DNA, 15 bp, Homo sapiens
acattgttgtgcacc

SEQ ID NO: 966066 - DNA, 15 bp, Homo sapiens
cattgttgtgcaccc

SEQ ID NO: 966067 - DNA, 15 bp, Homo sapiens
attgttgtgcaccct

SEQ ID NO: 966068 - DNA, 15 bp, Homo sapiens
ttgttgtgcaccctt

SEQ ID NO: 966069 - DNA, 15 bp, Homo sapiens
tgttgtgcaccctta

SEQ ID NO: 966070 - DNA, 15 bp, Homo sapiens
gttgtgcacccttag

SEQ ID NO: 966071 - DNA, 15 bp, Homo sapiens
ttgtgcacccttagc

SEQ ID NO: 966072 - DNA, 15 bp, Homo sapiens
tgtgcacccttagcc

SEQ ID NO: 966073 - DNA, 15 bp, Homo sapiens
gtgcacccttagcca

SEQ ID NO: 966074 - DNA, 15 bp, Homo sapiens
tgcacccttagccat

SEQ ID NO: 966075 - DNA, 15 bp, Homo sapiens
gcacccttagccatt

SEQ ID NO: 966076 - DNA, 15 bp, Homo sapiens
cacccttagccattt

SEQ ID NO: 966077 - DNA, 15 bp, Homo sapiens
acccttagccatttt

SEQ ID NO: 966078 - DNA, 15 bp, Homo sapiens
cccttagccattttg

SEQ ID NO: 966079 - DNA, 15 bp, Homo sapiens
ccttagccattttga

SEQ ID NO: 966080 - DNA, 15 bp, Homo sapiens
cttagccattttgat

SEQ ID NO: 966081 - DNA, 15 bp, Homo sapiens
ttagccattttgatg

SEQ ID NO: 966082 - DNA, 15 bp, Homo sapiens
tagccattttgatga

SEQ ID NO: 966083 - DNA, 15 bp, Homo sapiens
agccattttgatgaa

SEQ ID NO: 966084 - DNA, 15 bp, Homo sapiens
gccattttgatgaag

SEQ ID NO: 966085 - DNA, 15 bp, Homo sapiens
ccattttgatgaaga

SEQ ID NO: 966086 - DNA, 15 bp, Homo sapiens
cattttgatgaagaa

SEQ ID NO: 966087 - DNA, 15 bp, Homo sapiens
attttgatgaagaat

SEQ ID NO: 966088 - DNA, 15 bp, Homo sapiens
ttttgatgaagaatt

SEQ ID NO: 966089 - DNA, 15 bp, Homo sapiens
tttgatgaagaattt

SEQ ID NO: 966090 - DNA, 15 bp, Homo sapiens
ttgatgaagaattta

SEQ ID NO: 966091 - DNA, 15 bp, Homo sapiens
tgatgaagaatttaa

SEQ ID NO: 966092 - DNA, 15 bp, Homo sapiens
gatgaagaatttaag

SEQ ID NO: 966093 - DNA, 15 bp, Homo sapiens
atgaagaatttaaga

SEQ ID NO: 966094 - DNA, 15 bp, Homo sapiens
tgaagaatttaagac

SEQ ID NO: 966095 - DNA, 15 bp, Homo sapiens
gaagaatttaagact

SEQ ID NO: 966096 - DNA, 15 bp, Homo sapiens
aagaatttaagactc

SEQ ID NO: 966097 - DNA, 15 bp, Homo sapiens
agaatttaagactca

SEQ ID NO: 966098 - DNA, 15 bp, Homo sapiens
gaatttaagactcat

SEQ ID NO: 966099 - DNA, 15 bp, Homo sapiens
aatttaagactcatt

SEQ ID NO: 966100 - DNA, 15 bp, Homo sapiens
atttaagactcattt

SEQ ID NO: 966101 - DNA, 15 bp, Homo sapiens
tttaagactcatttt

SEQ ID NO: 966102 - DNA, 15 bp, Homo sapiens
ttaagactcattttt

SEQ ID NO: 966103 - DNA, 15 bp, Homo sapiens
taagactcatttttg

SEQ ID NO: 966104 - DNA, 15 bp, Homo sapiens
aagactcatttttgt

SEQ ID NO: 966105 - DNA, 15 bp, Homo sapiens
agactcatttttgta

SEQ ID NO: 966106 - DNA, 15 bp, Homo sapiens
gactcatttttgtat

SEQ ID NO: 966107 - DNA, 15 bp, Homo sapiens
actcatttttgtatc

SEQ ID NO: 966108 - DNA, 15 bp, Homo sapiens
ctcatttttgtatca

SEQ ID NO: 966109 - DNA, 15 bp, Homo sapiens
tcatttttgtatcag

SEQ ID NO: 966110 - DNA, 15 bp, Homo sapiens
catttttgtatcagt

SEQ ID NO: 966111 - DNA, 15 bp, Homo sapiens
atttttgtatcagta

SEQ ID NO: 966112 - DNA, 15 bp, Homo sapiens
tttttgtatcagtag

SEQ ID NO: 966113 - DNA, 15 bp, Homo sapiens
ttttgtatcagtaga

SEQ ID NO: 966114 - DNA, 15 bp, Homo sapiens
tttgtatcagtagat

SEQ ID NO: 966115 - DNA, 15 bp, Homo sapiens
ttgtatcagtagatt

SEQ ID NO: 966116 - DNA, 15 bp, Homo sapiens
tgtatcagtagatta

SEQ ID NO: 966117 - DNA, 15 bp, Homo sapiens
gtatcagtagattat

SEQ ID NO: 966118 - DNA, 15 bp, Homo sapiens
tatcagtagattatg

SEQ ID NO: 966119 - DNA, 15 bp, Homo sapiens
atcagtagattatgg

SEQ ID NO: 966120 - DNA, 15 bp, Homo sapiens
tcagtagattatgga

SEQ ID NO: 966121 - DNA, 15 bp, Homo sapiens
cagtagattatggag

SEQ ID NO: 966122 - DNA, 15 bp, Homo sapiens
agtagattatggagg

SEQ ID NO: 966123 - DNA, 15 bp, Homo sapiens
gtagattatggagga

SEQ ID NO: 966124 - DNA, 15 bp, Homo sapiens
tagattatggaggag

SEQ ID NO: 966125 - DNA, 15 bp, Homo sapiens
agattatggaggagc

SEQ ID NO: 966126 - DNA, 15 bp, Homo sapiens
gattatggaggagca

SEQ ID NO: 966127 - DNA, 15 bp, Homo sapiens
attatggaggagcat

SEQ ID NO: 966128 - DNA, 15 bp, Homo sapiens
ttatggaggagcata

SEQ ID NO: 966129 - DNA, 15 bp, Homo sapiens
tatggaggagcataa

SEQ ID NO: 966130 - DNA, 15 bp, Homo sapiens
atggaggagcataat

SEQ ID NO: 966131 - DNA, 15 bp, Homo sapiens
tggaggagcataata

SEQ ID NO: 966132 - DNA, 15 bp, Homo sapiens
ggaggagcataatag

SEQ ID NO: 966133 - DNA, 15 bp, Homo sapiens
gaggagcataatagt

SEQ ID NO: 966134 - DNA, 15 bp, Homo sapiens
aggagcataatagtc

SEQ ID NO: 966135 - DNA, 15 bp, Homo sapiens
ggagcataatagtcc

SEQ ID NO: 966136 - DNA, 15 bp, Homo sapiens
gagcataatagtcct

SEQ ID NO: 966137 - DNA, 15 bp, Homo sapiens
agcataatagtcctt

SEQ ID NO: 966138 - DNA, 15 bp, Homo sapiens
gcataatagtccttc

SEQ ID NO: 966139 - DNA, 15 bp, Homo sapiens
cataatagtccttca

SEQ ID NO: 966140 - DNA, 15 bp, Homo sapiens
ataatagtccttcac

SEQ ID NO: 966141 - DNA, 15 bp, Homo sapiens
taatagtccttcaca

SEQ ID NO: 966142 - DNA, 15 bp, Homo sapiens
aatagtccttcacag

SEQ ID NO: 966143 - DNA, 15 bp, Homo sapiens
atagtccttcacaga

SEQ ID NO: 966144 - DNA, 15 bp, Homo sapiens
tagtccttcacagaa

SEQ ID NO: 966145 - DNA, 15 bp, Homo sapiens
agtccttcacagaaa

SEQ ID NO: 966146 - DNA, 15 bp, Homo sapiens
gtccttcacagaaag

SEQ ID NO: 966147 - DNA, 15 bp, Homo sapiens
tccttcacagaaaga

SEQ ID NO: 966148 - DNA, 15 bp, Homo sapiens
ccttcacagaaagaa

SEQ ID NO: 966149 - DNA, 15 bp, Homo sapiens
cttcacagaaagaag

SEQ ID NO: 966150 - DNA, 15 bp, Homo sapiens
ttcacagaaagaagg

SEQ ID NO: 966151 - DNA, 15 bp, Homo sapiens
tcacagaaagaagga

SEQ ID NO: 966152 - DNA, 15 bp, Homo sapiens
cacagaaagaaggaa

SEQ ID NO: 966153 - DNA, 15 bp, Homo sapiens
acagaaagaaggaaa

SEQ ID NO: 966154 - DNA, 15 bp, Homo sapiens
cagaaagaaggaaag

SEQ ID NO: 966155 - DNA, 15 bp, Homo sapiens
agaaagaaggaaaga

SEQ ID NO: 966156 - DNA, 15 bp, Homo sapiens
gaaagaaggaaagag

SEQ ID NO: 966157 - DNA, 15 bp, Homo sapiens
aaagaaggaaagagc

SEQ ID NO: 966158 - DNA, 15 bp, Homo sapiens
aagaaggaaagagca

SEQ ID NO: 966159 - DNA, 15 bp, Homo sapiens
agaaggaaagagcaa

SEQ ID NO: 966160 - DNA, 15 bp, Homo sapiens
gaaggaaagagcaac

SEQ ID NO: 966161 - DNA, 15 bp, Homo sapiens
aaggaaagagcaacc

SEQ ID NO: 966162 - DNA, 15 bp, Homo sapiens
aggaaagagcaacct

SEQ ID NO: 966163 - DNA, 15 bp, Homo sapiens
ggaaagagcaacctg

SEQ ID NO: 966164 - DNA, 15 bp, Homo sapiens
gaaagagcaacctga

SEQ ID NO: 966165 - DNA, 15 bp, Homo sapiens
aaagagcaacctgag

SEQ ID NO: 966166 - DNA, 15 bp, Homo sapiens
aagagcaacctgaga

SEQ ID NO: 966167 - DNA, 15 bp, Homo sapiens
agagcaacctgagag

SEQ ID NO: 966168 - DNA, 15 bp, Homo sapiens
gagcaacctgagaga

SEQ ID NO: 966169 - DNA, 15 bp, Homo sapiens
agcaacctgagagac

SEQ ID NO: 966170 - DNA, 15 bp, Homo sapiens
gcaacctgagagaca

SEQ ID NO: 966171 - DNA, 15 bp, Homo sapiens
caacctgagagacag

SEQ ID NO: 966172 - DNA, 15 bp, Homo sapiens
aacctgagagacagc

SEQ ID NO: 966173 - DNA, 15 bp, Homo sapiens
acctgagagacagct

SEQ ID NO: 966174 - DNA, 15 bp, Homo sapiens
cctgagagacagctt

SEQ ID NO: 966175 - DNA, 15 bp, Homo sapiens
ctgagagacagcttt

SEQ ID NO: 966176 - DNA, 15 bp, Homo sapiens
tgagagacagctttt

SEQ ID NO: 966177 - DNA, 15 bp, Homo sapiens
gagagacagctttta

SEQ ID NO: 966178 - DNA, 15 bp, Homo sapiens
agagacagcttttac

SEQ ID NO: 966179 - DNA, 15 bp, Homo sapiens
gagacagcttttacc

SEQ ID NO: 966180 - DNA, 15 bp, Homo sapiens
agacagcttttacct

SEQ ID NO: 966181 - DNA, 15 bp, Homo sapiens
gacagcttttacctt

SEQ ID NO: 966182 - DNA, 15 bp, Homo sapiens
acagcttttaccttc

SEQ ID NO: 966183 - DNA, 15 bp, Homo sapiens
cagcttttaccttcc

SEQ ID NO: 966184 - DNA, 15 bp, Homo sapiens
agcttttaccttccc

SEQ ID NO: 966185 - DNA, 15 bp, Homo sapiens
gcttttaccttccct

SEQ ID NO: 966186 - DNA, 15 bp, Homo sapiens
cttttaccttccctc

SEQ ID NO: 966187 - DNA, 15 bp, Homo sapiens
ttttaccttccctca

SEQ ID NO: 966188 - DNA, 15 bp, Homo sapiens
tttaccttccctcac

SEQ ID NO: 966189 - DNA, 15 bp, Homo sapiens
ttaccttccctcaca

SEQ ID NO: 966190 - DNA, 15 bp, Homo sapiens
taccttccctcacac

SEQ ID NO: 966191 - DNA, 15 bp, Homo sapiens
accttccctcacact

SEQ ID NO: 966192 - DNA, 15 bp, Homo sapiens
ccttccctcacactt

SEQ ID NO: 966193 - DNA, 15 bp, Homo sapiens
cttccctcacactta

SEQ ID NO: 966194 - DNA, 15 bp, Homo sapiens
ttccctcacacttag

SEQ ID NO: 966195 - DNA, 15 bp, Homo sapiens
tccctcacacttagg

SEQ ID NO: 966196 - DNA, 15 bp, Homo sapiens
ccctcacacttaggg

SEQ ID NO: 966197 - DNA, 15 bp, Homo sapiens
cctcacacttaggga

SEQ ID NO: 966198 - DNA, 15 bp, Homo sapiens
ctcacacttagggag

SEQ ID NO: 966199 - DNA, 15 bp, Homo sapiens
tcacacttagggaga

SEQ ID NO: 966200 - DNA, 15 bp, Homo sapiens
cacacttagggagag

SEQ ID NO: 966201 - DNA, 15 bp, Homo sapiens
acacttagggagagg

SEQ ID NO: 966202 - DNA, 15 bp, Homo sapiens
cacttagggagaggt

SEQ ID NO: 966203 - DNA, 15 bp, Homo sapiens
acttagggagaggtt

SEQ ID NO: 966204 - DNA, 15 bp, Homo sapiens
cttagggagaggttt

SEQ ID NO: 966205 - DNA, 15 bp, Homo sapiens
ttagggagaggtttt

SEQ ID NO: 966206 - DNA, 15 bp, Homo sapiens
tagggagaggttttt

SEQ ID NO: 966207 - DNA, 15 bp, Homo sapiens
agggagaggtttttg

SEQ ID NO: 966208 - DNA, 15 bp, Homo sapiens
gggagaggtttttga

SEQ ID NO: 966209 - DNA, 15 bp, Homo sapiens
ggagaggtttttgac

SEQ ID NO: 966210 - DNA, 15 bp, Homo sapiens
gagaggtttttgaca

SEQ ID NO: 966211 - DNA, 15 bp, Homo sapiens
agaggtttttgacag

SEQ ID NO: 966212 - DNA, 15 bp, Homo sapiens
gaggtttttgacagc

SEQ ID NO: 966213 - DNA, 15 bp, Homo sapiens
aggtttttgacagct

SEQ ID NO: 966214 - DNA, 15 bp, Homo sapiens
ggtttttgacagcta

SEQ ID NO: 966215 - DNA, 15 bp, Homo sapiens
gtttttgacagctat

SEQ ID NO: 966216 - DNA, 15 bp, Homo sapiens
tttttgacagctatg

SEQ ID NO: 966217 - DNA, 15 bp, Homo sapiens
ttttgacagctatga

SEQ ID NO: 966218 - DNA, 15 bp, Homo sapiens
tttgacagctatgag

SEQ ID NO: 966219 - DNA, 15 bp, Homo sapiens
ttgacagctatgagc

SEQ ID NO: 966220 - DNA, 15 bp, Homo sapiens
tgacagctatgagca

SEQ ID NO: 966221 - DNA, 15 bp, Homo sapiens
gacagctatgagcac

SEQ ID NO: 966222 - DNA, 15 bp, Homo sapiens
acagctatgagcact

SEQ ID NO: 966223 - DNA, 15 bp, Homo sapiens
cagctatgagcactg

SEQ ID NO: 966224 - DNA, 15 bp, Homo sapiens
agctatgagcactgt

SEQ ID NO: 966225 - DNA, 15 bp, Homo sapiens
gctatgagcactgta

SEQ ID NO: 966226 - DNA, 15 bp, Homo sapiens
ctatgagcactgtac

SEQ ID NO: 966227 - DNA, 15 bp, Homo sapiens
tatgagcactgtacc

SEQ ID NO: 966228 - DNA, 15 bp, Homo sapiens
atgagcactgtacct

SEQ ID NO: 966229 - DNA, 15 bp, Homo sapiens
tgagcactgtacctg

SEQ ID NO: 966230 - DNA, 15 bp, Homo sapiens
gagcactgtacctgg

SEQ ID NO: 966231 - DNA, 15 bp, Homo sapiens
agcactgtacctggg

SEQ ID NO: 966232 - DNA, 15 bp, Homo sapiens
gcactgtacctggga

SEQ ID NO: 966233 - DNA, 15 bp, Homo sapiens
cactgtacctgggaa

SEQ ID NO: 966234 - DNA, 15 bp, Homo sapiens
actgtacctgggaaa

SEQ ID NO: 966235 - DNA, 15 bp, Homo sapiens
ctgtacctgggaaaa

SEQ ID NO: 966236 - DNA, 15 bp, Homo sapiens
tgtacctgggaaaag

SEQ ID NO: 966237 - DNA, 15 bp, Homo sapiens
gtacctgggaaaaga
